United States Patent Application Publication US 2017/0009304 A1 - sequence listing, part 8

SEQ ID NO: 150779 - DNA, 100 bp, Homo sapiens
tctgcagctagtgtgtcaactcagcgtttctcctctcgtccctgcctagatattatcctactgaagatgtgcctcgaaagctgttgagccacggcaaaaa

SEQ ID NO: 150780 - DNA, 100 bp, Homo sapiens
ccgttccccacggaggccatgggcgacccagcccccgcccgcagcctggacgacatcgacctgtccgccctgcgggtgctggagaaaatttggagaatac

SEQ ID NO: 150781 - DNA, 100 bp, Homo sapiens
cgaccagaggcgcgggggtggaaaggtactaggttttgacaagcttgcatcatgcgtgagtataagctagtcgttcttggctcaggaggcgttggaaagt

SEQ ID NO: 150782 - DNA, 101 bp, Homo sapiens
ctgtgccgcaccgaggcgagcaggagcagggaacagcatcagaggctccttgaaatgctagatacagagaaggaactgttaaaagaaaaaataaaggaagc

SEQ ID NO: 150783 - DNA, 100 bp, Homo sapiens
ctacttaataatgacaatctcctcagggaaggggcagcacaggggagctgatcaccttctattactattggaagaagacccccgaagcagccagctcccg

SEQ ID NO: 150784 - DNA, 102 bp, Homo sapiens
tggaatatgaagagacacagtatggtagccacacccccagaatacagattctgttcatcttgctctgaaattaaataattctgaactcatggggagaaaact

SEQ ID NO: 150785 - DNA, 90 bp, Homo sapiens
ccatccagttatacagtgtaaaatcagagcagcttttcgatcctttggtacagaagacagaccgacagatcgtccaataccacctcgaga

SEQ ID NO: 150786 - DNA, 100 bp, Homo sapiens
cttatgagctgctattgaacacggcagggagattcttcaagcaatcactatgtcaacagacacaggtgtttcccttccttcatatgaggaagatcaggga

SEQ ID NO: 150787 - DNA, 100 bp, Homo sapiens
cagacgttcctgtaaaagaggacaccaacagtgtggtggagaaagcaatggatgaaatcaaatcccaaggtaagaatgattgatgttggctgatattgga

SEQ ID NO: 150788 - DNA, 75 bp, Homo sapiens
tggaacttcgtcgcgctgcaacccccggctcggacctaatctgggagcctgcaagtgacaacagcctttgcggtc

SEQ ID NO: 150789 - DNA, 76 bp, Homo sapiens
tagcaagtgctgcagctgacaaaattgttggctatacagtgcgctttgatgatgtcacctcagaagacaccaggat

SEQ ID NO: 150790 - DNA, 101 bp, Homo sapiens
ccttcaatactacctttatttccaccataggaatctcgtaggctgtatcagtttcattatgtgaactggccagaccatgatgttccttcatcatttgattc

SEQ ID NO: 150791 - DNA, 100 bp, Homo sapiens
caattgcagaaatacatcagagagctggagcaagcaaatgacgacctggaaagagccaagcgaaagcgtggatacccatcaacgaagttttgatattgga

SEQ ID NO: 150792 - DNA, 74 bp, Homo sapiens
caagtatccgccagtcaataggaagtacgagtgtcttccccagggaggtcctgaactacacagctgagaacatc

SEQ ID NO: 150793 - DNA, 75 bp, Homo sapiens
tccactgatggccggggtggtggtgactatctgaagaagcctgggggcggtgcagagcccagctgcccccagggc

SEQ ID NO: 150794 - DNA, 74 bp, Homo sapiens
cttaatttccctactccaccatcatcaacaaagccatcactggtgcaagctatatttaacggagatcctgatga

SEQ ID NO: 150795 - DNA, 90 bp, Homo sapiens
aggcggcacagtatgaccggcagatccgcctgtggggactggaggcccagaaacggattcagtccccgtgggggtggctttggcggccga

SEQ ID NO: 150796 - DNA, 100 bp, Homo sapiens
catgtggtcgtcattcactgcagggaatgtatcctgtcaggtataatgtcagtgaatggcaagaaagttcttcatatggatcgaaacccttactacggag

SEQ ID NO: 150797 - DNA, 75 bp, Homo sapiens
cccgttagaactcgcgtttccacttcagagatctgctacgtcaaaagctacctcctcccggataagcagagcaag

SEQ ID NO: 150798 - DNA, 83 bp, Homo sapiens
ctcgggtcgttgtggtgcgctgtcttcccgcttgcgtcagggacctgcccgactcagtgactctggtggagcaacgttcaggt

SEQ ID NO: 150799 - DNA, 75 bp, Homo sapiens
caagcacatcccggggagccccttcacagccaagatcacagggtggagagattcaaccagttagcgtgaaagttg

SEQ ID NO: 150800 - DNA, 100 bp, Homo sapiens
cgccgcggaccttcagctgccgcggtcgctccgagcggcgggccgcagagttaagatgtcccgtgaagtccaggtgtttgagataacagagaacagcgcc

SEQ ID NO: 150801 - DNA, 100 bp, Homo sapiens
tgttgccgcctctcggtttcgctctcgctcgctgcgctcctagaaggggcggccgcctccaggtgggctgggggccctgactggacctggcctggccagc

SEQ ID NO: 150802 - DNA, 50 bp, Homo sapiens
tttctggcctggaggctatccagcgtgcagctctgtcatttccactctgc

SEQ ID NO: 150803 - DNA, 100 bp, Homo sapiens
ctggagaactacatcaccgctctgcaggctgttcctcctcggggtcccgggattcttgagctgtgcccagctgacgagcttttgaagatggcacaataac

SEQ ID NO: 150804 - DNA, 89 bp, Homo sapiens
cgatgatcgtgtgtcggatgaggagaagatgaggacggggacttggttgccttttccagtgacgaggaattgacaatggccatgtccta

SEQ ID NO: 150805 - DNA, 82 bp, Homo sapiens
gttcttccaagaaaccaacattcccaacagccaccaccaccaccagatggctcttgtcaggatggtgaagctgttcatcgga

SEQ ID NO: 150806 - DNA, 137 bp, Homo sapiens
tggaggagggaatgatattcagtggtgtttttctcaggtgaaaggagcagtagatgatgatgtagcagaagcacccgacagctacaaagtgcaagataagaaaaatgcctccagccgccctgcctctgcaatttcag

SEQ ID NO: 150807 - DNA, 99 bp, Homo sapiens
tctggggagcgcctcgtcgacatgagtgatgtggaggaaaacaacttcgagggcagagaaggatgataaagactatgctttaaaacaaatagaaggaac

SEQ ID NO: 150808 - DNA, 50 bp, Homo sapiens
ggccactcagagtcgcccgagaaaatgtacctgaaacatgggagcccagt

SEQ ID NO: 150809 - DNA, 98 bp, Homo sapiens
gcggagacggcggaagcggagagcaacagcgcgccgaggcacagagctttggcctgctggatcccaaactctgctacctgctggatggaatcctcttc

SEQ ID NO: 150810 - DNA, 97 bp, Homo sapiens
tggcggcggcgcttgggctctgagtggaaacaaaatgtcagtcagtgtgcatgagaaccgcaagtccagggccagcagcggctccattaacatctat

SEQ ID NO: 150811 - DNA, 75 bp, Homo sapiens
atggagccttcctgtggcaggagagacaacaaagcgctattatcctaaggaagagagagaaaatccttcaaaacg

SEQ ID NO: 150812 - DNA, 100 bp, Homo sapiens
ataggagcaaccctgtaaaaccagccttagactatttttcaaacagacaccatgtaaaattgaacctagtataaaccacatcctaagcaccagaaagcct

SEQ ID NO: 150813 - DNA, 100 bp, Homo sapiens
ggccaggcgattcggtgaagcgattcctgcaggcgttggttcccctctttgacctggtgtgagttcttgatacgaatgaaaggccaagagtttgttgatg

SEQ ID NO: 150814 - DNA, 92 bp, Homo sapiens
cgtcgtggaagcaggactgcgccgcgtcttcctcaagggcgtgatggtgggcatgggtcagaaggattcctatgtgggcgacgaggcccaga

SEQ ID NO: 150815 - DNA, 114 bp, Homo sapiens
tcgggtgcaaggcggtgcggtgtgcctcgggtcggtgcaccgtccgggattttatccaccggcactgccaagatcagccgtttacctctgcaagagaacaatgcaaaacaaggc

SEQ ID NO: 150816 - DNA, 82 bp, Homo sapiens
acttctgctggaaggacaggacgtccgggaacgtggaagacgttttggttatgaacaggattcggattcacgtcttgccaac

SEQ ID NO: 150817 - DNA, 50 bp, Homo sapiens
ggaacacctcgccaaagcagagaaatagtcatttcttcagatagctcccc

SEQ ID NO: 150818 - DNA, 90 bp, Homo sapiens
cttcgggaagcagggattccagtgccaagctgaaaatgtgtgtctgacatgcaagctcagtggggcagagacccgtggattgctgtgccc

SEQ ID NO: 150819 - DNA, 50 bp, Homo sapiens
ctgagacccggacagtggcagtgaaacagatctcaggaaacaggctcgac

SEQ ID NO: 150820 - DNA, 90 bp, Homo sapiens
gtgtagggacattggggttgatgaaacttacctctttgaatctgaaggtttagctgagatgagtgaactgagtgtggcacagaaaccaga

SEQ ID NO: 150821 - DNA, 98 bp, Homo sapiens
ccagatgggtttgtatggacaggcttgtccatctgtaacttcattaagagattggaaaggtgtatgagcattgtgacatcgatgactgctggtgtctc

SEQ ID NO: 150822 - DNA, 98 bp, Homo sapiens
tcgtcacaaatcacactatcgtaatcgagaacactttgctactatacggacagcatcactggagctcttgtccctggcaaagcgaaagcgcagtgact

SEQ ID NO: 150823 - DNA, 50 bp, Homo sapiens
tgacaacgacagtgatttttctgaatgtgcaagtaaagatgttctggtga

SEQ ID NO: 150824 - DNA, 100 bp, Homo sapiens
acgctttttgcatacaagcaggaaaatgagatgttatccagaaacttggggactgtggcagccatggagccagtgtagtgccacatgtggggatggtgtc

SEQ ID NO: 150825 - DNA, 98 bp, Homo sapiens
tgattaaagtaattgaggattttccagcaaagcatacacaagctgagggagaatgtctttcaagagcatcagacccttaaggagaaggaacttgaaac

SEQ ID NO: 150826 - DNA, 100 bp, Homo sapiens
cagatacccgcggtgcaccgcctgctgggagcgccgctcaagttgcagagtgggcaggatcttaagacccgataggtgcagaacccatctggacacggag

SEQ ID NO: 150827 - DNA, 50 bp, Homo sapiens
gatgtggtctacagaccaggagctgaataccactagaaacatacctgtaa

SEQ ID NO: 150828 - DNA, 89 bp, Homo sapiens
caccgatttgcgaagcttctatgcagttctaactgtacctgctggtaaggttgcagaggagactgtaattaaagaggaagaagaagaga

SEQ ID NO: 150829 - DNA, 51 bp, Homo sapiens
cctaaacatgtggaatcccaatgccgctactgtttcagctcattattgact

SEQ ID NO: 150830 - DNA, 126 bp, Homo sapiens
cttgtggccccggattgcatccaatgctggcagcattgcatgattctccagtatatttggcattctctccagcaggtgactgggcatgaccactacaatgctgatctgaaaccgatcgatgggttc

SEQ ID NO: 150831 - DNA, 75 bp, Homo sapiens
ttgaagccacacaaagaacaaattgcagttgtttgaggtcgcctggtcggcgctctggatgcagtgttggattcc

SEQ ID NO: 150832 - DNA, 115 bp, Homo sapiens
gcacggtgggcctgctcacatacccagtactccaggcagccgacattctgttgtacaagaggatgtttcctgccatgagagtgaaaatcactggcctagatccacatcagcagta

SEQ ID NO: 150833 - DNA, 100 bp, Homo sapiens
cgcgaattactctaagcgcggctctcagaagggtgcaagaagaatcagtggagccggcatcatggattccttcaaagtagtgctggaggggccagcacct

SEQ ID NO: 150834 - DNA, 100 bp, Homo sapiens
agcagaagcaaacagggtgcagatgatggctttgttacggtgagcctaaagccagacaaagagaagaggccccctgagccccccggacctccaccgccgc

SEQ ID NO: 150835 - DNA, 98 bp, Homo sapiens
gaataaagctcgagccgaaggacatatggagcagcagccaagctggacagatgacctgcctctctgccacctctctggggttggctcagcctccaacc

SEQ ID NO: 150836 - DNA, 108 bp, Homo sapiens
cccttcattattgtggcaggtttttggcagtgccactggcctagctcgatattatccaggtgactctgacatcattagaagcatgccagaacagactggtgaaaagta

SEQ ID NO: 150837 - DNA, 75 bp, Homo sapiens
ttctccctgcctggacccctactattgcaacaagttctttcgggaggaccattgcctcaagggcatgaatttgaa

SEQ ID NO: 150838 - DNA, 87 bp, Homo sapiens
ccgcaggccgctgatgccgcccgcggcgaggtggcccggaccgcagtgccccaagagagggtaacaagatgctcaactatagtgctc

SEQ ID NO: 150839 - DNA, 75 bp, Homo sapiens
cagaaagcaagtgaatacgagtcagaaggaactgtggctgcaccatctgtcttcatcttcccgccatctgatgag

SEQ ID NO: 150840 - DNA, 88 bp, Homo sapiens
ggatccgtcattggattggctgcggggcccacctctctaagcctatggaaaagcttctggggccaaggcctaatgagtcagattctga

SEQ ID NO: 150841 - DNA, 98 bp, Homo sapiens
aactatgtttggatgttggatctacactttctcaagcactgtgatcttcaaataatggacagcaaattatggatgaacctatgggagaggaggagatt

SEQ ID NO: 150842 - DNA, 83 bp, Homo sapiens
ggaagaagcgccgcgcacggacttcggcagagcaaattgtggctactaatttgccccctgaagatcaagatggctctggggat

SEQ ID NO: 150843 - DNA, 100 bp, Homo sapiens
cagctgcaaggagggcggcgggactgcactcgagtgtccagacctgctcgatgagtgcagacatcctcagcaccatcggctatgacaacattatccaaca

SEQ ID NO: 150844 - DNA, 135 bp, Homo sapiens
gatgttcccgctgcctgtcaccaacgggaagggccggcccgcctccctggccggggcgcagttcggaggttcaggtatcacctcttctgggctcaagatggacaacaagaagcgcctggcctacgccatcatcca

SEQ ID NO: 150845 - DNA, 96 bp, Homo sapiens
catacccgtgacctggggatcgctacggaccttaaaatacccgcaacagccccttcgtcccaagaatttaaactttgggataatgagctgcagtat

SEQ ID NO: 150846 - DNA, 146 bp, Homo sapiens
acgaagttatcctctcaaatttcagacttgcttactaggccaacaccagctttaaatagtggaggcggaaagtacaccaggggttggaaaaaccacactaggcaaagaacttgcgtcaaaatcaggactgaaatacattaatgtgg

SEQ ID NO: 150847 - DNA, 98 bp, Homo sapiens
ttggtggtggagtgtagagatatagttggcaacctcactgagttagaatcagagatgtttactgaactgcaacagatgaggcaacagttaccagacat

SEQ ID NO: 150848 - DNA, 100 bp, Homo sapiens
ggtggagttggtgttgatgaaggtatttgaagggacttcaggtatagatgctaagaaaacgtcctgtgagtttactggggatattctccgaacaccggtg

SEQ ID NO: 150849 - DNA, 75 bp, Homo sapiens
tgctctgcgcctcacggccagatcccaggtcatctcgatgcactcctgaggggcttggttctgggaaaactagga

SEQ ID NO: 150850 - DNA, 100 bp, Homo sapiens
cggcggccgcgttcgcaccccagggtctcaccggcaagggaaggataatgtgggtctatgtctcaatctccggaatttgccgtggtttgatgaggttgat

SEQ ID NO: 150851 - DNA, 75 bp, Homo sapiens
cgtaaacagtgttacacggctttcctccacctgcgaagtgcagtcattggagaaatcgatgaagaaacagattct

SEQ ID NO: 150852 - DNA, 100 bp, Homo sapiens
gccaatggctacctggaactgctggaccatgtactgctgtgtccttgaagtggagattgcattttgaatttgtaacgtcccgagaaccaggattggtact

SEQ ID NO: 150853 - DNA, 82 bp, Homo sapiens
taggagaagaaatccgcagaagcttattaaagttaaggtacatcaggaacgtctctatcaagaatacaatttcagcaaggct

SEQ ID NO: 150854 - DNA, 50 bp, Homo sapiens
gagcacgtcatctccatcgagggaatggcggcgctagatagtaaggcatc

SEQ ID NO: 150855 - DNA, 99 bp, Homo sapiens
attcttgctacctccagtcaagacaattctgtgaagctgttcgggggtcttgtctggattttggttgcctcctccaatgttcctctacctctactacaa

SEQ ID NO: 150856 - DNA, 74 bp, Homo sapiens
acgagttgaatcattgttcaaataagggatcatagacggtatttctatgtaaacgaacagtcgggcgagtctca

SEQ ID NO: 150857 - DNA, 50 bp, Homo sapiens
attagatggtgacactgcagttggaagatgaagatcctgccaaaggtgat

SEQ ID NO: 150858 - DNA, 100 bp, Homo sapiens
ggaactgctgacgcttgatgagaaggacccacggcgtctgttcgaagaactgataaatttcaaacggaagagagtggcagcatttagaaagaatctaatt

SEQ ID NO: 150859 - DNA, 101 bp, Homo sapiens
cctgcgcctcttctactgcactgtcctggtctgctccaaagagatctcagcgctcaccgacttctctgggttatgtaccgaaggactctaccgtgtcagcg

SEQ ID NO: 150860 - DNA, 83 bp, Homo sapiens
ctccgtcgcacccaccatgatggaagacgacgggcagccccggactctacaggtgctctagttcacagctataggggaacagg

SEQ ID NO: 150861 - DNA, 75 bp, Homo sapiens
agagaacggttgcaaaactggaaaagacaattgatgacctggaaggaaggcaacagcccccaggggagcaaccag

SEQ ID NO: 150862 - DNA, 75 bp, Homo sapiens
ctggaggatcaggtggagcctgatggactggactcgggccatatccgtggtgccgtcaacatgcctttcatggac

SEQ ID NO: 150863 - DNA, 100 bp, Homo sapiens
cagttgaatgacctggatgccatgtgcaaatactgtgcaaaggtgatggacactcatcttgtacaatggtcagttccgttcaaggaaacacatatcccag

SEQ ID NO: 150864 - DNA, 90 bp, Homo sapiens
tgacgtcctgtttggagatgtctggctctgtagtgggcagagtaacatgcagatgactgtgttacagaggggtgtttgatgcttccctca

SEQ ID NO: 150865 - DNA, 50 bp, Homo sapiens
gccaaatggagctggaagcagtccagtggttatttctcaaactctgaggc

SEQ ID NO: 150866 - DNA, 100 bp, Homo sapiens
aggaccatgtgatgcacctgctccagattgtgactgctttaggtaaacaagaagcagaaaggaagtttgaaactttgttaaagcacctgtcacatcctcc

SEQ ID NO: 150867 - DNA, 50 bp, Homo sapiens
tttagctgtgggagactggtcgaagaatatcagctgcatccagtgtcccc

SEQ ID NO: 150868 - DNA, 82 bp, Homo sapiens
gtggtcgcgtctcggaaaccggtagcgcttgcagcatggtgcccgtggttgacacgagctgtgtccccagctgttcccgtct

SEQ ID NO: 150869 - DNA, 100 bp, Homo sapiens
cttttagacctgaagccatacaaagtaagctggaaagcagatggtactcgagttgtggaaagtaaaaatgtagccctaccaaaaggaactattgtactgg

SEQ ID NO: 150870 - DNA, 96 bp, Homo sapiens
tgctccaggaagccaccttactctgagggtcaagaattgccgcttccttttagttactggaatgaaggatggcagcatgccgtgcattaaaagctg

SEQ ID NO: 150871 - DNA, 74 bp, Homo sapiens
aaaggtcaaaatcaagactatagaggtggaaagaatagcacttggagtggggatgccaacagacagatcagcga

SEQ ID NO: 150872 - DNA, 75 bp, Homo sapiens
gaacctggtgttttagaggataccttggtcccagagtcatcatgaagatcagcaatgtgggagacaggagcttca

SEQ ID NO: 150873 - DNA, 100 bp, Homo sapiens
gtgtttggatcagtattccatgttaccggctactccatggggtgtgtgggaaataatcaagcgaactggcttatcaaagttttggctttgttgcaagagc

SEQ ID NO: 150874 - DNA, 97 bp, Homo sapiens
ctgaggaggggagtaaattgaaaatattggggccatttagtaacttctttgcaaggcgtccgacctccgatcatgaacgggcccctgcacccgcggc

SEQ ID NO: 150875 - DNA, 100 bp, Homo sapiens
cgccaggcgctctgaccactctccagcaccagcttccagttagtggatatagcacaccatccccagccaggtgtcaaattgagaaccaggtagatcccca

SEQ ID NO: 150876 - DNA, 100 bp, Homo sapiens
tgctgaagcagctcccgcgaggaccacccgctacaaggctttggccgaccaagtgtgtaccatgctgctattgtcatcttccttgaattctttgcgtggg

SEQ ID NO: 150877 - DNA, 100 bp, Homo sapiens
cgggtcgccggagccgcgccccaccccgccagctccagagccacgttatcttgacgaatcagattacaacccatctgagtggagccctggcttctcaggc

SEQ ID NO: 150878 - DNA, 77 bp, Homo sapiens
atgtctcggatgattctgggggagtacacagacccagaacgctggacaaacattcctttgctggtcaagatcctaaa

SEQ ID NO: 150879 - DNA, 90 bp, Homo sapiens
tgtatttattgacagacaaaacagaatcttccccaggtgtgactgaggtgaccatcatagaaaagcctcctgctgaacgtcatatgattt

SEQ ID NO: 150880 - DNA, 100 bp, Homo sapiens
agaaggcagtacattttgggttaccggacagtcattttgtttactcattcagccctgttgcaggtcccaataaactcttcataaggttgacagaagcacc

SEQ ID NO: 150881 - DNA, 75 bp, Homo sapiens
tacgtgtactttaccaacgagctgaagcaggaaatgggtcctgatgaatatgaagagatggaagaagaggaggag

SEQ ID NO: 150882 - DNA, 100 bp, Homo sapiens
ggaaaaccagttattgaatatcaagaggaggagttgttggaggcagttcccatgttatacgcagcagatacttacggagcattgtaatgaagtgtggttc

SEQ ID NO: 150883 - DNA, 100 bp, Homo sapiens
aggggtgacatggattatcaaatattgtggatcaggtatccgttacagcactgatgtgagtgtagatgaagtaaaagctttggcttctctgatgacatac

SEQ ID NO: 150884 - DNA, 100 bp, Homo sapiens
ccaacatgaagcttcttcatgttttcctgttatttctgtgcttccacttaaggttttgcaagtgtttacgaaaatggggttacagaagatgtgaagatat

SEQ ID NO: 150885 - DNA, 75 bp, Homo sapiens
tgtggcagtggaaaatgcgctcgggctggaccagcagggctgcccttgagatggagttgctgcctctttggctct

SEQ ID NO: 150886 - DNA, 75 bp, Homo sapiens
ggaacttgctgagcaactattcaaaaatcactgccagtgaaagatgtagaagataaacctgaacaacaaaccaga

SEQ ID NO: 150887 - DNA, 83 bp, Homo sapiens
ccaagacttacccgaagttgccgcggggccttccgatcccctgttctcgactggaccgggttggtggcctgaatgtattagct

SEQ ID NO: 150888 - DNA, 100 bp, Homo sapiens
ccgcaagtcccgtcttatgggacttgaggccctcaagttctggcctgagccttgaagattctaagaaattgacagcttctcccagtgatcccaaagtaaa

SEQ ID NO: 150889 - DNA, 83 bp, Homo sapiens
cccaggtccaccacctgctccatttgcaaagctgtaactgaagttcgtgaagtcaccagaaaatcagtccctcgtaattcctt

SEQ ID NO: 150890 - DNA, 50 bp, Homo sapiens
tgggagcggagagcgcaggcgtgacctgcaggctgggacaatgaaaagaa

SEQ ID NO: 150891 - DNA, 75 bp, Homo sapiens
cggacgccgatgcccggggctgcgacggctgcaggtctcctctgagcctccggcctccataagacccaaaacaga

SEQ ID NO: 150892 - DNA, 75 bp, Homo sapiens
tgtttcaactgctgtattgcagaacagcctcagccttccgggaccatgtctggagaactaccaccaaacattaac

SEQ ID NO: 150893 - DNA, 90 bp, Homo sapiens
gtcctccttcgccgccgcgcacaaccgcacgtgcagaaagttcgtcgctgcttcctgtgctccaggagaggacatctcctgtattcctgt

SEQ ID NO: 150894 - DNA, 74 bp, Homo sapiens
ccctggactgtgaagagtgaggagaccatagctgcacagccaggtgccgtgagcgatgtggagatgcaggaaca

SEQ ID NO: 150895 - DNA, 50 bp, Homo sapiens
actgactaaagctatatgtggactggaatccatcaacagcatcaagtcca

SEQ ID NO: 150896 - DNA, 74 bp, Homo sapiens
ggccaagggaccaaggtggaaatcaaacgatttttgaagtgaagcatcagcataggaaggtggaaaaccagatc

SEQ ID NO: 150897 - DNA, 50 bp, Homo sapiens
gtttgaacactggcctcatatttgcacgcctacaacacagcagtcccctc

SEQ ID NO: 150898 - DNA, 98 bp, Homo sapiens
gatttgggagagacgctctgaactgactgccccgcatcaccggagcgtcccagctgcgaggagaaatgggcaagttcatgaaacctgggaaggtggtg

SEQ ID NO: 150899 - DNA, 145 bp, Homo sapiens
catgttatatggaactattacagaattctgcactgaagcaagctgtccagtcatgtctgcaggtccgaggctccactttgaggctctgatgaacattccagtgctggtgttggatgtcaatgatgatttttctgaggaagtaacc

SEQ ID NO: 150900 - DNA, 75 bp, Homo sapiens
agctctacgcctcctacgtttacctgtccatgtatatttaaagttggagttcgttgctaaagatggcagacccag

SEQ ID NO: 150901 - DNA, 124 bp, Homo sapiens
agcaccttgtccaggcgggcctcccgtttctggctccgggctgagcttcctggagaagaggaaggtgagaagccctaccactgcaactgggacggctgcggctggaagtttgcgcgctcagacg

SEQ ID NO: 150902 - DNA, 100 bp, Homo sapiens
agccggagttcaaacctaagcagctggaagggaaacaagctcacatcttcctgtgggaaaccttctagcaacaggatgagtctgcagtggactgcagttg

SEQ ID NO: 150903 - DNA, 74 bp, Homo sapiens
gacatttaattttagggtcctttatatagaagggagatgcaaagagccgtctcactcttctctctgaacgaccc

SEQ ID NO: 150904 - DNA, 98 bp, Homo sapiens
cgagctgagtggttgtgtggtcgcgtctcggaaaccggtagcgcttgcagcatggggatgaccgctttggaagacgtgttgtcacgttcagctgctgc

SEQ ID NO: 150905 - DNA, 100 bp, Homo sapiens
tcatcatgaaagcatttatcaatggaaggaaactttttggtacccctttttatccactcattggcagagaagctgaatgcaactcccatgtaaatcgagg

SEQ ID NO: 150906 - DNA, 100 bp, Homo sapiens
gcggctgccgtgctgaggaccgggggtggaggtggtgcctctggcagtgacgaggacgaagtgtccgaggtctgtgtgtcatgattgcggcctccattta

SEQ ID NO: 150907 - DNA, 87 bp, Homo sapiens
acgcacaggccgtcgctatgagcgggaccaccctgggcacagcaggcatcggagtgttttaactcaaatgggtgatgaaaaggactc

SEQ ID NO: 150908 - DNA, 75 bp, Homo sapiens
caagaagtttctaggaaaggccggacaccagttttctggatatgccgcagaaggatccgtgccagaagcaagcct

SEQ ID NO: 150909 - DNA, 83 bp, Homo sapiens
caaccattgacgccatgtcgggttattcgagtgaccgagaccgcggccgggaccgaggtaacctttggaaacatcagaagcta

SEQ ID NO: 150910 - DNA, 82 bp, Homo sapiens
agcaaggtcggcagagcaaggggcttacgcagaaggacctggccacggtgagcactgtgaggtgagtgctcgctcaggccgt

SEQ ID NO: 150911 - DNA, 95 bp, Homo sapiens
tggagcgcaaggaggagcaggccgaggccatatccgagcgacaaatggtggcccggagtttgctcgataccttgagggaagtctgcgatgatgaa

SEQ ID NO: 150912 - DNA, 90 bp, Homo sapiens
gggactgggagtcgttagtgaggctattgagggcacctacattgacaagaaatgccccttcactggtaatgtgtccattcgagggcggat

SEQ ID NO: 150913 - DNA, 58 bp, Homo sapiens
cagaagtccagagctgaggactgcctgtttgcaggaagaatccccagcacaagataga

SEQ ID NO: 150914 - DNA, 98 bp, Homo sapiens
tcggaggagagcgacatggacaaagccatcaaggctggacgtaaagaaagaagtgatgcactcaattctgcaatagataaaatgaccaagaagaccag

SEQ ID NO: 150915 - DNA, 98 bp, Homo sapiens
taaaaacaatagctcaaggaaacctttccaacacagatgtccaagctgccaagcaggaaactgcatatcttctggtttacatgaagatggagtgctaa

SEQ ID NO: 150916 - DNA, 74 bp, Homo sapiens
tgagcccgggacggcagcggcctggggacccagcaagtcatctgcaagcagcagaccccggagctggagccagc

SEQ ID NO: 150917 - DNA, 101 bp, Homo sapiens
tgctccattatgtcgtgtgcttccccgatagcaaagccattgtggatgggaacctgaagctcatcttgggtctggtgtggacgctgatcctccactactcc

SEQ ID NO: 150918 - DNA, 75 bp, Homo sapiens
gccgcccagacgctgcccgcgggcccggccacggcggagccaaggaggtgcgggagacgcggcggcggcacgagc

SEQ ID NO: 150919 - DNA, 75 bp, Homo sapiens
actccagaagtagcatggaaatggagggcatcttcaaccacaaaggtgtgatcccctgggcccgtttgttgtcgg

SEQ ID NO: 150920 - DNA, 108 bp, Homo sapiens
ccaagatccgcaaggccgcccgggaactgctgacgcttgatgagaaggacccacggcgtctgttcgaagttggtgacaaagttcctgctgatataaggttaacttcca

SEQ ID NO: 150921 - DNA, 96 bp, Homo sapiens
aaaatcgtggcctccatgtgggacagcctgggagaggaacagaagcagatcatccccccgaaggagtggaagccgcggcagacgtatgatgacatc

SEQ ID NO: 150922 - DNA, 100 bp, Homo sapiens
ctagcaggaatgcttactgttgcgtggttcgttattaacagacttcccaagtaagaagcggaagaggagccgctggaaccaagacacaatggaacagaag

SEQ ID NO: 150923 - DNA, 90 bp, Homo sapiens
tgggtcgtcatttcccccgcttctatgtcctgtacacaatcttcatgaaaggttgtctgcattcaaaagagcattctattaaagctacct

SEQ ID NO: 150924 - DNA, 100 bp, Homo sapiens
agcggtcggtcgagtgtggcctgtgtggactcgcatcttgcccgaagccgggcggaggagagctcaagctaaggctattactcgtggaggagcccaggaa

SEQ ID NO: 150925 - DNA, 75 bp, Homo sapiens
gaacgatacacacgttggatcaaccagctgacgccggagcagctcctaacccagagacacggggtcttgccatgt

SEQ ID NO: 150926 - DNA, 96 bp, Homo sapiens
cctcccaaagtggtgagattacagattggccgcgtaatccaggttgctgctgggagcagcaacctcaagagagtgaccttggagctgggggggaag

SEQ ID NO: 150927 - DNA, 105 bp, Homo sapiens
gccgcagcagccgccgccgccgcgcaagtaaccagagagcacagagaaatgctggtgaaactggccaaacagaacaccaacaaggccaaagactctttacggaag

SEQ ID NO: 150928 - DNA, 100 bp, Homo sapiens
tttggagtgtgcgtgcgcgccgagcggactgcctccgggcctgccaggagcagatcgaagccctgctggagtcaagcctgcgccaggcccagcagaacat

SEQ ID NO: 150929 - DNA, 82 bp, Homo sapiens
ctcgctgggaccccctagacttggcatggaggctgggtcttcgccttgatcgtgttctcctgcatctatggtgagggctaca

SEQ ID NO: 150930 - DNA, 83 bp, Homo sapiens
atgaagaggtttgctctggaacagcaggttggtgttcgaggaagagacattgttgttcttggtgtggagaagaagtcagtggc

SEQ ID NO: 150931 - DNA, 101 bp, Homo sapiens
tacgtttagcttcaaaaatgacaagttcgataaaagtgtgcagaccaaggaattctcacactcaagaaagcaaatgaacttcttctgagcacaggcatgcc

SEQ ID NO: 150932 - DNA, 74 bp, Homo sapiens
tttcttcaagctcttctggcagtgattctgacagtgaggttgacaaaaaggttcttgatagtccacaatgggtg

SEQ ID NO: 150933 - DNA, 100 bp, Homo sapiens
gaggaagatggacagctgggaattgctgaattagaactgcagaggttcctctacagcaagcttcataaacaagcagatatgcaagaagagaaaaaccgaa

SEQ ID NO: 150934 - DNA, 75 bp, Homo sapiens
catggctgccgcgccgccgctacgggaccgcctgagctttctacaccggctttctgtatgagcccaatagccaag

SEQ ID NO: 150935 - DNA, 82 bp, Homo sapiens
gggcgcagtcgggctctgcaggagcgcgcggagaacactctgctccagccaaggtggtgagggcagctgttcctaaacagcg

SEQ ID NO: 150936 - DNA, 100 bp, Homo sapiens
ggcccacatcttccggccaacttccattgaacttcccagcactcgaaagggaccgaaatggagagcaaaggtattacaggaataacggaagccgttaaag

SEQ ID NO: 150937 - DNA, 90 bp, Homo sapiens
caaagagtttcaagatgcaggtgaacagggcccagtcatatatgcacagttagaccactccggcggacatcacagtgacaagattaacaa

SEQ ID NO: 150938 - DNA, 80 bp, Homo sapiens
cccaggtcgtgctggtagctgacgggcgagaaggcctcgtgcaagcgattttgcaagaacgaggctcaaggatgtgaggg

SEQ ID NO: 150939 - DNA, 74 bp, Homo sapiens
aacggccatatttatgtgtgtggttgttgacctcctgtactggagagacattaagaagactggagtggtgtttg

SEQ ID NO: 150940 - DNA, 88 bp, Homo sapiens
ggtcgaccccatctcccatgacctgcttgtgaacctggcccgggacctgcagtgccccaagaaggcagctgttgaagacagagctggg

SEQ ID NO: 150941 - DNA, 90 bp, Homo sapiens
gtcaccgtggagctccgccgccccgaaactttcaccgcgagcggttccagaaagctgagtctgatctggattacattcaatacaggctgg

SEQ ID NO: 150942 - DNA, 100 bp, Homo sapiens
cggctcggactccggcgggacctgctcggaggaatggcgccgccggattgcaacacctgctcggtataccgtgactttgggaggaacatctgtcactgtg

SEQ ID NO: 150943 - DNA, 98 bp, Homo sapiens
gaagtcggtgtctgctgcgttcacggcaggattcggttaggtctgaatttcctgctgctgttcacaaagatgctttttatctttaactttttgttttc

SEQ ID NO: 150944 - DNA, 100 bp, Homo sapiens
ccggaaatatggcctcaatatgtgccgccagtgtttccgtcagtacgcgaaggatatcggtttcattaaggtgattgaaaactcagcctcaaaacaaaaa

SEQ ID NO: 150945 - DNA, 100 bp, Homo sapiens
cgggtggaagaagtggggccatacacctacaggtggatgctcatggaaatattctgttgacatcgctggaagttcacaatgaaatgaatgaggtctcagg

SEQ ID NO: 150946 - DNA, 80 bp, Homo sapiens
tcatttccttaggtacaggtccccagcttactccagggatgatgtcagaaaatgaggttggaagcgaagtggaagcactg

SEQ ID NO: 150947 - DNA, 88 bp, Homo sapiens
cagattcgcagtggtcgcttcttctccttgcgaattggctacctcgctgcttcccagagctttcacgaaggcaccgacgtcatcatgc

SEQ ID NO: 150948 - DNA, 97 bp, Homo sapiens
tgaccagtggtcgagcatccataggatttctccccagtgtgaaagacgttatgaagaggacatgtactggaggagaatggaggaagaacaacatcat

SEQ ID NO: 150949 - DNA, 95 bp, Homo sapiens
gtgaatggcagcaaggtgggcccggacggcacaccctacgttaccgtgctcaagattcctggtcgggtggcttccagtggtcttcagtctgtcgt

SEQ ID NO: 150950 - DNA, 90 bp, Homo sapiens
aggttgatgcggaatcttggaaaactacaccatatcaaattgcctgtggaattagttactaaaccaaggagatttaactgaaagacggac

SEQ ID NO: 150951 - DNA, 90 bp, Homo sapiens
gaggaagcaaagaaaatgatatcaggactacagtcccacagtgttttgttcgccccacggaggccaagaaagccgcagatgaggccaaga

SEQ ID NO: 150952 - DNA, 83 bp, Homo sapiens
tgggcaaccgggcggccacgttcccgctgcaggcctgtttaaagaagaaaacccgtatgctagatttgaaaacaactaaagcg

SEQ ID NO: 150953 - DNA, 73 bp, Homo sapiens
tgcggtctgccaggagctgcggccccgtccggcccgggctgatgatgattattctccaccgtctaagagacca

SEQ ID NO: 150954 - DNA, 125 bp, Homo sapiens
aatcatttctgggagaatgccgaagactgcatttcaacttcaagaatgcatctacttgtttccaaagttatttgggtcagcattttcctccacccaccacttaaaactgatttgtttcatacatt

SEQ ID NO: 150955 - DNA, 90 bp, Homo sapiens
ggccgcaggtgctcctgctgccgctcctgctggtgctcctggcggcggcgcccgcagccagcaagggtggagagattcaaccagttagcg

SEQ ID NO: 150956 - DNA, 100 bp, Homo sapiens
ggaggatcctgtcgcacggcgtcacctccttctgccccaccctggtcacttccccaccggaggtttatcacaagagcgcctccgcagggaggagaagcag

SEQ ID NO: 150957 - DNA, 75 bp, Homo sapiens
tacctgtggaccgtgtgctgccactgcgggggcaagacgaagagttatgcccagccaagtcttcagtatatccag

SEQ ID NO: 150958 - DNA, 100 bp, Homo sapiens
gttactccactgactctctcttttcctgataacatggccagcaagaaagtaattacagtgtttggagcaacagggaaatgaggcaagttatcctttggaa

SEQ ID NO: 150959 - DNA, 82 bp, Homo sapiens
ttcagagtgtcatccaagagacctccttcagtagtttaattggttggggtcagataagaagaggagtgacaatcaagccaac

SEQ ID NO: 150960 - DNA, 75 bp, Homo sapiens
cgtggagtgacggtcccacggcagcgcataggaaccaaggctttagccttctcaactcattgactggaacaaacc

SEQ ID NO: 150961 - DNA, 82 bp, Homo sapiens
gctaagagatatctgcaatgatgtactggtcagtcatatcatttggatcaaaaaatagaacaatcggagttgcagccaaaaa

SEQ ID NO: 150962 - DNA, 136 bp, Homo sapiens
acggccttgagcgaggaggagctggacaatgaagactattactcgttgctgaacgtgcgcagggaggtgtgaccatgaagctcatggatgaggtcgccgggatcgtggctgcacgccactgcaagaccaacatcgt

SEQ ID NO: 150963 - DNA, 51 bp, Homo sapiens
tggatagataccgaattcttatcacaaagaaacctcctgcaaaagtggaag

SEQ ID NO: 150964 - DNA, 75 bp, Homo sapiens
taatgtattccaccacctccgccagttaagaggaaaaagccttagaggagaaaaggagaaaagaggaactagtga

SEQ ID NO: 150965 - DNA, 90 bp, Homo sapiens
gcagtaagggctaggggatgccagttccttggaccaggtacggattttcaaatatgcgctatatttcttcgctaattagtggtgttggta

SEQ ID NO: 150966 - DNA, 75 bp, Homo sapiens
ttccagtggaggcattttggggcagaatacagagatatggaatcaggtctcccactccaaagagcaaacgtaaat

SEQ ID NO: 150967 - DNA, 75 bp, Homo sapiens
cagatctgtgggactggtttgaatccttccttgatgatgaagagtaacttgctctggaagtacacttggaatggg

SEQ ID NO: 150968 - DNA, 50 bp, Homo sapiens
gccctttcttgggctgtgttcacggtgactctgacatcattagaagcatg

SEQ ID NO: 150969 - DNA, 80 bp, Homo sapiens
cactgacttcaagaatgaagccgtggaccctcacggaactctccggagtcctttctgtattgttgtgattttgcttctgg

SEQ ID NO: 150970 - DNA, 100 bp, Homo sapiens
ggacctggactcacggctgcttggagcgtccgccatgaggagaagcaaactgccctatgatgtgacccctgagcaggcgctagctcatgaagaagtgaag

SEQ ID NO: 150971 - DNA, 83 bp, Homo sapiens
tagcagggaataatttcaatttgaaaacaagtggaatagtgctgtcttccttggagaaaagccttacagatgctcatgggaag

SEQ ID NO: 150972 - DNA, 95 bp, Homo sapiens
ccgagcggctgctgagatgagtgcagcttcgcaaaggctgaaaaatttgcctcgcacttccctcaaagccaaacagttgcttcaaacttcatcta

SEQ ID NO: 150973 - DNA, 74 bp, Homo sapiens
cggctgctgcaggccatcgacccccagagcaacgtggtgagccggctgggcctggactccctgtgccccttcag

SEQ ID NO: 150974 - DNA, 51 bp, Homo sapiens
acaacagttatcatatggcaagttgatccgacagagtctcgctgtgtcacc

SEQ ID NO: 150975 - DNA, 75 bp, Homo sapiens
tggcatgggctacaaggaaaacggtcctagcagaagatgtgactcagactgcctctgggtggggctggctggccc

SEQ ID NO: 150976 - DNA, 102 bp, Homo sapiens
ctccagagcctgccggaaggctccctcggtcgcgagtatctccgtttcctggatgtgaacatcaccggcgtaatcaacccagcgttggacaaatactttccg

SEQ ID NO: 150977 - DNA, 100 bp, Homo sapiens
cagcctcccaagtagctggcattacagaaatttggagacagacaacttgtcacgcatacagggaaaatgacatttgaagacaaagtcagacatctacaag

SEQ ID NO: 150978 - DNA, 100 bp, Homo sapiens
cagacagggcagcacgccgtcattgacatcaatgccttcccaggacacaatgtttgcacgaggactgaagaggaaatgtgttggccacgaggaagacgtg

SEQ ID NO: 150979 - DNA, 100 bp, Homo sapiens
caggctgatctcaaactcccacggtcaagcgatctgctggcctcggcctctcaaggctttctcctgtttctcagaggatttatcaattatgcaaaagttc

SEQ ID NO: 150980 - DNA, 101 bp, Homo sapiens
cggcgcgtaccgccccagcccgggtgcccacactggccgtcccggccatctcgctgcccgacgatgtccgcaggcgttaaaagggccaaattccagggttc

SEQ ID NO: 150981 - DNA, 100 bp, Homo sapiens
ccagatccagaaactggaggagtcccgctcgaagctagatgctgaaattttcttctaaggagaaatatcccttatttacttttgtaaatggtcattccag

SEQ ID NO: 150982 - DNA, 100 bp, Homo sapiens
gaggcccagaatccaccgtcaggcataaattgattattcctcgcccacatctgtgccagcaatgatagcactgatggggagccagaagaaaagagacgga

SEQ ID NO: 150983 - DNA, 75 bp, Homo sapiens
ccccatcctcctggtcctttcctgcttctgactctactgctgggacttacaggtcacttggtacatatgaccgtg

SEQ ID NO: 150984 - DNA, 98 bp, Homo sapiens
cggatcgccgcgctcagcgacaaacaagatgagttagatgaactccgtgctgagatggaagagatgagagacagttatttagaggaagatgtttacca

SEQ ID NO: 150985 - DNA, 100 bp, Homo sapiens
gctgaaaggaattcctagatctaaacaccagggagatcttgtgcgaaaactcaaagaagataaagcaccccaagtagacgtagacaaagcagtggctgag

SEQ ID NO: 150986 - DNA, 100 bp, Homo sapiens
ctgaaggggtggctgcccctgccgacccagagatggtcaccttacctctgcaacctagcagcacccttaatgtcccgagcaaccccgcccagtctgcgca

SEQ ID NO: 150987 - DNA, 75 bp, Homo sapiens
ggagaccaaattttgaacctcctcaggtctcttttattcaaaaccttgtattttgtgtggaaagagtttaccgtg

SEQ ID NO: 150988 - DNA, 101 bp, Homo sapiens
ctgctcatctaatccataaagctatgttaacagattggagcaaagtaaagcagcggttcggctgaaagaagacatgaaaaagatagtggcagtgccattaa

SEQ ID NO: 150989 - DNA, 75 bp, Homo sapiens
ctgatgaagcttctgaaccatccacacatcataaagctttaccaggcatagagaaggagacgtgccagaagatgg

SEQ ID NO: 150990 - DNA, 74 bp, Homo sapiens
agcaggaggtggatttgcagcagctcatcagagactctgccgagaggaagctgagctgaacacattacgatgga

SEQ ID NO: 150991 - DNA, 82 bp, Homo sapiens
gaagatgcggctgtcgccaagagcaaactgagggagctcaacaaggtccctgtgcgttttattgcgacctgccggtgggaac

SEQ ID NO: 150992 - DNA, 98 bp, Homo sapiens
tctccagaagagatttatggcagcctcactcccagtagtttctgcatttagtgagataagatatgtgctgattagaaggctcacttgtgcagtgtgga

SEQ ID NO: 150993 - DNA, 85 bp, Homo sapiens
atctgcctagatcggctagaaaactggtcgctggatttgtgactgttgtcagcgggcccccccaacacccaggaaagtgggcaga

SEQ ID NO: 150994 - DNA, 100 bp, Homo sapiens
aggctactgataaatctttacaagcttgtaaaatctcaggtaggcgaaaaccaagagtacatcggcctcgttctcctatattggaagaaaaagacatccc

SEQ ID NO: 150995 - DNA, 82 bp, Homo sapiens
acgcagagacaaaagaaacgggccccgactgcagtggtctcggaaagagggtcgtggtcccgcacggatgcgcttgttggga

SEQ ID NO: 150996 - DNA, 50 bp, Homo sapiens
gcggctccaggagtcctgtgactcaggctaagtcctatcagccatggaaa

SEQ ID NO: 150997 - DNA, 98 bp, Homo sapiens
cgtatggctgatgacgactggtggccaatgcagatactaattaagtgccctaatcaaattgtgagacaggaacaggatctggacttggcacatttctt

SEQ ID NO: 150998 - DNA, 100 bp, Homo sapiens
actggccagagtgaccaggctgaccagcaccagccctgatccaggcctcatggaggtccttccggagcgctgcgtgcagatcgccaagcgggagctgctc

SEQ ID NO: 150999 - DNA, 96 bp, Homo sapiens
cggcgagccactgcttcaggtcacgctggtcgactgccccgggcacgcctccctcatccggaccatcatcggcgtttgaaggatgacctctaggaa

SEQ ID NO: 151000 - DNA, 100 bp, Homo sapiens
ttcaggattatgaccatcatttttgggaagagtgttagagtaaggcatcagggtaaacttcatgatccagaaggcatgggaattattccaagaatagtgc

SEQ ID NO: 151001 - DNA, 75 bp, Homo sapiens
tggcgggcgcaggagcccggccccggagccaccggagcttgatcctggatagtgtttgtatgatgtgcacacgtc

SEQ ID NO: 151002 - DNA, 75 bp, Homo sapiens
aaagagaaaaggcaacatcctgtcacaggccatgctctggcaaaaacgaaatccttttgtactattgctcattca

SEQ ID NO: 151003 - DNA, 100 bp, Homo sapiens
tcctggcgcgatgcgtcaagtacactgaaattcatcctgagatgagtcaccttcaggccattcagaggaggaaagagaggggaatatgaagtcagccaag

SEQ ID NO: 151004 - DNA, 75 bp, Homo sapiens
ggcccctcatgtaacctcagagatctgggcaggccaggcgcggtggctcatgcctgtcatcccggcactttggga

SEQ ID NO: 151005 - DNA, 50 bp, Homo sapiens
ggagctgacactttgggaaaagaatgaggcctgtcatctttacttcagag

SEQ ID NO: 151006 - DNA, 100 bp, Homo sapiens
ttggagaactacagaaacctcgtctccctgggctcagacaaatgacagtgactctgacactgagtctaagaggcaggcccagagatcctctgcttctgag

SEQ ID NO: 151007 - DNA, 51 bp, Homo sapiens
agatctgggtgactgtgatctgagggagaaccgaagattacaggaggccag

SEQ ID NO: 151008 - DNA, 112 bp, Homo sapiens
gctggagctgggtcagtccgccgctcaccccgcggccgcaccttcccgccttctcaggagccttcacgtaaatgggtccagtcatgcctcccagtaagaagccagaaagctc

SEQ ID NO: 151009 - DNA, 75 bp, Homo sapiens
actgtactggctattggaaggaggagattctgaagataaggagtaatagctcttcaagtctgcaataaaaaatgg

SEQ ID NO: 151010 - DNA, 100 bp, Homo sapiens
actacaacgagacccacaagatcctgggcaataccttcggcatgtgtgtgctgcaggaaattgtagtgatgatgctgtttctcaccattctgggacttgg

SEQ ID NO: 151011 - DNA, 115 bp, Homo sapiens
agccttctccacaaggaccagaggcagcggctgggctccaaagcagactttgtaaccatggagaaagagctgcggagcaccattcttttcaatgcctacaaaaaggagatattta

SEQ ID NO: 151012 - DNA, 90 bp, Homo sapiens
gctgggcgcgtcgaggactggtaccaaatatgccccaacagcggcaagaccagcatcatcagagtgccatgatgcacccagcgtcagcag

SEQ ID NO: 151013 - DNA, 101 bp, Homo sapiens
gctccgagcggccgcgagcagagccgcccagccctgccagctgcgccgggacggtaatcattaccaaatgaggaggaaaggacgatgtcatcgaggctctg

SEQ ID NO: 151014 - DNA, 75 bp, Homo sapiens
aacaacccattagttccccttgggatgtagtttttggaacatcagggcaactgtactcctgatgatattggtctg

SEQ ID NO: 151015 - DNA, 80 bp, Homo sapiens
atgcccagtccccagctcgccagcgcatagaatgtcaagctaaccaggcgtccgctacttcagaagagtgtactgtcgca

SEQ ID NO: 151016 - DNA, 100 bp, Homo sapiens
aagagcaaactatcagaatgggaagaacaatgtgccaaggctgaaattatcctacaaagtgaagtgcgccacaagcaaaccagctttctttgcagagaag

SEQ ID NO: 151017 - DNA, 75 bp, Homo sapiens
actcccctctgtactcggtgaagtcgtttgaagagcttcggctcccagcctgactcctggagattgtgaatagct

SEQ ID NO: 151018 - DNA, 49 bp, Homo sapiens
cgcgtcagcatactttggcgggttccagcagcactgatgtgaaggaaaa

SEQ ID NO: 151019 - DNA, 82 bp, Homo sapiens
tcaactgcatttgcgtccaccaaaaaaagtccacaaggcgattacaatttccagtcccctaaccacagacctgactgcagag

SEQ ID NO: 151020 - DNA, 101 bp, Homo sapiens
ctgggagccatcacgcccagctagccatcttctaattttcattccttcaaagggtctgggggtggtggcatctcccctaaaggaagtggtccctctgtggc

SEQ ID NO: 151021 - DNA, 100 bp, Homo sapiens
taccccctcccccctgagcccgaggtgctgacgtcgcaaaaaaattggatagagccaaaaacctgtatatcatctccgtgaaggggatcaagggacggct

SEQ ID NO: 151022 - DNA, 75 bp, Homo sapiens
cagaaaaccaaacaccacatgttgtctcttagaagtgggagctgaacgagaatggatcttggagaatgtctgaaa

SEQ ID NO: 151023 - DNA, 100 bp, Homo sapiens
ggagttaactttggtgatattttgatctgccgtgatcaatatcaggaaaggccccatcttcccttcacacctgtcagaatctggagatgtgagtagaaac

SEQ ID NO: 151024 - DNA, 82 bp, Homo sapiens
gaaggtgcatctgcagtacaggatatgaagaaattgagggttcttgccatgatattgatgatgttaagaagttcaaaccggg

SEQ ID NO: 151025 - DNA, 98 bp, Homo sapiens
tctctttgcagtgaacggcattctcttcaatcatgagagtcccagaagaggacaaagcccagccattccacctcccttaccgacagaacaagcttcca

SEQ ID NO: 151026 - DNA, 100 bp, Homo sapiens
ggatcttcggaatgatgagcacacaaggcgggagctagccaagatgaagcaggtgagccaatggtggcagcagaagtaggcgtatgggataactattgtg

SEQ ID NO: 151027 - DNA, 101 bp, Homo sapiens
taaggaactctatcccaggaatacagctttgcattaggttcatgaaccatcgagctccagccaatggccgctacaagccaacttgctatgaacatgctgct

SEQ ID NO: 151028 - DNA, 100 bp, Homo sapiens
ttgcaccgcagatcctcctgcccggctggcccgacccagttgttcctcaaagtcattcaagctgtactcgccgaaggagcccccgaacggcaacgccttt

SEQ ID NO: 151029 - DNA, 50 bp, Homo sapiens
caaagatctcgtacaagatccttctttgtcttgctatcacagatgaaatt

SEQ ID NO: 151030 - DNA, 100 bp, Homo sapiens
cggactcttcttcgccttcgaatgtgtatatctcatgattgatatggagaaactagtcatgggccaaaggtcaagatacttctctgggaaatgttgctgc

SEQ ID NO: 151031 - DNA, 82 bp, Homo sapiens
cctcaccatagctaatcttgggacatcagagggtcgcttcatgcagctgccactggtgacatgccaacttaccagatccgag

SEQ ID NO: 151032 - DNA, 101 bp, Homo sapiens
ccgatgtaaatattgtgaccattcgagagaacacagaaggagaatacagtggaattgagcatgtggcaagaatgttgtacaccagttatctgtaactcttg

SEQ ID NO: 151033 - DNA, 83 bp, Homo sapiens
ctcgagtgcacggagcgtcccttccatcaggagagggcttgtcaatgaggcagatcagattcaggttcgacgggcagccaatc

SEQ ID NO: 151034 - DNA, 96 bp, Homo sapiens
gaggacaatggacctgcctgggcatagacttccttaagttggatatgtcaagtgaccagatagctgccaatctgcaagcagttattaatgaagttt

SEQ ID NO: 151035 - DNA, 90 bp, Homo sapiens
gccttggctgctctcagcccccaagctggttcccgctgtagcaaacgtccgcggcctctcagtactatactggcaattgctggagaagat

SEQ ID NO: 151036 - DNA, 75 bp, Homo sapiens
gagaatttgtccaaatacaaagacagatcatcattttctgggtggaagtattcagctaaagactggttgatgagt

SEQ ID NO: 151037 - DNA, 75 bp, Homo sapiens
cagctgcccgcacgccccgaccttccatcgtaggtcatcatcagatttgaaatatttaaagtggatacaaaacta

SEQ ID NO: 151038 - DNA, 82 bp, Homo sapiens
cgctgcccgcactcctggtcctgctcggggctctgttcccagtcctggtacctgggataaaagttgcagcgtcccaccatcc

SEQ ID NO: 151039 - DNA, 100 bp, Homo sapiens
gcgtctcgggcagcatggccgagaagcggcacacacgggactccgaagcccagcggctccccgactccttcaagggtactagcaaaggccagacgtctta

SEQ ID NO: 151040 - DNA, 90 bp, Homo sapiens
gaaattcgcgatgcaatgatggcaaaggccgagtacctctgccggataggtgacaaagtgttaatgttgactttgcaaaatgatccaccc

SEQ ID NO: 151041 - DNA, 83 bp, Homo sapiens
gtcaccttggctctcccacccaatggagatggctctaatgtttgccagggtttggatacctgatccagaggaagtctggaagt

SEQ ID NO: 151042 - DNA, 83 bp, Homo sapiens
agtgactgtcaggtcgatcatatacaatgactgatgtggtgggtaacccagaggaggagcgccgagctgagttctacttccag

SEQ ID NO: 151043 - DNA, 80 bp, Homo sapiens
gacggcccccgcagcaagccccagccaaaggatgtgggctctcttgatgagaagatgaagagcttggatgtgaatcagga

SEQ ID NO: 151044 - DNA, 90 bp, Homo sapiens
ctggggtataccgttttagtcttgggggtagagtgactgcttgcgaaccagttcagcagtgcctcagatcagcttgaacgggtcttttta

SEQ ID NO: 151045 - DNA, 100 bp, Homo sapiens
tgaaggtcctggaagtctgttatcagaacttaagtcaaaggaatgtactcaagactgatcttctaagttcactggaaatgattttatccccaactgtggt

SEQ ID NO: 151046 - DNA, 100 bp, Homo sapiens
gaggaagaagcagctgaagacggaggcagctccacactgtgaactaagacccttgaacatctgtgaagaaatgactattctgcatggaggcttcttgctg

SEQ ID NO: 151047 - DNA, 96 bp, Homo sapiens
ctcgaaggggacctcatgtccctgtgggacacaatgcccccaagggcagcaggatgggtgtggaagcagtgatggcacttttggaggggaccccag

SEQ ID NO: 151048 - DNA, 80 bp, Homo sapiens
gacgggcatcctggtgcagctcctggtgcgtggcccagcctcagatgccaccatggcaactgcaccatacaactactctt

SEQ ID NO: 151049 - DNA, 83 bp, Homo sapiens
atctggagtgaggtggccggttcttggtgggatctgagcagacaaatttacatgtattggagaccagaccagaagcccttctg

SEQ ID NO: 151050 - DNA, 83 bp, Homo sapiens
ctccaacaaagccctcccagcccccatcgagaaaaccatctccaaagccaaagtgagcagtagccaacatgtcagggtgggag

SEQ ID NO: 151051 - DNA, 50 bp, Homo sapiens
atcctctgagatcccagatcatgaggccctggccaacgtcaacattggga

SEQ ID NO: 151052 - DNA, 83 bp, Homo sapiens
cgcaaggccaacgtgaacctggcatatctgggcgccaagccgcggagcctccagacggtgtactaatggtcacttgatgtgcg

SEQ ID NO: 151053 - DNA, 75 bp, Homo sapiens
gcctggaggattgtcactccaacctcttttcgctggcctccaccatggacagaggccaggccctgcccctcccag

SEQ ID NO: 151054 - DNA, 50 bp, Homo sapiens
cagtgagaaattccttgaaatttgcaaggcacattgcaagcaacccgtgc

SEQ ID NO: 151055 - DNA, 73 bp, Homo sapiens
caaagtgccatgtctttaatgttcgatacaagaggctgttttcctagcgtggcttgctgcctttggtaagaac

SEQ ID NO: 151056 - DNA, 149 bp, Homo sapiens
gcagtaggcacccgagcagcgccagcggccgagcgggcggcttcctggcctgggcgctccggtggcggcggaggtgagaagccctaccactgcaactgggacggctgcggctggaagtttgcgcgctcagacgagctcacgcgccacta

SEQ ID NO: 151057 - DNA, 98 bp, Homo sapiens
aagaagaggagaaggagcagtccgtgctcaactgaattcttgccgccaggatggggaaacagaacagcaagctgcgcccggaggtcatgcaggacttg

SEQ ID NO: 151058 - DNA, 100 bp, Homo sapiens
tgccggctggccgccaggaagcgccctacagctccggctgggcatgtgaccaaaagccagccccactgtgagttgaactctttcgtgttgaccggccact

SEQ ID NO: 151059 - DNA, 78 bp, Homo sapiens
caggctctggagagcggggtcttgtgcgcctgggccagatgccatggacaatattaccaggcagaaccaattctacga

SEQ ID NO: 151060 - DNA, 100 bp, Homo sapiens
atttctctccagtttatcgatgtctacatatatattctgtcctgtcttctcattcacaggttaaggctacctttccagataatccaacagctaaatcacc

SEQ ID NO: 151061 - DNA, 75 bp, Homo sapiens
caagtggtctggtcggcaagcctttgtctttgtctgccagaccaagatcactccatggatgaaatgacagctgtg

SEQ ID NO: 151062 - DNA, 82 bp, Homo sapiens
cctcagaccgtgtctcagcatgattgcttcccattttgtgcctcgaaacgtaaatattttcaccacgatcgattagactggg

SEQ ID NO: 151063 - DNA, 101 bp, Homo sapiens
cctgctgtcgcccgggaggggctcagggacaagtgatgacgacattgtatttgaggactttgctcgccagagactgaaaggcatgaaggatgacaaggagg

SEQ ID NO: 151064 - DNA, 78 bp, Homo sapiens
agtccagaaagcggcttatcgaacagagccgggagttcaagaagaacactccagaggaatcccagtcagaagttccag

SEQ ID NO: 151065 - DNA, 49 bp, Homo sapiens
atgcaacacattttcctatacctctggttatgatgtgattgctcaagcc

SEQ ID NO: 151066 - DNA, 75 bp, Homo sapiens
gattgtgaagcaatagcctaagggcaaacttgaagataaatcttttgactccagctctttagaggatctaaagtg

SEQ ID NO: 151067 - DNA, 98 bp, Homo sapiens
cgttgtgtcatccgccccccgctcaatggcgactccctcaccgagtacgaagcgggcgtttgcgaaggttcaccaagttgaagagtcttaacctttcc

SEQ ID NO: 151068 - DNA, 100 bp, Homo sapiens
attggtgcagagatggcattacgaacctttggccacttggaaaattacgggcagaaggaggctgagaaagtggcccgggtgaaggcgctatatgaggagc

SEQ ID NO: 151069 - DNA, 75 bp, Homo sapiens
tatgagccacacatccccgaccacttgcggcctgagtatggtaatcatagcctcctggtgtcgcacatccatggg

SEQ ID NO: 151070 - DNA, 82 bp, Homo sapiens
ccctcgcctcccggccgagctgacggtgcgcgcggagccatggttatcatgtcggagttcagcgcggaccccgcgggccagg

SEQ ID NO: 151071 - DNA, 74 bp, Homo sapiens
cttcctgtacagcctgcaaaactagggctgactagaagcagctaatatgcaccaatttcaaggagagaagacag

SEQ ID NO: 151072 - DNA, 83 bp, Homo sapiens
gctgcggggcccacctctctaagcctatggaaaagcttctggagttaaacatgaagtttctggagagacagtggtatttcaag

SEQ ID NO: 151073 - DNA, 100 bp, Homo sapiens
cgagactctccttgcttggaattctgcccactctgcggagttagcagtcacgacctccagcacaggtccagcaagactatgaatctctgttccaaatgct

SEQ ID NO: 151074 - DNA, 80 bp, Homo sapiens
cgcaaggagggactccccgtgaacaacatcttccagcagatctcccccgtgggaagctcttcgtgggcggtcttgactgg

SEQ ID NO: 151075 - DNA, 90 bp, Homo sapiens
gaaaggagtaatcctgatgatgactccatgggaattcagatagtcaaggcaaggaaagcatcttttgggaccatcaaatgcatcctgttc

SEQ ID NO: 151076 - DNA, 96 bp, Homo sapiens
cctgtacagcctgcagaaccgctgggaagtccaagatcaaggtgctggcattttgccagggccttcttgctgtgtcaccacatccgtggctgaagg

SEQ ID NO: 151077 - DNA, 83 bp, Homo sapiens
gccagcagtttgcctggtggtggaagaatgtctccttgctcggggttttaaaatcaaagatgggaaaatcggagaaaattgcc

SEQ ID NO: 151078 - DNA, 100 bp, Homo sapiens
cttcactaaagaaaacttaacagcacctggaagattgctgccaattcctggggaaagtcatggggagagaatggctatttcaggattcttcgaggagtaa

SEQ ID NO: 151079 - DNA, 83 bp, Homo sapiens
ctcgcccagcgtccgccgcgcctcggccaagctggcccccaagaggaccctttccaagtccccagctgggggccctgtgtaga

SEQ ID NO: 151080 - DNA, 100 bp, Homo sapiens
ctcagatgttggatatttgcttggaaaaacgtgtgggtacgaccttggaattgcattttgtgaaaaaagaacaagaattttctgcaaggatcatatctaa

SEQ ID NO: 151081 - DNA, 80 bp, Homo sapiens
caaggatttcagcaacaatgcctctgttcaaactcccagatgtgtcttgctgaatcagggctctcttatccctgccatcg

SEQ ID NO: 151082 - DNA, 100 bp, Homo sapiens
gttgataaaaataagaacaaagtgacaccactgcagaggaattacatgaacgacagccttcgcaccgacgtcttcgtgcggttccagccagagagcatcg

SEQ ID NO: 151083 - DNA, 97 bp, Homo sapiens
gccggaggctccgggacgtggatacaggttgtggaaaatgcccttaaagtgaacccaatactaggtccacaaatgtttcaaccgattttaccctatg

SEQ ID NO: 151084 - DNA, 50 bp, Homo sapiens
agcagagggtgtgtaataaaatacagacgaagttatacggaagcgtctcc

SEQ ID NO: 151085 - DNA, 73 bp, Homo sapiens
tccgacaaagcggctctccagcaagaaggtggcaagcacgtggccgaggagctccagcatctgctgcagtggc

SEQ ID NO: 151086 - DNA, 76 bp, Homo sapiens
agtctacaaaggaagacttgtaacctggagaagagatcaacagtacaaattctgaagtttgtaaacttgctgatgg

SEQ ID NO: 151087 - DNA, 75 bp, Homo sapiens
tggacacacctggttgctcagacagtgacagacatcacacctccagtgcaatccctgttcctaagagacaaagct

SEQ ID NO: 151088 - DNA, 87 bp, Homo sapiens
tcatcgacggcttcgccatcgccagcttcagcaccctggaggccctggaggtactccaaagattcaggtttactcacgtcatccagc

SEQ ID NO: 151089 - DNA, 100 bp, Homo sapiens
gccacctacagaaacaaaatgtcaacaaattgatggttgcctgtgtccctggagtgttacacagtgcctcctgaagacaacctggccctccttcagctct

SEQ ID NO: 151090 - DNA, 82 bp, Homo sapiens
ccaacccactttctcggcgccgcggctcttttctaaaagtttgcatccaagaattgatgcccggagagctgatgaaaacctt

SEQ ID NO: 151091 - DNA, 49 bp, Homo sapiens
ctgccctgcgcgctgctggctggggacaccgtggtgtttaaggatggcc

SEQ ID NO: 151092 - DNA, 83 bp, Homo sapiens
ctctgctgtgggcgctgctggcgctctggctgtgctgcgcgacccccgcgcatggttgtgaccgagattcccgacgagagaga

SEQ ID NO: 151093 - DNA, 100 bp, Homo sapiens
cggagggagagcaggagccactgagatgaggaggcgtcgcgcgcgcctgtagctcgcgggcctcgcaggctctcaaaattagagagatgtgtaattgtcc

SEQ ID NO: 151094 - DNA, 90 bp, Homo sapiens
tcatggaggattattttgcttttcggaacttcctttacctacgccttgatggcagcatggtgattcatttgatgcttccagaaaccagag

SEQ ID NO: 151095 - DNA, 99 bp, Homo sapiens
cagcgtagcccgagtcggtcagcgccggagcaaacatgtactgaatgactgctgtgtgtcaggcactgggaatacaaagacactgagattggtccctcc

SEQ ID NO: 151096 - DNA, 80 bp, Homo sapiens
ctccgcctctatgtggagactgaggacggtgctggagaatctggtaaaagcaccattgtgaagcagatgaggatcctgca

SEQ ID NO: 151097 - DNA, 82 bp, Homo sapiens
ctactctctctttctggcctggaggctatccagcttaataaaggtatccatggagaacactgaaaactcagtggattcaaaa

SEQ ID NO: 151098 - DNA, 75 bp, Homo sapiens
catcctggaagctgggaaatgccaccttttgtggtgacattggatgaggtagagctgatccactttgagcgggtc

SEQ ID NO: 151099 - DNA, 100 bp, Homo sapiens
caagaacaagggccgcgatgtggaagcttcagaagaagtgtctaaatcactgcaagcaatgaaagaaattctgtgtggtacaaacgagaaagaaccccca

SEQ ID NO: 151100 - DNA, 106 bp, Homo sapiens
gaaagtcggccaagaaagacaaagacccagtgaacaaatccgggggcaaggccaaaaagaaggtatccagtgaattttttgaagaaggatttatggctgacgttga

SEQ ID NO: 151101 - DNA, 95 bp, Homo sapiens
acatctcgctgtaatgcagtgggagtcttattgttacaggtatcgctgtgctgctcggagccagaacacacctgatagctctgcttcgaatctgg

SEQ ID NO: 151102 - DNA, 75 bp, Homo sapiens
aagaggaagcctgggaagcatcacataagtgctgactgggttacttttttaaacactaggaatggtaatttctac

SEQ ID NO: 151103 - DNA, 50 bp, Homo sapiens
attttcaatagcagtataaaagcgactgcatttgcctccagacttgtcag

SEQ ID NO: 151104 - DNA, 108 bp, Homo sapiens
caaaattaccacatcccacccaagagttccatccctcactacagtgccacagacacaaggccagaccacagggtctagtggacagagaagactcttggccaggcagat

SEQ ID NO: 151105 - DNA, 59 bp, Homo sapiens
atccccagtcctcctgtgcaagttggacctggacaagggtgaagttgaacaaattgcta

SEQ ID NO: 151106 - DNA, 75 bp, Homo sapiens
gccgccctgggccgggccccaccggacggtgtggacactgccagcggctgcagccgacttggaatgacctgggag

SEQ ID NO: 151107 - DNA, 98 bp, Homo sapiens
gagccctggactgtgaagagtgaggagaccatagctgcacagccagtgaagacctaggaaaggacgttgaatttgaagttgttggtgatgccccggaa

SEQ ID NO: 151108 - DNA, 83 bp, Homo sapiens
aatgcagctgtgaacgatcagagatgcttgggatttgctttacattctaagtggatttggagaagagacaataaagaataagc

SEQ ID NO: 151109 - DNA, 100 bp, Homo sapiens
cttcggagaagcagtggtgggttccatgtgatggtggagtaggaggcaggtctccgcggcagagatcctacaagaatccaggatgatgatcccagattgc

SEQ ID NO: 151110 - DNA, 101 bp, Homo sapiens
gccagcagcagccggatgcagtgcccccagcgccaggggctccggcatgtgctgcggtgtgtcgcggggtgcccaggcctggaggaactctaccttgagtc

SEQ ID NO: 151111 - DNA, 82 bp, Homo sapiens
agatcctgatttgaatgctgtcctttataccaaccgggcagcagcacagtactatctggaatatactgatgataatgctctg

SEQ ID NO: 151112 - DNA, 100 bp, Homo sapiens
tacaaccacccagaacactggcttttcctttggtaataccagcaccataggacagccaagcaccaacaccatggcagttaacatcactgacctgagcgag

SEQ ID NO: 151113 - DNA, 80 bp, Homo sapiens
ctttctcaaaccaaggctgctgatacattaattgtttggtcagaagcagagaactatgatttggctctgagttttcagga

SEQ ID NO: 151114 - DNA, 90 bp, Homo sapiens
ggagaagagccatggatatcagagggagaaatccaacgacctttctatccaggatggtgattgctcacaccaaagccttggacccctccc

SEQ ID NO: 151115 - DNA, 98 bp, Homo sapiens
cgggcctggcggacgcggcgccatcgcagtcaggtgggcattcacgctgatcatcatctcatcctacacggccaacctggcagccttcctgaccgtgc

SEQ ID NO: 151116 - DNA, 83 bp, Homo sapiens
cttggagctgccgccgccgggactcccgtcccagcagtttgaaggatgacctctaggaagaaagtgttgctgaaggttatcat

SEQ ID NO: 151117 - DNA, 101 bp, Homo sapiens
cacgctcggaggacagctcctgcctgcagcttccagacccagagctggagataagatgggtagactgctacttcccttttacacatccttcctttgagatg

SEQ ID NO: 151118 - DNA, 98 bp, Homo sapiens
gcgacctcggtacctcggaccagctctgtaaaagccccgcctctgccttcggatagatataaagacctgatgccacatgatttggctagagcagcgct

SEQ ID NO: 151119 - DNA, 100 bp, Homo sapiens
aaaaatctcaaggaaaagtattgcaagcaacagtagtcgctgttggatcgggttctaaaggaaagaagaaagccagccgccacataaaaggtgaagacaa

SEQ ID NO: 151120 - DNA, 100 bp, Homo sapiens
gcccagcccgcgcctgagaaggtcaaggtggaggtgaagaagtttgtgaagatcggccgcccgggctacaaaggtcccatccggaagatggatcggcttc

SEQ ID NO: 151121 - DNA, 116 bp, Homo sapiens
gtctgctccggatggctccgcaagtcccccccggagaaaaagttgaagcgttatgtttcccaaaccactccttatgatccagtgaatattcaagagagctacatttgaagcctgta

SEQ ID NO: 151122 - DNA, 100 bp, Homo sapiens
agaaaccacagagtacttaaaaacatcatggatcaatctcaaacaaaggaaataaagtctttgcttttgctttttggaggtcagtttgccagcagtcaag

SEQ ID NO: 151123 - DNA, 101 bp, Homo sapiens
gcgacaagccgctggcagccgcggatctcaccgccgctcaggcccgcggcgccatggctcacgtcggctcccgcaagcgctcgaggagtcgcagccggtcc

SEQ ID NO: 151124 - DNA, 100 bp, Homo sapiens
agttttccacatatggtgctttctcttcatcagaagcacttttcaggattagaagaggctgtgtatagaaacatacaagcttgcaaggagcttgcccaaa

SEQ ID NO: 151125 - DNA, 80 bp, Homo sapiens
gtgccctttccacccacctgggctgaggaccctgggccagcctatggagatggtctcctctgagcctccggcctccataa

SEQ ID NO: 151126 - DNA, 75 bp, Homo sapiens
tcgcggcagcaacacgatcggcgcccgcctgaaccgagtagaagacaagggctctcaaagacttcagaccaggcc

SEQ ID NO: 151127 - DNA, 76 bp, Homo sapiens
tcttcactgtattagtgaatccgataaggacacagcattgttggttttgccatgtactattttacctatgacccgt

SEQ ID NO: 151128 - DNA, 75 bp, Homo sapiens
ggaatgtctttcctaccatctaaaatacgaaggtttctggctgggtagttgtttgtgtgtcagctggatacagac

SEQ ID NO: 151129 - DNA, 74 bp, Homo sapiens
gtttttcgccgtcatgggcgcctcggccgccatggtcttcagcgcaggttcaggagaagtggcacctggtggag

SEQ ID NO: 151130 - DNA, 100 bp, Homo sapiens
gagttcccaaaaagctccgcaggggctgtagggagggtgatgaattagaagacaatggaaagaatttctacgaatctgatgatgatcagaaggaaaagac

SEQ ID NO: 151131 - DNA, 83 bp, Homo sapiens
cggacggggagctgaacgtggacagcctcatcacccggctgctggaggcttccatgaggcaggctgaacctgcagatatgcgc

SEQ ID NO: 151132 - DNA, 74 bp, Homo sapiens
tcagcatttaataacaaatagctttgtagagagaactcaatttcctgtatctactgagtctcaaaaaccccggc

SEQ ID NO: 151133 - DNA, 50 bp, Homo sapiens
aggaaaacaacttcgagggcagactatgcagatacaatgttttccctcct

SEQ ID NO: 151134 - DNA, 75 bp, Homo sapiens
acgaagtggcagaggaacttagagacggtggctcagggagtaaaggaaggccagttgagcaaacagaagtgttcc

SEQ ID NO: 151135 - DNA, 100 bp, Homo sapiens
cacaagtccatgctgctgccgttaatggagataagggtgctctacagaggctcatcgtagacaaatttacatgtattggagaccagaccagaagcccttc

SEQ ID NO: 151136 - DNA, 75 bp, Homo sapiens
tttataccgagtccactttcttctcgggcctgcttccgcgaggccaacatcccaacccacttcgggagaagaacc

SEQ ID NO: 151137 - DNA, 85 bp, Homo sapiens
tggatccaaccgaagagaaaggggtgctccaccactccctcccatcccgagagaggaagatgtctacattggatatttgcctctg

SEQ ID NO: 151138 - DNA, 75 bp, Homo sapiens
catcctgccaaactccaggctcagatgtcacaggtgcttgtgagtgaggattctgacagtgatggcattgtggcc

SEQ ID NO: 151139 - DNA, 75 bp, Homo sapiens
gacggtaggagcctccgtgcggagaccactgttcaaggccacaggcctgagacctgggaggaagctggagaaaag

SEQ ID NO: 151140 - DNA, 99 bp, Homo sapiens
ccggaggacggctcagcggtctgatgcctggagcaccactgcagccagaaagcgagggtgattctgggggcccacttgtctgtaatggtgtgcttcaag

SEQ ID NO: 151141 - DNA, 88 bp, Homo sapiens
cagagctacagatcacaaatgtgatggaggcaaaccagcgggttcgttaccgtgaacgcatcaccattcttcgagggaatcatgagag

SEQ ID NO: 151142 - DNA, 78 bp, Homo sapiens
tgaagctcaagaatccgtaacaaaaacaactaactactctacagttttatagcagaggcttcttagaagcttaaaccc

SEQ ID NO: 151143 - DNA, 83 bp, Homo sapiens
cgccgctcatccccctctcccagcaggtgtggatgaggtcaccattgtcaacattttgaccaaccgcagcaatgcacagagac

SEQ ID NO: 151144 - DNA, 75 bp, Homo sapiens
agcagccgagaacctcggcatcaccagtggcttcgtgaagcccaagctggatactcctgggcatggaagtggatg

SEQ ID NO: 151145 - DNA, 90 bp, Homo sapiens
cggctctccaagttctaccagccctactgtcaagctgagctcccagactctgatacaggctggggatgatgagaagaaccagaggacgat

SEQ ID NO: 151146 - DNA, 101 bp, Homo sapiens
tgcaccagcaagatcggcaggcgagattgcctgacccaggcctgctcggccctcacaggattgacgagatgcctgaggctgccgtgaaatcaacagccaac

SEQ ID NO: 151147 - DNA, 100 bp, Homo sapiens
agccacccatcaaatcagagagaaggaatccaccttcttacgctatggcagctcttagcttctgccagctatgatgacacagtgaagctgtaccgggagg

SEQ ID NO: 151148 - DNA, 98 bp, Homo sapiens
agacgtcgctgaggggcttgcctgaagcgaggggtagtaaacctattgatggcaattttgctgactgtggaagtgactcatccaaactccatgccagc

SEQ ID NO: 151149 - DNA, 75 bp, Homo sapiens
aaacaaagccacccagccaatgaaggaggaggaggagaggaaggcccgcgaggagcaggcccagcgggagcatga

SEQ ID NO: 151150 - DNA, 100 bp, Homo sapiens
gttatctacacacccttctcatggcaatcgagttgagtacttggatagacttatacctcagggtgatcagcccatgacctaaacctccagacaaaataaa

SEQ ID NO: 151151 - DNA, 89 bp, Homo sapiens
tatgggcccgcctgaccctgggcgccgcgccgcacgagcaccagcctagagccagaagttggtgagatggcaaagcagtatatagagaa

SEQ ID NO: 151152 - DNA, 100 bp, Homo sapiens
gcgcctttgagccccagccggaggtccagagatcctgagagcccgagcgcccagcgccgcgccgggagtagacccaaatgatttgtacattgtagaaccc

SEQ ID NO: 151153 - DNA, 75 bp, Homo sapiens
gagctgtatggagcagttgacacgtagtcactgggaaggatttgcctctggtattctctgaaaccaaatgaccaa

SEQ ID NO: 151154 - DNA, 100 bp, Homo sapiens
cttcgagatggtgatgcgggcccgggacaacgtgtatcacctcgactgcttcgcctgccagctctgcaaccagagtacccagacagaccatagtgatgtt

SEQ ID NO: 151155 - DNA, 82 bp, Homo sapiens
gccggagctaacctcggggaccgagatgcagtgtactaatggtcacttgatgtgcgctggctgttttatccacctactagca

SEQ ID NO: 151156 - DNA, 90 bp, Homo sapiens
gcggggcgcggcgggaaggagcgggcgacccggtgtgtgggccagcggagctccgatcagaccccaacaccaacaagattcttgaaaaac

SEQ ID NO: 151157 - DNA, 100 bp, Homo sapiens
ctgcagccccagtctccatacagcgcagcgccccaggtggtggcggggtgtttggcaatcaactcattcctcccaatgcacaagtgaagaaggccactgt

SEQ ID NO: 151158 - DNA, 98 bp, Homo sapiens
ctcttccaggactttgagccagtccagaccctgctgctgtcttcaaagaagaaccgcatgcacgagtctctcatgctcttcgactccatctgtaacaa

SEQ ID NO: 151159 - DNA, 100 bp, Homo sapiens
cgctatggatttcaatccctccgtatgcacatgtgggtagaggacgtgttagacaagttcatgaggtgattatcctgaaccatccaggccaaataagcgc

SEQ ID NO: 151160 - DNA, 51 bp, Homo sapiens
ctcccgagaagctgggattacagatggctgctgctggacacggagacccat

SEQ ID NO: 151161 - DNA, 89 bp, Homo sapiens
gagcagggccccttagcctctgggtttgcgctagcagcgtaagaataacatagctgatccagaagaactgttcacaaaattagagcgca

SEQ ID NO: 151162 - DNA, 97 bp, Homo sapiens
cgtcaagctggccaagcacaaagagcttgctccctacgatgagaactggttctacacgcgagctgttttgcgtttggctccctaatatctgctgtcg

SEQ ID NO: 151163 - DNA, 100 bp, Homo sapiens
cgcccaggcttcttctccagccgcctccactgtagggacatcgaacctcaaaggaaactactaaagttcctggggaagcaaagtagaatttcataagaac

SEQ ID NO: 151164 - DNA, 127 bp, Homo sapiens
ccgagaccgccttgccctccatcagcacactgaccgccctgggccccttcccggacacacaggatgacttcctcaagcaaatcagccggcaccaggagcagttcatccagatgctgaacgagccccc

SEQ ID NO: 151165 - DNA, 90 bp, Homo sapiens
gcaccatcttcaaatttgtggaagcttatcaacaacgaactgtctacagactgatgctcgtgaaagcatggaacgtggacgagctccagg

SEQ ID NO: 151166 - DNA, 76 bp, Homo sapiens
gaaaattgagccaaagcacattggagttggaatgtatcagagattatggagaagtctggcgaggaaggaatgcctg

SEQ ID NO: 151167 - DNA, 75 bp, Homo sapiens
cagacccccccacagacggattgctgtacttgtgttccaggcaagaaaaatctcgttgggaagtcctccaacaag

SEQ ID NO: 151168 - DNA, 96 bp, Homo sapiens
tttactacttccaaattcagctacaagatagactttgcaggcactgccaggggcattgtgattgccacaggagaccggacggtgatgggccgcata

SEQ ID NO: 151169 - DNA, 87 bp, Homo sapiens
ccgctaggctgtctgcctcggtacctgttactgctgctacttcctcgtttgacaccttcctgggaaaacgggccttactatacatca

SEQ ID NO: 151170 - DNA, 74 bp, Homo sapiens
acagccaccgccgagcgagctcaccatgtcggaagatgtttccttccaatgggcttttggtgtaggatgtcgga

SEQ ID NO: 151171 - DNA, 90 bp, Homo sapiens
tgactgggcaacatgttattcagatgagtaacgaaagaggctttgaaaatgtagaactgggagtcataggaaaaaagaagaaagtcccaa

SEQ ID NO: 151172 - DNA, 82 bp, Homo sapiens
cggcctcccaaagtgctgagattacaggcgccatgtcagaaccggctggggatgtccgtcagaacccatgcggcagcaaggc

SEQ ID NO: 151173 - DNA, 100 bp, Homo sapiens
gggtcggccacccttggaaggcattgtttctttaccagctgtctgtgatcctggaaacatacgtgtgactgaagctcccaaacacccaatctctgaagaa

SEQ ID NO: 151174 - DNA, 100 bp, Homo sapiens
ggagcctggccagctgcacttcaaccagctgcagtattgaagtatgagaacaatgttatgaatatcaggcaattcaactgttctcctcatccatactggc

SEQ ID NO: 151175 - DNA, 82 bp, Homo sapiens
aaaattcttcctgggacacaacgacgacattatcagctcattgctatggacagtgctatcaccctgtggcagttccttcttc

SEQ ID NO: 151176 - DNA, 96 bp, Homo sapiens
ttgagaagaggaggaagaataatgggaggagacaggacctttttcaacttgacaaatagatggatcctgagcttgaaaaaaaactgaaagagaata

SEQ ID NO: 151177 - DNA, 83 bp, Homo sapiens
cctgggccgcgcgctatggcaccttcgcctggcccaccactcccagaggccttagcagtaggaggactaggctccattataag

SEQ ID NO: 151178 - DNA, 89 bp, Homo sapiens
acccgaatgtgcaccatccgcatgagcttcgtcaaaggctggggagcggagtacaggaccatccacctgaccatgccccaactggtgct

SEQ ID NO: 151179 - DNA, 80 bp, Homo sapiens
cgcgcgggagccagcaggagcaccagctgcgcaggcaggactacatacggacctgcatcatgaacaatggggttgggtac

SEQ ID NO: 151180 - DNA, 100 bp, Homo sapiens
tgaagttcgagcactaatatttaagaaagaagatgttaactttcaggttttaaaatcaaagatgggaaaatcggagaaaattgcccttccccatggccag

SEQ ID NO: 151181 - DNA, 99 bp, Homo sapiens
aacggagccagcggctgaggaggggccccagcagcccccgaaggccctatcaggacatggagtatgaaagacggtgtgacgtatgcagccaaaggctac

SEQ ID NO: 151182 - DNA, 100 bp, Homo sapiens
ggagctgctatggtgctgagtttcctggtagagccggccgagctgaggcggtcgcggccatgaagatccatgtggtttcccagtttaagattctggtcag

SEQ ID NO: 151183 - DNA, 75 bp, Homo sapiens
taaatgaaagtgatgaagttgaggagcatggcttgaacttccagagactcctggacaccagcacctacaaggagg

SEQ ID NO: 151184 - DNA, 75 bp, Homo sapiens
tgacaaccaggcaatgctggatagataccgaattcttatcacaaaggaggagccgatcactttctgtgaggaagc

SEQ ID NO: 151185 - DNA, 100 bp, Homo sapiens
gtcaaagtctacccctcctgtcggggaggcaaggtggttttggaccagacaggcgtgtctaagattatatgcgtcaggcaggagaagtgacttatgcaga

SEQ ID NO: 151186 - DNA, 50 bp, Homo sapiens
caacagttcaccaccattaccgtgtttacaggcattggagtttttacatg

SEQ ID NO: 151187 - DNA, 82 bp, Homo sapiens
ggcagaagaagaaaagaggagagttgaaagagaacagcaaggacacccaggcccattattttcctccagcctccatggacca

SEQ ID NO: 151188 - DNA, 82 bp, Homo sapiens
cttttattctctaaggcagatggctactcagagatttcctaatgacagtcatgtccctttccagggacctcaaggacgactt

SEQ ID NO: 151189 - DNA, 75 bp, Homo sapiens
gtcgacgacttcagtgatcgaggaaattgattccagtggaaacattaactcctgaaattgctttgtattggtgtg

SEQ ID NO: 151190 - DNA, 89 bp, Homo sapiens
ttcaaagggaatacattgccagaacttggaatactctactggacaaacatttcctccaagatcctgataacttaagtgactctctcttt

SEQ ID NO: 151191 - DNA, 90 bp, Homo sapiens
tggcacttgtcctcctgtttctatagaaactgggttggaagtcagagctgcacaaagggaaaggccaatgttttcagttgcaccaagctt

SEQ ID NO: 151192 - DNA, 75 bp, Homo sapiens
ctggaggctgagtacgacagcctcaaacaggagctggagcagctcaaagaggattcctacaggaagcaagtagta

SEQ ID NO: 151193 - DNA, 82 bp, Homo sapiens
aaggaatcgtatcgtatgtccgctatccagaacctccactctttcgatgtgaagttcatttccaatccgccctccatggtgg

SEQ ID NO: 151194 - DNA, 100 bp, Homo sapiens
aaattccttcaaaagaatggacgatgaggataaacagctgaacatccatgtgggaaacatttccctggtggaccagtttgagtgggacatgtcagagaag

SEQ ID NO: 151195 - DNA, 82 bp, Homo sapiens
tggaggattgtcactccaacctcttttcgctgggaagaacctacggcagatgagcaaggactaccaacaagtgttgctggac

SEQ ID NO: 151196 - DNA, 83 bp, Homo sapiens
ctcggagacgagtggtgggagaaccagccgactggagcaggcagcagcccaggtgaaagcccagcctccgtggttcttaatgc

SEQ ID NO: 151197 - DNA, 96 bp, Homo sapiens
ccgcagagaaattcagaacctcaagcttttcaggcatcctcatataattaaactttctttccaaatggcaatgcatttgccactggctcagacgac

SEQ ID NO: 151198 - DNA, 111 bp, Homo sapiens
ccccgctctgctgtgggcgctgctggcgctctggctgtgctgcgcgacccccgcgcatgggggatatgagactttctactcggaatatcctgagtgttgcgtggatgtaaa

SEQ ID NO: 151199 - DNA, 100 bp, Homo sapiens
tctgcggggcatcgtgtctcgaccgcgtcttctgagtcagtgatgaatcaccaacaccagcagcagatggcccccagtaccctgagccagcagaaccacc

SEQ ID NO: 151200 - DNA, 100 bp, Homo sapiens
ctgagctgaaggtgcgcagggacccccaggtgagccccatgcactgcctggacgaggaaggcgatgactcagatgggctctggcaggctgccctgagcac

SEQ ID NO: 151201 - DNA, 82 bp, Homo sapiens
cgcccgtgggggctgagcccgccgtctacccgtggccgctgccggtctacgcctgcattgatgagaacctggaggtggtgcg

SEQ ID NO: 151202 - DNA, 100 bp, Homo sapiens
cgatcatggcggatggcccccggtgcaagaggcgcaaacaagccaatcccaggaggaaaaacgttttctggatatgccgcagaaggatccgtgccagaag

SEQ ID NO: 151203 - DNA, 76 bp, Homo sapiens
gaaggttcaattatgtggtcaaatagtattattgattccacagaatacagccaacctccaggtttcagtggcagtt

SEQ ID NO: 151204 - DNA, 82 bp, Homo sapiens
tccagaacgtgccatggagacgcttaacgattgactttgaagatgtgattgcagaaccagaagggacacacagttttgacgg

SEQ ID NO: 151205 - DNA, 76 bp, Homo sapiens
atcgacattgatgacaaggagcccctcatccccatccaggtttggtgcacctcgatttggaggaagtagggcaggg

SEQ ID NO: 151206 - DNA, 100 bp, Homo sapiens
agctcctggtcgatgaagaggatgatgtttttggtgaagatgggagattctttggtcagagagacctacgaaggtgaatgcttcccaagctcgccagttt

SEQ ID NO: 151207 - DNA, 75 bp, Homo sapiens
atggccccgaccgcgtgctggagctcttcgacccacccaaggacgactgggtttggattcagaagaggattatta

SEQ ID NO: 151208 - DNA, 90 bp, Homo sapiens
tgagacatgagatcttcagcctccaggctctccagtttttcgtcgagagattcactatggaatcgtgccctcggctagcatgacccgcct

SEQ ID NO: 151209 - DNA, 75 bp, Homo sapiens
aaacagacagatttgtcatgaagaaactcaatgatcgtgtcatgagatcaggacagttcaacgaggacatgatcc

SEQ ID NO: 151210 - DNA, 100 bp, Homo sapiens
tgaaatcattgaagtgcttggagtgcagaactgaaagaggttagcatggcctcattgaaagaactagatcaaagactctttgaaaattacatcgagttga

SEQ ID NO: 151211 - DNA, 101 bp, Homo sapiens
ctcctgctgcagcagcagcgcctgggccgcgcgctatggcaccttcgcctggcccaccactcccagaggtgtggacactgccagcggctgcagccgacttg

SEQ ID NO: 151212 - DNA, 100 bp, Homo sapiens
cagaaacaggctccaggccctgcctgccctgtgcctctgcgtgctggtcctggcctgcattgggggagcaactttcagccagaggcatggatgcttctct

SEQ ID NO: 151213 - DNA, 76 bp, Homo sapiens
gggaaggcactcaaaagtggggggcaggaaaggtgcttttgaagatgatgatatcacgcacgttgaaggaagtgta

SEQ ID NO: 151214 - DNA, 83 bp, Homo sapiens
gcaagaggcggatggacacggacgtggtcaagctggcttggcaactcttgtgaaatttcatagatctcgtcgcttactgggag

SEQ ID NO: 151215 - DNA, 83 bp, Homo sapiens
ctccagcaggacctccgccctcctctccggctttgccatgcttcttggacacttaatgattgttggcaagaaatgtgctgctg

SEQ ID NO: 151216 - DNA, 90 bp, Homo sapiens
caaaagatgattttacatccattattgggaaatgtcaagggaaatcctcattgacgattcaatttgttgaaggccaatttgtggactcct

SEQ ID NO: 151217 - DNA, 100 bp, Homo sapiens
ttggtgaagttgaatctgcaaaacttattcgggataaagtagcaggtgtcatggagaaactccagctgggcccagagattctgcagcgggaaaatccaag

SEQ ID NO: 151218 - DNA, 50 bp, Homo sapiens
cggagctcccccaagagccggaaagatgaaggatttgggggcagagcact

SEQ ID NO: 151219 - DNA, 90 bp, Homo sapiens
gcttaccctccgggggtaaaagagatcaccgacaagatcaccacggacgagatgatcaaacgcctgaagctgccactgcagagccccgcc

SEQ ID NO: 151220 - DNA, 100 bp, Homo sapiens
tggagcaaataaaagagccctgcaatttgaagatacatgagacagcagccaaacccccagctgagcgggctttggacaccatgaactttgatgtgattaa

SEQ ID NO: 151221 - DNA, 82 bp, Homo sapiens
gcagcgggagctggacggcgagcgcgagcggcgcgagaaaaaagaagcttccggttctgaggtcctggaggtgccatttccc

SEQ ID NO: 151222 - DNA, 82 bp, Homo sapiens
ccgaaggaaaaggaggaattcgccgtgcccgagaatagctccgtccagcagaattcagaaggagctggcggacatcacttta

SEQ ID NO: 151223 - DNA, 51 bp, Homo sapiens
ctccgctgctgaaccaaacgaaagaggccagaacacaaagcgtgaatccgg

SEQ ID NO: 151224 - DNA, 75 bp, Homo sapiens
acacacgctctgtggaggacctgcagtggtcaccgactgagaacacggtggcttcccacacttctgactcggacg

SEQ ID NO: 151225 - DNA, 75 bp, Homo sapiens
tcctaacttaatcaacaacctggaaacattctttgaattggattatcccaaagctggacgtaaagaaagaagtga

SEQ ID NO: 151226 - DNA, 80 bp, Homo sapiens
tgagatttaccgggattacagtgcggacggccagcttcttcactacagttttccaagagataacttcaccaagatgtcca

SEQ ID NO: 151227 - DNA, 134 bp, Homo sapiens
cttggccccgcgcagcgtctggtcactcgctctcctctggggactgcagagaagcaggacctcgggccatgggtgagcctgaatttaaatacattgggaatatgcatgggaatgaggctgttggacgagaactg

SEQ ID NO: 151228 - DNA, 80 bp, Homo sapiens
cttttggggggaaactaggtcgatggtcggcggcgcccggatgggcagctgagagctgtaactgaagttcgtgaagtcac

SEQ ID NO: 151229 - DNA, 78 bp, Homo sapiens
acttaataaatcaagtcctatttgtgaatggaaaggactggaagttcaccttaaaacaatcatcctcttccagtggta

SEQ ID NO: 151230 - DNA, 74 bp, Homo sapiens
ttcgtcaccccagaccttgccagagacctggcaaatgacatcatgacactgccgcggcgagtcctttgcacatg

SEQ ID NO: 151231 - DNA, 75 bp, Homo sapiens
aacactcaagtgaagcaaaagccttccatgattacgcgaatttccttttgcaaaatgttttgtttgtggagaaat

SEQ ID NO: 151232 - DNA, 96 bp, Homo sapiens
tcattttatgtgggaggatgttcagcagcgcggcagagtcatggggagacggtctcgccacattgcccagactggtctgaaagtcttgggctcaag

SEQ ID NO: 151233 - DNA, 100 bp, Homo sapiens
ctggacccgagccagcgaccgaagcagaaggctgtcacccttgacccaaactttctggatgcttatatcaatttaggaaatgtcttgaaagaggcacgca

SEQ ID NO: 151234 - DNA, 75 bp, Homo sapiens
gggccatgtcggtgggcgagctctacagccaggtgagaagccctaccactgcaactgggacggctgcggctggaa

SEQ ID NO: 151235 - DNA, 100 bp, Homo sapiens
tacgtagtcacggtcttgtgctctaaggtttccaatacttatctacaggaatcgccatgaccccagctctgagggaggcaacagcaaagggtatcagctt

SEQ ID NO: 151236 - DNA, 75 bp, Homo sapiens
cccgcttcagcctcccaaagcattgggcttacaggagccgaatcagaaatgtcatcctcaggcacgccagactta

SEQ ID NO: 151237 - DNA, 75 bp, Homo sapiens
caacaagacagagctggcctggagtccgcggctggccgcgtgagtagtcatattccagagagactctgtgaaagt

SEQ ID NO: 151238 - DNA, 75 bp, Homo sapiens
tccaaaagagtctcaaggatccttcaaataacttcagggaaagctggcagttaaggaaaggagtaagtgaaattg

SEQ ID NO: 151239 - DNA, 90 bp, Homo sapiens
caagaagtggccggagagttctgcatgttgattcgaagtgctctctggcgtggtggtcatatcgagtaaggattcagtccaacaccaggg

SEQ ID NO: 151240 - DNA, 90 bp, Homo sapiens
cgagagcgcctgccgcccctgcgccgccgagccagctgccaggctctccaatccagtgttgaatagaagtgatgatagtggacatcttta

SEQ ID NO: 151241 - DNA, 98 bp, Homo sapiens
gccgaggacacaccgctggatcagtgtaaggtgagcatgggtttatgcgtcttaggcattattgtgatggcgagcaccaattctctgatgtggacctt

SEQ ID NO: 151242 - DNA, 75 bp, Homo sapiens
ggcctacatcccacagagatacccagacaacaggatcgtctcgtccaagcacacgccaaagaagatgagtcaagg

SEQ ID NO: 151243 - DNA, 83 bp, Homo sapiens
gcaggcagccgtggatgccgtggcccgggtcactggccagcaccccgaggcatccgtgggctctgagaagctctttgcgccgg

SEQ ID NO: 151244 - DNA, 100 bp, Homo sapiens
ctggcacgccttcaccgcactcgaccaggaccacagcggcaaggtctccaagtcccagctcaaggccagctgcgggccgtccagcggctgtgccacttct

SEQ ID NO: 151245 - DNA, 74 bp, Homo sapiens
gcgttgcattgcctgcaagctctgcgaggccatctgccccgcccagatgagacgtgcaggtaccatcaggaagc

SEQ ID NO: 151246 - DNA, 82 bp, Homo sapiens
attctggtgcttatggtgcctcagtacgagctcaactggaggcagtcctgtgcggaaatctgaagaaaaaacagatacaaag

SEQ ID NO: 151247 - DNA, 104 bp, Homo sapiens
ctgatctccatgtcctgttgtggggcttttacagcctttgggattatatgcgtcaggcaggagaagtgacttatgcagatgctcacaagggacgcaaaaatgaa

SEQ ID NO: 151248 - DNA, 90 bp, Homo sapiens
agagccggcggatgttcatgggcagcaccatcgagccagaagcagtatttgtcctgagaggtggagaagagcgagtacttgagaaagaag

SEQ ID NO: 151249 - DNA, 75 bp, Homo sapiens
gatctgaagagctatggtgaaacaccactgaagcattgccaagcaaaaaatcccagaagtgggatgaaatgaaca

SEQ ID NO: 151250 - DNA, 100 bp, Homo sapiens
tccttgtggaggaagagattgctctgtttgccactgtgttcctgaaaaggggtctcggcactttcagaccatgctgaagtctaaattgaatgtcttaaca

SEQ ID NO: 151251 - DNA, 51 bp, Homo sapiens
ttggcagcaacatgaagatcattttgagaccgtccaggctggacttgaact

SEQ ID NO: 151252 - DNA, 74 bp, Homo sapiens
tgctctcaactacaacatcgtttcagggtgctgaccttaaggaaagagccaaaatgagttccagtgaagttggt

SEQ ID NO: 151253 - DNA, 100 bp, Homo sapiens
atgcagtcccccaggatacagggtcaaaggagagcacaaccatcgcagttggaagcccatggggcagggcatatcgatgcatttacttcaaaactttttc

SEQ ID NO: 151254 - DNA, 74 bp, Homo sapiens
gccaagttagatgccgattacccacttcgagtcctttattgtggagatggcccactgcgtgaccttggttcagc

SEQ ID NO: 151255 - DNA, 107 bp, Homo sapiens
caacaatcccaagaagcaggaatgaaagtggcgctttctccgccccagaacaggccgcccgcctgaagaaactacaagagcaagagaaacaacagaaagtggagttt

SEQ ID NO: 151256 - DNA, 100 bp, Homo sapiens
ggggtactcggaaggcgcgggcaggagcctggcgaggatgcaccttcccctgccttggaaagttatcaggaactgttgccgttattacatcagatgggag

SEQ ID NO: 151257 - DNA, 85 bp, Homo sapiens
tggagcagcagcgggccgcaggcctccgccggcgcctggtgtgcttcaccatggaggaagttgtggaaagtaaaaatgtagccct

SEQ ID NO: 151258 - DNA, 50 bp, Homo sapiens
gtgccaggatctgcccggatccgagcctcctcaacaagcccaagagtgag

SEQ ID NO: 151259 - DNA, 100 bp, Homo sapiens
ctcgaaatggaccccaactgctcctgctcgcctgtgaaatgcaaaatggaggacgatgcagtacctgcagccaagatgaaaattccatcatcttaaccat

SEQ ID NO: 151260 - DNA, 82 bp, Homo sapiens
tgaagagtccttcaaaaatgccagaaatcaacgccaagcttggatttacactgggcaacgtggttggaatgtatctggctca

SEQ ID NO: 151261 - DNA, 90 bp, Homo sapiens
ctttgtgaaggtggtgcccactgtgtacatgaaggtggacggagagacctgcgaccgcatcaagcagtccgccagcggaaccaagcggcg

SEQ ID NO: 151262 - DNA, 83 bp, Homo sapiens
ctgccggcacgcgactccccccgggcccaaagatagctagcggccaggagaaatacagtggaaaatgcaaaacaacgaaatta

SEQ ID NO: 151263 - DNA, 75 bp, Homo sapiens
cgggagcaccggggctccgtcatctgtctggagccaacacaagccatcagccccatgctcagctcccagcaggca

SEQ ID NO: 151264 - DNA, 75 bp, Homo sapiens
cagacgcttcctatccctacaaagccatgttacacccccagattaccagcctcccggttttaaggatggtgattg

SEQ ID NO: 151265 - DNA, 74 bp, Homo sapiens
ggaatctatagttaatcttggcgacattgacaatgatggctttgaaggttgtttacattcagagctctatcaat

SEQ ID NO: 151266 - DNA, 80 bp, Homo sapiens
ctcaatatctgtcttcggtggactccttcggcagtccacccaccgccgccgcctcccagactgtgtcagggaaaagggag

SEQ ID NO: 151267 - DNA, 98 bp, Homo sapiens
tctgcgtccaggcccctacatctgcagtgagatggacctcgggggcttgcccagctggctcctgcaagacccccggttactgttgaggacaaccaaca

SEQ ID NO: 151268 - DNA, 82 bp, Homo sapiens
tgctaacagaactggaccttttcggaatctctgaaggaagaagatgaatcagatgatgataatatgtaacatttactccagc

SEQ ID NO: 151269 - DNA, 100 bp, Homo sapiens
ggagcaacgtcacgctcatcaccctgaactcggaaggaagacctggaagcgctcatagcccatttccagacactcgatgccaagaggactcagactgtgg

SEQ ID NO: 151270 - DNA, 83 bp, Homo sapiens
gactacaagcatcactggcaaggaactgtggctgcaccatctgtcttcatcttcccgccatctgatgagcagttgaaatctgg

SEQ ID NO: 151271 - DNA, 97 bp, Homo sapiens
atcgtcactgaggttgcagttggcgtgaagcagatataatttctacagtagaatttaatcattctggagaattactagcaacaggagataaaggtgg

SEQ ID NO: 151272 - DNA, 82 bp, Homo sapiens
tcattgtcttttccgcccgcttcgatcgcctcgcgccggctgctctttccgggtaagaatgattgatgttggctgatattgg

SEQ ID NO: 151273 - DNA, 100 bp, Homo sapiens
cgaccgcacacgttgccaccctgaggtggtggctaatgccgtagcggcattatctgaaatcagtgagtctcacccaaacagcaacttacttgatctgaac

SEQ ID NO: 151274 - DNA, 89 bp, Homo sapiens
cccagcacgcctgggccgggggctgcagcatgcagcgtccgtctccaagagagtatgaagagagtgcgtctgtagggcagggaagatgg

SEQ ID NO: 151275 - DNA, 98 bp, Homo sapiens
agagctcccagggcggacagcagcctcgggtgcaatcctggagccccccagtgagggcgccttcgccaaggtgaaggagagccaacgcatgagtgacg

SEQ ID NO: 151276 - DNA, 82 bp, Homo sapiens
aaacttgcaaaagtatctcatatgaccagtgaacaccttccaccatgaccacctcagcaagttcccacttaaataaaggcat

SEQ ID NO: 151277 - DNA, 99 bp, Homo sapiens
gcagaagcggcggcgacacgacgcgcagcagctgcagcagctcaagcacctggagtccttgaaatgcttccagactgcacacttttacttagaggacag

SEQ ID NO: 151278 - DNA, 100 bp, Homo sapiens
agcgctatgcctgcggcggagactgcatcaggctctcggaatgtatcctgtcaggtataatgtcagtgaatggcaagaaagttcttcatatggatcgaaa

SEQ ID NO: 151279 - DNA, 82 bp, Homo sapiens
acaaaatgcaaaaaaggaggccaaagacttttcagatgagtgagcctcatagcggtttgacgctcaaatgtgccaagtgtgg

SEQ ID NO: 151280 - DNA, 75 bp, Homo sapiens
agcggcgatttcgtctacttcgacggccgcgaccgggagagaatgcagtaatagtggccttgtcttcaaaatcat

SEQ ID NO: 151281 - DNA, 100 bp, Homo sapiens
gcacagagctgtaccagtacacggcccacgttgccagattgatgaggacatgactgcccgaattagcatggctgatgtcaagttctctttccaatgtcct

SEQ ID NO: 151282 - DNA, 100 bp, Homo sapiens
cttcccagaatcccttctctgaagacaagacggacaaggttgcacactgggccacagaggatccagcaaggatgaagaaatggagcagcacagacttggg

SEQ ID NO: 151283 - DNA, 83 bp, Homo sapiens
gggaggtgttcgagaacgaccccgagacggtgctgcagggtgcacagctgatcgccgtggcctcctcggaccccgcggcggcg

SEQ ID NO: 151284 - DNA, 100 bp, Homo sapiens
ccgggagtccccactgtctctctacaatgaggagctggtgaggtttacccaaggtccagcctagcccctaggcaccatgtcggacagtgatctaggtgag

SEQ ID NO: 151285 - DNA, 100 bp, Homo sapiens
cacaaacgccgcaccaggtcttgtagcagcgcctcctcgatttggagcaagaggtggtggtggccttcccccgaagaaatttggtaatcctggggagcgt

SEQ ID NO: 151286 - DNA, 98 bp, Homo sapiens
ttgggttcagttttcttcagaagaaggacttcggaatgcactacaacaggaaaatcatattatagatggagtaaagaccaagatgaagagacgagctg

SEQ ID NO: 151287 - DNA, 75 bp, Homo sapiens
aaaagtaccaggggcttgtggtaaaacaggaacagctattacgagggcacacgtgtttcacgttgacaggtttgc

SEQ ID NO: 151288 - DNA, 90 bp, Homo sapiens
gatggttccatcatggcgtcaatgcagccggactactttagttctgtggccacagtggtgtatcttcgcaaagagaactgcatgtaccaa

SEQ ID NO: 151289 - DNA, 101 bp, Homo sapiens
ctgaggccccaggcatcagagatcatgagaggcgagatccctccaaaatcaagtggggcgatgctggcgctgagtacgtcgtggagtccactggcgtcttc

SEQ ID NO: 151290 - DNA, 82 bp, Homo sapiens
ccccgcgcgccgcggctcctgttgacccggtccgcccgtcggtctgcagcgcggctgagcctgaaaaaggactgcgcggact

SEQ ID NO: 151291 - DNA, 83 bp, Homo sapiens
cttctggattacaggccaaattagcaagcagagatcctacaagaatccaggatgatgatcccagattgccagcgcaggttgga

SEQ ID NO: 151292 - DNA, 75 bp, Homo sapiens
aaagctatctgctgtgagacacaatgagaaatgcttttgtgtaaaggcatacaagaattaaattctgaataagtc

SEQ ID NO: 151293 - DNA, 83 bp, Homo sapiens
ttaatcatgaggattatggattaagtattaccaaaggagctccttaataagcatttatagtcagtttttggcagcaatagaat

SEQ ID NO: 151294 - DNA, 75 bp, Homo sapiens
agcagacattgacctcaccaagagggcgggagaactcactgaggatgagatgcgtctgatggaggaagagttacg

SEQ ID NO: 151295 - DNA, 100 bp, Homo sapiens
cttgccgctgctgtcctgcgaccccaagcaggttatgaagacagtatggagtttccagaccatagtagacatttgctacagtgtctgagcgagcagagac

SEQ ID NO: 151296 - DNA, 98 bp, Homo sapiens
acagtgaatgtggaaaggagattgacagtcacaattttgtaataaggatactgccacaacatgtcaactgtcctggaggaattaatgcctggaatact

SEQ ID NO: 151297 - DNA, 82 bp, Homo sapiens
cggacggtccttgcattggcctccggcaggcgccccccgggggcgggaagctgagctggactggccattatggaggaggagc

SEQ ID NO: 151298 - DNA, 74 bp, Homo sapiens
aaccagaaagagattgggtacttaatggagagaagtttgctgaggaatgccttcaagcacaaagtgatgaatga

SEQ ID NO: 151299 - DNA, 98 bp, Homo sapiens
gacagattcgcagtggtcgcttcttctccttgacaccaatgagtgcagcatcaacaacggaggctgtcagcaggtctgtgtgaacacagtgggcagct

SEQ ID NO: 151300 - DNA, 98 bp, Homo sapiens
agcattatgggcagacagcggcatacagaatgcctatgaccggcgtcgagaatttcaactggtttggtgcacctcgatttggaggaagtagggcaggg

SEQ ID NO: 151301 - DNA, 75 bp, Homo sapiens
agttgttcattgtttgtcaccacaaaaaggacaggtcgatggccaggtggtcttcataaactatactgccttgtg

SEQ ID NO: 151302 - DNA, 90 bp, Homo sapiens
agcagctcctgcccctgtccgggggatgactgattctcctccgccagccctgccatcactgtgaaccagggcgagatgagcagcccgcag

SEQ ID NO: 151303 - DNA, 97 bp, Homo sapiens
cgccagcagccgtccggagccagccaacgagcgtctgcaaaatgaatgttcaccgtcgatgtgagaccaacgtggctcccaactgtggagtggatgc

SEQ ID NO: 151304 - DNA, 50 bp, Homo sapiens
attctgccctcccggcttcccagtaagaagcctggctacagataagggac

SEQ ID NO: 151305 - DNA, 100 bp, Homo sapiens
attatctaccacccgagatgccccaaggttgaaaggattgttgacaaaaggaaaaataaaaaagggaagacagagtatttggttcggtggaaaggctatg

SEQ ID NO: 151306 - DNA, 100 bp, Homo sapiens
gcgcgcccagagcaagatcctgttcgtgagtgtacggccccctcccgcaaagctttgacaaagagtgggtggccaagcagaccaagaggatgctggacat

SEQ ID NO: 151307 - DNA, 120 bp, Homo sapiens
atctctcagctggagcaagaagaggacctgtgcagggcagagcaggaggccccccgagacaactggaagcaggagctgacaaaattcatcagccccgaccagctgcccgtggagtttggg

SEQ ID NO: 151308 - DNA, 98 bp, Homo sapiens
ttttatgacaggggctgcagaacaaatcaagcacatccttgctaatttcaaaaactaccaggttggaagtcggatcgcagaccgtgtatatgacatac

SEQ ID NO: 151309 - DNA, 82 bp, Homo sapiens
cctgatgaaagcctacgggatccgctttgacgtgatggtgaacggcaagatggtcatcatgggccagtgctactacaacgag

SEQ ID NO: 151310 - DNA, 75 bp, Homo sapiens
tcgtgtgcctgatgatcacgcagctggctggcttcagtggaccagaatctccgtatgttatgatgaagaaaaatc

SEQ ID NO: 151311 - DNA, 78 bp, Homo sapiens
ggagacccacagccacgttagccctgagaccatcaaggttcaagggcagcaggaaagacgagatcctgggcatcgcca

SEQ ID NO: 151312 - DNA, 75 bp, Homo sapiens
catgcaaggatattcctcatatatcatcacttttccagccattaactccaggctctcgagaatttgaagatgttg

SEQ ID NO: 151313 - DNA, 75 bp, Homo sapiens
cgggattggaccgacgcagccatggtgctggagaatctggtaaaagcaccattgtgaagcagatgaggatcctgc

SEQ ID NO: 151314 - DNA, 90 bp, Homo sapiens
gcggggaccgctgtgctctcgcgtcaagggttccacactgttgggagtcgctgcaagaatcggacaggcgctgagcacctgtggctgacc

SEQ ID NO: 151315 - DNA, 75 bp, Homo sapiens
cgcgcctggtatcgggaggtgccgaacactgggactttgaacatgtcggggatcgccctcagcagactcgcccag

SEQ ID NO: 151316 - DNA, 100 bp, Homo sapiens
gccggtccaaggcggtgcgctgggggccggggcgcgtcgcaggtcgccactgggacactgtgaaccaggagtgagtcggagctgccgcgctgcccaggcc

SEQ ID NO: 151317 - DNA, 98 bp, Homo sapiens
cgccgcccccagcccagcccgcccggccgcaggaccgccggggcctggccgccggtccggcgtgcgccaagttcaggccctgggaggagcggggacac

SEQ ID NO: 151318 - DNA, 75 bp, Homo sapiens
cagaatggaagcatacagatctgggaccgaaatttgactgcggctgagccagaggccaactgcagaggaactgga

SEQ ID NO: 151319 - DNA, 96 bp, Homo sapiens
agaaaacagtctggatgctggtgccactaatattgtttgaagaaaacaggtctgaaacaaggtcttacccccagctgcttctgaacacagtgactg

SEQ ID NO: 151320 - DNA, 90 bp, Homo sapiens
agaggttggtaaaaggagattggaaaccagaaggtgatgaatggctgaagatgtcatactatgctaagaaggaatctgatcttaatggcg

SEQ ID NO: 151321 - DNA, 100 bp, Homo sapiens
ttgtctgctgcatccaaatcttctccctggacctcgtgcatacggatgtgggctctcttgatgagaagatgaagagcttggatgtgaatcaggactcgga

SEQ ID NO: 151322 - DNA, 98 bp, Homo sapiens
ttgcatccactttttggctgttctgaagagtgttactgtgaacattcatgcacaaatttttatgtggagtactatactggcaattgctggagaagatt

SEQ ID NO: 151323 - DNA, 82 bp, Homo sapiens
ctggaaagcaagggattgctggctacagcttcagaagaccgaagcgttcgtatctggaagatcgcaccccctccctccctgg

SEQ ID NO: 151324 - DNA, 100 bp, Homo sapiens
aaaaaacatttgatttttggaaggatatagttgctgctatacaacacaattataaaatgtcagcttttaaggtcggctcctccctgaagaagaggttcaa

SEQ ID NO: 151325 - DNA, 76 bp, Homo sapiens
gtttgaacaaactcgaagaacagctgtggaaagaagttgcaaaacactgggatctcatctggccaccgcgttctgg

SEQ ID NO: 151326 - DNA, 116 bp, Homo sapiens
cccgggagcgcgatgtggagcgcttctttaagggctacgggaagatcctggaggtggatctgaagaacggggacattagtcatgagtgccgagtgtgcggggtcacagaagtgggt

SEQ ID NO: 151327 - DNA, 74 bp, Homo sapiens
cgcgaaatgatgggatagcgttgcaaatccttaaaagagtcttaacggtgccactgattaatgaacttgaatca

SEQ ID NO: 151328 - DNA, 75 bp, Homo sapiens
gtccacaaaatgcttcatctcttctttagcgtcacctccctcactgggcagcatgggggagaagtcagagaactg

SEQ ID NO: 151329 - DNA, 74 bp, Homo sapiens
aggagcctctcagctttttcgtatttggagaatcctcactatggatgggctcattgaggacattaagcatcggc

SEQ ID NO: 151330 - DNA, 75 bp, Homo sapiens
taaaaattatttatccaacagctcctcccagcatcaacaacagcaacttgtgattggcggtgaccggatattcag

SEQ ID NO: 151331 - DNA, 98 bp, Homo sapiens
aaggctgaggtggcagcggcaggagagtccggccgcgacaggacgtaatctatgccagcaattatgacaatgttagcagaccatgcagctcgtcagct

SEQ ID NO: 151332 - DNA, 50 bp, Homo sapiens
cgtgtctccggcatcatgtgtgaggcacagagctttggcctgctggatcc

SEQ ID NO: 151333 - DNA, 88 bp, Homo sapiens
tgcccagccaccagcaaccccccagcctctatccggctgtggaggtcacgtctgggccgggtgatgtactccatggcaaactgtctgc

SEQ ID NO: 151334 - DNA, 74 bp, Homo sapiens
gccatcttcagcatcccagaattccagagagcactggaacgtgagaaacgagcccgcatcaaagcacggaagga

SEQ ID NO: 151335 - DNA, 82 bp, Homo sapiens
aggggccaccccccaaagatactggctggacagattcgaaggttgtatggttcaaacaaaaaagctgacaggccattttgga

SEQ ID NO: 151336 - DNA, 74 bp, Homo sapiens
ggggcctccgcagcgacaacatggaggccgtgaagaccttcaatagcgagatgccacctcagtatggacagcaa

SEQ ID NO: 151337 - DNA, 82 bp, Homo sapiens
gtttcattcgaggtttcgggccggttagcatcttgcaaggaggtagtaacatatccagtcgtgaaactgggaaagaccagag

SEQ ID NO: 151338 - DNA, 76 bp, Homo sapiens
ggagcccgcgggcggccggtcgggcggggcggcggcgctgacaggtaagaatgattgatgttggctgatattggag

SEQ ID NO: 151339 - DNA, 100 bp, Homo sapiens
tgcaggccccgaaacttctgtggctgaaagaggaaataatgcaaaaggtgtcccaaggctcctgaccagtgaacaaagatttgagaaagacagccaagct

SEQ ID NO: 151340 - DNA, 75 bp, Homo sapiens
cagattcgcagtggtcgcttcttctccttgcctgtggacatctctacagcaatgagtgaacgggcacttgctcag

SEQ ID NO: 151341 - DNA, 100 bp, Homo sapiens
ggactgcccctgacccaggcgcgcccgctgctcggtggcaggagggccggcggagcgccatggcctgcatcctgaagggtattttaagcctggaatattg

SEQ ID NO: 151342 - DNA, 76 bp, Homo sapiens
cagaaacagagatcatctttaattcaatacagatgaattccctctgctgacaaccaaacgtgtgttctggaagggt

SEQ ID NO: 151343 - DNA, 113 bp, Homo sapiens
ccacgacgtgggactgcccggggtgtctcgcgcacgggccctcaggaaggctttctgtgaagaattggaatcaatgatacaggagcaatttaagaaggggaagaaccccacag

SEQ ID NO: 151344 - DNA, 75 bp, Homo sapiens
gggagccgtccggaggacctgggacaccgcggaagtcgggaaatgattggtgctgaagacatggacggcttccag

SEQ ID NO: 151345 - DNA, 100 bp, Homo sapiens
gtcgcctccaggccaagagggatccttcacccgtgtctgaacacagatatgtagaactcttcttgaattctacagcaggagcaagcggtggtgcttatgg

SEQ ID NO: 151346 - DNA, 75 bp, Homo sapiens
ccctgatcgagcggcgggagcgaggtcgtttggactgggagactcttgtgcacgaaaatctgcccgggctaatgg

SEQ ID NO: 151347 - DNA, 100 bp, Homo sapiens
tccatcggagatttaagcagctgagtggagatcagcctaccattcggctctattccgttcgctggttcgccacctcaggggaacgatggccatggagtcc

SEQ ID NO: 151348 - DNA, 119 bp, Homo sapiens
gagaacgtgcgggaagagaagatcatcgagcatttcaaacgggcggcaccttcctacttctgcccagccacagccctcccctcacagttgagcacctgtttgcctgaagttaatttcca

SEQ ID NO: 151349 - DNA, 75 bp, Homo sapiens
agggcagcatctctggtgcatgctgatgacgaaaaaccagcctcccgcgacgatgcccctcaacgttagcttcac

SEQ ID NO: 151350 - DNA, 99 bp, Homo sapiens
cccatcctgccgtccttctccactttcgccagcccgtgccgcgagcgcggcctgcaggaggagcaggccgggctctcgccatgggtcactgtcgcctct

SEQ ID NO: 151351 - DNA, 75 bp, Homo sapiens
cccagacgcacacttctgccaagcatagccaccacgggtttagatgtagattctctggtcattgagcatatccaa

SEQ ID NO: 151352 - DNA, 82 bp, Homo sapiens
tgctcgcgctactctctctttctggcctggaggctatccagccttcctgggtctgcaggtccagccggctggcaccctccat

SEQ ID NO: 151353 - DNA, 75 bp, Homo sapiens
cgccatcgttgctgccttcttcgtcaagtactatactggcaattgctggagaagattttgcaattgttgcttctg

SEQ ID NO: 151354 - DNA, 83 bp, Homo sapiens
agaggacagcggcagcgacgagaacctggatcaggccatttcataattctgaatcatgtctgataacggagaactggaagata

SEQ ID NO: 151355 - DNA, 75 bp, Homo sapiens
caaatgaatgccttccactgaaccgagctgcctactgaatcactcttctatcgtgctgttcttcaggatattatt

SEQ ID NO: 151356 - DNA, 100 bp, Homo sapiens
gacaaacttcactttaaaatctgaatgtgagaaagatcagtctaaagaaaaggagaagaaagtgaaaaaaacaattccttcctgggctaccctttctgcc

SEQ ID NO: 151357 - DNA, 100 bp, Homo sapiens
cagggctacgattggagtgagcccttcagccccggggaaggtctcctactccctccctccagtactgcgagaactgtgacacccacttccaagattccaa

SEQ ID NO: 151358 - DNA, 100 bp, Homo sapiens
ccgggagaagattgtcaatggcatccagctggggatccacttgtacgcccatggcgtgtttctggactggacctacagagacatctgggattttctgcgt

SEQ ID NO: 151359 - DNA, 100 bp, Homo sapiens
ctgctctggcctcgcttgttgctcttcggggactccatcacccaggcccagtgacctggggaagaacgcaggggacacgctgcctcaggaggacctgccg

SEQ ID NO: 151360 - DNA, 155 bp, Homo sapiens
tttggggcgcctctgacccagctagccagatcccggacccaaaccatgttccctgtgaaggtgaaagtggagaaatcagatggctgctgctggacacggagacccatgacctggtggctatccacacagacggcaatgaacagatctcagtggtc

SEQ ID NO: 151361 - DNA, 90 bp, Homo sapiens
gagatgcagagccccagctcctgtctggtctgtgagatgtcctcactgtttcaggaggccctggccaacgtcaacattgggagcctcatc

SEQ ID NO: 151362 - DNA, 106 bp, Homo sapiens
cctgccggcaaggccatctgggtcacgggctggggacacacccagtatggagacaatgcagatcttcgtgaagactctgactggtaagaccatcaccctcgaggtt

SEQ ID NO: 151363 - DNA, 101 bp, Homo sapiens
ggtctcccatgtgaactgctggcaggctgccttccctgacccccagttacgcctggaatatgaaggcttccccgtcccgatagctttccaatgattagacg

SEQ ID NO: 151364 - DNA, 87 bp, Homo sapiens
cggtggacgagcaggaagctgcggctgagtcggttttcgacgctggggaagtgtttgggatcatgcaagtggaggaggtagaagagg

SEQ ID NO: 151365 - DNA, 140 bp, Homo sapiens
tacagaacggtgcctctgcgtcctgccactcaggacctctcaagtccccgatgtgatggctcctcagcatgatcaggagccagaacacaaagcgtgaatccggaagaaaagttcaatctggaaacatcaatgctgccaag

SEQ ID NO: 151366 - DNA, 76 bp, Homo sapiens
cgatgctgaggatcgaggaacgttgtctggtacaccaggggttggaaaaaccacactaggcaaagaacttgcgtca

SEQ ID NO: 151367 - DNA, 100 bp, Homo sapiens
tggcccagcaaatgcaactagccaatgccatgatgcctggtgccccattacaacccgtgaccagatgatgtgcttctgcatcgcactcatgatgagattg

SEQ ID NO: 151368 - DNA, 101 bp, Homo sapiens
atcgtcgctacttacatccaggagcccaacgaagactgtctctacctgaacgtctatgtgccgacggaggatgaatcactatcagtgacccctgaggagcg

SEQ ID NO: 151369 - DNA, 98 bp, Homo sapiens
cccatgcgggaccagatcatccgcgtgaagcggcagacatctggtccctgggcataacagctattgaacttgcaagaggggaaccacctcattccgag

SEQ ID NO: 151370 - DNA, 83 bp, Homo sapiens
ctcccctccactttctcccgggtttctgctttgggacaaccatacatctaattccttaaagtagttttatatgtaaaacttgc

SEQ ID NO: 151371 - DNA, 96 bp, Homo sapiens
tcgatgccaatctctgcttgaaaggagaagacttggattctcaggaaactaaatatattttgccaactttggaaaaagaattattcttggcagagc

SEQ ID NO: 151372 - DNA, 98 bp, Homo sapiens
ctgtagtccacatggagctctcagcataccgtgcaacagctctccagggcacaccgtattcagctctgagcggtctttgctagtgaggccaaggagcc

SEQ ID NO: 151373 - DNA, 100 bp, Homo sapiens
cttcacggggctggctgctctgtgtctcttccaagaaggccagggctttgtaagtgaggatgagtacctggagatctctgacatcaagcgagaccagtcc

SEQ ID NO: 151374 - DNA, 100 bp, Homo sapiens
tccggaaccatttgaaggaacagcatcctgacatcgaaaacccggacctcgcttacctgcatgctggtccaatgatgcatcagcagcctccttctcagca

SEQ ID NO: 151375 - DNA, 88 bp, Homo sapiens
cgccgacaacctcaagtgctgcagcgcgggctgtgccaccttctgctctctgcccaatggtctcagccttagatccaaggacagtcca

SEQ ID NO: 151376 - DNA, 100 bp, Homo sapiens
caggttacttcttcctcaacaccagcaccgcagatgttgtcaaggtggcctaccaggaggccaggggtgtcgccatgacccagccgatgcccaatcctgt

SEQ ID NO: 151377 - DNA, 90 bp, Homo sapiens
gcggcgggcgagtgactgcggccacgcctgaaaggcgactctcctgttgcgagttataaggactcagcatcatgtagaagcacttgtgga

SEQ ID NO: 151378 - DNA, 74 bp, Homo sapiens
ttcaaagtactcaagatgaatttgagattctttcttgtggagaagttattcatgtgaagatccttggaattttg

SEQ ID NO: 151379 - DNA, 82 bp, Homo sapiens
cttcggcagtccacccaccgccgccgcctcccaggtgctgaaggtcgccatcctggctgagaagtacgcggtggactacacc

SEQ ID NO: 151380 - DNA, 100 bp, Homo sapiens
cgtttcctcgcttgcattcagctcctctgtgtttgccgcctggtacaacaaacacctcttcgtgcacattgggcatgccaaccattcttacagtgaccca

SEQ ID NO: 151381 - DNA, 90 bp, Homo sapiens
gccgcatgcggcaatttgacgacctcttccggggtgagacgggcaaggacagttgtggaagatatcaataagcgcagagagccgctcccc

SEQ ID NO: 151382 - DNA, 100 bp, Homo sapiens
caccatgtcagacgcagccgtagacaccagctccgaaatcaccaccaagaccaggacggtgacaagcagctctctgtgcccgagttcatctccctgcccg

SEQ ID NO: 151383 - DNA, 100 bp, Homo sapiens
gcagtggtcgcttcttctccttggtaaaggcgacacaggaggagaaccgggagctgaggagcaggtgtgaggagctccacgggaagaacctggaactggg

SEQ ID NO: 151384 - DNA, 100 bp, Homo sapiens
cgcgcaccatgggggagaaacccgggaccaggacagagcgggatgccaccagcttgtccaaagggaagttccaggagctcctggtgggcatcgttgtgga

SEQ ID NO: 151385 - DNA, 75 bp, Homo sapiens
ggatggcaaagggaacctggcacctcaaggatcgggcggtggagggcagcgtcctggtcagctcctcctctgacc

SEQ ID NO: 151386 - DNA, 110 bp, Homo sapiens
ctgagtggttgtgtggtcgcgtctcggaaaccggtagcgcttgcagcatggacgtggcccagtggaacatcgggagcctccggaccatcctggacatggtggagcgcgag

SEQ ID NO: 151387 - DNA, 82 bp, Homo sapiens
attggacacagtgccagagtgtatgcactttactacaaagatggacttctctgtacagcgtcgagggcgaggcccccagcag

SEQ ID NO: 151388 - DNA, 82 bp, Homo sapiens
cgggaagactcatcggagcgtgtggatttgagccgccgcattttttaaccctagatctcggctccctggggaagggaatgca

SEQ ID NO: 151389 - DNA, 100 bp, Homo sapiens
cctgtacagcctgcagaactgacttcctcgttctgcccatcttcctaacaaggctatggctgataacagcagtgatgagtgtgaagaggaaaataacaag

SEQ ID NO: 151390 - DNA, 100 bp, Homo sapiens
ctaaagtccagcatgtcatccattaccaggtatgggctattccatgtatcgggaattctgggcaaaacctaagccttagaagaagagatgctgtcttggt

SEQ ID NO: 151391 - DNA, 92 bp, Homo sapiens
gtcgaaggtttcctttaagatcacgctgacgtcggacccacggctgccgtacaaagtgagaagatggtataaactggtccatcagtgacaaa

SEQ ID NO: 151392 - DNA, 95 bp, Homo sapiens
gtcaaagaagatgcctcgaactaaacaaattcatcccagaaatctaagaggtaagaatgattgatgttggctgatattggagtgctcattcacat

SEQ ID NO: 151393 - DNA, 90 bp, Homo sapiens
cctgccaccagctccagagcttgactggatggagacaggaccatctctgacattcattggccatcagatccaggactgagatcccagaac

SEQ ID NO: 151394 - DNA, 80 bp, Homo sapiens
caccgtcactctgacccagcatggccagctgcgggccgtccagcggctgtgccacttctacagcgccgtcatgcccagcg

SEQ ID NO: 151395 - DNA, 100 bp, Homo sapiens
caggaagcagagtggctatggtgggcaaactaagccgattttccggaaaaagcaaccagcaggcctttttactggagaacgtcccttgtaataatgcaag

SEQ ID NO: 151396 - DNA, 100 bp, Homo sapiens
gtgcaacatctgcaaggtccgcttcaccaggcagttgtgaaaaacttcaggacaaaaatgtttcatttaaggacttgtgctgctaagttgaggccattga

SEQ ID NO: 151397 - DNA, 111 bp, Homo sapiens
cggatggaaatcctaatgacagtctccaaattcgcctccatctgtaccatggatgcctttgtggaactgtacggccccagcatgcggcctctgtttgatttctcctggctg

SEQ ID NO: 151398 - DNA, 97 bp, Homo sapiens
ctcacgagcgcagcacgtggaaaccgtcagtgatttgtgtctgcaacgtgtgtgagagaatggaggaagagagaagggcacagttacctaagtatca

SEQ ID NO: 151399 - DNA, 134 bp, Homo sapiens
gcagatatgcctgctaacatggataagcatgccctgaaaaagtatcgtcgagaagcctatcatcggagacctgttctgatgatgtgtgtggtcctcaccacactgccctgcctcaccttttccatagcagtgac

SEQ ID NO: 151400 - DNA, 83 bp, Homo sapiens
tggacctgtacagcatcaactacctgcactttggggagcctaagtcctgaccagcatctcagacatgtcgaaaaagatgtttt

SEQ ID NO: 151401 - DNA, 95 bp, Homo sapiens
ataattctttttatgtgcgaacatgtaacaagaatccaaagaaaacaaaatggtggtatcatgcctccagggtcgtatagacctccccctcctat

SEQ ID NO: 151402 - DNA, 74 bp, Homo sapiens
aagatcttggagaggacacagagaggtccccctccggatgattgacagtgtggagagccgtgatatgttccagt

SEQ ID NO: 151403 - DNA, 100 bp, Homo sapiens
ccctgcccaacagaatttatatagagatgtgatgttggagaactacagaaacctcgtctccctggctccagtgatccacaagctcagaaatacatcgcgg

SEQ ID NO: 151404 - DNA, 90 bp, Homo sapiens
aataggtgtatcaagtaatggtgcaaagcctgaagtggagcgcgtgtcgcacccgctgctgcagcagcagtatgagctgtaccgggagcg

SEQ ID NO: 151405 - DNA, 98 bp, Homo sapiens
caatggaccacaaattgctccgcccaatgccattctggaaaaggtcttcactgcaattacaaaggaagaggcagaaatccaggcagaacttgaacgtt

SEQ ID NO: 151406 - DNA, 100 bp, Homo sapiens
caggggaccagaggaactcagccctgattgcgtgacctgaccaacggtgcagatgggatgctggccacaagctccaatgggtctcagtacagcggctcca

SEQ ID NO: 151407 - DNA, 75 bp, Homo sapiens
agatgagaaggttcagttggcaaaccagatatatgacttggctaaagtaaataatgccagcctgattggactggg

SEQ ID NO: 151408 - DNA, 80 bp, Homo sapiens
attacacacagcaagttcctgcttctgggacagctctactgacggattcaatacttgagaagaccagtgcttactccaga

SEQ ID NO: 151409 - DNA, 98 bp, Homo sapiens
cagttactcggggtttccggtgcgaggccagaggtggggaagccatcggacgtcggcggtgaggagaaaatgcagaagtctccatggacgtttccctg

SEQ ID NO: 151410 - DNA, 89 bp, Homo sapiens
gcatcaacatgaaggacatattcctaatgctgtggattcctgtctccaaaagctttgcaaaaaactgggtggctcatgtgttacagccc

SEQ ID NO: 151411 - DNA, 100 bp, Homo sapiens
ccagtgtgatgatgatgctgatggggatgggatcaagaatgttgagcttgactgtagtagactctgatggagctaccaactctactactgcaaacctgac

SEQ ID NO: 151412 - DNA, 83 bp, Homo sapiens
gaaatccccactcctccaagaaccaacccccaaattggctgggacaggtgtttcagtcacctccagtaacacgggcgtgccag

SEQ ID NO: 151413 - DNA, 75 bp, Homo sapiens
ttcctgaggacggcgtacggagtgtggatggacctccagttgtagctcattatgatatgtctgacaccaactctg

SEQ ID NO: 151414 - DNA, 82 bp, Homo sapiens
gcgctgatcaccaagcagaatgtccagcgggtcctggaggctgctaacctcttccaggtggtccgggactacaatcttcagc

SEQ ID NO: 151415 - DNA, 50 bp, Homo sapiens
caccacagagcccatcaagcccgagcagctgtcccctttcctccaaccca

SEQ ID NO: 151416 - DNA, 73 bp, Homo sapiens
aaaggaagctgcacaggaagccgtgaaactggtcaggcagttcctgctccgactggggctcctccaggtggtc

SEQ ID NO: 151417 - DNA, 75 bp, Homo sapiens
catggagccgctggggtcccttttgcctcagatactattttgaaggtattttggcctctccccagtctgctcctg

SEQ ID NO: 151418 - DNA, 100 bp, Homo sapiens
ggaagagagcaaggcaaagtttgagaacctctgcaagctcatgaaagaaatcttagataagaaggttgagaaggtgttgtctacatctactggcctaaca

SEQ ID NO: 151419 - DNA, 87 bp, Homo sapiens
ggagcgggagacagcggtgacaggagcagcggccgggagcccttagggaggcaggagctcttgtccctggcaaagcgaaagcgcagt

SEQ ID NO: 151420 - DNA, 100 bp, Homo sapiens
gtgtactgattgcagcccatggcaacagcctccggggcattgtcaagcatctggagggacgcaatgagcccctgaagaaagagcggcttaagtggaagag

SEQ ID NO: 151421 - DNA, 100 bp, Homo sapiens
cccgaagtactgtttacagctcacgattcctgggggaactgtcttactgcagccacaattacaagttcatccgaaaatgatgaccggagtggctccagtt

SEQ ID NO: 151422 - DNA, 75 bp, Homo sapiens
gtgaccgagagcgcgaatatcgtcatcgttagaagtggagttggatcacaggattgattttgaactcagagaagg

SEQ ID NO: 151423 - DNA, 90 bp, Homo sapiens
ggctgtccaggaactgtcggaacagaaccaaaggctattggatcagctcagcaggtgattcgcctttgccagtctcatctcgtgtctgct

SEQ ID NO: 151424 - DNA, 75 bp, Homo sapiens
tcgggcctgtggaagaagcgccgcgcacggacttcggcagagctactctcctctgcaaggcctaccgtgggggcc

SEQ ID NO: 151425 - DNA, 75 bp, Homo sapiens
aggacatcgggaaaccagagccataacaattgtttgaccagacccaacatctacctcattccagacattgatctg

SEQ ID NO: 151426 - DNA, 108 bp, Homo sapiens
ccttgcggaaaggatgttggcggtccctgtgacctgtggagacacggccagatctgccctccagttttaaaatcaaagatgggaaaatcggagaaaattgcccttccc

SEQ ID NO: 151427 - DNA, 48 bp, Homo sapiens
agatggctgactcttgtcttctgtgtcacccctcctaatttctcagtg

SEQ ID NO: 151428 - DNA, 83 bp, Homo sapiens
gaagccgaaggacctagggctgcctacagaagcgtacatttcagtggaagaagtccatgatggcatggatttcattggtcgcg

SEQ ID NO: 151429 - DNA, 75 bp, Homo sapiens
agctactgcagacgacgagctgagcttcaaaaggggggacatcctcaaggctggcagtgatggtgaaagcatagg

SEQ ID NO: 151430 - DNA, 100 bp, Homo sapiens
aaacagcagtatgatgaactggaggctgagtacgacagcctcaaacaggagctggagcagctcaaagagatgaagacttccggggcaggcgtcaggaggc

SEQ ID NO: 151431 - DNA, 87 bp, Homo sapiens
atggtgatgaaggagctgatccggttcgacgaggagacccagaggacgttcctcaaggaggttatgatgtgattgctcaagcccaat

SEQ ID NO: 151432 - DNA, 74 bp, Homo sapiens
attgaaacctggcacaaaccagatcttggcacgcaggagaatggtgtgtccgcagccggccaggtggtatccct

SEQ ID NO: 151433 - DNA, 100 bp, Homo sapiens
ttttctcttcctttcacctcttttcaggttttattgtgactactgcgatacatacctcacccatgactctgtatagctgtggaccaactgtatatgatca

SEQ ID NO: 151434 - DNA, 75 bp, Homo sapiens
tgcagaaatcatttcggctctcatgttcctccatgataaaggaatcatctatagatcagaccccaacaccaacaa

SEQ ID NO: 151435 - DNA, 73 bp, Homo sapiens
tttcatctgtcctcattctctgcgcctttcgcagagcttccagcagcgaatcgcctaccatttggtgcaagca

SEQ ID NO: 151436 - DNA, 75 bp, Homo sapiens
tgccgcctggtggaggctgtgctctcaggagagttgctgaacctgtttgcatgagttgctcctgacggcccttta

SEQ ID NO: 151437 - DNA, 88 bp, Homo sapiens
cttagagattgaacattcggtgcccaaaaaacaaaggcatcaacgcacagagaacattaaagaaaggtctctacagtccctggcaaag

SEQ ID NO: 151438 - DNA, 80 bp, Homo sapiens
gagatgggcaccgcggatctggggccgtcctcagatgccatggacaatattaccaggcagaaccaattctacgataccca

SEQ ID NO: 151439 - DNA, 90 bp, Homo sapiens
caactaggcaacatcatgtccggatatgagttcatcaacaactcggttggtttagcaaaagcagctctagaagcaattaatggattcaac

SEQ ID NO: 151440 - DNA, 100 bp, Homo sapiens
gtgatatcattatgcccatcatatattaattgtcgagaacggtcaagaaagagtagaagttgaagaagatggccagttaaagtccttaacaataaatggt

SEQ ID NO: 151441 - DNA, 90 bp, Homo sapiens
gacctccaaacccaaaatccactgcttcaggagcctaaagcgtgggggcgatgccagtccctccactccagaggagaacgaaaccacgac

SEQ ID NO: 151442 - DNA, 73 bp, Homo sapiens
gaccgctggggactgcgggcggcgctgtgtccgtcgccatgacagcctcacttctaaacttctggaacccgcc

SEQ ID NO: 151443 - DNA, 100 bp, Homo sapiens
ggattccgcgactgccggggcaccgcaggttttggactcgctgaagcggtggataatattaatgcagctgtgatggatttgaaaaaaaagaagatccgca

SEQ ID NO: 151444 - DNA, 100 bp, Homo sapiens
tatggatgtcttcacgtggtctttaccgtttgttggagaaaaagacaggggcaagtgtccgagtggtgaatcagctacttacagagatggatggtctgga

SEQ ID NO: 151445 - DNA, 75 bp, Homo sapiens
tgctcccatcattgatgtggtgcgatcgctccagaaacatgacaaggaggactttcctgcctcttggagatcaga

SEQ ID NO: 151446 - DNA, 100 bp, Homo sapiens
ctgaatctcccgcccagtctcaaaccatgcagctgagtaactgcaagggcgcctttgaggagtagcacgcagatgtcaaataaggagttgtttccaccaa

SEQ ID NO: 151447 - DNA, 75 bp, Homo sapiens
aagcactgacaagcagcacattctcaagagcacacaggtaatttcatctgtgccaaagcctccagaggacaagcc

SEQ ID NO: 151448 - DNA, 75 bp, Homo sapiens
caggaagctttggatcagacttttgtgttgcagttcggaggctgggaggcggcagaatgcagccagaggagggca

SEQ ID NO: 151449 - DNA, 100 bp, Homo sapiens
cagaacttcaaagggaaggtcattgtcatcgtggggcatgtggcaaaacacacagctgagggattcgataaacaagtggatgtgtcatatattgccaaac

SEQ ID NO: 151450 - DNA, 123 bp, Homo sapiens
caggcatgcagtgggacacagagcacgtggccagagtcctccttcagcacatagaagtgaatggcatcaatctgggcaattgaaggaacagactaaaaatcgtgtcctggaaggaaactacag

SEQ ID NO: 151451 - DNA, 100 bp, Homo sapiens
tggtgcgaggacaactacaccatcgtgcctgctatcgccgagttctacaacacgagacgagttgtactgctgtcacaggaaatggacgctggattacaag

SEQ ID NO: 151452 - DNA, 75 bp, Homo sapiens
acactgaagatgaagcaaggcccaatgacccaggcggaacttgtaatagctggcatcgttgagaatgaatggaaa

SEQ ID NO: 151453 - DNA, 75 bp, Homo sapiens
cattgtgaaagaaggttgggttcagaagagggatcctgaggaggatgaaggggctggccctggaggccgagagtg

SEQ ID NO: 151454 - DNA, 75 bp, Homo sapiens
gctgccagaaatttgaacaactttccgaatctgcaaaagaaggaattcgatgtcttctttccgtcctgggagagg

SEQ ID NO: 151455 - DNA, 75 bp, Homo sapiens
gaaaccagcagacagaatttgtcagatagcagaggacaccctccaaacactggttccccactgccctgtgccttc

SEQ ID NO: 151456 - DNA, 96 bp, Homo sapiens
agtcccccaaagatgagatttacctgtgagatgtttcatcccaacaggcgagagaggctggctgaggatcgtgaccagcacctataaggatgggaa

SEQ ID NO: 151457 - DNA, 105 bp, Homo sapiens
gaggagcagcgcttacggaaactgcatgctgttgtagaaactctagtcaaccataggaaagttatggctgcagcttcgattgccaatattgtaaaaagttctctt

SEQ ID NO: 151458 - DNA, 97 bp, Homo sapiens
acaaggccaagggcaagtgatttgacaggtcaaaatgcagatcttcgtgaaaacccttaccggcaagaccatcacccttgaggtggagcccagtgac

SEQ ID NO: 151459 - DNA, 51 bp, Homo sapiens
gaagaatatcctttgaagaattctgtgcttcagccataatggcaggtgaag

SEQ ID NO: 151460 - DNA, 50 bp, Homo sapiens
ctctgagagaatggctgtggaagctgttcgggggtcttgtctggattttg

SEQ ID NO: 151461 - DNA, 99 bp, Homo sapiens
ctgcaacgcctacttaaatgctgtgcgctggcaccctcagaacagtcctcctagccagcagttttgtgcccatttatgcaggactgaagctagtggaat

SEQ ID NO: 151462 - DNA, 100 bp, Homo sapiens
ggaatgatattgaaaaaatcgtctgtctcctgttttctaggtggaaagaatctgatgagccttttaggcctgttcagaatatccgtggcacgtgtttatt

SEQ ID NO: 151463 - DNA, 148 bp, Homo sapiens
taccggcccgggtccgagctgtcagcctctccaaagcctgcgcgagaggagccgggacacgcctagcgcgggctccaggtactccaaagattcaggtttactcacgtcatccagcagagaatggaaagtcaaatttcctgaattgcta

SEQ ID NO: 151464 - DNA, 86 bp, Homo sapiens
agctcctacggattgcccccacccctcaccacacaccccagatgatgaactacttccttgacttcacagagaatgcagttgtcttg

SEQ ID NO: 151465 - DNA, 83 bp, Homo sapiens
ctggcgttgctttgcctgggcggtgcggacaagcgcctgcggaactgtggctgcaccatctgtcttcatcttcccgccatctg

SEQ ID NO: 151466 - DNA, 90 bp, Homo sapiens
gcggtagaggcggcggcgaggactggcgacggcgaggagctactacccacagatggcatgatccgaaaacactctcatgtcaagataggg

SEQ ID NO: 151467 - DNA, 73 bp, Homo sapiens
ctggatgtcatgaaggaagcaatggttcaggtcgttccaggggtagaggaggcatgaaggatgaccgtcggga

SEQ ID NO: 151468 - DNA, 51 bp, Homo sapiens
gctgccgctcggtcacgcttgacctggagtggaagatcatttatgttggct

SEQ ID NO: 151469 - DNA, 116 bp, Homo sapiens
tttctggacgcggatttttggcctcatactctgttatagataaacaaggtgccttagctggaccaattattgtggagccacatgtcacagcagtatggggaaagaatgtttcatta

SEQ ID NO: 151470 - DNA, 99 bp, Homo sapiens
ggcgtcgacttcaccatgaagacgctggagatccagggcaagcgggtcaagtggactcccgaaaaattgaccaggaagggaaaatcccagatgaaactt

SEQ ID NO: 151471 - DNA, 82 bp, Homo sapiens
gcgctcggcgcttggcgctggcgctggccaaggcggtgagcgagtgctgtgctttcatgggcctcttctttatgaagcaaag

SEQ ID NO: 151472 - DNA, 98 bp, Homo sapiens
ccagtcccacttcaaacattcgtctcggaaaccccgcctcttacagtcacgagcctattgctgtggaagttttctctggagatggacggaattacctc

SEQ ID NO: 151473 - DNA, 98 bp, Homo sapiens
acggctccctgctgttcgagtacctgcccagaggggcccactcgctgtcccgctgtattcatcaccaaagaaaaaacttacaccaatgcagaaatcgg

SEQ ID NO: 151474 - DNA, 100 bp, Homo sapiens
cccaaatgccggttctgtggagcagacgcccaagaagcctggcctcagaagacgtcaaacgtaaacagctcgacatatctgaagagatggattaagaatg

SEQ ID NO: 151475 - DNA, 50 bp, Homo sapiens
ggatgtgatgcctgctagccaaaaggtgatgtcttggcattgcccatttt

SEQ ID NO: 151476 - DNA, 98 bp, Homo sapiens
ttggaaccacagctgtccctacgtatcaggttggaagaaatcgagctatagcagattatcttcgttcaaatggctatgaagaggcatattcagttttt

SEQ ID NO: 151477 - DNA, 103 bp, Homo sapiens
gttgtgagtctctttcctgtttacctccagtgtcccttcttccacatgaaaaggataaggcatctccttggaaacaatgccatctttgaatgtgagagataaa

SEQ ID NO: 151478 - DNA, 88 bp, Homo sapiens
agccacgcgcctggggaggctctggcccgggctccgcgtacttcctgttcagtggatatcaaagtattgcagagtgccttagcagcca

SEQ ID NO: 151479 - DNA, 82 bp, Homo sapiens
cttccccatcatcgccagctgcacactcttggggctctacctctttttcaaagcatcacgttgggtggtttccatttagacc

SEQ ID NO: 151480 - DNA, 51 bp, Homo sapiens
ctctgccagacaccatataagccagttctgtaatccaagatgtctgtaaag

SEQ ID NO: 151481 - DNA, 96 bp, Homo sapiens
tggtcctaaagtccagagacagagcactaattagttacatcatgctgatgacagcttcctggtcctcaccacagatggaattaacttcatggtgaa

SEQ ID NO: 151482 - DNA, 130 bp, Homo sapiens
attttgacagtcgtagatacaaatttttggatgatgatggatccatttctcctattgaggagtcaactgtggcaaaggagcagagaactttgacaagttcttcacacgaggacagcccgtcttaacacca

SEQ ID NO: 151483 - DNA, 97 bp, Homo sapiens
gcctttgactggtccccagtggtgacctatgtgtgtgatcttgaagggaacagattactctagtttgatgtcataatttctcatggagttaaaactg

SEQ ID NO: 151484 - DNA, 104 bp, Homo sapiens
caaaggcaagagtaacagcagcgccgtcccgtccgacagccaggcccgggagaatttggtgccctggttgtcagatgttggaaagcagtaggacggaacatact

SEQ ID NO: 151485 - DNA, 74 bp, Homo sapiens
gcggaggcgccgaaatcaaagcgagagcgcctcggcctctccagctgtccgcgaaaacagaatcttggcattgt

SEQ ID NO: 151486 - DNA, 88 bp, Homo sapiens
gaaactgcaggatatacagcagcgaggaggggaagagagtcaccaaaggcttcgtgtacagctctttcctaaagccctacaatcctcg

SEQ ID NO: 151487 - DNA, 75 bp, Homo sapiens
tacaacagagcaacgaggtagagaggacacaagcacttcgattagtcagaaagttggcaaacatgaattgactgg

SEQ ID NO: 151488 - DNA, 95 bp, Homo sapiens
ctgttcgatctggtggagctactggcgtggtagttaaaggcccagatgataggaatcccatctcatttagttgagttacagacatcctgccaaaa

SEQ ID NO: 151489 - DNA, 100 bp, Homo sapiens
gtcctactttcctgataaagtggccctgctgcagagaaagttggaggagaggtcagtgctctttgcggtggcctcagcgctggtgaactgcaccaacagc

SEQ ID NO: 151490 - DNA, 58 bp, Homo sapiens
tttagccaccaaagacatgaggaaatcacaggttggaatgttaaagaaattcatcagg

SEQ ID NO: 151491 - DNA, 100 bp, Homo sapiens
accaacgttagaagcagcctggcctcatctacagcagaagatggctgtgccacccacgtatgccgatcttggcaaatctgccagggatgtcttcaccaag

SEQ ID NO: 151492 - DNA, 74 bp, Homo sapiens
acacattaactgaagtggagcttctggcatttacatcattccagtgtctcgccccatcctcaccctcagggttc

SEQ ID NO: 151493 - DNA, 51 bp, Homo sapiens
ctggaggccaccctgtggttcagaaagcgtggatacccatcaacgaagttt

SEQ ID NO: 151494 - DNA, 100 bp, Homo sapiens
gatcttattgattcctacccaggacatgaaaccctttggtgtcataggtgtgcattgacaacgtactcagaagattatgttccaccatatgattatcagc

SEQ ID NO: 151495 - DNA, 99 bp, Homo sapiens
agggctatattagaagggacaaagataataagttcagcaagcccatgtgcagacttcttttatcgaagtttatcttctgaattgaaaaaaccacaagct

SEQ ID NO: 151496 - DNA, 90 bp, Homo sapiens
gagcaaaggcacgggcagccggaaggacaccaagatgcggatccgggcctttccggaagactatgaccgtctgaggcctttatcttaccc

SEQ ID NO: 151497 - DNA, 100 bp, Homo sapiens
gtttcacggtggcacatacatgatcgatctctttgggctgcctgacctccttgggtgcttgctattaattaacagactttgtggggaaaaaaaggagctt

SEQ ID NO: 151498 - DNA, 50 bp, Homo sapiens
tttaatgcagccttcccaaaaacggtatggtggatattgcccgacagacg

SEQ ID NO: 151499 - DNA, 74 bp, Homo sapiens
caggcctgcccacagacggtggtgcctcaaaacacctacccagggttcagagatgggcagtgagaaggagcaga

SEQ ID NO: 151500 - DNA, 85 bp, Homo sapiens
aagaaagtagaaagaaaagcccctgatgctggaggctgtcttcacgctgacccagacctgaactacaaatgcccttctggctgca

SEQ ID NO: 151501 - DNA, 74 bp, Homo sapiens
cacacagaacaacaaggtgttgatgccgccggacgaaggcacagatcattcatggggatgtataaccgaaacca

SEQ ID NO: 151502 - DNA, 97 bp, Homo sapiens
cgcgctttgcagttcggtctcctggtgtacggccaacgccaagtaggggattgcgttccctccagtcgcagaggctgacccgcggctgattgagtcc

SEQ ID NO: 151503 - DNA, 80 bp, Homo sapiens
gccgggtaccggccgtggaagcggccaccgactactgtcagcagctgtgccaggtgcacttacagagtgctacgatgaac

SEQ ID NO: 151504 - DNA, 100 bp, Homo sapiens
caacaagttcaaccaggtggagagtgataagcttcgaatggacagagccatccctgacacccggcatgaccaaaggagctcaaaaagtgggatgagtttg

SEQ ID NO: 151505 - DNA, 100 bp, Homo sapiens
ggccttcagttgctccgcagagtcttccactgtgggaagtgcgaccaagaccagtgcattcagagcaccaaattcgttttgcaggctgcagccacgcccc

SEQ ID NO: 151506 - DNA, 82 bp, Homo sapiens
aaaggtcccactgcagccctccaagcagcaaattgtggctactaatttgccccctgaagatcaagatggctctggggatgac

SEQ ID NO: 151507 - DNA, 50 bp, Homo sapiens
ttcgcgacacccttgaagctgagaaatggagtgtccatcaggacagcttc

SEQ ID NO: 151508 - DNA, 75 bp, Homo sapiens
accagagaaaccctgcaaaggagtccctagagacacctagtaatgtcataccctaatgatcccagcaagataatg

SEQ ID NO: 151509 - DNA, 83 bp, Homo sapiens
gccgagggacaccgcagtatgaggcagaggttgattcttcaccacactgaaaccattaggaaaaatccttgtggttaacagca

SEQ ID NO: 151510 - DNA, 99 bp, Homo sapiens
cccatcccatggtggactacctggtgcctctagtgaaaagaacaagaagtcttaccctcaggtcaaagagctcgaagagaaacatcgggaggcccaagt

SEQ ID NO: 151511 - DNA, 99 bp, Homo sapiens
aaactattggattcataacctgctccatgcttgaaaacatggggattggaattcggttgcacagacagcagatggtgtggatgctgacctctggaaaga

SEQ ID NO: 151512 - DNA, 101 bp, Homo sapiens
gccccacattgatgatccagatgttaaagattcacagtctgagaatgaggcttcaccagtaaaacggccacgactacttgagaatacggaacggtccgagg

SEQ ID NO: 151513 - DNA, 90 bp, Homo sapiens
gagaggagtcggcctattgcctccattctagaggaagtgaagaagctttctgagcagaatatactgatgataatgctctgattcctaaga

SEQ ID NO: 151514 - DNA, 51 bp, Homo sapiens
ctacctggaatactctcttcttgcagaatttccaaagcacttagaatctcc

SEQ ID NO: 151515 - DNA, 100 bp, Homo sapiens
gaggcgccgaaatcaaagcgagagcgcctcggcctctccagctgtccgcggttcatgtgaaaatggcggatgaggctgtctgtgttggcccagctcccac

SEQ ID NO: 151516 - DNA, 75 bp, Homo sapiens
ttgaattgcccccctgggaagtttcgtcaggatggctaaaggtgaccccaagaaaccaaagggcaagatgtccgc

SEQ ID NO: 151517 - DNA, 100 bp, Homo sapiens
tgctgtcagcacagaagcattaccatgacgctctgaacatcatcgacatggccctgagtgaatacccagaaaatttcattgctggtcaagatgtccaagg

SEQ ID NO: 151518 - DNA, 100 bp, Homo sapiens
caaactgggaaaaagtctacagggtgatccagcagcagctctgcttgaggaagcgttgttgacgaccatggacatcatccacgatggatttggattcatg

SEQ ID NO: 151519 - DNA, 101 bp, Homo sapiens
agaaagaatatcagacaatgcgagagagtcagctgcaacaggaagacccaatggatagatacaagacctcagttggatgaacccattccactgtatgaggc

SEQ ID NO: 151520 - DNA, 53 bp, Homo sapiens
cacttaataacgtgggagaagactttcagatggagtctcactgtgtcacccag

SEQ ID NO: 151521 - DNA, 100 bp, Homo sapiens
gtgacccttctagaagacttggagcttgatttatcaggacaacagggtgctctgtgctcacgcttcagtctgtgaatgtgctgcgcaagtacatctccct

SEQ ID NO: 151522 - DNA, 90 bp, Homo sapiens
ccccctctgaagctcatccaggcggtggcaggctcccagcactgtgcccaggacaaccagacagacagtgggatggtgctggcctcggag

SEQ ID NO: 151523 - DNA, 71 bp, Homo sapiens
gagaatgtgtcagccgatgcaccgagtccagcccaggaaaatggagaggttatcaatactctggctgacca

SEQ ID NO: 151524 - DNA, 103 bp, Homo sapiens
gtatcctatatcatgcagagaaaagagatggaaacttacttgaagaagggtgcaacaccggaggatttcagcaacctcccacctgaacaaagaaggaaaaagc

SEQ ID NO: 151525 - DNA, 98 bp, Homo sapiens
tgcgtggggagacagcgccgggagaggccggcagccccgggacacccccgcaagcgagcagaaatctcctgcaaagaagctgagccatgcaattagta

SEQ ID NO: 151526 - DNA, 50 bp, Homo sapiens
gccccgaaactttcaccgcgagcgggtaaatatttccaactacagtctgg

SEQ ID NO: 151527 - DNA, 98 bp, Homo sapiens
aggcaggaaggaagccattgatgcctgggctccttacttacctcagtacatagaccacgtcatatcacctgtgagaaacgaccgaaacaagaagaaga

SEQ ID NO: 151528 - DNA, 51 bp, Homo sapiens
atccaccttcttacgctatggcagagccaacacgaggagctaaagaaacag

SEQ ID NO: 151529 - DNA, 76 bp, Homo sapiens
ggatgatgagcgccttaaggatctctttggcaagtttggtggcatccttagctgggcctggagggcaagtggaaat

SEQ ID NO: 151530 - DNA, 96 bp, Homo sapiens
cgctctcagtcagcctggggaatgagacccaaactgctcatacagaattacgcatttccacttctaatggtgcgaagcccagcggtgcagagtcca

SEQ ID NO: 151531 - DNA, 97 bp, Homo sapiens
ggtcctactacgcgtacgtggtggagctctgcgtgtaaaggagatgaagttgctggagcaggcaggttctctgaaaggctccctgagtgtggaagag

SEQ ID NO: 151532 - DNA, 100 bp, Homo sapiens
tccagcccgtggtccttctccatattcgagtctcccaacgagcgtgcccgcttgtacttcctgctggcctggtttcatgcgatcatccaagaacgcttac

SEQ ID NO: 151533 - DNA, 90 bp, Homo sapiens
gcggagacgcacggagcggccgggggctcggccgggccgtcccggcctgcgcagcctgagagtgatcagcagctggactgtgccttggac

SEQ ID NO: 151534 - DNA, 100 bp, Homo sapiens
aatccctcgcctccggaggcggcgaggagcggcggtcattgaaattatgagactatcattcaaatggaagcattatagttcttcggaaccattatgatct

SEQ ID NO: 151535 - DNA, 100 bp, Homo sapiens
cttgcccgcctcgggcttgcccggcccgctgccgcccgggaagtacatggccggcctgaatctccatccgcacccgggtgtcatggagaaactccagctg

SEQ ID NO: 151536 - DNA, 100 bp, Homo sapiens
ctctcgaatacctttaacatttatcgccttgttagtctccacatccacctccgtgaaaggttcagcagactgtacaggatctttttggcagagccccaag

SEQ ID NO: 151537 - DNA, 82 bp, Homo sapiens
ctgactctcggactgagaaacgcaagatgatggtggtgctaccccagtacaggatgaacgggattcagggtcagacggtgag

SEQ ID NO: 151538 - DNA, 99 bp, Homo sapiens
cttgaactctgccgaattcctgtgccacctcctcctttagaaaactgatcttaatacaggtcaaaatgcagatcttcgtgaaaacccttaccggcaaga

SEQ ID NO: 151539 - DNA, 87 bp, Homo sapiens
gaaatcctccccacttatgtttgtaaatgtgagtggaagccatgaggccaaaggcagttgtattgatatgagggaaggcaccattgg

SEQ ID NO: 151540 - DNA, 100 bp, Homo sapiens
accacccggtacgagttcgagcagcagcggtaccgttacgcggagctctcggaggaggacctgaagcagctgtctgttctctggggaggcagtaaggggc

SEQ ID NO: 151541 - DNA, 100 bp, Homo sapiens
ggaagacgcggcggcggcggcggaggatgagcctgcagagcgcgcagtacctccgactgcagcgaggcaagaaacaacagattgaaaatggtagtggagc

SEQ ID NO: 151542 - DNA, 100 bp, Homo sapiens
tgataccagagctatacagctgctattaggcagtctgcgctcctcagaccaccggcaggtgaacagcctgatgcagaccgaggagtgcccacctatgcta

SEQ ID NO: 151543 - DNA, 101 bp, Homo sapiens
ggagaatgaggaggacctgaaggacaagctggactttgcccctcccaccccaccccattaccctccacatggtacatgtcccagagcaagcacacggaggc

SEQ ID NO: 151544 - DNA, 96 bp, Homo sapiens
gctgggttcgcggcgcgccctcctgctgcctccccggagctcccgggccagtaggttgctgcttttgctcagaggacatccatgaccctaatggtc

SEQ ID NO: 151545 - DNA, 100 bp, Homo sapiens
cacgtcagtgcctcataaaatccaatctccattcaggaaccacgtgaatgttgagggggcgacacacaagcaggtggtggacctgattcgagcaggcgag

SEQ ID NO: 151546 - DNA, 74 bp, Homo sapiens
ttaaaaaaaatagctcagttaatgaaggatcaacgtatcataaaaggacgcaaatcaatttcacagtggctatt

SEQ ID NO: 151547 - DNA, 132 bp, Homo sapiens
tgtgattgggtggaagatggcgctggccggatggaaatcctaatgacagtctccaaattcgcctccatctgtaccatgacaatgcagatcttcgtgaagactctgactggtaagaccatcaccctcgaggtt

SEQ ID NO: 151548 - DNA, 100 bp, Homo sapiens
gcgacgaaccttggagagaggagaacgaacatcttctggacctttgtccagcaataggcgaatatgaagaccttagagcagagaaccagaaaacaaagga

SEQ ID NO: 151549 - DNA, 100 bp, Homo sapiens
gccacgaaagccgccaggaaaagcgctccctctaccggcggggtgaagaagcctcatcgctacagatgcatggtcatggaggctatgattctgattttag

SEQ ID NO: 151550 - DNA, 100 bp, Homo sapiens
acccaagcaactataatgcttggtcccatcgcatctgggttttacagcacttggccaagctagatgtcaaggttcgagaacttgtcttggacaattgcaa

SEQ ID NO: 151551 - DNA, 90 bp, Homo sapiens
ctccagtcccctgcccctcacagccatcatctgccctccaccatccatacctacgtttgcaacacttcgtgtttataagccatcagctgg

SEQ ID NO: 151552 - DNA, 100 bp, Homo sapiens
agcaagacctctcctcattcttattgttttattagggcaatttgtctcaataaaagcccaggaagaagacgaggatggttaaacccatccagagtaatgg

SEQ ID NO: 151553 - DNA, 90 bp, Homo sapiens
tccgggggaaggccctgcgcacgcagctggacctgcgcagttaagtgggcagaccaacatccacctcagcaaaaacttcttcctgacgaa

SEQ ID NO: 151554 - DNA, 98 bp, Homo sapiens
gtctgatcagctgctgcgtgctcagccccagagcagggggggccctcagcctcttggccttgaacgggctgttcatcttgattcacaaacacaacctg

SEQ ID NO: 151555 - DNA, 83 bp, Homo sapiens
ccacgcagctgcctggacaacattactctactgactggcagagacaggagaggtagatgtccacgcccacagaccctggtgcg

SEQ ID NO: 151556 - DNA, 75 bp, Homo sapiens
tatctgtggcccttccaaataagcggcataaagcaattgagaattcaggttgttgtggttggagatcagagtgct

SEQ ID NO: 151557 - DNA, 100 bp, Homo sapiens
ggagcttggtttcgggatctcggtgctgcagacggcgagacctcctgcacagatgcagagcaaagcggcagtccccggacagggatgggctctgaccagg

SEQ ID NO: 151558 - DNA, 99 bp, Homo sapiens
caaacttgggccaaaggacagttagaagacagtaggagcttcctggacgatttaacaggtcctcaagcgagtcttcaaagaagtgaaaagaaaatggat

SEQ ID NO: 151559 - DNA, 100 bp, Homo sapiens
cctccatgcgcagtcatgagtcgcttcaagtttatcgataagaaccgctgggaggaccctggtaagcagctctacaacgtggaggccacatcctatgccc

SEQ ID NO: 151560 - DNA, 50 bp, Homo sapiens
ctgacgctctgggtgaagaatggaagacggtggagcatggcttcccgcac

SEQ ID NO: 151561 - DNA, 100 bp, Homo sapiens
tatgagaccatgtttgctcctgaggtctaggcgttttacactgagattctccactgccaccctttctactcaagcaaaatcttcgtgaaaagatctgctg

SEQ ID NO: 151562 - DNA, 80 bp, Homo sapiens
gctgtggaacgggccaagcaggtgaccatggcagaactgaacgccatcattggggtgtgttccagagaacaagccttcag

SEQ ID NO: 151563 - DNA, 100 bp, Homo sapiens
gctcctgctgcagcccccgacgccacctccgctgctgctgctgctcttcccgctgctgctcttctccaggctctgtgactcacagatgaatgcttctcac

SEQ ID NO: 151564 - DNA, 100 bp, Homo sapiens
tgcccgaggaggcagccaagctcgtagcctgccactccgtgcgtaccacatggaatgcttggacccccctctccaggaggtgccggtggacgagtggttc

SEQ ID NO: 151565 - DNA, 100 bp, Homo sapiens
ccgcaaggtcaacctgggagtgggaggaacacctgattgagaatgaagtgtcaatactgcgccgagtgaaacatcccaatatcattatgctggtcgagga

SEQ ID NO: 151566 - DNA, 88 bp, Homo sapiens
aagggtatcatggaaggcaactgtgtttcacttaccagaatactacgttcagctaaattaagcgtcttcctccacttgatgaaggtgg

SEQ ID NO: 151567 - DNA, 75 bp, Homo sapiens
gtgcataccctacaccctgcagaatcactattaccgcaacaatagagagacaagagagacacctccaacttcgac

SEQ ID NO: 151568 - DNA, 100 bp, Homo sapiens
cccgtccccatctcttaccatcagaaagaagacatagctcatccagcaagccgcctttggccgttcctcccacttcagtattttccttcttcccttctct

SEQ ID NO: 151569 - DNA, 100 bp, Homo sapiens
ttcgtcaagcaaaagatgaacgtacttttcatatcttttaccagttgttatctggagcaggagaacacctaaagtctgctgcctattcacactctgaggc

SEQ ID NO: 151570 - DNA, 80 bp, Homo sapiens
caaagtttcagctttaatgcagccttcccaaaaacgaacattctagtatgccagtagaaaaaaatatcactttagaaagg

SEQ ID NO: 151571 - DNA, 83 bp, Homo sapiens
cttgggcctcgcgccggctatggccgtgccctggggctgagccctcagaggctgaggggatctggcggtggagcgctaggatc

SEQ ID NO: 151572 - DNA, 98 bp, Homo sapiens
ctctgctctgcctccggggacaagaaactagagcaaataaccgttttgaaattttggttgaatctggcgatgtggaacccatggatatggagggctga

SEQ ID NO: 151573 - DNA, 89 bp, Homo sapiens
ctgtcacccaaagggctccagctggtttttcactcaggcctcactttatcttccaagttttttgctccactcaagcctgttagaatcac

SEQ ID NO: 151574 - DNA, 90 bp, Homo sapiens
ctttaatgaagatcagcccatgtatgtccgtggttcagaccctgtattaaagcttttggacgacaatgggaacattgctgaagaactgag

SEQ ID NO: 151575 - DNA, 101 bp, Homo sapiens
ctttccaccccgaaattcgccccgattaaagactgtgttgcattatcaggaatgggctatgtgaatgaaaaaaggtatccgttatgaaacttccagaaaaa

SEQ ID NO: 151576 - DNA, 100 bp, Homo sapiens
ggagtcatttctgttccgcacaggcctgctgaactgggtgctttatataggaatcatgtgagggccaaccggggaaggtggagcagatgagcacacacag

SEQ ID NO: 151577 - DNA, 51 bp, Homo sapiens
tatcaggacatggagtatgaaagacgaaacaagtgttgaaaatgttaaagg

SEQ ID NO: 151578 - DNA, 100 bp, Homo sapiens
cgcggcggggcctccgcggtctgctcatggcgcacagccagcggctgctcttccgaatcggagccccggagctatgtggagtctgtggcacggacagcgg

SEQ ID NO: 151579 - DNA, 74 bp, Homo sapiens
cagaatgtgatttgcttgaagatatgagccctggaagaaagcgggacttttcccctgttccttggagtcagtat

SEQ ID NO: 151580 - DNA, 100 bp, Homo sapiens
gccgggtcacccaatgccccagcctggcttcatcccaccacacatgagtgcagatggcacctacatgcctccgggtgcccagggtggctccgtggcccgc

SEQ ID NO: 151581 - DNA, 98 bp, Homo sapiens
aacaggccatgaagatggtggtcaccgacccccgttacaggtttgggtacccagaccccacctacctgacccgggtgcaagaggagctgagagcgaag

SEQ ID NO: 151582 - DNA, 82 bp, Homo sapiens
ctccacgatgctatgtaggggccacagtgcttcgggggagactctatgcaattgcaggtggtggtgaccgcggtggcttcaa

SEQ ID NO: 151583 - DNA, 82 bp, Homo sapiens
ccatcactcatgtccataaggaggtggaacggcacatgtgtgatggggacattgttatcttcaaccggcagccaactctgca

SEQ ID NO: 151584 - DNA, 124 bp, Homo sapiens
ctgcacagcaacttggagaagtggtgaagcttcatccccatgaactaaataatctcctgtctaaagaagctctatgcagaactgtgccaaggcatcgtggacatagccatttccagtgtcttcc

SEQ ID NO: 151585 - DNA, 102 bp, Homo sapiens
tcggattcatgtctatacccatgactgttggcccacccattgcagggattgagtgttgctatagtgggacccacgtttcaagatttggcaacaaacgtgaac

SEQ ID NO: 151586 - DNA, 100 bp, Homo sapiens
atctttccaaaggagatgcccgttagagatgtttatgattacttccgagctgtcctgcagcgtgatgaaagaagtgaacgagcttttaagctaacccggg

SEQ ID NO: 151587 - DNA, 100 bp, Homo sapiens
aagacaacaccaccctctgtcttctttcctgtctttgtccggtttgtgaaagcatataagaatgaactctggaagcccagccagggacaatgcaccttca

SEQ ID NO: 151588 - DNA, 100 bp, Homo sapiens
tttcatggagaatggctggaagttcttggctgcggggtgatggaacaacaactggtcaattcagccccatctgctttgatatgattgaagaagcatacat

SEQ ID NO: 151589 - DNA, 90 bp, Homo sapiens
agttcgtctcttacgtctgcggaagtgcagctgcctcagttcttagcgcagcatccacccaacccaccagtatcaccaggaaaaactgta

SEQ ID NO: 151590 - DNA, 51 bp, Homo sapiens
cgagggtcggctctaccaagtagattccactgtgtaaagtaattagattca

SEQ ID NO: 151591 - DNA, 100 bp, Homo sapiens
tctcagcgcctatggcgaggtcggacgcgtcttctttcaggctgaggattccagttcttcagacaaacaatggtccaagtctaacaggattgactactat

SEQ ID NO: 151592 - DNA, 83 bp, Homo sapiens
ctgcgggactctgaggaaaagctcgcaccaggtgcatggctgcctcctaatcccatagtccagaggaggcatccctaggactg

SEQ ID NO: 151593 - DNA, 51 bp, Homo sapiens
gataaaatcatcaaaagagccaatgaggtgtctgcttttggggcagagttt

SEQ ID NO: 151594 - DNA, 110 bp, Homo sapiens
tggcgttctcattcttattcaccgttataactttcccaatctcaatatggatgtgcataaaggtgttccattgcctaaagaggagaacatttctgctcccttgatctcca

SEQ ID NO: 151595 - DNA, 75 bp, Homo sapiens
agcctgcggagcctgtggggcagacaatcccatgaggttggtagaacagagattctcatctccgttttaactgag

SEQ ID NO: 151596 - DNA, 100 bp, Homo sapiens
gaagggcagtggctgtagctgccctttccgtttccagggttccgaccagtacctggagtagaacagaaaaattattatgtctgtgttcccttgggactca

SEQ ID NO: 151597 - DNA, 76 bp, Homo sapiens
accatccgcctgtgggacacctaccagatttctttaaagactcgtgcagcacatcattatcgctggatgcccggac

SEQ ID NO: 151598 - DNA, 98 bp, Homo sapiens
aaccgtcagtttgagccagatgttggtgcttcccgtgctgctgttgatgctggctttgttcccaatgacatgcaagttggacagacgggaaaaatagt

SEQ ID NO: 151599 - DNA, 75 bp, Homo sapiens
cacctactattacccccagtatctgcaagccaaggttgacatcatggacatatgtgagtccatcctggagaggaa

SEQ ID NO: 151600 - DNA, 83 bp, Homo sapiens
acactcaaagtcaagtatactggttggagaaatggaacacgatgatgaacgcgttaatttccctcaaagaaagaagaaaggcc

SEQ ID NO: 151601 - DNA, 73 bp, Homo sapiens
gtcctttatatagaagggagagtagttcttggccaggctgactgagagatttgtgctgggagtggatatgttc

SEQ ID NO: 151602 - DNA, 82 bp, Homo sapiens
tgaagtgtcaacaagtgcaacagatgaacttctatcacagtttaagttgctgctgacacgccgaccgcctgctgcttcagct

SEQ ID NO: 151603 - DNA, 97 bp, Homo sapiens
tgaggatagcttgttccctgttcaatgggggaccagattcgtgtggatgtcctcttgttgctgtaccacatagaattcactcaacaagtagaaacgt

SEQ ID NO: 151604 - DNA, 51 bp, Homo sapiens
ggggtttgcccagctcacaccaactgcaggctggagtgcgatggcacgatc

SEQ ID NO: 151605 - DNA, 82 bp, Homo sapiens
aagcggcaaccaagtctgggcaccacaagcaggtggtttttccccatcatcggccacatgggcatctgcacatccacaggag

SEQ ID NO: 151606 - DNA, 99 bp, Homo sapiens
ttgaaaatgctttgtgcagaaaggaatcaaaagaatatttagaatgcaggatggagaggacagagggcttggtggactccttttctcagggactggaaa

SEQ ID NO: 151607 - DNA, 60 bp, Homo sapiens
ggagatgcgactcgaagcagaaaggtgcgtatagcagcaaaattcatcattcatgcccct

SEQ ID NO: 151608 - DNA, 101 bp, Homo sapiens
aaaaaaagagaaacctgggtgaactttcacggacaacctcagaggacaacgaagtgttcgaataactgaagtgaagtgatggactccgatttggagagtag

SEQ ID NO: 151609 - DNA, 75 bp, Homo sapiens
tccaaaaccacaaacttgcctacgtcagtaacagccaccaaggatgatcacggacgtgcagctcgccatcttcgc

SEQ ID NO: 151610 - DNA, 90 bp, Homo sapiens
agaaaaacagaggagttctattaagacgggggattcccgaagtcttccgttttctgagaatgtgagtgctgttcaaaaattagacttttc

SEQ ID NO: 151611 - DNA, 100 bp, Homo sapiens
gaaaactaggaatctatgatgctgatggtgatggagattttgatgtggatgatgccaaagttttattaggtgactattatatggttaaaaagattttgga

SEQ ID NO: 151612 - DNA, 50 bp, Homo sapiens
tgtctgcaacgtgtgtgagagaatggagtaccatgcggagaccatcaaga

SEQ ID NO: 151613 - DNA, 82 bp, Homo sapiens
ccccagggggacttccctgccgtacctggagtagaacagaaaaattattatgtctgtgttcccttgggactcattggaaatt

SEQ ID NO: 151614 - DNA, 100 bp, Homo sapiens
ctacaacgagcgcgagaacctgccgctcatcgtgtggctgctggtgaaaagcttctccgagagctgagtcagtgctgattctctcaaatagagcttgaag

SEQ ID NO: 151615 - DNA, 83 bp, Homo sapiens
ggggaggaggactctggagctgacagcgcgcacttcacccgcagttgcctcctgcccgaaggccacctgaacctaacggctcc

SEQ ID NO: 151616 - DNA, 91 bp, Homo sapiens
tgatgatgctcagtttgatgcgtcacactacgacagtgagaaaggagtgattcgcctttgccagtctcatctcgtgtctgctttgttaagt

SEQ ID NO: 151617 - DNA, 51 bp, Homo sapiens
tatgacgctaggccacaaaaatcatccagggcagcgacgccggctggactt

SEQ ID NO: 151618 - DNA, 74 bp, Homo sapiens
cgcgggcaaggccatcggcgtcctgaccagcggcggcgacgcgcaaggttgtactcgtaaaacaaggatcatcg

SEQ ID NO: 151619 - DNA, 137 bp, Homo sapiens
gaaagttcagcgacggcggcagcggccggagccgggccgggcagctagcagggcgcttcggggcgaactttctgaccaagtatacaactacccagagggcctaggagaagtgctgtatagagagcagttcgacttca

SEQ ID NO: 151620 - DNA, 99 bp, Homo sapiens
cagacttcaacacatgtagaaacactactaactttttcagctttgaaaagccatcactggtgcaagctatatttaacggagatcctgatgaagttcgag

SEQ ID NO: 151621 - DNA, 123 bp, Homo sapiens
ttaattcttccactgatatctcaaaaggtgatctggacaaaggaacaggtatctcaggttatgatggagggtggtcgcagcaaagggtttggttttgtatgtttctcctccccagaagaagcc

SEQ ID NO: 151622 - DNA, 98 bp, Homo sapiens
cgccgcctccgagctggctcatgtgaagcagctggcctgttccatcgtggaccagaagaatctgtgcggagaccctgggagaagaacagcacaacctt

SEQ ID NO: 151623 - DNA, 100 bp, Homo sapiens
agcctttctacacatgcgcctgccccacgggtgtgcagctgcaggacaacggcaggacgtgtaaggcaggtgtggtacatggacggctatcacaacaacc

SEQ ID NO: 151624 - DNA, 100 bp, Homo sapiens
gccggtcacactggggtccccaaagaggtcaagccagcagacaggcacaacctgctgcggccagagaccgtggagagcctgttctacctgtaccgcgtca

SEQ ID NO: 151625 - DNA, 75 bp, Homo sapiens
tggattgcctattaaaatctatgggagaatgataatcagacagctaaatggagtctgagcagctgttccatagag

SEQ ID NO: 151626 - DNA, 51 bp, Homo sapiens
cagcgtttcttgcaagaatgggagaaactatgttccaacttcctgtcaaca

SEQ ID NO: 151627 - DNA, 100 bp, Homo sapiens
ctatcctcaacaagcaatgtggatgatgacagctgtgtcaaaggtgatggggaggaagtacatccggctgtattccccgcaggagtcaggggctctgtac

SEQ ID NO: 151628 - DNA, 90 bp, Homo sapiens
ggaggacatggagatgaagaagaagattaacctggagttaaggaacagatccccggaggagatttctccacccaggtgaactcctccctc

SEQ ID NO: 151629 - DNA, 99 bp, Homo sapiens
caggactcccgacttgacacgatattttttgctaagcagtgtgtggataacatccgatgcaatgggctcatgatgaacgcatttgaagaaaattccaag

SEQ ID NO: 151630 - DNA, 98 bp, Homo sapiens
gcgcttgagttggtcgggggcagcggcaggccgaatacatcaagcaatggtaacatctttaaatgaagataatgaaagtgtaactgttgaatggatag

SEQ ID NO: 151631 - DNA, 50 bp, Homo sapiens
cagcctcctgaatagctgagaccacaggacctcggacagtgatccaccct

SEQ ID NO: 151632 - DNA, 101 bp, Homo sapiens
aggatcaacagtcaattgtgtactagcattccaaggtgagatcggactggaactgttcggctgcgaccagaaatttattttcctgagtaaattgccgagaa

SEQ ID NO: 151633 - DNA, 74 bp, Homo sapiens
aaaaaacggctccccaactccaccacagcaaaacagtttctcatggagttaaactttctcagaagcaacgaaaa

SEQ ID NO: 151634 - DNA, 75 bp, Homo sapiens
cgagccatcaaggtgaccgtggacggaccccgggagcccagactcttctcaagtcttaggattgcagcaacacgc

SEQ ID NO: 151635 - DNA, 100 bp, Homo sapiens
catctttatccaatcaagtgcccttggacaaagcctgaaaccagttgtcatggatgcactggtagaagatgatatctgtattctgaatcatgaaaaagcc

SEQ ID NO: 151636 - DNA, 100 bp, Homo sapiens
cgccatcgttgctgccttcttcgtcaaggtgctggagatcagaatttatttacctctgtttatccaacgctctctcagcagcttccaagagaaccaatgg

SEQ ID NO: 151637 - DNA, 83 bp, Homo sapiens
cggtgctggcggcggcagctgaggccttggccgaagccgcgcgaggctgacccgcggctgattgagtccctctcccagatgct

SEQ ID NO: 151638 - DNA, 100 bp, Homo sapiens
caagagcttagttgaactccttctgccactgcagagccccgccatggaagacacgccgttggtgatatcgaagcagaagacggaggtggtgtgcggggtc

SEQ ID NO: 151639 - DNA, 75 bp, Homo sapiens
ccgatccagcctgcggagcctgtggggcaggtggctttgtacaagtcagtgccaacgcgcttgctgtcacgggcc

SEQ ID NO: 151640 - DNA, 82 bp, Homo sapiens
gcaagcgggcgagggcagcgccctaagcagggcgtgatggtgggcatgggtcagaaggattcctatgtgggcgacgaggccc

SEQ ID NO: 151641 - DNA, 83 bp, Homo sapiens
gctttcttctctggcagctgcaaacgggcgctgacctcaaccagcaggtccacaaggcgattacaatttccagtcccctaacc

SEQ ID NO: 151642 - DNA, 74 bp, Homo sapiens
tgtctgcgagccaggattcccggagaacgtatttaccgggcagtcaaagatctattcctacatgagcccgaaca

SEQ ID NO: 151643 - DNA, 75 bp, Homo sapiens
cgcaaggagatgggatggagagcctgagttggcattcgtataaatgacctggtggagccccctgagctgcccgct

SEQ ID NO: 151644 - DNA, 98 bp, Homo sapiens
ccagaagagccgacagaggcagacacagaaggccgacaccctgcacctgttctagcgactgcgaagatagctcgctgagctggaaccccacagatcac

SEQ ID NO: 151645 - DNA, 83 bp, Homo sapiens
ctttgatgccctggtgaccttctgtgaagaactgggagttttgcggcctccaggtggtggatccaatttttcattaggttttg

SEQ ID NO: 151646 - DNA, 80 bp, Homo sapiens
gcgggtcaggagcagccgcagcgacggcggcgacagcagcatatgaaacactctcagatgctaatagacgaaaagagtat

SEQ ID NO: 151647 - DNA, 96 bp, Homo sapiens
gcgggaacgattgggctgagcagaggacgacatgttgcttttcgtggagagatcctacagtaaggaattgtttgaagaagttatttcaaagatgcg

SEQ ID NO: 151648 - DNA, 100 bp, Homo sapiens
acgaggcgttcatcgaggagggcacattccttttcacctcagagtcggtcggggaaggccacccaggtgctggagaatctggtaaaagcaccattgtgaa

SEQ ID NO: 151649 - DNA, 100 bp, Homo sapiens
atgtggtcgggtctgtgctggactgcttcagaataccctctaccatctgctttggtcagggtgccgctcgaggatttaaaagcaacaagaagaaaaccaa

SEQ ID NO: 151650 - DNA, 50 bp, Homo sapiens
ggctcaagactatttcatcttacacggggaaaatggctttgttggcctca

SEQ ID NO: 151651 - DNA, 100 bp, Homo sapiens
gatgacctttgcacagaaaatgccatcatgctgaaacgattcaatagcctgattcggactccaccaaacactcaactccatcgaatagctccaaccccag

SEQ ID NO: 151652 - DNA, 92 bp, Homo sapiens
agctaatgaaattgaaaacctgggatccacagaggaaaggtggagatgacccctgagaagttcagtgtcttaatggagaagctctgtaaaaa

SEQ ID NO: 151653 - DNA, 82 bp, Homo sapiens
ttgctggctacagcttcagaagaccgaagcgttcgtatctggaaggtgctttgcaagatatcaccttgtcacagcagacccc

SEQ ID NO: 151654 - DNA, 100 bp, Homo sapiens
gaccgagcctgggaggccggccggtgccagcacctttcggcttctgagacggcggcagcagcggcattcaggaaattgctcagaagacctcttatgtatc

SEQ ID NO: 151655 - DNA, 82 bp, Homo sapiens
ctggactacgtggcggcgctggaagggatgtcgtctcagcagtgctcgggcgcagattgtcctgggtcacataatgccagct

SEQ ID NO: 151656 - DNA, 94 bp, Homo sapiens
cccaagtgcacatggctgaccacccctaaaagcacctggccccgctacagcaaaccagatgtgaagttcatttccaatccgccctccatggtgg

SEQ ID NO: 151657 - DNA, 100 bp, Homo sapiens
cactggaagatgctatttcaccaaaatctgcaaatgtaaactgaaggacatcgcatgtttaaaatgcaagcaaggacttagcacagacttcttacttcat

SEQ ID NO: 151658 - DNA, 100 bp, Homo sapiens
gagagcatgccccggccccctgagcaggtgtcactagttccaggcgtctgctgaaagatttggaacagaagatgatggccactccgaaccagaccgcctg

SEQ ID NO: 151659 - DNA, 73 bp, Homo sapiens
gataacaagaaaaagaagccgaagaaagaagaggaacagaagtggaaatgggtcagtatagaccttctgattt

SEQ ID NO: 151660 - DNA, 101 bp, Homo sapiens
cgaagggcgacgccaagccggaggctctggattaatcgaattacagctgctagccaggaacatggactgaagtatccagcgctcattgggaatttagttaa

SEQ ID NO: 151661 - DNA, 88 bp, Homo sapiens
gatccatctgtcttagcaaggctgtcatcacagtcagtactcctgcatttgtaccaacgaaaactcacgtgctgcttcatcgaatgag

SEQ ID NO: 151662 - DNA, 100 bp, Homo sapiens
gtgaaggagggttggctgcacaaacgaggggacaaccccaacaagcccatgaaccctctgatcactggggtcttcggagctattgcaggcgcagccagtg

SEQ ID NO: 151663 - DNA, 100 bp, Homo sapiens
ctcctcctcgcctgcgaagcatcacgtccgcttcccgacgctgagggcagccccgtccaggagtactcctgattgtgacatcacattcatcccctgggcg

SEQ ID NO: 151664 - DNA, 74 bp, Homo sapiens
cgagccccggggtgatgactggagggtcagcctggaagaccacagcagccaagtctattatcctcccagtccac

SEQ ID NO: 151665 - DNA, 100 bp, Homo sapiens
tctctccatcccttccgaggcccgacttcgaagcagatgttccaggagaggagcagccggatgctgcaggccttatccccgaagcagagccctgtgagca

SEQ ID NO: 151666 - DNA, 117 bp, Homo sapiens
gtctggggaagcggcggcaggcgccatgtccggccgcgaagcctcctgacaaggtgatccgggcgggccccgcaggaattttatcccctcaccggcctcacactagtatcgcatgtc

SEQ ID NO: 151667 - DNA, 98 bp, Homo sapiens
aggactccaaaatggcgtcagttgatggcctactgccagcatattggggtggagttcatgttcatcaatgacctggagcagtgccagtggatccggca

SEQ ID NO: 151668 - DNA, 90 bp, Homo sapiens
gcctcgatgtcagctgaactttccatccaaggtgccacttctccacttttaagcagtgccaagagtggctctcacggctaagccgagcca

SEQ ID NO: 151669 - DNA, 100 bp, Homo sapiens
cctgaaggcctcgctggagatcgagtaccaagttaatccctatatcctgaagaagaacatgatcctcatgacaaatcatttctatgcagcgatcttggga

SEQ ID NO: 151670 - DNA, 101 bp, Homo sapiens
gtggttccaatgagacagggcacaccaaactccatctgatgagcgggatcgtgtgcagaagaaaaccttcaccaagtgggtcaacaagcacctcatcaagg

SEQ ID NO: 151671 - DNA, 83 bp, Homo sapiens
tgctcatgcctcgtctcatttgcaaggccaaacgtaccaagaaagtcgggatcgtcggtaaatacgggacccgctatggggcc

SEQ ID NO: 151672 - DNA, 101 bp, Homo sapiens
cctgcagcgggagctggacggcgagcgcgagcggcgcgagaaaactgcaaaattcaaaatggggctcaaggtattcgtttcatctacaccagagaaggcag

SEQ ID NO: 151673 - DNA, 96 bp, Homo sapiens
ggacttactagtacctacgcgggtatcagaaaagggtgatcagttatgaagaagggaaagctttggcagaatcttggaatgcagcttttttggaat

SEQ ID NO: 151674 - DNA, 94 bp, Homo sapiens
tacatatgaggcgcatctgcttggtgcaaatgtccaagcacctcttctgactcggagtgtggccatctggggccgtgtggtatttgccactcag

SEQ ID NO: 151675 - DNA, 96 bp, Homo sapiens
acaacccgttcttgcctcaggccagtcgcctccaggccaagagggatccttcacccgtgtctggactgagcagggggaggaacatttaagctgatg

SEQ ID NO: 151676 - DNA, 74 bp, Homo sapiens
tggcctcaagtacagggtcatcaagggcagccttcaataatctggagaatcttgtctttggcaaaggattccaa

SEQ ID NO: 151677 - DNA, 100 bp, Homo sapiens
tttgagaacagagtgctgttttagagctggcagcagcatctcagcccaagagaaggtcctgggtgccccttctttccgcatgctggcctggcacgttctc

SEQ ID NO: 151678 - DNA, 87 bp, Homo sapiens
accaaccgcacccctgaatttctccgcaaatttcctgccggcaaggcccccagcaccccatgctgacttggagaaccccagatctct

SEQ ID NO: 151679 - DNA, 74 bp, Homo sapiens
ttgaaagtgcgattgtggaagctgctcgggcaatgaagggctattggcctgtcagctgctcccatccatcccct

SEQ ID NO: 151680 - DNA, 100 bp, Homo sapiens
acatcgatggacgcattcagaagcggagctggagtttgttcagatcatcatcatcgtggtggtgatgatggtgatggtggtggtgatcacgtgcctgctg

SEQ ID NO: 151681 - DNA, 98 bp, Homo sapiens
atggatatgtttcctctcacctgggttttcttagccctctacttttcaagacaccaagtgagaggccaaccagatgatatcatcaagttgaatcgaaa

SEQ ID NO: 151682 - DNA, 100 bp, Homo sapiens
acctgtgaccacccctgaagaaattgcacaggcacagaaagctgaaggtgctggagatgccaagtgaagtgtgtgcatttttgataactgtgtacttctg

SEQ ID NO: 151683 - DNA, 100 bp, Homo sapiens
gttagaacagataactggcaaaggtgcttcggggacattccaggtggggaaagatcaagtgcagactgagctgtggccaacgtttgcagaccaggaatcc

SEQ ID NO: 151684 - DNA, 100 bp, Homo sapiens
atcacggctgtgcaggcacgcatgcaggccagctaccgggagcacgtgaaggaggtgcagcagctgcagggcaagatcctgttcatcttcatcgacagcg

SEQ ID NO: 151685 - DNA, 75 bp, Homo sapiens
tcctcctttctatctgctcacttcttacagactgtaatcctgatccctgcatgtcactgagtccaccatgcttta

SEQ ID NO: 151686 - DNA, 83 bp, Homo sapiens
gagccatggcggctgacagtcgggaggagaaagcaaaaatattttgattctggggattacaacatggctaaagcaaaaatgaa

SEQ ID NO: 151687 - DNA, 76 bp, Homo sapiens
atttttattgacgaaaatggaacagcaacaattagaggacacagagtctgggatctaataattcagtcattttgga

SEQ ID NO: 151688 - DNA, 74 bp, Homo sapiens
agtcttccctggcaagattcttctgaattgtgctgccttggccaaaagaggaagctgtgctgaatggtttggtg

SEQ ID NO: 151689 - DNA, 82 bp, Homo sapiens
aagaatagagttgagcctgtgggacacttcggtggtggtcctgctccatgatgtccgtgatgtgagcgtggaggaggagaag

SEQ ID NO: 151690 - DNA, 74 bp, Homo sapiens
aacgcttagaaagagatcacatctttcgacttgaaaaagcactttgtgagtgtgccctccagactccttatgac

SEQ ID NO: 151691 - DNA, 100 bp, Homo sapiens
cccgcgtcggtcgccgcagtcacggagcgcacagctcccagctcctccagcagccgacaggaggcccgtcaagatgcaggcaggcattgccaccccaggg

SEQ ID NO: 151692 - DNA, 75 bp, Homo sapiens
tctggtccatgggggtcatcctgtatgcaaaccagtccagctacgggggcccagccagccagcagctgagtgggg

SEQ ID NO: 151693 - DNA, 88 bp, Homo sapiens
gcagagcttccaggacatcaagcccatgcgggaccagatcatccgcgtgaagcgaccaactgccagagttttctctgggtgttaacag

SEQ ID NO: 151694 - DNA, 82 bp, Homo sapiens
agggggactccaggaaaagccgttgagaggaccatcacaacctgagcagcacagacttcccaagtaagaagcggaagaggag

SEQ ID NO: 151695 - DNA, 83 bp, Homo sapiens
attacttctcccgcttctttcctgtctcggaacttgctactaccagcaccatgccctaccaatatccagcactgaccccggag

SEQ ID NO: 151696 - DNA, 100 bp, Homo sapiens
tgccggtattggatgattcgtatctaagactctgggacactcctgaagtcgggaaatgaggctccaccggttagagagatgaccctccgtgacctcccga

SEQ ID NO: 151697 - DNA, 96 bp, Homo sapiens
ccaggagacagtgacctagagctctgccgtgcccacattgagagactccagcaggagatttgtgccacaccccggctgtttccagatgacccacgg

SEQ ID NO: 151698 - DNA, 50 bp, Homo sapiens
cgggaagcgcgcacctgccaagcagtgaccgaagctggctttggtgctga

SEQ ID NO: 151699 - DNA, 100 bp, Homo sapiens
ggaagtgatgtaccatcatgggtagcctttgataaacagcactgccagtgaaagatgtagaagataaacctgaacaacaaaccagaacaagagagactga

SEQ ID NO: 151700 - DNA, 85 bp, Homo sapiens
gctctgagggagggtccgagccagccgctgttttgccggaggagcccctcaggccgtgtggatgaggtcaccattgtcaacattt

SEQ ID NO: 151701 - DNA, 101 bp, Homo sapiens
atgtattcttcagccccataaactgggatgacctgtaccacaagaggctaactccacccttcaacccaaatgtgtgcacagccagagaacaacacatcaca

SEQ ID NO: 151702 - DNA, 74 bp, Homo sapiens
cttggtggagaatagaaggcaaatggccggtctaattgaagccaacggagaactcaaggtcttcatagaccaga

SEQ ID NO: 151703 - DNA, 51 bp, Homo sapiens
cgagcaggaggcgccatcatggtaccacatcgaggtgaaccgtgttcctgc

SEQ ID NO: 151704 - DNA, 100 bp, Homo sapiens
cggacggggcggacggcgacgcagcccgcggcagaagtgtgaaggaagaagtgttctggaggaactacttttaccgcgtctccctgattaagcagtcagc

SEQ ID NO: 151705 - DNA, 75 bp, Homo sapiens
gaataaatgaaataaagagtgaagaagttccagcttttggggttgggtatctacagccattggttgctgttcagg

SEQ ID NO: 151706 - DNA, 100 bp, Homo sapiens
gttgaaaaacctgacttttatcatcatattgataatctcaggagaactctatgcagaaggaaaccacagtgcaaatttaattgccggggaagataacggg

SEQ ID NO: 151707 - DNA, 102 bp, Homo sapiens
ctttcctccggactcctgcacgacctgctcctacagccggcgatccactcccggctgttcccccggaggtgacttaatgaaaataccaagttctgaattgag

SEQ ID NO: 151708 - DNA, 80 bp, Homo sapiens
cccgtctgccaaggagctggtgctgcggattcctggtcgggtggcttccagtggtcttcagtctgtcgtgcaccgatgag

SEQ ID NO: 151709 - DNA, 82 bp, Homo sapiens
aaaaaacgcaccttggagaaaaattttaacgtttgaggactcagcccaggagagtgttattactcgagatattcatcgtaca

SEQ ID NO: 151710 - DNA, 88 bp, Homo sapiens
tatgggtcgaccattccaaaaaaatcgtagtggtgggggtggtggaggaggcggcggcggtggaggtggaggtggtggcagacgtcga

SEQ ID NO: 151711 - DNA, 100 bp, Homo sapiens
cccccagcaaggaggtgctcgattcgttcctggatcttgcgaggcgtggtgaccaagatgaagatgcagaggaccattgtcatccgccgagactatctgc

SEQ ID NO: 151712 - DNA, 90 bp, Homo sapiens
ctgacattgctgcccagaaactattctgggccgatctaagccaaaaggctatcttcagccgtgttgaaatccttgtctcctgtagaccca

SEQ ID NO: 151713 - DNA, 96 bp, Homo sapiens
actcctctcttgtgcagattgtggcagtagtgggaactctaatgatccaggacaaagaagttaccctggagtatgtatcaagcctggatttttggt

SEQ ID NO: 151714 - DNA, 75 bp, Homo sapiens
gcgttggaggccaccgtttccagcatggggctgcttttggtccaccgcaaggtggatttcatcctccttattggc

SEQ ID NO: 151715 - DNA, 100 bp, Homo sapiens
agctcactcagattccctcattgatacctttcctgagtgtagtacggaagatgccacttcaaatgaacaacaagagcttttctgtcagaagttgcagcag

SEQ ID NO: 151716 - DNA, 83 bp, Homo sapiens
acatactatccgtttgttcaggaaccaccagtgacagattcaaaagaatgctgaaccgggagctgacacacctctcagagatg

SEQ ID NO: 151717 - DNA, 95 bp, Homo sapiens
cttcctccatcctggtattttttggagcttccatcctggttcttccaaagtgcccggacccaaaacaggaagtagtctgggttggaggaggcaga

SEQ ID NO: 151718 - DNA, 100 bp, Homo sapiens
tctacctcaacttctgctgcctgggcttcatcgccttggcctactccctcaaagttgaaggggcccggccaggactcggggaagggtggcctgagagcag

SEQ ID NO: 151719 - DNA, 75 bp, Homo sapiens
cgacaagccgctggcagccgcggatctcaccgccgctcaggagagaaaaggaacagttccgtaagctctttattg

SEQ ID NO: 151720 - DNA, 90 bp, Homo sapiens
tgaaacaacatttagttcagaatccagtcagactctggcaacttttagataaacattgacgatcttgaggatgaccctgtggtgaacggg

SEQ ID NO: 151721 - DNA, 83 bp, Homo sapiens
aaccgagggaaccgaggcagcggaggtggtggtggaggtggagatttggtgttgtactgcgaggcattcctgaccacctacag

SEQ ID NO: 151722 - DNA, 51 bp, Homo sapiens
cggaggcagcggagccctgggccatcgatcatggaagggaagtggttgctg

SEQ ID NO: 151723 - DNA, 90 bp, Homo sapiens
gaaaaacttaaatgggcgaaagatcacgatgaagagcttcttggacacttaatgattgttggcaagaaatgtgctgctgatctgggcctg

SEQ ID NO: 151724 - DNA, 51 bp, Homo sapiens
gcaccaaattgcatcgtttcccaggctaccggctctctgaccagttccacg

SEQ ID NO: 151725 - DNA, 100 bp, Homo sapiens
ggaagccgtgtccggtgcccagccggtgggtagagaggaaggtgctggagaatctggtaaaagcaccattgtgaagcagatgaggatcctgcatgttaat

SEQ ID NO: 151726 - DNA, 75 bp, Homo sapiens
gaagagtccccgatgtttgtagaccttatgacacattcagctaacgtattttagcaggtggagtgaggttgaaga

SEQ ID NO: 151727 - DNA, 75 bp, Homo sapiens
ccgcgtccccagagagcgccctgagagaacagggtggccgcttggtccaggttatagaaacattatcacgacttt

SEQ ID NO: 151728 - DNA, 75 bp, Homo sapiens
ccttctccactttcgccagcccgtgccgcgagcgcggcctgcaggaggtgttcaaactggatccaaacaataaag

SEQ ID NO: 151729 - DNA, 85 bp, Homo sapiens
cgtcgcgcgcgcctgtagctcgcgggcctcgcagatgttcctcctgctgatcaagagaagctttttatccagaagttacgtcagt

SEQ ID NO: 151730 - DNA, 100 bp, Homo sapiens
gcgggagtcgcggaacagcaggcccgagcccaccgcgccgggccccggacgccgcgcggaaaagtccaagccttatgcatttgatcgggtgttccagtca

SEQ ID NO: 151731 - DNA, 100 bp, Homo sapiens
ctggaccaggaggaggttttcaggaccaaaattgtggaaaagtcactctgagacgcccaagcagatggcctgcgatgaagtttagaagaggctctggaca

SEQ ID NO: 151732 - DNA, 100 bp, Homo sapiens
ctgcgcttggggatcctctgtacgcccgttcactgtcccctccagggcaggtgactgaggccgtgaaggtggccattgacgtcgggtaccgccacatcga

SEQ ID NO: 151733 - DNA, 98 bp, Homo sapiens
tccccggcacgcaccatctgttgccatcccggccggccgaggccattgcaggcttcagggatgacttcttagggggcaggggaggtagtcgcccaggc

SEQ ID NO: 151734 - DNA, 76 bp, Homo sapiens
gaacgtgcaggtcgccgtgcgggtccggccgctcagcaagaggtactccaaagattcaggtttactcacgtcatcc

SEQ ID NO: 151735 - DNA, 100 bp, Homo sapiens
ccgaaactttcaccgcgagcgggtgtcagttgtacccgaggcgttctcagcagcagcaagtacctgtggtggatttccaggctgaactgaggcaggcatt

SEQ ID NO: 151736 - DNA, 83 bp, Homo sapiens
caacgatcccgatgtcatcaagttgcaagagattccaaccttccagccccttttgaaaggtcctgtgggaatggccgctgctg

SEQ ID NO: 151737 - DNA, 87 bp, Homo sapiens
agatgttcgacaagggcccagagcagtccaatggatgggaccccaatgaaatgttcaagttcaatgaggagaactacggtgtgaaga

SEQ ID NO: 151738 - DNA, 82 bp, Homo sapiens
atgttggaacttgctcgtgccttagacaagaaactcctttccttaaaggttggtcaaagaaaaagtgatgtatgaaaaagag

SEQ ID NO: 151739 - DNA, 100 bp, Homo sapiens
gcagcccccgaaggccctatcaggacatggagtatgaaagacgattacctggctggtgtttgcttgttctggagtgatcttctgactggaaaagaactat

SEQ ID NO: 151740 - DNA, 100 bp, Homo sapiens
tcgccgccatggcccgctggatcccgaccaagaggcagaagtacggggttgagcctgccttctggtacaagatgcctgtggaatgttcggtgaagtgcac

SEQ ID NO: 151741 - DNA, 82 bp, Homo sapiens
agcctgcgggagcccccggccggttattattaacttggtagaccaggcaggaagagagaagattattggcgatgcttacctg

SEQ ID NO: 151742 - DNA, 100 bp, Homo sapiens
gcgacagttggcgatcccactctatggtgactctgacatcattagaagcatgccagaacagactggtgaaaagtaaaccttttcacctacaaaatttcac

SEQ ID NO: 151743 - DNA, 88 bp, Homo sapiens
actcctcaacagagcccctctgctctcccaggtccacaactcccaggcctgttgcagatctccaactcctgctttgtgtgacccccca

SEQ ID NO: 151744 - DNA, 82 bp, Homo sapiens
atgaatgtcctcttttcctgtcacgtccgtaaggttctcagctgctgcgggagttgaaaaagatggacgacaaagctctttt

SEQ ID NO: 151745 - DNA, 83 bp, Homo sapiens
ggacgagcgcgccggccgcgagcagaccggcctggaagcctacgccctggggctggacaccgagcatcagatccatgctgctg

SEQ ID NO: 151746 - DNA, 80 bp, Homo sapiens
ccgcggccccctgttgtgttgctgcggagaggcaatagccctctggaacaagacaattcatgtgagataagaaagaagag

SEQ ID NO: 151747 - DNA, 98 bp, Homo sapiens
gttggtgctgaaaacagactcctgtgatgtaaatgactgtgtccagcaagttgtggaacttctacaggaacgggagagcctgacaaggagctgaatcc

SEQ ID NO: 151748 - DNA, 75 bp, Homo sapiens
agggcttaaggaagtaaaatggcggacctggcgaacgaagcatcctgaggttagcattacacttctcccagtgga

SEQ ID NO: 151749 - DNA, 75 bp, Homo sapiens
cttggcacgatacgtgttccagtcagatgaggaaaatgaggcccaaagaagtgatgccacttggttaaggtccca

SEQ ID NO: 151750 - DNA, 101 bp, Homo sapiens
ctcctatgcaagggctattcctgaccaagaagatctaaagagaacgtctctgaaatcaagtccggatgaaggaagatgagaatgtgcctactgctcctgat

SEQ ID NO: 151751 - DNA, 98 bp, Homo sapiens
caccacgcggcctacgtgaacaacctgaacgtcaccgaggagaagtaccaggaggcgttggccaagggtgaagatcccggatctgttttgtggcctag

SEQ ID NO: 151752 - DNA, 74 bp, Homo sapiens
gggacagccagccagcagcaggaggtaaggaagagcccaacactgctggaagtgagcatgccccatttcatgag

SEQ ID NO: 151753 - DNA, 82 bp, Homo sapiens
gtgcaagaggcgcaaacaagccaatcccaggaggaaaaacgtgggaatgtaagacggacttagatattgcatacaaatttgg

SEQ ID NO: 151754 - DNA, 98 bp, Homo sapiens
atcagacgtgctccaggaggccagaaggaaatacgacacagcttgggctatggctttgtgaactacgtgaccgcgaaggatgcagagagagcgatcaa

SEQ ID NO: 151755 - DNA, 100 bp, Homo sapiens
ctccttctcctggagacgcaactcaagaaggacagaataacgggctcccagattcacaagccccaccaagaggatcaccccaggaacgcttggaggctga

SEQ ID NO: 151756 - DNA, 74 bp, Homo sapiens
ggaagagcgctcccaggagaaacaaaaggtcagtgcaccagatattctgaaacctctcaatcaagaggatccca

SEQ ID NO: 151757 - DNA, 97 bp, Homo sapiens
ggtggcctggagcaagaccgctgacaagatcgagggcttctatttggagcaagaggtggtggtggccttcccccgaagaaatttggtaatcctgggg

SEQ ID NO: 151758 - DNA, 74 bp, Homo sapiens
gatcagtagcaccagtgtttatgtccacagatcctggtccctacaaataagcctgctcatgtgagataagaaag

SEQ ID NO: 151759 - DNA, 71 bp, Homo sapiens
ggaggacagctctgatgaggagttggcatgccatcatcgtggatggacacagcgtggaggagctgtgcaag

SEQ ID NO: 151760 - DNA, 98 bp, Homo sapiens
ggcgcggggagccagcgagcgcgccttcggcattggccgccgcgatgtcagctcagtgctgtgcgggccaggacatggatttgattgacatactttgg

SEQ ID NO: 151761 - DNA, 83 bp, Homo sapiens
atggtgaaacaccactgaagcattgccaagcccgacggccatggaggctgaagagacgatggaatgccttcaggagttccctg

SEQ ID NO: 151762 - DNA, 100 bp, Homo sapiens
gaaaagaagattactctgcaacagctaaaggcaatcaggatgagtgaaaaattgatttgcagctgacctgcaaatggaatcatcaggaacatccctttct

SEQ ID NO: 151763 - DNA, 96 bp, Homo sapiens
cacagggctgcgattccggggtacctcactgcagaggtgctggagctggcagttaaagattggtgcctggccagaaatgcctgtgaaacagctgtg

SEQ ID NO: 151764 - DNA, 100 bp, Homo sapiens
cttggggaaaatgtttgcggtccacttgatggcattttacttcagcaagctgaaggaggaccagatcaagaaggactgagcagggggaggaacatttaag

SEQ ID NO: 151765 - DNA, 75 bp, Homo sapiens
tccacctgtccgctacgctcgccggggctgcggccgcccgagagtttatgtggccgaggcagacaagtggaatta

SEQ ID NO: 151766 - DNA, 98 bp, Homo sapiens
cccggcttcccgtctcgtcaccctctgatcctgaggaggatgaaggggctggccctggaggccgagagtgagctggagagacaagacgaagccctgga

SEQ ID NO: 151767 - DNA, 82 bp, Homo sapiens
acaactacctcaacgccgtgccgcccccctcccgcccccagtgagacggtttaagcggaagcatcttactgccattgactgc

SEQ ID NO: 151768 - DNA, 80 bp, Homo sapiens
ctcagttggaagcagccgatccagcctgcggagcctgtggggcagttcatagccctgatgaagcaagttactctgctctc

SEQ ID NO: 151769 - DNA, 50 bp, Homo sapiens
gtgtacatcgtgcatggcgtccagatcttactgtgccgagatcgctcaca

SEQ ID NO: 151770 - DNA, 88 bp, Homo sapiens
gccttcgcgctgaggagccctcgttttcgagatcaggcctgaccgggataagctccaggagttgtaagacgttcatcgccgtgttatc

SEQ ID NO: 151771 - DNA, 100 bp, Homo sapiens
cgccgagcgtcgccgccgccgccgccatgaacaactcgggcgccgacgagatcggcctccggcacccacaggccctgaggctccagtgcccacaggcaga

SEQ ID NO: 151772 - DNA, 95 bp, Homo sapiens
aggaagtaccttcgcagtgtaggagatggagagactgtggagtttgatgttgttgaaggagaaaaggttatttccagaaagaagagaatggcaaa

SEQ ID NO: 151773 - DNA, 100 bp, Homo sapiens
gcattttgctgtctcctcctaatacgctgatgaacttattagtcctaaagacattgatcctgtccagcgctatgtcccactaaaggatcaacgtaacgtg

SEQ ID NO: 151774 - DNA, 100 bp, Homo sapiens
gcagagctagttcctctccagctcagccgcgtagggttacacatcattttggaatgactgtatatcatctggattacgtggctgtatgttaattgaatta

SEQ ID NO: 151775 - DNA, 83 bp, Homo sapiens
ccctgatgcccgtgctgggctatgatcctcctcagctctatctgacgcagctcagggacatggatttgattgacatactttgg

SEQ ID NO: 151776 - DNA, 104 bp, Homo sapiens
gactgaccacttctgcctgggccatgccgaaaaaaggagattgtgacatatcactgcattcaatacctagatgatgctaaagaattacctccaaagccattgtc

SEQ ID NO: 151777 - DNA, 75 bp, Homo sapiens
tacgtcagaagaggcctgccatactacattcgcttaaattttgcagagaaagcaaccctgatctccggagaactg

SEQ ID NO: 151778 - DNA, 75 bp, Homo sapiens
ccgggccggagtacgtcgttcccgctgcgctaggggaagcgggcaggttaacgaagcccttgtcatttgctgatt

SEQ ID NO: 151779 - DNA, 100 bp, Homo sapiens
gcgcaggagtcgggcaccatcccaaagaagcggttggtcaaagaaaaagtgatgtatgaaaaagaggcaaaacaacaagaagaaaagattgaaaaaatga

SEQ ID NO: 151780 - DNA, 50 bp, Homo sapiens
gcaggttgcaggtgaacatggccttgaggcaacatcagatgctgacctga

SEQ ID NO: 151781 - DNA, 90 bp, Homo sapiens
ctggaacgaaagatgcccttgggaggtgatgacactcagcctccttctgaagaaataaaaacaggtgaggatgaagatgaggaagataat

SEQ ID NO: 151782 - DNA, 100 bp, Homo sapiens
gtaaaccatctatggagagtggagatggcaacacagacgctctgctgttgcccgtattcaggagttcttcagacggagaaaagaaaggaaagaaatggaa

SEQ ID NO: 151783 - DNA, 75 bp, Homo sapiens
tccaaatcttgctgcttttaattcaactcagagaaaagtacgaagatctgagctcttctgacgagtcctgccctg

SEQ ID NO: 151784 - DNA, 74 bp, Homo sapiens
atcgacaagaccatgctggcaagtctgaaggtcaattggaatcgaagcctcttaaaatggcagatgacttggac

SEQ ID NO: 151785 - DNA, 74 bp, Homo sapiens
gcacggaggagctctttgacttcttgcatgcgagggaccattgccaacgaatcagtattcagcagctcttcact

SEQ ID NO: 151786 - DNA, 101 bp, Homo sapiens
gtaaaaaaggacagaggctgttccctatggcagactagggtatttaaattacttcaaaaccaaattcaacaacaaacttggactgatgagggcactccatc

SEQ ID NO: 151787 - DNA, 75 bp, Homo sapiens
ccaggtccctgctgaatcacacgccgccatccgggaggcccagggaaggagatcatgaatcagacagataaaaat

SEQ ID NO: 151788 - DNA, 100 bp, Homo sapiens
ggaagccgactgctgcctggtctgcaaagaagtcctttcaagtctctaggactggactcttcctaagcaagtccggtgaccatctacctggggaacagag

SEQ ID NO: 151789 - DNA, 100 bp, Homo sapiens
cagccaccagcaccccagccacccccagctcttcagcattgtccgccaggcctgtgtccggagcctgagctgtgaggctcatttttggacagtacatcac

SEQ ID NO: 151790 - DNA, 82 bp, Homo sapiens
gaggccctagagctccgggacaatgataagactcgctatatggggaaggtctgcagatctccaggggagcccaccagcctag

SEQ ID NO: 151791 - DNA, 75 bp, Homo sapiens
agttcctttttgaagtagttccagaacttatctacaaggaagtaatgaattcagaagaaaagactaaaaatggtg

SEQ ID NO: 151792 - DNA, 76 bp, Homo sapiens
ccttttcaacatggatggctcctcccgctgccgctgccgctccaggagacagattcatgatgttgctatcaaaagt

SEQ ID NO: 151793 - DNA, 98 bp, Homo sapiens
tgcagtttcgggaccacctggaggaggtgttgaaaggggccaagaagacgctggagggaggctgttaggagggactctgagcttcacacctgtctgct

SEQ ID NO: 151794 - DNA, 80 bp, Homo sapiens
aatgtctcggattttgataatgaagaagcatgattatgatatgagggtggatgatttccttcgtcgcacacaagctgttg

SEQ ID NO: 151795 - DNA, 82 bp, Homo sapiens
agcaagactatgaatctctgttccaaatgctttgctgccgcttgatggcattgaaacgaatgggaattgtaagcgactatga

SEQ ID NO: 151796 - DNA, 90 bp, Homo sapiens
taccaagcatgttgctcttattcagtgtaatcctaatctcatgggtatccactgttgggggagaagccatcatctgccctccaccatcca

SEQ ID NO: 151797 - DNA, 75 bp, Homo sapiens
gaagatggcggcgccgctcatccccctctcccagcagggaactctaatgatccaggacaaagaagttaccctgga

SEQ ID NO: 151798 - DNA, 97 bp, Homo sapiens
ctggaccctgctgactggccagatggttcttacccaacgtttgatggctcatcaaactgcaatatttataatcgcttagatacaaattgctgtggat

SEQ ID NO: 151799 - DNA, 107 bp, Homo sapiens
ccggcatggccgggatcattaagaagcagatcctgaaacacctgtcccgacaatgcagatcttcgtgaagactctgactggtaagaccatcaccctcgaggttgagc

SEQ ID NO: 151800 - DNA, 50 bp, Homo sapiens
tggaatgttaagtcatggcccatactatgaatcaaagttgagaccaagaa

SEQ ID NO: 151801 - DNA, 87 bp, Homo sapiens
gagttcaaggagttctccaggaagcagatcaaggacatggagaagatgttcaagcagatggcgtcgtgcgggcagggcagtgtgcgg

SEQ ID NO: 151802 - DNA, 145 bp, Homo sapiens
ggaagagacagttgtgagattcccttgcaaatttacatacgagaatggcttgtgaaatcatgcctctgcaaaggaaaaccagcattggaatcagctgattcaggatgctcagaagcgtggtgccattattaagacctgtgacaaa

SEQ ID NO: 151803 - DNA, 71 bp, Homo sapiens
accacaacctcttcagtagaaggtgctggagaatctggtaaaagcaccattgtgaagcagatgaggatcct

SEQ ID NO: 151804 - DNA, 90 bp, Homo sapiens
ccgtgagccggccctgcgccggcaggtcgcgggacatactgtggcgcgcatacttttttgatgcaccagagatggaccatctcccaacaa

SEQ ID NO: 151805 - DNA, 105 bp, Homo sapiens
cagcaatgcctcctgcaccaccaactgcttagcacccctggccaaggtcatcgtattgaggaagttcctgaacttcctttggtagttgaagataaagttgaaggc

SEQ ID NO: 151806 - DNA, 50 bp, Homo sapiens
aaaatggagagttctacctacgagtgagaaaccttttgaatgtaacattt

SEQ ID NO: 151807 - DNA, 83 bp, Homo sapiens
gagcagtagccgccgtgggagggagccatgaagcattacgagactaagaaaaatggctttgtcagcccaacagatacccagat

SEQ ID NO: 151808 - DNA, 80 bp, Homo sapiens
cgtggatccaagatggcgacggcgatggtcaaaatgcagatcttcgtgaaaacccttaccggcaagaccatcacccttga

SEQ ID NO: 151809 - DNA, 83 bp, Homo sapiens
agaaaatcaaaacgctgattaaaagaagcacggtgcctctgagcctcggaacatgatctacatgagccgcttgggtatctggg

SEQ ID NO: 151810 - DNA, 76 bp, Homo sapiens
aggcgggatgtgtcagtcaaagcagcctctgaacttctcatgaaactctcagaaagcggcagcccagaatctcgtg

SEQ ID NO: 151811 - DNA, 100 bp, Homo sapiens
gtgctgcaggcgccgccgccggacgtcggcaacggagaaggaggctctgtcggtggtgagcgacgaccagtccctctttgactcagcgtacggagcggca

SEQ ID NO: 151812 - DNA, 49 bp, Homo sapiens
gaggggtgaagaaacctcatcgttacagattcctggattttgtgaaggg

SEQ ID NO: 151813 - DNA, 100 bp, Homo sapiens
cctgttcaaagatgccattagactgtttgcagcatacaatgaaggaattattaatttgttggattgcagcaattctccggaaacggaaattagactatta

SEQ ID NO: 151814 - DNA, 97 bp, Homo sapiens
gcagcgggagctggacggcgagcgcgagcggcgcgagaaaatttggtcgtattgggcgcctggtcaccagggctgcttttaactctggtaaagtgga

SEQ ID NO: 151815 - DNA, 90 bp, Homo sapiens
ccacctctgtattcagcatagctattcctgttgatggtgatgaagacagtttgcagctctccacccatccacatgaaggtgcagcctctg

SEQ ID NO: 151816 - DNA, 75 bp, Homo sapiens
cctgcccggcttcctcatcgtggccgagatcatcctactatgttgacagacatgatgaaagggaatgtaacaaat

SEQ ID NO: 151817 - DNA, 99 bp, Homo sapiens
gtgcactgacagtgcttatgaaggacgcaatcaagcccaatctcatgcagacactggaggttggatggcaagcatgtggtgtttggcaaagtgaaagaa

SEQ ID NO: 151818 - DNA, 82 bp, Homo sapiens
ggacctcaagctctgggggatcgaccgggacagctaccggcgcatccttatggcaccgtctgcgtcctgctgtccttcccct

SEQ ID NO: 151819 - DNA, 100 bp, Homo sapiens
ccagacctggtgggaagaaggtgcggggacgggtccctgaggatcccgatgcctacgagccaagatgctcagatggcgggtgaaaaagttgagaagccag

SEQ ID NO: 151820 - DNA, 100 bp, Homo sapiens
tgaagatccccgagatgcagctgatgcagtccgagagctagatggaaggagaaagaccatttatctgcgaattatgtggaaattcttacacagatattaa

SEQ ID NO: 151821 - DNA, 50 bp, Homo sapiens
ccactcagagtcgcccgagaagttttgagcaaaattttggactgtgaagc

SEQ ID NO: 151822 - DNA, 73 bp, Homo sapiens
catcgacccgaagttgcggattgcagccgagaacgagctcaaccaggttcatcctaagttccactataaacag

SEQ ID NO: 151823 - DNA, 71 bp, Homo sapiens
ctgctcccatcattgatgtggtgcgatcggccatcatgcagaagggggatacaaacataaagcccatcctc

SEQ ID NO: 151824 - DNA, 100 bp, Homo sapiens
cgggagggagcggtcgccgcgggatttggagctgcctagcctcgcggtcggaaggaaaatcacctcggcagtgtttgaaggaaggatactgcaactcttt

SEQ ID NO: 151825 - DNA, 100 bp, Homo sapiens
gagcggagtcgtgcggttggtgggggagccctgccctcctggttcggcctccccgcgcactagaacggagtgtgaggaagaggctgtctgtgtcattatg

SEQ ID NO: 151826 - DNA, 99 bp, Homo sapiens
aagggccaatgtgaacctcgatgtccctttgcaaggagtacaagcgcaagctagccagagtttccctggtgcgcaaagaactcaggtcccggatccaga

SEQ ID NO: 151827 - DNA, 100 bp, Homo sapiens
tccgtccctagtggagcgcaggggaggcagaagtcatgacaggcgaggtgggttctgagactgtgccctgtccacggtgcctcctgcatgtcctgctgcc

SEQ ID NO: 151828 - DNA, 100 bp, Homo sapiens
gtttcccaacagtgatgtcacaagattgaccacattgatcacaaggcatttcatccttcatgaagccattcaggattttgaattgcatatgagtgcttgg

SEQ ID NO: 151829 - DNA, 50 bp, Homo sapiens
ccggattcaggattcagatgaaccagacaagttggatggcttgaggactg

SEQ ID NO: 151830 - DNA, 83 bp, Homo sapiens
tatggagtaaacctaattctgcccttgatgtcacaggatctcttgaagggcaagtgtccagagaatggctgggatgaaagtac

SEQ ID NO: 151831 - DNA, 75 bp, Homo sapiens
gcagccgatccagcctgcggagcctgtggggcagggattgtgggactttaccaaatcggtttgtaataacaccta

SEQ ID NO: 151832 - DNA, 89 bp, Homo sapiens
cggcggtgaagaaggaagggggtgctctgagtttccaaccctttgtaatcagtactacaaattaatcacatttatctgtgagatttttc

SEQ ID NO: 151833 - DNA, 83 bp, Homo sapiens
tcagtggtgttaaggattccaacaacaattccgatggcaaagccgttgccaagatacaaagaagctgttgtagcttatgaaaa

SEQ ID NO: 151834 - DNA, 75 bp, Homo sapiens
ggtgcctgggaatcggtcgcctggaggaccagtatttcccatggagggccatcatgcagaagggggatacaaaca

SEQ ID NO: 151835 - DNA, 75 bp, Homo sapiens
cgtgggtgaagataggatcaagatggccatgtggcaggatgatggatttagaagaggtaatacccctggattgct

SEQ ID NO: 151836 - DNA, 100 bp, Homo sapiens
cacagacgcctccagggggcagcactcaagcgcatcttaggaatgacaggttccagcaacagatagaaatgctttaagttcactctggggaaagctggcc

SEQ ID NO: 151837 - DNA, 118 bp, Homo sapiens
aacagcctggggaaactgccgacgctcaaggatggtgatttcatcttgaccgaaagccccaggatgggtgagttcaacgagaagaagacaacatgtggcaccgtttgcctcaagtacc

SEQ ID NO: 151838 - DNA, 74 bp, Homo sapiens
tcggcggcgccctgcaccgcgcctcgcaaatatgacgccgtgcccatccagtccagcgtggtgttatgttcctg

SEQ ID NO: 151839 - DNA, 83 bp, Homo sapiens
cttacagccgctcgtcagactccagcagccaagatggtgaagcagatcgagagcaaggaatcaaccctgcctaccggactgag

SEQ ID NO: 151840 - DNA, 83 bp, Homo sapiens
agcatataagtcagaattattccagaaagccaaggatatgttcaaggaatgagtgatttactttcccctcttttatatgtgat

SEQ ID NO: 151841 - DNA, 120 bp, Homo sapiens
ggtcagtccgccgctcaccccgcggccgcaccttcccgccttctcaggcacaaatcctgaagagcccgtgggcgtggactgctcatctgtaaagaaagtggagacatgaccttgagattt

SEQ ID NO: 151842 - DNA, 83 bp, Homo sapiens
tccgccacctcgagctgcggtagcagcgactcatgagagcgcggccggaggacaggtttggtgcacctcgatttggaggaagt

SEQ ID NO: 151843 - DNA, 75 bp, Homo sapiens
cagaaaagattttgctgtcaaagttgtgtcagtgaatacaaacaggacttagcactcaggcctgtgaatcaggag

SEQ ID NO: 151844 - DNA, 100 bp, Homo sapiens
cactggtgctgagctgctaggaagcccctatcgccgagctcgttggagcttgaacccattgtcacccctccgttgctctaggtcgtaaccagcctttgaa

SEQ ID NO: 151845 - DNA, 87 bp, Homo sapiens
tgcttaaaaatcaccagttactttaatgagtaatggagagtgaagagttcatgttgcttccagccaatcaactcattgatataatat

SEQ ID NO: 151846 - DNA, 75 bp, Homo sapiens
taaggatcagatcaagaagatgagagagggtcctgcaaaggtccttgaatgggcaagagggcacatgaagtacgg

SEQ ID NO: 151847 - DNA, 74 bp, Homo sapiens
cacgcagaacgtcaacaccaagtgcatcaccatccccaggttcgagaacttgtcttggacaattgcaaatcaaa

SEQ ID NO: 151848 - DNA, 100 bp, Homo sapiens
cggcgcgcgggggcgacgcgcgggaacaacgcgagtcggcgcgcgggacgaagagacacctatggctgccgatgaaggctcagcagagaaacaggcagga

SEQ ID NO: 151849 - DNA, 98 bp, Homo sapiens
ccaagaagcaagagatcaacaagaagctgaacacccacaaccggaatgagcctgaatacagcagaactcaaccttggtgtgttatctgaccaacttcc

SEQ ID NO: 151850 - DNA, 115 bp, Homo sapiens
cagcgattcgagaaggtttcctactttgtatttggtgatttcaacttccggctggattccaagtccgtcgtggaggtcaccgacgatgagggcgcacctgctgtcctggagcttc

SEQ ID NO: 151851 - DNA, 100 bp, Homo sapiens
cagcggcgcgcatcagggacactcggtgtgcgacgtggagatccgaaggaatgaaatccggctgagcttcagtcattgtctattcctggaacttaccaag

SEQ ID NO: 151852 - DNA, 51 bp, Homo sapiens
gaaatcttcaatccagatattggacccatggatgaaggaccagatcttgat

SEQ ID NO: 151853 - DNA, 100 bp, Homo sapiens
cagtgttaaaggaacctctacaacgaaggtgaagccacggaagataaggccaagactaaggggctgcagagcggggtggacattggcgtcaagtactcgg

SEQ ID NO: 151854 - DNA, 100 bp, Homo sapiens
cggcgcgcggtgcggagcctgggggaaaagggaggagcgctccggtggtctggcgcgctgggctcgctaggctctgacgcccgctctgcggcttcggtgt

SEQ ID NO: 151855 - DNA, 75 bp, Homo sapiens
ctggaatgcatccaagagaatccctcaacatgctgcaaccatgtccaagggacctgcagttggtattgatcttgg

SEQ ID NO: 151856 - DNA, 98 bp, Homo sapiens
agagctcatctggaattttgccgatttcatgactaaccagtgctgtgggtgagcgtggaggatgctcagatgcacaccgtcaccatctggctcacagt

SEQ ID NO: 151857 - DNA, 90 bp, Homo sapiens
gacgcgtagcaggtggaaggagggagggagccgcaggcgcagacccacccgccatgaagccccccgcagagctgccaaacggaggcccga

SEQ ID NO: 151858 - DNA, 82 bp, Homo sapiens
agaagaactggcttcgggaattttaccaggttcgaccttgaaactacaagagtgaatctgaaagttagttcaaaaagtcaaa

SEQ ID NO: 151859 - DNA, 90 bp, Homo sapiens
gaccacttcacaaaagcccagcggaagaacatcagcgtgtggtgcaaacaagctgaggttgaaaggattgttgacaaaaggaaaaataaa

SEQ ID NO: 151860 - DNA, 75 bp, Homo sapiens
gtatttcaaccacagatggcactgccaacagtttgcagctcaccttgtgaagatgaaatatccaagaatctgtat

SEQ ID NO: 151861 - DNA, 74 bp, Homo sapiens
cgtagagctgagcgacccagcccgcgagcgagtttgtgaagaaatatgggaacctttttagcttggagcttggt

SEQ ID NO: 151862 - DNA, 82 bp, Homo sapiens
ccggtatgagcgcccctcgccaccccgtgtcccaggcccggcctttctgacaagaggtgctggagaatctggtaaaagcacc

SEQ ID NO: 151863 - DNA, 75 bp, Homo sapiens
cagcaagccgcacctggagaagctgaccctgggcatcacgcgcatcctaggcttctgactttggccaggtaggac

SEQ ID NO: 151864 - DNA, 75 bp, Homo sapiens
ctccaagtcaatatagccaacagagcagcagctacgggcagcagagacacagcaagaggcaacattttggaagca

SEQ ID NO: 151865 - DNA, 83 bp, Homo sapiens
ggaggaggagacgcggagccgaagtgccattgtcatcaaggctggaggccgctacctggaggctgaggctgcagtggccaccc

SEQ ID NO: 151866 - DNA, 75 bp, Homo sapiens
gccgggggctacggaggagctggaggagcgctagtcctgctgatgggcaaagaaggtgtccacggtggtttgatc

SEQ ID NO: 151867 - DNA, 51 bp, Homo sapiens
tacatgaagtatcatgtttctgctgctgacttgagtaaaccaatagataaa

SEQ ID NO: 151868 - DNA, 101 bp, Homo sapiens
cagtcttcccgcgtccgccgattcctcctccttggtcgccgcgtccttggctggcgtctgcatatctatgtgagactgaattttcctcttagacttcagct

SEQ ID NO: 151869 - DNA, 75 bp, Homo sapiens
tagacattggtggaggattcacgggaactgaatttcaattggaagaggctgctctttggcgtaaattgcaatcga

SEQ ID NO: 151870 - DNA, 88 bp, Homo sapiens
tccgagtctccgccgctgcgggcccgctccgacgcggaaggcaagcgctttgcttctggatcagctgacaaaagcgttattatctgga

SEQ ID NO: 151871 - DNA, 74 bp, Homo sapiens
gatgctgtggaacttgcaaatcgaagttatgaggagtcaaatcctaaggatccagcggcagtgacagaatccaa

SEQ ID NO: 151872 - DNA, 82 bp, Homo sapiens
ccagctttgagactgtggcagaatgtcgtgtgctgcagaagctgggagcagacgctgttggctggagggcagtggcatgatc

SEQ ID NO: 151873 - DNA, 74 bp, Homo sapiens
ggagcctggacacgcagtacagcaagggatatttcccccaaaaatggccttaagacatttttctctcgagaaaa

SEQ ID NO: 151874 - DNA, 83 bp, Homo sapiens
tgatcatgctgggagccatctgtgccatcatcgtggtagttattgtaagccggatcacctcaacagtcacgtcagacaagtgc

SEQ ID NO: 151875 - DNA, 90 bp, Homo sapiens
atgaagatgcgacaggctaagctggattatcagattgctgctaaaattgattcaattcctcacttgaataattccacacctctagtggac

SEQ ID NO: 151876 - DNA, 95 bp, Homo sapiens
ggaagaggcactgctgagggggcgcgaggggaacggaggccagagctgcggtgccgtgagcgatgtggagatgcaggaacactatgatgagtttt

SEQ ID NO: 151877 - DNA, 100 bp, Homo sapiens
tccgcgcccggccggacccgggcccgaggtgggacagtcacttcctcctccctccccacccctgtcgcatccacgtgcgacctggaggactggtcagaac

SEQ ID NO: 151878 - DNA, 75 bp, Homo sapiens
gactgcgtggttttggtcgactacaccatccggaagttctgcatacagccagctcagggaaggcctccatattat

SEQ ID NO: 151879 - DNA, 98 bp, Homo sapiens
aaaatggaaggtgtagaaccaaattcgttgtggtccttgatccagtatgcttatacagcttcttggacacttaatgattgttggcaagaaatgtgctg

SEQ ID NO: 151880 - DNA, 100 bp, Homo sapiens
tttaagtacaatggtgggcttaattttagtactatactggcaattgctggagaagattttgcaattgttgcttctgatactcgattgagtgaagggtttt

SEQ ID NO: 151881 - DNA, 48 bp, Homo sapiens
ggcgccggcctccggggagaaacgaaaatgacagatggcgagacctgg

SEQ ID NO: 151882 - DNA, 100 bp, Homo sapiens
cgaggtcccgcctcgttcctctgggcagcctgggtgttttcacttgttcttggactgggccaaggtggagaagacagactgctgctttggacctgttggt

SEQ ID NO: 151883 - DNA, 51 bp, Homo sapiens
cgaattccagaatgatgaaattgtaaatcatagcccactaatgagttttgg

SEQ ID NO: 151884 - DNA, 74 bp, Homo sapiens
gcagcacattttgaaaaatcctctcattattaacagcattatcgataagtttgtctgcatagcccagcaagatt

SEQ ID NO: 151885 - DNA, 100 bp, Homo sapiens
agaatggtgtcagtgatataaaaactcacaagtggtttgccacgacagattggattgctatttaccagaggaagagagcagcacttgaggcatgtcacaa

SEQ ID NO: 151886 - DNA, 100 bp, Homo sapiens
atcaatcaaccagaagtgaagacgaaagcttcaaaggttctcctgaaaagaaagctgaacattcatctataaatcaagaaaatggcactgcaaaccctat

SEQ ID NO: 151887 - DNA, 100 bp, Homo sapiens
tgcacccctacgggaacccacgaccattatatgctggaatggttccttataatggcaaagggaggcattgtccgaactgggactcatggactgcttgtga

SEQ ID NO: 151888 - DNA, 73 bp, Homo sapiens
atcacaagcaactctggatgggattgcaaaatgtttcaggtttagctgtgcctcccagtgactataatgacaa

SEQ ID NO: 151889 - DNA, 75 bp, Homo sapiens
attactgctcatgcctaaccttctatgaggcagagatcaatcttcaggtcctggcattgatgtgcctgctccaga

SEQ ID NO: 151890 - DNA, 100 bp, Homo sapiens
gagcgtctagagattaacgactccgaagaggttgcaagtatttatactccaaccccaagacaccaagcatgcttgagagttcaaaccggcttgatgaaga

SEQ ID NO: 151891 - DNA, 100 bp, Homo sapiens
aaagaatttgagcctctgctgaattggatgaaagataaagcccttaaggacaaggctgcagcaaactaagtgttgcttgctaaagaaaaatgaaagctgg

SEQ ID NO: 151892 - DNA, 75 bp, Homo sapiens
taccaccagtggagtccaggatgagatcatgatcagaagcatcttcctgttcttggaccgcacctatgtgctgca

SEQ ID NO: 151893 - DNA, 98 bp, Homo sapiens
ggcgagctgggtggtctggagaccatggagaccctcacggagctgggcgacgagctgaccctgggagacatcgacgaaacgcttcgttaagggactca

SEQ ID NO: 151894 - DNA, 75 bp, Homo sapiens
tcagtatcaacaatgattgctcaagacttctttgtggctttgctaaaggacaggaaatgttcaggctggagacta

SEQ ID NO: 151895 - DNA, 80 bp, Homo sapiens
aacagcggcgtttcacggtggcacatacatggttattggagtgatgagtaaagaatacataccaaagggcacacgttttg

SEQ ID NO: 151896 - DNA, 75 bp, Homo sapiens
gttccaagaactgcctgtgcgccctcaacctgctttacaccgtaattaatgatcctatccatggccacattgagc

SEQ ID NO: 151897 - DNA, 75 bp, Homo sapiens
tggtgaagttccatgcccatccagagagcacaacgtggaagttcttggaatactttccgatgatgtagagactga

SEQ ID NO: 151898 - DNA, 83 bp, Homo sapiens
caaacagcccgcccgaccccgtcccgaccctggccgccccgagcggagcctggaggctaaccttgccgcgggccgagccctgc

SEQ ID NO: 151899 - DNA, 75 bp, Homo sapiens
ccactgatgaggatcagcccatgttactccacaggatccgctgaacataggatgttgccacaaaatctacctcgt

SEQ ID NO: 151900 - DNA, 97 bp, Homo sapiens
gttcaaatgtcctttctgtagctacgcctgtagaagaagggacgccctcacaggacacctcaggacccattctgcttcgcagaatcaagaacggcta

SEQ ID NO: 151901 - DNA, 80 bp, Homo sapiens
gctattgccaacagcatgtttaatggatttaagcgagagcctcactggttcccaggacatcaacctgaactggatcctcc

SEQ ID NO: 151902 - DNA, 96 bp, Homo sapiens
cagcacctttcggcttctgagacggcggcagcagcggcattcagcagtagcagccagatgaagaagcggccaacatctgcagtgggctacaagagg

SEQ ID NO: 151903 - DNA, 75 bp, Homo sapiens
acagaagccgctattcgcctgggattggagcctcaaggaataggttctcctagtgtctatcatgcagttatcgtc

SEQ ID NO: 151904 - DNA, 97 bp, Homo sapiens
gagcagcctggcaacggcggtggcgcccggagcccgaggttctggcctataggaacaagacattttcagtaatggaagaaggagcttccaggctggg

SEQ ID NO: 151905 - DNA, 73 bp, Homo sapiens
accaccttcgtcaatgtcatcgcggatggacaaccggaaattttctacacattttggaattcagttactcagg

SEQ ID NO: 151906 - DNA, 99 bp, Homo sapiens
ccgccttctactgcgagaaggagaacctcttcatcctggaggaggagcagcggatcaggctggctactgcagcactggggtgtcagttgttggtccgac

SEQ ID NO: 151907 - DNA, 106 bp, Homo sapiens
atgcatccaacgtcaagtacaccatgcacaaggtcttccagtttctgaacctagacctgcctagagctggaacgttacctccagagcgagccctgctatgtttcag

SEQ ID NO: 151908 - DNA, 76 bp, Homo sapiens
agaggaatagtctacaaaggaagacttgtaacctggagaagaggtctatgttaacaatgaatgggcaaccagtgtt

SEQ ID NO: 151909 - DNA, 100 bp, Homo sapiens
aaaaagagcaggaagtcattacatgggcaattgaaggaacagactaaaaatcgtgtcctggaaggaaactacaggtactaccagggattttcagtctgaa

SEQ ID NO: 151910 - DNA, 75 bp, Homo sapiens
cttggcttcaggttctgatgatgcaaaagcttcatgtactggactgactggggaactcccgccaagatcaagaaa

SEQ ID NO: 151911 - DNA, 90 bp, Homo sapiens
cagtgaccgtgcccacgccaaggggcattgacgttgtgaggaataaaattaaaatgtttgctcaacaaaaagtcactcttcccaaaggcc

SEQ ID NO: 151912 - DNA, 100 bp, Homo sapiens
gcccctggagcacctggtggaagaacaagtggcagctctattaccaggttttaaacttcgccatgatcgtgtcttctgcactcatgatatggaaaggctt

SEQ ID NO: 151913 - DNA, 90 bp, Homo sapiens
tgaaggattttgcactcaccattaaatctatcaggctttagaaaagaactcaggaatttggaagcaggctataaatctcatgaattccac

SEQ ID NO: 151914 - DNA, 89 bp, Homo sapiens
tgggattaatgctaaatttgtgaatgctgtgtatgataccttacttaatactgttacaggaaatacaggaggcagaggaacaaataaaa

SEQ ID NO: 151915 - DNA, 87 bp, Homo sapiens
gaggaggaggggagaggcctggaggacaccaacatggtttgagcacaaaatgaacataattagggaaaataaggatctggcatgttt

SEQ ID NO: 151916 - DNA, 100 bp, Homo sapiens
gtgactgcctgttcatgcagagagatgtgtacatatcccacgtgaggaaggagcacgggaaggactacgccgacacagagctcctgctttcccgagaaaa

SEQ ID NO: 151917 - DNA, 50 bp, Homo sapiens
ctacaacagcagccacaggaaccttgagcctgatcaaccccgtataacca

SEQ ID NO: 151918 - DNA, 90 bp, Homo sapiens
gtgacatcaagaggaagcggaaaccagtggccacagcatctttgtctagccccagtgcaggtaagagcttctgttcgtgtgcagggaaag

SEQ ID NO: 151919 - DNA, 100 bp, Homo sapiens
agcttacattttatgtaagagaaacagaccagagttcctccgatggccaggaaccttttagtacttccgccacaggtggaattaagaaatctggcaaaaa

SEQ ID NO: 151920 - DNA, 96 bp, Homo sapiens
actcgagactgtaggcactgccatggcccctgtgctcagtaaggactcggcggacatcgagtatgtccgtggttcagaccctgtattaaagctttt

SEQ ID NO: 151921 - DNA, 73 bp, Homo sapiens
agctcgcgatgagtggtctcggcaggctcttcgggaagggtaatcaatattatcaatgctgcccaggaaagta

SEQ ID NO: 151922 - DNA, 98 bp, Homo sapiens
accaacgtggggtccctgttgctcaccccgcaggagaacgagtccctcttcactttcctcggcaagaaatgtgtgcaatgctggggtgaaaacaacac

SEQ ID NO: 151923 - DNA, 95 bp, Homo sapiens
cttggctcactgaggaggtttgttgtctgtgagacggaagttttactaaaagagctggagcaaatgctgcagcaagcactgcaacccacagccac

SEQ ID NO: 151924 - DNA, 83 bp, Homo sapiens
ctcacgttggagggcttcgcgtctgcttcggagaccgtaagggaatactcccccagttgcaagaggcgcaggaccgtggaaga

SEQ ID NO: 151925 - DNA, 96 bp, Homo sapiens
cagcatcccagtttttggtcttctgtcaaaaacacagggatgagaggcctccgcttcatccaggtcttcctccagagcatctgcgacggggagcgg

SEQ ID NO: 151926 - DNA, 96 bp, Homo sapiens
cgggaggagaaggaaggcatggaaagttccagccggttcgagagctagcccgagcgggaagaagttccgcagcaagccgcagctggcgcgctacct

SEQ ID NO: 151927 - DNA, 80 bp, Homo sapiens
aaacattcaagaatgagagcgagaacacctgtcaagaggtccagttccggccgtaccgcacagacgacttcatcacgcgc

SEQ ID NO: 151928 - DNA, 83 bp, Homo sapiens
ccggagaactgtgcccattacttctgcctggactgcattgtcgaatggtccaagattataagcgccatggctatggctagtgt

SEQ ID NO: 151929 - DNA, 50 bp, Homo sapiens
gaggcatggcggccttgaccagccagtgatggattctcgctctgttgccc

SEQ ID NO: 151930 - DNA, 82 bp, Homo sapiens
tacagacatgcgccagcacgcctgcccaagaagatgaaaggattgttcttgttgacaacaaatgtaagtgtgcccggattac

SEQ ID NO: 151931 - DNA, 100 bp, Homo sapiens
tggctcacactcttctgaaacgactcgggtagaggctgaggaaggccgtgttgtttgtctacctgggactatgagaaagatcagtctaaagaaaaggaga

SEQ ID NO: 151932 - DNA, 100 bp, Homo sapiens
aatttttacaaaatttgatgaagtccagaaatctggaaacatgatacaatctgcaaatgccagcctgtctcgatcagcctttctgtctcagagatattat

SEQ ID NO: 151933 - DNA, 82 bp, Homo sapiens
ctttcggcggagggaccaaggtggagatcaaacatatgatgcttcctggtgtgtttagtggttggtgccattccaattttct

SEQ ID NO: 151934 - DNA, 75 bp, Homo sapiens
caaagcctgcccagacggctcacctgtgcgggatggaacaaaagagtaatcaagtcagaggattatatgactttt

SEQ ID NO: 151935 - DNA, 100 bp, Homo sapiens
cgagggatgctgaaaacctttgggcttcatggagtcgtcttagatgttgattcacaaaatcctttatatgatacagaaagatgcaaggtattccagtgtg

SEQ ID NO: 151936 - DNA, 82 bp, Homo sapiens
cttggacgaagatggggagaaggaagcgagactcatacgcaacctcaatgggttttggccaaattgggcgagggcacaaaat

SEQ ID NO: 151937 - DNA, 46 bp, Homo sapiens
gatcctggacaggatgcaggcagataccatgtctgcaaaggagaag

SEQ ID NO: 151938 - DNA, 98 bp, Homo sapiens
agaactgatggaaagccgcatgagaattgagagcctttcatcccagctttctaatctacagaaagaggtgctttgtaacagagccagactggtttcct

SEQ ID NO: 151939 - DNA, 90 bp, Homo sapiens
ttctgccacaggcggcgtcatctacaaggagttagtccttgaccactagtttgatgccatctccattttgggtgacctgtttcaccagca

SEQ ID NO: 151940 - DNA, 100 bp, Homo sapiens
ggaaaatgcaagaagactgatggagcaggcttgcaatattaaagttttgacaacaattcgttcagggcaccgagcaaacatatttagtgcaaagttctta

SEQ ID NO: 151941 - DNA, 90 bp, Homo sapiens
ttggaactgtcaggtacctcaaagcgtaaagacgagttgtactgctgtcacaggaaatggacgctggattacaagcatggcagctcaggc

SEQ ID NO: 151942 - DNA, 97 bp, Homo sapiens
gtgcacacagttcctctttctgaagatcagctctgcagccagatggaacagctggagcaagagaaccagcaactgaaggagggggctgcaggagcag

SEQ ID NO: 151943 - DNA, 100 bp, Homo sapiens
acttcgtagcgcagaaagtgaagctgtttcgggccagcgacccgctgctcagcgtcctcatgtggggggtaaaccactcggtaagaatgattgatgttgg

SEQ ID NO: 151944 - DNA, 100 bp, Homo sapiens
tgaagaagaatttcgatctccgccctggggtcattgtcagggtgtcggttggtggaaatatgaattctgctatggcaaacatgtacatcaataccatgag

SEQ ID NO: 151945 - DNA, 100 bp, Homo sapiens
cccaggataatgttatcaaagtatgtgcttcagtaacattcaaaaactatattaaaaggaactggagaattgttgaacgtaattaggaagctgatagcag

SEQ ID NO: 151946 - DNA, 82 bp, Homo sapiens
actggttctacacgcgagctggtcgtcgtcccgcagacacacaatccagaagtcactttcctcgagacattggtcagcccat

SEQ ID NO: 151947 - DNA, 100 bp, Homo sapiens
ccctgctcttccacttcaaggagacaacggccacacactgtgggagttttgccgaattgacaagcccctgtgtcacagtgaggatgagaaactcagcttc

SEQ ID NO: 151948 - DNA, 100 bp, Homo sapiens
gaagtactcatcgactgatgtggcagactttgctccctggcaaaagacttggacaacttcattgccaactttggggatgcagggtttgtccttgtggcct

SEQ ID NO: 151949 - DNA, 100 bp, Homo sapiens
tgaagcctcctcgccgccgtttctgagaagtttgcccgaccatctgtaagtcacacggctgcaccgccgaaggcctctgttgccacagcgagtgcctggg

SEQ ID NO: 151950 - DNA, 75 bp, Homo sapiens
aaagaatgcgtgtattttgtggaaagttccaaactgtctgatgctgggtcagatgtggaggcactgaagcgagag

SEQ ID NO: 151951 - DNA, 75 bp, Homo sapiens
aggaggacagttcgctacacagcaatgcatcgaggactggaatgtcacgtggaataccagcaaccccgacttcac

SEQ ID NO: 151952 - DNA, 90 bp, Homo sapiens
cgggaatgctgagaaaacagacagatttgtcatgaagaaactcaatgatcgtgtcatgagaggtagaagagcagaggatggctctgtcat

SEQ ID NO: 151953 - DNA, 80 bp, Homo sapiens
aagctgaggtcgtctgagccctgcgacagcctggacagcaactcagcaaaatgatgcttcaacacccaggccaggtctct

SEQ ID NO: 151954 - DNA, 100 bp, Homo sapiens
ctcaggtttttcctaagctcaactctagccagctaggttcctggtgctttgggggggcaagctctgtgtgattgattggaagacatcagagaaaccaaag

SEQ ID NO: 151955 - DNA, 51 bp, Homo sapiens
gcaaataaccgttttgaaatttgaatttcctactgaagcagatctggaaga

SEQ ID NO: 151956 - DNA, 83 bp, Homo sapiens
gctgagcctgcagccggccctgccggtattagaaaactactcggatgctccaatgacaccaaaacagattctgcaggtcatag

SEQ ID NO: 151957 - DNA, 51 bp, Homo sapiens
agggagcattccaggagagaaaggaactctcgagaaccctgtcctggcttc

SEQ ID NO: 151958 - DNA, 97 bp, Homo sapiens
catgcggaagatatggcagaactcgtgattgtcggggggaaagacatccagggctccttgcagcagtacttcatcctcctcatcatcacggacgggg

SEQ ID NO: 151959 - DNA, 74 bp, Homo sapiens
tggaccaagatcgagcccagcgtcaacttcctcaagtcgcccaaagggaagatgaagggcttctccctgctggc

SEQ ID NO: 151960 - DNA, 98 bp, Homo sapiens
agaggttcttcaaaatcagtcactaacttctctctcagatgttgaaaagtgttcctttctgccgaaattctccattcatatagaaaccaagtatgagg

SEQ ID NO: 151961 - DNA, 74 bp, Homo sapiens
tactcatctattttgaataaatcagaaactgaaactgttttggctgggcctacttcacctataccttctctggg

SEQ ID NO: 151962 - DNA, 100 bp, Homo sapiens
cgtctccggacggggccctgacacggccaccctactgcctggaggccggggagccgacgcctgatgtggtcaaaggtgaaaagattcttccggtatttga

SEQ ID NO: 151963 - DNA, 75 bp, Homo sapiens
cttggttaaaacctgacacttttaacagattgaagaaggtattgttgtaatggaagatgattctccagtggaggc

SEQ ID NO: 151964 - DNA, 75 bp, Homo sapiens
cactaacgatgtagggatacaaaaggatggtgcaccaaaggtggtcgtgtgatggtaacagatgctgacaggtca

SEQ ID NO: 151965 - DNA, 50 bp, Homo sapiens
cgacgtccttctggaagaggcgaaactgccattcaaactcctccccacga

SEQ ID NO: 151966 - DNA, 100 bp, Homo sapiens
ttagggaaaatagaacctacgctgaaattttgggggcaggttctcttgctaggtcatcatcagatttgaaatatttaaagtggatacaaaactatttcag

SEQ ID NO: 151967 - DNA, 83 bp, Homo sapiens
ggatgagctatgacttgctaaacaatctgttggagcaatgttcctttagttgggactgggggccttcctttcctacccaggga

SEQ ID NO: 151968 - DNA, 75 bp, Homo sapiens
tgaagcttctaggagcttctgaattgccaattgtggaatcagagatcattgatttcttcctgggggcctctctca

SEQ ID NO: 151969 - DNA, 75 bp, Homo sapiens
tcagaagataaacgaggggctggaacacctcgccaaagcagagaaatagtgccatgtttcagaacagagtaagac

SEQ ID NO: 151970 - DNA, 88 bp, Homo sapiens
tggagaccatgaactatgcccagaccctgtattcagtggatcagctggcaccacccaaatagataaattggcccatctggtcttgtgg

SEQ ID NO: 151971 - DNA, 75 bp, Homo sapiens
cgtcatccctgatatccctgaccacttcctgtgtctgtgggagcactgtgagtatcctttgaaagaaattgtggt

SEQ ID NO: 151972 - DNA, 101 bp, Homo sapiens
tgaaccaagaaaaccttatcagcactatttgaaacttttatctcatctggcttggcgcctgaggttctcccattagggactttcagttaccttgatgatgt

SEQ ID NO: 151973 - DNA, 105 bp, Homo sapiens
cctccaatcgagcgtatgattttctgtacgatgctaatactggagaccgtggacagaccaataatgctgcttctgcatcagcttccaactccacctgaacagtcc

SEQ ID NO: 151974 - DNA, 97 bp, Homo sapiens
gaacaagtttgtcaatccgtctgaacttcagttgccttacctgtaagatacactctgtgcagttttagagagagacacactcagtattcgagaaagt

SEQ ID NO: 151975 - DNA, 100 bp, Homo sapiens
ggaacctcactgaaaattggtattgttggattgccaaatgttggctccagaaggtcctgagcctcggccacatcagcaccgactacccgctggccgaaac

SEQ ID NO: 151976 - DNA, 101 bp, Homo sapiens
catgaactcagggccggttgtggccatggagtctactcttcatcttgtgttgagacttcgtggtggtgctaagaaaaggaagaagaagtcttacaccactc

SEQ ID NO: 151977 - DNA, 90 bp, Homo sapiens
ggaggttctgctagaccagcctggcagggagggatggccgagcctcgatttaacaacccctacttctggccccctcctcccaccatgccc

SEQ ID NO: 151978 - DNA, 100 bp, Homo sapiens
ctatgtacctgttaccactttcaaaaacttcacagagaatgcagttgtcttgacttcaggtctgtctgttctgttggcaagtaaatgcagtactgttctg

SEQ ID NO: 151979 - DNA, 88 bp, Homo sapiens
tttcattgtctcggacgtgcggggcctgggcctcccggtccgcaagcaggttgtttacattcagagctctatcaataagaggaataca

SEQ ID NO: 151980 - DNA, 100 bp, Homo sapiens
cgcataccatcaccctgctcagcttcaccatcgtcagcctcatgtacttcgcctttaccaggttcaagggcagcaggaaagacgagatcctgggcatcgc

SEQ ID NO: 151981 - DNA, 96 bp, Homo sapiens
gagcggcgccgagaggccgtgcgggacgcgggcgccaggaccggccgaacgcagagctccatcggcagtgtccatcatgcatcaggtgagccgcac

SEQ ID NO: 151982 - DNA, 83 bp, Homo sapiens
ctgcaagatcgaggctgtcctctggtgagaaggtggtgaggcttcccgtcatattccaggcctatatgaacccaatagcaatg

SEQ ID NO: 151983 - DNA, 75 bp, Homo sapiens
gaaattacgcttaaggaatgactgggaaattgtggattttaatggacccgactgagattactgatgacttaattc

SEQ ID NO: 151984 - DNA, 96 bp, Homo sapiens
aagagggctatggccggagcttgagatacgccgctctgaatcttgccgccctgcactgccgcttcggtcactaaatggatgatgaacttgttgttg

SEQ ID NO: 151985 - DNA, 50 bp, Homo sapiens
catgtgtcattgggcagaaaacaggctcttcaaaggaatctaaagacagc

SEQ ID NO: 151986 - DNA, 112 bp, Homo sapiens
gtcgtaagaagaggtcccaatcccccactctttccgccctaatggaggtctccagtttcggcgagtttataccgaggtggctacagccgatttgccccctactgaagtgacg

SEQ ID NO: 151987 - DNA, 80 bp, Homo sapiens
gtggcagattcactcccattgctaacccaaaggctaacacatcagatcattataaacctgcaatttcccatcgagattta

SEQ ID NO: 151988 - DNA, 75 bp, Homo sapiens
ctatgaaaccactcaagagatgctgaattatgccaaaaccaggatccagcttcagcttcggcgaacacatgcagg

SEQ ID NO: 151989 - DNA, 74 bp, Homo sapiens
acctgggctgggaacccgcggtggagcgggacacgaacgtgatgccgacaaaaggatcaaggtggcgaagcccg

SEQ ID NO: 151990 - DNA, 90 bp, Homo sapiens
gtgcgatatggcaaagccaaagctcccatccaagacatctggtaccacgaggatcggattagagcccatcgacgagtacaagccccagga

SEQ ID NO: 151991 - DNA, 100 bp, Homo sapiens
aggactccaaggacagccacacgtctgtcaccatggaagaaatggtggagtcaatgaagaaagtagcagggatggatgtggagctgacagttgaagaaag

SEQ ID NO: 151992 - DNA, 100 bp, Homo sapiens
cgccatcctgccgcagctggcgcagcccacgctcatgatcgacttcctcacccgcgcctgcgacctcgacgctgcaggagctgaagatggcgagctccgt

SEQ ID NO: 151993 - DNA, 73 bp, Homo sapiens
agcttcggcctgagtgatctctatggtgacaacagagtccatgaagactgatggagaggcagaaacggaaggc

SEQ ID NO: 151994 - DNA, 100 bp, Homo sapiens
agaggggaaactatgggagttcccaattaacaatgaagcagccttgaaaagatcttttgaggtcgaggaggtcgagacacccaactccaccccaccccgg

SEQ ID NO: 151995 - DNA, 100 bp, Homo sapiens
gccggtactgttgaaagcgacaagtggaggcgccgctctagcggccgggactctgaactatggcgcttataggctttatactgtggtgcctcgcctggtc

SEQ ID NO: 151996 - DNA, 140 bp, Homo sapiens
cacagctggctgtagctggccaaggagttctcgattaaagaggaaggggcagtgctcacatttctgggcagcttggtttatggcagctccaggacctcgcaccccgagacggacatcttacaccgccaggcctatgcggc

SEQ ID NO: 151997 - DNA, 83 bp, Homo sapiens
tgcccaggacgcacagatgagagcgctccgaagactggaagaggagcaggacttggatggtgagaaggggccatcatcggaag

SEQ ID NO: 151998 - DNA, 75 bp, Homo sapiens
cagcagctgaaggaagtttccgtggaagaaaggtattgaagcccctgggtgataatttgatggaggaaaacataa

SEQ ID NO: 151999 - DNA, 100 bp, Homo sapiens
ttggtgagcagcgctctggggctcgccttgtatctcaacaccctgagtgcggatttctgctatgatgacagtcactatgaacaagaccgtagtgcactta

SEQ ID NO: 152000 - DNA, 100 bp, Homo sapiens
ttgttaaggattccaagtaactcttatttgcttatgttcctgaggaagaattgaaggcagcagaaatagatgaagagcacgtggaggatgacgggctgtc

SEQ ID NO: 152001 - DNA, 103 bp, Homo sapiens
atagacatggctgtgctggaggaaattcaacaggagctgatcaaccaaggagacaaagcttttgttgatttcctgagtgatgaaattaaggaggaaagaaaaa

SEQ ID NO: 152002 - DNA, 75 bp, Homo sapiens
gatcaaccctctgcatacagtaaagttcgctgtgatcctgagattcaagaactgcgtcagtggcagaagaaactt

SEQ ID NO: 152003 - DNA, 100 bp, Homo sapiens
ctataatgcacccgaggggcgatacaagcaggatgtgtacttgcttcctaagaaaatggaatgatggtcgactgaggttgagccgtcagggcatcatctt

SEQ ID NO: 152004 - DNA, 75 bp, Homo sapiens
tggagaccctcacggagctgggcgacgagctgaccctgggagacatcgacggcaatctgaaggcaaatcctgttt

SEQ ID NO: 152005 - DNA, 80 bp, Homo sapiens
aaaatcccatctaccgcaactctcagttcgagagtaaaggagtgtggccatctggggccgtgtggtatttgccactcagg

SEQ ID NO: 152006 - DNA, 73 bp, Homo sapiens
tcagaagacagagggttttcttttgaggctattgagggcacctacattgacaagaaatgccccttcactggta

SEQ ID NO: 152007 - DNA, 97 bp, Homo sapiens
agctgttactaggacaaccaatatttccaggggatagtggtgtggatcagttggtagaaataatcaaggtcagcctgccagtatactggggggcagc

SEQ ID NO: 152008 - DNA, 83 bp, Homo sapiens
actcgagcgacagagacaagctgagcttgccgcacaaaaagctagagaggagtcctttgcaagagcaaaaaattgggttaaag

SEQ ID NO: 152009 - DNA, 100 bp, Homo sapiens
cacgacccacgagatcatggggcccaagaaaaagcacctggactagctggactggccattatggaggaggagctgcagcattcccattgtgtgaattgtg

SEQ ID NO: 152010 - DNA, 100 bp, Homo sapiens
gcaccgccccgcccccgcgcggccggcgcccgagctcccctcccctctccagcacgcgagtgtcggttgcaaaagcttctcatttcagagagatgccagg

SEQ ID NO: 152011 - DNA, 50 bp, Homo sapiens
accgtggcaccgagagcaagaaaatggttacatgttctctcgcattgagg

SEQ ID NO: 152012 - DNA, 100 bp, Homo sapiens
aagggtgtttggggtgtgttttacaaagccgctgtatgtgtcctgctgagaaccctggctgcagagaccagccctttaccatcttgtaccgggacatgga

SEQ ID NO: 152013 - DNA, 82 bp, Homo sapiens
gaaaaaggacggtgttcttggtcaactctggtgtgagttcttgatacgaatgaaaggccaagagtttgttgatgagattcaa

SEQ ID NO: 152014 - DNA, 100 bp, Homo sapiens
gtatgttaatgagagaaatgcccgggctgctgtagcaggagaggatggcagaatgattgctggccaggttttagatatctcttccaaacgcatgatgaag

SEQ ID NO: 152015 - DNA, 83 bp, Homo sapiens
gggaacaagtcagtcagccttcgtggtcagaagctatgagactctgcacggaggagtgcagggtcctgggacactctgaccag

SEQ ID NO: 152016 - DNA, 100 bp, Homo sapiens
gatgccaactttaaaataaaggacttccctgaaaaagctaaggatatctttattgaagctcacctttgtctaaataaatggagtttcgctcttgtcaccc

SEQ ID NO: 152017 - DNA, 100 bp, Homo sapiens
ccagtatggcaactcctaggatttgtcacgaatgggaagccaagtgccatcttcaaaatttcaggtcttaaatctgaagtcctggagggtatttgggagc

SEQ ID NO: 152018 - DNA, 109 bp, Homo sapiens
agtctcaatatctgtcttcggtggactccttcggcagtccacccaccgccgccgcctcccagagatgccctgtatccaagcccaatatgggacaccagcaccgagtccg

SEQ ID NO: 152019 - DNA, 98 bp, Homo sapiens
atttctggtccagctggagaactaccctcccaacacggaggtcaacctcactctgatctgccggcccaggcctttgtggtgaagcggggcgtccacgt

SEQ ID NO: 152020 - DNA, 100 bp, Homo sapiens
cgggaggctcccgggcttgcgtgggtcaaacacttcagagctttgcaagagcaggcaaggacctacctagatctcctttgctccatgtgtgacctgtcaa

SEQ ID NO: 152021 - DNA, 100 bp, Homo sapiens
cgagactggagcagagccgctgggcgccggagccgaggcgagcgccgcgcgcaccactgcggagctggagtttgttcagatcatcatcatcgtggtggtg

SEQ ID NO: 152022 - DNA, 49 bp, Homo sapiens
gtgcccttcaagcgcctgtctgcccgaggcctgacagacgcgggcagtg

SEQ ID NO: 152023 - DNA, 100 bp, Homo sapiens
ttcctccccacccattcctttaaatccggagggggaaaaaatcccaaggtctgcaaagtcaaacgcttcagagaaccaaagcatgaaagacgtccgtgga

SEQ ID NO: 152024 - DNA, 100 bp, Homo sapiens
gcgagctgaggtggaggcaggctgcggcagacggcgacagtggcggcggcgccatggcagggcttgcaggaaatgcttccagactgcacacttttactta

SEQ ID NO: 152025 - DNA, 97 bp, Homo sapiens
agtggtcacagctggatgtttgcgacatcccagagagcttccagaggtctactgctgagccagtttctcagtctaccacttctgattatcagtggga

SEQ ID NO: 152026 - DNA, 99 bp, Homo sapiens
gcacctttcggcttctgagacggcggcagcagcggcattcaggttagagcagccagcgggtacagaatggattttggaagagggagtcaccactggacc

SEQ ID NO: 152027 - DNA, 126 bp, Homo sapiens
ctaaaaacaagactggggctgctcccatcattgatgtggtgcgatcggggatgccaagggagcagagatgcctgcagcccgtgggagcaagtcctggcctttgcagttgcaaaaactggctgcaag

SEQ ID NO: 152028 - DNA, 51 bp, Homo sapiens
cggtccaatggccggggaggcggagagtcttgctatggagatacacttcaa

SEQ ID NO: 152029 - DNA, 71 bp, Homo sapiens
agcgacggagctggggccggcctgggaccatgggcgctggagaatgctggaggagaccttaaggatggcca

SEQ ID NO: 152030 - DNA, 75 bp, Homo sapiens
agcatggcatggccccgcaggtcttcacccaggccctggagtgcatgcgcagatgtgaatcccgatggagcggcc

SEQ ID NO: 152031 - DNA, 133 bp, Homo sapiens
tgtccctcgggctgacaagaaccacttcccaagacccacagtgcctggagaggacatggggaaggctgaccggttccctgatgtgttacctgcttctgctactgatccaaactgcagaacttctcattcatcc

SEQ ID NO: 152032 - DNA, 75 bp, Homo sapiens
ttcccacgctggcgcccggcgaccgggtggggctgcgagaggtgatcgagaagaaaccagaggtgttcaaggtcg

SEQ ID NO: 152033 - DNA, 82 bp, Homo sapiens
cgtcgaaacgttcctcctgctgctggcacttaagatacagaagatcattgagacactgacacagcagcttcaggcaaaggga

SEQ ID NO: 152034 - DNA, 75 bp, Homo sapiens
ctgagtggttgtgtggtcgcgtctcggaaaccggtagcgcttgcagcatgacctgcttttttaaaggctgcagaa

SEQ ID NO: 152035 - DNA, 98 bp, Homo sapiens
ggccacggagaagggcgagaagaagaaggaggttggtgttcgaggaagagacattgttgttcttggtgtggagaagaagtcagtggccaaactgcagg

SEQ ID NO: 152036 - DNA, 102 bp, Homo sapiens
caggagagcccatggcaggaccggcacggcgaaaccttcaccttcagggtgaggacgcttgagcggaagttagaagcaaaaatgatcaaggaggaaagcgac

SEQ ID NO: 152037 - DNA, 96 bp, Homo sapiens
ttcggctgtacatcgatagctatgagaaggacgttgccaagattaaccaggacccccaggatggtcatccagaggataagccaacgcacatcatct

SEQ ID NO: 152038 - DNA, 122 bp, Homo sapiens
gagaccgcttaccgcatctggctggagccctgcattcgcggcgtgtgcagctgcggataaccgtctggtccttgtgcacaaaatccgtgtcttacatcaaatacccgaaagcttgtctgcag

SEQ ID NO: 152039 - DNA, 74 bp, Homo sapiens
gcaaaaatgacccaccaatggaagcagctggcttcactgctcaggatgctccagaccttgtatgattacttctg

SEQ ID NO: 152040 - DNA, 51 bp, Homo sapiens
atcatagctctcattgccttatcaggtcacggtctagatcacattctcgat

SEQ ID NO: 152041 - DNA, 74 bp, Homo sapiens
gattggaactgtgtttgggagcctcatcattggttatgccagctcctctctgctatatgaaatatgggagacga

SEQ ID NO: 152042 - DNA, 82 bp, Homo sapiens
catcaatggagactttgattctattaggcctgaagtcagagaatactatgctactaagctgtagtgatcctgtgcagcgaat

SEQ ID NO: 152043 - DNA, 100 bp, Homo sapiens
tactctggaggcagattccattttacaggcattaacaaatacatctcctacataaacctcaagccgaagaggttaaaatctcagacaaaaataattcctg

SEQ ID NO: 152044 - DNA, 75 bp, Homo sapiens
ctaatctgggcctcttgtcatgatcgttaactgaagacaatatgcaaaattctcacatggatgaatacagaaatt

SEQ ID NO: 152045 - DNA, 83 bp, Homo sapiens
agtggtaccccggaggagaccctttgaaggtcccttgtggggactggaaagaggacgctcacggatgattgatatccagacca

SEQ ID NO: 152046 - DNA, 95 bp, Homo sapiens
actttcagctacttgaagatagccatcagccgctacgtgactcttttctccaggtatggaattggcaattggacaaatgtatctttctacgaggc

SEQ ID NO: 152047 - DNA, 100 bp, Homo sapiens
cttggaactgtttcctgatgatgaagtgatttgcaatagtatgggggagcatctcttcaggtgcggccgggtgtgtggcaacattacttcatgatgcagc

SEQ ID NO: 152048 - DNA, 51 bp, Homo sapiens
caatatattgactactgccacaattccggacttaaagagagatctacttca

SEQ ID NO: 152049 - DNA, 73 bp, Homo sapiens
cagcctatgaaatgaggatgcagaataactctgtgttacagggtcttgattatttacataccaagtgccgtat

SEQ ID NO: 152050 - DNA, 96 bp, Homo sapiens
cggaaaccgatctgcccgttgtgtttgtgaaacagagaaagataggcggccatggtccaaccttgaagactgtgccctgtccacggtgcctcctgc

SEQ ID NO: 152051 - DNA, 97 bp, Homo sapiens
tggcttgtggtgcggcctcaccatacaggaacagggcagacgttagcgtgagtgatcactctcaatcccggatgttccatttaagcagacctcttcc

SEQ ID NO: 152052 - DNA, 98 bp, Homo sapiens
agaggaagatgttgggcaacatttatttaacatgctccacagcccggaccctggccccatggctgggggttatggagtgatgggtgacgatggttcta

SEQ ID NO: 152053 - DNA, 98 bp, Homo sapiens
ccacctcgagtcgtggtgcgtccagaggcgaaggcatgcaatccacagtagtgactcgacttcatcttcctcctctgaagatgaacagcactttgaga

SEQ ID NO: 152054 - DNA, 78 bp, Homo sapiens
aacgatatgataaagacgatgaagccccctctgatggatttaagtgccctgtatgctcaaaatttgtatcctcagatg

SEQ ID NO: 152055 - DNA, 98 bp, Homo sapiens
tggcgggcgtgggaacccaggccccgccgaggcggccagcaaacggggattcagcgtccgatcctttggaacagggactcacgtgaagcttccaggac

SEQ ID NO: 152056 - DNA, 100 bp, Homo sapiens
ggggcctccagggtctgcagacaaggcaggaagacccttttgaggacttctttgggaatcgaaggggtccccgaggaagcagaagccgagggacggggtc

SEQ ID NO: 152057 - DNA, 96 bp, Homo sapiens
attcggtgaagcgattcctgcaggcgttggttcccctctttgacctgttggttgaatctggcgatgtggaacccatggatatggagggctgactat

SEQ ID NO: 152058 - DNA, 100 bp, Homo sapiens
ccgaggtcgaggcggaggctttagaggaagccaatcgcctggctgaggagctggtggctgaggaggagcgcatgaaacagaaagcagagaaaaagcgact

SEQ ID NO: 152059 - DNA, 101 bp, Homo sapiens
gctggcaaaccggtgtcccctgtgtcatgagaacttcagccctggagaagagcaatgccaagtgagtacacctatgtgaaactgagaagtgattgctcgag

SEQ ID NO: 152060 - DNA, 100 bp, Homo sapiens
ctctgggacattcgaaaacctcagagcagcagccgctcttctaaaacattcaaaccaaagaagaatatccctgaaggatctcatcagtatgaactcttaa

SEQ ID NO: 152061 - DNA, 100 bp, Homo sapiens
taacaccacccgttctccccggcacccgggagtcatcttcaaagccctgaaggtcatccatgcctggcttattatatcatctctattgttgctgttcttt

SEQ ID NO: 152062 - DNA, 98 bp, Homo sapiens
accagtacattaggaaacatgctagaattacctggaacttcatcatcatctacttcacaggaattgccatttagtttctgaagaccacagcatgttga

SEQ ID NO: 152063 - DNA, 100 bp, Homo sapiens
gatatcggccggaggaccacaggcttccagtacgagctggttaggaggcacagggcgtcggacctgcacgagctgtctgttcctgggcttcccgatggac

SEQ ID NO: 152064 - DNA, 82 bp, Homo sapiens
ctggtggaagacttgcagaaagaacctggaagacagaggctggagtggtggatctgaaccttctaacagaggaggtaagatt

SEQ ID NO: 152065 - DNA, 101 bp, Homo sapiens
gctcctctccagaaggcaccaccacagccgcccacttctggaaggttccatcccctgcaggacctggttccagcccactcttctccctgctgcctgggtat

SEQ ID NO: 152066 - DNA, 88 bp, Homo sapiens
gcaacccatgggtggccagggattctgtggaagagaaagccaatacccacctcctcttgggcatgtgcttagacgcctgtgctcgcta

SEQ ID NO: 152067 - DNA, 100 bp, Homo sapiens
cacaggcttccagtacgagctggttaggaggcacagggcgtcggacctgcacgagctgtctgccattgagacccagagcagcagttctgaagagatagtg

SEQ ID NO: 152068 - DNA, 92 bp, Homo sapiens
ctgacagccccggattattctgcctttgaagtggctgggagcccgagccccacacctgccgggcagcaggtgctggacgtcgacagctgcct

SEQ ID NO: 152069 - DNA, 75 bp, Homo sapiens
ccaaagttcatcagagtccaaaatggtgatcaggaagctgcggcaagacatcagtgctcctacttagtgaacctg

SEQ ID NO: 152070 - DNA, 75 bp, Homo sapiens
ctcctgtgcaccctcttcatcaggatggccgagcctcgatttaacaacccctacttctggccccctcctcccacc

SEQ ID NO: 152071 - DNA, 75 bp, Homo sapiens
tcacacgccgccatccgggaggcccagggaagcggaagatccatccaaaagctatgtgaaattacgagactttgt

SEQ ID NO: 152072 - DNA, 96 bp, Homo sapiens
catggacaaatttgtggggctgggagtatttgtagacacctaccccaatgaggagaagcagcaagagatactaatggaccatactaccaaggacca

SEQ ID NO: 152073 - DNA, 100 bp, Homo sapiens
ggcggaatgacagcggcgaggagaacgtcccgctggatctgacccgaggacccagatgatgtggtaccagttggccaaagaagagcctggtgttggtgca

SEQ ID NO: 152074 - DNA, 82 bp, Homo sapiens
tcatctccctcttctgtgtcagggaatgctcctggctggtgcggacacaacccaataggcagtttggagcatgtgaacacct

SEQ ID NO: 152075 - DNA, 75 bp, Homo sapiens
cttttagaagacatagaagaagcactgcccaattcccagaaagctgtcaagttgtggacatcggatacccaagga

SEQ ID NO: 152076 - DNA, 83 bp, Homo sapiens
ggcttgccaagaagactgccgaagagccagctgcctctggccgcatcatctccttatgccagcctggaccatcttggaggcag

SEQ ID NO: 152077 - DNA, 82 bp, Homo sapiens
ctgagcggccaggacgacgaggagcagggcctgactgcgcagctgttaaacgtttaatgaaagaagcggcagaattgaaaga

SEQ ID NO: 152078 - DNA, 78 bp, Homo sapiens
ttgtcgatgggctcgctccagaggacatgagcaaggagcagggtcctaaaaaggtggggacgctgtggcgagaagccg

SEQ ID NO: 152079 - DNA, 100 bp, Homo sapiens
aacactgccggggcccaaccacaagacgactcaataggaggaaggctgattactctgagtgcaaaccttttcactgttccagagaggagcctgacaacca

SEQ ID NO: 152080 - DNA, 83 bp, Homo sapiens
agccaagcgcatgatccgcatggccaagaatagcctaacatggcagaccagagacagcgctcactgtctacctctggggagtc

SEQ ID NO: 152081 - DNA, 101 bp, Homo sapiens
ctaattaccacctggaaaatgcaggctgcaacaaaattggcaacttcagtactgacatcaaggaaattggatacactcacatgaaaatagcggaaggagtg

SEQ ID NO: 152082 - DNA, 76 bp, Homo sapiens
cgccgatgtccctgatccctggagcgacgacggccgctgcctaagctggaaagttgctgcagcaactggtcacaca

SEQ ID NO: 152083 - DNA, 83 bp, Homo sapiens
cggagaggccgcaggagtcatttctcctcctgcccctgctcgagtcttgcagtgtgcggcccgacgccagcgtttccagtcac

SEQ ID NO: 152084 - DNA, 82 bp, Homo sapiens
ctattacccccagtatctgcaagccaagggcgtgatggtgggcatgggtcagaaggattcctatgtgggcgacgaggcccag

SEQ ID NO: 152085 - DNA, 98 bp, Homo sapiens
caatccagctaatccagaaccactttgtagatgaatatgatcccaccatagagtaatcttcctctttgaggcatcaaccggaaagccgttaggtgatg

SEQ ID NO: 152086 - DNA, 75 bp, Homo sapiens
ctttgaccttctgccatgattgtgaggcctccccagccacgtgaaacttctgaagatgatgagaaactgaaaaag

SEQ ID NO: 152087 - DNA, 75 bp, Homo sapiens
tagggaccctgctgaatagctggggctacaggcgtgtgtcactgcgcccaggtatggtttaggaatgatttatta

SEQ ID NO: 152088 - DNA, 83 bp, Homo sapiens
tgggcgtaggaccctccgagccagctccagagagggaccctgtgggctcctggtacaacgtcaccatactggtgaaaatggac

SEQ ID NO: 152089 - DNA, 80 bp, Homo sapiens
gaagatctatgggtcagacagaattacctagaggatcaagacataatgggagcatttttagacaagccaaagatggaaaa

SEQ ID NO: 152090 - DNA, 74 bp, Homo sapiens
ccagtcctgcagcgccagcagctggactatggcatctatgttatcaaccaggacacgagagacttcctaaacag

SEQ ID NO: 152091 - DNA, 71 bp, Homo sapiens
ccgcttatgctattccgatgctgcagctgttgctccataggaaggcgtgacctgaccaacggtgcagatgg

SEQ ID NO: 152092 - DNA, 98 bp, Homo sapiens
atggatgctggagggcgaagacctgcgaagtccctctccaggcagtcatggatcaggtaatgcagtttgttgagccaagtcggcagtttgtaaaggac

SEQ ID NO: 152093 - DNA, 96 bp, Homo sapiens
gccaactctatcgtggtcgtaggaggctgtcctgtctgcaggacctgaaggagaagaaggagaaggtggaggagaaggcaagccggaaagagcgaa

SEQ ID NO: 152094 - DNA, 75 bp, Homo sapiens
tcggcatctagtctttccgcttcttgaatttctctctgtaaaggagagcaaagactcaggtggactgaaggccgc

SEQ ID NO: 152095 - DNA, 75 bp, Homo sapiens
ggcacctacggcgacgtctacaaggctaactatatgtcagaaagcatcagcttttctcgatggacccattcatct

SEQ ID NO: 152096 - DNA, 90 bp, Homo sapiens
gtttcctgtgtgaaattgcttctgtcaaaggtctaccagccacagtctctgcacgtttccaagagcagcagaaaatgaacacattgcagg

SEQ ID NO: 152097 - DNA, 75 bp, Homo sapiens
ggcccctgggcgggactgtgctcgcctttgtgtccaagcaggagggcagcgaggtagtgaagagacccaggcgct

SEQ ID NO: 152098 - DNA, 90 bp, Homo sapiens
agactgaagaaaacaagtcatttagcgctatggaagatgaccagaggactagacctgaagtttcaaagattcagtttaaggagaaagtgc

SEQ ID NO: 152099 - DNA, 100 bp, Homo sapiens
ccaggtggaatctctccatacccatccggataccctcccaatcccaggacatggtctgctatacagctcagactctcgtccgaatcctctcacatggtgg

SEQ ID NO: 152100 - DNA, 96 bp, Homo sapiens
ggggactctgtggccggaagccgcggaactgaggcggcgcgcgctcccggccaccccaagcgcgagggtcaaaaattgcatgttcaaacaaaagga

SEQ ID NO: 152101 - DNA, 75 bp, Homo sapiens
gcggtctgacatcgcgacgctgctcaaaacctcgctccggaaaggggacacctgtcttgctgggtacttcatgca

SEQ ID NO: 152102 - DNA, 100 bp, Homo sapiens
catgaccagtgtctgagcctacaactgcgctatcttccctggatttttcttcaccttttccttactcatgagccagggcaggagcgatttggcaacatga

SEQ ID NO: 152103 - DNA, 82 bp, Homo sapiens
agcagaactaaagaaagctttaaaagaaaaagaaaacagattattattgcaacaaagctttcagaagaattattagataaat

SEQ ID NO: 152104 - DNA, 76 bp, Homo sapiens
gtgttcaagtgcagggagttcccgttacaatcactagtgttgcaggttgaattctcttacccgcccctgattccag

SEQ ID NO: 152105 - DNA, 75 bp, Homo sapiens
ggaaatggcacaagcgcagtggacaaaagcaagccgggaggctggctgcctctcctcctgctgtctctgctggtg

SEQ ID NO: 152106 - DNA, 100 bp, Homo sapiens
ctaaccctattttgaagcaacagaatctcccatccagtccggcacccagtaccatattctctggaggttttagacacttttcggctttgtgagaaacctt

SEQ ID NO: 152107 - DNA, 98 bp, Homo sapiens
acctaaccatgaagacttgaacttaatacagcaagaaagaccatcaagtttaccacaatgaggtcttactgtgtagcccaggctgctctggaactcct

SEQ ID NO: 152108 - DNA, 50 bp, Homo sapiens
gagccgggccgcacccgccgagccgtatggtgttgaaactctggattctg

SEQ ID NO: 152109 - DNA, 75 bp, Homo sapiens
caagcctatgtcgtgaggctttggcagaaattaagaaggaaatatctccattgttacagtctctagcttcgccat

SEQ ID NO: 152110 - DNA, 75 bp, Homo sapiens
tggaatgttggcagctataacttacacatccttattggaaatgaaggagttaagaagaagtaagaagcaaaccaa

SEQ ID NO: 152111 - DNA, 75 bp, Homo sapiens
cgcgggagacttccacggcctgcaggagttcctgaagaaggagttcagcgcggaaaacgtgactttctggaaggc

SEQ ID NO: 152112 - DNA, 100 bp, Homo sapiens
ccagagaatgacacaggtgaaaggccctggaatactgatttgcctgataatgtggaagaagtgaagcttttacttcatatgtgggtagctctgttttaca

SEQ ID NO: 152113 - DNA, 75 bp, Homo sapiens
ccttggtgggtgagaagcagaaagtaaatattatccagttcggcacagcaggtcaatggccagcaaggagggggg

SEQ ID NO: 152114 - DNA, 98 bp, Homo sapiens
ccgggagttacaccgccaccgccagccctgaaggatggctgccatattgggagacaccatcatggtggctaaaggccttgtcaagctgacccaggcgg

SEQ ID NO: 152115 - DNA, 82 bp, Homo sapiens
ccgggattcgcggcccggagctcgggaccggccctgggaggagcggggacactgaggacctctctccaaattggcctctcaa

SEQ ID NO: 152116 - DNA, 83 bp, Homo sapiens
ggccaagctatcttctcgctagcagcttaaagcttttcaagccaggccaagaagctgtgaagtaccagggtcctcgggacttc

SEQ ID NO: 152117 - DNA, 90 bp, Homo sapiens
ctcgatctctggaggcacctgttgcaagtgacagaaactcagccacctgtgacaaatttgagtgtctctgttgaaaacctctgcacagta

SEQ ID NO: 152118 - DNA, 89 bp, Homo sapiens
gcgtgatgaaacagttcctggaaactgccattaacctccagctttttaagcaggatatcctaaacctgaggaaggaatacttgacagtt

SEQ ID NO: 152119 - DNA, 71 bp, Homo sapiens
cggcgagcagaactacggcgagcggagtgcctggtgaagaatgtgatgggatcactagcatgtctgcggag

SEQ ID NO: 152120 - DNA, 101 bp, Homo sapiens
gccggagtgagaagcaagaaggccctggacacagcaatatctctgggctttcacagtttttgaagagcctgaagatcccagcagtaggtccttcttctcag

SEQ ID NO: 152121 - DNA, 75 bp, Homo sapiens
aactctttgggaaagccactcgaaaaggtgaagaggacaataccagcgtcgtctggttttggctgcacaaaggcg

SEQ ID NO: 152122 - DNA, 139 bp, Homo sapiens
tcaaaggagcagggaagaaggaatcatcgaggcatgggggtccacactgcaatgtttttgtggaacatggtgtgttccagagaacaagccttcagacatttgctatattgacgctgagctgtcaggggactcaggctta

SEQ ID NO: 152123 - DNA, 100 bp, Homo sapiens
atatacttacatcagttgttgttttgattcccaccatggccatcacccagtttcggttatttaaattttgtacctgcctagcaacagtattctcattcct

SEQ ID NO: 152124 - DNA, 51 bp, Homo sapiens
accagcttccagaagcagaaagcatggaagctccacaaagcagcagcctgg

SEQ ID NO: 152125 - DNA, 75 bp, Homo sapiens
ggaggcgtcgcgggagcctttggggcaccacagagatgcgggtgctggagaatctggtaaaagcaccattgtgaa

SEQ ID NO: 152126 - DNA, 100 bp, Homo sapiens
aggagacccctctgctgcaccacttcatggagagaaaggccttgggaaaacaactgggaagaagttatgttataaaggttctacgttccatcgtgtggtt

SEQ ID NO: 152127 - DNA, 75 bp, Homo sapiens
ctctgctcttccaacaccagtggaagatgatcacatcccagaatttgccatctgccttagtaagtcatgtactaa

SEQ ID NO: 152128 - DNA, 100 bp, Homo sapiens
cctatcatcgtctcctgtggctgggacaagctggtcaaggtcctagaccagaaggagcacaggctggatggccgtgtcattgaccctaaaaaggccatgg

SEQ ID NO: 152129 - DNA, 74 bp, Homo sapiens
aaaaatgacccaccaatggaagcagctggcttcactgctcagggagacgtacgaggaggaccgggagtacgaga

SEQ ID NO: 152130 - DNA, 100 bp, Homo sapiens
gacgagggccggttgccgggcgcgggcgagaaagtgataatagagtgacatccttcagagacctcattcatgaccaagatgaagatgaggaggaagagga

SEQ ID NO: 152131 - DNA, 90 bp, Homo sapiens
ccgagttggtgtaagaaagacaccgaaagtaaagaagaagaaaacttcagtgaaacaagaatgggatgacctagaagaatcccttaggat

SEQ ID NO: 152132 - DNA, 98 bp, Homo sapiens
ccaagttgtcgacgaccgacagggtggtgaaagtatcctagaaggaaaacatcaccatggctacagaaattggttctcctcctcgttttttccatatg

SEQ ID NO: 152133 - DNA, 101 bp, Homo sapiens
cacagagatacccagacaacaggatcgtctcgtccaaggattattgcatcgagcttttagtgtcttcttattcaacaccgaaaataagcttctgctacagc

SEQ ID NO: 152134 - DNA, 113 bp, Homo sapiens
gcgggtcggcagcgggagggcgcgcggccgagcggaggcggagtcggcgccgagaacatggcagttgtgaaaaacttcaggacaaaaatgtttcatttaaggacttgtgctgc

SEQ ID NO: 152135 - DNA, 102 bp, Homo sapiens
cggagatggctgcgacgcgtgcgcaggcaggagtagggctgattggagccattgtacagtgtcgggaacataccaggacactgagaatagtgtcatgtcata

SEQ ID NO: 152136 - DNA, 89 bp, Homo sapiens
ggagactctcaacgggggaatcaccgacatgctcacaggtctggatgtaccgactgcttttggaataaaaagattcccaggatgtgagc

SEQ ID NO: 152137 - DNA, 75 bp, Homo sapiens
ccaggccagggcggcagcaccagcgccttcgagcagctgcagaggtcccggttcgatacaagaggctgttttcct

SEQ ID NO: 152138 - DNA, 100 bp, Homo sapiens
gctgaccctgggagacatcgacggccataggaaaaggatacagagtagagtttcatgaacctgaaacttggtggaaatttgatcctgaagaattagaaaa

SEQ ID NO: 152139 - DNA, 75 bp, Homo sapiens
caaccaggacgctctccaggaggcgggcacattcagggagactgcattgcttattgatccaaaaaattcctgttc

SEQ ID NO: 152140 - DNA, 74 bp, Homo sapiens
ggagcctcagttggaagcagccgatccagcctgcggagcctgtggggcagggctttgttcgcgggggtcacagc

SEQ ID NO: 152141 - DNA, 100 bp, Homo sapiens
aattgcctttgggactctgaaggctgaaggtcctgggaactccaacaagggagcaaatcagagaaatgaacccaaactacacagaatttaaattccctca

SEQ ID NO: 152142 - DNA, 80 bp, Homo sapiens
gcactttggaggatctttctggacattctgtgaggactccctggaggaaaagcggaagcggcagcggtctgaacgcctgg

SEQ ID NO: 152143 - DNA, 100 bp, Homo sapiens
cagacacgggtgaatgctgctaaaaacaagactggggctgctcccatcattgatgtggtgcgatcggttggtcaaagaaaaagtgatgtatgaaaaagag

SEQ ID NO: 152144 - DNA, 83 bp, Homo sapiens
gaccgggggagctcccaggcgcccgggtacatgtcccagagcaagcacacggaggcccgggagctcatgtactcgggagccct

SEQ ID NO: 152145 - DNA, 75 bp, Homo sapiens
cggcagccggaaggtcaccagcctggacgagctgctggaagatgcctgctctgtgcctgtatctgagatcatcgc

SEQ ID NO: 152146 - DNA, 83 bp, Homo sapiens
ggcttccaggcgcactaccgcgggaaatcctcattgacgattcaatttgttgaaggccaatttgtggactcctacgatccaac

SEQ ID NO: 152147 - DNA, 98 bp, Homo sapiens
agacctgctcaagctctcttaagagattatggaacacagcctattggatccctaggctcaatatgtcctaatagttatggaagtgtgaaagatgtgtg

SEQ ID NO: 152148 - DNA, 76 bp, Homo sapiens
tgtggtggacgttcggccaagggaccaaggtggaaatcaaacgtgtgagagggttgctgttgtattgcaatcatgg

SEQ ID NO: 152149 - DNA, 90 bp, Homo sapiens
aatggaaaatcgcttggttaaaacctgacacttttaacaggtctcacgctgttgcatgtgtcaatcagtttatcatcagtaggactcaag

SEQ ID NO: 152150 - DNA, 100 bp, Homo sapiens
tttgtacacatgtacaatgcccaatgcgatgctttgcatcctaaatcagtttcaaaactctgcttcagcaagatgtgaaaaaaagaagaagctatggaaa

SEQ ID NO: 152151 - DNA, 100 bp, Homo sapiens
ctcaaactcctggactgaaacgatcctctcatctcagcctccaaaagtgctggcattacaggcctgcaggacaagctgaacaagagggacaaagaggtga

SEQ ID NO: 152152 - DNA, 83 bp, Homo sapiens
ggtgccggtggtgcgagtcttcggagcgaccccggcagggcacggccgagcagatgaggactgtgtggacgaccgggccagac

SEQ ID NO: 152153 - DNA, 90 bp, Homo sapiens
gtgagctcactactgacgctgccattagatatgctgtcaacattacaggaatgaagaactgttgcctaattggaaagtgccagcattcca

SEQ ID NO: 152154 - DNA, 83 bp, Homo sapiens
caagaaatctcaagatattaaagttactgctgttaaaaagatggtgttatctgaaaaggttagtcagctgatggaatggacta

SEQ ID NO: 152155 - DNA, 51 bp, Homo sapiens
tggaaagctttaggagttcacagttgggctcgggatgagtttgaaggcctc

SEQ ID NO: 152156 - DNA, 82 bp, Homo sapiens
cctggagtaaccctcactggagaatccagaggtgagaagccctaccactgcaactgggacggctgcggctggaagtttgcgc

SEQ ID NO: 152157 - DNA, 50 bp, Homo sapiens
gcagacattgtcctcaacgaccagcggacgccaggaaagcatgtgcagat

SEQ ID NO: 152158 - DNA, 90 bp, Homo sapiens
cggtccacagctcatcatgatggacttggagctgccgccgccgggactcccgtcccagcaggccttccggagcagtactacagcctcacc

SEQ ID NO: 152159 - DNA, 73 bp, Homo sapiens
tcaagtacctgacgcggggcaagattctgctgtgcacagatgccgaatataccaactctcctttggtacctac

SEQ ID NO: 152160 - DNA, 108 bp, Homo sapiens
gcaggtgaggggcgcgcgcctgcccagctttgcagcccccgaacgcggcctcgcacagtcactcagcctctgaagaagcttcgggttcagactcaggcagtcagtcgg

SEQ ID NO: 152161 - DNA, 75 bp, Homo sapiens
agaagatcggctgcggcaacttcggggagctccgcctagcggctggctgtcggcaattggattcttccagtacag

SEQ ID NO: 152162 - DNA, 100 bp, Homo sapiens
aattatttgtggcaatagtgatcacattcattttaattttgccggaatatttcaagacaccgaaagctatgctaagaaggaatctgatcttaatggcgcc

SEQ ID NO: 152163 - DNA, 100 bp, Homo sapiens
ggcggggacccctgatcggcagcggcatgccagggaagcccaagcacctgggcgtccccaacgggcgcatgacaatgcagatcttcgtgaagactctgac

SEQ ID NO: 152164 - DNA, 80 bp, Homo sapiens
acacctacaaggccgacagagagaagggtccccacggagtctggaccatggaggagcgaggtctggcccccaagttcgac

SEQ ID NO: 152165 - DNA, 76 bp, Homo sapiens
ggaggagaggatgatttttggatcctgagaattgatctatgttggatcatcaagctacaacttcaagcagaagaga

SEQ ID NO: 152166 - DNA, 75 bp, Homo sapiens
cgtgcgagaacagctattccacgagaggatccgcgagtgtattgtcacggtctagatcacattctcgatccagag

SEQ ID NO: 152167 - DNA, 83 bp, Homo sapiens
gtaccacaacagggacacctggttccagctgcagcacgtggacgctgactcggaagtgcagcgccatcatgaccgggtcctat

SEQ ID NO: 152168 - DNA, 101 bp, Homo sapiens
gaatgtgttatacgtcacacaacactttcccatggtttggcatggacattgggggaactctagtaaagctctcgtactttgaacctattgatatcacagca

SEQ ID NO: 152169 - DNA, 75 bp, Homo sapiens
cgaacggctccttcagcagctccagggagtgtgtccaacgtagccccctggcctgtgcaagccctgactccctca

SEQ ID NO: 152170 - DNA, 100 bp, Homo sapiens
cgaccgccagcatgatcgccgcgcagctcctggcctattacttcacggagctgaaggatgaccaggtcaaaaagatgccgctcctacgaggactgctgtg

SEQ ID NO: 152171 - DNA, 101 bp, Homo sapiens
ctgaagatgaagcaaggcccaatgacccaggcgggccgttgctccagggagaactgcaaatatcttcatccacccccacatttaaaaacgcagttggagat

SEQ ID NO: 152172 - DNA, 98 bp, Homo sapiens
ggaggaggaggtggagttgctgcccttccggagtccgccccgtgaggagaatgcatgcttttcacttccactgcatctctcgctggctcaaaacacga

SEQ ID NO: 152173 - DNA, 96 bp, Homo sapiens
atacgccacatttattctaccggggaagacagtggcacaacattctgaaattttttggttattgtaatgatgttgatcgggagttgagaaaatgcc

SEQ ID NO: 152174 - DNA, 74 bp, Homo sapiens
ccccagtgaagctgccagtgaagaaagtaacagtgagatagagcagcccagatggcagttacacagaggagcag

SEQ ID NO: 152175 - DNA, 96 bp, Homo sapiens
tagaggccctattggacaaatttggtggggagcataatccaccatcaatatatctggagaaaccaggaatggatctggcagacacctatattatgt

SEQ ID NO: 152176 - DNA, 99 bp, Homo sapiens
cgccgcctgaggaggcgagctagccgggagttacaccgccaccgccaggaggggagcacaaggaggactccagttggagttcattggatgcgcggcggg

SEQ ID NO: 152177 - DNA, 100 bp, Homo sapiens
tttgcaccctgcttggagacggacttgcttccgtgactgtcatgtggcatgggtctctgcccaagctcgtaatgagactatagcaaggcggctgtgggac

SEQ ID NO: 152178 - DNA, 74 bp, Homo sapiens
cggtggagcgggacacgaacgtgtttgcctatctggggcgcctggctcacgaggttggctggaagtaccaggca

SEQ ID NO: 152179 - DNA, 50 bp, Homo sapiens
agaggatgatgtttttggtgaagaccaagatcactccatggatgaaatga

SEQ ID NO: 152180 - DNA, 100 bp, Homo sapiens
cagcggtccagggaaggaagcaaagcaaatggagaatggcatgctggtgacggacagtgcagggaagcaactgcagagggttcttgatggtgctagacat

SEQ ID NO: 152181 - DNA, 51 bp, Homo sapiens
gataagaaaacacatctttacacactaaggaagctgccaaagaatgtcgac

SEQ ID NO: 152182 - DNA, 87 bp, Homo sapiens
gacacatttgtgagaactatttatgcaggtggtggaggtggatacagcagtcggagaacatctggcagagacaaatacggaccacct

SEQ ID NO: 152183 - DNA, 90 bp, Homo sapiens
tcttgagagcaccttgtggcgcacccagtgtaactgtgacggcagcctggcatcctcgctacaacctcattgttgtgggccgatacccag

SEQ ID NO: 152184 - DNA, 82 bp, Homo sapiens
gaaggaacgaggcaaggagctaaagcagcgtgcgttcagccctggggtcttgagtcaccacgtccgaatataattcttgggt

SEQ ID NO: 152185 - DNA, 99 bp, Homo sapiens
cccaatgaaccttgggtgatttgttctgtatcagaagacaatatcatgcaagtgtggcaaatgcctcctccagctggtgatctcgggtcccgtgcagca

SEQ ID NO: 152186 - DNA, 100 bp, Homo sapiens
agtgttcaccatcctggccccggaaggtgctggagaatctggtaaaagcaccattgtgaagcagatgaggatcctgcatgttaatgggtttaatggagag

SEQ ID NO: 152187 - DNA, 98 bp, Homo sapiens
gagattctgcagttgttgctctaggagctgaaaccagtgggtagatgtcgttctgaaacgcaggttcattttccagacactgaaagagcagaatggct

SEQ ID NO: 152188 - DNA, 83 bp, Homo sapiens
aggaaacacctctacctcctgcgaggcctcccgggctccgggaaaactacactggccagatgatgatgtgcctgcagatatgg

SEQ ID NO: 152189 - DNA, 75 bp, Homo sapiens
gaaaggctcaacgagaacaagctatcagaattcagaaggagctggcggacatcactttagaccctccacctaatt

SEQ ID NO: 152190 - DNA, 75 bp, Homo sapiens
gctatcgatgaaagctggaaaggaggaggcccagctacctggcctatcgaaactttatgattgacacttaccgac

SEQ ID NO: 152191 - DNA, 88 bp, Homo sapiens
gaaccatgctcaccgaccctgaatccccttctggtcgaaggaaagctcttgctactagcagcatcaatatgaaacagtatgcaagccc

SEQ ID NO: 152192 - DNA, 100 bp, Homo sapiens
ttggggatggctgcttgagcctcctgatacagtttatgtaacttgatggaagaaaatggaattactccaaaaagacaagtgctcaagcagcaaaatcctt

SEQ ID NO: 152193 - DNA, 84 bp, Homo sapiens
ccccgccggccgccgcgccgcccggcagcctcggcaggtttggtgcacctcgatttggaggaagtagggcagggcccttatctg

SEQ ID NO: 152194 - DNA, 48 bp, Homo sapiens
cggcggccgccaccggctctagatggtggagccagggcaagatttact

SEQ ID NO: 152195 - DNA, 75 bp, Homo sapiens
cggtcagctgcatgtggctggttggggggcggttcaggaaacaatgtgatgagaaccattcatggggtgggagag

SEQ ID NO: 152196 - DNA, 75 bp, Homo sapiens
gcttgtcaacaaggcgctgctgaccacctacggctcacggatgattgatatccagaccaggatggctgggcgagc

SEQ ID NO: 152197 - DNA, 83 bp, Homo sapiens
atcagcgccatccccgagcagcggtggaagctggtaactaggatttctacctcaaccgcgagacctatgcaaggacggtgtgg

SEQ ID NO: 152198 - DNA, 90 bp, Homo sapiens
cttttttcaagtcccttgtgggcaaggatgtggtcgtggaactaaagaatgacctgagctgctggagccagttctgcttctcggcaagga

SEQ ID NO: 152199 - DNA, 50 bp, Homo sapiens
ggggttcctgtcgaatgggatcgtttcagaaaatttttactactggagat

SEQ ID NO: 152200 - DNA, 100 bp, Homo sapiens
cctaccaggaggccaggggtgtcgccatggctaaagaacgtgccaatggaatggagcttgatgggcgtaggatcagagttgatttctctataacaaaaag

SEQ ID NO: 152201 - DNA, 90 bp, Homo sapiens
gaaatgccggctgcggaggaggatggactcggggagaaagaacaggccgcgaatgggtaccacagaccatgtcatcgtcctggcgtccac

SEQ ID NO: 152202 - DNA, 100 bp, Homo sapiens
gtgaaaatgaagccagaccgaggctccccaaaaaggccacaaagacagccccacctgccctgcctacaggttatgattcagaggaggaggaagagagcag

SEQ ID NO: 152203 - DNA, 100 bp, Homo sapiens
tggagacagatcaaaggagagtttagtgagttttgcaatgcagcatgttagaagtacagtgacagaactttggacaggtttatttcacagagcagtgtac

SEQ ID NO: 152204 - DNA, 74 bp, Homo sapiens
tgctgatccccgtctttttgagtatcggaaccaaggtgctaaaatgatgtattttctggacaagtcaaggcagg

SEQ ID NO: 152205 - DNA, 97 bp, Homo sapiens
tggagttttaccggccgggaacagacggatgccaattctcggaagcaagaagcagagtggaaagaaaaggcaataaaggagctagaagaatggtatg

SEQ ID NO: 152206 - DNA, 83 bp, Homo sapiens
ccgctcctggcgcccctgctctgcctggcgctgctgcccgcgctcgccgcacgaggctccccacaggtgcaggaagccgccgc

SEQ ID NO: 152207 - DNA, 74 bp, Homo sapiens
cttaaaagatgccacctctaaggccctgggaggagcggggacactgaggacctctctccaaattggcctctcaa

SEQ ID NO: 152208 - DNA, 117 bp, Homo sapiens
ctcaattgttttaggggccagcagatgcaggaaaatttcgatattgaagtgtcaaaatccatagatggaaaagatgctgggatagatgggcagcagaagatcatgtgcttcgtgata

SEQ ID NO: 152209 - DNA, 96 bp, Homo sapiens
atgtccaggaaggaggaggaataatatttatggagcatatattatggaacacagaagcgagcagctgcaaagcatctaatagaacgctactaccac

SEQ ID NO: 152210 - DNA, 98 bp, Homo sapiens
gaatttccatgtcaacatagtccagggatcatggcccaagttgcaatgtccaccctccccgttgaagatgaggagtcctcggagagcaggatggtggt

SEQ ID NO: 152211 - DNA, 100 bp, Homo sapiens
cggcacaaggacgttctcaagtggggcgatgaggcccgatgagagaaagggaaagttaaggatgctggagcagaacaatggatttctctttctctttcat

SEQ ID NO: 152212 - DNA, 75 bp, Homo sapiens
gcagtggtgggttccatgtgatggtggagtaggaggcaggtctccgcgctcgaattacatctttacaagaggagg

SEQ ID NO: 152213 - DNA, 83 bp, Homo sapiens
gctgccctcagctccgagtccagggcgagatgaaggatttgggggcagagcacttggcaggtcatgaaggggtccaacttctc

SEQ ID NO: 152214 - DNA, 74 bp, Homo sapiens
atggatgtcttcacgtggtctttaccgtttgttggagaaaaagaattggcagagggggtcgatttgggaggaaa

SEQ ID NO: 152215 - DNA, 100 bp, Homo sapiens
ggagttaacgacgctttcaaagatgcactgcagagagcccggcagacgttgagaaagaagggccttaatggctgtgacagcccagaccccgatgcggacg

SEQ ID NO: 152216 - DNA, 101 bp, Homo sapiens
tgtgcgaggagtgcctcaaagtctacctgagcgcccagaggcggggtttcaccatgttgcccagactggtcttgaactcctgagcttaagcaatccacctg

SEQ ID NO: 152217 - DNA, 50 bp, Homo sapiens
ctgcattgtcgaatggtccaagttgctgccttcactgaagtcttgaaccc

SEQ ID NO: 152218 - DNA, 75 bp, Homo sapiens
cttggggctgggctggagtgaaggtggctacgaggtgaaagaaaagatgttgtcccggttaagagtagtttccac

SEQ ID NO: 152219 - DNA, 90 bp, Homo sapiens
tcctttatatagaagggagagtggtgatctttgtgaagtctgtgcagcggtgcattgccttggcccagctactagtggagcagaacttcc

SEQ ID NO: 152220 - DNA, 100 bp, Homo sapiens
ccttgacaggcggctttgcatcggaaatcagctctacagttcagatgcttgtgaccacaccagaaaaatgggatgtagtgacaagaaagagtgttgggga

SEQ ID NO: 152221 - DNA, 100 bp, Homo sapiens
ggcatggccctccggagtgcgcagggcgacggccccacctccggccactgggacggcggcgcggagaaggcagacatttatgcagtgtgtgattctttct

SEQ ID NO: 152222 - DNA, 117 bp, Homo sapiens
ctggccgagctgcccagcgagatcctcggggccccagaggccgcggacaccgacctggagccacctgtctttaccagtttccaagactatgttactgggcttcagactttaatttcc

SEQ ID NO: 152223 - DNA, 100 bp, Homo sapiens
taaaagcaagctggttctctgggatataaataaggagttttgagagcaaaatgacaacacccagaaattcagtaaatgggactttcccggcagagccaat

SEQ ID NO: 152224 - DNA, 90 bp, Homo sapiens
cgcagtcgttcgcccaggctttggcccggcttccggagaggctgctggccaagctgcaaagctgggagagactggaccagaccatgggcc

SEQ ID NO: 152225 - DNA, 100 bp, Homo sapiens
tattggctagatccaaatcttcgatacgccacaagggaagcagatgtcatggaaatctgaaatagagtactatgctatgttggctaaaactggtgtccat

SEQ ID NO: 152226 - DNA, 100 bp, Homo sapiens
taaacagagggataagaacatgacttgtattaaagtttctattgatccgagagaagtttgctgaggaatgccttcaagcacaaagtgatgaatgactgcc

SEQ ID NO: 152227 - DNA, 50 bp, Homo sapiens
ctacgatgtcacccgcttcctcaacgagacctacattgccccaccagctg

SEQ ID NO: 152228 - DNA, 75 bp, Homo sapiens
ccctcttctacggaggaaggaacgggcacagcagaattatatccagatcgagagacagaagattctgaaagggtt

SEQ ID NO: 152229 - DNA, 75 bp, Homo sapiens
aacaagtgttgttaaacacaaaccaccctttaaattttcaagggaaggacagtttctcacatggtcatagaggaa

SEQ ID NO: 152230 - DNA, 50 bp, Homo sapiens
aaatcatttccatcaataccggagaaactggtagtctgggtagattcaaa

SEQ ID NO: 152231 - DNA, 90 bp, Homo sapiens
caaatacattgcccatctcgctgcagtctataagaagtagcctactgctaggcttcaggagccgagtcgtccggaaatccattgcccgtg

SEQ ID NO: 152232 - DNA, 87 bp, Homo sapiens
ctccgagctcgcctgcatctactcggccctcattctgcacgacgatgaggtgacagtcacgtaaatacctgggcacaggacttcaaa

SEQ ID NO: 152233 - DNA, 74 bp, Homo sapiens
aggagcagataaactccaacacgatcccggggctcaagtggcttaacaagatcaagaagctactctagaagtcg

SEQ ID NO: 152234 - DNA, 90 bp, Homo sapiens
accaaactctctagcaaaaccactgctaagttatccactagtgctaaaagattgtgccaaggacttgaatggatgatgtcacgacttaag

SEQ ID NO: 152235 - DNA, 95 bp, Homo sapiens
gacgtcatacttggaaatggctgcaggttcagaattcacaatgacatcctttcaagaagtcccattgcagacttccaactttgcccatgtcatct

SEQ ID NO: 152236 - DNA, 100 bp, Homo sapiens
gaaaaacgtgcccaatttgttacacatgggcttcagggatgacttcttagggggcaggggaggtagtcgcccaggcgaccggcgaacaggcccccccatg

SEQ ID NO: 152237 - DNA, 75 bp, Homo sapiens
gtcgcacacagcatctccaacagataaagcttcaccaagaaggttgcccaggaaacgggcacagaagagatcagt

SEQ ID NO: 152238 - DNA, 100 bp, Homo sapiens
gatctggggactttgatgattttaacctggaggatgcagtgaaagaaacttcctcagtaaagcagcagcctgggagcatcctgggccccgaatgtgcctc

SEQ ID NO: 152239 - DNA, 75 bp, Homo sapiens
ctttgctggtctttcttggactattccagagaggagttttgagagcaaaatgacaacacccagaaattcagtaaa

SEQ ID NO: 152240 - DNA, 98 bp, Homo sapiens
gctgccgccgccaccgccggggccgctgccgttgaggaggagacggaggagaccgacgttgttagctcctctggtgcaagtgtggtagctattgacaa

SEQ ID NO: 152241 - DNA, 128 bp, Homo sapiens
tgccgacaaggctgcagtcctaagcatgggtcttgcaaactcccaggtgactgcaggtgtcatggagaaactccagctgggcccagagattctgcagcgggaaaatccaaggcttatttatgccaggc

SEQ ID NO: 152242 - DNA, 96 bp, Homo sapiens
tttgtggcaggcatctgtgggatctgtaatagaaatgagtgtacctcacagccttctaggatctccagagtggacaggaatctcacttggagggac

SEQ ID NO: 152243 - DNA, 74 bp, Homo sapiens
cttcgacatcatcaaccctgagattatcactcgagatattcttcaaagtgacgcctcccccaggaagcgggccc

SEQ ID NO: 152244 - DNA, 100 bp, Homo sapiens
ctcttggtcatgtgaactgcacgataaaggaactcaggcgcctcttcttagttgatgatttagttgattctctgaagatgcctgaaatgtgcagatgccc

SEQ ID NO: 152245 - DNA, 75 bp, Homo sapiens
atgcagtggccatagtccttacatagaccaaactcttacccaggatctactggagcagctgttggagcccatgac

SEQ ID NO: 152246 - DNA, 75 bp, Homo sapiens
aaggggaagccccacatcagagctgttcagatgatgattattccccaccttctaagagacaaagaccaacgagcc

SEQ ID NO: 152247 - DNA, 100 bp, Homo sapiens
aagatgccaaatggagggtccgcctggccatcattgagtatatgccgctgctggcaggccagctggtaaatgagctggatggtatcccgttgatcctgga

SEQ ID NO: 152248 - DNA, 101 bp, Homo sapiens
gtgaggcccttgctggggatgaggctggtacaggtttgcagattccgccagcagcacagcaagctctacagatgagtggctctttggcatttggtgctgtg

SEQ ID NO: 152249 - DNA, 90 bp, Homo sapiens
cttcgtcatgaatgggatctgcagagttcgggcgagaggaggcgagaggcgcaaaggtgcactttacaggtccccgatgaaccaagagaa

SEQ ID NO: 152250 - DNA, 98 bp, Homo sapiens
gaggacagaggtgcctggggcaacctccaccttgacggttccaggacttttcttggtagagatggaaatccaaataaacggaatgtgcacaatgaaac

SEQ ID NO: 152251 - DNA, 98 bp, Homo sapiens
gaaatggctgaaggaaaacctccttatgctgatatacatccaatgaggaaattgtgccatccttcatcaacaaagatacagaaaccataaatatgatg

SEQ ID NO: 152252 - DNA, 90 bp, Homo sapiens
tgccccgcggccaacatgagcttcttgttatccgagtgaagcctgacaggaccggtgtggtcacggatggtgtgaagcactccatgaacc

SEQ ID NO: 152253 - DNA, 75 bp, Homo sapiens
cagcagcttcggcggcggcagagggtgtagtattgagtcctgtttgagctattgttctctttttcctgaaaaatg

SEQ ID NO: 152254 - DNA, 100 bp, Homo sapiens
cttggaatgaatcacgatgatgggagagattgttcctgtggagcaaagagctgcatcatgaattcaggagcatcgcccgatgagagaaagggaaagttaa

SEQ ID NO: 152255 - DNA, 108 bp, Homo sapiens
gaataataaaagttaaaacaattgctgcacgaaacactgaaattttggcagcaccaaatgtggctccttcagatgtaggaggtggaggtggaagaaacagagagctga

SEQ ID NO: 152256 - DNA, 75 bp, Homo sapiens
tgttccatatcgtgactcagttctcacttggctgctcaaatttccccctttctagggtgaggatggttctacaca

SEQ ID NO: 152257 - DNA, 83 bp, Homo sapiens
cctaggcagaagcgatggcaggacaaaggcagagaaggcactgccagcacttctcagaacttctggatgagttttcccagaac

SEQ ID NO: 152258 - DNA, 101 bp, Homo sapiens
tgtgggagaaggcccagcgagcttctccagggaaagtgaccgaggcagtgaaagaggccattgacgcagggtaccggcacttcgactgtgcttacttttac

SEQ ID NO: 152259 - DNA, 101 bp, Homo sapiens
aggaaaccagggcttgcagatattgttgaagattcctgtctctggatccaaatcagagggccttctctacgtccactcatccagaggtggcccctttcaga

SEQ ID NO: 152260 - DNA, 75 bp, Homo sapiens
atcgacgtcgtgatccagaagtccagagctgaggactgcctgtttgcaggactttccttatcccagttgattgtg

SEQ ID NO: 152261 - DNA, 51 bp, Homo sapiens
ggagaacctgcggcggccggagcggtgatgatgaacagtctacacagatgg

SEQ ID NO: 152262 - DNA, 75 bp, Homo sapiens
atgtcatccagcgagtgattaggtgaccattgtgaggtagatattttgttctaattttccagatgaggaagctga

SEQ ID NO: 152263 - DNA, 98 bp, Homo sapiens
aaagcacacatgaactcagtgctcatggggatgaagaaccagctcgacttaattcagtgcacaaatgagatgaatgtgaacatcccacagttggcaga

SEQ ID NO: 152264 - DNA, 75 bp, Homo sapiens
tcaaagaggaaggatgggaaacatctcacacttcatgagcaaattgctcgaccctcgcaagaagaaaaagtagaa

SEQ ID NO: 152265 - DNA, 90 bp, Homo sapiens
ctgcctcagtctcccaaagtgctggaattacagggatcccagctctcctgttggcttcgtgcttggggtagatcttcttcacatattccc

SEQ ID NO: 152266 - DNA, 50 bp, Homo sapiens
gatacaccttgcgaaaagtgatggaggatttgacagctaaggatattgaa

SEQ ID NO: 152267 - DNA, 100 bp, Homo sapiens
ttagcatcagtgactcacaaatcagcaacacagaatttctgcaagtaattggctcttcgtcagattgggcagaggacgataagcactgcttcccgcaggc

SEQ ID NO: 152268 - DNA, 100 bp, Homo sapiens
gcctgggttccacttccagcaacagctcctgcagcagtaccgagtgccccggggaagccattccccaccccccaggaggtcaccatcaaccagagcttgc

SEQ ID NO: 152269 - DNA, 100 bp, Homo sapiens
gcaaggacagttgcatcatcaaagaaggagacgtggggtcactggtgtatgtcatggaagtgaggattctacacgtagattgttcaaatttccttttctg

SEQ ID NO: 152270 - DNA, 74 bp, Homo sapiens
ggggctgggagtatttgtagacacctaccccaatgaggagaagcagcaagagggtgctgacacctttacggcaa

SEQ ID NO: 152271 - DNA, 98 bp, Homo sapiens
agggctgtattctgacgtttacaaaactacagagcctagttccccgagagcgttcagacagtgggggctcaagctcagagccatttgaccgtcatgca

SEQ ID NO: 152272 - DNA, 97 bp, Homo sapiens
gcaaagtccaagcattgtatcacttcatctgcaaatatttcaataagtacccaaaagaaaatcactctgggagctatgtgaaggatcgattggagac

SEQ ID NO: 152273 - DNA, 115 bp, Homo sapiens
tacaatgtactggatcgaaatgtccatgagaaaaagcttggagataaagttgctttttactggtactccaaagattcaggtttactcacgtcatccagcagagaatggaaagtca

SEQ ID NO: 152274 - DNA, 75 bp, Homo sapiens
catcggatctacaggaccagttgaatcatctgttgaaatagaatgacatcttttccttccctccatgagaaagaa

SEQ ID NO: 152275 - DNA, 100 bp, Homo sapiens
aagaaggcagagggagtggcgctgaccaatgccactggggcggtagagtccacatcccaggctggggaccgcggcaggcaggaccagatgctgtgttggg

SEQ ID NO: 152276 - DNA, 100 bp, Homo sapiens
gtgcctttcgcctcccaccatgattctgagacctccccagcaatgtggaactgactcctaaatgcaaagtccctggatgtttcttgcaagaccttgaaaa

SEQ ID NO: 152277 - DNA, 50 bp, Homo sapiens
gccgcgcagccctcggagcacgggggggccctcagcctcttggccttgaa

SEQ ID NO: 152278 - DNA, 100 bp, Homo sapiens
cgacagtcctagctaaacttcgccaactccgctgcctttgccgccaccatgcccaaaacggttgtaaagaagaaagttctaccctttctgtcaaaatgaa

SEQ ID NO: 152279 - DNA, 100 bp, Homo sapiens
gtgagcccaccaagtggaatgtagaagacgtctacgaattcatccgctctctgccagatggagatacacgtgaattagagcgaacaaaacaatatgtaaa

SEQ ID NO: 152280 - DNA, 74 bp, Homo sapiens
gtgaggcctccccagccacgtggaactgtttatcacatttccagaaactcgtggttcaaaatggagacaagaat

SEQ ID NO: 152281 - DNA, 99 bp, Homo sapiens
gtcgtccagaatgagccctttgaggaccctcaccatggcaatgggcagttcaccgagaagcgggtgtatctcaacagacagagtctcactctgttgccc

SEQ ID NO: 152282 - DNA, 100 bp, Homo sapiens
taataaagttgcagcgaggagaagcgcagcgacggcgtcgggagagcgcgcctagccggctcgcgaatgaggacggggacttggttgccttttccagtga

SEQ ID NO: 152283 - DNA, 50 bp, Homo sapiens
gggaccaaagggaacttcaaattagtcagattgtggtatctgaacgggaa

SEQ ID NO: 152284 - DNA, 80 bp, Homo sapiens
gcggcgcggcgcaggcaccggcccggggagaggcaccatgagcgaaatcttcccaaggctgcagacaccgacggatttgc

SEQ ID NO: 152285 - DNA, 74 bp, Homo sapiens
agttcctacaggtgtcttcacagatatcccaatcagcaacattcgtcggctggctccaaggctgcatctctcca

SEQ ID NO: 152286 - DNA, 90 bp, Homo sapiens
taaaacttacctggatggggaaggctgcatagtatttgattttcatcaagcagctgatggtatccaggaacaacagagacaagaacaagc

SEQ ID NO: 152287 - DNA, 100 bp, Homo sapiens
ggaacggtaggaagctgagctggactctctgccacatcgttcggttcccacaacagcctggtatcatgatattagctggtttgacatcaagtcatttgtg

SEQ ID NO: 152288 - DNA, 76 bp, Homo sapiens
gagcaatccaatccatctatggtattggacatagagagatttaaatgaacagtcccaggcacagctaagtgaagga

SEQ ID NO: 152289 - DNA, 75 bp, Homo sapiens
ctgccccatctgccggctgcgcctcatgcattgtgcgtcagcagcaatgtttatggtgaaaaatggcaacgggac

SEQ ID NO: 152290 - DNA, 100 bp, Homo sapiens
acgcccagaataaagccaagctcatctctgagacccggaggaggttcgaagctgagtatgtgacaggtgctcttacagcctgttccaagtgtggcttaat

SEQ ID NO: 152291 - DNA, 102 bp, Homo sapiens
tgaagacttgctagttaggattttattactggcagcatgtatatcttttatggggagactgaggccgtggctgtgtgtccctctgagagttggagcggggct

SEQ ID NO: 152292 - DNA, 100 bp, Homo sapiens
tttctggccgccgatatcttcgccatcgccagcatcgccaacccggactggatcaacaccggggagtctgcggctgagatgagtgaactgagtgtggcac

SEQ ID NO: 152293 - DNA, 101 bp, Homo sapiens
gataaagggccgtggctcaagcaggacaatcgcactttataccacctgcgattacttgtccatgggctattcctcaaaatacaatatcttgttctttggct

SEQ ID NO: 152294 - DNA, 90 bp, Homo sapiens
caagaccctacccgcttcactggcaccatgctggcagagaggctgatgacatcgtgaactggctgaagaagcgcacgggcccggctgcca

SEQ ID NO: 152295 - DNA, 100 bp, Homo sapiens
ctgacttcaagaatgaagccacggacccttgcgctccctctcactggcagcaccttccatgaccagatagccatgctgagccaccggtgcttcaacactc

SEQ ID NO: 152296 - DNA, 80 bp, Homo sapiens
gccttcgaggaggtcatgaaggacctgagcctgacgcgggccgcgcgggagagaagtttgctgaggaatgccttcaagca

SEQ ID NO: 152297 - DNA, 83 bp, Homo sapiens
acgggtgatttctgcatttccatctgaggaaatgacacctcatgcaggcaggtaccagaaagtaagtcctcagcaggaaaaac

SEQ ID NO: 152298 - DNA, 83 bp, Homo sapiens
cgtgttcgcgggtgtgtgctgcgttcacaggtgtttctgcggcagggtgtcttttatgaataatcaaaagcagcaaaagccaa

SEQ ID NO: 152299 - DNA, 100 bp, Homo sapiens
caaaaggacgtcctcctagtgctagcagcttagatgccatttctcctgttcagggtgtccgcaatgttgccagtgtctgtctgcagattggctacccaac

SEQ ID NO: 152300 - DNA, 75 bp, Homo sapiens
gccagcgctcggagctggaggcccacgtgggagcagtgagcggctaaggacagaataacgggctcccagattcac

SEQ ID NO: 152301 - DNA, 100 bp, Homo sapiens
cactcaggcctcactttatcttccaagagagactagcttgcaaaattttcctcatattgaggtggttcggaaaaaagaggagagaagaaaactgcttggg

SEQ ID NO: 152302 - DNA, 74 bp, Homo sapiens
caaacagtggtatcgacttatcaaaggtcctactgctctgttggctcatgaaataggttttggaagtaaagtta

SEQ ID NO: 152303 - DNA, 82 bp, Homo sapiens
cttgcatttgtttctgctgaccgcgggccctgccctgggctggaacgaccctgcaaccatgtccaagggacctgcagttggt

SEQ ID NO: 152304 - DNA, 101 bp, Homo sapiens
tctacctggagcatttgctgcagaagcgtagtcggccagagcccttgccctgttggatgaataggcacctctggaagagccaactgtgtgagatggtgcag

SEQ ID NO: 152305 - DNA, 90 bp, Homo sapiens
gatgcccaatgtatctaacgacctctcacagaaactatatgccaccatggagaagcataaagagcatggcggacaccgacctgttcatgg

SEQ ID NO: 152306 - DNA, 96 bp, Homo sapiens
caaagctgttgtctcagggagcacagaaatatcattgaaatggattccaagcgtgtgcctcgagacaagctggcctgcatcaccaagtgcagcaag

SEQ ID NO: 152307 - DNA, 87 bp, Homo sapiens
cagctccggccgcctggctccccatactagtcgccggaaagaacatgaggttcccttggaaatcattcaagaggaagatggaagggg

SEQ ID NO: 152308 - DNA, 100 bp, Homo sapiens
gaggagctgtggtccagcctgcgcggcgggaagcggcggcggcggctccagcgtcctaagagtgagacggtttaagcggaagcatcttactgccattgac

SEQ ID NO: 152309 - DNA, 88 bp, Homo sapiens
cgaggccacccagtcccacttcaaacattcgtctcggaaaccccgcctcttacagtcacgaggccatctggctgctgtgcacaggcgc

SEQ ID NO: 152310 - DNA, 100 bp, Homo sapiens
cgaggaggaacgcgctaaggcaaagcacctggttgatgaaaaaaccgtaggagaacctggttggctttatggtagttttcaaggaaattttggctggttt

SEQ ID NO: 152311 - DNA, 75 bp, Homo sapiens
aatggcctatccaaggacatgagcagtttacacatctcacccaattcaggtattttacatggagctggactttct

SEQ ID NO: 152312 - DNA, 74 bp, Homo sapiens
caataaaagagacctctacttagctcagcaattcttaccttatgacttgtttaaagtgcataaagcaaaaccaa

SEQ ID NO: 152313 - DNA, 90 bp, Homo sapiens
ctgagcagaggacccggcgggcggcctcgcgggtcagctttaccactcctgaaggccctaaaccccgttccagatgctctgactgggcaa

SEQ ID NO: 152314 - DNA, 100 bp, Homo sapiens
atggaggggtcttcaaagaccttgcaagaagtactaactatggagtatcggctaagtcaagcttgtatgtatgccagtactgaggttgatggagagcgtt

SEQ ID NO: 152315 - DNA, 100 bp, Homo sapiens
tcgttctatttctctagctattgccttattttttctcatggatgttcttcttcgagtatttgtagaaggtatgaggttgatgagctacgccgaaagaagg

SEQ ID NO: 152316 - DNA, 83 bp, Homo sapiens
caggaacccgcgccgcgagggctccttccctcaggaccaggaatcaccttcaagcctatgtcgtgaggctttggcagaaatta

SEQ ID NO: 152317 - DNA, 100 bp, Homo sapiens
caaaggtgtcgtggtggtcattaagcggagatccgatgcctgaggaaacccagacccaagaccaaccgatggaggaggaggaggttgagacgttcgcctt

SEQ ID NO: 152318 - DNA, 98 bp, Homo sapiens
ttcattgttttcagctaacagtaaccccaggctcgtggaggagttcatgctcttggccaacatggcagtggcccacaagatccaccgcgccttccccg

SEQ ID NO: 152319 - DNA, 101 bp, Homo sapiens
gcaagcatgcagcttactgcttgaaagctggtcctggctgagggtgctcactcggatgcggggtcccagggcacggacagccacacagacctgcccccgcc

SEQ ID NO: 152320 - DNA, 75 bp, Homo sapiens
cccctataagcctcggcctccacagttggctggggaacagaccagggaattggtggatttggagaagagccggga

SEQ ID NO: 152321 - DNA, 100 bp, Homo sapiens
ggctggttctggggctgggattggaactgtgtttgggagcctcatcattggttatgccagataagctgtcattggaaggaatagtggtacaaagagctga

SEQ ID NO: 152322 - DNA, 100 bp, Homo sapiens
cccagactaggaatgccagcatctgccaagcagaaaagagcactggttgccattggtacccatgatttggacactttgtcgggcccatttacttatactg

SEQ ID NO: 152323 - DNA, 83 bp, Homo sapiens
ctggagtgcgtgggggaccggctgttggcgggtggcgggacaggcttcattgggacagccctaacccagctgctgaatgccag

SEQ ID NO: 152324 - DNA, 90 bp, Homo sapiens
gcgaggaaaagagccctggatgattttgagggaagaaacacagttcacagtccttccttcagaagggaaatttctgagggtcaggaaggg

SEQ ID NO: 152325 - DNA, 73 bp, Homo sapiens
gcaactggattatactgtactgcccatgaaaaaggatgttgaccggacaggatgtggagagcatcttgtgcgc

SEQ ID NO: 152326 - DNA, 50 bp, Homo sapiens
gttcatcacatcattcatgattttcagatttatttaattgcccaactacc

SEQ ID NO: 152327 - DNA, 82 bp, Homo sapiens
gggagagtccgacgagcgctgcactaacgcaggatccggctgccgaaggtcctcgccagagctggaagtcgagtgtgctact

SEQ ID NO: 152328 - DNA, 75 bp, Homo sapiens
gaagaagcagttctacaaggcgagccaggaacaagcacatcatgattgacttggggactggcaacaacaacaaga

SEQ ID NO: 152329 - DNA, 100 bp, Homo sapiens
tacatgtagcctgtgttgtacagcagaaagatgccaggcaatggtttgctgagctttctgtggatatggaaaagggagtgaagagcaaggccagcctacc

SEQ ID NO: 152330 - DNA, 104 bp, Homo sapiens
ccatggactcggaatattacagcggcgaccagtcaggcaagttgctttggcagatgccattctcattaataaaacagacttggttccagaagaagatgtaaaga

SEQ ID NO: 152331 - DNA, 75 bp, Homo sapiens
gggctcagggagcaggagcttcaggttgtccgagcatctgggaatgtctcgactgcattgtgagagtgaatcttt

SEQ ID NO: 152332 - DNA, 87 bp, Homo sapiens
cgcgcagcgccccagccacacgccggcgggcagaagccgcccgctctccggattcttgaagacctggatgaacaaatttatatcatt

SEQ ID NO: 152333 - DNA, 83 bp, Homo sapiens
gttactatggaaactgccgttctctcctggaactgtggctgcaccatctgtcttcatcttcccgccatctgatgagcagttga

SEQ ID NO: 152334 - DNA, 100 bp, Homo sapiens
gagacggaagactttgaagaaaattcagaagaaattgatgttaatgaaagtgaactttcctcagaggtatttcagtgaaaattacactagtgaagctcat

SEQ ID NO: 152335 - DNA, 100 bp, Homo sapiens
agggtccctgaagagggaagacacgcggaaacagaaatgggcaagttcatgaaacctgggaaggtggtgcttgtcctggctggacgctactccggacgca

SEQ ID NO: 152336 - DNA, 98 bp, Homo sapiens
actcatgtctgaattagaaagcttccctggctcgttccgtggaagacatcccctcccaggctccgactcatctgaagttgcagccggagtgaagaaga

SEQ ID NO: 152337 - DNA, 100 bp, Homo sapiens
ttggccaagaggaagaccccaccagtgagatccactgctccagtgaaacaaagagtcctcttcgtggaaaagaaaaaaatacgctccctttaaacggtgg

SEQ ID NO: 152338 - DNA, 100 bp, Homo sapiens
attatataccttggggaaagctgatgtcagccccagttgatgctgacagcaggacccagtgttgccgtccctccccaggcaccttttggttatggttata

SEQ ID NO: 152339 - DNA, 82 bp, Homo sapiens
gagaaagacagatggaagtctttaaggtagctacagcaagctgggtagcaggcagatccaaaggatatcatgaagtttccag

SEQ ID NO: 152340 - DNA, 50 bp, Homo sapiens
gaggcgaattttcagttgataggtgtgtgatctgtatgatggactttgtt

SEQ ID NO: 152341 - DNA, 75 bp, Homo sapiens
gcacgtccgcgagatggcttgctccattgtcgaccagaaggataagttctgaacgtcgaaaagaaaagtctcgag

SEQ ID NO: 152342 - DNA, 75 bp, Homo sapiens
ctgggagcccgggtgaccgcgtagcctacaacacagcagtcccctcaggatgagcaggaaaagctcttggatgaa

SEQ ID NO: 152343 - DNA, 100 bp, Homo sapiens
gcgctaccggaatgtcatccagcgagtgattagctggacacctgttctgctgttgtgtcctgccattctcctgaagaacagaggcacactgtaaaaccca

SEQ ID NO: 152344 - DNA, 105 bp, Homo sapiens
gaatcccctgtttgagaaaaggcctaagaattttggcattggttttgaacgaagaatgtgatcagaactggtacaaggcagagcttaatggaaaagacggcttca

SEQ ID NO: 152345 - DNA, 97 bp, Homo sapiens
atctatttccaggcgatgagcagtgtggagaagacgtggccctttatggtggccgggaaacccgagagtgacctgaaagaagtggtgaccgcgagcc

SEQ ID NO: 152346 - DNA, 90 bp, Homo sapiens
gtcaccgtgtgggagcgggagctgcggaaaggtgtaatggataggtaacagagaagacctcgtcccttcctagtcagggcatcagcatga

SEQ ID NO: 152347 - DNA, 159 bp, Homo sapiens
gcatttgttggggagaagaggattggaggtgtcagtgttaaaggaacctctacaacgaaggtgaagccacggaagataagatccagacatttaatgtggatgcaccatgccagaccgtggaagatttaacgaatggggttgtgatggcccaggttcttc

SEQ ID NO: 152348 - DNA, 90 bp, Homo sapiens
tggattgtgagctgaagctttctgaatcaggccctgggaggagcggggacactgaggacctctctccaaattggcctctcaactcacagg

SEQ ID NO: 152349 - DNA, 75 bp, Homo sapiens
tgcggaacaggacgccctctgatgtcttctccaagatcttcagccacgaggccctggagagttacctgcccaaga

SEQ ID NO: 152350 - DNA, 100 bp, Homo sapiens
actgccatgaaactacttcgtgtcctggcctcagctgggaggaatattgctgcccggctgagctctgcgtgcctcttgctgtgccctacctggacaaacc

SEQ ID NO: 152351 - DNA, 99 bp, Homo sapiens
gcccagctaggaatgcagacctcctgaaaaccaagccgaggactgcggggtccggtgtccacgcagaaatagcctaacatggcagaccagagacagcgc

SEQ ID NO: 152352 - DNA, 108 bp, Homo sapiens
cgtggtcattgttgcttccttcttcatattgaagaacttcaaccccacagtcacggatgataccatcggggaccttaagaagctgattgcagcccaaactggtacccg

SEQ ID NO: 152353 - DNA, 74 bp, Homo sapiens
catcctggatctgtcttgtaataaactgactactctaccggagaagttaaggctgcaaggccaaatcacagagg

SEQ ID NO: 152354 - DNA, 98 bp, Homo sapiens
accgtgtccagccagggtcctgggccgcgacctggttctcccggagtctacaatcatgatgctgccgccaccgccgccaccacggagcgagaagccca

SEQ ID NO: 152355 - DNA, 75 bp, Homo sapiens
ctccactccccagctgtgaaaggatactctccattgcataatgtgaagttaccagaagcagatgacatccagtac

SEQ ID NO: 152356 - DNA, 51 bp, Homo sapiens
cttcccgtccgcggcgtggaggaattcggttccctcaaaattataaaggca

SEQ ID NO: 152357 - DNA, 87 bp, Homo sapiens
ccaggcttggaaggcttcgaagaggacggagctgcgctggggccggaggcgggcgaggaagagtccggcagcgtcttctcttgaggg

SEQ ID NO: 152358 - DNA, 100 bp, Homo sapiens
ggcagcggttggaggcttcgcccggctttgcagcggggacttcggcggcggcgcctcaggcacctcggcccgggtggctattatcatggaaaactaattt

SEQ ID NO: 152359 - DNA, 88 bp, Homo sapiens
ccgggctgcgccgcgggagttcgagtattaaaggtggaagaaggtccatatctttttctgtgggtgcttcaagtgttgttggaagtgg

SEQ ID NO: 152360 - DNA, 104 bp, Homo sapiens
ccgcgaggcaggagagaggaggaggagtgcggcgcggcggccccgggaccaaggaggtgagaagccctaccactgcaactgggacggctgcggctggaagtttg

SEQ ID NO: 152361 - DNA, 75 bp, Homo sapiens
acaattccttggtttatggagattcgtctttgtaaaggacagtcattttgtttactcattcagccctgttgcagg

SEQ ID NO: 152362 - DNA, 101 bp, Homo sapiens
acaaagagagcacttcctaagaagagtcagagcgatcgtcttctgatcaaaggaggtaaaattgttaatgatgaccagtcgttctatgcagacatatacat

SEQ ID NO: 152363 - DNA, 90 bp, Homo sapiens
gccagcgaacatcacagattccttatccaatcgttctttgattgttaccaccattttgtctccagagaatacagagggcaaagatggatc

SEQ ID NO: 152364 - DNA, 110 bp, Homo sapiens
cgaaacgccgccgcggagccgaggcggagccgctgtcctcgtccccagcggtcccgcccaacgcccgactctgtcctggctataagtcaccatggcacagcaagctgccg

SEQ ID NO: 152365 - DNA, 100 bp, Homo sapiens
gggcggccacggtgatgagccgggcctggcggacgcggcgccatcgcagtcaggacctcagcagccatgtcgaagccccatagtgaagccgggactgcct

SEQ ID NO: 152366 - DNA, 100 bp, Homo sapiens
caggccttgtggcccagcacccgcctgccaggcgctcgggggccgaactggccctggactacctctgcagggtaccgtgagggttttctctggaagcgtg

SEQ ID NO: 152367 - DNA, 75 bp, Homo sapiens
cttccatccccatcttacagatgtattaagaagcctcagcggtttgctgcggtaatcatgaggataagagagcca

SEQ ID NO: 152368 - DNA, 75 bp, Homo sapiens
ggacggcttgttgcgggcacttctcacccctgagaatctgggacctcaacagcctgatggaatgtgctgcagagc

SEQ ID NO: 152369 - DNA, 50 bp, Homo sapiens
attcgagaatcaaagggccgggagcgatgctggcgctacgtacatctttg

SEQ ID NO: 152370 - DNA, 51 bp, Homo sapiens
ggaggttcttcagtgtatgcctgagcccccctccatgcgcctgaaggcccg

SEQ ID NO: 152371 - DNA, 75 bp, Homo sapiens
gtgatcacattcattttaattttgccggaatatttcaagacaccgaaaggactcagcccaggagagtgttattac

SEQ ID NO: 152372 - DNA, 100 bp, Homo sapiens
aatgacattgagaactgcgacatgggaccctgtgccaagagctggttcctcaccgagtggagcgaaaggattgtaaaccatggctgtgtggatacaagct

SEQ ID NO: 152373 - DNA, 90 bp, Homo sapiens
tggatgtgatgcctgctagccaaaaggaaatgcatcgtgattcctgtccattggactgtaaggtttatgtaggcaatcttggaaacaatg

SEQ ID NO: 152374 - DNA, 87 bp, Homo sapiens
cattcagtcctttgatgcctccagctgtgatatctcagatgctgctgcttgacaatccacacaaaaggatgccttgttttgcaagag

SEQ ID NO: 152375 - DNA, 75 bp, Homo sapiens
aggtttaaaattttacataagaagttacctttttcaggatgagagagacctagagaaagatgatgaactggaact

SEQ ID NO: 152376 - DNA, 99 bp, Homo sapiens
accagacgttaacagactatgatattcgattttacatgtatgagattctgaaggccctggccaacgtcaacattgggagcctcatctgcaatgtagggg

SEQ ID NO: 152377 - DNA, 80 bp, Homo sapiens
ggacccaccgctgccctcagctccgagtccagggcgaggtatcagaagcatgtgcacacgtatcgcattctgcctgatgg

SEQ ID NO: 152378 - DNA, 100 bp, Homo sapiens
gggtgcagtatttctgggaggcactgaacaacttcaccaacgtgtgcccagctggctggaaacctggcagtgataccatcaagcctgatgtccaaaagag

SEQ ID NO: 152379 - DNA, 98 bp, Homo sapiens
agaaaatacatttgacctggtggttagcagtttaagggtctaaaattcccaggactccacagctttgcaccagataagcctggaggaatactaatgat

SEQ ID NO: 152380 - DNA, 74 bp, Homo sapiens
aaatagcctttgccatcactgccattaagggtgccaagtaccggggctccatccatgacttcccaggctttgac

SEQ ID NO: 152381 - DNA, 100 bp, Homo sapiens
ggatgagtcaacaggttggggcccaaaggcacagcgatcctgttctcagattgaaggtagaagatagcaccatgccgattcgtcgaactgtgaattctac

SEQ ID NO: 152382 - DNA, 100 bp, Homo sapiens
ctatggtgggcaaactaagccgattttccggaaaaaggtgtctttcctgaagactatcttcccgtctcaaaatggacatgatggatccacggatgtacag

SEQ ID NO: 152383 - DNA, 100 bp, Homo sapiens
gtcaaccggggcctggacaccgggcgcaggagggcagcaccagaggccagtggcactcccagctcggctcatttgcaggggggagccaaaagggtcatca

SEQ ID NO: 152384 - DNA, 82 bp, Homo sapiens
ttccacttgcacgaaagctttcctaggccaaaaagagggcttcaagatgggctgcgctccagttccaacagccgcagcggga

SEQ ID NO: 152385 - DNA, 82 bp, Homo sapiens
gggggcgcgggcggcggcgccggcaggaagggcgtctctggccgagcctctttttgtggaaaacgacagcagcagcagtggc

SEQ ID NO: 152386 - DNA, 80 bp, Homo sapiens
cccatcccggctgcttttgctgcgccctctcagcttcccaagaaaggttttcaattcaaaaacagctgaactacttagtc

SEQ ID NO: 152387 - DNA, 100 bp, Homo sapiens
agaagcggcagcagtcccttgggggcttctttaaaggcctgatctgagtgggacatacttttgaaggatgtgcaatgttcaatcataagtgtgacaaaaa

SEQ ID NO: 152388 - DNA, 100 bp, Homo sapiens
cacagccaaggaacagaattagaagaaaaggaaccctggcctgaggtgcgtatagcagcaaaattcatcattcatgcccctcctggagaatttaatgagg

SEQ ID NO: 152389 - DNA, 114 bp, Homo sapiens
aaaaaagttgtatctgccgctcttcagttttcattatcttgcatttttctgagggaaggaaaagccacatattgcaggagaagaggctgggtccgatccacactcattatgtct

SEQ ID NO: 152390 - DNA, 50 bp, Homo sapiens
atttcctagagctgtggcctcggggccgcgatgggcctcttggaacattg

SEQ ID NO: 152391 - DNA, 100 bp, Homo sapiens
cgggccccctggagctggacctgacggcacctgaactcctggggggaccgtcagtcttcctcttccccccaaaacccaaggacaccctcatgatctcccg

SEQ ID NO: 152392 - DNA, 90 bp, Homo sapiens
agcggtggctgggcaaggccgaggagtgcgattcccgtgcctggtacgcagaaagatcaactgaaatcggcaaacttctgagttcctact

SEQ ID NO: 152393 - DNA, 51 bp, Homo sapiens
ctcagacaccatagccccctggttccatgctccaagaggaaaacgaggatg

SEQ ID NO: 152394 - DNA, 82 bp, Homo sapiens
gctgcaggtggtggaaaagcagaaccttagcaaagaggagctgatagcggagctgcaggtgccctacgagacgctgaacaaa

SEQ ID NO: 152395 - DNA, 96 bp, Homo sapiens
gatggttccatcaagggagaaatccgaaaacaggcactggaccacttcaatgcagatgggtctgaggaatggaagttggatacactttgtgacttg

SEQ ID NO: 152396 - DNA, 83 bp, Homo sapiens
gcccttgaacggagaatagagtacattgaagctcggggtaatggcagatgagttaaccaactcaagagcagctttacagcgtc

SEQ ID NO: 152397 - DNA, 98 bp, Homo sapiens
cctgaggcagctcggcctgcagatgagcctacccctgccagcaagtgctgcagcaagccacaggtggctttagcatccaaagaaaactcatatccaaa

SEQ ID NO: 152398 - DNA, 100 bp, Homo sapiens
gcgctcaccagccccgagctgagctcctggagtgcatcccgggcctcgctgaaggccaagctcctccgcagaactcagcctcctcccaagctccctgtgg

SEQ ID NO: 152399 - DNA, 127 bp, Homo sapiens
ccgcggggtgaaggcgctcatggacggaagacccctggctctataagctgaattatggcagcccagtcaagaactcccccactggaaaggattctgaaagaaatgaagtcagccctcagaaatgaag

SEQ ID NO: 152400 - DNA, 98 bp, Homo sapiens
cccggcagtgctgcaaccgctacagcagccgcaggaagcagctcaccttccaccgacgttggacctctcgaacaaccagctgagcgagatccctgcag

SEQ ID NO: 152401 - DNA, 100 bp, Homo sapiens
catccccgccgggctgcagtccatgaaccaggcgttgcagaggcgcttcgccaagggggtgcagtacaacaggctttgttcgcgggggtcacagctctca

SEQ ID NO: 152402 - DNA, 75 bp, Homo sapiens
atacacctcccacctgtcctcaggcatatcaaaggttgcttatggaaccacagagaacagtcccgtgacattcgc

SEQ ID NO: 152403 - DNA, 93 bp, Homo sapiens
accagctcaagcagttcaccaccgtggtggccgacacgggcgacttccacgggagcatcgagtacagctgtccggcctccaacgagtgtgaga

SEQ ID NO: 152404 - DNA, 90 bp, Homo sapiens
tgaaaagagggagcttctcgacctgctctataaagcctatgggatgccaccttcagcctctgcagggatccaccacaagtacaacagcga

SEQ ID NO: 152405 - DNA, 100 bp, Homo sapiens
tgtttgaccaggcccagaggtccgtgcggcagcagctccagagctttgtcaaagacatcgccctgagcaactggtggtttgtggcccacctgacagacct

SEQ ID NO: 152406 - DNA, 98 bp, Homo sapiens
cccgcggctgcgcttccgacggggcggccgggggctcagagatccaagtgcgcgccctggcgggtccggaccaagcagagtcacctgatatgaaaaag

SEQ ID NO: 152407 - DNA, 100 bp, Homo sapiens
ctgggacctgggaacctactgtggggccgcggccggaccgagcgcctcgacctcggtctgaggtcaaaatgcagatcttcgtgaaaacccttaccggcaa

SEQ ID NO: 152408 - DNA, 100 bp, Homo sapiens
tacagttgaaactccagcagcgccggacccgggaagaactggtgagccaagggatcatgccgcgagctgctgctcttcctccagaacctgcccacagccc

SEQ ID NO: 152409 - DNA, 100 bp, Homo sapiens
acctggtctcagaggtgaaattggtaaccctggcagagatggtgctcgtggtgctactggtttccctggtgctgctggccgagtcggtcctcctggcccc

SEQ ID NO: 152410 - DNA, 101 bp, Homo sapiens
agaccctgtgcacctctcagcaggcctttgctggacagatgaagagtgacttgtttctggatgattctaagagagcatcctggccagaacaagccaaggag

SEQ ID NO: 152411 - DNA, 100 bp, Homo sapiens
ggacctgacccagtgtgtggactgcgtgattcctccagaggggtccctcttgcaggtgacctctgagaaggatgtgcaaacagctctggctctagcaaaa

SEQ ID NO: 152412 - DNA, 78 bp, Homo sapiens
aggccccgcccacgccgcacacttggaactctggccctgtgaatggactcacggacatgatccacatcgcggacacca

SEQ ID NO: 152413 - DNA, 100 bp, Homo sapiens
cagaaaagaagaagaagagggatactcccatgctgccaaagtaggataagttctgaacgtcgaaaagaaaagtctcgagatgcagccagatctcggcgaa

SEQ ID NO: 152414 - DNA, 100 bp, Homo sapiens
gtgtcatcctccacagctccagggaaggcactcaaaagtggggggcaggaaaggtgaaattgatcttcaaattctctccaaagttcaggctcaataccca

SEQ ID NO: 152415 - DNA, 75 bp, Homo sapiens
aatgaaagccatcattcatcttactcttcttgctctcctttctgtaaacacaggccctggccaacgtcaacattg

SEQ ID NO: 152416 - DNA, 83 bp, Homo sapiens
gttcctcttgctcacagagctctgtaaagccctgggcgctgcctatggcacagccaagagcggtaccggcattgcggccatgt

SEQ ID NO: 152417 - DNA, 75 bp, Homo sapiens
gcgtggacttcatggtggacaatgcccagctgggttttctggggtgaacgtgggctgcgggccagccgaggagcg

SEQ ID NO: 152418 - DNA, 75 bp, Homo sapiens
aaaaactgtatcacgttttcgtggaatggcatttactttacaagaacgacaaatgcttggtcttcaaggacttct

SEQ ID NO: 152419 - DNA, 75 bp, Homo sapiens
cggcagtccacccaccgccgccgcctcccaggcattggaatggatacttgtgtcattcctttgaggcacggtggg

SEQ ID NO: 152420 - DNA, 82 bp, Homo sapiens
ctacaagactctcttcgctctttgcatcttaactgcagtgcctccggagccagcgtggtggccatagacaacaagatcgaac

SEQ ID NO: 152421 - DNA, 75 bp, Homo sapiens
cgcggggcgacgctggctgcagggacccggtgacagcgtgagagctgatggtgagaccattctaaaaggcctcca

SEQ ID NO: 152422 - DNA, 90 bp, Homo sapiens
ccctgactacagctggagcgcccagaggcgagccctggtggaggaagagagatggacagagacgtatgtgcgttggtctcctaagggcac

SEQ ID NO: 152423 - DNA, 83 bp, Homo sapiens
gatcttggcaaagcttctccctcagtatttagaccagaaactaatctggattcactccctctggttgatacccactcaaaaag

SEQ ID NO: 152424 - DNA, 100 bp, Homo sapiens
agctgggtctggagacgccgtggcagcctgaacggagtgtgcgacggattgggaggctgaagccgacgtagcttctctgaacagacgcatccagctggtt

SEQ ID NO: 152425 - DNA, 98 bp, Homo sapiens
tttcctgcgcgaccacagctatgcgaccgaagggatgaaaaaggaaaccttccttgtgaagacctcagaggacatatggtgggcaagccagtgcataa

SEQ ID NO: 152426 - DNA, 80 bp, Homo sapiens
catgacacttctagactgattaaaaatcttggtggttctgacaacaaaggagattgtgacatattgctgggcctaacact

SEQ ID NO: 152427 - DNA, 95 bp, Homo sapiens
aggctccttgtgccacattcttgcagctgcctacaaattcaagagtgaccagggatgggcagcagagaagaaagtggtgaaaattacatctgaaa

SEQ ID NO: 152428 - DNA, 100 bp, Homo sapiens
gagtcccgtattctcagagtaaaagttgtttctggaattgatctcgccaaaaaggacatctttggagccaggattctaacattttcagagaaccttttgg

SEQ ID NO: 152429 - DNA, 74 bp, Homo sapiens
cgctacgccctggatgagatggcttgccgctgttccgtaacccagtgattccagtcttggctgtggtatgaatc

SEQ ID NO: 152430 - DNA, 100 bp, Homo sapiens
aatgtcgaggtggaacaagagagcttctttgaagggaagaacatggcacttttcgagtttgacttgctggaaatggaccggctggagaggccactggttg

SEQ ID NO: 152431 - DNA, 82 bp, Homo sapiens
gaacatccgctgcctgcaggactgccgcgagtgcactggaggcatgatgaggaagaaaatccttcccgttcttctggatgag

SEQ ID NO: 152432 - DNA, 90 bp, Homo sapiens
tggagttcttacaacatggcagacattgacaaaaacttgtggtggagaatgttgatgtgttaacacaaatgaggaccagctttgacaaac

SEQ ID NO: 152433 - DNA, 82 bp, Homo sapiens
cttagctgtgctcgcgctactctctctttctggcctggaggctatccagctcaactgcttggaccagcatgttcggaagtcc

SEQ ID NO: 152434 - DNA, 90 bp, Homo sapiens
cgctgatgccgcccgcggcgaggtggcccggaccgcagtgccccaagagaggcaccgtctgcgtcctgctgtccttccccttcatcttca

SEQ ID NO: 152435 - DNA, 75 bp, Homo sapiens
cggggccgctggattctgaggaccagcagatggccagtcacgagaacccaggtactccaaagattcaggtttact

SEQ ID NO: 152436 - DNA, 100 bp, Homo sapiens
agttgagaagcagaacccagctgaaggactggttatggaggttttgatgactatggtggctataataattacggctatgggaatgatggctttgatgaca

SEQ ID NO: 152437 - DNA, 100 bp, Homo sapiens
cctctacaaaggcattagtcctatcttgtaaggcatgtgagcagcagtgacagagtgggcaagccttaccgtggcgtaaagcctgttttcagcattgggg

SEQ ID NO: 152438 - DNA, 74 bp, Homo sapiens
ttttgaagatggaatccgtagcgcccagctcattgcctcagctaagtgaacacacagtgttcatcccctcagga

SEQ ID NO: 152439 - DNA, 50 bp, Homo sapiens
aagaagatgatagcagtggagaagaggtgtcgtgaaaactacccctaaaa

SEQ ID NO: 152440 - DNA, 98 bp, Homo sapiens
cgccttcctgggccacaacggggccggcaagaccaccaccctattccaactccacagagtgaccagagagaggacgtggctgaagacaccaaagatgg

SEQ ID NO: 152441 - DNA, 74 bp, Homo sapiens
tggcactctggatcaggtttcccacagggagaaaatggagcagacattcagggcgcatgctgagaagcaacaat

SEQ ID NO: 152442 - DNA, 101 bp, Homo sapiens
tcatagaggaagggaagtactccctggtgatggagtacatggagaagggcaacctgatgcacgtgctgaaagccgagagacaaggtcttgctgtgttgccc

SEQ ID NO: 152443 - DNA, 97 bp, Homo sapiens
gcatgagaaatttaaggtggagagcggctgcttttgtcagagacgttttattaccgggagaatgggatgtatgtgtaacatcttatgaaatgcttat

SEQ ID NO: 152444 - DNA, 100 bp, Homo sapiens
ggtgctgcgagggcagaacctgggcgcatattaaatttcctattgactacccctattcaccacctaccttcagattcttgaccaaaatgtggcaccccaa

SEQ ID NO: 152445 - DNA, 83 bp, Homo sapiens
atagagttgagcctgtgggacacttcgggggacggcaaaacagaacagaaaggcggagataaaaagaggggtgttaaaagacc

SEQ ID NO: 152446 - DNA, 74 bp, Homo sapiens
tgaccttcagtcacctaacctgcagatggagaaggatgaaactgtgagtgactgctccccacacatagccaaca

SEQ ID NO: 152447 - DNA, 101 bp, Homo sapiens
gaaagccaagaattccaacccagcattgccaaaaaatatatagatcagaaatttgtattacagtgacgagtagcacagcccctctatggtttagatggcag

SEQ ID NO: 152448 - DNA, 96 bp, Homo sapiens
ggatgttcatgggcagcaccatcgagccagaagcagtatttgtcctggatctgagtgatgagacgtgtccccactgaggtgccccacagcagcagg

SEQ ID NO: 152449 - DNA, 96 bp, Homo sapiens
gcccggctccgggtcaagggctgtaccgctccccgatgcccggagcggcctatccggttttcctttggaatatggataaatacaccatgatacgga

SEQ ID NO: 152450 - DNA, 100 bp, Homo sapiens
tcatggtgatgggtattacagatgtagatgataaaatcatcaaaagagccaatgagtgccggtggtggtgtgcacattgagccccggtatagacagttcc

SEQ ID NO: 152451 - DNA, 82 bp, Homo sapiens
tctgggacttaggagggcaggaagagctgcagtctttgtgggacaaggtgtttcccattaaacactaccaggacaaaatcag

SEQ ID NO: 152452 - DNA, 98 bp, Homo sapiens
gccggacagagcagaagaaccctcttggactggacgatttgggaattcaaaacttgggacaaactgtcagccttgacaatggcgatgaccactcagaa

SEQ ID NO: 152453 - DNA, 90 bp, Homo sapiens
gactgggggcatctgaagcagtggccgacatcaagttttcctctgcagtaggtggtcttggcacaggcagcctgactggtataggaactg

SEQ ID NO: 152454 - DNA, 90 bp, Homo sapiens
gttcttcatctacgccatcatcggcatgcagttccatgccattgcagtgtcaactaggcctcagttacttttcagtttgcccaaattgag

SEQ ID NO: 152455 - DNA, 105 bp, Homo sapiens
gaagctgtgagcgcccccatcccggaggtctccgccggctcccggttttcggctttgtgagaaaccttaccatcaaacacgatggccagcaacgttaccaacaag

SEQ ID NO: 152456 - DNA, 96 bp, Homo sapiens
ctgaagaaatttgtgtggagcgaggaaaggtgtgctgtgcctgaggccaggagattagcagaggcatttcatatcagtgaggattctgatcctttc

SEQ ID NO: 152457 - DNA, 75 bp, Homo sapiens
ggatgatgccaaagttttattagggtcatcgagcagctcggtgggaagcagctggtcatgaaccacatgcatcat

SEQ ID NO: 152458 - DNA, 98 bp, Homo sapiens
ccctcaactctctacgctttgcctccaaggacacctcctacctgttcatcactggccctgatgttgtgaagtctgtcaccaatgaggatgttacccag

SEQ ID NO: 152459 - DNA, 98 bp, Homo sapiens
aaaaaaacgacgcggccaaggggatcgccgacctgctgtcaaacggtcgcatgaggcgggatttcaaattattggtggggagaagatgggaagactgg

SEQ ID NO: 152460 - DNA, 82 bp, Homo sapiens
ccctctccttttcgtttccggaaacatgggcgaactttctgaccaagtatacaactacccagagggcctaggagaagtgctg

SEQ ID NO: 152461 - DNA, 96 bp, Homo sapiens
tgccgtgtggacccgtaaaataaaatggatcactccaagaactgaggcccctgtcagcagtgtcagtaatagtttggagaatgccctgcacacatc

SEQ ID NO: 152462 - DNA, 75 bp, Homo sapiens
gagcggggccttccacaccccctccgtgggtgtgtggtgagtgtgggtacatgtcccagagcaagcacacggagg

SEQ ID NO: 152463 - DNA, 82 bp, Homo sapiens
aaagaaagctcatcacagctcacaattcttccatctctatgacaacaagcccattttagctttctggagaatagcatctgag

SEQ ID NO: 152464 - DNA, 100 bp, Homo sapiens
gggacggacggtgatggtggtcgccgcggcggcgtgtgcgcccctcagccttgaaaagatcttttgaggtcgaggaggtcgagacacccaactccacccc

SEQ ID NO: 152465 - DNA, 82 bp, Homo sapiens
cggcgggcggcggcgcgcggacccaggcgcggatggcgaggccagcagcgcgttccttcacctcgggcagaataactttgca

SEQ ID NO: 152466 - DNA, 100 bp, Homo sapiens
ttttttcttcttggtcaaggattatggcagctggcttgatattgggacaagtaccaagggaagaacacctacctggagaagattgacggcttccgagcct

SEQ ID NO: 152467 - DNA, 90 bp, Homo sapiens
ggaagcgtgcaaatgccagaaagaggatttggccagagcgttttgtctgccccagagcacatcagctatgtgccccagctctcaaacgac

SEQ ID NO: 152468 - DNA, 100 bp, Homo sapiens
tttgccgccgtctcctcctcttgcccgcgcaggcacccctctggctgctcagtcctgcctcaggggcaagctctgtgtgattgattggaagacatcagag

SEQ ID NO: 152469 - DNA, 100 bp, Homo sapiens
cggagcctggaggaagagaaggcagctgtgactgaggcagtgcgggccctgctgggaaacactactatgaagtatcctgtcatgaccaagggttatgcag

SEQ ID NO: 152470 - DNA, 100 bp, Homo sapiens
ccgcagaccaccaacctcctgtatctggagctgggagacaagcccgcgcccaacaccttctatgtagggactttgaacatgtcggggatcgccctcagca

SEQ ID NO: 152471 - DNA, 74 bp, Homo sapiens
cagaatatgctaaacttttggccaagagaatgaaggatacagcagttaaaacagttactggaggattctacctc

SEQ ID NO: 152472 - DNA, 90 bp, Homo sapiens
cagggaggatgtcgggacaccccggaagctgggaaatggtacccattcctggcccagtgggtaacaagagaatggttcatttttccccgg

SEQ ID NO: 152473 - DNA, 90 bp, Homo sapiens
aacagacctcagctccgcggaagttgcgtgctttaagcagtggcttaaagggcagagcgcttgcccggcctgccagggtcgtgatctcct

SEQ ID NO: 152474 - DNA, 75 bp, Homo sapiens
gctggactggcagttggagaccagcatcaccaagccttttgatgaggccgccatggcatcagatgaaggcaaact

SEQ ID NO: 152475 - DNA, 100 bp, Homo sapiens
cagagtgacagttacccgagatcagccacgcagagtcctgccttcctttgggggccagcagcctcccccgatgggtcgtcagcaacgagggtgcctcagg

SEQ ID NO: 152476 - DNA, 100 bp, Homo sapiens
gccacatcaacccacctcacagcacttcattatgcagctaagttggctaagtggaagacagctgaggaggtggccgccctgatccgatctctgcctgtgg

SEQ ID NO: 152477 - DNA, 95 bp, Homo sapiens
gaatgcctcaacaaagttatcaaactgcaccacctcgtgagcgatgacgtctgcctgaaggtggtggagctctacctgaacgagaagaagcgggg

SEQ ID NO: 152478 - DNA, 50 bp, Homo sapiens
gtcaatcagagcgtcctgtgcggctttgggaacgatcactgcagtgcctg

SEQ ID NO: 152479 - DNA, 50 bp, Homo sapiens
tcaaacttctatatcacagaaaagggaatgcagagagcaaccaatgtcac

SEQ ID NO: 152480 - DNA, 90 bp, Homo sapiens
ctggagccgaggcgcaggtggcgctgggtctcctctgagcctccggcctccataagacccaaaacagatgacacctcttcccagtccccc

SEQ ID NO: 152481 - DNA, 75 bp, Homo sapiens
ccggcggcggcgcgcagcgtgtcaggcggagagacccgccgccagtttgcagaaaaaacttcagcatgtgccagg

SEQ ID NO: 152482 - DNA, 100 bp, Homo sapiens
tagggaagaaaagtctgcttctgattcttctggaaaacagtctactcaggttatggcagcaagtgaaaccgcagccccctctgagtgatgcctacctcag

SEQ ID NO: 152483 - DNA, 98 bp, Homo sapiens
tcactgaggttgcagttggcgtgaagaaatatggctacacacacctttctgcaggagagctgcttcgtgatgaaaggaagaacccagattcacagtat

SEQ ID NO: 152484 - DNA, 75 bp, Homo sapiens
ttcagccgcagtcgccactggctgcctgaggaaggtgctcgggtcttcggggcactgggtcccatcggtccctcc

SEQ ID NO: 152485 - DNA, 75 bp, Homo sapiens
ctgtgccccgccagctaccggggggactcatgccagggtcctgccctccggaggagcagcctcgaggctggtggt

SEQ ID NO: 152486 - DNA, 75 bp, Homo sapiens
cttgtcaacaaggcgctgctgaccacctacggccaactgggtacatggaaaactcagtctcctacagcgcaattg

SEQ ID NO: 152487 - DNA, 74 bp, Homo sapiens
gaattttggcatcaaggacaaacccaccttcatcaaagggagtggtggacatgacaacagagtcaactgcatac

SEQ ID NO: 152488 - DNA, 98 bp, Homo sapiens
cttccaccagcaaagactcatctcatccaaggtacggattttcaaatatgcgctatatttcttcgctaattagtggtgttggtattttcatgatgggt

SEQ ID NO: 152489 - DNA, 96 bp, Homo sapiens
gaattggtgtaagacatcacaatcccattattcagagcgcgtatggagtggaaacgcttgtagggtttcaccagatggagtctcgctctgtcgccc

SEQ ID NO: 152490 - DNA, 100 bp, Homo sapiens
cgccgacaaggctgcacaacaggtaatcattaccaaatgaggaggaaaggacgatgtcatcgaggctctgcagcgaggcatccttcttccccatgcagtg

SEQ ID NO: 152491 - DNA, 75 bp, Homo sapiens
aacatgtactacagccagtcttctatgtttccacatcggtcagaaaaagattcaagctacaacttcaagcagaag

SEQ ID NO: 152492 - DNA, 83 bp, Homo sapiens
agacatgaagctgatgttccggaatgccaggcactataatgaggagggctcccagccatcaagggccctcatttggccaatag

SEQ ID NO: 152493 - DNA, 140 bp, Homo sapiens
tacatcatagactttcagctacttgaagatagccatcagccgctacgtgactcttttctccaggtgccttggtggatcaggcagtctttgaagaacttatcagggatcaccttcctcagctgacagaacacatgactgat

SEQ ID NO: 152494 - DNA, 100 bp, Homo sapiens
acggagacttggatgaggtgaaagactatgtggccaagttcaacagatgcattacctctcagctcatcaagtggtttagcaatttccgtgagttttacta

SEQ ID NO: 152495 - DNA, 80 bp, Homo sapiens
ctaaaataggccaggcctgcaggacatacggtctacatcggtaaactctgcaaaactccagcagttacagagcctgtgct

SEQ ID NO: 152496 - DNA, 100 bp, Homo sapiens
caatgaccttcacatgctttgtgttttttgacatgttcaatgcactaagttccagatcccaggaactgaccaacactggatgaatttgaccatttcttag

SEQ ID NO: 152497 - DNA, 99 bp, Homo sapiens
tatctgatgatgatgaaagttacacagagacacctatggctgccgatgaaggctcagcagagaaacaggcaggagaggcccacatggctgcggacggtg

SEQ ID NO: 152498 - DNA, 113 bp, Homo sapiens
ttgaagatgaagataagagtgagcctgagcagacaggattctaccatcagaaaagaggccaaacttctatcatcatggtggatgtgaagtgtctgagtgactgtaaattgcag

SEQ ID NO: 152499 - DNA, 99 bp, Homo sapiens
gtgaccaacacttctaaacttggattccggatctgggatgtggcggattatgtgataccagctcaggtgcaaacggaggttcttcagaagaggcagcag

SEQ ID NO: 152500 - DNA, 100 bp, Homo sapiens
aagatttgtaaagaaaactcttaggcgggacccttgcgtttgtcagcccaagcctggcggtgcacaagagctcctcggccgtggaccgccagcgagagta

SEQ ID NO: 152501 - DNA, 100 bp, Homo sapiens
ccgatgcccgggggtcgctacggacttaaaatctccgcaccgcaccctccacctcaggattgacttctaaggactcttggtacatgaggaagaaacccgg

SEQ ID NO: 152502 - DNA, 50 bp, Homo sapiens
ctgagcttcctggagaagaggaaggtgctgacatccatgctgaaaacgag

SEQ ID NO: 152503 - DNA, 50 bp, Homo sapiens
ttcttaagctcccaatttggcttcaacttgtgcaccatggacaattttgc

SEQ ID NO: 152504 - DNA, 100 bp, Homo sapiens
cggccgagtccccgtacggccacccggcggtcttcccgaggctgctgtccatgacactgagtccagatcttcacatgaggcatgggtcgattctcgcctg

SEQ ID NO: 152505 - DNA, 87 bp, Homo sapiens
tgccataaacaattcatatctcatggtgattcaagacattactgctatggctctctatgagaacatgctggtggagctgccctttgc

SEQ ID NO: 152506 - DNA, 100 bp, Homo sapiens
gcaagaaaaactgaaggagacagaagcagccatggaaaaattaatcaacagagtgggacctaatggtgagaggccactattgaactctgcagtacccatg

SEQ ID NO: 152507 - DNA, 88 bp, Homo sapiens
ccagcctggacaaaggagagaatgggactctcaggtcttcgccttgatcgtgttctcctgcatctatggtgagggctacagcaatgcc

SEQ ID NO: 152508 - DNA, 100 bp, Homo sapiens
gctttcagcaaatcaaagccagctcgcaacgccctggtggtctccttcgcagccctggttgcgtactccttcgaggtgactggataccagcctttcatcc

SEQ ID NO: 152509 - DNA, 100 bp, Homo sapiens
gctcttaacccagtttgaaacgtaactggttccctgaccagacaggccgacggtcgcaaggtcctacggtcaagcatccgggagtttctatgcagcgaag

SEQ ID NO: 152510 - DNA, 83 bp, Homo sapiens
gtgaatggcagcaaggtgggcccggacggcacaccctacgttaccgtgctcaagttctgggaagtcatcagtgatgagcatgg

SEQ ID NO: 152511 - DNA, 75 bp, Homo sapiens
ggagaagacacggtcgtgatcgcggaaccttttgaggatggctttgcaaatggggaagaaagtactccaaccaga

SEQ ID NO: 152512 - DNA, 98 bp, Homo sapiens
atggaacacactgaagttcttcagcttctcagccccccaggaaagatgaatgggagggctgattttcgagagccgaatgcagaggttccaagaccaat

SEQ ID NO: 152513 - DNA, 101 bp, Homo sapiens
attagcaaaggtgctaatccagtggaaatcaggagagggatttccacaagatcaaattcgattgtggcccatgcaagcaaggagtaatggaacaaaacgac

SEQ ID NO: 152514 - DNA, 82 bp, Homo sapiens
caacatctggatggttggggagaacgatgctgcacttaaaaggatgcttgttttgatgtcctgctcattgttttccctatga

SEQ ID NO: 152515 - DNA, 100 bp, Homo sapiens
caacccccgcctcctggctcagatcgatgcgtccatgggtctgttcctggtttcccagatgcataaaggaagacatatccctcccctgggcagcaaggct

SEQ ID NO: 152516 - DNA, 76 bp, Homo sapiens
ctggcaagcagctggaagatggacgtactttgtctgactacaatattcaaaaggacgcaaagtaccacatgcagcg

SEQ ID NO: 152517 - DNA, 83 bp, Homo sapiens
ctgagctaaaatggctgaggagagagtcgcgacgagatgggatttcaccatgctactcaggcttgtcttgaactcctgggctc

SEQ ID NO: 152518 - DNA, 96 bp, Homo sapiens
acagctgcccgcgggcccagcctgacgccatctcacgcctgctggagcaccccgagcagaaggcagaccggtattttgtgttatacaaaccgcccc

SEQ ID NO: 152519 - DNA, 100 bp, Homo sapiens
aacagaggagaatctgaaaaaaagagaaacctgggtgaactttcacggacaacctcagaggacaacgaagtgttcggacatttcattaccatccagaagt

SEQ ID NO: 152520 - DNA, 74 bp, Homo sapiens
cccagcctaactacatccacgatatgaaccgactagacgcttgaagcaaagctgccatcccagaagacgacatg

SEQ ID NO: 152521 - DNA, 98 bp, Homo sapiens
gttattttctcttcttctgaaaaagagatcttgattatatagaagctgaaagttcttatagtcgagccctcgaaatgtgcccatcctgcttccaaaag

SEQ ID NO: 152522 - DNA, 83 bp, Homo sapiens
caacccgttcttgcctcaggccagtcgcctccaggccaagagggatccttcacccgtgtctgccggtggctgctggcagcgga

SEQ ID NO: 152523 - DNA, 100 bp, Homo sapiens
ttcatgaatttcaagagagtaccattgggggttaccttccgaacaagaatctatcactgtaatattaacagccaaggtgtgatctgtctggacatcttaa

SEQ ID NO: 152524 - DNA, 86 bp, Homo sapiens
ggaaacaccatggctgcggcggcccagctctctctgacacaggaggcacgcggacctccagtggccggctccggaggcttggtgac

SEQ ID NO: 152525 - DNA, 75 bp, Homo sapiens
ccgcctagagtggttcagccacaaggaggacaatctctatgggaagcagaaggcaaggaccccggtcattttagg

SEQ ID NO: 152526 - DNA, 98 bp, Homo sapiens
cacgcttgatccccggccgcggggccaggaagtcggagtttgagccccggaggcagagcggctgccatgactcagaaccgtgctgcatactatcctcc

SEQ ID NO: 152527 - DNA, 100 bp, Homo sapiens
agctcggcggacgcgggagggcagcaccacgggcggcaggtactccaaagattcaggtttactcacgtcatccagcagagaatggaaagtcaaatttcct

SEQ ID NO: 152528 - DNA, 100 bp, Homo sapiens
gacctacatctccaagaagctgactcgctacctcaactggattggcgtccccacaaaagataaggaggagcattccaggccgagacgccctcatcagcag

SEQ ID NO: 152529 - DNA, 79 bp, Homo sapiens
acattactacttcctaggcagaatgcttggaaaggaatcactagatttgatctacttggcgactttggaaggtttaatt

SEQ ID NO: 152530 - DNA, 51 bp, Homo sapiens
gcgtgctgatccgccagcgccatatcagagacggggtttcatcatgttggc

SEQ ID NO: 152531 - DNA, 100 bp, Homo sapiens
cacagttggataagatggggttcacaattatcagaaaatgcatcagtgccgttgaaacacgaggtatctgtaattcttgcccaccaaacaagcctgcaga

SEQ ID NO: 152532 - DNA, 97 bp, Homo sapiens
tgaacgtctggactctagggaccctgctgaatagctggggctacaggcgtgtgtcactgcgcccagcataagctgtggccatgactactgaagtagg

SEQ ID NO: 152533 - DNA, 100 bp, Homo sapiens
gctttcaggaacattgctgtggattcccaggccgctttgtagttcagaatgtttctgcacagaaagatggagaaaaatctagagtaaaagtcaaagtgcg

SEQ ID NO: 152534 - DNA, 82 bp, Homo sapiens
tgaggtggcagcggcaggagagtccggccgcgacaggacgatgtggacgagtgctcactagcagaaaaaacctgtgtgagga

SEQ ID NO: 152535 - DNA, 100 bp, Homo sapiens
ctgtaccgggttttggaggctggcaagattgggatatttgagagtccaactggcactttctgggaggtgatcagtgatgaacatggcatcgaccccaccg

SEQ ID NO: 152536 - DNA, 74 bp, Homo sapiens
cacataaaaattatttatccaacagctcctcccaggtaattaataatgcttgtgctactcaagccatagtgagt

SEQ ID NO: 152537 - DNA, 80 bp, Homo sapiens
ctgcacggcccactccgacgtgtgctccgcccagggggtgcgaggataccccacgttcgatacaagaggctgttttccta

SEQ ID NO: 152538 - DNA, 102 bp, Homo sapiens
cgagactgagctggctaagcaggtgctgcagacggagctggagcgaccgagagagctgaaggaagaggatcaccttccaagacaaaacagtcttcatggggg

SEQ ID NO: 152539 - DNA, 100 bp, Homo sapiens
atgatattgagctttacatgcacttgaacagactagaaattgcaccacagatatatgggttgtgatctttagacagtgactgagtatggatcatttgaac

SEQ ID NO: 152540 - DNA, 80 bp, Homo sapiens
cgcggggcatgttcccgaggctgtcaccaggtgcgcgcggagccatggttatcatgtcggagttcagcgcggaccccgcg

SEQ ID NO: 152541 - DNA, 90 bp, Homo sapiens
ccacgtcacgcacacgctcggcgctgcgatccgcgcatataacgtgccggtggtggtgtgcacattgagccccggtatagacagttcccc

SEQ ID NO: 152542 - DNA, 98 bp, Homo sapiens
ccttggtcgccgcgtccttggctggcgtttgattatggaagattcccacaagagtaccacgtcagagacagcacctcaacctggttcagcagttcagg

SEQ ID NO: 152543 - DNA, 141 bp, Homo sapiens
ttcaacggaaactagctcatctgtagagactgatttgcaacccttccgggaagccatagctctgcatggtttcatgaagtcttcaaaaccctagctgaaagtgatgaaggaaagttacatgtgctaagagttatgtttgag

SEQ ID NO: 152544 - DNA, 100 bp, Homo sapiens
ggcccggcaaccattgcctgcggaaagatcgtgtcgcacacgcacctcggagtcttacaaaacactacacagcaaaataatgatctgctagactgctaac

SEQ ID NO: 152545 - DNA, 98 bp, Homo sapiens
ccgacccgggccccgggctagcagagcggaggcgctgccacgaaactcgtacctgcggctaagagcagtaagactttgaccccgacgcaggcttcagt

SEQ ID NO: 152546 - DNA, 98 bp, Homo sapiens
ggctgccccgcaggatcatcaagtcttgaaagcgccacaagcagcagctgctgagccatggctgaaggggaaatcaccaccttcacagccctgaccga

SEQ ID NO: 152547 - DNA, 100 bp, Homo sapiens
cccatcgcggtgctcatagacgaactccgcaatgaggacgttcaggagcgcctggaccatgctgctgagcgcctactggcacggcctccacccgggctac

SEQ ID NO: 152548 - DNA, 100 bp, Homo sapiens
ctcctcctggccgctcatcgcttcctagccacagcatcagaagagctaacaattgctggaatgacctttacaacttttgatcttggtgggcacgagcaag

SEQ ID NO: 152549 - DNA, 100 bp, Homo sapiens
ctgtgagttctggctgacgctggccgagcagcccatctgcaaggaagtcctggcctcccatctggtccatttgtcccgctggctggaagcctggcagtga

SEQ ID NO: 152550 - DNA, 111 bp, Homo sapiens
aaagctcaaggtgaagattgctgaccttggaaatgcttgttgggtggaacagcatatgccatatatgagctggctgtggcttcatttcccaagaagcaggagtgacttcag

SEQ ID NO: 152551 - DNA, 108 bp, Homo sapiens
atcgaatgtcacgaatgcttgaagacagagatttattcgtaatgcgactcaaagctgcacggcagtctgtttatgaggggctagtgacatttgaagatgtagctgtgg

SEQ ID NO: 152552 - DNA, 82 bp, Homo sapiens
gcggtgacggtggcgccgcccggggcgaggcagggccagcagcaggcgggagggcgaagctgtgctcaggcccgggctggac

SEQ ID NO: 152553 - DNA, 96 bp, Homo sapiens
ccttgctgtaaattatgagaaagaagaagaattcctcactaatgagctctccagaaaattgatgcagatgtcatcacaatggatcccaaagacaat

SEQ ID NO: 152554 - DNA, 90 bp, Homo sapiens
gggatcacaaacactcagagtggaaaaagtaccatcatttgaaacagaaataagcgggttttgaaaacaaaaaaaagaaggagtggaaga

SEQ ID NO: 152555 - DNA, 98 bp, Homo sapiens
cccgtccttcactcacgccatgcagctgctgacggcagcatttttgaaacgttggggttgttggagtggttggattttccctggaattgagtgagaaa

SEQ ID NO: 152556 - DNA, 96 bp, Homo sapiens
aaactcgactttggagaaaccaccgtgctggaccgcttttacaatgcaggaacctctttcaggagctataaaagaaagggaggaatcatgtccaca

SEQ ID NO: 152557 - DNA, 83 bp, Homo sapiens
cgctgggctgtcggcctggaccttgcagccgcaatgtgatgagccctcctcttcagctaggaaaatgacggtgttcagaaagt

SEQ ID NO: 152558 - DNA, 75 bp, Homo sapiens
ggtggttaaacttcgcaaaatgcacaagctccgggtggataaggcagctgctgcagcagcggcactacaagccaa

SEQ ID NO: 152559 - DNA, 88 bp, Homo sapiens
gcagacccaaatacgtgtctccccaggatgtgacgaccatgcaaacctgtgctacacacgcagggccctgtcgatggcagcctttacg

SEQ ID NO: 152560 - DNA, 101 bp, Homo sapiens
agaacagatacaaggacatactgccatttttagaaagagcgttttcgctacgtaaagcacattcgataaaggatatggaaaatactttgcagctggtgaga

SEQ ID NO: 152561 - DNA, 100 bp, Homo sapiens
aaaagaagtgttaagaattgcctttgggactctgaaggctgaaggtccatggaaataaaaggcacatgaacaagtgcattctctctcttagagaccttaa

SEQ ID NO: 152562 - DNA, 75 bp, Homo sapiens
ggcatgggggtccacactgcaatgtttttgtggaacatgtgatcagcctttgagcctttcccacattgaagatgg

SEQ ID NO: 152563 - DNA, 50 bp, Homo sapiens
aactttggactgagctatgccagactcagcatacctcatctcagaactag

SEQ ID NO: 152564 - DNA, 90 bp, Homo sapiens
atgtattccctggggatggcgcatcacacaccaaagggaacccgagcgtcatgttagggtgaagcagaggacctcagtgctgaacatgct

SEQ ID NO: 152565 - DNA, 75 bp, Homo sapiens
ccgcggggcagttcgggccggctgtcctggcgcgtttgctatgaagattatggaatcagagagagctcttggaga

SEQ ID NO: 152566 - DNA, 100 bp, Homo sapiens
gcggtcgtcagctaagggccccggggctcgcggggggtgcgcagggcaggtgtaccatagatgaccgggtaacccgggtggcctggctaaaccgcagcac

SEQ ID NO: 152567 - DNA, 100 bp, Homo sapiens
gttgcaggagctgacgcgggcgcacgtggagtccttcaactacgctgtgcacgagggtctcggcctcgcggtgcagaaaagatgttggtttaaagcgatt

SEQ ID NO: 152568 - DNA, 74 bp, Homo sapiens
aggatatgatcgtgggtatgacagatatgaagactatgattaccgatacagagacattagtaaaaaccgcctct

SEQ ID NO: 152569 - DNA, 100 bp, Homo sapiens
aaaagaagaagtattaaagaagtatcaacgtcttctagaaaaagccagagaggagcgagctggacgccactgtggggctctgagagtcctgaattcttac

SEQ ID NO: 152570 - DNA, 98 bp, Homo sapiens
tacatcaagtgatgaaaaacacccacctgaaaatatcattgatggagataattgacgaccttgccaacctagtggagaacacagatgaaaaacttcgc

SEQ ID NO: 152571 - DNA, 83 bp, Homo sapiens
ggaaatgctgttgctggattgcaaccccgagcggcctcccagccaacatccagctggacattgatggggaccgtgagacggag

SEQ ID NO: 152572 - DNA, 83 bp, Homo sapiens
gcggcgacggcggcggtggcggcttggacgactcggagagccgcacatgattaagtaccggtacatcccgttcacacatggga

SEQ ID NO: 152573 - DNA, 100 bp, Homo sapiens
ctggggcccgttccatgggagtgtccagaccagagcctcatcccccaggcaggcggagccggggtttgttaaagttgttaagaataaggcctactttaag

SEQ ID NO: 152574 - DNA, 82 bp, Homo sapiens
gcagcagtcagaaggggaacggatctgtgtgcccacagctcctggagccccacaggtttggtgcacctcgatttggaggaag

SEQ ID NO: 152575 - DNA, 75 bp, Homo sapiens
aagaaactgacaaaaacatttctgaggaccggccagccttgcagctgtatgatccaggagctcgcttccgagcgc

SEQ ID NO: 152576 - DNA, 101 bp, Homo sapiens
catgaatattttgcactccagcatgccgatagttcaaacttctatatcacagaaaaggatctagtgaaaagccatttgatgtatgcggtcagagaagaagt

SEQ ID NO: 152577 - DNA, 75 bp, Homo sapiens
ttggactgtgggcatggaatgaaaaactatatgttctcctttcagccaagacctttcaccagtgcaggggataga

SEQ ID NO: 152578 - DNA, 75 bp, Homo sapiens
cagaggacgccggaacaccctggaagccgagaaatgacaaacctcagcctgatagcaaaccaacatatagtcggg

SEQ ID NO: 152579 - DNA, 103 bp, Homo sapiens
cgctcaccccgcggccgcaccttcccgccttctcaggggcagtggaagccgttggagggcctcaggcaggaacacaaggtgtcgtggcagaaaggaagaaggg

SEQ ID NO: 152580 - DNA, 100 bp, Homo sapiens
gctcacagcacctacagggaaagcagctggcttactaagacagaaaactggtcttcatgcctacacactgtgtcaggtggctgccaagagacaagggtcc

SEQ ID NO: 152581 - DNA, 71 bp, Homo sapiens
aagagaggcctctcccaaagcacctgcgcagatgaagatcagcttcgtgcaaagggttatgacaaaacacc

SEQ ID NO: 152582 - DNA, 49 bp, Homo sapiens
gagtccggacatctgaaacttggacatggatttgattgacatactttgg

SEQ ID NO: 152583 - DNA, 98 bp, Homo sapiens
cgttggcggcggcggcggcggcagcggcagcgcggcggggccggactagacgcttgaagcaaagctgccatcccagaagacgacatgctctcagcaac

SEQ ID NO: 152584 - DNA, 88 bp, Homo sapiens
gagccctctcttcagtcagattctgagccttcagacttctgtacagcagctgaaagaccaggtggtgcatatgaagtcaaacagcatc

SEQ ID NO: 152585 - DNA, 94 bp, Homo sapiens
ggcagacgacaataagctcttcagggaggaattcaacgtggtttgttctggatgcagaaaccagagatctagtttctatccacacagacgggaa

SEQ ID NO: 152586 - DNA, 82 bp, Homo sapiens
accagttcgcccgtccccctgccccgttcacaataaccgggctgtgggtcggcccaaggggaagctgggcccggcctccgcg

SEQ ID NO: 152587 - DNA, 100 bp, Homo sapiens
ccaggggaggcccccacctccccttctattgttctgtggcccagggtatttctcaagctgccagatacgtttaccaacgactcatcaacgacgggatttt

SEQ ID NO: 152588 - DNA, 75 bp, Homo sapiens
aagccttcagaatcagatgaatggaggacctttttatagccagaatccaggagctggaagacctgaacaaatggg

SEQ ID NO: 152589 - DNA, 50 bp, Homo sapiens
caagaccatccctggctgctggactgcaagatggaggaaggcgggaacct

SEQ ID NO: 152590 - DNA, 75 bp, Homo sapiens
aagagcaagatgcagtcagtggagaacactggaactattttggggctgatgagaatcttggtccagtggctgtga

SEQ ID NO: 152591 - DNA, 100 bp, Homo sapiens
aataacacagagacgggcacatgccagggcagctcccccagtgaccgtcgagactgctacaagtaccagattgggcaactccatgtaaaaccaaagacgc

SEQ ID NO: 152592 - DNA, 101 bp, Homo sapiens
ccataaacatgtcttgtgagaggaaaggcctctcggagctgcgatcggacacgaagatcgattgagaagttattagaatgggaaaacaataggttatacca

SEQ ID NO: 152593 - DNA, 75 bp, Homo sapiens
aactatggaacaaaacagatccttggagaagctaccaagctgtagaatacatgagaagaggagaagatccaacca

SEQ ID NO: 152594 - DNA, 101 bp, Homo sapiens
caagaaagagaatggagaagtaaagattttgctgaaaagccccttcacagatgtagtcactacaaatcttaaattgcgaaatccatcggatagaaaagtgt

SEQ ID NO: 152595 - DNA, 97 bp, Homo sapiens
atgtactacagccagtcttctatgtttccacatcggtcagaaaaagatagtgctgcagcagctcccagtccagtgctaggaaacattcccccaggag

SEQ ID NO: 152596 - DNA, 100 bp, Homo sapiens
aatgaggaatgtctttcctaccatctaaaatacgaaggtttctggctgggttgcaaaagcttctcatttcagagagatgccaggatcctaagtgcctgcc

SEQ ID NO: 152597 - DNA, 75 bp, Homo sapiens
cgcgtgcccgcgaggagccgccgcgcgcccgcgccctccgcgcgacgccagaagtcccgggcccagagcccggcc

SEQ ID NO: 152598 - DNA, 100 bp, Homo sapiens
ctggattggtggatctgaagtacaaaatattttccaggacaatataaggcttcaagattgctcagcactatgtgaagaggaagaagatgaagatgaagga

SEQ ID NO: 152599 - DNA, 50 bp, Homo sapiens
aagaacatatgccagttcctcgtagagctcattcttggaatcccagaaca

SEQ ID NO: 152600 - DNA, 75 bp, Homo sapiens
aagactttaaaactccctccaaaggatctaagaatcaaaacttcgttcatggctcagttccacgaaaagatctac

SEQ ID NO: 152601 - DNA, 83 bp, Homo sapiens
accacactaacgagattcaagattatttgcaacagctcacgggagcaagaacgggctcaaaatctccttcgccaagaccaaac

SEQ ID NO: 152602 - DNA, 118 bp, Homo sapiens
gccgtcgctcggacgctcctgctcggctgggtcttcgcccaggtggccggcgcttcaggtacctggaatggaaacacaaaagtagccataaagactcttaaaccaggcacaatgtccc

SEQ ID NO: 152603 - DNA, 100 bp, Homo sapiens
cctgcagagcgcgcagtacctccgaaaacccatatagacagctgccttgtaactgtcatggaagcatgcctggaaagacagcaatagaacttggacctct

SEQ ID NO: 152604 - DNA, 90 bp, Homo sapiens
aagaagcagcttgggccatcacaaatgcaacttctggaggatcagctgaacagatcaagttacaaatgctgctgccaactgtcctggcca

SEQ ID NO: 152605 - DNA, 51 bp, Homo sapiens
cggcgcctcaggcacctcggcccggggccgagaactactggtggcgtggcc

SEQ ID NO: 152606 - DNA, 75 bp, Homo sapiens
tacaaattttgctactgtcagatggattgactatggaaaagttgccaaattgattcaaccctatgaaaagataaa

SEQ ID NO: 152607 - DNA, 83 bp, Homo sapiens
acttttacctacgttggcggccccagaagagatggggacttgcttggggtcttgctgcccaggctggtcttgaactcgtggcg

SEQ ID NO: 152608 - DNA, 132 bp, Homo sapiens
tgcatactatcctcctagccaaattgctcaactaagaccaagtcctcgctggactgctcagggtgccagacctcatcagactttagaagacagctttccatcgacactaggccctttagaccagcctctgaa

SEQ ID NO: 152609 - DNA, 99 bp, Homo sapiens
gaaggataagtcgaaggggaaggcgcctgaagaggacgaaggtggttttttggcaaaatccccagagccaaggcagaagaaatgcttagcaaacagcgg

SEQ ID NO: 152610 - DNA, 82 bp, Homo sapiens
ctgccttcgaccccccggacatccctaagactttgaccccgacgcaggcttcagtgattgccgcggatcagaagcctgagca

SEQ ID NO: 152611 - DNA, 74 bp, Homo sapiens
ggatcccagttttctctggatgacgtggcctccggtgtggctgtctctgatggtgtcatcaaggtgttcaacga

SEQ ID NO: 152612 - DNA, 108 bp, Homo sapiens
gccgcccctgttgcgatggcgcagaaaccccgttgacaaggcactgctttttcatgacgagtctcactgtcgcccaggctgcagtgcagtggtgccatcacgcgtcac

SEQ ID NO: 152613 - DNA, 75 bp, Homo sapiens
aaaagaatacattcctgattacctgccacccattgtgtcttctcaagaagagttcctgagttggaggtagaagaa

SEQ ID NO: 152614 - DNA, 100 bp, Homo sapiens
aaatgcttccaattcacctgaaggaaacaaaaccaaaggccgaagtacaagatctaaggctcttgtctggttgttattgatgccttcagattgatcaatg

SEQ ID NO: 152615 - DNA, 90 bp, Homo sapiens
caaagctgaggtccagatgaaagagaagtttctggtcactccccaggattatgcgcgattttcagctgaactctcatctctcaacactgg

SEQ ID NO: 152616 - DNA, 50 bp, Homo sapiens
tggactgaccactattggagcctcagcgatggattttgggtggggaagtc

SEQ ID NO: 152617 - DNA, 71 bp, Homo sapiens
cagagttgcagttaacaattttggagtgaagcactatgctggagagaatggcattgtgcccatcgtggagc

SEQ ID NO: 152618 - DNA, 90 bp, Homo sapiens
gggccagttcctgccgtctgctcttctgcctcttgatctccgccaccgtcttcaggccagatgaggacggggacttggttgccttttcca

SEQ ID NO: 152619 - DNA, 75 bp, Homo sapiens
caggacggaagcacaggggccactcagagtcgcccgagaagaagctcttcgtgggcggtcttgactggagcacga

SEQ ID NO: 152620 - DNA, 75 bp, Homo sapiens
gcgcgcacctcagccgcctcctagcggcgcggcgctcgctcctacgctctggaagagaaatggccccagttcatc

SEQ ID NO: 152621 - DNA, 74 bp, Homo sapiens
caagaagaagaagttgcgaaggatccccaacggggaggccaacgtgaagaacttcgagagcatgcagaggctct

SEQ ID NO: 152622 - DNA, 100 bp, Homo sapiens
ccagccggcgccgagggcttggaatctcgagcgggaaaagggtccacatatagcctcagttacattagctgcttatgaatgcaattcagttaattttccc

SEQ ID NO: 152623 - DNA, 83 bp, Homo sapiens
gcggcgaggtggcccggaccgcagtgccccaagagaggagcatcagatccatgctgctgctgactcggagccccacagcttgg

SEQ ID NO: 152624 - DNA, 74 bp, Homo sapiens
gggcgtctttcagagcattacgtgaaacaaagagtcctcttcgtggaaaagaaaaaaatacgctccctttaaac

SEQ ID NO: 152625 - DNA, 79 bp, Homo sapiens
acgtggagcccggcaatgccgccatccgggagaagctggcctgggccaagagccactccatccccaaattcaagattag

SEQ ID NO: 152626 - DNA, 82 bp, Homo sapiens
ggttcaggaacttttgggaaaaggagcaagtgtgcttgcagtagatgaaaatgggtatttgaagtataccatacaactgttt

SEQ ID NO: 152627 - DNA, 75 bp, Homo sapiens
gagcgggacgagtacaagcggaggtactccgtggaaggcttcatcgacaagaacagagatttcctcttccaggac

SEQ ID NO: 152628 - DNA, 100 bp, Homo sapiens
ccaacagaagaacctcagaacatacccaagaggacaaatcccccaggactccctggaggaaaagcggaagcggcagcggtctgaacgcctggaacggatt

SEQ ID NO: 152629 - DNA, 50 bp, Homo sapiens
taacaatgcatttcagctcgtcaggtcttctcagtacagcatggtggctg

SEQ ID NO: 152630 - DNA, 99 bp, Homo sapiens
gcacgggacactggctggtggaagatcatgttcgaatatgggaagttttaaagacagaggaggataatattggacaccgcttactccagaaacatgggt

SEQ ID NO: 152631 - DNA, 78 bp, Homo sapiens
aaggattcaaacttgggaagcacaagcatgagacctttataacgtcaagagatcctgagtcatgtgttccagtggctt

SEQ ID NO: 152632 - DNA, 75 bp, Homo sapiens
gcgcacttcgtcatgttcttcgcgccctgcgccgtgccgtccctgcagtgacaccgaggtgctcctagccgtctg

SEQ ID NO: 152633 - DNA, 59 bp, Homo sapiens
atttttgaaagaacatgaccaccttcgaaatgacaacactgcagctgaaggaggagttg

SEQ ID NO: 152634 - DNA, 96 bp, Homo sapiens
acacctggatccaggataacggaggctggcttttctgggagaagaggctacaaggacttagtgcatcagatgtaacagaacaaattataaaaacca

SEQ ID NO: 152635 - DNA, 75 bp, Homo sapiens
tgggaacgcgggcggcgagacggcggcaggacggcggcagagccccccaagatgaacccagtggtggagccactg

SEQ ID NO: 152636 - DNA, 75 bp, Homo sapiens
gcaaatacagccccactgtgcagacccggaggtgatgtgtccaatctagatcccaacttctcatttgaaggcacc

SEQ ID NO: 152637 - DNA, 88 bp, Homo sapiens
aaagttgaaaacaaagtgctggctatagaaagcgcaattggtggtaacgcttatcaacacagcaaagtgaaccagtggaccacaaatg

SEQ ID NO: 152638 - DNA, 100 bp, Homo sapiens
cttacgtgtactttaccaacgagctgaagcagtggttatagccaagaggtggtgtgctacacattaggaaatatccctcagatgccttctgcaccaaggc

SEQ ID NO: 152639 - DNA, 100 bp, Homo sapiens
atactgctgaggactggggcctcattttggatatctgtgataaagttggtcagtctcgcactgggacagtcattttgtttactcattcagccctgttgca

SEQ ID NO: 152640 - DNA, 100 bp, Homo sapiens
agccgggacgacgttatcggaaaggtctgccttacaagggacaccatagcctctcaccctaagggttcactggttgaggacccagttcccatctttggat

SEQ ID NO: 152641 - DNA, 101 bp, Homo sapiens
aacgaagttatggcagagttagctaaagaactccctcaagtttcatttgtgaaggtgaggacaccagtgatgaattctgaagcaaaagttctggtgcctgg

SEQ ID NO: 152642 - DNA, 74 bp, Homo sapiens
cctggcgttgatccccgataagcctgccactcagtgtatttcagacggcaagggtaagatgatcatgcaggata

SEQ ID NO: 152643 - DNA, 71 bp, Homo sapiens
ttgggctaccacgccattccgagtatgagattatgtgtgacaatccaagaagccaaccaattaagaaccga

SEQ ID NO: 152644 - DNA, 100 bp, Homo sapiens
gccatggcggcaggggagagcatggctcagcggatggtctgggtggacctggagtctggctcttgctgattgaattcctttggtgcagtttagcatgttc

SEQ ID NO: 152645 - DNA, 90 bp, Homo sapiens
agcatctgacaaacactgtattcgttgacagagctttgatagtcgtaccatatgcagaagagcccccctccatgcgcctgaaggcccgac

SEQ ID NO: 152646 - DNA, 74 bp, Homo sapiens
ccatcccaaagctattctgggggcaacagagctttctgaaaaggatatgagcatgctcgaggagaggattaagc

SEQ ID NO: 152647 - DNA, 100 bp, Homo sapiens
gcccgccaggccccccaggtattccaggatgcaatggcacaaagggggagagggggaagaaaggctctagagggcctaaaggggataagggagaccaagg

SEQ ID NO: 152648 - DNA, 90 bp, Homo sapiens
caactgcaagggggaagtagagagataacaaaagctgctcagagtctcaatgaacttggctgatagccctgaagagatgcacagttggat

SEQ ID NO: 152649 - DNA, 101 bp, Homo sapiens
cgcgctgacaggggggcctggccgcgcagccgcccgagcgggaagaagttccgcagcaagccgcagctggcgcgctacctgggcggctccatggacctgag

SEQ ID NO: 152650 - DNA, 100 bp, Homo sapiens
atgccataagaggaaaagtcaggggagtgttgaagactctgcctcctacaaatatgtggagaggagtcttcgtccgataccaataagtcagcctgatgct

SEQ ID NO: 152651 - DNA, 100 bp, Homo sapiens
ttattctggcctataattacaaaatggaacagatttcaaaaggacgtaatactccactgtgcgacagtcttcccatgcacaagatgattaatacagatct

SEQ ID NO: 152652 - DNA, 75 bp, Homo sapiens
gaggaaagtcccaggatgactactgtgtcaagttcctctcctggctgaaatttatggtatagaaggaaacatttt

SEQ ID NO: 152653 - DNA, 82 bp, Homo sapiens
caggcggccagccagctggaggagcactacaaacaccactggtttcccgaaaagccgtccaagggctccggctaccgctgca

SEQ ID NO: 152654 - DNA, 83 bp, Homo sapiens
cttggactgagtcctgcaggacacagagcactacaaacaccactggtttcccgaaaagccgtccaagggctccggctaccgct

SEQ ID NO: 152655 - DNA, 98 bp, Homo sapiens
ttcgtttgccattttcttatggagaactgtccttgtttcttactactttgaccgcgatgatgtggctttgaagaactttgccaaatactttcttcacc

SEQ ID NO: 152656 - DNA, 96 bp, Homo sapiens
ctttcttaaaggactgatttttagaactccacatttgaggtatgcccaagaggacagagaacgaatgcacagaaatattgtcagccttgcacagaa

SEQ ID NO: 152657 - DNA, 83 bp, Homo sapiens
ggggacgcggaggccgaggacgcggaggacgcggctctgccagtttgcagaaaaaacttcagcatgtgccaggaacacaacct

SEQ ID NO: 152658 - DNA, 83 bp, Homo sapiens
ggcggatgaagcagctggtggggctctactgcgacaagctatcagaggactcctgaaacctggagagctacctgctgtataaa

SEQ ID NO: 152659 - DNA, 50 bp, Homo sapiens
ggctagtccatctaggctttcagtggccctttctaaggcacaaaatgatg

SEQ ID NO: 152660 - DNA, 100 bp, Homo sapiens
cccacgtttcataaatttctaaggaagtgtttggattgtgagctatttcagaactgttctcaggactcattattttaacatttgggagaaacacagccag

SEQ ID NO: 152661 - DNA, 50 bp, Homo sapiens
ttttccacctaccatgctctcgggaaagcaggcaggatgggagagtcgcc

SEQ ID NO: 152662 - DNA, 98 bp, Homo sapiens
ccagttgcttctctgtgcatgcacatcagtcactgatctcacctactgaacctcttcgacagcatcaagagtgagccattctccatccctgaggacga

SEQ ID NO: 152663 - DNA, 82 bp, Homo sapiens
cgcgtccgccgattcctcctccttggtcgccgcgtccttggctggcgtgtgaaagaaaatggcccgaaccaagcagactgct

SEQ ID NO: 152664 - DNA, 100 bp, Homo sapiens
actgctcttcctcctgttgtctcgaacccaatttatgacaacctgaacagcagagaatttcaaaggaccttgctaatatctgtaagacggcagctacagc

SEQ ID NO: 152665 - DNA, 100 bp, Homo sapiens
gtttgtggcaagacaagctcagaactgagaagctgtcaccacagtctcacagaaagttctccgctcccagacatgggtccctcggcttcctgcctcggaa

SEQ ID NO: 152666 - DNA, 100 bp, Homo sapiens
ggatgtcgagaacggtgcttctatggcaggatatggttaatgttcgtgaagaaattgaagagttttttccaagaatgtggaagataaatcaagataaaag

SEQ ID NO: 152667 - DNA, 75 bp, Homo sapiens
gcgagcgcgaatggcacgagctggagggagaatttcaagaactgcagcttgcgcgatctctggcctcttcaactg

SEQ ID NO: 152668 - DNA, 100 bp, Homo sapiens
gcccgtgcctgtcttcagatcttcacagcacagttcctgggaaggtggagccaccagcctctccttggtctgtttatgatggtgaagaacatggacgttt

SEQ ID NO: 152669 - DNA, 96 bp, Homo sapiens
cagaagggaggctccaagacctcatcaacaattaaggctatggagttactagtagagaaagcaatcagcagtgcttctagccctcagagccctggg

SEQ ID NO: 152670 - DNA, 89 bp, Homo sapiens
gatggagtacctggaggacctggagaaactgggaagaattatcctgtggagcacccagacaaattcctgaagtttggcatgacaccttc

SEQ ID NO: 152671 - DNA, 75 bp, Homo sapiens
ccgcaggccggcggccgagctcgcgattggtgctgaagacatggacggcttccaggcagacacggaggaggagga

SEQ ID NO: 152672 - DNA, 118 bp, Homo sapiens
aagcagttcagaagagccaaggaataaacatgcaatgaacccaaaaggggagtggagcaactgctgtagtccaagcagcttattgtgcccctaaaaaggagaaagtggcaatcaaacg

SEQ ID NO: 152673 - DNA, 74 bp, Homo sapiens
tgatgtggtagttattccggctggagtccccagaaagccagggccccacaccagtttgtacaccaacatttttg

SEQ ID NO: 152674 - DNA, 82 bp, Homo sapiens
ccgggtggagcgagctggcgcctgtaacacggagaccagtatgatgtctgtgccatttgcctggatgaatatgaggatgggg

SEQ ID NO: 152675 - DNA, 100 bp, Homo sapiens
taagaagcacctcatgcaagcgagggacctgggactgctcacagccaggagctgctgctcttcctccagaacctgcccacagcccactgggatgatgagg

SEQ ID NO: 152676 - DNA, 74 bp, Homo sapiens
aagccaaagagaaaggtacctgggttcaactaaagcgccagcttctatatattacggcctttttttttgctgga

SEQ ID NO: 152677 - DNA, 100 bp, Homo sapiens
ggcggcggcggcgccgggcccgggggtggtgacagcaggtctgaggaaacttccattttagaagaatacagtatcaattggactcagaagctgggagctg

SEQ ID NO: 152678 - DNA, 75 bp, Homo sapiens
cagaagactcgggaggaccagggaagcagtgaaaatgatgagagatggcaaaagagttggtagtggtgcacaaaa

SEQ ID NO: 152679 - DNA, 51 bp, Homo sapiens
ggaagcgggaggcagttgcagctttcagaggcgtcgggagaaggctggaag

SEQ ID NO: 152680 - DNA, 74 bp, Homo sapiens
gggatgtgccttagaggattatggctcctctggtgcaagtgtggtagctattgacaacaaaatcgagcaagcta

SEQ ID NO: 152681 - DNA, 49 bp, Homo sapiens
ctgggagcaaatatccagaacaggcaggtgacagcagggacatgtctcg

SEQ ID NO: 152682 - DNA, 90 bp, Homo sapiens
atggaggttaaaccatgaagaaacatggctctagcccttagggagctcccggtcctgcagggacctccgaaacaatcttattagtagtat

SEQ ID NO: 152683 - DNA, 100 bp, Homo sapiens
acctgctttctctcgatgaggataacatccctccagaagatggttttttgcatgtctgacacccatgactccacctggaccttatggctccacccagaag

SEQ ID NO: 152684 - DNA, 100 bp, Homo sapiens
gcaaccacatcaaatatgctgtcaccactggcatttaaatcaaacggtattgagatggattgggttatgaaacataatggtccaaatgacgctagtgatg

SEQ ID NO: 152685 - DNA, 98 bp, Homo sapiens
cgggatcccagcctcaggcgtgcgcggacggtgtgcggttgactatattgtggagtatgactatgatgctgtacatgatgatgaattaactattcgag

SEQ ID NO: 152686 - DNA, 100 bp, Homo sapiens
cacccgatgcccgggggtcgctacggacttaaaatctccgcaccgcaccctccacctcagctctagcctctcggaatttgtcttcttcagtggaaacccc

SEQ ID NO: 152687 - DNA, 100 bp, Homo sapiens
cttttttgacccaacctttgactatgagatgatcttcaggggaacaggagcattgatatacgtcattgacgcacaggcttatcaggagggcagacttcaa

SEQ ID NO: 152688 - DNA, 100 bp, Homo sapiens
cctgtagaaatgagaatgacagctgtgataaaaaaaaaattcatctgggcggtatctggaacttgtttcttaaacaattaggtctacatcctaactggca

SEQ ID NO: 152689 - DNA, 100 bp, Homo sapiens
aaaatggccgccgccgccgccgccgcgccgagcggaggaggaggaggaggcgaggaggagagactatcaggatcctcatgaccagccaaagagaagaaga

SEQ ID NO: 152690 - DNA, 90 bp, Homo sapiens
ccctcgtcgaaaggattggattggcatctttagatggatatcaaagtattgcagagtgccttagcagccatccgacatgcccgctggttc

SEQ ID NO: 152691 - DNA, 100 bp, Homo sapiens
gagacaagagccagacaatactggtgtgcttttattactttcatctatacacttccagtgtcgaaggctggacagctccgtggtagtgattgactctgat

SEQ ID NO: 152692 - DNA, 100 bp, Homo sapiens
cccaatcatgagcactgctttaataggcaagccagggctgagcaggaagaagaattcattagtaacactttattcaagaaaattcaggctttgcagaagg

SEQ ID NO: 152693 - DNA, 74 bp, Homo sapiens
ggagaaacatgcagattatatcgcatcctatggctcaaagaaagatgattatggatctggatctgaagaagcca

SEQ ID NO: 152694 - DNA, 75 bp, Homo sapiens
tgtttcagagaaagttacgtggagcgtgggcgtttcgcagactcctaaggaagcagtcaattatagatttcttca

SEQ ID NO: 152695 - DNA, 74 bp, Homo sapiens
gcagcaacagcaagctcccgggcaggtcaaaatgcagatcttcgtgaaaacccttaccggcaagaccatcaccc

SEQ ID NO: 152696 - DNA, 97 bp, Homo sapiens
tttgttaaggattccaagtaactcttatttgaagcatcagatggtgaaggagaaggagacacagaagtgatgcagcaggagacagttccagttcctg

SEQ ID NO: 152697 - DNA, 82 bp, Homo sapiens
ttactgttgcgttttgcagacaacactttctcagacacgatgaggcgagtggtacgacagagcaagtttcggcatgtatttg

SEQ ID NO: 152698 - DNA, 75 bp, Homo sapiens
cccagctggggcgcagcacctacatggagacgtatgtgtacttctatcggtgctggcatcggccccaccattcag

SEQ ID NO: 152699 - DNA, 50 bp, Homo sapiens
acaacatacagtgacgcttcacaggtcacccacaaaagctgtatataatg

SEQ ID NO: 152700 - DNA, 98 bp, Homo sapiens
cgctgtggctgctgctgaaggccggcgcagaacatgacctttgacctgccatcagatgccacagtggtgctcaaccgcagctcctgtggaaaagagaa

SEQ ID NO: 152701 - DNA, 100 bp, Homo sapiens
ctcttgggtccgaaggggacggacgtcctcccacgtaccatttagaagcagtcctgcgttaactgcggccgggaggctatgagcgagtgcaccggctgcc

SEQ ID NO: 152702 - DNA, 101 bp, Homo sapiens
ccatggctaacgtggctgacacgaagctgtacgacatcctgggcgtcccgcccggcgccagcgagaacgagctgaagaagctgtgttccagatcatctccc

SEQ ID NO: 152703 - DNA, 74 bp, Homo sapiens
ccctaataaggagccatggagaaaaatggatcttaggagattaaaagctgctttgacccagcaacatcctccag

SEQ ID NO: 152704 - DNA, 96 bp, Homo sapiens
aggtgcgagttacaccaaccaggacagaaatcattatcttagccaccagaacaccttccaccatgaccacctcagcaagttcccacttaaataaag

SEQ ID NO: 152705 - DNA, 82 bp, Homo sapiens
aaaccgggcacccgaacctaccccacagcagggggatatgagactttctactcggaatatcctgagtgttgcgtggatgtaa

SEQ ID NO: 152706 - DNA, 100 bp, Homo sapiens
cttcatcaccttcgtggtcgtctggtcctactacgcgtacgtggtggagctctgcgtgtttaccggtattgtaagaacaagccgtacccaaagtctcgct

SEQ ID NO: 152707 - DNA, 88 bp, Homo sapiens
gacattaaagtgaagtggttgcggtaacctggcctgggcctgaagtgagtgagaggcacatgaaggagcatttcctccctctgctatt

SEQ ID NO: 152708 - DNA, 98 bp, Homo sapiens
tccaggacatctatgagaacaggagccagatgaccaagatgctccagatgaacatgagtcgcctccacctgaagatgccccattgtacccccattcac

SEQ ID NO: 152709 - DNA, 59 bp, Homo sapiens
cgtcggcagctgctgctccgagatctcgaatacctgatgcatgcaaaacagcagctagt

SEQ ID NO: 152710 - DNA, 51 bp, Homo sapiens
cttggagtccggacatctgaaacttggtactttgcagcaactcagtttgaa

SEQ ID NO: 152711 - DNA, 82 bp, Homo sapiens
ttcgacttggagtctttgtccaggacgttccctgagtgtggcttctacggcctttacgacaagatcctgcttttcaaacatg

SEQ ID NO: 152712 - DNA, 95 bp, Homo sapiens
cgaagtacaaagccacattttcagcatttacacccaggtgaatggaagagaatccgaagaagaaaatctcaataaatctgaaataagtcaagtgt

SEQ ID NO: 152713 - DNA, 83 bp, Homo sapiens
ctgcggccagatagccagttacccgctggccctggtccggacccgcatgcaggcacaaggtcgtcgtcccgcagacacacaat

SEQ ID NO: 152714 - DNA, 75 bp, Homo sapiens
cgactcagacgtggataaagataatcccgaagtccattggaatattaagcccaggagttgctttggggatggctg

SEQ ID NO: 152715 - DNA, 82 bp, Homo sapiens
attccaagtaactcttatttggtgtttaaaattatccaactgccatagagctaaattcttttttggaaaattgaaccgaact

SEQ ID NO: 152716 - DNA, 96 bp, Homo sapiens
ctgtaatgttcaggccatggaagaaatgatgatggaaatgaagtataataccaagaaagccccacttgagtacaggggctcaggtccaggtggcag

SEQ ID NO: 152717 - DNA, 75 bp, Homo sapiens
cctgggtgctggccctgtgctggagcaatggctgccatccggaagaaactggtgattgttggtgatggagcctgt

SEQ ID NO: 152718 - DNA, 125 bp, Homo sapiens
aagcagttcagaagagccaaggaataaacatgcaatgaacccaaaaggggaactgctcgcagaaagaagaaggtggttcatagaacagccacagcagatgacaaaaaacttcagttctccttaaa

SEQ ID NO: 152719 - DNA, 80 bp, Homo sapiens
tcaacttccggctggattccaagtccgtcgtggaggcctccggtgtggctgtctctgatggtgtcatcaaggtgttcaac

SEQ ID NO: 152720 - DNA, 74 bp, Homo sapiens
tgacaaaagggtttacttggggatgatgatgctgaagctatccttgctgcagacttcgaaattggtcacttttt

SEQ ID NO: 152721 - DNA, 90 bp, Homo sapiens
cggtgaagtcttttgaagagcttcggcttagaccaaattttggtacaattgaatcacactgcagcagaattcaccctgtgctaggacatc

SEQ ID NO: 152722 - DNA, 98 bp, Homo sapiens
gtactatattggaaaaacctcaaaatatgatggtggttggacagtcagcatttgcagactttggccttataatgggactaattttacgatatgctaca

SEQ ID NO: 152723 - DNA, 100 bp, Homo sapiens
tgccattgatgaatattatcggatgaagaaggaggaggacaaagacactgattctaccaaagagcctctggatgaccttttccccaatgatgaagacgac

SEQ ID NO: 152724 - DNA, 80 bp, Homo sapiens
gaaaagatcctcttcattagggtctgctaaaaggtcagagtaatgcagaatgcgtgccttcatctcagatttgttcatca

SEQ ID NO: 152725 - DNA, 50 bp, Homo sapiens
gccgggatcacattctgattggatagctgggagtatggccaccctgctcc

SEQ ID NO: 152726 - DNA, 75 bp, Homo sapiens
agaagctggaccaccccaatgtggtgaagctggtggagtttcttgcagaacataaattattaggaaacattaaaa

SEQ ID NO: 152727 - DNA, 75 bp, Homo sapiens
cgcagctcgcgggtctttggacaccaccggtcctgagtccgcgactggattatggacagaacttggaaatattga

SEQ ID NO: 152728 - DNA, 97 bp, Homo sapiens
tctactgaaagctgccgctgaagctgccgccgttgcctccgccgccaagagtgagcgagcggacccgcgatggcttcgagagctgtgcccaggagtg

SEQ ID NO: 152729 - DNA, 88 bp, Homo sapiens
agattcgcagtggtcgcttcttctccttgggagtgcatccgccccaacccttttccccctcgtctcctgtgagaattccccgtcggat

SEQ ID NO: 152730 - DNA, 86 bp, Homo sapiens
gccccgcactctctcgatgagtcggagaagtcccacaatgcagatcttcgtgaagactctgactggtaagaccatcaccctcgagg

SEQ ID NO: 152731 - DNA, 75 bp, Homo sapiens
tggagcaggtgctcaccactggatgctgaaaacgccattcaacagatgggtggccagtggcttggtggaagacaa

SEQ ID NO: 152732 - DNA, 90 bp, Homo sapiens
ttcaagagcagcattcataaatttccaggtggcacagatcagattctgccccaagaaataaaatttcaaggttccaggcaccgatttctg

SEQ ID NO: 152733 - DNA, 101 bp, Homo sapiens
tgcagggagtatcaaatatgagaaagctaggccatctgaataactttactaaggaagatgaagtcctcagtacattctgaagaagatgattttgttccaga

SEQ ID NO: 152734 - DNA, 75 bp, Homo sapiens
tccagctgcgagtgcggcctcggctggcggcggcaccagattgagaggatccagaatccagatctctggaatagc

SEQ ID NO: 152735 - DNA, 74 bp, Homo sapiens
gagctacaaaacagtggaaagactgattcggaactttggaaaaactgtgaggtcgtctcagatgatgccctgat

SEQ ID NO: 152736 - DNA, 74 bp, Homo sapiens
gcaagattactgatttcatcaagttcgacactgtgcagtcattggagaaatcgatgaagaaacagattctgcgc

SEQ ID NO: 152737 - DNA, 148 bp, Homo sapiens
atgatgatgagttggaactccgcgatggagatatcgttgatgtcatggaaaaatgtgacgatggatggtttgttggtcactcctggaagcaaggcggctctagctaatttatgtattggagatgtaatcacagccattgatggggaaa

SEQ ID NO: 152738 - DNA, 100 bp, Homo sapiens
cgaaggatgcagagagagcgatcaacacgctgaacggcttgaggctccagtcaaaaaccattaagtgtactaatggtcacttgatgtgcgctggctgttt

SEQ ID NO: 152739 - DNA, 83 bp, Homo sapiens
gagcgcgtccaggagcggacccgtcttgctctgttgcccaggctggagtgcagtggtgccatcatgccaacctcgacctcctg

SEQ ID NO: 152740 - DNA, 83 bp, Homo sapiens
cccagccccatggacctccgagcagtgtctcaatgagatcttggagtcagcagatgcacccttagaagtcactgaaggattca

SEQ ID NO: 152741 - DNA, 75 bp, Homo sapiens
ccttgatcaccaggataatattctctcattgattaatgtcaatgatgagttttgatcatcctgagaaaaatgggc

SEQ ID NO: 152742 - DNA, 100 bp, Homo sapiens
agaaggtggacagggtaaaagaaagagacttttttctaaagaatgaaatgcttccagactgcacacttttacttagaggacagtacatcccctagagtta

SEQ ID NO: 152743 - DNA, 90 bp, Homo sapiens
tgaatgcaagaggcgtttctataagaattggtcagcccaaggccaaccccactgtcactctgttcccgccctcctctgaggagctccaag

SEQ ID NO: 152744 - DNA, 100 bp, Homo sapiens
aacaccaagaaatgctgaaaaccagccccaccaaccttcacctgaacagcagagctgaaatggaaattggcaggtaccactggatgtacccaggctcaaa

SEQ ID NO: 152745 - DNA, 100 bp, Homo sapiens
ccggcgtgccccaccatgtcagacgcagccgtagacaccagctccgaaatcaccaccaagtaagaagacatgttggataacaagaagaggtgtagagttt

SEQ ID NO: 152746 - DNA, 75 bp, Homo sapiens
ttctgttttgctgcccgaagcttggctgtggatctttccattgatgagtccagcttgacaggtgagacaacgcct

SEQ ID NO: 152747 - DNA, 50 bp, Homo sapiens
gcaccgccgaggactccagcacaccgaggccatcgactacagtgacagcg

SEQ ID NO: 152748 - DNA, 76 bp, Homo sapiens
gacgagtttgaagagttccctgccgaagatgatatcatcaagttgaatcgaaaggaagggaagaagcagaattttc

SEQ ID NO: 152749 - DNA, 100 bp, Homo sapiens
aaacacttagagcagtttctggcacatggatgaaagtcaaacttctgcatcctcttgtgatgagactgagatacagatcagcaaccaggaagaagctgag

SEQ ID NO: 152750 - DNA, 101 bp, Homo sapiens
cgccagcggagcgaacccgagagcgtggagcgggctgggccaggaaaccactgattgcttgtgtggagaaacagctattaggagaacatttaacagcaatt

SEQ ID NO: 152751 - DNA, 101 bp, Homo sapiens
acttccccggggtgtaataatgttaactgaggacaaggtggagcagacacctcgcagtcaacaagacccggcaggaccaggactccccgcacagtctgacc

SEQ ID NO: 152752 - DNA, 90 bp, Homo sapiens
cttggagtcgaggaccacacttctcagctatgacctatggccttcgagaggcaggaagaggcctgggagcaggcgtaacccaacacctat

SEQ ID NO: 152753 - DNA, 100 bp, Homo sapiens
gctcccggggcgggccgggcgggccgcgggagccgcacgcggcgatatggaagaggagggcaagaagggcaagaaggactccattttctggcaatacggt

SEQ ID NO: 152754 - DNA, 50 bp, Homo sapiens
ggcagcatcacccccggacagcaagaaaggagatgaagttgctggagcag

SEQ ID NO: 152755 - DNA, 104 bp, Homo sapiens
cctggccgatgaggaagtactgagcctgttggaggaactggcccggaaacaggaggacggaacccagtttggccagtgggatactgctggttttgagaacgagg

SEQ ID NO: 152756 - DNA, 82 bp, Homo sapiens
atcctccaggcatgccccgctacgagctggctttaatcctgaaagccatgcagcgggaattcctggtgactggaagggggag

SEQ ID NO: 152757 - DNA, 100 bp, Homo sapiens
ccagagtgtatgcactttactacaaagatggacttctctgtacagtgctcggccttgttctccccatgtgggccatagccctcatttcctttggtgtcgc

SEQ ID NO: 152758 - DNA, 111 bp, Homo sapiens
gagaatgtttcagagaaagttacgtggagcgtgggcgtttcgcagactcctaagtccacaagaatcggaatgtcagttaatgctattcgcaagcagagtacagatgaggaa

SEQ ID NO: 152759 - DNA, 88 bp, Homo sapiens
ggccgctaccgctcaggtgctgcaggcacagcccgagaaaccgcagcactacacgcccgataaaagtgaaggatgtaatagatcgtgg

SEQ ID NO: 152760 - DNA, 82 bp, Homo sapiens
ggaatctgcttttcaagtatgccaccaacagtgaagagaaacccaccttgtcccatccacatcaggacatcccagctggagt

SEQ ID NO: 152761 - DNA, 50 bp, Homo sapiens
gggaaaaacagtatgcgccgactgttctaaagaaatccaaatggcagttc

SEQ ID NO: 152762 - DNA, 90 bp, Homo sapiens
ctcaaagatgcccaggagaagctggagctggcagagaaaaaggccaccgatattatgtttgagaccttcaacaccccggccatgtacgtg

SEQ ID NO: 152763 - DNA, 98 bp, Homo sapiens
gtatatccatattaaaacgagatgacagaagccaaagtaattatggtgaaatgacaatggatgctctgttggctcgattgaaacttctgaatccagat

SEQ ID NO: 152764 - DNA, 99 bp, Homo sapiens
agagaaagcagaagatagggcagctcgagaacgtataaaacagcagattgcattgattccaaagtcatgtgttgaaatagcggaattacttcaacagtc

SEQ ID NO: 152765 - DNA, 74 bp, Homo sapiens
tgctgtccacgcacctggacgacgcccggcgccagcacatcgcaggacacattcagctaacgtattttagcagg

SEQ ID NO: 152766 - DNA, 87 bp, Homo sapiens
gccaagcatgtagaaagccggaaccgcggcgagtcctttgcacatgttggcaacacacgcatccgcatcggcctccctgcccacaaa

SEQ ID NO: 152767 - DNA, 100 bp, Homo sapiens
gagtggttcaccctggtcaacaagaagaacgctctcatccggaggcaggaccagctgcagctgcttgcacttcagaaggagatcacaacgcgttatcaac

SEQ ID NO: 152768 - DNA, 83 bp, Homo sapiens
cccacctggcggccatcgtcatcctgctgctgaagatctggaagacgcgctcctgcgccggaaacctgtaggaagtgtcaggg

SEQ ID NO: 152769 - DNA, 75 bp, Homo sapiens
cttcagactggtggactgttcatcattctgttgaagaaacgcttaacccattatcaggaactgttgccgttatta

SEQ ID NO: 152770 - DNA, 100 bp, Homo sapiens
ttgagagaacgaggaggaaggagagaaaatggcgtccacggcatcccagccatcactcttccacctgctccttagagaagggaagatgagtgagtcgagc

SEQ ID NO: 152771 - DNA, 97 bp, Homo sapiens
gcaacggcaacttccaccccaagcaggatgaagtgaagctgccggccaaactgagcatcagcaaatcgctgaaagagtcggaggcgctgccagagaa

SEQ ID NO: 152772 - DNA, 100 bp, Homo sapiens
cccaggtgtaagcgcagaaagcaggcgaacccgcggcgcaataacggagaactacgatgacccgcacaaaacccctgcctccccagttgtccacatcagg

SEQ ID NO: 152773 - DNA, 100 bp, Homo sapiens
ggagctggacgccgcgatcgtggggcccgcgaggcgggcagccggggcgtccagggcagcgaggtcacaggccccacctttgctgatggcgagctcatcc

SEQ ID NO: 152774 - DNA, 100 bp, Homo sapiens
cccagacagagacacacggtcactgcagctgaagccgctgcccctgctacaggggcataaggaaatggtggcaggcacttcctcctaacaagaaggaagt

SEQ ID NO: 152775 - DNA, 51 bp, Homo sapiens
gactacagctggttcttgaagctgctgatttcattgacaggtactccacgc

SEQ ID NO: 152776 - DNA, 75 bp, Homo sapiens
tgagcctgttggaggaactggcccggaaacaggaggacgagaagtttgcaggctgtttcctgaggtctgggccag

SEQ ID NO: 152777 - DNA, 100 bp, Homo sapiens
ctgaagtactatgtctctccttctgacctactggatgacaagactgcatctcccatcattttgcatgagaataatggtatgcccccacctgttccacgtc

SEQ ID NO: 152778 - DNA, 101 bp, Homo sapiens
cccgtctgtcaggaggtgctcaaaacgcccgtgcggaccacggcctgtcagcacgtaaatacccactgggagctggcaactttatcatgtaacattgaaag

SEQ ID NO: 152779 - DNA, 90 bp, Homo sapiens
ccccagtggagccggagtgcgggcgcgccccaccaccgccctcaccatgagttgcatgctgagaatttgaaaaatgaagatgatgtagac

SEQ ID NO: 152780 - DNA, 100 bp, Homo sapiens
cctggcggtgctcgagtgcctgcaggatgtgagggaggattttgacacttcatgacatgtcattatttagagcaataatgaatattgacctgttttggat

SEQ ID NO: 152781 - DNA, 82 bp, Homo sapiens
cctcggcggctgaggaaagcaggaggaggtggcggcggcgggaagatatgagcagcaccagcagtaagagggctccgaccac

SEQ ID NO: 152782 - DNA, 80 bp, Homo sapiens
atgaagccttggaaggcccgctggttcgtgctggacaagaccaagcaccagaccaagatcactccatggatgaaatgaca

SEQ ID NO: 152783 - DNA, 50 bp, Homo sapiens
tgactgtgcaaagaagattgttaaagcctctacggcagacacatgcaggc

SEQ ID NO: 152784 - DNA, 98 bp, Homo sapiens
ggagagatagaaaccgagggagggagagagacagcgatcgagagagaccggagaggtggagaggtgtccctggccagtgtccttccacctgtccacaa

SEQ ID NO: 152785 - DNA, 98 bp, Homo sapiens
ccacagcttgtgccaccgccgtgctgggcaatcaggtttaccgacaagactgtgaaactttcgggatggtggtgaaaatgctgattgaaaaagatcct

SEQ ID NO: 152786 - DNA, 82 bp, Homo sapiens
gctgcggcgcctgggactgcaccgcaccgagggcgagctccaggtataccaagcttggctacgcaggcaacactgagcccca

SEQ ID NO: 152787 - DNA, 99 bp, Homo sapiens
ctgcaacattcggccgtggttacgatgccaatggtcatgcatctggcctgtgtaaacatgagaatgtccatgcctgaggccttggccgctgccaccatc

SEQ ID NO: 152788 - DNA, 75 bp, Homo sapiens
ggatgggggaccacaagatcctcatcgacagaagaaaaagtcagcactttttgaagtgtctgaggttataccagt

SEQ ID NO: 152789 - DNA, 152 bp, Homo sapiens
ggagtggcaggtattatgacagtcgacctggagggtatggatatggatatggacgttccagagactataatggcagaaggctcccctgatgctcttcagaatccctgctacatcggcactcatgggtgtgacaccaacgcggcctgtcgccc

SEQ ID NO: 152790 - DNA, 136 bp, Homo sapiens
catcatattactcctcttctgtctgctgtctatgagggtcatgtttcctgtgtgaaattgcttctgtcaaagtttcttgcagaacataaattattaggaaacattaaaaatgtggccaagacagctaacaaggacc

SEQ ID NO: 152791 - DNA, 100 bp, Homo sapiens
cgcgagggccctgggcaaggcccgacagggtgttcctgaaaagaaggtacttccaatcaccgtccccaagtcaccagcctttgcattgaagaacagaatt

SEQ ID NO: 152792 - DNA, 82 bp, Homo sapiens
ccggcgccgaggcggccacccgagacgcggcgcgcacgctccggcctgcgtattaaaggtggaagaaggtccatatcttttt

SEQ ID NO: 152793 - DNA, 100 bp, Homo sapiens
cagaacagcacgtaccagaggtggaagtccaagtcaaacgcagaaggactgcctcactgagcaaccaagaggaatcatcgcagaagagaacaagaacctg

SEQ ID NO: 152794 - DNA, 83 bp, Homo sapiens
cgacaagccgctggcagccgcggatctcaccgccgctcaggaaattggcgtgttagccaaggctttcattgaccaagggaaac

SEQ ID NO: 152795 - DNA, 96 bp, Homo sapiens
caacgttagaagcagcctggcctcatctacagatgggcctttgggtccccgaggattagctgaagctacagagatgtgcactcaagagtgcttggt

SEQ ID NO: 152796 - DNA, 74 bp, Homo sapiens
gggacatgcatcgtcccctggactctctcaataatctatgccagcaattatgacaatgttagcagaccatgcag

SEQ ID NO: 152797 - DNA, 100 bp, Homo sapiens
tttccttaatagtgatctacgacgctccccaagtaagcctacacttgcctatccagaaagcaacagcagagattattcctgattctaagataaatgtgcc

SEQ ID NO: 152798 - DNA, 109 bp, Homo sapiens
gagctggagaaggccatcaccacgcagaacgtcaacaccaagtgcatcaccatccccagtgtgcacctgtgtcgtccataaacgctgccatcatctaattgttacagcc

SEQ ID NO: 152799 - DNA, 99 bp, Homo sapiens
tcggtcctatacaaggagtatgctgaagatgacaacatctatcaacagaagatcaaggtactcatttgcaattgtgggcatcaatataactgacctggc

SEQ ID NO: 152800 - DNA, 100 bp, Homo sapiens
gaatacctcggaagccgggaaatgcaggaggatgcattagcacaacaggcctttgaagaggctcggagaaggacacgcgaatttgaagatagagacaggt

SEQ ID NO: 152801 - DNA, 100 bp, Homo sapiens
acggaggtgggagactgaaccatctccacatctagttgccccaggttgtgttgctttctgccacaatgccaactgatgtgttggaagtgaccaaaaaatt

SEQ ID NO: 152802 - DNA, 90 bp, Homo sapiens
ctcagtgcgaagaagctgcagccgcacctggccaagggtcagaatggcggcagtggagcatcgtcattcttcaggattgccctactggcc

SEQ ID NO: 152803 - DNA, 50 bp, Homo sapiens
gaggcagctgcgtatttaaaaggtcgtgtagggataaaaagaactgtaag

SEQ ID NO: 152804 - DNA, 82 bp, Homo sapiens
caggacacggtctgggccgccgaatctccggccgaagagcggcggcggcagcggcggttatggaaacaaaggacatgcttta

SEQ ID NO: 152805 - DNA, 104 bp, Homo sapiens
tgaatactttttctcccgaaggaagattatttcaagtggaatatgccattgaggctatcaaggagaccatctagctggctgcccccgacagtgagtgtgttggc

SEQ ID NO: 152806 - DNA, 51 bp, Homo sapiens
ttcagatccaaccaggtctgcttgcccagacggagtctcgctgtgtcgccc

SEQ ID NO: 152807 - DNA, 90 bp, Homo sapiens
cgccatgaatgaggagtacgacgtgatcgtgctgggcaccggcctgacgataattccctcagtattttggcaaagcataatggattcaac

SEQ ID NO: 152808 - DNA, 100 bp, Homo sapiens
cgggacccggcgaagacgcgaccgcggcgcgagtcaccatgattactgtcctagatgagacatggactgtattcaggcgttacagtcgttttcgagaaat

SEQ ID NO: 152809 - DNA, 74 bp, Homo sapiens
agccacacgccggcgggcagaagccgcccgctctccggctgctgatgcaaggaatcccctgggctcccgtccac

SEQ ID NO: 152810 - DNA, 75 bp, Homo sapiens
ggaacagattgttcctaaaccagaagaggaggttgcccagaagaaaaagtcccatgaagctgaggtcttgaagca

SEQ ID NO: 152811 - DNA, 100 bp, Homo sapiens
agctgctgacgcactgtgactccagccagagcccccccacggtacctaaaacagatccaggacctgcccccaactggcctccctgagatgaacctgctgg

SEQ ID NO: 152812 - DNA, 100 bp, Homo sapiens
gtgatgttggagaactacagccacctgatctcactgggtctcctctgagcctccggcctccataagacccaaaacagatgacacctcttcccagtccccc

SEQ ID NO: 152813 - DNA, 109 bp, Homo sapiens
cttctggcaaacagtgtttgcctctggttcagctcatacaacagcttcttaggtggggaacgccaagcacaacgtgcatgtcatgaacatctccacaggcaagaaagtg

SEQ ID NO: 152814 - DNA, 90 bp, Homo sapiens
ctggatagctccttttccataagtgatgggagttttgtggttcatgatataccttctggatcttatgtagtggaagttgtatctccagct

SEQ ID NO: 152815 - DNA, 98 bp, Homo sapiens
aagatgcctctgattggtctgggtacctggaagagtgagcctggtcaggtgaaagtcaatataataggagaagtggttgaccagggaagtaccaattt

SEQ ID NO: 152816 - DNA, 90 bp, Homo sapiens
ggtacaccacgctgagcctgctgcgccgtgccaggatgcacatccaggcagcgctgttcataagatgattgtggacaggcagtatatggg

SEQ ID NO: 152817 - DNA, 89 bp, Homo sapiens
cgtttgtgtacggggggctggcctccatcactgctgagtgcgtggcattcctctttaactggattgggtttttcctgtctttttgcctg

SEQ ID NO: 152818 - DNA, 90 bp, Homo sapiens
agaaaataggcacaggatcagtaaatattcacagactgaatcacaacagtttgggaatacctgctactgcaattcagttcttcaagcact

SEQ ID NO: 152819 - DNA, 87 bp, Homo sapiens
aaatggccgctgtgtggttgcaacggagataaattcccggaaccgcgattcggcgtgtcagacacgatgaggcgagtggtacgacag

SEQ ID NO: 152820 - DNA, 100 bp, Homo sapiens
tgtggctgatcttattgaatccatgttgaaaaatctatccaggattcatcccgtgtcaacaatggtaaaggggatggcattcctactgtatttgtggcag

SEQ ID NO: 152821 - DNA, 97 bp, Homo sapiens
aggattcgttggctgccgtccccgctgctgtgcattggattgctgagctgaaaagaggtgctgaaattattgtttgcacacctggtcgaatgattga

SEQ ID NO: 152822 - DNA, 73 bp, Homo sapiens
agtgataacagaattcattgaagtggagaatttttaaagaaggttggtcaaagaaaaagtgatgtatgaaaaa

SEQ ID NO: 152823 - DNA, 100 bp, Homo sapiens
ggacaatggtcaccgtctcttcagggatcttgcctcggagctggtcccactacacggtgcctgccggcatgaccgtcatccagtgggtgtccgacttcag

SEQ ID NO: 152824 - DNA, 102 bp, Homo sapiens
ggcgctcgagggaccatggccgatcctcgcgtgagacagatcaagatcaagaccggcgtggtgaagcgtaccaaggatgattgcttcaatgttaatattcag

SEQ ID NO: 152825 - DNA, 74 bp, Homo sapiens
ctgagttgaattatcagcttaaaattaaagtgtgcattgacaaattgtaaaccatggctgtgtggatacaagct

SEQ ID NO: 152826 - DNA, 101 bp, Homo sapiens
ggggaggaagccctttctcctcggcactgtattctttacctgcttcccaatcccactgatgaggatcagcccatgcaggcattttggagatcaaagatggg

SEQ ID NO: 152827 - DNA, 98 bp, Homo sapiens
caccttctccatcaggtgcagaagaccagcatctcagacatgtcgaaaaagatgttttgatccctaaaataatgagagaaaaggccaaagagaggtgt

SEQ ID NO: 152828 - DNA, 100 bp, Homo sapiens
agcagcttatgctggaggcttggttttggaccccaaagttgatcgtcacagctacctgtctctggggatccctagtataacacattcagtgttccccttt

SEQ ID NO: 152829 - DNA, 99 bp, Homo sapiens
cagcagcagcagcaacagcaacagcagcagcggaagatgtcggacagcgaggacagcaacttttccgaggaggaggacagcgagcgcagcagtgacggc

SEQ ID NO: 152830 - DNA, 100 bp, Homo sapiens
tggttgacttaaaagacatgtatgttatactcaacctggatgaggaaaataaagtgtctgcactgcttggggaggaagatgaagaggcactgcattattt

SEQ ID NO: 152831 - DNA, 98 bp, Homo sapiens
tggtgccgcgcagctttccccgagatttaccgcattgtttctcagaagcaaatgtcagacagacgcgaaaatgacatgtctccaagcaacaatgtggt

SEQ ID NO: 152832 - DNA, 83 bp, Homo sapiens
aaacggagtcttcaagaacatatgagtattcacacaggtggcctaggtggtagtcatgccttgcttctactacgtagttgtgg

SEQ ID NO: 152833 - DNA, 75 bp, Homo sapiens
cttgactggtcttacattgctgcatcaagaaacccaagctgctgaggaagatgagaatgtgcctactgctcctga

SEQ ID NO: 152834 - DNA, 82 bp, Homo sapiens
ctggggcggccggccaggaaccacccgttaaggaatcacatgcagcccaactacagattcttatggaattcctcaaggttgc

SEQ ID NO: 152835 - DNA, 83 bp, Homo sapiens
gctaaacgtgccctactctgccccgggggagaggtgatgtgtccaatctagatcccaacttctcatttgaaggcaccaaactg

SEQ ID NO: 152836 - DNA, 90 bp, Homo sapiens
tgcctgcaaagagtttcaagatgcaggtgaacaggaaacttggctgtaacttcaaaagaagatttgattctttatttctggactgcatat

SEQ ID NO: 152837 - DNA, 90 bp, Homo sapiens
ccggcccggcgcggcccagcgccctcaggcctgtccccggacctgcagtctatggagcagattcggcggatcatgcggcccacagatgtg

SEQ ID NO: 152838 - DNA, 75 bp, Homo sapiens
ggaagctcctggagggcgaggaggagaggccagtgcagttctggcgaaggccaaggctaaagctgaagctattcg

SEQ ID NO: 152839 - DNA, 50 bp, Homo sapiens
cgcactggagtaccctgttcctggcagtatcatgatattagctggtttga

SEQ ID NO: 152840 - DNA, 100 bp, Homo sapiens
ctcgcctcgggtctcgggggccgctctgggatcccggccaccagcaattgtccggcaccgtctgcgtcctgctgtccttccccttcatcttcagcccctg

SEQ ID NO: 152841 - DNA, 100 bp, Homo sapiens
aagacttgagtgttgctactaagcatcatctgagggttctccataaacacggttagccttccaagctgctgtcctgccagttgatatgaacatggcctgt

SEQ ID NO: 152842 - DNA, 100 bp, Homo sapiens
aacctagtgggtgtaatacatcatgaactgcagggttatccggtgttggctcctgctgcttactatgaccaaactggtgcccttgtagtgaatgcaggcg

SEQ ID NO: 152843 - DNA, 96 bp, Homo sapiens
cttaaaccttttaagcaaggaaattgaactaagaaatggagagcttacgaggaaatatttcagtaaaagcagttaaaaaagaagtagaaaagaaac

SEQ ID NO: 152844 - DNA, 90 bp, Homo sapiens
cagaagggcaagagaggtggatctgtgagggaaaagacccaataggataactcaagttactgagtgcagaggcaatacatggagatgcag

SEQ ID NO: 152845 - DNA, 101 bp, Homo sapiens
tttgaagcggctgccacgggcaaggtggccagcgtgaggaagaccacggtcctggatgtcatgaggcggctgctgcagcccaagaacgtgatggtgtccac

SEQ ID NO: 152846 - DNA, 100 bp, Homo sapiens
gactgcacttcttttttgagaaaggaaggaatatatcctgactgattgccggaaggtggtggtcgtacgctgtgaaggcatcaacatttctggcaatttc

SEQ ID NO: 152847 - DNA, 75 bp, Homo sapiens
cctcacccgaggatattaaaaaggcaatgccagctgatgaagaccgagaggccgcgacccaacacctttgtcata

SEQ ID NO: 152848 - DNA, 83 bp, Homo sapiens
actcggcgccttgggaaccgctcgagcctaccaggtaaagctacttcttcttctaatccaagcagcccagctccagactggta

SEQ ID NO: 152849 - DNA, 51 bp, Homo sapiens
ccaggcgtgcaggttctctttgagggtgctggagaatctggtaaaagcacc

SEQ ID NO: 152850 - DNA, 100 bp, Homo sapiens
ctcgcctcagggagatctactcagccccgacgggtgacagatgtgccagatacccaaaggacttgaactgccatgtcctctgaagaaggaaagctcttcg

SEQ ID NO: 152851 - DNA, 100 bp, Homo sapiens
ccgcgccggcggccgcccgcccctcggacactgcccccgccgccgccggagctctgcagcacgttgctgatcatctgggctgtgatccacaaacccggtt

SEQ ID NO: 152852 - DNA, 89 bp, Homo sapiens
gaaggaggccgagccgggatctcaggtcctcgggggcggcggccacgccaaggacggcttcatcgcagtaggaatggcagccccatcta

SEQ ID NO: 152853 - DNA, 100 bp, Homo sapiens
cctcgcctacgcctactaccagcagccgccgccatgtctgcgcatctgcaatggatggtcgtgcggaactgctccagtttcctgatcaagaggaataagc

SEQ ID NO: 152854 - DNA, 74 bp, Homo sapiens
ccttagctgtgctcgcgctactctctctttctggcctggaggctatccagcgtctcggaggaccccatcctagc

SEQ ID NO: 152855 - DNA, 74 bp, Homo sapiens
gtctgcatgtgaagcgtgctcatttcatgctggcgatgtcaccatttctacctgccacgcatcggcgaaggttg

SEQ ID NO: 152856 - DNA, 112 bp, Homo sapiens
tttaatagctggcattgctattcctgcaatgattattggcattcctgtgtatgtgggccgcaagggctctggaacttcatccattctctatgaaacctcttctgaggcgggc

SEQ ID NO: 152857 - DNA, 51 bp, Homo sapiens
catcgagcttatgcagagcagcgagctgaccctgagtggcctcagccagac

SEQ ID NO: 152858 - DNA, 98 bp, Homo sapiens
ccactatccccggcacatcgtgttcctggagtatgagagttctgagaaggagaaagacacaatataacaccagcaatcctgacttgttgctagtcata

SEQ ID NO: 152859 - DNA, 101 bp, Homo sapiens
gaagacgcggagaaaaaagttctcggttatgatggagggtggtcgcagcaaagggtttggttttgtatgtttctcctccccagaagaagccactaaagcag

SEQ ID NO: 152860 - DNA, 101 bp, Homo sapiens
ctggagatcgacccgtacttgaagccctacgccgtggacttccagcgcaggaactgcaagcacatgttgaccagataactgaaatggcagcagtaatgagg

SEQ ID NO: 152861 - DNA, 119 bp, Homo sapiens
ctcggctgcgggaaatcgggctgaagcgactgagtccgcgatggaggtgaatgaacttcagaatttgtcaagtgcagaagttgttgtccctcgtgaccagacacctgatgagaatgacc

SEQ ID NO: 152862 - DNA, 90 bp, Homo sapiens
gcccagtggcgtccacctgctcgtccgcagagatgaagaggaagatgatgatgtagtggctcctaaaccacctattgaacctgaagaaga

SEQ ID NO: 152863 - DNA, 98 bp, Homo sapiens
agggagctcacacgacacagattttggggcaaagcctttccaactggacagcaccatgtccaccaaagcggagcagtatggaatcgccacttatatat

SEQ ID NO: 152864 - DNA, 90 bp, Homo sapiens
caacaacctggcggtgctcgagtgcctgcaggatgtgagggaggcttgcattgatgacaatgttgatatggtgaagtttctggtagaaaa

SEQ ID NO: 152865 - DNA, 75 bp, Homo sapiens
gtacatggctaagagacgagctacctgggacacaaagttcacctttccttgccagtgaagatggcgtgcttggcg

SEQ ID NO: 152866 - DNA, 90 bp, Homo sapiens
ctcctcctgagcagtcagcccgcgcgccggccggctccgttatggcgacccgcagccctggcgtcgtgggctggtgaattaccagatctc

SEQ ID NO: 152867 - DNA, 75 bp, Homo sapiens
gtcgcctgctgctggctcctcactgattcgccttttacaagtccacctctcagagaagaaataatggcaaataac

SEQ ID NO: 152868 - DNA, 88 bp, Homo sapiens
ggatctggtgtaccaggcgaagctggccgagcaggctgagcgatacgacggctctgacgcccgctctgcggcttcggtgtttgaacag

SEQ ID NO: 152869 - DNA, 75 bp, Homo sapiens
ccccagtgctgcgtccttatcagccgagccgtttggatttaggtggcgagtagaaaaagaagtaatttcaggaaa

SEQ ID NO: 152870 - DNA, 98 bp, Homo sapiens
agcagctgcacggtatgaatgtgctccggtgaaaccttttttctgcaggatccggcaagataacccctgtgacagaaggctactgttgctgtaacaaa

SEQ ID NO: 152871 - DNA, 90 bp, Homo sapiens
gaatgctgctaaaaacaagactggggctgctcccatcattgatgtggtgcgatcgattgagcagctgtatgtccggcaactggcagaaga

SEQ ID NO: 152872 - DNA, 75 bp, Homo sapiens
gtatgtggatgtcacagccaaaacaccagcatctcagacatgtcgaaaaagatgttttgatccctaaaataatga

SEQ ID NO: 152873 - DNA, 98 bp, Homo sapiens
tgccatcccaggtccgcaacccggagaagcaagggaatggatttgtaaactcaagagcttctccaaatttgattggagctactggtgcaaatagctta

SEQ ID NO: 152874 - DNA, 50 bp, Homo sapiens
cctcccaagtagctgggattacaggtgtgattccaatccagggcgggatc

SEQ ID NO: 152875 - DNA, 100 bp, Homo sapiens
cgccggcaccggcgacctgtctgtgtactaatggtcacttgatgtgcgctggctgttttatccacctactagcagatgcccggctgaaggaggagcaggc

SEQ ID NO: 152876 - DNA, 90 bp, Homo sapiens
ggatgctgcattccgtcaaggtcacaacagtgtctttctgatcaaggaatttgatgaatcttcacccaaacaacctacaaatccttatgc

SEQ ID NO: 152877 - DNA, 88 bp, Homo sapiens
cttctttcattatggagggaggtttggcagatggagaacctgatcgaacttcgctgggatgacagcagttcagtgagcagtggtctca

SEQ ID NO: 152878 - DNA, 102 bp, Homo sapiens
atgaagagatggtggattctcactgagttttgactagcggaagaaaaggatgttcacgtcccagtatgcccactctgtaatacccccatcccagtaaaaaag

SEQ ID NO: 152879 - DNA, 100 bp, Homo sapiens
tggctacaggccgcggaggaggaggaggtggagttgctgcccttccggagtccgccccgtgaggagaatggtgaatacatcaagacctggaggccacggt

SEQ ID NO: 152880 - DNA, 123 bp, Homo sapiens
caagtccagtttggacctctgacccttgggcagcacctcccgacagccggctcgggacccaactctgcgagccagcctcttgttgctgtaccacatagaattcactcaacaagtagaaacgtg

SEQ ID NO: 152881 - DNA, 100 bp, Homo sapiens
gacatccgcaaacagagtgagcccttcttcaaggaacccaagacagaccaggatgaggagcattgccggaaagtcaacgagtatctgaacaaccccccga

SEQ ID NO: 152882 - DNA, 100 bp, Homo sapiens
gggtattacacatggatggtgagaactttagaattgttttgggtttaccgacaagactgtgaaactttcgggatggtggtgaaaatgctgattgaaaaag

SEQ ID NO: 152883 - DNA, 96 bp, Homo sapiens
acaccatcgtgcttagcgtctgcctgtctgcaacaccgggaggcaaggagcacctggtctggcaggaattgaatgatctggcacgggaccctccag

SEQ ID NO: 152884 - DNA, 83 bp, Homo sapiens
tagttctggggagcgcctcgtcgacatgagtgatgtggaggaaaacaacttcgagggcagatgctgctcacggccgtgaactg

SEQ ID NO: 152885 - DNA, 83 bp, Homo sapiens
gaggagtcggaggagccgcgggcggcgcggcccagctcgttccagcttcggaaccaaaaagaagcttcccagagccggggcca

SEQ ID NO: 152886 - DNA, 101 bp, Homo sapiens
gtggaatgtgtttgttatctgcttctatttggaggctggggacctctcaaagaatcttcagctacttggagcaacagccattgaggataaattacaagatc

SEQ ID NO: 152887 - DNA, 88 bp, Homo sapiens
gtggagaaacagctattaggagaacatttaacagcaattctgcagaaagtggaggagtgtctgctggacgagaacagcatgctgatcc

SEQ ID NO: 152888 - DNA, 99 bp, Homo sapiens
agtttcaggcctcaggaggtgtaggggagcgcctgcagaaggggctggagcgtcgggccaggaagacggagaactggtgtgctggaattgatgttcgtc

SEQ ID NO: 152889 - DNA, 95 bp, Homo sapiens
tgctgcggcgcggggaccgctgtgctctcggttgagactgagctaaagttaatctgttgtgacattctggatgtactggacaaacacctcattcc

SEQ ID NO: 152890 - DNA, 100 bp, Homo sapiens
aagacactccccagggcagaaatagcgaccatggcgaggtatatttgaaggctcccatgattctgaatggagtctgtgttatctggaaaggctggattga

SEQ ID NO: 152891 - DNA, 100 bp, Homo sapiens
gtgtggagtttggagctcgtatggtcaacattgatggaaaacaaatcaaactgcaaatctgggatacggacactatcttgatcagaagaggctgaagcag

SEQ ID NO: 152892 - DNA, 90 bp, Homo sapiens
cttcgaaacgtgataagaagcacctggatgagacatttgctacagcatcccacattaagtcaacgagctgccaaacggaggcccgaagaa

SEQ ID NO: 152893 - DNA, 89 bp, Homo sapiens
tcctgcgcttggggatcctctgtacgcccgttcactgattactcttgtctctgctgctcctgggaaagtgatttgtgaaatgaaagtag

SEQ ID NO: 152894 - DNA, 100 bp, Homo sapiens
gcctatgaccccgagggcatcctgggcaccatcaactccatcgtgatggcctttttaggagttcaggtgggaatgatggttagatgctgccgaacatacg

SEQ ID NO: 152895 - DNA, 82 bp, Homo sapiens
agcagttttcatcatctaagtgaaaggtcactctacatgacatgatcctgaaaaatatcgagaagatcaaacggccccggag

SEQ ID NO: 152896 - DNA, 50 bp, Homo sapiens
caggcgctgacggccacccctccagtgagcaagaagaacccatcaggtga

SEQ ID NO: 152897 - DNA, 83 bp, Homo sapiens
ggaagatggcggccggcaagagcggcggtagcgcaggggagattacttttctggaaggggcaagctctgtgtgattgattgga

SEQ ID NO: 152898 - DNA, 99 bp, Homo sapiens
gattcgcagtggtcgcttcttctccttggaagagtctaacctgtctctgcaagctcttgagtcccgccaagatgatattttaaaacgtctgtatgagtt

SEQ ID NO: 152899 - DNA, 74 bp, Homo sapiens
agtacgtccaggaatagaagtgacctgctttttcgcaagctatgtggttgatgttgcagaatgatgagccggag

SEQ ID NO: 152900 - DNA, 101 bp, Homo sapiens
ccagagcccatcaggaagtgcccacagtgcaacaaggacatggtccttaagaccaagaagaatggcggttttttaggtggtggcggcagtcggatagacaa

SEQ ID NO: 152901 - DNA, 98 bp, Homo sapiens
ctttgaactactgccggagcttctgccaggaggaggaagccaagaatctggtgagcgaagccatcgcagctggcatcttcaacgacctgggctccgga

SEQ ID NO: 152902 - DNA, 100 bp, Homo sapiens
gacgactatgacctcgagtctgacatggactgcagtgtgctagcttttgttctggaccacctgctcccacatacccagaatgcagaagacaaggacaccc

SEQ ID NO: 152903 - DNA, 100 bp, Homo sapiens
aaatgcccaaacccagactaaaggctacagaaacaccatctgattcagatcacaagaagaagaaaaagaaaaaagaagaggatcctgaacggaaaaggaa

SEQ ID NO: 152904 - DNA, 75 bp, Homo sapiens
gcgagcccagcgggagaaaatcaaggagaccaatctccagttcaacaacaacaagtactatctgattcagctatt

SEQ ID NO: 152905 - DNA, 100 bp, Homo sapiens
tgtagtccctaactccagactccaccagatgtgcagggcaaacatgctgaagacatatttggtgagttgtttaatgaggctaacaacttctacatcagag

SEQ ID NO: 152906 - DNA, 88 bp, Homo sapiens
actccacgggctgcctgcggatgaaggaccagtgtgacaagtgccgggagatcttgtctgtggaaactggcgatggaatatgagagga

SEQ ID NO: 152907 - DNA, 100 bp, Homo sapiens
aagaaaatttggaagaaaaccagcatgaaattacttgaccaagttgtccctccagctggtggtttatgatgataaagactacaggagaattcggtttgta

SEQ ID NO: 152908 - DNA, 101 bp, Homo sapiens
ggaaaattatactcagtggctgcaaaaaatgttctcagtgcagctgagtcttggtgagcagacatgggaatccgaaggcagcagtataaagaaggctcagc

SEQ ID NO: 152909 - DNA, 82 bp, Homo sapiens
tggggccagggaaccctggtcaccgtctcctcaggaactctgcgaccttcaagtcgtttgaggaccgagttgggaccataaa

SEQ ID NO: 152910 - DNA, 82 bp, Homo sapiens
ttcacctgtccagcatccgaccaccgaggctggagggggagaacacccagggtcttactgaagtaacacaaagcttaaaaat

SEQ ID NO: 152911 - DNA, 90 bp, Homo sapiens
gcagaatctacaaattttgctactgtcagatggattgactatggaaaagttgccaaattggtgttcccttcccaaagaacttccttcaga

SEQ ID NO: 152912 - DNA, 73 bp, Homo sapiens
gcgggcgagggcagcgccctaagcaggttctgcggggagtgtctccagccctgcctgcaggtgccatccccgc

SEQ ID NO: 152913 - DNA, 100 bp, Homo sapiens
gcctctgagaaagtccaggagaaagaggaagggaggatggaatcagacagatttgaccagttttgggccatcaatcggaaactcatggaatatcctgcag

SEQ ID NO: 152914 - DNA, 100 bp, Homo sapiens
ggactttgtctctgatgagctgagaaacaaagccacccagccaatgaagaccatcaagtgcctgctgatccaccctaaccccgagtctgcactcaacgag

SEQ ID NO: 152915 - DNA, 98 bp, Homo sapiens
atggataaaattgaccgaattaacagaccagtcgaggctgtctgtcaacagcgtgactgctggagactactcccgacccctccacatctccaccttca

SEQ ID NO: 152916 - DNA, 99 bp, Homo sapiens
caagcagtgaagaccagccctccactcagcctgcaggtcctcgaggccacacgggttaatcgaagaaagagcgcactggctttgcgctgggaagcaggg

SEQ ID NO: 152917 - DNA, 75 bp, Homo sapiens
tggcggtgcggatacgacccatgaaccggcgaggctttgggggaccagatactatttgtaaatcgtcccgataag

SEQ ID NO: 152918 - DNA, 82 bp, Homo sapiens
agaaggtctctggagacatcttcagcagcatcccagccatcactcttccacctgctccttagagaagggaagatgagtgagt

SEQ ID NO: 152919 - DNA, 74 bp, Homo sapiens
caccagctacatcctggtcttagaaatgcatcacgttgggtggtttccatttagaccgaggccggttcagaact

SEQ ID NO: 152920 - DNA, 75 bp, Homo sapiens
ccacagctcaccttgtcccaacccatccagctcacagcacagtctttccacaggagccagcatacttcctgaaca

SEQ ID NO: 152921 - DNA, 82 bp, Homo sapiens
cggccgccctgggccgggccccaccggacggcatcagtgtttttctgaccgaagttctcatttcctgacaatggaaatggaa

SEQ ID NO: 152922 - DNA, 75 bp, Homo sapiens
ggtccgacctcgtaacgccacaaggaataatgggtgcaatggatgagcttcatagtctggatccaagaaggcaag

SEQ ID NO: 152923 - DNA, 87 bp, Homo sapiens
ataacccaagagtttccgggaaaaggcaaggctttgttccaggaatggaagttggatacactttgtgacttgtacgagacactgacc

SEQ ID NO: 152924 - DNA, 100 bp, Homo sapiens
agtctacagataaatctacagagacaattcctcaagtggacttggccatgattggttgttctccacagacgaaggtcaatgctggcaaacctacacgttc

SEQ ID NO: 152925 - DNA, 83 bp, Homo sapiens
cccaggtgatgcctgaagctcaagggactgtgtccaccctcagacctcctgccccccgaggtctgcagtctcctgaacccagc

SEQ ID NO: 152926 - DNA, 90 bp, Homo sapiens
cggcctgcgtgtggcctccgagcagtcctctcagcccacttgcacgcaaatctccttggaccggctgttgggggaaaaaagtgttagccg

SEQ ID NO: 152927 - DNA, 83 bp, Homo sapiens
aaagacgttctcaaggagaaggcagacctggggcactccacagaaggatgttattatcaagtcagatgcaccggacactttgt

SEQ ID NO: 152928 - DNA, 75 bp, Homo sapiens
ctcacaggactaatagctggcaaatttctgttccatcagcgtttgtttggtgtcaacatgaaaacttagtagaac

SEQ ID NO: 152929 - DNA, 90 bp, Homo sapiens
cagagagaaccaccagcattgccaccaccaccaccaccaccacagagtctgtggaagaggtggttcgagttgcagaggaaagtggtcgct

SEQ ID NO: 152930 - DNA, 50 bp, Homo sapiens
cggcaacgtcgccaagacctcggccctcgggaccaaggatcacgtcatga

SEQ ID NO: 152931 - DNA, 101 bp, Homo sapiens
atggcatcatagttgtgtatgatgtgacagatcaggtcctcagttacatgggtctacaaaatctcaaagcggaggcagaccagtctctcgaaccaggcagg

SEQ ID NO: 152932 - DNA, 105 bp, Homo sapiens
cgacagcagccaggagtcatgagcgacagcggcgagcagaactacggcgagcgggaggatcccttttcccccagaaattactcaatgctgaaacctctcaaagtg

SEQ ID NO: 152933 - DNA, 95 bp, Homo sapiens
gacctacgctccttcatctaatccatggaaagcgatcatctcagtccacattggaacgatctgaacagcagatcagggctgcttctagtttggag

SEQ ID NO: 152934 - DNA, 75 bp, Homo sapiens
ggatatcaagccagagaagtgcccgaggagagttaacagaaacctgatgtgagactctctcgaggcagtattgac

SEQ ID NO: 152935 - DNA, 100 bp, Homo sapiens
tcaccactctgacgtgtattcctggggtcattgaagtgggcctgggcttgggctacctggagctgccacagatcaactacaagctctccgtggaacataa

SEQ ID NO: 152936 - DNA, 90 bp, Homo sapiens
caagaagattatgacagattacgccccctatcctatccgcaaacagtttggttgggatgttccagtaattctgagaaattcagaagagac

SEQ ID NO: 152937 - DNA, 100 bp, Homo sapiens
ccaaacaaccgcagccgctgttcccaggatggtgatccgtgtatatattgcatcttcctctggctctacagcgggaggtggggaagacagggctccagct

SEQ ID NO: 152938 - DNA, 97 bp, Homo sapiens
ccggcgccgccgcgtcttcccggtctcctttcccggccgcacaggtctgctccatctggacacaagcatctgacggtagaagagttatttggaacct

SEQ ID NO: 152939 - DNA, 75 bp, Homo sapiens
cttctcgactcggtcctgtttcgacagcgaacatgtcgcggcctgtcagagttactggaggtgaactgtttgaag

SEQ ID NO: 152940 - DNA, 100 bp, Homo sapiens
ccgacttgccggcagaacttacgctgcgggaccccgggcactgttgctgctgcgggaggcattcccatcaagagcaccatggacaaccccaccaccaccc

SEQ ID NO: 152941 - DNA, 98 bp, Homo sapiens
cctggtgcacccccagtgggtgctcacagctgcccattgcctaaagaaatccagaagcttggaagctgtattacagatccaggtaatcgagagacctc

SEQ ID NO: 152942 - DNA, 100 bp, Homo sapiens
tcctgcttcagcctctctagtaactcggattacagtgcaagcatctcttggcagtttacctgagtcaggttatgaggacctgtcagcagctaagtgtctc

SEQ ID NO: 152943 - DNA, 82 bp, Homo sapiens
ccgtttgggttctccacgcattctagactcccgaagagcagaaaaatatggctcaggagactaaccagaccccggggcccat

SEQ ID NO: 152944 - DNA, 75 bp, Homo sapiens
gcattttttccagaacacaaaagacaagttggatggcttgaggactggtactaaaaggaaacgtgactgggaggc

SEQ ID NO: 152945 - DNA, 51 bp, Homo sapiens
cgcggagctggaatgactggcaacccagctgtcaataccagcaaatatgca

SEQ ID NO: 152946 - DNA, 90 bp, Homo sapiens
aagaaagattctggaggaaaggtttacaagcaggccacgattgaatctctgaagctctggcaggctgccctgagcacgctcaaccccaac

SEQ ID NO: 152947 - DNA, 50 bp, Homo sapiens
gaaatttgaagagatgattcaacaaattgcagagggaatggcatacatcg

SEQ ID NO: 152948 - DNA, 89 bp, Homo sapiens
tgtactggggcacgtcacgctggagctccatggagatcatgacaggcaatctatacctgcgggggcccctgaagaagtccaatgcaccg

SEQ ID NO: 152949 - DNA, 75 bp, Homo sapiens
ctgccctcagctccgagtccagggcgagtgacaaagcataaatcatggacaccagagaataaggtggacctcagg

SEQ ID NO: 152950 - DNA, 101 bp, Homo sapiens
ggcggatggccccaggtgtaagcgcagaaagcaggcgaacccgcggcgcaataacgttggaggagagcagattagtgccattggaaggggcatatgtgtgt

SEQ ID NO: 152951 - DNA, 75 bp, Homo sapiens
aagctgtgtactgccgttgttggaggtccaaaaagattcaagatggaaaaggtgatgtaaccattacaaatgatg

SEQ ID NO: 152952 - DNA, 75 bp, Homo sapiens
gtgttcgagaacgaccccgagacgcttggtttatggcagctccaggacctcgcaccccgagacggacatcttaca

SEQ ID NO: 152953 - DNA, 82 bp, Homo sapiens
attttgtgaattggaagtttttgctaaagtactgagagctttggataaaagaccaaactagagtcagaacgaatactagcat

SEQ ID NO: 152954 - DNA, 95 bp, Homo sapiens
gttaaccaaagccagcctggcatactttgaagatcgtcatgggctcttggataagcacaagaatacagagagcatggtggagcttctggacttgt

SEQ ID NO: 152955 - DNA, 74 bp, Homo sapiens
ggggcgcccgaggtctggaaggcgcagagatgggcagtagcgaaccccttcccatcgcagatggtgacaggagg

SEQ ID NO: 152956 - DNA, 97 bp, Homo sapiens
tcatcctcaagatgcagtctcatgggcagtggtttgagacaaaagctgaccgtatgtcctatcatcaatggggaagaccaccttcgtttgttgaact

SEQ ID NO: 152957 - DNA, 89 bp, Homo sapiens
gagcaagtgagtagtcacatcacctccagccctctgcattcacgtagcattgctgcggtacgcatagctgctaaattcatcactcatgc

SEQ ID NO: 152958 - DNA, 100 bp, Homo sapiens
atccaggcgttctccgccccggagaatgcagtgcgcatggacgaggctcgggataacgcctgcaacgacatgggtgtcagcatttgcaggtatacaggaa

SEQ ID NO: 152959 - DNA, 75 bp, Homo sapiens
gagaaaacattcaacaaagatacagtgattatagtgagttgatccctgaattttattatctccctgagatgtttg

SEQ ID NO: 152960 - DNA, 100 bp, Homo sapiens
agagctccagccatgaggactacatcagggtctcttgcaacgtgtgagctgcctcttgccaagagtgagtggcaaaagaaactaaccccggagcagttct

SEQ ID NO: 152961 - DNA, 100 bp, Homo sapiens
ttcagagtgtgaagtcaaatgcatgccaacattccagttttttaagaagggacaaaagaagaagtagatggctgccctgtcattctagtttgtggatccc

SEQ ID NO: 152962 - DNA, 100 bp, Homo sapiens
gggagaggatggacgagggatgcggagagaccatatatgtcattgggcagggatcaggttggatggcaagcatgtggtgtttggcaaagtgaaagaaggc

SEQ ID NO: 152963 - DNA, 100 bp, Homo sapiens
acaagcccggcgcctctacgtgggcaacatcccctttggcatcactgaggaacttgctactaccagcaccatgccctaccaatatccagcactgaccccg

SEQ ID NO: 152964 - DNA, 82 bp, Homo sapiens
tcgcggcatggcgtcggaggggccgcgggagcccgaaagcgagacaatgcagatcttcgtgaagactctgactggtaagacc

SEQ ID NO: 152965 - DNA, 100 bp, Homo sapiens
ccaggagttggtggtgaccccgcccagttggcccagaggatctcttctaacatccagaagatcacacagtgttagctggagataagatgggtagactgct

SEQ ID NO: 152966 - DNA, 50 bp, Homo sapiens
cgtcaatcagagcgtcctgtgcggcttcctgtgtccagtaccggttagtg

SEQ ID NO: 152967 - DNA, 100 bp, Homo sapiens
taacacagtagcagctggaaccatgacaggcatgttgtataaatgtacagcccttgaaggtagtggacccagatcatcccctcgcagcacttgttcgtaa

SEQ ID NO: 152968 - DNA, 74 bp, Homo sapiens
cctcgcttctcagatccccgccggaagtgttgggggccgtcccgctcctaaggcaggaagatggtggccgcaaa

SEQ ID NO: 152969 - DNA, 99 bp, Homo sapiens
gattgccccctagtgtccgtgggaaagtttggagtctagctgtaggaaatgaactaaatatcactcctggaaagatgaatgggagggctgattttcgag

SEQ ID NO: 152970 - DNA, 90 bp, Homo sapiens
caacggaggattgtgcctgagaagaacccacagaggtgatggctgtgctgcctggccctctgcagctgctgggagtgctgcttaccattt

SEQ ID NO: 152971 - DNA, 100 bp, Homo sapiens
ggcatcgccgcctcagccgccgccgccgccgttttcgcctgcagctgctcaccggacattcagtcagaagaaggctgctattgaaagagagtatgcacag

SEQ ID NO: 152972 - DNA, 51 bp, Homo sapiens
ccagccagcagtgtatctcctgcaagtgaagccttgaaaggaaaggtcaca

SEQ ID NO: 152973 - DNA, 100 bp, Homo sapiens
aacgccacaaaaagaaatgcatcttcctgggcacggtccttggaggatactgctattgttcatccagttcccattcgtatgactccaagcaaaatccaca

SEQ ID NO: 152974 - DNA, 135 bp, Homo sapiens
catctattaagtttttccatgtgtctagtggagtagatggagatacaacatcgtcagatgactttgactggccacggagaacagtgtggagtttgaagcctgtctggtggcccaatgtgatgccctcatcgatgc

SEQ ID NO: 152975 - DNA, 50 bp, Homo sapiens
agaatcacagctggtgttaacgagacggtctggaaaatcccgaagcagaa

SEQ ID NO: 152976 - DNA, 100 bp, Homo sapiens
ctagtaattgagcctcaaaatgaagatggcacatggcccaggcagaccttgcagtcaaattatgtcacgcatctgatgaagcgaattcagagaggcccag

SEQ ID NO: 152977 - DNA, 100 bp, Homo sapiens
gtgacagattctagccgctactttgtaatccggatccaggatggtactgtgcaagcatctcttggcagtttacctgagtcaggttatgaggacctgtcag

SEQ ID NO: 152978 - DNA, 100 bp, Homo sapiens
ggcgatggaagatggaaggaaggagcgcagcggccagagatcctcagcaggagcctatggaagagatagaaaatttgaagaaacaacatgatttattaaa

SEQ ID NO: 152979 - DNA, 90 bp, Homo sapiens
cccggatgtgaggcgatccgctggcgctagtctgaccctccgccaggcaaaaggaaggtggtctcatggattataaccatttggatattt

SEQ ID NO: 152980 - DNA, 75 bp, Homo sapiens
tgcaccctttttgtcagattatcaggatgaggtttggaaattttagcattcaggtgccaggaatgcagatgggac

SEQ ID NO: 152981 - DNA, 75 bp, Homo sapiens
gggaaggcgattggcatcgatctctccatcccttccgaggcccgacttcgctggaaaggcagctcatcatgcaga

SEQ ID NO: 152982 - DNA, 101 bp, Homo sapiens
ctgcagcatccttgatgataaaccagtaaatatggcattcctgcgtcctttacaagcgccaagtctgtattcagcagtaaggccctggtgaaaatgcagct

SEQ ID NO: 152983 - DNA, 95 bp, Homo sapiens
tgctgacgacctgctacaacagaaatacctgcactttaatcagatagaaactttggacccagattcgttccagcatctcccgaagctcgagaggc

SEQ ID NO: 152984 - DNA, 90 bp, Homo sapiens
ttgggagaaagtttcatctgtggatggagtattggttgactatagtcaatggggccaatggagccaagtgtatggaaacccacaacagta

SEQ ID NO: 152985 - DNA, 101 bp, Homo sapiens
ctgcgccagagaccagataaaggctggaaacaggattgttgaaatactccctgaacatctgaaagagtttcagtcccttgaaactttggaccttagcagca

SEQ ID NO: 152986 - DNA, 76 bp, Homo sapiens
ctcacatttccaagtacattctcaggtggagacctcactgtcttggggtgaatggatgtagccttcatgtaaaaac

SEQ ID NO: 152987 - DNA, 100 bp, Homo sapiens
ctctttggaagaaatggcttctctagaggaggaagcctgcagccttaaggtgtgttccagagaacaagccttcagacatttgctatattgacgctgagct

SEQ ID NO: 152988 - DNA, 74 bp, Homo sapiens
ctgatgttccactgaaatcacaatggaaagtcttgacttgactgggatgaggggaaatgcgtagaaggaattct

SEQ ID NO: 152989 - DNA, 83 bp, Homo sapiens
gtcgccgctgcagccctagtgactgcggcctgcatcccggagctgatggtacacacatggatggtgatcaaattgttgtggaa

SEQ ID NO: 152990 - DNA, 90 bp, Homo sapiens
gtacccaccagagggcgccactaaactgggtcaatgatgccttccttcatgtgatacaggggaaatccgtgggcaaggtgcttctcgctc

SEQ ID NO: 152991 - DNA, 90 bp, Homo sapiens
cggcggcagcgggtcttgggtcctccgagagcagcagcggcgcacctatgttggcagcatgcctggtcgcatcatcaacggcttgaagac

SEQ ID NO: 152992 - DNA, 100 bp, Homo sapiens
cctgcaggctggtggccagccggccgcccatcttccacaccatgtcggacggcgagggcccctccgccgcaggcaggctccggagagttccgcacgctgc

SEQ ID NO: 152993 - DNA, 89 bp, Homo sapiens
cggatattcagttgcacatccccacatcaatgcactgccaatgcaaaagctgatgaagcattgaaagccaaagaaagaaatgaggaaga

SEQ ID NO: 152994 - DNA, 98 bp, Homo sapiens
ggacttcgacacctacgacgatcgggcctacagcagcttcggcggcggcagaggacacaggcagccatgccgcgcagcccaacatccagcgaggacga

SEQ ID NO: 152995 - DNA, 100 bp, Homo sapiens
atcctccttgaagtatttggctgaggagttttcaatcccaaatgtgacagtgatgataacatgggtgccaaaaatacttcaataggagaagaatttatat

SEQ ID NO: 152996 - DNA, 101 bp, Homo sapiens
atcatgtctgcgagccaggattcccggcggccggcgcggggcgcaggcggcgcggccatgggctcgcagggcagtccggtgaagagctacgactacctgct

SEQ ID NO: 152997 - DNA, 90 bp, Homo sapiens
aaattgctgtaaaagtgccttctgtttttaagcttctaattaaagaggtaatactgcattgcatgattgtgcagaatctggaagtttgga

SEQ ID NO: 152998 - DNA, 100 bp, Homo sapiens
cgggcaggagcctggcgaggatgcaccttcccctgccttggaaaggctatgtccaaactgggtcttcggcaggttacaggagttactagagtcactatcc

SEQ ID NO: 152999 - DNA, 100 bp, Homo sapiens
cggagctctgatcgccgggaacccttgccgctgctgtcctgcgaccccaagcagtgatgtcttggcattgcccattttcaagcaggaagattccagcctt

SEQ ID NO: 153000 - DNA, 100 bp, Homo sapiens
gaggcggaggcagaggtggaggcgctttgaaaggctggcgcccatgcggctctacacgctctccaagcgccactttgtcctcgtgtttgtcgtcttcttc

SEQ ID NO: 153001 - DNA, 90 bp, Homo sapiens
atcacttgagatcaggagttcgagaccagcctggccaaactgttttcagatagtagttcagcactttagtgaagaacattacatctttta

SEQ ID NO: 153002 - DNA, 75 bp, Homo sapiens
gccgatccagcctgcggagcctgtggggcagatggtgtcctcagaccgaagccaactttcctttctgcccacaga

SEQ ID NO: 153003 - DNA, 83 bp, Homo sapiens
cggaagcacatcaacagagcgcactccttgctcaagacccctccccagtacctacccttccaggcccccctttcccatctcag

SEQ ID NO: 153004 - DNA, 96 bp, Homo sapiens
aatacctctgacccctccagggcagagacaagaaagcgcaaggaatgtcctgaccaacttggacccagaaaccgaaacttcattgccccttcaatg

SEQ ID NO: 153005 - DNA, 75 bp, Homo sapiens
gtctccagcgggcctggactgtgggctggtgtgtggaactggaaatggaagttccagtattaccgaaaatctctc

SEQ ID NO: 153006 - DNA, 100 bp, Homo sapiens
agtggctgtagggagcatagctgctacactgaagatgaagcaaggcccaatgacccaggcgtcccacagtgttttgttcgccccacggaggccaagaaag

SEQ ID NO: 153007 - DNA, 82 bp, Homo sapiens
gtctcttacgtctgcggaagtgcagctgcctcagttcttagcgcagcctggagatttgaaaaagagaattgaatctctgata

SEQ ID NO: 153008 - DNA, 75 bp, Homo sapiens
cggagccgtgggacgagggcggcggaccatggccaacctggagcgcaccttcatcgccatcaagccggacggcgt

SEQ ID NO: 153009 - DNA, 98 bp, Homo sapiens
cctagtaataaagtgaaatcagacccacaacgaatgaatgaacagccacgtcagaaggccaatgatgaggccaatcagagtgatacaagtgtctcctt

SEQ ID NO: 153010 - DNA, 100 bp, Homo sapiens
gaagagtacaagctgatcctgtccacagagataattgacgaccttgccaacctagtggagaacacagatgaaaaacttcgcaatgaaaccaggcgggtaa

SEQ ID NO: 153011 - DNA, 50 bp, Homo sapiens
gcacagacagaatccctgctaccaattaacagacccctgactatgaagaa

SEQ ID NO: 153012 - DNA, 49 bp, Homo sapiens
cttcaactctgttcacctgcttgcaggaacttagtgatttggcccgtga

SEQ ID NO: 153013 - DNA, 100 bp, Homo sapiens
ctgacgacgggcgcccccgagccgccgccgctgtccggagccccacaggaagctatgaagcagataacccagctcctaccagaggacctcagaaaggagc

SEQ ID NO: 153014 - DNA, 82 bp, Homo sapiens
cggacctcaagctctgggggatcgaccgggacagctaccggcgcatccttatggattttttatcaagcagaaatgcatcgaa

SEQ ID NO: 153015 - DNA, 89 bp, Homo sapiens
tgttccatggtattttcaacggaatacactttgaaaggttcacagcagatgaggctcgggacctgattcaacgttacctgacagagcac

SEQ ID NO: 153016 - DNA, 75 bp, Homo sapiens
attttttctcatggatgttcttcttcgagtatttgtagaagggtttactcctggcttgggggcattaggaagcac

SEQ ID NO: 153017 - DNA, 99 bp, Homo sapiens
gcagcaaggaaataggatttaaccgctctctgcctcccagctccttgctcggattgaacgtatggaaaggcggatgcagctggtaaagaaggataacga

SEQ ID NO: 153018 - DNA, 74 bp, Homo sapiens
agggtccctgaagagggaagacacgcggaaacaggactgaagcgggtcacgggcgggtttaactccaagaacag

SEQ ID NO: 153019 - DNA, 82 bp, Homo sapiens
ttttcgatccgggacggccggtcaggctcgccgccgagctgatgagtaacccgaagcccctagaggagtggtcacctgcctg

SEQ ID NO: 153020 - DNA, 100 bp, Homo sapiens
cggcagccgagcagcctggcaacggcggtggcgcccggagcccgaggtggaagttgatgggtcgaaactaaatgtgaccagcacgtggaacctggcttcg

SEQ ID NO: 153021 - DNA, 88 bp, Homo sapiens
ggaaaatggtactattttgatgacagtagtgtctccactgcatctgaagaccaaattgtggtcaaaatgcagatcttcgtgaaaaccc

SEQ ID NO: 153022 - DNA, 75 bp, Homo sapiens
atcagggacagtggcggatgtgcactgctacaggactctactatggagctgccactgtcccagagcagaggactg

SEQ ID NO: 153023 - DNA, 96 bp, Homo sapiens
acaccgacaaccccttcggagacaacaacctgctgggcaccttcatctggaataaggactggacctacagagacatctgggattttctgcgtcagc

SEQ ID NO: 153024 - DNA, 50 bp, Homo sapiens
atctcctgcaggatctcagtgatgacaaatttacatgtattggagaccag

SEQ ID NO: 153025 - DNA, 100 bp, Homo sapiens
gatgagttgcagcaagtcatacgggagaatggtgaggttctggagaattgatgaggattatccagtgcaagttgcacctttgagcaatggtctttgctgt

SEQ ID NO: 153026 - DNA, 75 bp, Homo sapiens
cgaagcctgacccgactgcctctctcagtgagggaaaacaaagtgcatgatgaagtcttcagactgtgtcataaa

SEQ ID NO: 153027 - DNA, 100 bp, Homo sapiens
aaggagttgctgcttttccaggaatgaaagacattcaggatcaacttgaacgaatatttctgaagctggctctgaagatattgacatacttcccaatggt

SEQ ID NO: 153028 - DNA, 82 bp, Homo sapiens
agtaaaccaagaagaaatccacagatttagttctgtgtcatcaatcttacagaagaagtgctgtgggtcaaagtgaatataa

SEQ ID NO: 153029 - DNA, 82 bp, Homo sapiens
cacgactgcacccaccaggaagatgtggctgtcatctgctcaggtctctccctctagtgcctactggggccagaagcaatca

SEQ ID NO: 153030 - DNA, 80 bp, Homo sapiens
tgcttcagagagaggaagccgaaaacaccctgcaatctttcagacagccaagacaatgcaaactccagtgaacattcccg

SEQ ID NO: 153031 - DNA, 74 bp, Homo sapiens
gaagatgcagatgagaaggttcagttggcaaaccagatatatgacttggtcatggaaaatggaagatttgcaaa

SEQ ID NO: 153032 - DNA, 100 bp, Homo sapiens
gcagggattgcccccaccaagccccagagctgggagtgggcaggacggggcaggtgaaaagtagtgatgaggcagtgatcctgtgtaaaacagcaattgg

SEQ ID NO: 153033 - DNA, 75 bp, Homo sapiens
cggggcaggggcggaggcggaggcagaggtggaggcgctttgaaagatatttgaacagtttgtcaagacaagaat

SEQ ID NO: 153034 - DNA, 75 bp, Homo sapiens
tataaaggaagcaatcgaaagatactgctgcaatggaaaggcctctcaaggtgactctcctattccatctgtttc

SEQ ID NO: 153035 - DNA, 101 bp, Homo sapiens
gcctgacccgaagtaccgacccgagttatgcccaccctccaactttgcgacggaaatgtgtcatcgaaagccaggactttgagggccagagtcccaaatgc

SEQ ID NO: 153036 - DNA, 51 bp, Homo sapiens
caacgattgagacagcactgaaaatggaggccctgactgcagagatcgtga

SEQ ID NO: 153037 - DNA, 83 bp, Homo sapiens
ctcctgcttcccatcgaagctctagaaatgaatgtttccatctcttcagagatgaaccagggggatatgagactttctactcg

SEQ ID NO: 153038 - DNA, 50 bp, Homo sapiens
agtcggggaccctggagaaaggggttggggtgctggaggactgcttcacc

SEQ ID NO: 153039 - DNA, 75 bp, Homo sapiens
gcggagctgacggtggaggttcgcggctctaacggggctttctacaagccactacttccttcattggactgcaag

SEQ ID NO: 153040 - DNA, 75 bp, Homo sapiens
ggctcgacaagttcaagcagctgcttgccggccccaacacggaccttgcatgcttttcacttccactgcatctct

SEQ ID NO: 153041 - DNA, 78 bp, Homo sapiens
tacatccggcaagcgggtgacttccatcagcaagttgtcctcgaagaaggtacaattgcttttaaaaattgggttaaa

SEQ ID NO: 153042 - DNA, 100 bp, Homo sapiens
tattaaactgatcactgtctgataaggtgctggagaatctggtaaaagcaccattgtgaagcagatgaggatcctgcatgttaatgggtttaatggagag

SEQ ID NO: 153043 - DNA, 75 bp, Homo sapiens
ccaacaggcacgacaagtttctggacactctccgagaggtgaagggtgtacaactatgagcctttgacacagctc

SEQ ID NO: 153044 - DNA, 100 bp, Homo sapiens
cactttgttattggagaaacatgcagattatatcgcatcctatggctcaaagaaagatgattatgtcttcaataaactcatcaggagatataagtatttg

SEQ ID NO: 153045 - DNA, 82 bp, Homo sapiens
ctcgcctgcgccccgcacccctccgagcagcccggggatccagcacgcagttttgtaccaatggctagaagcagatcgtcat

SEQ ID NO: 153046 - DNA, 75 bp, Homo sapiens
gaactgttctcaggactcattattttaacatttgggagaaacacagccagaagggtttgtgtttagtgaatcaga

SEQ ID NO: 153047 - DNA, 75 bp, Homo sapiens
gcgggccctctccatacagaggctgtggtacttctgggatcgcttacacctgagacgaactacagaacagcacgt

SEQ ID NO: 153048 - DNA, 75 bp, Homo sapiens
tgaagcctgagtatgatgcggtggtgataggagcagatgagcgggatcgtgtgcagaagaaaaccttcaccaagt

SEQ ID NO: 153049 - DNA, 101 bp, Homo sapiens
ctatgtcccactaaaggatcaacgtaacgtgagcatgaggttttccaatcagccaactgggtacatggaaaactcagtctcctacagcgcaattgaagacg

SEQ ID NO: 153050 - DNA, 75 bp, Homo sapiens
cctgccactcagtgtatttcagacggcaagggaggagctttatctttatatactgcccttaccacacagcagaaa

SEQ ID NO: 153051 - DNA, 100 bp, Homo sapiens
gggtgagctggagaacctgaagtagcaaaggcaagaaggcaacgacgttccatctgtggaaggacctaccaaccagcaggagagcctgtcctgcctccag

SEQ ID NO: 153052 - DNA, 75 bp, Homo sapiens
tggccaccgaccagaggaaagtcaaggtgcccccacttgactctcgccccagctccccagccctctacttcaccc

SEQ ID NO: 153053 - DNA, 73 bp, Homo sapiens
tgcatatatcaagaattcaaggccagaggctaatgaagcccactaggcaaggataaggctggatggaagctgg

SEQ ID NO: 153054 - DNA, 74 bp, Homo sapiens
caaacgtatggactacctccttttggcatcaaacagtgcctcctacatccaggacgcctttcagctactcttac

SEQ ID NO: 153055 - DNA, 90 bp, Homo sapiens
gtctcctggtgaccgagcacccgcctccgggcatcttcaactccaacacatatctctttatggtacaagctcgaggtataatgttgagag

SEQ ID NO: 153056 - DNA, 82 bp, Homo sapiens
aattacgttttaattgactatgacaccaaaaggatggtactggggaagtatgactgttaatgaagccaaagagaaattaaaa

SEQ ID NO: 153057 - DNA, 83 bp, Homo sapiens
caggtcgtggcagagaaaaccagctgagacagggcgccacttactagcaattctgtggtgttcttggtcacacatttatggag

SEQ ID NO: 153058 - DNA, 83 bp, Homo sapiens
ggtgtaccaggcgaagctggccgagcaggctgagcgatacgacggacaagagcgaggaaggtgaggacaacagaagctcagag

SEQ ID NO: 153059 - DNA, 100 bp, Homo sapiens
gctggcgcagctggcggacccgtggcagaagatggctgtggagagcccgtccgacagcgctgagctgagatgagtgaactgagtgtggcacagaaaccag

SEQ ID NO: 153060 - DNA, 82 bp, Homo sapiens
cctggactcgccctcctatgtcctgtacagatcgccaaactgaggcagcaactacaacgcagtaaacagagtagtcgtcaca

SEQ ID NO: 153061 - DNA, 75 bp, Homo sapiens
ttcatccttgtttaatgactttggtgccctcaacatctctcagagacgaaaggtgaaggagtacctcctggcaac

SEQ ID NO: 153062 - DNA, 83 bp, Homo sapiens
ccttctccatcaggtgcagaagcgccaaatcttaaaggcagaccacgcaaaaagaaaccatgcccacaaagaagagattcatt

SEQ ID NO: 153063 - DNA, 89 bp, Homo sapiens
gaggcaaggagctaaagcagcgtgcgttcagccctggggaaattgggatggcggttcttgttaagctcccctatgccgcccagcaggaa

SEQ ID NO: 153064 - DNA, 58 bp, Homo sapiens
caacgtggaaggaagttgctgcccaatgtgtccagttctgtgtcctacatagagcagc

SEQ ID NO: 153065 - DNA, 89 bp, Homo sapiens
gaaaattgaagatctccaccaagtgaagaaggatgaaaaaagcattgaggttgagacttccattagtttgatgaatctgacttccacac

SEQ ID NO: 153066 - DNA, 75 bp, Homo sapiens
caccgaccagccgcacacgcagcggcgcaaggagatactggggggcctggctgtggattgggtccatgacaaact

SEQ ID NO: 153067 - DNA, 75 bp, Homo sapiens
ttcctttactggttcaacaactacaggaaagaggactactgagcccagccaggctgtatgccattgctgccaaag

SEQ ID NO: 153068 - DNA, 100 bp, Homo sapiens
gccagcgcctgagcccgcccttgatcttcgctgtggcatggcggacgaggggaagtcgtacagcggggttggccggagacctacgacatgaatacctcgg

SEQ ID NO: 153069 - DNA, 95 bp, Homo sapiens
ctgaggaagagggcggcgacggtggtggtgactgagcggagcccggtgacaggatggcctacatttgaatttgggagataccattatgaaagatt

SEQ ID NO: 153070 - DNA, 75 bp, Homo sapiens
cagtctctgatcgaaggggagtttccacagtgattgatgctgcctcagatcagctggacatcatctccatggcgg

SEQ ID NO: 153071 - DNA, 100 bp, Homo sapiens
tccagcgacctcagccacaggaactagagacagcttgctttctgtcgtggcaatgttttgaaactggcaaaatcaggtgtacaaagataatcaatgctga

SEQ ID NO: 153072 - DNA, 100 bp, Homo sapiens
ggggaaaagggaagtgaaaagagatctgttttcagtacactcagaagaagccttgtttttactggcaacctgttattaccgctcaggaaaggcatataaa

SEQ ID NO: 153073 - DNA, 100 bp, Homo sapiens
acacagaaggtgtgaccccaacgaagagtggagaacggcaacccatccagatcaccatgccggtagcaaaccatgtgatttcttctgactctatttcctc

SEQ ID NO: 153074 - DNA, 118 bp, Homo sapiens
cgctaccaccgccgacggtcttcagggtcacgagatgagcgctatcggtcagcatcctgaggttagcattacacttctcccagtggagcccatgacttctgatcaggacgctaaggtt

SEQ ID NO: 153075 - DNA, 50 bp, Homo sapiens
cagggcagagcaggaggccccccgaggaatagcgggttttgcagcaattg

SEQ ID NO: 153076 - DNA, 82 bp, Homo sapiens
agctacaaccatccatcatctttatagatgaaatagatgcagagaggtgttcataaagagcaatatcagatggcaccccaaa

SEQ ID NO: 153077 - DNA, 100 bp, Homo sapiens
agcaacatcggccacatccgcccgcagaggaccattctggcttttgtctctggcatcttcttcatactatcgggccatcgatgatgactgtaaccagaca

SEQ ID NO: 153078 - DNA, 88 bp, Homo sapiens
gccccgccctggggacgaagagctgcagctcctcctgtgcgggcctccggtgtggctgtctctgatggtgtcatcaaggtgttcaacg

SEQ ID NO: 153079 - DNA, 98 bp, Homo sapiens
gtcagaagacatctctaacccaagaaacagagcttttggaatccttacttcaggaggtggagcaccagtcccacccgctgtacctgtgcaatgccagt

SEQ ID NO: 153080 - DNA, 83 bp, Homo sapiens
gtcttctcttcctcctccaccgagtcgtgctctcgccccaacccgcgcgccagcttccccgggcgctgcctggacaggcctgc

SEQ ID NO: 153081 - DNA, 83 bp, Homo sapiens
cttcgagtgacccgggtgccgaggagcgggaagagttgctggggttggccgactgcgatgtgagtgacagcagctgcagcagc

SEQ ID NO: 153082 - DNA, 90 bp, Homo sapiens
gctgttcctattcgggcatcttggctcctccttgagctcacagaacatttcctgcctgttgctcacactctgttgtccacagcatacccg

SEQ ID NO: 153083 - DNA, 100 bp, Homo sapiens
tgttcgggaaataagtggacaaacacatctcatcaccctgagtatttagtaggagaagagattttccgcagatttccagtggccccactgatcccttatc

SEQ ID NO: 153084 - DNA, 125 bp, Homo sapiens
cgagaaaggaacaggcgccttcaaaagcccacttggcgatgggttacagtaagaggctgaaactgccgccaaccggatctgtaaggtgctggctgtcaaccaagagaacgagcacctgatggagg

SEQ ID NO: 153085 - DNA, 83 bp, Homo sapiens
tgtagataccagcctttcaaaccacctatcaagactcttccacctgctacttctaccgagccatctgtaatcttatcaaaaag

SEQ ID NO: 153086 - DNA, 100 bp, Homo sapiens
cttctctgctgccattgaaagctgtaacaagggtgtcaacatctgggccctggtggcggctgtggtgctcctctccagcagtgtgaatgacatccagcga

SEQ ID NO: 153087 - DNA, 90 bp, Homo sapiens
cagtggttggaaggacatgttcaatgatcttgtgctgtgaagacatttcccaagtgcttcatgttagccagcaaatctgacccacaaggc

SEQ ID NO: 153088 - DNA, 75 bp, Homo sapiens
cagactcatggggaagggccaggtccaggtaagaaccttgatgctgtccatgatatcactgtggcgtatcctcac

SEQ ID NO: 153089 - DNA, 90 bp, Homo sapiens
ggtttatttacttgatgtccaggggaacatcactcagaagtttgatgtaaatgaagtccctgaggtgaagaaagaggagactttgctgga

SEQ ID NO: 153090 - DNA, 121 bp, Homo sapiens
ctatgttcgggacttcaaagcaaaggttcagtatttccggttctggtgtcagattctgcctgatcaatgcaggagtcctgtacctctacttcagcaattacctacagattgatgaggaaga

SEQ ID NO: 153091 - DNA, 75 bp, Homo sapiens
ctatgtacctgttaccactttcaaaatatggaccaatatttacagtctttgctatgggaaaccgaatgacctttg

SEQ ID NO: 153092 - DNA, 75 bp, Homo sapiens
ctacctcttctatgaagacatgaaggaggaacagatggagtcggataactgttcaggaggagatgatgactggac

SEQ ID NO: 153093 - DNA, 73 bp, Homo sapiens
tgtcctttcaggaaggagccattatttatgtcatcaagaagaatgacgatgattcgggaactggagcctctcc

SEQ ID NO: 153094 - DNA, 82 bp, Homo sapiens
tttataaactgcctggccgaatcagccttttcacgctcaagctctattaccaggttttaaacttcgccatgatcgtgtcttc

SEQ ID NO: 153095 - DNA, 75 bp, Homo sapiens
aattaatcaagagcaagactcccaagcagctttgaggagctcaagcttgggaaaatggtgtgcattccttgtatc

SEQ ID NO: 153096 - DNA, 100 bp, Homo sapiens
agcggaaccatctgggagccttcctgatccgggagagtgagagctccccaggggagttctctgtgtctgtgaagctgtgggtgagcgtggaggatgctca

SEQ ID NO: 153097 - DNA, 75 bp, Homo sapiens
cgccgtcagagccgccctatcaggaaatctgaaatagagtactatgctatgttggctaaaactggtgtccatcac

SEQ ID NO: 153098 - DNA, 100 bp, Homo sapiens
ataagggcttaactcatatatttaacccccctccaaaaagggatcccaacaagccctcaggattcagaagtgttaaagctcctgtcactaaagtggctgc

SEQ ID NO: 153099 - DNA, 100 bp, Homo sapiens
aacaggtcataactcctggagaagggattgcccagtcagcaaaggttcagccctccaagatgttaaggacatgttcacttccagatctctcaaagctgtt

SEQ ID NO: 153100 - DNA, 49 bp, Homo sapiens
caggacatggagtatgaaagacgggccgcacggcacctgtgcccgccgc

SEQ ID NO: 153101 - DNA, 100 bp, Homo sapiens
caacctagtgggtgtaatacatcatgaactgcaggaaaatgcttggacagaagagatgagtactatttccactaaggcctagaattgcctactgtacaaa

SEQ ID NO: 153102 - DNA, 84 bp, Homo sapiens
gactatgtggtggacttggacacgtcccagctctctctgggcatctggaaaggtttcttttctccatggaaaactccaaagcct

SEQ ID NO: 153103 - DNA, 50 bp, Homo sapiens
gtgatttccagaggatttacactgtgtctgctttttcaacgtgggagaag

SEQ ID NO: 153104 - DNA, 74 bp, Homo sapiens
caatggccatgtcctacgtgaaggatgacatcttccgaatctacattaaagggttcagaaagacaggcaaaaac

SEQ ID NO: 153105 - DNA, 75 bp, Homo sapiens
gttttcaactatgctgacagcatttatcttcagatactatggaaatgcttccagactgcacacttttacttagag

SEQ ID NO: 153106 - DNA, 90 bp, Homo sapiens
cgcggactatgagagcggacgggccatacccaataaccaggtgcttggcaaaatcgagcgggccattgatcattaaaatccgtgcccaga

SEQ ID NO: 153107 - DNA, 96 bp, Homo sapiens
gccacgctcagcgccgagggcgagatcgtgcagtacatcgcggtgcacgtggtcccggaccagctcatggccttcggcggctccagcgagccgtgc

SEQ ID NO: 153108 - DNA, 100 bp, Homo sapiens
ctgagcgagaagaaaatcaagaagctgaatttccaggccttcgccgagctgtgcagatcatgattgagttctgtccagggggagccgtggacgccatcat

SEQ ID NO: 153109 - DNA, 90 bp, Homo sapiens
caggccgagttccgagagcctctgattctcctgtgccaggttcgagaacttgtcttggacaattgcaaatcaaatgatggaaaaattgag

SEQ ID NO: 153110 - DNA, 100 bp, Homo sapiens
ccggttcctgatgagctgtacggagtgtcagaagaggatgcactttaactccaatggcctggaacccaaagctttcttggactccgtactgttggtgtaa

SEQ ID NO: 153111 - DNA, 100 bp, Homo sapiens
gcaatatcaagcccattcaaacagaggcatggatgagcaatgtgaagagactacggccacggctcagtgctattctctttaagcttcagtttgaagagca

SEQ ID NO: 153112 - DNA, 82 bp, Homo sapiens
gtcgacgaccgacagggtggtgaaaggtgtggacactgccagcggctgcagccgacttggaatgacctgggagacaaataca

SEQ ID NO: 153113 - DNA, 90 bp, Homo sapiens
tcgcgctgggagctgtagaccggagctgttcctattcggccatcttggctcctccacaagtgtcttctctttagggatggtgaggttgga

SEQ ID NO: 153114 - DNA, 82 bp, Homo sapiens
cctgaaccgcgcggccgaaccctccgtgtgtcccggcatggatatccggaacaacctcactaggttgcatgagctggagaat

SEQ ID NO: 153115 - DNA, 83 bp, Homo sapiens
tggtgctgctgctgtagctgctcctgacaatgcagatcttcgtgaagactctgactggtaagaccatcaccctcgaggttgag

SEQ ID NO: 153116 - DNA, 88 bp, Homo sapiens
atcgtatcatcagtccaaaggggatcccactgctaaaaaggtatattcaagagcaaatgaccaagagccatgtgggtggtggttggct

SEQ ID NO: 153117 - DNA, 123 bp, Homo sapiens
aggcggaagaccgcgcgcagggcctgcagcgggagctggacggcgagcgcgagcggcgcgagaaaactgattcttgctattccaaatcctcttccacgttgacagcccttcagatatttcaac

SEQ ID NO: 153118 - DNA, 50 bp, Homo sapiens
cagcacttaagcaaacgggaattctcgctgggtaattccagaattgattg

SEQ ID NO: 153119 - DNA, 74 bp, Homo sapiens
gaaatggcattctctcaaaagcaggtgggtttggaggatttgggacaacatctacaactgcaggttctgcattc

SEQ ID NO: 153120 - DNA, 51 bp, Homo sapiens
ccgaaggctctccatcgaaggcaacattgttggtactagaggacccaaagt

SEQ ID NO: 153121 - DNA, 101 bp, Homo sapiens
cctcctggcccctcaaaacctggcccaagtcagcagccaagatggaggtgcagcgccggccctggttagtgaagtacggggacagcggggagcagattgcc

SEQ ID NO: 153122 - DNA, 101 bp, Homo sapiens
ccgtggtctcagcccaggacctccaggggaacaatgaggcctacgcagagctcatcgtccttgagctcgtccgcatggtgctgaatggctgaggaccttcc

SEQ ID NO: 153123 - DNA, 75 bp, Homo sapiens
gtacctgcctgggcagagactactaagcggaaaacatcttcagatggtctgggaggggctgaacgtggtgaagac

SEQ ID NO: 153124 - DNA, 82 bp, Homo sapiens
tgaaaagcttctacctggaattgaagtgctttggacaggtatcttggagatggccgcttccatctggagtctgtcatgattg

SEQ ID NO: 153125 - DNA, 100 bp, Homo sapiens
cacacccatcagcgcggctacctgctgacacggaaccctcacctcaacaaggtgatcatggagctcagcttggtctccatggggctggtggtgatggaat

SEQ ID NO: 153126 - DNA, 98 bp, Homo sapiens
aacatctgggagaagaaattaaagaacttcagcaaaggcttggagaagtccagggcgacaacaagaatcttcagctacttggagcaacagccattgag

SEQ ID NO: 153127 - DNA, 75 bp, Homo sapiens
ggagagtagcagtgccttggaccccaggtgctgggagaccgtgaagtgcaaagcagatggagtccaggccctcgg

SEQ ID NO: 153128 - DNA, 99 bp, Homo sapiens
gactctgaccgcaaacaaggagagcctactgagcagcctgagtgggctatgtccaaactgggtcttcggcaggttacaggagttactagagtcactatc

SEQ ID NO: 153129 - DNA, 83 bp, Homo sapiens
gctcccttctgccccagctccgtctcggcggcggcggatggaaatcatattatgtagaatacttgggtgacatctgcctgaga

SEQ ID NO: 153130 - DNA, 100 bp, Homo sapiens
caggctcgcctcgactccaaatggttgaaaacagatatacaggttaagaaggcttttttgctctgtagcctggacgtactttgaagcccctccccacgat

SEQ ID NO: 153131 - DNA, 75 bp, Homo sapiens
aaatcgtcatctttctgaaatggtgatgaaattggaattgggtttacatgaggaagctcataaaatggtgagaga

SEQ ID NO: 153132 - DNA, 82 bp, Homo sapiens
ggtcctcggatcccgagcgcggggaggcagaccggtttggtgcacctcgatttggaggaagtagggcagggcccttatctgg

SEQ ID NO: 153133 - DNA, 75 bp, Homo sapiens
ggagaggcgagctcgcgatgagtggtctcggcaggctcttcgggaaggtttcacctgtgattccctggatggtta

SEQ ID NO: 153134 - DNA, 51 bp, Homo sapiens
tttctcaagcactgtgatcttcaaatatttgcttgtaaatgcatcacgaag

SEQ ID NO: 153135 - DNA, 85 bp, Homo sapiens
acatgttcctgcaagaggaggcaattgacaggaactacgtcccggggaagagagtccggagggctgtgctaccccaagaagagga

SEQ ID NO: 153136 - DNA, 95 bp, Homo sapiens
cagatatcttgaaaagctgccagaaaggaccagttacagaagtggatccgcggtaatgtgagtgcatgtgcgaactctgttttcatatttgacga

SEQ ID NO: 153137 - DNA, 75 bp, Homo sapiens
agaaggaaattgaaggaacttggagttaatggtctaatttatgatagatatctccggagcatttggataatgtga

SEQ ID NO: 153138 - DNA, 75 bp, Homo sapiens
tagacctttcacatgggaaaaaagatgcttttgttttggaggcagcttggatcttaaaagcaagagcgctaacag

SEQ ID NO: 153139 - DNA, 100 bp, Homo sapiens
ggcctaccacagcttcctggtggagcccatcagctgccacgcctggaacaaggaccgcaccctttttggtgttgagccagacttgaccagggaaggcggc

SEQ ID NO: 153140 - DNA, 82 bp, Homo sapiens
cggagaggcacggaggagccgctggggctgccgccacggccgcccggagacgaagttatacggaagcgtctcctcattgatg

SEQ ID NO: 153141 - DNA, 80 bp, Homo sapiens
caggtgtggcgtctctgtccccatctggttttagtcaggatggctaaaggtgaccccaagaaaccaaagggcaagatgtc

SEQ ID NO: 153142 - DNA, 90 bp, Homo sapiens
gtgaatttcctgaagaacgttggggagagtgtggcagctgcccttagccctctggaaactgaaaggccaacgtgggagacaaagaagagc

SEQ ID NO: 153143 - DNA, 50 bp, Homo sapiens
ccgacaacagcctggcgtccgccacgcttcctgatttctcccgattcctt

SEQ ID NO: 153144 - DNA, 75 bp, Homo sapiens
gaagactgcatcgccaagatcatggtttttgccaatccagaagactgtgtagcatttggcaaaggagaaaatgcc

SEQ ID NO: 153145 - DNA, 99 bp, Homo sapiens
cctgctgtggattgtcagcagctgcctctgcagagcctggacggctccctccacgtcccaggagattttgaagacacacatcgcacactggtggtctcc

SEQ ID NO: 153146 - DNA, 98 bp, Homo sapiens
acaaggttctggacaagatgaagtctttctgccaggtgatactatcaaccaaagcaccctgccctcacagcagaaccgtttcccagactaccttgaag

SEQ ID NO: 153147 - DNA, 101 bp, Homo sapiens
gattagatgatccaagtcaccaagaaattactgtctcaagtgatacgacacgaagatcgattgagaagttattagaatgggaaaacaataggttataccac

SEQ ID NO: 153148 - DNA, 50 bp, Homo sapiens
gcgtcgtctgcgaccgctgccttctcggatcttgtagaaaatttcagctg

SEQ ID NO: 153149 - DNA, 100 bp, Homo sapiens
gaagcccttagccctgctaaaggccaggtgggatgtgtgtgggctgaaattccgagctgcggttgtgcatgagaatacacccttcgtggtaccccatctc

SEQ ID NO: 153150 - DNA, 51 bp, Homo sapiens
tttcaaatgatccaagacatcctcaaatcccaggtggaaagaagtttgatt

SEQ ID NO: 153151 - DNA, 51 bp, Homo sapiens
tcagtatcttgccacagaaaccatacaaaaaagaggcacagttagatgaag

SEQ ID NO: 153152 - DNA, 50 bp, Homo sapiens
ccagatccatttacactttacaggcaagttaaagtcttcagagccctgta

SEQ ID NO: 153153 - DNA, 98 bp, Homo sapiens
gacgcacagccaggacatcctggaacctgggaaagggtatccaaaccttgaaacctttgctctagatgtcaggcttgtttttgacaactgtgaaacat

SEQ ID NO: 153154 - DNA, 82 bp, Homo sapiens
gaatgatttatagctaagactccaggacacccctgaagccgagaaatgggatgatcatggtgattttactgctgcttgtggc

SEQ ID NO: 153155 - DNA, 75 bp, Homo sapiens
ggtgaatcccctgtttgagaaaaggcctaagaattttggcattgatgtcagtattgaatatggtggtgaggcgtg

SEQ ID NO: 153156 - DNA, 100 bp, Homo sapiens
acgggagcggcccgcacacctgagccgcccggagaggagcctcggccccgtacccaggacttgacacagcaagcaaaagacatacagaacataacagtcc

SEQ ID NO: 153157 - DNA, 75 bp, Homo sapiens
ggcccttagaggctgaaggtgcccagctgcagggcggcagtaatgagagcactgcagtttcctcctgaaggctgg

SEQ ID NO: 153158 - DNA, 83 bp, Homo sapiens
cggacggaagaaaaggtctggccggtcaacaacggttccagcctcagggatgagtgcatcacaaacctactggtgtttggctt

SEQ ID NO: 153159 - DNA, 75 bp, Homo sapiens
aatcaagcgagacccgccggcctacatcgaggagaaatcctggctgacattgacttctccactgcaaccatcgag

SEQ ID NO: 153160 - DNA, 50 bp, Homo sapiens
cactttccggggtgcacagcaagtggcaggtgacagcagggacatgtctc

SEQ ID NO: 153161 - DNA, 100 bp, Homo sapiens
ctacctgtggctgttcctcctgctgctgcccctggccctgcacctggccgactgcagcagtggcccagggcaaagagtgtgcgtcatcgatgagattggg

SEQ ID NO: 153162 - DNA, 100 bp, Homo sapiens
atggcggcggaagaggaggctgcggcgggaggtgaggttgccggtggcgaggcgacggccccaggttcaaggtcagctgccgccattaatgattcccgta

SEQ ID NO: 153163 - DNA, 100 bp, Homo sapiens
tccgggcctccaaggaacttaagcaaaggcaaccactgagaaaacggaaccgaatagtcaagaggacaagaatgatggtggaaaatcaagaaaagggaat

SEQ ID NO: 153164 - DNA, 96 bp, Homo sapiens
aacaacaacaacaactgcgaggaaaatgagcagtctctgcccccgccggccggcctcaacagttctgaagaaagtctccaaatacattcaagagca

SEQ ID NO: 153165 - DNA, 83 bp, Homo sapiens
gttggcctttcaggaagagtgcttaaggtaaaattcccccagaaagtacactgatatttaatattgatctcctggagattcga

SEQ ID NO: 153166 - DNA, 75 bp, Homo sapiens
gagacagagtcaacaattcaattggtggatccataaagaacccagccaacccgcagagggaggggaggggctgag

SEQ ID NO: 153167 - DNA, 100 bp, Homo sapiens
ggaaagactatctcccagttggacagcggatgcctgggactcgtttcattgctttcaaagttcctttgcaaaagacaccttggaagagcttaaggaaata

SEQ ID NO: 153168 - DNA, 88 bp, Homo sapiens
ctgctctccaaggagcatgctcgcagctggattgtcaatgaggcagatcagattccgatttgacgggcaaccaatcaatgaaacagac

SEQ ID NO: 153169 - DNA, 100 bp, Homo sapiens
agacagttcactgttgcagacattgaaattggccatttgtaagataaaaggttcagaaaagatcagtaagtctgaggaaaccttactaactccagagcga

SEQ ID NO: 153170 - DNA, 96 bp, Homo sapiens
gaaaggaattgttttggcctaggatcatccaggttaaagctgaagctcaacaaagatatagtgatctctgtgggcatttataatctggtccagaag

SEQ ID NO: 153171 - DNA, 75 bp, Homo sapiens
gcccgggagatgggctacttctcccagtacgtggcctgggtgagagaggaggtggctggggagctgaagtaccac

SEQ ID NO: 153172 - DNA, 100 bp, Homo sapiens
agatcgagagcactgacacggcctgcatcgggcccacgctcagatgtcctcctcgcactttcttaccagccctttgcaaaatttttcttgatgaaagtgc

SEQ ID NO: 153173 - DNA, 52 bp, Homo sapiens
aaggacaagtcattttctgatcaaagaaggtggcctccatgaaccagcgccg

SEQ ID NO: 153174 - DNA, 75 bp, Homo sapiens
gtggccaagacctctgctgcacagaagacctatggagcattcatgatctagaagcaagataccaggaaagccaag

SEQ ID NO: 153175 - DNA, 89 bp, Homo sapiens
accagctggatcgacccccgggacagatgatgagagtaatgttgcagttaccagacccgattcagaaagttcctgtgtgctgagtgaac

SEQ ID NO: 153176 - DNA, 88 bp, Homo sapiens
ggagaatctgctgtcgcctgcagctgctcgcctgtctccgtcggaagggagcccaagctttgcagagttattctacctatggaaatcc

SEQ ID NO: 153177 - DNA, 82 bp, Homo sapiens
gggtggggtcgacgacgaagacagcggagaggagagcggtgcggaggactgaggagccttcacgtaaatgggtccagtcatg

SEQ ID NO: 153178 - DNA, 90 bp, Homo sapiens
ttgaggccattaatatcaccaacaatgagagagtggttgtaaaaatcctgaagcgcattttggaggaccaggaggaaaacccgctgcccg

SEQ ID NO: 153179 - DNA, 80 bp, Homo sapiens
gaggcacacctggccgcactgcgcgagcggctgcgcgagaaggcatagcgtggcgtcagcccagctgcaggagaagctgg

SEQ ID NO: 153180 - DNA, 75 bp, Homo sapiens
gagtcaacaggttggggcccaaaggcacagcgatcctgttctcagattgggctgcccttgagatggagttgctgc

SEQ ID NO: 153181 - DNA, 50 bp, Homo sapiens
ctgaggccccagaactatcttttcgaattaaacaaccaccatgtcgagca

SEQ ID NO: 153182 - DNA, 75 bp, Homo sapiens
gaagtcagggtactgggccagtcatttagccgggcgaaagtatcatatcaggacagtcattttgtttactcattc

SEQ ID NO: 153183 - DNA, 74 bp, Homo sapiens
ctgtgatggctggaagttcctctgtaccaggtccaagacaagctgctgctatctgcgtgccacttactggtctc

SEQ ID NO: 153184 - DNA, 100 bp, Homo sapiens
cggcgaggagcgagcgctgcgaggtggcggcctgaggtcctgaacgaggctgtgggggccctgatgtaccacaccatcactctcaccagggaggacctgg

SEQ ID NO: 153185 - DNA, 75 bp, Homo sapiens
gtttctccggggcaaagcagcaaatgcattccacgtgtatcaggcctctgagcccaagtctgcacgtattcatcc

SEQ ID NO: 153186 - DNA, 74 bp, Homo sapiens
actactggggccagggaaccctggtcaccgtctcctcaggtaaataccagctgtcccctacagtgaatatgccc

SEQ ID NO: 153187 - DNA, 101 bp, Homo sapiens
ggacagacaattgttcagttgcaaaaagaaactggagccaccatcaagctgtctaagtccaaagatttttacccaggtgttggagcgggccggagagaagt

SEQ ID NO: 153188 - DNA, 50 bp, Homo sapiens
gccgcggcactgatccccacagtcacatcgatcagacaacaacatggcag

SEQ ID NO: 153189 - DNA, 75 bp, Homo sapiens
cttctcagcagcaacatccccaaacagcggcgtttcacggtggcacatacatgcaggaacgaatgcaggaatttg

SEQ ID NO: 153190 - DNA, 82 bp, Homo sapiens
acccccctattcaagttcatgtcacgctgggtaatgaggatttgactgtgaagattggcgctgttccactggctgctttggg

SEQ ID NO: 153191 - DNA, 100 bp, Homo sapiens
agcgtccatgaagcagtgtttgaggcacgagagcagaaggaaagaccacagcaagattctttcattcgtctcctcctagcctgggggaccaggctcgaac

SEQ ID NO: 153192 - DNA, 82 bp, Homo sapiens
ctcctcccctggctggagtgccctgcctggagggagccctcctggctgggggcaagcacgagtacacgagacaggattgaga

SEQ ID NO: 153193 - DNA, 80 bp, Homo sapiens
tcacaggacagtctggcctctaactgctctgccaaagaaatggggctgttgtggttccgactataaacagtacgtgtttg

SEQ ID NO: 153194 - DNA, 100 bp, Homo sapiens
gtttggagccctgcagactgtccgcctggagcgttacaaggccttctacattaccggcccagaggcagagctacacaaccatggaatccaaattaattcc

SEQ ID NO: 153195 - DNA, 143 bp, Homo sapiens
agctcctcctggaaaaagcaagctgaagacatcaagaagatcttcgagttcaaagagaccctcggaacggctgttttgctgcagcttctgaagtgttaaagcacttgaaggaacgatttccgcctaatagtcagcacgcccag

SEQ ID NO: 153196 - DNA, 96 bp, Homo sapiens
agaattggggatacatccctatggtcatcagccaactgctgcattcagtaaaaataaggtgcccagcagagatttgaatataacctgccgctttgc

SEQ ID NO: 153197 - DNA, 75 bp, Homo sapiens
gtcgaaggccgtgaggtatttttctaaggaaatggaaaattttgtccagagttcaggggaagatggtattgtggt

SEQ ID NO: 153198 - DNA, 82 bp, Homo sapiens
tctctcatctcgctcggctgcgggaaatcgggctgaagcgactgagtccgcgatggagggaaccctactctggaaactgtca

SEQ ID NO: 153199 - DNA, 98 bp, Homo sapiens
agaacttcgagatggattccaacatcctgctagacttgttaaggtaagcagctgctccctttgtccagcagtgtacatagcagtgtgggacaggtgac

SEQ ID NO: 153200 - DNA, 100 bp, Homo sapiens
cagccacttccttctgtggagcaggtacccctgtccctggtccctgggcccagagggcagaggtggaggagacactgaagcgactgcagagccagaaggg

SEQ ID NO: 153201 - DNA, 75 bp, Homo sapiens
cggcgacaagggtgttcccgaactagagtggtcatccgtccttggctcaggatttggagagcttgcaccaccaaa

SEQ ID NO: 153202 - DNA, 82 bp, Homo sapiens
ccggccgtacgcggtgctgcgagggcagaacctggattatggtgacaagctgaacatggagctgagtgagaaatacaagctg

SEQ ID NO: 153203 - DNA, 95 bp, Homo sapiens
cggatatttaagtacaatggtgggcttaattttagtttttggctttcacccccaaccagtgaccaaagacttgaccactcaaagtccagctcccc

SEQ ID NO: 153204 - DNA, 75 bp, Homo sapiens
aatacagaagttaagatttattgtcaaccaagctgaatatctgtattctacacctgaacagctttcaaaaaggct

SEQ ID NO: 153205 - DNA, 71 bp, Homo sapiens
cggggacgccagagctcctgagaagatgtcagcaatacagattgcccgtgaggcagaggctgccatctacc

SEQ ID NO: 153206 - DNA, 75 bp, Homo sapiens
catggaaggggcagtacaagcttacgtctctgctcttcagtacaatcctgtttagaaacatcaactggaatcaat

SEQ ID NO: 153207 - DNA, 100 bp, Homo sapiens
gagaagacaagaacatgctctaaagcccttcacagcaagacccaggaagccgcgggcaaactcagactcgaaggtgaagtcatgggcattgggcgttcat

SEQ ID NO: 153208 - DNA, 100 bp, Homo sapiens
aagacactacaggaagtggagctacagatagtaaagatgatgatgacattgacctctttggatctgatgatgaggagcaccagaaatgtcagcagcccag

SEQ ID NO: 153209 - DNA, 104 bp, Homo sapiens
ccagcatcaagatgatttatggtaataagtacagctattggaatcagatgcaaagatggtgttgtctttggggtagaaaaattagtcctttctaaactttatga

SEQ ID NO: 153210 - DNA, 87 bp, Homo sapiens
cgacgggttggggatggcgtgcagcgcaaccacgagacggccttccaaggaacctacaagcagcaattggcgcctattatgactttg

SEQ ID NO: 153211 - DNA, 133 bp, Homo sapiens
tttgagcccgcagacaacaagtgtctgttaagagctaccgatgggaagaagaagatcagcactgtggtgagcccaatccggaacttgtcagacgggcagaagtgccgagtgtgtctggcctggctggcctggc

SEQ ID NO: 153212 - DNA, 98 bp, Homo sapiens
tgcagagctcccagggcggacagcagcctcgggtgcaatcctggagccccccagtgaggactctttttgatcagaacaatgctgcaaaaaaagaagag

SEQ ID NO: 153213 - DNA, 100 bp, Homo sapiens
ctctgtggagaacacccccccatggaggcgaggtagagttggggtcgcagcttctcaataggtttggcatggacaagatctatgaaggccaagtggaggt

SEQ ID NO: 153214 - DNA, 98 bp, Homo sapiens
atctcgcactaccctgactacagctggagcgcccagaggcgagccctggtggaggaagagctcatcctgtttgggctcagtaatcagctggctgtgac

SEQ ID NO: 153215 - DNA, 50 bp, Homo sapiens
ggattgatgaacaatgaagcagctcagttggttgaagccatggataacag

SEQ ID NO: 153216 - DNA, 96 bp, Homo sapiens
ctgcatggtttcaagggacgtaccaggaggatggtgcccaggtgacacagtggtcttgtccctgaagaagttcctgaagcaggatacatatgacgt

SEQ ID NO: 153217 - DNA, 82 bp, Homo sapiens
gacaaagccgcctgatggagcgttggctgtgaggagacagagcatcccagacacctagctgttgggcagaagagggtgcaga

SEQ ID NO: 153218 - DNA, 75 bp, Homo sapiens
cgagggttgaagattgtgaagcaatagcctaagatccttgcactgctggatgctctgagtacggtgcatagtcag

SEQ ID NO: 153219 - DNA, 74 bp, Homo sapiens
ttgaatattgtgaccacacagttctccatgagttggacagataccaaagaggacctagaggatcaagacataat

SEQ ID NO: 153220 - DNA, 132 bp, Homo sapiens
gacttgctctaattaaaaaatattatggaacgaaagatcctgttccaggctattctgttccagcagcagaacacaggtggagccgccaccaaaatgcagattttcgtgaaaacccttacggggaagaccatc

SEQ ID NO: 153221 - DNA, 83 bp, Homo sapiens
gtgggacaggccacgctgtccgtccgcagtaccgacgcctgcaggtggagccatcgaagcccccacccacaggctgacagagg

SEQ ID NO: 153222 - DNA, 90 bp, Homo sapiens
cccgtctgcttcgggcctctggaatttagcgctcgcccagctagccgcagggggatatgagactttctactcggaatatcctgagtgttg

SEQ ID NO: 153223 - DNA, 100 bp, Homo sapiens
agtggttgtgtggtcgcgtctcggaaaccggtagcgcttgcagcatgagtcaacctatttgatttcttgacaagaccacaatctgatcccaaagatgtgc

SEQ ID NO: 153224 - DNA, 100 bp, Homo sapiens
tacaacagacagtgagtgctaaaggcccccctgaaaaacggatgagacttcattttaacagtgtatgccagggaacacacattctctttcgagaattcag

SEQ ID NO: 153225 - DNA, 90 bp, Homo sapiens
ggatcctgggaagcagagtgtctggatggaacctgagctgggtctctgactcacttctgactttagggaatgtcttgggaaacatgaggt

SEQ ID NO: 153226 - DNA, 82 bp, Homo sapiens
tgaatttccatgtcaacatagtccaggacagagcgggatgccaccagcttgtccaaagggaagttccaggagctcctggtgg

SEQ ID NO: 153227 - DNA, 96 bp, Homo sapiens
gtcatttctggagaagccctgggaataaagctgccagagtctctcctggaggcggatcttagctttctgtctctggaagttcctactccacccctg

SEQ ID NO: 153228 - DNA, 75 bp, Homo sapiens
cccgcggtggagcgggacacgaacgtgatccagagacaatggccccgatgggatggagcccgaaggcgtcatcga

SEQ ID NO: 153229 - DNA, 97 bp, Homo sapiens
ctgtgggctggtgtgtggaactggtatgtgcactgcgcgtgaccagccgggcccgcagccgcatcctcagggcagggggcaagatcctcactttcga

SEQ ID NO: 153230 - DNA, 50 bp, Homo sapiens
gagtgaggctgtggagtggcagcagaagggggactctggaggccctcttg

SEQ ID NO: 153231 - DNA, 82 bp, Homo sapiens
tggtgtttctccaaaagatgttggacacaatatctatattctggcccatcaggtcaccccagctctgatatttgccatcaca

SEQ ID NO: 153232 - DNA, 75 bp, Homo sapiens
cctgcagaacggctgcctaatttacagcaaccatgagcattaaagctaggtcctgaatcattcaagtttgatggt

SEQ ID NO: 153233 - DNA, 75 bp, Homo sapiens
caagatggcggacaaaacgccaggcggatctcagaaggccagttcaaaggttatcaatactctggctgaccatca

SEQ ID NO: 153234 - DNA, 50 bp, Homo sapiens
cagaaacgtcactatcaagaagttccatgccattgcagtgtcaactaggc

SEQ ID NO: 153235 - DNA, 75 bp, Homo sapiens
cctcatggggaaaatctccccggtgactttcagctcttggtgctggacaggcatctttgtttgggaacaaccaac

SEQ ID NO: 153236 - DNA, 100 bp, Homo sapiens
cagatcgacaagtccgggagctgggcggccatttaccaggcgagtctgcggacaccagaactgacctgggagcgagtgagatctcaagttgaccatgtga

SEQ ID NO: 153237 - DNA, 74 bp, Homo sapiens
gattcgcagtggtcgcttcttctccttggtgattgaagcctccgatgttgtcctagaggtgttggatgccagag

SEQ ID NO: 153238 - DNA, 82 bp, Homo sapiens
ggcggcggcaagacctctccccctcggaggcggcgggcggaggcggcggattttgcaagaacgaggctcaaggatgtgaggg

SEQ ID NO: 153239 - DNA, 75 bp, Homo sapiens
gcttagtcctgggagccgcctccgtcgccgccgtcagagccgccctatcaggaaataacatcaagatttgtaatg

SEQ ID NO: 153240 - DNA, 101 bp, Homo sapiens
ccccatcgagctgctcatcaacgacaaggttgtgcccacgtgcctcagggccttggtagaaatggcccgggtagggggtgcctcctccctggagaatactg

SEQ ID NO: 153241 - DNA, 100 bp, Homo sapiens
ggaaatgaaaaagttctggaaaggtaacagctatcagagtcactgctagttggattgaagcacacctgccagatgattctaaagacacatggaagaagag

SEQ ID NO: 153242 - DNA, 100 bp, Homo sapiens
aacagcttatagctgctacaatttctagtcagatttcaggttcagtgacatcagaaaatgtgtccagagattacaagggtgggtcactctgtctgtcggg

SEQ ID NO: 153243 - DNA, 75 bp, Homo sapiens
tggaattttggcatcaaggacaaacccaccttcatcaaagggttttgtgcaccgagggcggcctgagcctctgga

SEQ ID NO: 153244 - DNA, 98 bp, Homo sapiens
ctgaagcaggagaaccgggaggcccggcggaggatcgacctcaacctggatatcagcccccagcggcccaggcccagagatcccagccatcatgtcca

SEQ ID NO: 153245 - DNA, 100 bp, Homo sapiens
cagcggcaggctcaggtgcagccgctgttttcggctttgtgagaaaccttaccatcaaacacgatggccagcaacgttaccaacaagacagatcctcgct

SEQ ID NO: 153246 - DNA, 89 bp, Homo sapiens
gaaaccccgatcacaaagatacgaatctcttaaggggaccctaaaaagtctgccagtcgccctgggagtcgggctgggagtcgagccgg

SEQ ID NO: 153247 - DNA, 53 bp, Homo sapiens
aagaaacccagcttgatatgttggaatctggtggacagtaacaaactttggtg

SEQ ID NO: 153248 - DNA, 99 bp, Homo sapiens
aactacttcctattgatttgattaaaatttttgatgaaaatgagctggaggcgcagttgtgtagcagttgagtaatgctggttagctgttaaggtggcg

SEQ ID NO: 153249 - DNA, 82 bp, Homo sapiens
tctacccagaattcaattaaagtggctcagcaacgaatcagtattcagcagctcttcactattacctccaggcaggagctgt

SEQ ID NO: 153250 - DNA, 116 bp, Homo sapiens
ttggaatatcgaattcgtcagcaaacagacatttacaaacagatacgtgctaataagccttgctgttagaggctctttcccagaagttggacgaagaggctcaggcgttgctgttt

SEQ ID NO: 153251 - DNA, 96 bp, Homo sapiens
acttgctggagggagacttggacaaggccattgaagtctacaagaaagcagtggacttatgttcctgaggaagaattgaaggcagcagaaatagat

SEQ ID NO: 153252 - DNA, 100 bp, Homo sapiens
gggcccctcccccaggcctctgggctctgaggtacctgcacatgttgttctttgtcagtgctgtcaagtgtgtgccagggtgatccatggtcactttccg

SEQ ID NO: 153253 - DNA, 90 bp, Homo sapiens
cgaaaataccgagtttgtaatgtgactagacggccagccagtcatcaaacggatttcagtcataatcggttgtctaactggaacatcagc

SEQ ID NO: 153254 - DNA, 75 bp, Homo sapiens
cgaattcgaatcaccctaacaagccgcaacgtaaaatccttggaaaagggtgctgtgattgtctccacgccccag

SEQ ID NO: 153255 - DNA, 100 bp, Homo sapiens
aagaggcgcaaacaagccaatcccaggaggaaaaacggttccggagtctcaccactgcatttttcagagacgccatgggcttcttattaatgtttgacct

SEQ ID NO: 153256 - DNA, 100 bp, Homo sapiens
ggaagtgaaagtcctctttttctttgtaccacttactgaggtaaatttggaaggcaaagccagccctctgtcacttctacaaatggcctccccaagtggc

SEQ ID NO: 153257 - DNA, 90 bp, Homo sapiens
gcgatgcgggccccgcccgtcgcctcaggttggctggctgtggcctcacagctgaggactgcaaggaccttgcctttgggctgagagcca

SEQ ID NO: 153258 - DNA, 75 bp, Homo sapiens
aagcgcttcctggatgagaagagcggcagtttcgtgagcgacctcagcagggctgagccaggcccctcctgtgtc

SEQ ID NO: 153259 - DNA, 100 bp, Homo sapiens
ccaggatgaggagacatgttggaactcagaccagcgccgtgaagaacctggtggacagcagcgtctacttccgcagcgtggagggtctgctcaaacaggc

SEQ ID NO: 153260 - DNA, 75 bp, Homo sapiens
aaaatgtcaacaaattgatgggcacagagcagatgctgtcccatggcaccgctgatgtggtcttagaggcctgca

SEQ ID NO: 153261 - DNA, 50 bp, Homo sapiens
gccgagctggacccggaccggttttgggtcattcctgtcccaatcagctg

SEQ ID NO: 153262 - DNA, 100 bp, Homo sapiens
ggggaggagtttcatgaagagcccaaaacctattacgaactcaaaagtcaaccgctgaagagcagggttttggccaaattgggcgagggcacaaaataac

SEQ ID NO: 153263 - DNA, 90 bp, Homo sapiens
aatcgccaatgccaactcccacatcaaggagcacgtgaaacagctagagaaagcggtttcaggcaaggagccgagattcgtgctgcgggc

SEQ ID NO: 153264 - DNA, 100 bp, Homo sapiens
cagcaattagtttgcagatgttctgctttgtcgaagaactggacagatttactacgtttccgagggtggaagttgatgggtcgaaactaaatgtgaccag

SEQ ID NO: 153265 - DNA, 101 bp, Homo sapiens
tcgccctctgggaggcttaccgagagtttgaaagtgcgattgtggaagctgctcggttatggctgcagcttcgattgccaatattgtaaaaagttctcttg

SEQ ID NO: 153266 - DNA, 100 bp, Homo sapiens
cttttctccacaaccacttcccaggaggagttggaaactctggagagcaacctcttagcacagcagaattcactgaaagctcaaaaacagcagcaagaac

SEQ ID NO: 153267 - DNA, 100 bp, Homo sapiens
ctgttggcagccgtttgtcttgtcagaggcgggcatgaaatcattttatcagcatttgataactttaaagagatgcctggaatgatgtcgtcagtaatgc

SEQ ID NO: 153268 - DNA, 82 bp, Homo sapiens
cccgcccgccttccgccgtctcttcgagttcttcgtgctgctcaagatctggtggctggacccagagctgacctatggctgc

SEQ ID NO: 153269 - DNA, 82 bp, Homo sapiens
ctgcctggtgcagaggatcctggaggcctgggaagccaacgaccacacgcaataacgaaggaggcccaacttcattcaataa

SEQ ID NO: 153270 - DNA, 75 bp, Homo sapiens
gtggcagtattcggcttggagaaaaggtgttggggatgtcctttgcactgaccctgaactgccagattgacaaaa

SEQ ID NO: 153271 - DNA, 100 bp, Homo sapiens
gggtgctgctggttagtgtgctctgagggagggtccgagccagccgctgttttgccggaggagcccctcaggccaaccttcgagatctgcggtctggggt

SEQ ID NO: 153272 - DNA, 75 bp, Homo sapiens
cctgtggccattgaactatggaaggtgatttgaagatattaaagctagaaattggaactagaaaatcaaaagaat

SEQ ID NO: 153273 - DNA, 101 bp, Homo sapiens
caagcgaagccttgaaaaagctgccctgagacggtgtcccgccgaaaggccatcgaagacggcaatttggaggaaatggaagaggaagtacggcttaagaa

SEQ ID NO: 153274 - DNA, 83 bp, Homo sapiens
cacatccaggcgggccagtgcggcaaccagatcggcgccaaggtgagaagccctaccactgcaactgggacggctgcggctgg

SEQ ID NO: 153275 - DNA, 97 bp, Homo sapiens
ctcctgcaaaagtggaagcgaagccgaaaaaggcagcagcgaaggaaaggagatgtggcattactgaactgtacagccattgtgaataccagcaatg

SEQ ID NO: 153276 - DNA, 88 bp, Homo sapiens
acgaagacagtccctggatcaccgacagcacagacagaatccctgctaccagtggagccccctgagctgcccgctgatctgcagcact

SEQ ID NO: 153277 - DNA, 83 bp, Homo sapiens
gtctggagtgcgtgggggaccggctgttggcgggagcacgtgaattgcctctgcttacgttcaggccctgtcctaaacccagc

SEQ ID NO: 153278 - DNA, 100 bp, Homo sapiens
attccaagtaactcttatttgggatcatgtaccgcaagtcctgtgcatcatcagcggcctgtctcatcgcctctgccgggtaccagtccttctgctcccc

SEQ ID NO: 153279 - DNA, 90 bp, Homo sapiens
cttgtatagtgaaatccatgagcgtggatgagacagataaggtactgctagttgaacagctcttccgcaaggagttccaaccatttttga

SEQ ID NO: 153280 - DNA, 98 bp, Homo sapiens
agggtctcaatgcccacagaaaatattgaaactaatctggattcactccctctggttgatacccactcaaaaaggacacttctgattaagacggttga

SEQ ID NO: 153281 - DNA, 82 bp, Homo sapiens
agatggtgcagaagaaaccagccgaacttcagggtttccaccgttcgttcaagcattgtcccagatatagccgttggtacaa

SEQ ID NO: 153282 - DNA, 100 bp, Homo sapiens
tcatcctagaccaagtgataaactgaaccctaaaacaattaatccggtaaaataccatgaagattttgaaaaaacaaaggggagaggctttactcccgtc

SEQ ID NO: 153283 - DNA, 88 bp, Homo sapiens
aactctacatgaaaagtctgttaaaaatctttgcggatccgaaaagtgtggcagaaaaggaaatgttcagttaaaaatggttttctga

SEQ ID NO: 153284 - DNA, 74 bp, Homo sapiens
tctcaagctcatattttgaagtgtttacgggccgccatggcatcagatgaaggcaaactttttgttggagggct

SEQ ID NO: 153285 - DNA, 95 bp, Homo sapiens
aacttgaggaattttggattgattttaatcttgggagtcagactctctcattctacattgctggagataatgattagagacggggtttcaccacg

SEQ ID NO: 153286 - DNA, 51 bp, Homo sapiens
ggacggcgagcgcgagcggcgcgagaaagttagcactctacgtatatgaat

SEQ ID NO: 153287 - DNA, 99 bp, Homo sapiens
caggtctttggagaattacgaaccatgttcaagtcaaaactgcagctgctaccatgggccaccaccacctatcatgacagatggtgaagatgcggatta

SEQ ID NO: 153288 - DNA, 80 bp, Homo sapiens
ggccgagggtggccctaggggcagcgagcaagacagcaagcagtctcccgagcggcgcccgcctcccgccggtgcccgcg

SEQ ID NO: 153289 - DNA, 75 bp, Homo sapiens
ggaagacagggtgaatttatcacagaggaataacgagggagaggagaaagctcaaatagctataactgtaccaaa

SEQ ID NO: 153290 - DNA, 137 bp, Homo sapiens
ctttcgctggctgtgcttgcggagcactttgggtttcatttgtaaaggagccggagccccagattactgattttgggcactccaagattttgggagagacctctctcatgagaaccttatgtggaacccccacctac

SEQ ID NO: 153291 - DNA, 90 bp, Homo sapiens
tcagcccagagcgcccatcagatgaggactccaagagcacagagtccatcttcctgacccagtgccggatggagtgctgtgatgtgccag

SEQ ID NO: 153292 - DNA, 82 bp, Homo sapiens
tcagatccgcgcacgactagagggcgggaaagatttgagctacgcctgcgcagaggagatctataaggacaggcagaaattc

SEQ ID NO: 153293 - DNA, 82 bp, Homo sapiens
cattcggaggctggtgtccagggtctcagcgcgggggacgactcaggagtgtatggtgaataaattcaagaaaacatctatt

SEQ ID NO: 153294 - DNA, 100 bp, Homo sapiens
atgacatgctggttgaaatcctgagagcaagcaagggtcatctttctgaaggattggttactaaatggtacagatctccacgtcttttactttctcctaa

SEQ ID NO: 153295 - DNA, 101 bp, Homo sapiens
gaaggaacgaggcaaggagctaaagcagcgtgcgttcagccctgggactcggtgaaatacctggagtgctcagctctcacccagagaggcctgaaaaccgt

SEQ ID NO: 153296 - DNA, 75 bp, Homo sapiens
cgccgacggtcttcagggtcacgagatgagcgctatcggtcagcttcggggagttttgcctggctcacctgttac

SEQ ID NO: 153297 - DNA, 80 bp, Homo sapiens
cagaaggatatcgacgtcgtgatccagaagtccagagctgaggactgcctgtttgcagcgcgagcttcggcctcggctct

SEQ ID NO: 153298 - DNA, 75 bp, Homo sapiens
cctgcccaaagttgtgtcccgagctgagaacctttccgttcctgtcattggagcagcagtgttgtactgctactt

SEQ ID NO: 153299 - DNA, 100 bp, Homo sapiens
cgacgccgcggagatggagcgctgtctggcgcgcaggagcggagacctggacgccctggacaagcagcacagaacccgagcaacttcccgagaagagaag

SEQ ID NO: 153300 - DNA, 90 bp, Homo sapiens
ggaaggtctcacctgaggtgaaccttcgaccttggacttctcagcctccagaatgggtatcggtacagcaatcggagagctgcctccata

SEQ ID NO: 153301 - DNA, 100 bp, Homo sapiens
ctgcgcactcacttggcggccgcgcccgctggcgtcctcttgttctcttccagatcttaccaatatatttgagtccttcctgcctcagttattggcctat

SEQ ID NO: 153302 - DNA, 98 bp, Homo sapiens
tatttaaggatggctgacttaccgtatcagttatggctgcagcttcgattgccaatattgtaaaaagttctcttggtccagttggcttggataaaatg

SEQ ID NO: 153303 - DNA, 100 bp, Homo sapiens
ctcagtttatctggatgttatcagatcacagaccatggtctcagcagagagactttcaagcagctggctggatgttcgtcatattgaaaagtatgtagac

SEQ ID NO: 153304 - DNA, 75 bp, Homo sapiens
aagcacaggaatctcactctgttaaagctggtctgttctaactgagattgggaaaatgaggtacgttagtgttcg

SEQ ID NO: 153305 - DNA, 96 bp, Homo sapiens
cgacagaccttcagcttcctctcgggcatgaccggaaaggccaaggaccatggccaacctggagcgcaccttcatcgccatcaagccggacggcgt

SEQ ID NO: 153306 - DNA, 50 bp, Homo sapiens
gccaagctcatggcctgccactgcgtgcggaactctaatgatccaggaca

SEQ ID NO: 153307 - DNA, 100 bp, Homo sapiens
cgacaagccgctggcagccgcggatctcaccgccgctcaggactagacgcttgaagcaaagctgccatcccagaagacgacatgctctcagcaacccccc

SEQ ID NO: 153308 - DNA, 100 bp, Homo sapiens
aggcaggttaccatcactggatctgctgccagcattagcctggctcaatatctaatcaatgtcagatagtcaaagaggttggtcaactggcagaaaccca

SEQ ID NO: 153309 - DNA, 82 bp, Homo sapiens
cgcctcgggtctcgggggccgctctgggatcccggccaccagcaattgtccggtctcagcggcggtggcagccgaggtgcag

SEQ ID NO: 153310 - DNA, 100 bp, Homo sapiens
ggggacggcaggagggaagtgagaagcccaactaaagccccacatttgcagctcattgaaggaaagaacacaaatggaatcctggccatgctggatgaag

SEQ ID NO: 153311 - DNA, 74 bp, Homo sapiens
gaggggccggggctgggctcgcagacagagtttcactcctgttacccaggctggaggacaatgatgtgatctcg

SEQ ID NO: 153312 - DNA, 73 bp, Homo sapiens
caaaaatgtgcatactcacagagttagagagagggatggtgaaagaatcttcaagagggagacatagggaaaa

SEQ ID NO: 153313 - DNA, 100 bp, Homo sapiens
gaattggaagacatgaggaaagctggtcacgaagccctcagcattattgtggatgaatataaggagcttctaagtaggacatccttagaaactcagaagt

SEQ ID NO: 153314 - DNA, 75 bp, Homo sapiens
gttggagctttgcagctgacctacatctcgaagacctccgcgctctggcagctcctcttccgtgtgctctcgcca

SEQ ID NO: 153315 - DNA, 82 bp, Homo sapiens
ggttccattattttggatgaagaaagagttgatctctctaatgtattagatcttcatgcctttgatagtctctctggaataa

SEQ ID NO: 153316 - DNA, 82 bp, Homo sapiens
ttctttcaggttatctgagttcattggagtgggtgcttgtgcatatatgctaggacatggatttgattgacatactttggag

SEQ ID NO: 153317 - DNA, 75 bp, Homo sapiens
ttctgggagtccaactcggctgcccacaaggagacctgcctagagctggaacgttacctccagagcgagccctgc

SEQ ID NO: 153318 - DNA, 99 bp, Homo sapiens
cttcgttcaagacaggtgtttaagcgtcttttagataaccctgaacttcgtgtggtccttgtctttggttataattgctgtaaggtgggagccagtaat

SEQ ID NO: 153319 - DNA, 100 bp, Homo sapiens
ggatgtgatgcctgctagccaaaagggaaccaacgtccaagaggcccagaagatactcaacaacagcggactccccattacttcagccattgacctggag

SEQ ID NO: 153320 - DNA, 90 bp, Homo sapiens
ccgccgcgcagcgccccagccacacgccggcgggcagaagccgcccgctctccggccgaggcctgcctggagccccagatcaccccttcc

SEQ ID NO: 153321 - DNA, 75 bp, Homo sapiens
ctgagtggttgtgtggtcgcgtctcggaaaccggtagcgcttgcagcatgatctaatgaggcgtcaagaagaact

SEQ ID NO: 153322 - DNA, 82 bp, Homo sapiens
gcccccgctgctctatgacctgtccaaggaccctgacagcggtggcctacccgagcgcagtgtgtccttgacaggagcccca

SEQ ID NO: 153323 - DNA, 75 bp, Homo sapiens
ccactatcaaggataagccagcagcaagccaatcactgaggtgatgcgttttgcaagggagaaaagatgttattc

SEQ ID NO: 153324 - DNA, 97 bp, Homo sapiens
ctcggcgctgcctacggaggtggcagccatctccttctcggttaacacagaaatctgcctcctgggccatgccgcttctaaggcctgtttcttctca

SEQ ID NO: 153325 - DNA, 83 bp, Homo sapiens
gagaaggatgacaccggagtttgacgaagaggtggtttttgagaacatccagtcatggataaaaatgagctggttcagaaggc

SEQ ID NO: 153326 - DNA, 83 bp, Homo sapiens
tcttgccctggctttttacctagcaaaggatgtgaaatggtctgacttcgggtttcctggaagaaatggacaggaaagtacat

SEQ ID NO: 153327 - DNA, 95 bp, Homo sapiens
caaggatctctgggtcctgcatttggccaccaagacctgggaacaagtcaatgaagaggaagaaaagttccaaatcagaggccaagggcactgtg

SEQ ID NO: 153328 - DNA, 98 bp, Homo sapiens
tctaatctctgtagagggaaaagtccacctccagaatttgcaaaggttgcagcatgcagagatactggatatgactggtttgagcaactgcttcaaaa

SEQ ID NO: 153329 - DNA, 90 bp, Homo sapiens
gtccttatacgggcacgaactcgcgaggtcctgtacctgcacatgttgttctttgtcagtgctgtcaagtgtgtgccagggtgatccatg

SEQ ID NO: 153330 - DNA, 99 bp, Homo sapiens
ctgtctcagcccatccctacaatcccagcagaagtgcatcgtgatctttgccctggtgtgctgctttgccattctggttgcactgatcttttcagccgt

SEQ ID NO: 153331 - DNA, 100 bp, Homo sapiens
atgttgtcattgatggtctcaatgttgccaaaatgtttcctaaagttcgtgaatctcaacttaaaacgttgtgtgacgtgatcctcatggtccaggaaag

SEQ ID NO: 153332 - DNA, 100 bp, Homo sapiens
acctatgagatccagtttgggcacctgcagcgacctacccactacaatacctcttgggactgggctcgatttgaggccaagtataaggagcgagggacgg

SEQ ID NO: 153333 - DNA, 49 bp, Homo sapiens
ccaggcatcagagatcatgagagcaaaaaagggagacgctgtccccgct

SEQ ID NO: 153334 - DNA, 90 bp, Homo sapiens
cacaaactgcagcaagtgatcagagataatctctacttgagaaccattccataataatccagaatggctactctgatctatgttgataag

SEQ ID NO: 153335 - DNA, 100 bp, Homo sapiens
tcagaggggagtcatcatgagcgatgttaccattgtgaaagaaggttgggttcagaagagggatgccacttcaaatgaacaacaagagcttttctgtcag

SEQ ID NO: 153336 - DNA, 87 bp, Homo sapiens
tttggtgctgatggtgcaaggaaactagcacagacccttggtcttgaagttctaggtatgaatcctaggacccagaataaggattct

SEQ ID NO: 153337 - DNA, 74 bp, Homo sapiens
attggcaggacctggggccaaaagccaagctggctgcaataaaacttggccgatatggtgaagaccttctcttc

SEQ ID NO: 153338 - DNA, 75 bp, Homo sapiens
cagatgataggaatcccatctcatttagacaacagtgattgactacgtgaagccctcggatctcaagaaggacat

SEQ ID NO: 153339 - DNA, 83 bp, Homo sapiens
gccgctcacgctgcattaccgccaggtgatgtgtccaatctagatcccaacttctcatttgaaggcaccaaactggatgtggg

SEQ ID NO: 153340 - DNA, 100 bp, Homo sapiens
gggtggacgaagctctctccagaaagacatcctgagaggacttggcaggcaggatgacgcaaaacacggtgattgtgaatggagttgctatggcctctag

SEQ ID NO: 153341 - DNA, 96 bp, Homo sapiens
aaatgcagaattcacaagatccaatcccttgtccttaaaaggttatggaggttttgatgactatggtggctataataattacggctatgggaatga

SEQ ID NO: 153342 - DNA, 75 bp, Homo sapiens
atgtgcccttccaatatacaaccttacccctcgtgaattcaactcttacggagctcgaagaggtaatgatgctgt

SEQ ID NO: 153343 - DNA, 100 bp, Homo sapiens
ggacagagcggtcggtgacagcctcaagggcttcagcaccgcgcccatggcagagccagaccccaaggactacgagaacgccatcaagttctacagccag

SEQ ID NO: 153344 - DNA, 100 bp, Homo sapiens
tgaccaatatctgggacttgtgaggactcacataaatgctgttgtggcaaattccagcgcacttttccaacacatcactgcattatttgaatgcagcatg

SEQ ID NO: 153345 - DNA, 74 bp, Homo sapiens
atatagacacttctttggtcacactttttcccctccatatggacccagggtccgcaagcaggtggtgaacatcc

SEQ ID NO: 153346 - DNA, 100 bp, Homo sapiens
gaccattcagatgggatctttccggatcaatccagatggcagccagtcagtggtggagctggtcatcaatgctgctttgggatttgacacatttgttgtc

SEQ ID NO: 153347 - DNA, 107 bp, Homo sapiens
caagggaggaggaagatggcggcgggggcgagttctggacttcagtgaccccttcagcactgaagtgaagccgagaatcctgctcatgggcctgaggagaagcggca

SEQ ID NO: 153348 - DNA, 75 bp, Homo sapiens
aagcacctctccagcggggacctgctccgggacaacatgctgcggggcacagtctcggagtcggagagcgcgcct

SEQ ID NO: 153349 - DNA, 100 bp, Homo sapiens
cgaccacagccctcaccctgcgctccaagtccatgacctcggagctggaggagctcgggtacctgctcttccgagacttctgcctgaaccacctggagga

SEQ ID NO: 153350 - DNA, 100 bp, Homo sapiens
cgccagcacgcgcctgcttcccgtctgcgcgagtccacgcagctccccagccccatggctgggggttatggagtgatgggtgacgatggttctattgatt

SEQ ID NO: 153351 - DNA, 83 bp, Homo sapiens
ggtgcctaagctgtgctctgattcacgtttagaagctgaccagacaaagagaggcctccggtgtggctgtctctgatggtgtc

SEQ ID NO: 153352 - DNA, 75 bp, Homo sapiens
gaggacacttactacagctgctcagaagcaccactggaaactcaggatgatgacctggaagaaggtgaagtgaag

SEQ ID NO: 153353 - DNA, 106 bp, Homo sapiens
caaacccaagttggttggagatgtggattttgaagtgatgttgcacctgtaaccatctttttatgggtggagcagagagtcaatccctgcagccaccctgcagcca

SEQ ID NO: 153354 - DNA, 100 bp, Homo sapiens
cctgcagggactggcagacccgtagctaagacgccaggatttcctggaagcagagaaatgcatcctgaggttagcattacacttctcccagtggagccca

SEQ ID NO: 153355 - DNA, 90 bp, Homo sapiens
cggcggcaacatggcagagaccgcggccggagtgggccgcttcaagaccaatgctgcccacggtgctgctggatgagatcgaggcggccg

SEQ ID NO: 153356 - DNA, 83 bp, Homo sapiens
atccgccgcccgtccacacccgccgccaggtgctgaaggtcgccatcctggctgagaagtacgcggtggactacacctggtat

SEQ ID NO: 153357 - DNA, 82 bp, Homo sapiens
cgggtgtctcgtgtgtgaacatcacaggctccaggaacactcggaggtgtctggcttccttctggagtgtgacagctcggtg

SEQ ID NO: 153358 - DNA, 82 bp, Homo sapiens
cgagagcaagctctataagattcttcaaggtggggttggcatcccccacatacgattgggaaaatgaggtacgttagtgttc

SEQ ID NO: 153359 - DNA, 83 bp, Homo sapiens
cggacctaactagctccaggttaggccgagctttgcgggaaagcagcgatatggctcgtggacagcagaaaattcagtctcag

SEQ ID NO: 153360 - DNA, 75 bp, Homo sapiens
ttcttgtgggtggcatgactaggatgcccaagtttaattggttggggtcagataagaagaggagtgacaatcaag

SEQ ID NO: 153361 - DNA, 82 bp, Homo sapiens
ccagggccggcttcaggaggcccaagacaccacagaagccctccgagcccaggacttggatgttgtgggtgatggtatgcag

SEQ ID NO: 153362 - DNA, 74 bp, Homo sapiens
aaaatacatctcaatactttttcataacaccaaaggctcatgctgaagattcggttatggaccatcatttccgg

SEQ ID NO: 153363 - DNA, 100 bp, Homo sapiens
gcggagaggcgccccccgcagcagttctccaaggagaagtacatcctggactcatcgccagagaaactccacaaggaattggaggaggagctcaaactca

SEQ ID NO: 153364 - DNA, 75 bp, Homo sapiens
cagtttacagccactgcagtatcacagccagggaaacactactatgaagtatcctgtcatgaccaagggttatgc

SEQ ID NO: 153365 - DNA, 75 bp, Homo sapiens
taaaatcagtttaatttcagaaaaggaaacagaagaaatgtgtgtgatgcttgtctctaatttgcctaataaagg

SEQ ID NO: 153366 - DNA, 83 bp, Homo sapiens
ggagcagcgcgtcgtggggcgagcggcaggtgtggacactgccagcggctgcagccgacttggaatgacctgggagacaaata

SEQ ID NO: 153367 - DNA, 100 bp, Homo sapiens
gtttgacaatcacattaattcatatgaccatgctcacaagcaggcagacctgttatcctaaactaggtgagtcagcttttggtacatgtgatgattttca

SEQ ID NO: 153368 - DNA, 99 bp, Homo sapiens
ccagttttgaaatcgacacacaaagaatagagttgagcctgtgggacacttcggggactttgaacatgtcggggatcgccctcagcagactcgcccagg

SEQ ID NO: 153369 - DNA, 100 bp, Homo sapiens
attgaagatactacaaaatcagtttatcaagtgccaactatggctgtggagaaggtcctggtgtacaataatacatccattgttcaggatgagattcttg

SEQ ID NO: 153370 - DNA, 104 bp, Homo sapiens
gctcgccgctccctagcaccttctccagtcgacactctcgcgcccggagctagagttgggaagacatcactgattatgtctctggtcagtgaagaatttccaga

SEQ ID NO: 153371 - DNA, 90 bp, Homo sapiens
tgcgttcagagccgggcacactgggctctgcagcctcatcctacagccccctagcaggtcgagtcccgggcgctcaccatgttccgggac

SEQ ID NO: 153372 - DNA, 100 bp, Homo sapiens
aggcaatccacctgctttggcctcccaaagtactggaattacaggtgtgaaccatcgtgcccagcccaatttgaattcaaagaagctttttcactatttg

SEQ ID NO: 153373 - DNA, 75 bp, Homo sapiens
agaggagaaggaaaaacaagctgaagaaatggcatcagaataccgtagcagtaggcaggacagttccaattcaac

SEQ ID NO: 153374 - DNA, 75 bp, Homo sapiens
gattcgcagtggtcgcttcttctccttggccgagtgatagctactttcacatgttcaggagaaaaggaagtaaat

SEQ ID NO: 153375 - DNA, 97 bp, Homo sapiens
tacaatgaaatctataacttcaaggggcaccaccacgaggcgatttgtgggccataccaaggatgtgctgagtgtggccttctcctctgacaaccgg

SEQ ID NO: 153376 - DNA, 100 bp, Homo sapiens
gagaaggtgttgttgccggagctgagaccgggcggccacagtccgcagggatgaacctcgagttgctggtttcaggtttagctgtgcctcccagtgacta

SEQ ID NO: 153377 - DNA, 87 bp, Homo sapiens
ttccaaagctgggaatcctattttttattatgttgcacggaggtggaaaaacttgtgaaatatttggatcccaacgacctggggaga

SEQ ID NO: 153378 - DNA, 100 bp, Homo sapiens
agaaatcacattggaccctcctcccaactgtaggtcacccaacctgcctgcagtttaccctgaacatgaccgaggctgtcaagacctacaagtggcagtg

SEQ ID NO: 153379 - DNA, 75 bp, Homo sapiens
tcagtgactgaattaaaaggtgtcaagaagctcagaatggaagacataggccaaggagccagacttcctgtgtta

SEQ ID NO: 153380 - DNA, 89 bp, Homo sapiens
cttttttgtggggctggctattgggactcttttttcaaatgcaattttccaacttattccagaggttcaaaccttgtactactcagctg

SEQ ID NO: 153381 - DNA, 100 bp, Homo sapiens
tctctagaccataaaaataaaaaacatatccgagggtgtcctgttacttccaagtcatcaccagaaaggtttttcgttggaatatacgttgcacatttat

SEQ ID NO: 153382 - DNA, 75 bp, Homo sapiens
tgaaggagttccaccaggccgggaagcccatcggccacgccgcaatgaagagcttcttacagtgaaagcaaagta

SEQ ID NO: 153383 - DNA, 100 bp, Homo sapiens
cctgaaactgactgagagccagtggatttgccagcagtctgacgaaggggaggaccaggctggcgatgaagatgaagatgatgaatgggatgactgagtg

SEQ ID NO: 153384 - DNA, 114 bp, Homo sapiens
gtggctctgagggcagggacgtgttggacacgctgactttgtaggctccgccaagaggcgccgcaggaggattctgaaaccttccttgtatccctcctgagacatctttgctgc

SEQ ID NO: 153385 - DNA, 80 bp, Homo sapiens
cgattctctatgacttgttggtcaacaccgagtggccaccggagactgaagtacagggggcagtacccaaaggaaacgct

SEQ ID NO: 153386 - DNA, 74 bp, Homo sapiens
tcattttgtggctcagcgttggaagttcagatgttgatgttagtgaagattcacctcctcccctacctgaaaga

SEQ ID NO: 153387 - DNA, 100 bp, Homo sapiens
aatgtttggcctcaaaagaaacgcggcaaacaagcatgcatttaggatccttatgcacgggagatatcaaacggagaagaaaagctgcacctttgcctgg

SEQ ID NO: 153388 - DNA, 98 bp, Homo sapiens
aacggagaaaccccgggtccggcgagaggggctgtgacagtcggagtcccaagctgcggttcggctgctgccgagtgtggcaaaggagcagagaactt

SEQ ID NO: 153389 - DNA, 74 bp, Homo sapiens
accaggtcttccaggatcaccgggacctccaggaccgccaggaaataatgaagatgtttcattttcaagaccag

SEQ ID NO: 153390 - DNA, 101 bp, Homo sapiens
ctggagatgattgagccgcgcacgctacagtacaaggatgctgaaaacgccattcaacagatgggtggccagtggcttggtggaagacaaatcagaactaa

SEQ ID NO: 153391 - DNA, 75 bp, Homo sapiens
gaccccgcggcgcccctcggcctcggagcaacgagcgcagcgccgcatcctggtggggaagaagttttaagggaa

SEQ ID NO: 153392 - DNA, 83 bp, Homo sapiens
accggagcgaacgccacgccgttggcagttggaattgatcacaccttttcagttgtacttcaatcctgaattaatctttaaac

SEQ ID NO: 153393 - DNA, 98 bp, Homo sapiens
tctgaatcccaatcctacaggagttcaaaacccacacataggatgtactgagtaaagatgctggggaatgtgcaatatgccttgaagaattgcagcag

SEQ ID NO: 153394 - DNA, 76 bp, Homo sapiens
cacgcagctggctggcttcagtggaccaccaaaagaatgcaatggtgtaaagattccagttgatgccagtaaacct

SEQ ID NO: 153395 - DNA, 99 bp, Homo sapiens
atgctaggtggattttaagccaaacacataatatttttactcagatctttggcatgatattcagcatggtcctctgctgtgcgatacgaaactcacgag

SEQ ID NO: 153396 - DNA, 50 bp, Homo sapiens
tgggactttccttctgtgggggttcattccgacaggaccaccccagtagc

SEQ ID NO: 153397 - DNA, 83 bp, Homo sapiens
ctcctgtgtggcgatggtcttcctgctggggctcatgtttgagaactgtaagagtaaatgggtccagtaattggaatgactcc

SEQ ID NO: 153398 - DNA, 82 bp, Homo sapiens
cggaaaaggacgcaaagttctccggcgagaataccctctaccatctgctttggtcagggtgccgctcgaggatttaaaagca

SEQ ID NO: 153399 - DNA, 83 bp, Homo sapiens
gctgctgttgcttctgggccagaggaagagaatgaggtgagaagccctaccactgcaactgggacggctgcggctggaagttt

SEQ ID NO: 153400 - DNA, 88 bp, Homo sapiens
ggatgggctgctgaagaaccagggagttcctgacagctggattctagaagtagaactatgagctcacctttggcctcccttagcaaga

SEQ ID NO: 153401 - DNA, 83 bp, Homo sapiens
gtctggagtgcgtgggggaccggctgttggcgggcacattcaggaccccgcgagccagcggctgacgtggaacaagtccccaa

SEQ ID NO: 153402 - DNA, 100 bp, Homo sapiens
atcccggaatgcctgaaccaactgttttgaggtggttatcactaggctaaaactggacaaagaccgcaaaaagatcctcgaacggaaagccaaatctcgc

SEQ ID NO: 153403 - DNA, 90 bp, Homo sapiens
ctgaaaccggatgctgagtaccctgaatgataagacgttatctgtggcaatcgaaggcagtgtggatgaagccaaggctctgttcaaacc

SEQ ID NO: 153404 - DNA, 95 bp, Homo sapiens
attgcagagtcgctaggtggaagtggatatagtgttgagagattgtcagttccgtatgtaccacaagtaacaggctatgagaagtacaactccat

SEQ ID NO: 153405 - DNA, 73 bp, Homo sapiens
gatagatccaccattgcaagacatttgctcagaatgtttcctatggactcaaagccttcactgttaaacccca

SEQ ID NO: 153406 - DNA, 50 bp, Homo sapiens
gctcggacacagaagaacaaggatgattaaacttcaggaagtatttaagg

SEQ ID NO: 153407 - DNA, 74 bp, Homo sapiens
ggtgttcgagaacgaccccgagacgggtgtccgtgccgctgctgaagacgctggaccacgtgctcacccacggc

SEQ ID NO: 153408 - DNA, 82 bp, Homo sapiens
ggtgtgctgaagataaccatctgtacaatgcagatcttcgtgaagactctgactggtaagaccatcaccctcgaggttgagc

SEQ ID NO: 153409 - DNA, 96 bp, Homo sapiens
atcccagcatcttgacatttccgtggcaaccaaagacgggcgcctatcagtacacaataaggctccaaatgagaagatgaagcaagtgttaaagaa

SEQ ID NO: 153410 - DNA, 75 bp, Homo sapiens
gcgtggtggagttttcctgtggtgggctgggggccctgactggacctggcctggccagcttactggggagcagtg

SEQ ID NO: 153411 - DNA, 75 bp, Homo sapiens
aggggcgcccgcctcaagctagagacaatgcagatcttcgtgaagactctgactggtaagaccatcaccctcgag

SEQ ID NO: 153412 - DNA, 75 bp, Homo sapiens
cgaggagccgccgccccccctcgcaggtcttctcagtacagcatggtggctggggcaggccgagagaatggcatg

SEQ ID NO: 153413 - DNA, 100 bp, Homo sapiens
cacaacatcctgaagaaataccaccagcacctgttcttcccggagcctatcagcaaagccattcccaaggctatggctacatgcaccagaccagtgtgtc

SEQ ID NO: 153414 - DNA, 75 bp, Homo sapiens
cagggactgaaggtcacaccacagcgcaccttcacggcatggtgcaactcccacctgcggaaggcaggcacacag

SEQ ID NO: 153415 - DNA, 100 bp, Homo sapiens
gccgggagttcaagaagaacactccagagagtaatgaacctcatgagacaatgccaattgctgcctttggacaaaaacagcggccttctcgattttttat

SEQ ID NO: 153416 - DNA, 83 bp, Homo sapiens
cgactacttcaaccaggaggttttccgagacaacaacggcaccgcgggggatatgagactttctactcggaatatcctgagtg

SEQ ID NO: 153417 - DNA, 78 bp, Homo sapiens
tttggtctcctgccgtgcccggtgacagagttagtccttgataattgcctgtgtgtcaatggggaaattgaaggcctg

SEQ ID NO: 153418 - DNA, 75 bp, Homo sapiens
cgcagctctacgtgtaccgcctcaaccgcgacgccgagttggatcgatcaacccgggaggtggagctgggcttgg

SEQ ID NO: 153419 - DNA, 100 bp, Homo sapiens
gttcaacagttaactgcagctcaacagcagcaatatgcattagcagcagctcagcagccacatataggtaccagatccccaggggctgcagggctcacca

SEQ ID NO: 153420 - DNA, 100 bp, Homo sapiens
gcagcaactgaggcagcggcaggctcaggtgcagccgctggaaagaacgcgctttgagaatttggggccccagttaacgggaaagtcaaatgaagatgga

SEQ ID NO: 153421 - DNA, 90 bp, Homo sapiens
tggctcagaggctctatgcaggttccactgtcaaggtatttaccttgctgtggattgctgactggatggtccatcacttctggaggaaag

SEQ ID NO: 153422 - DNA, 90 bp, Homo sapiens
gtcgcggaggcttgtcattctgacccggggattcctcacagcgtctggcaggttttttgcatgtctgacacccatgactccacctggacc

SEQ ID NO: 153423 - DNA, 50 bp, Homo sapiens
gctccaacattgtgcagctgctgatcggcttgtccaaaaggaaacatcgg

SEQ ID NO: 153424 - DNA, 83 bp, Homo sapiens
cgggaccgacgcctcggaccgggctgcgccgcgggagttcgaggtgtggacactgccagcggctgcagccgacttggaatgac

SEQ ID NO: 153425 - DNA, 100 bp, Homo sapiens
gaagaagttgggcaagcccggtttatacagaagcagatggaacattttcaaggtccccttcccctgagcccatctacaatagcgaggggaagcggcttaa

SEQ ID NO: 153426 - DNA, 100 bp, Homo sapiens
ctctctccctgggcgacctgcagtttgcaatatgactttggaggaattctcggctggagagcagaagaccgaaagatgagagtccctacactaaatccgc

SEQ ID NO: 153427 - DNA, 100 bp, Homo sapiens
gatcttacctaactgggaaacaatgaacaagatcactcaaggtgaaggataatctactaataccagcactttgaatgaaaatttgtttctctgccacaaa

SEQ ID NO: 153428 - DNA, 90 bp, Homo sapiens
taattgctgaacttaaaaagcagtctaaacctgtgaccacccctgaagaaattgcacaggtaatgaaagtactaaattcttccaatgagc

SEQ ID NO: 153429 - DNA, 102 bp, Homo sapiens
caggctatcatatcatgttgcctttcattactacgttcagatctgtgcaggcccgacaacaagctcaaatacgtcaccaaatggcagaggacagcaaagcag

SEQ ID NO: 153430 - DNA, 75 bp, Homo sapiens
ggcagcgcggacccgcccggagatgaggttttgggatttgagattgacgcggtgaactctgtccagttttcaaac

SEQ ID NO: 153431 - DNA, 100 bp, Homo sapiens
agaagcagattgccaacattgaccgtattacaaagtactaggttttgacaagcttgcatcatgcgtgagtataagctagtcgttcttggctcaggaggcg

SEQ ID NO: 153432 - DNA, 100 bp, Homo sapiens
ggaagcccagagtgaacagaaagagaagtcgcttgagaggactcaagttcaaaccatgttgatgagtttgaagataatctgctgattgaatcagatgtga

SEQ ID NO: 153433 - DNA, 90 bp, Homo sapiens
gcgcccagcaacaagacagagctggcctggagtccgcggctggccgcgtgagtaggtggccaagcaagaggagttcttcaacctgtccca

SEQ ID NO: 153434 - DNA, 100 bp, Homo sapiens
cgactagcggcggcgggagcggcgccgagaggccgtgcgggacgcgggcgccaggaccggccgaacgcagagggcgtctctggccgagcctctttttgtg

SEQ ID NO: 153435 - DNA, 75 bp, Homo sapiens
gaataaagctgttttggaactgtcaggtacctcaaagctcttgttactacagctataattcaaagaggaacttta

SEQ ID NO: 153436 - DNA, 100 bp, Homo sapiens
agcagatttacaaactggccaagaagggccttactccttcacagatcgccttgctatacatcctgacaaaattaggattgcaactggacagatagctggc

SEQ ID NO: 153437 - DNA, 76 bp, Homo sapiens
aacatggcagccttttccttagaacaccaaagattgtctctggcaaaggtggcaagtgcaggcagctgtcccggtt

SEQ ID NO: 153438 - DNA, 100 bp, Homo sapiens
agccaaatggcttgaggctcagatcatccaggcccgatctggcagacctgttgatctgtccaagggactgtgagcaggctgtggtccacgtggagaccac

SEQ ID NO: 153439 - DNA, 83 bp, Homo sapiens
ttctcggcgccgcggctcttttctaaaagtggggcagctggcattttatgctatgtgggagcctatgtcttcatcacttatga

SEQ ID NO: 153440 - DNA, 83 bp, Homo sapiens
cagattcgcagtggtcgcttcttctccttgcaaagccttctagacaagctcagtggaatctgaagggcccaccccatggagga

SEQ ID NO: 153441 - DNA, 100 bp, Homo sapiens
gtccgcggcgcggtcggtcggcgcctgttctcgggctgtttggcgggcgtttagatgccaaccatattacctcagtccccgaggacagttttgaaggact

SEQ ID NO: 153442 - DNA, 100 bp, Homo sapiens
cacaaagtgaccaagaacgtgagcaagcccaggcacagccgacgccgcggggttaatttggagtggcccctggagtcagtttcctacaccatccgaggcc

SEQ ID NO: 153443 - DNA, 98 bp, Homo sapiens
tcggaccttcgtctgtgacgctcagtcttcctcgctctttggcacctgcgtgtgtggtgtcgcctgcgaggccgctggccaggcctgagcctctgcca

SEQ ID NO: 153444 - DNA, 98 bp, Homo sapiens
gccagcagccgtccggagccagccaacgagcggaacttaagagatttgagaacttcataaaatctcgtcctccttttgatgttgtcattgatggtctc

SEQ ID NO: 153445 - DNA, 76 bp, Homo sapiens
gattcgcagtggtcgcttcttctccttgattctgtgctgaacgcctccggtccctgctgcatactctggagatcac

SEQ ID NO: 153446 - DNA, 51 bp, Homo sapiens
tgatctggacaaaggaacaggtatctcagaaatgcactcggtgatggaaag

SEQ ID NO: 153447 - DNA, 101 bp, Homo sapiens
cacacagttctccatgagttggacagataccaaagaggacttatcagatgtagacttcctagatgattcttcaacggagagtttgcttctgagtggggatg

SEQ ID NO: 153448 - DNA, 58 bp, Homo sapiens
cgagtatctccgtttcctggatgtgaacaaagaaatgaccgcccggatgtgccactga

SEQ ID NO: 153449 - DNA, 83 bp, Homo sapiens
gtggctggaaggagaactaaatgggagaagaggaatgttccctgacaatttcgttaaggttcgagaacttgtcttggacaatt

SEQ ID NO: 153450 - DNA, 98 bp, Homo sapiens
ctatggttatgggggacaaaaaagacctttagaagatggagttgtgtgacttcattgagacacattacctgaatgagcaggtgaaagccatcaaagaa

SEQ ID NO: 153451 - DNA, 100 bp, Homo sapiens
atcgcccatcaaatacaacaaagatggcagtgttgccattgccagtaagccaagagagatgatttgtcattaattcggaagaacagaatggctctctttc

SEQ ID NO: 153452 - DNA, 85 bp, Homo sapiens
ctctcccaggccacaagacatttcctgctcggaaccttgtttactaattgttttaaaatcaaagatgggaaaatcggagaaaatt

SEQ ID NO: 153453 - DNA, 78 bp, Homo sapiens
aaaacgacagcagcagcagtggcctggaagacgccaccgctaacgctgccaagctcctctatgaatctcgggaccagt

SEQ ID NO: 153454 - DNA, 101 bp, Homo sapiens
gtgggcactgaagggggactacaggttcgagaccagcagccagcttcgggtgtagcctattctcatccaactacagttgctagctacactgtccatcaggc

SEQ ID NO: 153455 - DNA, 51 bp, Homo sapiens
gcaagatggcggacagtgcggaactaaagaccacagagtattcagccatgg

SEQ ID NO: 153456 - DNA, 82 bp, Homo sapiens
tgaagaccaagaacctcggcctctcgaaagaggatccggccagcagaatttatgcaaagttttcggctttgtgagaaacctt

SEQ ID NO: 153457 - DNA, 74 bp, Homo sapiens
gcgccatgtccctaatctgctccaacccagtcatggcagcctccagcatcagttcaccatggggaaagcatgtg

SEQ ID NO: 153458 - DNA, 101 bp, Homo sapiens
aagttggacagacgggaaaaatagtagcaccagtgaccaagaatatggcccaggtgaccaaagccctggacaaggccctgagcaccatggacctgcagaag

SEQ ID NO: 153459 - DNA, 100 bp, Homo sapiens
cacggttggtgtcgacggatctctttacaagacgcacccacacttggctgaagaggaaataaaaacagaacaggaggtggtagagggcatggatatctct

SEQ ID NO: 153460 - DNA, 83 bp, Homo sapiens
agggcctgcagcgggagctggacggcgagcgcgagcggcgcgagaaaggccaattcctgtccccccagcagcatggcatcgtg

SEQ ID NO: 153461 - DNA, 74 bp, Homo sapiens
gggagccgcctgctgcgaggccgccgggctcccggtttacccaaggtccagcctagcccctaggcaccatgtcg

SEQ ID NO: 153462 - DNA, 83 bp, Homo sapiens
gccaggcttcccaacattcttgtctgtggtctctaattaacagaagatggcaaagcccagccacagcagctatgtccttcagc

SEQ ID NO: 153463 - DNA, 100 bp, Homo sapiens
gtcaaaacagcagcgcgggcaaccggggaccccggccactggagcaggtcacctgttacaaggatccttcaaaccaaaaatgtggtggaagaaagaaaac

SEQ ID NO: 153464 - DNA, 100 bp, Homo sapiens
ttttgagctggtggaagtggttggaaatggcacctatggacaagtctataaggagccaaaaacctgtatatcatctccgtgaaggggatcaagggacggc

SEQ ID NO: 153465 - DNA, 107 bp, Homo sapiens
gagaggagctgtggataacgggaggtgaatttccatgtcaacatagtcctgccttgatgacttacaagccctcaaggggaagcattttctcctggactccttgatgc

SEQ ID NO: 153466 - DNA, 73 bp, Homo sapiens
acaggctggttccccagtaattatgtccgtgaaattaaatccagtgctcctgtatcacgtggaagagatagtt

SEQ ID NO: 153467 - DNA, 75 bp, Homo sapiens
ttttgatgtggatgatgccaaagttttattagaatccagctcaaatgtcagaagaattgacgttagtttgagaga

SEQ ID NO: 153468 - DNA, 82 bp, Homo sapiens
ggccgcggccggaccgagcgcctcgacctcggtctgagctgtcaaagctcgaaaaacagcagcagaggaaagaaaagaccag

SEQ ID NO: 153469 - DNA, 80 bp, Homo sapiens
ccgggctccgctcttgccttctccacacttgtttgggggatatgagactttctactcggaatatcctgagtgttgcgtgg

SEQ ID NO: 153470 - DNA, 100 bp, Homo sapiens
ctggatttaagcactgctgcactttatgagtgtctaccatcagagggagatctctgccccctggggctgagagaccccaacctttccccaagctgaagct

SEQ ID NO: 153471 - DNA, 74 bp, Homo sapiens
ccgagagggactacgtgggcaccttgcgcttcttgcagtcgatgccttcaattaagttgcagagttctgatgga

SEQ ID NO: 153472 - DNA, 80 bp, Homo sapiens
aggcgctcatccacagagccacatctgttaggtacatggactatatcgcacaacaggtgctagttttgagaaggcccaac

SEQ ID NO: 153473 - DNA, 100 bp, Homo sapiens
acatcaagacacgtctggagcaggagatcgccacctaccgcagcctgctcgagggccaggacgccaaaaattgcaggtgctgcagtgtctgaaatttccg

SEQ ID NO: 153474 - DNA, 80 bp, Homo sapiens
caataacaggcggagggtcggcgtagatatttaacaccgtgcccgatatgcctctcaccaatgcccagctgcacctgtct

SEQ ID NO: 153475 - DNA, 90 bp, Homo sapiens
cggggccgggcgacctgggcaccagcaggacccgaggccaggagccaggggcccagaaggaatgtatcctgtcaggtataatgtcagtga

SEQ ID NO: 153476 - DNA, 100 bp, Homo sapiens
ttctacctgcggatcatactgggggccaatgtgtaaagaagacattccagtgtgagctttgcagttacacgtgtccacggcgttcaaatttggatcgtca

SEQ ID NO: 153477 - DNA, 100 bp, Homo sapiens
ttgctctatagaatttggcccagcagaatttattcctcttcatccactaataacgtatagctatggcctgaaggtggacatttgggcagctggtgtgatc

SEQ ID NO: 153478 - DNA, 74 bp, Homo sapiens
cctgaggttgtggaaaaggaagattactcagagattatagggagcatggaggagaaggcagagcccccccaggc

SEQ ID NO: 153479 - DNA, 98 bp, Homo sapiens
ttctggcctggaggctatccagcccacaggtggaattaagaaatctggcaaaaagtaagctgttccttgtgcctgaggagatggtgaccctttatttc

SEQ ID NO: 153480 - DNA, 50 bp, Homo sapiens
gcacggctgaggcccgcaagcgcaagagatggggtcttgctatgttgccc

SEQ ID NO: 153481 - DNA, 50 bp, Homo sapiens
gaagaacttgcccgaaggaaacagctttaccgatttgttacaactcaagc

SEQ ID NO: 153482 - DNA, 75 bp, Homo sapiens
ggggtctctgcgtctgtagttcatttgaccaaacgcagcaagatgaagagcgacgtcggcagctgagagagagag

SEQ ID NO: 153483 - DNA, 101 bp, Homo sapiens
caagaagatcatcattaaggacggaggcacggtgctggagaatctggtaaaagcaccattgtgaagcagatgaggatcctgcatgttaatgggtttaatgg

SEQ ID NO: 153484 - DNA, 75 bp, Homo sapiens
tcaaaggagagcacaaccatcgcagttggaagcccatggggcagatggagtttcactcttgtctcccaggctgga

SEQ ID NO: 153485 - DNA, 76 bp, Homo sapiens
tctgatcctccacttcagagaacagggctagagatgatcgctatggaaaatcctgcagacttgaagaagcagttgt

SEQ ID NO: 153486 - DNA, 96 bp, Homo sapiens
aaggaacttgcagaaatcacattggaccctcctcccaactgtaggtaaagaaactgcggcaatgaaagctgatctcctgagggccaggaacatgaa

SEQ ID NO: 153487 - DNA, 75 bp, Homo sapiens
tgagagtccgccgccaacgcgcaggtgctagcggccccttcgccctgcaggtggggaccaaggcatactgaacac

SEQ ID NO: 153488 - DNA, 75 bp, Homo sapiens
cgagctatagagaaaggagatgaggtgccagaaccctgtggagcatcatgaactgggaagagtagctgagcccca

SEQ ID NO: 153489 - DNA, 80 bp, Homo sapiens
atcaggggccttgataacacagagtttcaaggaagctattttgccagccacttcattatgggaggagagaagtttgactc

SEQ ID NO: 153490 - DNA, 50 bp, Homo sapiens
ctcgtgaccacccctacatccagtacagatgctttcattggatttggagg

SEQ ID NO: 153491 - DNA, 97 bp, Homo sapiens
acttatcagagattgagaatgtccatggatttgtttctcattctcatatttcaccaataaagaatcgagagctccagatcatgagaaagctagatca

SEQ ID NO: 153492 - DNA, 50 bp, Homo sapiens
gtgcggacgcagcggcgggggcattacatgaagcagatgacatttgaagc

SEQ ID NO: 153493 - DNA, 82 bp, Homo sapiens
cctcgctccctctgctcttcctcccttcgctcgcaccatgggcgaagctgtgctcaggcccgggctggacgcagagccagag

SEQ ID NO: 153494 - DNA, 99 bp, Homo sapiens
gcgcgacccggcggcgggacaggcttgctgcttcctcctcctcggcctcaccgctctttggtgtaacgggaaactgcgctgcctgtagtaagctcatcc

SEQ ID NO: 153495 - DNA, 75 bp, Homo sapiens
tccttcgacttggagtctttgtccaggacggtggagttggcatgaacttaacagcagcagatactgtgatttttg

SEQ ID NO: 153496 - DNA, 96 bp, Homo sapiens
ccggactcgacctctcggacgcggagcccgacgcgggcgaggccacgatctaaccatgagctaccctggctatcccccgcccccaggtggctaccc

SEQ ID NO: 153497 - DNA, 83 bp, Homo sapiens
gccgctggcggcagtcacttgtacagcgccggtcaacatcgcggtcatcaagtacttgctgctcacggccgtgaactgctaca

SEQ ID NO: 153498 - DNA, 80 bp, Homo sapiens
ctggtgtaccaggcgaagctggccgagcaggctgagcgatacgacggtggaagatgcaatgctgatgtttgataaaacta

SEQ ID NO: 153499 - DNA, 100 bp, Homo sapiens
tttgaatgggtgcatgttagtgctcaagagcctcattatctaccacccgagatgccccaagctgaggagtacctgtcatttgcctttgagcattgtcacc

SEQ ID NO: 153500 - DNA, 50 bp, Homo sapiens
cagagcctagggctagcggccatggtgatccgggggctgctcaaatactg

SEQ ID NO: 153501 - DNA, 100 bp, Homo sapiens
agaaaggatggtggaggactacctggcaagtggttatcaggctggtgcagacatctccatgattgggcagtttggtgttggcttttattctgcctacttg

SEQ ID NO: 153502 - DNA, 82 bp, Homo sapiens
gaacagtacgcagtgaatgttacaatgcagatcttcgtgaagactctgactggtaagaccatcaccctcgaggttgagccca

SEQ ID NO: 153503 - DNA, 83 bp, Homo sapiens
cggtgacgtccctcccgctggtcaccactccggcaccagaatccacattcatctcaatggaaggatcctgccttaagtcaact

SEQ ID NO: 153504 - DNA, 97 bp, Homo sapiens
gtgctaaaagactgtccaaagatgatgttcatccatgtgattgttgagcccattccaattggacaagctgctaaggactatttaaatttacatataa

SEQ ID NO: 153505 - DNA, 100 bp, Homo sapiens
ggacagaatgaccttccggccttgagtccctggcgtcctgcctctgcggctctgccccctgcatcctgtgcagctgctgccccgccagccgcaactccac

SEQ ID NO: 153506 - DNA, 82 bp, Homo sapiens
ccctttcgccatgattttataagtttcctgaggcctccccagccaagctgaactgtggaatgaatcttacttgttgaatatc

SEQ ID NO: 153507 - DNA, 100 bp, Homo sapiens
atcaccggcgtgccccaccatgtcagacgcagccgtagacaccagctccgaaatcaccaccaaggacttgatcatcttccctgacgactgtgagttcaag

SEQ ID NO: 153508 - DNA, 75 bp, Homo sapiens
ggcggcgctttcggcgcgggcccgggccccgagcgcccgaacaggaatactcccccagttgcaagaggcgcagga

SEQ ID NO: 153509 - DNA, 98 bp, Homo sapiens
ttaaatccggagggggaaaaaatcccaaggtctgcaaagacatatgtagagtgtgtcggtcagaaggaacacctgagaaaccgctttatcatccttgt

SEQ ID NO: 153510 - DNA, 51 bp, Homo sapiens
ataaatctcgcccaaacaggaaaggtgccatgtttcagaacagagtaagac

SEQ ID NO: 153511 - DNA, 115 bp, Homo sapiens
gcggaacccgcagcaggactacgaactcgtccagagggtcggcagcggcacctacggggacgtctataaggttttcatactctgcacaccatcctcggggtccagtgtctccctt

SEQ ID NO: 153512 - DNA, 100 bp, Homo sapiens
cagaaattacaggccctggcaaatgagcaggctgaggcccgcaggtctaagaccaaggaagcacgcaagcgccgtgaagagcgcctccaggccaagaagg

SEQ ID NO: 153513 - DNA, 98 bp, Homo sapiens
ccgcccgcgcccgggaccgacccctctgctcgcggccgcgcctttgagacaatgcagatcttcgtgaagactctgactggtaagaccatcaccctcga

SEQ ID NO: 153514 - DNA, 98 bp, Homo sapiens
gaacagtggcagcgcgacctggccagctgccgcgactgggaggagcgccggaacgccgaggcccagcaccaatagctgcaggaactggcccaaatttt

SEQ ID NO: 153515 - DNA, 93 bp, Homo sapiens
ctccactttcgccagcccgtgccgcgagcgcggcctgcaggaggaccaagaatcgccttcagccctgtctggtgcatccttggcagaaagtga

SEQ ID NO: 153516 - DNA, 75 bp, Homo sapiens
gccgctgcagctcgggcagagccgccaagctttggggtctacgacgttcctccatcggtgagcaaggatgtgccc

SEQ ID NO: 153517 - DNA, 100 bp, Homo sapiens
acctccattggatttaaaagacagtcctcgtcagcactgactttcagctatggaatcggaggaagcgcagctacaagcaggccgtgagtgagctggacga

SEQ ID NO: 153518 - DNA, 78 bp, Homo sapiens
tatactgcagcaggattggctgcagcagctacattagcagctttgaagatactgctataatttgaaaatttgaaatta

SEQ ID NO: 153519 - DNA, 78 bp, Homo sapiens
accaccacaactccaggaaggaaaccaaggggcagacccaaaaaactggtttctaagcatgaattgaggaacagaaga

SEQ ID NO: 153520 - DNA, 83 bp, Homo sapiens
agagcctcgcctttgccgatccgccgcccgtccacacccgccgccagctcctgtccaaatatgacccccagaaggaggcagag

SEQ ID NO: 153521 - DNA, 113 bp, Homo sapiens
acgttgcaggggcatactaatagagtctattcattacagagtatctgcacaaccaccactgcatttttgcactttttcttcctggcttcattctgttgggttttgactgaggc

SEQ ID NO: 153522 - DNA, 74 bp, Homo sapiens
gctcctgcagctgcccccctggctggatgctacctgacttacatcaagctatcaacggcaatcaagcgtaatga

SEQ ID NO: 153523 - DNA, 51 bp, Homo sapiens
cagtctccacaagtccaaacagttcagagtagctgtgctatgtgtttccag

SEQ ID NO: 153524 - DNA, 75 bp, Homo sapiens
ggaaatcgggctgaagcgactgagtccgcgatggagcagcctcccgcgacgatgcccctcaacgttagcttcacc

SEQ ID NO: 153525 - DNA, 84 bp, Homo sapiens
caacgccaacctcaggcgagatgcaaccatgtccaagggacctgcagttggtattgatcttggcaccacctactcttgtgtggg

SEQ ID NO: 153526 - DNA, 51 bp, Homo sapiens
gctgaggactcagaccagtctctgcaagaatttgaagaccttgcttctcat

SEQ ID NO: 153527 - DNA, 75 bp, Homo sapiens
agcgcggggaaccaaggagacgctcctggcactgcaggtcgcaatggaagaagagatcgccgcgctggtcattga

SEQ ID NO: 153528 - DNA, 89 bp, Homo sapiens
ttttggtgggatttataggagagttccaaagtttttcaagaagttgattcaagtcagttgagacgccagttgtgtggaggaagtcaggc

SEQ ID NO: 153529 - DNA, 90 bp, Homo sapiens
tgttttctgaagatgggaaaagccctttggacaaggactgaaatgcaactgcagaagcaacatgtgaccttttagagatgcttgtgggac

SEQ ID NO: 153530 - DNA, 82 bp, Homo sapiens
gacggcgagcgcgagcggcgcgagaaacatgatgccttcttctgtagagtgggcgctttgcagaatacgtgttgaatgaaat

SEQ ID NO: 153531 - DNA, 97 bp, Homo sapiens
tctctcgctgtgagacatgtctgagactcctgctcagtgtagcattaagcatgttggcagataaattgaacatgactccagaagaagctgaaaggtg

SEQ ID NO: 153532 - DNA, 75 bp, Homo sapiens
ggacagcggcacagaggagggaggttcttcacacacccccattcggcgtagtacccagagagctcaagatgtgtg

SEQ ID NO: 153533 - DNA, 100 bp, Homo sapiens
ggcaccagctgttgcaagggaccttctccggcccctccagctgccccctgtgtggcaaacctttcttgagctcagctcgatgcattctatttctcatcat

SEQ ID NO: 153534 - DNA, 143 bp, Homo sapiens
gactctctaggctgccgggcgctggtcgtcagcgccgaggctgggctgaggcgccgcggtaccatgaggcgccggacagatgggagttttgtggttcatgatataccttctggatcttatgtagtggaagttgtatctccagc

SEQ ID NO: 153535 - DNA, 96 bp, Homo sapiens
cagcgacacccgaggggctacacagtatataaggtcaccgcccgggcacgtgtggttctcaaatataggcattctgatgggaacttgtgtgttaaa

SEQ ID NO: 153536 - DNA, 101 bp, Homo sapiens
ccccagtaccccaaggccccgaaggagacctggccggccccggaagctgccccgcctggagatctcagacctcccagatgaatggtgtccacacagcgagg

SEQ ID NO: 153537 - DNA, 90 bp, Homo sapiens
gtacaatcctcacccaatgttccaaagaaatatttatggaccagctttatccagggactctaccattcccacccctttggccccactcca

SEQ ID NO: 153538 - DNA, 100 bp, Homo sapiens
agtgcctgagcaacatccgcgagttcctgcgcggctgcggggcttccctgcggctggagatttgaaaacaatttgtagccaacttcagtatgaatcaaag

SEQ ID NO: 153539 - DNA, 75 bp, Homo sapiens
cgctgttttgccggaggagcccctcaggccacctagaggatcaagacataatgggagcatttttagacaagccaa

SEQ ID NO: 153540 - DNA, 82 bp, Homo sapiens
caggaacagaaaaccaaacaccacatgttgtctcttagaagtgggagctgaacggcagaaggccacaagctgtacaaggacc

SEQ ID NO: 153541 - DNA, 100 bp, Homo sapiens
ccatcagaggcaccccagacacaagtgatcagcagctggactgtgccttggacctaatgaggcgcctgcctccccagcaaatcgagaaaaacctcagcga

SEQ ID NO: 153542 - DNA, 100 bp, Homo sapiens
tcaacttctaccagttcctcggggtgcagcagccttgttgtcctcctggtgcgaagagctcggccgcctgctgctgctccgacatcagaagagccgccag

SEQ ID NO: 153543 - DNA, 97 bp, Homo sapiens
cagctccgcctcctccgccgcgcaggtgtacacttaaagcgttctgggaatatgaatcccttctgcaccctggaatcaccagtccagccatgcatgg

SEQ ID NO: 153544 - DNA, 100 bp, Homo sapiens
cgaccgccctcttctgtcttgctggttatattctgggcactaaatgaaggcgtttctaggcaatttgattcgttcagagatggatttgaatcagtcttcc

SEQ ID NO: 153545 - DNA, 75 bp, Homo sapiens
caccgagtacgaagcgggcgtttgcgaagatactacatcctttgaagacataagtccacaaggtgttagtgatga

SEQ ID NO: 153546 - DNA, 75 bp, Homo sapiens
tatgctggacatcaaatttccaggtcctcagaatggttggaatgaccctccagctttgaacagagtacccaaaaa

SEQ ID NO: 153547 - DNA, 80 bp, Homo sapiens
cgcagcccggcgggaggataaagaccaccacgtttgtttcgacgccggaccgcgtaagagacgatgatgttgggcacgga

SEQ ID NO: 153548 - DNA, 84 bp, Homo sapiens
gcttcatcaaaaatagtgatagctttgataaatatcacacttcagtggcttattcagcattcaaaatctagaagaagctgaagc

SEQ ID NO: 153549 - DNA, 76 bp, Homo sapiens
caaagtgctgtttgtggcccacaatcctcaacatgggccccttcacagatgtagtcactacaaatcttaaattgcg

SEQ ID NO: 153550 - DNA, 82 bp, Homo sapiens
tggcggatgccctgcagtacctgcagaaggtctctggagacatcttcagcaggtacctggactatgccagagtccccaatag

SEQ ID NO: 153551 - DNA, 98 bp, Homo sapiens
cttagctgtgctcgcgctactctctctttctggcctggaggctatccagcgagtggagtcaacatatcaatggagcaagtcacagtcgtcgatgccag

SEQ ID NO: 153552 - DNA, 100 bp, Homo sapiens
tccgcggcgctccgggcccgggcggctggcctcaccgcccactggtacaacaaacacctcttcgtgcacattgggcatgccaaccattcttacagtgacc

SEQ ID NO: 153553 - DNA, 75 bp, Homo sapiens
gtcaaaaaggaccagttgggcaaggtcatactccctgtcacaaactccagctgaactaacttggaggaggatctt

SEQ ID NO: 153554 - DNA, 100 bp, Homo sapiens
tcaaccaagaacgtcaaacactccaacgattgagagcatttaaagatgttcctcatggatgaagaaggaccagcccacatttaccctccgacaagttggc

SEQ ID NO: 153555 - DNA, 82 bp, Homo sapiens
gactgaaggaggaatatcagtcccttatccggacctgcctagagctggaacgttacctccagagcgagccctgctatgtttc

SEQ ID NO: 153556 - DNA, 82 bp, Homo sapiens
ggaatgggtccaggccgtggtcagccgcttcgacgagcaggtatattgaaaagtctgattcagttacaatcagtgtatggaa

SEQ ID NO: 153557 - DNA, 88 bp, Homo sapiens
gcggagaaggactccctggacccctccttcacgcacgccctgcgcctggtgaaccaagggcgaactttctgaccaagtatacaactac

SEQ ID NO: 153558 - DNA, 83 bp, Homo sapiens
cttcgtatggcagctgatgatgtagaaggaattacatgaatgacagtcttcgaaccaatgtgtttgttcgatttcaaccagag

SEQ ID NO: 153559 - DNA, 98 bp, Homo sapiens
actgcagacacaactacggggttggtgagagcttcacagtgcagcggcgagttaccacaccagctcaaaggggcaaggtccctccagttcaccactcc

SEQ ID NO: 153560 - DNA, 100 bp, Homo sapiens
cttcgccgtgctggccgcggcccgcctcagcatctggtacagccgagtaaatgaattggtggatgccagagatgtcggccttggtgcttggtttgaagca

SEQ ID NO: 153561 - DNA, 100 bp, Homo sapiens
agaacggacttttcgtgtcccgctgtaaggaaacaagatggtccttaaaaccgaagaggaggacgatgtgttcagagcaacattgttttgttgacacaag

SEQ ID NO: 153562 - DNA, 74 bp, Homo sapiens
cagccttgcgcgtcgtcgctacctcctcggacagcgcccgggggctggagaaggccaggcagcagctgcaggag

SEQ ID NO: 153563 - DNA, 100 bp, Homo sapiens
tctggtcactccccaggattatgcgcggatgtacagttacccagcacgtgtacctcctcctcctcctattgctcgggctgtagtgccctcgaaacgtcag

SEQ ID NO: 153564 - DNA, 101 bp, Homo sapiens
gatctctactgtgcagctccagagagacgtgaaacatgtgaacactcaagtgaagcaaaagccttccatgattacgccgaatacatcaagcaatggtaaca

SEQ ID NO: 153565 - DNA, 103 bp, Homo sapiens
gcgtgggatcttcacaatcagtgaccacccagcagaacagcgtgggatgttcacaaaggtgtgggttgctgaccgaggaaataaaagaatccaagtatttgat

SEQ ID NO: 153566 - DNA, 83 bp, Homo sapiens
gtttcttctagaaaagaaaggctcacggaaaatgtaagtacgaggatgtcgtccaggaaagattgtgcagatgactgaagcag

SEQ ID NO: 153567 - DNA, 100 bp, Homo sapiens
gcagtctaatagtaacacagagatatgagggaaggcaccattggagatatggctatcctgggtataacagaaagttttcaagtgaagcgacaggttcttc

SEQ ID NO: 153568 - DNA, 100 bp, Homo sapiens
gagcggccgcgcggctgggcgttcatctaccacgcctacgtcccgtggaccgggagcccgtggaccgggagccggtggtgtgccaccccgacctggagga

SEQ ID NO: 153569 - DNA, 100 bp, Homo sapiens
ttatcgatatataccaacaagaaggcaccaggggtctgtggagggttctcgcaaccttgggattaatcttgctcactgcctactttgtgattcaaccttt

SEQ ID NO: 153570 - DNA, 75 bp, Homo sapiens
ttttgggcttcagaatgcagtgttttcgatttggaggccaatcactgccaccttttatttccctgtgggtccagg

SEQ ID NO: 153571 - DNA, 50 bp, Homo sapiens
cggacctcctcacgagcccaaatcaactcccttctcctgacctggacctt

SEQ ID NO: 153572 - DNA, 75 bp, Homo sapiens
tggtggccatttatgaagttttaaaggatgatgaacgaaggcagagtgtaaacaggaacatcgataagtagtgta

SEQ ID NO: 153573 - DNA, 100 bp, Homo sapiens
atcggctgcggcaacttcggggagctccgcctaggggaacgcccttttgcttgtgactggcagggctgcgacaagaagttcgcccgctccgacgagctgg

SEQ ID NO: 153574 - DNA, 100 bp, Homo sapiens
gaaagtgtataactacaatcacctaatgcccacaagggagaaaactggttgtcctggatgtttgaaaagttggtcgttgtcatggtgtgttacttcatcc

SEQ ID NO: 153575 - DNA, 100 bp, Homo sapiens
cgctgacttctccactggttcctgggcaccgaaaggatgcagcaccgaggcttcctcctcctcaccctcctcgccctgctggcgctcacctccgcggtcg

SEQ ID NO: 153576 - DNA, 100 bp, Homo sapiens
gatccaccagcggttccatcctacacttggatgcggcattccaaaagaactcactgtcctgattgggatagcagagaaagctggggacatgaaagctatc

SEQ ID NO: 153577 - DNA, 82 bp, Homo sapiens
caccacaataatccacagccaaggaacgtcaaggtcgtgggaaataaaaggcagttctacacagactgcagcaacggttgca

SEQ ID NO: 153578 - DNA, 75 bp, Homo sapiens
accagaagggacaccttttgaagatgcaggaacgaatgcaggaatttgggaactgagctgtgcaagtgctgaaga

SEQ ID NO: 153579 - DNA, 101 bp, Homo sapiens
gaaccgcgggctctgccaggagagaagactgaacccagcgggtgccgcttctccacccgaggcttccacctccaacgagccatgttccaggctgcaggagc

SEQ ID NO: 153580 - DNA, 75 bp, Homo sapiens
accgaggaaggccccgagatcccaggcactgagtgactgcatactatatctgagaaatatgggctgcccgtggag

SEQ ID NO: 153581 - DNA, 100 bp, Homo sapiens
caggagtcatttctgttccgcacaggcctgctgaactgggtgctttatatagggaagttgccttaaagaatagacaagagctgtatgcactacctcctcc

SEQ ID NO: 153582 - DNA, 82 bp, Homo sapiens
tatcagagatattacagtttacaggctgactactggaagcttgctaatctggacctgaactctgaaaaacagagtggaggag

SEQ ID NO: 153583 - DNA, 100 bp, Homo sapiens
taaacacaaaccaccctttaaattttcaagggaaggacagaaacacagtgctctgtgcctatacagtgtacggataaaacagataaacaagaagcgctgt

SEQ ID NO: 153584 - DNA, 87 bp, Homo sapiens
ttgtttgtggatcgctgtgatcgtcacttggaaagctccaaccatggccatggggctcttccgcgtgtgtctggtggtggtgacggc

SEQ ID NO: 153585 - DNA, 80 bp, Homo sapiens
aaagaactctggctagagaccctccaagggggctttgaccacgacctttgaagagcttcattttgagatcaagccccacg

SEQ ID NO: 153586 - DNA, 83 bp, Homo sapiens
acgcaaccccagatccatttacactttacattcctccgtgtcacaaagcagtacctgccccacgtggcgcgcctctgtctgat

SEQ ID NO: 153587 - DNA, 90 bp, Homo sapiens
ccgcgcggccgcggcggcggagaagcagctcgccagccagcagcccgccagccgccgggagacaacgactgaaagacctttcattcagaa

SEQ ID NO: 153588 - DNA, 83 bp, Homo sapiens
cgagtcctagatgtcaataaccagtccttcagagaacaagaggcttgacacaactctcatagactttactgacatgaagtgcc

SEQ ID NO: 153589 - DNA, 101 bp, Homo sapiens
gaggagtccatggacttcctggataagagcacagagcatgtctgttcgatcctggcttccctcctgcggaacctgagagggcagcagcggacccggcttct

SEQ ID NO: 153590 - DNA, 100 bp, Homo sapiens
ctgaggagaggagcgtcaacagcagcaccatgggtgccaagctctcctgatgaaatgtgttctgccccactgggctccagggacagtgtctggtgctgtt

SEQ ID NO: 153591 - DNA, 87 bp, Homo sapiens
gcggccggagcgggcggctgagacaaaggcgacgcttcttggacacttaatgattgttggcaagaaatgtgctgctgatctgggcct

SEQ ID NO: 153592 - DNA, 100 bp, Homo sapiens
tctaccctaatcaagatggggacatacttcgcgaccaagggagacctggccttacagggcagcattgggagtctgtctctaagtgacctcacatgccatg

SEQ ID NO: 153593 - DNA, 83 bp, Homo sapiens
acagtgctgagtcagtgtgacagtccatatgtaaccaaatattatggatcctatctgaagagatcctgaaggagctagacgag

SEQ ID NO: 153594 - DNA, 97 bp, Homo sapiens
atgggaaggtggatcccgccgggaggtactttgctgaagtattagaggaagctcttgtaggaaatgacagtgaaggcccactgtgtgaattgctttt

SEQ ID NO: 153595 - DNA, 90 bp, Homo sapiens
cagagagagagcttggttaacttgggagaaagtttcatctgtggatggagtattgtctaattccaagctaaagttggtgcgtagcctggc

SEQ ID NO: 153596 - DNA, 76 bp, Homo sapiens
gagagaacagggtggccgcttggtccaggcagctactgggtcagtgacaagaggctgcccccctgctcactcagcc

SEQ ID NO: 153597 - DNA, 51 bp, Homo sapiens
aagaaaacatcaaagaggtctagcaaaggaacagattataccattctctcg

SEQ ID NO: 153598 - DNA, 75 bp, Homo sapiens
tcggcggcagctgtgagggggttccgggaagatggtgctgatcaaggaattgagatcgtgctggtggtgttcttc

SEQ ID NO: 153599 - DNA, 122 bp, Homo sapiens
gagaggtgctaagtggatcctctggccagctgactgcacttcttttttgagaaaggaaggaatatatcctgactgattttcgaggtcaggaaaatggattggatggcaccaagagtggaggg

SEQ ID NO: 153600 - DNA, 100 bp, Homo sapiens
tttgtctttgatgtaatacatgaaggatgtttggtcaccccgccagagcttctcagtttaattggttggggtcagataagaagaggagtgacaatcaagc

SEQ ID NO: 153601 - DNA, 100 bp, Homo sapiens
ctcagcgagctcctgggcatcccgctggaccagttcccatggagaatgttgcaacaattgctgattgtgccagtgtgattgaaggagtcagtcggagccg

SEQ ID NO: 153602 - DNA, 100 bp, Homo sapiens
ctggtgaggacagcctgccagagtctggagatgcgctctgtgctgcggaaggcgggctccccgcgcaaggcccgccgcgcgcgcctcaaccctctggtgc

SEQ ID NO: 153603 - DNA, 95 bp, Homo sapiens
cagaggctactgggggaacaagatcggcaagccccacactgtcccttgcaaggtgacaggagtttctgccaaatcctgtatgaccacagcacctg

SEQ ID NO: 153604 - DNA, 101 bp, Homo sapiens
ggaccccgccatcgctgcctcggaccccgccaccaaggttccaattgtggacaagataaggaccattgctcaggctgtctatggagccaaagatattgaac

SEQ ID NO: 153605 - DNA, 100 bp, Homo sapiens
agtttgccttcatgaagaaaagacaccagcaggaagaatagtggctgactgcctaacagattgttatcaggttactggagttggctataatcaatttggg

SEQ ID NO: 153606 - DNA, 100 bp, Homo sapiens
ggctagaagacttattataaatgaagatctggacagtggcacacagataccgtttattaaaagagctgtggctaatgtgacagtgatgataacatgggtg

SEQ ID NO: 153607 - DNA, 73 bp, Homo sapiens
gggaactctgaacctcaataacgagctagagaccgttggatggcagcttaaccttcagatggctcactctgct

SEQ ID NO: 153608 - DNA, 75 bp, Homo sapiens
agcctttggacaactattttcgtcatctttggaacaaagactgggctggcttagatgaagatgaagatgcacatg

SEQ ID NO: 153609 - DNA, 100 bp, Homo sapiens
gccgggggccggggagcgccagccacataaagaagatccctaatagtcatttctcaacaattatatagtcaactgatgtaacaatggtactaatattggg

SEQ ID NO: 153610 - DNA, 100 bp, Homo sapiens
gcggtgcctgagcccgtgcctgtcttcagatcttcacagcacagttcctgggaaggtggagccaccagcctctccctggaaaaacaagaatggtggtggc

SEQ ID NO: 153611 - DNA, 90 bp, Homo sapiens
agacacggtggctactctgcctcggggacgaaagcaggtatagtggaggattacaagccaccgttctacgatgtggttcccaatgaccca

SEQ ID NO: 153612 - DNA, 126 bp, Homo sapiens
aggacatgtaccgtgctgcagatgaaatagaaaaggagaaagaattgcttatacatgaaagaggggcatcagaacatacatatgatagttgagaaagacacatattctgatcatgaagaaataaac

SEQ ID NO: 153613 - DNA, 82 bp, Homo sapiens
caacggcaaagttttgcagatcttcaacaagaggacccaggagaaattcgccctcaaaggagtgcatccgccccaacccttt

SEQ ID NO: 153614 - DNA, 75 bp, Homo sapiens
ccaggccaagagggatccttcacccgtgtctggctcttgtcaggatggtgaagctgttcatcggaaacctgcccc

SEQ ID NO: 153615 - DNA, 90 bp, Homo sapiens
gctggccacttgcttgggatcctttatcctggtcatcttctatttccaaagtgaggtttatacatggggcgacaatgatgagggacaact

SEQ ID NO: 153616 - DNA, 88 bp, Homo sapiens
tatgaaaagtgaagaaagtgatcataggagaaaaccatttcaggttatgatgtgattgctcaagcccaatctgggactgggaaaacgg

SEQ ID NO: 153617 - DNA, 83 bp, Homo sapiens
ctccctccacatctgtataacctgtcatgctgctaatccagccaatgtttctgcatctaaagaatgcagagagctggaattcc

SEQ ID NO: 153618 - DNA, 100 bp, Homo sapiens
aggctgtaaggaccatggaaatctatgttgcccagttcagtgaaattaaggagagaaggatattcctggactgactgatactacagtgcctcgccgcctg

SEQ ID NO: 153619 - DNA, 82 bp, Homo sapiens
tgaagctgccgctgtcgctgctgctcgttcgagtcgcagtactatactggcaattgctggagaagattttgcaattgttgct

SEQ ID NO: 153620 - DNA, 90 bp, Homo sapiens
aaaccccgatcacaaagatacgaatctcttaagggggttggaaaagagactgttcaaaccactgaggatcagattttgaagagagatatg

SEQ ID NO: 153621 - DNA, 100 bp, Homo sapiens
tacgtgggcagcggcggctggcgcttcctgcgcatcgtctgcaagaccgcgaggcgagacctcttgtgtctgcggcgccgagggggcccctacaagaccg

SEQ ID NO: 153622 - DNA, 89 bp, Homo sapiens
cagccccaggatgccgtgggccgcagccactcaggactgtcaaaggtactccaaagattcaggtttactcacgtcatccagcagagaat

SEQ ID NO: 153623 - DNA, 101 bp, Homo sapiens
ccaaccccacatccctcccggctgtagccaagaactattcggttctctacttccaacagaaggtagagttggctttgtgggacacagctgggcaggaagat

SEQ ID NO: 153624 - DNA, 83 bp, Homo sapiens
ggacagaggcaccaaggacctccaagacagtaaaatgtttattggaggcttgagctgggatacaagcaaaaaagatctgacag

SEQ ID NO: 153625 - DNA, 100 bp, Homo sapiens
atggtgaataaccccaaaattcacctggcacagtcacttcacaagttgtctaccgcctgtccaggaaggatgtcagtattgaatatggtggtgaggcgtg

SEQ ID NO: 153626 - DNA, 100 bp, Homo sapiens
cctgcacctcaagctcctcagcgtggtgcccgtccctgaagacccccctcgacaaccaacattcaccaccaggctggaccttgatgccgctggggccggg

SEQ ID NO: 153627 - DNA, 75 bp, Homo sapiens
gggaaaaatgctgaagtgctgtactcgatcgagtcagagtttcaagaagtttttaaccgaagtgtcatgattatt

SEQ ID NO: 153628 - DNA, 100 bp, Homo sapiens
ctccggcagcagcggcctcgccgccgcccgtctcctgtcgcgcagcttcctccattatcataaagtgcagagcagtggaagtttcattaatacaccacat

SEQ ID NO: 153629 - DNA, 83 bp, Homo sapiens
aggacgaggaggcagccacggggcccctggggacttgccatgaggtgttgaagccttgtttcactgagttggagagactggac

SEQ ID NO: 153630 - DNA, 110 bp, Homo sapiens
atggatttgatccacaaagtcccctttgtgttcacataatgctgtcaggaactgtgaccaagcttttcaggatgtccagcaaagaatcctgtgggaaaaaagagacatct

SEQ ID NO: 153631 - DNA, 50 bp, Homo sapiens
ctcccaagtagctgggattataggtgcccgccaccatgcccggctaattt

SEQ ID NO: 153632 - DNA, 83 bp, Homo sapiens
gtgaaactggcctcccaagccctgataagttcatcaatgccagaagacgaattcttcagccaatgttggattcaagttgttca

SEQ ID NO: 153633 - DNA, 74 bp, Homo sapiens
gtcttcaattaaaaaatttattaaaggaagcacacctaaggttttgacacaagggcgcatatcttcaaagcacc

SEQ ID NO: 153634 - DNA, 76 bp, Homo sapiens
aacgcatcatgccagggagccaagcgtcctgcccggccgtaaatccattacaagattttggcttttctgttgaaaa

SEQ ID NO: 153635 - DNA, 75 bp, Homo sapiens
ggaaggggttcccagaagtcagaatccaagatggaaaaacttgacatgtctaggtttcctgttgaaaatattaga

SEQ ID NO: 153636 - DNA, 82 bp, Homo sapiens
gcaagatggcggacagtgcggaactaaaggatggatgtggacagtttccatatgatgcaaacatccagatacactgggtatc

SEQ ID NO: 153637 - DNA, 95 bp, Homo sapiens
cccccacctgaacagaaaactgcatttgacaagattatggattggatatgtctacttctggatgcaaattttactgttgttgtaatgatgccaga

SEQ ID NO: 153638 - DNA, 50 bp, Homo sapiens
agcggagctcccccaagagccggaaagtatctccagatgaaatggccact

SEQ ID NO: 153639 - DNA, 75 bp, Homo sapiens
ggaatagactccatctatccatatgagcacagaatgaaaagcacctttgaagaatcgtaagccatgaatgatgac

SEQ ID NO: 153640 - DNA, 73 bp, Homo sapiens
aattgctaatccagtatttgcggatagctccaaactgggatatatgttttcatcttctgcccctgtggatcag

SEQ ID NO: 153641 - DNA, 82 bp, Homo sapiens
aagaagatcctgctgcccgagcccagacatccacgacagcgatggcagttccagcagcagccaccagagcctcaagagcaca

SEQ ID NO: 153642 - DNA, 98 bp, Homo sapiens
ccacttgattacccgttaagtcccccaaagatgagatttacctgtgagatgtttcatcccaacattcaaggagcagggacaagttacaggaatgttct

SEQ ID NO: 153643 - DNA, 100 bp, Homo sapiens
cttcaagccaaacatcaagcagaatgtgatttgcttgaagatatgaggaataatgtatttgtggccttggacatgaggcagtcagtcctctgttgctgtt

SEQ ID NO: 153644 - DNA, 88 bp, Homo sapiens
aaaaccctgcagaacggctgcctaatttacagcaaccatgaggtgtggccgacgacgatgccctcgctgaggagcgcatgcggagagg

SEQ ID NO: 153645 - DNA, 75 bp, Homo sapiens
tgcaccccctggctggaggccgaggactaccccctgcttctagggtgtccgcaatgttgccagtgtctgtctgca

SEQ ID NO: 153646 - DNA, 50 bp, Homo sapiens
gcctgggcatagacttccttaaggaactcattatacaatgacaaatggag

SEQ ID NO: 153647 - DNA, 90 bp, Homo sapiens
gccgttcctttgctgagtattctagcctccgaaaacatctggtggttcactcagggacagatctggaagcatctttgctaagttttgaaa

SEQ ID NO: 153648 - DNA, 100 bp, Homo sapiens
tggacaatcccaacgccctcacagagcgggagctgttggttaccaaggaagaccccaaagcactggctgttgccttgaactgggacataaagaagacgga

SEQ ID NO: 153649 - DNA, 100 bp, Homo sapiens
agtgcaagcttagagcgtctggccaagaatcagaggaagtggatgaagaagatgactttatgtgtaagaaggcggcctctaaatcaaaagagaatggaag

SEQ ID NO: 153650 - DNA, 100 bp, Homo sapiens
gcatcggctgcgagctcctcaagaatctcgtgctcaccggtttctcccacatcgacctggtgtattacctgactgcttaaccgatggctctgatgtggtc

SEQ ID NO: 153651 - DNA, 83 bp, Homo sapiens
tttgatgaggacgcggagccgcggcggagccggaggaagctgatggtcatcttttccaagtgaaaggtgtagcagtcactcgg

SEQ ID NO: 153652 - DNA, 74 bp, Homo sapiens
tgagagcgcctggaggctcgagcggagggggcagagttaccagggcaggttatctccatggcagcttctactct

SEQ ID NO: 153653 - DNA, 51 bp, Homo sapiens
cgggattcccaggattcataggaagccggagaaaatacggtacatgtcccc

SEQ ID NO: 153654 - DNA, 82 bp, Homo sapiens
ggagaaggtgtacatcgtgcatggcgtccagaataccctctaccatctgctttggtcagggtgccgctcgaggatttaaaag

SEQ ID NO: 153655 - DNA, 75 bp, Homo sapiens
cgcggatctcaccgccgctcaggtaaggtacctgccgtgggcagatctgagctttcttcttggacaccccatacc

SEQ ID NO: 153656 - DNA, 89 bp, Homo sapiens
agcctttaccaacgccatcaccgacctcatcagtgagctgtccctgctggaggagcgcttccgggttcggagtgttcagtggacacacg

SEQ ID NO: 153657 - DNA, 75 bp, Homo sapiens
gcggtgctgaggcacctggagaccttcgagcaccccaacgtggtcaggtgtgactgcacagaaaagttacaaaac

SEQ ID NO: 153658 - DNA, 50 bp, Homo sapiens
ccattttaatggttggaacagaagacgaattgtacgtgggcagaccgcag

SEQ ID NO: 153659 - DNA, 83 bp, Homo sapiens
cttggagtctttgtccaggacgggcagcgaggtcacaggccccacctttgctgatggcgagctcatccccagggaacccggct

SEQ ID NO: 153660 - DNA, 98 bp, Homo sapiens
gtgtcttccccagctctgcagccacatactatccgtttgttcaggaaccaccagtgacagactacaagagactgtgaaaaggaagttggaaggagctc

SEQ ID NO: 153661 - DNA, 100 bp, Homo sapiens
aaagctttcttctgttcgtcagaaatttgatgttcaaaccttgtactactcagctgatcacaagctgcttgatgggaacctactagatggacaggctgag

SEQ ID NO: 153662 - DNA, 100 bp, Homo sapiens
cgggcggcccctggagatgattgagccgcgcacgctacagtacaagggcatcatggtgggaggcttgaagaggaaacactctgatttggaagaggaggag

SEQ ID NO: 153663 - DNA, 100 bp, Homo sapiens
gcaagatctggctgcttttctttgtggaggttttgaacgaagaatgtgatcagaactggtacaaggcagagcttaatggaaaagacggcttcattcccaa

SEQ ID NO: 153664 - DNA, 96 bp, Homo sapiens
tggaaggagactggatgatagaattgctgaccggttccctgatgtgttacctgcttctgctactgatccaaactgcagaacttctcattcatcccc

SEQ ID NO: 153665 - DNA, 75 bp, Homo sapiens
cggagacatgggagacccggggtcggaatggccacagatgtctttaattccaaaaacctggccgttcaggcacaa

SEQ ID NO: 153666 - DNA, 82 bp, Homo sapiens
cttggaaggtgcatctgcagtacaggatatgaagaaattgagggttcttgccatggtgaccaagaatatggcccaggtgacc

SEQ ID NO: 153667 - DNA, 100 bp, Homo sapiens
agggaccagtacatcagagaaacccaactccatggacactgcaaatacctcacccttcaaagtaccaaatgaggacctaatttgcttcaaagatatcaaa

SEQ ID NO: 153668 - DNA, 122 bp, Homo sapiens
agagccgggagaagaaccagcccgaggtggacatgagtgaccggggcatctccaacatgctggatgtcaacggcctctagaaagcaaccagcgagatgaatactgctgaggactggggcctc

SEQ ID NO: 153669 - DNA, 100 bp, Homo sapiens
cagatccgggagcacgtcatctccatcgagggtccggcctctttggcctacccccgttggctccgctgccccaggtcgatgagtcccctgtcaacgacag

SEQ ID NO: 153670 - DNA, 100 bp, Homo sapiens
acgccgtgtacgagcgcaccagcgaccacaagatcgtcttctttaaaggaggtgaattagttatccctcttcttgtagaagaccctttagctacccctcc

SEQ ID NO: 153671 - DNA, 100 bp, Homo sapiens
ttagcacgatatcctaattatcccaaccctgctgtgaataatgacatctgccttgacgaagtggcagaggaacttagtgtgatccctcacatccacaaat

SEQ ID NO: 153672 - DNA, 120 bp, Homo sapiens
ggagctgctggaccggcagctgatgttctctcagtttgcacaagggaggcgacagagacagcagcaggtcatgttggcagcttcctattggtctcttctggccccagcagttgagatggc

SEQ ID NO: 153673 - DNA, 80 bp, Homo sapiens
gcaggcccagacgacgcgcgcgcatgtctgcgagattaatctctcatggccgctgcacaagaacctggcttttagctgaa

SEQ ID NO: 153674 - DNA, 100 bp, Homo sapiens
gggacatgtctaaccccggaggccggaggaacgggcccgtcaagctgcgcctgacagccgggccagcacatggctcccagcccccatctgaccgtgtaca

SEQ ID NO: 153675 - DNA, 100 bp, Homo sapiens
cagcagtggtggctatgaacccagaggtcgtggaggtggccgtggaggcagaggtggcatggggactcaaatccaaaagcatgaagcaacagctaagcaa

SEQ ID NO: 153676 - DNA, 100 bp, Homo sapiens
gggacaggaggctgcggggcctcaggtgaacctgagcaaggtgggcgagtattggtggaacgccatcctggagggagaagagcccatcgacattgacaag

SEQ ID NO: 153677 - DNA, 107 bp, Homo sapiens
agacgagggggcgtctgaggaggaagacctggaagacagatctgggtgaggtggctttgaccccgggttgcccggccagcacgaccgaggaggtggctggacagctg

SEQ ID NO: 153678 - DNA, 75 bp, Homo sapiens
atcggcctggagccagtgcccaagtacggtttggtatcgaaggatgatcgcagtgatgtggagagcagctcagag

SEQ ID NO: 153679 - DNA, 74 bp, Homo sapiens
gacctccttccatgaatcacaaatgttcttaatggcatctagaatggtgaaaggtgtagcagtcactcggccta

SEQ ID NO: 153680 - DNA, 75 bp, Homo sapiens
tgtgaaagagagcagctaaggctccaaaaggaattcttcatttgtctcctgatgtttatcaagagatggaagcca

SEQ ID NO: 153681 - DNA, 83 bp, Homo sapiens
ctatattgttacaattttttttcaagaactgccgtcttctttgcctgcactaatgatgataagagcacttttgaagaaacgtg

SEQ ID NO: 153682 - DNA, 83 bp, Homo sapiens
caggacacacttttgaagcttctcattctgtcaatggctgctgtattatatatctccacaggaccttcttggttaaatcaggg

SEQ ID NO: 153683 - DNA, 75 bp, Homo sapiens
ccttggcctctcctgggatcggcccaaggccagttctccgcaggtggcctgctgatagcatgtgctcattttggt

SEQ ID NO: 153684 - DNA, 99 bp, Homo sapiens
gaacatttctgggtgacactcaacaggattcccgtttaatctccacctcacaggtgacatccatgccatcactgcagctaataacctcgttgctgcggc

SEQ ID NO: 153685 - DNA, 75 bp, Homo sapiens
cgaaagtgctcccccatccccacagtataaaaagggttggattgagattgttggatgtgctgatcgttcctgtta

SEQ ID NO: 153686 - DNA, 100 bp, Homo sapiens
cgacgcccacccgctgtggaagtggatgaagatccaacccaagggcaagggcatcctgggaaagcgtggtgaccaagatgaagatgcagaggaccattgt

SEQ ID NO: 153687 - DNA, 96 bp, Homo sapiens
aaagaaacagagagaaagcagaagatagggcagctcgagaacgtataaaacagcagattgcattggtaatagcctgcagctggtgttttgagaagc

SEQ ID NO: 153688 - DNA, 86 bp, Homo sapiens
gtcatctcgctcggagcttcgctcggaagggtctttgttccctgcagccctcccacggtcaaaatgcagatcttcgtgaaaaccct

SEQ ID NO: 153689 - DNA, 101 bp, Homo sapiens
ctctgacccagctagccagatcccggacccaaaccatgttccctgtgaaggtgaaagtggagaaatcagccctcccaggcccaatacttcaaagcatccta

SEQ ID NO: 153690 - DNA, 98 bp, Homo sapiens
cactatgaaatcgaaattgtacacatttccaccgtgcagatcctcacagaaggcttccctcctggaggtatttgaagtacacactggaccaatacgtt

SEQ ID NO: 153691 - DNA, 75 bp, Homo sapiens
tgggcgcaagtcccagaagatgtcggagcccatagcaggtactccaaagattcaggtttactcacgtcatccagc

SEQ ID NO: 153692 - DNA, 75 bp, Homo sapiens
aaaaagagatgtggggggattctcgacctgctaacagaactggaccttttcgtccatttgacgtggaggacatga

SEQ ID NO: 153693 - DNA, 100 bp, Homo sapiens
gattcccaggatgtgagcaacacgggaccggactgactgcattgcacagatgatggatatttacgtatgtttgaaacgaccatcctggatggtggacaat

SEQ ID NO: 153694 - DNA, 99 bp, Homo sapiens
cgctgccgcctccgagcagcccgccaggcgagaaccactgtctctgatcaacgtgcggaagaggaacgtggaatctggggaagaagagctggcgtccaa

SEQ ID NO: 153695 - DNA, 143 bp, Homo sapiens
gttctgcaagatggagccaggaggagagcccacaggtgctaaagagagcagtaccctgatggagtcccttgcaggtctgccgtggcccccggagctggtggaggtggtggtcacgaccatggagctacatgacagggtcctcg

SEQ ID NO: 153696 - DNA, 101 bp, Homo sapiens
aggaggctaagaaagtggtgaatcccctgtttgagaaaaggcctaagaattttggcattgtgacagctggagtatcagccttggaagtatatacgccaaaa

SEQ ID NO: 153697 - DNA, 75 bp, Homo sapiens
aaggagctcggggactcccccaaagacaaggtgaagttcatccacgaccagacctccccaaaccccaagtacaga

SEQ ID NO: 153698 - DNA, 100 bp, Homo sapiens
cgacagttgtgttgtgccaatggtggagaagaaaacttcggtcccacttcagatggtgctgcagcagcaattttggccagtgaagcatttgtacagaagt

SEQ ID NO: 153699 - DNA, 75 bp, Homo sapiens
gaagttcagcccagaggagaaactcgctcgccttcagaagacaggccaccagcttgggctccccacggagggcag

SEQ ID NO: 153700 - DNA, 83 bp, Homo sapiens
gggaaagatctaccttctggaagctactactacgtggtgcttggaaagcagagtccccaggccccgtttgccgagctggctga

SEQ ID NO: 153701 - DNA, 75 bp, Homo sapiens
taaagacatagttcctggtgatattgtagaaattgctgttggaaatctacatttctgaaggaacccactcaacag

SEQ ID NO: 153702 - DNA, 97 bp, Homo sapiens
gggaaggcgggagacgagaagcctgaaaagtcgcagcgagctggagccgccggagatgcttctgatgatctagatgacttgaacttctttaatcaaa

SEQ ID NO: 153703 - DNA, 89 bp, Homo sapiens
gagctagagcgaatactggaagagaataaccgaaaaattgcagaagcacaagccaaactggctaggcagctggaagagaaagaccgagt

SEQ ID NO: 153704 - DNA, 75 bp, Homo sapiens
gaaggggtgaaagagactcggtgacagatacaggattttttatcaagcagaaatgcatcgaacaacgagaatcaa

SEQ ID NO: 153705 - DNA, 82 bp, Homo sapiens
gctgtctgggcttcatagcattcgcctactccgtgaagctggtaggtgagtgctgtcctcggctcactttcctcaagctctc

SEQ ID NO: 153706 - DNA, 90 bp, Homo sapiens
actccaagtaaggaagaaattgagaaagaatgtgaagataccagtttgcgtcaggagacacagcaggaggatgcattagcacaacaggcc

SEQ ID NO: 153707 - DNA, 98 bp, Homo sapiens
aaaaaagtagagaggttgacaatgcaagtctcttccttacagagagagccatttacaattgcacaagatgttccatttaagcagacctcttccatagc

SEQ ID NO: 153708 - DNA, 100 bp, Homo sapiens
cctggatcaaagagggcaactacttggctgtgggcaccagcagtgctgaggtgcaggagatgacaagtatgggcggaagatcattgtgtttagtgcctgt

SEQ ID NO: 153709 - DNA, 90 bp, Homo sapiens
gaagaatgtggaaataacggagcaacttgctaatggcaggcattttacaaggttgcaaaggagtttggcttccaaaataatggcttctcg

SEQ ID NO: 153710 - DNA, 90 bp, Homo sapiens
ccgtgacccacccggtgcccacaccccggcctggagcgtcggtcctgaccgccagcctgtcgtacatggtggggatgatcgccagcttct

SEQ ID NO: 153711 - DNA, 82 bp, Homo sapiens
tgtgcagccgcgaggaggcgcgggaggtgttcgagaacgaccccgagacgatgacgacaacccccccgtgtcttttgtgaag

SEQ ID NO: 153712 - DNA, 75 bp, Homo sapiens
taacctcaacctctgccatcacaaggatcatggaagggaagtggttgctgtgtatgttactggtgcttggaactg

SEQ ID NO: 153713 - DNA, 86 bp, Homo sapiens
cacctcctcgccagcagccgtccggagccagccaacgagcggattttttatcaagcagaaatgcatcgaacaacgagaatcaagat

SEQ ID NO: 153714 - DNA, 114 bp, Homo sapiens
ccacttccgctgacgtcattacggcgacacgtggatccaagatggcgacggcgatgaaggatgccctgcagtggtctcgccatccagctacagtggagggagaggagccagagg

SEQ ID NO: 153715 - DNA, 100 bp, Homo sapiens
tgagcgaggaggagctggacaatgaagactattactcgttgctgaacgtgcgcagggaggacatggatttgattgacatactttggaggcaagatataga

SEQ ID NO: 153716 - DNA, 100 bp, Homo sapiens
caagcttccaggtgtcccagaaacccaggaaatcgagactcatgactcccagagaggatggcatctagaaggaaatggctagtgatgagctgaaagagat

SEQ ID NO: 153717 - DNA, 101 bp, Homo sapiens
gcctcaactaatgacttcccagttcatcagcgtcttcagagatgctgatgaaaccaaagaatggattgaagagaagaatcaagctctaaacacagacaatt

SEQ ID NO: 153718 - DNA, 83 bp, Homo sapiens
gaatagtctacaaaggaagacttgtaacctggagaagaggatgaatttttagatgtgatctactggttccgacagatcattgc

SEQ ID NO: 153719 - DNA, 83 bp, Homo sapiens
ccgttcgttcgtttccagcctcaggaatttatggtcgcctttttgaatgagctgtcagttccccaaaacgtgtcactcctacc

SEQ ID NO: 153720 - DNA, 75 bp, Homo sapiens
aacctcagaggacaacgaagtgttcggttttataggatcacattgacaaaagtaccatggagttttatgagtcag

SEQ ID NO: 153721 - DNA, 82 bp, Homo sapiens
gaccacgcatccatccagatgaacgtggccgaggaaggaagcagccaccctcgccatggcctccccgcccgcctgcccctcg

SEQ ID NO: 153722 - DNA, 75 bp, Homo sapiens
gcagacatctacaaccttcgatctcctgacgagttgtgggcccacctggtacaggcaaaacagatgtggcagttc

SEQ ID NO: 153723 - DNA, 83 bp, Homo sapiens
agcaaggtcggcagagcaaggggcttacgcagaaggacctggccacgatttggtgttgtactgcgaggcattcctgaccacct

SEQ ID NO: 153724 - DNA, 83 bp, Homo sapiens
gttcgagcactaatatttaagaaagaagatgttaactttcagctcttcagagaagtaagaataatgaagattttaaatcatcc

SEQ ID NO: 153725 - DNA, 75 bp, Homo sapiens
acgctggtcgggcttcagtactcgggcaagaccaccttcgtcaacgtgatcgcgatgcttcaggactgccccaag

SEQ ID NO: 153726 - DNA, 100 bp, Homo sapiens
aggatgaagattcaccaaataagctatatactttggttacctatgtacctgttaccactttcaaaagtgatgcagaagatggggaagaatatgatgaccc

SEQ ID NO: 153727 - DNA, 80 bp, Homo sapiens
taaaaggaaaccacataccaatggagatggaaagaactccagtggatccaagcgttataatcgcaaacgtgaactttcct

SEQ ID NO: 153728 - DNA, 82 bp, Homo sapiens
tgtccatcgtgtgcctgatgatcacgcagctggctggcttcagtggaccatttcactgttacatgccttgaagtgatgagga

SEQ ID NO: 153729 - DNA, 75 bp, Homo sapiens
tagctgaaataacccttgatcctcctcctaattgcagaggcgtggagctatttcctatgacagttctgatcagac

SEQ ID NO: 153730 - DNA, 100 bp, Homo sapiens
ccctgagctccaggccgtgcgcatgtttgctgactacctcgcccacgagagtcggagtgtgagtgcatctccatccatgtgggccaggccggagtgcaga

SEQ ID NO: 153731 - DNA, 50 bp, Homo sapiens
caaacatgtcacaagagtcggacaatgccggtggtggtgtgcacattgag

SEQ ID NO: 153732 - DNA, 100 bp, Homo sapiens
acaaaatgaaatgacatttcaacgagtttgtcatcatgtgagagagaatagttgttgaatgttgggtcacgaagatctcaacctggccaaagaagagaac

SEQ ID NO: 153733 - DNA, 100 bp, Homo sapiens
gaggggtggtgaccatcgaaaggagcaagagcaagatcaccgtgacatccgaggtgcctttctccaaaaggcaacagctggaaacagagaagaaaaggag

SEQ ID NO: 153734 - DNA, 90 bp, Homo sapiens
gatccgaagcgatggagccccagctgaaggaaagcggaatcgatctgacaccgagcaggtctgggaggggctgaacgtggtgaagacagg

SEQ ID NO: 153735 - DNA, 50 bp, Homo sapiens
ctgggcatctttggggtctatgtcagagcttattggaaagtgatgttgaa

SEQ ID NO: 153736 - DNA, 83 bp, Homo sapiens
ctgcccccccgcctctgctcctacctctccactgccttcatccccaccatcaagcgctggagagcgaggtggcttcaataagc

SEQ ID NO: 153737 - DNA, 100 bp, Homo sapiens
cttccatggcatggatcttacccgtgacaaaatgtgttccatggtcaaaaaatggcaggccagaggcattgatgtgcagcaggtttctttagtcatcaac

SEQ ID NO: 153738 - DNA, 74 bp, Homo sapiens
ttacagggtcttcatgcactctgtcaagctgaggcatggaagaggagatggttcgtgttacgcagtggccgttt

SEQ ID NO: 153739 - DNA, 82 bp, Homo sapiens
tggactcatagtcactgccagaaaggtttggtgcacctcgatttggaggaagtagggcagggcccttatctggaaagaagtt

SEQ ID NO: 153740 - DNA, 50 bp, Homo sapiens
ggctcctggtggctccagcagcagcggttgctgatgctattagaacaagc

SEQ ID NO: 153741 - DNA, 100 bp, Homo sapiens
gctctttaagccatggatcctggttttagaggacaacgaaagcttttctgggagaagaggctacaaggacttagtgcatcagatgtaacagaacaaatta

SEQ ID NO: 153742 - DNA, 100 bp, Homo sapiens
aaaacgtagggaccacatcaaagacagctttcacagtttgcgggactcagtcccatcactccaaggagagaaggacacatattgaaggaaatgtggatat

SEQ ID NO: 153743 - DNA, 98 bp, Homo sapiens
tttgtggtgttttctatcccagttctttggcttttactaaaaatggacgcctggcaaccaagtccccagaggcaaattttagacaaatcttactatct

SEQ ID NO: 153744 - DNA, 100 bp, Homo sapiens
tccgcgcccgcggttgtagcagctgccgctgcagccatagcagcaggaactcagcgagatgctgtacacagaccggcccgactggcagagtgtgatgcag

SEQ ID NO: 153745 - DNA, 100 bp, Homo sapiens
cttcggagaagcagtggtgggttccatgtgatggtggagtaggaggcaggtctccgcggtgcaatgaagggcgtgttggtagacattgtgaatgcagcac

SEQ ID NO: 153746 - DNA, 90 bp, Homo sapiens
caagactgtgttcgggagtccttggaactgtggtccatggtaaagttttacaggtgcaatatcagctacttagaagaatggcttaaagat

SEQ ID NO: 153747 - DNA, 74 bp, Homo sapiens
ggacagtcgcgaggttcgagtgttgcagagcctgcggggcaagatctgtatccgttacagcactgatgtgagtg

SEQ ID NO: 153748 - DNA, 75 bp, Homo sapiens
tactcagcaccgacgctgacagggatggtgcctggtatgctccagaatcactgacagagagcaagttttctgtgg

SEQ ID NO: 153749 - DNA, 88 bp, Homo sapiens
agatcttgacaaagcctcttctgtttccaatgggctacagattctcgttgacactggaagcagtaactttgccgtggcaggaaccccg

SEQ ID NO: 153750 - DNA, 82 bp, Homo sapiens
tcgacttcggttcgggtgcgctgctcaaggacacggtctacaccgacttcgacggagccttcacgtaaatgggtccagtcat

SEQ ID NO: 153751 - DNA, 100 bp, Homo sapiens
ctgaagtgaggggtgaatttaaggaacaggagtacagctgtgtagtaaagatgccttctggtgaatttgcacgtatatgccgagatctcagccatattgg

SEQ ID NO: 153752 - DNA, 89 bp, Homo sapiens
ggggtgtgtggacgccgctttgttgcctgaggtttctgctttgggacaaccatacatctaattccttaaagtagttttatatgtaaaac

SEQ ID NO: 153753 - DNA, 50 bp, Homo sapiens
ttccatcgtcgggcgccccagacaccagggtctgactggaagccctggca

SEQ ID NO: 153754 - DNA, 74 bp, Homo sapiens
agcacgagggcgcgctcgagacgctcctgagctgaccctctggtgggcagcatcgccacacagtacatgaccaa

SEQ ID NO: 153755 - DNA, 82 bp, Homo sapiens
ccgcgtttcagccctagggaagggcccccagatgccgacggccctctctacctcccctacaagacgctggtctccacggttg

SEQ ID NO: 153756 - DNA, 80 bp, Homo sapiens
ccccacgcaaccccagatccatttacactttacagtgaaaggaaagcaagccaggatggatatttacgacactcaaacct

SEQ ID NO: 153757 - DNA, 100 bp, Homo sapiens
ctgttccagatgaagctttttgtggatacagatgcggacacccggctctcacgcagagattctgcttctcagaagatgcactattatagatactctaacg

SEQ ID NO: 153758 - DNA, 95 bp, Homo sapiens
gtggagcacctggaggaggagatccgtatcagatccgccgacgactgcaagcagtttcgggaggagttcaacgcctgggcggatgatgtggagcg

SEQ ID NO: 153759 - DNA, 100 bp, Homo sapiens
ggacctgcaataacccccacacctacagggcaaccatgaccgaggagagctctgacgttcccagggagttgatagaatgtgacagtgatgataacatggg

SEQ ID NO: 153760 - DNA, 123 bp, Homo sapiens
acacttcaggtgatgccaccaatccagacagaatgtacgaccttgttgctgttgtggttcactgtggaaggaaggatgataaagactatgctttaaaacaaatagaaggaactgggatctcta

SEQ ID NO: 153761 - DNA, 75 bp, Homo sapiens
tataccgtctgagggtagcagctcgaaagtagaagaaaactctcttgatagagcccaagcagccaagaataaagg

SEQ ID NO: 153762 - DNA, 82 bp, Homo sapiens
catgctggccaagaagatcatcattaaggacggaggcacgtctctgctttctatccgtcaagatgataaagtcgtgtgcccg

SEQ ID NO: 153763 - DNA, 75 bp, Homo sapiens
cttctccgccgcggcactgatccccacagaattaccaggaacactggtctcaatatgaaagtacaaaatcaagca

SEQ ID NO: 153764 - DNA, 100 bp, Homo sapiens
tctccttcagtgtggtcttccaggaggccgaggacacaccgctggatcagtgtaaggccctgggaggagcggggacactgaggacctctctccaaattgg

SEQ ID NO: 153765 - DNA, 100 bp, Homo sapiens
acgccgcccaggagacccctctgctgcaccacttcatggaatctttcccatgagaagctggtgcagttgtatggcgtctgcaccaagcagcgccccatct

SEQ ID NO: 153766 - DNA, 100 bp, Homo sapiens
cagagatccaagtgcgcgccctggcgggtccggaccaagcagggagagcaacaagccccggccctcagagctcagccggatgagcgcagcccagagacag

SEQ ID NO: 153767 - DNA, 100 bp, Homo sapiens
ctttgctgacctgataatgaagaattattttgcaccactggatgttgtttactgatttattgctaaacatgggtgcatttttggataaacccaaaactga

SEQ ID NO: 153768 - DNA, 101 bp, Homo sapiens
aaggatttcaacatgcctctgacaatctctagtgctggaggcaaagctggaaaggacagtgggaaggccaaggctaaggcagtatctcgctcacagagagc

SEQ ID NO: 153769 - DNA, 82 bp, Homo sapiens
gtcttgcctgtgtcccacttgttcgcggcctatagggtgaaaaggaacagcctgtatttgcaatgaccggccttcgatgggg

SEQ ID NO: 153770 - DNA, 100 bp, Homo sapiens
ggcgcccgtgtcggagaccccgcgccggaccctgaggcagcgaatgacctggttccacatggactgtcaggacctgatggcccagctcaggctggacaag

SEQ ID NO: 153771 - DNA, 90 bp, Homo sapiens
gaagaagggacacctttcacagctatcagggaagaagaagaagatggagtgtgggagaatggactttcctatgaatgccgtactctgctt

SEQ ID NO: 153772 - DNA, 98 bp, Homo sapiens
tgaagcaaacagatgagtgtattcgagtccacctctggaggtatgaaggaggctatccagccctcacagaagtcatgaataaactcagagaaaataag

SEQ ID NO: 153773 - DNA, 100 bp, Homo sapiens
caacactggagtcatcaatgccccccagaagctctgggttcccttcattatcctgtggaagtagcggtagcagttcatccaacacggctgtgaattctcc

SEQ ID NO: 153774 - DNA, 50 bp, Homo sapiens
acccacttcgagtcctttattgtggagggaccattgacatttatggatgt

SEQ ID NO: 153775 - DNA, 97 bp, Homo sapiens
tctgaatcatcgggtgttctctactccagagctccgacttatttctgtgggcagacattaacattcagccttgcagtctcatcctactcaagtgtgg

SEQ ID NO: 153776 - DNA, 124 bp, Homo sapiens
ctccgcgcccgccagttgcttgatcaggtggaacagattcagaaggagcaggattaccaaagggaacaggagtacagctgtgtagtaaagatgccttctggtgaatttgcacgtatatgccgag

SEQ ID NO: 153777 - DNA, 100 bp, Homo sapiens
aacaggatgctgatagtctccagcgggcctggactgtgggctggtgtgtggaactgtgggctcgggatgagtttgaaggcctcttcaagcagccagcaga

SEQ ID NO: 153778 - DNA, 74 bp, Homo sapiens
ccgtcacattcagttaaagttcacacagttcctaagccaggctggagtgtgatgaggagtgttcagccttggaa

SEQ ID NO: 153779 - DNA, 50 bp, Homo sapiens
aaagagggctctatctggaaccaccagatctgcaaagcccctgagcccaa

SEQ ID NO: 153780 - DNA, 98 bp, Homo sapiens
ggatgggcctggggcagagcgttctaaggagatgcccagaggagatacaactcgtcaacgaatcaaattcagtgatgacagagtatgcaagagtcacc

SEQ ID NO: 153781 - DNA, 75 bp, Homo sapiens
cgcggccgctgcggacggacgctcgcctgccggctgaggtttgaaatatctccattcagctggcattttacatcg

SEQ ID NO: 153782 - DNA, 75 bp, Homo sapiens
aagcccctcagcgactcagaccctgacagtgacaaaggaaaaccagtgttctctggacatgaaaagcaaactgaa

SEQ ID NO: 153783 - DNA, 98 bp, Homo sapiens
tgaggttgaaaactatcttaaggaaggctttatgaataaggagggaggaataagtttttttcatctgtaatttggaagccaagtcagtaacaaaatga

SEQ ID NO: 153784 - DNA, 100 bp, Homo sapiens
cgggacgccacccacgacgaggcggtgcaggcgttgaagcgcgcgggcaaggaagtgctgctggaaggacaaggtgcaacgctggttgatagaggagata

SEQ ID NO: 153785 - DNA, 75 bp, Homo sapiens
cgaaagctcagcacacactcccgcaggatcccgccattgttcaggcggtggatgaattttattccaagatagaag

SEQ ID NO: 153786 - DNA, 50 bp, Homo sapiens
ctcccaagaagctgggactacaggaatccaaaaatccttgtggagtgtct

SEQ ID NO: 153787 - DNA, 99 bp, Homo sapiens
tcagcattagaagggctacccctaataaagcgactcattgagcagaacattgagctgaaggttgaagtggagagcttgaaacgagaactccaggacaag

SEQ ID NO: 153788 - DNA, 100 bp, Homo sapiens
ggctttgctgtgaggctcgtcttccaggacttcgacctggagccgtcccaggactgtgcaggggactctgtcacagtctgtgatgatgagtggcaccact

SEQ ID NO: 153789 - DNA, 90 bp, Homo sapiens
acacataaagtttccggaaatcttagatttggctcctttttgcacccttaaatgtaagggcatcagctcttcacacagcaacagcttcct

SEQ ID NO: 153790 - DNA, 100 bp, Homo sapiens
tgaagagctatggtgaaacaccactgaagcattgccaagatgtatcctccactcctcgctggccaccatcctgctgcccaacagaagaagctcttctgtc

SEQ ID NO: 153791 - DNA, 100 bp, Homo sapiens
atcctgcagctaaagttctttgtgagctggctgatctgcaagacaaagaagttggagatggaactacttcagtgggctttttggtggtgctggagttggc

SEQ ID NO: 153792 - DNA, 83 bp, Homo sapiens
gcgcggagaagctgcatcccagaggagcgcgtccaggagcggacccggggaacgcccttttgcttgtgactggcagggctgcg

SEQ ID NO: 153793 - DNA, 75 bp, Homo sapiens
catacctcagggctcagaaagagaagaactccctttaaggagcagccccagccctgctaacagcactgctggtac

SEQ ID NO: 153794 - DNA, 51 bp, Homo sapiens
ctcaagttgtttggctaaattcttcagttggaagctgaaggtgttcctgaa

SEQ ID NO: 153795 - DNA, 100 bp, Homo sapiens
gctggtggaggcgcgggaggcctcggaggaggacctgctggtggtgcacacgaggcgctatcttaatgagctcaagcttgaagaagaatacccacaccta

SEQ ID NO: 153796 - DNA, 83 bp, Homo sapiens
tggctcagctgacaacagctgtcgtctctgggactgtgaaacagatccagctatgggacacagcaggacaagaacgattcaga

SEQ ID NO: 153797 - DNA, 75 bp, Homo sapiens
tgctacagaaacaaggtcgtcggctggcggagcggcttgatgggtcatcagttaaggaagttgaaacctaccacc

SEQ ID NO: 153798 - DNA, 122 bp, Homo sapiens
gagaccgtgaccgagagcgtgaccgagagcgcgaatatcgtcatcgttagaagatccatccttttacaatccctgctattattcgtccattcagcgtattgaactatgatccacctcaaagg

SEQ ID NO: 153799 - DNA, 100 bp, Homo sapiens
ggttatcagtgagctgaatggaaaaaacattgaagacgtcattgcccaggccgtactctgacagctgtgcacgatgccatccttgaggacttggtcttcc

SEQ ID NO: 153800 - DNA, 100 bp, Homo sapiens
gcgggctctgcgtcaacgctagtgccgtcagccgcctgcgcgcctacctgctgccagcgccgccagctccagccttcaaacttttccagccgtagcttgg

SEQ ID NO: 153801 - DNA, 100 bp, Homo sapiens
ttctaatctgctcagcatcactggattatgttataatgtggaacctggatgaatgtagagagaaagtacttcaaggttgactatagtcaatggggccaat

SEQ ID NO: 153802 - DNA, 82 bp, Homo sapiens
caggaattgagagtcacagaggaaggacagtggagtctggcatcttattgttggtagctggcagtgttgtgatggcttttga

SEQ ID NO: 153803 - DNA, 82 bp, Homo sapiens
cgacctcacaggccgacaagatacctctcgcatgtccacctcacagcggggatctgacgagcttttctctacttgtgtcact

SEQ ID NO: 153804 - DNA, 101 bp, Homo sapiens
aacggagaccagacctactgcagccacgcgggcgagcggctgtgtggatgtcggcgaagccgcgggcgagcctggagagtcaccgccgagggatgaggacg

SEQ ID NO: 153805 - DNA, 97 bp, Homo sapiens
ttggctgctgcaggagccattttagtgtttatcagctggttgtcaaggaggagcgacttcagaagtcacggagggcagctgacattattgagtgctt

SEQ ID NO: 153806 - DNA, 100 bp, Homo sapiens
gtgtttcattcttacagtccatatgatcacaaggttactcaaatgagtcgtccagacttgattctctttctgatgaaatacctgatggctctcatagttg

SEQ ID NO: 153807 - DNA, 100 bp, Homo sapiens
ccgggatcgtgaccgagaccgtgaccgagagcgtgaccgagagcgcgaatatcgtcatcgttagaagtggtgaaaatgtagggttggaatccaaatacct

SEQ ID NO: 153808 - DNA, 100 bp, Homo sapiens
aacgaagtaggccgtctcgctctgggtctccaggcccgcgaccgtccgccagtcgtcccgagtgtctttggtgcaacactaacaaggcttgtctggacta

SEQ ID NO: 153809 - DNA, 100 bp, Homo sapiens
tcatccactcaacacattcactgacaaactctcacgctcacaccgggtcatctgattgtgctaactgccaaagaaaggaaaactcaaattgatgatagaa

SEQ ID NO: 153810 - DNA, 99 bp, Homo sapiens
agccagtctctgcaggcggccagcgggttctcccatgggcaggtggtctctctggatgagctgcgccccttccaggacccagacctgagctccctgcag

SEQ ID NO: 153811 - DNA, 75 bp, Homo sapiens
tgagtttgacttttacctctgtagtcatgcaggaattcagatgacagatttgaagatctggaagaggcaaatcca

SEQ ID NO: 153812 - DNA, 75 bp, Homo sapiens
cccggacctctggagtgcccccagcccagagcccgggatgataccggggactctccagagccatgactagatcca

SEQ ID NO: 153813 - DNA, 74 bp, Homo sapiens
caagcgccagtgccacgtctgcctttgtgtgaagctgtacttcacaaaaacagtagaggagccgtcaaatccag

SEQ ID NO: 153814 - DNA, 90 bp, Homo sapiens
aagcaagattataatcaggaagtggatgcctccatttttaagcactgtgacttctgccgtgttcaccgtgggagacaacgtggtttcagg

SEQ ID NO: 153815 - DNA, 104 bp, Homo sapiens
gtcacaggtccagggcagaggaccaacatgggcattttgtttatgagcaaggtggaaaatgaggttgatcgcagcattcagaaagtgtataagacctacaatgg

SEQ ID NO: 153816 - DNA, 100 bp, Homo sapiens
aatcaggatggctggataaactctctcctcaaggcagtcagtggaagagcatctgcaatgtcaaacactcctacccacagtattgctgcatccatttccc

SEQ ID NO: 153817 - DNA, 51 bp, Homo sapiens
ggacaccaaacatttcctgccgctcggctctgacgcccgctctgcggcttc

SEQ ID NO: 153818 - DNA, 82 bp, Homo sapiens
ccggaagtgtatagggaaacctgggggctccctggacaactccgagcagagtttatgtggccgaggcagacaagtggaatta

SEQ ID NO: 153819 - DNA, 100 bp, Homo sapiens
tactttggaccaaaagctttacggcttgcagatgggtcaagggttgtggagagtggtcagaaaccagcagctgcaacaagaaggctacagtgagcaaggc

SEQ ID NO: 153820 - DNA, 74 bp, Homo sapiens
cagccgatccagcctgcggagcctgtggggcagggggagaagcactacacctaatcctcttacctgctacaggc

SEQ ID NO: 153821 - DNA, 101 bp, Homo sapiens
gacgacgaggagcagggcctgactgcgcaggtgctggagaatctggtaaaagcaccattgtgaagcagatgaggatcctgcatgttaatgggtttaatgga

SEQ ID NO: 153822 - DNA, 100 bp, Homo sapiens
cccaaagccaagccactcactctgctctggggtgaacgagaacgccaagaaggacctgaaggaaggcctgctgctgtaccacaccgagaacaacgtgggg

SEQ ID NO: 153823 - DNA, 112 bp, Homo sapiens
gtgggcttggccatggtcagcgtgaacgcgcccctcggggctccagtggagagttcttacgtcctcaaccactgaagaagaagcttgatgcttggctgtcagaagacatgaa

SEQ ID NO: 153824 - DNA, 82 bp, Homo sapiens
ctgcgcggcgcggcggccgggccctcgagacggggacgagcaacagcgagctcgccatcctgtccaatgagcatggctccta

SEQ ID NO: 153825 - DNA, 75 bp, Homo sapiens
gtgatgaggaaagctgtgaaagttctcaaggcgttggagaccagggccagccctggccacaccccaggctgtgtc

SEQ ID NO: 153826 - DNA, 82 bp, Homo sapiens
acgggaacagaaagaaaagtccgaaagagctgatgacttcaaacctgcttctattgacacttcttctgaaggataccttgag

SEQ ID NO: 153827 - DNA, 100 bp, Homo sapiens
agccaggaactgcgcagcctcttcgagcgccgcggacgcgtcatcgagtgtgacgtggtgaaaggtgtggacactgccagcggctgcagccgacttggaa

SEQ ID NO: 153828 - DNA, 98 bp, Homo sapiens
accacagtacttcacatcgtcgttcacatgggatgttgctgacaaaaatgcttctaacagaaattctgctggatgtcacagatgaagaaatttattac

SEQ ID NO: 153829 - DNA, 99 bp, Homo sapiens
caagaacctggcttttagctgaactaaggagaaagtcctacaacagtttggcgtgcaacatggggcttgagaaaggcatgttggcagataaattgaaca

SEQ ID NO: 153830 - DNA, 75 bp, Homo sapiens
actccccagtttctaaagcagtacttggagatgatgaaattacaagatattaacctggctgcagagccaaaagtg

SEQ ID NO: 153831 - DNA, 100 bp, Homo sapiens
cgcctggacagacagggtgctgtggtggaggaagaaacatccctttgataaaacagaagacgtgaacgatcaagagagagggaccatagtagatcacgag

SEQ ID NO: 153832 - DNA, 74 bp, Homo sapiens
ctgcgcttccccatggggctggcctgcggcgcctgggcgctctgagatgacctgtgtagaaaaagcaggaacag

SEQ ID NO: 153833 - DNA, 99 bp, Homo sapiens
aaagggaagggagagaaaaaggagagcctctgagctcaacggaggattgtgcctgagaagaacccacagagggggacttgatctcatcttcatgccagg

SEQ ID NO: 153834 - DNA, 82 bp, Homo sapiens
gtctatcaagcagcccttctgggtcacccttgcatgatgtggttgccctgcttggctttccttatgcctccagtggagaaaa

SEQ ID NO: 153835 - DNA, 75 bp, Homo sapiens
tccctttggatgtagcaaggaagaaattgttcagttcttctcagttctgaaagtgtgaagcaaaggaatgatgtg

SEQ ID NO: 153836 - DNA, 100 bp, Homo sapiens
tgcgagccgggaagacgcggggaagaggaggcggaaaaggacgcaaagttctccggcgagctttggctagatcagagtctaagagagatggaggttttaa

SEQ ID NO: 153837 - DNA, 100 bp, Homo sapiens
gccatcacccgtgtggtggactttgccaaaaaactgcccatgttctccgaggactgggcgttcatcaacaccaacatctttgccaggaccaagatagacc

SEQ ID NO: 153838 - DNA, 100 bp, Homo sapiens
ctggccatggctcagcagcacgagggcggcgtgcaggagaaaggagatgtaagattcttgatttgcacagatgtagctgctagaggaattgatatccacg

SEQ ID NO: 153839 - DNA, 49 bp, Homo sapiens
tgcagttcccgctcaaaatgcttataggccgtggagaagtgtaaagatg

SEQ ID NO: 153840 - DNA, 74 bp, Homo sapiens
cgagatcttccgccactacgagttagctttatacgtctacgaatatttactgcacgtaggagcacagaaatctg

SEQ ID NO: 153841 - DNA, 76 bp, Homo sapiens
tttcgctggtccacccgcaacggcccttccgttttctttgtcactcgtaaaggtacttcgacctggtgtcctgtgg

SEQ ID NO: 153842 - DNA, 75 bp, Homo sapiens
tgacaggagaggctgcttcttgtagaggagcggcctattgccaattcatggacatgctcttccctggctgcatta

SEQ ID NO: 153843 - DNA, 110 bp, Homo sapiens
gtctgcgaaatcatatggctgtagcattcgtgctatccctgggggttgcagctttgtataaggaaagaacatgaggttcccttggaaatcattcaagaggaagatggaag

SEQ ID NO: 153844 - DNA, 100 bp, Homo sapiens
ccctgccccccgggacccggagaagatgtcttcgcggacggtgctggccccgggcaacgatcggaactcggacacgccttatgtttgatcatcggccaag

SEQ ID NO: 153845 - DNA, 98 bp, Homo sapiens
gcggtacatggccacaagcggaggggaggtatccgttacagcactgatgtgagtgtagatgaagtaaaagctttggcttctctgatgacatacaagtg

SEQ ID NO: 153846 - DNA, 75 bp, Homo sapiens
gccgtcaagaagggctcgaccgcggttacgggcaggacttgagtggcttcggacagggcttctcagaccccagcc

SEQ ID NO: 153847 - DNA, 100 bp, Homo sapiens
ttatgatctacctaccaatcgtgaaaactatattcacagaccctgtattcagtggatcagctggcaccacccaaatagataaattggcccatctggtctt

SEQ ID NO: 153848 - DNA, 89 bp, Homo sapiens
aaggagcggaaggttaatgttcttcagaagaaggttgtttacattcagagctctatcaataagaggaatacatattacagtgaattcga

SEQ ID NO: 153849 - DNA, 113 bp, Homo sapiens
caagagacgatcattctgcaagcaggcaacctgaatacaggtgaccaagaatatggcccaggtgaccaaagccctggacaaggccctgagcaccatggacctgcagaaggtct

SEQ ID NO: 153850 - DNA, 82 bp, Homo sapiens
gaacgcaaatgcaggagggagaggtgccaagaagcagctgtacacgaacatcatcttcagcgggctatttcagcacagcagg

SEQ ID NO: 153851 - DNA, 96 bp, Homo sapiens
tgaatgactcaagtctggacctgggacccactgcaggaaacaatgtgatgagaaccattcatggggtgggagagatgatgacccagatggtactca

SEQ ID NO: 153852 - DNA, 128 bp, Homo sapiens
ttagccatggtcaaccccaccgtgttcttcgacattgccgtcgacggcgagcccttgggccgcgtctcctttgagaaaaagcttgtggtgaaggggggcaaaaaaaagaagcaagttctgaagttcac

SEQ ID NO: 153853 - DNA, 97 bp, Homo sapiens
ccagcccgccagcatgccccagtccaaagtgtgttccatgggaaccggtacaagcagactctatagtgctctcgccaagacactgaacagcagcgct

SEQ ID NO: 153854 - DNA, 83 bp, Homo sapiens
gttcgcgcccgccgacccgcgccctgctccctctcagcacctgggcggacgaatcccgtcacggggctgctgtcagccagcca

SEQ ID NO: 153855 - DNA, 100 bp, Homo sapiens
agcagggtgcgggagagccccttgcagaagacgccgtacgagcaatggctgccatccggaagaaactggtgattgttggtgatggagcctgtggaaagac

SEQ ID NO: 153856 - DNA, 100 bp, Homo sapiens
gaagaaatggggaaagtcaagaaaatagatgcttctaaatctgttgatgaagaaaagcttcctgcttaccttgccacctcaccaattcctactgaagatc

SEQ ID NO: 153857 - DNA, 90 bp, Homo sapiens
gctcatcagagggaagatctttttcctcaattggttcctaaaagtaaagctctagaggccgtcaaattggcaatagaagccgggttccac

SEQ ID NO: 153858 - DNA, 80 bp, Homo sapiens
cgatctacggggctgacatcagcggctctttgtatgatgactgcagagcagagcgggcggaggaccccgggcgcgggcgc

SEQ ID NO: 153859 - DNA, 100 bp, Homo sapiens
ggatggctatccagacgctctggtcatactaaagaacacatctggaaggccctggccaacgtcaacattgggagcctcatctgcaatgtaggggccggtg

SEQ ID NO: 153860 - DNA, 99 bp, Homo sapiens
tcaaagaagtttgtccttctgctattgatcctgaaggacatgtctcaggaaggctatggaactagatctcaacctcctctggcccccggaaaacctaac

SEQ ID NO: 153861 - DNA, 75 bp, Homo sapiens
aggttactcgcacgcggatttggctggcgtcccgcgtgtgatgaatgcagactctgctaccattttggctgtttg

SEQ ID NO: 153862 - DNA, 50 bp, Homo sapiens
ggcaagtgcgcttacatccgaggaaatctggcattttttaaagtttgcgc

SEQ ID NO: 153863 - DNA, 75 bp, Homo sapiens
ggaattcgccgtgcccgagaatagctccgtccagcagattctgaaggaagatttccattaggtaatttgtttaat

SEQ ID NO: 153864 - DNA, 73 bp, Homo sapiens
caggacaaacgggagcggaagagaggaggaaaaggccaaagcgtacaagaaagagaaacagaaggagaagaaa

SEQ ID NO: 153865 - DNA, 51 bp, Homo sapiens
acccgaagacagggaaatttagtatcttctcacaggtatgaaacacctagc

SEQ ID NO: 153866 - DNA, 100 bp, Homo sapiens
aatgcatcggccacccctttccaacagccgagtggatatgggtctcatggatacaacactgaacttccaggtcctgagtcagagacacctggtgagagac

SEQ ID NO: 153867 - DNA, 82 bp, Homo sapiens
cctggcctcagcccgccacatcaccctgacctgcttacgcccaggtgtagacggggcactgccttcagagcaggtcctgcca

SEQ ID NO: 153868 - DNA, 75 bp, Homo sapiens
ccgacggagaaaacaggagctgctggctgacattcagtccagttacaacacagggatcacaacaaacacaaccgc

SEQ ID NO: 153869 - DNA, 95 bp, Homo sapiens
tatttcagcagttggccacaacttcattgctgggaaaagggttctccaaaaaatgtggaatcctttgcatctatgctgagacattctcctcttac

SEQ ID NO: 153870 - DNA, 98 bp, Homo sapiens
ccctggtgggcctgaaggggaacctggagatgacactggcatccagactctccacagctgtgaaagaactcttttcttctttgggagtcgaatgtaat

SEQ ID NO: 153871 - DNA, 75 bp, Homo sapiens
tccaaaagtgctggcattacaggctttgacaaattacaaaaggctcgtttggatctgtgacacatcgttttgggg

SEQ ID NO: 153872 - DNA, 83 bp, Homo sapiens
ctgagcgagctgtcagagcccggggacggcgaggccctcatgtaccacacggaaaaatgccagctgtgggacaaggagtgcag

SEQ ID NO: 153873 - DNA, 82 bp, Homo sapiens
cttcgtttgccattttcttatggagaactgtccttgttaatcccacgtggcgaagtctcgattttggaattatgccagaccg

SEQ ID NO: 153874 - DNA, 75 bp, Homo sapiens
aaaaattacagcacatctcagtgaatttgcaagtgaatctccctggaaaaggagacatgaatgtctgcaatgata

SEQ ID NO: 153875 - DNA, 75 bp, Homo sapiens
tttgcttttaaggttgcagcaagaaaagtcttcccaagggattgttgaagaaacttctgaagagggaaactctgt

SEQ ID NO: 153876 - DNA, 96 bp, Homo sapiens
gatgccctgactgagctgctggctaagatcaccaacacagacgtggtgctcctggagctgttggtgggaatatacccctcaggggttattggactg

SEQ ID NO: 153877 - DNA, 83 bp, Homo sapiens
aggtcatccttggcatgggctacaaggaaaacgttgcctttccccatcttcctggttctgctccttcgtggcctagtcttgtg

SEQ ID NO: 153878 - DNA, 100 bp, Homo sapiens
aaatctatcgtgaggttcagctgatgaagcttctgaaccatccacacatcataaagctttaccaggttgtgaccgagattcccgacgagagagactgagg

SEQ ID NO: 153879 - DNA, 59 bp, Homo sapiens
ccgacgccacggagtcagcacaagtctcatcaggtgcaggcctggggtagtctcctgtc

SEQ ID NO: 153880 - DNA, 74 bp, Homo sapiens
ttatatcgcatcctatggctcaaagaaagatgattatgagttaggacctggaaatgtacagaaagaagtctcat

SEQ ID NO: 153881 - DNA, 74 bp, Homo sapiens
acttgcccagatgttctcagatatggtcttaaaagggtacagccaaagaccggagctttggagagatgaagttt

SEQ ID NO: 153882 - DNA, 100 bp, Homo sapiens
aggcattctacagacgggctcaagcccacaaagcactcaagcatttaaatcaaacggtattgagatggattgggttatgaaacataatggtccaaatgac

SEQ ID NO: 153883 - DNA, 101 bp, Homo sapiens
ggccgatatggaacccaagcagtggcgaagggaatcgcaaggctcttccctgaccattttctactgtccctgcgcgaggactgatcctttgaaatactcca

SEQ ID NO: 153884 - DNA, 100 bp, Homo sapiens
gtcctgcatcctcagcgaggtctccacccgctcgcgctccaagctccctgcggggaagaacgtgctactgctgggtcagtcatatgaaattcggatgctg

SEQ ID NO: 153885 - DNA, 89 bp, Homo sapiens
ttttcaagagttccgatttcatcactcgtgacttcactcagccatctttgtagaatttgatggctgtaactggaagcaacactcctggg

SEQ ID NO: 153886 - DNA, 51 bp, Homo sapiens
tgtaacatcagtcacagcattactatactggcaattgctggagaagatttt

SEQ ID NO: 153887 - DNA, 100 bp, Homo sapiens
caatttctgaagagaaaggtgactctgatgatgagaaaccaaggaaaggagaaagacgatcatctagggtcagacaggcctgctactgaccctgcagcca

SEQ ID NO: 153888 - DNA, 51 bp, Homo sapiens
tccagtgctactgctacaaataagatgattcaacgagaagccgatgtaaaa

SEQ ID NO: 153889 - DNA, 133 bp, Homo sapiens
gcagggggagattttgggaatccactgagaaaattcaagttggtgttcttgggggagcagagcggtactccaaagattcaggtttactcacgtcatccagcagagaatggaaagtcaaatttcctgaattgct

SEQ ID NO: 153890 - DNA, 100 bp, Homo sapiens
cgagcacctgccgcgtggcggggctgtggagcggccgctgaccccggctcatcatgtcactacagtgaacagtacaaattgtaagaagacaccacctgaa

SEQ ID NO: 153891 - DNA, 100 bp, Homo sapiens
ctgctgaaggacaaggggctactcctgcgctgctacacgcagccaataggagctctgaacccaaaaagagcagcattcttcgctgagcgttatgaatcat

SEQ ID NO: 153892 - DNA, 100 bp, Homo sapiens
tgaggtgaaagactatgtggccaagggggtcctgatgacaacttaattgaaggtggaggaacaaaatttgtctgcaaacctggagccagaaacattaccg

SEQ ID NO: 153893 - DNA, 75 bp, Homo sapiens
ggctggaagttcctctgtaccagcatcaagatggtgctcatgtggaccagtggtgacgccttcaagacggcctac

SEQ ID NO: 153894 - DNA, 100 bp, Homo sapiens
atactccagtatcaagtacaaatgaaaaggatatgtacagcttcctagaggagaaatatggggagttgatgagcatcagaaaaaccaggacagacttttg

SEQ ID NO: 153895 - DNA, 107 bp, Homo sapiens
aagctcaccgagacggcgatccgggcgctcgagacttaccagagccacaagggggatatgagactttctactcggaatatcctgagtgttgcgtggatgtaaaaccc

SEQ ID NO: 153896 - DNA, 75 bp, Homo sapiens
cgcgctgcttccacccaacttcctgttagcctcccgcgacgatgcccctcaacgttagcttcaccaacaggaact

SEQ ID NO: 153897 - DNA, 100 bp, Homo sapiens
cgcgcgggagagcacggatgggcaccctgggctcgatgtgacctccttcagcacaccccccaccccagaacggaacaaccggcctgccttcttctcccca

SEQ ID NO: 153898 - DNA, 100 bp, Homo sapiens
ccagcgagcggcgcggagctggacgccgcgatcgtggggcccgcgaggcgggcagccggggcgtccagttttgatgtcacagaccctctgacaaggtctg

SEQ ID NO: 153899 - DNA, 83 bp, Homo sapiens
ggtgcggtgcggagactccatgaggccctgcacctgaactcctggggggaccgtcagtcttcctcttccccccaaaacccaag

SEQ ID NO: 153900 - DNA, 90 bp, Homo sapiens
ctaagtcccacagagacgggagtcgggtgggatcccaggctgggccccgcggcggagcccccctccatgcgcctgaaggcccgacccagc

SEQ ID NO: 153901 - DNA, 100 bp, Homo sapiens
ttatcctctgtttctctgctgcaccgacctcgacgtcttgcctgtgtcccacttgttcgcggcctatagaggctgaggggatctggcggtggagcgctag

SEQ ID NO: 153902 - DNA, 49 bp, Homo sapiens
ctgctgacagcatctggctatcgcagagatggggttttgccgtgttgcc

SEQ ID NO: 153903 - DNA, 98 bp, Homo sapiens
ctggacgcggcgctgctgaccgacatcgaagggaaatcctcattgacgattcaatttgttgaaggccaatttgtggactcctacgatccaaccataga

SEQ ID NO: 153904 - DNA, 87 bp, Homo sapiens
gcggggtgcgccggcagaggatccagtgttcaccatcctggccccggaagatccagacatttaatgtggatgcaccatgccagaccg

SEQ ID NO: 153905 - DNA, 90 bp, Homo sapiens
gtccgctcctcagcggatgtggcagccccgagccatggctctcgccgtccgagtcgtttattgccgaatttgccacatacctgaatttct

SEQ ID NO: 153906 - DNA, 98 bp, Homo sapiens
atcagagagcattttactactgagctgcaaaggggttattatcgtccccagtgctggtgttggtattgtcctcggaggctacattataaaaaaattga

SEQ ID NO: 153907 - DNA, 75 bp, Homo sapiens
cgattctgcaaccaagcacctgaaacagcagatagtagtaaccactagcattggacaggatttgaaaagctacca

SEQ ID NO: 153908 - DNA, 98 bp, Homo sapiens
tttgttggagattcagaaaaagtgttgtctcagatgatgaagaacgagagcttcaaatggatcctgcagactatggaaagcaacatttcaatgatgtc

SEQ ID NO: 153909 - DNA, 50 bp, Homo sapiens
tgggggagccccgagagcaagggagtagagacggggtttcgccatgttgg

SEQ ID NO: 153910 - DNA, 76 bp, Homo sapiens
agacacccagaagaaagccttcacgtgctggataaactcacagttggccagggaggacgaatccatgaaccaacca

SEQ ID NO: 153911 - DNA, 100 bp, Homo sapiens
gggggcaagggttcggccgtgccctccgacagccaggcccgcgagaatacctggagatgcgcttcagccgcgcagtgcggctctgcgggactttgcagta

SEQ ID NO: 153912 - DNA, 100 bp, Homo sapiens
cagcctggcttggctactcactcttctgttaacagggtcctggcagagctttcagcagaggccaaggcagcattgcttgaatttgaagaaagggagcgac

SEQ ID NO: 153913 - DNA, 90 bp, Homo sapiens
tgctgtagcaggagaggatggcagaatgattgctggccaggttttagggtctcctatggacagaagtgcgggcaaggagctttgttcctc

SEQ ID NO: 153914 - DNA, 75 bp, Homo sapiens
tacctcatctcgtccaacgtcggggaagttgtctggtacctgaaaaacctgcagttccaccgcttctggtccgtg

SEQ ID NO: 153915 - DNA, 75 bp, Homo sapiens
ccttcttcctcaactatctcgctgacacgcaggttgaccccctgtttacagtgccagcgccaccaccgccgattt

SEQ ID NO: 153916 - DNA, 100 bp, Homo sapiens
cagagatggacggtcactcagcctatggagctctctatcaatatcagctcacatcattgaaaagataattttgaagacatgttttgctgaaaagacacta

SEQ ID NO: 153917 - DNA, 98 bp, Homo sapiens
gcacgcagagccgcaagctggtggaagcgctgtgcgccgcgggccaccgcgccgaactgctccggttcccgggtgggcccatctggggcagggaagag

SEQ ID NO: 153918 - DNA, 89 bp, Homo sapiens
gaagaacatgggtctgggaaaatcgctgtgatatcagggacacagtggactctgatcagttcaagcgggaggaggatttctactacaca

SEQ ID NO: 153919 - DNA, 96 bp, Homo sapiens
ggacgcgcgcagcccgcccgcccggcgaccagcaaggtgaagtggatcctaaagagaggatagcacgccaacgaaaattattacagaagaaacttg

SEQ ID NO: 153920 - DNA, 95 bp, Homo sapiens
cggactcaggccaggccactcgcagactcacagatgaatgcttctcacccggaaacaaacttgccagttgggtatcctcctcagtatccaccgac

SEQ ID NO: 153921 - DNA, 119 bp, Homo sapiens
ggaatcccagaggaaactgacggagacgcagatgtggacttgaaagaagctgcagcggaggaaggcgaggctatcatggcagaaggaaaacagcatgctctatgtgttggagtcatgaa

SEQ ID NO: 153922 - DNA, 83 bp, Homo sapiens
gtggggacgtccggcttcggagcgggagtgttcgttgtgccagcgactaaaaagagggggatatgagactttctactcggaat

SEQ ID NO: 153923 - DNA, 82 bp, Homo sapiens
ttggtggaggctgtggcaatggaacaggcttgagaaacagtactgccaaatctgtcgaaagggagataatgaagaactgctt

SEQ ID NO: 153924 - DNA, 83 bp, Homo sapiens
cctgatcaagcgggcacggctggccaagacaatgcagatcttcgtgaagactctgactggtaagaccatcaccctcgaggttg

SEQ ID NO: 153925 - DNA, 75 bp, Homo sapiens
atttagatgaacagcaggagcttgttgaaagggactttctaagaagatcactaataatattgtttattttcttcc

SEQ ID NO: 153926 - DNA, 82 bp, Homo sapiens
gcggggatcctgctggactgcacgaaaaagccgatacaaagcaggggaaaaggagccagatcccaagacgtggaaggccaac

SEQ ID NO: 153927 - DNA, 100 bp, Homo sapiens
gaggaagacgccgaggcctgggccatggaactggcggacgtgggggcggcagccagctcgcagggctttcttcgagagtcacccagctccttcagctgag

SEQ ID NO: 153928 - DNA, 75 bp, Homo sapiens
caatgaagtagacattggtggaaacatttaggtgtcaaattgagaaccaggtagatccccaccacctacagtaaa

SEQ ID NO: 153929 - DNA, 83 bp, Homo sapiens
ccaataaccaggtgcttggcaaaatcgagcgggccattgggtgcttcaaggatgaccgcatcgtcttctggacttggatgttc

SEQ ID NO: 153930 - DNA, 82 bp, Homo sapiens
tagtatttgaatttgctagtaacgtcatggaggatgaacgacagctggagttaaccgaatttcatactggcctgctgatcca

SEQ ID NO: 153931 - DNA, 98 bp, Homo sapiens
cgcagtggtcgcttcttctccttggagtccaagattgatctccttgatcggaaggaggatgtgaagaaaaaactgaagaaggccttctgtgagccagg

SEQ ID NO: 153932 - DNA, 83 bp, Homo sapiens
ctgacattgaagaagggatgagagtgggccattatttggaaagcaggtctataaatgagaaagattatcatagtcgacgctac

SEQ ID NO: 153933 - DNA, 100 bp, Homo sapiens
gctgttgcccgcggccccccagccgctggagaaggagaacgacggctactttcggaagaacatgaacgattggatgcccatcgccaaggagtatgatcca

SEQ ID NO: 153934 - DNA, 128 bp, Homo sapiens
cagagcagctcagggccggctggtgcgcgaccccggaaagcgggggtggagaggcgagcggagcccgcggggccagacaatgcagatcttcgtgaagactctgactggtaagaccatcaccctcgagg

SEQ ID NO: 153935 - DNA, 82 bp, Homo sapiens
gaacagtctcgttgctgcctctgtgtacgctgaggggggagcctacagacctggtacctggatttttgcccgagatgattcc

SEQ ID NO: 153936 - DNA, 110 bp, Homo sapiens
ttgtgccgtgaacctcgttttgagattaagagtacccaacatgtgagcagcttacttgtgacaatggggcctgctataacaccagtcagaagtgtgattggaaagttgat

SEQ ID NO: 153937 - DNA, 100 bp, Homo sapiens
cggttccccggcccacagtgggggtgtgcaaacccgagagaactgggcactgaaaatgaagtatttcagtaatcggccagggccaacacctggatgtcag

SEQ ID NO: 153938 - DNA, 115 bp, Homo sapiens
cgaaccgcagtatcatgctggccaagaagatcatcattaaggacggaggcacgaaagggctattgcaagacacgaagtccgagaaattgagcagcgacatacaatggatggccct

SEQ ID NO: 153939 - DNA, 80 bp, Homo sapiens
tcacttcaaataatgccactcgagactttttgctccccttcctggaagagcaggaagaaccggacccggcgaacctggaa

SEQ ID NO: 153940 - DNA, 75 bp, Homo sapiens
cttggcgtaaagccgcttccctcaagagtaactacaagtgctggagaatgccgaaggtgccagaaccaccccttc

SEQ ID NO: 153941 - DNA, 90 bp, Homo sapiens
gtcaaacttctcagatgttaataccaaccgttgtttcgaagtataaagcattccgcacgacgggggatggagaaggatgctgaagatggc

SEQ ID NO: 153942 - DNA, 100 bp, Homo sapiens
aagccagcagtgtctgatgagaaaccgcaatcggaaggctgcccggcagctctgacagactcagaggacgagtccccagaagacatgaggctcccaccct

SEQ ID NO: 153943 - DNA, 74 bp, Homo sapiens
caagcaagcctgccataagtgagaagatcatcactccattcagaaggctaatgctgtgtgctgagaacagaaag

SEQ ID NO: 153944 - DNA, 92 bp, Homo sapiens
caccctgaccaacctgctgcttgtgggttttggcatcacctgtctcatcaacaacttacacctccaggggacggtattcagaattcgagcgc

SEQ ID NO: 153945 - DNA, 105 bp, Homo sapiens
tgaggacaaggacgggaaacagcctgtgggccgcttctttgggaatagctgggctgagacctacaggaatcggggcaagattcttgccaagagaattaatgtgcg

SEQ ID NO: 153946 - DNA, 75 bp, Homo sapiens
cccaccacagtctctcaaatacttgggactacagagcccccctccatgcgcctgaaggcccgacccagcagccct

SEQ ID NO: 153947 - DNA, 112 bp, Homo sapiens
aaaagagatgtggggggattctcgacctgctaacagaactggaccttttcgttacagccaagttctacttctgaatctatggatcaactactaaacaaaaatagagagggag

SEQ ID NO: 153948 - DNA, 82 bp, Homo sapiens
cagctgcttgccggccccaacacggaccttggtcagcccaaggccaaccccactgtcactctgttcccgccctcctctgagg

SEQ ID NO: 153949 - DNA, 76 bp, Homo sapiens
gataggcggccatggtccaaccttgaagacacgatgaggcgagtggtacgacagagcaagtttcggcatgtatttg

SEQ ID NO: 153950 - DNA, 97 bp, Homo sapiens
gccaggagaaattcggtggactgagagatggctattatatccaaggtttgccggttatgtactgtctattggaagctgtgtcagtgtatccagaaaa

SEQ ID NO: 153951 - DNA, 100 bp, Homo sapiens
ccacgggctgcatgggcagcgctcgcgccccgccgctgagccgccggggagccgtccagtcttcgaatcccaggtttttaagtaccggtgaccaggcagc

SEQ ID NO: 153952 - DNA, 90 bp, Homo sapiens
gggcagttgcagtgttggagctaaagatgatcaggatggtagtcaaggtctgggcaagagaaaaagggtaaaactaagcagtggcaccaa

SEQ ID NO: 153953 - DNA, 76 bp, Homo sapiens
gcaggaccagctgcagctgctctatcatggtgaacttacttcagattgtgcgggaccactgggttcatgttcttgt

SEQ ID NO: 153954 - DNA, 101 bp, Homo sapiens
cttggttaaaacctgacacttttaacaggatttcttacaatctccagctacaacctgcttagcttgctactcagtacgtgaattaggatgcaggcaacaca

SEQ ID NO: 153955 - DNA, 101 bp, Homo sapiens
ggcgagtctacgatgtcacccgcttcctcaacgagtgggttgaccacacaggtgcagcctcacagaagaaggctttccgttcttcaggatttggactagag

SEQ ID NO: 153956 - DNA, 100 bp, Homo sapiens
tgaaatctgataagaaagtacggaccataataatcaggagtgaagtcccagggatattctgtgctggaggtcgttcagctacctttagagtttgtgaaac

SEQ ID NO: 153957 - DNA, 97 bp, Homo sapiens
cacgggattggcagtaattggaggaagaatgatagcacagaaaatctctgtcagaactgctgcaaaaacagccttgaatagtttcatgcattccaaa

SEQ ID NO: 153958 - DNA, 100 bp, Homo sapiens
gtgaacactcaagtgaagcaaaagccttccatgattacataatcagcaactgctgtgatgagatgctgcctttaatgctgctgcatgtggtcaaacctcc

SEQ ID NO: 153959 - DNA, 96 bp, Homo sapiens
gcgcagcatggcggtggaggacgaggggctccgggtcttccagagcgtgaagatcaagatcgttgatattcactgatggactccaaagaatcatta

SEQ ID NO: 153960 - DNA, 75 bp, Homo sapiens
acctggccaaaatcactcagcagatgccaaagatccaaggattaatgtcgtgcttgctggtggccacgttgtgcc

SEQ ID NO: 153961 - DNA, 100 bp, Homo sapiens
ccggagcccgctctgcgttttgttttcccctcggcactaggcagcggaggagcccgaccgacccggttcgagaacttgtcttggacaattgcaaatcaaa

SEQ ID NO: 153962 - DNA, 96 bp, Homo sapiens
ctgcaaactcatcaccaggaaagacttcgaaactttgttcaccgattgcaccaatgccaggatgtgtgctgtgtttggtggaatttattgtcttcg

SEQ ID NO: 153963 - DNA, 82 bp, Homo sapiens
gaggctgttgaaggagttccaggcacgttaccggcagctgggcgcccatgtgagttgttaccgcctccactgtccgcctgtc

SEQ ID NO: 153964 - DNA, 100 bp, Homo sapiens
tcatcaactgccgcaacaataagaaactcctgggccgcgtgaaggccttcgatagtctctgctggatgaaccgaatcctaacagtccagccaatagccag

SEQ ID NO: 153965 - DNA, 100 bp, Homo sapiens
gcagaaatagaagagctgaaactggtgtatccttatcacggcgttctacacagcgactagaagagctgaaactggtatattattttcctagaagcaagtc

SEQ ID NO: 153966 - DNA, 82 bp, Homo sapiens
actcactcgcctggagaagtatgctttcagcgagaacaccttcaaccgtgcctgagattgtgagggagacccaggacctaat

SEQ ID NO: 153967 - DNA, 100 bp, Homo sapiens
cgcggccttcccatcaccatcacagagagcgatatgagctccccacacaagaactctgtgccatcatccctaaatgagtatgaggtgctgcccaatggct

SEQ ID NO: 153968 - DNA, 80 bp, Homo sapiens
ggaccttcatcaccattggagacagagaatggccttgatgaagatgacaggcatggccggggtcagctctttcagccgcg

SEQ ID NO: 153969 - DNA, 82 bp, Homo sapiens
cgcgagcgaacgaccaagagggtgttcgactgctagagccgagcgaagcgtgaacttcacggtagaccagatccgcgccatc

SEQ ID NO: 153970 - DNA, 75 bp, Homo sapiens
ggtctccttgcaagacttcgaaaggttcgagaacttgtcttggacaattgcaaatcaaatgatggaaaaattgag

SEQ ID NO: 153971 - DNA, 98 bp, Homo sapiens
cgacgaggaagttttctactgtaaagtcaccaacgagatcttccgccactacgactttatggttccataatgtaatttctgaagagtttggagtggga

SEQ ID NO: 153972 - DNA, 90 bp, Homo sapiens
gtggcgagaatcctcctccaggagaacggccatatttatgtgtgtggtgagtatcttcccagtcttgttattctctttgcttcatgctgc

SEQ ID NO: 153973 - DNA, 95 bp, Homo sapiens
aaacatcgttgtccacgtccagcattatgagaacatggacacgagaacccccataaataatcttcttggtcctgagaaaagggtgccagcgatgc

SEQ ID NO: 153974 - DNA, 100 bp, Homo sapiens
gctgatcctatggacgggtcttctgtgtgccctgggcacctccgtggtaggcaatttccagccgcataaccgcgaatgaaccaaagagaacccgaagccg

SEQ ID NO: 153975 - DNA, 100 bp, Homo sapiens
tgaaaaaacaaaaggactgtgggattccattaaaagattagtgacaagagctggggttaggatccggttggactctgacatcggatgccctcaaacatac

SEQ ID NO: 153976 - DNA, 100 bp, Homo sapiens
tcatcaaggccttcagaaacatccctggatgactacatggaggctttaacaagacttcacattactgtttctaaagcctacaaagttaacccagacatga

SEQ ID NO: 153977 - DNA, 98 bp, Homo sapiens
atcagcttgacactgtcctggctgtgctagaggatgacatctgaactggagagcagcctaacgtctatggactggttaccacagctcaccatgagagc

SEQ ID NO: 153978 - DNA, 83 bp, Homo sapiens
atctgcgctaggtggcatctcctctcacggatgcctcggtcgtagttcccccgctccctgggaaagcgtttttgcgtcagctt

SEQ ID NO: 153979 - DNA, 75 bp, Homo sapiens
caccactgaagtgaccgaatgagcgccctttggctctgggagctgatatttctatgtattctgcaacaaaataca

SEQ ID NO: 153980 - DNA, 75 bp, Homo sapiens
gtaccctaaaattagggcatgattaagttggtccttgatgcggttggcgatggtgcaattggtgctcaacaattt

SEQ ID NO: 153981 - DNA, 118 bp, Homo sapiens
gcggccctggcgcggggaagcagtgggaaaatcgcaaggaagccgggtgctggagaatctggtaaaagcaccattgtgaagcagatgaggatcctgcatgttaatgggtttaatggag

SEQ ID NO: 153982 - DNA, 100 bp, Homo sapiens
cctggagcggcgcagccggagtggggccgtgagtctgcgggccaggcatcgacatccgcaacgactatcagcagctgaagcgcctggagaactgcacggt

SEQ ID NO: 153983 - DNA, 100 bp, Homo sapiens
cgacatcaccacggagaaccagtaccggctgacctcgctgtacgccgagcacccaggcgactgcctcatcttcaaggatgcctttgtggaactgtacggc

SEQ ID NO: 153984 - DNA, 90 bp, Homo sapiens
cttctcctggttaatcaagaattctctatttctgctccgtcatccatgccactgcttatccagaatcagatcacagctaaggggactgcc

SEQ ID NO: 153985 - DNA, 82 bp, Homo sapiens
acgacaaaacaccagatgatgaccctgagcaaggaaaatctgaggcttaccctgaaagaagcagatcccagttcaaaagtag

SEQ ID NO: 153986 - DNA, 90 bp, Homo sapiens
tggctatctatccaccatgtgggaggaggaaaatcatcttatcagacgaaggcaaaatgtatgagaacacgtagcgactccgaagatcag

SEQ ID NO: 153987 - DNA, 88 bp, Homo sapiens
acagaactcagctttggaacatttcaggcctggcacggaatgcagtttttacataagtttttaccagcagccccagcagcagccggtg

SEQ ID NO: 153988 - DNA, 75 bp, Homo sapiens
ctcatttaagctactcaagaaagagtgcccaattccaaatgtacagagcaacaagatatggatttggatatagaa

SEQ ID NO: 153989 - DNA, 96 bp, Homo sapiens
aaggacaactgcagactcgtgcccaatcccgaccagaaggactctgacggagcctgatgcccaggaccctcgagagccagatcacgctggagaaga

SEQ ID NO: 153990 - DNA, 82 bp, Homo sapiens
agccggacgggcactgggcgactctgtgcctcgctgaggtactgtcaagatgataagcatggaataaagcttcagaagggtc

SEQ ID NO: 153991 - DNA, 74 bp, Homo sapiens
aagaagctcatatccggagatattccaggcccactccagggcagaggtctgcggggtttccgagaggctcgccg

SEQ ID NO: 153992 - DNA, 111 bp, Homo sapiens
cagaagcctacaatgaagaactgaagaagctggagttgctcagacaggaatagccaggccagaagaaggaaggcctgtggtgagtgggacaggaaatgacatcaccacccc

SEQ ID NO: 153993 - DNA, 100 bp, Homo sapiens
tcctgagtagctgggactacaggtgttttcacagtcctgtgtttggtatggagagtgtggaattgcatatggggacaagaggtacaattgcgaatattct

SEQ ID NO: 153994 - DNA, 90 bp, Homo sapiens
tataccgtgggcagaggatgccagctgttgaccgcttgtgcctggggattccccctggtgagagcttggggcttccttggtcgcacccac

SEQ ID NO: 153995 - DNA, 99 bp, Homo sapiens
cgtcatcacagtcaactatcgacttggagtactcggaagcattgtgagtgttggggacccaaagaaaaaatacacaagatttgaaaaaattggtcaagg

SEQ ID NO: 153996 - DNA, 83 bp, Homo sapiens
cacagtgtgcctgcaacctgtccggggatcccagggaggcatgtcgggccccaggcctgtggtgctgagcgggccttcgggag

SEQ ID NO: 153997 - DNA, 100 bp, Homo sapiens
taattaagaaagcagttgctgttcgaaagcatcttgagaggaacagaaaggctctccttcggaaagatgtcggacacggcagtagctgatacccggcgcc

SEQ ID NO: 153998 - DNA, 100 bp, Homo sapiens
tcgtatttgggttttgaaacttaccaggttatctctcaggctgctgtggttcatgccacagccaaagatgccactgctactccttcacttgctcattctg

SEQ ID NO: 153999 - DNA, 74 bp, Homo sapiens
gtcggagacatgggagacccggggtcggagggtagacaacctcagcgtgttgcagattccctgcaaggggagtt

SEQ ID NO: 154000 - DNA, 74 bp, Homo sapiens
ggatgccaactctgcccttatggaattggacaaaggcatttgacattatcacagactgacatggcagcattaac

SEQ ID NO: 154001 - DNA, 101 bp, Homo sapiens
aaatgatacctatcactcaagagactcttcatttagattggattctgaatatcagctcactgttaatgaagcggctgctcaactctgtgtgaaggataatg

SEQ ID NO: 154002 - DNA, 90 bp, Homo sapiens
cagtgatggaagggccgctttttttgcagagtcagcgctttgggaccaaggtgctggagaatctggtaaaagcaccattgtgaagcagat

SEQ ID NO: 154003 - DNA, 99 bp, Homo sapiens
tgcagggatgcctggaatagaagagaatgacctagcaaaagttgatgatcttccccctggggccatggcacctgcaaggtgtttctcagcaagattgag

SEQ ID NO: 154004 - DNA, 90 bp, Homo sapiens
tttgcccaatgttttgatgattggcagagacccactgtctgctgtcggaaaaggtaacagaagatggaactcgaaatcccaatgaaaaac

SEQ ID NO: 154005 - DNA, 100 bp, Homo sapiens
caacaagtggaccatctcagaccaccatacacttactacctacaggtggagcagctcctgtacgaaagccctgagcggtactcccgctcagtgcttctca

SEQ ID NO: 154006 - DNA, 83 bp, Homo sapiens
gccgcgtgtggaggaggctgaagtctcacatcagaggtgtcaaggaatatattattcgagtgcaaagaggaatttctgtggaa

SEQ ID NO: 154007 - DNA, 93 bp, Homo sapiens
agggattgctggctacagcttcagaagaccgaagcgttcgtatctggaaggattttttatcaagcagaaatgcatcgaacaacgagaatcaag

SEQ ID NO: 154008 - DNA, 75 bp, Homo sapiens
tttccaccagctcagatagcacagactttagcccacagaacttaattgcccaatctcagtctggtactggtaaaa

SEQ ID NO: 154009 - DNA, 80 bp, Homo sapiens
cacaggagctgtagagaggaccccggtacatctgaaagccgggaaatgtgggtaattccagaattgattggccataccat

SEQ ID NO: 154010 - DNA, 82 bp, Homo sapiens
gccccccccagctggaaaatggtctgctctgcgaatcggtgtggacactgccagcggctgcagccgacttggaatgacctgg

SEQ ID NO: 154011 - DNA, 83 bp, Homo sapiens
ccgattcctcctccttggtcgccgcgtccttggctggcgtgtctggccgtgggcctgggcttcggggcactggcagaggtcgc

SEQ ID NO: 154012 - DNA, 90 bp, Homo sapiens
gttcaagatgctctctctggaccgatcccactagctgtaggtaaaacttgcctactgatcagttacacaaccaatgcatttcctggagaa

SEQ ID NO: 154013 - DNA, 101 bp, Homo sapiens
ccgggcgcagaggcctacatcccacagagatacccagacaacaggatcgtctcgtccaaggttcttgggtgtctctggggagtccctgggccagaccttcc

SEQ ID NO: 154014 - DNA, 50 bp, Homo sapiens
atttcttcggcattctgcaacagggcatcgttataacacccctgctcctg

SEQ ID NO: 154015 - DNA, 75 bp, Homo sapiens
cctaccccttgcacacctaccctaaggatcaagtagatatagctgttcaagaactccttcagctaaaggcacagt

SEQ ID NO: 154016 - DNA, 95 bp, Homo sapiens
ccagttggaccttttggacaggaaagtgtaacatcagttacagaacattatgatctcaaccagctgctggagcctcgaagcataacagcagatcc

SEQ ID NO: 154017 - DNA, 75 bp, Homo sapiens
ccttctccactttcgccagcccgtgccgcgagcgcggcctgcaggaggctttgtgccttgggcaaagggcagctt

SEQ ID NO: 154018 - DNA, 117 bp, Homo sapiens
atggtgatggagattttgatgtggatgatgccaaagttttattagaccaagatcactccatggatgaaatgacagctgtggtgaaaattgaaaaaggagttggtggcaataatgggg

SEQ ID NO: 154019 - DNA, 75 bp, Homo sapiens
tttgggatttgagattgacgcggtgaactctgtccagttttcaaaccacacagtccaaaccaggttgcagagaag

SEQ ID NO: 154020 - DNA, 80 bp, Homo sapiens
aaagcaatatttcgagcagtttggcaagacgttccatcctcagagcagcctgaactgttcctaaagaaacttcagcagtg

SEQ ID NO: 154021 - DNA, 97 bp, Homo sapiens
aggttggcctgacaaattatgctgcagcatattgtactggcctgctgctggcccgcaggccagtgtattagctcacaattagatgagcttctctgtc

SEQ ID NO: 154022 - DNA, 97 bp, Homo sapiens
ggccgcgagcgactgcggcgccgagccggctgaagccgacgtagcttctctgaacagacgcatccagctggttgaggaagagttggatcgtgcccag

SEQ ID NO: 154023 - DNA, 100 bp, Homo sapiens
tggggtccgaccgcaacacgtgcgctggataaacgcttgttaactggactatagggtatgaccccatcatttccccagaggtctcggcctcctttggtgt

SEQ ID NO: 154024 - DNA, 100 bp, Homo sapiens
tcagagatcggcggagaccctcgaagtgcgcaaacttgacactcaccctgaccggtctgccatcatggatgttctcgcagaagcaaatggcacctttgcc

SEQ ID NO: 154025 - DNA, 102 bp, Homo sapiens
gaagcactggatccaaagcatgtctgcaacccagccattttcagagatgagtgaatttcataattataacttggatctgaagaagagtgatttttcaacacg

SEQ ID NO: 154026 - DNA, 100 bp, Homo sapiens
gaggaagatgaacccacaaagaagaaaactatccttcagatgcctgaggaaacccagacccaagaccaaccgatggaggaggaggaggttgagacgttcg

SEQ ID NO: 154027 - DNA, 50 bp, Homo sapiens
cgcaacgtaaaatccttggaaaaggactccctgcgacaaggactgtgtac

SEQ ID NO: 154028 - DNA, 89 bp, Homo sapiens
gaagcccgctgccttgtggaggagttgagaaaaaccaaggaattagacctttacgagaagcacagttttgtcttcagtttcctctcccc

SEQ ID NO: 154029 - DNA, 100 bp, Homo sapiens
gaatccctacgcgtccctttgggtttagcacgatgagctcaatcggcactgggtaattcgccaaaatgacgaacacaaagggaaagaggagaggcacccg

SEQ ID NO: 154030 - DNA, 100 bp, Homo sapiens
aaacatcaagcagaatgtgatttgcttgaagatatgagagacaagctctcgccatgttgcccaggctggtctctaattcctggcctcaagctgtcctcct

SEQ ID NO: 154031 - DNA, 83 bp, Homo sapiens
cctaccccagtacagcagacaaaactctctgacccagtttatgaggtttactcctggcttgggggcattaggaagcactggag

SEQ ID NO: 154032 - DNA, 83 bp, Homo sapiens
cagaaaaagtgctcctgggactccaggataccagatgccccttggtgtggccactgcaaggctctggcccctgagtatgccaa

SEQ ID NO: 154033 - DNA, 82 bp, Homo sapiens
tccgcagcggcaacagtaacgaaaaacagggcttgtttcaggagccgtagagccagatcgtcatcatgtctgcattgtggct

SEQ ID NO: 154034 - DNA, 104 bp, Homo sapiens
ggccgtgtcagtttggggcatctccgcggtccggcccggggccccgggatctcggctgtccttcctcccgtccaatatcagatggaaatgatgcggagccttcg

SEQ ID NO: 154035 - DNA, 75 bp, Homo sapiens
caagacaaggacgccccgccactgccgcccctggctggtgcagacatctccatgattgggcagtttggtgttggc

SEQ ID NO: 154036 - DNA, 82 bp, Homo sapiens
aaacggcgagagtgggcgagaacgtccactgcgggccggcgaaagctgatcgcaccccctccctccctggcggagcccctga

SEQ ID NO: 154037 - DNA, 100 bp, Homo sapiens
cagagttgtacaggaggaaaaccaggccaagtcctgtatctgccatgtctgtggcgtccacctcaacaggctgcattcctgcctctactgtgtcttcttc

SEQ ID NO: 154038 - DNA, 50 bp, Homo sapiens
gctgcttccacccaacttcctgttagattgtaaaccatggctgtgtggat

SEQ ID NO: 154039 - DNA, 74 bp, Homo sapiens
tcaggttggaaccataatggactcctcctatagtgccaataggaaaatgtttataggaggccttagctgggaca

SEQ ID NO: 154040 - DNA, 82 bp, Homo sapiens
cttcggtggactccttcggcagtccacccaccgccgccgcctcccaggatgacgtagctttgccaaagacttagaagctaag

SEQ ID NO: 154041 - DNA, 90 bp, Homo sapiens
aaacatttgatttttggaaggatatagttgctgctatacaacacaattataaaatgtcagcttttaaggctgttcatgccaagagcctgg

SEQ ID NO: 154042 - DNA, 75 bp, Homo sapiens
gtctcgtgtgtgaacatcacagttcttcaccaaaggacatggatgaaaatgaaagcaaccagtctctgatgacaa

SEQ ID NO: 154043 - DNA, 90 bp, Homo sapiens
caaggccacagctggcttacgcctgttacctggagaaaaggcccagaagttactgcagaagattctgctcctaagtgtaggagagaactt

SEQ ID NO: 154044 - DNA, 98 bp, Homo sapiens
ccgaggcccaggacagccaggtcaccagcaccaagaggcccccagatgccgacggccctctctacctcccctacaagacgctggtctccacggttggg

SEQ ID NO: 154045 - DNA, 75 bp, Homo sapiens
tggaagatgcagatgagaaggttcagttggcaaaccagatatatgacttggtgattaggaagaagcttgttcgta

SEQ ID NO: 154046 - DNA, 75 bp, Homo sapiens
gaacctgaggagagaatggcatgccagttgtttttaagggaaatgaatagaaacaatccactttgaagaagccat

SEQ ID NO: 154047 - DNA, 98 bp, Homo sapiens
ggtagagtgaagtcctacagagttatcaggttccagaccctgccttctcttctgaaagaaattgataaagaaggtgtgattgaaccagacactgatgc

SEQ ID NO: 154048 - DNA, 90 bp, Homo sapiens
aaagccatggccattgccacgtcggcctggctacagcaatatggctacctgcctcccggggacctacgtacccacacacagcgctcaccc

SEQ ID NO: 154049 - DNA, 90 bp, Homo sapiens
agggaaggaaaaacctgtatgtggaaccacctctgatcgtcgtgtgttgccacccattcatgtcaagatgactaagtttggatttttgcg

SEQ ID NO: 154050 - DNA, 100 bp, Homo sapiens
tggtgtgaactcattgttaagcacaagttcacgaaagcctacaaaagtgtggagaggttccttcaggaggatcaggagccaaaaacctgtatatcatctc

SEQ ID NO: 154051 - DNA, 100 bp, Homo sapiens
ggtcagtgaacagacacgggtgaatgctgctaaaaacaagactggggctgctcccatcattgatgtggtgcgatcggtgaattttgaagtcttcatcagt

SEQ ID NO: 154052 - DNA, 122 bp, Homo sapiens
agagagcgagctgagtggttgtgtggtcgcgtctcggaaaccggtagcgcttgcagcatggattttttatcaagcagaaatgcatcgaacaacgagaatcaagatcactgagctaaatcccc

SEQ ID NO: 154053 - DNA, 74 bp, Homo sapiens
agggagccaactgtttctttgaacagtaaatcagattttgatccaaacaatatcttcaaggcattctttggcgg

SEQ ID NO: 154054 - DNA, 90 bp, Homo sapiens
gtccttcagagaggaattcaaaaccaggctgaacccagagagttcctgcaacaacaatacagctctggtagctgaagaacatctcacagt

SEQ ID NO: 154055 - DNA, 71 bp, Homo sapiens
gtgccgcagatgcccaccggaatggagaaggaagaggagtcgctttcagaaggagttctcactcgaagata

SEQ ID NO: 154056 - DNA, 74 bp, Homo sapiens
ccgtgtctctggattcaagtcccaggagtcctgaccagagagcagctatacacagaatgggattttacatatgc

SEQ ID NO: 154057 - DNA, 101 bp, Homo sapiens
cggatcgtggcctctcgagagcaaggagatggggaagaagatgaaggtgatgaagacaggttggacaatgcagtcaggggccctgggcccaaggggccagt

SEQ ID NO: 154058 - DNA, 100 bp, Homo sapiens
ggaagcccaggaaacacaggcagcgggatcagttccatgacaagaccccttatacgattatgtttggtccagataaatgtggagaggactataaactgca

SEQ ID NO: 154059 - DNA, 100 bp, Homo sapiens
tcagagatccaagtgcgcgccctggcgggtccggaccaaggggaggagcgcccccgggactccccgggcccggcggaggcccaggcaccggccggggtgg

SEQ ID NO: 154060 - DNA, 82 bp, Homo sapiens
agagtgacgtgaagtcattggctgaagctgatgaacaggaagttgtggctgaggttcagacaggtgctctagttcacagcta

SEQ ID NO: 154061 - DNA, 96 bp, Homo sapiens
tatccctactacaggactgcggacaagggctggcagtattctaccttgtaaatactgttatttgtatatactgtaaatgatgacatcggtgggcac

SEQ ID NO: 154062 - DNA, 106 bp, Homo sapiens
ggagccgtctgcaaagtgtccccggcaagaagcccgagcgggaagaagttccgcagcaagccgcagctggcgcgctacctgggcggctccatggacctgagcacct

SEQ ID NO: 154063 - DNA, 99 bp, Homo sapiens
cgacaaagatggcggcagggaccagcagttactgggaagtttgatgaaggccggaacaactttgaaggggaggtcaccaaggagaacctgctggacttt

SEQ ID NO: 154064 - DNA, 82 bp, Homo sapiens
tctagtcctttccaccccgaaattcgccccgattaaagactgtgttgcattatcaggttaaccagcttcgtggcatcctcaa

SEQ ID NO: 154065 - DNA, 80 bp, Homo sapiens
cctcttcgccaagcaggtgcagaagaagtttagcagggcccaggagaagaaactgccaagttttggaccttatctggaac

SEQ ID NO: 154066 - DNA, 83 bp, Homo sapiens
cagctcgcccagctcgcccagcgtccgccgcgcctcggccaagcacatggattaattgatgtatgttgagtttatggagctgc

SEQ ID NO: 154067 - DNA, 100 bp, Homo sapiens
cagaaggctgttcttcagtggaccaagcatgatgattcttcagataacttctgtgaagctgatgatccacaagaaggtgctgtggtggttctccctgcag

SEQ ID NO: 154068 - DNA, 100 bp, Homo sapiens
taaatgaggaatgtctttcctaccatctaaaatacgaaggtttctggctggacttcaccataagggaaagaagagagccttgttggacactgaagaaggg

SEQ ID NO: 154069 - DNA, 101 bp, Homo sapiens
ctctgaaatctgacacctgctctcccggcaaggaaacttcgcaggctgtttcagagactcctccactctctgggaatgacacggactccctctcctgcgac

SEQ ID NO: 154070 - DNA, 51 bp, Homo sapiens
caagaaacatctcaccaatttcaaatctgtagagacgggatttcaccatgt

SEQ ID NO: 154071 - DNA, 123 bp, Homo sapiens
gcaagatccagatcgggatttacgtggagatcaagcgcagcgatgtaatctatgccagcaattatgacaatgttagcagaccatgcagctcgtcagctgcttgatttcagccaaaaactggat

SEQ ID NO: 154072 - DNA, 100 bp, Homo sapiens
tccttcccagccttcagaaattgccggtctgggagttgggggcaaggagaagatcctgatcctgaggtgatatcagacttggtatttttgaaacagcctt

SEQ ID NO: 154073 - DNA, 76 bp, Homo sapiens
ttttcctgttatttctgtgcttccacttaaggttttgcaaggtgacgcatccaaagaagacattgacactgctatg

SEQ ID NO: 154074 - DNA, 90 bp, Homo sapiens
ctccgtgtggatctggcagtcggtcatccacctgctgcagatggggcaggtgtggagatgagctcacagtgcctgcactttaccccagta

SEQ ID NO: 154075 - DNA, 98 bp, Homo sapiens
ggatctgcccttgtctctgcttcatacgcaggatgtcctcttcgtgctcaacagcaaagaagtggcacaggccaagggagctgagcacataacgactt

SEQ ID NO: 154076 - DNA, 95 bp, Homo sapiens
gcaagcagttcagaagagccaaggaataaacatgcaatgaacccaaaagggtacaaagaagacccctggctctgggacctggagtgggacctgca

SEQ ID NO: 154077 - DNA, 90 bp, Homo sapiens
acacaacctgcaaaaatccattagagccactgcccccagagatgtcaggaaccctcagtgctgcgtctagattctgcaggggaggtttgc

SEQ ID NO: 154078 - DNA, 82 bp, Homo sapiens
ggcttcctggcctgggcgctccggtggcggcggagtgatgatgacagcctcttcatctatgactgcagtgctgcagaaaaga

SEQ ID NO: 154079 - DNA, 101 bp, Homo sapiens
cagacagctgttgagggcctggaagatgagggactccttttggtcaggctggagctgaagctgaagaagatggggacctgcagtgcctgtgtgtgaagacc

SEQ ID NO: 154080 - DNA, 112 bp, Homo sapiens
cggcgctctggctctggctgtgcgcgctggcgctgagcctgcagccggccctgccggtttgatctgtggatgaaatgaatcatgattttcaagctcttgcattagaatctcg

SEQ ID NO: 154081 - DNA, 103 bp, Homo sapiens
ccacctatatagatccccgcacaggaaaatctgccctgcagaggtggaggagacactgaagcgactgcagagccagaagggagtgcagggaatcatcgtcgtg

SEQ ID NO: 154082 - DNA, 101 bp, Homo sapiens
ctgcagttccgggagcaggaggtacggaaccagggccaggcgaggaccaactccacctccgtacccactgatggtaatgctggcctgctggctgaacccca

SEQ ID NO: 154083 - DNA, 100 bp, Homo sapiens
gaactctagggagccgggttgatttttaaagcttcaaaatcctaagactcagcactgttgcggggctgggatatgaagaacaacagcctgaggttccaat

SEQ ID NO: 154084 - DNA, 100 bp, Homo sapiens
cagacctagtgggcgttgcctttagacccagatcaaacagatgatggaggcagcaacacgacaaatcgaggagaggaaaaaacagctgagcttcattagc

SEQ ID NO: 154085 - DNA, 100 bp, Homo sapiens
ctcgtactcgtgcgcctcgcttcggggaggtcatcaaggcttgggacattgccatagccaccatgaaggtgggggaggtgtgccacatcacctgcaaacc

SEQ ID NO: 154086 - DNA, 75 bp, Homo sapiens
cctgctttgattcattgaaaatgagattgtggggaacctgggtgaaggcacctttggcaaggtggtggagtgctt

SEQ ID NO: 154087 - DNA, 98 bp, Homo sapiens
tacacattggcagctgctgactactgcataccctcatttctggggtcaacagtccagatgggggcggcaccttcctacttctgcccagccacagccct

SEQ ID NO: 154088 - DNA, 100 bp, Homo sapiens
ggggaactttgaaatgtggtgagtcaggggcatgcaggatatatgattccaccaccttcagggttatcaatgccgggaagagcacacacaatgaagacca

SEQ ID NO: 154089 - DNA, 90 bp, Homo sapiens
atcgtattgccgcccagaagagccgacagaggcagacacagaaggccgacaccctgcacctggaaaaagctcctcaatttctgaagagaa

SEQ ID NO: 154090 - DNA, 101 bp, Homo sapiens
ggaagaggaaagcaaaggagtcagggatggctcttcctcaggtgtgcaactgaggaacatggctcaagaaactaatcacagccaagtgcctatgctttgtt

SEQ ID NO: 154091 - DNA, 89 bp, Homo sapiens
ctggatgagacatttgctacagcatcccacattaagtcaacgggtgcaaaacgtccatgttcccatccttgaagtacctggtagtaaac

SEQ ID NO: 154092 - DNA, 100 bp, Homo sapiens
agcatgtctccaaggaggaaacccccaagttctgcagccagtgcggagagaggctgcctcctgcagcccccatagcagatcctcagccacagaaagccac

SEQ ID NO: 154093 - DNA, 82 bp, Homo sapiens
cactgaaaggaaatgacggattttaacgcatgctgattctgcaaaatccacctcttctgaaacagactgcaatgataacgtc

SEQ ID NO: 154094 - DNA, 50 bp, Homo sapiens
gcctcctgagtagctggaattacagggtggctgtgctggctctggctgtg

SEQ ID NO: 154095 - DNA, 74 bp, Homo sapiens
gccggacctacaaacccaaccagtctacagatgcaaaaactgccacaaggcagcaaagcagaatcgggagcagt

SEQ ID NO: 154096 - DNA, 100 bp, Homo sapiens
accctgaagtgcttgatatcacagaggaaactctgcattctcgcttcctggaggaggaggaagagcgagacgagagtggctgtgaggaggaggaagggcg

SEQ ID NO: 154097 - DNA, 83 bp, Homo sapiens
gcgtcatgaacccgagctatagagaaaggagatgagcacatgattaagtaccggtacatcccgttcacacatgggaagagaag

SEQ ID NO: 154098 - DNA, 74 bp, Homo sapiens
gatacctacgggagacttaaaaggccctcagaccacaggattaatgcctctgcgagggaaaggccctatagacc

SEQ ID NO: 154099 - DNA, 101 bp, Homo sapiens
cccagcatccactaagctggtgttgtcctatcgacccagctggatcgtgtaaccagtctatgggaagtgagttcccagaggtccacttgggccagtggtac

SEQ ID NO: 154100 - DNA, 75 bp, Homo sapiens
ggaactcccaagcgactgcaggcagaagctgagacggctaagatttggaggccaatcactgccaccttttatttc

SEQ ID NO: 154101 - DNA, 100 bp, Homo sapiens
cacagctgtacatccatgccatcttctccagccaccccagccagtggaaccaagtatgctcaggcttcagaagaggctcgcctctagtgtcctccgctgt

SEQ ID NO: 154102 - DNA, 100 bp, Homo sapiens
ctgaagaggaaataaaaacagaacaggaggtggtagagggcatggatatctctactcgctccaaaggccaatggtggcagagtctacatagaactatgct

SEQ ID NO: 154103 - DNA, 100 bp, Homo sapiens
cccagaaggtagagctgctggagaagtttcgggacaactgtttggcaattttggagagcaagggccttgatccagatgttgatgatggagacacagtgac

SEQ ID NO: 154104 - DNA, 90 bp, Homo sapiens
tgtatctgctgcttcttgcttggcttgcttttggcagtcactgccactggccttgccccctggtacctgacagtgtaaagaaggagctcc

SEQ ID NO: 154105 - DNA, 100 bp, Homo sapiens
tcaggaggacctgcaggaggacgcagacggatattcacaatgacatcctttcaagaagtcccattgcagacttccaactttgcccatgtcatctttcaaa

SEQ ID NO: 154106 - DNA, 75 bp, Homo sapiens
taaagctggtctgttctaactgagaatcttgtggaagaagaatgaagttgctgattatgaagctacaacattttc

SEQ ID NO: 154107 - DNA, 83 bp, Homo sapiens
ccgcgagcaaggagcgcggaatcggggagcgtccggagctagctggatcctctaggcaggagagaacattgaaagtattctct

SEQ ID NO: 154108 - DNA, 75 bp, Homo sapiens
gagaagttagcttcagagttctttgtggatggacttgattctgatgagagatcttgatgtggaagaaatggagga

SEQ ID NO: 154109 - DNA, 83 bp, Homo sapiens
gatctgaatgttgtgaccactaatttggaaatttatacaagcatgcagcattgcacttgaactaaatgagcggctaattaaag

SEQ ID NO: 154110 - DNA, 75 bp, Homo sapiens
ctgatggcagttagcacactggtggaagattggctggtggacagaaggcactgcagcctgaaatggcagagtctg

SEQ ID NO: 154111 - DNA, 100 bp, Homo sapiens
gctcacggaccctcatcacaccatgggagactacaaaggtactatattgaggttaaaaggtgcaatcttgagaatggcatttctggataccacaggctgc

SEQ ID NO: 154112 - DNA, 90 bp, Homo sapiens
cgtgaccgagagcgcgaatatcgtcatcgttagaagaattggagcgttattcagtatattaatgtcttattgataatggcagaacatcca

SEQ ID NO: 154113 - DNA, 96 bp, Homo sapiens
tcatcatcaacaaccagacagggcagcacgccgtcattgacatcaatgccttcccagaatgtggccccgtcccagagcaccacccgagacatcagg

SEQ ID NO: 154114 - DNA, 100 bp, Homo sapiens
gagagggctctagctaaaaatgagcaagttaaaggcaagatcgacaccatgaagcaaatgcagccctgaggatttggctactgcatataacaacaggggg

SEQ ID NO: 154115 - DNA, 100 bp, Homo sapiens
acggagggctgcagcgcccaccctgcgccagagaccagataaagttgaaatcacaaagattagacacctttttagataggtgttcttcagcaccactgac

SEQ ID NO: 154116 - DNA, 99 bp, Homo sapiens
caacttttgtcttgacaggttcttcagccaaaaagggttatgtggtccgaatcagtggtgggaacgacaaacaaggtttccccatgaagcagggtgtct

SEQ ID NO: 154117 - DNA, 83 bp, Homo sapiens
acctccagtctataagcccaggaagccgtcttcgaactcaggagaagcgaatcaatccctctgctgagatggtgatgatcgat

SEQ ID NO: 154118 - DNA, 100 bp, Homo sapiens
acaacaaccctaacgacacctccaacttttgccctggattacaggacctgaaggagaagaaggagaaggtggaggagaaggcaagccggaaagagcgaaa

SEQ ID NO: 154119 - DNA, 50 bp, Homo sapiens
cgcaggccggacccccttctagggcgttggagaccagggccagccctggc

SEQ ID NO: 154120 - DNA, 102 bp, Homo sapiens
tttataaccaccccttgcactttgttttcaatgacaccaagttggacgctatgctggaagaatttaagaaaggtgtttggagaagagggattgaccctgaat

SEQ ID NO: 154121 - DNA, 100 bp, Homo sapiens
aaggaacgaggcaaggagctaaagcagcgtgcgttcagccctgggagatcccaggcccacaaatcaacgcatcaataagcacgtcaacaatgatgtgaac

SEQ ID NO: 154122 - DNA, 100 bp, Homo sapiens
cccaagttggttggagatgtggattttgaaggttggactccatgaaagaattgcacaaaacaaatcgacagcagcatgagaaacatctgcaaagccgagt

SEQ ID NO: 154123 - DNA, 100 bp, Homo sapiens
caggtcgaggacggtcggactcccgcggcgggaggagcctgttcccctgaggaccatggccaacctggagcgcaccttcatcgccatcaagccggacggc

SEQ ID NO: 154124 - DNA, 82 bp, Homo sapiens
gaaatatgaattctgctatggcaaacatgtacatcaataccatgaggaatggtcgttggaggtcagaatggaagtttacaat

SEQ ID NO: 154125 - DNA, 101 bp, Homo sapiens
gcaggagaacatcatcagtttctttgaggacaactttgttccagaaatcagtgtgacaacaccttcccagagaggagctctaaattgggaagtaatgcagg

SEQ ID NO: 154126 - DNA, 96 bp, Homo sapiens
ggagaatatccctgaaaaatatattttattcctgtggtgtaacctatgaaatagtatccaatataccaaagttttcagcattgcaaataacaatct

SEQ ID NO: 154127 - DNA, 96 bp, Homo sapiens
agtcaccaacgagatcttccgccactacgaattcctcgaggtctgaacaagaaccactgacgcagaacgtgaaaactagaagcgttcattagcgac

SEQ ID NO: 154128 - DNA, 100 bp, Homo sapiens
cagaaaacaggagaccaagctcaaactaatggcacgctatgggcggctggcggaccctgctgtcactgactttccaggttatgtgaaattacctccagag

SEQ ID NO: 154129 - DNA, 90 bp, Homo sapiens
taacgtctctgatttctcaagctgctcagctctctacacaagatctgttaccattgggatgataacctgaggacccccactggaaatctc

SEQ ID NO: 154130 - DNA, 96 bp, Homo sapiens
gaacagcagaaagaggcttcttggaaacataaccagatcccattccttctggtctgatggaagaatgtgtggattgggatgtggaagttaaagctg

SEQ ID NO: 154131 - DNA, 96 bp, Homo sapiens
ttggggccctttgggacgagtgctgtgactgtgttgttactgtaaaatggggaaaggagaaatttgaaggtgtagaattgaatacagatgaacctc

SEQ ID NO: 154132 - DNA, 75 bp, Homo sapiens
tacacttttcaccaaggaactggtgctgcagcgagaggtacatcaggaacgtctctatcaagaatacaatttcag

SEQ ID NO: 154133 - DNA, 83 bp, Homo sapiens
caaagaaaagaaagagaaaaagcagaaagtagatgaagatgagattcagaagatgcagtcgttcttccctctttccaatagat

SEQ ID NO: 154134 - DNA, 75 bp, Homo sapiens
aaaacatgcagctcctgtcgagatcaaggcaaaaatgcgaaaagcagcatctgttatagcaaaatacccacacaa

SEQ ID NO: 154135 - DNA, 100 bp, Homo sapiens
attatgaaaaggaatacattctttcatcattaagaaatcagggtggttctcttcccaaagtggaagccaaattcatcaattatgtgaagaattgcttccg

SEQ ID NO: 154136 - DNA, 98 bp, Homo sapiens
tgggagcccgcggccggagaagggctgcgggttagggggccggcgcccgcggttcaggctcttgcagccaatgccggaacaggatttgctgttgctga

SEQ ID NO: 154137 - DNA, 75 bp, Homo sapiens
tgcagctctgctgagagagtgcaagccgtggggctgaattgaagatccctcttacccgccaggtgccaagaacta

SEQ ID NO: 154138 - DNA, 100 bp, Homo sapiens
aaacacacagaagtgggaaatgaataaaagagtattgataaatttttgaaaattgttgaagctgagtaatggagagaaatctcatcatctgtgcagcctt

SEQ ID NO: 154139 - DNA, 73 bp, Homo sapiens
ggcaagataattgttttcaagtgttggaaggctgctatggagaaatgtgaagcctcagtttaggtcatctggt

SEQ ID NO: 154140 - DNA, 75 bp, Homo sapiens
ccgggagtttgcggattttgaatatagggaggagctcgcagccctcatctctgagctgaagcaggagcagaaaaa

SEQ ID NO: 154141 - DNA, 73 bp, Homo sapiens
cgctgcagctctccgtgagcaacctgcagaggcacagagctttggcctgctggatcccaaactctgctacctg

SEQ ID NO: 154142 - DNA, 82 bp, Homo sapiens
gtcgtcttccacttgcacgaaagctttcctaggccaaaaagaggaaaaggggaagatagtgatgtactcagtataaatgcag

SEQ ID NO: 154143 - DNA, 125 bp, Homo sapiens
ggacctggcagcagaggatgatgagggcttcagtgcagacgcagtggtggccctggagcagtatgccagcaagaaaccagcctggacaccaagtctgtgtcagaaggccacctcaagaggaacat

SEQ ID NO: 154144 - DNA, 75 bp, Homo sapiens
aaaagttgtggcaatagaaacgaaacgccctcagaccctgtaatcattgacaggatatggaatattatcttgtaa

SEQ ID NO: 154145 - DNA, 50 bp, Homo sapiens
ctgaagatagatcgccatcatggaatcctcgtagcccactacctccagag

SEQ ID NO: 154146 - DNA, 82 bp, Homo sapiens
ttattgtggcattgcgccgtacattcgagagtttgagccttagattgtaagcaaaagaaatcaaggtcaagatctggaagca

SEQ ID NO: 154147 - DNA, 98 bp, Homo sapiens
gcacgaggaccatgctgggccggagcctccgagaagagtacgagacccaatctagtgcagaagccaaatttgtgaagcagctagaccaatgtgaaatg

SEQ ID NO: 154148 - DNA, 75 bp, Homo sapiens
agaaggccaaggaggtcagcccgatgtctgcacccaacatgccttcgatcgactatggcctgaaggtggacattt

SEQ ID NO: 154149 - DNA, 100 bp, Homo sapiens
cgcagcttcctcggcgcccccggccgctaccgctcaggtgctgcaggcacagcccgagaaaccgcagcactacacgtcttggtcttgatgccaagtttgg

SEQ ID NO: 154150 - DNA, 75 bp, Homo sapiens
ccccatcgagaaatggccgcgtcggcaggactggagactgatgcatgagggggctacggaggcgcaggagcggtg

SEQ ID NO: 154151 - DNA, 75 bp, Homo sapiens
agggagccgaccgggccctgggctggaggtaaaaccccacggtcagccatgtcatctgagcctcccccaccacca

SEQ ID NO: 154152 - DNA, 100 bp, Homo sapiens
agacctgcagagtgaagaaagctggtaatagatgtctgacaaactaaagaaagacttgtgttactatctagatcaccatggcgactggacagaagttgat

SEQ ID NO: 154153 - DNA, 48 bp, Homo sapiens
taggcaagtcatttatgaaggagataaacaggggtcacatgacgacag

SEQ ID NO: 154154 - DNA, 101 bp, Homo sapiens
ttaacagaagcttggtgctgacaggccagtgggaaggtactaggttttgacaagcttgcatcatgcgtgagtataagctagtcgttcttggctcaggaggc

SEQ ID NO: 154155 - DNA, 75 bp, Homo sapiens
ccttcaatccagttccaaggactccacgggattactttctatgaagacaaaaattttcaaggccgtcgctatgac

SEQ ID NO: 154156 - DNA, 75 bp, Homo sapiens
cgcggcttaaatgatgtattttgtgatcgcagcgatgaaaggtgaaattaaagagccccttgaaatctctatatc

SEQ ID NO: 154157 - DNA, 90 bp, Homo sapiens
ggacctgagcctgacgcgggccgcgcgggctttgtccagggatctgaaaccactttgcagtcgacatactcggataccagcgctcagccc

SEQ ID NO: 154158 - DNA, 74 bp, Homo sapiens
gaccatcaaaaggcaaattgcaaaccataaggatgtttcgttccctgtggtccactgtaggtgtgccaagtgtt

SEQ ID NO: 154159 - DNA, 90 bp, Homo sapiens
tgatgattgatctggctgaagtagcagatctgaatagcctaacatggcagaccagagacagcgctcactgtctacctctggggagtcatt

SEQ ID NO: 154160 - DNA, 75 bp, Homo sapiens
ggtgagtcgcggtgggtcctcgcttgcagttcagcgaccacgggaagacgcttccctcctggggccaggccctgc

SEQ ID NO: 154161 - DNA, 99 bp, Homo sapiens
tctcgcttttcccctggccttctgtatcttcatggtgcggctcatcttcgagagagttgcatgctgagaatttgaaaaatgaagatgatgtagacactg

SEQ ID NO: 154162 - DNA, 100 bp, Homo sapiens
gatgatgaagctgaagaaggagaggttgaagatgagaactcaagtgatgtagagcatggcctgtatgagaagaaaaagacctcaagaaagcaacgaaagg

SEQ ID NO: 154163 - DNA, 50 bp, Homo sapiens
aattgcctgctttgattccctaaagagatcctgaaggagctagacgagtg

SEQ ID NO: 154164 - DNA, 75 bp, Homo sapiens
cagggagaaggaagaggtgtttgaaaagatcattgctgaaggtgccaatgggccaacaactccagaagctgacaa

SEQ ID NO: 154165 - DNA, 100 bp, Homo sapiens
ccaagatggcggcggcggcggcagcgacagcagcagcagcagccagtattcgggaaaggcagacaggtggtggacataatgcgagttaacgtggacaagg

SEQ ID NO: 154166 - DNA, 90 bp, Homo sapiens
tgcccccgaagtgaaagagatggcctggtggaaagcctggaagtctcaggggatccagaactgcagccagtccttgctgggctgttcctg

SEQ ID NO: 154167 - DNA, 101 bp, Homo sapiens
cgtgttgtggcgttgccccgccggggagcagaccaaggcgctggtcacccaactcaccctcttcaaccagatcctggtggagctgcgggatgatatacgag

SEQ ID NO: 154168 - DNA, 82 bp, Homo sapiens
gaagttgcgaaggatccccaacggggaggccaacgtgaagaaggctgaaatctctttaatgatggagggaagcaggcagacg

SEQ ID NO: 154169 - DNA, 101 bp, Homo sapiens
ctaagaaaggccagggaacggcagcaacagcttataccattgctaagtatggtatgtctatgtatgtgcttggaatggcagaagaatttaaaggtgaaatt

SEQ ID NO: 154170 - DNA, 100 bp, Homo sapiens
catgtgcagacaaagaagcaccagacagagcccatttagcctgggacagtaaaaggctgcagagagtacagcaacttgcgaaaaacacaagatacttcag

SEQ ID NO: 154171 - DNA, 90 bp, Homo sapiens
tggccggaatgcagtaccctcagcagcagtctcctgcagacagatctcagaagattcatgctggtgacgaagtcattcaagttaatcagc

SEQ ID NO: 154172 - DNA, 100 bp, Homo sapiens
aggcacccatccttattgctacagatgtagcctcccgtgggctagataatggagacatcaaatttctgactaaaggagataataatgaagttgatgatag

SEQ ID NO: 154173 - DNA, 101 bp, Homo sapiens
ctgttatggctgcggtccagaacccggccctcaccgccctcaccacccctatccagacggctgcccttcaagtaccaaatgtggccccgtcccagagcacc

SEQ ID NO: 154174 - DNA, 82 bp, Homo sapiens
taacaagaaataccgtgccctgaggttggacgtggggaatttctcctggggctcagagtgccctggccaacgtcaacattgg

SEQ ID NO: 154175 - DNA, 98 bp, Homo sapiens
cagaagtgtcttggagccaactagaggcagggtcatccttgcccttgtcctcccctttcatccctatgtggaaaacgatgacaacggcaacacgacaa

SEQ ID NO: 154176 - DNA, 60 bp, Homo sapiens
ggcctgaccaaggacctccaagacatcacggctgcagccctggctacgggtgcctgcatc

SEQ ID NO: 154177 - DNA, 95 bp, Homo sapiens
gtctctgctggaaatgatgcctatgttgaccttgatcgtcagctggaggagagcaggagtgttcagaagcaaatgaagatcctgcagaagaagca

SEQ ID NO: 154178 - DNA, 110 bp, Homo sapiens
ctgactcgggactcctccatcctggggcctcaccacttggacgagtttgtccgcgtctgggcagaatatgaccgagcagcatgggttgagttccagaataaattctacag

SEQ ID NO: 154179 - DNA, 100 bp, Homo sapiens
agatggcgtctcccacagacggtatttgaaatggacatcgctaaacagttacaagcttatgaagttgagtaccacgtccttcaagaagaacttatcgatt

SEQ ID NO: 154180 - DNA, 101 bp, Homo sapiens
cgcgtgctggagctcttcgacccacccaaggatgctccagaccttgtatgattacttctggtgggaacgtctgtggctgcctgtgaacttgacctgggccg

SEQ ID NO: 154181 - DNA, 100 bp, Homo sapiens
agcggcggcggcgacgtggtgtgcaccggctggctgaggaaatcgcctcccgagaagaagttgaggcgctatattgcagagggaatggcatacatcgagc

SEQ ID NO: 154182 - DNA, 100 bp, Homo sapiens
gctgaagaggacccaccgtgggctccacgttcttacttggaaaagggcaggagctaacatgattgtgtctggcagtgctattatgaggagtgaagacccc

SEQ ID NO: 154183 - DNA, 50 bp, Homo sapiens
caagcaaagggactaccaccagcagcgtgagtgcatctccatccacgttg

SEQ ID NO: 154184 - DNA, 75 bp, Homo sapiens
gagtatgaagagacatgagatcatggtggccaaacccacagattcagaatggacagtttagaagaacctcagaaa

SEQ ID NO: 154185 - DNA, 83 bp, Homo sapiens
tcattttaattttgccggaatatttcaagacaccgaaagcaggaggccactgtctgcagctcccgtgaagatgtccactccag

SEQ ID NO: 154186 - DNA, 50 bp, Homo sapiens
cctgttgactccaattcagaggttcagagcatgtaacttctaatgccagc

SEQ ID NO: 154187 - DNA, 100 bp, Homo sapiens
cattggccacctacagaaacaaaatgtcaacaaattgatggcttcagctttagctgcagctgcctctgttcagccacttgcaacacaatgtttccaactc

SEQ ID NO: 154188 - DNA, 46 bp, Homo sapiens
aggaggcagtagccaaacacccaggctgcctttaatattggttggg

SEQ ID NO: 154189 - DNA, 50 bp, Homo sapiens
tgttgaccctgttcaggcctcggtgaagaaacctgctcctccaaagccag

SEQ ID NO: 154190 - DNA, 90 bp, Homo sapiens
cagagatccaagtgcgcgccctggcgggtccggaccaagggacttgccatgaggtgttgaagccttgtttcactgagttggagagactgg

SEQ ID NO: 154191 - DNA, 100 bp, Homo sapiens
acagcgaatgtggaggatagactacagtgccgctggcctcattgctacgatttcagagtaccctggtaatagctgagcatgcaaatgattccctagcacc

SEQ ID NO: 154192 - DNA, 141 bp, Homo sapiens
gatgggagacggggcagtgaaacaaggcttcttgtatcttcagcagcagcagacgtttggaaagatgttccaggtcatccagccagagcgtgcgctgtacatccaggccaacaactgcgtggaggccaaggactggatcga

SEQ ID NO: 154193 - DNA, 98 bp, Homo sapiens
tttcagttctttggaattccattcttttccttattcttctgatgtggatccaggaatggttccccaaggtgaggccaactttgctccatctctaagcc

SEQ ID NO: 154194 - DNA, 50 bp, Homo sapiens
gcatccggcactgcaacaatgttgtggaagatatcaataagcgcagagag

SEQ ID NO: 154195 - DNA, 100 bp, Homo sapiens
ggacacggctaagaaggaagtccaccagcctgccaagatgaattgccttgaagatcccaaactgatcttccaggctagccttgcaaatgctcagattttg

SEQ ID NO: 154196 - DNA, 90 bp, Homo sapiens
tcaagaatccgtaacaaaaacaactaactactctacagcaatggccaatgtacatggtggactatgccggcctgaacgtgcagctcccgg

SEQ ID NO: 154197 - DNA, 74 bp, Homo sapiens
gccgtcccaacatcacaaaaaggggctgggcctgtatgctgctcgagacattgagaaacacaccatggtcattg

SEQ ID NO: 154198 - DNA, 100 bp, Homo sapiens
cgcaggaactcggcagaggagaaattcagacggctcccgaggatctgccgacaccccaggccatcgagccccaggccatcgtgcagcaggtcccagcccc

SEQ ID NO: 154199 - DNA, 83 bp, Homo sapiens
gcctcgggaccggctgtatgattaggccacaatcttcaatgagtaaacatattcctatcggatcaacatcaagaggaagggag

SEQ ID NO: 154200 - DNA, 98 bp, Homo sapiens
tactactgaaatgaatggcaaaaacacattctgggatgtggatggaagcatggtgcctcctgaatggatttttcaagccacattcaattgataggatg

SEQ ID NO: 154201 - DNA, 100 bp, Homo sapiens
gggaggtgtggtttattggcaaagaaaaagaagaacgtgaccggctgcaactgaaagctctagaggagcatttcctccctctgctatttatacacggaaa

SEQ ID NO: 154202 - DNA, 90 bp, Homo sapiens
ggaagcagaattccattttactcatctcataatgactttcaagtgccggtggtggtgtgcacattgagccccggtatagacagttccccc

SEQ ID NO: 154203 - DNA, 75 bp, Homo sapiens
gaggcgaggccggacgcacctctgtttgggggtcctcagcaattctgtggtgttcttggtcacacatttatggag

SEQ ID NO: 154204 - DNA, 100 bp, Homo sapiens
aatggcatttacagaaagagtcaacagcagtggcaacaggtgttgtctacatctactggcctaacaaaaacagtgtataatccagctgctttgaaggctg

SEQ ID NO: 154205 - DNA, 98 bp, Homo sapiens
gaagatatcaccaccttcgtcaagggcaagatacacagagcaacttcttcaagggcccggctctatgatgttgttgcagtttttccaaagacagaaaa

SEQ ID NO: 154206 - DNA, 75 bp, Homo sapiens
gatatgcagagagagcttgggagactgagacaacagctcccctcccacccggtcactccgtccagcaagcacgca

SEQ ID NO: 154207 - DNA, 100 bp, Homo sapiens
ggagttttccggggccctctcagcaagaacgggaacaaaactctggcaaccaaaacctcatgtcctggatatgcaaggaaaacagagtcgcgcttctttt

SEQ ID NO: 154208 - DNA, 82 bp, Homo sapiens
gaacatgccaagtggtttccaaggtgtgactgcacagaaaagttacaaaacaaatttgactttttgcgctcacagttgaatg

SEQ ID NO: 154209 - DNA, 90 bp, Homo sapiens
atgggctgcaagggagacgcgagcggatgttgccttatggctgtttagcaacaggagatcgctctggcctcattgaagttgtgagcacct

SEQ ID NO: 154210 - DNA, 90 bp, Homo sapiens
cggagagttctgcatgttgattcgaatgtatcctgtcaggtataatgtcagtgaatggcaagaaagttcttcatatggatcgaaaccctt

SEQ ID NO: 154211 - DNA, 90 bp, Homo sapiens
gttcacgcacatcctgctgtccagtcagacctcggataacaatgccctgacacctgaggccagggagctggagagcagagaggcagagct

SEQ ID NO: 154212 - DNA, 75 bp, Homo sapiens
cagcctgatgctaccaaaggtggaaagtcctgaagaaatccagtggagtttgtggtggattgtcgaaaatttttg

SEQ ID NO: 154213 - DNA, 51 bp, Homo sapiens
gagcagctgaaatctccgcccagcccagacccagcctcgcctttaaggatg

SEQ ID NO: 154214 - DNA, 74 bp, Homo sapiens
cccacctgctgacatctacctgccagtaagactttgaccccgacgcaggcttcagtgattgccgcggatcagaa

SEQ ID NO: 154215 - DNA, 74 bp, Homo sapiens
aacaccgttcccccagccgggctgaccctctttcccagctgcccgctcctcagcacccgaagattcgcctgtac

SEQ ID NO: 154216 - DNA, 101 bp, Homo sapiens
aggggctccgggtcttccagagcgtgaagatcaagatcggcctcatgcattgtgcgtcagcagcaatgtttatggtgaaaaatggcaacgggaccgcgtgc

SEQ ID NO: 154217 - DNA, 100 bp, Homo sapiens
cgacgccaatgctcctgtggctgtcagatccaaagttcctgattctgagttccccgtgatgcagtgcttgacagttttcggctttgtgagaaaccttacc

SEQ ID NO: 154218 - DNA, 74 bp, Homo sapiens
gcgtgtgggacgggtttagcggcagcctcttcgcagagagtgaggaagaagatgaaatggaagttgaagaccag

SEQ ID NO: 154219 - DNA, 50 bp, Homo sapiens
caaactccaggctcagatgtcacaggaggaggaagccaagaatctggtga

SEQ ID NO: 154220 - DNA, 80 bp, Homo sapiens
tcagaaggatatcgacgtcgtgatccagaagtccagagctgaggactgcctgtttgcagaacatggtccaagacaattcc

SEQ ID NO: 154221 - DNA, 103 bp, Homo sapiens
ctaatttgaaccatgtttggattgaagccgcctctgtattacttaccagtgctgctcacggccgtgaactgctacagcgtgaaggccgccacccgggtccagg

SEQ ID NO: 154222 - DNA, 101 bp, Homo sapiens
ctgaaaacatcatcgttttgaagagttctgcgttttgccagtcacctctcaactgtgtgccaaaggaataagtttgtggagtttgacatgaagccagtctg

SEQ ID NO: 154223 - DNA, 101 bp, Homo sapiens
cggcgctgctgctcgggctgctcttggagactttgctaccaggacttgctggcccctctggggagatggttaaatccacaacaagtctgacctcgtcttct

SEQ ID NO: 154224 - DNA, 87 bp, Homo sapiens
atttggaaaaacactagagacagacggctggcagtaatagttatgcacgagtgcgagctgtggtgatgacccgagatgactcaagtg

SEQ ID NO: 154225 - DNA, 101 bp, Homo sapiens
cctggcacaaaccagatcttggcacgcaggagaatatggcctgatatgaaggagtcacgcctcccgcctcccggagctgcccagtggctgccttgtccttc

SEQ ID NO: 154226 - DNA, 100 bp, Homo sapiens
gcttggtgtcctcctggcctcagcaacctgacaattctgtcgtgtcccgatttgaggcttaagcaacttcttccggggaagagtgccagtgcagccactg

SEQ ID NO: 154227 - DNA, 100 bp, Homo sapiens
cggcaggaaggccactcacagggcttcaacaagctagctgaggttggatggcaagcatgtggtgtttggcaaagtgaaagaaggcatgaatattgtggag

SEQ ID NO: 154228 - DNA, 75 bp, Homo sapiens
cagaaagggtttgactggaggaacctctggagcagctgttatcaatactctggctgaccatcatcatcgtgggac

SEQ ID NO: 154229 - DNA, 100 bp, Homo sapiens
gcaccacaggactgcagctccccagcacgtactataaccaagagtggacattgtgggatcgctttgaggtacaagggctgcagcctaatggtgaggagat

SEQ ID NO: 154230 - DNA, 95 bp, Homo sapiens
ttgagttctagtagcacacactctgcacctcgaaggctgacaagtcatctgggaaccaagaaacattattccatcatttgtgttgatggatatcc

SEQ ID NO: 154231 - DNA, 74 bp, Homo sapiens
cctcgaagctggctcagcctttgttcaggaaccgagccctcaggactgcccccggaccctgctctcacccctgg

SEQ ID NO: 154232 - DNA, 82 bp, Homo sapiens
gggccatacccaataaccaggtgcttggcaaaatcgagcgggccattgccggtggctgctggcagcggaatcccccagatca

SEQ ID NO: 154233 - DNA, 100 bp, Homo sapiens
gcaataaagagagcagactggaaggagatctattgggaaactgattataaccactcgggcaccatcgatgcccacgagatgaggacagccctcaggaagg

SEQ ID NO: 154234 - DNA, 100 bp, Homo sapiens
ataagaaggaacccaaagaaccatctcccaaacaggatgcagcagccgctcttctaaaacattcaaaccaaagaagaatatccctgaaggatctcatcag

SEQ ID NO: 154235 - DNA, 100 bp, Homo sapiens
tggcctctcctgggatcggcccaaggccagttctccgcagcaacagggagctgccaccaccgtgtactgtgctgctgtcccagaactggagggtctggga

SEQ ID NO: 154236 - DNA, 75 bp, Homo sapiens
caggtgtagtacagagcggactgcagagtggagtcaacatatcaatggagcaagtcacagtcgtcgatgccagct

SEQ ID NO: 154237 - DNA, 80 bp, Homo sapiens
cgagagcgcggtggccgggccccaggtgaaatgacaatggatgctctgttggctcgattgaaacttctgaatccagatga

SEQ ID NO: 154238 - DNA, 100 bp, Homo sapiens
ctccttcaagattgacttctcggaatggaaggatgacgaggttgctgatcagctctgtgccaagtatagcaaggaatatggcaagctatgtaggaccaac

SEQ ID NO: 154239 - DNA, 98 bp, Homo sapiens
tactcatgatccggaccctgagactcccctaaaggccagaaagagtgctatgcaggttattgggatcccgcccagcatccagcagctggtcctgcagc

SEQ ID NO: 154240 - DNA, 75 bp, Homo sapiens
gagcttgccgacgcggtgtgaggacgctcccacggaggccggagacagaagagatgggtgatgaagaagttttct

SEQ ID NO: 154241 - DNA, 100 bp, Homo sapiens
acaaaacacaggaaccatttagcgtcagaaataagccgttttttgacatctgtacttcaagaaagtttaaaaggatgcttaatcgggagctcacccatct

SEQ ID NO: 154242 - DNA, 139 bp, Homo sapiens
cgaggacctagactgtgacaacgaccacgtctccaaaatgagtcgcatcttcaacccccatctgtgttatttggaagatggagcttcaaagggtgcctggctgaaccggtcaagtattatttttgcgggaggtgataag

SEQ ID NO: 154243 - DNA, 83 bp, Homo sapiens
ctaccatggtctacaagactctcttcgctctttgcatcttaactgcagtttggtgccctggttgtcagatgttggaaagcagt

SEQ ID NO: 154244 - DNA, 102 bp, Homo sapiens
atcgtgtgcctgatgatcacgcagctggctggcttcagtggaccagacttttgggaaaagatatttcagaagttcagtgcatatcaaaaaagcgaacaacag

SEQ ID NO: 154245 - DNA, 98 bp, Homo sapiens
ggggtctgggtgttgaggggcgactggagccatggcggagtcggcgcctgctcgggtgcctgtggcatttgatgatgtctccatctacttttccactc

SEQ ID NO: 154246 - DNA, 100 bp, Homo sapiens
tctccttcccagccttcagaaattgccggtctgggagttgggggcaaggagaagatcctgaatatcaacttgcaaggccttctgatgcaaacagaaagga

SEQ ID NO: 154247 - DNA, 101 bp, Homo sapiens
gacttgcagctggagagaatcaacgtgtactacaatgaggctgctggaaagcagatggtggagctgaatatgccacttaccagactaaatcaaccactcca

SEQ ID NO: 154248 - DNA, 71 bp, Homo sapiens
cgagattgcctgacccaggcctgctcggccctcacaggtatgcaggaagcaggcggtcaatgcctctggga

SEQ ID NO: 154249 - DNA, 100 bp, Homo sapiens
tttaacaccaagatggcggacggcccggatgagtacgataccgaagcgggctgtgtgccccttctccacccagaggtatttatgggccatcggtaagaat

SEQ ID NO: 154250 - DNA, 100 bp, Homo sapiens
gcgctacaagaacagaaccatcctgggctacaagacgctggccgcgggctccatcagcatggctgagaggctgggaggcggcagaatgcagccagaggag

SEQ ID NO: 154251 - DNA, 83 bp, Homo sapiens
gtagacgccccttcgccgggacctggcacccgaatccggcctgccggagtgaagatagtccaagtcctaagagacagcgcctc

SEQ ID NO: 154252 - DNA, 100 bp, Homo sapiens
gctcggctcatgttctgggacttaggagggcaggaagagctgcagtctttgtgggacaaggtggtggtgcccacccgcgtggggcagggctatgtatacg

SEQ ID NO: 154253 - DNA, 100 bp, Homo sapiens
ccaggacgcccccgagggtgtagaccgcgcccctggagtaagactttgaccccgacgcaggcttcagtgattgccgcggatcagaagcctgagcactttg

SEQ ID NO: 154254 - DNA, 83 bp, Homo sapiens
ttcacagcacagttcctgggaaggtggagccaccagcctctccttgcgccatcatgaccgggtcctataacaacttcttcagg

SEQ ID NO: 154255 - DNA, 83 bp, Homo sapiens
tttaaagctgagctgcgaggaaaatggcggcgggaggcgccatgtcagaaccggctggggatgtccgtcagaacccatgcggc

SEQ ID NO: 154256 - DNA, 98 bp, Homo sapiens
agtaagagaaaccgaagtcctcaccactcaacagtcaaagtgaagcaggccaaagaggtgctgaaaaaatatttggagtccaaggaggatgtggctga

SEQ ID NO: 154257 - DNA, 105 bp, Homo sapiens
atctgtcttcggtggactccttcggcagtccacccaccgccgccgcctcccagagcagtcattatggcgaaccttggctgctggatgctggttctctttgtggcc

SEQ ID NO: 154258 - DNA, 75 bp, Homo sapiens
tgtgggatgtcagtactggcatgtgccttatgaccctcgtttaccgacaagactgtgaaactttcgggatggtgg

SEQ ID NO: 154259 - DNA, 103 bp, Homo sapiens
gcccggcggcagcagctggaggaggatcgcactgctcatcttggccatcactatacacaacgttccaggtgtcatggagaaactccagctgggcccagagatt

SEQ ID NO: 154260 - DNA, 75 bp, Homo sapiens
ataaaaccatccatcaattactaccaagccataggaaaaggatacagagtagagtttcatgaacctgaaacttgg

SEQ ID NO: 154261 - DNA, 79 bp, Homo sapiens
taacccagaagtagctgaatgtgttactccattgctgaggagtgtgtatcctactcagtacatgtatctgaagattacc

SEQ ID NO: 154262 - DNA, 75 bp, Homo sapiens
gctgccatagatgaggccctggcagccttgcacgtgacgccggaagtcggtgcagcccacctcagaggagcgcat

SEQ ID NO: 154263 - DNA, 74 bp, Homo sapiens
agctgaccaagctatccgaccagactggctacgtggagtactacagggacccccaggaaatcaagagggctgcc

SEQ ID NO: 154264 - DNA, 75 bp, Homo sapiens
ctcctggtgcgcatcctgctgctggctgcccttgtctcctttgcctgtagtggtggagacacgcccagtggatga

SEQ ID NO: 154265 - DNA, 50 bp, Homo sapiens
gacctccagggatacgtggtcctccactgaaagtacccatggcagacaag

SEQ ID NO: 154266 - DNA, 75 bp, Homo sapiens
gacaacttcgagcagctgctctcgggggctcactggatgtctctgctttctatccgtcaagatgataaagtcgtg

SEQ ID NO: 154267 - DNA, 88 bp, Homo sapiens
gcaactatacttctttgctatttccacctatgtgcagagggaggaatgatcaattggaatcgtctttttcctcctttacgtcagcgac

SEQ ID NO: 154268 - DNA, 101 bp, Homo sapiens
cgcagatccgctgtacttgcgtccgctacagtatgtcaatcgcttgccccagcacagaccatggtgaatccgggcagcagctcgcagccgcccccggtgac

SEQ ID NO: 154269 - DNA, 98 bp, Homo sapiens
aaagctcagtggataacctatgaaaccactcaagagatgctgaattatgccaaaaccaggctaactgccttctatgaaagcagtcattattcaaggtg

SEQ ID NO: 154270 - DNA, 82 bp, Homo sapiens
ccaattctcgaatcccacctcctgtctttgaccactcgtggttttactttctctccgagtgggccggatgtatcccccgcgt

SEQ ID NO: 154271 - DNA, 90 bp, Homo sapiens
ccgggacccggttccccggcccacagtgggggtgtgcaaacccgagagaactggggaaatcctcattgacgattcaatttgttgaaggcc

SEQ ID NO: 154272 - DNA, 153 bp, Homo sapiens
gcatcatggctcaatttggaggacagaagaatccgccatgggctactcagtttacagccactgcagtatcacagccagttacaggtttatgataatggatcgctttgggagtgaccttcagaaaatatatgaagcaaatgccaaaaggttttc

SEQ ID NO: 154273 - DNA, 74 bp, Homo sapiens
caggggagttctctgtgtctgtgaaagagaagaagaaggaggttcctgctgtgccagaaacccttaagaaaaag

SEQ ID NO: 154274 - DNA, 75 bp, Homo sapiens
aaagcacagaaactgaggggacataatcatcactcagtagccgccaccggcaactaacctatgaccttctgacct

SEQ ID NO: 154275 - DNA, 75 bp, Homo sapiens
ctggaccaacttgaccgtctactggaaatctgaatgctgttatcacaaaagcagcatctgttatagcaaaatacc

SEQ ID NO: 154276 - DNA, 100 bp, Homo sapiens
agagcttctcttccttccagattatctggttttgtccaactgcgagactggaagactgcaccataccagatcttttatgacctagtgcggcaaattaaca

SEQ ID NO: 154277 - DNA, 81 bp, Homo sapiens
taccatgaatagttctactccttctacaggtgtgtatggtttagacgtctgtgccacttgccatgaacatgccacatgcca

SEQ ID NO: 154278 - DNA, 100 bp, Homo sapiens
cgagcagccccggctctgggctacggactatgggcgaatagctctgaccacccggcgaagggcaagaatatcacggcatgggcatgagtagcttgaaact

SEQ ID NO: 154279 - DNA, 107 bp, Homo sapiens
gggaggcgcggctggcgccgctgcgcgcatgggcctgttcctggcccgcagccgccacctacccagtgaccatgataggtggagtctcactctgttgcccaggctgg

SEQ ID NO: 154280 - DNA, 100 bp, Homo sapiens
gctcaccttctacgacatcgccatgaccgcggggtctctaattaacagaagatggcaaagcccagccacagcagctatgtccttcagcagctaaacaacc

SEQ ID NO: 154281 - DNA, 110 bp, Homo sapiens
ccagatactctgcccaaccgcacggtcaccctagaggtacagaaagcagtcaacactgcccagggattgtttcagagatggacagagctcctccaggacccctccacagc

SEQ ID NO: 154282 - DNA, 76 bp, Homo sapiens
gcggctactacctggagatgctgatcgggacccccccgcagaagtacctggagtagaacagaaaaattattatgtc

SEQ ID NO: 154283 - DNA, 96 bp, Homo sapiens
gtaagaagaggtcccaatcccccactctttccgccctaatggaggtctccagtttcgtgccctctggtggtcagaagatgctgtgctgtctcgtta

SEQ ID NO: 154284 - DNA, 83 bp, Homo sapiens
gtggcgcgcccagagccccgcgtttcagccctagggaaggttcttctgtgtggcagttcagaatgatggatcaagctagatca

SEQ ID NO: 154285 - DNA, 50 bp, Homo sapiens
cacgaattacacatttgatttcaagcaccccgagcagaaggcagaccggt

SEQ ID NO: 154286 - DNA, 100 bp, Homo sapiens
cctacaccgactcggacgcgccgcccagcgccgccgccccggacagcggccccgaagcgggcggcctgcactcgggaatcctttgtgcattgaagacttt

SEQ ID NO: 154287 - DNA, 83 bp, Homo sapiens
ggtttcgggatctcggtgctgcagacggcgagacctcctgcacaggactcagtggcatttgaggatgtggctataaacttcac

SEQ ID NO: 154288 - DNA, 85 bp, Homo sapiens
atcaaagtacaggaggccaacatccatcagatccaaaaggaaagtcctcggccgtagagattcagatgatgaccactcccgaaac

SEQ ID NO: 154289 - DNA, 75 bp, Homo sapiens
ctcttgtgcagattgtggcagtagtggtttggaaggtttgcagttgctgctcttcagtccaaagtagaacagtat

SEQ ID NO: 154290 - DNA, 75 bp, Homo sapiens
gaaaaatcggcagatgttacagctgctcatgaaccacttggcaaaatctcacattcttgaaggtggcattgaaga

SEQ ID NO: 154291 - DNA, 100 bp, Homo sapiens
gcatcttatgatactcgagtatatatctgggatccacataatggagacattctgatggaatttggggacggaagaagtctatagtggctgtggagcccag

SEQ ID NO: 154292 - DNA, 50 bp, Homo sapiens
ggaggaaactgtgcaggctatggagtgattacagtggcgagatcttgaac

SEQ ID NO: 154293 - DNA, 100 bp, Homo sapiens
aggcgctgggagccgcaccacctaacgctggccgacaacagcctggcgtccgccacgtttattgaagtcaaactgtgatggctggctgcttggaacatca

SEQ ID NO: 154294 - DNA, 75 bp, Homo sapiens
ttgctactgacatactcaggcacagagaaatttcccgagctctgtgattggccgcgtaatccaggttgctgctgg

SEQ ID NO: 154295 - DNA, 90 bp, Homo sapiens
gaaggaaatgagggcaacttctgaagacttcaacaaggtagatcgacacttgagaaagctggatcaggaactggctaagtttaaaatgga

SEQ ID NO: 154296 - DNA, 75 bp, Homo sapiens
gcttgttggatgaattaatgaaccttgacccacaccaaggcctgtttaaagaagaaaacccgtatgctagatttg

SEQ ID NO: 154297 - DNA, 75 bp, Homo sapiens
acgcgctcaaccagatcgcgcgggagtgttatagttttgccgctggactcttccctcccttcccccaccccatca

SEQ ID NO: 154298 - DNA, 75 bp, Homo sapiens
cagaaatccgaccggaccgggctcgggggagcgtgagttgcagggttgggaagaacatggaaagtgacctccctg

SEQ ID NO: 154299 - DNA, 97 bp, Homo sapiens
aaagattacaccaagatctgtgctgaccacaggaattggatctactagtgcaggccctgggaggagcggggacactgaggacctctctccaaattgg

SEQ ID NO: 154300 - DNA, 100 bp, Homo sapiens
actgggtcagcttcatcctcggcggcggtggccgctagctccaaggaaggtgctggatccgggactccctggtcagctacatcaccaacctgggcctctt

SEQ ID NO: 154301 - DNA, 100 bp, Homo sapiens
ggaaaatggagcagacctggacgagaatgccgaactggggaggaggcaagaaatgtggggtgtgtcagaagacggtttactttgccgaagaggttcagtg

SEQ ID NO: 154302 - DNA, 83 bp, Homo sapiens
cagtttgaagaacttgagattgtacagattctttcaaaatgggacaagagtttgtgaaacacttcactagcagtgcagacaag

SEQ ID NO: 154303 - DNA, 90 bp, Homo sapiens
gcctaatatacctgtccagacaatctccagagctgctgcagaaaagctgtttgggctttcttcgagagtcacccagctccttcagctgag

SEQ ID NO: 154304 - DNA, 75 bp, Homo sapiens
atcagacagaacagttaatcctcaatttaagcctgatctaacccctagaaacagtttgcagaaaaaacttcagca

SEQ ID NO: 154305 - DNA, 58 bp, Homo sapiens
gacggagagaacacgagcccatcagcctcttgttgctgtaccacatagaattcactca

SEQ ID NO: 154306 - DNA, 74 bp, Homo sapiens
ggaggacagggagcgaagtttcctcaataaacatacaacctcctcttcagtgtcaaaaaagccacggttagacc

SEQ ID NO: 154307 - DNA, 88 bp, Homo sapiens
gcacgtgattgaccacaccaaggggcagccgtccgaaggcgagagcaggacaaaagagatgatgttttgattggtcttaagtcaacgg

SEQ ID NO: 154308 - DNA, 95 bp, Homo sapiens
ctgctggaggcccccaccccggccctgaagaggacactggattccatgaacagcaagggctgcaagtggtatcctgaggtgcggcaccactgtcc

SEQ ID NO: 154309 - DNA, 50 bp, Homo sapiens
caggggccactcagagtcgcccgagaacgtctgctgcagagaccatgtct

SEQ ID NO: 154310 - DNA, 75 bp, Homo sapiens
atttcagaggctgggcgatcctcagaagcctcagactatggcatgaaactgccaatcctgcgttccaaccctgag

SEQ ID NO: 154311 - DNA, 100 bp, Homo sapiens
acctggtcggggaggagaccatggctgactacctgctgtacaccctcaacaaacaccagcgctttggctggaggaaagagcagagcagatccgttcgaag

SEQ ID NO: 154312 - DNA, 100 bp, Homo sapiens
atcatgagggaattccggtcagggtcaagtcgtgttctgatcactactgacttgttggtgcaccctgaagaccacaaattaaataaatatcatgactggc

SEQ ID NO: 154313 - DNA, 83 bp, Homo sapiens
ctccagtgtcccacttgcatcaagctgggcatccagggctcgtacttctgctcgcagcaattctgtggtgttcttggtcacac

SEQ ID NO: 154314 - DNA, 88 bp, Homo sapiens
ctgaatgccgtgaaagtgacgccttcgctcaacgaggacctgcaggtggaagtgatgaagggcacctcgatttaaagatttccagcaa

SEQ ID NO: 154315 - DNA, 83 bp, Homo sapiens
gggttctgtcttttggcatgtgctcttctgcattagtggttttaaaatcaaagatgggaaaatcggagaaaattgcccttccc

SEQ ID NO: 154316 - DNA, 100 bp, Homo sapiens
gaaaactcgaggcaactattgtgcacaaatgaagatgtttccagccctgcctcggcggaccaaagggttttgaagagacaggggacacgctctatgcccc

SEQ ID NO: 154317 - DNA, 74 bp, Homo sapiens
cggaagcggggtcggcccccaaaggatgagaaggctgccagagctgctgagggggagagcagacagaagttctt

SEQ ID NO: 154318 - DNA, 75 bp, Homo sapiens
tcttgggtgaactctagcaattacaaggagtggagtcaacatatcaatggagcaagtcacagtcgtcgatgccag

SEQ ID NO: 154319 - DNA, 90 bp, Homo sapiens
cgcgcccagagccccgcgtttcagccctagggaagtacctggagtagaacagaaaaattattatgtctgtgttcccttgggactcattgg

SEQ ID NO: 154320 - DNA, 50 bp, Homo sapiens
gtaactcccatgtgcattctactgacggtctctaattaacagaagatggc

SEQ ID NO: 154321 - DNA, 50 bp, Homo sapiens
aggaccagagctccgcgcggcgaaatggtacactgaggaggggacggctc

SEQ ID NO: 154322 - DNA, 75 bp, Homo sapiens
catcgtggagcttttggtgtccttgggtgctgatgtcaatgctcagatggattaccgggccttggtgcatgagcg

SEQ ID NO: 154323 - DNA, 100 bp, Homo sapiens
agaggaagcagtagttcgggcggcaagaaatgctacaagctggagaatgagaagctgttcgaagagtaagctttcccgccagagcgccacagagatcccg

SEQ ID NO: 154324 - DNA, 82 bp, Homo sapiens
caggcgctggttggacagacaaaaaatgatttggtggtcagcttgcctgaggaggagtcaaattgactttatcagctttaat

SEQ ID NO: 154325 - DNA, 73 bp, Homo sapiens
cataacatcagggacattgacaaacgcttcgttaagggactcaggcagtacgggaagaacttcttcagaatta

SEQ ID NO: 154326 - DNA, 106 bp, Homo sapiens
gatggatccatttctcctattgaggagtcaacttggtagctggcagtgttgtgatggcttttgaagaagtatgcccggacagaatagatctgattcataaaaatta

SEQ ID NO: 154327 - DNA, 100 bp, Homo sapiens
gtcgccgccatcctcggcgcgactcgcttctttcggttctacctgggagaatccaccgccatccgccaccatggtgagtggcatcaaggcgctgtacgag

SEQ ID NO: 154328 - DNA, 74 bp, Homo sapiens
ccaacgtcctgcggcctggttgagctcgcactgacaatcgcaggaacttgctactaccagcaccatgccctacc

SEQ ID NO: 154329 - DNA, 75 bp, Homo sapiens
gaccagctcggccaggcagtgggccagcagcctggtgcctcccaggctgccgcagcgggaaccgcaagagcttgg

SEQ ID NO: 154330 - DNA, 100 bp, Homo sapiens
gccgccgcgatgtcagctcagtgctgtgcgggccagttgtctgagggaagtcaaaagcatgcaagcctacagaaaagcattgagaaagctaaaattggcc

SEQ ID NO: 154331 - DNA, 99 bp, Homo sapiens
acaaaattaaggaagatatccttaccgatgaagatgaaaaaacaaaaggactgtgggattccattaaaaggaatagccaggccagaagaaggaaggcct

SEQ ID NO: 154332 - DNA, 100 bp, Homo sapiens
tgcaaatcagactggaagatgtcaagctacaacttcaagcagaagagagaggagttgtgtctatcaaaggagtgtgtgctaaccgttacctggctatgaa

SEQ ID NO: 154333 - DNA, 96 bp, Homo sapiens
agccaaaaaatgcagaaaagctcaaggtgaagattgctgaccttggaaatgcttgttgggtgggaggcaaatacatgcaggcggtgattcagtatg

SEQ ID NO: 154334 - DNA, 100 bp, Homo sapiens
tagcctcaaactcccaggctcaagcaatcctaccatgtcagccttcccagtagctggaactacaggggacagagcacaggaaagggacccccacagtcac

SEQ ID NO: 154335 - DNA, 100 bp, Homo sapiens
tggatgaacctcatgaaaaatataggaagaaaagatccagtagtgcaaaatatgggagcaaattgtcacagaccagcagacaggacagaaaatccagata

SEQ ID NO: 154336 - DNA, 100 bp, Homo sapiens
gaccaggtcaaggttaagatggagaacacaagcgtggtattgtccatgaatagtcaaaagagtgacttggatatgtcggaattcttaattaatccaaatg

SEQ ID NO: 154337 - DNA, 153 bp, Homo sapiens
tggacgggggacaggctgtggggtttctcagataactgggcccctgcgctcaggaggccttcaccctctgctctgggagaccctcctgttcttaactgtgggcgatgagaaaggtggtggactcttcttactggcagggccacctgcgtctgt

SEQ ID NO: 154338 - DNA, 100 bp, Homo sapiens
ccgccaataaccacggagccggcagcggcgcgggaggccgtgcggtgccaaatctttggagtgttgatggagaagttacagtagctgaacagaagccggg

SEQ ID NO: 154339 - DNA, 76 bp, Homo sapiens
gtgaaactgaacttataatcgtcactggattgcacgtctgagaatggtggatgtggtggagaaagaagatgtgaat

SEQ ID NO: 154340 - DNA, 100 bp, Homo sapiens
ttggagaaatttcacagtacatcatccaaaagaggagtccatgatggaggcagaggtaaacttggagagtgagaaagatcagtctaaagaaaaggagaag

SEQ ID NO: 154341 - DNA, 100 bp, Homo sapiens
aacaaaaacaatgtgagatgtctccagcatttttacggacccaatcatgagcactgctttaataggggccgttgctccagggagaactgcaaatatcttc

SEQ ID NO: 154342 - DNA, 55 bp, Homo sapiens
tgctcgcacacagcaggatttaagagatgcacagtctctgacatcagctctcctg

SEQ ID NO: 154343 - DNA, 101 bp, Homo sapiens
tcgggccgcgccgcgcctcagctctgagactctgacctgtttttgttggacacccgtgtagtatgggcctcagaagaaggctggctggaatttgacatcac

SEQ ID NO: 154344 - DNA, 100 bp, Homo sapiens
aagaacatccccgccgggctgcagtccatgaaccaggcgttgcagaggcgcttcgccaagggggtgcagtacaacaggggggccctcagcctcttggcct

SEQ ID NO: 154345 - DNA, 75 bp, Homo sapiens
tgttttggatgcaacatttgtaatggtggctcgtgattctgaaaataaaggttataggtaaacattggaaactcc

SEQ ID NO: 154346 - DNA, 75 bp, Homo sapiens
caaaaggaaatgcttcgaaataatgaatccaaaatccttcatttacagcaaatttccgtcaggaaaaacagcctt

SEQ ID NO: 154347 - DNA, 90 bp, Homo sapiens
gttaaagctgcactgggaagacttcgatgtgttcacaaagggggagaacgtcagtccacggcttcttctcatatcggtaattccactcag

SEQ ID NO: 154348 - DNA, 100 bp, Homo sapiens
tgtttgtcgagatttgaaagagctcagacatctggcagaagtcaattcatctggaaagactatctctgagtcagacttaaaccactctttttcactaact

SEQ ID NO: 154349 - DNA, 80 bp, Homo sapiens
tcccctcgcccgcccgggccgccaggttgacatcatggacatatgtgagtccatcctggagaggaagcggcatgacagcg

SEQ ID NO: 154350 - DNA, 51 bp, Homo sapiens
atggccaagcaaggccagatgggtgtccgcaatgttgccagtgtctgtctg

SEQ ID NO: 154351 - DNA, 100 bp, Homo sapiens
cttcattcatgactccagacaggcaagaggaggaacgacgtagaagagaggaagagatgatgattcgtcaacgtgagatggaagaacaaatgaggcgcca

SEQ ID NO: 154352 - DNA, 83 bp, Homo sapiens
gctggggcgactgtgtctggctgccttatctttacacgctgcaggtcagcccaaggccaaccccactgtcactctgttcccgc

SEQ ID NO: 154353 - DNA, 95 bp, Homo sapiens
atgggagcagatcaggatactattccaagaggactttcaaatggtgaagaaacaccccggagagagtccagcctctgatgaagcaggagagaaag

SEQ ID NO: 154354 - DNA, 96 bp, Homo sapiens
aggagcccaagtcggagaactcatccactcagagctccccagagatgcccacgaccaagaacaggaacaggcctttgagagcagccagaagtacaa

SEQ ID NO: 154355 - DNA, 75 bp, Homo sapiens
gtcttggattcgtgaacagaccacagtggaccacttctggggacccatggatgaaggaccagatcttgatctagg

SEQ ID NO: 154356 - DNA, 73 bp, Homo sapiens
tcatcctcaaggagactcggcggctgccctgggccactggctacgcagagtgtgatgaatgcagactctgcta

SEQ ID NO: 154357 - DNA, 82 bp, Homo sapiens
gtacctctccttttccctctccctttccctaagatagcctgggctggaagctcttctacgtcacaggctgcctgtttgtggc

SEQ ID NO: 154358 - DNA, 100 bp, Homo sapiens
taatggtgtcttctggttgcagaatgcgaagtctgtggtttatcattgtaatcagcttcttaccaaatacagaagatgaggaaactgaacttgccccaag

SEQ ID NO: 154359 - DNA, 101 bp, Homo sapiens
aggatcagaaccggtacctggatggcatgtgccggatggagtgctgtgatgtgccagccgagacactctacgacgtcctacacgacattgagtaccgcaag

SEQ ID NO: 154360 - DNA, 100 bp, Homo sapiens
cctcctctctggatccctggaagcactcatccagcacttagtacctaatgtggattactatccagatgaggagatgttaaagtaacccatcttgcaggac

SEQ ID NO: 154361 - DNA, 80 bp, Homo sapiens
attacacacagcaagttcctgcttctgggacagctctactgacgcagttgcaccaccagcaccaccttccagtagtcagc

SEQ ID NO: 154362 - DNA, 75 bp, Homo sapiens
gacgatggcaggtgggggcagcgacctgagcaccagctgcagaaccttggcctgaaaatgctacattatatcagc

SEQ ID NO: 154363 - DNA, 90 bp, Homo sapiens
ggagccggtggtgccttcgctcgtggatcgatacttcactcgctggtacaaaccggcatgagtctgctttgccctgggatgaccatagac

SEQ ID NO: 154364 - DNA, 107 bp, Homo sapiens
gagaatacgattcttaaagctactgaagtgcagttcccgccaaagccagtagtaacacctgaagcaaagaacccaacgtcttcctcatcttcagccatggactgcag

SEQ ID NO: 154365 - DNA, 100 bp, Homo sapiens
cctttttgtccatgaattcttctatagcttcctgcaaatagtagtgatagtgaagaactttcagctggtgaaagtataactaagagtcagccagtcaaat

SEQ ID NO: 154366 - DNA, 82 bp, Homo sapiens
ccagaccctggagcctcagttggaagcagccgatccagcctgcggagcctgtggggcagggacacttgacattcagggacgt

SEQ ID NO: 154367 - DNA, 74 bp, Homo sapiens
cactttgggaggccgaggtgggcggatcacaagtgtttcagctgaaccatccgttcatcttcaagccatcatga

SEQ ID NO: 154368 - DNA, 101 bp, Homo sapiens
gaggagccgacgccgacgccacggagtcagcacaagtctcatcagatgggaataactgggaacacaagtccatttggacagccctttagtcaagctggagg

SEQ ID NO: 154369 - DNA, 98 bp, Homo sapiens
tgtcagtaagaaagcagctgatagcacatcacagatcaggaactgaggacatatctaaattttctagttttatagaaggcttttatccacaagaatca

SEQ ID NO: 154370 - DNA, 82 bp, Homo sapiens
caggcccggaagctggtggaacagctacgcatagaagccgggattgagcgcatcaaggtgaaaccagcccagagaagttacg

SEQ ID NO: 154371 - DNA, 100 bp, Homo sapiens
cagggaagttcctttttgaagtagttccaggtgcagcagtgaacagcagtgagagtctccctccatcctcgtctgtcaatgacatctcctccatgtccac

SEQ ID NO: 154372 - DNA, 100 bp, Homo sapiens
cgcgcccggctgaagacgctgaccagcgagctggcattgtacaagaggggatctcggcccctttccaaacactcctgatgcctcatttgcctctcgcctc

SEQ ID NO: 154373 - DNA, 108 bp, Homo sapiens
acggcaagcagccctggtaccagctctccaacacggaggcctctgcaatgtcaccgcctctgtgtcccctccttctcctggctgtgggcctgcggctggctggaactc

SEQ ID NO: 154374 - DNA, 100 bp, Homo sapiens
caaccacctgggctgcctggtcttcagcaggcatgaacaaccgggaggtgctggagcaggtggagcgaggctacaggatgccctgcccgcaggactgccc

SEQ ID NO: 154375 - DNA, 90 bp, Homo sapiens
cggccagttaaacctgtcgggtagaaacctcagtgaaggtactttggaagttcgtcttatgggctgccaagatatcctagagaatgtccc

SEQ ID NO: 154376 - DNA, 82 bp, Homo sapiens
gaaaccccgttgacaaggcactgctttttcatgacgacggaaatggagagctggatttctccacttttctgaccattatgca

SEQ ID NO: 154377 - DNA, 75 bp, Homo sapiens
tggtggaggaggctcttcagtctccatggctgtgaagcttcatggaggtatcgatatcctagtctccaatgctgc

SEQ ID NO: 154378 - DNA, 100 bp, Homo sapiens
tacattctgaagatgaatttctacaagggaaattgtttatgacattctgagcatgtgagacctgaggactgcaaacagctataagaggctccaaattaat

SEQ ID NO: 154379 - DNA, 74 bp, Homo sapiens
ctgaagatagatcgccatcatggagcccgtaggtcatcttggagggtcgtctcaagtattgaacaaaagacgga

SEQ ID NO: 154380 - DNA, 83 bp, Homo sapiens
caaagaaaagaacgtgcctcttccaggggcaattccaaaagtcttcagatttccaaaaggaaggactgcagcagacatttctg

SEQ ID NO: 154381 - DNA, 82 bp, Homo sapiens
cactttgcattgactggaaacaatggcatttacagaaagagtcaacagcagtggcaacaggctctgaaccaagttgtcctat

SEQ ID NO: 154382 - DNA, 87 bp, Homo sapiens
tccggctgctggatggaggggattttgtcagcttgtcgtcaaggaggaggaagccaagaatctggtgagcgaagccatcgcagctgg

SEQ ID NO: 154383 - DNA, 118 bp, Homo sapiens
aaaacattacgcctctggatggatgatgttaatgagcaagttaagaatagacccaccagcatttcgtgggatggtcttgattcagggaagctctacaccttggtcctgacagacccgg

SEQ ID NO: 154384 - DNA, 82 bp, Homo sapiens
gatccttctgtcatagaaactcacatgagacaaatgcgctcagcttcaattgcaaataaagcatgagctgttggaatcccaa

SEQ ID NO: 154385 - DNA, 100 bp, Homo sapiens
taatacagaaagaatctgaggtggctcacgttgaccaactctttgatgatgcatccagcatgcatgagtgaagagaccagtaaccaaaagcagcagcagc

SEQ ID NO: 154386 - DNA, 100 bp, Homo sapiens
agcttcatgaactccaagccaaaatcacagctttgagtgagaaacaggtgtctgtgacctttgaggatgtggctgtgacattcacccaggaggagtgggg

SEQ ID NO: 154387 - DNA, 90 bp, Homo sapiens
cgctcgccatggccgacgaaaagcccaaggatgttgcttcagagtgtgaagtcaaatgcatgccaacattccagttttttaagaagggac

SEQ ID NO: 154388 - DNA, 100 bp, Homo sapiens
gccaattcatatacacaggaagtctccacttccaagatctaggaagacggctacaaatgatacttcacagagaatgcagttgtcttgacttcaggtctgt

SEQ ID NO: 154389 - DNA, 75 bp, Homo sapiens
aggccttaaggagaaagtttcaggactactgttcgaagatttttggaagaatactgagaacggcataaagtgaag

SEQ ID NO: 154390 - DNA, 97 bp, Homo sapiens
cgcctggggaggctctggcccgggctccgcgtacttcctgttcagtctgaccagtgcacaggacttcagggcttcctggtgttccacagctttggtg

SEQ ID NO: 154391 - DNA, 83 bp, Homo sapiens
ccggaggcagagcggctgccatggattttttatcaagcagaaatgcatcgaacaacgagaatcaagatcactgagctaaatcc

SEQ ID NO: 154392 - DNA, 82 bp, Homo sapiens
atttggagaggatccctggtcgcgcggcagcggcggcggcgcgcgggtgagcggatgatatcatcaagttgaatcgaaagga

SEQ ID NO: 154393 - DNA, 51 bp, Homo sapiens
cccggatccgctatgcgctcggcgaggggtttcatcaccttaaatggtttt

SEQ ID NO: 154394 - DNA, 74 bp, Homo sapiens
agaagtgaagctgctgctactcggtgctgctggtgagtagcagccggtacccagaccagtggattgtcccagga

SEQ ID NO: 154395 - DNA, 100 bp, Homo sapiens
ttttggaagctgatcttcctaactacaagagcaagatcttaaggcttctttgtacagtcctccagtctgtggactttgaagctgtggcaatcacagtgaa

SEQ ID NO: 154396 - DNA, 80 bp, Homo sapiens
ccggacaattatgtccgcgaaaccaagttggacttacagagagggggatatgagactttctactcggaatatcctgagtg

SEQ ID NO: 154397 - DNA, 75 bp, Homo sapiens
gcgcgccgctgcccgcgccacagattgagaggatccagaatccagatctctggaatagctaccaggcaaagaaaa

SEQ ID NO: 154398 - DNA, 100 bp, Homo sapiens
ccggggtgtgcgcctagctgccccggccccgtgcaccgcgggccgcctcgcgcaggacttccgcagctcgccaaggaaatcatcgagttccccatcctaa

SEQ ID NO: 154399 - DNA, 51 bp, Homo sapiens
gccaggtgcccccggccacacggtcatcatcagatttgaaatatttaaagt

SEQ ID NO: 154400 - DNA, 87 bp, Homo sapiens
aggtcatcctctatgtctcgctgcagctggccctcgtccgacaggccactttgcaaaagattgtttcatgcaaccaggtgggactaa

SEQ ID NO: 154401 - DNA, 107 bp, Homo sapiens
cgcaccatgccgctcctaagcctgcacagccgcggcggcagcagcagtgagaggaagcggggagaggtggtgagagatgacccctgttgaggatttcattggtgtct

SEQ ID NO: 154402 - DNA, 75 bp, Homo sapiens
ttgcgctgcatccgctcgacctcgtgaagatccgcttcgccggtggacccccaaaagtacaagggcatatttaac

SEQ ID NO: 154403 - DNA, 90 bp, Homo sapiens
tgacatcatccataccaaggagacgctgacacttgtgtttgaatatgtgactgggacagggagaaattacttgaagcttggatgtccaac

SEQ ID NO: 154404 - DNA, 48 bp, Homo sapiens
tcccgtgtagctgggattacagtacgctggcatcaacccctcggacgg

SEQ ID NO: 154405 - DNA, 73 bp, Homo sapiens
gagcaagatcaccgtgacatccgaggtgcctttctccaaaaggtggcttctggcacagcagcttaattgaccg

SEQ ID NO: 154406 - DNA, 100 bp, Homo sapiens
cttcagacagcatatttgagtcatttccttcgtacccacagtgcttcatgagagaaacaagtgttgaaaatgttaaaggctgtgctgaagaagagccgag

SEQ ID NO: 154407 - DNA, 75 bp, Homo sapiens
ccgaggtgcctttctccaaaagaaattgccccaatgatggccaagacaattaaagctttcaagaacagattctcc

SEQ ID NO: 154408 - DNA, 75 bp, Homo sapiens
cgatccaaaaattcagtggaagctccctgtgctgtcaggaatctacaggacttggctcgtatttacattcgacgc

SEQ ID NO: 154409 - DNA, 74 bp, Homo sapiens
ggatgatgacaaaggcaactgtgaggactaccttatgatttcctgcagtgtcatcattaggctgtctttgtgcc

SEQ ID NO: 154410 - DNA, 120 bp, Homo sapiens
ttctcaagtggaccaactatctgaagggctaccagcgccgctggttcgtgctgggcaatggtttgctctcttactacagaggaggagctccggaagctgcgagaagaaaccaacgcggag

SEQ ID NO: 154411 - DNA, 90 bp, Homo sapiens
ggagtggctcatcaaaggcagccttttccccatggcagcccctgttctgatcttggccctgattgcattcatctgcatagagaccatcat

SEQ ID NO: 154412 - DNA, 100 bp, Homo sapiens
gtgctgggggtcatcgacagctgcaaggaggccgtcaccttcaaggccgtcagacaaggaggcacgcggacctccagtggccggctccggaggcttggtg

SEQ ID NO: 154413 - DNA, 50 bp, Homo sapiens
ccacacttttatcaacaaggaacggggaccctcacaatgatcccaatgct

SEQ ID NO: 154414 - DNA, 75 bp, Homo sapiens
gcaggccgtacttagtcataccagccattgccgaaatctaaaaaaacttgtagcaaaggcagtaaaaaggaacgg

SEQ ID NO: 154415 - DNA, 101 bp, Homo sapiens
agacagtcactgctgtggctgcgggaaagcctctctcttgcccaaaccacgatgggaatggcttccagggcagcgattgaggagaccttaccaaggagcac

SEQ ID NO: 154416 - DNA, 107 bp, Homo sapiens
gccggcttggcgtgaccctcgcctgatccaggccaacatagccgaggtagaggtctccatccctgccaagctgcacaactccctcattggcaccaagggccgtctga

SEQ ID NO: 154417 - DNA, 82 bp, Homo sapiens
catccttaccaaggaatctgcttttcaagtatgccaccaacagtgaagagtgatgtcttggcattgcccattttcaagcagg

SEQ ID NO: 154418 - DNA, 98 bp, Homo sapiens
ggaagatgatcagccaggcacagaagaccgagacatgggtgcccggcaccgcgcccgagcccactccattcagatcatgaaggtggaggagatcgcgg

SEQ ID NO: 154419 - DNA, 100 bp, Homo sapiens
ccttggtctcggggtcgctgtaggcgctgaggctgcaggagtataacatgtatggctggtgggtgggagaactgaacagcctcgttgggattgttccaaa

SEQ ID NO: 154420 - DNA, 51 bp, Homo sapiens
cgggcgctggtctgctcccagccgacagtgaccaacaccttcaggacgaac

SEQ ID NO: 154421 - DNA, 100 bp, Homo sapiens
atcctgggaggccctgcctatgaccagcaagaggatggggccctggatgagggggaagggcctcaaagccagaaggattttatagctaccttgggaaaac

SEQ ID NO: 154422 - DNA, 72 bp, Homo sapiens
agctcgccatggatcccaactgctcctgcgccgccgacctcaattactgtttttcaggaatgtctgatcaca

SEQ ID NO: 154423 - DNA, 80 bp, Homo sapiens
atactctcgctcacgcagcaggagcaggggacgaagttttgagaaatggtgcttgggaaattgtccactgggaaaaggta

SEQ ID NO: 154424 - DNA, 76 bp, Homo sapiens
caggtcataccatgaccggaagtcaaaagattgtcatggattttaagcacccagatggcattgcagtgccagttat

SEQ ID NO: 154425 - DNA, 100 bp, Homo sapiens
tcccggggagatcatgaaacgaggtcgccttcccagcagcagtgaggattctgacgacaatggcagaaattgcaagacctaacatggctgaaagagaaac

SEQ ID NO: 154426 - DNA, 98 bp, Homo sapiens
tacaaatgctagaagctatcaaagcccttgaagtcagaccattaaaaatctcaagtgacgactttgggaaactctggttatccttcgcaaatgatgtg

SEQ ID NO: 154427 - DNA, 98 bp, Homo sapiens
gcgaccacctcgtgaacgaagattcgaaaagccacttgaagaaaagggtgaaggaggcgaattttcagttgataggtcacacatcccgggtcctgagt

SEQ ID NO: 154428 - DNA, 101 bp, Homo sapiens
attgacattacacagtgttaacaatgcatccacagaggcaacaatttgggatgaatcccaaagacattatgctgaatgggagaaatcatttttgaaacggt

SEQ ID NO: 154429 - DNA, 98 bp, Homo sapiens
atacttcatatttggcttcaatgtcatattttgggtttctttacctccagaaagaagaatattggccccttgaattctggaagttcattgaagagtct

SEQ ID NO: 154430 - DNA, 90 bp, Homo sapiens
atcgaaaccgtttccttcatatgcatgagctgcaggaatggacatctggaggacctgttgatgctagttcagagtatcagcaagagctgg

SEQ ID NO: 154431 - DNA, 82 bp, Homo sapiens
tttcagcagccctccagctacttcctgcctgccatgccccagaatccagggcctgaaaacccagaatgaacttgtgtccatc

SEQ ID NO: 154432 - DNA, 75 bp, Homo sapiens
gcgcaggcacccctctggctgctcagtcctgcctcaggtcgctgaaaattttgttccccctctgttggatgcagt

SEQ ID NO: 154433 - DNA, 82 bp, Homo sapiens
tgctgcactaaggggaaatcccagtgagatggaagattttcgaggtatagcagaagaatcatttccaagctttctcaccaat

SEQ ID NO: 154434 - DNA, 73 bp, Homo sapiens
catgaccgtggagcagaacgtgctgcagcagagcgcggcgcagaaggttgtctgcattcaaaagagcattcta

SEQ ID NO: 154435 - DNA, 82 bp, Homo sapiens
tctcagctctcggcgcacggcccaggtgctgctgcatgaggaggcgggtgattctggctttgtcagtctctctcggctgggc

SEQ ID NO: 154436 - DNA, 100 bp, Homo sapiens
cgccgcctcagccgccgccgccgccgttttcgcctgcagctgctcaccggtatcctggatacagccatcgttgatcgggggaggaatgtggtgtctgctt

SEQ ID NO: 154437 - DNA, 83 bp, Homo sapiens
ggcgattgcgggggcctgggctaggctgtctgtccccagaccccagagcacgtccggcaccaccatgactgggctgttgaaga

SEQ ID NO: 154438 - DNA, 100 bp, Homo sapiens
cggaatcatcgatgcaggggcctcaattaatgtatctgtgcttagcgaatgccacagacggcgtgcggctagcagcccgcatcgtggacacaccctgcaa

SEQ ID NO: 154439 - DNA, 100 bp, Homo sapiens
gtgggccgcgtcgaagacatggaccagggctacggagtccacaggtcctggctaccctgggaagagacaagaagtaaatgaagaaagaggaagattccag

SEQ ID NO: 154440 - DNA, 75 bp, Homo sapiens
ccggacggcctgcagagcgctgccatcatgagttggcagatgacttgatctccgacattttcaccactattggct

SEQ ID NO: 154441 - DNA, 95 bp, Homo sapiens
ttcccttggccagtccctgttcttccatttccccccactgctcagagacggcgagattgagaggatccagaatccagatctctggaatagctacc

SEQ ID NO: 154442 - DNA, 75 bp, Homo sapiens
gcctacctctatgggagaggagttcaagttgaaatgaacaatatgtcatcagcagcagaatattacaaagaagtt

SEQ ID NO: 154443 - DNA, 75 bp, Homo sapiens
atttcgtccttcacctgatatctgtgccagagaatggtacagcaatcatttgaaactccaagggccaaagctcaa

SEQ ID NO: 154444 - DNA, 122 bp, Homo sapiens
gctgccgccgctgctgctgggggccttcccgccggccgccgccgcccgagggagtaccctgacttctaccggaagctctacggcctcttggacccctctgtctttcacgtcaagtaccgcgc

SEQ ID NO: 154445 - DNA, 51 bp, Homo sapiens
gtgcttctttcttggagctgaccatggaaaacggacgatgtattactaagc

SEQ ID NO: 154446 - DNA, 90 bp, Homo sapiens
atcagctacaccaccaacgcctttcccggagagtacatccccaccgttacatcgcggtgcacgtggtcccggaccagctcatggccttcg

SEQ ID NO: 154447 - DNA, 101 bp, Homo sapiens
ctggggccggcgatgtgccaccgaggctgaggatgatggtagattgccaggcagatcgggagcggtgccgagaaaaatttccttactagatgacatttcat

SEQ ID NO: 154448 - DNA, 98 bp, Homo sapiens
gcgggcagccgtggtggaccggaaaggctggcaaaggaggaggtgagccggcaggagctgaggcagcgggtgcgcatggctgacaacgaggtcatgga

SEQ ID NO: 154449 - DNA, 95 bp, Homo sapiens
caggaatatatcgcagtagttaaaaaactagatccaggttggaatcctcaggaaatgagtggcttatactctcctgtcagtgaggatagcacagt

SEQ ID NO: 154450 - DNA, 88 bp, Homo sapiens
tatgattaggccacaatcttcaatgagtaaacatattcctgagagattaaacagattctagaaaatgaacttcagatacctgtgtcca

SEQ ID NO: 154451 - DNA, 73 bp, Homo sapiens
cttccggagcttctcagaagacagagggttttcttttgaggtgatgatgaacagtctacacagatggctgcaa

SEQ ID NO: 154452 - DNA, 75 bp, Homo sapiens
atgactctcacagatgaaggcctagacgcagtttctcttcagcaacgggtagcagaattggaaaaaattaatgca

SEQ ID NO: 154453 - DNA, 82 bp, Homo sapiens
gctgtgttaactgctaacttttctgtaaccaacctggtaacctgtctggtcagagtgcagcttcagtcttgcacccccagca

SEQ ID NO: 154454 - DNA, 80 bp, Homo sapiens
ctgcagagaacagccccaatcaccgtccttacacggcctctgatttcatagaagagatatagatcagctatcaggaaggg

SEQ ID NO: 154455 - DNA, 96 bp, Homo sapiens
agcatgtaatgcaacccttgcttcatcaaccatcagataaccagaaaatttaccaggatttattgacagagtctcactctctcacccaggctggag

SEQ ID NO: 154456 - DNA, 76 bp, Homo sapiens
gggaccagcagttggaccaagaggaaatctggctgcaagctttcttcctggtggcagatgacatcatggattcatc

SEQ ID NO: 154457 - DNA, 100 bp, Homo sapiens
ccacccacctcggcctcccaaaatgctgggattacaggtataagccactgtgcctggccaaatatgtgccaagagttgtaacctctgcacaacagaaagc

SEQ ID NO: 154458 - DNA, 101 bp, Homo sapiens
tttgtccacatgagaggattacctttccaagccaatgcccaagacattataaacaaaatgtatggagatctagatgtcttattcctgacagatgaatacga

SEQ ID NO: 154459 - DNA, 50 bp, Homo sapiens
agcgcaggggtgggcgccatctttgacagtagagacgcggtttcaccgtg

SEQ ID NO: 154460 - DNA, 90 bp, Homo sapiens
atcgtgaccgagaccgtgaccgagagcgtgaccgagagcgcgaatatcgtcatcgttagaagatttattccccatgtttacagataccgc

SEQ ID NO: 154461 - DNA, 97 bp, Homo sapiens
cacatctatgccatcacagacaccgcctacaggagtatgatgcaaggcggtgcgtctttctacgtgaataggattttgtggctggccagatacactg

SEQ ID NO: 154462 - DNA, 97 bp, Homo sapiens
agaattctcagaggtccttatgctgccctttttgctgcagtcttgacatcttaacgtggatagaaaaagacagcaaggccatcgtggacgggaacct

SEQ ID NO: 154463 - DNA, 75 bp, Homo sapiens
catcccaggacctaccagaatctggaccagtccatgggcaattggcagatcaagcgccagaatggagatgatccc

SEQ ID NO: 154464 - DNA, 83 bp, Homo sapiens
tgcggcctggcggcttccaggcgcactaccgcgacgggaggcgtgggcagcttcgacatcgccggcctgctgaacaaccctgg

SEQ ID NO: 154465 - DNA, 100 bp, Homo sapiens
ccggcgttgaattccgggaagtgggagcttcaggctcgctccgtgcgggttctgaatgatgactgacgcgggtttgggtgatacccctcacagcccctgt

SEQ ID NO: 154466 - DNA, 76 bp, Homo sapiens
tgatgattctagcaggttcctgagtcctcgagcgcgggaagaaaggactgatcctttgaaatactccagccatgac

SEQ ID NO: 154467 - DNA, 75 bp, Homo sapiens
cagtacatagaagtggctcatagttccctccagattgtcctcgcaatgccgtagggccaggtgagctgctgtgaa

SEQ ID NO: 154468 - DNA, 114 bp, Homo sapiens
gggtattaaaatgactgtatttgcaatgattattggagcctttgtagctgccaggttcaattcccatgaaagtgcagcacatgcaattgtttctgttaatggtactaccattga

SEQ ID NO: 154469 - DNA, 75 bp, Homo sapiens
gagggcaggcaatacggccgtgggcgatctgggggccaggtggactgggtggttatggatcaggagacagtgaag

SEQ ID NO: 154470 - DNA, 85 bp, Homo sapiens
ccaatgaccccctggacctgggctacgaggtgcagatctgcaggtattggttgctctggcatctgaagaacttgccaaaggctgg

SEQ ID NO: 154471 - DNA, 82 bp, Homo sapiens
gcagaagtcgcgtgtctaggtgagtcgcggtgggtcctcgcttgcagttcagcgaccacgattgagatggccatcctgcggt

SEQ ID NO: 154472 - DNA, 80 bp, Homo sapiens
tgtgccctaccttctaggtgtcaacaacctggaattcaattggctcttgccttatgtacatcaggaacgtctctatcaag

SEQ ID NO: 154473 - DNA, 82 bp, Homo sapiens
ctggaatagcagagactccggaggggcgtcggaccagccggcgcaagcgggcgaagagcatcctggccagaacaagccaagg

SEQ ID NO: 154474 - DNA, 83 bp, Homo sapiens
ccctatgtcaccaaccaggcctaccaggagcgcacctaccagcgcctgctgtggcctgccatgggtatccatggtgacaagag

SEQ ID NO: 154475 - DNA, 100 bp, Homo sapiens
ctgaaatgtccatccacttatccagacccaatggaacatcagcaatgcttctgatggatcctgagcttgaaaaaaaactgaaagagaataaaatatcttt

SEQ ID NO: 154476 - DNA, 100 bp, Homo sapiens
gcacatttgacttggaagcaatgtttgaacaaactcgaagaacagctgtggaaagaagttgcaaaacactggtgctgggctttgacaaacttcctctgtg

SEQ ID NO: 154477 - DNA, 78 bp, Homo sapiens
gaggtctcatctttgaactactgccggagcttctgccaggtgaaagaacttgtcctggacaacagtcggtcgaatgaa

SEQ ID NO: 154478 - DNA, 50 bp, Homo sapiens
cccagtactaccggcccctgcatgttctgcggggagtgtctccagccctg

SEQ ID NO: 154479 - DNA, 90 bp, Homo sapiens
tagcagctctgatgacgatttggatgaatatacccttagaaaaaatgtggcagtgttatctaccttgcctgctcctatgccacagtgtac

SEQ ID NO: 154480 - DNA, 82 bp, Homo sapiens
cagctccgcctcctccgccgcgcagaagtggtacaccatccccaaaacgaacatctgtaggctccaggccaccagcagtaag

SEQ ID NO: 154481 - DNA, 97 bp, Homo sapiens
ggaaacttcttggaggttttcaggaaacttgcagcaaagccattcgggttggagtaattggtgtcatggagaaactccagctgggcccagagattct

SEQ ID NO: 154482 - DNA, 75 bp, Homo sapiens
agaaaaggcctaagaattttggcattgccatacacactgctgctatggatatgctgggaggacctggtatcgaaa

SEQ ID NO: 154483 - DNA, 75 bp, Homo sapiens
cctctgttatgaaactatctgagcgaaaaatatgtcgtaactgcaagtgtggccaagaagagcatgatgtcctct

SEQ ID NO: 154484 - DNA, 83 bp, Homo sapiens
gacggttcgccgtcggtgccgagaccccatcaacgtggagggcctgctggatgaagcctgctgggagcgtgaatgacatggcc

SEQ ID NO: 154485 - DNA, 98 bp, Homo sapiens
ttggagcatttgtgttgatgaagatgaaagagactgcagaaggtgcttcctggaggggcctgccccactgttcctgtgctgagttccaggacagcctc

SEQ ID NO: 154486 - DNA, 100 bp, Homo sapiens
ctaagaacatggcctacacgggtggaattctactaagtatcagtcggccctacaagacaaagcccacccacggcattggaaagtacaagcacttaattaa

SEQ ID NO: 154487 - DNA, 98 bp, Homo sapiens
cggcgagggctccacgtgcagcgtctctccgggggaacgcccttttgcttgtgactggcagggctgcgacaagaagttcgcccgctccgacgagctgg

SEQ ID NO: 154488 - DNA, 100 bp, Homo sapiens
ccatggagaccctcacggagctgggcgacgagctgaccctgggagacatcgacgctctggacttattggacaaaatgttgacattcaacccacacaagag

SEQ ID NO: 154489 - DNA, 97 bp, Homo sapiens
gcctatgactggaccccagcggtgaaattcgcctgtgagctggaaggaaacagaagaagactgcataaactgggcgtgtcaaaggtcacccaagtgg

SEQ ID NO: 154490 - DNA, 101 bp, Homo sapiens
agctcccctcacccaacgtcgtgctgaccccgcactacatctacccaccagccatcgtgcagcccagcgtggtgatcccagccgcccctgtcccgtcgctg

SEQ ID NO: 154491 - DNA, 50 bp, Homo sapiens
catacagaggctgtggtacttctggcgatatgagtctcatccagtctgtg

SEQ ID NO: 154492 - DNA, 75 bp, Homo sapiens
gaagttgatggcctggagaagaaagatgttttgcctactgttgatccgattcatgttacatgtaaagctgtcctc

SEQ ID NO: 154493 - DNA, 100 bp, Homo sapiens
acgcatttcggatctggaaacctctagaacaagttatcacagaaactgcaaagaagatttcaactcctgttgtaaagctctctgaaatagtgaccttagc

SEQ ID NO: 154494 - DNA, 100 bp, Homo sapiens
ccggggttcgtggcagcgctggtgctccatcacctgtcctgacgattaagaaagatcggacctccagaaatagcatctctttgtcctggcaagaacctga

SEQ ID NO: 154495 - DNA, 100 bp, Homo sapiens
cgcagcaaacaactccgcaaacgaaaaagaacgacatgatgcaatcttcaggaaagtaagaggggttccccactgaaggacttggtccagctgtctggca

SEQ ID NO: 154496 - DNA, 83 bp, Homo sapiens
ctaggactggttggagatcctgggctatttggattaattggcccaaagagacgagttgtactgctgtcacaggaaatggacgc

SEQ ID NO: 154497 - DNA, 75 bp, Homo sapiens
cgctgctacctgcagcgccgtgtggcacgacacaaaaatcaggtacatgtcccagagcaagcacacggaggcccg

SEQ ID NO: 154498 - DNA, 100 bp, Homo sapiens
ggctgccggggagcgctatcgcagggagatgctggcccacggtggaggcagggagcccatgctcatggttgaagggtgtccgcaatgttgccagtgtctg

SEQ ID NO: 154499 - DNA, 75 bp, Homo sapiens
ctgtgacattgctacatcacatgcttcaaaagcagtggactgtcttttggattcaaagtgggcaaaggccaagaa

SEQ ID NO: 154500 - DNA, 75 bp, Homo sapiens
tctacctgacgggcctgcgagggttgaagattgtgaagcaatagcctaaggtctcctctgagcctccggcctcca

SEQ ID NO: 154501 - DNA, 75 bp, Homo sapiens
tcccctccaccatatagtagtattactgtggaagtacctacaacttcagaggttggcgatttgaaggagctgcag

SEQ ID NO: 154502 - DNA, 100 bp, Homo sapiens
gaaaattcctactggacaagaatatgctgccaaaattatcaacaccaaaaagctttctgctaggggtaagaatgattgatgttggctgatattggagtgc

SEQ ID NO: 154503 - DNA, 100 bp, Homo sapiens
gttaggtcgtgtttccaaagagaaaaacctactcttgatacacaatctaaaaagaattaggaaggtccttcagggcctgctttcttccccgggcgatgtg

SEQ ID NO: 154504 - DNA, 100 bp, Homo sapiens
ggagtggtgcctcatggaaagcgaccccggggtcttcaccgagctcattaaaggattcggttgtacatcctggagacctgaagaattctgttgaagtcgc

SEQ ID NO: 154505 - DNA, 100 bp, Homo sapiens
cccatcagtttggtcagaatggagctcatgccactggtcaccctccccaaagggtgtcaaattgagaaccaggtagatccccaccacctacagtaaaaag

SEQ ID NO: 154506 - DNA, 71 bp, Homo sapiens
ctttgagtcagacctgtaggcctgatagactgattaaaccacagaatgtttctccatcccagagagatgaa

SEQ ID NO: 154507 - DNA, 82 bp, Homo sapiens
catcaacctcacgctgcacctgggaagctgtggatcggaaaaggaccacttttattctgatgatgacgcaatagaagctgac

SEQ ID NO: 154508 - DNA, 98 bp, Homo sapiens
catgctgtctggagaaacagccaaaggggactatcctctggaggctgtgcgcatgcagcacctgtgtgttttagaaccctgtgaaatgcaccactgaa

SEQ ID NO: 154509 - DNA, 100 bp, Homo sapiens
gctgagaggagtcttctggtgcagtcttattttgaaaagacagtgtttaagaatgaaagcctcaacgcagaatcaaaatctggctgcaaacttcaggagc

SEQ ID NO: 154510 - DNA, 89 bp, Homo sapiens
tgataatcttgaaactaaagaacccccaaacccaaaccgaggagcgcttccgccctcagtggagggcggagcagctggccagcctggaa

SEQ ID NO: 154511 - DNA, 51 bp, Homo sapiens
tagcagattggccgatgattcagggatagtaaagctctgaaggatgaaaat

SEQ ID NO: 154512 - DNA, 88 bp, Homo sapiens
gcagccgagataagagcgtttgggtctgggaagatagagtatgatcttctcaggagctacaaagaccacctggaagtcctggacattc

SEQ ID NO: 154513 - DNA, 90 bp, Homo sapiens
ctgcctcccagagaggggagccggcgaggatcaaaatcttcgaaggagggtactccaaagattcaggtttactcacgtcatccagcagag

SEQ ID NO: 154514 - DNA, 100 bp, Homo sapiens
cccatccggaccccgccgcccgagcgcgcggccccggaagcacccggggaacgcccttttgcttgtgactggcagggctgcgacaagaagttcgcccgct

SEQ ID NO: 154515 - DNA, 100 bp, Homo sapiens
cagctgccttgtctggagaagcaggaaaaccagtagattcccagacatcgcgaagtgaatctgaaattgtgccaaaagttgctaaaatgactgtatctgg

SEQ ID NO: 154516 - DNA, 83 bp, Homo sapiens
ccggaggcggcggcggcgagcggttccttgtgggctagggatcgcttacacctgagacgaactacagaacagcacgtaccaga

SEQ ID NO: 154517 - DNA, 75 bp, Homo sapiens
catgctgccgtgttccgtgtgggaagcgtgttgcaagaagggtgtgggccgaagatatgctcatgtggtgttgag

SEQ ID NO: 154518 - DNA, 90 bp, Homo sapiens
ccctggcttccgtgcccgctggcattgctaaacacgtggaaagaatcaatttgggacaagcagatgcccagtgtcgggaaggcagcccag

SEQ ID NO: 154519 - DNA, 101 bp, Homo sapiens
ctgtgagatgtttcatcccaacagagatatgtcagtattgaattctcccagacatcagagctgtataatgcatgttgatatggattgcttctttgtatcag

SEQ ID NO: 154520 - DNA, 97 bp, Homo sapiens
cactccagaagtagcatggaaatggagggcatcttcaaccacaaagtgggcatccccaccatcagatggtgcggggcagagggggactacaacgtca

SEQ ID NO: 154521 - DNA, 74 bp, Homo sapiens
gctgagcactgtccccaagtgctttcttggcaacaattaccagctctggctgggtcgccacaacttgtttgacg

SEQ ID NO: 154522 - DNA, 100 bp, Homo sapiens
ctcatcctgtctcataaaagatagagtgactattaccaattgccttctcatgaactcagtcactgtggaggaagggtcctgggatttgaacaaaatctgc

SEQ ID NO: 154523 - DNA, 74 bp, Homo sapiens
tgctcgaaaacccatagcttgaaaggcctggccaggggaggagcacaggtttcctatcctgggagcaggagagt

SEQ ID NO: 154524 - DNA, 88 bp, Homo sapiens
tttcttttccatgatatcattatatggacagtttagggcacagcagctcttatcagcatgtttagaaaaggtagatatttctagtaca

SEQ ID NO: 154525 - DNA, 75 bp, Homo sapiens
gcaataaaacgcttccatctttatccagaggttaatttggagtggcccctggagtcagtttcctacaccatccga

SEQ ID NO: 154526 - DNA, 100 bp, Homo sapiens
gccgcggagtcggcggtgttgtaggtagcggtaccttgagtggcaacagtctgcgctcctcagaccaccggcaggtgaacagcctgatgcagaccgagga

SEQ ID NO: 154527 - DNA, 75 bp, Homo sapiens
gtgcgtcatcctaaggaacatcgacgtgtccctggccagtgtccttccacctgtccacaagcatggggaacatct

SEQ ID NO: 154528 - DNA, 100 bp, Homo sapiens
caaggaatttttaagtaaaaattttcagaagcacatgtattataacagggtcctggcggcagagaccacgtcccagcaggagcggctgcaggccatcgca

SEQ ID NO: 154529 - DNA, 96 bp, Homo sapiens
tgccagagcaaacaagaacagaaatacaaatggagaactggtcaaaagacatatctgaagagatggattaagaatgctttggattaaggattgtgg

SEQ ID NO: 154530 - DNA, 82 bp, Homo sapiens
aagaaaactaatactgaagaaaaaaatactcttccctcaaaggaaaaaaccttccttccttccagatgtgtgtcagtagaat

SEQ ID NO: 154531 - DNA, 83 bp, Homo sapiens
ccctgctaacccagactcacataagaggaaaggatcgccatgtgacacactggcatcaagatggcagtcttgggcacgtccat

SEQ ID NO: 154532 - DNA, 95 bp, Homo sapiens
ctcttcagcatctacgggaggcaaacttgtaaaacctggaacagcagcatcattgtcaaagtaccacagcagcctggcttcactgaatgggctgg

SEQ ID NO: 154533 - DNA, 72 bp, Homo sapiens
acgggaaggctgcggaccgagatcccaccagccctggtcagattgtcaagcatggagatatcaagtgtgtac

SEQ ID NO: 154534 - DNA, 73 bp, Homo sapiens
cggtgctggccccgggcaacgatcggaactcggacacgctcaggagcatctatcggctgcacgccaacatcaa

SEQ ID NO: 154535 - DNA, 100 bp, Homo sapiens
accctgatatcagtggattatgaaatttttgggaaggtgcaaggggtgtttttccgtaagcatactcagattggtccagaaaagggcgtggtgcacctgg

SEQ ID NO: 154536 - DNA, 83 bp, Homo sapiens
gccagccctcgctggaccagaccatggccgcggccttcggacacctgctccacttcaccttttgccatgagtaaaagctccct

SEQ ID NO: 154537 - DNA, 49 bp, Homo sapiens
gagccgcgcacgctacagtacaagctcaggcgctcaggactgccaggac

SEQ ID NO: 154538 - DNA, 83 bp, Homo sapiens
cctccggccagggccgggagccgggccggcctagccaggttcgtgctggccgtgggcagcgccgtctttgatgccatgttcaa

SEQ ID NO: 154539 - DNA, 75 bp, Homo sapiens
gccctttccacctcgcggcagttcgactcaaggcacaggagggaagaaagtcattcagactgatgagtggagaaa

SEQ ID NO: 154540 - DNA, 100 bp, Homo sapiens
gaggattatcttagaattttaagatacttcaggaatcagtgtctgtccctgaagggtcattaaatcagctatgttcttcagaagaaccagaacaagaaga

SEQ ID NO: 154541 - DNA, 96 bp, Homo sapiens
gtctgggtctgagaatactaaagtggaacaaactgactgagacttaccgtgttatcccagaaggtgggaaagcagtgccactctccgcttcacaga

SEQ ID NO: 154542 - DNA, 100 bp, Homo sapiens
aacattcctttgaacactcagctttctgaaatggtgtcccaccgcaaggactggagaagggaacttttcacacctgagtgcaaattcaaagaatcagtgt

SEQ ID NO: 154543 - DNA, 101 bp, Homo sapiens
cgctcaagcagtggacagagcggagaaagcgacttcggagtggcggtctggggtggccgggcacctcattctttctgacgaggatgtcacttctgaggtcc

SEQ ID NO: 154544 - DNA, 75 bp, Homo sapiens
taccaagcatcctctgcggctttcaatgttaactcattccagcaaactacaaagtggattgatgatgtcagaaca

SEQ ID NO: 154545 - DNA, 80 bp, Homo sapiens
aagtcctcccaactaggcagagaaatcggtgtcatggagaaactccagctgggcccagagattctgcagcgggaaaatcc

SEQ ID NO: 154546 - DNA, 76 bp, Homo sapiens
tggagaagtggatccgcatcgcccagcaatatggtgaaattgaagattgtcagattgatgattcctcacttcatgc

SEQ ID NO: 154547 - DNA, 116 bp, Homo sapiens
ccggggccctcctgtgacctgcatgtactgggggattcgcagggaggatgtcgggacaccccggaagctgggaaatgtgggtaattccagaattgattggccataccattgtcact

SEQ ID NO: 154548 - DNA, 96 bp, Homo sapiens
cttttgtctgcccctattgtaagtgcagatggaacacaacagattcttgtagacactgtttgggctctgtcatacttgacagatggaggtaatgaa

SEQ ID NO: 154549 - DNA, 100 bp, Homo sapiens
cagaaaaattaaccagcttccagaagcagaaagacccctgacctggagcagctggagccgtctttggaagatgtggaaagcatgaatgattttgatccct

SEQ ID NO: 154550 - DNA, 75 bp, Homo sapiens
ccggggaggactggggaagactgtgaggcagcattttgatacggacacccaggatctcacagggattgagtgggc

SEQ ID NO: 154551 - DNA, 100 bp, Homo sapiens
gttcgggatgagcgatggcatcggtcaaggtggccgtgagggtccggcccatgaatcgcagcggccctccaggcactgaagcgtaagaagaggtatgaga

SEQ ID NO: 154552 - DNA, 75 bp, Homo sapiens
cagctgtcctacttctgtgacaagtgccaaaaatggataccagccagggtttaaagccaatttgtctctcttgag

SEQ ID NO: 154553 - DNA, 75 bp, Homo sapiens
acgagctgatcaagtatatgactgaagaagttgcctttccccatcttcctggttctgctccttcgtggcctagtc

SEQ ID NO: 154554 - DNA, 98 bp, Homo sapiens
ctttgcctcatcccaggttgccttggaaaatgccaacgccgtgtctgaaggatggtgccatgacaatggtgtgaactacaagattggagagaagtggg

SEQ ID NO: 154555 - DNA, 100 bp, Homo sapiens
ggactttcttttggccctaggccccttcctgcccctgtcgtcagcagggggacttgatctcatcttcatgccaggccttgggtttgacaaacatggcaac

SEQ ID NO: 154556 - DNA, 76 bp, Homo sapiens
taaaatagaacttccaactactgatacgatgaatggattaaagcagataaaatagtaagacctgctgataaaaatg

SEQ ID NO: 154557 - DNA, 98 bp, Homo sapiens
gccatcaaccgccagatcaacctggagctctacgcctcctacgtttacctgtccatggcccaggtgttggtgtgccgagccctctctaacatcttgct

SEQ ID NO: 154558 - DNA, 100 bp, Homo sapiens
agggaattcattggcaacttcctagaactgtttggacctgatggagcatggtgccggtggtggtgtgcacattgagccccggtatagacagttcccccag

SEQ ID NO: 154559 - DNA, 75 bp, Homo sapiens
ttttttctactccaaatctttcgtcaaacacagtttcgagggcttctatttcgaccgcgatgatgtggctctgga

SEQ ID NO: 154560 - DNA, 87 bp, Homo sapiens
cagacacatcgaggcccatcgcatcctgctggctgcgtcctgcgattacttcaggcagaggtggaggagacactgaagcgactgcag

SEQ ID NO: 154561 - DNA, 74 bp, Homo sapiens
tggcacccgaattgccaaagttttggaaaagtttaagctatgaagaaggacatccctcacactctgaaacagat

SEQ ID NO: 154562 - DNA, 101 bp, Homo sapiens
ctgtagtggccccgaaggaggactgaggaagcagcagtgttgtactgctacttctataaacggacagccgtaagactaggcgatcctcacttctaccagga

SEQ ID NO: 154563 - DNA, 100 bp, Homo sapiens
cgattggaatggttggtgaaggaagcattcagtcctctcgatataagaaggaatcaaagtcaggccttgtgaaaccagcaaagtcctgtgaagatatcca

SEQ ID NO: 154564 - DNA, 83 bp, Homo sapiens
gtggtgaagcgctacggacccatggaggagcccctgtgtactaatggtcacttgatgtgcgctggctgttttatccacctact

SEQ ID NO: 154565 - DNA, 74 bp, Homo sapiens
ggaacacttcagcacaagaacgctaccttttcttatcctgacacagctctccctgaggagcagccacattccag

SEQ ID NO: 154566 - DNA, 74 bp, Homo sapiens
cgctcggcgatggtaggcgtccctggagcggccgccttccagcgtgaaaggtgtagcagtcactcggcctacac

SEQ ID NO: 154567 - DNA, 75 bp, Homo sapiens
tcccgagtagctggtattacagggttcttgatggtgctagacattccccaggagcgggggctcagctctctggac

SEQ ID NO: 154568 - DNA, 97 bp, Homo sapiens
cttagctgtgctcgcgctactctctctttctggcctggaggctatccagctgtcctcagcctgcgggggctgcgtggaggtggactcggagaccgag

SEQ ID NO: 154569 - DNA, 100 bp, Homo sapiens
cgaagggaagacttccagtagctccaaggaggttaaggcgggtgccacgtctatgtgggcttcgtgctgtgggctgctgaatgaagtcatgggaactgga

SEQ ID NO: 154570 - DNA, 85 bp, Homo sapiens
aaaagtgaaacaattcaggacactaggagcaggatgcaaccgacaggctgtggccggacagctgctgcccagcacatggagcctg

SEQ ID NO: 154571 - DNA, 100 bp, Homo sapiens
actctgagcccccgaactctgcaaagcctccagaggacataccacctccaggatcaggatgcagaggtaaatgaattggtggatgccagagatgtcggcc

SEQ ID NO: 154572 - DNA, 74 bp, Homo sapiens
agcatccaaatcagcccttgagatttgaggccttggagactcaggtttctaccatgaatgaaatgaagagttat

SEQ ID NO: 154573 - DNA, 83 bp, Homo sapiens
cctcaatccaacagcccagtgcttctgtctcgactgcactttgagaaggaagtgggaaaactcttgcctttgccatcccaatg

SEQ ID NO: 154574 - DNA, 74 bp, Homo sapiens
cttggcagtttcggtgcatagaaaatcagctaaaccatttcccaggctcattccagattgggaggaaggaccgg

SEQ ID NO: 154575 - DNA, 98 bp, Homo sapiens
ttcgttatatcccctttagaatatatcaggtgcacgtgaacccaaagtatattgttttggagtctgacttcaccaacaacgtggtgagatgcaacatt

SEQ ID NO: 154576 - DNA, 100 bp, Homo sapiens
ttgccacatgttgagcttggaggaggtggccccagtgctgcagcagacattacttcaggacaacctcttgggcaggacaagttggatggcttgaggactg

SEQ ID NO: 154577 - DNA, 78 bp, Homo sapiens
aatgtgggtgatttagctcgagaaggccaaagcctcactgtttcaattgtggttctgaagaacaccaaatgaaagatt

SEQ ID NO: 154578 - DNA, 75 bp, Homo sapiens
attgtatatgaagactcacctttgaaaaagaaggggagcgttcaattccaaacagctgctttatttggagaaata

SEQ ID NO: 154579 - DNA, 108 bp, Homo sapiens
ggagcgcgatgtggagcgcttctttaagggctacgggaagatcctggaggtggatctgaagaacgggtggggaagaaaacatgacagaaacagatgccttctataaaa

SEQ ID NO: 154580 - DNA, 90 bp, Homo sapiens
ctctttcaatgacaaaaagtttgtcattaaacccatcgacaagaaggcacctacccaacatgagtgaagtttcctgcaagaaacgggacg

SEQ ID NO: 154581 - DNA, 90 bp, Homo sapiens
cttgaatacactgagacccggaatcagttccttgatgagctcatggagattcttggtgccaccattgagaactccaggattgtcctgcag

SEQ ID NO: 154582 - DNA, 50 bp, Homo sapiens
cgccgacccgccgagcaaaatgtgtaaacaggaacatcgataagtagtgt

SEQ ID NO: 154583 - DNA, 109 bp, Homo sapiens
gagtcccccggagtccgactcgctacgcgggtcttgcgagatatctggccgcctctgccgcagctggagataagccaatggacacgtcagtgttatctgaagaaggagg

SEQ ID NO: 154584 - DNA, 100 bp, Homo sapiens
atcatatctcatgaggctgtaggctccttcaacccgtggctgatagctgaaaggtattgttgcagcatctggcagtgagactgaggatgaggacagcatg

SEQ ID NO: 154585 - DNA, 90 bp, Homo sapiens
accgggatcgtgaccgagaccgtgaccgagagcgtgaccgagagcgcgaatatcgtcatcgttagaagatttggggatattccctgccca

SEQ ID NO: 154586 - DNA, 100 bp, Homo sapiens
gataggaacgatggtagaggaccaccggtcaaattcttaccaggtttgttgataagccggggcccttcgtgggaccctgcggtcactggatcaggccctc

SEQ ID NO: 154587 - DNA, 75 bp, Homo sapiens
atgctggggaacggaaaatgagggagttcaactctggggctgggaaccgacgaggactctctcattgagatcatc

SEQ ID NO: 154588 - DNA, 122 bp, Homo sapiens
cccagctcaggacccttgcaccaccatatatgttgctgccacagagcctgtcccagagtctgtccagggccggaagcagctggaaaagactcagaaatcttcacagtgaatgggattctggg

SEQ ID NO: 154589 - DNA, 90 bp, Homo sapiens
ggcgtgacgcagccggatcggcgccagacggaaacctagcggtactgcaacagccacttgcaggtacttggctttatcccgaaaaaagag

SEQ ID NO: 154590 - DNA, 71 bp, Homo sapiens
ggcaactttctgggatccagcgagcgacatgtataacactgcctttaaattcagatgtccccaaggtattt

SEQ ID NO: 154591 - DNA, 49 bp, Homo sapiens
ttaccatcgcccatgagctgggccacaaaagacttgcactatctgccag

SEQ ID NO: 154592 - DNA, 121 bp, Homo sapiens
atggaagctgtggacttgaggatttacacttaaggaaggatggggaaaatgtggatggagtccactttctcatccaggctggagtgcagcagcgcaatctctgtgtgatcattgcaacctt

SEQ ID NO: 154593 - DNA, 100 bp, Homo sapiens
tttgatatcaccaaactggaggatgcctatgtattccctggggatggcgcatcacacaccaaagtggacagaggactgcagaaaatcaacctatcctcct

SEQ ID NO: 154594 - DNA, 100 bp, Homo sapiens
ggagtacaaaaacggcccttggatgatggaggtgcagctattgctggagtttaccgagcagcagggaaggaaatgataccatttgaagccctcacactgg

SEQ ID NO: 154595 - DNA, 98 bp, Homo sapiens
ggatggcgtcccccgggggcccgtactgcacatcgtggtggtcggatttcaccacaagaagggctgccagctgttcgggggtcttgtctggattttgg

SEQ ID NO: 154596 - DNA, 83 bp, Homo sapiens
cagagaagtcaaaggaaatgctgcttggggatgagcatgtgcatgaatacctcagaagtaaactctgttcactgtatgaaaat

SEQ ID NO: 154597 - DNA, 75 bp, Homo sapiens
gctgagcctggaacaggtcaagaagcttaaggagagatggggctccaacgtttggaccccaatgaccagaagtct

SEQ ID NO: 154598 - DNA, 100 bp, Homo sapiens
gtctgcgtgagaatagagaccaccgaggtctcctccgggctggggctgagcaagccctcggagtgaccgtgggtgacagcggctccagggactcttgggg

SEQ ID NO: 154599 - DNA, 85 bp, Homo sapiens
ctatggactttccgaagacgaggtgtaatggataggtaacagagaagacctcgtcccttcctagtcagggcatcagcatgactga

SEQ ID NO: 154600 - DNA, 75 bp, Homo sapiens
agctacatattctgccttttcaacactacacaggtacaacagaatagctcgggaatggactcagaagtatgcgat

SEQ ID NO: 154601 - DNA, 50 bp, Homo sapiens
cgcgcctttgtgcgcgcgccgagctcctgaagtcctcgcccagaaacctt

SEQ ID NO: 154602 - DNA, 100 bp, Homo sapiens
cgagaagctgccgtttctgggactggctctgagctcccgcaaaaacttgtgtattcaccctgaggatcttctccaacacagtgaatatattacccatgaa

SEQ ID NO: 154603 - DNA, 76 bp, Homo sapiens
catggagttgagctgcagcgaagcacctctttacgagtggaaacaaaatgtcagtcagtgtgcatgagaaccgcaa

SEQ ID NO: 154604 - DNA, 100 bp, Homo sapiens
agcggcggcggcggcgccgggcccgggggtggtgacagcaggtctgaggtaatattaacggctgctatttgaactattacttttttcttctggctgctat

SEQ ID NO: 154605 - DNA, 75 bp, Homo sapiens
gtgcagtatacagaaacagagccgtatcataattaccgaatggagtttcgctcttgttgtccaggctggagtgca

SEQ ID NO: 154606 - DNA, 101 bp, Homo sapiens
tatgctacattccaattcaagaggaggagaggggttgttttataaactgcctggccgaatcagccttttcacgctcaagatggagtctcgctctgttgccc

SEQ ID NO: 154607 - DNA, 97 bp, Homo sapiens
tgctggacgactccaaaaaccgtgtgtggaccagttgacaaagatccaaactgaattacaagagacagtgaaagatttagctaaaggcaaaaagaaa

SEQ ID NO: 154608 - DNA, 97 bp, Homo sapiens
tgcagcagggcgagcgcgcgctgtggtgcagccgccgcgacggcggcctccagctccgacccggagcaccatactggaccaacacagaaaagatgga

SEQ ID NO: 154609 - DNA, 73 bp, Homo sapiens
caggtcctcaactttgaagagatcgactacaaggagatcgaggtggaagagttatcttcaggcagagtgagaa

SEQ ID NO: 154610 - DNA, 95 bp, Homo sapiens
cttagattgcaacagtgattcacaggtgtttccctctttgaatgaatttcttcacatggctcctggagaagtgaccatcacagttcgcctcatcc

SEQ ID NO: 154611 - DNA, 100 bp, Homo sapiens
aaggattactcgcccccacctgtggactctgaccgcaaacaaggagagcctactgagcagcctgagtggtttgtcctgaagaattatggagagaacccag

SEQ ID NO: 154612 - DNA, 97 bp, Homo sapiens
gaacttggagttaatggtctaatttatgataggtacatgtcccagagcaagcacacggaggcccgggagctcatgtactcgggagccctgctcttct

SEQ ID NO: 154613 - DNA, 100 bp, Homo sapiens
tttactacaaagatggacttctctgtacagcaggtagagcagagccggagccaggtgcaggccattggagagaaggtctccttggcccaggccaagattg

SEQ ID NO: 154614 - DNA, 104 bp, Homo sapiens
ggaatacgagggctttgggcaggctgggtacccaatatacaaagagcagcactggtgaatatgggagatcaacttcctggtacaatggccaccctttctctggt

SEQ ID NO: 154615 - DNA, 100 bp, Homo sapiens
tacggcaagcctgtccatcatggtgttaaccagctaaagtttgctcgaagccttcagtccgttgcagagaaaaagcttgtggtgaaggggggcaaaaaaa

SEQ ID NO: 154616 - DNA, 96 bp, Homo sapiens
acccagtcccacttcaaacattcgtctcggaaaccccgcctcttacagtcacgaggctattgcattacctcctatagccaaatggccataccagaa

SEQ ID NO: 154617 - DNA, 97 bp, Homo sapiens
cttggccagaagtctgggcctccagatgcccgtggtggtgcagagcatgtacatctttaaggatgaaactgattccaagacagcctccccgtggaag

SEQ ID NO: 154618 - DNA, 74 bp, Homo sapiens
cggagagcggctgatcgcagtccggagctggcccgagataacttcttccgctgtggtgtgctgtatgaggactc

SEQ ID NO: 154619 - DNA, 100 bp, Homo sapiens
gagtgataacaaagacgacatattaaaggggctgatccatatgaattcctcttattaagaaaaataaagcatccaggattcaatgaagaactgactatca

SEQ ID NO: 154620 - DNA, 75 bp, Homo sapiens
agagagtatcgaaaccgtttccttcatatgcatgagctgcaggaatgagtatggaagagttggagaagaatcatg

SEQ ID NO: 154621 - DNA, 100 bp, Homo sapiens
ggccggtcaggctcgccgccgagctgatctggtggctggacccagagctgacctatggctgcgccaagcccttcgtcttcacccagggccactccgtgtg

SEQ ID NO: 154622 - DNA, 89 bp, Homo sapiens
gagcagattctgaaacttcttgacaatttgcttgcgcttataagctcttcacagaggtcctccaggatcaaggggaccactgattccac

SEQ ID NO: 154623 - DNA, 83 bp, Homo sapiens
aggagctggcggacatcactttagaccctccacctaattgcagtgtttgaagatactgtggaggagcgtgtcatcaatgaaga

SEQ ID NO: 154624 - DNA, 100 bp, Homo sapiens
ggatcttataaaacaaatgctgctgctatgaatatgggtcgaccattccaaaaaaatcggaattacatgaacgacagccttcgcaccgacgtcttcgtgc

SEQ ID NO: 154625 - DNA, 89 bp, Homo sapiens
ggaatgtgaagagacaggaggcagcagacggacatccagttgaaacattgtagtcggtatatacatgacttatttccttcactcatcaa

SEQ ID NO: 154626 - DNA, 75 bp, Homo sapiens
agaagattgatcatcatatgggttggacaaaagtggctctcaatccagcacatgcacattgaagcaagttaaagg

SEQ ID NO: 154627 - DNA, 95 bp, Homo sapiens
cattgggcacacattatggcaaggtttatttacttgatgtccaggggaacatcactcagaagtttgatgtagcactactgcagtcttcagttaag

SEQ ID NO: 154628 - DNA, 98 bp, Homo sapiens
cgctgaaaaaactcaacaagaataaaaaactggtcaagaagctggatccttcttagaaattcctaaggctcaatgctgtgtggaagattctgagaaag

SEQ ID NO: 154629 - DNA, 100 bp, Homo sapiens
gtattggacaatttgtagctaagactcccggataccctgaagtcgggaaatgctctgaccacaaagccgagctctctgtcctggctgccctctccctcct

SEQ ID NO: 154630 - DNA, 50 bp, Homo sapiens
aaataccgcattcttatcacaaagggttatgtggtccgaatcagtggtgg

SEQ ID NO: 154631 - DNA, 50 bp, Homo sapiens
ttggagccaggagcctgccatgagacttccattagtttgatgaatctgac

SEQ ID NO: 154632 - DNA, 98 bp, Homo sapiens
gaaaactcgtgtccatcaaaatccagatgctggatgacacccaggaggcatttgaagttccagtcataagcgaattcactccttttcgctttgaaaac

SEQ ID NO: 154633 - DNA, 90 bp, Homo sapiens
gcagcggcaaaacaactttcccatgtttccctctcctaaagcctggaatttcagagggaactgataaatttcaaacggaagagagtggca

SEQ ID NO: 154634 - DNA, 76 bp, Homo sapiens
tgctgctgaccctggccttcaaccccgagccgctggtgctacaggatgttccagatgaccttgatggtgcccccat

SEQ ID NO: 154635 - DNA, 90 bp, Homo sapiens
ctccgctgcgtgtaggtgaagggggcttcctgaccgagcctatacggttcagacatccgagagcatgaccccaactgccacttcagagac

SEQ ID NO: 154636 - DNA, 83 bp, Homo sapiens
agatcatcaaggacttggcctccatggtgtcagagcaaggagaagctgttggcaggtacttcccggagcgagcggggaacgcg

SEQ ID NO: 154637 - DNA, 147 bp, Homo sapiens
cggctctgaggagcccggagggaaccggcgacgaggggaccatgtaccgggacccggaggcggccagcccaggtcctgaggcaagaatttgcctttgcctgtaatcaagggcgagccgggcagccaaggttccgaaacgcaccgtga

SEQ ID NO: 154638 - DNA, 83 bp, Homo sapiens
ccgccagcatgccccagtccaaagaagtccattggaatattaagcccaggagttgctttggggatggctggaagtgcaatgtc

SEQ ID NO: 154639 - DNA, 100 bp, Homo sapiens
gacctcctagccagttacattccagaggatgaggcgctgatgcttcgggatggacggccttcgatgtggtggagaggagcttcctggagtccattgacga

SEQ ID NO: 154640 - DNA, 100 bp, Homo sapiens
gcccatcgactccagcgtgctctctcggaataagacagagacagctttattaaaccgcctggagcgaattttcgaagcatgttttccttccatacttgtc

SEQ ID NO: 154641 - DNA, 99 bp, Homo sapiens
ggacccatgtcactgaccccctcatagatgatgaaactgaggcacaaactgcttaatgaacttgtccatggtaaagaagaaaggaccctggataagaga

SEQ ID NO: 154642 - DNA, 83 bp, Homo sapiens
atcttccatgtcaacacggatgatcacaggatcacaagatttctgttgtgaaggatgtggctctgccatgaaggatgtcctgt

SEQ ID NO: 154643 - DNA, 100 bp, Homo sapiens
agcccccatcccctgaccgtggacacccagcctgagcaagcgccacagaagcctcgtctcctggaggaaaatggtccgaggaggcaaacaaagccttctc

SEQ ID NO: 154644 - DNA, 75 bp, Homo sapiens
atatgaccctatggaagcagaagaagctgaggatgaagaagatgatggagtcttgcttagtcgcccaagctggag

SEQ ID NO: 154645 - DNA, 90 bp, Homo sapiens
tcgacaccgaaaactccaccgtagcccttgccaaaggcccagcccccaagccaccctcccagcttcaacggggaagggctggagggccct

SEQ ID NO: 154646 - DNA, 83 bp, Homo sapiens
ctacctggagatatgtctactggtcccatagcagaaagctggtgttacacacaggaatgcacagcctcattgctacaggccat

SEQ ID NO: 154647 - DNA, 96 bp, Homo sapiens
tttcacaaagccaggccggcggggcaggtccggccgcgggggacacggatgcccaggaccccaggctaatcggccctggtcagttttttccacgca

SEQ ID NO: 154648 - DNA, 87 bp, Homo sapiens
caagttctgcagccagtgcggagagaggctgcctcctgcagcccccatagcagataccaactagttgtgcaaaccacgactgaagaa

SEQ ID NO: 154649 - DNA, 83 bp, Homo sapiens
tgcccgctttgttcagctgcagcatggagagatagataaacgggaggcaagtgaggcctatctggttggcctttttgaagaca

SEQ ID NO: 154650 - DNA, 83 bp, Homo sapiens
aaccaaggctacacgccgctgcactgggcttgttacaatgacctgcctagagctggaacgttacctccagagcgagccctgct

SEQ ID NO: 154651 - DNA, 83 bp, Homo sapiens
cccatcatcgccagctgcacactcttggggctctacctctttttcaaagggcggagaaactcatcatccacctgcggaaacat

SEQ ID NO: 154652 - DNA, 83 bp, Homo sapiens
ggtattatggtgtaaacaacgattctttggaggatatggaccctccacatcccttccccaaggagatcccacacaacgagaag

SEQ ID NO: 154653 - DNA, 80 bp, Homo sapiens
ggagaagaagcagcactctcagcatgcaaagcagtcctccaaaccagtggtagtctcagaaattacagaagacatccccg

SEQ ID NO: 154654 - DNA, 100 bp, Homo sapiens
cccagacccccggcagaaggccctgtaccgccggcttgccacagtccacatgtcccggagagattgcatcctacctgatcacctttgagaagcatgatga

SEQ ID NO: 154655 - DNA, 82 bp, Homo sapiens
ccgggatttgggtcgcagttcttgtttgtggatcgctgtgatcgtcacttgaattaaacaaccaccatgtcgagcaaaaagg

SEQ ID NO: 154656 - DNA, 100 bp, Homo sapiens
gccaaggaaaaactggagagcttcatcaaaaatagtgatagctttgataaatgcgacctaaagtcatgtggcacctccttcgaaggtacatggcatcccg

SEQ ID NO: 154657 - DNA, 98 bp, Homo sapiens
cactttccctgtggctatgttctgggtttccaatcaggccgagtggtttgaggacgatgtcatacagcgcaaggactctaatccctttgcttcccttg

SEQ ID NO: 154658 - DNA, 50 bp, Homo sapiens
cggaaccgccacagcactcaagctgaccccgcactacatctacccaccag

SEQ ID NO: 154659 - DNA, 100 bp, Homo sapiens
gcctctgaagagccaatccattcaggatgggaaaccacgcaggcaaacgagaattaaatgccgagaaggccagtacgcttatgttcctgaggaagaattg

SEQ ID NO: 154660 - DNA, 100 bp, Homo sapiens
ccaggagatggttcgggcctagcggagccgggactggaggcatttgggcagtccttctccatccaccggaaggttgctgaagatggagagactcgggagg

SEQ ID NO: 154661 - DNA, 74 bp, Homo sapiens
gaagccggtctgaacttgtgataacctgggatatcctcctggccaacttcttggcccagacagaggccctgatg

SEQ ID NO: 154662 - DNA, 74 bp, Homo sapiens
tgaccgggtttctttgatgcgacctcaggaaggagatgaggtctctgtgccttgcggagaatcctgaaaaaaca

SEQ ID NO: 154663 - DNA, 50 bp, Homo sapiens
cctgggcgggcgccgcgagccggataaggatgacattcggctgctgccgt

SEQ ID NO: 154664 - DNA, 75 bp, Homo sapiens
attggatcaaacatgtcacaagagtcggacaagtctgctgagaacagacccagtccctgaggaaggagaagatgt

SEQ ID NO: 154665 - DNA, 73 bp, Homo sapiens
gagcagaacttcttccagcgggccgccaagcctctgcaagcactggatgtgtgtgagaagtggggagaaatgc

SEQ ID NO: 154666 - DNA, 80 bp, Homo sapiens
tttttttcgggtagtggaaaaccaggtttttagaacttcagccataaaaatgggcagaattttccttgatcatatcggtg

SEQ ID NO: 154667 - DNA, 50 bp, Homo sapiens
ctgcagctctcggtggagacgctggatggccgacggtcgcaaggtcctac

SEQ ID NO: 154668 - DNA, 100 bp, Homo sapiens
gaccccagctctcacgattaataggctctgtggttctggttttcagtccattgtgaatggatgtcagcaatacgtttggtttaatattggcagtgtggac

SEQ ID NO: 154669 - DNA, 50 bp, Homo sapiens
cgctgatctacctgctccaaccagccaacactggacaaattgatgacccc

SEQ ID NO: 154670 - DNA, 98 bp, Homo sapiens
ccaactatcaaggcctcccagtacgttgtgtgaagagtatcattcgacaggtgacaggagcctgttgcctctttctggctgggaaagtagaagaaaca

SEQ ID NO: 154671 - DNA, 51 bp, Homo sapiens
ggaactgtacacctattggaacccttaaggggggccttctcggaggtgatc

SEQ ID NO: 154672 - DNA, 85 bp, Homo sapiens
ctcagagagatgatatcatctaacattcaagcaatgatcatcaaagtagcagctttggacaattccaagctcgagtgtctcggca

SEQ ID NO: 154673 - DNA, 100 bp, Homo sapiens
gttttgctgaccttattcaccatgacttatcagtctgttctctggggaggcagtaaggggccgtggagctggcctcggcctcggcatcgggagaggctgg

SEQ ID NO: 154674 - DNA, 83 bp, Homo sapiens
ctgggtgactcagagagggaagagattcagccagcacactcctcgcgagcaaggagtgcctgtgaagaaaacggggtattgcc

SEQ ID NO: 154675 - DNA, 75 bp, Homo sapiens
gaaagccgctggggttacagtgggacgagtgatcgaatcagggaaatcctcattgacgattcaatttgttgaagg

SEQ ID NO: 154676 - DNA, 75 bp, Homo sapiens
ttccctccaaactagatgccgagaaacttgttggtagaggtaaaaagcagcttcctgattcaaatgagattgtgg

SEQ ID NO: 154677 - DNA, 97 bp, Homo sapiens
agtagaggaggaggtgaacaaggaggagttcaggcttcagagagcccctgacgcctgcaggaacatggcagaggagacaccgtctgtcttcacaaag

SEQ ID NO: 154678 - DNA, 82 bp, Homo sapiens
cgacatgatggcgagcatgcgagtggtgaagcaaaatgatgcttcaacacccaggccaggtctctgcctcggaagtgagtgc

SEQ ID NO: 154679 - DNA, 90 bp, Homo sapiens
ctggccacattttgcaccccgagtacctgcagcccctgccttccacgccggtcagccccatcgagtggatgattcaacagccacacaaag

SEQ ID NO: 154680 - DNA, 100 bp, Homo sapiens
tgtcttcctgtctcaacgatacctattttctagtgctgagatcctgagacaatggaataatgtatttgtggccttggacatgaggcagtcagtcctctgt

SEQ ID NO: 154681 - DNA, 51 bp, Homo sapiens
gaaagtgcgattgtggaagctgctcgggttgttctggaattgatagagctc

SEQ ID NO: 154682 - DNA, 75 bp, Homo sapiens
gaagcaaattcgtcagatcaaagaacaaggttgcacagagcattgaggatcaccatcaggaagtgattggtttct

SEQ ID NO: 154683 - DNA, 100 bp, Homo sapiens
ttcgagcagctcatgaccgacctcaccctgtcgcgggacaaccctccatatgataagggagccttcagaatcgaaatcaactttccagcagagtacccat

SEQ ID NO: 154684 - DNA, 100 bp, Homo sapiens
gagctagcagtgagcaccttttggcccaatgaatatcagccttctttgaatcctggggggagccagtcatctgatgtggtgcttttgaaccactggaaag

SEQ ID NO: 154685 - DNA, 102 bp, Homo sapiens
cttgaggaagcaaagagaggattgcttttgcttaaggaagctgcttacctgttgattcggtggtaattacagaatctgatgcacagagaacaatgtaccctg

SEQ ID NO: 154686 - DNA, 75 bp, Homo sapiens
ggcgggagaggcgccggggccgcacagacggcgcctcatctcccagagatcttccttggagaccctggaagatat

SEQ ID NO: 154687 - DNA, 77 bp, Homo sapiens
tggaaacctatggttatctgcagagggagtcatgctttcaaggacctcatgttctaaatggcttctaagaagttggg

SEQ ID NO: 154688 - DNA, 60 bp, Homo sapiens
aacaaggatgtcacatctctagattggaatccacagtacacgaacctggggctcctgaac

SEQ ID NO: 154689 - DNA, 50 bp, Homo sapiens
gtggaacggctgcttttggaagcggagcgtgctttggacaccatgaattt

SEQ ID NO: 154690 - DNA, 90 bp, Homo sapiens
aggcatgccccgctacgagctggctttaatcctgaaagccatgcagcgggtctcctctgagcctccggcctccataagacccaaaacaga

SEQ ID NO: 154691 - DNA, 98 bp, Homo sapiens
accccaagaagaccattcagatgggatctttccggatcaatccagatggcagccagtcagtggtggaggattatgttgacaaagagaaggcaattgcc

SEQ ID NO: 154692 - DNA, 51 bp, Homo sapiens
aacaagtatatatcccaacctaggttggattagtagaatctaaaatccgtg

SEQ ID NO: 154693 - DNA, 85 bp, Homo sapiens
ggataaaagcactttcagcttctggtcaggactctattcagagactgaaggcactttctcaaaagtctatggtcctgtgttcacc

SEQ ID NO: 154694 - DNA, 50 bp, Homo sapiens
gtggatggagcttgtcaagattgactgactgaacatgtgcaagataaaag

SEQ ID NO: 154695 - DNA, 98 bp, Homo sapiens
gaaataaaaacagaacaggaggtggtagagggcatggatatctctactcgctccaaaggttggctggctcctctggctgatggcatgttgaggtacat

SEQ ID NO: 154696 - DNA, 75 bp, Homo sapiens
aacaatttctcctgctctgcagcttctgttcagggcagcccaatggatccaatggtgatgaagagacctcagttg

SEQ ID NO: 154697 - DNA, 101 bp, Homo sapiens
ccgaggcacggacaacatcaccgtgaggcagggggacacagccatcctcagtcattcccaacatagcaccgcaactcgtcagccttcaatgactctccaac

SEQ ID NO: 154698 - DNA, 127 bp, Homo sapiens
gggggggtggcgcggcggcggtggcatctgcggccatggcggcgactactgccaaccccggtgacagagttagtccttgataattgcctgtgtgtcaatggggaaattgaaggcctgaatgatactt

SEQ ID NO: 154699 - DNA, 101 bp, Homo sapiens
cgcagaatctgtttcacacaacaactgctatttgaaggtcaaaatgcagatcttcgtgaaaacccttaccggcaagaccatcacccttgaggtggagccca

SEQ ID NO: 154700 - DNA, 75 bp, Homo sapiens
gctcttggctctcaacttattcccttcaattcaagtaacaggtctccatcatcaccagttccagtagtgaaaaac

SEQ ID NO: 154701 - DNA, 75 bp, Homo sapiens
atgagctcctgtttagccactgcagggtgagaatccttttgaaattcaagaccattctcaggatcagcaaataga

SEQ ID NO: 154702 - DNA, 75 bp, Homo sapiens
gaacatgcagagtctgcacaacttttcctccgcaaccatgtctgacaaacccgatatggctgagatcgagaaatt

SEQ ID NO: 154703 - DNA, 96 bp, Homo sapiens
aaagaagttgcaaaacactggtccctgcactaggtcagacaatcccctttggggtacaggaaacaaagcaggaggagtttgaggtccctacactgc

SEQ ID NO: 154704 - DNA, 100 bp, Homo sapiens
cccaaattccttcaatgataaattttgtgatcagatgatggagctcgaggccatgagcagatataccagcccagtgaacccagctgtcttcccccatctg

SEQ ID NO: 154705 - DNA, 75 bp, Homo sapiens
cagattcgcagtggtcgcttcttctccttgattatactgacctggccatgagcacggtgaagcagacccaagcca

SEQ ID NO: 154706 - DNA, 90 bp, Homo sapiens
gttttttcctgtatgaagcggttggcaccactgaagtgaccgaatgagggtgcaaaaatgcagagtaataaaacttttaacttggagaag

SEQ ID NO: 154707 - DNA, 110 bp, Homo sapiens
tccgccacctcgagctgcggtagcagcgactcatgagagcgcggccggaggacagaatgatatggaacctagcaaagctgttccactgaatgcatctaagcaagatggac

SEQ ID NO: 154708 - DNA, 80 bp, Homo sapiens
gtgatgctgtccttgatgcccaccttcagcaggatcctgatgccaaagtagcttgtggagccgtgccgctcttggccacc

SEQ ID NO: 154709 - DNA, 101 bp, Homo sapiens
gcgtctaggggagcgaaggctgaggtggcagcggcaggagagtccggccgcgacaggacgatcatcaatgctgtggtactgttgattttattgagtgccct

SEQ ID NO: 154710 - DNA, 100 bp, Homo sapiens
tccgcccctttctggcaaagatgagggggattcttaaggttagacggtagagagatccacgccacaattcctgagaccggcttaatgcatcggatccaag

SEQ ID NO: 154711 - DNA, 50 bp, Homo sapiens
tatagaggtacctcttaccagaaagacagaaaaggggagtgcacttcatg

SEQ ID NO: 154712 - DNA, 75 bp, Homo sapiens
ccaggacagcacctagtcgtggccggaggagtctcagagctgtcagaaaggatctgccagagcatcttttggaga

SEQ ID NO: 154713 - DNA, 74 bp, Homo sapiens
caccaaactgaagatgccttctcagtcagttgagataaccatgatgactacacagacttctactatgacatttg

SEQ ID NO: 154714 - DNA, 100 bp, Homo sapiens
gtgacctgcaggtactgggagatccatagggaggacggcggaacatctggaggctgggaaatgcatgttacaccagacagctatattccatgccttgcag

SEQ ID NO: 154715 - DNA, 82 bp, Homo sapiens
tgctttttatttttccccaattcagcagagaatattttcaagggggattcttcgctgctgctgccttaccgccgagaaccac

SEQ ID NO: 154716 - DNA, 100 bp, Homo sapiens
tggtggggaagccttctcctgagtttttcaagtctgccctgcaagcgataggagtggaagcccaccagaccggaacatgaacattttgcagtactgcccc

SEQ ID NO: 154717 - DNA, 98 bp, Homo sapiens
ttattagagaaagagaaaggatttctaagcaggaactccccaggaaactaaatatattttgccaactttggaaaaagaattattcttggcagagcaca

SEQ ID NO: 154718 - DNA, 74 bp, Homo sapiens
gattttgaagatgcagatacccaggatcaggcagctagagacatgaagaggcttgaagaaaaggacaaggaaag

SEQ ID NO: 154719 - DNA, 88 bp, Homo sapiens
accggatcaggagcttggctcagatgaacgtgcctttgcctttgatggcttcaagtcgtgtctgttcaaaccggcacggtctgatccg

SEQ ID NO: 154720 - DNA, 74 bp, Homo sapiens
caggggtggagcagctcatgtacatcaaggaggacttgatcatccctcacaggcatttcatccttcatgaagcc

SEQ ID NO: 154721 - DNA, 100 bp, Homo sapiens
gacggtggctccagcatgtatcagccgaggtggagctgcggggccctggcatgaaaggtgtggacactgccagcggctgcagccgacttggaatgacctg

SEQ ID NO: 154722 - DNA, 100 bp, Homo sapiens
tttgaactagatcgagctgatagagaccctagtaacatggatgaatttcatcctttcatcgaagcacttctgccccacgtccgagcctttgcctacacat

SEQ ID NO: 154723 - DNA, 75 bp, Homo sapiens
agataggactcttggtttggacatactacatggatcaggaccctgtggcctgtgaggatgttgctgtgaacttca

SEQ ID NO: 154724 - DNA, 51 bp, Homo sapiens
ctcagcctcctgaggagctgggattacaggagctctttgttcaatgcctag

SEQ ID NO: 154725 - DNA, 96 bp, Homo sapiens
gcaacaaggagggaaaaaagagcaggtggaaaaggaaaggagaagtgccagaaagcccggaagcaaggaaggaaagtgaccaagcatgtggcaaaa

SEQ ID NO: 154726 - DNA, 75 bp, Homo sapiens
atctgggacacagcggggcaggagcgcttccgcaccatcacctccaccttccgccctgcgctgccagtctcctac

SEQ ID NO: 154727 - DNA, 90 bp, Homo sapiens
tgtgcagaaagctttgtacaaggatgtgatgttggagaactataggaacctggtcttcctagctccagggttccttgaaaagaaaacagg

SEQ ID NO: 154728 - DNA, 90 bp, Homo sapiens
ctaaaccagaagaggaggttgcccagaagaaaaagagtttcagattgccaaaagacaaaacgggtaccacaaggattggtgacctcgcac

SEQ ID NO: 154729 - DNA, 100 bp, Homo sapiens
gtctctggagacatcttcagcagcctggagaacagctccctccagagatgactgtggcaagatcttcggtcaaagagacctccagagaaggcacctcttc

SEQ ID NO: 154730 - DNA, 90 bp, Homo sapiens
gttggcccagaggatctcttctaacatccagaagatcacacagtgtttactatactggcaattgctggagaagattttgcaattgttgct

SEQ ID NO: 154731 - DNA, 103 bp, Homo sapiens
gtttgaaatgagcaggcactccttggagcaaaagcccactgacgctccaccgaaagagtccaccctgcacctggtgttgcgcctgcgaggtggcattattgag

SEQ ID NO: 154732 - DNA, 116 bp, Homo sapiens
ccttgactccttggtggttccctggccgcggcgaccggtggtcccacgtccagccgggctcagtgagctgggaggctgtggcgtgctgggtgtcggcatctggctggccgccacac

SEQ ID NO: 154733 - DNA, 75 bp, Homo sapiens
atcgccagctgcacactcttggggctctacctctttttcaaagtgaaaggaaagcaagccaggatggatatttac

SEQ ID NO: 154734 - DNA, 97 bp, Homo sapiens
ctaacactgtgggacttggtttgcctatgtcaagatcacaggtggcttctggcacagcagcttaattgaccggaacctcattgattattttgttccc

SEQ ID NO: 154735 - DNA, 90 bp, Homo sapiens
gagtataacaatcagtgccgagcaattgtgatgagatattctgctgagtggaaggtattgcaggcaatgggatatccaacaggctttgat

SEQ ID NO: 154736 - DNA, 100 bp, Homo sapiens
cccagcctcaggcgtgcgcggacggtgtgcgggcgccaagcccatctttgtgtgcttgcatccaactgtgatgagcctatgtatgtcaagttggtggagg

SEQ ID NO: 154737 - DNA, 78 bp, Homo sapiens
cagccacagcacacaggaccaggctgcgagaacagacaggtgatttggcttctgcacagttaggaggagcaccaaacc

SEQ ID NO: 154738 - DNA, 100 bp, Homo sapiens
gggaaccactgagaaggaacatgaagtcttaggaaaagtcctcagtgctgtgggcagtgcccagctactgatgtcccagaaattccagcagttccggggc

SEQ ID NO: 154739 - DNA, 100 bp, Homo sapiens
gaaaaaagcagaggccagggcgccggcttcggcatggaagccacgctgctgttggtggtcggctactcgcactccaagggcgtggccatctccttcctgg

SEQ ID NO: 154740 - DNA, 101 bp, Homo sapiens
ttgggctacgcgtatgtgaacttccagcagccggcggacggattcccctattccaaatctgaccctctcccaggacatggaaagaatggcttggaccagcg

SEQ ID NO: 154741 - DNA, 100 bp, Homo sapiens
tttttacttcgaggagaagagtctcacgagttgtcctggaagtaagtttaaaggagctggagaatgctggaggagaccttaaggatggccaccaccacta

SEQ ID NO: 154742 - DNA, 90 bp, Homo sapiens
gatcgcctgagcccaggaggtcaaggctacagtgagccgtgactgcaccactgcactccaccctggggggcaatggcggcttcctgtgtt

SEQ ID NO: 154743 - DNA, 75 bp, Homo sapiens
aaatggggatctggtggtcgtgaaactgcttcccgaggagcattggaaggagctggctaaatatgaatacatgga

SEQ ID NO: 154744 - DNA, 98 bp, Homo sapiens
gccgattctacgccgcccggtcgccagggagagtgaatacagctagggacgtgaaaggctgttcggctcttgaatcccagcgatgaaaccaggaactc

SEQ ID NO: 154745 - DNA, 50 bp, Homo sapiens
caactattcgcagtccgagcggaggccccgtgtgggccgcggcccggccc

SEQ ID NO: 154746 - DNA, 123 bp, Homo sapiens
tgaagggtaaccgagagatggtatatgactgcactagctcttcctttgatgggttgcactgctgtgatccatcctcatctcctaaagatgcatcctgacttatctccacacttgcacactgaa

SEQ ID NO: 154747 - DNA, 96 bp, Homo sapiens
gagcgaacccgagagcgtggagcgggctgggccagaagatggcagtgaacgtatactcaacgtcagtgaccagtgataacctaagtcgacatgaca

SEQ ID NO: 154748 - DNA, 50 bp, Homo sapiens
agaacgtcccgctggatctgacccgaggttgattcttcaccacactgaaa

SEQ ID NO: 154749 - DNA, 100 bp, Homo sapiens
accaccattatcttaactgaggcacccaaaatgataaagagttctatctgtcttctacgcgggaaaatctatgatgctctagataaccgaaccctggcta

SEQ ID NO: 154750 - DNA, 100 bp, Homo sapiens
gagaccgtgaccgagagcgtgaccgagagcgcgaatatcgtcatcgttagaaggtcctggatgcctcatcccttagtttcaacaccagattgaaatggtt

SEQ ID NO: 154751 - DNA, 100 bp, Homo sapiens
aaagcagtgggatttggatgtgggatccggttccttggtgtcatccagccttagcaaaccagaggatgattatttcagaaactggaatcccaacaagccc

SEQ ID NO: 154752 - DNA, 50 bp, Homo sapiens
cgctggagtccgcgcctccctgggtggtataagttgaaatccaaaccagg

SEQ ID NO: 154753 - DNA, 97 bp, Homo sapiens
tcctgcagatgaaaaagtgtgacttggcagctgactaccatgccggggatgaagcgagactgcgggggtgctgcggccgtcctgggggccttcagag

SEQ ID NO: 154754 - DNA, 100 bp, Homo sapiens
agcgcagcggcgttggcggcggcggcggcggcagcggcagcgcggcggggccggattactacagcccggccatgctgggcctgaagaccgaccaggaggt

SEQ ID NO: 154755 - DNA, 101 bp, Homo sapiens
caaggtggggttggcatcccccacatacgggggcggaggaaagcgcaaagggaaaagcaagaagtggaaagaaatcctgaagttccctcacattagccagt

SEQ ID NO: 154756 - DNA, 101 bp, Homo sapiens
ttcacccagcatttcatccctcgtcgaaaggattggattggcatctttagatgggtgggaggacgctactcgctgtggtcggccatcggactctccattgc

SEQ ID NO: 154757 - DNA, 83 bp, Homo sapiens
tgctgtatctactcaagagtggaagttttcacaggtcagcccaaggccaaccccactgtcactctgttcccgccctcctctga

SEQ ID NO: 154758 - DNA, 100 bp, Homo sapiens
ccagcaattaccttaccgactaatatccagaggagaataatttggaagactgttgtggcaaaacttagagagtaacctcaccaaccttattaagaggaac

SEQ ID NO: 154759 - DNA, 75 bp, Homo sapiens
aagtacaacgaagccaccggcgtgtgccccgacggcgacgagctgctctttggcgtaaattgcaatcgattaggg

SEQ ID NO: 154760 - DNA, 83 bp, Homo sapiens
cgtcggagaagaccttcaagcagcgccgcaccttcggtggtctttgggaagaagcttcctgcctttgccaccatccccatcca

SEQ ID NO: 154761 - DNA, 95 bp, Homo sapiens
cccgggccccccagcatgaagaccccggcggacacaggatgatcggctgaatgtaacagaggaactaacgtccaacgacaagacgaggattctca

SEQ ID NO: 154762 - DNA, 51 bp, Homo sapiens
aacctacatcccctgatggcggagaacctgacagagtcttgctctgtcgcc

SEQ ID NO: 154763 - DNA, 75 bp, Homo sapiens
agcgccgaggaggctttcctgctggtggcaaccgcctacgagacactcaagaacatccagtcatggataaaaatg

SEQ ID NO: 154764 - DNA, 76 bp, Homo sapiens
gtcttcatctcggatatccgcaactgtttctctggaaacccccctggtaagtgtggaggaggcgggacactctgac

SEQ ID NO: 154765 - DNA, 75 bp, Homo sapiens
gccgatgaggaatttggaaacacatgtgggacatacaagcgttggatatagagagtgatgatgcgggtgtgctgg

SEQ ID NO: 154766 - DNA, 99 bp, Homo sapiens
cttgaaaagactgggcttgtccttgctggtgcatgcgtcgtcggcctctgggcagcagtaaagatgacggcgccttgaggtaagctacaggcaacacca

SEQ ID NO: 154767 - DNA, 82 bp, Homo sapiens
atgtaaagcaatatttcgagcagtttggcaaggagggaacctgtatgacaaaatccttcgtcagaaggacaagttgtttgag

SEQ ID NO: 154768 - DNA, 75 bp, Homo sapiens
gaaagctttcctaggccaaaaagaggtgcctgattattacaaaataattaaaaatccaatggatttgtcaaccat

SEQ ID NO: 154769 - DNA, 100 bp, Homo sapiens
atgaaaagagggactgccataacattcccaaagaaaggcctaaagaatgtatttgacgaagcaatattggctgccctggagcctccagaaccgaagaaga

SEQ ID NO: 154770 - DNA, 98 bp, Homo sapiens
ccctgctgacttcgaccagcggccctggtttccatctcatgctccctttcatcacatcatataagtctgtgcaggtctacttccccagcaggacagca

SEQ ID NO: 154771 - DNA, 101 bp, Homo sapiens
agtgtggtctacgagctgtttctcatctttatactcttccagatgctgtgtgctgtggacccacctggggttcatggagtgggccacggggcccagcccta

SEQ ID NO: 154772 - DNA, 100 bp, Homo sapiens
atcacattgctgttcatgagtggaatccatgtttctggacgcggatttttggcctcatactctgttatagataaacaagacttttgccatgggcttcatg

SEQ ID NO: 154773 - DNA, 51 bp, Homo sapiens
gggagaggcctggaggacaccaacatgtgaagaactgaatgtcatcatgtc

SEQ ID NO: 154774 - DNA, 75 bp, Homo sapiens
ggttaagctggctgtcctgaaatattataaggatctcaaagatttcatgagacaagctggggaagtaacgtttgc

SEQ ID NO: 154775 - DNA, 100 bp, Homo sapiens
cgtcagtcctttcagcttcagcctgctcaagaactgcagcattgcagccgccaagacggtattctagaatggattctgggaaagaaagatgtcatgtgga

SEQ ID NO: 154776 - DNA, 101 bp, Homo sapiens
ctggcgttggccagtcagccacagaggctggagttgggtaggaaacctgagcataccggcacactggcttgtgggtgacttctctccctgctgtatttccc

SEQ ID NO: 154777 - DNA, 100 bp, Homo sapiens
tttgctgccagcatgatgtcgtatttataatatgtggaggagagagagctcaccatgctcaggtaaagggatgaggttgaaggctgcattgactcaccac

SEQ ID NO: 154778 - DNA, 125 bp, Homo sapiens
caaccttacacacttagaactcggaggaatagtacaacaattatgagccgtcacagcctgtgggctcgggatgagtttgaaggcctcttcaagcagccagcagaaaatgtcaaccagtacctcac

SEQ ID NO: 154779 - DNA, 51 bp, Homo sapiens
ggagagcgggcagccttccaggtggacagactgtgcaacttacatcatctg

SEQ ID NO: 154780 - DNA, 83 bp, Homo sapiens
tctgctgggagtgctgatgctggcgggatctgagttcgacttcattgtcagtggccacagatgtctttaattccaaaaacctg

SEQ ID NO: 154781 - DNA, 100 bp, Homo sapiens
ggtggactggacagtgcactccgggccgcagttactcttcagggatgtgctggtggatatggacaagagcggtgaagtacgacttatagaactggatgaa

SEQ ID NO: 154782 - DNA, 89 bp, Homo sapiens
ccacaccttcccctgcctcaaggagctgtgcaccagcccccggctccccacaggtgcaggaagccgccgcccagccatggacggggagg

SEQ ID NO: 154783 - DNA, 127 bp, Homo sapiens
gcgaagggaatcgcaaggctcttccctgaccattttctactgtccctgcgcgagtgccggtggtggtgtgcacattgagccccggtatagacagttcccccagctgaccagatcccaggtgttccag

SEQ ID NO: 154784 - DNA, 98 bp, Homo sapiens
gatcgtgtgattgactttgatgagaacactgctctggatgatgcagaagaggagtcctttaggaaggttcagcagatagatcgtgtggtagaagttgt

SEQ ID NO: 154785 - DNA, 75 bp, Homo sapiens
aagagcagagcggagggagccccagacacgggacagaagatgagcctgtcggtcctggagggtatggggttccgt

SEQ ID NO: 154786 - DNA, 98 bp, Homo sapiens
aagtagcagaaaccctgtctttcaggattcctgggacacagaggttttatgaatgaagctatggctacagattccccaagaagacccagtcgttgtac

SEQ ID NO: 154787 - DNA, 74 bp, Homo sapiens
gccggggccggccagaagcgggcggcgcgggggagatgaaaccgtgtcagcatggttgcctggctacctgctca

SEQ ID NO: 154788 - DNA, 82 bp, Homo sapiens
gggccacgtgtggaggaggccatgtacagttggaagtgttgctgtggaagaccagccagatgtcagtgccgtgttgtcagcc

SEQ ID NO: 154789 - DNA, 97 bp, Homo sapiens
ccctctgctcgcggccgcgcctttgaggtctgatgagtctctatggcagaccttagacctcacaggtaaaaatctgcacccggatgtgactggtcgg

SEQ ID NO: 154790 - DNA, 74 bp, Homo sapiens
cagtctaaacctgtgaccacccctgaagaaattgcacagtttggcttcattaactatgaagtaggagatagcaa

SEQ ID NO: 154791 - DNA, 82 bp, Homo sapiens
gccgcgaaccgcagtatcatgctggccaagaagatcatcattaaggacggaggcacgatgtccagctcgccgctgtccaaga

SEQ ID NO: 154792 - DNA, 100 bp, Homo sapiens
ggcgaggactggcgacggcgaggagacaacaagggaggtgtcacagttttccatttagatcaacaacttcaagttcttaccatggaaaattccgagaaga

SEQ ID NO: 154793 - DNA, 75 bp, Homo sapiens
cggagaggagatgcacacggcactcgagtgtgagatgcctgaggaagtgcaccatggagaggaggaggtggagac

SEQ ID NO: 154794 - DNA, 75 bp, Homo sapiens
gagctcctcaagaatctcgtgctcaccggtttctcccacatcgacctggtcagcaatctgaagatggtcttacgg

SEQ ID NO: 154795 - DNA, 98 bp, Homo sapiens
atttagcattgatgggaagatggtagctgtaaacctggccactggaaaacgaagctttttgatgacaagcttcaaaactgcaaagaagatgaacagag

SEQ ID NO: 154796 - DNA, 100 bp, Homo sapiens
agccttgcaagggtgaagtgcttcgggtccagaccaaacatttccacatcaagtgtttcacctgcaaaggatgatcctagtgctccccacaaaatccagg

SEQ ID NO: 154797 - DNA, 128 bp, Homo sapiens
tgtacatgtacaacctggacccccaggagggcggcgagtgtgccctgatgaagcagcaccggttaagaatagacccaccagcatttcgtgggatggtcttgattcagggaagctctacaccttggtcc

SEQ ID NO: 154798 - DNA, 74 bp, Homo sapiens
tcaagttacacaacacatccacagatgcaacaaggtgacaagaccaccttccagctacaggttcgccaggtgga

SEQ ID NO: 154799 - DNA, 100 bp, Homo sapiens
tggccaccccgctggagagggcccagcatctgcaaagctcccggcaccgccgagccctggacaccaactattgcttcagccaagacaatgcaaactccag

SEQ ID NO: 154800 - DNA, 98 bp, Homo sapiens
ttctctcgatgaggataacatccctccagaagatgtcatccgtccttggctcaggatttggagagcttgcaccaccaaaaatggcaaacatcaccagc

SEQ ID NO: 154801 - DNA, 100 bp, Homo sapiens
cctgaaacatgaatttgatgcagacttacagattgctcgctgtaagcagctcatctgtgaccccagctacgtaaaagatcgggtagaaaaagtgggccag

SEQ ID NO: 154802 - DNA, 100 bp, Homo sapiens
atatgacaaaggctttgccgcagttcatcttcctccctgtgtactttccatttgccttcctgggaagatattttcgattcagataaagaagttcctatcg

SEQ ID NO: 154803 - DNA, 96 bp, Homo sapiens
cggagccgtgggacgagggcggcggagcttcaggatggttcgtactaagacatggaccctgaagaagcactttgttggctatcctactaatagtga

SEQ ID NO: 154804 - DNA, 98 bp, Homo sapiens
gtggatcggagcctagcgtgactgtgcctctgagaagtatgtctgatccagaccaggactttgacaaagaggatcatccttccttgtgggttagcagg

SEQ ID NO: 154805 - DNA, 90 bp, Homo sapiens
gtttcaagcagtattaagagtaaatggtttttgaatctgaaaattcaagaaggtgaagctcacaacattttttgccctgcatatgattgc

SEQ ID NO: 154806 - DNA, 76 bp, Homo sapiens
accgcatctggctggagccctgcattcgcggcgtgtgcagggcaagaggattatgacagattacgaccgctgagtt

SEQ ID NO: 154807 - DNA, 76 bp, Homo sapiens
gccacttcctacgtgaaatcactgtggcaaccggggcatttaaatcaaacggtattgagatggattgggttatgaa

SEQ ID NO: 154808 - DNA, 83 bp, Homo sapiens
ctggaattgatgaagctcaagttgaacaagatgctcaggatgaatttcatcctttcatcgaagcacttctgccccacgtccga

SEQ ID NO: 154809 - DNA, 100 bp, Homo sapiens
gcctgcgcgggcccgaggccggaggaacccggactccggcgtagcggtcatcatcagatttgaaatatttaaagtggatacaaaactatttcagcaatgc

SEQ ID NO: 154810 - DNA, 95 bp, Homo sapiens
gaggggttgttttataaactgcctggccgaatcagccttttcacgctcaaggttgcagtgcacgaggggattaactcaggaacagccatgtcaag

SEQ ID NO: 154811 - DNA, 88 bp, Homo sapiens
gtttgttatgtttgccgtggtttttatcaccacacgactgggtatatttcctctctgagttagtgctgagggtgctgtactatggccg

SEQ ID NO: 154812 - DNA, 100 bp, Homo sapiens
tcgccatcaagaaagtattgcaggacaagagatttaaggacccagatgatgtggtaccagttggccaaagaagagcctggtgttggtgcatgtgctttgg

SEQ ID NO: 154813 - DNA, 83 bp, Homo sapiens
ctgatcgcctaacttctactgacgaagcttggaagttgcagaagcaagatggattctggatatactctgagtattgtaacaac

SEQ ID NO: 154814 - DNA, 75 bp, Homo sapiens
gtggtttgctgcacctattgacctatcctaccctgtgcgcactcattcgaggagtccatcaaaagaataagtcta

SEQ ID NO: 154815 - DNA, 110 bp, Homo sapiens
ctggagacaaagtcaagccagtcctcatgaactcaaagctgcctcttgatgtcctgggcaggtctcggaagggtgctgacctggaccgggagaagaaggctgccgagtgc

SEQ ID NO: 154816 - DNA, 75 bp, Homo sapiens
agaatcaccagcactggctgaagggcggcgactggcggcgcgatggacctgaccgggctcctgctggacgaagaa

SEQ ID NO: 154817 - DNA, 100 bp, Homo sapiens
ttcgaggggccaaggcagaagaaatcttggagaagggtctaaaggtagaggaaggatggtgggaaggtgttctcaacgggaagactggaatgtttccttc

SEQ ID NO: 154818 - DNA, 83 bp, Homo sapiens
ggcaacggagacgacgaggcagctgagttgatgcagcaggtacgaggaacagcaaattcaggaaaaagtggcgacctttcgac

SEQ ID NO: 154819 - DNA, 98 bp, Homo sapiens
actcacgccttcgccgtagcatctttcgcagcggaccgaagagaagaaaagtaggccagagccgtcggaatgtggaacaggggcttcgagggacccgc

SEQ ID NO: 154820 - DNA, 100 bp, Homo sapiens
gtcaaccctaaacagtggactcaacttcaaagacgttctcaaggagaaggcagacctggacatatctgaagagatggattaagaatgctttggattaagg

SEQ ID NO: 154821 - DNA, 82 bp, Homo sapiens
aagcgagaccgcgtgcgaggaccggccaccagcttgggctccccacggagggcagcaagtgggacttggggaacccggctgt

SEQ ID NO: 154822 - DNA, 90 bp, Homo sapiens
atattagagcttagagaaaaccagttaaaaatgttgcctaagtggggttaattcagtatgccaataatccaagagttgtgtttaacttga

SEQ ID NO: 154823 - DNA, 100 bp, Homo sapiens
caataaaaaacttcccaaagaactcctgttacgctgatcttgcatctttaatggataaaacatttgagagaaagttgcctgttagttctttaacaatatc

SEQ ID NO: 154824 - DNA, 88 bp, Homo sapiens
ccttcaaaagcagtgcaactggctcagtattcacagggaaagctgtgagggaaaggcagcaacaggtggaagctgttgagttggaggc

SEQ ID NO: 154825 - DNA, 51 bp, Homo sapiens
cgccatcgttgctgccttcttcgtcaagcaattatattccagaagtgagaa

SEQ ID NO: 154826 - DNA, 94 bp, Homo sapiens
aagcggaaaccagtggccacagcatctttgtctagccccagtgcagtttttggctttcacccccaaccagtgaccaaagacttgaccactcaaa

SEQ ID NO: 154827 - DNA, 82 bp, Homo sapiens
tggggttctgagactccctgtcccggaccgcaggcgtccgagctgggccacagcctgaacgagaacgtcctcaagcctgcgc

SEQ ID NO: 154828 - DNA, 74 bp, Homo sapiens
ggggccgctctgggatcccggccaccagcaattgtccggaaatctactttcttcaatgtgttaaccaatagtca

SEQ ID NO: 154829 - DNA, 100 bp, Homo sapiens
agaggcacccgatatatgttctctaggccttttagaaaacatggtcctactgctctgttggctcatgaaataggttttggaagtaaagttacaacacacc

SEQ ID NO: 154830 - DNA, 101 bp, Homo sapiens
acaaatggaggaggaggaggacgacgacgatggggatatcggaaacctcgacctgtctcccagttggttgcacagcaggttactcagcagtttgtgcctcc

SEQ ID NO: 154831 - DNA, 90 bp, Homo sapiens
agcagacagtgctacagagccaactcctgacagggtcatgtggttatgggtaacaatgcagtctcaccctatcagcaagtgattgaaaag

SEQ ID NO: 154832 - DNA, 75 bp, Homo sapiens
aaaattgagacggagctaagagatatctgcaatgatgtactgaaaaccctcgtggatgtgactttggaaaacagc

SEQ ID NO: 154833 - DNA, 75 bp, Homo sapiens
gtcagcgccgaggctgggctgaggcgccgcggtaccatgaggcgccgtactatactggcaattgctggagaagat

SEQ ID NO: 154834 - DNA, 74 bp, Homo sapiens
atgtggcaaaacgaaaaagctcaatgcctcagaaattcattggctacagatgcacatgttgaatggagctcttc

SEQ ID NO: 154835 - DNA, 80 bp, Homo sapiens
gctcctgtcagtggacagtttgaatctggccaacctatttgtggaaatggaatggtagaacaaggtgaagaatgtgattg

SEQ ID NO: 154836 - DNA, 95 bp, Homo sapiens
tttcctgaggcctccccagccatgctgaactcagatatctaggcataatgaaactaaggctctttcagaaactctggaagaaaagaacaaaaata

SEQ ID NO: 154837 - DNA, 96 bp, Homo sapiens
atgggatccctgtggaccagcaggatgatgacaaaggcaactgtgaggactaccttatgatttcctgatgttgaggaagtatatgccggagacatc

SEQ ID NO: 154838 - DNA, 51 bp, Homo sapiens
ggctcctcagccaggacacagggcgaagatgaagagatggctgacccaatg

SEQ ID NO: 154839 - DNA, 90 bp, Homo sapiens
gaaagagtaattcacgcagagccggctttgcaggaaatgaatgaggaccatagcacacccaagaaagagaagcaagagcggatctccaaa

SEQ ID NO: 154840 - DNA, 50 bp, Homo sapiens
cttaggaccacccaccatgcctatccaggcttctcgtcagtgcctcgcag

SEQ ID NO: 154841 - DNA, 88 bp, Homo sapiens
ggatctggaggagcagttgtctgatgaagagaaggtggctttgcagatcgctcctccatgtaccagtgagaagcattatgagcatctg

SEQ ID NO: 154842 - DNA, 100 bp, Homo sapiens
cgcgatggcgggcatcctgtttgaggatattttcgatgtgaaggatattgacccggagggcaagaagtttgaccgagcgctgcccgtgcccctagcagga

SEQ ID NO: 154843 - DNA, 101 bp, Homo sapiens
agctattgccttattttttctcatggatgttcttcttcgagtatttgtagaaggttcacatggatgcagtggagccaaccacaccagcatcacaagccccc

SEQ ID NO: 154844 - DNA, 97 bp, Homo sapiens
tcaaacatgattgaacgatctgtggtggaagcagcagtccaggaatgcagtcagtctgttgatgaaactatgttacccaggagatttcagatgaaac

SEQ ID NO: 154845 - DNA, 51 bp, Homo sapiens
ctcctccaaaaccaccaaggacccgcaggcctgatcaaccccgtataacca

SEQ ID NO: 154846 - DNA, 100 bp, Homo sapiens
tgccgcgtgcttctcttgaccctgtagaaataatggaaattggacgcccgcggaaagacacctggaagaacctaaaggcagacccagaagagctttttac

SEQ ID NO: 154847 - DNA, 75 bp, Homo sapiens
gcagagccccagctcctgtctggtctgtgagatgtcctcactgtttcaggagggatgatcatggtgattttactg

SEQ ID NO: 154848 - DNA, 100 bp, Homo sapiens
ccaggctttggtgagcgggaagcttgcacttcggtatgcagggaggcagggcatgagccagaaggagagctctaagtctgccatgatgtatattcaggag

SEQ ID NO: 154849 - DNA, 98 bp, Homo sapiens
atggaaatcataactgctgagcagctgatggaatatttagaattgcttcagattgctggaattagcccacatggtaatgctttaggagcatcaatgca

SEQ ID NO: 154850 - DNA, 98 bp, Homo sapiens
gaatgtatcagaatctaacgtgtcgttaatagaaagaagaacaggcaagaagtggtccagccggcgaagttcagtaccatttgaagaaaggattttag

SEQ ID NO: 154851 - DNA, 100 bp, Homo sapiens
ggaaggccgaccgactgccgcggatctctctaggagctgacactcgaaccttcacgacccattcggatttttccaggactcaggagtggcactgggaaga

SEQ ID NO: 154852 - DNA, 90 bp, Homo sapiens
ggaacaccgtcacgctgctggaggaggaggattcacatttccaaagccacgctggactgtctcaacggtgactataacgtggaagagggc

SEQ ID NO: 154853 - DNA, 74 bp, Homo sapiens
cgcccggagcaagcggagctcccccaagagccggaaaggaacttagtgatttggcccgtgaccctccagcacaa

SEQ ID NO: 154854 - DNA, 75 bp, Homo sapiens
gcctgcggcagccggtaccagcagtctttcccagggaactccgatgaagtgttccaacaaaatgagcgagtgaac

SEQ ID NO: 154855 - DNA, 83 bp, Homo sapiens
caaagccctgggtcgcttggaagaagccaaggtcaatgagctgaaggagaaaggcaacaaggccctgagcgtgggtaacatcg

SEQ ID NO: 154856 - DNA, 90 bp, Homo sapiens
cgggaatgctgagaaaacagacagatttgtcatgaagaaactcaatgatcgtgtcatgagagcaccccctgtaatggcctatcctgctac

SEQ ID NO: 154857 - DNA, 75 bp, Homo sapiens
agagcttgaagcaagggaccttgttatagaagccttaaagtttaaggaagaaatctctaaacgttttaaatcaca

SEQ ID NO: 154858 - DNA, 83 bp, Homo sapiens
acaggctaacaccaatggaggctttacttcagacaaggtgctccagaggctggtggacctgagcggaggctgggacgccctgg

SEQ ID NO: 154859 - DNA, 75 bp, Homo sapiens
gttcaataccatccttaccaccagaagctatccacaacttcgcagaggtactggtcttcttggacattaatcttt

SEQ ID NO: 154860 - DNA, 82 bp, Homo sapiens
tgcaagaccagtccatttggggaaatccttcggatggtgaactcattagaaacggtctggaaaatcccgaagcagaagcccg

SEQ ID NO: 154861 - DNA, 75 bp, Homo sapiens
cgtggctgtacctgtgcaagagagtttgcctgagaatacagatcaacccacagaacaaagcggatttccaaggca

SEQ ID NO: 154862 - DNA, 82 bp, Homo sapiens
attggaccctcctcccaactgtaggtcttgtccagaaggctaaaaaagcaaaggacaggttgttgaaacgagaaggggatga

SEQ ID NO: 154863 - DNA, 90 bp, Homo sapiens
agtggttcatcgagcagaggctgctcatgttctccttcgtcaacgaccgccaaaattgcctggaaaagagcagtgagaggagtccgggag

SEQ ID NO: 154864 - DNA, 75 bp, Homo sapiens
gccgggttggtgtactgctcggagcaatggagacagatgggaccgtgttcagaattcacacaaaagctgaaggat

SEQ ID NO: 154865 - DNA, 75 bp, Homo sapiens
ggaaggtgaagaaggcgcgggagagctcggggcgcctggagtcagtggatcggtggggaaaatgctgcttaccct

SEQ ID NO: 154866 - DNA, 100 bp, Homo sapiens
gattggcacaggaccagactcaagacacacaactcataacagttgatgaaaaattgaatgatatggaacctagcaaagctgttccactgaatgcatctaa

SEQ ID NO: 154867 - DNA, 100 bp, Homo sapiens
accgctacagcagccgcaggaagcagctcaccttccaccgtgccatcagacaagatcagttgatcagaacagaaagctagctcggaaaatcctacaagag

SEQ ID NO: 154868 - DNA, 83 bp, Homo sapiens
atggctgcgtcggagctctacacaaagaagatctaaagcagtccacagtagctggcaagcaccccccagtttgaaccaacctg

SEQ ID NO: 154869 - DNA, 75 bp, Homo sapiens
cacaaacttgaagatggatatcagctacagactttcctgagtcagagcactagaatgctgcagggttggcctttg

SEQ ID NO: 154870 - DNA, 75 bp, Homo sapiens
ccagctggtggtcctggtctacgtcatcgggcggagctggtcaccacccacaagtgcctgcaccatgaggtaaag

SEQ ID NO: 154871 - DNA, 95 bp, Homo sapiens
ctggataaatattccgaggacctgaaggacgcgcaggagaagctggagctcacggagaagaaggcctccgacatcctctggaccttctccatcta

SEQ ID NO: 154872 - DNA, 50 bp, Homo sapiens
cgcgggtctgctctgtgtgccatggacggttctccaaggagaagtacatc

SEQ ID NO: 154873 - DNA, 75 bp, Homo sapiens
cgaggagatcatcctgcagtccctcatgcaactggagtctgttttaaggaacatcataaaagaacgaaaaggaag

SEQ ID NO: 154874 - DNA, 90 bp, Homo sapiens
cagctccgaagctggcaagaaggagaagtacagcatcggggagcccacagtgccatccaccctggcagaggagtttacctacaacccctt

SEQ ID NO: 154875 - DNA, 50 bp, Homo sapiens
ccggactttcaagatgggaccaagctccctcgtgaaagatgcttctgttc

SEQ ID NO: 154876 - DNA, 100 bp, Homo sapiens
ttggacctctacagccttagtaagagtcacctaaggtcctgcgagtacaagggtcgacccccaaaggcaggggcagagccagcatctgagagggaggtct

SEQ ID NO: 154877 - DNA, 100 bp, Homo sapiens
aaaggaagcaacaacataatgcccagagttggagccaattaaaccagagtttttggtcatgaagaggaagagaggcaggcctaaggggtccacgaagaag

SEQ ID NO: 154878 - DNA, 75 bp, Homo sapiens
cgctagtctgaccctccgccaggcaaaaggaagggaagtaccactgcccagtgctgtttaccgtgttcaccaaca

SEQ ID NO: 154879 - DNA, 100 bp, Homo sapiens
gcaactggaaacagtacaaacaagaagacagcatctggggcaaacttgaagataaatcttttgactccagctctttagaggatctaaagtgaccttgatg

SEQ ID NO: 154880 - DNA, 100 bp, Homo sapiens
cctgcgggcacccagctggtttgacactggactctcagaggtgaacctatgggtcgtggaacaaaagttatcctacacctgaaagaagaccaaactgagt

SEQ ID NO: 154881 - DNA, 82 bp, Homo sapiens
attgccttattttttctcatggatgttcttcttcgagtatttgtagaaggtggacggaattgaccccaacttcaaaatggag

SEQ ID NO: 154882 - DNA, 75 bp, Homo sapiens
gaagattgtgaagcaatagcctaagagtacaggggctcaggtccaggtggcaggggatatgctacccaactcaac

SEQ ID NO: 154883 - DNA, 75 bp, Homo sapiens
tgcctggcctcaactgttgcttcttataaaggaaagaaccggaggctgaagcaggccaaagaagaagctcaggct

SEQ ID NO: 154884 - DNA, 80 bp, Homo sapiens
aagagaaaggaagcaggcccgttggaagtggttgtaacactctgctccagccaaggtggtgagggcagctgttcctaaac

SEQ ID NO: 154885 - DNA, 90 bp, Homo sapiens
ctgctgttctcgggagccgtggccctgatccagacctgggcaggtgctggagaatctggtaaaagcaccattgtgaagcagatgaggatc

SEQ ID NO: 154886 - DNA, 83 bp, Homo sapiens
cagaagtcagagacaagaagaggctaacatgactgataccactataatttagtggaggagctgtgcagtgagaagcaaagcag

SEQ ID NO: 154887 - DNA, 78 bp, Homo sapiens
cttccagcaccttctgctcctcgtgggcatccacctcctcaagttgccgaggtactgtctgaatgccgcctgctcgcc

SEQ ID NO: 154888 - DNA, 83 bp, Homo sapiens
gacagttcatgatgaggtggccaacaagcagaccatggaggagctgaaggacctgctgaagtgtactaatggtcacttgatgt

SEQ ID NO: 154889 - DNA, 90 bp, Homo sapiens
ggaagatatgcatcagttccatcgagccattactacaggtgaaggaaatactcatgaccagccagatgtcttaaggaatgcttttgaaaa

SEQ ID NO: 154890 - DNA, 96 bp, Homo sapiens
acagcggcaaggtctccaagtcccagctcaagcctcgtcacgtgttcaatatgctaaagaagtatgtccgcgcagaacagaaggacagacagcaca

SEQ ID NO: 154891 - DNA, 74 bp, Homo sapiens
ctgacgctctgggtgaagaatggaagtctctggatggtcgtcagatccgtgtggatcatgcaggcaagtctgct

SEQ ID NO: 154892 - DNA, 100 bp, Homo sapiens
ctcgatccagaggaaggcgatactctcgctcacgcagcaggagcaggggacgaagaattaaacatgtggacatgaaccaaaagagcatattatggagtgc

SEQ ID NO: 154893 - DNA, 77 bp, Homo sapiens
ccaagcggtttcaaacggcttagagcaggccgcttggttctgacccagctgagttggaaatctacatttctgaagga

SEQ ID NO: 154894 - DNA, 93 bp, Homo sapiens
gagaggaactggagcaattgaagctgactactaaggagaataagggaggagctttatctttatatactgcccttaccacacagcagaaactgg

SEQ ID NO: 154895 - DNA, 100 bp, Homo sapiens
ccatattcagattggccagtgtggcaaccagatcggagccaagaggctgtggccctgagaaagatcacgtctacctgcagctgcaccacctacctccaga

SEQ ID NO: 154896 - DNA, 100 bp, Homo sapiens
aataaagctgttttggaactgtcaggtacctcaaagcgatcttaatgcaagtcatgaacttgaatgtgccgatgaggcctggcattcttgtccagagaca

SEQ ID NO: 154897 - DNA, 100 bp, Homo sapiens
atggagagatcctctacccttttgaggatatttcaacaagcaggtttattgaagtcaaaatgtccaaaaaaatcagtggcggttctgtggtagagatgca

SEQ ID NO: 154898 - DNA, 100 bp, Homo sapiens
actcgatggaccgcggctggcaacggagctggagtttgttcagatcatcatcatcgtggtggtgatgatggtgatggtggtggtgatcacgtgcctgctg

SEQ ID NO: 154899 - DNA, 74 bp, Homo sapiens
actctcatcaaaaagaaacctgggcaaaatgggcatatcaagtttttgaccaaaggagataataatgcggttga

SEQ ID NO: 154900 - DNA, 100 bp, Homo sapiens
ctcgggacggaggacgcgctagtagtccggcagcgtcttctcttgagggagcaatttggagaagagctggaacccagactcgcgccctggatgccatcct

SEQ ID NO: 154901 - DNA, 74 bp, Homo sapiens
tgaacttccctggtcgaacagttttttctaatggctattcaagtggccacagatgtctttaattccaaaaacct

SEQ ID NO: 154902 - DNA, 100 bp, Homo sapiens
gcgtcgagcttgcgctctttgctgccgccttcctgtgcggggccgtggcggccgcggcgatgactcggacccaggttctagagccttctttccgccaggc

SEQ ID NO: 154903 - DNA, 75 bp, Homo sapiens
gttgttccgttgcgagctgcagctgcgatctctgtggtaggcccaggttgcaattgtagctcaagacttggcagc

SEQ ID NO: 154904 - DNA, 75 bp, Homo sapiens
tttgttcaagataaagtgattttttgcctttgttgattaactggacaaattcagttgttgacctcctgtactgga

SEQ ID NO: 154905 - DNA, 100 bp, Homo sapiens
ggccggtgagattggaagtggcggcggcggcaggcggcagaggggagtcttaggaaaagtcctcagtgctgtgggcagtgcccagctactgatgtcccag

SEQ ID NO: 154906 - DNA, 100 bp, Homo sapiens
ggctcacatcgagggcatggaggatattatgtttgagaccttcaacaccccggccatgtacgtggccatccaggccgtgctgtccctctacgcctctggg

SEQ ID NO: 154907 - DNA, 97 bp, Homo sapiens
gcggcctcttcggctgcggaccctgccattccggaggaggggaaggggaggagttacagcccggccagttggagttgtagtaccacgagggacgcca

SEQ ID NO: 154908 - DNA, 50 bp, Homo sapiens
taaaaactatggagaagaccagtccaatgtgataaacaagcaactttgat

SEQ ID NO: 154909 - DNA, 100 bp, Homo sapiens
ctctactgtgacttcagagacactgccaagcagccttagccctagtgtagagatgccactgccgccaggagccctgtaacatcagccatcgtcaacccca

SEQ ID NO: 154910 - DNA, 100 bp, Homo sapiens
ctccatcttcgcggtagctgggaccgccgttcaggttcaggcatggctcctccaagccagggaccccctggccctctgtcagccacatcattgcagactc

SEQ ID NO: 154911 - DNA, 100 bp, Homo sapiens
gctgtagcgtatggtgctgctgtccaggctggtgtgctctctggtgatcaagatacagctgcgttcctttgcctgcaacaggggtcaagatgagttttgc

SEQ ID NO: 154912 - DNA, 100 bp, Homo sapiens
ggacgtcgtgcttcagcctcaccaactgcgggcacgtgtactgcgacgcctgcctcggcaaagaacttggagcgtgatgcccagaagtgtgtgaactggt

SEQ ID NO: 154913 - DNA, 75 bp, Homo sapiens
gttcccccagtctgcagaaacactggcaacatttacaaagtatatcaagctgtcttccattaaagtggacacgcg

SEQ ID NO: 154914 - DNA, 100 bp, Homo sapiens
ctgcgatgtgaggaaaggcacctccaccagcacttctcagaacttctggatgagttttcccagaacgtcttgggtcagctcctgaatgatcctttcctct

SEQ ID NO: 154915 - DNA, 100 bp, Homo sapiens
cgccgcgcacggacttcggcagagcccgacggccatggaggctgaagagacgatggaatgccttcaggagttccctgaacatcataaaatgatcctcgac

SEQ ID NO: 154916 - DNA, 98 bp, Homo sapiens
gggggagcggggccttccacaccccctccgtgggtgtgtggtcacggagctgctggacgtctccatggagctgggctgtttcctggctggagcgctcg

SEQ ID NO: 154917 - DNA, 100 bp, Homo sapiens
gtactgcaaagtcctgcggttgcccgaggttgaagccagagggagctcctgaaccagaaggggtggcggcccccccacccaagaacagcttcaataaccc

SEQ ID NO: 154918 - DNA, 101 bp, Homo sapiens
attgcaaagagttatggatattctggtggggagatgaacccaacctagtgggtgtaatacatcatgaactgcagggtcctgacctgagggctgcatcaaga

SEQ ID NO: 154919 - DNA, 51 bp, Homo sapiens
acagaatcaccagcactggctgaaggagtatgctgctgctgttccgctttg

SEQ ID NO: 154920 - DNA, 48 bp, Homo sapiens
acagaaattctggaacacctatatgaaaatatttacaccagcagctcc

SEQ ID NO: 154921 - DNA, 140 bp, Homo sapiens
agccttgcgcggccacagcatgaccgctcgcggcctggcccttggcctcctcctgctgctactgtgtccagcgcagaacaccttccaccatgaccacctcagcaagttcccacttaaataaaggcatcaagcaggtgtac

SEQ ID NO: 154922 - DNA, 90 bp, Homo sapiens
cggagaatgaaggaaggctggtgcacatcattggcgccttacggacatccaagatcaccggggaacccttgatccgtcgatcagatgata

SEQ ID NO: 154923 - DNA, 82 bp, Homo sapiens
ggggcctcccgatgtttaccctcaggaccccaaacagaaggaggatccccaggtgattcttatcagaagctcatcctacagt

SEQ ID NO: 154924 - DNA, 83 bp, Homo sapiens
gacgccagttactgcacggaaagcagcgtcaggagccatagtacctacagcagcactccagagtctcgctctgtcgcccaagc

SEQ ID NO: 154925 - DNA, 74 bp, Homo sapiens
gtgtcctatgaataccgcttcctggagttcacgactctgagtgctgatagttttgaggcagctgtgccatcaaa

SEQ ID NO: 154926 - DNA, 100 bp, Homo sapiens
ttgagttggtcgggggcagcggcagctggaccagctattccttctgttgtggcgtatccgaaaaggagtcagaccagcactgcagatagtgacctcaaag

SEQ ID NO: 154927 - DNA, 100 bp, Homo sapiens
gatgaacgtctccggaaagagttttctccatttggtacaatcactagtgcaaaggccacatctatcccaaatttctcttatatgggagctcgcctgtgta

SEQ ID NO: 154928 - DNA, 101 bp, Homo sapiens
ggaagcaaggaacggtgtatgcgcaagtgaaagaggatgccctaaatgagaccagggaatcagagacaaagctgaaggagctcccaggagtgtgcaatgag

SEQ ID NO: 154929 - DNA, 90 bp, Homo sapiens
atttcagaggtcacacggggtgcaggagagctttggaggtgatgcttcagacacagatataaccagtaaaatgggagcccattatcattg

SEQ ID NO: 154930 - DNA, 82 bp, Homo sapiens
gttcgtctcttacgtctgcggaagtgcagctgcctcagttcttagcgcaggcttcgggagcaggaaagaaaagaagcagaag

SEQ ID NO: 154931 - DNA, 90 bp, Homo sapiens
gatgatgaagatgaggactccacagtattcgacatcaaatacaggaagggcctgtcccagtcggctttaccctatcgacgcagcgtcccc

SEQ ID NO: 154932 - DNA, 75 bp, Homo sapiens
tcgaattacatcacttttggcttacagagcctatgagcttactcaggtgtgcaagcatttcctggaagctattga

SEQ ID NO: 154933 - DNA, 106 bp, Homo sapiens
ggctcatcgtgatcccggcgacatactacctctggccccgagatcagaatgccgattctgcttctcagaagatgcactattatagatactctaacgccaaggtcag

SEQ ID NO: 154934 - DNA, 100 bp, Homo sapiens
gttcattctccttaacctgctaaaggtttgcagttgcaactccagaggagctggctgtcaacaatgacgactgtgccatctgttgggactccatgcaggc

SEQ ID NO: 154935 - DNA, 50 bp, Homo sapiens
gacaccgccctgaacactatcaccgacggtttccaggcctgaggtgcccg

SEQ ID NO: 154936 - DNA, 73 bp, Homo sapiens
gaaaatggacgctgacatcaatgtcacaaaagcggatgttgaaaagtcccatgaagctgaggtcttgaagcag

SEQ ID NO: 154937 - DNA, 97 bp, Homo sapiens
gaacagcagaatcaaggcctggatctcatggtggatgttcctggacatggaaaggtgatggtggacattgcatatggcggtgcattttatgcatttg

SEQ ID NO: 154938 - DNA, 50 bp, Homo sapiens
ccctccggaggcagcacctcaggaaagtcaccaggagactaaagtccatc

SEQ ID NO: 154939 - DNA, 50 bp, Homo sapiens
tgagcggctgcttactgctcgacaggtagagcagctgacagaagagcaga

SEQ ID NO: 154940 - DNA, 90 bp, Homo sapiens
ctgctcacttcttacagattgcaaccctgctctttccaacaactgatcctgtgggtactttgctccaagttccagaacagatctctgctc

SEQ ID NO: 154941 - DNA, 107 bp, Homo sapiens
atttgttaaggattccaagtaactcttatttggcagttcaattaacctccagaagatggctgaacctgcaggaataccagagcaagaaactgatgtctgacaacgga

SEQ ID NO: 154942 - DNA, 100 bp, Homo sapiens
ccagactgaggaagacccggaaacttaggggccacgtgagccacggccacggccgcataggtcaccaggcagcagggattggaaaccaggcaacaggaat

SEQ ID NO: 154943 - DNA, 100 bp, Homo sapiens
atcaagtccaaggaggccgaggagtaccggttgaaggagcactatctcaccttcgagaagatggctgtgccacccacgtatgccgatcttggcaaatctg

SEQ ID NO: 154944 - DNA, 90 bp, Homo sapiens
ggttgaaaggagcagggaaaagatccagaagcatgttagttcgacatcatcatcttttcttgaagtggccatggctaccgggcaggtgtt

SEQ ID NO: 154945 - DNA, 106 bp, Homo sapiens
caaacagcccgcccgaccccgtcccgaccctggccgccccgagcggagcctggagacctgcctagagctggaacgttacctccagagcgagccctgctatgtttca

SEQ ID NO: 154946 - DNA, 74 bp, Homo sapiens
cgggctcgggtcgccggagccgcgccccaccccgccagctccagagccacgtcagggaagtcaaagatgcatcc

SEQ ID NO: 154947 - DNA, 100 bp, Homo sapiens
ggacgaaggcatggaagtctacgggggcgagaatgtggagcttgggatcagggcttggcttggactcatcgtcaacagcagcagcatcatcatcatcacc

SEQ ID NO: 154948 - DNA, 82 bp, Homo sapiens
cgcgccccgccgctgagccgtcgcggagccgcgcagccctcggagcacggtataccgctgggccgaccactcaagcacggtg

SEQ ID NO: 154949 - DNA, 75 bp, Homo sapiens
gatcctgatgaagttcgagcactaatatttaagaaagaagatgttaactttcagattctgaaaaagagttccacg

SEQ ID NO: 154950 - DNA, 100 bp, Homo sapiens
gggaaactcagcctgtgaccccagcgtgggtgaagataggatcaagatggccatgtggcaggggcgaccctggacatctttgactacatctacatagatg

SEQ ID NO: 154951 - DNA, 75 bp, Homo sapiens
aggaggccgagcccaagagctcactgaagatagtggaggagcgccggactgtggtggacagtgagggccggacag

SEQ ID NO: 154952 - DNA, 100 bp, Homo sapiens
acacagtagccatcaggaccccctgacagatagctgctacacggatcatggagctggaaggcagggtccgcagggcggctgcagagagaggcgccgtgga

SEQ ID NO: 154953 - DNA, 83 bp, Homo sapiens
ctgaaaggaaatccggaattatcacagagacttctgcacggacctggccgtctccagtgccaacttcattcccacggtcactg

SEQ ID NO: 154954 - DNA, 100 bp, Homo sapiens
cctgaatgtgagaatcctgaaacagatttggaggagaagcagccccaaaagacgaaggaaccctcaaaagaagatgagcctcagcagaaggagatgccaa

SEQ ID NO: 154955 - DNA, 75 bp, Homo sapiens
ctcggagatcgagaaggagatcgctcggacacagaagaacaaggaagttcagttctgcaagcaagtatgctgctc

SEQ ID NO: 154956 - DNA, 75 bp, Homo sapiens
ctcctggctcccttctgccccagctccgtctcggcggcggcgggtggatccataaagaacccagccaacccgcag

SEQ ID NO: 154957 - DNA, 89 bp, Homo sapiens
tcctcctcggcgggagccctcgcgacgcgcccggcccggagcccccagcgcagcggccgcgttcaaatctgaacatcaatgatgtacta

SEQ ID NO: 154958 - DNA, 74 bp, Homo sapiens
gccgagcacccaggcgactgcctcatcttcaagggccacgccaatattatctcctgcctctgcgtcagtgaaga

SEQ ID NO: 154959 - DNA, 100 bp, Homo sapiens
tgtgatcatgtaattcttctttgggcatgggtgaccattcgtttattagaaactattgatgtccataggcctcttcttaggaattccctggatgatcttg

SEQ ID NO: 154960 - DNA, 82 bp, Homo sapiens
cagacactgaacgaggagccagtgtacctccctgcacttggctattcaaaacgggtccatctgatgaatcctatggttccag

SEQ ID NO: 154961 - DNA, 99 bp, Homo sapiens
cgaacagctggagcaaggcgacgaaccttggagagaggagaacgaacatcttctggacctttgtccaggctggagggcagtggcatgatctcggctcac

SEQ ID NO: 154962 - DNA, 82 bp, Homo sapiens
ggatcaaaaaatagaacaatcggagttgcagccaaaaatcaggagcactcactgtgggcctcgtgcgacagtgtcaaacaat

SEQ ID NO: 154963 - DNA, 80 bp, Homo sapiens
gctgggaagaggcggcagacagcggggtactccaaagattcaggtttactcacgtcatccagcagagaatggaaagtcaa

SEQ ID NO: 154964 - DNA, 90 bp, Homo sapiens
aaacccagcgccaaggccaagggtggtatggacctgtctgccaatcaggacgaggagaccgaccaggagaccttccagctggagatcgac

SEQ ID NO: 154965 - DNA, 101 bp, Homo sapiens
aacggggcgagcctggaggattgtcactccaacctcttttcgctggctgtctacctggtctccagaatggacggccctgtggcagagcatgccaagcagga

SEQ ID NO: 154966 - DNA, 88 bp, Homo sapiens
gagacagcagccaaacccccagatcttcctcagaactgtgatcctaacattcccctagttgctcaggaattaatgaaaaagatgatac

SEQ ID NO: 154967 - DNA, 99 bp, Homo sapiens
gacttatatgatgcaagatgtggcagaagaacaagaagttgagaccgagaatgtggaaacagacaaaactgtgtggagttttatcctatattcataatt

SEQ ID NO: 154968 - DNA, 96 bp, Homo sapiens
ctgaagaccagcaggaaagcagtgagcccttacagagattcgtcagcgaactgcagctcaaagaaacctttctccaacaccagcaagccctaacca

SEQ ID NO: 154969 - DNA, 100 bp, Homo sapiens
cgcagacagagctattccagcaccagcagagacaggagactggggagaaccttccattaccttgcgacctccgaatgaagccacagcctctaccccggta

SEQ ID NO: 154970 - DNA, 83 bp, Homo sapiens
ggaaactggatgcagcaaggaaataggatttaaccgctctctgcctcccagctctccttcctccactaagagcggaaaatgaa

SEQ ID NO: 154971 - DNA, 100 bp, Homo sapiens
tttggttatattgcaaaggccattgggtgtttggagaagagggattgaccctgaatcttgaagacgttcagcctcatgacttaggaaaagttggagaggt

SEQ ID NO: 154972 - DNA, 82 bp, Homo sapiens
ccccacttggtgaatggagatgcagctcagcaggagatacaactcgtcaacgaatcaaattcagtgatgacagagtatgcaa

SEQ ID NO: 154973 - DNA, 98 bp, Homo sapiens
accctccgccccacgccggctcggcctcgaaacagcttgaagaaagccacaggtcccagcacacctggaaagttctgcaaggcctcagctacagaaag

SEQ ID NO: 154974 - DNA, 51 bp, Homo sapiens
ttcgaagtgtgtgccactgtttataccagcgcattggatattcatttaaga

SEQ ID NO: 154975 - DNA, 75 bp, Homo sapiens
ctcatcgactccatggccaactccttcgtgggcacgcgctcctacatggctgagcaactttcagccagaggcatg

SEQ ID NO: 154976 - DNA, 95 bp, Homo sapiens
ggagcttggtggagcaggagcggctgggcatcctcctgagactccggggtcagacgcccactccagggaacttatagaaatgctggcaatttcaa

SEQ ID NO: 154977 - DNA, 75 bp, Homo sapiens
tacaacagtgccacccaatcttcgaaaactggatccagaactccattgttgtgagaactgctttattggatgctg

SEQ ID NO: 154978 - DNA, 131 bp, Homo sapiens
gtgatgatgacccagtcctgatcccaggtgcaaggtatcgagcaggacctggtgatagtatgagtttaaagccaagaacatcaagaagaagaaagtgagcattatggtttcagtggatggagtgaaagtga

SEQ ID NO: 154979 - DNA, 75 bp, Homo sapiens
tgggtgctttttatatatgcaaaagtgaaactggaacgccaagctgaagaagaacgaatacggaagcacaaagca

SEQ ID NO: 154980 - DNA, 97 bp, Homo sapiens
gcctcaacaaccatttctaagtggggcctttacaacaactaaacggacaggcattccagccccacgggaattttcagtaactgtctcaagagagagg

SEQ ID NO: 154981 - DNA, 100 bp, Homo sapiens
cagaggatattactcagatccaaccacagcagttggttttgcgattaagatcagggccgcaagcttcttatcattgggaccactagccgcaaagatgtcc

SEQ ID NO: 154982 - DNA, 100 bp, Homo sapiens
gccggctgcaggagcagctagcgcaggctcagtagatgaaggcgtttctgagggcttgcctacacttcaaagcacgtctagcactaatgctcctccggat

SEQ ID NO: 154983 - DNA, 80 bp, Homo sapiens
gcgctggccagactgacacccataccttttgggcttcagaatgcagtgttttcggtatcatgaactgatcactaaatatg

SEQ ID NO: 154984 - DNA, 82 bp, Homo sapiens
caaggagcgcggaatcggggagcgtccggagctagctggatcctctaggcagctgtcattcttctctacagaagagcttctc

SEQ ID NO: 154985 - DNA, 75 bp, Homo sapiens
aaaaattgtataccgcagattcagggtagaatttcagaacaaattctacgttggtgcaggcaccaaatttgttcc

SEQ ID NO: 154986 - DNA, 100 bp, Homo sapiens
taattcaaggtcacacaatgtcggggatggacctccagatttccttactgcatattgagtatcagtgctgatattgaaacaattggagaaattctgaaga

SEQ ID NO: 154987 - DNA, 100 bp, Homo sapiens
tgcaccctccgccaggctccgcgggatgcaccgtggtagccgagggcggaggcgacactctcagcataagctgtggccatgactactgaagtaggctctg

SEQ ID NO: 154988 - DNA, 87 bp, Homo sapiens
caggatgaagagaggaagccaacccacaggcagcatgacacccaggacctcttggaagaggcctctggtgcacatggcttcctcccc

SEQ ID NO: 154989 - DNA, 50 bp, Homo sapiens
tcaaaagagcttctctccagagtagaaagacctgtttaaaacgaattcga

SEQ ID NO: 154990 - DNA, 100 bp, Homo sapiens
ctcatctgccagaatcagaaagaattcatcacactgtggcaattgaaggaacagactaaaaatcgtgtcctggaaggaaactacaggtactaccagggat

SEQ ID NO: 154991 - DNA, 100 bp, Homo sapiens
catcttctaaaccaacactcctagccaatggtggtcatggagtagaagggagcgatactacagcaatggctgccatccggaagaaactggtgattgttgg

SEQ ID NO: 154992 - DNA, 75 bp, Homo sapiens
ttcttcagctgctcggacagatgaagctccccaaggagctgcagggtgtggatgaatggaacatagctcgcctca

SEQ ID NO: 154993 - DNA, 75 bp, Homo sapiens
tcaagctgaaaacaaacaagaggactgtgttggtgcccagctaagacctgaatgccatcaccctccccagggctc

SEQ ID NO: 154994 - DNA, 98 bp, Homo sapiens
cttgtctctcaacatcctctcttccggatacatccacccagcccaagatgaccggctaactcaggtgagatggagccgctatagtcctgaattcaagg

SEQ ID NO: 154995 - DNA, 82 bp, Homo sapiens
ggtgagcgcgtttcccgcctgagcgcaactagcggcgggtcgtgggcacctccagatgccatggacaatattaccaggcaga

SEQ ID NO: 154996 - DNA, 90 bp, Homo sapiens
ggcagcatctacaaccctgaagtgcttgatatcacagaggaaactctgcattctcgcttcctggagccaagcgcccggcgccagcccggc

SEQ ID NO: 154997 - DNA, 75 bp, Homo sapiens
tggccctactgcaatctactgcactcgaggctggcagtgatggtgaaagcataggaaactgccccttttcccaga

SEQ ID NO: 154998 - DNA, 82 bp, Homo sapiens
ccagctgccgctgtcgtctttgcttcagccgcagtcgccactggctgcctgaggattttttatcaagcagaaatgcatcgaa

SEQ ID NO: 154999 - DNA, 74 bp, Homo sapiens
ctgcctcagcctcccgagaagctgggattacagagcaactaagaggtctttcttggctctatgagaacctggtg

SEQ ID NO: 155000 - DNA, 80 bp, Homo sapiens
tgcagtacctgcagaaggtctctggagacatcttcagcaggagtctgcagtttctgggagcagtgaacggtgcccccgtc

SEQ ID NO: 155001 - DNA, 82 bp, Homo sapiens
tacgacaccctggacgctgcccgcagcagcatccgcgtcgttcgttgactgtgaagtgctgaccacactcaccccagacact

SEQ ID NO: 155002 - DNA, 109 bp, Homo sapiens
gtcagctgcgtgattcccgtgattgcgttacaagctttgtctccttcgacttggagtctttgtccaggacggtacatgtcccagagcaagcacacggaggcccgggagc

SEQ ID NO: 155003 - DNA, 100 bp, Homo sapiens
gaagagggcagagccgtgcatggggctgctccccaggacctgagcaggaacctggagttttcagaaccttcgagatctgcggtctggggtctggttgaaa

SEQ ID NO: 155004 - DNA, 100 bp, Homo sapiens
cgccgcgcccaccgctacgacctggtcaacctggcagtcaagcaggaaacccatcaacagctggctgataagaagggcctccatgttgtggaaatccggg

SEQ ID NO: 155005 - DNA, 78 bp, Homo sapiens
tggaatctgaagagacatgagatggtagacaaaaccccaggcacgcggaataaaagatgctacagaaatcatctttga

SEQ ID NO: 155006 - DNA, 124 bp, Homo sapiens
cacaaaggacctactactgcctatcaaaacgcccaccacaaatgcagtgcacaagtgcaggatatttggccttgacattaaaggcagagactgtggcaatgaggcagctaagtggttcaccaac

SEQ ID NO: 155007 - DNA, 80 bp, Homo sapiens
acagattctaactccaatggcccaaaaatacgatgaatggattaaagcagataaaatagtaagacctgctgataaaaatg

SEQ ID NO: 155008 - DNA, 73 bp, Homo sapiens
gatgattctggaactgggagaagatggctttaaagaatacacttcaagggatgtggagacgctggtagcgggg

SEQ ID NO: 155009 - DNA, 51 bp, Homo sapiens
tggggctgctcctggaggagctacgcagggagttccaccatcttcctctga

SEQ ID NO: 155010 - DNA, 90 bp, Homo sapiens
tgtagacagagctcgacagtatgtactacaggcctcagagaaccatggctactgccaagggaatcgccataggcatcgacctgggcacca

SEQ ID NO: 155011 - DNA, 50 bp, Homo sapiens
ggtcccactgcagccctccaagcaggtgccagtgacggggtggcccgtga

SEQ ID NO: 155012 - DNA, 97 bp, Homo sapiens
gtggctgcacagtttctctggaatgcactttatcgctaccgaggcatggagtccgctggaattcatgagacaacctacaattccatcatgaagtgtg

SEQ ID NO: 155013 - DNA, 100 bp, Homo sapiens
caaaccagaaagtgtggatttgtgtggagcacacattgaatgggccaaggaaaaatcgagcagaaagaatgtctttcagtttcaccagtgatcattaaag

SEQ ID NO: 155014 - DNA, 100 bp, Homo sapiens
gacgctgccaacaacgggcactacaaggtcaaaatgcagatcttcgtgaaaacccttaccggcaagaccatcacccttgaggtggagcccagtgacacca

SEQ ID NO: 155015 - DNA, 88 bp, Homo sapiens
ggctccctactcttctaaggatcgctgtcctgacagaagagatgccttcaattaagttgcagagttctgatggagagatatttgaagt

SEQ ID NO: 155016 - DNA, 75 bp, Homo sapiens
gatatgttgtgggttgtcgtcgacagggttccaaaaggtcccaggtgtcctctccgtgcagtcggaaaaagcccc

SEQ ID NO: 155017 - DNA, 100 bp, Homo sapiens
cgctcctgtggggatgaaggccgagggcttcgtggatgccctgcaccgggtccggcaggaacagcgccttttgatagtcctaagtaattgctgctatcta

SEQ ID NO: 155018 - DNA, 51 bp, Homo sapiens
aaacatctcaccaatttcaaatccgaaaaagcttgtggtgaaggggggcaa

SEQ ID NO: 155019 - DNA, 97 bp, Homo sapiens
tcctgaaaaggagggaacaattgttgtagcaggtctaaaagttcaggtccagggagagctggaaaagcagcttctacaagcaaacccgattctggag

SEQ ID NO: 155020 - DNA, 100 bp, Homo sapiens
gagccataaaaggtctaggaccgcttcccccgagccagcagcattccaaaatatgcccggtgctatccgcccagctgctcctagaccaccatttagtact

SEQ ID NO: 155021 - DNA, 90 bp, Homo sapiens
ttcgaaagccagaggctcgagttacccctcttaccaccgtcatggcagtcccagcataatgcaaggcaaggtccagccgttccacccggc

SEQ ID NO: 155022 - DNA, 51 bp, Homo sapiens
tgatatggagatggtcaacaaagtggtgaaatgacaatggatgctctgttg

SEQ ID NO: 155023 - DNA, 100 bp, Homo sapiens
cccccaggcttctgcgcagaatgcttctcagcagcaacatccccaaacagcggcgtttcacggtggcacatacatggttgcactgctgtgatccatcctc

SEQ ID NO: 155024 - DNA, 90 bp, Homo sapiens
ccatgattgtgaggcctccccagccatgtggaactccacagaccccgcacctggaggaggacttgaaggaggtgctgcgttctgaggctg

SEQ ID NO: 155025 - DNA, 82 bp, Homo sapiens
taaacgcggttagtgcaagcatctgggccatcttcaatgatatttggccttgacattaaaggcagagactgtggcaatgagg

SEQ ID NO: 155026 - DNA, 100 bp, Homo sapiens
caaacccaggaggagactctccctggaaaacttcccttccctttcggagcttactccacgggaacagcctctagataatctgagttgttgaaaatacgaa

SEQ ID NO: 155027 - DNA, 75 bp, Homo sapiens
ctctcttggcagccttcctgatttctgcagctctgtgtgaaggtaagaatgattgatgttggctgatattggagt

SEQ ID NO: 155028 - DNA, 107 bp, Homo sapiens
tccgatttcagcatcggggcagacaccgccctgaacactatcaccgacatttcctcctctgatgctcctcttcagcctttggtatcctctccttctctgcaagctgc

SEQ ID NO: 155029 - DNA, 75 bp, Homo sapiens
agccaccccgcgggatacgcctcagcgcgattgctcgctgtaagcagctcatctgtgaccccagctacgtaaaag

SEQ ID NO: 155030 - DNA, 50 bp, Homo sapiens
gagagatggtggaagaacccagagcaaaatccgttcgaaatacccccagc

SEQ ID NO: 155031 - DNA, 100 bp, Homo sapiens
tccactgaaggttctttccctttaagatatgtgcaggatcaagttgcggcaccttttcagcatacgtttgaaatggtttctgaagatgaagatgggaaat

SEQ ID NO: 155032 - DNA, 100 bp, Homo sapiens
agcacttgagccacgtgcatgaaccaaacccacttcgttcaagacaggtgtttaagcgtggatccataaagaacccagccaacccgcagagggaggggag

SEQ ID NO: 155033 - DNA, 96 bp, Homo sapiens
cccacacaacgcagacggtgcgcctgtgcagccctcccaggtggagtacacggcagactgtcaaatgggctctctcattcttggagtgaaaggatt

SEQ ID NO: 155034 - DNA, 100 bp, Homo sapiens
agaacatgctacaaaactgctccaggcacattgcaagcaacccgtgccttgatggtggttggcatcctcctgggagtgatagcaatctttgtggccaccg

SEQ ID NO: 155035 - DNA, 51 bp, Homo sapiens
cggcggggcagcgcaccggcaggcgggaataagacgagttggaagaagacc

SEQ ID NO: 155036 - DNA, 75 bp, Homo sapiens
ttggattgtctgcttcaagccctggctcaaaataagcatctgctgcacccaagcctgagccggttcctgttcaaa

SEQ ID NO: 155037 - DNA, 101 bp, Homo sapiens
gcagcaggagcagcccgcggcgaccaagatcaggaacctgccctgttatgtgtctcggtaccacgtgaaagactcctcacgccacgtcatcctaggcaccc

SEQ ID NO: 155038 - DNA, 110 bp, Homo sapiens
atcccacacaacgagaagctcctgtccctcaagtatgaggctgaggttcaactatgctacctggaagcacaaagagatgctgttgagcagatgtccctcaagctgtacag

SEQ ID NO: 155039 - DNA, 95 bp, Homo sapiens
ctcggattccttatgcagagtggccgacttggatcttcacactatatagcaaatcactaccacttgatctggcctgtcgagtctgggatgtattt

SEQ ID NO: 155040 - DNA, 100 bp, Homo sapiens
ctgaaagactgggctgtagtgaggaaggacctgctgatgaatattacatcatataccgaaatgtttttgataagagtaatcaagtcagaggattatatga

SEQ ID NO: 155041 - DNA, 74 bp, Homo sapiens
tctcatcgagatgggcttccccaggggacgcgcggagaagacagacgacacctcaggggaggacaacgacgaga

SEQ ID NO: 155042 - DNA, 96 bp, Homo sapiens
cgcgcacggccccctggacctgcggccgcccgtgtgtgacgtcagaattcagaaggagctggcggacatcactttagaccctccacctaattgcag

SEQ ID NO: 155043 - DNA, 101 bp, Homo sapiens
acagttgcactgtaaaaaacccagctgaagaccactttagaaactcaattaagactgtcctgattgcctgtaatgttaagcagatgagcaaggatgctcag

SEQ ID NO: 155044 - DNA, 101 bp, Homo sapiens
ggaaaactaggaatctatgatgctgatggtgatggagattttgatgtggatgatgccaaagttttattagcaaataaaacctcaggtgtaccaggaaatcg

SEQ ID NO: 155045 - DNA, 100 bp, Homo sapiens
ttcaacaccaccttcatctccaccatcgaccctcaaactgacacaagacctacagagaaaaccctttgccaaatctgctctcagcaagtggacagtgata

SEQ ID NO: 155046 - DNA, 128 bp, Homo sapiens
ctatgctcagaatccaagcggagagagtcagcctctggttcagactgcagtaaccagaggagatgttaaagtaacccatcttgcaggacgacattgaagattggtcttctgttgatctaagatgatta

SEQ ID NO: 155047 - DNA, 117 bp, Homo sapiens
atcggtgctgattcggcgcgatttgaggagctgctgctgcaggttggatggcaagcatgtggtgtttggcaaagtgaaagaaggcatgaatattgtggaggccatggagcgctttgg

SEQ ID NO: 155048 - DNA, 83 bp, Homo sapiens
tgaacgcacaggccgtcgctatgagcgggaccaccctgggcacagcaggcatcggaggacactgcccatctctaagataagaa

SEQ ID NO: 155049 - DNA, 75 bp, Homo sapiens
aggagaaaagccaagaggaccaggagcagaagaggaagagagtgtcaatccatatctacaaggacagagactgga

SEQ ID NO: 155050 - DNA, 98 bp, Homo sapiens
cttcttagacttggaggaggtatgcctggactgggccagactgagaactatgagcagagaatacgtgaacaacaggaacagctgtcacttcaacagac

SEQ ID NO: 155051 - DNA, 100 bp, Homo sapiens
gttaacaaacacataaagtttccggaaatcttagatttggctcctttttgcacccttaaatgtaagatccacttcctcatgatactgtcttctaactggg

SEQ ID NO: 155052 - DNA, 98 bp, Homo sapiens
cgcgacctacctgggcgctccgcgcccccggatgctgcagctcttcctgctgcccacattcctgcaccccctcatgagggtagtcccagagaccaggc

SEQ ID NO: 155053 - DNA, 126 bp, Homo sapiens
gttgaagttgacatctgacgacgtgaaggagcagatttacaaactggccaagaagggccttactccttcacagatcggagacggtggctcagggagtaaaggaaggccagttgagcaaacagaagt

SEQ ID NO: 155054 - DNA, 100 bp, Homo sapiens
cttgtacagagatgtgatgttggagaactatagcaatctggttttcttgggactccctggaggaaaagcggaagcggcagcggtctgaacgcctggaacg

SEQ ID NO: 155055 - DNA, 100 bp, Homo sapiens
aagttggttttttcaagcccatatcttgccgaaatgtataaacaatcagattctgtatggaagaagtcaccaaaatgcatctgccattattaagactgcc

SEQ ID NO: 155056 - DNA, 114 bp, Homo sapiens
caccaccccagatgacctggaggggaaaaatgaggactcagtggaactgctggtgttggaacattcagaagattctcggccttgccccttcacgagccgccaccaagcaggcag

SEQ ID NO: 155057 - DNA, 83 bp, Homo sapiens
acgccggcggctgccggggcggcgaggcgcgaggagctaggagtggagtcaacatatcaatggagcaagtcacagtcgtcgat

SEQ ID NO: 155058 - DNA, 75 bp, Homo sapiens
caggaatctcactctgttaaagctggtctgttctaactgagaataactgaagtgaagtgatggactccgatttgg

SEQ ID NO: 155059 - DNA, 100 bp, Homo sapiens
gtgacccttgtggaggatatgcagagagagcttgggagactgagacaacagaatttcgctaaggagtttgtgatcagtgatcggaaggagctggaggaag

SEQ ID NO: 155060 - DNA, 100 bp, Homo sapiens
tgcagagagagagcgcgagagatggagatgggcagacggattcatttagagctgcggaacaggacgccctctgatattgcagagggaatggcatacatcg

SEQ ID NO: 155061 - DNA, 100 bp, Homo sapiens
cgggaagtgtgaagcggccaatggcacggaggcctgcgtggttcagaatctcccatgatgattggtgagttgagaagtgaccttgatgatgttgatccct

SEQ ID NO: 155062 - DNA, 74 bp, Homo sapiens
tgactgtctggaaccgcactgcagagaaaaatggagatttacagacagtcatctgggtggaggacacccttttg

SEQ ID NO: 155063 - DNA, 96 bp, Homo sapiens
atcaccactgtccaaattcagaagctcagaacgctggactctccctttgcagtgcatctgggggaggtgttgtagccattgacaacaaaatagaac

SEQ ID NO: 155064 - DNA, 101 bp, Homo sapiens
acagaagtcgtactcccttaaaccattattcttggagaaaccctgtctgtttactgtaaccttttgcactcaaattcctttatcaggaataactacatagc

SEQ ID NO: 155065 - DNA, 97 bp, Homo sapiens
gtacaccgggtacaaggtgttttccagcgtgcctcagcaaaatggaaattggtgttggtattaggagatctgcacatcccacaccggtgcaacagtt

SEQ ID NO: 155066 - DNA, 100 bp, Homo sapiens
tcaagtacacagagagacggcagccgctgtacagattcatcaccacggtggtgtgtgatgagaacggctctaagggttatgcctttgtccacttcgagac

SEQ ID NO: 155067 - DNA, 75 bp, Homo sapiens
gtgagcttctgcctttccttacaggagcctggattgtcactgggggtctgcacacgggcatcggccggcatgttg

SEQ ID NO: 155068 - DNA, 82 bp, Homo sapiens
caagagtgttgagcagcccatcgtgcttaaagaagggtgtcgtgaaaactacccctaaaagccaaaatgggaaaggaaaaga

SEQ ID NO: 155069 - DNA, 100 bp, Homo sapiens
ggaaaatggcggtgtctacagtgttctcgacttcgtcgctggatgccttccgcgccttccaccctgacctggaattcgtgggcaagttcttgaaacccct

SEQ ID NO: 155070 - DNA, 88 bp, Homo sapiens
aagtcggcagagcactgtgattgcttgcagtgtttctttataatacattccatgggaggagaaggagatccggttggcagctaaaccg

SEQ ID NO: 155071 - DNA, 100 bp, Homo sapiens
aaacatgctccgccagatcatcggtcaggccaagaagcatccgagcgtaatttctcactatcagtgtaaagagcagcgtgatgcccatagatttgagaaa

SEQ ID NO: 155072 - DNA, 88 bp, Homo sapiens
agctcgtggcctgcctctgcgtgcggtcctcactgagcagcgagtcgtcccccgtgtcctctccggccaccaaccacagctcccccgc

SEQ ID NO: 155073 - DNA, 100 bp, Homo sapiens
ggatgatagcactgatggtggcaggtttcctttggatcctaaaagaagaaaagaatgggttcgcctggttaggcgcaaaaattttgtgccaggaaaacac

SEQ ID NO: 155074 - DNA, 98 bp, Homo sapiens
tgcggtcactgcaggacctgcacgaggagatggcttgcatcctggaggagagtgaaagtgtgctgacactcaagggcctgactcccacagggatgttg

SEQ ID NO: 155075 - DNA, 100 bp, Homo sapiens
tgatcaacaagcagacgccaaacaagcaaatctggctatcttctccatccaggtacaaagggaatttcttgcagagctgtgttcagctgagagccagtag

SEQ ID NO: 155076 - DNA, 98 bp, Homo sapiens
tgaagcacatcgaccggcgacagcagccaggagtcatgagcgacagcggcgagcagaactacggcgagcggaaatgagccgtcagactgctacagcat

SEQ ID NO: 155077 - DNA, 100 bp, Homo sapiens
accaagagagcgcacacaccaacaccaggcatctacatgggcagaccaactcaatgacctcattccacctatggacttgcttgaaatgattgtcacctgg

SEQ ID NO: 155078 - DNA, 81 bp, Homo sapiens
ctggagtcagtggaagacggagctggtcggcccgaagatatcatttgaggatgtggctgtggatttcacgctggaggaatg

SEQ ID NO: 155079 - DNA, 96 bp, Homo sapiens
gtcctctacaccatctgtggtcatgtcaacagtagcacaaggtgatggaagctgttttattgtccagcaagacttagactatgtcactgagctcac

SEQ ID NO: 155080 - DNA, 100 bp, Homo sapiens
gggatggttaacgaaggcacaaaatgtggtgctggaaaggttagctcccagcgatgccagatgggatcagcacagccctgcctctgctgctaattgttcc

SEQ ID NO: 155081 - DNA, 86 bp, Homo sapiens
tacgcctcctacgtttacctgtccatgtagagacggggtttcaccatgttagccaggatggtctcaatctcctgacctcgtgatcc

SEQ ID NO: 155082 - DNA, 85 bp, Homo sapiens
ctgggaaaagtagtgggacagtttcaaggccaatggaagcactgttgtgaagaacttatgaaaattgagattatgtcaccacgga

SEQ ID NO: 155083 - DNA, 82 bp, Homo sapiens
tgaagccgtgcccgttcttcctggagggaaagtgccgctttaaggagaactgcaggcagagctgacctgtccggtaatcaag

SEQ ID NO: 155084 - DNA, 83 bp, Homo sapiens
cttcgctcacctggatgacaacgagaggagaaactatgttccaacttcctgtcaacaatcttggcagtttaagaaaagcccgg

SEQ ID NO: 155085 - DNA, 90 bp, Homo sapiens
aagattttgagggatgagacaagaggaccttgcccagatgcagagcaaagcggcagtccccggacagggatgggctctgaccaggaggac

SEQ ID NO: 155086 - DNA, 85 bp, Homo sapiens
caatcaagaaatgcagaaacgtaaagaaatgcaattgagtggatatcaaagtattgcagagtgccttagcagccatccgacatgc

SEQ ID NO: 155087 - DNA, 116 bp, Homo sapiens
aattgcaaagtctgtatctttagtaaggatgggaccttgtttgcctggggcaatggagaaaatgtttcctgaggttataggcgggtgtttgaggagtacatgcgggttattagcca

SEQ ID NO: 155088 - DNA, 75 bp, Homo sapiens
tatttcttaccaaaagacactttcaggtttatctggcaagactgaggcaaataagactacagaatttcaatgagc

SEQ ID NO: 155089 - DNA, 100 bp, Homo sapiens
gggggtgtacgagtcggccaagttgatgaatgtacttacctcaacacttcactccatggcagttcccgagacccgccctaaccacactatttatatcaac

SEQ ID NO: 155090 - DNA, 51 bp, Homo sapiens
agcagcactggaggaggagggcaggtggtggttgtccaggccatcagtgcc

SEQ ID NO: 155091 - DNA, 74 bp, Homo sapiens
cccagagggttgggaaactcactccacagattcgccatgaagtcagcgtaaataatgtaacacataaactgtgc

SEQ ID NO: 155092 - DNA, 100 bp, Homo sapiens
ccctgcacgaccagctgaaccgcctcaaggaagagagaagggcacagttacctaagtatcaacgtaatcttcctcggccaggacaggcccccatcggtaa

SEQ ID NO: 155093 - DNA, 75 bp, Homo sapiens
ggcagagtacgatctgaaggaggggcttctggttagcccagttcgtgccctcgtgaggctggcatgcaggatggc

SEQ ID NO: 155094 - DNA, 82 bp, Homo sapiens
tcccgaggagctgggactacagttattaccccattcaagttgacaactgaggcaacgcagactccagtctccaataagaaac

SEQ ID NO: 155095 - DNA, 82 bp, Homo sapiens
agtggaggggagccaggcggccgcctcagtcgcaatgtatctgctgagcaaaaagatgaaaacaaagaagcaaagcctcgat

SEQ ID NO: 155096 - DNA, 75 bp, Homo sapiens
tggaaccctctgaagggcacagccaaggggcactatgaacgaagaggagcagtttgtaaacattgatttgaatga

SEQ ID NO: 155097 - DNA, 100 bp, Homo sapiens
gacggaccgcccaaccccaaaagagccaaactcagctcgcccggtttctcggcgaatgacagcacaggtgggatgcaggccctgggcaagcacctgacca

SEQ ID NO: 155098 - DNA, 75 bp, Homo sapiens
atggcaactctgatcccaactctggaatcgggagcttgccatcctgttgggcatgctggatccagcagagaagga

SEQ ID NO: 155099 - DNA, 113 bp, Homo sapiens
gaagagcttgaaagcgaagttcaggaagagtgacgaatcctatgaggatggttgtgaggattatcctactctatcagaatatgttcaggattttttgaatcatcttacagagc

SEQ ID NO: 155100 - DNA, 130 bp, Homo sapiens
ctcaaagatatcccttcgacagaagtggaagtgctgaaaaatgctcatctctcacacagacttttgatggacaggaggtttgatttttgccaagcatcagaaggaaagcgcccatctgaaaatcttggtc

SEQ ID NO: 155101 - DNA, 83 bp, Homo sapiens
cagacttcatctcaaatatatagggttagtcagcaacataaaatcaacctaatgacagcagacaacttatccatctgtttttg

SEQ ID NO: 155102 - DNA, 100 bp, Homo sapiens
actatgatgaggagatgagtggggggatcgagttcctggctagtgtcaccaaggacacagcgtccgactcccctgcagcggccttgcaggccactcgagc

SEQ ID NO: 155103 - DNA, 75 bp, Homo sapiens
ttctacaacatccacagtttcggattctacgtggtaactcaggcctcagatgagggcactctgggaggatccccc

SEQ ID NO: 155104 - DNA, 88 bp, Homo sapiens
ctaaatgagcctcttgccaaagtgtcccttttaaaagtttgtctcccagtctaactgccagcagttcctgaacactgtttggtttgga

SEQ ID NO: 155105 - DNA, 100 bp, Homo sapiens
acttgtcttcttccttactgtaatgggactatttctactccacataatctgatatgtgtcacaaagatgtctacacggaactgccagggaatggactcag

SEQ ID NO: 155106 - DNA, 50 bp, Homo sapiens
gagttcacgactctgagtgctggtactgtgagaatagagatgtttcgaaa

SEQ ID NO: 155107 - DNA, 83 bp, Homo sapiens
agcagacccgtttgggttctccacgcattctagactcccgaagaggcccgcagcccgagtgtcgccgccatggcttcgccgca

SEQ ID NO: 155108 - DNA, 101 bp, Homo sapiens
ctgaaacttctggctggtagggatgccagctaaaccagatggcatcaaacagtgaaatacaggcctggctttcagacttgctgcacagttggggatcttca

SEQ ID NO: 155109 - DNA, 75 bp, Homo sapiens
caaccaggcaatgctggatagataccgaattcttatcacaaaggcgcatattaaatttcctattgactaccccta

SEQ ID NO: 155110 - DNA, 74 bp, Homo sapiens
ggaaaatagcctttgccatcactgccattaaggatgtgggctctcttgatgagaagatgaagagcttggatgtg

SEQ ID NO: 155111 - DNA, 75 bp, Homo sapiens
cagaacaccccgagatgagaggagaagagcccagcacaacgaaggagctcactcctctacttgaaaaagaaagag

SEQ ID NO: 155112 - DNA, 100 bp, Homo sapiens
agaaagtgaagctgtttcgggccagcgacccgctgctcagcgtcctcatgtggggggtaaaccactcggcatgaagctttgctgtattatgttttagcag

SEQ ID NO: 155113 - DNA, 75 bp, Homo sapiens
ggcagctgtcccatgctctgctgagcacggtggttccagaatctcagcttttacctggacagaggtttcaaacta

SEQ ID NO: 155114 - DNA, 82 bp, Homo sapiens
acggaggaccggagcggcctgtccgaggttttaaaatcaaagatgggaaaatcggagaaaattgcccttccccatggccagc

SEQ ID NO: 155115 - DNA, 100 bp, Homo sapiens
ttctgcttcccctgggacagcactgagcgagtgtggagagaggtacagccctcggcctacaagctctttagttccaggaccgtctgcagccctaacaaca

SEQ ID NO: 155116 - DNA, 100 bp, Homo sapiens
acggacagcccatcgtgtgaactatagagtttgtggacagatttatattgcatcaacaacagcaacttgtgattggcggtgaccggatattcagttgcac

SEQ ID NO: 155117 - DNA, 90 bp, Homo sapiens
aagacagacaggatggggaggaggttcttcagtgtatgcctgctcaacgggacccaggtggagtctgtacagctcaaagtcaacatagcc

SEQ ID NO: 155118 - DNA, 98 bp, Homo sapiens
cagcaattgaaccatcagattagccagcagacccagctacgtggactagaggcttgttagagtgctgtgcaagatgtctggtaggggccccctttgct

SEQ ID NO: 155119 - DNA, 50 bp, Homo sapiens
atcatgggcaaaggacagatccagagagaaaaggaacagttccgtaagct

SEQ ID NO: 155120 - DNA, 98 bp, Homo sapiens
ttacagctactccagcaacatcttgtccataaggctgaaccggcaactgctgaggagcttgatatggaaaatgaatttttattaccacctgtttttgg

SEQ ID NO: 155121 - DNA, 48 bp, Homo sapiens
atcagctctctgttttggaaaatggaatctggcaccactccttctaca

SEQ ID NO: 155122 - DNA, 90 bp, Homo sapiens
ttcgcagggaggatgtcgggacaccccggaagctgggaaatggtggcctttttgaagatgtaactattagagctgggcattctcctcccc

SEQ ID NO: 155123 - DNA, 75 bp, Homo sapiens
gtgaagctcaaggcacaggtggcccgatcccagcaggacattgaaagagaacgtttgtctgcctgatgagagcca

SEQ ID NO: 155124 - DNA, 90 bp, Homo sapiens
gtttgctgtttcacctgtatcgactttccaaaagcaactttcatcctttgaaacgtgtgctgaaaaagaagaatcagcaaatactactga

SEQ ID NO: 155125 - DNA, 75 bp, Homo sapiens
ctttaaggatggtttagaaatggaaaaatgtggcttccgttacaagatgaggtctgtgtatgctcacttccccat

SEQ ID NO: 155126 - DNA, 55 bp, Homo sapiens
tgggccaaaggacagttagaagacagtagatccacagaccagcatggctgccact

SEQ ID NO: 155127 - DNA, 75 bp, Homo sapiens
gttttttatttttgctttgacacctcaacaagttagagagatatgcatatccagtccaagccttatgcatttgat

SEQ ID NO: 155128 - DNA, 100 bp, Homo sapiens
gagtcctcagaagcatgtgtcttccccagctctgcagccacatactatccgtttgttcaggaaccaccagtgacagaatggctgtatgggcgaaaaagat

SEQ ID NO: 155129 - DNA, 89 bp, Homo sapiens
gactgctacagctaagaatgttctgaaactcctttctgatttcttagatagtgaggcacattttacaatatgggataagctattggaaa

SEQ ID NO: 155130 - DNA, 100 bp, Homo sapiens
gttggagccccagtggaaactgcctgctgtctggggacaggctgattgctgaggaaggggtggacagcctgaatgtcaaggagctgcaggcagcgtgtcg

SEQ ID NO: 155131 - DNA, 75 bp, Homo sapiens
cgcctgcccagctttgcagcccccgaacgcggcctcgcacagacaagttggatggcttgaggactggtactaaaa

SEQ ID NO: 155132 - DNA, 100 bp, Homo sapiens
cagaggcaagcaggggcgccgtgggtgccagagaggcggaagaggaggcctgatggggcctatgttgtccttggccagtttctggtgctaaagaaagatg

SEQ ID NO: 155133 - DNA, 100 bp, Homo sapiens
ctggagaactttgcacatgtaacatccctgggatgacactcctgtccaggacactaaaatgtgaagaacagctcattgtgccccagtgatgaagttgctg

SEQ ID NO: 155134 - DNA, 75 bp, Homo sapiens
agaagatgcctcgaactaaacaaattcatcccagaaatctaagagaacatacatatgatagttgagaaagacaca

SEQ ID NO: 155135 - DNA, 100 bp, Homo sapiens
caggcgatcgacgccaccgactcttgtatcatgagcattggatttgatcacatgggattcttacagaagcagagattgatgctcaccttgttgctctagc

SEQ ID NO: 155136 - DNA, 96 bp, Homo sapiens
agatggagttcctcctggggaacccgttcagcacaccagtggggcagtgcctcgagacggtctcgccacattgcccagactggtctgaaagtcttg

SEQ ID NO: 155137 - DNA, 101 bp, Homo sapiens
tggctttctttggacccttgacatcaaccagttactatttgatgtatcggcaagcagtgtaaacggaggacttggggaaaaaggaccacatagtccatcga

SEQ ID NO: 155138 - DNA, 89 bp, Homo sapiens
ctgaaaatcgctatgttggtaatccacttagaggaacatgttattgtgttgacttcaaaatcaaaactgtagagctaagaggaaagaaa

SEQ ID NO: 155139 - DNA, 82 bp, Homo sapiens
ggcagacccagttctttcattgcagtcaacttgttcacaggcagaagattttcgcaagctctggaaaactccacctcgagag

SEQ ID NO: 155140 - DNA, 100 bp, Homo sapiens
tatggctctgccgtgccacctgctgcacccacgaatctgcccacccctcctgtaacccagcctgtttcacttcttgggaagaatatttctcagccctccg

SEQ ID NO: 155141 - DNA, 100 bp, Homo sapiens
taatgacaagctcatgtacaaaattacaagtggaaatccacaaggattcttttcaatacatcctaaaacagggggaggagttttggcccacacaatacta

SEQ ID NO: 155142 - DNA, 88 bp, Homo sapiens
gatattcaccaagcgcttcgctacaaggccaaagaccgggttccagatgtggttagaagaaaatagaagtaatattttgtctgacaat

SEQ ID NO: 155143 - DNA, 50 bp, Homo sapiens
ccgacgtgcagcctggcagtgcagtgtgcctggaagcagcgagcccttta

SEQ ID NO: 155144 - DNA, 87 bp, Homo sapiens
cctgtctcgccagcatgtccttactagaattggtgttatgtctttgattcgcaagaaggaatcagagatcattgatttcttcctggg

SEQ ID NO: 155145 - DNA, 100 bp, Homo sapiens
cgaaggccgggacccggttccccggcccacagtgggggtgtgcaaacccgagagaactggagggaggaagaaggagacttcagagaaagaggccgtgtga

SEQ ID NO: 155146 - DNA, 97 bp, Homo sapiens
aaggagtcagggatggctcttcctcagaccagaacttgtccgtccagctacgactttgtatcagcataacttgactggaattctagaaaccgctgtc

SEQ ID NO: 155147 - DNA, 135 bp, Homo sapiens
gtcagtgactgccgggagtcctgcaggggcggggcggcgccaagcgcagggagcccggctgagtggcagcccaggagctccttcccttaacagagctgagagaggcatctggagctgcagcatggaccagcgaga

SEQ ID NO: 155148 - DNA, 60 bp, Homo sapiens
attccaagtaactcttatttggtcgggccaaccactggtctgcgatcatcggaggatccc

SEQ ID NO: 155149 - DNA, 96 bp, Homo sapiens
cagggccaggcgccgctcagaacgacttcacagagaatgcagttgtcttgacttcaggtctgtctgttctgttggcaagtaaatgcagtactgttc

SEQ ID NO: 155150 - DNA, 74 bp, Homo sapiens
aagacagcactctgaaagcagctggaatcgattgatatcagtaaatgccattatttagtggatttggacaccat

SEQ ID NO: 155151 - DNA, 98 bp, Homo sapiens
gtgcccacagtgtttgagaactatgtggcagatatcgaggtggatggaaagcaggtcgagctgatccagagtgtatgctgggccacttgctgagaata

SEQ ID NO: 155152 - DNA, 76 bp, Homo sapiens
gcgtccgagtctccgccgctgcgggcccgctccgacgcggaagaccctgaaggaagattgggaatctgaaaaagat

SEQ ID NO: 155153 - DNA, 83 bp, Homo sapiens
aggcgcaccagatgtaccggaccctgttcttcaggcctgggttctgaggaaaacgcaatggtggccatggacttgggctctcc

SEQ ID NO: 155154 - DNA, 75 bp, Homo sapiens
cctgctcttcctcctgcctaccacagccctgtactacctggtgttcaccctggttacggcctccgctgccacagg

SEQ ID NO: 155155 - DNA, 75 bp, Homo sapiens
tgtttacagctcacgattcctgggggaactgtcttactgcagggatagctgggagtatggccaccctgctccacg

SEQ ID NO: 155156 - DNA, 73 bp, Homo sapiens
tgcgcttgatcaccacccttgtcaaggcttatgtagacatgaggaagattggcagtagccggggaatggtttc

SEQ ID NO: 155157 - DNA, 74 bp, Homo sapiens
gcggcaatcgcgctcctggagccagcaggaaatgcaacctcaccacaagtacaaagaccatctttcatggacta

SEQ ID NO: 155158 - DNA, 82 bp, Homo sapiens
gttggaagcagccgatccagcctgcggagcctgtggggcaggctcttctcaaccatctgtgagtccaggggaaccgtctcca

SEQ ID NO: 155159 - DNA, 49 bp, Homo sapiens
gttctgccttctggacaatctttccggatgcctgccatattagatggag

SEQ ID NO: 155160 - DNA, 97 bp, Homo sapiens
tgcgtgttccgaagttcaggggccccctgatcccgctgagccccctccaggagcgaaagggttaagaatgatgatgaatttcatcctttcatcgaag

SEQ ID NO: 155161 - DNA, 90 bp, Homo sapiens
tagagctttggaaggctgaatgcactaaacatgaagagcttgaaagcgaagttcaggaagagtgacatatcctctgagagccaagcaaag

SEQ ID NO: 155162 - DNA, 98 bp, Homo sapiens
gttgtgagaaaagcgagcctcttctgataactcaggatttacttgaaacaaaaggagaccctaatcttcagtgacatgaaaaaggttggtgtcaccgt

SEQ ID NO: 155163 - DNA, 75 bp, Homo sapiens
tgctattgaaagagagtatgcacaggtccgagtggacagatgaattaaacacgtacagagtggaagcagcttgga

SEQ ID NO: 155164 - DNA, 82 bp, Homo sapiens
gatggcgtgcagcgcaaccacgagacggccttccaaggttatcaatactctggctgaccatcatcatcgtgggactgacttt

SEQ ID NO: 155165 - DNA, 100 bp, Homo sapiens
tctccacagagctcattggcctgtgcatctgtttcttctgtagcagtggctgtatcttcttggggtctccaccgcagtctctgaaattctgaaatagccc

SEQ ID NO: 155166 - DNA, 100 bp, Homo sapiens
caaaaacatcaaaacggcgatccaaaaattcagtggaagttgcccagaagattgttgccacaaggaagaagcagcagctgtccataggaccctgcaagtc

SEQ ID NO: 155167 - DNA, 51 bp, Homo sapiens
gaagtgtttgacgaaaaccgattgaggcaaatttctggagatgtgcaatga

SEQ ID NO: 155168 - DNA, 95 bp, Homo sapiens
acagggtataactttacattagcagatatactattgtactatggacttcatcgctttatacttcagccccaggaaatcagcccccctcctactgc

SEQ ID NO: 155169 - DNA, 75 bp, Homo sapiens
tgcaagcttagagcgtctggccaagaatcagaggaagtggctgatgaacttattagtcctaaagacattgatcct

SEQ ID NO: 155170 - DNA, 60 bp, Homo sapiens
aagcccttccgcggaccgaaaggaaatgagtggcttatactctcctgtcagtgaggatag

SEQ ID NO: 155171 - DNA, 100 bp, Homo sapiens
ggaggaggagcgggcgagaagctgccgccgaacgacaggacgttggggcggcctggctccctcaggtcccaacactggtggaggagctgatcgcagtgga

SEQ ID NO: 155172 - DNA, 100 bp, Homo sapiens
gctagctgcttatggctataaaattacagcattcctctgaatattgatttgctgaatagcccagacttattggaagcaacgattggtgatgtaattgggg

SEQ ID NO: 155173 - DNA, 101 bp, Homo sapiens
ggattggaggtgtcagtgttaaaggaacctctacaacgaaggtgaagccacggaagataagggcagcacgctgaggaaacgcaagatgtacgaggagttcc

SEQ ID NO: 155174 - DNA, 75 bp, Homo sapiens
cggatcaacttcgacaaataagtccctgtgaagcaggaagagtgagggcaggttcactgcagctcagcagcatgt

SEQ ID NO: 155175 - DNA, 75 bp, Homo sapiens
tgccgggggaacctgtacaaggcatacatgcagctggtccaggtgcctagagatgatggtggtgctaccccagta

SEQ ID NO: 155176 - DNA, 100 bp, Homo sapiens
catggaggaagtcaagaaatttctagtaccggaagaaatgttggctatttggcgatgagaggtggtgaacagtgaccatactggtatacaacactatggg

SEQ ID NO: 155177 - DNA, 50 bp, Homo sapiens
gaccggcctcgagcgccccggcgggaggccaagtcctgtatctgccatgt

SEQ ID NO: 155178 - DNA, 100 bp, Homo sapiens
ctttgctctgaggaaccacacggggtgcactttgtggtttgccaccctgaccaccacacccaccagcattgagcgaattatcactcctcgcctggctcta

SEQ ID NO: 155179 - DNA, 82 bp, Homo sapiens
tcagctgagtgtgccacacaggtagccctggacggcattcagtgttttgcttgtgaagcacttactgagtgggaatatctgc

SEQ ID NO: 155180 - DNA, 98 bp, Homo sapiens
gtagctgaacgtctggatggtggagaagagcagggctgtggtggaggctgtgcatcgacttgacctcatcctttgcaacaaaactgcttatcaagaag

SEQ ID NO: 155181 - DNA, 98 bp, Homo sapiens
cgtttcccttgctgcggttgcttgggtgggacaacaagtccacaacctgcttctcacctacctgatagctgccactgcagagccccgccatggaagac

SEQ ID NO: 155182 - DNA, 82 bp, Homo sapiens
tgctgcgctacgagaccttcatcagtgacgtgctgcagcgggacttgcggctcctggaatcccagctgcagtcacagaagag

SEQ ID NO: 155183 - DNA, 50 bp, Homo sapiens
tttcccggagagtacatccccaccgtgtcaaacatgtgttgacatcaagg

SEQ ID NO: 155184 - DNA, 100 bp, Homo sapiens
agaaagtgtgcggcgaggagggcgtccgcgtgtacagccagctcaccatgcagaaggccttcctggaggctgttactgaggcggagacacgggtgatgat

SEQ ID NO: 155185 - DNA, 101 bp, Homo sapiens
aagaagaagccgacgcccatccagctgaacccggcccccgacggctctgcagttaacgggaccagctctgcggaagatttaccgcattgtttctcagaagc

SEQ ID NO: 155186 - DNA, 83 bp, Homo sapiens
ggccaagggaccaaggtggaaatcaaacgtggaatatgtgatcaagtgtgacatgtcagctctgcagaagattctgtatcgcc

SEQ ID NO: 155187 - DNA, 99 bp, Homo sapiens
agatactgcagagatattctactccatctcattcattgtacaggtgctggagaatctggtaaaagcaccattgtgaagcagatgaggatcctgcatgtt

SEQ ID NO: 155188 - DNA, 100 bp, Homo sapiens
catctggccctggtgaggtgaaggttgaggaacaggttagcaccactgagagagtgtttcaggatagacaatatcagattgatgctgctatcgtcagaat

SEQ ID NO: 155189 - DNA, 103 bp, Homo sapiens
gcctgatctgggttccgctgattcctttcgtaaccgcaccacacccgagatggagaaggatgaaactgtgagtgactgctccccacacatagccaacatcggg

SEQ ID NO: 155190 - DNA, 83 bp, Homo sapiens
ttcaggcaactcatcagccagattggaaaatcagtcgcctatatgccttatgctgaggtcaaacgtgctctagaacaggaagc

SEQ ID NO: 155191 - DNA, 74 bp, Homo sapiens
aagccgcacctggagaagctgaccctgggcatcacgcgcatcctaggagccttactgcctttgtaccccactcg

SEQ ID NO: 155192 - DNA, 110 bp, Homo sapiens
aaccagaccagggaggccaacgtggggtcatcatcaacactgccagtgtggctgccttcgagggtcagggtgctgtggaatctattgccatgaagaaccccaaagagagg

SEQ ID NO: 155193 - DNA, 100 bp, Homo sapiens
ggatggctatccagacgctctggtcatactaaagaacacatctggaagctgatgaacttattagtcctaaagacattgatcctgtccagcgctatgtccc

SEQ ID NO: 155194 - DNA, 97 bp, Homo sapiens
agagtattgccgcggtggaaatggaggtgaatcttggaagcaaccagtaccttttctctgtcatagtggatcctaaagaaatgccctgcttctgttt

SEQ ID NO: 155195 - DNA, 83 bp, Homo sapiens
agaagatcctgctgcccgagcccagtgccctctggtggtcagaagatgctgtgctgtctcgttaggatgaatggattaaaatg

SEQ ID NO: 155196 - DNA, 75 bp, Homo sapiens
gcgtcgagaggaccatcctgggtgctggccctgtgctggagggagtggctgttctggggattgcccttattgcta

SEQ ID NO: 155197 - DNA, 50 bp, Homo sapiens
cccaggagaagccgcccaaagaactggtgaatgttggatgtgtacccaaa

SEQ ID NO: 155198 - DNA, 100 bp, Homo sapiens
cactaagtgaagcaagaaagcatttaaaagaagagacacaattacgattggaatcagtgtctgtccctgaagggtcattaaatcagctatgttcttcaga

SEQ ID NO: 155199 - DNA, 101 bp, Homo sapiens
gatttggactccacagtgtctgctcttgccctggctttttacctagcaaagatctttaatctcatgaagtacgacagctacagccgcttcttaaagtctga

SEQ ID NO: 155200 - DNA, 97 bp, Homo sapiens
aaaaaaacaggagatcagtgagctagcagcagagaagccttcctggaaaaggtccctccttgtggtccatttctgggcaccatgggctccacagtgt

SEQ ID NO: 155201 - DNA, 134 bp, Homo sapiens
agggcggagaggagcggccggagtcagcgatggtgcccggcgaggagaaccaactggtcccgaaagagccaaaagaatgcaatggtgtaaagattccagttgatgccagtaaacctaatccaaatgatgtggag

SEQ ID NO: 155202 - DNA, 75 bp, Homo sapiens
cccaaaggtaaagacactcaaggacagacatttttggcagaggttacactcctcttcctgggtccaattattcag

SEQ ID NO: 155203 - DNA, 51 bp, Homo sapiens
cctgacccactggaagataaacaggtggacccccaaaagtacaagggcata

SEQ ID NO: 155204 - DNA, 75 bp, Homo sapiens
agaccttcaacttgatcccggctgttggttccaagttccccatcaagtggacagccccagaagctgccctctttg

SEQ ID NO: 155205 - DNA, 53 bp, Homo sapiens
gggccgggcccagtcaccgaccgtccagaatatcagcctccgggaaggggaga

SEQ ID NO: 155206 - DNA, 89 bp, Homo sapiens
ggagactctccctggaaaacttcccttccctttcgcaattaatggatgcctcgaagttgacgtacatatatattcagaaatgttttgcc

SEQ ID NO: 155207 - DNA, 50 bp, Homo sapiens
cccgcgccggaagagccacgccggcgtcgaccagaagattatgatattca

SEQ ID NO: 155208 - DNA, 75 bp, Homo sapiens
ctccctacccatccgccaggagccctcttccttcagcccgcggcgccatggctcacgtcggctcccgcaagcgct

SEQ ID NO: 155209 - DNA, 99 bp, Homo sapiens
cttgaggttggtgaaggtgaacaggtgaccataactctgccaaatatagaaattacctaggaacagtacgatttggggttatcacaaataaacatcttg

SEQ ID NO: 155210 - DNA, 90 bp, Homo sapiens
gacctgtgaagcaactgaagaaaatgtttgaagcaacaagattgcttgcaacaattgttatgcttgccgaggttgataaaaacatagaac

SEQ ID NO: 155211 - DNA, 82 bp, Homo sapiens
cgccgaggcaccgaggcactcagaggagattgagatggccatcctgcggttcccttacgagtcctgggggaccccgttccag

SEQ ID NO: 155212 - DNA, 100 bp, Homo sapiens
cgctggacaagcacgagggcgcgctcgagacgctcctgagatcttactgtgccgagatcgctcacaatgtttcctccaagaaccgcaaagccatcgtgga

SEQ ID NO: 155213 - DNA, 100 bp, Homo sapiens
tcatcttccagatgtgcaggctgaaatatttatggatgaaattgtcagatgcctagcatttgctccatgataatctgagtacaaaattggacagctgtac

SEQ ID NO: 155214 - DNA, 76 bp, Homo sapiens
ccttcaccttccttcatgatggaagccagcagacctgcagaacttggctcccgggacccacccaccatttataact

SEQ ID NO: 155215 - DNA, 100 bp, Homo sapiens
aaataatgaagaagaatctttttggctgttagatgctcttgttggaagaatactaccagggcggcgactggcggcgcgatggacctgaccgggctcctgc

SEQ ID NO: 155216 - DNA, 88 bp, Homo sapiens
ggcagtcggcggagcttcgccaaggctggcgcagtcggtgaaatgacaatggatgctctgttggctcgattgaaacttctgaatccag

SEQ ID NO: 155217 - DNA, 100 bp, Homo sapiens
tcatcccatgaagtcctccagccattgctaaggtacatgtgaagattttttggcagcttagcgtggaaaccattgatcaccctgctctcatttctacctg

SEQ ID NO: 155218 - DNA, 75 bp, Homo sapiens
ctgcagtgccaaatgtgtgacccagctcgggttcatgacgctctcgatattcctgtgcagaaacctggaccacgt

SEQ ID NO: 155219 - DNA, 83 bp, Homo sapiens
tgcccacttgctggtcttcacagagcacgctgaaagtgattgtagagaaggctccaaaagccagggtgcctgatctggacaag

SEQ ID NO: 155220 - DNA, 100 bp, Homo sapiens
tacccgtccatcatagtcaactgcgtggaagagaaggtcaaactgtgctgaaaatatccgcaaacacattctgcatactggcaaacatgaaggagtcaag

SEQ ID NO: 155221 - DNA, 75 bp, Homo sapiens
actgcccatgctgggccggcgccctggggccccggagagaaatgtgaacataatttgagcaagccagaatttaac

SEQ ID NO: 155222 - DNA, 75 bp, Homo sapiens
ctggagagaaatcctacaagtgtgaagcagcaaacccctctgcatgtagctgctgatcgtggaaatgtggaactg

SEQ ID NO: 155223 - DNA, 102 bp, Homo sapiens
ctccggccgcctggctccccatactagtcgccgagttgctggagaatgtaaccctaatccataaaccagtgtcgttgcaaccccgtgggctgatcaataaag

SEQ ID NO: 155224 - DNA, 75 bp, Homo sapiens
gaagaagatgaagaggaactttttaaaatatcccagaaattatccatttctgctgtgatttcctcatgtcctggg

SEQ ID NO: 155225 - DNA, 75 bp, Homo sapiens
ggagtgagaagcaagaaggccctggacacagcaatatctctgggctttcacagaggtgctgatactcaaagaagg

SEQ ID NO: 155226 - DNA, 74 bp, Homo sapiens
caggatttacacagacgtggggcgatgcttgtgaccctgcagctcctcaaactcatgttttttggctagaccta

SEQ ID NO: 155227 - DNA, 102 bp, Homo sapiens
tcgcagtggtcgcttcttctccttggatcccagctggctactgctttgtagaatttgcagatttggccacagctgagaagtgtttgcataaaattaatggga

SEQ ID NO: 155228 - DNA, 50 bp, Homo sapiens
caaggactcaccccgtttccggagatgcttttgacaagttataataaggg

SEQ ID NO: 155229 - DNA, 74 bp, Homo sapiens
tccgtgtcaccgccggaacctggcgcagctattgtggacgatgaaaggctctctgcagaggagatggatgagag

SEQ ID NO: 155230 - DNA, 100 bp, Homo sapiens
ctgaagagccagaccctcctccagaaccgatgagtgaggagaacatagataccctggagcgaatagccgggctggaacaggaggacttggtggaggcgca

SEQ ID NO: 155231 - DNA, 97 bp, Homo sapiens
tgagctcagctccccagtggtggtgttcagatttttccaggaattaccaggctcagctcgcatgtggaagactctcaccttcttcgtcgcgctcccc

SEQ ID NO: 155232 - DNA, 82 bp, Homo sapiens
gcgaagtcatggggctctgtcgggaaggattttttatcaagcagaaatgcatcgaacaacgagaatcaagatcactgagcta

SEQ ID NO: 155233 - DNA, 115 bp, Homo sapiens
gtgcatgatgttcagcgccaccctgagcaaggacatccggcctgtgtgcaggaagttcatgcaggatgatggcacatttcctagaggcagaatcctacaacttccactccaagtg

SEQ ID NO: 155234 - DNA, 100 bp, Homo sapiens
tggataccaaggaagagaagaaggaacggaaacaaagttattttgctcgattcccagaaaatctaagctggcagttcataggaatatcagagacgacgaa

SEQ ID NO: 155235 - DNA, 75 bp, Homo sapiens
aaactgtccaaggctttggcaatcgtctggggaatatttttcatcttagttgcattgctgtttgtaatttctctc

SEQ ID NO: 155236 - DNA, 50 bp, Homo sapiens
cgagaagcggccgagccagcagcagcatatatagcagtgacgaggatgat

SEQ ID NO: 155237 - DNA, 74 bp, Homo sapiens
cagggatgaacctcgagttgctgggaactactataatgtctccagggatcctgtggtcatcaacaaagtcttca

SEQ ID NO: 155238 - DNA, 82 bp, Homo sapiens
ttgccctggtcttgctcggccgatgaagtgcagaggtttttttctgacatctttccaggaacagcgtgaggaggacagaagc

SEQ ID NO: 155239 - DNA, 75 bp, Homo sapiens
tccccgggacccgcctgctgagtggacccgggtggaaagattttcaagggagcaaacttaaagtctcccttgctc

SEQ ID NO: 155240 - DNA, 90 bp, Homo sapiens
agtaccagcgatggcaacggcaagcatccaagccaggtctaaactgcagtaatccatttactcagctggagaggagacatcaagaacatg

SEQ ID NO: 155241 - DNA, 99 bp, Homo sapiens
caactaactgatgctgacaccaaagttttcataccttggtcctgaccctgtccataagctgctcacactggtggtggatgatggcattcaacctcctgt

SEQ ID NO: 155242 - DNA, 100 bp, Homo sapiens
gtgtttgatgtccggctgagtgggaagaccaagacagtgcctggataccttcgaataggtaggtgacctcacagtgactcaagctaccacttactgttga

SEQ ID NO: 155243 - DNA, 74 bp, Homo sapiens
gtgaaacaccactgaagcattgccaaggtccctcgtctgagctggctcactcgcccaccaacagcgggaagaag

SEQ ID NO: 155244 - DNA, 88 bp, Homo sapiens
tttcagtgagtcatcgctgacagctgaggaagtctgcatccacattgcacataaagttgtgaacgacctgaagaatgcagccccctgt

SEQ ID NO: 155245 - DNA, 100 bp, Homo sapiens
ccagctcctaccagaggacctcagaaaggagctctatgaactttgggaagtcttcaaagcttcacctttctccaaaggcagatgtgaagaacttgatgtc

SEQ ID NO: 155246 - DNA, 90 bp, Homo sapiens
ctgatttagaaggaggttcaggctacggtgagccgaagagagattaacaagcggatcacagaggagcaagcccgcaaagccttcgacaga

SEQ ID NO: 155247 - DNA, 89 bp, Homo sapiens
ggttcagagaagattcttcatgggaaatcaagttctaaaggtctttgcagcaagagatgatgaggcatccgagatgtttccaaatggag

SEQ ID NO: 155248 - DNA, 100 bp, Homo sapiens
ctccatgctgctcactagaaaaggggctgtgaactataaactcatcctgaaagtcgctgttgttctcctgctgagcaagaatggaggccccactggtgag

SEQ ID NO: 155249 - DNA, 96 bp, Homo sapiens
ctgacagagatgccctttccaaaccagacccctgtgtcatcctcaagatgcagtctcatgggcagtggtttgaggacagcctcgggggtaacagca

SEQ ID NO: 155250 - DNA, 75 bp, Homo sapiens
atgtggacagctacaccgagtcgtccgaggttatgcgtctcaatgatcccgcggaaacgctacgggtctaagaac

SEQ ID NO: 155251 - DNA, 101 bp, Homo sapiens
gatctgacgaactactctcaggcagtgttctcagtagtccgaactctaatatgagcagcatggtagttacaggattttggccccaaacagtaattatcaag

SEQ ID NO: 155252 - DNA, 100 bp, Homo sapiens
cagttgctgtacgagagcaagctctataagattcttcaaggtggggttggcatcccccacatacgcttaataccaaaacatccccagcaaccaaccaggc

SEQ ID NO: 155253 - DNA, 98 bp, Homo sapiens
gcacagctaagatgccaggacatcctggaagctgggaaaagacaaagatcattccactcagcctgggacgatggggaggaaaaaaatccagatctccc

SEQ ID NO: 155254 - DNA, 88 bp, Homo sapiens
aggagttcgtctcttacgtctgcggaagtgcagctgcctcagttcttagcgcagagaagctgatcgtcgaagggcatctaaccaaagc

SEQ ID NO: 155255 - DNA, 80 bp, Homo sapiens
ggcggcgtctgcccagggcagggctcctaaggaaggacccgcctttaggtgatctttagacagtgactgagtatggatca

SEQ ID NO: 155256 - DNA, 100 bp, Homo sapiens
ccacaaacaaactacccattttcttttttggaactcatgagacggaaaccatctgccgtgtgactggtgggatgaaggtaaaggcagaccgagatgaatc

SEQ ID NO: 155257 - DNA, 88 bp, Homo sapiens
aaggaagcaagcagttcagaagagccaaggaataaacatgcaatgaacccaaaagggtcactctacatgacatgatcctgaaaaatat

SEQ ID NO: 155258 - DNA, 50 bp, Homo sapiens
ggctaaatggctccctgattcatgcttttcatgcaacacccaacacttat

SEQ ID NO: 155259 - DNA, 75 bp, Homo sapiens
caaaacctattacgaactcaaaagtcaaccgctgaagagcagggctacaggggaagaattgaaagtgaaggcata

SEQ ID NO: 155260 - DNA, 50 bp, Homo sapiens
agcggactcttcttcgccttcgacgaggatgccatgaggaaagctggtgt

SEQ ID NO: 155261 - DNA, 101 bp, Homo sapiens
tgctgctttcctctttggtgccgcgaagtagaaatcgggataagggttgtcatggccggagggagcgaagagaatccaggaactttatattgctgttggaa

SEQ ID NO: 155262 - DNA, 109 bp, Homo sapiens
gtctcaatatctgtcttcggtggactccttcggcagtccacccaccgccgccgcctcccagtcaggatggctaaaggtgaccccaagaaaccaaagggcaagatgtccg

SEQ ID NO: 155263 - DNA, 82 bp, Homo sapiens
ccgacgatggagggagacgtgctggacacactggaggcgctgggaggctgacccgcggctgattgagtccctctcccagatg

SEQ ID NO: 155264 - DNA, 82 bp, Homo sapiens
cgggaggccgccggttttctccccgcttgccggggtggtcctcttccctttgtcgtcctcctgcatatgcccaagaggattg

SEQ ID NO: 155265 - DNA, 82 bp, Homo sapiens
ggccaagtccttcgaggcaccaataaaatcctccactgagcttcagcaagtcatcctgatctccgtgggaacattttcgttg

SEQ ID NO: 155266 - DNA, 109 bp, Homo sapiens
atcgctgcaacctttagactaatgactgtccgaaacatcgcctccatctgtaatatgactgggactcttcaattaatctgacatttcacaaatccaaaattgccgtgga

SEQ ID NO: 155267 - DNA, 51 bp, Homo sapiens
cctcgagggagacatcaggctgggtagcatcacgcagattgccatctcaga

SEQ ID NO: 155268 - DNA, 83 bp, Homo sapiens
ttcatatcctgctggtttaacagtgagctcacccatggatgaggtgctagcctccttgaagcgtggtagttttcatctgaaaa

SEQ ID NO: 155269 - DNA, 50 bp, Homo sapiens
ctctgggccaggacgccgaggagcgcaccttttgacaagacagccaacat

SEQ ID NO: 155270 - DNA, 75 bp, Homo sapiens
gaagcagcaatccggtgtctcctggaagccagaggagctccccccacccgctgcctgcggttttgtttctgttaa

SEQ ID NO: 155271 - DNA, 97 bp, Homo sapiens
agaagactggaaaattataagagcactctctgagctggtggagccgctgacacctagcggagcgatgcccaaccaggcgcagatgcggatcctgaaa

SEQ ID NO: 155272 - DNA, 82 bp, Homo sapiens
caggactccaaaatggcgtcagttggtgagtgtccggccccaggatttaagaggggtgcagatcccggaatgcctgaaccaa

SEQ ID NO: 155273 - DNA, 75 bp, Homo sapiens
cctggatccaggataacggaggctgggtggctttgcagatcgctcctccatgtaccagtgagaagcattatgagc

SEQ ID NO: 155274 - DNA, 75 bp, Homo sapiens
ccacgcgccccgcgcggcccgcccggatcgtggcctctcgagagcaagacaatgcagatcttcgtgaagactctg

SEQ ID NO: 155275 - DNA, 134 bp, Homo sapiens
gaccggttgctcattttctggtctgaccggcggaacccccacgaggtgaagccagcctatgccaccagcttccacagcgcggcacctgtacctccggggtggcgctggggttggctccatgaccaagatctatg

SEQ ID NO: 155276 - DNA, 50 bp, Homo sapiens
ggatgcacagccccggcgctgcctcctgacaaggtgatccgggcgggccc

SEQ ID NO: 155277 - DNA, 76 bp, Homo sapiens
gccggcaggcctggacttccagtgctcagagggcggggagaatctcaggttccaagttccccatcaagtggacagc

SEQ ID NO: 155278 - DNA, 88 bp, Homo sapiens
gcgaggttcgagtgttgcagagcctgcggggcaagatctgtgtggatgaggtcaccattgtcaacattttgaccaaccgcagcaatgc

SEQ ID NO: 155279 - DNA, 100 bp, Homo sapiens
agacatacagtttactaaaacacatcatgaaggcctgttttgaagagaaggggaataagactgcatctgttcatatgagactgccaatctggctgaagcc

SEQ ID NO: 155280 - DNA, 100 bp, Homo sapiens
ggatcactggattgctgacggcagccctctcagggaactctaatgatccaggacaaagaagttaccctggagtatgtatcaagcctggatttttggtact

SEQ ID NO: 155281 - DNA, 100 bp, Homo sapiens
atggaaattggactaaattaccagaatgcaggggtgtgatccctcacatccacaaatctctgattggaaagaagggacagcagaaaactgcttagaggga

SEQ ID NO: 155282 - DNA, 100 bp, Homo sapiens
ctttaagggctacgggaagatcctggaggtggatctgaagaacggaatcatattctaagaactcagccactcaggtatccaccatggtgctgggtcctga

SEQ ID NO: 155283 - DNA, 50 bp, Homo sapiens
cagattttgaagctaaagttaagcagatgccaattctcggaagcaagaag

SEQ ID NO: 155284 - DNA, 82 bp, Homo sapiens
gattttgcacaactgcatcatttataatgggggctgcatagagcctggacctgggcactggggtgagctgagccggacacca

SEQ ID NO: 155285 - DNA, 82 bp, Homo sapiens
cgcacagccaggacatcctggaacctgggaaagggagtggagtcaacatatcaatggagcaagtcacagtcgtcgatgccag

SEQ ID NO: 155286 - DNA, 90 bp, Homo sapiens
gcaccgcagatgttgtcaaggtggcctaccaggaggccaggggtgtcgccatggtgattgcccacagtgagtatcaaaagtccaaaagaa

SEQ ID NO: 155287 - DNA, 82 bp, Homo sapiens
agtcaggcagatgtttgtcgactggaatggacattccactgcccttctcccaaaaagatgtcttttcgaaaaatggatccca

SEQ ID NO: 155288 - DNA, 100 bp, Homo sapiens
gtttggatttgggaaagtaaaatcaagacaaggtgttggtgctggagaatctggtaaaagcaccattgtgaagcagatgaggatcctgcatgttaatggg

SEQ ID NO: 155289 - DNA, 82 bp, Homo sapiens
gggcaaggaaagcagcatagagaatgagatagccgtcctgagaaagtctctaattaacagaagatggcaaagcccagccaca

SEQ ID NO: 155290 - DNA, 83 bp, Homo sapiens
gttggatttggggctatagaaaagacggcatctgctacctttgagagtgccaggtgcactttacaggtccccgatgaaccaag

SEQ ID NO: 155291 - DNA, 100 bp, Homo sapiens
catctgtgtgggttggctgtatctcagggacagagtctgcagcaaaaaaggaattgaatgatctggcacgggaccctccagcacagtgttcagcaggtcc

SEQ ID NO: 155292 - DNA, 100 bp, Homo sapiens
ctcgtcctgcccggcctgagcgccccgcccagcagccggctctggcccaccggggtccgggagacatagggcctgattacattccaacagaggaagaaag

SEQ ID NO: 155293 - DNA, 82 bp, Homo sapiens
gcccgaccccgtcccgaccctggccgccccgagcggagcctggaggctgaccccgcactacatctacccaccagccatcgtg

SEQ ID NO: 155294 - DNA, 104 bp, Homo sapiens
cgcttgaaaagactgggcttgtccttgctggtgcatgcgtcgtcggcctctgggcagcagaccactctgcttcatttttgggagaaaacttctcacactatggc

SEQ ID NO: 155295 - DNA, 98 bp, Homo sapiens
cgtgattcccgtgattgcgttacaagctttgtctccttcgacttggagtctttgtccaggacgaatatgcttttaaggctattaaccagggtggcctt

SEQ ID NO: 155296 - DNA, 75 bp, Homo sapiens
aaggcagagagcagagacatcccgatctggggaaactgtgccctgtccacggtgcctcctgcatgtcctgctgcc

SEQ ID NO: 155297 - DNA, 100 bp, Homo sapiens
tgctgcagaagacacatgtgatgtaggcgtgagctccgatgatgacaagggggcccaggcagcacggtgcacaaaaagctttaaacaagttaaaatctag

SEQ ID NO: 155298 - DNA, 100 bp, Homo sapiens
ctggcattgaatgatttatagctaagactccaggacacccctgaagccgagaaatgtgagatggaagattttcgaggtatagcagaagaatcatttccaa

SEQ ID NO: 155299 - DNA, 100 bp, Homo sapiens
atctcctcctccactgccactacagggaagtgcatcacatgtcaggagagccggacagggcagcggccggcactaccgcgctgcgatttgcgcagagctg

SEQ ID NO: 155300 - DNA, 75 bp, Homo sapiens
taggcattctgatgggaacttgtgtgttaaagtaacagatgatttagttgattctttctactaatccagatactt

SEQ ID NO: 155301 - DNA, 50 bp, Homo sapiens
cgcagatatagaacatttcttttatcacatactatactggcaattgctgg

SEQ ID NO: 155302 - DNA, 80 bp, Homo sapiens
cctggaagttggaggaggggagtcattcctagcagaggaaatagcacacgttcaccctgatatgtatgagagagcagtgc

SEQ ID NO: 155303 - DNA, 75 bp, Homo sapiens
ttggagtctggacatctgaaacttgtcccaggacatcaaagctctgcagaaagaactcgagcaatttgccaagct

SEQ ID NO: 155304 - DNA, 89 bp, Homo sapiens
ttcactgagggatgacctaataatgttggattttggtgaaaaaaggctgggatatgaagaacaacagcctgaggttccaattctttatc

SEQ ID NO: 155305 - DNA, 89 bp, Homo sapiens
gcggcgagcgcggtcgagatcgccatgcctacccgtgagccgttctccaaccctttggcccccgatggccacgatgtggatgatcctca

SEQ ID NO: 155306 - DNA, 98 bp, Homo sapiens
tgaagaagaacctgcgagccgacaacgccttcatgctgctcacgcaggcgaacctcttcccggccgctctggtgcacttgggagccgaggagccggca

SEQ ID NO: 155307 - DNA, 74 bp, Homo sapiens
gcctcagacgcggtggagccgccggagtctgagaaggcatcgttggcttcacagtatgactgatgatcctccaa

SEQ ID NO: 155308 - DNA, 98 bp, Homo sapiens
cggatttgctgccatgaaggatgttcgtactggaagtcatgaggacaggtctcatcctcgtactgggtctgtccagacaagcccatcaagtactccag

SEQ ID NO: 155309 - DNA, 98 bp, Homo sapiens
ccatggtcaaccccaccgtgttcttcgacattgccgtcgacggcgagcccttgggccgcgtctcctttgagcttgtattggttggtgatggtggtact

SEQ ID NO: 155310 - DNA, 80 bp, Homo sapiens
agggcctggactgggacctcatggtggatgaggtgaactggtctcactggaaccagaacttgggcatcatcaacgaggac

SEQ ID NO: 155311 - DNA, 90 bp, Homo sapiens
gtaactggagccgtagcgtcggtgctggaagacgaggccacagacacttctgatagtgaaggtctcctctgagcctccggcctccataag

SEQ ID NO: 155312 - DNA, 50 bp, Homo sapiens
cttttccacagggaattgagttggattggacaactgaatttaaaggcaag

SEQ ID NO: 155313 - DNA, 100 bp, Homo sapiens
aggttatcgttctgaaatcacatactgccggaggaactttcttaatagaacatcactgttaaccctagaggacaatctctatgggaagcagaaggcaagg

SEQ ID NO: 155314 - DNA, 95 bp, Homo sapiens
aggttctgcttacccgaggccgctgctgtgcggagacccccgggtgaagccaccgtcatcatgtctgaccagaatgccagaggattcaacatgag

SEQ ID NO: 155315 - DNA, 82 bp, Homo sapiens
gttcggttcccacaacagcctgggaaatcctcattgacgattcaatttgttgaaggccaatttgtggactcctacgatccaa

SEQ ID NO: 155316 - DNA, 80 bp, Homo sapiens
cgcgctcccgcggagccggagccgcagaggctcccgggctggactcaggcttctcaggctgaccaactgactgaagagca

SEQ ID NO: 155317 - DNA, 98 bp, Homo sapiens
ccctacccatgaggccctgatggaaaacacaaaggatctgttcttggccaggctgactgagagatttgtgctgggagtggatatgttcgtggagacac

SEQ ID NO: 155318 - DNA, 97 bp, Homo sapiens
ttctaaaggtctttgcagcaagagatgatgaggtatgagttaatacagaaaggagtgactgaacttagaactgttgggaatgttccagatgtctaca

SEQ ID NO: 155319 - DNA, 90 bp, Homo sapiens
gctactcgcgcttttcgccgtcgccgctctccatcaaacaattcctggacttcgatcgtaaagctgaaaattgaaatcatgaaagtagac

SEQ ID NO: 155320 - DNA, 100 bp, Homo sapiens
gatcgagaccatcctggccaacatgggaaattggattccaagatccatcaaggagcaaagaaggggttaatgaagcagaataaagctgtctgacccagga

SEQ ID NO: 155321 - DNA, 98 bp, Homo sapiens
cagaacatcgtcttctaaagcctcactatccagggtatgggatgatgggatcattgatccagcagacaccagactggtcttgggtctcagttttagtg

SEQ ID NO: 155322 - DNA, 83 bp, Homo sapiens
ctacaactggcttagactcaagcacagcaaatgctgtccttttgctcctgaaaagggcagctgcaatgactctccgcacggta

SEQ ID NO: 155323 - DNA, 100 bp, Homo sapiens
ggagcccctcctttggtgacccacagctatcccctgaggcccgacccaggctttgaagacaagattcccaaaaggagattctctgagatgcaaaatgaaa

SEQ ID NO: 155324 - DNA, 100 bp, Homo sapiens
gatgaacaacggcggcaaagccgagaaggagaacaccccgagcgaggccaaccttcaggaggaggagaggaagaaatcctacttagcgacatgaacaaac

SEQ ID NO: 155325 - DNA, 98 bp, Homo sapiens
aaggcccccggtctctggaggggagcaggcggtagcgagtttagtgacgtggagcaggcgcagaacagtcggagcaccctggaggagaagaggttctg

SEQ ID NO: 155326 - DNA, 82 bp, Homo sapiens
aagcagattttgaaaccgatgagaagattgtaaaatgtaccgagactggtattgctcgagttccacttgctggagctgccgg

SEQ ID NO: 155327 - DNA, 75 bp, Homo sapiens
caacaagatgttgtcctgtgctggggctgacagggagtgcctgcagggcaccatccgcaacagccaggaggcgga

SEQ ID NO: 155328 - DNA, 96 bp, Homo sapiens
tctggaatcctatcctactctggcagcccatcccggtgcacacagttcctctttctgaagatcagcttccaatcagaagactatacaacctcctag

SEQ ID NO: 155329 - DNA, 83 bp, Homo sapiens
gaggtggttatactggaagaatcggacccaagaacagaacattctagtatgccagtagaaaaaaatatcactttagaaaggcc

SEQ ID NO: 155330 - DNA, 100 bp, Homo sapiens
caagaaccattggtggagatagaagaccgcaacagatgaccaaggaagtttgggattatgttttcttcaaggaggctccatttcctaagactcagattgc

SEQ ID NO: 155331 - DNA, 90 bp, Homo sapiens
gcggcacctacggggacgtctataaggaatgctttcaattcatactgccagctctacctcatgccattgaccttttacgtgatgccattg

SEQ ID NO: 155332 - DNA, 100 bp, Homo sapiens
gaccacttctctgtcgacggctatgacagttctgtgtgggcgaaatgctgaaaacttcgaccgatttttcacccgccatccaccagtcctaacacctccc

SEQ ID NO: 155333 - DNA, 108 bp, Homo sapiens
gactaaggccaccatgaatgccatccgggaagagcgggaccggctccggaggagggatccagtttatggaaaaggaaaacttggagaaatccagggacttatcttggg

SEQ ID NO: 155334 - DNA, 82 bp, Homo sapiens
aactacctgctaaccaccgccgagaacgagctgggagtggtggtagcccacagtgagtcagtggtctggaactgaaagtgat

SEQ ID NO: 155335 - DNA, 75 bp, Homo sapiens
cacttcaggtggcttttgtggaggccacacgtgtctacacttagcctctatccatggctacctgggcatcgtgga

SEQ ID NO: 155336 - DNA, 88 bp, Homo sapiens
agaaataaggacaaaagccaagaggaggacagttcgctacacagcaatgcatcgaggtctttgggctgcctctgcccttcgtagattc

SEQ ID NO: 155337 - DNA, 95 bp, Homo sapiens
caaactttgtgattcaggagaactggtcgccatcaagaaagtattgcaggacaagagatttaaggaaaatcctgccttgcttcgttgggcctatg

SEQ ID NO: 155338 - DNA, 51 bp, Homo sapiens
ctggtttatggagcaatttctgtttcaccaaaactcatgccaatgcagcag

SEQ ID NO: 155339 - DNA, 74 bp, Homo sapiens
gaaacccaccagagatgctgcgtgcttctgcccacctcctcgtgtcaaaggccactactacgtgcccctcctga

SEQ ID NO: 155340 - DNA, 100 bp, Homo sapiens
cgccgcccgccgggaggaccgagcctaagagggcagccgcctgaaggaacgcgacggcggcgcccgcaggacttaaagagagatctacttcagagccagc

SEQ ID NO: 155341 - DNA, 100 bp, Homo sapiens
taggaaccttggcttccccatgcttgcccagattacattcagatattttggcagagacttcttcaatcctcttgtacctttttcttagaaatatttttgt

SEQ ID NO: 155342 - DNA, 100 bp, Homo sapiens
cagctcaggacacacagacccagctggaactcgctcctcagaagaaatatcacgttaccaagaaatgattcagaaacttcaaaatgtattggagtctgag

SEQ ID NO: 155343 - DNA, 101 bp, Homo sapiens
gactccccggctcgaagcctggatgaaatagatctctcggctctgagggatatgttcaaggaatgagtgatttactttcccctcttttatatgtgatggaa

SEQ ID NO: 155344 - DNA, 100 bp, Homo sapiens
agacgaggcccgcagggacatggccggggacacccagtggtccagttctgggaggtgatcagtgatgaacatggcatcgaccccaccggcacctaccacg

SEQ ID NO: 155345 - DNA, 80 bp, Homo sapiens
ccgcgccagcctcctcactggcctgccccagcccacagatgacatagtgctaatggcccaagctttagagaaaatttttc

SEQ ID NO: 155346 - DNA, 82 bp, Homo sapiens
gcatctgtgtggtatggcaacaggagactgacaaggcgtggcatgggggatgtctggcgctggcagagctgggcaggagagg

SEQ ID NO: 155347 - DNA, 100 bp, Homo sapiens
tctggagtctctgacagacaaatctaagcacctgtggccttgccgaagaactggaaaaagagaagtcaagggaacagatgagctcccaacccaagtcagc

SEQ ID NO: 155348 - DNA, 129 bp, Homo sapiens
tccgctcgagaatctgaaggtgccctggtcctggaggagttccgtcccagcccgcggtctcccggtcacaccgacaaatctgaagcgggtttgccaggggagtgtacccgtctccccagcctgggccac

SEQ ID NO: 155349 - DNA, 82 bp, Homo sapiens
cgcagcctcttcgagcgccgcggacgcgtcatcgagtgtgacgtggtgaaaggttgtgaccgagattcccgacgagagagac

SEQ ID NO: 155350 - DNA, 75 bp, Homo sapiens
gtgctgctgcagcttcccgagacatcaccttgtgccgcagaatggaattcggcattgttcctacacagcttctcg

SEQ ID NO: 155351 - DNA, 101 bp, Homo sapiens
ctatggcatccccccagatgaaatggatgagttcggtctctgcaagtcgttccccatcaggaagtcctcgcagaagtgcaagtcctgaaagaatggactga

SEQ ID NO: 155352 - DNA, 75 bp, Homo sapiens
gtcgatccagctgccagcgcagccgccagcgccgggtcttccccagggaggtcctgaactacacagctgagaaca

SEQ ID NO: 155353 - DNA, 80 bp, Homo sapiens
atgtaagacaggaaaataattaaatattcttaccgaggttttatgacttacctagtggagcctttatttacagaatgggc

SEQ ID NO: 155354 - DNA, 100 bp, Homo sapiens
ccgggatcgtgaccgagaccgtgaccgagagcgtgaccgagagcgcgaatatcgtcatcgttagaagaggctgacccgcggctgattgagtccctctccc

SEQ ID NO: 155355 - DNA, 95 bp, Homo sapiens
gcagtgctgccaacgccccggtggagaagctgagggaccctaacctccaaaagaggtacccattggcgctcaaccgaattgctgctcaggaggtc

SEQ ID NO: 155356 - DNA, 90 bp, Homo sapiens
ggcagttgcaaaatattcaggagaccgtcgttgccttgtatttccagagaacaggtgaagctttgttctaagaatatttgtttcatctag

SEQ ID NO: 155357 - DNA, 75 bp, Homo sapiens
gcgccaccctctcttgctttggttccgccatgccgatgtaccagcctagatattatcctactgaagatgtgcctc

SEQ ID NO: 155358 - DNA, 50 bp, Homo sapiens
gaaaattagattacagatctgttttggagtccagaacatgtaaagttttt

SEQ ID NO: 155359 - DNA, 100 bp, Homo sapiens
gagctggccctggccggcatcaacatgctgctcaacaacggcttcagggagtcggaccagcttttcaaacaatacaggaacaagcacatcatgattgact

SEQ ID NO: 155360 - DNA, 75 bp, Homo sapiens
gattggattgaggttcagatcaacaacgaggaaatatttccaacatgcgtggttgctgttgctgatgcaaagaag

SEQ ID NO: 155361 - DNA, 100 bp, Homo sapiens
gaaacaaatactatgaagacaacaagcaattttttgaaatttggagacagacaacttgtcacgcatacagggaaaatgacatttgaagacaaagtcagac

SEQ ID NO: 155362 - DNA, 96 bp, Homo sapiens
aaagagggtggagagctactcaaaattctacgttagagagactgaaaagacatctaatttcattgctcggcagctgaattcttgccgccaggatgg

SEQ ID NO: 155363 - DNA, 75 bp, Homo sapiens
cttctttacatcaaccatttatttcaagctctctgatgtaaaggatggagtaaatcaagcagcacctgcatttgg

SEQ ID NO: 155364 - DNA, 100 bp, Homo sapiens
aaaaaacaggctgctgtccagtgtcttcgatctgcttctgatgaactatgaagtcttacactccatatttcattctcctgtggagtgctgttgggatagc

SEQ ID NO: 155365 - DNA, 100 bp, Homo sapiens
cgcggcctacgtgaacaacctgaacgtcaccgaggagaagtaccaggaggcgttggccaaggcaccgacagtaaatggttcacggccgacatcatgtcca

SEQ ID NO: 155366 - DNA, 101 bp, Homo sapiens
gcccctattatggagaaaggtgttccctagatatagccagtaccaacgtatgctgagcacgctgtctcaatgtgaattttcaatgggcaaaactttactag

SEQ ID NO: 155367 - DNA, 75 bp, Homo sapiens
cagaaagcaatgataattcccaggacagtcagtctggtactaacaatgcagtaatgacgcggcacagtcagatga

SEQ ID NO: 155368 - DNA, 78 bp, Homo sapiens
ggaagaacagctgcataatgaaatgcagttaaaagatgaaatggagcagaagtgcagccccagacactacagctggat

SEQ ID NO: 155369 - DNA, 96 bp, Homo sapiens
tctccatgaaatggtacacgcagaacatggtgtcatggagaaactccagctgggcccagagattctgcagcgggaaaatccaaggcttatttatgc

SEQ ID NO: 155370 - DNA, 87 bp, Homo sapiens
catggggcccaagaaaaagcacctggactgaggagacatcacagctttcccagatcgggaggaaaaatatggaatgtgttttaccgc

SEQ ID NO: 155371 - DNA, 75 bp, Homo sapiens
gggcagccgggggacagctgtagtgaagatgtctttggtggacttgggaaagaggttgctagaagcagcaagaaa

SEQ ID NO: 155372 - DNA, 100 bp, Homo sapiens
cactccccagggcagaaatagcgaccatggcgagggttcatagtggcgtcatgcacgcagactcctgcaagttcccctaagttcttagaggactgctttg

SEQ ID NO: 155373 - DNA, 90 bp, Homo sapiens
ggttgttatctgcaggtgtggcaggttgcagaggacagtggtgaggtcccagcttgaagagaaagaaaacaagaagttccctgtgtttaa

SEQ ID NO: 155374 - DNA, 74 bp, Homo sapiens
aggatctggggacatcttactggtccatgctactgagactgacaggaaaggtgctggagaatctggtaaaagca

SEQ ID NO: 155375 - DNA, 138 bp, Homo sapiens
ggaccacatcaaagacagctttcacagtttgcgggactcagtcccatcactccaaggagagaagaaaacatgctttaaactgccacagaatgaagcctgccttgtttaatgtgttgtgtgaaatcaaagaaaaaacag

SEQ ID NO: 155376 - DNA, 51 bp, Homo sapiens
gccacctgttcctcagttccaaccacaggaaaaggccaaagttgttgagcc

SEQ ID NO: 155377 - DNA, 98 bp, Homo sapiens
cacgtatcatcaggtctgcaagctgaacagatgctctcacgtgtcatctcttagaggtaagaagagttcctgggtcaagtggtcaccttcataaaacc

SEQ ID NO: 155378 - DNA, 74 bp, Homo sapiens
gttcttcatcggtttcaccgcgctcgttatcatgtggcagaagcactatgatggagtttcactcttgttgccca

SEQ ID NO: 155379 - DNA, 82 bp, Homo sapiens
caaactggagagagaccagacctgcaagctctttgacacacagcagttcttgtcagatgctgtgggccctgagggaaaggat

SEQ ID NO: 155380 - DNA, 130 bp, Homo sapiens
ccagggtccgctgcccccaccgccatcaccacctcggaacccagggtaacgctgtcagtctttggacatggacatcttccagcaacagatctcgagaagacagctggctaaaatccttatttgtccggaa

SEQ ID NO: 155381 - DNA, 96 bp, Homo sapiens
gtgaaattgttaggcgtggagagggagtgatgtcttccagactcggtgctgtacccgcccttcggggagttttgcctggctcacctgttactgaag

SEQ ID NO: 155382 - DNA, 51 bp, Homo sapiens
gggaagagatgcgaggatgacaaggaggagtttgcaaaccaaagctgatca

SEQ ID NO: 155383 - DNA, 82 bp, Homo sapiens
atggcacattacaacttcaagaaaattacggtggtgccgtccgccaagggccacaggagaatggtatgctgctcggcatgga

SEQ ID NO: 155384 - DNA, 90 bp, Homo sapiens
cgtggggatcttggcagcgctgcaggtgaagtacatgcgagaagccacgccctatgtgaagaaaggatccccagtatccgagattgggtg

SEQ ID NO: 155385 - DNA, 74 bp, Homo sapiens
tgatgccgcatacattttcgaagagcccttcgacatcagggatctgcagttcgtaatggacctgaaagtggcag

SEQ ID NO: 155386 - DNA, 99 bp, Homo sapiens
ggttaatgacatagtatctttaaactacacaaaagtggaacagctttgttcaggatgtgaggtctggaacagctgcagccattttgccaccatgggaaa

SEQ ID NO: 155387 - DNA, 50 bp, Homo sapiens
ctctcgagtagctgggattacagtcggatctgctccagtgtctccagtac

SEQ ID NO: 155388 - DNA, 78 bp, Homo sapiens
gcgggccaggagagcgctcggcgggcacttccgttccggcgcccctccggtcatcaacccgctgggcaccagcttccc

SEQ ID NO: 155389 - DNA, 121 bp, Homo sapiens
gaagaaccaggagcggattctccgcgaggtgtgcagagtgctgagaccggtatagcaggctttgtgactgtggtgtcctgtggtctttacaagctaaagtacagaagagatcagaaaatgt

SEQ ID NO: 155390 - DNA, 101 bp, Homo sapiens
ggaaaaaaatttgctggatattgatgcgccagtcactgtggatctcttagagttgagtacaacaaatgaaattttcaaacagcacaagttgaaccaaaatg

SEQ ID NO: 155391 - DNA, 106 bp, Homo sapiens
ccagacagttacaggacaggctaacaccaatggaggctttacttcagacaaggtttttagaacttcagccataaaaatgggcagaattttccttgatcatatcggt

SEQ ID NO: 155392 - DNA, 96 bp, Homo sapiens
gcgcgccgctgctcccggaccgggccgcgcacgccgcctcagacaatgcagatcttcgtgaagactctgactggtaagaccatcaccctcgaggtt

SEQ ID NO: 155393 - DNA, 83 bp, Homo sapiens
ggctgatggcggaggcttcgagtgacccgggtgccgaggagcgggaagagttgctggggcccctgtctcccagcctgatgccc

SEQ ID NO: 155394 - DNA, 75 bp, Homo sapiens
ctctttcaatgacaaaaagtttgtcattaaacccatcgacaagaaggcacctacagagaaagagctggacccaga

SEQ ID NO: 155395 - DNA, 98 bp, Homo sapiens
ccgccgccagggtctgcagggcctgggccgccgctgctacctgcagcgccgtgtggcacgacacaaaaatcaggcaccgcatgcgtggggagaccacc

SEQ ID NO: 155396 - DNA, 74 bp, Homo sapiens
gccaagatggtgctgtcccagagacaacgagatgaactgctaccacatactgttgattgtgatgaaatgccagt

SEQ ID NO: 155397 - DNA, 100 bp, Homo sapiens
cgccgcaagaaagtgtccttcgaggccagcgtggccctgctggaggcctcgctgaggaacgacgccgaggaaggcaatgtctacttcgatctgaagtcta

SEQ ID NO: 155398 - DNA, 73 bp, Homo sapiens
ggagccttcctgtggcaggagagacaacaaagcgctattatcctaaggtgctggctgctgtctacaaggctct

SEQ ID NO: 155399 - DNA, 99 bp, Homo sapiens
gtcatctgatgtggtgcttttgaaccactggaaagtgaggaattttgaagtacaccgtggtgacattgtatcattggttgtggaaaagccactggcagt

SEQ ID NO: 155400 - DNA, 75 bp, Homo sapiens
cagaagcctcctagggttgcaagcctccttggctaatggttgggtcctgacacagctctccctgaggagcagcca

SEQ ID NO: 155401 - DNA, 105 bp, Homo sapiens
ctgtgcagccgcgaggaggcgcgggaggtgttcgagaacgaccccgagacggtgacttaagagattaaaattaatttggttgctgttggttctgaacaaataatg

SEQ ID NO: 155402 - DNA, 88 bp, Homo sapiens
cggcgccggccagaaatccgaccggaccgggctcgggggagcgtgagttgcaggccatttcataattctgaatcatgtctgataacgg

SEQ ID NO: 155403 - DNA, 145 bp, Homo sapiens
ttcacctgaatgacatctacctccatcaggaccccagatgtctgacagccctgtgtgacaccaagataagtaacatcatggaagggaagtggttgctgtgtatgttactggtgcttggaactgctattgttgaggctcatgatgg

SEQ ID NO: 155404 - DNA, 100 bp, Homo sapiens
tcagatgtggtggaatatgccaaggaaaaactggagagcttcatcaaaaatagtgatagctttgataactcctcttttgacttggactatgactttcaac

SEQ ID NO: 155405 - DNA, 100 bp, Homo sapiens
tccgtttcattattatggtaacaatatggagtgctgtattcctaaactaatacagattctgttcatcttgctctgaaattaaataattctgaactcatgg

SEQ ID NO: 155406 - DNA, 76 bp, Homo sapiens
aggaggacccagccccgagccggaagatccatttcagcacggcgcccatccaagatgaaaactttgacctgtcaaa

SEQ ID NO: 155407 - DNA, 98 bp, Homo sapiens
tacaccctctcggttttctctgctctgccaacactagtggaatatgatcacatcccagaactgagtccaggaacacctgccttgttcagtgaagccgc

SEQ ID NO: 155408 - DNA, 100 bp, Homo sapiens
tgagcagtttgaagacttgctagttaggattttattactggcagcatgtatatcttttggccatccaggagagcctcctcaccagcacagaaggcctgtg

SEQ ID NO: 155409 - DNA, 98 bp, Homo sapiens
tcagcttctttctcacacgcagatgaacactggacttcagaaatgtgctggagaatctggtaaaagcaccattgtgaagcagatgaggatcctgcatg

SEQ ID NO: 155410 - DNA, 75 bp, Homo sapiens
cctggacagaggcctgtgaacagagctcaggccccggggcctccagcggcaccagcggagaccacggtgagctcg

SEQ ID NO: 155411 - DNA, 74 bp, Homo sapiens
aagatgctgcaaaacgtgactccccacaataacccggagaaataggggagtgggggcccaagaacgagaagacg

SEQ ID NO: 155412 - DNA, 75 bp, Homo sapiens
gcaagctcaacgacctcatcaagcgagcgaggctggccaagtggacatttgggagcaataaaaataagaagaaag

SEQ ID NO: 155413 - DNA, 98 bp, Homo sapiens
ctgagaaggcacagcagaaccccacgctgctggcagagctgcggctgctgaggtcaaagatgagccagactctcctcctgtggcgctgggcatggtag

SEQ ID NO: 155414 - DNA, 90 bp, Homo sapiens
atcctcatccgagcctttgatttgagtgggttggcacttaccaagttggatattttggacatgtttacggaaatcaaagttggagttgct

SEQ ID NO: 155415 - DNA, 50 bp, Homo sapiens
cttcaggctcgctccgtgcgggtttgacatctacaggaaggtgcccaagg

SEQ ID NO: 155416 - DNA, 90 bp, Homo sapiens
gacacttacaaattgctgcttgtccaaatcaggatccactgcaaggaacaacaggaggctattacttgacaagcgcatatggagcacttt

SEQ ID NO: 155417 - DNA, 74 bp, Homo sapiens
ccatgtctctctcagaacttggtgctgctagaatgcaggaacagcaggtgttgacttcaaaatcaaaactgtag

SEQ ID NO: 155418 - DNA, 99 bp, Homo sapiens
ctgctggcgctctggctgtgctgcgcgacccccgcgcatgaaattgcaggtgctgcagtgtctgaaatttccgggcctttctcaacagaggatgtagcc

SEQ ID NO: 155419 - DNA, 74 bp, Homo sapiens
cgagagccgccgacatgaagaaagacgtgcggatcctgctggtgggagaacgtaaagggagaagatgaggaaga

SEQ ID NO: 155420 - DNA, 100 bp, Homo sapiens
ggagaacctggaggaggaggccatcatcatgaaggacgtgcccgactggaaggcccagctgcccgagtgctgtgtggatgtggtgggcgtcaacgccagc

SEQ ID NO: 155421 - DNA, 83 bp, Homo sapiens
cgagaagcctgaaaagtcgcagcgagctggagccgccggagacaatgcagatcttcgtgaagactctgactggtaagaccatc

SEQ ID NO: 155422 - DNA, 50 bp, Homo sapiens
tttgatggcacatacgaaacccagctatccgtggtcctgaaccagttatg

SEQ ID NO: 155423 - DNA, 50 bp, Homo sapiens
gcgagaggaggcgagaggcgcaaaggacacgagcagaagatatgaaaaca

SEQ ID NO: 155424 - DNA, 100 bp, Homo sapiens
tataaatgcatacttccccttgtgacaagtggggatgagattcaagatggaaaaggtgatgtaaccattacaaatgatggtgctaccattctgaaacaaa

SEQ ID NO: 155425 - DNA, 83 bp, Homo sapiens
tgattttcctgcatggattgggagatactggtattctaccttgtaaatactgttatttgtatatactgtaaatgatgacatcg

SEQ ID NO: 155426 - DNA, 100 bp, Homo sapiens
gcaccagtcagaccgatatgtcaaaatcaaggctttcatgttactctgtgatcttctgatgattttcagccaccaattaatgacaggtggcagagagggc

SEQ ID NO: 155427 - DNA, 101 bp, Homo sapiens
accagtgccgctgggcacactggcttcacgccggctccgcctcaccagcaagcgcattcccagtagtttatgccaacgtgacttcattcatacagatgaac

SEQ ID NO: 155428 - DNA, 82 bp, Homo sapiens
ctcccaggccacaagacatttcctgctcggaaccttgtttactaattccattattggaccccctggaatgcaagtagaagta

SEQ ID NO: 155429 - DNA, 90 bp, Homo sapiens
ggagaaagttctgccactaatgaacccagtccctgcatctcatcctgtcctcactctcagccctgaaaaggctctgaattttgagggaac

SEQ ID NO: 155430 - DNA, 100 bp, Homo sapiens
gcaccagtcttcaccgcggaaagcatgttgtggctgttccaatcgctcctgtttgtcttctgctttggcccagataattggttaagtgcaggcagccaca

SEQ ID NO: 155431 - DNA, 51 bp, Homo sapiens
gaaagagactgcccggttgcagggtccaacttaaccttatggatttagtgt

SEQ ID NO: 155432 - DNA, 100 bp, Homo sapiens
cgagatcatggggcccaagaaaaagcacctggactgcgcattggagtgactgtctggcatcaccaagatgacactccacgccacccggggggctgcactc

SEQ ID NO: 155433 - DNA, 58 bp, Homo sapiens
tggcctcatctacttcttcgtccagggaaatgtttcaacgtgcgcaagcgttgcggcg

SEQ ID NO: 155434 - DNA, 96 bp, Homo sapiens
gaattaaaagccttttgtgctgatcaacttgatgtctttttacaaaaagtaagactttgaccccgacgcaggcttcagtgattgccgcggatcaga

SEQ ID NO: 155435 - DNA, 85 bp, Homo sapiens
tcgctctttggactaatgggagttgcttttggaatgaatttggaatcttcccttgaagaggtgcactcagctaaacacaaaagtg

SEQ ID NO: 155436 - DNA, 100 bp, Homo sapiens
ttcggcgcccgccgtccccagcggcaccgggcagacgtcggcggagctggaggtgcagcgcaggcactcgctgggtcctaacctgattataaaacaacca

SEQ ID NO: 155437 - DNA, 87 bp, Homo sapiens
cactgtgagggaacaagaccagagtttcacggtacttacaatttcatcagaaattcctaaaagaattcgaagtgccttaaaaaatgc

SEQ ID NO: 155438 - DNA, 100 bp, Homo sapiens
acggaagacccctggctctataagctgaattatggcagcccagtcaagatggtcaaactactcttgtctagaggtgccaatattaatgcttttgacaaga

SEQ ID NO: 155439 - DNA, 80 bp, Homo sapiens
agtaataaccctcttttccagtataagtatttggctcttaatatgcattatgtaggatctcactggcatcgaatctatgg

SEQ ID NO: 155440 - DNA, 75 bp, Homo sapiens
tgggatccagcccttctggtgtcacctcccagggtgactcaactccagtgggcatccccaccatcagatggtgcg

SEQ ID NO: 155441 - DNA, 101 bp, Homo sapiens
cggggccaaactggtgaagctggcagacaagctgtacaatctgagggacctgaatcgctgcaccccagagggtcttgtccaataagcatgtggctcctgat

SEQ ID NO: 155442 - DNA, 100 bp, Homo sapiens
gggcaaagaaagtatccctttgagtgacactgctgatcctgtaacatggaggattgtcttcatacctcatctgagaatctgtccaaattggtcagctggg

SEQ ID NO: 155443 - DNA, 95 bp, Homo sapiens
gcgagcgaacgaccaagagggtgttcgactgctagagccgagcgaagcacctgcctagagctggaacgttacctccagagcgagccctgctatgt

SEQ ID NO: 155444 - DNA, 100 bp, Homo sapiens
ggactcggggctctcacgctttctgctcaagtcctgtcctcttctgaccaaagagaagacaactgttagttttgtggcttactgctgctccacccagtgt

SEQ ID NO: 155445 - DNA, 102 bp, Homo sapiens
ggcggcggcggcggagcgggagcgggtaccgggcgcgggcagagcgcggcggcgcgggaggaggaagccaagaatctggtgagcgaagccatcgcagctggc

SEQ ID NO: 155446 - DNA, 82 bp, Homo sapiens
aaggggttcagcttattgacttctcaccttgtgaaagtgtccatgaaactgggaggcgaccgtgttagctgccagttcctga

SEQ ID NO: 155447 - DNA, 98 bp, Homo sapiens
ttggaggccggggccgcgctgagggcgcccagctggaacgcggcaggcaaagatggcaaagagcgcttgggcggctcagtgctggggcagatcccctt

SEQ ID NO: 155448 - DNA, 75 bp, Homo sapiens
tggaagccaacaatgcctttgaccagtatcgagacctgcggtccagcctcgtcatcaccaccaagatcttctggg

SEQ ID NO: 155449 - DNA, 100 bp, Homo sapiens
ccagagctcaatgggggaccacagcatgcacttccttccagcagctacacaggatggcactggatctttaaaacgcagtggttcctttagcaaactccgg

SEQ ID NO: 155450 - DNA, 100 bp, Homo sapiens
agaagactcttgtcacactaattgccaacaacaatggtaatgtgtcagtggatggaaaagtttagaaaagatctgtgtaggttctggagcaacgttttcc

SEQ ID NO: 155451 - DNA, 82 bp, Homo sapiens
cgaagagctgcggctcagcctcgtcctcctccgcctcctcctctctgcatgcgcgtcagagcccgtgccaagaacaagcagc

SEQ ID NO: 155452 - DNA, 80 bp, Homo sapiens
cgttttccaccaccaaggaaacagccacctagccaacggaactcagcgagatgctgtacacagaccggcccgactggcag

SEQ ID NO: 155453 - DNA, 97 bp, Homo sapiens
cggtggagcaggagctggcgtctctggagaaagggacatctctacaccgttcccatccgggaacagggcaacatctacaagcccaacaacaaggcca

SEQ ID NO: 155454 - DNA, 75 bp, Homo sapiens
tctactcgtgcaggaaggtgaagtgggagcagatatgtcacacgactgggcatttagctatggagacattattat

SEQ ID NO: 155455 - DNA, 100 bp, Homo sapiens
ggatgtccctgcactgatacagaagactgaaactgttgaggagcccatggaggaagaagaagcagccaaagaagagaaagaagaatctgatgatgaagct

SEQ ID NO: 155456 - DNA, 100 bp, Homo sapiens
cggcgccgcggcaccagggcgcgcagccgggccggcccgaccccaccggccatacggccagaagcggactcctagaagaggggagcagcaaggatggaat

SEQ ID NO: 155457 - DNA, 95 bp, Homo sapiens
cgttcacagcaagctcaagctgtggagccacatgttcctcctgatcgaggaccaaggtgcccagggctatgagctgttcttcaagacaagagaat

SEQ ID NO: 155458 - DNA, 97 bp, Homo sapiens
agctcccgggtcgtctttcgtgtggccgcgaggtgtcatggagaaactccagctgggcccagagattctgcagcgggaaaatccaaggcttatttat

SEQ ID NO: 155459 - DNA, 100 bp, Homo sapiens
gaccaccgaggctggagggggagaacacccagccaacaaatggaattttcttgagcatgtttctaatcgttttgccattggaatccatggctcatgggct

SEQ ID NO: 155460 - DNA, 138 bp, Homo sapiens
gaccatgtttgacaagacgcggctgccgtacgtggccctcgatgtgctctgcgtgttgctggtgctgatgagctccttctaactgagatgatgtttaatggccttttcaatgacctttctgcagaacaggcaacagca

SEQ ID NO: 155461 - DNA, 51 bp, Homo sapiens
cgctccgagcggcgggccgcagaggttgaaatcacaaagattagacacctt

SEQ ID NO: 155462 - DNA, 82 bp, Homo sapiens
ctccagcgctgcctggaggagaatcaagagctccgagggcaacaggtttgtctatgctggctctaactcgggcgtggtccag

SEQ ID NO: 155463 - DNA, 100 bp, Homo sapiens
ctggagacctggatctcgcgccacaaggagatgttttagaaagagcgttttcgctacgtaaagcacattcgataaaggatatggaaaatactttgcagct

SEQ ID NO: 155464 - DNA, 101 bp, Homo sapiens
ccgcaaggaaataccagccaaaatcatttttgaggatgaccggacaatgcagatcttcgtgaagactctgactggtaagaccatcaccctcgaggttgagc

SEQ ID NO: 155465 - DNA, 82 bp, Homo sapiens
cagatgtatacaaccaatcaggagcagttacaggaaattgagattcttctaacagagaaaatgccattgaggatgaagagga

SEQ ID NO: 155466 - DNA, 100 bp, Homo sapiens
agacacatcagtggagtccatgctacctgattgcccccgggtctcagcagtggatccaaacttctacagcaaaaacttacttcttttaggaaagacatac

SEQ ID NO: 155467 - DNA, 74 bp, Homo sapiens
cgcggctaagtgaggaagccagccaggctctcatcgagggcctgccttaagtgtgaaagtaatgactgatgaaa

SEQ ID NO: 155468 - DNA, 75 bp, Homo sapiens
ggtggataaggaacatctcttcccagcggctcagccgtttccctggggagatggtaaccatactctattccataa

SEQ ID NO: 155469 - DNA, 101 bp, Homo sapiens
gcagtgggggttgctgacccagaggagagttctccaaacatgatcgtttactgcaaacctctacggcagacacatgcaggccaacccagaaccaccgaaga

SEQ ID NO: 155470 - DNA, 100 bp, Homo sapiens
ccatctacaggccattagatccaaagccattcccaaattatagagctaattacaactttcggggcatgtacaatcagagaccaaccctggaatggtcccc

SEQ ID NO: 155471 - DNA, 100 bp, Homo sapiens
ctgaatgacatctacctccatcaggaccccagatgtctgacagccctgtgtgacaccaagataagtaacggctgaaagaatcaggattcctgaaccttgg

SEQ ID NO: 155472 - DNA, 90 bp, Homo sapiens
gcggatcccgtccgagccccggccccaagtaacgccgccgccccggagccgccgttttgcagacattgggtacagaaacttaccggccta

SEQ ID NO: 155473 - DNA, 100 bp, Homo sapiens
gccccggacagcggccccgaagcgggcggcctgcactcgggtgcttacactccagagcccctcagcagtttccggtgggctcttctctcaactggcctca

SEQ ID NO: 155474 - DNA, 100 bp, Homo sapiens
tggtggcagcttctttggcagctccagttttcaactatgctgacagcatttatcttcagatactatggctctacagtgccatatatgtagcaaagattcc

SEQ ID NO: 155475 - DNA, 114 bp, Homo sapiens
ggggtcacccctcagcacatggtgggggccacaccatttgccgtggccaggctagagatcccaagcactgcaagtccagatgcaacgggagcctggctcaagggacgacaagat

SEQ ID NO: 155476 - DNA, 100 bp, Homo sapiens
ctcggcgcaagcaggccaagccccagcacctcaagtcggacgaggagctgctgccgcctgacggggctcccgagcacgatattgaaatggattccaggcg

SEQ ID NO: 155477 - DNA, 75 bp, Homo sapiens
ggttcaagaaccttgacaagctcatccggctggtaaatgcgcagacgctgaccggaaaggagattgagattgaca

SEQ ID NO: 155478 - DNA, 97 bp, Homo sapiens
agctccccggagcgccactacacgcccttgccttctgcttccagggaactcaccagtcaccaagggtatgagtattatagaacaattagaccctgta

SEQ ID NO: 155479 - DNA, 100 bp, Homo sapiens
tgcatctagaggaattgaaagatgataaggatgccttctatgtggcagacctgggagacattctaaagaaacatctgaggtggttaaaagctctccctcg

SEQ ID NO: 155480 - DNA, 75 bp, Homo sapiens
gtgtcgcagcctctcgggatgacaccactctgaatgcactgaacacaggcgtctctggccgagcctctttttgtg

SEQ ID NO: 155481 - DNA, 100 bp, Homo sapiens
ctggcctgcccggacgagttcgatgacttcgtcacctatgaggtatggatcctggcgggagccagtcaacccctattatgtcaatgccggctatgccctg

SEQ ID NO: 155482 - DNA, 100 bp, Homo sapiens
caaattattagctaagaaagcagaggttaatacaatccctggctttgatggagtagtcaaggaattggagaatgatgcagcttttcagcaagctgtgagg

SEQ ID NO: 155483 - DNA, 100 bp, Homo sapiens
cgctgccgggcaccgaggaccagctcaatgacaggaagacgtattttagcagatgaagcactcaagctgggcattctagataaagttgtaaactcagacc

SEQ ID NO: 155484 - DNA, 100 bp, Homo sapiens
caaaaagcctgcatcagagctcccattgaccacgggttggaacagctggagacatgagcccccctccatgcgcctgaaggcccgacccagcagccctggc

SEQ ID NO: 155485 - DNA, 90 bp, Homo sapiens
atttaattttagggtcctttatatagaagggagagtagttcttcgcacactcatgggacacaaagccaacatctgcagcctggatttcca

SEQ ID NO: 155486 - DNA, 75 bp, Homo sapiens
gcctcccgagtggctgggactacagctctttcgacgtgtagcagcagctttgccgggaatggaaagcacacagga

SEQ ID NO: 155487 - DNA, 88 bp, Homo sapiens
tcgtgaccgagaccgtgaccgagagcgtgaccgagagcgcgaatatcgtcatcgttagaagagccgctcccgaggccccggcgcggcg

SEQ ID NO: 155488 - DNA, 100 bp, Homo sapiens
ggaggaggaggtggcagtggaggagtgtgacagggatgatgaagaagacctgctggatggagtttgggctttgcaaaactgagaacaaagccaagtcggg

SEQ ID NO: 155489 - DNA, 50 bp, Homo sapiens
cctttgaattaattatggcttacaaaattggacagctgtacatgatcagc

SEQ ID NO: 155490 - DNA, 50 bp, Homo sapiens
agcccacagagcctgggcctcttggtgctggagaatctggtaaaagcacc

SEQ ID NO: 155491 - DNA, 74 bp, Homo sapiens
aaatctcccaggaagatcaagaaagtgggaaccactgagaaggaacatgaaggatttaagtgccctgtatgctc

SEQ ID NO: 155492 - DNA, 75 bp, Homo sapiens
catctacaaccttcgatctcctgacgatcatggcacagattgaaaaacaagagagatttgaacagtatactacct

SEQ ID NO: 155493 - DNA, 100 bp, Homo sapiens
gcagttggatggcggtgactgcgtgcatttttgaaacgttggggttgttggagtggttggattttccctggaattgagtgagaaattcagaagactgaag

SEQ ID NO: 155494 - DNA, 141 bp, Homo sapiens
cggacgcgactcgagggtgacgctcgctccgctcgtcccgctcgtcatggcctacccgggatacggaggagggatcaaaggtccatcatcaaaacaccaaagactcaagacacagaagatgatgagggagctcagtggaat

SEQ ID NO: 155495 - DNA, 75 bp, Homo sapiens
caagacaacagtgatgaggaaagctgtgaaagttctcaagctagagttgggaagacatcactgattatgtctctg

SEQ ID NO: 155496 - DNA, 83 bp, Homo sapiens
ctacacttttcaccaaggaactggtgctgcagcgagagcaaccatgtccaagggacctgcagttggtattgatcttggcacca

SEQ ID NO: 155497 - DNA, 50 bp, Homo sapiens
cagagattgacatgatgcagccgcaagataacgaaggaggcccaacttca

SEQ ID NO: 155498 - DNA, 75 bp, Homo sapiens
agcaacagctctgccggctggaagctgtcaaagctcgaaaaacagcagcagaggaaagaaaagaccagagctaag

SEQ ID NO: 155499 - DNA, 100 bp, Homo sapiens
ttaaatgattctacaaactttaaacttatttacagatatgcgtttgactttgcacggatgtctcgaagtcggagtccttctccaataagatgtggattgc

SEQ ID NO: 155500 - DNA, 75 bp, Homo sapiens
ggtgactatttgtttgaacctcattcaggggaagagtacactcgagatgaagtgtccaagagacgcaaggcccat

SEQ ID NO: 155501 - DNA, 78 bp, Homo sapiens
aaaggattcgttacagccagagattgaacacagtactgtctgctttgcttgcagtatgtaattctgctggtgaagctt

SEQ ID NO: 155502 - DNA, 100 bp, Homo sapiens
cagagtgcagagccgcctttccagcatgcaggggctgctcagatgttcctcctgctgatcaagagaagctttttatccagaagttacgtcagtgttgcgt

SEQ ID NO: 155503 - DNA, 90 bp, Homo sapiens
aaatcatctccatattctcaggcacagagaaaggattcctagatgaggttatgaagaagtatggcagtttggttccactcagtgaaaaag

SEQ ID NO: 155504 - DNA, 51 bp, Homo sapiens
cccggccgcggcgggacccgagaatggactgctgaattatgaagtatttca

SEQ ID NO: 155505 - DNA, 101 bp, Homo sapiens
atccctttatgaaccttgtgatagatgaatgtgtggagatggcgactagtggacaacagaacaatattggaatggtgagggagcactatgtctgcggaagt

SEQ ID NO: 155506 - DNA, 75 bp, Homo sapiens
gaaaaattaggacacggcttataagaaaacgctttttgtgccttggatgggtcattgctgtgcgtgtgaaggaag

SEQ ID NO: 155507 - DNA, 96 bp, Homo sapiens
gacatgagtgatgccgaacaatacagaagctacagactggatattaaaagaagactaattagcccatataaggctggagtacagtggcgcaatctc

SEQ ID NO: 155508 - DNA, 100 bp, Homo sapiens
atgagctctgggcaggacggcgggccgaggagcccggggagggacccggagctccagtactatactggcaattgctggagaagattttgcaattgttgct

SEQ ID NO: 155509 - DNA, 88 bp, Homo sapiens
agcccagcactcaaggagaagcggtcccatgaagctgaggtcttgaagcagctggctgagaaacgagagcacgagaaagaagtgcttc

SEQ ID NO: 155510 - DNA, 100 bp, Homo sapiens
cggacaacggggctggctacgccttcatcaaggtctgaggagctctggccatggatggcccacgtgctgctgccctacgtccacgggaaccagtccagcc

SEQ ID NO: 155511 - DNA, 75 bp, Homo sapiens
agacattactcaagaggagagagttcttctcttacagtttgttacgggcagggaatctaagggaggaaattatca

SEQ ID NO: 155512 - DNA, 76 bp, Homo sapiens
gatacaactctctggaaattcttgctgttcataattggacccttgaagacactcttcagtggttgatagagtttgt

SEQ ID NO: 155513 - DNA, 60 bp, Homo sapiens
cccaaagtgggactcaagtacgggacagatttacgcgaagctgctctcaggggagaaccc

SEQ ID NO: 155514 - DNA, 100 bp, Homo sapiens
tggcggtccctgtgacctgtggagacacggccagatctgccctccattccgccatggtttttaaatcatccttccaacctgtatgcctatgaaagcatgg

SEQ ID NO: 155515 - DNA, 51 bp, Homo sapiens
gaatttgctgtgtgaccctggacctgaaggctgaaattgacaagttggcca

SEQ ID NO: 155516 - DNA, 100 bp, Homo sapiens
aaagaaacattaagaacttggatcccattcacctgaggcacccgaagaagagaccatccatatttccagatattctctaagccgctttcatcatgggaga

SEQ ID NO: 155517 - DNA, 83 bp, Homo sapiens
cagcagcaacgcggaggaaacgggagtgaacggagagcgtagtgaccatcatagagtaatgccttctagctttttcctgctgt

SEQ ID NO: 155518 - DNA, 75 bp, Homo sapiens
tctcctgtaacaatttacgcgccgtgtaactgtgaatctttcaaagtttgcagaaaaaacttcagcatgtgccag

SEQ ID NO: 155519 - DNA, 75 bp, Homo sapiens
tggtgatcgcgctgatgttcctggcctggggggaagattctgaagggagtggtaatggaagtgaagatgcttcaa

SEQ ID NO: 155520 - DNA, 90 bp, Homo sapiens
cccgacctcccggctgacctattcacctcctgcctcaccacccccatcaagatcgccctgcgctgggccatgaagcccccaggaggagaa

SEQ ID NO: 155521 - DNA, 100 bp, Homo sapiens
ggttcagttgactattgcaaagttgcaggatgtgagtttgaatctatggaatgtctacagcaagatggatcctatgtctctggagagtttgctttcagat

SEQ ID NO: 155522 - DNA, 100 bp, Homo sapiens
gaagaagataacaatcaagatgaatatgaccctatggaagcagaagaagctgaggatgaagaagatgggtgtccgcaatgttgccagtgtctgtctgcag

SEQ ID NO: 155523 - DNA, 83 bp, Homo sapiens
cgactgtgacgaggacgaggaggcagccacggggcccctggtgcctgatttgagatggggtcccaggtctcggtggaatcggg

SEQ ID NO: 155524 - DNA, 95 bp, Homo sapiens
gaaggcacagattagaggaaggaagagttatggctgcagcttcgattgccaatattgtaaaaagttctcttggtccagttggcttggataaaatg

SEQ ID NO: 155525 - DNA, 50 bp, Homo sapiens
ccatgatttaaatatcggcgttaaggattcaagttcgaaatatggcaact

SEQ ID NO: 155526 - DNA, 50 bp, Homo sapiens
aaggaagtcctggcctcccatctggtccatcaccgagacttggagccaga

SEQ ID NO: 155527 - DNA, 75 bp, Homo sapiens
atggacaggcttgtccatctgtaacttcattaagacactttttcaaaaatggcaatggtatcagaattcctcaag

SEQ ID NO: 155528 - DNA, 100 bp, Homo sapiens
ttttgatctctcatcagagagatcatactcccaagaacaggctttgacccttctttaaaaggaaaggccgagggggacggcaagatgcacatcaccctct

SEQ ID NO: 155529 - DNA, 75 bp, Homo sapiens
attgaagaggaagaactgaccagagctgatcccgagcagcgtcatgtacccctggggcccatgtgaccatcaacg

SEQ ID NO: 155530 - DNA, 50 bp, Homo sapiens
aatcgcccaagtccctctactcgcgagagctcaggccccggggcctccag

SEQ ID NO: 155531 - DNA, 83 bp, Homo sapiens
gcgctgttcgacgtgcggcccgaatgccagcgcctcttctaccggggcaagcagaagtccattggaatattaagcccaggagt

SEQ ID NO: 155532 - DNA, 96 bp, Homo sapiens
cccccatcgaagtgttgtgtaaaggctacccttgtgcttttctgctttgggccaagtagcaaaagctcgattcctgcatgagaccaatgagattgc

SEQ ID NO: 155533 - DNA, 90 bp, Homo sapiens
tttcccagagaaaatgagatgctgatgttgaagacgacaccacggcgaatctttctgcattgaatttgaagatttctgaacagaaggaaa

SEQ ID NO: 155534 - DNA, 83 bp, Homo sapiens
ggcagacaagctgtacaatctgagggacctgaatcgctgcaccccagagggaactgtggctgcaccatctgtcttcatcttcc

SEQ ID NO: 155535 - DNA, 75 bp, Homo sapiens
aaagatccagattttaatcaagtcctggacccaagccagaagcctctgcaaagcttccttccagacctgcagata

SEQ ID NO: 155536 - DNA, 100 bp, Homo sapiens
tggctggaagtgctgcgcacctacttggagctggtgctttgcgtgctggtcagcatccggaacaacagggcccacagcctgtcacccacagatcaccaag

SEQ ID NO: 155537 - DNA, 96 bp, Homo sapiens
tctttccaaaaggtcaaggttcacaagccatcagtggcctatgtacataccacgccgggtctgccttcaggctgggaagaaagaaaagatgctaag

SEQ ID NO: 155538 - DNA, 101 bp, Homo sapiens
ggccgctttccacaatgcagttgctgtagtcatctacaataataaatccaaagaggagccagttaccatgactcatccagttttcggctttgtgagaaacc

SEQ ID NO: 155539 - DNA, 75 bp, Homo sapiens
aacgtcagttattaagggcattaagagccaactggtagagcaatttccagaaacctctgcgccatgagagccaag

SEQ ID NO: 155540 - DNA, 85 bp, Homo sapiens
gcggttaagtatgcggcgccaggagctgtgttatgaagcggagattgaggagatagatgaagaaaatggcaccgctgcaatcacc

SEQ ID NO: 155541 - DNA, 83 bp, Homo sapiens
ttccccccacctgaacagaaaactgcatttgacaagaaatgagccgtcagactgctacagcattacctaccggtacctcgaag

SEQ ID NO: 155542 - DNA, 100 bp, Homo sapiens
aggaacttggttccccctccctcagcttccgccccaaaaggctttggtgaagcacgtgcagtctaaaggatacccaaatgaacgttttgaacttctcacc

SEQ ID NO: 155543 - DNA, 90 bp, Homo sapiens
gccctggtcttgctcggccgatgaagtgcagaggtttttttctggatctcttgaatcgtgtagaagattttcaacagcatagtcagaaac

SEQ ID NO: 155544 - DNA, 75 bp, Homo sapiens
tgccagatgtgggagctattgtaacctgtaagttcttctcaccactaaatccaatacgagttcatattgatattg

SEQ ID NO: 155545 - DNA, 83 bp, Homo sapiens
ggttgtggggtcgcgtcagtgcggagacagcggtgtcctgcgcgtcttcgggttaaagatcgaggtccggaagccactaggag

SEQ ID NO: 155546 - DNA, 75 bp, Homo sapiens
gcaccatggaggaggacgacagctacgaaccacctctgtgcagaaaagcaaccaccttgttctctattctgctgc

SEQ ID NO: 155547 - DNA, 100 bp, Homo sapiens
ttccacttacagctttagtagatggacagaagtccttggatgaggatgacctaggtcctagaagggtagttgccctggagaaagaagctgaagaatggac

SEQ ID NO: 155548 - DNA, 96 bp, Homo sapiens
ggatgatgccttcaatactacctttatttccaccataggtctacttccccagcaggacagcatcattctcctatatcttctagacatcactcatct

SEQ ID NO: 155549 - DNA, 51 bp, Homo sapiens
ccgccgcgcaggagcctcccggagctggttatgaagacagtatggagtttc

SEQ ID NO: 155550 - DNA, 83 bp, Homo sapiens
cgaggagcgggaagagttgctgggatcctgaggaggatgaaggggctggccctggaggccgagagtgagctggagagacaaga

SEQ ID NO: 155551 - DNA, 75 bp, Homo sapiens
ctttatgaagcctatcttcctgagacctttcggcgacctcagatagacccctgctcaagatgaggaggtgcgcgg

SEQ ID NO: 155552 - DNA, 83 bp, Homo sapiens
cgcgcggggaggccatcgaatcggatgacacgccgccatggcatcagatgaaggcaaactttttgttggagggctgagttttg

SEQ ID NO: 155553 - DNA, 75 bp, Homo sapiens
gaggggaattccagcaccgcagcaaccactccagaaactttccctccttcaggaaaatgtttataggaggcctta

SEQ ID NO: 155554 - DNA, 75 bp, Homo sapiens
aacctttccaacacagatgtccaagctgccaaaaattcattgagtttgaagatgctctggaacaagagaagaaag

SEQ ID NO: 155555 - DNA, 50 bp, Homo sapiens
ctttacaagacgcacccacaatttcagaagaaagtggtagcttcctttcc

SEQ ID NO: 155556 - DNA, 99 bp, Homo sapiens
gcgccgaagcaggacccgaagcctaaattccaggaggatggctcgttcggaacaccacctggatacggctgcgctgcagaccgggcagaggagcagcgc

SEQ ID NO: 155557 - DNA, 88 bp, Homo sapiens
gaaatttgggaagtccctctactcttctctccaggatgagagccactcagagtgggtgtcttgtgtccgcttctcgcccaacagcagc

SEQ ID NO: 155558 - DNA, 90 bp, Homo sapiens
gtgtgggttagacttgtgcaaccagggcaactctggcccctcctcaagtgtctggctgaaagatgccacccagggaagggaactcgggct

SEQ ID NO: 155559 - DNA, 100 bp, Homo sapiens
atctgacctcatggatgaacttcaggatgttcagctcacagagatcaaaccacttctaaatgataaggcagcctgcttctgcaaagtggtacgatcgaag

SEQ ID NO: 155560 - DNA, 90 bp, Homo sapiens
acagcctgcaggactttgacacgctggccaccgtggggctggttgatatgtgaagagccaacctgtcgcaatcgaactcgtcaccttccc

SEQ ID NO: 155561 - DNA, 96 bp, Homo sapiens
ccgagcccttcgcacagcttatggccgctaaagattccaggcttcaagatcagaggcagaactctcctgcagggaataaagaaaatattaaaccca

SEQ ID NO: 155562 - DNA, 83 bp, Homo sapiens
ggcgtctctgtccccatctggttttagggcagcccaatggatccaatggtgatgaagagacctcagttgtatggcatgggcag

SEQ ID NO: 155563 - DNA, 100 bp, Homo sapiens
ggccacccaacttccccacattcctgtagcagtaagagtgggctgtttgcagtagaagaagctctgatccagatccatgatccagaactcaggaagctgc

SEQ ID NO: 155564 - DNA, 100 bp, Homo sapiens
tgctgagccagcggagctgcttgagctctcgatgttctgaagtatgaggaagttgacatggattcattagccaaggctgttccagagcccttgaagaagt

SEQ ID NO: 155565 - DNA, 82 bp, Homo sapiens
gacttctgcgcgcgggagttcgaggccctgcggagctgcttcgccgctgcggcccagctgagagccagcctggaggttaccc

SEQ ID NO: 155566 - DNA, 48 bp, Homo sapiens
aagcttcaggtggagacagcccgaaggctggacgtaaagaaagaagtg

SEQ ID NO: 155567 - DNA, 75 bp, Homo sapiens
tttggatgtagcaaggaagaaattgttcagttcttctcagttgttgacctcctgtactggagagacattaagaag

SEQ ID NO: 155568 - DNA, 75 bp, Homo sapiens
cagctgcgcaaggaggaagagaatgcatcagcacaagctccgggtggataaggcagctgctgcagcagcggcact

SEQ ID NO: 155569 - DNA, 83 bp, Homo sapiens
ctggtggcctcaggtgaaaagaaataccacacacatttattacagtttgatggtgaaggaggttggcgctttgaacaattgga

SEQ ID NO: 155570 - DNA, 101 bp, Homo sapiens
ttcacaaagcactgggatggattacaggaacaggatctggacttggcacatttcttttaaaggtgcttgaagacgaattcccagaagtatacagatttgtg

SEQ ID NO: 155571 - DNA, 98 bp, Homo sapiens
agaatctgccggatggtgctggccacttgcttgggatcctttatcctggtcatcttctatttccaaattcaaggagcagggacaagttacaggaatgt

SEQ ID NO: 155572 - DNA, 82 bp, Homo sapiens
ggaggaagcaggagcagcccaagcgccttccctcacggggatatgagactttctactcggaatatcctgagtgttgcgtgga

SEQ ID NO: 155573 - DNA, 100 bp, Homo sapiens
atcaacaacgacgccgagctctggggcgtcttgcagccctatgagcatctcatctgcggcaagaacgccaatggtcatagcctgcagtgctacaactgtc

SEQ ID NO: 155574 - DNA, 75 bp, Homo sapiens
agcatgccctgaaaaagtatcgtcgagaagcctatcatcgatgcctaccttaatgcctctgaaacaaccactctg

SEQ ID NO: 155575 - DNA, 100 bp, Homo sapiens
gtggaggcggcctctctggcagcagacatcagccacgcatctgaccttgttgttcaccaaccgctgcctgctcaagtggctgaagttgtgggacctggtg

SEQ ID NO: 155576 - DNA, 100 bp, Homo sapiens
acagaagcaaaagctgcagcaaagcgggaagatcaaaaatacgcactaagtgtcatgatgaaggtaataaaaggcctgacatatctgagggagaagcaca

SEQ ID NO: 155577 - DNA, 98 bp, Homo sapiens
ccttgtgaaacctcctagtagaaaaagttcttgggacaaacttcatttgcactattcctgatcagagaactccagttgcttcaacacacagtatcagt

SEQ ID NO: 155578 - DNA, 100 bp, Homo sapiens
aacagcccaagatggccgacttcgatgatcgtgtgtcggatgaggagaaggtcaaaaggctgagtttcaaattctggataatgtagactcaacgggagag

SEQ ID NO: 155579 - DNA, 82 bp, Homo sapiens
gatggagcaggggctggaggaggaagaagaggtggatccccggatccagcatcatcggctggttcgtgcgaagcttcaagta

SEQ ID NO: 155580 - DNA, 73 bp, Homo sapiens
tcccgagtagctgagattacaggtcgaggcttgaagagtggagagaactttaagttgttatatgacttggcag

SEQ ID NO: 155581 - DNA, 75 bp, Homo sapiens
catgaagacttgaacttaatacagcaagaaagaccatcaagtttaccaacctctgactatgtgaagatacggtgg

SEQ ID NO: 155582 - DNA, 75 bp, Homo sapiens
gtgcgaggagaactactccgtgacctggtacatcgccgagttctggcgtctctggccgagcctctttttgtggaa

SEQ ID NO: 155583 - DNA, 82 bp, Homo sapiens
gcggagggagccccagacacggtgctgccgaaaagaaccaacttccctgggatcagctccacagaccgcgggggccttcgag

SEQ ID NO: 155584 - DNA, 100 bp, Homo sapiens
cggccggagaagggctgcgggttagggggccggcgcccgcggttcagttacagaatgtctgaaggggacagtgtgggagaatccgtccatgggaaacctt

SEQ ID NO: 155585 - DNA, 100 bp, Homo sapiens
agcaaatctacttttgggttacaaaaatccagaccaggaaagtcttaaagatgtcaaatatgatgataaagtattctctcacttgtcacttgaattggca

SEQ ID NO: 155586 - DNA, 75 bp, Homo sapiens
cagcaaagatggtacaaaagagtctttggaggatgcggctttgatggcacctggaatggataaaagtggcagttt

SEQ ID NO: 155587 - DNA, 101 bp, Homo sapiens
cgggtacatatgacacagaaggtgtgaccccaacgaagagtggagaacggcaacccatccagatcaccatgccgtctgcagatctccaggggagcccacca

SEQ ID NO: 155588 - DNA, 51 bp, Homo sapiens
cgaatgtgttcagtctgacactcatacagatgaagattatggaagagattc

SEQ ID NO: 155589 - DNA, 75 bp, Homo sapiens
ggggcgcccagctgccaacaccaagctgctggagccagttctgcttctcggcaaggagcgatttgctggtgtaga

SEQ ID NO: 155590 - DNA, 96 bp, Homo sapiens
ccagcacagttaccaaaattgaacttgtctttcgcttgtgagcggttgtggtcattgtgaggctccatggtccccttctcgatgcgcatcttgcac

SEQ ID NO: 155591 - DNA, 75 bp, Homo sapiens
ttgcatgagacgcttctggacaggcggcagcagaacactcaagagatgccttggaatgtgagaatgcaaagcccc

SEQ ID NO: 155592 - DNA, 98 bp, Homo sapiens
tgggctgcgcgcgcttttgggctgcgccaccgacagagacatctggaagccggagctagtggaagaaataatatgtggattcgagaccatgaggatag

SEQ ID NO: 155593 - DNA, 75 bp, Homo sapiens
cggagcgtcacatcactttccgatcacttcaaagtacctcctgccccccgaggtctgcagtctcctgaacccagc

SEQ ID NO: 155594 - DNA, 82 bp, Homo sapiens
tctaaaacaccaccaaaaagttacagcacagccagacgttctagaagtgcaagcagaatggtgaggttctggagaattgatg

SEQ ID NO: 155595 - DNA, 113 bp, Homo sapiens
ccagttttgaaatcgacacacaaagaatagagttgagcctgtgggacacttcggaaaccaaggtgtatgttggtaacctgggaactggcgctggcaaaggagagttagaaagg

SEQ ID NO: 155596 - DNA, 74 bp, Homo sapiens
caaccccggccgctggccctctgatggagttttaacattgaatgcggagaacactaattatgcctatcaagttc

SEQ ID NO: 155597 - DNA, 75 bp, Homo sapiens
gggctgaaggaggaggacaaagagcccctcatcgagctcttcgtcaaggcacctcggaactgaacccattctccg

SEQ ID NO: 155598 - DNA, 100 bp, Homo sapiens
taggccgcggccttcgttcctcccagaaaggtgtgagttcttgatacgaatgaaaggccaagagtttgttgatgagattcaaggtagatatcctcatctt

SEQ ID NO: 155599 - DNA, 48 bp, Homo sapiens
tatcatactggctattatatgttttacatggacggatggcaaattaaa

SEQ ID NO: 155600 - DNA, 75 bp, Homo sapiens
tcacccccaaggagtctcgctgcttttgtggacatatttgacagtgattggtacacttctcgaaatctaattggg

SEQ ID NO: 155601 - DNA, 90 bp, Homo sapiens
atttgttaaggattccaagtaactcttatttgaacaggacgcaggccttgatgccctttcctctatcataagtcgccaaaaacaaatggg

SEQ ID NO: 155602 - DNA, 75 bp, Homo sapiens
ccaatgcctacactgtcactgacctagtggatgtgataggccaggttctgcctgaagcaacaactacagcatttg

SEQ ID NO: 155603 - DNA, 100 bp, Homo sapiens
cgggcggcgcgcggcggcggcgctcggcgatggtaggcgtccctggagcggccgccttccagcgtttttggattcaaagcataaaaaccattacaagata

SEQ ID NO: 155604 - DNA, 51 bp, Homo sapiens
gcggaggtcgataagctggaactgatgccctttaactaaggtgaagctgat

SEQ ID NO: 155605 - DNA, 82 bp, Homo sapiens
gcctcagcctcctaagtagctgggactacagacatatctgaagagatggattaagaatgctttggattaaggattgtggagc

SEQ ID NO: 155606 - DNA, 95 bp, Homo sapiens
aggacgccaggtggacacgcccatccttggacttcctgaaaatgacccaggcgcccgctccggccggcaccatggacagcgaggcattccagagc

SEQ ID NO: 155607 - DNA, 97 bp, Homo sapiens
ggaagcgtggagttcacccgcgcactcgaagtgcctttgcaaaaggagacacaccttgaagaaacaacagagagccaacagaatggtgaagaaggca

SEQ ID NO: 155608 - DNA, 98 bp, Homo sapiens
cttatggaacatcttcaagttgtgggggtggacaatgctctgttgtgtccctcagggccgggagaccgagtggctctttggcatggatgagggccgga

SEQ ID NO: 155609 - DNA, 74 bp, Homo sapiens
tcagccagcacactcctcgcgagcaaggtctacatgttcaagtgcgtgtggcggtgctacagattgatcaagtg

SEQ ID NO: 155610 - DNA, 88 bp, Homo sapiens
gtttcgacccggtcacacaaagcttcagcatgtcatgtggcatatcacacctgaaaaattttatgtggaagcttgtgatgatggagca

SEQ ID NO: 155611 - DNA, 74 bp, Homo sapiens
accgcgtgctggagctcttcgacccacccaaggaggagagggcagtgagagataggaatctcctccaggttcat

SEQ ID NO: 155612 - DNA, 82 bp, Homo sapiens
tgatccagcaaggtcggcagagcaaggggcttacgcagaaggacctggccacgtgtgccgtgcaggtgaagctggagctggg

SEQ ID NO: 155613 - DNA, 80 bp, Homo sapiens
cagcctgtggaaagcagtgaagacagcagtgatgagtctggttatggaggttttgatgactatggtggctataataatta

SEQ ID NO: 155614 - DNA, 75 bp, Homo sapiens
ctcaatctccttttccttggctaccctataggcagatctctccctcatataacggatgtttcttggcgcttggaa

SEQ ID NO: 155615 - DNA, 90 bp, Homo sapiens
catttttgttccagaggatgatgatgatgatgactaacaggttttctgtctcaactggtctctgacaagcctctgactgaatgtatccgt

SEQ ID NO: 155616 - DNA, 101 bp, Homo sapiens
aaatcaccctgcttgagcaaaggaagtgctgctacccccgtatgatgatgccactgtgaatggtgctgccaaggagccaccgccaccttacgtgtctgcct

SEQ ID NO: 155617 - DNA, 83 bp, Homo sapiens
gtggatttgagccgccgcattttttaaccctagatctcggtgttggagagcacaatggctgaacaagtccttcctcaggcttt

SEQ ID NO: 155618 - DNA, 100 bp, Homo sapiens
caacacgcttagcggcttctcctcagcccacatgggcagtcacggagcacgtgaattgcctctgcttacgttcaggccctgtcctaaacccagccgtcta

SEQ ID NO: 155619 - DNA, 100 bp, Homo sapiens
atgttacagctgctcatgaaccacttggcaaattgcagaatgaagaagagtctggagaacctgaacaggctgcaggtgatgctcctccaccttacagcag

SEQ ID NO: 155620 - DNA, 49 bp, Homo sapiens
gacgccgtcgcggtggactgcaagggtctttttggagttcctgagctga

SEQ ID NO: 155621 - DNA, 100 bp, Homo sapiens
aacagcttcaagatgaactggagatgctcgtggaacgactaggggcctatcatggtcaccatcaagcactggaagtgttggtacagtctttgttagatct

SEQ ID NO: 155622 - DNA, 75 bp, Homo sapiens
atgaattgcatattctggacatgatagagcagggctgttgataatcaggtgtatgtggccacagcctctcctgcc

SEQ ID NO: 155623 - DNA, 87 bp, Homo sapiens
gcaggtgaacactgaccccaatgggactcctaaatgcaaagtccctggatgtttcttgcaagaccttgaaaagtcaaagaaatactc

SEQ ID NO: 155624 - DNA, 80 bp, Homo sapiens
cccagttttctctggatgacgtggacacctgctccacttcaccttttgccatgagtaaaagctccctgaggcctcccaag

SEQ ID NO: 155625 - DNA, 100 bp, Homo sapiens
gtcagagctgagctccccaccaagacagtttgctgcggtcagcatcacaactaatcaggctgtcgccatccttctgaaagacgactattttgtcagtgga

SEQ ID NO: 155626 - DNA, 55 bp, Homo sapiens
caatcacacgtaccacctggatgttgtggatggagtcttgctctgtcaccaggct

SEQ ID NO: 155627 - DNA, 75 bp, Homo sapiens
ctcagttggaagcagccgatccagcctgcggagcctgtggggcagggtggactccattatgctggtggaagaggg

SEQ ID NO: 155628 - DNA, 51 bp, Homo sapiens
caggtctacgccacatcacttaggaccgaggtgatgagttcacatacactg

SEQ ID NO: 155629 - DNA, 75 bp, Homo sapiens
tcgggttctgccgcttatcttcaggagcgaagagctgcttctgtatcttaaggtctgccatcatggatgttctcg

SEQ ID NO: 155630 - DNA, 83 bp, Homo sapiens
cacctggaggggcattgcttggttcgcgtggtagcagaggagcttgaggttgaaatcacaaagattagacacctttttagata

SEQ ID NO: 155631 - DNA, 75 bp, Homo sapiens
gcgaagaagctgcagccgcacctggccaagggttgctacaactatctgtataggatgaaagctctggatgccatt

SEQ ID NO: 155632 - DNA, 82 bp, Homo sapiens
tgtaacgggaagctgggcagctacaaaatcaatggccggacgaaaactgacattgagattacacgagaggaggacttcaccc

SEQ ID NO: 155633 - DNA, 96 bp, Homo sapiens
gaaggaacgaggcaaggagctaaagcagcgtgcgttcagccctggggagcaggaactcaaagcagccgctgatggcgtactatctgaagtgaggaa

SEQ ID NO: 155634 - DNA, 100 bp, Homo sapiens
gctgtttccatatgacccttatgaacgagctcgccaaaagatgttattggagctattttgtaaggatggagctatgacattgaagagaggaaggttccaa

SEQ ID NO: 155635 - DNA, 95 bp, Homo sapiens
gacagagctccacggatgcatggacaggaaacttccattttagaagaatacagtatcaattggactcagaagctgggagctggaattagtggtcc

SEQ ID NO: 155636 - DNA, 98 bp, Homo sapiens
ttaaacctgaaagtggtagcaagaaaaaggtagcagcactgcctaaacaagaggttatacaagaagaggaagagataatccatgaagataatgaatgg

SEQ ID NO: 155637 - DNA, 100 bp, Homo sapiens
attctgactatccccccttgcagcaattctttgttgttatggaacattgcctgaaacacggtcttaaaggagcagcatggacctgtcagcaactaaggaa

SEQ ID NO: 155638 - DNA, 90 bp, Homo sapiens
gctcttgggtggtctgtaagccgcggagctaattggagatggtttcacagcacgcagtggcttcgggatatgatgatatgttagtggtac

SEQ ID NO: 155639 - DNA, 112 bp, Homo sapiens
cttggtgtccggcgtcccgggggcgcagggaaggagggcgtccgagtcaacaaccgcttcgagctggacctctccaaggagaactgcaaaccactgctcaatgaaataaaag

SEQ ID NO: 155640 - DNA, 100 bp, Homo sapiens
cgaagggcgacgccaagccggagggatcccaaaatggctgggcgaaaacttgctctaaaaaccattgactgggtagcttttgcagagatcataccccaga

SEQ ID NO: 155641 - DNA, 51 bp, Homo sapiens
ctgtgctgttcatatatggtggtcctcaggctcatcgtgcttcccaacggc

SEQ ID NO: 155642 - DNA, 75 bp, Homo sapiens
tcaagattgacttctcggaatggaaggatgacgagacctcgggaagggactcttcagctgcagcgacccaggccc

SEQ ID NO: 155643 - DNA, 100 bp, Homo sapiens
ttcaagctggagaatgagaggctgaagcctaaatgcgatggccaggtattactgacacaagtgtggaagcgtttaaacctggtagaatgtgactacttcg

SEQ ID NO: 155644 - DNA, 111 bp, Homo sapiens
ggagcccggccccggggaactagggagcgtctccggctgcacagcgctcagacaagttggatggcttgaggactggtactaaaaggaaacgtgactgggaggccattgcca

SEQ ID NO: 155645 - DNA, 100 bp, Homo sapiens
cccacttcgacctgagctgggaggccactagcagccagttccggcccgaggacaccgactaccagcagagtgctgcagccgcccccagccccgttatggg

SEQ ID NO: 155646 - DNA, 100 bp, Homo sapiens
aagtccagagctgaggactgcctgtttgcagcctctacggcagacacatgcaggccaacccagaaccaccgaagaagaataatgacaaatcgaaaaagat

SEQ ID NO: 155647 - DNA, 100 bp, Homo sapiens
tcagcaagaggaccgggctgggcgcgcccggccgcgacgcccgggacccagattgcgggttcagatgatcagtagaattgaatatgtgcatacaaagaat

SEQ ID NO: 155648 - DNA, 101 bp, Homo sapiens
caggcattttctggtggacaacagtgtgtttcatggtgtgggatttgatggaggcaatgataaagattgggaagccaatgcctgcaaaatccagcttatta

SEQ ID NO: 155649 - DNA, 50 bp, Homo sapiens
gccgaagatggcggaggtgcagtgcaccaattccagctggacatcactgt

SEQ ID NO: 155650 - DNA, 50 bp, Homo sapiens
gtgacgagcggccgaagcagctttgcggtacatgtcccagagcaagcaca

SEQ ID NO: 155651 - DNA, 100 bp, Homo sapiens
atacaccgagagagtgaggagccagacgacaagcacacactatggcgctgaaacggattaataagctactctccagagagaccggatcttcaaacatttt

SEQ ID NO: 155652 - DNA, 75 bp, Homo sapiens
acagaatatcatctataacccggttatgatgtgattgctcaagcccaatctgggactgggaaaacggccacattt

SEQ ID NO: 155653 - DNA, 95 bp, Homo sapiens
tgataacaccctgtaacagctgaagaaagcatgggattatggcaaccacagaatctcagtagtacaagttccattcagttttttctgaaagaaag

SEQ ID NO: 155654 - DNA, 83 bp, Homo sapiens
gttcgtcctcggcggccccggcgccggcaaggggacccagtgcgcccgcatcgtcgagacctgcctagagctggaacgttacc

SEQ ID NO: 155655 - DNA, 90 bp, Homo sapiens
ttcctcatcatcgtcttcaggaagccagacagattcaagtattgaaggtacctgtttcccaggcaactactgatcaggcatttctggacc

SEQ ID NO: 155656 - DNA, 50 bp, Homo sapiens
ggccgggcccagagctcctgtctctcagagctcaggccccggggcctcca

SEQ ID NO: 155657 - DNA, 100 bp, Homo sapiens
tgagtttcccacttgattacccgttaagtcccccaaagatgagatttacctgtgagatgtttcatcccaacagtagacgttacatccaagaggaaataat

SEQ ID NO: 155658 - DNA, 50 bp, Homo sapiens
ggggcgcggaccgcggagcggccgttctctacttaaaagacaatgactac

SEQ ID NO: 155659 - DNA, 100 bp, Homo sapiens
aacagggctcgagtctacctggatgaaaactacaaatcccaggagcacttcacgtttggaaattttagcattcaggtgccaggaatgcagatgggacagc

SEQ ID NO: 155660 - DNA, 50 bp, Homo sapiens
cagccagcaccgcacgccctgcaagggagctcttttgtgacagggacggc

SEQ ID NO: 155661 - DNA, 98 bp, Homo sapiens
tccttaacgcctttcaccattaagaggaaagcgatggaggagctgagcgctgatgaggaccttctaccgctttgaggctgtgtgggatagctctctgc

SEQ ID NO: 155662 - DNA, 88 bp, Homo sapiens
ggcgttggaataccggctctcagcggctgtttggtaccatgtatgtagcagccgtggaaaagggtgttataacacaagactcaaggaa

SEQ ID NO: 155663 - DNA, 95 bp, Homo sapiens
atcgacaaaagaaccattgaaaaatttgagaaggaggctgctgagatgggcagagaagttagatcggctaactagtacagcgacaaaagatccag

SEQ ID NO: 155664 - DNA, 100 bp, Homo sapiens
aacagcagatttcccaagagcagcggaaaatgatccagtcacaggaaagatgaatgggagggctgattttcgagagccgaatgcagaggttccaagacca

SEQ ID NO: 155665 - DNA, 100 bp, Homo sapiens
agggcagtttagctgatgttgttgacaccttgaagcagaggaaaatggaagagctcatcaaaaacgagccggaagtgtgaaaaaacaactgatgtgaaga

SEQ ID NO: 155666 - DNA, 82 bp, Homo sapiens
ccaaggtgattcagattgcaacgtcatcctccacagctaaggttttcctttggaatatggataaatacaccatgatacggaa

SEQ ID NO: 155667 - DNA, 80 bp, Homo sapiens
ggcctggttggctggcgcgcatcagggccaggattttttatcaagcagaaatgcatcgaacaacgagaatcaagatcact

SEQ ID NO: 155668 - DNA, 90 bp, Homo sapiens
cataccctggaccagcagaaacctagagtggaaaacctgattggcgccctcttggcgatcttcgggcacctcgtggtcagcattgcactt

SEQ ID NO: 155669 - DNA, 101 bp, Homo sapiens
ccctggaacatcccggaagccgggaaatgggtggttctcttcccaaagtggaagccaaattcatcaattatgtgaagaattgcttccggatgactgaccaa

SEQ ID NO: 155670 - DNA, 83 bp, Homo sapiens
ctgatgaagttcgagcactaatatttaagaaagaagatgttaactttcagggaaaaagacctcgatgaagttctgcagaccca

SEQ ID NO: 155671 - DNA, 122 bp, Homo sapiens
gggcctcccggtgtcctcgggatatcgccaatgtgatgcagaggctgcaaggagaagaatttggattggtttcctcggatgcgagccatgtccctcgttagcaatgaaggcgacagtgagca

SEQ ID NO: 155672 - DNA, 74 bp, Homo sapiens
gcagaacgtgctgcagcagagcgcggcgcagaagaaatttccatgcagtatcggcatgatggagcttgcccaac

SEQ ID NO: 155673 - DNA, 75 bp, Homo sapiens
aggttgacttctacattgataaggtggaagatgctgtgccttttcccctgatgggaaagccttagcggttggctt

SEQ ID NO: 155674 - DNA, 98 bp, Homo sapiens
cttagctgtgctcgcgctactctctctttctggcctggaggctatccagcgtctcggcgcggaagatggccggcggcgtggacggccccatcgggatc

SEQ ID NO: 155675 - DNA, 50 bp, Homo sapiens
acactgtgctgtcccccgccttagatgtccagctcgccgctgtccaagaa

SEQ ID NO: 155676 - DNA, 90 bp, Homo sapiens
aaaacatgagtcaatatgtattgtggcattcaaatcctagcactctgggagaggcacaacgtgtttgattgctctgctatcagataaaga

SEQ ID NO: 155677 - DNA, 117 bp, Homo sapiens
aggatcctcatgcggaagaatttgaagacaaagagtggacatttgtcatagaaaatgagctgcccaatggggaccccaaggaggggcctttccgggaggaccagtgtcccctacagg

SEQ ID NO: 155678 - DNA, 74 bp, Homo sapiens
catggagacccattcagataacccactaagggggatatgagactttctactcggaatatcctgagtgttgcgtg

SEQ ID NO: 155679 - DNA, 83 bp, Homo sapiens
gggctggtgcagccccgggccaggccgcggccggggcaggagcgcagtacctggagtagaacagaaaaattattatgtctgtg

SEQ ID NO: 155680 - DNA, 101 bp, Homo sapiens
ctgcagcgggagctggacggcgagcgcgagcggcgcgagaaaagcctggcagagagcaggtgtgtgatacacgtcgtcaggtgactgaccgaggaattcag

SEQ ID NO: 155681 - DNA, 50 bp, Homo sapiens
tgtaatctcagcactttgggaggccaaggcgggcagatcacaaggtcagg

SEQ ID NO: 155682 - DNA, 80 bp, Homo sapiens
ccatgaatgaagagaacttttttgaatgggaggcattgatcataacaagttgaaatcatcgcagaaggataaagttcgtc

SEQ ID NO: 155683 - DNA, 100 bp, Homo sapiens
tcggtccgggacgtgcgcttccccacgtcgcttgggggccacggcgcggacgccatgatgatgaccactggatcgtcgacacagactacgacacgtatgc

SEQ ID NO: 155684 - DNA, 83 bp, Homo sapiens
tgcgccgccggggccgctgcaaggggaggagagaggccgcctcagacaatgcagatcttcgtgaagactctgactggtaagac

SEQ ID NO: 155685 - DNA, 114 bp, Homo sapiens
ctaaatgatgggcagtcatggtcccagaaacgtcactatcaagaagtctcttgcatggcaccaagaatgttaccaattcaagcagtttaagattgccaagacaaaatagtgatg

SEQ ID NO: 155686 - DNA, 82 bp, Homo sapiens
ggcgccgaccaggcctggctcgcgcctctcccaggacccgcctggctgcgagatatgaggcccgggcagtcctgacctttgc

SEQ ID NO: 155687 - DNA, 100 bp, Homo sapiens
gccactggaaaccgcacctccccgcagcctcttgttgctgtaccacatagaattcactcaacaagtagaaacgtgagagaagaaaaaacacgctcagaga

SEQ ID NO: 155688 - DNA, 100 bp, Homo sapiens
ggatcctggagcagctcacgcgcctctacgactgccagagtccctggcctatctcacagctgctacccatggcttagatgaagaagctgagagcctaaag

SEQ ID NO: 155689 - DNA, 101 bp, Homo sapiens
tgcatatggaatgtatggccaggcatggaaccagcaaggatttaaatgttttactgtgcctggctaactatagtcgagggggtgatggtcctatgtgtcgc

SEQ ID NO: 155690 - DNA, 131 bp, Homo sapiens
gcaaagcggggacccagaccctggagcctcagttggaagcagccgatccagcctgcggagcctgtggggcagggggcccaggcagtgccacttctgatctggggatggcatgtgaccgtgccagggtcttc

SEQ ID NO: 155691 - DNA, 75 bp, Homo sapiens
catcgtcatcttcctgtcagtctgcagctactcaggaaccacagaggacacattaataactggaagtaaaactgc

SEQ ID NO: 155692 - DNA, 96 bp, Homo sapiens
cgttggtcttctgatagcaactttaatgtggtgcttcagcgaagagtcctgcgtctccatccctgaagtggagggctacgtggtcgtccttcagcc

SEQ ID NO: 155693 - DNA, 51 bp, Homo sapiens
ccttggaaaatgccaacgccgtgtctgaagaaccacaccttcatcaagcgg

SEQ ID NO: 155694 - DNA, 100 bp, Homo sapiens
ttatcatggagttgataacaagaagaataaagggcagctcactaatgctacctgggcgatgccttccgctgtgccagctgcccctaccttgggatgccag

SEQ ID NO: 155695 - DNA, 96 bp, Homo sapiens
gttaaaagttacctgtttcggaatgcttttgtgctgctcacagtcaccgctgtcattgtgggatgtgttcgaaatgcgctttgccaagatgccgga

SEQ ID NO: 155696 - DNA, 90 bp, Homo sapiens
ctgaagtgaacactgcagggccatttgataacaacgaacttgatgcaagtgataggtttgccaaggtcagacctctcatcatccggatga

SEQ ID NO: 155697 - DNA, 100 bp, Homo sapiens
tttggatgcagcatagtcatggtgatgggtattacagatgtagatgataaaatcatcaaaagagccaatgagaatgccagaggattcaacatgagcatac

SEQ ID NO: 155698 - DNA, 83 bp, Homo sapiens
atcgggctgaagcgactgagtccgcgatggagacacaacatttgcctgcaacaaggacagcggccagtggcactactttgatg

SEQ ID NO: 155699 - DNA, 90 bp, Homo sapiens
caagaggtggaagaggacgggctttaggctggaagcgccttagaggagccatttttccagggaaggtgtgatggagttcttattagcaaa

SEQ ID NO: 155700 - DNA, 88 bp, Homo sapiens
ggtggccggcagtcatctcgcggccgttcaggcacacaagactgtatctctgcttacacaagtctggccagaaggatctgacattcgg

SEQ ID NO: 155701 - DNA, 100 bp, Homo sapiens
aggtagtacgtagagctcctgagccacgagtgattgacttttccagaagcctgttaaaagcaaggtctccccacaagcaacttctctgccacatcgccac

SEQ ID NO: 155702 - DNA, 100 bp, Homo sapiens
tccattggatttaaaagacagtcctcgtcagcactgactttcagctatggaatcgaaaaattgtatggcgacttcttgagctggaagctagaggaaaccc

SEQ ID NO: 155703 - DNA, 100 bp, Homo sapiens
ggcagcggagttcctcttccacctaccaccgccagcgcaggcatagcgatttctgcacgtggactccctttaatccagtgactgtcaggtcgatcatatg

SEQ ID NO: 155704 - DNA, 97 bp, Homo sapiens
tgccattcctcaccaggaactacctcaaacaaggcttcatggaaaagactgggccaaaggaaagtggagaatgaggacatgaataaagaccagatct

SEQ ID NO: 155705 - DNA, 75 bp, Homo sapiens
caccttactctgagggtcaagaattgccgcttccttttagttactgccactccccacctgtcctgcctttgtgtg

SEQ ID NO: 155706 - DNA, 90 bp, Homo sapiens
ctcatcccaaagactcattacactcttgtgaccatcctcttgccgaaaaaacccagagcggcactgcagaggtggagctgaagaagggag

SEQ ID NO: 155707 - DNA, 51 bp, Homo sapiens
ggccccgctccgcttcgaatgggtattaaagactaccacagaggctatgat

SEQ ID NO: 155708 - DNA, 51 bp, Homo sapiens
ggccactcagagtcgcccgagaagttgcaaaagcttctcatttcagagaga

SEQ ID NO: 155709 - DNA, 50 bp, Homo sapiens
caagggcacccctgagaaagccaatgagaaactcatcgcatacgggcaca

SEQ ID NO: 155710 - DNA, 98 bp, Homo sapiens
agcagtgttcatggagttcattgaattatggcatagatcttgggaaaattgcgaactcaaagaacctgtaggacaaatcgtatgtacagataaaggta

SEQ ID NO: 155711 - DNA, 122 bp, Homo sapiens
tttttcaatgagaagaatgaacagacctagtgggcgttgcctttagacccaggcatagaatgtcaagctaaccaggcgtccgctacttcagaagagtgtactgtcgcatggggagtctgtaa

SEQ ID NO: 155712 - DNA, 50 bp, Homo sapiens
ctggataccaaatagcagtggaaaccggtcaccttcttgactcctttgcc

SEQ ID NO: 155713 - DNA, 100 bp, Homo sapiens
cctgggtttggaggccgcacctgcagcgagtgccaggaactcttctggggagaccccgacgtggagtgccgagcatcaacaacagcaacttgtgattggc

SEQ ID NO: 155714 - DNA, 100 bp, Homo sapiens
ctctgtggaggagcagcagtagtcggagggtgcaggaatagctattcagtcagacagaaccacttatcacgttttgcagtatctcctgaggaagtcagaa

SEQ ID NO: 155715 - DNA, 97 bp, Homo sapiens
cgaggaggcagccaagctcgtagcctgccactccgtgcgacccttgaacatctgtgaagaaatgactattctgcatggaggcttcttgctggccgag

SEQ ID NO: 155716 - DNA, 83 bp, Homo sapiens
gaactagcagatgctggcgacctatccagaatgatcaagcagtccaaggttgtgctcttggaagacctggcttcccaggtggg

SEQ ID NO: 155717 - DNA, 97 bp, Homo sapiens
atccggttccttggtgtcatccagccttagcaaaccagaggctgatcccaaagaactaatcaagatggtcaccaggcatgtgactcgacatgagcac

SEQ ID NO: 155718 - DNA, 76 bp, Homo sapiens
gggatttctacgacccggagcacccgacccctgaggttttgacccaccacatcagagtgacacaagaaccatctac

SEQ ID NO: 155719 - DNA, 98 bp, Homo sapiens
atctcaaaaacaaaattctgaactcaggacttggcaagcgttcgtggcattcagggatgtggctgtgtacttcacccaggaggagtggaggttgttga

SEQ ID NO: 155720 - DNA, 80 bp, Homo sapiens
ggcattgctatttttgcacttcagttcacatactatttatggattgcattcatggcttctctggcaacccacttcagcaa

SEQ ID NO: 155721 - DNA, 101 bp, Homo sapiens
aacctcctctggcccccggaaaacctaaccatgaagacttgaacttaatacagcaagaaagaccatcaagtttaccatattggatgaacgaatatacctca

SEQ ID NO: 155722 - DNA, 75 bp, Homo sapiens
gctaacccgacccggattggcgctgaggtggcccgtggggcagctcttcctgctgcccacattcctgcaccccct

SEQ ID NO: 155723 - DNA, 100 bp, Homo sapiens
tgagcacgtggggtggacaagccatccaatcagtcctcactgactctgtgaattttgaagattgcaccggtcgacaaaggacagcctatttttccctcga

SEQ ID NO: 155724 - DNA, 50 bp, Homo sapiens
cacggaagcagctggataaagaacagtgtaaactggagttgctggtgggc

SEQ ID NO: 155725 - DNA, 82 bp, Homo sapiens
agaaaatcgcatgctgccccaggttcagccgtctgtatatctccccagatacctgaaactgaccacctgagtacgttttccc

SEQ ID NO: 155726 - DNA, 100 bp, Homo sapiens
aataccacacaattggtacaagatgaccaagtaaagggtcctttaagagttctgtacagagtaatgagatgtgtgacggctgcaaaccaggtgttttttt

SEQ ID NO: 155727 - DNA, 100 bp, Homo sapiens
agcagtctcctggaggagcagttccagcagggcaagcttcttggaatttgctgacacaatatcttccgcctggtgctgggcatatcctaagaacttacaa

SEQ ID NO: 155728 - DNA, 90 bp, Homo sapiens
gaatgatcaggatacttgggactacacaaaccccaatctcagtggacaagtacacctgaagcggcacttcatgttccggaaccacctgtg

SEQ ID NO: 155729 - DNA, 80 bp, Homo sapiens
cgctgccgctgccgctgccgcacctccgtagctgactcggtgcagaggccaagaccgttttgcccaagaaggagaaaatg

SEQ ID NO: 155730 - DNA, 100 bp, Homo sapiens
ctgcctccactggcccaggcatggaacccgagaccacagccaccactattctagcatccgtgaaggagcaggattctggactctacttataatatcccta

SEQ ID NO: 155731 - DNA, 82 bp, Homo sapiens
ctgagactggagtgagagggtcttctgctgtccgcaggcttgtccaaaaggaaacatcggaatgaccacttaacatctacaa

SEQ ID NO: 155732 - DNA, 82 bp, Homo sapiens
cccacctcagcccagcaattcgaataactgaagtgaagtgatggactccgatttggagagtagtaagacgtgaaaggaatac

SEQ ID NO: 155733 - DNA, 76 bp, Homo sapiens
acgcggttagtgcaagcatctgggccatcttcaatgtgaatcaattccaataaggctatttttagcaggatatgac

SEQ ID NO: 155734 - DNA, 82 bp, Homo sapiens
ttgactgaacctggaaaagagccggtggttatcactaggctaaaactggacaaagaccgcaaaaagatcctcgaacggaaag

SEQ ID NO: 155735 - DNA, 75 bp, Homo sapiens
ggaaaggcacccatccttattgctacagatgtagcctcccgtgggctaggtactaggttttgacaagcttgcatc

SEQ ID NO: 155736 - DNA, 87 bp, Homo sapiens
cgtcttatagttgagaatttatcctcaagagtcagctggcaggtcgcaatgatgatgtcaaatgcttttgttgtgatggtggcttga

SEQ ID NO: 155737 - DNA, 75 bp, Homo sapiens
gaaaaattgactgtatcctatgatgaagcaggcaagcacgaggagcggcaggacgagcatggctacatctcccgg

SEQ ID NO: 155738 - DNA, 100 bp, Homo sapiens
aggttttaaatcaagatttaacattccaacacataaaaattatttatccaacagctcctcccaggtttaccgacaagactgtgaaactttcgggatggtg

SEQ ID NO: 155739 - DNA, 99 bp, Homo sapiens
caggaaggtctcacctgaggtgaaccttcgaccttggacttctcagcctccagaatgggctttgttcgcgggggtcacagctctcatggctgcagctag

SEQ ID NO: 155740 - DNA, 100 bp, Homo sapiens
tgaggagccagaggagaccagaggcttgggttttgatgaaatccggcaacagcagcagaaaattatccaagctgactggaaataccggcatgcaggattg

SEQ ID NO: 155741 - DNA, 97 bp, Homo sapiens
atcctgggcgtcttcccaggctgtcatataactcctgagaatagtggttcttaactctgaaggatgataaagactatgctttaaaacaaatagaagg

SEQ ID NO: 155742 - DNA, 74 bp, Homo sapiens
attaaactatgggattttcagggctttgaatgcatcagaaccatgcacgtagagacggggtttcgccatgttgg

SEQ ID NO: 155743 - DNA, 83 bp, Homo sapiens
aatactgatgtcagataaaacttttccccaaaaccctgttgaactaaagtacaaggtgaatatcttaaccagacttgccgcag

SEQ ID NO: 155744 - DNA, 100 bp, Homo sapiens
ccagcgccggcctcctccgtgcggagaagaagctgcggccgcacctggccaagggattctcgcaggagccacagctaacaaggcttctcataacaggacc

SEQ ID NO: 155745 - DNA, 83 bp, Homo sapiens
cagtctcattagttttctggaagcaagatacagataatcccaaggactgcagcaaagccaaaaagctggtgtgtaatatcaac

SEQ ID NO: 155746 - DNA, 73 bp, Homo sapiens
gcatggtcagtgccatttcgcctttatcgtggtggagtccaccctggctgtgattgggagagtcatattaata

SEQ ID NO: 155747 - DNA, 101 bp, Homo sapiens
ccttgagggcaggcctgtcttgcatctgtttctccaccacctagcctggaatataggaaatggctcattccaagactagcttttcatgggcaacccctttc

SEQ ID NO: 155748 - DNA, 87 bp, Homo sapiens
tcctgatattaagccatcaaatgtggaacctatggaaaagggtgtacaactatgagcctttgacacagctcaagaatgtcagagcaa

SEQ ID NO: 155749 - DNA, 74 bp, Homo sapiens
cactaccaagaagggatctatcacctctgtacaggggacccaagtaacagggaggaaagcagatgttattaagg

SEQ ID NO: 155750 - DNA, 83 bp, Homo sapiens
atgaggcaagcgcagggggacggggaccagcagctgtcgccgccgctctcagattggccatctgcaagcttcccttctccgtg

SEQ ID NO: 155751 - DNA, 73 bp, Homo sapiens
tgggcatcctcctgagactccggggtcagacgcccactccaggtgacgcatccaaagaagacattgacactgc

SEQ ID NO: 155752 - DNA, 75 bp, Homo sapiens
cactagagcagagtacgagtctgaggcggagggagtaatggttctgctccagacgagcccttaccacgttgactc

SEQ ID NO: 155753 - DNA, 90 bp, Homo sapiens
cagtggagcgcactcgtaacctggatcccagaaggtcgcgaaggcagtaccgtttcctcagcggcggtcaggatggctaaaggtgacccc

SEQ ID NO: 155754 - DNA, 96 bp, Homo sapiens
atctaccacctacagccaagtggcagatttgttattggtgggcctcagggccatgctatgatagtggaagcttatccaaaataatagatccagaag

SEQ ID NO: 155755 - DNA, 74 bp, Homo sapiens
gaaactgtgttccccccttgggttgctatcggatgatgatgctgaagctatccttgctgcagacttcgaaattg

SEQ ID NO: 155756 - DNA, 75 bp, Homo sapiens
cctgacagaagctttggtggatcacctcaatgtgggagacgaagtttcatcatgttgtccaggctggtgtcaaac

SEQ ID NO: 155757 - DNA, 96 bp, Homo sapiens
cgggccggccgcccagacgctgcccgcgggcccggccacggcggagccaaggctggagtgcagtggcgagatctcgactcactgcaggctccgact

SEQ ID NO: 155758 - DNA, 104 bp, Homo sapiens
ctttcaatgacaaaaagtttgtcattaaacccatcgacaagaaggcacctgtctctcagccagggtagtacaaatgcaacagtgctagatgttgctcagacagg

SEQ ID NO: 155759 - DNA, 87 bp, Homo sapiens
ggagttcgtctcttacgtctgcggaagtgcagctgcctcagttcttagcgcaggtgggcaccatgtccttgaagcttcaggcaagca

SEQ ID NO: 155760 - DNA, 75 bp, Homo sapiens
gcgggtggaccgattgtcgctcggcggcgggagtcgcacccctgcagtggaccatgagtcggtaatgcccactga

SEQ ID NO: 155761 - DNA, 75 bp, Homo sapiens
gtccgagcttggacccttaatgaggaccacactccaacgcggggcgcagtgggtgtccgcaatgttgccagtgtc

SEQ ID NO: 155762 - DNA, 50 bp, Homo sapiens
cggcgactccggggatggcgaagcgtcattacacctactctgagaatcgt

SEQ ID NO: 155763 - DNA, 83 bp, Homo sapiens
gccgtcaacgccttcaaccaggaggaactgattcatttggaagaaagattaggcaatgtcaatcgtggagcatcccaggggac

SEQ ID NO: 155764 - DNA, 100 bp, Homo sapiens
gccacacagtgtccagatacgagggatcctggaggtgatgggatagactggggagacgatgctgttgctttgcagatcacagtgctggaagcaggaaccc

SEQ ID NO: 155765 - DNA, 100 bp, Homo sapiens
atcttctcagttcctggctcccaaggacagtcattttgtttactcattcagccctgttgcaggtcccaataaactcttcataaggttgacagaagcaccc

SEQ ID NO: 155766 - DNA, 82 bp, Homo sapiens
cgaggccctcatgtaccacacggattggcagccaccatttgcatgtgatgttgataaacttcattttacgccacgtatccag

SEQ ID NO: 155767 - DNA, 96 bp, Homo sapiens
ctgctcgccgtccccgccatgctgtctctagactttttggacgatgtgcggcggatgaacaagcggcagaatcctggtaattgatgtccacccgag

SEQ ID NO: 155768 - DNA, 100 bp, Homo sapiens
taccaagcgtctcattggccggcgatatgatgatcctgaagtacagaaagacatgtcacatttagggcaggcaaaacataagggatatagccctcctgag

SEQ ID NO: 155769 - DNA, 106 bp, Homo sapiens
gcaagcggtttgggaccttgaacaaggcaaatatggttttgacatatgtagagtgtgtcggtcagaaggaacacctgagaaaccgctttatcatccttgtgtatgt

SEQ ID NO: 155770 - DNA, 75 bp, Homo sapiens
aagggaagggagagtggcatccgcactggttgctcgtcgtcattacagtgactactgtgaagactggccagaggc

SEQ ID NO: 155771 - DNA, 99 bp, Homo sapiens
tatatgccatggttgagggagactgtgatgaggagccttttgtggcagatgaatatattgaacgtcttgtatggagaaccccaggaggaggctctagag

SEQ ID NO: 155772 - DNA, 75 bp, Homo sapiens
cagctgttccttggccatcccaaagctattctgggggcaacagagctcatgggcctcctgagtgacccagaatta

SEQ ID NO: 155773 - DNA, 74 bp, Homo sapiens
ggtatccaagggttgtatcgaggctataaaagcacagttttaagagagggtgtcgaagtgcagacagactacgt

SEQ ID NO: 155774 - DNA, 100 bp, Homo sapiens
gatggatccatttctcctattgaggagtcaacgaatctgatgcttccaccagatgtctggatgaaaataactatgacagggaaaggtgttccacttactt

SEQ ID NO: 155775 - DNA, 100 bp, Homo sapiens
ccagaaatgagggcatactggcctgacgtaattcactcgtttcccaatcgcagccgcttctgtaccagccatcgctcagagaaaagtgagataagtattg

SEQ ID NO: 155776 - DNA, 100 bp, Homo sapiens
gggtctctatctgggagctgggccagggcctggactacttctacgacctgctctagctcagagcccgggcgctgtggaagagattctagaccgggagaac

SEQ ID NO: 155777 - DNA, 75 bp, Homo sapiens
ccaagctgagttccagtcatacagcaggacatgctacgacagtgaagattcagatccggaagaccacggccagcc

SEQ ID NO: 155778 - DNA, 75 bp, Homo sapiens
gtggagtgtagagatatagttggcaacctcactgagttagaatcagaggaggaacatatgcagcagaaaaaagag

SEQ ID NO: 155779 - DNA, 90 bp, Homo sapiens
gtggaattattgacccagggtcaactgtgactgtttcagagtggacagctggttttgaggggtacagtctgagcagtcgaagaaatatag

SEQ ID NO: 155780 - DNA, 89 bp, Homo sapiens
cgggctccgagaggcccgggagcggcgcgcagagcagcctccggccgccgccgcgcagttttacaatgagttgactgaaatcctggtca

SEQ ID NO: 155781 - DNA, 100 bp, Homo sapiens
caaagagtcacctaaagttaggcggcactccagccccagctcgctaaaccatttacacagctggtgaaagaaatgcagcttcatcgagaagactttgaaa

SEQ ID NO: 155782 - DNA, 82 bp, Homo sapiens
ccacagtccgcagggatgaacctcgagttgctggaattcagacctaccttcagtcaacaaagccaattattgacttatatga

SEQ ID NO: 155783 - DNA, 90 bp, Homo sapiens
aacggcaccaactattcgcggagctggaatgactggcaacccagcaccagaaagtttgatgcaggcattggaagacttagattatctggc

SEQ ID NO: 155784 - DNA, 100 bp, Homo sapiens
agcagctccacgaaaggcagccgcggatcgccgcgctcagcgacaaacaaggagagtcccgtattctcagagtaaaagttgtttctggaattgatctcgc

SEQ ID NO: 155785 - DNA, 74 bp, Homo sapiens
agggaaccctggtcaccgtctcctcagggacccagacatggagctgcgggaagaagcctggtctccggggccgc

SEQ ID NO: 155786 - DNA, 51 bp, Homo sapiens
gagcaagcagaatggataacgacctgggttactaggtgtctttcagaagct

SEQ ID NO: 155787 - DNA, 100 bp, Homo sapiens
ccgcggggaccagcgcggacggcggcgacggaggagagcagctcctcactgtcaagcacgagctgcggactggaactcaacagaggcaattattatcccg

SEQ ID NO: 155788 - DNA, 74 bp, Homo sapiens
tgagaagagccttgctttattactcaattatcttcacgatttcctaaagtagatgacattaatgctgataagaa

SEQ ID NO: 155789 - DNA, 78 bp, Homo sapiens
cgacccaagacacccagagagggacaggaggttccagccttggcaagaggagtgtggcccttcctggaatccctctgg

SEQ ID NO: 155790 - DNA, 50 bp, Homo sapiens
ccacgggcaaggaggtgcacggacatgatccacatcgcggacaccaaggt

SEQ ID NO: 155791 - DNA, 75 bp, Homo sapiens
tcttagtgcttggcagattagtactgtccctagctgttggtagtaagtccggttataaatttttctccctttctt

SEQ ID NO: 155792 - DNA, 87 bp, Homo sapiens
tgcgtgtcatcaagaagtactggctccagttccgggaaggcccctgggggcagctgtgattagagaagccagggccaccccggagcc

SEQ ID NO: 155793 - DNA, 75 bp, Homo sapiens
attgaataagtgttttaagaaagtggacaaagagaggagtcaggcatctatcctttctctggtgacaaaaataaa

SEQ ID NO: 155794 - DNA, 75 bp, Homo sapiens
tgcaaggactggttccacggcagttccagggtctccctccactgctgtagtaacccgggtccggggcctcggtgg

SEQ ID NO: 155795 - DNA, 101 bp, Homo sapiens
gcttaaaccaagaaacagtatgtttagcaagcactgctatgaagactgagaattgtgtggccaaagagcacatctacaagctgatgaagagtgacagctat

SEQ ID NO: 155796 - DNA, 83 bp, Homo sapiens
cttgactaatcttcgggcagagagaaggaaacacttagaggaagttctggagatgaacctgccaggagtgaagaaagctttgg

SEQ ID NO: 155797 - DNA, 90 bp, Homo sapiens
ataaagtaagatgcagctgtggcatgtcaaccagcttggttttgggtcctgctcctcggtggtgttccttcttagacaacttgaccgaag

SEQ ID NO: 155798 - DNA, 115 bp, Homo sapiens
catttcatccctcgtcgaaaggattggattggcatctttagagtccaggccatcaacgtgtccagccgcttcgaggaggagatcaaggcagagcaggaggaaaggaagaagcagg

SEQ ID NO: 155799 - DNA, 90 bp, Homo sapiens
cgaatgaaggaatcctctccatctggttcgaagtctcagcggtattctggtgcttatggtgcctcaggtgaccagcatcatgtcccaccg

SEQ ID NO: 155800 - DNA, 75 bp, Homo sapiens
tccagacatgggaggcaatgagtccagcatctacttaatcatttgctgtttcaaatagagaactgtgcgatgatg

SEQ ID NO: 155801 - DNA, 98 bp, Homo sapiens
ttcagagagcatctggagctaattgtgaaaaatagtgcaacctacaatgttcttcctgtccaagatccggtcccacgtggctacttgttccaaatacc

SEQ ID NO: 155802 - DNA, 100 bp, Homo sapiens
agcgcagcgacggcgtcgggagagcgcgcctagccggctcgcgagcagagatcctacaagaatccaggatgatgatcccagattgccagcgcaggttgga

SEQ ID NO: 155803 - DNA, 80 bp, Homo sapiens
aagctatcaaagcccttgaagtcagggtgattttgtagacagaggttactatagtttggagaccttcacttaccttcttg

SEQ ID NO: 155804 - DNA, 100 bp, Homo sapiens
ttcgcctccatctgtaccatggtctctgaaagaagatgaatttggctgagatttgtgataatgcaaagaaaggaagagaatatgcccttcttggaaatta

SEQ ID NO: 155805 - DNA, 76 bp, Homo sapiens
gttgtatcgaggctataaaagcacagttttaagagaggctcccgtcttcgtcaggaagattttccacctcgcattg

SEQ ID NO: 155806 - DNA, 80 bp, Homo sapiens
gcctgacaaccttggaacagaacaagaggacaggaggtgtcgttccaggtcagcccaaggccaaccccactgtcactctg

SEQ ID NO: 155807 - DNA, 75 bp, Homo sapiens
aaggccctggacacagcaatatctctgggctttcacagaaatctccgagaagcaagggataatgctgtggctgaa

SEQ ID NO: 155808 - DNA, 100 bp, Homo sapiens
gcacaaaagagtctccgcggtggaggtctgcgttgctcttgcttttcctcgctggggtgtacggaagatgagaatgtgcctactgctcctgatcctccaa

SEQ ID NO: 155809 - DNA, 90 bp, Homo sapiens
ctgggcagaacgcgacgggtctgcggcttaggcttgtactcccagagtacctcatccacgctttcttctgtgtcatgtttctttgtgcag

SEQ ID NO: 155810 - DNA, 88 bp, Homo sapiens
ccactggagttgcttcacttagctctacaatcaacccatgtggttgaaatcacaaagattagacacctttttagataggtgttcttca

SEQ ID NO: 155811 - DNA, 100 bp, Homo sapiens
ctgtcatgcttcctgaaggggaagatctcaatgaatgggttgcagttaacaatgcagcaaatattttggtgatgggtgtggaaaattctgcaaaagaagg

SEQ ID NO: 155812 - DNA, 75 bp, Homo sapiens
ccgaggaggcagccaagctcatggcctgccactgcgtgcgctccctggggaagggaatgcagggttgctggggct

SEQ ID NO: 155813 - DNA, 100 bp, Homo sapiens
cctggataaggaacagctacagtcgctgttaaatgtgcctgaaaagcaatttgcaatctttgcattagaatgtgaaaacctttgcatcttctgatagtct

SEQ ID NO: 155814 - DNA, 90 bp, Homo sapiens
ggcggtctgtcggcggagtcgccctcgggggctgtcaggttctggctccttggcagcaatggctgtatttgaagataagtttaggccaga

SEQ ID NO: 155815 - DNA, 100 bp, Homo sapiens
cggcggacctgcccgcgatcaccttcacggcatggtgcaactcccacctgcggaaggcaggcacacagatcgagaacattgatgaggacttccgagacgg

SEQ ID NO: 155816 - DNA, 75 bp, Homo sapiens
acaaatacccctttgaattaattatggctccactgaggcggctcccagctgcgttggcgacatggccgacacccc

SEQ ID NO: 155817 - DNA, 98 bp, Homo sapiens
tcaagaggctgaatgctatctgtgcacaagtcattcctttcctgtcccaagagatggacggggagtccgaggaggagcaggagtccgtggacaccggg

SEQ ID NO: 155818 - DNA, 75 bp, Homo sapiens
gcgaatccggcccccgcagcgggacccggccaaaacaacttcccgacaagtggcagcacgatcttttcgacagtg

SEQ ID NO: 155819 - DNA, 90 bp, Homo sapiens
gggagatcgtgggcgagctgggcgacggcgccttcggcaaggtttacaagagcagcccgacggccatggaggctgaagagacgatggaat

SEQ ID NO: 155820 - DNA, 100 bp, Homo sapiens
gggtcaccggagcgacagaaaacttggaactaagctggaggacaccgagtactcttatgcagtccccatgctctcggaagaactggttgttaaagagcac

SEQ ID NO: 155821 - DNA, 98 bp, Homo sapiens
ctgccttcagcccttccaggaggaccagcaagggctctgtgtgcccaggatgcgccggcctccagttatagggatggcccaggtaatcctcttagaca

SEQ ID NO: 155822 - DNA, 75 bp, Homo sapiens
tatagagctggaattaggcaaatatggacaggaattgaatgatctggcacgggaccctccagcacagtgttcagc

SEQ ID NO: 155823 - DNA, 90 bp, Homo sapiens
ccgggaggacccactcccccaggactcctttgaaggcgtggacgaggacgagtggggtcacggagactcaccagttggcagaattaaatg

SEQ ID NO: 155824 - DNA, 99 bp, Homo sapiens
cgcgctggcgggaggtttggagcagatggataccgtatcgacgtggggcctccggtatgttgccgctgcgttgagctgatgaacttattagtcctaaag

SEQ ID NO: 155825 - DNA, 88 bp, Homo sapiens
ccacatgaaaatggatgttgcctgcaaggtcaagccgctgctgcaggtgagccggcaggaggaggagatgatggccaaggaggaggag

SEQ ID NO: 155826 - DNA, 50 bp, Homo sapiens
ctacccgggatacggaggaggggtcttgagtcaccacgtccgaatataat

SEQ ID NO: 155827 - DNA, 100 bp, Homo sapiens
ctcctgcctcagccccctgagtagctgggattacaggcacgcgccaccactcccaggcagcacacttctgcttttgttccttcatcaggacgaatttact

SEQ ID NO: 155828 - DNA, 74 bp, Homo sapiens
tcggcggctgaggaaagcaggaggaggtggcggcggcgggaagatgggccaaaccagtgctcctgccacctctc

SEQ ID NO: 155829 - DNA, 96 bp, Homo sapiens
aatggagaaattgctgctatcatccatcctaatctgcagatattcaagagaagcttatgtggagttagttcaccatattagagaatctattccagg

SEQ ID NO: 155830 - DNA, 50 bp, Homo sapiens
tccatgcaccagtttcgccaggacacaggagtacgagagggcctccaaag

SEQ ID NO: 155831 - DNA, 96 bp, Homo sapiens
ctggccagggcagcccttcaggagctccttagtaaaggtcagagtttaccagcagggattcacagagctccgacaagcagattctaaacatctatg

SEQ ID NO: 155832 - DNA, 101 bp, Homo sapiens
aaaaattcatctgggcggtatctggaacttgtgtgattcttggagcaaatacccggccagacttggatctccgagaccccatctgtgatgacttcttccag

SEQ ID NO: 155833 - DNA, 75 bp, Homo sapiens
gaaatgccagtccagttaacatcaaggagagaaatcaggaagattatgggagtgcagtcattggagaaatcgatg

SEQ ID NO: 155834 - DNA, 100 bp, Homo sapiens
aggacctgtctgacgatagtccaaaaactgaagaagatggtggataagcccacccaggtggggtttttcggctacgtcagcttcaccgaggccacggccg

SEQ ID NO: 155835 - DNA, 79 bp, Homo sapiens
aagaaagcctctttgcaactgggtcagaatggcggcagcggagcatcgtcattcttcaggattgccctgctggccctac

SEQ ID NO: 155836 - DNA, 100 bp, Homo sapiens
tccttccgctagtgatcctttgcaccctgcttggagacggacttgcttccgatggatcctgagcttgaaaaaaaactgaaagagaataaaatatctttag

SEQ ID NO: 155837 - DNA, 75 bp, Homo sapiens
aagacgtcatgctagccgaggcccaggtatgtatattaggttaggctgggaagttttttttaaaaacagaaaaac

SEQ ID NO: 155838 - DNA, 112 bp, Homo sapiens
aaacacacccagacgcacacttctgccaagcatagccaccacgggttttgagctcatcttcatcattcatatgaggaaataagtggtaaaatccttggaaatacaatgagac

SEQ ID NO: 155839 - DNA, 100 bp, Homo sapiens
tgttcaggccagaccctctgggagcttctcagccattttccacagatcaggctggtccagggaccctcatcatggccacaggagtccaggactttaaccg

SEQ ID NO: 155840 - DNA, 75 bp, Homo sapiens
caaaactcctctctatagtcaactccttcaagcatataagtggtcaaacaagaactttcacgatggccgtaaagc

SEQ ID NO: 155841 - DNA, 100 bp, Homo sapiens
ggcctctccaccctgggggagctgaaacagaacctgtccaggagctggcatgacgtgcaggtctctagcgcgtccctggtgctgaaccgcctgcgtccag

SEQ ID NO: 155842 - DNA, 90 bp, Homo sapiens
gtgttgctagttttcctagtgctgatgaaactgatggtaacctcccagtccctgagattctgcagctcagcgatgccctgcgggacaaca

SEQ ID NO: 155843 - DNA, 101 bp, Homo sapiens
cgaccgccatggcgttcctcaaactccgtgaccagtgacagaggccaagcaagaattaataacctaccctcagcctcagaaaacatccataccagcaccat

SEQ ID NO: 155844 - DNA, 149 bp, Homo sapiens
ggggaccgagcctgggaggccggccggtgccagcacctttcggcttctgagacggcggcagcagcggcattcaggtttttcgttggaatatacgttgcacatttatggcgattctgagtgtgagggcagacttctgccaggctcagcac

SEQ ID NO: 155845 - DNA, 75 bp, Homo sapiens
caccgggaggccgggccgagcggtgtttgtaaaatgtatgaagaacatctgaaaagaatgaatcccaacagtccc

SEQ ID NO: 155846 - DNA, 100 bp, Homo sapiens
caccctgagcaagaaggagctgaaggagctgatccagaaggagctcaccattggctcgtgttaatgtaccgcggtgaggctcttgaagatttcacaggcc

SEQ ID NO: 155847 - DNA, 75 bp, Homo sapiens
gaaaagtgcctgcaatttgccatttatttgtaataaggtaagaatgattgatgttggctgatattggagtgctca

SEQ ID NO: 155848 - DNA, 75 bp, Homo sapiens
agaaggagaacaagccaggaaaaccccgaaaacgcaagaagcgtattgaaactgcttctgccttggctagaggcc

SEQ ID NO: 155849 - DNA, 74 bp, Homo sapiens
tcttctgtcatgaactgccacatgaattaggtacccagcgtgccaatgcccgggctccagccccttacaagcgg

SEQ ID NO: 155850 - DNA, 50 bp, Homo sapiens
gaacttctctcatggaactcatgagggtcttgctacgtacgttgcccagg

SEQ ID NO: 155851 - DNA, 100 bp, Homo sapiens
gaagaagctgcggaagcccagacaccaggaaggtgagatcttcgacacagaaaaagaggaccctgaaccatcaatatgactacacatttgattggacaat

SEQ ID NO: 155852 - DNA, 76 bp, Homo sapiens
ctccgggcttgccctggagccctcaggtcgcaatggaagaagagatcgccgcgctggtcattgacaatggctccgg

SEQ ID NO: 155853 - DNA, 83 bp, Homo sapiens
ctcccctgcggctcgggcaacgcgctggccggagcagtgaaccagcacgggggatcctgagagtgagaagcctgactgacccc

SEQ ID NO: 155854 - DNA, 73 bp, Homo sapiens
cagcttgcttatggcatctatgtcatccaccaggtgcaggtgatggtcctaccagtgtgtctgttgaggtcac

SEQ ID NO: 155855 - DNA, 82 bp, Homo sapiens
ctctgtcaagtagacagcatcacttaatacaaagcttatgtccctgatgccaaaaatgcacctactctttcctctaactctg

SEQ ID NO: 155856 - DNA, 49 bp, Homo sapiens
cgagcggttccttgtgggctaggtacttcttcctgccctctctcccacc

SEQ ID NO: 155857 - DNA, 100 bp, Homo sapiens
gttacagcgagctgcttactatcagagcccgcggttcccttcaaaaagcggctgcaagatctggaggtgcgggagaaggagtcggccacgttcctatgtg

SEQ ID NO: 155858 - DNA, 139 bp, Homo sapiens
cgcgggcgtccgcggagcagcttccccccgcgcctctcttcgcctcgcctcgggacccgcggtccccgctcttgctggtacagaggtgcagttccatggtacaccataaatcttgacttaccaccctacaaaagatggc

SEQ ID NO: 155859 - DNA, 105 bp, Homo sapiens
ctcaccaagaagatgaagaagattgtggatgccgtgatcaagtacaaggacagtgcccacttggatcttggtgctctccctgagcctggctggtgccctcttcct

SEQ ID NO: 155860 - DNA, 100 bp, Homo sapiens
gtgaccctgggagattactaccagggccggaggattaccatcaccggaaagcactgcagtttcctcctgaaggctggctccggctctccctcaataatgg

SEQ ID NO: 155861 - DNA, 98 bp, Homo sapiens
ccgtgtcctgcaggtattgggagatccacagctaagacaccgggacctcctggaagccaaaaatggctaaatttattgtgaagaaatcagaagatgaa

SEQ ID NO: 155862 - DNA, 96 bp, Homo sapiens
tccaggggctgcagagcatggactgttaaatcttgcacttcttctgagtgagtcatggctgagtacgggaccctcctgcaagacctgaccaacaac

SEQ ID NO: 155863 - DNA, 100 bp, Homo sapiens
agaaagtccaggagaaagaggaagggaggatggaatcaggtgaaaagaacggaggggagcccgatgacgctgaactagtaaggctcagtaagaggctggt

SEQ ID NO: 155864 - DNA, 74 bp, Homo sapiens
gacagtggagtgggactggaaactgctcacctatgtcatggaggaagaggatgagacttcagcactcaagtttg

SEQ ID NO: 155865 - DNA, 100 bp, Homo sapiens
cgcagatacggccaggggagagcttcatcaccccctacctcctggggcccgacaagaacttcacgcgggagcagcgtccagcctgcatgccgtgcggact

SEQ ID NO: 155866 - DNA, 98 bp, Homo sapiens
agaccaggccgtggggacgccggagaactgtgcccattacttctgcctggactgcattgtcgaatggtccaaggtccttgtacaagccatcaaggagg

SEQ ID NO: 155867 - DNA, 100 bp, Homo sapiens
aggaaggtgcccaaggaccttacgcagccaacgtacaccggggccattagcctctgggtgaccatgaagatgctggtgggtgacatcattcagattcgca

SEQ ID NO: 155868 - DNA, 100 bp, Homo sapiens
gctctgggacacacctccattggatttaaaagacagtcctcgtcagcactgactttcagctatggaatcggtcgcaatgatgatgtcaaatgcttttgtt

SEQ ID NO: 155869 - DNA, 80 bp, Homo sapiens
ggcgctgggcgagccgtgcgatctggacgcggcgctgctgaccgacatcgaagggagtgcatccgccccaacccttttcc

SEQ ID NO: 155870 - DNA, 100 bp, Homo sapiens
tctggatcctgcggctccctccaggtattaagggagatatcccaaagtgctgaggaatgtaaacaagtttgctgggccttgcgagacttcaccaggttgt

SEQ ID NO: 155871 - DNA, 74 bp, Homo sapiens
ggaagggcctcggcactggtaccctttacatcgctgagaggtgtaagctgttcagatgaagatgaaaaacccag

SEQ ID NO: 155872 - DNA, 83 bp, Homo sapiens
tcggtggactccttcggcagtccacccaccgccgccgcctcccagctggacacctgttctgctgttgtgtcctgccattctcc

SEQ ID NO: 155873 - DNA, 100 bp, Homo sapiens
ggcggcgccgctcatccccctctcccagcagggaggaagctgatgaatatattgacattggagccctcaatggcatctttgtgctgggaaggagtatggg

SEQ ID NO: 155874 - DNA, 80 bp, Homo sapiens
gctacaacaccaagtttgccctggtggcccctgtccaggctgaagaagactctggtaatgctggaggatggaagaagcaa

SEQ ID NO: 155875 - DNA, 100 bp, Homo sapiens
ttacgttcacctcggtgtctgcagcaccctccgcttcctctcctaggcgacgagacccagtggctagggttcatcatttacaacccaacagcctcaggct

SEQ ID NO: 155876 - DNA, 75 bp, Homo sapiens
cggcgcctaccatgctgtacgtcggtgaccccgcacggcacctcgccacgacgttggacctctcgaacaaccagc

SEQ ID NO: 155877 - DNA, 83 bp, Homo sapiens
agaagatctgggtgcccgtggaccacaggccctcgttgcccagattgcctacaccaactaatgttacaattgaatcctataac

SEQ ID NO: 155878 - DNA, 100 bp, Homo sapiens
cctgtccacactttccacccttggtacaggtatttttgataaagctgtggaatggaaagggtccaattggttccaagacgcgtaggcgagttggtctgaa

SEQ ID NO: 155879 - DNA, 98 bp, Homo sapiens
agtgctcccccatccccacagtataaaaagaactggcaagggaactgaatttttcagtggatgaaatcaatcaaatacgtgtggaaaatccaaattct

SEQ ID NO: 155880 - DNA, 97 bp, Homo sapiens
ggggcgccctctccactgcgcgcgatgacgtccggttgtttgccttcgtgcgcttcaccaccggggatgccatgagcaagaggtccaagtttgccct

SEQ ID NO: 155881 - DNA, 75 bp, Homo sapiens
cggccgcctccgcgagggcaccatggaggtgaatgcagcatttgacattgtgcagcaaagaaatggttatggaga

SEQ ID NO: 155882 - DNA, 100 bp, Homo sapiens
agaaaattcagtgagatctccaagaaaatcacctcgtttaatggcacaagggggtcctggtcttcatgatccttgtgagcgagacccaacagatgctctg

SEQ ID NO: 155883 - DNA, 100 bp, Homo sapiens
ggaaggtgggaaagggccggaaaacacacgttcctccgaaaccggtttgcaagtccttgtagagtgtcaaaccagaagagaagtaaaattcaacaaaaat

SEQ ID NO: 155884 - DNA, 50 bp, Homo sapiens
ggaaggtgtcttagaggacattaaagctactctccagagagaccggatct

SEQ ID NO: 155885 - DNA, 83 bp, Homo sapiens
gagaggaacactacaaactgctgtatgaagtttcccagggcaaatccagacagaacctttgacttggtgttgaaagtgaaatg

SEQ ID NO: 155886 - DNA, 98 bp, Homo sapiens
aggtcatgactttcatgaaggcgttagagctggtgtatggtggctgatgaagtaagtgtttcaatggtttttatgtcttttataagattacacagctt

SEQ ID NO: 155887 - DNA, 100 bp, Homo sapiens
gtgcacttgcaggccgggcagtgcggcaaccaaatcggcgccaagttggttgaatctggcgatgtggaacccatggatatggagggctgactatatacac

SEQ ID NO: 155888 - DNA, 75 bp, Homo sapiens
tggaaatgtttactattagtgtaagcatcaagcattgcacagttctctccaataacatagatcatctcttactga

SEQ ID NO: 155889 - DNA, 100 bp, Homo sapiens
gtgaccgagagcgcgaatatcgtcatcgttagaaggatataatgactacatcaagatgagcattaatcctaagaaacttgtaatgggtgttccttggtat

SEQ ID NO: 155890 - DNA, 82 bp, Homo sapiens
tgaactgtgtcaagggctccaagtgccaggacaagtgttggacagccggagtcagtctccatggagattatctttgataaca

SEQ ID NO: 155891 - DNA, 75 bp, Homo sapiens
tgttcttcttcgagtatttgtagaaggccctgtgcctaaggatagagataaattttatttcaaattaaagcaagg

SEQ ID NO: 155892 - DNA, 100 bp, Homo sapiens
atgaatactgctgaggactggggcctcattttggatatctgtgataaagttggtcagtctcgcactggaaaatggtgtgaatggaacattaacttcaaat

SEQ ID NO: 155893 - DNA, 88 bp, Homo sapiens
tcctatgacagcttcgacacttccagttgccaccttccagagaagaggtacgagatgacaagacaaccataaagtgtgaaacctcccc

SEQ ID NO: 155894 - DNA, 90 bp, Homo sapiens
ggcggattcgggaactgactgctgtagttcagaagaggtttggctttccagagggcagtgtagagctggagctctcaaacactgctgtcc

SEQ ID NO: 155895 - DNA, 88 bp, Homo sapiens
atgaacggaaattctggttttccaacaggcagatcatgactgagagattgttaataaaagcattgagtggtggtaaaaatacgaagat

SEQ ID NO: 155896 - DNA, 96 bp, Homo sapiens
tctgaatcaaatccaaagagtgtctgacatttcttttgtgcaagatgagcctcaagtgcttctgcattacaagagaactcgatgccaccgcaacgg

SEQ ID NO: 155897 - DNA, 100 bp, Homo sapiens
ctgccgcctgcgtgtggtgggcaccatctttgacagcgctcctggtgacagcaacctggagcagctggcagagcacctgggcgactgcgggctgcaggaa

SEQ ID NO: 155898 - DNA, 96 bp, Homo sapiens
caaacaagccaatcccaggaggaaaaacggcacgtgggaaaaagcgccagataggctggttcccagctaattatgtaaagcttctaagccctggga

SEQ ID NO: 155899 - DNA, 100 bp, Homo sapiens
tactgggagttacatagctaagatgccaggacaccccgaaagccggaaaacgtttatttacaaatgttggagtaataaagaaggcagaacaaaatgagct

SEQ ID NO: 155900 - DNA, 100 bp, Homo sapiens
tggcccattaacaagcagctcttccggaagatcaactgcagactgtcctattgcatctcaagccttcgagcatcagacaagcggatagcttgtgatgaag

SEQ ID NO: 155901 - DNA, 75 bp, Homo sapiens
tactggggccagggaaccctggtcaccgtctcctcagatcctggtgaagaccatgatacgtaaacgctcctttgg

SEQ ID NO: 155902 - DNA, 100 bp, Homo sapiens
ttctgctccacgaggagcacagccgggccgctgcgaaggactggttgccataaaggaagcccacgacatagagaccaggcttaatgaggtggagaagctg

SEQ ID NO: 155903 - DNA, 90 bp, Homo sapiens
atagcctgaaggcagccattcaggaatgaatctgaagtctgctgcagtaaaacacagaaggctttaaaatgttttcttgcataaaattca

SEQ ID NO: 155904 - DNA, 83 bp, Homo sapiens
gagcgggcggcttcctggcctgggcgctccggtggcggcggagctcctgtccaaatatgacccccagaaggaggcagagctcc

SEQ ID NO: 155905 - DNA, 75 bp, Homo sapiens
tttttctgttttgcctgaatacatgatttaaacaagagatttccacagaagcttcgaggcagagaatgggccgac

SEQ ID NO: 155906 - DNA, 100 bp, Homo sapiens
gaagttgacatctgacgacgtgaaggagcagatttacaaactggccaagaagggccttactccttcacagatcggagctctgtctaaacatcattccaac

SEQ ID NO: 155907 - DNA, 90 bp, Homo sapiens
tggccaaggaggaagggtggctggcagagcacatgctgagagattccccttccacttccagacagtccccagctaatggtcatagcagca

SEQ ID NO: 155908 - DNA, 90 bp, Homo sapiens
gtcctacaccgtggtccagaggccctcactcaagaacttctccgcaggcacatcagggcgtctctggccgagcctctttttgtggaaaac

SEQ ID NO: 155909 - DNA, 46 bp, Homo sapiens
gatcagcaaatctaactgaccagccgagcctcttgaagccattctt

SEQ ID NO: 155910 - DNA, 80 bp, Homo sapiens
caagatcgccgaagtagactgcactgctgaacggaatatctgcagcaagtattcggtgatgtgccttcaggacttttttg

SEQ ID NO: 155911 - DNA, 82 bp, Homo sapiens
gttgaaagtgaaatgtcatgcctctgaaaatgaagtaatgtatcctgcatatgcaaaatgggtacagtcacacagagacctg

SEQ ID NO: 155912 - DNA, 101 bp, Homo sapiens
attctcccagacatggggaacagggtcacagctctcacccagagtaaacatcagtctccaaagataactacatcccttcttcccatcaacaatggctccaa

SEQ ID NO: 155913 - DNA, 74 bp, Homo sapiens
gacccggtgtgtggcgcgcccagagccccgcgtttcagccctagggaaggtttacccaaggtccagcctagccc

SEQ ID NO: 155914 - DNA, 100 bp, Homo sapiens
ctctttccaaatctccaggttttccctgcgctgggtaatcatgactattggccacaggtaacccaggcctgcacagtcccatgttggatcttgataatga

SEQ ID NO: 155915 - DNA, 100 bp, Homo sapiens
cgcttctccacccgaggcttccacctccaacgagccatgttccaggctgcaggagccgcccaggccaccccctctcataagcacctggaggagccgctgt

SEQ ID NO: 155916 - DNA, 90 bp, Homo sapiens
aacaaaggcaaatacagccccactgtgcagacccggagggccatgaagcccccaggaggagaatcgagcaatctttttggaagtccagaa

SEQ ID NO: 155917 - DNA, 82 bp, Homo sapiens
gagtggatatgggtctcatggatacaacactgggagctgcagtccatggctgaccaggagcaggtgtcaccagccgccatca

SEQ ID NO: 155918 - DNA, 82 bp, Homo sapiens
ctgcacggacggtgttggttggggacccggtcagcccaaggagcaggggtccagcagctctgcggaggcatctggaacagag

SEQ ID NO: 155919 - DNA, 90 bp, Homo sapiens
atgtgattacagcaggagattatgaccttaacatcagtgcccttagagatttgtttgattccatggataaaacttcttccagtattccac

SEQ ID NO: 155920 - DNA, 95 bp, Homo sapiens
tcctcaatggggagctgagccagaaattacaagtgtactgtgatatgaccaccgacgggggcggctggattgcttcgaacctaatgaacaatccc

SEQ ID NO: 155921 - DNA, 75 bp, Homo sapiens
cgcgcccggcgcccctgagccggccgagcggcgacggaccgcgaggagttttaatgtgggaagtttttacagaag

SEQ ID NO: 155922 - DNA, 100 bp, Homo sapiens
cccctgccaaaatcaggatctgtcttcattggtggatttccagaccttcatgggaaaatccagaaacagtatctcacctccctaaactggttaatagtgg

SEQ ID NO: 155923 - DNA, 75 bp, Homo sapiens
aagctgcccagccaccagcaaccccccaggctattcagcttgaccctgaagaaactcgtcatgctaaaagaaatg

SEQ ID NO: 155924 - DNA, 75 bp, Homo sapiens
attgctatcaatgcgaatgatcctgaagcctcaaagtttcatggagctgctgctcaagaggtcatcaaaataatc

SEQ ID NO: 155925 - DNA, 100 bp, Homo sapiens
ggacgtgcacgggatccacttccgcaaggaccctttggaaggccgggtgggccgaggtgatttgatgaaggctgctgcaggagagttcgcagatgatccc

SEQ ID NO: 155926 - DNA, 75 bp, Homo sapiens
ccagccgactggagcaggcagcagcccagttcatggggagatttccttttggataccatctcggggcttgtattt

SEQ ID NO: 155927 - DNA, 99 bp, Homo sapiens
ccaaaattgagtcctacgctgctgtgaatcacatatcccaactgtcagaggagcagggcttcgtgctgtgtcactccatcgctgggggtacgggttctg

SEQ ID NO: 155928 - DNA, 100 bp, Homo sapiens
gcctccaggccaagagggatccttcacccgtgtctgctttggcagcatgtaagcagctgtttgccaagaacccaggtcactgctaagaaagggtgccttc

SEQ ID NO: 155929 - DNA, 98 bp, Homo sapiens
tccggaaacatgtggccctacatcaggaatttcatggcaagggaatttactttgcaaaagatgccatctattcccacaaaaattgcccgtatgatgcc

SEQ ID NO: 155930 - DNA, 100 bp, Homo sapiens
agtggcaggtgacagtctgcatgtgcagttttcagggacccagacatggagctgcgggaagaagcctggtctccggggccgctggattctgaggaccagc

SEQ ID NO: 155931 - DNA, 83 bp, Homo sapiens
ccaccatgtcagacgcagccgtagacaccagctccgaaatcaccaccaagattcctggtcgggtggcttccagtggtcttcag

SEQ ID NO: 155932 - DNA, 75 bp, Homo sapiens
caagttggacagacgggaaaaatagtagcaccaagcagtcattatggcgaaccttggctgctggatgctggttct

SEQ ID NO: 155933 - DNA, 75 bp, Homo sapiens
ctaccaggaggccaggggtgtcgccatgcggaaagtgaccagaagaggtgtgcagtttccaggcctggcccatac

SEQ ID NO: 155934 - DNA, 50 bp, Homo sapiens
ttttgacagaggaactctgtcagggtctgagtgtacggtttgcagatatg

SEQ ID NO: 155935 - DNA, 119 bp, Homo sapiens
caaattgcagcagaacagaacctggataatgatgaaggattgaaaatcgctgctaaacattaccaggactatggactacgtggcttcttccaaggtggcatcccccgagccctccgcag

SEQ ID NO: 155936 - DNA, 50 bp, Homo sapiens
ctgtgaaggctgcccaatttgagggtagaatccgccaagctttgagagaa

SEQ ID NO: 155937 - DNA, 100 bp, Homo sapiens
gaattggaagctaaagctaccaaagacgtagaaagaaatcttagcagatctctcaaaggccttggttctgacagaaattggccccaaacgtgaccctgcg

SEQ ID NO: 155938 - DNA, 89 bp, Homo sapiens
aaggtctctggagacatcttcagcaggggttcggtccgagcccggtgggaggctcccggagcgcagcctgggcccagcccaccccgcgc

SEQ ID NO: 155939 - DNA, 132 bp, Homo sapiens
gtacctttcagctgcgccggccgcgaggccacggagagctcgccttggagagcccaggagcaggggagacatggggtctactccttcggcctcttcaccacgaccatcttcgccaacgcggggcaggtggtg

SEQ ID NO: 155940 - DNA, 100 bp, Homo sapiens
cacgcgctcctcgccgtgctcagtgcctgttacttgggcaccccgagtcttgctggaatgagtacctgacaactcggatcgagcagaaccttgttttgaa

SEQ ID NO: 155941 - DNA, 75 bp, Homo sapiens
atttacaagagccctgagctgccacggatactgagatttgctaatggtcgttctactgggctgattttggacagt

SEQ ID NO: 155942 - DNA, 90 bp, Homo sapiens
gcctggaggggcgaagaggacgagggggccaaggcttcctccgggcttggaactgcagttggctttttgctaccaccagttttagtaccc

SEQ ID NO: 155943 - DNA, 83 bp, Homo sapiens
aaagattgcccacgaattgggtcgatctgtgacagatgtgtatgtggaatttgatgatcttgaatgggataaacgagagtggg

SEQ ID NO: 155944 - DNA, 98 bp, Homo sapiens
cagttgctcgatgtgcctcctggtgaagacaaggggggatatgtgatcaaagcatcagaaggttattcttggacagtataattggctttcctatgaag

SEQ ID NO: 155945 - DNA, 50 bp, Homo sapiens
agcaagattcccagccttcctcagactgtgaacctgaaagcatttctgat

SEQ ID NO: 155946 - DNA, 75 bp, Homo sapiens
ctggaaagtcctttcagaatcggttggtaacaaggaagatgctgagaaggaagtagctatttctaccttctcatc

SEQ ID NO: 155947 - DNA, 99 bp, Homo sapiens
cctcctgagtaactgggattacaggccccctcttctctcctggaggtcagccggccccttgtggctctcaggccagctggaccaagtctcagaacccgg

SEQ ID NO: 155948 - DNA, 75 bp, Homo sapiens
cttcattatatgctttaggaactcaggattctacagatatatgcaaggttcggcaaaagcagaacaaatatccga

SEQ ID NO: 155949 - DNA, 51 bp, Homo sapiens
ggcgggggctggcccggggttccaggtaacaaggacgtctttgtgtgcatg

SEQ ID NO: 155950 - DNA, 101 bp, Homo sapiens
ctcaggcgcgaccgcggcgttctctgaggtacatgtcccagagcaagcacacggaggcccgggagctcatgtactcgggagccctgctcttcttcagccat

SEQ ID NO: 155951 - DNA, 75 bp, Homo sapiens
cggcgctctcctggctcccttctgccccagctccgtctcggcggcggcgggtcaaaatgcagatcttcgtgaaaa

SEQ ID NO: 155952 - DNA, 75 bp, Homo sapiens
attaagttcacctgcaacagaaacaggtgaaccagtgtgttattggtactgctcaggccaacaggaagtgaagac

SEQ ID NO: 155953 - DNA, 82 bp, Homo sapiens
ttcatctcaaaaacaaaattctgaactcaggacttggcaagaatgacatctttgtgttcctgttaagcacacgagctggagg

SEQ ID NO: 155954 - DNA, 100 bp, Homo sapiens
aatgaattccaacaacttcaaagtaaaatcagtttaatttcagaaaaggtccaggtgcaggtacagcagtctccgcaacaggtctcggctcagctctccc

SEQ ID NO: 155955 - DNA, 82 bp, Homo sapiens
caacagtggccttctgatgaatactttaagcccccttgtatttgctggtcctatttttatgaaccatcgagaacaggctcta

SEQ ID NO: 155956 - DNA, 100 bp, Homo sapiens
cagagatacgcgccgtggtgcgcaccgagcccttccaggacggctacagcctgtgcccgggccgggagctgggcagaaacattgctgaggctcttgtcag

SEQ ID NO: 155957 - DNA, 120 bp, Homo sapiens
gttcggtcctgctgttgcggccgctgccccagggctgcggggacggtactccaaagattcaggtttactcacgtcatccagcagagaatggaaagtcaaatttcctgaattgctatgtgt

SEQ ID NO: 155958 - DNA, 83 bp, Homo sapiens
ctttgctcccggagcgcttgaaggagctgcgggtcaaaatgcagatcttcgtgaaaacccttaccggcaagaccatcaccctt

SEQ ID NO: 155959 - DNA, 75 bp, Homo sapiens
caaaacctcttacatcatgggcgacttcaggaacagccataggccaccctggagaaatgtgccacgtgctcccag

SEQ ID NO: 155960 - DNA, 102 bp, Homo sapiens
cccaacatcaccaatgcacttccccagagtgccattcacagcccaggatggcacatttcctagaggcagaatcctacaacttccactccaagtgagaaggag

SEQ ID NO: 155961 - DNA, 75 bp, Homo sapiens
gagtggcgcagtcagagataaatggaacagattacaattcctagaccttctgtggcatctacacagtcaacttca

SEQ ID NO: 155962 - DNA, 96 bp, Homo sapiens
cagggaagaaatgaaatttcatgagttcgttgagaaactgcaggatatacagcagcgaggaggggaagagaggggaaggtgtggctcattgacttt

SEQ ID NO: 155963 - DNA, 83 bp, Homo sapiens
cgtggagccggcagccgacggcaaaggtgtcgtggtggtcattaagcggagatccgacaatgcagatcttcgtgaagactctg

SEQ ID NO: 155964 - DNA, 98 bp, Homo sapiens
cgacaagatcaccacggacgagatgatcaaacgcctgaagggatcgcttacacctgagacgaactacagaacagcacgtaccagaggtggaagtccaa

SEQ ID NO: 155965 - DNA, 82 bp, Homo sapiens
acaagaagacgtccaatctgagcgtgctgcggacggcgctgcggtacatccagatgactcctcctctgagagtggcagcggc

SEQ ID NO: 155966 - DNA, 100 bp, Homo sapiens
tgggaacattcctcataaagcgagtcgtcaaggagttgcagaatctcacgggctgtgcgtgcctcaccaccgtccctgctgagaacgcaaccgtggttcc

SEQ ID NO: 155967 - DNA, 75 bp, Homo sapiens
gttcaaagcttgttgtctttgatactacattacaaggccatgtgaaactttctgactttggtctttgcacaggac

SEQ ID NO: 155968 - DNA, 82 bp, Homo sapiens
agaaaaggcaacatcctgtcacaggccatgctctggcaaaaacgtgtggacactgccagcggctgcagccgacttggaatga

SEQ ID NO: 155969 - DNA, 109 bp, Homo sapiens
ggaggctggagtgggcgcggaggcgaccgccatggcgttcctcaaactccgtgaccagctccctgtgctgtcaggaatctacaggacttggctcgtatttacattcgac

SEQ ID NO: 155970 - DNA, 82 bp, Homo sapiens
atcaatcttaccagagggccctcaggccaagaagcttgagagaagaaaaatttcagaaaaattgtctcaatttgactagaat

SEQ ID NO: 155971 - DNA, 123 bp, Homo sapiens
gagcaaaagccccttgccatccctgtgtgacagcaatgaggtgaacccaggggccgaagcccacccagggagttgatggatgctttcattggatttggaggaaatgtgatcaggcaacaagtc

SEQ ID NO: 155972 - DNA, 99 bp, Homo sapiens
acaagtttaacgacaagcacatcaccactctgcaggcgtccctttcccttgcacctgttaacatctttaaggcaggagctgatgaagagagagcagaga

SEQ ID NO: 155973 - DNA, 101 bp, Homo sapiens
aggggcggagcctggcttaggaaggggagctgaggtccggggcccagttttccggagttgcggtgttctttgcagaagatgtgggttcaaacaaaggtgca

SEQ ID NO: 155974 - DNA, 83 bp, Homo sapiens
gtaatgctgctgtatcctcagttgactcattcactcaggaaacaagctcacatcttcctgtgggaaaccttctagcaacagga

SEQ ID NO: 155975 - DNA, 49 bp, Homo sapiens
cggatcccccggaccccccgaccgacgtggcccagtggaacatcgggag

SEQ ID NO: 155976 - DNA, 75 bp, Homo sapiens
ctgagcagtcctcggggagagcgcgccaagaccgctgcagccgctggctgaacctgtcatttactccatccttta

SEQ ID NO: 155977 - DNA, 73 bp, Homo sapiens
cacattcctcttacaagccatcagaaatacaacagctgctgaagaggatggagatgaagatgaggaagctgag

SEQ ID NO: 155978 - DNA, 82 bp, Homo sapiens
caggtcgcagcagcgtgtcgcctccggggggcgtagcaagtcacccacaaaagctgtatataatgccagacattggaatcat

SEQ ID NO: 155979 - DNA, 82 bp, Homo sapiens
ccgaccgggccctgggctggaggtaaaaccccacggctgaccccgcactacatctacccaccagccatcgtgcagcccagcg

SEQ ID NO: 155980 - DNA, 100 bp, Homo sapiens
cagtggtgggataaacggagagcagcagccgcccgcttcaaccccaggggaccagaggaactcagccctgattgcggacctgcgcgaagtctggctcaat

SEQ ID NO: 155981 - DNA, 75 bp, Homo sapiens
cttcctatagtagttcttctcagaatgccgactctatgctaatgaaatcatagcccactaatgagttttggagcc

SEQ ID NO: 155982 - DNA, 51 bp, Homo sapiens
cttcaagacaaccagaagtgcctgtcttcccaagggattgttgaagaaact

SEQ ID NO: 155983 - DNA, 83 bp, Homo sapiens
ctggaagctgagggcacgtgtttgcggttcagccctttgatgaccgcagcaggattccgatgcaacaccatgcaaaaccccga

SEQ ID NO: 155984 - DNA, 100 bp, Homo sapiens
agatccagagcccgagaagaggcacgggggccatgtgggggctggcctgcttcactcccccaaactcaaggcaccttttgatgtcccagcagaccctgag

SEQ ID NO: 155985 - DNA, 71 bp, Homo sapiens
gggaagagatgcagcgctatgcggaggatgttggggccgtcaaaaatctctaccccaaatttgcgtcaccc

SEQ ID NO: 155986 - DNA, 100 bp, Homo sapiens
aggaaattgggaatgaattggatgaacaaaatgaagaccacgtggccttaaaccaactgctgcaactctgtgtgcaggatgattctgtgggcccaagtca

SEQ ID NO: 155987 - DNA, 124 bp, Homo sapiens
gccggggagaaggtgttgttgccggagctgagaccgggcggccacagtccgcagggatgaacctcgagttgctgggggatgtacgtatttttgcatgcagtgaaaggaacacctttcgaaactc

SEQ ID NO: 155988 - DNA, 95 bp, Homo sapiens
ggacatggagatgaagaagaagattaacctggagttaaggaacagatccccggaggaggatggatagaatgacagaagatgctcttcgcttgaat

SEQ ID NO: 155989 - DNA, 98 bp, Homo sapiens
ggggcacgattctccctctcctagaggcggcaatttctaaaccgggatgacattggcatcatcctcatcaaccagtacatcgcagagatggtgcggca

SEQ ID NO: 155990 - DNA, 100 bp, Homo sapiens
ctgaaagttcatcctgaacaggaaaagggtgagaaggactggcagaaatacgagactgctcggcggctgaaaaaatgtgtggacaagatccggaaccagt

SEQ ID NO: 155991 - DNA, 100 bp, Homo sapiens
aaggccatgttcagcgggcgcatggaagtgctcaccgacagtgaaggaggcaagtgaggcctatctggttggcctttttgaagacaccaacctgtgtgct

SEQ ID NO: 155992 - DNA, 74 bp, Homo sapiens
atgatgtctcatatgtctcaggcttccatgcagcctgccttaccggtgaaaattgagctaccaacacaactcca

SEQ ID NO: 155993 - DNA, 101 bp, Homo sapiens
gtggatttcagcctgcacggatggtcttgaaacacaaatggtttttgatatgttgatgatgtgatcagccgcattgacaggatgtttcctgaaatgtccat

SEQ ID NO: 155994 - DNA, 83 bp, Homo sapiens
cttctggaagctactactacgtggtgcttggaaagatctttgtggagttcacctctgtgtttgactgccagaaagccatgcag

SEQ ID NO: 155995 - DNA, 100 bp, Homo sapiens
caggtctacgccacatcacttaggtgtctgacttccagcaactgctggcctgtgccagggtgcaagctgagcactggagtggagttttcctgtggagagg

SEQ ID NO: 155996 - DNA, 100 bp, Homo sapiens
cttgctgatctgagctcagacctgccaatttaccagagataattgataacaccctgtaacagctgatactatactggcaattgctggagaagattttgca

SEQ ID NO: 155997 - DNA, 90 bp, Homo sapiens
tgtaggtgagaatgaaacttatcccagagctttgctacattggaacagggccgcctctcaagcctgatctagttgaatctgaagatgtgg

SEQ ID NO: 155998 - DNA, 100 bp, Homo sapiens
caagaaagaaaactcctccttgtacctaggcccacccttcctccattctgagcacataaaaaccccacactcagccagactcaacactcatcaggacaac

SEQ ID NO: 155999 - DNA, 101 bp, Homo sapiens
ctggaattgagcaagggagtgatgccggttatctctgtgaatctcagtggaaattgatgacttgaaaaaaattaccaattcactgactgtgctttgcagtg

SEQ ID NO: 156000 - DNA, 75 bp, Homo sapiens
tgacaaggtccagcctggggacagagtgaatgttacagatgagaacaacgtgtcaagctacttaagcaaaaatat

SEQ ID NO: 156001 - DNA, 107 bp, Homo sapiens
atgttttccaaaaacttgtagaaggttgtgaaaaaactactaggatcacgcggcatgtattgagggtgtcaaattgagaaccaggtagatccccaccacctacagta

SEQ ID NO: 156002 - DNA, 100 bp, Homo sapiens
gtgatttctgcatttccatctgagaacaccattctgccttgccaagaccagtactttgtaggaggccagagctataattgcccgtattccactacaacgt

SEQ ID NO: 156003 - DNA, 80 bp, Homo sapiens
cccagtatgggaaagatctaccttctggaagctactactacgtggtgcttggaaaggaaatctggcattttttaaagttt

SEQ ID NO: 156004 - DNA, 131 bp, Homo sapiens
gggaccgccctggacatcaagattaaaagagcgaataaagtttatcacgccgggatttatgtgatcagtttggctgaaccccgtctgcccctgcagctggatgatgctgttcggcctgaggcagaaggaga

SEQ ID NO: 156005 - DNA, 98 bp, Homo sapiens
accaaccagatgggcagtgcatcctgtgagctgaccctctctgtgaccgttaccttccacgctgtatgtccgtgagaaatacaatgaagacggtctga

SEQ ID NO: 156006 - DNA, 71 bp, Homo sapiens
gtgagggtggaagctgggaaacccacaggaggcaaccacactagtttaggagcctcctcaacaagcccaag

SEQ ID NO: 156007 - DNA, 100 bp, Homo sapiens
gaggatatttggaatagcctctcttcagtgttcacagagatgcaaccaaccaatctgaccttcgttggctgcgtgggcatgctggatcctccgagaatcg

SEQ ID NO: 156008 - DNA, 82 bp, Homo sapiens
agacgtccaatctgagcgtgctgcggacggcgctgcggtacatccaggttccctcggagacatggaggccagagaggaggtg

SEQ ID NO: 156009 - DNA, 83 bp, Homo sapiens
tcctgctggtgggccagtacagcaccggcaagaccaccttcatcaggtggtcattgggactcccacacttaaacaaagaaagg

SEQ ID NO: 156010 - DNA, 82 bp, Homo sapiens
ctgcaggacggcgcggcagagtccccgtacgcctacagtaacgatgtgaagttcatttccaatccgccctccatggtggcag

SEQ ID NO: 156011 - DNA, 75 bp, Homo sapiens
cttggactgagtcctgcaggacacagagcatgcaagcggcaagatgtcctacagatgaattatctttaaccaatt

SEQ ID NO: 156012 - DNA, 100 bp, Homo sapiens
ggaagctgctaacccgacccggattggcgctgaggtggcccgtggggcaggtgcagaccatgaattacgtggggcagttagccggccaggtgtttgtcac

SEQ ID NO: 156013 - DNA, 100 bp, Homo sapiens
cgctgagcgatatcacagaacacaagattaatcaatgtcaactgacagacccatcctcatgccaacaaactacccttgaaggattctttcacttacgagg

SEQ ID NO: 156014 - DNA, 100 bp, Homo sapiens
aatcaatttcgtgaatttaaactcagcaaagtctggcgtgatcaacattttgttaagattcaggtcaaagacagcttcttggacacttaatgattgttgg

SEQ ID NO: 156015 - DNA, 75 bp, Homo sapiens
aatcaatgctgtccaaacttaaacatgggatgttctgttcttgaaggactgtgtaggcccagaagtggagaaagc

SEQ ID NO: 156016 - DNA, 74 bp, Homo sapiens
gggatatacagaccttactatcccggatggaggttggatggcaagcatgtggtgtttggcaaagtgaaagaagg

SEQ ID NO: 156017 - DNA, 83 bp, Homo sapiens
ctgggctcaacatcctttaaggccagaatttgcagaaagtacctacttcttatataaagtcgatttagtaacagggttagcca

SEQ ID NO: 156018 - DNA, 75 bp, Homo sapiens
aagaaaaccaaggctgaaggggatcgtctaaaagaggttggagtcattcgttgcccagtttgcagccaagaatgt

SEQ ID NO: 156019 - DNA, 100 bp, Homo sapiens
atgagagacaggcccggcaagatgaagagacagtgcggaagcttcaggccaggctctatgtgaactggagatttttacgaggcattgaggctcaattctt

SEQ ID NO: 156020 - DNA, 80 bp, Homo sapiens
atccaaaaagaaaaaaaagaaaaagaagaagcaaggtgaagataactctactgcacagactaagaaaaatggctttgtca

SEQ ID NO: 156021 - DNA, 75 bp, Homo sapiens
cagctctgcagccacatactatccgtttgttcaggaaccaccagtgacagaataacgaaggaggcccaacttcat

SEQ ID NO: 156022 - DNA, 100 bp, Homo sapiens
ctcataacagagatccaatcagcagatgtgtacggatgaaaatacaggttgagcaatgtttaaagcgtttgaaaaacatgaatttggagggctcaattca

SEQ ID NO: 156023 - DNA, 100 bp, Homo sapiens
aacccagaagaagctgggaagtttgtctttgaaatcattccagggggctgttgtggttccgactataaacagtacgtgtttggcggctgggcctgggcct

SEQ ID NO: 156024 - DNA, 74 bp, Homo sapiens
ggatgagcacttggtggcgtctgatgctgaactggatgctaaacttgaggatgatccgttggtgctgaatgaga

SEQ ID NO: 156025 - DNA, 98 bp, Homo sapiens
aaagagcctgaaggactcctcactgtcagcagcttctgtctccagcattgcaaagccctgatccagaccaagaacaccttccaccatgaccacctcag

SEQ ID NO: 156026 - DNA, 101 bp, Homo sapiens
aggctggctgtggcagatgcaactgcagatgccttcaattaagttgcagagttctgatggagagatatttgaagttgatgtggaaattgccaaacaatctg

SEQ ID NO: 156027 - DNA, 75 bp, Homo sapiens
gtgcctccagggctggaattactatggaaaggtgtagctagcttgaaccagagtgcactgagccgtccaatgcaa

SEQ ID NO: 156028 - DNA, 75 bp, Homo sapiens
cgcgcagtgctgccaacgccccggtggagaagctgaggagaggagaggcagcagcatggcgagtgtcctgtcccg

SEQ ID NO: 156029 - DNA, 98 bp, Homo sapiens
caaggaggagcgccaagagcccagcaccacggcacggaaggtggggcggcctgggaggaagcgcaagcaccccccggaggagctcaaagaggagcaga

SEQ ID NO: 156030 - DNA, 100 bp, Homo sapiens
tgctttgggccttccatgtcgtcaggaaggtgggagtcaatcattttgacaagtctcctgaaaggaacagctagcaggaactgaaacctttttccatttg

SEQ ID NO: 156031 - DNA, 75 bp, Homo sapiens
actttggttacctatgtacctgttaccactttcaaaattgcggagcaggagctggccaacctggagaagtggaag

SEQ ID NO: 156032 - DNA, 105 bp, Homo sapiens
ggcgtcccgggggcgcagggaaggagggcgtccgagtcaacaaccgcttcgagctggtgagaagccctaccactgcaactgggacggctgcggctggaagtttgc

SEQ ID NO: 156033 - DNA, 90 bp, Homo sapiens
accaaacctgcccaccccaatgaccagtaaatcggcatcagggattcgataaacaagtggatgtgtcatatattgccaaacattacaaca

SEQ ID NO: 156034 - DNA, 74 bp, Homo sapiens
tgctggacagctccttcctcacgttctcaggcctccacgctgagaacatatcctgcattagagacattaacaga

SEQ ID NO: 156035 - DNA, 74 bp, Homo sapiens
ctcaggctggaacttgccctgtctcctcgcagatgagggaacgggtatggcaatccccgaaactcaccaggtct

SEQ ID NO: 156036 - DNA, 75 bp, Homo sapiens
acttgcagaaatcacattggaccctcctcccaactgtaggttgaactcccaccacctgatcttggaccaagttct

SEQ ID NO: 156037 - DNA, 75 bp, Homo sapiens
cattggaaactctgtttacgttattatcaacacaggaccagtttcggtgtctgaactgctcagcttcgcaagtct

SEQ ID NO: 156038 - DNA, 78 bp, Homo sapiens
ccgggccccgatggccccgaccgcgtgctggagctcttcgacccacccaagggcggcgactggcggcgcgatggacct

SEQ ID NO: 156039 - DNA, 90 bp, Homo sapiens
gggcgcctgggcttcaggatgaaggaccgtctggagcagctgaaggcctttcacaatggaggagcgctcatgggggccctatatcacctg

SEQ ID NO: 156040 - DNA, 82 bp, Homo sapiens
cagggttttgtttatataactcaagttgtttggctaaattcttcagcagatccagtttgctgaccagaagcaagaattcaac

SEQ ID NO: 156041 - DNA, 75 bp, Homo sapiens
tttacagaataagtcagatgactttctgtctgataccccaatgtccttctttgactttgtggttgatcctcattc

SEQ ID NO: 156042 - DNA, 107 bp, Homo sapiens
tgcctattggaggagatgttccagccttacagctccagtatgaccattgtaagagatgtggtactggatcttcctctgggctctcttctcttctctgtttgtccatg

SEQ ID NO: 156043 - DNA, 82 bp, Homo sapiens
ttcagtgatgagaatcgcacctaccaggcttccagcccggatgagcagttggaattgatcacaccttttcagttgtacttca

SEQ ID NO: 156044 - DNA, 100 bp, Homo sapiens
tctgcatagaggcagacctccagaactacctgtaaattatgtgaaacctccaaatgtggggagagataatgcatgtgagaaaacttcatatatgtttcta

SEQ ID NO: 156045 - DNA, 82 bp, Homo sapiens
attgcgcgtggaacggctgcttttggaaggtggatgcagaccaagttatcctctctcacagccccatgaagctcttctccga

SEQ ID NO: 156046 - DNA, 75 bp, Homo sapiens
tggctgactccactgcaccgggctgttgcttccagaagtgaactgaggagaagaaagtggaagcaaagaaagaag

SEQ ID NO: 156047 - DNA, 75 bp, Homo sapiens
gcactccgcacctcggggacattattgcgcgtggaacggctgcttttggaagacggttacctggcacgctggcca

SEQ ID NO: 156048 - DNA, 88 bp, Homo sapiens
gctcagaacagttggatcttgctcagtctctgtcagaggaagatcccttggccgccagagcctgcggctggtcatggagtacctgccc

SEQ ID NO: 156049 - DNA, 82 bp, Homo sapiens
cggcggcccgagcgcgccccaagcccgggcgccaccgctgccacctccgcgagcaagagtgagccatggagctacgtgtggg

SEQ ID NO: 156050 - DNA, 87 bp, Homo sapiens
tggaacagattcagaaggagcaggattaccaaagggatggccaggccatgttatgggatctcaacgaaggcaaacacctttacacgc

SEQ ID NO: 156051 - DNA, 146 bp, Homo sapiens
tgttggggagaagaggattggaggtgtcagtgttaaaggaacctctacaacgaaggtgaagccacggaagataaggaatgaatctgaagtctgctgcagtaaaacacagaaggctttaaaatgttttcttgcataaaattcaaaac

SEQ ID NO: 156052 - DNA, 121 bp, Homo sapiens
ctgaatccatcattgcagctgcatgttcaagaagtggccggagagttctgcatgttgattcgtgcaacccagtttatgcctgaccccaagctcatggatcacgggcagtcccacccagaag

SEQ ID NO: 156053 - DNA, 75 bp, Homo sapiens
aaagatgaagaaaagcaaagggctttgctgggctatgctgataaccagggtaagggactgttctgaagaaccttt

SEQ ID NO: 156054 - DNA, 100 bp, Homo sapiens
ctttgttgggtgagcttgtttgtgtccctgtgggtggacgtggttggtgattggcaggatcctggtatccgctaacagatgatatcatcaagttgaatcg

SEQ ID NO: 156055 - DNA, 100 bp, Homo sapiens
tccgcgcccggcggcggcgggagcccaggagcctgccccgccctggggacgaagagctgcagctcctcctgtgcggacaagttggatggcttgaggactg

SEQ ID NO: 156056 - DNA, 100 bp, Homo sapiens
gaaggggtgaaagagactcggtgacagatacagaatgatatggaacctagcaaagctgttccactgaatgcatctaagcaagatggacctatgccaaaac

SEQ ID NO: 156057 - DNA, 74 bp, Homo sapiens
caacagatcgtggatctgaaagtgacaagcattttagaaaggtatcagatacacaccggacttcaacattctat

SEQ ID NO: 156058 - DNA, 74 bp, Homo sapiens
cggctccaagatggcgcaggcgatctttgaggccctggaggatatcaatgatgtcaaacggctgaaacctggct

SEQ ID NO: 156059 - DNA, 106 bp, Homo sapiens
ggctcttcaccaacctcaaggacacctcctccaaggtcatccagtccgtcgctaaggcgtgatggtgggcatgggtcagaaggattcctatgtgggcgacgaggcc

SEQ ID NO: 156060 - DNA, 87 bp, Homo sapiens
atggtctcagctgacaaaaacgggatcgctttggaaacatctttaccctgttcattgggccagagcaccagtggcagttcgcagcct

SEQ ID NO: 156061 - DNA, 97 bp, Homo sapiens
gcttcgtagtgaagagaggcgtctacaagagcgattgctacacatggacagtgatgatgaaattcctatcagttttgcagccttagaaaatggcatg

SEQ ID NO: 156062 - DNA, 76 bp, Homo sapiens
atgattgcaaccacaggaaaaaacaatgtgtattctggaggtagcatggcaagaaggaatacatatgtctgtgaaa

SEQ ID NO: 156063 - DNA, 90 bp, Homo sapiens
gaaagtagttcagataaaaaagtcttgtctgcaatcatcaacaaaacaattattccccgacttacagccgggggccatcaagtataagac

SEQ ID NO: 156064 - DNA, 76 bp, Homo sapiens
tggagaacaatatgaatgctgctgtctccacggtcctccctgtggcccagtgaactgcaatgaaaagatcgtggtc

SEQ ID NO: 156065 - DNA, 75 bp, Homo sapiens
agaccataacgtggaattcaggtccaatttatatatagctcagttttcagttcagaaagtcactcctcagtctga

SEQ ID NO: 156066 - DNA, 99 bp, Homo sapiens
acacccatcaccccttgcactccccgctcctgccccttccgtatggggacataaatctcaactgcccaaaaggtgtgatcaatgactggcgccgcttca

SEQ ID NO: 156067 - DNA, 100 bp, Homo sapiens
accacgcagtctgtgatggggtttgatcctctgcctccttcggacacaatctactcctacgtcaggccagagagggctgcgctggcctcggcacaccagt

SEQ ID NO: 156068 - DNA, 75 bp, Homo sapiens
tacctgcagcgccgtgtggcacgacacaaaaatcagacttcctcgcccccatgacctggtgttgtgtctgatcac

SEQ ID NO: 156069 - DNA, 99 bp, Homo sapiens
ccaagacccacctggagatgaagaagatgatctcagaggtgacaggaggggtcaaaatgcagatcttcgtgaaaacccttaccggcaagaccatcaccc

SEQ ID NO: 156070 - DNA, 100 bp, Homo sapiens
ggggtgctgggcgacctgcaggcagcaccggaggcccaggtctccgtgcagcccaacttccagcaggacaagtgaagcgctatgtccggaaaggggtccc

SEQ ID NO: 156071 - DNA, 75 bp, Homo sapiens
gccgcctcgacccagggcccgcgggccaggagagcgctcggcggctcaaaagccaaaagtctctgagaacgactt

SEQ ID NO: 156072 - DNA, 100 bp, Homo sapiens
acataaacaagaattggaagacatgaggaaagctggtcacgaagccctcagcattattgtggatgaatataaggttaaacccatccagagtaatggctgc

SEQ ID NO: 156073 - DNA, 100 bp, Homo sapiens
gtaccaagaaggggagtgcccgcggcaggagccgaggtgacgtacatgaacatgaccgcttacaacaagggccggctgcagtcctccttctggatcgtgg

SEQ ID NO: 156074 - DNA, 75 bp, Homo sapiens
tgttggggtagctgcgcgtacaccatccaaagcatagttgatggtggcatcacccttgagaaggaaatctccaaa

SEQ ID NO: 156075 - DNA, 97 bp, Homo sapiens
gcctttctggacacagaagtatttgtgacagaggatgttaagcaagtttttggacagaccacaattcatcaacatattccatttaactgggattcag

SEQ ID NO: 156076 - DNA, 95 bp, Homo sapiens
gaaaaaactgaagaaaaaacttgtcaggtctgaagaaaacatctcaattgctacgctttacatatggtccttcatttcctgcatttaaagttccc

SEQ ID NO: 156077 - DNA, 74 bp, Homo sapiens
agcctgtcgtgatcgacaaccccaatcaattgagcagagactgatgaaaatggatcacactgcaatccacccac

SEQ ID NO: 156078 - DNA, 82 bp, Homo sapiens
atgggggcctctccagggagtgctctgttcacggctccatcgctgttagaatggaagattgcgaaacaatggaagatgtata

SEQ ID NO: 156079 - DNA, 90 bp, Homo sapiens
ttcgggtgggagtgacccgattttccaggcttttcctccaaatgcgatcattgtatttttctactgcagtgcagtgactatattcttcac

SEQ ID NO: 156080 - DNA, 100 bp, Homo sapiens
taacaccattgaagactctgggattaatgctaaatttgtgaatgctgtgtatgataccttacttaatactaatctgatgacctccgaggggaccctgcac

SEQ ID NO: 156081 - DNA, 100 bp, Homo sapiens
caacgagcagctcatcacccagtacgagcgggagaaggcgctgcgcaagcacgctgaggaggctcaaccacaggaattatctcttggaatctccgcatag

SEQ ID NO: 156082 - DNA, 78 bp, Homo sapiens
gcgacccttggaactaaaaacttttctcaaagttgtcccccagtcaaccagagaggagaaaagagaaaatgggcttga

SEQ ID NO: 156083 - DNA, 82 bp, Homo sapiens
cttcgaacttttgacacggctttggaaacgacgtcatgtgttagggggattcccgaagtcttccgttttctgagaatgtgag

SEQ ID NO: 156084 - DNA, 100 bp, Homo sapiens
ctgaatcgtgttcctgaatgaaagaagtcaggaccttaaaggctttgatccaggagagaaatactttcataacacatcatggggtgatgtttctctctgg

SEQ ID NO: 156085 - DNA, 58 bp, Homo sapiens
cttaggaccacccaccatgcctatccagtggtacaggagctgcagcaggccatctcca

SEQ ID NO: 156086 - DNA, 119 bp, Homo sapiens
gttttgagaagccttccgctattcagcagagagctattattccctgtattaaaggtatcaaacagctactgaaacaagggtcagtgcagaaggtatacaatggactgcaaggatattga

SEQ ID NO: 156087 - DNA, 75 bp, Homo sapiens
cggagcttctcagaagacagagggttttcttttgagctattattcatggactatccagtctaacagcttgccagt

SEQ ID NO: 156088 - DNA, 100 bp, Homo sapiens
gatttaacattccaacacataaaaattatttatccaacagctcctcccagtgccggtggtggtgtgcacattgagccccggtatagacagttcccccagc

SEQ ID NO: 156089 - DNA, 100 bp, Homo sapiens
caaaaagtatgctttagaaaaagtgccaaaagtgggtagaaagtttcataggataggactccctcctaagggaggagatatcaccaaacatgatggaaca

SEQ ID NO: 156090 - DNA, 101 bp, Homo sapiens
gataacagctgttgacaagactgaggatagtttagaaggatgcttggattgtctgcttcaagccctggctcaaaataaataagactgattttatgggaaaa

SEQ ID NO: 156091 - DNA, 100 bp, Homo sapiens
tgggcctggctccctggctggccagcctctgcttggcatccccttgctggacagtggctgtgacccacccccacagaggcctgaggagacctctgcccag

SEQ ID NO: 156092 - DNA, 98 bp, Homo sapiens
agttccgccatgagctggggcacggagctgtggatgagctttgatccaaaccttctccacaacaatggacataatgggtaccctaatggtacttcagc

SEQ ID NO: 156093 - DNA, 83 bp, Homo sapiens
ggagtatcagttcagtatcgctacttcaaagggtactttttagaaccaaaggctataccccagctttggcctgtgctcccaat

SEQ ID NO: 156094 - DNA, 100 bp, Homo sapiens
ggagagcaagaccatcatgctgcgcggccttcccatcaccatcacagagagcgatggtgacccagagaagacagctaaagtggaatgtggggacttctac

SEQ ID NO: 156095 - DNA, 83 bp, Homo sapiens
ctggttgccttggtaggcaataaaagcgtttgcaatggctgctactgtgaacttggaacttgatcccatttttttgaaagcac

SEQ ID NO: 156096 - DNA, 100 bp, Homo sapiens
ttcctggttggagggacagccccaggatgccgtgggccgcagccactcaggactgtcaaaggtcaccaaagtccatgagcccccccgggaggacgcagct

SEQ ID NO: 156097 - DNA, 82 bp, Homo sapiens
cggcgctcgccatggccgacgaaaagcccaagaagtccattggaatattaagcccaggagttgctttggggatggctggaag

SEQ ID NO: 156098 - DNA, 75 bp, Homo sapiens
gaagtatttgatgtcttagagaaacttggagaaggtcacagttgcagattatatttctagagctgagtctcagag

SEQ ID NO: 156099 - DNA, 75 bp, Homo sapiens
aatcgtagaatttcttcagtcttttgatgagattacagctatgcacccagaggcctccattcaggctgttttttc

SEQ ID NO: 156100 - DNA, 100 bp, Homo sapiens
acgtgaggagctagagcgaatactggaagagaataaccgaaaaattgcagaagcacaagccaaactgagtacagaattttctgagacgccttctcccgac

SEQ ID NO: 156101 - DNA, 85 bp, Homo sapiens
gaggcaccgaggcactcagaggagttggaatcgaagcctcttaaaatggcagatgacttggacttcgagacaggagatgcagggg

SEQ ID NO: 156102 - DNA, 100 bp, Homo sapiens
caacgtgttggaccttccggagcttctcagaagacagagggttttcttttgaggtccaacgagcgctcctccaagcggagccttggagggcacggccggc

SEQ ID NO: 156103 - DNA, 50 bp, Homo sapiens
gggtgatcccttccttcatgtgccaggtggtggaagatggatatgaattt

SEQ ID NO: 156104 - DNA, 75 bp, Homo sapiens
tgatcccaagttgtcgacgaccgacagggtggtgaaaggtgtgttccagagaacaagccttcagacatttgctat

SEQ ID NO: 156105 - DNA, 50 bp, Homo sapiens
ctcaggaccaggcaccttctgtggaaggccgaagaacagttgagaattgt

SEQ ID NO: 156106 - DNA, 100 bp, Homo sapiens
tatagatggcttttattacattgagaggaggaagcttgacgctgtctattactatatgcgcagtttagctgccagcaaccctatcctgactgccaaggag

SEQ ID NO: 156107 - DNA, 75 bp, Homo sapiens
ctcggcagacgcagctcgattccagatggaggagatgagacggcccgaagttctctctgacccccacctcgactc

SEQ ID NO: 156108 - DNA, 100 bp, Homo sapiens
acctgcagaggtgtcacaggcaacagaacttcatgtcctggatgtggcagggaacagagccctatgagtttgtctctctggaatggctgcaaaagtggtt

SEQ ID NO: 156109 - DNA, 100 bp, Homo sapiens
aagagaacaagacgtgtgaagactcaggaactgcaagcacatgttgaccagataactgaaatggcagcagtaatgaggaaagccattgaaattgacgagc

SEQ ID NO: 156110 - DNA, 100 bp, Homo sapiens
cagtgagcaatgctttaaactggagagaattcagttttattcagcttcaggctgatgcaatcaacgcttttggagaatcactacaaaagaaacttctgga

SEQ ID NO: 156111 - DNA, 74 bp, Homo sapiens
ccgagaaccgtcagtttgagccagatggagagttgtggactggggcaacctttgccagtgatgagaagtgatgc

SEQ ID NO: 156112 - DNA, 90 bp, Homo sapiens
tgccacccactgtgcgggccttcgtggcctcccgcggcaccaagcaggaggcaaaaccttcaactgaggacttgggggataagaaggaag

SEQ ID NO: 156113 - DNA, 83 bp, Homo sapiens
gtttcgacagcgaacatgtcgcggcctgtcaggcttcaacggaccacaccaaaatgccatctcaaatggaacacgccatggaa

SEQ ID NO: 156114 - DNA, 121 bp, Homo sapiens
ccgctaatgtgtgtgcctgcccacaaggcttcactggacccagctgtgaaacgggttccctctcccagcctgtgctgactcagccatcttcccattctgcatcttctggagcatcagtcag

SEQ ID NO: 156115 - DNA, 76 bp, Homo sapiens
tgcagagcgcgcagtacctccgaatgattacggacctgaagccaaagaacaagatgcgctagtggacagattgctg

SEQ ID NO: 156116 - DNA, 100 bp, Homo sapiens
gccctgccgccgccgccgcggcccagcgagcggccctgatgcaggccatcaagtgtgtggtggtgggagacggggaattcagtttctaatagaaaatgac

SEQ ID NO: 156117 - DNA, 90 bp, Homo sapiens
accagctcttcgaggagcttggcaaaggcgacttgcatcacggagatgtcggtgatgatggcttgctggaagcagaatgaattccgcgac

SEQ ID NO: 156118 - DNA, 83 bp, Homo sapiens
aaagcagcgtgcgttcagccctggggtgaaaggaaagcaagccaggatggatatttacgacactcaaaccttgggggttgtgg

SEQ ID NO: 156119 - DNA, 95 bp, Homo sapiens
gaacattatcacaaagctatcatcctgccaaactccaggctcagatgtcacagagttttgccgaattgacaagcccctgtgtcacagtgaggatg

SEQ ID NO: 156120 - DNA, 50 bp, Homo sapiens
gcttggcaaaatcgagcgggccattgatcctcgttcctagctgcctgcca

SEQ ID NO: 156121 - DNA, 100 bp, Homo sapiens
agaaacatcgagtcactttgcctggacaggaggaacccttcaaggtgattctggataaatactacttcctctgcgggcagcctctccacttcatcccgag

SEQ ID NO: 156122 - DNA, 83 bp, Homo sapiens
gactctgaggctgatatgcaatgtcacttacaacattaatcagatactgcatttaaggcaaaatttggtttctctaatattac

SEQ ID NO: 156123 - DNA, 100 bp, Homo sapiens
ctggaggctcaggccctaggccattaaatcctgtaactcaagctcccttgccacctggggcttgcgtttcaagaaagcccatgtaacacatcctgaactg

SEQ ID NO: 156124 - DNA, 90 bp, Homo sapiens
tgaaactgaaggtagccgaggggcagtaaaagcatctactgggggacatcctgttgtgaaggtcctatggccgggctccgaagatgattc

SEQ ID NO: 156125 - DNA, 98 bp, Homo sapiens
tgcacgcctgtgtcctcattgctccaaactgtgttgtttcagctgtattaggagtaccaagttcgatccatagcaagtcatgttcgtcctgacaggca

SEQ ID NO: 156126 - DNA, 50 bp, Homo sapiens
tggagctcgtgtttggacgcatgggtgagtcaagtgaagacatagaccaa

SEQ ID NO: 156127 - DNA, 100 bp, Homo sapiens
gcgctcccgcctgaactaccctgagaatgggtggactcccggagaggattcctaccgagagtggatacaggggtttaaagccaatttgtctctcttgagg

SEQ ID NO: 156128 - DNA, 99 bp, Homo sapiens
agcccgccttctccgaggcgcagaagtggattgagttttaagataaaattggctgcagcattggcaagatgtcgaatcaagcatgatgccctttcaatt

SEQ ID NO: 156129 - DNA, 100 bp, Homo sapiens
acttattccgacattcagagttgtttcctccatttgctaaaggaatagtgtttgttaaacacagtgggaatatcacttttgatgagattgtcaacattgc

SEQ ID NO: 156130 - DNA, 75 bp, Homo sapiens
gtgcctttgaccttctgccatgattgtgaggcctccccagccacgtgaaacttggctacagcaaaccaaacagcc

SEQ ID NO: 156131 - DNA, 100 bp, Homo sapiens
ggccgccatcaaagccgccttggctcagggctaatgcgccctgaaggcagaggtactggtcttcttggacattaatctttgaatacttgctgactgctaa

SEQ ID NO: 156132 - DNA, 90 bp, Homo sapiens
ggagtgagaagcaagaaggccctggacacagcaatatctctgggctttcacaggattttgagtctggttggaggaatgtctttttcctgt

SEQ ID NO: 156133 - DNA, 95 bp, Homo sapiens
agctgcgtgattcccgtgattgcgttacaagctttgtctccttcgacttggagtctttgtccaggacgatgaagggcgccctaatggagatcatc

SEQ ID NO: 156134 - DNA, 90 bp, Homo sapiens
agctttacctcgctgaccctatgaagtatgttggtgagagtgaacgtgctgtgcgacaagtttttcaacgagccaagaactcagcaccct

SEQ ID NO: 156135 - DNA, 75 bp, Homo sapiens
gaaagaagtcattccttttttgaaggttttatgacttacctagtggagcctttatttacagaatgggccaggttt

SEQ ID NO: 156136 - DNA, 83 bp, Homo sapiens
agagaggacagcggacgagcagatccgggatacccacccaccatcccagggtctacaacatccacagccggaccgtcacccgc

SEQ ID NO: 156137 - DNA, 90 bp, Homo sapiens
cgcagctgagcgctgccgccgccgcagcaggtgctaaacctgcccctgggatctgctttgagagagtcaattctgcaggtgatccttatg

SEQ ID NO: 156138 - DNA, 76 bp, Homo sapiens
gaggcgctggcgcggcgggcgcggaatttcgctaaggagtttgtgatcagtgatcggaaggagctggaggaagatt

SEQ ID NO: 156139 - DNA, 73 bp, Homo sapiens
ggtggtgcctccggactgcacttgcgaagggagcttggggaggaagcgagaaccgaagtttggaggtagacga

SEQ ID NO: 156140 - DNA, 87 bp, Homo sapiens
gaagaaaagaaggggaagaagatcaaaacccaccatgccccagatatccatttggggatgaagtctactttgacagctagcaaggcg

SEQ ID NO: 156141 - DNA, 100 bp, Homo sapiens
tggccttcagttgctccgcagagtcttccactgtgggaagggcgatgccagtccctccactccagaggagaacgaaaccacgacaaccagcgccttcacc

SEQ ID NO: 156142 - DNA, 76 bp, Homo sapiens
ggtcgtctggtcctactacgcgtacgtggtggagctctgcgtgtgtaaagatgagcccagcagctacacatgtaca

SEQ ID NO: 156143 - DNA, 74 bp, Homo sapiens
tactaatggacagttagtcacccacctacatgttgagtactaaggctcgtacgtctgcatcgattatcttacgt

SEQ ID NO: 156144 - DNA, 74 bp, Homo sapiens
gtaaagtctgaagtatttcctgtatcaaaaacgctggcatgcttctgacggccaatgaaacccccaagatgggc

SEQ ID NO: 156145 - DNA, 51 bp, Homo sapiens
tgacggccatcgccgccgacctgtgcaagaaaaagcttgtggtgaaggggg

SEQ ID NO: 156146 - DNA, 100 bp, Homo sapiens
gccaatgagatttgtaacaaatcggaaaagaagaccatctcaccagagcatgtcatacaagcacgtggctgacgagatgctgaaagacatgaagaaagac

SEQ ID NO: 156147 - DNA, 98 bp, Homo sapiens
ggaagatttaacgaatggggttgtgatggcccaggttcttcaaaagatgtgataactaccccgtacagttcattccatcaacaatggcagctgctgct

SEQ ID NO: 156148 - DNA, 96 bp, Homo sapiens
gtgcccaggatgcgccggcctccaggctctcttgtcggaccttcgtctgtgacgctcagtcttcctcgctctttggcacctgcgtgtgtggtgtga

SEQ ID NO: 156149 - DNA, 147 bp, Homo sapiens
ggatgctcttccgcttctccttagtgctgcctccaaaccaatgcaccatcaccaaccaagtctcctctcggaaggtctggagcccggcactgtggtcataacagagcaggcagtggatacctgcttcaaggcagagtttgagcagat

SEQ ID NO: 156150 - DNA, 96 bp, Homo sapiens
gctaaagacatagttcctggtgatattgtagaaattgctgccccttctactgaattagtttctggaggatctgataatcaagtgattcactgggaa

SEQ ID NO: 156151 - DNA, 96 bp, Homo sapiens
tggacacctgtgtcagcatgtgggacctggttctctccatcgccttgtctgtggggtgcactggcccacccatggccacccatggaccagtcagct

SEQ ID NO: 156152 - DNA, 100 bp, Homo sapiens
cgaatccgaggaccactgcttgctcaggtgacgggggaagtgacagatccatcaggaaaagtccactttgctcttctggggacgtgggatgagaaaatgg

SEQ ID NO: 156153 - DNA, 83 bp, Homo sapiens
ggatagaagatgaagatgctctcattgctgatgtaaagctctctgatgtaaaggatggagtaaatcaagcagcacctgcattt

SEQ ID NO: 156154 - DNA, 100 bp, Homo sapiens
tacaggacctgtctgacgatagtccaaaaactgaagaagatggtggataagcccacccagactcagatgccactgcatcatcagataacagcgagacgga

SEQ ID NO: 156155 - DNA, 132 bp, Homo sapiens
gacgacagaaccctgtacaatttgatagtcattcgtaatcagcaggccaaagactcagagttttccaagagataacttcaccaagatgtccagtgataggcaaaggtccgatgatgagagccccagcaccag

SEQ ID NO: 156156 - DNA, 100 bp, Homo sapiens
gcaagcaggacttccgggaggaccaggatgctgccttcttcaagagacgagttgtactgctgtcacaggaaatggacgctggattacaagcatggcagct

SEQ ID NO: 156157 - DNA, 95 bp, Homo sapiens
atgcagtgtatgccttcttaggcttgacagccccacctggttcaaagcatgacgacagagatgatggtgtggattattgggccaaaagaggaaga

SEQ ID NO: 156158 - DNA, 100 bp, Homo sapiens
cacaagaacttgagcgacatggagaacgaattctactatcgctacccaagtggcagatatctacctagcatctcagtacacatcctatgccataagtggt

SEQ ID NO: 156159 - DNA, 88 bp, Homo sapiens
atggtgatggagattttgatgtggatgatgccaaagttttattagatgttccatttaagcagacctcttccatagctgtagctggagc

SEQ ID NO: 156160 - DNA, 100 bp, Homo sapiens
tggcttagaactctccacagccatcactcatgtccataaggagaggtcggaaaggtctgcttggaagccagacgaaacggctccacagagttccctgagg

SEQ ID NO: 156161 - DNA, 96 bp, Homo sapiens
cttcttgcctggaatcccatttgtttggggttggtagaaggtgttattgggaaaattcaacttcattcagggagaagagcctgctgagtgcagtga

SEQ ID NO: 156162 - DNA, 98 bp, Homo sapiens
tcgacgaccgacagggtggtgaaagattccaacaatgtctcacccatcttggctgccacccaaaagcactggtgagcccctcggccatgtgcctgcac

SEQ ID NO: 156163 - DNA, 100 bp, Homo sapiens
atgagagtcgaattggagaacttgttggagtgctggtgaatcatttcaagagtgtgaccgcaacaagggaaaacatggcttatactgtggaatgcctgcg

SEQ ID NO: 156164 - DNA, 100 bp, Homo sapiens
agccgggctggtcctgctgcgagccggcggcccggagtggggcggcgggttgcacactgggccacagaggatccagcaaggatgaagaaatggagcagca

SEQ ID NO: 156165 - DNA, 86 bp, Homo sapiens
aaggaggagaatacgctgaatgagaagcttttcttgctggcgtgcgacaaggggcccccagatgccgacggccctctctacctccc

SEQ ID NO: 156166 - DNA, 76 bp, Homo sapiens
gtactgcgttgaattgctcaacagcatcttggaagtccttagctaccaggatgcgtgacactccattcagggtaat

SEQ ID NO: 156167 - DNA, 100 bp, Homo sapiens
ccctgtttcccttcgaggaggacacgacaattcctcctcgcttcaagaagatgaagaagtagagatggaggccatcagctggcaggccagcagtccagcc

SEQ ID NO: 156168 - DNA, 95 bp, Homo sapiens
cgcgcgcagggcctgcagcgggagctggacggcgagcgcgagcggcgcgagaaatgtgtcccggcatggatatccggaacaacctcactaggttg

SEQ ID NO: 156169 - DNA, 98 bp, Homo sapiens
agaattcaaggttttgagtcggttcaggtcacccaatttcgaagtgactggacaaccccaaaatgcatcttttgtcaagaggaaccggtggtggctac

SEQ ID NO: 156170 - DNA, 82 bp, Homo sapiens
ccaggagtcatcggacgccagaatctgagtgcctggtgaagaatgtgatgggatcactagcatgtctgcggagagcggccct

SEQ ID NO: 156171 - DNA, 100 bp, Homo sapiens
ccaggaaccgaaaaggcgaggagtatagtacggcaaaaaactgtcggcccggattgcatttctacaaggcgaaagaaaaggtcaagagaacctgaagaag

SEQ ID NO: 156172 - DNA, 74 bp, Homo sapiens
tggcatcatttttgccctcaaaagaaatggcaggaagatgttaccgagtacttcagtgaattccttagtgcagg

SEQ ID NO: 156173 - DNA, 82 bp, Homo sapiens
cgggtggcttacagacgctgccagcatcgccgccgccagatgccatggacaatattaccaggcagaaccaattctacgatac

SEQ ID NO: 156174 - DNA, 97 bp, Homo sapiens
gcggccagcaaggaggacctggggctctacgagtgtgaggagttcatgatcaagtgttgcccacaccaaatgcttcatccagagtcatagtacatgt

SEQ ID NO: 156175 - DNA, 50 bp, Homo sapiens
atcgcccaatccacatgcttttccagactctcagcgttctcatctctctt

SEQ ID NO: 156176 - DNA, 99 bp, Homo sapiens
aggatatcgacgtcgtgatccagaagtccagagctgaggactgcctgtttgcaggaatgtttacccttgcggaagttgcatcacttaatgacattcagc

SEQ ID NO: 156177 - DNA, 90 bp, Homo sapiens
ctctgaagcagcgacggcacagcgggaagaatggaatgtctgatcacagatacggggatggtggctctactttccagagcacaacaggac

SEQ ID NO: 156178 - DNA, 90 bp, Homo sapiens
ccccctgaggccccagaactatcttttcgcaactcaagcatcccaaccttgttaacctcctggaagtcttcaggaggaaacggaggcttc

SEQ ID NO: 156179 - DNA, 100 bp, Homo sapiens
gagctggtgcagcaggaattgggatcgtgtcgctgcgatcacaatgaggacctagggcatctgtctgctgacgccccctggcctgcagtgaccatggccc

SEQ ID NO: 156180 - DNA, 83 bp, Homo sapiens
actaccaccacagaaagaatattgtactattccggatatacaagatcactgggagatgaacccacaagatcattgagtggtct

SEQ ID NO: 156181 - DNA, 100 bp, Homo sapiens
aggtgagtcgcggtgggtcctcgcttgcagttcagcgaccacggaaccctcagtgctgcgtctagattctgcaggggaggtttgctgggaccttggctcc

SEQ ID NO: 156182 - DNA, 98 bp, Homo sapiens
tgcacaaggggaaatttggcttgcaattcatcactttgaaaagaccccaccaacaactgaacgctttggtcaggctgctacaatggaaggaattgggg

SEQ ID NO: 156183 - DNA, 74 bp, Homo sapiens
gtggggccttttgacaactccaatgttgactccatgtacatcttcatgtgatcagccaggattttgattctcct

SEQ ID NO: 156184 - DNA, 100 bp, Homo sapiens
agatcacctactccatcaaggtcatcgaggccaacaacccattccaggctgtgcaggaaggctgctttgtaccgcctcagtggagactggaatcccttac

SEQ ID NO: 156185 - DNA, 80 bp, Homo sapiens
ataatatttatggagcatatattatggaacacattggttgaatctggcgatgtggaacccatggatatggagggctgact

SEQ ID NO: 156186 - DNA, 100 bp, Homo sapiens
gaagcagcagacagccaataaggtggaaattgagaaaattcggttgcacactgacaagaaacagatcagtgttgggttcattggctatccaaatgttggc

SEQ ID NO: 156187 - DNA, 95 bp, Homo sapiens
cgtgtaccctggagactggatggccatgagcatggttcaaaacagggacagaatgatgctgctgaaattggaacaagaaattttagatttcattg

SEQ ID NO: 156188 - DNA, 75 bp, Homo sapiens
gagtcagaaactcagccactggttgccttggtaggcaataaaagattaaagcaaggagagccaatcatgactggc

SEQ ID NO: 156189 - DNA, 74 bp, Homo sapiens
tgactacctgctgtacaccctcaacaaacaccagcgctttggattgtcactgctgttccaagggcacacgcaga

SEQ ID NO: 156190 - DNA, 80 bp, Homo sapiens
ctcctcccagtgacgggtctggagtgcgtgggggaccggctgttggcgggtattagaaaactactcggatgctccaatga

SEQ ID NO: 156191 - DNA, 51 bp, Homo sapiens
aggaagaagatctaatcatatgtcagatgatgatgatgcggagagtaggag

SEQ ID NO: 156192 - DNA, 75 bp, Homo sapiens
ctcatcagagggaagatctttttcctcaattgcatcaacaacagcaacttgtgattggcggtgaccggatattca

SEQ ID NO: 156193 - DNA, 75 bp, Homo sapiens
cacaacccctgcaaacttggattcagtgtgctggaattgatgttcgtctgtgtgatgttggtgaggccatccaag

SEQ ID NO: 156194 - DNA, 50 bp, Homo sapiens
aaaaatttcaggattggtactacaagcactgccctgggaagaactaggat

SEQ ID NO: 156195 - DNA, 50 bp, Homo sapiens
gacagatgcgaggcggcggtcagcttcgagagctgtgcccaggagtgaac

SEQ ID NO: 156196 - DNA, 75 bp, Homo sapiens
gaagaattatgatgagttcatgaagctccttgtgcctgagattgtgagggagacccaggacctaattgaacaagg

SEQ ID NO: 156197 - DNA, 50 bp, Homo sapiens
tctggatgaaatacatcgtgagaagagagctggcgctacgtacatctttg

SEQ ID NO: 156198 - DNA, 98 bp, Homo sapiens
cgctgaagctgccgccgttgcctccgccgccaagagtgagcgagcggacccgcgatggggcatttgtttacctgagcaatctgctgtatcccgtgccc

SEQ ID NO: 156199 - DNA, 50 bp, Homo sapiens
cgagctcactcacagagcctgagctgagaaagtggaactccagagacact

SEQ ID NO: 156200 - DNA, 82 bp, Homo sapiens
aagatgatgatgtcctcagtattgattcagtattgaaatggctgatggcaagtgcaggaagatccttttctacagcagttac

SEQ ID NO: 156201 - DNA, 100 bp, Homo sapiens
ctatccagatggaaaggattttccaagagtggaagctggacacactatgtgacttgtatgaaaccctgaccatcacccaggcagtcatcttcatcaacac

SEQ ID NO: 156202 - DNA, 102 bp, Homo sapiens
gagcacaaaagagtctccgcggtggaggtctgcgttgctcttgcttttcctcgctggggtgtacggtttttcgttggaatatacgttgcacatttatggcga

SEQ ID NO: 156203 - DNA, 74 bp, Homo sapiens
tcaaagtgattccccggaatcgtgtgctgggctggtcccccttggacaaagccaaaggccccttgttagctggc

SEQ ID NO: 156204 - DNA, 83 bp, Homo sapiens
agcgtggcctccgccaccgtgcacatccgaatggtttgtgaatagcacaatggaagaagctggactttgtgggttaagagaga

SEQ ID NO: 156205 - DNA, 100 bp, Homo sapiens
cagtccctgcccgataccccattccttttagcagtgctgattactggtccaactatgaatttcataataggaaaaagcggatggtggttcctgctgccct

SEQ ID NO: 156206 - DNA, 90 bp, Homo sapiens
ggaacagcagaaagtccttcatgaaaccattaaagttttagaagatcgtttgtgaagaaatatgggaacctttttagcttggagcttggt

SEQ ID NO: 156207 - DNA, 100 bp, Homo sapiens
caagacccacgtggagaaggacttcattgctttctgctcttcaacgccactgatcccaccaccagatatccacattgacagctatggtgaaaattatcta

SEQ ID NO: 156208 - DNA, 75 bp, Homo sapiens
ggcggagcctgcgtgctggtgatcgcgctgatgttcctggcctggggggaaggtgaatctggattgggaaagtcg

SEQ ID NO: 156209 - DNA, 100 bp, Homo sapiens
gtcaacactatgggatgggtttcaggatgtggacaacaaagtagagaggatttggggtgattgtacagtcaggaagaagtactctcatgtggacctggtg

SEQ ID NO: 156210 - DNA, 75 bp, Homo sapiens
atcagtttcttgagccagccccagcgcctggtgctgcagtccccttggatctcccttcgtggagacgacaccggg

SEQ ID NO: 156211 - DNA, 50 bp, Homo sapiens
ggaagttcatttaagtcaccagacacaaattatccatgaagctggttatt

SEQ ID NO: 156212 - DNA, 74 bp, Homo sapiens
tgccctcagcatctcccttcatgtctgggtcatggtaattaagaatcgttttcatcgtgtgttcctaccctccc

SEQ ID NO: 156213 - DNA, 75 bp, Homo sapiens
tgctgagttttcttttcatgtaccaagtcttgaagagcttgctggaggaactttgctgccacaatacctcggccc

SEQ ID NO: 156214 - DNA, 98 bp, Homo sapiens
aggtgctgcccgctttggagaacaacaaggagcaggcaatggatcacttggagtcctttattgctgaatgtgatcggagaactgagctcgccaagaag

SEQ ID NO: 156215 - DNA, 76 bp, Homo sapiens
ctctggccggattccagactcgtgggggaaaggctggtttgcatcgccagcttctatatattacggcctttttttt

SEQ ID NO: 156216 - DNA, 76 bp, Homo sapiens
cgactgggttcgcctgcccagcaaatgcgaagcccacgacccttcctcagggcaccatcaacatgaaccagtgcac

SEQ ID NO: 156217 - DNA, 82 bp, Homo sapiens
accgtgacttcccggacgctgggaaatggggtcgggccccggctcagtggtcccaggcagctcgggtgtcggaacccccaga

SEQ ID NO: 156218 - DNA, 75 bp, Homo sapiens
ttcggtggactccttcggcagtccacccaccgccgccgcctcccaggtagagcagagccggagccaggtgcaggc

SEQ ID NO: 156219 - DNA, 96 bp, Homo sapiens
catgagcggtggtgaagtggtctgctccggatggctccgcaagtcccccccggagaaaaagttgaagcgttatgttattaccccaagaaaaagcca

SEQ ID NO: 156220 - DNA, 90 bp, Homo sapiens
cccgccagctaccggggggactcatgccagctccaagcccagccctcagccatggcatgccccctggatcaggccattggcctcctcgtg

SEQ ID NO: 156221 - DNA, 74 bp, Homo sapiens
atggccaactccgggcccaacagcaacaggtctcaattgcccagctgagagccagcctggaggttacccagcag

SEQ ID NO: 156222 - DNA, 75 bp, Homo sapiens
aatggtctcaatttggcctttaccatcgcccatgagctgggccacaaatcagtagtaatttcacttcgtcttctt

SEQ ID NO: 156223 - DNA, 75 bp, Homo sapiens
tctcagctttttcgtatttggaggttttactgcaatgactgagaagttcagcagtgccatgtacatggacagagg

SEQ ID NO: 156224 - DNA, 101 bp, Homo sapiens
agtaaatctgtctgcagcccagacactgagagccgctttcatcaaggtgtggtggctcacgtctgtaatcccagcactttgacaggctgagcgagggagtg

SEQ ID NO: 156225 - DNA, 96 bp, Homo sapiens
ggctctgcgtgagtgtggtctacgagctgtttctcatctttatactcttccagaatagcctaacatggcagaccagagacagcgctcactgtctac

SEQ ID NO: 156226 - DNA, 83 bp, Homo sapiens
tgtctatgagcagttcctgctgcagcttcaggttattcagcttctcaaggctggaaaagcgaaggaagtttcctacaatgcac

SEQ ID NO: 156227 - DNA, 75 bp, Homo sapiens
gctcatggcctgccactgcgtgcaaatgagccgtcagactgctacagcattacctaccggtacctcgaagtgtcc

SEQ ID NO: 156228 - DNA, 80 bp, Homo sapiens
ccaacaccacgacaatccagtttcctgctaatttgcagcttcctccaggttttaaaatcaaagatgggaaaatcggagaa

SEQ ID NO: 156229 - DNA, 74 bp, Homo sapiens
ccatcgattgttggtgccagttggaaagaaccttttccaaacggtgtgctgctgaggactgtcttggaccctgt

SEQ ID NO: 156230 - DNA, 101 bp, Homo sapiens
cggcagtctgagccagcagcgccccctctagaagtttctgaggaacagggaaatcctcattgacgattcaatttgttgaaggccaatttgtggactcctac

SEQ ID NO: 156231 - DNA, 100 bp, Homo sapiens
gagaaaatgcggagtggcaagatggcacccaagccccagtctcgctgcacctctacccgctcagcaggcatttccggagagttcttttgaagtcacttca

SEQ ID NO: 156232 - DNA, 100 bp, Homo sapiens
ccctcggtgcgggctccagggcatgctcgggaccccccgcggctccagcccagacgccccggcctcaggaattgaatgatctggcacgggaccctccagc

SEQ ID NO: 156233 - DNA, 75 bp, Homo sapiens
tggcttctgtccctgctcagtcggccaagaagccctgcccagttccagaagaaggcttcttattgggatgtgtgt

SEQ ID NO: 156234 - DNA, 98 bp, Homo sapiens
ggacgaggagctgctgccgcctgacggggctcccgagcacgggatttgtcttggctgttactatgacacgggaagcaattgatgaatttcggcgtttt

SEQ ID NO: 156235 - DNA, 75 bp, Homo sapiens
gcggcgcgacaccgggctccggaaccactgcacgacggggctggacgtttgctcctaaatctcaaaatatggaaa

SEQ ID NO: 156236 - DNA, 102 bp, Homo sapiens
cacctcacggtgaggctgtcgagtgacctgagagcctcagaccctcacgtcagccggatgtcgcaccagcctgctgttgacggagtctcgctctgtcgccca

SEQ ID NO: 156237 - DNA, 82 bp, Homo sapiens
gaggaggttgggatcttcttcactgcctctggcatggatgagtttgctgacctctctgaggctgccaaccggaacaatgacg

SEQ ID NO: 156238 - DNA, 75 bp, Homo sapiens
aacgagcacctcctcgaagtcatcccagtacgttgagaaagaagggccttaatggctgtgacagcccagaccccg

SEQ ID NO: 156239 - DNA, 75 bp, Homo sapiens
ctcatgttctgcacctcaggagggaattcagcctcagtgatgtccatgagatttttattgaaggatggtcagctg

SEQ ID NO: 156240 - DNA, 74 bp, Homo sapiens
cacatggtgtcagatgaatatgagcagctgtcctctgaagtaagactttgaccccgacgcaggcttcagtgatt

SEQ ID NO: 156241 - DNA, 100 bp, Homo sapiens
gggaaagttgagtctctcctgcgccgagccttcggggcgatgtgtagtgccttccatagggctgagtctgggaccgagatccccctgaggtgaccgtgtt

SEQ ID NO: 156242 - DNA, 76 bp, Homo sapiens
ctggaggaatgttttaattcttcggaaataccaagtggtctctgatatatcccctggggcagctggtggggctgaa

SEQ ID NO: 156243 - DNA, 100 bp, Homo sapiens
ggaacccgacatggattccacaggtgccatgcctctgcaactcctcctgttgctgatcctactgggccctggcaacagcttgcagctgtgggacacctgg

SEQ ID NO: 156244 - DNA, 82 bp, Homo sapiens
ggtacgggaagaagaaatgggggagtccatagaggccactgtattctattgaagaacatgtctaacagtaacactactcaag

SEQ ID NO: 156245 - DNA, 101 bp, Homo sapiens
ctttggtcccaggcatcatcacagttattgacaccgaaaccgttggagagggccaggctgctctttggcgtaaattgcaatcgattagggatcgtttctca

SEQ ID NO: 156246 - DNA, 82 bp, Homo sapiens
gcaggaaggactggggccacgtggagctgctggaggggaaattcaactactgaggaggttacggcacaaaaatgtcatccag

SEQ ID NO: 156247 - DNA, 74 bp, Homo sapiens
gaattacagctctcagatgtcccaaggacctattgctatgcagaatcctggttttgacttcagtggagcagaaa

SEQ ID NO: 156248 - DNA, 104 bp, Homo sapiens
accgaggtgggggctacggaggagaccgaggtggctatggaggcaaaatgggaggaaggtaattctgttccacaggatatctgctgtatggcagctgatggcag

SEQ ID NO: 156249 - DNA, 79 bp, Homo sapiens
tttgtggtgcgggacgcaccctggaccgccagcagcagtgagaagattctgaaaaagagttccacgtcctcccttatcg

SEQ ID NO: 156250 - DNA, 50 bp, Homo sapiens
cctcctcctccacaggggagacagaggtactctcatttacacatcccatc

SEQ ID NO: 156251 - DNA, 75 bp, Homo sapiens
taccagccaccctgcccccaagaaggaagtcatcatgggccggcctggaacagacagagaagctgacgaggagag

SEQ ID NO: 156252 - DNA, 50 bp, Homo sapiens
agatagccagcccatacaagatcgtaaagctgtctgccaaggagaaggag

SEQ ID NO: 156253 - DNA, 100 bp, Homo sapiens
attcttccatggacaggacaactatgaccaggggtggcctatgtatgcacagctactgattgatttattcaaatatttagcgcctttccttagaaatgtg

SEQ ID NO: 156254 - DNA, 100 bp, Homo sapiens
caccaacctcctgtatctggagctgggagacaagcccgcgcccaacaccttctatgtagggggcttcgccaccttctcctcctgcttccccggcctctgc

SEQ ID NO: 156255 - DNA, 50 bp, Homo sapiens
gtgtggcacgacacaaaaatcaggactccctggaggaaaagcggaagcgg

SEQ ID NO: 156256 - DNA, 83 bp, Homo sapiens
aaaaggtcgtgaggaaactgagaggagaagatcaagaggtggagctggttgtagattatggatcatagacggtatttctatgt

SEQ ID NO: 156257 - DNA, 100 bp, Homo sapiens
cttcctcttcagtcatcagtgatgcctttgtggaactgtacggccccagcatgcggcctctgtttgatttctcctggctgtctctgaagactctgctcag

SEQ ID NO: 156258 - DNA, 74 bp, Homo sapiens
tcagtttggttctgagtctcctcaagctgggatcagtattgctaccagtagtgcagtttcaaaggaactcacca

SEQ ID NO: 156259 - DNA, 98 bp, Homo sapiens
taataaaatgcacatatcccagtccattgaggctgattcaccccaagagtggccgttcctaccacgaggagttcaaccctccaaaagagcccatgaaa

SEQ ID NO: 156260 - DNA, 145 bp, Homo sapiens
tgaatgggcccgtgggcatatttagtcattcatttttgatcaggagaaagaagacagccatcatttgaaaggaacgtggctgaagagcggtctgggtcttgtgcaccaggaaggcagccagctgacgtggacatacattgccccc

SEQ ID NO: 156261 - DNA, 88 bp, Homo sapiens
gcagctggcgcagcccacgctcatgatcgacttcctcacccgcgcctgcgacctcgcccggaagcaggagatcattaagaccacggag

SEQ ID NO: 156262 - DNA, 50 bp, Homo sapiens
tggaaacccaatgaaggctggaactcaacctaaagaatgttttttgatac

SEQ ID NO: 156263 - DNA, 100 bp, Homo sapiens
gacggaggaaggtctgaggagcagcttcagtccccgccgagccgccaccgcaggttgatggacggatggctacatggatgtgatggagatggtttactat

SEQ ID NO: 156264 - DNA, 83 bp, Homo sapiens
caaggagtccaaggacatcctggagaagcaaaccaagagtttcactgttgacatccgcgccaagccagaataccacaaattcc

SEQ ID NO: 156265 - DNA, 50 bp, Homo sapiens
gtccaatgtcaacattgcccagcaagtggagcgggacggtatgcgggcca

SEQ ID NO: 156266 - DNA, 96 bp, Homo sapiens
cgagcgggcgctgctggatgccgagcgcctcaagcgcgagatcctggtgaagaccatgatacgtaaacgctcctttgggaacccattcgagggcag

SEQ ID NO: 156267 - DNA, 50 bp, Homo sapiens
cagccccccaggcttcactggatgagttttgatcatcctgagaaaaatgg

SEQ ID NO: 156268 - DNA, 90 bp, Homo sapiens
aaaaagcagtaaagccagaggaaggaggccagcaagcgcatctccagccacatccctttgatcatccagttcttcatgctccagacgtac

SEQ ID NO: 156269 - DNA, 74 bp, Homo sapiens
ttcctgcaggagcacaacaccacactgcagacccagaccgccaagctgcagcctccagggtcgtatagacctcc

SEQ ID NO: 156270 - DNA, 96 bp, Homo sapiens
gatctgctcttcgtctgcttcttcctcttcagtcaaggtgctggagaatctggtaaaagcaccattgtgaagcagatgaggatcctgcatgttaat

SEQ ID NO: 156271 - DNA, 82 bp, Homo sapiens
ggcgagcgcgagcggcgcgagaaacactgccagtgaaagatgtagaagataaacctgaacaacaaaccagaacaagagagac

SEQ ID NO: 156272 - DNA, 100 bp, Homo sapiens
ccttggcactggcaggatcaagtgatgctttttctggaagtgagggtgtcatggagaaactccagctgggcccagagattctgcagcgggaaaatccaag

SEQ ID NO: 156273 - DNA, 75 bp, Homo sapiens
caagctttagagcctggctactcacagttgaagcctgattgcagggtaagcttgatgattaccaggaacgaatga

SEQ ID NO: 156274 - DNA, 100 bp, Homo sapiens
cagccagcaggagctgaagccatttccctttggtgtccgcattgactacgtgctttacaagagatactttctagttgggagcaataatgcagaaacgaaa

SEQ ID NO: 156275 - DNA, 90 bp, Homo sapiens
atcactcggtgcacctgcttttttctgcaaatcgctgggaacaagtgttcacgcaaagaatctgctccacaagttttgcttccagaagaa

SEQ ID NO: 156276 - DNA, 144 bp, Homo sapiens
caggttctggcaaaaccagtctgttgtccaaactctgcagtgaaagccccgataacgtcgtgtcgaccacaggcctccccatggccacccatggaccagtcggcattcacttcctcccttctgcggcccataaaagccctgggt

SEQ ID NO: 156277 - DNA, 100 bp, Homo sapiens
gaggctctttgctgctgtcagtatcaccactggtcaagcaggaactgttgacattcagggatgtgaccatagaattctctctggaggagtgggagtttct

SEQ ID NO: 156278 - DNA, 131 bp, Homo sapiens
ctttatgaaccttgtgatagatgaatgtgtggagatggcgactagtggacaacagaacaatattggaatggtggaaatgactataccctggtgcttaaggagagcggaacttgtgttcaagtgtgtcaaag

SEQ ID NO: 156279 - DNA, 100 bp, Homo sapiens
cgctctggaccagcacctccaacgacaactgacatatatccacaagaagtgccatagtgaacctgatggacctgggattgcagcattaactagtgaggag

SEQ ID NO: 156280 - DNA, 75 bp, Homo sapiens
cctgaacttttgggttgccttaagtgagaaatcagcatggctcaggtgtctggaccatactggcttctcttgcat

SEQ ID NO: 156281 - DNA, 49 bp, Homo sapiens
cttcattccgcagcagcactccgacagggatagctgggagtatggccac

SEQ ID NO: 156282 - DNA, 101 bp, Homo sapiens
agaggaagctatgaaaagagtacgagaagcacagtccctaatttctgctgctatagaaccaggtcattggtgaagccttgaatcagctagttcctcaaaaa

SEQ ID NO: 156283 - DNA, 75 bp, Homo sapiens
aaccagaaactttaaatcttgagaaaagaagattgtctatcatgaaggaggactccattttctggcaatacggtg

SEQ ID NO: 156284 - DNA, 94 bp, Homo sapiens
gcgacgcgcaagggctgcggagccgcgggccggcgagcgcgtcgccaccatgatgaggacggggacttggttgccttttccagtgacgaggaat

SEQ ID NO: 156285 - DNA, 82 bp, Homo sapiens
ccttggtgtcatccagccttagcaaaccagagatgagtgaccgaggaggtggcgttcctttgaggaaaattgacagactttt

SEQ ID NO: 156286 - DNA, 80 bp, Homo sapiens
aagaagataatggaaaagaaataccacaatgttggtcttagtaaagaggagatgttaaagtaacccatcttgcaggacga

SEQ ID NO: 156287 - DNA, 83 bp, Homo sapiens
ccgggatttgggtcgcagttcttgtttgtggatcgctgtgatcgtcacttgggctcattgtcatccccaagccaggccagttc

SEQ ID NO: 156288 - DNA, 75 bp, Homo sapiens
acgcggtcatctcgcagaacgccatcaaccagctgacgcacagacattcgggtgcttcagccagaacaaccccag

SEQ ID NO: 156289 - DNA, 75 bp, Homo sapiens
tgataaaagcctaagagtttgggaatgcaagaagttgagaactttaagaagctaaatctcattagtaaagagcag

SEQ ID NO: 156290 - DNA, 60 bp, Homo sapiens
ttcagacccttctctcccctccactttctcccgggtttttcgttggaatatacgttgcac

SEQ ID NO: 156291 - DNA, 100 bp, Homo sapiens
accccagacgtctgcaggccagtcctttccggctagtgcctaatgtcagaatccacatggatgggatatctcccggggccaattcagcatctctacctgg

SEQ ID NO: 156292 - DNA, 74 bp, Homo sapiens
tattacagattctattcatgaacaatgctatttcaaagcttcacaggctgctcaagaagccgagatcaatgcca

SEQ ID NO: 156293 - DNA, 100 bp, Homo sapiens
ttccatggtaccttcatacccatctgatgggacaaccacaaggttccaatcgttgcacttactgctactgcaagttcttcaatccgggaagacattgtac

SEQ ID NO: 156294 - DNA, 97 bp, Homo sapiens
ggggaggcgcgcggaggctggagctggaggcgcggcgccggtgagctgagcatgttggcagataaattgaacatgactccagaagaagctgaaaggt

SEQ ID NO: 156295 - DNA, 75 bp, Homo sapiens
ctaaatttgtgaatgctgtgtatgataccttacttaatactgaaagaccacagcaagattctttcattcgtctcc

SEQ ID NO: 156296 - DNA, 100 bp, Homo sapiens
ctggatcagtttctttgtcatgtagccaagactggagaaacaatttgaaggcacagttaaatgaaacactcacaaaacttagaactgaacaaaatgaaag

SEQ ID NO: 156297 - DNA, 100 bp, Homo sapiens
tacaggactcctaaggcttgcaacaagtgttgttaaacacaaaccaccctttaaattttcaagggaaggacagcaaagaatggctcaagaagtactgaca

SEQ ID NO: 156298 - DNA, 96 bp, Homo sapiens
gtggctttcaatgtttcgaagatgctgtctggaataggggctgaaggagaggctgttatcaaagaacagcttcaagagactcagggattgtgtgaa

SEQ ID NO: 156299 - DNA, 75 bp, Homo sapiens
ccaagaagcacgacctgctgaggggactcagagctcttcctcatgaagctcatcaaccgccccatcatcgtgttc

SEQ ID NO: 156300 - DNA, 75 bp, Homo sapiens
ctgtttctcatctttatactcttccaggcctccggtgtggctgtctctgatggtgtcatcaaggtgttcaacgac

SEQ ID NO: 156301 - DNA, 50 bp, Homo sapiens
aaaattgtcactggatttaatggcagcagccgctcttctaaaacattcaa

SEQ ID NO: 156302 - DNA, 100 bp, Homo sapiens
gttgagtccccacagacctggaaattgcggcccctctttctcaacccagagcaaattgagacgtccgggccatcgatgatgactgtaaccagacagggca

SEQ ID NO: 156303 - DNA, 75 bp, Homo sapiens
tttctccaaggtttgaaaagcagctggcctgcaagttgttgtggaattataagctgaacctaactacagatccca

SEQ ID NO: 156304 - DNA, 100 bp, Homo sapiens
aggcgcgctccctgcggccccgggatgacttctcagcgttcccctctggcgcctttgctgctcctctctctgcacgggggagtcggtgaagtacttcctg

SEQ ID NO: 156305 - DNA, 74 bp, Homo sapiens
gataatggaggcctggactctgaggaatcctatccatatgaggcaacagtggatgaaaatactaggaaaagttt

SEQ ID NO: 156306 - DNA, 101 bp, Homo sapiens
acttccctgagccactctccaggctgctccagtactcaagggaacgggcctcaggcccaggcccaaggccaagtgagagagcccaggccacaggacatgct

SEQ ID NO: 156307 - DNA, 78 bp, Homo sapiens
ggtcatcattgtccaggcctgcagaggtgacttaattcagtgcacaaatgagatgaatgtgaacatcccacagttggc

SEQ ID NO: 156308 - DNA, 75 bp, Homo sapiens
ttttcggatcatgtctggtggctccgcggattataacagggtcaaggcttgggtcttgccccgcagacccttggg

SEQ ID NO: 156309 - DNA, 76 bp, Homo sapiens
atctgcccctgtcaaatcattccaggtggtcttcaagctgacagagaagctgacggaacagaaggagtggatgaag

SEQ ID NO: 156310 - DNA, 75 bp, Homo sapiens
aaacggagacttggatgaggtgaaagactatgtggccaaggttaaatgggccagggaaaactatcaccataacat

SEQ ID NO: 156311 - DNA, 74 bp, Homo sapiens
cagcatggttgtgggccagcttaagggtcccagtcctatgaggatatgagaggaatcctgtatgcagcccccca

SEQ ID NO: 156312 - DNA, 97 bp, Homo sapiens
cggaacccttcgctggcgggagcgcggttcggggccgcagaggtgatgggcagaggcttcagtgtccccttcgcctccgcaggagaggagaggcagc

SEQ ID NO: 156313 - DNA, 73 bp, Homo sapiens
tccacaccgacaccatctggaggaggcgttgccgtgaggagaagcagggccctgagcggaagaggattaagaa

SEQ ID NO: 156314 - DNA, 90 bp, Homo sapiens
agcagagatgttttccaaacgtatggacagctttttatcctccgttgcagacatggttcaaaggtgtttgtggcttgatcgtcccccagg

SEQ ID NO: 156315 - DNA, 75 bp, Homo sapiens
ccagaggccatgccaactcacagaaatctatgttctctgaagaaatacactttcgggaaatggcctctaaatcct

SEQ ID NO: 156316 - DNA, 100 bp, Homo sapiens
cggccatctcgctgcccgacgatgtccgcaggcggtgcacttacagagtgctacgatgaactggggaacagatatcagcttccagtgtattgcttggcac

SEQ ID NO: 156317 - DNA, 100 bp, Homo sapiens
gataattggaggtgttgcagcccgggatcagctctctgttttggaaaatggagatggaatttttaagatgagcctttctccagatgggatgctcctggca

SEQ ID NO: 156318 - DNA, 100 bp, Homo sapiens
aggaagccgactgctgcctggtctgcaaagaagtcctttcaagtctctaggactggactcttcctaagcaagtccgagtggagactgctgcacggactct

SEQ ID NO: 156319 - DNA, 100 bp, Homo sapiens
ctatggcctgatgcctttaaatggagtcctgaggaaagagcctgtatttaacgatgagctcccagcaagcattctgtgtggcattgtgtccgtaaagcct

SEQ ID NO: 156320 - DNA, 95 bp, Homo sapiens
gtcgggaagaatcgtttggtctcctgccgtgcccggaacaagatcactcaaggtgaaggataatctactaataccagcactttgaatgaaaattt

SEQ ID NO: 156321 - DNA, 80 bp, Homo sapiens
ttcccttgcaaatttacatacgagaatggcttgtgaaatcatgcctctgcaaaggaactgtggctgcaccatctgtcttc

SEQ ID NO: 156322 - DNA, 80 bp, Homo sapiens
ctgaagagactttccgttacatgagtgccaaactgcggtaaattttttatcagtgaagtggaagcatgtgttttgttttg

SEQ ID NO: 156323 - DNA, 100 bp, Homo sapiens
cacaaggagaggaccggcagcaatcgatttgccaagagagaactcgatgccaccgcaacggtattggcgaaccggcaggatgaaagtgagcagtccagaa

SEQ ID NO: 156324 - DNA, 100 bp, Homo sapiens
cattgccaaaaaatatatagatcagaaatttgtattacaggagccttttgtggcagatgaatatattgaacgtcttgtatggagaaccccaggaggaggc

SEQ ID NO: 156325 - DNA, 95 bp, Homo sapiens
cacactggaaacaaacagtatttctactggaaaaaccattttcagttaaagcagggaaacaaaggacccatcgcaaatgttttccatgctgatct

SEQ ID NO: 156326 - DNA, 82 bp, Homo sapiens
cctgggggccctcactgagatgtgtgattgacgtgagtgaattcagatataactcaagcttgttagagggctttttaaaaat

SEQ ID NO: 156327 - DNA, 100 bp, Homo sapiens
caggcatggagatgctactgatgtcagggacattctgagcatgtgagacctgaggactgcaaacagctataagaggctccaaattaatcatatctttccc

SEQ ID NO: 156328 - DNA, 100 bp, Homo sapiens
cggagtcctattctgagacagacgccaggtggctacccattgccaggcagcaaggccggaggacgccgtgcagcacgtgtccatggaaaacactggcgaa

SEQ ID NO: 156329 - DNA, 100 bp, Homo sapiens
agaagaggacgttcttatgatagtagcatggagtcacgatctttccctagatcattctgacctagttgcagagttgttgaaggagctgtctaaccataat

SEQ ID NO: 156330 - DNA, 100 bp, Homo sapiens
tccgcgtcccgctcgctgggagagaggtacctctccttttccctctccctttccctaaggaagctcttcgtgggcggtcttgactggagcacgacccaag

SEQ ID NO: 156331 - DNA, 100 bp, Homo sapiens
ctccctggtgaagaaaacctgaaggttttaaaagccttggcctcagaggaccctttccaggttctgaaagagtctttcttcttcaaacctttgtgtgcgg

SEQ ID NO: 156332 - DNA, 101 bp, Homo sapiens
gcagaggtgccgacatggggcttaagatgtcctgcctgaaagatgacgtccggttgtttgccttcgtgcgcttcaccaccggggatgccatgagcaagagg

SEQ ID NO: 156333 - DNA, 90 bp, Homo sapiens
cttctgggagctgaggaaccagatatcttgaaaagctgccagaaagtcatgctgcaaagcttggagcccagctggccgatttacaccttg

SEQ ID NO: 156334 - DNA, 100 bp, Homo sapiens
gtgggcgtcaacgccgtatccagcgactacgcggccgcggagacctacctgcggcgtcggcagctgctgctccgaggccccttcccagctgcctgcctgc

SEQ ID NO: 156335 - DNA, 75 bp, Homo sapiens
gccacaatcttcaatgagtaaacatattcctgaatactcccccagttgcaagaggcgcaggaccgtggaagactt

SEQ ID NO: 156336 - DNA, 83 bp, Homo sapiens
cagatatcgggctgaacggtcaaagacattcacaacatggatgattgtcagaagcttcagttctggtaaaagagaaggtgggg

SEQ ID NO: 156337 - DNA, 49 bp, Homo sapiens
gtgaggtgtgggtgttcgtttctcagggctacttctacaagtccgaaca

SEQ ID NO: 156338 - DNA, 82 bp, Homo sapiens
aaaactccagcgagatccgggccgtgaacgaaagcagtgacggaggagcttgtaccaccgatcactccaagaactgaggccc

SEQ ID NO: 156339 - DNA, 74 bp, Homo sapiens
tagatccaggttggaatcctcaggcacaacagcaacgccatgaaagagacttggccctcttgaaactaaaggct

SEQ ID NO: 156340 - DNA, 97 bp, Homo sapiens
cagcgcgctgcaacacaagatcaagaactccatctgggtggctgtgctggctctggctgtggcaaatgtgactgccatggagtgaagggacaaaagg

SEQ ID NO: 156341 - DNA, 100 bp, Homo sapiens
gcctcctccaagccggccaattccccccgcaccaaattgcatcgtttcccaggaaaattgcctaagaattatgacccaaaagttaccccagatccagaaa

SEQ ID NO: 156342 - DNA, 83 bp, Homo sapiens
catcggagctgtggtcgctgctgtgatgtgtaggaggaagagttcagcacagccatgacagtgcagatcctgctgaagctgga

SEQ ID NO: 156343 - DNA, 96 bp, Homo sapiens
ctttctccagtggaagtggttggaaagattgtagaaggcatgaaacaaaaaatgtggagtattgaaaatattgccttcggttctggtggaggtttg

SEQ ID NO: 156344 - DNA, 75 bp, Homo sapiens
ctggagctaaactggagccgtccataggggtgaatggggccatggcaatgacaggctcaacaccttgctcatcca

SEQ ID NO: 156345 - DNA, 90 bp, Homo sapiens
tgccagaatgtgtctctgaagaggctcgctcactcattcaacagggtacaagttgaattctatatgaatgaaaatacatttaaagaaaga

SEQ ID NO: 156346 - DNA, 75 bp, Homo sapiens
ggtacctgtagctgggaatgtcctacgtgttaccgggaatcacagacacggctcagaccatttatgaaactgcgg

SEQ ID NO: 156347 - DNA, 100 bp, Homo sapiens
taagagaccatgtaaagtaaaaactattcaccttctcacctctctggatgaagtacatcaggaacgtctctatcaagaatacaatttcagcaaggctgag

SEQ ID NO: 156348 - DNA, 98 bp, Homo sapiens
cttgcagatgcttcgggagaacctggaggaggaggccatcatcatgaaggacgtgcccgactggaagtggtggacttgctttgtgaagagacagttca

SEQ ID NO: 156349 - DNA, 100 bp, Homo sapiens
ccctacaaaaggcaaagtttgatgtatcaggacctttgtgctgctcctgcaaatggtggaaatgtctccaggcctccagtgaccctgcgccttgtcatcc

SEQ ID NO: 156350 - DNA, 98 bp, Homo sapiens
gatcagtgatccttcacgttgggagctctgccagtgccggccgggagaaggcaattgctcctgctgtaaggagtgcatgctgtgtcttggggcccttt

SEQ ID NO: 156351 - DNA, 74 bp, Homo sapiens
ccggttccccggcccacagtgggggtgtgcaaacccgagagaactggtgaaaatgcctcgtgtaaaagcagctc

SEQ ID NO: 156352 - DNA, 91 bp, Homo sapiens
aggaggggaggaggaggaggattcagggaataggagctggggagcccttctgcgccacaggaccaagaatcgccttcagccctgtctggtg

SEQ ID NO: 156353 - DNA, 49 bp, Homo sapiens
tggtgatattgtagaaattgctgctggttttccaagaattgatataaag

SEQ ID NO: 156354 - DNA, 82 bp, Homo sapiens
agtgccctcctgctacagatctgtctcttccttacaatgcagcccctgtcaaagggaacaggaagcagtccacggagggtga

SEQ ID NO: 156355 - DNA, 100 bp, Homo sapiens
tactatattgaatacgctgcagaacatttctgaaggattggtcgtgtaccccaaacaccccgagcagaaggcagaccggtattttgtgttatacaaaccg

SEQ ID NO: 156356 - DNA, 100 bp, Homo sapiens
ccgtgtggcacgacacaaaaatcagtaatcagttcaagaagttccctcagatgacctcatatcaccggatgctattacaccgggtagctgcctattttgg

SEQ ID NO: 156357 - DNA, 100 bp, Homo sapiens
cttggaacagtttatagagaacttcagaaactttcaaagtttgatgagcagagaactgctacttatgtccgtggttcagaccctgtattaaagcttttgg

SEQ ID NO: 156358 - DNA, 82 bp, Homo sapiens
gtctggagtgcgtgggggaccggctgttggcggggctgaagaagatgcagagcagcctgaagctggtggactgtatcatcga

SEQ ID NO: 156359 - DNA, 82 bp, Homo sapiens
tgggagagaacctcatcaatttccacatttcttccaagttctcttgccctgagacgagacccactgctaaggagttattgaa

SEQ ID NO: 156360 - DNA, 75 bp, Homo sapiens
ttctggggtgtttctcctcctttcctccctcccagatcttctcacgtactatactggcaattgctggagaagatt

SEQ ID NO: 156361 - DNA, 90 bp, Homo sapiens
cacatgcagagctacaagggcaatgaccctcttggtgaatgggaaagtcatgatgctatggactcctactacgactacatatgggatgtt

SEQ ID NO: 156362 - DNA, 101 bp, Homo sapiens
caaaggcaggggaggaagccacctcgagcatttgacattgtgcagcaaagaaatggttatggagaagcccagtccgctgcttgtagggcgggagtttgtga

SEQ ID NO: 156363 - DNA, 75 bp, Homo sapiens
cgcgataatattattgacctcttcctttatcagccacagccttgcaattgccagtgccctaatagatatttcaca

SEQ ID NO: 156364 - DNA, 75 bp, Homo sapiens
aggaacggaaacaaagttattttgctcgaacccttaggagaaatcttgagagtggacagcaattgtgaagatcgc

SEQ ID NO: 156365 - DNA, 98 bp, Homo sapiens
gggaactccaacatatgatgaaaaccccatgaagatgaagtggccattctgcctgcccctcagaacctctctgtactctcaaccaacatgaagcatct

SEQ ID NO: 156366 - DNA, 100 bp, Homo sapiens
ttctctttgtggccagatgggtttgtatggacaggcttgtccatctgtaacttcattaagaagccaagtacaagaagctggagaagcgatgagaaactta

SEQ ID NO: 156367 - DNA, 101 bp, Homo sapiens
cagaaagttgagcgcattgcatcacatgattttgaccccacagggctaccctgagaggaatctacatgcagagaagttcaggagactgaactaacggaacg

SEQ ID NO: 156368 - DNA, 107 bp, Homo sapiens
acatgtcatgcctgggtgcagcttctctagctggccttgctgttggttggtttgacttccacaaatgcagaagtaagaggatttatagatcagaatctcagtccaac

SEQ ID NO: 156369 - DNA, 96 bp, Homo sapiens
ggagaggacagaggtgcctggggcaacctccaccttgacggttccaggtgaaattgatcttcaaattctctccaaagttcaggctcaatacccagg

SEQ ID NO: 156370 - DNA, 75 bp, Homo sapiens
gttggctgcagatttgtggtgcgttctgagccgtctgtcctgcgccaagaatacttcagagagtcagagttgtgc

SEQ ID NO: 156371 - DNA, 100 bp, Homo sapiens
cagatgatccacaggatgctgtagtagcaaatcaggctcgaaaggacacagaagcgggagaaacgttttcatctgtccaagccaatttaagtaaagcaga

SEQ ID NO: 156372 - DNA, 75 bp, Homo sapiens
gccgtcccgtccgacagccaggcccgggagaagacgcgccagcggagctccggctccttcgccctggacgcggag

SEQ ID NO: 156373 - DNA, 88 bp, Homo sapiens
aagattggaaggggacttgattattttaagaaaccacaggatacatgatcccttaattcaggctcaggctgaagaactgacccactta

SEQ ID NO: 156374 - DNA, 75 bp, Homo sapiens
aggaaaatcctacctgatgaacaagctagctgggaagaataaggttgtggtcagaaatgagaagacatgaaatgt

SEQ ID NO: 156375 - DNA, 90 bp, Homo sapiens
ccaacgcagacaccatgaaggtgctgggagtgcagcggcctctcctacaggcctactttccccactcccaaacaatgatacatcttctcc

SEQ ID NO: 156376 - DNA, 82 bp, Homo sapiens
attgactacggcaaagtggccactcagtaagactttgaccccgacgcaggcttcagtgattgccgcggatcagaagcctgag

SEQ ID NO: 156377 - DNA, 75 bp, Homo sapiens
ctgggggctctactcatagtggcacaaccttttagaggtgggatgatgacgttgtcttcaagaactgtgcaaaag

SEQ ID NO: 156378 - DNA, 98 bp, Homo sapiens
tgcagggtcccgggactggtagagacactgcggaggtttcgagctggctgcgtcctggtgttgagcaggaacttcgtgcagtacgcctgcttcgggct

SEQ ID NO: 156379 - DNA, 113 bp, Homo sapiens
tggagggattctggcatcagggaggctttcagccggagaagcgagtttcagctgttgatattcactgatggactccaaagaatcattaactcctggtagagaagaaaacccca

SEQ ID NO: 156380 - DNA, 76 bp, Homo sapiens
agcgaaccgggggagcgaggcacgagaatggatcttggagaatgtctgaaagtccatgacctggctttaagagcgg

SEQ ID NO: 156381 - DNA, 75 bp, Homo sapiens
attccaagtaactcttatttgggggtcctgatgacaacttaattgaaggtggaggaacaaaatttgtctgcaaac

SEQ ID NO: 156382 - DNA, 82 bp, Homo sapiens
gtcaggaccgcgacggcagcagagcagatttttgtccctgagtcatggaagacagaagagctgaaaagtcatgtgaacaagc

SEQ ID NO: 156383 - DNA, 74 bp, Homo sapiens
gcaaggagctaaagcagcgtgcgttcagccctgggaagcacgaggtcccagcaaagtctgatgtttactgtgag

SEQ ID NO: 156384 - DNA, 100 bp, Homo sapiens
gttattttgctgcaatgctgagtggctgttgggctgaaagctcccaagagtacgttactcttcaagggacacaatgtaggaagtcttttccacatggcag

SEQ ID NO: 156385 - DNA, 100 bp, Homo sapiens
agcgcgtggtgggggaactgctggggaaggcgattggcatcgatctctccatcccttccgaggcccgacttcggagatctattgggaaactgattataac

SEQ ID NO: 156386 - DNA, 108 bp, Homo sapiens
caggcctgcgtccgagtctccgccgctgcgggcccgctccgacgcggaaggacatggatttgattgacatactttggaggcaagatatagatcttggagtaagtcgag

SEQ ID NO: 156387 - DNA, 100 bp, Homo sapiens
tgctccatgctgtggctccatactggaataatggagcagagacttcttggcagaatgtgacagtgatgataacatgggtgccaaaaatacttcaatagga

SEQ ID NO: 156388 - DNA, 100 bp, Homo sapiens
ggatctgaaagaaacccttaggctgagaatactttctgaggacatagagatgccactgccgccaggagccctgtaacatcagccatcgtcaaccccaccg

SEQ ID NO: 156389 - DNA, 74 bp, Homo sapiens
cagcagctttggtccggcaacttcaacaacagctctctagcaagtagcctgcagtatgaaatgctgctgctgac

SEQ ID NO: 156390 - DNA, 90 bp, Homo sapiens
gaagcacactgtgtagaatttctcaccaaacatcttagggcagataatgcctttatgttacttactcagaagttatagaccttactcatg

SEQ ID NO: 156391 - DNA, 75 bp, Homo sapiens
tgtgacgctgctggaggaaacacctcaggacacggcctacaacaccaagagagggagaccaagacatcattgttt

SEQ ID NO: 156392 - DNA, 100 bp, Homo sapiens
atcatggcggatggccccaggtgtaagcgcagaaagcaggcgaacccgcggcgcaataacgcgtttagtcacatcaagaaatagaacagaattcagccat

SEQ ID NO: 156393 - DNA, 99 bp, Homo sapiens
ttggaggtcagaagcagaggcatctgtaaagtcatgtgtccatgaggaacatacaagaggaatctttgtctgaagtggaagaaaaatacaagaaagcca

SEQ ID NO: 156394 - DNA, 74 bp, Homo sapiens
cctctgggacagcccctgccttctaccaggaaatgattgaagccatccgcgaagcggtggtctacctggcacac

SEQ ID NO: 156395 - DNA, 100 bp, Homo sapiens
cggcgcaatgtgcaaaagaaggtggcactggccaagaagctcctggcaaaactgcgctttctggctgaggagggcttcgtgctgtgtcactccatcgctg

SEQ ID NO: 156396 - DNA, 83 bp, Homo sapiens
ctgaagatggcggctgctgtaggacggttgctccgagcgtcggtcaaaatgcagatcttcgtgaaaacccttaccggcaagac

SEQ ID NO: 156397 - DNA, 75 bp, Homo sapiens
tatctgtcttcggtggactccttcggcagtccacccaccgccgccgcctcccagaggcagaagaggcctggacct

SEQ ID NO: 156398 - DNA, 80 bp, Homo sapiens
ccttccaaggtgccagctctggaacgaaagatgcccttgggaggtgatgacactcaggctggagtgcaatggcacgatct

SEQ ID NO: 156399 - DNA, 100 bp, Homo sapiens
ctcgggcaggccttccgagaggaacctctatgccgacatcgacgccgcctggcaggccctgcgcaccagttggaatcgaagcctcttaaaatggcagatg

SEQ ID NO: 156400 - DNA, 75 bp, Homo sapiens
ttcctgtacagcctgcagaactggggggccctcagcctcttggccttgaacgggctgttcatcttgattcacaaa

SEQ ID NO: 156401 - DNA, 100 bp, Homo sapiens
tggcggtggaagaggaagattcccaggctgaggattcagtggattttcaagacacgaatgctcggagtctggcagaaaggaagagagaagaggagaagca

SEQ ID NO: 156402 - DNA, 100 bp, Homo sapiens
gaaaggagagcccgtcattagcgtgaaaaccacaagcaggtccaaagagagagtagctgcaatcaacccaaatcaccctcttgctcagatgcctttgcct

SEQ ID NO: 156403 - DNA, 100 bp, Homo sapiens
ttcccgtctcagaggcaaactgctctgggcgtggggaggctgagacacgggagtgcatctactacaacgccaactgggagctggagcgcaccaaccagag

SEQ ID NO: 156404 - DNA, 98 bp, Homo sapiens
attatccatggcccaatttgtgctgctttactgggccgttgctccagggagaactgcaaatatcttcatccacccccacatttaaaaacgcagttgga

SEQ ID NO: 156405 - DNA, 75 bp, Homo sapiens
cgggtgctgtgcaagcggtgcggtgctgtacttctttgcagtatacaaggactagcagttaatattgacccaatc

SEQ ID NO: 156406 - DNA, 98 bp, Homo sapiens
gaagagacgaagagacagctggatgaagcatttataagacgctgtttggcatatcgaaaagaagatcgatttgatgtgcaccagctggcaaatgaccc

SEQ ID NO: 156407 - DNA, 98 bp, Homo sapiens
ccacctctctggacacagccgtctgcaggccaaaaagcaaatggatttccacctgacaaatcttcgggatccaagaagcagaaacaatatcagcggat

SEQ ID NO: 156408 - DNA, 100 bp, Homo sapiens
cggcagcagcccgacgcaaaccaaggatctggggatcttcgcactatcccaagtattaaaggtggaagaaggtccatatctttttctgtgggtgcttcaa

SEQ ID NO: 156409 - DNA, 90 bp, Homo sapiens
gccaatgtttgaggagaaggccagcagtccttcagggaagatgggaggcgaggagaagccggactggctggacaatggcccagaacaagc

SEQ ID NO: 156410 - DNA, 75 bp, Homo sapiens
cgccactgtaacgggaagctgggcagctacaaaatcaatggccggacgaaaaccgagacaacacttggactcagt

SEQ ID NO: 156411 - DNA, 75 bp, Homo sapiens
agaggctgaggaggaggagctggagataccccctcagtaccaaggtagcaccatctggctggaggggggcacccc

SEQ ID NO: 156412 - DNA, 58 bp, Homo sapiens
ctcggattttgataatgaagaagccatggcaatgacaggctcaacaccttgctcatcc

SEQ ID NO: 156413 - DNA, 97 bp, Homo sapiens
gctccgtggccttagctgtgctcgcgctactctctctttctggcctggaggctatccagccctgacatttaccccggtaactgctgggcatttaaag

SEQ ID NO: 156414 - DNA, 101 bp, Homo sapiens
ctcattatggtcgtggagtgctgattgattcacagtagataaagctggcagtaagaaatgctaagacactcttgcactcctgtaatgagcctggcactgtg

SEQ ID NO: 156415 - DNA, 76 bp, Homo sapiens
tatgccactgtggaggaggtggatgcagctatgaatgcaaggagaagaaggaagttgtggaagaggcagaaaatgg

SEQ ID NO: 156416 - DNA, 75 bp, Homo sapiens
tacagtcatagcagtacccgagatggaagacgcgacaggtatattgagatcttcagaagtagcaggagtgaaatc

SEQ ID NO: 156417 - DNA, 74 bp, Homo sapiens
agcgacaagccgctggcagccgcggatctcaccgccgctcaggagatgtggtatggtgtattcctgtgggcact

SEQ ID NO: 156418 - DNA, 88 bp, Homo sapiens
tcatggtatatttgcagccagtactctatatgaacaatccgtctggatcacggatgtaggaagtgggactttgaacatgtcggggatc

SEQ ID NO: 156419 - DNA, 50 bp, Homo sapiens
gaggaaacctggtctcccggagccagagtcttgctctgtcgcacaggctg

SEQ ID NO: 156420 - DNA, 98 bp, Homo sapiens
ccgtgtggcgctgattggatttccctctgtgggtaagaacctggggtctctgttctccatccgtgttgtgggactctctgtggcctgcagctatttgt

SEQ ID NO: 156421 - DNA, 98 bp, Homo sapiens
aaaccgcctcgaaaacggagaagcagaaagtgaagtcactgcttttgctgtcttggatcaagaccagaaagaaattattgataccaatggagctggag

SEQ ID NO: 156422 - DNA, 80 bp, Homo sapiens
aagactccaggacacccctgaagccgagaaatgaacccttaggagaaatcttgagagtggacagcaattgtgaagatcgc

SEQ ID NO: 156423 - DNA, 75 bp, Homo sapiens
atgataaaatttcatggagaagaaggccttgactacggaggggttgccaggtggaatgaatcttacttgttgaat

SEQ ID NO: 156424 - DNA, 71 bp, Homo sapiens
gaaggataagtcgaaggggaaggcgcctgaagaggacgaaggtattatccatgcagcagaagagaaggact

SEQ ID NO: 156425 - DNA, 51 bp, Homo sapiens
agcctctgcccaaagaaagaaggagtcaggatggctaaaggtgaccccaag

SEQ ID NO: 156426 - DNA, 75 bp, Homo sapiens
caggactcaccccaagggctacaccgagtacaaagtaaccgcgcaggtcttgggcgtctttggtactggcttttt

SEQ ID NO: 156427 - DNA, 83 bp, Homo sapiens
cgaagctgccatcagtaagctatactccaccatccggccctacctagagaaaaggttgaaagctgctgaagcagacagcaaac

SEQ ID NO: 156428 - DNA, 100 bp, Homo sapiens
cggcccggcggctgctgctgctgctgacgctgctgctgcccggcctcgggtttttgaagagccggaagatccaagcaacagatcatttttctctgaaatt

SEQ ID NO: 156429 - DNA, 85 bp, Homo sapiens
aaacaaaagattgagctgcactgtattccttatgccgagattttgctgtcctggaggaccacaccctggctcacagcctgcagga

SEQ ID NO: 156430 - DNA, 90 bp, Homo sapiens
atcaaattgcatctctacttgtgaacagattaaggataaatatatgcaggagcttcctccagctgggcgccggcctgagcgtgggcctga

SEQ ID NO: 156431 - DNA, 51 bp, Homo sapiens
attccaagtaactcttatttggtactgctcacatgatagaggctgatgtcc

SEQ ID NO: 156432 - DNA, 75 bp, Homo sapiens
caccatgaacgaggagtacgagacgaggttcctgtgcaactcttcacaggattgacttctaaagactcttggtac

SEQ ID NO: 156433 - DNA, 82 bp, Homo sapiens
aggagcggccgggagcccgccgcgctggtagcgggctgtgcctgcgcccagaagcagctacacttcatggaccagttgctcg

SEQ ID NO: 156434 - DNA, 98 bp, Homo sapiens
caattcctggagaaggagagcagtctgactgagccgatcgggcccgggacacccagacagatgagattgtcgcactgaagaaggtgcggatggacaag

SEQ ID NO: 156435 - DNA, 100 bp, Homo sapiens
ggtcgagcagaacgtgtagccgcgtcccctccagtccgctccgggcagccttgccaacattccactaacccccgagactcagcgggaccaggagcggcgg

SEQ ID NO: 156436 - DNA, 75 bp, Homo sapiens
gtgagagaaaggctggaagacgagagttcacatgagactctgaatatagtggaggagaagaagcgggcagaggtt

SEQ ID NO: 156437 - DNA, 51 bp, Homo sapiens
ggactgtgggctggtgtgtggaactggtgggcagaaacagcggattgcgat

SEQ ID NO: 156438 - DNA, 83 bp, Homo sapiens
cttggcgctggccggctacatcgagacaatgcagatcttcgtgaagactctgactggtaagaccatcaccctcgaggttgagc

SEQ ID NO: 156439 - DNA, 100 bp, Homo sapiens
ctcggacgggcaagccctggtcctgggcaggggacccctgacccaggttacggaccggaagtgctccagaactcaagccgctgccatggcccagacactg

SEQ ID NO: 156440 - DNA, 82 bp, Homo sapiens
gctcagcaccgccaggcctggatgggccccatctgccagctggccttcccgcctttgaagtaaattttatggatgatgtagg

SEQ ID NO: 156441 - DNA, 87 bp, Homo sapiens
ctcgcctagaagaactggccaagaaacactgtggggagaatgagagggagaaacttcaaataaagatagatgagatggataaaatac

SEQ ID NO: 156442 - DNA, 90 bp, Homo sapiens
ttcatgtgttcctgtagctctgatgagtgcaatgacaacatcatcttctcagaagatgtgcactgggaactacacctttgttccttacat

SEQ ID NO: 156443 - DNA, 100 bp, Homo sapiens
gtcactgcctgcgcagctccggccgcctggctccccatactagtcgccggtcctcttcctgatggatgggaacaagccatgactcaggatggagaaattt

SEQ ID NO: 156444 - DNA, 83 bp, Homo sapiens
cctatgaccagcaagaggatggggccctggatgagggggaagggcctcaaagccagaaggtaaatgagctggatggtatcccg

SEQ ID NO: 156445 - DNA, 100 bp, Homo sapiens
ctgaagaagcagttctacaaggcgagccaggtcatcgaggctgaacttcggtccaccaagcactgggagcttactgcggagggcgaggagattgcccggg

SEQ ID NO: 156446 - DNA, 100 bp, Homo sapiens
cgcgcacgttggaaccgaagagagctctgttgttgcatgcctccatatctgggacctggatgtgcgtggcaaccatcggggcctgtggagattgtttcgg

SEQ ID NO: 156447 - DNA, 97 bp, Homo sapiens
ctttaaaacagatctgcgcttccagagcgcagctatcggtgctttgcaggttggatggcaagcatgtggtgtttggcaaagtgaaagaaggcatgaa

SEQ ID NO: 156448 - DNA, 98 bp, Homo sapiens
ctggaacagccagaattggacccgaaaccatgcctcactgtcctaggcaagtggaatgcagtagccctctgggcctgggatattgtggttgataactg

SEQ ID NO: 156449 - DNA, 82 bp, Homo sapiens
ctcgatcttgggacccaccgctgccctcagctccgagtccagggcgaggttagcatggcctcattgaaagaactagatcaaa

SEQ ID NO: 156450 - DNA, 100 bp, Homo sapiens
agatggcggagcgcgggtacagcttttcgctgactacattcagatgtgggcgctatctccaactgtctttgcacttctgagtaagaatctgatgattgtg

SEQ ID NO: 156451 - DNA, 100 bp, Homo sapiens
tggatcttcacccaggaggccccggaggaggggaccgggggcttcggtgcagaccatgaattacgtggggcagttagccggccaggtgtttgtcaccgtg

SEQ ID NO: 156452 - DNA, 100 bp, Homo sapiens
ccgtggcctgtaccctgtgtggcctcgtggatggagtcattgggcgaagctgggccatgctgtttgccagtggaggcttccaggtgaaactctatgacat

SEQ ID NO: 156453 - DNA, 108 bp, Homo sapiens
aagaaatgatggaaggagaaacaaacttcagctctgaaatagaagatcttgcaaggattgtccgtgtggagcccttggtgaccatgggccaggtgactgccctgctga

SEQ ID NO: 156454 - DNA, 124 bp, Homo sapiens
agaacagcctgaagaagggctccctcgtgaagaacctgaaggacacactaggaaggcgtggaagtgcgagtggccagaatcttcaacacctttgggccacgcatgcacatgaacgatgggcgag

SEQ ID NO: 156455 - DNA, 82 bp, Homo sapiens
gcccgcgccggaagagccacgccggaacccaagacagaccaggatgaggagcattgccggaaagtcaacgagtatctgaaca

SEQ ID NO: 156456 - DNA, 50 bp, Homo sapiens
tgactgataccactataatttagtgatggcacatttcctagaggcagaat

SEQ ID NO: 156457 - DNA, 75 bp, Homo sapiens
ctagttcagaggagagtagatccgagatatatgaggagaaggcagagcccccccaggctatgaatgccctgatgc

SEQ ID NO: 156458 - DNA, 100 bp, Homo sapiens
ggagatctaccgctacagccgcagcctggaggagctgctgctcgacgccaaccagctgcgcgagctgcccaagacgctgacagaggcaaaaatctgctaa

SEQ ID NO: 156459 - DNA, 75 bp, Homo sapiens
ttcgcagtggtcgcttcttctccttggcatttgcctggtggcctgatttattggctgaacatgcagagaaatttt

SEQ ID NO: 156460 - DNA, 100 bp, Homo sapiens
gagcgagaatcagagagtggaggccggatcccagacagcctgaagaactgtgtcaacaaggaccatctgacagccgccacccactgggccagcatggacc

SEQ ID NO: 156461 - DNA, 50 bp, Homo sapiens
ggcaaagttattgccagcttcctgtggtcatatgcattagaaaaacccaa

SEQ ID NO: 156462 - DNA, 100 bp, Homo sapiens
ttcggccatctttgctcctccctgcaactaactccattcttaattggtcagtaggcatccagcgctggggcagctgcttcaggacatcgccgaggacaag

SEQ ID NO: 156463 - DNA, 88 bp, Homo sapiens
tgcacttcaaaatggttaagatgaccagcattctcgaaattggaggactcctttgaggccctctccctgtacctgggggagctgggca

SEQ ID NO: 156464 - DNA, 100 bp, Homo sapiens
ctctttccccgtcagcatcccagccgtgctcacgacgaaaaccactattgctctgttgtatgatgaagagtccgaaaatgcctatgacatccggctgaag

SEQ ID NO: 156465 - DNA, 100 bp, Homo sapiens
ggaagcgccgcgatgttcgccccccggctgctggatttccagaagacgaaatacgcgagctcttttgaaacagatggtcaccatgtttagatattagcag

SEQ ID NO: 156466 - DNA, 100 bp, Homo sapiens
cggccatggacctggcggatccggcctgccctggcccagctcaacacctgatttcggaatgtttacccttgcggaagttgcatcacttaatgacattcag

SEQ ID NO: 156467 - DNA, 100 bp, Homo sapiens
atctattatcgtttcaacacgcgcctgattgaggaagagaacatgctggcaccatctctgaagcagttttccctacgagtggagattttgccatcctaca

SEQ ID NO: 156468 - DNA, 83 bp, Homo sapiens
tggaaaggaatgaggagttacagagggccgagaaggacaggatcagagctagagccggtgcaggccacgcagaacaagacagg

SEQ ID NO: 156469 - DNA, 76 bp, Homo sapiens
caagccccgctccggccaacaaacacgatgaggcgagtggtacgacagagcaagtttcggcatgtatttgggcaag

SEQ ID NO: 156470 - DNA, 80 bp, Homo sapiens
cttcctgtcgctgacggcgactgcgggaggccaggtatgatgccgggcgggacggcttcatcgacctgatggagctaaaa

SEQ ID NO: 156471 - DNA, 100 bp, Homo sapiens
tctaatctgctcagcatcactggattatgttataatgtggaacctggatgaatgtagagagaaagtacttcaagtgcagctgtctgcttcagaaagtgag

SEQ ID NO: 156472 - DNA, 90 bp, Homo sapiens
attcattctgtgggattcttgcatcgagacatcaaaccgtggattttgctctgaaggttctccagtggtctgactacgagatagtgcggc

SEQ ID NO: 156473 - DNA, 90 bp, Homo sapiens
ccggaggcggcggagggcaccccgggcgggcggcggctgctggggggccctcagcctcttggccttgaacgggctgttcatcttgattca

SEQ ID NO: 156474 - DNA, 101 bp, Homo sapiens
caagaagttttgaaagatggtttccacagaaatttttaagaactatggcgctgaaaagtatggacctcattccgtttgtctaattcagaaatcagcattcg

SEQ ID NO: 156475 - DNA, 96 bp, Homo sapiens
ggtccctctgagccccggggcatctatgccagtgagaggcccaagtccctagaaaccagcctggacaccaagtctgtgtcagaaggccacctcaag

SEQ ID NO: 156476 - DNA, 83 bp, Homo sapiens
ggcctactgcgaccagatcttccaggacgagacgggcaagaaccgagctccacgcaggagatcggtgaggagctgatcaacgg

SEQ ID NO: 156477 - DNA, 75 bp, Homo sapiens
aacctcaagtatacaattaaatgtaggtggcaagtgggagaaaccatcagaaattttggaaatcaaaggacagaa

SEQ ID NO: 156478 - DNA, 74 bp, Homo sapiens
cgctggatgcacacttttcctgtgggtgacagagctgaatgaacctctctccaatgaagatcgaaatctcctct

SEQ ID NO: 156479 - DNA, 100 bp, Homo sapiens
cccgctgctgcccgcccgctgcctgcctgcctggcatctctctctcccggaactgcaagcacatgttgaccagataactgaaatggcagcagtaatgagg

SEQ ID NO: 156480 - DNA, 98 bp, Homo sapiens
aatgttaacatggacatgatcttctttataattctactttgagtgctgtctccatgtttgatgtatctgagcaggtgttgaaattccgtaaacttaac

SEQ ID NO: 156481 - DNA, 98 bp, Homo sapiens
agcgatcacatcagggactccacggccagagccctggatgtcatttggaaaaacactagagacagacggctggcagacgcaaacatgcagatctttgt

SEQ ID NO: 156482 - DNA, 75 bp, Homo sapiens
aacatctatcaacagaagatcaaggaattgaatgatctggcacgggaccctccagcacagtgttcagcaggtcct

SEQ ID NO: 156483 - DNA, 75 bp, Homo sapiens
caactatgacgtgctggaaagcgatttggaaggagtgccaccctctaaaaagatgaaactggaggcctctcaaca

SEQ ID NO: 156484 - DNA, 74 bp, Homo sapiens
agtcagctgtgtgtccagaacgtgccatggagacgcttaacgtggaggccatagtggagtttgactaccaggcc

SEQ ID NO: 156485 - DNA, 100 bp, Homo sapiens
cgccgctgggcctgcaggtctctgtcgagcagcggacgccggtctctgttccgcaggatggctgaagccgacgtagcttctctgaacagacgcatccagc

SEQ ID NO: 156486 - DNA, 100 bp, Homo sapiens
agctgtggaaagaagttgcaaaacactggataccttcacttgctggatggaaatgaaaattacccgtgtcttgtggatgcagacggtgatgtgatttcct

SEQ ID NO: 156487 - DNA, 50 bp, Homo sapiens
ctcttcgatcgcttctttggacttggcggactctgtctacatcttccggg

SEQ ID NO: 156488 - DNA, 100 bp, Homo sapiens
gacggaagagagggccccgtcaaggttactagtattggaatctactgctccatcaggagacctcacccgcccacaccacattgcatcagttgttcccaac

SEQ ID NO: 156489 - DNA, 50 bp, Homo sapiens
caagccaatcccaggaggaaaaacggtaaaccccaaggatttggacccca

SEQ ID NO: 156490 - DNA, 100 bp, Homo sapiens
gtcgttcttgacgtcgtggcgagctagttagctccgcaaggacccggacgcgaccaggggaggcagaagccctgccctgcttggatagaggcctccgaac

SEQ ID NO: 156491 - DNA, 96 bp, Homo sapiens
atacaccttttccacagggaattgagttgagataattgacgaccttgccaacctagtggagaacacagatgaaaaacttcgcaatgaaaccaggcg

SEQ ID NO: 156492 - DNA, 89 bp, Homo sapiens
aactcgcccggccgggagccgccgcgggcaggacgcgcgctgcagtttaaggaagaaatctctaaacgttttaaatcacatactgacca

SEQ ID NO: 156493 - DNA, 75 bp, Homo sapiens
caagaaagctaagcattgatatttgctgctcacggccgtgaactgctacagcgtgaaggccgccacccgggtcca

SEQ ID NO: 156494 - DNA, 98 bp, Homo sapiens
ggtctgcggcactgatgggctcacatatacgaatgaatgccagctctgcttggcccggatgttgatgctatgaaactgggagtaaaggaaatgaagaa

SEQ ID NO: 156495 - DNA, 75 bp, Homo sapiens
gccagctggagagcagcttcgcggagcgactggagagccagagttacgctacaggcaggaccacaggggtggtgc

SEQ ID NO: 156496 - DNA, 98 bp, Homo sapiens
ccgacagccaggcccgggagaaatcctggccaatgtgatcattttcatctgtgggaacctggcgggagcctaccataagcacctcatggaactcgctc

SEQ ID NO: 156497 - DNA, 100 bp, Homo sapiens
ggacgtcacatgtcattataccttcacccagcatttcatccctcgtcgaaaggattggattggcatctttagagtgaagattgtccccagtggatggtcc

SEQ ID NO: 156498 - DNA, 75 bp, Homo sapiens
tgcaacctcaggcttcagccaattttcagctgaactctcatctctcaacactggcaaatattcataagatctacc

SEQ ID NO: 156499 - DNA, 100 bp, Homo sapiens
ggacgcggaactggtgtaccctggtggacgtgcacccagaggaccaggcggcggaggcagttccctccatccccatcagccccgaagatcccctcctggc

SEQ ID NO: 156500 - DNA, 90 bp, Homo sapiens
cttgaatttgcccaaaggaatgaagagcaccagaaatggcaaatgtgtgggaggaggtgcgccagtctgtaactcctgccgagccagtcc

SEQ ID NO: 156501 - DNA, 75 bp, Homo sapiens
atggtctttgatgcgaagttactcaggatttaaaaactggaacggtgaaggtgacagcagtcggttggagcgagc

SEQ ID NO: 156502 - DNA, 82 bp, Homo sapiens
ctcagagagggaagagattcagccagcacactcctcgcgagcaagctgtttttggaaggaagaaagatggaaagcggtgcag

SEQ ID NO: 156503 - DNA, 75 bp, Homo sapiens
acatgaccagcttagcttctgtcctaaaggccttgtctggttttagacagattcatgttatagatatggacacta

SEQ ID NO: 156504 - DNA, 50 bp, Homo sapiens
gaacaacctgtcttggagcgcttgcagatctctggaaacaccaagtcatg

SEQ ID NO: 156505 - DNA, 100 bp, Homo sapiens
caacatcccattcagcagggtgaaccacagcaagttcatggtcacggagaaggcagcctacatagggcggcgactggcggcgcgatggacctgaccgggc

SEQ ID NO: 156506 - DNA, 87 bp, Homo sapiens
ggcactggaaaaatatggcaaagacttcaatgacatacggcaagattttgtgcgaaattcatccacacttctctttagtgccttgat

SEQ ID NO: 156507 - DNA, 75 bp, Homo sapiens
caatattaaaactttacctgggaatggattatctccattgcacatggccacacaaggggatcatttaaactgcgt

SEQ ID NO: 156508 - DNA, 98 bp, Homo sapiens
acagagttgttgttcagcagaaataatcaagagttgacatcataccagggtcatgatcagagttcgactcttgcccaacactctgttgaactgacttt

SEQ ID NO: 156509 - DNA, 106 bp, Homo sapiens
agagattaaagatgcagtacgccacggggccgctgctcaagttccagatttggacctgctgaagttcccatgatgtcacccaatggatccattcctcccattcatg

SEQ ID NO: 156510 - DNA, 50 bp, Homo sapiens
gctgggtccgctgagcggggcgacccgagaaaacaaccctttttgctgca

SEQ ID NO: 156511 - DNA, 83 bp, Homo sapiens
aaatcttccaagtccaaggatgtgatcgcagtatgtggtagggaagtgatgctgtctgaaggtgacatcctgttctcctctct

SEQ ID NO: 156512 - DNA, 100 bp, Homo sapiens
atttaagctactcaagaaagagtgcccaattccaaatgtacagggtgtccgcaatgttgccagtgtctgtctgcagattggctacccaactgttgcatca

SEQ ID NO: 156513 - DNA, 100 bp, Homo sapiens
aaagccagagactggaccaagcagacagtgggggcaacaggacacagcacaggtgaattatgtaacctcattacgctggatgtagctcacaatcaacttg

SEQ ID NO: 156514 - DNA, 75 bp, Homo sapiens
ttaacttgttgacattacttttatttgaaggaacgtatattagagcctccacctcctggatgccctcccaatgct

SEQ ID NO: 156515 - DNA, 101 bp, Homo sapiens
caacttctgctacagacgactcacaacacagtcactcctggcggcaaaccaaacaaaaccagagtcatctggggaaaagtaactcgggcccatggaaacag

SEQ ID NO: 156516 - DNA, 75 bp, Homo sapiens
aacggcgcttgaaggaagccgagatagtcgcagaggaccagttttgtggccaccaagggaatgacatgtacgatg

SEQ ID NO: 156517 - DNA, 100 bp, Homo sapiens
cgctactctctctttctggcctggaggctatccagcatgaaggtcaccgtgtccaaagggggcgaccgggacagtgacgacgacagcgtcctcgaagcca

SEQ ID NO: 156518 - DNA, 100 bp, Homo sapiens
ctagtgggggttggcttgcccatttcctctaaacgagaggtgaataccgttttggcagatgtcatcaagcacatgactccagatcgtgcatttgaagatt

SEQ ID NO: 156519 - DNA, 101 bp, Homo sapiens
tctacctccgcacggtgccatgtggcttcccacacttctgactcggacgttccttccggtgtcactgaggtggtcgtgaagctctttgactctgatcccat

SEQ ID NO: 156520 - DNA, 97 bp, Homo sapiens
ccatcgagctggagaagctggccaagaagcaagtggctatcatagaaaaggagacgccctgctggcggacttggagtctaccacctcccacatctcc

SEQ ID NO: 156521 - DNA, 87 bp, Homo sapiens
ccagatggagaaaaagatccagattttaatcaagtacaagaatattccacagatgtcctttgatgatacagaaagggagccagatca

SEQ ID NO: 156522 - DNA, 100 bp, Homo sapiens
gccacctccgggcgcagaggcctacatcccacagagatacccagacaacaggatcgtctcgtccaagagagaggatgcaagccatggagaaacagattgc

SEQ ID NO: 156523 - DNA, 98 bp, Homo sapiens
ctggtccgcagcggcaacagtaacgaaaaacagggctaacactgatatttgcatttaatggggaacaaaagatgaagaaggaaaaggaatatattcac

SEQ ID NO: 156524 - DNA, 78 bp, Homo sapiens
aggtttcggcacatggagattgatggtgagcatggacaatcttgtgccaaaatgcttgtgaatcgagcattgggccgc

SEQ ID NO: 156525 - DNA, 75 bp, Homo sapiens
tccttggcctctcctgggatcggcccaaggccagttctccgcagcggtttccaacctagatgaggaaagccgatg

SEQ ID NO: 156526 - DNA, 100 bp, Homo sapiens
tggttcatatacttacatcagttgttgcatctatcatttcccgtaaaaaagaagccaaagctgaggaacttcaggaggccaaggagaagttagccagcct

SEQ ID NO: 156527 - DNA, 75 bp, Homo sapiens
gcaaacatagagaattctgggcttccacacaactccagtgctaactcaacagttcctccaactcctctgccaacc

SEQ ID NO: 156528 - DNA, 74 bp, Homo sapiens
ccatgtcccaggtgtatggagcgccacatctcctgagattatttgatatcccatattatccgagagattcgcca

SEQ ID NO: 156529 - DNA, 74 bp, Homo sapiens
gggaatttccgtcccccaccaagtccggatgctcactccaaagtctcagcagggccaattcctgtccccccagc

SEQ ID NO: 156530 - DNA, 82 bp, Homo sapiens
agctgagtggttgtgtggtcgcgtctcggaaaccggtagcgcttgcagcatggatcgaatcatcaatttagttgttggcagc

SEQ ID NO: 156531 - DNA, 90 bp, Homo sapiens
ttaaggaacagcgagctgtttgacccctttgacctcttcgatgtgcgagactttggaaaggaattgaatgatctggcacgggaccctcca

SEQ ID NO: 156532 - DNA, 74 bp, Homo sapiens
cagcggagcccacgagaggcagcgccatggcggagcagacctactcgtgatccagaggcaacagggacatggcc

SEQ ID NO: 156533 - DNA, 100 bp, Homo sapiens
ctcaggagtgggattgctggatcatatgcagaatcaaattggatatccccaaccttatggccagtggggccagtggtatggaaatgcacaacaaattggc

SEQ ID NO: 156534 - DNA, 118 bp, Homo sapiens
gaggagggctctgatccccccctgccggggagggcccagcgcatccgacaggaaacctgtaggaagtgtcagggactctggaaagaacataatggcctcacctgtgaagagctggctg

SEQ ID NO: 156535 - DNA, 100 bp, Homo sapiens
cactagtgtggctctcctgttccagcaattggtttaagctatgaagaaggacatccctcacactctgaaacagatctccttcagagacagagttttgcag

SEQ ID NO: 156536 - DNA, 100 bp, Homo sapiens
cgctgggagcgagcgcagcaaagcgcccagcctgccgcctcgctgtccctgcggcttctgggggtttcgaagtataaagcattccgcacgacgggggatg

SEQ ID NO: 156537 - DNA, 75 bp, Homo sapiens
acgccaggatttcctggaagcagagaaatgagaatatgaaactggtgtcaaaatgacatccagatttgggaaaac

SEQ ID NO: 156538 - DNA, 76 bp, Homo sapiens
tggccgtgggtctccgtgatgggtgaggtcccagcttgaagagaaagaaaacaagaagttccctgtgtttaaggcc

SEQ ID NO: 156539 - DNA, 75 bp, Homo sapiens
ggacgggagagtctgccggcggagaatataaggcaaacctgtcttcattaaagtccctgaggaccagactgggct

SEQ ID NO: 156540 - DNA, 75 bp, Homo sapiens
acagcatcctcctcttgacccacggctcaccaaaaactatcagaggactcctgaaacctggagagctacctgctg

SEQ ID NO: 156541 - DNA, 98 bp, Homo sapiens
tggtggttttggcccctttgctgcaaagtggccagccctccagatctctatattgaaagatttaatatagctcttggacaatatatgggagcattgca

SEQ ID NO: 156542 - DNA, 83 bp, Homo sapiens
ccctcagggcatccccgttttcggcctgtgatacttgggctgtgatcctctagagccagcttggactcacatcattctatggg

SEQ ID NO: 156543 - DNA, 96 bp, Homo sapiens
tgaggaaatcgcctcccgagaagaagttgaggcgctatgtgtgagttcttgatacgaatgaaaggccaagagtttgttgatgagattcaaggtaga

SEQ ID NO: 156544 - DNA, 100 bp, Homo sapiens
gcggtacatcgcctcggtgcagggctccaccccgtcgcctcgacagcagcatgatgcagaagttgaacacttaaccgaagttcttaaggaaaagaataaa

SEQ ID NO: 156545 - DNA, 100 bp, Homo sapiens
ccaggtccggcgacagggtctacaagaacgagtgcgccttctcctacgactctcccggccgttgctccagggagaactgcaaatatcttcatccaccccc

SEQ ID NO: 156546 - DNA, 83 bp, Homo sapiens
agctacttggagattcatggcgtcgtttgcagcaagtcagctcagtatgaaggctatgaagtagagtcatctttaaaggatgc

SEQ ID NO: 156547 - DNA, 98 bp, Homo sapiens
tcaatcaaggttataagaaaggtgcagaagtcattttaaactatggacgactccgaggaacattgaggacttggatgttgtgggtgatggtatgcagt

SEQ ID NO: 156548 - DNA, 80 bp, Homo sapiens
atacctgggcttcccttactacctgaagatcaactactcctgcgaggaaaaggagctggtgactgccctcatgtgtgatt

SEQ ID NO: 156549 - DNA, 80 bp, Homo sapiens
actccccagggcagaaatagcgaccatggcgaggattctgagaaacgaacccctcttcatgtggccgcatttctgggaga

SEQ ID NO: 156550 - DNA, 100 bp, Homo sapiens
cagccagcagcggccgcatcgtggtagcagacagcaacaaccagtgtattcagggcacccaggtatatgtcttcctgacaaagggaggctataccctagt

SEQ ID NO: 156551 - DNA, 90 bp, Homo sapiens
agcccagcaggccttccagtcagtaggtaccaagtgggatgtttcaacaaccaaagctcgagtgatggcaagattattttatcataaacc

SEQ ID NO: 156552 - DNA, 132 bp, Homo sapiens
ccttgtagataagcaactggattttttaactgaagatagtgcctttcagccctaccaggctattctcatggatcacaactgccctattaaaacaaaaatgtacactcagaataatatccagtcatatccgat

SEQ ID NO: 156553 - DNA, 80 bp, Homo sapiens
gagctgactgatacactccaagcgctggtaggtgagtgctgtcctcggctcactttcctcaagctctccggctgccacgg

SEQ ID NO: 156554 - DNA, 75 bp, Homo sapiens
gcaatccattccatgggttttattcacagaaattccaacagaatgggtttcctgaaacggatttgcaggaattcc

SEQ ID NO: 156555 - DNA, 75 bp, Homo sapiens
gggaggtgaatttccatgtcaacatagtccagatagggccagatttgagtgtgtgaatttttgagtgaaacctgg

SEQ ID NO: 156556 - DNA, 98 bp, Homo sapiens
tgaccgcggatcccagcttcctgcagccaggtttccacttcaagcgtgacccttttgcctgtgggatgagctccagcatggggtgaggtacagaagag

SEQ ID NO: 156557 - DNA, 83 bp, Homo sapiens
cccgcctcgcccgccgtgagcgcccggagcggtccgcgagccaccgaggcccagatcaggatcctcatgaccagccaaagaga

SEQ ID NO: 156558 - DNA, 51 bp, Homo sapiens
actgatgaggatcagcccatggaatgtcgttgtctgctgggtcttcccctc

SEQ ID NO: 156559 - DNA, 83 bp, Homo sapiens
gagggacacgcagtgacgagcggccgaagcagctttgcggttttaaaatcaaagatgggaaaatcggagaaaattgcccttcc

SEQ ID NO: 156560 - DNA, 100 bp, Homo sapiens
gacactttctcagttacagagagatgccagatatacgaaacccagaaggaactcagtacagttcccatcctcagatggcagccatgagaccaaggggcca

SEQ ID NO: 156561 - DNA, 100 bp, Homo sapiens
tctatggtgttgtgaagttctttaagcccccatatctaagcaaaggaactggtactaggttttgacaagcttgcatcatgcgtgagtataagctagtcgt

SEQ ID NO: 156562 - DNA, 100 bp, Homo sapiens
taccactattcctactcggtggtgaggggctgcgaccgcatcgtgcccgtggacatctacatcccagaccctacgtccgctccaagggccggaagttcga

SEQ ID NO: 156563 - DNA, 83 bp, Homo sapiens
caacgcgtttggcaacgctttcctcaacagatcaagaatgctgcagccaatgtccttcgggaaacatggttaatctataaaca

SEQ ID NO: 156564 - DNA, 98 bp, Homo sapiens
gcccccctcaacacggaccgcgcccgccgggcacacaagaatggtcactgtccttctggcactcctctggtggaccgcccccatcggccacacttgcc

SEQ ID NO: 156565 - DNA, 50 bp, Homo sapiens
tacagcaataatcgcttccttcagcgggagcagctggtggaagtgatgct

SEQ ID NO: 156566 - DNA, 75 bp, Homo sapiens
aacaatcttgaatcatgaagctactaaccagagccggctctttctcggagtctgagaatagtggggacagcggat

SEQ ID NO: 156567 - DNA, 100 bp, Homo sapiens
ctgcagcgaagcacctctttacgtcagatgtaccaacagtaccagcaacaggccggctatggtgcacagcagccgcaggctccacctcagcagcctcaac

SEQ ID NO: 156568 - DNA, 74 bp, Homo sapiens
gcggtttactcctcatgccgagatggaccttgggcagctcagttcacaagtgagtgtgtccgcttgaaaccaac

SEQ ID NO: 156569 - DNA, 108 bp, Homo sapiens
gaccgagaccgtgaccgagagcgtgaccgagagcgcgaatatcgtcatcgttagaagcggatctgaaaagaacaattgctgtccttctggatgacattttgcaacgat

SEQ ID NO: 156570 - DNA, 100 bp, Homo sapiens
ccggatatttaccaggtgtcctacttctcatttaagctactcaagaaagagtgcccaattccaaatgtacagatgtacctgtgtggtctaagctggaatc

SEQ ID NO: 156571 - DNA, 75 bp, Homo sapiens
ggaaatgtccaccactgtttctcatcatcaccaaacggatgtatgttgtgttcacagcgaaggtactcccttcag

SEQ ID NO: 156572 - DNA, 102 bp, Homo sapiens
taacaggaacatgaagccttgataaaacagcagttttacttttctcacaaaaacttgtaagtgtttcctgaggttataggcgggtgtttgaggagtacatgc

SEQ ID NO: 156573 - DNA, 75 bp, Homo sapiens
cagtcgcccgcaaccggggcgaatcatggcggccgccaaggaatcattaaccaatggcaacaggaatccaaggat

SEQ ID NO: 156574 - DNA, 112 bp, Homo sapiens
gagagaggcaccgggatcgtgaccgagaccgtgaccgagagcgtgaccgagagcgcgaatatcgtcatcgttagaagggtctcctatggacagaagtgcgggcaaggagctt

SEQ ID NO: 156575 - DNA, 75 bp, Homo sapiens
taggtatccgcactgctcaggggacctgctgaagttcccatgatgtcacccaatggatccattcctcccattcat

SEQ ID NO: 156576 - DNA, 96 bp, Homo sapiens
gtaggaagaggcactgctgagggggcgcgaggggaacggaggccagagctgcggagccccagtggcaccagtgacgggcagaggggacttgccatt

SEQ ID NO: 156577 - DNA, 83 bp, Homo sapiens
cagaccctcagcgctttcctcatgggattcgccagctagctaattatcacacaggtgaactccagaaagaagaagctatggcc

SEQ ID NO: 156578 - DNA, 100 bp, Homo sapiens
gccaatggtggagaagaaaacttcgggtcacaagctacctaactaagaagtttgctgaactacgcagccccaatgagttcaaggtgtacatgggccacgg

SEQ ID NO: 156579 - DNA, 75 bp, Homo sapiens
gtcccgcccaacgcccgactctactattgggaagaagttacctgcaactacagcaactccagactcatcaaaaac

SEQ ID NO: 156580 - DNA, 75 bp, Homo sapiens
gaggttcagagaggttaagagactccactgaggtcacacagccgatggtgagcaaaaatttgagggtaataggac

SEQ ID NO: 156581 - DNA, 87 bp, Homo sapiens
ccccgccgcgccgcgctccaaccgcctcctcctcctcagtaacgcgggaagtgcacggctgtctataacgtgctgccgggtctcagg

SEQ ID NO: 156582 - DNA, 101 bp, Homo sapiens
gtcgccgccatcctcggcgcgactcgcttctttcggttctacctgggagaatccaccgccatccgccaccatggtcaaaatgcagatcttcgtgaaaaccc

SEQ ID NO: 156583 - DNA, 75 bp, Homo sapiens
caagctcatattttgaagtgtttacggacccaacatgagtgaagtttcctgcaagaaacgggacgactatttgga

SEQ ID NO: 156584 - DNA, 75 bp, Homo sapiens
tgccaaaaacctttggacagtccaatgtcaacattgcccagcaagtggctactgcagcactggggtgtcagttgt

SEQ ID NO: 156585 - DNA, 100 bp, Homo sapiens
aggaaaactaggaatctatgatgctgatggtgatggagattttgatgtggatgatgccaaagttttattagaaagggttcaaagacaccagtcagtatgt

SEQ ID NO: 156586 - DNA, 100 bp, Homo sapiens
cggcagcgcagtgcagatccgcaggcgcaaggcttcaggcgacccgtactgggcctactctgatggttggaatccattttcgtacccatacaaaaaactg

SEQ ID NO: 156587 - DNA, 82 bp, Homo sapiens
tgcgaaggatccccaacggggaggccaacgtgaagaagaagcaggtcctggggaccaaggtggacgcggagcgtgacggcgt

SEQ ID NO: 156588 - DNA, 88 bp, Homo sapiens
cttgcctcaatcctgcatcccccatagttaagaaaatcatcgaaaagatgctgaacagcggaaaagacaggaggcagaaggtgaggcc

SEQ ID NO: 156589 - DNA, 100 bp, Homo sapiens
gcggcggggcagaccgctggggactgcgggcggcgctgtgtccgtcgccatgacaggtccttccatagtgacgccccccaaggacatctggaatgtcact

SEQ ID NO: 156590 - DNA, 99 bp, Homo sapiens
caggtcttacaattctaaaaccatgacctgtgtggaatttccagaggcccggatcttcgaggagaccctgaacatcctcatctacgagactccccgggg

SEQ ID NO: 156591 - DNA, 100 bp, Homo sapiens
ccgccggccctcggtgcgcccggccgcctgcacccccaggaattgaatgatctggcacgggaccctccagcacagtgttcagcaggtcctgttggagatg

SEQ ID NO: 156592 - DNA, 82 bp, Homo sapiens
attaaaaagtgaacttttctctggacttccccagaagaagattgtggttgaattcagcttgcttggctcaggaacaacagaa

SEQ ID NO: 156593 - DNA, 98 bp, Homo sapiens
tcaatgtgggtgtagagtctaaactcatccttaaaggggtcatactgctgggagaaccttgctagtgacatgtatcttatatcacagatggatagtga

SEQ ID NO: 156594 - DNA, 143 bp, Homo sapiens
ctgcatcacagaagctggaagttctgatgttccactgaaatcacaatggaaagtcttgacttgactgaataactgaagtgaagtgatggactccgatttggagagtagtaagacgtgaaaggaatacacttgtgtttaagcac

SEQ ID NO: 156595 - DNA, 82 bp, Homo sapiens
ctgaaggccttgctggctctctgtggtggtattgtcttctaagaactctgaagcaatgtcagacattgagggaagctctcat

SEQ ID NO: 156596 - DNA, 74 bp, Homo sapiens
cggcacacgcgcagccccggcctctcggcctctgccggagaaacagctcccggagccctgcctgttccctgtcc

SEQ ID NO: 156597 - DNA, 75 bp, Homo sapiens
aagggaatcgcaaggctcttccctgaccattttctactgtccctgcgcgaggagtaccgggcgtcaaagcagaac

SEQ ID NO: 156598 - DNA, 74 bp, Homo sapiens
tttgttattggggagaaaatcttcagaggagaatacttatctctggcgcacatcactatatttggctgcctctg

SEQ ID NO: 156599 - DNA, 100 bp, Homo sapiens
aggcttcgcgggaagacgcggcggcggcggcggaggatgagcctgcagagcgcgcagtacctccgctcctcttttgacttggactatgactttcaacggg

SEQ ID NO: 156600 - DNA, 100 bp, Homo sapiens
gcggtatcaaatggaaagtttttccaaatattcatctgtacaggtagaacgtcatgacatgaataccttaagcctgcccctgaacatacgccgagggggg

SEQ ID NO: 156601 - DNA, 50 bp, Homo sapiens
acaatctaaagtggactgcattttgtggaagcatcagttcacagcagtaa

SEQ ID NO: 156602 - DNA, 90 bp, Homo sapiens
caccatcctcaacgaccggggcgtcggcatgctcacccgcctctacaacatcaagaagaatgatatggaacctagcaaagctgttccact

SEQ ID NO: 156603 - DNA, 75 bp, Homo sapiens
ggatgaccaggaatgggaaagccccaggtttcagcacagccagtcccacaggagcccagcagaaaagattacgag

SEQ ID NO: 156604 - DNA, 50 bp, Homo sapiens
gcgggacaagcttcggccgcgcaagaagtcttctcaagtcttaggattgc

SEQ ID NO: 156605 - DNA, 97 bp, Homo sapiens
atggcggtgtctacagtgttctcgacttcgtcgctggtgtatctacatcagcaatcaaaatggcatcaaccagacttccttcccccaaaagcttagt

SEQ ID NO: 156606 - DNA, 90 bp, Homo sapiens
ctgaatacctaatagtttttccaaaattgggtgaagtggatcctaaagagaggatagcacgccaacgaaaattattacagaagaaacttg

SEQ ID NO: 156607 - DNA, 83 bp, Homo sapiens
ctaggcgacgagacccagtggctaggtttacaaaggaggaaaacgacttcttctagatttttttttcagtttcttctataaat

SEQ ID NO: 156608 - DNA, 98 bp, Homo sapiens
tttactggtggtaggggacaattcgcctgcagttgaggctgtgctttggtctgctctaaacttatccatctctgtccattactggaacaactccgcaa

SEQ ID NO: 156609 - DNA, 95 bp, Homo sapiens
ttccccacccagtcggatggcggcggccgcgctgaggcccccggctcagagatccggggctccaaggagacagcaactcagcccttgcctctgta

SEQ ID NO: 156610 - DNA, 100 bp, Homo sapiens
cgagccgcgggcgtttactcttagcagaagctcacctcatgccaatgaagatgtggaaagaatgttactaggaaacaagtgtgatatggacgacaaaaga

SEQ ID NO: 156611 - DNA, 100 bp, Homo sapiens
tattataaatgaagatctggacagtggcacacagataccgtttattaaaagagctgtggcttctgtgaatttctggtacgtgctggtgatgaatgatgag

SEQ ID NO: 156612 - DNA, 100 bp, Homo sapiens
agaagaaggggacttgggcccagtttatggcttccagtggaggcattttggggcagaatacagagatatggaatcagaccgagacatgggtgcccggcac

SEQ ID NO: 156613 - DNA, 78 bp, Homo sapiens
atgtcatcacaatggatcccaaagacaattgttcaaaagatgcaaatggtgacttagattctaccacatttggtacca

SEQ ID NO: 156614 - DNA, 97 bp, Homo sapiens
ttgaggaagaaagaactcaagtacaacccaatgaggttttaaccgtgattggagataccacaaagaagaacgagtatggattaccagggcaccaggc

SEQ ID NO: 156615 - DNA, 96 bp, Homo sapiens
tgggacctgcaagtgcggtctggagtgtccacttaatgtccccaaggcactggaaatgtacaaagatgactggaacaaagtgtccgagcatgtggg

SEQ ID NO: 156616 - DNA, 74 bp, Homo sapiens
ggaagtcgcctctgtgctcgtgagtgcatggggtataaggttctgggccggagaaggggcgacgttcgggcacc

SEQ ID NO: 156617 - DNA, 97 bp, Homo sapiens
gtacttagatttgattagctatggacaagattggaggaaatactataaagtggaacctcttgattttggcgataccttagatagaactttaggagac

SEQ ID NO: 156618 - DNA, 75 bp, Homo sapiens
agggaggagattcagcccggcgatattgtcattattgatcagttcattgacagaggtgacattgtgattgcaaaa

SEQ ID NO: 156619 - DNA, 96 bp, Homo sapiens
aactgtggccactggcggggtcgggggggggcagcggcggagccgcctcggacgatcaagaagctactctagaagtcggagcagaggatggtacag

SEQ ID NO: 156620 - DNA, 75 bp, Homo sapiens
gttggatcttgctcagtctctgtcagaggaagatcccttggaatgggaaaaggacagcacaggatgccctccaag

SEQ ID NO: 156621 - DNA, 90 bp, Homo sapiens
aggcatccctgcagggcgctcctccgagtccctcggcgctctgagcccacagtgcctgatcaactttctagcgggagaacgatcatggag

SEQ ID NO: 156622 - DNA, 98 bp, Homo sapiens
tcatatttggcttcaatgtcatattttgggaaagtgaaaaggtttctgaatatccagcagtgattgtggagccagttccaagtgccagattagagcag

SEQ ID NO: 156623 - DNA, 98 bp, Homo sapiens
aagacggaaaaagtcgatctggagcttttcccctccccggctctaagcgaaagacatgaggcctcagcctgaaatgaggttgttttgaggtcatctga

SEQ ID NO: 156624 - DNA, 98 bp, Homo sapiens
agagattttttattcgttactatgtggatgttccacaggaagaagtgccattcagatggtgagaacaagaccaagattggaaagccagcttcagagga

SEQ ID NO: 156625 - DNA, 74 bp, Homo sapiens
ggccggcgcggcgcagaagaaacccgcggcgaccacagccaaagcgggcggtgatggattggagttcaagagac

SEQ ID NO: 156626 - DNA, 75 bp, Homo sapiens
gaacacctcactattgatggtgtagcgctttaggggaaggttggacgtgataagtatgagcctgcagctgtttca

SEQ ID NO: 156627 - DNA, 101 bp, Homo sapiens
ctgagaaccagcaaggaaaatccaaggcggctcattttgtgttcaggacctcggcccagcccacagccatcccaggttgatggaaatcacaatcttctgac

SEQ ID NO: 156628 - DNA, 100 bp, Homo sapiens
tgcagaccagagtctccgctatggataacacccaggcttcttctcatatcggtaattccactcaggccactgtgagggatgcagttgttggaagaccatc

SEQ ID NO: 156629 - DNA, 75 bp, Homo sapiens
atggtggcggcggatttggagggaccctacgaaccaggagtcaggtgttggatcccagaacaagaatgattttat

SEQ ID NO: 156630 - DNA, 74 bp, Homo sapiens
tgccacctgcctttgacctttttgaagcctttgcaaaaagagtggtttttcctcctgtctcatgaggtgctcaa

SEQ ID NO: 156631 - DNA, 98 bp, Homo sapiens
gtcaccatttgatttggaacagcagtggcaagatctcatgtccatcatggaaatgcagatttcttcggtgcagaaaaaaaatgaagatttaggacagg

SEQ ID NO: 156632 - DNA, 75 bp, Homo sapiens
agactcgtggggctggatgggaatcgtagtcttcctaggagttgatggtgctgctccactggtgcctgctgtggc

SEQ ID NO: 156633 - DNA, 100 bp, Homo sapiens
ccgtcgccgccgccaccgcggccgagaccgcgcagccggcggagctgacttttttgaagatgaggcgattgaacagattttgaagtataatccttggtgg

SEQ ID NO: 156634 - DNA, 76 bp, Homo sapiens
aaacaaggtcatcatcacgggacagatggaatatccgtggcacgtgtttattgtcctacagtagttcaaatgactg

SEQ ID NO: 156635 - DNA, 51 bp, Homo sapiens
gagcccccagcgcagcggccgcgatggaaatcctgtatgaatgtggaagcc

SEQ ID NO: 156636 - DNA, 96 bp, Homo sapiens
tcggcggggcccaggtgagaaaggcccacctgtgtcctggttgagggtctccagggttctttggggcccgagggcggggcggtgattgtccaaaag

SEQ ID NO: 156637 - DNA, 80 bp, Homo sapiens
cttcatttagagtacagattttataaacagcttggcagtgcagctgaactagatgcagagcacgcccagaaggtcctgga

SEQ ID NO: 156638 - DNA, 100 bp, Homo sapiens
cggcggacagaccctccgaaggcctggcggccagcgattgctgatctgtgcatggcaacagagatgcttatttttggaaagaagttaacagcgggagagg

SEQ ID NO: 156639 - DNA, 100 bp, Homo sapiens
tcccgcccaaggagaatgcgctcttcaagcggatcttgttcccagtgacctgacagcagaggagcgtcaagaactggagaacatccgacggagaaaacag

SEQ ID NO: 156640 - DNA, 51 bp, Homo sapiens
cgctaattagactcatgccacttgaggataaaagaatcagagtgtctcaac

SEQ ID NO: 156641 - DNA, 100 bp, Homo sapiens
gcacatcacctacactaccacggccacactcaccactccatggccacacagttcaagaatcactggtgtccgaggagatcgtgcacgacctggatacctg

SEQ ID NO: 156642 - DNA, 51 bp, Homo sapiens
gtggcagtatactccagaatagaacagcaggacgaggggcaggaatctctg

SEQ ID NO: 156643 - DNA, 99 bp, Homo sapiens
cggccgcctggtcatggcgcagccgggcccggcttcccagcctgacgatataaagatgaagcgcagctgtataaagaagagcacctgaggaatcggcag

SEQ ID NO: 156644 - DNA, 74 bp, Homo sapiens
tttcttcatttgatgcagatatttgcacaatggtgtacaactatgagcctttgacacagctcaagaatgtcaga

SEQ ID NO: 156645 - DNA, 157 bp, Homo sapiens
cttaagaaacaatgaaatttcatgggccatagaagatgctagtgaagcctttgctggactcacaagtctcactaaactaagcctttgtgataaccacagaatcagaacatataaaaagctctgcgggactggtgctgactgcaaccatgacaaagct

SEQ ID NO: 156646 - DNA, 74 bp, Homo sapiens
ttgtaatcattcaaaggataaccaaatgtgccgtgatgtatgtgaacaggaagtgcacggctgtctataacgtg

SEQ ID NO: 156647 - DNA, 75 bp, Homo sapiens
accaaactgcatcaaatcctaaaccttatatgagtggttaagaaagtagctcaatacatggctgatgtattggaa

SEQ ID NO: 156648 - DNA, 75 bp, Homo sapiens
caatcgctcctgtttgtcttctgctttggcccaggacggggaggtttactgcatcgacgcgcggttctacgggaa

SEQ ID NO: 156649 - DNA, 101 bp, Homo sapiens
aacacataaaaattatttatccaacagctcctcccaggttgttcctactgaaggattggtctccatattaaagaagaggaatgatactgtaggagatcatc

SEQ ID NO: 156650 - DNA, 76 bp, Homo sapiens
atggaggagagaaggctgagagcgaagctggaaaaggattgtctcaaagcttgccaggagcagattgaggcggtgc

SEQ ID NO: 156651 - DNA, 75 bp, Homo sapiens
gaattatgggagcgcatttccccagggctggaagcgcaattcattgaccccgaggacaactgttttcccttgccc

SEQ ID NO: 156652 - DNA, 75 bp, Homo sapiens
cagtagtggaagatgtaaagcaatatttcgagcagtttggcaaggagttccccttggccattctcaggggctggg

SEQ ID NO: 156653 - DNA, 108 bp, Homo sapiens
aggtgatccagcaaggtcggcagagcaaggggcttacgcagaaggacctggccacggtgagaagccctaccactgcaactgggacggctgcggctggaagtttgcgcg

SEQ ID NO: 156654 - DNA, 100 bp, Homo sapiens
aaagactagagacagtacaaggagggagagaggtatttatgagcctccatttcttatactactgcagtgaaccaacattggatgtgaaaattgccttttg

SEQ ID NO: 156655 - DNA, 129 bp, Homo sapiens
ggaggagaagaagatgtcttgggggatgagagtcagacaaccccaaatcgaggttacatttagtaacactttttgaaaatgatcgtcatttctctcacctctcatctttggaacgggagatgacttttc

SEQ ID NO: 156656 - DNA, 100 bp, Homo sapiens
tggatgggggaccacaagatcctcatcgacaggacttcctccgtcaggcagctggcaggacctgaaggatcacatgcgagaagctggggatgtctgttat

SEQ ID NO: 156657 - DNA, 50 bp, Homo sapiens
ccgggcctcccgctcctccgtacaggacatggatttgattgacatacttt

SEQ ID NO: 156658 - DNA, 75 bp, Homo sapiens
cgtcagtacgcgaaggatatcggtttcattaagctttcaccaacaatcaccagtggtttacacaacattgcaagg

SEQ ID NO: 156659 - DNA, 74 bp, Homo sapiens
tgaaatgctctggcctaggaaccttacaagggtgcaaatagctatgggcaacttggcctcggccataaggaaga

SEQ ID NO: 156660 - DNA, 93 bp, Homo sapiens
cgagtatttgcctggccagcagcactgccttgagaagatactagaattccatcagaagcacgttgagaaagatcagtctaaagaaaaggagaa

SEQ ID NO: 156661 - DNA, 100 bp, Homo sapiens
cagcagcagcttcagtagcgcagaggcggcggtggcgagaggtgcggcgaaggaggcagaggcacttatgcttgtcagttcttggccaggctgactgaga

SEQ ID NO: 156662 - DNA, 97 bp, Homo sapiens
tatggctcagaggagtacttgcagctgagatctaagagtacccaagtggccttggaccatctggagtctgtgcctgagaaactgagcctactagaag

SEQ ID NO: 156663 - DNA, 90 bp, Homo sapiens
agcccgtggagtcggctgagggaaaagcgaggcaaggcaggcggaatgtttgatgtgggaggtcagagatctgagcggaagaagtggatt

SEQ ID NO: 156664 - DNA, 100 bp, Homo sapiens
ccgaattcagaaggatatcgacgtcgtgatccagaagtccagagctgaggactgcctgtttgcagttctgggatacatgtgcagaacgtgcaggtttgtt

SEQ ID NO: 156665 - DNA, 80 bp, Homo sapiens
tgttcaggaaccaccagtgacagagtcttcggataaactcaaccaactgtcaactagaaaatgtttaaatttacctatag

SEQ ID NO: 156666 - DNA, 83 bp, Homo sapiens
aaacagtacaaggtgatgaagactatccctctatacaatggtgtgatcctggtctatgacattgcgaaccgctggtcttttga

SEQ ID NO: 156667 - DNA, 90 bp, Homo sapiens
gacctggtccagcttcccttcctcaaataaggaaattgacacctggcgtggagccagatgaccaagatgctccagatgaacatgagtcgc

SEQ ID NO: 156668 - DNA, 50 bp, Homo sapiens
cccaggttaccactaaaaatgccaatgcctgaggaagtgcaccatggaga

SEQ ID NO: 156669 - DNA, 51 bp, Homo sapiens
ggaatctgtcttggaggacatcagaaggtacgtgaacacactcctgaaact

SEQ ID NO: 156670 - DNA, 97 bp, Homo sapiens
ggccgattatgtccattgttctcttggagcagctggtcatcatgggaacacaacagtagatgagttaatgatgagactcatggctgcaatggagatc

SEQ ID NO: 156671 - DNA, 75 bp, Homo sapiens
tgcgggtgatcgcagaagcctacgctaccaaaggcttcggcatggaagccacgctgctgttggtggtcggctact

SEQ ID NO: 156672 - DNA, 76 bp, Homo sapiens
gccctcccgggaggctgcctgcctgttggaagtgtatcctcccttcttattttttctagctgttggaggtgtttac

SEQ ID NO: 156673 - DNA, 90 bp, Homo sapiens
gatcagcttcactcagaagatctaggtctggttctataaaaggatcgaggtatttccattgaccactgaaaaacacacatactatctgac

SEQ ID NO: 156674 - DNA, 75 bp, Homo sapiens
gggtgaggccggccacgccccgcacgaacatccagtcatggataaaaatgagctggttcagaaggccaaactggc

SEQ ID NO: 156675 - DNA, 100 bp, Homo sapiens
tggagtgtaggtcatatcgccgcgcatccttttatcaagaatgccaaacctgtatcaatattaagagacctgatcacagaagctatggagatcaaagcta

SEQ ID NO: 156676 - DNA, 50 bp, Homo sapiens
cgaagatttattttgtcagtgaatgcaagttctagccggtttttcctaca

SEQ ID NO: 156677 - DNA, 96 bp, Homo sapiens
ccggggctccgcgcgcgtcgccggcccagctctgtcgctgacgggaggatctgaagccggccgcagacaaatttacatgtattggagaccagacca

SEQ ID NO: 156678 - DNA, 80 bp, Homo sapiens
gtgtgtccggaggtttgcaggggtgcagtgtgtctggtcttatgaggaggtgctaatgatgctggataactatgtaagag

SEQ ID NO: 156679 - DNA, 96 bp, Homo sapiens
gttgtctcttagaagtgggagctgaacgaatgatatggaacctagcaaagctgttccactgaatgcatctaagcaagatggacctatgccaaaacc

SEQ ID NO: 156680 - DNA, 100 bp, Homo sapiens
cgacagcaggaacaacgcggcctcagccagatggggaagggatccttcaagtatgcctgggtgctggacaagctgaaggcggagcgtgagcgcggcatca

SEQ ID NO: 156681 - DNA, 90 bp, Homo sapiens
ccaggacacccctgaagccgagaaatgtggtcaagtgggttctcggagtccttctatgattagtaatgattctgaaaccttagaagagtg

SEQ ID NO: 156682 - DNA, 75 bp, Homo sapiens
caacaagcagaccatggaggagctgaaggacctgctgaaggtatttctggaaaactcaaactgtttttcctctac

SEQ ID NO: 156683 - DNA, 100 bp, Homo sapiens
tcaggggccttgtgtcctaccatggtatttgctaacgtttagagagtgcttccccttgccgagcactgggtgccgtgagcgatgtggagatgcaggaaca

SEQ ID NO: 156684 - DNA, 74 bp, Homo sapiens
agtcaaagaaatgcaaatattctttcaaatgtgtaaatagtctcaaggtgcaaacagctgcacagcaagtggca

SEQ ID NO: 156685 - DNA, 101 bp, Homo sapiens
gagaaacttctgagcaacagatctaaagccctggtgtgtcctctcgcatggcagagcaagtgggaaggcccagaagatcccttacaatacctgagaggtct

SEQ ID NO: 156686 - DNA, 50 bp, Homo sapiens
gaacgcggctaaagttctgatgtgcctggaagcagcgagccctttatgac

SEQ ID NO: 156687 - DNA, 74 bp, Homo sapiens
aagatctctctacttctcctaaggatcactactcttggaatcaaagataaatccaaatactgcatatcagaaac

SEQ ID NO: 156688 - DNA, 100 bp, Homo sapiens
caagagcaagatcaccgtgacatccgaggtgcctttctccaaaagcatgtttttggcccagaggagcctctgctctcttagcggtagagcaaaattcctg

SEQ ID NO: 156689 - DNA, 87 bp, Homo sapiens
ggtgtctacccggcactacagagctcccgaggtcattttgggaaaatcatcagcgtgttagcattttctttgactatgcaagatgta

SEQ ID NO: 156690 - DNA, 100 bp, Homo sapiens
cgcaaggcgtataagaggccccaggtgtggcacattggttgacctttgccagggcccccaccttcggcatactggacagattggaggactgaagctgcta

SEQ ID NO: 156691 - DNA, 97 bp, Homo sapiens
acatcacagccagacccaactggatggagtgacagtgttccctattggaattggagatcgctacgatgcagcccagctacggatcttggcaggccca

SEQ ID NO: 156692 - DNA, 101 bp, Homo sapiens
ggctttgcagcggggacttcggcggcggcgcctcaggcacctcggcccggctttgcccgaagtttttacatacaaattctactagtcacacctggccattc

SEQ ID NO: 156693 - DNA, 100 bp, Homo sapiens
gcaccatgccgctcctaagcctgcacagccgcggcggcagcagcagtgagaggttacaggaggttccagtggcatcgggaagtgcattgctatcgagtgc

SEQ ID NO: 156694 - DNA, 80 bp, Homo sapiens
gaagaaatccgcagaagcttattaaagttaaggaactgtggctgcaccatctgtcttcatcttcccgccatctgatgagc

SEQ ID NO: 156695 - DNA, 50 bp, Homo sapiens
ccgggcgccaccgctgccacctccgcgagagattttaagcagcaccatca

SEQ ID NO: 156696 - DNA, 75 bp, Homo sapiens
ctgatcttcccagactgtctggcaccacgaggtccactgtcccacgagcagaagctgtcacaaagcttggaaatt

SEQ ID NO: 156697 - DNA, 73 bp, Homo sapiens
tattacttaagagaatctcaagctgctaagcgatctagggcagccctgcagaggtacctgttctactgtaatc

SEQ ID NO: 156698 - DNA, 100 bp, Homo sapiens
tcagggtcccccttcctggtggctgtgaagctctccctaattgtagttacataaagttacaacttgactaaaactacaaggaagatgttgacatgctctt

SEQ ID NO: 156699 - DNA, 90 bp, Homo sapiens
cgaagacatgacacttacaagatggacagggatgataattgggcctccaagaagtattgggaaagggtcgttgtggtgcatagacccaga

SEQ ID NO: 156700 - DNA, 98 bp, Homo sapiens
cgaggagtgcgtcaaggactccccgcgcttcagtcgcagcgccgtgttacgtttcatctccctgatggctcccaggaaagctgcagtgacagtggtct

SEQ ID NO: 156701 - DNA, 87 bp, Homo sapiens
tgaaaacagaagctgtggctgtgggaacattctccatggccagtgaggaagtcttgaagaatagagccataaagaaagcaaagcgca

SEQ ID NO: 156702 - DNA, 95 bp, Homo sapiens
agaaagaaggttaagctggctgtcctgaaatattataaggtggccaagactaagcagcagattgaggagcagcgggtgcaggtgcaggtggtgga

SEQ ID NO: 156703 - DNA, 90 bp, Homo sapiens
aaataatgacaatgcttaacaagggctcaatacattctcagtcatcttcatttacagaaattcgagctcaactggtagaacaacaaaaat

SEQ ID NO: 156704 - DNA, 75 bp, Homo sapiens
tgagcaggcccggggagggtggttaccgctgaggagctgcagtctctgtcaagaaaaggcgacggcggattgaca

SEQ ID NO: 156705 - DNA, 86 bp, Homo sapiens
gatggacaagagaaagctcgggcgacggccatcttcatccgcaagctatagtcagcagactggacctcaacaacctcagcagttcc

SEQ ID NO: 156706 - DNA, 90 bp, Homo sapiens
cctctttaaaaattccgccgaaaaagagaagacgctttacccgactctttgggccgttatctcaccttacatcacgagaaaaagcagcca

SEQ ID NO: 156707 - DNA, 90 bp, Homo sapiens
aaacctctcacttctagcagtgcaggtaaaagtgcagttttaaagtgtctcctggatattcacaaaatttttcaggaaaatgacccagcg

SEQ ID NO: 156708 - DNA, 51 bp, Homo sapiens
ggaccaggcaccttctgtggaagagaattttcctgacactctcaactgtgc

SEQ ID NO: 156709 - DNA, 74 bp, Homo sapiens
atgcagggagtaaaaacaggctggtgcagacagcagagctcacaaaggaccttgcagatgcttcgggagaacct

SEQ ID NO: 156710 - DNA, 100 bp, Homo sapiens
gagcttatacagggatgtgatgctggagaactatagccacctggtttctcttgaggagaaggcagagcccccccaggctatgaatgccctgatgcggttg

SEQ ID NO: 156711 - DNA, 75 bp, Homo sapiens
ttgtaagtgcagatggaacacaacaggagtccaaaactacttacctggaagaccttccaccaccccctgagtatg

SEQ ID NO: 156712 - DNA, 97 bp, Homo sapiens
agtatgtaaggatgttgcagtggcctaaggagcagccttttggagattatggcttgttaacaacaccccagctgcactacatggtgtattgtcgaaa

SEQ ID NO: 156713 - DNA, 82 bp, Homo sapiens
tatcattatgaattggatatcaagccagagaagtgcccgaggagagttaacaggtgaatgaaaactttgccattgatttgat

SEQ ID NO: 156714 - DNA, 100 bp, Homo sapiens
gctgtcagcgcggccgtcggagacatgggagacccggggtcggaagtttttcgttggaatatacgttgcacatttatggcgattctgagtgtgagggcag

SEQ ID NO: 156715 - DNA, 100 bp, Homo sapiens
aaagcataggccgtgccccgaccggactggacgcatttttatacatagggccacgaataccatgttctgtcccctaaggcggtcccaaaaggcaatggca

SEQ ID NO: 156716 - DNA, 98 bp, Homo sapiens
agagcttcatcaccccctacctcctggggcccgacaagaacttcacgcgggagcagggtttgccttcccggattgggcctacaagccagagtcgtccc

SEQ ID NO: 156717 - DNA, 100 bp, Homo sapiens
ccaaggcactaccaatatgttatctccagatgccgcgcaactgtctgatctcagttcatgatatgtgaaagaggccaaagaagcaactaagaatggagac

SEQ ID NO: 156718 - DNA, 100 bp, Homo sapiens
agaccaataaaaataaactgcttgaacatcctttgactggttagccaggaaggccgctgcttgtttgtcatcctgctcatggcggtgtactggtgcacgg

SEQ ID NO: 156719 - DNA, 76 bp, Homo sapiens
aacctggccaaaatcactcagcagatgccaaagtaccacatgcggatccacaaggaggaacggaagtacctgtgcc

SEQ ID NO: 156720 - DNA, 50 bp, Homo sapiens
gcgaagccgaaaaaggcagcagcgaagttaagtgggcagaccaacatcca

SEQ ID NO: 156721 - DNA, 100 bp, Homo sapiens
ctcctcacggtcctcctggctgtgctcatatacacctgtgggggacttgcgagacttcgtgaggagccacctggggaaccccgagctgtcattttacctg

SEQ ID NO: 156722 - DNA, 100 bp, Homo sapiens
aagatcgagcccagcgtcaacttcctcaagtcgcccaaagacaaggcgaccagccagctcctgttggagacagattgggagtccattttgcagatctgcg

SEQ ID NO: 156723 - DNA, 90 bp, Homo sapiens
cttatatcctgctgtgtggtttccctccattccgtggactgcaattacatgcctgtctactgttctatcaattgatttcaaaccttcaga

SEQ ID NO: 156724 - DNA, 84 bp, Homo sapiens
gtgacatgtctgatcccttgctcccatccctgcagcatgaacaagctgttaaacgtttaatgaaagaagcggcagaattgaaag

SEQ ID NO: 156725 - DNA, 100 bp, Homo sapiens
ggcagtcagagtcaaaacagagcttttggaatctgaacaaggggtggaagttgatgggtcgaaactaaatgtgaccagcacgtggaacctggcttcgccc

SEQ ID NO: 156726 - DNA, 87 bp, Homo sapiens
tggatattgagccggatagacctattggatatggagcctttggtgttgtctggctgaccggttccctgatgtgttacctgcttctgc

SEQ ID NO: 156727 - DNA, 100 bp, Homo sapiens
cagcgattggacagaatttgtgaagattgtaaaccatggctgtgtggatacaagctcagcagctccaaggagaagcccttcatcagatgcaagcgttata

SEQ ID NO: 156728 - DNA, 90 bp, Homo sapiens
tctcaacttgaaggtcatttaaccaacctcagctttacaaaccctgaatttataactgagacactgcccatctctaagataagaacctgg

SEQ ID NO: 156729 - DNA, 98 bp, Homo sapiens
aaggtgttcaccacaggcttcagccgaatgagcgagcggcagctggcgctctgggacccacttcctgggtctgcaggtccagccggctggcaccctcc

SEQ ID NO: 156730 - DNA, 100 bp, Homo sapiens
gccgccatccgggaggcccagggaagtcactgtgtgcccagtattctgcagacaaacgagaagatgagaagatgtgtgatcatttgataagagcagcaaa

SEQ ID NO: 156731 - DNA, 90 bp, Homo sapiens
agaagcgcagcaacgtgcggtgggaccacgagagccctaaaacaaccaatgttctaggagctgttaacaagccactttcatcagcaggca

SEQ ID NO: 156732 - DNA, 51 bp, Homo sapiens
ggaggagcagttgtctgatgaagagaaggtcccagcacacctggaaagttc

SEQ ID NO: 156733 - DNA, 100 bp, Homo sapiens
cagtcctcaatctccttttccttggctaccctgccctcggctagcatgacccgcctgatgcggtcccgcacagcctctggttccagcgtcacttctctgg

SEQ ID NO: 156734 - DNA, 100 bp, Homo sapiens
ttttattgacagagctctgatagttgttccttgtgcagaagatttgcctgaagacctggataatctccatttttgtcatggactgttaaaacgtttgaag

SEQ ID NO: 156735 - DNA, 97 bp, Homo sapiens
cagcacaatattcctcagtaaatctcagacggacggtctcaccaacggctttgggggtgcgaggagcgagcaggagccgggcggcggcctggggagg

SEQ ID NO: 156736 - DNA, 75 bp, Homo sapiens
ggcgatattgtcattattgatcagttcattgacaggttcatatccagctttcagagtggcaccgtgcaatttttc

SEQ ID NO: 156737 - DNA, 100 bp, Homo sapiens
acgtcaccgccatggcaggcatcaaagtttgggatgaatgcgcttctcctgtctgcctggttcggccacttacgaatcctccagatcttggtaaactcag

SEQ ID NO: 156738 - DNA, 88 bp, Homo sapiens
tgtcttcaattaaaaaatttattaaaggaagcacacctaagggtgcttcaaggatgaccgcatcgtcttctggacttggatgttctcc

SEQ ID NO: 156739 - DNA, 100 bp, Homo sapiens
caaggccaccacctctgaggctttcttcggcatctttgcagagttcatgagcaaattcgaggattacggggcgctgaaagacatcgtgatcaacgcaaac

SEQ ID NO: 156740 - DNA, 83 bp, Homo sapiens
ccacgccgcacctgcgcaacctcgccgtggccatgtgcagccgctactgatgcaccatgccaatagtggataagttgaaggag

SEQ ID NO: 156741 - DNA, 100 bp, Homo sapiens
cggggacccagaccctggagcctcagttggaagcagccgatccagcctgcggagcctgtggggcagaatccacactggtgatagaccatacaaatgtgca

SEQ ID NO: 156742 - DNA, 100 bp, Homo sapiens
agaagacctcaaagggctggaggagacagtgggtaatactgaacaacctgtccaaactagcaagattggacttggaagaagagagtatcagagtttacaa

SEQ ID NO: 156743 - DNA, 100 bp, Homo sapiens
taggcaacatcgcactttccccatcaccagtggttcaaaccttgtactactcagctgatcacaagctgcttgatgggaacctactagatggacaggctga

SEQ ID NO: 156744 - DNA, 82 bp, Homo sapiens
ggatcagcgacactatggcagtgtctgacaccagagccggaagtggaaccgcccagtgcccccgagctcaagcaagggctgt

SEQ ID NO: 156745 - DNA, 82 bp, Homo sapiens
tcaaagatcttgtctcgctggcctgcgacccagccagccagcaacctggaccggaagggaaaaggccgaggcatcagcgtgt

SEQ ID NO: 156746 - DNA, 95 bp, Homo sapiens
tcaacggcagaagcttcaccacaaaagcgaaatgggcacaccacagagctgcgcataaaatccagctttgtggcacctctggaaaagtcatatgg

SEQ ID NO: 156747 - DNA, 110 bp, Homo sapiens
acagactgttgaaaacaatcggcaaggggaattttgcaaaagtaaaattggcaagacatatccttacaggcagagaggttagcactctacgtatatgaatatctgctcca

SEQ ID NO: 156748 - DNA, 100 bp, Homo sapiens
ttgacccagtcgacaggatctgaacttccagtgaccatcccaggaacagaaagcaactgtgaagcagaatctggtaatataagtcaaaagtctgatgaag

SEQ ID NO: 156749 - DNA, 73 bp, Homo sapiens
ggctacgacccccagcagaacctgaacgacctgatgctgcttcagctggagcagttcaagaaggacaacgagg

SEQ ID NO: 156750 - DNA, 135 bp, Homo sapiens
aggaacatcgcctctttccatcgaacattccgagaatgcgagagaaagagcctccgtcaccacataaccgtcaacaaagatgtggacgcacaggctgaaggagaagggagccgcccatccatggacttattcagg

SEQ ID NO: 156751 - DNA, 74 bp, Homo sapiens
tggtctggccttctccatggcctcaacacgtccctaacttgtgcttccacagcgcggcacctgtacctccgggg

SEQ ID NO: 156752 - DNA, 96 bp, Homo sapiens
gggcaccaagaagggccacaagctccacctggactacatcgggccttgcaaatgtttcatcgtccataacgaagagtgagactatttggaaacaga

SEQ ID NO: 156753 - DNA, 75 bp, Homo sapiens
ctccagtgattttcaatcaaacattgcatagggaattcacaattgaaactgaagggaaaacatttcagttaacaa

SEQ ID NO: 156754 - DNA, 100 bp, Homo sapiens
tggcggtggagactctgtccccggactgggagtttgaccgcgttgacgacggctcgcagacttaatcttctccatacagagctggctaaacagttggcag

SEQ ID NO: 156755 - DNA, 89 bp, Homo sapiens
gagcatttgagcttcagatttctaacagactgtatgaaaacaagggagaggctgacttcgtggaatctttgctgcagctcttcaggtcc

SEQ ID NO: 156756 - DNA, 74 bp, Homo sapiens
tgaaaccagtgttgctcaactctaagttacctgtggatatccttggaagagaatgtatcctgtcaggtataatg

SEQ ID NO: 156757 - DNA, 87 bp, Homo sapiens
agtgttcaccatcctggccccggaaggtacgcaataactgtttggtattttgatgcagatgagagagcacgagctaaagtaaaatat

SEQ ID NO: 156758 - DNA, 83 bp, Homo sapiens
cttgctcacaacatccgccgccactgtgacttgcagtcatcatccattaccacaaaattaggaactgtggctgcaccatctgt

SEQ ID NO: 156759 - DNA, 98 bp, Homo sapiens
ctgcggctggtccaggccttccagtacacagacgagcatggggaagctgtgaaagttgtgtagatttactgtttgtgagaggagctggaaactgccct

SEQ ID NO: 156760 - DNA, 100 bp, Homo sapiens
ctgcagttggtctttcagagatggcagcagaagctgcatatcaaactgggactttgaacatgtcggggatcgccctcagcagactcgcccaggagaggaa

SEQ ID NO: 156761 - DNA, 83 bp, Homo sapiens
gtccggccggggacccggcccgggaccggcggcgcgcggcggccgaggccaggtgtttgagaagtcccccctgcgggtgaaga

SEQ ID NO: 156762 - DNA, 74 bp, Homo sapiens
ggatgatttgggaatatagtgtccttttttgtttggctatgccaccacagtcatccccagggtctatacatact

SEQ ID NO: 156763 - DNA, 100 bp, Homo sapiens
atatgcagttgtgtcttttacttacaaagatgatatacaaactccgaagtttgtaccttcatcaaggagaatgtactactcatcacctcccacctgtgaa

SEQ ID NO: 156764 - DNA, 100 bp, Homo sapiens
ctaatagtggttatcctgcctggaaagacaccagtatatggttgggtatctacagccattggttgctgttcaggtcagctttgctcctaacaacactggg

SEQ ID NO: 156765 - DNA, 100 bp, Homo sapiens
tgaatgtttccatctcttcagagatgaaccagctgttaaagaatcattgactacagatctacaaacaagaaaagaaaaggatactccaaatgaaaaccga

SEQ ID NO: 156766 - DNA, 100 bp, Homo sapiens
gtcgataagctggaactgatggagaaaaaccagaggctgatagaaatccgcctgtgctatatcacaatagccgagctcgatctactggtgcttgcaactg

SEQ ID NO: 156767 - DNA, 98 bp, Homo sapiens
cgggagtaggagactcagaatcgaatctcttctccctccccttcttgacctgcctagagctggaacgttacctccagagcgagccctgctatgtttca

SEQ ID NO: 156768 - DNA, 96 bp, Homo sapiens
ctccaggcagtgtaatctcattccatcttcattcatgactccagacagagtacagaatgcaggctattctgtgagccggccagagggtgacacagg

SEQ ID NO: 156769 - DNA, 90 bp, Homo sapiens
ggagcaccttttccaagctggcttcatggtttgctcagaattctcggggcggcacagttccagggtacagcagggaagaactggaaactc

SEQ ID NO: 156770 - DNA, 97 bp, Homo sapiens
aagacaagaggtaattttcctgtaatcacaggatgactcaggtagctacagcaagctgggtagcaggcagatccaaaggatatcatgaagtttccag

SEQ ID NO: 156771 - DNA, 101 bp, Homo sapiens
ggagcggagcggagaatgccaagggagatgcagttaaagacttgatgcttcgctttctgggtgaaaaagctgcagcaaagagacaagtcctaaatgccgac

SEQ ID NO: 156772 - DNA, 87 bp, Homo sapiens
tgctgggcttcagtttcctgctcctcgtcatctcttctgatggacataatgggcttggaaaggtagagaaatggtcagaaggaacga

SEQ ID NO: 156773 - DNA, 98 bp, Homo sapiens
cggtgcctggccctctagccccgctaccggactacatgtcggaggagaagctgcaggagaaagtgagaaagatcagtctaaagaaaaggagaagaaag

SEQ ID NO: 156774 - DNA, 100 bp, Homo sapiens
gggctggggaccccgcacgtacacctgtggccgcagatttctgcgccaggagatgaggggcggtagagccctggaatggagatgtccttgacgcctgggc

SEQ ID NO: 156775 - DNA, 75 bp, Homo sapiens
gaatattaccatactcacatccccaacatcttccaggaatcccgttctgcttccagaagtggaagtgctcacgga

SEQ ID NO: 156776 - DNA, 98 bp, Homo sapiens
ttgtcattgatggtctcaatgttgccaaaatgtttcctaaagttcgtgaatctcaactttctattgcgtctgcagacatggatttcaaccagctggag

SEQ ID NO: 156777 - DNA, 100 bp, Homo sapiens
ggactttaaaactgctgttgtaatgctgtttgggtacaagccctccaaggatgagacctgcacgcagtggctcacagcagcacgatttgtgacagcccga

SEQ ID NO: 156778 - DNA, 100 bp, Homo sapiens
cgctcctgggcatagtcctcgccgcttggctccgcggctcgggggaggagccccagccccgcgacgaggaggaagcggagctggagctgctgaggcagtt

SEQ ID NO: 156779 - DNA, 90 bp, Homo sapiens
cctgttactgctgctacttcctcgtttgacaccttcctggcttcggaaccaaaaagaagcttcccagagccggggccaggagccccaagc

SEQ ID NO: 156780 - DNA, 100 bp, Homo sapiens
caagagagaaagagtggatttcagcctgcacggatggtcttgaaacacaaatggtttttggttcctcgtctatggccgctactgcagccaggtggagtca

SEQ ID NO: 156781 - DNA, 101 bp, Homo sapiens
ctggaactgccaccattgctgaacggagaggtagccatgatgccccacttggtgaatggagatgcagctcagcaggattactacagcatcccatttcccac

SEQ ID NO: 156782 - DNA, 90 bp, Homo sapiens
gtaatcaccacagtctctcattatttggacagagaggtgaaaatggttctttccaaattgtatgagaataagaaaatagctagtgccacc

SEQ ID NO: 156783 - DNA, 100 bp, Homo sapiens
gaaaaggtgtacttgcaagaaacctcaggacttgagtaacagcaacatgccctttggagtgaatcaacctggaccttatatcatgtatacaactgtagat

SEQ ID NO: 156784 - DNA, 90 bp, Homo sapiens
cgcctgcttcccgtctgcgcgagtccacgcagctccccagggtcccgacggcctacacatggggcgctgtgggcgccgtggggctggtgt

SEQ ID NO: 156785 - DNA, 50 bp, Homo sapiens
cccggcggtgctcgtcacctccaggtcgttgaggacttccacatggagat

SEQ ID NO: 156786 - DNA, 98 bp, Homo sapiens
gatgacgcagagtcagatgtcaggatggtggctgacgaatgcctcaacaaagttatcaaagtgaggcttcgagctctgaggaagagcctccatcccca

SEQ ID NO: 156787 - DNA, 98 bp, Homo sapiens
ccccctcatccgctgggactcctacgacaacttcagtgggcatcgagatgacggcatggagggtgaaaatgagttcttcagtaagaagaaaaggcaag

SEQ ID NO: 156788 - DNA, 50 bp, Homo sapiens
ctggaaacttcgctatcatggagatcacattgatcgccctaaaggactgg

SEQ ID NO: 156789 - DNA, 100 bp, Homo sapiens
cctccaaggaagccacgtgcagacatctacaaccttcgatctcctgacgaggtgtgactgtaatctggaaggtgttctccctgaaatatgtgatgcccac

SEQ ID NO: 156790 - DNA, 100 bp, Homo sapiens
gaagaatttaggtctccagtgagatgtattgcaacaactagagtgaccagaagtcagcagcttcccagaagccccgaagccggggcatcctccactcact

SEQ ID NO: 156791 - DNA, 99 bp, Homo sapiens
gatttctggatcagttagtggggacaaagaagcagaggctcttcagggagctcagcaaaacccagcagctcagattcctgccaggcagcgggagattga

SEQ ID NO: 156792 - DNA, 75 bp, Homo sapiens
ccaggatgtctacaaaattggtgatattgatgatgttaagaagttcaaaccgggttacctggaagctactcttaa

SEQ ID NO: 156793 - DNA, 75 bp, Homo sapiens
tcagaagaaggctgctattgaaagagagtatgcacaggtcagcccaaggccaaccccactgtcactctgttcccg

SEQ ID NO: 156794 - DNA, 98 bp, Homo sapiens
gtcagccttcccagtagctgggaccacagttatccaagcattaggtgaacatcttaaattaagacaacaagttattgccactgctacggtatatttca

SEQ ID NO: 156795 - DNA, 100 bp, Homo sapiens
agcatggaaagtcgggggctttcgcccgggtcctcctagaaattccccccgaagaagactcccccacatctggcaacatggccaacgccctggccagcgc

SEQ ID NO: 156796 - DNA, 96 bp, Homo sapiens
agccaatcacattttgcacaagggcagtcaccatgaaaggtggagaaagaactcacttacgagaagttcgtagaatggacgaggctggacatgatg

SEQ ID NO: 156797 - DNA, 101 bp, Homo sapiens
gcaaaggcaccgtgacaggccaagtgcaggggccagaagacaaagtcaattccatactggtcaaacaaatggattttacagaggcttacgcggacacgtgc

SEQ ID NO: 156798 - DNA, 75 bp, Homo sapiens
gagatggtggccctaacacagggggaatgggagcctattgtccagcccctcagctgtaaaactaccatagaagct

SEQ ID NO: 156799 - DNA, 100 bp, Homo sapiens
cttcagagacactgccaagcagccttagccctagtgtagagcatgcatatgcgctagaacttctatttgatcagttgcatgaaggagctaaagctcttga

SEQ ID NO: 156800 - DNA, 83 bp, Homo sapiens
cctcccggctctcgtcagcctcccgccggccgtctccttaacaccgaacaccttgatattcactgatggactccaaagaatca

SEQ ID NO: 156801 - DNA, 100 bp, Homo sapiens
gagagcccctcgtgtatgatcttgcctcactgaaagcagcccctgaaccccaacagcccatgagcatagaagactttatttcttgtctggattctgcagc

SEQ ID NO: 156802 - DNA, 89 bp, Homo sapiens
gtgggtcttcctcaagaatatcatccctgaaatttttaacctgctaaaagatgaaggactgaaccatgaatgcaaactctgcagccaga

SEQ ID NO: 156803 - DNA, 97 bp, Homo sapiens
gtacttggatagacttatacctcaggtcatcctgtacagttctacagcatgaataggcctgcctctcgccatactcccccaacaatagggggctcgt

SEQ ID NO: 156804 - DNA, 116 bp, Homo sapiens
gctcttcagaaaccaggctgctttcaggaacattgctgtggattcccagaactttaccttttgaccagttggtccagagggcagctgaagagaaacataaagaattctttgtttca

SEQ ID NO: 156805 - DNA, 75 bp, Homo sapiens
acgaaatccggaaggtgacgggcaagagcaaattggtcaggagatgttggaaaaccttagtcatgacagagaaaa

SEQ ID NO: 156806 - DNA, 74 bp, Homo sapiens
ggaagtgttatgatgcccttcgaaaaatgatcaactattgaccatataggtcagaagagatcaattctacagaa

SEQ ID NO: 156807 - DNA, 75 bp, Homo sapiens
tcaggtccttttggccagatctttagaccagacaactttgtatttggtctataagaaggagaaagctcgagtcat

SEQ ID NO: 156808 - DNA, 113 bp, Homo sapiens
ggtgcgaggtcgagtaccttccctgtcccatcgcaaacccaaagatccccgttcctggagattctgattgaggtgagaagccctaccactgcaactgggacggctgcggctgg

SEQ ID NO: 156809 - DNA, 90 bp, Homo sapiens
ctaagtttgaagattggctttgtaacaagtgctgcccagtttcgaggtcatagtggagcctacagagaaattctactacatctataacga

SEQ ID NO: 156810 - DNA, 85 bp, Homo sapiens
atattctaggatcttccggagctgccgtgcatacctgtgtgaaagcaaccttccacattcgagtgagggttgaaaaggatccaga

SEQ ID NO: 156811 - DNA, 82 bp, Homo sapiens
ccagggaaccctggtcaccgtctcctcaggtgcgcgcggagccatggttatcatgtcggagttcagcgcggaccccgcgggc

SEQ ID NO: 156812 - DNA, 74 bp, Homo sapiens
caaggtcgccctcaaggccatgatcaaaacgctgagagccagcgacatcatggagcccaacctgacctacgtct

SEQ ID NO: 156813 - DNA, 100 bp, Homo sapiens
tgcagtacctgcagaaggtctctggagacatcttcagcaggcccaggctttggtgcagtacctggaggagcccctcacccaagtggcggcatcttaacgg

SEQ ID NO: 156814 - DNA, 82 bp, Homo sapiens
cctcacagcgaaacgccgcgcactcggagccggcacggctcggcgaattcagaaggagctggcggacatcactttagaccct

SEQ ID NO: 156815 - DNA, 83 bp, Homo sapiens
cggagagatgctgggcgtggcggccgggatgacccacaggaagcgttgttgacgaccatggacatcatccacgatggatttgg

SEQ ID NO: 156816 - DNA, 83 bp, Homo sapiens
gtggaaaagcagaaccttagcaaagaggagctgatagcggagctgcaggtaacacaagtggcaagacagccgggaacccctac

SEQ ID NO: 156817 - DNA, 100 bp, Homo sapiens
ctgatatctgagaacaacttaaacggcgattttagtgaagttgacgctcaagagcagagaattctcttatccaacatcaacatcttggtcagatttgaac

SEQ ID NO: 156818 - DNA, 100 bp, Homo sapiens
acgcgccctgggacaaccacgtctccggccacggtccctgtgcgttttattgcgacctgccggtgggaactttgtctccgagtcggagcagcatggagcg

SEQ ID NO: 156819 - DNA, 82 bp, Homo sapiens
gggagtgctctgttcacggctccatcgctgttacttcgagagctgtgcccaggagtgaacaaccagccctacctctgtgaga

SEQ ID NO: 156820 - DNA, 75 bp, Homo sapiens
cgctgcagggggctgcgcctgcctgctccgccccagacctgtcggcgaaagggctggagtgcggtggcgtgatct

SEQ ID NO: 156821 - DNA, 100 bp, Homo sapiens
tcaaagaagtttgtccttctgctattgatcctgaaggaggatcagctgatttattcggaggatttgctgactttggctcagctgctgcatcaggcagttt

SEQ ID NO: 156822 - DNA, 98 bp, Homo sapiens
taccagtgaaagttgtggtggatgtcttaagacaagcttctaaggtttccattaactttggaccatgcttcaagtatcctccgaaggatctcacttac

SEQ ID NO: 156823 - DNA, 75 bp, Homo sapiens
cggagctgcagtcggcactgctactgcgaagacagctggcaggtttggtgcacctcgatttggaggaagtagggc

SEQ ID NO: 156824 - DNA, 100 bp, Homo sapiens
gcacttttcatgcctgtagaaatgagaatgacagctgtgataaaaaaaaaattcatctgggcggtatctggaacttggttggcctgtcaggccatgaggc

SEQ ID NO: 156825 - DNA, 100 bp, Homo sapiens
aaggaggtgctgaagagcgaggaggtttggtgcacctcgatttggaggaagtagggcagggcccttatctggaaagaagtttggaaaccctggggagaaa

SEQ ID NO: 156826 - DNA, 76 bp, Homo sapiens
ctcaaatgcaagtccaagaggaggaggaggcggaggtccaagcggaaagcttcctgcctgacacagctcacttcaa

SEQ ID NO: 156827 - DNA, 98 bp, Homo sapiens
atccttcaaaattaaaagaggagcagcatggcatttcagtcactggtttgcagagtccagaggaggaacccgttttcactagacaagacagcaatcgc

SEQ ID NO: 156828 - DNA, 95 bp, Homo sapiens
catttagattggattctgaatatcaggttgctgtgagtctaggtactccaattatgaagccagaatggatttataaagcttgggaaaggcggaat

SEQ ID NO: 156829 - DNA, 76 bp, Homo sapiens
gccgccagtgtttccgtcagtacgcgaaggatatcggtttcattaaggtgcagcagtgaacagcagtgagagtctc

SEQ ID NO: 156830 - DNA, 51 bp, Homo sapiens
gcggcttgggagcccgcacgccctaggctgctggagccagttctgcttctc

SEQ ID NO: 156831 - DNA, 95 bp, Homo sapiens
cctctccagctcagccgcgtagatctggacgttggtggttggctatgtgttgactgtttcattcaagtggaatgcaagcactgaacgctacttga

SEQ ID NO: 156832 - DNA, 75 bp, Homo sapiens
gaaacaccatggctgcggcggcccagctctctctgacacagggaaagcaggcaggatgggagagtcgccgataga

SEQ ID NO: 156833 - DNA, 75 bp, Homo sapiens
gagatccgtccagtctgccgcaagttcatgcaagatatcctctggaccttctccatctacctggagtcagtggcc

SEQ ID NO: 156834 - DNA, 95 bp, Homo sapiens
gtggaatattaccagtcagaggcggaaggactcctggaatgccacaaatgcaaatacttgtgcactgggagagtgaagctgtggtctaccaatct

SEQ ID NO: 156835 - DNA, 90 bp, Homo sapiens
agctgattaaggactatcgggagaaagtggagtccgagctgagatccatctgcaccacggtgctgaggagaattctgcctaagccaactc

SEQ ID NO: 156836 - DNA, 50 bp, Homo sapiens
agggtcctttatatagaagggagagtaggagggcatcctggctgtttcac

SEQ ID NO: 156837 - DNA, 98 bp, Homo sapiens
gtatttgtggcttaaactcttggcatttggctttgcctttctggacacagaagtatttgtgacaggtgttggctacgtttgtggttttaagaaagcct

SEQ ID NO: 156838 - DNA, 75 bp, Homo sapiens
ggctgctggatggaggggattttgtcagcttgtcgtcaagttacatggacacagaacagtatgaagaagcagtac

SEQ ID NO: 156839 - DNA, 96 bp, Homo sapiens
cggctgcgcgtggctggggaggcgaggccggacgcacctctgtttgggggtcctcagcttggacgaaccttgacaggatgggtgcagcgaactttc

SEQ ID NO: 156840 - DNA, 112 bp, Homo sapiens
agctgattccctggaagtggtccttgccaatctccgagttccttcaaaaaggtctcttgcaacgtgtgagctgcctcttgccaagagtgagtggcaaaagaaactaaccccg

SEQ ID NO: 156841 - DNA, 75 bp, Homo sapiens
cttgtcctggctcttgccctcatcctggttctggaatcctcagttcaagcttggtgatccagctatttttcctgc

SEQ ID NO: 156842 - DNA, 100 bp, Homo sapiens
attttcatcacatcatatgtcaggccagtgaaattctgggagaaaaactacaatggttctcaccattcaggaagcccttcagctcactgttcaaaaagta

SEQ ID NO: 156843 - DNA, 75 bp, Homo sapiens
gcacagctgcccctgcctatgacagaggactatctcaaacggaagattcgttcccggccggagagatcggagctg

SEQ ID NO: 156844 - DNA, 100 bp, Homo sapiens
atacttgggcatacattgctgcagaaggtgatcaggaggttttagacagcgtgtgccaagcagatgagaattcagggacagaatgatgctgctgaaattg

SEQ ID NO: 156845 - DNA, 76 bp, Homo sapiens
aacgatggttctgcttaacaagcagagagctcacctaccacaaacagccaggtgatttgaagatattaaagctaga

SEQ ID NO: 156846 - DNA, 100 bp, Homo sapiens
gacagccgacgcgcagatagcagagccatccttggggtacaccagaggatcgcttcctggcagaatttgggagctgtttattgcagcactgttgtgccct

SEQ ID NO: 156847 - DNA, 74 bp, Homo sapiens
ttccagctgtttgaccgaacaggcacagtgtggatacaagtccaggatatcatgagtcagattccaagaagtct

SEQ ID NO: 156848 - DNA, 100 bp, Homo sapiens
tgcatcagtgcccttgtggcgaatggggctcacgtcgatggcagctctcgccgtcgggattactatgacagaggatatgatcggggctatgatgatcggg

SEQ ID NO: 156849 - DNA, 74 bp, Homo sapiens
cccgacagaccagaaactcatcccagagttcattaagaagggccttcatcctagaataatcactgaaggatttg

SEQ ID NO: 156850 - DNA, 100 bp, Homo sapiens
cggtggcagatgacacctgtttggagaagctcctggactggtttaaaacggtcactgaaggagatgtgggcgctatctccaactgtctttgcacttctga

SEQ ID NO: 156851 - DNA, 50 bp, Homo sapiens
cagcaactggagcagcttcatcttccagggccagccaagtctcgggatgg

SEQ ID NO: 156852 - DNA, 100 bp, Homo sapiens
ctgactgctgggaatgaagcaggatcaatgatgggataaaaatcaaggattgactttgaagatgtgattgcagaaccagaagggacacacagttttgacg

SEQ ID NO: 156853 - DNA, 51 bp, Homo sapiens
attctgaactcaggacttggcaataatgtgtgtggctggtattggacttgt

SEQ ID NO: 156854 - DNA, 90 bp, Homo sapiens
ggtacctctccttttccctctccctttccctaagggagtgcatccgccccaacccttttccccctcgtctcctgtgagaattccccgtcg

SEQ ID NO: 156855 - DNA, 75 bp, Homo sapiens
catggataagcatgccctgaaaaagtatcgtcgagaagcctatcatcggtttttcacgactgaaaacaacatagc

SEQ ID NO: 156856 - DNA, 84 bp, Homo sapiens
ctgaaatggaagcatatgttctagaagacattcttgagacaatgcagatcttcgtgaagactctgactggtaagaccatcaccc

SEQ ID NO: 156857 - DNA, 93 bp, Homo sapiens
gtcatgtggcagtggaaaatgcgctcgggctggaccagcagggggatatgagactttctactcggaatatcctgagtgttgcgtggatgtaaa

SEQ ID NO: 156858 - DNA, 100 bp, Homo sapiens
gggaactgaacgcggttctgggagcagcaagcccacgggtagcagccgaggccccagaatggccaaacttccagatctgcaaccatttccttctccagat

SEQ ID NO: 156859 - DNA, 100 bp, Homo sapiens
ctctggccagctgactgcacttcttttttgagaaaggaaggaatatatcctgactgatttgtgtgctgtatttatggagtttaaagattaatcatcccaa

SEQ ID NO: 156860 - DNA, 99 bp, Homo sapiens
ggggcgggtctgagtggtaccccggaggagaccctttgaaggtcccttgtggggactggaaagaggacggtgattgaaatctctgaatatcgaacccag

SEQ ID NO: 156861 - DNA, 75 bp, Homo sapiens
ccgtgccctatcgcctggagctggaccaaaagaccagaacttctgactcacagtaccactgaagttactcagcca

SEQ ID NO: 156862 - DNA, 51 bp, Homo sapiens
aagaaaggccagggaacggcagcaacaggacctgcctcctgcctgcccctc

SEQ ID NO: 156863 - DNA, 74 bp, Homo sapiens
cgatctacggggctgacatcagcggctctttgtatgatgacatgctggacgagaaccaccacctgatccagtgc

SEQ ID NO: 156864 - DNA, 82 bp, Homo sapiens
ccgagcatcactgtgccctccccacaaaggccgccatggcatcagatgaaggcaaactttttgttggagggctgagttttga

SEQ ID NO: 156865 - DNA, 75 bp, Homo sapiens
gttgtatcttgggagaaagacacagtctccatcatcccaggtgctttggctctagcagacaggaagaaattctgg

SEQ ID NO: 156866 - DNA, 75 bp, Homo sapiens
ggtcgaccattccaaaaaaatcggaggatttgacagctaaggatattgaagaaattattgatgagctcaaggctg

SEQ ID NO: 156867 - DNA, 83 bp, Homo sapiens
cgctcacctgcgctgtgatgcctgcagagctgtggcttaccaggtggtgaatgcagtcaactgcagtctgttctcagctgtgc

SEQ ID NO: 156868 - DNA, 80 bp, Homo sapiens
tggctgtctccagaagctgctgtttggaaaggtggcaaaggatagcagcagtccgtagttcgtggtccttcgccggtgtc

SEQ ID NO: 156869 - DNA, 136 bp, Homo sapiens
tccacttcagcttctttgtcaccataggagacatggacgaagccttcaaatccatcaagctcatcaaaaggaaatggcaactgctgacaggaagtttggcatccacctcccccagcctcctgagtggacaggggcc

SEQ ID NO: 156870 - DNA, 101 bp, Homo sapiens
tctgccatctcttccgagaaactttaattaacaaaggttttgtggaaatccaaactcctaaaattatttcagccagtattgcaggaaggaggtggaggccg

SEQ ID NO: 156871 - DNA, 82 bp, Homo sapiens
gatagttctcagaaagacctgctgaattttactggcacaattcctgtgatgtatcagggtcccagtagggatggcacaatca

SEQ ID NO: 156872 - DNA, 51 bp, Homo sapiens
cctgagcctgacgcgggccgcgcgggtaaaagtacacctgtaagccagctt

SEQ ID NO: 156873 - DNA, 100 bp, Homo sapiens
tgaatgaaatgactcttagcactttgaaagaaaaaggctacaaagctgctttcattggaataggtgacttaagagattaaaattaatttggttgctgttg

SEQ ID NO: 156874 - DNA, 82 bp, Homo sapiens
cgttgcgtgccctacttcaaggataagggcgacagcaacagctctgccggctggaaggattttttatcaagcagaaatgcat

SEQ ID NO: 156875 - DNA, 75 bp, Homo sapiens
acagctattggatttcccacccagaatctttaggtaaatgagctgagatctgtatctgtggacctgaatgttgat

SEQ ID NO: 156876 - DNA, 90 bp, Homo sapiens
cttttctctctcgtcctcgctgctgtacttcgtctatgtggcgcccggcataggattttaaacaatttgaacctaatgacttttatttga

SEQ ID NO: 156877 - DNA, 75 bp, Homo sapiens
cgaagatgggggatttctacgacccggagcacccgacccctgaaggttggaaagaaccatgactgtattcaggaa

SEQ ID NO: 156878 - DNA, 100 bp, Homo sapiens
ttctggactaattgaagaaaaaagtaaactacttgaaaaatttagccttgttcaaaaagaggttatcagttgattgggagccactcgggggtgaagcttt

SEQ ID NO: 156879 - DNA, 75 bp, Homo sapiens
tgctgccaacgccccggtggagaagctgagttgtcgagatgtccacagaaggaggatttggtggtactagcagca

SEQ ID NO: 156880 - DNA, 97 bp, Homo sapiens
tcgccgagcgcgccgcgtagacctccgctcccccagatgaacgggaccgggttcagaagaaaacgttcaccaagtgggtcaacaagcacttaatgaa

SEQ ID NO: 156881 - DNA, 74 bp, Homo sapiens
cctacccctggccctacggccgacagacggggtccccacggagtctggaccatggaggagcgaggtctggcccc

SEQ ID NO: 156882 - DNA, 90 bp, Homo sapiens
gaaagatattaacaccactgcccagctcaagtgctgtggcttcaccaactatacggattttgaggactcaccctacttcaaagagaacag

SEQ ID NO: 156883 - DNA, 90 bp, Homo sapiens
tatacaaaagatagagctgctaaatgtaaaattccagccctggaccttcttattaaggcaggaagttatgttcgtgatgatgcagtcccc

SEQ ID NO: 156884 - DNA, 90 bp, Homo sapiens
ccggcaagagcggcggtagcgcaggggagattacttttctggaaggccagagaagatgtgatccacatgctgaagacagagaaaaccaag

SEQ ID NO: 156885 - DNA, 95 bp, Homo sapiens
aactccgccgcccaccatggcttccgaggagctgtacgagcctcaaggaataggttctcctagtgtctatcatgcagttatcgtcatctttttgg

SEQ ID NO: 156886 - DNA, 82 bp, Homo sapiens
cggcggggctgaccacttaccgcagcatccaagtcggccctggccaccagcccctcgggttccaagatgcagctactggaga

SEQ ID NO: 156887 - DNA, 95 bp, Homo sapiens
catcctccttgaagtatttggctgaggagttttcaatcccacctgaagagttgagagaaatcattgagaagacaagagagatggagcagaacaat

SEQ ID NO: 156888 - DNA, 125 bp, Homo sapiens
gcatagggcattacttcttttagtttgttgcctggacttgggagttgggcccagagctgcaggaagctttcaccttcttcgatcccaatgacccggcgtgccaggagatcctgtttgaccctcag

SEQ ID NO: 156889 - DNA, 100 bp, Homo sapiens
aaggctcttccctgaccattttctactgtccctgcgcgaggtatggaaggctttgttacaagaaatgccgcttactgcattactaaggaatctaggaaag

SEQ ID NO: 156890 - DNA, 75 bp, Homo sapiens
ctgcctacggaggtggcagccatctccttctcggatgcttatagaattttatgagtcaccagatccagaaagaag

SEQ ID NO: 156891 - DNA, 100 bp, Homo sapiens
catctcacttacacctgacccagagcctacccatgaaggtggtggaagatggatatgaattttttgctaaacgacagttggtaaccttattttcagcccc

SEQ ID NO: 156892 - DNA, 90 bp, Homo sapiens
gctgtgaagctgggaactgatctagaatatggccactgcctccaccatggctgaggctttctctaagacaacctctgaggaagaccagag

SEQ ID NO: 156893 - DNA, 83 bp, Homo sapiens
cgtgccggctcttcaccatcccgttttccagcaagcaaattgtggctactaatttgccccctgaagatcaagatggctctggg

SEQ ID NO: 156894 - DNA, 99 bp, Homo sapiens
gctgaatctgccgcagctagaaatgctcaagaaccagctggaccaggccttccactcccgagatgaagctcagacacagtactcgcagtgcttaatcga

SEQ ID NO: 156895 - DNA, 98 bp, Homo sapiens
cgaaggtgaagatggctgcctctgcctttgctggtgcagtgagagcagcttcagagcctccattatggcatgctgaatttaccaaagaagaattggtt

SEQ ID NO: 156896 - DNA, 50 bp, Homo sapiens
gtaagctgtgatctcagtatacaaagtttactaaagcagtgaagcacttt

SEQ ID NO: 156897 - DNA, 98 bp, Homo sapiens
gaagcgtggccggcagcgtcccggacgaggaggattgtcagctgacctctgtcctgtgtgcccagtggccccaggtgacgtgtcttcaagaagaggct

SEQ ID NO: 156898 - DNA, 83 bp, Homo sapiens
ccgcccttgatcttcgctgtggcatggcggacgaggggaagtcgtacagcggtcataactccatgcaggaagctcatcttgtg

SEQ ID NO: 156899 - DNA, 75 bp, Homo sapiens
ccaagggtttctaactttttgtcttggaaaggaaaaccactacctgacgttttcgaagatgccttggaaaccatc

SEQ ID NO: 156900 - DNA, 100 bp, Homo sapiens
cagtgcccagagtgccctcttcttgcagcatggcctggccacccagagggcccttgtgtccaagtcccgcaggtactatttcctaagtgaggaggctgag

SEQ ID NO: 156901 - DNA, 83 bp, Homo sapiens
gagcgacaagccgctggcagccgcggatctcaccgccgctcagggcctgacctctcgggacacacccagccctgtggacccag

SEQ ID NO: 156902 - DNA, 100 bp, Homo sapiens
cggagaccccgaaaacggaagcgcagggagaaggaagaggtgtttgaaaagtgggtaattccagaattgattggccataccattgtcactgtattactgc

SEQ ID NO: 156903 - DNA, 100 bp, Homo sapiens
tctggagagcttgacattctcaaagactggtgctatgaagctgtgcggcggcagcacatggagcgttgtaccagcttcctggtggatgagctgggcgtgg

SEQ ID NO: 156904 - DNA, 100 bp, Homo sapiens
cggatctccatcgttaagtgacgcatgactagtcaagaattgaaggttggctttcagtaccaaatagaggaaatatcaaacgatatggctggaagaaaca

SEQ ID NO: 156905 - DNA, 82 bp, Homo sapiens
cctgtgtcccacttgttcgcggcctataggcatcagaacacaccatgatggctgtgacctaagaccctcaggaagccccggg

SEQ ID NO: 156906 - DNA, 58 bp, Homo sapiens
tgtgtgcgcgctcattgccatgatggccctggccactgcagtcatcccccagtggcag

SEQ ID NO: 156907 - DNA, 82 bp, Homo sapiens
tgggatcccggccaccagcaattgtccggtactccaaagattcaggtttactcacgtcatccagcagagaatggaaagtcaa

SEQ ID NO: 156908 - DNA, 114 bp, Homo sapiens
aatatgagaaagaatatcagacaatgcgagagagtcagctgcaacaggaagacccaatggatagatacaaggctagttcaggggatacgataaaagatctccaaatgtgtcctg

SEQ ID NO: 156909 - DNA, 101 bp, Homo sapiens
ccgctggcagcctgaagagagtcgctggccgtggtcgccgctaggaccaaacctggaccacccaaaaagccgaagaccccttcaagaccatcagccttagc

SEQ ID NO: 156910 - DNA, 74 bp, Homo sapiens
aagctgccgttctttaatatgctggatgagctgctgaagcccaccgaattagaaagtgccagcgatgccgcccc

SEQ ID NO: 156911 - DNA, 101 bp, Homo sapiens
cctgtctgggtgtcgcgggccggccccgcggggagcgcccccggcgcgatgcccttcaggaaagaatcatgtcaaccctgccatggacttcacgcagactc

SEQ ID NO: 156912 - DNA, 100 bp, Homo sapiens
cagctctcctgggaccctccaagagcactagtgtctagaaggcactaaggggtggacccggtgcctcacgatgcccccaaacctccaggctacacccgct

SEQ ID NO: 156913 - DNA, 82 bp, Homo sapiens
tggctcgctccctccctccctccctccgacgctatcgagatagacaatggggatgagttgactgcagacttcctttatgaag

SEQ ID NO: 156914 - DNA, 98 bp, Homo sapiens
aatgatacagttagaggacagatagtaggaatggaagttggatacactttgtgacttgtacgagacactgaccattacacaggctgttatttttctca

SEQ ID NO: 156915 - DNA, 100 bp, Homo sapiens
tggaagagtcatacatcaatttccttgcaattaaccaaaaaatcaaggatccattttgttggacaaagacgggaagagaaaacacacgagacccactttt

SEQ ID NO: 156916 - DNA, 101 bp, Homo sapiens
ctcggagccagaggagaggcgcccccgccggccgccgcgccgcccggcagcctcggcagttgctgatcatctgggctgtgatccacaaacccggttctttg

SEQ ID NO: 156917 - DNA, 98 bp, Homo sapiens
catatatgcgaatctataagaaaggtgatattgtagacatcaagcaatttaatactgtttccaaactggacactggagaatattcctgtgaagcccgc

SEQ ID NO: 156918 - DNA, 75 bp, Homo sapiens
ccgcggagacctacctgcggcgtcggcagctgctgctccgagagctccacgcaggagatcggtgaggagctgatc

SEQ ID NO: 156919 - DNA, 100 bp, Homo sapiens
aaggacttcgagaccctctacaatgactgcaccaacgcaaggctgctgaccctggggctgtccctcctgcatgccgatgtggttccaaatgcaaccatcc

SEQ ID NO: 156920 - DNA, 90 bp, Homo sapiens
tggccggaggagtctcagagctgtcagaaagaatgtcaaaactggaccaatggggccaggctgaagtattgaactttctgctacgctacc

SEQ ID NO: 156921 - DNA, 92 bp, Homo sapiens
ctgaagaggagcgccagatggtggaggaatacacttatttatgaatgagaaggcaaccaaagtgcaggacatcaaaaacaacctgaaagagg

SEQ ID NO: 156922 - DNA, 95 bp, Homo sapiens
ggagacctgcaggctgcgtgtaccattcttgtcaacgcactgatggatttccaccaaagccctgggcgctgcctatggcacagccaagagcggta

SEQ ID NO: 156923 - DNA, 89 bp, Homo sapiens
atccgggggcaaggccaaaaagaagggtccgcaagcaggtggtgaacatcccgtccttcattgtccgcctggattcccagaagcacatc

SEQ ID NO: 156924 - DNA, 90 bp, Homo sapiens
gtgccacatcctagcccctttccttactggatcctcaaaccagaagaaaacctgaatctctgagcctgtgggccaaagctgaccaactcc

SEQ ID NO: 156925 - DNA, 82 bp, Homo sapiens
cggggccccgggatctcggctgtccttcctcccgtgagaagcgccaccttcaagtgaacgtcaccaacccagtacagtgcag

SEQ ID NO: 156926 - DNA, 98 bp, Homo sapiens
ggtaaagacagcttctgggccaaagcagagcttggaatccacgaagactccactaaccgccgccgcctgtctgagctgctgcgctatcatacctccca

SEQ ID NO: 156927 - DNA, 100 bp, Homo sapiens
cattagcatgggatccaacgacagagattatttggtagcaattgaagagaaaaacaaagctacatttctacgtgcttatgtgaactggagaaataaaagg

SEQ ID NO: 156928 - DNA, 100 bp, Homo sapiens
cggtggcctcaccagcctccagcagcagaagcagcgcctgatcgagtccctccggaactcacactccagatatttcagttgaaggaagaaatagctcttc

SEQ ID NO: 156929 - DNA, 74 bp, Homo sapiens
tcttcttctgaaaaagagatcttgatgctggtttttcagcagcagacagagaagccagtctggagcttattaaa

SEQ ID NO: 156930 - DNA, 115 bp, Homo sapiens
tccttctggcatattgctatgaaacccgtgtcactgaaggagagaagaatcatgattatgatatgagggtggatgatttccttcgtcgcacacaagctgttgtcagtggccggag

SEQ ID NO: 156931 - DNA, 98 bp, Homo sapiens
cggcgcccatccgcaggctggagtggcagaagcagacttcagaggtgtctgatgatttgtgagcctcaagtgactactctgtggaatcatctgtcctt

SEQ ID NO: 156932 - DNA, 50 bp, Homo sapiens
cccagacaggtggcgacggcagaggagactcagttgcctttgaggatgtg

SEQ ID NO: 156933 - DNA, 75 bp, Homo sapiens
ccctcacatctatgccatcacagacaccgcctacaggagtatgatgcaaggcacaatcattagcggcatcacttt

SEQ ID NO: 156934 - DNA, 98 bp, Homo sapiens
ccaaggtcaaagtgggtaaagaagactcatcatccactgagtttgtagaaaaacggagagcagctcttgaaagatttggagcaagaggtggtggtggc

SEQ ID NO: 156935 - DNA, 90 bp, Homo sapiens
ggaaactgacggagacgcagatgtggacttgaaagaagctgcagcggaggaaggcgagatgtcatctgggtgattctcagtgtggaggtg

SEQ ID NO: 156936 - DNA, 90 bp, Homo sapiens
ggcgtctcatggcgttggaataccggctctcagcggctgttatcaatactctggctgaccatcatcatcgtgggactgactttggtggaa

SEQ ID NO: 156937 - DNA, 100 bp, Homo sapiens
ctctggttatgatagtcgttctgcacgtgcatttccatatggcaatgattttcagctgaactctcatctctcaacactggcaaatattcataagatctac

SEQ ID NO: 156938 - DNA, 74 bp, Homo sapiens
cgaaatagctaaagaatctgccaaatctcctgtgattgtagacagggaaagcaggcaggatgggagagtcgccg

SEQ ID NO: 156939 - DNA, 100 bp, Homo sapiens
gtacctgcataactatggcatcgtgcaccgtgacctcaaaccagacaaattccaactccacagagtgaccagagagaggacgtggctgaagacaccaaag

SEQ ID NO: 156940 - DNA, 100 bp, Homo sapiens
cttccccagtaccacggcccggcgcctgcactcgtttcctgcaggagagtactcttggaagctggttcatcccacagacaagttctgcaacaaggactgt

SEQ ID NO: 156941 - DNA, 96 bp, Homo sapiens
gagaagctgaagcattgcttcaaagcatggggctaactccagaatcccccattggtctgataccacaacttataggggttgctccagaaaaggcca

SEQ ID NO: 156942 - DNA, 82 bp, Homo sapiens
gggaccacggtcaccgtctcctcaggcaaagcgaaggctggagctaggagaaagcggtcatcagtacctctcagatggttta

SEQ ID NO: 156943 - DNA, 75 bp, Homo sapiens
caacttcggggagctccgcctagtgaagatagtgatccggggagacaggaacacgggcaagacagcgctgtggca

SEQ ID NO: 156944 - DNA, 100 bp, Homo sapiens
gacaacgaaatagacaatggactccatcccactgaggaccgaacacagcctattggatccctaggctcaatatgtcctaatagttatggaagtgtgaaag

SEQ ID NO: 156945 - DNA, 75 bp, Homo sapiens
gtgaccgagaccgcggccgggaccgaggctcctgcccctcctaaagctgaagccaaagcgaaggctttaaaggcc

SEQ ID NO: 156946 - DNA, 135 bp, Homo sapiens
ccaaactggaaatgctctgacagagaatgagatgaccacaattcactatgatagaattacttctctacagtgtgatgcctaccaacatgttatgatgcagcaagaaggctctcaccagatggtggcatctttata

SEQ ID NO: 156947 - DNA, 83 bp, Homo sapiens
ccgcgccgggagcggcgctggccccaaggcgctgccctgcgcaggctgtgagccgtgagctttgaggcggtgggatgtgtcag

SEQ ID NO: 156948 - DNA, 75 bp, Homo sapiens
ctggactgaaagaggacacgggaagaacaaagacttagactcggctcctcctgctggaccctccagccccgggcc

SEQ ID NO: 156949 - DNA, 75 bp, Homo sapiens
ccgccatacgcgctctccctgtttaggctaactatatgtcagaaagcatcagcttttctcgatggacccattcat

SEQ ID NO: 156950 - DNA, 83 bp, Homo sapiens
gggtgtacaaatacccctttgaattaattatggctcccgtggaagccaccgatgatgccttttgggaccagttctgggcagac

SEQ ID NO: 156951 - DNA, 50 bp, Homo sapiens
cgccgcccgtccacacccgccgccagacgggaggcgtgggcagcttcgac

SEQ ID NO: 156952 - DNA, 87 bp, Homo sapiens
gatctttccggatcaatccagatggcagccagtcagtggtggaggcaccaccttccatggtcaataatgaacaacgccagcatgcag

SEQ ID NO: 156953 - DNA, 75 bp, Homo sapiens
gcgaggtccgcgcagcccagcgcagccatgcatctgcatctgggaccgacctcctgggctggctgatcaaagagg

SEQ ID NO: 156954 - DNA, 50 bp, Homo sapiens
gtgagatgtttcatcccaacagtgaggaagatcttctcagtcctccccag

SEQ ID NO: 156955 - DNA, 78 bp, Homo sapiens
gtctattatctttgcaaattatattgccagagacacacgtcgccttggcgcaacaagatgctccaggatgaaacgcca

SEQ ID NO: 156956 - DNA, 88 bp, Homo sapiens
gttcgaattgcctatgacaggcctcggggtcgtcccatgtccaaaaagaaggatgatgatgacgacatgggagaggatgaagatgagg

SEQ ID NO: 156957 - DNA, 100 bp, Homo sapiens
ccgagtggggctggaaacagacccggcgcccagcggtagccctccttgcgcctccgattcccaggaaactaaatatattttgccaactttggaaaaagaa

SEQ ID NO: 156958 - DNA, 75 bp, Homo sapiens
cctggtgaccgagcacccgcctccgggcatcttcaactgtgggcctaccatgactttttcaaccggtatcgggtg

SEQ ID NO: 156959 - DNA, 90 bp, Homo sapiens
tcgtctcttacgtctgcggaagtgcagctgcctcagttcttagcgcagacatatcaagtggatttgaagcccaatgggtcagaaataatg

SEQ ID NO: 156960 - DNA, 76 bp, Homo sapiens
aaatcaacctgctcaccggggagtctgatacacaggtaatctgtaagtcagatgctccaacaggggatgttcttct

SEQ ID NO: 156961 - DNA, 75 bp, Homo sapiens
cgcggctactacaaccagagcgaggacgatcgtgcagaatggacgtctcatcgtttccacagaatgcggccatgt

SEQ ID NO: 156962 - DNA, 83 bp, Homo sapiens
gtctgggtctcagccgccaaagaccccgtccggttttaaaatcaaagatgggaaaatcggagaaaattgcccttccccatggc

SEQ ID NO: 156963 - DNA, 87 bp, Homo sapiens
aacattgatgtacgagaaccagagcttgaagatttgactagatacgatgttgtttgcagatgctgaaggttactttgctgcttgcac

SEQ ID NO: 156964 - DNA, 86 bp, Homo sapiens
ccctgcagtacctgcagaaggtctctggagacatcttcagcagcggagctggagtttgttcagatcatcatcatcgtggtggtgat

SEQ ID NO: 156965 - DNA, 50 bp, Homo sapiens
gcagttgcgtgttgttcagaaagtggttagcaggaagaagatgagcctta

SEQ ID NO: 156966 - DNA, 51 bp, Homo sapiens
agactcatacgcaacctcaatggggccaccaaggacatggggaagatgctg

SEQ ID NO: 156967 - DNA, 82 bp, Homo sapiens
gtcatccagccttagcaaaccagagttctaattgtggagtggtaaatatatacaatcaagattcttgtctccaagaaacaaa

SEQ ID NO: 156968 - DNA, 100 bp, Homo sapiens
acttctgcccagctctccttgaacatacatatgatagttgagaaagacacatattctgatcatgaagaaataaacacaagttaaatatgactaagcagaa

SEQ ID NO: 156969 - DNA, 74 bp, Homo sapiens
gactactggggccagggaaccctggtcaccgtctcctcagaccaaaggtgagaaggtgcggactacagagactc

SEQ ID NO: 156970 - DNA, 83 bp, Homo sapiens
cgaggccctcatgtaccacacggtgcgtatagcagcaaaattcatcattcatgcccctcctggagaatttaatgaggttttca

SEQ ID NO: 156971 - DNA, 51 bp, Homo sapiens
gcgcccggccggacccgggcccgagagcccagccctgaccctgctgctggt

SEQ ID NO: 156972 - DNA, 101 bp, Homo sapiens
cctgtaggatccactggcgtcatcaagtcaccaagctggcaacggccaaaccaaggaggatctaagcctttcccacgttatggttataaaccctccccacc

SEQ ID NO: 156973 - DNA, 100 bp, Homo sapiens
gcccggccacctctgagaagggagacgacgctgctgggtccgctgagcggggcgacccgaggtagctgtagccatacctaatagacctcctgatgctgta

SEQ ID NO: 156974 - DNA, 74 bp, Homo sapiens
cactttggataccgcgtcctgcaggtcggaaacgggctaaagtaaataatgccagcctgattggactgggttat

SEQ ID NO: 156975 - DNA, 100 bp, Homo sapiens
gaagagtttgaaagcgtgctccacaaatatttacagtcggaggagtactcggtgaaatcctgtcctgaagactgtaagacgtttgatgcaaatgatttgt

SEQ ID NO: 156976 - DNA, 100 bp, Homo sapiens
aacgcactcctcagagtccgactctcccacctgctaagatgcctgtgaggagccaccaacatttgaagctatggagctcattggtaaaccaaaaccctac

SEQ ID NO: 156977 - DNA, 90 bp, Homo sapiens
ggcatttatcgggtgagcgggaacttggcagtggtccagaagcttcgctttctggtggacagagggtctggaacagaatctgacagtgat

SEQ ID NO: 156978 - DNA, 74 bp, Homo sapiens
aggcccagttcagccagatcctggagacaatgcagatcttcgtgaagactctgactggtaagaccatcaccctc

SEQ ID NO: 156979 - DNA, 100 bp, Homo sapiens
aaacggcttccgacatgcccgcaacgtggacagggtcctctgcagcttcaagatcaatgactcggtcacactcagtatatttgcttacttaaactaccat

SEQ ID NO: 156980 - DNA, 100 bp, Homo sapiens
tgcacccccagtgggtgctcacagctgcccattgcctaaagaaataggaaagctgtgatatcacaaggaatgctgaaatgtgttggttcttcaatgttcc

SEQ ID NO: 156981 - DNA, 101 bp, Homo sapiens
tgaaagccctacactgctgtagaggtcatgctggaagtgtagattctatagctgttgatggctcaggaactaaagtctctaattaacagaagatggcaaag

SEQ ID NO: 156982 - DNA, 83 bp, Homo sapiens
ggatcctttatcctggtcatcttctatttccaaaaacatgaaaggctcccggagcagcgctgactcctccaggaaacactgag

SEQ ID NO: 156983 - DNA, 101 bp, Homo sapiens
ctcggcggccccggcgccggcaaggggacccagtgcgcccgcatcgtcgagggaaggtattcatgtaaatcaagaattactgcaaatatctccttgtatca

SEQ ID NO: 156984 - DNA, 75 bp, Homo sapiens
agcgtcgtcgcttcactgtggctcatacatggaataagacgagttggaagaagacctgatcaacaacttcagggt

SEQ ID NO: 156985 - DNA, 82 bp, Homo sapiens
aatatctgtcttcggtggactccttcggcagtccacccaccgccgccgcctcccagggagcatcgagtacagctgtccggcc

SEQ ID NO: 156986 - DNA, 82 bp, Homo sapiens
ggtcaacgaccggtggcagcatctcctggacctcattgcagccagaatacctcctctgaaaaatggcagaagcagttttcca

SEQ ID NO: 156987 - DNA, 100 bp, Homo sapiens
tgtggaggaagaacatgcatatttgggtccaactgtgaagccagatgataagctgagatgagtgaactgagtgtggcacagaaaccagaaaaacttttgg

SEQ ID NO: 156988 - DNA, 75 bp, Homo sapiens
cctcccaagtagctgggattacaggaccgagtctcctgccattccgagcaggcctggtatgggtaatggtgtgaa

SEQ ID NO: 156989 - DNA, 100 bp, Homo sapiens
ctaggagtatgccagatggaagaaccattgttagtgaacgtggacaaagctgttgtctcagggagcacagaattgccaccttccagagaagaggtacgag

SEQ ID NO: 156990 - DNA, 100 bp, Homo sapiens
cgccgccctacagcatggcgcccgccatggtgaacagctcggcagcaaatttctgtggtccctggaaaagtacagatgatcctggacttacagtggggtt

SEQ ID NO: 156991 - DNA, 99 bp, Homo sapiens
tggcggccaatgtgggatcgatgtttcaatattggaagcgctttgatttacagcagctgcagtcccacgcctttgacatctcatccttcagtccctttg

SEQ ID NO: 156992 - DNA, 125 bp, Homo sapiens
ctagctggaaacccatttccaatcagtcatgggaccagaagtttacactggaactggacaggatatgcaagaactgtacaggttgctttgatcgacacatcccatgtgtttctctgaactgccca

SEQ ID NO: 156993 - DNA, 75 bp, Homo sapiens
gaaatgatttcctcaggactccagattatctacaacactgatgagttggttgaaatgttggatatgtctgtccct

SEQ ID NO: 156994 - DNA, 75 bp, Homo sapiens
ctggactcgccctcctatgtcctgtacagcttaattgactggaataatcctgccatcattaataagatgtacaag

SEQ ID NO: 156995 - DNA, 95 bp, Homo sapiens
attactgaaggtgtcccgggacaagaggctgatatccccaataggtttgaaatgaaacttcacagaaataacatatttgaagagtcctatcggag

SEQ ID NO: 156996 - DNA, 75 bp, Homo sapiens
ttgctaactttgcacatttcaacagtcatgcagatgaagatcagcttcgtgcaaagggttatgacaaaacaccag

SEQ ID NO: 156997 - DNA, 98 bp, Homo sapiens
ggcttttcttgacaatggaccaaagacgatcaatcaaattcgtcaagatgcagtaaaagttcactttgatggctggaacaattgctatgattactgga

SEQ ID NO: 156998 - DNA, 100 bp, Homo sapiens
ggtgaggcaggctcgcctcctccagctgttgttgctgctggttggatggcaagcatgtggtgtttggcaaagtgaaagaaggcatgaatattgtggaggc

SEQ ID NO: 156999 - DNA, 87 bp, Homo sapiens
cgccgccgcttgtgctgcagccatgggagaatgaagttgaagaggtaaaagaggagggtccaaaagagatgactttggatgagtgga

SEQ ID NO: 157000 - DNA, 100 bp, Homo sapiens
acaagcaggctttcctggaggccctggatccccaggcctgccagtgattcgcctttgccagtctcatctcgtgtctgctttgttaagttccatgatccag

SEQ ID NO: 157001 - DNA, 100 bp, Homo sapiens
acggccacgaggagtctaaggacacatccaatttccattcgcatccaaaatggaatccgagacagaaagaggaccttagttttcggctttgtgagaaacc

SEQ ID NO: 157002 - DNA, 100 bp, Homo sapiens
gaagagtcctgaccacaatggggaggacaacttcgcccgggacttcatgaatgcaaagtatggcgaaatccactaaatttatttaggggtgctgaataca

SEQ ID NO: 157003 - DNA, 96 bp, Homo sapiens
cttggatccacttccccatctgtaacgaggtgttgagacgaggcagcacaacaagattcgcagcgtggaggggagccagctgaaggcctacctttc

SEQ ID NO: 157004 - DNA, 98 bp, Homo sapiens
agcccgcggcgctgagccagccgggacggacatgcgcgggagggcgccgcggggcagccgccgctcctccgggaaaaagcttgtggtgaaggggggca

SEQ ID NO: 157005 - DNA, 75 bp, Homo sapiens
ttggttcacacgctgtgtcccgattctataacaatagctgagatgctgaaattttcttctaaggagaaatatccc

SEQ ID NO: 157006 - DNA, 96 bp, Homo sapiens
caagctctaaattgtaaattctataaaagcatgaaaatttatgtggaaaatttaattgactgccttaatgaaaagtttgtgaagtgtggatatgca

SEQ ID NO: 157007 - DNA, 109 bp, Homo sapiens
ctggatttccaaggaagaatttcctctgaagcaccggtactccaaagattcaggtttactcacgtcatccagcagagaatggaaagtcaaatttcctgaattgctatgt

SEQ ID NO: 157008 - DNA, 75 bp, Homo sapiens
gaaacaataggacggaaacgccgaggaacccggctgaggcggcaggtccaggtgcaggtacagcagtctccgcaa

SEQ ID NO: 157009 - DNA, 100 bp, Homo sapiens
gaaaagtctggcctcggcgccaagatcccagtcacaattatcaccgggtatttagggccccccaggatctgaaggcctcccaggccccccaggcccagcg

SEQ ID NO: 157010 - DNA, 89 bp, Homo sapiens
gccttagcattgttgcagcaaagagagaaaaggaacagttccgtaagctctttattggtggcttaagctttgaaaccacagaagaaagt

SEQ ID NO: 157011 - DNA, 73 bp, Homo sapiens
tctacaggcgctgacggccacccctccagaaaaagcttgtggtgaaggggggcaaaaaaaagaagcaagttct

SEQ ID NO: 157012 - DNA, 100 bp, Homo sapiens
ggtgatggaagcaggtggaattatgccctgttggttccaatgctgggattggctgcttttcgctcagctgtcgcaggccctggaggagctgggaggccag

SEQ ID NO: 157013 - DNA, 82 bp, Homo sapiens
caaaacgtgactccccacaataactccgcagacgctccctgacggcccattggccagtcctgccagagtgccgatgttccca

SEQ ID NO: 157014 - DNA, 100 bp, Homo sapiens
tgctcctgagggtgctggaccccctgctctgcgacttcctggcttttcatgcaacacccaacacttataagcggaagaacacagaaacagctctagacaa

SEQ ID NO: 157015 - DNA, 90 bp, Homo sapiens
gaaggttcaacggggagagtgtcagactactatccaagggcaggtcagagagcagctctcctcgacgggagagaaagaaaagctcaaaga

SEQ ID NO: 157016 - DNA, 125 bp, Homo sapiens
ctcaagtatttgaaataaaaatggatgcaagtttaggaaatctatttggcctatatgaacccaatagcaatggcgagatcaaggggtccaatccagtcttcagggccaacaatacaggattatct

SEQ ID NO: 157017 - DNA, 50 bp, Homo sapiens
gaaagaagatcaagctacagatatggtagctttggatatgttaaatcctc

SEQ ID NO: 157018 - DNA, 96 bp, Homo sapiens
aacatacacatcaacccgcacttcaaagggacggtggtcacgcctgttcaagttgttgacctcctgtactggagagacattaagaagactggagtg

SEQ ID NO: 157019 - DNA, 75 bp, Homo sapiens
gtcgtagcggtcgaggcttttgcggctccggcgtgccggaaagtgctaatgccatcggtcccctggtagccttgt

SEQ ID NO: 157020 - DNA, 82 bp, Homo sapiens
ccttcggagtttgatgtgatcgtaatagggacggatttgaatataacctgccgctttgcaggtgtattccacgtggagaaaa

SEQ ID NO: 157021 - DNA, 87 bp, Homo sapiens
tacaccatcgacaccgacaactccaccgtggcgctcgccaaagagccccccaagatgaacccagtggtggagccactgtcctggatg

SEQ ID NO: 157022 - DNA, 107 bp, Homo sapiens
gacacacctccattggatttaaaagacagtcctcgtcagcactgactttcagctatggaatcgggaggaagttttattttgtcttcatcaggaagccaactaattcg

SEQ ID NO: 157023 - DNA, 75 bp, Homo sapiens
gccgatccagcctgcggagcctgtggggcagtcctcctgcaaggagaatccttttaaccggaagccatcacctgc

SEQ ID NO: 157024 - DNA, 78 bp, Homo sapiens
ttggtgtgattagcttcgcagtctggaaagctttaggagttcacagtatctcacattcttgaaggtggcattgaagag

SEQ ID NO: 157025 - DNA, 75 bp, Homo sapiens
tggttgaagaactgggaaagaaaaatgaagctgttgtcatttctggaaggaaactggcccagcagatcaagcagg

SEQ ID NO: 157026 - DNA, 100 bp, Homo sapiens
gagcacggatgccccccggagccgcgggctggcagaggattccacagatgttggtgaggaggacagcttccttggtcagacttctattcacacatctgcc

SEQ ID NO: 157027 - DNA, 100 bp, Homo sapiens
ggaggaggagcgcaagaagcggctcggccccggcggcctggaccccgtcgaggtctacgagtccctccctgaggaactcaaagtgaaaggtcccaaggac

SEQ ID NO: 157028 - DNA, 100 bp, Homo sapiens
gcaacggggtggccgatgaatcacccaacatgctggtgtacagaaagattgggctaatggatactacagacaacagagaaaacttgttgaagagattggc

SEQ ID NO: 157029 - DNA, 90 bp, Homo sapiens
gtgggaaggctcaagatggcgtgcttgttggagaccccaatccgcatgagcgtcctttcgattttaccaaatgttgcaagaactctggag

SEQ ID NO: 157030 - DNA, 74 bp, Homo sapiens
aacagttaatcctcaatttaagcctgatctaacccctagaaacaggttgttcggaatcctataattgaaaaaca

SEQ ID NO: 157031 - DNA, 100 bp, Homo sapiens
gagaactctcttcagaggtcgaagacgacgagaagatgacaggatctcaaatccagactccaaaatgatgcaaatcaacctgactggatttttgaatgga

SEQ ID NO: 157032 - DNA, 90 bp, Homo sapiens
ggctgccgcttcgaggggcagttcagcatcaacaagagggtcaccatgaagttcaatcccttcgttacctcggaccgcagtaaaaaccgc

SEQ ID NO: 157033 - DNA, 50 bp, Homo sapiens
cttcctgtcttctctcgaaccctggttatcaggaactgttgccgttatta

SEQ ID NO: 157034 - DNA, 74 bp, Homo sapiens
agtaatgggaaatttaggtccaggtgcatagttgttgcccaaatctcttggtacagaatgtttttgtagaaaca

SEQ ID NO: 157035 - DNA, 100 bp, Homo sapiens
gaacgcggtggacgaggagatctgcctggctgaatgtgacatctacaggtgggctacgagaacgcaggcaccgtggagttcctggtggacaggcacggca

SEQ ID NO: 157036 - DNA, 82 bp, Homo sapiens
agttcaaggaggtgctgaagagcgaggagaccgagtgtgtcagcagccaggactttctctctgggtccccttccaaaacgca

SEQ ID NO: 157037 - DNA, 111 bp, Homo sapiens
ccgcgcagcccccggccgcagcgcaggcagcccagcaggtctcggcgcggaagatggccggcggcgtggacggccccatcgggatcccgttccccgaccacagcagcgaca

SEQ ID NO: 157038 - DNA, 100 bp, Homo sapiens
gcctacctcgctcctcggcgccatgaccacaaccaccaccttcaagggagtcgaccccaacagcaggaatagctcccgtgttgttacagatcttataaca

SEQ ID NO: 157039 - DNA, 73 bp, Homo sapiens
aaataaagtagccaaagaagctgctaacagatggactgcttctcggacaaactatttagtggaaaaggcttac

SEQ ID NO: 157040 - DNA, 75 bp, Homo sapiens
tacagtggtatttgaagttaaaatcctggtgggctacaaattacctcggggacctgcttcacaagttacagttcg

SEQ ID NO: 157041 - DNA, 100 bp, Homo sapiens
gtgaggccgtggatgcaggcattaagataacagacgagtacctttggaaaggtcacgctctcgccacaatggagctatctcatctaagtgattcctgatg

SEQ ID NO: 157042 - DNA, 83 bp, Homo sapiens
cgaggcaccgaggcactcagaggagatcagtcgcatcgaatacattcattcaaagaacttcatccaccgggatgtgaagccag

SEQ ID NO: 157043 - DNA, 75 bp, Homo sapiens
ttttaccttttgtgctgagccaactcgagccaggctgcaaaaagttccaagatgagatgggattctccaacatgg

SEQ ID NO: 157044 - DNA, 100 bp, Homo sapiens
aagagaagacgctttacccgactctttgggccgttatctcaccccattgcagatgcaaaggctcctgagaagcgggcctcaccatccaagccagcttctg

SEQ ID NO: 157045 - DNA, 50 bp, Homo sapiens
gtttgccaaaatgctgcttgaatcagctcagtcccagttccagaatgagg

SEQ ID NO: 157046 - DNA, 98 bp, Homo sapiens
ccgggatttgggtcgcagttcttgtttgtggatcgctgtgatcgtcacttggtctcggcgcggaagatggccggcggcgtggacggccccatcgggat

SEQ ID NO: 157047 - DNA, 98 bp, Homo sapiens
agcagcctcacatggtgtgggccgacatcaagagctgcgagatccaacagtgcctacaccaactaatgttacaattgaatcctataacatgaacccta

SEQ ID NO: 157048 - DNA, 74 bp, Homo sapiens
cctaattcaaatgggagcagcggtggaagcgaagagatggacagagacgtatgtgcgttggtctcctaagggca

SEQ ID NO: 157049 - DNA, 90 bp, Homo sapiens
tggcagctgagaacaatacttagtggataccatcgaatagtacaacagtttcagctcctggcatcagctctattcaaatctggttcagat

SEQ ID NO: 157050 - DNA, 96 bp, Homo sapiens
ccctagcgccgctgggcctgcaggtctctgtcgagcagcggacgccggtctctgttccgcaggatgaaagcgtggatacccatcaacgaagttttg

SEQ ID NO: 157051 - DNA, 91 bp, Homo sapiens
ataaggagaaggataagtcgaaggggaaggcgcctgaagaggacgaaggactccctggaggaaaagcggaagcggcagcggtctgaacgcc

SEQ ID NO: 157052 - DNA, 75 bp, Homo sapiens
caacagatcaagaaggctgaagagattgctaatgagatgattgaggcagccaagatggtttccacggtgatgtgt

SEQ ID NO: 157053 - DNA, 76 bp, Homo sapiens
gcggctggggttccctcctccgtttctgtatccccacgagttacatggacacagaacagtatgaagaagcagtacg

SEQ ID NO: 157054 - DNA, 100 bp, Homo sapiens
ccggggaatggccgcggtgtggcagcaagtcttagcagtggacgcgagggtcaaaagcggctggtgctttccgaaagctgctcccgggactccatgagca

SEQ ID NO: 157055 - DNA, 90 bp, Homo sapiens
cgaggcggcgcgggccgaggcctgggacagctaccgcagcatgagcgaaagctacacgctggagaaactggcgatggaatatgagaggag

SEQ ID NO: 157056 - DNA, 90 bp, Homo sapiens
agatgatgttgtgattgagtttatattcaaccagctggaagtgaaggagggctctgagagatttcatttctgtcctgctgatgaagtcta

SEQ ID NO: 157057 - DNA, 98 bp, Homo sapiens
cgcgaagagccgttagtcatgccggtgtggtggcggcggcggagactgcgggcccgtagctgggctctgcgagggccgttgctccagggagaactgca

SEQ ID NO: 157058 - DNA, 75 bp, Homo sapiens
ctgctggatactaaatgtgatccccatggcctttctgtggtgctcacgtccccagcggtgttcactttcacggcc

SEQ ID NO: 157059 - DNA, 50 bp, Homo sapiens
gtctggaaagctttaggagttcacagtttagttgaatccatggacatgaa

SEQ ID NO: 157060 - DNA, 101 bp, Homo sapiens
gacagacagctcaccaaccgtgacagcaccatactggaacttcaaaaagttctgaaaacatgttggttggtcaaagaaaaagtgatgtatgaaaaagaggc

SEQ ID NO: 157061 - DNA, 110 bp, Homo sapiens
aggcagccatttccgaaacctcgctgttaaccgagcacctgcttatccaacaaaagtattaacatatacattaacaacgtcgaaagtagcctactttaagagaaaatatg

SEQ ID NO: 157062 - DNA, 90 bp, Homo sapiens
gccggccagaagcgggcggcgcgggggagatggacttcagggccacaggtgctgccaagatgctccagggcacctgctccgtgctcctgc

SEQ ID NO: 157063 - DNA, 101 bp, Homo sapiens
caaagacgggcgcaaagattgcttgaagaaatccatgccatgaaggtaatgaatttgggcatcctgaatggttagacttcccaagaaaaggaaataatgag

SEQ ID NO: 157064 - DNA, 73 bp, Homo sapiens
acgaggagcagaatgtggacagctacaccgagtcggtgaagaagaaaacattttctcgaaagaatcattcaaa

SEQ ID NO: 157065 - DNA, 97 bp, Homo sapiens
ctggaaaaggaggaagtccaggctggtgtggctgcagccaacacaaagggtgatcaggaacaagccaagcctgtggggcccggatagtcagccgacc

SEQ ID NO: 157066 - DNA, 100 bp, Homo sapiens
cctagtggtcccacagctgcggccgccgccttcttcctccatgtacctcctatggaagattgtaaggaacaagagcctattatggacaacaatatttctc

SEQ ID NO: 157067 - DNA, 74 bp, Homo sapiens
caaaacagcacttccttggcgcctttcctctacaccgttttccaggtactccaaagattcaggtttactcacgt

SEQ ID NO: 157068 - DNA, 75 bp, Homo sapiens
catccaggagtcagtttattactggaaatttgctgaggctaaacactatcatgccaagttggtgaatataagaaa

SEQ ID NO: 157069 - DNA, 82 bp, Homo sapiens
aaaaaaaggagatgcctggcagccccgctctctgcactgtgcagagtcgagatgcagcctggtaccagctgctgatggcacc

SEQ ID NO: 157070 - DNA, 96 bp, Homo sapiens
gtgacctggatgtctgaggaggaagtgtccccagttgtcctcatccagggtgctattcgagtccagcctgaagggccggctccctctctaccacgg

SEQ ID NO: 157071 - DNA, 100 bp, Homo sapiens
ctcggacccacggagccggcagcccagcactccgagtgaccgactcctcatcaaaggtggacggatcatcaacgatgaccaatccctttatgctgacgtc

SEQ ID NO: 157072 - DNA, 76 bp, Homo sapiens
ttccaggctgcaaccatgtgcaaattcaccagcaagcttgcgggttcgagtacacctctaaacttcagcgcatgtt

SEQ ID NO: 157073 - DNA, 82 bp, Homo sapiens
cctttgtctttgaaggcatgttgagtgagcaagtgaagaccaatattcaacaggcagagaactacgatgacccgcacaaaac

SEQ ID NO: 157074 - DNA, 74 bp, Homo sapiens
cttcccggcgagtccgcgacggtcgccgcccacggcgagacctctcaagctggatccaaggataaaaagatgga

SEQ ID NO: 157075 - DNA, 80 bp, Homo sapiens
cggagcagcgcgtcgtggggcgagcggcaggtggacgacatccttggagaaggcagcgacgacagcgacagcgagaagag

SEQ ID NO: 157076 - DNA, 82 bp, Homo sapiens
ttccccccgaagaagactcccccacatctgggtgcaatgattctggactgagacgcgcttgggcagaggctatgtaatcgtg

SEQ ID NO: 157077 - DNA, 100 bp, Homo sapiens
cgtgtttggagggaaatgggaatgtacacgataattaaagagtaaagttgtgctcaacgctccataatgggagaagtaaagaacaaagacttaaggaaca

SEQ ID NO: 157078 - DNA, 100 bp, Homo sapiens
gcttcgctgacagccggccaccagattaatactgaggaacacgtggatgcagctgatcaggaggttatcttgtgggatcataagattcctgaggatatcc

SEQ ID NO: 157079 - DNA, 75 bp, Homo sapiens
agcctgcggagcctgtggggcagatcttgagccagatgattgtgcatccatttacatctttaatgtagatccacc

SEQ ID NO: 157080 - DNA, 75 bp, Homo sapiens
atcggaggcttcgcaggtctcacctcgacggtgatttgcaggtgatttggagcaagaggtggtggtggccttccc

SEQ ID NO: 157081 - DNA, 100 bp, Homo sapiens
cagttcctctccaactagtccaggaagtttcagaggattaaagaaatggtggagtcaatgaagaaagtagcagggatggatgtggagctgacagttgaag

SEQ ID NO: 157082 - DNA, 50 bp, Homo sapiens
ccattgtattggacactaatgataagcccccaggctccgctcttgccaga

SEQ ID NO: 157083 - DNA, 98 bp, Homo sapiens
gtgcacttgcaggccgggcagtgcggcaaccaaatcggcgccaagatttgtgacccagaaggaaatctctgacctcagctgtggctcttggtgctggc

SEQ ID NO: 157084 - DNA, 100 bp, Homo sapiens
gatgaatgaaggagatgcttattatttgttgaaggattttgcactcaccattaaatctatcagcaaagtgcctgcattcgtgaggatgattgctcccgag

SEQ ID NO: 157085 - DNA, 100 bp, Homo sapiens
tttggagccggccccaggcagcgtgtgtcggtcgcctagtctggagaactagtcctcgactcacgaggaaggcattactgggtaccggccaagaggctgt

SEQ ID NO: 157086 - DNA, 75 bp, Homo sapiens
gaagtatttcagattgcaagtaatggttgctccttgagggcaggacagttcttatggctttatccgttgcgtaag

SEQ ID NO: 157087 - DNA, 88 bp, Homo sapiens
tgacaactcaagagcaatcagtaccatctggtttggcatgagagggagtgaaggatgtgcctacctcagcgatgatggtgcagcaaca

SEQ ID NO: 157088 - DNA, 100 bp, Homo sapiens
ttgggaaaaggccggagaaggtgaaattctgtgtgctccctccggcgagagactttgtcagctcccgcacagtaacctactggtcagaagttatatgtaa

SEQ ID NO: 157089 - DNA, 74 bp, Homo sapiens
gatctggtgtaccaggcgaagctggccgagcaggctgagcgatacgacgatgtagccatagctgtaacgtataa

SEQ ID NO: 157090 - DNA, 98 bp, Homo sapiens
gaaaatggagcccttcaccaatgatgatgcagtttgcttggcagagctataagcgttatgcaatggggaaaaacgaactccgtccactaacaaaagat

SEQ ID NO: 157091 - DNA, 100 bp, Homo sapiens
cgaggggagcctgatcctatcgttttgacgccaggcatagaatgtcaagctaaccaggcgtccgctacttcagaagagtgtactgtcgcatggggagtct

SEQ ID NO: 157092 - DNA, 51 bp, Homo sapiens
gacagggcacaccaaactccatctgttcaaaaggtgatgacctatcaacag

SEQ ID NO: 157093 - DNA, 101 bp, Homo sapiens
gttgatgtcctcaatctctgctttgcccagtttgagccagattccacagagtatatcaaggcaccatgactcctgtgaggatgcagcactccctggcaggt

SEQ ID NO: 157094 - DNA, 90 bp, Homo sapiens
ctttccggatcaatccagatggcagccagtcagtggtggaggattatatgcgtcaggcaggagaagtgacttatgcagatgctcacaagg

SEQ ID NO: 157095 - DNA, 98 bp, Homo sapiens
tcctgagcgccatggctcactccccggtgcagtcgggcctgcccggcatgcagggaaaactgaggctgccatcaaaaacttcagtccctactacagtc

SEQ ID NO: 157096 - DNA, 101 bp, Homo sapiens
atgatgatggaaatgaagtataataccaagaaagccccacttggtgctggaaacgtgcgtagcaacagtaggccgagtatccaacgttgatcataacaaac

SEQ ID NO: 157097 - DNA, 101 bp, Homo sapiens
gtgaactgcgtgaacgtctctatgggaaaaaaattcaggtactccaaagattcaggtttactcacgtcatccagcagagaatggaaagtcaaatttcctga

SEQ ID NO: 157098 - DNA, 100 bp, Homo sapiens
atagtggaactgttttcaacatcgcagccagaaatctttgaaaatatttacccaaatttctctatgaatcatcatcaagaactctgggagaacttttgaa

SEQ ID NO: 157099 - DNA, 75 bp, Homo sapiens
cccaaccacaagacgactcaataggaggaaggtcttcagaactactagcagataatttggggggacttcatattc

SEQ ID NO: 157100 - DNA, 101 bp, Homo sapiens
acaccatgccgtccgccttctctgtcagctctttccccgtcagcatcccagccgtgctcacgattgcaacacctgctcggtataccgtgactttgggagga

SEQ ID NO: 157101 - DNA, 74 bp, Homo sapiens
gctgactacctgctgtacaccctcaacaaacaccagcgctttgggctcaaagtgctgacaaataaagcttctgt

SEQ ID NO: 157102 - DNA, 97 bp, Homo sapiens
ggaactgtggtccatggtaaagttttacagtatgaaaacccatggacaatcccgaatatgttgtcaatgacgagaattggcttggccccagttctgg

SEQ ID NO: 157103 - DNA, 82 bp, Homo sapiens
tacagctgtacataagtgtcatgcagcaggacgtcactgttggaagaaaaaatgatgcatcctgttgccagcagtaatccag

SEQ ID NO: 157104 - DNA, 75 bp, Homo sapiens
gcacctctgtttgggggtcctcaggaagaaggagagacgaccatcttgcaactagaaaaagatttgcgcacccaa

SEQ ID NO: 157105 - DNA, 50 bp, Homo sapiens
ctcctggactgcctcccataaagcccaaggcctattccctggtggattcc

SEQ ID NO: 157106 - DNA, 77 bp, Homo sapiens
tcctaagactcgaaggcagcacaggacctggaaaaattacatggagaagatgtcaaccggacactagaaggtggaag

SEQ ID NO: 157107 - DNA, 83 bp, Homo sapiens
cggggctccaggacggcgcccttagcgacaccatgggtgaatcgaaacgcatcaccctggtcctccagcagccacagtctgga

SEQ ID NO: 157108 - DNA, 87 bp, Homo sapiens
gcccagcgcccgacaccgccggccgcggcggcggccgccaccggctctagtttgcagaaaaaacttcagcatgtgccaggaacacaa

SEQ ID NO: 157109 - DNA, 74 bp, Homo sapiens
agagaactcttctcaaagaggaccctgcttactgcggatcgtgtgaagaagggatttgacttccagtggcccca

SEQ ID NO: 157110 - DNA, 101 bp, Homo sapiens
ggaatttgaagagatgctggaacatgcagagtctgcacaagatgagctttctgatgttagccaaggcggatctaaagctaccactccagcatcaacagcta

SEQ ID NO: 157111 - DNA, 100 bp, Homo sapiens
cccttggatattccagtcgatgtatttgtacaccaacctcctgacaaggtgatccgggcgggccccgcaggaattttatcccctcaccggcctcacacta

SEQ ID NO: 157112 - DNA, 87 bp, Homo sapiens
caagaagaccattcagatgggatctttccggatcaatccagatggcagccagtcagtggtggaggatcataaaaggattcctctgta

SEQ ID NO: 157113 - DNA, 90 bp, Homo sapiens
gtctttcctaccctcttcagtgcccttccttgataagctgtttaaaccagatcctgaccaagatgaagcagcagggtcatgagacagccg

SEQ ID NO: 157114 - DNA, 75 bp, Homo sapiens
tggaggcgtcgggcgtgagcggaaatgaggaggagatggtggaggaggctgaagcaaaccattcctcaagcaact

SEQ ID NO: 157115 - DNA, 82 bp, Homo sapiens
agctcagtgcaggcactggcaacttctatttgacaccagagccggaagtggaaccgcccagtgcccccgagctcaagcaagg

SEQ ID NO: 157116 - DNA, 85 bp, Homo sapiens
cctctgaagtgacggaatttatttcaaaggatgccctggcagggggacaccaacaacatgattgaccgattcgatgtccgtgccc

SEQ ID NO: 157117 - DNA, 74 bp, Homo sapiens
taatacaagatgctttaaagaaggcaagaaaattggatgtatattttgaatatgaagaaaaaataatgagcaaa

SEQ ID NO: 157118 - DNA, 100 bp, Homo sapiens
ggaagaagcgccgcgcacggacttcggcagaggtgacttaagagattaaaattaatttggttgctgttggttctgaacaaataatgagttcttttatttg

SEQ ID NO: 157119 - DNA, 100 bp, Homo sapiens
ggggcttgatgaaggcgtggatagcctgaaggcagccattcagacgcaaaatcgaatgaagctaatggccgacaactacgaggatgaccacttcaaatcc

SEQ ID NO: 157120 - DNA, 50 bp, Homo sapiens
gcatttcctcgtcgagcgcaacccaaggagaaatcaacatctcatggaag

SEQ ID NO: 157121 - DNA, 74 bp, Homo sapiens
ctagcatcttgcagtctgttaagaatgggggtatcttggtggatgtaaacactgccgaacattcaactgtcata

SEQ ID NO: 157122 - DNA, 73 bp, Homo sapiens
gtgaagaaatgttgaaactatttaaagaggttgctagcttacagactcaaaagcctcgaaagtttgactgtga

SEQ ID NO: 157123 - DNA, 90 bp, Homo sapiens
gaactgtttgtagccctcgtccagacgccccaaacaaacaaatctacctgttactcgtattttggacaatcttatggagatgaagtcaaa

SEQ ID NO: 157124 - DNA, 90 bp, Homo sapiens
aagaagaaaaagagcaaagataagaagagaaaaagagaagatgaagaaacccagcttgatatgttgacatcgctattgcggttccgaggc

SEQ ID NO: 157125 - DNA, 101 bp, Homo sapiens
ttgaaatcgacacacaaagaatagagttgagcctgtgggacacttcgggaatagccaggccagaagaaggaaggcctgtggtgagtgggacaggaaatgac

SEQ ID NO: 157126 - DNA, 75 bp, Homo sapiens
aaattatgtgaaacctccaaatgtggatgtagaagacagaagtagctcagggtcctgggggaatggaggacatcc

SEQ ID NO: 157127 - DNA, 75 bp, Homo sapiens
gatgaacccaacctagtgggtgtaatacatcatgaactgcaggcttggtgatccagctatttttcctgccgtaat

SEQ ID NO: 157128 - DNA, 100 bp, Homo sapiens
gcagagacttctcaatctgacagccctagtttggcgcggtgtaaaacgaccgcagcatcaaacacttggcttgttccagaaactaaaggagctattgtac

SEQ ID NO: 157129 - DNA, 100 bp, Homo sapiens
gcatggcactctggcgggcataccagcgggccctggccgctcacccgtggaaagtacaggtcctgacagctgatctcacattcttgaaggtggcattgaa

SEQ ID NO: 157130 - DNA, 75 bp, Homo sapiens
tggttcttctcggcctcctccgaggaggagcgcaaggttctaggtaccagcctctggcttctacagcctcagaca

SEQ ID NO: 157131 - DNA, 82 bp, Homo sapiens
tgctggccatgctctacgggacaggtttcagaggagcgtgctcgacctttctctccagtggagatttgccaacctgcccaac

SEQ ID NO: 157132 - DNA, 49 bp, Homo sapiens
attgctgagccagcggagctgcttggtgttgctctcttgccattcgtgg

SEQ ID NO: 157133 - DNA, 100 bp, Homo sapiens
gagatctgctatttctttgtggagacatcaatgtatttcttaccaaaagacactttcagagactgacttgcataccaaatgtgtggtggatgtggatgca

SEQ ID NO: 157134 - DNA, 90 bp, Homo sapiens
cgaggaggaggaagagtccagtgaaggaaagaccacagcaagattctttcattcgtctcctcctagcctgggggaccaggctcgaactga

SEQ ID NO: 157135 - DNA, 100 bp, Homo sapiens
gcattttacaagggaagctgagttttggagcaaactaatggcaaaagtcaacaactctagcttaattggagtaggctatactcagactctgaggcctggt

SEQ ID NO: 157136 - DNA, 106 bp, Homo sapiens
cttaatcggatgtatcttgtattcatgggaacctccacaaggagctcattttctttccagaagtctagatgatgccttaaaacttactgaacaaccagaattagca

SEQ ID NO: 157137 - DNA, 75 bp, Homo sapiens
tgtaacccaaaggaggaaacagctggctaagctcatcattgttactgaggaattacggaggttgagctggtccgg

SEQ ID NO: 157138 - DNA, 90 bp, Homo sapiens
atcgttgctgccttcttcgtcaagtgggaaatatgagtgagcatgtgagaacaagatcccaatcctcagaaagaggaaatgaccaagagt

SEQ ID NO: 157139 - DNA, 101 bp, Homo sapiens
ctacaaggttccttccactgaagcagaagccctggcatctaagtcattttctgaggatgaatggaatttactgtatgttgcagtaactcgagccaagaagc

SEQ ID NO: 157140 - DNA, 88 bp, Homo sapiens
tcccaagacccccgggcctgctccacaaagtttgaagggttattaatgctgcactggctttagcagcaaaaccacagagtaaactggc

SEQ ID NO: 157141 - DNA, 130 bp, Homo sapiens
gcggagaccccctgggcaggctgaaagatggcggcggcgtctgtctctgcggcttctggttctcacttgtcgctccagggttccttgaaaagaaaacaggtagttaacctatctcctgccaacagcaagc

SEQ ID NO: 157142 - DNA, 74 bp, Homo sapiens
gaggtcgtcgacgccatcatgaccacggcccagagtcttaaaatccttgcacgtttgatgactgccaaattctt

SEQ ID NO: 157143 - DNA, 101 bp, Homo sapiens
cgtgcacgggatccacttccgcaaggaccctttggaaggccgggtgggccgaggttcatgcatgggagatctcagaccagttgttacagatccggcaggat

SEQ ID NO: 157144 - DNA, 75 bp, Homo sapiens
tgacagagaaactgttgcagtgaaggtacactggctttctcaaaggactattgcaagtctttgcacacatagctg

SEQ ID NO: 157145 - DNA, 100 bp, Homo sapiens
agagagatgccatctacaaagaattctccttccacaattttaatcagcaattgcctgtggttacctccagtacaattgtgagatgccgttcatgcaggac

SEQ ID NO: 157146 - DNA, 100 bp, Homo sapiens
cagtgactaccatgacgaaaacatgtactacagccagtcttctatgtttccacatcggtcagaaaaagatggaggtggggaagacagggctccagctacc

SEQ ID NO: 157147 - DNA, 100 bp, Homo sapiens
caacaaactcgaagactggcatgagaggatttgacacgataagcctcatctgatggaagagaggaataaataattcacctatatgtgtttgaggttgtga

SEQ ID NO: 157148 - DNA, 74 bp, Homo sapiens
cgggagctgggcggccatttaccaggcattcctgcatcgcatccggcagaacgtggccgactcagtggagaagg

SEQ ID NO: 157149 - DNA, 75 bp, Homo sapiens
ccctgagtgccccgagggcagcggcaatgtgagctacgtgaagacgtctccattatgtttccagatgtttcaaac

SEQ ID NO: 157150 - DNA, 83 bp, Homo sapiens
cgcaggccttgaagaacctcctcgtggcgggaccccgaggatttttagactctgaggagcagttggagctaatccacattatg

SEQ ID NO: 157151 - DNA, 50 bp, Homo sapiens
aaggatggtttagaaatggaaaaatgtaaacttctgcagcatccagaact

SEQ ID NO: 157152 - DNA, 95 bp, Homo sapiens
cctgattcaagtgttggcggatggaagggaggagactcctgaccctcagaatggtctatcatatgcaagtcacacggttggtttcacgccaccaa

SEQ ID NO: 157153 - DNA, 101 bp, Homo sapiens
gagagattgagagagagagagagagatagacggagatctctggagcagacctcaagccgaggcctgcctggagccccagatcaccccttcctactacacca

SEQ ID NO: 157154 - DNA, 100 bp, Homo sapiens
acggcctgcactctgcgctttgagctactgggctgtgagctgaacggaatctccgccagcagtcctctgcagacatcccttgttcggcctgctggccttg

SEQ ID NO: 157155 - DNA, 100 bp, Homo sapiens
atgatttttgttggaagagatgactgtgagctcatgttgcagggaagaatggacagaagctatccaggctgtagcagacagactgcagaggcaagaagag

SEQ ID NO: 157156 - DNA, 98 bp, Homo sapiens
cagattttggtttaatatctgattgggacaacattcagacccatttccagtcatgaggtgtccggtggagagctgtttgaccggatagtggagaaggg

SEQ ID NO: 157157 - DNA, 95 bp, Homo sapiens
accatttctgtcagctttctcattcctagattgatgcagattgcttaattccttgaggagtcagtggatcggtggggaaaatgctgcttaccctg

SEQ ID NO: 157158 - DNA, 90 bp, Homo sapiens
taagttcgccaaagcgacaggagctgatgaccggaaagaagggatgaccgcgtttgtggaaaagagaaaggccaacttcaaagaccagtg

SEQ ID NO: 157159 - DNA, 100 bp, Homo sapiens
tgcagataggatcactctttatcattactgctgtaaaccctgctacaattggaagagagagcttcgtttaggagcctgaatctccaagcagagtctgtta

SEQ ID NO: 157160 - DNA, 50 bp, Homo sapiens
agaagaagatgcctttaccgacccccaccttgggacaccttgactccaag

SEQ ID NO: 157161 - DNA, 82 bp, Homo sapiens
acgacggccccagggaggatgacgaacccaacctggtgcccggcccgcaggatgcctaaatcaaaggaacttgtttcttcaa

SEQ ID NO: 157162 - DNA, 83 bp, Homo sapiens
agacaccttccatcggggcagcgacaagatgcagcctcccgcgacgatgcccctcaacgttagcttcaccaacaggaactatg

SEQ ID NO: 157163 - DNA, 73 bp, Homo sapiens
atgcagtacgccacggggccgctgctcaagttccagatttgtgagggtcgctgtctgcccattgatagaggcc

SEQ ID NO: 157164 - DNA, 96 bp, Homo sapiens
gctgcccactctagaggagctgaaagtagatgagatctcacattcttgaaggtggcattgaagagcactaagatcggaagatgagtgagcttgacc

SEQ ID NO: 157165 - DNA, 90 bp, Homo sapiens
ggctttggtggatggggtattcttgaaccaggtcatgctccaaatggtgtgctgatctgcaaaccctggacacaatgcagccaattgaga

SEQ ID NO: 157166 - DNA, 90 bp, Homo sapiens
gtcagtccgccgctcaccccgcggccgcaccttcccgccttctcaggagggtttgcatttgtgtatgaagctcaagatgtggggagtggc

SEQ ID NO: 157167 - DNA, 100 bp, Homo sapiens
tcctggctcctcggcccttttctcccctgttgcagctgggagcggacgaagcgcgaagctggggtattgatgaagatgaccctactgctgatgataccag

SEQ ID NO: 157168 - DNA, 83 bp, Homo sapiens
ctgtggatccttatcccatgggcaaacctcctttgcctagaggctatcacacgaattttgcaagagtaaagatgcaagtaacc

SEQ ID NO: 157169 - DNA, 90 bp, Homo sapiens
agccgggggagcgctctcggagggagcgcgctttctttggagtcggcgaaacccggctagttaaaggccttcagcaagagctgaatcgat

SEQ ID NO: 157170 - DNA, 95 bp, Homo sapiens
caggacctgagcaggaacctggagttttcagagaagagcaagttagtaccttgtaccaaaacatcaaccttgtggagccaagattaattcagcca

SEQ ID NO: 157171 - DNA, 75 bp, Homo sapiens
cccgcccgggagggccggggccgcgctcaggttaatccctatatcctgaagaagaacatgatcctcatgacaaat

SEQ ID NO: 157172 - DNA, 100 bp, Homo sapiens
accagatagtgttggagctccacttttctcattgtgccgccatgggagctgctctgttgatgcttatcgcaaatcagccggcaccaggagcagttcatcc

SEQ ID NO: 157173 - DNA, 82 bp, Homo sapiens
gtcactgtagccaacaagatggaggccggcggcatccctggagaacaagactcgaagacgcacagctgacgactcagccacc

SEQ ID NO: 157174 - DNA, 106 bp, Homo sapiens
gggctcctcaggttcagacccgaccgttatccagtcggttcgtggagaggagagacaatgcagatcttcgtgaagactctgactggtaagaccatcaccctcgagg

SEQ ID NO: 157175 - DNA, 75 bp, Homo sapiens
gtcagagttcagcacccaacctgagaacttcttgaaaggctgtaagtgacccagaaccagcttgtctacttcatt

SEQ ID NO: 157176 - DNA, 74 bp, Homo sapiens
gaatttatcctcaagagtcagctggcagactatcaagaaatccaagtggtaatgggcgaagtttattcagcatc

SEQ ID NO: 157177 - DNA, 75 bp, Homo sapiens
aagacgccctggtgctcaccaagcaagattctggacaatcaggaagtccaagccacaatgatcctgccaagaatc

SEQ ID NO: 157178 - DNA, 51 bp, Homo sapiens
tggcaggaaagatttcagcatctgaatgacccgtgccccgcatcatggtgc

SEQ ID NO: 157179 - DNA, 133 bp, Homo sapiens
caggaactgaattttgccagcaaccagtgagtgaccttggaagtggatccttcccccgaaagcccggctttcagtgcttggtccatcctactagatcgctcccagactcgcctacagatagtgttgatctcac

SEQ ID NO: 157180 - DNA, 89 bp, Homo sapiens
gcgtcgctccggacgctgccaacctgttctccaccgtcgctcgacttccacctctaagactcccacctcaatctgaaattgaagtgtct

SEQ ID NO: 157181 - DNA, 100 bp, Homo sapiens
gtttgagtccagcagtgctttagctcaaattgaaattattccatgcaagatctgtggagacaaatcatcaggaatccattatggtgtcattacatgtgaa

SEQ ID NO: 157182 - DNA, 73 bp, Homo sapiens
tacaaatgacttaagtcagcccacgggatttttagcccagcccatgaaggtgttcaatatgaatgccccagtt

SEQ ID NO: 157183 - DNA, 50 bp, Homo sapiens
cgggactcacttgccgcgcgaggagaggggtgtggatgaatggaacatag

SEQ ID NO: 157184 - DNA, 51 bp, Homo sapiens
cctcaccaagaatttggcatttcaaggcaattgctggctactttgatatat

SEQ ID NO: 157185 - DNA, 75 bp, Homo sapiens
tatgccgacggactgtgtccggcgatgggcacgggtcttcccatgcacaagatgattaatacagatcttagcaga

SEQ ID NO: 157186 - DNA, 51 bp, Homo sapiens
ggttgtaagcagtgaagccaaggggaaagctctggcaatttaaatgaccca

SEQ ID NO: 157187 - DNA, 51 bp, Homo sapiens
aactgactttgcagccacggagagaccgagacatgggtgcccggcaccgcg

SEQ ID NO: 157188 - DNA, 100 bp, Homo sapiens
agacttttgaagtgcctttgatttctggtctcaaatatctatcagtgtagaagagtgggaagacaccaaagactccaaagaacaagggcaccaccgcagc

SEQ ID NO: 157189 - DNA, 98 bp, Homo sapiens
tctccaaatccctcgaggcatctggtcgaatatatgtctaccggaaagacctggcggacactttggctccaggttatggagatgttaggttgtctttg

SEQ ID NO: 157190 - DNA, 75 bp, Homo sapiens
atccacgaggatgtcttccccgagccccaggcccggtgtcttgtctgtataccctgggctacccgccagcccaag

SEQ ID NO: 157191 - DNA, 83 bp, Homo sapiens
ctgctctccccgcccgcggcccgtgcagaacaagttgaaatcatcgcagaaggataaagttcgtcagtttatgatcttcacac

SEQ ID NO: 157192 - DNA, 100 bp, Homo sapiens
aactccccatcgcgttttgccagcgataatacgcctcagtccacaggtcctggctaccctgggaagagacaagaagtaaatgaagaaagaggaagattcc

SEQ ID NO: 157193 - DNA, 83 bp, Homo sapiens
gtcgaccccggcccggaggaggctcatgcgggatttcaagcgggagtggggaaggccagggccagattctgcagcgcttccca

SEQ ID NO: 157194 - DNA, 100 bp, Homo sapiens
aagagggcagccgcctgaaggaacgcgacggcggcgcccgcaggtctcctctgagcctccggcctccataagacccaaaacagatgacacctcttcccag

SEQ ID NO: 157195 - DNA, 97 bp, Homo sapiens
caggagggaagtgagaagcccaactaaagccccacatttgcagctcattgaaggaaagagtgagtagaacagagcgtagtggaagatacggttccat

SEQ ID NO: 157196 - DNA, 88 bp, Homo sapiens
tggcgcctaaagtctgagagagggaagtcgcctctgtgctcccctgggcgctgcctatggcacagccaagagcggtaccggcattgcg

SEQ ID NO: 157197 - DNA, 98 bp, Homo sapiens
ccatctaatcacagactcctatttgaagtatttgacgaaaatagactgggggcagctggcattttatgctatgtgggagcctatgtcttcatcactta

SEQ ID NO: 157198 - DNA, 82 bp, Homo sapiens
ctttactttaagaggagattcagacatagacaagaatgattacccagaccaagatcactccatggatgaaatgacagctgtg

SEQ ID NO: 157199 - DNA, 99 bp, Homo sapiens
caagactctgtcttcgcccagtaataggccttctggagaaacttctgttccacctcctcctgcagattcagatgaagagatatttgtaagtaagaagtt

SEQ ID NO: 157200 - DNA, 100 bp, Homo sapiens
gtgatatttctcttttgtctgcccctattgtaagtgcagatggaacacaacagtgatgatgatgatgattttgatgatgaggaagctgaagaaaaagcgc

SEQ ID NO: 157201 - DNA, 101 bp, Homo sapiens
aagtttccgggaattaagtccagtttcttttcaatataggggagaaaactggttgtcctggatgtttgaaaagttggtcgttgtcatggtgtgttacttca

SEQ ID NO: 157202 - DNA, 101 bp, Homo sapiens
gtattgcaatcatggtgcagaaataccagtccccagtgagggtgtacaaatacccctttgaattaattatggctggaagacatgtaaggaatttgcataag

SEQ ID NO: 157203 - DNA, 100 bp, Homo sapiens
ttcccattgtacccacggcagagttccaagacaggatatcggaaggagatggataaagcagatgtttattggggcattccttatcccagctatggtgtgt

SEQ ID NO: 157204 - DNA, 88 bp, Homo sapiens
aaccgctgtctcgagatggatgtggagaagagaggttcagctaaagagctgctacaggaaggatctgagtctctccctgcggagacag

SEQ ID NO: 157205 - DNA, 100 bp, Homo sapiens
tattaatactgctgtatctatgctataaggttccagagttctaaatctggaaagatctacctccatagagacgtacggctcctgttctctagaaagtcaa

SEQ ID NO: 157206 - DNA, 82 bp, Homo sapiens
agaaaaattacctctttatcttgcatgaacatcttaattttcagctatcatggtgaacttacttcagattgtgcgggaccac

SEQ ID NO: 157207 - DNA, 74 bp, Homo sapiens
caagggaggaggaagatggcggcgggggcgaggagcaatttctacgggagaaggttaaagtcaatggcaaaact

SEQ ID NO: 157208 - DNA, 100 bp, Homo sapiens
ggaaaatgccaacgccgtgtctgaagttggctaagtggaagacagctgaggaggtggccgccctgatccgatctctgcctgtggaggagcagcccaagca

SEQ ID NO: 157209 - DNA, 88 bp, Homo sapiens
ccccaccaagtgctggccagtgagcccatcccgttctctgatttgcagcagatcgggctggtggtcatcctggcttccacggtggtgg

SEQ ID NO: 157210 - DNA, 100 bp, Homo sapiens
agaatacagccaacctccaggtttcagtggcagttctcaggtcaatgatgccttccttcatgtgatacaggggaaatccgtgggcaaggtgcttctcgct

SEQ ID NO: 157211 - DNA, 100 bp, Homo sapiens
aagcctttctttctgatagaaagctgtttaaaccttctgtcatgccttgactgcattggtaaaaattctatcatgttagaaagtcagatatctttattac

SEQ ID NO: 157212 - DNA, 50 bp, Homo sapiens
ttggtatatagatacttgcaagagtcaggaaagccatcaccaagtcgggc

SEQ ID NO: 157213 - DNA, 49 bp, Homo sapiens
ttcgtctatgtggcgcccggcataggttgcttatcaagtgtcccacaaa

SEQ ID NO: 157214 - DNA, 80 bp, Homo sapiens
caagatttggggaatctatagttaatcttggcgacattgacaatgatggctttgaagctttatgctgaaaaggtggccac

SEQ ID NO: 157215 - DNA, 101 bp, Homo sapiens
ccaaggagttcaatcacttggcgtgacttcactacttttaagcaaaagatactatactggcaattgctggagaagattttgcaattgttgcttctgatact

SEQ ID NO: 157216 - DNA, 82 bp, Homo sapiens
gagtactgcaagctcatcctgagctcaccatggatgatgatatcgccgcgctcgtcgtcgacaacggctccggcatgtgcaa

SEQ ID NO: 157217 - DNA, 101 bp, Homo sapiens
catgacgcaggtgcaggtgtctcttctcgccctggcggggaaggttttggctacgggcctccacctccaccgccagatcagtttgcccctccgggggttcc

SEQ ID NO: 157218 - DNA, 100 bp, Homo sapiens
acacccccagcggccgccggctcccccacgaggacacaatgtttgcacgaggactgaagaggaaatgtgttggccacgaggaagacgtggagggagccct

SEQ ID NO: 157219 - DNA, 73 bp, Homo sapiens
ggagagtccctaagcctcattggacaccgtctgcaggaaactgagattgggaaaatgaggtacgttagtgttc

SEQ ID NO: 157220 - DNA, 74 bp, Homo sapiens
atccagttcgctattttgataactcaagtttaggcctttgtccagatgcttgctcagaaatctggcaatattat

SEQ ID NO: 157221 - DNA, 82 bp, Homo sapiens
ctcgaaggggagtctcagcgaccatgggggacaccatccactgccgccatggcatcagatgaaggcaaactttttgttggag

SEQ ID NO: 157222 - DNA, 100 bp, Homo sapiens
gtcgagtgtcattacgctcaaacaaggagttcatgatcaagtgttgcccacaccaaatgcttcatccagagtcatagtacatgtggatctggattgcttt

SEQ ID NO: 157223 - DNA, 100 bp, Homo sapiens
ggaatggtattggagacaaatatgaatgagattgttacacaaattgatgcacaaaataagctggaaaaatctgagggtttttaatgaccacaacaagcaa

SEQ ID NO: 157224 - DNA, 100 bp, Homo sapiens
ggcactggacggggaatcaagagacccggtttctaatccctgctctgtcactaacaagctgcgtgatcttcgacaagcatgagacgaagctgaagggagt

SEQ ID NO: 157225 - DNA, 50 bp, Homo sapiens
tgctgggaagatctggattctcgtttcagctaaacaaccctgagatggtg

SEQ ID NO: 157226 - DNA, 75 bp, Homo sapiens
gccccggcggcggcggcggccttgggccggtggacgtacccagcgctcgtgcaaattgggaatcgtgaaattcat

SEQ ID NO: 157227 - DNA, 82 bp, Homo sapiens
gagtaaattgaaaatattggggccatttagtaacttctttgcaaggtgacttaagagattaaaattaatttggttgctgttg

SEQ ID NO: 157228 - DNA, 75 bp, Homo sapiens
cgggacaccccggaagctgggaaatggtatcatgatattagctggtttgacatcaagtcatttgtgagtcatcag

SEQ ID NO: 157229 - DNA, 75 bp, Homo sapiens
ggaatgtctttcctaccatctaaaatacgaaggtttctggctgggatccggaaagtatggcagaggaggaagtgt

SEQ ID NO: 157230 - DNA, 98 bp, Homo sapiens
ttaaaaaactaagaatcctagacatagctggaaatattattcagatatttccatcaggaataagccaatggacacgtcagtgttatctgaagaaggag

SEQ ID NO: 157231 - DNA, 97 bp, Homo sapiens
tcaaaactcagcatgcttagcattcgagagaacaaaattaaacaactacctgctgaaattgatgccatggacaatattaccaggcagaaccaattct

SEQ ID NO: 157232 - DNA, 98 bp, Homo sapiens
tgggacgcacagagaccgtgaagattccaagttcaggagaactcgaccgaaattgagaaagctgatgatcatctgcagcagcccttgcaaaaccaaaa

SEQ ID NO: 157233 - DNA, 100 bp, Homo sapiens
ttctaccagggccacatcaccgccttcctgggccacaacggggccggcaagaccaccacccttgagaaagatcagtctaaagaaaaggagaagaaagtga

SEQ ID NO: 157234 - DNA, 74 bp, Homo sapiens
cgagttgaactttaggagagctgtgttctctgcagattctaagaaatctactttcttcaatgtgttaaccaata

SEQ ID NO: 157235 - DNA, 75 bp, Homo sapiens
ccctgtctctggaaagctggagaaggttgctccggttgctaagaagactatgaacaagtcagagaacctgctgtt

SEQ ID NO: 157236 - DNA, 101 bp, Homo sapiens
cccttccacgtcatccgcatcaacaagatgttgtcctgtgctggggctgacaggatgagaacaagttgagcagtgccaacggccatgaagaacgtagcaaa

SEQ ID NO: 157237 - DNA, 100 bp, Homo sapiens
gcacctgtgcacatcgatgtgggcggccacatgtacaccagcagcctggccacgctcaccaagtaccctgactccagggttggggtctgctaggtccccg

SEQ ID NO: 157238 - DNA, 51 bp, Homo sapiens
caccgccatgcccaagaataaaggcctcgccgacccagcccctaatgttcc

SEQ ID NO: 157239 - DNA, 75 bp, Homo sapiens
ctgtttgagcccggaagcgcagaagctgggacagagcagaatgggctgatatagatccggtgccgcagaatgatg

SEQ ID NO: 157240 - DNA, 97 bp, Homo sapiens
gctcgacagagaggccatgaagcagaggaaagcagggtcatgctgtggaaaaggaatcctttaccgtatcagcagatgttgcacacaaacttggtat

SEQ ID NO: 157241 - DNA, 49 bp, Homo sapiens
aacagaattacttggaggagaaagatgagcccattattgaagagccaag

SEQ ID NO: 157242 - DNA, 98 bp, Homo sapiens
gagatttggagacagggacagtactttttgagattgccaaaccttgcgtttcagtgatggggagctgggatccagatactcctccgggtattcatctg

SEQ ID NO: 157243 - DNA, 98 bp, Homo sapiens
ctcacactcctgggagccggctccaggtgtgggcccatcgctggatggatctgtcagaacacggctttgggctggccctgctcaacgactgcaagtat

SEQ ID NO: 157244 - DNA, 82 bp, Homo sapiens
cctgagcctcctgcaacacctgcggcctcactgggacccccaggaggtgaccctgcagttcacagaagaaaagcttggccag

SEQ ID NO: 157245 - DNA, 80 bp, Homo sapiens
gcgtcccggcgccgtcgcgccactcctccgattttcggctttgtgagaaaccttaccatcaaacacgatggccagcaacg

SEQ ID NO: 157246 - DNA, 51 bp, Homo sapiens
ttcagaccaatgccagaggagcaacagacggattctcgctctgtcgcccag

SEQ ID NO: 157247 - DNA, 98 bp, Homo sapiens
actcccaggctcaagcagtcctaccatgtcagccttcccagtagctgggaccacaggtggttccacgagtgtttgggcgcatggtgggtaaaagccgg

SEQ ID NO: 157248 - DNA, 101 bp, Homo sapiens
gcgctttttggaattcagttatcaagctttagagcctggctactcacagttgaagcctgattgcagatgacattaaagtatcagtaaatgattttatcatc

SEQ ID NO: 157249 - DNA, 95 bp, Homo sapiens
tgataggggggttccatctcccaacttgtccatgtcgtggagggcccccaagacccaacagagggatgccgcaaatgaacactcagcaagtgaat

SEQ ID NO: 157250 - DNA, 75 bp, Homo sapiens
cccaaaggatttgatacgactgccataaacaaaagctattacaatgtggataagttctgaacgtcgaaaagaaaa

SEQ ID NO: 157251 - DNA, 90 bp, Homo sapiens
ggataaacttcgtgagcagctttccacttcagaaaatgccctgacagagtcacctaaggtcctgcgagtacaagggtcgacccccaaagg

SEQ ID NO: 157252 - DNA, 50 bp, Homo sapiens
ccatcgacaagaaggcacctgaaggaaaatcacctcggcagtgtttgaag

SEQ ID NO: 157253 - DNA, 97 bp, Homo sapiens
ctcattggagcaagggaaggagccctggatggttgtgagggaagagacaggaagatggtgcccagctgtcccctttcctccaacccaacggcttact

SEQ ID NO: 157254 - DNA, 83 bp, Homo sapiens
ctttctgcttcactactgcctcttggccgtcacgcaaggatggtgattgctcacaccaaagccttggacccctcccagcctgt

SEQ ID NO: 157255 - DNA, 100 bp, Homo sapiens
agctggccaagcacaaagagcttgctccctacgatgagaactggttctacacgcgagctgggacgtccagatcggtgacatcgtcacagtgggcgagtgc

SEQ ID NO: 157256 - DNA, 50 bp, Homo sapiens
cctcaatgcagtcttttatagaaaaggatgaccagtgtcccagtgaagga

SEQ ID NO: 157257 - DNA, 80 bp, Homo sapiens
tgaccatggctccctgcagtaccctttaacggtaaaacttccttttcctgtagatcaaatcacagatcttccaaggaacg

SEQ ID NO: 157258 - DNA, 90 bp, Homo sapiens
ccggagggggaaaaaatcccaaggtctgcaaagaacgtgctggccaaagcgctctatgacaatgtggccgagtccccggatgagctctcc

SEQ ID NO: 157259 - DNA, 82 bp, Homo sapiens
ctattattttcaatagaaacagatatacagatgtggagaaggttatctgggaacaaagcaggacaagtctgggcacctgaag

SEQ ID NO: 157260 - DNA, 75 bp, Homo sapiens
gccagcgcccggagcaagcggagctcccccaagagccggaaagtgagcatgtttttgaacacattaacaccgaag

SEQ ID NO: 157261 - DNA, 74 bp, Homo sapiens
tgtttgagaaaaggcctaagaattttggcattgatcattgagaagcagccaggccacattcggagcagggtttt

SEQ ID NO: 157262 - DNA, 95 bp, Homo sapiens
aacttcctgcttgcagcgtttgatccattgacatggtacatcgtaacaagtccgaaggattcttccttgatgcatctcgacacatccttgaagca

SEQ ID NO: 157263 - DNA, 75 bp, Homo sapiens
ctgacgcccaatgggaatgaagacaccacagctgatgtggacgagtgctcactagcagaaaaaacctgtgtgagg

SEQ ID NO: 157264 - DNA, 88 bp, Homo sapiens
tttggatcctggttccgtccgctaggagtctgcgtgcgaggtgtgcaactgaggaacatggctcaagaaactaatcacagccaagtgc

SEQ ID NO: 157265 - DNA, 82 bp, Homo sapiens
ttccaacacagatgtccaagctgccaagtgtgggccatgtttgaggattgccccagcattcagttctatgagtaataaatat

SEQ ID NO: 157266 - DNA, 90 bp, Homo sapiens
gtggacgagtttgccatgcgctacggcgtcgagtccatctaccaagccatgacgtgtggcacattggttgacctttgccagggcccccac

SEQ ID NO: 157267 - DNA, 74 bp, Homo sapiens
ctggaccggcaaattaaagcaattatgaaagaagtcattccttttttgaaggctggacaggaagcacggcagca

SEQ ID NO: 157268 - DNA, 107 bp, Homo sapiens
gatggcggatgccctgcagtacctgcagaaggtctctggagacatcttcagcagccttatgccagcctggaccatcttggaggcagtgtaggatcatggaagaactt

SEQ ID NO: 157269 - DNA, 50 bp, Homo sapiens
ggcataaaacagttctcactgaactacagctttctatgggaggattctcg

SEQ ID NO: 157270 - DNA, 82 bp, Homo sapiens
ccaaatggacgggactattaaggctgcctgctgtttcccggggagatcatgaaacgaggtcgccttcccagcagcagtgagg

SEQ ID NO: 157271 - DNA, 96 bp, Homo sapiens
gaatgacaaacaaccagctcttcagtatcccttttactattcagcgactatgtgaattgttaacagatccaaggagaaactatacaggaacagaca

SEQ ID NO: 157272 - DNA, 100 bp, Homo sapiens
ggaattttgaagtacaccgtggtgacattgtatcattggttgggtaattccagaattgattggccataccattgtcactgtattactgctcatgtcattg

SEQ ID NO: 157273 - DNA, 74 bp, Homo sapiens
aagaaacagaggtcaaaggaaaaagaaaaaggggtcgtcctggccggcctccatttaacttacatgtgtagagc

SEQ ID NO: 157274 - DNA, 100 bp, Homo sapiens
tcttggcatttggctttgcctttctggacacagaagtatttgtgacagaacattgatgatggcacctcagatcgcccctacagccatgctctggtggctg

SEQ ID NO: 157275 - DNA, 100 bp, Homo sapiens
agccagctgattgacactctgcagcaccaagtgaaatctctggagcaacagctggccgtacaaatctattgtcaagtacaagacagctttctactccttc

SEQ ID NO: 157276 - DNA, 100 bp, Homo sapiens
ggagccattctatataaaacacgattcttaccactcaggaaccgttttgattaaaagtaacagtggtccgttgatgttggtatctcctcagcaaactgta

SEQ ID NO: 157277 - DNA, 100 bp, Homo sapiens
gttcaatacacctcccacctgtcctcaggcatatcaaaggtaattcatttgcacacctgttagcaagaaacagaagttgaaggactggaacaagtgaact

SEQ ID NO: 157278 - DNA, 100 bp, Homo sapiens
gacatttctggctctgaaggcgaacgcttcgctggccatttaggagctctgctcaaagccagacggtgagcgagtgctgtgctttcatgggcctcttctt

SEQ ID NO: 157279 - DNA, 90 bp, Homo sapiens
atcagtgtttgggaatgattctgatgatgatgatgagatgtgggaagaatatcctgatgtttatggggtcaggcggtcaaaccgaagcag

SEQ ID NO: 157280 - DNA, 76 bp, Homo sapiens
ctgaagaagcttacaagcaaatggccagaggcatttcatccttcatgaagccattcaggattttgaattgcatatg

SEQ ID NO: 157281 - DNA, 74 bp, Homo sapiens
tttcttttaatttttaaacttggtttgaaaggtggcgacatgtctaagaatgtgagccagtcacagatggcaaa

SEQ ID NO: 157282 - DNA, 49 bp, Homo sapiens
ctggactcatctgatagggatattaggacagtcattttgtttactcatt

SEQ ID NO: 157283 - DNA, 100 bp, Homo sapiens
agcaagatattgacgacctcaagcggcagaatgctcttctggagcagcaaggtggtttgggaacattccatgcccttctaaatacagctgtacatgtagt

SEQ ID NO: 157284 - DNA, 98 bp, Homo sapiens
cagagatctcttctgttctccactgctagggaggctgccggcgtggaccgcgggaaggcggggctggggctcggcgggaggccacccccacagccgcc

SEQ ID NO: 157285 - DNA, 98 bp, Homo sapiens
tgccgggcaacagcttcaaccgcaacgtactccaaagattcaggtttactcacgtcatccagcagagaatggaaagtcaaatttcctgaattgctatg

SEQ ID NO: 157286 - DNA, 100 bp, Homo sapiens
gtgttgcttacaggtttaacatcattaactgtgaaaagtccaacagtcagtttaattatgtacacattttggaactttatacccaagaatttatttgaac

SEQ ID NO: 157287 - DNA, 82 bp, Homo sapiens
cgacgtcttgcctgtgtcccacttgttcgcggcctatagtttggtgccctggttgtcagatgttggaaagcagtaggacgga

SEQ ID NO: 157288 - DNA, 88 bp, Homo sapiens
ggaggcgggagaggcgagctcgcgatgagtggtctcggcaggctcttcgggaaggatattaacctggctgcagagccaaaagtgaacc

SEQ ID NO: 157289 - DNA, 90 bp, Homo sapiens
agatatgggatgctggaggacatctgggggccacaaatgctccttctcctggagacgcaactcaagcttggatttacactgggcaacgtg

SEQ ID NO: 157290 - DNA, 100 bp, Homo sapiens
cggcaggaggaagttccccagcagacagtggccccacagcaacagaggcacagcttcaagggggaggagtgtccagcagcaggcattttggagatcaaag

SEQ ID NO: 157291 - DNA, 90 bp, Homo sapiens
ctccggggacccttccgtatctgcctaggcattttgctgtctcctcctaatacgcaatacgagaattggagacccaaccagccagacagc

SEQ ID NO: 157292 - DNA, 96 bp, Homo sapiens
ttggaaaacaccacttttaagtatcttacaggagaacagactgaaaaaatgtggcagcgcctgaaaggaatacttgtgtatgcggatacctgcttc

SEQ ID NO: 157293 - DNA, 100 bp, Homo sapiens
caaccagaagaagtatttgatgtcttagagaaacttggagaaggaatgtgacagtgatgataacatgggtgccaaaaatacttcaataggagaagaattt

SEQ ID NO: 157294 - DNA, 90 bp, Homo sapiens
atttgggacttcagatacgctttaacttgaaatcaaggaatgtagaaatcagggcttgggatgatgtagtacgtaaagaaaaacctaaag

SEQ ID NO: 157295 - DNA, 90 bp, Homo sapiens
cggcgtgctactgtgcgctcgatccagcaccatggggaagcgggacaatcgggtggactttttttatgaagacatggagtccttgacgca

SEQ ID NO: 157296 - DNA, 83 bp, Homo sapiens
ctctcccagacggttcccctttctgattcccacagcattttccaaccattcacggctatgactttgcagccgtcctggagtgg

SEQ ID NO: 157297 - DNA, 100 bp, Homo sapiens
ctcggtttgtgggcagcaggtggaagtggatgacgaaaactggatatacagagcccagcccagaaaagaaatagccaggcaagcagcacaaataaagctt

SEQ ID NO: 157298 - DNA, 82 bp, Homo sapiens
tgggccgggccccaccggacggcttgggcactgtttaaaggaaagttccgagaaggcatcgacaagccggaccctcccacct

SEQ ID NO: 157299 - DNA, 76 bp, Homo sapiens
ccaacaaccgcttggaatgctgcaacaatggccatcacagagccatgaaccagcagcacatgatgccttcccaagc

SEQ ID NO: 157300 - DNA, 75 bp, Homo sapiens
ggaagatatttttgggaaggaaacgcccagtggtgtgacgatggatggccaggccatgttatgggatctcaacga

SEQ ID NO: 157301 - DNA, 96 bp, Homo sapiens
ggacaagtttcatacatttctccgccaattcaccttgactctgagctagaaagaccctctgttaaagatccagctccaggtcccacaggggctctt

SEQ ID NO: 157302 - DNA, 82 bp, Homo sapiens
agaccctggagcctcagttggaagcagccgatccagcctgcggagcctgtggggcaggtgctcttgatgatttcgataaagc

SEQ ID NO: 157303 - DNA, 82 bp, Homo sapiens
cgacaagccgctggcagccgcggatctcaccgccgctcagggccggctgcctaccctccagactgtccgctatggctccaag

SEQ ID NO: 157304 - DNA, 123 bp, Homo sapiens
taccgcccagtcactcaaatccgtggactacgaggtgttcggaagagtgcaggaactctaagaaggagctgatgtggaggagcagctgagacagttcaagatgacgaccacagtagccacaga

SEQ ID NO: 157305 - DNA, 98 bp, Homo sapiens
gtttctctctgcctgatttctccaaaatttggaaactatttacgcaagatggctgtcctctctaaggaatatggttttgtgcttctaactggtgctgc

SEQ ID NO: 157306 - DNA, 100 bp, Homo sapiens
ccactctgcggagttagcagtcacgacctccagcacaggcctggcgcaagcgctggtttgtcctccggcgaggccgcatgagcggcaaccccgatgtctt

SEQ ID NO: 157307 - DNA, 100 bp, Homo sapiens
cgcccgcaggcggcaggaatcctcctccggcgatagatgttggctccgacttgacacctacttcatttggagttttataggaccagcaactttgataatt

SEQ ID NO: 157308 - DNA, 98 bp, Homo sapiens
gaggaccagcggccagagcctcagtgactgccaccctggaggacagggcacaacaaccgtttctggaggctgaacagtacccagggggagattcgtgt

SEQ ID NO: 157309 - DNA, 75 bp, Homo sapiens
cagattctgttgcgaaggcagccatctttagttcgtctttcctagagagcttccttcaaaatgtctactgttcac

SEQ ID NO: 157310 - DNA, 75 bp, Homo sapiens
ggagctgtggccctcagaatttaaacttaaggaaagagtgggaaagtgaggcccctggcaaccactaatctgctt

SEQ ID NO: 157311 - DNA, 100 bp, Homo sapiens
gccgcctagagaagaggctgtgcttcggcgctccggctcctcagagagcctcggctagggtatttgaagtataccatacaactgttttgaaaatccagcg

SEQ ID NO: 157312 - DNA, 50 bp, Homo sapiens
atggatgaggaggacgcggcggccccgaacttccgagaagtcaccaccaa

SEQ ID NO: 157313 - DNA, 114 bp, Homo sapiens
tgttttagtgctttttatttttccccaattcagcagagaatattttcaagggggacaatgcagatcttcgtgaagactctgactggtaagaccatcaccctcgaggttgagccc

SEQ ID NO: 157314 - DNA, 100 bp, Homo sapiens
ctgtactgacgcgccctcgcttcttcctctttctcgactccatcttcgcggtagctgggaccgccgttcagggcaaacctggtggacctgcagaagaagc

SEQ ID NO: 157315 - DNA, 50 bp, Homo sapiens
tgctgctgagaccaaggaatgaactataatgtaactgcaaactccaagct

SEQ ID NO: 157316 - DNA, 75 bp, Homo sapiens
ctcttctggcagtgattctgacagtgaggttgacaaaaagtcaaggcctggccgacaacaccgttattgctaaag

SEQ ID NO: 157317 - DNA, 89 bp, Homo sapiens
agaccagcctgaacaacatatgtaaacaggaacatcgataagtagtgtaaaaacttgcacaatgaaatccgaagccaaggatggagagg

SEQ ID NO: 157318 - DNA, 50 bp, Homo sapiens
aattccaagttcagattctccagattcatgttacatgtaaagctgtcctc

SEQ ID NO: 157319 - DNA, 95 bp, Homo sapiens
tggggcacccggtgtaccgcggcgagaagccccagctgcactacgcggtctgaaaactccaaatggctgtgagctggtggtggggggagagcccc

SEQ ID NO: 157320 - DNA, 90 bp, Homo sapiens
ctcagcctctcaatcccagtctcatgcttccagcctggataatgattgagccacctgtccagtgctccagctgaggctgcaacaaaggag

SEQ ID NO: 157321 - DNA, 96 bp, Homo sapiens
cgagaggaaagaagtcccttatcacgaactcacctgtgagtgaatctctgatccaggaggagcctcactcagcctgggaactttgaggtgctattg

SEQ ID NO: 157322 - DNA, 75 bp, Homo sapiens
ccactgctgcacttctatggccgtaaactttacaataattttcccagctttctacactacttgcctggaagccac

SEQ ID NO: 157323 - DNA, 100 bp, Homo sapiens
ccctgctcgcagaattaccgcctcttctttagttcagctgaatccagaacttggtgttaagaatggcatcttgggagctggcatgcttcccctgggctcc

SEQ ID NO: 157324 - DNA, 75 bp, Homo sapiens
ccggaacgggagccaacatggcagcggggttcgggcgatgctgcaggggctgtttaacgacccccaactccccat

SEQ ID NO: 157325 - DNA, 75 bp, Homo sapiens
ccggctgagaacggcagcggcgagggctccacgtgcagcgtctctccggggctttgttcgcgggggtcacagctc

SEQ ID NO: 157326 - DNA, 75 bp, Homo sapiens
aatgacctccatccgcaggacgaggaatgttacgttcataacttactaaggattagtgtatattttccaaccttg

SEQ ID NO: 157327 - DNA, 75 bp, Homo sapiens
cgccgcgtagcttccatccgccagctgccatgagcgagcgcctccgtcccaggcgacctgggagacccagccagt

SEQ ID NO: 157328 - DNA, 100 bp, Homo sapiens
attttgcaacacgtggtagtgaactgtgaggagtttgaggggtctgaagactgaaagagtcgaatggtttgttggcagatgagttttgatcatcctgaga

SEQ ID NO: 157329 - DNA, 50 bp, Homo sapiens
tacaccttttccacagggaattgagttgaatggagatttacagacagtca

SEQ ID NO: 157330 - DNA, 100 bp, Homo sapiens
ggtgctggacgacctgtgccgcaacatggacgcgctcagcgagtgggactggatggagttcgccaaagacagcagcattcccaagcgcaagagaaagcgg

SEQ ID NO: 157331 - DNA, 100 bp, Homo sapiens
cgcttctcgtagtcctgggagcacagcagaagtcgcgagcccagcattgacctgctgcaggccttcgtggagcactggaagggcatcacgcactactaca

SEQ ID NO: 157332 - DNA, 78 bp, Homo sapiens
aagcatgaacaggcatctaatgttcttagtgacattagtgtgcgggcattctatgtgaacgtgctgaatgaggaacag

SEQ ID NO: 157333 - DNA, 100 bp, Homo sapiens
actgcagacatgcttcaggctcctctctttactgctgaagctttacttcgagctcatggttgttggaagaggagcctttggagttgtttgcaaagctaag

SEQ ID NO: 157334 - DNA, 75 bp, Homo sapiens
ccgccgctatgactggtgagggccccgggccctcagcctctcttaattcagaaggagctggcggacatcacttta

SEQ ID NO: 157335 - DNA, 75 bp, Homo sapiens
agagccaaggaggaagggttgtccgggttctaatagaagactgtatcccggtactgaagaggtacgccaaagaag

SEQ ID NO: 157336 - DNA, 100 bp, Homo sapiens
ggtgaagtataggctgaggctacctgtgaacagtacgcagtgaatgttgtgtgtggaggtcattgcaaaggaaggacaaaacctgaaagagctatatttg

SEQ ID NO: 157337 - DNA, 100 bp, Homo sapiens
taagagactccaaggacaactgcaagggggaagtagagagataacaaaagctgctcagagtctcaatgaacttgcattgtttacaataaccaagatatga

SEQ ID NO: 157338 - DNA, 82 bp, Homo sapiens
accgaccccgcctactgcggcgcggggacccttggcatggaagaggagatggttcgtgttacgcagtggccgtttaactgga

SEQ ID NO: 157339 - DNA, 50 bp, Homo sapiens
cgacgaggagcagggcctgactgcgcagatgaaggtcaccgtgtccaaag

SEQ ID NO: 157340 - DNA, 75 bp, Homo sapiens
gcggaggcagccatggtgcggttcaagcacagatatatttttgccatcatggatcagtttggagatatattagaa

SEQ ID NO: 157341 - DNA, 90 bp, Homo sapiens
tgaccgagaccgcggccgggaccgagggcgacattgactacagcaccgtgctcctcggcatgctggtgacgcaggacgtgcagctcgggc

SEQ ID NO: 157342 - DNA, 90 bp, Homo sapiens
ctcccgcacctgcggggcgaggaccgcgtctgccactgcaactgtggccgcccgagcgggaagaagttccgcagcaagccgcagctggcg

SEQ ID NO: 157343 - DNA, 74 bp, Homo sapiens
tgtctttttcttcaatgggcagcatatgaaagtggattatggaggtatgaaggttattgaaaaccgggccttaa

SEQ ID NO: 157344 - DNA, 50 bp, Homo sapiens
acctgtagccctggagagaggaaaagcgttctcttcaccccaggaagaag

SEQ ID NO: 157345 - DNA, 136 bp, Homo sapiens
gcgtcttatccaaccttgcgctgcatccgctcgacctcgtgaagatccgcttcgccgctagtgtgcatttactcctgcctctccatgcctgaaggaaggaatgaagaggtctctgctgtccatctgagccagtgac

SEQ ID NO: 157346 - DNA, 101 bp, Homo sapiens
agcggcaccgcatccggggtccacctactcgccaggactcccctgcaaagcgcccagccctgggggtgcacagcgacttcaccgcggcagccaccaggggc

SEQ ID NO: 157347 - DNA, 91 bp, Homo sapiens
ctcacggaccttagccaccgccgccgccatcgccaccatgggttcagcttgttggtttagatgaggagagttcagagtttatttgcagaaa

SEQ ID NO: 157348 - DNA, 82 bp, Homo sapiens
cagctttatgaaacagcttgcttcctacagattcgagaaatgatggagtccttcgaaggccctcagcctgcggatgtgaggc

SEQ ID NO: 157349 - DNA, 50 bp, Homo sapiens
ggaatcccaacaagccctttgaccaagatatttggagttcttacaacatg

SEQ ID NO: 157350 - DNA, 100 bp, Homo sapiens
ctgagcaagtggtcgatcctatccagactggcatccacaaggacaaagataaacctcccagcttctctgttgtccttgagagattgaggcgtaccttgac

SEQ ID NO: 157351 - DNA, 90 bp, Homo sapiens
cggacgtcctgccggggaagaatcaaagagcagtgctcctacagaagaagggaaaaaagagctgctgttcctaagtaacgcgaacccctc

SEQ ID NO: 157352 - DNA, 90 bp, Homo sapiens
ggacaccgcagtatgaggcagaggtgtggtgtcagcacagcggcaggtcaccgttcaggaaggacccttgtaccgcacggagggctccca

SEQ ID NO: 157353 - DNA, 76 bp, Homo sapiens
gcttcacggaggagggcgccagctacttcatcgagcaaataagggcgagactgaaaaatcaagtcactcagttgaa

SEQ ID NO: 157354 - DNA, 75 bp, Homo sapiens
cgcccaactgcctcagaggacagggcctgtccttgatagtggtcgggaagcgaagtcccggagaagaacgtgcct

SEQ ID NO: 157355 - DNA, 76 bp, Homo sapiens
cagaattacgggcaagcgctgttcaaacccatgaagtgagcgagtgctgtgctttcatgggcctcttctttatgaa

SEQ ID NO: 157356 - DNA, 85 bp, Homo sapiens
aggaggttcttcagtgtatgcctggcaaatgggagagaccctttgaagtcaaggacaccgaggaagaggacttccacgtggacca

SEQ ID NO: 157357 - DNA, 75 bp, Homo sapiens
cgacgccagagccctttgactctgagaccagaaaggtgtgaccccagcccgtcctcctatcccggtcaccatccc

SEQ ID NO: 157358 - DNA, 74 bp, Homo sapiens
tttttgagaaaggaaggaatatatcctgactgattgtccagaggtgtccttctaaagctggtagaggtttcacg

SEQ ID NO: 157359 - DNA, 100 bp, Homo sapiens
cttgctgcaaatgctcgtgctacctgccctggccctgctcagcgccagcggcactggctccgccgcccaagaatgtttctccatcccagagagatgaagt

SEQ ID NO: 157360 - DNA, 65 bp, Homo sapiens
ctcctgagaagctgggattacagatgcccacacactagagactcaactatccaagtggtggagaa

SEQ ID NO: 157361 - DNA, 100 bp, Homo sapiens
aagattacagagaaaaaaccaacaccttcctgtgcagtcctgttggaattttgcacttgttgagctcgtgaaacacaagcccaaggcaacaaaagagcaa

SEQ ID NO: 157362 - DNA, 75 bp, Homo sapiens
cacccaccgccgccgcctcccaggctcagacctcggcatgtcggttacaagaagaattggagaagctccgcacag

SEQ ID NO: 157363 - DNA, 82 bp, Homo sapiens
ggagaagtttccgcaggactacttccccgagtgtactaatggtcacttgatgtgcgctggctgttttatccacctactagca

SEQ ID NO: 157364 - DNA, 115 bp, Homo sapiens
ctgaactcctgacactatttagtattcttgaaggagagcttgaagcaagggaccttgttatagaagccttaaaggtacgcatagctgctaaattcatcactcatgcacccccagg

SEQ ID NO: 157365 - DNA, 98 bp, Homo sapiens
gactgcagcgggtccggtgcaggtgaggggcgcgcgcctgcccagctttgcagcccccgaacgcggcctcgcacagagcttgtcaggaagatcggagg

SEQ ID NO: 157366 - DNA, 100 bp, Homo sapiens
attcacagacaactccaccaattgtacagatccaggatgagaagactgataaaagaagaagctagctgaacagctgtaaaatgcccaaatctgggttcac

SEQ ID NO: 157367 - DNA, 107 bp, Homo sapiens
gttggcaaatcaagcctagtgcttcgttttgtgaaaggccaatttcatgaatttcaagagagtaccattgggggtagttacttttggtgacgctgtccagttcccac

SEQ ID NO: 157368 - DNA, 90 bp, Homo sapiens
ccctccagcagcagaccttcaagatagacattgaccccgaggagacgctgatgaacttattagtcctaaagacattgatcctgtccagcg

SEQ ID NO: 157369 - DNA, 100 bp, Homo sapiens
ggggacccagggatccgagaaaggaagacttgggatataaagatgaagcgcagctgtataaagaagagcacctgaggaatcggcagcaccctcactgcta

SEQ ID NO: 157370 - DNA, 74 bp, Homo sapiens
ctgagatgcgcaaattcactccccagtacaaaggagttgtaagacgttcatcgccgtgttatccttgagtaaag

SEQ ID NO: 157371 - DNA, 50 bp, Homo sapiens
atatcttgaaaagctgccagaaaggtctggccagcatgacccagaactta

SEQ ID NO: 157372 - DNA, 75 bp, Homo sapiens
tggatctttgctagaaagagaggtacagcagggaagaactggaaactcagagaaagaaactgcccttccatctac

SEQ ID NO: 157373 - DNA, 83 bp, Homo sapiens
gccgcgtgtacccggttgtcctcaggcgctgtcagggggatatgagactttctactcggaatatcctgagtgttgcgtggatg

SEQ ID NO: 157374 - DNA, 100 bp, Homo sapiens
ctcgatgaggataacatccctccagaagatgcactgctcagcacgcaggcatgtgaggaagctgggcttaaaggagactccagcaaatggagagacagac

SEQ ID NO: 157375 - DNA, 83 bp, Homo sapiens
cagtacccagtgaagccattcgagggctgagtgctttgcagtctttcctctacagctttacgttccagtccaataatgagaaa

SEQ ID NO: 157376 - DNA, 120 bp, Homo sapiens
cctaggagtgcaccacccccggagcccccctcaacacggaccgcgcccgccgggcacacaagaatggtcactggccaattcctgtccccccagcagcatggcatcgtgtgctgaaccctc

SEQ ID NO: 157377 - DNA, 100 bp, Homo sapiens
gtaggaagaagggcaggacctgggcggaggccgccaagacgagttgctggagaatgtaaccctaatccataaaccagtgtcgttgcaaccccgtgggctg

SEQ ID NO: 157378 - DNA, 97 bp, Homo sapiens
agggtaaaaggctgagaagcttaagcaatctgaagaggatgtaagtcagtttgattccaagtttacacgtcagacacctgtcgacagcccagatgac

SEQ ID NO: 157379 - DNA, 118 bp, Homo sapiens
ctgatctcaaggaacccagtaatcgattacccaaagtttacaaatggagttttcagatgtgaatgggtaccacagaccatgtcatcgtcctggcgtccacgaaccgagctgacatttt

SEQ ID NO: 157380 - DNA, 90 bp, Homo sapiens
aaacattctacccaagtctacctgggacccatttgacattgtgcagcaaagaaatggttatggagaagcccagtccgctgcttgtagggc

SEQ ID NO: 157381 - DNA, 82 bp, Homo sapiens
tgggaacccgcggtggagcgggacacgaacgtgcgggagatacagatgacccaccaagaattactcagaaccctgtgatcaa

SEQ ID NO: 157382 - DNA, 85 bp, Homo sapiens
aacagaaacacctaggaagggagaactggatacatgatcccttaattcaggctcaggctgaagaactgacccacttacgacagaa

SEQ ID NO: 157383 - DNA, 50 bp, Homo sapiens
gttctggggacagtttggtattaaaagtgatggatgtggacacactgtac

SEQ ID NO: 157384 - DNA, 100 bp, Homo sapiens
atgaatgtgggggagtttacactacacacgctcttggctgtctgccatcatggatgttctcgcagaagcaaatggcacctttgccttaaaccttttgaaa

SEQ ID NO: 157385 - DNA, 90 bp, Homo sapiens
cgccggaacaccctggaagccgagaaatgagagtctactgtggccacgagtacaccatcaacaacctcaagtttgcacgccacgtggagc

SEQ ID NO: 157386 - DNA, 100 bp, Homo sapiens
tggagcctcagttggaagcagccgatccagcctgcggagcctgtggggcaggcagtatttggcagtcgtattcagagataaacccctggagctatgggat

SEQ ID NO: 157387 - DNA, 100 bp, Homo sapiens
tgcgtgaggggtttgtactatcctcggtgctgtggtgcagagctagttcctctccagctcagccgcgtagattgggaaaatgaggtacgttagtgttcgc

SEQ ID NO: 157388 - DNA, 83 bp, Homo sapiens
ctcagctctcggcgcacggcccagcagcctcccgcgacgatgcccctcaacgttagcttcaccaacaggaactatgacctcga

SEQ ID NO: 157389 - DNA, 75 bp, Homo sapiens
gctccaggccaggccatgcgggtgacttaagagattaaaattaatttggttgctgttggttctgaacaaataatg

SEQ ID NO: 157390 - DNA, 114 bp, Homo sapiens
cacacagtcagagaaaccggggcaacctggagttgagacagacgactgggatggaccaggtactatggatatagaggagagaaatcgccaaatgaaaattaacaaatacaaaca

SEQ ID NO: 157391 - DNA, 74 bp, Homo sapiens
ttgcagattccacgccatcggctgcctcgagacggccttggacaagattcgctatgagagcctgacagaccctt

SEQ ID NO: 157392 - DNA, 100 bp, Homo sapiens
gaccagatgttggatatgggatttgctgatcaagtggaagagattttaagtgtggcatacaagaaagtaccatgcgggatactatgaagtatgtctatgg

SEQ ID NO: 157393 - DNA, 95 bp, Homo sapiens
ggcaagattgtgacagactacaccctggctgaggctgaggctgccctgcagaaggcctggaatcagggcggggatggggaagtcagagctccaag

SEQ ID NO: 157394 - DNA, 75 bp, Homo sapiens
aagcaagctgaatggaggccagatagtaccatgatagctgtatcagtttcaggcacagaactgtatatccaataa

SEQ ID NO: 157395 - DNA, 102 bp, Homo sapiens
tgagtcagcctcgaacgccacagaaacatccggcccagacatgactatcaaggatgttgcttcagagtgtgaagtcaaatgcatgccaacattccagttttt

SEQ ID NO: 157396 - DNA, 75 bp, Homo sapiens
gagtcctcagctagtgacatggtcggaatgcccaattcttctggactcatgaaccgtcgtgatgccattgccaaa

SEQ ID NO: 157397 - DNA, 96 bp, Homo sapiens
ctcaaatttgcttcccagagaaatgatattcaggagaagtgtgtaaagctctttcagtctcacatggcaacgaaaacaacttgtatgtcttcacaa

SEQ ID NO: 157398 - DNA, 90 bp, Homo sapiens
cagattcgcagtggtcgcttcttctccttggaagatgatgagaagcttattgaggaaatccagaaggaggctgaagaggaacagaaaaga

SEQ ID NO: 157399 - DNA, 99 bp, Homo sapiens
caacaccaggcatctacatgggcagaccaactcaatctacggaatccagaggcagcattgtctccaaccttccgtagtgacagcccagtgcctactgca

SEQ ID NO: 157400 - DNA, 98 bp, Homo sapiens
ttgaatcacctgtcgaagattcattgcaactggccatgccacagcacataaagattacagtgacaagaaaaacattgtttgaggattcctttcaacag

SEQ ID NO: 157401 - DNA, 75 bp, Homo sapiens
cctctccagccatgtggaactggtgatcagcaaataaatgatcaatactaagacaccaaggccctaagaagtcac

SEQ ID NO: 157402 - DNA, 82 bp, Homo sapiens
cgaggacacctcggtggagaagctcaaggagcgctgcctcaagcacagcctcagctcaaaggcatcgtcaccaaactgttct

SEQ ID NO: 157403 - DNA, 75 bp, Homo sapiens
ccagaagcgggcggcgcgggggagatgtaagactttgaccccgacgcaggcttcagtgattgccgcggatcagaa

SEQ ID NO: 157404 - DNA, 100 bp, Homo sapiens
gggtcaccaatgccagcctagtccttttcaaatccaaaggactgcatgacacaccataggatatagtcaagaagcctttggacatgggagtttcaagctc

SEQ ID NO: 157405 - DNA, 75 bp, Homo sapiens
gaagaaaatggatttcgttatatcccctttagaatatatcagccacccacacagaatatgcctatgggtcctgga

SEQ ID NO: 157406 - DNA, 82 bp, Homo sapiens
cgagacacaccaggccggcaggctgagaaaagcgagaccgcgtgcgaggaccggttttaaaatcaaagatgggaaaatcgga

SEQ ID NO: 157407 - DNA, 83 bp, Homo sapiens
gcggctctcggcgcgtccagcgcagcccgacgttccgctgctggggaaacaagctcacatcttcctgtgggaaaccttctagc

SEQ ID NO: 157408 - DNA, 82 bp, Homo sapiens
aagcattggtgcacgatgtactggttttgatacttatagaggactcccttcaatttccaatggaaattatagccagctgcag

SEQ ID NO: 157409 - DNA, 80 bp, Homo sapiens
tgccacactcctcatggatgtcatgtcctacttcaatggattcacggcccttccacagtaccttccacaataccagtgct

SEQ ID NO: 157410 - DNA, 97 bp, Homo sapiens
gctaagtccgtgagcggtggcagtcgcgaccgcgggtgcatccagtttctgcgcccagacctgcaggctgggacaatgaaaagaaaatagctatttt

SEQ ID NO: 157411 - DNA, 100 bp, Homo sapiens
atgcgctcatgacgctggagatgcagctggtggagcagctggagccattaagaagcctgtgggaaagacaaaggaggaactggctttggagaaaaagcgg

SEQ ID NO: 157412 - DNA, 100 bp, Homo sapiens
tacacattggcaccagctacatcaatccttgagtatcctattgaacctagtggtgtattaggaaggtacacagttgtcaaaggcatcatctctcctgttg

SEQ ID NO: 157413 - DNA, 100 bp, Homo sapiens
ttcgaaaacgaacttcccacgtttgctatgttgccctttggagacaaaacaaggtcctggatgcctcatcccttagtttcaacaccagattgaaatggtt

SEQ ID NO: 157414 - DNA, 100 bp, Homo sapiens
gccagctggtggaggcgatagacgagtatcagatgagctgaacaagcggctcactgctcctcctgcagctttcctctgtcatttggataatctccttcgc

SEQ ID NO: 157415 - DNA, 101 bp, Homo sapiens
atctgaaggaggggcttctggttagcccagcctacaaggagaagatgaaggagctgtcggtgctgtcgctcatctgctcctgcttctacacacagccgcac

SEQ ID NO: 157416 - DNA, 74 bp, Homo sapiens
cactacccacaggacctggcccggcccctcttccccagcacaggccctcctccagagttctgcaagtcgaaaaa

SEQ ID NO: 157417 - DNA, 90 bp, Homo sapiens
atcagcaccaaatcccacagaggcatctgagtttggaaattttagcattcaggtgccaggaatgcagatgggacagccagtgccagaaac

SEQ ID NO: 157418 - DNA, 50 bp, Homo sapiens
gtctcaacccacttccttcagaggtccccagtcccaagcggaagttggaa

SEQ ID NO: 157419 - DNA, 75 bp, Homo sapiens
cgccgagggacctcacatcaacttctaccagctggcaagtagcctgcagtatgaaatgctgctgctgacggattc

SEQ ID NO: 157420 - DNA, 74 bp, Homo sapiens
tcagagtggaaaaagtaccatcatttgaaacagacaggggcaagtgtccgagtggtgaatcagctacttacaga

SEQ ID NO: 157421 - DNA, 102 bp, Homo sapiens
taccccaaaagaactctgagagaatatactcaactgtcctgctgtgattaaacaagactgctgtattttgtgagcctgaatttaaatacattgggaatatgc

SEQ ID NO: 157422 - DNA, 51 bp, Homo sapiens
ggaagatcgtcgccacctggatgctggagcagaaagatgaaggtcttagaa

SEQ ID NO: 157423 - DNA, 83 bp, Homo sapiens
tggacacggacgtggtcaagctaacttcttccttgacatggtcctttggaaagttgtgttcaaccgagacaaacaaggagagt

SEQ ID NO: 157424 - DNA, 74 bp, Homo sapiens
atgattgaatctggtgttatcaacttaaaagatgccacctctaaggttcagaggacagttttggagaaggagat

SEQ ID NO: 157425 - DNA, 90 bp, Homo sapiens
cgccgacggctgctcaaacatcaggaaatgagccgtcagactgctacagcattacctaccggtacctcgaagtgtccaccatcccagagg

SEQ ID NO: 157426 - DNA, 75 bp, Homo sapiens
ccgcccagagtccgatggcggcggcactgagggccccgacccaggtggaagttaaacgagctgagcctcgggaca

SEQ ID NO: 157427 - DNA, 100 bp, Homo sapiens
gccatcgcacccccactgctgcaggagctcaagaaggtgacccggatctggttctgaggtgcattgtctccggcttcttcgccaatgcagcgaggtttca

SEQ ID NO: 157428 - DNA, 83 bp, Homo sapiens
agtttaaaacttatgctatctgcggggccattcgtaggatggtaactaggatttctacctcaaccgcgagacctatgcaagga

SEQ ID NO: 157429 - DNA, 96 bp, Homo sapiens
ccactcgcctcagggagatctactcagccccgacgggtgacagatgtgccagatacccaaagagcccgcggttcccttcaaaaagcggctgcaaga

SEQ ID NO: 157430 - DNA, 100 bp, Homo sapiens
gaactgcgaggaggaagctggtggagggccagctaggtatcttggagatggccgcttccatctggagtctgtcatgattgccaaccccaatgtccccgct

SEQ ID NO: 157431 - DNA, 98 bp, Homo sapiens
cggcgacgtcgagaacgacgaggacgcgttgctgcggcgtctgcgaggcccgaggcttcagtatcagacacagcacagcagccatctgaagagcaaag

SEQ ID NO: 157432 - DNA, 98 bp, Homo sapiens
aacaaattgctatgatgaaaccaaaaggccagactgaacacgatgagggaccgtataatagacgctggccccaaaggaaactactctcgatttatgaa

SEQ ID NO: 157433 - DNA, 98 bp, Homo sapiens
cacgaggcttcacggaggaggtggataccatggcctgggagaccatcctgatggatacactggaggacaacatcccccgtgctcgggctggccactgc

SEQ ID NO: 157434 - DNA, 83 bp, Homo sapiens
ctcgtacacttcttggcagtcatggacaagagctattgatagaaggaagctgagctgaacacattacgatggatgatggaaac

SEQ ID NO: 157435 - DNA, 83 bp, Homo sapiens
ccaggtgcccgcagagagcagccgggctgccagcgatattgaaatggattccaggcgtgtgcctcgagacaagctggcctgca

SEQ ID NO: 157436 - DNA, 124 bp, Homo sapiens
gagacgtgcctttgaccttctgccatgattgtgaggcctccccagccacgtgaaactgtgtctgtgacctttgaggatgtggctgtgacattcacccaggaggagtggggacagttggatgcag

SEQ ID NO: 157437 - DNA, 74 bp, Homo sapiens
gaaaccagaccagaaggatggaacgagcgacgtgacacaagaggtcccaagggagcaaacctgaaagccagagc

SEQ ID NO: 157438 - DNA, 83 bp, Homo sapiens
cccgaggccaggagccaggggcccagaagagctccacgcaggagatcggtgaggagctgatcaacggagtcatctactccatc

SEQ ID NO: 157439 - DNA, 76 bp, Homo sapiens
cttcagtacaatgtcaccctcccagcaacaggcatttattaatacagcaaaagaaatttatgaaaaaattcaagaa

SEQ ID NO: 157440 - DNA, 82 bp, Homo sapiens
tggcgtgcactccgcacctcggggacattattgcgcgtggaacggctgcttttggaagctcattgctatggacagtgctatc

SEQ ID NO: 157441 - DNA, 90 bp, Homo sapiens
caggactattttcacgttttaatgccgagaggtatccgttacagcactgatgtgagtgtagatgaagtaaaagctttggcttctctgatg

SEQ ID NO: 157442 - DNA, 74 bp, Homo sapiens
gggacaagatcccgtccatgaatcagaaccaagcgcctccaggtctctacacgaagacccaggacccagccaaa

SEQ ID NO: 157443 - DNA, 100 bp, Homo sapiens
gcggggtgtacgaaagagaaacccggagggcgccgggtagccacgatggaggtgatgaacctgatggagcagcctatcaaggtgactgagtggcagcaga

SEQ ID NO: 157444 - DNA, 75 bp, Homo sapiens
gtcttccccggccggtccctcgcctcccggccgagctgacggacatggatttgattgacatactttggaggcaag

SEQ ID NO: 157445 - DNA, 71 bp, Homo sapiens
cgatcccagaggtgcatttcaggattcattctatttcatcaggagagctcaaaggatggctactgacatgc

SEQ ID NO: 157446 - DNA, 97 bp, Homo sapiens
gatgcacaggagtggccgttatggaacgcagaacacacatgcaggacttgaaagatgttactaataatgtccactatgagaactacagaagcagaaa

SEQ ID NO: 157447 - DNA, 152 bp, Homo sapiens
gccctcaccgggttcaccttctcagccctgcagatcctgccctacacactggcctccctctaccaccgggagaagcagatattccactgttgaaagaagcatgagggcagcggccagcctttcctctctgcgaggttctctcagcccttcct

SEQ ID NO: 157448 - DNA, 75 bp, Homo sapiens
tttgcagtctcgacataagttggccacagatgtctttaattccaaaaacctggccgttcaggcacaaaagaagat

SEQ ID NO: 157449 - DNA, 73 bp, Homo sapiens
gtcacctgccaagcccagcaccaatggcacaacaggctaagtcctatcagccatggaaacaccattgctctct

SEQ ID NO: 157450 - DNA, 104 bp, Homo sapiens
aataccagtccccagtgagggtgtacaaatacccctttgaattaattatggctgacactcatgaggaccatgatacttccactgagaatacagacgagtccaac

SEQ ID NO: 157451 - DNA, 75 bp, Homo sapiens
aacagaaagtcttacatgacacaatggatctgaatcatctcttgaaaggtatcaaattgtagtggaaataatcca

SEQ ID NO: 157452 - DNA, 76 bp, Homo sapiens
ttttccggccctgggatgtcacggcctggagtggtgtgtctaagggactggctgagagtctgcagccagactacag

SEQ ID NO: 157453 - DNA, 97 bp, Homo sapiens
cccagttccaaagtgtcttaaagcacgtcgcgtttggaaaaattatctcccagcaattaatgggattgtctttctggtggactgtgcagatcattct

SEQ ID NO: 157454 - DNA, 90 bp, Homo sapiens
ctttcctgtaatggatttcatgacctaccaagtcaaattggcaatctgctaaaatcttgatgtggaagaaatggaggactcagaaccaag

SEQ ID NO: 157455 - DNA, 82 bp, Homo sapiens
agagcggggtcggggccggctgaccaggaacctgggcgagcagcggcgggggcccgagggacagatgcaccatcaggaatgg

SEQ ID NO: 157456 - DNA, 100 bp, Homo sapiens
aatgcgtgagcaaagaagattccatggccaggccccactggaggagatgaggaaggctgccgaggatctggaaattgtgggcccatctggggcagggaag

SEQ ID NO: 157457 - DNA, 80 bp, Homo sapiens
ctgatgggctgccatctcgaccacttcgaagaagtcagcaaggtgaggctccaggttgggctctatgctgtgtaccttct

SEQ ID NO: 157458 - DNA, 100 bp, Homo sapiens
tcgccgtctcttgcttccccgtcctctgacatcgcctgcagccgagcgggcccgttccgccggagctgaggaccagtgacttctgacagctctctccatg

SEQ ID NO: 157459 - DNA, 98 bp, Homo sapiens
ttgccctgggggcctttttttaaaaaacaaaaaccacaaaaattcccaaaccatacttgctaaaaattctgggtagtccatgatggtaagtcatagaa

SEQ ID NO: 157460 - DNA, 108 bp, Homo sapiens
cctgctgtagtcacaggagctgtagagaggaccccggtacatctgaaagccgggaaatggtcaaaatgcagatcttcgtgaaaacccttaccggcaagaccatcaccc

SEQ ID NO: 157461 - DNA, 82 bp, Homo sapiens
ctcgcgaccgccgagcctgcagcctgccccgcggccaacatgagcttcttgttggcagctgcaatgactctccgcacggtat

SEQ ID NO: 157462 - DNA, 75 bp, Homo sapiens
gggacctgctccgggacaacatgctgcggggcacagcttcagatgatgaatttgagaatcttagaattaaaggcc

SEQ ID NO: 157463 - DNA, 100 bp, Homo sapiens
tctccattcccagtgggatcccagacttgccccaggacacctttatccagtttcctggatggaccaagctgcctactgaatcactcttctatcgtgctgt

SEQ ID NO: 157464 - DNA, 90 bp, Homo sapiens
cgcatccatccagatgaacgtggccgaggttattgaagaaattgaagaaatgatgcaggaatcaccggacccagaagatgatgaaacccc

SEQ ID NO: 157465 - DNA, 100 bp, Homo sapiens
ttggtcaatgacctcattcatggcaaaaatgataagcaacgatgtgctgagctgaagaaagccttgtgtactgcccatgagaagttctgtttctggccag

SEQ ID NO: 157466 - DNA, 82 bp, Homo sapiens
ggcccgggcgccatcgagccttggcggcggacgtgcaggtcaccgacgatgagggcgcacctgctgtcctggagcttccgat

SEQ ID NO: 157467 - DNA, 83 bp, Homo sapiens
gtcaacgctggctgccgctggaggccaatcccgaggaggctactcacagtcgaactacaactccccggggtccggccagaact

SEQ ID NO: 157468 - DNA, 83 bp, Homo sapiens
aacacaaaccccaagtcctccttgccaggccttcaaccactatctcagtgcaatggatatggctcgtggacagcagaaaattc

SEQ ID NO: 157469 - DNA, 75 bp, Homo sapiens
tctaccataaatcatgcgttttcatcctcagaagcagctgtccaggcagccatcttgtctggagacaagtctgag

SEQ ID NO: 157470 - DNA, 96 bp, Homo sapiens
acagtcgctgttaaatgtgcctgaaaagcaatttgcaatctttgcattaggaagaatttttaactttgaccatagagcataggaaggggactcaag

SEQ ID NO: 157471 - DNA, 82 bp, Homo sapiens
gtggtcagtgtgtgtggccacctgtactgtgtgtcccggcatggatatccggaacaacctcactaggttgcatgagctggag

SEQ ID NO: 157472 - DNA, 101 bp, Homo sapiens
agcagtaacatggtaacacttaaaatggtactcggggacctccaaagactaaactgacaagccttcaaggagcccagggattgagaggatccagaatccag

SEQ ID NO: 157473 - DNA, 100 bp, Homo sapiens
tgatgctgagaagatatgaaagatgttgtcttgagaaattacgcttaaggaatgactgggaaattgtgggaacctggcttctgtatttaccatgtacctg

SEQ ID NO: 157474 - DNA, 82 bp, Homo sapiens
gaagcttcagacccgagaaagggaatttcaggaacaaatgaaagtagctcttaagtttgcctgcaatggtactgtaattgag

SEQ ID NO: 157475 - DNA, 100 bp, Homo sapiens
aggatctggtgtaccaggcgaagctggccgagcaggctgagcgatacgacggaaaaaccccatcctgaacttctctgctcagccttcgcctctgcctccg

SEQ ID NO: 157476 - DNA, 82 bp, Homo sapiens
gaaaggagaaacaccagacactggaagtctcactgtctcgagctttgccacaaatgtcagtgcagaactctggctggcccca

SEQ ID NO: 157477 - DNA, 80 bp, Homo sapiens
cacagcagttcctgcagcttccttgagacctcctgccccccgaggtctgcagtctcctgaacccagcagccatctacgcc

SEQ ID NO: 157478 - DNA, 83 bp, Homo sapiens
gacaggcagagtgctgatgtgaaaaataccacgacaaaaccaccctaagaggacatgtactcccaggattccatagatctcct

SEQ ID NO: 157479 - DNA, 101 bp, Homo sapiens
ggcgcctgcgtgacctccccgccggcgggatgtggcgactacgtcgggccgctgtggcctggtatgtcgagagtaccaacgtggcaattgcaaccgaggag

SEQ ID NO: 157480 - DNA, 75 bp, Homo sapiens
ttgaagtatttggctgaggagttttcaatcccagtgtccaaggcagctgcagatttgatggcctactgtgaagca

SEQ ID NO: 157481 - DNA, 74 bp, Homo sapiens
agaactgagtggcaacttcgagcaggatggggaatttagcatggatcttcgtaccaagagcaccggtggggccc

SEQ ID NO: 157482 - DNA, 75 bp, Homo sapiens
tacagaaacttcttttccacaggtacgtgccctggaggaggccaatgctgacctggaggtgaagatccatgactg

SEQ ID NO: 157483 - DNA, 74 bp, Homo sapiens
ccctgtttgagaaaaggcctaagaattttggcattggatgctccaggatgaaacgccataggcctgtcagcagc

SEQ ID NO: 157484 - DNA, 75 bp, Homo sapiens
gcccgccgggaccccccggagcgcggccacggcgcagctatgtcttctcattacactgaagaccttttgccagaa

SEQ ID NO: 157485 - DNA, 98 bp, Homo sapiens
caaagggaaagaggagaggcacccgatatatgttctctaggccttttagaaaacatgaaatgtgtgttctgcgaatgactcgagctagacgttcccag

SEQ ID NO: 157486 - DNA, 109 bp, Homo sapiens
ttggccatttaagcactattattcatgaggcaaatgaggaacagggcaatagtatgatgagacgagttgtactgctgtcacaggaaatggacgctggattacaagcatg

SEQ ID NO: 157487 - DNA, 83 bp, Homo sapiens
atttttgattctgattggaatcctcagaatgatcttcagactgaaacagcagagcttcctgcttctgatagcataaacccagg

SEQ ID NO: 157488 - DNA, 75 bp, Homo sapiens
cctcccgggctccgggaaaactacactggccagggaggaaataatgctggccatacagttgttgtggattctgtg

SEQ ID NO: 157489 - DNA, 82 bp, Homo sapiens
ctttgccaagaagatggacaagatggtgcagaagaagaacgcggttcgagaacttgtcttggacaattgcaaatcaaatgat

SEQ ID NO: 157490 - DNA, 100 bp, Homo sapiens
gccatcggcctcctggcgcgacacctgaaggcgacccacgggggccgcatcgactacatcgcagggaattcctggggaagtcggagcctgagcaccagca

SEQ ID NO: 157491 - DNA, 82 bp, Homo sapiens
cccggcgaggagaaccaactggtcccgaaagaggtatacaaaactaggatatgctggaaatacagaaccacagtttatcatc

SEQ ID NO: 157492 - DNA, 90 bp, Homo sapiens
gcagcttgagtactatcagagccagcaggcctctggctttgtccgtgatctcagcgggcacgtgctcagagtcaagatctccactgaagt

SEQ ID NO: 157493 - DNA, 100 bp, Homo sapiens
atctttatggagaccctgaacaacatcatggagtattacaacgacggtaacggacttcctccgtcaggcagctggcaggacctgaaggatcacatgcgag

SEQ ID NO: 157494 - DNA, 99 bp, Homo sapiens
gtcatcttatgcagatatgctacatgacaaagacagagcctagttccccgagagcgttcagacagtgggggctcaagctcagagccatttgaccgtcat

SEQ ID NO: 157495 - DNA, 100 bp, Homo sapiens
gagatgctgctcttcccttacgatgactttcagataaccatgatgactacacagacttctactatgacatttgctccttttgaggatacattgagttgga

SEQ ID NO: 157496 - DNA, 76 bp, Homo sapiens
cagtggcgcggccgcgatgcgctccatggcatctggaggtggtgtcatttgtgaagaagaatgttctagtaactgg

SEQ ID NO: 157497 - DNA, 88 bp, Homo sapiens
acaaaacattcatggagggggaacattagtgccagcagtagttcccaagggctgtctcagccatccacccagacgactcagtatctga

SEQ ID NO: 157498 - DNA, 100 bp, Homo sapiens
gccgacgccagccagagagcggtgagcatgggtttatgcgtcttaggcattattgtgatggcgagcaccaattctctgatgtggaccttctttagccggg

SEQ ID NO: 157499 - DNA, 85 bp, Homo sapiens
aagggaccacggtcaccgtctcctcagataacgaaggaggcccaacttcattcaataaggagcctgacggatttatcccagacgg

SEQ ID NO: 157500 - DNA, 100 bp, Homo sapiens
tgccaatcaccgggcccgggtcaccaccaggtgccacatcatctcacagttcaaccaaggcttctacgactgtgtcatagcaactgatgctgaagtcctg

SEQ ID NO: 157501 - DNA, 50 bp, Homo sapiens
ggtacaagacatgcagcaatcatgtttcagcagagcagctttaccatttg

SEQ ID NO: 157502 - DNA, 114 bp, Homo sapiens
gcctacctaggacctcatcctgcctctccacacacaccagtcatccagtacaatgcttgcacactgcacggtggaaaaggccaggagcagcgagagtttgcgttgtccaacctc

SEQ ID NO: 157503 - DNA, 98 bp, Homo sapiens
aaggcaaagaacaagagaagacctcagatgtgaagtccattaaagcgatttgaacactcagccaagctgcggcggaagatcaccacgtatgtgtcctt

SEQ ID NO: 157504 - DNA, 98 bp, Homo sapiens
aagcagtctaaacctgtgaccacccctgaagaaattgcacaggccaagcaatggggctggacacaaggtcggtggcccaaaaagagtgctgaattttt

SEQ ID NO: 157505 - DNA, 83 bp, Homo sapiens
ccccgagtgagcgcgggcgccgagatcagaccaaacattgtctggcttgcactgtaaaactagttagctgaagacgacttctc

SEQ ID NO: 157506 - DNA, 75 bp, Homo sapiens
gcattcccatgagccacgttgcccggcagggattaaagcctgtggtttccacagaagcaccacctatcatatttg

SEQ ID NO: 157507 - DNA, 90 bp, Homo sapiens
gctttctgcgccatcctgcaccgccaccggcccgacctcatgcccagctgagagccagcctggaggttacccagcagcaggccacccagg

SEQ ID NO: 157508 - DNA, 90 bp, Homo sapiens
ttgtgaccatttcgcaggcaacccccagttcagtgtccagaggcacagcccccaggccctggaggaagcactgagcatccaaaccccgcc

SEQ ID NO: 157509 - DNA, 90 bp, Homo sapiens
cgcgtttccacttcagagatctggaaactttgatccaaaagccatgaataatttttatgacaacatagaacctggcccagttgtaccacc

SEQ ID NO: 157510 - DNA, 60 bp, Homo sapiens
aacatcagttggacactgatctgtttccccatttagcttcctgtgctaagtgccccccaa

SEQ ID NO: 157511 - DNA, 100 bp, Homo sapiens
tgcttgtgggagattcttttgccagacattactacttcctaggcagaatgcttggaaagctccttttcccagcagcagtttgcccaccaggggaatcctg

SEQ ID NO: 157512 - DNA, 98 bp, Homo sapiens
tctcatgggagaaagacactgtttcacttgtctcagtggttggaataaaaacagggttgaatgagttccagaaagcagggttctcaacctcgtggaca

SEQ ID NO: 157513 - DNA, 50 bp, Homo sapiens
tgcggagcgggaggaggaccgaaagtgctccagctgaggctgcaacaaag

SEQ ID NO: 157514 - DNA, 86 bp, Homo sapiens
aatcggggcgcttcgccccgggccccccagcatgaagaccccggcggacacagcaattctgtggtgttcttggtcacacatttatg

SEQ ID NO: 157515 - DNA, 82 bp, Homo sapiens
ccgggacaccgcacagccgggaaatggggctttgaccacgacctttgaagagcttcattttgagatcaagccccacgatgac

SEQ ID NO: 157516 - DNA, 123 bp, Homo sapiens
ggaaatgtcgggggcctcatcagaaatgttacacacggagtatcaaactctgctgccaagaggatgtcacccccatcccctctgacagcactcgcaggaaggggggtcgccgtggtcgccgtc

SEQ ID NO: 157517 - DNA, 100 bp, Homo sapiens
gccatacttcctgaaaaaatgtgacagagctgaatgaacctctctccaatgaagatcgaaatctcctctctgtggcctacaagaatgtggttggtgccag

SEQ ID NO: 157518 - DNA, 87 bp, Homo sapiens
ttctccttccacaattttaatcagcagaagatggctgtgccacccacgtatgccgatcttggcaaatctgccagggatgtcttcacc

SEQ ID NO: 157519 - DNA, 100 bp, Homo sapiens
cagagctcgtgcttcgggatggaaacctatggttatctgcagagggagtcatgctttcaaggacctcatgaatgatcaccaagacacacaaagtagacct

SEQ ID NO: 157520 - DNA, 83 bp, Homo sapiens
cttcggtgcctctctccagcagactgcgaaatacagcccctcggaccctgcatttgcatatgcgcagctgacccacgatgagc

SEQ ID NO: 157521 - DNA, 82 bp, Homo sapiens
attcgccgtgcccgagaatagctccgtccagcaggagtcagcattggtaatagtgctgtgctgcggaagagtggagtctaaa

SEQ ID NO: 157522 - DNA, 100 bp, Homo sapiens
ggctgcccctgcagcagggcatgacccagtccctgtccgtgcctggccccacgggactgcattataagagagagtggactccagagattgtcatttcagg

SEQ ID NO: 157523 - DNA, 89 bp, Homo sapiens
ggcaggcatggagccaacaaggagaacctggagctcaacggcagcatcctgagtggatgccaaagaagaccatgaaagaacacatcaaa

SEQ ID NO: 157524 - DNA, 108 bp, Homo sapiens
taactagctccaggttaggccgagctttgcgggaaagcagcggtactccaaagattcaggtttactcacgtcatccagcagagaatggaaagtcaaatttcctgaatt

SEQ ID NO: 157525 - DNA, 81 bp, Homo sapiens
ataagaaaagagttgagcattaagttttcggctttgtgagaaaccttaccatcaaacacgatggccagcaacgttaccaac

SEQ ID NO: 157526 - DNA, 75 bp, Homo sapiens
atgggaaccagtctttcaaaatgtggtggaggtggatacagcagtcggagaacatctggcagagacaaatacgga

SEQ ID NO: 157527 - DNA, 83 bp, Homo sapiens
gtggtttttcggatcatgtctggtggctccgcggattataacagtatggctgtgacccgatccaaagacgctcctcctttcgg

SEQ ID NO: 157528 - DNA, 74 bp, Homo sapiens
ccgccgccgcctctccttagtcgccgccatgacgaccgcgtccacctcgcaggagcttctgaacatgaagctat

SEQ ID NO: 157529 - DNA, 90 bp, Homo sapiens
ggaacacttcagtgcattcaagatggttcacaggcaccagccagaccccctaaaccacgaccgcgcaggactgcaccagaaattcaccac

SEQ ID NO: 157530 - DNA, 75 bp, Homo sapiens
gtcctttatatagaagggagagtaggaatcctcaacctgtgcctaggattcagcaacaaaccacctggaacacat

SEQ ID NO: 157531 - DNA, 76 bp, Homo sapiens
aagcactcagcacagtccttggaacaagtagacccaaatgatttgtacattgtagaacccctcaagttttctccag

SEQ ID NO: 157532 - DNA, 83 bp, Homo sapiens
ggagcctcagttggaagcagccgatccagcctgcggagcctgtggggcagtgtaaggcaaacattggtgggcaccgatcttcc

SEQ ID NO: 157533 - DNA, 106 bp, Homo sapiens
ccccgagcacccccagcttccgggagagatactacctgctactcccgagcccggagaggacccacgcgtgacccgggccaagtacttcattcgagatgagtttctg

SEQ ID NO: 157534 - DNA, 75 bp, Homo sapiens
aggtattttaagacagaaagagagagaggagagaaaccgcattcacaaagttactgtggcccatgtcctaaaaac

SEQ ID NO: 157535 - DNA, 51 bp, Homo sapiens
cttggtttcatagagactgtttacagtgtgtaatgctgtgtcatggagcta

SEQ ID NO: 157536 - DNA, 99 bp, Homo sapiens
gcagaaggaggccttccccgggcggagagcccctctccagattctgacatcaaagtacttgaagatcagtttgatgaaatcatagtagatatagccaca

SEQ ID NO: 157537 - DNA, 75 bp, Homo sapiens
caggaagatcaagaaagtgggaaccactgagaaggaacatgaagggatgcttgaagatggaaagaaatttgattc

SEQ ID NO: 157538 - DNA, 100 bp, Homo sapiens
aggtccactgcacgttccgatccctggcttccgtgcccgctggcattgctaaacacgtggaaagaatcaatttgggggcggtggccagtttgaatactcc

SEQ ID NO: 157539 - DNA, 101 bp, Homo sapiens
atggaccctctggagacccctatcaaggatggcatcctctaccagcagcatgtcaagtttggcaaggttctgggccggagaaggggcgacgttcgggcacc

SEQ ID NO: 157540 - DNA, 83 bp, Homo sapiens
gggatcctttatcctggtcatcttctatttccaaaagttgcatgctgagaatttgaaaaatgaagatgatgtagacactggac

SEQ ID NO: 157541 - DNA, 80 bp, Homo sapiens
attcagaggagtatgcatcagtcttgcagctgctgagaggctacatggtaatgggagattctttcaacacttctctcttc

SEQ ID NO: 157542 - DNA, 96 bp, Homo sapiens
gggctgtaggggaaagtgctaaagccgctgagacaccacctcagataattttggatacaacctactgacgttcatcatcttatacaacaatcttat

SEQ ID NO: 157543 - DNA, 100 bp, Homo sapiens
tctggctggcgttgctgcgctccgtggccggggagcaagcgccagaatgcaagtgcggccccatcgacctcctgttcgtgctggacagctcagagagcat

SEQ ID NO: 157544 - DNA, 100 bp, Homo sapiens
gcaaagatgaaacaattcacatttatgacatgaaaaagaagattgagcatggggctctagtgcatcacagtggaatctagaaaactgtatctgaagttgt

SEQ ID NO: 157545 - DNA, 100 bp, Homo sapiens
tctttcttggactattccagagagctccgggaagcagtttgttcgctatataaacatgttgataaacgacacgacgtttttgctcgatgaaagtctggag

SEQ ID NO: 157546 - DNA, 83 bp, Homo sapiens
cgggaacacagagagcgaagccaggtagttttgctgtcagccacaatgccttctgatgtgcttgaggtgaccaagaagttcat

SEQ ID NO: 157547 - DNA, 75 bp, Homo sapiens
atgttattgaagctgtttatagtagactgaatccacatagagaaagtgatgggacctacattgccccaccagctg

SEQ ID NO: 157548 - DNA, 48 bp, Homo sapiens
tctagaaggggaaaagctacttcaaggaggaatgccagctcctgagca

SEQ ID NO: 157549 - DNA, 82 bp, Homo sapiens
caccgagtcgtgctctcgccccaacccgcgcgccaggttgacatcatggacatatgtgagtccatcctggagaggaagcggc

SEQ ID NO: 157550 - DNA, 75 bp, Homo sapiens
gcgtgtgctctccaaagacttgaagcagaagagaagtcaagattccgccaacgaaagaccacagcaagattcttt

SEQ ID NO: 157551 - DNA, 112 bp, Homo sapiens
gtagccccagcccacggcttattcctcaagtcagtgctgtacgggaacctcgatgagcagcaccagcagtaagagggctccgaccacggcaacccagaggctgaagcaggac

SEQ ID NO: 157552 - DNA, 99 bp, Homo sapiens
gcaaagagccccgaagctaagagcccccttcagtcgcagcctcactctagcacacacatgccctcttggttctgtttctttgaagaaccccaggaaaac

SEQ ID NO: 157553 - DNA, 50 bp, Homo sapiens
tggaagtcgcctggtgtgaactgcagcgtcgtctcggagatgcagccaag

SEQ ID NO: 157554 - DNA, 100 bp, Homo sapiens
tgacgtttgttgatggcaacaaccctttccaagcagttcaagaagaaatcagtgtttactgcagagaacacagaagccagcaagcagcagggaagggagg

SEQ ID NO: 157555 - DNA, 90 bp, Homo sapiens
gtgacatggtttctccctatgttacgtggatgtttgtaacagtgaagatagtccaagtcctaagagacagcgcctctctcattcagtctt

SEQ ID NO: 157556 - DNA, 100 bp, Homo sapiens
tctgcgaaggccgggacccggttccccggcccacagtgggggtgtgcaaacccgagagaactgggtcagtactcctgcatttgtaccaacgaaaactcac

SEQ ID NO: 157557 - DNA, 73 bp, Homo sapiens
ccaggcgcaagtctgtgtggtccaggtctgtggtcagggatcatcatctgtacagtctttcaagctgtgtgtt

SEQ ID NO: 157558 - DNA, 100 bp, Homo sapiens
cccgacgtacagcgggccgggaaaagtggcactgaggctctggaacttctgcccagctctccttggttatcaatactctggctgaccatcatcatcgtgg

SEQ ID NO: 157559 - DNA, 82 bp, Homo sapiens
acctctccttttccctctccctttccctaaggatcagttccacaagatggttgagctgacagtggcggcccgacaggcgtac

SEQ ID NO: 157560 - DNA, 113 bp, Homo sapiens
tggtgtcaaagtgtcactgaactaaaggctgactttccagacaacgccttagaaaatttacgtgtatacctgtgtgagaaaatcatagctgagagacattttgatcatctacg

SEQ ID NO: 157561 - DNA, 90 bp, Homo sapiens
gtttttcagccgtctctagcagtatttaaaggacaaggaaccaaagaatatgaaattcatcatgtgctgggcctaaaggagataacattt

SEQ ID NO: 157562 - DNA, 130 bp, Homo sapiens
gatcctgctgggatttttgagctggtggaagtggttggaaatggcacctatggacaagtctataagacttcaaatcatcccaacaccagagaacactaaatgacagtggacaggaagacagtgtaccttt

SEQ ID NO: 157563 - DNA, 90 bp, Homo sapiens
tgaaaccccttggtgaaggccctccagacccaaatgaagcagccgacacgagtcgttgttcataaaacagcttttgaaagttgagagcac

SEQ ID NO: 157564 - DNA, 90 bp, Homo sapiens
gaccgtgtgtcagaacaatcttgaatcatgaagctactaaccagagccggctctttctcggaagaagaagaattttcagttcttgccagc

SEQ ID NO: 157565 - DNA, 100 bp, Homo sapiens
gagccagcgagcctctctccctgatcttacgtgctcaaggctgagtcatcactagagagtgggaagggcagcagcagcagagaatccaaaccctaaagct

SEQ ID NO: 157566 - DNA, 75 bp, Homo sapiens
tttgatgtggatgatgccaaagttttattagtggttagcaggaagaagatgagccttaagtctgaacgccgagga

SEQ ID NO: 157567 - DNA, 98 bp, Homo sapiens
gcccaaaagaggggcgacagaacatgatgttgacacgggctgggcgcccccagaagcccgggaacaaacacacgatgaggcgagtggtacgacagagc

SEQ ID NO: 157568 - DNA, 101 bp, Homo sapiens
actcaggcaccctggtgcccagccgggaactccccatcgcgttttgccagcgataatacgcctcaggttacaggaaatacaggaggcagaggaacaaataa

SEQ ID NO: 157569 - DNA, 88 bp, Homo sapiens
gggaggtgaaggccctgctagagaaggtgccagcgagatttcagattcctgtaaacctctaaagaaaaggagtcgcgcctcaactgat

SEQ ID NO: 157570 - DNA, 102 bp, Homo sapiens
cgagtacaatgacatcaaggatgtggggcagatgctgatgggcaaactagggacctcatgtcttggatcaatggaatacgggggttggtgtcctcagatgag

SEQ ID NO: 157571 - DNA, 75 bp, Homo sapiens
tgcccataatcatggacacagccccaggatgtgcagggtcccaggtgtgacaccttcagcaggtctcagggaaga

SEQ ID NO: 157572 - DNA, 50 bp, Homo sapiens
ccctggagcggccgccttccagcgggctgcgtattgtcagtttatggaca

SEQ ID NO: 157573 - DNA, 51 bp, Homo sapiens
gttccctggatacccccctgcctgttgctgatagtccaactccaccgccac

SEQ ID NO: 157574 - DNA, 82 bp, Homo sapiens
ttcggcagtccacccaccgccgccgcctcccaggtggccagcatcgaaatgttcagccttttagtgatgaagatgcatcaat

SEQ ID NO: 157575 - DNA, 75 bp, Homo sapiens
cactggcccctcatgtaacctcagagatctgggcagttcagccagtgctacccctgaatttgaaggtagaggagg

SEQ ID NO: 157576 - DNA, 75 bp, Homo sapiens
ggagcctcagttggaagcagccgatccagcctgcggagcctgtggggcagagagaacgaggtgctcaaagtccaa

SEQ ID NO: 157577 - DNA, 100 bp, Homo sapiens
cggcggcagcggtcccccctcctcacccgaacatcagggccctccagactcaggcgccccaacatcatgtttataactactgtactagtgttcaccagtc

SEQ ID NO: 157578 - DNA, 96 bp, Homo sapiens
ctccgaaccgccggcgcccggccatggcggtctccagatgtgcagagcagcccacacaaccagttcaccttcagacccctcccaccgccacctccg

SEQ ID NO: 157579 - DNA, 82 bp, Homo sapiens
ccgcggatctcaccgccgctcagggagaaccaggtgcatcagcgcattgcggagctgaggaaagcaggtctgtggtcccaga

SEQ ID NO: 157580 - DNA, 82 bp, Homo sapiens
gaagatggtgcagaagaaaccagccgaacttcagggtttccaccgttcgttcaaggtccagctgggagctccccgacctcca

SEQ ID NO: 157581 - DNA, 126 bp, Homo sapiens
ggcttatgagtggaacatggctagcaggaatgcttactgttgcgtggttcgttattaacagcagcctcgtcttacagcgtgactgcaaagaaaaagacttttgttttgcaaaagaaaagcagctcg

SEQ ID NO: 157582 - DNA, 100 bp, Homo sapiens
ccgtttaccactactacagtcgaatggccaactatcggaacacgagcgagattcctctggttctggtgggaacccaggacgaagttatacggaagcgtct

SEQ ID NO: 157583 - DNA, 100 bp, Homo sapiens
ggggagaccaatccagcagattcaaagccaggcaccattcgtggggacttctgcattcaggttggcagaaacccttgggagagcagttccgaaaagaagt

SEQ ID NO: 157584 - DNA, 82 bp, Homo sapiens
ggctgctgaagaggcgctttcactggaccgcgccggctgcgctgcagaccatggcaaaagttataaccaccgtactgaagtt

SEQ ID NO: 157585 - DNA, 72 bp, Homo sapiens
gtcagaaactcagccactggttgccttggtaggcaataaaattgagaaaccaaggcagtatcatgagcagga

SEQ ID NO: 157586 - DNA, 50 bp, Homo sapiens
gtcagcagccggcagcagcagcgggctacagaagaagtttccaaaaatct

SEQ ID NO: 157587 - DNA, 90 bp, Homo sapiens
ccagcggctgcaggactgggcacagcatgagatccaaaggcagggcaaggaaactggccacaagacctgctgaagttcccatgatgtcac

SEQ ID NO: 157588 - DNA, 90 bp, Homo sapiens
tcacaattacactgccacatatccctgagtctactcttcatcttgtgttgagacttcgtggtggtgctaagaaaaggaagaagaagtctt

SEQ ID NO: 157589 - DNA, 82 bp, Homo sapiens
tcgcggccgccgcgcttcccggggagagaggcgagcgcggcgcccggaccgcgagtgatcagcagctggactgtgccttgga

SEQ ID NO: 157590 - DNA, 100 bp, Homo sapiens
gaagaagtatgaagtggtttatcctataagacttcatccactgcataaaagagaggccaaagagccagagcaacaggtttctgctttgggacaaccatac

SEQ ID NO: 157591 - DNA, 98 bp, Homo sapiens
agccgcggcaacgaccgcaaccgcatcgtgctgcctttcagtttcgcctggccgggacccagacatggagctgcgggaagaagcctggtctccggggc

SEQ ID NO: 157592 - DNA, 76 bp, Homo sapiens
ctcctggtgaccgagcacccgcctccgggcatcttcaactgctgctctttggcgtaaattgcaatcgattagggat

SEQ ID NO: 157593 - DNA, 75 bp, Homo sapiens
aacggccagacgccgacgtcgaccagcagagactggttggtcaaagaaaaagtgatgtatgaaaaagaggcaaaa

SEQ ID NO: 157594 - DNA, 83 bp, Homo sapiens
gtccaatctgagcgtgctgcggacggcgctgcggtacatccagggcagctggtggaatttttgaagaaaatggaatctcgagg

SEQ ID NO: 157595 - DNA, 74 bp, Homo sapiens
gtcgcccgtgggggctgagcccgccgtctacccgtggccgctgccggtctacgcacacggaatgcagtgctgaa

SEQ ID NO: 157596 - DNA, 96 bp, Homo sapiens
tgaatacgaacggaggaccctatcatgtgaacttcaaaactgaaggcagcaggtttcaaattatttgcatgggtgcaaaagaaaatggtttgccgc

SEQ ID NO: 157597 - DNA, 100 bp, Homo sapiens
tgaagctcaagttgctactcgggacgctgcacctcccgcgccgcacggtggacgaggccgccatggcatcagatgaaggcaaactttttgttggagggct

SEQ ID NO: 157598 - DNA, 100 bp, Homo sapiens
gggaactccagatgtgcgcattgacaccaggctcaacaaagctgtctgggccaaaggaataagcgtaactggcggaaacccagaggcattgacaacaggg

SEQ ID NO: 157599 - DNA, 51 bp, Homo sapiens
ccagacctctctggagacgagaatattgtcactgctgttccaagggcacac

SEQ ID NO: 157600 - DNA, 109 bp, Homo sapiens
ccgcactgagtcaacagactgagcgcgtccaggcctgacagctctgcggctcgggccctgagtgtctttctcgagaagcaggtggaaacatgagcattcagtttcttgg

SEQ ID NO: 157601 - DNA, 96 bp, Homo sapiens
cccatcgggaagccattgtgaacagctgtgtgtttgttcatcagactcttcaccaggatgaaaactttcggaagagaaagttgcctgtggtaagtt

SEQ ID NO: 157602 - DNA, 100 bp, Homo sapiens
cgtgaaactcaagctttgatcttggctcccacaagagagttggctgtgcagatccagaagcctcttagcaatgcataccacgagttagcacaagtgtatt

SEQ ID NO: 157603 - DNA, 99 bp, Homo sapiens
gcggaacgcaggagacacaagaagcggatccaggtttgtcctggttgtggtcaagactggatgatgtaactggctctctaggaagcctcacttggccgt

SEQ ID NO: 157604 - DNA, 100 bp, Homo sapiens
ccgttgcagtcggccagcccccttctccacgactgtgccctgtccacggtgcctcctgcatgtcctgctgccctgagctgtcccgagctaggtgacagcg

SEQ ID NO: 157605 - DNA, 101 bp, Homo sapiens
gcttcatcaaaaatagtgatagctttgataattctttcagaatggaaagtatacataataagatgagaggtgctgggaatgacattttaaatatgtcaagc

SEQ ID NO: 157606 - DNA, 113 bp, Homo sapiens
aggccatggtgctattcctcaacatggtagcgcccggccgagtgctcatctgcactgtcaaggccctaggcgagcccctttaccgggtgagcaccggcaactatgagtaccgc

SEQ ID NO: 157607 - DNA, 75 bp, Homo sapiens
gcccggccgcgacgcccgggacccagattgcgggttcagtggagcacatgatccagaagaaccaatgtctcttca

SEQ ID NO: 157608 - DNA, 50 bp, Homo sapiens
gaaagagtcaacagcagtggcaacagcgtgagtgcatctccatccacgtt

SEQ ID NO: 157609 - DNA, 82 bp, Homo sapiens
tgaaggaggaggacaaagagcccctcatcgagctcttcgtcaaggtgtcgtgaaaactacccctaaaagccaaaatgggaaa

SEQ ID NO: 157610 - DNA, 96 bp, Homo sapiens
cactccccagggcagaaatagcgaccatggcgaggttaatttggagtggcccctggagtcagtttcctacaccatccgaggccccacccagcacga

SEQ ID NO: 157611 - DNA, 82 bp, Homo sapiens
gaagagattgctaatgagatgattgaggcagccaagcaagacactaagggcgactaccagaaagcgctgctgtacctgtgtg

SEQ ID NO: 157612 - DNA, 100 bp, Homo sapiens
agcactttcagcttctggtcaggactctattcagagactgaaggcactgaaggaatcgtgtctcctagtgacctggaccttgtcatgtcagaagggttgg

SEQ ID NO: 157613 - DNA, 100 bp, Homo sapiens
gagaagcataaacctatcttctttcattatggagggaggtttggcagatggagaacctgatcgaacttcggtaactgaatgtgagatatttctgtcactt

SEQ ID NO: 157614 - DNA, 82 bp, Homo sapiens
agccgatccagcctgcggagcctgtggggcaggacagacccacgaagtcaagcatgcggagtgcagccaagccctggaaccc

SEQ ID NO: 157615 - DNA, 100 bp, Homo sapiens
gaaaacggaagcgcagggagaaggaagaggtgtttgaaaaggcatcaactgtgaaatctgtgttagaattgattcctgaattaaatgaaaaggaagaagc

SEQ ID NO: 157616 - DNA, 98 bp, Homo sapiens
gccatcaggactccatcactcgtcttatggaggtgtctgtaactgaggtgctggagaatgccgaaggtgccagaaccaccccttcagttgtggccttt

SEQ ID NO: 157617 - DNA, 97 bp, Homo sapiens
caaaactgtcattttgggactgctgtgcctcctcctcctgtggtggaggagaaggaaaggtttgagaaaccctccaagacccctcttggtgcctggt

SEQ ID NO: 157618 - DNA, 50 bp, Homo sapiens
gaggaactggcccggaaacaggaggacgaagcggggagaggtggtgagag

SEQ ID NO: 157619 - DNA, 82 bp, Homo sapiens
tctgctccggatggctccgcaagtcccccccggagaaaaagttgaagcgttatagtcccctttacttggtaaatcacggcga

SEQ ID NO: 157620 - DNA, 75 bp, Homo sapiens
tgaaagtgaaaatgttagaagaactcgtgagccggattgatgtgatgtcttggcattgcccattttcaagcagga

SEQ ID NO: 157621 - DNA, 100 bp, Homo sapiens
agagctggctgcagtaaaaatcattaaattggagcctgatttatcgaggtgtgagagtcggagggttgaaagagtctgcagtgcattctcagtataagag

SEQ ID NO: 157622 - DNA, 102 bp, Homo sapiens
gaaaacccctggaaacttgctaaagagctgtgcctacaacacagcagtcccctcaggatgagcaggaaaagctcttggatgaagccatacaggctgtgaagg

SEQ ID NO: 157623 - DNA, 100 bp, Homo sapiens
caagctggagaacagcatccgtgagctacacgacatgttcatggacatggccatgctcgtggagagccagatgttccagaaggagaaggcggtgctggac

SEQ ID NO: 157624 - DNA, 98 bp, Homo sapiens
gccgcaccttctgtctcttcgtcaccttcgacctgctcttcatctccctgctctggatcatcgaactgaatggtgcagcagttggaggaagaaaatac

SEQ ID NO: 157625 - DNA, 74 bp, Homo sapiens
actttcccgccgagggcccggaccccgaatatgacgccgtccagaatgagcgggaccggatcagcactcgaagg

SEQ ID NO: 157626 - DNA, 75 bp, Homo sapiens
ccggttccccggcccacagtgggggtgtgcaaacccgagagaactgggttgggagccacgtgtaccagtgtgtgt

SEQ ID NO: 157627 - DNA, 83 bp, Homo sapiens
cagtggtcattgcgggggggaccatgcagccggtgtctgacttccggcagcagctgctggcctgtgccggggtggaagctgag

SEQ ID NO: 157628 - DNA, 82 bp, Homo sapiens
gctacttgggactcctctctcaagagaagctgcaagagcaacatctttcctcaccccaagaactgataaatttcaaacggaa

SEQ ID NO: 157629 - DNA, 75 bp, Homo sapiens
cagtgatggaggacagagtgcggtgttggggatgtcctttgcactgaccctgaactgccagattgacaaaaccag

SEQ ID NO: 157630 - DNA, 75 bp, Homo sapiens
gtggtccaccatcggtgacctcaccgcctcggttcgccctcagccgccccggtgtgagcctcagcagcgatttca

SEQ ID NO: 157631 - DNA, 100 bp, Homo sapiens
gtgagtatgagcgtagagtggaacgggtattggctggagttggcgatgactcagcagatcaaggctggaagactcattctcgtcaggtggttgacgttgg

SEQ ID NO: 157632 - DNA, 90 bp, Homo sapiens
ggacacttctgcaaccccgcagagcgcatccatcaaagctttgcgcaacgccaacctcaggcgagatgagggaagtgtaacatctcccat

SEQ ID NO: 157633 - DNA, 75 bp, Homo sapiens
agaagagcacagaatgtaccagagagggatttgtcttggctgttactatgacacgggaagcaattgatgaatttc

SEQ ID NO: 157634 - DNA, 100 bp, Homo sapiens
cgcccgaagaggagagagcgcgggcctctaggaaggatccagagaatcacccgctgatggtttttgcccaggcctgaaacaaccagagagctacgggaaa

SEQ ID NO: 157635 - DNA, 51 bp, Homo sapiens
ctagaagcagttcggttatacctggcatctagtgctttttgcatggcccaa

SEQ ID NO: 157636 - DNA, 100 bp, Homo sapiens
gggatccgaggtgccgggtgacaaggccgccgaggaacaggaattcctagaggacctgtgcaacaacctcttgaggatcgaatcttcactcccgctgtct

SEQ ID NO: 157637 - DNA, 100 bp, Homo sapiens
cttctgataactcaggatttacttgaaatgaaaggagattccaacctacttcagcgggctgacgcacgaggcacacaggaaggaggtggagcaggtgtat

SEQ ID NO: 157638 - DNA, 101 bp, Homo sapiens
aaagttgatggagattacctttggtacgaattggagcaatgttggcttatacacctctggatgagaagagccttgctttattactcaattatcttcacgat

SEQ ID NO: 157639 - DNA, 75 bp, Homo sapiens
aaaaggagctgtgctgtaggtttctcagcttggatttacactgggcaacgtggttggaatgtatctggctcagaa

SEQ ID NO: 157640 - DNA, 100 bp, Homo sapiens
gcattgctagagctccagggccggcttcaggaggcccaagacaccacagaagccctccgagcccagcttctccaggcagccaccaactaccacaacgggc

SEQ ID NO: 157641 - DNA, 85 bp, Homo sapiens
gattctgcaagaccatgtctacacagacaacaccatcttctgaatgacagaggatcaggccctcgggaccaaggatcacgtcatg

SEQ ID NO: 157642 - DNA, 90 bp, Homo sapiens
tttggatcttcattcattaagcagtgcagaaacacagaataatgcatatactgccatgtcagattcctacttacccagttactacagtcc

SEQ ID NO: 157643 - DNA, 78 bp, Homo sapiens
ccggagccgcagaggctcccgggctggactcaggcttctcagggcagctggtggaatttttgaagaaaatggaatctc

SEQ ID NO: 157644 - DNA, 129 bp, Homo sapiens
gggcggtccctggctgcgtgcacagcgccttgttccagcagggcctgatccagattctgaagactactttgaggtcaacattccaacagacctacgagcaaaacattctggggaaataagtgagagaaa

SEQ ID NO: 157645 - DNA, 107 bp, Homo sapiens
ctttaatggaccagatcaggatttgagcggaagaacgaatgtaactttaaggtggcaagtgggatgatactggtcatggctttctttctcatcacctacacctttca

SEQ ID NO: 157646 - DNA, 100 bp, Homo sapiens
ctctcatctcgctcggctgcgggaaatcgggctgaagcgactgagtccgcgatggaggtggacattgaagtggacctaattcggttttccttttaaaagc

SEQ ID NO: 157647 - DNA, 75 bp, Homo sapiens
caagtactttttgcagggaatgggctacaacccccagggtggccagcggcagagccagcagacacagcatttctc

SEQ ID NO: 157648 - DNA, 100 bp, Homo sapiens
cactggatccacccagtgaccggacttctcacccccaggatgtcatcgagggctctccagcagaactatctcctactactctttcccctgttaatcatag

SEQ ID NO: 157649 - DNA, 112 bp, Homo sapiens
cgcaaccattgacgccatgtcgggttattcgagtgaccgagaccgcggccgggaccgagggcattgaagttgatatcgatgtggagcacggagggaaaagaagccgcctgac

SEQ ID NO: 157650 - DNA, 82 bp, Homo sapiens
ctgtgcagccgcgaggaggcgcgggaggtgttcgagaacgaccccgagacggggtgagcccctccagactccgaataggaga

SEQ ID NO: 157651 - DNA, 100 bp, Homo sapiens
agacacatgatccgcaagaacaagtaccgccccgacctgcgcatgcagccagactgccttccgggtcactgccatggaggagccgcagtcagatcctagc

SEQ ID NO: 157652 - DNA, 98 bp, Homo sapiens
tctgggtgacacgctgggggtcggcaccttcggcaaagtgaaggcctttagaagaagccacactctctgaattaaaaactgtcctcaagagcttccta

SEQ ID NO: 157653 - DNA, 51 bp, Homo sapiens
gctgtcctccatgggtcccgagcagaaaatggtgtgaatggaacattaact

SEQ ID NO: 157654 - DNA, 100 bp, Homo sapiens
aaaaccgacctgaggtttcagagcgcagccatcggtgcgctgcaggaggctgttgtggatcttcatgctgatgactctcgcatctctgaggatgagacag

SEQ ID NO: 157655 - DNA, 97 bp, Homo sapiens
caggagttcgtctcttacgtctgcggaagtgcagctgcctcagttcttagcgcagaatccattccaatatatggccatgtggctctttggagcaatg

SEQ ID NO: 157656 - DNA, 100 bp, Homo sapiens
ggcggagagcgaagtggaaaggaggtgctccgaaaggatgacgtagctttgccaaagacttagaagctaagcagaaaatgagcttaacatcctggttttt

SEQ ID NO: 157657 - DNA, 74 bp, Homo sapiens
gcaagatggcgcctcccaagaacgctccgagagatgccttgttaccggtattgtaagaacaagccgtacccaaa

SEQ ID NO: 157658 - DNA, 82 bp, Homo sapiens
tttctctgctgcaccgacctcgacgtcttgcctgtgtcccacttgttcgcggcctatagtactatactggcaattgctggag

SEQ ID NO: 157659 - DNA, 74 bp, Homo sapiens
ggtcgcggggcccgcgcccggagctggcgccaggccttcatcgagatgaacacggaggaggctgccaacaccat

SEQ ID NO: 157660 - DNA, 82 bp, Homo sapiens
agagcctcgcctttgccgatccgccgcccgtccacacccgccgccagatcaatgtccgagttaccaccatggatgcagagct

SEQ ID NO: 157661 - DNA, 100 bp, Homo sapiens
aagccattctcctacctcagcctcccaagcagttgggaccacaggaggaagttaacatccctaataggagggttctggttactggtgccactgggcttct

SEQ ID NO: 157662 - DNA, 75 bp, Homo sapiens
tggcaagaactggcgtcacgtttacaagggctggaggcagcaccagagaaagacacagttgtgcggtgcttgcgg

SEQ ID NO: 157663 - DNA, 75 bp, Homo sapiens
atggccccactctcagagccgaatgccgtaggcattgtcattgctcatggactactgttcgaagatttttggaag

SEQ ID NO: 157664 - DNA, 101 bp, Homo sapiens
ctgagcgcgtccaggcctgacagctctgcggctcgggccctgaggttgtcttttggaaatgcaggtttaaggacaaattatctgcttaagctagaagatgg

SEQ ID NO: 157665 - DNA, 100 bp, Homo sapiens
ggcaaaggaatgcctattcagaatggcagattcaggagagagtttgtgccagacagcacccaagaaaacctcatttggctcgctgaaggatgaagaccgg

SEQ ID NO: 157666 - DNA, 100 bp, Homo sapiens
ggaatacctaagtataaagcagcaaagaaatgtcacctgtagtcccattattcagcggcagcaggtggggaatcagctctggctcccagtgtatttaaac

SEQ ID NO: 157667 - DNA, 74 bp, Homo sapiens
gccccagttatgtggacgagctgttaaaccagaggatcttcgaaagtacgtcactactatggtgtgtgtggctg

SEQ ID NO: 157668 - DNA, 129 bp, Homo sapiens
ctccattggatttaaaagacagtcctcgtcagcactgactttcagctatggaatcggtgaatgaaaactttgccattgatttgatagcagagcagcccgtgagcgaggtggagactcgggtgatagcgt

SEQ ID NO: 157669 - DNA, 100 bp, Homo sapiens
ctcccggcccggattatagtctctcgccacagcggcctcggcctccccttggattcagacgccgattcgcccagagaaccatggagtctggcagtaccgc

SEQ ID NO: 157670 - DNA, 83 bp, Homo sapiens
gcttcggctacaaaggctccaccttccacagggtgatcccttccttcatgtgccaggccctgggaggagcggggacactgagg

SEQ ID NO: 157671 - DNA, 75 bp, Homo sapiens
ctgcctcctgctctgtcctcatccccggcttaggtgatctttagacagtgactgagtatggatcatttgaacgag

SEQ ID NO: 157672 - DNA, 75 bp, Homo sapiens
cgacgtcatcatgctgaccaccaatcagatccgtaagacttcccaagtaagaagcggaagaggagccgctggaac

SEQ ID NO: 157673 - DNA, 100 bp, Homo sapiens
tggtaggaggagttggcggaagcacttggaactcctttataagtgtcagctgtgaggacacagcattgttggttttgccatgtactattttacctatgac

SEQ ID NO: 157674 - DNA, 100 bp, Homo sapiens
gagaccgtgaccgagagcgtgaccgagagcgcgaatatcgtcatcgttagaagaaaaaagcctggagcaggagctggccagccccatcctggacattgag

SEQ ID NO: 157675 - DNA, 100 bp, Homo sapiens
tcagtttgtaaaaacatggcggatccagaattctggtatcttcaaagaacagtaaaacatccaactttactacaggatcctgatttaaggcagttcttgg

SEQ ID NO: 157676 - DNA, 84 bp, Homo sapiens
ctttcagtgagtcatcgctgacagctgaggaagtctgcatccacattgcacataaagttgtagagacggggtttcgccatgttg

SEQ ID NO: 157677 - DNA, 102 bp, Homo sapiens
ttatgcaagacttttatgtggtggaaagtgtgttcctacccagagatggcatcttcagcacgaacgctggctgtgaggactttggatggaagaacagaagag

SEQ ID NO: 157678 - DNA, 100 bp, Homo sapiens
caaggcggtttctagtgcaaatcccctgctcagggtcttcatccagaaacgagaatcaaagaattccatcggacatggtgtttcttaggacttcagaaaa

SEQ ID NO: 157679 - DNA, 100 bp, Homo sapiens
gcgaccgctgccgaagcatgaagaaggggtaaggcgtgagcccccaagatttcacgaggtcctgctgtactagccaccaaagcagctgctggtactaaga

SEQ ID NO: 157680 - DNA, 90 bp, Homo sapiens
ggagagttctccaaacatgatcgtttactgcaaagttgcgtcaaatatcacgtcatttgcagtatatgatgagtttttattgttgacaac

SEQ ID NO: 157681 - DNA, 90 bp, Homo sapiens
cgtttggctgcaatgagctcggcctcggggctccgcagggggcacccggcagataatcaggacacccggagcaacctggacataactgtc

SEQ ID NO: 157682 - DNA, 120 bp, Homo sapiens
attatgttgacagaggatattattcagttgaaacagttacactgcttgtagctcttaaggaggaccagtatgatcatttggatgctgctgacatgacaaaggtagaaaaaagcacaaatg

SEQ ID NO: 157683 - DNA, 82 bp, Homo sapiens
gccttacccttcgctcccagcccaggtgtctgctttttcaacgtgggagaaggagttgcacaagatagtttttgatccccgg

SEQ ID NO: 157684 - DNA, 82 bp, Homo sapiens
ccggtatgagcgcccctcgccaccccgtgtcccaggcccggcctttctgacaagaggtgagaagccctaccactgcaactgg

SEQ ID NO: 157685 - DNA, 51 bp, Homo sapiens
gccatagctgttatcaaaggaatgtaccagatctctctactttagttagaa

SEQ ID NO: 157686 - DNA, 126 bp, Homo sapiens
cagcttcaccacccgcacggcgcagtgccggaacactgtggcggccatcgaggaggtctgtgagctggatattatctttaattttgaaaaggcttatttcatcctggacgagtttataataggtgg

SEQ ID NO: 157687 - DNA, 75 bp, Homo sapiens
acccgggacccacttcactccagtgcctccgacgcctcctgatgggtggtgaaggaggagatctttgatgacaat

SEQ ID NO: 157688 - DNA, 99 bp, Homo sapiens
atggcacacacagtgggacctagacaaagggagagggtgaccgacatcccaactagacgctctgctgttgcccgtattcaggagttcttcagacggaga

SEQ ID NO: 157689 - DNA, 75 bp, Homo sapiens
ctggtgcacatcattggcgccttacggacatccaaggtcaaaatgcagatcttcgtgaaaacccttaccggcaag

SEQ ID NO: 157690 - DNA, 76 bp, Homo sapiens
gactgtgtcaaggagatcggcctcttgaagagcatgaccttcctcttgatgttgctgctcatcttcttctacattt

SEQ ID NO: 157691 - DNA, 75 bp, Homo sapiens
gatacctgcctgcaggagttcctcagatgttctcaaatagtgatgaagctgtaatcaataaaaaacttcccaaag

SEQ ID NO: 157692 - DNA, 82 bp, Homo sapiens
cagcggccgagcgggcggcttcctggcctgggcgctccggtggcggcggagccgccaccggcacggccaggccagcatggtg

SEQ ID NO: 157693 - DNA, 100 bp, Homo sapiens
tgagaaaactttctgttgacttgatcaaaacatacaagcatattaatgaggatcccatggtccattattgcctttaccaagtcgttacagaatgggctct

SEQ ID NO: 157694 - DNA, 110 bp, Homo sapiens
gggcccgatgagccagagaagcttggttatcaatactctggctgaccatcatcatcgtgggactgactttggtggaagtccttggttacatgtcattattgcgtttccga

SEQ ID NO: 157695 - DNA, 100 bp, Homo sapiens
gttctgcttccttcggtgctgcggctgtgtgttttctgagcgagccttgaaagagataaaagcggaagtttgccacacgagccagtcttggtgctctgtg

SEQ ID NO: 157696 - DNA, 100 bp, Homo sapiens
tggagcggcacggctgaggcccgcaagcgcaagcatgcttttcacttccactgcatctctcgctggctcaaaacacgacaggtgtgtccattggacaaca

SEQ ID NO: 157697 - DNA, 74 bp, Homo sapiens
gtatgctgatgactgggtaacagatccccgttttctaataggtcctcctagccagcagttttgtgcccatttat

SEQ ID NO: 157698 - DNA, 100 bp, Homo sapiens
cacctctgcaaatatgagagattctgcagaaggtacctggaatggaaacacaaaagtagccataaagactcttaaaccaggcacaatgtcccccgaatca

SEQ ID NO: 157699 - DNA, 82 bp, Homo sapiens
ctgtactaggactgggaacggatgaaggatttgggggcagagcacttggcaggtcatgaaggggtccaacttctcgggttgt

SEQ ID NO: 157700 - DNA, 83 bp, Homo sapiens
caagatattaaagttactgctgttaaaaagatgttctcagtgcagctgagtcttggtgagcagacatgggaatccgaaggcag

SEQ ID NO: 157701 - DNA, 80 bp, Homo sapiens
cgggggccgctctgggatcccggccaccagcaattgtccggagcccccccatggaactgcagccccctgtctcccctcag

SEQ ID NO: 157702 - DNA, 100 bp, Homo sapiens
cggggaccagcagctgtcgccgccgctctcagtgaacagagtatctgccaagcccgggcttccgtgatggtctacgatgacaccagtaagaaatgggtac

SEQ ID NO: 157703 - DNA, 50 bp, Homo sapiens
ggcgcacgtcggcggactgtggtggtttccgagagagcgcttttgcctac

SEQ ID NO: 157704 - DNA, 106 bp, Homo sapiens
cgggcaggagcaggcatgataacccaacattcaaggatggtggccgatcctgataaccctttggtgctggacatcctgacgggctcttccacctcttactccttct

SEQ ID NO: 157705 - DNA, 75 bp, Homo sapiens
atttctggagagcttgacattctcaaagactggtgctatgaagctgtggccaagactaagcagcagattgaggag

SEQ ID NO: 157706 - DNA, 103 bp, Homo sapiens
gtaccgatttggtcacctgaagcctcttgtcccttcattgtcatctgcttttgaggtatctcagatgaagacatcatcaacattactcttcctactggagtcc

SEQ ID NO: 157707 - DNA, 100 bp, Homo sapiens
cagaatcctcttctgagtgatggagatttgtctaccatgattggcaaggaagccttggctcaagctttctggattgacatcaagcgcatggatgacccag

SEQ ID NO: 157708 - DNA, 50 bp, Homo sapiens
taaagcagcgtgcgttcagccctggggttaaagatcgaggtccggaagcc

SEQ ID NO: 157709 - DNA, 100 bp, Homo sapiens
cccgaggtgaacaggatttaattgaggatctcaaacttgcaagaaaggcctatcatgaccccatgctgaaactctccataatgacagaacaagagttgaa

SEQ ID NO: 157710 - DNA, 100 bp, Homo sapiens
cggctgttgccatgtccgcaccgggacgatcatcctggggacctggtacatggttacactcctggcacaccttacaaagtgtcctgttcccccaccagcg

SEQ ID NO: 157711 - DNA, 90 bp, Homo sapiens
tgaacggagaggtagccatgatgccccacttggtgaatggagatgcagctcagcagatggcttcagtgacagatggtaaaactggagtca

SEQ ID NO: 157712 - DNA, 96 bp, Homo sapiens
tgggccccagtctccaagggcgagaatggaccctgatggacttggacatggagctgtccttggctcttgctgatgagaatgagtttgtgcgtgaca

SEQ ID NO: 157713 - DNA, 76 bp, Homo sapiens
ggacttcagatacgctttaacttgaaatcaaggaatgtagaaatcagggcttacctagaaatggaatttaaagagg

SEQ ID NO: 157714 - DNA, 100 bp, Homo sapiens
gagaatggcagccatttatttgtcccgtgcttccagtggtgtctgtagtgagagaaacagagtcccagttactgccagatgtgggagctattgtaacctg

SEQ ID NO: 157715 - DNA, 82 bp, Homo sapiens
gatttgggtcgcagttcttgtttgtggatcgctgtgatcgtcacttgtttggtgccctggttgtcagatgttggaaagcagt

SEQ ID NO: 157716 - DNA, 98 bp, Homo sapiens
tacataggccctcaaggacagcagaactaaagaaagctttaaaagaaaaagaaaacagattattattgcaacaaagaacattcctgatgtagatgaag

SEQ ID NO: 157717 - DNA, 100 bp, Homo sapiens
acagaaatcgacgtggtaattaacagaagcttggtgctgacaggccagtgggaaggctatgattcccggataggcagtggcagaagagcatttggcagtg

SEQ ID NO: 157718 - DNA, 82 bp, Homo sapiens
ccaggccagttctctgaatgtcgaggagcctccatcgacctgcagaagacatcccacgattacgcagacaggaacactgcct

SEQ ID NO: 157719 - DNA, 100 bp, Homo sapiens
ttaaggattccaagtaactcttatttggtcgtccttggtggaaggaaccatgaactggcatctccccctcttcctcttggcctctgtgacgctgccttcc

SEQ ID NO: 157720 - DNA, 100 bp, Homo sapiens
tgaactggcaggcaagctacaaagcctagacctttcagccgctgccgaaatggaagatgagaatgtgcctactgctcctgatcctccaagtcaacattta

SEQ ID NO: 157721 - DNA, 101 bp, Homo sapiens
aggatgtcaacaattttttggagacttacagattccagtctgctgttagatgattattcatccaagttgagccccaaaccaaagagagccaagcacagcct

SEQ ID NO: 157722 - DNA, 75 bp, Homo sapiens
tgcggagattgggctagaggcggaggcctgggccacggcggaggcgctgggctggagtgcaatggcgcgatctcg

SEQ ID NO: 157723 - DNA, 100 bp, Homo sapiens
aaaattgctgtgctctcactttctgaaatggaacctcaggatcttgagctagaggctgttagagaaacgctagcatccagaatagtgctgtttgggacct

SEQ ID NO: 157724 - DNA, 75 bp, Homo sapiens
cttggctctcccacccaatggagatggctctaatggactttgtgttttatgccccacgtctgagaatcaacaagc

SEQ ID NO: 157725 - DNA, 100 bp, Homo sapiens
cgtcgggggctgcgcgggggctgtggctccgggactgcggtttggtgcacctcgatttggaggaagtagggcagggcccttatctggaaagaagtttgga

SEQ ID NO: 157726 - DNA, 87 bp, Homo sapiens
gcgggacatagaacaggtgccacaggaaatactgacagcccagctgacagagaaagatagtgaccttcaaaagtggcgagaagaacg

SEQ ID NO: 157727 - DNA, 100 bp, Homo sapiens
ctggatgaaatagatctctcggctctgaggcactctacacccccaagtgcatatgggtctgtcaaagcctatactaactttgatgctgagcgggatgctt

SEQ ID NO: 157728 - DNA, 75 bp, Homo sapiens
gttgtttctgagaaacagttctctaaaagatctcataggaaatgttcaacaattctgtgaaaggtcacaggaccc

SEQ ID NO: 157729 - DNA, 75 bp, Homo sapiens
tcaaatctctgcaggaatcagacagtgaagtgaagacttacgatccttctggtgactccacacttccaacctgtt

SEQ ID NO: 157730 - DNA, 83 bp, Homo sapiens
cctgtacacgcacctgaagcaacagcccatctgatgaggctgctgtcatttgtggtgttggctctatttgctgtcactcaagc

SEQ ID NO: 157731 - DNA, 100 bp, Homo sapiens
cgcggatctcaccgccgctcagggtcgagcctcttaggcagagtttaacacatgggagctgcctgcctgctgctgctgctgcttcctgcagatcatggag

SEQ ID NO: 157732 - DNA, 51 bp, Homo sapiens
aagatggcgtctcccacagacgactggcacagcctccaggttggcgggctc

SEQ ID NO: 157733 - DNA, 83 bp, Homo sapiens
aacagttaatcctcaatttaagcctgatctaacccctagaaacagtggatggaagcacagtatatgcagagagtgtgattctg

SEQ ID NO: 157734 - DNA, 73 bp, Homo sapiens
ggagaggagcctcggccccgtacccagatagaaaactacctgctacgaaatcacgagactagaaaataccttc

SEQ ID NO: 157735 - DNA, 51 bp, Homo sapiens
tgaaaagcatgcccatacgattaaacctgctactatactggcaattgctgg

SEQ ID NO: 157736 - DNA, 53 bp, Homo sapiens
gtccctgcttgtcagggctgagagcgacgcctccagatatgggctttgagact

SEQ ID NO: 157737 - DNA, 100 bp, Homo sapiens
gtatgcttagttcctttccagtggtatagccttggataccagttactggactttcattaatcacgtcttcatctgggggagcattgccatttatttctcc

SEQ ID NO: 157738 - DNA, 98 bp, Homo sapiens
cttctcctggttaatcaagaattctctatttctgctccgtcatccatgccactatgagctccgacaagaaatgctggatgatgtacaaaagaaattga

SEQ ID NO: 157739 - DNA, 75 bp, Homo sapiens
ctggggttctgagactccctgtcccggaccgcaggctctccgtgtgaaatggtcccatctcagactgccctgggt

SEQ ID NO: 157740 - DNA, 100 bp, Homo sapiens
tcatgagcatgaggtcctgctgagagacttgcttctagagaaaaacctgtccttcctagatatcatggaaatcaggacagtggcagttggaattgtggca

SEQ ID NO: 157741 - DNA, 100 bp, Homo sapiens
gccagggcctcggggccgcttgtgggatggcctacaccggcaaatacttcgacaaggccagacctcctgccccccgaggtctgcagtctcctgaacccag

SEQ ID NO: 157742 - DNA, 100 bp, Homo sapiens
cgcggctgcacaacgccttggcgctaatccgcctccgaaacccgccggtcaacgcgatcaggcatttatgtttgaatcatctttaagtctggcggtcaca

SEQ ID NO: 157743 - DNA, 98 bp, Homo sapiens
ttggtggagaagctgaagctgctccgctacgaggaggagttcctccggaagagcaacctgaaggccccgtccagacacgttggtcgtcattgcctccg

SEQ ID NO: 157744 - DNA, 139 bp, Homo sapiens
gcggcgcctgtactgactctaggaagggctggagttgttttgaatgggcgcccgtaagagagatgggggctccggaggtggcgcccaggctctgagctaccctaggtctgcagactagcgggcattggccagagacatg

SEQ ID NO: 157745 - DNA, 90 bp, Homo sapiens
catcatcggccactatgactgcacttatggtggtggcgtgctgcagctcaactacctgggaaactacgtccccaatggctggactcctga

SEQ ID NO: 157746 - DNA, 75 bp, Homo sapiens
cacttgttccccaaacaagtgctcctacattctggtgcacacatcttgaccaactcagcagcaaggtggattttc

SEQ ID NO: 157747 - DNA, 90 bp, Homo sapiens
cagctccgcgcccgccagttgcttgatcaggtggaacagattcagaaggagcaggattaccaaaggctctggaaaggaagagaaatggaa

SEQ ID NO: 157748 - DNA, 100 bp, Homo sapiens
cacagcacttcattatgcagctaagacttcagtgccctgaacggttagagaaattaatgaaggagctccaccaggtgccttcacaactctgagtcatatc

SEQ ID NO: 157749 - DNA, 90 bp, Homo sapiens
tcagcatggatgagaccagaggaggcctgtctcctccctcctacacatttccagctcctgctgcagttattcctacagaagctgccattt

SEQ ID NO: 157750 - DNA, 100 bp, Homo sapiens
ctcgatctaggaatagcttgccaaaccaggttgcatttcctgaaggggaagagcaagatgcagtcagtggagataaagtcagacctaaagccaaaaggaa

SEQ ID NO: 157751 - DNA, 75 bp, Homo sapiens
tctggtacagttagatgactacagggacttgccatgaggtgttgaagccttgtttcactgagttggagagactgg

SEQ ID NO: 157752 - DNA, 100 bp, Homo sapiens
gcacctagtacctcctaccattgtcaactgctccttgctctgctatggcttaccatcatgacagcagacggatatttgtgggccaggataatggagctgt

SEQ ID NO: 157753 - DNA, 90 bp, Homo sapiens
gcagaagaaccctcttggactggacgatttgggaattcaaaacttgggacaaactgtcagccttgcccttctataaagaggactcttgag

SEQ ID NO: 157754 - DNA, 100 bp, Homo sapiens
acgtcttctctgcattttgtccacatgagaggattacctttccaagccaatgcccaagacattataaacgcactgcaacatggtgctggagaacgtgaag

SEQ ID NO: 157755 - DNA, 82 bp, Homo sapiens
tgaagctcaccgagacggcgatccgggcgctcgagacttaccagagccacaaggtgggagacctccacagaacccttccagc

SEQ ID NO: 157756 - DNA, 80 bp, Homo sapiens
ccctgaaccccaaggccaacagagagaagatgactcaggttcacaactacatgatgccacccctcgaccgaagctggagg

SEQ ID NO: 157757 - DNA, 100 bp, Homo sapiens
aaaaccttcaggcggcccatgggtagctaaaattggtgctttctgctgtggccttagtttatgtaaccagcacacaataatactctatgttttgtgcata

SEQ ID NO: 157758 - DNA, 83 bp, Homo sapiens
cggacacgggaggcgctacgccaggaccgacgggaaggttttcaagatggcagcatctatgcatggtcagcccagtccttctc

SEQ ID NO: 157759 - DNA, 80 bp, Homo sapiens
ctggctacgtggagcggctgaagggcatgtccctgcttgtcagggctgagagcgacgacccatcctcatgccaacaaact

SEQ ID NO: 157760 - DNA, 50 bp, Homo sapiens
tcccaaccaggagggacgataaggtgcccctgggcgctgggattgctcta

SEQ ID NO: 157761 - DNA, 83 bp, Homo sapiens
agaggcccgcccaccagttcgcccgtccccctgccccgttcacaatgagccttcacgtaaatgggtccagtcatgcctcccag

SEQ ID NO: 157762 - DNA, 97 bp, Homo sapiens
tggcttcggagcattcagcaggtgttacagctgaaggcaggtacaatctctacacagcggaaggcaaatatatcttcaaggaaagagaatcatttga

SEQ ID NO: 157763 - DNA, 100 bp, Homo sapiens
gattgaagacaaccttgatttcagtgtggttggacgtgataagtatgagcctgcagctgtttcagaacaaggtgataaaaagggcaaaaagggcaaaaaa

SEQ ID NO: 157764 - DNA, 75 bp, Homo sapiens
caggtagcaagtacatggggagctgctgtattaaagtatgaaaataatgtgatgaatattcgacagtttaactgt

SEQ ID NO: 157765 - DNA, 90 bp, Homo sapiens
cccagagcgtctttcctggggagtacgtcccggaggacctccttcccgtctacaaagaaaaagtggtgccgcttgcagacattatcacgc

SEQ ID NO: 157766 - DNA, 97 bp, Homo sapiens
tggtgtgaactcattgttaagcacaagttcacgaaagcctacaaaagtgtggagaggttccttcaggaggatcagtgtttctgaaagatctatccag

SEQ ID NO: 157767 - DNA, 116 bp, Homo sapiens
ataaagaagtggagcgtgtcctgaaggagttccaccaggccgggaagcccatcggcgaggaagaaaggacccggtttcaggagctgctggccagtccggcctacagagccagcccc

SEQ ID NO: 157768 - DNA, 83 bp, Homo sapiens
cctcacttgtgaatctttagagcctgtggtggttgatctgactcacaatgactctgttgtgctcaagaggtttggatatggac

SEQ ID NO: 157769 - DNA, 83 bp, Homo sapiens
gatcatccgcaaacacgcgcagaccttcgttgccctctgtgccacagggaacggcaggagcagctgatgggatatcggaagag

SEQ ID NO: 157770 - DNA, 99 bp, Homo sapiens
atcgaaggggacgtggtagcggcggcgggggcacagccaggttgcttttgaaatcagaaagtcagtgcagggttgtagtgttgatgggctctacttctg

SEQ ID NO: 157771 - DNA, 82 bp, Homo sapiens
cgcttggctatgtgacgctgctggaggaaacacctcaggacacggcctacaacaccaagagttcaaaaggtgatgacctatc

SEQ ID NO: 157772 - DNA, 118 bp, Homo sapiens
cgcccactccagaagtagcatggaaatggagggcatcttcaaccacaaaggctgctttgactctcccgcgaagacctttccttcactgttctactgtgattcccgttgtggttctgac

SEQ ID NO: 157773 - DNA, 90 bp, Homo sapiens
ctggccggcatcaacatgctgctcaacaacggcttcagggagtcggaccagcttttcaaacaatacagtagagaaatggtcagaaggaac

SEQ ID NO: 157774 - DNA, 76 bp, Homo sapiens
gccaccattggtgtggggctgggcctgccatcattcaaaccagggctgagatctgtatctgtggacctgaatgttg

SEQ ID NO: 157775 - DNA, 83 bp, Homo sapiens
gagagagcgatcaacacgctgaacggcttgaggctccagtcaaaaaccattaagctggccatgggcaagatgatggagcaggg

SEQ ID NO: 157776 - DNA, 96 bp, Homo sapiens
ccatggaactggctcgatttcactgtcattacatttgcaatttggcctcagtatgtcaaggatagaattcattccacctatatgtacttagcaggg

SEQ ID NO: 157777 - DNA, 110 bp, Homo sapiens
tctgttacgtctccaggatacctacaatttggatacagataccatctcaaagggtaatcttccagggagaactaatgccgacgtgatgaccgccctgtcccagggctaca

SEQ ID NO: 157778 - DNA, 100 bp, Homo sapiens
ctttgaaagcatccgattggctcatgaccacttcctgagcaatttgctggctcaatcctttatcctattgaaaccttgcacagccagagaacaacacatc

SEQ ID NO: 157779 - DNA, 75 bp, Homo sapiens
cccactggctctgctgaccttgtgccttggtagtttcctggtcccctacatcatcatgcttatcgtggagggaat

SEQ ID NO: 157780 - DNA, 99 bp, Homo sapiens
tggaagacaatgaaatgagttgttcaccttaacccattacggttctcatgaacagcgagaagaagtgtgaagttctgtgcagccagtccaacaagccag

SEQ ID NO: 157781 - DNA, 100 bp, Homo sapiens
tcgggaaacagatgctaatttgggaaaaagctccaggattctgacagggatgttgcgaagtttttcagaagaagtgaagtcaagatgaagaaccatttgc

SEQ ID NO: 157782 - DNA, 98 bp, Homo sapiens
cagcgacggttcttcatcctttacgagcacggcctcttgcgctacgccctggatgagatgttgcagtaccatgcaggactagcatctggccttttaaa

SEQ ID NO: 157783 - DNA, 83 bp, Homo sapiens
aagctacatgacccctaaacgacaatgcagatcttcgtgaagactctgactggtaagaccatcaccctcgaggttgagcccag

SEQ ID NO: 157784 - DNA, 76 bp, Homo sapiens
cgctgagaggggctgcggccggagcgggcggctgagacaaaggcgacgatttgggaatggatgatgaaggagatga

SEQ ID NO: 157785 - DNA, 83 bp, Homo sapiens
actgttgaggtgtgaacgtggaccctgagagtctgtagaagaggcgacaccagggcttccaaatgaacaaccgaaaggaagat

SEQ ID NO: 157786 - DNA, 99 bp, Homo sapiens
cccaggaagcctttaccaacgccatcaccgacctcatcagtgagctgtccctgctggaggagcgcttccgggaggaatcggagaagcagctctgtctga

SEQ ID NO: 157787 - DNA, 100 bp, Homo sapiens
gaagtcggacagtggaacaaattccgagacaaccgcatgcacgagtctctcatgctcttcgactccatctgtaacaacaagttcttcatcgatacctcca

SEQ ID NO: 157788 - DNA, 75 bp, Homo sapiens
ttcaggatctgctttcagagtacatgaacaaccatctgtgggtcttgcagatatgatgtctcctggtgaatccaa

SEQ ID NO: 157789 - DNA, 100 bp, Homo sapiens
cggcctcctccgggccgtcgtcttcggtcggtttttcatcctttgatcccgcggtcccttcctgtaccttgtcctcagatgccatcccgcccactttcta

SEQ ID NO: 157790 - DNA, 75 bp, Homo sapiens
ccctcctcttcattccgcagcagcactccgacagaaagctgacttcatgagaccgaggatctcgttcgttgatcg

SEQ ID NO: 157791 - DNA, 100 bp, Homo sapiens
tcaggaacagcaaattaaaacagtgccttttaccaacccttggggagctgatctatcttgtagccacccagatgtcaagccctccaacatcctagtcaac

SEQ ID NO: 157792 - DNA, 99 bp, Homo sapiens
atccccgcggacgccacagcgctcctacaacacagcagtcccctcaggatgagcaggaaaagctcttggatgaagccatacaggctgtgaaggtccagt

SEQ ID NO: 157793 - DNA, 100 bp, Homo sapiens
tattgctgttgtcccaggacagaaaccatcaatatgagaagccgctgtctgagatggagccaaaggttctgagtgagaggaagctgaagacggtgttcta

SEQ ID NO: 157794 - DNA, 82 bp, Homo sapiens
gtccttacagccgctcgtcagactccagcagccaagatggtgaagcagatcgagagcaagttcttccctgtggaacagtaga

SEQ ID NO: 157795 - DNA, 75 bp, Homo sapiens
gaaagaccatcaagtttaccaggagtgaactactttatgtccaagggtatcctggatgattcgccaaaggaaata

SEQ ID NO: 157796 - DNA, 82 bp, Homo sapiens
atcactgactccatgatctgtgcaggtggcgcaggtgcctcctcgtgccagctccctgtgctgtcaggaatctacaggactt

SEQ ID NO: 157797 - DNA, 75 bp, Homo sapiens
gtggcggcctggggcggcgcgacggctggtgcgcaggtttgagtggccgcttctttgtcaccactctcccagcat

SEQ ID NO: 157798 - DNA, 82 bp, Homo sapiens
caccgagacggcgatccgggcgctcgagacttaccagagccacaagacatccggctccgggttcgagcagagtactgcgagc

SEQ ID NO: 157799 - DNA, 51 bp, Homo sapiens
cagattcgcagtggtcgcttcttctccttgtgccttcgtgcatcgctgcgg

SEQ ID NO: 157800 - DNA, 83 bp, Homo sapiens
cttttgatcaccattggctgggaaggaaaaacagaatcagctgttccctgcgaaaggggttcaacagaaatatttggtggtta

SEQ ID NO: 157801 - DNA, 100 bp, Homo sapiens
atgagcatgttgacagcatcgatgctagacagacagtgttacagggtcttgattatttacataccaagtgccgtatcatccacactgacattaaaccaga

SEQ ID NO: 157802 - DNA, 82 bp, Homo sapiens
agggaaccctggtcaccgtctcctcaggtgtttgagaagtcccccctgcgggtgaagaacttcgggatctggctgcgctatg

SEQ ID NO: 157803 - DNA, 83 bp, Homo sapiens
tgcaatcttaatttgcctgtatgggacccaagggaatctttgtctgaagtggaagaaaaatacaagaaagccatggtttccaa

SEQ ID NO: 157804 - DNA, 75 bp, Homo sapiens
ccaaagggggctgctgaccgagagagctcactcagccagtgcatttgcccagtataacatggatcagttcacgcc

SEQ ID NO: 157805 - DNA, 100 bp, Homo sapiens
attgagcatccggaatatggagaagtaattcagctacagggtgaccaacgcaagaacatatgccagttcctcgtagagggttttggtgcctttgaacgct

SEQ ID NO: 157806 - DNA, 83 bp, Homo sapiens
cgggccgggagatcgctcagctggccgtgtcctggcagtaagactttgaccccgacgcaggcttcagtgattgccgcggatca

SEQ ID NO: 157807 - DNA, 50 bp, Homo sapiens
gcccacaaggagttagcgacctactgggacctattcaggcctgttctgtg

SEQ ID NO: 157808 - DNA, 75 bp, Homo sapiens
gcggccggacgcttgcggaccgaggagaaggcagagcccccccaggctatgaatgccctgatgcggttgaaccag

SEQ ID NO: 157809 - DNA, 75 bp, Homo sapiens
gaagatctgcaatatctgtcacagcctcctcatccaggtccaagacaagctgctgctatctgcgtgccacttact

SEQ ID NO: 157810 - DNA, 98 bp, Homo sapiens
agccggagaagcgagtttcagctgacttcccaaaagttcccaagggtgcctcttcccagaagagagtccccaagtgaagagaggctggagcccaagag

SEQ ID NO: 157811 - DNA, 100 bp, Homo sapiens
caacactggccgaaacctccatagtcaccacttcacttcacctctttctggaaaccaggctccatctactctttgaagcttctgcccagcttgcattgtt

SEQ ID NO: 157812 - DNA, 75 bp, Homo sapiens
agggaggcgaggttcccgcaccggatagtctgcgctcctcagaccaccggcaggtgaacagcctgatgcagaccg

SEQ ID NO: 157813 - DNA, 100 bp, Homo sapiens
tcaaccctcccccatgggctcctgcctgcctgccaggaccgccgggagagcctgcccacctccccaccctggacgccgggcgcgtcccggccccccagca

SEQ ID NO: 157814 - DNA, 100 bp, Homo sapiens
gtcgctcttgtgccctagcaccccgagaaccgtcagtttgagccagatggctaccaagcagtttctcgaagagattaacaagtggacagttcagtacaat

SEQ ID NO: 157815 - DNA, 82 bp, Homo sapiens
agcgtggttgctgaccagttgaaagagacacctatggctgccgatgaaggctcagcagagaaacaggcaggagaggcccaca

SEQ ID NO: 157816 - DNA, 89 bp, Homo sapiens
ctggagggtggcatcatgcaaagaaattgagtcatatgtctgccggatgtgttctcgaggggatgaggatgacaagctcctgctgtgtg

SEQ ID NO: 157817 - DNA, 100 bp, Homo sapiens
ccgtgggagccagcgagcctctctccctgatcttacgtgctcaagctgcttttctaacccaaactgtatgtcttgatgacactacagtaaagtttgaaat

SEQ ID NO: 157818 - DNA, 75 bp, Homo sapiens
gctccgaccggagaccccaccacccacgttacctacttcagggatctctctaggagctgacactcgaaccttcac

SEQ ID NO: 157819 - DNA, 100 bp, Homo sapiens
taaaaggacagtagaaaaggcttttccagtttgcataatatggaatggggcgagtccttgctcaagatgtatatgcaaaagacaatttaccccccttccc

SEQ ID NO: 157820 - DNA, 87 bp, Homo sapiens
cctcgggcagcctcaacgagaactcggagggcaccggagttgatattcactgatggactccaaagaatcattaactcctggtagaga

SEQ ID NO: 157821 - DNA, 83 bp, Homo sapiens
cagcaggcgccgctggatggagaggagataggaacaggtggcacatgtcagtggaagatatgtggacttagtcccactacaac

SEQ ID NO: 157822 - DNA, 75 bp, Homo sapiens
gttagtggtgctcaacgtgtacgacatggagcactcactgtgggcctcgtgcgacagtgtcaaacaatccatgga

SEQ ID NO: 157823 - DNA, 101 bp, Homo sapiens
ctctcatctcgctcggctgcgggaaatcgggctgaagcgactgagtccgcgatggagaaagggagtttcgtgctccaactttggcatccctagaaaactgc

SEQ ID NO: 157824 - DNA, 101 bp, Homo sapiens
accaggggcgacggcgtactttgggcttcatcatggaggactacctgcagggttgtcgagctgctctgcaggtcttgggcgtctttggtactggctttttt

SEQ ID NO: 157825 - DNA, 100 bp, Homo sapiens
aaataatttaagtcaaagaatctgctctatgctaaccaaggtgcaaacagctgcacagcaagtggcagaggataaatttgtttttgacttacctgattat

SEQ ID NO: 157826 - DNA, 75 bp, Homo sapiens
tgggaggggggcagctggagcctcaggcggcagcgcttctaggtttaactgaactgaatgacagtccagttcccc

SEQ ID NO: 157827 - DNA, 99 bp, Homo sapiens
cgtcctcaaggagttccggcccgaggaccagccctggctgctccgggtcaacggcaaatcaggcaggaagtatccagctcacatagaagacattgacta

SEQ ID NO: 157828 - DNA, 97 bp, Homo sapiens
cgcgtctccccggcccagtccgcgcccggccccgcggggccgctccggcccgctccgaggacccaggaccacccccaccttctccattactaggttt

SEQ ID NO: 157829 - DNA, 50 bp, Homo sapiens
ttcaagtacatcataatcggcgacacagaacaactctgctcatggtgatt

SEQ ID NO: 157830 - DNA, 97 bp, Homo sapiens
accatacatggtacagccagagtaccgaatctatgagatgaacaagagactgcagtctcgcacagaggaaaatgtttataggaggccttagctggga

SEQ ID NO: 157831 - DNA, 80 bp, Homo sapiens
gaagcaacaagattgcttgcaacaattgttatgcttgaagctgcagtaaaggaagatgaagaagaagtttcagataaggg

SEQ ID NO: 157832 - DNA, 90 bp, Homo sapiens
ccgggaaatctccaagtcagaaaggtggagatgacccctgagaagttcagtgtcttaatggagaagctctgtaaaaaggggctggcagcc

SEQ ID NO: 157833 - DNA, 100 bp, Homo sapiens
tcctcgcggcgctggcgctgggcgtcctccggaagcagcggagaagccgagccgctgttgtgacaagaaaagctgtggcaaccgaaatgagactccctca

SEQ ID NO: 157834 - DNA, 100 bp, Homo sapiens
cagcaacaagctgagctgctgtgacagaggggaacaagatggcggcgccgaaggggagcctctgggacccggtcagcccaaggagcaggggtccagcagc

SEQ ID NO: 157835 - DNA, 88 bp, Homo sapiens
gcgatggcttcagacagcatatttgagtcatttccttcgtacccacagtgcttcatgagagtatgaagtgtaacagaacagactttac

SEQ ID NO: 157836 - DNA, 82 bp, Homo sapiens
caagcgagaaagaacatcctctttaacccagttcccaccctcacagtcagaattcagaaggagctggcggacatcactttag

SEQ ID NO: 157837 - DNA, 100 bp, Homo sapiens
aggactcagaccagtctctgcaagagaagatgacatttggaagagtcagtgacttggggcaattcatccgagaatctgagcctgaacctgatgtaaggaa

SEQ ID NO: 157838 - DNA, 145 bp, Homo sapiens
tgaaggagaatacacacatcacaaagatcctggaatatataaatgtgttgtttgtggaactccattgtttaagctgtcattttagaaaatgaagaacttcccaaactgtttcttgatttcctaaatgtgcgacacttgccctctc

SEQ ID NO: 157839 - DNA, 75 bp, Homo sapiens
ctcagttggaagcagccgatccagcctgcggagcctgtggggcaggttggtgacagcgtcccaagctggtgacag

SEQ ID NO: 157840 - DNA, 100 bp, Homo sapiens
cagctgggccgcggccgaggaggcagcgcgacctccgcacggtctggagcccggcactgtggtcataacagagcaggcagtggatacctgcttcaaggca

SEQ ID NO: 157841 - DNA, 82 bp, Homo sapiens
cccagaccctggagcctcagttggaagcagccgatccagcctgcggagcctgtggggcagtgtcttctcagaaacaatcggc

SEQ ID NO: 157842 - DNA, 88 bp, Homo sapiens
cactcaccaggctgcaagaacagtgctggggaaatgaaggaccatatggtcagcccaacagccgtagcatttttggagaggaataaca

SEQ ID NO: 157843 - DNA, 74 bp, Homo sapiens
gccgcgccaggccggggggcgtttgaaaatctgaacacagttgctgagtgtctgttttctctggtcaacggtga

SEQ ID NO: 157844 - DNA, 89 bp, Homo sapiens
gaacgagcgcagagttatcgtgccagcagatcctccgagcggcggcgacggctgttgctaagggaggggacgcgcgaggaagcgcgacc

SEQ ID NO: 157845 - DNA, 74 bp, Homo sapiens
tcaaggaccccagaaccccaagaaacagggaatcttccacattcatgaagtttccaagccagcgccctactggg

SEQ ID NO: 157846 - DNA, 50 bp, Homo sapiens
taaggaacaggaggaaaccattcagagcctcatctagttgaatctgaaga

SEQ ID NO: 157847 - DNA, 78 bp, Homo sapiens
aaaaagaagtctttacaccgccaatccacttcctgtggcaactacagggcttattcagctgattctgaatcatcttac

SEQ ID NO: 157848 - DNA, 50 bp, Homo sapiens
gcaaactctggaaaaaaacttggcatttgacattgtgcagcaaagaaatg

SEQ ID NO: 157849 - DNA, 100 bp, Homo sapiens
ctgggcaagacctgctgggaggccctggtcagccccgtggtgcagaacatcacctcccctgctggcagccaggaggcaggagcagcgggcgacagtgcgg

SEQ ID NO: 157850 - DNA, 96 bp, Homo sapiens
agcccagacaatgccggtggaggaatttgtggctggctggatctctgctcaactataaatttccagcaacagtgcacatggcgcatcaaaaaccca

SEQ ID NO: 157851 - DNA, 75 bp, Homo sapiens
gcctttctggacacagaagtatttgtgacagatgacaatgaggggagcagcagtgatactgcccctctgttccag

SEQ ID NO: 157852 - DNA, 100 bp, Homo sapiens
tgccttcgccactgctcagcgtctgcacatccctacaatggctaaaacagcaatgggaaacccagcgtttgctggcagaaccagttcctggcatcaaagc

SEQ ID NO: 157853 - DNA, 74 bp, Homo sapiens
ccagacgcggcacagagagggcctgggagcttgctgcagcttcaggattttttatcaagcagaaatgcatcgaa

SEQ ID NO: 157854 - DNA, 100 bp, Homo sapiens
ccaaaacctaagtacaacccatacaaacaacctggaggtgagggtgactttcggatggtggttggagaagataaaacaaaagtgttgaatattgtgaagc

SEQ ID NO: 157855 - DNA, 100 bp, Homo sapiens
ctcttctccttcacagtaaagtggctggttttgcacactagggaccaagaagccctcggggacactgctgagaaaagactgccgaagggaagaccagcgg

SEQ ID NO: 157856 - DNA, 82 bp, Homo sapiens
ctgcagcgggagctggacggcgagcgcgagcggcgcgagaaagcatctgcatctgggaccgacctcctgggctggctgatca

SEQ ID NO: 157857 - DNA, 80 bp, Homo sapiens
ctgtagaggaggctggagattccacccaaatcctcttctccaagaaggtgaccattgtgaggtagatattttgttctaat

SEQ ID NO: 157858 - DNA, 74 bp, Homo sapiens
gaacatttccccagaggagctcaaaatggagttgccggagagacagcccagccatttccccaaaggaatgtctt

SEQ ID NO: 157859 - DNA, 90 bp, Homo sapiens
attcgttacagccagagattggaaatatgagctgtacagcatggactgggacctgaaggaggaactcagggattgcctggtggctgctgc

SEQ ID NO: 157860 - DNA, 100 bp, Homo sapiens
ggaggaagtaggggtgcacctcagcactatcccaagactgctggcaacaggtgcccctgggcgctgggattgctctagcctgtaagtataatggaaaaga

SEQ ID NO: 157861 - DNA, 96 bp, Homo sapiens
gtgtcagtagtggacggccagacagagtccccggaggggaagaatggacagaagctatccaggctgtagcagacagactgcagaggcaagaagagg

SEQ ID NO: 157862 - DNA, 50 bp, Homo sapiens
acattgtcaccgagtacatggccagagtgcctccggagccagcgtggtgg

SEQ ID NO: 157863 - DNA, 76 bp, Homo sapiens
agatgttgtcaaggtggcctaccaggaggccaggggtgtcgccatggtatggagatggtccacgtcctcccaagat

SEQ ID NO: 157864 - DNA, 98 bp, Homo sapiens
atggttagagaagaattttccaaatgaatttgcaaaacttactgtagggctgaaaaactgggtggtagctgaagacgtggtgtttaaacctgtggctg

SEQ ID NO: 157865 - DNA, 82 bp, Homo sapiens
tggcgtgcagcgcaaccacgagacggccttccaagcatggcggacaccgacctgttcatggaatgtgaggaggaggagttgg

SEQ ID NO: 157866 - DNA, 88 bp, Homo sapiens
agattccaaccttccagccccttttgaaaggccaagggcgagatcccagaagtggcattcatgaagtgatcgtagtcatgcctcagaa

SEQ ID NO: 157867 - DNA, 110 bp, Homo sapiens
atgctcagcaggagcttcatcaacgatatatgtcagatctaaagataatacatatgtgtcaagttcagagaatgatgaagatgtgctagttactacagagccaataccag

SEQ ID NO: 157868 - DNA, 100 bp, Homo sapiens
taaccatgagggaaatcgtgcacatccaggctggtcagtgtggcaaccagatcggtgccaagtaatctatgccagcaattatgacaatgttagcagacca

SEQ ID NO: 157869 - DNA, 97 bp, Homo sapiens
ttgtgtcaaccatccattccaggagccagctatctgagaatgaactctggaagcccagccagggacaatgcaccttcacagagattctgcactaatc

SEQ ID NO: 157870 - DNA, 98 bp, Homo sapiens
agcaacagcagcagcaagttagtggattaaaatctcccaagaggaatgacaaacaaccagctcttcaggtaagaatgattgatgttggctgatattgg

SEQ ID NO: 157871 - DNA, 100 bp, Homo sapiens
cgaagccacgctccggatggaaaacgtggacgtgaaggaggaatggcaggacgaagatcttcccagggcttctttcgccgcacaatccagaagaacctcc

SEQ ID NO: 157872 - DNA, 100 bp, Homo sapiens
aactcatcggaaacatggcactgttgcctatcagaagtcaattcaaaggacctgcccccagagagaaatctgaattatccagaacagaaagttgtgactg

SEQ ID NO: 157873 - DNA, 99 bp, Homo sapiens
ataccaaacagtggcatggaccacacccagcggaaaaatttctgaataaattggcagaagaacgcagacagaagaaggaaacttaagatgtgcaaggag

SEQ ID NO: 157874 - DNA, 90 bp, Homo sapiens
gtcttacatgacacaatggatctgaatcatctcttgaaaggtaaagaaactgcggcaatgaaagctgatctcctgagggccaggaacatg

SEQ ID NO: 157875 - DNA, 100 bp, Homo sapiens
gttctgccaccttcctggagctgcagctcctcaatggttgaaactgataaagccactgttggatttgagagcctggaggagtgttatatggcaaagatac

SEQ ID NO: 157876 - DNA, 101 bp, Homo sapiens
gaggcaccgaggcactcagaggagggcgccggccacatggttcccaccgacaagcccctcgctgccttcaccatgttctcccgcttcctgaacaagcagcc

SEQ ID NO: 157877 - DNA, 83 bp, Homo sapiens
gcatcggctctgctgaagagcctgcgggttggagattatggcttgttaacaacaccccagctgcactacatggtgtattgtcg

SEQ ID NO: 157878 - DNA, 82 bp, Homo sapiens
cgcgaggttcgagtgttgcagagcctgcggggcaagatctccacataaagaagatccctaatagtcatttctcaacaattat

SEQ ID NO: 157879 - DNA, 75 bp, Homo sapiens
atttaattttagggtcctttatatagaagggagagtaggaaaatggcattcctatgaagaaagcacgaaatgatg

SEQ ID NO: 157880 - DNA, 115 bp, Homo sapiens
ctacgcagaacccgggagtaggagactcagaatcgaatctcttctccctccccttcttgacaatgcagatcttcgtgaagactctgactggtaagaccatcaccctcgaggttga

SEQ ID NO: 157881 - DNA, 82 bp, Homo sapiens
gcatccttcagaaaaagcatccccgaggaggaagacgaatcgttaaacatcttaggtcagttaattggccttggtcctcaca

SEQ ID NO: 157882 - DNA, 100 bp, Homo sapiens
agcggcggcgccagctcctgtggctgaaactgccgccaaccggatctgtaaggtgctggctgtcaaccaagagaacgagcacctgatggaggactacgag

SEQ ID NO: 157883 - DNA, 75 bp, Homo sapiens
gatctcttcaaaacaagtgctcctgccccagtggggcccctggtgggtctagaatgtagaagaaggaagtccggc

SEQ ID NO: 157884 - DNA, 82 bp, Homo sapiens
caacaagatcccctatgagagtcccatcttcagcagaggtcatcctgtacagttctacagcatgaataggcctgcctctcgc

SEQ ID NO: 157885 - DNA, 100 bp, Homo sapiens
tactggctcatgctcaacgagaaggaggcccagcaagtgtatggtgggaaggaggccaggacgcccgtgaaggtggagcggacccggaagcggtccgagg

SEQ ID NO: 157886 - DNA, 51 bp, Homo sapiens
cgtaggaatggagagggaccggatctcaggaagaggagcaggacttggatg

SEQ ID NO: 157887 - DNA, 101 bp, Homo sapiens
aagcctgtatcaactctggtatggacacagcttctagtgttgctttggatcttgtggaaagtcagaatattggtatcaacttgactgaccctatgttcaga

SEQ ID NO: 157888 - DNA, 51 bp, Homo sapiens
ctcggccatgtcactgctctgcgtgcgcgttgctgtcccctttgacgatga

SEQ ID NO: 157889 - DNA, 100 bp, Homo sapiens
cgaggatcaaatgagttgatgatacttgcacggcgctcggatcgtggaagaaatgttggctatttggcgatgagaggtggtgaacagtgaccatactggt

SEQ ID NO: 157890 - DNA, 102 bp, Homo sapiens
ccgacccgagttatgcccaccctccaactttgcgacggaaatgtgtcatcgaaagccaggtatctcgggggagctttgtgccttgatggatcaagttcatca

SEQ ID NO: 157891 - DNA, 100 bp, Homo sapiens
gtgaatttccttttggatctaagcaaaaagaagtttgtatcaacccataccactataagagagtggagagtccaggtcttttgccaactcctattactca

SEQ ID NO: 157892 - DNA, 75 bp, Homo sapiens
ctggctgtagcgaacaacaacccaaccattactgttcacagcacagagtaagcactcaaaaaatgaaagttgtat

SEQ ID NO: 157893 - DNA, 97 bp, Homo sapiens
ctgatgtccaaacaaagaaatctatggcaattcactggggaacttttgccttagcaaatgaggtgacttaatgaaaataccaagttctgaattgagg

SEQ ID NO: 157894 - DNA, 100 bp, Homo sapiens
acgtggagatggctttgctcagcaacatcctagcggcctattcctttgtctcagtgtggcaaagcgctccctggcctttcaaagcaagaggactgctgtg

SEQ ID NO: 157895 - DNA, 76 bp, Homo sapiens
gttgtgccaatggtggagaagaaaacttcggagccctgcgctgggttacgcctcagatgctgtgtgtccctgttaa

SEQ ID NO: 157896 - DNA, 75 bp, Homo sapiens
cagcctcttctgaaacactggggtgcatgtgagggaaccctggcttgttcaacctgtcacctcatctttgaagat

SEQ ID NO: 157897 - DNA, 100 bp, Homo sapiens
cctcaagctgtcccaggacatggacacctgtgagaacccagcgggtgccgcttctccacccgaggcttccacctccaacgagccatgttccaggctgcag

SEQ ID NO: 157898 - DNA, 88 bp, Homo sapiens
gggttcagcgctcgggtgaggagctggtggcgtcggcaggttcgaggcgattcgaggtgagggtgacctgaataaagtggctgatgcc

SEQ ID NO: 157899 - DNA, 100 bp, Homo sapiens
ccctctatgtcctctttgttcaggccactgcgtatgggcaggcctgtgcctcgtgtgcatcaccggggccagtggggaggaggtggccggcgccacagcg

SEQ ID NO: 157900 - DNA, 74 bp, Homo sapiens
atgtcattatcagacacaatggggatgatccctggttttgggacagattttatgagcaaaggaaatgaacagga

SEQ ID NO: 157901 - DNA, 98 bp, Homo sapiens
cgggactgcactcgagtgtccagacctgctcgatgacaaatgtttatgggtcagcccagagacgaaaaatgagaccatttgaaggcttccagcgcaaa

SEQ ID NO: 157902 - DNA, 88 bp, Homo sapiens
ggacctgccccatggaggtgctgcgggatcacctcctcggcgtgagcgacagcggcaaacggctatgtgactacgtttgtgacctcct

SEQ ID NO: 157903 - DNA, 90 bp, Homo sapiens
gttcgttgtgccagcgactaaaaagagctattgacctgaaaagtggttctggaaaagtgtaccaaggccctgcaaaaggtgctgctgata

SEQ ID NO: 157904 - DNA, 122 bp, Homo sapiens
tggagagaccccgcggctgggcgttcatctaccacgctttcgtagtcgggccacaaaaagttaaaaagtaccatccagagaagcacagaaacaggcatggcagctgaaatgagaaagatggt

SEQ ID NO: 157905 - DNA, 100 bp, Homo sapiens
aggggagccctgtccagagcctccagggccctgcgccttgctccttttgtctaccttcttctgatccagacaggtaaaccccaaggatttggaccccaaa

SEQ ID NO: 157906 - DNA, 82 bp, Homo sapiens
aaccaaacaccctcagctccacattgagagcaaaatctacaagatgatgcagggaggaggttcccaacaaggctacgcagaa

SEQ ID NO: 157907 - DNA, 89 bp, Homo sapiens
cgcagctccggcagagggaggtggtggacctgacaatgcagatcttcgtgaagactctgactggtaagaccatcaccctcgaggttgag

SEQ ID NO: 157908 - DNA, 95 bp, Homo sapiens
gtttcaagtgctgcctctggtgtctggaaaaatttatcaagttcctaaaccgcaatgcatacatcatgatcgatcctgtcctcggtaccgtgggc

SEQ ID NO: 157909 - DNA, 100 bp, Homo sapiens
ggaacccagcaacaattcttctgccagctgcatggctacttggagaatgagccgctgatgctgcagcttttcattgggacggcggacgaccgcctgctgc

SEQ ID NO: 157910 - DNA, 80 bp, Homo sapiens
gcctccgtgcggagaccactgttcaaggccacagggatcgactacaagaccaccaccatcctgctggacggccggcgcgt

SEQ ID NO: 157911 - DNA, 111 bp, Homo sapiens
ggccctggggctggaaattgcgctggaccgtcgccttgctcctcgccgcggcggggactgcagaacatgccgagtttttgcactgcaagtccaaaaagtttacagactttg

SEQ ID NO: 157912 - DNA, 83 bp, Homo sapiens
ctgtctcccatacacacaccacagcgggtcctggatgttctgaccaaagggaagcagcaggcattctttgtgccaccaagccg

SEQ ID NO: 157913 - DNA, 82 bp, Homo sapiens
cgcttgcagttcagcgaccacgagatgctgcccccacccccttaggcccgagggatcaggagctatgggaccagaggccctg

SEQ ID NO: 157914 - DNA, 89 bp, Homo sapiens
tgatctgtctgaatgtttaattaatcaggaatgtgaagaaattctacaggttcgcctaacccctactggtcataacatgaaaattctgc

SEQ ID NO: 157915 - DNA, 100 bp, Homo sapiens
acacctggtgtttgtgccaagaccccaggctgcctcccaggtcctctgggacagcccctgccttctaccaggcgtcgacattccagatggctatcctgct

SEQ ID NO: 157916 - DNA, 100 bp, Homo sapiens
tgctcatagacgaactccgcaatgaggacgttcaggttcttgggtgtctctggggagtccctgggccagaccttcctccagactccagcccacctcttcg

SEQ ID NO: 157917 - DNA, 95 bp, Homo sapiens
ggacgtcactggccctggtggggattgacagccacgggaagcaaattgtggctactaatttgccccctgaagatcaagatggctctggggatgac

SEQ ID NO: 157918 - DNA, 100 bp, Homo sapiens
gacagttcgctacacagcaatgcatcgaggtggattgtctcattgttagtgctgaatcttcttgcctacttgtatctgggaatttaactttgaagaggaa

SEQ ID NO: 157919 - DNA, 60 bp, Homo sapiens
gacatccccgagtcccagatggaggagccggcagcccctgggaacaagccggagctgtat

SEQ ID NO: 157920 - DNA, 75 bp, Homo sapiens
gtcttggaagttccaaagttgcaacgatttctttttggcaagcgttctgcaggaagttttaggcgtggctgtgaa

SEQ ID NO: 157921 - DNA, 83 bp, Homo sapiens
gccaaccatgctcaacttcggtgcctctctccagcagactgcgaaagttcaggagccctggaaaggagaaggaataagacggc

SEQ ID NO: 157922 - DNA, 100 bp, Homo sapiens
atgtgtcaaggcttgaagacggctgagcagacagccagcagatatgagttactggggcttccggatgcagatgacgatgcgtttgaagagtacagtgctg

SEQ ID NO: 157923 - DNA, 100 bp, Homo sapiens
gtgggcctccatcccgtgccctcgctctgagctgcgcctggacctggttctgccttctggacaatctttccggaggaggccctgcagcgacatggaggga

SEQ ID NO: 157924 - DNA, 97 bp, Homo sapiens
gaaggatcagctggacaacttgttgttaaaggagtccttgctggaggactttaagttgttgacctcctgtactggagagacattaagaagactggag

SEQ ID NO: 157925 - DNA, 83 bp, Homo sapiens
cccaaagatccccgttcctggagattctgattgaggttgagcttcagcgacagcgagagtgacaacagcgccgactcctccct

SEQ ID NO: 157926 - DNA, 75 bp, Homo sapiens
caggtcttgtagcagcgcctcctcgttgctacccaagcattgtgccaaaactatcagtcaagcagtgaataagaa

SEQ ID NO: 157927 - DNA, 88 bp, Homo sapiens
tgtctgatcccttgctcccatccctgcagcatgaacaagttgtattccctgaatgactataaaccacccatttcgaaagcgaaaatga

SEQ ID NO: 157928 - DNA, 50 bp, Homo sapiens
cgggagcacagttccgccgaaggccccacagtatcaaatatccgcctggc

SEQ ID NO: 157929 - DNA, 75 bp, Homo sapiens
cacagctacatatttgttattggggagaaaatcttcagaggaacaggagtacagctgtgtagtaaagatgccttc

SEQ ID NO: 157930 - DNA, 75 bp, Homo sapiens
gctgccgcctatgggcacaggcagtgtctggaattgcgctgctttacatttatggaccgagggtatgtgtttaag

SEQ ID NO: 157931 - DNA, 119 bp, Homo sapiens
aacagctgcggtgctctgccatattgtgtcttccccggccggtccctcgcctcccggccgagctgacggaaagttcacatccttggctccttccaaaatatcaagatggcaagaactgc

SEQ ID NO: 157932 - DNA, 100 bp, Homo sapiens
gggatgtgaaaactctgttactgaagagtattgggaaagggtcgttgtggtgcatagacccagagtatagacaaaatctaattcaggctttgaaaaagac

SEQ ID NO: 157933 - DNA, 100 bp, Homo sapiens
ctgaggaggccggctgcagccccaagacagagcgctactcctggcagtgcgtcaatcagagcgtcctgtgcggttgctgcttttgctcagaggacatcca

SEQ ID NO: 157934 - DNA, 83 bp, Homo sapiens
cgggcgagcggctgtgtggatgtcggcgaagccgcgggcgagatgatatcatcaagttgaatcgaaaggaagggaagaagcag

SEQ ID NO: 157935 - DNA, 82 bp, Homo sapiens
ggggaaaaggcaaaaatcccatctaccgcaactctcagttcgagagtaaaggtttctttacctccagaaagaagaatattgg

SEQ ID NO: 157936 - DNA, 98 bp, Homo sapiens
caccgtgcacattctctgttctaagtgccttaagagaggatcgcccaatccacatgcttttccagtagtttatgccaacgtgacttcattcatacaga

SEQ ID NO: 157937 - DNA, 100 bp, Homo sapiens
cgcggggagcgcccccggcgcgatgcccttcaggaaagttgcaggacgaggagcggaggcggcagcagcagttagaagagatgcgcaagcgggaagcgga

SEQ ID NO: 157938 - DNA, 50 bp, Homo sapiens
tgtgcaaacccgagagaactgggccaagacccatgttcttgacattgagc

SEQ ID NO: 157939 - DNA, 109 bp, Homo sapiens
tggtgatggagattttgatgtggatgatgccaaagttttattaggtatcattgcccagtgcctaagatcttttatgttcagctcactgtaggaaataatgaattttttg

SEQ ID NO: 157940 - DNA, 90 bp, Homo sapiens
agaaactcgaggagctaaaagcgaaggccgcggggaaggggcccttgggcacgtggactccctttaatccagtgactgtcaggtcgatca

SEQ ID NO: 157941 - DNA, 83 bp, Homo sapiens
agagaccaataaaaataaactgcttgaacatcctttgactggttagccagaatgtacctgaacttccggacactacagagcat

SEQ ID NO: 157942 - DNA, 75 bp, Homo sapiens
tgaatttcctacagttcttgatattacagggcacacgtgtttcacgttgacaggtttgcttgggacgctagtaac

SEQ ID NO: 157943 - DNA, 109 bp, Homo sapiens
acctggaagcaagtctgcaactccttcaccatccagttcagtgcatgaagatgaaggcgatgatacctctaaggaggaagacaatggtcctataatgcccttggataag

SEQ ID NO: 157944 - DNA, 100 bp, Homo sapiens
ctcagtgtggtttgggcccaaagaggtgtccacagcttgtgccaccgccgtgctgggcaatcaggaaatttgcgagaatccccgatttatcattgatgga

SEQ ID NO: 157945 - DNA, 100 bp, Homo sapiens
ccttctctatcagatgctgtgtggaatcaagcaccttcattctgctggaattattcatcggaatgagaagactttgggacatttcatgagtcattcaagc

SEQ ID NO: 157946 - DNA, 50 bp, Homo sapiens
cggctgcctaatttacagcaaccatgagaatctccctggggtgccctccc

SEQ ID NO: 157947 - DNA, 100 bp, Homo sapiens
aggaatgatccagatggacctcattcagacagaatctattaccttggtactccaaagattcaggtttactcacgtcatccagcagagaatggaaagtcaa

SEQ ID NO: 157948 - DNA, 99 bp, Homo sapiens
tcattcaagtggaaatttatgccaactcttctctgacccataatgcctcagaagatgaattgaatcttctggttattgtagttgatgccaacccaattt

SEQ ID NO: 157949 - DNA, 74 bp, Homo sapiens
ggaaagtctggaccgagctcttggatgttcttggacttgacggctcagtagatgaaggcgtttctgagggcttg

SEQ ID NO: 157950 - DNA, 80 bp, Homo sapiens
gggaaccctggtcaccgtctcctcagctgttaaacgtttaatgaaagaagcggcagaattgaaagatccaacagatcatt

SEQ ID NO: 157951 - DNA, 51 bp, Homo sapiens
agattcgcagtggtcgcttcttctccttgattgtagaaggcatgaaacaaa

SEQ ID NO: 157952 - DNA, 99 bp, Homo sapiens
caaacagtggcatggaccacacccagcggaattcctacaacagcagccagtacccctgatgccgttgacaagtatctcgagacacctggggatgagaat

SEQ ID NO: 157953 - DNA, 98 bp, Homo sapiens
tgtttcactctgctctgctactatgatcccaattcaggctacagcatgctggccatagggattggaaccctgatctacgggcactggagcataatgaa

SEQ ID NO: 157954 - DNA, 89 bp, Homo sapiens
cggctccctgcctccgcgtcgcagcccccgccgtagccgcctccgagcccgccgccacatcctctgagtcaccacgttctgcgcttttc

SEQ ID NO: 157955 - DNA, 85 bp, Homo sapiens
gaagataagacactttctcagttacagagagaacgatctggaaaaattttcaaaaggtattggcaggtttacaagagaagatccc

SEQ ID NO: 157956 - DNA, 74 bp, Homo sapiens
gctggactatggcatctatgttatcaaccaggatctgcaggcccaagaccgagctcaccgcatcgggcagcaga

SEQ ID NO: 157957 - DNA, 100 bp, Homo sapiens
tctggagttctcccaccctcacagatctgtgacttcctccgcggagccacagtccatagaatcctcggccagcaggtcccctatgccaccaagggcaacc

SEQ ID NO: 157958 - DNA, 75 bp, Homo sapiens
cgctgccctgggtgctgtaggagcccatctgactcaccagtccactgcttttaaggccctgcactgaaaatgcaa

SEQ ID NO: 157959 - DNA, 75 bp, Homo sapiens
tacaccttttccacagggaattgagttgggtcctgatgaagaagctgttgtggatcttggcaaaactagctcaac

SEQ ID NO: 157960 - DNA, 75 bp, Homo sapiens
atcatgcacatcttcaagcatgctcaggatttgcgcaagcaggtagcgccgctgctgaagagtttccaaggagag

SEQ ID NO: 157961 - DNA, 90 bp, Homo sapiens
tctcgagttgctgggaccacagacctctcacttgactatgcctctcagccagcaaatcttcagttccctcacataatgccccttgctgaa

SEQ ID NO: 157962 - DNA, 50 bp, Homo sapiens
ccctgcgcactcaccatggcgcagcaacaactccaggcccagcatttatc

SEQ ID NO: 157963 - DNA, 75 bp, Homo sapiens
gagatcctcctgatgcccactccagggaagcatggaggctatgtggcccctcccacttgttctatgtcctgcctg

SEQ ID NO: 157964 - DNA, 75 bp, Homo sapiens
tctcgttccagttccagagaacgttcgagatctcgtgggtcgaaatcaaggccaaggcagaggcttcctcaggag

SEQ ID NO: 157965 - DNA, 90 bp, Homo sapiens
aacggcttcatcagcaccttgggactcctgggagagttggctctcaaggttctgatttagattcatcagcaactcctataaacacagtgg

SEQ ID NO: 157966 - DNA, 50 bp, Homo sapiens
aggacactcccctaacatatttgtttgtcagggagccactggtgatgtgg

SEQ ID NO: 157967 - DNA, 99 bp, Homo sapiens
tgtgaatgtgaaagattttgcaggtcaaatgctgcaaatactggccagatgacacagagatatataaagacattaaagttaccctaatagaaacagaac

SEQ ID NO: 157968 - DNA, 100 bp, Homo sapiens
gacctccggatgacccgggcttcggcccccaccagagactcggaccgcagctgaatgcacagctagaaggttggctttcacaagtacagtctacaaaaag

SEQ ID NO: 157969 - DNA, 74 bp, Homo sapiens
ccaaccctgccatccgggagcagacggtcaaggtacggcttcaggtccagagcgtggagaagcctcagtaccgc

SEQ ID NO: 157970 - DNA, 104 bp, Homo sapiens
cgatgccgctgaatgggctgaaggaggaggacaaagagcccctcatcgagctcttcgtcaagaggagaagaagggacctggtggcggcgccccagtccgcctcc

SEQ ID NO: 157971 - DNA, 90 bp, Homo sapiens
ccaacgtgtggcggctcgcgacccccggcaacccggagaaggtctacagagcggcctgcgccagcgagtaaaaaagagtgtcaagtggac

SEQ ID NO: 157972 - DNA, 96 bp, Homo sapiens
cctgggagacgctgcctcggcccggacgcgcccgcgcccccgcggctggagggtgacggagtctcagtggcgtgatcctggttcactgcaacctct

SEQ ID NO: 157973 - DNA, 121 bp, Homo sapiens
agagcggggtcggggccggctgaccaggaacctgggcgagcagcggcgggggcccgaggggattttttatcaagcagaaatgcatcgaacaacgagaatcaagatcactgagctaaatccc

SEQ ID NO: 157974 - DNA, 83 bp, Homo sapiens
gtgaaaaataccacgacaaaaccaccctaagatgccctgtatccaagcccaatatgggacaccagcaccgagtccgggacccc

SEQ ID NO: 157975 - DNA, 75 bp, Homo sapiens
ctgctgtggaagggctccttcaagcccagcgagcatgaatgtcaaaactggaccaatggggccaggctgaagtat

SEQ ID NO: 157976 - DNA, 100 bp, Homo sapiens
tttgtcgcccctgatgatcgagttgtcttccgcacctgtgaaagagagcagaacagggtggtcttccagatgcaccctggaggagaagaggttctgctgg

SEQ ID NO: 157977 - DNA, 100 bp, Homo sapiens
gatccgcaaagtgtctacctcggggcagatccggaccaagcatcagccactatgtgattgtcatgtccatgaccatctttttggtgttcctcaatggcct

SEQ ID NO: 157978 - DNA, 74 bp, Homo sapiens
gctgcccagggaccgatgttgcgcgaggaaaatgcgggacgcccaggagttaaagttcctcgtaattttcgctt

SEQ ID NO: 157979 - DNA, 130 bp, Homo sapiens
cggaaaaggaacagattgttcctaaaccagaagaggaggttgcccagaagaaaaaggaatcatatgaagatggcccttgtactataacttcaaataagaattctgataataacttgctttcattggatgg

SEQ ID NO: 157980 - DNA, 100 bp, Homo sapiens
ccgctgcacccgcaggtgctgggcgcgctgcgggagctgggcttcccgtacatgacgccggtgcagaggctgccatgggctccgtggggagccagcgcct

SEQ ID NO: 157981 - DNA, 80 bp, Homo sapiens
gggctgcaggagaagatggcggtctccacagggttctccaaaaaatgtggaatcctttgcatctatgctgagacattctc

SEQ ID NO: 157982 - DNA, 51 bp, Homo sapiens
cccggagaagcaggagccctactcggcaggacccattccaacaatctcgta

SEQ ID NO: 157983 - DNA, 75 bp, Homo sapiens
gctgtgaactgtgaacagaagcaagctcccaaccctcccacaattagagaagagctctgcacagcttcatatgac

SEQ ID NO: 157984 - DNA, 51 bp, Homo sapiens
cctcaggctttaggaactgaagagtactatactggcaattgctggagaaga

SEQ ID NO: 157985 - DNA, 80 bp, Homo sapiens
tgaaaatggggcggaagaaaatacaaatcacacgcataatggatgaaaggaaccgacagacccccccaagacacatatga

SEQ ID NO: 157986 - DNA, 90 bp, Homo sapiens
ctcttgataaggaagctgcccttcagccgcctgcttccccatggcctccctccttgtgccccagatctgcagcaagaagcagaacagttg

SEQ ID NO: 157987 - DNA, 82 bp, Homo sapiens
gcgatccgggcgccaccccgcggtcatcggtcaccggtcgctctcaggaacagcaggagaacaaggggtctgtggaaatcat

SEQ ID NO: 157988 - DNA, 100 bp, Homo sapiens
aatgatttctccagtgctcatcttgttctcgagttttctctgccatgttgctattgcaggacggaggcaagtgtccagagaatggctgggatgaaagtac

SEQ ID NO: 157989 - DNA, 75 bp, Homo sapiens
ggggaccacaagatcctcatcgacagattgaaaatattgaacttcccatggatacaaaaacaaatgaaagaagag

SEQ ID NO: 157990 - DNA, 100 bp, Homo sapiens
cggaaccagcctgcacgcgctggctccgggtgacagccgcgcgcctcggccagaaatgtctttcctccaggacccaagtttcttcaccatggggatgtgg

SEQ ID NO: 157991 - DNA, 75 bp, Homo sapiens
gcaaaagtgactcagctgcctgcaagacaaaggtagctggatccgtagagcacttctcagaacttctggatgagt

SEQ ID NO: 157992 - DNA, 100 bp, Homo sapiens
cggagtctacgccatcgtggccacgcttctcatcctggacatctgacataaacgagctgaacctgcccaagacgtgtgatatcagcttctcagatccaga

SEQ ID NO: 157993 - DNA, 100 bp, Homo sapiens
tttaacaagatcaccaacgtgtcggctgtcatcaagcccactgctcagtggagcgtggaggacgaggaggaggccgtccacgagcaatgccagcatgaga

SEQ ID NO: 157994 - DNA, 90 bp, Homo sapiens
tgtcctttcataagtatggagagtacttcccaggaactggggacctacgggtggacccaagtggagagattgtggaactggcgaaaggtg

SEQ ID NO: 157995 - DNA, 51 bp, Homo sapiens
cgggagctcaaagtgtgccttctcgggaggagtgaatgtcgttccttttct

SEQ ID NO: 157996 - DNA, 76 bp, Homo sapiens
tggtttggaaaaatttcattagagattcggtttatgctagagacgatgttggccctgaagaacaatgacatgcgca

SEQ ID NO: 157997 - DNA, 100 bp, Homo sapiens
cgttccgcgggatcttgcagaggagaggtcccaggtgtgacaccttcagcaggtctcagggaagatggcagccctaggggacattcaggagtccccttct

SEQ ID NO: 157998 - DNA, 111 bp, Homo sapiens
gcgagtgcctgagcaacatccgcgagttcctgcgcggctgcggggcttccctgcggctggaggtgagactgtggagatgagaaggtggtggacactcgtgatggaatggaa

SEQ ID NO: 157999 - DNA, 75 bp, Homo sapiens
gttttaatgccgagaggtctctgtgacgattttggcatatagttggaaagagaggggacactaggaagaaaatag

SEQ ID NO: 158000 - DNA, 50 bp, Homo sapiens
acatggtcatgagcttcgtcaacctcggctaattcacctaaataagattg

SEQ ID NO: 158001 - DNA, 100 bp, Homo sapiens
aaaaagtctgctactactacgacgcctgacatttaccccggtaactgctgggcatttaaaggctcccaggggtacctggtggtgaggctctccatgatga

SEQ ID NO: 158002 - DNA, 82 bp, Homo sapiens
ggagattccacccaaacttgctggtcactgggagatgatgataattccgaagaaggcttccacactattcattcaggaaggc

SEQ ID NO: 158003 - DNA, 99 bp, Homo sapiens
aagaggccctcattctcatcaaaggctccttccggattctcaagctgattgtcaggaggtcctgcaaccctggttccagtctggcaagcattgtagacc

SEQ ID NO: 158004 - DNA, 75 bp, Homo sapiens
gagacagaagtgaagaaagatgaggccggagaaaactattccaaataacgaaggaggcccaacttcattcaataa

SEQ ID NO: 158005 - DNA, 83 bp, Homo sapiens
actacttcgtgctgtgcgggatcgacgcggacagcgggctggagcctgacgagctggcgggaacaagatcactcaaggtgaag

SEQ ID NO: 158006 - DNA, 97 bp, Homo sapiens
tggaaagtttgcagaagtggaaggagcagaacgtgagggtgtaacttacaaaaagaaataccgctaccaagatgaagacacgccccctctggagcac

SEQ ID NO: 158007 - DNA, 95 bp, Homo sapiens
ttaccctcggacgtagcccggcttgtattgggctcccaggccagtgccagtacttgggcttgccagtggcggattacttcaagcagtggattaat

SEQ ID NO: 158008 - DNA, 90 bp, Homo sapiens
aattattcagggtgtcagatcacatgggctaaattttgcaaaaaatctcccaagcctaagaagaagaagcacaggaaggagaaggaggag

SEQ ID NO: 158009 - DNA, 83 bp, Homo sapiens
cctggcctcactcaaacagtaaacgaggtaattaataatgcttgtgctactcaagccatagtgagtgtgttactgaactgtac

SEQ ID NO: 158010 - DNA, 90 bp, Homo sapiens
cgcgcccgctggcgtcctcttgttctcttccagaatagcctaacatggcagaccagagacagcgctcactgtctacctctggggagtcat

SEQ ID NO: 158011 - DNA, 49 bp, Homo sapiens
cagctgcagttcaaagatgccttttggattttaggtgatgggcaagtca

SEQ ID NO: 158012 - DNA, 100 bp, Homo sapiens
aggattatgtcaaatagttagaagattcccagatttattgctaaacatgggtgcatttttggataaacccaaaactgaaaaacataatgctcatggtgct

SEQ ID NO: 158013 - DNA, 96 bp, Homo sapiens
agtgtcaacctggggctgaatcttcaacctgtcaaagccttcttaattatgtctgagaaaaggtttggctctttaaccatggatggtggccttcgc

SEQ ID NO: 158014 - DNA, 83 bp, Homo sapiens
cggggcgccctccgccacgcagccggccaccgccgagacccagcacatcgccgaccagattcctagaggggagtgcctgcgag

SEQ ID NO: 158015 - DNA, 100 bp, Homo sapiens
atggctgcggcggcccagctctctctgacacagtgatcctgccatgaagcagtttctgctgtacttggatgagtccaatgccctggggaagaagttcatc

SEQ ID NO: 158016 - DNA, 96 bp, Homo sapiens
cgccttcaagctaaaatgatgactaatttggttatggccaaggaccgcttacaacttctagccaagaaggatcaagaaggtggagaagaaaagaaa

SEQ ID NO: 158017 - DNA, 83 bp, Homo sapiens
caggtcggaaatgtagccagtggggccgccagatattatgcctggtgatcctgatctgcttcagtgcctccacaccaggctac

SEQ ID NO: 158018 - DNA, 90 bp, Homo sapiens
cagacaccgagcttcagcaagctctctccaacgggcggcagcagcagctggatgcagagcgcctggacagctatgtgaacgctgaccacg

SEQ ID NO: 158019 - DNA, 82 bp, Homo sapiens
gtcattatgaccagagtattgccgcggtggaaatggagcagatataatttctacagtagaatttaatcattctggagaatta

SEQ ID NO: 158020 - DNA, 100 bp, Homo sapiens
ccggcgtccgcggcagctgataccagagtcttgctccggccgcggccagcggagccctgggctggggcaggagccggccatggttgcttgttatccgggc

SEQ ID NO: 158021 - DNA, 80 bp, Homo sapiens
catgaactccagtgacccagacctggctgtggtcaaacccacccggcccaactcactctgccgggccgcaagtacagccc

SEQ ID NO: 158022 - DNA, 100 bp, Homo sapiens
cggctctcggagccggcgcgaatccggcccccgcagcgggacccggattctttggatgggaagagaccttgaaaggacctctagtttatcctgcaactcc

SEQ ID NO: 158023 - DNA, 88 bp, Homo sapiens
cggcgtcggcggctggagcagaggcagcagccggacgagcagcggaggcggtcgggagcgatggtggagccgccaccaaaatgcagat

SEQ ID NO: 158024 - DNA, 90 bp, Homo sapiens
gaatgcgagagaaagagcctccgtcaccacataggttattggggctgtgccatcggcaaagccaggcaagctgcaaagacggaaatagag

SEQ ID NO: 158025 - DNA, 73 bp, Homo sapiens
ctctgcgtgggccggccgggagggcctcgggggactgactgggaaatattagtcgtcaagaagctgttagcat

SEQ ID NO: 158026 - DNA, 75 bp, Homo sapiens
cctgaatctgaaggtacttcatctggtcttcttaatgcttctgcacagattcagccagacacaatcatacaggtg

SEQ ID NO: 158027 - DNA, 50 bp, Homo sapiens
cgaatcgttaaacatctgaaagggtcagatatggaatgtgcagatgtccc

SEQ ID NO: 158028 - DNA, 100 bp, Homo sapiens
tcggtcgcgatgggggcgcaggaccggccgcagtgccacttcgacatcgagatcaaccgggagccggattgagaggatccagaatccagatctctggaat

SEQ ID NO: 158029 - DNA, 145 bp, Homo sapiens
aaggtttttgtgggtggattgagcccggatacttctgaagaacaaattaaagaatattttggagcctttggagaggttggactccatgaaagaattgcacaaaacaaatcgacagcagcatgagaaacatctgcaaagccgagtg

SEQ ID NO: 158030 - DNA, 100 bp, Homo sapiens
ggatctgcagaagacgcagggctcaagattgacttacgcaggattctcagcccttgcctgggagaacagttcaggagacagatggccccaagagcccaga

SEQ ID NO: 158031 - DNA, 100 bp, Homo sapiens
atcctgctgggatttttgagctggtggaagtggttggaaatggcacctatggacaagtctataagtggaggtgaagccggtgctgccaagagccatgccc

SEQ ID NO: 158032 - DNA, 100 bp, Homo sapiens
ctcacatctgtgacttcatccgaaaaacactgaatgctggggcgtactccaaagttgttcaggaacgcgaggatgccatgaggaaagctggtgtggcaca

SEQ ID NO: 158033 - DNA, 85 bp, Homo sapiens
accgggaggctcccgggcttgcgtggctttgctgcaagataacatcgctgatgctgtagcttgtgcaaagagggttgtccgtgat

SEQ ID NO: 158034 - DNA, 100 bp, Homo sapiens
ttattctttctacaacgttcacacccagacccctcttctagacctcatgagcgacgcccttgtcctcgccaaaatggtgcgaggaagtggctggagtgga

SEQ ID NO: 158035 - DNA, 99 bp, Homo sapiens
gatgataaagactatgctttaaaacaaatagaaggaactgggatctctatgtcggcatgtagagaaatagcagaaagtaggttgttgaaagaggaagaa

SEQ ID NO: 158036 - DNA, 80 bp, Homo sapiens
cccagagatgaccccttatgaagttcaaatctgaacatcaatgatgtactagggaactactcattgactcttgttgatgc

SEQ ID NO: 158037 - DNA, 97 bp, Homo sapiens
gatggttttgaaaagttcatgctgtcccttcattgaattttagacttaattcagtgcacaaatgagatgaatgtgaacatcccacagttggcagaca

SEQ ID NO: 158038 - DNA, 90 bp, Homo sapiens
agaagctggtatttggccaaggaaccaggctgactatcaacccaagcctctccttccgatgaaaagagaaaggaagaatggactacagcc

SEQ ID NO: 158039 - DNA, 100 bp, Homo sapiens
ttgtgatgcatatctacaaatgaagggtaaccgagagatggtatatgactgcactagctcttcctttgatggatgttgatcttgtctcagaatattgccc

SEQ ID NO: 158040 - DNA, 100 bp, Homo sapiens
gggcgggagatcacaaccgccagagaggatgctgtgtaacaatttggacaagacagcaaatgctattgtcgaagttttctaaagaagaatctgaagtgaa

SEQ ID NO: 158041 - DNA, 83 bp, Homo sapiens
acgacgtggagtttaagtctggagcaggcactgagctgtctgtgcgcgaataccaagctgctattttacacttgaagagggag

SEQ ID NO: 158042 - DNA, 82 bp, Homo sapiens
acatattcgatgccatcgtgatggcggatgagagacttaattcagtgcacaaatgagatgaatgtgaacatcccacagttgg

SEQ ID NO: 158043 - DNA, 100 bp, Homo sapiens
ccacgactgcctgggacctggccaagggctccacacaccaagaccaaggtcctctccacccggatcctggccatgaaggcctcgctctgcaagctgtcgc

SEQ ID NO: 158044 - DNA, 97 bp, Homo sapiens
aagaaagtacctcgtctcaaaacctggctgctatcagagaagaagggtgtttggggtgtgttttacaaaggtaacatctgccggcacctgctgcccc

SEQ ID NO: 158045 - DNA, 87 bp, Homo sapiens
caggggcggaggcggaggcagaggtggaggcgctttgaaaggctgttcgctgctacgaatctttaatcttaaaagctgaaggaaaag

SEQ ID NO: 158046 - DNA, 86 bp, Homo sapiens
agaggaatcagaaacctgaagttagaaaggctcaacgagaacaagctatcagtctccggagtagagatgaagagagaatttctaaa

SEQ ID NO: 158047 - DNA, 75 bp, Homo sapiens
acttcaatttttctgcagtggctctgggtccagccccttacttaaagatccctctctgggcgcattgttggaggt

SEQ ID NO: 158048 - DNA, 82 bp, Homo sapiens
aaagacgacaagaaaaagaaggaagctgctcaaaagaaggccgactcgcgggccgctgcacccaccgccaaggacaaaagga

SEQ ID NO: 158049 - DNA, 75 bp, Homo sapiens
gatgcctccattaagaaaatgaaacaagcctttgctgaattggagagctgctggatctaccatgaaagacttgtg

SEQ ID NO: 158050 - DNA, 75 bp, Homo sapiens
ggctgaagcccatccagactgtttgatgctgaacttcaccgttaaggctgtttgtactgatggcaagctcttcaa

SEQ ID NO: 158051 - DNA, 89 bp, Homo sapiens
cagcggaagattctcaagagaaagtggctgatgaaatttcattcagattcctgctccaaaacgaggagaaatagtaagacagattggcg

SEQ ID NO: 158052 - DNA, 80 bp, Homo sapiens
ccgggcagcccgggaaatctccaagtcagaaaggactgcccacagtggtgaaactggtagacagaaacaccttattaaaa

SEQ ID NO: 158053 - DNA, 100 bp, Homo sapiens
tggaagaagcacatatttttagtgacaaagactgtgactatgctcctacagaagaagggaaaaaagagctgctgttcctaagtaacgcgaacccctcgct

SEQ ID NO: 158054 - DNA, 58 bp, Homo sapiens
ctgtcagatagcacttgccttccccatattattcaggatgctggtcgtttactatata

SEQ ID NO: 158055 - DNA, 96 bp, Homo sapiens
aaataagttatgctatgaggatgacaaactctggagtaattggagccaagaaatgagtataggaaggaaaatcacctcggcagtgtttgaaggaag

SEQ ID NO: 158056 - DNA, 100 bp, Homo sapiens
gacagagcttgggatggtcgtcttggggatcgatacaacccacctggtgttacctgcattcacatccagaatggaatgaatcttcaaactctaagtcaag

SEQ ID NO: 158057 - DNA, 103 bp, Homo sapiens
tggctgctaccccactcctgggccgtccctgaagtatttagcgtggactacaatgatgaactggatatcttggtgagcggctctgcagacttcactgtgaaag

SEQ ID NO: 158058 - DNA, 98 bp, Homo sapiens
ccctttccggcggagtggagatcctattcagaggggccggtctctctaaatatgccccagggccaattcctgtccccccagcagcatggcatcgtgtg

SEQ ID NO: 158059 - DNA, 73 bp, Homo sapiens
atggatttttgcatgagacgcttctggacaggccatcatctctcagcaaggtgacatatttgtttttgacctg

SEQ ID NO: 158060 - DNA, 100 bp, Homo sapiens
accaaaacaatccagctgttccctcagctcaaattgaaattattccatgcaagatctgtggagacaaatcatcaggaatccattatggtgtcattacatg

SEQ ID NO: 158061 - DNA, 100 bp, Homo sapiens
aatacttgaaggacgaaagtggcttcaaagatccttccagcgactgggaaatgtcacagtcttcagttggtggcactaaggctggtgtagtccggtttct

SEQ ID NO: 158062 - DNA, 90 bp, Homo sapiens
ctcgccagcagccgtccggagccagccaacgagcgccgcagggccgtaggcagccatggcgcccagccggaatggcatggtcttgaagcc

SEQ ID NO: 158063 - DNA, 129 bp, Homo sapiens
gtgcagggcaacacctctacaaggatctgcagccatttatattgcttaggctactgtttaggcaggaatatttagatacactctacagatatgcaaaattccagtacgaatgtgggaattactcaggag

SEQ ID NO: 158064 - DNA, 82 bp, Homo sapiens
ttgccggctcccctctcaggacaacccagatgtgcaacaaagtgcgatgcgagggcggcactgctcacaggacggctaccca

SEQ ID NO: 158065 - DNA, 75 bp, Homo sapiens
gctccgcgctctggcgctacggtctggccgtcggctgcggcgccatcgatcataggtatattgaactgttcctga

SEQ ID NO: 158066 - DNA, 126 bp, Homo sapiens
gttggtggtcaagatagaattaggcctctctggaagcattacttccagaatacccagtatgttcatgcggatgctcctaccaataaaacactggctgggctggtggtgcagcttcttcagttccag

SEQ ID NO: 158067 - DNA, 75 bp, Homo sapiens
gagagcccgctcttcaacaacgtcaagctacagccttcctgtccacttccaacgaagcggtctataagatctttg

SEQ ID NO: 158068 - DNA, 109 bp, Homo sapiens
cacataagaagttcttcgatgtatctaaacttggcaccaagtatggcctcattgctacgatttcagagtaccctggtaatagctgagcatgcaaatgattccctagcac

SEQ ID NO: 158069 - DNA, 82 bp, Homo sapiens
gaggccgaactcgggttctgacaagatggccgggctgccccgcaggatcatcaagttgtccgaacagacagcctgaaggggc

SEQ ID NO: 158070 - DNA, 98 bp, Homo sapiens
gtgccctcgctctgagctgcgcctggacctggttctgccttctggacaatctttccgaaacaagtgttgaaaatgttaaaggctgtgctgaagaagag

SEQ ID NO: 158071 - DNA, 98 bp, Homo sapiens
ctttgctggacagatgaagagtgacttgtttctggatgattctaagaggaatgggatgctgggcccgggaggtgctggtccccgaggggcccttgtac

SEQ ID NO: 158072 - DNA, 74 bp, Homo sapiens
ttgctatttttgcacttcagttcacatactatttatgggtatgtcgagagtaccaacgtggcaattgcaaccga

SEQ ID NO: 158073 - DNA, 82 bp, Homo sapiens
ggagaacgtcccgctggatctgacccgagaaagcgtggatacccatcaacgaagttttgatattggaattcagattggctat

SEQ ID NO: 158074 - DNA, 100 bp, Homo sapiens
ctcacctcgccgtgctctctcgcggcggccggcggggcccgcgctgcagccggagacccggagaaaggttccatgccattgcagtgtcaactaggcctca

SEQ ID NO: 158075 - DNA, 115 bp, Homo sapiens
cccaggtctccgtgcagcccaacttccagcaggacaaggagctgctggcactaaggctggccctggaggatgggtgtggccctgggcctggacccccgagggagctcagcttcac

SEQ ID NO: 158076 - DNA, 75 bp, Homo sapiens
gccaaatggagctggaagcagtccagtgggatagagggaggaatcagcagcttggaaattcaagcacgtgatctg

SEQ ID NO: 158077 - DNA, 90 bp, Homo sapiens
ccaggccgtgcctgcccccaaccagcagcccgaggtcttctgcaaccaggatatgtgatggcgtccagtttggagctgggataaggttcc

SEQ ID NO: 158078 - DNA, 89 bp, Homo sapiens
caatgggctggtcacactggacaataccaaccttcaaattcacagtctatatcggcacaggatgaaaacctctcaaaaacaatgtttct

SEQ ID NO: 158079 - DNA, 75 bp, Homo sapiens
cgactccggagacagcccaaatatcctcggaagagcgctcccaggagaaacaatacctgtttgaaaatggtagaa

SEQ ID NO: 158080 - DNA, 103 bp, Homo sapiens
ggcgactttcagaaacaatcacatgaagactaaagcatctgtcagaaaagaattggcagcaatgaaacagattctcgttaagatgcatagtaaacattctgag

SEQ ID NO: 158081 - DNA, 90 bp, Homo sapiens
gtagagacggacctgtttaagaggcagcaggcgatgccctccacaggtatggcagcccagtgtgccatcataatgtttgatgtaacatcg

SEQ ID NO: 158082 - DNA, 82 bp, Homo sapiens
tcgctctaaagacggaaccgccacagcactcaacaaaatgatgcttcaacacccaggccaggtctctgcctcggaagtgagt

SEQ ID NO: 158083 - DNA, 101 bp, Homo sapiens
ccgtgtctacctccctccttggagacacttccgacacgacctctactggccttgcccagcgcctaggtcagtcattggcaccatgaactggaataaaggtg

SEQ ID NO: 158084 - DNA, 88 bp, Homo sapiens
ccccttaaataaaacagctccctgtgttcgcctgctcaacgccactcatcagattggctgccagtttaccaccaccctgtgaatctgc

SEQ ID NO: 158085 - DNA, 88 bp, Homo sapiens
ggatggttcctacctggctgagttcctgctggagaaaggctatgaggttgaaaggattgttgacaaaaggaaaaataaaaaagggaag

SEQ ID NO: 158086 - DNA, 49 bp, Homo sapiens
gaccacaacctcttcagtagaaggtggagccgccaccaaaatgcagatt

SEQ ID NO: 158087 - DNA, 75 bp, Homo sapiens
gtggccctcgatgtgctctgcgtgttgctggctcttcctgctgcccacattcctgcaccccctcatgagggtagt

SEQ ID NO: 158088 - DNA, 83 bp, Homo sapiens
catcacccaccaacaacaccacaataatccacagccaagagaccatgaaccaggcatctcctgctagaaagctggaagagatt

SEQ ID NO: 158089 - DNA, 87 bp, Homo sapiens
catggacagcatcatcttcccaaagcgatctagggcagccctgcagaggtacctgttctactgtaatcgctatatgaaccacatgca

SEQ ID NO: 158090 - DNA, 75 bp, Homo sapiens
cctggtggtggaggaaatggaaaccaaagtcaagcatgtgataaagcagaaggaatggaagcaactggatcctgc

SEQ ID NO: 158091 - DNA, 74 bp, Homo sapiens
ctggttctgccttctggacaatctttccgaggagttctccaaaatgaaggaagaggtacccacggccttggtgg

SEQ ID NO: 158092 - DNA, 75 bp, Homo sapiens
gcaggaccccgggacaccctggaagccaggaaatgctcatgatggagcagtccaagaagtcctccctcatggtgg

SEQ ID NO: 158093 - DNA, 75 bp, Homo sapiens
tcattttactgtcaagacatttcttcggcattctgcaacaggtggagtctttcattttggatcaggatgatttgg

SEQ ID NO: 158094 - DNA, 101 bp, Homo sapiens
tggccatcctggattggcttcatcagaggaggtgcccacctggactggatttaagtcagaagagaaggaagatgtgagtattcattaaacgtctctgcgaa

SEQ ID NO: 158095 - DNA, 75 bp, Homo sapiens
cggaatctgggtgcagttcctgcagtaccccactctacgatcagggacagcatcgtggccgagctggaccgagag

SEQ ID NO: 158096 - DNA, 78 bp, Homo sapiens
ctcccaaagtgcttggattacagctctgcctggaagtcccccaatccctgtgctcctgcccccagatcgtgggcttgg

SEQ ID NO: 158097 - DNA, 74 bp, Homo sapiens
attccatctctcttcctttctcatgttttggctttggggctagggcagctgaaaaagttggatgaagatagttt

SEQ ID NO: 158098 - DNA, 75 bp, Homo sapiens
ggaagtaaaagcgaactacagtggatgggtgcagttcagggtgtatgcaacagcgttattgcaacaggctaacga

SEQ ID NO: 158099 - DNA, 75 bp, Homo sapiens
tgtggctcactggaaggaaacccagcaccaaggatgacattgatcttgatgccttggctgcagaaatagaaggag

SEQ ID NO: 158100 - DNA, 103 bp, Homo sapiens
gaatccttcaaaaacatggtccctcaggctcagcagggagctgctggatgagaaagggcctgaagtcttgcaggactcactggatagatgttattcaactcct

SEQ ID NO: 158101 - DNA, 50 bp, Homo sapiens
taaagtgaggatgataaagggtgaggcttcactgtataaataggagagga

SEQ ID NO: 158102 - DNA, 100 bp, Homo sapiens
ggactaccaaggagaagctatagactacttctactccaccaggaagggttttcttaagaaacgctcacctcaagaagcagaaattcttcgtcagctgtac

SEQ ID NO: 158103 - DNA, 88 bp, Homo sapiens
gtaccaagaggcatactgactccattgacagaaggttttgttttgacatagaagctgctgatcgtgttgtacatcagtacacagaaga

SEQ ID NO: 158104 - DNA, 98 bp, Homo sapiens
gccaagtccagatatatggagctctacacgtatcctcctgcctagcgcaggtttttcgttggaatatacgttgcacatttatggcgattctgagtgtg

SEQ ID NO: 158105 - DNA, 96 bp, Homo sapiens
ccttggatacaactgggaaagccgtctacactctcacctatgctaaaccatttacttctaaagtgaaacaaatgcgattacatagagaagactttg

SEQ ID NO: 158106 - DNA, 100 bp, Homo sapiens
agaagattccataattgaggatgaagatgatgaagccgaggtagaagaagatgaacccacagatttggcaacagcattattgagaaaagcccttacagaa

SEQ ID NO: 158107 - DNA, 129 bp, Homo sapiens
gtccaaaccacaagttctcaaaactctctgaaaaatggctccctccgagttaagtactatactggcaattgctggagaagattttgcaattgttgcttctgatactcgattgagtgaagggttttcaat

SEQ ID NO: 158108 - DNA, 100 bp, Homo sapiens
caaggccggctacggcgaatacagtgaagatgtgcacctgcacacgcccccggcacctggtggagcgatttagccaagaagttcagattacagaagcccg

SEQ ID NO: 158109 - DNA, 82 bp, Homo sapiens
cggggggttcctggagtcttttaagacaatgcagatcttcgtgaagactctgactggtaagaccatcaccctcgaggttgag

SEQ ID NO: 158110 - DNA, 75 bp, Homo sapiens
cccgaggagtgcaggcgcttcaccacagacggaatgggtaccacagaccatgtcatcgtcctggcgtccacgaac

SEQ ID NO: 158111 - DNA, 80 bp, Homo sapiens
ctgacgctgctgctgtgtgcggtgctgctgagcttggcctcggcgtcctcggccgcttacaaacacgcagatggcaagaa

SEQ ID NO: 158112 - DNA, 78 bp, Homo sapiens
cggctcctccaatgtgggcatcaacaggtggcgattcagaatggacagtttagaagaacctcagaaaaaagtctttaa

SEQ ID NO: 158113 - DNA, 98 bp, Homo sapiens
ggaaaccttcaggaatcttctgcccttgatgctccagatcgacccctcggatcgaataacgataaagagaaagttcagaaggactcactgaggcccga

SEQ ID NO: 158114 - DNA, 82 bp, Homo sapiens
cctgggacccaatggcctctggatgaaacgtcaggaatttactacacagaaaaggcaacagatggctccctgcaaagtgagg

SEQ ID NO: 158115 - DNA, 75 bp, Homo sapiens
cagactgtccgcctggagcgttacaaggccttctacattaccgaaatcctctgcggacaaaatgcaacagttaaa

SEQ ID NO: 158116 - DNA, 74 bp, Homo sapiens
ctgccccggcgccgtccgtgcccgcgggacctgacagccgggtcagaggctctgacgcccgctctgcggcttcg

SEQ ID NO: 158117 - DNA, 83 bp, Homo sapiens
aaaatacagccaagatcttggcaaagcttctccctcagtatttagaccagaaaatgatgcatcctgttgccagcagtaatcca

SEQ ID NO: 158118 - DNA, 95 bp, Homo sapiens
ggccgggcacctccgagcgcaaggacagcgcgaggtccgcgcagcccagcgcagccatcttccccgggcgctgcctggacaggcctgcctgcgtg

SEQ ID NO: 158119 - DNA, 107 bp, Homo sapiens
gcgccactcctcccggaggcgacatggggcacccggtgtaccgcggcgagaagccccagctgcactacgcgatagggccagatttgagtgtgtgaatttttgagtga

SEQ ID NO: 158120 - DNA, 100 bp, Homo sapiens
cccccacagccggagcccccgccgctccacagtccctggggccgagcacgagggctgctggccagaacaaacaacattctattaccaagaacacggccaa

SEQ ID NO: 158121 - DNA, 76 bp, Homo sapiens
aaaacagacactgaagactcctggaaaaagtttcacaaggagtaagctggggccacaactttggtgaagaaggata

SEQ ID NO: 158122 - DNA, 82 bp, Homo sapiens
tgggcatcatcgacagtgccttcggccagagcggcaagttcaagatccacatcccagggggatatgagactttctactcgga

SEQ ID NO: 158123 - DNA, 100 bp, Homo sapiens
ctcatctggaattttgccgatttcatgactaaccagtgtgctggagaatctggtaaaagcaccattgtgaagcagatgaggatcctgcatgttaatgggt

SEQ ID NO: 158124 - DNA, 100 bp, Homo sapiens
acttggaccagttcagcctattccttgttcggaagatggagaaccgtgattaccgggatgcacaggagtttgctgctgatgtacggcttatgttctccaa

SEQ ID NO: 158125 - DNA, 100 bp, Homo sapiens
tttactgataagaaaacacatctttacacactaaatcccagcatggtgagtgcctacatgtacccagcaggggccactggggcgcaggcggccccccagg

SEQ ID NO: 158126 - DNA, 75 bp, Homo sapiens
gacacagaagaaaaagtgggactgaagtacactgaagcagctgcagaaccttggcctgaaaatgctacattatat

SEQ ID NO: 158127 - DNA, 50 bp, Homo sapiens
ccgccagcgccccatcctgagccggaggagaacatttgcctgcactgggc

SEQ ID NO: 158128 - DNA, 101 bp, Homo sapiens
gttggtgcacaaaaagacacttatactatgaaagaggcagaatacttctatgaattcctgtccttgcgctccctggataaaggcatcatggcagatccaac

SEQ ID NO: 158129 - DNA, 128 bp, Homo sapiens
gtctagagcaaggaaaagagccctggaatatgaagagacatgcgatggtagatcaacccccagaaatggtggagtcaatgaagaaagtagcagggatggatgtggagctgacagttgaagaaagaaac

SEQ ID NO: 158130 - DNA, 100 bp, Homo sapiens
tcctgaccaatgtcatccttgcagacctcaacctctcaggtcggctcaatgacatgtatggagactacaaatacacatactgggcatgtggcgtcgtcct

SEQ ID NO: 158131 - DNA, 100 bp, Homo sapiens
aacactctacgtgcccaattgtgaccatcgaggcttctaccggaagcggcagggtctgttcctggtttcccagatgcataaaggaagacatatccctccc

SEQ ID NO: 158132 - DNA, 124 bp, Homo sapiens
gctgccactgtggagcagttcgttttgaagtttgggcctcagcagacttgcatatatttgactgcaattagagatgtttatgattacttccgagctgtcctgcagcgtgatgaaagaagtgaac

SEQ ID NO: 158133 - DNA, 116 bp, Homo sapiens
gacccatggtttccagtgcagcgcggagtgggcgatgccagcgtgccaggttggaagaatgtgggttaacgagcacctgctgtaaggatctcgcgtctgttctcacctgcagtaag

SEQ ID NO: 158134 - DNA, 87 bp, Homo sapiens
gcagcagaccttcaagatagacattgaccccgaggagacggactcaaaaactttagcagcaaaggaaaaagaggttaaaaagataac

SEQ ID NO: 158135 - DNA, 100 bp, Homo sapiens
ccacagttacatgtatggagaatggctggtctcctactcccagatgcatccgtgtcagccggaaggtggtggtcgtacgctgtgaaggcatcaacatttc

SEQ ID NO: 158136 - DNA, 83 bp, Homo sapiens
ccagcttatgccagacacacaggacaagtagggaccaaactgtatatgagcccagagcagggtctcactctgtcactcaggct

SEQ ID NO: 158137 - DNA, 50 bp, Homo sapiens
aagcccaacaccttcccccactgtgttcccagtgaagcggcggaaccggc

SEQ ID NO: 158138 - DNA, 75 bp, Homo sapiens
ctctttccccgtcagcatcccagccgtgctcacggtgaaattcgatgctactgtgatgctgcccactgtgtagcc

SEQ ID NO: 158139 - DNA, 82 bp, Homo sapiens
ccctgcccctacatttggagcctggacacgcagtacagcaaggccagaacacaaagcgtgaatccggaagaaaagttcaatc

SEQ ID NO: 158140 - DNA, 82 bp, Homo sapiens
taaacctggacggtatctctctcctcacgcagatggtggagagcggcactgaatgaggtggaaagtgagaaatggtacctgt

SEQ ID NO: 158141 - DNA, 100 bp, Homo sapiens
acggattggttgttttttcctgtatgaagcggttggcaccactgaagtgaccgaatgaggttttcaaccagatgaagaaatgaatgaaatctgcaagact

SEQ ID NO: 158142 - DNA, 100 bp, Homo sapiens
cgaggatttgtcatcagctggggacattactgaggcctgggccgaggccactggtgcatatgttcccgggagggataagccagacctgccaacctggaag

SEQ ID NO: 158143 - DNA, 98 bp, Homo sapiens
tgagcttcattgaactcaacagagccaacatttcatagcaccatgccattcaaactcctccccacgacactctgaagcagcgacggcacagcgggaag

SEQ ID NO: 158144 - DNA, 75 bp, Homo sapiens
cccggcaactcagaaacatcaggtccaagcagcgaggagagcgtgacagccagacccaggccatcctcaccaagc

SEQ ID NO: 158145 - DNA, 75 bp, Homo sapiens
ctttgatagtcgtaccatatgcagaagaatgacatgtcacatagaccagctgaacacttggtatgatatgaaaac

SEQ ID NO: 158146 - DNA, 51 bp, Homo sapiens
aggagattgcctcggattccgacagcagtgccaaatctttggagtgttgat

SEQ ID NO: 158147 - DNA, 95 bp, Homo sapiens
agctaggaattcccttggaagaggtcgggtcacagccagcagctatgtctgacataaatcttgactgggttgacaggcgtcagttgcagcgcttg

SEQ ID NO: 158148 - DNA, 99 bp, Homo sapiens
cagcattatctagtcctttccaccccgaaattcgccccgattaaagactgtgttgcattatcagacaccaacgtgattcggtatatccagctgacggag

SEQ ID NO: 158149 - DNA, 50 bp, Homo sapiens
ttaaggtttcgctggccaaaggttggaatcgaagcctcttaaaatggcag

SEQ ID NO: 158150 - DNA, 90 bp, Homo sapiens
agcctggaacgcaaggaccggagggcgtgggctgggacgcccctaccttggtctttcagggcagcctgcttctgcaaagtggtacgatcg

SEQ ID NO: 158151 - DNA, 100 bp, Homo sapiens
ctaattcagagaatattgctgcaatctctcagtcttcagtgggttcagactaccagaacttctgactcacagtaccactgaagttactcagccaagaacg

SEQ ID NO: 158152 - DNA, 146 bp, Homo sapiens
ggattactcgcccccacctgtggactctgaccgcaaacaaggagagcctactgagcagcctgagtgggcagttgcagtggtgcagaatggctgacctcagtcttgcagatgcattaacagaaccatctccagacattgagggagag

SEQ ID NO: 158153 - DNA, 101 bp, Homo sapiens
gggattttcaggaaatggtgtcacaatttgtgaaggttagcatggcctcattgaaagaactagatcaaagactctttgaaaattacatcgagttgaaagca

SEQ ID NO: 158154 - DNA, 75 bp, Homo sapiens
ccacgccgtggccggagccgtgaattaaagctatagagagtcccaacaaagaagatgatacccagtggctgacct

SEQ ID NO: 158155 - DNA, 75 bp, Homo sapiens
actgctactgcgaagacagctggcaggttcccaacaaggctacgcagaagaacccccttgactgaagcaatggag

SEQ ID NO: 158156 - DNA, 50 bp, Homo sapiens
taccttgtctcagctgctgaagctggggaggaagttgccttgtactgtgc

SEQ ID NO: 158157 - DNA, 50 bp, Homo sapiens
gagccgcgcgcctttgtgcgcgcgccgagtggctgcttcaacccccaact

SEQ ID NO: 158158 - DNA, 100 bp, Homo sapiens
gccttggagaggttactttcaatggagttttcggcgtggactgcaggactgtggaatgccctcctgttcagcagaccgcgtgtcccccggacagctatga

SEQ ID NO: 158159 - DNA, 74 bp, Homo sapiens
ccagttcgcgtcctgctccaaggactgcactgtgaagatgcagaggccaggatgtgggcccagccctgtgccag

SEQ ID NO: 158160 - DNA, 96 bp, Homo sapiens
gtttgatgttgttgaaggagaaaaggtgtacccaggaaggatgtgggaaacactttgcatcacccagcaagctgaaacgacatgccaaggcccacg

SEQ ID NO: 158161 - DNA, 153 bp, Homo sapiens
aaagacaaagcttttgttaattatcttaaatacttgctttactggaaagacccagaatatgccaagtatctaaatgtttctgccacccacttagcagacaaggtagaggaggcagttctggatcgtttgaagcctctcttggtcaaggcccag

SEQ ID NO: 158162 - DNA, 97 bp, Homo sapiens
gaggatcaaaatcttcgaaggaggggatgtttcagcagcccctgagaaggaagaggaggaagctgagggcccgctgagggcgcaggacctgagggag

SEQ ID NO: 158163 - DNA, 100 bp, Homo sapiens
ctccggcctgggaggtgcgtcagatccgagctcgccatccagtttcctctccactagtccccccagttggagatctggtttggacagaggagccaaaggc

SEQ ID NO: 158164 - DNA, 96 bp, Homo sapiens
tcaaggttgtgattgaggacggttgcagatgctgctaaaaacacagaagtctgtgatgaactaatgagcagacataacatctacgtgcaagcaatc

SEQ ID NO: 158165 - DNA, 100 bp, Homo sapiens
gcagttgcaggagcggatggagttgctgcaggcagagggagccacaggagcctcctcaacaagcccaagagtgagatgaccccagaggagctgcagaagc

SEQ ID NO: 158166 - DNA, 82 bp, Homo sapiens
gaagaagccaaaaacattctgggctgaccccgcactacatctacccaccagccatcgtgcagcccagcgtggtgatcccagc

SEQ ID NO: 158167 - DNA, 98 bp, Homo sapiens
cggcgcgtcacgggcctcagctgggattcccgcgcccctcggacggccacgagactcgggcactgaagtggcagcagcatcagggattgcttcctcct

SEQ ID NO: 158168 - DNA, 140 bp, Homo sapiens
gctgataccagagtcttgctccggccgcggccagcggagccctgggctggggcaggagccggaggcaagtgaggcctatctggttggcctttttgaagacaccaacctgtgtgctatccatgccaaacgtgtaacaatta

SEQ ID NO: 158169 - DNA, 75 bp, Homo sapiens
gttaaggattccaagtaactcttatttggattttatggaagaccttgggttatggaacagagaaaagaactcttt

SEQ ID NO: 158170 - DNA, 100 bp, Homo sapiens
catgtactgcaatggtctgatggaggaagatacagtcgtgagatggagaataaagaaactctcaaagggttgcacaagatggatgatcgtccagaggaac

SEQ ID NO: 158171 - DNA, 100 bp, Homo sapiens
gatgccaggaacccctggaagcctagaaatggtgagactgccagctcagcgacatgtcctcacctacatggaggatgcagtgtgccagctgctagaaaac

SEQ ID NO: 158172 - DNA, 98 bp, Homo sapiens
ctaactcaagccattggcacacaggctaaaacactgtcttatgaaccattatcttcagcaactgtttccactgggagccttttaagttatgaaaacac

SEQ ID NO: 158173 - DNA, 78 bp, Homo sapiens
aaagatacgaggctctaggagagaaaaaagcagcaagcctcggcagcagtcaatcctccagaacctatgctggtggaa

SEQ ID NO: 158174 - DNA, 100 bp, Homo sapiens
tttcaagttaaggtccaaaaaaactccagctgtgaaagcaacataaatgctgcctagtgtgagccaggagaccctgaagcatagtgggattggacgagca

SEQ ID NO: 158175 - DNA, 82 bp, Homo sapiens
ccagaccctggagcctcagttggaagcagccgatccagcctgcggagcctgtggggcagggaaacagtgcttcttagtccta

SEQ ID NO: 158176 - DNA, 82 bp, Homo sapiens
gccgctgcccatggagggagtggacatcagccccaaacaggacgaaggcgtgctgaaggtgtcccgacccaggctaagcttg

SEQ ID NO: 158177 - DNA, 83 bp, Homo sapiens
actggatgcagcaaggaaataggatttaaccgctctctgcctcccagcattttgaaagcgaagcagaagccgtagaatcagcg

SEQ ID NO: 158178 - DNA, 50 bp, Homo sapiens
accatggctgtgactctctttccacaggaagccttaaaaatgtcatgctg

SEQ ID NO: 158179 - DNA, 82 bp, Homo sapiens
gcgtcccgctcgctgggagagagcagaaaaatatggctcaggagactaaccagaccccggggcccatgctgtgtagcacagg

SEQ ID NO: 158180 - DNA, 95 bp, Homo sapiens
gactggcagacccgtagctaagacgccaggatttcctggaagcagagaaatggtatgaacgctgccgtccgtgccgtggtgcgcatgggtatcta

SEQ ID NO: 158181 - DNA, 75 bp, Homo sapiens
ggcctcgcgccggctatggccgtgccctggggctgagccctcaggttaacacagaaatctgcctcctgggccatg

SEQ ID NO: 158182 - DNA, 73 bp, Homo sapiens
gaaaaccagttattgaatatcaagaggaggagttgttgaatactgagaatatacttcacacattgactcagca

SEQ ID NO: 158183 - DNA, 75 bp, Homo sapiens
gcacaaatgaagatgtttccagccctgcctcggcggaccaaaggtgagaaagatcagtctaaagaaaaggagaag

SEQ ID NO: 158184 - DNA, 98 bp, Homo sapiens
ttggctggaaaaccccaaaagtgtacataaggactttgcctcccgggccaaactggcagttcaaaaactagtacagaaagttggattttttggaattt

SEQ ID NO: 158185 - DNA, 89 bp, Homo sapiens
ctgcaccatgagcgtcccggccttcatcgacatcagtgaagaagatcaggttaaacccatccagagtaatggctgcggccttacccagg

SEQ ID NO: 158186 - DNA, 127 bp, Homo sapiens
ggaaacacatgaaagacttcctcaaggactacagtatgcacttaatgtccctatgacacacaataatttttggttgaagaagatagaaatcagtgtttcagaagcagaaaaacgaactggaagaaat

SEQ ID NO: 158187 - DNA, 82 bp, Homo sapiens
cgagtcagtgcgttcgcgcgaggttcgagaacttgtcttggacaattgcaaatcaaatgatggaaaaattgagggcttaaca

SEQ ID NO: 158188 - DNA, 71 bp, Homo sapiens
gaaattctggaacacctatatgcaggagcattggtttgaaaaggccctacgagacaagaagggcttcatca

SEQ ID NO: 158189 - DNA, 100 bp, Homo sapiens
cttagccagcccgagcaagtaaagattgttgtatatgaacacagatcaagattagagaaatccttgcaaaaagaaagacttgaacataaaaaagcaaagg

SEQ ID NO: 158190 - DNA, 109 bp, Homo sapiens
aaagatagttgcttattcctctattgctgcaaaaaatgcagaactagaacaggagcttatgcttctcaataggtttggcatggacaagatctatgaaggccaagtggag

SEQ ID NO: 158191 - DNA, 98 bp, Homo sapiens
gaagacattgctgcccgcctcaacatcccagtcagccaggtgaaccccagattttactctgcagaaatcagtctagcattaaattatcttcatgagcg

SEQ ID NO: 158192 - DNA, 96 bp, Homo sapiens
ccattcagattgatttggagactggcaagattactgatttcatcaagttcgacactggaacccttctctgaagcaacagctcttctcctacgccat

SEQ ID NO: 158193 - DNA, 75 bp, Homo sapiens
cccgacgccatgggagtgacttggtgaatggctatgtggtgaaccttttctgggcatttgacacccacaagcaag

SEQ ID NO: 158194 - DNA, 90 bp, Homo sapiens
tgtgttgagagcttctcagactatccacctttgggtgtggccgacgacgatgccctcgctgaggagcgcatgcggagaggccagaacgcc

SEQ ID NO: 158195 - DNA, 100 bp, Homo sapiens
cttggactatgactttcaacgggactattatgataggtataagcagtttagccaaattttgaagaacattggagaaaatgaaggtggtattgataagttt

SEQ ID NO: 158196 - DNA, 100 bp, Homo sapiens
ggacgatgcatcccaagtgtcctccactagcaacgatgttagttcttcagattttgaagaagggccgtcgaggaaaagtgacctaaaacttgacaacgtg

SEQ ID NO: 158197 - DNA, 100 bp, Homo sapiens
agcggagcgcaggacagcgcaggagccccggcgcatcgcggcgcgcacagacccagggcttgagtctgggggagcctggctgcccagaggtggcagatga

SEQ ID NO: 158198 - DNA, 98 bp, Homo sapiens
cgaacatcagggccctccagactcaggcgccccaacaaacacagcttgaaggggaccgaagacagaacctcttggatgatcttgtaactcgagagaga

SEQ ID NO: 158199 - DNA, 83 bp, Homo sapiens
gtgcgggagagccccttgcagaagacgccgtacgaggcattactacagccgccgtttgtgtttatcccgcccgggtgtgtgat

SEQ ID NO: 158200 - DNA, 106 bp, Homo sapiens
cactcattcacttctagacgacaaaatgcaaaaaaggaggccaaagactttttgatattcactgatggactccaaagaatcattaactcctggtagagaagaaaac

SEQ ID NO: 158201 - DNA, 74 bp, Homo sapiens
cagggaagtctataagctttgcaacagaattacagagtatgatcctcttagcaaatatccggctgtgatcaatg

SEQ ID NO: 158202 - DNA, 83 bp, Homo sapiens
caatgatggaaagtggggtgagagactatagcaagcagggcaattcatgatgttaaagccacagatctgggattaggtaaagt

SEQ ID NO: 158203 - DNA, 75 bp, Homo sapiens
aggagcgaggcagctgtactaggactgggaacggacttaattcagtgcacaaatgagatgaatgtgaacatccca

SEQ ID NO: 158204 - DNA, 98 bp, Homo sapiens
gatgacaagaaggagagatctctgctgcctgcattgaggggtgtgatgaatgcagactctgctaccattttggctgtttggatcctcctttgaaaaag

SEQ ID NO: 158205 - DNA, 75 bp, Homo sapiens
atatgctacggaatccaaagaatgcagctggtgtattctcagcaggccttgctccagctgcatttgtgccaaatc

SEQ ID NO: 158206 - DNA, 98 bp, Homo sapiens
accttgatgaggatacaatctaccacctacagccaagtggcagatttgttattggtgggcctcagagctcaaccttcaacaagactacacagaacctg

SEQ ID NO: 158207 - DNA, 75 bp, Homo sapiens
cagatttacaaactggccaagaagggccttactccttcacagatcggagggaattgtcgagaatcttttcaaatg

SEQ ID NO: 158208 - DNA, 104 bp, Homo sapiens
ggatattctggtggggagatgaacccaacctagtgggtgtaatacatcatgaactgcaggggcggcgactggcggcgcgatggacctgaccgggctcctgctgg

SEQ ID NO: 158209 - DNA, 51 bp, Homo sapiens
cccacaccatgtgcatcgagggctcgcaggttcctccgtgtcacaaagcag

SEQ ID NO: 158210 - DNA, 104 bp, Homo sapiens
gagccactcatttatgagagcgaccgtgatggggccattgaagacatcatcacaggggactcgggcaagggtgccgaagatagacaagaggcacacagagacag

SEQ ID NO: 158211 - DNA, 82 bp, Homo sapiens
tcttagcagcgcgcggagaagaacggggagccaggtatcacctcttctgggctcaagatggacaacaagaagcgcctggcct

SEQ ID NO: 158212 - DNA, 90 bp, Homo sapiens
aaatgaccgcaatctctgccagcaccttgggaagagaaagaaaatgccgaaggcactcagacaggtgacctccttcagcacaccccccac

SEQ ID NO: 158213 - DNA, 100 bp, Homo sapiens
atgggatccagctgttagtcgggtaggcataggaaattcgaaatgagtcccatgactatcctcatagagtggccaagtttccagaaaacagaaatcgaaa

SEQ ID NO: 158214 - DNA, 98 bp, Homo sapiens
gccgaccttgagctccaggagttcgtctcttacgtctgcggaagtgcagctgcctcagttcttagcgcagtatttgattttcatcaagcagctgatgg

SEQ ID NO: 158215 - DNA, 80 bp, Homo sapiens
ctaccgcaactgaaagtcacgattaggactgacaataaggttgtacatcctggagacctgaagaattctgttgaagtcgc

SEQ ID NO: 158216 - DNA, 75 bp, Homo sapiens
tgagcaggcagctcggcacccatggcatttataagacgctgtttggcatatcgaaaagaagatcgatttgatgtg

SEQ ID NO: 158217 - DNA, 75 bp, Homo sapiens
ggctctgccatcagcaggaagcttggagacatgagaaacttgaagggtcaaagtgcaaagggcagcttttgattt

SEQ ID NO: 158218 - DNA, 73 bp, Homo sapiens
aactcctaggagggcttgctgtgcggagggagagcttatggatggagaccaaacatccagatctggagtgccg

SEQ ID NO: 158219 - DNA, 118 bp, Homo sapiens
ctcaagtgtccagaatttccaattacagacgacaaagtagcactggtacaccaggggttggaaaaaccacactaggcaaagaacttgcgtcaaaatcaggactgaaatacattaatgt

SEQ ID NO: 158220 - DNA, 73 bp, Homo sapiens
tatatcctccaggaatactggccaggtgtgggcccatcgctggatggatctgtcagaacacggctttgggctg

SEQ ID NO: 158221 - DNA, 100 bp, Homo sapiens
gagaaagcaaactgggaagctcaacaacgtattttagaacaacagaactcttcaagtacgagctcaactggaggcagtcctgtgcggaaatctgaagaaa

SEQ ID NO: 158222 - DNA, 82 bp, Homo sapiens
cacctcggggacattattgcgcgtggaacggctgcttttggaagtgagtgacctgcaggaagaaggcaagaatgccatcaac

SEQ ID NO: 158223 - DNA, 80 bp, Homo sapiens
caaacttgctggtcactgggaggttgttgatcattatgaaaatcctagaaacgtggggtcccttgacaagacatctaaaa

SEQ ID NO: 158224 - DNA, 100 bp, Homo sapiens
cagctggaggcggcggagcggaaggtacattttgaccaatttaaagaagcattaatactcatcttgtccagaactctgtcaaatgaagaacactttcaag

SEQ ID NO: 158225 - DNA, 90 bp, Homo sapiens
ggaggtggaagtggaggtgggcggcgagcctccagggtcgtatagacctccccctcctatgggcaaaccaccaggttcaattgtaagacc

SEQ ID NO: 158226 - DNA, 75 bp, Homo sapiens
aacaggacctgcctaattaccttcaaacctgaggttgacggatatattcagacgttacgacacggatcaggacgg

SEQ ID NO: 158227 - DNA, 98 bp, Homo sapiens
cacttggtgaatggagatgcagctcagcagatatctcccggggccaattcagcatctctacctggccatcctaacaaggtgatttgtgaaagggtgag

SEQ ID NO: 158228 - DNA, 100 bp, Homo sapiens
gaggtccaaaggcttctaagcatgcgggagaagaaggctgctgagcttcgtgcttatctgaaatctaaaggagctgagatttcagaagagaactcggaag

SEQ ID NO: 158229 - DNA, 100 bp, Homo sapiens
tccacccaggagctggaggaagcagggacggagctgtgcagcaggctctccccggaggctcagccccctctgctccccatgggcaactgccaggcagggc

SEQ ID NO: 158230 - DNA, 100 bp, Homo sapiens
cggaccattaatggacaaaaacatgagtcaatatgtattgtggcattcaaatcctagcactctgggagaggggcataaggaaatggtggcaggcacttcc

SEQ ID NO: 158231 - DNA, 80 bp, Homo sapiens
gcggcaggacgggaaccacgcgagctgcagccagaattcaattcgtcataatctgtccctacacagcaagttcattcgtg

SEQ ID NO: 158232 - DNA, 96 bp, Homo sapiens
cacggcatcccagcctcagggctgcccggacggtgttggttgggctccagctcaaggtccctgctgaaggtcggagagcttggcatggccccgttt

SEQ ID NO: 158233 - DNA, 50 bp, Homo sapiens
taaacatgcaatgaacccaaaagggacggcccacctccatggagacggcc

SEQ ID NO: 158234 - DNA, 74 bp, Homo sapiens
agaaggaggaggagcagcaggcctccgggcccggcgccgccgcccgcaggttatctaccttgcctgctcctatg

SEQ ID NO: 158235 - DNA, 95 bp, Homo sapiens
gagtaaagtcagcatgagcaaaaactccaaactcctctccaccagcgccaagagaatcttgccctgtcgctcaagctggggtgcagcggtgtgat

SEQ ID NO: 158236 - DNA, 100 bp, Homo sapiens
gccccgcggcctacagcagctcctcgtgcctggcggcgtgggcccgggcgagcagccctgcctccggacgagtggtgaaaccagaacaatatctcacttt

SEQ ID NO: 158237 - DNA, 100 bp, Homo sapiens
tctcaaatataggcattctgatgggaacttgtgtgttaaagtaacagatgatttagttgatcagaaatgtcaatatgactcaaaatatcgtgctgccaca

SEQ ID NO: 158238 - DNA, 110 bp, Homo sapiens
tgaccggcgggcccggagcagccgccgccgcagcgcgaacatggacgccgtcaacgccttcaaccaggagaaatgcactcggtgatggaaagagagccactattctgaag

SEQ ID NO: 158239 - DNA, 50 bp, Homo sapiens
ctcggctcactgcaagctccgcctcccagagacagggtttcaccatgttg

SEQ ID NO: 158240 - DNA, 99 bp, Homo sapiens
acaggatgctgtagtagcaaatcagaacattgatgatggcacctcagatcgcccctacagccatgctctggtggctggaattgaccgctacccccgcaa

SEQ ID NO: 158241 - DNA, 100 bp, Homo sapiens
ggattttgaggacacttgtggagagctcgaattccagaatgatgaaattgtgaaaacagttcctcctgaggatttcagagaagagctggacttcctggct

SEQ ID NO: 158242 - DNA, 75 bp, Homo sapiens
ggcactgtattctttacctgcttcccaatcccactgatgaggatcagcccatggggttgatatagaagcagctcg

SEQ ID NO: 158243 - DNA, 90 bp, Homo sapiens
ccaactttgcgacggaaatgtgtcatcgaaagccaggtttgggagcagcagcaacaccacatccttcggcacgctcgcgagtcagaatgc

SEQ ID NO: 158244 - DNA, 94 bp, Homo sapiens
caaagacagactaagtgacagtactacaggggaagatggtgaaaggaatgggaggtgctatggatttagtgtccagtgcgaaaaccaaagtggt

SEQ ID NO: 158245 - DNA, 90 bp, Homo sapiens
gactcttggtgagcgaggagctctccgagaagcaatgagtcctggtacctgggataaaagttgcagcgtcccaccatccaccagacagac

SEQ ID NO: 158246 - DNA, 75 bp, Homo sapiens
cagatctccagatggaagcggggcatggccaggccagcacatggattaattgatgtatgttgagtttatggagct

SEQ ID NO: 158247 - DNA, 96 bp, Homo sapiens
ttcacctcctgcctcaccacccccatcaagatcgccctgcgctgtacgacgatctaccccattacgggggcatggatggagtaggcatcccctcca

SEQ ID NO: 158248 - DNA, 100 bp, Homo sapiens
ctccgttaccctgtgatctgcaagtcctgggagacgcacagctaagatgcccggacatcctggaagctgggaaatgggcccagacagaagagaagagtca

SEQ ID NO: 158249 - DNA, 101 bp, Homo sapiens
ccgccaaccgcaaccattgacgccatgtcgggttattcgagtgaccgagaccgcggccgggaccgaggcctcctctattggcccaggaagcccacccagcc

SEQ ID NO: 158250 - DNA, 76 bp, Homo sapiens
ggagctccgccgccccgaaactttcaccgcgagcggggatactgaggcccctgagcactcggcatggggtggaaga

SEQ ID NO: 158251 - DNA, 80 bp, Homo sapiens
gagcagtccctctgacacatccaacttcgacgtggatgacgacgtgctgagaaacacgagaatagtgacagtggtacagg

SEQ ID NO: 158252 - DNA, 98 bp, Homo sapiens
ctccacattgagagcaaaatctacaagatgatgcagggaggagatcctgaggaggatgaaggggctggccctggaggccgagagtgagctggagagac

SEQ ID NO: 158253 - DNA, 100 bp, Homo sapiens
atttctgctcatagagtggtgctggccgcctgtagtccttattttcatgccatgtttacagaacattctagtatgccagtagaaaaaaatatcactttag

SEQ ID NO: 158254 - DNA, 100 bp, Homo sapiens
cagcatgggcctggataagaacacagtgcacgaccaagatgacaaccatgagtggaaaaaactaattatggttcagcactggcctgagacagtatgcgag

SEQ ID NO: 158255 - DNA, 100 bp, Homo sapiens
cgagctccagccgaaggagaagggggggcggcgactggcggcgcgatggacctgaccgggctcctgctggacgaagaaggcaccttctccctcgccggct

SEQ ID NO: 158256 - DNA, 83 bp, Homo sapiens
cctcgaactaaacaaattcatcccagaaatctaagagatttggcagctgatcggaagctctttcgtcttgtctccaatgactc

SEQ ID NO: 158257 - DNA, 100 bp, Homo sapiens
ggacaattcttctctcgggctgcccaagcgacagctgtcagaggggcaggagcttctgggagccaccgtctgaaggattttttatcaagcagaaatgcat

SEQ ID NO: 158258 - DNA, 83 bp, Homo sapiens
caagtatgggtctccgtacaccaaaaactcaggcttcgccacctgcgtgcaaagtgaagccaaaaaccttccctcttacccgg

SEQ ID NO: 158259 - DNA, 89 bp, Homo sapiens
gccagcgcccggagcaagcggagctcccccaagagccggaaagactgctttctgattccaaacagttcaacattttaagaaaagcaaga

SEQ ID NO: 158260 - DNA, 100 bp, Homo sapiens
gaagaaatgaggacatatcagtatcggagaacaaggggtctgtggaaatcatgagaaaggacttgaatgacgcccgggacctgcatggccaggcagagtc

SEQ ID NO: 158261 - DNA, 100 bp, Homo sapiens
cccagtgacactatcgagaacgtcaaagcaaagatccaagacaaggaaggcattcctcctgaccagcagaggaggatgaaattttgaacagatcaccaag

SEQ ID NO: 158262 - DNA, 101 bp, Homo sapiens
ctactatgcatgtaaacaaatgaagcagcgctttgaaaggtagcagggcgccaagcagtgacttctgaccaacagagtgtggggagaagggatgtgtatta

SEQ ID NO: 158263 - DNA, 75 bp, Homo sapiens
ctggagtgaggtggccggttcttggtgggatctgagcaggctccacaagttcttccctgtgtgaacactgggtga

SEQ ID NO: 158264 - DNA, 75 bp, Homo sapiens
cggcgcgcgagctggagcactcgcacaatgcagatcttcgtgaagactctgactggtaagaccatcaccctcgag

SEQ ID NO: 158265 - DNA, 90 bp, Homo sapiens
ctcagcacacagaggatgatgctgactttgatgaagctacatatgctcagcaagtgccgcgtgcctcccatccttggtcggtggtaaatg

SEQ ID NO: 158266 - DNA, 75 bp, Homo sapiens
cccaggtccaccacctgctccatttgcaagtattttgaccaacgtgatttagctgatgagccatcttgatgtagc

SEQ ID NO: 158267 - DNA, 95 bp, Homo sapiens
tggtggacagaaagtcagcctcttgtgctgatgttctaatcatgtcagataaagatgatattgagactccactgctaactgaagcagcccccatc

SEQ ID NO: 158268 - DNA, 101 bp, Homo sapiens
catcgatatgttggaaaagagccgagtggactaagattcaacaaactatttttgaatgaagatggatttggtgctatggagaaatttttggtagaatataa

SEQ ID NO: 158269 - DNA, 75 bp, Homo sapiens
ctcggcctcggagcaacgagcgcagcgccggtggacgcggatctgtcaacatgggtaaaggagaccccaacaagc

SEQ ID NO: 158270 - DNA, 101 bp, Homo sapiens
cggccgcggcctggtaacattctgctgcagctgcggcagggccagctgaccggccggggcctggtccgggcggtgcagaactttccatgactggatcacag

SEQ ID NO: 158271 - DNA, 100 bp, Homo sapiens
gccctggtgaaccctgtctatgactgcctcttccggctggcccagccagacagtttgagcaaggaggaggagtacctgggggacagggtgtctgagaaag

SEQ ID NO: 158272 - DNA, 89 bp, Homo sapiens
gaaacttcagaatgctgtttatagtgaactgagtgtacatggaaggtctttaatgtaactttaaatggttcaccaaaggatgctctaat

SEQ ID NO: 158273 - DNA, 100 bp, Homo sapiens
ggtaagagcccagtgctggtccgcattcttctcagagaactggagaagagttgatctctctaatgtattagatcttcatgcctttgatagtctctctgga

SEQ ID NO: 158274 - DNA, 86 bp, Homo sapiens
ggagcgagttccccgaaattgacggacaagtcttcgactacgtgaccgattcctgacattcagacaactgacttgtaactgactta

SEQ ID NO: 158275 - DNA, 100 bp, Homo sapiens
ccctgcatgtggacatcacccactggaatgacagcgtcaagcaggaagtgcagaacctcatcaaggacaaagtttgctgtagggtaccagcgattgaaag

SEQ ID NO: 158276 - DNA, 89 bp, Homo sapiens
cttctctggactccttagatgactctgtggtgggtccctcagcccttctgagctctgtgctgaacaagttgccctcaaattggctgtag

SEQ ID NO: 158277 - DNA, 75 bp, Homo sapiens
gtgcttttatattcatctcaaaaacaaaattctgaactcaggacttggcaatagagacgggggtttcaccgtgtt

SEQ ID NO: 158278 - DNA, 100 bp, Homo sapiens
ctttccttcgctgcgctaaggaatgaaacccttccagctcgatctgctcttcgtctgcttcttcctcttcagtcaagaagaggactgtcagaaggacgta

SEQ ID NO: 158279 - DNA, 96 bp, Homo sapiens
catccttggatttattgctgctgacaataaagcagctaccaagggggtgccagctggaaacagtgacacagaggggggccagcctggtcggaaacg

SEQ ID NO: 158280 - DNA, 75 bp, Homo sapiens
gaaagatgttttgcctactgttgatccggtcgttccaggggtagaggaggcatgaaggatgaccgtcgggacaga

SEQ ID NO: 158281 - DNA, 83 bp, Homo sapiens
tactgctgaggagatcaagcaggggcaggcaacaggtgtggatgaggtcaccattgtcaacattttgaccaaccgcagcaatg

SEQ ID NO: 158282 - DNA, 98 bp, Homo sapiens
acctcatccaccgcagcaagatggcccggtgcagaggacggtttgtctgcccagtaatcctgttcaagggcaagactgccactctccgcccctacctg

SEQ ID NO: 158283 - DNA, 75 bp, Homo sapiens
actcagtttccctctttgtcccatgcagaggtgcagagattcattattgatcttcagcctgttaaacaagaaaac

SEQ ID NO: 158284 - DNA, 75 bp, Homo sapiens
catcccctggatgggggaccacaagatcctcatcgacagaacccagtgacttgattgtaaaaatttacagagcgg

SEQ ID NO: 158285 - DNA, 127 bp, Homo sapiens
ctctacgtgtgcttcttgggcgtcgttgtcaccatcgtctccgccttccagttcggagagtgatacgggaacaacacctccagagagtggtatttttggatttatgataaacttctctgcatttctt

SEQ ID NO: 158286 - DNA, 95 bp, Homo sapiens
ccctatggggcatacctatggctttattgacctcgactcccatgcggcaacaaacaggcatttcccacaaactgttacaggggcatatttgagtg

SEQ ID NO: 158287 - DNA, 75 bp, Homo sapiens
ccgggagttacaccgccaccgccagcctgtgcagtgcgggggctgctggcaggcagagtgccgccccaggggccc

SEQ ID NO: 158288 - DNA, 74 bp, Homo sapiens
tgagctttggctttggaatgtacaacagcagtgttgtactgctacttctataaacggacagccgtaagactagg

SEQ ID NO: 158289 - DNA, 88 bp, Homo sapiens
agtgccggaaccgacgccgggagctgacagagaagctgcaggcggtcacaagctacctaactaagaagtttgctgaactacgcagccc

SEQ ID NO: 158290 - DNA, 100 bp, Homo sapiens
caccctgctgaagcttgaacagaacacgtgttcagtcatcacaaccctcaaaggacatgaagtgctcgccagaaacccagagctaattatttagaagacc

SEQ ID NO: 158291 - DNA, 75 bp, Homo sapiens
acctgttttatacttgcttttgcttcagcgttctgtggttgtcaacagaaataagcgggttttgaaaacaaaaaa

SEQ ID NO: 158292 - DNA, 50 bp, Homo sapiens
tcagcctctgcctctaattcctccagccctgggcgctgcctatggcacag

SEQ ID NO: 158293 - DNA, 98 bp, Homo sapiens
gaatatttatggaagacactgcctgggagaaaactggttgtcctggatgtttgaaaagttggtcgttgtcatggtgtgttacttcatcctatctatca

SEQ ID NO: 158294 - DNA, 109 bp, Homo sapiens
ctgtaattcttgctgtagaaagcttaaacttccagatgtccctggtagatttgggaaagaagcttttagaagcggcacgagcaggtcaagatgatgaagttcgtatttt

SEQ ID NO: 158295 - DNA, 100 bp, Homo sapiens
cgcgggcagcgaaccgggggagcgaggcacgggcgaacgctgttggagaagctgttcagccagcaggagaacgggcctccagaagaagcagagaagtttt

SEQ ID NO: 158296 - DNA, 75 bp, Homo sapiens
ggagcacttcctggacccaggaagggagagtcttcttccaagcagtcccaggaacaaatctgaaaatccaatggt

SEQ ID NO: 158297 - DNA, 90 bp, Homo sapiens
caaaaactagagagagagagaatggaacgcgaacgcttggaaagggaacgcattcgtattgaacagcaactattctgtcaaccctggcca

SEQ ID NO: 158298 - DNA, 100 bp, Homo sapiens
tgacctaagctatcagaatataggaacaggatctggacttggcacatttcttttaaaggtgcttgaagacgaattcccagaagtatacagatttgtgact

SEQ ID NO: 158299 - DNA, 100 bp, Homo sapiens
cgtacgccttcacgtcctcctccatgctgaggcgcaatacaccgcttctgggtcaggtgaccaagaatatggcccaggtgaccaaagccctggacaaggc

SEQ ID NO: 158300 - DNA, 74 bp, Homo sapiens
aaggaagtgactcaaactgtgagaacttcaggaggaattttgttgtcagagaataaaaggaggttgtccataat

SEQ ID NO: 158301 - DNA, 75 bp, Homo sapiens
tggagaactgccccaaggatttgcaagaaccttctgaggaaaggaggccatacagaaattgaacctcagcacttc

SEQ ID NO: 158302 - DNA, 82 bp, Homo sapiens
ggcggcagcagccgctctgagggcgcctgctcaggatggcccaatggaatcagctacagcagcttgacacacggtacctgga

SEQ ID NO: 158303 - DNA, 110 bp, Homo sapiens
acacggccgacatgttcacgcacgggatccagagcgccgcgcacttcgtcatgttcttcgcgccctgcccgacggccatggaggctgaagagacgatggaatgccttcag

SEQ ID NO: 158304 - DNA, 100 bp, Homo sapiens
agggaaggcgcgagtgaggaaaggaggtactgtagatcctgagagtcagaccttgaaagaacacttaattgatgaattggactatgtattggtccctacc

SEQ ID NO: 158305 - DNA, 74 bp, Homo sapiens
atctgtgataaagttggtcagtctcgcactggcttagaccatgctcagcctccaagcagccttgtcatcgacaa

SEQ ID NO: 158306 - DNA, 90 bp, Homo sapiens
gcaaatggtggaatttttaataaagaaaaaagcaaatgtaaatgcagtagataagttggaaagtatgtgccaagtgctctctgctgcccc

SEQ ID NO: 158307 - DNA, 75 bp, Homo sapiens
cccctcggacggccacgagactcggaagtgacacagccctagaggaggcagtagcagaggtgctagaccatcgac

SEQ ID NO: 158308 - DNA, 74 bp, Homo sapiens
cgtgaccgagagcgtgaccgagagcgcgaatatcgtcatcgttagaaggattacctgagctggaattggaagca

SEQ ID NO: 158309 - DNA, 76 bp, Homo sapiens
atgccagctcttctcagaaagaaaaggtgaaaggtgtagcagtcactcggcctacacccacagcatcgaccttgtg

SEQ ID NO: 158310 - DNA, 97 bp, Homo sapiens
acattctggcttttcttgttcctttcgtagcctgcattttccagctatccccttttccagggcacagtgaggccagcagatattgagtaaaccggag

SEQ ID NO: 158311 - DNA, 100 bp, Homo sapiens
atctttgtggctgtgcttgccaggcctggctccaggtccaaattccaagcctgtagtgtccttcattgctggtttaactgctcctcctgggagaagaatg

SEQ ID NO: 158312 - DNA, 100 bp, Homo sapiens
aagccggacaccatgatcctaacaccgttacagtgtttctgccacctctgtacaaaagacaattttacttgtgtgacagatgggctctgctttgtctctg

SEQ ID NO: 158313 - DNA, 109 bp, Homo sapiens
ccacagggcctcctgccagccccagcccctggagaggatgcaggtttcccaacctctttcccccactgaagccggagacggtggcccggaggacagtggaagctgtgca

SEQ ID NO: 158314 - DNA, 100 bp, Homo sapiens
ccggaagaaagaggagcggcagagcctgctggggagcatgattgagcggatattagtgtcgtgcaacaaccagcaggatctgcaggaatgggtggagcac

SEQ ID NO: 158315 - DNA, 74 bp, Homo sapiens
gcctgcggcgtgtggctggacgcggcggcgctgaagaggcggaaagtgcaggctatgtcttgcccagccacgtg

SEQ ID NO: 158316 - DNA, 75 bp, Homo sapiens
atagacatttacgcggatgtcggcgaagagttcaaccagtgcctccggagccagcgtggtggccatagacaacaa

SEQ ID NO: 158317 - DNA, 75 bp, Homo sapiens
atattgaaatggacagtggagatgaagcctaagaatatgatcagactgaaaatattcctgtggttagaagacctg

SEQ ID NO: 158318 - DNA, 75 bp, Homo sapiens
gtttaccatcttcagaaatgtggacatgctgagtgaattagtccaggtcacccaattgacaggtttctcagatcc

SEQ ID NO: 158319 - DNA, 89 bp, Homo sapiens
cgtgtgcatctgttggaagaatgctggaacgagttataggaagatgtagtccaacccacatcagcagagttgaaactgtgggacagcca

SEQ ID NO: 158320 - DNA, 51 bp, Homo sapiens
ggacacttctctgtcgtcacagttagtactatactggcaattgctggagaa

SEQ ID NO: 158321 - DNA, 75 bp, Homo sapiens
gactgaccacatccctgctcatctcacctatgggaagctgctagctctaacagcaacagttgcagcttttgcagc

SEQ ID NO: 158322 - DNA, 87 bp, Homo sapiens
aacctccagatccatcacgtggggcaggatggtcagttcatagccctgatgaagcaagttactctgctctcctaataaatgcaagaa

SEQ ID NO: 158323 - DNA, 100 bp, Homo sapiens
gaaataagcatcctcacagcacagtacacgaccagactgtcttctgaagattgatgtctatttccttgagctctttaattttgttgccaatttggataaa

SEQ ID NO: 158324 - DNA, 75 bp, Homo sapiens
catgacggtcggctccttcgtgtgtacctcctgctccggcagcctggaaacagtgcttcttagtcctacgtcagc

SEQ ID NO: 158325 - DNA, 75 bp, Homo sapiens
gggacattattgcgcgtggaacggctgcttttggaagggcttgtcaatgaggcagatcagattcaggttcgacgg

SEQ ID NO: 158326 - DNA, 74 bp, Homo sapiens
cctccctcaccttggacacctcgcttggactacgtctactttgagaactcctccagcaacccatacctgatccg

SEQ ID NO: 158327 - DNA, 100 bp, Homo sapiens
acaaagggaggagctggactccatcctcttcctttttgaaatatctcttgtaaatgtgtaaacacggatttgccaccaaaggggaagaacaatatgggag

SEQ ID NO: 158328 - DNA, 82 bp, Homo sapiens
atccagtcggttcgtggagaggagagaaatggtggagtcaatgaagaaagtagcagggatggatgtggagctgacagttgaa

SEQ ID NO: 158329 - DNA, 80 bp, Homo sapiens
tgttaataaaactgatagtgccgtcagacttgtccacatccccacaggaagtaccaccaagaacagggaaggacaagcca

SEQ ID NO: 158330 - DNA, 100 bp, Homo sapiens
gaggtcagccccaaactaccggtaatatagctgctgctggaagtgacgagaagtgcaagctggcgatgcagaggggtgcgcagtccagcgtgaactacag

SEQ ID NO: 158331 - DNA, 85 bp, Homo sapiens
cgagctgagtggttgtgtggtcgcgtctcggaaaccggtagcgcttgcagcatgccgtactctgacagctgtgcacgatgccatc

SEQ ID NO: 158332 - DNA, 82 bp, Homo sapiens
acacgttatctgagttctggatggaggtaaaggaatatcacggtactccaaagattcaggtttactcacgtcatccagcaga

SEQ ID NO: 158333 - DNA, 83 bp, Homo sapiens
gttgaaaggtgcgccctgctgtgacagacaatgcagatcttcgtgaagactctgactggtaagaccatcaccctcgaggttga

SEQ ID NO: 158334 - DNA, 75 bp, Homo sapiens
tagaacgtgaggctcggatatgtcgacttctgaaacatccaaacatcggtgctggagaatctggtaaaagcacca

SEQ ID NO: 158335 - DNA, 82 bp, Homo sapiens
cctgggcagctcttcggccgcatccccatgcgcttctcggtgctgcaaattgtggctactaatttgccccctgaagatcaag

SEQ ID NO: 158336 - DNA, 100 bp, Homo sapiens
tagcttgtgctgctgctgctgctgctgctgcatgtctaccaggagaggagggaactgcggagcggatgcaatcttcttaccgcgaagaagccaggggaat

SEQ ID NO: 158337 - DNA, 90 bp, Homo sapiens
ggagcctcgtgctctgggacgcgtgccgcgcactggcacggcaggggcgcgagccaggctgcacgagaccatttgtttgtgactatgaag

SEQ ID NO: 158338 - DNA, 98 bp, Homo sapiens
gtctgtgcagtggcacctgcgcgaagctggccaaagcctgcccagacggctcacctgtgcgggatggaacaaaagtctcagaccagtatccttcaggg

SEQ ID NO: 158339 - DNA, 108 bp, Homo sapiens
ccgcgcgcagggcctgcagcgggagctggacggcgagcgcgagcggcgcgagaaagtggaaatgagttctcaacagtttcctcggttaggagccccttctaccgggct

SEQ ID NO: 158340 - DNA, 99 bp, Homo sapiens
caggagcatcgctaggtgttgccgccaccgggaagcggggctgcagagtgatttcttctgacttgagcctgcagtgtgctgtgagagatctaccactag

SEQ ID NO: 158341 - DNA, 96 bp, Homo sapiens
ctgtagataaaaacattttcagagactgtaacaagatcgcattttacagatgagcccattattgaagagccaagccgcctccaggagtcagtgatg

SEQ ID NO: 158342 - DNA, 96 bp, Homo sapiens
gccaggagccccacggagcgctgcggagcgaacctcacctttccagggcgcaaggtgacttaagagattaaaattaatttggttgctgttggttct

SEQ ID NO: 158343 - DNA, 112 bp, Homo sapiens
cttgcctcaggccagtcgcctccaggccaagagggatccttcacccgtgtctggagcatcagatccatgctgctgctgactcggagccccacagcttggcacaggctctctc

SEQ ID NO: 158344 - DNA, 100 bp, Homo sapiens
ttttattacaagactacggagcataggaggaaaattcatcatctggttaatgatgaaatggcaggtaattcacacttttggacagagcgcaccgcccccg

SEQ ID NO: 158345 - DNA, 100 bp, Homo sapiens
aattttagcacccagtatgttttagatggcagtggccacatactttctcagaaaccttcacatcttggtcaaggtggaataacactcccatggatgaagc

SEQ ID NO: 158346 - DNA, 88 bp, Homo sapiens
ttcggaaccaccggcctcggacggcccagcgggctgctgctcaggttcctgatgttattagcagcataaggcaattatctaaagcggc

SEQ ID NO: 158347 - DNA, 108 bp, Homo sapiens
cgccaccgcaggtcgaggacggtcggactcccgcggcgggaggagcctgttcccctgagactgtgccctgtccacggtgcctcctgcatgtcctgctgccctgagctg

SEQ ID NO: 158348 - DNA, 82 bp, Homo sapiens
cttgataaaaagagatgtggggggattctcgacctgctaacagaactggaccttttcggtctcttgcagctgaatggggtaa

SEQ ID NO: 158349 - DNA, 100 bp, Homo sapiens
cgcccgcccgggccggtcgcggaggccgcgccgggccctgtcgcgaacctccggcgcgctgccccgccggaccgtgaatcctcactatggatgggctcat

SEQ ID NO: 158350 - DNA, 100 bp, Homo sapiens
cctagcaccccgagaaccgtcagtttgagccagatgattttaggtgatgggcaagtcagaaagtcagatggatataactgatatcaacactccaaagcca

SEQ ID NO: 158351 - DNA, 100 bp, Homo sapiens
ctgggcacagcatgagatccaaaggcagggcaaggaaactggccacaactggagaatgctggaggagaccttaaggatggccaccaccactatgaaggag

SEQ ID NO: 158352 - DNA, 98 bp, Homo sapiens
gaagtgccaggaccttcgtgccctcctcaagcgaaaacaccgctttatcctgctgcgatccccagggaacaaggaccagctgcaggcccaggacttta

SEQ ID NO: 158353 - DNA, 98 bp, Homo sapiens
tgggcacccggcaagcagaacctgagctcgacctccgctcaattaaggaagtcgatgagttgagtcagcagatactggagttatttgaaacatgtcag

SEQ ID NO: 158354 - DNA, 100 bp, Homo sapiens
gacatgacatcattgcatgggttaatgacatagtatctttaaactacacaaaagtggaacagctttgttcaggaagctgccacttttgctagagagcaag

SEQ ID NO: 158355 - DNA, 83 bp, Homo sapiens
gtgtggtcgcgtctcggaaaccggtagcgcttgcagcatggttgcaccccagcgctcccacctagatgggtctgatcctccag

SEQ ID NO: 158356 - DNA, 83 bp, Homo sapiens
ccggcgggaggaacgctcactgtcagcgcctggaaacttgctcactccctgaagaggaaggagaaggaatatgagcatgaaat

SEQ ID NO: 158357 - DNA, 75 bp, Homo sapiens
ctgagaacaacttaaacggcgattttagtgaagttgacgctcaagagcaggttgtacgtggacactataaaggtc

SEQ ID NO: 158358 - DNA, 96 bp, Homo sapiens
cttaccgagagtttgaaagtgcgattgtggaagctgctcgggacttggcagatgaacttgctcttgttgatgtcatcgaagacaaattgaagggag

SEQ ID NO: 158359 - DNA, 100 bp, Homo sapiens
gaaaaatcatctgatacattaacaaggttgacagaagtcccactggctcaggagtgacagcccgaattgccttacagtatcacaaagggcttctggaact

SEQ ID NO: 158360 - DNA, 100 bp, Homo sapiens
gcgggatctctgaagtcctcccaactaggcagagaaatcggtactccaaagattcaggtttactcacgtcatccagcagagaatggaaagtcaaatttcc

SEQ ID NO: 158361 - DNA, 82 bp, Homo sapiens
gtttgctgccatgctcctggcgtggacacacaagcaccccaataacctcaagacgcatcttctctccagactgccgatccca

SEQ ID NO: 158362 - DNA, 82 bp, Homo sapiens
aaccccttcctggtcggattacactcctgcttccagacgacaagtcggtttggtgcacctcgatttggaggaagtagggcag

SEQ ID NO: 158363 - DNA, 90 bp, Homo sapiens
gcgtgaggtgtgggtgttcgtttctcagaaaaagcttgtggtgaaggggggcaaaaaaaagaagcaagttctgaagttcactcttgattg

SEQ ID NO: 158364 - DNA, 50 bp, Homo sapiens
gcctcctaagtagctgggattacagtgacccctcccagagtgaccctgag

SEQ ID NO: 158365 - DNA, 148 bp, Homo sapiens
gtgtccgccgagatgtccggctgcagcagcaagtcccatcggaggacctccctgccctgtataccgagggaacaggtttctgctttgggacaaccatacatctaattccttaaagtagttttatatgtaaaacttgcaaagaatcaga

SEQ ID NO: 158366 - DNA, 83 bp, Homo sapiens
acccactgaagacgtctgcgtgagaatagagaccaccgagcggagctggagtttgttcagatcatcatcatcgtggtggtgat

SEQ ID NO: 158367 - DNA, 100 bp, Homo sapiens
gccgtatctcctcagaggatcaggcgtgtgtccagttctggtgtcactctgcaaacctgaatggtgtatactacagcggcccctacacggctaaaacaga

SEQ ID NO: 158368 - DNA, 82 bp, Homo sapiens
aatcggtctctggacgctgcgcggcgctcctaggagcaggcgttcccgactccggcaagaggacaatgcagatcttcgtgaa

SEQ ID NO: 158369 - DNA, 90 bp, Homo sapiens
cgctggacgtgctcctctccatggggttccccagagcccgcgcgtgtgccacggaccacaatgtggacaacaccacagagatgctgcagg

SEQ ID NO: 158370 - DNA, 96 bp, Homo sapiens
cctgtcccagtgggtacaatgtagaggaaaatggccgagactgtcaaagactatctgctgccaaactcttgactgaatatggcgttagtgttttgg

SEQ ID NO: 158371 - DNA, 82 bp, Homo sapiens
taaaagttgcacttaattcaaatgaagaatataacctggaccaagagtagagacggggtttcaccgtgttagccaggatggt

SEQ ID NO: 158372 - DNA, 138 bp, Homo sapiens
aaaaggaaaaacatcttgatctggagaaaaactggatgttggtagaaaaagcaagagtttgttatatagcagatgaggagaacaatccccttgagacagaatatggcctttctgtctacaaggatcaccagaccatca

SEQ ID NO: 158373 - DNA, 75 bp, Homo sapiens
taaattaaaatagctggctgtaattttccagccaatcctgaggcaaaagaaacattttaattcactgcacattcc

SEQ ID NO: 158374 - DNA, 100 bp, Homo sapiens
aggaagaaagtgggacttactggtttgctgagaattaaatgcaaaatgaaatgaatcgtgtcactctcccagacaagcagagcaagcaggattctgttac

SEQ ID NO: 158375 - DNA, 116 bp, Homo sapiens
gctatccaaagagccttctgcccgtctgctgaagcatgtagtgagatgttaccttcgactttcagataaccccaggcattttgttcccaacatcacctttggtcaccctgtggtag

SEQ ID NO: 158376 - DNA, 100 bp, Homo sapiens
gtttggacttctcgacttgagtgcccgcctccttcgccgccgcctctgcagtcctcagcgcagtggtcctcgttaccacctcttggctcacaccacactc

SEQ ID NO: 158377 - DNA, 98 bp, Homo sapiens
cttgggacccaccgctgccctcagctccgagtccagggcgaggtgcgtagtttctctgaaaagcatcacccaggtcagaatgaaaggaaactctctgt

SEQ ID NO: 158378 - DNA, 100 bp, Homo sapiens
cgccgccatgtcggcgcaggcccagatgcgcgcgatgctggaccagttgatgggcacctcccgggacggtatggcacagtcacaagggtgggtgaaaaga

SEQ ID NO: 158379 - DNA, 51 bp, Homo sapiens
gtggaaatgaattgggacatggtacaggccataaaattttgagtagaaaaa

SEQ ID NO: 158380 - DNA, 75 bp, Homo sapiens
aacaagaagtaggcattgaccccttgtccagttactctaacaagtctggagggatcgcttacacctgagacgaac

SEQ ID NO: 158381 - DNA, 100 bp, Homo sapiens
gccaaggccacacggcagccacgggggcagccgtcgcagtcgccgtcccacacgggctgcggacaccaagggttgctacttttctgggagaagaggctac

SEQ ID NO: 158382 - DNA, 96 bp, Homo sapiens
ctgaagagaagaataagaaagccaggcttcgctctatcttcccaggaggaggggataaaaatctttaaatggatgagatggctaccactcagattt

SEQ ID NO: 158383 - DNA, 100 bp, Homo sapiens
tccaggaaaagtgtttggggaattggctattctttacaactgtacccggacagcgaccgtcaagagcattcagctcagtgagtacttaccggaggtgaaa

SEQ ID NO: 158384 - DNA, 83 bp, Homo sapiens
tggacattcagacttcagaatgaactggttccgaacatcagcagacccacctcccaaacacaggagccaggactcattggtgc

SEQ ID NO: 158385 - DNA, 74 bp, Homo sapiens
tagctgtgctcgcgctactctctctttctggcctggaggctatccagcgcgctttgacttccgtccaaaacctg

SEQ ID NO: 158386 - DNA, 74 bp, Homo sapiens
cgccgcttctagaccctactgcggtctcggatattgccgggtggtttggctttgaatgacagcaagaactctgt

SEQ ID NO: 158387 - DNA, 75 bp, Homo sapiens
attaagctttacatcttcacaggaggacttaaatgcattggacagtggacaaagaccatttaaatggattacaaa

SEQ ID NO: 158388 - DNA, 101 bp, Homo sapiens
atgggcagacggattcatttagagctgcggaacaggacgccctctgatgtttttcgttggaatatacgttgcacatttatggcgattctgagtgtgagggc

SEQ ID NO: 158389 - DNA, 75 bp, Homo sapiens
cagattggacatatgtaaagggacatcagtatatctggatcatcaggtctagatgttgatggaatatatcgagtt

SEQ ID NO: 158390 - DNA, 103 bp, Homo sapiens
tggagcgcactcgtaacctggatcccagaaggtcgcgaaggcagtaccgtttcctcagcggcggatttgaggcttaagcaacttcttccggggaagagtgcca

SEQ ID NO: 158391 - DNA, 100 bp, Homo sapiens
gggaggcatagcgcctctctgatcttcctgcatggctcagatctacaatggaaccctcaagcgggagcctgacaacaggcgcttcagctcctacagccag

SEQ ID NO: 158392 - DNA, 100 bp, Homo sapiens
ggacaacatcaccgtgaggcagggggacacagccatcctcaggtgcactaggccttccaatgagggggatgagcaacaatacccctcagttaaatcgcag

SEQ ID NO: 158393 - DNA, 78 bp, Homo sapiens
gaggacgaggagctgaacaaccccatgaagagctccaggcccggattcgaacttacaatcagcattacaacaacctgc

SEQ ID NO: 158394 - DNA, 75 bp, Homo sapiens
aaatgttgttgtatgccaatatgataagctgcccaaactccaaaatgatggtagagaattgaccaagaaaaataa

SEQ ID NO: 158395 - DNA, 80 bp, Homo sapiens
cgggtcctacgaggagggctgtcagagcctcatggagtacgccatggcaatgacaggctcaacaccttgctcatccatga

SEQ ID NO: 158396 - DNA, 73 bp, Homo sapiens
agagattctgggagccaaacactccattgggatcctagctgctagagatgatcgctatggaaaatcctgcaga

SEQ ID NO: 158397 - DNA, 50 bp, Homo sapiens
cgcgggtctgctctgtgtgccatggacggtcaggatggctaaaggtgacc

SEQ ID NO: 158398 - DNA, 89 bp, Homo sapiens
ggatgttttggccactggacatcagaaccacattttgggtttgaagaatcttctacatggtgatggcatcagctgagaagggaaggaag

SEQ ID NO: 158399 - DNA, 83 bp, Homo sapiens
gagtgcagaagatctgggtgcccgtggaccacaggccctcgttgcccagatgttccctcggagacatggaggccagagaggag

SEQ ID NO: 158400 - DNA, 75 bp, Homo sapiens
tttttcttccttctgtcacatcacacccaatgattagtgacaagagctggggttaggatccggttggactctgac

SEQ ID NO: 158401 - DNA, 51 bp, Homo sapiens
tgagatggtagccaaacccccagagcagcccgacggccatggaggctgaag

SEQ ID NO: 158402 - DNA, 75 bp, Homo sapiens
ttgatgatttagttgattctctgaagaaaatggtgtgaatggaacattaacttcaaatgtagcagactctccccg

SEQ ID NO: 158403 - DNA, 112 bp, Homo sapiens
ctgtcttcatctttacagaggaatagtctacaaaggaagacttgtaacctggagaagagcttccttcaaaatgtctactgttcacgaaatcctgtgcaagctcagcttggag

SEQ ID NO: 158404 - DNA, 100 bp, Homo sapiens
ggatggcaaacttgcgccccgtggccgcccccgccagcgccggcccccgctcctgctgctgacggcgcccagatcatgacaagatgtttaagatgagtga

SEQ ID NO: 158405 - DNA, 74 bp, Homo sapiens
cacagatgaagtgtgcggagggctacggcttcaaggaggaatacgaggatttgtacacacagatatgacgaaag

SEQ ID NO: 158406 - DNA, 100 bp, Homo sapiens
ctcatgtcagctgttctgcaggatcccatgagaaggcatctccttggaaacaatgccatctttgaatgtgagagataaacctagtttcagcatgtctgca

SEQ ID NO: 158407 - DNA, 100 bp, Homo sapiens
gatggggacaaaggcgcaagtcgagaggaaactgttgtgcctcttcatattggcgatcctgttgtgctacagcatgctggccatagggattggaaccctg

SEQ ID NO: 158408 - DNA, 98 bp, Homo sapiens
cccatgaaccgctggcagtagctgatgctaaactaggaggggtcataaaggagagttaatcttggtctatctggtgtgaatatattgtggatctttgg

SEQ ID NO: 158409 - DNA, 100 bp, Homo sapiens
tcacgtttcccttcctccatatttactggacagagtgctgtgttataaacaacttgtgaaatgagtgatttggaagatgatgagacaccccagctttctg

SEQ ID NO: 158410 - DNA, 74 bp, Homo sapiens
tgacagtgatatattcatgtggaactatgaggatgggccagaaaaagagacgtattgctaatacccatttgaat

SEQ ID NO: 158411 - DNA, 88 bp, Homo sapiens
gcagtttggcgacatttctcggccgaagggccatttgcttttgcggagactagacgcttgaagcaaagctgccatcccagaagacgac

SEQ ID NO: 158412 - DNA, 74 bp, Homo sapiens
tggaaacgcaagacggtgccgagaagcagctgcgaggccagcggagcctgcaccaccgtggagacaacctggag

SEQ ID NO: 158413 - DNA, 100 bp, Homo sapiens
ggcgcggcggccccgggaccaaggagaccaagctgtacaccctgcctgcaagccacgccacgcgtgtgtatgagatgctggtcagccacattcagctcca

SEQ ID NO: 158414 - DNA, 98 bp, Homo sapiens
gggagcctcgggcaccatgagcgacgtggctattgtgaaggagggttggctgcacaaacgaggatttccctagagattatgacgttgcagccccgctg

SEQ ID NO: 158415 - DNA, 100 bp, Homo sapiens
aagtggagacagcaatctcaacttcagtgccggtggtggtgtgcacattgagccccggtatagacagttcccccagctgaccagatcccaggtgttccag

SEQ ID NO: 158416 - DNA, 75 bp, Homo sapiens
gacggcgaggccctcatgtaccacacgaagtctggcaagttgatgagcagatagatcactacaaggaaagccaag

SEQ ID NO: 158417 - DNA, 90 bp, Homo sapiens
ggcagcagcgtggcctccgccaccgtgcacatccgaatgggctggcgcccatgcggctctacacgctctccaagcgccactttgtcctcg

SEQ ID NO: 158418 - DNA, 74 bp, Homo sapiens
cagtggtcgcttcttctccttggtcatgaatgaaaaacttcagcactgcatggaactaacagatctaatgcgga

SEQ ID NO: 158419 - DNA, 88 bp, Homo sapiens
ccacggtggtgttagcacctcagcccatcccagcttattgcaggagtgaccaggacactacctcctagaagtaatgcccacagaaagc

SEQ ID NO: 158420 - DNA, 100 bp, Homo sapiens
aaattctggaacacctatatgagcagcccgacggccatggaggctgaagagacgatggaatgccttcaggagttccctgaacatcataaaatgatcctcg

SEQ ID NO: 158421 - DNA, 75 bp, Homo sapiens
gcaaattcactccccagtacaaagcatggtttcatcttacctcgtgcatcatgggtattgtgccacagccacggc

SEQ ID NO: 158422 - DNA, 75 bp, Homo sapiens
tttccttacctgtttttccagctcacccactgccagcagaggtaactgcatcctgcccagcatgacggccccctg

SEQ ID NO: 158423 - DNA, 73 bp, Homo sapiens
gaaaggagtccagagaaaaagagctgacaaatactgggagtacactttcaaaaaggaaacttctaacggaagt

SEQ ID NO: 158424 - DNA, 98 bp, Homo sapiens
cttgaaggtgacaacttagagacgaagaagcattgcatgcatttattcagccagagattctggatggcccaaatcagtatttttgtgaacgttgtaag

SEQ ID NO: 158425 - DNA, 98 bp, Homo sapiens
gcggcgctgagccagccgggacggacatgcgcgggagggcgccgcggggcagccgccgctcctccgggagctgacatcgcgctgatcggattggccgt

SEQ ID NO: 158426 - DNA, 74 bp, Homo sapiens
ctcgttgatgagagcattcgaagtgacctcagcagggcatccaggtccacggcccactgctgaggctgaaccag

SEQ ID NO: 158427 - DNA, 95 bp, Homo sapiens
ttcgagtgacccgggtgccgaggagcgggaagagttgctggggcgtccgagctgggccacagcctgaacgagaacgtcctcaagcctgcgcagga

SEQ ID NO: 158428 - DNA, 100 bp, Homo sapiens
tgctgcggcgcggggaccgctgtgctctcgatataaagatgaagcgcagctgtataaagaagagcacctgaggaatcggcagcaccctcactgctacgtt

SEQ ID NO: 158429 - DNA, 80 bp, Homo sapiens
aaacagaggaactgtaacttacattgctccacctgggaattatgatacctctccactatggaaggaggggtcaggattac

SEQ ID NO: 158430 - DNA, 100 bp, Homo sapiens
ggggcgtctgcggctctccgccgtccccagccctgcctctccctgggctctggccagcgttaatgactgccattgatggaagacatgatgtttgtatccg

SEQ ID NO: 158431 - DNA, 49 bp, Homo sapiens
tacctcaaagactggcacttgtgcagacttctgctggatgtgtctagga

SEQ ID NO: 158432 - DNA, 100 bp, Homo sapiens
cagctagcgcgaccctgagccggcgcccgtggtccggccatggacgacctcgcccggccgcaccacctgggtctccgccatgaacgggcctgccctgcag

SEQ ID NO: 158433 - DNA, 90 bp, Homo sapiens
cacacataaagtcattgcagtcgtcaacaagatggtgagcatgatggagggtgtcatccaggagtagatcccataatagatcacgttcaa

SEQ ID NO: 158434 - DNA, 75 bp, Homo sapiens
aattagtctttgtgcagaaagcacagatgattgcttgtctggagcccccaactcccttgacagtgtacgctggag

SEQ ID NO: 158435 - DNA, 107 bp, Homo sapiens
ccgtcttcccctccatcgtggggcgccccaggcaccaggtcactgcagccagaggggtccagaagagagaggaggcactgcctccactacagcaactgcacccacga

SEQ ID NO: 158436 - DNA, 100 bp, Homo sapiens
gggacttgatgttaacaaatgtgagattgccagaggtctcttcataattgaccccaatggagtcatcaagcatttgagcgtcaacgatctcccagtgggc

SEQ ID NO: 158437 - DNA, 50 bp, Homo sapiens
ccggattctcaagctgattgtcaggagtctatccttcactggagtctgat

SEQ ID NO: 158438 - DNA, 90 bp, Homo sapiens
agtcctacaacagtttggcgtgcaacatggggcttgagaaaggatggttccaatccctatacattgaagctttgcttttctacatcatcc

SEQ ID NO: 158439 - DNA, 75 bp, Homo sapiens
tgcgcgccttgtcactggagtgcaagaagaaattcccacctgtcaaagaggatgtgaaatggtctgacttcgggt

SEQ ID NO: 158440 - DNA, 100 bp, Homo sapiens
ccccccagagccgacctgcagcaaataattgtcagtctaacagaatcctgtcggagttgtagccatgccctaggtaagaatgattgatgttggctgatat

SEQ ID NO: 158441 - DNA, 100 bp, Homo sapiens
gctgaacctggtgttttagaggataccttggtcccagagtcatcatgaaggcacgtgtggttctcaaatataggcattctgatgggaacttgtgtgttaa

SEQ ID NO: 158442 - DNA, 100 bp, Homo sapiens
aaaaaacacacccttgcactatgctgctgcctcagggatgaaagcctgtgtagagacaccaaatcctactgcaagcgagtttattcctaaaggaggatca

SEQ ID NO: 158443 - DNA, 75 bp, Homo sapiens
gaagggactgttgttccagaggatcgctgcaaatctccaacctctgagagacaagagagacacctccaacttcga

SEQ ID NO: 158444 - DNA, 75 bp, Homo sapiens
cgcctctcttcgcctcgcctcgggacccgcggtccccgctcttgctggttaaagatcgaggtccggaagccacta

SEQ ID NO: 158445 - DNA, 82 bp, Homo sapiens
aagccacacttgaaggccttgcacacctgcagccctaccaaatcattataaacctgcaatttcccatcgagatttaaacagc

SEQ ID NO: 158446 - DNA, 100 bp, Homo sapiens
tccgcggccggcccggcgcggcccagcgccctcagtgtaaagaactggccaagtccaaagccgaagtggcctgcattgcagtgtatgaaacagacgtgtt

SEQ ID NO: 158447 - DNA, 99 bp, Homo sapiens
gtgccggtcaacctggagcttcaggagttgctgctggactacagcttccagcacctgggtgtctcctcacaggttccatgcctctgcagcggtgcctca

SEQ ID NO: 158448 - DNA, 83 bp, Homo sapiens
gcggcctcggggaatggaagcggagaacgcgggcagacagggtctcactttgtcacccatgctggagtgtagtggagtgaact

SEQ ID NO: 158449 - DNA, 89 bp, Homo sapiens
gagacgctccaagaggctcctcagtgtgggcgagtaaaatgccctgcgtgtgagaagcagacgcagtaaaacgcaggactcttcccgct

SEQ ID NO: 158450 - DNA, 98 bp, Homo sapiens
gcttgctgccccccgacaccgctatcctaattaaagctatagagagtcccaacaaagaagatgatacccagtggctgacctactgggtagtgtatggt

SEQ ID NO: 158451 - DNA, 97 bp, Homo sapiens
agctgctgaggatcgccaaaaagctggagaagatggtggccaggaagaacacgaggctgaggggatctggcggtggagcgctaggatcagacgcccc

SEQ ID NO: 158452 - DNA, 90 bp, Homo sapiens
tcaatggcatcatcgtgtttggcacccggatcctggatgaggaggtgtttgaggctgtcacaaatcctctgcaccccaggagcgccgctt

SEQ ID NO: 158453 - DNA, 75 bp, Homo sapiens
ggatgccctgcagtacctgcagaaggtctctggagacatcttcagcagcacaagctccgggtggataaggcagct

SEQ ID NO: 158454 - DNA, 90 bp, Homo sapiens
tacgcctagaacagtgccctctgcagctgaataacccttttaacgagtattccaaatttgatggcaagattctgtttctggcgtctgcat

SEQ ID NO: 158455 - DNA, 90 bp, Homo sapiens
cgccgtggcgctcttcctctctcagctggtgttcgtgattgggatcaaccagacggaaaacccgtttctccacagtcgaactcctctagg

SEQ ID NO: 158456 - DNA, 100 bp, Homo sapiens
ctcgctgctcggtgcgaggcggcggagagcgaggcctggtagatgctggctggattggattttggtccatagttggaggctgtgttgttggaatagctat

SEQ ID NO: 158457 - DNA, 98 bp, Homo sapiens
cggagcaaaacagatcttgactgcatttttgggaaaagacagagtaagaagactcccgagagcctggcccaactagagaatctgtgcaaacagctgta

SEQ ID NO: 158458 - DNA, 75 bp, Homo sapiens
aaactgggtggacattacccaagattttgaagaagcttgtcgagtttaaggaagaaatctctaaacgttttaaat

SEQ ID NO: 158459 - DNA, 100 bp, Homo sapiens
cgactattctccgggagccgtccgtgtcaccgccggaacctggcgcagacatggatgggtgcaaaaaagagctgccccgcttgcaagagccggaggagga

SEQ ID NO: 158460 - DNA, 75 bp, Homo sapiens
ctgcccaccacccacgcttgcccagcctttcttcacgcacacttcactacgcttagcagatgtcctctggaattc

SEQ ID NO: 158461 - DNA, 100 bp, Homo sapiens
ctgtattctgacgtttacaaaactacagagtttggtgcacctcgatttggaggaagtagggcagggcccttatctggaaagaagtttggaaaccctgggg

SEQ ID NO: 158462 - DNA, 96 bp, Homo sapiens
tggaaaagaaagcatactgcgagccctgctacattatctgtgactttggcctggcccgtgttgcagatccagaccatgatcacacagggttcctga

SEQ ID NO: 158463 - DNA, 101 bp, Homo sapiens
cataagggcttaactcatatatttaacccccctccaaaaaaggctctccctatagagaatctcctttgggtcattttgaaagctatggagggatgcccttt

SEQ ID NO: 158464 - DNA, 96 bp, Homo sapiens
ccgggctgtgagcaagaggaagctgcagcccacccgggcagccctcaccctggcataatggttatgaaagcttctgtagatgatgacgattcagga

SEQ ID NO: 158465 - DNA, 87 bp, Homo sapiens
gcaaccttgactgccaggaagagccagattcctgcatcaggcatcaccaactctgaatttcatactggtcaagcagagaagattttg

SEQ ID NO: 158466 - DNA, 111 bp, Homo sapiens
aggtcatcatcattacattatgctgcatgttttggaagacctcaagtagcaaagatgctaacatcagagaagttggccttgagggggcattgttgatcttactagacaagg

SEQ ID NO: 158467 - DNA, 87 bp, Homo sapiens
cggtgattaagattggcacttgcttacaggagtgaaaaacagctgtaacatcttatgaagatcttggactctttgcatttggattac

SEQ ID NO: 158468 - DNA, 75 bp, Homo sapiens
accctgtacacgctcacccatgtggtgctgctcatctacgaggcggaatggcctggtttgctttcgaccctggct

SEQ ID NO: 158469 - DNA, 85 bp, Homo sapiens
actacagaaacctggtctccctaggcttcaatggctgagaatagtatacctctatacactaccgcttccatgggaaatcccactc

SEQ ID NO: 158470 - DNA, 90 bp, Homo sapiens
ttgccaggaccagggctgcgacggccatgctggggcagaggcagccctggatgacctctgtgccgcggaaaccgatgtggaagaccccga

SEQ ID NO: 158471 - DNA, 100 bp, Homo sapiens
cattcatggaatgaatcgtgggttgaaaaaatggaagaagggaactcgagatgttggtatgcagaaacagattgtctcagtttacctagctttgaaaatg

SEQ ID NO: 158472 - DNA, 98 bp, Homo sapiens
ggcgataagtgaggctgggcggagaacttgccttatgcggctgcgtgggcatgccggagttctagcctcagttttacccaaagttgatttgaattaca

SEQ ID NO: 158473 - DNA, 82 bp, Homo sapiens
ggcagaagctgagacggctaaggattctttctactaatccagatacttgttgaagtgctgactagtttcttggggaaagatg

SEQ ID NO: 158474 - DNA, 95 bp, Homo sapiens
aaaaacctgatagtaagaaggtggaggaagacttaaaggcagacgaaccatcaagtgaggaaagtgatctagataagtactcctctcagtttggt

SEQ ID NO: 158475 - DNA, 75 bp, Homo sapiens
tgttgaacaacttggaattccagtgttggggatgtcctttgcactgaccctgaactgccagattgacaaaaccag

SEQ ID NO: 158476 - DNA, 100 bp, Homo sapiens
caccatgtggctgccctcgtcgatgagcttcaggaatgccaggagcaggatctgcagaagacgcagggctcaagaccgagacatgggtgcccggcaccgc

SEQ ID NO: 158477 - DNA, 133 bp, Homo sapiens
aggcacagccttttcaccaagaggagaaagagtctttgtctctgcagcttcaaaagaagaatcaccaagtccagcaggcaactttgtccctaacaaaatgtggaagggattagtcaagaggaatgcatctgtg

SEQ ID NO: 158478 - DNA, 83 bp, Homo sapiens
taattcaaggtcacacaatgtcggggatggacctccagatttccttactgctccataatgggagaagtaaagaacaaagactt

SEQ ID NO: 158479 - DNA, 150 bp, Homo sapiens
tgcgtgttgtccacccaagatggagttcctcctggggaacccgttcagcacaccagtggggcagtgcctcgggagtcatcaagctttggtgtatgtgttggccggttctgaagtcttgaagaagctctgctgaggaagaccaaagcagca

SEQ ID NO: 158480 - DNA, 100 bp, Homo sapiens
tgcggcagacggcgacagtggcggcggcgccatggcagggcttgcagatgtccagctcgccgctgtccaagaaacgtcgcgtgtccgggcctgatccaaa

SEQ ID NO: 158481 - DNA, 80 bp, Homo sapiens
ctccttcggcagtccacccaccgccgccgcctcccagggcttgtcaatgaggcagatcagattcaggttcgacgggcagc

SEQ ID NO: 158482 - DNA, 97 bp, Homo sapiens
gccaggatgccgtccaggcggcgcggcggctcctcactcatcccagactccagcgggaggaagaagaggcctttgccagcagtcagagcagccaagg

SEQ ID NO: 158483 - DNA, 98 bp, Homo sapiens
tttcactcattgccttatagttaagtgtacagcagatattttggtgatagattccgcagtataatagatgacgcctggtggtttgggactgtggagag

SEQ ID NO: 158484 - DNA, 90 bp, Homo sapiens
ataaatacgatgttgcagctcagccctgaagaaaagggaaaacttgctgcggttgctcaaggtgcagtagacattgttgcaatcatgatc

SEQ ID NO: 158485 - DNA, 101 bp, Homo sapiens
gcagagtgtaccaggggatgctggactgcatgagtcttgctatggagatacacttcaattcctacttcagtggaagagtcgggaaagaaagagaaaggaaa

SEQ ID NO: 158486 - DNA, 75 bp, Homo sapiens
ctgggggctgaagagcgcgccgccctctcgtcccactttccagcatcccagccatcactcttccacctgctcctt

SEQ ID NO: 158487 - DNA, 100 bp, Homo sapiens
actcacgccatgcagctgctgacggcagggagatgcatcaacaaagcatgggtgtgtgatggagatattgattgcgaagatcagtcagatgaagatgact

SEQ ID NO: 158488 - DNA, 82 bp, Homo sapiens
cgagaggcgggctgaggcggcccagcggcggcagacaatgcagatcttcgtgaagactctgactggtaagaccatcaccctc

SEQ ID NO: 158489 - DNA, 82 bp, Homo sapiens
tgcagatcgggagcgcaaggtcgccctcaaggccatgatcaaaacaggccagaccaggagctgaccgggagctggggccacg

SEQ ID NO: 158490 - DNA, 101 bp, Homo sapiens
cggcggcaaaatggcggcgcctgaggagcgggatctaacccaggagcagacagagaagctgctgcagtttcaggtggtcgtgtgatggtaacagatgctga

SEQ ID NO: 158491 - DNA, 100 bp, Homo sapiens
ccaatgtcttcgcaagtgccatgatgcatgccttagaagtgttaaattcacaggaaacaggttttgcgtgtgaagctgtgtggaaatgtgaaatactacc

SEQ ID NO: 158492 - DNA, 83 bp, Homo sapiens
cagctacacaaagagggtcatctcttctattgtacctgcagggtgagcagggcagcatttccttctcccactgctgctgagat

SEQ ID NO: 158493 - DNA, 99 bp, Homo sapiens
gaagagtcatccctcagaaagtcttgacacagatagtcttcttattgctggaatgagtagcgacagtgacattgaatgtgacactgagaatgaggagca

SEQ ID NO: 158494 - DNA, 75 bp, Homo sapiens
gctgaagaaagattagccgaggcacataggatccaagaaaaactctgtgtatggctgtgacccgatccaaagacg

SEQ ID NO: 158495 - DNA, 100 bp, Homo sapiens
cattgtttgaccacaacaagggccggattctcacccagattttatcatgtgggcaacctgctgcaactggttctgcctggatggacagcctgaggaggtc

SEQ ID NO: 158496 - DNA, 75 bp, Homo sapiens
gcaaccctgcagcatgttttaatgagtgactgcttcttggacacttaatgattgttggcaagaaatgtgctgctg

SEQ ID NO: 158497 - DNA, 101 bp, Homo sapiens
gacagttctgtctgcagaagcccattatggctgtaactggagatgacacagcatcctccaggacaaatagcaaggaaatacagttcctgctccaccatttt

SEQ ID NO: 158498 - DNA, 88 bp, Homo sapiens
ggtggaagaggacgggctttaggctggaagcgccttagaggagccatttttccagctccagtgatccacaagctcagaaatacatcgc

SEQ ID NO: 158499 - DNA, 75 bp, Homo sapiens
gcggctgagacaaaggcgacggaaaacggacgatgtattactaagctggaaaacatggggtttcgagtgggacaa

SEQ ID NO: 158500 - DNA, 100 bp, Homo sapiens
gttgagggatgtcccacagttcttatcaggacaactttcaggagatgtcctttgcttctcagatgtaaatgcactttaagtttgttattcaacagtgaaa

SEQ ID NO: 158501 - DNA, 88 bp, Homo sapiens
tgcacgaaagctttcctaggccaaaaagaggtgaaaggtgtagcagtcactcggcctacacccacagcatcgaccttgtgaacccagc

SEQ ID NO: 158502 - DNA, 100 bp, Homo sapiens
gccaccgccacagccacagccaccgtggctgctctccaggagaagcagagccaggagctgagccagtatggagcgatcctgggaaaagtctattccgttc

SEQ ID NO: 158503 - DNA, 98 bp, Homo sapiens
cgcgtcccgctcgctgggagagaggtacctctccttttccctctccctttccctaagaacacttcagttatggaagatcaaaatgaagatgagtcccc

SEQ ID NO: 158504 - DNA, 74 bp, Homo sapiens
caagaattgccgcttccttttagttactgtatctggtgacccatctcatgggggcagatctgaacaacattgtg

SEQ ID NO: 158505 - DNA, 101 bp, Homo sapiens
tgaactggacggtgatcctgaaaggaaagagttcctggatgacctcttcgtctttatgcagaagaggggaaacccctcctggagtttccccaaagccatgg

SEQ ID NO: 158506 - DNA, 100 bp, Homo sapiens
gagttttgaaaaataaatggtcaatactctacctcttgctgagcctcagtgaggacccacgcaggcagccaagcaaggccataggaaaaggatacagagt

SEQ ID NO: 158507 - DNA, 50 bp, Homo sapiens
agcgcctgcctgaggagagcagccaaaacctattgatgtacaagtcatta

SEQ ID NO: 158508 - DNA, 100 bp, Homo sapiens
cccggggcaacagctgagccgtctgggaagggatgcatctatatcattaacggagctcaagaaaaatgtgtattgcctcctatggacggctaccctcact

SEQ ID NO: 158509 - DNA, 100 bp, Homo sapiens
gagcgagctgagtggttgtgtggtcgcgtctcggaaaccggtagcgcttgcagcatgagtgtgaacatggctacgcctcttcattcccgtccatgccgag

SEQ ID NO: 158510 - DNA, 50 bp, Homo sapiens
gaagagggaagacacgcggaaacaggtggtaataagctgcagtcaacagg

SEQ ID NO: 158511 - DNA, 97 bp, Homo sapiens
caggaagcaaaattgaagaggattttccacacatcagatcgctttgtcacaacaaacagagtaaggtgtatcttccagaaccaccttttcctcatgc

SEQ ID NO: 158512 - DNA, 96 bp, Homo sapiens
cacacttctgatgacacctttattttaaaagctgatgttccaagataatgtacaacggccagccaattaccaaaatggcctgtggggctgaattca

SEQ ID NO: 158513 - DNA, 99 bp, Homo sapiens
ataaaactaccaacaggcacagaggagtggttaatgtgttgctaacaactccactctgggtggtaaacaccagactgaagcttcaaggagcaaaattta

SEQ ID NO: 158514 - DNA, 75 bp, Homo sapiens
ggacttagagtggtctgtgtttacggaggaacaggaatcagtgagcagaacttgtctgtggaaagtatattattt

SEQ ID NO: 158515 - DNA, 75 bp, Homo sapiens
tgctgctatgaccgtggggaaggatgttagactcgctctgttgcccaggctggatcatagctcactgaagcctca

SEQ ID NO: 158516 - DNA, 75 bp, Homo sapiens
ctgagatgcgcaaattcactccccagtacaaaggagcacggtctgaatctgcacagagcaagatgctgagtggag

SEQ ID NO: 158517 - DNA, 83 bp, Homo sapiens
gaggcagggccagcagcaggcgggaggagcatcagatccatgctgctgctgactcggagccccacagcttggcacaggctctc

SEQ ID NO: 158518 - DNA, 75 bp, Homo sapiens
cttcaatggaaaacatgaaaaggtgaacagtcagcccaggtatttaccttgctgtggattgctgactggatggtc

SEQ ID NO: 158519 - DNA, 51 bp, Homo sapiens
agcggagggagccccagacacgatcatccccccgaaggagtggaagccgcg

SEQ ID NO: 158520 - DNA, 90 bp, Homo sapiens
gaaccggaactcaaaacagacccatctttggatcttcattcattaagcagtgcagaaacacagatctccagcaccctgccggtggcacta

SEQ ID NO: 158521 - DNA, 74 bp, Homo sapiens
aatgaatggaaaagaacgtgctccagacccaaatctagttcctcagcagaagggcataccgatgctgtccttga

SEQ ID NO: 158522 - DNA, 83 bp, Homo sapiens
cccgagttatgcccaccctccaactttgcgacggaaatgtgtcatcgaaagccagactatggaaatgatgttagacaaaaagc

SEQ ID NO: 158523 - DNA, 100 bp, Homo sapiens
tcggcaacaattacttacctggcccaggaggatgggcccgttgtggttcaaaccttgtactactcagctgatcacaagctgcttgatgggaacctactag

SEQ ID NO: 158524 - DNA, 100 bp, Homo sapiens
ccggaagtgccccttagcgggtgggggaagctggtaggcacgggcggctccgcagtgaccggactcgggggaggaaagaccacagcaagattctttcatt

SEQ ID NO: 158525 - DNA, 122 bp, Homo sapiens
ggagcctggcggccaccccctcttcctcacttccctgtactctcatcgctctcggcctccgacacgggtcttctttggggaaaaaggtggcaggtgccctacagaccattgagacctccctg

SEQ ID NO: 158526 - DNA, 96 bp, Homo sapiens
ccggcgtggaatccgcaacagcggatacgatgaaatgggtcctgatgaatatgaagagatggaagaagaggaggaggaggaagaggaggaagacga

SEQ ID NO: 158527 - DNA, 134 bp, Homo sapiens
tccgggcccaagggcagtacatgtacgatgaacagggggcagaatacatcgattgcatcagcaatgtggcgcacgagcaaaatatgctgtgaattccatcaagaagaaagtcaacgacaagaacccacacgtcg

SEQ ID NO: 158528 - DNA, 100 bp, Homo sapiens
tggaaaggaagtaccaggacttgcacaggaagtcagcctcataccaaaccatccgtttttgtcatgaaaaatggaacaaatgtcgcttgtctggtgaagg

SEQ ID NO: 158529 - DNA, 100 bp, Homo sapiens
tgcaggacatctgcaatgatgttctgatgatacagacctacgtggagcacattgagaggtccaagatgcagcaggtcggaggaaacagccagaccgagag

SEQ ID NO: 158530 - DNA, 100 bp, Homo sapiens
agaaccacagtttatcatcccttcctttttgtttggctatgccaccacagtcatccccagggtctatacatactatgtttcaactgtattatttgccatt

SEQ ID NO: 158531 - DNA, 49 bp, Homo sapiens
tatttttccatcatttctccaaaggccttcctgatgcgcttgcctgctc

SEQ ID NO: 158532 - DNA, 100 bp, Homo sapiens
gacacaatgtgtcccagccacttttcccctggtcttcaatgccagaatggtgtttgaaaagtgccctgcaggagtcattaaatcaaaacttcatgctgat

SEQ ID NO: 158533 - DNA, 96 bp, Homo sapiens
ccaagcccgagaagacggaggaggactcagaggagctgccactgcagagccccgccatggaagacacgccgttggtgatatcgaagcagaagacgg

SEQ ID NO: 158534 - DNA, 80 bp, Homo sapiens
atcgaaacagatacagagatgtaagcccatgattctcaaagttggattggtggaaacaatgaaccattgacaggctttac

SEQ ID NO: 158535 - DNA, 82 bp, Homo sapiens
gggggattctcgacctgctaacagaactggaccttttcgatatccttggaacagaagatcttattgtggaagtgacttccaa

SEQ ID NO: 158536 - DNA, 100 bp, Homo sapiens
ggaaaacaacttcgagggcagagtgtgtgtgtaatattgactgttctcaaaccaacttcaatcccctctgcgcttctgatgggaaatcttatgataatgc

SEQ ID NO: 158537 - DNA, 99 bp, Homo sapiens
gacctggtccagcttcccttcctcaaataaggaaattgacacctggcgtgggtgtacaactatgagcctttgacacagctcaagaatgtcagagcaaat

SEQ ID NO: 158538 - DNA, 100 bp, Homo sapiens
aggatgtgatgccagaggtcaacaaggttctggacaagatgaagtctttctgccaggccatctggctgctgtgcacaggcgctcgtgaggctgccttccg

SEQ ID NO: 158539 - DNA, 88 bp, Homo sapiens
gtattgaaaggccagatttggagaaacttaagaccagaatccgtagaagctagccctgtggtagttgagaaatccaacagttatcccc

SEQ ID NO: 158540 - DNA, 100 bp, Homo sapiens
aggaaaacaacttcgagggcagagcagcctgcttctgcaaagtggtacgatcgaagggactatgtcttcattgaattttgtgttgaagacagtaaggatg

SEQ ID NO: 158541 - DNA, 73 bp, Homo sapiens
gaaaccagatttgcctgaaaatggctcggccaagttcaagttttgaaagttgtagtaatggtgtaatatcaaa

SEQ ID NO: 158542 - DNA, 82 bp, Homo sapiens
cagctccctgctcggaggcggtggcgaccatggtgaatccgggcagcagctcgcagccgcccccggtgacggccggctccct

SEQ ID NO: 158543 - DNA, 97 bp, Homo sapiens
tgcgaagtggttgagaagcctgtacctgttttatacttgcttttgcttcagcgttctgtggttgtcaacagatatggctcgtggacagcagaaaatt

SEQ ID NO: 158544 - DNA, 100 bp, Homo sapiens
caacaagtgttgctggacgtccggcggtcattgcggcggttccctcctgatgtggaagatgtcaagtttgtgatcaactatgactatccaaacagctcag

SEQ ID NO: 158545 - DNA, 82 bp, Homo sapiens
gctgagagggaaaaggacgccgcggtcttcccaggcgtcgcggagagcagttcaggacctcaaggggctcggctatgagaag

SEQ ID NO: 158546 - DNA, 100 bp, Homo sapiens
tttgatgactttgcacattatgaaaagcgtcaagaagaggaggaagccatgcgtagggttatcaatactctggctgaccatcatcatcgtgggactgact

SEQ ID NO: 158547 - DNA, 100 bp, Homo sapiens
ttggaattacagacatgggccactacacctggcgatctgtgtcttatacggaccgtataatagacgctggccccaaaggaaactactctcgatttatgaa

SEQ ID NO: 158548 - DNA, 75 bp, Homo sapiens
cccggggcaagagcaggagcccggcaccccccgccgacaaggaggcaaccatgtccaagggacctgcagttggta

SEQ ID NO: 158549 - DNA, 75 bp, Homo sapiens
tcgatggtggaatcactgggaacatgcggcaagaggccattgaccgcttcaatgaggctgtggccctgagaaaga

SEQ ID NO: 158550 - DNA, 100 bp, Homo sapiens
gctagaactggacacctcgggggtttcctgctttatggcgaagggtgctggagaatctggtaaaagcaccattgtgaagcagatgaggatcctgcatgtt

SEQ ID NO: 158551 - DNA, 100 bp, Homo sapiens
gagctgaagctgctgcttttgggcatttcactgaaagcagaagctgtctcagtcaagaaagaatcagaagatcctaattactatcaatataatatgcaag

SEQ ID NO: 158552 - DNA, 100 bp, Homo sapiens
ggcgagctcaacgggcccctgcgggaggttctaagctggtctatgtccatcaccttcttggagaaggagcctttgcccaggtgtacgaagctacccaggg

SEQ ID NO: 158553 - DNA, 100 bp, Homo sapiens
cggtagacttaggtctgttagaggaagacgacgagtttgaagagttccctgccgaagggtgctgataagactgtgaaaggcccagatggactgaccgcct

SEQ ID NO: 158554 - DNA, 100 bp, Homo sapiens
agctctgaagcctcagctcttgccaaacagacccgagacccatgtcagccccactggatgccattgactggggcgactttggggtagaggcagtgtctga

SEQ ID NO: 158555 - DNA, 75 bp, Homo sapiens
gtggttgatgcagatgaaatcattgtcttggatcagattaatactgaggaacacgtggatgcagctgatcaggag

SEQ ID NO: 158556 - DNA, 75 bp, Homo sapiens
aaggaaatgttaggatcactttattctgatgccggaaggtccttctgaatcccttccctgttccttaggttgcac

SEQ ID NO: 158557 - DNA, 88 bp, Homo sapiens
agagcggctcagccagcggcagacagaacgggacctgtgtcagggcctggcctacgtggagtatgaaaatgaatcccaggcgtcgcag

SEQ ID NO: 158558 - DNA, 74 bp, Homo sapiens
tatctactactgctcctcctggcatccgcagtggctgcgatggaagcaaggacacccaggcccattattttcct

SEQ ID NO: 158559 - DNA, 100 bp, Homo sapiens
gctgcccagcgccctggccctctcgctgttgctggtctctggctccctcctcccagggccaggcgccgctcagaacgaatactgagaatatacttcacac

SEQ ID NO: 158560 - DNA, 101 bp, Homo sapiens
gaatcaaagataaatccaaatactgcatatcagaaacaacaggtatcgagaaccttccctgcgaacttcagaggaacttccagctgatgcgagagctggac

SEQ ID NO: 158561 - DNA, 90 bp, Homo sapiens
ccatcatcgtggtagttattgtaagacctctggtcctcaatcgagttcctctacgaagaacacaccagaaatttgtcattgccacttcaa

SEQ ID NO: 158562 - DNA, 76 bp, Homo sapiens
tcgccaaaatcccaaatttttgggtaacaacatttgtcaaccatccacaagatgagctccccacacaagaactctg

SEQ ID NO: 158563 - DNA, 75 bp, Homo sapiens
aagatgagactgatgaccggcctgaatgtccctatggaccatcctgttataggtccagcatcctttgaagcatga

SEQ ID NO: 158564 - DNA, 100 bp, Homo sapiens
cctttgctatcttctccagacagtgaacaaaggcagtctgttgaggcatctggacaccacacacatcatcagtctgggggtcctgatgacaacttaattg

SEQ ID NO: 158565 - DNA, 98 bp, Homo sapiens
catacattatgctgccgcctatgggcacaggcagtgtctggaattggttcaaaccttgtactactcagctgatcacaagctgcttgatgggaacctac

SEQ ID NO: 158566 - DNA, 100 bp, Homo sapiens
acccagacaggtggcgacggcagaggaaacccagcccttgctgacatctacacagagcacgcccatcaggtggtggtggccaagtatgcgcccagcggat

SEQ ID NO: 158567 - DNA, 75 bp, Homo sapiens
tcccggggtccccggccggccaagcaggctccgagctctgtccagtggtgggagtattacatcccctcctctttc

SEQ ID NO: 158568 - DNA, 82 bp, Homo sapiens
tgctgagaccgctccggacgtgcgaagcgttcgcggtgcggtagggtgtgggccgaagatatgctcatgtggtgttgaggaa

SEQ ID NO: 158569 - DNA, 117 bp, Homo sapiens
ctcaaagccgggagatcgactgtttgagcccggaagcgcagaagctgcccatcacctcttcatgaccactgcctgccaggaggctaactacggtgccctcctccgggagctctgcct

SEQ ID NO: 158570 - DNA, 95 bp, Homo sapiens
aggttcagctgatgaagcttctgaaccatccacacatcataaagctttaccagataacgaaggaggcccaacttcattcaataaggagcctgacg

SEQ ID NO: 158571 - DNA, 73 bp, Homo sapiens
gatgataaagactacaggagaattcggtttgtaggtcgtcagaaagagatatcgggaggcaattcagaagtgg

SEQ ID NO: 158572 - DNA, 101 bp, Homo sapiens
cttcacggggctggctgctctgtgtctcttccaagccgccatgtactcggagatccagagggagcgggcagacattgggggcctgatggcccggccagaat

SEQ ID NO: 158573 - DNA, 98 bp, Homo sapiens
agaaagtgaacttggcattttagatctaattcaagtattatagctgcaaatgtccttgtattctgtttatggagagtaccttctctgcagcggacaat

SEQ ID NO: 158574 - DNA, 100 bp, Homo sapiens
ctgttcgtgattatatttcttggagttgtgttggtaatgaagaaaagatcatatactcctatgaaaggaggaatctccaatgtatggtttgacagattta

SEQ ID NO: 158575 - DNA, 100 bp, Homo sapiens
acttcctggaggagcgcatgcaacagaagtatgaggccagccgggaggacatctacaagcggactccaatggcagcaattcaagatggtcttgctaaggg

SEQ ID NO: 158576 - DNA, 95 bp, Homo sapiens
actatgaagacaacaagcaattttttgggatctctcaatgctatttgccttcattagcttgctcgttatgcttcccacttggtggattgtgtctt

SEQ ID NO: 158577 - DNA, 90 bp, Homo sapiens
ccgcccggaacatggactctgactcttgcgccgccgccttccacccggaggtgggaggaggagctcgccaagcgcatgaaccttcagacc

SEQ ID NO: 158578 - DNA, 100 bp, Homo sapiens
cctctccgtccatggccccagatgacacttcaggtagacatagctgacattgagaatgaagagaaccgctactgtctattcatggaactcctggaatcta

SEQ ID NO: 158579 - DNA, 98 bp, Homo sapiens
agcccgtcggccgccgccaactacctgctctgtaccaactgccggaaagtgctgcggaaggagagcttgtttcatatccatatcccactgtattcctg

SEQ ID NO: 158580 - DNA, 100 bp, Homo sapiens
gccgtgaacgaaagcagtgacggaggagcttgtaccaccggaatcaaagatcaactcccactgaggacaaatggacctgtaattccgggtgtgacgagag

SEQ ID NO: 158581 - DNA, 83 bp, Homo sapiens
gtgatgcctgcagagctgtggcttaccaggatctcgaggacctggaagaagcagaggagccagacatggaggaagacgatgat

SEQ ID NO: 158582 - DNA, 99 bp, Homo sapiens
tattcttggatcttgcacaggaaggaattaaagggaatgaaagctactggttgattttaaagtgcctgggcctcacaggtttggagatgtcccagaata

SEQ ID NO: 158583 - DNA, 90 bp, Homo sapiens
gtcagcgctgagcagcccgcaggcggcgccgagggcttccacctccacgggatggcccactgcgtgaccttggttcagctgtccatttcc

SEQ ID NO: 158584 - DNA, 98 bp, Homo sapiens
tagtccctcttacttgaagcatgtctttcagagcccggcaccacccatcttgagtatctgggggtccactggacggggcctgagctacaacttcaccc

SEQ ID NO: 158585 - DNA, 100 bp, Homo sapiens
actaacggaaatgaactattccaaatatggtgccaagccaagggcacgtgaagttgttgactggaggaaatatgaacaagaacaggagaaaggtcaggag

SEQ ID NO: 158586 - DNA, 75 bp, Homo sapiens
gtttcgaaaatgtgtgtgaattggatttgatcttccatatggataagatggtgtcctcagaccgaagccaacttt

SEQ ID NO: 158587 - DNA, 100 bp, Homo sapiens
ccccacggaggccatgggcgacccagcccccgcccgcagcctggacgacatcgacctgtccgccctgcggtgaggagatttctagtgaagatgatgagct

SEQ ID NO: 158588 - DNA, 75 bp, Homo sapiens
aaggcatttccagcccgcccacccaggacgagattgaggagctgcgggccgagatgctggagatgcgggacgtct

SEQ ID NO: 158589 - DNA, 100 bp, Homo sapiens
ccccgccatcgccttcggtggaagcatccccagtttcccgcgggcctggaggtgacagatgaggtactggagaaggcagctgggaccgatgtcaacaaca

SEQ ID NO: 158590 - DNA, 82 bp, Homo sapiens
caccccgaacgggttgcttcccccgctgcgaggaaaaatatattcagggggaagagatgtaatagatttcacattatggcag

SEQ ID NO: 158591 - DNA, 97 bp, Homo sapiens
cctttccaacacagatgtccaagctgccaaattgaagatctcaaacagacaaatcatggcttggaagaatatgttaggaaactcttggatagtaagg

SEQ ID NO: 158592 - DNA, 90 bp, Homo sapiens
ctcaggatggacccaagctctgccggacatggtggtgtcccacctttttgggaagctttctccaatagagtatgtgtttttaaaaccacg

SEQ ID NO: 158593 - DNA, 100 bp, Homo sapiens
cggccctcagcggccgcgaccgagtcatggctgagacctacgaaagatccccagcaggccctcaaggagctggctaagatgtgtatcctggccgactgca

SEQ ID NO: 158594 - DNA, 75 bp, Homo sapiens
tacactgaaattcatcctgagatgaggttgtgaccgagattcccgacgagagagactgaggggaagagaggaagg

SEQ ID NO: 158595 - DNA, 100 bp, Homo sapiens
gcctcgcccgccgtgagcgcccggagcggtccgcgagccaccgaggcccaggtgaaaggtgtagcagtcactcggcctacacccacagcatcgaccttgt

SEQ ID NO: 158596 - DNA, 100 bp, Homo sapiens
ccttctaagagtttggcgagtcagtgactgaagcgcccgtccattccaaggaagggaaaaggccgaggcatcagcgtgtgaagaccgcaaagacgatccc

SEQ ID NO: 158597 - DNA, 100 bp, Homo sapiens
gaaaaattacagcacatctcagtgaatttgcaagtggtgtgatgaatgcagactctgctaccattttggctgtttggatcctcctttgaaaaagtctcct

SEQ ID NO: 158598 - DNA, 90 bp, Homo sapiens
gcctcccgggtggcttacagacgctgccagcatcgccgccgccagttgggccatatggtgctcttcccagtctggttcctgtacagtctg

SEQ ID NO: 158599 - DNA, 100 bp, Homo sapiens
cgatgtagatgtttcagattctgatgatgaagatgatactcccatggctattgaagaacaagtggctgttatctatgcgggtgtaaggggatatcttgat

SEQ ID NO: 158600 - DNA, 100 bp, Homo sapiens
tagctggggctacaggcgtgtgtcactgcgcccagcatgatggaagtggttcattgcatgatattcaactgtcattgccatccagtccagaaccagaaga

SEQ ID NO: 158601 - DNA, 80 bp, Homo sapiens
ctggccgctatcatcccagcagtggagttcagcccactactctgaaccagtatgttcatgcggatgctcctaccaataaa

SEQ ID NO: 158602 - DNA, 75 bp, Homo sapiens
gggtggagtgtaggtcatatcgccgcgctattcccttcagcaagctcaagctttttatacgtttccatttcaaca

SEQ ID NO: 158603 - DNA, 82 bp, Homo sapiens
gccgtggaggcagaggtggcatggggccagaagcggactcctagaagaggggagcagcaaggatggaatgacagccgtgggc

SEQ ID NO: 158604 - DNA, 98 bp, Homo sapiens
ggaactgaaccctcgcggccgcaacgtgtgccgtgctcccggttgctcctggaatgaaggtttatattgacccttttacctacgaggaccctaatgag

SEQ ID NO: 158605 - DNA, 96 bp, Homo sapiens
ggaccccggcccaggcggccttcgagaaaatgcaggagaagcggcctgtggacatctctacagcaatgagtgaacgggcacttgctcagaaaagac

SEQ ID NO: 158606 - DNA, 101 bp, Homo sapiens
atttgggcctgatgagcccagctgggtgcctgcctcatacttggagaaagacgggaggcgtgggcagcttcgacatcgccggcctgctgaacaaccctggc

SEQ ID NO: 158607 - DNA, 50 bp, Homo sapiens
tttggctgctgcaggagccattttagatgcacacttgactgaaggaggac

SEQ ID NO: 158608 - DNA, 75 bp, Homo sapiens
cttttggaactgtttataagggtaaatggcacggttggtggttctgtcagatgaaagcaaagcgaggctggatcc

SEQ ID NO: 158609 - DNA, 100 bp, Homo sapiens
cggaagtgacttgcttttttgaccatgttactcatagagtccgactataccacatacaggagtactgatgaaatctccatctccagcattacacccacct

SEQ ID NO: 158610 - DNA, 51 bp, Homo sapiens
ctcactgcagaggtgctggagctggcagatatgatgcccctccttcataat

SEQ ID NO: 158611 - DNA, 100 bp, Homo sapiens
caaagtcaagagacagcgattggacagaatttgtgaaggtaaatgagctggatggtatcccgttgatcctggacaactgcaacatcagtgacagtaaccc

SEQ ID NO: 158612 - DNA, 51 bp, Homo sapiens
ctcccaaagtgctgggattgcaggcacccagtggcaagtactagctgagca

SEQ ID NO: 158613 - DNA, 100 bp, Homo sapiens
tgggactgggacaacgataccaccccgaatggctccagtgcagtggtgtgatcatggctcactgcagcctcgacctcctgggctcaagcaatcctcctgc

SEQ ID NO: 158614 - DNA, 82 bp, Homo sapiens
atttccatgtcaacatagtcctgagagaagtggagatcctgatgtttctcagtgccattgtgatgatgaagaaccgcagatc

SEQ ID NO: 158615 - DNA, 100 bp, Homo sapiens
gcatgagattcagagaaggaaagaagagataaaagaagagaaaaaaaggaaagaaatggctaagcaggttgattgcactgccaacactaacacctgtaat

SEQ ID NO: 158616 - DNA, 124 bp, Homo sapiens
gggacccatttctcctcctttgacagggacatcagtggagccttctcagacccacaggaagccttggaagatcgtttggaaaggattaatcgagaactgggttcagttcgcatgacgctaaaga

SEQ ID NO: 158617 - DNA, 97 bp, Homo sapiens
gggacgcccgcgcgacgagcaggtggcggcggctgcaggggcccagaagacacctgctttgagtttggtgtttttcctgccatcctgagtttcccac

SEQ ID NO: 158618 - DNA, 100 bp, Homo sapiens
ttcagagatatctgggtcttccagttctgcctcgtcatagccagctgtcaatactcactgcttaagcctcttccttggttgtgccactactgagttctcc

SEQ ID NO: 158619 - DNA, 100 bp, Homo sapiens
aaagtgtggatttgtgtggagcacacattgaatgggccaaggaaaaatcgagcagaaagaatgtctttcagatgttgctaaatttgcataagaagagttg

SEQ ID NO: 158620 - DNA, 75 bp, Homo sapiens
tcagcactgcctctggcatccccgacttcaggcctggcgctgctgctgccgcccgtcaccctggcagccctggtg

SEQ ID NO: 158621 - DNA, 74 bp, Homo sapiens
ttagatacttttaaacacccgagcgctgaggtggaagatgcaatgctgatgtttgataaaactaccaacaggca

SEQ ID NO: 158622 - DNA, 100 bp, Homo sapiens
gaatccatgtttctggacgcggatttttggcctcatactctgttatagataaacaagtttctttcaagatggcttgaaaacagctgataagttgaaacag

SEQ ID NO: 158623 - DNA, 100 bp, Homo sapiens
ggacgagaagcgcagcaacgtgcggtgggaccacgagagcgtgaatgaaaactttgccattgatttgatagcagagcagcccgtgagcgaggtggagact

SEQ ID NO: 158624 - DNA, 89 bp, Homo sapiens
acggacccgcggttcctcatcctcctgggtgaatattacttcagtgtagaaaatttggaacgagacttctttcttcggggaaagatgga

SEQ ID NO: 158625 - DNA, 75 bp, Homo sapiens
gggctcccactgattctacattatggtttttagaacttcagccataaaaatgggcagaattttccttgatcatat

SEQ ID NO: 158626 - DNA, 83 bp, Homo sapiens
cttctccggacagaggaacatctgtaccctctcaacgaactgtggctgcaccatctgtcttcatcttcccgccatctgatgag

SEQ ID NO: 158627 - DNA, 100 bp, Homo sapiens
atggcagccagtcagtggtggaggaatggaagttggatacactttgtgacttgtacgagacactgaccattacacaggctgttatttttctcaatacgag

SEQ ID NO: 158628 - DNA, 100 bp, Homo sapiens
ctgttaaggaactcgatttatatttggcatactttgtgcatgcagcagatcggcttcagctccccaggaatatgattgaaaacagcatgtttgaggaaga

SEQ ID NO: 158629 - DNA, 100 bp, Homo sapiens
gcctggtgcagatcatctacgacgagaaccggacagacagtctagcagtgcttccttggagaccctgttagcacttcttcaggcagaaggggccaagatt

SEQ ID NO: 158630 - DNA, 82 bp, Homo sapiens
tgagccggccgagcggcgacggaccgcgaggagccttcacgtaaatgggtccagtcatgcctcccagtaagaagccagaaag

SEQ ID NO: 158631 - DNA, 74 bp, Homo sapiens
gctgtcggaggagaatgagaccctggtggagtttgctattgtacgaattggagcaatgttggcttatacacctc

SEQ ID NO: 158632 - DNA, 76 bp, Homo sapiens
ggatttctgcccctccaagcttcctttccaggttactccacaggatccgctgaacataggatgttgccacaaaatc

SEQ ID NO: 158633 - DNA, 50 bp, Homo sapiens
cccgctgtctcagcagtctacagcacggccaccagcccctcgggttccaa

SEQ ID NO: 158634 - DNA, 98 bp, Homo sapiens
aagcagtagagaattaccttatacagatggcaagatatggacaactaagtgagaaggtcctgggaactccaacaagggagcaaatcagagaaatgaac

SEQ ID NO: 158635 - DNA, 97 bp, Homo sapiens
ttgcctatagtttcctccaacaactcattcgctatgtggatgaagcccatcagtatatcctggagtttgggaagaggaagaacgtctgagaaataaa

SEQ ID NO: 158636 - DNA, 75 bp, Homo sapiens
gaacagggcagacgttagcgtgagtgatcactctcaatcccggactacagtggtagtggaggccgaagcggcggg

SEQ ID NO: 158637 - DNA, 99 bp, Homo sapiens
ctcaacaccaacatcgatgggcggcggaaaatagcctttgccatcactgccattaagattaagatgttctacgaggagcatttgcacttggacgatgag

SEQ ID NO: 158638 - DNA, 100 bp, Homo sapiens
cttcaaggataagggtgacagcaacagctcggcgggctggaaggcctcgaaaaagcccaagacagcagaagcagacacctccagtgaactagcaaagaaa

SEQ ID NO: 158639 - DNA, 89 bp, Homo sapiens
tagactgcactgctgaacggaatatctgcagcaagtattcgatgtgtcttgctgaatcagggctctcttatccctgccatcgacttaca

SEQ ID NO: 158640 - DNA, 75 bp, Homo sapiens
tggagtgatctatcaggcaccagacttgggatcagttataaactctagagtgatccagctccaggtcccacaggg

SEQ ID NO: 158641 - DNA, 83 bp, Homo sapiens
gaggaagtactgagcctgttggaggaactggcccggaaacaggaggacgagcaggccgggctctcgccatgggtcactgtcgc

SEQ ID NO: 158642 - DNA, 75 bp, Homo sapiens
agacaaatgcgctcagcttcaattgatattgatgatgttaagaagttcaaaccgggttacctggaagctactctt

SEQ ID NO: 158643 - DNA, 100 bp, Homo sapiens
taattgttccaaatggagataatgtatttgctgcagtcaagacgagattgaggagctgcgggccgagatgctggagatgcgggacgtctatatggaggag

SEQ ID NO: 158644 - DNA, 137 bp, Homo sapiens
tattgaaaaaatcgtctgtctcctgttttctaggtggaaagaatctgatgagccttttaggcctgttcaggagcccaggcttgtgtgctcgtgttctctaccacagatagggaatcttttgaagcagtttccagttg

SEQ ID NO: 158645 - DNA, 75 bp, Homo sapiens
tcgccacttactttaatgagaagatctccattcctgaggaggaggtctatgaaaattatcctacttatgatttaa

SEQ ID NO: 158646 - DNA, 88 bp, Homo sapiens
aacaaagacaaactggaggaaacctctggactgaaaattcttcaaaccggagtcgggtcggccctcctggtgagatcccatcacgtcc

SEQ ID NO: 158647 - DNA, 82 bp, Homo sapiens
atggagtccacagccactgccgccgtcgccgcggagctggtttctgccgacaaaatccacattcatctcaatggaaggatcc

SEQ ID NO: 158648 - DNA, 82 bp, Homo sapiens
gtgagggtgtacaaatacccctttgaattaattatggcttactgccaaatctgtcgaaagggagataatgaagaactgcttc

SEQ ID NO: 158649 - DNA, 100 bp, Homo sapiens
gaataaccctgcagaaaatggagatgccaaaacagaccaggtaatttcatctgtgccaaagcctccagaggacaagccagaagatgtacatacaagtcat

SEQ ID NO: 158650 - DNA, 78 bp, Homo sapiens
tcgggcctgtggaagaagcgccgcgcacggacttcggcagaggaggccccgtgtgggccgcggcccggccctcaccat

SEQ ID NO: 158651 - DNA, 100 bp, Homo sapiens
gcctcatcaacagccccctccctaccctctgatgcaccaccagatgccaccacctcatccaccccagccagactattgtgtcaaagaatgcactgcagta

SEQ ID NO: 158652 - DNA, 83 bp, Homo sapiens
agcgatggcatagtaaatgaaaacttgggagtggacatccgccataacaaggaccgaaaggttcggcgcaaggagcccaagag

SEQ ID NO: 158653 - DNA, 48 bp, Homo sapiens
tgaaataccagagtcaggcccggaagatgcttgctctgtcaaggcaca

SEQ ID NO: 158654 - DNA, 80 bp, Homo sapiens
cccgggtcatctccagatgctagggttatgggttgacctgacagttcaagaaaaggagaaatatcttaatgtgtctcgct

SEQ ID NO: 158655 - DNA, 100 bp, Homo sapiens
tcctggtgtttcatcatatatacgactaagatatcagatagtaatgatgacactgaagatgtttcactgtttgatgcggaagaggagacgactaatagac

SEQ ID NO: 158656 - DNA, 100 bp, Homo sapiens
tgcagctggagcagtggcgtttggaggagactcgcaattctgtggtgttcttggtcacacatttatggagtttctgaagggcagtggagattactgccag

SEQ ID NO: 158657 - DNA, 96 bp, Homo sapiens
agaagatcgaaaattaaacctcaggttgaagttcatgagttcgcccagcctcagtgacctgggcaagagagagccggccgccgccgcggacgagcg

SEQ ID NO: 158658 - DNA, 100 bp, Homo sapiens
cgggagatcccaggcggtgacagagtggagccatggctagaggtgtcatggagaaactccagctgggcccagagattctgcagcgggaaaatccaaggct

SEQ ID NO: 158659 - DNA, 101 bp, Homo sapiens
ggtttgcctgaatccatcattgcagctgcatgttcaagaagtggccggagagttctgcatgttgattcatttattgccaaaccctgtgcactctgtattgg

SEQ ID NO: 158660 - DNA, 90 bp, Homo sapiens
cggcggctcagttgtccatgaccctgaaggtccaggagtacccgaccctcaaggtgagaagccctaccactgcaactgggacggctgcgg

SEQ ID NO: 158661 - DNA, 100 bp, Homo sapiens
tatcttcatggtgcggctcatcttcgagagcttgtacctccttttaaacctcaagtaacatctgagacagatactagatattttgatgaagaatttacag

SEQ ID NO: 158662 - DNA, 98 bp, Homo sapiens
ggagacatggaccgcggcgagcaagaacttgatggagagtttggattcattgctttgtgcagaaggttctgaaagtctgaagagtttatgtctgaaac

SEQ ID NO: 158663 - DNA, 80 bp, Homo sapiens
gggcatcatgaattcgtttgtgaacgacattttcgagcgcatcgcagggtatacagggagctaccctgtgtttctgagac

SEQ ID NO: 158664 - DNA, 83 bp, Homo sapiens
cccagcggccgccgagacagcgggagccggcgtgcgagcggcaggtgtcgtgaaaactacccctaaaagccaaaatgggaaag

SEQ ID NO: 158665 - DNA, 100 bp, Homo sapiens
gcagccctttgcgcagccgccgggaccctggcccctgtcgagtgttctaagaacggaagcatctgggctggatggaatttagcatcaagcagagtcccct

SEQ ID NO: 158666 - DNA, 75 bp, Homo sapiens
ctacttgaagatagccatcagccgctacgtgactcttttctccagactctgatgccagtatggactggagatgat

SEQ ID NO: 158667 - DNA, 95 bp, Homo sapiens
cctccggcgcagcccggaaatgtccggcaagatcgagaaagcagggtgcaacaccggaggatttcagcaacctcccacctgaacaaagaaggaaa

SEQ ID NO: 158668 - DNA, 100 bp, Homo sapiens
tccagacagtttagcagaacagcctccgcggctccggggagaaggtgcaatggatgagcttcatagtctggatccaagaaggcaagagttattggaagct

SEQ ID NO: 158669 - DNA, 82 bp, Homo sapiens
tcttccgtcaatttcgcggaattctccaagaagtgttcggagagatggaagagtatttgatttctgacactggaggacaaca

SEQ ID NO: 158670 - DNA, 75 bp, Homo sapiens
ctccagggagcagctcctcctccagccactggctgccagaaactcattgaagtggacgatgaacgcaaacttcgt

SEQ ID NO: 158671 - DNA, 96 bp, Homo sapiens
catctcaccaagaagctgctaaaccgggatatccagagagaactcgatgccaccgcaacggtattggcgaaccggcaggatgaaagtgagcagtcc

SEQ ID NO: 158672 - DNA, 82 bp, Homo sapiens
aggagaaggataagtcgaaggggaaggcgcctgaagaggacgaagtctctgctttctatccgtcaagatgataaagtcgtgt

SEQ ID NO: 158673 - DNA, 90 bp, Homo sapiens
cacaaagtcaagagacagcgattggacagaatttgtgaagtctaacaaagtgccagtggtgcagcaccctcaccatgtccaccccctcac

SEQ ID NO: 158674 - DNA, 90 bp, Homo sapiens
gccaggtggaggtcaatatcacagagtgtgaacatggctacgcctcttcattcccgtccatgccgagcccccgactgcagcattcaaagc

SEQ ID NO: 158675 - DNA, 100 bp, Homo sapiens
tggatgtttgcgacatcccagagagcttccagaagatcatgatgcagccgtccttttggatttctttttaataatgtgtgacccttcacctttgatcccc

SEQ ID NO: 158676 - DNA, 78 bp, Homo sapiens
aaagctcaccctcccgagttgaaaaaatctccaagacgacatagatccacatctccttccccttctcgactgaaagaa

SEQ ID NO: 158677 - DNA, 73 bp, Homo sapiens
tgaaggcatctctcatcctcgtcttgaaaccctgaatctcaaagaacacacatgcaggacttgaaagatgtta

SEQ ID NO: 158678 - DNA, 83 bp, Homo sapiens
tgaaggtgttcttcggaatagaaagtcacaccattataagaaacattaccctaatgaggcaagaaaattggatgtatattttg

SEQ ID NO: 158679 - DNA, 75 bp, Homo sapiens
gagacgtcgctgaggggcttgcctgaagcgagggctatttgaactgctgggacctgaaggacttgaacttattga

SEQ ID NO: 158680 - DNA, 105 bp, Homo sapiens
gagcacaaaagagtctccgcggtggaggtctgcgttgctcttgcttttcctcgctggggtgtacgcttagaccatgctcagcctccaagcagccttgtcatcgac

SEQ ID NO: 158681 - DNA, 96 bp, Homo sapiens
ctggaattgatctcgccaaaaaggacatctttggagccagaagacttgcactatctgccagatgctgcttcctaaccagtgcagttatgcatcaca

SEQ ID NO: 158682 - DNA, 97 bp, Homo sapiens
gataatatcaaggacatcaggacaccgggagtgggagagattggactgggagactcagcagggggctctgccctttgatgacgacaacctccgccag

SEQ ID NO: 158683 - DNA, 74 bp, Homo sapiens
tcctgattacgatgctttggatgttgccaacaaaattgcttatgcccgtatagagggggatatgatagtctgcg

SEQ ID NO: 158684 - DNA, 100 bp, Homo sapiens
cccgacttgaagtggaaaatcaagctaagcgcctactagagcagggtttggagactcagatggagtcttgttctgttgcccaggctcactgcaacctccg

SEQ ID NO: 158685 - DNA, 51 bp, Homo sapiens
cgtggagtgaaggtccctcagcggcgcatccgagtgaagcctgacaggacc

SEQ ID NO: 158686 - DNA, 101 bp, Homo sapiens
gggacatctgaaagccaggaaatgtgccggtggtggtgtgcacattgagccccggtatagacagttcccccagctgaccagatcccaggtgttccagagcg

SEQ ID NO: 158687 - DNA, 100 bp, Homo sapiens
atcttcccagttcatcatggcttcaacatccaggaaaattcacgaattgtgagagtaagagttatagccggaataggccttgccaagaaggatatattgg

SEQ ID NO: 158688 - DNA, 101 bp, Homo sapiens
tttcaacatgcctctgacaatctctagtagcaactaagaggtctttcttggctctatgagaacctggtgggattcctgaagataaagtccacaaaaatgaa

SEQ ID NO: 158689 - DNA, 100 bp, Homo sapiens
tccctgggcctcggagacgctgacagatgatgccaccagtccccatttctcaacacgtcatgaagggtccttccaagttcctgtcctgtgtgctgtaatg

SEQ ID NO: 158690 - DNA, 75 bp, Homo sapiens
gcttggcagcccagcgggacccagggagaaacaggggggcgagaagagaaacagccacctcggtggacaaaggcg

SEQ ID NO: 158691 - DNA, 75 bp, Homo sapiens
gaatttttagctaatattggaacaagcgttcagaagatcacagaagaactgcagcttcctggggagcagtttcac

SEQ ID NO: 158692 - DNA, 90 bp, Homo sapiens
tatctgataggctcaggagacaaccccactatcgtgcagacttaattcagtgcacaaatgagatgaatgtgaacatcccacagttggcag

SEQ ID NO: 158693 - DNA, 100 bp, Homo sapiens
cgcggagtcgagacctacccgaacgacgcgggcgagcggggctttggacgccggtggagacgcaggcgaggagtacaagcgcaagctagccagagtttcc

SEQ ID NO: 158694 - DNA, 100 bp, Homo sapiens
cttactccctctttaagattgcgtacccactgcagagtgctgaagacggggtagccacgagagcttggggcttccttggtcgcacccaccacctgcctgc

SEQ ID NO: 158695 - DNA, 100 bp, Homo sapiens
cctgctgtccgcgtcctactccgccttcgagatgaaggagttgccgcagctggtggcctcagtcatcgagagaattgccagcacaacacggaggggccac

SEQ ID NO: 158696 - DNA, 122 bp, Homo sapiens
acctcgtggacaagtttgcagatcgggagcgcaaggtcgccctcaaggccatgatcaaaacccgcttacaaacacgcagatggcaagaagattgatggcaggagggtccttgtggacgtgga

SEQ ID NO: 158697 - DNA, 75 bp, Homo sapiens
aaaaaataaaaaaaaagccaaaaagataaaagcccggatgaacttcaggaagggaaaaggccgaggcatcagcgt

SEQ ID NO: 158698 - DNA, 100 bp, Homo sapiens
gggagcgcggggcgacgctggctgcagggacccggtgacagcgtgagaggatatccgacatgaagccagtgacttcccatgtagagtggccaagcttcct

SEQ ID NO: 158699 - DNA, 100 bp, Homo sapiens
gctcttcctggactcctgagcagaggtgattttacaacgagatgctgctctccatagggatgctcatgctgtcagccacacaagtctacaccatcttgac

SEQ ID NO: 158700 - DNA, 100 bp, Homo sapiens
tatttctgttgaattgtatttagtaactcaaaaggcatataccaagctgtcagaagcagcttcatttaaaagtttcaccagtgatcattaaagaatgggc

SEQ ID NO: 158701 - DNA, 75 bp, Homo sapiens
cgcggcccgcgcgcagccggccgggctccacgtgttccccacgtttgtggcgtacgagctcacggtgctggtgtt

SEQ ID NO: 158702 - DNA, 100 bp, Homo sapiens
aaagcttttggacattcctgggggttatgtaccgaaggactctaccgtgtcagcgggaataaaactgaccaagacaatattcaaaagcagtttgatcaag

SEQ ID NO: 158703 - DNA, 155 bp, Homo sapiens
gtcccccgtagcagcgcaggccgggaagcttctgcgagccctagcgctgcggccccgcttcctggcggccgggtcccagcaacaaactaccaacactgtagaggagcccctggatcttatcaggctcagcctagatgagcgaatttatgtgaaaa

SEQ ID NO: 158704 - DNA, 102 bp, Homo sapiens
cctggagcctcagttggaagcagccgatccagcctgcggagcctgtggggcagacaggccgacggtcgcaaggtcctacggtcaagcatccgggagtttcta

SEQ ID NO: 158705 - DNA, 74 bp, Homo sapiens
ccgggctgagaggagcgtggctgtctcctctctccgccatggtacaccaggggttggaaaaaccacactaggca

SEQ ID NO: 158706 - DNA, 100 bp, Homo sapiens
ctttttccaaaagaggagctcaaaagagaaagttcatctagaaatctcaaagccatgtctcagatataatgaagatctggaacttgaagatgccattcat

SEQ ID NO: 158707 - DNA, 100 bp, Homo sapiens
cttctccactgttcctggaggaatccgagaagagcagagcggagggagccccagacacggagagaagtttgctgaggaatgccttcaagcacaaagtgat

SEQ ID NO: 158708 - DNA, 100 bp, Homo sapiens
acagaaattctggaacacctatatggtgctgcagggtgcacagctgatcgccgtggcctcctcggaccccgcggcggcgggcgtggatgggtcgccactc

SEQ ID NO: 158709 - DNA, 74 bp, Homo sapiens
caagctctgtgattggtggtcgcttggggtgatcatgtatgagatgctcatcgtttaattggttggggtcagat

SEQ ID NO: 158710 - DNA, 88 bp, Homo sapiens
gttaaggattccaagtaactcttatttgatgaataatacggcagctagtccaatgtctactgcaacttcaagtagtggaaggagtaca

SEQ ID NO: 158711 - DNA, 100 bp, Homo sapiens
aggagactgtggaccatgctctcgcacatcagttatttcctgcagatgctctttcagaacaaagggtttcgtgcacctgaagttgccagaggaaatgtca

SEQ ID NO: 158712 - DNA, 82 bp, Homo sapiens
cgtgaagctaatcaagcaattaatcccaagttgcttcagttggtcgaagacagaggttcagtctgcgaaacttgtatctgtt

SEQ ID NO: 158713 - DNA, 90 bp, Homo sapiens
atttaagaactgaatgtgcaacttgcaagggaactggagacaatgaaaatcttgtcagctacgagtcctcggcggaaatcctgcctcata

SEQ ID NO: 158714 - DNA, 50 bp, Homo sapiens
ccgagcaggctgagcgatacgacgggtcctatccttcccccaaagctgga

SEQ ID NO: 158715 - DNA, 82 bp, Homo sapiens
aggaacaagccatggagggtcaaagaaactcctggttgagctcaaagttattttacatttacctctgtgagtgtcagtttga

SEQ ID NO: 158716 - DNA, 113 bp, Homo sapiens
tcgaggtgatgagaaacggaaaaataaaggcacttcgttgtggaagctgatcgaggaagcctaagcaggctctgtgaagtgggaatagtggtatttgagtcaaggtttgctta

SEQ ID NO: 158717 - DNA, 83 bp, Homo sapiens
ggagaggatccaggaggaggagttgcagagtaccataacagcttgggggaaagaccatgaaaaagatgcttttgaacatattg

SEQ ID NO: 158718 - DNA, 98 bp, Homo sapiens
gggacagcgagcccttcaccctggtggagcgagacgcttatgttcctgaggaagaattgaaggcagcagaaatagatgaagagcacgtggaggatgac

SEQ ID NO: 158719 - DNA, 90 bp, Homo sapiens
gctcctgtctccgatgaggacgaaggagaatgcagttgaaactaattttgtggatagagaaactgttggaactgctttacaaagtatttt

SEQ ID NO: 158720 - DNA, 140 bp, Homo sapiens
gggcaagaagaggcacgagatgccccctcacatctatgccatcacagacaccgcctacaggagtatgatgcaaggtctggtccttgcactcctgtttccaagcatggcgagcatggcggctataggcagctgctcgaaag

SEQ ID NO: 158721 - DNA, 120 bp, Homo sapiens
cagcgcccgcgccccgccgctgagccgtcgcggagccgcgcagccctcggagcacgctcaaggagttatgaccactcagaaaattctgatttggtctttggtggccgcacaggaaatgag

SEQ ID NO: 158722 - DNA, 82 bp, Homo sapiens
ggctctgatctgtgcgacagaggctgaaatctctttaatgatggagggaagcaggcagacgcgagtgtctcggccatacaag

SEQ ID NO: 158723 - DNA, 95 bp, Homo sapiens
gggccttactccttcacagatcggcggccttctgatctgtttaccacgtgagcaagcagctcggttctgtgcagagataaagtcccccaaatatg

SEQ ID NO: 158724 - DNA, 82 bp, Homo sapiens
ctgagcctgcagccggccctgccgccctgaccctctattctgcaccctgtgagccaccgagactgaaccaaacccaggaagc

SEQ ID NO: 158725 - DNA, 76 bp, Homo sapiens
actacgaacaatggggaaagcttacagactgtgtggtattcagaaacgtgaagccagcaattgtttcgcaattcgg

SEQ ID NO: 158726 - DNA, 51 bp, Homo sapiens
gggctgaagcgactgagtccgcgatggagctggatcatcattgaactaaaa

SEQ ID NO: 158727 - DNA, 75 bp, Homo sapiens
ccagaggtggggactgttgttggaggaacactttccaggtggctggctgcaagatgccctcagcagagcaaagtc

SEQ ID NO: 158728 - DNA, 82 bp, Homo sapiens
aggcgagccctggtggaggaagaggtctgtctgctatcagctatgccgctgcccgttgcgctgcagacccgcttggccaaga

SEQ ID NO: 158729 - DNA, 50 bp, Homo sapiens
gtgtaccactgtggatgaagcaggcatacaagaattaaattctgaataag

SEQ ID NO: 158730 - DNA, 83 bp, Homo sapiens
cactcctggacaggatggattgccagggcttcctggcccgaaaggagagcctgaattgaatgatctggcacgggaccctccag

SEQ ID NO: 158731 - DNA, 83 bp, Homo sapiens
ccttccacgtcatccgcatcaacaagatgttgtcctgtgctggggctgacaggatccagctggggaaaaccgtgcattacctg

SEQ ID NO: 158732 - DNA, 80 bp, Homo sapiens
cctcccaaagtgctggaattacaggagcagtgaggagaatgaataccttccaagaccagagtggcagctccagtaataga

SEQ ID NO: 158733 - DNA, 51 bp, Homo sapiens
ccaaagtttgcaacaatcagtcagaattctgcttggtcagaatcgtgatgg

SEQ ID NO: 158734 - DNA, 88 bp, Homo sapiens
tgcggagttcataatgaataacacaggagaatggataaggcaaaacggaggctgggctttcagtccagtgtaaagctgttggagcgcg

SEQ ID NO: 158735 - DNA, 89 bp, Homo sapiens
ggccaatcatcaagacaagccagcagctcgctcagtacaagagtttacaagtccttccactttctctctgaggcagaaagagcaagggt

SEQ ID NO: 158736 - DNA, 75 bp, Homo sapiens
ggctgtcatataactcctgagaatagtggttcttaactctcgtggggtagagcagcggctgccatgctcttctgt

SEQ ID NO: 158737 - DNA, 51 bp, Homo sapiens
gctagaagtacataagaccttatttgaatcctgctgcatcacagaagctgg

SEQ ID NO: 158738 - DNA, 74 bp, Homo sapiens
aaaatgcgctcgggctggaccagcagtttccctgaaacctgggctcttgaagacgcatcactggagcagatgga

SEQ ID NO: 158739 - DNA, 50 bp, Homo sapiens
aggaccccagcagcacttcctggaagaataagatgctcccaagtcccttg

SEQ ID NO: 158740 - DNA, 100 bp, Homo sapiens
tcgcggtgggtcctcgcttgcagttcagcgaccacggagaggcagatgcgaaccagaacaatgggacctcctctcaggacacagcggtgactgactccaa

SEQ ID NO: 158741 - DNA, 75 bp, Homo sapiens
gaacagaccaagacacgacatctagccctgaatctgcagcttctgcagaaagccgtcattacacctgattttgaa

SEQ ID NO: 158742 - DNA, 75 bp, Homo sapiens
gagcaacttgctaatggcaggcattttacaagctgtgtgttctcatttcacccaaaacctttggacagtgcaggg

SEQ ID NO: 158743 - DNA, 82 bp, Homo sapiens
tcgcatctgggttttacagcacttggccaagctagatgtcaaggctactgggaacgttatttggaaacattcctgtggaaaa

SEQ ID NO: 158744 - DNA, 83 bp, Homo sapiens
tggaaagaaaccatgtgctgaaatgtttgacgacactgatggtttgaccccaagggcctgccagggacccggcgcgtcctcgg

SEQ ID NO: 158745 - DNA, 100 bp, Homo sapiens
cagtcgtgcatgttcttggtgaagtcggccagcctgagcaagcggaggacctacgccggcctggctctaagcgaaagacatgaggcctcagcctgaaatg

SEQ ID NO: 158746 - DNA, 100 bp, Homo sapiens
gtcagccatgaacggatggatgtgatgcctgctagccaaaagggcaaaacccatttatggcggttggctgctcctggctccagatgggaccgactttgac

SEQ ID NO: 158747 - DNA, 82 bp, Homo sapiens
atcgggtggagtgtaggtcatatcgccgcgggccatgaagcccccaggaggagaatcgagcaatctttttggaagtccagaa

SEQ ID NO: 158748 - DNA, 88 bp, Homo sapiens
ttcctgcaccctggggctcctgaaactcacatgtttgggatatgagattgaaaatgacgactcggaattttcctgagagagaagtacc

SEQ ID NO: 158749 - DNA, 83 bp, Homo sapiens
ggcggatgccctgcagtacctgcagaaggtctctggagacatcttcagcagctgcctgtggaggaaccgattgtgtccacaga

SEQ ID NO: 158750 - DNA, 104 bp, Homo sapiens
cggagctgccggcggcatgatccgacacgccggggcgcccgcgcgcggggaccccacgggtaagactttgaccccgacgcaggcttcagtgattgccgcggatc

SEQ ID NO: 158751 - DNA, 100 bp, Homo sapiens
ttgaacaaatgtagggatgaactagtgagaacaacagcacaatacgaccaggcgtcaaccaagctggaatttaccatgcaagaagctgtgcaatgtttac

SEQ ID NO: 158752 - DNA, 107 bp, Homo sapiens
ccgcgtcttcctcaaggtggggttcggggggccaccgaatcgctgtcacgccggcagggggatatgagactttctactcggaatatcctgagtgttgcgtggatgta

SEQ ID NO: 158753 - DNA, 75 bp, Homo sapiens
ggagcagtggcgtttggaggagactcgagagcatcagtgatgtcacgtttggagcaggggtcagttacatcggga

SEQ ID NO: 158754 - DNA, 82 bp, Homo sapiens
cgacaagccgctggcagccgcggatctcaccgccgctcagggcctggtctccaagtcctctcctaagaagcctcgtggacgt

SEQ ID NO: 158755 - DNA, 82 bp, Homo sapiens
cccggcccggagcccccagcgcagcggccgcggagtcagagtcagaagcaaaggtagatggagagactgcatcggacagtga

SEQ ID NO: 158756 - DNA, 74 bp, Homo sapiens
atttcggctctcatgttcctccatgataaaggaatcatctatagaaagtttcctacactactgaggtttagggg

SEQ ID NO: 158757 - DNA, 100 bp, Homo sapiens
tcactgcaacctccgtctcccagatgatgattctgataccgagacgtcaaatgacttgccaaaatttgcagatggaatcaaggccagaaacagaaatcag

SEQ ID NO: 158758 - DNA, 90 bp, Homo sapiens
cagggccggaagtagagcggaggtggtggcggcggaggctttggcagctcgggactgagtgcaagaaacaagtggaagccggtgtctgtg

SEQ ID NO: 158759 - DNA, 90 bp, Homo sapiens
aaaaatctgggaagacttcttcaattctgaaagataaaggtttgtgtgctggagaggcaaatatttgacttccttggatatcagtgggca

SEQ ID NO: 158760 - DNA, 101 bp, Homo sapiens
gctgcagtaactacattcactcaggacaggcagataaggctaattcacctaaataagattgatcctcatgctccaaatgaaatgctctatgggcgaatagg

SEQ ID NO: 158761 - DNA, 75 bp, Homo sapiens
gtaccggctcacgggaaactctaaatacatctaccgagctcaaagctttctacaagttctgattaaagtcagaaa

SEQ ID NO: 158762 - DNA, 88 bp, Homo sapiens
acgattcgggcctcatccgccgccggaggctgcagggggggccctcagcctcttggccttgaacgggctgttcatcttgattcacaaa

SEQ ID NO: 158763 - DNA, 97 bp, Homo sapiens
ccaaaagaaggacctggaggaggatgagagcgttactgctgcacacctaaagtcaagggcagcacacttctgcttttgttccttcatcaggacgaat

SEQ ID NO: 158764 - DNA, 82 bp, Homo sapiens
tcggcgcctgttctcgggctgtttggcgggttttaaaatcaaagatgggaaaatcggagaaaattgcccttccccatggcca

SEQ ID NO: 158765 - DNA, 90 bp, Homo sapiens
cttcagtcttaccaagaggctttgcagcagcaggtgctggagaatctggtaaaagcaccattgtgaagcagatgaggatcctgcatgtta

SEQ ID NO: 158766 - DNA, 98 bp, Homo sapiens
acagaaaagatggattcagttatttaaggcccaagaggatgctgagaaacttcggtccgttgtgatgccaatggaaaaggaaattgcagctttgaagg

SEQ ID NO: 158767 - DNA, 100 bp, Homo sapiens
tccagatgaaagagaagtttctggtcactccccaggattatgcgcggtatgtgacgcattcccagactcttcagccaactgagcatcagcttcttcacag

SEQ ID NO: 158768 - DNA, 100 bp, Homo sapiens
ttcttcaaatccctccactctcttcaactgcaactctgagcaaggaaagagggcagaggggcttctcccaggaggagctggagacgtgcatgattaacca

SEQ ID NO: 158769 - DNA, 95 bp, Homo sapiens
tgcgcgctgctcttccccgcggagcccgcgcagtccgcgcagccctcatcgcaactgggcccgcgcgcaggcagcggaggaggagaaagagatgg

SEQ ID NO: 158770 - DNA, 100 bp, Homo sapiens
gagatcattgatacaggatctgattatgaagatcaggtagagttggctttgtgggacacagctgggcaggaagattatgatcgcctgaggcccctctcct

SEQ ID NO: 158771 - DNA, 100 bp, Homo sapiens
aaggaagccacgtgcagacatctacaaccttcgatctcctgacgacggtttccaacctagatgaggaaagccgatggacagtccactacactgccccgtg

SEQ ID NO: 158772 - DNA, 50 bp, Homo sapiens
gttgaggagcccccggactacaggtggaaccgtcccaaaatgtcccttgc

SEQ ID NO: 158773 - DNA, 83 bp, Homo sapiens
gctggcgctagtctgaccctccgccaggcaaaaggaagcttataggctttatactgtggtgcctcgcctggtcaagtttgtag

SEQ ID NO: 158774 - DNA, 100 bp, Homo sapiens
catcaactttgtcaacttgtggcagtttgaagagaacacatgaagaagaggatgattttggaaccatgcaagtggcgactgcacagaatggctgacttga

SEQ ID NO: 158775 - DNA, 82 bp, Homo sapiens
gatatcgacgtcgtgatccagaagtccagagctgaggactgcctgtttgcagttgatattcactgatggactccaaagaatc

SEQ ID NO: 158776 - DNA, 83 bp, Homo sapiens
agggaccacggtcaccgtctcctcagaacattgatgatggcacctcagatcgcccctacagccatgctctggtggctggaatt

SEQ ID NO: 158777 - DNA, 75 bp, Homo sapiens
cgtcaggcagttggttgggacccgctccaaccctcgactatggctgtgatggcgatgaggacgacggctactgaa

SEQ ID NO: 158778 - DNA, 80 bp, Homo sapiens
aagcacgggaagaagcagctggacccgctcaccatctacggcatccggtgctaccggctctctgaccagttccacgacat

SEQ ID NO: 158779 - DNA, 100 bp, Homo sapiens
tgccaatctctgcttgaaaggagaagacttggattctcagctgggctcaaaatgcagagaactcaaagatattcatttcggccagtgttacaagatctca

SEQ ID NO: 158780 - DNA, 75 bp, Homo sapiens
cttcccggagcatgccctccagctcataccgggatatgccaggtgagccaccagctgggcagcatcatggacctc

SEQ ID NO: 158781 - DNA, 74 bp, Homo sapiens
caccgaggagcagtggccctctatgaccaagctgccagactataagctctattaccaggttttaaacttcgcca

SEQ ID NO: 158782 - DNA, 75 bp, Homo sapiens
aaaccaccgcatcagatctgcgctgcggcagaggcagacttaagcccttagatgtggcgtttatgaaggcaatac

SEQ ID NO: 158783 - DNA, 75 bp, Homo sapiens
cctgatgcaggccatcaagtgtgtggtggtgggagacggctcaggtacctgacaatgatgagcagtttgtaccag

SEQ ID NO: 158784 - DNA, 76 bp, Homo sapiens
ccagatgctgaaccactacgcaaagacagcctccttcaccaccaaggtatttggcaccaatgtgatggtgacagtg

SEQ ID NO: 158785 - DNA, 98 bp, Homo sapiens
gaactgcaccaagatcctgggcaacctggactttctgatcaccggcctcaatggcctggagatgcccaaagatgagctgcccaaccataactgcatta

SEQ ID NO: 158786 - DNA, 83 bp, Homo sapiens
cggagcagtatttcaatgtggagcattttgaaagcgaagcagaagccgtagaatcagcggcgagcctgttgaaagaacccaca

SEQ ID NO: 158787 - DNA, 100 bp, Homo sapiens
caccctgggttcaggtgatcctcccacttcagcctcttcagtaactgggactacaggtctcattcaggaacgtcgcctgataacactgcaccaccacctc

SEQ ID NO: 158788 - DNA, 100 bp, Homo sapiens
ttccaatatgacgaggactcggagacgtatttctatccctgcccatgtggagataacttctccatcaccaaggcccatctgcccctaggacagagtaaca

SEQ ID NO: 158789 - DNA, 100 bp, Homo sapiens
caagaatgaagccgcagaccctcgtgaacactcgtgaaactgctcaggccatcaagggtatgcatatacgaaaagccacgaagtatctgaaagatgtcac

SEQ ID NO: 158790 - DNA, 95 bp, Homo sapiens
ggcggaggaggaggaggctggagtgggcgcggaggcgaccgccatggcgttcctcaaactccgtgaccagatactccatcttctaaaccaacact

SEQ ID NO: 158791 - DNA, 85 bp, Homo sapiens
cgaggggctccgggtcttccagagcgtgaagatcaagatcgcatcaagatggtgctcatgtggaccagtggtgacgccttcaaga

SEQ ID NO: 158792 - DNA, 75 bp, Homo sapiens
cttggagacacttccgacacgacctctactggccttgcccagcgcctaggatccaaggagctggttctgctggtt

SEQ ID NO: 158793 - DNA, 128 bp, Homo sapiens
cggggcccgcggcggtggcggcgactggccggcggggctgaccacttaccgcagcatccaagtcggccctgacaatgcagatcttcgtgaagactctgactggtaagaccatcaccctcgaggttgag

SEQ ID NO: 158794 - DNA, 75 bp, Homo sapiens
gaatgacagcaagaggcaaaacttcggacatagaggccaaccaacctttggagcttaacattggtatcccttccc

SEQ ID NO: 158795 - DNA, 76 bp, Homo sapiens
ccatcttgttactccctagcagtgtggtaaggtttcagcaagcagatggtggaaattcttcacaaacataatattc

SEQ ID NO: 158796 - DNA, 73 bp, Homo sapiens
aaacatgtggaatcccaatgccgatccatctgtgtgtgctgtggaattcaggatacttgggcattgcctacta

SEQ ID NO: 158797 - DNA, 83 bp, Homo sapiens
gtgggaagtcaggttcttccgccacctcccagccaggcgtccgagctgggccacagcctgaacgagaacgtcctcaagcctgc

SEQ ID NO: 158798 - DNA, 75 bp, Homo sapiens
gaagaagtggtacaggagagaatttgtgatgatgagctgatcttaatcaaaaaatggaatctcactctgtgagtc

SEQ ID NO: 158799 - DNA, 95 bp, Homo sapiens
cgtccaactgacaagcccttgcgcctgcctctccaggatgtctacaaaattggtggtagcctcatggctgcaacctgtgagattagcaacatttt

SEQ ID NO: 158800 - DNA, 100 bp, Homo sapiens
ggaaatcagagacaatgatggggctcttccccagaactacaggggctctggccatcttcgtgggaaacctgtttgacttcttacgcttgacggaatggcg

SEQ ID NO: 158801 - DNA, 98 bp, Homo sapiens
cgggatcgtgaccgagaccgtgaccgagagcgtgaccgagagcgcgaatatcgtcatcgttagaagaactctcccattcctgcaaagcttcctgaacc

SEQ ID NO: 158802 - DNA, 101 bp, Homo sapiens
tgagcccgacccccaggcagctcgccgctccctagcaccttctccagtcgacactctcgcgcccggagctgtatgcaggagctattcttgaagtttgtgga

SEQ ID NO: 158803 - DNA, 100 bp, Homo sapiens
tagcaaggaaaactcaggaccatgatggctcagtttcccacagctatgaatgggggaacacacctgaaactagaggaacagcttatgtggtctatgagga

SEQ ID NO: 158804 - DNA, 83 bp, Homo sapiens
aaagaacatcctctttaacccagttcccaccctcacagtcaggagcggaaagaatgtcggagcgggccgcggatgacgtcagg

SEQ ID NO: 158805 - DNA, 100 bp, Homo sapiens
tactcgagcacgggccattttggaaaagtctcgtctgaagaacccaaagaaccctgggctgtgaatccacactggtgatagaccatacaaatgtgcacac

SEQ ID NO: 158806 - DNA, 51 bp, Homo sapiens
agaggatcaggcgtgtgtccagttctggtatatccgcaccatgtacctggg

SEQ ID NO: 158807 - DNA, 98 bp, Homo sapiens
ctgatcttgaaggtttacacttgtcaacttcctcttcagtcatcagtgtagaggaaggatggtgggaaggtgttctcaacgggaagactggaatgttt

SEQ ID NO: 158808 - DNA, 75 bp, Homo sapiens
tggcggccgacttccagcgggcgcagttcgccgaggccacgcagagctctcgtgctcattcccccatgatcgccg

SEQ ID NO: 158809 - DNA, 88 bp, Homo sapiens
ttgtaaaacctggaacagcagcatcattgtcaaagggacgctcacttgattcccgaccacacaatccgagccttgggacacattgcgg

SEQ ID NO: 158810 - DNA, 75 bp, Homo sapiens
cggggcgggccctgggggtcctcagcgtggtctgcctgctgcactgctttgatggcccactgcgtgaccttggtt

SEQ ID NO: 158811 - DNA, 83 bp, Homo sapiens
caagacaccaagtgagaggccaaccagggaaatcgtggaacacatggtccagcactttaaaacacagatctttggggatcgga

SEQ ID NO: 158812 - DNA, 83 bp, Homo sapiens
cccaggtcaagaagccagtcatcgctgctgtcaatggctatgccaaacctgctcctccaaagccagagcccaagcctaaaaag

SEQ ID NO: 158813 - DNA, 50 bp, Homo sapiens
ctggagctgccagatgtcacgaaggaggtggtggaccgggggctgcagaa

SEQ ID NO: 158814 - DNA, 114 bp, Homo sapiens
caacgccttaacccaaggaagtgactcaaactgtgagaacttcagcggcagtacatacctgtgaaaatgaagagcaaagccttctggatcttttcttgggagtatgccatgatg

SEQ ID NO: 158815 - DNA, 100 bp, Homo sapiens
ctttggagccagcctgctaggggctgaattctgactcagccatttactaactgtgtgaccttaggacggagggtgaacactccaaagaggttattaaacc

SEQ ID NO: 158816 - DNA, 83 bp, Homo sapiens
gacaggacggtcgattggtctgaaattcttgaagagacaggtgagaagccctaccactgcaactgggacggctgcggctggaa

SEQ ID NO: 158817 - DNA, 80 bp, Homo sapiens
agagaaaaggcaacatcctgtcacaggccatgctctggcaaaaacgtttggtgcacctcgatttggaggaagtagggcag

SEQ ID NO: 158818 - DNA, 100 bp, Homo sapiens
tgagcagtgacaattgctaggcggagacagtgcagggaagagagaccttagaaaggatcaggactggcggtacaatggtcagttccgttcaaggaaacac

SEQ ID NO: 158819 - DNA, 90 bp, Homo sapiens
ggaaggggtcctcagagttactggggcacagtatgaaaacccaccacatatctatgcccttgcagataatatgtacagaaacatgatcat

SEQ ID NO: 158820 - DNA, 88 bp, Homo sapiens
ggtccgcggcagggtcccgcatggcggcgcacaggaagcacgattgaagatggatacgtgacaatcccagggaccgctgcactgactt

SEQ ID NO: 158821 - DNA, 82 bp, Homo sapiens
ccttgtggagccggagctgggcgcggattcgccgaggcaccgaggcactcagaggaggacactgcccatctctaagataaga

SEQ ID NO: 158822 - DNA, 124 bp, Homo sapiens
aagcgatggcttcagacagcatatttgagtcatttccttcgtacccacagtgcttcatgagaggtcagcccaaggccaaccccactgtcactctgttcccgccctcctctgaggagctccaagc

SEQ ID NO: 158823 - DNA, 90 bp, Homo sapiens
agagcaaattgagacgtcccgggtcggcggacctgggtgtctgtctgcacacgtcctccagtggcctggacctgcccatgaaggtggtgg

SEQ ID NO: 158824 - DNA, 75 bp, Homo sapiens
gcagccgggccggcccgaccccaccggccatacgcaaattgtggctactaatttgccccctgaagatcaagatgg

SEQ ID NO: 158825 - DNA, 51 bp, Homo sapiens
agccggtctatggactttccgaagacgaggcgaggattaaatccaccacac

SEQ ID NO: 158826 - DNA, 100 bp, Homo sapiens
cccgcggccgcaccttcccgccttctcagttttcggctttgtgagaaaccttaccatcaaacacgatggccagcaacgttaccaacaagacagatcctcg

SEQ ID NO: 158827 - DNA, 109 bp, Homo sapiens
gcaatcttcaagcgctatgccaagaagcgaaatgtgctcattggccattcctacgggttaccacattctcatctggagccaggaggaagccaggacacggaagtgagag

SEQ ID NO: 158828 - DNA, 100 bp, Homo sapiens
aggtcatacagctgatactacccacccccggttacgcctgtcacataaagaaatgagccgtcagactgctacagcattacctaccggtacctcgaagtgt

SEQ ID NO: 158829 - DNA, 87 bp, Homo sapiens
cttggatcaccatggaaacagcaacgttctctatgggcagcaccgtttctatggaacccaaaaagcattccacgcctacgggaaggc

SEQ ID NO: 158830 - DNA, 74 bp, Homo sapiens
tttacctttggaagcctttcctgatggagtctgcacgcaaagcatgggagaattctccaaatgtaagggaaaag

SEQ ID NO: 158831 - DNA, 100 bp, Homo sapiens
cgctactccggacgcaaagctgtcatcgtgaaggaggatttgacagctaaggatattgaagaaattattgatgagctcaaggctggcaaaatcccaaaac

SEQ ID NO: 158832 - DNA, 88 bp, Homo sapiens
accatcatgctgcgcggccttcccatcaccatcacagagagcgatgacagagcgggatgccaccagcttgtccaaagggaagttccag

SEQ ID NO: 158833 - DNA, 74 bp, Homo sapiens
ttggtttacatgagcatctgtggggagaatgaaaactgccctcctggcgtggggtggttctcttcccaaagtgg

SEQ ID NO: 158834 - DNA, 83 bp, Homo sapiens
cagcgacttatgtctgttgcttatacgtatgataatctggctcctaggctatactttggctcccagtggtactgtggataatt

SEQ ID NO: 158835 - DNA, 88 bp, Homo sapiens
gccgcagagcgccgaggaggctttcctgctggtggcaaccgcctacgagacactcaaggggatcatggaagctgataaagatgacaca

SEQ ID NO: 158836 - DNA, 90 bp, Homo sapiens
cccttccttggttacttctatcatggtgctgtggtgtccgcaatgttgccagtgtctgtctgcagattggctacccaactgttgcatcag

SEQ ID NO: 158837 - DNA, 75 bp, Homo sapiens
ttaaggattccaagtaactcttatttgatgcatccaagaagtcagattcaaatccgctgactgaaatacttaagt

SEQ ID NO: 158838 - DNA, 100 bp, Homo sapiens
tggcacctatggacaagtctataagattgaaaaggaagatcaggccaaccccaaagaagaagtgaccaaggaggagtttaaactgaatgaacaacctcgg

SEQ ID NO: 158839 - DNA, 100 bp, Homo sapiens
ggatcttctgccgcaccaggctcatcctgtccatcgtgtgcctgatgatcacgcagctggctggcttcagtggaccaccggttcttcttgatagcagtag

SEQ ID NO: 158840 - DNA, 100 bp, Homo sapiens
tcaggtgctcgccccgcgtcggtgcttcaggagggaatgtggccagaacgagaaagcacaaacgtgcagatatctgatagccctttccgttgcactcaag

SEQ ID NO: 158841 - DNA, 51 bp, Homo sapiens
ctttcaactatatttgagcatacccagtccccaaagctccagagatagatc

SEQ ID NO: 158842 - DNA, 139 bp, Homo sapiens
gaaaacaaaaactgatgaccaagagaatgtgtcagccgatgcaccgagtccagcccaggaaaatggagagatttttgatgaaattgagtcatgaaactgtaaccattgaattgaagaacggaacacaggtccatggaac

SEQ ID NO: 158843 - DNA, 122 bp, Homo sapiens
cggatgccctgcagtacctgcagaaggtctctggagacatcttcagcagaggtcggatccgcagctgcttgcccggttctactatgccgacgaggagctgaaccaggtggccgcggagctgg

SEQ ID NO: 158844 - DNA, 100 bp, Homo sapiens
cgtgaacatgctgatgcaccatgacagacctcagcagggcccaggttccagcccagatcccagcatgtggtcagagctggtgtgactgaagccaacaggt

SEQ ID NO: 158845 - DNA, 117 bp, Homo sapiens
acgcaggcttccaaccccgtcgtctgcacgcagcccaaatccccatccgggacagtgtgcacctcaaatcctacgctatggagtacagaccatgtgcggcagtggctggagtgggcg

SEQ ID NO: 158846 - DNA, 100 bp, Homo sapiens
tggctcagccgcaagtacccgtccatcatagtcaactgcgtggaagagaaggttggtcatcattttatccaagcttgactgtggtacagcatggcattcc

SEQ ID NO: 158847 - DNA, 100 bp, Homo sapiens
ggagtcagctgtgtgtccagaacgtgccatggagacgcttaacgatgcctgtgaggagccaccaacatttgaagctatggagctcattggtaaaccaaaa

SEQ ID NO: 158848 - DNA, 99 bp, Homo sapiens
cttctggcactggcacttgtcctcctgtttctatagaaactgggttggaagtcagagctgcacaaagggaaagggttttggagatcatattcattggag

SEQ ID NO: 158849 - DNA, 76 bp, Homo sapiens
aaagccaggagctcgatgtgcaaattccagttctttgatgaaagtctctattccacccatcaagtctgtgtctgat

SEQ ID NO: 158850 - DNA, 75 bp, Homo sapiens
gaaatgttccaccaggacttgatgaatataatccattctcggattctagaacagactctgagagtgtttccaaag

SEQ ID NO: 158851 - DNA, 54 bp, Homo sapiens
gataactcggaggctgcagcaggaacggagtgctcatctgaggaggcaggacgc

SEQ ID NO: 158852 - DNA, 101 bp, Homo sapiens
ccctgatttcctgcttctccttttcatgagtgttcctgtggtctctgcacctcctttctggggttggcactgatgaagcctgcctgattgagatcctcgct

SEQ ID NO: 158853 - DNA, 75 bp, Homo sapiens
aaacatgaagactttgacaaagcgattaacgtccagggcattttgtcagtgatgctgatctttgccttcttccag

SEQ ID NO: 158854 - DNA, 75 bp, Homo sapiens
atcttgacgaggctgcggtgtctgctgctattctccgagcttcgcaatgacttaaataagctggatggatttggt

SEQ ID NO: 158855 - DNA, 100 bp, Homo sapiens
aagatctcgtacaagatccttctttgacctgatcccaaccttgaagaaagtcctaaaagaaaaaatattacatatgaggaattaaggaataagaacagag

SEQ ID NO: 158856 - DNA, 73 bp, Homo sapiens
aattttttgtggaacagaattggagcagaatcaaactgatggctgaaggcgagttgaaggatatggaacagtt

SEQ ID NO: 158857 - DNA, 75 bp, Homo sapiens
ggcccgtactgcacatcgtggtggtcggatttcaccacaagaagggctgccagggtctctctgtggtggagcaag

SEQ ID NO: 158858 - DNA, 100 bp, Homo sapiens
cttttgatagatgtcataacagtatttggagaactcactgatgaaaagccccatgtgccactcccctgatctgcagcttcggtaggccggtggacctgga

SEQ ID NO: 158859 - DNA, 100 bp, Homo sapiens
aatggtgcgtggctgacaccgtagtgttttcaaaactggatatggccaggatgctatagcattgtcagtctctaagcgaaagacatgaggcctcagcctg

SEQ ID NO: 158860 - DNA, 75 bp, Homo sapiens
tgcagcagctgagaaaggagctcggggactcccccaaagacaagatcctgaccaagatgaagcagcagggtcatg

SEQ ID NO: 158861 - DNA, 124 bp, Homo sapiens
ggcggagagaagaggattccggcgggaactcgactcttggcgccaccgcctcatgcactgtgtaggtgctggagaatctggtaaaagcaccattgtgaagcagatgaggatcctgcatgttaat

SEQ ID NO: 158862 - DNA, 75 bp, Homo sapiens
gtcccagatttttgctcattaacagaaaagaagaggagaatgctaagcagattggatcatcatcgctgccacagt

SEQ ID NO: 158863 - DNA, 82 bp, Homo sapiens
tgaacgagacttttctcagatgttggatatttgcttggaaaaacgtgtgggtacgaccttgtcaccattactttaagtactg

SEQ ID NO: 158864 - DNA, 100 bp, Homo sapiens
gttcgaggccctgcggagctgcttcgccgctgcgccttatgatctcctcattgcgtccccctctgcccactggacttggacttcagatctgaccccagac

SEQ ID NO: 158865 - DNA, 96 bp, Homo sapiens
cgctaccacactctgggacagtgggagatttggaacagctttgagaagagcaagtgggttgccagcgttgatgtggtggagaatgaagaggccagc

SEQ ID NO: 158866 - DNA, 88 bp, Homo sapiens
ttctctggagccccagattcaacccgtgtacgtgcctgtgcctaaattggttgaatctggcgatgtggaacccatggatatggagggc

SEQ ID NO: 158867 - DNA, 50 bp, Homo sapiens
cagcaccggcaagaccaccttcatcagcccggaagcaggagatcattaag

SEQ ID NO: 158868 - DNA, 100 bp, Homo sapiens
aaacagcacagtatatttccttaatctatttaatcacaccctgacctgctttgaacataaccttcagacaaatcttcctattttcaagctgaaagaatct

SEQ ID NO: 158869 - DNA, 83 bp, Homo sapiens
ggggactaaggcgagccggagaccgagcccgaacagcagatctctgttgaggagctggcgcggaatctggtcatcaaggtcaa

SEQ ID NO: 158870 - DNA, 100 bp, Homo sapiens
ctttccaaacttggtgtcttttctacaaactctgtgcctcaacaaccatttctaagtgacccctgaatggttggacagtgattcctgccaaaagtgtgat

SEQ ID NO: 158871 - DNA, 100 bp, Homo sapiens
aaaaaacatttgatttttggaaggatatagttgctgctatacaacacaattataaaatgtcagcttttaaggatcctttcccggagttcagttatgggtg

SEQ ID NO: 158872 - DNA, 100 bp, Homo sapiens
gcacctgcgcgaagctggccaaagcctgcccagacggctcacctgtgcgggatggaacaaaagactgactggagctctcccgtgtcagctcgtagcacag

SEQ ID NO: 158873 - DNA, 121 bp, Homo sapiens
gagatgtgattaatgtattccaccacctccgccagttaagaggaaaaagcagggtggccactgcaacaggtgtggatgtgcctgacaagatgaagagccgaatacctgtggtgctcctggc

SEQ ID NO: 158874 - DNA, 90 bp, Homo sapiens
tttgtattttgtgtggattcctcagagagtgaacttggaatcttggacctcatccaggtgcagattcactttataggaacagcttcagct

SEQ ID NO: 158875 - DNA, 87 bp, Homo sapiens
gccgcggccctgggagctggaggaaccgcggtgtctgctttttcaacgtgggagaaggagttgcacaagatagtttttgatccccgg

SEQ ID NO: 158876 - DNA, 88 bp, Homo sapiens
gcttcgggggtccccgaacgttactggggccgcctcctgcacaagctggagcacgagggactttgaacatgtcggggatcgccctcag

SEQ ID NO: 158877 - DNA, 100 bp, Homo sapiens
ctcgggtggaagaagtggggccatacacctacagacaattggcgggcaacgacctttcttttatccacccaaaggccttgtctgggttgaaagaactcaa

SEQ ID NO: 158878 - DNA, 103 bp, Homo sapiens
tggaagcaatgtttgaacaaactcgaagaacagctgtggaaagaagttgcaaaacactgggcatagaatgtcaagctaaccaggcgtccgctacttcagaaga

SEQ ID NO: 158879 - DNA, 82 bp, Homo sapiens
ggctgtgcagggccccgagccggcccgggtcgaggtctgtcctcccatgactcacctgtgtgagaaaatcatctccacgctg

SEQ ID NO: 158880 - DNA, 100 bp, Homo sapiens
aaagagctggtggcctcaggtgaaaattgctcatgtgcggcctcggtgatgtggatgtgaatgactggagacagcattctatttacaagaacggctactg

SEQ ID NO: 158881 - DNA, 95 bp, Homo sapiens
ggaagagggagtcaccactggacctccaaggaagccacgtgcagacatctacaaccttcgatctcctgacgaggcttcgtgggacacatatgcaa

SEQ ID NO: 158882 - DNA, 97 bp, Homo sapiens
atggactcgagtgtaccgagtacagagggcggcgactggcggcgcgatggacctgaccgggctcctgctggacgaagaaggcaccttctccctcgcc

SEQ ID NO: 158883 - DNA, 115 bp, Homo sapiens
taatgccagagaactacaagaacagagggattctttgactcagaaactacagatctttctctggaatcaaaggactccagctgaaagttaacctccaacccaatgataactactt

SEQ ID NO: 158884 - DNA, 100 bp, Homo sapiens
aaagacaaaaggagattctgatgaagaagttattcaagatggaaaactcaatgtgagtagtgacactgtccagcatggtgtggaaggattaacgtatctc

SEQ ID NO: 158885 - DNA, 128 bp, Homo sapiens
attctttgtagcagacactgcaaatgaagctctcgaggctgctaagagactaaagccctatgagtttgtctctctggaatggctgcaaaagtggttggatgaatcaacacctaccaaacctattgata

SEQ ID NO: 158886 - DNA, 50 bp, Homo sapiens
ctgtaagaagggcggtatcgggttcaagccttgaaaagatcttttgaggt

SEQ ID NO: 158887 - DNA, 100 bp, Homo sapiens
cacgcagctgcacttcgccttccaggatgagaactacctgtttgcagacctgacagacgctgctgcccgcaacgcggagctgctccgccaggccaagcac

SEQ ID NO: 158888 - DNA, 97 bp, Homo sapiens
aatggctgaggaggcggcccgaaaactcctcccagtatcagaagtgactctgaccttggactccaagacctacatcaacagcctggctatattagat

SEQ ID NO: 158889 - DNA, 140 bp, Homo sapiens
agaacattttgtggaattcgtgaaacttgtccgtgccaaatttcctgaacacaccattatgttgccccccagcggtcccggaaaaagcgctgtccctataccaagtaccagatccgcgaactggaacgcgagtttttctt

SEQ ID NO: 158890 - DNA, 82 bp, Homo sapiens
tcagaaccgttcttccctaatattggtgtggcatgcagcattttggaaggaaaattgaagacgtgttcaagaaaacatgaac

SEQ ID NO: 158891 - DNA, 75 bp, Homo sapiens
ggatgaaacgtcaggaatttactacacagattcttggtgccaccattgagaactccaggattgtcctgcagatcg

SEQ ID NO: 158892 - DNA, 75 bp, Homo sapiens
gtgggcagccagggtcggtgaagattcaaccaactctggtgataacatgtatactttaatgaatgcagtacctcc

SEQ ID NO: 158893 - DNA, 75 bp, Homo sapiens
ctgatgggaaaaagatggttgcattactcattgagaacctcaagaaggcatgaagccagcccctgcagtgccgtc

SEQ ID NO: 158894 - DNA, 90 bp, Homo sapiens
gcaaaaatcttagctctctcaatctctgtctgaactggatcataaatgacaggttgaaaacgttagcggaagaacttatgcaaacacagc

SEQ ID NO: 158895 - DNA, 98 bp, Homo sapiens
tctgctccaggaaattcagcctcaaaaccgtcctgctgcttgctgaccaaatgagcagccatggaggaggtggtgattgccggcatgtccgggaagct

SEQ ID NO: 158896 - DNA, 83 bp, Homo sapiens
ctcttcgagcgccgcggacgcgtcatcgagtgtgacgtggtgaaagatggagaaggaggagacaacccgggagctgctgctgc

SEQ ID NO: 158897 - DNA, 128 bp, Homo sapiens
gctgtgcaaagactgctcagaccccaatccaatggtgcgagggctggcgttacggagcatgtgtagcctcagtgagggccccaaggctgttgcagctcctcgacctgatcggttggtcaatcgcttga

SEQ ID NO: 158898 - DNA, 75 bp, Homo sapiens
gctgcggctgctgctggaagtcacctatgaagccatcgtggacggaggtatggaatcttgcggcatccacgagac

SEQ ID NO: 158899 - DNA, 98 bp, Homo sapiens
tgtgttgatcaggagtgaattcacagtctaccatgaattggaaggtacaaagaggatggtgaagctttgctaattttgctaccctcagaaaaagctat

SEQ ID NO: 158900 - DNA, 100 bp, Homo sapiens
tcaaacccagtacagaaggattcacgagaagaaaattggcaagagtggagacaaagagatgagcaggactattagaagacacattagtgcagaagcttcc

SEQ ID NO: 158901 - DNA, 90 bp, Homo sapiens
gccgcaggtgaccccttagcccagctccagtgggcgggtggcaggttgactatagtcaatggggccaatggagccaagtgtatggaaacc

SEQ ID NO: 158902 - DNA, 50 bp, Homo sapiens
ttcgccaaagcgacaggagctaaggtgcttcctggaggggcctgccccac

SEQ ID NO: 158903 - DNA, 82 bp, Homo sapiens
ctttggggagcctaagtcctggcacttccgttccggcgcccctccggtcatcaacccgctgggcaccagcttcccggacgac

SEQ ID NO: 158904 - DNA, 98 bp, Homo sapiens
tgaatatccacaatttagcatcaggcaaaggaagcaccgcacatttttcagctctggattaatcgaattacagctgctagccaggaacatggactgaa

SEQ ID NO: 158905 - DNA, 76 bp, Homo sapiens
gcacaggggccactcagagtcgcccgagaagttgctaggaagaggctcaatgtttgtgttttcaccagatcagttt

SEQ ID NO: 158906 - DNA, 101 bp, Homo sapiens
ctcgaccatgggcagaatcccagctgcccctcccagaacactccatgccactggaactcaggagcgcaggctaaagtaaataatgccagcctgattggact

SEQ ID NO: 158907 - DNA, 50 bp, Homo sapiens
ctacaggaacctgatctccctggttgttcagcacttctggtctcttcagt

SEQ ID NO: 158908 - DNA, 83 bp, Homo sapiens
ctcggctgcgcgctgctcctcgccctcaagttcacctgcaggtgtcgtgaaaactacccctaaaagccaaaatgggaaaggaa

SEQ ID NO: 158909 - DNA, 76 bp, Homo sapiens
ccgccactggaaagctgaaatccttcgcccggaaattcatcaattcgatatctcaatgcctatactggaatagtgc

SEQ ID NO: 158910 - DNA, 75 bp, Homo sapiens
gagcggcggtagcgcaggggagattacttttctggaagcgatggcaagccggcaggtggatattgcaactcaggg

SEQ ID NO: 158911 - DNA, 101 bp, Homo sapiens
ctcattgctccaaactgtgttgtttcagctgtattaggtacaatggtcagttccgttcaaggaaacacatatcccagccaggcgccagtatatagtcctcc

SEQ ID NO: 158912 - DNA, 100 bp, Homo sapiens
cttggatggaccttgcactctagaagggacaatggacttctggctttggccactttacttcctgccaggaggcaagtgaggcctatctggttggcctttt

SEQ ID NO: 158913 - DNA, 82 bp, Homo sapiens
tggggtcctcggcgatgcccgtgtgcgcagccccgcgagtctcaggaaaagcaggtgatattctcagtggagaccaggacaa

SEQ ID NO: 158914 - DNA, 83 bp, Homo sapiens
cagcaggcggccaacctcatccaggagatgggacagcgtctcaatgtaaattggatgaaccttcgggatgctgagacagggaa

SEQ ID NO: 158915 - DNA, 101 bp, Homo sapiens
tggagatccagttcaattatgaatctcaggaacaccaccttctgtcaggtcaaactgtgctgaaaatatccgcaaacacattctgcatactggcaaacatg

SEQ ID NO: 158916 - DNA, 75 bp, Homo sapiens
accaattcttgaatgacatccgagcgaaagagaaagaggttggatggcaagcatgtggtgtttggcaaagtgaaa

SEQ ID NO: 158917 - DNA, 97 bp, Homo sapiens
agtactgacagtagaaatgatatgatgtctgagttcaactccagcaaaacagtgctcaacaggaaccttggattatattttacaacgctgtcagttg

SEQ ID NO: 158918 - DNA, 90 bp, Homo sapiens
ctgacatcgcgacgctgctcaaaacctcgctccggaaaggggacacctggatcatgtatatgaacttctcaacaccattgatgcctgcca

SEQ ID NO: 158919 - DNA, 75 bp, Homo sapiens
tgctcctctatgctggacatcaaatttccaggatggagctatgacattgaagagaggaaggttccaaaacccaag

SEQ ID NO: 158920 - DNA, 48 bp, Homo sapiens
tctaattttcattccttcaaagaaaaccagtctatccaagaccaggca

SEQ ID NO: 158921 - DNA, 96 bp, Homo sapiens
catattagtgcctgtgatggcatctttcatctaacacgttggcagtggcaatgacccctggtcagcctggagtgcctccaaatctgggaactggga

SEQ ID NO: 158922 - DNA, 75 bp, Homo sapiens
cgagaggcagcagcggagacgcggtgctcctcgggcgccaagcgaatgcatgaactgcacccggctcagtgacat

SEQ ID NO: 158923 - DNA, 98 bp, Homo sapiens
agaccatggcacttaagaacattaactaccttctcatcttctacctcagtttctcactgcttatctacataaaaagttgttcttgcagaacatgccag

SEQ ID NO: 158924 - DNA, 100 bp, Homo sapiens
ggcgggggaaagggagacggcgagacgcgcagcgccggcgcccgggagacccaggaggagcccgcagagcagcccgacggccatggaggctgaagagacg

SEQ ID NO: 158925 - DNA, 99 bp, Homo sapiens
cggggacattctgcagcagataatgaccatcaccgaccagagcctggacgaggcccaggccaaatgagtcaagctccagtcctggaaggcagatgtcct

SEQ ID NO: 158926 - DNA, 90 bp, Homo sapiens
ggaaagaagatatctgtgcttttattgagaaacattggacttttttactagggaatagctgagatctgtatctgtggacctgaatgttga

SEQ ID NO: 158927 - DNA, 90 bp, Homo sapiens
agaagaacaaactgacgcagagtaaggctgaccagtgcaccggtcttcagggcttcttggttttccacagctttggtgggggaactggtt

SEQ ID NO: 158928 - DNA, 83 bp, Homo sapiens
cttttgtgaagcggcagctgaggagactccggcgctcgccatggccgacgaaaagcccaagctcaccatggatgatgatatcg

SEQ ID NO: 158929 - DNA, 100 bp, Homo sapiens
cgtcacttgacaagcctatagaatcggcacagaagatctctgatgatctgatgcagaagatcagtactcagaaccgccgggccctagaccttgtagccgc

SEQ ID NO: 158930 - DNA, 100 bp, Homo sapiens
gggcgccccagcgcctctcgcgggcaccgaaagcgcagccgcagggttctctaccctcgagtggtcttatatccagatggccaggctcagatgattcacc

SEQ ID NO: 158931 - DNA, 98 bp, Homo sapiens
gatgaaaaagactgattggctcttcctcaatgcttgtgtggattctgaaggaagatttccattaggtaatttgtttaatcagtgcaagcgaaattaag

SEQ ID NO: 158932 - DNA, 75 bp, Homo sapiens
gaatggctaagttttggacatcgatttcaactagaaacagagcaaatgcagcgttacaatcaaagacttattgag

SEQ ID NO: 158933 - DNA, 90 bp, Homo sapiens
ggcagccaagctcgtggcctgcctctgcgtgcttgttttggagaatcatgtagtgacagatgaagacgaacctgctttgaaacgccagcg

SEQ ID NO: 158934 - DNA, 135 bp, Homo sapiens
ggtgcagccctcctctatgagtactgtcagcaaaagggaatttcctacaagcagtgtggcaaggttcaggaacaagtgcatcccactctctcagctaatgaagagtctctctattatattgaagagctgattttt

SEQ ID NO: 158935 - DNA, 88 bp, Homo sapiens
tatatattgcatcttcctctggctctacagcgtttttcacagcatatggtcctgattatgtgctggaaatcacgccaagctgccggcc

SEQ ID NO: 158936 - DNA, 100 bp, Homo sapiens
acttcctggagaaactgaagcgggacgttgagaagttcagttctgcaagcaagtatgctgctctctctgttgatggtgaagatgaaaatgagggagaaga

SEQ ID NO: 158937 - DNA, 74 bp, Homo sapiens
cggagatggtgcagaagatggaggagggtgagaaggactggcagaaatacgagactgctcggcggctgaaaaaa

SEQ ID NO: 158938 - DNA, 100 bp, Homo sapiens
agcttgagaacgtgtcggtggcgctcgagttcctggaccgcgagagcatcaaactggtgtccatcggtatccagtcggaattctttattaacaccacccg

SEQ ID NO: 158939 - DNA, 88 bp, Homo sapiens
atgaacccagaggtcgtggaggtggccgtggaggcagaggtggcatggggagcactttagtgaataaagaacctgacagtatgctggc

SEQ ID NO: 158940 - DNA, 78 bp, Homo sapiens
taagaccctgcagcgtgactgtttggcgcccagacaccatgtcacaaccctccagaactgacgttggcaggaagtaga

SEQ ID NO: 158941 - DNA, 100 bp, Homo sapiens
aggggcaagacgggttcagttcgtcatggggctgtttggaaagacccaggagaagccgcccaaagaactgctcttcagtaggttacctgcaacatccagg

SEQ ID NO: 158942 - DNA, 100 bp, Homo sapiens
cgacagacgagcagctattcaggtctgatgctacaggacttggtttcagctaagctgatttcagattacactgttaccgagatccctgataccattaatg

SEQ ID NO: 158943 - DNA, 97 bp, Homo sapiens
agagactgagtccagagcagaggaatctatacaaagaagtgatgctggagaattacaggaatcttctctcattggatctacggaatccagaggcagc

SEQ ID NO: 158944 - DNA, 127 bp, Homo sapiens
ccggcgtgccccaccatgtcagacgcagccgtagacaccagctccgaaatcaccaccaagccctgggcgctgcctatggcacagccaagagcggtaccggcattgcggccatgtctgtcatgcggcc

SEQ ID NO: 158945 - DNA, 82 bp, Homo sapiens
aagggaggctccaagacctcatcaacaattaagggtgataaaagaaaatgtggctgaagttacccgaagttcagcttgcagt

SEQ ID NO: 158946 - DNA, 111 bp, Homo sapiens
ctcggctgcgccgcgtgtcctcggagcgcggtccctgtattggtctcctgctcctagagacctgcctagagctggaacgttacctccagagcgagccctgctatgtttcag

SEQ ID NO: 158947 - DNA, 83 bp, Homo sapiens
ccgcagccccgggcacggcggaggcagcggagccctgggccatcggtgatggtaatgcccgaaggagcagacacggtgtccag

SEQ ID NO: 158948 - DNA, 83 bp, Homo sapiens
aatcggaatgtgatcacagagcctatttacccagaagtagtccatatgggaaatcctcattgacgattcaatttgttgaaggc

SEQ ID NO: 158949 - DNA, 98 bp, Homo sapiens
ggttgctggtcaaattccctgagttgaattatcagcttaaaattaaagtgtgcattgacaagtgaggcaggcgactaatcagattgtgatgaattgtg

SEQ ID NO: 158950 - DNA, 100 bp, Homo sapiens
aggccgaggtgggcggatcacctgaggctggtctcgaattcccgacctcaggtaatccacctgccttggccccccaattataggtgtgagccacagcacc

SEQ ID NO: 158951 - DNA, 76 bp, Homo sapiens
ggcccccacagaagcccccgaggctgggcgcacagattgctgaagggatggcatacattgagcgcatgaattccat

SEQ ID NO: 158952 - DNA, 73 bp, Homo sapiens
agatttcactggagctattaccctgttggaggtcaccagtgaaaagttgtgcagagcccaacatgagcttcat

SEQ ID NO: 158953 - DNA, 75 bp, Homo sapiens
tcatgagcgacagcggcgagcagaactacggcgagcggactggatgatgtcctggttggggcacctctctttatg

SEQ ID NO: 158954 - DNA, 100 bp, Homo sapiens
gcatcctccttgaagtatttggctgaggagttttcaatcccaggaagtcgagacaacatgagtgtgattttgatctgttttccaaatgcacccaaagtat

SEQ ID NO: 158955 - DNA, 78 bp, Homo sapiens
ggagcgtcccagctgcgaggaggtgttatctatctgaaaaatatgataacacagtattggcctgatcgagaaacagca

SEQ ID NO: 158956 - DNA, 100 bp, Homo sapiens
ctgcgctatcttccctggatttttcttcaccttttccttactcatgagccagtgagttattctccccacctcagaagtaccagcttttggtgtatcatgc

SEQ ID NO: 158957 - DNA, 89 bp, Homo sapiens
ctccaggccgctccccacggtggtgttagcacctcagcccatcccagctgtcaccactgactaaagaagagaaaactgcggcagagcaa

SEQ ID NO: 158958 - DNA, 90 bp, Homo sapiens
tctggccgcctctgccgcagctggagagtccgatgggtggtccttttattcctgctgctcctgtcaaaactgccttgcctgctggccccc

SEQ ID NO: 158959 - DNA, 100 bp, Homo sapiens
cccacttgcatcaagctgggcatccagggctcgtacttctgctcgcaggtctcggacagcccgggagacgagccctcggagtccccatacgaaagtgcag

SEQ ID NO: 158960 - DNA, 90 bp, Homo sapiens
atggaggccgtgaagaccttcaatagcgaggcaaggcagtttccccggcatgaaccagagtggacttatggcttccagctctccctacag

SEQ ID NO: 158961 - DNA, 100 bp, Homo sapiens
ccggagaagcgagtttcagctggtatctcagatgaagacatcatcaacattactcttcctactggagtccccattcttctggaattggatgaaaacctgc

SEQ ID NO: 158962 - DNA, 100 bp, Homo sapiens
gctgcgcttccgacggggcggccgggggctcagagatccaagtgcgcgccctggcgggtccggaccaaggaaaaatgccagctgtgggacaaggagtgca

SEQ ID NO: 158963 - DNA, 100 bp, Homo sapiens
atgcctcctgcaccaccaactgcttagcacccctggccaaggtcccagcatttgagggtgatgatggattctgtgtgtttgagagcaacgccattgccta

SEQ ID NO: 158964 - DNA, 75 bp, Homo sapiens
tctccttttccctctccctttccctaaggctatgactttgcagccgtcctggagtggttcgcggagcgtgtggac

SEQ ID NO: 158965 - DNA, 101 bp, Homo sapiens
ttagaccaaagccattgcttttgaagttattaaagtctgttggtgcacaaaaagacacttatactatgaaagaggagtcaatcttaagatgtgatactttc

SEQ ID NO: 158966 - DNA, 100 bp, Homo sapiens
cagaatccaaaggcagcgcaaaaaacagccaccgattttgctatgtctctgagctgcgagggagtgaactactttatgtccaagggtatcctggatgatt

SEQ ID NO: 158967 - DNA, 100 bp, Homo sapiens
caacagttaactgcagctcaacagcagcaatatgcattagcagcagctcagcagccacatataggtcagatacttcatactgatgtggtttacttgcatt

SEQ ID NO: 158968 - DNA, 101 bp, Homo sapiens
cgcctgttcccggggcagatccaggttcagatcgcccaggaccacaccgcagcgtaactgcaggcctctcagcgaaaaagggggaaagcaaagacccgggt

SEQ ID NO: 158969 - DNA, 100 bp, Homo sapiens
agaacagggcgctcctgagaccctccagcgctgcctggaggagaatcaagagctccgagtcaggatggctaaaggtgaccccaagaaaccaaagggcaag

SEQ ID NO: 158970 - DNA, 90 bp, Homo sapiens
ggctgcgaggagccggcgcggtcgcagtctccacggcgcaggcccacggtagcgcagccgctctgagacaacagcagttctgtagagagt

SEQ ID NO: 158971 - DNA, 50 bp, Homo sapiens
gcttcagttcatgtatgacgaggaaacaaaccatcaggcctcccagaaag

SEQ ID NO: 158972 - DNA, 75 bp, Homo sapiens
gtgcgatccatgcccatccgaaaggatgatgaagttcaggctgactgtgctgtcctgattgttgctgctggtgtt

SEQ ID NO: 158973 - DNA, 75 bp, Homo sapiens
ctttgatcttgccttggcacgttctgctaaacttcgaaaccctacaaaaatacactttcgggaaatggcctctaa

SEQ ID NO: 158974 - DNA, 95 bp, Homo sapiens
agaaaacggagacgcaggagaagaacaccctgccgaccaaagagacgattgaacaggagaagcaagcaggcgaatcgtaatgaggcgtgcgccgc

SEQ ID NO: 158975 - DNA, 100 bp, Homo sapiens
gagtttcttcatctacaacccgcgcttctggccgcgggaaggagagcttaagagttggacagtggaggaccttcagaagaggctcttggccctggacccc

SEQ ID NO: 158976 - DNA, 100 bp, Homo sapiens
gtattaggcagtgctacaagggatcaagatcagctccaggcctgggaaagtgaagcctccatcaagggagacctgcaagttgcctggggttcagtgctct

SEQ ID NO: 158977 - DNA, 122 bp, Homo sapiens
gtgaactttgtccttactcaagttctcagaagactcatctaactagacatatgcgtactcattcaggttatgaagacagtatggagtttccagaccatagtagacatttgctacagtgtctg

SEQ ID NO: 158978 - DNA, 83 bp, Homo sapiens
tgtggcgctgattggatttccctctgtgggtctgtcttgcagccgatgagcaccatggggatcccgcggcagaaatgcgtgac

SEQ ID NO: 158979 - DNA, 90 bp, Homo sapiens
ggtaacaagaaataccgtgccctgaggttggacgtggggaatttctcctggggctcagagtgtggtgttcccactgatgaagagcaggcg

SEQ ID NO: 158980 - DNA, 75 bp, Homo sapiens
ccttaatgagcatgttgacagcatcgatgctagacagacagtgttcttcaacggtgccaacgtccggcaggtgga

SEQ ID NO: 158981 - DNA, 82 bp, Homo sapiens
tgctcctcgaccccccactgatcgcgctggataaagatgcgcctctgcgatttgcaggggtcagtcctgcatcaagaccttc

SEQ ID NO: 158982 - DNA, 128 bp, Homo sapiens
aacagagccatcactctgcgcagagaagccgatgtcaagaagaggatcaaggaggccaagcagcggtgtggcgatcgatgggaataatcacgaagtcaaagaaagacacattcagctggtcaagaaaa

SEQ ID NO: 158983 - DNA, 46 bp, Homo sapiens
taatggaggtctccagtttcgttgctgatcatctgggctgtgatcc

SEQ ID NO: 158984 - DNA, 75 bp, Homo sapiens
gctgctgctgctggtggcccctttgcagtttgcagaaaaaacttcagcatgtgccaggaacacaacctcaccttg

SEQ ID NO: 158985 - DNA, 75 bp, Homo sapiens
atccttgaatgttgaagatgtccttaccagctttgacaatacaggaaatgtttggtcaacatatttcactggcac

SEQ ID NO: 158986 - DNA, 117 bp, Homo sapiens
cctgatattaagccatcaaatgtggaacctatggaaaagggaaacctgtttgacttcttacgcttgacggaatggcgtggcccccgcgtgctctacttcggggaccacctctatagt

SEQ ID NO: 158987 - DNA, 87 bp, Homo sapiens
gcagaaccccacgctgctggcagagctgcggctgctgagttttttgtagcatcagatccaacagttaaaacagatcgactgtggcac

SEQ ID NO: 158988 - DNA, 90 bp, Homo sapiens
ccggccgcggggccaggaagtcggagtttgagccccggaggcagagcggctgccatgagagatcaatgtcttattgtgatgagtctcgac

SEQ ID NO: 158989 - DNA, 50 bp, Homo sapiens
gggcggcccaccgggactcgccgttgtttcagggagaccttgcatcacca

SEQ ID NO: 158990 - DNA, 90 bp, Homo sapiens
acgacttatattttgttaaactgcccaactttctcagtgtagagcccagactctgaagaagaagctatggagactacaccagccaaagga

SEQ ID NO: 158991 - DNA, 100 bp, Homo sapiens
ggccagagacgacaacccgggcctccgagttggaaaatggatataccttatttgattatgatgttggactgaatgatataattcagctgctagttcgccc

SEQ ID NO: 158992 - DNA, 88 bp, Homo sapiens
gtttttgactttaaaggacaattgagaactggagacataatattacacagctggtcttcatttcctgtgctgttccctcgtcacacca

SEQ ID NO: 158993 - DNA, 83 bp, Homo sapiens
agagcatcgagaagaagcggatccgcaaggtatagtcgtctccccctccaccacggcaagtcctgcagagggaaccagctctg

SEQ ID NO: 158994 - DNA, 104 bp, Homo sapiens
agagtggagggagcgaatcgccaacacgaggcggctggtggagcggctggagaccatgaggcggaatgtgatggggaacggcctgtcccagtgtctgctctgcg

SEQ ID NO: 158995 - DNA, 74 bp, Homo sapiens
cagggccactagcccatcgtccgccaactgcaggaagctcttcgtgggcggtcttgactggagcacgacccaag

SEQ ID NO: 158996 - DNA, 87 bp, Homo sapiens
aggaacgagcagtgatggctgaaaaggatgctttagaaaaacacgatcagctcttagacagtgagaaagatcagtctaaagaaaagg

SEQ ID NO: 158997 - DNA, 74 bp, Homo sapiens
gaagaactcccacaatgccacaggaggaggcagcagagccaaagaaatgtctgaggaccaggaatgtttcaaag

SEQ ID NO: 158998 - DNA, 75 bp, Homo sapiens
cgaaggtctcagagctttacgatgtcacttgggaagcaaccatgtccaagggacctgcagttggtattgatcttg

SEQ ID NO: 158999 - DNA, 75 bp, Homo sapiens
tggggtctatcctgacaaatctgtatatatttattgactgcagatggaagcacattgctaaggaatggaaagctg

SEQ ID NO: 159000 - DNA, 101 bp, Homo sapiens
tgatactaagtctattcgagcttttgctaagggcttcttagctgggcccagcactagaagatttcagtcatctgccaccagaacagagacgtaaaaaacta

SEQ ID NO: 159001 - DNA, 100 bp, Homo sapiens
ctcccttctgccccagctccgtctcggcggcggcggattacacccatgctaatttggtggataaggcattgcagctcttgaaggaaagaatactgaaagg

SEQ ID NO: 159002 - DNA, 83 bp, Homo sapiens
gtcgcgtctcggaaaccggtagcgcttgcagcatgatctcacattcttgaaggtggcattgaagagcactaagatcggaagat

SEQ ID NO: 159003 - DNA, 80 bp, Homo sapiens
aacacattgaagcagaagcagacatgagaatccagctgtcttctaaatgatgccaatgggtggaatgatgccacctggac

SEQ ID NO: 159004 - DNA, 98 bp, Homo sapiens
cgagtgacagccagtgagaagaatgagtataaaggatgggttttaactacagacccagtctctgccaaatgtctttggtggacttgggaaagaggttg

SEQ ID NO: 159005 - DNA, 75 bp, Homo sapiens
aagctaatcttgtacttcaagaggaggaatcacgctcggaaacaatggctgtttgcagacaaggtcccaaagaca

SEQ ID NO: 159006 - DNA, 88 bp, Homo sapiens
tccagaagacatccttcacccctgtaggatccagagccagagctctacctcgatcctttctgccctccgggtttctccagtcagaaat

SEQ ID NO: 159007 - DNA, 100 bp, Homo sapiens
aaggggattgcctggcaggacgtgaaggggaagaggcccaccctggagtaaccctcactggagaatccagagcctgtctcgatatagattgaagtttagc

SEQ ID NO: 159008 - DNA, 87 bp, Homo sapiens
gcgaagctggccgagcaggctgagcgatacgacggtcaagtttacccatgggggaactggttccagccaaaccgcaccaacctgtgg

SEQ ID NO: 159009 - DNA, 49 bp, Homo sapiens
gatcgctgtcctgacagaagaggttcttgatcaatatgaacgagaagga

SEQ ID NO: 159010 - DNA, 100 bp, Homo sapiens
tggctaagctcatcattgttactgatgacggtggatattccatgaattttaacatgagttcttccaggggaccactcccagtaaaaagaggaccaccacc

SEQ ID NO: 159011 - DNA, 87 bp, Homo sapiens
aaagtatgttgtaccttgtgacagaatatgccaaaaatggagaaatttttgtgtaaacaggaacatcgataagtagtgtaaaaactt

SEQ ID NO: 159012 - DNA, 51 bp, Homo sapiens
agatcatcgagcatttcaaacgaaatgcactcggtgatggaaagagagcca

SEQ ID NO: 159013 - DNA, 87 bp, Homo sapiens
gagaaaagcccccaaaagcagctattcagctgtgcaagttcattcgcaaacgtcctagaagtggaactgctgggtcaaagtgcattc

SEQ ID NO: 159014 - DNA, 82 bp, Homo sapiens
tggtagtggataggcctgtgacgaaggtgctaccatcgtgagagtaagatctgcgagtgaagagggacgagggaaaagaaac

SEQ ID NO: 159015 - DNA, 75 bp, Homo sapiens
gccggccgagcggaggcctgagtgcacccgctgcagtactatactggcaattgctggagaagattttgcaattgt

SEQ ID NO: 159016 - DNA, 74 bp, Homo sapiens
tgcggctgcgccgaggcgccctactcagtttgcgtgtgaacttggacatgggcaaagcggtgtatggatggatg

SEQ ID NO: 159017 - DNA, 75 bp, Homo sapiens
caagctctgggcgtctgtctcacaaggagggtaaatctgactttaacatgcatttgctgaaaaaaaccctgcaga

SEQ ID NO: 159018 - DNA, 100 bp, Homo sapiens
ggatttgtttgagtacgaagggtgcaaagtgggacgcggcacctacggtcacgtctacaaggcgaggcggaaagatggatttcaaggccagagaatggca

SEQ ID NO: 159019 - DNA, 75 bp, Homo sapiens
aggttattcttaatcctgtaaatacgaatctttccaaaggagatgcccgaatatgcttttaaggctattaaccag

SEQ ID NO: 159020 - DNA, 90 bp, Homo sapiens
gtctctaggactggactcttcctaagcaagtccgatctgactgcagccatgagcagcaatgagtgcttcaagtgtggacgatctggccac

SEQ ID NO: 159021 - DNA, 87 bp, Homo sapiens
gcgtgctactgtgcgctcgatccagcaccatggggaagcgggacaatcgggtggtggacgacatccttggagaaggcagcgacgaca

SEQ ID NO: 159022 - DNA, 100 bp, Homo sapiens
gggcggcaaggacttcgagcagcctctcgccatttcccggtttgaacaggaaaatcagcgactaattggtgaaatgaacagcttgtttgatgaagtgagg

SEQ ID NO: 159023 - DNA, 96 bp, Homo sapiens
cgcccctcgccgctgctgcctgggctgggacttcagcacgcagcagggtgagcttgtcggccacagactgctacattgtgcatgagatctacaatg

SEQ ID NO: 159024 - DNA, 100 bp, Homo sapiens
ctgtgacctgcatgtactgggggattcgcagggaggatgtcgggacaccccggaagctgggaaatgttttttcaagggggaacatggcaaaggtgttcag

SEQ ID NO: 159025 - DNA, 83 bp, Homo sapiens
ttgctgccaggaagcttcggccccgcagctcggcttgctgcggtctcagccctgggcgctgcctatggcacagccaagagcgg

SEQ ID NO: 159026 - DNA, 98 bp, Homo sapiens
ctaagagaaagttagcaggtgccaatccagcagtcattacttgaaactatgtgaagcaacactctggattttgaaagacatcttttcatcatgggaca

SEQ ID NO: 159027 - DNA, 100 bp, Homo sapiens
atccagtcacacctgcggaggttctgccttcagtcttgcacaggcaactgaaatgctatacatgcgtttggacacaatgaacactacctgtgtagacagg

SEQ ID NO: 159028 - DNA, 99 bp, Homo sapiens
tagctatcaaagtactaaataagaccatggatgttagtaaactctctgctgaaaaaggcgcggatcaagaagatcatgcagacggacgaagagattggg

SEQ ID NO: 159029 - DNA, 88 bp, Homo sapiens
ccgtttccccgcgcagagctcgccggcgccccgacgggccccggagcagcggcccccggccggatgacagtcgtctagaggagctcaa

SEQ ID NO: 159030 - DNA, 82 bp, Homo sapiens
ggtgacggtggcgccgcccggggcgaggcagggccagcagcaggcgggagttacagaatgtctgaaggggacagtgtgggag

SEQ ID NO: 159031 - DNA, 83 bp, Homo sapiens
tgacaatgactttgagccctaccttactggacagtcaaatcagcaaacggggattcagcgtccgatcctttggaacagggact

SEQ ID NO: 159032 - DNA, 48 bp, Homo sapiens
ggcagcggcctggggacccagcaagggaagatggaagagttgagtcag

SEQ ID NO: 159033 - DNA, 83 bp, Homo sapiens
acagcctcctcttccagaatgcctttgcgcagtctgcagatctccaggggagcccaccagcctagtcaacatggcctcggaag

SEQ ID NO: 159034 - DNA, 90 bp, Homo sapiens
cgctacctgaaggacgtgaagcagcaccacgtcaaggctgacaagcggtgacagtttcctgaggagaggggtgtatccaggcttacctcc

SEQ ID NO: 159035 - DNA, 75 bp, Homo sapiens
aacatgtatttaaccaagttccaacaaaagaatgctgccgcagtgtactaatggtcacttgatgtgcgctggctg

SEQ ID NO: 159036 - DNA, 88 bp, Homo sapiens
caacgccctggccctgcagtgctacaaccctgtcacagaattacgttcctacagtgtttgagaattacacggccagttttgaaatcga

SEQ ID NO: 159037 - DNA, 101 bp, Homo sapiens
aaaaaagtctccagacatggccaaatgtcccctggggggcaaaatcacccccaattgagaactactgctctaaactgcctttttgcaaatgtgtaacttgc

SEQ ID NO: 159038 - DNA, 74 bp, Homo sapiens
gaagctggtctctgaggtctggcataagaaacggcttgcagccctgagtgatcgagagactcggctgcaggagg

SEQ ID NO: 159039 - DNA, 100 bp, Homo sapiens
actgatgcttcttcctacatgtcctaatatgttgatggcattccagaatatctcagatgagcagagttcccgattttgaaatgctgggctcactcagaag

SEQ ID NO: 159040 - DNA, 74 bp, Homo sapiens
gaccaacatgggcattttgtttatgagcaaggtgctcatctgccggaactaccgtggcgacgtggacatgtcag

SEQ ID NO: 159041 - DNA, 100 bp, Homo sapiens
atttaaaaatcacagaccaggatggagataaaggaactcaaagaatttggatgttcagagaattccaacttcttacaagaacagatatttataagaaaac

SEQ ID NO: 159042 - DNA, 83 bp, Homo sapiens
cctcaacgtgcgggagactcattcgcttttcttccggagcctgaaggctccatcaagtatgatggtgaaggatgaatatgtgc

SEQ ID NO: 159043 - DNA, 100 bp, Homo sapiens
ggccggccgcctggtcatggcgcagccgggcccggcttcccagcctgacgggggacttgatctcatcttcatgccaggccttgggtttgacaaacatggc

SEQ ID NO: 159044 - DNA, 82 bp, Homo sapiens
tcaagatgctgcaaaacgtgactccccacaataaagtgaagacatttccacctggacacctgaccatgtgcctgccctgagc

SEQ ID NO: 159045 - DNA, 98 bp, Homo sapiens
gaacatcccggtgctaggggtgcaggaggaggacggcagcaaccgcagcagcagccttcagaaaccgaaagttccagcatctcccaccagagaggagg

SEQ ID NO: 159046 - DNA, 90 bp, Homo sapiens
cagtttgggaaatctggatgccaaacgagattggggccatgccaaggactatgtggaggttgctccgactgtgtgttccaggagtggtgg

SEQ ID NO: 159047 - DNA, 85 bp, Homo sapiens
taaaacgagaaattgagaaaaggagaggagcacagattcaggcagcaagatgctttcattggatttggaggaaatgtgatcaggc

SEQ ID NO: 159048 - DNA, 74 bp, Homo sapiens
aaaaatagaggatgctttattatgggaatgcccagtggaaatctactttcttcaatgtgttaaccaatagtcag

SEQ ID NO: 159049 - DNA, 96 bp, Homo sapiens
atttagagactgaaatcactgcaccttaaaaacaaaagattgagctgcactgtattcctgttgcaaagacagttgcacagaggctcaacacagatc

SEQ ID NO: 159050 - DNA, 50 bp, Homo sapiens
agctgatggttgccctggcaaaggacttctgtttcctgctctcgacaagg

SEQ ID NO: 159051 - DNA, 83 bp, Homo sapiens
cctcgctccctctgctcttcctcccttcgctcgcaccatgggtgctttcttctgcgacctggtactcatctacctcatcaaaa

SEQ ID NO: 159052 - DNA, 100 bp, Homo sapiens
tggaagtccagagatagttgtgcttttacacggttttccaacatccagctacgactggtacaagtacaagttgtgcaaagtgaggaagattactgtggga

SEQ ID NO: 159053 - DNA, 100 bp, Homo sapiens
gtgactcaaaggagcctgagggggatgggagcaaggatttggcgccgcagccgtatcggacactcagggagtcagacagcgcggaaggcgacgaggcaga

SEQ ID NO: 159054 - DNA, 51 bp, Homo sapiens
gaaagagaagctcttcctgtgagggcctttaccttctaatgcaaaagccgc

SEQ ID NO: 159055 - DNA, 100 bp, Homo sapiens
gccactgcccaaactgctgaagcagctcccgcgaggaccacccgtcttgcgtccaacggcatctccacagaaggaggaaagagccttgcgagggccctgc

SEQ ID NO: 159056 - DNA, 96 bp, Homo sapiens
tcttcatgtgtctcttctaagctgaataaagctgttttggaactgtcaggtacctcaaagcgtaagtcagactatgatgactggagaccgtctctg

SEQ ID NO: 159057 - DNA, 75 bp, Homo sapiens
acagagcctcgcctttgccgatccgccgcccgtccacacccgccgccagaaggaagaggcccagcagaagggact

SEQ ID NO: 159058 - DNA, 100 bp, Homo sapiens
ctccgggaccggagtcagaaccctccgcagagtaaagcccacacatcttgctgacttcactcaagtgcaaaccattcagtattcaaacagtgaagacaag

SEQ ID NO: 159059 - DNA, 112 bp, Homo sapiens
ataaaaacaagtgtgtgcatctggctgttagaagaattcatgctcatccgggatctctctaggagctgacactcgaaccttcacgacccattcggatttttccaggactcag

SEQ ID NO: 159060 - DNA, 100 bp, Homo sapiens
aaggacgcgcagtccatctctctcagctgccaatcagattaatcaaacatggaaaaaaaagatgaggttgcaattgggggaataggatgcaattttccag

SEQ ID NO: 159061 - DNA, 100 bp, Homo sapiens
caaggaggtgctgaagagcgaggaggatctttaccttatatagtaaatctctgcccctcgacctggcctgtcgtatctgggacgtgttctgtcgcgatgg

SEQ ID NO: 159062 - DNA, 116 bp, Homo sapiens
caccccggctgcagctccaggagcaagtactccaggaagcacagagctgtaccagtacacggcccacgttgccagagctcccagctcctccagcagccgacaggaggcccgtcaag

SEQ ID NO: 159063 - DNA, 100 bp, Homo sapiens
ctgccagcacccgccgtgccgcatgagcatcgcggagcttgacccgtccatcgctgtggaaattgagaggctgactgagcgactagaagaaaaagagagg

SEQ ID NO: 159064 - DNA, 74 bp, Homo sapiens
aaccacagccccagccaccacccgtaacacagcttctctgcgctttgacggggccctcaatgtggacctgacag

SEQ ID NO: 159065 - DNA, 100 bp, Homo sapiens
cacctccatcaggtacaacctcgaggagctctaccaggtcaacaacggttccagcctcagggatgagtgcatcacaaacctactggtgtttggcttcctc

SEQ ID NO: 159066 - DNA, 50 bp, Homo sapiens
ctgggagccacattcctcattgagatgagacgtatcttgacatcttccgc

SEQ ID NO: 159067 - DNA, 76 bp, Homo sapiens
cttccggagcttctcagaagacagagggttttcttttgaggttcgtgagccacacatctccccacaccaagctcct

SEQ ID NO: 159068 - DNA, 75 bp, Homo sapiens
gtgaccctgccgctggcgagcgccaccgcatggagagcctatctctggcagaagtagccaacgagctggacacgg

SEQ ID NO: 159069 - DNA, 120 bp, Homo sapiens
tcaagttaatccaggtgagactttcacaataagagcagaggatggaacacttcagtgcattcaagttgtatatgaacacagatcaagattagagaaatccttgcaaaaagaaagacttga

SEQ ID NO: 159070 - DNA, 100 bp, Homo sapiens
caaacatgattgaacgatctgtggtggaagcagcagtccaggaatgcagtcagtctgttgatgaaactatgacaatacatggcttgatatacaacgccct

SEQ ID NO: 159071 - DNA, 75 bp, Homo sapiens
ccgctgaggcccccggttcgctgtcccgcctggcgtcccttcgcctcggtggccgctggatttccagctggacag

SEQ ID NO: 159072 - DNA, 82 bp, Homo sapiens
gttaaagagacagcaatgattgcttctttatagctccaagctctacagattcttcaaatatattgagaatagggatgttgca

SEQ ID NO: 159073 - DNA, 89 bp, Homo sapiens
tggttttcatggatgtaaggatgcccaaaggtcctgctgtactagccaccaaagcagctgctggtactaagaaatatgatcttagtaaa

SEQ ID NO: 159074 - DNA, 100 bp, Homo sapiens
cttcggcgatattttttggaaacgtcaagagatgtgaagcgcctggaatctacaatggctgcttcaacccccaactccactgctggtgcagccatgaact

SEQ ID NO: 159075 - DNA, 100 bp, Homo sapiens
tacctgatgccgatattcaacgctttcgggattggagtttggaatcctgccttcgatgtcaccccccacgacctcatcactggtggcatcatcacagaac

SEQ ID NO: 159076 - DNA, 50 bp, Homo sapiens
ctcagctggaacggcaggcctggtaaactgtttcacgttagacctgtaac

SEQ ID NO: 159077 - DNA, 75 bp, Homo sapiens
ctagaactcgtcacaggaggagaactgtttgatagagggtcctccgcggaagggcagctgaatggactccagagc

SEQ ID NO: 159078 - DNA, 98 bp, Homo sapiens
gcaactgcagctacagtggaaaaaagcaaactgctcttgatcccagagcagcccgacggccatggaggctgaagagacgatggaatgccttcaggagt

SEQ ID NO: 159079 - DNA, 110 bp, Homo sapiens
cagccagggctgaacccccgcaggttgcagtgggacctggggctaggccacctccctcgcttttttggaactgcggtgacctgcctcctttccccacactcgcaagtgct

SEQ ID NO: 159080 - DNA, 90 bp, Homo sapiens
gaccacagccaccactattctagcatccgtgaaggagcaggtatagtggaggattacaagccaccgttctacgatgtggttcccaatgac

SEQ ID NO: 159081 - DNA, 83 bp, Homo sapiens
ggacagctctgtgaagaggggctacttccagaaggtgacaccttgtttgtggctggctgcgggaagttctatgaagggactgc

SEQ ID NO: 159082 - DNA, 90 bp, Homo sapiens
ctggtggataaccaacaagatggggaagaaaaggattgagaactttaagagtggtgtggagcaccctccggccatgaatcacctggactc

SEQ ID NO: 159083 - DNA, 100 bp, Homo sapiens
gaagacttgcttcagcatttctcaactgctgagaaggaagaatttgaacatcaacagaaagagctggagaaagtttgcaaccccatcatcaccaagctgt

SEQ ID NO: 159084 - DNA, 50 bp, Homo sapiens
aaggattccaagtaactcttatttggtaaagctttccagtttgaatttag

SEQ ID NO: 159085 - DNA, 126 bp, Homo sapiens
ccgaagtcagttccttgtggagccggagctgggcgcggattcgccgaggcaccgaggcactcagaggaggtctcctctgagcctccggcctccataagacccaaaacagatgacacctcttcccag

SEQ ID NO: 159086 - DNA, 100 bp, Homo sapiens
cggcggctgagaaggcggactccagacagcgaccccagatgaaggttattcagcttctcaaggctggaaaagcgaaggaagtttcctacaatgcactagc

SEQ ID NO: 159087 - DNA, 83 bp, Homo sapiens
gttcgacaagaatctgcaggacttggtccgcggcatccgtaaccacaaggaggacgagcattgactgtgccggaatcctgaaa

SEQ ID NO: 159088 - DNA, 75 bp, Homo sapiens
ggtctggtgattattacagcatggattatcctgtgccacagttcctcaaaatacatgatcacggatatcatcggg

SEQ ID NO: 159089 - DNA, 85 bp, Homo sapiens
ttactagattttctctcaaactacgagaatggagaagctgatgccatgagcttggatggagggtttgtctacatagcgggcaagt

SEQ ID NO: 159090 - DNA, 80 bp, Homo sapiens
cgtcaacttcctcaagtcgcccaaagagatagagtttcaccatgttgtccagggtggtctcaaaactcctgagctcaagc

SEQ ID NO: 159091 - DNA, 82 bp, Homo sapiens
ggccgcgcccgcggaaccagaccagttccagggtctccctccactgctgtagtaacccgggtccggggcctcggtggtgctc

SEQ ID NO: 159092 - DNA, 89 bp, Homo sapiens
atcattttgtatcccaccagcaatgaatgagcgttccagcttctccctacgacgaggacttcaaccatgagccgtgtcagaggaagggc

SEQ ID NO: 159093 - DNA, 82 bp, Homo sapiens
tcttcggtggactccttcggcagtccacccaccgccgccgcctcccagtctcgaagatatgactccaggaccactatatttt

SEQ ID NO: 159094 - DNA, 75 bp, Homo sapiens
gcatgatcctttgcagaaatgactacattaggcttgaagtagaaaatgccatgatgagaaaaactattaaaaaac

SEQ ID NO: 159095 - DNA, 90 bp, Homo sapiens
ccgggatgaaaggagggaacgcagtgggaggatacccttgacaaatactgtgaccgggagtatgctgtgaagacccaccaccacttgtgt

SEQ ID NO: 159096 - DNA, 101 bp, Homo sapiens
aaaatatcgagatatcctaaaatttcctgaagaactggaacacgtagaaagtgcaagcaaagtgaatctacagacctattttctcaggagctcagcctggc

SEQ ID NO: 159097 - DNA, 100 bp, Homo sapiens
ctaagaagaccgagagtcaccacaaggccaagggcaagtgatttgacagactcgagccttacgcagacccttattatgactatgaaattgagcggttttg

SEQ ID NO: 159098 - DNA, 83 bp, Homo sapiens
cggcgccatggcagggcttgcaggtgaaagaaaatggcccgaaccaagcagactgctcgtaagtccaccggtgggaaagcccc

SEQ ID NO: 159099 - DNA, 73 bp, Homo sapiens
ttaatggaaaatcgcttggttaaaacctgacacttttaacagctatggcctgctgtgcagttagccaacttct

SEQ ID NO: 159100 - DNA, 75 bp, Homo sapiens
cccgcgggcggccggtcgggcggggcggcggcgctgacaggagaatgcagttgaaactaattttgtggatagaga

SEQ ID NO: 159101 - DNA, 97 bp, Homo sapiens
agatggctacgtgatccatctggctcctccaagtcactggtgcagtcacgacagtaggtgtggcagcaggcctgctggctgccgcaagccttgtggg

SEQ ID NO: 159102 - DNA, 83 bp, Homo sapiens
cagaggtcgtggaggtggccgtggaggcagaggtggcatgggcaaactcattattacattgggtaagaaacaaaaaagaaaga

SEQ ID NO: 159103 - DNA, 80 bp, Homo sapiens
ccgccaaggcggcgcgcgagctggagcactcgcgtgtcccgacccaggctaagcttgagcatggctgagcaggagcccac

SEQ ID NO: 159104 - DNA, 83 bp, Homo sapiens
tgactacctgctgtacaccctcaacaaacaccagcgctttgggattatatctgtccaagatgcgagtctggttttatcgagga

SEQ ID NO: 159105 - DNA, 75 bp, Homo sapiens
ccgtaggcaggaccccgggacaccctggaagccaggaaatgaaatacactttcgggaaatggcctctaaatcctg

SEQ ID NO: 159106 - DNA, 82 bp, Homo sapiens
tggggtgagaccctcacttcatccggttgaaaggattgttgacaaaaggaaaaataaaaaagggaagacagagtatttggtt

SEQ ID NO: 159107 - DNA, 75 bp, Homo sapiens
cagttctgcaaggagcacggtttcgtaggatggtttgaaacatcagcaaagtttgctgctttgtggtgcacaagc

SEQ ID NO: 159108 - DNA, 75 bp, Homo sapiens
ggtgaacatgccaggagagcaatgcaaaaggtgctggagaatctggtaaaagcaccattgtgaagcagatgagga

SEQ ID NO: 159109 - DNA, 101 bp, Homo sapiens
gtcttcaattaaaaaatttattaaaggaagcacacctaagcatccacccaacccaccagtatcaccaggaaaaactgtaaatgatgtcaacagcaataata

SEQ ID NO: 159110 - DNA, 90 bp, Homo sapiens
tctggatgccaggcccaggaattcccataccaaccacagagatatgagggaaggcaccattggagatatggctatcctgggtataacaga

SEQ ID NO: 159111 - DNA, 99 bp, Homo sapiens
cctatacaaagaagtgatgctggaaaatctcaggaatctggtctcattgggtgtgctcctgagaaaattagaagcaggcattcgaggaatcagtcatgt

SEQ ID NO: 159112 - DNA, 74 bp, Homo sapiens
tgcaatctgaaaagcagactgaaaggtgtctggaacagatgagccaggaggggctgaagctgcaggcactcttc

SEQ ID NO: 159113 - DNA, 100 bp, Homo sapiens
gcctctgacaccagttctccgctggaaaaagggacaaaagattgcccaaaagaatcagccttggcccctccgttgtgggtttggctcggtactcccatgt

SEQ ID NO: 159114 - DNA, 75 bp, Homo sapiens
tcgtggccggaggagtctcagagctgtcagaaaggccatcagcatcagcaaagccatcaacacccaggaggcccc

SEQ ID NO: 159115 - DNA, 83 bp, Homo sapiens
cccaagcttaacttttccaatgtggaatcctgggccttcattggttgaagatgacagcgatgcagagacctatggagaagaga

SEQ ID NO: 159116 - DNA, 99 bp, Homo sapiens
gaaagtctcagcagacccttcctgagggccgagcaacagtgtagtggcgtattccacatagcaaacaggctcgggttatgtatgattttgctgctgaac

SEQ ID NO: 159117 - DNA, 83 bp, Homo sapiens
ggaaggaacgaggcaaggagctaaagcagcgtgcgttcagccctggggaagcggggagaggtggtgagagatgacccctgttg

SEQ ID NO: 159118 - DNA, 148 bp, Homo sapiens
cttcggccccggcccctgccctggttccgttgcgcgccccggatgtggcgcggctgcgcgaggagcaggaaaaggccgtccagggcactggcctggcattcatcgtctacacagaggccattaaaaacatggaggtgtcccagctgtg

SEQ ID NO: 159119 - DNA, 100 bp, Homo sapiens
gcagccactgttcacagaaaactaaagacattcatggaaattactttggaagaggatagcattgaaagattccttatggcagaaagtatgacaaggcatg

SEQ ID NO: 159120 - DNA, 100 bp, Homo sapiens
cggtccctagagaggataccgggacgctcctgaagccgcgagatggttctgtacagagtaatgagatgtgtgacggctgcaaaccaggtgtttttttctg

SEQ ID NO: 159121 - DNA, 90 bp, Homo sapiens
ggtgggggcttcctcggtggcgggcatggaggcttcgcgctgccggctcagtcccagcggcgacaggatcaactcactatcctgaaggtc

SEQ ID NO: 159122 - DNA, 146 bp, Homo sapiens
ggaaatgcctggaccctgcccagcagaatttgtatagagatgtgatgttggagaactacagaaacctggtctccctagagtcattcttatagaagagcatcagaggaagataaaaaagaatcctcaatgtcaggcccctgagccca

SEQ ID NO: 159123 - DNA, 98 bp, Homo sapiens
tattacattgcttgaacaaaataattgggacttagtggagaataaaggcagccccgttgatgactgaaaatgacaaagcatccacctaacagacgagg

SEQ ID NO: 159124 - DNA, 100 bp, Homo sapiens
ctgatcacctgtctggagcaaggaaaagatccctggaatatgaagagacacagtatggtagccacacccccaggggggctatttcctaggggcgccgatc

SEQ ID NO: 159125 - DNA, 82 bp, Homo sapiens
ggccgggcccagtcaccgaccgaaataatgcaaaaggtgtcccaaggctcctgaccagtgaacaaagatttgagaaagacag

SEQ ID NO: 159126 - DNA, 75 bp, Homo sapiens
ctggaggagatttactgctcgctgctgggtcccgcggcggggcgctgcggtggccctggccaacgtcaacattgg

SEQ ID NO: 159127 - DNA, 99 bp, Homo sapiens
agagaagtttctggtcactccccaggattatgcgcggtgccattgagaaacagaaattggtgtatattttgaacagagatgctgcagcccgacttacca

SEQ ID NO: 159128 - DNA, 50 bp, Homo sapiens
cgccgctcgcgccgggcccgtggccgggccccagcacccgcagagcagac

SEQ ID NO: 159129 - DNA, 100 bp, Homo sapiens
ggagcgcctcgtcgacatgagtgatgtggaggaaaacaacttcgagggcagactttctgttcaaaatcaggagtttgagataaataaagatggaatcccc

SEQ ID NO: 159130 - DNA, 76 bp, Homo sapiens
ccccagcagggccaccgggcggcaaggctccataaaaatacagactcaccagttcctgctttgatgtgacatgtga

SEQ ID NO: 159131 - DNA, 90 bp, Homo sapiens
caaagttggatattgcgtttggaacacaccacacagctaaagagcctaggagctgacttcacctttggcttcatccaggtgatggatggg

SEQ ID NO: 159132 - DNA, 51 bp, Homo sapiens
gcaaaatgacagatcttctagaagaaggctttgatggtgaggaaaggaaag

SEQ ID NO: 159133 - DNA, 98 bp, Homo sapiens
tggcggatggtgggactctccggccctgtgcagtaaagcaacagcccacaattgcctgcattttctttcctcttcaaaaccacttctgctccaaagac

SEQ ID NO: 159134 - DNA, 82 bp, Homo sapiens
cctcggagtccttggggacggagcagcgcgtcgtggggcgagcggcagctgaagtagcagatctgccccagtagaatctgag

SEQ ID NO: 159135 - DNA, 100 bp, Homo sapiens
cgggatttgggtcgcagttcttgtttgtggatcgctgtgatcgtcacttgacacgttggtcgtcattgcctccgagcccactttagccctcagctctgta

SEQ ID NO: 159136 - DNA, 75 bp, Homo sapiens
attacactgtgatacgactgacttccgatacatacttctgcatgtctatgcgaataccagtggatgaggaagcct

SEQ ID NO: 159137 - DNA, 100 bp, Homo sapiens
cgccacaacgtccgactgcactcacacgacgtgcgctatgggtcagtcagcgagatgatccgccacccgtatgagacccagtctgacagcttctacttcg

SEQ ID NO: 159138 - DNA, 50 bp, Homo sapiens
ctcccaggtagctgggattacaggagcagctgataacctcagtccgtcac

SEQ ID NO: 159139 - DNA, 98 bp, Homo sapiens
taccggctgaagtacctgcggctgcgcaaagcggccaaggccacggtgttttatgagtttaaagccaagaacatcaagaagaagaaagtgagcattat

SEQ ID NO: 159140 - DNA, 98 bp, Homo sapiens
tctggtttgatagcggaacttcatggtcttatgttcttccaggtcattagctattgttagtgttagtgtattttttgtgtggcccaagacaatcttct

SEQ ID NO: 159141 - DNA, 101 bp, Homo sapiens
gggagaaccagccgactggagcaggcagcagcccaggttgtttacattcagagctctatcaataagaggaatacatattacagtgaattcgacaaccgcac

SEQ ID NO: 159142 - DNA, 98 bp, Homo sapiens
agactgtttgtgttgcgggggccggacttcaaggcccctagcagtcttcttgatgctttggaacaacatttagcttccttggaaggaaagaaaatcaa

SEQ ID NO: 159143 - DNA, 76 bp, Homo sapiens
gtggttggctatggtgatcttaatgggaaagaatactggcttgtgaaaaacaggcctctgagcccaagtctgcacg

SEQ ID NO: 159144 - DNA, 100 bp, Homo sapiens
gtatttgctaagtggaagccagaagaggaggaaaatgttttgccacgtggatgtgaagatttcctctaaaagaattaaacaaccaccatgtcgagcaaaa

SEQ ID NO: 159145 - DNA, 100 bp, Homo sapiens
ctacgtgctgggcgacacgctgggcgtcggcaccttcggcaaagtgaagaagtttgctctccaaagctcggggaattgattccagctctgttaaactccg

SEQ ID NO: 159146 - DNA, 75 bp, Homo sapiens
cgcctacttcctgtcccactgccacaaagctccagtgatccacaagctcagaaatacatcgcggaaagtaaatgt

SEQ ID NO: 159147 - DNA, 73 bp, Homo sapiens
aaaaaatgaaaaacatcagcaatcacctttttccaaccctttgtaatcagtactacaaattaatcacatttat

SEQ ID NO: 159148 - DNA, 100 bp, Homo sapiens
cgctgcgcggcgcggcggccgggccctcgagacggggacgaccatcatggagcagttcaaccctagcctccggaacttcatcgccatggggaagaattac

SEQ ID NO: 159149 - DNA, 101 bp, Homo sapiens
ccaaacccgactagaaagcctgggaacggtcactgcgcaggatcaagctacaatgaagaggagggaggcagtctgcgcgcaccgccattttctaggaactg

SEQ ID NO: 159150 - DNA, 100 bp, Homo sapiens
tttcttaggaagattcttccctatcagttaaaaagacagggtctcactttgtcacccatgctggagtgtagtggagtgaacttagctcactgcagcctag

SEQ ID NO: 159151 - DNA, 100 bp, Homo sapiens
ggaggtggtgcctctggcagtgacgaggacgaagtgtccgagaaatttctgaataaattggcagaagaacgcagacagaagaaggaaacttaagatgtgc

SEQ ID NO: 159152 - DNA, 74 bp, Homo sapiens
aggaacgtggccgacgacaccagcaacttttcatgtctgcaaataataatttcactccctccaacaattcctct

SEQ ID NO: 159153 - DNA, 82 bp, Homo sapiens
gttgcctcaatgggagctgactcaggagatgactttccgagtcgtccggaaatccattgcccgtgttctcacagttattaac

SEQ ID NO: 159154 - DNA, 100 bp, Homo sapiens
gatgattggtctcgtctggcgctccatggagcacccagggaagctactgtttgctcctaacttgctcttggacagcaatacgaggattctctccaccaca

SEQ ID NO: 159155 - DNA, 74 bp, Homo sapiens
tggtggctttgcagcagtctccagagcattccatgaggcatggattccgtgaaggaacaacacctaaacccaag

SEQ ID NO: 159156 - DNA, 100 bp, Homo sapiens
tgattaaactggggccattcatatgagagtttaagaactcagaccagtgacttaggagtcagagtattcatcgaaaagaaagcacagctaacacttttag

SEQ ID NO: 159157 - DNA, 82 bp, Homo sapiens
tcgaagactggcaagcacggccacgccaagtcccaagaggaattacaagagtactgcagacatcatgaaatcacctatgtgg

SEQ ID NO: 159158 - DNA, 87 bp, Homo sapiens
ctgagtcactgcctgcgcagctccggccgcctggctccccatactagtcgccgatactgcttttgcaaaaaataaagatgatggaaa

SEQ ID NO: 159159 - DNA, 99 bp, Homo sapiens
ggcaaaactttgagattgggaatgacagagcgggatgccaccagcttgtccaaagggaagttccaggagctcctggtgggcatcgttgtggagaatgac

SEQ ID NO: 159160 - DNA, 98 bp, Homo sapiens
aaggtctctcgcgggcgggagaacggaaaactcccaacttcctggtacccactgatggtaatgctggcctgctggctgaaccccagattgccatgttc

SEQ ID NO: 159161 - DNA, 100 bp, Homo sapiens
ggaaaacataggagaactgaaaaaggaaatcgaagagatgaaacaagggaaaaagtggagtttagaggacgatgatgagcgagatgcgagaacacttttg

SEQ ID NO: 159162 - DNA, 100 bp, Homo sapiens
atcaagatcaagaccggcgtggtgaagcggtttgcagctaaaactgtgcacagtgggtcattgatgctagtcacagtggaactgaaggaaggctctacag

SEQ ID NO: 159163 - DNA, 82 bp, Homo sapiens
cctgcggcggagggaaaaaggaagaggagaaggaaattgtcccgaatccctgcagtgttatagttttgccgctggactcttc

SEQ ID NO: 159164 - DNA, 90 bp, Homo sapiens
cgctaattagactcatgccacttgagggttccccactgaaggacttggtccagctgtctggcagggaggagagacagaagctctggcccg

SEQ ID NO: 159165 - DNA, 97 bp, Homo sapiens
ttcaagcagcccaccttctgcagccactgcaccgacttcatctgacctgcctagagctggaacgttacctccagagcgagccctgctatgtttcagc

SEQ ID NO: 159166 - DNA, 96 bp, Homo sapiens
aagcccagaagaatgtggctaccagcgaaggagggccaaacatgtgggctattacctctgaagaacgtactaagcatgacaggcagtttgataacc

SEQ ID NO: 159167 - DNA, 101 bp, Homo sapiens
ctgaggaccagcagatggccagtcacgagaacccagaactacagcggaaggaatctctggattccatttcccattcttcaggctctgaagacatcgaagtc

SEQ ID NO: 159168 - DNA, 98 bp, Homo sapiens
acgcccatccttggacttcctgaaaatgacccagagtgtgaacatggctacgcctcttcattcccgtccatgccgagcccccgactgcagcattcaaa

SEQ ID NO: 159169 - DNA, 82 bp, Homo sapiens
tcatatcttcacttggcaaactcaacaaggataccgaagtgtataaagctacagtaaaagatgacctcaccaagtggcagaa

SEQ ID NO: 159170 - DNA, 83 bp, Homo sapiens
gttaagatttgcattgaaggccggtctaatgtagacctgcctagagctggaacgttacctccagagcgagccctgctatgttt

SEQ ID NO: 159171 - DNA, 75 bp, Homo sapiens
ttgcctgctcccggagggagacgcgctgccgaggagaacccagcgggaggtggtccaggccacgctggtggtcct

SEQ ID NO: 159172 - DNA, 80 bp, Homo sapiens
atccagcccttgagtggaatatggccagcaggtgattcgcaaggggtggctcaccatcagcaacattggcatcatgaaag

SEQ ID NO: 159173 - DNA, 102 bp, Homo sapiens
aaaaggtgtacttgcaagaaacctcaggacttgagtaacagcaacatgcttccatgaggcaggctgaacctgcagatatgcgcccagagatatggatcgccc

SEQ ID NO: 159174 - DNA, 100 bp, Homo sapiens
gctgggagctgtggtgcatgtacatcagccccccaaaagactggtgggacgccggagacccttctctccccatcagaagaagctcattcacacagaagac

SEQ ID NO: 159175 - DNA, 100 bp, Homo sapiens
cttccggacaacaacagggcttgattctgcagtagatcctgtccagatgaaaaatgtcacctttgaacatgttaaagggatgtggctaaagccctgtaag

SEQ ID NO: 159176 - DNA, 75 bp, Homo sapiens
cagcggcggcagcggagagcgagagaggggagcagggtaagcttgatgattaccaggaacgaatgaacaaagggg

SEQ ID NO: 159177 - DNA, 100 bp, Homo sapiens
atcaagtcggcttccatgcatccctaccagcgaatgtggccccgtcccagagcaccacccgagacatcaggagcccatcgtgggctagggaagatcctcc

SEQ ID NO: 159178 - DNA, 100 bp, Homo sapiens
aagatagatgtgtcctatgaataccgcttcctggagttcacgactctgagtgctgctgctcatgtttcccacctggagaatgtgtcagaggaagaaatga

SEQ ID NO: 159179 - DNA, 82 bp, Homo sapiens
ttttttctaatggctattcaagccaagaaggatcaagaaggtggagaagaaaagaaatctgtgcaaaagaaaaaagtaaaag

SEQ ID NO: 159180 - DNA, 90 bp, Homo sapiens
cctgctcaaagccctgggtcgcttggaagaagccaaggtaactttaagccaggtgtatatgcggtgtcagtcactggtcgcctgccccaa

SEQ ID NO: 159181 - DNA, 97 bp, Homo sapiens
gtgacagttaagacttccttttcacaaatacttggacaggtgttgacttcaaaatcaaaactgtagagctaagaggaaagaaaattagattacagat

SEQ ID NO: 159182 - DNA, 50 bp, Homo sapiens
ccggtgacagcgtgagaggttcgcagaatgctggcatcaccatctacatc

SEQ ID NO: 159183 - DNA, 75 bp, Homo sapiens
ctgtgcagccgcgaggaggcgcgggaggtgttcgagaacgaccccgagacgcagaaaaatatggctcaggagact

SEQ ID NO: 159184 - DNA, 76 bp, Homo sapiens
agcaaatgggatcaatatttcacctgatgataaagatctggttggagttggagggtgagagaaaatgaattctaat

SEQ ID NO: 159185 - DNA, 75 bp, Homo sapiens
aagacagagcgctactcctggcagtgcgtcaatcagagcgtcctgtgcgtggagacctttggcgacttggccttt

SEQ ID NO: 159186 - DNA, 83 bp, Homo sapiens
ctcagatccgctacctcacccagattgggaaaatgaggtacgttagtgttcgcgattttaaaggcaaagtgctaattgatatt

SEQ ID NO: 159187 - DNA, 74 bp, Homo sapiens
gatgccctgcccgttgccctgtgatgaagaaaatcagggagctgattttggatggatctttacagttgatccag

SEQ ID NO: 159188 - DNA, 83 bp, Homo sapiens
gcaggaattattggaggccaggtttactggagtaggtgttagtaaggcatccgtgtcattctggaccttactcccaactaccg

SEQ ID NO: 159189 - DNA, 73 bp, Homo sapiens
caaggaaagaagatcaagctacagatatgacactggctctgagaccccgactgcccgacggctctacactgcc

SEQ ID NO: 159190 - DNA, 123 bp, Homo sapiens
ggacacaaaggacatttctgcacccaaaccaggacctctaaaaaaggcacctgctgctaagatcaatgtccgagttaccaccatggatgcagagctggagtttgcaatccagccaaatacaac

SEQ ID NO: 159191 - DNA, 100 bp, Homo sapiens
agcaagggaaagaaccctggctggggaaaagggaagtgaaaagagatctgttttcagacaccattcgcttttcacccaagatgatttgatgtcttataaa

SEQ ID NO: 159192 - DNA, 101 bp, Homo sapiens
tttcgacgacatcatcgtcttcgcctatgcctgccaggctgctggtgcctctgagcctcggaacatgatctacatgagccgcttgggtatctggggcgagg

SEQ ID NO: 159193 - DNA, 84 bp, Homo sapiens
caaccattgacgccatgtcgggttattcgagtgaccgagaccgcggccgggaccgagggctgatcagctgaccgaagaacagat

SEQ ID NO: 159194 - DNA, 89 bp, Homo sapiens
tagtgaagagcatgatgatggaggatacagaatcacagatgatggcgctgattgtttgcctggagggagcactatgtctgcggaagtcc

SEQ ID NO: 159195 - DNA, 100 bp, Homo sapiens
tcactttcattgtctcggacgtgcggggcctgggcctcccggtccgcaagcagcattttgaaagcgaagcagaagccgtagaatcagcggcgagcctgtt

SEQ ID NO: 159196 - DNA, 75 bp, Homo sapiens
gctgttcctcaccatccctttcgccttcttcctgcccgagctggaataactcaagtcacctgtactggaaatcag

SEQ ID NO: 159197 - DNA, 150 bp, Homo sapiens
gccagtcgcgggttttgggccgaggcctgggttacaagcagcaagtgcgcggttggggccactgcgaggccgttttagccacttctgccccaccaacgttgggccaaccaaaaggagtcagtgccagtcaagatcgaaagatacctcccc

SEQ ID NO: 159198 - DNA, 65 bp, Homo sapiens
ctgaagcagcagaaccccaggctggtgtacggtggttttacgcacgacgagctgctgaaggtgtg

SEQ ID NO: 159199 - DNA, 100 bp, Homo sapiens
gctcagagatccaagtgcgcgccctggcgggtccggaccaaggtctcctggaacacggccgcaactggtcggccatcgcccggatggtgggctccaagac

SEQ ID NO: 159200 - DNA, 75 bp, Homo sapiens
atcacattcattttaattttgccggaatatttcaagacaccgaaaggcagaagtcaattcatctggaaagactat

SEQ ID NO: 159201 - DNA, 85 bp, Homo sapiens
cacctggctacctatttccccagtttccagggactgagcacggaaggcatctaccgggtcagcgggaacaagtctgagatggaga

SEQ ID NO: 159202 - DNA, 100 bp, Homo sapiens
aagaacatttccatcaaaccctgagagctttattaccagacatgatctttcagcacatatggctggacagcaaacatggagagaatcatgaaagctcaag

SEQ ID NO: 159203 - DNA, 82 bp, Homo sapiens
cttggaagtggccacgtacaccttcctccagcagctctgtccagtcatgatgctatggactcctactacgactacatatggg

SEQ ID NO: 159204 - DNA, 100 bp, Homo sapiens
cagatacagagatcatgactttggtagatgagactaacatgtatgaaggtgtaggaagaatgtttttcgttggaatatacgttgcacatttatggcgatt

SEQ ID NO: 159205 - DNA, 90 bp, Homo sapiens
taccaatgaagccagagagggcttggtggatgacaaggaggcctgagtagaccgcaggtgctggagaatctggtaaaagcaccattgtga

SEQ ID NO: 159206 - DNA, 111 bp, Homo sapiens
cggccgcgagaagcagcgggggggcaggcgatcgaaggacagtggtgattatcctcttaccatgcctggacctcagtggaaaaaatttcgttcaaacttttgtgaatttat

SEQ ID NO: 159207 - DNA, 95 bp, Homo sapiens
ccaagaaggggagtgcccgcggcaggaagtccagtaaattctttgtttgtggctcctgctgttacaccagtgaagagtgttttagaaaaacagac

SEQ ID NO: 159208 - DNA, 82 bp, Homo sapiens
tactctatatgaacaatccgtctggatcacggatgtaggaagtggattccggagtttgaatccacctttgacaattgtccga

SEQ ID NO: 159209 - DNA, 100 bp, Homo sapiens
aagaaaaaaaagaaagattttagctcgaaaggtatgtcgagagtaccaacgtggcaattgcaaccgaggagaaaatgattgtcggtttgctcatcctgct

SEQ ID NO: 159210 - DNA, 78 bp, Homo sapiens
ccggaggctcgccgacgaccttgtacctgcaagatgagaatggcgtgggctacgtgctgagtggggctgggaatttca

SEQ ID NO: 159211 - DNA, 96 bp, Homo sapiens
gatgccagtagtgcccgccccacccgcatgctctttgtcactccccggcggcagcacgaaagtaccatgagctgcccatcaactttccagaagaaa

SEQ ID NO: 159212 - DNA, 100 bp, Homo sapiens
ggaacatttttctctgtgtctggatgtttataggcatcatattaacaggtgttggggatgtcctttgcactgaccctgaactgccagattgacaaaacca

SEQ ID NO: 159213 - DNA, 90 bp, Homo sapiens
cggcggaggaggagacggcaggtcggcctcaaggaataggttctcctagtgtctatcatgcagttatcgtcatctttttggagttttttg

SEQ ID NO: 159214 - DNA, 138 bp, Homo sapiens
tccagatgaggtgatggcaacggccaacttcggcaagatccagatcgggatttacgtggagatcaagcgcagcgatgatctttaatctcatgaagtacgacagctacagccgcttcttaaagtctgacttgtttttaa

SEQ ID NO: 159215 - DNA, 100 bp, Homo sapiens
tggagacccagtctgagtgtctgtccccagagcctcagtttgtgcaggacaccgacatggaacagggactcactggggggctaaggaatatgagagttta

SEQ ID NO: 159216 - DNA, 82 bp, Homo sapiens
tgcttgcctgtgcgcgcgtgcgcggacatggcctcaaacggatgtttcgtctgaactcactttctgctttggcagaactggc

SEQ ID NO: 159217 - DNA, 73 bp, Homo sapiens
cgggccgtgtttggggagagcggcgggggaggcggcagcggagaggatggagatgaagatgaggaagctgagt

SEQ ID NO: 159218 - DNA, 75 bp, Homo sapiens
cctcccgggtagctgggactacaggatatttctacccagctctcagacattttggacaatgtcaattgtgtcatc

SEQ ID NO: 159219 - DNA, 100 bp, Homo sapiens
gtgatcgactttctactactgttaatagccgggccttcaatccaggacgagacttaaattcagtgttaaaagatcactgaagttggatggtctgttagaa

SEQ ID NO: 159220 - DNA, 50 bp, Homo sapiens
cagagctgaggactgcctgtttgcaggaggcatacacggaatacctgagg

SEQ ID NO: 159221 - DNA, 100 bp, Homo sapiens
ccgggagaagttcatcatctcggactggagatttgtcctgtctggatcttacagaaacatccctttattttgatgtatgaagaacgtgccgttgaggtcg

SEQ ID NO: 159222 - DNA, 50 bp, Homo sapiens
ggcttcctccagacctctcggcgcggctaaagtctccagtgaatattgaa

SEQ ID NO: 159223 - DNA, 73 bp, Homo sapiens
cgcggcctcgggctctggctgctgggcgcgatgatgctgcctggaacctccaaaggaagacctgactgtgtct

SEQ ID NO: 159224 - DNA, 100 bp, Homo sapiens
cgcaggagacacaagaagcggatccagatttgaaagaagccaacactaaaccacaaatatacaacaaggccattttctcaaacgagagtcagcctttaac

SEQ ID NO: 159225 - DNA, 102 bp, Homo sapiens
aggcaagaagatgaggaagaaggaagcggagcaggtgctgcagaagtttgttcaaaacaagtggctgattgagagctgaagaagcaggtggagagtgccgag

SEQ ID NO: 159226 - DNA, 100 bp, Homo sapiens
gaattttgaagtacaccgtggtgacattgtatcattggtgccccaaattctcaccagtccgtctccttcaaaatccattccaattccacagcccttccga

SEQ ID NO: 159227 - DNA, 50 bp, Homo sapiens
aaggattccaagtaactcttatttggaaaaatatctccctggacggggcg

SEQ ID NO: 159228 - DNA, 100 bp, Homo sapiens
aaggaacgtatcttcgcggagactggcttcccggtgtcggagcagcggctgtggcgcggcggccgcgagatgagctcacagtgcctgcactttaccccag

SEQ ID NO: 159229 - DNA, 75 bp, Homo sapiens
gctaagatggcgactcccatgcatcggctaatagcccggagacaagccggaagatccatccaaaagctatgtgaa

SEQ ID NO: 159230 - DNA, 75 bp, Homo sapiens
cgctgagcaaacagccctcagtttctggagctgttccgagggaccactgacatttatggatgtggccatagagtt

SEQ ID NO: 159231 - DNA, 100 bp, Homo sapiens
ggcatcacctcctccaagaccgtgctggtctttctcaacctcatcttctgggtaagaatgattgatgttggctgatattggagtgctcattcacatgaag

SEQ ID NO: 159232 - DNA, 98 bp, Homo sapiens
cagaggatagcctttcacttattcatctgtccagcatgactcatccccgggagtgttgagcacagttggcgggcagctcccaggtctccatgagtacg

SEQ ID NO: 159233 - DNA, 75 bp, Homo sapiens
ggtcttcttccttctcgcctaacgccgccaacatggtgaacttcacggtagaccagatccgcgccatcatggaca

SEQ ID NO: 159234 - DNA, 90 bp, Homo sapiens
aacaacgcgagtcggcgcgcgggacgaagggaaatcctcattgacgattcaatttgttgaaggccaatttgtggactcctacgatccaac

SEQ ID NO: 159235 - DNA, 98 bp, Homo sapiens
agcagggcccttgcggagttccgcgtccgaggtgtgaagaacaagttgaaatcatcgcagaaggataaagttcgtcagtttatgatcttcacacaatc

SEQ ID NO: 159236 - DNA, 83 bp, Homo sapiens
cttgaaaagactgggcttgtccttgctggtgcatgcgtcgtcggcctctgggcagcagcgccaaatcttaaaggcagaccacg

SEQ ID NO: 159237 - DNA, 100 bp, Homo sapiens
tgccaaaattatcaacaccaaaaagctttctgctagggcaatgtctcaggctgtgcagacaaacggaactcaaccattaagcaaaacatgggaactcagt

SEQ ID NO: 159238 - DNA, 101 bp, Homo sapiens
aggaagactgccacacctagactgatgcttattagtcatcaccgttattcctactaacgtcctgtgtcactgagatagaagaatttcgaaggctgaggaca

SEQ ID NO: 159239 - DNA, 90 bp, Homo sapiens
aaaaacttgaaagtaacagcagtgcctacactacttaagtatggaacagttgatgctatgaaactgggagtaaaggaaatgaagaaggca

SEQ ID NO: 159240 - DNA, 100 bp, Homo sapiens
tgacgacgtgaaggagcagatttacaaactggccaagaagggccttactccttcacagatcggaactgtggctgcaccatctgtcttcatcttcccgcca

SEQ ID NO: 159241 - DNA, 75 bp, Homo sapiens
tttgagtctccattctgggatgacatttctgagtcagttgctttgaattacggaatttataagcaggatctccca

SEQ ID NO: 159242 - DNA, 87 bp, Homo sapiens
gatggacagccagaagctggctggtgaggataaagattcagaaccggcaggatgtatcaggacaaactggcttctctcaagaggcag

SEQ ID NO: 159243 - DNA, 100 bp, Homo sapiens
ccaccttcgtcaacgtgatcgcgctgcatatccccaccgtttgaatctcttttaccttgccaatgatgtcatacagaactgtaaaaggaaaaatgcaatc

SEQ ID NO: 159244 - DNA, 100 bp, Homo sapiens
cagcagtgagctgcaccgggccggcggcgacctgcactttcccgcagacagaaactgcttggaaactccctgctgaaactggaaggtgatgaccgtctag

SEQ ID NO: 159245 - DNA, 74 bp, Homo sapiens
acgtgaaacatgtgaacactcaagtgaagcaaaagccttccatgattacatggcagtcttgggcacgtccatct

SEQ ID NO: 159246 - DNA, 75 bp, Homo sapiens
cctaaagcgtttcctcgcttgcattcagctcctctgtgtttgccgcctgggtgtgatgttagctgttgatgctgt

SEQ ID NO: 159247 - DNA, 100 bp, Homo sapiens
ctgctggagaagggagactacaaggacagcagcgactttggggcccgtcaccctcaggccagctgcgggccgtccagcggctgtgccacttctacagcgc

SEQ ID NO: 159248 - DNA, 76 bp, Homo sapiens
gcctggcctgcgcgccgctgcccgcgccacagctctaagcgaaagacatgaggcctcagcctgaaatgaggttgtt

SEQ ID NO: 159249 - DNA, 82 bp, Homo sapiens
ctgcgagggttgaagattgtgaagcaatagcctaaggtcatacttacctggttgcttgcgcatctagtaatgttggatcata

SEQ ID NO: 159250 - DNA, 82 bp, Homo sapiens
aagtactgagcctgttggaggaactggcccggaaacaggaggaccaatgcagagtccctggacaggctcctgccacctgtgg

SEQ ID NO: 159251 - DNA, 88 bp, Homo sapiens
gctcccctaccatcatgcggaaaagcagcggcagccccgactctcagcactggaaagaccacagcaagattctttcattcgtctcctc

SEQ ID NO: 159252 - DNA, 98 bp, Homo sapiens
cgcgagcctcgtggtgtggtgtatggccgtgggcatctcctacattagcgtctacgaccaccaagctcaaagcttggattctgccgtgccactcacga

SEQ ID NO: 159253 - DNA, 78 bp, Homo sapiens
tgagccctggctgcgcgcgcggcccctcctccccggcgcctcccagattcctggtcgggtggcttccagtggtcttca

SEQ ID NO: 159254 - DNA, 75 bp, Homo sapiens
gctccttccaacctcagccaagcttccaccttgcaggccaaccgagaagattatcaacgaggacattgccaagag

SEQ ID NO: 159255 - DNA, 78 bp, Homo sapiens
gggagcaacgggagtgtcctggacccagctgagcgggcggtcattcgcatcgcagatggtcatcatgggccagtgcta

SEQ ID NO: 159256 - DNA, 100 bp, Homo sapiens
cttcagtgcattcatgaagcatctgaaaaagctgtggaaggctctggataaggaccagtacctgcccaggaaactgctgaaagtgcccactacggaaaag

SEQ ID NO: 159257 - DNA, 89 bp, Homo sapiens
cggctgctccccggtggcccaggcctcggactccgcggccggcccggcgcggcccagcgccctcagggctctctttacctatgaaggca

SEQ ID NO: 159258 - DNA, 50 bp, Homo sapiens
ccaagcccggagaccttcaaccctgaaagagacgagttgtactgctgtca

SEQ ID NO: 159259 - DNA, 98 bp, Homo sapiens
ggctatcaggacagctgccagatcgcaccgtttccagaagctgcgttgccaacgtcacatcccaaaatagagtgcccaagacaggagcaggacattgt

SEQ ID NO: 159260 - DNA, 74 bp, Homo sapiens
gcttccatcattgtcttcaacctggtagagttggaaggtgattatcctgaaccatccaggccaaataagcgccg

SEQ ID NO: 159261 - DNA, 100 bp, Homo sapiens
cagagaccgtggcatgttatataaagatgtcgcttctgggccatgtaaaatagtgatgtctacagatgttgaaagtgtgatgaacagtgtggtatcccta

SEQ ID NO: 159262 - DNA, 83 bp, Homo sapiens
gggacggggaccagcagctgtcgccgccgctctcaggttctgcgaaaattttcttgattttaaagaggatttgaacaattcta

SEQ ID NO: 159263 - DNA, 50 bp, Homo sapiens
gcatttccagcccgcccacccaggggcctttacaacaactaaacggacag

SEQ ID NO: 159264 - DNA, 98 bp, Homo sapiens
cgcccgagacctcgatgatgccctctcctgcaagccactcgctgacgtttgaaagatgatgacagtggggaccatgatcagaatgaagaaaacagcac

SEQ ID NO: 159265 - DNA, 98 bp, Homo sapiens
acattctaccaaggttctttcagaaaatgtagataatggggctgaagggtatgtgattggcagctgtattaaacacattccaatcgcaggacgagata

SEQ ID NO: 159266 - DNA, 75 bp, Homo sapiens
aaagagttgggtttctgcgtccatgtgaagcatcctcataaggtacaagaatattccacagatgtcctttgatga

SEQ ID NO: 159267 - DNA, 90 bp, Homo sapiens
tccagcgtggggacagaggctgacatttcttgcggagtgcatccgccccaacccttttccccctcgtctcctgtgagaattccccgtcgg

SEQ ID NO: 159268 - DNA, 112 bp, Homo sapiens
ctgggacacacctccattggatttaaaagacagtcctcgtcagcactgactttcagctatggaatcggtgaccccagggtttgaagaaaaggagggggagctgctggtgagg

SEQ ID NO: 159269 - DNA, 100 bp, Homo sapiens
ttcgcttaaattttgcagagaaaggaagttaaatgaagttcgaaagagattgaatgagctaagagaattagttcattattatgaacaaacgtcagacatg

SEQ ID NO: 159270 - DNA, 100 bp, Homo sapiens
ctttttggccaggcttttccctctgtctgagaaatcaggacaatcatatcctgattcagcccttcctccacaaaggcaagacagattttgttctaattct

SEQ ID NO: 159271 - DNA, 83 bp, Homo sapiens
agggtttccaccgttcgttcaaggatgagctttctgatgttagccaaggcggatctaaagctaccactccagcatcaacagct

SEQ ID NO: 159272 - DNA, 50 bp, Homo sapiens
tcatggaagatatgatgccaaaggttgttggcatggagtggaggatgaag

SEQ ID NO: 159273 - DNA, 52 bp, Homo sapiens
gaggctggctgcatcatgggagaagagtactatactggcaattgctggagaa

SEQ ID NO: 159274 - DNA, 50 bp, Homo sapiens
gagaaggcaaggcagctgttctgaagtgcaccgtccaggtgaggttagag

SEQ ID NO: 159275 - DNA, 75 bp, Homo sapiens
accagttccgatacagcacaatgaagggatggaaaccctattttcttttctccaagaccatggttggtctgcttc

SEQ ID NO: 159276 - DNA, 73 bp, Homo sapiens
caatggatcccaaagacaattgttcaaaagatgcaaatggctggagtgcaatggcaccatctcggctcactgc

SEQ ID NO: 159277 - DNA, 140 bp, Homo sapiens
gttggtggttctcttcgtcatgatcaacaaatatggtcgacggtccaaatttggaatgaagggtaagtgacactccctgtcctagtcggtctatctggacttgcccttgtctgttcgtggtcctcggtggttatctgcag

SEQ ID NO: 159278 - DNA, 75 bp, Homo sapiens
cgcagccccggcctctcggcctctgccggagaaacaggtattctttaggtgatgctagaaggcctcttcatgaaa

SEQ ID NO: 159279 - DNA, 82 bp, Homo sapiens
gttcacgcacgggatccagagcgccgcgcacttcgtcatgttcttcgcgccctgatttggtcgtattgggcgcctggtcacc

SEQ ID NO: 159280 - DNA, 74 bp, Homo sapiens
tgtcccacttgttcgcggcctataggtccctgagtgccagaggtggtggtgttgcttatcttctggaaccccat

SEQ ID NO: 159281 - DNA, 83 bp, Homo sapiens
caccttccatacattgactacttacacactggtgctgactgcatttggctttatcctgtggataaacgcagagtgaacgagtt

SEQ ID NO: 159282 - DNA, 75 bp, Homo sapiens
ggacacactgtgatcctgcacgcccagcccgggctccagtacctggagtagaacagaaaaattattatgtctgtg

SEQ ID NO: 159283 - DNA, 98 bp, Homo sapiens
ggaggtgcccgagcgttaccagaacctgtctccagtgggctctggcgcctatggctctgtgtgtaatctatgccagcaattatgacaatgttagcaga

SEQ ID NO: 159284 - DNA, 96 bp, Homo sapiens
gtcggatttcgacagtaacccgtttgccgacccggatctcaacaatcccttcaaggatttgtataagtccttgaaaacactatctgcagaactggt

SEQ ID NO: 159285 - DNA, 75 bp, Homo sapiens
gcctggcgctcatccgcttccacgtcaagcaaactctggcctgttctattctgactgcgctattgagtgaatttt

SEQ ID NO: 159286 - DNA, 100 bp, Homo sapiens
tacttcatatttggcttcaatgtcatattttgggttcaatgaaagatcacccacagcagcagccaggcatgttgtcccgtgtgactgggggtatcttcag

SEQ ID NO: 159287 - DNA, 75 bp, Homo sapiens
tcatgccttcttgatacctcatacttcaaaagtgatgcacaggaacaaacgagggaatatgcctcctatggaaca

SEQ ID NO: 159288 - DNA, 75 bp, Homo sapiens
aagcagaggacagaatgaagacagggacagtggcattgctcgatcagctatgtttccagtgtcctctgggtgttt

SEQ ID NO: 159289 - DNA, 83 bp, Homo sapiens
cttgattggaatgttctccctgcagcagtcagcccaaaggaagtttgtcagaggaatggctgtgaatggatgcctggaaggac

SEQ ID NO: 159290 - DNA, 75 bp, Homo sapiens
cgggacttggccgagcggatcctaataaggggaaaatggggtcaccagtcgttggcacaccaagaagctgccccg

SEQ ID NO: 159291 - DNA, 82 bp, Homo sapiens
ccccgtcccgaccctggccgccccgagcggagcctggaggttattcagcttctcaaggctggaaaagcgaaggaagtttcct

SEQ ID NO: 159292 - DNA, 101 bp, Homo sapiens
cccgctacgccgccgccatgtcggcgcaggcccagatgcgcgcgatgctggaccagttgatgggcacctcccgggacggatcctgtgctctgagtcagcca

SEQ ID NO: 159293 - DNA, 75 bp, Homo sapiens
tttgcctcaagacccagctattgttcagttgtggtcagaaatgagaagacatgaaatgttgagggaggagctgcg

SEQ ID NO: 159294 - DNA, 95 bp, Homo sapiens
ccacgtctggaataatgggtactctttcctcgtggaatttgaagattctacagataaatcagtaatagctcttcaagtctgcaataaaaaatggc

SEQ ID NO: 159295 - DNA, 100 bp, Homo sapiens
ccaagaggaacagcagtgtaaatgactcagggtttggaaatcccttgtctccaggttgctgggattgacttcttgctcaattgaaacactcattcaatgg

SEQ ID NO: 159296 - DNA, 83 bp, Homo sapiens
tcaggagaactggtcgccatcaagaaagtattgcaggacaagagatttaaggtggggaccaaggcatactgaacacatttttt

SEQ ID NO: 159297 - DNA, 75 bp, Homo sapiens
gaaagtttgcccccgctgcggccccagcagaatccagtgtgaaatgacaatggatgctctgttggctcgattgaa

SEQ ID NO: 159298 - DNA, 50 bp, Homo sapiens
cctccctcagcttccgccccaaaagatgccagtgacagtgggcgttctta

SEQ ID NO: 159299 - DNA, 98 bp, Homo sapiens
gctccttcgtgtgtacctcctgctccggcagccttgtcttcattggctgctctggcatggagctgatatcacacacgtaacaacgagaggttggacag

SEQ ID NO: 159300 - DNA, 90 bp, Homo sapiens
ggccctccgggtctggggagtggggaatgaggcgggggtcggcccggggctcggagaatgggcagatgttcatttggatttggaagaccg

SEQ ID NO: 159301 - DNA, 120 bp, Homo sapiens
ctggggtggtggttccaatgagacagggcacaccaaactccatctggtactccaaagattcaggtttactcacgtcatccagcagagaatggaaagtcaaatttcctgaattgctatgtg

SEQ ID NO: 159302 - DNA, 74 bp, Homo sapiens
gcggaagaatggcagtgctcaaactcaccgaccagaaatgcactcggtgatggaaagagagccactattctgaa

SEQ ID NO: 159303 - DNA, 152 bp, Homo sapiens
cctgtacctttcagctgcgccggccgcgaggccacggagagctcgccttggagagcccaggagcaggggagacatgggattcttctgctatgacagtacctacgccaagccctacccagggcctgaggctgccagccgagtgcctcctgctc

SEQ ID NO: 159304 - DNA, 50 bp, Homo sapiens
ttaagtttagtagtgctcctattaagaggatgaggaagatgaggaaatgg

SEQ ID NO: 159305 - DNA, 75 bp, Homo sapiens
gcgccatggcgaccggagcgaacgccacgccgttggtccagaatgacagggtccagaaactggcgagccacgagg

SEQ ID NO: 159306 - DNA, 95 bp, Homo sapiens
cggtcccccaaatctgtcgtccctgcccccaggcctgagcggtgcatccccgttcctgggcgagaccaagcaggagacgctcaccaacatctcag

SEQ ID NO: 159307 - DNA, 100 bp, Homo sapiens
tttaatttcagtgactgaattaaaaggtgtcaagaagctcagaatgtgccagggcaggggcccttggagtgacttggctggggtctgtggcccgatcccc

SEQ ID NO: 159308 - DNA, 98 bp, Homo sapiens
tctggggaaaataatccagagatttccacagaaggactgggatgatacaccttttccacagggaattgagttgtagtttatgccaacgtgacttcatt

SEQ ID NO: 159309 - DNA, 80 bp, Homo sapiens
tcagcctcctgagtagccgggactacaggtcctcgatgggcttcctggaatattggtgtgtttatttgcatcagatgtgc

SEQ ID NO: 159310 - DNA, 100 bp, Homo sapiens
ccctgactcacaagatcactcacctgtccacactgcaggtgctgggcgtcctcttctttgccatagcctgcttcttatacaagcccctgtcggagtcttc

SEQ ID NO: 159311 - DNA, 82 bp, Homo sapiens
actgacggctatgtccccattctcggcaacaagggatccacattcttcagcagtgtgacggtagcttttgcacaggaaaggt

SEQ ID NO: 159312 - DNA, 100 bp, Homo sapiens
gggtccaaactcttctttgacaagagagacaactctgactttgggaatttcggacatcgatgaagagttcatcttgaaacagtttgacattgactatgag

SEQ ID NO: 159313 - DNA, 100 bp, Homo sapiens
caaggatctggggatcttcgcactatcccaaggtgcaaagttccccatcaagtggacggcccccgaggcagccctgtacgggaggttcacaatcaagtct

SEQ ID NO: 159314 - DNA, 100 bp, Homo sapiens
ccctgccctgcttggatagaggcctccgaacaggagtaaagaatggctgttgaacatccacaaggcacctgcaaggggttggtgaccttcagagatgtgg

SEQ ID NO: 159315 - DNA, 48 bp, Homo sapiens
agtgaagtttaatgttgccaatggagagacaaagactcactatgttgc

SEQ ID NO: 159316 - DNA, 100 bp, Homo sapiens
acagaaccgtcccaaaatatggcaaagaaacctattctgagcctcgatgacttacgagccctcaaggggaagcattttctcctggaccccttgatgccgg

SEQ ID NO: 159317 - DNA, 80 bp, Homo sapiens
cgaagccttgggtttctttcttaaaggactgatttttagaactccacatttgaggttactcctggatggagcacctctga

SEQ ID NO: 159318 - DNA, 90 bp, Homo sapiens
tgcccctacgtgcacaacatcacccgcaagcacgtcctgaacagagcgcaggacatcaccctgccccacctgtgcagcgtacttctggct

SEQ ID NO: 159319 - DNA, 73 bp, Homo sapiens
caaggaagaaatcccttttgtggagacagtctctttgaatgaagacaaaaggtggaggaaagttacaccattc

SEQ ID NO: 159320 - DNA, 98 bp, Homo sapiens
tcccggatagcgagggcggccgcgccggctccagaatttttccctagattggtgtaaacagccagacgtgggccttcccaaacccgacctggtcctgt

SEQ ID NO: 159321 - DNA, 100 bp, Homo sapiens
tgaagattcaccaaataagctatatactttggttacctatgtacctgttaccactttcaaaaaacggcagaggtgtgctctttggattagaaagctgtgc

SEQ ID NO: 159322 - DNA, 100 bp, Homo sapiens
ttttttgaaatttttaagacacgctgcaacaaagcagcctggagcattggtaagcgtcacactgccaaagtgagagctgctggagaactcataatcccag

SEQ ID NO: 159323 - DNA, 82 bp, Homo sapiens
caacccgataccatcggacaggatttctccgcctcagcccaacggggagtgggtaattccagaattgattggccataccatt

SEQ ID NO: 159324 - DNA, 83 bp, Homo sapiens
gaggtgttcgagaacgaccccgagacggcccagctgagagccagcctggaggttacccagcagcaggccacccaggccgaagg

SEQ ID NO: 159325 - DNA, 50 bp, Homo sapiens
cgtgttctgatcactactgacttgttgcttcccatcgacggtcagtgcgc

SEQ ID NO: 159326 - DNA, 90 bp, Homo sapiens
tctgtcttggtgcttcttgctcttttgggtgtcatcattgccaaaaaatacagttgagttttgccaaatttgacagttcacgcaagcccc

SEQ ID NO: 159327 - DNA, 99 bp, Homo sapiens
accgggatcgtgaccgagaccgtgaccgagagcgtgaccgagagcgcgaatatcgtcatcgttagaaggtaccgagttttggcaattggggatgaaaaa

SEQ ID NO: 159328 - DNA, 48 bp, Homo sapiens
cttcgagaattacaccggggtccaggacttggcctttaccctggaaga

SEQ ID NO: 159329 - DNA, 88 bp, Homo sapiens
gctaagacgccaggactccctggaagcctagaaatgccaaaacagagtggagtacgagaaaagggtccgagcacaagccaagaagttt

SEQ ID NO: 159330 - DNA, 95 bp, Homo sapiens
ggggactgcacgtagcccggcgctcggcatggctctcctggtgctcgagtcttcctaatattctcaccgatgatcgatttaaagttatgtttgag

SEQ ID NO: 159331 - DNA, 88 bp, Homo sapiens
tacacctcccacctgtcctcaggcatatcaaagagatcctgaaggagctagacgagtgctacgagcgcttcagtcgcgagacagacgg

SEQ ID NO: 159332 - DNA, 74 bp, Homo sapiens
tgattttaaaaacttcggatgagaaagaaagtaaaagatgtcattggaactcaatgttcgaaaagttacactgt

SEQ ID NO: 159333 - DNA, 83 bp, Homo sapiens
cggagtacaacgagccgcatgagagccggacaaactcagacatcgtggagaagtgagcttgtagtggacaaaacaaagaggaa

SEQ ID NO: 159334 - DNA, 50 bp, Homo sapiens
tcagaggcaccccagacacagaagctcttcgtgggcggtcttgactggag

SEQ ID NO: 159335 - DNA, 100 bp, Homo sapiens
cggccaactccaatgggcctttccagcccgtggtccttctccatattcgaggcacgcacagaggctgggctgcggtccagatgcgtttgctccatgaatt

SEQ ID NO: 159336 - DNA, 102 bp, Homo sapiens
ggccagcctaccagaagtatttgtggtggaaaaaatatttgacatcattacagctttttctatttttgaggccgggtgcagtggctcactcctgtaattcca

SEQ ID NO: 159337 - DNA, 121 bp, Homo sapiens
cggcgtggacgaccgttgctgagctggtgtggaacgtctgtgatcaggttgtactcagactatctctactttgcaagttcgaataaatccgcggacgacttccatgagaaagtgacagaag

SEQ ID NO: 159338 - DNA, 100 bp, Homo sapiens
ggggatttataacctctccaaaggagtcaaccgattctgcctgtccaagcctggcttttgacctttatgaacaaagatatgctgctgtgaagatacatca

SEQ ID NO: 159339 - DNA, 100 bp, Homo sapiens
gccagaagcgggcggcgcgggggagatgggttgtgagtcccggcccagcccctccacccccctgcccccccgatgcgaccatgggctctggcagtgacta

SEQ ID NO: 159340 - DNA, 100 bp, Homo sapiens
tttgctcttccatccgcctttgatcgtcttcctcttcagccatccaggtgttggaaatcaatagctcttctagcctttgcattgtttaaatataatagtg

SEQ ID NO: 159341 - DNA, 50 bp, Homo sapiens
ccgcgttgccagcaacctgttttcttcgcggttctcagggtgtagaggaa

SEQ ID NO: 159342 - DNA, 82 bp, Homo sapiens
cttctctgcacagcatccctgtgacaggtgccatcgcctgcaggattctttattcagctctgacagtggcttcagcaactac

SEQ ID NO: 159343 - DNA, 90 bp, Homo sapiens
cgccacctcaatgatgatgatgtcacaggttctgtgaaaagtgaaaggggctacttctacaagtccgaacagccagtccagcaaaatgaa

SEQ ID NO: 159344 - DNA, 97 bp, Homo sapiens
aagctggagccaagtggctgcttctggactgcgctctgtcttccggccatgaagcccccaggaggagaatcgagcaatctttttggaagtccagaag

SEQ ID NO: 159345 - DNA, 122 bp, Homo sapiens
gcactgcgggcatcggggacttgaaccagctgagcgctgccatcccggccacgcgggtggaggtgtccgtgtcctgcagagggagacgtggtgggcggtccttcctgtgacacgacccttga

SEQ ID NO: 159346 - DNA, 75 bp, Homo sapiens
cagcagtagcggcagccctgaggacgatgaccgcacctcgagcaggagtggggatgccacgtctgcccccagcgc

SEQ ID NO: 159347 - DNA, 100 bp, Homo sapiens
gtgatctccagcgccggcctcctcagtgcgaagaagctgcagccgcacctggccaaggaccaagatcactccatggatgaaatgacagctgtggtgaaaa

SEQ ID NO: 159348 - DNA, 100 bp, Homo sapiens
gccccaggtgtaagcgcagaaagcaggcgaacccgcggcgcaataacgggaaaaggacttggaggccaagttcattattcagatggagaaaagcaaaacg

SEQ ID NO: 159349 - DNA, 89 bp, Homo sapiens
atcaacagctaacagcaacacagaaatttagaaagctgctttctaaaggacctcttctcagctctcatcaagggccccactcgaacccc

SEQ ID NO: 159350 - DNA, 100 bp, Homo sapiens
cgcctgtgatccaggattatccactgatttatgaaattattttttgggaaaacacttcaaatgctgagccaaaattgcctggaaaagagcagtgagagga

SEQ ID NO: 159351 - DNA, 100 bp, Homo sapiens
ggtcaacatcgcggtcatcaagtactggcagcgggtggcatgagacgtgggaacatgggccacctcacacggatcgccaacgcggtggtgcagaacctgg

SEQ ID NO: 159352 - DNA, 75 bp, Homo sapiens
acggccttggatgtttctgtcctaaatagctgacattgcatcttcaagactgtcctgccttgtacttcatgcagg

SEQ ID NO: 159353 - DNA, 75 bp, Homo sapiens
gtatcaagccaaacatgcagaagctgtccagaccaaaacgaagaagacgttagccaaacccaatataaggaatgt

SEQ ID NO: 159354 - DNA, 98 bp, Homo sapiens
ggcagggaggagaccggcacccagacaggtggcgacggcagaggaaatttctacttggataacagaggaaaaaaagaaagcaaggaaactaatgagaa

SEQ ID NO: 159355 - DNA, 100 bp, Homo sapiens
aacttgccttcctgttctccaagaccaggaccctgctgcaggaagactatgggttcttccgcgccatcagcctgtggcccccactggtgttgatcggaat

SEQ ID NO: 159356 - DNA, 83 bp, Homo sapiens
gctgatcgcagtccggaggtgaggcggaactctgaggtgatgggcagaatctgtttacgaaagacgtgacagtgatcgaggga

SEQ ID NO: 159357 - DNA, 51 bp, Homo sapiens
catcctggaagctgggaaatggacccctcgtccagtcattgtggaacccat

SEQ ID NO: 159358 - DNA, 75 bp, Homo sapiens
ctggactgcattgtcgaatggtccaagctgtttttggaaggaagaaagatggaaagcggtgcagttctgctggaa

SEQ ID NO: 159359 - DNA, 83 bp, Homo sapiens
cgcggattcgccgaggcaccgaggcactcagaggagtgtactaatggtcacttgatgtgcgctggctgttttatccacctact

SEQ ID NO: 159360 - DNA, 74 bp, Homo sapiens
tagaggtcatccaaagcagccgtcccctctgcagcctctctgacaagtggctgatgtttcagacaccgcaggaa

SEQ ID NO: 159361 - DNA, 101 bp, Homo sapiens
agtctacaagtacccgtttgagctggtcatggcggttctgactaataagaagacgaccttctttggtggcaattctatctctatgattgattacctcatct

SEQ ID NO: 159362 - DNA, 74 bp, Homo sapiens
ccctgatgcttggagaagctgaggacacacagggtgatgatgaacagtctacacagatggctgcaagttgggaa

SEQ ID NO: 159363 - DNA, 100 bp, Homo sapiens
agtcgtgcggttggtgggggagccctgccctcctggttcggcctccccgcgcactagaacggttatcagtgagctgaatggaaaaaacattgaagacgtc

SEQ ID NO: 159364 - DNA, 74 bp, Homo sapiens
ttggtgcttaaatccagctgtgtgattacagtggcgagatcttgaacaactgctgcgtcatggagtaccaccaa

SEQ ID NO: 159365 - DNA, 75 bp, Homo sapiens
ctttgtgcagcagcccccgggcagaccctgttccgagagcagctggctgctgccaaggcccaacaggagcaggag

SEQ ID NO: 159366 - DNA, 90 bp, Homo sapiens
acaggaaccatttagcgtcagaaataagccgttttttgacatctgtacttcaagaaaggctgtggaaaatctctgttctcacaaagtctc

SEQ ID NO: 159367 - DNA, 75 bp, Homo sapiens
aagacactccaagtttggcatgaaaggaacatcatttacagcgagcaatttcagcacagcaagtgtttagagaaa

SEQ ID NO: 159368 - DNA, 87 bp, Homo sapiens
atgtgacatcagtaaagaaaacaaggaagttattcaagagctgaataattgccaggataatccttcaaaaacagcttcaactctacg

SEQ ID NO: 159369 - DNA, 50 bp, Homo sapiens
aagccgcctctgcaggctcctgcaaaatggagttcgctcttgttgcccag

SEQ ID NO: 159370 - DNA, 76 bp, Homo sapiens
aaacaccatggctgcggcggcccagctctctctgacacagatatggagattaatcaccaacttcttattttttggg

SEQ ID NO: 159371 - DNA, 78 bp, Homo sapiens
gaaaacagcaaaatccagtagttcttctaatccaaaatgggatgaacagctaactgtctatgcagttatcacatggga

SEQ ID NO: 159372 - DNA, 74 bp, Homo sapiens
aatcttgtggcaggaagctaaggctgtggccacagcacaggttgaagatgaaatccactgaggagggaagtcca

SEQ ID NO: 159373 - DNA, 98 bp, Homo sapiens
gcgtgctgctggaggcgcgcggccgcgacgactgcctgctgttcgaggccggcacggtggccacgctggaattaaagctatagagagtcccaacaaag

SEQ ID NO: 159374 - DNA, 100 bp, Homo sapiens
acaacatggcagacattgacaaagacaccacccacttggagattgaacccttcactcttctcggcgtgtgtgctggacttatcccataccctcaccataa

SEQ ID NO: 159375 - DNA, 90 bp, Homo sapiens
atcaagaccggcgtggtgaagcgggacaagaatccttcaagaaacaggaaaaaactcctaaaacaccaaaaggacctagttctgtagaag

SEQ ID NO: 159376 - DNA, 85 bp, Homo sapiens
aactgctgcatcttagatgaaagattcttgtgggttggagagaggatgcctttggcaacttccacggatcatggccacaacctcc

SEQ ID NO: 159377 - DNA, 100 bp, Homo sapiens
tggagatgccaccccggcaaagttcgccctagtcatttgcttcacgtacatgtcccagagcaagcacacggaggcccgggagctcatgtactcgggagcc

SEQ ID NO: 159378 - DNA, 50 bp, Homo sapiens
attagcacaagagcaccatactttgaggttccagaaagctgagtctgatc

SEQ ID NO: 159379 - DNA, 50 bp, Homo sapiens
ccaaagacccctggagacatgctgtcccctttcctccaacccaacggctt

SEQ ID NO: 159380 - DNA, 49 bp, Homo sapiens
ggaagtcgtgcacgaacaccaaggaagctgaatatggtgggcatgatca

SEQ ID NO: 159381 - DNA, 75 bp, Homo sapiens
acacacggtcctaagagctgggcaccaggaagcgaaggctgggccaattcctgtccccccagcagcatggcatcg

SEQ ID NO: 159382 - DNA, 100 bp, Homo sapiens
gtcctgctggtgctgttggcccaagaggtcctagtctggttatattctgggcactaaatgaaggcgtttctaggcaatttgattcgttcagagatggatt

SEQ ID NO: 159383 - DNA, 83 bp, Homo sapiens
ctcacaccagacctacggagggagctggaaattcctgacgttcattgatctgacgctgaccggaaaggagattgagattgaca

SEQ ID NO: 159384 - DNA, 100 bp, Homo sapiens
tggaacaaggagaagagccatggatcataaagagacacataccaaattggatctatccagacttaattcagtgcacaaatgagatgaatgtgaacatccc

SEQ ID NO: 159385 - DNA, 100 bp, Homo sapiens
gacggcagccacagcgtccgactcgactcggagggtttctgtgagagacaaattgcttgttaaagcttttaacctggagacttgccggcttatggtttca

SEQ ID NO: 159386 - DNA, 100 bp, Homo sapiens
cccagctcgcgcttcagcgtcccggcgccgtcgcgccactcctccgaggttcccagcaccatgagggcctggatcttctttctcctttgcctggccggga

SEQ ID NO: 159387 - DNA, 82 bp, Homo sapiens
ggaatgttccctgacaatttcgttaaggaaggatcgagatcgagaccgggatcgtgaagatcggtctaaagatcgagaccga

SEQ ID NO: 159388 - DNA, 89 bp, Homo sapiens
aagacagatcctgtgtcacccggcaactcagaaacatcaggtccaaggtgctggaaacatgcatgaagagctgcggcaagcggttccac

SEQ ID NO: 159389 - DNA, 83 bp, Homo sapiens
accccgcggagacccttcgagaaatctcgtctcgaccaagagctgaagctgatcgattcaaccaactctggtgataacatgta

SEQ ID NO: 159390 - DNA, 83 bp, Homo sapiens
tcggtggactccttcggcagtccacccaccgccgccgcctcccaggatcatccagcagctcgtcaacggcatcatcacgcccg

SEQ ID NO: 159391 - DNA, 75 bp, Homo sapiens
tggccagcgccagctgcagccccggctgcccactcgcctcacctgagcctgggtcacagggattatggacccaga

SEQ ID NO: 159392 - DNA, 75 bp, Homo sapiens
aagagctatgataactcctgctctccgagaagcccttactaaacaagccacaatggtgcgcatgaatgtcctggc

SEQ ID NO: 159393 - DNA, 95 bp, Homo sapiens
agctgattgagcagtatgagctgcgcgaggagattgcgcagtctctttgtggagaggacttgatcattaaaggaatcagcgttcatatatccaat

SEQ ID NO: 159394 - DNA, 75 bp, Homo sapiens
ctttttcagaaatgcgcagagcaaacatctttcaaaggccaccccagcagacatgtttgccaaggcctttcgggt

SEQ ID NO: 159395 - DNA, 78 bp, Homo sapiens
gcgtccgagctgccagcaaagagattgaggagacttcagaagaaacacctacaacaggagaaggagtgcctcatgtcc

SEQ ID NO: 159396 - DNA, 90 bp, Homo sapiens
ttggaatgggaaatcctctgcttgacatctctgctgtagtggacaaagatttccttgataaaactgataaatttcaaacggaagagagtg

SEQ ID NO: 159397 - DNA, 50 bp, Homo sapiens
cccggacctcgcttacctgcatgctggacttaaagagagatctacttcag

SEQ ID NO: 159398 - DNA, 100 bp, Homo sapiens
ctcgcttgcagttcagcgaccacgagagaagaagaaggaggttcctgctgtgccagaaacccttaagaaaaagcgaaggaatttcgcagagctgaagatc

SEQ ID NO: 159399 - DNA, 82 bp, Homo sapiens
agcaccgcagccttgggcctcgcgccggctatggccgtgccctggggctgagccctcagggtttgccttcccggattgggcc

SEQ ID NO: 159400 - DNA, 90 bp, Homo sapiens
acgaggtgcgccggctgatcgcttgccctgcagggacattcaaggccagccaggaagctgaaggctgctcccactgcccctccaacagcc

SEQ ID NO: 159401 - DNA, 90 bp, Homo sapiens
cggccaacgacacatttgacattgatccgatggtggttactggatggccatgagctacccccaccaattgcctttgatgttgaagccccc

SEQ ID NO: 159402 - DNA, 100 bp, Homo sapiens
gatctttagataacattgttaagctgtgggatacaagaaggggtggtgttctggaaccagaggggacagtggagattaagttccgaaagaaagatctgat

SEQ ID NO: 159403 - DNA, 100 bp, Homo sapiens
gagttccccttcgagaggaggcagattcccctctacatagacgacaccctgacggcaaaagtcaacaactctagcttaattggagtaggctatactcaga

SEQ ID NO: 159404 - DNA, 100 bp, Homo sapiens
tgggaagacggttgctaattagcctgcaacaaagagttccttgctcatctaaaagaggcaatcaccgttcaggccattgatgacaacatgtcccttgatg

SEQ ID NO: 159405 - DNA, 75 bp, Homo sapiens
ctcctgagtagctgagactacagactctcttggaagtttaggatatttcacagttctgaatgttagccactgaaa

SEQ ID NO: 159406 - DNA, 107 bp, Homo sapiens
gtgaggacgcggcagcccgtggagtcggctgagggaaaagcgaggcaaggcaggcggacaagttggatggcttgaggactggtactaaaaggaaacgtgactgggag

SEQ ID NO: 159407 - DNA, 75 bp, Homo sapiens
cgagccatggctctcgccgtccgagtcgtttattggtgtgaagatatgtgacgtgtataacgctgtcatggacgt

SEQ ID NO: 159408 - DNA, 82 bp, Homo sapiens
tgcagcagccttcagcttttggcagcatgaaagttagcacttttcctaaaaggattgtacaccttagaagtgcttaaggaag

SEQ ID NO: 159409 - DNA, 88 bp, Homo sapiens
ttgtcaggcaggccttggcgtaccttgagcagagtactatactggcaattgctggagaagattttgcaattgttgcttctgatactcg

SEQ ID NO: 159410 - DNA, 96 bp, Homo sapiens
tgcgatcagacgcgcgtgcccagctgaaccagcatgtgtcaatggcctgtgtccacctggcttccaagatagaagaggccccaagacgcatacggg

SEQ ID NO: 159411 - DNA, 50 bp, Homo sapiens
caggcgctcaccatgttccctggagggtgctttcttctgcgacctggtac

SEQ ID NO: 159412 - DNA, 101 bp, Homo sapiens
gaacgccctctttttaaaaaaggtatagacacgtgtggccgtttacgctgtaggatcctcattcccactggctttgaacattttggggacttacaatgccg

SEQ ID NO: 159413 - DNA, 74 bp, Homo sapiens
aggacctggacccggacccaaagtgccatgtctttaatgaaacccagcgtttgctggcagaaccagttcctggc

SEQ ID NO: 159414 - DNA, 101 bp, Homo sapiens
atcattcagcaaggtggctggtccaattcaagagaaaagcccaaaacaggccttgtcgtctcacatgtattcagcatccttacttcgtctgagccagcctg

SEQ ID NO: 159415 - DNA, 98 bp, Homo sapiens
gacgatggaaattccgaaagattccttgcagaagtacctcaaagacttactgggtatccagaccacagttgaggagctcaagcttgggaaaatggtgt

SEQ ID NO: 159416 - DNA, 100 bp, Homo sapiens
gcgtcgaagacatggaccagggctacggaggtcccacaccggcgagcgccccttcctctgctccgagtgcgggaagagcttctcccgctcatcctcgctc

SEQ ID NO: 159417 - DNA, 100 bp, Homo sapiens
cagaggcccaagcgtttagattctgctgatgccaaagatccaaagatagcatcttctgtcactgctggagttgccagttcactctcagaaaaaatagccg

SEQ ID NO: 159418 - DNA, 75 bp, Homo sapiens
tctgatgtggagcagctgatgggctccattaacaccattccagacttatgaaaatatgcatcagtttaatactgt

SEQ ID NO: 159419 - DNA, 100 bp, Homo sapiens
cacactccaggaatgccagtgcatcttttgcacagctgcccgccatgttcatagaggataaagcagtagacaccctggcttacctcagtgacggtgacgc

SEQ ID NO: 159420 - DNA, 100 bp, Homo sapiens
gacatcgatagggatgcagaggatcagaaccggtacctggatggcatggaaattggccttgcctctctgggtgcacctgatgaatacattgaaaagctcg

SEQ ID NO: 159421 - DNA, 83 bp, Homo sapiens
cctacagcaatgctccacagcacatgccaagtttcttcctaacagtggtgattctactctggccatgtgtgcccgtgacgggc

SEQ ID NO: 159422 - DNA, 51 bp, Homo sapiens
acgcgaaggatatcggtttcattaagaaggtgcttcctggaggggcctgcc

SEQ ID NO: 159423 - DNA, 96 bp, Homo sapiens
ccgggacaccgcacagccgggaaatggaagatgagaatgtgcctactgctcctgatcctccaagtcaacatttacgtgggcatgggacaggctttt

SEQ ID NO: 159424 - DNA, 100 bp, Homo sapiens
ctgaaagctgctgagtgtcctgcagcagcaaagtgtgggatgctgtctcaggagatgaattgatgaccctggctcataaacacattgtcaagactgtgga

SEQ ID NO: 159425 - DNA, 82 bp, Homo sapiens
gggaacccacaggagtcgctggatagactgcacaaggtgaagactgtctgcagcaagatccatatcatagattttgacgatg

SEQ ID NO: 159426 - DNA, 75 bp, Homo sapiens
tcggggacattattgcgcgtggaacggctgcttttggaagaatttttccctagattggtgtaaacagccagacgt

SEQ ID NO: 159427 - DNA, 98 bp, Homo sapiens
cttccgggaacgggacgagttcgtcatccgtgctgaggacatcccttccctcaagagtccgccatggagagggaccgctacatgagccccatggaggc

SEQ ID NO: 159428 - DNA, 90 bp, Homo sapiens
ttgacatagacctggaccagccagaggacgcgggctctgaggatgagctggaggaggggttacatggacacagaacagtatgaagaagca

SEQ ID NO: 159429 - DNA, 101 bp, Homo sapiens
ttgagctccaggagttcgtctcttacgtctgcggaagtgcagctgcctcagttcttagcgcaggacaggaagatgtcacccaagcgcatagctaaaagaag

SEQ ID NO: 159430 - DNA, 103 bp, Homo sapiens
ggccgggcacctccgagcgcaaggacagcgcgaggtccgcgcagcccagcgcagccatgcctccggtgtggctgtctctgatggtgtcatcaaggtgttcaac

SEQ ID NO: 159431 - DNA, 75 bp, Homo sapiens
cgtgcattcgtgaagaagcccatcagtatttcttgaataccaggattgtcagctgacctctgtcctgtgtgccca

SEQ ID NO: 159432 - DNA, 90 bp, Homo sapiens
tgatatctcaaaaggtgatctggacaaaggaacaggtatctcagggattttggaccagggggagggtgtcctgattattttcgatgaacc

SEQ ID NO: 159433 - DNA, 101 bp, Homo sapiens
agggatcaaagagcaaacagattcagtggcctgcattggaacgtcaaggtcgtgggaaataaaaggcagttctacacagactgcagcaacggttgcatctg

SEQ ID NO: 159434 - DNA, 75 bp, Homo sapiens
cggcgacggcgcagtgcgaagcgaaacagggctgggttacgacccctacaaccctgagctgcccaagccccccgc

SEQ ID NO: 159435 - DNA, 126 bp, Homo sapiens
tgctattcctggtctacatcctgcgggtgcctttgaaaatcaacgacaacttgagcacagaccgaggctgggccaagatggtgtctgtgtttcgaagcgaggagatgtgtttgtcacaactgtttc

SEQ ID NO: 159436 - DNA, 100 bp, Homo sapiens
gttagacttgtttcttatatgtgatgccattccagcactggactcatggaggctgagcatttattcagttgccattgccccaaatggagccttacagttg

SEQ ID NO: 159437 - DNA, 100 bp, Homo sapiens
atgacccatgctcttcagtggcccagtcttaccgttcagtggcttcctgaagtgactaattttctggatatgccgcagaaggatccgtgccagaagcaag

SEQ ID NO: 159438 - DNA, 74 bp, Homo sapiens
gcgctgctgcttggcgccctgctctgcgcacacgcctgtgcaggagacatggcggacgcagcatctccgtgctc

SEQ ID NO: 159439 - DNA, 96 bp, Homo sapiens
aatttgggaaactggactatacttcaggacatcactccattagggtttgggatgctctgacagacaattacatcccttcactctcagaagactgga

SEQ ID NO: 159440 - DNA, 83 bp, Homo sapiens
ctcccagccacctctgaagttgccaggcttcccaacattcttgtctgtgcaatggctgccatccggaagaaactggtgattgt

SEQ ID NO: 159441 - DNA, 49 bp, Homo sapiens
tcacgcatcaggcgcgggaagcggcccccaccatgaagggtttcacagc

SEQ ID NO: 159442 - DNA, 100 bp, Homo sapiens
cctggctttgatggagtagtcaagggaagaaacccttttttcttggagccagcaataattatcacaattactgatgggagcaagttgactaccaccagtg

SEQ ID NO: 159443 - DNA, 75 bp, Homo sapiens
ctggcgctagtctgaccctccgccaggcaaaaggaaggtatttgacctgtccaaagacgacttgatacctctata

SEQ ID NO: 159444 - DNA, 98 bp, Homo sapiens
agacagaaactggcatgaggattctgccaccatggaagggctcctgtctccgatgaggacgaaggaacatcgtcttgagcaatcccaagaagaggaac

SEQ ID NO: 159445 - DNA, 95 bp, Homo sapiens
ccacttcggccaagaaattagacaagaaacattggaaaagaaatcctgataagaactgcttttcccattaaagatatccatgatgttttggaagt

SEQ ID NO: 159446 - DNA, 100 bp, Homo sapiens
tgccccccgcccccaagccgcggccatggacctggcggatccggcctgccctggcccagctcaacacctgatttcgcatctggaatcaagagacccatgg

SEQ ID NO: 159447 - DNA, 75 bp, Homo sapiens
gtgagcaccttttggcccaatgaatatcagatgccttcaattaagttgcagagttctgatggagagatatttgaa

SEQ ID NO: 159448 - DNA, 100 bp, Homo sapiens
ctgaagagagactacgcaggaaagccccagccacccatcaaatcagagagaaggaatccaccttcttacgctatggcagctcaggcccagaatcagcagc

SEQ ID NO: 159449 - DNA, 90 bp, Homo sapiens
ttgcaacagtggccgcacgcataggctgaagtgcaatgttgtgatctcggctcactgcaacctctgcctcccaggttcaagcgattctcc

SEQ ID NO: 159450 - DNA, 88 bp, Homo sapiens
gtccaaggccgaggaggccaagaagctggcgggccgcgcggctgtggagaaccacgtgagggtgctggagaatctggtaaaagcacca

SEQ ID NO: 159451 - DNA, 99 bp, Homo sapiens
ataagctatatactttggttacctatgtacctgttaccactttcaaaattgatccacctgaagaattaggagctagtatttctgtcacaacagatgagc

SEQ ID NO: 159452 - DNA, 90 bp, Homo sapiens
aaaataagattgaagaactacttgctagtcttttaaacagctacgtaattcgaattgacttgattttttcaagtaatcctagaaaggggg

SEQ ID NO: 159453 - DNA, 76 bp, Homo sapiens
caaccttgtgctggacggcaccattgagtacatgcgagtagagacggggtttcaccatgttagccaggatggtctc

SEQ ID NO: 159454 - DNA, 97 bp, Homo sapiens
caggccgggccacagcctggaggccgagcgcgagcagttcgacaagacccaggtcgtggagtcagatttgagtgatgatggcaaagcatctttggtg

SEQ ID NO: 159455 - DNA, 128 bp, Homo sapiens
gcagcgagggtgggcggcggcggagggagctggaccccatggacgtccgcggggtgatagcacactcagataagaatcgcatgacaccccacaacctgggaattgtgtttggaccaaccctgtttcgg

SEQ ID NO: 159456 - DNA, 75 bp, Homo sapiens
ctggggatcttcgcactatcccaaggatctctctaggagctgacactcgaaccttcacgacccattcggattttt

SEQ ID NO: 159457 - DNA, 118 bp, Homo sapiens
tttgagcccagctgcctggatgccttcccaaacctgaaggacttcatctcccgatttgagtatgaagtgtaacagaacagactttaccacctgaaactgctgcttcaagttcagatca

SEQ ID NO: 159458 - DNA, 75 bp, Homo sapiens
tctatggcgaatgcaacccgacgagggagtggggggaaagctctggcaatttaaatgacccaaataaggaggcac

SEQ ID NO: 159459 - DNA, 100 bp, Homo sapiens
cgaggcaaggagctaaagcagcgtgcgttcagccctggggcgggctggtccgagtctctgttttggaagctcaaccagtggctgatgattcacatgtttc

SEQ ID NO: 159460 - DNA, 76 bp, Homo sapiens
ttcggttcccacaacagcctgtcctattttgtaacggattatgatccaaccattgaagattcttacacaaagcagt

SEQ ID NO: 159461 - DNA, 73 bp, Homo sapiens
gcgacagcaacagctctgccggctggaagcactctccgaatcagagcagtgcctctctcagatacaagaatta

SEQ ID NO: 159462 - DNA, 75 bp, Homo sapiens
acaattgatttgctcttacgtatttgtgtgacttgactcttcaaacacaaaggactgatcctttgaaatactcca

SEQ ID NO: 159463 - DNA, 82 bp, Homo sapiens
ggcagtccacccaccgccgccgcctcccagggctggtgaattaccatatctccgtcaagtgcagtaaccagttcaagttgga

SEQ ID NO: 159464 - DNA, 95 bp, Homo sapiens
ttactgtgaaccaaaaccaactgttatcaagagggtttgaaaaccttgtaccttatacttcaactgttaggtgatgccacactcaatcagaaact

SEQ ID NO: 159465 - DNA, 98 bp, Homo sapiens
cagatgccactgtaagtggggagagaagctgctcaggatcccatgacagattctgttgtcacgtctccttacagagtttgagcggtgctgaactgtca

SEQ ID NO: 159466 - DNA, 50 bp, Homo sapiens
cgcagtggtcgcttcttctccttggacttggatgttgtgggtgatggtat

SEQ ID NO: 159467 - DNA, 76 bp, Homo sapiens
ctctgctcttccaacaccagtggaagatgatcacatcccagcctttctgagaaaagtctacagcattctttctctg

SEQ ID NO: 159468 - DNA, 101 bp, Homo sapiens
gccccgataacgggccgcccccacagcaccccgggctggcgtgagaccccacgtgggccagcttgaacctgggcgccctcatctgcatcgagtgttctggc

SEQ ID NO: 159469 - DNA, 90 bp, Homo sapiens
ggcagtatccttgtggatgaatatggcatggaagaaggctgtcggcagggactgctagacatgctccagttacatattattgaagttggc

SEQ ID NO: 159470 - DNA, 90 bp, Homo sapiens
aaggaagaaaacctttgaccatgaagagaaatgagatgatagccaaaccctcaggttttagctaaagaagatactgaggcagctattcaa

SEQ ID NO: 159471 - DNA, 73 bp, Homo sapiens
agactgaaaacctcccctgtggaaggtggtgttatcaaggagaagaaattcctgccttgaccagatgtgtgga

SEQ ID NO: 159472 - DNA, 90 bp, Homo sapiens
caggaaagacatggagattctcttaaaaagactggtgaattttcagctcgtttccttttgaagctgcccgtagatttcagcaatatcccc

SEQ ID NO: 159473 - DNA, 123 bp, Homo sapiens
gtggatattatggctaataacacaacaagtttagggagtccatggccagaaaacttttggggccatcgaagacggcaatttggaggaaatggaagaggaagtacggcttaagaagcgaaaaag

SEQ ID NO: 159474 - DNA, 100 bp, Homo sapiens
ggaaacaccattccagaaaatgggattgcccaccacgataatgcagttcttattactagcaaaccaagatggagtatgagtggaaacctgacgagcaagg

SEQ ID NO: 159475 - DNA, 83 bp, Homo sapiens
gcgggaggtgttcgagaacgaccccgagacggtaaggctggcctctctgcagtcagaggtctgagctctgccatggggatagg

SEQ ID NO: 159476 - DNA, 74 bp, Homo sapiens
agaagccgagacccacagctgtggctggtcattgaccgcaaggtttacaacatcaccaaatggtccatccagca

SEQ ID NO: 159477 - DNA, 120 bp, Homo sapiens
ccccgcgctggtgcagccaccctcgctccctctgctcttcctcccttcgctcgcaccatggtgctggagaatctggtaaaagcaccattgtgaagcagatgaggatcctgcatgttaatg

SEQ ID NO: 159478 - DNA, 96 bp, Homo sapiens
gtgggggccccactgagtatgtcggaggagagcgacatggacaaagccatcaagtgcctggagccctgcaaggaatcaggggacctgaggaaacac

SEQ ID NO: 159479 - DNA, 51 bp, Homo sapiens
aacggaacttgccgcgtcgaggactgtcggtaaatcttgctgctgctcact

SEQ ID NO: 159480 - DNA, 100 bp, Homo sapiens
aaccctgacttctgagctttcataaccccaggatcctccagaaaatttgcggcgcgctgagggaaaaccttgctgcagaaaaatatggctcaggagacta

SEQ ID NO: 159481 - DNA, 98 bp, Homo sapiens
tcgggtgcccagctccgggtctcagagatccgtgatgccttcgagagagaggctacggaaacaggccgagaagaacgtggagaagaaaattgacaaat

SEQ ID NO: 159482 - DNA, 100 bp, Homo sapiens
atcctagttcctcacagtctacgtcaggctcaagcaagcttccgggatgagaccccaagtttgtggagcgaacactgcggctggcaggcactcagccctt

SEQ ID NO: 159483 - DNA, 50 bp, Homo sapiens
gcggaccgggccaggctgcttgaaggtcaaaaggctgagtttcaaattct

SEQ ID NO: 159484 - DNA, 90 bp, Homo sapiens
cctgcgtgggaccctccacctggcagcagttacacaacagccaatgcggagtctgacaatgagcgggactctgacaaagaaagtgaggac

SEQ ID NO: 159485 - DNA, 83 bp, Homo sapiens
tcacagcactctgggcgaaaattggatgtgaaaatgaagccagaccgaggctcagttattgggacagaggctgatgaagaaag

SEQ ID NO: 159486 - DNA, 50 bp, Homo sapiens
tactggaaacccacaggcacacccaagttccgaggtgcaccgattatacc

SEQ ID NO: 159487 - DNA, 90 bp, Homo sapiens
ccatgtgggaggaggaaaatcatcttatcagacgaaggcaaaatgtatggtgacctgagcatctctgcagaccgcctgagtgagaagcgc

SEQ ID NO: 159488 - DNA, 98 bp, Homo sapiens
agaactcgagcgacagagacaagctgagcttgccgcacaaaaagctagagaggaatggaagttggatacactttgtgacttgtacgagacactgacca

SEQ ID NO: 159489 - DNA, 50 bp, Homo sapiens
aggcgtgagccaccgtgcctggctgaaggggttctgaaggaacattaaat

SEQ ID NO: 159490 - DNA, 82 bp, Homo sapiens
ctatttaggttttaaacagagaactgtggctgcaccatctgtcttcatcttcccgccatctgatgagcagttgaaatctgga

SEQ ID NO: 159491 - DNA, 74 bp, Homo sapiens
gagttagtctgcccgaggaccttctggaggataccgaccaagaccatcactatgaccgatggagactatgatta

SEQ ID NO: 159492 - DNA, 75 bp, Homo sapiens
aaccctggtcaccgtctcctcaggacatggcaaccacagagagagcagcccttttctttcccccttggaggcttc

SEQ ID NO: 159493 - DNA, 97 bp, Homo sapiens
gctgctcaaaacctcgctccggaaaggggacacctggccctggattattgtcacagcatgggaattatgcacagagatgtcaagccccataatgtca

SEQ ID NO: 159494 - DNA, 50 bp, Homo sapiens
caccatcacccccaacaccctcaagtcgactcaaccccgagtctcacctc

SEQ ID NO: 159495 - DNA, 74 bp, Homo sapiens
agtcatggcgaagcgcgagagtcagcgagcggcgatgccctccaaatccttggttatggaatatttggctcatc

SEQ ID NO: 159496 - DNA, 105 bp, Homo sapiens
cgccgcccacggcacggcagccaccatggcgctcctgctgtgcttcgtgctcctgtgcggagtagtggcaggatccaactttactactgtcatggagggaattac

SEQ ID NO: 159497 - DNA, 98 bp, Homo sapiens
tcctgacagtgttaatggaagtgaaccaagcattcctcagggctatgaagaggtttctcagaagttcacctccatacggcgagtccgtggtgataatt

SEQ ID NO: 159498 - DNA, 75 bp, Homo sapiens
gagtaccgcagggaggtggagaggaagcagaagggctctgaaggttctgcttggattctgctagacagacccgac

SEQ ID NO: 159499 - DNA, 100 bp, Homo sapiens
tcgccgtcccgggcggcgtggacctcctcaccctgccgcagctgtgcttcccagagatggacagagacgtatgtgcgttggtctcctaagggcacctacc

SEQ ID NO: 159500 - DNA, 96 bp, Homo sapiens
aggaaggaacgaggcaaggagctaaagcagcgtgcgttcagccctgggtggtcccaggctgcacccatggcagaaggaggagggcagaatcatcac

SEQ ID NO: 159501 - DNA, 83 bp, Homo sapiens
cgacatgagtgatgtggaggaaaacaacttcgagggcagattatttctcaaactctgaggctgcggagttcacacattgaaat

SEQ ID NO: 159502 - DNA, 90 bp, Homo sapiens
tgttaccagaggttaaagaagagatgcagggaagaggagaaggtcattccgctggaaagaccacagcaagattctttcattcgtctcctc

SEQ ID NO: 159503 - DNA, 50 bp, Homo sapiens
gccggccggcgcgtcgtccccacagcctggagtactcgggtactttgagt

SEQ ID NO: 159504 - DNA, 98 bp, Homo sapiens
ccgacctcgacgtcttgcctgtgtcccacttgttcgcggcctatagggcgaactttctgaccaagtatacaactacccagagggcctaggagaagtgc

SEQ ID NO: 159505 - DNA, 90 bp, Homo sapiens
ggacaaagcaagtccagatcagaatgcttcaacccacacacctcagtcttcagttaagggcatgagccagaaggagagctctaagtctgc

SEQ ID NO: 159506 - DNA, 75 bp, Homo sapiens
gaaaatcataccatatcagatgcctcgcagagcaccaggcccaccgtgaaaggttgctgctaaatgggaaaaact

SEQ ID NO: 159507 - DNA, 90 bp, Homo sapiens
cggacgagaagcgcagcaacgtgcggtgggaccacgagagctaagactttgaccccgacgcaggcttcagtgattgccgcggatcagaag

SEQ ID NO: 159508 - DNA, 83 bp, Homo sapiens
cgctgagcctgcagccggccctgccggcgcatattaaatttcctattgactacccctattcaccacctaccttcagattcttg

SEQ ID NO: 159509 - DNA, 90 bp, Homo sapiens
tggccaaagcctgcccagacggctcacctgtgcgggatggaacaaaaggttttgaagtacaggaagaaggttatctggcaaaaatcctgg

SEQ ID NO: 159510 - DNA, 98 bp, Homo sapiens
cctagcccagcaaatgatcagccttgcaaataatcacagattagcttgccgcagaatggaattcggcattgttcctacacagcttctcggcaacatct

SEQ ID NO: 159511 - DNA, 75 bp, Homo sapiens
ctcgacctgctaacagaactggaccttttcgatctttgatggaaaacagattccacagagaatggttgatggatg

SEQ ID NO: 159512 - DNA, 95 bp, Homo sapiens
cacagcatgcggaaaatactacagagtgtgcacactggctatcattgatccagctgccgggccgcaagtacagccctgggtacaacaccgaggtg

SEQ ID NO: 159513 - DNA, 50 bp, Homo sapiens
tcattcagcagagcgtgcgcacgattctcatcccttacagctgactcttc

SEQ ID NO: 159514 - DNA, 82 bp, Homo sapiens
acgggctctgctgtctccacggacgactcagagcaaggccagctgcgggccgtccagcggctgtgccacttctacagcgccg

SEQ ID NO: 159515 - DNA, 75 bp, Homo sapiens
ccaggatctcgggctcggaacgagactgcacgtattggtaaaggttttcaaggtgtcatgaaaagatggggattt

SEQ ID NO: 159516 - DNA, 83 bp, Homo sapiens
cgggtgtgtgctgcgttcacaggtgtttctgcggcagatggcatccgccacagactcgcgctatgggcagaaggagtcctcgg

SEQ ID NO: 159517 - DNA, 100 bp, Homo sapiens
tcctgatggcatgcctgtaaagaacttgcagttgaaggagtataacacagacggtgtacttgatctgtccactaagaaaagtccatgtgctggcagcact

SEQ ID NO: 159518 - DNA, 75 bp, Homo sapiens
gcagaactgcaggacatctgcaatgatgttctggaggagatgttaaagtaacccatcttgcaggacgacattgaa

SEQ ID NO: 159519 - DNA, 73 bp, Homo sapiens
tttaatggaaaatcgcttggttaaaacctgacacttttaacaggtcgtgcacacacacaagccgcacttcatg

SEQ ID NO: 159520 - DNA, 75 bp, Homo sapiens
cagagtgctgatgtgaaaaataccacgacaaaaccaccctagagtggaagctggacacactatgtgacttgtatg

SEQ ID NO: 159521 - DNA, 50 bp, Homo sapiens
cccgagaagaagttgaggcgctatgacattcagtcagaagaaggctgcta

SEQ ID NO: 159522 - DNA, 95 bp, Homo sapiens
tcttctttatgatccccacctgggttctggtggacctctcggctttcctggtcagcagcgacttgatgctcagtgacctccaggagtctgtggcc

SEQ ID NO: 159523 - DNA, 100 bp, Homo sapiens
gttccataaaccgaagctgctgaaaccacagagaaaagtcacgctggacctgcagagaaacgcctcctgattttgtcttacaatggaacttaaaaagtcg

SEQ ID NO: 159524 - DNA, 100 bp, Homo sapiens
agctatgataactcctgctctccgagaagcccttactaaacaagaaagttcaggagccctggaaaggagaaggaataagacggcaggaggaagagagaga

SEQ ID NO: 159525 - DNA, 120 bp, Homo sapiens
aagaagaaacgggccgcgaaccgcagtatcatgctggccaagaagatcatcattaaggacggaggcacggcctccccatggccacccatggaccagtcggcattcacttcctcccttctg

SEQ ID NO: 159526 - DNA, 90 bp, Homo sapiens
cgaagaaagtgcgcagcctgcaagattgtggtgcacacgccctgcatcgagcagctggagaagatgccctccaaatccttggttatggaa

SEQ ID NO: 159527 - DNA, 75 bp, Homo sapiens
cagcagagccgctgcagccatggccccaatcaagtcgagcaaaagatgtgataataccagcaaagccacctgtca

SEQ ID NO: 159528 - DNA, 76 bp, Homo sapiens
acatgaggaaaatgtccttccagcgctgcgcccggacagacaaggaattgaatgatctggcacgggaccctccagc

SEQ ID NO: 159529 - DNA, 100 bp, Homo sapiens
cccagcgctgtcgtgctcctctactcggagtggaagctggacacactatgtgacttgtatgaaaccctgaccatcacccaggcagtcatcttcatcaaca

SEQ ID NO: 159530 - DNA, 135 bp, Homo sapiens
gaatactccttccttcctccccacccattcctttaaatccggagggggaaaaaatcccaaggtctgcaaaggcttgtccagccggaagccctgagggcagctgttcccactggctctgctgaccttgtgccttgg

SEQ ID NO: 159531 - DNA, 75 bp, Homo sapiens
agcggctctttgtatgatgacgtcctcagaatggttggaatgaccctccagctttgaacagagtacccaaaaaga

SEQ ID NO: 159532 - DNA, 74 bp, Homo sapiens
ccaggccggggaggtggtggatgtcatcgagaagaacgagagcgaaggacagaataacgggctcccagattcac

SEQ ID NO: 159533 - DNA, 82 bp, Homo sapiens
tggttccagctgcagcacgtggacgctgactcggaagtgcagttgatattcactgatggactccaaagaatcattaactcct

SEQ ID NO: 159534 - DNA, 100 bp, Homo sapiens
gaggaggctgcgagcgagccgcgaaccgagcgggcggcgggcgcgcgcaccatgggggagaaacccgggaccaggctgtagaagccgcccagctggccga

SEQ ID NO: 159535 - DNA, 100 bp, Homo sapiens
cagccgctgagacggtttttcacaagcacaaacacagagcagtctaaagcaaccgagcactgagaaaaatgaactctgcccaaagaatgtcccaaagaga

SEQ ID NO: 159536 - DNA, 75 bp, Homo sapiens
tgggcaactgaaagaagtacaagcagacaaggagcaaagtgaggtaccacgaaaggcagtggtagaaaagccagc

SEQ ID NO: 159537 - DNA, 96 bp, Homo sapiens
cagatacccgcggtgcaccgcctgctgggagcgccgctcaaggtagctacagcaagctgggtagcaggcagatccaaaggatatcatgaagtttcc

SEQ ID NO: 159538 - DNA, 101 bp, Homo sapiens
gctgtccatgggaagagcatgcattgtgggttactggaggaacccgacatggattccacaggtgtgggcaataatagtgaaggtggaagaggaaaggcagg

SEQ ID NO: 159539 - DNA, 99 bp, Homo sapiens
cgataaaggaactcaggcgcctcttcttagttgatgatttagttgattctctgaagtttggcagtaatcagtccaaaccagagttcacagtggacctca

SEQ ID NO: 159540 - DNA, 100 bp, Homo sapiens
gaatttccttgtgcctccattcccgggaggggggagcggcgttggaggccaccgtttccaggaactgtggctgcaccatctgtcttcatcttcccgccat

SEQ ID NO: 159541 - DNA, 83 bp, Homo sapiens
cctcattcgggtggagctgagccggagacaggtggtgtttcataagatgtcacccaacgagaccctctttttggaaagtacca

SEQ ID NO: 159542 - DNA, 100 bp, Homo sapiens
gtttcgtctccagaaccctggacagctcctccaggatcaggagcgtctgggcaagcagctcaagttacgtgcagaaagggaagaaaaggagaagctgaaa

SEQ ID NO: 159543 - DNA, 82 bp, Homo sapiens
agagaagtcgcgaaagtgggccagaggttctgcgacaccacctcggctttccatgaagtctcagtttacccaaagaaggagc

SEQ ID NO: 159544 - DNA, 75 bp, Homo sapiens
tctacatgacctgctattttcagatttctgaaatgtcaccttatcactcagcaaaacccagcagctcagattcct

SEQ ID NO: 159545 - DNA, 98 bp, Homo sapiens
attcctcatggttggttcaaagtggaatgagaccgtggagctttttcgtgctaagatgccgttacggaaacatcgctgtcgtttcaagagctatgagc

SEQ ID NO: 159546 - DNA, 75 bp, Homo sapiens
agacgttctcaaggagaaggcagacctgggtagtaacactctggtacagatctccagaagtattgctggggtcag

SEQ ID NO: 159547 - DNA, 100 bp, Homo sapiens
gagacacgctgggccgaccccagagcggcgctggacagatatttatccccattttacaaggcctggctcttgctgccaaagagtgctccctcgacagtga

SEQ ID NO: 159548 - DNA, 90 bp, Homo sapiens
atatcctggattgatgacacatcagcatttgtttcccttagccagcccgagcaagtaaagattgaactgccattggatgtccagaatccc

SEQ ID NO: 159549 - DNA, 82 bp, Homo sapiens
tgtgtgccggcagctagcagagaagagaatgctgaaacttctgcagcatccagaactgagtaatagtcaacttctggcagac

SEQ ID NO: 159550 - DNA, 76 bp, Homo sapiens
gcaccaagttcacggccaacgccttggcactagggtggtgttcccactgatgaagagcaggcgactgggttggaga

SEQ ID NO: 159551 - DNA, 101 bp, Homo sapiens
ctgtcccgctggccctctgtctgcctgtgtccctgaccatggctccctgcagtaccctttaacgctgttgacagtgtcttgaagaggatgacaataattgg

SEQ ID NO: 159552 - DNA, 100 bp, Homo sapiens
ttagaaggtgacgaggagggagaagacgaggatgatgcggaaattaaccccaaggtggttcgagatcagatctctcactgcacagtgaaattgcgccaga

SEQ ID NO: 159553 - DNA, 108 bp, Homo sapiens
cagatgtaaagagaccggcaaagttcacgtgactgtggatctcaagtactaccggccaactgaagtggcccgccatgttcatagaggataaagcagtagacaccctgg

SEQ ID NO: 159554 - DNA, 75 bp, Homo sapiens
catctatcagcaggctccgggctgaagattgcttctcttctctcctccaaggctcgactacctgtgaagtggatg

SEQ ID NO: 159555 - DNA, 82 bp, Homo sapiens
aagcggatcccacacttctcagagctgcccctggacgaccaggtcatcctgctgcgggcagacaatgcagatcttcgtgaag

SEQ ID NO: 159556 - DNA, 75 bp, Homo sapiens
tggtgcattgcagttgcgtgttgttcagaaagagcacaatcattgtggagaagacagttcaagacctcctgaacc

SEQ ID NO: 159557 - DNA, 75 bp, Homo sapiens
acatggccccctggtttagggaggtgggtaattccagaattgattggccataccattgtcactgtattactgctc

SEQ ID NO: 159558 - DNA, 100 bp, Homo sapiens
cgccgtcaccctggcgcccgcggccgacgacgcgggagagccgcccccagttgcggagttggagaggaaatgaaccagaagagtggatccctcggacata

SEQ ID NO: 159559 - DNA, 83 bp, Homo sapiens
ccgctgccgtcgccgccgccaccatgcccaagagaaagtgcccatgacgcttccggagacaaccctggaaacactgaagcata

SEQ ID NO: 159560 - DNA, 82 bp, Homo sapiens
cagcacgagatgtcccaagaaggcttcagcacagccctcacaatgcccttgccctgttggatgaataggcacctctggaaga

SEQ ID NO: 159561 - DNA, 98 bp, Homo sapiens
atggtgctgggtgcagatgcagtgtggctctggatagcaccttatggacagaagtttgcctgcaatggtactgtaattgagcatccggaatatggaga

SEQ ID NO: 159562 - DNA, 75 bp, Homo sapiens
gggggagccccgggagccgcacggtggtgaagaaggtgaagtccatgcagatgttccacatgcccatcacttcag

SEQ ID NO: 159563 - DNA, 96 bp, Homo sapiens
gaatctaaaaagccctcagtaccagagacagaagcagatggattcgtccttttaggagtgtagcttttgtgaagaccctcgctttgctagaactgg

SEQ ID NO: 159564 - DNA, 75 bp, Homo sapiens
attaaaagcacatttgtgcattgtaaggcaaatcctgatcctaactgttgtcttggagtatttgggctgagcttg

SEQ ID NO: 159565 - DNA, 82 bp, Homo sapiens
ccccagaagagcggcggctggaccacttctctgtcgacggctatgacagttctgacaatgcagatcttcgtgaagactctga

SEQ ID NO: 159566 - DNA, 97 bp, Homo sapiens
gctgctcggacagatgaagctccccaaggagctgcaggtgctggagaatctggtaaaagcaccattgtgaagcagatgaggatcctgcatgttaatg

SEQ ID NO: 159567 - DNA, 100 bp, Homo sapiens
tggactctgacaccttatgcactgaagaggtcttccccactgcaggagctggattttgtgttggagacaaatttttcctaaagaataacatgatcctttg

SEQ ID NO: 159568 - DNA, 100 bp, Homo sapiens
attatttgcacccagtcctgcagcgccagcagctggactatggcatctatgttatcaaccagacagtcgaccggcccaaggactggtacaagacgatgtt

SEQ ID NO: 159569 - DNA, 75 bp, Homo sapiens
tcgtcgacatgagtgatgtggaggaaaacaacttcgagggcagaatttggagcaagaggtggtggtggccttccc

SEQ ID NO: 159570 - DNA, 90 bp, Homo sapiens
cataaacagcacggaagcgcggacggcgcacgacgagtactggcatgcgcacgtggacaagggccattatgctgtgatgaacaaccccac

SEQ ID NO: 159571 - DNA, 100 bp, Homo sapiens
gaggccggggtgaccctgccggagcctccgctgccagcgacatgttcaagctgagatgccgcggcagtttcccaagctgaacatctctgaagtggatgag

SEQ ID NO: 159572 - DNA, 97 bp, Homo sapiens
ggaacctcactgaaaattggtattgttggattgccaaatgttgggtgagaagaaatttgtttgtccagaatgttcaaaacgctttatgagaagtgac

SEQ ID NO: 159573 - DNA, 90 bp, Homo sapiens
agaagcatctccttggacagactcccgaacaagcactgcaggaatccataacactggaggatgtggctgtggacttcacttgggaggagt

SEQ ID NO: 159574 - DNA, 83 bp, Homo sapiens
ttgaagtacaccgtggtgacattgtatcattggtgcctgatggaattgggactgtttcagtggaagaaaaagaaagatttgag

SEQ ID NO: 159575 - DNA, 98 bp, Homo sapiens
cgggccccgctgagccgccccacacccttggaggacttggagggccgcatccacagccatgagaaaaattgtgccgacccctgccctggaagagcaca

SEQ ID NO: 159576 - DNA, 100 bp, Homo sapiens
gccaacaacagtgtgggtgcttctcctgcttctgtaatagtcatctctgcagaccccgaaaacatcatgttgtcataggaacaactggagaagaataaag

SEQ ID NO: 159577 - DNA, 75 bp, Homo sapiens
tttggaccatgcttcaagtatcctccgaaggatctcacttaccgccctatgtcgaactctctcaggttcacccag

SEQ ID NO: 159578 - DNA, 75 bp, Homo sapiens
gccacaacggggccggcaagaccaccaccctattccgggaccccaaatcccagcggacgcaccaggctcaggtgg

SEQ ID NO: 159579 - DNA, 100 bp, Homo sapiens
aagtcttacaccactcccaagaagaataagcacaagagaaagaaggttaagctggctgtcctgaaatattataagacctgatggccaaaagaaaggaaga

SEQ ID NO: 159580 - DNA, 99 bp, Homo sapiens
cgggtacgcgccgcccggcgcgcacaggctgtagcaggttccggcggacggcgttgcgaagagagatgcaggtcagctcctccagtaccacaacttctg

SEQ ID NO: 159581 - DNA, 90 bp, Homo sapiens
cttgtttcttatatgtgatgccattccagcactggactcatggaggctgagcatttattcagaacactggaactattttggggctgatga

SEQ ID NO: 159582 - DNA, 98 bp, Homo sapiens
gatgtggatgcagcagataaccggaaaatcacacctcttatgtcagcatttcgcaaggaaatgttctgtgaaggtcaagtgtgcaaacagacattcca

SEQ ID NO: 159583 - DNA, 83 bp, Homo sapiens
acaaaatacaaatcatggagccgctggggtcccttttgcctcagatactattttgaaggttttccctccagatgagattgagc

SEQ ID NO: 159584 - DNA, 100 bp, Homo sapiens
cggggagcgtccggagctagctggatcctctaggcagaaatgagcccctgagtcctgagttggtggcagctgcatctgctgctctgttttgacaagcaaa

SEQ ID NO: 159585 - DNA, 75 bp, Homo sapiens
gcaagagtaacagcagcgccgtcccgtccgacagccaggcccgggagaagaggtgtgattgcctatatcagttct

SEQ ID NO: 159586 - DNA, 75 bp, Homo sapiens
tttgtctcaatgaaggttgatttcatcagactaaaaagttacaggctgtcattcttctctacagaagagcttctc

SEQ ID NO: 159587 - DNA, 100 bp, Homo sapiens
gcagagcgccgaggaggctttcctgctggtggcaaccgcctacgagacactcaaggtcagcccaaggctgccccctcggtcactctgttcccgccctcct

SEQ ID NO: 159588 - DNA, 88 bp, Homo sapiens
tcgatgcaaatcaaccagagggaagaaaatgcaaactgaaacctgggaaacagtgcagtcttaaaatccttgcacgtttgatgactgc

SEQ ID NO: 159589 - DNA, 83 bp, Homo sapiens
gggagagctcctgggccacccctcctttcaggtcaagaagaggactgtcagaaggacgtagaaggcacggttttactgtgagg

SEQ ID NO: 159590 - DNA, 100 bp, Homo sapiens
accccaaagttgcatttcctcgtcgagcgcaacccaagatcttggaaaggactttggaacctgatagctcggatgaagagcccccacctgtgtactcccc

SEQ ID NO: 159591 - DNA, 104 bp, Homo sapiens
ctcggcgcaccatgaggctcccggggcccaaggccgaccgtgagagcgcacgagagataaaagcaacagtgtttgatgactgcaagaaagaaggcgaatggaag

SEQ ID NO: 159592 - DNA, 75 bp, Homo sapiens
agcgctcccacccccggcggcggcacgatgccctttgacttcaggagatcaagaagttggtatatgtttacctgg

SEQ ID NO: 159593 - DNA, 90 bp, Homo sapiens
ccccagacctggagaggatccgcacacttctggagtatctttacgcgttcagtattgttcccatgaagctaatggatgcagcagaactgg

SEQ ID NO: 159594 - DNA, 100 bp, Homo sapiens
gatgaattgcaagtttgtgccccatagctgcacagcctctctgccagcaccctgtccatgtcatctgggagcagcctgggttccctggcatcgagtcggg

SEQ ID NO: 159595 - DNA, 78 bp, Homo sapiens
cgtatagcattggtaaagaacgatcgtccagtggagcgttttaccaacgaggatcatttggctgtccataaacataaa

SEQ ID NO: 159596 - DNA, 100 bp, Homo sapiens
aagttaatttcatgcagaaccatcttgaaatagagaagacttgtcgagaaagtgctgaagctttggcaacaaagaatgctgcctttttatatggtcttgg

SEQ ID NO: 159597 - DNA, 75 bp, Homo sapiens
agaacaccaaagattgtctctggcaaagtctgcgaaacttgtatctgttttaaagaaggcacttgaaattacaaa

SEQ ID NO: 159598 - DNA, 83 bp, Homo sapiens
ctacaggggaaaatattctgaggagcatcagatccatgctgctgctgactcggagccccacagcttggcacaggctctctcag

SEQ ID NO: 159599 - DNA, 75 bp, Homo sapiens
agacagcactctgaaagcagctggaatcggtcctggcagtcagtaacttttgaaaggcagcctgcctccttcatc

SEQ ID NO: 159600 - DNA, 74 bp, Homo sapiens
gctgctgctgctgctgcccgcgtccgaggctcgcgggcggcgggcccgggtgcacattcaggttcccgagcaca

SEQ ID NO: 159601 - DNA, 74 bp, Homo sapiens
ttcacaccagctccttcccctggcgatcagagctcagactttcttgtctgcacagaaagtcccagtacaacttc

SEQ ID NO: 159602 - DNA, 100 bp, Homo sapiens
gaggatgatgcattgtggcctcctcctgaccgagtgggccggcagggtacagctcgcagaaagaagaaggtggtacatagaacagccacagctgatgaca

SEQ ID NO: 159603 - DNA, 75 bp, Homo sapiens
ctgtggctgaggctacaccccggagccaggagggttgctgtcttcctcgtccctccggcccttcttcctactcag

SEQ ID NO: 159604 - DNA, 94 bp, Homo sapiens
tgccgcctacgtgccccctggactcatgcccgggaatatgatgaaccaatcttgaaacacctgcaggatattaaagtgaaattttctgaccctg

SEQ ID NO: 159605 - DNA, 101 bp, Homo sapiens
aagcagatttcccgagactacggtgtgctgttagaaggttctggtcttgcactaagggatcccaacggcttcaatgactggaccttctccactgtgcgatg

SEQ ID NO: 159606 - DNA, 100 bp, Homo sapiens
gtcttcaccgccccacactggcggatgaagcagctggtggggctctactgcgacaagtgccgcgtatgatgctgtccttgacagaaatgtggccattaag

SEQ ID NO: 159607 - DNA, 75 bp, Homo sapiens
acagtctatggatctacattataccaataacgagattgagaggatccagaatccagatctctggaatagctacca

SEQ ID NO: 159608 - DNA, 82 bp, Homo sapiens
ggaaccctggtcaccgtctcctcagggtggtgaaggaggagatctttgatgacaatgccaagcttccctgcttcaacggccg

SEQ ID NO: 159609 - DNA, 74 bp, Homo sapiens
gacacagttgcagccaaactcatctatgattcctggtcatctgctacaccaaaattgcattgagccaaacttgc

SEQ ID NO: 159610 - DNA, 101 bp, Homo sapiens
ggccctccgggtctggggagtggggaatgaggcgggggtcggcccggggctcggagaatgggcagttcatccatgagctcggatttcccacattacaactt

SEQ ID NO: 159611 - DNA, 80 bp, Homo sapiens
catgcagtgacatgttgataaaaaatgatgacattcactactttcactgcctaagaatcctggaccttctcaaaggcaca

SEQ ID NO: 159612 - DNA, 100 bp, Homo sapiens
ccgagcgttggtgtctggcggtttccgaccgttggtgtctggcacgcgccaccccgatgtaccaggatagcaaaacctgatctcataaaacctaggtcac

SEQ ID NO: 159613 - DNA, 74 bp, Homo sapiens
agaggcctagcagccccgccttgtgcatggatcagaccagcaagttgctgcttttgctcagaggacatccatga

SEQ ID NO: 159614 - DNA, 100 bp, Homo sapiens
atggtcaagagcgtgccctacttcaaggataagggtgacagcaacagctcggcgggctggaaggtggaaacaagttaacgtaccagaattttcgtctgaa

SEQ ID NO: 159615 - DNA, 100 bp, Homo sapiens
tctgtaatgttcaggccatggaagaaatgatgatggaaatgaagtataataccaagaaagccccacttgagtgcctcagaccccagcccagctcagccac

SEQ ID NO: 159616 - DNA, 80 bp, Homo sapiens
agggatacatgccctacctcaacaagtacatcctggacaagaagggtgggagagaatcaagctcctgtggccacctgtgt

SEQ ID NO: 159617 - DNA, 83 bp, Homo sapiens
atctcagacttccagccttcagaactgtttttagaacttcagccataaaaatgggcagaattttccttgatcatatcggtggt

SEQ ID NO: 159618 - DNA, 96 bp, Homo sapiens
tttggggatcggcgctctggctgtttcgtgaaggagagagagacctccaatggaagtccgggcacatggcggagagcctcaccaacatgccacggc

SEQ ID NO: 159619 - DNA, 100 bp, Homo sapiens
cccagagctgccagcacttgtacaccttcacaggacaccgggatgcagtgtcggaggagaagcagccccaaaagacgaaggaaccctcaaaagaagatga

SEQ ID NO: 159620 - DNA, 83 bp, Homo sapiens
cctgagcacgctgctgtgtgagcagcaggcagcggaggaggagaaagagatggacctcccggactcggcctcgagggtcttct

SEQ ID NO: 159621 - DNA, 75 bp, Homo sapiens
catcttcctgcacacagccaaagtctgcaaaggtgcgagaagatgtactaaattcattgaataacaactttcttc

SEQ ID NO: 159622 - DNA, 48 bp, Homo sapiens
ttctgaccatctcacatgccacagttaagattctgtgtcaccagttgc

SEQ ID NO: 159623 - DNA, 83 bp, Homo sapiens
aagccgccgcctcgacccagggcccgcgggccaggagagcgctcggcggctacgagttccagggagctctgtcctggtgaccg

SEQ ID NO: 159624 - DNA, 82 bp, Homo sapiens
cgaggagtagtcgctggagtccgcgcctccctggactgggcatttagctatggagacattattatcccttacttctaaacga

SEQ ID NO: 159625 - DNA, 51 bp, Homo sapiens
cggaacccgtggtcctccgcttcatttgtggtcagaaatgagaagacatga

SEQ ID NO: 159626 - DNA, 83 bp, Homo sapiens
cagagtataacaatcagtgccgagcaattgtgatgagatattctgctgagtggaagtacgagctcaactggaggcagtcctgt

SEQ ID NO: 159627 - DNA, 75 bp, Homo sapiens
ggccgcgagcggaggtgtgtgcggactgcagcgccccgggaatactcccccagttgcaagaggcgcaggaccgtg

SEQ ID NO: 159628 - DNA, 100 bp, Homo sapiens
gaggcacaaatggctgccaaactggaacgtttgcgagagaaggctctccccaggtggtggcaaagatgatcgccattagctccaggcttacatcctacca

SEQ ID NO: 159629 - DNA, 90 bp, Homo sapiens
cgcccagcaatcacagaagccgacaaggcgttcaagcgaaaacatgaccgctgagcccatgagcctacagacctggtacctggatttttg

SEQ ID NO: 159630 - DNA, 100 bp, Homo sapiens
aatcacttgcggcagctgcagcagcaaatccaacattggcttttggtcagggtcttgctactggcatgccaggcatgcttctgacggccaatgaaacccc

SEQ ID NO: 159631 - DNA, 98 bp, Homo sapiens
gcatggcggcgcaccttaagaagcgggtttatgaggaattcacgaaagtggttcagctcagcaaaacccagcagctcagattcctgccaggcagcggg

SEQ ID NO: 159632 - DNA, 98 bp, Homo sapiens
ggcgttcgcaccggaaaatgtagcttcccggttaagtcataccctaatgatcccagcaagataatgtcctgtcttctaagatgtgcatcaagcctggt

SEQ ID NO: 159633 - DNA, 95 bp, Homo sapiens
gcggttgcgggggggaagtgactgggcggtgccggcgccggagacgatgccgttgatatggaggcacagcaagttaatgaagcagaatcagcaag

SEQ ID NO: 159634 - DNA, 87 bp, Homo sapiens
gtgcagaactccaaaaagcagctgccaatccagacttacagaaactgggagtgatttttccatgtttgaagctttgcgagatactat

SEQ ID NO: 159635 - DNA, 75 bp, Homo sapiens
gccagtatctcaagaaattcctcaggaggagatgttaaagtaacccatcttgcaggacgacattgaagattggtc

SEQ ID NO: 159636 - DNA, 90 bp, Homo sapiens
tcatgaaccaaatcatcaggaaatactacgagactgtctcagcccatccctacaaggtatgacaaggcagcaaagattgctaagacagca

SEQ ID NO: 159637 - DNA, 75 bp, Homo sapiens
agagtgagagctccccaggggagttctctgtgtctgtgaagagagtagttatcttgatggaattagaagttttga

SEQ ID NO: 159638 - DNA, 75 bp, Homo sapiens
atccctggactttaacaacaagcgcgatgagcacccagagaagtgcagggtcactttccgtatcctgatccttcc

SEQ ID NO: 159639 - DNA, 82 bp, Homo sapiens
gcgccccgcgcggcccgcccggatcgtggcctctcgagagcaaggtactccaaagattcaggtttactcacgtcatccagca

SEQ ID NO: 159640 - DNA, 75 bp, Homo sapiens
aagaacatgaaggaactgactcctcttcaagccatgatgcttcgtatggcaggaaaactcaatgtgagtagtgac

SEQ ID NO: 159641 - DNA, 100 bp, Homo sapiens
ctcttccttgtcctcttctttgacaacaagcgcacctggtatgaaaatgaaagtcttcagaatggaaggaagtcaactgaatttccaagaaaaatacgtg

SEQ ID NO: 159642 - DNA, 75 bp, Homo sapiens
cgcagtggtcgcttcttctccttgaacctaaggaaattagtggtcatacttctggtataaaaaaagctctgtggt

SEQ ID NO: 159643 - DNA, 82 bp, Homo sapiens
agggcttcatgtccaacaagcacgtcttcgccatcttcaacacggagcagaggtatgttgagtctaaaaaggacagagtcac

SEQ ID NO: 159644 - DNA, 100 bp, Homo sapiens
tgaagccgcctttcgggggctccgcgcccagcgagcgcttggagctgcacgtggacgactgttccaccaacaacccctcccaggctaagctgcggcggga

SEQ ID NO: 159645 - DNA, 100 bp, Homo sapiens
ctgcccgagaatgggaattctcttcactagaatatggagactgttcaatcaccaggccttgaaaagatcttttgaggtcgaggaggtcgagacacccaac

SEQ ID NO: 159646 - DNA, 75 bp, Homo sapiens
cgtggatttggggatggctataatgggtatggaggaggacctggagtagaaaccattgaaggttttcagtgttct

SEQ ID NO: 159647 - DNA, 75 bp, Homo sapiens
gtgatccatgggcgagtctacgatgtcacccgcttcctcaacgaggcaggggaaatggaaggtgatgcagtcgaa

SEQ ID NO: 159648 - DNA, 75 bp, Homo sapiens
attgatgaactagtagatagagccaaacaatcttttcaaggtttcagtgtagctcagaagccatttggagccacg

SEQ ID NO: 159649 - DNA, 75 bp, Homo sapiens
ggcattctctctcataccaagataccttttgagggttacacatcattttggaatgactgtatatcatctggatta

SEQ ID NO: 159650 - DNA, 98 bp, Homo sapiens
ttgaatatggacccaagagtcagcggtatattagttcagttaccactaccaggttttcctcctccaccaggcgctccacctccatctcttataccaac

SEQ ID NO: 159651 - DNA, 101 bp, Homo sapiens
ggcctctgggcatcgcagccttctacttgtcccatgagggggccgaaggccagagaccaggatttggctacggaggcagagcgtccgactataaatcggct

SEQ ID NO: 159652 - DNA, 75 bp, Homo sapiens
ctcagcttggggctggtgggactttccttctgtggggcggatggtggttcctgctgccctcaaggtcgtgcgtct

SEQ ID NO: 159653 - DNA, 75 bp, Homo sapiens
caagtacctccttttcagctacaacatcatcttctggatgccatggacaatattaccaggcagaaccaattctac

SEQ ID NO: 159654 - DNA, 74 bp, Homo sapiens
cgccgcccccccagacaagatggacaccgcggaggaaggtgctaaagagattgatatcgcagcgaccctggagc

SEQ ID NO: 159655 - DNA, 107 bp, Homo sapiens
attcatttggaaaatgaaggcctgaaaaagaaacaagtaaaactggatgagcagctcatggagagagagatcatcattgcctgaatttagctttgtgactgcaagag

SEQ ID NO: 159656 - DNA, 126 bp, Homo sapiens
tgttgtattgcaatcatggtgcagaaataccagtccccagtgagggtgtacaaatacccctttgaattaattatggcttgctgattcctaaagaaaagcccccaatcacggttgtgggtgatgttg

SEQ ID NO: 159657 - DNA, 73 bp, Homo sapiens
tacaaccttcgatctcctgacgagtacaggtttgcagattccgccagcagcacagcaagctctacagatgagt

SEQ ID NO: 159658 - DNA, 74 bp, Homo sapiens
catctttgacaagtttgagtgttgctggaacggttcggatagtgaggatgaggatgatgaccttcagtatgccg

SEQ ID NO: 159659 - DNA, 100 bp, Homo sapiens
ctctccctagtcaccctcatcgattcctacgagtcttctagcttcatgttcctggtgtttgacctagacggggtttcaccatgttagccaggatggtctc

SEQ ID NO: 159660 - DNA, 82 bp, Homo sapiens
cccagctggatgccctcttggctgcactgcactcccagtgtactaatggtcacttgatgtgcgctggctgttttatccacct

SEQ ID NO: 159661 - DNA, 98 bp, Homo sapiens
gagccgtgaggaccccgctgtcccaggtgaacaagaggccattgcccaagtctggccaggctgatgggaccagcgaggagtctctgcaccttgacatt

SEQ ID NO: 159662 - DNA, 80 bp, Homo sapiens
atgggtatggaggaggacctggaggttaatgttcgtgaagaaattgaagagttttttccaagaatgtggaagataaatca

SEQ ID NO: 159663 - DNA, 100 bp, Homo sapiens
ggtgaaatgttttcacatctaagaagaattggaaggttcaggaattggtggtaaagaccctgattgtagcagaacctcatgtcctgcatgcctatcgaat

SEQ ID NO: 159664 - DNA, 75 bp, Homo sapiens
agaagtgatgctggagaattacaggaatcttctctcattgggtgaagttttacaggcggtcaccgaccatgatat

SEQ ID NO: 159665 - DNA, 75 bp, Homo sapiens
aagcaataccaaacagtggcatggaccacacccagcggaaggaatccgagcccgcattttagagactttggtcat

SEQ ID NO: 159666 - DNA, 100 bp, Homo sapiens
actcgtgacttcactcagccgacatgtattcctctgagaaaccttggacagcagattttggtttaatatctgattgggacaacattcagacccatttcca

SEQ ID NO: 159667 - DNA, 137 bp, Homo sapiens
gcgcagaggcgggcgcctaccagccggcagctccggagctgcccgcgccatgtccgcgcacaatcggggcaccgagctcgtggaatgcagtagccctctgggcctgggatattgtggttgataactgtgccatctgc

SEQ ID NO: 159668 - DNA, 50 bp, Homo sapiens
gcattatccaacggctgctggaaggattcactccttctccagttgcacag

SEQ ID NO: 159669 - DNA, 82 bp, Homo sapiens
gactgctgcaacctacggggtgtacttgggaacgaggggtgaagcggcccaggtgagggtcaaaatgcagatcttcgtgaaa

SEQ ID NO: 159670 - DNA, 97 bp, Homo sapiens
atccctggatctggtggactttgtgaggcaacatcggataccactggggcccaccagctctgagcagatcatgaagacaggggcccttttgcttcag

SEQ ID NO: 159671 - DNA, 50 bp, Homo sapiens
gctgctctctgacatgaagctgcaaggacgactgggtttggattcagaag

SEQ ID NO: 159672 - DNA, 74 bp, Homo sapiens
ggaactgcaagctgcccatcacgcagcgcctctccacactgcagcaacagctgcgaatgcggatcaagcttaca

SEQ ID NO: 159673 - DNA, 75 bp, Homo sapiens
tttgaactctgcatcttcatggtttacagaaattggtgcaggatggacactccacagctgaccttgactgaactc

SEQ ID NO: 159674 - DNA, 75 bp, Homo sapiens
ggcttggtaccgtgctgcccagaatgcccttcgggaggaaagtatgtgatggtgatgggagtggttcaggcctgc

SEQ ID NO: 159675 - DNA, 100 bp, Homo sapiens
atgttgtctaattaacaaagaaccacagaattctggacaatcaaaacttaactcctggatacagggcaaacttgaagataaatcttttgactccagctct

SEQ ID NO: 159676 - DNA, 75 bp, Homo sapiens
ggcaccttcggcaaagtgaaggatttggagcaagaggtggtggtggccttcccccgaagaaatttggtaatcctg

SEQ ID NO: 159677 - DNA, 90 bp, Homo sapiens
ggagagcaggcgtcgatgctggcgcccaaagcctccagcctgagagtcgcctcactcgtgtgacgacagagtttcgctcctgttacccag

SEQ ID NO: 159678 - DNA, 100 bp, Homo sapiens
gacctgcaggcagcaccggaggcccaggtctccgtgcagcccaacttccagcaggacaaggtgaaggccgtgctggacgacatcctggagaagattccgg

SEQ ID NO: 159679 - DNA, 76 bp, Homo sapiens
agcttgttccaggcattgctggagatggatctgctgaccgttcataattggacccttgaagacactcttcagtggt

SEQ ID NO: 159680 - DNA, 98 bp, Homo sapiens
gtctgcgaaggccgggacccggttccccggcccacagtgggggtgtgcaaacccgagagaactgggaaggaagcagccaccctcgccatggcctcccc

SEQ ID NO: 159681 - DNA, 100 bp, Homo sapiens
cgtgaggtcaacctgcgcccccagatgtcccagagctggagccggagccagagctggagccccctaccccacagatccctgaggcccccacacccaacgt

SEQ ID NO: 159682 - DNA, 75 bp, Homo sapiens
caggcgctcgggggccgaactggccctggactacctctgcagatctatacaatatcagtgatggccgagggaaag

SEQ ID NO: 159683 - DNA, 100 bp, Homo sapiens
aacagagagagaggtggacagatctgagagatactgaggtacggacattgctgcaggagaagaggttgccatcaagcttgaatgtgtcaaaaccaaacac

SEQ ID NO: 159684 - DNA, 83 bp, Homo sapiens
ggacggcctgcagagcgctgccatcatgagggtggcccagttgaaatccttcccttcctctaccttggaagtgcctaccatgc

SEQ ID NO: 159685 - DNA, 118 bp, Homo sapiens
gtgggagtctccgcgtcccgctcgctgggagagaggtacctctccttttccctctccctttccctaaggcataatcaccagcaacacccgggacaataatacgggggccacctacccc

SEQ ID NO: 159686 - DNA, 136 bp, Homo sapiens
aaagcaagtgcacagtggtctgcagaactcctggtcatcaattaccgaggagaacttagaagttaccttgtaagggagcttctgataattggaggtgttgcagcccgggatcagctctctgttttggaaaatggag

SEQ ID NO: 159687 - DNA, 76 bp, Homo sapiens
gcacaagggcccaactggaattccacttacggcatctacttgtttccaaagttatttgggtcagcattttcctcca

SEQ ID NO: 159688 - DNA, 90 bp, Homo sapiens
ggttctgacaagatggccgggctgccccgcaggatcatcaaggtatcattggaacatttcaagatcatcaaatcaaattccacagggatt

SEQ ID NO: 159689 - DNA, 107 bp, Homo sapiens
agctgtgctcgcgctactctctctttctggcctggaggctatccagcgcaagagcggtgagcggggcgcctatgcctccttcgggagagacgcaggcgtgggcggcc

SEQ ID NO: 159690 - DNA, 114 bp, Homo sapiens
cagcagcagtggcaaccccgggggcagcagcaactgccggacgccctatcgcaagcagatacctttatcaatgaatgtgtcaacctttctggcatacgaccagcccacaataag

SEQ ID NO: 159691 - DNA, 75 bp, Homo sapiens
ggttaagggactcccaggaatatcaggactctgcagacagtgggcccatcccatgcccgaacctacactgtggct

SEQ ID NO: 159692 - DNA, 100 bp, Homo sapiens
tgttactccagccctatcatcaaatgtgttaccaagacatcttggatcccctgctacttcagtgcctggaatgggaagccattaatttgctagaaccaat

SEQ ID NO: 159693 - DNA, 86 bp, Homo sapiens
gttgcagctcagccctgaagaaaagggaaaacttgctgcggttgctcaaggaaatggtgttcacactggccctgaatcaagggaac

SEQ ID NO: 159694 - DNA, 100 bp, Homo sapiens
caggaaaacgtggatgattactacgacaccggcgaggaacttggcaggaaaagaatacttgagatccatttgtaaggaaagaaaaggaagcaacaacata

SEQ ID NO: 159695 - DNA, 100 bp, Homo sapiens
tgggaggggaagttcaggaaacatccaagaaaaatgtccttaaagcaattgagcaggctgatctactgcaggaggtgttatgtattctctgggacatgga

SEQ ID NO: 159696 - DNA, 82 bp, Homo sapiens
ttcgatggacatggacatgagccccctgaggccccagaactatcttttcgccgcggcgagtcctttgcacatgttggcaaca

SEQ ID NO: 159697 - DNA, 75 bp, Homo sapiens
cagaggtcgtggaggtggccgtggaggcagaggtggcatggggcacagaaagctgaaggtgctggagatgccaag

SEQ ID NO: 159698 - DNA, 100 bp, Homo sapiens
attcgatcttggattgactgtagaagaagggacagaaagagcccagaacattcccccagctggagttggccacggccaagaacgacatgaaccggcacct

SEQ ID NO: 159699 - DNA, 95 bp, Homo sapiens
cagactgctctggaaattattgtcaacatgtgctgcaatgaagttctaggtctcgttccagatcatattctccagctcataacagagaaagaaac

SEQ ID NO: 159700 - DNA, 95 bp, Homo sapiens
tggctgagtaccacaaagcaagagatgaattgccattcttgcatgaggaaacgatttgaacagcagcaaaaactcttagaagaagaaagaaaaag

SEQ ID NO: 159701 - DNA, 100 bp, Homo sapiens
cgacaacgtcccgataacttgcagactgtggcgcaactggtcttggtagcggaggcacccgaatgctgcccgggtgagattgatatcagtaaatgccatt

SEQ ID NO: 159702 - DNA, 82 bp, Homo sapiens
tagcttgggaaaaagagaaacatgaactcggcctaatgaagctaaagaatcggagaatgcccacttcagcatctcagagtcc

SEQ ID NO: 159703 - DNA, 73 bp, Homo sapiens
cgggaacgattgggctgagcagaggacgacatgttgcttttcgtggagactatatcatcatgtacatagaaaa

SEQ ID NO: 159704 - DNA, 98 bp, Homo sapiens
aacattgaattgacctcgccacgcatgttcacctatggttcatgtggatgttcacagccattacaattctgtcgccaatgaaactttttgccttgaga

SEQ ID NO: 159705 - DNA, 75 bp, Homo sapiens
gcagcatattcctgatacatatctatgtgaacgttgtcagcctaggttggatggcaagcatgtggtgtttggcaa

SEQ ID NO: 159706 - DNA, 74 bp, Homo sapiens
cttggagtgtcccccagataggtcattccacattggtgcctcatgtgaaagaattcttagccaaagccaaagaa

SEQ ID NO: 159707 - DNA, 100 bp, Homo sapiens
ccatctgcagcaccttcggcatctgcccctgccatgaccactgtggagaacaaatccaagattagcacagcactgctcagcacgcaggcatgtgaggaag

SEQ ID NO: 159708 - DNA, 75 bp, Homo sapiens
tgttttgcaaaaaccatcagtgtttgggaatgattctgatgatgatgatgaggactcctagaagtaccccacccc

SEQ ID NO: 159709 - DNA, 80 bp, Homo sapiens
aaaactccaaactcctctccaccagcgccaagagcttactcaacttgaagatgagaagatgaaggcccttatgatgatcc

SEQ ID NO: 159710 - DNA, 74 bp, Homo sapiens
gcctcagaaatgactgcatacagaatccagcaagctaaagtgcaaattcttcccgaatgtgtgttgccttcaac

SEQ ID NO: 159711 - DNA, 75 bp, Homo sapiens
tagcaccccgagaaccgtcagtttgagccagatggtcaaaatgcagatcttcgtgaaaacccttaccggcaagac

SEQ ID NO: 159712 - DNA, 101 bp, Homo sapiens
acccccaaggagtctcgctgcttttgtgatttcattcactttcaagtaatctgtacgaagaagttgagaataataaaaaatggacagaaaaccaatttctc

SEQ ID NO: 159713 - DNA, 105 bp, Homo sapiens
gggtttcccgggagatcccaggcggtgacagagtggagccatggctagagtcaccttcaggccattcagaggaggaaagagaggggaatatgaagtcagccaagc

SEQ ID NO: 159714 - DNA, 100 bp, Homo sapiens
ggcggcgacaagggtgttcccgaactagagtgggctctgctttgcaggatcaagcctcaaggctgggggttcccgtgggtattctctcagccgggatggt

SEQ ID NO: 159715 - DNA, 75 bp, Homo sapiens
ggcgacttgtgcacacatgtagagacctttgtatgagtcagtggatcggtggggaaaatgctgcttaccctgggc

SEQ ID NO: 159716 - DNA, 75 bp, Homo sapiens
gacagatcgctgtcaaaaccctagccacataaagaagatccctaatagtcatttctcaacaattatatagtcaac

SEQ ID NO: 159717 - DNA, 73 bp, Homo sapiens
gaatggagccatcccccttcggcgacgtctcctcccgcctcaccacaggtaaccaaggagcagtgaacagcag

SEQ ID NO: 159718 - DNA, 100 bp, Homo sapiens
aagcaggatcaatgatgggataaaaatcaagggtgctgaacgaggatgggtactcctccaccatcaaggacaagatcctgaccattgatgtgaagcccgg

SEQ ID NO: 159719 - DNA, 100 bp, Homo sapiens
ccccgagtgcggcagtaccgcctccttcccagccgcgcggcttcctccagacctctcggcgcggacctgcctagagctggaacgttacctccagagcgag

SEQ ID NO: 159720 - DNA, 100 bp, Homo sapiens
tcttctggtgcagtcttattttgaaaagggtaaccaggagccgacaacaactcctgacgcaatggttcagccttttactaccatcccatttccaccacct

SEQ ID NO: 159721 - DNA, 100 bp, Homo sapiens
caagttcttcaggaatggagacacggcttcccccaaggaatatacaggaagccttggaagatcgtttggaaaggattaatcgagaactgggttcagttcg

SEQ ID NO: 159722 - DNA, 75 bp, Homo sapiens
gaggaatcctgatactgagcgccaagacaatgcaaactccagtgaacattcccgtgcctgtgctccggctgcccc

SEQ ID NO: 159723 - DNA, 82 bp, Homo sapiens
aaatatggtgaactcattgtcttagggttcgaaaacatggccaaaagaaatgccgagaaggaactgacagataggaattggg

SEQ ID NO: 159724 - DNA, 116 bp, Homo sapiens
cccggggcggtccctggctgcgtgcacagcgccttgttccagcagggcctgatccagatgaaatcagacatcactgaaggagttgatattccaaagaaacctagattggagaaacc

SEQ ID NO: 159725 - DNA, 82 bp, Homo sapiens
agattcgcagtggtcgcttcttctccttgatgttcgagcctgtgagctgcaccttcacgtacctgctgggtgacagagagtc

SEQ ID NO: 159726 - DNA, 100 bp, Homo sapiens
gctgctatcgcgcgccagaaggccgagattgccgcctccagccctgcctctttcttgtcgcagtcagtttcatcatcagatagaaacagtgttacagtac

SEQ ID NO: 159727 - DNA, 101 bp, Homo sapiens
agaaatcaaaaatctggtgaaattgccggcaagagggagttaaggacattccaggcagaggcaaggaaattcagtgaacattatcactccttgtgtaaagc

SEQ ID NO: 159728 - DNA, 75 bp, Homo sapiens
aacctcacacggtgtgggctgaatgaagagctgccagatcccacaggtgtatgtggaatttgatgatcttgaatg

SEQ ID NO: 159729 - DNA, 90 bp, Homo sapiens
cttcgagtcctttattgtggagaggcgttggggctgaacctctgctcccatggaaccggatgctgcaaacccagaatgcagccttccagc

SEQ ID NO: 159730 - DNA, 90 bp, Homo sapiens
attcaaaaacactatcccagggagtgcaagcttagagcgtctggccaagaatcagaggaagtggatgatatcatcaagttgaatcgaaag

SEQ ID NO: 159731 - DNA, 75 bp, Homo sapiens
gtggaattgaagaattcaaacctcctgagacattgaagcggtacccatgccggcagtgtgaacagtccttccaca

SEQ ID NO: 159732 - DNA, 50 bp, Homo sapiens
caggatttcctggaagcagagaaatggatctctatgacgctggagtgaag

SEQ ID NO: 159733 - DNA, 113 bp, Homo sapiens
ggagagcagcggcggcggggagcgaccgggagcggcggcagcggcggcgcggaggcggctgaggtgcgagccgcaatcagaaacggagactgttcatctgtttatcccagctc

SEQ ID NO: 159734 - DNA, 50 bp, Homo sapiens
tccgttctctcaggctcccgttcaggtaagaatgattgatgttggctgat

SEQ ID NO: 159735 - DNA, 88 bp, Homo sapiens
tgaagacagcaccaggttccaaatcatcaatgaagcaagtaagagcccacaggcggttttgtgagctgcttccccaggagcagcggag

SEQ ID NO: 159736 - DNA, 82 bp, Homo sapiens
gggagatgggcctactcgcccgccaccctgcgctgccgccgctctgaggagttaaaggtttttctatatgagtggagaagac

SEQ ID NO: 159737 - DNA, 75 bp, Homo sapiens
ggatctccctgtcctacctcacgggggcggcggccagtacgggatccctgaaccatggaattttccttttcggag

SEQ ID NO: 159738 - DNA, 48 bp, Homo sapiens
gaaaagcaggaagctggaaaggaaggtgaacctgatgcagcacatgaa

SEQ ID NO: 159739 - DNA, 100 bp, Homo sapiens
caggtgtgagtgccggagtggttatgagtttgcagatgaccggcatacttgcatctacaagttggatggcttgaggactggtactaaaaggaaacgtgac

SEQ ID NO: 159740 - DNA, 99 bp, Homo sapiens
tttcacaataagagcagaggatggaacacttcagtgcattcaaggaacagaaattcttggcaagtcagttcgtattatattctctacattaggagtgtg

SEQ ID NO: 159741 - DNA, 82 bp, Homo sapiens
gtggccaggcgactgcagtcacgtctccaacaaccaaggatttttagactctgaggagcagttggagctaatccacattatg

SEQ ID NO: 159742 - DNA, 73 bp, Homo sapiens
cctgacctcttacttcctgtggattggccgcgtaatccaggttgctgctgggagcagcaacctcaagagagtg

SEQ ID NO: 159743 - DNA, 80 bp, Homo sapiens
ttggtggtgacaagaacggcggtacccgggtggttaaacttcgcaaaatggccttgctgtctctaaccctgatctgatct

SEQ ID NO: 159744 - DNA, 100 bp, Homo sapiens
cgggcggcgcgcggcggcggcgctcggcgatggtaggcgtccctggagcggccgccttccagcgaaaatggctttgtaaagaagtttgaacctaaatctg

SEQ ID NO: 159745 - DNA, 100 bp, Homo sapiens
ccaatgacgaggagctcaaccagattgttgatccatttcagatacttgtggcagcaaacaaagcagttcacctctacaaactgggaaaaatgaagacaag

SEQ ID NO: 159746 - DNA, 100 bp, Homo sapiens
ccggggtgtcagtgtggaggagactgaggactccatgttttcgttggccctgaaatgccttatcagtctgtccaccatcatccttttgggcttgatcatc

SEQ ID NO: 159747 - DNA, 98 bp, Homo sapiens
gcacccggtgtaccgcggcgagaagccccagctgcactacgcgccccactgtgttctccttgcctcaaaagaaaactcggcacctgttaaacttggag

SEQ ID NO: 159748 - DNA, 83 bp, Homo sapiens
gcttgggagagctcctgggccacccctcctttcaggtcaaggctctacagattctcccctgcccctggagaaggaggagcagg

SEQ ID NO: 159749 - DNA, 74 bp, Homo sapiens
gggaaccaacccactttctcggcgccgcggctcttttctaaaagtaataatcatgggccagactgggaagaaat

SEQ ID NO: 159750 - DNA, 101 bp, Homo sapiens
ggatgaggtgaaagactatgtggccaagaagacccttttgaggacttctttgggaatcgaaggggtccccgaggaagcagaagccgagggacggggtcgtt

SEQ ID NO: 159751 - DNA, 83 bp, Homo sapiens
acatcaggaagatactgcagagatattctactccatctcattcattgtacagcctcccgcgacgatgcccctcaacgttagct

SEQ ID NO: 159752 - DNA, 51 bp, Homo sapiens
aatgctgaaagggagaaagtccagaaattgatgacttggatgccattgtac

SEQ ID NO: 159753 - DNA, 75 bp, Homo sapiens
aatggaaagtgcgtcatcctaaggaacatcgacgacattcggaaattctttggagtaataccaagtggaaagaaa

SEQ ID NO: 159754 - DNA, 76 bp, Homo sapiens
caacgatatatgtcagatctaaagatgcctgtgaggagccaccaacatttgaagctatggagctcattggtaaacc

SEQ ID NO: 159755 - DNA, 83 bp, Homo sapiens
catggagcttggccaccacatcctgaaggcgcacattttcaagtactgccaaatctgtcgaaagggagataatgaagaactgc

SEQ ID NO: 159756 - DNA, 98 bp, Homo sapiens
acggaggaggccgagaccggagcgccgctcgccgcagacttacttccccggctcagcagggaaagctgaggcaacttctcctagaatctcaatctcag

SEQ ID NO: 159757 - DNA, 75 bp, Homo sapiens
ccaggattagggaaagtcaatgttttgcacagtaataagttgactcacacagacttaaagcctgaaaacatctta

SEQ ID NO: 159758 - DNA, 74 bp, Homo sapiens
cccgacgccccgtgctgggaggaggccatggccgctgcattccaactggcgaagcactgcagtttcctcctgaa

SEQ ID NO: 159759 - DNA, 95 bp, Homo sapiens
cggaacagaccgccgtgagagaggaggggtgccggccgggattcgcggcccggagctcgggaccggtactccaaagattcaggtttactcacgtc

SEQ ID NO: 159760 - DNA, 100 bp, Homo sapiens
gacgacagcgagtacacctgcaccatccaggtactccaaagattcaggtttactcacgtcatccagcagagaatggaaagtcaaatttcctgaattgcta

SEQ ID NO: 159761 - DNA, 74 bp, Homo sapiens
agcagaggctagagaagctggactcccgggatgggaagttcatccactaccgcctgtgtgatccttctgagagg

SEQ ID NO: 159762 - DNA, 71 bp, Homo sapiens
ttatagagctaattacaactttcggggcatgtacaatcagaggcttcccagctggcgtgtatgttgtaaag

SEQ ID NO: 159763 - DNA, 83 bp, Homo sapiens
agaagatcaggtacacaaatgcacgcgacaggaaccagggtgccttcaccagggatggaagaggcaggctgcagcagagagat

SEQ ID NO: 159764 - DNA, 125 bp, Homo sapiens
agctttgaaaatcttaagcttgcaactgaactccctgatgctgaacttaggaggactttatgggatgtgatggtggcaggtgggatggagagcatgtccaatgttccatatgtaatgaacagagg

SEQ ID NO: 159765 - DNA, 75 bp, Homo sapiens
gtactgctccccaagaagactgagagtcaccacaaggccaaggttgaagactgggatagtttccaagctattttg

SEQ ID NO: 159766 - DNA, 51 bp, Homo sapiens
agtggaagacccagcactaagtgcatcacaggacatggccccctcagccac

SEQ ID NO: 159767 - DNA, 98 bp, Homo sapiens
ctgcccttgccgccgcgctaccgcttccgggacctgctgctgggcgacccgtccttccagaacgacgacaggtaccaaagcagtcagactcacagcct

SEQ ID NO: 159768 - DNA, 82 bp, Homo sapiens
ccggagagtacatccccaccgtgattttttatcaagcagaaatgcatcgaacaacgagaatcaagatcactgagctaaatcc

SEQ ID NO: 159769 - DNA, 82 bp, Homo sapiens
gagaagaagagctgctgatgaggactgggacaggtttaagtttttgaaactgaagtaggcctacacagtaggaactcatgtc

SEQ ID NO: 159770 - DNA, 100 bp, Homo sapiens
caaacaggttcgggttcagttctgtcccttcgagaaaaacgtggaatcgacgaggacacgcaggagaaagaaggtattctgcctgagagagctgaagagg

SEQ ID NO: 159771 - DNA, 100 bp, Homo sapiens
tttgacatctttgaagatgaaggattaattacacaaggtggaagcgcctgctataactgcggtagaggtggccacattgccaaggactgcaaggagccca

SEQ ID NO: 159772 - DNA, 101 bp, Homo sapiens
ccgccccacactggcggatgaagcagctggtggggctctactgcgacaagtttgaacgccatgaccctgtggatgggagaattactgagaggcagtttggt

SEQ ID NO: 159773 - DNA, 100 bp, Homo sapiens
ctgggcttcctgaccccattcagctttgagaactttcagtcccaagttactcaggtgatagagggacgactgggtttggattcagaagaggattattata

SEQ ID NO: 159774 - DNA, 114 bp, Homo sapiens
caagctgcggcggctgctccagaaatctgatttataccgagtccactttcttctcggtccctccttgtggtccatttctgggcaccatgggctccacagtgtgcacagatgaac

SEQ ID NO: 159775 - DNA, 75 bp, Homo sapiens
taacagcttccgccaggcggtgatgaagaatccccccgaaaggaccccccagggcattttagattatctggataa

SEQ ID NO: 159776 - DNA, 107 bp, Homo sapiens
ccttagaagaaacaattcttcgacatactctccagcttcaagatcttcaagatgaagttcaaagggagaatactaatctgcaaaaactacaggcccagaaacagcag

SEQ ID NO: 159777 - DNA, 96 bp, Homo sapiens
ctcggaaggccgtatttgggtctatgacgttggagaggcttcagggatgacttcttagggggcaggggaggtagtcgcccaggcgaccggcgaaca

SEQ ID NO: 159778 - DNA, 142 bp, Homo sapiens
aagagtactacagattttatacaccaccaaactttgttcttgctcttgttttgccctcaattgtaattctgggatgttttcaagcctatggaccttaatcgtgtcatcaaactcctcgaagagactgataaagtgagtaagc

SEQ ID NO: 159779 - DNA, 100 bp, Homo sapiens
gacaatgttctccaaagataagcctgccgagtgcctgcgattgcaggcgcgcgccgccacgcctgactggttttcgtatttttttggtggagacggggtt

SEQ ID NO: 159780 - DNA, 75 bp, Homo sapiens
gtgtctacagagctgagtccattcacactggtttggaagttgcaatcaaaatgattaaggcagttgacaatggtc

SEQ ID NO: 159781 - DNA, 82 bp, Homo sapiens
agttgaagaagtgaagaaattattggtacctgcaaatgtgacagtgatgataacatgggtgccaaaaatacttcaataggag

SEQ ID NO: 159782 - DNA, 95 bp, Homo sapiens
actatggatgctgggaaactgattgagaggatccagaatccagatctctggaatagctaccaggcaaagaaaaaaactatggatgccaagaatgg

SEQ ID NO: 159783 - DNA, 99 bp, Homo sapiens
cctgctggccgcctggacggctcgggcgctggaggacgagattgaggagctgcgggccgagatgctggagatgcgggacgtctatatggaggaggacgt

SEQ ID NO: 159784 - DNA, 89 bp, Homo sapiens
cttctggaagccccaggaggctgtgcagggtccctcgccggctccctcggggcctccactgcagcgcagctgcccatagctctgaacag

SEQ ID NO: 159785 - DNA, 83 bp, Homo sapiens
aaaatgattcgcagagtcaatgatgaagagggcattaagccttatgccagcctggaccatcttggaggcagtgtaggatcatg

SEQ ID NO: 159786 - DNA, 82 bp, Homo sapiens
cttagctgtgctcgcgctactctctctttctggcctggaggctatccagcgtttggggaaaggtgctgctgaagcaatggaa

SEQ ID NO: 159787 - DNA, 50 bp, Homo sapiens
gatgatgtagacactggactattaggacaacataacgatgcacggatgaa

SEQ ID NO: 159788 - DNA, 100 bp, Homo sapiens
ccgcggccctgctgagagggaaaaggacgccgcggtcttcccaggcgtcgcggagagcagaaaggaagctgttgaagttattgaagtacctgttgctata

SEQ ID NO: 159789 - DNA, 83 bp, Homo sapiens
ccacaccccccgccgcagcagcaccggcgacaggtgacttaagagattaaaattaatttggttgctgttggttctgaacaaat

SEQ ID NO: 159790 - DNA, 78 bp, Homo sapiens
ccagaatatgccaagtatctaaagtactgaacgacacctgggtctccttcccttcctggtctgaggactccacgttcg

SEQ ID NO: 159791 - DNA, 90 bp, Homo sapiens
gatgattgagccgcgcacgctacagtacaagttccatgccattgcagtgtcaactaggcctcagttacttttcagtttgcccaaattgag

SEQ ID NO: 159792 - DNA, 50 bp, Homo sapiens
cccggtggtgtctccctgtccaatgcaaagaaaggaggtacaggcccgag

SEQ ID NO: 159793 - DNA, 74 bp, Homo sapiens
ggaactttgggaattcttctgccctagactggagctggttacagacggaagaagaagagcacagctgcctggag

SEQ ID NO: 159794 - DNA, 116 bp, Homo sapiens
tgttcttaacccagaagtagctgaatgtgttactccattgctgaggagtgaactggtccctaggaaagaccttcttgtagaaaatgtgccatattgtgatgcaccaactcagaagc

SEQ ID NO: 159795 - DNA, 106 bp, Homo sapiens
gaaaagggatattacagtgagcgagatgctgcagatgccgttaaacaaatcctggaggcagttgctatatggagtttggacctccaacagttaatgataaactaat

SEQ ID NO: 159796 - DNA, 100 bp, Homo sapiens
gccttggacgtgcacagtagatccctcccggcttcccggcttcccgtctcgtcaccctctgatttctctatgaatcatcatcaagaactctgggagaact

SEQ ID NO: 159797 - DNA, 83 bp, Homo sapiens
gggagggtggttaccgctgaggagctgcagtctctgtcaagcgcgttcgttcacatagctcccagttttaacatttcgccacc

SEQ ID NO: 159798 - DNA, 51 bp, Homo sapiens
cccaggatgtgagcaacacgggaccgatggatatcagtattgacaaatagc

SEQ ID NO: 159799 - DNA, 90 bp, Homo sapiens
cctggagaagagcgaccagctcactaagaacatgaagggagaattccacaagttggctgatgccaagatatttttgagcgactgcctggc

SEQ ID NO: 159800 - DNA, 97 bp, Homo sapiens
tggcggccatcgtcatcctgctgctgaagatctggaagacgcgctcctgcgccggcaaaatcctgacagatgactttgcagacaaggagggtctgga

SEQ ID NO: 159801 - DNA, 75 bp, Homo sapiens
gtgctgcaagacacccgtcaggagcccatggtgcgccatgaggcagacaatgcagatcttcgtgaagactctgac

SEQ ID NO: 159802 - DNA, 100 bp, Homo sapiens
atgttccaagtggaaaagctgggagcagaatcagctagaaaattgttcagactcagcttgtctggtattggtcgttgtcagaaatagtgagggaattcaa

SEQ ID NO: 159803 - DNA, 75 bp, Homo sapiens
attccggcggctgccgtgactccagtgcaacttagaccatgctcagcctccaagcagccttgtcatcgacaaaga

SEQ ID NO: 159804 - DNA, 113 bp, Homo sapiens
agctgtgcgcctcgctgcctggaccgggtctgagcgcggctgcccaggttgacctttctgcgggagatatttggtttccaggcaggactgacgtctttggattgcagtggatc

SEQ ID NO: 159805 - DNA, 75 bp, Homo sapiens
gctttacgtcatcttcgattagctaataaccaactgcaattcctacctccagtcaccaggagactaaagtccatc

SEQ ID NO: 159806 - DNA, 98 bp, Homo sapiens
ggtgctgcagaaccagatccgggagcacgtcatcgccatcgaaggctcgtggaggagttcatgctcttggccaacatggcagtggcccacaagatcca

SEQ ID NO: 159807 - DNA, 86 bp, Homo sapiens
agccagacgacaagcacacactatggcgctgaaacggattaataagtggcagtatgatcacctcacggctacctatcttctgcttc

SEQ ID NO: 159808 - DNA, 74 bp, Homo sapiens
tttaaaactgaactaagtcaatctgatatgtttgatcagctgaataccaagagatatctcctgatatctgcacc

SEQ ID NO: 159809 - DNA, 98 bp, Homo sapiens
ccaccccagtgcacctccctggcctggtctgctgatggccaggtattctctactgccgctgatggtcaaacgcaagtggaaattaaagtgtgtcaggg

SEQ ID NO: 159810 - DNA, 100 bp, Homo sapiens
ctaaaggccccatacaatgaagtagacattggtggaaacatttagctgagtcatcactagagagtgggaagggcagcagcagcagagaatccaaacccta

SEQ ID NO: 159811 - DNA, 98 bp, Homo sapiens
agcgagctgagtggttgtgtggtcgcgtctcggaaaccggtagcgcttgcagcatggttattcagcttctcaaggctggaaaagcgaaggaagtttcc

SEQ ID NO: 159812 - DNA, 74 bp, Homo sapiens
gaagccacacagtgtccagatacgagggattatatgcgtcaggcaggagaagtgacttatgcagatgctcacaa

SEQ ID NO: 159813 - DNA, 97 bp, Homo sapiens
cttacattgcacaaagattttgtgataatagaatagtctcatctaagaaaccgatctgctcctccgtataaaggacatcagtcatttcttaatgcaa

SEQ ID NO: 159814 - DNA, 75 bp, Homo sapiens
cgcgtttgccgtcggctgctgcatgcctgggaaccagcggggaaactgaggctcggggtggagcgcaggattgtg

SEQ ID NO: 159815 - DNA, 83 bp, Homo sapiens
gcgccgcgctcggcggccgccattgcagaaagccattgatctggtgacgaaagccacagaggaggacaaagccaagaactacg

SEQ ID NO: 159816 - DNA, 74 bp, Homo sapiens
cttggactgagtcctgcaggacacaggggaaccaacggaagccgaagccagagctagagcatctaatgaagatg

SEQ ID NO: 159817 - DNA, 110 bp, Homo sapiens
ccaaaatcgaagaaatgtctcccgaactggcagcatggtgattcatttgatgcttccagaaaccagagaaatctatgaattagagaaattatggaccctacgttcttatg

SEQ ID NO: 159818 - DNA, 83 bp, Homo sapiens
cagaccctggagcctcagttggaagcagccgatccagcctgcggagcctgtggggcaggtgggatgtgtgtgggctgaaattc

SEQ ID NO: 159819 - DNA, 100 bp, Homo sapiens
ggatttgttaaggattccaagtaactcttatttgacgagctcatctgcgcctttgtttagaacgcttaaaagttctgattccactaggaccagactgcac

SEQ ID NO: 159820 - DNA, 101 bp, Homo sapiens
taattggagatggtttcacagcacgcagtggcttcgggcatgtagagcgcatgaagtacaggacaataaagcttcctacacatatcaccaggaggatctct

SEQ ID NO: 159821 - DNA, 100 bp, Homo sapiens
cgcagctggctggcttcagtggaccaccttacggacatccaaaaattgcttggaactgacttcatgggtaccataagtacagagaacaagggatgctgag

SEQ ID NO: 159822 - DNA, 98 bp, Homo sapiens
gttcttctttgtcaccaaaaacagaaaaatgcacaacagagggacaacaaaagcctcctacaagagtcctaccaaaattgttgacctcctgtactgga

SEQ ID NO: 159823 - DNA, 100 bp, Homo sapiens
acttatagcccttgaagtcaaccatctcacacctttccaaaggacgcgaccataactctaaaagggttcccagcaccatgagggcctggatcttctttct

SEQ ID NO: 159824 - DNA, 90 bp, Homo sapiens
cttgtcccgctgcagccgagatgccgggggagcggggccttccacaccccctccgtgggtgtgtggtggggaagaaaacatgacagaaac

SEQ ID NO: 159825 - DNA, 98 bp, Homo sapiens
gacagaggctgttagctatggctggacataatgatgtcatccaagccaacaagccatgctgaagtaaatgaaaccatacccaacccttacccaccaag

SEQ ID NO: 159826 - DNA, 99 bp, Homo sapiens
aagaagcgggcggcgtgcctgtgcttccggagcgagcaggaggacgagaggacggtcgggccctggaaggaacgctctcggaattggccgcggaaaccg

SEQ ID NO: 159827 - DNA, 83 bp, Homo sapiens
gctaaagcagcgtgcgttcagccctggggctggtccagggaccctcatcatggccacaggagtccaggactttaaccggacag

SEQ ID NO: 159828 - DNA, 74 bp, Homo sapiens
tccatcgaatcatcaccaatggattgaagaggttaatgaccatttgccagaaacactttcctacagacccatcc

SEQ ID NO: 159829 - DNA, 95 bp, Homo sapiens
ctgatgacccacggccgcatggtgccgagagggacaggcttctccggaaggaacagattttagctgtggccaggctgtgggtgagcgtggaggat

SEQ ID NO: 159830 - DNA, 75 bp, Homo sapiens
tggaaacagtcacgtccatagaacagctgggcgccgtgtacacagaaggtgggttcgtggaaggcgtcaataaga

SEQ ID NO: 159831 - DNA, 75 bp, Homo sapiens
tcagcgcggccgtcggagacatgggagacccggggtcggagaaggccaatgatgaggccaatcagagtgatacaa

SEQ ID NO: 159832 - DNA, 82 bp, Homo sapiens
accaggacagtcgcgaggttcgagtgttgcagagcctgcggggcaagatctgtggatctccttacgtagcagccaaaataaa

SEQ ID NO: 159833 - DNA, 98 bp, Homo sapiens
accacattggcgtggccgtcaaggagctggacctctacctggcctacttcgtgcgtgagcgagggcagagcggcttgggtaaatccaccttaatcaac

SEQ ID NO: 159834 - DNA, 75 bp, Homo sapiens
gtaacaatttacgcgccgtgtaactgtgaatctttcaaagatctttccctagatcattctgacctagttgcagag

SEQ ID NO: 159835 - DNA, 100 bp, Homo sapiens
gtcacggatcggattcctcagctacgaggaggcgctgaggagagaaatccaaggacacttatttgctgtatgagggtcgaggccctggtggctcttctct

SEQ ID NO: 159836 - DNA, 75 bp, Homo sapiens
cgacctgggcaccagcaggacccgaggccaggagccaggggcccagaaggagaagaaactgaggcctggaatttg

SEQ ID NO: 159837 - DNA, 90 bp, Homo sapiens
gaattaactcaaatatctcttcttaacacctacctgattctggcatacaatatggaatgtgcagatgtcccactattaactccaagcagc

SEQ ID NO: 159838 - DNA, 90 bp, Homo sapiens
gtgatgatgaagagcctagcacctcttatactgatgaagaaggtcgtggtcaaggtttcactgacggggtgtaccaagggaaacagcttt

SEQ ID NO: 159839 - DNA, 89 bp, Homo sapiens
gacaggcagagtgctgatgtgaaaaataccacgacaaaaccaccctagaacaggaaatatagtggtcattatgattagctatccaaaag

SEQ ID NO: 159840 - DNA, 100 bp, Homo sapiens
cagacccagtccctgagagagctcatctcagatctggagcatcggctgcaggggtcagtgatggagctgcttcagctgctgtgacttactcgaagcctcg

SEQ ID NO: 159841 - DNA, 75 bp, Homo sapiens
gcggatcagagagggctaccttgtgaagaagaaaagtccaacctgatcgtggtccagagaggtcacagcccaccc

SEQ ID NO: 159842 - DNA, 90 bp, Homo sapiens
gctcaagaactgcagcattgcagccgccaagacggagcgatctctctttgagtcggcatggaagaaggagaaggacatcgtttccaagga

SEQ ID NO: 159843 - DNA, 96 bp, Homo sapiens
agttagctaaagaactccctcaagtttcatttgtgaagaggcggggtttcaccatgttgcccagactggtcttgaactcctgagcttaagcaatcc

SEQ ID NO: 159844 - DNA, 80 bp, Homo sapiens
cgcggatgggatccagctgttagtcgggtaggcataggttaatttggagtggcccctggagtcagtttcctacaccatcc

SEQ ID NO: 159845 - DNA, 51 bp, Homo sapiens
aagaagtgaaattaacttacctggcaagtaactggcagaagttttggtgat

SEQ ID NO: 159846 - DNA, 82 bp, Homo sapiens
aagacccttgtgctcgttgtcgccgcggtcctgctgttgcagcccctgtcaaagggaacaggaagcagtccacggagggtga

SEQ ID NO: 159847 - DNA, 87 bp, Homo sapiens
acgccctcagcaccctggacaccaaggagaatctggaggggacactgaggagacgttccctaagggcaattgaaggaacagactaaa

SEQ ID NO: 159848 - DNA, 100 bp, Homo sapiens
taaaaagagaggtgcctttatctgatgatgatgaaagttacacagatggcgttcaggaagtggcttatattcactcaaaccagaatgtaattggatcgag

SEQ ID NO: 159849 - DNA, 75 bp, Homo sapiens
aaacaaaattcgatttgcaaatcattcagtgaatcccaactgttatgccaaaggacgactgggtttggattcaga

SEQ ID NO: 159850 - DNA, 97 bp, Homo sapiens
tcggcccgccgggcccgcagtgtggtgctggagaatctggtaaaagcaccattgtgaagcagatgaggatcctgcatgttaatgggtttaatggaga

SEQ ID NO: 159851 - DNA, 100 bp, Homo sapiens
caggatgagccccgcgaccactggcacattcttgctgacagagggagacgtggtgggcggtccttcctgtgacacgacccttgagtgacagttctatttg

SEQ ID NO: 159852 - DNA, 98 bp, Homo sapiens
acatctacgtcagtgataaaatctccttgaatcgctctctcccagatatccggcacccaaaggctaaggaatatgagagtttaatggaaaccaaaaat

SEQ ID NO: 159853 - DNA, 100 bp, Homo sapiens
ggcttatcgaacagagccgggagttcaagaagaacactccagagggtctaaaattcccaggactccacagctttgcaccagataagcctggaggaatact

SEQ ID NO: 159854 - DNA, 100 bp, Homo sapiens
gcatgagagtcaccatgctcaaagtgaatatattaaggaatgtagcaaacctcgagaagcctttggatttgaacaagctgtacgagagtatacacttcag

SEQ ID NO: 159855 - DNA, 98 bp, Homo sapiens
tgggcatgaggagcggagcggagaatgccaagggaagaggaagaacgtctgagaaataaaattcgagctgatcatgagaaggccttggaagaagcaaa

SEQ ID NO: 159856 - DNA, 90 bp, Homo sapiens
ggccgacccggcccgtagtgtggaagcagcttcaggttttgaacgaagaatgtgatcagaactggtacaaggcagagcttaatggaaaag

SEQ ID NO: 159857 - DNA, 82 bp, Homo sapiens
gttgtggctgttccaatcgctcctgtttgtcttctgctttggcccagaataccaagctgctattttacacttgaagagggag

SEQ ID NO: 159858 - DNA, 74 bp, Homo sapiens
ctaagattccgctcctcaccaccatcagtttctgtagaaaatgtttcctgactgcaatgagggaaagcggagca

SEQ ID NO: 159859 - DNA, 100 bp, Homo sapiens
gcagaagaaatctgtattgctgcttctaaagcttgtgataaatttgcgcctcattttggtaagcggaaaaacaaaagagttcctgttttctcctaacgat

SEQ ID NO: 159860 - DNA, 100 bp, Homo sapiens
gcgcgggcgcgggcgcgaaggcgatccgggcgccaccccgcggtcatcggtcaccggtcgctctcaggaacagcagtttgctggcctagacctgaactct

SEQ ID NO: 159861 - DNA, 90 bp, Homo sapiens
gcggagcgcgagagcttcgagcggactcaggaagatgttaccgagtacttcagtgaattccttagtgcaggggaacggagtcttgaattc

SEQ ID NO: 159862 - DNA, 100 bp, Homo sapiens
cctggagcactcggtcatgtacccggtggactcggtgaaggaaaaggctgaggaggtgtatcgtctgtatcagaactcgcccctctcctcccaccccgtg

SEQ ID NO: 159863 - DNA, 83 bp, Homo sapiens
ctccttttcgtttccggaaacatggtttacccaaggtccagcctagcccctaggcaccatgtcggacagtgatctaggtgagg

SEQ ID NO: 159864 - DNA, 80 bp, Homo sapiens
agtttcccgcaagggatgtttatgttccaaacactacttacagggaagaggaagaacgtctgagaaataaaattcgagct

SEQ ID NO: 159865 - DNA, 82 bp, Homo sapiens
gcactccaaagacatcatgcaaaccctgtctagatattacagcaatgctttttcagagtgttgcggagataggaacatggga

SEQ ID NO: 159866 - DNA, 95 bp, Homo sapiens
agaggtgccaagactctgtcttcgcccagtaataggccttctggagaaacttctgttccacctcctcctgcaggcgttacatagccatgtgccgc

SEQ ID NO: 159867 - DNA, 80 bp, Homo sapiens
gttcattgtttgtcaccacaaaaaggacaggaaaaggggaagatagtgatgtactcagtataaatgcagatgcttatgac

SEQ ID NO: 159868 - DNA, 82 bp, Homo sapiens
cttttctctgccttgcttgcttgagcttcagcggaattcgaaatgagacaagaggagcagcagcggcaccgcccctcaccct

SEQ ID NO: 159869 - DNA, 101 bp, Homo sapiens
attcaagttgagcagatgacaaaacttcaagccaaacatcaagcagaatgtgatttgcttgaagatatgaggtaagaatgattgatgttggctgatattgg

SEQ ID NO: 159870 - DNA, 83 bp, Homo sapiens
caccatgccgctcctaagcctgcacagccgcggcggcagcagcagtgagagagatgccctgtatccaagcccaatatgggaca

SEQ ID NO: 159871 - DNA, 80 bp, Homo sapiens
acccgaagaagaaaggattcgttacagccagagattgttcccagtgacctgacagcagaggagcgtcaagaactggagaa

SEQ ID NO: 159872 - DNA, 88 bp, Homo sapiens
ctcacgggatcccgaggctgaagaaatagaagctgaatatgctgcattagacaaacgagaggacgctggtcagaaacattttggggct

SEQ ID NO: 159873 - DNA, 75 bp, Homo sapiens
tggagcaccgatgatgtgcagatcaatgacatttccctgcagtttaattggttggggtcagataagaagaggagt

SEQ ID NO: 159874 - DNA, 98 bp, Homo sapiens
cgcgagtgaggaaaggaggtactgtaggatcagttcgacagcttagacaagcatacacaatggggaattgacttcttggaaagatatgccaaatttgt

SEQ ID NO: 159875 - DNA, 50 bp, Homo sapiens
attcggagctacatccagtgaataaggccatcagcttcttcaccggtgat

SEQ ID NO: 159876 - DNA, 50 bp, Homo sapiens
ggcagctggagccgaggatccagttattaccccattcaagttgacaactg

SEQ ID NO: 159877 - DNA, 51 bp, Homo sapiens
cgtgttgcagttttgtttgactgtgggtttactcctggcttgggggcatta

SEQ ID NO: 159878 - DNA, 100 bp, Homo sapiens
tctctggaggagtactggcaacagtttcagaggcggagcacagagagctgcggctgggacaaggagcacccgcgtgcaggtgcgaccctgcaggatgctg

SEQ ID NO: 159879 - DNA, 100 bp, Homo sapiens
acagtttagaagatgacatgggagtgatcgtgttaaatttgaacctagtggtaaaacagggtgatttcaagagacacaaatcatgaccaccccaggaaaa

SEQ ID NO: 159880 - DNA, 100 bp, Homo sapiens
cgggtgggagtgacccgattttccaggtactgaacgacacctgggtctccttcccttcctggtctgaggactccacgttcgtcagctccaagaagacacc

SEQ ID NO: 159881 - DNA, 82 bp, Homo sapiens
ctgccccctgggccccagcactgctgtcccacctgtgccggagcaggccgggctctcgccatgggtcactgtcgcctctgcc

SEQ ID NO: 159882 - DNA, 100 bp, Homo sapiens
attatattatgcagtctcattccctggatgtggacattcacattgttttgaatgatatttgcttcggtgcagagatgagcatcaggattttatggatgag

SEQ ID NO: 159883 - DNA, 100 bp, Homo sapiens
tgagggagatggaaatctggctgagtgtgaaagccttcatcctccccaaggcagaggtgtgcgtgcggaaccatgtccagccctacatcccatccatcct

SEQ ID NO: 159884 - DNA, 98 bp, Homo sapiens
ggcaaagccctctccgtggtctgggaccgccacctgagcatctccgtggtcctgaagcagacataccaggatgttgcttcagagtgtgaagtcaaatg

SEQ ID NO: 159885 - DNA, 74 bp, Homo sapiens
cccagttcctggaatctaatccttgggtagaaaaggttatttatcctgcttttctgggagaagaggctacaagg

SEQ ID NO: 159886 - DNA, 82 bp, Homo sapiens
gaggacaaagagcccctcatcgagctcttcgtcaagtaagactttgaccccgacgcaggcttcagtgattgccgcggatcag

SEQ ID NO: 159887 - DNA, 90 bp, Homo sapiens
agaaaatggtttggctgtgataggagtatttttaaagtattctaccttgtaaatactgttatttgtatatactgtaaatgatgacatcgg

SEQ ID NO: 159888 - DNA, 100 bp, Homo sapiens
gagcaaagtgatcattgttgacaattcccctgcctcatacatcttccatcctgagaatgcattcaaacgatatgtcaataaacttcgaagcaagagtaca

SEQ ID NO: 159889 - DNA, 83 bp, Homo sapiens
ccgaggagagcagagcccaggaactggacagcagacaaggaaggctttatcctgtggataaacgcagagtgaacgagtttggg

SEQ ID NO: 159890 - DNA, 116 bp, Homo sapiens
tttttcccattggatgagtcgggcaatgtggttcccagtgacaccaacattctggacacgtgggcggagccaaggcaaagagggaccactgtgctcatggacccatcgctgccttc

SEQ ID NO: 159891 - DNA, 50 bp, Homo sapiens
aaggaggacgacgtttcttttctcatggcctcgaaaaagcccaagacagc

SEQ ID NO: 159892 - DNA, 50 bp, Homo sapiens
ccgcggtggagcgggacacgaacgtgggaagaaggccgtgctgggttcca

SEQ ID NO: 159893 - DNA, 76 bp, Homo sapiens
cgtccatgggggctgcattggcggagaggagtgtgaattttagacacttctgcagggatctgcctgcatcctgacg

SEQ ID NO: 159894 - DNA, 75 bp, Homo sapiens
ctgaagacctattttactgataagaaaacacatctttacacactaagctctgctgccatgaaggtgaagattaag

SEQ ID NO: 159895 - DNA, 87 bp, Homo sapiens
ttcagcaggcgatagcaatgcacagccaatttcatgctccactataggctgctgatactttggctgtgaggcaaaaaaggagaattt

SEQ ID NO: 159896 - DNA, 82 bp, Homo sapiens
ctggctgcttccagtgttcgccgagaggtgcagagcattgtagaccaaggagccatggataggagaagtatgggtgaaacag

SEQ ID NO: 159897 - DNA, 114 bp, Homo sapiens
gatagcagcagaagagaagaagaagcaggatgaactgaaacggattgccagagaattggcagaagggtgtccgcaatgttgccagtgtctgtctgcagattggctacccaactg

SEQ ID NO: 159898 - DNA, 100 bp, Homo sapiens
cacgacccacgagatcatggggcccaagaaaaagcacctggactgaatgaagccaagagtgatgaaagaagctgtatctactccatcacgaatggcccac

SEQ ID NO: 159899 - DNA, 88 bp, Homo sapiens
acaaagcagcccaaccaaagggaaggatctgagtctctccctgcggagacagccctgaagaactcctgtaacgtcaagctggcaattt

SEQ ID NO: 159900 - DNA, 108 bp, Homo sapiens
gcgcgcgtcccgagccctccacccgtcgtgccggcgccgcccggaccgccagcacttgcacctcctgcgccgccgccccccatccaaggatatgccttcaagcctcca

SEQ ID NO: 159901 - DNA, 100 bp, Homo sapiens
gagattcaggccagagttgtgggccgccgtcggcagcaagaacagagagagaggtggacagatctgagagatactgagacatgccaccactgctctttga

SEQ ID NO: 159902 - DNA, 97 bp, Homo sapiens
gccctggaagattttgagggatgagacaagaggaccttgcccagttttaacttctagtcatggcgaatgatcgcaggagagcacagactggaccctg

SEQ ID NO: 159903 - DNA, 51 bp, Homo sapiens
agcgttgaataaacggttgtacaaagaggccgtcaccgatgggttgtatat

SEQ ID NO: 159904 - DNA, 100 bp, Homo sapiens
gaagtaccaggaggcgttggccaaggactcaaatccagtacctcaagcaagtccagcagccgagcgttgcccaactgagatcaacaatggtagacccagc

SEQ ID NO: 159905 - DNA, 96 bp, Homo sapiens
aacacacccttgcactatgctgctgcctcagggatgaaagcctgtgtagaggataaagtagccaatatttggtgcagcttcaatgtctttctgaag

SEQ ID NO: 159906 - DNA, 96 bp, Homo sapiens
ccgctctgctgtgggcgctgctggcgctctggctgtgctgcgcgacccccgcgcatggtacatgtcccagagcaagcacacggaggcccgggagct

SEQ ID NO: 159907 - DNA, 74 bp, Homo sapiens
tgctggtgaatcatttcaagagcatgcttttcacttccactgcatctctcgctggctcaaaacacgacaggtgt

SEQ ID NO: 159908 - DNA, 87 bp, Homo sapiens
tggaccgagccgatcgccgcggggcagttcgggccggctgtcctggcgcgtcctgacacagctctccctgaggagcagccacattcc

SEQ ID NO: 159909 - DNA, 110 bp, Homo sapiens
gtaatgtgtttaacaaagccacgaataacctataatgggacaggagagagtggcaagagtacgtttatcaagcagatgagaatcatccatgggtcaggatactctgatga

SEQ ID NO: 159910 - DNA, 100 bp, Homo sapiens
ggcggctctctggtccgcagcggcaacagtaacgaaaaacagggctgctgccagcgatccataggtctttccaatgggaaagccaaggtgtgcaactaca

SEQ ID NO: 159911 - DNA, 83 bp, Homo sapiens
taacagcagcgccgtcccgtccgacagccaggcccgggagaagttcgagaacttgtcttggacaattgcaaatcaaatgatgg

SEQ ID NO: 159912 - DNA, 100 bp, Homo sapiens
tgactcatccacaatgatttctccagtgctcatcttgttctcgagttttctctgccatgttgctattgcaggacggaccagtagacaagatttgactctg

SEQ ID NO: 159913 - DNA, 90 bp, Homo sapiens
caaggagctaaagcagcgtgcgttcagccctgggagagcgcctgctcgctgtgcccccgggttatgacgacccccaataaaggaaacaag

SEQ ID NO: 159914 - DNA, 100 bp, Homo sapiens
ggccaccccctcttccccacttccctgcactctcatcgctctcggcctcggcctcggcctccgacacggaaactggtggtgacaaaagagaaagagaaga

SEQ ID NO: 159915 - DNA, 100 bp, Homo sapiens
gttgtgttagcatatacactgccaccagcttcccggttcatcattatattcgagcaggaagccctcctatgacactgaaacagatcctagtgagggattg

SEQ ID NO: 159916 - DNA, 90 bp, Homo sapiens
cccctgctgtgttcttcaggagaaacgtcaggggccttcctccaaggccttctgacagtggcccgcccgctgagcgctccccctgccgcg

SEQ ID NO: 159917 - DNA, 80 bp, Homo sapiens
caacaaaacaattattccccgacttacaggctctttattgagaaactaccaaaacatcgagattacaaatctgctgtcat

SEQ ID NO: 159918 - DNA, 50 bp, Homo sapiens
ggcaatttgttttcttcgacctacaaagggatgtctcagatgcagcttgc

SEQ ID NO: 159919 - DNA, 89 bp, Homo sapiens
gaccagaagggacaccttttgaagatggctctgtggatagcaactggatcgtgggtgccacgctggagaagaagctcccacccctgccc

SEQ ID NO: 159920 - DNA, 75 bp, Homo sapiens
ggatcttagatggaagtcttggctttgctgcaggggtggtccgagacattctgctgattggacatagacaggctt

SEQ ID NO: 159921 - DNA, 82 bp, Homo sapiens
accggggacccaagccagcccgtgcgcctgttcaggggccggacctcgccaggcccagacatgtccgtccttgtaagttaaa

SEQ ID NO: 159922 - DNA, 98 bp, Homo sapiens
cgaggaggaggaggaggaggaaaaagctggaaactgacaaactagctctcccgatgagccccagcccgcttagcccgagccccatccccagccccaac

SEQ ID NO: 159923 - DNA, 96 bp, Homo sapiens
agaattcagaaggagctggcggacatcactttagaccctccacctaattgcaggtgccgtggccagcacagaagtgaagatgaagttacaagaatt

SEQ ID NO: 159924 - DNA, 100 bp, Homo sapiens
cggtaccaggctgtcctggccaacctgctgctggaggaggataacaagttttgtgcagattgccagtctaaaggaactgttaaccttcaaggacgtatct

SEQ ID NO: 159925 - DNA, 75 bp, Homo sapiens
gacgcgtcttctttcaggctgagggtgtggactggatgaacaaggtgatggcacgtttcgtgaggggggatgccc

SEQ ID NO: 159926 - DNA, 83 bp, Homo sapiens
gcaggactgcgccgcgtcttcctcaagatgctctctgtgtgggtatgtgtgtagccatcctccttctttgaagtctcatatgt

SEQ ID NO: 159927 - DNA, 98 bp, Homo sapiens
gcttcaaggaccccagcgactacgtgcgcgccatgcgtgagatgaatgggaagaacagtgattattgagcagagttggggaagtcccaaagtaacaaa

SEQ ID NO: 159928 - DNA, 101 bp, Homo sapiens
gtcatttccaaaacttttcagctatcttcccatccaatacttggtgactggtctattcaagttcaagtgaatggcaccagtgtcttgtcacctggactcca

SEQ ID NO: 159929 - DNA, 100 bp, Homo sapiens
atagaggggaagaagatcaaactacaagtctgagtaatcaagtcagaggattatatgacttttatctgcctagagaagaactatggatctacaacatgga

SEQ ID NO: 159930 - DNA, 76 bp, Homo sapiens
cgccatcgttgctgccttcttcgtcaagattgctcgctgtaagcagctcatctgtgaccccagctacgtaaaagat

SEQ ID NO: 159931 - DNA, 98 bp, Homo sapiens
tgggtccttcagagttttgaggagccgcggaggagtgcacaggaccccaccatgctgcagaatcaaaaagaccctctggctgtggacaaaataatgaa

SEQ ID NO: 159932 - DNA, 100 bp, Homo sapiens
atcactggattgctgacggcagccctctcagatatgcaaaagttataagggagagggtcggcagcagatttgtaaccagcagccaccgtgttcaagactc

SEQ ID NO: 159933 - DNA, 74 bp, Homo sapiens
aaacacagtttctgcaggaaaagatctctctacttctcctaaggatcttatggttggtgatgaggcaagtgaat

SEQ ID NO: 159934 - DNA, 82 bp, Homo sapiens
tgctgcacatcgtcattgacatccctatcaatgtctacaagttttcggctttgtgagaaaccttaccatcaaacacgatggc

SEQ ID NO: 159935 - DNA, 100 bp, Homo sapiens
cagaagatcgaccggatgatggaggcgtttgcccagcgatattgtcagtgcaataatggcgtgttccagtccacgggatctgggattggcacaagactct

SEQ ID NO: 159936 - DNA, 92 bp, Homo sapiens
ctggggccagggaaccctggtcaccgtctcctcaggtttggtgcacctcgatttggaggaagtagggcagggcccttatctggaaagaagtt

SEQ ID NO: 159937 - DNA, 101 bp, Homo sapiens
tcctgatcatcttcctggcagagctctcagcagccatcctggccttcatcttcagggaaaatatgttgatgttagtgaagattcacctcctcccctacctg

SEQ ID NO: 159938 - DNA, 75 bp, Homo sapiens
aaagaacagagccatcattcaagaagtttgcttcatgattgtggagaagcagcagcagaagatggatcagttgcg

SEQ ID NO: 159939 - DNA, 87 bp, Homo sapiens
ccgcgccccccgcccgtgccctcccgctcggccccgccagcagcactgtggaggccgtcctcgggagcatcgagtacagctgtccgg

SEQ ID NO: 159940 - DNA, 75 bp, Homo sapiens
caatgtggacggactcactgccctgcaccaggcgaaattacaagagtccattgaatatgaagacttggggaaaaa

SEQ ID NO: 159941 - DNA, 83 bp, Homo sapiens
cccgacgaggaagttttctactgtaaagtcaccaacgagatcttccgccactacgagtggccaaggtggaatacgtcaggaag

SEQ ID NO: 159942 - DNA, 75 bp, Homo sapiens
cccagccccacagaccagcccagcattcagcaaattgtggctactaatttgccccctgaagatcaagatggctct

SEQ ID NO: 159943 - DNA, 100 bp, Homo sapiens
agtgacgttttccacaggcatcaaaatggtctcagctgagtctgctctgatcacccaacaagacctagctccccagcagagagcggccccacaacaaaag

SEQ ID NO: 159944 - DNA, 88 bp, Homo sapiens
acgagccctccttcagcgaccccgaggacttcgtggacgacgtgagcgaggaaggttggatggcaagcatgtggtgtttggcaaagtg

SEQ ID NO: 159945 - DNA, 75 bp, Homo sapiens
cgggcatgggcggcaactctttgatgtactactataatgggaaagcggtaatgctggaggatggaagaagcaaag

SEQ ID NO: 159946 - DNA, 75 bp, Homo sapiens
gcctcccagagaggggagccggcgaggatcaaaatcttcgaaggaggtactatactggcaattgctggagaagat

SEQ ID NO: 159947 - DNA, 100 bp, Homo sapiens
ccaattacctcttttttgctctccctcgagaagctccagatggcgtcttccgtgggcaacgtggccgacagcacaggcgccaggaactccgagagcttcg

SEQ ID NO: 159948 - DNA, 100 bp, Homo sapiens
gctgctgttgatgctggctttgttcccaatgacatgcaagttggacagacgggaaaaatagtagcaccagcatcctctggtatcacgattccaaaacccc

SEQ ID NO: 159949 - DNA, 50 bp, Homo sapiens
gaacagaaagaaaagtccgaaagagctgctccctgtgctgtcaggaatct

SEQ ID NO: 159950 - DNA, 75 bp, Homo sapiens
gtgctgcggctctgcgcggtccccgccagcgccccatcctgagccgggcgaagctgtgctcaggcccgggctgga

SEQ ID NO: 159951 - DNA, 97 bp, Homo sapiens
ggggacctcggagggagcccggcggcttcggccatcctggaagacgccggtgccgacgtcctgatggaggccctggaggccctgggctgcgagtgcc

SEQ ID NO: 159952 - DNA, 87 bp, Homo sapiens
acggtgacaagtgtgggaaccagcgcttctccaccaggatcacgtttgagtgtgctcagatatcggcaagctttgttgcttctgaaa

SEQ ID NO: 159953 - DNA, 97 bp, Homo sapiens
ggacatcgtcaggctggcccaggaccaggaggagatgaagggccaattcctgtccccccagcagcatggcatcgtgtgctgaaccctctgagccctc

SEQ ID NO: 159954 - DNA, 82 bp, Homo sapiens
gggcccatcttccgcacgacctcagcaaggcaatcgacgacatcgcggatggcgccgtgaagcccccacccaacaagtaccc

SEQ ID NO: 159955 - DNA, 75 bp, Homo sapiens
ctgcagctagtaatttgccttctggattgcccgccatgttcatagaggataaagcagtagacaccctggcttacc

SEQ ID NO: 159956 - DNA, 90 bp, Homo sapiens
gagtgttcaaaattcaattacacagaaaatcatcagcgtgttagcattttctttgactatgcaagatgtagcaagaacactgcgtggccc

SEQ ID NO: 159957 - DNA, 51 bp, Homo sapiens
gcctacaggagtatgatgcaaggtattagaaaactactcggatgctccaat

SEQ ID NO: 159958 - DNA, 88 bp, Homo sapiens
ccggcgcgaagaggctggactcggattcgttgcctgagggagtgcatccgccccaacccttttccccctcgtctcctgtgagaattcc

SEQ ID NO: 159959 - DNA, 50 bp, Homo sapiens
cggaagccttcgtctcccagattgcagcggagtttaagagagctgtgaaa

SEQ ID NO: 159960 - DNA, 101 bp, Homo sapiens
gccgcgcgaggaaatggccgaggagccggagccgcagtctgtagatggacggcagatccgagtagaccaggcaggcaagtcgtcagacaaccgatcccgtg

SEQ ID NO: 159961 - DNA, 108 bp, Homo sapiens
gacacagccaaggatgccgtcatcagcctgtgtggccacctcttctgaattctctgagctggtgacaggtgccacaggcactggggatctcaccagaaaggaaccgac

SEQ ID NO: 159962 - DNA, 82 bp, Homo sapiens
cttgtttgtggatcgctgtgatcgtcacttgagagcgcctgctcgctgtgcccccgggttatgacgacccccaataaaggaa

SEQ ID NO: 159963 - DNA, 83 bp, Homo sapiens
ctggagacggcctgggtgctggcgaagcggaggccggaggtctcagccaatttcttctccagtcatcctccagtttggtcatg

SEQ ID NO: 159964 - DNA, 83 bp, Homo sapiens
attaacagagaggcctttcctgcacacaaggtcgtcctggctgcctgcagcgactacttcagacaatgcagatcttcgtgaag

SEQ ID NO: 159965 - DNA, 76 bp, Homo sapiens
atccaagcaataacccaagcaaaacttcagatgcagcacatttcacattttatgcaaaacatcccttttccttcac

SEQ ID NO: 159966 - DNA, 100 bp, Homo sapiens
gaaaagtagaaggaaaaacagaacgttgcaaactctggaaaaaaacttggaaactggcagacctttcacttcgtatccaacaaattgaaacaactctcaa

SEQ ID NO: 159967 - DNA, 88 bp, Homo sapiens
ctccctcagcttccgccccaaaaggagaaagctttgcagaattcagatctgcaggaactgatgatggtttcaccgattttaaaacagc

SEQ ID NO: 159968 - DNA, 100 bp, Homo sapiens
acattgctgcatcaagaaacccaagctgctgaggtatccagtagaaaaagcactctccagtgttcatctgtggaactggatggttcctacttgagcatag

SEQ ID NO: 159969 - DNA, 80 bp, Homo sapiens
gatttctccgcctcagcccaacggggagttcccagtgggccgtattcatcgacacctaaaatctaggacgaccagtcatg

SEQ ID NO: 159970 - DNA, 96 bp, Homo sapiens
cgcgccggagcggggtccgatggttctcgaaggcccgcggcgccccgtgctgcagctgcccatgatggggggagctttcatggactcgcccaacga

SEQ ID NO: 159971 - DNA, 75 bp, Homo sapiens
acaaaagttcacctctgcgaagaggagaaggcagagcccccccaggctatgaatgccctgatgcggttgaaccag

SEQ ID NO: 159972 - DNA, 75 bp, Homo sapiens
aagggaagtgtcttcacaaagatgagccggctcagttcggggaagctgcaggagttcggcgtgggtgatggcagc

SEQ ID NO: 159973 - DNA, 100 bp, Homo sapiens
gcgaccgcggtgcgcgctgtgggctgcctccccgtgctgtgtagcgggacggcaggatcctggtggacctgctgaagctgaacgtggcccccctcgccgt

SEQ ID NO: 159974 - DNA, 100 bp, Homo sapiens
caggccgcgacgagggcgctgaggtgatgtgtccaatctagatcccaacttctcatttgaaggcaccaaactggatgtggggaacattgtgctggcatta

SEQ ID NO: 159975 - DNA, 82 bp, Homo sapiens
agaatattggtcaagttgctgaccttgaagctgtggatttaatgtgactaacagtaaccctaccatctgcatcaacgacctc

SEQ ID NO: 159976 - DNA, 101 bp, Homo sapiens
ggatcgtgaccgagaccgtgaccgagagcgtgaccgagagcgcgaatatcgtcatcgttagaaggcaccgaccgtcacgagctaacttcctggaagagctt

SEQ ID NO: 159977 - DNA, 83 bp, Homo sapiens
cagcacttccacagccaagtgcgggagtccacggatattagaaatggctactccccagtcaattttcatctttgcaatctgca

SEQ ID NO: 159978 - DNA, 50 bp, Homo sapiens
aagaggatgatgtttttggtgaaggtgactcctgcacctgcgccggctcc

SEQ ID NO: 159979 - DNA, 87 bp, Homo sapiens
aacgcagactcgagtgcgaagcgcgcagtcgccgggccagaggcattgatgtgcagcaggtttctttagtcatcaactatgaccttc

SEQ ID NO: 159980 - DNA, 100 bp, Homo sapiens
gctgctgtgctcaggcctggccggacaggacctgaaggagaagaaggagaaggtggaggagaaggcaagccggaaagagcgaaagaaagaagtggtggag

SEQ ID NO: 159981 - DNA, 98 bp, Homo sapiens
aatctatgatgctgatggtgatggagattttgatgtggatgatgccaaagttttattagtccaatatcagatggaaatgatgcggagccttcgccatg

SEQ ID NO: 159982 - DNA, 135 bp, Homo sapiens
cgcccgcaagagcgagccgcctgccccggtgcgcagacagagctattccagcaccagcagaggtgctggagaatctggtaaaagcaccattgtgaagcagatgaggatcctgcatgttaatgggtttaatggaga

SEQ ID NO: 159983 - DNA, 75 bp, Homo sapiens
agtcgccacgacaggcggcagccaggagtctactcttcatcttgtgttgagacttcgtggtggtgctaagaaaag

SEQ ID NO: 159984 - DNA, 100 bp, Homo sapiens
cggagctagctggatcctctaggcagcccgtggccacccaggagcccgatgtgcaaggcaggtgtgagtgccaggacggcattcctggagatgaaggcct

SEQ ID NO: 159985 - DNA, 80 bp, Homo sapiens
cggtgcgcaagcgcaaccgtcggtgggtcggggatcggtcgcctgagagcaagagtgagccatggagctacgtgtgggga

SEQ ID NO: 159986 - DNA, 50 bp, Homo sapiens
acagtctctgcacctcgcgccccagcagggagagcctggggatgtacagg

SEQ ID NO: 159987 - DNA, 100 bp, Homo sapiens
cggctccttaccagctcacctctcaccgcgcatgtttggagggtcttactgaagtaacacaaagcttaaaaatggaaaatgaagagtttaagaagaggtt

SEQ ID NO: 159988 - DNA, 100 bp, Homo sapiens
caatcctcacattcaagctgataggctgcgctaccggaatgtcatccagcgagtgattagcaccttgcagagtgaagtcaagcccatcctagagaagctg

SEQ ID NO: 159989 - DNA, 82 bp, Homo sapiens
gggaggtgcccctgcgttgtaccatccgcctgtgggacacctaccaggttgtggcagcactgcctgaaggtatgagaccaga

SEQ ID NO: 159990 - DNA, 75 bp, Homo sapiens
ggagacgcaggaagcgatgaaagagatgtctgctacctgccatcctggctggacttgaccccagggacattgtgg

SEQ ID NO: 159991 - DNA, 75 bp, Homo sapiens
ttcggcagtccacccaccgccgccgcctcccaggatttgctttcccatatgcttcatatggacccacatcagcgg

SEQ ID NO: 159992 - DNA, 75 bp, Homo sapiens
ctcagtctacaagaccctgataatgagtgccccttctttgttgatgccacttcctggaactaaagcattgccttc

SEQ ID NO: 159993 - DNA, 75 bp, Homo sapiens
agcagccaggaaccaagaaaacttgctccgacagttagttaatatgtgcatcaacccagatccagagaagcgacc

SEQ ID NO: 159994 - DNA, 100 bp, Homo sapiens
ccaccttcccgcaccctgggaccgggccatgtgacctttgaggatattgctgtgtacttctcccaggaggagtggggcctccttgatgaagctcaaaggt

SEQ ID NO: 159995 - DNA, 96 bp, Homo sapiens
ctgtaatgattgctacatgcgatccagaagtgactggtatagtggtcccgcaactgaacttgatactgaacctgatgatgaatgggtgaaaaatag

SEQ ID NO: 159996 - DNA, 101 bp, Homo sapiens
cttgcactaccagcaggctctcaccagcgcacagttgcagcaacacgccgcgttcattccaacaggctccagtgatcattctacatatattgtacaaacac

SEQ ID NO: 159997 - DNA, 75 bp, Homo sapiens
caggaggatgaagctgctgctgggcatcgccttgctggcctacgtcgcctggtcgacatgttaaaacgggtcagt

SEQ ID NO: 159998 - DNA, 75 bp, Homo sapiens
aaaccagttattgaatatcaagaggaggagttgttggagtttgggctttgcaaaactgagaacaaagccaagtcg

SEQ ID NO: 159999 - DNA, 99 bp, Homo sapiens
caaagacaaagcttttgttaattatcttaaatacttgctttactggaaagacccagaatatgccaagtatctaaaatcgttaactgaagacaatatgca

SEQ ID NO: 160000 - DNA, 75 bp, Homo sapiens
gaaaagatccctggaatatgaagagacacagtatggtagccacacccccagagactaaggtgtcagtatgttctt

SEQ ID NO: 160001 - DNA, 83 bp, Homo sapiens
gtaggataagactttgattcaaccagtacttctggagtgtatgaaaaagcttgtggtgaaggggggcaaaaaaaagaagcaag

SEQ ID NO: 160002 - DNA, 98 bp, Homo sapiens
gctagcagagcggaggcgctgccacgaaactcgtacctgcggctaagagcagctgggagtgtccactcgccttccaccagcatggcaacgtcttcaca

SEQ ID NO: 160003 - DNA, 92 bp, Homo sapiens
agcgccagcggccgagcgggcggcttcctggcctgggcgctccggtggcggcggaggtacatgtcccagagcaagcacacggaggcccggga

SEQ ID NO: 160004 - DNA, 75 bp, Homo sapiens
cttgccaggagtgttcaagatgctctctctggaccgatcccactactcagaaccgtgctgcatactatcctccta

SEQ ID NO: 160005 - DNA, 100 bp, Homo sapiens
atttacttttaatcatctttattatctcattgaagcttggaattacatagctggaaaggatcttacaggtcattgtttttcagacatacacaaataaaag

SEQ ID NO: 160006 - DNA, 100 bp, Homo sapiens
cggagccgaataccaagctcggatccctgaatttgatccagacaatgcagatcttcgtgaagactctgactggtaagaccatcaccctcgaggttgagcc

SEQ ID NO: 160007 - DNA, 98 bp, Homo sapiens
ggaagttcatccttggactgcacgcatgaacgagtttgctgtcttcccattggattcagccagtccgcggtcctgataccatgtttgtgtggaagtgc

SEQ ID NO: 160008 - DNA, 75 bp, Homo sapiens
agtcagtctgttgatgaaactatgtccactccatactcggcatacgacccagagacgtacacaggccactggaag

SEQ ID NO: 160009 - DNA, 100 bp, Homo sapiens
gggcccagatccctgggacaccgagattctgagaggcatcagtcaagcctcggccttcatcatcgtcatgctcctggccagcctcaacagctgctgcaac

SEQ ID NO: 160010 - DNA, 98 bp, Homo sapiens
ggagtgctcgctcgcgcctcctaaagctctcagccgagcgcgccgagacccctcagggcggccgatgccatggacaatattaccaggcagaaccaatt

SEQ ID NO: 160011 - DNA, 116 bp, Homo sapiens
caggcggacgaggcggaagaccgcgcgcagggcctgcagcgggagctggacggcgagcgcgagcggcgcgagaaagttgcttatggaaccacagagaacagtcccgtgacattcgc

SEQ ID NO: 160012 - DNA, 82 bp, Homo sapiens
cagctgctgacaaaaggcatggtgatccttcgggacaagattcgcttctatgagggttgacatcatggacatatgtgagtcc

SEQ ID NO: 160013 - DNA, 82 bp, Homo sapiens
ctcctacctcctggacggcaagccgctcagcaagctccacatccccgtggtgtggaaacaggaagagaactagaactggaag

SEQ ID NO: 160014 - DNA, 100 bp, Homo sapiens
tgatgctgtgggacctattgttcagttacaagagaaactttatgtgcctgtaaaagaatacccagatgatcgaggaaataacaatgtaatgagcaattat

SEQ ID NO: 160015 - DNA, 74 bp, Homo sapiens
cctaccccaaactcatggaaattgatcagtggctgacaagattttgaaaaagaaagaataccctctttatataa

SEQ ID NO: 160016 - DNA, 87 bp, Homo sapiens
cgatcatggcggatggcccccggtgcaagaggcgcaaacaagccaatcccaggaggaaaaacgggctgatgttgtagtcaccgatct

SEQ ID NO: 160017 - DNA, 75 bp, Homo sapiens
ccagagacgggcccagaagactaaagcatggagatatggaccaaaaggaacgagacgtgattatgagggagtttc

SEQ ID NO: 160018 - DNA, 75 bp, Homo sapiens
ggaggagccgctggggctgccgccacggccgcccggaggcacgtggactccctttaatccagtgactgtcaggtc

SEQ ID NO: 160019 - DNA, 83 bp, Homo sapiens
cgaggcttcacggaggaggtgggctgctctttggcgtaaattgcaatcgattagggatcgtttctcagaatcaagttagaagt

SEQ ID NO: 160020 - DNA, 50 bp, Homo sapiens
catctgttggacccgcaccttgagttttactacccttggatgctgctgtt

SEQ ID NO: 160021 - DNA, 73 bp, Homo sapiens
tgaaacgatcctctcatctcagcctccaaaagtgctggcattacagtttcctccagcttatggaggcatatct

SEQ ID NO: 160022 - DNA, 98 bp, Homo sapiens
aaaatgggatgcaggattcaaggaagaaattagaccagatgagaagtcaatataacattcaggcttatccaacaacagtggtattcaaccagtccaac

SEQ ID NO: 160023 - DNA, 100 bp, Homo sapiens
ctgttgatgctgtaattgctgaacttaaaaagcagtctaaacctgtgaccacccctgaagaaattgcacaggtgtggcttggcgttggccctcaacaagc

SEQ ID NO: 160024 - DNA, 75 bp, Homo sapiens
tggtggtggaggtggaggtggaggtggaggctattgagggcacctacattgacaagaaatgccccttcactggta

SEQ ID NO: 160025 - DNA, 75 bp, Homo sapiens
gagtgcagaagatctgggtgcccgtggaccacaggccctcgttgcccagatcaaaatgatgcttcaacacccagg

SEQ ID NO: 160026 - DNA, 100 bp, Homo sapiens
gatgctctctcaggagatctggacagctgtccctccactacagaaacctcacagaacacagcaaagagttgtttagaaagtgattttacatctggtggag

SEQ ID NO: 160027 - DNA, 90 bp, Homo sapiens
gaccaccttcataattggagaaacaccaaaaggaatccgcaggtctcagcttgactatgaagttcccagggaaaaggccttccaaaagag

SEQ ID NO: 160028 - DNA, 101 bp, Homo sapiens
accagttctgggatacgcagcccgtccccaagctggcctcatctagttgaatctgaagatgtggacctgctgatgaagagggctgattgtatctaacttag

SEQ ID NO: 160029 - DNA, 98 bp, Homo sapiens
cggcgacggccacaggggcggcgacggcgcagtgcgaagcgaaacaggatgcagactcttcttattttaaaatctttaagacaaaacatgactgaaaa

SEQ ID NO: 160030 - DNA, 99 bp, Homo sapiens
cctgagggcgggccggcctgcggcggagggaaaaaggaagaggagaaggaaattgtcccgaatccctgcagcaaaagtgcaacagatgttaaagtcact

SEQ ID NO: 160031 - DNA, 100 bp, Homo sapiens
ctcagatgacgtccgtgatgagaagtggcctcatcctgcatgactcgcctgtcccggtctcgtacagcctctctgaccagtgcagcatccgttgatggca

SEQ ID NO: 160032 - DNA, 83 bp, Homo sapiens
ctggtgttcgccaagatgaagggctacccacactggccggcccggatgatcaagcggtgctgattcacgagagtggaagcctc

SEQ ID NO: 160033 - DNA, 76 bp, Homo sapiens
gcttggagcacttcctattccactggattgggaaagaccatggcaggtgattgcatactcggaacatcgttaccgt

SEQ ID NO: 160034 - DNA, 101 bp, Homo sapiens
aaggacttactgaaagatatgaatcagagttcattggccaaggagtgccccctttcacaggaactgcaagcacatgttgaccagataactgaaatggcagc

SEQ ID NO: 160035 - DNA, 51 bp, Homo sapiens
agcaggctgaagaggaacgatatttccgatagcagaggacaccctccaaac

SEQ ID NO: 160036 - DNA, 73 bp, Homo sapiens
cggtctcctgttgctcactttcctgggtattgtagccgctgtgcttgtcaagtccagtgtgaaaaaagccagt

SEQ ID NO: 160037 - DNA, 100 bp, Homo sapiens
cgccttcatccccgtggaggagatatggctcgtggacagcagaaaattcagtctcagcagaaaaatgccaaaaagcaagctggacaaaagaagaaacaag

SEQ ID NO: 160038 - DNA, 83 bp, Homo sapiens
gctgggtcagtccgccgctcaccccgcggccgcaccttcccgccttctcaggccaacccatggccagcacagacatgatggaa

SEQ ID NO: 160039 - DNA, 83 bp, Homo sapiens
gtggtggtctactctgatgtcaatcttgagggctaggcagaagtcaattcatctggaaagactatctctgagtcagacttaaa

SEQ ID NO: 160040 - DNA, 82 bp, Homo sapiens
actggttcttcttacatatactatgtttcgtctacagttggctctcgaacagtgtggcctgatgaaactatgggaccctttg

SEQ ID NO: 160041 - DNA, 75 bp, Homo sapiens
ctcgtggttgacagaacaaggcgattaggaaacatgaagcatgatggaagtggttcattgcatgatattcaactg

SEQ ID NO: 160042 - DNA, 75 bp, Homo sapiens
cagacctaccggtctgtcagtgagatggcttctaacaagtcgtgagatggagaataaagaaactctcaaagggtt

SEQ ID NO: 160043 - DNA, 97 bp, Homo sapiens
tgggccgtgtataggttgtcaaaattcacaaggcaaggtgactttgaaagatcagggagctgattttggatggatctttacagttgatccaggaagg

SEQ ID NO: 160044 - DNA, 103 bp, Homo sapiens
gtttgcccagaaattggtcgtctgagagctttacgtcatcttcgattagctaataaccaactgcaattcctacctccagaactgataaatttcaaacggaaga

SEQ ID NO: 160045 - DNA, 90 bp, Homo sapiens
taatgatagaatgaagaccacaataaaagagacctctacttagctcagcaattcttaccttagtggtgagatcaagtcggtagatcccag

SEQ ID NO: 160046 - DNA, 100 bp, Homo sapiens
caagcggaaggtgatgcccaagatggaccaggttctttcagagcacggcttcggccccatcactaccgacatccgggagggacagactttctactatgcg

SEQ ID NO: 160047 - DNA, 99 bp, Homo sapiens
gccttgctgatgaacctgactgaggaatggaacattactaaactttcaattgagtatgattctgagccctttggaaaggaacgagacgcagctattaag

SEQ ID NO: 160048 - DNA, 98 bp, Homo sapiens
gaagaagacctgcacgacgttcatagttgactccacagatccgggggtatcgaggcaccaagccagattcgctcttcaagttggagcaaggagaaccc

SEQ ID NO: 160049 - DNA, 76 bp, Homo sapiens
tattaatgtgtgccatttatgtgatggcaaagccaagctacatcagtgatgtgggaccccctggtcgaagctctct

SEQ ID NO: 160050 - DNA, 99 bp, Homo sapiens
aacctcttggcttctgaggcatctgacaaggtgtgggccatgtttgaggattgccccagcattcagttctatgagtaataaatatccacaggctgtttt

SEQ ID NO: 160051 - DNA, 75 bp, Homo sapiens
gaaaaccccaaaagtgtacataagattctgaaggaagatttccattaggtaatttgtttaatcagtgcaagcgaa

SEQ ID NO: 160052 - DNA, 74 bp, Homo sapiens
cgcgcgggacaagtcgccggcggcgcccgacggagcagcaactagaagccatttgtgtcaaggtaacgtctgga

SEQ ID NO: 160053 - DNA, 100 bp, Homo sapiens
tgttggagggagtgagccagcttctttgtcttacttgtcatttgaaggtgcaactaaaagaaacagaccaaatgtgcagaaattacagaagacatccccg

SEQ ID NO: 160054 - DNA, 74 bp, Homo sapiens
cttggaagagtttggtccaattgaatcaattaatgttggactccatgaaagaattgcacaaaacaaatcgacag

SEQ ID NO: 160055 - DNA, 80 bp, Homo sapiens
ctgtaccccatcgcggtgctcatagacgaactccgcaatgaggacgttcagatgaagaaactgaggccctgtgatgtgaa

SEQ ID NO: 160056 - DNA, 50 bp, Homo sapiens
ctttcaggtcggccaggagcgcgccggcgccatgtcagaaccggctgggg

SEQ ID NO: 160057 - DNA, 89 bp, Homo sapiens
cccagtctttgcaatttatcatcgatgcgtttaagggacagctttgggacatccggaagaaagcagccatccagacatttcagaacacg

SEQ ID NO: 160058 - DNA, 100 bp, Homo sapiens
cacctcaagccacgcatatgataatgcaaccatcggcttgatcaggaatctggccctgtgcccagccaaccatgccccgctgcaggaggcagcggtcatc

SEQ ID NO: 160059 - DNA, 90 bp, Homo sapiens
ggactggcttatcttcacacagaattaccacgaggagagagattcaagcaggtgctaaactgtcattaaatcgacaattttttgacgaac

SEQ ID NO: 160060 - DNA, 100 bp, Homo sapiens
ggcctcattttggatatctgtgataaagttggtcagtctcgcactgggattttttatcaagcagaaatgcatcgaacaacgagaatcaagatcactgagc

SEQ ID NO: 160061 - DNA, 100 bp, Homo sapiens
cgagcatggagatggcacagacggagaagacgagggggcgtctgaggaggaagacctggaagacagatctggtaatctgtaagtcagatgctccaacagg

SEQ ID NO: 160062 - DNA, 87 bp, Homo sapiens
tgaagacaaggcggccccgctcccgggttcctctgaggattggaattctagtgattctaccagaaaggaatgaagaacagaaccttc

SEQ ID NO: 160063 - DNA, 75 bp, Homo sapiens
agattgtcttggaagttccaaagttgcaacgatttctcaaccatgtccaagggacctgcagttggtattgatctt

SEQ ID NO: 160064 - DNA, 82 bp, Homo sapiens
atttttggtcgcaccaccactccacagcagaccaacactgccagtgaaagatgtagaagataaacctgaacaacaaaccaga

SEQ ID NO: 160065 - DNA, 119 bp, Homo sapiens
ctggaagcagaggaagtagtttaaatgatacctatcactcaagagactcttcatttagattggattctgaatatcagtttccagagtgtggattctttggcatgtatgacaaaattctt

SEQ ID NO: 160066 - DNA, 96 bp, Homo sapiens
gaatgagaatgaatctgaaaaaagagaactggtattcaaagaggatggtcagggcatggagggatttttgaaatcagatgagaggcagagattggc

SEQ ID NO: 160067 - DNA, 90 bp, Homo sapiens
gccgcaaagtggggctcatgaaccgcgccgtgcaactgctcatcctggcctacgtcatcgggtctgtttatgatggtgaagaacatggac

SEQ ID NO: 160068 - DNA, 75 bp, Homo sapiens
tccggctgcagggcggtaaggatttcaacatgcctctgacaatctctagtatttggactgagcaacaaatttgaa

SEQ ID NO: 160069 - DNA, 75 bp, Homo sapiens
actgggatttggaggatttaatacacagcagcagcagcaaactagcttactcaattccagatatggccgaggatg

SEQ ID NO: 160070 - DNA, 100 bp, Homo sapiens
gctgctggctgcgctctgcccggcgagtcgggctctggaggaaaagaaaggtcatgcagaaggcttttgtatgatgtgtacaatgcaagcacatattacc

SEQ ID NO: 160071 - DNA, 100 bp, Homo sapiens
cgggcggcggagcaacgttcgcgtcatcacggacgagaactggagagaactgctggaaggagactggatgatagaattgaagccattaatttgctagaac

SEQ ID NO: 160072 - DNA, 82 bp, Homo sapiens
caacaacaagtgcatccctgagtgtccctccgggtacacgatgaattccagcaagtggtgccaccaccacaacagaatgatc

SEQ ID NO: 160073 - DNA, 96 bp, Homo sapiens
ccgagaccgtgaccgagagcgtgaccgagagcgcgaatatcgtcatcgttagaagtcattatttagaagcaaggtccttgaatgagcgagattatc

SEQ ID NO: 160074 - DNA, 82 bp, Homo sapiens
accattgcctacagtgacattgatatcaaagatgccaacagccagtctgtgaagcaaagttctcatatagatgtggttcgtt

SEQ ID NO: 160075 - DNA, 82 bp, Homo sapiens
tgcatcccggccgtctgggcggccgccgcgcttctgctctcagtgtcccggacttcaggtgctggagaatctggtaaaagca

SEQ ID NO: 160076 - DNA, 82 bp, Homo sapiens
tgagatgattgccaaacccccagagtgcctggtgaagaatgtgatgggatcactagcatgtctgcggagagcggccctggga

SEQ ID NO: 160077 - DNA, 100 bp, Homo sapiens
ccgcgcggaaggagctggagacggtcgtagctgcggtcgcgccgagaaagtgtcgagatggctatgaaccctgtgtaaatgaaggaatgtgtgttaccta

SEQ ID NO: 160078 - DNA, 100 bp, Homo sapiens
catttaattttagggtcctttatatagaagggagagtaggcgcgggcggtgatgaactttgtggttcgctaccggccagacgagcagccgtctctgcggc

SEQ ID NO: 160079 - DNA, 100 bp, Homo sapiens
gtggtgtgtctgctgttcccggcttccggggagatgaaggacccataggccaccaggggccgattggccaagaagatggcagtggcagcaccatgatgca

SEQ ID NO: 160080 - DNA, 95 bp, Homo sapiens
aaaagcagcagagttactgatgagctgtttccgggtctgtgccagcgacactacttcctcgcgtattgctaaaggaggagttgaccacaccaaaa

SEQ ID NO: 160081 - DNA, 100 bp, Homo sapiens
gaaaaactgttcttgaaaaccacctgctatttagtcattgacaagtttggatcagacatcataaaactgtgatatcaatgatacagggttcttcatgaat

SEQ ID NO: 160082 - DNA, 56 bp, Homo sapiens
attagggagtgatatttaccttgatggtatcataactattgtggattcaaaatatg

SEQ ID NO: 160083 - DNA, 75 bp, Homo sapiens
ccctgttcaggcctcggtgaagagtgttgcggagataggaacatgggagagaaacaatctgggtaacatgaaagt

SEQ ID NO: 160084 - DNA, 100 bp, Homo sapiens
gagatgtgtctctccaaagacaagacgctccaggatcttgtctacgatctctccacctcagggtctggctcagccgctcctgacatcactggccataaac

SEQ ID NO: 160085 - DNA, 75 bp, Homo sapiens
gaggttcctgtgcaactcttcacaggccatgaccacaatgtttcttcagtagccatcatgcccaatggagatcat

SEQ ID NO: 160086 - DNA, 96 bp, Homo sapiens
ctcctcaaactgactttgcagccacggagaggttctgtttggattctgcaaagcagactcgtcagaaagttgctgtgaactggaccaacttcagcc

SEQ ID NO: 160087 - DNA, 75 bp, Homo sapiens
gagaagtcatctgcacgtccaggggcgtgatggtgggcatgggtcagaaggattcctatgtgggcgacgaggccc

SEQ ID NO: 160088 - DNA, 75 bp, Homo sapiens
ggaaaaacctgtatgtggaaccacctgcatccgtgtcattctggaccttactcccaactaccggggtgagaactc

SEQ ID NO: 160089 - DNA, 74 bp, Homo sapiens
caatttattatcataatggaaaagaatatccaaccgataatagtgcaccaggtggcggagcgggtggaggccct

SEQ ID NO: 160090 - DNA, 110 bp, Homo sapiens
tacctgcaggtattgggagatccacagctaagacgccaggacccactggaagcctagaaatgctatgtgatgatgatgccatttaaacgacaggctctagtggaatttga

SEQ ID NO: 160091 - DNA, 100 bp, Homo sapiens
cgtggcagcctgaacggagtgtgcgacggattgggaggttactcactataaacaatatccacccaacacaagcaaagtttattcctactttgaatgccgt

SEQ ID NO: 160092 - DNA, 90 bp, Homo sapiens
aagatgagctgtcctttcaggaaggagccattatttatgtcatcaagaagaatgacgatgggaagtgtgaaatcggctgggcctactact

SEQ ID NO: 160093 - DNA, 100 bp, Homo sapiens
cattttgcggggcagttgttataatgtgggcatatgatattttcctgaatgcaaaagagcaaaacattgtgtttaatgctgaaacctacagcaatctcat

SEQ ID NO: 160094 - DNA, 50 bp, Homo sapiens
agaccagaagtggatggagaggattaatgaaaatcaagttccatcctcag

SEQ ID NO: 160095 - DNA, 75 bp, Homo sapiens
gccagcatcgccaacccggactggatcaacaccggggagtctgcgggttatttcttatgagggtcatggatatcc

SEQ ID NO: 160096 - DNA, 99 bp, Homo sapiens
cagaagatgggtatagcactgttacattaaatgtattctctactgccgctgatggtcaaacgcaagtggaaattaaagtgtgtcagggtgaaagagaga

SEQ ID NO: 160097 - DNA, 100 bp, Homo sapiens
ctttcttaacctcatcaaattcatgaagatttagccgaggcccatggtgaagtgccagcattataagaaaaaacgaacggagcaagaagaaactattgct

SEQ ID NO: 160098 - DNA, 88 bp, Homo sapiens
ccgccgccgccgccgccgccgccgtctggccccaggagaacatattgtgatgttcgtgcctcagagctaaaactatgagtgaatttcg

SEQ ID NO: 160099 - DNA, 100 bp, Homo sapiens
tgatacagcaggcgctcaccatgttccctggaggggtcgggccccggctcagtggtcccaggcagctcgggtgtcggaacccccagacagttcacgcgac

SEQ ID NO: 160100 - DNA, 75 bp, Homo sapiens
aacaagagttttccgcttattaggatcagacaggtcctatggcagcgtatacaaagctattcataaagagaccgg

SEQ ID NO: 160101 - DNA, 100 bp, Homo sapiens
gttggagagctcatctggaattttgccgatttcatgactaaccagtgttcctacaaacttgatgacttttgagtagaagcctgagaaaaaaagagaggtg

SEQ ID NO: 160102 - DNA, 74 bp, Homo sapiens
caaaactctctgaaaaatggctccctccgagttaagggctgggttacgacccctacaaccctgagctgcccaag

SEQ ID NO: 160103 - DNA, 100 bp, Homo sapiens
caaatcaaggaaggctgctggtgatcatgctaagggtcttcatataccacgattaacagagattcaagatggaaaaggtgatgtaaccattacaaatgat

SEQ ID NO: 160104 - DNA, 100 bp, Homo sapiens
aaacaacttatcagtagtgacttacagtaagttctgtcaggccaagcagaaggcagccttgctggagctgctgcatgaactctacaatttcctggccatc

SEQ ID NO: 160105 - DNA, 97 bp, Homo sapiens
tttaattttagggtcctttatatagaagggagagtaggggtgtgtggaatgtaccatacatctcccaggcctatgtgatccggggtgataccctgcg

SEQ ID NO: 160106 - DNA, 74 bp, Homo sapiens
gtgcagatcgccgtggccaacgcgcaggagctgctgcagggggatatgagactttctactcggaatatcctgag

SEQ ID NO: 160107 - DNA, 75 bp, Homo sapiens
ggcgtccgtcctgcgcatcgcacgctgtgcttcgccgtgagccgctcgctgctgctgacgtgcctggtgccggcc

SEQ ID NO: 160108 - DNA, 107 bp, Homo sapiens
gatagactgggggctgcggcctagaggtccgggcttggagttcgcctcagacgcggtggagccgccggagtctgagaagcaacgggacaccctgcggcgccatgtgc

SEQ ID NO: 160109 - DNA, 75 bp, Homo sapiens
caaaaactaacagggatcttgaaattaaagatcaggttatgaagacagtatggagtttccagaccatagtagaca

SEQ ID NO: 160110 - DNA, 74 bp, Homo sapiens
gatcatgtctgcgagccaggattcccgactccgccgtggtcatggaggagggaagtccgggcgaggttcctgtg

SEQ ID NO: 160111 - DNA, 82 bp, Homo sapiens
ggctggaacttgccctgtctcctcgcagatgagaggcaggagaggcaggtccgagaccgcggggtgacccggtccaaggcgg

SEQ ID NO: 160112 - DNA, 113 bp, Homo sapiens
ctcgcccccacctgtggactctgaccgcaaacaaggagagcctactgagcagcctgagtgggatccgaaggtccattccatcttcccggcccgcggccccagagctgggggca

SEQ ID NO: 160113 - DNA, 134 bp, Homo sapiens
ggaaacaaatcaactaaaaacaaaattgccagaaaatctttcctctaaagtcaaactgggcaccagtgtcttgtcacctggactccacataggactaattattatactggcaataatgatctataaaaagtcag

SEQ ID NO: 160114 - DNA, 74 bp, Homo sapiens
cctgggcctcgccgagcccgacatgctgagaatgttctgctgcagatggggctgcacgtgctggcggtgaacgg

SEQ ID NO: 160115 - DNA, 100 bp, Homo sapiens
ccatgttttcagccagctgcacgatgaagacttcctcactagtctggtggccatcagcaagcccaggtctatgatggactagaggcttttaccagatttc

SEQ ID NO: 160116 - DNA, 90 bp, Homo sapiens
gggggacacatcatgcctcccacacaatcgcagtttggagagatgggaggcaagtttatgaaaagccagaatctcagtacaagtgaaggt

SEQ ID NO: 160117 - DNA, 80 bp, Homo sapiens
tttgacctttttgaagcctttgcaaaagaaatgagtggcttatactctcctgtcagtgaggatagcacagtgcctcaatt

SEQ ID NO: 160118 - DNA, 106 bp, Homo sapiens
ccaggactgcgcccccgggagcgggcgcccagagttaaaggcattaggatttcctgaaggacttgtgatacaagcgtattttgcttgtgagaagaatgagaatttg

SEQ ID NO: 160119 - DNA, 100 bp, Homo sapiens
cgccaaccgcaaccattgacgccatgtcgggttattcgagtgaccgagaccgcggccgggaccgagggtatgtgaggagcagcgctgtgaggaggaagtc

SEQ ID NO: 160120 - DNA, 100 bp, Homo sapiens
gactggcctggcgtgcactccgcacctcggggacattattgcgcgtggaacggctgcttttggaagatggtggagccagggcaagatttactgcttgctg

SEQ ID NO: 160121 - DNA, 90 bp, Homo sapiens
cgttgccatgtcaggtccaaaaacagagacttttccctcccagtccctaagtttaaggccatcgaggagggcacgctggaggagatcgaa

SEQ ID NO: 160122 - DNA, 73 bp, Homo sapiens
aagtaaatgctgtcttttcccaaaagacaggctcttcacctgaagattgactttgaagatgtgattgcagaac

SEQ ID NO: 160123 - DNA, 98 bp, Homo sapiens
tgcagcccgcgcacagctgctcccttcgccttcgccctttccacctcgcggcagttcggcttctgggaacttggcagacgcagcttagagagactcac

SEQ ID NO: 160124 - DNA, 100 bp, Homo sapiens
cacaacctctacggcctgaccgaagccatcgcctcccacaggtgaggtcccagcttgaagagaaagaaaacaagaagttccctgtgtttaaggccgtgtc

SEQ ID NO: 160125 - DNA, 82 bp, Homo sapiens
ggttccgcggcccaggggcgccgggtttggtggcacagcgagccccctttctctagcgggctctggaggccacgggcatgat

SEQ ID NO: 160126 - DNA, 95 bp, Homo sapiens
ctggagatgaaatgctgtcccaaccttactgggaaccttcagaagtttagtctttttggagacataagtgttctacaacagcaaggaagtttgtc

SEQ ID NO: 160127 - DNA, 98 bp, Homo sapiens
cgggtcacagtctccctgaaggagctgcagaggttttttgcatgtctgacacccatgactccacctggaccttatggctccacccagaagcaattcag

SEQ ID NO: 160128 - DNA, 97 bp, Homo sapiens
gagaggcaccgggatcgtgaccgagaccgtgaccgagagcgtgaccgagagcgcgaatatcgtcatcgttagaagaatggatcttctaaccaaagac

SEQ ID NO: 160129 - DNA, 100 bp, Homo sapiens
gaaccttacttggagaatctcttaagttaaaggaaaatttctaccttgaaccgtatctgaaagaggttattcgggaaagaaaagaaagagaagaatgggc

SEQ ID NO: 160130 - DNA, 100 bp, Homo sapiens
cccctcctcccctggctggagtgccctgcctggagggagccctcctggctgggggcaaggttggggaccagattctagaagtgaatgggcggagctttct

SEQ ID NO: 160131 - DNA, 75 bp, Homo sapiens
gactacttcatcgtggtaggctatgaccacgagaagccaggagcccagcagccggggccgccctattacaccgac

SEQ ID NO: 160132 - DNA, 83 bp, Homo sapiens
tcctttagaaaactgatcttaatacaggcgaggattaaatccaccacacagggtgaaatctatctccatgacaacattcacac

SEQ ID NO: 160133 - DNA, 74 bp, Homo sapiens
gggagcgcctcgtcgacatgagtgatgtggaggaaaacaacttcgagggcagaatccttccgctgaggaattga

SEQ ID NO: 160134 - DNA, 99 bp, Homo sapiens
tgaaaagacatctaatttcattgctcggcaggtgcaaatatatacagagcttcataatcagcccaagaccacatagagcaaacatgaatgatatttccc

SEQ ID NO: 160135 - DNA, 88 bp, Homo sapiens
gggaagtactggctgtcccagtgcttcgatgccaaagagtatgggagttgttctttatgtccttgtctgtggagctctgccctttgat

SEQ ID NO: 160136 - DNA, 100 bp, Homo sapiens
aatcattgcagcattacttagagctcggaagggagtttgggctttgcaaaactgagaacaaagccaagtcgggcaaacagaattcaaagaagctgtactg

SEQ ID NO: 160137 - DNA, 75 bp, Homo sapiens
ggtccagcggtcacctacccccagcaccacctccagcccctgcgcctcgtggaagagaaagccaatacccacctc

SEQ ID NO: 160138 - DNA, 96 bp, Homo sapiens
aatgatcccaagtggcccagcatgtggtatatgtcctggtacctgggctagcttggttcctttccaagtgtcaaataggacacccatcttaccggc

SEQ ID NO: 160139 - DNA, 87 bp, Homo sapiens
aaggagctcatgcagtggtacaaggaccagaagaaactgcaccggaaatgtgcctaccagatgctgtgggccctgagggaaaggatc

SEQ ID NO: 160140 - DNA, 100 bp, Homo sapiens
aagggaccttgttatagaagccttaaaggaaggggaacagtttgtgaagaaaatcggtggtatttttgccttcaaggtgaaagatggccctgggggtaaa

SEQ ID NO: 160141 - DNA, 102 bp, Homo sapiens
cagattcgcagtggtcgcttcttctccttgtgtgaagcctcagtttaggtcatctggtggttcagaacactcaacagagggctctgtatccttgggggatgg

SEQ ID NO: 160142 - DNA, 100 bp, Homo sapiens
gccatgccgtccaagggcccgctgcagtctgtgcaggtcttcggacgcaagaagccagctgaagatgagtggggtaaaaccccagacgccatgaaagctg

SEQ ID NO: 160143 - DNA, 90 bp, Homo sapiens
ctccagcctgctgcgcaggataaaaggcaaactcttcacctgccgcctgtcttggttagatggctctggattaggattctcactggaata

SEQ ID NO: 160144 - DNA, 90 bp, Homo sapiens
atttctgtcaaggctgtctgtgactacaggcagatcgagcaccgacgagagtgctggggaataaaaaggggatcttcactcggcagagac

SEQ ID NO: 160145 - DNA, 82 bp, Homo sapiens
ggaaccctggtcaccgtctcctcaggaggatacgaagcgttttcggcttcctgcccggagctgtgcagcaaacagtcgaccc

SEQ ID NO: 160146 - DNA, 98 bp, Homo sapiens
agacccctctgctgcaccacttcatgctctggccaggctgccgcacctctacaggaactttgccgcggagcagtatgccagtgtgttcgccatctccc

SEQ ID NO: 160147 - DNA, 90 bp, Homo sapiens
tgaagcaatgcttgaggctccttacaagaagagcaacttttagtgaatttgcagccaagcatgctaaagattcaagattcaaagcaattg

SEQ ID NO: 160148 - DNA, 74 bp, Homo sapiens
ggcgacctccggcggcgggaggcccggcctgggcaggtgccgacgccaccgccgagcccatgatcctggaacag

SEQ ID NO: 160149 - DNA, 144 bp, Homo sapiens
gagccaccacccagagaagccaaagaaagagctggatatctttggattgaaccctgctgatgaaagcacacggagtggcctcatcctgcatgactcgcctgtcccggtctcgtacagcctctctgaccagtgcagcatccgttg

SEQ ID NO: 160150 - DNA, 96 bp, Homo sapiens
tggagcccgacgcagagcagcgccctggccgggccaagcaggtcccgcagcccccggaagccaatagactccctcagggactctcggtccctcagc

SEQ ID NO: 160151 - DNA, 98 bp, Homo sapiens
ggctgctgcagcccgggcggctgccgagaaggagggaggggaaacacaaagccggctacgcgctgcgagatgatcacagtcgtgttaaactgcaaaat

SEQ ID NO: 160152 - DNA, 82 bp, Homo sapiens
agcctcgctggaggcagtttctgcacaggaagtcctggagaacctgaaggaccgctggtaccaggcggacagcccccctgca

SEQ ID NO: 160153 - DNA, 82 bp, Homo sapiens
ctaggagcgctctgtggtgcctggggctgaacgcggctttctggtaatactgcattgcatgattgtgcagaatctggaagtt

SEQ ID NO: 160154 - DNA, 82 bp, Homo sapiens
tggactcttttcttgacttagctaccagttacagaatgtctgaaggggacagtgtgggagaatccgtccatgggaaaccttc

SEQ ID NO: 160155 - DNA, 100 bp, Homo sapiens
gtaacaacagcgaggaagaagaggacgacgacgacgaggaagaggaggtttctgagagatggacagagacgtatgtgcgttggtctcctaagggcaccta

SEQ ID NO: 160156 - DNA, 90 bp, Homo sapiens
caggacatcttcatttacagagcaacttgatgaaggtacacccaatagagaggtcattatccagctcaggaaaacctgatgttccttgtt

SEQ ID NO: 160157 - DNA, 90 bp, Homo sapiens
tcggagaccccgcgccgacggctgctcaaacatcagggagctgctgatggcgcacgacttcaccaagtttcactcgctgaagccgaagct

SEQ ID NO: 160158 - DNA, 100 bp, Homo sapiens
ctcggtgccatttgctcctgcacatgctttggaggccagcggcgtgtgaaggcaaagaagaatgctgctccattcagaagtgaagtctgctttgggaaag

SEQ ID NO: 160159 - DNA, 100 bp, Homo sapiens
ttcttcctccagttaggagccttgatgccggaggggacagtgggcggctacttccctgagaatgtcaaggccatgaccagcctgcggtggctgaagctga

SEQ ID NO: 160160 - DNA, 98 bp, Homo sapiens
atgaggtggatctgacagatgccagcgtagctgaatccagtaccaaaaacgtcaacaacagttttacgtgactcgatggaaacagaagaaaagacaag

SEQ ID NO: 160161 - DNA, 100 bp, Homo sapiens
cgggaccgccaggccaccaccggccgcctcagccatggacgcgtccctggagaagattgctcatttagaaagtggatgtgtgggataacatgtccaatgt

SEQ ID NO: 160162 - DNA, 100 bp, Homo sapiens
agaaggatgctcagaacctgatcgggatcagcattggaggaggggcccagtactgtccctgcctctatatcgtccaggaagatgacatttggaagagtca

SEQ ID NO: 160163 - DNA, 90 bp, Homo sapiens
acagagacgcaagagaaaaatccactgccttccaaagaaaccgcggcgagtcctttgcacatgttggcaacacacgcatccgcatcggcc

SEQ ID NO: 160164 - DNA, 90 bp, Homo sapiens
ccccatacggaagggtctgcatcacaagaacctccaggtctcctgcctcaatgctgagcagaaccagcacctccgggcctccctcagccg

SEQ ID NO: 160165 - DNA, 96 bp, Homo sapiens
taccaagaagaatttttatccagttaatgaaaagctggtgctcaagaccgaatcggctgggcttttggcctaggattagaaaggctagccatgatc

SEQ ID NO: 160166 - DNA, 82 bp, Homo sapiens
cgacaagccgctggcagccgcggatctcaccgccgctcagggagagaacattgaaagtattctctaagctatttgaagagag

SEQ ID NO: 160167 - DNA, 83 bp, Homo sapiens
cgaccacaacatccagtaccagttccgcacagagacaaatggaggacaggcgtccgagctgggccacagcctgaacgagaacg

SEQ ID NO: 160168 - DNA, 100 bp, Homo sapiens
aatagaaagaatggagaattattgattgaccgtctttattctgtgggctctgattctccaatgggaataccaagggatatgcaagtttcctcatgggaat

SEQ ID NO: 160169 - DNA, 98 bp, Homo sapiens
cacaactctgcaaataaatgtgcatccggtggacaaccagcaagccatggtgcgcagggagtctgtggtcaatctggagaacttcaggaagcagtatg

SEQ ID NO: 160170 - DNA, 100 bp, Homo sapiens
gagagatgcttaaaaatcaccagttactttaatgaattggccgcgtaatccaggttgctgctgggagcagcaacctcaagagagtgaccttggagctggg

SEQ ID NO: 160171 - DNA, 83 bp, Homo sapiens
gtacaaggagtatatcatgaaaattctacttcaaagccttcacttaacttaagggaccttggattatctgaactaaaaattgg

SEQ ID NO: 160172 - DNA, 75 bp, Homo sapiens
gccgaactcgccatctggctcatcaacttcaacaacatccagaattacacccccaaggtgggcgagtatgccaca

SEQ ID NO: 160173 - DNA, 90 bp, Homo sapiens
aagaagcaaacctgtttctcctcatttgggaaccaaatggcgagacaccatcatctttatacagagttgcagcagtacttctacaattta

SEQ ID NO: 160174 - DNA, 97 bp, Homo sapiens
tctggacatccaggaagaggagccgagcatctgggccgagaccattccgtatggagagccgggatggcgtcctaaagggctgttagttgcccatctt

SEQ ID NO: 160175 - DNA, 83 bp, Homo sapiens
ctacttcgtgctgtgcgggatcgacgcggacagcgggctggagcctgacgagctggcggatgaagcccggggcaagaactgtg

SEQ ID NO: 160176 - DNA, 75 bp, Homo sapiens
gcatgcgctatacctaccagcaaaggcaggaccgcagggacaaccagggtgatatggctctgagagattcctctg

SEQ ID NO: 160177 - DNA, 98 bp, Homo sapiens
tggacaagttcggcttccacacggtgacgtgctgcggcttcatcccgcaggttatcaatactctggctgaccatcatcatcgtgggactgactttggt

SEQ ID NO: 160178 - DNA, 90 bp, Homo sapiens
taaagctacagcaaagcagtcatggttatagctgtagtgaaaaattatccaaagctcagttgacaactattcaggattatgaaactgctc

SEQ ID NO: 160179 - DNA, 75 bp, Homo sapiens
atggaactggccgggctgagctgtgctacagccatcgccaaggatatgggccctcacattttccaaacctgtcca

SEQ ID NO: 160180 - DNA, 87 bp, Homo sapiens
aaacctaaccaatgactgtggaataatatggaagaagatggaaaaaacttgtttaatggtctgcagcccaggacgctgattccagca

SEQ ID NO: 160181 - DNA, 100 bp, Homo sapiens
accaaatccaagatggcggccagcaggaggctgatgaaggctatgactttgcagccgtcctggagtggttcgcggagcgtgtggaccgcatcatcctgct

SEQ ID NO: 160182 - DNA, 124 bp, Homo sapiens
tcaatatctgtcttcggtggactccttcggcagtccacccaccgccgccgcctcccagaaaccaaggtgtatgttggtaacctgggaactggcgctggcaaaggagagttagaaagggctttca

SEQ ID NO: 160183 - DNA, 102 bp, Homo sapiens
acaagaacttgagcaaatggaaatagaactcaaaaggctgcaacaagaggagtctactcttcatcttgtgttgagacttcgtggtggtgctaagaaaaggaa

SEQ ID NO: 160184 - DNA, 101 bp, Homo sapiens
tagctaaagaactccctcaagtttcatttgtgaagcatttaaatcaaacggtattgagatggattgggttatgaaacataatggtccaaatgacgctagtg

SEQ ID NO: 160185 - DNA, 100 bp, Homo sapiens
gcactcgctggccgactgcgccgagctgcacgtcctcgaacgcgaggccaacagccccgcggcacccgacctgacagcgttcagcgacccgcgccagttc

SEQ ID NO: 160186 - DNA, 75 bp, Homo sapiens
agaacatgcatatttgggtccaactgtgaagccagatgataaggtgaggacaccagtgatgaattctgaagcaaa

SEQ ID NO: 160187 - DNA, 82 bp, Homo sapiens
atctctgcagttacaggaacatcgtctgcttcatgcttccatgaggcaggctgaacctgcagatatgcgcccagagatatgg

SEQ ID NO: 160188 - DNA, 74 bp, Homo sapiens
gcattctcttcccagtgcctatcggacagtgcggcggtcgagattgtcactgctgttccaagggcacacgcaga

SEQ ID NO: 160189 - DNA, 50 bp, Homo sapiens
aagagcttccagcagtcccatgtgcacggaaaagatcttggtctggcatt

SEQ ID NO: 160190 - DNA, 82 bp, Homo sapiens
ggcagcctgagtcccagtgatgcaaagatgcaatctacacaatcccagtaaaaaacattcttgctgtggaaaaactggaaga

SEQ ID NO: 160191 - DNA, 73 bp, Homo sapiens
gcccacacgactagaaggacgactgcctggcgcgatacaaaaatatcccagctctcctgttggcttcgtgctt

SEQ ID NO: 160192 - DNA, 100 bp, Homo sapiens
caatgttcttccactggcgacgtgcagcggaggagggcaaggactacccctttgccaggttcaataaggacccagatgatgtggtaccagttggccaaag

SEQ ID NO: 160193 - DNA, 100 bp, Homo sapiens
attagaaacaattcatttggaaaatgaaggcctgaaaaagaaacaagtaaaactggatgagcagctcatggaggatattattgctggattcctatatacc

SEQ ID NO: 160194 - DNA, 116 bp, Homo sapiens
tgcggagaggtcagtaactaaattggagaaaagcattgatgacttagaaggtgctggagaatctggtaaaagcaccattgtgaagcagatgaggatcctgcatgttaatgggttta

SEQ ID NO: 160195 - DNA, 100 bp, Homo sapiens
tctgccgcccgattcgccaccatccagatttcgagattgtccgtgtggagcccttggtgaccatgggccaggtgactgccctgctgacctccattggctg

SEQ ID NO: 160196 - DNA, 96 bp, Homo sapiens
agaagtgcattgttttggtgactgaacttatgacgtctggaacacttaaaaccaaagaagtttgtcatcctgatattggtggcaagatcataatgt

SEQ ID NO: 160197 - DNA, 75 bp, Homo sapiens
ccagaccctgctgctgtcttcaaagaagaaggtagaagatagcaccatgccgattcgtcgaactgtgaattctac

SEQ ID NO: 160198 - DNA, 100 bp, Homo sapiens
caaaccctctctctaccacgagcagcgccctgggagccctcacgagtcccgttgcaggaccagctctgccccctaattataaaagcagtagttcagattc

SEQ ID NO: 160199 - DNA, 100 bp, Homo sapiens
gccgagtgtctacaggtgacacatccccctgtgggactgaagaggactccagcccagcttcgcccatgcacgagcggagtgctgatgctgtaaaaaaggc

SEQ ID NO: 160200 - DNA, 76 bp, Homo sapiens
gcaaagactccagtaacactcaagcaaagaagagttgagcacaatcagaaacttgaagggtcaaagtgcaaagggc

SEQ ID NO: 160201 - DNA, 98 bp, Homo sapiens
attacagggctcgtccaactggtccctcagtcacacatgccagagattgctcaggaagcaatggaggatgaatttacaggaattgaacccttgagcga

SEQ ID NO: 160202 - DNA, 74 bp, Homo sapiens
gatggaaacaccatggctgcggcggcccagctctctctgacacagtctgcagcggctctttgtgttggagttgg

SEQ ID NO: 160203 - DNA, 95 bp, Homo sapiens
acctcactattgatggtgtagcgctttaggggaaggctcgggttatgtatgattttgctgctgaacctggaaataatgaactgacggttaatgaa

SEQ ID NO: 160204 - DNA, 95 bp, Homo sapiens
gagtctgtgccgacaagatggcggacggggagctgaacgtggacagcctcatcacccggctgctggagggaatgaattcagggcatggacggaca

SEQ ID NO: 160205 - DNA, 100 bp, Homo sapiens
cccagttacccccagactggaagatctaccggaggtgctggctggtgttccggaaatcctccagcaaggggccccagcggctggagaagtatccagatga

SEQ ID NO: 160206 - DNA, 112 bp, Homo sapiens
gcggagtcgagacctacccgaacgacgcgggcgagcggggctttggacgccggtggagacgcaggcgagtaacagatcaactcctagcaatcatgatcggatacagcgtctg

SEQ ID NO: 160207 - DNA, 90 bp, Homo sapiens
ctctgccacaaaaaaatataataaggctgagtgcggagccaagacagtatgctggctatgactattcgcagcaaggcagatttgtccctc

SEQ ID NO: 160208 - DNA, 76 bp, Homo sapiens
acctgatggcctatcctgatttaaacgagatttacagaagcttccagaatgaggttgcagaacttgaagctaattt

SEQ ID NO: 160209 - DNA, 100 bp, Homo sapiens
cccggtagttgctccaaaacctaagtacaacccatacaaacaacctggaggtgaggtactatactggcaattgctggagaagattttgcaattgttgctt

SEQ ID NO: 160210 - DNA, 100 bp, Homo sapiens
atcttcttgatgacaggaagctggaactcctagtacaggttgacagtgctgtgggaacactccctgcaacaagtccccagagcacctccgtccaggccaa

SEQ ID NO: 160211 - DNA, 73 bp, Homo sapiens
gggcgcagccctttgcgcagccgccgggaccctggcccctgtcgagggggtccactggacggggcctgagcta

SEQ ID NO: 160212 - DNA, 90 bp, Homo sapiens
gtgaactgttcaagggcaagaaggcttcatatccccagagcctcgatgacttacgagccctcaaggggaagcattttctcctggacccct

SEQ ID NO: 160213 - DNA, 100 bp, Homo sapiens
gtggtagcagtagtattggcattcccattgctgtgcctacaccttcgccacccactattggaccaggcatgttactaccagattcagcgtgagaagctta

SEQ ID NO: 160214 - DNA, 75 bp, Homo sapiens
cacgtgcggtgctcgtcgggagtgatcacctaccctacagatgtctttggtggacttgggaaagaggttgctaga

SEQ ID NO: 160215 - DNA, 100 bp, Homo sapiens
cctccctcttggggtcgtcgccctcgagatgattatcgtaggaggagtcctccacctcgtcgcagagaacctgcagttttggaggatttgacttgacgaa

SEQ ID NO: 160216 - DNA, 82 bp, Homo sapiens
agatcgcaccgcggacgcccgctgagcttggcgcacgggccgaccaggtgtcccgacccaggctaagcttgagcatggctga

SEQ ID NO: 160217 - DNA, 93 bp, Homo sapiens
gtaccccaggatgctgccaccatccccagctcagccatgcaggccccaacaggcctccctccaacacagttctccaagctctagaaatctctg

SEQ ID NO: 160218 - DNA, 108 bp, Homo sapiens
ccttgagctccaggagttcgtctcttacgtctgcggaagtgcagctgcctcagttcttagcgcagggtaccgtgagggttttctctggaagcgtggccgggacaacgg

SEQ ID NO: 160219 - DNA, 100 bp, Homo sapiens
ggccttgcagctggcccactgctggctgcagcggcaggaccgccatggtgctgggtaggccaggtttcagcatcgcagacaagaagcgcaggacaggctg

SEQ ID NO: 160220 - DNA, 90 bp, Homo sapiens
ttcttgtacaaagtggaatttcctactgtatcatgatcatcataggagtggagaacatgcacaagtcaaaatgcagatcttcgtgaaaac

SEQ ID NO: 160221 - DNA, 83 bp, Homo sapiens
aagctgtagataaaaacattttcagagactgtaacaagatcgcattttacagcaaagtggaagatgctttctacaaaggtgaa

SEQ ID NO: 160222 - DNA, 98 bp, Homo sapiens
ttctcgcggcgctcgagggaccatggccgatcctcgcgtgagacagatcaagatcaagaccggcgtggtgaagcggggaacgcccttttgcttgtgac

SEQ ID NO: 160223 - DNA, 80 bp, Homo sapiens
ttgtttctccaaggtttgaaaagcagctggcctgcaagggcttccgagtggacctgccaatcaagtcggcccgctaccgt

SEQ ID NO: 160224 - DNA, 75 bp, Homo sapiens
gcgggtgcgtctgccgcagagtcggcacctgaaggacatggaggtcacgagaagagaatgccttctagatgcaaa

SEQ ID NO: 160225 - DNA, 76 bp, Homo sapiens
cctttaccactgaagattatgacatgtttgaagtgtgttttgagagcaaggctttggacatcagacagtgcaggag

SEQ ID NO: 160226 - DNA, 98 bp, Homo sapiens
tcaattctaaaggaccctgtgtgtctgaaaattcccatgaagctgaggtcttgaagcagctggctgagaaacgagagcacgagaaagaagtgcttcag

SEQ ID NO: 160227 - DNA, 100 bp, Homo sapiens
gtgcatgagcccgaggaggcagggtctgatgggggcggcgactggcggcgcgatggacctgaccgggctcctgctggacgaagaaggcaccttctccctc

SEQ ID NO: 160228 - DNA, 51 bp, Homo sapiens
cgggttgcgtggatctccagtggaaagagacgaggtcttgctacattgtcc

SEQ ID NO: 160229 - DNA, 97 bp, Homo sapiens
aacatggcagccttttccttagaacaccaaagattgtctctggcaaagtttttaacgatggcagttccagggaactaatgaacctcactggaacaat

SEQ ID NO: 160230 - DNA, 74 bp, Homo sapiens
agcaggttgaggtgctccagaagaagtttgatgacttccagaaggtgtcttgtctgtataccctgggctacccg

SEQ ID NO: 160231 - DNA, 88 bp, Homo sapiens
gatggagacaccctctgggggtcctctctgagtcaaatccagtggattttatgcgacaagcaggtgaagtaacctatgcggatgccca

SEQ ID NO: 160232 - DNA, 75 bp, Homo sapiens
agaagaccacacactgggaaacatcattaaatccctcctgctcttcatggatgaagcagacgccttccttcggaa

SEQ ID NO: 160233 - DNA, 90 bp, Homo sapiens
gctgcctgccagaatggaagcatacagatctgggaccgaaatttgactcatgcaatgatgctacctgttctgacccatcatatccgctac

SEQ ID NO: 160234 - DNA, 99 bp, Homo sapiens
tactatcagaagaaggacatcaccaaggaggagtacaaggacatcctgaggaaggccgtccacaaggagttgtaagacgttcatcgccgtgttatcctt

SEQ ID NO: 160235 - DNA, 75 bp, Homo sapiens
caaggagcacagaagtgggttcgaaacatcagctacttcctgctactatatcggggccacagatgatgcagccac

SEQ ID NO: 160236 - DNA, 82 bp, Homo sapiens
cgatccacaatctgttagaaagaatatcctccgaatcctaaatctagagctccaaggatgctggtcattaagaaaggtaata

SEQ ID NO: 160237 - DNA, 89 bp, Homo sapiens
gcgatggctgggcccgcgtggatctctaaggtgtgatgaatgcagactctgctaccattttggctgtttggatcctcctttgaaaaagt

SEQ ID NO: 160238 - DNA, 83 bp, Homo sapiens
cagaagcccattatggctgtaactggagatgacacagccccttcatgaataagttttttccagccagctttccaaatcgacag

SEQ ID NO: 160239 - DNA, 75 bp, Homo sapiens
gagccacactttcaagtaaaccagctgtgttggggtggaagaggaggaggcgcccgacatcgacatataccactg

SEQ ID NO: 160240 - DNA, 75 bp, Homo sapiens
ccatctcacaactgctcgcgtgacgaccgcattcgtggcaggtgtgtggaggtcattgcaaaggaaggacaaaac

SEQ ID NO: 160241 - DNA, 100 bp, Homo sapiens
ggaaaacctggccctcttcaatttctgacaaaagctcaccttgcagagcgccaagtcccgagtggccttctttgaagagctctagcaggtgacccagcca

SEQ ID NO: 160242 - DNA, 74 bp, Homo sapiens
agttaaagttggatgtgctggaacagtgggaaagaagcctaaggaataaagtcatctctctagaccataaaaat

SEQ ID NO: 160243 - DNA, 75 bp, Homo sapiens
gaagaagcagaggaagaacaagaagagaaccttgaagcaagtgcattgatatgaaccatggacaagtatattctg

SEQ ID NO: 160244 - DNA, 50 bp, Homo sapiens
gtcttcctgtatgacacagacaggggttatttcacagttgaggattttgg

SEQ ID NO: 160245 - DNA, 100 bp, Homo sapiens
ggcagcctgcagctaggactttaataatggcctgtgggtgtccaagaattttgggggaaaatgggaagaaatccacaaagcagtatgtttggccaaatgg

SEQ ID NO: 160246 - DNA, 100 bp, Homo sapiens
ttcctcatcggcatcatcgtggccaatgtcccagagggtctgctggccactgtcactgattctcaaagttggattggtggaaacaatgaaccattgacag

SEQ ID NO: 160247 - DNA, 90 bp, Homo sapiens
gaactacaagaatttggccacagtagcatttgatactggagaaagtttcagaagatgaagaacttcggaagagaattgctcattctgcag

SEQ ID NO: 160248 - DNA, 117 bp, Homo sapiens
ttgttccgtgctcccacgtgcttccccttctccactggctgggatcccccgggctcggggcgcaggaaatctgaaatagagtactatgctatgttggctaaaactggtgtccatcac

SEQ ID NO: 160249 - DNA, 75 bp, Homo sapiens
gcagagtgctgatgtgaaaaataccacgacaaaaccaccctactgtccagaccaaaacgaagaagacgttagcca

SEQ ID NO: 160250 - DNA, 75 bp, Homo sapiens
ctcagctgggattcccgcgcccctcggacggccacgagactcgggcccgataaaagtgaaggatgtaatagatcg

SEQ ID NO: 160251 - DNA, 100 bp, Homo sapiens
ggacgaggagctggactaccggaaacaggccttggaccaggccaacaagaataccctctaccatctgctttggtcagggtgccgctcgaggatttaaaag

SEQ ID NO: 160252 - DNA, 98 bp, Homo sapiens
ctggacacagcaatatctctgggctttcacagattgtctacaaagcctggctctgttcccagtattttgaagtcacacagtttaactgcagaaagaca

SEQ ID NO: 160253 - DNA, 51 bp, Homo sapiens
aagggaagtgtcttcacaaagatgaggcaccttctaaaaatgaacaagagc

SEQ ID NO: 160254 - DNA, 100 bp, Homo sapiens
gaggagaatctgaaaaaaagagaaacctgggtgaactttcacggacaacctcagaggacaacgaagtgttcgttacctggctacagaaagaagatgccag

SEQ ID NO: 160255 - DNA, 138 bp, Homo sapiens
cttccatgagccggaggccattgagctgtgcacgaccacaccgctgatgaagacaaggactcacagtggctgcaaggtttggaaagaaatcccggcctgcaatgtatgatgtgagccccatcgcctatgaagattaca

SEQ ID NO: 160256 - DNA, 100 bp, Homo sapiens
cagcatgcctcaccaagtcacatgacaagcatggccataaaatgcagtaaaaacaaatccagttcccaagaagctgtacaaatgctttcttctgttcgac

SEQ ID NO: 160257 - DNA, 100 bp, Homo sapiens
acggacactgaaagcagagaccatggagcttcttgatatgaagagaaggctactaaagacttggaacgatacaatagtcaaatgaagagagccattgaac

SEQ ID NO: 160258 - DNA, 100 bp, Homo sapiens
ccggccccaggtcaccgccagcacgcgcctgcttcccgtctgcgcgagtccacgcagctccccagcaaaattcctgcctttctaaatgtggtggatattg

SEQ ID NO: 160259 - DNA, 100 bp, Homo sapiens
catgcctggaacagggatcgtactcctgaaacagaaccgcatgagggaaagaggaaagtggaatctctgtggcccatcttcaggatccaccaccagaaaa

SEQ ID NO: 160260 - DNA, 100 bp, Homo sapiens
ggcgtctctctcggcagtcaccggagtgcccgagggggaagcacgatttacggaagacaatgcagatcttcgtgaagactctgactggtaagaccatcac

SEQ ID NO: 160261 - DNA, 90 bp, Homo sapiens
gaagaagcagttctacaaggcgagccagtggctcacaggcccggggcattcaaagctgagctgtccaagctggtgattgtggccaaggca

SEQ ID NO: 160262 - DNA, 100 bp, Homo sapiens
ctcacctcaagcacacccaatggacagcatgcctcaccaagtcacatgacaagcagcaagaaaattggatgtatattttgaatatgaagaaaaaataatg

SEQ ID NO: 160263 - DNA, 76 bp, Homo sapiens
cagcctcctgaggagctgggattacagagtgatttcttctgacttgagcctgcagtgtgctgtgagagatctacca

SEQ ID NO: 160264 - DNA, 75 bp, Homo sapiens
ggtcttgctcggccgatgaagtgcagaggtttttttctgggcatccgtttccgaggctttagtatccctgaatgc

SEQ ID NO: 160265 - DNA, 100 bp, Homo sapiens
tactgaaaaggaggtagaaatactcttcattcaagtcaatcagtttgcattggtgtacctacttgtaaaaaactgttgggaggaagatccagaaaagaga

SEQ ID NO: 160266 - DNA, 100 bp, Homo sapiens
caagaacaagggccgcgatgtggaagacctcagcagccatgtcgaagccccatagtgaagccgggactgccttcattcagacccagcagctgcacgcagc

SEQ ID NO: 160267 - DNA, 100 bp, Homo sapiens
tggaagcaatgtttgaacaaactcgaagaacagctgtggaaagaagttgcaaaacactggaggcctctgtgtccaagaagaaacgcatgtgtgtgaagct

SEQ ID NO: 160268 - DNA, 50 bp, Homo sapiens
cttcacgcagtcaagaacgacttccagtgacaacactgcagctgaaggag

SEQ ID NO: 160269 - DNA, 75 bp, Homo sapiens
gggtccacgccgagggcaggacgaacttcaccagatttgaacatggaattcaatccttcagatcatcctcgggcc

SEQ ID NO: 160270 - DNA, 101 bp, Homo sapiens
gcttgtgtctcatatatgagggaaaatcaacaaacttttgagtctgtgctgggctctgtgaagaataagattgagaactttgcggcttcccaggaggactt

SEQ ID NO: 160271 - DNA, 83 bp, Homo sapiens
ggctttgcagcggggacttcggcggcggcgcctcaggcacctcggcccgggctccctggggaagggaatgcagggttgctggg

SEQ ID NO: 160272 - DNA, 75 bp, Homo sapiens
cgcgagtcggcgcgcgggacgaaggttattcagcttctcaaggctggaaaagcgaaggaagtttcctacaatgca

SEQ ID NO: 160273 - DNA, 100 bp, Homo sapiens
gcccgcggacctgcggcccgacgaggaagttttctactgtaaagtcaccaacgagatcttccgccactacgagtaattaataatgcttgtgctactcaag

SEQ ID NO: 160274 - DNA, 127 bp, Homo sapiens
gtcagcagaggggccactgctgggccctgaggctgcaccaagtggcgaaggagccggctccaaggagcgggacggtatgcgggccatcctggggtcctacgacagcgagctgaccccggccgagtac

SEQ ID NO: 160275 - DNA, 90 bp, Homo sapiens
cataggaggaaaattcatcatctggtcatacttacctggttgcttgcgcatctagtaatgttggatcatattctggatgttttgaatacc

SEQ ID NO: 160276 - DNA, 100 bp, Homo sapiens
agccactacgccgggcaggatgccacgcctacaacacagcagtcccctcaggatgagcaggaaaagctcttggatgaagccatacaggctgtgaaggtcc

SEQ ID NO: 160277 - DNA, 83 bp, Homo sapiens
actacatcattctgaacatgacagagaacatagactgtgtcacggagctgctggacgtctccatggagctgggctgtttcctg

SEQ ID NO: 160278 - DNA, 98 bp, Homo sapiens
cgcccggcggcggtttcggcgcgcggccgggctggcgatggaagatggaaggaaggagcgcagcggtcccctcttgctgttggctgcacatcaggaag

SEQ ID NO: 160279 - DNA, 90 bp, Homo sapiens
ccgattctcatctgcccataatcatggacacagccccaggatgtgcagggcagatataatgcacctgactgactctgtggtgcgtcgcca

SEQ ID NO: 160280 - DNA, 88 bp, Homo sapiens
aaaaatcccaaggtctgcaaaggccctcagcatcctcatgctccctcacaacatcccgtccagcctgagcctgctcaccagcatggtg

SEQ ID NO: 160281 - DNA, 82 bp, Homo sapiens
atcctgaaccgcgcggccgaaccctccggagggtgaggacaaaatcttcttaatcaacaagcttcactccatctacgagagg

SEQ ID NO: 160282 - DNA, 83 bp, Homo sapiens
aggacagtctccggaatattctttggagttgaattgctggatgtgggctctcttgatgagaagatgaagagcttggatgtgaa

SEQ ID NO: 160283 - DNA, 75 bp, Homo sapiens
attctcgctgtgacagagacaacaccgagtatgagaaataagatgctcccaagtcccttgcagctctcttcagaa

SEQ ID NO: 160284 - DNA, 98 bp, Homo sapiens
gtgccagcagattcagtgtcatgtgaggacgtgcttcctgcttcatagataagagccagccatacgtcgtgtgccggcagtgtcctgagtacagaagg

SEQ ID NO: 160285 - DNA, 110 bp, Homo sapiens
cggtagtaccgcccatgctgcagcgggaaagagaacagagagtcctggggacagagtacccaaaggcaagtggaacagctctaatggggttgaagaaaaggagacttggg

SEQ ID NO: 160286 - DNA, 100 bp, Homo sapiens
ccccaaggtgctccagtcctactattatgccgtgtccgacttctctgtgggcggcaggtcatttgaaccaattctccgcctccttccccagggaatctct

SEQ ID NO: 160287 - DNA, 100 bp, Homo sapiens
ccatcattcagaatatccggttttgcttgatgaccccaaccagcgtttttgagaagtttaattggttggggtcagataagaagaggagtgacaatcaagc

SEQ ID NO: 160288 - DNA, 50 bp, Homo sapiens
aaggaccagtacctgcccaggaaactggagctggggaccctgaaccagac

SEQ ID NO: 160289 - DNA, 100 bp, Homo sapiens
cgggcaaggaagtgctgctggaaggagtgattggggcagatgtgagagggcacggcctcatctgtgaggggcagccagtgacgtcacggctggctgtcat

SEQ ID NO: 160290 - DNA, 75 bp, Homo sapiens
gcgccgtcccgtccgacagccaggcccgggagaatgtttgaagatactgtggaggagcgtgtcatcaatgaagaa

SEQ ID NO: 160291 - DNA, 98 bp, Homo sapiens
accgctgtcccatctaaagaaacctgtcaggaatacgagcttctgggacacattcagctaacgtattttagcaggtggagtgaggttgaagattcctg

SEQ ID NO: 160292 - DNA, 82 bp, Homo sapiens
attgatttgctcttacgtatttgtgtgacttgactcttcaaacacaaaggttgctgaagcacatgtgcctaatttcattttt

SEQ ID NO: 160293 - DNA, 100 bp, Homo sapiens
atttaaaagcacagaaatggaagttcatgaagagagtcgacagtttacaaggaatgtatcctgtcaggtataatgtcagtgaatggcaagaaagttcttc

SEQ ID NO: 160294 - DNA, 74 bp, Homo sapiens
ggcagctgagacggccttggccggctgggagtcctccgtcagcatcagctccggctccggtgtcctccttctct

SEQ ID NO: 160295 - DNA, 98 bp, Homo sapiens
tcaggtccaggagatgaggcagaaacacgcacaggcggtggaggagctcacagagcagcttgagcagttcaagagggcttatcaggagggcagacttc

SEQ ID NO: 160296 - DNA, 100 bp, Homo sapiens
tccgccatgtcatccacttcgcccaacctccagaccaagatgaagagacgagctgtggggatctggcactgtggttcctgcatgaagacagtggctggcg

SEQ ID NO: 160297 - DNA, 74 bp, Homo sapiens
catgagccacccctacaccatgacaacgccttacccttcgctcccagcccaggagaccagtatgatgtctgtgc

SEQ ID NO: 160298 - DNA, 74 bp, Homo sapiens
atagaagctccgcggacgggaaggtaaactgagctcatccaccatacaccatgtgctttagagtgaaattctac

SEQ ID NO: 160299 - DNA, 75 bp, Homo sapiens
gctccgtgaaccttagggacaacaccgggacacccgcgaggccggaaaatggaggcatacacggaatacctgagg

SEQ ID NO: 160300 - DNA, 98 bp, Homo sapiens
ggggccggtgaagcagtgcttcgtggtgactgaaaaagaccctaaaaagtctgccagtcgccctgggagtcgggctgggagtcgagccgggagtcgag

SEQ ID NO: 160301 - DNA, 97 bp, Homo sapiens
atttaccagataatattaatgaaggacaagtacaagttagaactctttatctttctgtggatccttacatgaaactcccatcaagactgaagcagac

SEQ ID NO: 160302 - DNA, 82 bp, Homo sapiens
cggagagtacatccccaccgtatatggctcgtggacagcagaaaattcagtctcagcagaaaaatgccaaaaagcaagctgg

SEQ ID NO: 160303 - DNA, 100 bp, Homo sapiens
accctactgagccgtgagagccgcagtggatggctggaggtgcagggccaggaggaacatgagggcgtctctggccgagcctctttttgtggaaaacgac

SEQ ID NO: 160304 - DNA, 75 bp, Homo sapiens
tgtcattgagttggaccttagcccatctactggcattgtgttcctgagactggcccagacgctgcggcactatgg

SEQ ID NO: 160305 - DNA, 75 bp, Homo sapiens
caccgagtccgaggtctacgacgacggcaccaacaccttcttctgggtttccaggcctgaggtgcccgccctggc

SEQ ID NO: 160306 - DNA, 83 bp, Homo sapiens
ctccaatgggcctttccagcccgtggtccttctccatattcgagacaatgcagatcttcgtgaagactctgactggtaagacc

SEQ ID NO: 160307 - DNA, 100 bp, Homo sapiens
ccagcccctgccacttcaccctggtcaccggtctttgatttgcgtcagtgtcatcgacagatgcagcagcaggcggctactgcacaagctgcagcagctg

SEQ ID NO: 160308 - DNA, 90 bp, Homo sapiens
gcaggagccactgagatgaggaggcgtcgcgcgcgcctgtagctcgcgggcctcgcaggtcttgctcagtgtgcagaactctgctggcag

SEQ ID NO: 160309 - DNA, 100 bp, Homo sapiens
ctttcgcaacatcaagggagttttccggggccctctcagcaagaacgggaacaaaactctggacatggatttgattgacatactttggaggcaagatata

SEQ ID NO: 160310 - DNA, 100 bp, Homo sapiens
ttttatacgtttatatgctctgtctgcagttctggaccagaatacctcaaacgtctaccattacagtgattttgcagaatgagcaactagatgaaatatc

SEQ ID NO: 160311 - DNA, 90 bp, Homo sapiens
catttcattaccatccagaagtgtctcccactgaaggcatccgtggttgtttttaagataacaacgaacttgatgcaagtgataggtttg

SEQ ID NO: 160312 - DNA, 50 bp, Homo sapiens
cagttttgtgtccatgtgaacaactgtgttggtgaggatgcagagaaaag

SEQ ID NO: 160313 - DNA, 82 bp, Homo sapiens
tcagctcctcgacatttccacacccagacccaaagtttgcaacaatcagtcagatgcattcctggagcaagctgtgtcatat

SEQ ID NO: 160314 - DNA, 89 bp, Homo sapiens
cgcgccgggccccggacgccgcgcggaaaaggggatcccaacaagccctcaggattcagaagtgttaaagctcctgtcactaaagtggc

SEQ ID NO: 160315 - DNA, 75 bp, Homo sapiens
gcggggctggccgccatgcacaagctgcacttcctgcacagaattcagaaggagctggcggacatcactttagac

SEQ ID NO: 160316 - DNA, 100 bp, Homo sapiens
tcagctctgttctgtgggctgcactgagtttctcggtgtgagctggagatatgaggccccaggattcctggcgaggtcctcctccccttttccagcagca

SEQ ID NO: 160317 - DNA, 90 bp, Homo sapiens
gcatatgattggctctttagctgaaatacttctgaagagcaaaatatgctgtgaattccatcaagaagaaagtcaacgacaagaacccac

SEQ ID NO: 160318 - DNA, 75 bp, Homo sapiens
ctcagtctgcggccaagactccatcctgcaaggcctgatcacttgaacggacatatcaagcaggtgcacacttct

SEQ ID NO: 160319 - DNA, 102 bp, Homo sapiens
ggccctgagcgcactctggagggattctggcatcagggaggctttcagccggagaagcgagtttcagctgatctgaattctacaaacacattgtgctttctg

SEQ ID NO: 160320 - DNA, 101 bp, Homo sapiens
ggggaagacctgcgtcctttttcgtttttcggatgatgccttcaatactacctttatttccaccatagtgaatccctgttgttactatccatgccagcacc

SEQ ID NO: 160321 - DNA, 101 bp, Homo sapiens
gaaatttctgccatggttctcactaaaatgaaagaaaccgctgaggcttatttgggaaagaagttgcagactggtctagaaacaaatagacttatctttga

SEQ ID NO: 160322 - DNA, 75 bp, Homo sapiens
cttttccgttgccggtgccggcctagcgtcctggaattacttcaatcaaataggactgaggctttcagtgcatac

SEQ ID NO: 160323 - DNA, 78 bp, Homo sapiens
gaaccttcagacgaaagagattgtacagaaactacaaggccacacaggtccggcctctttggcctacccccgttggct

SEQ ID NO: 160324 - DNA, 76 bp, Homo sapiens
agttcgagcactaatatttaagaaagaagatgttaactttcaggtaccagtattttttgcaaattaaacaagacat

SEQ ID NO: 160325 - DNA, 50 bp, Homo sapiens
aggaggaggaatgtgaagtagaaagtcgttccccatcaggaagtcctcgc

SEQ ID NO: 160326 - DNA, 90 bp, Homo sapiens
gaaggacgtgctgacccgcctgaagcacctgcgggcgctgctggggcaccagaactagcacctctgaaaagtaaaatgatctatgcaagc

SEQ ID NO: 160327 - DNA, 90 bp, Homo sapiens
ggcaggcgcggagccgggccggcaggttcgagaacttgtcttggacaattgcaaatcaaatgatggaaaaattgagggcttaacagctga

SEQ ID NO: 160328 - DNA, 80 bp, Homo sapiens
tgtgccaccctgacatcgtccgatctgtcatcaatacctcaggggacattctggagaaggtcagcgtgcattgccctgtg

SEQ ID NO: 160329 - DNA, 74 bp, Homo sapiens
gagaaagacctgcgccgggccaagatgcaggccctgacttcctgtgagtgcaccatctgtcctgactgcttccg

SEQ ID NO: 160330 - DNA, 96 bp, Homo sapiens
cagtgccttcggccagagcggcaagttcaagatccacatcccagtaccagggccgcatcaacgagctgctgctgtcggtcatcacctgggtgggca

SEQ ID NO: 160331 - DNA, 90 bp, Homo sapiens
ctaatagcccttgaacagctatgcatgctgcttttgatgtctgacaacgtggatcgttgttttgaaacccaacaagtcccaaatttggaa

SEQ ID NO: 160332 - DNA, 100 bp, Homo sapiens
atagcaggcaactttgagctggcagaatacatcaagaaccacaaggaaacagacattgattctgaaagtcaagaagacatcatccggaatattgccaggc

SEQ ID NO: 160333 - DNA, 74 bp, Homo sapiens
gcctttctggacacagaagtatttgtgacagggatgccattgaaaagttatttcctgatgccattagactgaga

SEQ ID NO: 160334 - DNA, 51 bp, Homo sapiens
gccgcggaaacctggagtggaagggtgtcctgtcagaagaacagatccgcc

SEQ ID NO: 160335 - DNA, 50 bp, Homo sapiens
gcggcgccgccgggctgtggagtgatgaacggcagcagccactcaccaac

SEQ ID NO: 160336 - DNA, 75 bp, Homo sapiens
ccctctcaggacaacccagatgtgcaacaaagtgcgatgctctccacacaaggagatgcaagtcaggtgattggg

SEQ ID NO: 160337 - DNA, 101 bp, Homo sapiens
gccagaggggactctgagctccggaaaggagtacgagagggcctccaaagtggaccagtttgtgacgcgcttcctgctgcgggagacggtgagccagctgc

SEQ ID NO: 160338 - DNA, 75 bp, Homo sapiens
gtgagctgcggcaggacggctggaggtaagaatgattgatgttggctgatattggagtgctcattcacatgaagt

SEQ ID NO: 160339 - DNA, 75 bp, Homo sapiens
gcgaggggaacggaggccagagctgcggagtgggctatggtatgatggtggtgtccacctacatcggcatctact

SEQ ID NO: 160340 - DNA, 98 bp, Homo sapiens
cggcggccgcggtaatgctggtggtctgcatcaccaccggatcaacttcgacaaataacttaattcagtgcacaaatgagatgaatgtgaacatccca

SEQ ID NO: 160341 - DNA, 82 bp, Homo sapiens
ctcggcgtttgtagaagaggagcatctgctccagatcatggaagggaagtggttgctgtgtatgttactggtgcttggaact

SEQ ID NO: 160342 - DNA, 87 bp, Homo sapiens
agatatacaagaaggagatacattaaatgcaatagcccttcagtactgttgtacggtcatcatggtcacaggagaccatccaatcac

SEQ ID NO: 160343 - DNA, 109 bp, Homo sapiens
tgcctcatcccaggttgccttggaaaatgccaacgccgtgtctgaagagatggacagagacgtatgtgcgttggtctcctaagggcacctacctggctacctttcatca

SEQ ID NO: 160344 - DNA, 90 bp, Homo sapiens
gcatcagccctggcccagatcccacaaaagctataaagagaatgtcatgaaattatcaagaattcatcatgaccaaccaatgaagcccct

SEQ ID NO: 160345 - DNA, 76 bp, Homo sapiens
gacctcatcagtgagctgtccctgctggaggagcgcttccggcagtagaagactcagaaagtggtgtttacatgcg

SEQ ID NO: 160346 - DNA, 83 bp, Homo sapiens
cggagctgcggtggcgtctccacacggccatttacaagatggtttcgtccgtgatgaagatgccggaggacgagtcgaccccg

SEQ ID NO: 160347 - DNA, 100 bp, Homo sapiens
aggtggctccaggtctccgcggagcagctgccagtgggagagcgaggagaggcgagggggcggcagcctcggcccgaactgtggaaatacaaagaactct

SEQ ID NO: 160348 - DNA, 75 bp, Homo sapiens
ctggaagtctgttatcagaacttaagtcaaagggttcggatctgaagctcctgccttgtaccagcaaggctatca

SEQ ID NO: 160349 - DNA, 101 bp, Homo sapiens
gagtcggctgagggaaaagcgaggcaaggcaggcggggaaatcctcattgacgattcaatttgttgaaggccaatttgtggactcctacgatccaaccata

SEQ ID NO: 160350 - DNA, 100 bp, Homo sapiens
gttacaaagggatgatttacaaaatggactgcttagtacgtgtcgagaactttctcgagccactgccattctctcgggcctagccgtccttggaacccga

SEQ ID NO: 160351 - DNA, 82 bp, Homo sapiens
cagattcgcagtggtcgcttcttctccttgcttgcttggctcaggaacaacagaagagaataaagaaaatgacctcagacct

SEQ ID NO: 160352 - DNA, 82 bp, Homo sapiens
cggcctggcggcttccaggcgcactaccgcggaccaagaatcgccttcagccctgtctggtgcatccttggcagaaagtgag

SEQ ID NO: 160353 - DNA, 90 bp, Homo sapiens
ggctctgttggacagtgatgtgaagaggttcagctgtcctaatcctcactgccgaaagcctcttagcaaatatccggctgtgatcaatga

SEQ ID NO: 160354 - DNA, 98 bp, Homo sapiens
tagggctgctctccaatgtcaacaggaatgcagcagtggagctgacacggagacacatcgactcggcccagccttctgccatccctgaggcctccaac

SEQ ID NO: 160355 - DNA, 75 bp, Homo sapiens
tgttaacaatgcatccacagagacaagttggatggcttgaggactggtactaaaaggaaacgtgactgggaggcc

SEQ ID NO: 160356 - DNA, 88 bp, Homo sapiens
tcatcaggaagagaatggctgtgctgacttttttatccgtggagagcgactcagggacaaaatgagtcccctttacttggtaaatcac

SEQ ID NO: 160357 - DNA, 100 bp, Homo sapiens
tggacttggatgcctgcaaagcgaggctgaagaaggccaaggctgcagaagccaaagccacggtctttgactttgaactgagcagccaggatatgaccac

SEQ ID NO: 160358 - DNA, 50 bp, Homo sapiens
cagctacagcgagcgggactttgagtgcattgccgtctgcaacgtgcccg

SEQ ID NO: 160359 - DNA, 100 bp, Homo sapiens
agggctcttcgagaggataatgcctactgtgaagacgaaatctcacaaaactgtcccttatcttcagtcacatgctggcagaaatcaaagcaatctttcc

SEQ ID NO: 160360 - DNA, 100 bp, Homo sapiens
gcctggtcttgtggaactgaacttagctcgacggggctgaccgctctggcccagggtggtgactcagatattgctgggggttgtgagttgtgttcttgga

SEQ ID NO: 160361 - DNA, 95 bp, Homo sapiens
atgaaaccgaccaaactggagttagctaccggactgtcccgcgagcgacaaatttacatgtattggagaccagaccagaagcccttctgaattaa

SEQ ID NO: 160362 - DNA, 82 bp, Homo sapiens
cagtggagcccaaagacccctggagacatgactgattcttgctattccaaatcctcttccacgttgacagcccttcagatat

SEQ ID NO: 160363 - DNA, 50 bp, Homo sapiens
cgaagattcaaacaataatgttcccaggagttccatctggaatatgacaa

SEQ ID NO: 160364 - DNA, 51 bp, Homo sapiens
cagcagcgtgggaggcgttttaggtggtttgttctggatgcagaaaccaga

SEQ ID NO: 160365 - DNA, 87 bp, Homo sapiens
aagctgccaagttgaaaatggacgagtaatcgcctgctttgattcattgaaagtttttgtaaggccagcttccttcctttactggaa

SEQ ID NO: 160366 - DNA, 75 bp, Homo sapiens
gaactggcttcgggaattttaccaggttgtgaccgagattcccgacgagagagactgaggggaagagaggaagga

SEQ ID NO: 160367 - DNA, 82 bp, Homo sapiens
agaggtctccagagccttctctctcctggccagtacgggatccctgaaccatggaattttccttttcggaggagctactggt

SEQ ID NO: 160368 - DNA, 90 bp, Homo sapiens
ggagcccgaggtccccgcgcggcccgggcctggcgccctgaggggaagagcggcccggcccgaggccctcgggaccaaggatcacgtcat

SEQ ID NO: 160369 - DNA, 100 bp, Homo sapiens
cctggaggagacctggcagcaggtggtgatcgtggcagaggtggccctggtggcatgcggggaggaagaggtggcctcatggatcgtggtggtcccggtg

SEQ ID NO: 160370 - DNA, 100 bp, Homo sapiens
tgctcgcgctactctctctttctggcctggaggctatccagcgaaagaaccggaggctgaagcaggccaaagaagaagctcaggctgaaattgaacagta

SEQ ID NO: 160371 - DNA, 101 bp, Homo sapiens
agcagcagcagcggctccggcagcggtagcacgagtgcgggcagcagcagccccggggcccggagagcggagctcccacctccatatacagccattgccag

SEQ ID NO: 160372 - DNA, 80 bp, Homo sapiens
acgccaaggcccctccggccagggccgggagccgggccggcctagccagggaaggtggccatccagaaggaggacttgca

SEQ ID NO: 160373 - DNA, 114 bp, Homo sapiens
gagctcgccccgaacgggggtcttcctcctccgccgttgacagggtgttactgtgttgcccaggctggtcttgaaatcctgggttgaaacaattctcctaccttggcctctcaa

SEQ ID NO: 160374 - DNA, 100 bp, Homo sapiens
cgcgggctgcatgggcagcgcccgcgccccgccgctgagccgtcgcggagccgcgcagccctcggagcacggacatagagacactgcatattttaccaag

SEQ ID NO: 160375 - DNA, 82 bp, Homo sapiens
ctgcaccgacctcgacgtcttgcctgtgtcccacttgttcgcggcctatagcagcctcccgcgacgatgcccctcaacgtta

SEQ ID NO: 160376 - DNA, 83 bp, Homo sapiens
gaacctcccctccccccaacatctctccgccaaggcataatcaccagcaacacccgggacaataatacgggggccacctaccc

SEQ ID NO: 160377 - DNA, 100 bp, Homo sapiens
gccagcatggatgacatctacaaggctgcggtggcaaatattaagaaggagactcatattgtgtggtacaaagatgagagggagatatcagtggatgaaa

SEQ ID NO: 160378 - DNA, 98 bp, Homo sapiens
gcaagggcaacttcgcggtggtcaagcgggccacgcacctcgtcaccaaggccaagggaacatgaaggtcttgcaggagcccacctgcgtctccgact

SEQ ID NO: 160379 - DNA, 100 bp, Homo sapiens
ccatgagcgcatttcccggcatcgatgaggccatgagctatgccgaggtcatgaggtggggtcagagaagcagaaggagccctttgtgtttgcctcggtg

SEQ ID NO: 160380 - DNA, 98 bp, Homo sapiens
ccacaccgccgctgcctcagtcatgccgtaaaggcatgacttcctggcaccacagggaaaatcgggtgcaagcccagaaactatttccccaccaccac

SEQ ID NO: 160381 - DNA, 100 bp, Homo sapiens
cctgttgagaaggtactgatgacatggagattaatttgacaccagtccctcagagcctttagattttgaaacaaagaaggcatacactttcaaagttgag

SEQ ID NO: 160382 - DNA, 75 bp, Homo sapiens
tctactttctgtttttttcctatggcattgttgtagcatctaacattcacaagggaatttgattcagattctctt

SEQ ID NO: 160383 - DNA, 75 bp, Homo sapiens
cctaccagcactggtcatgtctaaagaacctaaggaaattagtggtcatacttctggtataaaaaaagctctgtg

SEQ ID NO: 160384 - DNA, 75 bp, Homo sapiens
cgacgtcctggagcagcagagaatcggccaatggagatcttcgtggatgatgagacgaagttgacgctgcatggg

SEQ ID NO: 160385 - DNA, 88 bp, Homo sapiens
cacggaaaccgtgacaactgccatgtcacaagaaaatacctgccagtcaacaggggaaagtgcagtgttgcccttctgaatgagacag

SEQ ID NO: 160386 - DNA, 100 bp, Homo sapiens
tgccaggcaggctacgagaaggtggaggatgcctgccaggcgaggctctcttcttagtgagcctgcaatccaggtgagaagaaaaggaaaaggaaagcag

SEQ ID NO: 160387 - DNA, 75 bp, Homo sapiens
gggggcagacgtcaacgtcaaggacttcgcaggcgagtttataccgaggtggctacagccgatttgccccctact

SEQ ID NO: 160388 - DNA, 100 bp, Homo sapiens
gagagcgccaggtgcttagcagcattgcagtgtcgagatggctatgaaccctgtgtaaatgaaggaatgtgtgttacctaccacaatggcacaggatact

SEQ ID NO: 160389 - DNA, 100 bp, Homo sapiens
gaacgacaggacgttggggcggcctggctccctcagtcaggtcaattcagtgaagatatgatacccacagtgggcttcaacatgaggaaggtaactaaag

SEQ ID NO: 160390 - DNA, 100 bp, Homo sapiens
ccactttgcagtcgacatactcggataccagcgctcagcccacctgtgattatgaccatgacctggtcgtttggatggaacagttctcttcctgtttact

SEQ ID NO: 160391 - DNA, 100 bp, Homo sapiens
cccttctccctcctgggtttcggagacattttggtgccagaccgctcgggcatggagaattccgcttcggtggagcagctccaggagacgctgctgcggg

SEQ ID NO: 160392 - DNA, 100 bp, Homo sapiens
cccgcttcctcctgcttcccatcgaagctctagaaatgaatgtttccatctcttcagagatgaaccagcactattcctgatcagagaactccagttgctt

SEQ ID NO: 160393 - DNA, 100 bp, Homo sapiens
gtaaccacctcacagattccagcttcggaacaagagaccctggatgggcagatagatgctgatgaattgcagagatgtctgacacagtctggcattgctg

SEQ ID NO: 160394 - DNA, 105 bp, Homo sapiens
cgacggaccagcgacccaagcgccgcggttaaccacgtctcgtccacgacctccctagggagagagatggtggattacatctgccagtacctgagcactgtgcgg

SEQ ID NO: 160395 - DNA, 82 bp, Homo sapiens
agctcttgggtttagcaaaagttcatctccttctgcatccttaactgagaatgaggtgctgcgacaagagactttggacaaa

SEQ ID NO: 160396 - DNA, 51 bp, Homo sapiens
ggacggccgtggccgtgttcgagctggtgtcatagatgaagattatagagg

SEQ ID NO: 160397 - DNA, 75 bp, Homo sapiens
cttcgggagccagcgggtgctggtggagccggacgcgggcgcagatgggcttccccaaggatttattgacattgc

SEQ ID NO: 160398 - DNA, 82 bp, Homo sapiens
gtactcgcagcacttggagcgcagaaccggccgcgcccgctctaagcgaaagacatgaggcctcagcctgaaatgaggttgt

SEQ ID NO: 160399 - DNA, 100 bp, Homo sapiens
catcgtcaagatggaggtggactacagcgccacggtggatcagcgcctacccgagtgtgcgaagctagccaaggggctgcttgctctcggtgactacatg

SEQ ID NO: 160400 - DNA, 112 bp, Homo sapiens
aaagtggtgtaggaggacgccagttactgcacggaaagcagcgtcaggagccatagtacctacagcagcactccaggttcaccggaacagcacaatccgccctggctgtgat

SEQ ID NO: 160401 - DNA, 100 bp, Homo sapiens
caccctgcaggtggtcagacatgtcatcaactcagctgatccggggctcccgggctcgagccctgccggacagggccctagtgaactgtcaatatagttc

SEQ ID NO: 160402 - DNA, 80 bp, Homo sapiens
caagagcgacctggtgcgctctcgtgaggtctcggtggatgccttcaagatggtcagcaaggccagcagtccacagccca

SEQ ID NO: 160403 - DNA, 95 bp, Homo sapiens
ggagactagcttggccacaggagacaacgttgaggtacagacagacaatgcagatcttcgtgaagactctgactggtaagaccatcaccctcgag

SEQ ID NO: 160404 - DNA, 75 bp, Homo sapiens
agtgggctcccctaaactggggcctggaaaagggaactgtggctgcaccatctgtcttcatcttcccgccatctg

SEQ ID NO: 160405 - DNA, 100 bp, Homo sapiens
aaggctgctattgaaagagagtatgcacagtaaggttcgtgatcctcgggccaattttgatcagtccctacgtgtactgaaacatgccaagaaggttcag

SEQ ID NO: 160406 - DNA, 51 bp, Homo sapiens
cttgcctggaccagcttaatggttctgagccccggcgctgtgcttcctgtc

SEQ ID NO: 160407 - DNA, 98 bp, Homo sapiens
aagagaggatttgcttttgtaacttttgatgatcatgatacagttgataaaattgttgtattcaagtcaaacaacgttgaaatggattgggtgttgaa

SEQ ID NO: 160408 - DNA, 100 bp, Homo sapiens
tcgaccccccactgatcgcgctggataaagatgcgcctctgcgatttgcagctcaaatagctataactgtaccaaagacatggaagaaaccaaaagatcg

SEQ ID NO: 160409 - DNA, 90 bp, Homo sapiens
ttccttcgtacccacagtgcttcatgagagaggcggggtttcaccatgttgcccagactggtcttgaactcctgagcttaagcaatccac

SEQ ID NO: 160410 - DNA, 99 bp, Homo sapiens
gcccggtactcacccagcaatcattgttgcctgacaaaagtcacagagaaggctcagttcttccttcctatgtctgaaggggcgtctcgattacctgag

SEQ ID NO: 160411 - DNA, 50 bp, Homo sapiens
ctagccgggagttacaccgccaccgccagaattcagaaggagctggcgga

SEQ ID NO: 160412 - DNA, 100 bp, Homo sapiens
gctcaggatggaggaagactcgatccgcctgcctgcgcacctgcttcaaaagcatcaaccaaggcaagaggaccagtgttgctgactccatgctgtggtt

SEQ ID NO: 160413 - DNA, 97 bp, Homo sapiens
agcggcgagcagaactacggcgagcggggacctgatgcccagaaccctggacgggcagatcaccatggagaagacgcccagttacttcgtcacgcgg

SEQ ID NO: 160414 - DNA, 91 bp, Homo sapiens
cgggcttctgtgaaacatggcggtaggctgggaccataacacaagtgcattccactcttcgttcaacttgttttggagagattaactcgag

SEQ ID NO: 160415 - DNA, 75 bp, Homo sapiens
cgcgtttccacttcagagatctggccccttcacagatgtagtcactacaaatcttaaattgcgaaatccatcgga

SEQ ID NO: 160416 - DNA, 49 bp, Homo sapiens
gagccagtttccccaaaattgaattaactcctgaggagagagcccaaaa

SEQ ID NO: 160417 - DNA, 98 bp, Homo sapiens
gggcagtggctacatcggaagagtcttcggcatcgggcgacagcaggtcacagtggacgaggtgttggcggaagccagtgccaatatctgcaatgtgg

SEQ ID NO: 160418 - DNA, 87 bp, Homo sapiens
gcgtcttgacattcgtgagcataagggcaagtttccccctttctagggtgaggatggttctacacagccacccggagttccttagtt

SEQ ID NO: 160419 - DNA, 98 bp, Homo sapiens
cgccgccgccatcatgagggaaatcgtgcacttgcaggccgggcagtgcggcaaccaaatcggcgccaagagtgctgcagcagctcccagtccagtgc

SEQ ID NO: 160420 - DNA, 82 bp, Homo sapiens
cgcgcgcccgccagcctgccgcctgggctgggggtcacgaaaggtttggtgcacctcgatttggaggaagtagggcagggcc

SEQ ID NO: 160421 - DNA, 75 bp, Homo sapiens
ctatgacagacgcttcgtcaagtggatgatcaagaacaaggtttactagaaattcccaactgttccaaagtggtg

SEQ ID NO: 160422 - DNA, 100 bp, Homo sapiens
ccgggattggaccgacgcagccatggtaggcgaaaaccaagagtacatcggcctcgttctcctatattggaagaaaaagacatcccgccccttgaatttc

SEQ ID NO: 160423 - DNA, 75 bp, Homo sapiens
tttcattgttccactggacgctcatcagagggaagatctttttcctcaattgagcatgtaacttctaatgccagc

SEQ ID NO: 160424 - DNA, 75 bp, Homo sapiens
aaacgacttaaggaatttttgaagaattacttgacaaatcttcttaaggtaactgtgacatttgatgatgtggcc

SEQ ID NO: 160425 - DNA, 88 bp, Homo sapiens
tgaaggcaggcacatttacatctatgtgccagacttcgcatatcatttaagtggatggttcgagctttctctggatacttagctacag

SEQ ID NO: 160426 - DNA, 83 bp, Homo sapiens
cgcgggcgccaggaccggccgaacgcagagacccgtgcctgtatattccacgctttgcgcacctgctggaattcggggagaag

SEQ ID NO: 160427 - DNA, 100 bp, Homo sapiens
ggaggatgtggtgctgcccgagaaggtggacgtgctggtgtctgagtggatggggacctgcctgctgagtcttgctcagttgcccaggctggagtgcagt

SEQ ID NO: 160428 - DNA, 100 bp, Homo sapiens
tctccttccagctcaacctcaagaccaacaccgtcatcaactggttccacaactacaggctctgtgtgctccgggatggagcaggtgtgcagagggtgag

SEQ ID NO: 160429 - DNA, 97 bp, Homo sapiens
cctcttccgccgccgggctcggggcctccgcagcgacaacatggaggccgtgaagaccttcaatagcgaggtatgaggatacatgggctgcacttca

SEQ ID NO: 160430 - DNA, 75 bp, Homo sapiens
tcctccgggaccggagtcagaaccctccgcagagtaaagggagttgaccacatttggccatttcccagaagggcc

SEQ ID NO: 160431 - DNA, 95 bp, Homo sapiens
ctcccagcccccaacgctgggccaggagatcctggaggctgctcctgctaaggccaagccggctgaagctcctgctgctgcagccccaaaagcag

SEQ ID NO: 160432 - DNA, 76 bp, Homo sapiens
gtagcgcccagctcattgcctcagctaaatattttatgacctggtcagacagataaataggaaaacaccagtggaa

SEQ ID NO: 160433 - DNA, 100 bp, Homo sapiens
ctcgtttctggctttgggctacgctgctgattcctgcggccgcggtctacgaagaccaagtgggcaagtttgattgacgatgacagtgagcctattttgg

SEQ ID NO: 160434 - DNA, 74 bp, Homo sapiens
tcactttgtgtcaaaaagaaataactcagctgaagcatcaggctgatcaggctgccaaggtagagaagatgcgc

SEQ ID NO: 160435 - DNA, 74 bp, Homo sapiens
cacagcacagttcctgggaaggtggagccaccagcctctccctgctctttcagtctcacatggcaacgaaaaca

SEQ ID NO: 160436 - DNA, 83 bp, Homo sapiens
gaaaaagctccaggattctgacagggatgttgcgaagttctttattggtgaaaacatgaatccagatggcatggttgctctat

SEQ ID NO: 160437 - DNA, 83 bp, Homo sapiens
gagattcaagattatttgcaacagctcacgggagcaagaacggactcctagaagtaccccaccccacccctgctccttggagg

SEQ ID NO: 160438 - DNA, 97 bp, Homo sapiens
acggaagtgtggtgaaggtggacacagaagccgcaggtgtcatggagaaactccagctgggcccagagattctgcagcgggaaaatccaaggcttat

SEQ ID NO: 160439 - DNA, 82 bp, Homo sapiens
tgatcaagccaacaacagtgacggaatgcctccatacatacctgtcatttactccatcctttatagtgatgctacaggacga

SEQ ID NO: 160440 - DNA, 80 bp, Homo sapiens
gcaagcggggcgctgtgtccccaagctccccgtcctcggggtgccaagtaccggggctccatccatgacttcccaggctt

SEQ ID NO: 160441 - DNA, 100 bp, Homo sapiens
gttcctgtcatatgcagactggttcaagatgatgggaagctgtccttggaggaattccagctcttctttgcagatggcgtccttaatgagaaagaactgg

SEQ ID NO: 160442 - DNA, 46 bp, Homo sapiens
gacgcgtcttctttcaggctgaggggatagctgggagtatggccac

SEQ ID NO: 160443 - DNA, 100 bp, Homo sapiens
cgggacctagaggcacacgtccggcagttgcaggagcggatggagttgctgcaggcagagggagccacaggcctcgggccagcggccaggagctgcctcc

SEQ ID NO: 160444 - DNA, 100 bp, Homo sapiens
ctgctgaatcacacgccgccatccgggaggcccagggaagtttagacactctgcaatatcaccaaaaagttcgctgcatagaaaatcaagaagtaaggac

SEQ ID NO: 160445 - DNA, 50 bp, Homo sapiens
ccgaggactcggagttcacctgcagtaatctatgccagcaattatgacaa

SEQ ID NO: 160446 - DNA, 50 bp, Homo sapiens
cctgagtccagcacttcccaggccaggtctatgttaacaatgaatgggca

SEQ ID NO: 160447 - DNA, 50 bp, Homo sapiens
atttctgcccagatagtgtctgcagctaagccggcaggagtgactctcgg

SEQ ID NO: 160448 - DNA, 51 bp, Homo sapiens
gttctctatatcatgaagaaaccatcaggtggactttcactgctggatgtg

SEQ ID NO: 160449 - DNA, 100 bp, Homo sapiens
ccgagaagctttacctcgctgaccctatgaaggaaactggagcacccatcctaactgatgatgttagcctgcaggtgttcatggaccatttgaagaagct

SEQ ID NO: 160450 - DNA, 102 bp, Homo sapiens
tcctcgtggtcatcctggtgctgctgaccgtgctcgcgctgctctcccaccgccgaggcatttcatccttcatgaagccattcaggattttgaattgcatat

SEQ ID NO: 160451 - DNA, 101 bp, Homo sapiens
ctgggtttgctgcagttgctggccgagcctggcctgggccgcgtccatcacctggcactcaaggtttttcgttggaatatacgttgcacatttatggcgat

SEQ ID NO: 160452 - DNA, 100 bp, Homo sapiens
gtccagccgccgccagcgcctttcggctctggcctgaagcagtactcccgcctcctggagcggagcgatcgtcttctgatcaaaggaggtaaaattgtta

SEQ ID NO: 160453 - DNA, 82 bp, Homo sapiens
cagcctgcggagcctgtggggcagcgctttgaacttcaagattcaggaagctctctacttcctaaagagattgtaaaagtag

SEQ ID NO: 160454 - DNA, 100 bp, Homo sapiens
ctggagcaaggaaaagatccctggaatatgaagagacacagtatggtagccacacccccagattgttcagattccattctgtggggaaattgactgtgag

SEQ ID NO: 160455 - DNA, 99 bp, Homo sapiens
tctgttacgccatggaaaccgctctggtcacaccaatactgttgcagattggatggtgccatgacaatggtgtgaactacaagattggagagaagtggg

SEQ ID NO: 160456 - DNA, 100 bp, Homo sapiens
ttccttttatcaatggcaaatcgagggaaacataccaatggttcccagtttttcattgttctccgtggcccgatgcccccacagcctatgtgaataacag

SEQ ID NO: 160457 - DNA, 75 bp, Homo sapiens
caagcagccaaccatgctcaacttcggtgcctctctccagcagactgcgggtgaggtggctttgaccccgggttg

SEQ ID NO: 160458 - DNA, 75 bp, Homo sapiens
tgaacatgcaagaaacatatactgcttacctcattgaaacaaggagcgagaacccgagcagcgccatgagcaaca

SEQ ID NO: 160459 - DNA, 83 bp, Homo sapiens
attcagaatagtacttcaattaagtacaatttagaagaactctaccagatggcaggattttcataatatatgtagtatgagtt

SEQ ID NO: 160460 - DNA, 97 bp, Homo sapiens
cctgtcccacctggcggccatcgtcatcctgctgctgaagatctggaagacgcgctcctgcgccgggaattcagtttctaatagaaaatgacctgct

SEQ ID NO: 160461 - DNA, 90 bp, Homo sapiens
gcttcatcgagaagactttgaaataattaaagtaattggaagaggtgcttttggtgagttgattatggaagattcccacaagagtaccac

SEQ ID NO: 160462 - DNA, 75 bp, Homo sapiens
cagctgcagcacgtggacgctgactcggaagtgcagcccacagcccccatcccgtagcccttcctggatctggag

SEQ ID NO: 160463 - DNA, 82 bp, Homo sapiens
ttgccgaagattaggaagaatccactgatagaaatcatttccatcaataccgggttttaaaatcaaagatgggaaaatcgga

SEQ ID NO: 160464 - DNA, 50 bp, Homo sapiens
gccagtgtcagcatcaaccagacagcaaaccagtccagctacgggggccc

SEQ ID NO: 160465 - DNA, 105 bp, Homo sapiens
ctggaccagagtcgagttccctcctcctgcaccaaagggagccgccaccgtctggtgtctaaaccgcctcgggccatgggtatcaatgatctgctgtcctttgat

SEQ ID NO: 160466 - DNA, 82 bp, Homo sapiens
agagatgtttttagaacggcctcgtgttcggtttgatggagttgatccccctcatattgtgtacagcatgtctacatcctga

SEQ ID NO: 160467 - DNA, 50 bp, Homo sapiens
cgacagaagcgactttggtgagactctgaaggagcatttctaccagaggc

SEQ ID NO: 160468 - DNA, 102 bp, Homo sapiens
acatcaggacagctgttccttggccatcccaaagctattctgggggcaacagagatggcctgtgagtatctgtctgtggaagtaatggagcgctggattatc

SEQ ID NO: 160469 - DNA, 75 bp, Homo sapiens
aagttagatgccgattacccacttcgagtcctttattgtggagaatttgccattttcagtggaaaacaagtggtc

SEQ ID NO: 160470 - DNA, 90 bp, Homo sapiens
ctgctggtgaccagaagcctgcatttctgcattctgcttaattccctttccttagatctttataaacaacgagtggcagaactcagagag

SEQ ID NO: 160471 - DNA, 82 bp, Homo sapiens
gcctcggccgccatggtcttcagcggtgcgcgcggagccatggttatcatgtcggagttcagcgcggaccccgcgggccagg

SEQ ID NO: 160472 - DNA, 121 bp, Homo sapiens
agaaaatgctagtgtgaaggtctccattgacattgaaggatttcagctaccagttacttttacgtgtgatgaaggacacgggtttctctatgaaacatttgggatccggccacagttctcc

SEQ ID NO: 160473 - DNA, 98 bp, Homo sapiens
gcagaaccagatccgggagcacgtcatcgccatcgaagcggacaaggcaaaatctcagcaagttcggacctctagtacaataaggcgaacctcctctt

SEQ ID NO: 160474 - DNA, 76 bp, Homo sapiens
atgagatccaagccatcatgcacagcttggccttcgtgcctctgcagatctggtccaaagtcctggccatctcagg

SEQ ID NO: 160475 - DNA, 90 bp, Homo sapiens
cacctggtttgtcgcatgtgctgtatgggcctggagctgctgaagactgctattgggaaagctggctacactgataaggtggtcatcggc

SEQ ID NO: 160476 - DNA, 100 bp, Homo sapiens
catgattcaaaccgccaggttaccatgaggaggatttctggccttcgagctttacaggaagtatggtgctggcatctgcttggcttctagagagtcttac

SEQ ID NO: 160477 - DNA, 74 bp, Homo sapiens
acgccggccgggccaagaacattaagactagggacctcgactggattttgatcctgacattgttgcagctcttg

SEQ ID NO: 160478 - DNA, 100 bp, Homo sapiens
ttggtgggaagcaagtgatcagggtctcctgcggtgatgagtttaccattgctgccactgatgtgacattgtgaggaagattgatcagtctgaatttgaa

SEQ ID NO: 160479 - DNA, 90 bp, Homo sapiens
gcggcgcgggctggcggtggctccacggctggcctgctgtctgccttgggctccctgatattgatgatttggctgatggcaacacctcat

SEQ ID NO: 160480 - DNA, 98 bp, Homo sapiens
aggggggacgcggcggcggcgttgacaatggtgcacttagaactacctcccagctccaacatagtgcaaactccagaagattttaacttgctcaagtc

SEQ ID NO: 160481 - DNA, 90 bp, Homo sapiens
ggagccggcttgcccgttgctggatctgggaccaacggaggtagtctttggaaagaggcaaaacctgatgaattaatggattccaaattg

SEQ ID NO: 160482 - DNA, 100 bp, Homo sapiens
ctccgggattaaagaacaacgaccgcagaacaccttccaccatgaccacctcagcaagttcccacttaaataaaggcatcaagcaggtgtacatgtccct

SEQ ID NO: 160483 - DNA, 82 bp, Homo sapiens
gaggaatccgagaagagcagagcggagggagccccagacacgtaagactttgaccccgacgcaggcttcagtgattgccgcg

SEQ ID NO: 160484 - DNA, 75 bp, Homo sapiens
caacattcagacccatttccagtcatgagaagttggtgaaccatctaaagaagagaaggctgtggccaagtatct

SEQ ID NO: 160485 - DNA, 87 bp, Homo sapiens
cgccatcaggctcaacgaggaactcaaagtggatgaggaaagactgggccggggtctgcagggctcagctgagcccatgagctccca

SEQ ID NO: 160486 - DNA, 132 bp, Homo sapiens
gaatctcctggaatgcttaatggacctttccagcaccgaaattcaagaattatgactcatcggtcagcagaaaaatgctaatcctgaggtgacgatgacaatgcttcgctggatctatacagatgagctgga

SEQ ID NO: 160487 - DNA, 83 bp, Homo sapiens
tttcacaggctggatgaagattgggaataccctctaccatctgctttggtcagggtgccgctcgaggatttaaaagcaacaag

SEQ ID NO: 160488 - DNA, 100 bp, Homo sapiens
caaaaccaaacaccctcagctccacattgagagcaaaatctacaagatgatgcagggaggaggatgtgtctagtccgaatgaagcaggaaggccggagtg

SEQ ID NO: 160489 - DNA, 75 bp, Homo sapiens
ttggtgaccaaggccaaggaactgcatgtacagaatgaaaggttgtatcaaagttcttaaggaccaacctcctaa

SEQ ID NO: 160490 - DNA, 123 bp, Homo sapiens
gttcccggctccgtggggccgtcttcccggcgagtccgcgacggtcgccgcccacggcgagggaaagggtgccacactgggaatgcaagctgtccttgcttctgaaccaagactactattgtg

SEQ ID NO: 160491 - DNA, 82 bp, Homo sapiens
atacagctcatcactccagcagccctccacccaggagtacgtgctgcatgtctacggtcagaatggcggcagtggagcatcg

SEQ ID NO: 160492 - DNA, 100 bp, Homo sapiens
agcactcagaatgctccaggcagtgtaatctcattccatcttcattcatgactccagacagaccattaaaaatctcaagtgacgactttgggaaactctg

SEQ ID NO: 160493 - DNA, 75 bp, Homo sapiens
gcttcctttctcggaaacgcggcgcggccggctgccggaaagaacatcaagtcagcctaatgagctttctggctc

SEQ ID NO: 160494 - DNA, 100 bp, Homo sapiens
tggcatttatgaatatatcctggtgattgacaaagcaaaaatggaatcccttggatgagacctgcacgcagtggctcacagcagcacgatttgtgacagc

SEQ ID NO: 160495 - DNA, 100 bp, Homo sapiens
ctgctcagaggagcttatacagggatgtgatgctggagaactatagccacctggtttctcttgattaagcctgatcaagatgacaacctcccaaaagcac

SEQ ID NO: 160496 - DNA, 100 bp, Homo sapiens
acatcacaatcccattattcagagcgcgtatggagtggaaacgcttgtagggtttcaccagtatgtgccaagagttgtaacctctgcacaacagaaagca

SEQ ID NO: 160497 - DNA, 75 bp, Homo sapiens
gcgtgtctaggtgagtcgcggtgggtcctcgcttgcagttcagcgaccacgattgaaaatggctcaggaatcagt

SEQ ID NO: 160498 - DNA, 100 bp, Homo sapiens
cagaagatgaagtcaaattggccctgaaaaaagacagagaaactatgggacacagatatgttgaaggggtgcgggttaccagcactgggaggccaggcca

SEQ ID NO: 160499 - DNA, 75 bp, Homo sapiens
gcacgacttcagcatgagacccgccttcggagccactgtcagaccacggaatgatgtggcccacaagcagctctc

SEQ ID NO: 160500 - DNA, 80 bp, Homo sapiens
gagaagccgcccaaagaactggacccagatgatgtggtaccagttggccaaagaagagcctggtgttggtgcatgtgctt

SEQ ID NO: 160501 - DNA, 73 bp, Homo sapiens
gcaacctggcagccgccgccgtggaagtcaagtaagggagaattgactacgcttatacatcagcttcaagaaa

SEQ ID NO: 160502 - DNA, 98 bp, Homo sapiens
gactgaacctgcataccatccgcgaccgagtctggcagatccagtcttgctcagctctcacaggagagggcgttcagataatgcaatagaagctgtgg

SEQ ID NO: 160503 - DNA, 100 bp, Homo sapiens
gaagaaccagaccaacctggagaggaagttctcctacgaccttgcatactccttccacgttactgcagacggtcagatgcagcctgtcccttttcccccc

SEQ ID NO: 160504 - DNA, 100 bp, Homo sapiens
ggaaatattttacagatctttttgactatcttcctctcactgccttggtggatgggcagcagaagatggctgtgccacccacgtatgccgatcttggcaa

SEQ ID NO: 160505 - DNA, 101 bp, Homo sapiens
gtggccctgacggaggggaggaaatatggctcgtggacagcagaaaattcagtctcagcagaaaaatgccaaaaagcaagctggacaaaagaagaaacaag

SEQ ID NO: 160506 - DNA, 83 bp, Homo sapiens
gcgtgggcgacccggtgtgtggcgcgcccagagccccgcgtttcagccctagggaagagctccacgcaggagatcggtgagga

SEQ ID NO: 160507 - DNA, 100 bp, Homo sapiens
tacagtgacatcttctgggatttagtctgcaggaacgaatgcaggaatttgggaactgagctgtgcaagtgctgaagaaggagatttgtttggaggaaac

SEQ ID NO: 160508 - DNA, 51 bp, Homo sapiens
caagtcctccatgggggccacaggtgccgtgagcgatgtggagatgcagga

SEQ ID NO: 160509 - DNA, 100 bp, Homo sapiens
ttatattcatccgttctggaaactgagaagcgagggtgacaatgtaatgtggaccgaactaccatgtacaaatttccatcttcttctctgttgtgctatt

SEQ ID NO: 160510 - DNA, 99 bp, Homo sapiens
ctggcagccaccatgaaggccccggagaagaagaaagtggacaagctgaacgctgatatatcccctggggcagctggtggggctgaagatggtttcttt

SEQ ID NO: 160511 - DNA, 75 bp, Homo sapiens
cctcttgctcacagagctctgtaaaggtgagaagccctaccactgcaactgggacggctgcggctggaagtttgc

SEQ ID NO: 160512 - DNA, 75 bp, Homo sapiens
gctgaggagttttcaatcccacgtttagtcacatcaagaaatagaacagaattcagccatggccccaagaaagag

SEQ ID NO: 160513 - DNA, 100 bp, Homo sapiens
gaagagaaaggtaatatgcaagacacttcgatttgttgcacattattatggagcatcattaatgggaaatgtttcaacgtgcgcaagcgttgcggcggcg

SEQ ID NO: 160514 - DNA, 83 bp, Homo sapiens
ggaacccgcacctgtgaacctcggcagtgcgtccccgggactctgttctgtgagtaattcgccaaaatgacgaacacaaaggg

SEQ ID NO: 160515 - DNA, 100 bp, Homo sapiens
cggagctccacggaaagatgatctccgtggagaaaatgtttactgaactgcaacagatgaggcaacagttaccagacatggaatttggccgacgaatggc

SEQ ID NO: 160516 - DNA, 90 bp, Homo sapiens
cagtactgtgagaaacagtttgaccattttggacattttaaagaacatcttcgaaaacatacagattgttaaaggaaatgggctggcagg

SEQ ID NO: 160517 - DNA, 80 bp, Homo sapiens
ataccagccaaaatcatttttgaggatgaccgggtgtggacactgccagcggctgcagccgacttggaatgacctgggag

SEQ ID NO: 160518 - DNA, 127 bp, Homo sapiens
ttgagctccaggagttcgtctcttacgtctgcggaagtgcagctgcctcagttcttagcgcagaccatgagaacattgctctgaactggtgttcctgtgaacacagttggactaaccgctacttgag

SEQ ID NO: 160519 - DNA, 98 bp, Homo sapiens
gagtgaagttcaggcaaacctttctctgttcctagaggcagctagtggcttctatactcagtacggtggggattgcagctgctgagcagggattctgg

SEQ ID NO: 160520 - DNA, 96 bp, Homo sapiens
ccttccagaggctttgtggtgcgggacgcaccctggaccgccagcagcagtgagaaggcaccatgagccaggacaccgaggtggatatgaaggagg

SEQ ID NO: 160521 - DNA, 82 bp, Homo sapiens
cccgcttcctggaatggcaagcgcagcaacaacagagagcacgtgacccaacatgagtgaagtttcctgcaagaaacgggac

SEQ ID NO: 160522 - DNA, 100 bp, Homo sapiens
agctccacattgagagcaaaatctacaagatgatgcagggaggaggaattcctcctgatcagcagagactgatctttgctggcaagcagctggaagatgg

SEQ ID NO: 160523 - DNA, 75 bp, Homo sapiens
cgggctgagcttcctggagaagaggaaggaaggcgatgcactgggcgccatggagaagctgtgccggcagctgac

SEQ ID NO: 160524 - DNA, 75 bp, Homo sapiens
catcaccatgctggtcagcttggtcatgatctaccagttcattgttcaggacagtcattttgtttactcattcag

SEQ ID NO: 160525 - DNA, 82 bp, Homo sapiens
cgagtcgcgcggaggcggaggcttggggtgagaagccatttaaatgtgatcagtgcagttatgtggcctctaatcaacatga

SEQ ID NO: 160526 - DNA, 82 bp, Homo sapiens
ccccaccgtgcagcggggcatcatcaagatggtgggcagcctcacaaaaggagaaagacctctgatgcaaatgaaactgaag

SEQ ID NO: 160527 - DNA, 98 bp, Homo sapiens
gagctggtggaagtggttggaaatggcacctatggacaagtctataagggaaatgatcttcattggttagcatgtgccttatatgtggcttgcagaaa

SEQ ID NO: 160528 - DNA, 98 bp, Homo sapiens
ggagatgtcgctcggccgccttctaccaggagcctgatccgtgccgcccgccgcccggatgggaccaccagagtgctatgtcagctattgaaaacatg

SEQ ID NO: 160529 - DNA, 100 bp, Homo sapiens
cttcatgcagtctctcattggcttctttgagactgaaatggcaggtgcttttctgctttgggccaagtagcaaaagctcgattcctgcatgagaccaatg

SEQ ID NO: 160530 - DNA, 75 bp, Homo sapiens
gggcacgttctcatcagcatggaatgtatcctgtcaggtataatgtcagtgaatggcaagaaagttcttcatatg

SEQ ID NO: 160531 - DNA, 80 bp, Homo sapiens
tttcggactcctgatggcatgcctgtaaagaacttgcagttgaaggagtataacacagacaatgcctgtggaagacaagt

SEQ ID NO: 160532 - DNA, 50 bp, Homo sapiens
atacacagcagttgtcttaaacaggggcaagattcttgccaagagaatta

SEQ ID NO: 160533 - DNA, 74 bp, Homo sapiens
tcgacctaaagcctgactggggcaagcctgatctagttgaatctgaagatgtggacctgctgatgaagagggct

SEQ ID NO: 160534 - DNA, 50 bp, Homo sapiens
attcagcctcagtgatgtccatgaggaaaacatgttccttcagtcgtcaa

SEQ ID NO: 160535 - DNA, 111 bp, Homo sapiens
ggttttagtattaaagcagtgccattccagaatgccatcttgaatgtaaaagaacttggaggatggagctatgacattgaagagaggaaggttccaaaacccaagtccaag

SEQ ID NO: 160536 - DNA, 88 bp, Homo sapiens
ggagctggaatgactggcaacccaggtgtaaagcaggccctctggctcaccaagaccaagttaatagaaggccttcccgagaaagtgc

SEQ ID NO: 160537 - DNA, 90 bp, Homo sapiens
tgaaaatgctgcacatcccttaatagtcatctacataggtgtcttctctttagggatggtgaggttggaaaaaggctcctgtaaccctcc

SEQ ID NO: 160538 - DNA, 96 bp, Homo sapiens
ccgccggagtcgttgtcgccggagcctggagccgtgaacccagccgcgccagggctcctcgcacctaccccagcaactcaaattcaccacctcgga

SEQ ID NO: 160539 - DNA, 100 bp, Homo sapiens
cctaagaatcctgagagcccatttatgttttccttacatctcaatgaagcaagggactatgaagggaagtagatcgagattcagatggtcacgtcagctt

SEQ ID NO: 160540 - DNA, 100 bp, Homo sapiens
atatcaaacggcaagatgtccagtaatgtcccggcggatatgatggcccactgcgtgaccttggttcagctgtccatttcctgtgaccatctcattgaca

SEQ ID NO: 160541 - DNA, 100 bp, Homo sapiens
agctggcggagagcggcctgcgggcgatcgggccgagaccaagatcactccatggatgaaatgacagctgtggtgaaaattgaaaaaggagttggtggca

SEQ ID NO: 160542 - DNA, 99 bp, Homo sapiens
gtgggagacacgccaaagctcccaaggtcacagaacagaaagtgctggtggacatctcttcttgccccaagatcttcgttggaagtccccgggacttgg

SEQ ID NO: 160543 - DNA, 100 bp, Homo sapiens
agaaggacttcggaatgcactacaacaggaaaatcatattatagatggagtaaaggactccctggaggaaaagcggaagcggcagcggtctgaacgcctg

SEQ ID NO: 160544 - DNA, 74 bp, Homo sapiens
ggacagaggcaccaaggacctccaagacagtgagagaatctggctccttgaaccctgaccatgggcctgcggtg

SEQ ID NO: 160545 - DNA, 90 bp, Homo sapiens
tggccactgaccttgcctattacctggtccgcaaagggtcttgtttctggcgctggagacatcaagcttactaaagacacaggagttgac

SEQ ID NO: 160546 - DNA, 82 bp, Homo sapiens
ctactctctctttctggcctggaggctatccagcgtccagaggtgtccttctaaagctggtagaggtttcacgagtcatcag

SEQ ID NO: 160547 - DNA, 50 bp, Homo sapiens
gctagccggacgtcctccgactcaagatgtgccaggtgcagagattaagg

SEQ ID NO: 160548 - DNA, 75 bp, Homo sapiens
caggctcaggtgcagccgctgggaactgctcgcagaaagaagaaggtggttcatagaacagccacagcagatgac

SEQ ID NO: 160549 - DNA, 83 bp, Homo sapiens
ctccccagggcccagtgcggactcgcctccgtgaaggcttgaacatgacaagcagatttgggagtccaaggcccagacagagg

SEQ ID NO: 160550 - DNA, 90 bp, Homo sapiens
gcggcggcacagagccggtggtggagccgccgagcaaccgttccttcagagttgatacagcgaagctccagcacaggtaccagcaactgc

SEQ ID NO: 160551 - DNA, 100 bp, Homo sapiens
cgtggagatatggcgcaactgcggcgcgttaatttggagtggcccctggagtcagtttcctacaccatccgaggccccacccagcacgagctacagcctc

SEQ ID NO: 160552 - DNA, 82 bp, Homo sapiens
gaacgtcattaacggcatcctcttcattcctctcagggccgagaactactggtggcgtggccagaacacacggacgctgtgt

SEQ ID NO: 160553 - DNA, 75 bp, Homo sapiens
gatctgcgcttccagagcgcagctatcggtgctttgcagagctgtattgacttgttcaagaataactgatatgcc

SEQ ID NO: 160554 - DNA, 100 bp, Homo sapiens
gtattcttggatcttgcacaggaaggaattaaaggtgtgagctaccacgccttgcctgagttgatcttctacaagagttcaaacaaaaaacagaccatac

SEQ ID NO: 160555 - DNA, 80 bp, Homo sapiens
ccagcacactcctcgcgagcaagagcctggagacacaggccccatccttcccaatggggacacttcagggagcggctctc

SEQ ID NO: 160556 - DNA, 75 bp, Homo sapiens
cgctcggaagggtctttgttccctgcagccctcccacggacgccaggaaagcatgtgcagatgcaactctctctc

SEQ ID NO: 160557 - DNA, 82 bp, Homo sapiens
acggggcgcgcgcgaagcgagcgagaaggcacggagtcgccgcggagcgcaggaaagaactgacttcctctggtgggccaac

SEQ ID NO: 160558 - DNA, 100 bp, Homo sapiens
tcatagggacagccgcccctggtgcacacaccctcgtattctcctgcccttccccagacctttccaaagtgaaactgatgagatttgatgatccactgtt

SEQ ID NO: 160559 - DNA, 100 bp, Homo sapiens
gggatgacttctcagcgttcccctctggcgcctttgctgctcctctctctgcacggtgattttacaacgagatgctgctctccatagggatgctcatgct

SEQ ID NO: 160560 - DNA, 96 bp, Homo sapiens
tttcaatgtccattccgctgtgttgattgaggacgttcccttcacggagaaagattttgagtggtgtgtgatgagaacggctctaagggttatgcc

SEQ ID NO: 160561 - DNA, 98 bp, Homo sapiens
cggtgaaatcctgtcctgaagactgtaaggcaactccccatcagatgagtctgaggagcgggaaagagaccccaaggtgctgacattcccagaataca

SEQ ID NO: 160562 - DNA, 96 bp, Homo sapiens
aacttgggctgagtaccgcggcgggcgcgagcgaggcgccctagacatcttctccctcccttgcctcagaatgtgacagtgatgataacatgggtg

SEQ ID NO: 160563 - DNA, 100 bp, Homo sapiens
ccgcgggcggccggtcgggcggggcggcggcgctgacagctgcatggctacttggagaatgagccgctgatgctgcagcttttcattgggacggcggacg

SEQ ID NO: 160564 - DNA, 100 bp, Homo sapiens
ccggcccctgtggcgccactacttccagaacacacaagcatcccagccatcactcttccacctgctccttagagaagggaagatgagtgagtcgagctcg

SEQ ID NO: 160565 - DNA, 75 bp, Homo sapiens
atatctacagcacctatcacttgttccctccaagacaactgaatggatactgtcatgaagcagacacatgctgac

SEQ ID NO: 160566 - DNA, 83 bp, Homo sapiens
ggttggtgtgattagcttcgcagtctggaaagctttaggagttcacagtcttttgcaagaagctgaagtatggaaagaacaag

SEQ ID NO: 160567 - DNA, 75 bp, Homo sapiens
cgttgctttgcctgggcggtgcggacaagcgcctgcggagacgcaggtcagaatggaaatgggctgcagaccggg

SEQ ID NO: 160568 - DNA, 100 bp, Homo sapiens
ctcagtggtacctgcacctgtctggcctgggcgccagcgcggctgcaggccaaggtgacagagttagtccttgataattgcctgtgtgtcaatggggaaa

SEQ ID NO: 160569 - DNA, 99 bp, Homo sapiens
gctgaaagaattgacaatgcagatgagttactagaaagcttcctggagggttttcacgatgaaagcacccagggtagaatccgccaagctttgagagaa

SEQ ID NO: 160570 - DNA, 83 bp, Homo sapiens
ggagattctcagggcaacccagatctgcctgtctacaagtcattttgcttgggcatttcactcagtagcagaagaagaactgc

SEQ ID NO: 160571 - DNA, 100 bp, Homo sapiens
agaatgctcagctagtcaactccctagaaggctgccagttggaaaattcacgaattgtgagagtaagagttatagccggaataggccttgccaagaagga

SEQ ID NO: 160572 - DNA, 90 bp, Homo sapiens
cggagcccagcagctgtgggagccccgagaacgcctccagcggggatgacacagaagggaaatcctcattgacgattcaatttgttgaag

SEQ ID NO: 160573 - DNA, 101 bp, Homo sapiens
tgatctctctcgctgtgagacatgtctgagactcctgctcagtgtagcattaagctcctctggtgcaagtgtggtagctattgacaacaaaatcgagcaag

SEQ ID NO: 160574 - DNA, 75 bp, Homo sapiens
gagatccaagtctctacagttaactggcaaagaaggaggaagacaatggtcctataatgcccttggataagaaaa

SEQ ID NO: 160575 - DNA, 51 bp, Homo sapiens
atcgccttggaccccgctcacggatgtgaagttcatttccaatccgccctc

SEQ ID NO: 160576 - DNA, 88 bp, Homo sapiens
tgagctcaccgcccagcccaaaccaggagattgcgagggagcgatgcggtgcagcgcgaacccttaggagaaatcttgagagtggaca

SEQ ID NO: 160577 - DNA, 97 bp, Homo sapiens
gacgatgaggatgacgaagatgatgaggatgacgatgacgatgaggaagatggctgccagcgatccataggtctttccaatgggaaagccaaggtgt

SEQ ID NO: 160578 - DNA, 82 bp, Homo sapiens
ctgataatgaagaattattttgcaccactggatgttgtttactggaaataatgcaaaaggtgtcccaaggctcctgaccagt

SEQ ID NO: 160579 - DNA, 90 bp, Homo sapiens
cttagtcaccagatcgcagcaggagacaggccagtgaagaagcaaaggaagacatgaaaattgacgctcattcttcttcctattgttccc

SEQ ID NO: 160580 - DNA, 96 bp, Homo sapiens
tacgacactgaacgcatcggagacttcacagagaatgcagttgtcttgacttcaggtctgtctgttctgttggcaagtaaatgcagtactgttctg

SEQ ID NO: 160581 - DNA, 90 bp, Homo sapiens
agaaccgtcccaaaatatggcaaagaaacctattctgaggagagaagatgactgaggaggaggtggagaccgttctggcaggacacgagg

SEQ ID NO: 160582 - DNA, 51 bp, Homo sapiens
gttagaagaattcatgctcatccggacaaatttacatgtattggagaccag

SEQ ID NO: 160583 - DNA, 101 bp, Homo sapiens
cttcggccttggtcccagcgccttcccacggagcagcactcttcaccctgcacagccttgttaggctactgcagcactggggtgtcagttgttggtccgac

SEQ ID NO: 160584 - DNA, 100 bp, Homo sapiens
caaaacctggctgttttccttcagagcactggcctccaattggcaaacttgaagataaatcttttgactccagctctttagaggatctaaagtgaccttg

SEQ ID NO: 160585 - DNA, 104 bp, Homo sapiens
ttgaaactggacaatgtattactggactctgaaggccacattaaactcactgactacggcatgtgtaaggaaagaccacagcaagattctttcattcgtctcct

SEQ ID NO: 160586 - DNA, 100 bp, Homo sapiens
tgcagccacatactatccgtttgttcaggaaccaccagtgacagaatgtgagtatgcagtgctcacaggatatacttcgaatgctcctctctcttcagcc

SEQ ID NO: 160587 - DNA, 100 bp, Homo sapiens
gaacagggacagcacctcatcccctggatgggggaccacaagatcctcatcgacaggtgggaggaggagctcgccaagcgcatgaaccttcagaccatgg

SEQ ID NO: 160588 - DNA, 74 bp, Homo sapiens
caatgatgagaggatgtggtggtctactctgatgtcaatcttgagggctagatgttttactgtgcctggctaac

SEQ ID NO: 160589 - DNA, 100 bp, Homo sapiens
gagtggcagccaaaagattgaaggaaggtgatacaatgatggggcagcaagtggccaatgatgatgatgatgattttgatgatgaggaagctgaagaaaa

SEQ ID NO: 160590 - DNA, 51 bp, Homo sapiens
agctcaccgaggacggggactcataagtttataccatggatagcacaaagg

SEQ ID NO: 160591 - DNA, 104 bp, Homo sapiens
tccttgtggagccggagctgggcgcggattcgccgaggcaccgaggcactcagaggaggaaataatgcaaaaggtgtcccaaggctcctgaccagtgaacaaag

SEQ ID NO: 160592 - DNA, 90 bp, Homo sapiens
atgaaccgcgccgtgcaactgctcatcctggcctacgtcatcggcgggaagagaggcagagcacttgtcctccccttggggagaatcctc

SEQ ID NO: 160593 - DNA, 100 bp, Homo sapiens
aagagacgaagcgctccatcaacgaagagatccacacacagtctcggaagggtgctgacctggaccgggagaagaaggctgccgagtgcaaggtggacag

SEQ ID NO: 160594 - DNA, 51 bp, Homo sapiens
gtttcaccatgttggccagactggtcaggagttcaagaccagcctggccaa

SEQ ID NO: 160595 - DNA, 100 bp, Homo sapiens
acccacagcggggcggcggcggcggcggctgcggcccaatatagagtgtgaacatggctacgcctcttcattcccgtccatgccgagcccccgactgcag

SEQ ID NO: 160596 - DNA, 101 bp, Homo sapiens
gacctgcgtggtgcactacaccggaatgaatctgaagtctgctgcagtaaaacacagaaggctttaaaatgttttcttgcataaaattcaaaacttttaag

SEQ ID NO: 160597 - DNA, 95 bp, Homo sapiens
ctgaaagtgttggctaaatccactgaaggaacagaaacaattgaaggagtctataacacagtcacggagctgctggacgtctccatggagctggg

SEQ ID NO: 160598 - DNA, 83 bp, Homo sapiens
ctcagttggaagcagccgatccagcctgcggagcctgtggggcaggtgtgttccagagaacaagccttcagacatttgctata

SEQ ID NO: 160599 - DNA, 100 bp, Homo sapiens
catctgtgtgggttggctgtatctcagggacagagtctgcagcaaaaaaggtgaccaagaatatggcccaggtgaccaaagccctggacaaggccctgag

SEQ ID NO: 160600 - DNA, 100 bp, Homo sapiens
cacagttcgaggggccaaggcagaagaaatcttggagaagggtctaaaggcggggagacaaccccttccccaagaatgctgatgggactatatgctacga

SEQ ID NO: 160601 - DNA, 75 bp, Homo sapiens
gggccccgaaggctctccatcgaaggcaacattggatctcactggcatcgaatctatggatcagtgtcgccatac

SEQ ID NO: 160602 - DNA, 83 bp, Homo sapiens
caacaccacaataatccacagccaaggtcttctccactggcccctgagattgccatcacctccagctcctcctctcctgaagt

SEQ ID NO: 160603 - DNA, 51 bp, Homo sapiens
cgcggggcaagtggctcggaacacagggtctgggggtggtggcatctcccc

SEQ ID NO: 160604 - DNA, 122 bp, Homo sapiens
ggccgccattgtcggctactgcgacgccaaatacgtctgggcagccacggccgggggcgtctttcagagcattacggattaaagcaaggagagccaatcatgactggcaaaacacagaccag

SEQ ID NO: 160605 - DNA, 100 bp, Homo sapiens
gactgtgctgtgcctctctcgcccacattttccccaagcactctcaggaacctggcaacaggtatggtctgaatatgcgttgcttggcagctcgggtcaa

SEQ ID NO: 160606 - DNA, 80 bp, Homo sapiens
agagggtctttaggacacagattcttaaaagtgcaggcttgaagtagaaaatgccatgatgagaaaaactattaaaaaac

SEQ ID NO: 160607 - DNA, 75 bp, Homo sapiens
tacatactcatcatggggctcctgtacaagaaaaatggctacaaacttcctagcacatgagaagatctggttcga

SEQ ID NO: 160608 - DNA, 100 bp, Homo sapiens
gcctgcgagagctggatgacatctcacttacacctgacccagagcctacccatgaaggagtccaaaactacttacctggaagaccttccaccaccccctg

SEQ ID NO: 160609 - DNA, 50 bp, Homo sapiens
cttcaacagaatgtggcaaccaggtgagacgtggtcttgtaacacagtgg

SEQ ID NO: 160610 - DNA, 100 bp, Homo sapiens
gaaaaaggggagcgcggagaggaggctggaagaggaagatgcctagcacagaccttctgatgttgattgatgttctgccagaaattgtggaggctgtgga

SEQ ID NO: 160611 - DNA, 101 bp, Homo sapiens
ggacctgcgagcagcgcgggcggcagcccgggggaagcgaataacctgggtatcttgtggtctgaaagagaagaaattgaaactgcacaggcttacctaga

SEQ ID NO: 160612 - DNA, 74 bp, Homo sapiens
atccactcaaggggagctgcagctgaaactggatctcctgaagggagctgtgattggtatagacgatgaggacg

SEQ ID NO: 160613 - DNA, 100 bp, Homo sapiens
cagaggatgtccatgttcaatcaccactgtccaaattcagaagctcagaacgctggactctccctttgcaggaaggattacggccaggagatacaaccag

SEQ ID NO: 160614 - DNA, 100 bp, Homo sapiens
acgcagtgatttgctccccctcgtgcagcaacccccacacccagcaccagatggcggctcagcggcagcgggcgctggccatcatgtgccgcgtctacgt

SEQ ID NO: 160615 - DNA, 51 bp, Homo sapiens
agagactgggacttggagcagcagtgggaaaagcttcactctgaccatcac

SEQ ID NO: 160616 - DNA, 50 bp, Homo sapiens
gcgaccacaagatcgtcttctttaaaggctggagtgcagtggtgtgatct

SEQ ID NO: 160617 - DNA, 75 bp, Homo sapiens
gctgttctgtgactgttcgcggcacctcatcacgctgagaatcaggctgaaagccgggcagcagtggaggggaca

SEQ ID NO: 160618 - DNA, 98 bp, Homo sapiens
agtaaacccctcaaggagtttgtggaggcctgtttgaataaggagccgagctttagaggtctgaagaatgtgtttgatgaggctatcctagctgccct

SEQ ID NO: 160619 - DNA, 98 bp, Homo sapiens
gcacggggctggtgggcatagtggctgccctgctggcaatccagtggggagaagatggccgtccatttcactatctcttctatactggcaaacagtca

SEQ ID NO: 160620 - DNA, 83 bp, Homo sapiens
ctttacagaggaatagtctacaaaggaagacttgtaacctggagaagagggtgcaaaaatgcagagtaataaaacttttaact

SEQ ID NO: 160621 - DNA, 82 bp, Homo sapiens
tgctggtatttcgaaggactctatccaacctattatattgaatggacctgagtggaccctttgatcacatcagtaaacatga

SEQ ID NO: 160622 - DNA, 98 bp, Homo sapiens
agcccgcgaccgcgccccggcccgacatggcgccggagctgaccccggaggaggagcagattcctccaaaggacctcaatcgtcttcaggtgtaaatg

SEQ ID NO: 160623 - DNA, 74 bp, Homo sapiens
gaggacccagtcctgtctcagccagtgacagtgaatctggagggctattcacgaaaagcagcagctctagagtt

SEQ ID NO: 160624 - DNA, 50 bp, Homo sapiens
atagactccatctatccatatgagaggaagaacttgtcgcttttcctaag

SEQ ID NO: 160625 - DNA, 97 bp, Homo sapiens
cgcatgtttaaacaaactgctattgccaaggttctccttactatgacaatgtccgccccctctcttaccctgattcggatgctgtgctgatttgctt

SEQ ID NO: 160626 - DNA, 90 bp, Homo sapiens
accgatgttaatggggtccggattgcagcacctggctttgtccagggatctgaaaccactttgcagtcgacatactcggataccagcgct

SEQ ID NO: 160627 - DNA, 97 bp, Homo sapiens
tgccaggtgctgtcggcccagcctgtggccctcatggagcacagcaactgctcgtcggagcccggcttctgggcacaccctcctggggcccaggcgg

SEQ ID NO: 160628 - DNA, 98 bp, Homo sapiens
tgagatacctgcttgccagatactatactggcaattgctggagaagattttgcaattgttgcttctgatactcgattgagtgaagggttttcaattca

SEQ ID NO: 160629 - DNA, 82 bp, Homo sapiens
gacatggtaatcctgaggaggaagagtggctcacagctgaacgaatggcaattgtggatcccagtcaaattctggaagggat

SEQ ID NO: 160630 - DNA, 75 bp, Homo sapiens
gacgctcaaccagcttctggtagaaatggatggacaatctctatgggaagcagaaggcaaggaccccggtcattt

SEQ ID NO: 160631 - DNA, 75 bp, Homo sapiens
ggaaattgtcccgaatccctgcagatttttaaagagcgagaagaagatttgaggcgtttgtctcgcccattggaa

SEQ ID NO: 160632 - DNA, 100 bp, Homo sapiens
ggccgggacccggttccccggcccacagtgggggtgtgcaaacccgagagaactggtttctcaactcattggatgctaaagaaatatatttggaagtaat

SEQ ID NO: 160633 - DNA, 74 bp, Homo sapiens
ggtgcgcgccggccgcggcttcagcctggaggagctcagggtgggcgcatgatgaactgcccaaagattctccg

SEQ ID NO: 160634 - DNA, 75 bp, Homo sapiens
caaagtccctgcccccaaagaagacatgaggctgagctggttccgggtcctgacagtactgtccatctgcctgag

SEQ ID NO: 160635 - DNA, 101 bp, Homo sapiens
cccattccaggctgtgcaggaagcctcctctattggcccaggaagcccacccagccccgccacgcagagcccagaaggaaagaaagcctcatgcctgagcc

SEQ ID NO: 160636 - DNA, 136 bp, Homo sapiens
ctttgaaatttgaaccatttgttcttcatgtgcagtgtcgacaattgcaggatgcacagattctgcctgggttactaggtgtctttcagaagctgattgcatccaaagcaaatgaccaccaaggtttttatcttct

SEQ ID NO: 160637 - DNA, 83 bp, Homo sapiens
aaacactggaagaagatgaagaggaactttttaaaattgacgcattggccctgcggctggcctgcatcggggacgagatggac

SEQ ID NO: 160638 - DNA, 88 bp, Homo sapiens
tgctggagaagtggatcaacctgaaggtctcggcgcggaagatggccggcggcgtggacggccccatcgggatcccgttccccgacca

SEQ ID NO: 160639 - DNA, 75 bp, Homo sapiens
gctgaccacccctaaaagcacctggccccgctacagcaaaccagttccagggtcacccccgagaggacaacaggc

SEQ ID NO: 160640 - DNA, 75 bp, Homo sapiens
cgccgcccgcctccgcctgccttctgccgccggccggcgcgtcgtccccacagatggagtctcgctctgttgccc

SEQ ID NO: 160641 - DNA, 50 bp, Homo sapiens
gaatatcagagccagaggaacatttggagacggttacctggcacgctggc

SEQ ID NO: 160642 - DNA, 75 bp, Homo sapiens
ctgtcctgaatgtggcttggttgtagtttttcagaagaagtgaagtcaagatgaagaaccatttgcttttctggg

SEQ ID NO: 160643 - DNA, 98 bp, Homo sapiens
ggggacttgatgttaacaaatgtgagattgccaggtacagtccttcagagattccagctgaaagcctgtggtatttaacaaggcccatcatcactggt

SEQ ID NO: 160644 - DNA, 97 bp, Homo sapiens
tcaacgtggacggcttgacagccctgcaccaggatttttttcccaggaagccatcccgtcagaggggttcaagtgatgaaagttggcaaactgcagc

SEQ ID NO: 160645 - DNA, 75 bp, Homo sapiens
ctggactatggcatctatgttatcaaccagggagactcatgcatctgtatgccgtgtgcgtggactgcctggaag

SEQ ID NO: 160646 - DNA, 90 bp, Homo sapiens
agcctgaaaatgaaaaggaagcttcaggtggagacagcccgaaggtggagccccctgagctgcccgctgatctgcagcactggatctcct

SEQ ID NO: 160647 - DNA, 50 bp, Homo sapiens
ctacgcctcctacgtttacctgtccatggaacaatggcgctgtcttcagt

SEQ ID NO: 160648 - DNA, 83 bp, Homo sapiens
gagagcgtgaccgagagcgcgaatatcgtcatcgttagaaggtagttgatgtcacttggcgatattcctgcaaacatgaagag

SEQ ID NO: 160649 - DNA, 75 bp, Homo sapiens
tctactgtgacttcagagacactgccaagcagccttagccctagtgtagagaggccctgccccttctggaaaacc

SEQ ID NO: 160650 - DNA, 80 bp, Homo sapiens
cccctttagccatgtggatacctacggagcacgagaaatacggcgtggggtttgaacatcctcatccctgtgttagaccg

SEQ ID NO: 160651 - DNA, 75 bp, Homo sapiens
gaccgctttaaatcaatgtttgcatacactgactgtataccacaggtgacagttaaaggatttgaacctttaatt

SEQ ID NO: 160652 - DNA, 76 bp, Homo sapiens
aaggttgaagtctgggatgtagtagacaaagctgacctgatctccagcttcctgctcatcaccatgctcttcatca

SEQ ID NO: 160653 - DNA, 100 bp, Homo sapiens
tcctcataatagaagatgatccttactattttctccagtttaacaaggagtctcaggagcaggggctgcggcagaggctgctggacgagcagttcgcagt

SEQ ID NO: 160654 - DNA, 51 bp, Homo sapiens
aaaatctcctggcaattacaagtatgccaagatggaaggaagcctcataca

SEQ ID NO: 160655 - DNA, 100 bp, Homo sapiens
ctgggattcgcgctgctgggcacccacggagcctccggggctgacatggcccatgaacatggacatgagcatggacatcataaaatggaacttccagatt

SEQ ID NO: 160656 - DNA, 75 bp, Homo sapiens
tgtagaagaccagaagtggatggagagcatttatgtttgaatcatctttaagtctggcggtcacaaagtggggac

SEQ ID NO: 160657 - DNA, 99 bp, Homo sapiens
gaactgcgcagacctggtggaggtgttaaatgaaagtagtaaacctattgatggcaattttgctgactgtggaagtgactcatccaaactccatgccag

SEQ ID NO: 160658 - DNA, 83 bp, Homo sapiens
gtgccttagacaagaaactcctttccttaaagggggatcggtggctcatttgctgagtaaatatggagccttcaaagaatcag

SEQ ID NO: 160659 - DNA, 60 bp, Homo sapiens
aacttacccaaagggaagtctgtgctccatacttgcttgcagtgcctacgtggctctggc

SEQ ID NO: 160660 - DNA, 100 bp, Homo sapiens
tgcctttgacctttttgaagcctttgcaaaactagttgctacattgcctgatgatgttcagcctgggcctgatttttatggactgccatggaaacctgta

SEQ ID NO: 160661 - DNA, 74 bp, Homo sapiens
gcaacggatccgtggggccacagacctgcccaaggggtcctactgggcaatagacaccaatccgaaggaagatg

SEQ ID NO: 160662 - DNA, 82 bp, Homo sapiens
agtggtgttaaggattccaacaacaattccgatggcaaagccgttgccaagccatccaacatattctttacaatggatgatg

SEQ ID NO: 160663 - DNA, 100 bp, Homo sapiens
gggaccccaggatgggggacaggaggctgcggggcctcagctgtggagtagagtgagattgtacaccccagtgttcacaagtaatgggaaagtcttcctt

SEQ ID NO: 160664 - DNA, 101 bp, Homo sapiens
tcattcatctggccaagttttatggttatgacaatgttaaggaatatctggagaggtctgaaggggcgtctcgattacctgagctctctgaaggtgaaggg

SEQ ID NO: 160665 - DNA, 73 bp, Homo sapiens
gacctcagaaaggagctctatgaactttgggaacggagcgtgctttggacaccatgaattttgatgttataaa

SEQ ID NO: 160666 - DNA, 78 bp, Homo sapiens
ggccatctgggtcaccatcctgtgcatggcacggctcaagacagtcctgaaatacatgccatggacaatattaccagg

SEQ ID NO: 160667 - DNA, 89 bp, Homo sapiens
gcatgattcaactttgtagtaagcttcgaaatttgctacatgacaatgagctgtcaggaatgatgagaagacagcagctgattacaaga

SEQ ID NO: 160668 - DNA, 80 bp, Homo sapiens
gggaacatgtacacctcatccctgtacgggtgcctggcctcgcttctgtcccaaatgctatcttctttgagaagtcaaat

SEQ ID NO: 160669 - DNA, 98 bp, Homo sapiens
cttacaacagggaagcagccctcaaggccagcggagtcttcagcacccccacaagcatgcagggtgaggacgcttgagcggaagttagaagcaaaaat

SEQ ID NO: 160670 - DNA, 82 bp, Homo sapiens
ctcaatatctgtcttcggtggactccttcggcagtccacccaccgccgccgcctcccaggacatcaaggacgccctgcgcag

SEQ ID NO: 160671 - DNA, 98 bp, Homo sapiens
gcaaattcgtcagatcaaagaacaaggttgtccgggtgccaaaaagcatgagtttctgaccagcgttctggacgcgctgtccacggacatggtccacg

SEQ ID NO: 160672 - DNA, 100 bp, Homo sapiens
cccagccagtggatacgttcagggtataaatgatctcgtcactcctttctttgtggtcttcatttgtgaatacatagatcttgatgtggaagaaatggag

SEQ ID NO: 160673 - DNA, 105 bp, Homo sapiens
ttaaaggagaggtatcagaaaattggagatacaaaacgggctacaccaatagaagtgttatgtgaaaattttccaggtggagtctcgctctgtcgcccaggctgg

SEQ ID NO: 160674 - DNA, 101 bp, Homo sapiens
gccacacatccagattaaaagccaggaagcacagcaaacgtcgagtgagagaatttcagaggcaggaaagtgtccggtcccagcataaaggtatccagtta

SEQ ID NO: 160675 - DNA, 78 bp, Homo sapiens
agctctgcaagtatgacttcataatggagaccaagctcaaacccctccggaaggaagcccttagtgtatacaaggaag

SEQ ID NO: 160676 - DNA, 97 bp, Homo sapiens
aatttctcttttgactactatgcattcctgattctaataatgatctcctacattccaaatctcattgcccaccagaaaggacagatagagaagcagc

SEQ ID NO: 160677 - DNA, 100 bp, Homo sapiens
ggaccatctcatcactaagcgggatcttgccctcagtgaaggagatattcacactttggtacgtttgcgggagcacatgggtgaaaagtatacaacttac

SEQ ID NO: 160678 - DNA, 126 bp, Homo sapiens
ctgactgcaaaggagacccaaggaacagtgccaagttagatgccgattacccacttcgagtcctttattgtggaggaagttcacaaatgggtgctaccatagtagatgctttggataccctttata

SEQ ID NO: 160679 - DNA, 100 bp, Homo sapiens
ccaagtcgagggccaagacgaagacaggccaattcctgtccccccagcagcatggcatcgtgtgctgaaccctctgagccctctgccccactgcccgccg

SEQ ID NO: 160680 - DNA, 83 bp, Homo sapiens
cgatgaggaaatgatggagctcagagaagcttttgccaaagttgtggttggaataaaaacagggttgaatgagttccagaaag

SEQ ID NO: 160681 - DNA, 100 bp, Homo sapiens
ggcagcggcggcggttgcgggggggaagtgactgggcggtgccggcgccggagacgatgccgttggaggcgccacatccaccacctggggaaccagctgc

SEQ ID NO: 160682 - DNA, 51 bp, Homo sapiens
cgcagtggtcgcttcttctccttggcacgcagatcctgtgcacagcccagg

SEQ ID NO: 160683 - DNA, 75 bp, Homo sapiens
cagaagaggtttggctttccagagggcagtgtagaggtcgtggagggcccccaagacccaacagagggatgccgc

SEQ ID NO: 160684 - DNA, 100 bp, Homo sapiens
gagaaagtggaagttcatcgtctgattaggcctctactacgtggacagtgaagggaaccggatttcaggggccaccttctctgtaggttctggctctgtg

SEQ ID NO: 160685 - DNA, 95 bp, Homo sapiens
ggctgtatgttatcaataatactttaatgtcattatcagtccgctctatcaagctgaaggaagacattctgtcctgcacttttgctgagttgagt

SEQ ID NO: 160686 - DNA, 100 bp, Homo sapiens
ccgcacccgccttttctctctctcctctggcaggatgaggcgtgcaggcctggcatgttacaccagacagctatattccatgccttgcagacctgtgcaa

SEQ ID NO: 160687 - DNA, 100 bp, Homo sapiens
cgcagttggagctagaggaagaatgggtgatagaaagagacagcctgctggatactcatccagctttctcatagaccaatgggcttggagcattaaggcc

SEQ ID NO: 160688 - DNA, 75 bp, Homo sapiens
attccgtctcttctccaagttctggccgtcttcaccctcagcttgcagaaatgaaaattggacatttgacatttg

SEQ ID NO: 160689 - DNA, 100 bp, Homo sapiens
ctacttggcaactttcctggcccttttgaagaggaaatgaagggtattgccgctgttactgatatacctttaggtaaattgggatattcacaatgtatgg

SEQ ID NO: 160690 - DNA, 75 bp, Homo sapiens
aatacccctgctgacatttggagcacggcatgcatgattgatatcagtaaatgccattatttagtggatttggac

SEQ ID NO: 160691 - DNA, 74 bp, Homo sapiens
ctacagaaacctcgtctccctggggtctttttggagttcctgagctgagtgccccagaaggatttcatattgca

SEQ ID NO: 160692 - DNA, 90 bp, Homo sapiens
acgctctggggctcagccaggcctgcgcgggcccgaggccggaggaacccggactccggcgtagcgataacagcgagaatcttggaggcc

SEQ ID NO: 160693 - DNA, 100 bp, Homo sapiens
ctcggacgccagcggacacgcgggcgagggggcagctggcattttatgctatgtgggagcctatgtcttcatcacttatgatgactatgaccacttcttt

SEQ ID NO: 160694 - DNA, 95 bp, Homo sapiens
ggcggattcgggaactgactgctgtagttcagaagaggtatattcaagagcaaatgaccaagagccatgtgggtggtggttggctaaagttcgga

SEQ ID NO: 160695 - DNA, 90 bp, Homo sapiens
cgtacaggtagccccgccgccgcgcacctgccttcgctcccgcaccgctgacagcagccatggcgagcggcagtggagacagcgtcaccc

SEQ ID NO: 160696 - DNA, 50 bp, Homo sapiens
gtcggctcccacgcttagccagctcccggggcctttacaacaactaaacg

SEQ ID NO: 160697 - DNA, 100 bp, Homo sapiens
cttgggaacgaggggtgaagcggcccaggtgagggaccgaccagctgggcatgttcacgcacaaggagtttgagcagctggcccccgtgctggatggttt

SEQ ID NO: 160698 - DNA, 76 bp, Homo sapiens
cccaggggagttctctgtgtctgtgaagctgtgtggttccgggtgctggtgctgtggaagtggcaatggcagaagc

SEQ ID NO: 160699 - DNA, 74 bp, Homo sapiens
ggccttcactcttcttctctgggtaccatgtctaccctacctgtaggaacacatccgggattctaggattttct

SEQ ID NO: 160700 - DNA, 82 bp, Homo sapiens
tccagagcgccgcgcacttcgtcatgttcttcgcgccctggatcatgcggccagatgatgccaacgtggccggcaatgtcca

SEQ ID NO: 160701 - DNA, 75 bp, Homo sapiens
gaggccaacgacctgtttgagagtgggaacatgacgcaggtctcctctgagcctccggcctccataagacccaaa

SEQ ID NO: 160702 - DNA, 75 bp, Homo sapiens
gtgtggaaccgcacgcgtggcatacggaagcttcaagaatccagaggctttaggaagaagataaaacgccttgag

SEQ ID NO: 160703 - DNA, 74 bp, Homo sapiens
tggccagctgccgcgactgggaggagcgccggaacgccgaggcccagacctcctgccccccgaggtctgcagtc

SEQ ID NO: 160704 - DNA, 70 bp, Homo sapiens
gattactacgacaccggcgaggaacttggcagtcctcatcaccgggggcatcgtggccacagctgggcgc

SEQ ID NO: 160705 - DNA, 75 bp, Homo sapiens
aggaggggcggccaagcgctgttgaaggcaattccatcgcctccatcccagatgaagcatttaatggattaccaa

SEQ ID NO: 160706 - DNA, 78 bp, Homo sapiens
cagagaaagataggcggccatggtccaaccttgaaggcaaaaattctgacgttctcaagagaccagctctgcccccgt

SEQ ID NO: 160707 - DNA, 51 bp, Homo sapiens
ctgcgaattcagtctggatgagttgcaggcaaagaccgaatgggaaggtgc

SEQ ID NO: 160708 - DNA, 76 bp, Homo sapiens
cctgtctttctactgcaagagcccagtacccctcagaccagagaatacaatgcagatcttcgtgaagactctgact

SEQ ID NO: 160709 - DNA, 100 bp, Homo sapiens
gcggacatcactttagaccctccacctaattgcaggtataagcagtttagccaaattttgaagaacattggagaaaatgaaggtggtattgataagtttt

SEQ ID NO: 160710 - DNA, 99 bp, Homo sapiens
catcagacatcaaagagttcacactgaagagcaaccctgaaaaattactgaatgtgaagaaatgtatacaaatgctctcagtccagccagacaccaagc

SEQ ID NO: 160711 - DNA, 75 bp, Homo sapiens
cgctgccgccgccgcgggagccgctgcccgaactcccggcccgaactccaggtgcgaaattcatccacacttctc

SEQ ID NO: 160712 - DNA, 90 bp, Homo sapiens
tgggatagcgttgcaaatccttaaaagagtcttaacggagactacctaggtggagaagcgtactgggccggcggcctgcacctctacacc

SEQ ID NO: 160713 - DNA, 100 bp, Homo sapiens
gagtaccggatctgcatgccgctcaccgtagacgagactgtgccctgtccacggtgcctcctgcatgtcctgctgccctgagctgtcccgagctaggtga

SEQ ID NO: 160714 - DNA, 100 bp, Homo sapiens
tcttccttccggagccatgtcagaaggagtggacttgattgatatatatgctgacgaggagttcaaccagagaggagcaagcaagggagctgtacaggag

SEQ ID NO: 160715 - DNA, 100 bp, Homo sapiens
cgaggttcgggctggttgttccgttgcgagctgcagctgcgatctctgtggtaggcccaggttgggcccgaaggcatcctgcagaacggggctgtggacg

SEQ ID NO: 160716 - DNA, 90 bp, Homo sapiens
cgacagagagaaggcaatgagccgacccatcttgtacagcaactggctgtcaaaggaggaggcaaaacagattcagaatctgcagaaagc

SEQ ID NO: 160717 - DNA, 76 bp, Homo sapiens
ggaggaggagcggacgtcggcttctccccgcgggagcccccagcatggaaatacaaacctggtcgatgtgatgata

SEQ ID NO: 160718 - DNA, 95 bp, Homo sapiens
tcacggggcgcgcatgccagggaagactacaaggttactcactataaacaatatccacccaacacaagcaaagtttattcctactttgaatgccg

SEQ ID NO: 160719 - DNA, 96 bp, Homo sapiens
agcgggaagagactggagatgaggaggatgggagtcccatcgagagctgcttttgcacattttcctgaactctatgattttgccctctcaaatgtg

SEQ ID NO: 160720 - DNA, 80 bp, Homo sapiens
ccaagaagcacggcaccaaaaacaagcgcggtgttcaagcagccctggccagggatcatgcgcacagtctatgggaacca

SEQ ID NO: 160721 - DNA, 74 bp, Homo sapiens
aatccccccacaacagcagaggctcatctacagtggcaagcagatagtcatcttagtgggatttggggaagcaa

SEQ ID NO: 160722 - DNA, 75 bp, Homo sapiens
agctgtacttgtcacctcgaattgagcacccctcatatggaaaatttgaaatgcagaggggaaacagtagcaaag

SEQ ID NO: 160723 - DNA, 90 bp, Homo sapiens
ccttgaaggacaagaacagcgccgtcaccagcaggtattgttgcagcatctggcagtgagactgaggatgaggacagcatggacattccc

SEQ ID NO: 160724 - DNA, 100 bp, Homo sapiens
gtgcaagtattttcagcgagggtactgtatttatggagaccgctgcagcagtggacgtcagctcagcgaggtcttcatccagctgccctcgcgaaaggag

SEQ ID NO: 160725 - DNA, 127 bp, Homo sapiens
gcgacggcggaacccgtgggcctgtggactgcagcctcggcggtcagcagatcttcagtgtctattggatttttccaagagaaagtttgtaaaattccttacactgtagatgtggatcagatacgat

SEQ ID NO: 160726 - DNA, 90 bp, Homo sapiens
gccatgacgacggcaacttcttcccggggagtggggctgtggatgaggtttccaaccaaggccagtcgctcagaaccctgggctctgcct

SEQ ID NO: 160727 - DNA, 102 bp, Homo sapiens
ctacaatgtggcctgcatcctaaccctgcctccctaccagcgccggggctacggcaagctgctgatcgagttcagagtgtttggctgccccacaactgtggc

SEQ ID NO: 160728 - DNA, 100 bp, Homo sapiens
gtcaaatcccggtggttggggtggtgacggaggacgatgaggcgcagggtaaatgggaagttggtagctctgaaggtgatcaggctgcaggaagaagaag

SEQ ID NO: 160729 - DNA, 78 bp, Homo sapiens
tggactcctatatgagagtcgcgagtgtgcagcagtttttccagaggcctcaaatacagcctcctagagctaccatcc

SEQ ID NO: 160730 - DNA, 75 bp, Homo sapiens
cgccgcgcgcccgcgccctccgcgcgacgccagaccatcaacgcactgaaggggaggatctcggaactgcagtgg

SEQ ID NO: 160731 - DNA, 98 bp, Homo sapiens
caacatcctgtcacaggccatgctctggcaaaaacgtgtcttcaaaaacaaacatatttaaaagattttacttctcatctccaggaagaaccagctag

SEQ ID NO: 160732 - DNA, 97 bp, Homo sapiens
ccgggaccccgaggcgggagcgcgggctgggccgggctgggctacgcgcacgggctcggccgccgcccctgccgatgactcctcctctgagagtggc

SEQ ID NO: 160733 - DNA, 82 bp, Homo sapiens
gtgacagcgacagcgaggagcagacccttcagctgtgagctggcaccgagaggatgttcccgctgcctgtcaccaacgggaa

SEQ ID NO: 160734 - DNA, 100 bp, Homo sapiens
ggtgagcggcctccacctaaacgacttactagtttttgcagaagggaagcctttggccttgccagtgagaacatcctacaaagcatttagtacaagatgg

SEQ ID NO: 160735 - DNA, 100 bp, Homo sapiens
gtgaaggtggagccctcaggcatcacatgtggagacccccctgagaggttctgctcccatgtaatcattaccaaatgaggaggaaaggacgatgtcatcg

SEQ ID NO: 160736 - DNA, 101 bp, Homo sapiens
tacatattcaccttgaagaggaagacggggcggaagaccaagatcatcgagatgggatcatagacggtatttctatgtaaacgaacagtcgggcgagtctc

SEQ ID NO: 160737 - DNA, 101 bp, Homo sapiens
cgggattctgggtgatcctggccaccaggggaagccggtatgtggaccgagtgactgaattcctccagcaaaagctgaagcagtcccagctgctggctttg

SEQ ID NO: 160738 - DNA, 83 bp, Homo sapiens
tggttcagttgctgagaagcctgacataccaggactgcctgagacaagccacaagctgttttcggctttgtgagaaaccttac

SEQ ID NO: 160739 - DNA, 96 bp, Homo sapiens
ttattcctactaacgtcctgtgtcactgagcctgtgaagttgaagcagggaaagtataccaggtctcctcaaaagagcatatgcagcctttcaagg

SEQ ID NO: 160740 - DNA, 100 bp, Homo sapiens
aatggctggtctcctactcccagatgcatccgtgtcagtgctgtcctggagccgagagctgccttgcgcttggcgcgccctgcacacctccccggtctgc

SEQ ID NO: 160741 - DNA, 100 bp, Homo sapiens
gaactcctgggctcaaaccatcctcccacctcagccttcaattctgtggtgttcttggtcacacatttatggagtttctgaagggcagtggagattactg

SEQ ID NO: 160742 - DNA, 50 bp, Homo sapiens
ccaggagtcatcggacgccagaatctggtacactgaggaggggacggctc

SEQ ID NO: 160743 - DNA, 90 bp, Homo sapiens
gtcggactcagactccaggtgaagcagccagcagaggtcagagagagacagctcacgttccggggactggtgattgcagctggaagtgcc

SEQ ID NO: 160744 - DNA, 100 bp, Homo sapiens
acgagattccggttgagtaccaaacagtccagagactcatccccgccctgtgggagaagcacagtccacagactggacgccgggcatggcagtgccacgg

SEQ ID NO: 160745 - DNA, 75 bp, Homo sapiens
cgccacctacagccgcttgctagaggttgaggacgctcagcctccggtgtggctgtctctgatggtgtcatcaag

SEQ ID NO: 160746 - DNA, 95 bp, Homo sapiens
cgtcgtacatggcttcctggacaccaaccctgccatccgggagcagacggtcaaggagcttctaagtaggacatccttagaaactcagaagttgg

SEQ ID NO: 160747 - DNA, 100 bp, Homo sapiens
gagagggattcgtggtgaaggtccggggcttgccctggtcttgctcggccgatgaagtgcagaggtttttttctgctcctattaaggaaccaaaaaagtt

SEQ ID NO: 160748 - DNA, 100 bp, Homo sapiens
ccggatcgctgtcattaaaaattaagcgtggcttttgaggaagatgtgacaactaccggagttttgtcaaagcaacaggcttcacaagtcctggttagga

SEQ ID NO: 160749 - DNA, 100 bp, Homo sapiens
gggatctaggcgacatggagccattgaagggaacaacacccttgatgaataactgaagtgaagtgatggactccgatttggagagtagtaagacgtgaaa

SEQ ID NO: 160750 - DNA, 85 bp, Homo sapiens
ccagagctgaggactgcctgtttgcaggtattagaaaactactcggatgctccaatgacaccaaaacagattctgcaggtcatag

SEQ ID NO: 160751 - DNA, 100 bp, Homo sapiens
aacccgtgtacgtgcctgtgcctaaaggaagtcgagacaacatgagtgtgattttgatctgttttccaaatgcacccaaagtatcgccagaagcagtgaa

SEQ ID NO: 160752 - DNA, 75 bp, Homo sapiens
ggaaactgcatgctgttgtagaaactctagtcaaccataggaaaggtatttattacagtatcaggagccaatacc

SEQ ID NO: 160753 - DNA, 83 bp, Homo sapiens
cgaactagagggggctttgggatcaccagtcggagcccttcgtgttacaggttggggaccagattctagaagtgaatgggcgg

SEQ ID NO: 160754 - DNA, 106 bp, Homo sapiens
gtgggggagccctgccctcctggttcggcctccccgcgcactagaacgccgccctgcccgcaggccatgtggcccccgctgttgctgctgctgctgctgctcccgg

SEQ ID NO: 160755 - DNA, 100 bp, Homo sapiens
ttgaatgactggaaactgattggaaactctttgggaaagccactcgaaaagatccagacatttaatgtggatgcaccatgccagaccgtggaagatttaa

SEQ ID NO: 160756 - DNA, 100 bp, Homo sapiens
gccgatatggaacccaagcagtggcgaagggaatcgcaaggctcttccctgaccattttctactgtccctgcgcgagattcggtttatgctagagacgat

SEQ ID NO: 160757 - DNA, 101 bp, Homo sapiens
tgaacggctagcgaagaggaatcgcagagccaagcgggcccgagcaatgcccgaggaggagccagtgagaggtcctggtaactttcgaccgactttcccca

SEQ ID NO: 160758 - DNA, 90 bp, Homo sapiens
gacagcttgagccccatcgtggattccaagacatccctgctgagagagccaagtcatccgtccttggctcaggatttggagagcttgcac

SEQ ID NO: 160759 - DNA, 100 bp, Homo sapiens
atcaactctcctaaagatgcatcttcctccacattccctacactgaccaggaactgtggctgcaccatctgtcttcatcttcccgccatctgatgagcag

SEQ ID NO: 160760 - DNA, 100 bp, Homo sapiens
tgcaaatctgcagaaactcacacaacttgtaaataaggaatccaacttgattgaaaaggctttgatgacagtagggaaagaaccatttcctaccatttac

SEQ ID NO: 160761 - DNA, 90 bp, Homo sapiens
cagtggcatggaccacacccagcggaagccatgtgtttatactgtgggatctcccataaacaacagggccctttttccatgccaggagcc

SEQ ID NO: 160762 - DNA, 82 bp, Homo sapiens
ccaggaaccttgaattaactgataaggacttcctcgttctgcccatcttcctaacaaggctatggctgataacagcagtgat

SEQ ID NO: 160763 - DNA, 75 bp, Homo sapiens
catttacagaaagagtcaacagcagtggcaacaggtttttcttcccccagtccctcagctgctgctgctgctcag

SEQ ID NO: 160764 - DNA, 100 bp, Homo sapiens
gacaaccgaagcattggggacctaggagcccgccacctcctggagcgggtggcccccagcggtggcaagctgaggagccaaaggagaagtcctctcggaa

SEQ ID NO: 160765 - DNA, 100 bp, Homo sapiens
gccattcccaaatgccccaaggatgaagaacggagacgtgctcaagtaaagctctttgtgacagggcttttcagcttaaatcaagatattcctgctttca

SEQ ID NO: 160766 - DNA, 99 bp, Homo sapiens
cgtttggatcacaaccgagctaaagctcaaggtatatttacttctggcacatgggaagagaaatcagatgaaatttcctttgctgacttcaagttctca

SEQ ID NO: 160767 - DNA, 75 bp, Homo sapiens
tggtgcagaacatgcgtgcgtttggcgggatcctggtgggtgagttctgcagtcagggtgtccgtgagggcctca

SEQ ID NO: 160768 - DNA, 100 bp, Homo sapiens
ccttcggggtctcccctcaacctcaactccatgcgagaattagaactgcagcgtcagcgtgacttgcataagatcaagcagcttcagcagacagtgagag

SEQ ID NO: 160769 - DNA, 75 bp, Homo sapiens
gacggcgacagtggcggcggcgccatggcagggcttgcagctttccgcttggccctcatccagcttcagatttct

SEQ ID NO: 160770 - DNA, 75 bp, Homo sapiens
tcgaagtgtgtgccactgtttataccagctctggattaatcgaattacagctgctagccaggaacatggactgaa

SEQ ID NO: 160771 - DNA, 100 bp, Homo sapiens
ggggaccgagcctgggaggccggccggtgccagcacctttcggcttctgagacggcggcagcagcggcattcaggcagtggagctactgctgtggttcag

SEQ ID NO: 160772 - DNA, 100 bp, Homo sapiens
ttggcctgatgctgaactctcgagggtatattgaagcaagtcaaagattacattaaacagtgtagcaaatgccaggagaaactagatcgatcccgtccaa

SEQ ID NO: 160773 - DNA, 101 bp, Homo sapiens
tgacgggacagtggccttcgcgctaacgaaggcaggatgtagccaatcaaatgtgcaccaagaccaaggaggagtgtgagaagcactatatgaagcatttc

SEQ ID NO: 160774 - DNA, 100 bp, Homo sapiens
gtcagttctgtgaaccccagtgtaaccaccatcaaaaccattgaagaaaattcttttgggagccaaacccacggagtctgctacaccatttttgatttgg

SEQ ID NO: 160775 - DNA, 90 bp, Homo sapiens
aaggatcatttgaagaatatttaaagcgtttggaaaatccacagatttccaggccctccacctgtcaacaatgtggcatcctcacatgca

SEQ ID NO: 160776 - DNA, 48 bp, Homo sapiens
actgcagcactggtggaacttgagaaaagactgtatcttcaccattga

SEQ ID NO: 160777 - DNA, 78 bp, Homo sapiens
gatcgctgtgatcgtcacttgtcactgtatatatgccttatttcctgggtccatgggaagcatgagtctgttgggact

SEQ ID NO: 160778 - DNA, 75 bp, Homo sapiens
caatggcatttacagaaagagtcaacagcagtggcaacaggtaatctatttaaagaagacaccagaagaagccta

SEQ ID NO: 160779 - DNA, 100 bp, Homo sapiens
cgcacagaagcattagaagccttacagagtgaaaaatcacgggcaattgaaggaacagactaaaaatcgtgtcctggaaggaaactacaggtactaccag

SEQ ID NO: 160780 - DNA, 75 bp, Homo sapiens
agaggttcacaaaacaagtgtagtagcaatacgaggattctctccaccacatagaatctgcagttttgaagaggc

SEQ ID NO: 160781 - DNA, 100 bp, Homo sapiens
gaaggtgcaaggggtgtttttccgtaagcatactcagatagctcgtgaggctgaggcagccatgttccaccgcaagctgtttgaagaacttgtgcgagcc

SEQ ID NO: 160782 - DNA, 51 bp, Homo sapiens
acaattccatgaatgaactgaagtgctggccattcaggcccgaaagcggag

SEQ ID NO: 160783 - DNA, 75 bp, Homo sapiens
gagaaacatgcagattatatcgcatcctatggctcaaagaaagatgattatgtttcccaggcagctgcagacttg

SEQ ID NO: 160784 - DNA, 102 bp, Homo sapiens
tgagcagtttacacatctcacccaattcaggtgtcatggagaaactccagctgggcccagagattctgcagcgggaaaatccaaggcttatttatgccaggc

SEQ ID NO: 160785 - DNA, 82 bp, Homo sapiens
ttctcttgaagcagatgcgaagatatgtaactggttcatcaatgcccggcggcggcttctcccagacatgcttcggaaggat

SEQ ID NO: 160786 - DNA, 90 bp, Homo sapiens
gggttcagttcgtcatggggctgtttggaaagacccaggagaagccgcccaaagaactgccttaaattggaatgtgagaaactggcaagt

SEQ ID NO: 160787 - DNA, 100 bp, Homo sapiens
cctacccccatcactgcttccctcagccataacaggaccaggaagaaacaggctcctgccagcaccgacagcaacgaaaatgttcccacggagatcagga

SEQ ID NO: 160788 - DNA, 51 bp, Homo sapiens
tgcagaagcctaccttgggaaggaggaagatgaagattttgaagaagaaag

SEQ ID NO: 160789 - DNA, 100 bp, Homo sapiens
cggggtggagcccatggaatcggtcctggaggacagaaaaatggctacaaacttcctagcacatgagaagatctggttcgacaagttcaaatatgacgac

SEQ ID NO: 160790 - DNA, 100 bp, Homo sapiens
tgcagaaccaacgaggtggccgaatcttccttcaggatatcaaggtgacagccgtgagggtgtatgtgaacagttcctctgagaatctcaactacccggt

SEQ ID NO: 160791 - DNA, 129 bp, Homo sapiens
atgagaaagcaggggacatcgcactcctgtatctccaagagatagaaaggatgccagaattccagaaaagttcagttcgaatcaagaaccctacaagagtagaagaaattatctgtggtcttatcaaag

SEQ ID NO: 160792 - DNA, 99 bp, Homo sapiens
ggcctgtccagtttgaaattctcagtgatcagtcagtcaactttggttttagtaagtttccctagaaagagaacgacaacatgatcaaacacatgttca

SEQ ID NO: 160793 - DNA, 75 bp, Homo sapiens
gtggatgggggtcaccgtccagagccaaggtccagggggcaaggtcgtggcagcctggcatcctcgctacaacct

SEQ ID NO: 160794 - DNA, 76 bp, Homo sapiens
ctggagcaggtcacctgttacaagagacagggtctcactgcattgcctagtctggtcacggactcctggcctcaag

SEQ ID NO: 160795 - DNA, 75 bp, Homo sapiens
ttgaaattatctctggtgctgcagctctagtcgtccttgtctactccactaccaaatgttgaagttcttcaagaa

SEQ ID NO: 160796 - DNA, 100 bp, Homo sapiens
aatccttgctctgcgatggactattccctggctgcagccctcactcttcatggtcactggagaagacagactgctgctttggacctgttggtaatgatgg

SEQ ID NO: 160797 - DNA, 100 bp, Homo sapiens
cctggctcagcaagactctcgagcccatgactctgtttggaaacaagatcaagtctgtggctaagagagcattctcggggctggaaggcctggagcacct

SEQ ID NO: 160798 - DNA, 82 bp, Homo sapiens
cggcgagagtgggcgagaacgtccactgcgggccggcgaaagctggcccagctgagagccagcctggaggttacccagcagc

SEQ ID NO: 160799 - DNA, 97 bp, Homo sapiens
gctccagcagccttgttagggcgtggcctgaggcttggataagtggggatgtacagttacccagcacgtgtacctcctcctcctcctattgctcggg

SEQ ID NO: 160800 - DNA, 76 bp, Homo sapiens
ataagactcgctatatggggaaggtaacccgtgtccatgccgcccctgcagccccttctgccacagcattgcctgc

SEQ ID NO: 160801 - DNA, 98 bp, Homo sapiens
gcggggaccgctgtgctctcgagctacatggaccccatgaacgagtacaacgcgctgaacgaggccaagcagatgatcgccgtcgccgacgagaacca

SEQ ID NO: 160802 - DNA, 98 bp, Homo sapiens
ctgcacccgctcagcgagctcctgggcatcccgctggaccagagctcttcagtatccccatcagccagtttccgaggtgctgagaagcacagaaactc

SEQ ID NO: 160803 - DNA, 87 bp, Homo sapiens
ggcctgcagcgggagctggacggcgagcgcgagcggcgcgagaaagaactctgcgaccttcaagtcgtttgaggaccgagttgggac

SEQ ID NO: 160804 - DNA, 100 bp, Homo sapiens
caaaatatggcaaagaaacctattctgaggcctagttccccgagagcgttcagacagtgggggctcaagctcagagccatttgaccgtcatgcacctgct

SEQ ID NO: 160805 - DNA, 100 bp, Homo sapiens
tgaatcctttctacaaggagtggggcaaacttgaagataaatcttttgactccagctctttagaggatctaaagtgaccttgatggacagtggaagaaat

SEQ ID NO: 160806 - DNA, 100 bp, Homo sapiens
cgctactcctggcagtgcgtcaatcagagcgtcctgtgcgtaagactttgaccccgacgcaggcttcagtgattgccgcggatcagaagcctgagcactt

SEQ ID NO: 160807 - DNA, 108 bp, Homo sapiens
ctaacccttgtgattttggccatcagtcctgttcttggactgtcagctgctgtctgggcaaaggtctatgttaacaatgaatgggcaaccagtgttggggaaggaggg

SEQ ID NO: 160808 - DNA, 100 bp, Homo sapiens
taaacagtgcacttaaacagaaaatggaaggtggaattgaagaattcaaacctcctgaggcatctatcctttctctggtgacaaaaataaacaatgtgat

SEQ ID NO: 160809 - DNA, 51 bp, Homo sapiens
gctggggacggcgaccctaggagagcggccagcctcccaactacgagatgc

SEQ ID NO: 160810 - DNA, 107 bp, Homo sapiens
tctacctcctgcgaggcctcccgggctccgggaaaactacactggccaggtgccctacgagacgctgaacaaacgctttcgcgccgctcagaagaacattgaccggg

SEQ ID NO: 160811 - DNA, 100 bp, Homo sapiens
ccccttcagcagcagcctacagaaccgggcagaggtggacaagatcaaacattatctatgtggccagcaatcattttgtttggagactcatccctgtccc

SEQ ID NO: 160812 - DNA, 101 bp, Homo sapiens
gttggctcagatacactctctgatttggggatctctagcctacaggatggcttggccttgcacataagtttttggctttcacccccaaccagtgaccaaag

SEQ ID NO: 160813 - DNA, 100 bp, Homo sapiens
tctactgtaatcggggtacggttaattccaagatcatggaaaatgctgagattaacaatatcatcaagattgtgggtcttcagtacaagaaaaactatga

SEQ ID NO: 160814 - DNA, 75 bp, Homo sapiens
ctcgggagcaggcctcgctgtttgcgcaggtcagcaatctgaagatggtcttacggagcctagtagagtactccc

SEQ ID NO: 160815 - DNA, 115 bp, Homo sapiens
aataaatacaaggtcacctaaaagaaaccagagggttgcaatggttccacagataatgttaattcaagactctcgaagagaagcttcagtgcagatggatttgagatgctacaaa

SEQ ID NO: 160816 - DNA, 82 bp, Homo sapiens
tgaaatcgccaatgccaactcccgaaacaagcctccaggtctgcttccccgcaaaggactatacatggcaaatgacttaaag

SEQ ID NO: 160817 - DNA, 75 bp, Homo sapiens
cgccatccagccaccattccaagggaccctgaagtggctgatggaggagagctggtcctggggggctcagacccg

SEQ ID NO: 160818 - DNA, 51 bp, Homo sapiens
atttgtttggatatcctgaaagatcaatgatacgaggaatgtctattgacc

SEQ ID NO: 160819 - DNA, 100 bp, Homo sapiens
gagaatggagctgaagaaggcatcgtcaaatcaggccaaggagcgggagctggaactgaagaacacctggtcagagaacaagctcagccgccgtcagacc

SEQ ID NO: 160820 - DNA, 75 bp, Homo sapiens
tggaggacgagcaaaagatgcttaccgaatccggagatcctgaggaggaggagcatattatttaatatctagaag

SEQ ID NO: 160821 - DNA, 100 bp, Homo sapiens
cgaggatgaggaggagggggacgagcagcagcggctcctcaacacccctcgaaggttgaacaaattgaagcagggacaccaggccgactcagagtagtag

SEQ ID NO: 160822 - DNA, 83 bp, Homo sapiens
ttttgatggccatggcataaggaactctatcccaggaatacagctttgcattaggcaacttcagagtggacgttggattaccc

SEQ ID NO: 160823 - DNA, 82 bp, Homo sapiens
ctttacaaccagaagctcagggagaagttgaaggaggaggagaacacagtggagaaccatggagtctggcagtaccgccgcc

SEQ ID NO: 160824 - DNA, 98 bp, Homo sapiens
ccgagtccggaccggagactttggggcctaactagttgaatacagataatcatgaggcccaagaccctaaggaacagtgcagccaggagtcggaagga

SEQ ID NO: 160825 - DNA, 90 bp, Homo sapiens
agaactgttccttcagccaaagaaacaagccgtggaataggtgtatcaagtaatggtgcaaagcctgaatatttaaaagacccaactcag

SEQ ID NO: 160826 - DNA, 100 bp, Homo sapiens
aggatggaggctggtgggagggacagatcaacggcaggagaggtttgttccctgacaactttgtaagaatcctgtttgaccaaactcagagatcaattaa

SEQ ID NO: 160827 - DNA, 75 bp, Homo sapiens
cgcggagcggacccagcaatgacgcaataccaagaaggagggtgacctgatagctgctcaggctcggctgaagga

SEQ ID NO: 160828 - DNA, 100 bp, Homo sapiens
gatcttcaccttaaaatcaaagccacaagacactgctgataaggatggtgatttgaagatattaaagctagaaattggaactagaaaatcaaaagaattc

SEQ ID NO: 160829 - DNA, 75 bp, Homo sapiens
gaaattattgatgagctcaaggctggcaaaatcccaaaaccagggccaaggtcaaaatgcagatcttcgtgaaaa

SEQ ID NO: 160830 - DNA, 80 bp, Homo sapiens
tggatgattgtctctcggcggcggagtcggaagacctccgtgtggatggccgtggctgtgaggactaccgatgtgtcgaa

SEQ ID NO: 160831 - DNA, 82 bp, Homo sapiens
tttgacttggtgttgaaagtgaaatgtcatgcctctgaaaatgaagtttcttatctcagtcatcactatggtgcttctgacg

SEQ ID NO: 160832 - DNA, 98 bp, Homo sapiens
gccgccgaagaggccccgctcccgggtcggacgcctgggtctgccgggaagagcgatgagaggtgctggagaatctggtaaaagcaccattgtgaagc

SEQ ID NO: 160833 - DNA, 100 bp, Homo sapiens
gcccgagtgctggtagacggagaagagcacgtcggtttccttaaaattaaacaaccaccatgtcgagcaaaaaggcaaagaccaagaccaccaagaagcg

SEQ ID NO: 160834 - DNA, 50 bp, Homo sapiens
ggatcagagagggctaccttgtgaagaagatttggccaattgggagagaa

SEQ ID NO: 160835 - DNA, 100 bp, Homo sapiens
ttgaatgtgtcaaaaccaaacaccctcagctccacattgagagcaaaatctacaagatgatgcagggaggaggtcgcgtctccttcttcacctcggggtc

SEQ ID NO: 160836 - DNA, 50 bp, Homo sapiens
gagccacacccacttcaagataatgatctgtcctctccagactccaccct

SEQ ID NO: 160837 - DNA, 100 bp, Homo sapiens
aagttacaaatatgggatacagcaggacaagaacgattcagcggagtttaagagagctgtgaaagtagcaacaggacaagaactctcaaacaatattttg

SEQ ID NO: 160838 - DNA, 83 bp, Homo sapiens
accaaggatgaatacttgatcaacaggaagaggatcacctagcccgggtagaagaggcaatcacccgtatgcttgtgtgtgcc

SEQ ID NO: 160839 - DNA, 96 bp, Homo sapiens
aagttattggaagaggtgcttttggtgaagtgcagttgagtcaagggtccagagaaggaggagaagttgagacaggcggtcaagcaggtgctgaag

SEQ ID NO: 160840 - DNA, 74 bp, Homo sapiens
ttcccccaagttatcaaatccaagggcggtgttgtgggcatcaaggctgtgctcctggcggacatcctccccac

SEQ ID NO: 160841 - DNA, 75 bp, Homo sapiens
gtctattctgaactcaacttctgaaatttacagaaacaaactacatctcaggagacagagtttcaccatgttgcc

SEQ ID NO: 160842 - DNA, 96 bp, Homo sapiens
agaagaatcaattaccaaaggtgatcttgagaaatcagagcctcattcccttagtagtgaagcattgatgaggagagcagtgtctttggtaacaga

SEQ ID NO: 160843 - DNA, 88 bp, Homo sapiens
tggccgattactgcgagaacaactacatacaggttttgacacaagggcgcatatcttcaaagcacctagtacctcctaccattgtcaa

SEQ ID NO: 160844 - DNA, 100 bp, Homo sapiens
agggagtgtcgagttgcaggccccaatggcagctggaagtgcactgtctgtgacaaaatcgcgtctatggattctggggtgccacaactcagactttcgg

SEQ ID NO: 160845 - DNA, 90 bp, Homo sapiens
agaacgggggcacctgcctgcagcacacccagagatggagtttcactgtgtcagccaggatggtctcgatctcctgacctcgtgatccgc

SEQ ID NO: 160846 - DNA, 74 bp, Homo sapiens
ccaagatgcatggacccagctcagcgggacgcgccgctggagaatgaagggactttgaacatgtcggggatcgc

SEQ ID NO: 160847 - DNA, 97 bp, Homo sapiens
catgaagacttgaacttaatacagcaagaaagaccatcaagtttaccagccagtactgatgcaggcactgcaggagccctgactccacagcatgttc

SEQ ID NO: 160848 - DNA, 74 bp, Homo sapiens
gggaccaaggtggaaatcaaacgcgaggtagccctctgttgattggtgtacggagtgaacataaactttctact

SEQ ID NO: 160849 - DNA, 74 bp, Homo sapiens
ctacccccagcaccacctccagcccctgcgcctcggtggcagtagagaagagcatcacagaagttgctcaggag

SEQ ID NO: 160850 - DNA, 100 bp, Homo sapiens
cgctcgtcctccacccctggaatccctgtctgggtgcggactcggagaagccctcgagcatccccacagaataactgaagtgaagtgatggactccgatt

SEQ ID NO: 160851 - DNA, 75 bp, Homo sapiens
gaggcaggcatgattgtcactgatggttgtcaatagggtgactggaaatttcaagcatgcatctcctattctgcc

SEQ ID NO: 160852 - DNA, 75 bp, Homo sapiens
attattttgaagtaaaaattgtcagtaagggaagagatggagctaagcttgtctgctggatccctgcagctggag

SEQ ID NO: 160853 - DNA, 100 bp, Homo sapiens
atctacctatgttacagaagtcagagaggccatgaccttgcctcctttcctggagttcggtgtcccgtccccagcccacctcagagcctggacggtggag

SEQ ID NO: 160854 - DNA, 97 bp, Homo sapiens
gcaaaacgggcggtcgagcagaacgtgtagccgcgtcccctccagtccgctccgggcagggcagctggtggaatttttgaagaaaatggaatctcga

SEQ ID NO: 160855 - DNA, 75 bp, Homo sapiens
gtgaaagtgtataactacaatcacctaatgcccacaagggccagctcttccgaggctccagcctgcttttccgcc

SEQ ID NO: 160856 - DNA, 74 bp, Homo sapiens
gccgacacgggcgacttccacgatataacacgtgggaaccggaggagaacatcctggaccccaggctgctgatc

SEQ ID NO: 160857 - DNA, 82 bp, Homo sapiens
ccgggaccgccgccgccgccgccaccatgatgcggcattccaaaagaactcactgtcctgattgggatagcagagaaagctg

SEQ ID NO: 160858 - DNA, 100 bp, Homo sapiens
agacttctctcaactgattgattgtccagagtttgtaccaggccaagccttttgctcacatacaggttcaaaccttgtactactcagctgatcacaagct

SEQ ID NO: 160859 - DNA, 100 bp, Homo sapiens
cgaccttgagctccaggagttcgtctcttacgtctgcggaagtgcagctgcctcagttcttagcgcagtccacagatcctggtccctacaaataagcctg

SEQ ID NO: 160860 - DNA, 90 bp, Homo sapiens
cgcgggcgagcggagcgcaacactcgcttggttggggagatcggcgcttggccggttgggaaggagaaaatgctcaaggtgaagattgtg

SEQ ID NO: 160861 - DNA, 96 bp, Homo sapiens
ctcccctgctatccccaacaagaggaaagacacacctaccaagaagccagtcaagcggccaggatctgggagtctcctctccttctagctgccaaa

SEQ ID NO: 160862 - DNA, 100 bp, Homo sapiens
cttgtttcttatatgtgatgccattccagcactggactcatggaggctgagcatttattcagatatcattctctgctggaactgggtgagaagcgtaaag

SEQ ID NO: 160863 - DNA, 100 bp, Homo sapiens
ggttggttgcagttgtgtagtagttaagctgagatctgtatctgtggacctgaatgttgatccctcgcttcagattgacatacctgatgcgctcagtgag

SEQ ID NO: 160864 - DNA, 82 bp, Homo sapiens
aacaactcgggcgccgacgagatcgggtgtcgtgaaaactacccctaaaagccaaaatgggaaaggaaaagactcatatcaa

SEQ ID NO: 160865 - DNA, 83 bp, Homo sapiens
cttagctgtgctcgcgctactctctctttctggcctggaggctatccagcgttctgcatagaagcatccatgttgttttaatt

SEQ ID NO: 160866 - DNA, 103 bp, Homo sapiens
ctgtctttggctctggggacagttggcatgccagggtgtgatgaatgcagactctgctaccattttggctgtttggatcctcctttgaaaaagtctcctaaac

SEQ ID NO: 160867 - DNA, 82 bp, Homo sapiens
cagcagcccccgaaggccctatcaggacatggagtatgaaagacggggttgtggaaaccagaacttcgcctggagaacagag

SEQ ID NO: 160868 - DNA, 75 bp, Homo sapiens
ccaggcatctgcatctggaatgtttcctggacaaagaaggtatctcaacacccagtttattaaaaagaataaatt

SEQ ID NO: 160869 - DNA, 100 bp, Homo sapiens
gacaatttggaggtggcaaacagcttcgcagtcactaatgcttgtgtgcctagattgatcggtataaggctcactctcccgccccccaaagtggttgatc

SEQ ID NO: 160870 - DNA, 75 bp, Homo sapiens
atccaagtcaccaagaaattactgtctcaagtgatacgtattggtaaaggttttcaaggtgtcatgaaaagatgg

SEQ ID NO: 160871 - DNA, 82 bp, Homo sapiens
ggtcctgatgccaacagtgtaccagcagggcgttggctatgtgcccatcacagcaagagtgagccatggagctacgtgtggg

SEQ ID NO: 160872 - DNA, 90 bp, Homo sapiens
ggtttccggctgcagggcggtaaggatttcaacatgcctctgacaatctctagtgttgaaccctcggatacgatagaaaatgtaaaggcc

SEQ ID NO: 160873 - DNA, 100 bp, Homo sapiens
atcaattgctcctctcagccacctctgatcagccatggtatcggcaaggatgtggagtcctgccatgatatgggctgtaatccccttgcacaaaccggcc

SEQ ID NO: 160874 - DNA, 100 bp, Homo sapiens
gtgcaggagagatcgcggctgtgcccaacaacagcttctgtgccgtgggcgtggcctacgggagccgcatcgcaggcactttagtgagtttctgcgaagt

SEQ ID NO: 160875 - DNA, 82 bp, Homo sapiens
gcctcgctggagatcgagtaccaaacaatgcagatcttcgtgaagactctgactggtaagaccatcaccctcgaggttgagc

SEQ ID NO: 160876 - DNA, 100 bp, Homo sapiens
catctctgctgtagtggacaaagatttccttgataagtacttatatactctggatttcccagagagtcgggtaatcagtcagccagatcaaaccttggaa

SEQ ID NO: 160877 - DNA, 97 bp, Homo sapiens
gctcttgcaactgacgcagtcactgcagcactggtggaacttgaggaacagggtctgttccacaaaaaagacagtgccaatcaaggctgtgttcgaa

SEQ ID NO: 160878 - DNA, 73 bp, Homo sapiens
atgggtttccagatagacttgcgtctacagaacaaacagaggtgaaaattagttctgctgtgcttaaagctgc

SEQ ID NO: 160879 - DNA, 96 bp, Homo sapiens
gtgaacatctccacagcacctcccaggcgctcgatgccagccgtcatcggtttccagacagctgatgtggtcaacgggctgatgggcacggctgtg

SEQ ID NO: 160880 - DNA, 83 bp, Homo sapiens
caagaaatctcaagatattaaagttactgctgttaaaaaggtaaagaaactgcggcaatgaaagctgatctcctgagggccag

SEQ ID NO: 160881 - DNA, 98 bp, Homo sapiens
gtgggtcccgcgaggagactctcgggctttgagaggctgtggccaggccagctgggctcggggagcgccagcctgagaggagcgcgtgagcgtcgcgg

SEQ ID NO: 160882 - DNA, 85 bp, Homo sapiens
gcatctttaccgtctcagggacttccagttgctgccccttcccagagattatgtttgagaccttcaacaccccggccatgtacgt

SEQ ID NO: 160883 - DNA, 96 bp, Homo sapiens
ctgtgacttctatctgtggctcattggaaggaaacccaggcactcaaggagttgcccctggtcctgtaattggacttcaggcaccatctactggtc

SEQ ID NO: 160884 - DNA, 100 bp, Homo sapiens
gccggggagaggcacccgagacccacggagaccgcacttaattcagtgcacaaatgagatgaatgtgaacatcccacagttggcagacagtttatttgaa

SEQ ID NO: 160885 - DNA, 75 bp, Homo sapiens
gactgggctgctggcaccatggacccaggaaaaccaattctgtgtcctcggaggaccacagcccagttgggcccc

SEQ ID NO: 160886 - DNA, 100 bp, Homo sapiens
attttggaaagcagtttttaagacaaggggcagctggcattttatgctatgtgggagcctatgtcttcatcacttatgatgactatgaccacttctttga

SEQ ID NO: 160887 - DNA, 100 bp, Homo sapiens
tgctcttccacttcaaggagacaacggccacacactgtgggctcagcagtacaacgtaccccgtggttgtgaagatggggcacgcacactctgggatggg

SEQ ID NO: 160888 - DNA, 83 bp, Homo sapiens
tgagtgttttcatttgcggagagctccctggtgactgccagcccaactgaacctccacagtcctctacactcttccaggagca

SEQ ID NO: 160889 - DNA, 90 bp, Homo sapiens
gtctcacttcgctcctgggcagctgcgcggagaactggggtccctgagtgccagaggtggtggtgttgcttatcttctggaaccccatgc

SEQ ID NO: 160890 - DNA, 98 bp, Homo sapiens
gtcaccacagtcaccactgtccagtcccggccccgtatagacggcaaattaggtgacagcctgctgatggtgaagaacccacccccggccccgccaca

SEQ ID NO: 160891 - DNA, 75 bp, Homo sapiens
tgtgattggctaccttctcccatcaccccaggctaacatccagtcaatcatggcatctgaaaaacaagtcaacat

SEQ ID NO: 160892 - DNA, 90 bp, Homo sapiens
aagatgcaggaggtggtggcaaacctacaggctggaaacgtgtcctgcatctctcctgagtgtccttctggcccctgtcagaccccccca

SEQ ID NO: 160893 - DNA, 75 bp, Homo sapiens
ctggtcacgaagccctcagcattattgtggatgaatataagctatatgaagcaccggctccctcttcattttccc

SEQ ID NO: 160894 - DNA, 101 bp, Homo sapiens
ttaatgtctgcaagagcacgctatgagagatacagtggcaatcaggttctcttttgtgccttgctttccatgacatttcccctcaagcaccaacacatttt

SEQ ID NO: 160895 - DNA, 77 bp, Homo sapiens
ctgccatcatggagggttatccagcacctggaggatacctgctacctgtagcatgggctcagctcagcacagctgct

SEQ ID NO: 160896 - DNA, 90 bp, Homo sapiens
aatctctactcgaagaagaaagagaagaaacgttttctcagtggatccagcagattgaaggagctgaggctgccctacaccagaaaatga

SEQ ID NO: 160897 - DNA, 100 bp, Homo sapiens
ttcctcacagtttaggtctcaaggcaagcctattgagttaacacctctgccgctgctaaaagggggcaccctcctgccagggaccgagcccacagtggac

SEQ ID NO: 160898 - DNA, 100 bp, Homo sapiens
gcgtgctggccccgggtggcgcctccctgcgactcctggaccaccgggcgctggtctgctcccagccggagctatgaagacatgattggtgaggaggtgc

SEQ ID NO: 160899 - DNA, 75 bp, Homo sapiens
gtgccctacttcaaggataagggtgacagcaacagctcggcgggctggaaggccgaaatagaactatttgtgaac

SEQ ID NO: 160900 - DNA, 90 bp, Homo sapiens
atgacaaatcacaacttgtagagcgattttgcatgctaaagaaagagtacatggaatcctttgaaggtatattcaaagaacagtatgata

SEQ ID NO: 160901 - DNA, 83 bp, Homo sapiens
ctgaatttgaaagctagacaggatcgtcaggctgaaggaatcttggtaaatggggtcatcacactgaaacggtgttcaaccgg

SEQ ID NO: 160902 - DNA, 75 bp, Homo sapiens
caggtgtacctgccgcgacaccgaggtttgagaaatttctgtggttcattagctcagagaactatctaattatag

SEQ ID NO: 160903 - DNA, 100 bp, Homo sapiens
gaagaaagtgagcgaggagtcagaaactcagccactggttgccttggtaggcaataaaacctagaacattccatattctgcttcacacacggtgactcac

SEQ ID NO: 160904 - DNA, 100 bp, Homo sapiens
gaccccagagcatgcacaggctgtttgcagacctgacagacgctgctgcccgcaacgcggagctgctccgccaggccaagcacgaagccaacgactaccg

SEQ ID NO: 160905 - DNA, 90 bp, Homo sapiens
cggcgccagcgtagagcggcggtttggaggaaagatgagacgccgagaccgacccgcccgcccgcggccccgcagcagctccaagaagga

SEQ ID NO: 160906 - DNA, 99 bp, Homo sapiens
cagagcgagtctcggagaagatgtggtggcttccgtttgttggtggaggaggtggcaggcctcggcggtgaccaagaatatggcccaggtgaccaaagc

SEQ ID NO: 160907 - DNA, 75 bp, Homo sapiens
atcagtgatgttgcattccttgtggttggtgatccatttggtttcttatctcagtcatcactatggtgcttctga

SEQ ID NO: 160908 - DNA, 74 bp, Homo sapiens
agggggtccaatgtcaccccaggatgatgaagcagaagagggacccccgcagcaaacacaagtttaagatccac

SEQ ID NO: 160909 - DNA, 83 bp, Homo sapiens
ggaaccgccacagcactcaagtgagaagccctaccactgcaactgggacggctgcggctggaagtttgcgcgctcagacgagc

SEQ ID NO: 160910 - DNA, 98 bp, Homo sapiens
ctctcctacagaagatgtgggaaagccaggacttcctgaaatgcatgcaaaggttcagagaaccggaaaagcagcagacgcccaacaagaggccctgg

SEQ ID NO: 160911 - DNA, 75 bp, Homo sapiens
actgggattccttgggcaatggtgaatttgaaaaggtttggtgcacctcgatttggaggaagtagggcagggccc

SEQ ID NO: 160912 - DNA, 50 bp, Homo sapiens
ggaacatacgggcaagtttataagaatcaagatttatttgctacatcaca

SEQ ID NO: 160913 - DNA, 82 bp, Homo sapiens
ctggagagcttcatcaaaaatagtgatagctttgataagaaatctgagaatgaagatgacagcgagtgggaagatgtggatg

SEQ ID NO: 160914 - DNA, 100 bp, Homo sapiens
cgtgggtgaaagaaacttccacgccttctaccaagaggatttgatgaagatgttaaagcgaaagtggagaaccttctcgggatttccagcctggaaaaaa

SEQ ID NO: 160915 - DNA, 82 bp, Homo sapiens
ctcggtgtctgcactggctgctggtcaaggcttcagtgtggagtaattgacactttcgaggcatctctgacgtatgctgaag

SEQ ID NO: 160916 - DNA, 74 bp, Homo sapiens
ccggcccacagtgggggtgtgcaaacccgagagaactgggggttcggtccgagcccggtgggaggctcccggag

SEQ ID NO: 160917 - DNA, 51 bp, Homo sapiens
agtaatttgccttctggattgtcctaggcctacttacaagcctccagtctc

SEQ ID NO: 160918 - DNA, 50 bp, Homo sapiens
tctgacaacgtggatcgttgttttgaaacaaactggcgatggaatatgag

SEQ ID NO: 160919 - DNA, 88 bp, Homo sapiens
ctgaaagagctatatttggtgtcctgtaaaatcacagattatggtggaagtgctgcatcagtaaatgctaattttgctcattttgata

SEQ ID NO: 160920 - DNA, 74 bp, Homo sapiens
tgggaaaccgaacgcggcgctgtggctttcagcttggcatctgcaaacatagagaattctgggcttccacacaa

SEQ ID NO: 160921 - DNA, 90 bp, Homo sapiens
agacacttgtattcagtcaccaagcaaagaggtggtggctaatgccgtagcggcattatctgaaatcagtgagtctcacccaaacagcaa

SEQ ID NO: 160922 - DNA, 98 bp, Homo sapiens
gcaaagaaagttgctgaaaatgtcaaggcatgaaatccaaggaaggaaaatcacctcggcagtgtttgaaggaaggatactgcaactctttgaagtac

SEQ ID NO: 160923 - DNA, 80 bp, Homo sapiens
acttatagatcttctgcactgtttacaggcacagtaaaagaagccttgagccctataaaatttaacagatggggtctccc

SEQ ID NO: 160924 - DNA, 99 bp, Homo sapiens
ccgggagtcctggccccctaactcaacaacaattgtgttaaatgaactcaactggacaagtgccttagatgaagttttcaaaaagaatcgcgaggaaga

SEQ ID NO: 160925 - DNA, 100 bp, Homo sapiens
ctatatttatctcgtctctctgccatgaaggaatttgcctatatgaagatggaagatggtaccccaaagcatatcatccagatgacaggatttaagatgg

SEQ ID NO: 160926 - DNA, 101 bp, Homo sapiens
cgcgcagccaccatgagcaccgccgccttccacatctccagcctcctggagaagatgacgtccagcgacaaggacttcagccatgacagttgaaaaagcaa

SEQ ID NO: 160927 - DNA, 80 bp, Homo sapiens
gccacgggggccgccgcagcaccatggcgaccaccgtcagcactcagcgcgggccgggccgagaactactggtggcgtgg

SEQ ID NO: 160928 - DNA, 82 bp, Homo sapiens
gacccttcgagaaatctcgtctcgaccaagagctgaagctgatcggtttgcagtatcttcagagtctgaattttgagcggat

SEQ ID NO: 160929 - DNA, 100 bp, Homo sapiens
cttttttgagggaattgatgatgttcactggaaggaaaatgggacattagttcaagtagcaactatatcagctgatttgatggagttggacatggccatg

SEQ ID NO: 160930 - DNA, 90 bp, Homo sapiens
tatcatggaaggaggagatgaagggcaagggccaaaatgatgggagtctgaagatacagtattgctcgtcctcaaagagatctaccaaac

SEQ ID NO: 160931 - DNA, 98 bp, Homo sapiens
gttttagtcttgggggtagagtgactgcttgcgaaccagttcagcagtgcctcagctgtccagaccaaaacgaagaagacgttagccaaacccaatat

SEQ ID NO: 160932 - DNA, 75 bp, Homo sapiens
acaagattaccttcttaatggacctcctgatacaccagttgacgctagagatgatcgctatggaaaatcctgcag

SEQ ID NO: 160933 - DNA, 98 bp, Homo sapiens
ggaccctggaagagaagagggtggctaatgattaagagctggacagaggcctcacggagccccagatacaggtggtttgccgccagatgctagaagcc

SEQ ID NO: 160934 - DNA, 88 bp, Homo sapiens
tctactccatcgtgggactcagcagccttggtgctcaggtgccagatgcaaaggtgggtcatgataactgggtacgtggagttctgtt

SEQ ID NO: 160935 - DNA, 100 bp, Homo sapiens
cgacgagggggccgaaaccgagagattcatgctggtcctggccagcaatctgcctgagcagttcgactgtgccatcaacagccgcattgacgtgatggtc

SEQ ID NO: 160936 - DNA, 128 bp, Homo sapiens
gtatggccagctgtgcagcatctacctgaaactgctaagaaccaagatggagtaccacaccaaagatggccaggccatgttatgggatctcaacgaaggcaaacacctttacacgctagatggtgggg

SEQ ID NO: 160937 - DNA, 83 bp, Homo sapiens
actgtggatttcgaggagtgtctgaaggactcgccccgcttcagagttgcatgctgagaatttgaaaaatgaagatgatgtag

SEQ ID NO: 160938 - DNA, 100 bp, Homo sapiens
cgaggcgcgcttcctgaacgtgattgagcgccaccctgtggacatcagcgccatccccgagcagcggtggaagctggtggccagcatcgaaatgttcagc

SEQ ID NO: 160939 - DNA, 100 bp, Homo sapiens
taatccccaaagtgtgtccagagttatgcaacttgacccaggtgaaccgggtttatgtgattttcgatctgcctaccaccgtgtcaatgatcaaactgtg

SEQ ID NO: 160940 - DNA, 90 bp, Homo sapiens
ggcctatgacaccctcccggtcctgatccatggcaacgggccaaccaaggaaggtgggagtcaatcattttgacaagtctcctgaaagga

SEQ ID NO: 160941 - DNA, 90 bp, Homo sapiens
ctggtgggctaccggatatcccacgtgtggcagagtgcagggatttccgttgctgaaaagccaggagtcaaaatgactgagcgctttgac

SEQ ID NO: 160942 - DNA, 100 bp, Homo sapiens
tgggggaggctgaaggccgggccccgcgagtgccatggcggccgccctgggagcgagcggaggagcaggcgccggagtgttcggtgaccagtgacttgga

SEQ ID NO: 160943 - DNA, 58 bp, Homo sapiens
agaacgcttcgcccgttggtgctatgtaactgaatgtgagatatttctgtcacttctg

SEQ ID NO: 160944 - DNA, 75 bp, Homo sapiens
gccttcccacctagctctcctctctttgcagagccatacaaagttgatgcctggtgtgcaggagtatatacaaca

SEQ ID NO: 160945 - DNA, 74 bp, Homo sapiens
gttcggacttccccgttagaactcgcgtttccacttcagagatctgatgctattaacattctgaaggagatgaa

SEQ ID NO: 160946 - DNA, 96 bp, Homo sapiens
tgcttctaaacctctggaggaggagagaaccatggagtctggcagtaccgccgccagtgaggaggcacgcagccttcgagaatgtgagctctacgt

SEQ ID NO: 160947 - DNA, 80 bp, Homo sapiens
gaagaatttcctctgaagcaccggttcgggtctggcggtacttgaagggcaaagacctggtggcccgggagagcctgctg

SEQ ID NO: 160948 - DNA, 82 bp, Homo sapiens
ttccgctggctcagccgcaagtacccgtccatcatagtcaactgcgtggaagagaaggcccgagtgccaggcatggacgggg

SEQ ID NO: 160949 - DNA, 101 bp, Homo sapiens
ggcatcgatctctccatcccttccgaggcccgacttcgacctactgaacgtgaacgaacagaaaggctaattaaaaccaaattaagggagatcatgatgca

SEQ ID NO: 160950 - DNA, 101 bp, Homo sapiens
cgcaaacagaatcgcgtttggctgtgctggagtaaactacaaattcttgtgagtcctaattcctccttatccacaaaacagtcaatgttcccgtggagtgg

SEQ ID NO: 160951 - DNA, 90 bp, Homo sapiens
cctcaggcccacgctgctgccgccttcgctgccgctgctgctgctgctaatgctagcttggaactgcagttggctttttgctaccaccag

SEQ ID NO: 160952 - DNA, 100 bp, Homo sapiens
catcaagcccttctaccagaagagggaggtgaccaaggaggagtacaaggacatcctgcgcaaggccgtgcagaagggatgcccgctgtctgtagccccg

SEQ ID NO: 160953 - DNA, 100 bp, Homo sapiens
cttgagctccaggagttcgtctcttacgtctgcggaagtgcagctgcctcagttcttagcgcagatggtgccaactggctgacttttttctgccagccag

SEQ ID NO: 160954 - DNA, 50 bp, Homo sapiens
ccaatcaaaatctgtcagaagcaaagtcactattcctgatcagagaactc

SEQ ID NO: 160955 - DNA, 75 bp, Homo sapiens
ttggctttccggtggcatccggcagaggaaaagggcgggggcagctagagagacggtggctcagggagtaaagga

SEQ ID NO: 160956 - DNA, 98 bp, Homo sapiens
tcgtttgtttctccaaggtttgaaaagcagctggcctgcaaggtctgtgatgaggaatggcaccactacgtcctcaatgtagaattcccgagtgtgac

SEQ ID NO: 160957 - DNA, 100 bp, Homo sapiens
tggagcagcatgtacgccaaggggggcaagggttcggccgtgccctccgacagccaggcccgcgagaattccagggtctccctccactgctgtagtaacc

SEQ ID NO: 160958 - DNA, 100 bp, Homo sapiens
gcggctcctcggccgtgggccagttcgtgtccctggacgatgaggacggggacttggttgccttttccagtgacgaggaattgacaatggccatgtccta

SEQ ID NO: 160959 - DNA, 50 bp, Homo sapiens
gaacctggacgccggaagccgggaaatgggggtgaatctctacattaaga

SEQ ID NO: 160960 - DNA, 100 bp, Homo sapiens
agaaacaagaggccgagccgtgtcgaagatggtagtgggcagcagtcagtgacaggtgtaacctctgtggatgacagcaacagttactggaggatacggg

SEQ ID NO: 160961 - DNA, 75 bp, Homo sapiens
tgtggtgatacgagccggagatgccttctgcaggatggggaatttagcatggatcttcgtaccaagagcaccggt

SEQ ID NO: 160962 - DNA, 75 bp, Homo sapiens
cgagcccggcgggaccatgttcaccagcaccggctccagtgggctctactgtattggtgatcacgtaccgagaac

SEQ ID NO: 160963 - DNA, 82 bp, Homo sapiens
ctctcaaagaatataaaattgatgagaaaaactttgtggtggttatggtgaccaaagtcgttccaggggtagaggaggcatg

SEQ ID NO: 160964 - DNA, 98 bp, Homo sapiens
gcacattacaacttcaagaaaattacggtggtgccgtccgccaagaatttgccatctgccttagtaagtcatgtactaaatcctcaacctggagagaa

SEQ ID NO: 160965 - DNA, 50 bp, Homo sapiens
gccctgagcagctttcagcactggaggtctctaattaacagaagatggca

SEQ ID NO: 160966 - DNA, 96 bp, Homo sapiens
tagcaaagaagataaagttgacagcagaggcagagtctctgctggatgaaccgaatcctaacagtccagccaatagccaggcagcacagctttatc

SEQ ID NO: 160967 - DNA, 97 bp, Homo sapiens
gcaagcttagagcgtctggccaagaatcagaggaagtggggctgcccttgagatggagttgctgcctctttggctctgcctgggttttcacttcctg

SEQ ID NO: 160968 - DNA, 50 bp, Homo sapiens
cttcgggggcatcatgtcttttgccagctgaggatgtcaccttcctctac

SEQ ID NO: 160969 - DNA, 71 bp, Homo sapiens
caaccttcgatctcctgacgaatgaggagcgggaaggcctcctgcaccctggagaccgtgtgggaagacaa

SEQ ID NO: 160970 - DNA, 100 bp, Homo sapiens
cgactacttcacacgccagtacggggatgagtccactctggccttccagcagaattatatccagatcgagagacagaagattctgaaagggttcaatgaa

SEQ ID NO: 160971 - DNA, 100 bp, Homo sapiens
cgcctctcgctaccaccgccgacggtcttcagggtcacgagatgagcgctatcggtcaggactgcatcgacgtaggctggtgggaaggagagctgaacgg

SEQ ID NO: 160972 - DNA, 100 bp, Homo sapiens
ccgggacatctgaaagccaggaaatggccatcgaggagggcacgctggaggagatcgaagaggaggtccggcagaagaaatcatcacggaagcgcaagcg

SEQ ID NO: 160973 - DNA, 134 bp, Homo sapiens
ctcctcgccgccaccgcccaggaccgccggccgggggacgagctcggagcagcagccagtttgacacgaatggagatggggagatcaccctggtggagctacagcaggccatgcagagactcctgggggagcgg

SEQ ID NO: 160974 - DNA, 51 bp, Homo sapiens
aataatagcaagatatgtaccatcgtatctggccaggaacagtcttcacgg

SEQ ID NO: 160975 - DNA, 96 bp, Homo sapiens
acgccccctatcctatccgcaaacaataaacaggggtcacatgacgacagaagccaagagggctgcaaagatggaaaagaagatgaaaattttgct

SEQ ID NO: 160976 - DNA, 75 bp, Homo sapiens
tttctattttagaaagcagttcggccctgctgctcctgggggccgccgccctggcctgcctcgccctggacctcc

SEQ ID NO: 160977 - DNA, 100 bp, Homo sapiens
cggatcctgaggaggcagctgcggtggcagctgctgagttctcggtgaagaaatcaacgaccgggagcagaagttgcatgcccttaaggaggtattaaag

SEQ ID NO: 160978 - DNA, 74 bp, Homo sapiens
ttctgtcttgtgatccattgcctgaatggcattgtgcccatcgtggagcctgagatcctccctgatggggacca

SEQ ID NO: 160979 - DNA, 101 bp, Homo sapiens
acaccttctgcgaggcctgcaagtccaccgtggaataacaagcctttgtattcatttgaagataatgcagactatgtttatgatgttatgtggtcacctac

SEQ ID NO: 160980 - DNA, 98 bp, Homo sapiens
aactgccctgatgggcagtcaacagctaaaaccttcctcaccgtgtactggtttgccttcccggattgggcctacaagccagagtcgtcccctggctc

SEQ ID NO: 160981 - DNA, 75 bp, Homo sapiens
ggctcctgtcgtccgttctctcaggctcccgttcaggctctacagattctcccctgcccctggagaaggaggagc

SEQ ID NO: 160982 - DNA, 75 bp, Homo sapiens
ctgatctaacccctagaaacagttttaacggtgactccctgatgatcattccttggcatgaacataaacaccgag

SEQ ID NO: 160983 - DNA, 50 bp, Homo sapiens
ataagcttttacaaactgatgcgcattctacattctaaaggggagctcag

SEQ ID NO: 160984 - DNA, 74 bp, Homo sapiens
ctgaactcaggacttggcaatcttcccaagggattgttgaagaaacttctgaagagggaaactctgtacctgct

SEQ ID NO: 160985 - DNA, 75 bp, Homo sapiens
acatcgtggtggaaaacctggctggcctcaagtacagggtcatcaagggcagtacctagtcgatagtcgctggtt

SEQ ID NO: 160986 - DNA, 76 bp, Homo sapiens
caggggggtctccggctgctccagggtgaagacggctttcctgggtttaaaggagacatgggcatcaagggtgatc

SEQ ID NO: 160987 - DNA, 96 bp, Homo sapiens
gcgcccggcggcggcgggagcccaggagcctgccccgccctggggacgaagagctgcagctcctcctgtgcggatgacgaagatgatcctgcagaa

SEQ ID NO: 160988 - DNA, 96 bp, Homo sapiens
gcgaatatcgtcatcgttagaaggagaggagtcactcacaatttttgtggacaagcggaagttgagcaaacgagctgaaggaagtgattccaccac

SEQ ID NO: 160989 - DNA, 100 bp, Homo sapiens
gagtgagttgttgctcccgcctgagcccagcccccagaaaggattgtgacatatcgttggacccagaattgagttttagaaagagcgttttcgctacgta

SEQ ID NO: 160990 - DNA, 100 bp, Homo sapiens
gcagcccccaccacggccggaccgaaggtgcggcggcggaggggagccagggcgccccagcaggatagtaatgatgacactgaagatgtttcactgtttg

SEQ ID NO: 160991 - DNA, 75 bp, Homo sapiens
aaagaacttgccagacttaaacaggaattgaatgatctggcacgggaccctccagcacagtgttcagcaggtcct

SEQ ID NO: 160992 - DNA, 149 bp, Homo sapiens
gtggggaagacctgcgtcctttttcgtttttcggatgatgccttcaatactacctttatttccaccataggatgatcacggacgtgcagctcgccatcttcgccaacatgctgggcgtgtcgctcttcttgcttgtcgttctctatcac

SEQ ID NO: 160993 - DNA, 76 bp, Homo sapiens
ctcaccatgaaatcacagcttcagatcactggcctcccagtagcattggatgcaggaaaaaatacattgacggtga

SEQ ID NO: 160994 - DNA, 75 bp, Homo sapiens
agagcacccaagatgaagatgctgttagcctttgcagtctcgacataagtcacttttccagccattaactccagg

SEQ ID NO: 160995 - DNA, 73 bp, Homo sapiens
gccgcccgaggccgtcggccgccgtcagcgagggcgccgagcaacttcgcaagccgaggtacttctatagaag

SEQ ID NO: 160996 - DNA, 75 bp, Homo sapiens
tgactggagacaacctgcagcctcctggcaccaaagaatcccgcccattgtcagttcctgttaaagccatgttga

SEQ ID NO: 160997 - DNA, 75 bp, Homo sapiens
aagcagcgtgcgttcagccctgggaaaatggacccaagtggggtcaaagtgctggaaacagcagaggacatccag

SEQ ID NO: 160998 - DNA, 87 bp, Homo sapiens
ggagtccgtgtaagctcggcgacagccctagcagcgaggccaaaacagatttgatgatcgtggacggagtgactatgatggtattgg

SEQ ID NO: 160999 - DNA, 83 bp, Homo sapiens
ttcaacagtacacaagatgttaacatttgccttgtctctacaatcagatataatttctacagtagaatttaatcattctggag

SEQ ID NO: 161000 - DNA, 98 bp, Homo sapiens
gaggcagcgccatatcctggaggtgaagcccgagcgggaagaagttccgcagcaagccgcagctggcgcgctacctgggcggctccatggacctgagc

SEQ ID NO: 161001 - DNA, 100 bp, Homo sapiens
tcataaagttcatcatgagtttcagtcaaaatttgctgtgcgatgtcacaattgtggcagaagacatggaaatttctgctcatagagtggtgctggccgc

SEQ ID NO: 161002 - DNA, 100 bp, Homo sapiens
cattatcttaactgaggcacccaaaatgcttcttaatgaagaggataactcagaatcatcggctatagagcagccacctacttcaaacccagcaccgcag

SEQ ID NO: 161003 - DNA, 75 bp, Homo sapiens
cgaggcttccgcccggcacaggggagtccctgcaggaagcatcacccaggctggcagatcatggtagcagcagcg

SEQ ID NO: 161004 - DNA, 78 bp, Homo sapiens
ggtgaacaaagagaagatcacaccactcacgctcaaggaagcccagaacctcatggccctcaccaatgtggacacccc

SEQ ID NO: 161005 - DNA, 74 bp, Homo sapiens
tggaggcgggctgccggctgtgcgggcgctccggagagaccgacagaagttttcggctttgtgagaaaccttac

SEQ ID NO: 161006 - DNA, 83 bp, Homo sapiens
tccggctcctcagagagcctcggctaggtgctgactgggttacttttttaaacactaggaatggtaatttctactcttctgga

SEQ ID NO: 161007 - DNA, 98 bp, Homo sapiens
gcgttactgatggtgctgctcacatctgtggtccagggcagggccactccagggaagatggaagagttgagtcaggccctggctagtagcttttctgt

SEQ ID NO: 161008 - DNA, 51 bp, Homo sapiens
ctacgacgcgctggtgcacttcgcgctgtcggtaacctctattgaagaacg

SEQ ID NO: 161009 - DNA, 98 bp, Homo sapiens
aggagacagagctactggatctcagccttgtcaaagatgccagatgtgggagacacgccaaagctcccaagttttagaaagagcgttttcgctacgta

SEQ ID NO: 161010 - DNA, 131 bp, Homo sapiens
ctgagatcaaatggcacttcattggccacctacagaaacaaaatgtcaacaaattgatgggttcaaaccttgtactactcagctgatcacaagctgcttgatgggaacctactagatggacaggctgaggt

SEQ ID NO: 161011 - DNA, 74 bp, Homo sapiens
atctgagaactgataagaagataattctggttgaaaataattgtgtgcccaagaagatgctgcagctggttggt

SEQ ID NO: 161012 - DNA, 119 bp, Homo sapiens
ctgcgagggttccagggagatcaaggacttcaaggatttctacctttccatagcaggtggataatattaatgcagctgtgatggatttgaaaaaaaagaagatccgcagtctaagtgaa

SEQ ID NO: 161013 - DNA, 100 bp, Homo sapiens
ggccagcaacctccccagtgcgaagaaggaccggcgcagcgaccctgtcgcaagcctgactttccgaggtgctggagaatctggtaaaagcaccattgtg

SEQ ID NO: 161014 - DNA, 51 bp, Homo sapiens
caggcctgctcggccctcacaggtggtctcggaaagagggtcgtggtcccg

SEQ ID NO: 161015 - DNA, 101 bp, Homo sapiens
aaaagaggagcagaagaaactcgaggagctaaaagcgaaggccgcggggaaggggcccttggattactcttgtctctgctgctcctgggaaagtgatttgt

SEQ ID NO: 161016 - DNA, 90 bp, Homo sapiens
tgcagtggcgcctaaagtctgagagagggaagtcgcctctgtgctcgtgagtgcatggggtataaggttaatccctatatcctgaagaag

SEQ ID NO: 161017 - DNA, 51 bp, Homo sapiens
gccccagacggaaagagctacttgctgaattgaccccaaagttgcatttcc

SEQ ID NO: 161018 - DNA, 148 bp, Homo sapiens
attaaaagatgatgagaaataaggacaaaagccaagaggaggacagttcgctacacagcaatgcatcgaggaatgaatctgaagtctgctgcagtaaaacacagaaggctttaaaatgttttcttgcataaaattcaaaacttttaag

SEQ ID NO: 161019 - DNA, 83 bp, Homo sapiens
ggcaagtattgctgtgggtgctgggacttcccgtccgcggcgtggagggcaccaggatcatctacgaccgaaagttcctgctg

SEQ ID NO: 161020 - DNA, 90 bp, Homo sapiens
ggcttcgatcccttctctgatttgctgtcagccatgaacggatggatgtgatgcctgctagccaaaaggatgtgaaaggaccacccaccc

SEQ ID NO: 161021 - DNA, 100 bp, Homo sapiens
agctcaaggcatcaaagctgacagagaaactgttgcagtgaaggagaagaacccttggttagattgagtcttactgagagactggggaaacgaaaatttt

SEQ ID NO: 161022 - DNA, 100 bp, Homo sapiens
tagctttagacttatatggttcttcagcgtttattttacatggctttcaccttcttataatcatgatggagatcttataacaatttttgatagttctgac

SEQ ID NO: 161023 - DNA, 123 bp, Homo sapiens
cggctctgtaggaaggaacttggttccccctccctcagcttccgccccaaaagatgtcaagccctccaacatcctagtcaactcccgtggggagatcaagctctgtgactttggggtcagcgg

SEQ ID NO: 161024 - DNA, 90 bp, Homo sapiens
ggacaaaactcctctctatagtcaactccttcaagcatataagtggtcaaacaaggtgcgtatagcagcaaaattcatcattcatgcccc

SEQ ID NO: 161025 - DNA, 95 bp, Homo sapiens
aaaaaaaaagaaagaaaactacaggcggggacggcttctcggtgtccttcaagtagtgaagcagagtgttcagatcccagtttttgtgatgattc

SEQ ID NO: 161026 - DNA, 98 bp, Homo sapiens
cgggcaccctgcagcgcgagctggaccacgagaggaagctgagggagaccgacctgaaggagaagaaggagaaggtggaggagaaggcaagccggaaa

SEQ ID NO: 161027 - DNA, 102 bp, Homo sapiens
accctgttgtacatccactggacctaaaatatgaccctgatccagaactgataaatttcaaacggaagagagtggcagcatttagaaagaatctaattgaaa

SEQ ID NO: 161028 - DNA, 75 bp, Homo sapiens
tccaccgtaccctagagttggcatcttgtttaccagaggggagcgttacatggacacagaacagtatgaagaagc

SEQ ID NO: 161029 - DNA, 82 bp, Homo sapiens
caacaagaaagtgcagataagcagggatgggcaggtgaacaacctttggacaaaacaggacatgttaaggatacaaatcaag

SEQ ID NO: 161030 - DNA, 74 bp, Homo sapiens
agacatcttgccaagatggcctaagtcaagccttagattgtaagcaaaagaaatcaaggtcaagatctggaagc

SEQ ID NO: 161031 - DNA, 75 bp, Homo sapiens
ggcgagctgggcgacggcgccttcggcaaggtttacaaggttgaaatgttccttcttgcctatgctgtgcgccac

SEQ ID NO: 161032 - DNA, 75 bp, Homo sapiens
ctgatgagatggttgaattacgcattctgcttcagagcaaggtgcagctcagtggaagatgatgacaaccagaag

SEQ ID NO: 161033 - DNA, 80 bp, Homo sapiens
aacagcataactggaacatagaggatggatctttatttcacgaacagtccaagaaatgtgtccaggctgcgaggaaggag

SEQ ID NO: 161034 - DNA, 95 bp, Homo sapiens
gggtcctccaggatgccctgggcatcgccttctgcctctacatgctgaagaccatccgtctgcccaccttcaagaatgctctgcccagcgacgag

SEQ ID NO: 161035 - DNA, 82 bp, Homo sapiens
gaagaggaaccacaagaaaatcaaaagaaacttttgcccttatcagtaacacctgagaaatggctcagggaactgttggagg

SEQ ID NO: 161036 - DNA, 74 bp, Homo sapiens
gtgaggttggcgcggcgcagtcttcctgctttggcgttgtctctcaggatcccgctgcacaagttcacgtccat

SEQ ID NO: 161037 - DNA, 82 bp, Homo sapiens
agagactctccgcaacagaaccatctcaagtgtcgtgaaaactacccctaaaagccaaaatgggaaaggaaaagactcatat

SEQ ID NO: 161038 - DNA, 50 bp, Homo sapiens
ccctggaccagcagaaacctagagtggtcatgaaacgagtgcgtaccgag

SEQ ID NO: 161039 - DNA, 75 bp, Homo sapiens
gttgctgggctcggcgtgctgcgtttgaaggatgacctctaggaagaaagtgttgctgaaggttatcatcctggg

SEQ ID NO: 161040 - DNA, 97 bp, Homo sapiens
tatcccataaagtataaagaaagctctgctatgtgtcagttgtgccatgcggagctgaatgccatcatgaacaaaaattcgaccgatgtgaaaggct

SEQ ID NO: 161041 - DNA, 58 bp, Homo sapiens
gcacaatcaacgcaaccacagaaacaagtggtacagtgagaaagatcagtctaaagaa

SEQ ID NO: 161042 - DNA, 74 bp, Homo sapiens
tgtggcaccgtctggaggagctctacacgaagaactctggacttattggacaaaatgttgacattcaacccaca

SEQ ID NO: 161043 - DNA, 87 bp, Homo sapiens
gaaacatgaagagctttctataaatagcaatccagttgatattcactgatggactccaaagaatcattaactcctggtagagaagaa

SEQ ID NO: 161044 - DNA, 95 bp, Homo sapiens
acattaaatgcaatagcccttcagtactgttgtacggttcaaaccttgtactactcagctgatcacaagctgcttgatgggaacctactagatgg

SEQ ID NO: 161045 - DNA, 75 bp, Homo sapiens
ccagcgagcaaacgggcgccccggagccttgctgagaggcaggaattctgtgcgtctggtcatccggaaggttca

SEQ ID NO: 161046 - DNA, 82 bp, Homo sapiens
tttaaatacttaagagaagaagttaaaacatttcagggcaagccaattatgctatcatggtgaacttacttcagattgtgcg

SEQ ID NO: 161047 - DNA, 100 bp, Homo sapiens
atgcagaggaaagaaaagaatacattcctgattacctgccacccattgtgtcttctcaagaagtggctgctaatttacagaagattgtagatgatcccaa

SEQ ID NO: 161048 - DNA, 98 bp, Homo sapiens
tcggacatggtgtttcttaggacttcagaaaaagcagcttatgttcctgaggaagaattgaaggcagcagaaatagatgaagagcacgtggaggatga

SEQ ID NO: 161049 - DNA, 90 bp, Homo sapiens
tgtgcagcacgagtggccagtagggctgagatgttgggagccatcaatcagtatgccttcaagacagtgtgttggctttctggaaacatg

SEQ ID NO: 161050 - DNA, 100 bp, Homo sapiens
cgcgaatgctccgatgtgcagcccaagctctgggcccgctacgccacgaaggaagacaggaggtccgaggagaaagcggcagccatggcagcctcaaaga

SEQ ID NO: 161051 - DNA, 50 bp, Homo sapiens
agcagaagctaaagcaggccaagttcatggatcaacatccggagatggat

SEQ ID NO: 161052 - DNA, 75 bp, Homo sapiens
gtgtgaaccatgtgactttgtcacagcccaagatagttaagtggggccggaaggtggtggtcgtacgctgtgaag

SEQ ID NO: 161053 - DNA, 102 bp, Homo sapiens
ctggcaatgggggcaggagctgttggagctttgcagctgacctacatctcgaaggaggataagatcaatgccctcattaaagcagccggtgtaaatgttgag

SEQ ID NO: 161054 - DNA, 98 bp, Homo sapiens
tacgaagactcctgccgcgtataccaggcatccagccccgatgaggttgaaatcacaaagattagacacctttttagataggtgttcttcagcaccac

SEQ ID NO: 161055 - DNA, 74 bp, Homo sapiens
gctggcacagggccttctgctgcatttcctgcccagaggaatatggaaggagactgtccctctgactggaaaac

SEQ ID NO: 161056 - DNA, 74 bp, Homo sapiens
gcgaaggttggatgagtgtgaagaagccttccaaggaaccagcaatgagaaggccaggaaaagaaagagctgaa

SEQ ID NO: 161057 - DNA, 83 bp, Homo sapiens
ggcaagaaaaggaaaaagcccgtgaggatgcagcccgggaaagagctaggggcgtctgccttggatataaaatcatagatggg

SEQ ID NO: 161058 - DNA, 101 bp, Homo sapiens
ggggcccaaccacaagacgactcaataggaggaaggaggaactctctggaatgaaaaataaaatacaagtagttgtgcttgaaaacgaagggctccagcaa

SEQ ID NO: 161059 - DNA, 82 bp, Homo sapiens
acagaaatgccttgccgtagggatgtctcgagatgtgagtgtgtccgcttgaaaccaactgacatacagcccgacatcttca

SEQ ID NO: 161060 - DNA, 88 bp, Homo sapiens
cggctgcagtggccgccgctggagaccgcgggacctggcgctgcagcgaggcacgtgtggttctcaaatataggcattctgatgggaa

SEQ ID NO: 161061 - DNA, 101 bp, Homo sapiens
caaaagtggagaagattcgcaggaactccgaggcgctcccatcccagatctcaaagtgtttgagcgtgagggagtacagctgaatctgtctttcattcgac

SEQ ID NO: 161062 - DNA, 100 bp, Homo sapiens
gggcccggcgccgccgcccgcaggcttcctcaaatcccgggaacgctccagccacaaactttactctcagctgctgcacacacagatgttctcacagttc

SEQ ID NO: 161063 - DNA, 82 bp, Homo sapiens
gccgcccacccggacgccgacgaaagccagcgagctcctcagcctcagatcattgagaagcagccaggccacattcggagca

SEQ ID NO: 161064 - DNA, 98 bp, Homo sapiens
atgagaagactgttgtccggctgcaggagaagcggcagaaggagctctggaatctcctgaagattgcttgtgcaatagccctctggaacaagacaatt

SEQ ID NO: 161065 - DNA, 100 bp, Homo sapiens
atgaattcgagcggctctcataaagatctggctggcaacatgtgcagtctttgccaacaaaaaaaattaccaagaaacctattccagatgagcacctcat

SEQ ID NO: 161066 - DNA, 80 bp, Homo sapiens
acggcccgcccctcaaggacaacctcggcctgagacaccggaggaccgggtctcctccgggctggggctgagcaagccct

SEQ ID NO: 161067 - DNA, 80 bp, Homo sapiens
cctcggagtccttggggacggagcagcgcgtcgtggggcgagcggcaggagtacgaccccagcaaagcgacctttgtgaa

SEQ ID NO: 161068 - DNA, 75 bp, Homo sapiens
gcccatcgtcagcatccgcgtgtggggcgtgggccgcgacaatggccgagcattggggagtcagcaatgtccgtt

SEQ ID NO: 161069 - DNA, 51 bp, Homo sapiens
atccgggaggtcaacgaggtcatccagtgttccatcgagtgtgggagcggg

SEQ ID NO: 161070 - DNA, 99 bp, Homo sapiens
ctggcaggttccgcggcaccgagcccgagccccgagacgcttcgtgctctgtctgatgatggagtatctgatcttgaagacccaaccttgactcccctg

SEQ ID NO: 161071 - DNA, 98 bp, Homo sapiens
attacccaagattttgaagaagcttgtcgaggtgttcagattttgcaaatctaaatgtcataaaaactttaaaaagaagcgcaatcctcgcaaagtta

SEQ ID NO: 161072 - DNA, 100 bp, Homo sapiens
ccaagtcctccttgccaggccttcaaccactatctcagtgcaatgggttctaagctggtctatgtccatcaccttcttggagaaggagcctttgcccagg

SEQ ID NO: 161073 - DNA, 54 bp, Homo sapiens
tgctgctggccaaggagaccctgactggcaatctgaaggcaaatcctgtttaga

SEQ ID NO: 161074 - DNA, 97 bp, Homo sapiens
gctccagagagacgtgaaacatgtgaacactcaagtgaagcaaaagccttccatgattacgtgtaggagctgcacgatctgggaacctcacgtttat

SEQ ID NO: 161075 - DNA, 85 bp, Homo sapiens
gggcaacctagaaagccagttgatgccacttgctattggagttgtgggttatttcttatgagggtcatggatatcccctatctaa

SEQ ID NO: 161076 - DNA, 100 bp, Homo sapiens
atctgcctaggcattttgctgtctcctcctaatacgatatttggtttccaggcaggactgacgtctttggattgcagtggatcttactgcttacctgtac

SEQ ID NO: 161077 - DNA, 100 bp, Homo sapiens
atgttgatcactgaaaatgatttatgcaagtttaagactctgtttgctggctacacggacaacctggtgcgagtgtggcaggtgaccattggcacacgct

SEQ ID NO: 161078 - DNA, 74 bp, Homo sapiens
gtcaggctgagggttagtgagcaggtcattcaagaatgaggttggaagagatcattctcctgtttgcaaatgag

SEQ ID NO: 161079 - DNA, 83 bp, Homo sapiens
ccctgatggggcaggaggggcctttgcagctcagcttgacaaaagtaagctgaagccaggaacaagagttgctttggatatga

SEQ ID NO: 161080 - DNA, 100 bp, Homo sapiens
cgtatctgcctaggcattttgctgtctcctcctaatacggggaaggggaggagttacagcccggccagttggagttgtagtaccacgagggacgccaact

SEQ ID NO: 161081 - DNA, 82 bp, Homo sapiens
cagcaacatgctcctagcagaagcctatggatctggaggttcgaccttgaaactacaagagtgaatctgaaagttagttcaa

SEQ ID NO: 161082 - DNA, 75 bp, Homo sapiens
ccaccttctgaaagaaatggcacttcatcaacttgtcaaggagagatgaatggagagtatagaggcagaggattt

SEQ ID NO: 161083 - DNA, 98 bp, Homo sapiens
ccaggactgaccgctgccgcccagcacgtccagcatcaacaaagagagcattgtggatgtagaaggtgttgtgagaaaagtgaatcagaaaattggaa

SEQ ID NO: 161084 - DNA, 75 bp, Homo sapiens
cgtgcgcttctgggatctcagcacagagacaccacatttcacatgcaaggacatccagctctgtcacccaagctg

SEQ ID NO: 161085 - DNA, 100 bp, Homo sapiens
ccactgagatgaggaggcgtcgcgcgcgcctgtagctcgcgggcctcgcagccaatcctgaggcaaaagaaacattttaattcactgcacattccaaaag

SEQ ID NO: 161086 - DNA, 102 bp, Homo sapiens
tcttaacccagaagtagctgaatgtgttactccattgctgaggagtggtccttggatgtggctgtgttgcccaagctattctcagtcgaggacgttttggag

SEQ ID NO: 161087 - DNA, 83 bp, Homo sapiens
tgctgatcgcctgggtggttgttggcgtgtccctgcagcgaaggatcctgttcaaatctgaacatcaatgatgtactagggaa

SEQ ID NO: 161088 - DNA, 87 bp, Homo sapiens
aatactacgttcagctaaattaagcagccatggcaatgacaggctcaacaccttgctcatccatgagtaaccacacaaaggaaaggg

SEQ ID NO: 161089 - DNA, 90 bp, Homo sapiens
cacaattataaaatgtcagcttttaagggtctgccatcatggatgttctcgcagaagcaaatggcacctttgccttaaaccttttgaaaa

SEQ ID NO: 161090 - DNA, 73 bp, Homo sapiens
aggctcaagcaatcctaccatgtcagccttcccagtagctggaactacagcaattgggcagatgtgtgaggca

SEQ ID NO: 161091 - DNA, 89 bp, Homo sapiens
atggacttcatcgctttatacattgtcttcagtgttaagaaatgtggactcctgtgaggtgctggaggtttgaatcatcttgaaaactt

SEQ ID NO: 161092 - DNA, 83 bp, Homo sapiens
cgcgcgtgtgtgagcgcgccggaccaagcgggcccagaagcgggcaccgggagcctggccgctgcagtggagacagcctcggg

SEQ ID NO: 161093 - DNA, 74 bp, Homo sapiens
tcctcggcccctggctcctgctcctggctgctacaggagctgagagaccctaccctcactttccgtctgcttgg

SEQ ID NO: 161094 - DNA, 101 bp, Homo sapiens
tgttctcatcgtccctgccaactttccaagtctggggatggccagcgactgcatttgcctccagacttgtcagacacagtgagccgctcaagcaaaatgga

SEQ ID NO: 161095 - DNA, 83 bp, Homo sapiens
tttgaaccatgtttggattgaagccgcctctgtattacttaccagggcgcggatggcgtcggggcgccccgaggagctgtggg

SEQ ID NO: 161096 - DNA, 100 bp, Homo sapiens
gcgtcctgctgaccccagccggcgccgagggcttggaatctcgagcgggaaaaggtggcgacatgtctaagaatgtgagccagtcacagatggcaaaatt

SEQ ID NO: 161097 - DNA, 75 bp, Homo sapiens
ggacaaaagcaacgacttcgtatggatgccggctccaggagcagcagtggaggtcgggaacgcctcattgtggag

SEQ ID NO: 161098 - DNA, 100 bp, Homo sapiens
tcaaaaatcagagtcacacttaaaagaaggacagaaaaggggagtgcacttcatgaagcagctttgtttggaaaggtggatgttgtacgagttctgttag

SEQ ID NO: 161099 - DNA, 75 bp, Homo sapiens
ttttggcctggcttgtttgcaaagattggactggctaaggacgatcagctgaaggttcatgggttttaagtgctt

SEQ ID NO: 161100 - DNA, 82 bp, Homo sapiens
gatggcgcagaaaccccgttgacaaggcactgctttttcatgacgattcttcgctgctgctgccttaccgccgagaaccacc

SEQ ID NO: 161101 - DNA, 95 bp, Homo sapiens
tgtgaaactgctttctaaaacaccagaactcaacctggttttaggagaagttttagcacaacttctgcttcttcccaaaaggagattaacagaag

SEQ ID NO: 161102 - DNA, 50 bp, Homo sapiens
agtggtggtggtgggggtagcagattgctggactcgctgaagagagacta

SEQ ID NO: 161103 - DNA, 100 bp, Homo sapiens
tttcaaaagggttctgtggaccatgagcttcagcaaatcattcgtgacaacctctacctccgcacggtgccatgagcgggacggtatgcgggccatcctg

SEQ ID NO: 161104 - DNA, 100 bp, Homo sapiens
gccctgaacactatcaccgacgtgcaagaaagcctttgaggtgaaggtgtatgaaagtcatcataacagatgttttccaaaaacttgtagaaggttgtga

SEQ ID NO: 161105 - DNA, 83 bp, Homo sapiens
agccgggtgtcctgacgctcggggttcagaactcccccactggaaaggattctgaaagaaatgaagtcagccctcagaaatga

SEQ ID NO: 161106 - DNA, 90 bp, Homo sapiens
cccggcggccgcggtaatgctggtggtctgcatcaccaccggatcaacttcgacaaatagcttgttagcagtggcacaagatcttacaga

SEQ ID NO: 161107 - DNA, 97 bp, Homo sapiens
cggaatggcggcttccatctctgaggcgagcgacgctatggatcccacagtatgactatgaatatgatgaaaatggtgacagagtcgttttaggaaa

SEQ ID NO: 161108 - DNA, 96 bp, Homo sapiens
tagaaagaagatgcagcacaatgttctagtagcggaggttcagctgaatccagaacttggtgttaagaatggcatcttgggagctggcatgcttcc

SEQ ID NO: 161109 - DNA, 107 bp, Homo sapiens
gtcacacacggtcctaagagctgggcaccaggaagcgaaggctgtactatactggcaattgctggagaagattttgcaattgttgcttctgatactcgattgagtga

SEQ ID NO: 161110 - DNA, 100 bp, Homo sapiens
tgttcagtactgtgggtgatatttgcctttagtgcactcttctccttcacagtaaagtggctggatcttagtaagagccctaagaccatgaaaaagctgc

SEQ ID NO: 161111 - DNA, 97 bp, Homo sapiens
ccatttatttctttggagacaaaactatgccatattttaaccacatcagcatcgaggactcgcgggtctacgagctgaccagcaaggctgggctgtt

SEQ ID NO: 161112 - DNA, 100 bp, Homo sapiens
ctgcccctgctgtcgctcctggtcggcgcgtggctcaagctaggccatggaagagctggtggatgaagggctggtgaaagctattggcatctccaacttc

SEQ ID NO: 161113 - DNA, 82 bp, Homo sapiens
tgcagatcgcctggcagatctaccgtcaccagcagaagataaagaagtccattggaatattaagcccaggagttgctttggg

SEQ ID NO: 161114 - DNA, 98 bp, Homo sapiens
tggatgccaaacgagattggggccatgccaaggactatgtggaggcgagacttgaaatctgtgctttgagggacactgtggctgtttacctgacaccc

SEQ ID NO: 161115 - DNA, 83 bp, Homo sapiens
gttaacttgggagaaagtttcatctgtggatggagtattggatgctttggagtctgcaatgaagaatggcctgtggggtcacg

SEQ ID NO: 161116 - DNA, 100 bp, Homo sapiens
cgagtaccagcactccaatttgtatgccatatcagagggtgatgagactggtgtgatggataatcttctagaagccctacaatcaggtgcagcattcaga

SEQ ID NO: 161117 - DNA, 75 bp, Homo sapiens
gcgaggaacagaagaagaagaaccggaagaaactgtccgagaagcccaaagctgaccggttccctgatgtgttac

SEQ ID NO: 161118 - DNA, 101 bp, Homo sapiens
tgagagtgacctttgcatctgcctgtccagccagcatggaaccaaagcggatcagagagggctaccttgtgaagaagtgaccatgcagcaggtggccagga

SEQ ID NO: 161119 - DNA, 82 bp, Homo sapiens
ccgcaaccagagccgccgccacggtcacccttgcaattatggatatttaaaagggtcagacagtgtggagggggagttcccc

SEQ ID NO: 161120 - DNA, 100 bp, Homo sapiens
acagtgcccaggggtctgagtctcacagcttgtaaagcctgagacagctgtcttgtgagggactgagatgcaggatttcttcacgcctcccctttgtgac

SEQ ID NO: 161121 - DNA, 50 bp, Homo sapiens
aaggaatccatgtttcttccaagaagcagtgaggtcaccaagaattccct

SEQ ID NO: 161122 - DNA, 100 bp, Homo sapiens
aaaaaggaaatcaccctgcttgagcaaaggaagttcgtcacaaggcatcgcagaaggtttatgctatgaagcttcttagtaagtttgaaatgataaaaag

SEQ ID NO: 161123 - DNA, 83 bp, Homo sapiens
ccgagggcaccaaggcggtcaccaagtacaccagctcgaagtagttagaaacaaacctgtggcaaggcaggctcctggcaaac

SEQ ID NO: 161124 - DNA, 83 bp, Homo sapiens
ggggaaagcccaggggtacaggaggcctctgggtgaaggcagaggctaacatgggggctgtatactttgcatgttactccaaa

SEQ ID NO: 161125 - DNA, 97 bp, Homo sapiens
gaagatgaattttatgatgctgatgaattccatcaaagtggctcatccccaaagcgcttaatagagtgtgtgatctgtatgatggactttgtttatg

SEQ ID NO: 161126 - DNA, 90 bp, Homo sapiens
attgaagaacaacaactagaagaagagaagctattggaaagagagaggaagcagaatctggtaatataagtcaaaagtctgatgaagaag

SEQ ID NO: 161127 - DNA, 74 bp, Homo sapiens
atttactgtcatcaagaactgtaatacttctggaatccagacagaatggagccctctggcacaaatggaagaag

SEQ ID NO: 161128 - DNA, 98 bp, Homo sapiens
cgaagccccttcccaggtcctcaactttgaagagatcgactacaaggagatcgaggtggaagagcatcccagccatcactcttccacctgctccttag

SEQ ID NO: 161129 - DNA, 98 bp, Homo sapiens
cgggagccgccgcgggcaggacgcgcgctgcaggtcgcaatggaagaagagatcgccgcgctggtcattgacaatggctccggcatgtgcaaagctgg

SEQ ID NO: 161130 - DNA, 74 bp, Homo sapiens
gccgagctggacccggaccggttttggatcatggaagggaagtggttgctgtgtatgttactggtgcttggaac

SEQ ID NO: 161131 - DNA, 100 bp, Homo sapiens
ttatctttctgtggatccttacatgattttgtggaagtataatactttgtcattatgagatgtcgtctctcggtgcctcctttgtgcaaattaaatttga

SEQ ID NO: 161132 - DNA, 75 bp, Homo sapiens
tggctccgggctgagcttcctggagaagaggaaggtgttggagcgggccggagagaagtagagtgggctgcgagg

SEQ ID NO: 161133 - DNA, 100 bp, Homo sapiens
cgacaacttcagtgggcatcgagatgacggcatggagggttgagggcaagaactccatcatcctgaccttcagacagctgatggcagaagaagggccttg

SEQ ID NO: 161134 - DNA, 50 bp, Homo sapiens
gaagaccactttagaaactcaattaagttgaaaggattgttgacaaaagg

SEQ ID NO: 161135 - DNA, 90 bp, Homo sapiens
aacctggggcctgaactcatcaaggaaagcaatgccaatgtgcatgaatacctcagaagtaaactctgttcactgtatgaaaatgactgc

SEQ ID NO: 161136 - DNA, 101 bp, Homo sapiens
cgacgtacccgccgccgccgttggctggaggacacaatgtttgcacgaggactgaagaggaaatgtgttggccacgaggaagacgtggagggagccctggc

SEQ ID NO: 161137 - DNA, 130 bp, Homo sapiens
tatctctctaccgggggaattgcaggcccatacgatttgagccaccaatgctggatttccatgaacagcaatttgaatcaacccatagaagtgacagcgctgtattcatttgaaggacagcagcctgggg

SEQ ID NO: 161138 - DNA, 82 bp, Homo sapiens
caccactcacttccagtggagacagggacagcgacttccttgcagcctcttctccggcttcgggctcagaatcaggttctga

SEQ ID NO: 161139 - DNA, 87 bp, Homo sapiens
gccagttatttgcctcagtaaaagaagttgtctgctggttctcagcttgaagaagattctgcagtccttattgatcctttttcttgg

SEQ ID NO: 161140 - DNA, 98 bp, Homo sapiens
ggggctccgcgcccagcgagcgcttggagctgcacgtggacgcgctcggccagctgatgctctttgtggatggaatgctgggggtggtggcccacagt

SEQ ID NO: 161141 - DNA, 75 bp, Homo sapiens
actctcagagtaactgtcccctctgactaccatttctaaggaatccatcacttgaagatcaagcttgtgaccgaa

SEQ ID NO: 161142 - DNA, 82 bp, Homo sapiens
gtgggagtctccgcgtcccgctcgctgggagagaggtctctaattaacagaagatggcaaagcccagccacagcagctatgt

SEQ ID NO: 161143 - DNA, 97 bp, Homo sapiens
taaggagaaagtcctacaacagtttggcgtgcaacatggggcttgagaaaggttgatattcactgatggactccaaagaatcattaactcctggtag

SEQ ID NO: 161144 - DNA, 100 bp, Homo sapiens
gctctccatcgaaggcaacattgaaatcagagcctcattcccttagtagtgaagcattgatgaggagagcagtgtctttggtaacagatagcacctctac

SEQ ID NO: 161145 - DNA, 93 bp, Homo sapiens
tacagactacggtttgagctcagatatcgggctgaacggtcaaagacattcacaacatggatgttccaagatgagatgggattctccaacatg

SEQ ID NO: 161146 - DNA, 82 bp, Homo sapiens
ggaagacggcagtttggcgacatttctcggccgaagggccatttgcttttgcggaggtgtggacactgccagcggctgcagc

SEQ ID NO: 161147 - DNA, 74 bp, Homo sapiens
ctacctggagagcatcaactgcgtgcacagatgtccctaagtgccagctctcccctaaaagttccagctcatct

SEQ ID NO: 161148 - DNA, 90 bp, Homo sapiens
gaaaatgagcaagaaaatcgcccagctcaccaagttgacggactggacaaagcttctatagcaaactcagatggccccacagcaggttcc

SEQ ID NO: 161149 - DNA, 100 bp, Homo sapiens
aacactagattccttaaaaaccctagcagatgtcccctggaagcaggactgcatagtagcagcaaagtcacaatacacgagtgtgatgaaggctccgagc

SEQ ID NO: 161150 - DNA, 100 bp, Homo sapiens
cctagctataaaggtcttatgagacttttgcactgtaaaactttacacattgtgctattcactctgctttacaaggaccagtggttttggcgagtgagaa

SEQ ID NO: 161151 - DNA, 83 bp, Homo sapiens
ctcaaacgtggagatcaactcctctctgttaatggagtggatgatgatgctgaagctatccttgctgcagacttcgaaattgg

SEQ ID NO: 161152 - DNA, 100 bp, Homo sapiens
ggaaccttgatccccgtgctccggacaccccgggcctcgccatggccctggaatactgatttgcctgataatgtggaagaagtgaagcttttacttcata

SEQ ID NO: 161153 - DNA, 100 bp, Homo sapiens
tcctgcagtctctctgtgtggctgtaacttacgtgtactttaccaacgagctgaagcaggtgcttctcaatgatgacctcattgtcagtacaggatttgg

SEQ ID NO: 161154 - DNA, 90 bp, Homo sapiens
gttccgagcggcggctccggggcagctccggcgggcgcatcagacaacagtcagcgctttcgagaaacctgttttgcatttgccttgaca

SEQ ID NO: 161155 - DNA, 101 bp, Homo sapiens
tcaggaccgggcctcaaaatggccacacgcgtacccccgtagcggaaaaacaccttattgcaatatgcaagcaacaagaatgcatcagaacatattgtgta

SEQ ID NO: 161156 - DNA, 51 bp, Homo sapiens
tctttacaagcttgtaaaatctcaggactttgcctcccgggccaaactggc

SEQ ID NO: 161157 - DNA, 88 bp, Homo sapiens
agctacccccgcacccacgcggccctgctgaaagtggcgcaaatggtgaagatggagctggaaaaacaagcttaataagaaaaattca

SEQ ID NO: 161158 - DNA, 100 bp, Homo sapiens
cctgtcctcctggggccaccacttttagagagtcccacgaactggctgggtatacagaaatgtccagaggccggagagcgtttcagatcacatgtaccgg

SEQ ID NO: 161159 - DNA, 100 bp, Homo sapiens
tttactctgacaatgatgcaactaaagcagggctctctaaatacgtacagattctgcgataatgtgtggacttttgtactgaatgatgttgaattcagag

SEQ ID NO: 161160 - DNA, 104 bp, Homo sapiens
gacaacatcaccgtgaggcagggggacacagccatcctcaggaagaaacccaagacagctgaaaaccagaaggcatctgaggagaatgagattactcagccggg

SEQ ID NO: 161161 - DNA, 75 bp, Homo sapiens
cttgattggaatgttctccctgcagcagtcagcccaaaggaagcggatctgaaaagaacaattgctgtccttctg

SEQ ID NO: 161162 - DNA, 96 bp, Homo sapiens
catctcttaaagcgatttgcactgaaatagccaactgcagtttgaaagttttgtcacaacttggacaaaagtaacacagaagaaccttactatgat

SEQ ID NO: 161163 - DNA, 100 bp, Homo sapiens
ctgatgacctgctgctcgtgctgatctcaggtcagaatggcggcagtggagcatcgtcattcttcaggattgccctactggccctacctcacagctgaaa

SEQ ID NO: 161164 - DNA, 75 bp, Homo sapiens
gtaacttacgtgtactttaccaacgagctgaagcaggatgatcttgaagaccttatagttaattgggatgagagc

SEQ ID NO: 161165 - DNA, 82 bp, Homo sapiens
aggtccggggcttgccctggtcttgctcggccgatgaagtgcagaggtttttttctgaatgttgtaccatctttgggtaggc

SEQ ID NO: 161166 - DNA, 75 bp, Homo sapiens
cttggaagcagatcctaattctggccagtcctggtatttcctcggaaggacattctgagcatgtgagacctgagg

SEQ ID NO: 161167 - DNA, 100 bp, Homo sapiens
atggcgtcccccgggggcccgtactgcacatcgtggtggtcggatttcaccacaagaagggctgccaggtgccacttcggataaaccctttggactccta

SEQ ID NO: 161168 - DNA, 83 bp, Homo sapiens
atgggctccctgaggcccgcccagccgacgtgctggagaatctggtaaaagcaccattgtgaagcagatgaggatcctgcatg

SEQ ID NO: 161169 - DNA, 96 bp, Homo sapiens
gattccggaaaaggtgccaagagcttagttgaactccttgcgttgacccggacgacacctataatgagaccccctacgagaaaggtttctgctttg

SEQ ID NO: 161170 - DNA, 117 bp, Homo sapiens
ccggccccggggaactagggagcgtctccggctgcacagcgctcaggttgaaatcacaaagattagacacctttttagataggtgttcttcagcaccactgacaacacggttctgac

SEQ ID NO: 161171 - DNA, 74 bp, Homo sapiens
tcggagcaggcagagcagccgagccagatcctgaggaggatgaaggggctggccctggaggccgagagtgagct

SEQ ID NO: 161172 - DNA, 75 bp, Homo sapiens
gtaccaggaagcattgcatttggctagagttgggaagacatcactgattatgtctctggtcagtgaagaatttcc

SEQ ID NO: 161173 - DNA, 100 bp, Homo sapiens
agatcttgctggactgtggagaagacaacatctgtgtgcctgacctgcagctggaagtgtttggcaaatgcagccctgaggatttggctactgcatataa

SEQ ID NO: 161174 - DNA, 98 bp, Homo sapiens
ggcgggcccggcggccgcagcgaggagaagatctcggactcggaggcagttcaattaacctccagaagatggctgaacctgcaggaataccagagcaa

SEQ ID NO: 161175 - DNA, 137 bp, Homo sapiens
catcaacggaattgtgttcaacctgctggccttcttggccctggcctcccactgccgggccatgctgacggaccccgaacacctgattgagaatgaagtgtcaatactgcgccgagtgaaacatcccaatatcatta

SEQ ID NO: 161176 - DNA, 80 bp, Homo sapiens
gtgggactgcagccggggaatgaagctggctgagatcaagacaatgcagatcttcgtgaagactctgactggtaagacca

SEQ ID NO: 161177 - DNA, 100 bp, Homo sapiens
tgtggctgctgacagtcctcctggaggggatctctggccaaggagtgtacggctcagcttgtcaatcggaaacagaaattagagtctgtggaactttcta

SEQ ID NO: 161178 - DNA, 100 bp, Homo sapiens
aggccggagcggcacctacgtcctgatcgacatggttctcaacaagatggccaaaggtaaaagtacacctgtaagccagcttggttccgcagactttccc

SEQ ID NO: 161179 - DNA, 88 bp, Homo sapiens
cggctgtatgattaggccacaatcttcaatgagtaaacatattcctttgtcgccgtgatcctgaaggcgctgacctacgacgagaagc

SEQ ID NO: 161180 - DNA, 100 bp, Homo sapiens
tgagactgttcaggaaagaaaacagaaggatcgaaaggcactccatgagctaaaactggaagagtgacaccctctccagagcccagcaattgtgagggac

SEQ ID NO: 161181 - DNA, 83 bp, Homo sapiens
cggagcgccagctcaatgaatacttcctcgcgtattgctaaaggaggagttgaccacaccaaaatgagtctacatggtgctag

SEQ ID NO: 161182 - DNA, 100 bp, Homo sapiens
aagcacaggtacatcagctgctaacgcctgcaagtgccatctcaaacaaagaggcaagcagtggctctggtgccgacgccaccgccgagcccatgatcct

SEQ ID NO: 161183 - DNA, 75 bp, Homo sapiens
tctcgcttcgtcctacacttgcgcaaatgtctccggcttctgggaacttggcagacgcagcttagagagactcac

SEQ ID NO: 161184 - DNA, 82 bp, Homo sapiens
actgtcggcttcaaagagaaaaggcaacatcctgtcacaggccatgctctggcaaaaacggaggagtctgctactagtctta

SEQ ID NO: 161185 - DNA, 73 bp, Homo sapiens
ttggatcctgagaattgatctatgttggatcagtacagcagggaagaactggaaactcagagaaagaaactgc

SEQ ID NO: 161186 - DNA, 82 bp, Homo sapiens
caaagaacaaattgcagttgtttgaggcagccatgttgttcagttctggagtcttttggatgggcttgttattcatccctgt

SEQ ID NO: 161187 - DNA, 100 bp, Homo sapiens
cggcttatcgaacagagccgggagttcaagaagaacactccagaggagctgcgggcgtctttggagacacagcgtgctcagagcagtcgactctgcgtgg

SEQ ID NO: 161188 - DNA, 75 bp, Homo sapiens
cattcctttcaggacattccctctgatgtcctattttcaaacttcggacatgatgtcacacctggtgaagatccc

SEQ ID NO: 161189 - DNA, 112 bp, Homo sapiens
agaagactctcaagaagtgtgtaccacctctttttccacctccccaccatcccagactctgtttgctggctacacggacaacctggtgcgagtgtggcaggtgaccattggc

SEQ ID NO: 161190 - DNA, 101 bp, Homo sapiens
gcgctgcgcagttttgttctgctccagctgttcgaaggtgatccaggtactccaaagattcaggtttactcacgtcatccagcagagaatggaaagtcaaa

SEQ ID NO: 161191 - DNA, 73 bp, Homo sapiens
gatctcacacaagtggtcagtttggttgtggaaaggttgcacagagcattgaggatcaccatcaggaagtgat

SEQ ID NO: 161192 - DNA, 75 bp, Homo sapiens
tggaaagtgaggaattttgaagtacaccgtggtgacattgtatcattggtaaatgcactcggtgatggaaagaga

SEQ ID NO: 161193 - DNA, 80 bp, Homo sapiens
ctcaggcctttagtgatgatgaagttcagttctgcaagcaagtatgctgctctctctgttgatggtgaagatgaaaatga

SEQ ID NO: 161194 - DNA, 106 bp, Homo sapiens
cccgggtttggtagagtgacttctattcactaaaaccatgtgtctgaactgaagaagcttgggctcacttccacaaatgtgattgaggtagatgaatcagatgtgg

SEQ ID NO: 161195 - DNA, 100 bp, Homo sapiens
aacagatgactacccagggagaggaattacgggaacagaaagaaaagtccgaaagagctggtggatttgccgctgcagtcaccacccctctagacgtggc

SEQ ID NO: 161196 - DNA, 100 bp, Homo sapiens
caagaggcgcaaacaagccaatcccaggaggaaaaacggtatggcatttcaaatatagatacaaccattgaaggaacgtcagatgacctgactgttgtag

SEQ ID NO: 161197 - DNA, 98 bp, Homo sapiens
ctaccacggtgatgttgttggccaggtctctacggatctgatagcccagagtgtaatgttcaagctcagaaatgccttatgtggatcgtcagaatcgc

SEQ ID NO: 161198 - DNA, 82 bp, Homo sapiens
gaagcctcctgcgccggccttgcctcggatgtgtatatctcatgattgatatggagaaactagtcatgggccaaaggtcaag

SEQ ID NO: 161199 - DNA, 118 bp, Homo sapiens
gctggacgacacggtgccgctgacagcagccatcgaggcgagccagagcctgcagtcccacacggaggcaagtgaggcctatctggttggcctttttgaagacaccaacctgtgtgct

SEQ ID NO: 161200 - DNA, 83 bp, Homo sapiens
agtggaccatggttgctgacagaactaaagtctcctgcaagggagttgctggaagccatcaaacgtgactttggttcctttga

SEQ ID NO: 161201 - DNA, 74 bp, Homo sapiens
ccaccagtccccggaactgcccgaaggctacggcatcgactgggcccccgagagtaaccgtattgtgacctgcg

SEQ ID NO: 161202 - DNA, 75 bp, Homo sapiens
cagggctcctccgtccacgatggcgtccccgtgcctttccagctgcccccagcaccacctgaagaaactggaggg

SEQ ID NO: 161203 - DNA, 96 bp, Homo sapiens
acccgcacgccgggctttgttgtggaaatcccggttacctgaagctgcacacatacatgtaagagaagcaaaaatgtcagatgatatcaggaaaag

SEQ ID NO: 161204 - DNA, 100 bp, Homo sapiens
tgcgcctgtgggccgtgggggctgtgtcggagctgaggtgcaagggctcaggcgccaggcagctgacaccctagctgtacgccagaagcggcggatttac

SEQ ID NO: 161205 - DNA, 106 bp, Homo sapiens
caatgtggaaaatcagctccaagctactcaagctgccaggaatcagagatcattgatttcttcctgggggcctctctcaaggatgaggttttgaagattatgccag

SEQ ID NO: 161206 - DNA, 82 bp, Homo sapiens
aacttttgacacggctttggaaacgacgtcatgtgttagtgtttctaagacctcagagaaatttggaatctatagacccgca

SEQ ID NO: 161207 - DNA, 90 bp, Homo sapiens
ggcttgagagctgggttctattttccctcctcaaactgactttgcagccacggagagattctacttgacacacctggcattatcagtcct

SEQ ID NO: 161208 - DNA, 75 bp, Homo sapiens
cagaccacttgccacattgtcaccggccaagagccactgcacaatgaggagctggcaggagcaggccgggtggcc

SEQ ID NO: 161209 - DNA, 100 bp, Homo sapiens
tcctaccctctggctgcaatggggctgcactgtgagccctgcccccaacagatgcatcctgctctgacagtaacaacatgctgtaccccaaggaagacaa

SEQ ID NO: 161210 - DNA, 100 bp, Homo sapiens
ctttgttttcaatgacaccaagttggacgctatgctggaagaatttaagaaagttgtggaagctgatcgaggaagcctaagcaggctctgtgaagtggga

SEQ ID NO: 161211 - DNA, 75 bp, Homo sapiens
cgtgcccgcgggacctgacagccgggtcagaggtctcggcgcggaagatggccggcggcgtggacggccccatcg

SEQ ID NO: 161212 - DNA, 100 bp, Homo sapiens
ctaggatttgtcacgaatgggaagccaagtgccatcttcaaaatttcaggtcttaaatctgccgtgcaaggttataaacgcaaaagatgttgacttcatg

SEQ ID NO: 161213 - DNA, 99 bp, Homo sapiens
cctgaaccccgaagacttttgggagattataggagaactgggcgacggagcctttgggaaagtgtacaaggccgttgatgctcactgccatcagctgca

SEQ ID NO: 161214 - DNA, 82 bp, Homo sapiens
ttcctggcctgggcgctccggtggcggcggagaggagcaggagcggcttcgcttggagcaggagcgagagcaggaacagaag

SEQ ID NO: 161215 - DNA, 82 bp, Homo sapiens
cgccgcccgccctaccccccaagcagcggcagctgacttcagctacgggacggacgagtacgacggagaggggaatgaggag

SEQ ID NO: 161216 - DNA, 73 bp, Homo sapiens
caggaagtaactttagaggaggatctgatcgatcctgtcctcggtaccgtgggctttgggtctggcctccacg

SEQ ID NO: 161217 - DNA, 100 bp, Homo sapiens
acgaagagtggagaacggcaacccatccagatcaccatgccggtcagaagagatcaattctacagaaatttccagtggttctgttgaggctttatggaat

SEQ ID NO: 161218 - DNA, 75 bp, Homo sapiens
aatgatgatgtctcatatgtctcaggcttccatgcagcctgccttaccgacatgtcctatttgtgtgtctcttcc

SEQ ID NO: 161219 - DNA, 82 bp, Homo sapiens
ggcgcggcgcaggcaccggcccggggagaggcaccatgagcgccattggatttaatgtagagacggtgacgtacaaaaacct

SEQ ID NO: 161220 - DNA, 89 bp, Homo sapiens
cgcccgtggtccggccatggacgacctcgggagtaccctgacttctaccggaagctctacggcctcttggacccctctgtctttcacgt

SEQ ID NO: 161221 - DNA, 100 bp, Homo sapiens
ccggaggcagagcggctgccatgttttttgctccactcaagcctgttagaatcaccatggaatacagctccagtgggaaggccactggagaagctgatgt

SEQ ID NO: 161222 - DNA, 90 bp, Homo sapiens
atactcaattggatgctgctcaaatgagaaatgatgtcatagaggaagaccttgcaaaggggaccacttctataagagaaacaagaacct

SEQ ID NO: 161223 - DNA, 97 bp, Homo sapiens
aatagtagttctggtaccagctatcatgaacagggtccttctcccacacctgaggatgtctccatgaaggaagagaatctctgccaagctttttctg

SEQ ID NO: 161224 - DNA, 75 bp, Homo sapiens
tgtgtagcgtcagatccttgagtgataaaggagtagagagacctacagagttgaaacagtgaaacctggaaagat

SEQ ID NO: 161225 - DNA, 100 bp, Homo sapiens
gaagtaggagaggagttcggcgccgcttctgtggccacggcagtattcatgggctgccctgggcaagagccagctctgtttagcactgataatgatgact

SEQ ID NO: 161226 - DNA, 110 bp, Homo sapiens
aaagaagttgctgttggggactcggaaggccgtatttgggtctatgacgttggagaggtgtatgcaacagcgttattgcaacaggctaacgaaaacagacaaaattcaac

SEQ ID NO: 161227 - DNA, 104 bp, Homo sapiens
tacgatgttgcagctcagccctgaagaaaagggaaaacttgctgcggttgctcaaggatcagttcttaagagcagccccggtaactggaggaatgggagccgtt

SEQ ID NO: 161228 - DNA, 50 bp, Homo sapiens
gttctgtgctggagccatcgaccatatcactccttcgagaactcatagaa

SEQ ID NO: 161229 - DNA, 98 bp, Homo sapiens
ctgggccgggagccgggtgagggcgccgagaggctcggtgggcgcgggcggcgagtactatactggcaattgctggagaagattttgcaattgttgct

SEQ ID NO: 161230 - DNA, 82 bp, Homo sapiens
cctggggtcggcgccgagtgggaggatggcggaaggcgtgatggtgggcatgggtcagaaggattcctatgtgggcgacgag

SEQ ID NO: 161231 - DNA, 101 bp, Homo sapiens
ccaggactgaccgctgccgcccagcacgtccagggggaaatttgcagtggtgagaaaatgtataaagaaagattctgggaaagaatttgctgcaaagttca

SEQ ID NO: 161232 - DNA, 83 bp, Homo sapiens
ctgggattcgcgctgctgggcacccacggagcctccggggctgatgaggacggggacttggttgccttttccagtgacgagga

SEQ ID NO: 161233 - DNA, 100 bp, Homo sapiens
catccacagtccttcagcagattgattcagtggctaatgctgatatcataaatgagcactcactgtgggcctcgtgcgacagtgtcaaacaatccatgga

SEQ ID NO: 161234 - DNA, 50 bp, Homo sapiens
tccctccccatcttctacagggaggataagatcaatgccctcattaaagc

SEQ ID NO: 161235 - DNA, 98 bp, Homo sapiens
tcggcgcggagccccggcccgccgcggtcccgtctcctgggcctgtcccgcccgcgccctccgccggccctcagggtactatttttctgcctggaaat

SEQ ID NO: 161236 - DNA, 100 bp, Homo sapiens
gttataccctaaccatcttggatgctgggctttgttatgctgtaattcataaggctctgttttatcaggtaatgctgaaagccatcccttctttcttgaa

SEQ ID NO: 161237 - DNA, 152 bp, Homo sapiens
aggtgactctctggatggaccagaatacgaggaggaagaggtggccataccgttgaccgctcctccaactaaccatacctggagtagaacagaaaaattattatgtctgtgttcccttgggactcattggaaattgtacagtgacatcttct

SEQ ID NO: 161238 - DNA, 98 bp, Homo sapiens
agttaatcctcaatttaagcctgatctaacccctagaaacaggtgtcttataagactttgacacttcctgttttgtctgaaaaaaatgtgaattacct

SEQ ID NO: 161239 - DNA, 75 bp, Homo sapiens
cccccttcggcgacgtctcctcccgcctcaccacagactgaaggggctggacttgctacctgtatagaactgtgt

SEQ ID NO: 161240 - DNA, 74 bp, Homo sapiens
gccacccgctaggatgccggtggccccagcgccctcagccgacggaggatgttgcttcagagtgtgaagtcaaa

SEQ ID NO: 161241 - DNA, 75 bp, Homo sapiens
gaagaattgaattttacaaagaatccaagcaacaggctctgtccaatatgtatctctcagaagatagaagtgtgc

SEQ ID NO: 161242 - DNA, 100 bp, Homo sapiens
gtcaaaatctgctccgacatcaagtaaaggatttgcttgacttgattaagcaacccaaatgtcaaatcaacagtgccttgacatctttccacactgcttt

SEQ ID NO: 161243 - DNA, 98 bp, Homo sapiens
caacaataagcccaagctacctgtggtgatctcgcagtgtggggagatgtagtccagacaaagactgaatcagaatctcgctccgttgcccaggctgg

SEQ ID NO: 161244 - DNA, 100 bp, Homo sapiens
agcgactattttggtctgagatttatggattcagcacaagtagcagttaatccagcacgtatggggccaagtgtaggctcccagcaggaactgagagcgc

SEQ ID NO: 161245 - DNA, 82 bp, Homo sapiens
ctccaagtctctgacttgtgcttggcagcaacatgaagatcattttgacttaattcagtgcacaaatgagatgaatgtgaac

SEQ ID NO: 161246 - DNA, 74 bp, Homo sapiens
tttgccaccattccttcaaatgagtgtaaacaggaacatcgataagtagtgtaaaaacttgcacaatgaaatcc

SEQ ID NO: 161247 - DNA, 101 bp, Homo sapiens
gtgccatccacagtctcatatttggaggatttgcttccaaagaactaagtagtcgcattgatcatgtaaaggtcagaatggcggcagtggagcatcgtcat

SEQ ID NO: 161248 - DNA, 100 bp, Homo sapiens
cttcttactgctgtacttcagtgaatgtaacaaatgtgatgacaagaaggagagatctctgctgcctgcattgaggggatttgaatttgttgaaatgagc

SEQ ID NO: 161249 - DNA, 75 bp, Homo sapiens
attttgaccaagcattttgtaaggtaaataccagctgtcccctacagtgaatatgccccaagatgacactgtcat

SEQ ID NO: 161250 - DNA, 74 bp, Homo sapiens
cgctgctgctgcccggcctcgggctccaattaaggaacagctatatcctgcttccttctgtaagcagcatcgac

SEQ ID NO: 161251 - DNA, 100 bp, Homo sapiens
agtgatgaggaaagctgtgaaagttctcaaggaagctgttttaggttatgtgaaagagatgtttcctcatctctaaggcttaccagaagctctgatttga

SEQ ID NO: 161252 - DNA, 75 bp, Homo sapiens
gggcagttgcagtgttggagctaaaggggatatgagactttctactcggaatatcctgagtgttgcgtggatgta

SEQ ID NO: 161253 - DNA, 82 bp, Homo sapiens
attggagctgaaggcggcggcagagaacttgccggtgccagctgagacaatgcagatcttcgtgaagactctgactggtaag

SEQ ID NO: 161254 - DNA, 82 bp, Homo sapiens
aacatcctctccgtgcagccctacagccaagaatgggagctgtttcatctctgtgccaacttttttcaagaaaatccaactc

SEQ ID NO: 161255 - DNA, 91 bp, Homo sapiens
tgaacatttgattccacagctgggctatgtggcaacaaataatcttgtgccgtggaaatcagaagggcaaaacgaagcagtcatgatgaga

SEQ ID NO: 161256 - DNA, 75 bp, Homo sapiens
cgcagggatatctactgaaggaagctcggacttctcctggggatatggtgtagcaaattatggagttggaggaca

SEQ ID NO: 161257 - DNA, 75 bp, Homo sapiens
tcaagcccacagggaaccgcctcaggactatctcagcaaaaactcatcatcaggctgttaacttcaacattttcg

SEQ ID NO: 161258 - DNA, 82 bp, Homo sapiens
cagtgcataaacgaggcgcagcgggtgaagttctccagtgctgatgaagcggctttaaaagagcccatcattaagaagtttg

SEQ ID NO: 161259 - DNA, 101 bp, Homo sapiens
gcgagagatggaagcggcggcgacgccggcggctgccggggcggcgaggcgcgaggagctagtatgaaaagacacagactgtactctcagaactgaagttg

SEQ ID NO: 161260 - DNA, 113 bp, Homo sapiens
gctggaggacatctgggggccacaaatgctccttctcctggagacgcaactcaagggcagagcggcttgggtaaatccaccttaatcaacaccctcttcaaatccaaaatcag

SEQ ID NO: 161261 - DNA, 100 bp, Homo sapiens
ggcctactcgcccgccaccctgcgctgccgccgctctgaggagttaaagattccaaatcctttatttgatctggctggaataacgtgtggacactttctg

SEQ ID NO: 161262 - DNA, 96 bp, Homo sapiens
caacaagcgcatcgggcagatcaagagcaagaagttccggtgctcagctgtccaggcagccatcttgtctggagacaagtctgagaatgttcaaga

SEQ ID NO: 161263 - DNA, 51 bp, Homo sapiens
tgcaacacacctgcacgcaacagaagaaggaatgtccagaaagagaagtgt

SEQ ID NO: 161264 - DNA, 50 bp, Homo sapiens
gtgagggatattcttgaaggaattcaaagattatgatgcatcattatcac

SEQ ID NO: 161265 - DNA, 76 bp, Homo sapiens
acagcatgtgttaccaagctgtttcctaccaggtcacacactgttgcagcgcagggtcacggagactcaccagttg

SEQ ID NO: 161266 - DNA, 100 bp, Homo sapiens
ggaggatgtcagatcggcattgctggacccggagctggaagctatcaaagctcgagtcagggagatggaggaagaagctgagaagctaaaggagctacag

SEQ ID NO: 161267 - DNA, 87 bp, Homo sapiens
cctttgaccacgaagattttacaggaaattgtgaaccccgatggttttgatgttctccgccgagtctatgtggacttcgagggcatc

SEQ ID NO: 161268 - DNA, 100 bp, Homo sapiens
gctgggtccgctgagcggggcgacccgagattcacagtctgagaatgaggcttcaccagtaaaacggccacgactacttgagaatacggaacggtccgag

SEQ ID NO: 161269 - DNA, 90 bp, Homo sapiens
ttctgcccgcctgagtgatcttgaaatgaataggtgaaaggtgtagcagtcactcggcctacacccacagcatcgaccttgtgaacccag

SEQ ID NO: 161270 - DNA, 74 bp, Homo sapiens
gcttcagcagaggctgcagggccagcagtggtggacttgctttgtgaagagacagttcatgaacaagagtcttt

SEQ ID NO: 161271 - DNA, 80 bp, Homo sapiens
gctgtggttttgatcatgttgttaccctcggacgtagcccggcttgtattgggtgatgggcagaatctgtttacgaaaga

SEQ ID NO: 161272 - DNA, 90 bp, Homo sapiens
ataagatttcaggagctgatattaactccatctgtcaggagggttaaagcacgaattgggagctctcagcgacatcaccagtcagcagcc

SEQ ID NO: 161273 - DNA, 100 bp, Homo sapiens
aatccgaagtgccgcggaaagtggaggtgagggccgcccgccctagaggtgcccgtccgagaggcaggcagtcgatgatgtgaagaaaggttacatcaaa

SEQ ID NO: 161274 - DNA, 74 bp, Homo sapiens
acgggctgggcgtggcccggccgcactatggctatgccgacaaaaggatcaaggtggcgaagcccgtggtggag

SEQ ID NO: 161275 - DNA, 78 bp, Homo sapiens
gaccatgggctccaggatcaagggtattccctcagcggatactacacccatccatttcaaggctatgagcacagacag

SEQ ID NO: 161276 - DNA, 88 bp, Homo sapiens
cctgcaaagtaaaccctttccccaaggacaggcttctccagggaaagtgaccgaggcagtgaaagaggccattgacgcagggtaccgg

SEQ ID NO: 161277 - DNA, 75 bp, Homo sapiens
tccccagtggtggtgttcagatttttccaggaattaccaggctcaggccctcgggaccaaggatcacgtcatgac

SEQ ID NO: 161278 - DNA, 105 bp, Homo sapiens
ccgagcgggcggcttcctggcctgggcgctccggtggcggcggaggctatgcccactggaagggccaagtgctgaattcagatgagctccaggagttgtacgaag

SEQ ID NO: 161279 - DNA, 75 bp, Homo sapiens
ggccccgatggctctgtgcaacggagactccaaggtgctggagaatctggtaaaagcaccattgtgaagcagatg

SEQ ID NO: 161280 - DNA, 71 bp, Homo sapiens
agtcttcctcttgatccatatgtttcagtctcccatcaaaggacgtgcacagccttatgatcccaattttt

SEQ ID NO: 161281 - DNA, 100 bp, Homo sapiens
attgccggcaagagggagttaaggacattccaggcagaggcaagttcagacttggttccttcaacctagagaaagttgaaaacccagctgaagtcattag

SEQ ID NO: 161282 - DNA, 100 bp, Homo sapiens
gggtatagcagatacatggcaagttgttggaacagtgacttgcaaggtagctacagcaagctgggtagcaggcagatccaaaggatatcatgaagtttcc

SEQ ID NO: 161283 - DNA, 75 bp, Homo sapiens
aactgcctggccgaatcagccttttcacgctcaagagcatcctggccagaacaagccaaggagccaagacgagag

SEQ ID NO: 161284 - DNA, 100 bp, Homo sapiens
ttttgaagcagaatcctgagggccaatggacaattatggacaacaagagacgagttgtactgctgtcacaggaaatggacgctggattacaagcatggca

SEQ ID NO: 161285 - DNA, 100 bp, Homo sapiens
tcaaggctgcctataatcaagtaaaaacaatagctcaaggaaacctttccaacacagatgtccaagctgccaacctgaagaaagttcgtggcaaagtctg

SEQ ID NO: 161286 - DNA, 100 bp, Homo sapiens
ccgagggcggcgggcacgcacggcccgggccggcgctccaaggcccgcccgggagggccggggccgcgctcaggactcgctcagcagcagcctgaaaact

SEQ ID NO: 161287 - DNA, 100 bp, Homo sapiens
gtcttcagcggggcgctccaggaggcactcacaggctatgactttgcagccgtcctggagtggttcgcggagcgtgtggaccgcatcatcctgctcttcg

SEQ ID NO: 161288 - DNA, 75 bp, Homo sapiens
tgactcagcttacactgagctgaatgaaattggaagaaccagaggcaggagaagtgtcccctccagtcggtgcgg

SEQ ID NO: 161289 - DNA, 83 bp, Homo sapiens
ctcaggacaacccagatgtgcaacaaagtgcgatgaatccagacatctgttgagcccgcagttggtacagtaccagtgtgggg

SEQ ID NO: 161290 - DNA, 101 bp, Homo sapiens
tgctccagctgaaggtgcgagaagaagtcagaaatctacagttactcacacaagctccagaagtattccaggtgtacatggacagaggccccggatactcg

SEQ ID NO: 161291 - DNA, 76 bp, Homo sapiens
gaagtatgtgttacggagacatgctcttattgtacagatactagttttcccagaaggtacttgtactaatcgttcc

SEQ ID NO: 161292 - DNA, 96 bp, Homo sapiens
gcagtacctcctaggactctatgacacggccggacagttctttaggtgctgggaatgtagccgatcgtgttttggctcagctcttaacagaaatgg

SEQ ID NO: 161293 - DNA, 75 bp, Homo sapiens
ttcaggattgagacccggaaggcttcaaaggctgtcgcaaggaggaagggatgtgcccttctcgtaaagttgttc

SEQ ID NO: 161294 - DNA, 87 bp, Homo sapiens
ctcatctccggccctctcggcgtccgccagcgatggcacaggtatatttgcttacttaaactaccatgttcctcgaacgagacgaga

SEQ ID NO: 161295 - DNA, 88 bp, Homo sapiens
tcggctgctccccggtggcccaggcctcggactccgcggccggcccggcgcggcccagcgccctcagtttttggctttcacccccaac

SEQ ID NO: 161296 - DNA, 80 bp, Homo sapiens
agaccagacctgcaagctctttgacacacagcagttcttgtcagatccactccttataccgccgcacaggtgccagcttt

SEQ ID NO: 161297 - DNA, 75 bp, Homo sapiens
ctttgtactaccgcagcaacatggctgacatgctttataatttactggtcgaattgacaaatcttaccctacagt

SEQ ID NO: 161298 - DNA, 98 bp, Homo sapiens
gtgatgaataaaaacatttcaactccctacagttgtgccatgctgccgccagcaatctcaatgcctcagaaatcttttaatgccacagcagagagagg

SEQ ID NO: 161299 - DNA, 75 bp, Homo sapiens
tcagcgtgcccatcccggggggcagcaacggcgacatccagcaagatattgatgatgttaagaagttcaaaccgg

SEQ ID NO: 161300 - DNA, 100 bp, Homo sapiens
gacctcttccagtggctgtgctcagattccctgaagctctgctgccccgcaggcaccttcgggccctcctgccttcggtcttgctacgtacgttgcccag

SEQ ID NO: 161301 - DNA, 75 bp, Homo sapiens
gggaacgattgggctgagcagaggacgacatgttgcttttcgtggaggaaacccttttccaaagagaaatgaaga

SEQ ID NO: 161302 - DNA, 98 bp, Homo sapiens
ggaaatacgtccagtaccagaatgtcccaaggaacacctgggcaacagaatattggtcaagttgctgaccttgaagtcctccacagcctgtgaatccc

SEQ ID NO: 161303 - DNA, 75 bp, Homo sapiens
caggacacaactggaaatgaccgattgccaggtccaagagcggttgcagcatctttttcaatgagtgcctatgtg

SEQ ID NO: 161304 - DNA, 90 bp, Homo sapiens
gtcgcgggagcctttggggcaccacagagatgcgggaagcaaccagcttggccccatatatggccacacatcagtgatgacaggaagttt

SEQ ID NO: 161305 - DNA, 96 bp, Homo sapiens
ctgcttcgggcctctggaatttagcgctcgcccagctagccgcaggcttgggcactgtttaaaggaaagttccgagaaggcatcgacaagccggac

SEQ ID NO: 161306 - DNA, 100 bp, Homo sapiens
aggaatctcagtagggacaacaggcaggagaattatgggagcgcatttccccaggtggattttgctctgaaggttctccagtggtctgactacgagatag

SEQ ID NO: 161307 - DNA, 75 bp, Homo sapiens
aggaaaatgcaagaagactgatggagcaggcttgcaatattaaattccagttcagacatcataagagatctttta

SEQ ID NO: 161308 - DNA, 78 bp, Homo sapiens
ggaaatggcaacttgcgcggtggaggtgttcgggctcctggaggacgaggtgcttttgaagatgatgatatcacgcac

SEQ ID NO: 161309 - DNA, 75 bp, Homo sapiens
cttggagttttacagggaacatgtcaagccactcttcaatatggaagataaggtggacccccaaaagtacaaggg

SEQ ID NO: 161310 - DNA, 98 bp, Homo sapiens
tatgacaggcctcggggtcgtcccatgtccaaaaagaagaggagttttctcgggtccgggaggaggtaccactggaattggttgaagctcatgtcaag

SEQ ID NO: 161311 - DNA, 74 bp, Homo sapiens
cgaggttgtttgcaacgaccgtctggggaagaaggtccgcgttaaatcagaatggggaaatggagagagaacct

SEQ ID NO: 161312 - DNA, 71 bp, Homo sapiens
ggattgcagcggaaaagcaaagtctccatctgctgctgcctcttcatcctcttcctcttcctctcggagct

SEQ ID NO: 161313 - DNA, 82 bp, Homo sapiens
cttggaactaaaaacttttctcaaagttgcggacaaggcaaaatctcagcaagttcggacctctagtacaataaggcgaacc

SEQ ID NO: 161314 - DNA, 96 bp, Homo sapiens
tcaggttaaactctaaaaagaagaatcttcatcttgagttggaagcactgtatgacgccgtgcccatccagtccagcgtggtgttatgttcctgcc

SEQ ID NO: 161315 - DNA, 75 bp, Homo sapiens
tccagccgagatgctaagagcaaggccaagaggaagctcctgcccctcctaaagctgaagccaaagcgaaggctt

SEQ ID NO: 161316 - DNA, 89 bp, Homo sapiens
ggtgaggacatgaggaaaatgtccttccagcgctgcgcccggacagacaagagtgatggtgtgcaacaaacaacctacctcgcccagca

SEQ ID NO: 161317 - DNA, 75 bp, Homo sapiens
cgacttactggggagagaaagaaaaggaacgggagctgagagaacaagttgaaatcatcgcagaaggataaagtt

SEQ ID NO: 161318 - DNA, 100 bp, Homo sapiens
aaaccccagattcctttgaaaagcatattagaagcattttgcaacgtagtgttgccaatccagcatttttgaagccctcttcaatgccatcatcccagat

SEQ ID NO: 161319 - DNA, 100 bp, Homo sapiens
gctgcttatggcggcgctggagagggggcgctgagctgttggggcagaaaatgtgctagattggaggtgaagaccctggagccagagagcctaggcttag

SEQ ID NO: 161320 - DNA, 75 bp, Homo sapiens
ttccgggagcctagatcctgtgctttactctgaagactcgtggtataagttgaaatccaaaccaggaaagaagga

SEQ ID NO: 161321 - DNA, 100 bp, Homo sapiens
ctctgtcttttctgtgacgggagcaatgctgacctcggtttcctggacccattccgactcagagctatttatgaagaaattgatgctcaccagcacaaag

SEQ ID NO: 161322 - DNA, 100 bp, Homo sapiens
agatagacacgtacctgaacgccgccttggacctcctgggaggcgaggacggtctctgccagtataaatgcagtgacgatatttggagttcttacaacat

SEQ ID NO: 161323 - DNA, 75 bp, Homo sapiens
cgaggagtctctgtccgggggcctggctaaggaaaccctattacctccagcttctcaataggtttggcatggaca

SEQ ID NO: 161324 - DNA, 96 bp, Homo sapiens
atggattgggaagaaagaagcaagaatggtgttgtaaaagatcagccttcagaacaggaggtgaggttccgccctgcacactggcccctgcctcgg

SEQ ID NO: 161325 - DNA, 96 bp, Homo sapiens
tgctacgtggagaaaacctcggataaggtctggagcccggcactgtggtcataacagagcaggcagtggatacctgcttcaaggcagagtttgagc

SEQ ID NO: 161326 - DNA, 94 bp, Homo sapiens
cgcaccatgccgctcctaagcctgcacagccgcggcggcagcagcagtgagagaaagaagatgctgatatgctacaacacggatgaacctggag

SEQ ID NO: 161327 - DNA, 75 bp, Homo sapiens
ccttctggtataccatcgtcaccatgacaacactagggtgttttattccaaacgtctatgctgctttgttcactg

SEQ ID NO: 161328 - DNA, 100 bp, Homo sapiens
aagaaaaacagaaaaataataattacatctgcaaagaccttatttccaggtggttgaccagattgacaccctgacctctgacctacagctggaggatgag

SEQ ID NO: 161329 - DNA, 75 bp, Homo sapiens
gtaaagatcaaaagaattcgaagggagttggtaaacgctggaatgaatctgaagtctgctgcagtaaaacacaga

SEQ ID NO: 161330 - DNA, 89 bp, Homo sapiens
gccaatcccaggaggaaaaacggagccaaaaacctgtatatcatctccgtgaaggggatcaagggacggctgaacagacttcccgctgc

SEQ ID NO: 161331 - DNA, 90 bp, Homo sapiens
ggtatccaagggttgtatcgaggctataaaagcacagttttaagagagcttatcacacagactttcagccaccacaatcagctggcacag

SEQ ID NO: 161332 - DNA, 88 bp, Homo sapiens
ccgctccggcctcgggctgcccgtggcgcccgcaggcggcaggaatcctcctccggcgataggaaatctggcattttttaaagtttgc

SEQ ID NO: 161333 - DNA, 75 bp, Homo sapiens
ttcatccccatgaactaaataatctcctgtctaaaggtgtttgtgaaccgaagtttagcaatggaaaagataaag

SEQ ID NO: 161334 - DNA, 75 bp, Homo sapiens
caagagatggcagctgggttctttactgctggatcgcagagagaactcgatgccaccgcaacggtattggcgaac

SEQ ID NO: 161335 - DNA, 83 bp, Homo sapiens
ctcgtaattacattctctcggccagcgcctccgcgtgcagagcagagcgggcggaggaccccgggcgcgggcgcggacggcac

SEQ ID NO: 161336 - DNA, 100 bp, Homo sapiens
gtcaatctactggattcaaaaacaattcaaggggagctgggctggatctcttatccatcacatgggtgaaccaaggactgggttttgctctggaagcctg

SEQ ID NO: 161337 - DNA, 88 bp, Homo sapiens
cctgggcggcgtggagacggcgccttcagcttgagatagctgaagctcagggccctgtctgctctgtggactcaacagtttgtggcaa

SEQ ID NO: 161338 - DNA, 75 bp, Homo sapiens
attggagccaagaaatgagtataggtcgttccaggggtagaggaggcatgaaggatgaccgtcgggacagatact

SEQ ID NO: 161339 - DNA, 83 bp, Homo sapiens
cgcggagcccggctcccgcaccatggaggaggacgacagctacggatgccggaccagatctctgtctcggagttcatcgccga

SEQ ID NO: 161340 - DNA, 83 bp, Homo sapiens
tggcatcatagttgtgtatgatgtgacagatcaggagtctactcttcatcttgtgttgagacttcgtggtggtgctaagaaaa

SEQ ID NO: 161341 - DNA, 75 bp, Homo sapiens
gtccttctgcaaagcacggagagcaaactgcaccttcaaggagctacaatgatagctgtttcctggattcctccc

SEQ ID NO: 161342 - DNA, 111 bp, Homo sapiens
cggcaaaggcaagagtaacagcagcgccgtcccgtccgacagccaggcccgggagaagcgccatgtcagaaccggctggggatgtccgtcagaacccatgcggcagcaagg

SEQ ID NO: 161343 - DNA, 97 bp, Homo sapiens
gccgcgcggtgatgctcctgaaaacgtctgcccggcgtagcgggaacccagcatgattttcaggagacctgtcggccatggagcctaatgatagtac

SEQ ID NO: 161344 - DNA, 100 bp, Homo sapiens
tcgcgcactttttggatcggcatctagtctttccgcttcttgaatttctctctgtaaaggagagttttccagaaaaagaccttctgcactgtccatctaa

SEQ ID NO: 161345 - DNA, 93 bp, Homo sapiens
tgaagccactgaggaaaagatcagggagtactttggcgagtttggggaggtggcaggtgtcacagctttagcctgtggaatgatagcagtagg

SEQ ID NO: 161346 - DNA, 50 bp, Homo sapiens
ccagaacttgcagcaacaatagaacggcccgggatgttggacttcacggg

SEQ ID NO: 161347 - DNA, 101 bp, Homo sapiens
gaggccgcggacattttggtgccaagccgaaccgagccggggcgccgggagctattgggacctgcggtggacagaggactgcagaaaatcaacctatcctc

SEQ ID NO: 161348 - DNA, 75 bp, Homo sapiens
gctgtgaagaaagtgattgctgctatgaccgtggggaaggatgttagttcctggtccagaactttacacagaaaa

SEQ ID NO: 161349 - DNA, 100 bp, Homo sapiens
aacaactgagagaactgcaggacttgtcccccggttttgcacacgtaagcggtcagaagtgtttgacaagcacggagataatgagaattcaaagggagac

SEQ ID NO: 161350 - DNA, 88 bp, Homo sapiens
tgcactcgatcccctcagagcaccacgaggccatcacctgcctggagtgggaccagtcaggtgtttcagtcacctccagtaacacggg

SEQ ID NO: 161351 - DNA, 75 bp, Homo sapiens
ctcacttccccggggtgtaataatgttaactgagattttaccaaatgttgcaagaactctggagttcttatggta

SEQ ID NO: 161352 - DNA, 100 bp, Homo sapiens
ctccctgctggagcaagaggcagagctgtgggcggtggagtctagacttccccaaggcgtgtacccaggtgtgatgaatgcagactctgctaccattttg

SEQ ID NO: 161353 - DNA, 100 bp, Homo sapiens
ggtcgtttgtttctccaaggtttgaaaagcagctggcctgcaagcctgcaggtcaggagtcatcttttcccccttctggtcagtatccttatcctagtgg

SEQ ID NO: 161354 - DNA, 74 bp, Homo sapiens
ccgagagatgaggccggagcccaccaagttctgggaaaacccttaggagaaatcttgagagtggacagcaattg

SEQ ID NO: 161355 - DNA, 100 bp, Homo sapiens
ggacgaggggaagtcgtacagcgtacaaaattggacagctgtacatgatcagcaaacacagccatgaacagagtgaccggggagaaggggtggaggtcgt

SEQ ID NO: 161356 - DNA, 100 bp, Homo sapiens
aggggattcaacttcaatttttctgcagtggctctgggtccagccccttacttaaagatgtgctacacaaaagatggagcatagtatcttcaccagaaag

SEQ ID NO: 161357 - DNA, 90 bp, Homo sapiens
gccatgggtcctcgacctgcagggagcagaggggacagaggcaccaaggacctccaagacagaaagaaatttcagagcttccaagaccac

SEQ ID NO: 161358 - DNA, 100 bp, Homo sapiens
ggaaccaaagcggatcagagagggctaccttgtgaagaagaacaccaatcagggtcttcaggcctggaagattgaagacattccagccaacaaaatgtcc

SEQ ID NO: 161359 - DNA, 100 bp, Homo sapiens
aggcagttatgggagccctagagggcctgagagttgctattggaccatgtagaatgttgcaatattgtttacaggaaaattgcctaagaattatgaccca

SEQ ID NO: 161360 - DNA, 100 bp, Homo sapiens
gccggcagccggcagctttgcagcggggccaaacagcctttgatgtagcagatgaagacattttaggatatttagaagagttgcaaaagaaacaaaatct

SEQ ID NO: 161361 - DNA, 50 bp, Homo sapiens
cagcgctcagcccacctgtgattatgatccagacatttaatgtggatgca

SEQ ID NO: 161362 - DNA, 100 bp, Homo sapiens
ttttaaagtatatgtatgacttttaaaagagagagcttgtgaaactgagggaatagaacatggttggtgcgggagaggtggatgaagacttggaagttga

SEQ ID NO: 161363 - DNA, 75 bp, Homo sapiens
tgcactacaacaggaaaatcatattatagatggagtaaaggtttttgtggaaactctggataagtgtttcgaaaa

SEQ ID NO: 161364 - DNA, 100 bp, Homo sapiens
agatgcatcagttccttaatatacacgtgaaatttgaaaactgtacattcgtatacgctcaacggcaagaaagtggaagttgccgtcaaacagatcatcg

SEQ ID NO: 161365 - DNA, 100 bp, Homo sapiens
ccggtgcccgaggaggcagccaagctcatggcctgccactgcgtgcgaatactcccccagttgcaagaggcgcaggaccgtggaagacttcaacaaattc

SEQ ID NO: 161366 - DNA, 78 bp, Homo sapiens
gcttttcttgagttcttgccagcaaattttggcagaaacctccacagctgttgagaaaaaggagaaacctcttccaag

SEQ ID NO: 161367 - DNA, 99 bp, Homo sapiens
cacgatctcctgaccagcggtcagagccttctgatcattccaggcactcgccgcagcagccaagcaatggcaggctggtagagcagatcacccccaaag

SEQ ID NO: 161368 - DNA, 100 bp, Homo sapiens
atacagacagttcctgctctaagaggccatctgtgaggctcagtctcccaacacctctgctgctcaagatgaggaggtgcgcggggccggggcggagcag

SEQ ID NO: 161369 - DNA, 75 bp, Homo sapiens
gttccaatgagttatctaacgtctatggattagctaggtggttggtggaaggtctttgagagctggatgcaccat

SEQ ID NO: 161370 - DNA, 100 bp, Homo sapiens
cgacgagtacgactacctattcaaagtaattcgccaaaatgacgaacacaaagggaaagaggagaggcacccgatatatgttctctaggccttttagaaa

SEQ ID NO: 161371 - DNA, 80 bp, Homo sapiens
tgcagcccgcgcacagctgctcccttcgccttcgccctttccacctcgcggcagttcgttgccagagtctgccctccgag

SEQ ID NO: 161372 - DNA, 101 bp, Homo sapiens
aaggagaaagtcctacaacagtttggcgtgcaacatggggcttgagaaagggagcagtgaggagaatgaataccttccaagaccagagtggcagctccagt

SEQ ID NO: 161373 - DNA, 98 bp, Homo sapiens
ggatgtgtgtggaggacatctatgccaacatcttcatcatcaaatgcagccgagagacagagaagcggcagtccctgccccggtgggccgagtgcagg

SEQ ID NO: 161374 - DNA, 99 bp, Homo sapiens
atgtacttttgggaatggaaggatctgttaagctcagattttaaactgtctacggttcttaacctcatctgttaagttcccatgcctggagaagctaat

SEQ ID NO: 161375 - DNA, 90 bp, Homo sapiens
gttcaaggaggccttccagctgtttgaccgaacagagtcagtgtgcggtttgggagaaaatgtgtcggatattttggggcggtcacgtgg

SEQ ID NO: 161376 - DNA, 83 bp, Homo sapiens
ccgccaaaccccagctggaactccggccacagccagcatgcagacaatgcagatcttcgtgaagactctgactggtaagacca

SEQ ID NO: 161377 - DNA, 88 bp, Homo sapiens
gcgcccctcggggctccagtggagagttcttacgatgcgtctgttactagagtggagagtctaccttcgtctcacatgtgccacaaag

SEQ ID NO: 161378 - DNA, 98 bp, Homo sapiens
gatcaccagcttctacctataagacttcaactcaagatgcagattcccaaatgctggaaaatcctctttgctaagttgtgtttctcatgcaaaacctg

SEQ ID NO: 161379 - DNA, 95 bp, Homo sapiens
gggaacttcggagagctcagattaggtcttggtatggtgactcctgtgaacgatcttagaggatctgattctattgcgtatgacaaaggagagaa

SEQ ID NO: 161380 - DNA, 101 bp, Homo sapiens
ccggcgtctaggggagcgaaggctgaggtggcagcggcaggagagtccggccgcgacaggacgcaacaactccaggcccagcatttatcacatggacatgg

SEQ ID NO: 161381 - DNA, 74 bp, Homo sapiens
ggtggagtgtaggtcatatcgccgcgtccagaacacatattacataatggagccgggagacagactagggctgg

SEQ ID NO: 161382 - DNA, 74 bp, Homo sapiens
ccctgtgggtgctgggcctctgctgcgtcctgctgaccttcggtcctcagccagcagagccacgttccttatga

SEQ ID NO: 161383 - DNA, 101 bp, Homo sapiens
ttagttttaaaaggatgaaaagcttatgcaacatgctcagcaggagcttcatcaacgatatatgtcagatctaaaggccctgggaggagcggggacactga

SEQ ID NO: 161384 - DNA, 75 bp, Homo sapiens
gcccacaactcttgtcctaccacctcagctggagaatcgggaagggagaaggctacgccgatctggaatatgcca

SEQ ID NO: 161385 - DNA, 97 bp, Homo sapiens
aaggacgccagcatcatacaccggctgttcgaggccttgactgtagacaatgcagatcttcgtgaagactctgactggtaagaccatcaccctcgag

SEQ ID NO: 161386 - DNA, 100 bp, Homo sapiens
gcaccgggccctctgcgacctggggccctgggtgaagtgctccgccgcccttgcctccagatctctcgtggaagaggaagaccaacacatgaaattgtcc

SEQ ID NO: 161387 - DNA, 96 bp, Homo sapiens
tcatcgcatatgtctacaagaaccactctctggcctttgtgggcaccaaaagtggcaagctgaagaaggctaggcagctggaagagaaagaccgag

SEQ ID NO: 161388 - DNA, 100 bp, Homo sapiens
ggcatggaaggggtcctcagagttactgggtggacatttgggagcaataaaaataagaagaaaggaaaagccagaaaaatagagaagaaaggaaccatga

SEQ ID NO: 161389 - DNA, 104 bp, Homo sapiens
cggagctgggcgcggattcgccgaggcaccgaggcactcagaggagggtgctttcttctgcgacctggtactcatctacctcatcaaaaagagagagttttacc

SEQ ID NO: 161390 - DNA, 80 bp, Homo sapiens
ccggccgggagaggcgcgcgccatggcttctggagccgagttactataacaacagtaccaaggtggctgtgaaaaccctg

SEQ ID NO: 161391 - DNA, 100 bp, Homo sapiens
ggccactgtggccttctgcgacgcgcagtccacgcaggagatccatgagaaggctttggccagcataagccatgtggctcatgttactattacaacgaaa

SEQ ID NO: 161392 - DNA, 100 bp, Homo sapiens
gtactatgtcaacacgaccaccaatgggaaagaatatggcaaagctgatgcaagatgggtttattttgatccaaccattgtgtctgtggaaattctgacc

SEQ ID NO: 161393 - DNA, 83 bp, Homo sapiens
gggcgagcggctgtgtggatgtcggcgaagccgcgggcgaggttgtgaccgagattcccgacgagagagactgaggggaagag

SEQ ID NO: 161394 - DNA, 90 bp, Homo sapiens
accatgagggaaatcgtgcacatccaggctggtcagtgtggcaaccagatcggtgccaagatgggaaaactagacgagctgagattcaac

SEQ ID NO: 161395 - DNA, 85 bp, Homo sapiens
cttttaagaggtctgcctggttctgggaaaacaacattgtctcggacagtcggcccaatatgtcaagacctctgatcactagatc

SEQ ID NO: 161396 - DNA, 82 bp, Homo sapiens
aagatggcggcagccgaggccgcgaactgcatcatggaggttcccagaccagaggactgttgttaggtgattggctgtgaac

SEQ ID NO: 161397 - DNA, 82 bp, Homo sapiens
ttttcttcctgcccctcgttgatgagagcattcgaagtgacctcagcagggcatccaggaaggagtcaagactgagaacaac

SEQ ID NO: 161398 - DNA, 76 bp, Homo sapiens
gaggctggctgtggcagatgcaactgcagcccagctcaacattggcaatgtgctccctgtgggcaccatgcctgag

SEQ ID NO: 161399 - DNA, 80 bp, Homo sapiens
ccgatccgccgcccgtccacacccgccgccagccccctccatcccatcggaagaggaaggaacaaaaggtcccggacccc

SEQ ID NO: 161400 - DNA, 101 bp, Homo sapiens
tgaagatgggcaagacaatcagggcacagtgactgaaggagagtttgggctttgcaaaactgagaacaaagccaagtcgggcaaacagaattcaaagaagc

SEQ ID NO: 161401 - DNA, 75 bp, Homo sapiens
tgcggctgcccggcccccgccgcgggtacaccaggggttggaaaaaccacactaggcaaagaacttgcgtcaaaa

SEQ ID NO: 161402 - DNA, 88 bp, Homo sapiens
cttcacagaagaaactctacagagatgtgatgcaggaaacattcaagaacctggcatctatagtacgcctgcctcacaccttgcgatg

SEQ ID NO: 161403 - DNA, 50 bp, Homo sapiens
gtgacatctacaggcagctgctctataagaggtgattacagtgcgtgttc

SEQ ID NO: 161404 - DNA, 75 bp, Homo sapiens
aggcggagtatttccccaccaagccgatgtttgagaccagtatgatgtctgtgccatttgcctggatgaatatga

SEQ ID NO: 161405 - DNA, 75 bp, Homo sapiens
caatgaagagaacccagggaagttcctttttgaagtagttccaggacacattcagctaacgtattttagcaggtg

SEQ ID NO: 161406 - DNA, 100 bp, Homo sapiens
agcagctggagtctaaacggggcaggatctgtgccaaaagagcctctctccggagtagaaagctgaatgcaatatccatacatctccttctccgggaatt

SEQ ID NO: 161407 - DNA, 100 bp, Homo sapiens
aattacagctactccagcaacatcttgtccataaggctgaaccggcaaggtgatgacaactccgtgagggtggagattatacatctctcatcatttcagc

SEQ ID NO: 161408 - DNA, 82 bp, Homo sapiens
cgggaactgctgacgcttgatgagaaggacccacggcgtctgttcgaagacagcacccaagaaaacctcatttggctcgctg

SEQ ID NO: 161409 - DNA, 100 bp, Homo sapiens
tgatgaaattgtagagaactctattgacctgaaaagtggttctggaaaagtgtaccaaggccctgcaaaaggtgctgctgatacaacaatcatactttca

SEQ ID NO: 161410 - DNA, 100 bp, Homo sapiens
agcagagccccactgtgacaggacctagcattcaccttcctcttctgttccgagtgcgagaagtttgcttgcctaaactggacttgaagcaatttaaact

SEQ ID NO: 161411 - DNA, 98 bp, Homo sapiens
cgagtacggggtgtggccatgaatctggcggcagcagctgaaattgatgaagaaccagtcagtaaagcaaaacagagtcggagtgaaaagaaggcacg

SEQ ID NO: 161412 - DNA, 100 bp, Homo sapiens
tgagacactggtctctctgagcctccctccgtatccagagcacctcaccagcccacttagccctgcccaggaggagctgaaagaagggcaggcccccaag

SEQ ID NO: 161413 - DNA, 75 bp, Homo sapiens
ctaactttttctttcccctgtcgacagactaaactggaagagggtgtccgcaatgttgccagtgtctgtctgcag

SEQ ID NO: 161414 - DNA, 98 bp, Homo sapiens
tgttgctgtttgtgagcctgtggcgcggcttctgtgggccggaaccttaaaggatttggtgctatggagaaatttttggtagaatataagagtgcagt

SEQ ID NO: 161415 - DNA, 100 bp, Homo sapiens
gtgggctacaaggactcgccctccgtctgggccgccgtccccgggaaaacgttcgtcaacatcacggaagctcttcgtgggcggtcttgactggagcacg

SEQ ID NO: 161416 - DNA, 82 bp, Homo sapiens
ccaagctggttcccgctgtagcaaacgtccgcggcctctcagactgaaactgttgaggagcccatggaggaagaagaagcag

SEQ ID NO: 161417 - DNA, 50 bp, Homo sapiens
ctggaggccgtgaacacctacgaagccgctgccatggcccagacactgca

SEQ ID NO: 161418 - DNA, 74 bp, Homo sapiens
cagagttctttgtggatggacttgattctgatgagagtatcaccttttgccatgatagcatttctttcattgga

SEQ ID NO: 161419 - DNA, 100 bp, Homo sapiens
gaaataggagtgaagctgttatcgcccagttctaccacagccctgcggacaacaagcgggtggaagttaaacgagctgagcctcgggacagcaagagcca

SEQ ID NO: 161420 - DNA, 88 bp, Homo sapiens
gcggacaggcacctaccagcgcgccatcctgcaaaaccacaccgacttcaaggacaagctgccactgcagagccccgccatggaagac

SEQ ID NO: 161421 - DNA, 96 bp, Homo sapiens
gtcaaccccttcctcccgtatatcagggtgaggatccacgacctccgcagtggtaacatcgccctgtcgctctccgcccatcagctcagggtctct

SEQ ID NO: 161422 - DNA, 127 bp, Homo sapiens
ctgaaggcgaacgcttcgctggccatttaggagctctgctcaaagccagacggtgaagagtgcgacattgacataaatgaatgtgacagtaacccctgccaccatggtgggagctgcctggaccagc

SEQ ID NO: 161423 - DNA, 57 bp, Homo sapiens
gagatgctcagtattccttcaggctctggatcatccaggtttgaccagcacaagcca

SEQ ID NO: 161424 - DNA, 75 bp, Homo sapiens
gtcccggcgcccggcgagggcgcgcggctggtgtccgccccgcccgaaagctcaaagttatgaagtttcaggatg

SEQ ID NO: 161425 - DNA, 50 bp, Homo sapiens
tggaaagaagttgcaaaacactggagcattctggagctggagaaggaaag

SEQ ID NO: 161426 - DNA, 90 bp, Homo sapiens
ccagggagaggaattacgggaacagaaagaaaagtccgaaagagctggtgacttcatggtcatgacgattttcttcaatgtgagcaggcg

SEQ ID NO: 161427 - DNA, 142 bp, Homo sapiens
cccacggaggccatgggcgacccagcccccgcccgcagcctggacgacatcgacctgtccgccctgcgggactcgggcagccgcaagtagctcctccagcgccagcagccagcccagcagcaagcagcaggccccagccgca

SEQ ID NO: 161428 - DNA, 75 bp, Homo sapiens
ctgccctccggctccaagaaggttatctcctcagccaacagagctgtggttggggagaacattaatatctgctgg

SEQ ID NO: 161429 - DNA, 74 bp, Homo sapiens
agcagattgggctgacaatgttggcactccacagaaggatgttattatcaagtcagatgcaccggacactttgt

SEQ ID NO: 161430 - DNA, 83 bp, Homo sapiens
gtgacaaaactcacacatgcccaccgtgcccagctcggccgctactccgccctgttcctcggtgtggcctacggagccacgcg

SEQ ID NO: 161431 - DNA, 95 bp, Homo sapiens
cagccccctcctggcgacccgcaagttattgcagctgactgcaaaagggtcacagtgctgaagtattttctggaagccctttgtggacaagaaga

SEQ ID NO: 161432 - DNA, 89 bp, Homo sapiens
tcctgaacctgttgccagatggtgcaatgttcaaagtactcaagatgaatttgaggagtctccaagagcttttagattaccccggggag

SEQ ID NO: 161433 - DNA, 101 bp, Homo sapiens
gcggccaccgactactgtcagcagctgtgccagaataacaagcctttgtattcatttgaagataatgcagactatgtttatgatgttatgtggtcacctac

SEQ ID NO: 161434 - DNA, 74 bp, Homo sapiens
tgtctgttgcagcttgcgtttggggctttcgacatgacaggtcactagaggtaaatattgcagattttcaagag

SEQ ID NO: 161435 - DNA, 114 bp, Homo sapiens
tcacagcctacacaaacagatttacaagcagcacggcttttgtggccacaggaaccaatctgtctctccagttttttccggccagctggcagggagaacagcgacaaacaccta

SEQ ID NO: 161436 - DNA, 105 bp, Homo sapiens
ttgacgccatgtcgggttattcgagtgaccgagaccgcggccgggaccgaggatcagtcgcatcgaatacattcattcaaagaacttcatccaccgggatgtgaa

SEQ ID NO: 161437 - DNA, 101 bp, Homo sapiens
ttctccagaaggtgctaaaattgaaagtggactatttaatagctaggtttggaattcacccagttgcaggccgaatgcctggtcagcttaatgtgctgctg

SEQ ID NO: 161438 - DNA, 100 bp, Homo sapiens
ggtctgcgtgccttaagagagacgcttcctgcagaacaggacctgactacaaagattgggaaaatgaggtacgttagtgttcgcgattttaaaggcaaag

SEQ ID NO: 161439 - DNA, 80 bp, Homo sapiens
aattagggtccttgccccttcccttatctacttcagaacagtgtggcaaaggagcagagaactttgacaagttcttcaca

SEQ ID NO: 161440 - DNA, 75 bp, Homo sapiens
aaaatcttcacttctgggctcaggagcaaccatgtccaagggacctgcagttggtattgatcttggcaccaccta

SEQ ID NO: 161441 - DNA, 109 bp, Homo sapiens
ctccggggcgcagcgtgacggctggcatcatcattgttggagatgagatccttaagaatcctcactatggatgggctcattgaggacattaagcatcggcggtattatg

SEQ ID NO: 161442 - DNA, 75 bp, Homo sapiens
ctaggtcggcgctgccgggagatcgagcagatggtcctgaccaagtgcacatcaccagggagtcggcatctgaga

SEQ ID NO: 161443 - DNA, 75 bp, Homo sapiens
tcatcatcatctacttcacaggaattgccatttctagtggcggttggcaggaacctgaaaatcctcacacacaac

SEQ ID NO: 161444 - DNA, 75 bp, Homo sapiens
taccagtctggaggagtcaacatggtattgctattaaggagtcagcaaaagtgggtgatcaagctcaaaggaggg

SEQ ID NO: 161445 - DNA, 100 bp, Homo sapiens
ggcccgagctccgggaacggcggcgggtacggcggccccgcgcagcccccggccgcagcgcaggcagcccagcagctcaccatggatgatgatatcgccg

SEQ ID NO: 161446 - DNA, 75 bp, Homo sapiens
aagcagaccaactacttgcgcacgctgatcaacgagctagtgaaagacatttgtcttcaccgacagcccagacaa

SEQ ID NO: 161447 - DNA, 90 bp, Homo sapiens
tgatgttggagaactatagcaacttggtatcactaggaaatggtgttcacactggccctgaatcaagggaacaccagttttcacatgctg

SEQ ID NO: 161448 - DNA, 75 bp, Homo sapiens
gagtaccagcacttcatccagcagtgcacagacctcagagttgggtgtcacagaacatgttgaaggagacccttg

SEQ ID NO: 161449 - DNA, 82 bp, Homo sapiens
tactgtgtggggagttggcaacgcgacacagagccagtaatctcaggggcgatataatcaatgaggtggtcctaaagttgct

SEQ ID NO: 161450 - DNA, 75 bp, Homo sapiens
tcaaggataagggcgacagcaacagctctgccggctggaagggttcttgaagcttttgagattaacaatggcagg

SEQ ID NO: 161451 - DNA, 50 bp, Homo sapiens
tgaaagtgaagatttgacctccatagttcttgcattcacaagagatgggc

SEQ ID NO: 161452 - DNA, 100 bp, Homo sapiens
ccaagggccgcggccgcggaggcctgcagcagcagaagcagcagaaaggccgcggcatgggcggcgctggccgagagaaggtgttcgccagcctcccgca

SEQ ID NO: 161453 - DNA, 96 bp, Homo sapiens
agactaaagacaaactggaacaagcccaaaatgaactgagtgcctggaagtttacgcctgatagaattggcagagggggtcgatttgggaggaaag

SEQ ID NO: 161454 - DNA, 100 bp, Homo sapiens
ataaaaacaaggtggaagattcttccaaggaaccagtgcgaaggttttgatgatgatggttcagaatttcatgaacatatatttctggagaaacacctgg

SEQ ID NO: 161455 - DNA, 98 bp, Homo sapiens
cacccgactctcatagaaaacgagagtatatgcgatgagtttggtgtcatggagaaactccagctgggcccagagattctgcagcgggaaaatccaag

SEQ ID NO: 161456 - DNA, 75 bp, Homo sapiens
gggacgggtttagcggcagcctcttcggaaattttgattgggtagggaatgatttcactcagaatgctggcacgg

SEQ ID NO: 161457 - DNA, 98 bp, Homo sapiens
aaattaagcgtggcttttgaggaagatgtgacaactaccggagaattagaggagacagcactgattgcagtgacagaagcggtgccagctaactcccc

SEQ ID NO: 161458 - DNA, 83 bp, Homo sapiens
cccccggctccatcgacctcaaggacatcaacttccggccgcagatgtcccagagctccacgcaggagatcggtgaggagctg

SEQ ID NO: 161459 - DNA, 90 bp, Homo sapiens
gagccccgcctgaggtgccctaaacacactatgaccgtgtggacaacagtgagtatatgcggaatggagacttcttacccaccaggctgc

SEQ ID NO: 161460 - DNA, 97 bp, Homo sapiens
cttttcagaaactcatatttaagggttgatgctatgaaactgggagtaaaggaaatgaagaaggcatacaagcaagtgaagatcgaccagattgagg

SEQ ID NO: 161461 - DNA, 74 bp, Homo sapiens
gcggtgctgctggtcacggccaacgtgggctcgctcttcgacgaccaattgcatctgcaaaggaatgccctgtg

SEQ ID NO: 161462 - DNA, 89 bp, Homo sapiens
cgagaagcgagtcaaggcctcccactccttcctccgagggctgtttgggatatccgacatgaagccagtgacttcccatgtagagtggc

SEQ ID NO: 161463 - DNA, 100 bp, Homo sapiens
caagtggacattttactggctcaaagccagcccctgggcaacaaagtggaaatggagattgtgagcatgttggaaaaaaacgcaacacttctcaaattcg

SEQ ID NO: 161464 - DNA, 99 bp, Homo sapiens
tcttcaggaattttactgggataattatccaaataaattgcaagcattctatccaaatgaataagaaagccttgagttttgtgaaaaaccggagaagag

SEQ ID NO: 161465 - DNA, 100 bp, Homo sapiens
agcagcggtggtgctggtggcggcggcgctttcggcgcgggcccgggccccgagcgcccgaacaggcgtgccgccgccagacggattactggcagttcgt

SEQ ID NO: 161466 - DNA, 83 bp, Homo sapiens
ctcaagagcaagtggcccaaggcctcagaagactagaaggaagttcctggccattcagattaacgtcttcaaggacccagttg

SEQ ID NO: 161467 - DNA, 98 bp, Homo sapiens
ttcagcaaatcctgcagctgttgaaggagtcccagtccccagacaccaccatccagagaaccgtgcaacaagcatatccccccacgtccatgtccagg

SEQ ID NO: 161468 - DNA, 141 bp, Homo sapiens
cgctgagcaccgggtcgcgcgcggccgagtcgcggaggcgcctccgctgcagtcgctgcgtctccaaggcctcaacaccctcccccagcctcccattccctgctggacgccctctccccaggccgcacagggctggttcct

SEQ ID NO: 161469 - DNA, 88 bp, Homo sapiens
cagagctgagtccattcacactggtttggaagttgcaatcaaaatggctgaccggttccctgatgtgttacctgcttctgctactgat

SEQ ID NO: 161470 - DNA, 90 bp, Homo sapiens
catgtctatcccgctcaggtgcagtatgtggaaggaagcgatactgtctataccaatggagcaataagtgagttgctgaatgagcttatg

SEQ ID NO: 161471 - DNA, 75 bp, Homo sapiens
agctgccaagttgaaaatggacgagtaatcgcctgctttgattcattgaaagttatcaatactctggctgaccat

SEQ ID NO: 161472 - DNA, 88 bp, Homo sapiens
ctatgagagcggacgggccatacccaataaccaggtgcttggcaaaatcgagcgggccattggcgtccgacctccgatcatgaacggg

SEQ ID NO: 161473 - DNA, 82 bp, Homo sapiens
agcggccgcgtggaggtgctgaccgatgccggagcaattaccagctctggctgggtcgccacaacttgtttgacgacgaaaa

SEQ ID NO: 161474 - DNA, 75 bp, Homo sapiens
gctacagatggaaccaccactatcctcactcaggaacacgatgaacctattctgaagcacttgaaagatattaaa

SEQ ID NO: 161475 - DNA, 75 bp, Homo sapiens
catgggactcaacaaacactgggttgaccctctgcctgatgaatgtccctcttccagtggaaagcccaaccatgc

SEQ ID NO: 161476 - DNA, 82 bp, Homo sapiens
agacgtccaatctgagcgtgctgcggacggcgctgcggtacatccagcgtccgtctccaagagagtatgaagagagtgcgtc

SEQ ID NO: 161477 - DNA, 100 bp, Homo sapiens
ggccccggccgtccgcgcccggagcaagacaccctgactgggatgcgcacagaactgttctcaggaagaactgagcacggagtgggacaccttcatcgag

SEQ ID NO: 161478 - DNA, 97 bp, Homo sapiens
taccacgcagacatggggaaggttctggaaagttctctgtggcgattatgattccgatgcgatgagcagctcttatgagtcgtatgatgaagaggag

SEQ ID NO: 161479 - DNA, 100 bp, Homo sapiens
agaaacctcaggacttgagtaacagcaacatgaatactacaacacatctttgcaggattctttgcaaattctgccattcctggatctccacacccttttt

SEQ ID NO: 161480 - DNA, 101 bp, Homo sapiens
gagttctacaacctggtgcgcttccggatcgggggcaagcggaaggtgatgcccaagatggaccagatattgctatatggagatttgccaaaaaataaaga

SEQ ID NO: 161481 - DNA, 98 bp, Homo sapiens
cttccctgccagaaatgaaggttcagttatgaggcaaccctctaggtatttgaagtataccatacaactgttttgaaaatccagcgtggacaatggct

SEQ ID NO: 161482 - DNA, 98 bp, Homo sapiens
atcacctcatgactagcggggcaggcctctaattcaccgcaggatttccgattttctcaactgaagggcctgaacttgtcccataataaacttgggtt

SEQ ID NO: 161483 - DNA, 82 bp, Homo sapiens
cggtacaccatcgacgccatgcagaaagcctgcctgaatggctgtgccaaggatcttcattgccttgctgctgcgctttgac

SEQ ID NO: 161484 - DNA, 75 bp, Homo sapiens
ttttagagctggcagcagcatctcagcccaagagaaggcttcaccggccagaactgtgaggaaaatatcgacgat

SEQ ID NO: 161485 - DNA, 51 bp, Homo sapiens
gattgtcagcaaaggaagagatgggaactcagcgagatgctgtacacagac

SEQ ID NO: 161486 - DNA, 87 bp, Homo sapiens
ggcctggcgtgcactccgcacctcggggacattattgcgcgtggaacggctgcttttggaaggactcagtggcctttgaggatgtgg

SEQ ID NO: 161487 - DNA, 88 bp, Homo sapiens
gaagcctttggccagaagatcggccacttccagagcatagcggcctgaccacaggggtggccttcgggcatcacgccaagttcatcgc

SEQ ID NO: 161488 - DNA, 82 bp, Homo sapiens
cttcccaagatggctgatgtctcagcagaagaaaaggcagcctggcatcctcgctacaacctcattgttgtgggccgatacc

SEQ ID NO: 161489 - DNA, 82 bp, Homo sapiens
caacccccggcagatcaagccctgcctgctccgcttcagcggactctcgctggtctacctgctcttcctgctgctgctgccc

SEQ ID NO: 161490 - DNA, 75 bp, Homo sapiens
agcagtagaatgtctgcagcagatcaggtatggctatcctgatccttcttacctgaaacgtgtcaaagaggagct

SEQ ID NO: 161491 - DNA, 80 bp, Homo sapiens
gcgagcgaagctagggtcgccgccactgccgcaggaggcgtgagacaatgcagatcttcgtgaagactctgactggtaag

SEQ ID NO: 161492 - DNA, 100 bp, Homo sapiens
gccaatttttacatttctttcagaacaagggacactcaaactaccagaggttggacgtgataagtatgagcctgcagctgtttcagaacaaggtgataaa

SEQ ID NO: 161493 - DNA, 100 bp, Homo sapiens
aacttctacaagaaaacttacaaacaaccccatctccagacaaagacctgaaggagaagaaggagaaggtggaggagaaggcaagccggaaagagcgaaa

SEQ ID NO: 161494 - DNA, 90 bp, Homo sapiens
gtcattgccattaatgtggatgatcctgatgcagccaattataatgcgaccgtggcagccatgtattacagctactacatgctaccggac

SEQ ID NO: 161495 - DNA, 100 bp, Homo sapiens
ggcggcggcggcacagagccggtggtggagccgccgaggatgaagagactcggcacagccttgagtgcatccaggccaatcagatctttcccaggaagca

SEQ ID NO: 161496 - DNA, 100 bp, Homo sapiens
gtttcgtgtgtttgacaaggaggggaacggcaaagtcatgggagcagagctcagacatgttctcaccacccttggtcctggcattgatgtgcctgctcca

SEQ ID NO: 161497 - DNA, 50 bp, Homo sapiens
caagctcatattttgaagtgtttacggtgttctaagaacggaagcatctg

SEQ ID NO: 161498 - DNA, 100 bp, Homo sapiens
ctcagggctctggtgaacaagctgtaggcggagtacgtccagcttgttactgaacttcgaatgacaagagccattcagcctcagatcaatgcttttttac

SEQ ID NO: 161499 - DNA, 82 bp, Homo sapiens
ggcagccgcggatctcaccgccgctcagggaaatccagttatcaaaattgactcaagaagagagaacctaacagaacaataa

SEQ ID NO: 161500 - DNA, 50 bp, Homo sapiens
tacacactcagttaattaatctgctccagtgatccacaagctcagaaata

SEQ ID NO: 161501 - DNA, 80 bp, Homo sapiens
ttttcgggtagtggaaaaccagatgccatggacaatattaccaggcagaaccaattctacgatacccaagtcatcaaaca

SEQ ID NO: 161502 - DNA, 100 bp, Homo sapiens
aatatgactggactggaaccatcaaacaaggctgcagagagcaacaagatatggatttggatatagaatttgatgtacaccttggaatagctcatacccg

SEQ ID NO: 161503 - DNA, 100 bp, Homo sapiens
ctgaatgatgatcagagagatttatacagagatgtgatgttggagaattacagcaacctggtttcaatgggaccagatggcctttgaggatgtggctgtg

SEQ ID NO: 161504 - DNA, 100 bp, Homo sapiens
gggagtttttatactcattcaccattgacaattcaacttactctctcttcccacagtctctggctgatgaacttgctcttgtggatgttttggaagataa

SEQ ID NO: 161505 - DNA, 100 bp, Homo sapiens
tggtcattctcgctaacaactgcccagctttgaggtgcaattgctggtatagttgatcagccgatgcagaacttccagaaaacatctgaggcacaggctt

SEQ ID NO: 161506 - DNA, 75 bp, Homo sapiens
cacacctgcagaaggtccttaatcagggcagccattctacaaaagtggaagctgtggtcagaactctgatgaaaa

SEQ ID NO: 161507 - DNA, 100 bp, Homo sapiens
cacggtggataacgacaagaaaaacaatcgcttcaatgatgggaaggtggatcccgccgggaggtactttgctgcaatggctgccatccggaagaaactg

SEQ ID NO: 161508 - DNA, 82 bp, Homo sapiens
ggtcctacctggggatattatcaaatctactactgttcatggcaggtttactcctggcttgggggcattaggaagcactgga

SEQ ID NO: 161509 - DNA, 75 bp, Homo sapiens
aactgctcatacagaattacgcatttccacttctaatgctgctgaatgccatggtggcaaaactggggaaccggg

SEQ ID NO: 161510 - DNA, 100 bp, Homo sapiens
ttcagagcgtcacggcgtacgccctcatggggaaaatctccccggtgactttcaggactccatccccgtgtctacctccctccttggagacacttccgac

SEQ ID NO: 161511 - DNA, 90 bp, Homo sapiens
tccggcgtcctctcccggccctctcgcgctgcactgtctctccgacgcaagactgtcccggcccgggtgtggaaacaggaagagaactag

SEQ ID NO: 161512 - DNA, 90 bp, Homo sapiens
ggattcctttcagaaaacaaagaatttgccagatgtttggcagtgtgtgaagaaaccctgaaggtcgggcctcaagtaggtctctttcta

SEQ ID NO: 161513 - DNA, 109 bp, Homo sapiens
tgagctaaacttcaccaaataatagctgtttgtattttggctgctgcaggagccattttagcggagctggagtttgttcagatcatcatcatcgtggtggtgatgatgg

SEQ ID NO: 161514 - DNA, 100 bp, Homo sapiens
gttgcatggtccatccgggaaaccctcagatatcaaagacatgcgtaactaaatgaccatggaatctggagccgagaaccagcagagtggagatgcagct

SEQ ID NO: 161515 - DNA, 74 bp, Homo sapiens
ggtgagtcgcggtgggtcctcgcttgcagttcagcgaccacgaatctccggcctgtgaaactgtgaggggattc

SEQ ID NO: 161516 - DNA, 100 bp, Homo sapiens
agcgcccgcgacagcggtccggacgccgcccgaacatggactccgccggccaaggttacagcaactccatgtaaagatgatggtgatgcaaggatttcag

SEQ ID NO: 161517 - DNA, 90 bp, Homo sapiens
agttacttcatcgtctccatcctctacctcaagtatgagccaggaagctgtgccagccacagagcactggcagcctccttggagaccctg

SEQ ID NO: 161518 - DNA, 100 bp, Homo sapiens
gcaaccatcgatgtcaagtatccacacacctggcctgaatggatccctctgcctttcagaggtacttggattatggagaagagaattggaagaaacagac

SEQ ID NO: 161519 - DNA, 90 bp, Homo sapiens
gtacatcataatcggcgacacagcatactggagcatagtgaaagagtctattttgaagcttcaaacttagtgctgctgcagaccaggaac

SEQ ID NO: 161520 - DNA, 100 bp, Homo sapiens
aatctgcaaaacttattcgggataaagtagcaggccagtgttctagcttccagttctactgcagcagctgctactctttctctggctaattcagatgtct

SEQ ID NO: 161521 - DNA, 90 bp, Homo sapiens
ggctgtaacttacgtgtactttaccaacgagctgaagcagaataactgtgtagaatacattgaggatgatgaggagcacgtggacattga

SEQ ID NO: 161522 - DNA, 75 bp, Homo sapiens
gaccgctcctccaactaaccaccgagagcagaaacattcatactgggagtttgctgagtggattcctttagcctg

SEQ ID NO: 161523 - DNA, 83 bp, Homo sapiens
gcctcggtgcagggctccaccccgtcgcctcgacagcagcagccgctcttctaaaacattcaaaccaaagaagaatatccctg

SEQ ID NO: 161524 - DNA, 75 bp, Homo sapiens
tcgcagtggtcgcttcttctccttggtgacaaggagccctgtgcacatcccaactctcgattttgtgccccggct

SEQ ID NO: 161525 - DNA, 97 bp, Homo sapiens
ctgggttggagttactggtatgccttgggtgaaacttcctacatccgagtttatcctgagagaagcaccagctatggctactcacggtctcggtctg

SEQ ID NO: 161526 - DNA, 100 bp, Homo sapiens
agcgatgagcagtttcatttattctttggctgccatacctggatatatggttctcttgagaaatgcactcggtgatggaaagagagccactattctgaag

SEQ ID NO: 161527 - DNA, 100 bp, Homo sapiens
agcagtgaaggagtgcagaggcatcacctgaaagatgctcagtgacctccaggagtctgtggccagctctcgcccccaggaggtgtcagcatacctcacc

SEQ ID NO: 161528 - DNA, 100 bp, Homo sapiens
gttcctgctgccctcaaggtcgtgcgtctgaagcctacaagaaaggggccagcagtttgcccagcagatgcagcagcagaacccagagttgatagagcag

SEQ ID NO: 161529 - DNA, 82 bp, Homo sapiens
cacccggctccccggacgcctcggtgtggatgaggtcaccattgtcaacattttgaccaaccgcagcaatgcacagagacag

SEQ ID NO: 161530 - DNA, 89 bp, Homo sapiens
gacatcttccgagaaacaggcgataatttttcagatgtggcaattcaggttcgtcaaaaaatgttgtatgcagcaacaagagcaactct

SEQ ID NO: 161531 - DNA, 82 bp, Homo sapiens
ccacaagcaggtccaaagagagagtattagaaaactactcggatgctccaatgacaccaaaacagattctgcaggtcataga

SEQ ID NO: 161532 - DNA, 94 bp, Homo sapiens
gttcccccccattcaggactcctcgcctggctcggaaggtcagaagttgagtagcaggggcctaggagggctcgaagccttcacagcgatggca

SEQ ID NO: 161533 - DNA, 76 bp, Homo sapiens
acgcttaaacaacataaccattattggtccacttgatatgaaacaaattgcgcagtctctttgtggagaggacttg

SEQ ID NO: 161534 - DNA, 75 bp, Homo sapiens
tctggtgtaccaggcgaagctggccgagcaggctgagcgatacgacgccccatctgtgacttcctagaactccag

SEQ ID NO: 161535 - DNA, 74 bp, Homo sapiens
ccgccgcagccatggaggccaactggaccgcgttcctgttccaggaagctcttcgtgtggtgaagatcttacag

SEQ ID NO: 161536 - DNA, 90 bp, Homo sapiens
gtgatggccgccgcgaggccgggaaggtgaagcggaagatccatccaaaagctatgtgaaattacgagactttgtgcttgtgaagctttg

SEQ ID NO: 161537 - DNA, 75 bp, Homo sapiens
gtctgttcgttgtcgccttctaagttgctctaggtcgtaaccagcctttgaaaaaggagaaaccaaaatggaaaa

SEQ ID NO: 161538 - DNA, 76 bp, Homo sapiens
ccaatgccgtgggcatgggccgcgctgagcaggtcatctttgtccgaggttctccccaattaccattgatggaatg

SEQ ID NO: 161539 - DNA, 101 bp, Homo sapiens
ccggacgatactggcctttgtctctggcatcttctttatcctctcaggctcttgggaaagctggtgctgctgctgcctgattcccgccgacagaccttggg

SEQ ID NO: 161540 - DNA, 75 bp, Homo sapiens
agtcatgggaccagaagtttacactggaactggacaggaaactgccaagttttggaccttatctggaacagcgca

SEQ ID NO: 161541 - DNA, 100 bp, Homo sapiens
ctggctcggaggaatctcagtagggacaacaggcaggagaattatgggagcgcatttccccagggtgtgtgtatagaaatgagctctcaaggcatcccaa

SEQ ID NO: 161542 - DNA, 124 bp, Homo sapiens
tgggcttctctgaggcggcgagagatggtcaggtctggagctcgaccgggccagaaaaagcttgtggtgaaggggggcaaaaaaaagaagcaagttctgaagttcactcttgattgcacccacc

SEQ ID NO: 161543 - DNA, 50 bp, Homo sapiens
gggaaggtggagccaccagcctctccttgtactatactggcaattgctgg

SEQ ID NO: 161544 - DNA, 75 bp, Homo sapiens
cgccgcgccctcggcctgcacggctaaagtctccagtgaatattgaattgctgaggattttgggaaaagacaaat

SEQ ID NO: 161545 - DNA, 74 bp, Homo sapiens
gatgttcatgggcagcaccatcgagccagaagcagtatttgtcctgattttcagctgaactctcatctctcaac

SEQ ID NO: 161546 - DNA, 98 bp, Homo sapiens
gcacaaagttctctcgatcagggcatacatctttcttcgacaaaggagcatgcaagcggcaagatgtcctacagatgaattatctttaaccaattgtg

SEQ ID NO: 161547 - DNA, 75 bp, Homo sapiens
ccctcagccccgtcctcttgtcctcctcagcctcgtgatgacgaggacgaggaggaggaggaggaaggagaagag

SEQ ID NO: 161548 - DNA, 74 bp, Homo sapiens
gcaggacttccaaggagagcatgtcggaggctgatcgcgcccagaaggttgtggcagcactgcctgaaggtatg

SEQ ID NO: 161549 - DNA, 90 bp, Homo sapiens
tgtgggaagcggtgtcctgctggcttccagggagaggactgtggccaagaccgctgccatgaagggggtcagtcctacaagattggtgac

SEQ ID NO: 161550 - DNA, 83 bp, Homo sapiens
ggactgcgtgattcctccagaggggtccctcttgcaggccgactcgcgggccgctgcacccaccgccaaggacaaaaggagcc

SEQ ID NO: 161551 - DNA, 51 bp, Homo sapiens
gggccgtgtctccggcatcatgtgtggtatgatctcgtgaaatcttgagag

SEQ ID NO: 161552 - DNA, 74 bp, Homo sapiens
cagctggagccagttactgggcaggtgttcttcaacggtgccaacgtccggcaggtggacgtgcccacgctgac

SEQ ID NO: 161553 - DNA, 80 bp, Homo sapiens
ctgcaggacatcaattcttcaaggcctgttttactaaatgggacctatgatgtgcagcccatttggaagccctttcctaa

SEQ ID NO: 161554 - DNA, 98 bp, Homo sapiens
agaccagcccaaaagtgctcaacttcctccagaaactttggcgacaatgttggcctgtctgcaagcttgtgcaggatggagtctccctctgtcaccca

SEQ ID NO: 161555 - DNA, 107 bp, Homo sapiens
aaaagatttgcctggtgttagagagctgtttgaaaaagaacatctgactgcagccatgagcagcaatgagtgcttcaagtgtggacgatctggccactgggcccggg

SEQ ID NO: 161556 - DNA, 97 bp, Homo sapiens
gatcgggaacaaaggagtcaacgtgtggccgggcggccaaaggagatcatgcacgccctgaagatgacctggcacgtgcactgctttacctgtgctg

SEQ ID NO: 161557 - DNA, 75 bp, Homo sapiens
ctgccctgtggcctcgctcctcggaggtgagaaagatcagtctaaagaaaaggagaagaaagtgaaaaaaacaat

SEQ ID NO: 161558 - DNA, 100 bp, Homo sapiens
gggcccgagccaggccggagctgaggagaacgactgggttcgcctgcccagcaaatgcgaagagtgtgccctggaggatgaaacgtatgcagatggagct

SEQ ID NO: 161559 - DNA, 125 bp, Homo sapiens
tgatgatcggggcctctggcatccatataacaggattgacagccggatcattgagtcactctctgaaagagaacaaagtaattttctgaagggaagctgcagaatatggaaaacatatattggag

SEQ ID NO: 161560 - DNA, 100 bp, Homo sapiens
tgcagctcgtggatacgaaggcgggatagccctggtcctttctccagatttccactggacaaagcggttgcctatgcaaaactcaggaatccatttgtaa

SEQ ID NO: 161561 - DNA, 52 bp, Homo sapiens
cctggtccttctgcagaggcctgagcaggactgcagtgcaacgcatccgtgg

SEQ ID NO: 161562 - DNA, 100 bp, Homo sapiens
ccgccacctggtggtttgtgtatgacgccgagggacctcacatcaacttctaccagctgggttatgggacccacctgatgaaccacctgaaggagtatca

SEQ ID NO: 161563 - DNA, 86 bp, Homo sapiens
ctgccgtccttctccactttcgccagcccgtgccgcgagcgcggcctgcaggagttcaaatctgaacatcaatgatgtactaggga

SEQ ID NO: 161564 - DNA, 98 bp, Homo sapiens
ggcatggcctacgtggctgtccaggcttggccttcgtgcctctgcagatctggtccaaagtcctggccatctcaggaatcttcaccatgggcatcgcc

SEQ ID NO: 161565 - DNA, 100 bp, Homo sapiens
tgggaccccggaatcccgcgcgctgcccacgattcgcttctgaggctgaacaagctccaaacacttgtgaatgtcatgtttgtaagcaggaagcttctgg

SEQ ID NO: 161566 - DNA, 75 bp, Homo sapiens
cttgtcacactaattgccaacaacaatgggagttctgggaaatcgttcattcatttacagatgaacagaaaagac

SEQ ID NO: 161567 - DNA, 75 bp, Homo sapiens
ccaagggggacataatctactctcatcagccagttttcaggcctccgacatccaggcaaggacagtagtacttac

SEQ ID NO: 161568 - DNA, 82 bp, Homo sapiens
tactacgcgtacgtggtggagctctgcgtgtggagagtcccgtattctcagagtaaaagttgtttctggaattgatctcgcc

SEQ ID NO: 161569 - DNA, 83 bp, Homo sapiens
gctgctcgcgcctccccaactcggagacgtctcccacaacctgctccgggcgctggacgttgggctcctggcgaacctctcgg

SEQ ID NO: 161570 - DNA, 83 bp, Homo sapiens
agccctacgagtgcaacatctgcaaggtccgcttcaccaggagaactacgatgacccgcacaaaacccctgcctccccagttg

SEQ ID NO: 161571 - DNA, 100 bp, Homo sapiens
tagaatctgggactttcttcgttgccatgaggaaagaattctccgagaagagtcaagtaccattggccaggatcaaacgcttatggaacgtgatacagag

SEQ ID NO: 161572 - DNA, 50 bp, Homo sapiens
cagcgagcttgacaacccctttcaggtttgttgataagccggggcccttc

SEQ ID NO: 161573 - DNA, 101 bp, Homo sapiens
acgtggacgtcaacagcaatggcggaaggagaagatgtgccgccgctgccaacgtcgagcggcgacggctgggcaagttaaagtcttcagagccctgtata

SEQ ID NO: 161574 - DNA, 88 bp, Homo sapiens
tcagcagggtttacagacattagcaacggaagccccgggcctcatcccagggagagacaggtttgggcaagtccaccctcatggacac

SEQ ID NO: 161575 - DNA, 80 bp, Homo sapiens
ttgctgttgcttggcctggtgggcccagtcctcggtgcggcgcggccagaacccagtgacttgattgtaaaaatttacag

SEQ ID NO: 161576 - DNA, 75 bp, Homo sapiens
tttacactgtggctttagctttcaaaccagaggttcctcttacccagcaaaaaagtccagcctctgatgaagcag

SEQ ID NO: 161577 - DNA, 74 bp, Homo sapiens
ctgaggatcagattttgaagagagatatgccaccagcatttattaaaatctatgtactttcatcagcgcggcca

SEQ ID NO: 161578 - DNA, 75 bp, Homo sapiens
aagagcgccttgggacagggggatttggaaatgtcatccgatggcacaatcagacctggaatggccaaatatcaa

SEQ ID NO: 161579 - DNA, 75 bp, Homo sapiens
tgagatcagagtcacgcccttggtgtctcgactgcattgtgagagtgaatctttcaagatggatctaatcttaga

SEQ ID NO: 161580 - DNA, 75 bp, Homo sapiens
actgtgttcgggagtccttggaactgtggtccatggtaaagttttacagttcctgagactggcccagacgctgcg

SEQ ID NO: 161581 - DNA, 100 bp, Homo sapiens
aaattaaagttctacgtaaagagagtatggagctcgtaaaattacacttcagaatccagaggtggtggcccttcgaggtggactaaacaccatcttgaaa

SEQ ID NO: 161582 - DNA, 75 bp, Homo sapiens
ctttactgtgtcgggccagtggacatcaggttatatgtcaccacacccatctccattaggagccccagagcacgt

SEQ ID NO: 161583 - DNA, 100 bp, Homo sapiens
ggaaacatatgttacgatagccggagacttgcagctcctctgctgaaacgtttaagcctctccacatccaaattgaacagcctggccatcggtctgcgac

SEQ ID NO: 161584 - DNA, 101 bp, Homo sapiens
gcaaggtgggaagtgaagtcagtgcctcagttgctgatttctaccactccaaacgccggctgatcttctccaagaggaagccctaatccgcccacaggaag

SEQ ID NO: 161585 - DNA, 100 bp, Homo sapiens
ctgcgtttcgggtggggccgcgcaggcaaggacaaggccacagagtcggggtcttcacggtgctggagaatctggtaaaagcaccattgtgaagcagatg

SEQ ID NO: 161586 - DNA, 51 bp, Homo sapiens
acacgacgtggatcccatcgagggagagctggaccaggaacgactgaccag

SEQ ID NO: 161587 - DNA, 74 bp, Homo sapiens
tctccacagttgcctctgggtaggagcctggacactaatagaatgggcgacagatgcgaaagaaacgagttcca

SEQ ID NO: 161588 - DNA, 100 bp, Homo sapiens
aagctttccccctcctctgatgattaaacaggaacccagagattttgcatatgactcagaaacacaactggttttgagaatccatcccttcttcactcag

SEQ ID NO: 161589 - DNA, 100 bp, Homo sapiens
gctggacagtttgaggatgcagatgttgatcactgaaaatgatttatgcaagtttaaggataccatacttgcagagctccttcagatacataaagaacac

SEQ ID NO: 161590 - DNA, 82 bp, Homo sapiens
cgtgccgcgagcgcggcctgcaggaggatcccatgacagattctgttgtcacgtctccttacagagtttgagcggtgctgaa

SEQ ID NO: 161591 - DNA, 75 bp, Homo sapiens
caggaactcccggggaagaagctgctctctgagaaaaagctgataccagcgggcaagcagaaaacaagaggctca

SEQ ID NO: 161592 - DNA, 107 bp, Homo sapiens
tagctgtgctcgcgctactctctctttctggcctggaggctatccagcgtctcaccaacggctttgggggtgcgaggagcgagcaggagccgggcggcggcctgggg

SEQ ID NO: 161593 - DNA, 76 bp, Homo sapiens
ataatggcaaataacttttccttggagagtcataacatatcactgactggtatttcagtgtctgtagacaagatgg

SEQ ID NO: 161594 - DNA, 95 bp, Homo sapiens
tgaacgtggacagcctcatcacccggctgctggaggtcttctcacaagactttcaggattaagcgattcctggccaagaaacaaaagcaaaatcg

SEQ ID NO: 161595 - DNA, 100 bp, Homo sapiens
gcctgcgctatgccctgctgtagtcacaggagctgtagagaggaccccggtacatctgaaagccgggaaatgagtgaattactggaactgaaacggcagc

SEQ ID NO: 161596 - DNA, 107 bp, Homo sapiens
agaacaaccgcaggtcgaattgttcgtgaaggaaaccgaatgcggtgctacaactgtggtggaagccccagcagttcttgcaaagaggccgtgaccacctgtggcga

SEQ ID NO: 161597 - DNA, 75 bp, Homo sapiens
agcccccgacagctcagccagacttcccctatggtcagtatgatgaggacggggacttggttgccttttccagtg

SEQ ID NO: 161598 - DNA, 96 bp, Homo sapiens
atgatagagaatttatttatttgaggccttttgcttgtgatacaaaacttgaatgggtgtgccaaattccaaaagatttggtacacacagaggggc

SEQ ID NO: 161599 - DNA, 74 bp, Homo sapiens
aagaagacaaggtggaaaagttgcagtttgaagaggaggactttgctattataatggttttagagtcaactgga

SEQ ID NO: 161600 - DNA, 74 bp, Homo sapiens
aaggagaagaaggaagttgtggaagaggcagaagtcaattcatctggaaagactatctctgagtcagacttaaa

SEQ ID NO: 161601 - DNA, 90 bp, Homo sapiens
cccagttagttacttcctgtctagagttgtagcttccacctgatgccatggacaatattaccaggcagaaccaattctacgatacccaag

SEQ ID NO: 161602 - DNA, 100 bp, Homo sapiens
cctggatatcagcatacaattcttacatattcctggtgtagaatctgcaaacaggttgttgatcattatgaaaatcctagaaacgtggggtcccttgaca

SEQ ID NO: 161603 - DNA, 83 bp, Homo sapiens
ggccagcaagcggaggtgctgggagcgagttggctggttggatggcaagcatgtggtgtttggcaaagtgaaagaaggcatga

SEQ ID NO: 161604 - DNA, 90 bp, Homo sapiens
gctcgcggaacactcgcctgtccccgccggcttcggcttcagcgccgcggggtcaactgctatgatgtgtttggagcccagtcacccttt

SEQ ID NO: 161605 - DNA, 100 bp, Homo sapiens
ttcattttagtccctgcacttcttggtctcaaagggaacttggaaatgacattggcatccagattatccactgcagagaatgatgtaaacctgacccaca

SEQ ID NO: 161606 - DNA, 83 bp, Homo sapiens
cttcgaggcagcattggaaggatttctgcccctccaagcttcctttccagggatgatcggctgaatgtaacagaggaactaac

SEQ ID NO: 161607 - DNA, 100 bp, Homo sapiens
tacagagatgccaacattaaatcacgcacagaaagggagtcacaagacactgttgcagagaatgatgatggcgggttcagtgaggaatgggaagcccaga

SEQ ID NO: 161608 - DNA, 100 bp, Homo sapiens
atgagaaggttcagttggcaaaccagatatatgacttggagtctcaggagcaggggctgcggcagaggctgctggacgagcagttcgcagtgttgcgggg

SEQ ID NO: 161609 - DNA, 74 bp, Homo sapiens
gacgccgagcggtgactccccgccgctcccgggggccgtgacggaaatgagtggcttatactctcctgtcagtg

SEQ ID NO: 161610 - DNA, 98 bp, Homo sapiens
ttcaaagcacctagtacctcctaccattgtcaactgatatataagggatatgttgatgatcctcgaaacactgataatgcatggatggagacagaagc

SEQ ID NO: 161611 - DNA, 51 bp, Homo sapiens
ttacaggagtcctccacttgccactggccttatgtttgatcatcggccaag

SEQ ID NO: 161612 - DNA, 108 bp, Homo sapiens
tgtgagaatacaggcagttctggcgctttcacgacttcaggatcccaaggatgatgaatgcccagtggttaatgggatccagattagatgatcaaagatgtgctccac

SEQ ID NO: 161613 - DNA, 80 bp, Homo sapiens
tcgtcccctttgatccctgtgtgctgaagaggactggaatgtcacgtggaataccagcaaccccgacttcaccaagtgct

SEQ ID NO: 161614 - DNA, 75 bp, Homo sapiens
gctggctgcagtaaaaatcattaaattggagcctgttggtagctggcagtgttgtgatggcttttgaagaagtat

SEQ ID NO: 161615 - DNA, 100 bp, Homo sapiens
atatttttggacctgaaacagaaattctggaacacctatatggtgtgaccatgaagctcatggatgaggtcgccgggatcgtggctgcacgccactgcaa

SEQ ID NO: 161616 - DNA, 83 bp, Homo sapiens
cggcgcgggagcagcacttccacagccaagtgcgggagtccacggtaccagctggaggatgagtctgcgcatttggatgaaat

SEQ ID NO: 161617 - DNA, 88 bp, Homo sapiens
tgcggccccctggtgctggccctcagcagtcccggcctctggcagcacttgccccaaaggccctggaggaagcactgagcatccaaac

SEQ ID NO: 161618 - DNA, 100 bp, Homo sapiens
aggatgggctcgtccatgtcggcggccaccgcgcggaggccggtgtttgacgacaaggaggacgcaataggcgaatatgaagaccttagagcagagaacc

SEQ ID NO: 161619 - DNA, 90 bp, Homo sapiens
attcctccaaacctggcaggaatccctggggggaaacccttcaaggttactgactttttatgatgtttggtggctatgagactatagaag

SEQ ID NO: 161620 - DNA, 88 bp, Homo sapiens
gtgcaggacaccgacatggaacagggactcactgggggacaaggctcatcccaggaggatccatgatgctttatgaagacagtcccaa

SEQ ID NO: 161621 - DNA, 87 bp, Homo sapiens
cagcaacaacagagagcacgtgaccatggtgaatccgggcagcagctcgcagccgcccccggtgacggccggctccctctcctggaa

SEQ ID NO: 161622 - DNA, 100 bp, Homo sapiens
caggaaaacctctcctggcagcatgagctgcatcagctcaggtctcaacatatgcactagtggaagtgccacctcatgtgaagaatgtctgctaatccac

SEQ ID NO: 161623 - DNA, 82 bp, Homo sapiens
ttccatgttattaatggagtcctccgtacagcacattcattatttaaaaggtaaaaatgcatttgcaaagggagaaaatgaa

SEQ ID NO: 161624 - DNA, 100 bp, Homo sapiens
ggtttatattttcaaaatctatgaatgaaagcatgaaaaatcaaaaggagttcatgcttatgaatgctcgacttcagagacggggtttcgccatgttggc

SEQ ID NO: 161625 - DNA, 100 bp, Homo sapiens
ggcgcgcgcaccatgggggagaaacccgggaccagagggaagtgatgagctttcctttgatccggacgacgtaatcactgacattgagatggtggacgag

SEQ ID NO: 161626 - DNA, 82 bp, Homo sapiens
agaagttcttatgactcctccatgtctccagtgaagatgctcattcggaatctgctgaaaacagagcccacccagagaatga

SEQ ID NO: 161627 - DNA, 100 bp, Homo sapiens
aaacctacggctcaggcacacagtaccacatgcagctggccaaacaactggctggaatattgcaggtgcctttagagcctttgaagaagatggtggagag

SEQ ID NO: 161628 - DNA, 112 bp, Homo sapiens
caagcttcaggaggccaccaacttccctctgcggccgtttgtcattcccttcctgaagtagcctctagttcgttagtcaaaacgtgaaaaaaaagacctgctttgccctggg

SEQ ID NO: 161629 - DNA, 75 bp, Homo sapiens
aagccgtgcggatgaggaccggagcggaaaaccttctgaaggtgtccatcgcgcttccttcactgccttgatcat

SEQ ID NO: 161630 - DNA, 99 bp, Homo sapiens
ctcctgctcttcctggactcctgagcagagtgtatgcagagaatatttccaaaatggtgggaagagaaaagcacttgagaaagatgaaaaaagagctgt

SEQ ID NO: 161631 - DNA, 75 bp, Homo sapiens
cctcagtgtgggcgagtaaaatgccctgcgtgtgagaagcagagtgttgcggagataggaacatgggagagaaac

SEQ ID NO: 161632 - DNA, 82 bp, Homo sapiens
ccgtcccgcggtggttgctgctgctgccgctgctgctgggcctgaacgcaggttcaaggagtagttccagttccagagaggc

SEQ ID NO: 161633 - DNA, 75 bp, Homo sapiens
ctacgtggaggcaaacatggggctgaaccccagctcggaaactaaatatattttgccaactttggaaaaagaatt

SEQ ID NO: 161634 - DNA, 100 bp, Homo sapiens
cggcttccgacgtgcagcctggcagtgcagtgagtaacagttacccctcaatgagcgacccctacctgtccagctattacccgccgtccattggatttcc

SEQ ID NO: 161635 - DNA, 75 bp, Homo sapiens
acacacgtgcgggacacgccctcccccgacggcggcgctaacctctcggtttcccaggcagctgcagacttgaaa

SEQ ID NO: 161636 - DNA, 111 bp, Homo sapiens
ggaaaatctactgcgtggcttgtcaggaactcgactcagacgtggataaagataatcccgcagggtttccaggcctgaggtgcccgccctggccccaggagaatgaaccag

SEQ ID NO: 161637 - DNA, 50 bp, Homo sapiens
agccgcttgatggaagaaaaaaacctgctcctccaaagccagagcccaag

SEQ ID NO: 161638 - DNA, 101 bp, Homo sapiens
aggagagttctccaaacatgatcgtttactgcaaaagaaccatggagtctggcagtaccgccgccagtgaggaggcacgcagccttcgagaatgtgagctc

SEQ ID NO: 161639 - DNA, 75 bp, Homo sapiens
gtcgaagcttccaggtagcggcccgcagagcctgacccaggatctgggacatgtttggagtcttctttgctaacc

SEQ ID NO: 161640 - DNA, 50 bp, Homo sapiens
cagatgttcctgtggaccccagtccaggaattgaacaacacatgtgaacc

SEQ ID NO: 161641 - DNA, 100 bp, Homo sapiens
ctactacaaccagagcgaggacggctgaaaggttccctgagtcgaggtgactggtacaagacaaaggagatcctgctgaaggggcccgactggatcctgg

SEQ ID NO: 161642 - DNA, 100 bp, Homo sapiens
tgaggatggcaccgtcgtacgtgctcaagaaaggtggcagtgctccttttggacttttctctaggtttggcgctaaactcttcttgtgagctcactccac

SEQ ID NO: 161643 - DNA, 100 bp, Homo sapiens
agctagacagcagcgactagggctcgggcgccggcgagatgcctttgttcaccgccaaccccttcgagcaagacgtgggcatggaagaggagatggttcg

SEQ ID NO: 161644 - DNA, 90 bp, Homo sapiens
cagccggccacggagcgcctgcaggtctattattagcagaagatttttctgcatagttggcacgctgtacctgtatcggtgtattacaat

SEQ ID NO: 161645 - DNA, 99 bp, Homo sapiens
gcatgaaggaggatggaagggcaggacgaggtgtcggcgcgggagcagcacttccacagccaagtgcgggagtccacgctcaccatggatgatgatatc

SEQ ID NO: 161646 - DNA, 88 bp, Homo sapiens
ggaatgaggagttacagagggccgagaaggacaggatcaggttgtgaactaaaggccgacaaagattatcactttaaggtggataatg

SEQ ID NO: 161647 - DNA, 83 bp, Homo sapiens
ccacaccgccgctgcctcagtcatgccggatctaaaatgtccactgaggcacaaagagttgatgacagtccaagcactagtgg

SEQ ID NO: 161648 - DNA, 101 bp, Homo sapiens
tgctagccaggaacatggactgaagtatccagcgctcattgggaatttagttaagattgaggacgagacgcaggtgtcacgggccactcagggtgaacagg

SEQ ID NO: 161649 - DNA, 50 bp, Homo sapiens
gtcgcagcgagctggagccgccggagcccagggctccacttcttctacaa

SEQ ID NO: 161650 - DNA, 92 bp, Homo sapiens
agggacagcacctcatcccctggatgggggaccacaagatcctcatcgacagatctctgttgaggagctggcgcggaatctggtcatcaagg

SEQ ID NO: 161651 - DNA, 51 bp, Homo sapiens
cggaacttgccgcgtcgaggactgtcggatgatgataattccgaagaaggc

SEQ ID NO: 161652 - DNA, 50 bp, Homo sapiens
cctactcaagctgagcgccatgggctgggttttaaaagaaggtagacagc

SEQ ID NO: 161653 - DNA, 83 bp, Homo sapiens
ctgagctgcgaggaaaatggcggcgggaggtatgccattttgaagactgagacgttggagttttatcctagaggataaaggaa

SEQ ID NO: 161654 - DNA, 102 bp, Homo sapiens
cagatgataccatgaagagaagtttacaggccctctattgccaactgttaactgccactgcagagccccgccatggaagacacgccgttggtgatatcgaag

SEQ ID NO: 161655 - DNA, 75 bp, Homo sapiens
gagaaaccgcagcactacacctggaccaagctgactgaaagattcttcaagaatacaccttggcccgaggctgaa

SEQ ID NO: 161656 - DNA, 100 bp, Homo sapiens
atcacttcagtgcctcagagtgcagttcccaaggaggcttcaagacaaagggccccttacacaccagacagggacacgtcaaaggctacatatcgcatca

SEQ ID NO: 161657 - DNA, 50 bp, Homo sapiens
gcggaacaggacgccctctgatgaggctgaaccgtctgagcccagaagtg

SEQ ID NO: 161658 - DNA, 98 bp, Homo sapiens
gcagggttcgtggataataaactcaagcagcgagtcatccaggaggcggcgacggcggcggcggggggagaggaagagaaagaagcgtctccagctga

SEQ ID NO: 161659 - DNA, 87 bp, Homo sapiens
gcgcacctcagccgcctcctagcggcgcggcgctcgctcctacggtaagaatgattgatgttggctgatattggagtgctcattcac

SEQ ID NO: 161660 - DNA, 97 bp, Homo sapiens
ctgcatggccgtgtgtggcagcgccaattcagagaaaatggcacagtatctggaggaggaacgtcacatgagagaagagaacttgaggctccagagg

SEQ ID NO: 161661 - DNA, 115 bp, Homo sapiens
ttgctcgtaatagagccttaaatggggatctggtggtcgtgaaactgcttcccgaggagcattggaagtcatatttgatcagaaattggatgaaccttcgggatgctgagacagg

SEQ ID NO: 161662 - DNA, 75 bp, Homo sapiens
gcatggctctggggaggaggaggaagaggaagaggaggatgacccacttgaccatgctcgacagctgaccaaggc

SEQ ID NO: 161663 - DNA, 75 bp, Homo sapiens
ctcagcaagaacgggaacaaaactctgagagacaagagagacacctccaacttcgacaaagagttcaccagacag

SEQ ID NO: 161664 - DNA, 75 bp, Homo sapiens
gacagctgcaaggaggccgtcaccttcaaggccgtcagacaagataacattgcttcagagctggagaacttcatg

SEQ ID NO: 161665 - DNA, 83 bp, Homo sapiens
gtcagctgcaaatattctcttctgttctacagacctctctcctcttcctgctcatggcccgcggcgccatggctcacgtcggc

SEQ ID NO: 161666 - DNA, 74 bp, Homo sapiens
ttcagactcttggagccagaagctacatgacccctaaacgagagacaagagagacacctccaacttcgacaaag

SEQ ID NO: 161667 - DNA, 82 bp, Homo sapiens
ggaatgtcaactattcaacatggaggcggaggtcgataagctggaactgatggtagattttcgttccgtcacccaggctgga

SEQ ID NO: 161668 - DNA, 82 bp, Homo sapiens
tggtggtgcaggcgctgcgccgcaacgccgagcgcaccgacatctgcctgctcaaagatgtgaagttcatttccaatccgcc

SEQ ID NO: 161669 - DNA, 98 bp, Homo sapiens
ttgaatcatgaagctactaaccagagccggctctttctcggtggctgtgaaaaacaatatcgatgtcttctacttcagctgcctcatcccactcaatg

SEQ ID NO: 161670 - DNA, 100 bp, Homo sapiens
cttcgttatggacagcatccaaacattatcactctaaaggatgcgtatgtgggctctgcagtcatgaccgatgagacatccgtggtttcctcacctccac

SEQ ID NO: 161671 - DNA, 100 bp, Homo sapiens
aaaagacaaagctgccactccaagaaaagatggtcccaaacgttctgtactgtccaagtcagttcctgggtacaaggaacaggaaatatagtggtcatta

SEQ ID NO: 161672 - DNA, 102 bp, Homo sapiens
ggcgccctccgccacgcagccggccaccgccgagacccagcacatcgccgaccaggtatgagtcgtcatccgaggactccagcacagcagagaacatctcag

SEQ ID NO: 161673 - DNA, 77 bp, Homo sapiens
gtctctgtgtaatcatctgaagaaattggtcccaagccttgatgacttacaagccctcaaggggaagcattttctcc

SEQ ID NO: 161674 - DNA, 148 bp, Homo sapiens
aagaaaaccttatcagcactatttgaaacttttatctcatctggcttggcgcctgaggttctcccattagagagacaagagagacacctccaacttcgacaaagagttcaccagacagcctgtggaactgacccccactgataaactc

SEQ ID NO: 161675 - DNA, 100 bp, Homo sapiens
gtccagtcctgctccttctgcatggaggaggtcattctgccctttcttgggctgtgttcacgcttgagaattacattgtggaaaacatgaagtcggagat

SEQ ID NO: 161676 - DNA, 75 bp, Homo sapiens
gtggccaggctcattatccattttcgagacattcgaaaatttctaccttgaaccgtatctgaaagaggttattcg

SEQ ID NO: 161677 - DNA, 98 bp, Homo sapiens
gacaatttcagcttcagtgcaaaaataagagtgggtgacttctatgaagccagagatggaccgcagatgctgtgccacttttcctgaggcttctccat

SEQ ID NO: 161678 - DNA, 83 bp, Homo sapiens
ttcacgcacgggatccagagcgccgcgcacttcgtcatgttcttcgcgccctgattcttcgctgctgctgccttaccgccgag

SEQ ID NO: 161679 - DNA, 100 bp, Homo sapiens
gccatcttggatccgcgggacaagaaaattcatgcgcatctgtgggtcttgcagatatgatgtctcctggtgaatccaaactgcccctgcctctcaaagc

SEQ ID NO: 161680 - DNA, 50 bp, Homo sapiens
tgagatttcatcaagatcaacttcagggtttgtaccagttgctggagccc

SEQ ID NO: 161681 - DNA, 100 bp, Homo sapiens
gacggggccgggcgacctgggcaccagcaggacccgaggccaggagccaggggcccagaagagcactgtcatccgtggtggccctgggagccaacatcat

SEQ ID NO: 161682 - DNA, 100 bp, Homo sapiens
tggcagactcaaccttcactgtcctaaaacgttaccagcagctgaaaccaattggctctggggcccaagggattgtttgcacaccaaatgaaaagctgtt

SEQ ID NO: 161683 - DNA, 100 bp, Homo sapiens
agcacctttcggcttctgagacggcggcagcagcggcattcagtctcctgaatatttacgcgttgctgaatctcctgtggacaaaccaccaataggccag

SEQ ID NO: 161684 - DNA, 88 bp, Homo sapiens
ttcaggcacttatggccatttcagccaacggagtttcattcttgttgcccaggctggagtgcaatggcgcgatctcagctcaccacaa

SEQ ID NO: 161685 - DNA, 82 bp, Homo sapiens
tgtcttccctgccggcaaggccatctgggtcacgggctggggacacacccagtatggaggttgtgaccgagattcccgacga

SEQ ID NO: 161686 - DNA, 100 bp, Homo sapiens
cagccgcccgcttcaaccccaggggaccagaggaactcagccctgattgcggtcccggatgttacaggtcagagccctccagacccccaaggactgtact

SEQ ID NO: 161687 - DNA, 82 bp, Homo sapiens
ggagaactagtcctcgactcacgacaatgcagatcttcgtgaagactctgactggtaagaccatcaccctcgaggttgagcc

SEQ ID NO: 161688 - DNA, 50 bp, Homo sapiens
tgaagacgctgaacaaatgtgagaatgtcaaaactggaccaatggggcca

SEQ ID NO: 161689 - DNA, 100 bp, Homo sapiens
taccgggccacgcaccgcctgctgctgctgggtctaccccgagccccggagcgagagcgagtgcctgagcaacatccgcgagttcctgcgcggctgcggg

SEQ ID NO: 161690 - DNA, 100 bp, Homo sapiens
aggctcaagcaatcctaccatgtcagccttcccagtagctggaactacagggagccgatatgtggatttactcccttgatggaagcagctgctgctggcc

SEQ ID NO: 161691 - DNA, 90 bp, Homo sapiens
gcttcgacacctctcagttgtcaccctggctgctaaagtaaagatcatggaggagttggcagatgctctaatgtactgccatgggaagaa

SEQ ID NO: 161692 - DNA, 100 bp, Homo sapiens
aggagcgggtggtcactgtgattgctcatgagctggcccaccagcgctgccgtcaacgccgtggcctggtgctactccgggagccacatggtgagcgtgg

SEQ ID NO: 161693 - DNA, 75 bp, Homo sapiens
ctctatggttcatgagcttaatagcaaatcatgaaggacaggtggatcaatgcagggcatgaagaagatgaactc

SEQ ID NO: 161694 - DNA, 50 bp, Homo sapiens
acagattcagtggcctgcattgagacctcttgatacaaacaatagaaaat

SEQ ID NO: 161695 - DNA, 100 bp, Homo sapiens
atgctaaagaaattccaaggatattccaggtattgggaagaatgtggtttgcgagaaggcagcaacatcggtggatgccttccggatggtgacagcctcg

SEQ ID NO: 161696 - DNA, 90 bp, Homo sapiens
tctgtacgttgcaatctgtggatcagctacgaggttctgtgactccccgaccagtgacctggaaatgcgcaatggccggggtagaggcaa

SEQ ID NO: 161697 - DNA, 75 bp, Homo sapiens
accctggagactggatggccatgagcatggttcaaaacagcagcaaagtctctcgcgacaccctgtacgaggcgg

SEQ ID NO: 161698 - DNA, 100 bp, Homo sapiens
ggcggcctgggctgctgactgcgcacttggaatagtagcaggcggcggcggcggaacgccaggcaggtggaattctactaagtatcagtcggccctacaa

SEQ ID NO: 161699 - DNA, 82 bp, Homo sapiens
tcctggtggccggagcctccacagcagtgcagtggcagccacctacatgtactaatggtcacttgatgtgcgctggctgttt

SEQ ID NO: 161700 - DNA, 88 bp, Homo sapiens
gaaggtgccttgctcctcctggaaatgctgaaggccaccatgagccagatccgctgttgtaccaggggtctaatcaggcctgtgtctg

SEQ ID NO: 161701 - DNA, 50 bp, Homo sapiens
ggaaaatgccctcaaacgcgccaacgctgagagtgagggaacatcctgtt

SEQ ID NO: 161702 - DNA, 92 bp, Homo sapiens
aggacttccaggtcacggaggaggtgaaaattattcacaccgatagcaacaccgtcttgggccagaacgacacgggcttcagctgcgacggc

SEQ ID NO: 161703 - DNA, 50 bp, Homo sapiens
gcgaaatgtgcaaatgtttatgggaagatggatgttttgaaagctaccgc

SEQ ID NO: 161704 - DNA, 100 bp, Homo sapiens
aactgaggcctggagaggttaaagagacccgttcagagtcctacagtggcagctggtccacgacaaagagttggcagcagaagatgagcaggtgttccta

SEQ ID NO: 161705 - DNA, 101 bp, Homo sapiens
ggagtctctgtccgggggcctggctaaggaaaccctattacctccagggggatatgagactttctactcggaatatcctgagtgttgcgtggatgtaaaac

SEQ ID NO: 161706 - DNA, 97 bp, Homo sapiens
acagtggagatgaagcctaagaatatgatcagtccttaaaaaacgatgagcagtctgccaaaactgatgttcagaaacttctggaattaggacagaa

SEQ ID NO: 161707 - DNA, 75 bp, Homo sapiens
ccggatcaatccagatggcagccagtcagtggtggaggaggatttgacagctaaggatattgaagaaattattga

SEQ ID NO: 161708 - DNA, 102 bp, Homo sapiens
cctgctgggtagcgttgctgcctttggctcctgggcttctcggatcccccctctctccagaattaggcctaacatcgtgtcccagctcagccaagcctgcga

SEQ ID NO: 161709 - DNA, 50 bp, Homo sapiens
cttgcacgttatataccgcttattcaagccgattacaaggagagctttaa

SEQ ID NO: 161710 - DNA, 89 bp, Homo sapiens
aagtactcggcaagttgtcagggatggcactggatctttaaaacgcagtggttcctttagcaaactccgggcttccattagacgcagca

SEQ ID NO: 161711 - DNA, 98 bp, Homo sapiens
tatgttatcactggccggaaccgctccttggaaggtcgctgggaggtggcattcaaaggagttgttcctttggccacatatatgcgaatctataagaa

SEQ ID NO: 161712 - DNA, 100 bp, Homo sapiens
atgtgcgatgatgaggaggactacgacctggtgcactacatcctccaggaggtggtgatgggtgggatggtgttggaaacaaacatgaatgaaatcgtgg

SEQ ID NO: 161713 - DNA, 75 bp, Homo sapiens
tccaaacatggatagagctactcactggtcggaagtctatgcgtcagtctacagctgagcatacacgacaaacgt

SEQ ID NO: 161714 - DNA, 89 bp, Homo sapiens
aagcagggaaagagagcgccaggtgcttagcaggtacggttcctggagcagcagaacaagatgctggagaccaagtggagcctcctgca

SEQ ID NO: 161715 - DNA, 74 bp, Homo sapiens
cagagagaggaacattgatgcgtgtgaaatgttggcagatactgtggatggtagggaagaaaagtctgcttctg

SEQ ID NO: 161716 - DNA, 100 bp, Homo sapiens
gaagccttgggtttctttcttaaaggactgatttttagaactccacatttgaggattcactccttctccagttgcacagccacacccttcagctggcctt

SEQ ID NO: 161717 - DNA, 99 bp, Homo sapiens
ttagaagaccgtttgaagaaatatgaaaagaatgtatatgcaacaactgtggggacaccttacaaagaaaaaggtagcagcactgcctaaacaagaggt

SEQ ID NO: 161718 - DNA, 82 bp, Homo sapiens
gaaaatgcactcggatgccgccgctgtcaggaagcccgtcagcctgagctacagatgcccatgccgattcttcgaaagccat

SEQ ID NO: 161719 - DNA, 99 bp, Homo sapiens
tggatgttcttcttcgagtatttgtagaaggaaactgattattgatgagaagaagtattacttatttgggagaaaccctgatttgtgtgactttaccat

SEQ ID NO: 161720 - DNA, 82 bp, Homo sapiens
ccagtgggactttgccagttatgatattctcagtgccaccatggcaactgcaccatacaactactcttacatctttaaatat

SEQ ID NO: 161721 - DNA, 75 bp, Homo sapiens
agtcatggtcccagaaacgtcactatcaagaagcaactattctgtcaaccctggccaatttggaaggtgaagaaa

SEQ ID NO: 161722 - DNA, 89 bp, Homo sapiens
gaagaaggaagggggtgctctgaggttatcttatgatgaggcttttgctatggctaatgatcccttggaaggcttccatgaagtaaacc

SEQ ID NO: 161723 - DNA, 100 bp, Homo sapiens
ctgagctgaaatggcagacgatctcggagacgagtggtgggagaaccagccgactggagcaggcagcagcccagattagcctgaggcctgctcagtcgtt

SEQ ID NO: 161724 - DNA, 101 bp, Homo sapiens
aaagagtctccgcggtggaggtctgcgttgctcttgcttttcctcgctggggtgtacgagctacagagacttctgaagtggagagtctgcgacctcctcgg

SEQ ID NO: 161725 - DNA, 114 bp, Homo sapiens
ggcgggtggaggttcgagcgctgttctcgctccggagccgctgcacatttcggtaatactgcattgcatgattgtgcagaatctggaagtttggacatcatgaagatgcttctt

SEQ ID NO: 161726 - DNA, 87 bp, Homo sapiens
atgcaagcaagcagatggttaaatttgctgccaagaggcaggtggaagtcatcataaagtttctgtttcacccgtcgtccatgttcg

SEQ ID NO: 161727 - DNA, 100 bp, Homo sapiens
gtaaagccccagatcctgactgggcatccatcaatctctgtgttgtcatctgtaagaagtgtgcaggtttcagaaccttctgtggtccagaaagacattt

SEQ ID NO: 161728 - DNA, 74 bp, Homo sapiens
gagaggagctcaaacaggcagaagcctccaagactgcagagaatgccaccagtggggaaacattagaagaaaat

SEQ ID NO: 161729 - DNA, 82 bp, Homo sapiens
acgctaaacgtgccctactctgccccgggggagaggtcgcctgcgaggccgctggccaggcctgagcctctgccaccatggc

SEQ ID NO: 161730 - DNA, 50 bp, Homo sapiens
cttagacaagaagatggtcactgctcaagtaaagctctttgtgacagggc

SEQ ID NO: 161731 - DNA, 75 bp, Homo sapiens
attgacccatggggaggagggtcacttcccgtgaaaagggggggccctcagcctcttggccttgaacgggctgtt

SEQ ID NO: 161732 - DNA, 100 bp, Homo sapiens
gccgccgaagaagcatcgttaaagtctctcttcaccctgccgtcatgtctaagtcagaggagaatacttatctctggcgcacatcactatatttggctgc

SEQ ID NO: 161733 - DNA, 108 bp, Homo sapiens
atcgaccgcaacttacgggaggacggggaaaaagcggccaaagaagtgaagctgctgctactcgtgccagggcaggggcccttggagtgacttggctggggtctgtgg

SEQ ID NO: 161734 - DNA, 75 bp, Homo sapiens
cgaggggctcggagaggtgctcggattctcgtagctgtgccggcttgtcaaaattcccaaaaatgatcccctcaa

SEQ ID NO: 161735 - DNA, 75 bp, Homo sapiens
tcgaatctggagagagaatgctcacccaagctgatgaaaagtctcggaagggtgctgacctggaccgggagaaga

SEQ ID NO: 161736 - DNA, 100 bp, Homo sapiens
gcactgcatggttgctgctggatgtgttgtgttcctggcttccctctggatgctgacagaaacaaggtttcactgttacatgccttgaagtgatgaggag

SEQ ID NO: 161737 - DNA, 82 bp, Homo sapiens
actttccagtcagacacagatgcacaacaggagcctcacagtctactcagagaaaaataaaagaaggcaaaatgagtcctcc

SEQ ID NO: 161738 - DNA, 50 bp, Homo sapiens
gtcctggcctcatacaatcatgatgggtttgttcggacagtgttaccatt

SEQ ID NO: 161739 - DNA, 82 bp, Homo sapiens
ggcttcatcatcaagcagatgaaggaggatggcgcctgtctcttccgggctgtaggtactaggttttgacaagcttgcatca

SEQ ID NO: 161740 - DNA, 100 bp, Homo sapiens
gaaaaggccggagaaggtgaaattctgtgtgctccctccggcgagagactttgtcagctcccgcacagtaacaacaagaaactcctttacgagaagatga

SEQ ID NO: 161741 - DNA, 82 bp, Homo sapiens
atccggaggaccggccaacaggatcgctcaggatggacgtcttctactcaatgcctccggagccagcgtggtggccatagac

SEQ ID NO: 161742 - DNA, 100 bp, Homo sapiens
ctagcaatgagctcccaaagccatccagaatggctattcaagtggacaagttcaactttgagagtttcccggagtcccctggggagaaggggcaatttgc

SEQ ID NO: 161743 - DNA, 90 bp, Homo sapiens
aacaaactcatcagggacaccaattcaatcaaaaaactaaagttacagagtggagaggtaacaaaagaagagaggcagcctgcatcagcc

SEQ ID NO: 161744 - DNA, 82 bp, Homo sapiens
tgaattcctgacctcaattgatccgactgcctcggcctccggaagtgctgggattacaggttcagccgtctgtatatctccc

SEQ ID NO: 161745 - DNA, 126 bp, Homo sapiens
gaaatgttgacgcccctggggagattggacaagtatgctgcaagtgagaacatatttaacaggaatcagagatcattgatttcttcctgggggcctctctcaaggatgaggttttgaagattatgc

SEQ ID NO: 161746 - DNA, 50 bp, Homo sapiens
caggctcctcctttccccgctgatgggccaaggttgctcgggtgattggt

SEQ ID NO: 161747 - DNA, 100 bp, Homo sapiens
ctggagttggtgctgggaaacccggggctaatgttgacaacaggctcgaggcaaacctctactctggagccccttcttgcagaggcctctgcataaaagg

SEQ ID NO: 161748 - DNA, 50 bp, Homo sapiens
cagatacaaggacatactgccatcttcgatgtttttgaagcaggcatttg

SEQ ID NO: 161749 - DNA, 50 bp, Homo sapiens
gcgaaggctggcggaggaggaggtggagccgccaccaaaatgcagatttt

SEQ ID NO: 161750 - DNA, 75 bp, Homo sapiens
ggaacttcgagctgaacagcagagattgaaatctcaggcacctgaactcctggggggaccgtcagtcttcctctt

SEQ ID NO: 161751 - DNA, 50 bp, Homo sapiens
tctcatccttagtggggatgttagacacagcattgttggttttgccatgt

SEQ ID NO: 161752 - DNA, 101 bp, Homo sapiens
atggcaggagcgccggccagcgccagccggaccccagacaagccccggagcgcggccgagcaccgcaaggtcctgaacgaggctgtgggggccctgatgta

SEQ ID NO: 161753 - DNA, 82 bp, Homo sapiens
cagcgggagctggacggcgagcgcgagcggcgcgagaaaatgaaggtcaccgtgtccaaagggggcgaccgggacagtgacg

SEQ ID NO: 161754 - DNA, 75 bp, Homo sapiens
agaattcaattaaagtggctcagctccagaaacatgacaaggaggactttcctgcctcttggagatcagaggagg

SEQ ID NO: 161755 - DNA, 83 bp, Homo sapiens
cccacctgcccggtgcccgaggaggcagccaagctcgtggcctgcctctgcgtgcgtgacttaagagattaaaattaatttgg

SEQ ID NO: 161756 - DNA, 82 bp, Homo sapiens
caacggcctgcagagcaacatgcccaatctctcaagtcccgaggctacgtgaaggaacagtttgcctggagacatttctact

SEQ ID NO: 161757 - DNA, 88 bp, Homo sapiens
caacaccagcaccgcagatgttgtcaaggtggcctaccaggaggccaggggtgtcgccatggtcctgctggttggggcagacaacttc

SEQ ID NO: 161758 - DNA, 75 bp, Homo sapiens
tgaacattcctgctcttgttggcaaagacaaggagactggctttcacagaggtttgggttgggttcagttttctt

SEQ ID NO: 161759 - DNA, 98 bp, Homo sapiens
aggacctgggcggaggccgccaagacgaaccatgatggcagcattgacttccgagagtatgtgattggcctggctgtcttgtgcaacccttccaacac

SEQ ID NO: 161760 - DNA, 80 bp, Homo sapiens
ctcccttccccacgacggggcgcctctgcaactcacagtctgtgctgccaacatagtctcacaagatggtgaacagaatg

SEQ ID NO: 161761 - DNA, 123 bp, Homo sapiens
tgcgtgcgggcggaggccggcccccgagagccgccgacatgaagaaagacgtgcggatcctgctggtgggagaacgtaagaatgattgatgttggctgatattggagtgctcattcacatgaa

SEQ ID NO: 161762 - DNA, 140 bp, Homo sapiens
tgttggggagaagaggattggaggtgtcagtgttaaaggaacctctacaacgaaggtgaagccacggaagataaggtctttgactttgaactgagcagccaggatatgaccaccttactcagctacaacaggaactggag

SEQ ID NO: 161763 - DNA, 83 bp, Homo sapiens
gccgaaaggactgaggaacggtgcctggaaaagatggctcggactcaaaagaacaaggccacagcacaccacttagggctgct

SEQ ID NO: 161764 - DNA, 75 bp, Homo sapiens
gtttatcacttcctgaaagacctgaagaaactaatctggattcactccctctggttgatacccactcaaaaagga

SEQ ID NO: 161765 - DNA, 50 bp, Homo sapiens
tgcccaaaagccgccacctgaccatcaaatataacacgtgggaaccggag

SEQ ID NO: 161766 - DNA, 75 bp, Homo sapiens
ggaaggagggcgagcgaggaggatggcggagtcggggctcctgacggcctgcaggacaagctgaacaagagggac

SEQ ID NO: 161767 - DNA, 90 bp, Homo sapiens
tgtggaagagattcctgagaatgacagttttccaagagataacttcaccaagatgtccagtgataggcaaaggtccgatgatgagagccc

SEQ ID NO: 161768 - DNA, 100 bp, Homo sapiens
ttggcgtggccgtcaaggagctggacctctacctggcctacttcgtgcgtgagcgagggctgggtataagtaagcaagaagagggcctgggagaagagtc

SEQ ID NO: 161769 - DNA, 71 bp, Homo sapiens
agtctattcctggattcaatgtcatccagagcccagagcagggtgtgggccgaagatatgctcatgtggtg

SEQ ID NO: 161770 - DNA, 48 bp, Homo sapiens
caatggatgaaatcaaatcccaaggtgtttcaggcctcacctgaagat

SEQ ID NO: 161771 - DNA, 100 bp, Homo sapiens
cacctaccttcagattcttgaccaaaatgtggcaccccaacatttatgagtgtacaagtccccagagtatgagtcccttggttttgagcttactgtggag

SEQ ID NO: 161772 - DNA, 100 bp, Homo sapiens
cattgagcttgtttcaaattcagccagctgaagatgagtggggtaaaaccccagacgccatgaaagctgccatggccctggagaaaaagctgaaccaggc

SEQ ID NO: 161773 - DNA, 75 bp, Homo sapiens
ccgctgctacccacctgcatggcatcagcagagcagtgcctatcagaataatgacatcactgaatttgaaaagat

SEQ ID NO: 161774 - DNA, 98 bp, Homo sapiens
ctctgcggctggtccaggccttccagtacacagacgagcatggggaagggacaggctggcctgacatggaaggtgaaacaaggcagcagcccctgcct

SEQ ID NO: 161775 - DNA, 75 bp, Homo sapiens
ccgaggcagcctccgcggaggagcagaagattcacagttaatagaaggatctctatagttggatttggcttgtat

SEQ ID NO: 161776 - DNA, 119 bp, Homo sapiens
atttggtagcctttgcatacaagaatgtgaaatttgttctcaagcacaaaggaacactgacgagaagaccttatgaaccaggaatattttgtactcgatgtggcagacgtgacaaatgc

SEQ ID NO: 161777 - DNA, 75 bp, Homo sapiens
gccccctcaaggtgctatctcagagaccagctttggaaacatgatgagcaaggagaagcgagaggctgtcagtaa

SEQ ID NO: 161778 - DNA, 96 bp, Homo sapiens
ccccttcgagatcaccctttggatcctgctggcctccctggccaagattgctaaagttttccaggataaatttgatgtgactctgctacacaccaa

SEQ ID NO: 161779 - DNA, 82 bp, Homo sapiens
gggaggtgttcgagaacgaccccgagacgggtcccctggaagtgacgctgactcagccagtgaggagcgggcctgtctccaa

SEQ ID NO: 161780 - DNA, 100 bp, Homo sapiens
tccactttttggctgttctgaagagtgttactgtgaacattcatgcacaaatttttatgtggagtttggaaattttagcattcaggtgccaggaatgcag

SEQ ID NO: 161781 - DNA, 80 bp, Homo sapiens
gaaaactcctccttgtacctagaaatattgctgacactgctgaagccagttgcttcttcagctgaccgggctcacttgct

SEQ ID NO: 161782 - DNA, 100 bp, Homo sapiens
ccacttctccccgcagacctaggtactgaacgacacctgggtctccttcccttcctggtctgaggactccacgttcgtcagctccaagaagacaccgtac

SEQ ID NO: 161783 - DNA, 83 bp, Homo sapiens
tgtgtggtagcaggagaaagtgtgaacatcaggtggtccagatgaaggatttgggggcagagcacttggcaggtcatgaaggg

SEQ ID NO: 161784 - DNA, 90 bp, Homo sapiens
cggccgcacaggttccaggtctttaacgtgagcccgctgcaggtgtgcggcccagtccgagacagcagagactaatagacaagtcacgag

SEQ ID NO: 161785 - DNA, 101 bp, Homo sapiens
ctggagcctcagttggaagcagccgatccagcctgcggagcctgtggggcagacaaatttacatgtattggagaccagaccagaagcccttctgaattaag

SEQ ID NO: 161786 - DNA, 100 bp, Homo sapiens
caaagatgccagatgtgggagacacgccaaagctcccaagccctttctaaggcacaaaatgatgtgatggaaatgaagatgcagtcagagagactttcga

SEQ ID NO: 161787 - DNA, 92 bp, Homo sapiens
tttgacttgttaagagtggacaggttaagggactcccaggaatatcagataccatgctgtgaagtccaggccacatggaggtgtcctgtgta

SEQ ID NO: 161788 - DNA, 98 bp, Homo sapiens
agcaataataccaaaatatcttcgtgcttccatgactaacttggtcaagctgctgaatgccatggtggcaaaactggggaaccgggaggacccactcc

SEQ ID NO: 161789 - DNA, 88 bp, Homo sapiens
gctccaggagttcgtctcttacgtctgcggaagtgcagctgcctcagttcttagcgcaggtctctaattaacagaagatggcaaagcc

SEQ ID NO: 161790 - DNA, 76 bp, Homo sapiens
taaaagacagtcctcgtcagcactgactttcagctatggaatcgcatttcttatactgaagcagtggagatcttaa

SEQ ID NO: 161791 - DNA, 80 bp, Homo sapiens
gctcgacaaagatggggttgtcctctttaagaaggtaattcagtaccaaactgttcgatatgatatcctccccttatctc

SEQ ID NO: 161792 - DNA, 100 bp, Homo sapiens
gcgaggacggggaggacgcgccgcggccaggcagggaggagaccggcacccagacaggtggcgaaggcagaggagactttgtatctttgctaaagtcagt

SEQ ID NO: 161793 - DNA, 75 bp, Homo sapiens
ctcccacctccagcagcacaccagcatgatgccttcttctgtagagtgggcgctttgcagaatacgtgttgaatg

SEQ ID NO: 161794 - DNA, 98 bp, Homo sapiens
tggtaaagaccaaggaggaggatgggcgggaagcagtggagttccggcaggaggacaacaccatcgacttcctggagtacgtggcagctctgaatctc

SEQ ID NO: 161795 - DNA, 102 bp, Homo sapiens
ctccatcaggaccccagatgtctgacagccctgtgtgacaccaagataagtaacgatgaccaactcttggatgatggcaagacactgggcgagtgtggcttc

SEQ ID NO: 161796 - DNA, 100 bp, Homo sapiens
gtggtggtgactgagcggagcccggtgacaggatggcagctacatgttatggatgaaacacatgtgattaatcaagtgaaagaagatgtatgctatgtgt

SEQ ID NO: 161797 - DNA, 42 bp, Homo sapiens
ggcgactgcgcacgcgcggctgtgccggtggtggtgtgcaca

SEQ ID NO: 161798 - DNA, 75 bp, Homo sapiens
cggggctgaccgctctggcccagggtgaaatgggaagaacttggtggacttcacctttgtggagaacgtggtcca

SEQ ID NO: 161799 - DNA, 74 bp, Homo sapiens
cctaccatgtcagccttcccagtagctgggaccacagggatgctgagaacttgctggagtcacagccactggga

SEQ ID NO: 161800 - DNA, 99 bp, Homo sapiens
cttggcggcggcggctgcggggacgccccggctgcgctgttgtacagtggcctgattatagctcactgtagcctcgaaattctgggccgaaatgatccg

SEQ ID NO: 161801 - DNA, 82 bp, Homo sapiens
ctggagctgtgccagcctgacatggacctcctgccccccgaggtctgcagtctcctgaacccagcagccatctacgccaaca

SEQ ID NO: 161802 - DNA, 122 bp, Homo sapiens
gcccgcagagtccggctgccgcgcatcgtccgcagacgccgccaccgccatgggctcctgaggtgttggagcgggccggagagaagtagagtgggctgcgaggagaaggaaacaggcctttc

SEQ ID NO: 161803 - DNA, 100 bp, Homo sapiens
gccccgacggggcgcgcgcgaagcgagcgagaaggcacggagtcgccgcggagcgcaggtgtgggccatgtttgaggattgccccagcattcagttctat

SEQ ID NO: 161804 - DNA, 144 bp, Homo sapiens
gtcgggctcgccgtctccacctcctcgcgtccgtaatcagtgacgaggtccgctacgtaaatccctttgcggcggatttgaacatggaattcaatccttcagatcatcctcgggccagcacaatattcctcagtaaatctcaga

SEQ ID NO: 161805 - DNA, 100 bp, Homo sapiens
aaaattcaggagcccaactgcatgttacctacttggtgtctggcagtctcattcagaatggacattccgagcatttcctccctctgctatttatacacgg

SEQ ID NO: 161806 - DNA, 100 bp, Homo sapiens
tcatctggaattttgccgatttcatgactaaccagtgactacggagggtgatggtgcgggctcaccggcaggcctggtgctggcaggacgagtggtatgg

SEQ ID NO: 161807 - DNA, 90 bp, Homo sapiens
caattcttcgacaggaaaaaaatttgctggatattgatgcgccagtcactgatgcttgggatttgctttacattctaagtggatttggag

SEQ ID NO: 161808 - DNA, 50 bp, Homo sapiens
gccttccatcatgctaacttcccactgtaccacatgaaggaagatggttg

SEQ ID NO: 161809 - DNA, 91 bp, Homo sapiens
caagagggtgttcgactgctagagccgagcgaagcggggatatgagactttctactcggaatatcctgagtgttgcgtggatgtaaaaccc

SEQ ID NO: 161810 - DNA, 82 bp, Homo sapiens
tggaaggccgtgatgccatcttcaagcagtttcatttcaaagacttcaacagggcttcatagagcccagtgtgcaattaaac

SEQ ID NO: 161811 - DNA, 76 bp, Homo sapiens
atgctgtagcttgtgcaaagagggttgtccgtgatccacaaggcattagagcatgtgaactcttatgggcacccac

SEQ ID NO: 161812 - DNA, 96 bp, Homo sapiens
cccgtttgagctggtcatggcggggaggctcagaagcaagaagaagatgaaagttgtgccgctgctgaggcgttgacagcgcctgaggatgctggg

SEQ ID NO: 161813 - DNA, 100 bp, Homo sapiens
ggagcccagtcctgagttgggtgctgtgccagaatcagggactcagaagctcagccagccatacgtcgtgtgccggcagtgtcctgagtacagaaggcag

SEQ ID NO: 161814 - DNA, 85 bp, Homo sapiens
attcttaacttcttccaaggttaccagacactggccaaaagaagaccctagacaagaaagatggaagacgaatgtcttttcagaa

SEQ ID NO: 161815 - DNA, 100 bp, Homo sapiens
accagctgtagctgaacgtctggatggtggagaagagcagccacagcctggcagctctgatcaggaaagtgaggaacagcaacaattccggaacattttc

SEQ ID NO: 161816 - DNA, 75 bp, Homo sapiens
gtgttcgagaacgaccccgagacgggattccggttcacaatggatgctgataaagagaaagatttgcagaaattt

SEQ ID NO: 161817 - DNA, 46 bp, Homo sapiens
ccaggacagcagcagggctacggatcttacacatttgttccatggc

SEQ ID NO: 161818 - DNA, 97 bp, Homo sapiens
ggagcttaccaggctggcttgctctgagctgcggttactgtgtccaggccccgggttctcaggagctggctgctgaatgtaagagtgcaggctaccc

SEQ ID NO: 161819 - DNA, 90 bp, Homo sapiens
ggggcccagggtccgctgcccccaccgccatcaccacctcggaacccagggtaacgctgtcagtctttgctgccactgcagagccccgcc

SEQ ID NO: 161820 - DNA, 88 bp, Homo sapiens
ctcatattgccagacaagagctcagacctgaggagagtgactagcttctctgtgtcccaggtgctcagcagggagaccccctttcccg

SEQ ID NO: 161821 - DNA, 98 bp, Homo sapiens
ccttcccagtagctggaactacaggtgccacttctccacttttaagcagtgccaagagtggctctcacggctaagccgagccacagcaagacctgcca

SEQ ID NO: 161822 - DNA, 75 bp, Homo sapiens
ctccggtcatctttgcaggtggtcaggagtcccagccatcccctttggctctgctggcagcaacttgcagcagaa

SEQ ID NO: 161823 - DNA, 75 bp, Homo sapiens
aacaaaaatattatggtctttgtgcacatttacatcaagagaacggagaccaacctgggctgaagaaagaagatt

SEQ ID NO: 161824 - DNA, 101 bp, Homo sapiens
tgggaatatatgtagtgacaaatgctggaagatctcatgatgttcaaccattcacttacactccagacccaggtccttggtatagtagtgggagttctcct

SEQ ID NO: 161825 - DNA, 82 bp, Homo sapiens
gggcctacagcagcttcggcggcggcagaggcgtgagtgcatctccatccacgttggccaggctggtgtccagattggcaat

SEQ ID NO: 161826 - DNA, 100 bp, Homo sapiens
cgctcctcagcggatgtggcagccccgagccatggctctcgccgtccgagtcgtttattggaatcaggagcttcttttgctgttcttctgttttggatgc

SEQ ID NO: 161827 - DNA, 100 bp, Homo sapiens
cagcaggcatcatccgctatgcaattgggataaacattgacgatcttgaggatgaccctgtggtgaacggggagaggtctggctgtgcgctcacagacgc

SEQ ID NO: 161828 - DNA, 75 bp, Homo sapiens
ggcagtgacgaggacgaagtgtccgagtgctcaagtaaagctctttgtgacagggcttttcagcttaaatcaaga

SEQ ID NO: 161829 - DNA, 90 bp, Homo sapiens
gctaggagctggcggcgacggccacaggggcggcgacggcgcagtgcgaagcgaaacagcatgacgacagagatgatggtgtggattatt

SEQ ID NO: 161830 - DNA, 75 bp, Homo sapiens
gtaggagggagccgtggaggtccagatcattcaacttcaagtggcacattatcttttaagcctagtcaatcattg

SEQ ID NO: 161831 - DNA, 100 bp, Homo sapiens
gtctactaggtgactgtctcctggaaatgttatgcagctcagcaaggtgaagttttgtcagcctggcgggtggcagctgtccagagagaggaagcagcca

SEQ ID NO: 161832 - DNA, 80 bp, Homo sapiens
tggagaccaagaagcctggcatgaacttgcagaactttacatcaatgaacatgactctattaccaggttttaaacttcgc

SEQ ID NO: 161833 - DNA, 75 bp, Homo sapiens
gggcagtttgaggagctgctgcgcctcaaagccaactccagaacctgggtatcaacccagcaaacattggcttca

SEQ ID NO: 161834 - DNA, 98 bp, Homo sapiens
acaacagcgaggaagaagaggacgacgacgacgaggaagaggaggtttctgagagcctggagaaagttcttgtggaattcagtcacaaggagttgttt

SEQ ID NO: 161835 - DNA, 82 bp, Homo sapiens
cgccttcctcaacgacgcggacatggtcatgagctttgtgaacctgggatgccggctccaggagcagcagtggaggtcggga

SEQ ID NO: 161836 - DNA, 71 bp, Homo sapiens
ggctgggcgctccaggagtgccactatggtggcagcatacctgattcagattcgacgtcaagcaattaaag

SEQ ID NO: 161837 - DNA, 75 bp, Homo sapiens
ctgctgcggggcatctacgcttacggaagtgggaaaactcttgcctttgccatcccaatgattcatgcggtgttg

SEQ ID NO: 161838 - DNA, 100 bp, Homo sapiens
aatcctgtaacaaatgatcgacatggctttgtctcaacccacttccttcagagtatgtttcagcagaaatcaaggtagacgaagtaacctcttgtcctga

SEQ ID NO: 161839 - DNA, 83 bp, Homo sapiens
tcagaaggctttgctggcctgaaaaaggtatggcctcacaagtcttggtctacccaccatatgtttatcaaactcagtcaagt

SEQ ID NO: 161840 - DNA, 75 bp, Homo sapiens
gggggccacaccatttgccgtggccaggctagaggaacagggtctgttccacaaaaaagacagtgccaatcaagg

SEQ ID NO: 161841 - DNA, 80 bp, Homo sapiens
aaactctttggatgattctgccaaaaagtctccccagccttggggccggtgcctcttccgggcttcggcgaatgagacct

SEQ ID NO: 161842 - DNA, 75 bp, Homo sapiens
ttgactactggggccagggaaccctggtcaccgtctcctcaggttccttcaatggtgccttagctgctgttcctg

SEQ ID NO: 161843 - DNA, 91 bp, Homo sapiens
gagagggaagagattcagccagcacactcctcgcgagcaaggtcaaaatgcagatcttcgtgaaaacccttaccggcaagaccatcaccct

SEQ ID NO: 161844 - DNA, 76 bp, Homo sapiens
gcaatctcaagcagtgctatttcgagagctgtgtctgatgccagtgctggaaacccttcaaatagttggccttcac

SEQ ID NO: 161845 - DNA, 83 bp, Homo sapiens
gttcggcctgaagtgtgagctctgagaaagtgtggctgaacgtggacaagagcctagagtgcatcattcagcgtgtggacaag

SEQ ID NO: 161846 - DNA, 75 bp, Homo sapiens
gccgtccggagccagccaacgagcggataagttctgaacgtcgaaaagaaaagtctcgagatgcagccagatctc

SEQ ID NO: 161847 - DNA, 98 bp, Homo sapiens
cctcccactgcaaaaaggcctgggccctccacgcccttcaggaggagcaggccagactcaagatgaggctgtgggacctgcagcagctgagaaaggag

SEQ ID NO: 161848 - DNA, 74 bp, Homo sapiens
agtatttgatggcaacttttgtacatgtgtacatcacaagttttataagtgagaagaagctcattacagatgcc

SEQ ID NO: 161849 - DNA, 76 bp, Homo sapiens
ccaagcaatgaagaatctgagactgatcactattatcttcaaagcccaccatgagtgtacagatcagaaagtctac

SEQ ID NO: 161850 - DNA, 75 bp, Homo sapiens
aggcctctctggaagcattacttccagaatacccaggtagtaagcattaataatgtctttcatctttgagtggat

SEQ ID NO: 161851 - DNA, 75 bp, Homo sapiens
ggtaactctcatataaatagtaattccatgactcccaatggcaccgaagaattgcagatttccaggatgtcctga

SEQ ID NO: 161852 - DNA, 90 bp, Homo sapiens
cgcctttgatcgtcttcctcttcagccatccaggaggattatattgaaacagatgataaaaaagttttccctctgcgatggactgctcca

SEQ ID NO: 161853 - DNA, 100 bp, Homo sapiens
gataatgtaacaattaaaggtcttcagactaatgttagcataccaaagagacttgatggcagtgtagatttcaagaaaaactggattcaatataaagaag

SEQ ID NO: 161854 - DNA, 100 bp, Homo sapiens
ggttcatttaccctttggtcggaacgtaaatctcgctgctgctcactctttgggtccacaccacctttaagagctgtaacacttgccgcgaaggtccacg

SEQ ID NO: 161855 - DNA, 90 bp, Homo sapiens
gtagcccttccggaaacctccatgcccaacagcatggtggtggaacaccccgagttcctcaaggcagggaaggagcctggcctgcagatc

SEQ ID NO: 161856 - DNA, 87 bp, Homo sapiens
taccagagacgacttttagttactagatctggcaggaaaattaaaggaagaggaccaaggattcttcgttgtcaagccgccaaagtg

SEQ ID NO: 161857 - DNA, 74 bp, Homo sapiens
ggctgctgaaggatgaacggagaggaagaattctttgatgccgtcacaggtactccaaagattcaggtttactc

SEQ ID NO: 161858 - DNA, 83 bp, Homo sapiens
gtcgggcttcagtactcgggcaagaccaccttcgtcaacgtgatcgcggtgtaattgaaaagtgatcctctcttcagagatgt

SEQ ID NO: 161859 - DNA, 88 bp, Homo sapiens
gcagtcacttgtacagcgccggtcaacatcgcggtcatcaagtacttgaagatagtgatccggggagacaggaacacgggcaagacag

SEQ ID NO: 161860 - DNA, 90 bp, Homo sapiens
aaccagcctgcacgcgctggctccgggtgacagccgcgcgcctcggccagttaaactccattgatgatgcacagttgacaagaattgccc

SEQ ID NO: 161861 - DNA, 83 bp, Homo sapiens
acaagctcctgcgggccggcgggggtttccaggcctgaggtgcccgccctggccccaggagaatgaaccagccgcagaggatg

SEQ ID NO: 161862 - DNA, 75 bp, Homo sapiens
gtggactccttcggcagtccacccaccgccgccgcctcccagctgcatcttcctcccgtgaggctggccgagctc

SEQ ID NO: 161863 - DNA, 100 bp, Homo sapiens
ctacgacccggagcacccgacccctgagccctggagatgtacaaggatgattggaacaaagtgtcggaacatgttggaagtcgtactcaggatgaatgca

SEQ ID NO: 161864 - DNA, 50 bp, Homo sapiens
ctgcaacctcagccttccacatttggtccatgactccagctcaggctgac

SEQ ID NO: 161865 - DNA, 75 bp, Homo sapiens
gcactggctcagagccttcaagagcaacctgtgcctactacactggcacaagtggatagagaaaagatctatcag

SEQ ID NO: 161866 - DNA, 75 bp, Homo sapiens
cgaggaggcgctcatcatcccccccgacgccgtcgcggtggactgcaaggttcttgcatacactgagggacttca

SEQ ID NO: 161867 - DNA, 75 bp, Homo sapiens
gccatgcaaaggcaggggaggaagccacctcgagatcatggagctttgtggtgcaacaagacttggttattttgg

SEQ ID NO: 161868 - DNA, 82 bp, Homo sapiens
gaagaaattgccttttacagaggacataagctagagaccgttggatggcagcttaaccttcagatggctcactctgctcaag

SEQ ID NO: 161869 - DNA, 75 bp, Homo sapiens
aaagtgttgagtaaacagaccaagttggcccaagaagatgaaaggattgttcttgttgacaacaaatgtaagtgt

SEQ ID NO: 161870 - DNA, 101 bp, Homo sapiens
caatcggaaactcatggaatatcctgcagaagaaaatggatttcgttatatcccctttagaatatatcaggtgaaagatgtcatgaaggatgtcatgtcgg

SEQ ID NO: 161871 - DNA, 100 bp, Homo sapiens
cgagacggcccggctgcagcgagcgctggacggagaggaaagcggttaatcatgttatcagccctctgttggatatctactttcctgaaggatctggtgt

SEQ ID NO: 161872 - DNA, 90 bp, Homo sapiens
gaagcaagcagttcagaagagccaaggaataaacatgcaatgaacccaaaagggaggagatatttcatcaaatactccagactatgcctg

SEQ ID NO: 161873 - DNA, 90 bp, Homo sapiens
gtccacctccaccagacggtccaggtactgggcctaatcgctacgtgcctctttggctatgatgcctatgtcaccttccccgttcggcag

SEQ ID NO: 161874 - DNA, 100 bp, Homo sapiens
aggggaagaaaagaaggggaagaagatcaaaacccaccatgccccaggcttcctgctgtgaagacagggtgcactgctgtccgcacggtgccttctgcga

SEQ ID NO: 161875 - DNA, 74 bp, Homo sapiens
aaatggcggagtatctggcctccatcttcggcaccgagaaagacaaacgatcatccctcgttctgacctgaatg

SEQ ID NO: 161876 - DNA, 100 bp, Homo sapiens
ctacaagatttgtaagaaacaaatttatttccaaggtctgagctctttctactcggagctgatgaaaggactgggtgcaggggggcgcctctgggagctc

SEQ ID NO: 161877 - DNA, 100 bp, Homo sapiens
aaggattccaagtaactcttatttgtgtatgtggtagaagaccaaagaagagatgagctaggaccatccacctgcctcacagcctgctggacggctctct

SEQ ID NO: 161878 - DNA, 90 bp, Homo sapiens
cagaaggaaaccaaagcaattgatgacaccgcatcccatactaaaagtgactttttgaatgagtatgaaaaaggaaggactcccaatcct

SEQ ID NO: 161879 - DNA, 98 bp, Homo sapiens
cctgggaccagtgtgaatttggaagggatcgtgtggcatgaaacagaagaagctgacattatctctacggtagaattcaaccacacgggagaattact

SEQ ID NO: 161880 - DNA, 100 bp, Homo sapiens
ctgacagaccctattgagcgaggactgcgagtttttgatacaaccaagtcggatgggcagtttaagaagacagccagtaacagcaagctgaggacctacc

SEQ ID NO: 161881 - DNA, 75 bp, Homo sapiens
gtctttccagataaaggatattcatttgttcgatatgtgttgagacggattctccgccgagctgtccgatacgcc

SEQ ID NO: 161882 - DNA, 100 bp, Homo sapiens
tgggggaaccactatgatcactaatcttccagtaccaacaattgcagcaatagatggactcgctttaggtggtggtcttgaactggctttagcctgtgat

SEQ ID NO: 161883 - DNA, 75 bp, Homo sapiens
tcatccacaaagacctggctgccaggaactgtgtacctagaggatcaagacataatgggagcatttttagacaag

SEQ ID NO: 161884 - DNA, 88 bp, Homo sapiens
tcaccgagggcatttacggcagatttctcactatgtgcaatagacactttggcagtgttgtggcacaaaccattcggactcaaaaaac

SEQ ID NO: 161885 - DNA, 99 bp, Homo sapiens
ttacgggctcaacatgccatgttaggacattatgtaaattgtgaggattcttatgtggctagtttgcagatatttgaagatgttcaccttgagaaccaa

SEQ ID NO: 161886 - DNA, 74 bp, Homo sapiens
ctgaccacagtgctcaccacccaccaccactggttcttctgtgtggcagttcagaatgatggatcaagctagat

SEQ ID NO: 161887 - DNA, 96 bp, Homo sapiens
ggaggtggatctgaagaacggtttaaaattggtggtgaatggtggacatggatcgattataaccgcttccaggagctcatccaggaatatgaagat

SEQ ID NO: 161888 - DNA, 90 bp, Homo sapiens
caacaactcccctcggacctcagtatgggctggaacctgacacttggcatgacagtgaatggagatttacagacagtcatctgggtggag

SEQ ID NO: 161889 - DNA, 82 bp, Homo sapiens
tgctactgaatggagcccgccatctgggttataccctttgtaaacaaataggttttgcactgattgcaaaaataaagtcctc

SEQ ID NO: 161890 - DNA, 90 bp, Homo sapiens
ctgggggcaggtgggcccggtgacagagcttacaagaccctatgaaaaaattagttgagaaagaagagaagaagaaaatcaaccagcagg

SEQ ID NO: 161891 - DNA, 100 bp, Homo sapiens
acgcgggctctgaggatgagctggaggagggggaagcaagaggctactatgagcagactggagttggacctctgcccgttgtgctgttcaatggaatgcc

SEQ ID NO: 161892 - DNA, 107 bp, Homo sapiens
gaggaggggaatttccttgtgcctccattcccgggaggggggagcggcgttggaggccaccgtttccagaaccaccgggaggaactgggccattctaacacccgttg

SEQ ID NO: 161893 - DNA, 90 bp, Homo sapiens
tcgtacacgaagttgctggaagaaaatgagacagaagcagtgaccgtgcccacgccaagggtgtccgcaatgttgccagtgtctgtctgc

SEQ ID NO: 161894 - DNA, 105 bp, Homo sapiens
gcgttgctcttgcttttcctcgctggggtgtacggtgcagctaaatcaagtccagcagctaaaccaggatccacaccttctcgaccctcatcagccaaaagggct

SEQ ID NO: 161895 - DNA, 95 bp, Homo sapiens
aggagctccagatgacaacggtgctgaagcagaacgtacatgtgtttggaggtccagcagtggttccacctcagtattacggcgttccatggggg

SEQ ID NO: 161896 - DNA, 83 bp, Homo sapiens
aaatgctgctgatgaaatttccagatttcaagaaagagaattgaatgatctggcacgggaccctccagcacagtgttcagcag

SEQ ID NO: 161897 - DNA, 75 bp, Homo sapiens
gtagaaacaccaacaggatacattgaaaggtgccaagactggctagaggccctgcactggtacaacactgccctg

SEQ ID NO: 161898 - DNA, 100 bp, Homo sapiens
ccgaggcagaggaacagggaagatggcggctgtggtggagaatgtagtgaagctgtcttgggcgtctttggtactggcttttttaggggtctgcctgggg

SEQ ID NO: 161899 - DNA, 80 bp, Homo sapiens
tggcaacgcattcaagaaagccgacccccaagacaatgcagatcttcgtgaagactctgactggtaagaccatcaccctc

SEQ ID NO: 161900 - DNA, 100 bp, Homo sapiens
cgagactctccttgcttggaattctgcccactctgcggagttagcagtcacgacctccagcacaggtcaaaatgcagatcttcgtgaaaacccttaccgg

SEQ ID NO: 161901 - DNA, 51 bp, Homo sapiens
gcccatcctggggttgggtacctggaaggtcgcacggggcaggcggttgca

SEQ ID NO: 161902 - DNA, 51 bp, Homo sapiens
caggactccaaaatggcgtcagttgatacactgcctctaggactgggacag

SEQ ID NO: 161903 - DNA, 90 bp, Homo sapiens
gggccatggccttcgtcgggggtttggtgggcggcccaccgggactcgccgttgatgcctgctctgtgcctgtatctgagatcatcgccg

SEQ ID NO: 161904 - DNA, 100 bp, Homo sapiens
agtggctggcggtgcctggacgtacaaactatcaagaaatccaagtggtaatgggcgaagtttattcagcatccggcaatggacttatcgtagttgggga

SEQ ID NO: 161905 - DNA, 100 bp, Homo sapiens
tggacattctaactcgcctgccagagagtgtggaaagactcacaggcgtgagcatctcccagaaactgcttggaaactccctgctgaaactggaaggtga

SEQ ID NO: 161906 - DNA, 90 bp, Homo sapiens
gaggaagaggaagaggaggatgacccacttggtttcacagatggcagtgttacattgaacaaaggagacatcacccgggaccggcatagc

SEQ ID NO: 161907 - DNA, 74 bp, Homo sapiens
gaatgaccaagtggttgtcaaaataactggtcacttctatgcttgccagacgtgaacttatgaattcaacaggt

SEQ ID NO: 161908 - DNA, 103 bp, Homo sapiens
cgtagggagccgtgggcgctcggtgcccgggccgggcagcaacatggccaacgccctggccagcgccacttgcgagcgctgcaagggcggctttgcgcccgct

SEQ ID NO: 161909 - DNA, 75 bp, Homo sapiens
ctatcagcaggctccgggctgaagattgcttctcttctctcctccaagccaagctctactccaggaagtgaaaat

SEQ ID NO: 161910 - DNA, 100 bp, Homo sapiens
agcaaatctccttggatttcctccagagttcggcttctccagggaaagtgaccgaggcagtgaaagaggccattgacgcagggtaccggcacttcgactg

SEQ ID NO: 161911 - DNA, 88 bp, Homo sapiens
cagtttcattttgtactcaatcagtctccaaataatattccagcccttcttgaacctgagccagcagaagagtacactgagcaaagtg

SEQ ID NO: 161912 - DNA, 100 bp, Homo sapiens
gatgctgtgggacctattgttcagttacaagagaaactttatgtgcctgtaaaagaatacccagatcctcaaaataaattcgctgctctggacaatgaag

SEQ ID NO: 161913 - DNA, 100 bp, Homo sapiens
cacgggtggttcgtcatgattgcaactgggtgggtcaaagattatggattggatatgtctacttctggatgcaaattttactgttgttgtaatgatgcca

SEQ ID NO: 161914 - DNA, 96 bp, Homo sapiens
tggtggaggagttaacgacgctttcaaagatgcactgcagagagcccggcagctgtatgcaggagctattcttgaagtttgtggatgaaaattggg

SEQ ID NO: 161915 - DNA, 74 bp, Homo sapiens
cgagtttcagaatttacaccggaaactcagtgagtttatgtaataagaacgggcaaacagctgaagatctcgct

SEQ ID NO: 161916 - DNA, 100 bp, Homo sapiens
gccatggaggcttcattctggacgaggctgattgacagaggtgaggacgttccaagtgaggaggaggaggaggaagaaaacgggtttgaagacagaaaag

SEQ ID NO: 161917 - DNA, 90 bp, Homo sapiens
tgggctgtagtgaggaaggacctgctgatgaatattacatcatataccgaaatgtttttgataaggaagcaagatttccagatgtagcaa

SEQ ID NO: 161918 - DNA, 82 bp, Homo sapiens
cagagcccggggacggcgaggccctcatgtaccacacgcactccctcaacatcctgggccagaaggtgtcgatgcactacag

SEQ ID NO: 161919 - DNA, 75 bp, Homo sapiens
tgatgcttttgctacgacctcattttctgctggaactgggaaatgaggcaagttatcctttggaaatgtgctcac

SEQ ID NO: 161920 - DNA, 80 bp, Homo sapiens
tgagggaaaggagcgggactccggacctccaggaggtgctggagaatctggtaaaagcaccattgtgaagcagatgagga

SEQ ID NO: 161921 - DNA, 75 bp, Homo sapiens
gagaccgtgaccgagagcgtgaccgagagcgcgaatatcgtcatcgttagaagcaaaacagtttctcatggagtt

SEQ ID NO: 161922 - DNA, 89 bp, Homo sapiens
acaagtgcgaatgttaaatcagctggagaaggagaagtggagaagaaatcagtcagccgcaggaaacgttttgatggtaaattacaatc

SEQ ID NO: 161923 - DNA, 50 bp, Homo sapiens
caaacccaaaactttcctcctgaaggaaagggcactggtgtcctgcagga

SEQ ID NO: 161924 - DNA, 100 bp, Homo sapiens
gtaatgttattgaagctgtttatagtagactgaatccacatagagaaagtgatgggataaatggtactgtgacagaaaatatgtcattgacagatgcaaa

SEQ ID NO: 161925 - DNA, 101 bp, Homo sapiens
agttatcaatatcatgggcattggcgtggacaccattgacatggtgatggctgctcagcctcgaagggaagaggacccagatgatgtgccccatggacata

SEQ ID NO: 161926 - DNA, 75 bp, Homo sapiens
cttgggcatagccttttccacaggaatatgagagcctggagcaagaaaacaccatgctgcggagagagatcggga

SEQ ID NO: 161927 - DNA, 100 bp, Homo sapiens
cacgctttgttgcttctaaacctctggaggaggaggttctcctgcgctgcccaacagcatggtgtattttggaagctctcaggatgaggaggaagtcgag

SEQ ID NO: 161928 - DNA, 100 bp, Homo sapiens
ccggcccacagtgggggtgtgcaaacccgagagaactggatccagaatataagaagtttttagaaacctactgtgtggaggaagagaagaccagtgccaa

SEQ ID NO: 161929 - DNA, 100 bp, Homo sapiens
agctgtctttctcttgatgatcttgccaaaaggatagagattgcagaggtgattgaacaagaaaagcttgaagctcaagattcaggagaagaggctagga

SEQ ID NO: 161930 - DNA, 90 bp, Homo sapiens
gtggttcctgctgccctcaaggtcgtgcgtctgaagcctacaagaaagggtctttttggagttcctgagctgagtgccccagaaggattt

SEQ ID NO: 161931 - DNA, 75 bp, Homo sapiens
tgacatctgcctgagagatctccaagaattacagatgatgattattctccaccgtctaagagaccaaaggccaat

SEQ ID NO: 161932 - DNA, 88 bp, Homo sapiens
gaaggcgcgagtgaggaaaggaggtactgtagattaagatgttctacgaggagcatttgcacttggacgatgagatccgctacatcct

SEQ ID NO: 161933 - DNA, 82 bp, Homo sapiens
gaggaccggccaacaggatcgctcaggatggacgtcttctactcaagagccttcacgtaaatgggtccagtcatgcctccca

SEQ ID NO: 161934 - DNA, 90 bp, Homo sapiens
gcagaaattccagtgactagtaatggagaagttgatgactctcgtgaacatagctttaatagggattacttccttaggatagattgccag

SEQ ID NO: 161935 - DNA, 90 bp, Homo sapiens
tcggaaggcgcgggcaggagcctggcgaggatgcaccttcccctgccttggaaagcaacagccaactcagtttataaatccagaaacacc

SEQ ID NO: 161936 - DNA, 75 bp, Homo sapiens
agtttggatgtggaggggaatagactccatctatccatatgagaacattaaccaggtggtatttgttggaaattt

SEQ ID NO: 161937 - DNA, 82 bp, Homo sapiens
cacgctgctggtggcccgggtcttccagaaggctgtagaccagagtatcgagaagacaatgcagatcttcgtgaagactctg

SEQ ID NO: 161938 - DNA, 90 bp, Homo sapiens
cgggtggtacctgggctggggcgactgtgtctggctgccttatctttacacgctgcagaggctgacccgcggctgattgagtccctctcc

SEQ ID NO: 161939 - DNA, 98 bp, Homo sapiens
actcttcctgctggagcaccaggcagatataaatgtcagaataatgcaggatcaaagtgaaggtaacagcctgcagaatcaagctctgcagacttttc

SEQ ID NO: 161940 - DNA, 97 bp, Homo sapiens
gcctgtgaccccagcgtgggtgaagataggatcaagatggccatgtggcagggtttagatcctgataagcatcttgggaaaaccctggatcaaatgg

SEQ ID NO: 161941 - DNA, 104 bp, Homo sapiens
ccatggagaccctcacggagctgggcgacgagctgaccctgggagacatcgacgggtgcagcccggaatcccgaggatgtggaccgggagcggcgagaacacga

SEQ ID NO: 161942 - DNA, 75 bp, Homo sapiens
cgagagcgtggagcgggctgggccagtgagaacaatctccaggaagatctcttcgaccagatcttggctgggaag

SEQ ID NO: 161943 - DNA, 82 bp, Homo sapiens
cccctcggacggccacgagactcgggaggcaaaaccttcaactgaggacttgggggataagaaggaaggtgaatatattaaa

SEQ ID NO: 161944 - DNA, 50 bp, Homo sapiens
aggtaccaccttatccacagccacagcttgtatcacggactgattcaccg

SEQ ID NO: 161945 - DNA, 97 bp, Homo sapiens
tctaataactcggtgtcaaagccaagacataaactcaaccccttctcttccaaaaggagctcttgtccctggcaaagcgaaagcgcagtgactctga

SEQ ID NO: 161946 - DNA, 75 bp, Homo sapiens
tctttgtgaagggagacttggattcactgatgatgggcagtggcagaacaagttgaaatcatcgcagaaggataa

SEQ ID NO: 161947 - DNA, 98 bp, Homo sapiens
aagcacaaggattctcgctgtgacagagacaacaccgagtatgagaagtacaggagtctaaagcactttaattatgacatctgccaaagctgcttttt

SEQ ID NO: 161948 - DNA, 75 bp, Homo sapiens
accacaattcactatgatagaattacttctctacaggctgttcggctcttgaatcccagcgatgaaaccaggaac

SEQ ID NO: 161949 - DNA, 83 bp, Homo sapiens
aagaaaagtggtagtccttttcacagtgcctgacggaaaatcatcagcgtgttagcattttctttgactatgcaagatgtagc

SEQ ID NO: 161950 - DNA, 101 bp, Homo sapiens
tcgcctagtaaacggggctgctggtgggccgcgtcgaagacatggaccagggctacggaggcagttgtgaaaaacttcaggacaaaaatgtttcatttaag

SEQ ID NO: 161951 - DNA, 100 bp, Homo sapiens
gtttgttatggccgctgctgtcgctatggagacagggcacactacaaagagtatcttgtgagcctcatcaatgcccactcgctggacccagccaccttgt

SEQ ID NO: 161952 - DNA, 78 bp, Homo sapiens
actctgcaagtttccagaagtaagagggaaaatgaccacgttcaagtggtccatgctgtggacggcaccgccgagaac

SEQ ID NO: 161953 - DNA, 75 bp, Homo sapiens
ctgtctccacaaagtgtgaccacatattttgcaagaaacccctcctggagtttccccaaagccatggacagccct

SEQ ID NO: 161954 - DNA, 71 bp, Homo sapiens
accctcgtgtctgccaccatcttcgacttgagcgaagttttatgcaaggactgagcagggggaggaacatt

SEQ ID NO: 161955 - DNA, 82 bp, Homo sapiens
ggtgtgtcaaaaggcaaagtgtgttttgagatgaaggagatctataaggacaggcagaaattctcagaacaggttttcaaag

SEQ ID NO: 161956 - DNA, 154 bp, Homo sapiens
cggctgcgctcggcggaagacgcggcagccctgcgagaggcagcagcggagacgcggtgctcctcgggcgccaagcgtcatttgatccttcaaaaatcacaaggaagaaaagtgttataacttattctccaacaactggaacttgtcaaatgag

SEQ ID NO: 161957 - DNA, 100 bp, Homo sapiens
ctcactctgagtacggtctcacagacaacgttgagatctcagtggttcaatagcatccccagatgtcaaattaaatcttggtggagattttatcaaagaa

SEQ ID NO: 161958 - DNA, 90 bp, Homo sapiens
gatagccaattgcagtttgaggctgttaatgttcgtgaagaaattgaagagttttttccaagaatgtggaagataaatcaagataaaaga

SEQ ID NO: 161959 - DNA, 51 bp, Homo sapiens
catttttgccctcaaaagaaatggcagaatgtgaaagatgttgcagaagtg

SEQ ID NO: 161960 - DNA, 71 bp, Homo sapiens
tacctggatggaggatgctgacagtgggactcggaacaggaggtgatactgaccaccaagacccctaaggc

SEQ ID NO: 161961 - DNA, 75 bp, Homo sapiens
tccagccgaaggagaaggggggtggaacggcacatgtgtgatggggacattgttatcttcaaccggcagccaact

SEQ ID NO: 161962 - DNA, 50 bp, Homo sapiens
gccatccactgactcgtaaagaaaagtgccatcagtactggcccgaccaa

SEQ ID NO: 161963 - DNA, 75 bp, Homo sapiens
tggcattttttgatgattgtgtagataaactcaatgtcaattgctgcaagcttagtgagtgaagatacaaagacc

SEQ ID NO: 161964 - DNA, 82 bp, Homo sapiens
tgctcagcaggagcttcatcaacgatatatgtcagatctaaagaacatcgatatattgaactcttcttgaattctactcctg

SEQ ID NO: 161965 - DNA, 83 bp, Homo sapiens
ggcaagatccagatcgggatttacgtggagatcaagcgcagcgatgggcgtctctggccgagcctctttttgtggaaaacgac

SEQ ID NO: 161966 - DNA, 50 bp, Homo sapiens
cccagatatagccgttggtacaaagggagaagaaatgggtgaccgttggt

SEQ ID NO: 161967 - DNA, 80 bp, Homo sapiens
tctcttggatttggctacacacttatagatcttctgcactgtttacaggcacagatcgtcagtatttaaacagatcacat

SEQ ID NO: 161968 - DNA, 75 bp, Homo sapiens
cccaagtcgacgccgcaacccggggaaagcagagctccacgcaggagatcggtgaggagctgatcaacggagtca

SEQ ID NO: 161969 - DNA, 104 bp, Homo sapiens
cccagaccctggagcctcagttggaagcagccgatccagcctgcggagcctgtggggcagcacctgtggaatcctctcaagaggaacagtcattgtgtgaaggt

SEQ ID NO: 161970 - DNA, 75 bp, Homo sapiens
agtctcgttgctgcctctgtgtacgctgaggggggaggagctgtgactgatgagaattaaaggccatggatgaag

SEQ ID NO: 161971 - DNA, 96 bp, Homo sapiens
ggcgctggctgtggtcggtgctggcggcggcgcttgggctctccaaacatcatgtcaatggcaacagaacagtcgaacctttcccagagggaacac

SEQ ID NO: 161972 - DNA, 143 bp, Homo sapiens
gaccatggtggtggcgctgctcatcgtttgcgacgttccctcagcctctgcccaaagaaagaaggaggtgaggggaagtggcttcgaaacattgactattaccgtttagatggttccactactgcacagtcaaggaagaagtg

SEQ ID NO: 161973 - DNA, 100 bp, Homo sapiens
gcaagtcccccccggagaaaaagttgaagcgttatgttagcactctacgtatatgaatatctgctccatgtaggagctcagaaatcagctcaaacatttt

SEQ ID NO: 161974 - DNA, 89 bp, Homo sapiens
cggggacccgctgatcttccagctcccctcacccaacgtcgtactctgatgccagtatggactggagatgatgggagccagttggatag

SEQ ID NO: 161975 - DNA, 75 bp, Homo sapiens
cagccttgcgctgctctaatggtccggacttccgtgtttgggccatatggtgctcttcccagtctggttcctgta

SEQ ID NO: 161976 - DNA, 100 bp, Homo sapiens
caagcagctccttccagcacgagatgtcccaagaaggcttcagcacagccctcacaatgagcgtcacggggttcggacgtcagatgatcgagaaaaccaa

SEQ ID NO: 161977 - DNA, 100 bp, Homo sapiens
ggaaagtgaggcagctgcaaggagggcggcgggactgcactcgagtgtccagacctgctcgatgggccaattcctgtccccccagcagcatggcatcgtg

SEQ ID NO: 161978 - DNA, 50 bp, Homo sapiens
ctgcaatgtggaaaacttgcagagtgggaagatgccagaagtggactatg

SEQ ID NO: 161979 - DNA, 101 bp, Homo sapiens
ccgccgagctggacccggaccggttttggaggtacagccccgtggtggaggccggctcggacatggtcttccggtggaccatcaacgacaagcagtccctg

SEQ ID NO: 161980 - DNA, 88 bp, Homo sapiens
gccggccgcaccaccgccctctggccgttgcctcaccgggttgaaatcacaaagattagacacctttttagataggtgttcttcagca

SEQ ID NO: 161981 - DNA, 90 bp, Homo sapiens
actccattacgtcaggcctggacaaccatggagaagatgaagactcttaagatgacagaaggtgatttttctggtgatcgaggacttccg

SEQ ID NO: 161982 - DNA, 75 bp, Homo sapiens
ctctgaaggtgtccacactgtggaccaggtgttgagtgagttgatattcactgatggactccaaagaatcattaa

SEQ ID NO: 161983 - DNA, 100 bp, Homo sapiens
cgaggaggaagatgaaggcaactgaatcccaagaggcacctgcagccaggaaggaaagcctctctacatatgacatcgtgatcactacctatagcctcgt

SEQ ID NO: 161984 - DNA, 82 bp, Homo sapiens
tgcgctgtgatgcctgcagagctgtggcttaccagcactttcatttggacccgtggatacccattgaacagatgcttgaaac

SEQ ID NO: 161985 - DNA, 75 bp, Homo sapiens
gaagattcttacctctttgatctcgacaataagaaaaagcttgtggtgaaggggggcaaaaaaaagaagcaagtt

SEQ ID NO: 161986 - DNA, 100 bp, Homo sapiens
cgctcttgccttctccacacttgtttgaggcctttgaaattgttgttcgccatgccaagaactacaccaatgccatgttcaagaacaactacccaagcct

SEQ ID NO: 161987 - DNA, 100 bp, Homo sapiens
cccagactggtctcaaactcctgagctcaagtgatccacccaccgtggcctcccaaagtgctgagattaaagggtgagcagggcagcatttccttctccc

SEQ ID NO: 161988 - DNA, 82 bp, Homo sapiens
tcaaaaatagtgatagctttgataagtagatgatgagctggagatcaaggcctactatgcaggccacgtgctgggggcagcc

SEQ ID NO: 161989 - DNA, 100 bp, Homo sapiens
ttcagctgagatcaactatggaataaggtttactcagagtctgatcactgcgcatgagcagttcaaggccacgctgcccgaggcggacggagagcggcag

SEQ ID NO: 161990 - DNA, 75 bp, Homo sapiens
ggggctggacgacagcagcaggaggcgtgctcccatctccgatgaaggatttgggggcagagcacttggcaggtc

SEQ ID NO: 161991 - DNA, 100 bp, Homo sapiens
gggagatcagcatttgcatggaacacatgggttatgtggtccgaatcagtggtgggaacgacaaacaaggtttccccatgaagcagggtgtcttgaccca

SEQ ID NO: 161992 - DNA, 89 bp, Homo sapiens
agaccatctacatctcccacaggaagtgtcacacagcagtcaagtatgtcccaaacgtctaaaggacctaagtgtgaaataccccgaag

SEQ ID NO: 161993 - DNA, 88 bp, Homo sapiens
acaccaagatctgtgctgaccacaggaattggatctactagtgcaggtgaccaagaatatggcccaggtgaccaaagccctggacaag

SEQ ID NO: 161994 - DNA, 71 bp, Homo sapiens
ctactgacgaagcttggaagttgcagaaggtttggctccagcagctgctgttgccaccaccactagttcaa

SEQ ID NO: 161995 - DNA, 100 bp, Homo sapiens
gcagttgcaaaatattcaggagaccgtcgttgccttgtatttccagagaacagtttgaaggatgacctctaggaagaaagtgttgctgaaggttatcatc

SEQ ID NO: 161996 - DNA, 138 bp, Homo sapiens
cttttttgctctccctcgagaagctccagatggcgtcttccgtgggcaacgtggccgacagcacagaacttggagcgtgatgcccagaagtgtgtgaactggtctgtgaccacaaagatgagaaccgcatgctgagat

SEQ ID NO: 161997 - DNA, 75 bp, Homo sapiens
cccatctcctgcctcctaatagctttgaggtctccagcttgtacctcatatcagatgactccgcaagggcacagg

SEQ ID NO: 161998 - DNA, 100 bp, Homo sapiens
aggtcaacaaggacaacaatgagatcgtggacaagatcatgggcaaaggacagatccagatgaggagcgggaaggcctcctgcaccctggagaccgtgtg

SEQ ID NO: 161999 - DNA, 74 bp, Homo sapiens
gcactgccagtgatgaccgctgctggaacgggatggccagaggccggtcacaccgacaaatctgaagcgggttt

SEQ ID NO: 162000 - DNA, 87 bp, Homo sapiens
gggactttcttcgttgccatgaggaaagaattctccgaggttgtctgcattcaaaagagcattctattaaagctaccttaatttggc

SEQ ID NO: 162001 - DNA, 80 bp, Homo sapiens
agaactcttaacggccgatgcagctcttccaaagctaaggtcagcccaaggccaaccccactgtcactctgttcccgccc

SEQ ID NO: 162002 - DNA, 100 bp, Homo sapiens
tgggcgaggacatgcacaccatcggctttggcatctatgaggtggcccgtgatgtagccgtggtggccggagggctaggtcgccagctgctacaaaaaca

SEQ ID NO: 162003 - DNA, 101 bp, Homo sapiens
cctcgctttgcgtgaccgcggcagggatcgtgaccagatgcccgctggtgctgaaactgaagaaacttgtgaacgaagataagtggagaggcaaggtcagt

SEQ ID NO: 162004 - DNA, 75 bp, Homo sapiens
gtggacatcaagccggataagtgtccccgtagagtcaaccgtgtgtactgtaagcacggtcacctgtgtcccatc

SEQ ID NO: 162005 - DNA, 74 bp, Homo sapiens
caaaagagtctcaaggatccttcaaataacttcagggttggcaacaatgagtaaaccagaattaaaggaagaca

SEQ ID NO: 162006 - DNA, 98 bp, Homo sapiens
ttccctggcaagattcttctgaattgtgctgccttggccaaaagaggccggctgcctaccctccagactgtccgctatggctccaaggctgttacccg

SEQ ID NO: 162007 - DNA, 100 bp, Homo sapiens
ccgagaatacaccatcaacattcacaagcgcatccatggagtagttggaatggaaactgtctgaatctggagcaattatgacagacctggaggaaaaccc

SEQ ID NO: 162008 - DNA, 97 bp, Homo sapiens
ggctttttggctgccgagcaggacatccgagaggcagtcgatgatgtgaagaaaggttacatcaaagcagaagaaaagtcctatcaattacagaagc

SEQ ID NO: 162009 - DNA, 100 bp, Homo sapiens
ctcccgctatgccagcccggagatgtgcttcgtgtttagcgacagggcagatgattctggaccagatgaagcctgaggagccttccagctctaagatagc

SEQ ID NO: 162010 - DNA, 75 bp, Homo sapiens
tcagacagaccaccccgcacaagcgatcgtcttctgatcaaaggaggtaaaattgttaatgatgaccagtcgttc

SEQ ID NO: 162011 - DNA, 101 bp, Homo sapiens
agatgactgctctgagctttggctttggaatgtacaattatttggcaacatctggttatccatggccagcctggtcatctttatgcagctgcgttacctgt

SEQ ID NO: 162012 - DNA, 98 bp, Homo sapiens
ggcagtggccacatactttctcagaaaccttcacatcttggtcaagggtgccattattatccatgaagtttatgaagaaggagcagcatgtaaagatg

SEQ ID NO: 162013 - DNA, 85 bp, Homo sapiens
gctctcgcaggcccccccgcgccgaccgcgttcctatggacagacgcacagacacctgcaggatcaccattaacaaggacaccaa

SEQ ID NO: 162014 - DNA, 100 bp, Homo sapiens
cagcgagccgccgacccgccgagcaaaatgtgagaacaatctccaggaagatctcttcgaccagatcttggctgggaagctggagtttccggccccctac

SEQ ID NO: 162015 - DNA, 83 bp, Homo sapiens
gcgcgggcgccccgagcccggctccgcgcgcctggcggctacatggagagtgtcagacaatgcagatcttcgtgaagactctg

SEQ ID NO: 162016 - DNA, 50 bp, Homo sapiens
cttctcagtgtcaacagccagcagaactttatgaaaactttatcagtgaa

SEQ ID NO: 162017 - DNA, 98 bp, Homo sapiens
ttacaagcagagagacagctctatagcagtctggtgaagttccatgcccatccagagaggatcttagtgcaacattgctctgcaaacttggaccaggg

SEQ ID NO: 162018 - DNA, 100 bp, Homo sapiens
ctgacctcgctgtacgccgagcacccaggcgactgcctcatcttcaagctcatggctgacgccgtggccaccttcctgcagctggctgaccagtgtctga

SEQ ID NO: 162019 - DNA, 76 bp, Homo sapiens
gctggttatgaaagacagtgcacataagcttaaatcgtctcagaaggacaaggtccgccagtttatggcgtgcact

SEQ ID NO: 162020 - DNA, 74 bp, Homo sapiens
ccgccgccgcagcgcgaacatggacgccgtcaacgccttcaaccaggagataccagcagtttggaatcttacct

SEQ ID NO: 162021 - DNA, 100 bp, Homo sapiens
ggagcaagtggtttttaaatatcttcgagctgaacctgaggaccattattttttaatggaagatgagaatgtgcctactgctcctgatcctccaagtcaa

SEQ ID NO: 162022 - DNA, 98 bp, Homo sapiens
cccgcgtccgccgattcctcctccttggtcgccgcgtccttggctggcgtccagaggtgttcctggggagatggcggaacagcacggagcacccgaac

SEQ ID NO: 162023 - DNA, 75 bp, Homo sapiens
atatcaggagttaatggaacacaaactcatcactgctatatatgcagattatgcccggagtttgaagaacctcgg

SEQ ID NO: 162024 - DNA, 83 bp, Homo sapiens
cgctggaaaaagtgaatttcgtaaccagaagccgaagccggagaaccaaggaaactctgatgaggaagaaagtgcttcagaat

SEQ ID NO: 162025 - DNA, 75 bp, Homo sapiens
cggaccttttaccatgaatagttctactccttctacagatctacgcagaccccaccaagaggctggagctgtact

SEQ ID NO: 162026 - DNA, 51 bp, Homo sapiens
caatggggaaagcttacagactgtgtggtggaagattgctctgctgtgaat

SEQ ID NO: 162027 - DNA, 101 bp, Homo sapiens
cagacattgctctgtgaaatcaaaaggccccttcacagatgtagtcactacaaatcttaaattgcgaaatccatcggatagaaaagtgtgtttcaaagtga

SEQ ID NO: 162028 - DNA, 73 bp, Homo sapiens
gtcctcccatactggacccctacagtcatgatgctatggactcctactacgactacatatgggatgttaccat

SEQ ID NO: 162029 - DNA, 75 bp, Homo sapiens
acttgtgcagcaaagtggcccaaatccatggcattctgcaagctttcttcctggtggcagatgacatcatggatt

SEQ ID NO: 162030 - DNA, 90 bp, Homo sapiens
ccataatcatagaggcaagtgggggaggagcgttccttgtcctccctctgcacaaggagatcatgaatcagacagataaaaatcaacaag

SEQ ID NO: 162031 - DNA, 100 bp, Homo sapiens
gcccgcccgggtcgccgcgccacagccgctgcggatcatggtgctggagaatctggtaaaagcaccattgtgaagcagatgaggatcctgcatgttaatg

SEQ ID NO: 162032 - DNA, 74 bp, Homo sapiens
cctcggcctcccaaagagctgggattacagagtgcccttagaaagagataactcagaagaatttttaaaacggg

SEQ ID NO: 162033 - DNA, 75 bp, Homo sapiens
tgctccggttcctgggctcctaattcttggtccagcttcttccaggtacaagaactcggataatgataaagtcca

SEQ ID NO: 162034 - DNA, 74 bp, Homo sapiens
gcatgtctgcaacccagccattttcagaaactatccaactctggccaatattgaaaggaagaagaagttaaaac

SEQ ID NO: 162035 - DNA, 75 bp, Homo sapiens
atcagatgcctcgcagagcaccaggcccaccgtgaaaggtgcgtataacccgtatatagagataattgaacaacc

SEQ ID NO: 162036 - DNA, 83 bp, Homo sapiens
ggaggagctccccagctggtggctggagcgaccccttgttctttggtggcgctgattataccgaaaagaagttctagagaaat

SEQ ID NO: 162037 - DNA, 78 bp, Homo sapiens
ggcattcggggaatctgcagggcaggatgaaatctttgacatggtaaaaccaaaggatcctttgaaaatctctcttca

SEQ ID NO: 162038 - DNA, 100 bp, Homo sapiens
gaagctgctggagaatatgcagagcgacttgcgcgccttgtcactggagtgcaagaagaaattcccacctgtcaaagagatgagagtccctacactaaat

SEQ ID NO: 162039 - DNA, 75 bp, Homo sapiens
tgaccggagctcgggcgggtcctacagagacagttatgacagttacgcagggagagcaacaagccccggccctca

SEQ ID NO: 162040 - DNA, 76 bp, Homo sapiens
gccgcttgtgctgcagccatggaagtgtggcccccggctgtcagcagaggctgcagagaaactgaagaaccgctac

SEQ ID NO: 162041 - DNA, 101 bp, Homo sapiens
tcctgatgaatatctgttatccctcagggatttagagatactgttgttacttctgcatgttcattgcaaacagaaggttccttgagcacccggaaacggtc

SEQ ID NO: 162042 - DNA, 83 bp, Homo sapiens
ccctgtcagtagctcctcagattggtgctgcgagagatgtgcaagcagggataccgggatggcctgcgctttctgcagcggaa

SEQ ID NO: 162043 - DNA, 100 bp, Homo sapiens
gggctccagagacatggggtcgaccgactccaagctgaacttccggaaggcggtgatccagctcaccaccaagacgcagaactctcagaaattgagccca

SEQ ID NO: 162044 - DNA, 98 bp, Homo sapiens
cgaggtgccttctgtgaggcaaagattaagactgtgaaaaggctggtgaaagttaagacttcccaagtaagaagcggaagaggagccgctggaaccaa

SEQ ID NO: 162045 - DNA, 75 bp, Homo sapiens
gacctctatgccatgaacttcaatcccatcatttccagaaaggacatcacaggtcacagggattatggacccaga

SEQ ID NO: 162046 - DNA, 83 bp, Homo sapiens
agctcctgaacaagacatggaaggaaatgagggcaacttctgaagacttcaacaagatcgcaccccctccctccctggcggag

SEQ ID NO: 162047 - DNA, 98 bp, Homo sapiens
catcgaccctcgcacactctttgtcactgagtatgactatgaatatgatgaaaatggtgacagagtcgttttaggaaaaggcacttatgggatagtct

SEQ ID NO: 162048 - DNA, 98 bp, Homo sapiens
ggtggttgctgttgcttggcctggtgggcccagtcctcggtgcggcgcggccagcaaaagctggcaggctgacagaggcggcctcaggacggaccttc

SEQ ID NO: 162049 - DNA, 128 bp, Homo sapiens
tccggggcttgccctggtcttgctcggccgatgaagtgcagaggtttttttctgaacccgaaaacagtggccaaatgtcaggtaactcccagaagaaatgttctccaaaaacgcccagtgatagtgaa

SEQ ID NO: 162050 - DNA, 100 bp, Homo sapiens
gatggatgctggcatgattggaaaccaagttaatcgaaaagttctcaattttgaacaagctatcaaggtggtgtttactagtgatcctcataaaagttac

SEQ ID NO: 162051 - DNA, 111 bp, Homo sapiens
gagcgcgaacgagcgacggcggaacccgtgggcctgtggactgcagcctcggcggtcagcagcggggatctgatgagcttctttcttctggcatcattaacggacctttta

SEQ ID NO: 162052 - DNA, 100 bp, Homo sapiens
ccttgtccttgcattacatggaccaagaacacttcacaggactcagagagaaactactactgacttctaacatcatagttgggccagttttaataaatgg

SEQ ID NO: 162053 - DNA, 75 bp, Homo sapiens
gtcccggccatctcgctgcccgacgatgtccgcaggcggaggagttggcggggagccttgggcccctctggcctc

SEQ ID NO: 162054 - DNA, 50 bp, Homo sapiens
aaatgctcttcattgtgtaacaactacttctccaatttgggaaatacctg

SEQ ID NO: 162055 - DNA, 49 bp, Homo sapiens
cagttctgggggtcgtccgatcctgcagattttctctgtgggcagttct

SEQ ID NO: 162056 - DNA, 90 bp, Homo sapiens
gccctggtcccggagtcgccgctgggcctgtccgctggcgtcatgtgtagtgactatgacttggaatttggaactgagtgtttgcaattg

SEQ ID NO: 162057 - DNA, 74 bp, Homo sapiens
ttctattttagaaagcagttcggattttttatcaagcagaaatgcatcgaacaacgagaatcaagatcactgag

SEQ ID NO: 162058 - DNA, 95 bp, Homo sapiens
ggctccgcagcaagatggcggacgagaaggacagggaagactgtgccctgtccacggtgcctcctgcatgtcctgctgccctgagctgtcccgag

SEQ ID NO: 162059 - DNA, 76 bp, Homo sapiens
accatgaagacttgaacttaatacagcaagaaagaccatcaagtttaccaggctccttcagtggtagatgtcccct

SEQ ID NO: 162060 - DNA, 75 bp, Homo sapiens
ggagactcctgaccctcagaatgcatcagacaacagtcagcgctttcgagaaacctgttttgcatttgccttgac

SEQ ID NO: 162061 - DNA, 75 bp, Homo sapiens
gagacttggaacgcacagaggaacgagctgagctggcagagtcgctgacagcgtttgtcacaaaatgctttggcc

SEQ ID NO: 162062 - DNA, 51 bp, Homo sapiens
cgaatatcgtcatcgttagaaggagggagccatggatttgctgcgggagct

SEQ ID NO: 162063 - DNA, 82 bp, Homo sapiens
cagtggaaaatgcgctcgggctggaccagcagacacgcagcccaagaaggtccggaaggtcccgccgggtcttccatcctcg

SEQ ID NO: 162064 - DNA, 100 bp, Homo sapiens
accccaggactgcgcccccgggagcgggcgcccagagtatacctgaggtgcaccggaggtgaagtcggtgccacttctgccctggcccccaagatcggcc

SEQ ID NO: 162065 - DNA, 82 bp, Homo sapiens
tctaccgcaactctcagttcgagagtaaagggaaatcctcattgacgattcaatttgttgaaggccaatttgtggactccta

SEQ ID NO: 162066 - DNA, 98 bp, Homo sapiens
tcgggaacgtgcgtgatgacgcacgtgcgcgcgaagacgtggggacgcaggcgggtcgtagagagcggtgtacaactatgagcctttgacacagctca

SEQ ID NO: 162067 - DNA, 50 bp, Homo sapiens
caggcacagccgacgccgcggggccatctggctgctgtgcacaggcgctc

SEQ ID NO: 162068 - DNA, 83 bp, Homo sapiens
cgcggcggccgcgctcttcgcctgggaatacggggtgctttgcattcaggaatacagaaaaaacagcaaagtggagtcaagta

SEQ ID NO: 162069 - DNA, 102 bp, Homo sapiens
gccgccgccgctgccgctgccgctgccgcacctccgtagctgactcggtgctggagaatctggtaaaagcaccattgtgaagcagatgaggatcctgcatgt

SEQ ID NO: 162070 - DNA, 51 bp, Homo sapiens
cacttagtgagcggaagaatggtgtgagagggttgctgttgtattgcaatc

SEQ ID NO: 162071 - DNA, 100 bp, Homo sapiens
gggtggctacgcctcccggctggacctagatgtgaaggctggtggaggctgtgtaatgaccattggagaaatgctacgatcttttctcacaaaactggag

SEQ ID NO: 162072 - DNA, 100 bp, Homo sapiens
ctctgctggctccttcacagaagaaactctacagagatgtgatgcaggaaacattcaagaacctggcatctatagattttgtggaagtataatactttgt

SEQ ID NO: 162073 - DNA, 99 bp, Homo sapiens
tgaagctcctgaagccgacctgggtcaaccacaatgccccaacagtacttaccgatgttgatcctaaaaccaaggtgatgcaagaagaaatttttggac

SEQ ID NO: 162074 - DNA, 100 bp, Homo sapiens
agacccctggctctataagctgaattatggcagcccagtcaaggaaacttggatttaactggccagaagcaggtattcaaagcagagaacaatccctggg

SEQ ID NO: 162075 - DNA, 75 bp, Homo sapiens
atcagaagtcaattcaaaggacctgcccccagagagacttcccacatcacaaactttgaggttgatcaatctgtg

SEQ ID NO: 162076 - DNA, 75 bp, Homo sapiens
gcagcccgggcccaggccccggcagcgcctgggacaaggtggaagatgcaatgctgatgtttgataaaactacca

SEQ ID NO: 162077 - DNA, 101 bp, Homo sapiens
taacagcagcgccgtcccgtccgacagccaggcccgggagaaacgaagttatacggaagcgtctcctcattgatggagatggtgctggagatgatcggaga

SEQ ID NO: 162078 - DNA, 74 bp, Homo sapiens
aatcctccaaaaccagtcatgaccactagacccacagctgttaaagcaacaggaaacggcactgcccagtctgc

SEQ ID NO: 162079 - DNA, 96 bp, Homo sapiens
agagggttggaggcaaagttccgaatagggatgaggcatacgtggtgtaccttgaaagacttttaacatacgcagagatagatatctgtccggcca

SEQ ID NO: 162080 - DNA, 113 bp, Homo sapiens
gttcacgcacgggatccagagcgccgcgcacttcgtcatgttcttcgcgccctggaaggaagcagccaccctcgccatggcctccccgcccgcctgcccctcggaggaggacg

SEQ ID NO: 162081 - DNA, 100 bp, Homo sapiens
gtttttctgttttgcctgaatacatgatttaaacaagagatttccacagaagctttgtcacccgaaagaaccgccaagtgtgtgccaacccagagaagaa

SEQ ID NO: 162082 - DNA, 75 bp, Homo sapiens
gagccccttcctgagaagatcccagtactgaccaagtgccaggaagaggtcagccacatccctgctgtccacccg

SEQ ID NO: 162083 - DNA, 90 bp, Homo sapiens
atcaggaacatctctttcaatgataagaaatttgtcatcaagcccattgacaaaaaagccccggttaacagtcttccggcagaatggtgt

SEQ ID NO: 162084 - DNA, 90 bp, Homo sapiens
tctcaacaccttctgttgacaaatacagcatccctttaataaaaggtctttatcaccagtacctagaaatgctgaacactacaagcaaag

SEQ ID NO: 162085 - DNA, 51 bp, Homo sapiens
gaaggcctcgctggagatcgagtaccaaaaatggtggagtcaatgaagaaa

SEQ ID NO: 162086 - DNA, 50 bp, Homo sapiens
gatatcaagccagacaatatcctgagcggcactgcagaggtggagctgaa

SEQ ID NO: 162087 - DNA, 76 bp, Homo sapiens
tgttttgcctgaatacatgatttaaacaagagatttccacagaaggcacgaaggcagttccagtctcagctggctg

SEQ ID NO: 162088 - DNA, 83 bp, Homo sapiens
ccggccttgtgtgtccgactcggcagcagtggcagaagcaacaaattacccacctgcatgagaggataagggataatgaatta

SEQ ID NO: 162089 - DNA, 74 bp, Homo sapiens
ggcggatcggctcacgcagcttcaggacgctgtgaattcgggaccctccattttccatatccaggaaaatgtga

SEQ ID NO: 162090 - DNA, 75 bp, Homo sapiens
gaaagcagtgatgaaattcttgtgcgtctaacatctgcgtattgcctaagtgtaatcttgaacatgggcggtgct

SEQ ID NO: 162091 - DNA, 74 bp, Homo sapiens
agcatctacaaatgaggcagcctggggcagtgtgctggatcgaaggggtattttgccactggaggaaagtggaa

SEQ ID NO: 162092 - DNA, 98 bp, Homo sapiens
tccattccaaaggccgtggaaccaatggaaattgactcggaagaaagtgaatctgatgacaccagagaagcctatgatgacaagcaggtggtcacaga

SEQ ID NO: 162093 - DNA, 74 bp, Homo sapiens
tgaaccccaaataaggaagattgtggatcaaataagagtggacccccaaaagtacaagggcatatttaacggat

SEQ ID NO: 162094 - DNA, 80 bp, Homo sapiens
aacgaggacgcggactgcgaaggcaggtgtcccgacccaggctaagcttgagcatggctgagcaggagcccacagccgag

SEQ ID NO: 162095 - DNA, 112 bp, Homo sapiens
cagtcttcccgcgtccgccgattcctcctccttggtcgccgcgtccttggctggcgtcacttgcacctcctgcgccgccgccccccatccaaggatatgccttcaagcctcc

SEQ ID NO: 162096 - DNA, 75 bp, Homo sapiens
ccaaaggaaaagcagaaatacacagacatggccaaggagaataactgaagtgaagtgatggactccgatttggag

SEQ ID NO: 162097 - DNA, 100 bp, Homo sapiens
tattctacctatggaaatccaggcagccaaggctatggacaagcatcacaacatgacagtgatatatcagcatatacttacgagcgcactttgatgatgg

SEQ ID NO: 162098 - DNA, 82 bp, Homo sapiens
agaaactgcacaccaacaaatataatgccaattttgttacttttatggaaggaaaagtgattagagacttccaagaatatgt

SEQ ID NO: 162099 - DNA, 95 bp, Homo sapiens
ttttgagaagccttccgctattcagcagagagctattattccctgtattaaagggagagatgacatgctggacgtggagaccgatgcctacatcc

SEQ ID NO: 162100 - DNA, 101 bp, Homo sapiens
gtggagaaaccgcctcgaaaacggagaagcagcagagagagatcatcattgcctgaatttagctttgtgactgcaagagcaagaccagttcctgtctggag

SEQ ID NO: 162101 - DNA, 74 bp, Homo sapiens
gacgactggctgttgaccctgttcaggcctcggtgaaggccactttgcaaaagattgtttcatgcaaccaggtg

SEQ ID NO: 162102 - DNA, 115 bp, Homo sapiens
ccgagatgttgatccgaataggaggatgtcagttgctgaacagccacaatggtgcgcatgaatgtcctggcagatgctctcaagagtatcaacaatgccgaaaagagaggcaaac

SEQ ID NO: 162103 - DNA, 98 bp, Homo sapiens
ttcgtgaacggggtcctcttctgcaaggtccggctgctggatggaggggattttgtcagcttgtcgtcaagaaatgacatcagatgtaccatcactgg

SEQ ID NO: 162104 - DNA, 100 bp, Homo sapiens
gaaattgtgtgtccatcttggttttgagctctgctctgcctgtgatgtcgagaacactggcaccagtggcagttcgcagcctccaggacttggctcgcat

SEQ ID NO: 162105 - DNA, 100 bp, Homo sapiens
ttttgaagaaaagacaaaggtagaaaggatggtggaggactacctggcaagtggttatcagccaaaattgcctggaaaagagcagtgagaggagtccggg

SEQ ID NO: 162106 - DNA, 98 bp, Homo sapiens
gtgccccagttctgcaccaagagcactggcacctccaaccaacaggcccaggggtggcccgtaagctggtcatcattgagagcgacctggaacgtgca

SEQ ID NO: 162107 - DNA, 101 bp, Homo sapiens
agctggccaaagcctgcccagacggctcacctgtgcgggatggaacaaaagaacgacaaatcctccacccctgggctcaagtccaacacaccaaccccaag

SEQ ID NO: 162108 - DNA, 84 bp, Homo sapiens
ctgcttactcacttgtagatccagagaaagccaaagcggcttggcaactcttgtgaaatttcatagatctcgtcgcttactggg

SEQ ID NO: 162109 - DNA, 100 bp, Homo sapiens
gaaattctggaacacctatatgtcggcagaaccaattgaaagaccaacagcaacagcaagtggtatcgttatgtcctgatgacacagaatgcctgacagt

SEQ ID NO: 162110 - DNA, 85 bp, Homo sapiens
tgtctgtgggactctgcacactcttcggcctgacgcccaccctcaatggcggcccgtgggtgctggctgccaagtcttcgaaggc

SEQ ID NO: 162111 - DNA, 82 bp, Homo sapiens
taggccggcgcctgccgggaagcgagccgcgacccgagctgggtttgaacataatctttcatgtagctttggctctcctaaa

SEQ ID NO: 162112 - DNA, 83 bp, Homo sapiens
tctacgagctgtttctcatctttatactcttccagcatctgggctgatgggccgtaccctgcaccgtgagccacccgcaggag

SEQ ID NO: 162113 - DNA, 135 bp, Homo sapiens
gactaacgtgatgaagggctggcagtaccgttggttcgtgctggactacaatgcaggactgctctcctactacacgggccatcactgtgcatgtccccatgccctcagcaggagtcgtggacatccccattgtgg

SEQ ID NO: 162114 - DNA, 100 bp, Homo sapiens
ataagtcgaaggggaaggcgcctgaagaggacgaaggatgcagcagtctcggccctggctgctctatgcagtgaatattacatgaaggagccgggggagg

SEQ ID NO: 162115 - DNA, 102 bp, Homo sapiens
gaaatggcggagtatctggcctccatcttcggcaccgagaaagacaaacaatgcagatcttcgtgaagactctgactggtaagaccatcaccctcgaggttg

SEQ ID NO: 162116 - DNA, 74 bp, Homo sapiens
gccgaaacaccggtaggagcggggaggcctgaaacaaccagagagctacgggaaaggaagggcttggcttgcca

SEQ ID NO: 162117 - DNA, 83 bp, Homo sapiens
gtccaggcacgcgaggcccctcagatggggacattggttttggacctttacaacagaggatgtctgaagaagtttctttccag

SEQ ID NO: 162118 - DNA, 88 bp, Homo sapiens
ctgagcccagtatgggaaagatctaccttctggaagctactactacgtggtgcttggaaagggagatacttcaggggattaccggaag

SEQ ID NO: 162119 - DNA, 74 bp, Homo sapiens
tcctcaacgacgcggacatggtcatgagctttgtgaacctggtgagacggtttaagcggaagcatcttactgcc

SEQ ID NO: 162120 - DNA, 100 bp, Homo sapiens
gtcaaccccttcctcccgtatatcagaaatgggcaagttcatgaaacctgggaaggtggtgcttgtcctggctggacgctactccggacgcaaagctgtc

SEQ ID NO: 162121 - DNA, 60 bp, Homo sapiens
tttagaaggaggttcaggctacgtttacaggctggtaacctacatctttgtctacgagaa

SEQ ID NO: 162122 - DNA, 75 bp, Homo sapiens
gatccgtattgatgctatgcatggaggtgaagaacaaattggttttgagctagtggagaaattatttcaaggtca

SEQ ID NO: 162123 - DNA, 88 bp, Homo sapiens
aagctctttgctgatgccgtacaagagctgctgcctcagtacaaggagagggaaatttataagattggccagggctaccttatcaagg

SEQ ID NO: 162124 - DNA, 99 bp, Homo sapiens
cctcggagacaccgatatgaccatcaccagagcccggaagcaggagatcattaagaccacggagcagctcatcgaggccgtcaacaacggtgactttga

SEQ ID NO: 162125 - DNA, 90 bp, Homo sapiens
gccgatgccccctgccccgcccggaggtgaaagcgggtgtgaggagcgcggcgcggcaggttgtggcagcactgcctgaaggtatgagac

SEQ ID NO: 162126 - DNA, 88 bp, Homo sapiens
ttaaaacaagtcagatcatgtcactctgctcaaaatcctctggtgtttgatcagagtgcgctttcaactgaagctaaagaagaaatgt

SEQ ID NO: 162127 - DNA, 75 bp, Homo sapiens
ctgaagtttattcactttcaaaccactttcagtaacagatgtggaagatgtgaaatttgtcatcaattatgacta

SEQ ID NO: 162128 - DNA, 83 bp, Homo sapiens
gccgagggcggcctgagcccggcgcaggtgaccggcgcgcgggagcgctacggccccaacgcctgggctggaagctcttctac

SEQ ID NO: 162129 - DNA, 82 bp, Homo sapiens
cgccgccgccaccatgcccaagagaaaggtggaagttaaacgagctgagcctcgggacagcaagagccaagcgccgggacag

SEQ ID NO: 162130 - DNA, 75 bp, Homo sapiens
tatgtcatcaagaagaatgacgatgagaagagcaagttagtaccttgtaccaaaacatcaaccttgtggagccaa

SEQ ID NO: 162131 - DNA, 82 bp, Homo sapiens
agaacacccttctccgtcccctctactcagttccagtctcatcagattttccatgtcctggtggtggcagcagcctttgtcc

SEQ ID NO: 162132 - DNA, 82 bp, Homo sapiens
cgtgtcagacgatggccgtgtgcaacacagtgaagacatttccacctggacacctgaccatgtgcctgccctgagcagcgag

SEQ ID NO: 162133 - DNA, 75 bp, Homo sapiens
atttagagccaaactgtccaaggctttggcagatcttttgccagaaatgagggcatactggcctgacgtaattca

SEQ ID NO: 162134 - DNA, 96 bp, Homo sapiens
gaaaacggaagcgcagggagaaggaagaggtgtttgaaaaggttccagcaacagatagaaatgctttaagttcactctggggaaagctggcctctg

SEQ ID NO: 162135 - DNA, 101 bp, Homo sapiens
gacgaggagaggctggctgagtccaagcaggcgtttgaaacttcagtgctctcaagaaggaaaatatttatgaaaacaataaactggtgagtggcccccgc

SEQ ID NO: 162136 - DNA, 88 bp, Homo sapiens
ttaaatggcccacatcaggacagctgttccttggccatcccaaagctattctgggggcaacagagtctcttcaagaaaatgaggagga

SEQ ID NO: 162137 - DNA, 50 bp, Homo sapiens
cgtatggactactatgactctgaacacgggtccatatggaatatttgctg

SEQ ID NO: 162138 - DNA, 74 bp, Homo sapiens
acgcccctctgaagaacccggcgcgaggaggccataaaattttgagtagaaaaatccagaaatttgaaaatcag

SEQ ID NO: 162139 - DNA, 80 bp, Homo sapiens
agcccccgaggcccgcagcctccgcggatccgggcccgctcggcccctcccatgaacccagcgggtgccgcttctccacc

SEQ ID NO: 162140 - DNA, 75 bp, Homo sapiens
agcacttaccggctgccccagatcgcgcgcctggacaacgctgccactgcagagccccgccatggaagacacgcc

SEQ ID NO: 162141 - DNA, 98 bp, Homo sapiens
tctgcctacctgtcagccgtgggcaccttcacctgggtctgcacgccctttctgtcactcaagactgcttgcaactgattgcagacagtgaaacacca

SEQ ID NO: 162142 - DNA, 79 bp, Homo sapiens
aagcagctcagaagaggaaaggaaaggagccaggcatggctcttcctcagggacgcttgactttcagggatgtggctat

SEQ ID NO: 162143 - DNA, 100 bp, Homo sapiens
atccactgatagaaatcatttccatcaataccgggcaaagcgaaggctggagctaggagaaagcggtcatcagtacctctcagatggtttaaaaaccccc

SEQ ID NO: 162144 - DNA, 88 bp, Homo sapiens
gaaattttgccaaagaagtgagccatgaaatggatggacttatttttcagcctactggattgtggaagctgatcgaggaagcctaagc

SEQ ID NO: 162145 - DNA, 90 bp, Homo sapiens
tcctatccttacccgacctcagatgctcccttctgctcctggtcaaaatgcagatcttcgtgaaaacccttaccggcaagaccatcaccc

SEQ ID NO: 162146 - DNA, 90 bp, Homo sapiens
cagcagcagccccggggcccggagaggtttgcctcggagcgtgtgaacattcctccgctcggttttcaactcgcctccaacctgcgccgc

SEQ ID NO: 162147 - DNA, 82 bp, Homo sapiens
ctcacagcgaaacgccgcgcactcggagccggcacggctcggcgatgtccaacatcacagtcacatacagagatggccgagt

SEQ ID NO: 162148 - DNA, 80 bp, Homo sapiens
agggtcccttccagctgtcacattctggagcgtatgagatgagcccaagaagatgaaaggattgttcttgttgacaacaa

SEQ ID NO: 162149 - DNA, 109 bp, Homo sapiens
gtgcgaggagaccgcgggtttccaccccggcgggagctgtcaggttggctccgcgctccataaaaatacagactcaccagttcctgctttgatgtgacatgtgactccc

SEQ ID NO: 162150 - DNA, 98 bp, Homo sapiens
tctatctcgcttttcccctggccttctgtatcttcatggtgcggctcatcttcgagagacttgtgtatgcggatacctgcttcagtaccatcaagtta

SEQ ID NO: 162151 - DNA, 76 bp, Homo sapiens
cggggcgccttctgcaatggccagcggctccgggtctccggggagacagtgtgttcagtcaagctgtccagaacca

SEQ ID NO: 162152 - DNA, 98 bp, Homo sapiens
cgcagggccactcatcaagatccaagagaagtgcctacccaagcaccagtcgaggtcagggccaaaactggaaccaaggatttaataactattatgat

SEQ ID NO: 162153 - DNA, 90 bp, Homo sapiens
ccacagaaaaagaaaatggggacaagtctgaggcccagattgaggtggtgccttctgcctctgccctgatcatcaaagccctcaaggaac

SEQ ID NO: 162154 - DNA, 96 bp, Homo sapiens
gcagcctggggactctgcctcgtgccgctgagcctggcgcagatcggtcctcttcctgatggatgggaacaagccatgactcaggatggagaaatt

SEQ ID NO: 162155 - DNA, 76 bp, Homo sapiens
ctggagcctcagttggaagcagccgatccagcctgcggagcctgtggggcagttgcacactgacaagaaacagatc

SEQ ID NO: 162156 - DNA, 97 bp, Homo sapiens
cttccgggagggcggctcgcaggtgtcatggagaaactccagctgggcccagagattctgcagcgggaaaatccaaggcttatttatgccaggctga

SEQ ID NO: 162157 - DNA, 82 bp, Homo sapiens
ctgtgccagcagggagacacatgtttgtctttcaggagaggagttcattacttcggaagtggtacaatttaatgatacaaaa

SEQ ID NO: 162158 - DNA, 90 bp, Homo sapiens
cacgctgaacgagagggacacggagcagattcttggtgccaccattgagaactccaggattgtcctgcagatcgacaatgcccgtctggc

SEQ ID NO: 162159 - DNA, 82 bp, Homo sapiens
gggagacgtgctggacacactggaggcgctggggtgtggatgaggtcaccattgtcaacattttgaccaaccgcagcaatgc

SEQ ID NO: 162160 - DNA, 90 bp, Homo sapiens
gcaagaccaagaaggggccccccttggacgggactatgtgtgcacctggcaagagcgctcagggaatccgggaactactggatgttgcta

SEQ ID NO: 162161 - DNA, 100 bp, Homo sapiens
tgaaaaagcattacaaatatgaagaggcattatttatgaccttttctatggaaagacaagttggatggcttgaggactggtactaaaaggaaacgtgact

SEQ ID NO: 162162 - DNA, 90 bp, Homo sapiens
gacaagtcctgcgcttggggatcctctgtacgcccgttcactgctcctctggtgcaagtgtggtagctattgacaacaaaatcgagcaag

SEQ ID NO: 162163 - DNA, 97 bp, Homo sapiens
caacccacctaactacggaaaacctgatcccaaaattattgaaaacactcgaagggttagctcccagcgatgccagatgggatcagcacagccctgc

SEQ ID NO: 162164 - DNA, 73 bp, Homo sapiens
tgaaaccctcgaatacattgaagccaactatggatgtggtgctttttaaccgtgggatgctgccagcgtacta

SEQ ID NO: 162165 - DNA, 96 bp, Homo sapiens
gattgagaatgtccatggatttgtttctcattctcatatttcaccaataaaggattaccttgactgcatcagggaccaaacaaaacttcccctggg

SEQ ID NO: 162166 - DNA, 95 bp, Homo sapiens
cactacagcctccatcttctgtgcttaaggatccttccctctcaacctccaaggtagctgagactacagacttttggaacagcgatcgtaatcaa

SEQ ID NO: 162167 - DNA, 100 bp, Homo sapiens
ctgatccctacgagaagatcccgcatgtggtcggggagcatggccgctacctgtctgaggaacccgagccctacctggcagtctacctgcactcggagcc

SEQ ID NO: 162168 - DNA, 83 bp, Homo sapiens
tcacagacaccgcctacaggagtatgatgcaagctcctggaatgaggccgcccatgggaggccatatgccaatgatgcctggg

SEQ ID NO: 162169 - DNA, 71 bp, Homo sapiens
tgtctccccacattactatctacagaatactacaacacatctttgcaggattctttgcaaattctgccatt

SEQ ID NO: 162170 - DNA, 83 bp, Homo sapiens
caagggccacaaagtgaccaagaacgtgagcaagcccaggcacagccgacgccgcgggcattttgaaagcgaagcagaagccg

SEQ ID NO: 162171 - DNA, 90 bp, Homo sapiens
cagattcgcagtggtcgcttcttctccttggatacaatgtctctttgctatatgaccttgaaaatcttccggcatccaaggattccattg

SEQ ID NO: 162172 - DNA, 75 bp, Homo sapiens
catgaatagactctcccatcccaacatccttagggggcaatggcggcttcctgtgttctactgcacactgggcag

SEQ ID NO: 162173 - DNA, 75 bp, Homo sapiens
ttggaccacattgtcaattcacaccgaggactactgagcccagccaggctgtatgccattgctgccaaagaaaaa

SEQ ID NO: 162174 - DNA, 80 bp, Homo sapiens
tcagaggccccggtgctggcagctgagcccgaggctgacaagaaaccagactgtgatgactgggagagcgggctgaatgc

SEQ ID NO: 162175 - DNA, 100 bp, Homo sapiens
gaagatggtcgtaccctgtctgactacaacatccagaaagagtccaccttgcacctggtactccgtctcagaggtggatcgaggccatggaagatgcgag

SEQ ID NO: 162176 - DNA, 83 bp, Homo sapiens
tagggatgcagaggatcagaaccggtacctggatggcatggtgatggctggaccggcggaggaggcgggagcccattgtcccg

SEQ ID NO: 162177 - DNA, 101 bp, Homo sapiens
gaaggagatcgtggaccctctgtacggcatagctgagggcaccgcgtccgtgctgcagcgccggtcccccaatgaggagtacgtggaggtggggcgcctgg

SEQ ID NO: 162178 - DNA, 127 bp, Homo sapiens
gggcagcccaatgtctcctgcacgtgcaactgcaaacgctctttgttccagagcatggagatcaaagcggccagcttgatgtccgggagctgatctctctctaccccttcctgttgcccacctcctc

SEQ ID NO: 162179 - DNA, 82 bp, Homo sapiens
attgccttattttttctcatggatgttcttcttcgagtatttgtagaaggcccatctgctggcaaggctaagattagaacag

SEQ ID NO: 162180 - DNA, 88 bp, Homo sapiens
agagggacagatccagattatggagcctgtccaggtcactgtagaagatgcagatgcctccagctattacgagtcccatggcaacaag

SEQ ID NO: 162181 - DNA, 97 bp, Homo sapiens
aacattctgaaaatgtgcatatttcaggagtgtcaactggtgtcatggagaaactccagctgggcccagagattctgcagcgggaaaatccaaggct

SEQ ID NO: 162182 - DNA, 75 bp, Homo sapiens
agccgcgggcgcccgaggggccgagcgagtaggaaatccatgaagtccagaagtagaagtcctgcatattcaaga

SEQ ID NO: 162183 - DNA, 75 bp, Homo sapiens
gttaaggattccaagtaactcttatttgattgacgcgtcatgccttacgtgggaaggacaacagttccaggggaa

SEQ ID NO: 162184 - DNA, 88 bp, Homo sapiens
gaggacggcgtgctcaaggagggcttcctggtcaagagggcagcttgaaatccactctccagatgctaagcacacggtgatcctaagg

SEQ ID NO: 162185 - DNA, 82 bp, Homo sapiens
tggaggagctgtgcagccgcgaggaggcgcgggaggtgttcgagaacgaccccgagacggacagagcgggatgccaccagct

SEQ ID NO: 162186 - DNA, 74 bp, Homo sapiens
gcggagacgatgcctgagatcagagtcacgcccttgggttcatcctgacaaaaatcatcatccccgggctgagg

SEQ ID NO: 162187 - DNA, 97 bp, Homo sapiens
taaaaacaggaccagttacactccatacgcaaaccgcgatacattttgctgaacaaatagcaaaggtgtgatccctcacatccacaaatctctgatt

SEQ ID NO: 162188 - DNA, 74 bp, Homo sapiens
tgaacatgtatttaaccaagttccaacaaaagaatgctgccgcagattccgtcctatttcagtgttccgggaag

SEQ ID NO: 162189 - DNA, 80 bp, Homo sapiens
cctcgagctgcggtagcagcgactcatgagagcgcggccggaggacagacaatgcagatcttcgtgaagactctgactgg

SEQ ID NO: 162190 - DNA, 100 bp, Homo sapiens
tggccttctacgttgtgaaaatgatactcctgggcatggaagtggatgggctgagactcctcgaacagatcgaggtggagattctattggtgaaacaccg

SEQ ID NO: 162191 - DNA, 50 bp, Homo sapiens
gctccttttcctccacctaccttcccgaccagtaatgttaaagtagagac

SEQ ID NO: 162192 - DNA, 96 bp, Homo sapiens
gtgggcctctgagatatgccgtttacgggtacggattttcaaatatgcgctatatttcttcgctaattagtggtgttggtattttcatgatgggtg

SEQ ID NO: 162193 - DNA, 78 bp, Homo sapiens
gactgctttatggacttgcatcaggagtagcaacactgccagtgaaagatgtagaagataaacctgaacaacaaacca

SEQ ID NO: 162194 - DNA, 90 bp, Homo sapiens
gcgaaaaactatgctgaccagagttggatggcaagcatgtggtgtttggcaaagtgaaagaaggcatgaatattgtggaggccatggagc

SEQ ID NO: 162195 - DNA, 82 bp, Homo sapiens
caaaaccattgaagaaaattcttttgggagccaaacccacggaactgtggctgcaccatctgtcttcatcttcccgccatct

SEQ ID NO: 162196 - DNA, 82 bp, Homo sapiens
gaagagaaacaactgttttgttgcttcatcactggtccagctgtaataccagggtacttctccgttgatgtgaataatgtgg

SEQ ID NO: 162197 - DNA, 82 bp, Homo sapiens
aagagggtgttcgactgctagagccgagcgaagcgaagccatcttcgacaagagcacagggaaggttgttttgaagacgttc

SEQ ID NO: 162198 - DNA, 58 bp, Homo sapiens
cctgcatgttaatgggtttaatggagagtgttgagccagtgcaggttcaggaaactgt

SEQ ID NO: 162199 - DNA, 101 bp, Homo sapiens
gaatgaagaccacaataaaagagacctctacttagctcagcaattcttaccttttctggagagcagaagcatcacagtgtacatcccaggaaagaagtttg

SEQ ID NO: 162200 - DNA, 100 bp, Homo sapiens
ccacgctggtataccctcaaacccctcagacaatgaattcacaacctcaaacccgttctccgaatttggtgttcacttggcagaactgactgtagatccc

SEQ ID NO: 162201 - DNA, 75 bp, Homo sapiens
aataatgtcatctctatggaagaaattggaccatacactttctcagatcagagccaaacttggaatgccacagtt

SEQ ID NO: 162202 - DNA, 85 bp, Homo sapiens
gtccttgctggtgcatgcgtcgtcggcctctgggcagcaggtgctggagaatctggtaaaagcaccattgtgaagcagatgagga

SEQ ID NO: 162203 - DNA, 95 bp, Homo sapiens
cgggctggctgccaccaccaggacggagaatgtgaccgttgggggctactacccagggatcattgctgagcagtccaaagtcctgagcgccgtgg

SEQ ID NO: 162204 - DNA, 99 bp, Homo sapiens
cgtgcgaggtcgccgcggggctggccgccatgcacaagctgcacttcctgcacagcagagagagatcatcattgcctgaatttagctttgtgactgcaa

SEQ ID NO: 162205 - DNA, 98 bp, Homo sapiens
tcctcggaagtcggcatctctctccaacctgcattcttatctttacgcgttcagtattgttcccatgaagctaatggatgcagcagaactggtaaaac

SEQ ID NO: 162206 - DNA, 87 bp, Homo sapiens
ctccagccgaaggagaagggggttaatgttggagaagattgtccagtgtttgatggactctttgagttttgtcagctctcaactggc

SEQ ID NO: 162207 - DNA, 100 bp, Homo sapiens
caacaagtacaagcggcgggtgccccgggtttacccaaggtccagcctagcccctaggcaccatgtcggacagtgatctaggtgaggacgaaggcctcct

SEQ ID NO: 162208 - DNA, 83 bp, Homo sapiens
gtaaggtgctgcggagcgacgcggcctgggaggataaggctgaccccgcactacatctacccaccagccatcgtgcagcccag

SEQ ID NO: 162209 - DNA, 75 bp, Homo sapiens
actccggagacagcccaaatatcctcggaagagcgctcccaggagaaacaacatcgccctgagcaactggtggtt

SEQ ID NO: 162210 - DNA, 75 bp, Homo sapiens
ctagcgttcgccttcagccaccatggggaatgggatgaacaaggtgtcgtgaaaactacccctaaaagccaaaat

SEQ ID NO: 162211 - DNA, 83 bp, Homo sapiens
gcttcgtctctcccgccatcatcttcacacatgcctcactcctgtcagcagttccaccttttcatggttgaggagcacatgtg

SEQ ID NO: 162212 - DNA, 101 bp, Homo sapiens
taggagatggctacgtgatccatctggctcctccaaagttcctggaataactattgctacagatattatctgtggttttcctggagaaacagatcaggatt

SEQ ID NO: 162213 - DNA, 82 bp, Homo sapiens
cttcggcagtccacccaccgccgccgcctcccagaaccccaaggagtggaccaagaaggtcatcaggaacatcgcctgctcg

SEQ ID NO: 162214 - DNA, 101 bp, Homo sapiens
ggaacgactgcggcgcgctgctggacgaagagctctcctccttcttcctcaactatctcgctgacacgcaggcagagatcctacaagaatccaggatgatg

SEQ ID NO: 162215 - DNA, 100 bp, Homo sapiens
cccaggatgaagaaagaaggcagttgatacagcttcgagatattttgaaatccgcattgcaggttgaacagaaagagcctctacggcagacacatgcagg

SEQ ID NO: 162216 - DNA, 50 bp, Homo sapiens
ggcaggttgcagaggacagtgcactggagaggggtctcctgaaaaccctg

SEQ ID NO: 162217 - DNA, 100 bp, Homo sapiens
atggatattgaaatggacagtggagatgaagcctaagaatatgatcaggctgcggcaaatctacagggaccctgagaccctcgtgttccgggactcctct

SEQ ID NO: 162218 - DNA, 118 bp, Homo sapiens
atcagtctcaggatgttctgagattgcatcaggatattaatgattataaccggagattctcagggcaacccagatctggcttccgttacaagatgaggtctgtgtatgctcacttccc

SEQ ID NO: 162219 - DNA, 88 bp, Homo sapiens
ctgctgcttcctcgtcctagtgatccacgcgcagttcctcaaagaagattctccggatatggccggagtgtttccttatcgagggccg

SEQ ID NO: 162220 - DNA, 73 bp, Homo sapiens
ttgtcaatgcctttgtgtctatcacagtggaggagaacgaaggacttatcctgaggagcgaatgcctctgcca

SEQ ID NO: 162221 - DNA, 97 bp, Homo sapiens
ggggcctggggctgcctgccgggcggccgggcgcggcgagcccaggtatcatgatattagctggtttgacatcaagtcatttgtgagtcatcagatc

SEQ ID NO: 162222 - DNA, 100 bp, Homo sapiens
cagacaactaagcgaggggatcctcatgagttaagaaacatatttctacagaaagatggatactatgatgctgaatgtgcggaatctgtttgagcagctt

SEQ ID NO: 162223 - DNA, 73 bp, Homo sapiens
cgactcgggcttggcgcggcggccagaggaaccccgagacaatgcagatcttcgtgaagactctgactggtaa

SEQ ID NO: 162224 - DNA, 106 bp, Homo sapiens
cagagcctcgcctttgccgatccgccgcccgtccacacccgccgccagttacagaatgtctgaaggggacagtgtgggagaatccgtccatgggaaaccttcggtg

SEQ ID NO: 162225 - DNA, 90 bp, Homo sapiens
ctctgaagtgaagatggatgcagaattccgacatgactcaggatatgaagttcatcatcaaaaattggtccaaccgtgactgccagatcg

SEQ ID NO: 162226 - DNA, 75 bp, Homo sapiens
aatttcaagagagtaccattggggattactctcgtggctttggtggccggtacggggtggagaaggataaatggg

SEQ ID NO: 162227 - DNA, 83 bp, Homo sapiens
atgcgtcgtcggcctctgggcagcaggaggcccctggctcaatgatgccacctgcagctgcccaaccctccgcccatggtgcc

SEQ ID NO: 162228 - DNA, 100 bp, Homo sapiens
gttcgcagagttttttcttctaaaaggagtaatgtaaactttgtgacagagatatttcgtcagaaaatgaaacagttggtgatgtttcagagaacccaac

SEQ ID NO: 162229 - DNA, 83 bp, Homo sapiens
cctgctgaagccagaggacggaagagaaggtgagaagccctaccactgcaactgggacggctgcggctggaagtttgcgcgct

SEQ ID NO: 162230 - DNA, 100 bp, Homo sapiens
tgtaaatttgcacatccttcgaaaagctgccaagttgaaaatggacgagtaatcgcctgctttgattcattgaaaagatggaaaataatgtcctgcaaga

SEQ ID NO: 162231 - DNA, 74 bp, Homo sapiens
ccgtcagtccctgctctgtgcgcgcctccatctgggccatggatgggtttttcgttggaatatacgttgcacat

SEQ ID NO: 162232 - DNA, 74 bp, Homo sapiens
tggattgtagaacttctctctctgcatttccggagagttcttttgaagtcacttcagaaggatctacatgagga

SEQ ID NO: 162233 - DNA, 100 bp, Homo sapiens
tctggctcagagctaggaaaaaagctgaaggcaactatggatgctgggaaactggtcttcgccttgatcgtgttctcctgcatctatggtgagggctaca

SEQ ID NO: 162234 - DNA, 75 bp, Homo sapiens
agtccgagacgtcaaactcctagtggaccattcccggagtaataaatccagttggagcagcagtgatgagaagag

SEQ ID NO: 162235 - DNA, 100 bp, Homo sapiens
cccggcccctgaagttggcactgcagcagacagctccctgggcaccaggcagctaacagagatgctgcaatttgtcagtaatcaagtgggagagttccct

SEQ ID NO: 162236 - DNA, 100 bp, Homo sapiens
gcgggaggctccttgtgccacattcttgcagctgcctacaaattcaagagtgaccagggatgggtgtccgcaatgttgccagtgtctgtctgcagattgg

SEQ ID NO: 162237 - DNA, 97 bp, Homo sapiens
tgcgcggcccgggcagccgcgctttcccaggtgataaaagaaaatgtggctgaagttacccgaagttcagcttgcagtgtaattcagaagagttaag

SEQ ID NO: 162238 - DNA, 82 bp, Homo sapiens
ttgacgccatgtcgggttattcgagtgaccgagaccgcggccgggaccgagggacttgaaagaggagattgatattcgactc

SEQ ID NO: 162239 - DNA, 90 bp, Homo sapiens
cttatgcagctattgatcctagagtgcagtatttgggatatactatgaaagtgtttgctaaggtgggtgacatcaccatcctggtgaaca

SEQ ID NO: 162240 - DNA, 83 bp, Homo sapiens
gttgaacagtcctgtatcaaaactgaagatggtttgaaacagcttcacaaggtggaagttaaacgagctgagcctcgggacag

SEQ ID NO: 162241 - DNA, 98 bp, Homo sapiens
ggctgatcggaccggccactcaatattgcacaccttatacgggagggtcattcttaactgttcagccctaccttgccttctccacttgttgagcagtc

SEQ ID NO: 162242 - DNA, 101 bp, Homo sapiens
agacctgaccttcctctgggatatgtttggtgaaaaaagcctgcattcattggtaaaggagctagagttaatgccaaagacagcaaatggttgacaccttt

SEQ ID NO: 162243 - DNA, 87 bp, Homo sapiens
gcgagtgaggaaaggaggtactgtagggaaaaagaaatagtggtttcagacagtgcttcttcgggagccagaagcactgcaagttga

SEQ ID NO: 162244 - DNA, 90 bp, Homo sapiens
caatacatgggacaattgaaaatgaatgaatgtacacacctcattgtgcaagaaccaaaagctatcagttgagggatttgcagttgataa

SEQ ID NO: 162245 - DNA, 51 bp, Homo sapiens
cctggctgtcttctgccattcaggtacgaatttggtcaggctctcttcact

SEQ ID NO: 162246 - DNA, 95 bp, Homo sapiens
gattccaagtaactcttatttggggttggctgtgttccggccgcagagcaccgtctgcgtgaggagatcctggccaagttcctgcactggctgat

SEQ ID NO: 162247 - DNA, 82 bp, Homo sapiens
tgaaaatcaggatcgctacattaaggagaaatggtagccttaaaaaaagtacgtctggataatgaaaaggaaggctttccaa

SEQ ID NO: 162248 - DNA, 100 bp, Homo sapiens
tgcttttgaagttattaaagtctgttggtgcacaaaaagacacttatactatgaaagaggttgatgctatgaaactgggagtaaaggaaatgaagaaggc

SEQ ID NO: 162249 - DNA, 75 bp, Homo sapiens
ggcggcgctgagccagcggggccgacctctgtgagtgaaagccttcagagggaagctgctaagaagcaggccatg

SEQ ID NO: 162250 - DNA, 75 bp, Homo sapiens
ttccctgtcccatcgcaaacccaaagatccccgttcctggagattctgattgagctctacgaactcgacggggac

SEQ ID NO: 162251 - DNA, 75 bp, Homo sapiens
gcctggaggaagagaaggcagctgtgactgaggcagtgcgggccctgctggttctggaggacacgtgccggcggc

SEQ ID NO: 162252 - DNA, 82 bp, Homo sapiens
ccgccgtcggcagcaagaacagagagagaggtggacagatctgagagatactgaggtggacaagagcaaggaccaagtgtgg

SEQ ID NO: 162253 - DNA, 75 bp, Homo sapiens
cgggcgcctgggtccccagcatgatcctcgactgtgccctgtccacggtgcctcctgcatgtcctgctgccctga

SEQ ID NO: 162254 - DNA, 95 bp, Homo sapiens
agcccccttataagccaaaagctgtgatcataaacagcacaatcacaccgaatatgaccttcaccaaaacgtcacagaagtttgggcagtgggcc

SEQ ID NO: 162255 - DNA, 97 bp, Homo sapiens
tggatttcagcctgcacggatggtcttgaaacacaaatggtttttggcttatgcaagcaaagatctggaggagcagttacggtctgtgtccagtgta

SEQ ID NO: 162256 - DNA, 90 bp, Homo sapiens
cggggacgggggcgagagtgaacgattcaacccgggggagctcagggctgcattccagtatggtatcaaaatgtctgaagggcggaaaac

SEQ ID NO: 162257 - DNA, 74 bp, Homo sapiens
gcagtacattaatactgcttctaagacaggaagtcgagataacatgagtattgtactagtttgcttttcaaatg

SEQ ID NO: 162258 - DNA, 87 bp, Homo sapiens
gggcactagtgtggctctcctgttccagcaattgggttctggcctataggaacaagacattttcagtaatggaagaaggagcttcca

SEQ ID NO: 162259 - DNA, 74 bp, Homo sapiens
acacaaccgtctccagccttggtctgagtggactgtcctgcagagggaagtgatgagctttcctttgatccgga

SEQ ID NO: 162260 - DNA, 75 bp, Homo sapiens
cagctggagcgatgcaagctcggatccgagactggcagcatgagcagcatgagatgtaacctcgggtatggtgaa

SEQ ID NO: 162261 - DNA, 100 bp, Homo sapiens
ttgctcctggatgaatccaagttaacccttaccacccagcagcagggcatcaagtttcagacccaaagtttacgcctatcagacctacacagaaaatcgc

SEQ ID NO: 162262 - DNA, 98 bp, Homo sapiens
cctggagtctgcgaaggccgggacccggttccccggcccacagtgggggtgtgcaaacccgagagaactggattctggacaatcaggaagtccaagcc

SEQ ID NO: 162263 - DNA, 100 bp, Homo sapiens
cggcttccggggagatgaaggacccataggccaccaggggccgattggccaagaagcaaaccagtccagctacgggggcccagccagccagcagctgagt

SEQ ID NO: 162264 - DNA, 75 bp, Homo sapiens
cgctgtgagacatgtctgagactcctgctcagtgtagcattaagacagtgatgtgtgttctgaaattgtgaacca

SEQ ID NO: 162265 - DNA, 100 bp, Homo sapiens
acaatagaggacacgagcggcgccttctcagggctcgacagcctcagcaagctgggaccctgctgagacagactataccgcagtgggctgtgcagtcacc

SEQ ID NO: 162266 - DNA, 90 bp, Homo sapiens
gcggcagagagggaatggtgcaggcaggcgctgagaaggacgcgcagtccatctctctcagacacgatgaggcgagtggtacgacagagc

SEQ ID NO: 162267 - DNA, 83 bp, Homo sapiens
gggcattctctacaccatcgacaccgacaactccaccgtggcgctcgccaaaggtgagaagccctaccactgcaactgggacg

SEQ ID NO: 162268 - DNA, 100 bp, Homo sapiens
ggcaggagtagctgatcaaaccaaggatgggtcctatctgactcctgtacgggatgaggaagcagagtctttacggaaagcacgctccagacaagctcgg

SEQ ID NO: 162269 - DNA, 100 bp, Homo sapiens
ggagcagtatgccggaagctggttttcaggccacaaatgctttcacaggtgacagagttagtccttgataattgcctgtgtgtcaatggggaaattgaag

SEQ ID NO: 162270 - DNA, 83 bp, Homo sapiens
ggtcacttagactaccccaggaacccgcgccgcgagggctccttccctcaggtgttgacttcaaaatcaaaactgtagagcta

SEQ ID NO: 162271 - DNA, 90 bp, Homo sapiens
gggttctctctccgcgcgttcaggttgctgcatctacctttatccctgactgccttgaagttgaaggctctgtggctatctgacaaccag

SEQ ID NO: 162272 - DNA, 101 bp, Homo sapiens
ggagatacattaaatgcaatagcccttcagtactgttgtacggtactaggttttgacaagcttgcatcatgcgtgagtataagctagtcgttcttggctca

SEQ ID NO: 162273 - DNA, 50 bp, Homo sapiens
tttgaaattaatggcacagaagatggcagccataggtccatggagtcagc

SEQ ID NO: 162274 - DNA, 102 bp, Homo sapiens
agttgctaaactgtttgcagatgctggcttagtgtgcatcacaagtttcatatcaccttacactcaggatttaaaaactggaacggtgaaggtgacagcagt

SEQ ID NO: 162275 - DNA, 84 bp, Homo sapiens
tggagaacgccaagcgcttcgccatcgacataggtacttcaactcccgcccccacctgtgtcccgctggctcctaagctgcccc

SEQ ID NO: 162276 - DNA, 100 bp, Homo sapiens
cgcgactcgggctgagggagctcgggccaatcagagggacggccccagaatggcatggctgacgtgatggcagacagggttccccgctgcccggtctgca

SEQ ID NO: 162277 - DNA, 99 bp, Homo sapiens
caaattattgacggtcaaggtatttcatgccgaggcacattgcaagcaacccgtgccttgatggtggttggcatcctcctgggagtgatagcaatcttt

SEQ ID NO: 162278 - DNA, 100 bp, Homo sapiens
aaaacgccaggcggatctcagaaggccagttcaaagtgctgaagctgctgaaagatggcagaagaagtggtggtagtagccaaatttgattatgtggccc

SEQ ID NO: 162279 - DNA, 90 bp, Homo sapiens
ctcgcgcgggtgtcgctgggctgtcggcctggaccttgcagccgcaatggctaagtgctatttatggaggtacctatatgctgaataaac

SEQ ID NO: 162280 - DNA, 96 bp, Homo sapiens
aagcctcggtcactgcagccaccacactacgtgggtccgggcccaccagctggtcttgccaccttgcgacgtagtgatcaaagccgttgctgacta

SEQ ID NO: 162281 - DNA, 75 bp, Homo sapiens
ttagaggtgtacgagaagccggtacaggtgccctgcggacacgtcttatgttcctgaggaagaattgaaggcagc

SEQ ID NO: 162282 - DNA, 112 bp, Homo sapiens
taataaagtgtttgcatctcagtggttgaatcataggcaagtggtgtgtggcacaaaatgcaacacgtcatccgtccttggctcaggatttggagagcttgcaccaccaaaa

SEQ ID NO: 162283 - DNA, 85 bp, Homo sapiens
ttggtggatggtcacgatgtagttatagaacctgctaaggctgcctcagacctgactgcctggttcagcctcttcgctgacctcg

SEQ ID NO: 162284 - DNA, 51 bp, Homo sapiens
agatactgggactcctctcacaaatgactcagtctcctttgaggatgtggc

SEQ ID NO: 162285 - DNA, 100 bp, Homo sapiens
attcgatgccatcgtgatggcggatgagagctgactggaaataccggcatgcaggattgatggccttatctgccattggtgaagggtgccaccagcaaat

SEQ ID NO: 162286 - DNA, 75 bp, Homo sapiens
gcagtacaagcttacgtctctgctcttcagtacaatcctgttggacgtgataagtatgagcctgcagctgtttca

SEQ ID NO: 162287 - DNA, 50 bp, Homo sapiens
ttcatcgacatcagtgaagaagatcagaacatacggtccctaatgagcac

SEQ ID NO: 162288 - DNA, 100 bp, Homo sapiens
ctgcagctgcgatctctgtggtaggcccagactctgatgccagtatggactggagatgatgggagccagttggatagccccatggaaatccccaaagagc

SEQ ID NO: 162289 - DNA, 75 bp, Homo sapiens
aaaccagtgtgcaaacatggactgctaaggaagaagaagaaacattcatggtgtctcaagagaaaaaatccaccg

SEQ ID NO: 162290 - DNA, 100 bp, Homo sapiens
tgaggatgtaagtgcgtttgaaggcttccacaccctctactccagggtgggtgaggcagtcttggaaaatgcccggctcatgctgcagacagaaactatc

SEQ ID NO: 162291 - DNA, 90 bp, Homo sapiens
ggaagttcaggaaacatccaagaaaaatgtccttaaagcaattgagcaggctgatctactgcaggaggactacactttgttatatgaaga

SEQ ID NO: 162292 - DNA, 97 bp, Homo sapiens
ccgccgcttgtgctgcagccatgggtccccagccccaccccagccccaaaggaggctgttcgagagggacgtcctccggagccaaccccagccaaac

SEQ ID NO: 162293 - DNA, 76 bp, Homo sapiens
caggtgatggataggagcaaccctgtaaaaccagccttagactatttttcaaacaaatgtgacagtgatgataaca

SEQ ID NO: 162294 - DNA, 80 bp, Homo sapiens
gctggcagccgcggatctcaccgccgctcagggcgacgttgtggacgtttaccagcgggagttcctggcgctgcgcgatc

SEQ ID NO: 162295 - DNA, 100 bp, Homo sapiens
gtgttttccaggagtgtctcacttatgatggagaaatgggtgttgttatgtccaaagccatcttgccatgcgcagcctgagaatggagccaatgactgag

SEQ ID NO: 162296 - DNA, 75 bp, Homo sapiens
aagcagctgaaaatgatagactaaagtttagcgcggagtcgcggcgggtagggcggcgtcgcgtgcgtgacgtca

SEQ ID NO: 162297 - DNA, 98 bp, Homo sapiens
ccagatgagtatttcacctgctcctccttgtgcctcagctgtggattttccgcagatttccagtggccccactgatcccttatccactcatcactaag

SEQ ID NO: 162298 - DNA, 100 bp, Homo sapiens
cagaactggatggtacctgactttcttcatagacccatcttctgctgggactgaagctgacctccaacagaagccagatcacagaactgtgtggtgcaaa

SEQ ID NO: 162299 - DNA, 86 bp, Homo sapiens
tctttctcaacccagagcaaattgagacgtccggttatccaagcattaggtgaacatcttaaattaagacaacaagttattgccac

SEQ ID NO: 162300 - DNA, 49 bp, Homo sapiens
agcacatccatttcattggcaagattgtagaaggcatgaaacaaaaaat

SEQ ID NO: 162301 - DNA, 50 bp, Homo sapiens
cccagatatagccgttggtacaaagccggcacagtcttcactaccgtaga

SEQ ID NO: 162302 - DNA, 100 bp, Homo sapiens
agaagaagcagcagatgggcaaagagtaccgtgagaagatagaggcagaactgcaggacatctgcaatgatgttctggttagctccattcagaaccaaat

SEQ ID NO: 162303 - DNA, 75 bp, Homo sapiens
acatacctcctttttctcatagtcttgtgcatctgtaagaatgattgatgttggctgatattggagtgctcattc

SEQ ID NO: 162304 - DNA, 50 bp, Homo sapiens
accatgaagatcagccactgggatgggtatttttactgattgggaaggaa

SEQ ID NO: 162305 - DNA, 82 bp, Homo sapiens
ggtcacggaggtagtcatgatctatgacgccgagaagcagaggccccgaggtttttagaacttcagccataaaaatgggcag

SEQ ID NO: 162306 - DNA, 97 bp, Homo sapiens
gagcagggctgagatgggcaccgcggatctggggccgtcctcagggagtgcatccgccccaacccttttccccctcgtctcctgtgagaattccccg

SEQ ID NO: 162307 - DNA, 90 bp, Homo sapiens
gcgccgtttcttaagccggtctgaaaagcgcaatattcgggtggaagtgacccgattttccaggagtgagtccgtgctgctgcacatgcc

SEQ ID NO: 162308 - DNA, 100 bp, Homo sapiens
acgaaaaaacttccagaacatctgggagaatatttaatggaaaatcgcttggttaaaacctgacacttttaacaggtccagtccaggtgcagcagcaagg

SEQ ID NO: 162309 - DNA, 82 bp, Homo sapiens
ctccattactggaacagattcctctgtggaagccagggagaagaggaggtcagcccaaggccaaccccactgtcactctgtt

SEQ ID NO: 162310 - DNA, 75 bp, Homo sapiens
gagtcctcaggacaggaagtacaacagcccgcccacacagaaatcaatgtggactgaacataaatcacctgatgg

SEQ ID NO: 162311 - DNA, 76 bp, Homo sapiens
gtaaggccaaaaatgtgcatactcacagagttagagagagggatggtggaagaggagttgtacgcatgtcagagag

SEQ ID NO: 162312 - DNA, 75 bp, Homo sapiens
tcaaactgactttgcagccacggagagggacctcccgaattccctggtaacagtgttcattctcttcaccttgga

SEQ ID NO: 162313 - DNA, 90 bp, Homo sapiens
gtcattccagcaccaacaggatccaagtgaccaagaatatggcccaggtgaccaaagccctggacaaggccctgagcaccatggacctgc

SEQ ID NO: 162314 - DNA, 75 bp, Homo sapiens
cgcatcaacaagatgttgtcctgtgctggggctgacaggatggcacatttcctagaggcagaatcctacaacttc

SEQ ID NO: 162315 - DNA, 108 bp, Homo sapiens
tccttctccactttcgccagcccgtgccgcgagcgcggcctgcaggaggtgtccttaagtttgctcgcttggtcaagtcctacgaagcccaggatcctgagatcgcca

SEQ ID NO: 162316 - DNA, 82 bp, Homo sapiens
gatattgaaatggacagtggagatgaagcctaagaatatgatcaggatgcctttgtggaactgtacggccccagcatgcggc

SEQ ID NO: 162317 - DNA, 100 bp, Homo sapiens
caggacttgagtaacagcaacatggttccagttacagccatcccttgtcataacttttgaactgtatttggaaaaatactggccaggaaagaaaaatgat

SEQ ID NO: 162318 - DNA, 90 bp, Homo sapiens
gctgcgggagcgagagtgcgtgtggcggccgccgggtcctggcatgtggagagggccaaatgtgaactgtgttgacagcactggctacac

SEQ ID NO: 162319 - DNA, 100 bp, Homo sapiens
gccgattacccacttcgagtcctttattgtggagcttggagagggtctgggagtgaaggagacaccccagcaaaagtaccagcgcctactgcatgaggtc

SEQ ID NO: 162320 - DNA, 82 bp, Homo sapiens
atgcctgcagagctgtggcttaccagatcattgagaagcagccaggccacattcggagcagggttttcagggaggtggagat

SEQ ID NO: 162321 - DNA, 82 bp, Homo sapiens
ctcgacctgctctataaagcctatgggatgccaccttcagcctctgcagattgtccagaacatcgtgggcacagctctgatg

SEQ ID NO: 162322 - DNA, 82 bp, Homo sapiens
ggagtaccctgttcctggcagtggctgaggagtgggcccagggcaccttcaaactgaactccaatgatgaggacatccacac

SEQ ID NO: 162323 - DNA, 100 bp, Homo sapiens
tgacgaatatcaatattttctctcttctttggtcagcaatgtcagccttgataaattgcacactgcactttctgagttatgcttctctataaattatgta

SEQ ID NO: 162324 - DNA, 100 bp, Homo sapiens
ccgagttcaacatcctcctggccaccgactcctacaagggttttggccaaattgggcgagggcacaaaataaccacttaccccttctcaccgaggaagag

SEQ ID NO: 162325 - DNA, 50 bp, Homo sapiens
gcctagagtggttcagccacaaggaggtcaaaatgcagatcttcgtgaaa

SEQ ID NO: 162326 - DNA, 98 bp, Homo sapiens
attggaaggaggagattctgaagataaggagagatcttcgctttaacagaatcagagagatccaacctggggcattcaggcggctgaggaacttgaac

SEQ ID NO: 162327 - DNA, 106 bp, Homo sapiens
ggtcaatttgtacctgcaggcctcctacacctacctctctctgtgtactaatggtcacttgatgtgcgctggctgttttatccacctactagcagatgcccggctg

SEQ ID NO: 162328 - DNA, 82 bp, Homo sapiens
ttccaagaatacgacaaccacatcaagagcagcgtggtgggcagtgagcggaagcgagtgaccagcgccatgtccagccagg

SEQ ID NO: 162329 - DNA, 100 bp, Homo sapiens
cgtttacagccaggtgaggaagtggagatagctgagctcactacagatccagctccaggtcccacaggggctcttcttccccacgaaaaagatcttattc

SEQ ID NO: 162330 - DNA, 98 bp, Homo sapiens
gctcacatggtgtctgggcccttggcactctgggtgtgggccgaagatatgctcatgtggtgttgaggaaagcagacattgacctcaccaagagggcg

SEQ ID NO: 162331 - DNA, 82 bp, Homo sapiens
ggccaggccgtgcgccggcctttggtcgcctccgtgggcctcaatgggactggtgattgcagctggaagtgcccatgaccga

SEQ ID NO: 162332 - DNA, 75 bp, Homo sapiens
gtcccagagacaacgagatgaactgacagccagtacccatggagccagagagtgagctttgccaaggacatcgca

SEQ ID NO: 162333 - DNA, 75 bp, Homo sapiens
tggctgaggaaggggaagattaagtaagagggagcactatgtctgcggaagtccccgaggcagcctccgcggagg

SEQ ID NO: 162334 - DNA, 100 bp, Homo sapiens
cagcaggctgctcctacagatcctgacttaccaccaggtacaggtttgcagattccgccagcagcacagcaagctctacagatgagtggctctttggcat

SEQ ID NO: 162335 - DNA, 80 bp, Homo sapiens
aacttccaaacatctacaactcctcaggtctcgtctacagaggactggtctttcaatagcaagttttcacttcatcgaca

SEQ ID NO: 162336 - DNA, 75 bp, Homo sapiens
ctccgctcccctgtctacgacatcaggtggcagtgctccttttggacttttctctaggtttggcgctaaactctt

SEQ ID NO: 162337 - DNA, 100 bp, Homo sapiens
cacgaggcggcgggctggagacatggaccgcggcgagcaagattatggtgacaagctgaacatggagctgagtgagaaatacaagctggacaaagagagc

SEQ ID NO: 162338 - DNA, 80 bp, Homo sapiens
gttccatctgtggaaggacctaccaaccagtaacaatttggacaagacagcaaatgctattgtcgaagttttctaaagaa

SEQ ID NO: 162339 - DNA, 100 bp, Homo sapiens
tctgaagagactataaagcttctgaaaggtcatgcgcatcgtggataatgttcgtcctgatcgacagacggttatgttttcagctactttccccagagct

SEQ ID NO: 162340 - DNA, 75 bp, Homo sapiens
cagggatgataattgggcctccaagaagagctcagaaatatgctcagcaagtcttgcagaaggaatgtcgtccca

SEQ ID NO: 162341 - DNA, 90 bp, Homo sapiens
gactccatgagaaaacagcagaacgccagctttgcagttttgctacttgagaagatagaacatgatgacatctgcaataaaactttgaag

SEQ ID NO: 162342 - DNA, 82 bp, Homo sapiens
taattgaatcaagctgcaaagtaactaggtttgaagttgatcagctccagggtttgagaaattcagtccgaatggaacttca

SEQ ID NO: 162343 - DNA, 75 bp, Homo sapiens
aaactggacaaccaacggctcaagaatttcaagaacaaaggccgcgacttggagtttctaataagtgaccgtgac

SEQ ID NO: 162344 - DNA, 95 bp, Homo sapiens
atgcagaaaccaacagacaatgccaatttacgtgtcattatggaactacttatgagtctaacgggatcgcagccatcattgttattttggtgtta

SEQ ID NO: 162345 - DNA, 74 bp, Homo sapiens
tttataaaactgaagcaccaacttgggagacacatggaaatctcatggcccagatgatcttcctcaactgtggc

SEQ ID NO: 162346 - DNA, 100 bp, Homo sapiens
gcgaatatcgtcatcgttagaagggatgaattgtaaaagcaacatcagcttgaccagtataaaattacagtggattgctcatctcagtcctcaaagcttt

SEQ ID NO: 162347 - DNA, 101 bp, Homo sapiens
gacgaggtcctcaagctgctgcaccgcggcgccgacatcaattacgccaatgtggacggactcactgccctgcaccaggttttgaaagagggaaggaagat

SEQ ID NO: 162348 - DNA, 101 bp, Homo sapiens
ctaagagaaacttggcgaaaggcaaaggtcctactgctctgttggctcatgaaataggttttggaagtaaagttacaacacaccctcttgctaaagacaaa

SEQ ID NO: 162349 - DNA, 75 bp, Homo sapiens
gtttatggaatcacaataatttcaggctgcacaaatatgccagctacctttggacatttggcagggggatacgat

SEQ ID NO: 162350 - DNA, 75 bp, Homo sapiens
cgctggcgtcaggactattttcacgttttaatgccgagaggcgttcgtggcattcagggatgtggctgtgtactt

SEQ ID NO: 162351 - DNA, 75 bp, Homo sapiens
aggcagcaaaggtggctgctaatgcaccaaagggagaaaactggttgtcctggatgtttgaaaagttggtcgttg

SEQ ID NO: 162352 - DNA, 75 bp, Homo sapiens
tccagcgattggttcaaatccacgttgatacaatgaaggtatgtgaggagcagcgctgtgaggaggaagtcttcc

SEQ ID NO: 162353 - DNA, 100 bp, Homo sapiens
ggctgaaagagttgccgcagagagacgggaaaggattggtcaaacaattggttatcagatccgattagaaagcagcaatttcctgctgcagagagcattt

SEQ ID NO: 162354 - DNA, 82 bp, Homo sapiens
acactgagacccggaatcagttccttgatgagctcatggaggtgtgatccctcacatccacaaatctctgattggaaagaag

SEQ ID NO: 162355 - DNA, 85 bp, Homo sapiens
tgatttaaaagctgaaaatttacttctggatgccaatctgaatatcaaaatagcagctcggcttattccaggggtgtgtttcgtc

SEQ ID NO: 162356 - DNA, 101 bp, Homo sapiens
ggaagattagttggaatttttgaggaagagagaagggcacagttacctaagtatcaacgtaatcttcctcggccaggacaggcccccatcggtaatccacc

SEQ ID NO: 162357 - DNA, 82 bp, Homo sapiens
ggaaaatccgccgccaggcgctgtccccgacacgggtgaagatagtgatccggggagacaggaacacgggcaagacagcgct

SEQ ID NO: 162358 - DNA, 110 bp, Homo sapiens
ggaaaatgggttccatgagaagtgacatcctcctcgaatcaaaagggtgttttgaatgctgtatcaaatgcctggggggcattccctatgcctctctgattgccaccatc

SEQ ID NO: 162359 - DNA, 90 bp, Homo sapiens
aaaggtgggcaacctagaaagccagttgatgccacttgctattggagttgtggggtgacccagagaagacagctaaagtggaatgtgggg

SEQ ID NO: 162360 - DNA, 83 bp, Homo sapiens
cagttgtccagttcatccctgagccttgagctcccagtcgcagaaggtgcttcctggaggggcctgccccactgttcctgtgc

SEQ ID NO: 162361 - DNA, 100 bp, Homo sapiens
ccgggagatcccaggcggtgacagagtggagccatggctagaggagccttcacgtaaatgggtccagtcatgcctcccagtaagaagccagaaagctcag

SEQ ID NO: 162362 - DNA, 90 bp, Homo sapiens
gccagtcgcctccaggccaagagggatccttcacccgtgtctgtggacgcggatgtcctcctggaggcctgctgtgcggacggacaccgg

SEQ ID NO: 162363 - DNA, 100 bp, Homo sapiens
ggccgacggagcgcggcaggacttggctggacggcgcggccacggagaagggcgcgcaattctgtggtgttcttggtcacacatttatggagtttctgaa

SEQ ID NO: 162364 - DNA, 75 bp, Homo sapiens
gaggatcactcgagcccagaagatcaagactagtgtgagcaacaaacactatcctgaggagcgacatgtggttga

SEQ ID NO: 162365 - DNA, 101 bp, Homo sapiens
agtcctgttccaccttcagagcgtcacggcgtacgccctcatggggaaaatctccccggtgactttcagcccatcgccgaagcaccattcaagttcgacat

SEQ ID NO: 162366 - DNA, 75 bp, Homo sapiens
gctttttctaagaagagatgtgagacttcccttggaagttgaaaaacaggctgacaaaccaagaggatttgccag

SEQ ID NO: 162367 - DNA, 100 bp, Homo sapiens
attttttgttgtgtctggcccagctgcacacgacctgttccatgctgtcatgggccgtacactcagcatgaccctgcatctacacgggcgacagcttcgt

SEQ ID NO: 162368 - DNA, 95 bp, Homo sapiens
gacggcgggtcggcacacggggtgttcctgctaaacagcaatgccatggcctgcagcgtgctctacttgacctcagtggagacagagtcactgac

SEQ ID NO: 162369 - DNA, 100 bp, Homo sapiens
accaaacaccctcagctccacattgagagcaaaatctacaagatgatgcagggaggaggccaagaagacgctggagggaggctgttaggagggactctga

SEQ ID NO: 162370 - DNA, 87 bp, Homo sapiens
atgaggatgatgatgaaatcaccccggatttgtggcaagaagcatgctggattgtaatcaggagaacgcccatataaatgtgaactt

SEQ ID NO: 162371 - DNA, 75 bp, Homo sapiens
tttgaaccaaattatgctgcaaatgagccaagttacaccctgtttaaccctgccttcaaagggacgactctgtaa

SEQ ID NO: 162372 - DNA, 101 bp, Homo sapiens
ctgatgatgaactaatgactgaaggtgaagaccagtttgatgatcctgataacttaagtgactctctcttttccggtgatgaagaaaatgctgggactgag

SEQ ID NO: 162373 - DNA, 100 bp, Homo sapiens
cgggtactgacacttcccctgcaagcccaccacgccatggagaagatggaagagtttgtgtacaagaaaaatggctttgaacagttttgtatcaattttg

SEQ ID NO: 162374 - DNA, 60 bp, Homo sapiens
gccaaagccccaagtgccgcagacttgtctgagattagccctggaaaccaacaggtataa

SEQ ID NO: 162375 - DNA, 98 bp, Homo sapiens
aggccctgctgcacgacctcagctcccagaggatcaccagcgtggacttaattcagtgcacaaatgagatgaatgtgaacatcccacagttggcagac

SEQ ID NO: 162376 - DNA, 101 bp, Homo sapiens
gggcaagagaccgactggcggagcaccgccttccggcagaagctggtcagtcaaatggtcccagggctggtggttgctttgggtctacagctacgtcttac

SEQ ID NO: 162377 - DNA, 96 bp, Homo sapiens
ctcggtgaaatcctgtcctgaagactgtaaggtttacctgaagaagatggatactcacggttgtctataagtggcacagggacttcgacatttcaa

SEQ ID NO: 162378 - DNA, 74 bp, Homo sapiens
agctcctactcctccctcaactccctcatcggaacaagatcactcaaggtgaaggataatctactaataccagc

SEQ ID NO: 162379 - DNA, 96 bp, Homo sapiens
agaaattgcttatggaacattagactctggctccactaaagagtttttcagggaggagatgttaaagtaacccatcttgcaggacgacattgaaga

SEQ ID NO: 162380 - DNA, 50 bp, Homo sapiens
cgtctggtacagcagcttaagcagcagaattcaattcgtcataatctgtc

SEQ ID NO: 162381 - DNA, 90 bp, Homo sapiens
ggatttgttaaggattccaagtaactcttatttggtatggatggcagaacagaaaatatcatatgataagaagaaacaagaagaattgat

SEQ ID NO: 162382 - DNA, 75 bp, Homo sapiens
ccagcagcaacagaatccgcaagtttatgtgtctcagtctgcagcagcttcttggacacttaatgattgttggca

SEQ ID NO: 162383 - DNA, 75 bp, Homo sapiens
aaccggacagtcatcaccatgggccgggatcacattctgattataagtaatggaacatcatctgtgatcgtctcc

SEQ ID NO: 162384 - DNA, 90 bp, Homo sapiens
gagacatttgctacagcatcccacattaagtcaacggaatccctttgcccacgtccagctgaagccgacagtgaccaacgacaggtctgc

SEQ ID NO: 162385 - DNA, 131 bp, Homo sapiens
ccacaaccgccctcctggacaaggtggccgacaacctggccatccagcttgctattggtgctgaagacatggacggcttccaggcagacacggaggaggaggaagaggaggagggcgactgtatgatcgtg

SEQ ID NO: 162386 - DNA, 75 bp, Homo sapiens
ccggttcgcgtctctctgctgcggcgcggggaccgctgtgctctcggtgtctcccagtctgctaaagccctaagg

SEQ ID NO: 162387 - DNA, 82 bp, Homo sapiens
ccaatgccaccgcccccacctcccggggtttccaggcctgaggtgcccgccctggccccaggagaatgaaccagccgcagag

SEQ ID NO: 162388 - DNA, 83 bp, Homo sapiens
ggaagaatatattttgacaattatcggcgctgtgtcagcagaaatcaatgtggactgaacataaatcacctgatggaaggact

SEQ ID NO: 162389 - DNA, 90 bp, Homo sapiens
cttctatgacggagaatccgtttcaggaaagccaaagcctgctggagtactaggtgcagtaaataagcctttatcagcaacgggaaggaa

SEQ ID NO: 162390 - DNA, 74 bp, Homo sapiens
ctggtatgccagatgagaatgacaggtgaaaggtgtagcagtcactcggcctacacccacagcatcgaccttgt

SEQ ID NO: 162391 - DNA, 98 bp, Homo sapiens
aactcgtcatgctctttgtagcgtggtgcttctgttgctcacagccggaagaattaacctcgagtctgcacgcttttaagaacaaggcctttaaaaaa

SEQ ID NO: 162392 - DNA, 100 bp, Homo sapiens
gggaaccctggtcaccgtctcctcaggtgcaatggatgagcttcatagtctggatccaagaaggcaagagttattggaagctagatttactggagttgca

SEQ ID NO: 162393 - DNA, 51 bp, Homo sapiens
actgcaccggaaatgtgcctaccagcgggtaccatcgaatgcttcatggga

SEQ ID NO: 162394 - DNA, 80 bp, Homo sapiens
cccgtcccgaccctggccgccccgagcggagcctggaggcaccgtctgcgtcctgctgtccttccccttcatcttcagcc

SEQ ID NO: 162395 - DNA, 75 bp, Homo sapiens
gcgccgagtgggaggatggcggaaggtttccaggcctgaggtgcccgccctggccccaggagaatgaaccagccg

SEQ ID NO: 162396 - DNA, 82 bp, Homo sapiens
ccattttcctcggtgggggcttagcgcactggaggagcggcgggcttcagacagatttggtgcttccagatgtgagttatca

SEQ ID NO: 162397 - DNA, 100 bp, Homo sapiens
gatccagactcctttacatgatagtcttcctatcacgggcactagtgtggctctcctgttccagcaattgggaagaaggtagataatgactataatgccc

SEQ ID NO: 162398 - DNA, 99 bp, Homo sapiens
ctccgcgcaaaggatacaacatctatttccaggcgatgagcagtgtggagaaggtccatctgaactgtttactgtttgttcatcgattagcagaagagt

SEQ ID NO: 162399 - DNA, 90 bp, Homo sapiens
ggcagacgctgtgctcgctggcaccccgaacgggttgcttcccccgctgcgaggtctcggcgcggaagatggccggcggcgtggacggcc

SEQ ID NO: 162400 - DNA, 90 bp, Homo sapiens
aggcggcggaggcagcaccgaggaagcatttatgaccttctacagtgaggtatctccctgggataaaaaagaagaagctaaccagaaaaa

SEQ ID NO: 162401 - DNA, 101 bp, Homo sapiens
cctagcaatccatggaatggagacattaaagggggaaacgaagaagctagactcagatcaggtggacattgaagtggacctaattcggttttccttttaaa

SEQ ID NO: 162402 - DNA, 76 bp, Homo sapiens
tgaatgggccaaggaaaaatcgagcagaaagaatgtctttcagcaacatggccaacgccctggccagcgccacttg

SEQ ID NO: 162403 - DNA, 99 bp, Homo sapiens
gaacgaaagcagtgacggaggagcttgtaccaccgattcttcagcttgtctctaaccgaggaagcattgattgggagctactcattcagaaaattaaaa

SEQ ID NO: 162404 - DNA, 100 bp, Homo sapiens
ggccccgggccccgatggccccgaccgcgtgctggagctcttcgacccacccaaggaccttcgtggggatccaggcctctgaggcctccaggatggagga

SEQ ID NO: 162405 - DNA, 75 bp, Homo sapiens
cagcagcccaccagggagctcctgcaggtgaaggtgctaaaggagaagatagaagctgagaagggtcgtgatgcc

SEQ ID NO: 162406 - DNA, 83 bp, Homo sapiens
ctgatctattattttcaatagaaacagatatacagatgtggagaagggttctctataaaggtgtcttaaaaaggttgattttg

SEQ ID NO: 162407 - DNA, 50 bp, Homo sapiens
cttgactggagcacgacccaaggtggggcaggagaccctgtaggaggacc

SEQ ID NO: 162408 - DNA, 117 bp, Homo sapiens
acctccattggatttaaaagacagtcctcgtcagcactgactttcagctatggaatcgtgtaaacaggaacatcgataagtagtgtaaaaacttgcacaatgaaatccgaagccaag

SEQ ID NO: 162409 - DNA, 75 bp, Homo sapiens
tacctgttgacgtgtcaagcactaactactgaaactgttgaggagcccatggaggaagaagaagcagccaaagaa

SEQ ID NO: 162410 - DNA, 100 bp, Homo sapiens
accggcgccatgtccagcgctcggacccccctacccacgctgaacgagagggacacggagcagcctcccctggtgaagacacaaactgtcaccatctcag

SEQ ID NO: 162411 - DNA, 75 bp, Homo sapiens
gcagtcagaaggggaacggatctgtgtgcccacagctcctggagccccacagctgctacaggagctgagagaccc

SEQ ID NO: 162412 - DNA, 100 bp, Homo sapiens
cggggggcggccattcaggatggccgacttaaggcaggagacagacttatagaggtggtgttatcaaggagaagaaattcctgccttgaccagatgtgtg

SEQ ID NO: 162413 - DNA, 100 bp, Homo sapiens
gtcgcctttgctactaccgcgactggctgctgcggcgcgaggtgaccttgaggaaccctgggagctcaggaaggaaggagcgcccagaagcagggacagg

SEQ ID NO: 162414 - DNA, 90 bp, Homo sapiens
gggcgttcatctaccacgctttcgtattgcaaatagaagagtcttccaaaccagtgaggctatcacaacagctggacaaagttgtaacaa

SEQ ID NO: 162415 - DNA, 74 bp, Homo sapiens
cgaaggcgtcggaaaacatcagcctcgtcagcctctgcctctaattcctccagctcaccatggatgatgatatc

SEQ ID NO: 162416 - DNA, 100 bp, Homo sapiens
gtcagtgttgtgtggaagccagaacatcgttctcaatggcaagggcagtcagggcgacagcaagaatgccaagaagaagaacaacaagaaaaccaacaag

SEQ ID NO: 162417 - DNA, 100 bp, Homo sapiens
gcaggcttcatcatgtcctgaataccatgccttagcattttatgcgctttgacttccgtccaaaacctgatccttattgtcaagctaagtatactttctg

SEQ ID NO: 162418 - DNA, 87 bp, Homo sapiens
agaatcctgctttgaactgacctcccaggataggcgcagctatgagagagagcaggagattcggatgggtcagatggctatgggagg

SEQ ID NO: 162419 - DNA, 101 bp, Homo sapiens
ggttaatgaaggagaaatcatcacaatcacaaatccgatccaaaaggaaagtcctcggccgtagagattcagatgatgaccactcccgaaaccattctccc

SEQ ID NO: 162420 - DNA, 75 bp, Homo sapiens
catccacagggcctcctgccagccccagcccctggagaggatgcagtacgaattggagcaatgttggcttataca

SEQ ID NO: 162421 - DNA, 83 bp, Homo sapiens
cgtcctcaagcagctggagcgggtcaagggtctcgctctgttactcaggctggagtgcagtggcacactgcagcctcaacctc

SEQ ID NO: 162422 - DNA, 83 bp, Homo sapiens
agcaggactgcgccgcgtcttcctcaaggcataatcaccagcaacacccgggacaataatacgggggccacctacccccacct

SEQ ID NO: 162423 - DNA, 75 bp, Homo sapiens
accagggagccctacagcgtctcttcaaaaagtctcttcaagaaaatgaggaggaggagattgggaacctagagc

SEQ ID NO: 162424 - DNA, 83 bp, Homo sapiens
ggcggcctgcgcagccacctcaagctggtggttaagcgtctgggatatgacacccgggttactgtcttggggcatgtgcagag

SEQ ID NO: 162425 - DNA, 101 bp, Homo sapiens
aggagctgtggataacgggaggtgaatttccatgtcaacatagtcctgggacacttggcattcagggacgtggccatagaattccctcaggaggagtggaa

SEQ ID NO: 162426 - DNA, 99 bp, Homo sapiens
cagccctggatggtgaatttcagtcagcctcagaggttgacttctacattgataaggacggcatcagaattaatgtaactacactgaaagatgatgggg

SEQ ID NO: 162427 - DNA, 75 bp, Homo sapiens
gggagattcttttgccagacattactacttcctaggcagaatgcttggaaagattactttctatgaagacaaaaa

SEQ ID NO: 162428 - DNA, 147 bp, Homo sapiens
cactttctgggcacgtgaggttgggccttggccgcctgagcccttgagttggtcacttgaaccttgggaatattgagggaggaaataatgctggccatacagttgttgtggattctgtggaatatgattttcatctcttacccagtg

SEQ ID NO: 162429 - DNA, 75 bp, Homo sapiens
aactggaatatttagcaaggattcaaggctttcaggctggagcattggatttgctaaaggagcttaagaatattc

SEQ ID NO: 162430 - DNA, 89 bp, Homo sapiens
cggaggaacccggactccggcgtagcgctttctgaggaagagaaaattcagcgctacagcatcctctccgagctctatgagctgatcgg

SEQ ID NO: 162431 - DNA, 100 bp, Homo sapiens
aaaacatggtcaacgtcttgaaaggagtgcttatagaatgccattcatcggaacagcccccgtcctatgaaggtacctcgatgccatagtgaccctccta

SEQ ID NO: 162432 - DNA, 75 bp, Homo sapiens
ttcgccgtgtgaattcctttcagaagacccttttgaggacttctttgggaatcgaaggggtccccgaggaagcag

SEQ ID NO: 162433 - DNA, 103 bp, Homo sapiens
ccgggacccggtgtctgctcctgtcgccttcgcctcctaatccctagccactatggtggaagttaaacgagctgagcctcgggacagcaagagccaagcgccg

SEQ ID NO: 162434 - DNA, 50 bp, Homo sapiens
caggaagtggatgcctccatttttaaggttcacgtacggccacgcgggca

SEQ ID NO: 162435 - DNA, 100 bp, Homo sapiens
cggggacttctcctccttccgtgccctcctagagccggagctgcggcccgaggaccgtatccttgtgctagatatggtttggagtgcctttttcgatact

SEQ ID NO: 162436 - DNA, 75 bp, Homo sapiens
ctcccctctcaggacaacccagatgtgcaacaaagtgcgatggatgggagtcccagcttctggagacggggttcc

SEQ ID NO: 162437 - DNA, 100 bp, Homo sapiens
ctggacatatacgctgggttggacagtgctgtttctgggtctgacatacctgaagtgatgctggatttcattgactggctgacccaccaagagtttggca

SEQ ID NO: 162438 - DNA, 73 bp, Homo sapiens
tctgctgacacataaacacttcaatgcacacctcaaaatcgctgggaagaaggagaaagggccaacccctgaa

SEQ ID NO: 162439 - DNA, 100 bp, Homo sapiens
gtgaccgagaccgtgaccgagagcgtgaccgagagcgcgaatatcgtcatcgttagaaggactcgctgattcttgagaagagtcaaaactggagctctca

SEQ ID NO: 162440 - DNA, 101 bp, Homo sapiens
atcctgggttgacaattctacacaaggagcacccttacccttctgaagaacagaaaaagcagttggcacaagacacgggactcaccatccttcaagtgaac

SEQ ID NO: 162441 - DNA, 75 bp, Homo sapiens
gcaagattagtggctgctaaacttgaaccgaaaagtgatggtggcctgcgttttggagaaatggaacgagattgt

SEQ ID NO: 162442 - DNA, 50 bp, Homo sapiens
ctacgcctggttacccaagtgtcggtttcttgagtacaggcgatcaggct

SEQ ID NO: 162443 - DNA, 92 bp, Homo sapiens
atcaatacaaaatgggcagccacacgatgggccaagaagattgaagccagagaaaggaaaagccaggactctatttgaaaaaaatgctgccc

SEQ ID NO: 162444 - DNA, 50 bp, Homo sapiens
caaccttccagccccttttgaaaggtcttattagtaggtaagaaacagct

SEQ ID NO: 162445 - DNA, 100 bp, Homo sapiens
tgtggcagacatcggcctccatgacctgcgctctcagctgaccatcatcccgcaggaggaatttggctacaatgcagagacacagaaactactatgcaag

SEQ ID NO: 162446 - DNA, 82 bp, Homo sapiens
cgcttctttcggttctacctgggagaatccaccgccatccgccaccatgagtggtggacatgacaacagagtcaactgcata

SEQ ID NO: 162447 - DNA, 101 bp, Homo sapiens
agttacagatttttgttatcttctggataaatctaagcaactgttcaatgggttaagcgatgaaatctacattgctccttcaggagtgcaaaaggaacgaa

SEQ ID NO: 162448 - DNA, 82 bp, Homo sapiens
cagcatctgtgtggtgcaggacgggcggctggaggtctgcatccaggacactacaatgcagatcttcgtgaagactctgact

SEQ ID NO: 162449 - DNA, 90 bp, Homo sapiens
gtagtaagaactcctacatcaaactctccttcaaagaacatggccagattgaggttggatggcaagcatgtggtgtttggcaaagtgaaa

SEQ ID NO: 162450 - DNA, 51 bp, Homo sapiens
gatatcgaggtggatggaaagcaggaagagagaagggcacagttacctaag

SEQ ID NO: 162451 - DNA, 50 bp, Homo sapiens
ttgctggtcagcaacctcaacccagagggacagggtttcaccatgttggc

SEQ ID NO: 162452 - DNA, 90 bp, Homo sapiens
ccgccgccggggacatgtctaaccccggaggccggaggaacgggcccgtcaagctgcgcctgacaggcagcccttggctggtccctgcga

SEQ ID NO: 162453 - DNA, 100 bp, Homo sapiens
ttttagaggcatctgttctatcttcccatcataaaaaacttagcagtgtctgcaaaaacgaatcttttcctacaacctgttaactgactggactgttggt

SEQ ID NO: 162454 - DNA, 98 bp, Homo sapiens
tcccagggcatatgtctgcacgctgaggccgaggcggagaaggggcttcctgagcgtcccagtacactgacagaggtgtcatagagacgtcagatcga

SEQ ID NO: 162455 - DNA, 100 bp, Homo sapiens
cctcaatgtccggaggaaccagctcagtacgctgcccgaagaggacgtctttgatgaattatttaagctggctccggagaaagtgaacgcagtgaaagag

SEQ ID NO: 162456 - DNA, 100 bp, Homo sapiens
ctgaggagctggcattggagcaagccaagaaagaatccgaagatcagaaacgagttcttggagtctctgcggagtccctgggccagatctcacagtgaaa

SEQ ID NO: 162457 - DNA, 135 bp, Homo sapiens
acttgatcaggctctgccctgtctgacagaactcattctcaccaataatagtctcgtggaactggctgtgtttgatgtggacaagaagaaagggttgactctgattgagctctgggaaggcctgacagtggatga

SEQ ID NO: 162458 - DNA, 101 bp, Homo sapiens
gtgcgggagagcctggctgagctggagctggagctgtcggaaggtatagacacgtgtggccgtttacgctgtaggatcctcattcccactggctttgaaca

SEQ ID NO: 162459 - DNA, 83 bp, Homo sapiens
cctggattggctagtggtataattacaggtgtggggatattcagctttgccaggtatggcagtgatttttatagcatgcacta

SEQ ID NO: 162460 - DNA, 74 bp, Homo sapiens
agtgccgagcaattgtgatgagatattctgctgagtggaagaatttagcttgggttaaatcatataacatctgc

SEQ ID NO: 162461 - DNA, 100 bp, Homo sapiens
gtgaatggaaggtagcaagacgcctctccaaagcagcccttctgcgcaggagctgaaagctccactggggactgttgacatttagggatgtggccataga

SEQ ID NO: 162462 - DNA, 51 bp, Homo sapiens
gcctcctgagtagctgagactacaggtatccatcatcccacgtggcaaagg

SEQ ID NO: 162463 - DNA, 83 bp, Homo sapiens
ggaagagccagattcctgcatcagctgcttttctaacccaaactgtatgtcttgatgacactacagtaaagtttgaaatatgg

SEQ ID NO: 162464 - DNA, 100 bp, Homo sapiens
aatactccttccttcctccccacccattcctttaaatccggagggggaaaaaatcccaaggtctgcaaaggacagtggtgattatcctcttaccatgcct

SEQ ID NO: 162465 - DNA, 100 bp, Homo sapiens
ctctgatttgctgtcagccatgaacggatggatgtgatgcctgctagccaaaagggaagttggtgaaccatctaaagaagagaaggctgtggccaagtat

SEQ ID NO: 162466 - DNA, 88 bp, Homo sapiens
gtctgacccctccgacttccgggagtaccctgacttctaccggaagctctacggcctcttggacccctctgtctttcacgtcaagtac

SEQ ID NO: 162467 - DNA, 101 bp, Homo sapiens
cgggaggctcccgggcttgcgtggcgggtcacagaaagtcgagagagccaaatgacgattgaggagaggaagcagctcatcactgtgagagaggaggcctg

SEQ ID NO: 162468 - DNA, 97 bp, Homo sapiens
ttaacatcaaggcctgtggaaaccactttggaaaataatgaaggaactgaaatacgacgttggtggaggagaacggtttgattctttgacagatctt

SEQ ID NO: 162469 - DNA, 75 bp, Homo sapiens
ctggatttccaaggaagaatttcctctgaagcaccgctctggccctgccccatctcccagtagcttcctgcccag

SEQ ID NO: 162470 - DNA, 82 bp, Homo sapiens
acccactcagggcaaccccctgccacctcagatatttaatggcgaccgatactgtggaatgctctacccatggtaccccagg

SEQ ID NO: 162471 - DNA, 100 bp, Homo sapiens
gacatgaagaattggtatttcaaatgaccaccatgttgcaaaagtgttttccaagcagtgaagcacttgccgtgttgaactgaatgcactactggagaat

SEQ ID NO: 162472 - DNA, 100 bp, Homo sapiens
ggcagataaactggactgtcctctacagaaggaagcacaaaaagggacagtcggtcccgaacccctggtaatagaattgtttacctttataccaagaagg

SEQ ID NO: 162473 - DNA, 74 bp, Homo sapiens
ggaaaatcgcttggttaaaacctgacacttttaacaggctaccggctctctgaccagttccacgacatcctcat

SEQ ID NO: 162474 - DNA, 102 bp, Homo sapiens
atggccagtacctccaggccctgaacgcggactggcacgcagactgcttcagattcttgctcacttgtggcatctgggctactcaccagaagatatcattgg

SEQ ID NO: 162475 - DNA, 96 bp, Homo sapiens
ccgagagggagtcctcgcggacgtcagccaagcatcaacaacagcaacttgtgattggcggtgaccggatattcagttgcacatccccacatcaat

SEQ ID NO: 162476 - DNA, 96 bp, Homo sapiens
ttgtttgagtacgaagggtgcaaagtgggacgcggcacctacggtcacgtctacaaggcgaggcggaaagatggttcatagccctgatgaagcaag

SEQ ID NO: 162477 - DNA, 75 bp, Homo sapiens
cagcggaggaagggccacgccggcgatggaggcggcggcggcggactggcggcaataatgacgatgaggacctga

SEQ ID NO: 162478 - DNA, 75 bp, Homo sapiens
ggcttgatctcagtttcaaatctccccaagctgcctaaattgaaaaaggatgatgatgctgaagctatccttgct

SEQ ID NO: 162479 - DNA, 100 bp, Homo sapiens
aagcccaaaaagctgaaggtggaggcgccgcaagcgctgagggagtcctgacctgggggctgtggagctgcgcatcgaagagctgcggcaccacttccga

SEQ ID NO: 162480 - DNA, 100 bp, Homo sapiens
gtttgtctcttccagatcagaactgaggaacaaaaacccccatcctgggaaaaatggggaagctgaaatgcactcggtgatggaaagagagccactattc

SEQ ID NO: 162481 - DNA, 100 bp, Homo sapiens
tggctccgtgaaccttagggacaacaccgggacacccgcgaggccggaaaatggtctacgtgttgaagcgtcctcacgtggatgagttcctgcagcgaat

SEQ ID NO: 162482 - DNA, 90 bp, Homo sapiens
ggatagcagcaacttcaaagatgtaggttcaaaaggcaaagacttaattcagtgcacaaatgagatgaatgtgaacatcccacagttggc

SEQ ID NO: 162483 - DNA, 90 bp, Homo sapiens
cccgaagccgggagccgccgccatgggggcctgcctgggagcctgctccctgctcagctgcacatcaccctacagtggcttattcaacac

SEQ ID NO: 162484 - DNA, 98 bp, Homo sapiens
atgcctccgccggggggctatgggcccatcgactacaaacggaacttgccgcgtcgaggactgtcggatatcagaaaaccaggactctgcagatgttg

SEQ ID NO: 162485 - DNA, 87 bp, Homo sapiens
ggcgggcagggccgggctccgcagatgagggttactaccagggtggaaaatttcagtttgaaactgaagttcccgatgcgtacaaca

SEQ ID NO: 162486 - DNA, 112 bp, Homo sapiens
aagcccgttcggcctggaggagccgcagtgggtcccggacaaggaggtctcaagattctgccctccaagaaagtcttgccatgattggataggacccccagataaatattca

SEQ ID NO: 162487 - DNA, 100 bp, Homo sapiens
gagaagaaccgctcgctgcagtccgagaacgccgcgctgcgcatctccaacagcgacctgagcgggggggccctcagcctcttggccttgaacgggctgt

SEQ ID NO: 162488 - DNA, 100 bp, Homo sapiens
cggaaacctcgcgccgaccggggccctaggcccgacgacggcagtgcaagagaagcctgagccagtgccgctggagagccgctcctgcgtcctcatccgc

SEQ ID NO: 162489 - DNA, 82 bp, Homo sapiens
tcaatgaagggattaaccgaggcaaaaacaaggctttcgatgaggtctccaaagcggcgtctgacctcatgagctactgtga

SEQ ID NO: 162490 - DNA, 82 bp, Homo sapiens
taagggcaacaattttctgtacaccaatggaaagtgcgtcatcctaaggaacatcgactgtgaaataaaagtagccatgtcg

SEQ ID NO: 162491 - DNA, 75 bp, Homo sapiens
cgtccgaagcccgaggcagaggaaccggctcccaggtcccaggaaggtggcgtcagcatctgcagccgcgtcgac

SEQ ID NO: 162492 - DNA, 82 bp, Homo sapiens
gtgtgacttgactcttcaaacacaaaggcagcggaggaggaaatggcaggtcctaatcaactctgcattcgccgctggacta

SEQ ID NO: 162493 - DNA, 90 bp, Homo sapiens
caaattgatcaagcagatatgccagatccatcacaaagcgaagtcatgggagagccacacttgatggtggaatataaacttggtttactg

SEQ ID NO: 162494 - DNA, 80 bp, Homo sapiens
gtggaatatgccattgaggctatcaaggcagaagtcaattcatctggaaagactatctctgagtcagacttaaaccactc

SEQ ID NO: 162495 - DNA, 82 bp, Homo sapiens
aaagacgggccattttccagacctcatccaggccactcttcacctccaccatgagcctggacatccagagcctggacatcca

SEQ ID NO: 162496 - DNA, 100 bp, Homo sapiens
cccacccggacttgtccttctacctcaccacctttgatgttcatttggatttggaagaccgcctggcaaaatttatgaagacagaagaagccattatata

SEQ ID NO: 162497 - DNA, 90 bp, Homo sapiens
cacaccaccgaccaggacctggtgaagctctgtcaaccaggcgtggagctatttcctatgacagttctgatcagactgcattatacattc

SEQ ID NO: 162498 - DNA, 80 bp, Homo sapiens
tgccagctttgtcaacgggatctgggagtgacactgggaccagttactctccacaagaaaattcacacaaccacagtgct

SEQ ID NO: 162499 - DNA, 100 bp, Homo sapiens
ggggacccaggagtttcctgtgtccagcgctgccggagccgcctgagaatgaggagaaacctgtgcaaatgatgtttaagcaatctacttttaagaagac

SEQ ID NO: 162500 - DNA, 100 bp, Homo sapiens
cgccgcttcttccccatctccaaggaccagcctcgggtggtgctggctagagtgtatacgtttggacccaagcttaacttttccaatgtggaatcctggg

SEQ ID NO: 162501 - DNA, 100 bp, Homo sapiens
tgagaacggggctttccaggagcgggcgctccggtgtttccaccagctcatgaaagacacgactttgaactggaagctccgccgcatgcaagagatgatt

SEQ ID NO: 162502 - DNA, 100 bp, Homo sapiens
tgttttattctcagtagccgttgtgaagtggataggacatcatctggagtttggccgctggaaagtaaataaccttgcagttgagagaagaaatttcctt

SEQ ID NO: 162503 - DNA, 82 bp, Homo sapiens
agaaggtctctggagacatcttcagcaggtccggcgggcggtggcctccgtggtgggcggctggctgctgtgtctgcgtgac

SEQ ID NO: 162504 - DNA, 100 bp, Homo sapiens
tgaaaacctttgggcttcatggagtcgtcttagatgttgattcagcactccaggaagctcatcgggtgctgaaaccaggaggacggtttctctgtctgga

SEQ ID NO: 162505 - DNA, 87 bp, Homo sapiens
tgagccagccagctgggatctccaccaaccccttcatggtggtggtccctggggaggtgctgcctaccctcctccgcccagcatgcc

SEQ ID NO: 162506 - DNA, 83 bp, Homo sapiens
aatggccgctgtgtggttgcaacggagataaattcccggaaccgcgattcggcgtgtcagttaccggtattgtaagaacaagc

SEQ ID NO: 162507 - DNA, 89 bp, Homo sapiens
cgtggacctcctcaccctgccgcagctgtgcttcccagacaatgcagatcttcgtgaagactctgactggtaagaccatcaccctcgag

SEQ ID NO: 162508 - DNA, 80 bp, Homo sapiens
cacagacagaatccctgctaccaagaagctgatcgtcgaagggcatctaaccaaagcggtagaagaaacaaagctttcaa

SEQ ID NO: 162509 - DNA, 90 bp, Homo sapiens
ggacggtgccaccttaccccccttttaccaacggactccactacacctttgtctaacaccttccaagtggagatgtttggggtgacaggc

SEQ ID NO: 162510 - DNA, 100 bp, Homo sapiens
acgtttaatttttctaaagagtcttgttatttcttctttgagaaaaacctgaaagatgtctcattatcatttaacatggaagaagatgagttcattggag

SEQ ID NO: 162511 - DNA, 75 bp, Homo sapiens
tcagtggtgtttttctcaggtgaaaggagcagtagatgatgatgtagcagaagatgcacacttgactgaaggagg

SEQ ID NO: 162512 - DNA, 98 bp, Homo sapiens
tgttactcacatatttacttcagatggtctgcatgctgagataggcatgaagccttcgtctcacagctgcatgcgtagtcactgttgaagcaaatgcc

SEQ ID NO: 162513 - DNA, 122 bp, Homo sapiens
tactctgtcgctcttgtgccctagcaccccgagaaccgtcagtttgagccagatggttcgatacaagaggctgttttcctagcgtggcttgctgcctttggtaagaacatgtcgtccatctt

SEQ ID NO: 162514 - DNA, 75 bp, Homo sapiens
ggatcagagagggctaccttgtgaagaagggtgtcaaattgagaaccaggtagatccccaccacctacagtaaaa

SEQ ID NO: 162515 - DNA, 50 bp, Homo sapiens
ccagcccccatggcttcagaagaggtgggcctcatgagagatgtggagtc

SEQ ID NO: 162516 - DNA, 100 bp, Homo sapiens
taatagcaaacatcgatggcctactggggataacattcatgcagaacatcagatcaagcttcaggagtctccggaagacatgcctgcagggcagacacca

SEQ ID NO: 162517 - DNA, 90 bp, Homo sapiens
caaaaactgatgaccaagagaatgtgtcagccgatgcaccgagtccagcccaggaaaatggagagggtgtccgcaatgttgccagtgtct

SEQ ID NO: 162518 - DNA, 85 bp, Homo sapiens
aacctgtgaagagaacagaagctccaggatattatgaagttataaggttccccatgggacctgagagtcagtatactaagactgc

SEQ ID NO: 162519 - DNA, 82 bp, Homo sapiens
cgggagctcatcttcgtggggcgtgaggagtgtgagctcatgctacagacaatgcagatcttcgtgaagactctgactggta

SEQ ID NO: 162520 - DNA, 82 bp, Homo sapiens
ccgctgaggcttatttgggaaagaagtttagtcatccaacaagaagaaatatgaaattccagcaataagaaatgaacaaaag

SEQ ID NO: 162521 - DNA, 97 bp, Homo sapiens
ttaatgaaggatcaacgtatcataaaagggagaaactgcctacatccgggttaaagttgatgggcccagaagtccaagttatggaagatctcgatct

SEQ ID NO: 162522 - DNA, 119 bp, Homo sapiens
cccgttcttgcctcaggccagtcgcctccaggccaagagggatccttcacccgtgtctggattttttatcaagcagaaatgcatcgaacaacgagaatcaagatcactgagctaaatcc

SEQ ID NO: 162523 - DNA, 75 bp, Homo sapiens
tagagcggagcctggcgggcgtgggaacccaggccccgccgaggcggccagctgagctgactgctgcccactttg

SEQ ID NO: 162524 - DNA, 90 bp, Homo sapiens
tgtgctcagactgtcagcagtgtttttaaaggggttggacgtgataagtatgagcctgcagctgtttcagaacaaggtgataaaaagggc

SEQ ID NO: 162525 - DNA, 75 bp, Homo sapiens
ctaacaacaaagaattacatccggacatgtacagatatcaagccagaatgagaatgtaactggtcactacatttc

SEQ ID NO: 162526 - DNA, 100 bp, Homo sapiens
gactgtcattcacaaccccctgaaagcgttgctgcttttgctcagaggacatccatgaccctaatggtctttttgttcaagataaagtgattttttgcct

SEQ ID NO: 162527 - DNA, 82 bp, Homo sapiens
tgacgtggacatcgtcttcagcaagatcaaggtttgccttcccggattgggcctacaagccagagtcgtcccctggctcaag

SEQ ID NO: 162528 - DNA, 90 bp, Homo sapiens
taaaatggatgacagagcttacaaaactgcggaagcaaattaaaggaaaagctttgccagcagaagtataatgtctcctgcataatgatc

SEQ ID NO: 162529 - DNA, 88 bp, Homo sapiens
gtctacctgtttactatcaaagaggagtccttcaataatgttaaacagtggctgcaggaaatagatcgttatgccagtgaaaatgtca

SEQ ID NO: 162530 - DNA, 106 bp, Homo sapiens
caggccggcaggctgagaaaagcgagaccgcgtgcgaggaccggtgtcgtgaaaactacccctaaaagccaaaatgggaaaggaaaagactcatatcaacattgtc

SEQ ID NO: 162531 - DNA, 88 bp, Homo sapiens
cctcggaccagctctgtaaaagccccgcctctgccttcggataggtgatctgtgaaaatggttcgctattcacttgacccggagaacc

SEQ ID NO: 162532 - DNA, 100 bp, Homo sapiens
acggtcatgatggaccccaactccacccagcgctaccggctggaagccctcaagtaattcgccaaaatgacgaacacaaagggaaagaggagaggcaccc

SEQ ID NO: 162533 - DNA, 98 bp, Homo sapiens
ccgagctggacccggaccggttttggatttgggaatggatgatgaaggagatgatgacccagttcctctaccaaatgtgaatgcagcaatattaaaaa

SEQ ID NO: 162534 - DNA, 82 bp, Homo sapiens
aggccatcggcgtcctgaccagcggcggcgacgcgcaaggcgccatgtcagaaccggctggggatgtccgtcagaacccatg

SEQ ID NO: 162535 - DNA, 75 bp, Homo sapiens
ggggcctggaccagcctcttctgaaacactgggtacctccagaggtaactgtgctcacaaacagccctgtggaac

SEQ ID NO: 162536 - DNA, 100 bp, Homo sapiens
ctaagccgattttccggaaaaagtgagaagctcttcatggagatggcagagctcatggtctcagaaggctggaaggatgcaggttatgagtacctctgca

SEQ ID NO: 162537 - DNA, 98 bp, Homo sapiens
ctcagctccatggtgggcctcattctaggaagaaggtagataatgactataatgcccttcgagaaagactcagcaccttgcctgataaattgtcttat

SEQ ID NO: 162538 - DNA, 82 bp, Homo sapiens
ggcaagtgaggagaagctggcatctgtgtccaacctggtcactgtgtttgagaatagcagcaatggctgccatccggaagaa

SEQ ID NO: 162539 - DNA, 90 bp, Homo sapiens
ggagcctgtgccagccacgtcagcaccatggccagcttcctgaagtcgggctttgcagctaccagccaacctggccctcggctccccttc

SEQ ID NO: 162540 - DNA, 101 bp, Homo sapiens
gcaggctcaggctctgctcagcggggctgcaccaagtgtactttgatgcacccacctgccgagggggcaccaccaaggtcttcttagttggggactactcc

SEQ ID NO: 162541 - DNA, 98 bp, Homo sapiens
gctcacggcaactcttcagtgttggctgataaaattgccctgaaactggttggtgaagaaggatttgtaggaaaaccagtagattcccagacatcgcg

SEQ ID NO: 162542 - DNA, 100 bp, Homo sapiens
ccgagccgggatctcaggtcctcgggggcggcggccacgccaaggacggctatgtgatgatgatgccatttaaacgacaggctctagtggaatttgaaaa

SEQ ID NO: 162543 - DNA, 96 bp, Homo sapiens
acgcgttgtctgtgtcggttttcaataacaagaacattgctctatatgcaatcagtgctgtctactttgctggagtgatggtgcgactgatgttga

SEQ ID NO: 162544 - DNA, 50 bp, Homo sapiens
gcctccccagccatgtggaactggcagatgattctggaccagatgaagcc

SEQ ID NO: 162545 - DNA, 100 bp, Homo sapiens
gggcaccctgcaggtggtcagacatgtcatcaactcagctgggggggccctcagcctcttggccttgaacgggctgttcatcttgattcacaaacacaac

SEQ ID NO: 162546 - DNA, 100 bp, Homo sapiens
gccgaagcaggacccgaagcctaaattccaggagggtggagccgccaccaaaatgcagattttcgtgaaaacccttacggggaagaccatcaccctcgag

SEQ ID NO: 162547 - DNA, 98 bp, Homo sapiens
ggctggctgcagaagcaggaaacgtgaaagatgtgccggatggggtgaaagagctgtcagaaggttcagaagaaagcagtgatggtcagtcagattcc

SEQ ID NO: 162548 - DNA, 101 bp, Homo sapiens
ccagaagtggaattgcttggtcaaacggtactaggttttgacaagcttgcatcatgcgtgagtataagctagtcgttcttggctcaggaggcgttggaaag

SEQ ID NO: 162549 - DNA, 83 bp, Homo sapiens
atgtctcgccgcaagcaaggcaaaccccagcacttaagcaaacgggaattctcgcgtcatcatcagatttgaaatatttaaag

SEQ ID NO: 162550 - DNA, 100 bp, Homo sapiens
ttacccagcttaaagagctccacattcaggggaaccgcctcaccgttctgcccccagaactagactatgagaagatgtttggcacgaaatgccatggctg

SEQ ID NO: 162551 - DNA, 75 bp, Homo sapiens
cttggatccaggagaacggcggctgggtgaactgtcacccctacaactcagcttgcaaccagccctggccaccag

SEQ ID NO: 162552 - DNA, 100 bp, Homo sapiens
cagggagaaagcctggatgctcaagctttgggccagattatgttgtatgtggatggaatgaatggagtaataaaccgcaatgaaaccattcagtggctgt

SEQ ID NO: 162553 - DNA, 90 bp, Homo sapiens
atcgccgctcagctttccctaaggcagccatcaaaaggaccttcttcccagagaccacggacatctatgacaaaaagaacatgccccggg

SEQ ID NO: 162554 - DNA, 75 bp, Homo sapiens
cgtcccgcccggcgccagcgagaacgagctgaagaagccttctgtggacgattacatggggatgatcaaaaggag

SEQ ID NO: 162555 - DNA, 100 bp, Homo sapiens
acagcagatttcccaagagcagcggaaaatgatccagtcacaggtagccaatctgaattctaaggacctctcatataccttaaaggattatgtttttaaa

SEQ ID NO: 162556 - DNA, 75 bp, Homo sapiens
cggaggaagagccgggcagtccctggagcgggccaggtactccaaagattcaggtttactcacgtcatccagcag

SEQ ID NO: 162557 - DNA, 100 bp, Homo sapiens
aactttgaattcctggattcaagcaatcctcccatctcagcctcctgagtagctaaggactacaggctgtggaaaatctctgttctcacaaagtctcccc

SEQ ID NO: 162558 - DNA, 100 bp, Homo sapiens
gcagcttcgagggccgggagctcctggtcatcgagctgtccgacaaccctggcgtccatgagcctggcatggtctacatggctggacttgtttttgctgt

SEQ ID NO: 162559 - DNA, 100 bp, Homo sapiens
cgagctggagctgaagcgcaggctgcggggcgcggagtcgggagaagttccagcgtgagctaagcaccaaatgggtgctgaatacagtgagtacaggtgc

SEQ ID NO: 162560 - DNA, 99 bp, Homo sapiens
ccccggggcttggcatgtttgtggaggtgaaggacccagaggacaagttatctccagaagaagaagagaaaaggagaatccgaagggaaaggaataaga

SEQ ID NO: 162561 - DNA, 100 bp, Homo sapiens
ggcgaacccgcggcgcaataacggtcatcagaagattgagagaaagaggagaaccaatcagactatttggagagactgattatgatgcttttcaacgttt

SEQ ID NO: 162562 - DNA, 138 bp, Homo sapiens
ggctgtatgttagcaagcatgatctttcgaagggaaccattcttccatggacaggacaactatgaccaggtcagtcccttgttccaaaaattggaaaatgaccagattgaaagtttaaggcagcgctttggagggggc

SEQ ID NO: 162563 - DNA, 100 bp, Homo sapiens
ccacgctgcgggcccgggccatggccgccgccgatgccgaggtgtggtaacagtattgtggttaagcacgagaaggtctttattgctaggatatgatgag

SEQ ID NO: 162564 - DNA, 75 bp, Homo sapiens
tgccgtccccgctgctgtgcattggaacccttaggagaaatcttgagagtggacagcaattgtgaagatcgccag

SEQ ID NO: 162565 - DNA, 51 bp, Homo sapiens
tctgcattctgtcgggcggtgacctggccatgacccccctgatccctcaga

SEQ ID NO: 162566 - DNA, 75 bp, Homo sapiens
aagtactgtgagatacctgcttgccagaatccagaatataagaagtttttagaaacctactgtgtggaggaagag

SEQ ID NO: 162567 - DNA, 100 bp, Homo sapiens
ctgacgtgcccgaactggccagactcctggagatcgacccgtacttgaagccctacgccgtggacttccagcgcaggtaacacgtacacagacctctcgg

SEQ ID NO: 162568 - DNA, 75 bp, Homo sapiens
cgctgggaggtgacaacgtgactggcgtggactgcgtgaagggcataggaagccctcccgggaacacccagcagc

SEQ ID NO: 162569 - DNA, 100 bp, Homo sapiens
agatacataagatcgtagccagacccccagggcaaacttgaagataaatcttttgactccagctctttagaggatctaaagtgaccttgatggacagtgg

SEQ ID NO: 162570 - DNA, 71 bp, Homo sapiens
tgctaaaaacaagactggggctgctcccatcattgatgtggtgcgatcgctgggcgccgtgtacacagaag

SEQ ID NO: 162571 - DNA, 75 bp, Homo sapiens
gggtgatatttgcctttagtgcactcttctccttcacagtaaagtggctgggtcctgtattaataggaagttcac

SEQ ID NO: 162572 - DNA, 100 bp, Homo sapiens
aggaagaggatggagatgaagatgaggaagctgagtcagctacgggcaagcgggcagctgaagatgatgaggatgacgactcatttaatttacataacag

SEQ ID NO: 162573 - DNA, 100 bp, Homo sapiens
ggaaatcctaatgacagtctccaaattcgcctccatctgtaccatgagatctgaaactggacaatgtcctgttggaccacgagggtcactgtaaactggc

SEQ ID NO: 162574 - DNA, 101 bp, Homo sapiens
tcttcgtcagcattgcccagtctgagcaggagagcctgctgcagcaggcccaggcacagttccgaatgttcaaagaggaaatctcccggaggtttaaggct

SEQ ID NO: 162575 - DNA, 90 bp, Homo sapiens
cacggagccgcccgcgcacttccaggtgcacagcgcgggagccgtcacggtgctcaagtggacatttgggagcaataaaaataagaagaa

SEQ ID NO: 162576 - DNA, 82 bp, Homo sapiens
gaacttttgacacggctttggaaacgacgtcatgtgttaggaccatctaaagcaccaagtttctggtataaaatagatccat

SEQ ID NO: 162577 - DNA, 90 bp, Homo sapiens
cttcgatgatcgtgtgtcggatgaggagaaggggcagctggactctccacatcatccaacatcctcctggcctctgttgggtcagtgttg

SEQ ID NO: 162578 - DNA, 100 bp, Homo sapiens
ggcaagagaggcatcctccttgaagtatttggctgaggagttttcaatcccagataaagtggccagtgtgtacgaagccccgggctttttcctggacctg

SEQ ID NO: 162579 - DNA, 90 bp, Homo sapiens
atcttcagaacggacaagcagaagaagaaggtgtactcctttctattttaaagagccaagcctcagagatttcagaagaggagccccgcc

SEQ ID NO: 162580 - DNA, 74 bp, Homo sapiens
ggccgtccttcagattgaagctgaaaaggctgaattacgactggaacgtgagaaacgagcccgcatcaaagcac

SEQ ID NO: 162581 - DNA, 110 bp, Homo sapiens
gccagtagtgccagtgttcagagggatttcatggaccccactgtcaataacatgctgaagctgctgaaagatggcagaagaagtggtggtagtagccaaatttgattatg

SEQ ID NO: 162582 - DNA, 74 bp, Homo sapiens
cccgggactacgaccacctcttcaagctgctcatcatcggcgacagcggaaggtgggagtcaatcattttgaca

SEQ ID NO: 162583 - DNA, 75 bp, Homo sapiens
cggggctccaatggcgctttctacaaggcactcaaggagttgcccctggtcctgtaattggacttcaggcaccat

SEQ ID NO: 162584 - DNA, 90 bp, Homo sapiens
cataaagaatggcccttgtggataagcacaaagtcaagagacagcgattggacagaatttgtgaaggtaggaaacatgagcggcaccaac

SEQ ID NO: 162585 - DNA, 101 bp, Homo sapiens
atactccaagaaaaaaaccacaaatgtttttctgttttgcctgaatacatgatttaaacaagagatttccacagaaggaactgacaatggcgaagcccttc

SEQ ID NO: 162586 - DNA, 51 bp, Homo sapiens
gccatggccgccgccgatgccgagagtgcatcggatggcttctggaaatct

SEQ ID NO: 162587 - DNA, 100 bp, Homo sapiens
gaactactgccggagcttctgccagataggagaaagaattcgagtcatcttggacatggaagataagactttagcttttgaacgtggatatgagttcctg

SEQ ID NO: 162588 - DNA, 75 bp, Homo sapiens
tgtttatgaagcactgagaaatgatggctacaatagactagttaatattgtgccaaagaaaccaccactgctaga

SEQ ID NO: 162589 - DNA, 75 bp, Homo sapiens
cgactgcttgcgcattcccaagtcagatgtcgtgtacaccgattggaaaaaggtgtctgacttccagcaactgct

SEQ ID NO: 162590 - DNA, 75 bp, Homo sapiens
cggcgctgggctggaggcggcggagcgcgagagcttcgagcggactcaggtggcttgctttggtgaaggtattca

SEQ ID NO: 162591 - DNA, 90 bp, Homo sapiens
cgtgctctcctgcggacgtccaggcggccttcagcaccatcgtctcacggatacagagataccagcagggctccagcgggggagcggttg

SEQ ID NO: 162592 - DNA, 95 bp, Homo sapiens
gtttgtgcgcacagtgctggtctgcctgacattgtttgaaagatgtatggtgatcttgaaacctccagacacaagaaaacttctagcaaattcag

SEQ ID NO: 162593 - DNA, 100 bp, Homo sapiens
agcagcgactagggctcgggcgccggcgagatgcctttgttcaccgccaaccccttcgagcaagacgtggggaggagattggacaggctggactccccat

SEQ ID NO: 162594 - DNA, 75 bp, Homo sapiens
gaagtcgtggaggtggcgaaacgaggaggagataacgcggccttgggctctggagggtgaggacaaaatcttctt

SEQ ID NO: 162595 - DNA, 74 bp, Homo sapiens
taaagtaattggaagaggtgcttttggtgaggccatcatctgtgcgatctctgcggtggacgaggtggactaca

SEQ ID NO: 162596 - DNA, 100 bp, Homo sapiens
gcctggacaagcggggaaccctgccctggtgtccgcctatggcacgggactcgaagggggcaccacaggatgctccagaccttgtatgattacttctggt

SEQ ID NO: 162597 - DNA, 100 bp, Homo sapiens
tggcagggggcctggctccgggcagtgcggcgttgacagaaggctacgttggggccctgcacgagaatagacacggcagcgcagtgcagatccgcaggcg

SEQ ID NO: 162598 - DNA, 75 bp, Homo sapiens
gtagaaagtgaaatcagaggagatgtaactatcggttgggggccgtcccgctcctaaggcaggaagatggtggcc

SEQ ID NO: 162599 - DNA, 100 bp, Homo sapiens
gtatgatgactttgaatgggtgcatgttagtgctcaagagcctcattatctaccacccgagatgccccaagtagtcgaaaacgaagatcttccacagtag

SEQ ID NO: 162600 - DNA, 74 bp, Homo sapiens
agagcgtcacggcgtacgccctcatggggaaaatctccccggtgactttcagatacgtaggtaacctttccaga

SEQ ID NO: 162601 - DNA, 76 bp, Homo sapiens
agcctccatctcatttctccgtcagcacaataaccagaattatatccagatcgagagacagaagattctgaaaggg

SEQ ID NO: 162602 - DNA, 74 bp, Homo sapiens
ggaaaaaggccctcttcaagcctgctggtgccgacaagaaagccgaggctggggctgggtcagcaaccgaattc

SEQ ID NO: 162603 - DNA, 51 bp, Homo sapiens
tggctctgaagagaatccacaagggtcctcttgcctgcccagcttgggctg

SEQ ID NO: 162604 - DNA, 79 bp, Homo sapiens
gcccacagcctagcagtcgggaccgtactgagaacaccttccaccatgaccacctcagcaagttcccacttaaataaag

SEQ ID NO: 162605 - DNA, 50 bp, Homo sapiens
gaagaaacaaaagtgccaccgaagaggtacaggtttgcagattccgccag

SEQ ID NO: 162606 - DNA, 82 bp, Homo sapiens
ctcgctgggcagcctcaacatcccctacaagatcgaggccgtgcagagaatgtggacccccctgtctggtacgacaccgacg

SEQ ID NO: 162607 - DNA, 82 bp, Homo sapiens
gccgctgccgctgccgcacctccgtagctgactcgttggaatcgaagcctcttaaaatggcagatgacttggacttcgagac

SEQ ID NO: 162608 - DNA, 74 bp, Homo sapiens
ccaatgataccacttttggactagcagctggcgtctttaccaggctgctttgctggctctgcaagaaaatggac

SEQ ID NO: 162609 - DNA, 83 bp, Homo sapiens
ccgcgcgcagggcctgcagcgggagctggacggcgagcgcgagcggcgcgagaaagctgaccaactgactgaagagcagattg

SEQ ID NO: 162610 - DNA, 50 bp, Homo sapiens
gtgacactcaacaggattcccgcaccatatgaaggcggagtatggaaagt

SEQ ID NO: 162611 - DNA, 101 bp, Homo sapiens
caaggagtcacggatcggattcctcagctacgaggaggcgctgaggagagacaagagatgatttcctaggtcaagtggatgttccactttatccattaccg

SEQ ID NO: 162612 - DNA, 100 bp, Homo sapiens
ttcagatctccggcgaattgaaagcagtgatctctcagcggccctccaggcactgaagcgtaagaagaggtatgagaagcagctggcgcagatcgacggc

SEQ ID NO: 162613 - DNA, 82 bp, Homo sapiens
gaaggaacgaggcaaggagctaaagcagcgtgcgttcagccctgggatggcggcagctatgccatccacgactcccaggccc

SEQ ID NO: 162614 - DNA, 74 bp, Homo sapiens
aaagcttgatcttattctacatcattttttacctgtaggttttcggctttgtgagaaaccttaccatcaaacac

SEQ ID NO: 162615 - DNA, 83 bp, Homo sapiens
cggacagcgggctggagcctgacgagctggcggaatggttgttgagccgaatctccaagatgaaagtgaattcttgtatgctg

SEQ ID NO: 162616 - DNA, 100 bp, Homo sapiens
tacagctggagcgcccagaggcgagccctggtggaggaagaggtacttccagtgcccacccaagtttggtctcttcgcgcccatccacaaagtgatccgt

SEQ ID NO: 162617 - DNA, 100 bp, Homo sapiens
gataataggtcaagaaatcctaaatcagaacttttcagaccaagatcactccatggatgaaatgacagctgtggtgaaaattgaaaaaggagttggtggc

SEQ ID NO: 162618 - DNA, 100 bp, Homo sapiens
aggcacctacattgcccacctcaatggcctaagcaagtgtctgcagtgccaaatgtgtgacccagtacacctgaagcggcacttcatgttccggaaccac

SEQ ID NO: 162619 - DNA, 97 bp, Homo sapiens
ggaactcgcgcaggtcctgcccccagatactctgcccaaccgcacggtcaccctaaacctccacagctgttgagaaaaaggagaaacctcttccaag

SEQ ID NO: 162620 - DNA, 75 bp, Homo sapiens
ggatctttgtcctttgggatttctgaacttcagaaagccagtgttgatggctgtgatcgaactgtgagaatttgg

SEQ ID NO: 162621 - DNA, 98 bp, Homo sapiens
ttgagcagaggaagcacattgatgcggccatggttttggaagagtgtgcccagttcattgactccacttgatgcgagagatatattgatgcaaatagg

SEQ ID NO: 162622 - DNA, 100 bp, Homo sapiens
cccggggtgtaataatgttaactgagatgtatcctccactcctcgctggccaccatcctgctgcccaacagaagaagctcttctgtctccgatttcctga

SEQ ID NO: 162623 - DNA, 83 bp, Homo sapiens
ctcagctggagaacgcggctaaagttctgatgggaagaaacccttttttcttggagccagcaataattatcacaattactgat

SEQ ID NO: 162624 - DNA, 83 bp, Homo sapiens
tgtcctggctcttgccctcatcctggttctggaatcctcagttcaaggaagcaaatgtcacccttatagtgattggacagtca

SEQ ID NO: 162625 - DNA, 82 bp, Homo sapiens
ctggggccagggaaccctggtcaccgtctcctcagatatgtgtcacaaagatgtctacacggaactgccagggaatggactc

SEQ ID NO: 162626 - DNA, 73 bp, Homo sapiens
tcatcagcgtgtctcatggagaaccactctgagtggaacagatgtgcattcagattaaagaagttggagatcg

SEQ ID NO: 162627 - DNA, 75 bp, Homo sapiens
agaggatccaggaggaggagttgcagaggttggaaacacttttactgtattatctatgaagaaacgtttttgagg

SEQ ID NO: 162628 - DNA, 82 bp, Homo sapiens
catccaggctggtcagtgtggcaaccagatcggtgccaaggttttataggatcacattgacaaaagtaccatggagttttat

SEQ ID NO: 162629 - DNA, 75 bp, Homo sapiens
ctcggcctatcgctaccctccgaagtccggtgaaaggtgtagcagtcactcggcctacacccacagcatcgacct

SEQ ID NO: 162630 - DNA, 54 bp, Homo sapiens
ccagaggggtgacagcgaaacgtgactgcaggacaagttcgagcatcttaaaat

SEQ ID NO: 162631 - DNA, 100 bp, Homo sapiens
tcaactgttgcttcttataaagagtgttcgacctacaccacaaaatgatgctataacggtacactttaaaccaattacattaaaagcatcagaaagtaaa

SEQ ID NO: 162632 - DNA, 100 bp, Homo sapiens
gcgctggcggtgtggacgcggaactcagcggagaaacgcgattgaggggaagccatatgtttttgaccgtgtattccccccaaacacgactcaagagcaa

SEQ ID NO: 162633 - DNA, 82 bp, Homo sapiens
ctcctagaaattccccccgaagaagactcccccacatctgggtgacttaagagattaaaattaatttggttgctgttggttc

SEQ ID NO: 162634 - DNA, 50 bp, Homo sapiens
acttagcacagcgcctggcgcaagtacgtagagaaatcgacactcttaat

SEQ ID NO: 162635 - DNA, 90 bp, Homo sapiens
ctccttctggtgtggggcccgagagattaaaagctgctttgacccagcaacatcctccagttaccaatggtgatactgtcaaaggtcatg

SEQ ID NO: 162636 - DNA, 75 bp, Homo sapiens
gtcctttcaaatgaaaaccttggtcaaagcctgcatcaggaagttacatattattgaagttggcacaccacctac

SEQ ID NO: 162637 - DNA, 82 bp, Homo sapiens
ttggatatttgcttggaaaaacgtgtgggtacgaccttggtaagaatgattgatgttggctgatattggagtgctcattcac

SEQ ID NO: 162638 - DNA, 90 bp, Homo sapiens
aaaccagttattgaatatcaagaggaggagttgttgcctactttggggataaaggattatttggtcttctggatttggaggcaatcagcg

SEQ ID NO: 162639 - DNA, 82 bp, Homo sapiens
gacgctgctggaggaaacacctcaggacacggcctacaacaccaagaggttctgggccggagaaggggcgacgttcgggcac

SEQ ID NO: 162640 - DNA, 98 bp, Homo sapiens
gaaaatgccaacgccgtgtctgaaggactgaccagggccaagtggcgctcggcgggcactacatggcggagggtgaagggtacttcgccatgtctgag

SEQ ID NO: 162641 - DNA, 100 bp, Homo sapiens
gagccaccgccaggggtgaaggccaacatgctgaggacgttcagcagcattcccgtctcacggatatgcaaggtggtgatggcacttctcaaatactggc

SEQ ID NO: 162642 - DNA, 83 bp, Homo sapiens
cttgaaacgaaagtgaccgaggagctccttttcgagcttttccaccagtgctcaggcaggcgctgcggcagaagcaccaggaa

SEQ ID NO: 162643 - DNA, 100 bp, Homo sapiens
cagaaatgtgtcttgttgcatttggtaatttagcagaacttgctctttcgacgtgtagcagcagctttgccgggaatggaaagcacacaggacagaagca

SEQ ID NO: 162644 - DNA, 83 bp, Homo sapiens
gtgaaactgaatcacaggagatatttccaggaattacatgaacgacagccttcgcaccgacgtcttcgtgcggttccagccag

SEQ ID NO: 162645 - DNA, 98 bp, Homo sapiens
gctggccagggcttcggcctccggcgtcgggaaatggcggcggggggcaggatggaggacacctctgtgagtgaaagccttcagagggaagctgctaa

SEQ ID NO: 162646 - DNA, 100 bp, Homo sapiens
agatgacccaagttccttcagattttcagaaactttctccctttatccacagatagaagagtgatggatgtcatttctcgttcacagctttacttggatg

SEQ ID NO: 162647 - DNA, 75 bp, Homo sapiens
atcagaattactagattttctctcaaactacgagtttgcaggcctttcagatatatccatctcacaagacatccc

SEQ ID NO: 162648 - DNA, 96 bp, Homo sapiens
ccactaccccctgcacctcctagtctggaaaaacgactaccggcagctcgagaaggagctgcagggccaggtatcattgcccagtgcctaagatct

SEQ ID NO: 162649 - DNA, 100 bp, Homo sapiens
gcattgaagtccaagacacgagtgggggcacgacagccttgaggcccagcgctagcacccaggcccctacaaaggcttcagagtagatatctctgccaac

SEQ ID NO: 162650 - DNA, 100 bp, Homo sapiens
caaagccctaacctgtccagccagagcatgcgtctcagcagagctgtcttcccaagcctttgatgacaaaccagaccgggactttgtagccaagcagaag

SEQ ID NO: 162651 - DNA, 75 bp, Homo sapiens
cgccggatactcatcatttgcagcaaactcagcactggaggagctttatctttatatactgcccttaccacacag

SEQ ID NO: 162652 - DNA, 100 bp, Homo sapiens
ggctccaggcagcccgtatcggggcctttatttctcgtcggcggcgccctgcaccgcgcctcgcaaagatagtgacaacctctggtgggacgcctttgcc

SEQ ID NO: 162653 - DNA, 100 bp, Homo sapiens
aggaagctgcgctgcattctgcgggacgaaccctgctccgcgcgaggggacggtattcagaattcgagcgcaggagctccgcttctccacctgctcccgg

SEQ ID NO: 162654 - DNA, 100 bp, Homo sapiens
gctgcagtcgcacggcgtgcaagcacgggaggttcggctgatgcggaacaaatcttcagatgtccagctcgccgctgtccaagaaacgtcgcgtgtccgg

SEQ ID NO: 162655 - DNA, 83 bp, Homo sapiens
ttttcgtgtcagattacacagagagcagaagcgctgagtgagcctttgaccaagccagttggcaaaatcagttcaacaagtgt

SEQ ID NO: 162656 - DNA, 101 bp, Homo sapiens
gcggaacccgtgggcctgtggactgcagcctcggcggtcagcaggactcacaccacccggcaagaactgctcactacggctccctgccccagaagtcacac

SEQ ID NO: 162657 - DNA, 51 bp, Homo sapiens
cgaatcgttaaacatcttaggtcagcccagaagctgccccaaagccaagcg

SEQ ID NO: 162658 - DNA, 75 bp, Homo sapiens
aaaaaaatagtcaatagtgctcagactggtagcttcaaacagctcacagttaagtggactcccgaaaaattgacc

SEQ ID NO: 162659 - DNA, 75 bp, Homo sapiens
cagctctgcggctcgggccctgagactgggcggtgatcaggatctgaatgcacagggcgggtgttcagcgattgt

SEQ ID NO: 162660 - DNA, 87 bp, Homo sapiens
cgagcctgcccgggtccgggcgcttgtctatgggcaccacggggatccagccaaggtcgtcgagagccgtgtaaagccagtggaata

SEQ ID NO: 162661 - DNA, 100 bp, Homo sapiens
ttattcgtaacattactgtggataatagagttaaatgattcaggagcagttccagaaaaatcccgacagttacaatggtgctgtccgagagaactacacc

SEQ ID NO: 162662 - DNA, 100 bp, Homo sapiens
agagattcttaaccgctgacacaattaaacactgcagtgtctaaagaaggtgcatttattgtcagagattcaagacatttaggatcctacacaatttccg

SEQ ID NO: 162663 - DNA, 83 bp, Homo sapiens
cgacgggccgagcctgccactgtgtcgtgaaaactacccctaaaagccaaaatgggaaaggaaaagactcatatcaacattgt

SEQ ID NO: 162664 - DNA, 51 bp, Homo sapiens
gcgcagagccaaacagccaggcaggatgcaggagaagacccaagccacaga

SEQ ID NO: 162665 - DNA, 75 bp, Homo sapiens
ggatcacgaggtcaggagatcgagaccatcctggctaacacggtttgagaaatttctgtggttcattagctcaga

SEQ ID NO: 162666 - DNA, 75 bp, Homo sapiens
tggccgagcaggctgagcgatacgacggatgataatgaagataattcaaatgatgggacccagccatccaaaagg

SEQ ID NO: 162667 - DNA, 83 bp, Homo sapiens
ccaacgcctggctcggagcagcagcctctgagggactttgaacatgtcggggatcgccctcagcagactcgcccaggagagga

SEQ ID NO: 162668 - DNA, 82 bp, Homo sapiens
ctctgaggagatggtcatgacagttgatattcactgatggactccaaagaatcattaactcctggtagagaagaaaacccca

SEQ ID NO: 162669 - DNA, 99 bp, Homo sapiens
gaatgctatcttgtggatcttctgagtaacggaggacaattcaccatagttttctttaagttacatgagcatgcagcataccttgtggatagcatgtgg

SEQ ID NO: 162670 - DNA, 100 bp, Homo sapiens
agggaattcaggcaaaccggctggtgaagaatgattccagcgtggggacagaggctgacatttcttgcgtgacttaagagattaaaattaatttggttgc

SEQ ID NO: 162671 - DNA, 75 bp, Homo sapiens
catggcctataaaatgcttcaagtagtcctgtgctcaacattgcttatcggttacaagcctgatgaagggaaacg

SEQ ID NO: 162672 - DNA, 106 bp, Homo sapiens
gttgtgttgtacagccagaaaccggggaccttaacaatccacctaagaaattcagaggttatgcaatggtctctgcaagatggtttattcttgaattggacctttt

SEQ ID NO: 162673 - DNA, 90 bp, Homo sapiens
cagcgacttgcttctatgccttcgtgggctttgactgcatcgccaccacaggcatgacagcaagcgctgtggcggctttgatcctcatga

SEQ ID NO: 162674 - DNA, 100 bp, Homo sapiens
agtctgagtgtctgtccccagagcctcagtttgtgcaggacaccgacatggaacagggactcactggggaaatgccagatctggagtaaggaatattgtc

SEQ ID NO: 162675 - DNA, 96 bp, Homo sapiens
ccgggatggagaaggaggaggaatcggcattttgttcccaacatcacctttggtcaccctgtggtagaaagccttcgaaagcagctaggccaggac

SEQ ID NO: 162676 - DNA, 74 bp, Homo sapiens
cagatgcccctgccggagatccctcagccctggctggaagacggaagaaagtgccgggaagaaagaaaaccccg

SEQ ID NO: 162677 - DNA, 83 bp, Homo sapiens
ctggacaggcagagtgctgatgtgaaaaataccacgacaaaaccaccctacttccttcaaaatgtctactgttcacgaaatcc

SEQ ID NO: 162678 - DNA, 75 bp, Homo sapiens
gcattgctatttttgcacttcagttcacatactatttatggttcaaatctgaacatcaatgatgtactagggaac

SEQ ID NO: 162679 - DNA, 50 bp, Homo sapiens
ggaacttctgcccagctctccttgatattgatgatgctcaaatacttccc

SEQ ID NO: 162680 - DNA, 93 bp, Homo sapiens
tctgcattgctgatcttgtacttggattcagcaaggaaccttccgatttctctatgaatcatcatcaagaactctgggagaacttttgaattc

SEQ ID NO: 162681 - DNA, 75 bp, Homo sapiens
cccacatcaatgcactgccaatgtgccggtggtggtgtgcacattgagccccggtatagacagttcccccagctg

SEQ ID NO: 162682 - DNA, 90 bp, Homo sapiens
gaggacgccgggacaccaagaagcagggaaatggtgaaaggcaggattgggaaccccacagaccgcagctcctcccaggagaaccccaca

SEQ ID NO: 162683 - DNA, 103 bp, Homo sapiens
atgactcttcaaggattagaatatttacatcaacattggatcctacatagggttgatactgcctctccaagcccaatggaaacatctggatgtgcccctgcag

SEQ ID NO: 162684 - DNA, 90 bp, Homo sapiens
tggacacgctgactttgtaggctccgccaagaggcgccgcaggagctcttcacagaggtcctccaggatcaaggggaccactgattccac

SEQ ID NO: 162685 - DNA, 80 bp, Homo sapiens
cgaaatcgcctgctacaaaaacaaggtcgtcggctggcggagcggcgttgctgtgctgtggctttcattgagaagctaga

SEQ ID NO: 162686 - DNA, 100 bp, Homo sapiens
gacaagatcaccacggacgagatgatcaaacgcctgaagagtccgatgggtggtccttttattcctgctgctcctgtcaaaactgccttgcctgctggcc

SEQ ID NO: 162687 - DNA, 75 bp, Homo sapiens
acggctggtgatgagcatccgggatgggatccacggacccctgctggatgctgagaacttgctggagtcacagcc

SEQ ID NO: 162688 - DNA, 72 bp, Homo sapiens
gccactcgactttccaacatttttgttattggcaaggatttcttccgaaccctcatagcggcaatcctctac

SEQ ID NO: 162689 - DNA, 75 bp, Homo sapiens
agaaagagtcaacagcagtggcaacagacacatcaccttcactttgggatatggaatttgataagcagttagcca

SEQ ID NO: 162690 - DNA, 100 bp, Homo sapiens
tgggggcttagcgcactggaggagcggcgggcttcagacagacgcaaacatgcagatctttgtgaagaccctcactggcaaaaccatcacccttgaggtc

SEQ ID NO: 162691 - DNA, 74 bp, Homo sapiens
aaccccgtaaagtggttggttgcagttgtgtagtagttaaggacttcctgatcatgtttgtgcatcacttggtc

SEQ ID NO: 162692 - DNA, 100 bp, Homo sapiens
tgatactgtgcaccttccatttgaagggggaagtctcttgcaaattccagtcaaggccctaaaatataggcatttattaatacagcaaaagaaatttatg

SEQ ID NO: 162693 - DNA, 100 bp, Homo sapiens
ggagccggggccggcctggtcctcgggcggctgcttggccaccgccaccgccgtccgaagggctcgagcccaatttctagaaggaggagttggccatgtt

SEQ ID NO: 162694 - DNA, 100 bp, Homo sapiens
cagtccttctaggcagaagggccctcttgggctggccagctaaactatgtggatccagctactggctatgtggtgctcacacagattgcccacttgcaaa

SEQ ID NO: 162695 - DNA, 95 bp, Homo sapiens
actcagaagtgatctacggtcgtaagacccggaacccgctggtggccgtgtattacaccaaccgggccttgtgctacctgaagatgcagcagcac

SEQ ID NO: 162696 - DNA, 88 bp, Homo sapiens
gtggagaatcgtgggcgagtcaactatggggagaatattgatgaccagcgcaaagcatataggttgctgtagatgaatgttcttagct

SEQ ID NO: 162697 - DNA, 98 bp, Homo sapiens
aagtgactgggcggtgccggcgccggagacgatgccgttgcgaggattaaatccaccacacagggtgaaatctatctccatgacaacattcacacaac

SEQ ID NO: 162698 - DNA, 50 bp, Homo sapiens
ttggggaaacagctaattgagaggttttcacaccagacactgcagcagac

SEQ ID NO: 162699 - DNA, 75 bp, Homo sapiens
gagcttaagtggcttttgatgcatttccaagtagaataaggtggtttggctttgaatgacagcaagaactctgtc

SEQ ID NO: 162700 - DNA, 88 bp, Homo sapiens
agcagctggcagaagaagcaacacgcaaacgagagctgaggctaatgaaaaacaggcgagtgttgtgtataaaggaagttgaaatcct

SEQ ID NO: 162701 - DNA, 50 bp, Homo sapiens
aactcagacatctgcaaatcatggctgttcacggaagaccaggatgtaga

SEQ ID NO: 162702 - DNA, 90 bp, Homo sapiens
accccagccttcatgtgcgagacggcactccactacatccatgatgggatcggagccatgggtttccaggcctgaggtgcccgccctggc

SEQ ID NO: 162703 - DNA, 97 bp, Homo sapiens
aaagatctgcagagctcccagggcggacagcagcctcgggtgcaatcctggagccccccagtgaggcctgcaagtattcctgccacaagaaatgtga

SEQ ID NO: 162704 - DNA, 100 bp, Homo sapiens
ccctccccttggaccgagccgatcgccgcggggcagttcgggccggctgtcctggcgcgcccgttttacggagaagacttttactgtgaaattcctcgga

SEQ ID NO: 162705 - DNA, 100 bp, Homo sapiens
cacggctgtgctggaaaagtactgcgaggcctctggacagttcatccatcagatagttcatttaaagcccccatccctgcaaggtggtgctttctaccaa

SEQ ID NO: 162706 - DNA, 75 bp, Homo sapiens
caaccaccgccctggccatctaccatgtggatgccggctccaggagcagcagtggaggtcgggaacgcctcattg

SEQ ID NO: 162707 - DNA, 82 bp, Homo sapiens
aagtggcgaaggagccggctccaagctcaaactggaggattataaggatcgcctgaaaagtggagagcatcttaatccagac

SEQ ID NO: 162708 - DNA, 73 bp, Homo sapiens
aaaaagtgaggatggatctttataagagaggaattccccctgctagaatcagatgggtgactcaaatatctcc

SEQ ID NO: 162709 - DNA, 100 bp, Homo sapiens
aatgccacagcatcctccagcacctcaggcctctaattgtggcattgtagaaagtatcctgaactgggtgaaatttaaggctcagactcagctgaataag

SEQ ID NO: 162710 - DNA, 98 bp, Homo sapiens
gaaaagttgggtagaagaaccatgtgagagcattaatgagccacagtgcccagcaggaatgaaacagtgattcagagtgcatataaaagcctcataca

SEQ ID NO: 162711 - DNA, 83 bp, Homo sapiens
ggtcagtgtcctcaccatgcccttctgcttcaaacagggtgaggtggctttgaccccgggttgcccggccagcacgaccgagg

SEQ ID NO: 162712 - DNA, 101 bp, Homo sapiens
ctttttgagaatggaaacatgacccaggttcagactactctggtggctctagcaggtctgatgattgagctcagtgataatgaaaacccttggacaatatt

SEQ ID NO: 162713 - DNA, 90 bp, Homo sapiens
taacccggcctctggacaagaaacttttcaatgacaagagtaatactcatgaatttgtaaacctagtgaaagaactagccttacctggag

SEQ ID NO: 162714 - DNA, 90 bp, Homo sapiens
tgatatcctacacaacaaacaaatttccatcggaatatgtaccgacttacaagttgtgcaaagtgaggaagattactgtgggagtgaagg

SEQ ID NO: 162715 - DNA, 75 bp, Homo sapiens
tgaatatgggtcgaccattccaaaaaaatcgggaacttagcagagagcaaatgctatttgataacagttactcca

SEQ ID NO: 162716 - DNA, 82 bp, Homo sapiens
gtgtattgatcaatggaagaacaaaatctggcctgaaataaaaggtaaagtcagtgataaatcttttgtttgctgcatatac

SEQ ID NO: 162717 - DNA, 95 bp, Homo sapiens
tgaagagaaactgcaccttatcacccggaacctgcaggtgaaatgacaatggatgctctgttggctcgattgaaacttctgaatccagatgacct

SEQ ID NO: 162718 - DNA, 98 bp, Homo sapiens
cggagcccgggacgcgcgtacgccctgctgcttctcctggtcctcgagaggttgcagcaaagaggatttgaaatcgtgggctcctgtgggggaggagt

SEQ ID NO: 162719 - DNA, 75 bp, Homo sapiens
ctgtgagacatgtctgagactcctgctcagtgtagcattaaggtgaaaggtgtagcagtcactcggcctacaccc

SEQ ID NO: 162720 - DNA, 100 bp, Homo sapiens
tcttcctattcaccgtgggcagcagagggatggctgctcagctgctgactgatgaggcactggtatctctcctaaatgtgtgatcaaggaattaccacca

SEQ ID NO: 162721 - DNA, 80 bp, Homo sapiens
aggattttattactggcagcatgtatatcttttgctactgcagcactggggtgtcagttgttggtccgacccagaacgct

SEQ ID NO: 162722 - DNA, 75 bp, Homo sapiens
ataatctaatgacagttgaacagaataatgggtcagagtactgatcggctactatcaacagaacctcatgaggaa

SEQ ID NO: 162723 - DNA, 116 bp, Homo sapiens
tctgcacttcgcattttggcattgacatttaattttagggtcctttatatagaagggagagtagattgcccccgaggaattagcacttgttcacaacttgaggaaaatgatgaaaa

SEQ ID NO: 162724 - DNA, 74 bp, Homo sapiens
ttcattttatgtgggaggatgttcagcagcgcggcagagtcatgggggtgcaggagaacccggggaggaggccc

SEQ ID NO: 162725 - DNA, 80 bp, Homo sapiens
cagcaacctgctcctggaggacgtcacctggaagtacacaggtcttctgaatattgtgatggagccattttttaaaagag

SEQ ID NO: 162726 - DNA, 100 bp, Homo sapiens
tactcaactgtcctgctgtgattaaacaagactgctgtatttttgccaccatggcaactgcaccatacaactactcttacatctttaaatatattattat

SEQ ID NO: 162727 - DNA, 100 bp, Homo sapiens
cctgtgacctgcaggtactgggagttacatagctaagatgccaggacaccccgaaagccggaaaacgctcttttggtacaccagaaggccagaatggaac

SEQ ID NO: 162728 - DNA, 100 bp, Homo sapiens
cgattgcttcctgatcaaaatggagcaggtatcatgaactgatcactaaatatgggaagttggagcctttggcagaagtggacctaagaccccagagcag

SEQ ID NO: 162729 - DNA, 100 bp, Homo sapiens
agcagttatttgcagctatcatgtgaggtgacttaagagattaaaattaatttggttgctgttggttctgaacaaataatgagttcttttatttgaggta

SEQ ID NO: 162730 - DNA, 98 bp, Homo sapiens
ggacacccagcggtctgacatcgcgacgctgctcaaaacctcgctccggaaaggggacacctgggtaattcctctcctgcaattacttttggatggaa

SEQ ID NO: 162731 - DNA, 74 bp, Homo sapiens
cacaggggccactcagagtcgcccgagaactacagcctccgcttggcgtcccgatgctctccaccagcggcccc

SEQ ID NO: 162732 - DNA, 87 bp, Homo sapiens
gggtcatcacagagaaggagacccaggtggacataagcagctctatgaccaatagcacagctgccagtagacccccggtcaccctga

SEQ ID NO: 162733 - DNA, 100 bp, Homo sapiens
ctgagccacagtgtgatcccagctttaaaggagatgcaggagaaaatacggcattgctagctttcaccaacaatcaccagtggtttacacaacattgcaa

SEQ ID NO: 162734 - DNA, 101 bp, Homo sapiens
ggcgcgggcggcggcgccggcaggaaggccatggttgcttgttatccgggcaatggaacgggttatgtacgtcatgttgataatccaaatggagatggaag

SEQ ID NO: 162735 - DNA, 100 bp, Homo sapiens
ggggccgtaccatggcggagaagactcaaaagagaaagcataacccctactgtagaactaaatgcactgtgcatgaaacttggaaaaaaaccaatgtata

SEQ ID NO: 162736 - DNA, 100 bp, Homo sapiens
gaccatttgaaatactggtagatccatacatgcatgaggtttgctgactgcgccatattgttgctgacacaactggagactggacttaggaatgtttttg

SEQ ID NO: 162737 - DNA, 123 bp, Homo sapiens
cagaccctggagcctcagttggaagcagccgatccagcctgcggagcctgtggggcagcacccaccaaggctccggatgtgttccccatcatatcagggtgcagacacccaaaggataacagc

SEQ ID NO: 162738 - DNA, 74 bp, Homo sapiens
gcgggggtagagccccgccggagaggctgggcggctgccggtgacaggtctccaccgggaaccttctggtcatc

SEQ ID NO: 162739 - DNA, 96 bp, Homo sapiens
aaagacaaagacccagtgaacaaatccgggggcaaggccaaaaagaaggttggtgactttggagatgcaatcaattggcccacacctggagagata

SEQ ID NO: 162740 - DNA, 101 bp, Homo sapiens
tttgtttgaagaaatgcttcaagttgctaatgctatagtgctgcagatgattacaatagaattggttcttcattatatgctttaggaactcaggattctac

SEQ ID NO: 162741 - DNA, 99 bp, Homo sapiens
gtccatcaaccccctggccagctgcaagaccgatgtgctcgtcacggaagaccctgcagatgtcagcactgtgattgccaccaacattctcttggttga

SEQ ID NO: 162742 - DNA, 74 bp, Homo sapiens
tggggagaagcatcatggttcaacgtatcgagaaccttccctgcgaacttcagaggaacttccagctgatgcga

SEQ ID NO: 162743 - DNA, 100 bp, Homo sapiens
atgaatggagcaaaatggcggatcatgtgcagggtttggaaatcccttgtctccaggttgctgggattgacttcttgctcaattgaaacactcattcaat

SEQ ID NO: 162744 - DNA, 82 bp, Homo sapiens
gatagccgtcttcagcttgagccccatcactagagtcttttattcaaaacttcagcgttctctatagtcccttgaaaaggca

SEQ ID NO: 162745 - DNA, 100 bp, Homo sapiens
ggatggcgcatcacacaccaaagttaagtgggcagaccaacatccacctcagcaaaaacttcttcctgacgaatcgcgccagggagcgctcagacacctt

SEQ ID NO: 162746 - DNA, 100 bp, Homo sapiens
catcaatgcacgcaagatgaaatttgctctgctaaaaggctccttcagtgagcaaggcatcaacgagtttctcaggaaaccatcttcatcggtactccaa

SEQ ID NO: 162747 - DNA, 75 bp, Homo sapiens
ccatttctgcctgtcactgtgaatcaaagaattttgtgttttggcaagaacattaaccaggtggtatttgttgga

SEQ ID NO: 162748 - DNA, 82 bp, Homo sapiens
gtaccttccctgtcccatcgcaaacccaaagatccccgttcctggagattctgattgagataacgaaggaggcccaacttca

SEQ ID NO: 162749 - DNA, 99 bp, Homo sapiens
aggccctgcctatgaccagcaagaggatggggccctggatgagggggaagggcctcaaagccagaaggttcggagcgaccttggccgttggcctgacca

SEQ ID NO: 162750 - DNA, 89 bp, Homo sapiens
tccacaccccctccgtgggtgtgtgaacccttaggagaaatcttgagagtggacagcaattgtgaagatcgccagagagttctgtgttt

SEQ ID NO: 162751 - DNA, 75 bp, Homo sapiens
accgacaactccaccgtggcgctcgccaaagtctcgcccaagaacttcaaggtgaaaatgatcatgaagacatca

SEQ ID NO: 162752 - DNA, 51 bp, Homo sapiens
cgcggcggccgcagctgccacaaaccagggaggagattggacaggctggac

SEQ ID NO: 162753 - DNA, 87 bp, Homo sapiens
ccgcgcccgcctcatttgcgccttgcagcactgctggaccaggggatggtatgaatgcatatgtagcctacaaagttacaacacagg

SEQ ID NO: 162754 - DNA, 75 bp, Homo sapiens
tcaagcactgtgatcttcaaatcagctggaatccaaaagatcttgaaaccagtcctgaaaggcttgctcctatgc

SEQ ID NO: 162755 - DNA, 83 bp, Homo sapiens
ctctcggcctctgccggagaaacaggaaattcgaaatgagtcccatgactatcctcatagagtggccaagtttccagaaaaca

SEQ ID NO: 162756 - DNA, 100 bp, Homo sapiens
cggcaacagagtgaaggatttggttcacagagaagcagacgagttcactagacaaggtgccttctccaagagaggcagcagggagggagaaatggcaagg

SEQ ID NO: 162757 - DNA, 84 bp, Homo sapiens
cttcagctcactgaccatctgcctacctcccgttaatggaaccgcgactcacagatcaagatattttggaaactatattgatag

SEQ ID NO: 162758 - DNA, 100 bp, Homo sapiens
atatcccagttggagagggaagaaaagctttggatgaaggagcttcaaacccaaagaggtaagcattcagggactggtttggctgaaagacaaagaagca

SEQ ID NO: 162759 - DNA, 90 bp, Homo sapiens
cgcgtccagctcgcccagctcgcccagcgtccgccgcgcctcggccaaggctctgtgtgctccgggatggagcaggtgtgcagagggtga

SEQ ID NO: 162760 - DNA, 75 bp, Homo sapiens
ggcagtccctgacgtgtcggggaggagccgggcgcggaggggcctttacaacaactaaacggacaggcattccag

SEQ ID NO: 162761 - DNA, 100 bp, Homo sapiens
ctcatattgatgattacagcacatgggacatagtcaaggctacacagtctccggataactgtgctcctgacatccttccttatggttttgggaactggtc

SEQ ID NO: 162762 - DNA, 90 bp, Homo sapiens
caactcagagaacaacagaaaactcaaaaaccatctggtgctgtggattgcaaccttgaataattggcagagggggtcgatttgggagga

SEQ ID NO: 162763 - DNA, 75 bp, Homo sapiens
agcaaggtcggcagagcaaggggcttacgcagaaggacctggccacgcacacttccaccctgggcagcgtgtttg

SEQ ID NO: 162764 - DNA, 100 bp, Homo sapiens
cggccgggtccgggacttcgtcgccaagctggccaacaacacgcaccaggacattgtgacaaatgtttcccccagaatcatccggggaaccacctctggc

SEQ ID NO: 162765 - DNA, 75 bp, Homo sapiens
ttccgcacaggcctgctgaactgggtgctttatataggcaatgtgtattcctccatcatatgctgaccttggcaa

SEQ ID NO: 162766 - DNA, 90 bp, Homo sapiens
gtggaagcaggactgcgccgcgtcttcctcaagcagacggactggactgagccctggctcatggggctggccaccttccacgcgctctgc

SEQ ID NO: 162767 - DNA, 100 bp, Homo sapiens
cgtatcggggcctttatttctcgtcggcggcgccctgcaccgcgcctcgcaaaagtaatcaagtcagaggattatatgacttttatctgcctagagaaga

SEQ ID NO: 162768 - DNA, 90 bp, Homo sapiens
acgtcttgcctgtgtcccacttgttcgcggcctataggtcgcgtggggcaggcagtggcgctgcgggccaaggccttcggcttcaacgtg

SEQ ID NO: 162769 - DNA, 82 bp, Homo sapiens
cgggcacctccgagcgcaaggacagcgcgaggtccgcgcagcccagcgcagccatgggacaccgtggtgtttaaggatggcc

SEQ ID NO: 162770 - DNA, 50 bp, Homo sapiens
caaagatgcaccagcattcaatgaaaagaccaatctgaccttcgttggct

SEQ ID NO: 162771 - DNA, 102 bp, Homo sapiens
cagctggctaaccagaccgtgggcagtgagtgagatcattggccgagacctgagtggcttccctgcacctcctggagaagagcctcctgcctgaaccacgtg

SEQ ID NO: 162772 - DNA, 80 bp, Homo sapiens
cgttgtgccagcgactaaaaagagctatatgttctcctttcagccaagacctttcaccagtgcaggggatagaagattca

SEQ ID NO: 162773 - DNA, 74 bp, Homo sapiens
cccgcctgaagccccccttccccgcagacgtggggacgtccagatcggtgacatcgtcacagtgggcgagtgcc

SEQ ID NO: 162774 - DNA, 100 bp, Homo sapiens
ctcaagagatttgctgatgaaggcacggtactactgagcgagtgtgcttgatccagggaacggttgaagcactgaatgcagttcatggattcattgcaga

SEQ ID NO: 162775 - DNA, 100 bp, Homo sapiens
agaagcttatgtggagttagttcaccatattagagaatctattccaggagatgaacgccctgcgaggccaggtgggtggtgagatcaatgtggagatgga

SEQ ID NO: 162776 - DNA, 100 bp, Homo sapiens
ctggaggcgctgatccgagaccctcgctcccccatcaacgtggagagcttgctgggcttatttcaaaacctttgtccctcagttccaggaggcagcattt

SEQ ID NO: 162777 - DNA, 96 bp, Homo sapiens
gttctggtggacctctcggctttcctggtcagcagcgacttgtcgcagccgatgatgccagtgtcaaggcccatgggccctgtccccaacccccag

SEQ ID NO: 162778 - DNA, 75 bp, Homo sapiens
attacacccgtgcccaggagcttgacgccttagataacagccatcctattgaagaaagaaggtggaaagtttggt

SEQ ID NO: 162779 - DNA, 86 bp, Homo sapiens
caacgccgagcgcaccgacatctgcctgctcaaagggggatatgagactttctactcggaatatcctgagtgttgcgtggatgtaa

SEQ ID NO: 162780 - DNA, 75 bp, Homo sapiens
aattacatagctggaaaggatcttacaggagtgcatcagagccttaggtagaaataaacctcatactcctttccg

SEQ ID NO: 162781 - DNA, 100 bp, Homo sapiens
atcgacgccgcctggcaggccctgcgcaccagatcgaggagtccgtgcgctacatggttatgcgctacggcagccggctgtggaaactccgtgtgctaca

SEQ ID NO: 162782 - DNA, 101 bp, Homo sapiens
gtgatactgaaggggtcgtcactgtactggtatagcaatcaaatggtaaagtcagtgataaatcttttgtttgctgcatatactggagatgtgtctgcact

SEQ ID NO: 162783 - DNA, 75 bp, Homo sapiens
ctgaaaagtcgcagcgagctggagccgccggagccatcactggtgcaagctatatttaacggagatcctgatgaa

SEQ ID NO: 162784 - DNA, 83 bp, Homo sapiens
gaaaagactgggcttgtccttgctggtgcatgcgtcgtcggcctctgggcagcaggtgcgcacacggtcagtgggcgagtgtg

SEQ ID NO: 162785 - DNA, 116 bp, Homo sapiens
tgcccggcgacactgcacccatcccggctgcttttgctgcgccctctcagcttcccaagaaagctcatgacactgagaggttcggtcctggaggacgccattccgtcgacagccaa

SEQ ID NO: 162786 - DNA, 98 bp, Homo sapiens
gaaatgcttgccaacacaggtgaaaatggcggcgaagggtacccggcagtgtcacctgctcctggatgtcttcaactccaccgagcatgagctgaccg

SEQ ID NO: 162787 - DNA, 75 bp, Homo sapiens
cagtggagagcattccatccctacggggctctatcactcaggtggagctcatgaaggacttcagcatttgggtcc

SEQ ID NO: 162788 - DNA, 100 bp, Homo sapiens
cctcacctatgcaaagaaagggaagctattgctgggattttgaggaggttaacgaagcccttgtcatttgctgattgtgttggggatgagctgccgtggg

SEQ ID NO: 162789 - DNA, 90 bp, Homo sapiens
gtgattgagcagtttgaagacttgctagttaggattttattactggcagcatgtatatcttttgtcgggactgcccaaactcagggcagg

SEQ ID NO: 162790 - DNA, 75 bp, Homo sapiens
ccaggatctcgggctcggaacgagactgcacggtggatattccatctattataaccaagaaactattaaaagcag

SEQ ID NO: 162791 - DNA, 75 bp, Homo sapiens
gtcgtccgttctctcaggctcccgttcagacttcccaagtaagaagcggaagaggagccgctggaaccaagacac

SEQ ID NO: 162792 - DNA, 100 bp, Homo sapiens
ttgcacaggcaccccagttgtctgtgccaggtggcctccttggtatgccagatggcttcccagttacgactcttcgatccccagctgaaagagaagccag

SEQ ID NO: 162793 - DNA, 75 bp, Homo sapiens
gctggtggccctgctggaggaggaggcagaagtcattaaccagaagataccccagaatcttccatgctccgtcac

SEQ ID NO: 162794 - DNA, 82 bp, Homo sapiens
ggctgacgctgctgctgtgtgcggtgctgctgagcttggcctcggcgtcctcggtagagacggggtttcaccgtgttagcca

SEQ ID NO: 162795 - DNA, 100 bp, Homo sapiens
atggcggctgacagtcgggaggagaaagtttgtacaatgacgacagaaacctgcttcgaattagagagaaggaaagacgcaaccaggaagcccaccaaga

SEQ ID NO: 162796 - DNA, 99 bp, Homo sapiens
cgcaccatgcccgccgtggacaagctcctgctagaggaggcgttgcaggacagcccccagagggagacgtggtgggcggtccttcctgtgacacgaccc

SEQ ID NO: 162797 - DNA, 100 bp, Homo sapiens
ggagcagcagcagctccagcaggcgctggctcctgctcagatctgaataatgtggctgctacagcccgggtcctagttattggagctactaatcgaccag

SEQ ID NO: 162798 - DNA, 96 bp, Homo sapiens
cactgaggcccacacctattgctgcagtaccaccgggctctggtggcggtgctcctgagccgcacctggcacgtccgcaggcaggctcagcagaca

SEQ ID NO: 162799 - DNA, 83 bp, Homo sapiens
ttctggagcggttgtgcgatcagatcgatctaagatggcgactgtcgaaccggatctctctaggagctgacactcgaaccttc

SEQ ID NO: 162800 - DNA, 75 bp, Homo sapiens
gtcttgtggaactgaacttagctcgacggggctgaccgctctggcccagggtggccccttcacagatgtagtcac

SEQ ID NO: 162801 - DNA, 74 bp, Homo sapiens
tctcatctccggccctctcggcgtccgccagcgatggcacagattgccatcacgaaagccaaagtggatttctc

SEQ ID NO: 162802 - DNA, 96 bp, Homo sapiens
gaaaaggcctaagaattttggcattggtggttccatcaaggtcctaatccctacaatggagcacaggactggatttactctggcagctactgggac

SEQ ID NO: 162803 - DNA, 100 bp, Homo sapiens
gtcggtttttcatcctttgatcccgcggtcccttcctgtaccttgtcctcaggatgtgggctctcttgatgagaagatgaagagcttggatgtgaatcag

SEQ ID NO: 162804 - DNA, 82 bp, Homo sapiens
cgcgagtgggagcaccaggatctcgggctcggaacgagactgcacgatggtcctagaacaattggagattcatacgcacaca

SEQ ID NO: 162805 - DNA, 75 bp, Homo sapiens
tgcaagtacccgctcctccttaagcattcgttcagtcagagagcataatagaagtactgcgttttgatgatggag

SEQ ID NO: 162806 - DNA, 83 bp, Homo sapiens
taaatttctcccaccctaaaccaggcaagaaataccgcccacgaatggatcaggaagtctctgaccaagccattagcagagaa

SEQ ID NO: 162807 - DNA, 88 bp, Homo sapiens
agaacagagtgctgttttagagctggcagcagcatctcagcccaagagaagtgggcatccccaccatcagatggtgcggggcagaggg

SEQ ID NO: 162808 - DNA, 98 bp, Homo sapiens
gttcgttctcaatgccctgccgctgcttctcatcgcatggccaccgcatttctcagattcatgcttaacaagtctagcatcatcatcacttaaacaaa

SEQ ID NO: 162809 - DNA, 98 bp, Homo sapiens
gctctgggggccatgtggaaactacataagagcaacttgctggatgtgaatcagatcatcaaggacttggcctccatggtgtcagagcaaggagaagc

SEQ ID NO: 162810 - DNA, 96 bp, Homo sapiens
ccgggcaacgatcggaactcggacacggacaggctgcgggaggagctgcaggactgaggtacagaggccaggggcccagggcaggacccagcctgg

SEQ ID NO: 162811 - DNA, 83 bp, Homo sapiens
aaggctccttcagtgagcaaggcatcaacgagtttctcaggtcagcccaaggccaaccccactgtcactctgttcccgccctc

SEQ ID NO: 162812 - DNA, 100 bp, Homo sapiens
ccgctggtcgtgttcgtcctcggcggccccggcgccggcaaggggacccagtgcgcccgcatcgtcgagacccagggccaggacctcagcacaatttcac

SEQ ID NO: 162813 - DNA, 75 bp, Homo sapiens
ccggggcttgccctggtcttgctcggccgatgaagtgcagaggtttttttctgacggtctggaaaatcccgaagc

SEQ ID NO: 162814 - DNA, 90 bp, Homo sapiens
atgatgaggatgaagaagagatcgaggttgaggaggaactctgcaagcagcaataccagtttccagtgtgatccattattgaccttcaag

SEQ ID NO: 162815 - DNA, 100 bp, Homo sapiens
gagcactcggtcatgtacccggtggactcggtgaagtgttctaagaacggaagcatctgggctggatggaatttagcatcaagcagagtcccctttctgt

SEQ ID NO: 162816 - DNA, 100 bp, Homo sapiens
cccgtcatggagatggaaaaggagttcgagcagatcgacaagtccgggagctgggcggccatttaccagcggagctggagtttgttcagatcatcatcat

SEQ ID NO: 162817 - DNA, 74 bp, Homo sapiens
attggagctcatcagactgaccgtgtcttacatcagttcagagaggaagccattaatttgctagaaccaatgac

SEQ ID NO: 162818 - DNA, 75 bp, Homo sapiens
tgcgtcgcgatgtgtggcgactgtgtggagaaggaatatcccaaccggcttgtagaccctggagttaaggcatgg

SEQ ID NO: 162819 - DNA, 90 bp, Homo sapiens
atttacacagacgtggggcgatgcttgtgaccctgcagctcctcaaacaagagtgagccatggagctacgtgtggggaacaagtaccgcc

SEQ ID NO: 162820 - DNA, 82 bp, Homo sapiens
agacactgaacgaggagccagtgagagaactcgatgccaccgcaacggtattggcgaaccggcaggatgaaagtgagcagtc

SEQ ID NO: 162821 - DNA, 75 bp, Homo sapiens
gctgcttggagcgtccgccatgaggagaagctctactgagatgaagaaagaaaaagaatacctgctcagctccag

SEQ ID NO: 162822 - DNA, 100 bp, Homo sapiens
tcggaaaccggtagcgcttgcagcatgaggcctagaaaaggatggcagcttcggtgagggcctcaccatgaagaagcagagtggcatgcacctgactttg

SEQ ID NO: 162823 - DNA, 89 bp, Homo sapiens
ggaaacacctgaaggtgaagaacatcatccagtggcagacactgaaaataagaaaaactagaccagacctctgttatcttctgtgaaat

SEQ ID NO: 162824 - DNA, 100 bp, Homo sapiens
catcaggtaggctgcgttgaggatctttgctcttccatccgcctttgatcgtcttcctcttcagccatccaggagaactctcttcagaggtcgaagacga

SEQ ID NO: 162825 - DNA, 96 bp, Homo sapiens
aatggcagcagcggcgggggctatggcgccagtaagaagaaaaaagcgtccgcttccagctttgcgcaggacttcgtcttctatgctccccggctg

SEQ ID NO: 162826 - DNA, 75 bp, Homo sapiens
cgggactcgagcctagggaggcgaggttcccgcaccggatagttcacagaagaaaagcttggccaggctgagaag

SEQ ID NO: 162827 - DNA, 95 bp, Homo sapiens
ccatcttccacaaggagcacaggaccaagagtccaggacccaggatggtggccgatcctgataaccctttggtgctggacatcctgacgggctct

SEQ ID NO: 162828 - DNA, 75 bp, Homo sapiens
ttgagcacggcgagcagtctcaggcctttagtgatgatgctgaagaaaaggtgactggtctcatgagccctgaag

SEQ ID NO: 162829 - DNA, 98 bp, Homo sapiens
gacttcctctatggtggcgtcggccgaacagccccgcgggaatgtcgacgaggagctgagagcttactcacatagcatattggtatatcaaaatgaaa

SEQ ID NO: 162830 - DNA, 100 bp, Homo sapiens
agtccctagggaaccaccaattcttcccagaaggactccatgaaagatgacagaagaagttattgtgatagccaagtgggactacaccgcccagcaggac

SEQ ID NO: 162831 - DNA, 100 bp, Homo sapiens
ccgcttctcagaggacgccttcaacaccaccttcatctccaccatcgagaatagtgacagtggtacaggaaagaaagaaaaagaaaagaaaaacagaaag

SEQ ID NO: 162832 - DNA, 75 bp, Homo sapiens
caatagaattaaagcgcttccttctgggattggagctcaccactagatgctggtgtgccagaaaaaataagcctg

SEQ ID NO: 162833 - DNA, 103 bp, Homo sapiens
ccagaccctggagcctcagttggaagcagccgatccagcctgcggagcctgtggggcaggcaccacactgtaactcgaggcatcaccaaaggcgtgaaggagg

SEQ ID NO: 162834 - DNA, 75 bp, Homo sapiens
acagcatccaaccaaaggttttgcctctgtttcagaaaagattcacttgttttcagaaccacagtttcaaggtca

SEQ ID NO: 162835 - DNA, 100 bp, Homo sapiens
cagacctctggaaataaacgagactgaaaaagtgatgagaattgcaataaaagagattttgcaggcttatggctatgggccatacggtggtgcgtacccg

SEQ ID NO: 162836 - DNA, 95 bp, Homo sapiens
gggactgcaccttctccatcaggtgcagaagatatggtccggaaaaagaacccccctctgagaaacgttgcaagtgaaggcgagggccagatcct

SEQ ID NO: 162837 - DNA, 75 bp, Homo sapiens
gcagcttcggaaaggagccaatgagggtgccaacaattctaaattcgctacagagaagtgtacaagcagttttgg

SEQ ID NO: 162838 - DNA, 100 bp, Homo sapiens
tgactttgaacatgctggtgccgctagccaagctgtcctgcctgggtccagagccaaacccgtcactgaccccccagcccaggcgcccagccactcccca

SEQ ID NO: 162839 - DNA, 80 bp, Homo sapiens
ccccgtggttccaagactgctgaaccggatgtttgaccgagtcacgaacgagatcacgccggtgctgtcgtactcctacc

SEQ ID NO: 162840 - DNA, 100 bp, Homo sapiens
cgacaatggcagcatctacaaccctgaagtgcttgatatcacagaggaaactctgcattctcgcttcctggaggtggtggcggtggaggacagcagcgag

SEQ ID NO: 162841 - DNA, 100 bp, Homo sapiens
tatgcagtctcttttaccagcagttaaatggaagctgatcggcgttcacatggaatcctcctcacgtagctcagatggatggccacagggagcaacattg

SEQ ID NO: 162842 - DNA, 90 bp, Homo sapiens
ctgcaatgtttaatcaagttttgattttaatatctacattactatgccttatcttcacctgattccttttgcaataaaaacaacaccagg

SEQ ID NO: 162843 - DNA, 51 bp, Homo sapiens
cagttcgctacacagcaatgcatcgaggctgggcttggagcccacaggacc

SEQ ID NO: 162844 - DNA, 100 bp, Homo sapiens
aatggaacaagttccagcacaagtgatgatgaggacagtgattaccaccaggaggcctacaaggagtcctacaaagaccggcggcggcgcgcacacactc

SEQ ID NO: 162845 - DNA, 82 bp, Homo sapiens
cgcagatctccgggccacctgccttgaagctctgtctcccactccgtgctgtctgagatgcaggtgattgagcaggaaaccc

SEQ ID NO: 162846 - DNA, 98 bp, Homo sapiens
ttgatgtatctggaactatgaatagttggtaagtcacatagaagagatgctccagacagcctacaacaagctccacacatggcagtcacggcgtctga

SEQ ID NO: 162847 - DNA, 89 bp, Homo sapiens
gagctggttggccctgtgatccctcaagactggtccacggagtgtatgaccacaaacagccatcaagatacccagtatctccaagatac

SEQ ID NO: 162848 - DNA, 120 bp, Homo sapiens
tgacctcatgctggcggctctgcgtacgctggttggcatttgctctgagcatcagtcacggagacgagttgtactgctgtcacaggaaatggacgctggattacaagcatggcagctcag

SEQ ID NO: 162849 - DNA, 75 bp, Homo sapiens
aagagtgagtagcttggttggtggtaccctaaaattagggcatgattaaggatgttggcaaaggatgaactgatg

SEQ ID NO: 162850 - DNA, 83 bp, Homo sapiens
ctggggacccccgaatctttcaggcctatgaaggggtgctgcagctggtggaggctcgcgggcgctacgaggagctctgcatc

SEQ ID NO: 162851 - DNA, 75 bp, Homo sapiens
agatgttgtcctgtgctggggctgacagatgccgtgcgcgaaattcggaagtatgatgatgtgacggaaaaggtg

SEQ ID NO: 162852 - DNA, 83 bp, Homo sapiens
cgtcatcctgctgctgaagatctggaagacgcgctcctgcgccgagctttcagcagaggccaaggcagcattgcttgaatttg

SEQ ID NO: 162853 - DNA, 100 bp, Homo sapiens
gtgcctggtggtgaacgggtcggggaaggcctcgatgtcagctgaactttccatccaaggttctcaggaatcagatagctcgcagtcggccaagaaggac

SEQ ID NO: 162854 - DNA, 95 bp, Homo sapiens
caaatccgtgtcggagtccttacagtatctggagtccatctttcaccatcttctcctgagattgtactggaccgtgaccactcttcttccattgg

SEQ ID NO: 162855 - DNA, 76 bp, Homo sapiens
gcagttctggtcctcctaggagcggccgcctgcggtgtggatgaggtcaccattgtcaacattttgaccaaccgca

SEQ ID NO: 162856 - DNA, 90 bp, Homo sapiens
gacagaaaagacagtgttctgctttcatggagttcacagaagagtcgaggagcgagaaccctctgcccacagtggagattgccatccgga

SEQ ID NO: 162857 - DNA, 100 bp, Homo sapiens
ggcggtggagactctgtccccggactgggagtttgaccgcgttgacgacggctcgcagagattgggactcttctttggtgaagactttcaaactgaagaa

SEQ ID NO: 162858 - DNA, 83 bp, Homo sapiens
aacgaggcaaggagctaaagcagcgtgcgttcagccctggggttggtgttcgaggaagagacattgttgttcttggtgtggag

SEQ ID NO: 162859 - DNA, 115 bp, Homo sapiens
acctatctgagtacctgacttctcaggactgacacctacagcatcagataatgctctaccacaagaaaatggcctctcacctggggccattgctggcattgtgattggagtagtg

SEQ ID NO: 162860 - DNA, 100 bp, Homo sapiens
actaaactggcgggctccgtggaagcgtggccggcagcgtcccggacgaggaggtggtctgtttttctggggggccaccaacacctcccgtgaatctacc

SEQ ID NO: 162861 - DNA, 98 bp, Homo sapiens
ccaggacgacgtgtacctggacatcaccgaactctaagaaggagctgatgtggaggagcagctgagacagttcaagatgacgaccacagtagccacag

SEQ ID NO: 162862 - DNA, 50 bp, Homo sapiens
gttgctgacagaactaaagtctcctgcaaatcccggtctccagaatctcc

SEQ ID NO: 162863 - DNA, 51 bp, Homo sapiens
ttgtctgcttcaagccctggctcaaaatatgcgacttcatgatagcatatc

SEQ ID NO: 162864 - DNA, 90 bp, Homo sapiens
tgcctaggcattttgctgtctcctcctaatacgatgagtgaccgaggaggtggcgttcctttgaggaaaattgacagacttttcaactac

SEQ ID NO: 162865 - DNA, 99 bp, Homo sapiens
ttcgcggtgacggtggcgccgcccggggcgaggcagggccagcagcaggcgggaggtactccaaagattcaggtttactcacgtcatccagcagagaat

SEQ ID NO: 162866 - DNA, 75 bp, Homo sapiens
caaaatcagagctggaacctgaggagagagatgcggttcatgctattattcagccggcagggaaaactgcggctg

SEQ ID NO: 162867 - DNA, 100 bp, Homo sapiens
aactcagccactggttgccttggtaggcaataaaagagagttaatcaattgggtggcactggatcgtgagcaccgggggcaccatgagatgactgtgcta

SEQ ID NO: 162868 - DNA, 75 bp, Homo sapiens
ccctgggctggggcaggagccggtcaagacaaaacttaagccaaattcttcagaaaacacagtgactaaaaagca

SEQ ID NO: 162869 - DNA, 51 bp, Homo sapiens
ccaagcagccttagccctagtgtagaggagtcagaaataccatcagaggag

SEQ ID NO: 162870 - DNA, 51 bp, Homo sapiens
tcaccctgctcacccacgccccgctgcatagactcgtggtttgaagtgaac

SEQ ID NO: 162871 - DNA, 98 bp, Homo sapiens
ccattgtccagagggctattaagcggcgaccaggcagcgtcaccctttacaccagaaagctggcgggcactatggggaaaaaacaaaacaagaagaaa

SEQ ID NO: 162872 - DNA, 109 bp, Homo sapiens
aagctggccaaagcctgcccagacggctcacctgtgcgggatggaacaaaaggagaataaaggcagccccgttgatgactgaaaatgacaaagcatccacctaacagac

SEQ ID NO: 162873 - DNA, 80 bp, Homo sapiens
ttgttttgagctaaatattgagggttggaagtgtatcctcccttcttattttttctagctgttggaggtgtttaccaccc

SEQ ID NO: 162874 - DNA, 83 bp, Homo sapiens
ccggagcgtcccagctgcgaggagcagcgtccgtctccaagagagtatgaagagagtgcgtctgtagggcagggaagatggcg

SEQ ID NO: 162875 - DNA, 85 bp, Homo sapiens
gaggcgcgggaggtgttcgagaacgaccccgagacggacatggatttgattgacatactttggaggcaagatatagatcttggag

SEQ ID NO: 162876 - DNA, 100 bp, Homo sapiens
gtttcgacagcgaacatgtcgcggcctgtcaggatctcactggcatcgaatctatggatcagtgtcgccataccttggaacagcataactggaacataga

SEQ ID NO: 162877 - DNA, 100 bp, Homo sapiens
gagttgcttgtggactactatgtgaagatacaagacacaaatgtaacttctgaggacaaaaaggtggacccaagtggagagattgtggaactggcgaaag

SEQ ID NO: 162878 - DNA, 90 bp, Homo sapiens
tgagaagcgtatggccacagaagttgctgctgacgctctgggtgaagaatggaaggtggatcccacaactcatttgacctttaaccttca

SEQ ID NO: 162879 - DNA, 111 bp, Homo sapiens
ctctcccaggccacaagacatttcctgctcggaaccttgtttactaattgagtccaaaactacttacctggaagaccttccaccaccccctgagtatgaattggccccgtc

SEQ ID NO: 162880 - DNA, 76 bp, Homo sapiens
ctgaagatggctactctggagttgaggtgatctgtgaaaatggttcgctattcacttgacccggagaaccccacga

SEQ ID NO: 162881 - DNA, 90 bp, Homo sapiens
gtgtacctcatccacagggcctcctgccagccccagcccctggagaggatgcagaaactggcgatggaatatgagaggagccctctggaa

SEQ ID NO: 162882 - DNA, 100 bp, Homo sapiens
ctttgactgctttatgaccatattaatgcagatgaggcgttctttgaaaaagctgttcatttgcaagaggagctcatagctattaattcaaaaaaggagg

SEQ ID NO: 162883 - DNA, 75 bp, Homo sapiens
aaagcagcagttttcatcatctaagtgaaagctcctctggtgcaagtgtggtagctattgacaacaaaatcgagc

SEQ ID NO: 162884 - DNA, 97 bp, Homo sapiens
acatctctagcagtgctggagccaggtggcgagagacagagtctcgttctgtcacccagcctggtgtgcagtggttcaagccattctcctgcctcag

SEQ ID NO: 162885 - DNA, 83 bp, Homo sapiens
caggaagctggaaaggaaggtactgcaccatctgaaaatggtgaaactaaagctgaagaggtgtgaggacttctgcatcttac

SEQ ID NO: 162886 - DNA, 98 bp, Homo sapiens
aagactcatcatccactgagtttgtagaaaaacggagagcagctcttgaaagagacattttaaatccaaaggatgtgattagtgtccagctggaagac

SEQ ID NO: 162887 - DNA, 75 bp, Homo sapiens
aaggacacagacagtgaggaggagatccgagaggcgttccgtgtctttgacaagcttagcagtgtctgcaaaaac

SEQ ID NO: 162888 - DNA, 98 bp, Homo sapiens
gaagagggcaattggattgctcagccagattcgccatgaagtcagcgtaaataatgtaacacataaactgtgcagtaaccattgctttaataagtaca

SEQ ID NO: 162889 - DNA, 100 bp, Homo sapiens
cgagcgatctggacccttcacacaccctgatttcgaaccgagcactgaacaaaccctcctggggcttgcccatagatgctgttcagtgggatatctgcaa

SEQ ID NO: 162890 - DNA, 82 bp, Homo sapiens
tcctacaccgacaccggcttcttagctgaatacctctcctacgactccagtgaccgaacagatggagtcggataactgttca

SEQ ID NO: 162891 - DNA, 80 bp, Homo sapiens
agcggatcgggtggagtgtaggtcatatcgccgcgtgccctctggtggtcagaagatgctgtgctgtctcgttaggatga

SEQ ID NO: 162892 - DNA, 75 bp, Homo sapiens
ctcagcctgatcctggaagagactcggggccccccagcctccgccaacccaggggatggtggatccaggagagaa

SEQ ID NO: 162893 - DNA, 75 bp, Homo sapiens
cggagagcggcgaggcggcagccacagagtggagactgctgcacggactctggaaccatgaacatatttgatcga

SEQ ID NO: 162894 - DNA, 90 bp, Homo sapiens
ctccggagcagccactaagagggatgaacaggcctgcgtggaaattgaatgagattgtgtagtattgagtcctgtttgagctattgttct

SEQ ID NO: 162895 - DNA, 98 bp, Homo sapiens
gagcgggaccccgagcaccgggccctctgcgacctggggccctgggtgaagtgctccgccgcccttgcctccaggctgtattcatcaccaaagaaaaa

SEQ ID NO: 162896 - DNA, 80 bp, Homo sapiens
cacaagattgaccacattgatcacacctttctgagaaaagtctacagcattctttctctgcaggttctcttaactacagt

SEQ ID NO: 162897 - DNA, 82 bp, Homo sapiens
gctgcgggggattgtgggagtctccgcgtcccgctcgctgggagagagaccatggtgaatccgggcagcagctcgcagccgc

SEQ ID NO: 162898 - DNA, 100 bp, Homo sapiens
gagcttcttcctatttgccatgggagcaatttctacgggagaaggttaaagtcaatggcaaaactggaaatctcgggaatgttgttcacattgaacgctt

SEQ ID NO: 162899 - DNA, 87 bp, Homo sapiens
cagccgctgagacggtttttcacaagctgggctcaaaatgcagagaactcaaagatattcatttcggccagtgttacaagatctcag

SEQ ID NO: 162900 - DNA, 76 bp, Homo sapiens
cctggactgaaacgatcctctcatctcagcctccaaaagtgctggcattacagattcttggtgccaccattgagaa

SEQ ID NO: 162901 - DNA, 100 bp, Homo sapiens
gaaaagcgcaagctggtgatcccatccgagctagctggccttgactttgaagcaatcctgctgcagcctggcagccctccagataagacccaagtgccca

SEQ ID NO: 162902 - DNA, 98 bp, Homo sapiens
gccgggcacggcggccgagctgcggcagagcgtgtctgaggtggtgcgcggctccgtgctcctgacaaggcgcctctgtcgaagagccttctgctggt

SEQ ID NO: 162903 - DNA, 88 bp, Homo sapiens
ttttgggttacaaaaatccagaccagtttgcccagtatgcggagatcgtccacttcaccctcccagatgggactcagaggagcgggca

SEQ ID NO: 162904 - DNA, 80 bp, Homo sapiens
caaaggctgtcgcaaggaggaagcactatgttggccatggaaatgctatcaatgagctgaaattccatccaagagatcca

SEQ ID NO: 162905 - DNA, 97 bp, Homo sapiens
aggacagcaggcccaagtctgcacatcccaggtacccggaaattaaagaggagctggaggagctggaccgcatcacagagcagacgctctttgacct

SEQ ID NO: 162906 - DNA, 100 bp, Homo sapiens
agtatgcacttaatgtccctggccgttgctccagggagaactgcaaatatcttcatccacccccacatttaaaaacgcagttggagataaatggacgcaa

SEQ ID NO: 162907 - DNA, 101 bp, Homo sapiens
gggagaaccagccgactggagcaggcagcagcccagggtgtatgccatgtacaattccgtaaagggatcctgctccgagcctgttagcttcaccacccaca

SEQ ID NO: 162908 - DNA, 100 bp, Homo sapiens
gtttgtttctccaaggtttgaaaagcagctggcctgcaagagtaatcaagtcagaggattatatgacttttatctgcctagagaagaactatggatctac

SEQ ID NO: 162909 - DNA, 100 bp, Homo sapiens
cagcactttgtggagaaagtcgtcttccacttgcacgaaagctttcctaggccaaaaagagattgggctaatggatactacagacaacagagaaaacttg

SEQ ID NO: 162910 - DNA, 80 bp, Homo sapiens
aaactgaaaacaggtttcaaaagacagatgcttctgtgtcacacttgtcaggccatctggctgctgtgcacaggcgctcg

SEQ ID NO: 162911 - DNA, 75 bp, Homo sapiens
gggctttgttgtggaaatcccggttacctggttgcacagagcattgaggatcaccatcaggaagtgattggtttc

SEQ ID NO: 162912 - DNA, 100 bp, Homo sapiens
gggtgcccagcgcgccgctgctatcgcgcgccagaaggccgagattgccgcctccaggcctcaggagtgcaagtagctgatgaagtatgtcgcatttttt

SEQ ID NO: 162913 - DNA, 100 bp, Homo sapiens
aaaagatggtgcatgtgcaggattttactgctttttgggataagatggctctgagagattcctctgcgaatctgtttttagctatcaagtggcatccacg

SEQ ID NO: 162914 - DNA, 115 bp, Homo sapiens
ccggccggtgccagcacctttcggcttctgagacggcggcagcagcggcattcagttcccagtgacctgacagcagaggagcgtcaagaactggagaacatccgacggagaaaac

SEQ ID NO: 162915 - DNA, 82 bp, Homo sapiens
acagaaattctggaacacctatatggtttggtgcacctcgatttggaggaagtagggcagggcccttatctggaaagaagtt

SEQ ID NO: 162916 - DNA, 74 bp, Homo sapiens
agcgaccgatatagctcgccaggtgttgaggagctcaagcttgggaaaatggtgtgcattccttgtatcgtcat

SEQ ID NO: 162917 - DNA, 82 bp, Homo sapiens
ttgaagacttgctagttaggattttattactggcagcatgtatatcttttgctgaaggtgatgtggccgccctcaaccgacg

SEQ ID NO: 162918 - DNA, 75 bp, Homo sapiens
accgatgttaatggggtccggattgcagcacctgcagacaatatgaaacaccctttgaaggcaacttaattaatc

SEQ ID NO: 162919 - DNA, 111 bp, Homo sapiens
gcaaggtgatccagcaaggtcggcagagcaaggggcttacgcagaaggacctggccacggaagcggggagaggtggtgagagatgacccctgttgaggatttcattggtgt

SEQ ID NO: 162920 - DNA, 85 bp, Homo sapiens
acaagagtgaggttgctcatcggtttaaagatttgggagaagaaaatttcaaagccttgcctcttcatgtgcttgtgtgcaacgc

SEQ ID NO: 162921 - DNA, 100 bp, Homo sapiens
ggagagttctccaaacatgatcgtttactgcaaaatgggaaagggctccttcaagtatgcctgggtcttggataaactgaaagctgagcgtgaacgtggt

SEQ ID NO: 162922 - DNA, 98 bp, Homo sapiens
cttgctcatttctgagtattgtctttatatcctgacactatgaatgctacttggatgcctcttaagtcagcaggatggacctggagatgtcagggctg

SEQ ID NO: 162923 - DNA, 75 bp, Homo sapiens
tgaaagcccaaatcacctgtacttggtcatgcagctgggaaggtgtggctcattgactttaatccatttggtgaa

SEQ ID NO: 162924 - DNA, 90 bp, Homo sapiens
caacttcttccagaaccttcctctggcccgggctgcgctctgagccaggttggtcaaagaaaaagtgatgtatgaaaaagaggcaaaaca

SEQ ID NO: 162925 - DNA, 87 bp, Homo sapiens
cccaggaggacgactgggaccgggacctgctgctggacccggcctgggagaagcagcagcgcaaggcctgtagtggtggagacacgc

SEQ ID NO: 162926 - DNA, 100 bp, Homo sapiens
attctgtccctgattcacctctctacaacttcatcagggatggagagctccagtaccatgggatgccagcctggaagagtctcgctctgtggcccaggct

SEQ ID NO: 162927 - DNA, 75 bp, Homo sapiens
aagcgattctcatgcctcagcttctcaagtagctgggattacagatgctgggctcttgcactgtttggtggaaat

SEQ ID NO: 162928 - DNA, 100 bp, Homo sapiens
gctgaagcagaagatcgaggacacgctatgtccttttggcttcgaggtttaccccttccagatatcttaccatggatgaaacacgcaaattgttactttt

SEQ ID NO: 162929 - DNA, 100 bp, Homo sapiens
tgttggcctttcaggaagagtgcttaaggtaaaataccatgaagattttgaaaaaacaaaggggagaggctttactcccgtcgtggacgatcctgtgaca

SEQ ID NO: 162930 - DNA, 100 bp, Homo sapiens
tggaggctccgacttcctcatgaagagactccagaaagggcccgccgcgatggaggccgccgcccagttcttcgtcgagagcccggacgtggtctacggc

SEQ ID NO: 162931 - DNA, 74 bp, Homo sapiens
gggaaaaacaaatttagatgagtttgctatgggcaaagtggaagatgctttctacaaaggtgaactcaggctga

SEQ ID NO: 162932 - DNA, 51 bp, Homo sapiens
ccgccacctacccagtgaccatgataggatgtgatcttcgtggtggaaagc

SEQ ID NO: 162933 - DNA, 88 bp, Homo sapiens
cgcctggctcggacccacggagccggcagcccagcactccgattaataaagaactcttcagaattcctggtgtttcatcatatatacg

SEQ ID NO: 162934 - DNA, 101 bp, Homo sapiens
cttctgaaagcctctgctcacaatcggcagctgacacctgcagacaatctccactgttgcaagtggtgtttcgctatgccttggccattttcaagtacaac

SEQ ID NO: 162935 - DNA, 89 bp, Homo sapiens
ttacgggccttctggagatgcttccgaactgtgggcaaaaatggcgggaagaaggagaaagggccaacccctgaagaagcaatacagaa

SEQ ID NO: 162936 - DNA, 80 bp, Homo sapiens
ctcctggccaccgactcctacaagtatttaggtcagttaacgtccataccaggatacctgaatccctccagtaggactga

SEQ ID NO: 162937 - DNA, 82 bp, Homo sapiens
aagttgtaacaaccaattacaaacctgttgctaatcatcaatacaattggccataatataattgtgataatgtaataaaatc

SEQ ID NO: 162938 - DNA, 51 bp, Homo sapiens
gctgatgatcagaaacttatgatcaataccaagaaggagggtgacctgata

SEQ ID NO: 162939 - DNA, 100 bp, Homo sapiens
agaagctcagagcagagcaccgaaagtggccactaccagcatgaagagcccaacaattcaaactgctgcagaaccttggcctgaaaatgctacattatat

SEQ ID NO: 162940 - DNA, 100 bp, Homo sapiens
gaatatgccaaggaaaaactggagagcttcatcaaaaatagtgatagctttgataactctttcgacgtgtagcagcagctttgccgggaatggaaagcac

SEQ ID NO: 162941 - DNA, 75 bp, Homo sapiens
agcaccggtggggcccccaccttcaatgtcactgtcaccaagactgacaagagttatgatgtgattgctcaagcc

SEQ ID NO: 162942 - DNA, 96 bp, Homo sapiens
ccggcaactactttggattcacccacagcggggcggcggcggcggcggctgcggcccaatatagatcttgtggaagccctgaagccagagtatgtg

SEQ ID NO: 162943 - DNA, 100 bp, Homo sapiens
ccggaaggcttcaaaggctgtcgcaaggaggaagtttgtcccgctggctggaagcctggcagtgacacgattaagcccaacgtggatgacagcaaggaat

SEQ ID NO: 162944 - DNA, 100 bp, Homo sapiens
caatgccctcattaaagcagccggtgtaaatgttgagcctttttggcctggcttgtttgcaaaggaggatgaagaaggttataacgatggagaggtagat

SEQ ID NO: 162945 - DNA, 100 bp, Homo sapiens
cgcaaggccgcccgggaactgctgacgcttgatgagaaggacccacggcgtctgttcgaagaggagttctccaaaatgaaggaagaggtacccacggcct

SEQ ID NO: 162946 - DNA, 49 bp, Homo sapiens
gcccggcaccacccatcttgagtatctgagactgggtcttgctatgctg

SEQ ID NO: 162947 - DNA, 96 bp, Homo sapiens
aagaggtgttggtcatttccttaggtacaggtccccagcttactccagggatgatgtcagaaaatgaggcctctgtgtcctttgtcccaatagtaa

SEQ ID NO: 162948 - DNA, 100 bp, Homo sapiens
tgcactgattctagaaacactctctattcgaactctcatgagcttttctgggagaagaggctacaaggacttagtgcatcagatgtaacagaacaaatta

SEQ ID NO: 162949 - DNA, 98 bp, Homo sapiens
gatggcatgtcaggtggagaagaatttcctctgtgtgcgcatttagacaggttagtggatgacagatgtgtggtgcacccagaggccggggaccttgc

SEQ ID NO: 162950 - DNA, 90 bp, Homo sapiens
cggcactgttagaatctgggactttcttcgttgccatgaggaaagaattctccgagggccgcgatgggcctcttggaacattggtgtgtt

SEQ ID NO: 162951 - DNA, 75 bp, Homo sapiens
actgcacaaggatgtcaacgtggtagtagtggaaggggctgcatatccccaccgtttgaatctcttttaccttgc

SEQ ID NO: 162952 - DNA, 74 bp, Homo sapiens
cccgcccaacatctgcctagatcggctagaaaactgagatgaggtctcactctgtcacacaagttggagtgcag

SEQ ID NO: 162953 - DNA, 108 bp, Homo sapiens
gagcggccgccgcggccaccgaagccaccgcggccacggagaagggcgagaagaagaaggagctcctggggagtttgcttcacctacggcacctggtttggcctggag

SEQ ID NO: 162954 - DNA, 83 bp, Homo sapiens
aaagaagccatattgaaagaagctgagagagagcttcagctttagctgcagctgcctctgttcagccacttgcaacacaatgt

SEQ ID NO: 162955 - DNA, 83 bp, Homo sapiens
gacagcacctcatcccctggatgggggaccacaagatcctcatcgacagggacccagacatggagctgcgggaagaagcctgg

SEQ ID NO: 162956 - DNA, 100 bp, Homo sapiens
cctttatgaaccttgtgatagatgaatgtgtggagatggcgactagtggacaacagaacaatattggaatggtggtgtcctgtggccaggcggaaagcag

SEQ ID NO: 162957 - DNA, 98 bp, Homo sapiens
tcagaagaaggacttcggaatgcactacaacaggaaaatcatattatagatggagtaaagagtattgatgaggaaactgaagtttggagcgatcacat

SEQ ID NO: 162958 - DNA, 74 bp, Homo sapiens
gccggatccagcatctctccaccatcgactacgtggaggacgagccatccaaaactctgtttgtcaaaggcctg

SEQ ID NO: 162959 - DNA, 80 bp, Homo sapiens
tccagtccctgctgtctctgtttggtgctggagaatctggtaaaagcaccattgtgaagcagatgaggatcctgcatgtt

SEQ ID NO: 162960 - DNA, 100 bp, Homo sapiens
cttaaaagatgccacctctaagaacctgcacttgttgccaagtcttccatcttactagatgtgaaaccttgggatgatgagacagatatggcgaaattag

SEQ ID NO: 162961 - DNA, 103 bp, Homo sapiens
acagctcgacagtacgcctacttctataaagtcatccagttgctgatcatctgggctgtgatccacaaacccggttctttgtccctcctaatatcaaacagtg

SEQ ID NO: 162962 - DNA, 83 bp, Homo sapiens
tgctcagaccttcattgctctgtgtgccaccggaatgctgtctctgcaatttgagaggaggtgctcttaagcaaacgaagaac

SEQ ID NO: 162963 - DNA, 142 bp, Homo sapiens
aggagagatattttatatcccatgttctggctttctttgcagcaagcgatggcatagtaaatgaaaacttggcaactcatgcagcaattccagaaccccgacttcccacccgaagtagaggaacaggatgccagcaccctgc

SEQ ID NO: 162964 - DNA, 100 bp, Homo sapiens
tgcagttcccaaggaggcttcaagacaaagggccccttacacaccagacaggtggacccccaaaagtacaagggcatatttaacggattctcagttacac

SEQ ID NO: 162965 - DNA, 87 bp, Homo sapiens
aagcgggaagactcatcggagcgtgtggatttgagccgccgcattttttaaccctagatctcggtctctaattaacagaagatggca

SEQ ID NO: 162966 - DNA, 90 bp, Homo sapiens
atatgtgatgccattccagcactggactcatggaggctgagcatttattcagaatgtcatacccaggctatcccccaacaggctacccac

SEQ ID NO: 162967 - DNA, 101 bp, Homo sapiens
gctggcgctagtctgaccctccgccaggcaaaaggaagaggctgacccgcggctgattgagtccctctcccagatgctgtccatgggcttctctgatgaag

SEQ ID NO: 162968 - DNA, 75 bp, Homo sapiens
gcaattcttggaaatacttacactgtttcaataaaatcaaggaaatgggtcctgatgaatatgaagagatggaag

SEQ ID NO: 162969 - DNA, 97 bp, Homo sapiens
cgcaccggattccggagcacaagctccaccgcgcatgcgcacacgccccagacccaggctcagatggtgtcggacggcatgacaggcagcaatcctg

SEQ ID NO: 162970 - DNA, 100 bp, Homo sapiens
cagtcgccagtcagtgttgtgtggaagccagaacatcgttctcaatggcaaggaagatcctagtacctccccctctccggggacccgagcagccagccag

SEQ ID NO: 162971 - DNA, 104 bp, Homo sapiens
cggcgcctcctcggagtccttggggacggagcagcgcgtcgtggggcgagcggcagaattcagaaggagctggcggacatcactttagaccctccacctaattg

SEQ ID NO: 162972 - DNA, 71 bp, Homo sapiens
gcccggcccctgcggcccgcgcggagcggacgcgcgtggcgctgcccggctggagtgcaatggcgtgatct

SEQ ID NO: 162973 - DNA, 134 bp, Homo sapiens
cactggattggtgccacctaaaacattgttatgctggaaatgctagaatataatcactatcaggtgtgatgaatgcagactctgctaccattttggctgtttggatcctcctttgaaaaagtctcctaaacaga

SEQ ID NO: 162974 - DNA, 100 bp, Homo sapiens
tcttcaatgtgacggtagacagttggaaggtgcataaagagggagaagcatgacactggccaacactgcgtccagcatttgggtggccctcaggatttcc

SEQ ID NO: 162975 - DNA, 100 bp, Homo sapiens
ggtgacccactgtggacagatgaaacgaaaataccgagtttgtaatgtgactagacggccagccagtcatcaaacgtgaacacacagtgttcatcccctc

SEQ ID NO: 162976 - DNA, 51 bp, Homo sapiens
tgatattccaatttatgcagataagcttgttaaagcaggtttggcattagc

SEQ ID NO: 162977 - DNA, 98 bp, Homo sapiens
tcaagcttaggaccacccaccatgcctatccaggtttgggccccatggtatccctgtgacagtatttcccaaaagggaatataaggataaaccagaag

SEQ ID NO: 162978 - DNA, 82 bp, Homo sapiens
tgagattctctcccaggccacaagacatttcctgctcggaaccttgtttactaattatttgtgacccagaaggaaatctctg

SEQ ID NO: 162979 - DNA, 100 bp, Homo sapiens
gaaaccagctagtggagagggagaggttgaaggaacagaaaaatgagaagacaactcactgatctgcagcctcatgagagggggcattgctgagcgaggg

SEQ ID NO: 162980 - DNA, 75 bp, Homo sapiens
gaaatattggtcctcatggaagaagagcaagatttaccagagcaaccagaagctgccacttttgctagagagcaa

SEQ ID NO: 162981 - DNA, 75 bp, Homo sapiens
cgcacacgctagatggccgaaacttggaatcgaagcctcttaaaatggcagatgacttggacttcgagacaggag

SEQ ID NO: 162982 - DNA, 97 bp, Homo sapiens
caaacactaaggaatcgaaactcggcggccttgggggcggccctacgtagcctggcttctggataacagtcttcactcctatgctgatttttctggt

SEQ ID NO: 162983 - DNA, 75 bp, Homo sapiens
gacccggtaccaagaaggggagtgcccgcggcaggtgagaattatgaagatgatgacctagtaaattctgatgag

SEQ ID NO: 162984 - DNA, 100 bp, Homo sapiens
ctgcagtacctgctggagaagggagactacaaggacagcagcgactttggggcccgtcaccctcagaggctgacccgcggctgattgagtccctctccca

SEQ ID NO: 162985 - DNA, 99 bp, Homo sapiens
tgttcccccaccccagaagaggatggcaaaggtggctaaggacctcaacccaggagttaaaaaggtgtccggctttgctggcccagcaagcctgataag

SEQ ID NO: 162986 - DNA, 100 bp, Homo sapiens
gtctgggggttcgcgcccgccgacccgcgccctgctccctctcagcacctgggcggacggaggatacgaagcgttttcggcttcctgcccggagctgtgc

SEQ ID NO: 162987 - DNA, 82 bp, Homo sapiens
cggattttgcggggttcgtcgggcctgtggaagaagcgccgcgcacggacttcggcagagctcaccaaccaccaggagctgt

SEQ ID NO: 162988 - DNA, 100 bp, Homo sapiens
catcttctgtcctgaatacagtatctccttaagcaccaaggatgacattgatcttgatgccttggctgcagaaatagaaggagctggtgctgccaaagaa

SEQ ID NO: 162989 - DNA, 75 bp, Homo sapiens
gtttgcctctggttcagctcatacaacagcttcttagatgaattttctagacgaaaacgttctaaatcagaagac

SEQ ID NO: 162990 - DNA, 98 bp, Homo sapiens
agtgcctgtgtgttgggcactggctagagataaggcgaacagctgcttggagaactacaagtgaagaaaagaaagcattagatcaggcaagtgaagag

SEQ ID NO: 162991 - DNA, 82 bp, Homo sapiens
ggacagtgagtcgctctcgtccctccaggaaatgcaacctcaccacaagtacaaagaccatctttcatggactactttgata

SEQ ID NO: 162992 - DNA, 51 bp, Homo sapiens
ttcaagataacttgccaaaatgttcaaaatcaaaggaagcccagaagggag

SEQ ID NO: 162993 - DNA, 90 bp, Homo sapiens
caaagagctcagccactacacggtctcgcccaagaacttcaaggtgaaaatgatcatgaagacatcagttctgctcagctgggagttccc

SEQ ID NO: 162994 - DNA, 75 bp, Homo sapiens
agcaatggaagtgaaagcattaaaatgtgctggaaatcatattattcaaacacagttgatgaatgacttactggt

SEQ ID NO: 162995 - DNA, 98 bp, Homo sapiens
aaccggtcaggctggacgtgcacgcagcccggcgggaggataaagaccaccacgagcaagtgcaccggcacctggaccaacacgaagtgagatacctg

SEQ ID NO: 162996 - DNA, 82 bp, Homo sapiens
cagcagctgagaaaggagctcggggactcccccaaagacaagccttaatacagatattggcagctgctgcagctgagcgaga

SEQ ID NO: 162997 - DNA, 51 bp, Homo sapiens
cagcgcccggcgttggccacctacagcaacggcagcctttaacagttgagc

SEQ ID NO: 162998 - DNA, 80 bp, Homo sapiens
aaaccctatcctgtccgagcaaagattacctattaccagaacacactgacagaggatgatgaaattccactgtatctaaa

SEQ ID NO: 162999 - DNA, 74 bp, Homo sapiens
ctcccaagtagctgggattgcagtgcccatcccctccaaagccagcagcctctcagccctctccttggccaaag

SEQ ID NO: 163000 - DNA, 113 bp, Homo sapiens
gtctcaatatctgtcttcggtggactccttcggcagtccacccaccgccgccgcctcccagacctcctgccccccgaggtctgcagtctcctgaacccagcagccatctacgc

SEQ ID NO: 163001 - DNA, 75 bp, Homo sapiens
acactcaagcaaagaagagttgagcacaatcaggctcacctccacctccagtaaaagtttcttctgaacctccca

SEQ ID NO: 163002 - DNA, 75 bp, Homo sapiens
cagcggctgtatccgacgccgcgagttcgcggtgctggagaatctggtaaaagcaccattgtgaagcagatgagg

SEQ ID NO: 163003 - DNA, 75 bp, Homo sapiens
ggcttcaaaggctgtcgcaaggaggaagcaggtgagctcaggagataagatggaagatgcaacagccaatggtca

SEQ ID NO: 163004 - DNA, 100 bp, Homo sapiens
atcctcttcctcttcctctcggagctcaccggatttataacgacagaagtattgactttgaagatgtgattgcagaaccagaagggacacacagttttga

SEQ ID NO: 163005 - DNA, 88 bp, Homo sapiens
ctttccccaagtagtccgatggctgcggctgcgccgaggcgccctactcaggtatgaacgctgccgtccgtgccgtggtgcgcatggg

SEQ ID NO: 163006 - DNA, 100 bp, Homo sapiens
gagtgcagctccccctataagcctcggcctccacaggccaagatgttcataaatataaagagcatcttatggatgtgttcaaccttaatagtaacccatg

SEQ ID NO: 163007 - DNA, 74 bp, Homo sapiens
gcgcccttcctcggcgggccggactgtgtctttggtgcaacactaacaaggcttgtctggactacccagttaca

SEQ ID NO: 163008 - DNA, 75 bp, Homo sapiens
tgataagtggctcacagataaaattcgagagcatgggcatttggaggctacttaagtgaagtagtagaagaaaat

SEQ ID NO: 163009 - DNA, 82 bp, Homo sapiens
gtggctccgtaggccacaccgaggaacagggcggagtagcggccgagctgcgaaagagtaagactttgaccccgacgcaggc

SEQ ID NO: 163010 - DNA, 98 bp, Homo sapiens
cggaccgggcatggtgttgggcgccgggcccgcctcgcctgtctcggggagcccaggtatcatgatattagctggtttgacatcaagtcatttgtgag

SEQ ID NO: 163011 - DNA, 80 bp, Homo sapiens
ccgagcccttccaggacggctacagcctgtgcccgggccgggagctgggcaggtgagaagccctaccactgcaactggga

SEQ ID NO: 163012 - DNA, 50 bp, Homo sapiens
gcggaggctcaggcagcttgagcacttttccagccattaactccaggctc

SEQ ID NO: 163013 - DNA, 50 bp, Homo sapiens
cggagcctgacctcttacttcctgtggtctattatcctcccagtccacaa

SEQ ID NO: 163014 - DNA, 100 bp, Homo sapiens
tgaactctatagattctgctggtatacagctacatccaggagagaatgctgacagtcctgcagattaaagagtctattgttggggaaatcagacgggaaa

SEQ ID NO: 163015 - DNA, 98 bp, Homo sapiens
tttcaaaacctcgagcatctagaaaagaaaatggacctgttgtagattacaggctgtgccagccctggaaaaacagttacaattgttgttcgtggttc

SEQ ID NO: 163016 - DNA, 100 bp, Homo sapiens
gttcgtgctgctgggattcgcgctgctgggcacccacggagcctccggggctggaatcagagatcattgatttcttcctgggggcctctctcaaggatga

SEQ ID NO: 163017 - DNA, 75 bp, Homo sapiens
ttggagctttgcagctgacctacatctcgaaggtttatggagccgtacatctttgggagccgcctggaccacgac

SEQ ID NO: 163018 - DNA, 100 bp, Homo sapiens
acaacccggatgccaaggacctcaagcagcttgcccagaaaacaggtctgaccaaaagagttttgcaggaaaatatgagagccacacccgtgttcacaca

SEQ ID NO: 163019 - DNA, 75 bp, Homo sapiens
ttacggaggaacaggaatcagtgagcagaaaatgatgcatcctgttgccagcagtaatccagctttctgtgggcc

SEQ ID NO: 163020 - DNA, 100 bp, Homo sapiens
gcgagaggatcatggcggatggccccaggtgtaagcgcagaaagcaggcgaacccgcggcgcaataacgattgaccccaaagttgcatttcctcgtcgag

SEQ ID NO: 163021 - DNA, 98 bp, Homo sapiens
gatgaagacatctcttctctttttgtggaagactctgctagaaagacccccagagactgctgctactttgaaacgtacgatagaggccctgatggaca

SEQ ID NO: 163022 - DNA, 74 bp, Homo sapiens
aaactattctacagtgcaaaaaataccagcgaactcctgtttaagaaagcacagctgagtacaagctaactgga

SEQ ID NO: 163023 - DNA, 82 bp, Homo sapiens
tccagtgacaagcggacttccactcttctttgtcattactgtgacggctatcaaacaggtgaaagaaaatggcccgaaccaa

SEQ ID NO: 163024 - DNA, 83 bp, Homo sapiens
ggcggatggccccaggtgtaagcgcagaaagcaggcgaacccgcggcgcaataacgcggaatagaagatgaactcaactgaat

SEQ ID NO: 163025 - DNA, 75 bp, Homo sapiens
gagtgggcgagaacgtccactgcgggccggcgaaagctgagaaagcatgggattatggcaaccacagaatctcag

SEQ ID NO: 163026 - DNA, 100 bp, Homo sapiens
gtaggagaggattccggacgtaacctgagcgcccccgttaccttgaacttgagggtaaaaccacctcagctaattgattatctgcagcagaagaaaacag

SEQ ID NO: 163027 - DNA, 83 bp, Homo sapiens
gaagcagccgatccagcctgcggagcctgtggggcaggcccactgctcagtggagcgtggaggacgaggaggaggccgtccac

SEQ ID NO: 163028 - DNA, 90 bp, Homo sapiens
tgttcagtctcctgcagatgcctgcacacctcctggccaatggaagcactgttgtgaagaacttatgaaaattgagattatgtcaccacg

SEQ ID NO: 163029 - DNA, 100 bp, Homo sapiens
gccgctcgcgccgggcccgtggccgggcagtgaaatcaactgtgcagaccatcactgttggaggagtgagcacatcacagtttaagacaattattcctct

SEQ ID NO: 163030 - DNA, 95 bp, Homo sapiens
agtatgatgaactggaggctgagtacgacagcctcaaacaggagctggagcagctcaaagaggacataccgagggattgcatatgttaaatggaa

SEQ ID NO: 163031 - DNA, 127 bp, Homo sapiens
gggtcgcctagtgtcatgaccagggcgggagatcacaaccgccagagaggatgctgtggtgcaatggatgagcttcatagtctggatccaagaaggcaagagttattggaagctagatttactggag

SEQ ID NO: 163032 - DNA, 100 bp, Homo sapiens
gaaatagtaaccctgccaaatacatcagcttgtaggagacagagataagaccatcatcatgtggaaactgaccagggatgagaccaactatggaattcca

SEQ ID NO: 163033 - DNA, 100 bp, Homo sapiens
gagcctgggaggccggccggtgccagcacctttcggcttctgagacggcggcagcagcggcattcaggggtgagcccctccagactccgaataggagatc

SEQ ID NO: 163034 - DNA, 76 bp, Homo sapiens
gacggactcactgccctgcaccaggaactgcaagcacatgttgaccagataactgaaatggcagcagtaatgagga

SEQ ID NO: 163035 - DNA, 87 bp, Homo sapiens
gctctttggcagatctgctcccagtcctgccagtgaaatacatgaacaggaagcggtgcaggaggttcctagagttgttcagaatcc

SEQ ID NO: 163036 - DNA, 82 bp, Homo sapiens
cggagctgggcgcggattcgccgaggcaccgaggcactcagaggagaatcattgatcagcgattcgagaaggtttcctactt

SEQ ID NO: 163037 - DNA, 99 bp, Homo sapiens
cccagtcccagcagaggtaccagccgcagcaggtgacagagctgaatgaacctctctccaatgaagatcgaaatctcctctctgtggcctacaagaatg

SEQ ID NO: 163038 - DNA, 100 bp, Homo sapiens
atcagacatgcccaaagaagtctgcttagggtgaaacaaatacctttgaggtttaaatcagggcgatgctggatcttttcttgtctgaatgttatgaggc

SEQ ID NO: 163039 - DNA, 75 bp, Homo sapiens
aacttttcgcttatggcctcagtagggaccattgcaatttagagatgtggccatagaattctctctggaggagtg

SEQ ID NO: 163040 - DNA, 50 bp, Homo sapiens
tggactcattcatggtgacctttcagcaatcagcaaacattgggaggctg

SEQ ID NO: 163041 - DNA, 80 bp, Homo sapiens
gcaccggatcaccaagacggaggtgaccgggttattgatgtgggatctgaatggcgaactttcagcaatgacaaagcaac

SEQ ID NO: 163042 - DNA, 100 bp, Homo sapiens
gtccgaccgagagtcctggtgactttgaacatgctggtgccgctagccaagctgtcctgcctggtacatccagcagtggtcattcgacaacgaaagtcat

SEQ ID NO: 163043 - DNA, 82 bp, Homo sapiens
agttttgcagatcttcaacaagaggacccaggagaaattcgccctcaaagtctcggcgcggaagatggccggcggcgtggac

SEQ ID NO: 163044 - DNA, 117 bp, Homo sapiens
agtcattcatttttgatcaggagaaagaagacagccatcatttgaaaggtggtgatctttgtgaagtctgtgcagcggtgcattgccttggcccagctactagtggagcagaacttc

SEQ ID NO: 163045 - DNA, 96 bp, Homo sapiens
ttccacaccagtgcctcagaggtccatggcagtatcccagccaaatctcgctcaaaacactggaatttcaactttgtataggaattcttatggtgc

SEQ ID NO: 163046 - DNA, 98 bp, Homo sapiens
ctgcggccgtcgcccaggagtcatcggacgccagaatctgggatgtggcccactggacggtggtgccctggagatcctggagcggcgcctgcgtgtgg

SEQ ID NO: 163047 - DNA, 89 bp, Homo sapiens
catttttagatgagtctaatgaggatgatgaaaatgggtgtccgcaatgttgccagtgtctgtctgcagattggctacccaactgttgc

SEQ ID NO: 163048 - DNA, 74 bp, Homo sapiens
cagggtccctgaagagggaagacacgcggaaacaggttgtacgtggacactataaaggtcagcaaattggcaaa

SEQ ID NO: 163049 - DNA, 83 bp, Homo sapiens
cgaggtggccggagccgtgtggaccaggaggagcgctattctgaaaaagagttccacgtcctcccttatcgagtctttgttcc

SEQ ID NO: 163050 - DNA, 100 bp, Homo sapiens
ctgagtcctatgctggcagcggggaaccttggggagaacacgggacaccgcggaagccgggaaatgtgagaaagatcagtctaaagaaaaggagaagaaa

SEQ ID NO: 163051 - DNA, 75 bp, Homo sapiens
gaccagatgtttctcaggaaagccaagcgagagctctgcttatgataatgtcaacaaagttcgagtagctatcaa

SEQ ID NO: 163052 - DNA, 75 bp, Homo sapiens
agaccgtggctgagcagggcccctgtgagactgaatggtgaacctctggataattttgaatcactggataatcag

SEQ ID NO: 163053 - DNA, 101 bp, Homo sapiens
atccaaggacatgagcagtttacacatctcacccaattcagctacaaaagaccccacagctgtagagagagcaaacttgttaaacatggctaaactgagta

SEQ ID NO: 163054 - DNA, 100 bp, Homo sapiens
ctactctctctttctggcctggaggctatccagcacaggccgacggtcgcaaggtcctacggtcaagcatccgggagtttctatgcagcgaagccatgtt

SEQ ID NO: 163055 - DNA, 98 bp, Homo sapiens
cggcccctggaggagctgagcattccaggggcctccttccagggggctgccctctcgaagtcatcgaagaagccaactggatgactctggacaaagat

SEQ ID NO: 163056 - DNA, 75 bp, Homo sapiens
tgttcccgctggcggcgggcatcttcttcgtgaggctgctcttcgagcgtcatcagtgagttctgcctcagtcag

SEQ ID NO: 163057 - DNA, 75 bp, Homo sapiens
ctgctgggcacccacggagcctccggggctggttgggggccgtcccgctcctaaggcaggaagatggtggccgca

SEQ ID NO: 163058 - DNA, 74 bp, Homo sapiens
cctggaataggttcgccgaagagagagggttgaaaaataccggccacagaccctgaatgatctcatttctcatc

SEQ ID NO: 163059 - DNA, 100 bp, Homo sapiens
tgatagcttatggttctccattgtgatgaaagcacatggtacaggcccagcactggcttctgctgctccacttctcatagctttcctcctgggccccaag

SEQ ID NO: 163060 - DNA, 100 bp, Homo sapiens
catttcgaattctgcttcaagttcccggctcccaggtttattctcccatagcatgtggtgatccgggagccgaagccacgttcagcccgctggctcagca

SEQ ID NO: 163061 - DNA, 75 bp, Homo sapiens
ggctatccagtgacaaccttcgaggtacctgtgtccgtacacaccagaccggtcacggtctagatcacattctcg

SEQ ID NO: 163062 - DNA, 82 bp, Homo sapiens
tcggcagcgcccgcggagacgtgaagagatggttccttcatcagcttcaggccaagttcgaagtcactatgtagactggaga

SEQ ID NO: 163063 - DNA, 96 bp, Homo sapiens
attcctttaagacaaaatttactcagccagtactacctggtttcatgccctgccaaggtaaccctgctggggtcagttatcttcacattccagcac

SEQ ID NO: 163064 - DNA, 98 bp, Homo sapiens
cccacagccattctggcgttcctggtcaatcatgacttcacccctctggagctgctacaggagctgagagaccctaccctcactttccgtctgcttgg

SEQ ID NO: 163065 - DNA, 149 bp, Homo sapiens
aaggaaagttgactgaaaatggggcggaagaaaatacaaatcacacgcataatggatgaaaggaaccgacaggttttctaaatagctttgaggagttacaggctgaggaatgcggcatcctcaatggatgtgaaaatggtcgctgtgtg

SEQ ID NO: 163066 - DNA, 75 bp, Homo sapiens
tgcctctcgccctaagccccggcccagcccgagcaggatgccgctaccatggcgtcactactgcctccggagaga

SEQ ID NO: 163067 - DNA, 119 bp, Homo sapiens
cccggatgtgaggcgatccgctggcgctagtctgaccctccgccaggcaaaaggaagaatgctgcttctaaattacttgggcaaaattgggtccaaaacgcctttgatggcagctgcaa

SEQ ID NO: 163068 - DNA, 83 bp, Homo sapiens
gtgcccaccgcgcactcggagatgcagccgctggtgaaaggtgtagcagtcactcggcctacacccacagcatcgaccttgtg

SEQ ID NO: 163069 - DNA, 100 bp, Homo sapiens
atcatgttccatgctgctgacgtcacatggagcacagaaatcaatgttagcagatagccagcccatacaagatcgtcttctttgtgatattggccacagt

SEQ ID NO: 163070 - DNA, 107 bp, Homo sapiens
gctgcgggagtggcctcaagatggatgaagacggcggcggcgagggtggtggcggtatttctgggaaaagccagcttctgtttgcactggtcttcacaactcgttac

SEQ ID NO: 163071 - DNA, 100 bp, Homo sapiens
tttcgcttttttacctgccaatcaaactgctacaagacaacaccctgatctggcatggacatcaaccctgatctccggagaactgagcccatcttggaga

SEQ ID NO: 163072 - DNA, 105 bp, Homo sapiens
gcttcagaaacaaaaagaagagctacaacgtcagcatgatcaactggaggctcagaagctggaatatcatcagctttgcaaaaaactgggtggctcatgtgttac

SEQ ID NO: 163073 - DNA, 83 bp, Homo sapiens
tgcccaccagctccccatcgcagaggccatgctgacctacaagcagaagaggcccccagaactctccttccagctgaactccc

SEQ ID NO: 163074 - DNA, 75 bp, Homo sapiens
ctgaagctgggcatctggggcggtgtcctcatgacttctcttgtggaccatgtccgtgatcttttttgcctgcgt

SEQ ID NO: 163075 - DNA, 119 bp, Homo sapiens
agtcagtaccctgcagccctagcccccttgcaggcgaaattcgccgtggcaccagtgatttggagtcaaaatatggacctgagaaaatatctccagaaaatgatatttttgaaataaat

SEQ ID NO: 163076 - DNA, 80 bp, Homo sapiens
attttgaagtcatttcacatcgaagccatgatttaaatatcggcgttaaggattttttatcaagcagaaatgcatcgaac

SEQ ID NO: 163077 - DNA, 98 bp, Homo sapiens
aaccagtcacctccccacccccaccgccaagcagccacgagaaagggtcgacaagtgcccccaatgatttatggtacaacttcattgaactgccctac

SEQ ID NO: 163078 - DNA, 100 bp, Homo sapiens
atcattggtttatgcaggaattaaatcaattgtaaagtcatcgttggtgtgaacgcaagatttgtgaatgtgagaagggagatccaggtgatccagggcc

SEQ ID NO: 163079 - DNA, 100 bp, Homo sapiens
ggccagtgggagagcgaggcctgagcctctgcgtctaggtggagtgtgttactcttggggctggaatgagcatggcatgtgcggagatggcactgaagcc

SEQ ID NO: 163080 - DNA, 75 bp, Homo sapiens
cggggatttcctgattggtgctggcatcagcacagacaccgctttgccgataggaccaagaatcgccttcagccc

SEQ ID NO: 163081 - DNA, 83 bp, Homo sapiens
ccacttgctcgtgcactttacacacatgagggtggcccagttgaaatccttcccttcctctaccttggaagtgcctaccatgc

SEQ ID NO: 163082 - DNA, 75 bp, Homo sapiens
acatccacactccgctgctcgacagaactcaagacatggctgcccagtgtgtcacaaaggtggcgctgaatgttt

SEQ ID NO: 163083 - DNA, 75 bp, Homo sapiens
ttttgggttacaaaaatccagaccagggcacagtcagtggtgtgctgctagttacaccaaataatataatgtttg

SEQ ID NO: 163084 - DNA, 76 bp, Homo sapiens
gaccaacctggggcccaagggcaccatgaagatgctcttctggagctggagatgaactcggacctcaaggctcagc

SEQ ID NO: 163085 - DNA, 80 bp, Homo sapiens
ggacgaggaggacgcgcccgccaccgacatctactttcctcttctgaaacagtctccctggagcaaccatcagagcagtg

SEQ ID NO: 163086 - DNA, 75 bp, Homo sapiens
gtgaactgtgaacagaagcaagagtgggcccaacgacctacggcactttgaccccgagtttaccgaagagcctgt

SEQ ID NO: 163087 - DNA, 82 bp, Homo sapiens
tgactctcggactgagaaacgcaagtgcagggctcgcggcctggcaagaatgtacagctgacagagaacgagatccgcggtc

SEQ ID NO: 163088 - DNA, 82 bp, Homo sapiens
cgaggacatggacctgtacagcatcaactacctgcactttggggagcctaagtcctggtatcacctcttctgggctcaagat

SEQ ID NO: 163089 - DNA, 51 bp, Homo sapiens
aaagaggcaccattcgtacccgttggtgtcagtaattaacactgtggatac

SEQ ID NO: 163090 - DNA, 126 bp, Homo sapiens
ctttgctgacatggaattgctaagaaaagtagtagtccctgggatccgtatgtccattaaacttcatcaggagcaagtaatactgcagacacattgtttcaagaagtattaggtcggaaagacaag

SEQ ID NO: 163091 - DNA, 90 bp, Homo sapiens
tgagccagagctccagcagccttgttagggcgtggcctgaggcttggataagtggggtgcagtagacattgttgcaatcatgatcggcaa

SEQ ID NO: 163092 - DNA, 88 bp, Homo sapiens
ctcaaagttgagattatagagaaggacaccaagtacagtgtcattgtgatccggagtgacaatatgtacagttgtgaaaaatgcaaaa

SEQ ID NO: 163093 - DNA, 90 bp, Homo sapiens
ccgcaagtcccccccggagaaaaagttgaagcgttatgcctggcgtttccttgaccatgcaggcattttccgaagaggaaaggaagcagt

SEQ ID NO: 163094 - DNA, 102 bp, Homo sapiens
cacgcctggcgatcctgggcggcgtggaggggcagcctgacagcacccaagaaaacctcatttggctcgctgaaggatgaagaccggattttcaccaacctg

SEQ ID NO: 163095 - DNA, 83 bp, Homo sapiens
gcttcaccgtgcccctgcccgcgaccatggcctcctccgaggtggcgcggcacctgccaaaactggacaagccaaggcatctg

SEQ ID NO: 163096 - DNA, 99 bp, Homo sapiens
tctacaactactgaaaaagctaatattgctttatctgcagaattccttgtgtggatatcagatccggatggaatctcgagcttgtgaatctaccaggtt

SEQ ID NO: 163097 - DNA, 75 bp, Homo sapiens
acactcaactaattggcatcatcacagaagacaaacttttgcttgagagccagctcatcctagctacagctgaac

SEQ ID NO: 163098 - DNA, 82 bp, Homo sapiens
caaccatcgcagttggaagcccatggggcaggtgccccacctcaaccagaatgcctggaacaacctggagaaatatagccgc

SEQ ID NO: 163099 - DNA, 75 bp, Homo sapiens
gccccctggagagatactacgactacagcggggccttccgggatcttgcctcggagctggtcccactacacggtg

SEQ ID NO: 163100 - DNA, 98 bp, Homo sapiens
aactattcgcggagctggaatgactggcaacccagaaaatgatgcatcctgttgccagcagtaatccagctttctgtgggcctggcaagccttcctgc

SEQ ID NO: 163101 - DNA, 80 bp, Homo sapiens
ttctcctctcatgaaacccttgcttgtatttgtgaatcccaagagtggaggcaaccagagaatggatcttggagaatgtc

SEQ ID NO: 163102 - DNA, 74 bp, Homo sapiens
ccctcctcactcacttccggtggcaggatattcaaatagaagccttgctgatgagagcctgtgagcccataatt

SEQ ID NO: 163103 - DNA, 75 bp, Homo sapiens
accggattgagatgtggagttacgcagcaaagctgtgggatgctgccagtggctcgttgctccaggacctacaga

SEQ ID NO: 163104 - DNA, 75 bp, Homo sapiens
ttggagagtttttgcaatttgttcaacttgatggtgttctaaggatacattttattgaagctcaggatcttcagg

SEQ ID NO: 163105 - DNA, 76 bp, Homo sapiens
ctctagtgtctggaggaggaagtgtcagcgctactgccgcagcttgtcagctcatttgcagcttacatttttggtt

SEQ ID NO: 163106 - DNA, 51 bp, Homo sapiens
tcatacttggaaatggctgcaggttcagatagagatggagtttcaccgtgt

SEQ ID NO: 163107 - DNA, 100 bp, Homo sapiens
agcagatgtaccctcagtacgccacctactattacccccagtatctgcaagccaagcaacagcttgcacaactacagaaagaaaaatcagagattctgaa

SEQ ID NO: 163108 - DNA, 75 bp, Homo sapiens
cgactccatggccaactccttcgtgggcacgcgctcctacatggctctggcagccaggaggcaggagcagcgggc

SEQ ID NO: 163109 - DNA, 83 bp, Homo sapiens
ggactttgcagccctctttgccggaggaaggttacagagtgtttcaagtgccattcacctatgtgacaagaagaaaatggaat

SEQ ID NO: 163110 - DNA, 100 bp, Homo sapiens
gcatttaataacaaatagctttgtagaggtagcgatgggcttctttcaagtgggttttgtttctgtctacctctcagatgccttgctgagtggatttgtc

SEQ ID NO: 163111 - DNA, 75 bp, Homo sapiens
cagctgcgcgtcgccaaagtgacaggcggtgcggcctccaagctctctaagatctgctacaggagctgagagacc

SEQ ID NO: 163112 - DNA, 100 bp, Homo sapiens
ggtgctacacaaggagcccgggccccgggttcggggaggcggcggccgcggcggtcgctgggggccacggagcctgagactcagtgttcctgaaagtaca

SEQ ID NO: 163113 - DNA, 90 bp, Homo sapiens
ccccgggcaacgatcggaactcggacacggcagtgaaaaagcagtctggctcccgaggtccaccccttataccccaaggtccagatggcg

SEQ ID NO: 163114 - DNA, 75 bp, Homo sapiens
ccagcaagactatgaatctctgttccaaatgctttgctggacaagaagctctctctcagacaaccatctcatggg

SEQ ID NO: 163115 - DNA, 87 bp, Homo sapiens
cggctctccgccgtccccagccctgcctctccctgggctctgtgtgtcccagatgcctgtggccgagggcaagagtgttcagcaaac

SEQ ID NO: 163116 - DNA, 73 bp, Homo sapiens
gaaaatgtccacccccatcgaagtgttgtgtaaaggctacccttgtatcctgtggtctgaggccatcttcctc

SEQ ID NO: 163117 - DNA, 90 bp, Homo sapiens
aaagggcaagaacgtgcggatttatcaaatagccttgaggaaatatatatggcttaaaagacaaccttcttgcttctgggacatccagcc

SEQ ID NO: 163118 - DNA, 83 bp, Homo sapiens
gggcgctcgagacttaccagagccacaagatggagaaggaggagacaacccgggagctgctgctgcccaactggcagggtagt

SEQ ID NO: 163119 - DNA, 98 bp, Homo sapiens
ggagcccagcctcgttgcggccatcgccctgccggaccgcgcctcaggctcccccaggcagttgtgaaaaacttcaggacaaaaatgtttcatttaag

SEQ ID NO: 163120 - DNA, 126 bp, Homo sapiens
cattatcaaaaacagctcttaaaaatcaaaggaagcatgaagctaagaaagctgcaaagcaggaattagcagcaaaagtggttcagatgttttatgtggctgagccaaagcaagtgccccatattc

SEQ ID NO: 163121 - DNA, 83 bp, Homo sapiens
ctgctgggcacccacggagcctccggggctgaacactctgctccagccaaggtggtgagggcagctgttcctaaacagcgcaa

SEQ ID NO: 163122 - DNA, 100 bp, Homo sapiens
gcacaccaaggagatcgacctggtcaaccgcgaccctaaacacctcaacgatgacgtggtcaaggcattagatggcttcattatcgcagtgacaacagac

SEQ ID NO: 163123 - DNA, 95 bp, Homo sapiens
gaagaccgcgcgcagggcctgcagcgggagctggacggcgagcgcgagcggcgcgagaaatgtcaacagcatctccaccctggagcctgtgagcc

SEQ ID NO: 163124 - DNA, 100 bp, Homo sapiens
gggagcagccccgtcccttactcagcgcctcgtcctgcagtggtggccaagctgatcgtccccaacagcacggcgggcctgatcatcggcaagggaggcg

SEQ ID NO: 163125 - DNA, 88 bp, Homo sapiens
tggagatccagggcaagcgggtcaagagcctgttctgctgggacacagaatcacttgctccatctcatacattgatgatgattaattt

SEQ ID NO: 163126 - DNA, 99 bp, Homo sapiens
ggactacgacagtcaccgcaggttcgaagactactggtgcctggatgatctgtaccgggagatggtgagatgctatgtggaaatcgttgagaagcttcc

SEQ ID NO: 163127 - DNA, 100 bp, Homo sapiens
ctggagcggccgccttccagcatgacgtccggttgtttgccttcgtgcgcttcaccaccggggatgccatgagcaagaggtccaagtttgccctcatcac

SEQ ID NO: 163128 - DNA, 100 bp, Homo sapiens
gcgcgcgcagggcggccgagctgggtgccagggccgccgtggtggagagccacaagctgggtggcacttgccattatggatccaagcctgttgagagaaa

SEQ ID NO: 163129 - DNA, 97 bp, Homo sapiens
ttttggaactgtctatctggtttcagacaagaaagccaaacgaggagaggaattgttttgcagccactcttgatgatgacaaaccttggtactccat

SEQ ID NO: 163130 - DNA, 100 bp, Homo sapiens
ataacatcaacacactgttcaaaatcatgcgagtggggacagcttcttcctaggggtatagaacaggctatgcttacaggcatcctctcattcgagagaa

SEQ ID NO: 163131 - DNA, 75 bp, Homo sapiens
gtacccgaccctcacccgcctccttctgaaggctgattcccagccatatgaagacaccctagctggacgatcagt

SEQ ID NO: 163132 - DNA, 96 bp, Homo sapiens
aaacaaacttcagctctgaaatagaagatcttgcaagggctacccacctttctgttctgagacccctcaagagacatataagaaggtgatgaactg

SEQ ID NO: 163133 - DNA, 100 bp, Homo sapiens
tactcatagagccagatcctcagctctgcagctccaggcaactctgcctcagaacagggattgcttctccagccccttcgactccaccggggccctgagg

SEQ ID NO: 163134 - DNA, 100 bp, Homo sapiens
cttgggaaaaggccggagaaggtgaaattctgtgtgctccctccggcgagagactttgtcagctcccgcacagtaacgaagaaaaaatgctgggcatctt

SEQ ID NO: 163135 - DNA, 108 bp, Homo sapiens
ggccagagtcacacacggtcctaagagctgggcaccaggaagcgaaggctgacaatgcagatcttcgtgaagactctgactggtaagaccatcaccctcgaggttgag

SEQ ID NO: 163136 - DNA, 75 bp, Homo sapiens
cggccgatgaagtgcagaggtttttttctggaacttgatgggaaacctgcttctcctactccggttattgtggcc

SEQ ID NO: 163137 - DNA, 100 bp, Homo sapiens
cccactcagaaggtgccctctttgcaacatttcaggaaaacagagaaagaagtgataggagggctctgtagggttattttagggacacagtgatgtacta

SEQ ID NO: 163138 - DNA, 50 bp, Homo sapiens
gggcgtctgggcagcctacgctttccggcttcaacggaccacaccaaaat

SEQ ID NO: 163139 - DNA, 100 bp, Homo sapiens
cccgccgccgccgccgccatcatgagggaaatcgtgcacttgcaggccgggcagtgcggcaaccaaatcggcgccaaggctcttgtcaggatggtgaagc

SEQ ID NO: 163140 - DNA, 100 bp, Homo sapiens
cagcatcgttcaaggtttccagtggggaaccagggagggccccctctgtgatgaatgggcttctttcctgtcgttgttggctttattagaagagtgccag

SEQ ID NO: 163141 - DNA, 96 bp, Homo sapiens
ttgaatttttgttgcaacttggagtgccagtgaatgataaagacgatgtttccaatacttatctacaggaatcgccatgaccccagctctgaggga

SEQ ID NO: 163142 - DNA, 80 bp, Homo sapiens
ccggaggccatgggcacgccttggacagtccctgactccacctcttctgccacaaacgtcagcatggtggtatcagccgg

SEQ ID NO: 163143 - DNA, 83 bp, Homo sapiens
aggattccaagtaactcttatttggtggaaaggagactatggaaccaggatccagcagtacttcccatccaactacgtcgagg

SEQ ID NO: 163144 - DNA, 139 bp, Homo sapiens
gaagtccttatacttcagttgttcagtcagattggaccctgtaaaagctgtaaaatgataacagaggggaaggtgtggctcattgactttaatccatttggtgaagtcacagattcactgctgttcacctgggaagaac

SEQ ID NO: 163145 - DNA, 49 bp, Homo sapiens
atcgggactactatagcagatcatacagaggaggaggaggaagaggagg

SEQ ID NO: 163146 - DNA, 100 bp, Homo sapiens
aaattgttctctggagatgacaaaggcaaaattgtttattcttctctggatctagaccaggagatacaactcgtcaacgaatcaaattcagtgatgacag

SEQ ID NO: 163147 - DNA, 98 bp, Homo sapiens
cagtcaaccagtctattgttgtcagtggagagagtggtgctggaaaggtacctgaatctctctcatccatggagtgtcaccattttctgaggctgaaa

SEQ ID NO: 163148 - DNA, 103 bp, Homo sapiens
tatgccatctctagcagtaagtcctccaatgtcattgtcctgctattagcacagataatggagactgaagccaaggataccagcagagccaacatttgcttca

SEQ ID NO: 163149 - DNA, 75 bp, Homo sapiens
ctgccgaccgtgtgcgctccttatattcccccgcagagggtgttcctgaaaagccccatagtgattgagtcttca

SEQ ID NO: 163150 - DNA, 50 bp, Homo sapiens
agtcgccgccggcgtcggcgccggtaaggggcctggataccaagaagtga

SEQ ID NO: 163151 - DNA, 75 bp, Homo sapiens
gcagaaatcacattggaccctcctcccaactgtaggttgtgggctgcacactgcagaaagatacagctgaaaaag

SEQ ID NO: 163152 - DNA, 96 bp, Homo sapiens
gatgtctgacaacgtggatcgttgttttgaaacgtttctaagcatgaattgaggaacagaagaagcagagcagatgatcggagcagcatttgtttc

SEQ ID NO: 163153 - DNA, 100 bp, Homo sapiens
cggaagtgctccagaactcaagaggttggaaagaaccatgactgtattcaggaaggcacatgaactgaagcttctgtcagaatgccaatacaagcagttg

SEQ ID NO: 163154 - DNA, 97 bp, Homo sapiens
atgtcactctggctaacaaatttgagtcctgcagtgtaccacgaaaaatcaatgtcagcccaacaacttacagttggtcatgttcggagtttgacct

SEQ ID NO: 163155 - DNA, 83 bp, Homo sapiens
gtgattccctgcggtgtgcaagtccgactggaacaggccctggagggacaggaaagccagaaatggacttcgtgagactcgct

SEQ ID NO: 163156 - DNA, 98 bp, Homo sapiens
gcaaagcgcccagcctgccgcctcgctgtccctgcggcttctggggatttatcagcaagactgttgaacgcataactgcccaagatgcctgtccctcc

SEQ ID NO: 163157 - DNA, 100 bp, Homo sapiens
gatctgcacttcgcattttggcattgacatttaattttagggtcctttatatagaagggagagtagccttgtcttaaaagaagaagcatctgattacctt

SEQ ID NO: 163158 - DNA, 101 bp, Homo sapiens
gctgctggccaaatttgaagagaatgcgcccgcacagtccatcggcatacggagacagaaatgcctccacggctgtgtacgcctgttgcaaccccatccag

SEQ ID NO: 163159 - DNA, 84 bp, Homo sapiens
ttggttacctatgtacctgttaccactttcaaaagtgagaattatgaagatgatgacctagtaaattctgatgaggttatgaag

SEQ ID NO: 163160 - DNA, 90 bp, Homo sapiens
cttcggcagtccacccaccgccgccgcctcccagggaaatcctcattgacgattcaatttgttgaaggccaatttgtggactcctacgat

SEQ ID NO: 163161 - DNA, 98 bp, Homo sapiens
tgatagtatcctggatcttggattagtagactcctcagaaaaggtacaggtatcagcagatgttgcacacaaacttggtataccttgctacaatagca

SEQ ID NO: 163162 - DNA, 100 bp, Homo sapiens
cttcgctggcgggagcgcggttcggggccgcagagattgcttccaagtatgatcatcaggcagaagaagatcttcgcaattggatagaagaggtgacagg

SEQ ID NO: 163163 - DNA, 90 bp, Homo sapiens
ggctctaggctccaagacgccgtcgcttgagaatgctgcttctaaattacttgggcaaaattgggtccaaaacgcctttgatggcagctg

SEQ ID NO: 163164 - DNA, 48 bp, Homo sapiens
ggggccgccggcggcccggcttcaggaccgcagctgaatgcacagcta

SEQ ID NO: 163165 - DNA, 75 bp, Homo sapiens
cttcagcctgccgggcaggggacgtgaacatggatgaccctaagaaggaaggcctgagggaagacatgctggaga

SEQ ID NO: 163166 - DNA, 82 bp, Homo sapiens
cagaaacagaactgaaacaactggaaactgttttggatgatcttgaccccgagaggatgtgaagccactgaaagcttgactc

SEQ ID NO: 163167 - DNA, 102 bp, Homo sapiens
tggataccctggggctgagaggaatcttctggagtactcttattttgaaaaggctgaagacttgaagatgctaatcagacacatggagcactgggcacatag

SEQ ID NO: 163168 - DNA, 75 bp, Homo sapiens
gtttgagcgctcggaagtgaaggatcgccacctggtggctaagaggactcagaattcatgattgaagaaatgcag

SEQ ID NO: 163169 - DNA, 75 bp, Homo sapiens
gagtggacaaaatggcgaagatcgccaagactcacgaaggtgctatacttggtagatcagaaactcaggagtgtc

SEQ ID NO: 163170 - DNA, 75 bp, Homo sapiens
aaaatattgttttgaagcacctacactggcaacattagatccacctcatacagccaacttctctttgcctgaaaa

SEQ ID NO: 163171 - DNA, 83 bp, Homo sapiens
tctcacctgaggtgaaccttcgaccttggacttctcagcctccagaatggtgatgcagctaattgccccagtttggaaaacat

SEQ ID NO: 163172 - DNA, 100 bp, Homo sapiens
tgtgagccgctgggctcagatccacctggtgaaggtgatgagaagctacaaggcgaccatccagcagaccttggacatcctgttcctccgggaaggctcc

SEQ ID NO: 163173 - DNA, 51 bp, Homo sapiens
acacctaggaagggagaactgaaacatgattcccgtgacagaattccggca

SEQ ID NO: 163174 - DNA, 76 bp, Homo sapiens
aaggcttggtggccggggccagtccaaatatatgaaggaatcccagttctaaattgttggggagcactacccctag

SEQ ID NO: 163175 - DNA, 99 bp, Homo sapiens
gccgcgggagcgccgggccccgacggcactcaaggagttgcccctggtcctgtaattggacttcaggcaccatctactggtcttcttggcgcccggccc

SEQ ID NO: 163176 - DNA, 97 bp, Homo sapiens
ttgcatataatgctgtttcctttacctgggacgtgaatgaagaggcgaagggcgaactttctgaccaagtatacaactacccagagggcctaggaga

SEQ ID NO: 163177 - DNA, 75 bp, Homo sapiens
cgggaaggaagatccggcgcggggcacaggatccggagctggagcccccaggctctgacgcccgctctgcggctt

SEQ ID NO: 163178 - DNA, 82 bp, Homo sapiens
tgaaaaacagtaaagatggaaaaccagttattgaatatcaagaggaggagttgttgaacccacaatacattatatgcaccag

SEQ ID NO: 163179 - DNA, 100 bp, Homo sapiens
ccggtggtcgtgtccaactgctcctgcacccgggaggactatgagtgtgattacagtggcgagatcttgaacaactgctgcgtcatggagtaccaccaag

SEQ ID NO: 163180 - DNA, 82 bp, Homo sapiens
ccaacaaggatgatatgaagacttccctgaagaaagttgtgaaggagatggtgtcgggcaccaacgtgtacggcatcctgcg

SEQ ID NO: 163181 - DNA, 101 bp, Homo sapiens
aacatggcagacattgacaatcataccctaatgatcccagcaagataatgtcctgtcttctaagatgtgcatcaagcctggtacatactgaaaaccctata

SEQ ID NO: 163182 - DNA, 90 bp, Homo sapiens
cggcccgcgggggagccccgggagccgcacgggtctgctcttgataaaataacagcaagtttatgtgatcttaaatcaaggcttgattca

SEQ ID NO: 163183 - DNA, 96 bp, Homo sapiens
cggctttagtggcagcatgaagcgcaccccgactgccgaggaacgagagcgcgaagctaaggtaacggcgactgtgactgtggtgaatgtgtgtgc

SEQ ID NO: 163184 - DNA, 83 bp, Homo sapiens
attaaagatcactggttgaaacacccgaagtccattggaatattaagcccaggagttgctttggggatggctggaagtgcaat

SEQ ID NO: 163185 - DNA, 75 bp, Homo sapiens
tgaagaatagagccataaagaaagcaaagcgcagaaatgttggatttgaagtgtctttcctgaagactatcttcc

SEQ ID NO: 163186 - DNA, 83 bp, Homo sapiens
agcaaccgcgtgaaggacctgatgtgtactaatggtcacttgatgtgcgctggctgttttatccacctactagcagatgcccg

SEQ ID NO: 163187 - DNA, 97 bp, Homo sapiens
ttactcagagtttgaaggttgtgaccaaaagaggctccggttctggcctataggaacaagacattttcagtaatggaagaaggagcttccaggctgg

SEQ ID NO: 163188 - DNA, 50 bp, Homo sapiens
ccggaaaatgccctcaaacgcgccaacggaatacgtcgcctacagccaca

SEQ ID NO: 163189 - DNA, 73 bp, Homo sapiens
ctggctgcaaccgctggattaaattcagatgagataacccaacagcttgagggaatctgcttacaggtcattg

SEQ ID NO: 163190 - DNA, 83 bp, Homo sapiens
gcggaactggctttgttgaccgggagaaacgagatgggggtgaagctggagatatttcggacttgccttcaaggtgtgcaagt

SEQ ID NO: 163191 - DNA, 123 bp, Homo sapiens
cctggaaggtgcgtgtggggctgggtctcggagtgggagacgtggagtgcaggacatcaatgcaagcttgaataagaaaaacaaattcttcctcctaagccatggcatatcagttatacagaa

SEQ ID NO: 163192 - DNA, 75 bp, Homo sapiens
agcgaagtagaggatgccgaggagaaaacagcaggcacccaagcgggcggcagatatttcacattttcaggaaca

SEQ ID NO: 163193 - DNA, 100 bp, Homo sapiens
ggggcgtgcgcgtcctcctccccaggcccgccgcctccctgccaagaccaggtgataggtttgatcgagacagaccgttgagaggacgtggaggcccgag

SEQ ID NO: 163194 - DNA, 89 bp, Homo sapiens
gtgctttcccaagcctggaagaactcgtcatgctctttgtagcgtggtgcttctgttgctcacagttcctctgtgacgagggtgcaggt

SEQ ID NO: 163195 - DNA, 100 bp, Homo sapiens
acaagggtcctgaagtcagttgttgcatcaaatacttcatatttggcttcaatgtcatattttggccggcacagtcttcactaccgtagaagaccttggc

SEQ ID NO: 163196 - DNA, 100 bp, Homo sapiens
ggataatactagtgaagccgagaatgggttctccctggaggaagtgttacggctcggaggcaccaagcatggaaattactttgcttacgtgcaaatgttt

SEQ ID NO: 163197 - DNA, 74 bp, Homo sapiens
gcacagatggaagaggctccacttttcccaggagaatcaattaaagccattgcagccgaatccagtggagcagc

SEQ ID NO: 163198 - DNA, 101 bp, Homo sapiens
ctttgtggagggtacttcattgatgccacaaccataatagaatgtctacattcctgagcaccatactggaccaacacagaaaagatggaaaagcggctcca

SEQ ID NO: 163199 - DNA, 100 bp, Homo sapiens
gtggcgccgcgctgctcctgctgctcatcccggtggccgccgcgcaggagcctcccggagctgagagcatcagtgatgtcacgtttggagcaggggtcag

SEQ ID NO: 163200 - DNA, 75 bp, Homo sapiens
aagaaagaatgcaaagtccccagaatcttcatggccagcaagatgaaaaggcaacagatggctccctgcaaagtg

SEQ ID NO: 163201 - DNA, 75 bp, Homo sapiens
cgggccctgccctgggctggaacgaccctgaccactaaggcttttcttcctacgatgctggagattaatcatggt

SEQ ID NO: 163202 - DNA, 82 bp, Homo sapiens
cacccagcatcaaccaggagctctgccggctcaacacgatggacttactgctgagtgcagccgtagcagagcgggagagggt

SEQ ID NO: 163203 - DNA, 50 bp, Homo sapiens
ccttccagaagcacgacttttgttacagatcctgataacttaagtgactc

SEQ ID NO: 163204 - DNA, 120 bp, Homo sapiens
aaggtgttggagcagctcacagggcagacccctgtgttttccaaagatcgttctgaagtctccagcctgagttcagaggcccctgagacccctgagagcctgggcagtccagcctcctcc

SEQ ID NO: 163205 - DNA, 73 bp, Homo sapiens
aaggatggtggaggaatgaaaacgccgggtgatgaattagaagacaatggaaagaatttctacgaatctgatg

SEQ ID NO: 163206 - DNA, 99 bp, Homo sapiens
gacttcatcaggcagatactgtgagggctacaagcttctaaataagcacaaaggaactcttggtgtaataacagaagctacaataaaaatcagaccagt

SEQ ID NO: 163207 - DNA, 100 bp, Homo sapiens
ggacgatgtgcggcggatgaacaagcggcaggtctcctctgagcctccggcctccataagacccaaaacagatgacacctcttcccagtcccccgcgcct

SEQ ID NO: 163208 - DNA, 100 bp, Homo sapiens
cccagcagtcacgcaaacaacttatcagtagtgacttacagtaaggcacctgcggaactcgagtcatgcaggagcttttgtgatcgtgacggaagaagcc

SEQ ID NO: 163209 - DNA, 75 bp, Homo sapiens
gcgggaggccgaggagaagctggaggagcggctgaagcgcgtgcgcatggaggaaattatgtccccagagcggtg

SEQ ID NO: 163210 - DNA, 75 bp, Homo sapiens
ctgtaattacagctactccagcaacatcttgtccataaggctgaaccggcaaagaaccatggagtctggcagtac

SEQ ID NO: 163211 - DNA, 90 bp, Homo sapiens
atctgtaccattaccttccaccattcagaatcacgttgggaacactagctggagaaggagtacgtgtgccgggtggaaggggagttcccc

SEQ ID NO: 163212 - DNA, 87 bp, Homo sapiens
tgcgaccacccctacattgtgaagctcctgggagcctactatcacgacgggaagctgtggctcagaggatgaaacaggaaactgagt

SEQ ID NO: 163213 - DNA, 82 bp, Homo sapiens
agttggtgctaaccttaagaggagctttgatgtccgagagctttctgagaccaagatcttcactgcctctaatgtgtcttca

SEQ ID NO: 163214 - DNA, 90 bp, Homo sapiens
atacactcaggaagtgtttctcagagcaatctgaagaggatgtaagtcagtttgattccaagtttacacgtcagacacctgtcgacagcc

SEQ ID NO: 163215 - DNA, 100 bp, Homo sapiens
cctggggaaggttccactaaaggagtccaaggaaatgcagagcataatttgtgagcagagcaaaatccaattcttcatcagcaatggaagtggctgatat

SEQ ID NO: 163216 - DNA, 100 bp, Homo sapiens
atttgctgttggatcgtttcatactttacgcttgtgtgataaaactggggtgttgaaagacagagaagcgaagacagagacgtggaaagacagggagaga

SEQ ID NO: 163217 - DNA, 80 bp, Homo sapiens
cccttctttggcatcgtccccgtcctcatggatgagaagaaccccaaggagtggaccaagaaggtcatcaggaacatcgc

SEQ ID NO: 163218 - DNA, 96 bp, Homo sapiens
cctggttaagcgcaacagcgaactagaaaatcaaatggccaaactaatacagatctgccagcaggttgaggtattatacctgaagaaccttagccc

SEQ ID NO: 163219 - DNA, 98 bp, Homo sapiens
agcaacacagtcacggcagcccacatcaagaagttcaccttcgtctgcatggctctgtcactcacgcactgccctgggaagaactaggatgaggtatt

SEQ ID NO: 163220 - DNA, 75 bp, Homo sapiens
agcaatggaagcattgttgtcgtctcctctctggctggtactgtccaagaagctggaacattattatccagcaag

SEQ ID NO: 163221 - DNA, 83 bp, Homo sapiens
aaaaagagctgccccgcttgcaagagccggaggaggacgaggattgatacccagaaataatcgcttaatgtatattcatagct

SEQ ID NO: 163222 - DNA, 75 bp, Homo sapiens
cctaagccccggcccagcccgagcaggtgggagcaggtgctccgtgtcggcagttaacctgcccaaacacgtgga

SEQ ID NO: 163223 - DNA, 104 bp, Homo sapiens
gcaggtgaggggcgcgcgcctgcccagctttgcagcccccgaacgcggcctcgcacaggtgacttaagagattaaaattaatttggttgctgttggttctgaac

SEQ ID NO: 163224 - DNA, 75 bp, Homo sapiens
aaaggagattgacagtcacaattttgtaataagccatcactggtgcaagctatatttaacggagatcctgatgaa

SEQ ID NO: 163225 - DNA, 83 bp, Homo sapiens
agccggggcgccgacaagatcgagggggccaaaactatgttccaacttcctgtcaacaatcttggcagtttaagaaaagcccg

SEQ ID NO: 163226 - DNA, 75 bp, Homo sapiens
ttacattaagatccggccgggagaggttggatggcaagcatgtggtgtttggcaaagtgaaagaaggcatgaata

SEQ ID NO: 163227 - DNA, 101 bp, Homo sapiens
gtgtgcattaacctgccgccgcccctcaccagacagatcgctgtcaaaaccctagatctattcggcttagcgactgaagattgacgctgcccgatcgcctc

SEQ ID NO: 163228 - DNA, 100 bp, Homo sapiens
aggcactgaggaggccgagagatgaggccggagcccaccaagttctgggaaaaccccatgcatcccagctcaaggtggtcagagctagaccttcttattc

SEQ ID NO: 163229 - DNA, 100 bp, Homo sapiens
gtccattacgcagattaagtataaccgcgaaggagacctcctctttactgtggccaaggaccctgctatctatgtgcctgctgatgacttgactgaccct

SEQ ID NO: 163230 - DNA, 74 bp, Homo sapiens
cagaaggtcaatttctctgaagaaggaggaagaagaagatggtgttaatctgtcctctgagttaggtgatatgt

SEQ ID NO: 163231 - DNA, 97 bp, Homo sapiens
gggctggccccggaagcccccacgggctctacctgaccctgcagatctaccggaggtgctggctggtgttccggaaatcctccagcaaggggcccca

SEQ ID NO: 163232 - DNA, 87 bp, Homo sapiens
ccgcaagtacccgtccatcatagtcaactgcgtggaagagaaggccatttcataattctgaatcatgtctgataacggagaactgga

SEQ ID NO: 163233 - DNA, 83 bp, Homo sapiens
atcccggccaccagcaattgtccggtaaaacttccttttcctgtagatcaaatcacagatcttccaaggaacgatttccagat

SEQ ID NO: 163234 - DNA, 75 bp, Homo sapiens
ctggacagctgcgacggcgcgctgggctggcgcggcctgggagtcaatcttaagatgtgatactttcctgtgaaa

SEQ ID NO: 163235 - DNA, 74 bp, Homo sapiens
tggctgacttctggctcacacctggaattgtctcgccatttaaacgagtattcctaaaaggtgaaaagagtaga

SEQ ID NO: 163236 - DNA, 98 bp, Homo sapiens
aggagcgttgcatatctgacggagttatttattcaattagaacaaatggtgtgcttctatttataccaagatcaagagcagagattgaacacgaagca

SEQ ID NO: 163237 - DNA, 99 bp, Homo sapiens
cggagcgccaccggcaaagaggtgttgcagaacctcggccccaaggacaagagctcttcagaaaccaggctgctttcaggaacattgctgtggattccc

SEQ ID NO: 163238 - DNA, 83 bp, Homo sapiens
agcaagggctgtatgagctctcagcaagcaactttgagctgcacgttgcacaagtaagcaagctgtgtgggaagtgcagcccc

SEQ ID NO: 163239 - DNA, 75 bp, Homo sapiens
gggcaccctgcaggtggtcagacatgtcatcaactcagctgattctcttcctggacattctgttgccctctgttt

SEQ ID NO: 163240 - DNA, 101 bp, Homo sapiens
gaggagtgaaggcccccaggatcaagaccaagaacctggtcagggggtcctggtcttcatgatccttgtgagcgagacccaacagatgctctgagctatat

SEQ ID NO: 163241 - DNA, 116 bp, Homo sapiens
aagcagtcgtaagaagaggtcccaatcccccactctttccgccctaatggaggtctccagtttcgggagtgcatccgccccaacccttttccccctcgtctcctgtgagaattccc

SEQ ID NO: 163242 - DNA, 75 bp, Homo sapiens
gaaaattcccttatcgatattatgagagcagagcatgatcctcttaagggtcttgagagctgatgacaataacat

SEQ ID NO: 163243 - DNA, 96 bp, Homo sapiens
ctcggatctgccttgctctgggagggatgagctgcttcagaaagagcaaaactattcagatgacgtcttggccaacatgattagtgaaccaaggat

SEQ ID NO: 163244 - DNA, 98 bp, Homo sapiens
tgaagagtttcaagaacaacctggtggacatcattcagcagaacaaagagaggtggaaagagttagctgcacaaggcttccagacagttcgtgttggg

SEQ ID NO: 163245 - DNA, 100 bp, Homo sapiens
gctgaaactggtgtgtggaagtcacagcttcatcaagactctaaaatagagctcaagcttgagaagagagaaccactaaagggcagagcaaagactccag

SEQ ID NO: 163246 - DNA, 153 bp, Homo sapiens
tgaaattgctcaggaaattcaggagaagctggctattgaggcagagagacgacgcattcaggagaagaaggatgagcttaaccagctcgaaaaagcagtggaagcagctcacacatttttcgtggctaaccctgagcacatggaaatgcagca

SEQ ID NO: 163247 - DNA, 84 bp, Homo sapiens
acagcagccccgagcactgtggccgaggcccacctgctgacatctacctgccagcaaattgtggctactaatttgccccctgaa

SEQ ID NO: 163248 - DNA, 100 bp, Homo sapiens
agcctggacttcgcgcagtgcctggggtactacggctacagcaagagcagccagacacagtctccaacgccaccaaagcctccgtcgccaagcttcgagc

SEQ ID NO: 163249 - DNA, 100 bp, Homo sapiens
aaacgtggctgggtatggaatcaattttttgtgctggaagaatacgtgggctccgagcctcagtatgtgggaaaggtttcctatcctgggagcaggagag

SEQ ID NO: 163250 - DNA, 134 bp, Homo sapiens
gccgagtggattctgaggaccggaggagccgccactgcccgtacctggacaccattaacagtattctaccttgtaaatactgttatttgtatatactgtaaatgatgacatcggtgggcactaaccgagcccgg

SEQ ID NO: 163251 - DNA, 100 bp, Homo sapiens
atggcttccagtggaggcattttggggcagaatacagagatatggaatcaggcgcagttgtgtagcagttgagtaatgctggttagctgttaaggtggcg

SEQ ID NO: 163252 - DNA, 51 bp, Homo sapiens
gactgaaacctgagttttgattcaccagaaccactcacgaattcttgtttg

SEQ ID NO: 163253 - DNA, 59 bp, Homo sapiens
tcctgggaggccagttaaatgtctctggtgaccattgtgaggtagatattttgttctaa

SEQ ID NO: 163254 - DNA, 102 bp, Homo sapiens
cgagaggggctcctggagctgtgagctctgctacttcaagtaccaggtcctggcgatcagcaccaagaacccactgcagagacggggtttcgccatgttggc

SEQ ID NO: 163255 - DNA, 75 bp, Homo sapiens
ggctcatgcctccattatgaaactgaaccaggccagcatggataagctgccaacatcctgggccatgagaataag

SEQ ID NO: 163256 - DNA, 98 bp, Homo sapiens
agagggcatcttccgggaacgggacgagttcgtcatccgtgctgaggacatcccttccctcaagtgggatgaagctctcttgactatgagtaaaggag

SEQ ID NO: 163257 - DNA, 50 bp, Homo sapiens
tgctggacaaaggagtgatactacatgcctgggcagtttttaaagggaag

SEQ ID NO: 163258 - DNA, 90 bp, Homo sapiens
gaacatggaatcatcaaggaatgcacactcaccagcaacaccaagtgcaaagaggaaggtacgggaaaaacactcttggcacgagccgtt

SEQ ID NO: 163259 - DNA, 50 bp, Homo sapiens
ccggacctcgcttacctgcatgctgggctggtgaattaccatatctccgt

SEQ ID NO: 163260 - DNA, 82 bp, Homo sapiens
tacttcaagcaggggctgatttagaattaatattttcagtggagggttttaagtcctgtggctggtaccttaccttagtgca

SEQ ID NO: 163261 - DNA, 98 bp, Homo sapiens
ctttactccctggatgttcttgccgatgcttctcaccgaaggtgttcaccagcacactgctctgccagagtcaagggtccagagaaggaggagaagtt

SEQ ID NO: 163262 - DNA, 97 bp, Homo sapiens
caacaagcacaagcagatggcaggaagattagaacattggatattgattgccagtttttaagataatttgcaagtaccttttgagtgaagaagagga

SEQ ID NO: 163263 - DNA, 125 bp, Homo sapiens
cggctgccggcatggcacattacaacttcaagaaaattacggtggtgccgtccgccaagagcatcctggccagaacaagccaaggagccaagacgagagggacacacggacaaacaacagacaga

SEQ ID NO: 163264 - DNA, 90 bp, Homo sapiens
cctcagcctcctgagtgctgggattacaggcacctatcctagcccacagagctatgacagctgggactactcggaactagacccagagcg

SEQ ID NO: 163265 - DNA, 75 bp, Homo sapiens
gggaatccacattaagaagtacaatagcattcgcggttattctggactttatgaagccattgaaagttgggattt

SEQ ID NO: 163266 - DNA, 85 bp, Homo sapiens
agaaatggctgaaggaaaacctccttatgctgatatacatccaatgagggtacttctcccagcagctggtctcttacagttacag

SEQ ID NO: 163267 - DNA, 75 bp, Homo sapiens
gaaagttccagattgtgcagaaacttttatgactctactcttggttataactgtagtcgtgaaaggtgccaaatt

SEQ ID NO: 163268 - DNA, 98 bp, Homo sapiens
gttattgagaaggggagaaagcttgacgtcactgacctgcttgctgatcctgtggtccggatccagagaaatgacttttttgaacgaaccattctgtg

SEQ ID NO: 163269 - DNA, 75 bp, Homo sapiens
gctgacctggtggtgatactcaagattctgccaacgtgccctgtaactccagaacccctggcagcagcagctttt

SEQ ID NO: 163270 - DNA, 100 bp, Homo sapiens
agcgtgaccgagagcgcgaatatcgtcatcgttagaagagctgaactagagaaacatggttataagatggagacttcatagcatccagaagaagtgttga

SEQ ID NO: 163271 - DNA, 97 bp, Homo sapiens
ggcgccacattctcaacaccacggaattccatgcccctggccccaacatggcccgtcgctctcagagctcctcgcagggggacaacccactggcacc

SEQ ID NO: 163272 - DNA, 96 bp, Homo sapiens
aggtatgggctctacgtgtgcttcttgggcgtcgttgtcaccatcgtctccgccttccagttcggagaggaactccatctcaggaaacttggccag

SEQ ID NO: 163273 - DNA, 100 bp, Homo sapiens
gtgaacctcagcaccgagaacatctactctttcaactacaccagccagcccgaccaggatcaagtcttccataccagggaccaggccaaaaccagactgc

SEQ ID NO: 163274 - DNA, 100 bp, Homo sapiens
ccggggtcctccaggaccagccggtgctaatggtgctcctggactgcgaggtggtgcagatatagaatggactcacattgactacttcaataatgctatc

SEQ ID NO: 163275 - DNA, 90 bp, Homo sapiens
caagtccagccccagcatggcagacccacgcagccacccagcctcagcactcatctgcgcagccatggaggccctgggacctgggggcga

SEQ ID NO: 163276 - DNA, 75 bp, Homo sapiens
catctgtcatctttagcgccaccttatgtcaagcacctgtggccttgccgaagaactggaaaaagagaagtcaag

SEQ ID NO: 163277 - DNA, 74 bp, Homo sapiens
ccctcaccgagtacgaagcgggcgtttgcgaagatcaatgaactgagccatgttcaaatccctgttatgttgat

SEQ ID NO: 163278 - DNA, 50 bp, Homo sapiens
tgtcactccaacctcttttcgctgacacgaatgcagagtttgagtccaga

SEQ ID NO: 163279 - DNA, 82 bp, Homo sapiens
tgtggatcgctgtgatcgtcacttgagcccaaggtggtgtttgctaaggagcagctggcacgcaggaagctgcaggcagagg

SEQ ID NO: 163280 - DNA, 101 bp, Homo sapiens
cttctccttggccgtctttgagttgacattcagggacgtggccatcgaattctctcaagatgagtggaaatgcctgaactctacacagaggactttataca

SEQ ID NO: 163281 - DNA, 97 bp, Homo sapiens
tgcaggatggcgcggccgagtccccgtacggccacccggcgggtgtcatggagaaactccagctgggcccagagattctgcagcgggaaaatccaag

SEQ ID NO: 163282 - DNA, 82 bp, Homo sapiens
caattcagcagagaatattttcaaggggggcaacatgagtgagaatgaggaagaggaaatttctcagcaagaaggcagtggg

SEQ ID NO: 163283 - DNA, 50 bp, Homo sapiens
atttatccaacagctcctcccagatcatggagctttgtggtgcaacaaga

SEQ ID NO: 163284 - DNA, 98 bp, Homo sapiens
catcccccccgacgccgtcgcggtggactgcaaggtcctgctcaggttccaatgatgtccccaaatggttctgtgcctcctatctatgtgcctcctgg

SEQ ID NO: 163285 - DNA, 75 bp, Homo sapiens
ctgcggctgctgctggaagtcacctatgaagccatcgtggacggaggctctgctgccatgaaggtgaagattaag

SEQ ID NO: 163286 - DNA, 97 bp, Homo sapiens
atacgaagacgaggcaaagcacccagctttcttcactcttccggcagggcaagaatcctttcgttccatcacaaggtcgtattacagaggtgcagca

SEQ ID NO: 163287 - DNA, 90 bp, Homo sapiens
ctttctcgctgatcgcctaacttctactgacgaagcttggaagttgcagaaggacaggaagatgtcacccaagcgcatagctaaaagaag

SEQ ID NO: 163288 - DNA, 90 bp, Homo sapiens
gtaataagggagatatgttgtgaaagaagcagtagcagtgaatctacagggacgccatcgaatccggaggaacagcttgatgcacacaga

SEQ ID NO: 163289 - DNA, 90 bp, Homo sapiens
gttgtgttgtgccaatggtggagaagaaaacttcggatcagccgcatcgagtatatccactccaagaacttcatccaccgggacgtcaag

SEQ ID NO: 163290 - DNA, 73 bp, Homo sapiens
actattaagatgtgggatgtcagtactggcatgtgccttatgaccctccatgaacttacgagaggtgttaaaa

SEQ ID NO: 163291 - DNA, 80 bp, Homo sapiens
cagcgctcaattgcccctaggactcacccttattccccgtttcccaaaccactccttatgatccagtgaatattcaagag

SEQ ID NO: 163292 - DNA, 100 bp, Homo sapiens
cacaatcatacaaaagaaaacaccatccggaccacgaccagtttgcagacagtaggttgcatgcctccgcctgtgtcttctgcagtgattttaaccaagg

SEQ ID NO: 163293 - DNA, 75 bp, Homo sapiens
atgagatccaggacatctatgagaacagagttgatctctctaatgtattagatcttcatgcctttgatagtctct

SEQ ID NO: 163294 - DNA, 89 bp, Homo sapiens
ccggacgtgtccgcgaagatggcgggccggagttctgccttctccgagggaagcaaggtggcttcgagaacaagaagagaattgactct

SEQ ID NO: 163295 - DNA, 75 bp, Homo sapiens
ggaatgttccctgacaatttcgttaagattttaggtgatgggcaagtcagaaagtcagatggatataactgatat

SEQ ID NO: 163296 - DNA, 74 bp, Homo sapiens
cgagcggttccttgtgggctagggattaaagcctgtggtttccacagaagcaccacctatcatatttgccacac

SEQ ID NO: 163297 - DNA, 74 bp, Homo sapiens
tccatcacccaccaacaacaccacaataatccacagccaagtgcttttttaggaccaaaggatatatttcctta

SEQ ID NO: 163298 - DNA, 90 bp, Homo sapiens
cagacacacaataacctgtatgcttggggacaggtagagtcactgaccacagagctgtcagctgagcgcagtttctcagccaaggcagag

SEQ ID NO: 163299 - DNA, 83 bp, Homo sapiens
cggtcaggaaagccccgtggctatgccttcatcgagtacgaacacgagcgagacatgcactggctgaaatctctttaatgatg

SEQ ID NO: 163300 - DNA, 76 bp, Homo sapiens
ctggacccctactattgcaacaagaatcctgttacacctgggatttaggcactttcaatctgaaaaaatacatatc

SEQ ID NO: 163301 - DNA, 100 bp, Homo sapiens
tccactctggttgcctgtgtggtggatgtcgaggtctttaccaatcaggaggttaaggtgaagctgtacttcacaaaaacagtagaggagccgtcaaatc

SEQ ID NO: 163302 - DNA, 154 bp, Homo sapiens
aacatttgctccatttacaatctgaaaactcgtgaggggaacgtgcgcgtgagtcgtgagctggcaggacacacagcgtctgcttctacgctttgcctgggagaggccctggtggcctcgttcctggcgcccggagtccctgctgcggccccac

SEQ ID NO: 163303 - DNA, 75 bp, Homo sapiens
tagcagattctaatcaaaatatgcagtctcttttaccagcagcaatgaatcgctccctggctaatgtgattcttg

SEQ ID NO: 163304 - DNA, 109 bp, Homo sapiens
cgcccacttcctacttcaccagcggcctgcaggctggcctcaagcagagccacctcagtaaggccacctggagagtaagtccagcatcaagcgggtgctggccatcacc

SEQ ID NO: 163305 - DNA, 141 bp, Homo sapiens
tgggatgtgaagtagatgataaagatgatgatatccttctcaaccttgtgggatgtgaaaactctgttactgaagacttttcttcacaggaattagagattttcatttgctccttttcctcctcctggcttcaaatgtttg

SEQ ID NO: 163306 - DNA, 83 bp, Homo sapiens
ctgcagaaggtctctggagacatcttcagcagattttgcaagaacgaggctcaaggatgtgagggacacagtattgacagctg

SEQ ID NO: 163307 - DNA, 50 bp, Homo sapiens
ctccttcacagtaaagtggctggccaagtcctgtatctgccatgtctgtg

SEQ ID NO: 163308 - DNA, 105 bp, Homo sapiens
aaggagggtatgatgcaggtgccagatttggagctggggctactgctggcaacattccttgcttagatgagtacgaagatgatgaagcagggcagaaagagcgga

SEQ ID NO: 163309 - DNA, 98 bp, Homo sapiens
cagccccatctgatttaatcactgtgcaatgaccgtgaactgtacagttacctccgtgtgtcacaggaagactctttttcttactgatggaatgctgg

SEQ ID NO: 163310 - DNA, 82 bp, Homo sapiens
tccaaaattccctatttggattgttggcagtgagactcacctcaccgtattttttgccaagtgaacagagtatctgtcaggc

SEQ ID NO: 163311 - DNA, 100 bp, Homo sapiens
gagatgtgatgttggagaactatagcaatctggttttcttggccactgaggcggctcccagctgcgttggcgacatggccgacacccccagagatgccgg

SEQ ID NO: 163312 - DNA, 100 bp, Homo sapiens
gcgacgcccgggacccagattgcgggttcagtcctccgggcctcatatgaacaggagaaagaagcgcttacccactctttccgggaggccagttctaccc

SEQ ID NO: 163313 - DNA, 100 bp, Homo sapiens
ctgaggctgctccggccatggcccctcggccccgcgcccgcccaggggtcgctgtcgcctgctgctggctcctcactgctattgacctgaaaagtggttc

SEQ ID NO: 163314 - DNA, 83 bp, Homo sapiens
ccgaagcagcgtgtcctccgtgggagcccgaggaagagcctaggctggatgtcttgatcaataacgcagggatcttccagtgc

SEQ ID NO: 163315 - DNA, 100 bp, Homo sapiens
catgctcgggaccccccgcggctccagcccagacgccccggcctcaggcaattaagttggaatatgcaaggttggttaagttggcccaagaagacacccc

SEQ ID NO: 163316 - DNA, 100 bp, Homo sapiens
acgcgggcggctagagccggagtggggcgagccgcggaacccggccgggagccgcgcgaggcgactgaggctgatgtgaatccaaaggcctatccccttg

SEQ ID NO: 163317 - DNA, 101 bp, Homo sapiens
ccggcgctagcagggctgaagagaagatggaggagctggtggtggaagtgcggggctccaatggcgctttctacaaggtgagactgctgctcctcgggcca

SEQ ID NO: 163318 - DNA, 98 bp, Homo sapiens
ggctacgcgccgtggacacagacggggtggagcccatggaatcggtcctggaggacaggttggatggcaagcatgtggtgtttggcaaagtgaaagaa

SEQ ID NO: 163319 - DNA, 75 bp, Homo sapiens
ctgaaaaaactcaacaagaataaaaaactggtcaagaagctgggtgtggcatgcagcattttggaaggaaaattg

SEQ ID NO: 163320 - DNA, 75 bp, Homo sapiens
acctctgagaagggagacgacgctgctgggtccgctgagcggggcgacccgagtgtgtggaccagttgacaaaga

SEQ ID NO: 163321 - DNA, 100 bp, Homo sapiens
attctcattaaataaatctctggttcactgagacttttttgacggagagggacaaacaatccaagtggagtggaattcctcagctgctcctcaagctgca

SEQ ID NO: 163322 - DNA, 101 bp, Homo sapiens
gttgcgatggcgcagaaaccccgttgacaaggcactgctttttcatgacgtaaaggcatgacttcctggcaccacagggaaaatcgggtgcaagcccagaa

SEQ ID NO: 163323 - DNA, 76 bp, Homo sapiens
cagcggtagccctccttgcgcctccgattcccagtagagacaagttttcaccgtgttagccagaatggtctcaatc

SEQ ID NO: 163324 - DNA, 82 bp, Homo sapiens
atgggctccaacccagccagggccctgcagcaaatgagggacttaaaattggggccttatgtagatcattactatagagact

SEQ ID NO: 163325 - DNA, 100 bp, Homo sapiens
tgctgtggtgtctccttccgcagacgggctatgtgcacccagatgagttcttccagtcccctgaggtgatggcagaacgctgccaagaagagagaccagg

SEQ ID NO: 163326 - DNA, 100 bp, Homo sapiens
gctgccagcattagcctggctcaatatctaatcaatgtcagtcactcagcctctgaagaagcttcgggttcagactcaggcagtcagtcggaaagtgagc

SEQ ID NO: 163327 - DNA, 100 bp, Homo sapiens
gggcgcaatgaatccgcggcagtctctgctggatgaaccgaatcctaacagtccagccaatagccaggcagcacagctttatcaggaaaacaaacgagaa

SEQ ID NO: 163328 - DNA, 100 bp, Homo sapiens
ggagccctgcctacatcagtcccgacgtgctcagcggtgtttcagtcacctccagtaacacgggcgtgccagatatctcgggttctgtgtactccaaaac

SEQ ID NO: 163329 - DNA, 107 bp, Homo sapiens
gcgctactctctctttctggcctggaggctatccagcgtacaaccccacctgaaaatggactctcagagcacccctgtgaaacagaacagataaatgcaaagagaaa

SEQ ID NO: 163330 - DNA, 125 bp, Homo sapiens
cgagagcgactgggacacggtgacggtgctgcgcaagaagggccctacggccgcccaggccaaatccaagcaggttctaggtcccaattctactgcaaatagtatcatggcatcttatcagcaac

SEQ ID NO: 163331 - DNA, 98 bp, Homo sapiens
gacgccgggacaccaagaagcagggaaatggttttatgaatgaagctatggctacagattccccaagaagacccagtcgttgtactggtggagttgtg

SEQ ID NO: 163332 - DNA, 100 bp, Homo sapiens
aacctcaggacctgacccaaccactgtctacgtggacatgagagccctgagacacgacagcttattgcaggagtgaccaggacactacctcctagaagta

SEQ ID NO: 163333 - DNA, 100 bp, Homo sapiens
tccggctcgcccagcgcgctacgagtgctggccgaggtgcaggagggccgcgcgtggcaagttaaggtgaactgcacagctgaagtactttacccttcaa

SEQ ID NO: 163334 - DNA, 75 bp, Homo sapiens
aatttcctgcgctgttccacctcattcaacttcagaggctgggaggcggcagaatgcagccagaggagggcacag

SEQ ID NO: 163335 - DNA, 80 bp, Homo sapiens
aagcagccaaccatgctcaacttcggtgcctctctccagcagactgcgtgtactaatggtcacttgatgtgcgctggctg

SEQ ID NO: 163336 - DNA, 75 bp, Homo sapiens
ttctgtcatagaaactcacatgagacaaatgcgctcagcttcaattgctaatatgcaagtgaaccagtgacctgc

SEQ ID NO: 163337 - DNA, 101 bp, Homo sapiens
gcaggctctgcgggaggtggagcacctgaagagatgccagcagaaaatcactgtgctgatcgggaagcccttcagtgccctgcctgtactcgagcggctcc

SEQ ID NO: 163338 - DNA, 75 bp, Homo sapiens
ctgcctcagcaacactggtccctgttgccccaccaatatgccaggtatctctgcattagccagattggacatatg

SEQ ID NO: 163339 - DNA, 82 bp, Homo sapiens
ctccccgattctcatctgcccataatcatggacacagccccaggatgtgcaggtagagacggtatttcaccatgttagccag

SEQ ID NO: 163340 - DNA, 101 bp, Homo sapiens
taggttctgggaagatggcgaaggtctcagagctttacgatgtcacttgggaaggtgcgtatagcagcaaaattcatcattcatgcccctcctggagaatt

SEQ ID NO: 163341 - DNA, 100 bp, Homo sapiens
ggagtgctctgttcacggctccatcgctgttaaggatgccttgttttgcaagagcttgatgaacttgctcttcagcctgcatgtttcgtataagagtcct

SEQ ID NO: 163342 - DNA, 75 bp, Homo sapiens
ccagtggataatctggaagacatggacaggtcttgccccagaagctgcgggcacatccacgcctgaaatgcggcg

SEQ ID NO: 163343 - DNA, 98 bp, Homo sapiens
tacagtgcctacttggaaagaagaagagatagcgacttgccccagtccaaccccagagcgggcacagttggtggatctgaaatctgaactgacagaaa

SEQ ID NO: 163344 - DNA, 50 bp, Homo sapiens
tcgtcggctggcggagcggcttgtggagtcctttgaaagactgatacagg

SEQ ID NO: 163345 - DNA, 83 bp, Homo sapiens
ggaagaccgcgcgcagggcctgcagcgggagctggacggcgagcgcgagcggcgcgagaaaagcactgacacggctcccggga

SEQ ID NO: 163346 - DNA, 100 bp, Homo sapiens
ctttagttcgtctttcctagagaggttggactccatgaaagaattgcacaaaacaaatcgacagcagcatgagaaacatctgcaaagccgagtggactct

SEQ ID NO: 163347 - DNA, 74 bp, Homo sapiens
tatcaagtggcatccacgcttaaacaggtgaaacatggtggaaattcttgcttctcttcagaaaccaaagaaga

SEQ ID NO: 163348 - DNA, 75 bp, Homo sapiens
agcctcccaagtagctgggactacagaattcaaggaggcatttctcctgtttgacagaacaggtgattccaagat

SEQ ID NO: 163349 - DNA, 75 bp, Homo sapiens
caagaggcaaaacttcggacatagaggccaaccaacctttggagtaatggaggggaaagttccagtcgcagcgct

SEQ ID NO: 163350 - DNA, 98 bp, Homo sapiens
ggctagatcaggaagcctatgtcaactatggaacaacaacttgcagctcatctctattgatgatccacaggatgagcaggaacggatcgaggaaaggc

SEQ ID NO: 163351 - DNA, 100 bp, Homo sapiens
ttcgctctttgcatcttaactgcagttttgagtatccgaggagcccaggaggaggaacccacagacccccagctgatgcggctggacaacatgctgttag

SEQ ID NO: 163352 - DNA, 75 bp, Homo sapiens
cgtcgacatgagtgatgtggaggaaaacaacttcgagggcagagttattcagcttctcaaggctggaaaagcgaa

SEQ ID NO: 163353 - DNA, 90 bp, Homo sapiens
gatggtgctgtaaccacctcacagattccagcttcggaacaagagaccctgaccttagctggatctccaaaatacaagtgaatcacccgg

SEQ ID NO: 163354 - DNA, 96 bp, Homo sapiens
cacttcgcattttggcattgacatttaattttagggtcctttatatagaagggagagtagttctccaacatcttcaaataaagaagtggttatgag

SEQ ID NO: 163355 - DNA, 100 bp, Homo sapiens
ggacggcggcagcttcaccgccgagtcctccagcatcagccactatgtgattgtcatgtccatgaccatctttttggtgttcctcaatggcctggcccag

SEQ ID NO: 163356 - DNA, 100 bp, Homo sapiens
caatgagatcgtggacaagatcatgggcaaaggacagatccaggtgcagtggaggcttgcctcttgcatcagctgagacgccgtgccgctggcttcctgc

SEQ ID NO: 163357 - DNA, 75 bp, Homo sapiens
cagcatcaagatccgtctgacaggcatcagatgccagctctgaaaaactcttcaacactgttattgtaaacaaag

SEQ ID NO: 163358 - DNA, 100 bp, Homo sapiens
catctacaaaaagtattggccaagaagagagatcctgtttctcacatttgtttcattgaagaaatagttaagggttcagtttggcaaagacttggtgcag

SEQ ID NO: 163359 - DNA, 100 bp, Homo sapiens
tttaacagaactcaacaaatgctgtggcctttgtgtctgcccatgtaatagggcttccgttacaagatgaggtctgtgtatgctcacttccccatcaacg

SEQ ID NO: 163360 - DNA, 82 bp, Homo sapiens
cgggagcttccgggagggcggctcgcaggaagggaaaaggccgaggcatcagcgtgtgaagaccgcaaagacgatcccgagt

SEQ ID NO: 163361 - DNA, 90 bp, Homo sapiens
cgaggattcggatgactcggagcccgggggcccccctgctcctcggcgtcggaccccccgagaaaatgctgataccccaatgtccttctt

SEQ ID NO: 163362 - DNA, 75 bp, Homo sapiens
gagccgccttggcctcggggtctccctacaccaacgtttgcccgaccatctgtaagtcacacggctgcaccgccg

SEQ ID NO: 163363 - DNA, 100 bp, Homo sapiens
tatcaccatacaggcaacaacacattcagagtggtgggcaggaagattcaggaccatcagaatgttccagtggaaaacttctttgtgaaatgcaatggag

SEQ ID NO: 163364 - DNA, 96 bp, Homo sapiens
acagggcactgctgaggacggagccagctcagcatcttcctcctctcagtcggagacccccgagccagatgagtaacgaaagaggctttgaaaatg

SEQ ID NO: 163365 - DNA, 100 bp, Homo sapiens
gaagtgctttgaagtgggaatgtccaaagaatatctgcgtgagttctgaagaagaacaagatggttttatcagagtcctcagtggaaaaaagaaaggcct

SEQ ID NO: 163366 - DNA, 60 bp, Homo sapiens
ttcagcacaccagtggggcagtgcctcgatggctctgagtaaatcaatgcatgcaagaaa

SEQ ID NO: 163367 - DNA, 82 bp, Homo sapiens
ccagagctgaggactgcctgtttgcaggaccaagaatcgccttcagccctgtctggtgcatccttggcagaaagtgaggagg

SEQ ID NO: 163368 - DNA, 50 bp, Homo sapiens
gagccccttcctgagaagatcccagatataacacgtgggaaccggaggag

SEQ ID NO: 163369 - DNA, 100 bp, Homo sapiens
ggcggcctcggcctccggcgcagcccggaaatgtccggcaagatcgagaaagcaggagaatccctacctatgcagcaacgagtgtgacgcctccaacccg

SEQ ID NO: 163370 - DNA, 100 bp, Homo sapiens
ctcaggcgtgcgcggacggtgtgcgggacctacaagaacagtgaggagcttcggtctcgtattgtgtctggaatcatcacacctatccatgagcagtggg

SEQ ID NO: 163371 - DNA, 75 bp, Homo sapiens
cagcactgactttcagctatggaatcggctgctctttggcgtaaattgcaatcgattagggatcgtttctcagaa

SEQ ID NO: 163372 - DNA, 80 bp, Homo sapiens
ctggccccgccgcccgccctaccccccaagcagcggcagctgggggatatgagactttctactcggaatatcctgagtgt

SEQ ID NO: 163373 - DNA, 100 bp, Homo sapiens
gatttgtacaaaaacgatgcaacctggccataaaatgcagtaaaaacaaatccagttcccaagaagctgtacaaatgctttcttctgttcgactcaattt

SEQ ID NO: 163374 - DNA, 82 bp, Homo sapiens
ctatgatctgcagggagacgcacagccaggacatcctggaacctgggaaagggtgacttaagagattaaaattaatttggtt

SEQ ID NO: 163375 - DNA, 90 bp, Homo sapiens
cgtctcctccacttacgtggaggagctcaaggggatgtcgctgctggttcgggcagagtccgacggtcttgtggatgagcagcagaaagt

SEQ ID NO: 163376 - DNA, 75 bp, Homo sapiens
cgtcattgagacttattcatgctgtcagagggcatgaaggaactgactctcaagcagacctagaagatatcattg

SEQ ID NO: 163377 - DNA, 100 bp, Homo sapiens
ccaacctcagtttcggggctgcggctcacagaagtctaacctgcccgggacgcccgcaccaactcctgcgcgcggccaactacacagacccccagagcaa

SEQ ID NO: 163378 - DNA, 75 bp, Homo sapiens
tcagcttaaaattaaagtgtgcattgacaaacattacataaggtgaagagggagctgagatctaagatggagaag

SEQ ID NO: 163379 - DNA, 74 bp, Homo sapiens
aatccgtctggatcacggatgtaggaagtgttccgatgaagttaaattccgtcaagatttaatgaatattgcgg

SEQ ID NO: 163380 - DNA, 83 bp, Homo sapiens
tggatgaaagataaagcccttaaggacaagagtggtggacatgacaacagagtcaactgcatacagtggcatcaagacagtgg

SEQ ID NO: 163381 - DNA, 100 bp, Homo sapiens
gcactgaccagtgtttccggcaaaaccacattcatgggacacttctccaggtgctggagaatctggtaaaagcaccattgtgaagcagatgaggatcctg

SEQ ID NO: 163382 - DNA, 90 bp, Homo sapiens
cgcttgagttggtcgggggcagcggcagatgctttcttcacatgtcgaaaaaatgtccttctggcgaacagctcatccccccaggtagag

SEQ ID NO: 163383 - DNA, 75 bp, Homo sapiens
ggtaaatgacgaaggggcttcttccagagccaaggaggaagggttgtccggatggcctgtgagtatctgtctgtg

SEQ ID NO: 163384 - DNA, 96 bp, Homo sapiens
cacaggtttgacatccaggtacagtcctccagggtatacttcgtggcctgcaccatcgaccggtaccgggagtaccagtggatcggactcaacgac

SEQ ID NO: 163385 - DNA, 51 bp, Homo sapiens
cgcgaaggagaggccctagaacctgaagtaagaactctgctagagaggaaa

SEQ ID NO: 163386 - DNA, 75 bp, Homo sapiens
atctacatgaagatcctagtgaaaactttagaggaaaccacccctactcctaatcccccgactacagaagaggag

SEQ ID NO: 163387 - DNA, 100 bp, Homo sapiens
ggcagtgggggagatggagaagaagaggaggaggcactgcctgagcagtcagaaggcaaagaacagaagatcctccttgtgaatgagagccacaagtctg

SEQ ID NO: 163388 - DNA, 50 bp, Homo sapiens
tcatggaatcccttgcatggctctcagacgcagagggctctacgtgtttg

SEQ ID NO: 163389 - DNA, 50 bp, Homo sapiens
ctcatattaccaaccgcagagaggtgtgatccctcacatccacaaatctc

SEQ ID NO: 163390 - DNA, 100 bp, Homo sapiens
cgggccagcaccatggaggacgtgaagctggagttcccttcccttccacagtgcaaggaagacgccgaggagagcacagaatggggattcaacacctcgg

SEQ ID NO: 163391 - DNA, 90 bp, Homo sapiens
ctcctgtgaatggatctatagtgattgtcagagcagggaaaatcacctttgcagaaaagggtcaccgtcctctctcccagtccattgtcg

SEQ ID NO: 163392 - DNA, 75 bp, Homo sapiens
ttgtgaccaactccacctacgcagcagacaagggggacccatgccccctttgtgatgaagccaaggaagtactca

SEQ ID NO: 163393 - DNA, 82 bp, Homo sapiens
gcagcgcagcatcgtgcccaccatgcactaccaggacagcctgcccagctggatgaacatcgtactgagcaaaagaagttaa

SEQ ID NO: 163394 - DNA, 83 bp, Homo sapiens
ggagcggacgcagtgatttgctccccctcgtgcagcaacccccacacccagcaccagtgtactaatggtcacttgatgtgcgc

SEQ ID NO: 163395 - DNA, 51 bp, Homo sapiens
gcaagcaccattgttgcatcagggcttaaaagacaaccttcttgcttctgg

SEQ ID NO: 163396 - DNA, 100 bp, Homo sapiens
gtttcgtggatgatcagcagactttcttctgtggcaacgtggctcatcagcagcttatccaggatctcttccacattcctccttcttataagagcacagt

SEQ ID NO: 163397 - DNA, 75 bp, Homo sapiens
gtgtgaaaagactgaaaccggaccctgagccagatgacaagaatcaagtatgaagtgtaacagaacagactttac

SEQ ID NO: 163398 - DNA, 97 bp, Homo sapiens
cgcagttggaagcccatggggcaggtgatggcttggacaacagtgtagcttcccccagcacaggtgacgatgatgaccctgataaggacaaaaagcg

SEQ ID NO: 163399 - DNA, 110 bp, Homo sapiens
ctccgccgtcatggcccggcatcggaatgttcgaggctataactacgatgaagctggctgtcttcatgtggctgatgacctatgttggtgctgtttttaacggaatcacc

SEQ ID NO: 163400 - DNA, 100 bp, Homo sapiens
tggcggaggagccttttagatgagccccgaaaggccgggcaggagctgcagcagctgctgtgctgcacgcggcaagaggcgagggcccggctgcaggccc

SEQ ID NO: 163401 - DNA, 82 bp, Homo sapiens
ctggattcaaaaacaattcaaggggagctgggctggatctcttatccatcacatggggtggcacaagaatggctcaactctc

SEQ ID NO: 163402 - DNA, 100 bp, Homo sapiens
agactccaagcccaaaacaacccactccccaaagcttgcaggagggttcctacttgttatctcatgcagcagaagattcttcactcctgatttataaggc

SEQ ID NO: 163403 - DNA, 100 bp, Homo sapiens
cagcattgcctcgaccacactcacctctctctgctcatgcaggaaggagatgattcactacttataactgtggtacctgtcaaatcatataaaacatctg

SEQ ID NO: 163404 - DNA, 106 bp, Homo sapiens
cgacgcgtgcttcgtggcccggcaccgttccgcggacgtgctcgacaatgcagatcttcgtgaagactctgactggtaagaccatcaccctcgaggttgagcccag

SEQ ID NO: 163405 - DNA, 100 bp, Homo sapiens
cctgctcagagggccctgtaccgggatgtgatgctggaaacctatagcaacctcgtctcagtggggggcagtacccaaaggaaacgctacgaaagaatac

SEQ ID NO: 163406 - DNA, 100 bp, Homo sapiens
cacgattacagggatgagcatttggactttatccagtcacacctgcggaggttctgccttcagtgtaccatcaagtcttcagccacattgtttctctaga

SEQ ID NO: 163407 - DNA, 100 bp, Homo sapiens
gtgtttggagcagcagcctgcagcaggccaaggagcgggagctggaactgaagaacacctggtcagagaacaagctcagccgccgtcagacccaagccaa

SEQ ID NO: 163408 - DNA, 90 bp, Homo sapiens
attgagattatacggaaccagaagcagattgccaacattgaccgtattacaaagagacgggacttctaaaagcagtgaattaaagaaaag

SEQ ID NO: 163409 - DNA, 83 bp, Homo sapiens
ggaggcccacgtgggagcagtgagcggctgaaagaaccggaggctgaagcaggccaaagaagaagctcaggctgaaattgaac

SEQ ID NO: 163410 - DNA, 101 bp, Homo sapiens
cggcggacagattgaccttcagagcgagagatgtggtatggtgtattcctgtgggcactggtgtcttctctcttctttcatgtccctgctggattactggc

SEQ ID NO: 163411 - DNA, 90 bp, Homo sapiens
ggcgatgcttgtgaccctgcagctcctcaaaggagctgtcaccatgcctcactcgtacccagccctttctgctgagcagaagaaggagtt

SEQ ID NO: 163412 - DNA, 90 bp, Homo sapiens
cgtgggcgacgccacagagaaaggtgcaggagaacccggggaggaggcccaggctctgctggagggcttcgagggtgagatggacatgag

SEQ ID NO: 163413 - DNA, 75 bp, Homo sapiens
cagccccggtcacagagtgcaccgtatcctgtcacttctggatgtgagacctgatagcaagaactggcagtacca

SEQ ID NO: 163414 - DNA, 75 bp, Homo sapiens
tcgacagcgaacatgtcgcggcctgtcagcaattaccagctctggctgggtcgccacaacttgtttgacgacgaa

SEQ ID NO: 163415 - DNA, 51 bp, Homo sapiens
ggaatgacagcatctatgaggagaaagggctaagaactctgtgtatagcat

SEQ ID NO: 163416 - DNA, 72 bp, Homo sapiens
gcactgctcctgctggccgcctggacggctcgggcgctggagatgatcacagtcgtgttaaactgcaaaatg

SEQ ID NO: 163417 - DNA, 75 bp, Homo sapiens
cctgctgtgtgtgcttctgcgccccaggtgttgtgtgtgggggtgcaggtgagaagccctaccactgcaactggg

SEQ ID NO: 163418 - DNA, 74 bp, Homo sapiens
tcctggaccttctgtggatcgccagcgccttgtccacggggcagatccgattaaagtggtggagagagagctgg

SEQ ID NO: 163419 - DNA, 123 bp, Homo sapiens
ctgcagccacatactatccgtttgttcaggaaccaccagtgacagaggtgccctgaaaaccttgaaggaattttaacgaacgatgttggaaagacaggcgagcctcagtcagatcagcagatg

SEQ ID NO: 163420 - DNA, 98 bp, Homo sapiens
gtctgcgtggagttttcactcttggaagatgccatcggatgcatggaggccaaccaggaatatatatgtcccagatgtgaatcaggctttattgaaga

SEQ ID NO: 163421 - DNA, 101 bp, Homo sapiens
gaacaagacatggaaggaaatgagggcaacttctgaagacttcaacaaggagacatggaaatttacactacagaaggcaagacaaattgtcaagaagtccc

SEQ ID NO: 163422 - DNA, 100 bp, Homo sapiens
cttgaggattcgttttcctggctttgagcccctcacaccctggatccttgacctactatctattatcctcccagtccacaacgctgaaccgtggctggac

SEQ ID NO: 163423 - DNA, 83 bp, Homo sapiens
cttcaagccaaacatcaagcagaatgtgatttgcttgaagatatgagacttgtgtatgcggatacctgcttcagtaccatcaa

SEQ ID NO: 163424 - DNA, 49 bp, Homo sapiens
ggactggcaggcccgagggcgagtgagtgacctgcaggaagaaggcaag

SEQ ID NO: 163425 - DNA, 82 bp, Homo sapiens
cacgccatcgttgctgccttcttcgtcaaggctgggagtcctccgtcagcatcagctccggctccggtgtcctccttctctc

SEQ ID NO: 163426 - DNA, 82 bp, Homo sapiens
ccgtggattcctctgctaagaccgctggacactcatgaggaccatgatacttccactgagaatacagacgagtccaaccatg

SEQ ID NO: 163427 - DNA, 75 bp, Homo sapiens
gctgcttatggcggcgctggagagggggcgctgagctgttgggggtttcatcaccttaaatggttttgaaccaat

SEQ ID NO: 163428 - DNA, 100 bp, Homo sapiens
ggagaccataacccccgacagcgccatggcccagattctgccaattcgttttcaggagcatctccaggtctgccatcatggatgttctcgcagaagcaaa

SEQ ID NO: 163429 - DNA, 75 bp, Homo sapiens
cttctgagacggcggcagcagcggcattcaggatctatctggttcaatagatgacctccccatggggacagaagg

SEQ ID NO: 163430 - DNA, 98 bp, Homo sapiens
cttctctgtgctccacacttaccaggaccacttgtggaaatgctgtctatgatttcttcattggccgtgaattaaaccctcgaattggtacttttgat

SEQ ID NO: 163431 - DNA, 75 bp, Homo sapiens
gcagtttgtcgaacgatgttggactcatagtcactgccagaaaggagatacaactcgtcaacgaatcaaattcag

SEQ ID NO: 163432 - DNA, 80 bp, Homo sapiens
gctgaagcaggacaacatagcggtgaaggcgaacgcggtctgcaagctgacgtattgctcctcgtcttcctttgcctggg

SEQ ID NO: 163433 - DNA, 100 bp, Homo sapiens
aaactggtggggcgagtggataaactggaggaggatcacctgctgttaccagctaccacccataacaagaccacaagaccaaaaatgtcaattgtgttac

SEQ ID NO: 163434 - DNA, 51 bp, Homo sapiens
agtggagtggtggatcagaccaaagatggaatatttctcttagaagatgac

SEQ ID NO: 163435 - DNA, 90 bp, Homo sapiens
tcctcacctggtctctggctgtccagagttgcttcctgttgacgacagctctcctcagcttagcagtgtctgcaaaaacgaatcttttcc

SEQ ID NO: 163436 - DNA, 97 bp, Homo sapiens
tcgtgaaaagatctgctgcaaggaactgatagcttatggttctccattgtgatgaaagcacatggtacagaatgtagccgtgagttcaggcagtggg

SEQ ID NO: 163437 - DNA, 50 bp, Homo sapiens
gtcgtgcgtctgaagcctacaagaaaggcttgctggacgggacggcagac

SEQ ID NO: 163438 - DNA, 100 bp, Homo sapiens
gattaacactgcagagtaatggggttcaacagaaatatttggtggttacctgcaactatgaagctaggaaacttggagttaagaaacttatgaatgtcag

SEQ ID NO: 163439 - DNA, 88 bp, Homo sapiens
tttacaagattttagtcatcttgaccacagtactatactggcaattgctggagaagattttgcaattgttgcttctgatactcgattg

SEQ ID NO: 163440 - DNA, 100 bp, Homo sapiens
gaagaaatgactgagtctaagttctctaagtactctgaaatgagtgaggaaaaacgagccaaacttcgtgaaattgaggggatggagaagtttatgtttg

SEQ ID NO: 163441 - DNA, 89 bp, Homo sapiens
tgctgaaagtccacggatgctatccctggtcaaatcagagagaaccatggagtctggcagtaccgccgccagtgaggaggcacgcagcc

SEQ ID NO: 163442 - DNA, 96 bp, Homo sapiens
acccgtccatcttcgggatcttcgacgggcacgggggagaggtatgtcgagagtaccaacgtggcaattgcaaccgaggagaaaatgattgtcggt

SEQ ID NO: 163443 - DNA, 75 bp, Homo sapiens
gcgaaggatatcggtttcattaaggagagcgaagacctggagaaacagaacgcggctctacgcaaggagatcaag

SEQ ID NO: 163444 - DNA, 82 bp, Homo sapiens
cggcctgcagtggcgcgactgtgtacgccgccagctggactagacgcttgaagcaaagctgccatcccagaagacgacatgc

SEQ ID NO: 163445 - DNA, 96 bp, Homo sapiens
ctcaaggacatcaacttccggccgcagatgtcccaggctgagtatgagtttatcagctctggtctctacctagtggtgttattgcacttgtgcgaa

SEQ ID NO: 163446 - DNA, 83 bp, Homo sapiens
agtacatattcaccttgaagaggaagacggggcggaagaccaagatcatcgagatgacgttggacctctcgaacaaccagctg

SEQ ID NO: 163447 - DNA, 90 bp, Homo sapiens
ctccaggtcatcctgaacaaggacacggggatttccatgttcaactgcatcacggagctggtcctccgagcaaagaaagacaacctggca

SEQ ID NO: 163448 - DNA, 101 bp, Homo sapiens
tgagccagaaaattctagggaatttgcagcagctgcaaggacccttcccagatgggaagctgcaatgggaggaggaggccacagtgaaccgactgcagagc

SEQ ID NO: 163449 - DNA, 90 bp, Homo sapiens
aatggcagtgagccggaagagccacaggattcggcaaagacggacacacagcaccacaccccactctggccggagcacgccaagcagctc

SEQ ID NO: 163450 - DNA, 51 bp, Homo sapiens
ttcgcatttgggaccctgcaggtattctaccttgtaaatactgttatttgt

SEQ ID NO: 163451 - DNA, 50 bp, Homo sapiens
gccctgcatcacctcaagtgtgtagggctctgtggtatatgactgcttcg

SEQ ID NO: 163452 - DNA, 75 bp, Homo sapiens
gaagccttcaaatccatcaagctcatcaaaagattaaatctcttgatgaacagtgtgtggttggcaaaatttcca

SEQ ID NO: 163453 - DNA, 75 bp, Homo sapiens
gggtggcccgccacagctctgtcagcaaggaggagaaggagcaggttgccgtccggttgtttgaccaggagagtt

SEQ ID NO: 163454 - DNA, 100 bp, Homo sapiens
gtgaagccagtttgcaagcctggctggcaagacaacagtgagctgggacggagacaagctccagtgtgtgcagaagggtgagaaggaggggcgtggctgg

SEQ ID NO: 163455 - DNA, 100 bp, Homo sapiens
gtctggagttgaaagccagatcaccaccttctggttgaggaacaggttagcaccactgagagagtgtttcaggatagacaatatcagattgatgctgcta

SEQ ID NO: 163456 - DNA, 122 bp, Homo sapiens
tgatgagacttatatgatgcaagatgtggcagaagaacaagaagttgagaccgagaatgtggaaacaggtgagactgctgctcctcgggccattttgaccggccatgactatgaggtcacat

SEQ ID NO: 163457 - DNA, 50 bp, Homo sapiens
gcgagggagtaaagccacggcaggaggagatatctgaaatgtgttgtgaa

SEQ ID NO: 163458 - DNA, 100 bp, Homo sapiens
cgttaccatgcatcctgccgtcttcctatccttacccgacctcagatgctcccttctgctcctggagtggagtcaacatatcaatggagcaagtcacagt

SEQ ID NO: 163459 - DNA, 100 bp, Homo sapiens
tgggattagacagtgaggaaggctggaggcctctgttccaaaagacaggggagtttgaagaggaatcaaagcagccaggggtgtctgagcagcagcgcca

SEQ ID NO: 163460 - DNA, 49 bp, Homo sapiens
acggagtgtgcgacggattgggaggatgtgtctagtccgaatgaagcag

SEQ ID NO: 163461 - DNA, 127 bp, Homo sapiens
ccgcaccatcggcaagggcaacttcgcggtggtcaagcgggccacgcacctcgtcaccaaggccaaggaggcctactgcgcgtatgccatcatcctcatggcgctcttctggtgcactgaggccctg

SEQ ID NO: 163462 - DNA, 75 bp, Homo sapiens
tgtggctgatgcatttcatggctatcatctacacgtgagcgagtgctgtgctttcatgggcctcttctttatgaa

SEQ ID NO: 163463 - DNA, 90 bp, Homo sapiens
cgcgggggcggctcctgctcttcctggactcctgagcagagttgtgattccaaagaatccctatcctgcctccgatgtgaatactgagaa

SEQ ID NO: 163464 - DNA, 83 bp, Homo sapiens
ggcgaccgccatgtacttggagcactatctggacaaaatgagccgtcagactgctacagcattacctaccggtacctcgaagt

SEQ ID NO: 163465 - DNA, 75 bp, Homo sapiens
acagcagcaacacggataacattccacctgaaaggcactgaagtggcagcagcatcagggattgcttcctcctgg

SEQ ID NO: 163466 - DNA, 100 bp, Homo sapiens
agcgatcccaccgaagcagcgtgtcctccgtgggagcccgagcctgacgactccctggagcctttctttgactctctggtaaagcagacccacgttccca

SEQ ID NO: 163467 - DNA, 75 bp, Homo sapiens
ctggacccggaccggttttggccggcacagtcttcactaccgtagaagaccttggctccaagatactcctcacct

SEQ ID NO: 163468 - DNA, 80 bp, Homo sapiens
gcggcgagaggcgggctgaggcggcccagcggcggcagctcggccgctactccgccctgttcctcggtgtggcctacgga

SEQ ID NO: 163469 - DNA, 75 bp, Homo sapiens
gccacctaaaaacaaagaggattttgagaaggtacttccggaacctgtgctcagatgacacccccatggtgcggc

SEQ ID NO: 163470 - DNA, 50 bp, Homo sapiens
gcgaagtggtgaaagagcatcaggtttggcaaacatcgaaaagatgacaa

SEQ ID NO: 163471 - DNA, 98 bp, Homo sapiens
cgggcctcccagccgacatgtctctagtggcggaagccttcgtctcccagattgcagctgtgaattcctttggacaattgatgatatttatcattgtg

SEQ ID NO: 163472 - DNA, 74 bp, Homo sapiens
gctgctggctgcccttgtctcctttgaattacgtatggaaattgcaaaacaagaattaatcgctcatgcccggg

SEQ ID NO: 163473 - DNA, 75 bp, Homo sapiens
tgctagtcctggtggatctgcagtacgaaggtgttacacataatattgcattacttcgagaggtgataatcaact

SEQ ID NO: 163474 - DNA, 101 bp, Homo sapiens
acctctacaacgaaggtgaagccacggaagataagatattatgcctggtgatcctgatctgcttcagtgcctccacaccaggctactcctccctgtcggtg

SEQ ID NO: 163475 - DNA, 90 bp, Homo sapiens
aaagatgtcatgatggagaattatggaaacctggtctcactgggttgtctgcattcaaaagagcattctattaaagctaccttaatttgg

SEQ ID NO: 163476 - DNA, 83 bp, Homo sapiens
ggccgagcgcagagcattggcaggaggggcaaggtggaacagacccttccaagtaagtccaacgaaagccatgaccacatgga

SEQ ID NO: 163477 - DNA, 75 bp, Homo sapiens
cgcatctggctggagccctgcattcgcggcgtgtgcagtggagaccatcctgggcctcacaggagcgaccatggg

SEQ ID NO: 163478 - DNA, 100 bp, Homo sapiens
ctgatcagaagatctgccaaggctgcccacatagtcaaggcctggccgacaacaccgttattgctaaagtaaataatgttgtgtgggacctggaccgccc

SEQ ID NO: 163479 - DNA, 74 bp, Homo sapiens
gcgaattcggggctataacttcgaggaccttacagataggaacatggtcttgcctcacccaagctagagtgcag

SEQ ID NO: 163480 - DNA, 74 bp, Homo sapiens
agcacatcacactgacgtataggactccttgggatacaggctgaagagattctgcagacatacttgaaatccaa

SEQ ID NO: 163481 - DNA, 100 bp, Homo sapiens
agccatcggatctaagatccaaaaggggcaccaccacgaggcgatttgtgggccataccaaggatgtgctgagtgtggccttctcctctgacaaccggca

SEQ ID NO: 163482 - DNA, 99 bp, Homo sapiens
tgagcctggatgatcctgaggtggagcaggttgcagtccatgagctgggaaaggaggcagtgctcttgggagaaacagcagaggcctcaagtttcgggc

SEQ ID NO: 163483 - DNA, 99 bp, Homo sapiens
caagctggtcagctatactttcctcttctggctgcccctgtacatcacgaatgtgggttgaaaactaagcatggggaagagctgcaaggtggtcgtgtg

SEQ ID NO: 163484 - DNA, 100 bp, Homo sapiens
gctggagagaccccgcggctgggcgttcatctaccacgctttcgtgtgaatgaaaactttgccattgatttgatagcagagcagcccgtgagcgaggtgg

SEQ ID NO: 163485 - DNA, 90 bp, Homo sapiens
gcgatctatgggggtgtagaggggaatccagcactacgccctgccctctactgactggaggcaggcctctgcctactttagaagttaaac

SEQ ID NO: 163486 - DNA, 100 bp, Homo sapiens
aatcagtacaacaatgagccttcaaacatatttgagggtggccattcagggcaactggggccttcgtcagttgccccttcattccgcccagaggatgagc

SEQ ID NO: 163487 - DNA, 74 bp, Homo sapiens
caaaatctccagcgtccagtgcctcagattgtcttcgcagttttaccgacttagaagaacttgatgagacagag

SEQ ID NO: 163488 - DNA, 90 bp, Homo sapiens
gaggcattgaggactttccttacctgtttttccagctcacccactgccagcagaggtacggttcctggagcagcagaacaagatgctgga

SEQ ID NO: 163489 - DNA, 82 bp, Homo sapiens
aggacagtcagtctggtactaacaatgcagtgtaaacaggaacatcgataagtagtgtaaaaacttgcacaatgaaatccga

SEQ ID NO: 163490 - DNA, 100 bp, Homo sapiens
agattatatcgcatcctatggctcaaagaaagatgattatgtgcattattgcaatgggccttgacaaaaaaccgtctttgccgaaatctaggaaagaaaa

SEQ ID NO: 163491 - DNA, 98 bp, Homo sapiens
cgttttgcagacaacactttctcaggttggattagcttttcaaaacagaaattcttggaaagaattaaatgacattgcatcgaagccctcccaggaac

SEQ ID NO: 163492 - DNA, 100 bp, Homo sapiens
cgggaatgcatcgagtcggggcccggctgcacctggtgccagaagctggctctgcagcgccgcgagaccgaggtctatgcctgcatcgagaatgaggatg

SEQ ID NO: 163493 - DNA, 100 bp, Homo sapiens
gaaaccttgaatggcctggcgcaggagtccctggcttgcagggctcccatttaccaaaccaaaagtgatctccctgttgcagcaaggagaagatccctgg

SEQ ID NO: 163494 - DNA, 96 bp, Homo sapiens
tctggcctaccatccttctgctgctgaaccaatgccaacaggcctttgtgttgccaccgtaggcattgcagtattgatacgaattttgactacatt

SEQ ID NO: 163495 - DNA, 51 bp, Homo sapiens
gacagatcacccggagcactctccacggtgctggagaatctggtaaaagca

SEQ ID NO: 163496 - DNA, 96 bp, Homo sapiens
cctctgtgtgagacctgtgtagaggcgcaccagcgggtgaagtacaccaaggaccatactgtgcgctctactggttgttgcttagaatatgctacc

SEQ ID NO: 163497 - DNA, 50 bp, Homo sapiens
ttaaacaagagatttccacagaagaatggccaacagaaagggagaaggtg

SEQ ID NO: 163498 - DNA, 74 bp, Homo sapiens
tcagaagataacagaactccggccctttaatagttgggaggctctggagttcatgaaggccagcgtggatgtgg

SEQ ID NO: 163499 - DNA, 75 bp, Homo sapiens
catcatccttacagagacgagtcaagtcaattccagggacgtccagatcggtgacatcgtcacagtgggcgagtg

SEQ ID NO: 163500 - DNA, 75 bp, Homo sapiens
atccttatcagcacagcacttattccaggctgaccggttccctgatgtgttacctgcttctgctactgatccaaa

SEQ ID NO: 163501 - DNA, 75 bp, Homo sapiens
tgtaagaacccagtttataccactggaaggaaacctacggaaactaaatatattttgccaactttggaaaaagaa

SEQ ID NO: 163502 - DNA, 98 bp, Homo sapiens
gcggagctgacggtggaggttcgcggctctaacggggctttctacaagttgatgctgatgtaacagttataggttctggtcctggaggatatgttgct

SEQ ID NO: 163503 - DNA, 88 bp, Homo sapiens
gcgcgtttcagcgaagtcgcacgtgaaggatagcagtggcctgagaaagaggctgaggggatctggcggtggagcgctaggatcagac

SEQ ID NO: 163504 - DNA, 75 bp, Homo sapiens
gcactcgggccggcggacagtgagggcgcgctaagtttggtgcgaacgccattctgggggtgtcccttgccgtct

SEQ ID NO: 163505 - DNA, 101 bp, Homo sapiens
gagcagcctgcgcacttccaggtgcgcagcgcgggagccgccacggtgcttgagaacatcatcaagaaggtgatcgggcagaagtttgtgtacaagtttgt

SEQ ID NO: 163506 - DNA, 89 bp, Homo sapiens
cctggaggagaatcaagagctccgagctaccaagatgaatgaactaatggagaaatagaaagtcttcagtgatggcctacgccaaagca

SEQ ID NO: 163507 - DNA, 100 bp, Homo sapiens
cacaagtgagtgtctgcccgaacccagaggaattgccccccactgcctggatgagggcactgtgcggagtatggtcactgaggaattcaatggcagcgat

SEQ ID NO: 163508 - DNA, 129 bp, Homo sapiens
tacctaaatatggcagtataaatggagcaacaaggctgactataagaggggaagattgagatggcacagaagctattgaactctgacctgggtgagctcatcaacaagatgaaactggcccagcagtat

SEQ ID NO: 163509 - DNA, 75 bp, Homo sapiens
tggggcaaaaacattcaagaatgagagcgagaacacctgtcaagacctggagtggaagatcatttatgttggctc

SEQ ID NO: 163510 - DNA, 90 bp, Homo sapiens
aaaagacagtcctcgtcagcactgactttcagctatggaatcggaatccctttgcccacgtccagctgaagccgacagtgaccaacgaca

SEQ ID NO: 163511 - DNA, 83 bp, Homo sapiens
aatcaatgttagcagatagccagcccatacaagatcgtccatggaattccatgaacacttgcacagcataggcaccaaggaag

SEQ ID NO: 163512 - DNA, 50 bp, Homo sapiens
atatcaagaggaggagttgttggtagtagccatggttatgtgggttccag

SEQ ID NO: 163513 - DNA, 83 bp, Homo sapiens
agaaaacacaggagccggagcagaagcaaagagatcgaaagctgctttgcgtcgcagttggagcagcacccccaccgcaggtg

SEQ ID NO: 163514 - DNA, 50 bp, Homo sapiens
ccaaagtgggggaaaggtcgtcctccagatatggaatgtgcagatgtccc

SEQ ID NO: 163515 - DNA, 75 bp, Homo sapiens
ctacaattactaattaaagctgtgaatctgttccctgctggaacaaattcaaggatatgggccctcacattttcc

SEQ ID NO: 163516 - DNA, 97 bp, Homo sapiens
gctcggaggctgttcccacccccaggctccgcgttcccgccggccccagctccagccccgcagcccaccggtggcttctggcacagcagcttaattg

SEQ ID NO: 163517 - DNA, 83 bp, Homo sapiens
ccaggatccgcggggagaccttgggcatcatcggacttgggcagctgtgcggagggtagtggcagccatgaaccggatggacc

SEQ ID NO: 163518 - DNA, 100 bp, Homo sapiens
tcgggtctggccgcagagacgtctgcaatctctcaggctgcggcaaatctacagggaccctgagaccctcgtgttccgggactcctcttcgtggcgttgg

SEQ ID NO: 163519 - DNA, 100 bp, Homo sapiens
aggatctggtgtaccaggcgaagctggccgagcaggctgagcgatacgacggtcacgactgctgaatatgagacgatctgcagcaccaagtcagttgcag

SEQ ID NO: 163520 - DNA, 101 bp, Homo sapiens
gatcgagcagctgaacgagtgcaagcagctgtccgagtcccaggtcaagagcctctgcgagaagggcgtctctggccgagcctctttttgtggaaaacgac

SEQ ID NO: 163521 - DNA, 100 bp, Homo sapiens
attgctgaaaatgatgttggaaatgcacaagctggagcccaactgataatccttgaacatggtaacgatgactcggacatagacatccaggaggacgatg

SEQ ID NO: 163522 - DNA, 90 bp, Homo sapiens
gcagaatatcatgaacaggaagaaattttcaaacttagactaggacatctcaaaaagttagtaacaggagtatgggaaggcaaatacaac

SEQ ID NO: 163523 - DNA, 74 bp, Homo sapiens
ctcatcccctggatgggggaccacaagatcctcatcgacaggtcacaagacacccacttcaggagtcctgcctc

SEQ ID NO: 163524 - DNA, 110 bp, Homo sapiens
ttcagcatggctcatattctacttcattcagaagatcaggtacacaaatgcacgcgacaggaaccagatatgggataaaaccagcctggaatgtttgaaagtgttaacag

SEQ ID NO: 163525 - DNA, 90 bp, Homo sapiens
ggagtcgttgctgttgctgtttgtgagcctgtggcgcggcttctgtgggccggaaccttaaaggtctcctctgagcctccggcctccata

SEQ ID NO: 163526 - DNA, 82 bp, Homo sapiens
gagcgcaaggtcgccctcaaggccatgatcaaaacggcttcccacggcacgacatggagacctgtggttgcgaggctccctg

SEQ ID NO: 163527 - DNA, 50 bp, Homo sapiens
tggacaagagctattgatagaagagaacactttttacagttggctagaag

SEQ ID NO: 163528 - DNA, 74 bp, Homo sapiens
ggcgatgggcccgtggacatgcgcacctcacacagagcttggggcttccttggtcgcacccaccacctgcctgc

SEQ ID NO: 163529 - DNA, 129 bp, Homo sapiens
aaccgtggctgctcgataaatcagacagaacagttaatcctcaatttaagcctgatctaacccctagaaacagtttggagaattaggtggatttgcagcaatccaagccaagctccattcagaagatat

SEQ ID NO: 163530 - DNA, 50 bp, Homo sapiens
ccagacatctaaaagcagtgataacagtaaactgtttcacgttagacctg

SEQ ID NO: 163531 - DNA, 100 bp, Homo sapiens
tgctgatgctgtgcacctcatctctaagcactatcctttgtactccctcaacgtggcctccatgtggttgaagctagggagactctacatgggcctggaa

SEQ ID NO: 163532 - DNA, 100 bp, Homo sapiens
gcgctcccgcgccgcgctcccctcgcccgcccgggccgccagggttattttggagctgttggagcactccttgagctgttgaagatcccgtgatcattac

SEQ ID NO: 163533 - DNA, 85 bp, Homo sapiens
aaaaggggctgcttcatgtacggaaacagctttagtgatgagagcacccagggcacagtcgtagtgccaactctggactctgttt

SEQ ID NO: 163534 - DNA, 82 bp, Homo sapiens
tttcttatgttttggagtcacacaagctaaagacgggccattttccagacctcatccaggaggcaacgcacgggccacaggc

SEQ ID NO: 163535 - DNA, 100 bp, Homo sapiens
gccatggccgctgccgcccgagcccgggtcgcgtacttgctgaggcaactgcaacgcgcagcattggatttgaggctcctcccctccagggacaggctgc

SEQ ID NO: 163536 - DNA, 100 bp, Homo sapiens
ctacaggaagactcccactccctgaaatctggagtgaagaacgccgccatccagccaccattccaagtttaattggttggggtcagataagaagaggagt

SEQ ID NO: 163537 - DNA, 90 bp, Homo sapiens
gtcccagccctcagtttatcgttggtggagccacgcgcacagacatttgtcagggtggtctaggtgccatggagaactgggaccttgtta

SEQ ID NO: 163538 - DNA, 74 bp, Homo sapiens
tacacactcagttaattaatctggtcgttgaggacttccacatggagattggcacaggaccagactcaagacac

SEQ ID NO: 163539 - DNA, 82 bp, Homo sapiens
actcaattacacttcgactctcaaagcaataccaggatagctgttgtttcagagaaagatgcccccctcggaagcctggaga

SEQ ID NO: 163540 - DNA, 82 bp, Homo sapiens
tgcttaaccagatcagagccacatcggaagcttctgccataacccggacaacggacatggatttgattgacatactttggag

SEQ ID NO: 163541 - DNA, 83 bp, Homo sapiens
ttcggctgtgtcaatgccattgaattctccaacaatggaggccagtggctggtctcagtgcagggctcgcggcctggcaagaa

SEQ ID NO: 163542 - DNA, 82 bp, Homo sapiens
gcagccgcgaggaggcgcgggaggtgttcgagaacgaccccgagacggtatataatgtttacatggcagggaggcagctgtg

SEQ ID NO: 163543 - DNA, 108 bp, Homo sapiens
gttgaattccgggaagtgggagcttcaggctcgctccgtgcggatttccacatggaagaggcactggattggcctggagtatacttgttaccaggccaggtttctggg

SEQ ID NO: 163544 - DNA, 51 bp, Homo sapiens
gtttcactcactgagagctccagggacttgccatgaggtgttgaagccttg

SEQ ID NO: 163545 - DNA, 88 bp, Homo sapiens
cggggtctccctacaccaacgatggcagaaacggtggacacaagcgaaatggtcaacggcgctacagaacaaaggacgagctctaaag

SEQ ID NO: 163546 - DNA, 99 bp, Homo sapiens
gtctatgatgtcaaggataagtctcatgacaccgcgatctgggtgtccatagtggggaagaactccagctcaccaccactatcacccatgtggacggac

SEQ ID NO: 163547 - DNA, 99 bp, Homo sapiens
cggagcaccgcccgcgtcccggcccccggcaccatggacgcgccgcgcgcctcggcggccaagcccccgaccggtaaacctattgatggcaattttgct

SEQ ID NO: 163548 - DNA, 82 bp, Homo sapiens
gggtcggccgccgcagccatggaggccaactggaccgcgttcctgttccagaggcttcgtgacggagttatcagagacattg

SEQ ID NO: 163549 - DNA, 51 bp, Homo sapiens
attgcaaacttaattaaagaactggccagatgtcatccatactgtagggcc

SEQ ID NO: 163550 - DNA, 101 bp, Homo sapiens
ggaagtacgggcagttgcagtgttggagctaaagggccacctacagatgctcctgcagtggacacagcagaacaagtctatatctcttccctggcactgtt

SEQ ID NO: 163551 - DNA, 101 bp, Homo sapiens
tcatcctgtccatcgtgtgcctgatgatcacgcagctggctggcttcagtggaccaaactcttcatcttggcttatacctatactgcctgatatgctccga

SEQ ID NO: 163552 - DNA, 101 bp, Homo sapiens
gccaaaggcaccccgattgtcgatgggctcgctccagaggacatgagcaaggagcagagactttagaagacagctttccatcgacactaggccctttagac

SEQ ID NO: 163553 - DNA, 83 bp, Homo sapiens
caggctggaacttgccctgtctcctcgcagatgagatttgagttctgtgaacctgcatttgttgttggtaattgcctccagat

SEQ ID NO: 163554 - DNA, 75 bp, Homo sapiens
ccaagatcactgataagaaatgttctcgacagcaagcacctgtggccttgccgaagaactggaaaaagagaagtc

SEQ ID NO: 163555 - DNA, 100 bp, Homo sapiens
agcctttggacaactattttcgtcatctttggaacaaagagttcattgtcgaaatgctggacctgtagctgtagctgagaagagcattacccaggttgca

SEQ ID NO: 163556 - DNA, 90 bp, Homo sapiens
aggagtgaggggggcgaggaaacgcaagaaaaaagagtgccggcgggaccaccgcccaccgtgtgctcaggaggcgccccgcaacatggt

SEQ ID NO: 163557 - DNA, 76 bp, Homo sapiens
gaaaatcgtcttatagttgagaatttatcctcaagagtcagctggcagggtccacacccagcaccactgagcaagt

SEQ ID NO: 163558 - DNA, 75 bp, Homo sapiens
tggaagctgtgcacctccctcactttgtggctctccaagagacggtctcgccacattgcccagactggtctgaaa

SEQ ID NO: 163559 - DNA, 96 bp, Homo sapiens
gtgccctctgcagctgaataacccttttaacgagtattccaaatttgatggcaagggacaatggtgacagatccaggcaccgagctccacgcaatg

SEQ ID NO: 163560 - DNA, 75 bp, Homo sapiens
ctccagtcccttgccagtgggggaaatgatgttcaacagaagaggtggaaggtggagaccaactccaggctggat

SEQ ID NO: 163561 - DNA, 75 bp, Homo sapiens
gccaaggctgcagaagccaaagccacggctactgcagcactggggtgtcagttgttggtccgacccagaacgctt

SEQ ID NO: 163562 - DNA, 98 bp, Homo sapiens
agaattcacggtggagccacgccttctagctgctcctgctaaggccaagccggctgaagctcctgctgctgcagccccaaaagcagaacctacagcag

SEQ ID NO: 163563 - DNA, 100 bp, Homo sapiens
tggttctgctttagtgaagttgggaaatactacagtaatctgtggagttaaagcagttctaaattagttccattctggagctggctacaaatgggtaaag

SEQ ID NO: 163564 - DNA, 82 bp, Homo sapiens
agatgctggatgaagctgttttccaagtgttcaaggttatgatgtgattgctcaagcccaatctgggactgggaaaacggcc

SEQ ID NO: 163565 - DNA, 100 bp, Homo sapiens
ctggaactgaaaagaagtcttttatgtagagactctgcctatgacagtgaccccgagtatagattcatgatgttgctatcaaaagttgagaaattgtcag

SEQ ID NO: 163566 - DNA, 75 bp, Homo sapiens
tttgcttcagcgttctgtggttgtcaacagtgagggccgaggcaagttgacggtattttcagttaaagctatgtt

SEQ ID NO: 163567 - DNA, 83 bp, Homo sapiens
tggcctcaacacgtccctaacttgtgacaatgcagatcttcgtgaagactctgactggtaagaccatcaccctcgaggttgag

SEQ ID NO: 163568 - DNA, 90 bp, Homo sapiens
gccgacttctggttgccaccaccttcactcacagctaccctttttgctggaggctgcagaagatcctggcagagtctcccccacccgccc

SEQ ID NO: 163569 - DNA, 100 bp, Homo sapiens
ctgcactacaccgtgcacattctctgttctaagtgccttaagagaggatcgcccaatccacatgcttttccaggcatcacgtgccctccccccatgtccg

SEQ ID NO: 163570 - DNA, 75 bp, Homo sapiens
agcacccaccgaagacgaccatgacgagctctagctggatgggcgcagaggggttgctcaagaggctgaaagaga

SEQ ID NO: 163571 - DNA, 100 bp, Homo sapiens
gacttgctggcacccatctctgagcccatcgagtggaaataccacagccctgaggaggagataaggagaacatgatcgtgtatgtggaaaagaaagtgct

SEQ ID NO: 163572 - DNA, 82 bp, Homo sapiens
ggaccgggagaggcaccaaatctggcctgggggcccgagaagcttcctctcaggagaaccaggtgcatcagcgcattgcgga

SEQ ID NO: 163573 - DNA, 100 bp, Homo sapiens
ggggctcgctgctcatcatgctcaagtcagagggcttttactcctacctgtgtaccgagccaggccaataacggaaaactgcctgacaacaaagtcattg

SEQ ID NO: 163574 - DNA, 74 bp, Homo sapiens
ccgagggatagcctatggaaagaagggactacatgaggactggaatgaaattgaccccattaaaaagaaagacc

SEQ ID NO: 163575 - DNA, 136 bp, Homo sapiens
agggccgcgtctacaacttcctcgagcgtcccaccggctggaaatgcttcgtttaccacttcgccgtgatgacacagcaagaaggccctcaccagatgctgagcagatgccggcaccatgcctgtggacttcccag

SEQ ID NO: 163576 - DNA, 95 bp, Homo sapiens
attgccaataaaccagaatttgatcaccttgcagaatatctagaattctccaagtcccggctgcttatgtacctatcgagccagattcaccaccg

SEQ ID NO: 163577 - DNA, 100 bp, Homo sapiens
gaagatgtggataaccaacggaggaaaagctaattgggctttatatgtggcaaatcgctatgattactctgtggagtttactggtgtcggggaaccacca

SEQ ID NO: 163578 - DNA, 100 bp, Homo sapiens
cagggacagctggcctgtggcggagccctggtgtcagaggaggcggtgctaactgctgcccactgcttcattggagaaaccccgttcaccaaggccatgg

SEQ ID NO: 163579 - DNA, 98 bp, Homo sapiens
tcatcactgggaccctcagcaaagggacaggagagagtggcaagagtacgtttatcaagcagatgagaatcatccatgggtcaggatactctgatgaa

SEQ ID NO: 163580 - DNA, 75 bp, Homo sapiens
atgtcacttacaacattaatcagatactgcatttaagatgtggaaactaaagcccagagagaaagtctgacttgc

SEQ ID NO: 163581 - DNA, 75 bp, Homo sapiens
ccaggcataaaatcatctccatattctcaggcacagagaaaggttaatggcacagatgcagattatgaatatgaa

SEQ ID NO: 163582 - DNA, 96 bp, Homo sapiens
ctggataacactaagtttagatctcatgaggagacaaacagcctttcaaattaccagtttctgttccaggatctggccattacaactcttattggt

SEQ ID NO: 163583 - DNA, 50 bp, Homo sapiens
ctgtcaaaccatgtcaatctagagttggaaactcaactattggaacaatg

SEQ ID NO: 163584 - DNA, 97 bp, Homo sapiens
ctggcccagctcaacacctgatttcgttgattatggaagattcccacaagagtaccacgtcagagacagcacctcaacctggttcagcagttcaggg

SEQ ID NO: 163585 - DNA, 50 bp, Homo sapiens
atctcgaaagcctatcagcatagttaagtggcctcggaggcctttgaaga

SEQ ID NO: 163586 - DNA, 100 bp, Homo sapiens
aaccctggcgtccatgagcctgtggagacttttcagaaactgcagaaggcaaaggagattctgaccaatgaagagagtcgagcccgctatgaccactggc

SEQ ID NO: 163587 - DNA, 100 bp, Homo sapiens
aacggaaacaaagttattttgctcgctcccctgggacctgtggccgccgcccacagaccatgctcctggggcgcctgacttcccagctgttgagggccgt

SEQ ID NO: 163588 - DNA, 100 bp, Homo sapiens
ggagtggagtgatatcagacaccgagcttcagcaagctctctccaacggatggagctatgacattgaagagaggaaggttccaaaacccaagtccaagtc

SEQ ID NO: 163589 - DNA, 99 bp, Homo sapiens
ttattagatcctacaaatgtgttcatttcagttgtggatggagagagaaagaaaaagccagagaggagagctggggtccacctcgagaatcaaggccat

SEQ ID NO: 163590 - DNA, 83 bp, Homo sapiens
gttcatgaattgagtagacacttaacaagtgggcctttggagtgacgctgtgggaactcatgactctgggccagactccctac

SEQ ID NO: 163591 - DNA, 90 bp, Homo sapiens
gcctcctttattgcagcaggaatttgattttgagaagagggggaaaaaggaagtttgtcctgtcctggatcagtttctttgtcatgtagc

SEQ ID NO: 163592 - DNA, 75 bp, Homo sapiens
gcaaatgccagaaagaggatttggccagagcgttttgtgagcgcctggaccatgctgctgagcgcctactggcac

SEQ ID NO: 163593 - DNA, 75 bp, Homo sapiens
cgcgcccaacaccttctatgtagactttgaagattatccaatgagaattttatatgaccttcattcagaagttca

SEQ ID NO: 163594 - DNA, 50 bp, Homo sapiens
agaccagcctgagcaacacactgccccagagcacatcagctatgtgcccc

SEQ ID NO: 163595 - DNA, 75 bp, Homo sapiens
ttaaacatatggccaaactcctggacagtatcactgtggtatcacggaaaacttgacagaacgatagcagaagaa

SEQ ID NO: 163596 - DNA, 75 bp, Homo sapiens
gaccgcgcctcaggctcccccaggtcaaaatgcagatcttcgtgaaaacccttaccggcaagaccatcacccttg

SEQ ID NO: 163597 - DNA, 76 bp, Homo sapiens
tgggaatttacatcagcaccctcaaaacagggcttctaccactgctgatgcaaaaccacaaagggacctacctgag

SEQ ID NO: 163598 - DNA, 75 bp, Homo sapiens
agcaggctgagcgatacgacgatatgcacccaatgtccagggagcgtgcaaaatttgtcaaaagtggccttttat

SEQ ID NO: 163599 - DNA, 90 bp, Homo sapiens
gttcatggggctgcaccaggagaacaacgctgtgacgcagatccacctcctgcccggccagttctcctgtgcctcctgttggctctcttt

SEQ ID NO: 163600 - DNA, 131 bp, Homo sapiens
gcggatttgcaccccgtggggtggtgcacacagaacaacaaggtgttgatgccgccggacgcccagctccagcggctggaagggctgagaaccataggtgttaccaccaatggcatcaacctggcccggct

SEQ ID NO: 163601 - DNA, 90 bp, Homo sapiens
cagaatgagaagctacaaacaagaaatgggaaaactcgaaacagatttttctaacaaagtgccagtggtgcagcaccctcaccatgtcca

SEQ ID NO: 163602 - DNA, 98 bp, Homo sapiens
gataatggtatcatcaaggccttcagaaacatccctggcgcagttgtgtagcagttgagtaatgctggttagctgttaaggtggcgtgttgcagtgca

SEQ ID NO: 163603 - DNA, 97 bp, Homo sapiens
gaggcaccgaagggggcagcgccgagtcggagggggcgaagattgacgccagtaagaacgaggaggatgaaggaaatgcactcggtgatggaaagag

SEQ ID NO: 163604 - DNA, 75 bp, Homo sapiens
acttgttccaaaggaaaatcctggcagaggacaagtaacacaagtggcaagacagccgggaacccctaccccatc

SEQ ID NO: 163605 - DNA, 82 bp, Homo sapiens
caagcaaggtggaattaagcatggacagaactgtgtttctcacccaggaggagggcactgaaggatagcacagaagtagaaa

SEQ ID NO: 163606 - DNA, 100 bp, Homo sapiens
aggtcctggatcagctgtccaaaaacatcaccaggatggggctaacaaacttcaccctcaactacctcaggcctgccacagtgactcaggtcactcaagg

SEQ ID NO: 163607 - DNA, 50 bp, Homo sapiens
attcgggtgggagtgacccgattttccagtgagatgaacctggtacctca

SEQ ID NO: 163608 - DNA, 96 bp, Homo sapiens
ccggagtcagcgatggtgcccggcgaggagaaccaactggtcccgaaagaggctggcctgccactcctcctgctatgatgcctgggcagatcccgg

SEQ ID NO: 163609 - DNA, 78 bp, Homo sapiens
cacaagcaactttttgagtccggaaaaacagaatgtttctccatcccagagagatgaagtaattcaatggctggccaa

SEQ ID NO: 163610 - DNA, 76 bp, Homo sapiens
cttgtgcaaccagggcaactctggtgtggatgaggtcaccattgtcaacattttgaccaaccgcagcaatgcacag

SEQ ID NO: 163611 - DNA, 83 bp, Homo sapiens
ggaaacaagacagttctgtctgcagaagcccattatggctgtaactggagatgacacaggtcatcatcagatttgaaatattt

SEQ ID NO: 163612 - DNA, 98 bp, Homo sapiens
aataacttttccttggagagtcataacatatcactgactggtggtcagtctgaccaaggatacgggtctaaggatgaacttataaaggatgatgcaga

SEQ ID NO: 163613 - DNA, 73 bp, Homo sapiens
tcatgcagtgacatgttgataaaaaatgatgccaaaactggacaagccaaggcatctgtagccaaagtaaaca

SEQ ID NO: 163614 - DNA, 73 bp, Homo sapiens
gcggttcttgccggaagcggagagcggctgatcgcagtccggaggttgggggccgtcccgctcctaaggcagg

SEQ ID NO: 163615 - DNA, 116 bp, Homo sapiens
ggatcgtgaccgagaccgtgaccgagagcgtgaccgagagcgcgaatatcgtcatcgttagaagaaagcagaagccactggagaaaaacggccaagaggcagacctaggaaatggg

SEQ ID NO: 163616 - DNA, 98 bp, Homo sapiens
agaggcccagggagagctgcttcactcaagtcctgtcaagtcaaggcagccgggatttgtccacatcggggaacacacctgaaactagaggaacagct

SEQ ID NO: 163617 - DNA, 100 bp, Homo sapiens
gtttgaaaagcagctggcctgcaagaatgatctgaaagtgctgtttacatcactggctgacaacaaatacatcattctgcaaaaactggcaaatgtgttt

SEQ ID NO: 163618 - DNA, 100 bp, Homo sapiens
ggcctgcggcggagggaaaaaggaagaggagaaggaaattgtcccgaatccctgcaggttgaagaagcctcagcggaggcgatacggcctcctcgccaac

SEQ ID NO: 163619 - DNA, 50 bp, Homo sapiens
agttcagcatccccaagcagggggaggtatacaaaactaggatatgctgg

SEQ ID NO: 163620 - DNA, 50 bp, Homo sapiens
cttcgatcctgagaccaattccgacggtgtgagttcttgatacgaatgaa

SEQ ID NO: 163621 - DNA, 82 bp, Homo sapiens
acgaagtggccaagaaggagaagcagctgcggaaaatgctagaaggtgtcccgacccaggctaagcttgagcatggctgagc

SEQ ID NO: 163622 - DNA, 100 bp, Homo sapiens
agagctcggaggggcgctgtgtgtacatcacccccatggaggccctggcagagcaggaatggaagttggatacactttgtgacttgtacgagacactgac

SEQ ID NO: 163623 - DNA, 100 bp, Homo sapiens
caaaatgtcaacaaattgatgggtcctggcacaatgtttattgtgtcataaataaccaagaaatgggtttctacaaagatgcaaagactgctgcttctgg

SEQ ID NO: 163624 - DNA, 82 bp, Homo sapiens
cctggctcttgccctcatcctggttctggaatcctcagttcaagagaaagatgctggtttcgagttttggagatccttgttt

SEQ ID NO: 163625 - DNA, 88 bp, Homo sapiens
cctccaggcccagaacggagccgccttggcctcggggtctccctacaccaacgtgatgaatcaccaacaccagcagcagatggccccc

SEQ ID NO: 163626 - DNA, 74 bp, Homo sapiens
cgggcggctgagacaaaggcgacgacctctcaagctggatccaaggataaaaagatggaccaaccaccccaagc

SEQ ID NO: 163627 - DNA, 83 bp, Homo sapiens
gcgcctcgctcagctccaacatgatcatggaagggaagtggttgctgtgtatgttactggtgcttggaactgctattgttgag

SEQ ID NO: 163628 - DNA, 75 bp, Homo sapiens
aactcagttagaaagaacacgtcagcgaaacccatctgatcgacatgttattgagtcttacacatataaagaccc

SEQ ID NO: 163629 - DNA, 117 bp, Homo sapiens
ggacagaagatggtgcagaagaaaccagccgaacttcagggtttccaccgttcgttcaagatgctgtgggccctgagggaaaggatcacagaggcgctgagccgggatggctacgtg

SEQ ID NO: 163630 - DNA, 76 bp, Homo sapiens
gaaaaagccaaagtgggaccagggactggacctacagagacatctgggattttctgcgtcagctgtttgtcccata

SEQ ID NO: 163631 - DNA, 98 bp, Homo sapiens
aaacatggcggtggactcggcgatggagctgttatttttagatacttttaaacacccgagcgctgaggaaccactcgttttgactattattttatcac

SEQ ID NO: 163632 - DNA, 85 bp, Homo sapiens
cccccgccggttcgcgtctctctgctgcggcgcggggaccgctgtgctctcgggagtgcctgcagcaccccggcggggccacccc

SEQ ID NO: 163633 - DNA, 74 bp, Homo sapiens
attcctgtgtatgtgggccgcaaggttttgattcccaccatggccatcacccagtttcggttatttaaattttg

SEQ ID NO: 163634 - DNA, 114 bp, Homo sapiens
agaagctgagcctttctggacagaccaacctgtcagtgctgcaagtcatcatcctgaaccacccggggcagattagcgccggctactccccggtcatcgactgccacacagccc

SEQ ID NO: 163635 - DNA, 75 bp, Homo sapiens
gcggagacaacagcagtgagcaagaacaggacgcaggccttgatgccctttcctctatcataagtcgccaaaaac

SEQ ID NO: 163636 - DNA, 75 bp, Homo sapiens
gacctccgccagggcactccacacccaccccggattcctggtcgggtggcttccagtggtcttcagtctgtcgtg

SEQ ID NO: 163637 - DNA, 110 bp, Homo sapiens
gaaagacccaggagaagccgcccaaagaactgtttggaaattttagcattcaggtgccaggaatgcagatgggacagccagtgccagaaacaggcccagctatactcctc

SEQ ID NO: 163638 - DNA, 82 bp, Homo sapiens
gcttgcctgctgatgcagacagaacagaagactttgaatatgaggagctgactaaggctttggaacagaaaccagatgatgc

SEQ ID NO: 163639 - DNA, 74 bp, Homo sapiens
cgcgaggggaacggaggccagagctgcgagtctctggtaagaagagtgaaagcaaagaagccaagaagtctgaa

SEQ ID NO: 163640 - DNA, 96 bp, Homo sapiens
ttgccctgtgatctgcaggtccggagagacgcacagctaagatgtcaggacatcctggaagctgggaaagggttcctatctgacccacgaagccag

SEQ ID NO: 163641 - DNA, 76 bp, Homo sapiens
gaggattcgctcccagagcagctgcggccagaaaggcctaaagaatgtatttgacgaagcaatattggctgccctg

SEQ ID NO: 163642 - DNA, 83 bp, Homo sapiens
tttggtcataatcgctgaagatgttgatggagaagctctaagtacactcgtcttgaatagcacacagcaagaaggaggccatc

SEQ ID NO: 163643 - DNA, 75 bp, Homo sapiens
agaaggcgctgctggagttccgcgacaccatcttcgacaacatcctcaagactgacgacaacagtggagacttgg

SEQ ID NO: 163644 - DNA, 83 bp, Homo sapiens
gcgccgcgccaggccgggcgggcgatcctctccggcccctggagttcctgaggacttccctggggggcaggttcctggtgcac

SEQ ID NO: 163645 - DNA, 82 bp, Homo sapiens
tcggtgccctctccttttcgtttccggaaacatgacggcgggcgctaacaccaccgacaaggagctagaggttctctccttg

SEQ ID NO: 163646 - DNA, 96 bp, Homo sapiens
aaaaatgtggcagcgcctgaaaggaattggtattattgacagaagttgacaaactcaccaaagatgctcagcatgccttgcgaagaaccatggaaa

SEQ ID NO: 163647 - DNA, 98 bp, Homo sapiens
gaggcgccggggaccggggcgaggcggcccccgccgccgccatggaggcgctgggacccggtaagaatgattgatgttggctgatattggagtgctca

SEQ ID NO: 163648 - DNA, 100 bp, Homo sapiens
gctttatacgctgcacagcgtgaagcagccagggcagcaaagcagcgaaagctcttggagaaacctttcaacgaagtctaaaaataggaagcttccagaa

SEQ ID NO: 163649 - DNA, 100 bp, Homo sapiens
cagtgactttgttgagtgtcaaaacatcctcaaggcagcagagaccacactggctgtgcgcagacgcccctccgcagcgtccctcatgttgccttgctaa

SEQ ID NO: 163650 - DNA, 73 bp, Homo sapiens
ggcggagaagcagctcgccagccagcagcccgccagccgccgggaggttgtcttttggaaatgcaggtttaag

SEQ ID NO: 163651 - DNA, 98 bp, Homo sapiens
tcttcacccccaccattgaggcccgcacagcccagtccaacagtacaatgtagattataaactggagacttacttgaagattgctaggctatatctgg

SEQ ID NO: 163652 - DNA, 99 bp, Homo sapiens
ggcaagatgaagaagttgcggagaactttgtcggagagtttcagtcgcattggagatatacgactaaggggtcagacgggggttcgtgctgaacgccgt

SEQ ID NO: 163653 - DNA, 89 bp, Homo sapiens
gcacgacctcactagtgaacctgtcactgttcgggaagtcacctataagaaacctgatcgggaagaaattcagatgagcaatatgggat

SEQ ID NO: 163654 - DNA, 98 bp, Homo sapiens
ttccagctcacccactgccagcagagtgtaaacaggaacatcgataagtagtgtaaaaacttgcacaatgaaatccgaagccaaggatggagaggagg

SEQ ID NO: 163655 - DNA, 51 bp, Homo sapiens
gggcatgcctgtgacagctcgtgtggtgaggagacaaggattgagaatggg

SEQ ID NO: 163656 - DNA, 90 bp, Homo sapiens
tgcggttcagccctttgatgaccgcagcagaggatgtcacccccatcccctctgacagcactcgcaggaaggggggtcgccgtggtcgcc

SEQ ID NO: 163657 - DNA, 75 bp, Homo sapiens
agccttcgacgcgatgttccgccggagcttgaatcgttttgatcccaagtgatggtggtttcctcggagggcgag

SEQ ID NO: 163658 - DNA, 75 bp, Homo sapiens
atggatccattcctcccattcatgtgcctccaggttatatctcacagattgagaggatccagaatccagatctct

SEQ ID NO: 163659 - DNA, 88 bp, Homo sapiens
tttaccgcgacctccggaggccggcgtgacaggctctgtcactaaaataggtccaggtcaagacctcgtctccgttctcatagtcgta

SEQ ID NO: 163660 - DNA, 90 bp, Homo sapiens
caagaacatgctctaaagcccttcacagcaagacccaggaagccgcgggcaaactcagactcgaagggagcccagtggaggcgccctccc

SEQ ID NO: 163661 - DNA, 100 bp, Homo sapiens
attccaagtaactcttatttgtggtttgagtccagccaatgacactggagccaaaaagaagaaaaagaaacaaaaaaagaagaaagaaaaaggcagtgag

SEQ ID NO: 163662 - DNA, 100 bp, Homo sapiens
gatgtcttagagaaacttggagaagggaactgcaagcacatgttgaccagataactgaaatggcagcagtaatgaggaaagccattgaaattgacgagca

SEQ ID NO: 163663 - DNA, 100 bp, Homo sapiens
tagaggaggcttttcattatatttttaatgtgcaactagcctgtgagattcaggcatttctcattgcaattgtggtaccagatgttgagacattatgttc

SEQ ID NO: 163664 - DNA, 88 bp, Homo sapiens
gactttccttacctgtttttccagctcacccactgccagcagaggtgaccattgtgaggtagatattttgttctaattttccagatga

SEQ ID NO: 163665 - DNA, 100 bp, Homo sapiens
gtcagcttccatgtggtggtgtatgtgcgcttcccagggatcttgagagtgaagatctcgaaggatttcatagtgtttagaatctccagtggggaagagg

SEQ ID NO: 163666 - DNA, 86 bp, Homo sapiens
tccaaaccagacccctgtgtcatcctcaagatgcagtctcatgggcagtggtttgagattggccatctgcaagcttcccttctccg

SEQ ID NO: 163667 - DNA, 50 bp, Homo sapiens
gctggagctggagctctcggaggattaaagagtctattgttggggaaatc

SEQ ID NO: 163668 - DNA, 75 bp, Homo sapiens
cagagctttacggggtcccggacctactcctggacgctgagctggggcagcagtggacacagagcatgagcgtgt

SEQ ID NO: 163669 - DNA, 100 bp, Homo sapiens
tgagttcctgcatgagtatgacatgaccaagatgcccgagtgctacttctactccaagttcggtgctgggtaggccaggtttcagcatcgcagacaagaa

SEQ ID NO: 163670 - DNA, 100 bp, Homo sapiens
cggacacctaccaggtggacggcacggacgacagaagcgactttggtgagactctggagtatagcatcgtgatccagcagctctcaaatggcaaatgggt

SEQ ID NO: 163671 - DNA, 82 bp, Homo sapiens
caggagtcatcggacgccagaatctgtttccctgaaacctgggctcttgaagacgcatcactggagcagatggataatggag

SEQ ID NO: 163672 - DNA, 100 bp, Homo sapiens
tgagactccacagaggcctggaagccaatgcccctgctttcgacaggactatcctattaagtgtaatctcactgcttaatgagcccaacaccttctcccc

SEQ ID NO: 163673 - DNA, 100 bp, Homo sapiens
caaccgctccgctgcgcgcaggctgggctgcaggctctcggctgcagcgctggatgcacccacctgcccaaagcagtgccgccggacaggcaccttgcag

SEQ ID NO: 163674 - DNA, 100 bp, Homo sapiens
ctcaccgcaacattccttatccaatcccttaccgatgatccagatcctgatgatggatttaactataaacagatgatggttagagatgagcggaggttta

SEQ ID NO: 163675 - DNA, 96 bp, Homo sapiens
ccctgggggttcagattgcaaggtggcaaggagcagaagcagcccttacaagttgcaaagtcaagagaatccatcccattaaatgacctgaagtca

SEQ ID NO: 163676 - DNA, 78 bp, Homo sapiens
ctattatgcccagacaagtccccagggaatgccacagcatcctccagcacctcagtgatttgtcctataaccagctga

SEQ ID NO: 163677 - DNA, 90 bp, Homo sapiens
aatttacggagaaatggcagcacacgttggtactaggttttgacaagcttgcatcatgcgtgagtataagctagtcgttcttggctcagg

SEQ ID NO: 163678 - DNA, 100 bp, Homo sapiens
ccgcctttgagctggtcttcatagtcctggctgagcactacaagattaaagagactggtgctaacctagcaatttgtcagtggggctttgatgatgaagc

SEQ ID NO: 163679 - DNA, 100 bp, Homo sapiens
cacagaacagcgacagtacaaagaagactcttgtcacactaattgccaacaacaatgatcacaaacaacatcgacccagtgggaagaatccaaatgcgca

SEQ ID NO: 163680 - DNA, 86 bp, Homo sapiens
ctggtggtgttgtcgtggccggagcggcccgcgcctgggctgccggcacttcgcggcaggtgctggagaatctggtaaaagcacca

SEQ ID NO: 163681 - DNA, 74 bp, Homo sapiens
agctggcggagatcgaggccatccaggaaagcctgcagccctctgcccagctgcagctccagcaggtggcgctg

SEQ ID NO: 163682 - DNA, 75 bp, Homo sapiens
cagtggtacagcttcaatgatcaacatgtcagcagggcccgccaagctgccccctgtgtgctattctttgatgag

SEQ ID NO: 163683 - DNA, 100 bp, Homo sapiens
ctgctggacccggcctgggagaagcagcagcgcaagtgtgaagcctcagtttaggtcatctggtggttcagaacactcaacagagggctctgtatccttg

SEQ ID NO: 163684 - DNA, 75 bp, Homo sapiens
aaaaaactcaatcacaaaaatattgtcaaattatttgctattgaagaggagtcgaaccagtaaagctttcagcaa

SEQ ID NO: 163685 - DNA, 75 bp, Homo sapiens
gaaaggaatagacaggctacgcctggacaaatactatatgatcaaagccatcggccagacagagttgaatgcaag

SEQ ID NO: 163686 - DNA, 75 bp, Homo sapiens
ttgcattccttgtggttggtgatccatttggtttgatgccgaccgcgatgaggatgaggtgttctatgacatcag

SEQ ID NO: 163687 - DNA, 87 bp, Homo sapiens
aaaagagatgtggggggattctcgacctgctaacagaactggaccttttcgagatggaaaataatgtcctgcaagatgaggattgaa

SEQ ID NO: 163688 - DNA, 97 bp, Homo sapiens
catgaaccaggcgttgcagaggcgcttcgccaagggggtgcagtacaacagttgaaatcacaaagattagacacctttttagataggtgttcttcag

SEQ ID NO: 163689 - DNA, 76 bp, Homo sapiens
tgtcttaggaccataccatgacaagaaacctgctcctccaaagccagagcccaagcctaaaaaggcccctgcaaag

SEQ ID NO: 163690 - DNA, 76 bp, Homo sapiens
agaccatcatcagcgacatgaagataacgaaggaggcccaacttcattcaataaggagcctgacggatttatccca

SEQ ID NO: 163691 - DNA, 88 bp, Homo sapiens
gaacccgggaggcggaggttgcggtacttcaaaggctcatcaagtcccgaggaaagtctcagtccaaacacctcaatgtccaaatagc

SEQ ID NO: 163692 - DNA, 75 bp, Homo sapiens
gttaaaactgtgaaatactttaaagatttctgctaaacttggaacaaatgttgagagtgttcttcaggcaattat

SEQ ID NO: 163693 - DNA, 100 bp, Homo sapiens
gatcttctgccgcaccaggctcatcctgtccatcgtgtgcctgatgatcacgcagctggctggcttcagtggaccagtcccactctatgaccagtgggag

SEQ ID NO: 163694 - DNA, 98 bp, Homo sapiens
gaagattcaccaaataagctatatactttggttacctatgtacctgttaccactttcaaaaatgggcggaagccatttccaattaaccatggtgaaac

SEQ ID NO: 163695 - DNA, 75 bp, Homo sapiens
tttaggcaggtggctcccaaattaccggaaaggactgttcttgaggtattcagtggtcctttggcgtgctcctct

SEQ ID NO: 163696 - DNA, 100 bp, Homo sapiens
ccaagtatccgccagtcaataggaagtacgagtggccaacattgcctagacaaaactcacaactacctgctcaagttcaaaatggcccatcccaagaaga

SEQ ID NO: 163697 - DNA, 89 bp, Homo sapiens
gagtgcatgagcatgggctgtgtctctggctgcctctgccccccgggcatgaggttgacggatatattcagacgttacgacacggatca

SEQ ID NO: 163698 - DNA, 75 bp, Homo sapiens
ttcgggccccccaacacctactacgagggcggctacttcaaggtcaaaatgcagatcttcgtgaaaacccttacc

SEQ ID NO: 163699 - DNA, 100 bp, Homo sapiens
tttttcaagttgaatatgctatgaaggctgtggaaaatagtagttactggcaattcctgtggaaaaatctgttaagctatatagaagagaatcttggagt

SEQ ID NO: 163700 - DNA, 100 bp, Homo sapiens
gcaggagctggcggctgatgccttcaaggagctggatgatgacatggacgggacgcagctggaggccattgtgcgcatcgcggaagccctcagcaagatg

SEQ ID NO: 163701 - DNA, 100 bp, Homo sapiens
ccgtcaacccgctcgggaagcagctcttgccaaaaacctttggacagtccaatgtcaacattgcccagcaagtgagtgcaaattcacctgcaccagtggt

SEQ ID NO: 163702 - DNA, 65 bp, Homo sapiens
gagctcttacagcaagcccatcaggctcaggaggcagcagggacagggcagccagctcttggaca

SEQ ID NO: 163703 - DNA, 100 bp, Homo sapiens
gcgaggtcgagtaccttccctgtcccatcgcaaacccaaagatccccgttcctggagattctgattgagaacccctcatgatgaccactttggcacttcg

SEQ ID NO: 163704 - DNA, 90 bp, Homo sapiens
agtggcagaagattttaattagccactgtttcagttcgaggacatgcaggaaatcattcagaactttgtgcgggttcatgtggatgcccc

SEQ ID NO: 163705 - DNA, 75 bp, Homo sapiens
agaacaccccgagcgaggccaaccttcaggaggaggagtgaagctgtggtctaccaatctagacaactcagtggc

SEQ ID NO: 163706 - DNA, 50 bp, Homo sapiens
gagatttcattgttccagccaaacgaaaagggtcttggtcagagaggagg

SEQ ID NO: 163707 - DNA, 100 bp, Homo sapiens
gcaattgagcaggctgatctactgcaggaggcagagactccccctaatgggccagattgtggctatggctcctttcaccagcagtactggcttgacggaa

SEQ ID NO: 163708 - DNA, 75 bp, Homo sapiens
gacaccgccgccacaccgccgccacaccgccgctgcctcagtcatgccgataacgaaggaggcccaacttcattc

SEQ ID NO: 163709 - DNA, 100 bp, Homo sapiens
gcaaccaatacactgggtagaggagagcccagtataccatctaacagaattaaaacagacggtgctgatcaactctaccagcaacttgagcaaaatcgcc

SEQ ID NO: 163710 - DNA, 96 bp, Homo sapiens
tcctgactatgaccagcaggtgtttgaaaggcatgaaagatggccagaagataacattccatggtgaaggagaccaagaaccaggactggagccag

SEQ ID NO: 163711 - DNA, 98 bp, Homo sapiens
gctatgaattctgcatttcaactctagaggaaaaaattgaaagagaaaaggaattagcagaagacattatgtcaggagacgcaggtcagaatggaaat

SEQ ID NO: 163712 - DNA, 74 bp, Homo sapiens
ctcagagcgcctctgtcgctgggacccttcaggtggagaacgaccaggagcggttcctgagtgacctgcgtcgt

SEQ ID NO: 163713 - DNA, 75 bp, Homo sapiens
cgggaatcccactgttgaggttgatctcttcacctcaaaaggccaaaccagggtatcagccatctggagaatctg

SEQ ID NO: 163714 - DNA, 75 bp, Homo sapiens
atcgtgtgcctgatgatcacgcagctggctggcttcagtggaccagaaatacacagtacgcctgggagaccacag

SEQ ID NO: 163715 - DNA, 90 bp, Homo sapiens
aagggagacgtcatttgctactatgggaaccgaggggagcctgatcctatcgttttgacgccaggtggcagtagagaagagcatcacaga

SEQ ID NO: 163716 - DNA, 83 bp, Homo sapiens
ccttgaggaagcaaagagaggattgcttttgcttaaggaagctggtggcaaagaaacacagcatgatgtttggaaatataatt

SEQ ID NO: 163717 - DNA, 80 bp, Homo sapiens
cctcgcttgcagttcagcgaccacgacggcgggcgctaacaccaccgacaaggagctagaggttctctccttgcacaacg

SEQ ID NO: 163718 - DNA, 83 bp, Homo sapiens
ccggaagatcggcagcggctccttcggagacatctatctcgaactgtcccaagaaagcccaagggtagaagggagaattctca

SEQ ID NO: 163719 - DNA, 75 bp, Homo sapiens
aggaaggagccattatttatgtcatcaagaagaatgacgatggcttatgtacagaagtacgtcgtgaagaattat

SEQ ID NO: 163720 - DNA, 100 bp, Homo sapiens
atttgtgcaatgtttagccaacccaaattaccttaattgtgggcagcctcacaaaaggagaaagacctctgatgcaaatgaaactgaagatcatttggaa

SEQ ID NO: 163721 - DNA, 139 bp, Homo sapiens
ggagcttcgggggaaccagctggaaagcaccctgggaatcaatcttcctaagctgaagaacctctacctgcaggtgaaccaggatgtgagccggcagctgcttcaggatgggtatcacctggatgagattccagatgac

SEQ ID NO: 163722 - DNA, 123 bp, Homo sapiens
ttggatggaccttgcactctagaagggacaatggacttctggctttggccactttacttcctgccagacattccacttcttccatctattacatctctgagtctaaatgaaaatgaagagaag

SEQ ID NO: 163723 - DNA, 74 bp, Homo sapiens
ggaacatccggaggctgggaaatgactgaaactgttgaggagcccatggaggaagaagaagcagccaaagaaga

SEQ ID NO: 163724 - DNA, 117 bp, Homo sapiens
tatatgatgctatgatctatgtctacaacagaggcatgaatgaatttattagtccaatggaggtgtacacttaaagcgttctgggaatatgaatcccttctgcaccctggaatcacc

SEQ ID NO: 163725 - DNA, 98 bp, Homo sapiens
aggaggctgccgatgagatctgcaagaggttcatgggcgggggtggtgagagctgcagcctcatcgcggaaggactcagcacagccttgcagctgttt

SEQ ID NO: 163726 - DNA, 51 bp, Homo sapiens
cacaactccagtgctaactcaacagcacttttccagccattaactccaggc

SEQ ID NO: 163727 - DNA, 100 bp, Homo sapiens
gcttccacacaactccagtgctaactcaacaggctcagtagatgaaggcgtttctgagggcttgcctacacttcaaagcacgtctagcactaatgctcct

SEQ ID NO: 163728 - DNA, 51 bp, Homo sapiens
cggagccccggctcgcccgtgtgcagaggtggaaaaatgctaatcactgaa

SEQ ID NO: 163729 - DNA, 50 bp, Homo sapiens
cttgtgtggggagtttcatcctagcgggcacgtggactccctttaatcca

SEQ ID NO: 163730 - DNA, 102 bp, Homo sapiens
ttgaagattgtgaagcaatagcctaagacaacagtgagctgggacggagacaagctccagtgtgtgcagaagggtgagaaggaggggcgtggctggacccag

SEQ ID NO: 163731 - DNA, 74 bp, Homo sapiens
gggagtcggggtggtggcttctcggaaccgagccccgacaggctatgacgtaatttgagttctgtgaacctgca

SEQ ID NO: 163732 - DNA, 83 bp, Homo sapiens
ctatgtgggcgccgtccctcaccgcggcatcaagcagggcaacaggtttgtctatgctggctctaactcgggcgtggtccagg

SEQ ID NO: 163733 - DNA, 74 bp, Homo sapiens
ctcaatttaagcctgatctaacccctagaaacagatggcagaaacggtggacacaagcgaaatggtcaacggcg

SEQ ID NO: 163734 - DNA, 50 bp, Homo sapiens
cagaacttagcataaatgctgaagtggagcccacagtgaccatctcccca

SEQ ID NO: 163735 - DNA, 50 bp, Homo sapiens
ctggctgctcagtcctgcctcaggttatgaagacagtatggagtttccag

SEQ ID NO: 163736 - DNA, 100 bp, Homo sapiens
gtccggagctagctggatcctctaggcagggaaatcctcattgacgattcaatttgttgaaggccaatttgtggactcctacgatccaaccatagaaaac

SEQ ID NO: 163737 - DNA, 100 bp, Homo sapiens
tgatcaagaagtatctcctgacagagctgaccctgaagctgcctgatagcattgaagctgaacttacaagaagagtagacatgatggaactgtgacaaaa

SEQ ID NO: 163738 - DNA, 96 bp, Homo sapiens
gcctattggatccaaagagaggccaacattttttgaaatttttaagacacgctgcaacaaagcagaagctccaccatgaggcgaggtggatggagg

SEQ ID NO: 163739 - DNA, 90 bp, Homo sapiens
caggcctgcctgcctctcacgttcacccccgaggagtatgacaagcaggacattcacaggaggatgcattagcacaacaggcctttgaag

SEQ ID NO: 163740 - DNA, 98 bp, Homo sapiens
tgagtatgcggaggacagctctgatgaggagattattgccaagcgcctccccccagaccagctcatcagcctcttgctaaccatgtttgaggccctgg

SEQ ID NO: 163741 - DNA, 100 bp, Homo sapiens
aacttgattaccgtcgatatgcagaaacactctttgacattctggtggctggtggaatgctggttggcaacaccatcatgacatcacaacctgttcccaa

SEQ ID NO: 163742 - DNA, 75 bp, Homo sapiens
atttatcaaatactctcttggatggcaaaacaaccctttttgctgcacatgtaagtggagctgtgcttacctttg

SEQ ID NO: 163743 - DNA, 51 bp, Homo sapiens
tggctgcgtgtgcagctggagggcagagctgtaggtaaaacttgcctactg

SEQ ID NO: 163744 - DNA, 100 bp, Homo sapiens
tgcgtgtaggtgaagggggcttcctgaccgagcaagagtgagccatggagctacgtgtggggaacaagtaccgcctgggacggaagatcgggagcgggtc

SEQ ID NO: 163745 - DNA, 100 bp, Homo sapiens
gagtcctcaaagagtacaaagatgtggtggttctcttcccaaagtggaagccaaattcatcaattatgtgaagaattgcttccggatgactgaccaagag

SEQ ID NO: 163746 - DNA, 75 bp, Homo sapiens
gcctccggagtagctgggattacagcagcctgccttggcctcccaaagtgccgagattgcagcctctgcccggcc

SEQ ID NO: 163747 - DNA, 101 bp, Homo sapiens
tggccttgcgggcccggaactacgagtacctgatccgcctcttccaggagtgggaggtgggtgcgagcctggtctacgacgttcctccatcggtgagcaag

SEQ ID NO: 163748 - DNA, 100 bp, Homo sapiens
acacatagggatcggccatcacaacagcagcctcttcgaaatcagattggtgctgaagacatggacggcttccaggcagacacggaggaggaggaagagg

SEQ ID NO: 163749 - DNA, 51 bp, Homo sapiens
aatggagggcatcttcaaccacaaagacacaagatggtgaaggagacccag

SEQ ID NO: 163750 - DNA, 82 bp, Homo sapiens
acagacagctggcaagaggcagcctgggggccacagctgcttcaatataattgaccctgcaatcctgcgcccgggccgcctg

SEQ ID NO: 163751 - DNA, 75 bp, Homo sapiens
aaaagaagaccatctcaccagagcatgtcatacaaggagttattcctgatgaagctaaagctttgtctctgttgg

SEQ ID NO: 163752 - DNA, 100 bp, Homo sapiens
ttcaaactgccctgatgggcagtcaacagctaaaaccttcctcaccgtgtactatgacttccggatcttctgtggggatctgggcaatgaggtgaacgat

SEQ ID NO: 163753 - DNA, 100 bp, Homo sapiens
ataagaccacaaaaagaaggagacttcagaaaggagtgggctcgggatgagtttgaaggcctcttcaagcagccagcagaaaatgtcaaccagtacctca

SEQ ID NO: 163754 - DNA, 87 bp, Homo sapiens
cgcagctggcgcagcccacgctcatgatcgacttcctcacccgcgcctgcgacctcggcctcctcgctggggaggcagagtcctcgc

SEQ ID NO: 163755 - DNA, 88 bp, Homo sapiens
accgtcacactaacggtcattgctgaagaagggaagaggaagaacgtctgagaaataaaattcgagctgatcatgagaaggccttgga

SEQ ID NO: 163756 - DNA, 98 bp, Homo sapiens
cgacttggtggaggacgggctcactgccatggtgagcgggggcgggggagagcacatctgcctgatccgcaaggtgaacgagaactggtacgagggac

SEQ ID NO: 163757 - DNA, 100 bp, Homo sapiens
cctgtccctggctccctcattaccgtcgccagcggagcgaacccgagagcgtggagcgggctgggccagtaaagatgacggcgccttgaggtaagctaca

SEQ ID NO: 163758 - DNA, 75 bp, Homo sapiens
cgacttcgtcgtgggtcagcaagagggccccgctgaccaggtggctgcagggccattggtgccaaccccctatac

SEQ ID NO: 163759 - DNA, 90 bp, Homo sapiens
gctgtgcgacgtgaccctcaagtttccgttactatggcaatgacggcagggactacaacaacctttcctatgagcaaccatacccgggaa

SEQ ID NO: 163760 - DNA, 75 bp, Homo sapiens
tcctaaaaggattgtacaccttagaagtgcttaaggaagagtgatgaagaaactggcgatggaatatgagaggag

SEQ ID NO: 163761 - DNA, 100 bp, Homo sapiens
cagaggcgggcgcggaggcggctagaaggtgaccgcggatcccagcttcctgcagccagtgaacagagtatctgtcaggcaagagctgctgtgatggttt

SEQ ID NO: 163762 - DNA, 90 bp, Homo sapiens
ggaaggactcctggaatgccacaaatgcaaatacttgtgcactgggagagccggtttgcaagcctttttccaggtccaggagtgtaacaa

SEQ ID NO: 163763 - DNA, 123 bp, Homo sapiens
cgaaagtcggcacgacgcgctcgacacgcgggtgcggggcgacctcggtggcccgcaggaaaagttatcaaagtcttgaccagttatcagcagaagttagcctttctcagacttcactagatc

SEQ ID NO: 163764 - DNA, 75 bp, Homo sapiens
ttgagaccaacctgacgggtaccttctacatgtgcaaagcagaggcacagttgaatgctgttgatgctttgattg

SEQ ID NO: 163765 - DNA, 82 bp, Homo sapiens
tggagaggctccccgtgcacctcctcgctgtggtctttaaggacccagtacacacagagaaaattccagaagagccgccagc

SEQ ID NO: 163766 - DNA, 100 bp, Homo sapiens
tgagaacagagtgctgttttagagctggcagcagcatctcagcccaagagaagagctagagccggtgcaggccacgcagaacaagacagggaagtatgtg

SEQ ID NO: 163767 - DNA, 80 bp, Homo sapiens
gagcagtgaaccagcacgggggggccagccaagtctcgggatggtgaacgtactgtctattgcaacgtacacaagcatga

SEQ ID NO: 163768 - DNA, 101 bp, Homo sapiens
ctgcggtggcagctgctgagttctcggtgaaggttatgcctccgcctcgttgccctgaaagccgcagcgacagcgaaaagggctaagattcggccatgagc

SEQ ID NO: 163769 - DNA, 101 bp, Homo sapiens
ctcaagatggcgtgcttgttggagaccccaatccgcatgagcgtcctttcggctatttagcagacatgacccacaagcagaagaagcattagcaaagagga

SEQ ID NO: 163770 - DNA, 160 bp, Homo sapiens
ccgaactggagaagtaggtgcagttggtccccctggcttcgctggtgagaagggtccctctggagaggctggtactgctgagtcttttagtcctgctatacagctgcaccttgtacatcaagctccatgtaatgttcctccttacctctcaaagaatgaa

SEQ ID NO: 163771 - DNA, 101 bp, Homo sapiens
tcccaactccaccgtctccaacaccagcaccgagggcttcgggggcatcatgtcttttgccatgctctgccctacctaaccttgccctttggagcagcctc

SEQ ID NO: 163772 - DNA, 100 bp, Homo sapiens
ttctctccaacgaccagaatattctacccaaatgtcaggaccaagattttctaccaaaatatcagctgcagaaccttggcctgaaaatgctacattatat

SEQ ID NO: 163773 - DNA, 80 bp, Homo sapiens
ggaaacatgagcattcagtttcttggtacagtggaattggcagcaatgaaacagattctcgttaagatgcatagtaaaca

SEQ ID NO: 163774 - DNA, 75 bp, Homo sapiens
taatggccagtttaaaacttatgctatctgcggggccattcgtaggatggctatggagttactagtagagaaagc

SEQ ID NO: 163775 - DNA, 87 bp, Homo sapiens
ggagatgcagtggataatagtaattgggcatttgacactcttgcaaaagcattgaatcctggagagagcacagcctgccagagctca

SEQ ID NO: 163776 - DNA, 109 bp, Homo sapiens
ctaagctgtgctctgattcacgtttagaagctgaccagacaaagagagaacaccttccaccatgaccacctcagcaagttcccacttaaataaaggcatcaagcaggtg

SEQ ID NO: 163777 - DNA, 82 bp, Homo sapiens
gtagcctggcccggtgggcactgtgatctcagacttccagccttcagaactgtggccccagcagatggcttctctgatcttg

SEQ ID NO: 163778 - DNA, 83 bp, Homo sapiens
cggaaatgtgtcatcgaaagccagaatcttggacttgttaataccacttactaaccgggcctgtgacactgggctaaacaaag

SEQ ID NO: 163779 - DNA, 74 bp, Homo sapiens
tgggagatccacagccaagagccaggaccccctagaagtctagaaatggagctggtgtccgatgccaaccaaca

SEQ ID NO: 163780 - DNA, 100 bp, Homo sapiens
tacagccaggctcagtgaagaaggtcaacgagtcctcactgaactggcctcagggtcgtctactcaatttgagctgctccacagttcccacctttgttct

SEQ ID NO: 163781 - DNA, 90 bp, Homo sapiens
aaatagggaagatggagacaccctctgggggtcctctctgagtcaaatccagtgaacgtgctggccaaagcgctctatgacaatgtggcc

SEQ ID NO: 163782 - DNA, 75 bp, Homo sapiens
ccgaggagtctggtctggcgagtacagcttcgagaaggaggcctactgcgcgtatgccatcatcctcatggcgct

SEQ ID NO: 163783 - DNA, 75 bp, Homo sapiens
gaaaagcgaggcaaggcaggcggtgttcctctgaacaacagggagaatatctctgatcccacctcaccattgaga

SEQ ID NO: 163784 - DNA, 77 bp, Homo sapiens
gctgccccatgtgccagaaggagttcgcccccagacaaatttacatgtattggagaccagaccagaagcccttctga

SEQ ID NO: 163785 - DNA, 96 bp, Homo sapiens
ttacgtctgcggaagtgcagctgcctcagttcttagcgcagagaatgtaactggtcactacatttccccctttcatgatattcctctgaaggtgaa

SEQ ID NO: 163786 - DNA, 96 bp, Homo sapiens
tccacttcagaaggtctgcttggtgacttggatacagaaatttcctgggctaaacacaacattctgaaattttttggttattgtaatgatgttgat

SEQ ID NO: 163787 - DNA, 98 bp, Homo sapiens
ttgggatggcagagtttttggataagcatgtgacctctgaacaggagtgggacaagatccacatctcaaagaagtggggcttcaccaagttcaatgct

SEQ ID NO: 163788 - DNA, 76 bp, Homo sapiens
tatgtccctcacactgtgtacagtttcaccagtgatcattaaagaatgggcagcttacaaaggaaagtctcctcaa

SEQ ID NO: 163789 - DNA, 50 bp, Homo sapiens
ctttcctctcctgtgtcttcgtatcagaacatcgggtcagaagttgagat

SEQ ID NO: 163790 - DNA, 87 bp, Homo sapiens
tgaacaaacagcagagacgaagtgacctcgatcgcttttggctagagacaggtcttactacatattgcaacagaagataatattgga

SEQ ID NO: 163791 - DNA, 82 bp, Homo sapiens
tccacccaccgccgccgcctcccagatgcctcttccacctgattaagaaccactgtagcagacgcagacttattggacacta

SEQ ID NO: 163792 - DNA, 73 bp, Homo sapiens
accagtcagatccatctgaagatgaggatgaaagaagttctcagaaggattttatcctggaacattacagtga

SEQ ID NO: 163793 - DNA, 100 bp, Homo sapiens
cggaaacgcagacactgaactttgggcctgaatgtcagaactaagacatggtccgttttactatatgaagcagccactcaccacagaccctgttgatgtt

SEQ ID NO: 163794 - DNA, 98 bp, Homo sapiens
aagagaagtcacaaaacagcagatttcccaagagcagcggaaaatgatccagtcacaggaaggatttgatgccctggatccctttattcccatcctgg

SEQ ID NO: 163795 - DNA, 74 bp, Homo sapiens
aaggtggtctaccggcgcttcaccgagatctacgagttccatcaaatcgcagtcttctccaggctgacaaggcg

SEQ ID NO: 163796 - DNA, 51 bp, Homo sapiens
ttcctaggcagaatgcttggaaagattttaacattatggcagggaggcatc

SEQ ID NO: 163797 - DNA, 84 bp, Homo sapiens
cgcgcgggcgcgcaggccgcggggagcacctggcttcttccagaccagctggtcttgcttctggagcatctcttggagcagaag

SEQ ID NO: 163798 - DNA, 74 bp, Homo sapiens
gggaatgaagcgatgtagccttttaaagagaagaagaaggaggttcctgctgtgccagaaacccttaagaaaaa

SEQ ID NO: 163799 - DNA, 100 bp, Homo sapiens
agactgatgatgatgaaataacatggggaaatgatgagttgccaatagagagaacaaaccatgaagattctgataaaggaaccttgggatattgcattgc

SEQ ID NO: 163800 - DNA, 100 bp, Homo sapiens
cctgtattgagtttctctttgagatgattggactgctctatccagcatcattgagatctggaaagcatgaagactgggctttttttcctatgtctcttgg

SEQ ID NO: 163801 - DNA, 75 bp, Homo sapiens
cccggctcccgcaccatggaggaggacgacagctacggttctccacatacgattctacttgtcaaattgcccaag

SEQ ID NO: 163802 - DNA, 101 bp, Homo sapiens
atgcactggggcacagactccaggcatcagtgtttttctgaccgaagttctcatttcctgacaatggaaatggaacaagaaaaaatgaccatgaataagga

SEQ ID NO: 163803 - DNA, 74 bp, Homo sapiens
cccgggacctgggctgggaacccgcggtggagcgggacacgaacgtgatattatgcctggtgatcctgatctgc

SEQ ID NO: 163804 - DNA, 75 bp, Homo sapiens
aactttctcccttgatccgggagtctttccactggctcatgttttttggctagacctatgaccattttcgctaga

SEQ ID NO: 163805 - DNA, 82 bp, Homo sapiens
tggagagcttcatcaaaaatagtgatagctttgataatacctggagtagaacagaaaaattattatgtctgtgttcccttgg

SEQ ID NO: 163806 - DNA, 100 bp, Homo sapiens
gaatccactgctccgaaaggagagtgcgccccccagcctccggcggcggcccgcagagaccctcggagggcccttatattctcaagaccgaatccttcaa

SEQ ID NO: 163807 - DNA, 89 bp, Homo sapiens
agatgtggcctccagagggctaggggcgagaggtcaatgatcttaaaagaaaatctccttcagatctttggaaagaggatttagcggca

SEQ ID NO: 163808 - DNA, 87 bp, Homo sapiens
gaggagcgggcgagaagctgccgccgaacgacaggacgttggggcggcctggctccctcaggtggtgtttcataagatgtcacccaa

SEQ ID NO: 163809 - DNA, 100 bp, Homo sapiens
tccacgggaaggagcacgtacagaagtacctgctgacactcatgaacattggaaacagtgcttcttagtcctacgtcagcagcagtttaatgtccaggct

SEQ ID NO: 163810 - DNA, 100 bp, Homo sapiens
aaaagaggcgaaaggaagcaagcagttcagaagagccaaggaataaacatgcaatgaacccaaaagggttatcagtgagctgaatggaaaaaacattgaa

SEQ ID NO: 163811 - DNA, 90 bp, Homo sapiens
aagcgcgagaccaggacggcgcgggaactctacgccaacgtggtgctgggggccctgttggaggaagccagaaagcgaagactgctggag

SEQ ID NO: 163812 - DNA, 98 bp, Homo sapiens
cagctccgccgtgcagcacgtcaacctgctgaaggagtggagcaactcgctcgaaaagaaggtctcaagattctgccctccaagaaagtcttgccatg

SEQ ID NO: 163813 - DNA, 95 bp, Homo sapiens
gagcaaggcatcaacgagtttctcagcttccatgaggcaggctgaacctgcagatatgcgcccagagatatggatcgcccaagagttgcggcgta

SEQ ID NO: 163814 - DNA, 100 bp, Homo sapiens
aagttcaatttctgaagaagtggctgtagggagcatagctgctacactgaagatgaagcaaggcccaatgacccaggcgcaggactctggactgtcttca

SEQ ID NO: 163815 - DNA, 100 bp, Homo sapiens
agaatgaaaccggcttgttgtcttcaattaaaaaatttattaaaggaagcacacctaaggaagatgttaccgagtacttcagtgaattccttagtgcagg

SEQ ID NO: 163816 - DNA, 100 bp, Homo sapiens
ttgacaatgtcagcagcaccgagctttacagtgtggatcaggaactgctcaaagactacatcaagcgccagatcaaaccagtccagctacgggggcccag

SEQ ID NO: 163817 - DNA, 96 bp, Homo sapiens
cagattcgcagtggtcgcttcttctccttgataagaccatcatcatgtggaaactgaccagggatgagaccaactatggaattccacagcgtgctc

SEQ ID NO: 163818 - DNA, 90 bp, Homo sapiens
cacttccctcggtctgggcttctctgaggcggcgagagatggtcaggtctggagctcgaccgggccaggccagccagctgggtgtgtacc

SEQ ID NO: 163819 - DNA, 100 bp, Homo sapiens
ctcggggggaccccctcacatcacctcctcagccccagagctccggcagcgcctaacacatgttgacagattgagtgccatctatggggggacatatatg

SEQ ID NO: 163820 - DNA, 100 bp, Homo sapiens
ggaagatgaacaacggcggcaaagccgagaaggagaacaccccgagcgaggccaaccttcaggaggaggaggcagttgtgaaaaacttcaggacaaaaat

SEQ ID NO: 163821 - DNA, 97 bp, Homo sapiens
gctttccgggagactggagtcgaaggccgtgagctcctgagaaccatgtctatgcccaaaggtagagttctggataaaaacctggatgaggaagggt

SEQ ID NO: 163822 - DNA, 100 bp, Homo sapiens
ggcatctgcttcagcaccgcctctctggtgctaagggccacggatgtccatcccctccaggcacattcaggaccccgcgagccagcggctgacgtggaac

SEQ ID NO: 163823 - DNA, 74 bp, Homo sapiens
ccagctgccgcgactgggaggagcgccggaacgccgaggcccaggatgcctaaatcaaaggaacttgtttcttc

SEQ ID NO: 163824 - DNA, 100 bp, Homo sapiens
aacatggtgcaaagataccagtctcctgtccgagtctacaagtacccgtttgagctggtcatggcgggggccgaaggccagagaccaggatttggctacg

SEQ ID NO: 163825 - DNA, 90 bp, Homo sapiens
ctaggggtgtacttgttggggtcaggaggactaccccaatggcacctggctgggcgacgagaacaaccccgagatgcgggtacgctgcgc

SEQ ID NO: 163826 - DNA, 118 bp, Homo sapiens
ctgaccttccagaacgtggtcttcaatgtcatttatcagagcgcggcggtcttcaagctctcagttgactgcattcagccagtgccaaaagaggagcccagtcccgctaccaaattcc

SEQ ID NO: 163827 - DNA, 101 bp, Homo sapiens
gccttcaccagctatggcattagcccacaggccaagatctgtacccccgatttggtggtattcctggcttgtgctaatcagagactcaaagaaagattact

SEQ ID NO: 163828 - DNA, 101 bp, Homo sapiens
ggtcagtgtcctcaccatgcccttctgcttcaaacaggcttgcttccggcgtcatggctcaaagggccttcccgaatccttatgctgattataacaaatcc

SEQ ID NO: 163829 - DNA, 75 bp, Homo sapiens
cttctccactttcgccagcccgtgccgcgagcgcggcctgcaggagtgtcaggggaagctgatggagaatcgagc

SEQ ID NO: 163830 - DNA, 100 bp, Homo sapiens
aaaagatccctggaatatgaagagacacagtatggtagccacacccccagggtggttctcttcccaaagtggaagccaaattcatcaattatgtgaagaa

SEQ ID NO: 163831 - DNA, 100 bp, Homo sapiens
aagagcctgattgaaccagtcaaccagtctattgttgtcagtggagagagtggtgctggaaagggtgtccgcaatgttgccagtgtctgtctgcagattg

SEQ ID NO: 163832 - DNA, 100 bp, Homo sapiens
tgccaccgcgtggtgcttgccgcagccagcaactatttcagtatatttaaagttggagttcgttgctaaagatggcagacccagatgtcctcactgaagt

SEQ ID NO: 163833 - DNA, 136 bp, Homo sapiens
ggacatttgcaaaagcacatcatgtgacgacacccctgatggggcaggaggggcctttgcagctcagatctcaggaaattttctgatggaatttcaagtgaaaaatgttccttcagaaagaattgcaactcagaag

SEQ ID NO: 163834 - DNA, 87 bp, Homo sapiens
atccttcctgtaccgcttatgccaggccgatcccgacctggactcagacaaggtattacatttatgcactgtctgctgccaaagatc

SEQ ID NO: 163835 - DNA, 74 bp, Homo sapiens
gggagaagcatcatggttcaacgtgagaagccctaccactgcaactgggacggctgcggctggaagtttgcgcg

SEQ ID NO: 163836 - DNA, 100 bp, Homo sapiens
aactgtgaagagaggagttgagaacatctctgttgacattcattgtgcctgaagcaggacattctaaatgaaaagactgaattggaagcaacacttaagg

SEQ ID NO: 163837 - DNA, 74 bp, Homo sapiens
gtataacctgaaaacgctcctgtttttctcatctgtgcagtggcatgttggcagataaattgaacatgactcca

SEQ ID NO: 163838 - DNA, 83 bp, Homo sapiens
ggagggcgagcgaggaggatggcggagtcggggctcctgacgattctgcttctcagaagatgcactattatagatactctaac

SEQ ID NO: 163839 - DNA, 76 bp, Homo sapiens
agaacctcctaagagtcacccaaacaatcggctgagaatgagaagagcaatggctgccatccggaagaaactggtg

SEQ ID NO: 163840 - DNA, 76 bp, Homo sapiens
gtaagattgtcttggaaatactaagttgggagtctgatgatgaagaaaattttattgatgcaaatgatgatgaaga

SEQ ID NO: 163841 - DNA, 83 bp, Homo sapiens
gtatttcttcgtgctgggaatcctggccctgtcccacaccatcagttggactaaatgctcttccttcagaggattatccgggg

SEQ ID NO: 163842 - DNA, 75 bp, Homo sapiens
acaagaacggcggtacccgggtggttaaacttcgcaaaatggtgctgtttcctctacttaccaagctcttggaga

SEQ ID NO: 163843 - DNA, 101 bp, Homo sapiens
tccaacacaccatttcttcctaaaatcttcatcaaacccaatgctcagaaacctctccctcaaggaacgtcaaggtcgtgggaaataaaaggcagttctac

SEQ ID NO: 163844 - DNA, 100 bp, Homo sapiens
gcggaaaatgaaacgtgggtggtggacagctgcaccacgtgtacctgcaagcatctattgctggcaccatctgacgtggcaggctgggggatttttatca

SEQ ID NO: 163845 - DNA, 50 bp, Homo sapiens
cttatgctgatatacatccaatgagggtccagctcttctatgaactaact

SEQ ID NO: 163846 - DNA, 83 bp, Homo sapiens
gcagtcccagagtcagacccttggtctccaagcaatgcagccccagcagcccttgtgcatctgggggaggtgttgtagccatt

SEQ ID NO: 163847 - DNA, 75 bp, Homo sapiens
aatgctctgcatcatgctgcactaaggggaaatcccagtgtggaaaagccactggcagtgattcaagtggtgtca

SEQ ID NO: 163848 - DNA, 83 bp, Homo sapiens
ctcttgacaaccaagggcctccgtctggatttccaaggaagaatttcctctgaagcaccgcggggatctgacgagcttttctc

SEQ ID NO: 163849 - DNA, 100 bp, Homo sapiens
cttgattgaggagaaagtgacaggtccaacagcaacagtatatgggaccaaagaaggaggtgctgtaaaattgtgggaccaggagatgaagcgctgccgg

SEQ ID NO: 163850 - DNA, 75 bp, Homo sapiens
gcccatgcccagggtcagatactatgcagggggcacgtgactcaggatgcacccatcccaggctcccctctgtac

SEQ ID NO: 163851 - DNA, 75 bp, Homo sapiens
atataatccattctcggattctagaacatgggcaagttacggaagcaatggctaaaggaaagtatctctgatgtc

SEQ ID NO: 163852 - DNA, 88 bp, Homo sapiens
ttctggcatcagggaggctttcagccggagaagcgagtttcagctggttctcaggaatcagatagctcgcagtcggccaagaaggaca

SEQ ID NO: 163853 - DNA, 100 bp, Homo sapiens
ccaggaaggaggaggaataatatttatggagcatatattatggaacacagtatcagtttttggaagaagcttttcaaaatcagaagggtgcaattgagaa

SEQ ID NO: 163854 - DNA, 100 bp, Homo sapiens
cctcgtcatcctctgatgacagttgtgacagctttgcttctgataattttgcaaacacggcatcctctggtatcacgattccaaaacccccaaagccacc

SEQ ID NO: 163855 - DNA, 101 bp, Homo sapiens
cgaggtgcccgaggtgcgcgccctcatcgagtggatccgcaggaacaacatcagcgagagctttctaactgtcaaaggtgctgccctttttctaccacggg

SEQ ID NO: 163856 - DNA, 100 bp, Homo sapiens
cccctcccctcgcctcctctcctaggtgccggccgggagggcggccgcagcagtaattcgccaaaatgacgaacacaaagggaaagaggagaggcacccg

SEQ ID NO: 163857 - DNA, 90 bp, Homo sapiens
gtgggctctcccccgagcgggagcacgcccccccagggcccccgcaccaggatgttctcaggaccccaatgaggatgagccaaacatccg

SEQ ID NO: 163858 - DNA, 50 bp, Homo sapiens
gagctcgctaggcgccctaagcaacagagctgcacagttggggatcttca

SEQ ID NO: 163859 - DNA, 90 bp, Homo sapiens
cgggcgtttactcttagcagaagctcacctttttcggctttgtgagaaaccttaccatcaaacacgatggccagcaacgttaccaacaag

SEQ ID NO: 163860 - DNA, 75 bp, Homo sapiens
gctcccgggggttccgttatcttttcgctcggcgaggcgttcagaggtgaaaggtgtagcagtcactcggcctac

SEQ ID NO: 163861 - DNA, 101 bp, Homo sapiens
ccctccacacatgagcctgctccctactgccaacaccgtggcccagacagagacgctttccgaggaagaggatggagatgaagatgaggaagctgagtcag

SEQ ID NO: 163862 - DNA, 98 bp, Homo sapiens
agagactggatttggatgctgcaaaaacgagactaaaaaaggcaaaagctgcagaaactagaaattcagatcaactgcctgtagtcaccagtaaagtg

SEQ ID NO: 163863 - DNA, 50 bp, Homo sapiens
gttcaagcaattcaacaagttaactgagtgcctccggagccagcgtggtg

SEQ ID NO: 163864 - DNA, 88 bp, Homo sapiens
gcagacgacgacagaaccctgtacaatttgatagtcattcgtaatcagcaggccaaagactcagagacttgtgtatgcggatacctgc

SEQ ID NO: 163865 - DNA, 83 bp, Homo sapiens
gcctcaccatgttggtgctgtttgaaacgtctgtgggttacgccatctttaaggtgatctttacggagccataggctctccag

SEQ ID NO: 163866 - DNA, 82 bp, Homo sapiens
ccgagcccactcgagccgcagccatgtctggggacgagatggatcctgagcttgaaaaaaaactgaaagagaataaaatatc

SEQ ID NO: 163867 - DNA, 101 bp, Homo sapiens
cagccggcagcccaccgccgccttcttggcgcgaccccaacccagccccagcataatcaccagcaacacccgggacaataatacgggggccacctaccccc

SEQ ID NO: 163868 - DNA, 98 bp, Homo sapiens
tctgtgaaatgaccaaagaaattgctgacaaaacagaaaagtataataaatgtaaacaactcttgcaggattttgtgaaaatggaaaattatgaggca

SEQ ID NO: 163869 - DNA, 82 bp, Homo sapiens
ctcggcgatggtaggcgtccctggagcggccgccttccagcgtggcacaagaatggctcaactctccaaatagagagaattt

SEQ ID NO: 163870 - DNA, 90 bp, Homo sapiens
gggaaggaaatcatgtcaagcgaagccttgaaaaagctgccctgagacggtgtcccgccgaaagagaccagcatgctgatgatgtcaaag

SEQ ID NO: 163871 - DNA, 100 bp, Homo sapiens
acgggcctcagctgggattcccgcgcccctcggacggccacgagactcggaatgagtccctggaacgccagatgcgtgaaatggaagagaactttgccgt

SEQ ID NO: 163872 - DNA, 100 bp, Homo sapiens
ggaagataaatgaaggggtctagatgtaaatgtcagtggaaaggagagctaccatcactaagaccagcatctcagacatgtcgaaaaagatgttttgatc

SEQ ID NO: 163873 - DNA, 89 bp, Homo sapiens
aggtccaccacctgctccatttgcaagtcgttccaggggtagaggaggcatgaaggatgaccgtcgggacagatactctgcgggcaaaa

SEQ ID NO: 163874 - DNA, 97 bp, Homo sapiens
gaaactttatgtgcctgtaaaagaatacccagatgaaaatcctgccttgcttcgttgggcctatgcaagaacaataaatgtctatcctaatttcaga

SEQ ID NO: 163875 - DNA, 83 bp, Homo sapiens
atcctacagccaagctccaagtcaatatagccaacagagcagcagctacgggcagcagatctgaccagtgcacaggacttcag

SEQ ID NO: 163876 - DNA, 87 bp, Homo sapiens
gctgcctttgttgctgctgcacattaggttgcagtatgtggccagttatttgcctcagtaaaagaaatcgagagctccagatcatga

SEQ ID NO: 163877 - DNA, 100 bp, Homo sapiens
cggggcgctgggccgccagcctcggcaccgtcctttcctttctccctcgcgttaggctggacggcagtctggaaacgaccaatgagatcttggactctgc

SEQ ID NO: 163878 - DNA, 82 bp, Homo sapiens
ggagaggccggacggcgcgggcgccggcgaggagagcccgcggctgcagctggtcagtgagaaggtcggaggggccgagggg

SEQ ID NO: 163879 - DNA, 100 bp, Homo sapiens
aagttcctcatctgggacactgctggtcaggaacggagtaaagacaagattgcatcctacagcaaaactccaaaaattgaacgaagtgatgtgagcaagg

SEQ ID NO: 163880 - DNA, 50 bp, Homo sapiens
cggaggaccggagcggcctgtccgagtaacagtaacgagtagccagagta

SEQ ID NO: 163881 - DNA, 99 bp, Homo sapiens
tcgaagaacagctgtggaaagaagttgcaaaacactggggaacgtgctcagtcactttcaatgggcaccaggagaaaggttttggttcttggatctggc

SEQ ID NO: 163882 - DNA, 82 bp, Homo sapiens
ggcggcggcgctttcggcgcgggcccgggccccgagcgcccgaacagaccctgctggacatggtagaaaattaccccacagc

SEQ ID NO: 163883 - DNA, 82 bp, Homo sapiens
ccacttatgtttgtaaatgtgagtggaagccatgaggccaaaggcagttgtattggaaccctaaggactctgcaatatgaat

SEQ ID NO: 163884 - DNA, 100 bp, Homo sapiens
acccaagagataactacaatcaccccaacaagagacacttcagtaatgcagatcttcgtgaagactctgactggtaagaccatcaccctcgaggttgagc

SEQ ID NO: 163885 - DNA, 50 bp, Homo sapiens
agaggaagaggaaagcgaactggtatataatgtttacatggcagggaggc

SEQ ID NO: 163886 - DNA, 106 bp, Homo sapiens
cagcactgactttcagctatggaatcgagacaagaggagcagcagcggcaccgcccctcaccctggagggtcctgtacaatctcatcatgggactcctgcccttac

SEQ ID NO: 163887 - DNA, 100 bp, Homo sapiens
cacaagaagcggaagtatgagttggggcgcccagctgccaacaccaaggggcaagattcttgccaagagaattaatgtgcgtattgagcacattaagcac

SEQ ID NO: 163888 - DNA, 96 bp, Homo sapiens
gtcaagctggcacctgagaggattgccgatggcaccatggaagagctaaggagcaaatccaagatctgtgccaatgtgttttgtggagccggccgg

SEQ ID NO: 163889 - DNA, 75 bp, Homo sapiens
ggaggcgctcatggaggtgtctgtgtctggatgggagtcccagcttctggagacggggttcctggggatcttcct

SEQ ID NO: 163890 - DNA, 90 bp, Homo sapiens
gagcgagctgagtggttgtgtggtcgcgtctcggaaaccggtagcgcttgcagcatgaatctgatattgatgctgctgctgcaatgatgc

SEQ ID NO: 163891 - DNA, 122 bp, Homo sapiens
aggacacgcgaatttgaagatagagacaggtctcatcgggaggaaatggagctcgggtcccttctgcgctgccgcagggaggccgcccgggccaggcgagccgaaccaatgctggacctgga

SEQ ID NO: 163892 - DNA, 51 bp, Homo sapiens
ggatggaacacttcagtgcattcaagaacagctttgctgagccatcaaggt

SEQ ID NO: 163893 - DNA, 128 bp, Homo sapiens
ggcagtgccgcttcggccgaaggcccgagcgcccgaggcgtctgggatggtgtgggaccggctgatcttgcatctttaatggataaaacatttgagagaaagttgcctgttagttctttaacaatatc

SEQ ID NO: 163894 - DNA, 100 bp, Homo sapiens
ctggaacagcagcatcattgtcaaaggtacctgggccagctggacgacagtgagtttgagagagccctgcagaagctgcagctgaccaggagcatctgga

SEQ ID NO: 163895 - DNA, 75 bp, Homo sapiens
atttgaggtggtgaaactggggaaaagtgcaatgcaggttgctccttgagggcaggacagttcttatggctttat

SEQ ID NO: 163896 - DNA, 100 bp, Homo sapiens
aaagaatacattcctgattacctgccacccattgtgtcttctcaagaaggagaacctccatttctaccagaatcctttgaccgaattcttctggatgcac

SEQ ID NO: 163897 - DNA, 87 bp, Homo sapiens
ggttttacattggttcttcattgaatggtactcggggaaaaagagtatcaccttttgccatgatagcatttctttcattggacagtt

SEQ ID NO: 163898 - DNA, 100 bp, Homo sapiens
tcctacacagaaacccattatacttcaagtggtaaccctcaaaccaccacacggaaattggagaagctccaccatgaggcgaggtggatggaggaagcga

SEQ ID NO: 163899 - DNA, 83 bp, Homo sapiens
cccgtcagcatcccagccgtgctcacgaaattccgggtagatatgcctggctcaggcagtgcattcatccccaccatcaacgc

SEQ ID NO: 163900 - DNA, 101 bp, Homo sapiens
cggggacggagagaacacgagcccatcaggtacaccaggggttggaaaaaccacactaggcaaagaacttgcgtcaaaatcaggactgaaatacattaatg

SEQ ID NO: 163901 - DNA, 75 bp, Homo sapiens
gttcgtcatggggctgtttggaaagacccaggagaagccgcccaaagaactgaacaagttgaaatcatcgcagaa

SEQ ID NO: 163902 - DNA, 123 bp, Homo sapiens
ccaccatctccatcacccaccaacaacaccacaataatccacagccaaggtagacgaagttcctgatggagctgtaaagccacccacaaacaaactacccattttcttttttggaactcatga

SEQ ID NO: 163903 - DNA, 100 bp, Homo sapiens
ctatgggggaggagattggtgcagagatggcattacgaacctttggccacttgatgcaagtgctgctggaccaggcgggctgctgtatcgtgggtcagag

SEQ ID NO: 163904 - DNA, 75 bp, Homo sapiens
gcctaggcattttgctgtctcctcctaatacgtgattttggtcagttggccgttgaattattagaacagtccttc

SEQ ID NO: 163905 - DNA, 82 bp, Homo sapiens
gaagccttgaaaaagctgccctgagacggtgtcccgccgaaaggaaatctaccactgtcgaagacaaataaaatatagcaaa

SEQ ID NO: 163906 - DNA, 75 bp, Homo sapiens
ccacagcatggccttccgagtgcatgtcagatttcatttcagtgtaaaggtaaatggaatcctctccacagagat

SEQ ID NO: 163907 - DNA, 82 bp, Homo sapiens
ccgggtgtccggccgtgtcccgaggaagtgcaagacccggtgacagagttagtccttgataattgcctgtgtgtcaatgggg

SEQ ID NO: 163908 - DNA, 74 bp, Homo sapiens
ccatgaagacattctgtggcactccagaatatctggcaccagagattcccagaagttgtgcatgagttcctgtg

SEQ ID NO: 163909 - DNA, 100 bp, Homo sapiens
ccgacgtgcggacggcttgtgagaagctcatccagaaagaagatgctgatatgctacaacacggatgaacctggaggacgtggtgcagtgaaataagctg

SEQ ID NO: 163910 - DNA, 87 bp, Homo sapiens
tgaaacaaggtgatctggggaaccaaagactctgggactcttggtgccaacagagttactcttgatttaaagggagtgatagtcact

SEQ ID NO: 163911 - DNA, 100 bp, Homo sapiens
agcctggaacatcacatctgtacgttgcaatctgtggatcagctacgagctatccagtcagttcgctgctattcccatgggtcacaggagacagatgagg

SEQ ID NO: 163912 - DNA, 100 bp, Homo sapiens
tgggcacggaccaattcgggaacaaatactactacatcccgcagtacaagaactggagaggtgacttaagagattaaaattaatttggttgctgttggtt

SEQ ID NO: 163913 - DNA, 90 bp, Homo sapiens
cccctactgcacagcagaagctctgaatcgtgttcctgaatgaaagaagtcaggtctattattagcagaagatttttctgcatagttggc

SEQ ID NO: 163914 - DNA, 100 bp, Homo sapiens
ctgggataaaagtgaaagtggtgattggcattgtactgctagctggaaggaaacatccatgtctgattagcatgaaggttatgaggagaacgtgatcaca

SEQ ID NO: 163915 - DNA, 120 bp, Homo sapiens
aaaaaggaggaaaaaaatgtactggggaacaagacaagatcaatcagactctgccactcttctgcttagctgctgctggtggtgacaatgtcaaataacggcctagacattcaagacaaa

SEQ ID NO: 163916 - DNA, 98 bp, Homo sapiens
tgatgtctttcttgattccacacaaagacaaaatgtggtaaaacccattgataatccaccgcatcctggatcaactgattttaaacaagctgcactga

SEQ ID NO: 163917 - DNA, 100 bp, Homo sapiens
agagagaccagacctgcaagctctttgacacacagcagttcttgtcagatgacagtcgtctagaggagctcaaagccactctgcccagcccagacaagct

SEQ ID NO: 163918 - DNA, 88 bp, Homo sapiens
agcggcttatcgaacagagccgggagttcaagaagaacactccagagagccaacacgaggagctaaagaaacagcacagtgacttgga

SEQ ID NO: 163919 - DNA, 100 bp, Homo sapiens
ggacctgatcctgctgctgctccatatagtactcagaaatcatctgttctacctctttatgaagaaatgatccgactagatgaagtccccaatctgagtt

SEQ ID NO: 163920 - DNA, 100 bp, Homo sapiens
acttgcatcaagctgggcatccagggctcgtacttctgctcgcagggggcagcactgaaatacttaccaacgatcgtcaacgatgtgaaattggtgtttg

SEQ ID NO: 163921 - DNA, 50 bp, Homo sapiens
gataagtttaggccagacatggagctgactgcctgcatccacgggtctgc

SEQ ID NO: 163922 - DNA, 100 bp, Homo sapiens
ctcggagtccttggggacggagcagcgcgtcgtggggcgagcggcagggactggtgattgcagctggaagtgcccatgaccgagctggcgtcctccgggg

SEQ ID NO: 163923 - DNA, 100 bp, Homo sapiens
ggcgagcggctgtgtggatgtcggcgaagccgcgggcgaggtattgttgcagcatctggcagtgagactgaggatgaggacagcatggacattcccttgg

SEQ ID NO: 163924 - DNA, 91 bp, Homo sapiens
taaaatgaaagaaaccgctgaggcttatttgggaaagaagcaaggtgtccctgccttcactgtgctccaacctgaaggtcccctggcagtg

SEQ ID NO: 163925 - DNA, 100 bp, Homo sapiens
cggcgtctggctgctgcggaccccgccgagtcctagcgcctggcctgcgcgccgctgcccgcgccacagattcagaccaggatgtagcactcaaacttgc

SEQ ID NO: 163926 - DNA, 95 bp, Homo sapiens
ggtaccagaggtttgaaaaggcatttctcctagctgttgacgttggtgctcgtgacctctttatggcagtcatggccaaccaaaattgatgtacc

SEQ ID NO: 163927 - DNA, 74 bp, Homo sapiens
acgtcccaccgggcaggatgaaggcagagcgtgtggcatctccacctcaagggggacggcaaaacagaacagaa

SEQ ID NO: 163928 - DNA, 96 bp, Homo sapiens
acagacgtgaatctgaagaatggaagtggcaaggacaggacttggaccctctgtggaacacccgagtacctagcccccgaagtcattcagagcaag

SEQ ID NO: 163929 - DNA, 100 bp, Homo sapiens
actatgccccttattgtatctggggcagatgatcgtcaagtgaagatctggcgcatgaatggtgggaaagcagtgccactctccgcttcacagatgcccc

SEQ ID NO: 163930 - DNA, 97 bp, Homo sapiens
gtcttcagctgggagagctgtcttcagttggatactgggaactactataatgtctccagggatcctgtggtcatcaacaaagtcttcaaggactgga

SEQ ID NO: 163931 - DNA, 83 bp, Homo sapiens
atggtggaagggaaacacacttggagacaaacttcactttaaaatctgaatggtgccgtgagcgatgtggagatgcaggaaca

SEQ ID NO: 163932 - DNA, 100 bp, Homo sapiens
agagtcattgcaggaagtggatgagttccacctcattttagagtatcaagcagttccgaaagacccgaaaccccagtggagacgggtagcatggagttac

SEQ ID NO: 163933 - DNA, 51 bp, Homo sapiens
ctaagactgaagagaatggcgaggcagtttatcatgcaatctacttggaag

SEQ ID NO: 163934 - DNA, 100 bp, Homo sapiens
gtgggctcctactcagtgtgcaagcgatgtgtgcataaagccacagacaccgagtatgccgtgaaggcagaaaatataactgtgacaaaggattttagga

SEQ ID NO: 163935 - DNA, 75 bp, Homo sapiens
ccgtgggcagccagggtcggtgaaggatgagacaggagcctatctgattgacagggaccccacctactttggtcc

SEQ ID NO: 163936 - DNA, 49 bp, Homo sapiens
agaggatgaggaggtcataagtcaagaaatttatatgacagtatggaat

SEQ ID NO: 163937 - DNA, 83 bp, Homo sapiens
ctaagatgaagggctaccctcactggcctgccagggagaactacgatgacccgcacaaaacccctgcctccccagttgtccac

SEQ ID NO: 163938 - DNA, 51 bp, Homo sapiens
ccgccgagcgagctcaccatgtcggaagtttgttgcatattctaaggaccc

SEQ ID NO: 163939 - DNA, 48 bp, Homo sapiens
gtgcaaccatgacttttttcaagaaacatgccaagggacaagtgttat

SEQ ID NO: 163940 - DNA, 100 bp, Homo sapiens
cttggcttcttctggactcatctgcgccacttgtccgcttcacactccgccgccatcatggtgaagctcgcgaagctcaccatggatgatgatatcgccg

SEQ ID NO: 163941 - DNA, 100 bp, Homo sapiens
ccaacagatgaagacagatgcaccaacgaggttatgagcccctggccccgctcccctcagctgctgcctctgtgcctgtgtggcaggaccgtaccattgc

SEQ ID NO: 163942 - DNA, 75 bp, Homo sapiens
gtcgctggaaagcacccgtcgtatgctgcaactggttgaagaggacgcaaagtaccacatgcagcgctgcattga

SEQ ID NO: 163943 - DNA, 102 bp, Homo sapiens
cctaaaaaatgcagatgaattagtcaaacagaaaattcatcccacatcagttattagtggctatcgacttgcttgcaactatgctaagaaggaatctgatct

SEQ ID NO: 163944 - DNA, 75 bp, Homo sapiens
caagaagagcagttcccaggatctgcataaagcttcttggacacttaatgattgttggcaagaaatgtgctgctg

SEQ ID NO: 163945 - DNA, 100 bp, Homo sapiens
accccaggcatcctactatgcttcctgagtgcttctttcttggagctgaccatgatggcagaaacggtggacacaagcgaaatggtcaacggcgctacag

SEQ ID NO: 163946 - DNA, 75 bp, Homo sapiens
taagcgcagaaagcaggcgaacccgcggcgcaataacgcacccctgcagtggaccatgagtcggtaatgcccact

SEQ ID NO: 163947 - DNA, 51 bp, Homo sapiens
gcggggaccttgccttgcccgggagcttactcacatagcatattggtatat

SEQ ID NO: 163948 - DNA, 85 bp, Homo sapiens
gatggcgaatgggtgtataacaccttctgtatctatactggactaagcatgcccagtgatacttcactctctccagcaagtcaga

SEQ ID NO: 163949 - DNA, 87 bp, Homo sapiens
caaattaagtactgcttacaatatctgacaggatggcatctgatgactttgacatagtgattgaggccatgctggaagctccctata

SEQ ID NO: 163950 - DNA, 75 bp, Homo sapiens
tgtattttgtgatcgcagcgatgaaagatagcctgggctggaagctcttctacgtcacaggctgcctgtttgtgg

SEQ ID NO: 163951 - DNA, 76 bp, Homo sapiens
ccgaagcgggctgtgtgccccttctccacccagagttcacacaaaagatgttggacaatttctacaattttgcttc

SEQ ID NO: 163952 - DNA, 83 bp, Homo sapiens
atccagaggctctcggaggaagagctcagggctggagagcagcaaaccctgcctcctggatttaagggatcctcccacctcag

SEQ ID NO: 163953 - DNA, 50 bp, Homo sapiens
tcagaggacaacgaagtgttcgttcgtgccctcgtgaggctggcatgcag

SEQ ID NO: 163954 - DNA, 52 bp, Homo sapiens
taaagtgttacatgacagatgtatgaggacagagcgggatgccaccagcttg

SEQ ID NO: 163955 - DNA, 75 bp, Homo sapiens
ctcatcatcccgtcagagctgaggtacttcgtgaaggagcaagtggaagctgcccgcaaagacctggaccaagcc

SEQ ID NO: 163956 - DNA, 89 bp, Homo sapiens
acacctggcgggagctctggtcaggtggataatattaatgcagctgtgatggatttgaaaaaaaagaagatccgcagtctaagtgaaga

SEQ ID NO: 163957 - DNA, 100 bp, Homo sapiens
ccggcgagtcgggctctggaggaaaagaaaggcctcaggagtgcaagtagctgatgaagtatgtcgcattttttatgacatgaaagttcgtaaatgctcc

SEQ ID NO: 163958 - DNA, 89 bp, Homo sapiens
gcagcagctccagcaggcgctggctcctgctcaggtccctggatggccggttgcaggtgtcccatcggaaggggctccctcatgtcatc

SEQ ID NO: 163959 - DNA, 51 bp, Homo sapiens
cctctacttagctcagcaattcttaccttggtgataaaagaaaatgtggct

SEQ ID NO: 163960 - DNA, 98 bp, Homo sapiens
tcaggagccatagtacctacagcagcactccagtcctcaaccactgaagaagaagcttgatgcttggctgtcagaagacatgaattacgcacggttca

SEQ ID NO: 163961 - DNA, 99 bp, Homo sapiens
tggcagcatggctcagactgcatgacagggtgaattgctatggcgtggtaagtgcccagtgcccctttggtggattcaagatgtctggaaatggaagag

SEQ ID NO: 163962 - DNA, 96 bp, Homo sapiens
cttggctggactctgcgggactatgtccgaggatacatccttcagatgatcaagttccagatgatcctcagtgagggataccatcctttcaatatt

SEQ ID NO: 163963 - DNA, 100 bp, Homo sapiens
tgagaagctggagaataattttgatgacatcaagcacacgactcttggtgagcgaggagctctccgagaagcaatgagagtgaagatagtccaagtccta

SEQ ID NO: 163964 - DNA, 51 bp, Homo sapiens
taccgggattccttgccccagttggatttgtacacacagatatgacgaaag

SEQ ID NO: 163965 - DNA, 51 bp, Homo sapiens
attcgcagtggtcgcttcttctccttggtgacgcatccaaagaagacattg

SEQ ID NO: 163966 - DNA, 74 bp, Homo sapiens
cctttgcctagaggctatcacacggattccggagtttgaatccacctttgacaattgtccgaaagacgtttgaa

SEQ ID NO: 163967 - DNA, 100 bp, Homo sapiens
ctcgggcgccccgccggtcacctccgcgcggacaccaggatgctctggagttttggctgcaagctggcgtggatgggttccaggttcgggacatagagaa

SEQ ID NO: 163968 - DNA, 82 bp, Homo sapiens
gaagcagcgcctgttcccggggcagatccaggttcagggtgcttcaaggatgaccgcatcgtcttctggacttggatgttct

SEQ ID NO: 163969 - DNA, 100 bp, Homo sapiens
gcacgagggcgcgctcgagacgctcctgagtgaaacaaagagtcctcttcgtggaaaagaaaaaaatacgctccctttaaacggtggattgaaaatgact

SEQ ID NO: 163970 - DNA, 100 bp, Homo sapiens
gggccatgcccggtgaccacttttggaccaaaggcctgtgtgctgcagaacccccagaccatcatgaatagcgggttttgcagcaattgttgcatatgga

SEQ ID NO: 163971 - DNA, 75 bp, Homo sapiens
gagatcggcggagaccctcgaagtgcgcaaacttgacactcaccctgaccggtggccagcatcgaaatgttcagc

SEQ ID NO: 163972 - DNA, 74 bp, Homo sapiens
gatgtgatcactggtttcgtggcctgaccaaggacctccaagacacctgaaagaccccgccgtggcatcccagg

SEQ ID NO: 163973 - DNA, 71 bp, Homo sapiens
ctgctggaccctgccaagaagtcgcccatcgcagcagctcgagccccacagtcttcgttataacctcacgg

SEQ ID NO: 163974 - DNA, 121 bp, Homo sapiens
gggcccttcgcgggagagcgtcgtgcacgcgggccagaggcggtggatctccttacgtagcagccaaaataaatgaagcaaaagacttgctagaaacaaccaccaaacattgatgcttaag

SEQ ID NO: 163975 - DNA, 100 bp, Homo sapiens
ctgtcctccagaagacatccttcacccctgtagggcagcggaggaggagaaagagatggacctcccggactcggcctcgagggtcttctgcggccgcatc

SEQ ID NO: 163976 - DNA, 76 bp, Homo sapiens
agcacctggagattactggtgggcagggagtgcatccgccccaacccttttccccctcgtctcctgtgagaattcc

SEQ ID NO: 163977 - DNA, 96 bp, Homo sapiens
cacaaatgaaaaccccctggagacgaggaacattgccttcttttcaaccaattgtgttgaaggtggtggaggtggatacagcagtcggagaacatc

SEQ ID NO: 163978 - DNA, 83 bp, Homo sapiens
gctaccatggtctacaagactctcttcgctctttgcatcttaactgcaggttttatggcaggaattcttcctatgttcatggt

SEQ ID NO: 163979 - DNA, 94 bp, Homo sapiens
gaggacgacgagcgcagctgtcggggccgcgagtcggacgaagacaatgcagatcttcgtgaagactctgactggtaagaccatcaccctcgag

SEQ ID NO: 163980 - DNA, 90 bp, Homo sapiens
atccacaagcccaggagaaattccaggatctgggtgctgcttatgaggagtttcactgaccagctgcgtaaaatctctaaggatgcagga

SEQ ID NO: 163981 - DNA, 82 bp, Homo sapiens
cgcgcgcgaccgccgaatcgctcctgcagcagagcgccgtgccgtccctgcagtgacaccgaggtgctcctagccgtctgca

SEQ ID NO: 163982 - DNA, 100 bp, Homo sapiens
tccatgaaagctgaggatgctcaaagggtttttcgggaaaaagcacctgacttccttcctcttctgaacaaaggtccttccacttcctttacttctggct

SEQ ID NO: 163983 - DNA, 100 bp, Homo sapiens
aatacagcaagaaagaccatcaagtttaccatctgtgatcaaaacagggcgactgctaatcagtcacgaggctcccttgacaggcggctttgcatcggaa

SEQ ID NO: 163984 - DNA, 100 bp, Homo sapiens
gcgaagccggggcggagcacgcgagctatgcacacgtcacatggagatgggcgtcaagaagttacctctcgtaccagccgctcaggagctcggtgtagaa

SEQ ID NO: 163985 - DNA, 75 bp, Homo sapiens
ttctcttctgcagaaaaagaggctcttcctcctcctcccgcgacggtgcagcagtaccgcgtcgccatgactgcc

SEQ ID NO: 163986 - DNA, 51 bp, Homo sapiens
gtcaaagcagatcgtgaggaggaagctgacaaaaagccttggcatccacgg

SEQ ID NO: 163987 - DNA, 83 bp, Homo sapiens
ctcttttctctcgggcttcatctcttgtgtggggagtttcatcctagcgggtacaatgactcttcttgcttttcacctaagtt

SEQ ID NO: 163988 - DNA, 100 bp, Homo sapiens
agatggcggacggcccggatgagtacgataccgaagcgggctgtgtgccccttctccacccagaggtgctggagaatctggtaaaagcaccattgtgaag

SEQ ID NO: 163989 - DNA, 82 bp, Homo sapiens
caccggagcaggctcatcgagaaggcgtctgcgagaccatggagaacggttgagccccatatgggggttggcaggcagcaga

SEQ ID NO: 163990 - DNA, 100 bp, Homo sapiens
aagctgctgtttttgctgctgcaaacttctctgcacagtcaaagtatgaaaatgaaagtcttcagaatggaaggaagtcaactgaatttccaagaaaaat

SEQ ID NO: 163991 - DNA, 100 bp, Homo sapiens
ggaggagttcctgcgcagaaacaagggccaccacttattatctagcagatcgtcgctatgacatgctgccttccgtcctcagtgcagatttgtgttccct

SEQ ID NO: 163992 - DNA, 75 bp, Homo sapiens
atgcaggcaggccctgagcacgctgctgtgtgagcagcaggagtgtggccatctggggccgtgtggtatttgcca

SEQ ID NO: 163993 - DNA, 82 bp, Homo sapiens
gacgacgagtacgactacctattcaaagaactcgccgtgtgtgtgtcagagaatgttgctcctgtgccctgagtcaacaaag

SEQ ID NO: 163994 - DNA, 101 bp, Homo sapiens
ccctggtcctctgccctcgcgccccgctagggccagaggtcctgctgtactagccaccaaagcagctgctggtactaagaaatatgatcttagtaaatgga

SEQ ID NO: 163995 - DNA, 100 bp, Homo sapiens
gcgaatatcgtcatcgttagaaggcttcctttctgtctgaccagcctgagccttacctgccatttctttcacgcttcattgaaacacagatgtttgccac

SEQ ID NO: 163996 - DNA, 50 bp, Homo sapiens
cggggccgcgctgagggcgcccagctgctccgggattgtggagggctgcg

SEQ ID NO: 163997 - DNA, 50 bp, Homo sapiens
cggcagagcagggcggcggcgactcggtaagtaaggaggtctctgtacca

SEQ ID NO: 163998 - DNA, 75 bp, Homo sapiens
agtacctctacctccaggagaacagcctgctccacctacagcttcgagagctgtgcccaggagtgaacaaccagc

SEQ ID NO: 163999 - DNA, 48 bp, Homo sapiens
tcccacttgttcgcggcctataggtttactcctggcttgggggcatta

SEQ ID NO: 164000 - DNA, 51 bp, Homo sapiens
cagatggcagccagtcagtggtggaggagggagccatggatttgctgcggg

SEQ ID NO: 164001 - DNA, 100 bp, Homo sapiens
cacagttattaaccagactcagaaagaaaacctcaggaaattctacaagggctcccttaaggaaaagacagttgaaaatcttgagaagtatgtagtcaaa

SEQ ID NO: 164002 - DNA, 90 bp, Homo sapiens
ggaaaataaaccttcaaggcaaactgtgttcattgagaccctgattgaagagagagggttcacaatgctgattattacatgcaagaagct

SEQ ID NO: 164003 - DNA, 75 bp, Homo sapiens
gcatcaaccaggaggcgttggtgctcacggccaaggccacggtattagaaaactactcggatgctccaatgacac

SEQ ID NO: 164004 - DNA, 75 bp, Homo sapiens
tggactgcagcctcggcggtcagcaggcatgttatgttacccagagaactttccaaacaagtacctaaaactcat

SEQ ID NO: 164005 - DNA, 82 bp, Homo sapiens
ggcggcgccatggcagggcttgcaggcctccggtgtggctgtctctgatggtgtcatcaaggtgttcaacgacatgaaggtg

SEQ ID NO: 164006 - DNA, 100 bp, Homo sapiens
ggcacgaggaccatgctgggccggagcctccgagaacgggtattcccctacatctcagccatggtgaacaacggctccctcagctatgatcatgagcggg

SEQ ID NO: 164007 - DNA, 74 bp, Homo sapiens
cggcggccgcagctgccacaaaccagacgtaaaattcatcctgatcagaaaaatattaatgcctatgttgtgtt

SEQ ID NO: 164008 - DNA, 73 bp, Homo sapiens
aaactctcctagcgcggtgcccgcgccgtgactccgcagcagttggaattgatcacaccttttcagttgtact

SEQ ID NO: 164009 - DNA, 75 bp, Homo sapiens
caggacctggacccggacccaaagtgccatgtctttaatcaatggctgccatccggaagaaactggtgattgttg

SEQ ID NO: 164010 - DNA, 100 bp, Homo sapiens
tgtctgccaccatcctgggttgacaattctacacaaggaggccccttcacagatgtagtcactacaaatcttaaattgcgaaatccatcggatagaaaag

SEQ ID NO: 164011 - DNA, 75 bp, Homo sapiens
caggcgcagacgcgcgggcgggaagatggcggctgggttcaaggtcatggaggacgctggcggcggcgaggagac

SEQ ID NO: 164012 - DNA, 90 bp, Homo sapiens
ttgatgagagttttagagaagaagactgaagattttccatggtctggtaaagttaaagatattctgcaaaatgtctttaaactggaaaag

SEQ ID NO: 164013 - DNA, 90 bp, Homo sapiens
cgcagaaggactgcctcactgagcaaccaagaataacctttttcatgctgctttctgcagtgtgtgtaatgctgaatttggctggttcaa

SEQ ID NO: 164014 - DNA, 74 bp, Homo sapiens
gaaaaagtcaccttgtctttccctagtactctgcaaacagggtttgaacatcctcatccctgtgttagaccgga

SEQ ID NO: 164015 - DNA, 82 bp, Homo sapiens
ccgatcccagtatctatgcctatgataactttggcgtgctgggcctggacctctggcagaaatttgggattcaactgaaaga

SEQ ID NO: 164016 - DNA, 117 bp, Homo sapiens
ctcttattgattcacttaagaaaactcagcctgagaatgtgtttgagcaacacacctccacttactgagtatttcctcaatgataagtatcaagaagaactgaattttgacaatccc

SEQ ID NO: 164017 - DNA, 100 bp, Homo sapiens
caaggtccggctgctggatggaggggattttgtcagcttgtcgtcaagggaacaaagaatcggcctggcagtgccctggagaaggaggtggagagcatgg

SEQ ID NO: 164018 - DNA, 75 bp, Homo sapiens
ccagcactgaaaacggggatctcctcttctctggaatagtcaaatgatttcagttcgtgaagccaaagccattcc

SEQ ID NO: 164019 - DNA, 100 bp, Homo sapiens
ggacctcacttccccggggtgtaataatgttaactgagcaaccagcaggcctttttactggagaacgtcccttgtaataatgcaagctgtgaagaggcgc

SEQ ID NO: 164020 - DNA, 100 bp, Homo sapiens
atggcggacagtgcggaactaaagtaagtacaaggtggactgtgcatgcctcaaagaaaacccagagtgccctgttctaaaacgtagttctgaatccatg

SEQ ID NO: 164021 - DNA, 75 bp, Homo sapiens
agcaaggaagaaattgttcagttcttctcagatcttgtggagaattttgatgaggcttccaagaatgaggcaaac

SEQ ID NO: 164022 - DNA, 140 bp, Homo sapiens
cgcctgctcccagccatggtggcctggcgctcggcgttccttgtctgcctcgctttctccttggccaccctggtccagcgagtgaaagatgtcatgtatatctgcccatttatgggagcagtgagtggaaccctgacagt

SEQ ID NO: 164023 - DNA, 100 bp, Homo sapiens
aaaggaaaagcaaatattatattctcatatgtaagagccattggaataccagtttcttcactagttgaagaaggagaaaaacagaacaaacgttttaggc

SEQ ID NO: 164024 - DNA, 80 bp, Homo sapiens
cccggtgcccgaggaggcagccaagctcgtggcctgcctctgcgtgctattaaaggtggaagaaggtccatatctttttc

SEQ ID NO: 164025 - DNA, 75 bp, Homo sapiens
tttcggtccccgccgaagtcaccgtgatcctgttagatatcgaagtgacctacggcatgatgagctccaatgtgt

SEQ ID NO: 164026 - DNA, 80 bp, Homo sapiens
cgtggagatatggcgcaactgcggcgcagcgtgcagcatgagaacacctaccgggaccccatagcaaagtattgctatgg

SEQ ID NO: 164027 - DNA, 96 bp, Homo sapiens
gggcggcggcgggcccggcaccgggccgggactgggggaggcaggtcacagtgctgtcgatatcaccaaggtggctagaagacatcgcatgtctcc

SEQ ID NO: 164028 - DNA, 51 bp, Homo sapiens
gcagaaggttgtgactttagtatacagttcatcgttgggtcaattatgaat

SEQ ID NO: 164029 - DNA, 96 bp, Homo sapiens
aggacacccatgaagctaatgaagacggtgatgactgtcttaggtttcccaggcagctgcagacttgaaacagttctgtctgcagaatgctcaaca

SEQ ID NO: 164030 - DNA, 75 bp, Homo sapiens
aagcacatccttgctaatttcaaaaactaccaggatgcgactctgtacaagtgtcacagaaagtgaggttgcacg

SEQ ID NO: 164031 - DNA, 75 bp, Homo sapiens
cagccctgaagagaaactgcaccttatcacccggaacctgcagatgaggaaactgagacccagaaaggtggaagc

SEQ ID NO: 164032 - DNA, 99 bp, Homo sapiens
gattccccccacgcggcggcgccgcctgtttacgtacgcctgcctcacaccttgcgatgcgccaacatcaccatcattgagcaccagaagtgtgagaac

SEQ ID NO: 164033 - DNA, 82 bp, Homo sapiens
cgggccgggccggcgtggctgctgctggcaatctgggtgaaatgacaatggatgctctgttggctcgattgaaacttctgaa

SEQ ID NO: 164034 - DNA, 95 bp, Homo sapiens
acagacacagccggggtcgggagccgcccggggcagggctcgggagagcgggcgtccgacctccgatcatgaacgggcccctgcacccgcggccc

SEQ ID NO: 164035 - DNA, 75 bp, Homo sapiens
agaggccccagagggaaaagaagcccaaagttttaaaggtccggcccggagcggccatgtcccacggccccaagc

SEQ ID NO: 164036 - DNA, 90 bp, Homo sapiens
cgccccgtcggtgtacagcgtgcaagccctctctctcctggcagagcagcgtcaccctttacaccagaaagctggcgggcactatgggga

SEQ ID NO: 164037 - DNA, 73 bp, Homo sapiens
cgtgaccgagagcgtgaccgagagcgcgaatatcgtcatcgttagaagataaagcttcaccaagaaggttgcc

SEQ ID NO: 164038 - DNA, 83 bp, Homo sapiens
cagctgctgagttctcggtgaagggatcgcttacacctgagacgaactacagaacagcacgtaccagaggtggaagtccaagt

SEQ ID NO: 164039 - DNA, 90 bp, Homo sapiens
cagagacagaagatgatgaaagtgatggggaggatagaggaggaggcacttcaggggtggacaagagcaaggaccaagtgtggaaggtct

SEQ ID NO: 164040 - DNA, 60 bp, Homo sapiens
aatgagttgttcaccttaacccattacggtggagccgccaccaaaatgcagattttcgtg

SEQ ID NO: 164041 - DNA, 100 bp, Homo sapiens
aaagggacatctgctcctccaaggcagagcggctcccccctttcggttttgcacactagggaccaagaagccctcggggacactgctgagaaaagactgc

SEQ ID NO: 164042 - DNA, 98 bp, Homo sapiens
cagcctgctcgtcacttgcctcccgggagtcgctgtggcaaaagcattcaattcgagcactggcgttaagagttttgagggaaattctgagaaatcaa

SEQ ID NO: 164043 - DNA, 75 bp, Homo sapiens
ccatcactgccctccagaacatgctacaaaactgctccagttactccacaggatccgctgaacataggatgttgc

SEQ ID NO: 164044 - DNA, 75 bp, Homo sapiens
ctttggctggctatgcagacatctttctgggaagtggaaaatcaactttagccaaagcaatctgtaaagaagcat

SEQ ID NO: 164045 - DNA, 100 bp, Homo sapiens
gtcagctaggactcatgactactgaggattctgtggcagtgcccagatctgtgacttcctccgcggagccacagtccatagaatcctcggccagcaggtc

SEQ ID NO: 164046 - DNA, 100 bp, Homo sapiens
cagttacctgggatccatggagtcctgctataagctgtcttgtcgacggtctcactgatgcctcttctgcattcaaagttcctcgacccgggccagatac

SEQ ID NO: 164047 - DNA, 111 bp, Homo sapiens
attgtctcggacgtgcggggcctgggcctcccggtccgcaagcagggcttgtcaatgaggcagatcagattcaggttcgacgggcagccaatcaatgaaactgacactcca

SEQ ID NO: 164048 - DNA, 97 bp, Homo sapiens
caatccattccatgggttttattcacaggaagcggctcagccccagggcagcacatcagagacaccatggaacacagccattcctctgccgtcgtgc

SEQ ID NO: 164049 - DNA, 107 bp, Homo sapiens
gtcctactacgcctacgccatccagctgtgcatagggtggattacaggaggtggcagaacagttagagctggaacggataggaccacaacatcaggcaggatctgat

SEQ ID NO: 164050 - DNA, 115 bp, Homo sapiens
gcccgggaggaaggaacgaggcaaggagctaaagcagcgtgcgttcagccctgggggcttgtcaatgaggcagatcagattcaggttcgacgggcagccaatcaatgaaactgac

SEQ ID NO: 164051 - DNA, 82 bp, Homo sapiens
tgaggcggctgcagtgctgacaccactcagggcaagggtgtccgacggctggagcggcgctttgacttccgtccaaaacctg

SEQ ID NO: 164052 - DNA, 100 bp, Homo sapiens
tgctgaccgccgactgtcaatggagctggaaaacatcgtggccaacacggtcttgctgaaagccagggaagattggacgactgattattggacagaatgg

SEQ ID NO: 164053 - DNA, 87 bp, Homo sapiens
cagaatggcaaacagtatatcatttcagaggaggccatccttcttgcctggatatgacaatggagcttgtttctatgattaagacct

SEQ ID NO: 164054 - DNA, 99 bp, Homo sapiens
atggcggacggcgtggaccacatagacatttacgcggatgtcggcgaagagttcaaccagcaaaatgatgcttcaacacccaggccaggtctctgcctc

SEQ ID NO: 164055 - DNA, 112 bp, Homo sapiens
gacgaggcggaagaccgcgcgcagggcctgcagcgggagctggacggcgagcgcgagcggcgcgagaaaatggtcatcatgggccagtgctactacaacgagaccatcggct

SEQ ID NO: 164056 - DNA, 100 bp, Homo sapiens
gattggggaggaacgggccacggccatttccttgatgcgcaagttcattgcctaccagttcacagacacggacaatctctatgggaagcagaaggcaagg

SEQ ID NO: 164057 - DNA, 82 bp, Homo sapiens
gcccagggccacctaaggagcggaccccgcatcttcgccgtctggaaagagctgttgcgcagccattggtacctgtattggg

SEQ ID NO: 164058 - DNA, 100 bp, Homo sapiens
ataccactgccattgacaaagaggcctgtaaaagaggaaattcagacatcgtacgactcgtaattgaatgtggagctgactgcaatattttgtcaaagca

SEQ ID NO: 164059 - DNA, 75 bp, Homo sapiens
caggggtctgagtctcacagcttgtaaagtacgtttcaggagacggcagcgaggctaccttgcatggtgtggtgg

SEQ ID NO: 164060 - DNA, 50 bp, Homo sapiens
cggcggtcttcaagctctcagcatttgacattatcacagactgacatggc

SEQ ID NO: 164061 - DNA, 108 bp, Homo sapiens
tttaaaagttgatacagtatggaggaaaggtgtgaccctttctgcagatgtgagagggtgttttaaatagcatttccaggaaaggaaggctggaaggctgctgtcaac

SEQ ID NO: 164062 - DNA, 100 bp, Homo sapiens
aagatcactccgttccaaagggaaagttttcatctcacgagtttggagctgagggcccgtggggcaacatggccgaagcccgagctacactggaaatcct

SEQ ID NO: 164063 - DNA, 50 bp, Homo sapiens
gggatcctctgtacgcccgttcactgagcactagacaaactgaatggatt

SEQ ID NO: 164064 - DNA, 83 bp, Homo sapiens
gggagggggggctccaaagccgaaagaggaggtccctacctgccacggataccagtcaggatgctttggagtctgcaatgaag

SEQ ID NO: 164065 - DNA, 49 bp, Homo sapiens
gccctgcatcgacctcatcgagcggccgaacaaccctccaggtgtgctg

SEQ ID NO: 164066 - DNA, 51 bp, Homo sapiens
caagcgcagcaacaacagagagcacgtgggacgcatggaatacctcgtgaa

SEQ ID NO: 164067 - DNA, 101 bp, Homo sapiens
acctgcggcgggtgctcatcctggacaattcacctgcctcctatgtcttccatccagacaatgctaaagtgaaattcgttattctacatggaagaaagctg

SEQ ID NO: 164068 - DNA, 80 bp, Homo sapiens
gtttttcgccgtcatgggcgcctcggccgccatggtcttcagcgcttccccgggcgctgcctggacaggcctgcctgcgt

SEQ ID NO: 164069 - DNA, 100 bp, Homo sapiens
agaagtcgcgtgtctaggtgagtcgcggtgggtcctcgcttgcagttcagcgaccacgggtttggcgttgttgtcagcctcggggagagagattggacaa

SEQ ID NO: 164070 - DNA, 100 bp, Homo sapiens
tgcaggaaaatttcgatattgaagtgtcaaaatccatagatggaaaagatgtatacactgcgctgtgacatgaagcggtctctgttggccaaggacttga

SEQ ID NO: 164071 - DNA, 100 bp, Homo sapiens
caagtactcttaaagcaatccccgtgatgggtctagtaatggcaaagcttcttattctggatcaaaaggtaaagttttccagacgccctatacttcagct

SEQ ID NO: 164072 - DNA, 78 bp, Homo sapiens
caaagattacaccaagatctgtgctgaccacaggaattggatctactagtgcagattccagttcttcagacaaacaat

SEQ ID NO: 164073 - DNA, 100 bp, Homo sapiens
gggaccagcagctgtcgccgccgctctcagggcgacataccttctgttgaataccttttacaaaatggaagtgatccaaatgttaaagaccatgctggat

SEQ ID NO: 164074 - DNA, 76 bp, Homo sapiens
gttccccggcccacagtgggggtgtgcaaacccgagagaactggaacatccagtcatggataaaaatgagctggtt

SEQ ID NO: 164075 - DNA, 90 bp, Homo sapiens
ctgcaacctacggggtgtacttgggaacgaggggtgaagcggcccaggtgaggatttctgcgccaggagatgaggggcggtagagccctg

SEQ ID NO: 164076 - DNA, 96 bp, Homo sapiens
gctgctgctgctgctggcggggcgcgccgcgggggtattgaccaagaagaaattacaggacttagtaagagaagtggatcctaatgagcagttgga

SEQ ID NO: 164077 - DNA, 90 bp, Homo sapiens
agaagattgtggatgccgtgatcaagtacaaggacaggtttttatgtgatagtcaaaaggagctggatgagttgctaaactgtcttcacc

SEQ ID NO: 164078 - DNA, 89 bp, Homo sapiens
aacagggagcggggcttttgtctcgtacacagactttactaaaagagtacaaagaaagggataaatccaatgtattcagagataaacgc

SEQ ID NO: 164079 - DNA, 50 bp, Homo sapiens
cctcgccaaagcagagaaatagtctagcacataccgctccaagggctttg

SEQ ID NO: 164080 - DNA, 75 bp, Homo sapiens
acctcgacttatctgtaagcagcggaagggtcactgttactaccatggacatgtacggggatattctgattcagc

SEQ ID NO: 164081 - DNA, 82 bp, Homo sapiens
ccgagaacctacttcacgaccactatggagggaaagaatactgggatgttttaaaatcaaagatgggaaaatcggagaaaat

SEQ ID NO: 164082 - DNA, 75 bp, Homo sapiens
taaagatgcagaggatgctttgcagaaacttcataaatatatgcagattgctgaagggatggcatacattgagcg

SEQ ID NO: 164083 - DNA, 110 bp, Homo sapiens
ctttcaaggatatgctgtattcagctcaggaccaggcaccttctgtggaagttctgcagaatcagaagatttggcagtacatttatatccaggagctgttactattcaag

SEQ ID NO: 164084 - DNA, 96 bp, Homo sapiens
aacgctggctcgcgctcgcgctcgcgctggtggcggtcgcctgggtccgcgccgaggactcagacttacgcctagtggtaggagacagcttgaaag

SEQ ID NO: 164085 - DNA, 100 bp, Homo sapiens
taatagcaagatcatcagtgaggagtgtcggaaagagacaatctggcagctgagctagaagccaacctcggcctcattgaagaaatttcagggtatctaa

SEQ ID NO: 164086 - DNA, 75 bp, Homo sapiens
cgcatccctcaactagcacctccagctagttgttcaggggatgaaggaagctcaggaaaggctgacgggtgatgc

SEQ ID NO: 164087 - DNA, 51 bp, Homo sapiens
gggacatggagaagcccatccagccacaagtatatggttatgatgacttgc

SEQ ID NO: 164088 - DNA, 100 bp, Homo sapiens
cgtcagctgcgctcccctaggagtgctgagcccgcggaaccgcagccatggaggagacatcacagctttcccagatcgggaggaaaaatatggaatgtgt

SEQ ID NO: 164089 - DNA, 100 bp, Homo sapiens
cccagcgcccccaggccgctcccggggctcacgtgggcgacagatgcgaaagaaacgagttccagtgccaagacgggaaatgcatctcctacaagtgggt

SEQ ID NO: 164090 - DNA, 90 bp, Homo sapiens
ggagaccttgacacttatatcctccctggatcttcctctgatggcgctgcctccatgccatgccctctgccagttctatgtggtgaacag

SEQ ID NO: 164091 - DNA, 100 bp, Homo sapiens
cacaaactatggaccaaatccaagaccagtttaatgaccttgttatcagtgatggctcttctctggaagatcttgtgggcagcagcagctgacagtgcag

SEQ ID NO: 164092 - DNA, 98 bp, Homo sapiens
gccccgcgagcacagagcctcgcctttgccgatccgccgcccgtccacacccgccgccaggtgtggccgacgacgatgccctcgctgaggagcgcatg

SEQ ID NO: 164093 - DNA, 100 bp, Homo sapiens
aagaagagaaactcagcgctggggaagaagcttattcagctgattctgaatcatcttacactaccagacctgtgtagattagcacagacttgcaaactac

SEQ ID NO: 164094 - DNA, 102 bp, Homo sapiens
cacttatcccttaatctttgcaagcatttacaagattcttcatcttttagggaaagatagtgttcagttgctggacattggctccctggattatcaagagtt

SEQ ID NO: 164095 - DNA, 50 bp, Homo sapiens
ccgcgcgctgcccacgattcgcttctgagatatgcaatatgatgaggatg

SEQ ID NO: 164096 - DNA, 90 bp, Homo sapiens
ctgagtgaaggtgcagtgctggcggtccatgagctgattccagctgtgatgacctgcatcgtgagcagacagttgtgcctgcgaccagat

SEQ ID NO: 164097 - DNA, 110 bp, Homo sapiens
cgatatctcacctctactcccatgaattcacctttgattccagtgtgaactgtcaatcataaggatctgtgccagttcagaagcaggcgagcctcttccctgatgaaaaa

SEQ ID NO: 164098 - DNA, 75 bp, Homo sapiens
tgacagtctgcatgtgcagttttcaggtcaaggagaagatcattgaccaggtgtaccgtgggcagccctgctcct

SEQ ID NO: 164099 - DNA, 100 bp, Homo sapiens
ggcgagatctgcgtcaacgtgctcaagagggactggacggctgagctgggcatccgacacgtactgctgatgcctgaggaaacccagacccaagaccaac

SEQ ID NO: 164100 - DNA, 75 bp, Homo sapiens
gggtccctgaagagggaagacacgcggaaacaggagggggctggagtatggcatcaggatggagccctcccgcag

SEQ ID NO: 164101 - DNA, 75 bp, Homo sapiens
tcgacaccatcaatacatgcatcaagaagggaaagtcaagtccatcatctccagaaccagctagtcttcctgcag

SEQ ID NO: 164102 - DNA, 100 bp, Homo sapiens
ctgtgatctgcaggttctgggagacgcacagctaagatgccaggacatcctggaagctgggaaaaggtatatgccctcattttgcttaagacctctggcc

SEQ ID NO: 164103 - DNA, 98 bp, Homo sapiens
cctgctgcggctgggggtgctgcgccagacaatgccatccccatcaaatcctggttcagtgaccccagcgacacagcccttctcaacctgctcccaat

SEQ ID NO: 164104 - DNA, 74 bp, Homo sapiens
cattggatttaaaagacagtcctcgtcagcactgactttcagctatggaatcgaattactggaagaatttagtc

SEQ ID NO: 164105 - DNA, 74 bp, Homo sapiens
ctggacagccgggtcctgaacgctgtgaaataggaagatggatggccgagagtacccagacgcacagggctttg

SEQ ID NO: 164106 - DNA, 100 bp, Homo sapiens
agaaacattttctttaacatttcctgaagaactgtctcctggaattacattgaatatacaggttcaaaccttgtactactcagctgatcacaagctgctt

SEQ ID NO: 164107 - DNA, 110 bp, Homo sapiens
gcgtgccctacttcaaggataagggtgacagcaacagctcggcgggctggaaggctttctccatatttacgtgcttgtaactctggcatgacctttgctccagtctctac

SEQ ID NO: 164108 - DNA, 100 bp, Homo sapiens
cggctttcgactctccgactatgctcagggagccaatggtactctggagaacccagccctggacacaagtctgttggaggaatttctgggcaatgacttt

SEQ ID NO: 164109 - DNA, 100 bp, Homo sapiens
gtccagggcagctagggcctgggccgcggttcggccgcgccggccggaggagacatcacagctttcccagatcgggaggaaaaatatggaatgtgtttta

SEQ ID NO: 164110 - DNA, 100 bp, Homo sapiens
ggaaggtgaaggagtaattaactcttgagcgcttgcagaagttgggctgcgcagaagcaaagatttgatggtcctcgaagatttgaggatttagggtcaa

SEQ ID NO: 164111 - DNA, 50 bp, Homo sapiens
ggaggaggagttccatcattacgaatctctacaatcagttcaagtctgca

SEQ ID NO: 164112 - DNA, 76 bp, Homo sapiens
aactgtccttacgtgacctaaagctggagtattttgagattggagaattaaggttttgcgtgtgaagctgtgtgga

SEQ ID NO: 164113 - DNA, 85 bp, Homo sapiens
tggaatgagcctgtgccaagatccggacctaatatatatgaactcaggtcttaccaactccgagagcctcagggaacccagccag

SEQ ID NO: 164114 - DNA, 75 bp, Homo sapiens
tgccctcaactatgctctccgctgtgtccacagcgttcaaggaattagcttaccgaaaggagatggtgagagctg

SEQ ID NO: 164115 - DNA, 87 bp, Homo sapiens
cgggccaggaagcgcatccaggagattcagaatggacagtttagaagaacctcagaaaaaagtctttaaggctcgaaaaacgatgag

SEQ ID NO: 164116 - DNA, 97 bp, Homo sapiens
ctgtattgccgcagttctagcttcaccttcacgatgtttcccttggtcaaaagcgcactaaatcgtctccaagttacaggaaaccaacttacgagag

SEQ ID NO: 164117 - DNA, 100 bp, Homo sapiens
ccagctagcaaagtaattgcactgaaagtgattacagtggcgagatcttgaacaactgctgcgtcatggagtaccaccaagccacaggcacccttagtgc

SEQ ID NO: 164118 - DNA, 100 bp, Homo sapiens
gggaggggaattccagcaccgcagcaaccactccagaaactttccctccttcagttccacttacttacatgatcatttcgagagatgtaatgttgattgc

SEQ ID NO: 164119 - DNA, 103 bp, Homo sapiens
tagcaagcaatgtggcaaaacgaaaaagctcaatgcctcagaaattcattggtgctggagaatctggtaaaagcaccattgtgaagcagatgaggatcctgca

SEQ ID NO: 164120 - DNA, 82 bp, Homo sapiens
gtgggcgaaggacacccgcaggaactcggcagaggagaaattcagacggctcccgagggatcaaaatacttgctggatggtg

SEQ ID NO: 164121 - DNA, 100 bp, Homo sapiens
tgcacctgcagaaaagaggtcaaccgactcctgaagcatatagcactttctacattgtgggtttaatattatcaatgcagataccttttgtgggattcca

SEQ ID NO: 164122 - DNA, 100 bp, Homo sapiens
ggagcagcaacaccagcactgccaacagcgggagaggacctgctggccccaccgcacgacaccagcacggatctcacggaggtcatggagcagattcaca

SEQ ID NO: 164123 - DNA, 100 bp, Homo sapiens
gtgcgcggctgcgctttcctgtccccaagccgttctagacgcggtactatactggcaattgctggagaagattttgcaattgttgcttctgatactcgat

SEQ ID NO: 164124 - DNA, 100 bp, Homo sapiens
cgcgctggtggcggtcgcctgggtccgcgccgagggttggggtctgctaggtccccggaatgagttgtttgacgcagccaaataccgagtgctagctgat

SEQ ID NO: 164125 - DNA, 74 bp, Homo sapiens
cgaggtgaacctccggagccttggcacagctcgcttctaaagaaactggcagacctttcacttcgtatccaaca

SEQ ID NO: 164126 - DNA, 100 bp, Homo sapiens
ggagaggatggctactatttcaccaatctgacccttcgcaggtgttacagtcgggtgaaagaacatggtgttgggaaaagaaagagcagttacacatttg

SEQ ID NO: 164127 - DNA, 75 bp, Homo sapiens
ctccagcgccgtaagcgaggcctccttctcctacaaggaaaaatatattcagggggaagagatgtaatagatttc

SEQ ID NO: 164128 - DNA, 100 bp, Homo sapiens
agaactggcaaaatctccagagagccatggacattggagagagtggtattatggtgtaaacaacgattctttggaggttcagcgtcttccatttctttca

SEQ ID NO: 164129 - DNA, 118 bp, Homo sapiens
ccatgacccagcctccgcctgaaaaaacgccagccaagaagcatgtgcgactgcaggagagaattatatccagatcgagagacagaagattctgaaagggttcaatgaaatgagagtc

SEQ ID NO: 164130 - DNA, 74 bp, Homo sapiens
gtgcttcccgggagcaagctggtggactggctgctggctcagtatcctgtggagcacccagacaaattcctgaa

SEQ ID NO: 164131 - DNA, 100 bp, Homo sapiens
aaggcccagggacagctcgactcacagccagaggaccaacgcgagcggcttctgcagggtgtgcaggagatgacagcatattaaagtgagtgaccctgcg

SEQ ID NO: 164132 - DNA, 90 bp, Homo sapiens
gatttctgaacccaaaacatcaaatctgtgtgggaatcgagcatatggaaaatctctggtgctggagaatctggtaaaagcaccattgtg

SEQ ID NO: 164133 - DNA, 100 bp, Homo sapiens
tctcggaaaccccgcctcttacagtcacgaggtaccacaagagccaggccatctatctggagtcaaaggacaaccagaaactgagctgcgtgatcagttc

SEQ ID NO: 164134 - DNA, 100 bp, Homo sapiens
cgaacacaaagggaaagaggagaggcacccgatatatgttctctaggccttttagaaaacatgtgacgagtagcacagcccctctatggtttagatggca

SEQ ID NO: 164135 - DNA, 51 bp, Homo sapiens
catccccaactggtggcagagttatgagtttttgaatcagagccgacaggc

SEQ ID NO: 164136 - DNA, 75 bp, Homo sapiens
gcctcctacgtttacctgtccatgagtttcttggtcacaggacgtgaccccagccaggccctggtgttgaggtca

SEQ ID NO: 164137 - DNA, 82 bp, Homo sapiens
cccgcccctccaagccacagatcatctttggattcttccccagaagcttcaagtttctcagctacctcagtgcctgtgaccg

SEQ ID NO: 164138 - DNA, 101 bp, Homo sapiens
aggagaaccaactggtcccgaaagagggcccaacatctgtaccacgcgaggtgtgagctcctgccagcagtgcctggctgtgagccccatgtgtgcctggt

SEQ ID NO: 164139 - DNA, 88 bp, Homo sapiens
cattaattatctccactttggagagcccaagtcttgggtgatacaattctggagactggagaagtaattccaccaatgaaagaatttc

SEQ ID NO: 164140 - DNA, 83 bp, Homo sapiens
ttcgaacttttgacacggctttggaaacgacgtcatgtgttagcttttcaggatgtccagcaaagaatcctgtgggaaaaaag

SEQ ID NO: 164141 - DNA, 100 bp, Homo sapiens
ggaaaactcgtgtccatcaaaatccagatgctggatgacacccaggaggcatttgaagttccactgagatctgtatctgtggacctgaatgttgatccct

SEQ ID NO: 164142 - DNA, 98 bp, Homo sapiens
gctgtgctcaaaactgtcattttgggactgctgtgcctcctcctcctgtggtggaggagaaggaaagaagcgtaaaagatgtgttgttttcaatcaag

SEQ ID NO: 164143 - DNA, 80 bp, Homo sapiens
gatgaaattgagaggaacttttgtctacaactcattcttggaatcccagaacaggccttaagtcttctccacatggccat

SEQ ID NO: 164144 - DNA, 100 bp, Homo sapiens
ttcctgttcacggtgaccttcgcttggtgtcctcctggcctcagcaacctgacaattctgtcgtgtcccggtctgccatcatggatgttctcgcagaagc

SEQ ID NO: 164145 - DNA, 75 bp, Homo sapiens
agaagctacagactcttgtttctgaacagatcacagattctgctggccatattctctactccaaagaggatgcaa

SEQ ID NO: 164146 - DNA, 100 bp, Homo sapiens
cctcggagcggctgtacgagttgtggctgctctactacgcgcaggtttactcctggcttgggggcattaggaagcactggaggctcttcgggaactaatg

SEQ ID NO: 164147 - DNA, 99 bp, Homo sapiens
cgcaagctggtggaagcgctgtgcgccgcgggccaccgcgccgaactgctccggttcccgggtgaatcaggtctaggaaaatcgactctcataaacagc

SEQ ID NO: 164148 - DNA, 75 bp, Homo sapiens
gcagcctgcaagattgtggtgcacacgccctgcatcgagcagctggagaaggtacggctcctcactggcattgga

SEQ ID NO: 164149 - DNA, 100 bp, Homo sapiens
atttcaacatgcctctgacaatctctagtgcttgcattgatgacaatgttgatatggtgaagtttctggtagaaaatggagcaaatattaatcaacctga

SEQ ID NO: 164150 - DNA, 100 bp, Homo sapiens
caagtaaaccaagactactttgcatctgtaaatgcaccttcaaacccaccaaggcgtcgaggtggaaaatatgccgttggatcagcttgcattggaggtg

SEQ ID NO: 164151 - DNA, 74 bp, Homo sapiens
caaagatctacatttgcttgaggaaattgctctcacactcagagcttttgagaagttgattcaagtcagttgag

SEQ ID NO: 164152 - DNA, 98 bp, Homo sapiens
acaacgtgaaaatgccccgtgccggggcgtccaccggagtcctgccagctgtccggcgctggggcctgtcccaggctctctatcttctctgctacatc

SEQ ID NO: 164153 - DNA, 75 bp, Homo sapiens
gcgagtttccgatttaaagctgagctgcgaggaaaatggcggcgggaggtccagctgggagctccccgacctcca

SEQ ID NO: 164154 - DNA, 80 bp, Homo sapiens
ttgaggagcattgcttctcatacagtaagttttgtcagcctggcgggtggcagctgtccagagagaggaagcagccaacg

SEQ ID NO: 164155 - DNA, 83 bp, Homo sapiens
gccagatctacgagctagagttgccatttcgctgggatttttgggtggtgcaaagtactataaccaagagtggacattgtggg

SEQ ID NO: 164156 - DNA, 100 bp, Homo sapiens
ggcaaggaaagcagcatagagaatgagatagccgtcctgagaaaggtgaacttctcacctgagggctgtaaagactcgtttgaaaatggagagccaagaa

SEQ ID NO: 164157 - DNA, 139 bp, Homo sapiens
gcaaagactggcaaaagcacaaggattctcgctgtgacagagacaacaccgagtatgagaactatgaagtcttacactccatatttcattctcctgtggagtgctgttgggatagcgaaggctgccaaaatcatcatcg

SEQ ID NO: 164158 - DNA, 74 bp, Homo sapiens
gcactgcctgagcagtcagaaggcaaagaacagaagatcctccttgcggagcccatcgtggtgaggcttaagga

SEQ ID NO: 164159 - DNA, 100 bp, Homo sapiens
agacgacgctgctgggtccgctgagcggggcgacccgagaacttgaaggtgcacattcttgatactgaaagttttgaaactacatttggccctaagtcac

SEQ ID NO: 164160 - DNA, 82 bp, Homo sapiens
cacccaccaacaacaccacaataatccacagccaaggcaaagatgctggaaggagatctggtttcaaagatgctacgagctg

SEQ ID NO: 164161 - DNA, 75 bp, Homo sapiens
cagacttattggtctattcaagcaagtggaaaagcagcttaagcaagccaaacgtctcaagtccagtaccagttt

SEQ ID NO: 164162 - DNA, 100 bp, Homo sapiens
caaccctcctgaccatgaggtggtggccatggcccgcaagctccagctcatgatggagcagtccaagaagtcctccctcatggtggcccgcagtattctc

SEQ ID NO: 164163 - DNA, 73 bp, Homo sapiens
tcatgctgtgcagcaagaacccgctgccactgcagagccccgccatggaagacacgccgttggtgatatcgaa

SEQ ID NO: 164164 - DNA, 82 bp, Homo sapiens
aataaaaaacttcccaaagaactcctgttacggtcacggtctagatcacattctcgatccagaggaaggcgatactctcgct

SEQ ID NO: 164165 - DNA, 74 bp, Homo sapiens
acgcggtctgcaagctgacgtatgctaaccttgccgcgggccgagccctgcctcgccatggaccaggactatga

SEQ ID NO: 164166 - DNA, 148 bp, Homo sapiens
aaaagcttctagatggatcctttccaaacttggtgtcttttctacaaactctgtgcctcaacaaccatttctaagtggtgtctgtgggaggttatgtttatttgagacttctccatcgggatcgcctggtgtcaccaagtgtccactg

SEQ ID NO: 164167 - DNA, 88 bp, Homo sapiens
aatcatcgggtgttctctactccagagctccgacttatttctgtgggcagacattaacattcaggcagacctgttatcctaaactagg

SEQ ID NO: 164168 - DNA, 82 bp, Homo sapiens
gactttccaaagcgctggaattatgggcgtgagccactgtgcccagaggctgggaggcggcagaatgcagccagaggagggc

SEQ ID NO: 164169 - DNA, 98 bp, Homo sapiens
tatgaacatccaaatccctggaaagagagtttccagcagttggcattttgttcccaacatcacctttggtcaccctgtggtagaaagccttcgaaagc

SEQ ID NO: 164170 - DNA, 100 bp, Homo sapiens
cggcgacagtggcggcggcgccatggcagggcttgcagatgaggacggggacttggttgccttttccagtgacgaggaattgacaatggccatgtcctac

SEQ ID NO: 164171 - DNA, 82 bp, Homo sapiens
cttcgagatcagcatcttaacaattcatcatggtattttccctaattctccatggtgcttcaatagcatgttattatcataa

SEQ ID NO: 164172 - DNA, 137 bp, Homo sapiens
ggcagactcgagactgtaggcactgccatggcccctgtgctcagtaaggactcggcggacatcgagtaactctcaggagccttctccgcagttggcttcctcggtagcttccacacggagcatgcccgagagcctgg

SEQ ID NO: 164173 - DNA, 75 bp, Homo sapiens
ggacagatggacttcaaatgctgtttgtattccagagactaggcttggccttcgtgcctctgcagatctggtcca

SEQ ID NO: 164174 - DNA, 76 bp, Homo sapiens
gcgctgcctacgaggctttctgccgctggagggaggtctccgccaaggaagagctaaagatggctgaatttctaga

SEQ ID NO: 164175 - DNA, 90 bp, Homo sapiens
ccgcttcggagagagaaatgctggggtacgacaacatggcagagctgtttgcggtggtgaagacaatgcaagccctggagaaggcctaca

SEQ ID NO: 164176 - DNA, 74 bp, Homo sapiens
cggcccccgcagcctcagtacctctgctatctcttttgcagaagtccaggacactctggacttcagccaacagg

SEQ ID NO: 164177 - DNA, 74 bp, Homo sapiens
agctccggagacttcttagatctgaaggaaggagtcaagactgagaacaacgatcatattaatttgaaggtggc

SEQ ID NO: 164178 - DNA, 100 bp, Homo sapiens
acgaaggcaccgacgtcatcatgctgaccaccaatcagatccgtaagggtttccaggcctgaggtgcccgccctggccccaggagaatgaaccagccgca

SEQ ID NO: 164179 - DNA, 98 bp, Homo sapiens
cggccctccagttaccagccccctctgcagaatgccaagatgtctttggtggacttgggaaagaggttgctagaagcagcaagaaaaggccaagatga

SEQ ID NO: 164180 - DNA, 74 bp, Homo sapiens
cagctccgaccgcgaggacgacttctccgcaggggtgagcccctccagactccgaataggagatcaagagtttg

SEQ ID NO: 164181 - DNA, 83 bp, Homo sapiens
cgcggctcggagccctggaagcagcagctcaccgaggacggggactcggtgctttcttctgcgacctggtactcatctacctc

SEQ ID NO: 164182 - DNA, 100 bp, Homo sapiens
aacgcagatatagaacatttcttttatcacagatattttggaactcttagaaaaaagagtgaagtcaagattttctcaccggcagatacacttaatgaat

SEQ ID NO: 164183 - DNA, 101 bp, Homo sapiens
aggaagaacaaaatggcctctaatatctttgggacacctgaagaaaatcaagcttcttgggccaagtcagcaggtgcgcgtggaattcatggacgacacga

SEQ ID NO: 164184 - DNA, 75 bp, Homo sapiens
cagccaaccatgctcaacttcggtgcctctctccagcagactgcggaactgtggctgcaccatctgtcttcatct

SEQ ID NO: 164185 - DNA, 75 bp, Homo sapiens
ccgggcgccacgccgcgaacggggcactatggcagacaaagttaggaggcagaggccgaggaggcgagtctgttg

SEQ ID NO: 164186 - DNA, 74 bp, Homo sapiens
gacctgcaccactgtcgccttcacacaggcatggccagcattgacagcagtgcccctgaaacaacatcggatag

SEQ ID NO: 164187 - DNA, 83 bp, Homo sapiens
acaccgggacacccgcgaggccggaaaatggttaatttggagtggcccctggagtcagtttcctacaccatccgaggccccac

SEQ ID NO: 164188 - DNA, 100 bp, Homo sapiens
cgaatatcgtcatcgttagaagaacgagcgacgtgacacaagaggtcccaagggagcaaacctgaaagccagagcctcctgaatacacaaactgccggtg

SEQ ID NO: 164189 - DNA, 86 bp, Homo sapiens
acttgatagcatataaagattcccaacttattgtttcatcagctaatgtcagagatggctttggattccccgttctgtgtgctgct

SEQ ID NO: 164190 - DNA, 75 bp, Homo sapiens
tgcgaaaggtggttttgatcaccggggctagcagggaatgaaagctactggttgattttaaagtgcctgggcctc

SEQ ID NO: 164191 - DNA, 50 bp, Homo sapiens
ctggcaaagtggaaaaatgtgcggatttgtactgtgttcgcagtgacctg

SEQ ID NO: 164192 - DNA, 100 bp, Homo sapiens
agaaaagttgtttcctccaacattgatgttcctccagcaaggcatgtagaagtccaggtgtttggtgatcaccatggcaatgctgtgtacttgtttgaaa

SEQ ID NO: 164193 - DNA, 80 bp, Homo sapiens
gttaaaggagctgaaaaacaacccccaccgagatttttataactgcaggaagggcactccacagaaggatgttattatca

SEQ ID NO: 164194 - DNA, 100 bp, Homo sapiens
gctttcccattttgctcagcgactgtttgatgacgtcccgcagcagggagagcaacaagccccggccctcagagctcagccggatgagcgcagcccagag

SEQ ID NO: 164195 - DNA, 82 bp, Homo sapiens
atgacgattactctttttgcagagctctgaagggaggacttaaagagagatctacttcagagccagcagtcccgccagaaga

SEQ ID NO: 164196 - DNA, 82 bp, Homo sapiens
tttctctgtgccagtagtgggcatgtagaggctgcatgttgtgcctgggtcagtccaccttccttcgctttaaccacccggc

SEQ ID NO: 164197 - DNA, 78 bp, Homo sapiens
aaataaccacttaccccttctcaccgaggaagagcgggagaaaggatgatggaagcctctttgtatgacaaaattatg

SEQ ID NO: 164198 - DNA, 90 bp, Homo sapiens
cgaactgggtggcgaacggggcgagcctggaggattgtcactccaacctcttttcgctggccatcagcatcagcaaagccatcaacaccc

SEQ ID NO: 164199 - DNA, 50 bp, Homo sapiens
cgcacacctggcagcaaaagaggatccacctgatggctggccgagtaccc

SEQ ID NO: 164200 - DNA, 51 bp, Homo sapiens
tcaagatgatttatggtaataaggttctggcctataggaacaagacatttt

SEQ ID NO: 164201 - DNA, 83 bp, Homo sapiens
cctggggcggccggccaggaaccacccgttaaggtgatctttagacagtgactgagtatggatcatttgaacgaggcaactca

SEQ ID NO: 164202 - DNA, 90 bp, Homo sapiens
caggactccaaaatggcgtcagttgcatgcttttcacttccactgcatctctcgctggctcaaaacacgacaggtgtgtccattggacaa

SEQ ID NO: 164203 - DNA, 101 bp, Homo sapiens
ccggggctcaagtgatcctttcatctcagcctcctcagtagctgagactacagccacctgtctttaccagtttccaagactatgttactgggcttcagact

SEQ ID NO: 164204 - DNA, 83 bp, Homo sapiens
gccaaggtttcatcctggtttatagcctggttaatcaacagtcttttcaggtgctggttgccgaggagaacgtggacttccgc

SEQ ID NO: 164205 - DNA, 98 bp, Homo sapiens
tgactaagaagaatgagaactataagagcctggtgagacggagctatcggcgccgcggcaagagccaggtgaaatgacaatggatgctctgttggctc

SEQ ID NO: 164206 - DNA, 99 bp, Homo sapiens
ccgccttgctgctgctcaaagctgctgccgccccttgggctaaaaggttgggcccgaaggcatcctgcagaacggggctgtggacgacagtgtagccaa

SEQ ID NO: 164207 - DNA, 100 bp, Homo sapiens
caagaagaggacctgtgcagggcagagcaggaggccccccgagcctgggagcctcgatctgaaagccaagcatcacgcaaggaagagggcctgcctgaag

SEQ ID NO: 164208 - DNA, 75 bp, Homo sapiens
caagaaatttcaaaacttgatcaagcctggagatttgaaaaagagaattgaatctctgatagacagagactatat

SEQ ID NO: 164209 - DNA, 82 bp, Homo sapiens
cccaaacttgctggtcactgggagagacaagaggagcagcagcggcaccgcccctcaccctggagggtcctgtacaatctca

SEQ ID NO: 164210 - DNA, 83 bp, Homo sapiens
ggcgaacggggcgagcctggaggattgtcactccaacctcttttcgctgcttcgagagcatgcagaggctctgcgacaagtac

SEQ ID NO: 164211 - DNA, 80 bp, Homo sapiens
tgagtgtcttgtcatgctagcactgcattaagtgatgcatacaggacattcactgaacaatgccagggatacaagtgcca

SEQ ID NO: 164212 - DNA, 100 bp, Homo sapiens
ccaccaagacaccccttgaccagcacacactgcaaggagatcagagtcctgtgtatggaaactcacatgagtcagctcagtctagaagggtagtaatttc

SEQ ID NO: 164213 - DNA, 99 bp, Homo sapiens
gctgcctctggtggggaagtggaagatggtggcccacagacacagacaagaagtcctctgtaaagagatggtgcctctagcagagcagacaccactgac

SEQ ID NO: 164214 - DNA, 100 bp, Homo sapiens
gtttctaatatctcgaaatgcggctgcttttcaagagagctggattgaaagatgtctcaacgaaagtgaaaacaaacgttattccagccacacatctctg

SEQ ID NO: 164215 - DNA, 90 bp, Homo sapiens
taagagtttggcgagtcagtgactgaagcgcccgtccattccaaggtctcctctgagcctccggcctccataagacccaaaacagatgac

SEQ ID NO: 164216 - DNA, 83 bp, Homo sapiens
ccttcggcagtccacccaccgccgccgcctcccaggtggagccttttgccagcttgaccgaggccgtgcggagctcagttccc

SEQ ID NO: 164217 - DNA, 74 bp, Homo sapiens
ttaaatgcatatgttctccaagaaccacctaaaggttgaagaaatatggagatcaacacaaaactgctcatcag

SEQ ID NO: 164218 - DNA, 90 bp, Homo sapiens
cggggctcccaggacctccactaatcaccagaacaaaatgtgcagttgccaccttccagagaagaggtacgagatgacaagacaaccata

SEQ ID NO: 164219 - DNA, 83 bp, Homo sapiens
catgggtgttgtccgcagccgcaggggcataaggaaatggtggcaggcacttcctcctaacaagaaggaagtagttaaagaaa

SEQ ID NO: 164220 - DNA, 100 bp, Homo sapiens
gctcagcagtgccccagcatggggcagagcctctcggtgccagccagggtggagagattcaaccagttagcgtgaaagttggagataaagttcttctccc

SEQ ID NO: 164221 - DNA, 100 bp, Homo sapiens
ggcagcgtgggtgagcggcgcagcggcggcagcggagagcgagagaggggagcagcctccacctcagatatatgacaagcagttggatgaaagagaacac

SEQ ID NO: 164222 - DNA, 87 bp, Homo sapiens
ttagagtatgttctgcacttcactgcactgaatgggaagatttactttcgaagctataagcctctcttctgtggaaactctgaagcc

SEQ ID NO: 164223 - DNA, 100 bp, Homo sapiens
aatcacccagatttagcgaaggatctcacagcggctttgattcagcaagccacaacagttaaaaacaaggatatcaggaaatttttggatggtatctatg

SEQ ID NO: 164224 - DNA, 101 bp, Homo sapiens
atgaatatgaccctatggaagcagaagaagctgaggatgaagaagatggcatagaatgtcaagctaaccaggcgtccgctacttcagaagagtgtactgtc

SEQ ID NO: 164225 - DNA, 98 bp, Homo sapiens
attacttagaagtggaggctgaggccaagatggagaacttgcgagctgcagtgccaggtcaacccctagctctggctcaaagatttggaaagagacag

SEQ ID NO: 164226 - DNA, 114 bp, Homo sapiens
cttttgcaaccctctgcattccatctctatgagccaccataaaaggtggacaagtcctattttcaagagaagatgacttttaacagttttgaaggatctaaaacttgtgtacct

SEQ ID NO: 164227 - DNA, 50 bp, Homo sapiens
cttgactgccgcatcatgggagagtctcagcagtccaattttggcactgg

SEQ ID NO: 164228 - DNA, 76 bp, Homo sapiens
ttttacctacgttggcggccccagaagacgaaatctcacaaaactgtcccttatcttcagtcacatgctggcagaa

SEQ ID NO: 164229 - DNA, 83 bp, Homo sapiens
cggcttcaaagagaaaaggcaacatcctgtcacaggccatgctctggcaaaaacccatcactggtgcaagctatatttaacgg

SEQ ID NO: 164230 - DNA, 98 bp, Homo sapiens
aaattcagacaagagcattctccttatctcatctgcacaggaagcaggtctaagggtatcaagccggccagctttgagaaagtgcacgatcctgaaat

SEQ ID NO: 164231 - DNA, 75 bp, Homo sapiens
gacgggctaggcatcttgagaaaaaattcctggaaaacccagatcgggcccgggacacccagacagatgagattg

SEQ ID NO: 164232 - DNA, 100 bp, Homo sapiens
ttcctgtgcttatcatgattgctctcccctcccctagtatggaaggggccacctacagatgctcctgcagtggacacagcagaacaagtctatatctctt

SEQ ID NO: 164233 - DNA, 98 bp, Homo sapiens
ggcggtgttgctccggcagcgttcctgggagccgagggccagagactaagtctggagaagcgactggaggagtggttggggaggacattgcctggcag

SEQ ID NO: 164234 - DNA, 50 bp, Homo sapiens
accagggactctgttctgattagatttctatattcagatgaagttcaaat

SEQ ID NO: 164235 - DNA, 75 bp, Homo sapiens
acttcaagaggaggaatcacgctcggaaacaatgggtactccaaagattcaggtttactcacgtcatccagcaga

SEQ ID NO: 164236 - DNA, 90 bp, Homo sapiens
cctggaccaggaggaggttttcaggaccaaaattgtggaaaagtcactctgagagcgcctgctcgctgtgcccccgggttatgacgaccc

SEQ ID NO: 164237 - DNA, 101 bp, Homo sapiens
attttgaaacacctgggtctgggcttcccgggcgagcggtggactgctgagaagtcaggccagattgaaagatcaaagaatgtaaggcaaagacaaaatga

SEQ ID NO: 164238 - DNA, 90 bp, Homo sapiens
atcaaatggcacttcattggccacctacagaaacaaaatgtcaacaaattgatggaccctcgagtcttccatccagggcctccggataat

SEQ ID NO: 164239 - DNA, 90 bp, Homo sapiens
gtccagagctgaggactgcctgtttgcagtatttgattttcatcaagcagctgatggtatccaggaacaacagagacaagaacaagcagg

SEQ ID NO: 164240 - DNA, 101 bp, Homo sapiens
gaccagaggccgaactcgggttctgacaagatggccgggctgccccgcaggatcatcaagcagtctgagctatcagctgaagaaagtccagaaaaattagg

SEQ ID NO: 164241 - DNA, 75 bp, Homo sapiens
cctcagacgcggtggagccgccggagtctgagaagctttgcagttcctgaccccttaatgcctgacccttccaag

SEQ ID NO: 164242 - DNA, 75 bp, Homo sapiens
ctacaagaagagggcggagcggagacgggagtattatgaaaagatcgttccatcataatgaatggatccaatatg

SEQ ID NO: 164243 - DNA, 89 bp, Homo sapiens
caaaggaaagccgggtatctgtggtctttaagatgtggaagctgttttaggttatgtgaaagagatgtttcctcatctctaaggcttac

SEQ ID NO: 164244 - DNA, 75 bp, Homo sapiens
gattcagaaggagcaggattaccaaaggctcctacagaagaagggaaaaaagagctgctgttcctaagtaacgcg

SEQ ID NO: 164245 - DNA, 101 bp, Homo sapiens
ctggtgtgaggacgagcgcttcctgaagcagttctgtgtatccaacattaatcagaaggtgaagtttcaggtcaagaagaagagagattggccctagaaac

SEQ ID NO: 164246 - DNA, 102 bp, Homo sapiens
ggatgctggaggacatctgggggccacaaatgctccttctcctggagacgcaactcaaggaattgaatgatctggcacgggaccctccagcacagtgttcag

SEQ ID NO: 164247 - DNA, 82 bp, Homo sapiens
gtgggcctgggagctgcctctgaggaacacgccgcaggtctcggcgcggaagatggccggcggcgtggacggccccatcggg

SEQ ID NO: 164248 - DNA, 100 bp, Homo sapiens
ggccagcctgagcaagcggaggacctacgccggcctggtggtctcacgtgtgaaacatggctacagattggctgggaagtattgtgtccatcaattgtgg

SEQ ID NO: 164249 - DNA, 51 bp, Homo sapiens
atcttccccacacaatatatggtgagcaagagactaaggtgtcagtatgtt

SEQ ID NO: 164250 - DNA, 100 bp, Homo sapiens
gcaaccatcaagacttcacaggccacaaaatcaggaaccccagagccaggaaagaaagaaatctcgttttgggaatgctttccacctgtgtcgggaagtt

SEQ ID NO: 164251 - DNA, 100 bp, Homo sapiens
ctattggagattgtgaatcctgctgtctgtgcagggctcatagtgagtgttctgtgagggtatcactgggatacatcagattggatgccaagcgttcctc

SEQ ID NO: 164252 - DNA, 80 bp, Homo sapiens
tgagaaaaaaataaactcctatttgtttatggcaaggtcagcccaaggccaaccccactgtcactctgttcccgccctcc

SEQ ID NO: 164253 - DNA, 98 bp, Homo sapiens
cagaatgcagtttacattaaccttcgacagcttcagtatcagacacagcacagcagccatctgaagagcaaagcaagtctcttgaaaaaccgaaacaa

SEQ ID NO: 164254 - DNA, 100 bp, Homo sapiens
tataatgaggataatggtatcatcaaggccttcagaaacatccctgcaaagttttgtggtgaccctggtatacctgcccaaggaaaaagagaaggcaaaa

SEQ ID NO: 164255 - DNA, 98 bp, Homo sapiens
gcactctgggcgaaaattggatgtgaaaatgaagccagaccgaggcatcagaagttgagagacaactctccatgcaggtccacgccctcagagaagac

SEQ ID NO: 164256 - DNA, 76 bp, Homo sapiens
acagtgcgacgtctccggaagggcaaggacatggatttgattgacatactttggaggcaagatatagatcttggag

SEQ ID NO: 164257 - DNA, 100 bp, Homo sapiens
gcttccccaggcggcggcggtcctggtgcggaccctccggccgcagccatgtgggacccgcgggcagctagtttagaaatcagtccccagaatgtggatg

SEQ ID NO: 164258 - DNA, 90 bp, Homo sapiens
cgtggcgtcgtctgcgaccgctgccttctcggatatggtccggaaaaagaacccccctctgagaaacgttgcaagtgaaggcgagggcca

SEQ ID NO: 164259 - DNA, 89 bp, Homo sapiens
ggaggatttcaccaactgcaatccgaccatcgacctgcagggcgaggactccctggaggaaaagcggaagcggcagcggtctgaacgcc

SEQ ID NO: 164260 - DNA, 83 bp, Homo sapiens
cgccagttgcttgatcaggtggaacagattcagaaggagcaggattaccaaagggaacgtccttgtgaagacctttatctgag

SEQ ID NO: 164261 - DNA, 76 bp, Homo sapiens
aggtgctatctgtctgctctagtaataagccggctattgtagaagctggtagaagaccatgatggagaaggtgatg

SEQ ID NO: 164262 - DNA, 87 bp, Homo sapiens
gatgaggcgggtgaccctgttcctgaacggcagccccaagaacggaaagatcaggatcctcatgaccagccaaagagaagaagaatt

SEQ ID NO: 164263 - DNA, 50 bp, Homo sapiens
tcttccagaatctcagcagctgggagagctgggcatgtggagcacatgag

SEQ ID NO: 164264 - DNA, 75 bp, Homo sapiens
aaatggcttcagcgcagtatattactgcagcaaaagatacagatattgtggatgaagccatctattacttcaagg

SEQ ID NO: 164265 - DNA, 95 bp, Homo sapiens
tacggatggatatgtcaggaatgtgattcttcatcttccaagggccgttgctccagggagaactgcaaatatcttcatccacccccacatttaaa

SEQ ID NO: 164266 - DNA, 73 bp, Homo sapiens
gcccggcccctcagcgcccccagcacgccgccgagtcccgctcgccatggaggcggggtttcaccatgttgcc

SEQ ID NO: 164267 - DNA, 74 bp, Homo sapiens
ggcgggagcttccgggagggcggctcgcaggtgtggacactgccagcggctgcagccgacttggaatgacctgg

SEQ ID NO: 164268 - DNA, 102 bp, Homo sapiens
agcggaaacagctcaaaaaggccaagatggccaaggaccgcaagagccgcaagaagcctgtggaggaaagaaggcgtcggtggattttacaagggaattgct

SEQ ID NO: 164269 - DNA, 100 bp, Homo sapiens
cgcagaatgcaacgccattcgccaggctcttcaggatctgctttcagagtacatgaacaaccttttcttggacagtgacttactttgattcttttgaacc

SEQ ID NO: 164270 - DNA, 104 bp, Homo sapiens
tggattcacccacagcggggcggcggcggcggcggctgcggcccaatataggtgctggagaatctggtaaaagcaccattgtgaagcagatgaggatcctgcat

SEQ ID NO: 164271 - DNA, 98 bp, Homo sapiens
cgctgagaggaggccccgggagggcagccactccccgctggacagcgccgacgtccgggtgcacgtgccacgcacggacctgaaggagaagaaggaga

SEQ ID NO: 164272 - DNA, 82 bp, Homo sapiens
gcagggcgacggccccacctccggccactgggacggcggcgcggagaagcggagctggagtttgttcagatcatcatcatcg

SEQ ID NO: 164273 - DNA, 101 bp, Homo sapiens
cggccctcggtgctctgaggcgctggcgcggcgggcgcggaggtcctgctgtactagccaccaaagcagctgctggtactaagaaatatgatcttagtaaa

SEQ ID NO: 164274 - DNA, 125 bp, Homo sapiens
gtgacattaaagaccttactgtttgtgagccaccaaaaccacagtgttctttgcctcaagacccagctattgttcagggccatgaagcccccaggaggagaatcgagcaatctttttggaagtcc

SEQ ID NO: 164275 - DNA, 50 bp, Homo sapiens
caaccttcgatctcctgacgaattgtaaatcctcacttattgaaagatct

SEQ ID NO: 164276 - DNA, 97 bp, Homo sapiens
gccgctgcaccttcaccgcgtacccgggacccgcccgcccgcgggaggtgtggccgacgacgatgccctcgctgaggagcgcatgcggagaggccag

SEQ ID NO: 164277 - DNA, 71 bp, Homo sapiens
gtccgtaatcagtgacgaggtccgctacgtaaatccctttgcggcggggcagctgcaatgactctccgcac

SEQ ID NO: 164278 - DNA, 76 bp, Homo sapiens
ccggctcccaggtttattctcccatagcatgtgagaacctctctctagactccagttgcttctcttctccacctgt

SEQ ID NO: 164279 - DNA, 100 bp, Homo sapiens
tatcatccatatgtgtcaaggcttgaagacggctgagcagacagccagcagatatgagcactgctcagcacgcaggcatgtgaggaagctgggcttaaag

SEQ ID NO: 164280 - DNA, 101 bp, Homo sapiens
catccacagcagtgtttctcgggttggaaaagccattgataagcagcctcccgcgacgatgcccctcaacgttagcttcaccaacaggaactatgacctcg

SEQ ID NO: 164281 - DNA, 112 bp, Homo sapiens
cccggttccccggcccacagtgggggtgtgcaaacccgagagaactgggttccaatgattcttgttggtaataagtgtgacttggaagatgaaagagttgtagggaaggaac

SEQ ID NO: 164282 - DNA, 100 bp, Homo sapiens
atcaacccctctaactggtgtgatggcgtgtcacactgccccggcggggaggacgagaatcggtgtgattgcagagggaatggcatacatcgagcggaag

SEQ ID NO: 164283 - DNA, 75 bp, Homo sapiens
tggtgtatggccgtgggcatctcctacattagcgtctacgaccaccaaggactatggcaaggagtctcaggccaa

SEQ ID NO: 164284 - DNA, 83 bp, Homo sapiens
ccccggaggcagagcggctgccatggaaccactcgttttgactattattttatcactctttgtgaaacttcacaatgttcggg

SEQ ID NO: 164285 - DNA, 100 bp, Homo sapiens
cgactagcggcggcgggagcggcgccgagaggccgtgcgggacgcgggcgccaggaccggccgaacgcagagggggcaagcgcgatgaagagctggttct

SEQ ID NO: 164286 - DNA, 51 bp, Homo sapiens
agtgactagatcagagatcatagatgttctctctttccagacgtagtgaac

SEQ ID NO: 164287 - DNA, 100 bp, Homo sapiens
gagcaggcggaggccgacaagaaggcggcggaagacaggagcaagcagtttgcctatctggggcgcctggctcacgaggttggctggaagtaccaggcag

SEQ ID NO: 164288 - DNA, 75 bp, Homo sapiens
tagctacaaacatttatctaagatcagacactcctctaatttacaaagcagtgcccagctggtttgtgcgagtgg

SEQ ID NO: 164289 - DNA, 100 bp, Homo sapiens
ccggaggccgcacccgcctccggcggggctctcaggactgttgggaaagatcctgatggctatccgagatgcaggttttgaaatctcagctatgcagatg

SEQ ID NO: 164290 - DNA, 97 bp, Homo sapiens
caaataaattgcaagcattctatccaaatggaggaggagaacggggctgaggaggaagaagaagaaactgccgaggatggagaggaggaagatgaag

SEQ ID NO: 164291 - DNA, 102 bp, Homo sapiens
aaatgccagccagaagaggcgttcgctgcgcgtgcacattccggcactgcctccttacctgtgaggaatgcaaaataaagcatggattaagtgagaagggag

SEQ ID NO: 164292 - DNA, 90 bp, Homo sapiens
gcgacagcggcgagcagaactacggcgagcggaggcggggtttcaccatgttgcccagactggtcttgaactcctgagcttaagcaatcc

SEQ ID NO: 164293 - DNA, 115 bp, Homo sapiens
gacgaatagagaaaaaagggtctgacaaaaggaccaccgtcacagatgccaaagagttgaagtttgcaagtcaagtggcttttcatggcctgccactgaaaatcaagaaagaacc

SEQ ID NO: 164294 - DNA, 75 bp, Homo sapiens
agtcgatttacctggagaaaggagtgcctggctgttatggaaagcactccctgccattgatggtctggattccac

SEQ ID NO: 164295 - DNA, 100 bp, Homo sapiens
gaagtcagagctgcacaaagggaaaggccgccgccgctccactgtcactctccaaggccagcgccacctctcactcaccgagctccagccgaaggagaag

SEQ ID NO: 164296 - DNA, 100 bp, Homo sapiens
cctcccgggtagctgggactacagggaaagcaggcaggatgggagagtcgccgatagaaccacctcttccctgcctcctgggcttgggggaagcttgaat

SEQ ID NO: 164297 - DNA, 74 bp, Homo sapiens
cgcaagggcagaaggttgaagaacaggagcctctcattttgaaaagacatgtttttcttcaagcaacaaaggtg

SEQ ID NO: 164298 - DNA, 88 bp, Homo sapiens
gaagtcgtactcccttaaacccttcctgcctgacacagctcacttcaagaagtgcacaatgtcagaacgtggaattaagtgggcttgt

SEQ ID NO: 164299 - DNA, 100 bp, Homo sapiens
cccttgtagagtcattcctgcctttgagcggactcccttttaagagagagtctacaaggagattgaacaggtggttggcccacatcgccctccagcgctt

SEQ ID NO: 164300 - DNA, 81 bp, Homo sapiens
ttcagagagaggaagccgaaaacaccctgcaatctttcagacaggaaggaagcagccaccctcgccatggcctccccgccc

SEQ ID NO: 164301 - DNA, 82 bp, Homo sapiens
cgccgggaccctcgcgcgcgaccgccgaatcgctcctgcagcagagacctgcctagagctggaacgttacctccagagcgag

SEQ ID NO: 164302 - DNA, 82 bp, Homo sapiens
cctctgctcgcggccgcgcctttgagacaccattcgcttttcacccaagatgatttgatgtcttataaaactctgatgaacc

SEQ ID NO: 164303 - DNA, 82 bp, Homo sapiens
gtttagaagctgaccagacaaagagaggattttttatcaagcagaaatgcatcgaacaacgagaatcaagatcactgagcta

SEQ ID NO: 164304 - DNA, 83 bp, Homo sapiens
cgaagtcgcacgtgaaggatagcagtggcctgagaaaggagcatcagatccatgctgctgctgactcggagccccacagcttg

SEQ ID NO: 164305 - DNA, 75 bp, Homo sapiens
gagagtctccgggtccctggaaagattcccaaatgctggaaaatcctctttgctaagttgtgtttctcatgcaaa

SEQ ID NO: 164306 - DNA, 98 bp, Homo sapiens
ctggctccgggtgacagccgcgcgcctcggccaggattattgcatcgagcttttagtgtcttcttattcaacaccgaaaataagcttctgctacagca

SEQ ID NO: 164307 - DNA, 101 bp, Homo sapiens
tccagtgcatccccctcccctggcagtgtgacggctgggcgacttgcgaggatgagagcgacgaagccaactgtccaggttggtgacatcgtgaaagtcac

SEQ ID NO: 164308 - DNA, 97 bp, Homo sapiens
ctccctgtatgcatggtgtggggttggtgtgattagcttcgcagtctggaaagctttaggagttcacagttcatccgtccttggctcaggatttgga

SEQ ID NO: 164309 - DNA, 83 bp, Homo sapiens
ctggaagcggctcaatgaccatggcaagaactggcgtcacgtttacaagctgcatcttcctcccgtgaggctggccgagctcc

SEQ ID NO: 164310 - DNA, 100 bp, Homo sapiens
gagttatgcccaccctccaactttgcgacggaaatgtgtcatcgaaagccaggtagtcaaaccacacactccattaataaggtttcctgacagaagagac

SEQ ID NO: 164311 - DNA, 87 bp, Homo sapiens
agctgaaaccaactcagaatgcttctgagaaggttatcaatactctggctgaccatcatcatcgtgggactgactttggtggaagtc

SEQ ID NO: 164312 - DNA, 82 bp, Homo sapiens
attaactcagtggctcaacaggctgaagggaggacagagcgggatgccaccagcttgtccaaagggaagttccaggagctcc

SEQ ID NO: 164313 - DNA, 98 bp, Homo sapiens
tccagagctgaggactgcctgtttgcagtttggaaattttagcattcaggtgccaggaatgcagatgggacagccagtgccagaaacaggcccagcta

SEQ ID NO: 164314 - DNA, 97 bp, Homo sapiens
gaggagctgtggataacgggaggtgaatttccatgtcaacatagtcctggtcccctcttgctgttggctgcacatcaggaaggctgtgatgggaatg

SEQ ID NO: 164315 - DNA, 100 bp, Homo sapiens
aagatgacagcccgcagagagttaacttctgtttacatggaactcagacatctgcaaatcatggcacgtgtggttctcaaatataggcattctgatggga

SEQ ID NO: 164316 - DNA, 75 bp, Homo sapiens
gactgaacttaaatactgatagctgatcttgcatctttaatggataaaacatttgagagaaagttgcctgttagt

SEQ ID NO: 164317 - DNA, 75 bp, Homo sapiens
ccgggaccggaaagtccgtgacttgcaagaggcagatctggaccttttgagaggccctcgggaccaaggatcacg

SEQ ID NO: 164318 - DNA, 83 bp, Homo sapiens
tgaagattctacagataaatcaggaaatctggcattttttaaagtttgcgccccacaaagaggaaatattccaaaggtactca

SEQ ID NO: 164319 - DNA, 112 bp, Homo sapiens
ctgcctcagccccctgagtagctgggattacaggcacgcgccaccactcccaggcattcctagccgagtgtgacacagtggagcagaacatctgccaggagactgagcggct

SEQ ID NO: 164320 - DNA, 80 bp, Homo sapiens
tgtttagccaacccaaattaccttaatttttgctaatccagactttacacaacctatctcagaagttgtagatgaagtaa

SEQ ID NO: 164321 - DNA, 75 bp, Homo sapiens
cttggccatcccaaagctattctgggggcaacagagatggagtctcccaggcgggaatgcaatggtgcgatctcg

SEQ ID NO: 164322 - DNA, 83 bp, Homo sapiens
ccaagaccttctcttgccaggccctgccctccgagggcttcagtctggagccgcccagagcctgttcgacatgggcggtgagt

SEQ ID NO: 164323 - DNA, 100 bp, Homo sapiens
cgacctgctaacagaactggaccttttcgcagggaatacagcagacagcccctcctcaacagacagtgcagtattcactttcacagacatcaacctccag

SEQ ID NO: 164324 - DNA, 75 bp, Homo sapiens
gcgcaaagccagcgtgaccatcgtctcagccttagatccaaggacagtccaaggaagtcctaagaccatggagtt

SEQ ID NO: 164325 - DNA, 83 bp, Homo sapiens
ggacaaccacaaggcagacatcagctcctggttcaacgaggccattgacttcataggccgagtatgaagtgaccccggatgac

SEQ ID NO: 164326 - DNA, 71 bp, Homo sapiens
cctgcgggtgcctttgaaaatcaacgacaacttgagcacaggtattagaaaactactcggatgctccaatg

SEQ ID NO: 164327 - DNA, 100 bp, Homo sapiens
cattaatgatggaaacagtgggatgacaaaggtgcttcaaaggagaatgcaggctctgcaatgccagagggaggcttgtgcaaatattctcatagattct

SEQ ID NO: 164328 - DNA, 75 bp, Homo sapiens
ctgggacccgaggctgagccaagcaggctgcatgatcattgcaatgacccttccctagacgaccccatcccccag

SEQ ID NO: 164329 - DNA, 75 bp, Homo sapiens
cttgttatttcttctttgagaaaaacctgaaagatgtctcaggatcatagacggtatttctatgtaaacgaacag

SEQ ID NO: 164330 - DNA, 102 bp, Homo sapiens
gactgcttaattgctggggaccaccaaggaaatatttatgtttttgacttacatggaaacaggtggggagcattaagcgggaaatgaccttcacatttcagt

SEQ ID NO: 164331 - DNA, 83 bp, Homo sapiens
atggcactggacaaatccaggtgaacatccaggagggcgtgatggtgggcatgggtcagaaggattcctatgtgggcgacgag

SEQ ID NO: 164332 - DNA, 132 bp, Homo sapiens
gccagcttcgataaggccaagctgaagaaaacggagacgcaggagaagaacaccctgccgaccaaagagaattaagcctgatcaagatgacaacctcccaaaagcaccgagacttcgtggcagagcccatgg

SEQ ID NO: 164333 - DNA, 75 bp, Homo sapiens
ccaaaatgtgggtcgactctgggagcatcgtaattccctatgataacataggtcccccacggcccttcaggatga

SEQ ID NO: 164334 - DNA, 99 bp, Homo sapiens
cttttcttcttgaaattaggcagactcttcaaaacgcactcattcagtttgctactagattatcgggatttcagctgccctcctctatagtgagtacag

SEQ ID NO: 164335 - DNA, 73 bp, Homo sapiens
tccgctctcattggctctgctgggttggattagtagaatctaaaatccgtgtacttgttggaaacttggaacg

SEQ ID NO: 164336 - DNA, 100 bp, Homo sapiens
gcaccgcagatgttgtcaaggtggcctaccaggaggccaggggtgtcgccatggcctatcatggtcaccatcaagcactggaagtgttggtacagtcttt

SEQ ID NO: 164337 - DNA, 60 bp, Homo sapiens
cggatctggaggagcagttgtctgatgaagagaagatcatgacaagatgtttaagatgag

SEQ ID NO: 164338 - DNA, 101 bp, Homo sapiens
agacagctgtgaagtgtgaggttctttgtctgctggcagctaggggcgacgaggcgggacgtcatggaagtgtgacagagctgaatgaacctctctccaat

SEQ ID NO: 164339 - DNA, 98 bp, Homo sapiens
tctagcagtggcagtggactcggctccggaggtggcagttaagtattgctgacagacagaacgccttggaggctgagtggaggacggtgcaggcctct

SEQ ID NO: 164340 - DNA, 100 bp, Homo sapiens
agattattgagatggcctgtctgataactgactctgatctcaacattttggctgaagctggagacacagcacttcacgttgctgctgccctaaatcacaa

SEQ ID NO: 164341 - DNA, 90 bp, Homo sapiens
cgcggctcatgcgcggtgcacagaggcttgtttcacatctgtaacaacagggtctccaactgaattccttgaagagaaaatggcctacca

SEQ ID NO: 164342 - DNA, 75 bp, Homo sapiens
agcggcaacgccggtggctcggggccccgcggaaaaggaataggaggccttcaagattttgtgctgaaatctgca

SEQ ID NO: 164343 - DNA, 83 bp, Homo sapiens
ctcgagcagcgacaacccgtcctctcccgagtttttcatgcctttccatgggtaaggagaaggcacttagcctccagatgatg

SEQ ID NO: 164344 - DNA, 100 bp, Homo sapiens
tgacaaagtgcgcattttcttattaggactggctgataacgaagcagctattgtccaggacatgtattcctctgagaaaccttggacagcagattttggt

SEQ ID NO: 164345 - DNA, 107 bp, Homo sapiens
gggaaatcctggtgtctgagcgggacatcagagcccttatcccactggccaaggctgaaaaatcatcagtactaaagtcaaaagaggaaagccatgaacagtcagca

SEQ ID NO: 164346 - DNA, 75 bp, Homo sapiens
gctgcttccctgttgctggagatcctgggcctcctgtgcaaaagcatggtaactgccagtttctgtggctgaatt

SEQ ID NO: 164347 - DNA, 74 bp, Homo sapiens
tttgtagcctattggaggaaaacacaccaaggtacaacaaataacactgtgactccaacctcacaacctgtgcg

SEQ ID NO: 164348 - DNA, 100 bp, Homo sapiens
gcagcacgggatcccagcctcaggcctgcacggacggtgttggttgggcaattctgtggtgttcttggtcacacatttatggagtttctgaagggcagtg

SEQ ID NO: 164349 - DNA, 96 bp, Homo sapiens
ccggtgcagaagaacatcctggcggcggccagcccgtacatcagagaagatggcgaattagaagatggtgaaatagacgatgcaggatttgaagaa

SEQ ID NO: 164350 - DNA, 83 bp, Homo sapiens
ctctaaccctacagcgcaggaagatcggccgccgcggccagacgctgagcagcgagctgtcccaggcccgagatgagaataag

SEQ ID NO: 164351 - DNA, 82 bp, Homo sapiens
tgggatagtcttggagaggagcaaaaacaggttccagttacagccatcccttgtcataacttttgaactgtatttggaaaaa

SEQ ID NO: 164352 - DNA, 90 bp, Homo sapiens
gccaggcgtacggtgccaagggattcagcctggcggacatcccctaccaggagatcgcaggcctcatgcattgtgcgtcagcagcaatgt

SEQ ID NO: 164353 - DNA, 98 bp, Homo sapiens
tggaagaactcgtcatgctctttgtagcgtggtgcttctgttgctcacagatacctcggatctgcattttcaagtgagcaaagaccgctatggagggc

SEQ ID NO: 164354 - DNA, 100 bp, Homo sapiens
cacatatttacctgaatcacatcgagccactgaaaattcaggaattgaatgatctggcacgggaccctccagcacagtgttcagcaggtcctgttggaga

SEQ ID NO: 164355 - DNA, 74 bp, Homo sapiens
cctgcgagggttgaagattgtgaagcaatagcctaagcaggctctccccggaggctcagccccctctgctcccc

SEQ ID NO: 164356 - DNA, 88 bp, Homo sapiens
cgggacccggtgtctgctcctgtcgccttcgcctcctaatccctagccactatggcaccatgactcctgtgaggatgcagcactccct

SEQ ID NO: 164357 - DNA, 90 bp, Homo sapiens
catctatcagcaggctccgggctgaagattgcttctcttctctcctccaagtctgcgctcctcagaccaccggcaggtgaacagcctgat

SEQ ID NO: 164358 - DNA, 75 bp, Homo sapiens
aggaggaacatgactgtttcttggaagagtattgcctaagtgtaatcttgaacatgggcggtgctgtgagtgctg

SEQ ID NO: 164359 - DNA, 100 bp, Homo sapiens
gattccgcttcttgcatgaaactggaggagcaatggtgtatgggagaagatgtcaaccggacactagaaggtggaaggaaacctcttcattatgcagcag

SEQ ID NO: 164360 - DNA, 50 bp, Homo sapiens
cagatatttgagcatgtgttcctggtggggtggaagacaacccgtgagta

SEQ ID NO: 164361 - DNA, 101 bp, Homo sapiens
gcaccgacctcgacgtcttgcctgtgtcccacttgttcgcggcctatagaacccagtgacttgattgtaaaaatttacagagcggaatcatatgctggtct

SEQ ID NO: 164362 - DNA, 80 bp, Homo sapiens
caacgtgggctcgctcttcgacgaccctgtgggccaaagctgaccaactcccccaccgtcatcgtcatggtgggcctccc

SEQ ID NO: 164363 - DNA, 99 bp, Homo sapiens
cttcaaggagcacaagtagctgctcttccaagcaaggaagtcgacagagctacagagacttctgaagtggagagtctgcgacctcctcggttcttcaat

SEQ ID NO: 164364 - DNA, 100 bp, Homo sapiens
gcgcctcgtcgacatgagtgatgtggaggaaaacaacttcgagggcagaatgtaggtgcaaaaaactacagacatctctgtgctgtttattacaacaaga

SEQ ID NO: 164365 - DNA, 82 bp, Homo sapiens
gtagtctacacaggacctgagaatctgagaaactgcaggctctgcagaacattgctgccatcagcctggccatcaactaccc

SEQ ID NO: 164366 - DNA, 75 bp, Homo sapiens
tacccgacacttacatgccatggccttctacgttgtgaaaatggatcagttccatgacaagaccccttatacgat

SEQ ID NO: 164367 - DNA, 75 bp, Homo sapiens
aatcgcatttatggattctatgatgaatgtgtctgtttcatgtggaatacctgacttcaggtcaagggatggtat

SEQ ID NO: 164368 - DNA, 100 bp, Homo sapiens
acaggagcattaccacctcagccaccctgaccactatcatcaccatggaaaaagtgacttgagcaggttacgtcgctggatttgtagacttggaggtgag

SEQ ID NO: 164369 - DNA, 82 bp, Homo sapiens
tctgtcttcggtggactccttcggcagtccacccaccgccgccgcctcccagctgaataccactagaaacatacctgtaacc

SEQ ID NO: 164370 - DNA, 75 bp, Homo sapiens
gctatggtgaaacaccactgaagcattgccaagcctcgctcaaggagcacccccggggcaccctcctgtccgatg

SEQ ID NO: 164371 - DNA, 101 bp, Homo sapiens
ggtcccaatcccccactctttccgccctaatggaggtctccagtttcggtcagttcaccgggacctggaggcccagattgcgatcgtgacggagaaccagg

SEQ ID NO: 164372 - DNA, 101 bp, Homo sapiens
gggaacagtggatgtccaaagtcgtcactttccacaaactgaaactcaccaacaacatttcagacaaacatggatttgccctcaagagtattgagtatctg

SEQ ID NO: 164373 - DNA, 85 bp, Homo sapiens
gaattggaagctaaagctaccaaagacgtagaaagaaatcttagcagagtcaagggtccagagaaggaggagaagttgagacagg

SEQ ID NO: 164374 - DNA, 100 bp, Homo sapiens
ggggacgtcacatgtcattataccttcacccagcatttcatccctcgtcgaaaggattggattggcatctttagatttggggattctcagcagttgcggc

SEQ ID NO: 164375 - DNA, 76 bp, Homo sapiens
ggtgttggaaagcactatggtgtgctcctacagaagaagggaaaaaagagctgctgttcctaagtaacgcgaaccc

SEQ ID NO: 164376 - DNA, 100 bp, Homo sapiens
cccgtgagcaagcataagctgccaaaccaaggtgtgatgaatgcagactctgctaccattttggctgtttggatcctcctttgaaaaagtctcctaaaca

SEQ ID NO: 164377 - DNA, 50 bp, Homo sapiens
gcagctccacactgtgaactaattgccattgccccaaatggagccttaca

SEQ ID NO: 164378 - DNA, 100 bp, Homo sapiens
ctcccaaggtgctgggattacagccccggtttctctggattctgtgcttctccatggaggaaactcaaggagaactgacaagttcttgtggttctaaaac

SEQ ID NO: 164379 - DNA, 80 bp, Homo sapiens
ggcttctgggccatctcgcatattctcaacggctgtttagctgtgcctcccagtgactataatgacaaggaagctgtaaa

SEQ ID NO: 164380 - DNA, 100 bp, Homo sapiens
cggacagctcggacagcgcccagggccggagcccgagcccttggagagatccgtgctcagctcacagagcagatgaaatgcctggaccagcagtgtgagc

SEQ ID NO: 164381 - DNA, 74 bp, Homo sapiens
tggcgccctacagcctactggtgactcggctgcaggtgctggagaatctggtaaaagcaccattgtgaagcaga

SEQ ID NO: 164382 - DNA, 100 bp, Homo sapiens
caagcctctcagcttcggagaatggagtcttccatcaatcatatctcacaggaaaatagggatgctgataataccttgctcagggggttgtccaaagctg

SEQ ID NO: 164383 - DNA, 90 bp, Homo sapiens
tggaagtccaagtcaaacgcagaaggactgcctcactgagcaaccaagaataacatagatcatcagtagaaaacttcttgaagttgttca

SEQ ID NO: 164384 - DNA, 74 bp, Homo sapiens
gaaaactttgcatcctgcagtccatgctggaagaagaatttggtgttgatgattcttattctgaacaaggagca

SEQ ID NO: 164385 - DNA, 83 bp, Homo sapiens
cgccgcctggcaggccctgcgcaccagggtcgggtgtgctgacagccggctgttaagccctgcctgccccgcgccaaaggaag

SEQ ID NO: 164386 - DNA, 75 bp, Homo sapiens
tcggcccctggctcctgctcctgggcccaggaagtacacgagaagctccgaggatggctgaagtccaacgtctct

SEQ ID NO: 164387 - DNA, 100 bp, Homo sapiens
atcgatgaaattctaccctctaagaaaatgaaagttggactcttccaccgcccttgagtggggaacatccaggccttcacactcacgctcagcccatcac

SEQ ID NO: 164388 - DNA, 82 bp, Homo sapiens
agaaatcctgttcaccttgaccagaatgaccctcgtttcattggaaactggaactgtggctgcaccatctgtcttcatcttc

SEQ ID NO: 164389 - DNA, 90 bp, Homo sapiens
gccggaagcgcggagggagccgcgggatggaccgcagctggtgagcctggccagtgaagtccaggacctgcatctggcccagaggaagga

SEQ ID NO: 164390 - DNA, 95 bp, Homo sapiens
ggccctggaggcagcagagcgagccttgcaggaagacggaagaaagtgccgggaagaaagaaaaccccgtccggaccatccgcaaaaagtaagag

SEQ ID NO: 164391 - DNA, 100 bp, Homo sapiens
agcagaggacattctagagaaagtctcgcccaagaacttcaaggtgaaaatgatcatgaagacatcagttctgctcagctgggagttccctgacaactac

SEQ ID NO: 164392 - DNA, 83 bp, Homo sapiens
cgcgcttctgcaatccaagccgactgatgactggagaggatggctactatttcaccaatctgatggagtttcgctcttgtcac

SEQ ID NO: 164393 - DNA, 90 bp, Homo sapiens
ggagaagagccatggatatcagagggagaaatccaacgacctttctatccagtactaaggctcgtacgtctgcatcgattatcttacgtg

SEQ ID NO: 164394 - DNA, 98 bp, Homo sapiens
agggcgaagacgccttcccacctagctctcctctctttgcagagccatacaaagtttcatcaggtactcacaggttgactgcagaggagaggaaccaa

SEQ ID NO: 164395 - DNA, 131 bp, Homo sapiens
agctgccacctctacctgtggctgttcctcctgctgctgcccctggccctgcacctgatctttaatctcatgaagtacgacagctacagccgcttcttaaagtctgacttgtttttaaaacacaagcgaac

SEQ ID NO: 164396 - DNA, 100 bp, Homo sapiens
tatcatggtacttacatttttgtgggctggataataaacaaggttggcaaaagcagcttttgatgatgcaattgcagaactggatacgctgagtgaagaa

SEQ ID NO: 164397 - DNA, 73 bp, Homo sapiens
ttgggtcggagaagccgtcaaggatgatgactttgagttcactggcagccacctgacagtaaggaatggctac

SEQ ID NO: 164398 - DNA, 100 bp, Homo sapiens
gaagggaaggcgcgagtgaggaaaggaggtactgtaggttgcttcatgtgcgaaatggaaactgcaaatatcatttgggtgaagaaacatttaaattagc

SEQ ID NO: 164399 - DNA, 100 bp, Homo sapiens
ctatgatagaaagaagcaactcaagttgcaaggatattcctcatgtatcatgcaaggatattcctcatatatcatattttgtggaagtataatactttgt

SEQ ID NO: 164400 - DNA, 98 bp, Homo sapiens
gtggcggtgacgacaggcagcaaaagaccagtgactactccagtgattactctgactggacagcagatgcaggaattaatctgcagccaccaaagaaa

SEQ ID NO: 164401 - DNA, 75 bp, Homo sapiens
tacacctccttccaggagctcgtagatattgatatgctggaggaatttgcctacttgagaactcaggaaggtggg

SEQ ID NO: 164402 - DNA, 75 bp, Homo sapiens
cactgagccccagttcattattccttcatggatgggcgtgttttgggcgtgctagaggtgtcacgctccattggg

SEQ ID NO: 164403 - DNA, 82 bp, Homo sapiens
cgattggcatcgatctctccatcccttccgaggcccgacttcggcattatattgtacttctagcaagtgcaccaacagaaaa

SEQ ID NO: 164404 - DNA, 83 bp, Homo sapiens
gtgaaaaataccacgacaaaaccaccctagtatctcgggggagctttgtgccttgatggatcaagttcatcatatgcagcact

SEQ ID NO: 164405 - DNA, 100 bp, Homo sapiens
gggaaacagaagcttactttgctgacctgataatgaagaattattttgcaccactggatgttgtttactggtttgatattaaactgctctcagaattttc

SEQ ID NO: 164406 - DNA, 74 bp, Homo sapiens
tgcaaaagctggatacaatgtaaagcaggaggaattaattccaatgagtgtgaaaatgtatcaagaaaaaagaa

SEQ ID NO: 164407 - DNA, 75 bp, Homo sapiens
aacgtgttggaccttccggagcttctcagaagacagagggttttcttttgagggaagaatgacatctttggggag

SEQ ID NO: 164408 - DNA, 100 bp, Homo sapiens
actgttcaatgcaacaaggcaagaaaaaggattcctgcatgttgatgtgaggtacaaacgccattaaagaaatctacaactgaaccaggaatgaagaacg

SEQ ID NO: 164409 - DNA, 100 bp, Homo sapiens
gagaacaatgataaagaagaagaagagaagaaagatgaaacttcgagctcctctgctcatttaagaaaaactactgaatatgacagcatcagcccaaacc

SEQ ID NO: 164410 - DNA, 95 bp, Homo sapiens
agatccgcgaggtggcgtccggcgctgccaggatccgcggggagaccttgggcatcatcggacttggctgaacaagctccaaacacttgtgaatg

SEQ ID NO: 164411 - DNA, 75 bp, Homo sapiens
cgggcgtgagcggaaatgaggaggagatggtggaggaggctgaagatgcggtgacctgccagcacctgccgcagc

SEQ ID NO: 164412 - DNA, 80 bp, Homo sapiens
gtgtctggctctggaattgctactgctgcctctgtcactcctggtgaccagcattcaagagcacctgtcaaagcctaaag

SEQ ID NO: 164413 - DNA, 90 bp, Homo sapiens
gtacgccctcatggggaaaatctccccggtgactttcagatagagccacgaaccccctgaacaaggagctcgactgggccagcatcaacg

SEQ ID NO: 164414 - DNA, 83 bp, Homo sapiens
cagagatcctgagagcccgagcgcccagcgccgcgccgggaggctgaccccgcactacatctacccaccagccatcgtgcagc

SEQ ID NO: 164415 - DNA, 101 bp, Homo sapiens
gcatggcactctggcgggcataccagcgggccctggccgctcacccgtggaaagtacaggtcctgacagctggatgatcacggacgtgcagctcgccatct

SEQ ID NO: 164416 - DNA, 75 bp, Homo sapiens
aaacttggcaaatgaagccaacatatcaactcttcttcgagaatttcaggctatggagttactagtagagaaagc

SEQ ID NO: 164417 - DNA, 100 bp, Homo sapiens
cgccagctcctggctggagccagccggcaccaaatgtccagctcgccgctgtccaagaaacgtcgcgtgtccgggcctgatccaaagccgggttctaact

SEQ ID NO: 164418 - DNA, 98 bp, Homo sapiens
ctgctgcaggaggccaaggacggcgttctggatctcaaagcggattgaaagaaggtggcaagaggaagaagcagaagcagagagaggagtcgaagaag

SEQ ID NO: 164419 - DNA, 100 bp, Homo sapiens
ttcatggccccactgaacatatctacaaaactgaggaggaggagaggaaggcccgcgaggagcaggcccagcgggagcatgaggagtacctgaaactgaa

SEQ ID NO: 164420 - DNA, 98 bp, Homo sapiens
cgtgtccctggcattttaggtgtcggttgggtaggcagtcagatctcttggtgaagttgaatcgactcatggaaagatgtctaagaaattcgaagtgt

SEQ ID NO: 164421 - DNA, 88 bp, Homo sapiens
gacagagacaacaccgagtatgagaagtcgcctggtcggcgctctggatgcagtgttggattccaatgcacgggtcgctccatttcga

SEQ ID NO: 164422 - DNA, 50 bp, Homo sapiens
ctcctactgtcccacggccaccgaagaggaaacccagcgtttgctggcag

SEQ ID NO: 164423 - DNA, 88 bp, Homo sapiens
tcttccacccttggccacctccccaggtgatgcctgaagctcaagggactgtgtccaccctcaggactggactcgggccatatccgtg

SEQ ID NO: 164424 - DNA, 75 bp, Homo sapiens
cattaccgtcatattccacccattactaaggtttccctaggacttctgcatgcccatgccacacatatcctgtgg

SEQ ID NO: 164425 - DNA, 97 bp, Homo sapiens
tgctgctgctggattcagtgtgggagagtttgcagccctagtgtttgccggagccatggaatttgctgaagattttggaaccagtactagcagtgga

SEQ ID NO: 164426 - DNA, 75 bp, Homo sapiens
tctctcttcaccctgccgtcatgtctaagtcagaggccagtccctgagacgaataggaccttgtccctggatgag

SEQ ID NO: 164427 - DNA, 100 bp, Homo sapiens
atttacttaacacatcatgaaggctagtttggatgtggaggggaatagactccatctatccatatgaggcctcatgcattgtgcgtcagcagcaatgttt

SEQ ID NO: 164428 - DNA, 100 bp, Homo sapiens
aatgtcatgcctctgaaaatgaagttatctgactggatcaagattggagatctgacttccaaaaattgtcatctttttgtaaaccttcaatcaaaaggct

SEQ ID NO: 164429 - DNA, 100 bp, Homo sapiens
cttcagctgccgcggtcgctccgagcggcgggccgcagagaaagccaaacttggccctgctggcaacaaagtcatcagtccctctgaagacaggaaacaa

SEQ ID NO: 164430 - DNA, 75 bp, Homo sapiens
gccatggagcccgactcggtgattgaggacaagaccatcgagctcatgggttttgctctgttgctcaggctggag

SEQ ID NO: 164431 - DNA, 100 bp, Homo sapiens
aaggcgacgaaccttggagagaggagaacgaacatcttctggacctttgtccagtatcctagaaggaaaacatcaccatggctacagaaattggttctcc

SEQ ID NO: 164432 - DNA, 95 bp, Homo sapiens
ccaaatgcaccagcacagaagtggaattgaatctgctctaaaggagaccaaggtttgtgttgctagttaagctagcttgtattgttgtggcttcc

SEQ ID NO: 164433 - DNA, 100 bp, Homo sapiens
tgcagacactgttgaactctgtggtgcgcttaaggttctgagatgcagtaaaatcgctggtgtgaaagtagcagaaattacagagctaatattgaaagct

SEQ ID NO: 164434 - DNA, 75 bp, Homo sapiens
gaagcagcgcctgttcccggggcagatccaggttcagagcccgcggagctgagcagcggggagacggaagagtta

SEQ ID NO: 164435 - DNA, 100 bp, Homo sapiens
gagctcaaagatttggtttgaatgtctcttcaatctccagaaagagtgaagttcccagaccctacgccccgctgtcaggcagcccgccgatcagatggag

SEQ ID NO: 164436 - DNA, 96 bp, Homo sapiens
cctctttgaggcctctgacctgtctcgggaaacctccatctggaaggatatccaatatgccacaagtgaggaagagctgcgcaaaggtggagaccc

SEQ ID NO: 164437 - DNA, 50 bp, Homo sapiens
gaaactccagcgtgtctccagccgtgccattgagacccagagcagcagtt

SEQ ID NO: 164438 - DNA, 100 bp, Homo sapiens
tctccagccggccccccacctccccccggagccaggctggtttcggaaatgcccttacagcagcaggtactaggttttgacaagcttgcatcatgcgtga

SEQ ID NO: 164439 - DNA, 75 bp, Homo sapiens
tcaaaatcacagtggatgggccccgagaacctcgaagaattgcttacttaggaggtgtgtgcagtgctaagagga

SEQ ID NO: 164440 - DNA, 50 bp, Homo sapiens
cccttatccctccagtcacctttgagagtaaaggtgggattctatccaaa

SEQ ID NO: 164441 - DNA, 74 bp, Homo sapiens
ttttcctcagaactactatattcagtggctaaatggctccctgattcatgtggttcagcactgagtcatgcttg

SEQ ID NO: 164442 - DNA, 75 bp, Homo sapiens
ccgaggccaagtactaccgcaccctggaggacattgagaagataacaggcccctggcgcagcctatggattcgat

SEQ ID NO: 164443 - DNA, 75 bp, Homo sapiens
aagtacgcaggccacgtgggctcagattatcccgaaggcaataattcaagtgattatcttgttcaaacaacaacg

SEQ ID NO: 164444 - DNA, 51 bp, Homo sapiens
gtggcatgtcgatttgtccttcactacaggcaggatacgtatgtgtccaca

SEQ ID NO: 164445 - DNA, 88 bp, Homo sapiens
cacctgttgcctatccagaagaaaatacactactcatcaaggaagaaccaggagccaagccgccatggcctaccacagcttcctggtg

SEQ ID NO: 164446 - DNA, 98 bp, Homo sapiens
aagcgcagggggacggggaccagcagctgtcgccgccgctctcaggtgaggcaggcgactaatcagattgtgatgaattgtgctgatattgatattat

SEQ ID NO: 164447 - DNA, 83 bp, Homo sapiens
gtggtgagtaggtccaatcgactggaagaattggtgttggaaaatgctggacttagaacgggatgccaacagacagatcagcg

SEQ ID NO: 164448 - DNA, 75 bp, Homo sapiens
ggtgtatcaagtaatggtgcaaagcctgaaacctacctggtggttctgtgccttcccctactctcttctcatctt

SEQ ID NO: 164449 - DNA, 94 bp, Homo sapiens
cgaaggtgaagagttgtcccagctcggcccgcgggggagccccgggagccgcacggttgaaatcacaaagattagacacctttttagataggtg

SEQ ID NO: 164450 - DNA, 75 bp, Homo sapiens
agtgaacattcctcaagatgctaatgtggtcttcaaaagagcagaagagctatttgtcgtagatgtccagacaag

SEQ ID NO: 164451 - DNA, 90 bp, Homo sapiens
cggtcggccgccaccaggtcaccctggaagagtcgctggccgaagactaatagggatgccaaaggaaaaatatgatcctccagatcctcg

SEQ ID NO: 164452 - DNA, 82 bp, Homo sapiens
cccccggaggaggatgggctgcagacacagcaggctgagcagctgcaaacccccgaaaaagtgttgctaacaaccacaagca

SEQ ID NO: 164453 - DNA, 89 bp, Homo sapiens
gcttcattcagctcagcaccaccttggagactctccaacatgtgccttctgaccatacaaatgaaacttccaacagtactgtgaaacca

SEQ ID NO: 164454 - DNA, 101 bp, Homo sapiens
agcgcgccgggcgaggacgaggagtgcggccgggtccgggacttcgtcgccaagctggccaacaacacgcaccaggattggccatttgatgatggagctcc

SEQ ID NO: 164455 - DNA, 75 bp, Homo sapiens
ggtggaccagaacttttggaactagtgccggcggctctccaccccccagggagaatgaagttgaagaggtaaaag

SEQ ID NO: 164456 - DNA, 100 bp, Homo sapiens
ccacaggcactgtggccactgccagcactggggtggcagcctgccacatcgggggcaccaccctccatgcctttgcagttgtatcacggactgattcacc

SEQ ID NO: 164457 - DNA, 100 bp, Homo sapiens
tctaggagacgagagagcgaacgccagggaccctgtgcaggcctgctcctccgtttgcaaggaattgtcttagaagaaagaaggcaagccaccattttac

SEQ ID NO: 164458 - DNA, 90 bp, Homo sapiens
ctaatcctgaggacttcatccggtcaccatctacctattcttcaaatgtgttcagactgcatcacagtgcttccgatacaagcgacaaaa

SEQ ID NO: 164459 - DNA, 98 bp, Homo sapiens
tccggcttcagataacccctacctacaactttctcaggaagaagaagacttggaaatggagtccgtatgtgattcagcactgccagcgagtcaaaccc

SEQ ID NO: 164460 - DNA, 50 bp, Homo sapiens
caggaaattgctgactctgtaaaggagatctgaatctcaatgtggtagca

SEQ ID NO: 164461 - DNA, 101 bp, Homo sapiens
gagagcttgggagactgagacaacaggtacccagactcatggtatcgtgatatcacatccaacaagaagttcttttcccttgctgcaacctacagaggtgc

SEQ ID NO: 164462 - DNA, 48 bp, Homo sapiens
tcctccacctcgggagccccaggaattgaatgatctggcacgggaccc

SEQ ID NO: 164463 - DNA, 50 bp, Homo sapiens
atgaaattttggaagagtcagcagaaggccattggctgtggtattgtaga

SEQ ID NO: 164464 - DNA, 100 bp, Homo sapiens
aatcaaatagtgttacggcaacaaggtattagaaaactactcggatgctccaatgacaccaaaacagattctgcaggtcatagaggcagaaggactaaag

SEQ ID NO: 164465 - DNA, 100 bp, Homo sapiens
agctggcagtagcgccctgtaggacccccaggacccgatgaatcaggaaacccaggcccaacggcaggtggatgcaagaagaaatgttccccaaaacgac

SEQ ID NO: 164466 - DNA, 90 bp, Homo sapiens
tccgaaccctgaggcagtgtgtgaagctgggacgccagccatgttccagaccgcttggcgccagaagagatcgtcgcgcatgccagcaac

SEQ ID NO: 164467 - DNA, 75 bp, Homo sapiens
gactgaaaaaatgtggcagcgcctgaaaggaatgtttcctcaagcatctgcttcctacatattactacaatttgc

SEQ ID NO: 164468 - DNA, 51 bp, Homo sapiens
cgcgcctttgtgcgcgcgccgaggcttggcttggactcatcgtcaacagca

SEQ ID NO: 164469 - DNA, 50 bp, Homo sapiens
ctttgttggtgttggaccgttcggatcggcggccctttcattttccattg

SEQ ID NO: 164470 - DNA, 50 bp, Homo sapiens
tggagttgtacttaaatgcagacacaagttcctggtccagaactttacac

SEQ ID NO: 164471 - DNA, 83 bp, Homo sapiens
cgcggcgcgcgccaagatcgccgccaacctgcagtggatctgcgccaaggcctacggccgagacaatgcagatcttcgtgaag

SEQ ID NO: 164472 - DNA, 82 bp, Homo sapiens
agaagttaaaaacaaccaaacaaaagccaggttgaggcctctagaagtccattggaatattaagcccaggagttgctttggg

SEQ ID NO: 164473 - DNA, 82 bp, Homo sapiens
cctggaggcttatctgaccacaggtgaagctgagacccgcgtccccactatgagagtcaatgcatgtgttgatgtggtgctc

SEQ ID NO: 164474 - DNA, 100 bp, Homo sapiens
tgctgaggaccattgggaagggcaactttgccaaagtcaagctggctcggcacatcctcactggtcgggaggatctaccatacccattgactaactatgg

SEQ ID NO: 164475 - DNA, 82 bp, Homo sapiens
aggaggcgagctagccgggagttacaccgccaccgccagtgccgcagaatggaattcggcattgttcctacacagcttctcg

SEQ ID NO: 164476 - DNA, 96 bp, Homo sapiens
ggaaatgtcatccgatggcacaatcagcttcgcctcaacagcatcaagaagctgtccaccatcgccttggcccttggggttgaaaggacccgaagt

SEQ ID NO: 164477 - DNA, 118 bp, Homo sapiens
gcgtggtaccagtgccgctgggcacactggcttcacgccggctccgcctcaccagcaagcgcattcccaggtttatcaccagatcttcaatctatggagcagattcggcgaattatgc

SEQ ID NO: 164478 - DNA, 82 bp, Homo sapiens
tggaggagaatcaagagctccgaggaggatacgaagcgttttcggcttcctgcccggagctgtgcagcaaacagtcgacccc

SEQ ID NO: 164479 - DNA, 96 bp, Homo sapiens
tcctcattcttattgttttattagggcaatttgtctcaataaaagcccaggaagaagacgaggatggcagttatttggcagaaaagcagagtatca

SEQ ID NO: 164480 - DNA, 75 bp, Homo sapiens
ctcttggtttgcgtcctgcactgaaaggaaatgacggattttgcagtcgatgatgtgaagaaaggttacatcaaa

SEQ ID NO: 164481 - DNA, 100 bp, Homo sapiens
agccgcccggccaagctatcttctcgctagcagctgagcttcagtcattgtctattcctggaacttaccaagagaagatcacccacctgggacattctct

SEQ ID NO: 164482 - DNA, 107 bp, Homo sapiens
gagaaatgagatgatagccaaaccctcaggccaggagtggtggctcacacctgtaatcccagctctgggaggccaaggccagtggattgcttgagcccaggagtttg

SEQ ID NO: 164483 - DNA, 98 bp, Homo sapiens
tggccccgagtccagttatccccagattaactctccgagtcggtgctggccaagacaagattagactctttgtgaagaaacgagccagtgactgaaac

SEQ ID NO: 164484 - DNA, 75 bp, Homo sapiens
tcagtaaaaaggagctcaactccaaccacgacggggccgacgagacctcagaccatggtgaatccgggcagcagc

SEQ ID NO: 164485 - DNA, 50 bp, Homo sapiens
ctcaccgcaacctccacctcccagatggaatcttgctctgttgcccaggc

SEQ ID NO: 164486 - DNA, 96 bp, Homo sapiens
gtctggatgtgtagaagacaagacaatcagtgaccaggaatcctttagggaagttattatattatgcctggtgatcctgatctgcttcagtgcctc

SEQ ID NO: 164487 - DNA, 100 bp, Homo sapiens
tgatattgaagcaatgcttgaggctccttacaagaaggtcttatcgaatgttacttagcctccaacagtattcgagaagcaatggtaatggctaacaacg

SEQ ID NO: 164488 - DNA, 82 bp, Homo sapiens
ctcccttgtcagcacaacctgtgtaggaaatgtgccagtgatattttccagagaccatggcgagcccagggaaagacaatta

SEQ ID NO: 164489 - DNA, 97 bp, Homo sapiens
gaaatagcgcggctgtgcaagtacctgccagagaacgacctgaagtgatcagcctttgagcctttcccacattgaagatggtgaaactagatattca

SEQ ID NO: 164490 - DNA, 98 bp, Homo sapiens
gatttccgggagaggctgctgtggaggctgaggaggcggcggcggagatctggtggtattcatgggtagtttgaaatatccagatgagaatggatttg

SEQ ID NO: 164491 - DNA, 100 bp, Homo sapiens
tgccgtgcgccgcagcccgggcccaggccccggcagcgcctgggacaaggtcccaaaggcaagcagttagaaggaactgaatgtccactccatgttgttc

SEQ ID NO: 164492 - DNA, 100 bp, Homo sapiens
atgataccagcaactggtctattatatcatttaaaccacatggctatctaaagaggtgaagagatggcgtttgtgaagagtggctggttgctgcgacaga

SEQ ID NO: 164493 - DNA, 100 bp, Homo sapiens
caacaagatggacttggcggatcttacagagcagcaggtgcgggcggcacccagagactcacccgtgctgttgggaagtcgctggcgatggagatggtcc

SEQ ID NO: 164494 - DNA, 101 bp, Homo sapiens
agaaaaagaagaattcagatgatgctccatggagtcctaaagaataatccagaatggctactctgatctatgttgataaggaaaatggagaaccaggcacc

SEQ ID NO: 164495 - DNA, 50 bp, Homo sapiens
ctggataatgagcaggcacacaggtactccaaagattcaggtttactcac

SEQ ID NO: 164496 - DNA, 100 bp, Homo sapiens
ggctcggtttggctgactggggagtcggcaggcggcaggtgtctgacttccagcaactgctggcctgtgccagggtgcaagctgagcactggagtggagt

SEQ ID NO: 164497 - DNA, 99 bp, Homo sapiens
ctggcgctctggccggtcagcaagcagctctaccgccgcctcaactgccgcctcgcctactcactctggagccggtgataaaagaaaatgtggctgaag

SEQ ID NO: 164498 - DNA, 126 bp, Homo sapiens
ctttttggatcggcatctagtctttccgcttcttgaatttctctctgtaaaggaggtagtgtcagtggctgagtatcaccgcaggatcgatgctctaaatactgaagaactgcgcacactctgcag

SEQ ID NO: 164499 - DNA, 83 bp, Homo sapiens
gaggaaacacctcaggacacggcctacaacaccaagaggttgtgaccgagattcccgacgagagagactgaggggaagagagg

SEQ ID NO: 164500 - DNA, 90 bp, Homo sapiens
cggcggccgcggcggctgctgctgctgcagtgggacaggtggcggcgaccggcggcgtccgaggagcaaagtggaagatgctttctacaa

SEQ ID NO: 164501 - DNA, 95 bp, Homo sapiens
ctctacctcatccgtaggtgtggccctgatggtgtggcaggctctggactcctaaagctctggagcgtcccggcccaggcccctgagctggaggg

SEQ ID NO: 164502 - DNA, 83 bp, Homo sapiens
ccgagatcgtgagttgtgggtgcagcgactgaaggaggaatatcagtcccttatccgggaccatcagcacgtgcccatcgaca

SEQ ID NO: 164503 - DNA, 100 bp, Homo sapiens
tataactatgaatttgcacagatggaagttatcatgaaaaccctgaatagtaatgcttctaaccgaaaatcttcagttggcgtaaaaaagaatagcaaga

SEQ ID NO: 164504 - DNA, 111 bp, Homo sapiens
agccaatcagtgcagaccttaaaagatttcgcaaggaatatgtccaaccagtacaacttagggagaggaaattcgatgtcagtatgttgtgacatgtgcaggactttactc

SEQ ID NO: 164505 - DNA, 75 bp, Homo sapiens
tatgattatgctgggaaaaacaaagttccagagctacaaaagtttttccagcttccttggaaatcattgactagc

SEQ ID NO: 164506 - DNA, 78 bp, Homo sapiens
ttcacagtctaccatgaattggaagagttgctggagaatgtaaccctaatccataaaccagtgtcgttgcaaccccgt

SEQ ID NO: 164507 - DNA, 100 bp, Homo sapiens
tttgagccgcctgagcgactaactcctgcgcccctgagggaattttctacttctggtcatgcttacactgatacagggaaagcatcaggcaacctagaaa

SEQ ID NO: 164508 - DNA, 83 bp, Homo sapiens
ggacgaagatggggagaaggaagcgagactcatacgcaacctcaatggctggacggcagtctggaaacgaccaatgagatctt

SEQ ID NO: 164509 - DNA, 75 bp, Homo sapiens
gcaatggtctcaatctctggaaaaacttcttgccaaccaaacaggaacgaatgcaggaatttgggaactgagctg

SEQ ID NO: 164510 - DNA, 100 bp, Homo sapiens
ggcggcggcggcgagcggttccttgtgggctaggaggaaacaccaattggaagcctccgctcaactgtaagatttataactacctgaacaggattggatg

SEQ ID NO: 164511 - DNA, 98 bp, Homo sapiens
cccacttgcatcaagctgggcatccagggctcgtacttctgctcgcagtggtagtcgctcttctaaaacttttaaaccaaagaagaacattccagagg

SEQ ID NO: 164512 - DNA, 73 bp, Homo sapiens
tcgagtctacctggatgaaaactacaaatcccaggagcacttcacgagtgcctggtgaagaatgtgatgggat

SEQ ID NO: 164513 - DNA, 51 bp, Homo sapiens
cgacaacagcctggcgtccgccacgcataaagccaaggtagaagcaatgac

SEQ ID NO: 164514 - DNA, 74 bp, Homo sapiens
gaagatgctaattaaagtgaagaacctggagctggttgaaaaaggcttcagtaacttgaagaaacaaattgaaa

SEQ ID NO: 164515 - DNA, 90 bp, Homo sapiens
gttggtgaagaccttggactctcaaactcgtacctttattgtgggggcccagatcccaccagccagcaagctaaagcatggcggccatcc

SEQ ID NO: 164516 - DNA, 75 bp, Homo sapiens
ctgcctgggagaatgttgactctactgcagacgaaagtaggcggtacgaaccctaatggaggcagttttgaggag

SEQ ID NO: 164517 - DNA, 75 bp, Homo sapiens
gaaaaagcagctgaaaggagtcgaaagactgaaactgttgaggagcccatggaggaagaagaagcagccaaagaa

SEQ ID NO: 164518 - DNA, 82 bp, Homo sapiens
ggtggcttacagacgctgccagcatcgccgccgccaggaacccaagacagaccaggatgaggagcattgccggaaagtcaac

SEQ ID NO: 164519 - DNA, 92 bp, Homo sapiens
agatccaaaaaatgagacttctagcaaagattatttgccttatgttatgggctatttgtgtagcagaagcaacattttgtgattttccaaaa

SEQ ID NO: 164520 - DNA, 100 bp, Homo sapiens
ctgaggaggcggcggcggagatctggacaagccaaacggctcctgggacagattgtggaccgctgtcgaaatggacctggctttcataatgacatagaca

SEQ ID NO: 164521 - DNA, 82 bp, Homo sapiens
ccatcttcgaacttagacttccggaaggactttggcgagggctcctgtgacgtttgatgacatcactgtgtacttactccag

SEQ ID NO: 164522 - DNA, 129 bp, Homo sapiens
cggggacggattggttgttttttcctgtatgaagcggttggcaccactgaagtgaccgaatgagatggaggagatgtataagaaagctcatgctgctatacgagagaatccagtctatgaaaagaagcc

SEQ ID NO: 164523 - DNA, 82 bp, Homo sapiens
acgtaccggctctggaaaatccgcaagaccatcatgcagggggatatgagactttctactcggaatatcctgagtgttgcgt

SEQ ID NO: 164524 - DNA, 96 bp, Homo sapiens
tggtgatactaccagacaagttcagagaatatcatgcttccagtctactgtaaaggctaaaagagatgctaagagaatgcctgcaaaagaagtcac

SEQ ID NO: 164525 - DNA, 93 bp, Homo sapiens
ctcacctttaactctccttatgctgggtgaaaacaaagaacacaccacagccatcagcactggaatgcaaagaccagaacaaacagaaggaag

SEQ ID NO: 164526 - DNA, 82 bp, Homo sapiens
gcggcgacgccaggagaccccaagctgcatcgccgagtggtgtgtcccggcatggatatccggaacaacctcactaggttgc

SEQ ID NO: 164527 - DNA, 122 bp, Homo sapiens
ggcgacagcagcgtgtccagggcggctgtggaggtgttcgggaagctgaagatctggtggctggacccagagctgacctatggctgcgccaagcccttcgtcttcacccagggccactccgt

SEQ ID NO: 164528 - DNA, 98 bp, Homo sapiens
gtccatcttgcaagccttaaagagtaaaggtcaaggttcaagatcaagtgacattgaggcgtatgtgggctctgcagtcatgaccgatgagacatccg

SEQ ID NO: 164529 - DNA, 126 bp, Homo sapiens
taaatagtgaactagtgaagaggatcttgaatttcttaatgcatccaaagccttctggcaaagaagctcttactcctcagaaatgtattcctcacatcatcgtccggggtctcgtgcgtattcgat

SEQ ID NO: 164530 - DNA, 98 bp, Homo sapiens
aggagggcgagcgaggaggatggcggagtcggggctcctgacgggcaaacttgaagataaatcttttgactccagctctttagaggatctaaagtgac

SEQ ID NO: 164531 - DNA, 80 bp, Homo sapiens
ggtaatgaggatttgactgtgaagattcagaccaggatgtagcactcaaacttgcccaggagcgagctgaaatagttgct

SEQ ID NO: 164532 - DNA, 75 bp, Homo sapiens
tcagctccgagtccagggcgagacatctttccaggaacagcgtgaggaggacagaagcacccaacaggactgctc

SEQ ID NO: 164533 - DNA, 75 bp, Homo sapiens
aacaaaattctgaactcaggacttggcaacaatttgagaactggcgagagaaccagccggacaatttcttcgcgg

SEQ ID NO: 164534 - DNA, 96 bp, Homo sapiens
ggaaaaccgaagttggaagtgtctcttagcagcgcgcggagaagaacggggagccaggtcgcagcagttgtggtagaaatttctgggttagtggac

SEQ ID NO: 164535 - DNA, 89 bp, Homo sapiens
gcagtcgaactcgtgaatgacagtctgtatgattggaatgtcaaactcctcaatgccctgggagctgtcattgccctcctgctctgggg

SEQ ID NO: 164536 - DNA, 100 bp, Homo sapiens
cgagaactggagagaactgctggaaggagactggatgatagaattggtcaacatatttcactggcacctattcacaagcttgaagaagctctgtatgaat

SEQ ID NO: 164537 - DNA, 50 bp, Homo sapiens
gctcactgcagcctcaacctcccaggctcaagtgatcctcctgcttcagc

SEQ ID NO: 164538 - DNA, 74 bp, Homo sapiens
tgcggcagaagccgagttcaacatcctcctggccaccgactcctacaagctcggtcaaggagtgtgatgactgg

SEQ ID NO: 164539 - DNA, 75 bp, Homo sapiens
gcagaggaggcgggggcagccgctgagacggtttttcacaaggtccagcaagactatgaatctctgttccaaatg

SEQ ID NO: 164540 - DNA, 101 bp, Homo sapiens
gtctcccaagtagatgggattacaggtggcacaagatctctgtaaagtagcaggcatagcaaaagttctggtggctcagcatgatgtgtacaaaggcctac

SEQ ID NO: 164541 - DNA, 59 bp, Homo sapiens
agtggctacacttgccactgtgtgctgccatacacagtttaattggttggggtcagata

SEQ ID NO: 164542 - DNA, 101 bp, Homo sapiens
gcagaaataccagtccccagtgagggtgtacaaatacccctttgaattaattatggcttgtatgggtttcgacagaccatgatgaaattgagaatgtggcc

SEQ ID NO: 164543 - DNA, 87 bp, Homo sapiens
aatcagtgatgaagatgaatcgaacctcaagaggctttgttttctgtgaaacagtatttctatacagttgctccaatgacagagtta

SEQ ID NO: 164544 - DNA, 122 bp, Homo sapiens
aacagggctcgagtctacctggatgaaaactacaaatcccaggagcacttcacggactgggaggtgctggtcctagggaagctcaagtgggacctggctgctgtgattgcacatgatttcct

SEQ ID NO: 164545 - DNA, 108 bp, Homo sapiens
cgcagcggccgcagcagcagcggcagtcacaggcacatcagcaaagagaagccccatgtgccactcccctgatctgcagcttcggtaggccggtggacctggagaagg

SEQ ID NO: 164546 - DNA, 75 bp, Homo sapiens
ctcagcccgttcgctggactgcaaaccgagctcccgtctgccttgcagtaaactacacccggccggtgattatcc

SEQ ID NO: 164547 - DNA, 98 bp, Homo sapiens
cggatctcaacaatcccttcaagttgcaagttgtacaggctgacattgcctcgatcgacagtgatgctgtcgttcacccgacaaacactgacttctac

SEQ ID NO: 164548 - DNA, 83 bp, Homo sapiens
cgtggagttcggcagctacgcagatgcgctgtggtggggggtgacagtactactggtatgacgagcgggggaagaaggtcaag

SEQ ID NO: 164549 - DNA, 103 bp, Homo sapiens
caattggaccaagagaacaatgggaaccagtctttcaaaatgtggctgaagccatactattttatagaattaatggaaagcagaaaagacatcacaaaccaag

SEQ ID NO: 164550 - DNA, 82 bp, Homo sapiens
gcccctgttgcgatggcgcagaaaccccgttgacaaggcactgctttttcatgacggcttgggcactgtttaaaggaaagtt

SEQ ID NO: 164551 - DNA, 102 bp, Homo sapiens
tggtggtcggcgggggcggcgtgggcaagtcggcgctcaccatccagttcatccaggtgagaagccctaccactgcaactgggacggctgcggctggaagtt

SEQ ID NO: 164552 - DNA, 51 bp, Homo sapiens
aaaaccacatcgtcttccctgtcccaatcgatgcccaggcggaggtgcgct

SEQ ID NO: 164553 - DNA, 50 bp, Homo sapiens
ggaattgctgtaggtgcagctatggctaaaaagactccatcagacacaca

SEQ ID NO: 164554 - DNA, 100 bp, Homo sapiens
gaaaaagatgagcaggaatgttttgctacaaatggaggaggaggaggacgacgacgatggggatatcggaaatcttcaccgaaccagcagtgttcctgag

SEQ ID NO: 164555 - DNA, 52 bp, Homo sapiens
gtggacgccatcgtcaacgccgatttcgactgggtctgggatgacttaaata

SEQ ID NO: 164556 - DNA, 50 bp, Homo sapiens
ctaaacacgtggaaagaatcaatttgggtactatactggcaattgctgga

SEQ ID NO: 164557 - DNA, 75 bp, Homo sapiens
ttttcttaacctgggaagtggaaccggatatttaagtacaatggcagtcgatgatgtgaagaaaggttacatcaa

SEQ ID NO: 164558 - DNA, 100 bp, Homo sapiens
ctccagcccagcctcgctagctccgcctgcggtacgtgctcccgcctccgactcaagttatgaagacagtatggagtttccagaccatagtagacatttg

SEQ ID NO: 164559 - DNA, 96 bp, Homo sapiens
cggcctggctttctgcgccatcctgcaccgccaccggcccgacctcatgtgctgaaggtcgccatcctggctgagaagtacgcggtggactacacc

SEQ ID NO: 164560 - DNA, 75 bp, Homo sapiens
ttttgattctcagctggttattggagtaagagaatcctatgggattgccatcttttgcatgctactcacctacta

SEQ ID NO: 164561 - DNA, 100 bp, Homo sapiens
gcgactaactcctgcgcccctgagggttaaagaattgcccacccttaaggatatggactttctcaacaagaaccagaaagtatatattggtgaagaggag

SEQ ID NO: 164562 - DNA, 75 bp, Homo sapiens
gcacccagtaccatattctctggaggttttagacacgatgtaattaaaaccattgtgcagagtggtggcatcaag

SEQ ID NO: 164563 - DNA, 98 bp, Homo sapiens
ctggctcggagcagcagcctctgagggacacgtgatggaccgtaggaagaaggcactgaccgactacaagaagctgcgggccttctttgtggaggagg

SEQ ID NO: 164564 - DNA, 75 bp, Homo sapiens
gagattcagcccggcgatattgtcattattgatcagttcattgacagtgcttttttaggaccaaaggatatattt

SEQ ID NO: 164565 - DNA, 90 bp, Homo sapiens
caaaagaacaaattcagtcccttctccatgaaatggtacacgcagaacatgctctggtagctgaagaacatctcacagtggacgccaggg

SEQ ID NO: 164566 - DNA, 82 bp, Homo sapiens
ttttgagcggctgaaggagcctggtgagaagacaggctggctcattaacatgcatcctagggagacgctgttgcggcagctg

SEQ ID NO: 164567 - DNA, 100 bp, Homo sapiens
tatcaagagggtcatggcggcgatcgagaaagtgcgcaaatggcaggggtgtggggaagaacgaggaactgcgtctttatcaccatctcttcaacaacta

SEQ ID NO: 164568 - DNA, 82 bp, Homo sapiens
cgctccgcagccccgggcacggcggaggcagcggagccctgggccatcggtggatccataaagaacccagccaacccgcaga

SEQ ID NO: 164569 - DNA, 149 bp, Homo sapiens
tcatcctgtattctccatgtagacttccatcttcatgagtactccaagaagatggttcagttgactattgcaaagtcttaccattaagttaacaatggacgaagagatgacgctttgctttttgaagtacatgtatatgcacatgaatg

SEQ ID NO: 164570 - DNA, 100 bp, Homo sapiens
ccaggcccgcgaccgtccgccagtcgtcccgagagctgagctcaatgtgcagcaatggatgacgacagcctggatgagcttgtggcccggagcccagggc

SEQ ID NO: 164571 - DNA, 75 bp, Homo sapiens
acctgaagagaaaataagggagtactttggtggttttggtgaggtggaacgtgtgatcaccattatgcagaatcc

SEQ ID NO: 164572 - DNA, 75 bp, Homo sapiens
cctgtgctgtgggggctacgaggaaagcgggtgcagcccagaactgtcttctgaggaagaggtgctctcctgggc

SEQ ID NO: 164573 - DNA, 50 bp, Homo sapiens
ctccagggttctttggggcccgaggatcaggagaaggtctggggaaaata

SEQ ID NO: 164574 - DNA, 100 bp, Homo sapiens
cctagcttccctgtatgtgatgatgaccgtcaccaactggttcaagactatgaagatgactttgaggtttgtgatggtgatgatgatgaaagcagtaatg

SEQ ID NO: 164575 - DNA, 98 bp, Homo sapiens
aagactacagttatttgaacagattctcagaggattaaacagcaagcaacattgtttgttggagagtcccacaggaagtggaaaaagcttagccttac

SEQ ID NO: 164576 - DNA, 100 bp, Homo sapiens
ccgtggctatgccttcatcgagtacgaacacgagcgagacatgcactgcttcaccatcatcatcgagccctttgacgacagaaccccgaccattgccaac

SEQ ID NO: 164577 - DNA, 50 bp, Homo sapiens
tgaaaaggaactccctgacatccttggtcaaactgtgctgaaaatatccg

SEQ ID NO: 164578 - DNA, 101 bp, Homo sapiens
acagctgaaggctgcgagggactaagagcagagttcttgggtgtctctggggagtccctgggccagaccttcctccagactccagcccacctcttcggagc

SEQ ID NO: 164579 - DNA, 90 bp, Homo sapiens
cgcgggcgaggccgggtacctgggctgggatccggagcaagcgggcgagggcagcgccctaagcagaaatacccgcagcccaaagggcag

SEQ ID NO: 164580 - DNA, 75 bp, Homo sapiens
ttatttagcagctagtaacttcacttatttcagggctaactgccaggcggccaaaggacagtatgttcacacggg

SEQ ID NO: 164581 - DNA, 82 bp, Homo sapiens
cttctatagaaatggctgaaggaaaacctccttatgctgatatacatccaatgaggaatttcttcaggttgaattacctaga

SEQ ID NO: 164582 - DNA, 75 bp, Homo sapiens
ggaggatcgtcaggctctaaacaaaattctggaggagatgttaaagtaacccatcttgcaggacgacattgaaga

SEQ ID NO: 164583 - DNA, 50 bp, Homo sapiens
atgtcatttcatccaccacattacttagggacaggagagagtggcaagag

SEQ ID NO: 164584 - DNA, 100 bp, Homo sapiens
aaggcctcttctaagccaggagattgccttgcaatttccgtatagattttgggacagtaaagtacaaggggctgacttttttggtcacgttcctcccagt

SEQ ID NO: 164585 - DNA, 125 bp, Homo sapiens
aaagccactatcatggcctttgatgccctggtgaccttctgtgaagaactgggacacgatgaggcgagtggtacgacagagcaagtttcggcatgtatttgggcaagcggtgaaaaatgaccagt

SEQ ID NO: 164586 - DNA, 82 bp, Homo sapiens
gaccaggctggtctctaactcctgacctcaggatgatcggctgaatgtaacagaggaactaacgtccaacgacaagacgagg

SEQ ID NO: 164587 - DNA, 100 bp, Homo sapiens
ccggggatcgacaagctgcccatcgaggagacgctggaggacagcccgcagttgtctgttttgatgccaagataaactttgatgacaacgcagaattccg

SEQ ID NO: 164588 - DNA, 90 bp, Homo sapiens
ggtcaagatagaattaggcctctctggaagcattacttccagaatacccagggatcagagaaggctgaagaaggtggagaaactgaggca

SEQ ID NO: 164589 - DNA, 51 bp, Homo sapiens
tttggctctgtgcgaaacagaggggaaggagaagttcctgggcatcctgaa

SEQ ID NO: 164590 - DNA, 100 bp, Homo sapiens
acaactgctaccatgagggcaagagcttccagctgagacaccgtgaggttaacgtccctaaaacccgccggactttctgtaagaagtgtggcaagcacca

SEQ ID NO: 164591 - DNA, 96 bp, Homo sapiens
cagctcagcgccactgacaaagccccccgaaaagggcaaagacaaggtgaaccgggattccgtgcgctccatccagaagagcatcttcaccgtgtg

SEQ ID NO: 164592 - DNA, 100 bp, Homo sapiens
cttctttaagggctacgggaagatcctggaggtggatctgaagaacggtatgtgcaacgtatagagaaacagtttcttttgtatgcctactggataggct

SEQ ID NO: 164593 - DNA, 75 bp, Homo sapiens
tttaattttagggtcctttatatagaagggagagtaggttcatctgcagaagccagcggacgcctctgttcaact

SEQ ID NO: 164594 - DNA, 50 bp, Homo sapiens
tgcctaatggcagtgccctgacagatggcatctctgggaaaggacctggg

SEQ ID NO: 164595 - DNA, 108 bp, Homo sapiens
gaggttgccgacgccatcaggctcaacgaggaactcaaagtggatgaggaaaatctgactgcagccatgagcagcaatgagtgcttcaagtgtggacgatctggccac

SEQ ID NO: 164596 - DNA, 83 bp, Homo sapiens
gccccgtggccgcggccgtctcgtaggcagttccggcgaggggggagcctcagcaggattgctgtgtgaaaaccgagctgctg

SEQ ID NO: 164597 - DNA, 82 bp, Homo sapiens
ctcggctgcgggaaatcgggctgaagcgactgagtccgcgatggaggttctctacttaaaagacaatgactactgatgaagg

SEQ ID NO: 164598 - DNA, 51 bp, Homo sapiens
tggacgccgagcaggatcccagtggtggcggtggcggcccgcgatctgagc

SEQ ID NO: 164599 - DNA, 50 bp, Homo sapiens
cagaaccctccgcagagtaaagattcagaccaggatgtagcactcaaact

SEQ ID NO: 164600 - DNA, 82 bp, Homo sapiens
ctcctaagcctgcacagccgcggcggcagcagcagtgagagccgctgccatggcccagacactgcagatggagatcccgaac

SEQ ID NO: 164601 - DNA, 50 bp, Homo sapiens
tgtgctgcagaacccccagaccatcatcagcccctgtcaaagggaacagg

SEQ ID NO: 164602 - DNA, 83 bp, Homo sapiens
gccgagcgcggcccgggcgccatcgagccttggcggcggacgtgcaggattttttatcaagcagaaatgcatcgaacaacgag

SEQ ID NO: 164603 - DNA, 75 bp, Homo sapiens
atgagaagaatgacaaagataagaagatagctgagttggaaagttttagaaagagcgttttcgctacgtaaagca

SEQ ID NO: 164604 - DNA, 50 bp, Homo sapiens
gatagtgcctttcagccctaccaggcaatgccaccgtagataagttggag

SEQ ID NO: 164605 - DNA, 98 bp, Homo sapiens
ctgcacattaggttgcagtatgtggccagttatttgcctcagtaaaagataccacttccgctgtcacggtaaagtccgccatcagaagactgaaggag

SEQ ID NO: 164606 - DNA, 90 bp, Homo sapiens
tgggttccatgagaagtgacatcctcctcgaatcaaaagtaatggcaacgttgcagctaccagccactaatttggccaacttggcaaatt

SEQ ID NO: 164607 - DNA, 74 bp, Homo sapiens
gcggatgccctgcagtacctgcagaaggtctctggagacatcttcagcagatcgacctgatgccccatgacctc

SEQ ID NO: 164608 - DNA, 75 bp, Homo sapiens
gttagcgtgagtgatcactctcaatcccggacttaattcagtgcacaaatgagatgaatgtgaacatcccacagt

SEQ ID NO: 164609 - DNA, 100 bp, Homo sapiens
agtatggcaacatgacagaggaccatgtgatgcacctgctccagcgtaactggcggaaacccagaggcattgacaacagggttcgtagaagattcaaggg

SEQ ID NO: 164610 - DNA, 80 bp, Homo sapiens
agcacagttcctgggaaggtggagccaccagcctctccttgatttcaacactacacttgcacaatgtctttgaaaccaag

SEQ ID NO: 164611 - DNA, 75 bp, Homo sapiens
agccatgccggagaagcgcgcgggcgcgcaggccgcggggagcacctgggaactgtggctgcaccatctgtcttc

SEQ ID NO: 164612 - DNA, 98 bp, Homo sapiens
tctgactccacctttacttttacctacgttggcggccccagaaggtgtctgaacacacacaattaagttggatcctttcctgcatggtcagactacct

SEQ ID NO: 164613 - DNA, 100 bp, Homo sapiens
tcatggcgctgctgcccatcttcttcggcgccctgcgctccgtacgctgcgcccgcggcaagaaaaggtactttgtggactatcggagagtgcttgtctg

SEQ ID NO: 164614 - DNA, 90 bp, Homo sapiens
aggaccagtacctgcccaggaaactggtcactgtggaatatagacccataattgacaaaactttgaacgaggctgactgtgccactgtcc

SEQ ID NO: 164615 - DNA, 83 bp, Homo sapiens
gtcatttccttcgtacccacagtgcttcatgagaggccataaaattttgagtagaaaaatccagaaatttgaaaatcagtatc

SEQ ID NO: 164616 - DNA, 75 bp, Homo sapiens
ggaatagtctacaaaggaagacttgtaacctggagaagagtccctgaaaaacagctgaatgatattgaagattgt

SEQ ID NO: 164617 - DNA, 50 bp, Homo sapiens
gcaaaatgcccacactgcaaaaaaatgaatcccagtcagaagttccagcc

SEQ ID NO: 164618 - DNA, 82 bp, Homo sapiens
ccttcgtacccgtcttgattgagacttcccaagtaagaagcggaagaggagccgctggaaccaagacacaatggaacagaag

SEQ ID NO: 164619 - DNA, 75 bp, Homo sapiens
caagggttggaactgctgattatggaagtccctcggatcaggtactggttttggattaggaattgttttctcact

SEQ ID NO: 164620 - DNA, 75 bp, Homo sapiens
gactcctggagaacggatcaagtgcttattacaggttctccccatgacaccacctgaacgtctcttcctcccaag

SEQ ID NO: 164621 - DNA, 75 bp, Homo sapiens
cagtggagctgctgaatcctgcccgcgtgaaccacatgcccagcacggacacatgcctcactcctgtcagcagtt

SEQ ID NO: 164622 - DNA, 101 bp, Homo sapiens
cgacgctttcttgttgttgcggaataattccatccaaaaccggcagctgttagccgagcaaatgaggaaacagacttggagaggttaagtgacatgctcaa

SEQ ID NO: 164623 - DNA, 82 bp, Homo sapiens
tcttccatccccatcttacagatgtattaagaagcctcaggaatgtatcctgtcaggtataatgtcagtgaatggcaagaaa

SEQ ID NO: 164624 - DNA, 100 bp, Homo sapiens
agaagaagatacacagggacatcaaggtggtcctgaagagcaaggatgaccaggtgaccgttatcggggctggggtgaccctgcacgaggccttggccgc

SEQ ID NO: 164625 - DNA, 75 bp, Homo sapiens
tcagaaccaggttttgcttttcaaatttttgaggagtcttcttgacccaaggtagtggctctttatgactacaca

SEQ ID NO: 164626 - DNA, 138 bp, Homo sapiens
tttaacttggtgtctttagtgcttggattggtgggatgtttcggaatgggcattgtcgccaattttcaggactctgtctacatcttccgggaaggggccttgccaccctatcggcagatgttctaccagttatgcgac

SEQ ID NO: 164627 - DNA, 82 bp, Homo sapiens
acatacctcgcattattgaatgcatatgctgagaagggcgacattgaccatgttaagcagtgattcgcctttgccagtctca

SEQ ID NO: 164628 - DNA, 98 bp, Homo sapiens
gaagattcaccaaataagctatatactttggttacctatgtacctgttaccactttcaaaagccccttcacagatgtagtcactacaaatcttaaatt

SEQ ID NO: 164629 - DNA, 100 bp, Homo sapiens
cggagcggccggtactgttgaaagcgacaagtggaggcgccgctctagcggccgggactctgaactatggcgaaagacgagaatccaggacttgaatcgt

SEQ ID NO: 164630 - DNA, 75 bp, Homo sapiens
taaaagatcactgaagttggatggtctgttagaagaaaatatatcccgatgtctgtgggtataatcgatcctagg

SEQ ID NO: 164631 - DNA, 98 bp, Homo sapiens
cacgtcggagaagcccgaggagcaggatgcccaggtgaagccatcagtgtctacagcttcagctattgcccgtgtgcagatggtgcttaatctctctt

SEQ ID NO: 164632 - DNA, 50 bp, Homo sapiens
tggagatatggcgcaactgcggcgcaagtcggccagagcagcatgtggat

SEQ ID NO: 164633 - DNA, 75 bp, Homo sapiens
tgctgtaggctttgaataccaggggaagactgagaagcatgcctcccagaaagagtctagctctgttgcccaggc

SEQ ID NO: 164634 - DNA, 75 bp, Homo sapiens
ccgggtcttccagagcgtgaagatcaagatcggaagccatcttcgacaagagcacagggaaggttgttttgaaga

SEQ ID NO: 164635 - DNA, 51 bp, Homo sapiens
gattcgcagtggtcgcttcttctccttggtgggaatggaagtggccccaca

SEQ ID NO: 164636 - DNA, 51 bp, Homo sapiens
cttcagctcctcgtggttggtttattcagctgggtgcagtggctcacgcct

SEQ ID NO: 164637 - DNA, 100 bp, Homo sapiens
tgcagcccaggagcctcaaggcggcccggcgggcgactggacggccggacaggtcataaaccgctccaccaccgagctgcccctcaccgtgtcctacgac

SEQ ID NO: 164638 - DNA, 100 bp, Homo sapiens
ccgagagccgcggctccgtgtttctggaaagtgacagcaggtccatggtgatgcttctttctgtggtcaagggattgttcctgaaacattcacgctgtcc

SEQ ID NO: 164639 - DNA, 75 bp, Homo sapiens
cagccagtcagcaagcagcatcacaagctcagcctggacagcaacagcttagcagtgtctgcaaaaacgaatctt

SEQ ID NO: 164640 - DNA, 98 bp, Homo sapiens
gtatagcttccgttcctactaaacagatgaagtttgcagcctcaggcggctttctccaccacatgatccagacatttaatgtggatgcaccatgccag

SEQ ID NO: 164641 - DNA, 74 bp, Homo sapiens
tcaatgccaatgccatcaaagcagagtctaaaaagtttgcagagacccaacctaaaaaggacacaccacggaaa

SEQ ID NO: 164642 - DNA, 83 bp, Homo sapiens
cttaaagctacaggccacgtattccaggaattctcaagaaatttgaggaagaagatttggatgacattttaaggaaaagattg

SEQ ID NO: 164643 - DNA, 101 bp, Homo sapiens
taccagcacttcatccagcagtgcacaggtactaggttttgacaagcttgcatcatgcgtgagtataagctagtcgttcttggctcaggaggcgttggaaa

SEQ ID NO: 164644 - DNA, 100 bp, Homo sapiens
agaaaccacaggcgaatccataactctgataagccgtacaggtctgtttctgtcgactgtggaccacttatgtgcgatccgtggaccacttgcgtgcgat

SEQ ID NO: 164645 - DNA, 75 bp, Homo sapiens
ctccctggctgctggagagttgaatgccagccaccagccatggacctcctgccccccgaggtctgcagtctcctg

SEQ ID NO: 164646 - DNA, 98 bp, Homo sapiens
gctatcttcattggatcttctttggaaagattggaattccaccagcccctcgtggagttcctcagattgaagttacatttgacattgatgccaatggg

SEQ ID NO: 164647 - DNA, 100 bp, Homo sapiens
ctggccgagtactttatcggggatgtgtttgctgcacggttcaatgatgccctcacagtcgtggaaaggtcacaagaggaccagattaaaaatgctattg

SEQ ID NO: 164648 - DNA, 90 bp, Homo sapiens
cagaaaacagtgtttacttgggattgtcaccagacctgcaatctatggagcagattcggagaattatgagacctactgatgtccctgata

SEQ ID NO: 164649 - DNA, 100 bp, Homo sapiens
aagtcactgtttcagcttcagtagtcattatcctcatggaatcaacacagctatttaccaccctggtcacaggcaatttgaatcaacccatagaagtgac

SEQ ID NO: 164650 - DNA, 100 bp, Homo sapiens
ctaggaggggccgtcaggcggggatacagcctggaagggcaagtgtccagagaatggctgggatgaaagtacacttgaactctttttacatgaacttgca

SEQ ID NO: 164651 - DNA, 100 bp, Homo sapiens
ctcgtcttgcccttggggatgacagcccagcactcaaggagaagcggtttaaggaagaaatctctaaacgttttaaatcacatactgaccaacttgtgtt

SEQ ID NO: 164652 - DNA, 83 bp, Homo sapiens
gacgaggagcgcgtcgtgcgcctgggggtgcgcgcctgcgacctgcccgcctggggatacccacccaccatcccagggtctac

SEQ ID NO: 164653 - DNA, 83 bp, Homo sapiens
cttagctgtgctcgcgctactctctctttctggcctggaggctatccagcgttgcagatatcaagaaagtcaacaacttcatc

SEQ ID NO: 164654 - DNA, 75 bp, Homo sapiens
gctgggcagtctcagtcgtgtgcgacagctcgggttcatgacgctctcgatattcctgtgcagaaacctggacca

SEQ ID NO: 164655 - DNA, 76 bp, Homo sapiens
cggggccacagcgacgacatcatcaggtatattactcgaggggtttttaaatattgtcaggaaaaagaaggaagct

SEQ ID NO: 164656 - DNA, 48 bp, Homo sapiens
cataccaatattgttgcacagactactgtcacgggaagtctttttagg

SEQ ID NO: 164657 - DNA, 74 bp, Homo sapiens
tgcagttcagacccttctctcccctccactttctcccggccgatacggaagatgtgtgcattgtagagagattg

SEQ ID NO: 164658 - DNA, 103 bp, Homo sapiens
gaaggaacgaggcaaggagctaaagcagcgtgcgttcagccctgggggccccaaagtcaccagatgctctggagtcggctcagtcggaggaggaagtggacga

SEQ ID NO: 164659 - DNA, 100 bp, Homo sapiens
agaataaccttcctgaagccgggtgtttttgaagatcttcacagactagaatggctaaaagaggcacagttagatgaagaaggacagtttcttgtcagaa

SEQ ID NO: 164660 - DNA, 98 bp, Homo sapiens
tcttggcaggagtgaaaggactgaccatgctggatcacgaacagattctgaaggaagatttccattaggtaatttgtttaatcagtgcaagcgaaatt

SEQ ID NO: 164661 - DNA, 100 bp, Homo sapiens
agaaccctgcttgaccgctccaagtcctatgagctcatccggaagattgaggcctacatggaaggtggtagctgagcacccagatgcttcaggtgaggag

SEQ ID NO: 164662 - DNA, 74 bp, Homo sapiens
tgtcaacgggatctgggagtgacactggtcatttcatgggcaacaacacagtgctggatgttttgcggcgtgaa

SEQ ID NO: 164663 - DNA, 98 bp, Homo sapiens
agcaggtcggaggaaacagccagaccgagagcagcctgccggggcggagcgtgcctgccagtgtagagccggtggagcagctgggctcggcgctgagg

SEQ ID NO: 164664 - DNA, 98 bp, Homo sapiens
ctttggaatcgtgctctccgaggacaagcaggaggtggtggagctggtgaagcaccatctgtgggctctggaaggctggagtgcagtggcgagatctc

SEQ ID NO: 164665 - DNA, 96 bp, Homo sapiens
ggactgtgctgtgcctctctcgcccacattttccccaagcactctcaggaacctggcaacaggagaataaaggcagccccgttgatgactgaaaat

SEQ ID NO: 164666 - DNA, 75 bp, Homo sapiens
cggctgaaggccctacgggagaaaaccgggcgcaagtttaatggatcgagaagtggcgttgcttgctgaaatgga

SEQ ID NO: 164667 - DNA, 75 bp, Homo sapiens
aaaataatgtaaacgtcaatgcacaaaatggatttggaaggactgcgctgcagttccacctcttgaaggttttgt

SEQ ID NO: 164668 - DNA, 100 bp, Homo sapiens
tgatgccgcaaagaatcaagttgcaatgaaccccaccaacacagtttttggtttcagtgttgactggtgggctcttggagtgctcatgtttgagatgatg

SEQ ID NO: 164669 - DNA, 98 bp, Homo sapiens
ggacggagagaacacgagcccatcagaacccttaggagaaatcttgagagtggacagcaattgtgaagatcgccagagagttctgtgtttcatcaccg

SEQ ID NO: 164670 - DNA, 100 bp, Homo sapiens
ctggatgcttatatcaatttaggaaatgtcttgaaagaggcacgcatttttgacaggagttaaagttcctcgtaattttcgcttgttggaagaacttgaa

SEQ ID NO: 164671 - DNA, 51 bp, Homo sapiens
gtcaaaatccatagatggaaaagatggccggaaggtggtggtcgtacgctg

SEQ ID NO: 164672 - DNA, 74 bp, Homo sapiens
aatcccttgcatggctctcatcacattaactttgctctagaagacaactttacaaggatctaaaaggaacagga

SEQ ID NO: 164673 - DNA, 82 bp, Homo sapiens
gcatagacttcaaccagcctttggtcatcaccagggaaacattggcaaatttggagcgacagatctatgcttttgagggaag

SEQ ID NO: 164674 - DNA, 83 bp, Homo sapiens
gactcagcagccttggtgctcaggtgccagatgcaaaggaggcaagtgaggcctatctggttggcctttttgaagacaccaac

SEQ ID NO: 164675 - DNA, 90 bp, Homo sapiens
cccgacttgacacgatattttttgctaagcagattgctatgctatgccttgtatgactaagacctcttaccaagaatacgtgtcagacca

SEQ ID NO: 164676 - DNA, 100 bp, Homo sapiens
acatgccaagagagcgtaccgggagctggtcctcatgaagtgtgtgaaccataaaaacattcttggatgaagtacagtcctactcgggagttaacaaaat

SEQ ID NO: 164677 - DNA, 100 bp, Homo sapiens
gctcatgtcagagtgcgaatatgtctctgagaagctagagagtaatcaagtcagaggattatatgacttttatctgcctagagaagaactatggatctac

SEQ ID NO: 164678 - DNA, 100 bp, Homo sapiens
ctctggtgagaagtgccactgtgcactcttggcctcacagcaatggagtgcccgtgcgcagcggagatgccaccttccccaaagctatggacaacgtgac

SEQ ID NO: 164679 - DNA, 98 bp, Homo sapiens
gccacgcgtcctgcctgccgccccttcgtccgtcccccgcggccggcagctcccggggcgtctggagaggaggttcagatgagcccctgctgacttga

SEQ ID NO: 164680 - DNA, 100 bp, Homo sapiens
cctcggacgtagcccggcttgtattggagcattggggagtcagcaatgtccgttgtgttaaatcagctgctgcccatgattaagcctgtaacccagagaa

SEQ ID NO: 164681 - DNA, 100 bp, Homo sapiens
aagaaattgatattttgatgaacaatattgaacgctatcttaagaactgagagaagatggtttccagcctcaaacttacctagtacagggagtgaaagca

SEQ ID NO: 164682 - DNA, 97 bp, Homo sapiens
tggccaggaggtcggccagcgggaaaggccgagggggacggcaagatgcacatcaccctctgtgacttcatcgtgccctgggacaccctgagcacca

SEQ ID NO: 164683 - DNA, 128 bp, Homo sapiens
ctttggcagacatcgagaagcataatgacattgtggacagtgacagcgatgctgaggatcgaggaacgttgtctgagaatctggacgaggctagagaacagaaagaaaagagtcctccagaccagcct

SEQ ID NO: 164684 - DNA, 89 bp, Homo sapiens
ctctgctctacacactggtgtctcctgcggaagggcagctgggcacgccttccagaccgaggctatttttatgattcccacaaatccac

SEQ ID NO: 164685 - DNA, 74 bp, Homo sapiens
ttaggaccacccaccatgcctatccaggtgtgctgatgtatcgggactaccccctggaactattcatggcccag

SEQ ID NO: 164686 - DNA, 75 bp, Homo sapiens
gattcgccgaggcaccgaggcactcagaggagccctgccaggagcccggaagtgggtccgcacgagacagaatag

SEQ ID NO: 164687 - DNA, 104 bp, Homo sapiens
tgtctgcctcggtacctgttactgctgctacttcctcgtttgacaccttcctggcaggaaaaccgaaagcgccatggctctagtcgaagtgtagtagatatgga

SEQ ID NO: 164688 - DNA, 96 bp, Homo sapiens
atgttgtcgggtacattgatatatgtaaattacggaagatcatttatatacacatgaagaaccttgaaggctatgtgggatttgccaatctcccaa

SEQ ID NO: 164689 - DNA, 100 bp, Homo sapiens
attcgtgttcgtgagggccttttctgtgatcagggccaaagcggtcagtgagaaggaagtggactctggaaacgacatttatggcaaccctatcaagagg

SEQ ID NO: 164690 - DNA, 90 bp, Homo sapiens
gttgccatgaggcgaggctagggaggacctcacttccccggggtgtaataatgttaactgagttgtattccctgaatgactataaaccac

SEQ ID NO: 164691 - DNA, 118 bp, Homo sapiens
ctctgctcctcggaaaggaaagtccagtgggacctcgctgctctgctcccaggtatgacgctgggcgggatggcttcatcgacctgatggagctgaagctgatgatggagaagctggg

SEQ ID NO: 164692 - DNA, 100 bp, Homo sapiens
ctacgggaattcagtactctgtaacacccagctaccaggtcctttggagaatacctatcgtgatttctggctcatggtatgggagcaaaaagtcttggtg

SEQ ID NO: 164693 - DNA, 90 bp, Homo sapiens
ttccactgaggatgacgggacagtggccttcgcgctaacgaagacatatctgaagagatggattaagaatgctttggattaaggattgtg

SEQ ID NO: 164694 - DNA, 90 bp, Homo sapiens
gttaaggattccaagtaactcttatttggctacattggcgtggtgaaccgcagccagaaggatattgagggcaagaaggacatccgtgca

SEQ ID NO: 164695 - DNA, 90 bp, Homo sapiens
caagtgatcattaataaagcttttcttggttccttcagtggtgttggtagtaaaatggtgtatgtgctcaagaggccttatgtggatgag

SEQ ID NO: 164696 - DNA, 83 bp, Homo sapiens
cagggcctgcagcgggagctggacggcgagcgcgagcggcgcgagaaaaacccagtgacttgattgtaaaaatttacagagcg

SEQ ID NO: 164697 - DNA, 100 bp, Homo sapiens
cggagctgttcctattcggccatctttgctcctccctgcaactaactccattcttaattggtgcaaatgtcaattgtcaagccttggacaaagctacacc

SEQ ID NO: 164698 - DNA, 83 bp, Homo sapiens
gtcacttacaacattaatcagatactgcatttaagacaggggcaagtgtccgagtggtgaatcagctacttacagagatggat

SEQ ID NO: 164699 - DNA, 83 bp, Homo sapiens
cctggatgggggaccacaagatcctcatcgacagctgatccagtgtctctttgggccacttcaggcggggccgagcaatgcag

SEQ ID NO: 164700 - DNA, 75 bp, Homo sapiens
ctgcgcacggactgctggagatggtggagtccgtcaggagctcaaccctgttcagtgctctgctcatcaagtgtc

SEQ ID NO: 164701 - DNA, 75 bp, Homo sapiens
atcaactcgcgggtcctcgtggatcagactacaggtcgcaatgatgatgtcaaatgcttttgttgtgatggtggc

SEQ ID NO: 164702 - DNA, 87 bp, Homo sapiens
gcagaacagaggcttcgcatttgtgcagctgtcctctgcaatgcaagaaggccctcaccagatgccagcaccttgacattggacttt

SEQ ID NO: 164703 - DNA, 75 bp, Homo sapiens
tgggacagaaagtgttaattcccgtaaaacagttccctaagtccacaagaatcggaatgtcagttaatgctattc

SEQ ID NO: 164704 - DNA, 101 bp, Homo sapiens
ccgctgtgtgtctcgggcgttcagccgctcgctctccgccttccagaaggcacaagaccagttgcacaatgccctgaatcttaataggcacgatctgactt

SEQ ID NO: 164705 - DNA, 82 bp, Homo sapiens
ttagacatagctggcaagagtattttcgtgtgatcattcaggatatgttcgtccagtaccagtgccacgcagtttaaatagt

SEQ ID NO: 164706 - DNA, 50 bp, Homo sapiens
tctcagcaccgagaagtgagcctgattacttaaatgacctacagggttgc

SEQ ID NO: 164707 - DNA, 82 bp, Homo sapiens
agcctacagagcactcctgtctggctcaaaccccccctatcttccattcagcaacttcactgtgtggtggttggaagtgaaa

SEQ ID NO: 164708 - DNA, 74 bp, Homo sapiens
caatggctgcatcaattatgaagggcccaacatctgtaccacgcgaggtgtgagctcctgccagcagtgcctgg

SEQ ID NO: 164709 - DNA, 75 bp, Homo sapiens
tcacagtttgctctgctcttccaacaccagtggaagatgatcacatcccagaaatgcatcttctgcagacaccgg

SEQ ID NO: 164710 - DNA, 83 bp, Homo sapiens
agagcagagcggagggagccccagacacgcatgtccggcatgatttcgggtggcaacaaccccttgggaactcccggcaccag

SEQ ID NO: 164711 - DNA, 95 bp, Homo sapiens
ggaagacgaatcgttaaacatctgaaagggtcaggttactcactataaacaatatccacccaacacaagcaaagtttattcctactttgaatgcc

SEQ ID NO: 164712 - DNA, 50 bp, Homo sapiens
aaacccggtggacttcgctccagtgtaatgaacaagtctggggtgaatcg

SEQ ID NO: 164713 - DNA, 90 bp, Homo sapiens
tgagtctactctgtcgctcttgtgccctagcaccccgagaaccgtcagtttgagccagatggtgaccattgtgaggtagatattttgttc

SEQ ID NO: 164714 - DNA, 100 bp, Homo sapiens
gtctgagagctttacgtcatcttcgattagctaataaccaactgcaattcctacctccagatgaagcccggggcaagaactgtggtgtcttggtacattg

SEQ ID NO: 164715 - DNA, 50 bp, Homo sapiens
tgaggagccagccccagctatggcccagaatgataacactttgtgtccag

SEQ ID NO: 164716 - DNA, 90 bp, Homo sapiens
cctcggagggagcccggcggcttcgggatctcgaggacctggaagaagcagaggagccagacatggaggaagacgatgatcagaaagctg

SEQ ID NO: 164717 - DNA, 109 bp, Homo sapiens
aagattcgatggacatggacatgagccccctgaggccccagaactatcttttcgtttggtgccctggttgtcagatgttggaaagcagtaggacggaacatactcttcg

SEQ ID NO: 164718 - DNA, 99 bp, Homo sapiens
tccgctgggccgggagcgacttccaggatatagccctggaggagctgtttgatcagtgtgagaacaagaggcggactttatttaaactcgccagtgaga

SEQ ID NO: 164719 - DNA, 75 bp, Homo sapiens
ggaaaatgttttgccacgtggatgtgaagatttcctctaaaaggctcaggcagctgtccaaggacctgttggtac

SEQ ID NO: 164720 - DNA, 80 bp, Homo sapiens
ggcagtcagagcggagccaagatgcgaatgggtgggaatgtaagacggacttagatattgcatacaaatttggaaaaact

SEQ ID NO: 164721 - DNA, 100 bp, Homo sapiens
ctggccctgagtagggtgtgacctccgcagccgcagaggaggagcgcagcccggcctcggttaaccccaaagattggctttccttggagtgaaatcagga

SEQ ID NO: 164722 - DNA, 100 bp, Homo sapiens
gctggaggagctgcagagggaccttgatgggacatcctggagggttcagattcagaacaagaaagtggacatctctaaggtctcctccaagtgtgggtct

SEQ ID NO: 164723 - DNA, 74 bp, Homo sapiens
acagaacaacatatcgtatcagatggcagacatacatcatttaaagggtataattgaaatcctcaaaggaatgc

SEQ ID NO: 164724 - DNA, 100 bp, Homo sapiens
ggagcaaagcgctgagggagctcggtacgccgccgcctcgcacccgcagcctcgcgcccgccgccgcccgtccccaggttaatttggagtggcccctgga

SEQ ID NO: 164725 - DNA, 90 bp, Homo sapiens
caaggcgaggcggaaagatgggggaacacttaagaatctgtcctcaggaatatacatgctgcaccacagaaatggaagacaagttaagcc

SEQ ID NO: 164726 - DNA, 75 bp, Homo sapiens
tgagacagatcgcctcagacagcccacatgcctcccccaaacaatgcctggtttcggaaatctcgattcaaagga

SEQ ID NO: 164727 - DNA, 82 bp, Homo sapiens
gaaaacctttgggcttcatggagtcgtcttagatgttgattcagaattacatgaacgacagccttcgcaccgacgtcttcgt

SEQ ID NO: 164728 - DNA, 100 bp, Homo sapiens
tattcagtcgaagatttaaatatctggtctctcacttcaggaaaatctactgccatagttcacatacagctaacttggacttaaagtatgatgttgaata

SEQ ID NO: 164729 - DNA, 100 bp, Homo sapiens
tgatcagactcctggtgccactcccaaaaaactatcaagttgggatcaggcagaggtgtttggagaagagggattgaccctgaatcttgaagacgttcag

SEQ ID NO: 164730 - DNA, 100 bp, Homo sapiens
cttgggaaaaggccggagaaggtgaaattctgtgtgctccctccggcgagagactttgtcagctcccgcacagtaacagccagccccagtgcctgctgag

SEQ ID NO: 164731 - DNA, 88 bp, Homo sapiens
acggccactggccagaggtacttcctcaaatcacaaaatttgtccaggatagacatagagctagaagaaacagacttcgtaaagatca

SEQ ID NO: 164732 - DNA, 96 bp, Homo sapiens
gttcagcttggcaggaggagcagatctagaaaacaaggtgattacgctttcatccatcccaggggaatcacttacctatgccagcacaactttcaa

SEQ ID NO: 164733 - DNA, 100 bp, Homo sapiens
atggctttgggggccttgcttccattttccattattatgtggactaccggagcgacagcgcagtccaagaccttgcaggagcgagaacccgagcagcgcc

SEQ ID NO: 164734 - DNA, 75 bp, Homo sapiens
gaaggggccagtctggagacagtcaagctctattaccaggttttaaacttcgccatgatcgtgtcttctgcactc

SEQ ID NO: 164735 - DNA, 50 bp, Homo sapiens
cttggagtccggacatctgaaacttgattcttggtgccaccattgagaac

SEQ ID NO: 164736 - DNA, 90 bp, Homo sapiens
gcggcggcgcgggtgctccgggccgaggccgcgaataccctctaccatctgctttggtcagggtgccgctcgaggatttaaaagcaacaa

SEQ ID NO: 164737 - DNA, 100 bp, Homo sapiens
tggatgtcgatcttggacgagcctggagaggtcaccctcagctacggtgtctttgaggggaaactcaacgtcattaagctacagggccccttctccccgg

SEQ ID NO: 164738 - DNA, 85 bp, Homo sapiens
tagcaatcagcgagactccgtgggcgtaggaccctccgagccagaccattactgggacttccacccccaccacgtgcacagcgag

SEQ ID NO: 164739 - DNA, 100 bp, Homo sapiens
gcctgtcaacctctcaggggacttgctgggtgttaaaaaagatattgagaagctttatgaagctgtaccacagcttagtaatgtgtttaagattgaggac

SEQ ID NO: 164740 - DNA, 75 bp, Homo sapiens
cagcgaagagatctacattaaccagctggaagccctgttgctgactctgtccctacctgtggttgtcatcgtcca

SEQ ID NO: 164741 - DNA, 83 bp, Homo sapiens
gtcgcctctgtgctcgtgagtccagggatctaagagacctgtcggccatggagcctaatgatagtaccagtaccgctgtggag

SEQ ID NO: 164742 - DNA, 101 bp, Homo sapiens
gaccagttggatgatgagacgttatttccatcaaaaattgggtcgacaagtgcccccaatgatttatggtacaacttcattgaactgccctaccacgggga

SEQ ID NO: 164743 - DNA, 104 bp, Homo sapiens
tcaatatctgtcttcggtggactccttcggcagtccacccaccgccgccgcctcccagggaacggcaggagcagctgatgggatatcggaagagagggccgaag

SEQ ID NO: 164744 - DNA, 96 bp, Homo sapiens
gcattctcagttcataggctatcccatcaccctttatgttgggtatctacagccattggttgctgttcaggtcagctttgctcctaacaacactgg

SEQ ID NO: 164745 - DNA, 100 bp, Homo sapiens
tggccacacagtcgtcctaactatgctgaatttctttgtcaccgaatgaattttcaacgtccggttcatctaatacagacactggtaaagttactgggac

SEQ ID NO: 164746 - DNA, 90 bp, Homo sapiens
cttcaccaattcagagaggagatgtgacaatagaccgcagacacagggcccatcaccctaagggttgcaatattatctcatatctttggg

SEQ ID NO: 164747 - DNA, 100 bp, Homo sapiens
ggcaccttccaccaaccgccagatcggaataactgaagtgaagtgatggactccgatttggagagtagtaagacgtgaaaggaatacacttgtgtttaag

SEQ ID NO: 164748 - DNA, 75 bp, Homo sapiens
cattgaagctgtgcaagctatataaccagctcatgtttggaaaaggaatcttccactgaaacatttggatacccg

SEQ ID NO: 164749 - DNA, 75 bp, Homo sapiens
ccagctcaatgacgtggcccacctggtacagccgagccaagcagatgcccgatacatcgagatatttccaagcag

SEQ ID NO: 164750 - DNA, 98 bp, Homo sapiens
tggtgagacggagctatcggcgccgcggcaagagccaggtacgtcagcctgtcatatgcatcaacaaccatgtattttgttcgatttgtattgatttg

SEQ ID NO: 164751 - DNA, 87 bp, Homo sapiens
caaaagtgctcaacttcctccagaaactttggcgacaatgttggcctgtctgcaagcttgtgcaggctggtttaggtgaatttcgaa

SEQ ID NO: 164752 - DNA, 96 bp, Homo sapiens
agtttgctaaatttgaaaaggagaaaatgaatgccaaatgggacacgcgggaacttcattgcaggccgtgtgtcaccctgaccacgtctatctctg

SEQ ID NO: 164753 - DNA, 50 bp, Homo sapiens
cgcggcttcctccagacctctcggcgcggtactatactggcaattgctgg

SEQ ID NO: 164754 - DNA, 83 bp, Homo sapiens
gcaccagcaagatcggcaggcgagattgcctgacccaggcctgctcggccctcacagggtgcccgtggttgacacgagctgtg

SEQ ID NO: 164755 - DNA, 101 bp, Homo sapiens
gccgcagagcgccgaggaggctttcctgctggtggcaaccgcctacgagacactcaagaagatggctgtgccacccacgtatgccgatcttggcaaatctg

SEQ ID NO: 164756 - DNA, 147 bp, Homo sapiens
cggccctgctctcccgcctgaaggcaccttggccaggtccccgtccattgatagcattcagaaagatcccaggctcagctatgtgaaccatgcagaggacctggcctccaagctcctacaatgttccccaaagaacagactgtcggc

SEQ ID NO: 164757 - DNA, 82 bp, Homo sapiens
ccgaattttaagtcatcgttctaggataggaactgtggctgcaccatctgtcttcatcttcccgccatctgatgagcagttg

SEQ ID NO: 164758 - DNA, 75 bp, Homo sapiens
ccggcgccgtcgcgccactcctccgagtttattcttcagtccaaggaagcaattcacagtcagctgttagagaag

SEQ ID NO: 164759 - DNA, 88 bp, Homo sapiens
aactgccccatcgatgtgcggcgtccgctgtataaggttttataggatcacattgacaaaagtaccatggagttttatgagtcagcat

SEQ ID NO: 164760 - DNA, 98 bp, Homo sapiens
tgcttactacacagttggactctcttgaaagacttataaaaggttgttccaggctatggccatgcagtactaaggaagactgatccgcgatatacctg

SEQ ID NO: 164761 - DNA, 78 bp, Homo sapiens
cgccgggagctctgaccgaggcgcctcgctggggcggggaccttgccttgcccggggatgagctcaggtttctacaaa

SEQ ID NO: 164762 - DNA, 50 bp, Homo sapiens
cagaaggtctctggagacatcttcagcagcccaggatccggttgtggccg

SEQ ID NO: 164763 - DNA, 80 bp, Homo sapiens
caccttacccagcccagcccatgggcccaccggcctaccacgagaccctggctggctgagaaagtgttcatggtggctcg

SEQ ID NO: 164764 - DNA, 100 bp, Homo sapiens
gccaattgtatatacaccgacggttggtcttgcctgctcccagtatggacacatctttagaagacctaattggctggggaacagaccagggaattggtgg

SEQ ID NO: 164765 - DNA, 82 bp, Homo sapiens
ttaaggattccaagtaactcttatttggtatatagaaggtacacagaatcagaaaagattataaaagaaagcaagatttttg

SEQ ID NO: 164766 - DNA, 100 bp, Homo sapiens
ccaagttgggggctcagaggggagtcatcatgagcgatgttaccattgtgaaagaaggttgggttcagaagagggatatttgatttaatggatgccaaag

SEQ ID NO: 164767 - DNA, 75 bp, Homo sapiens
gctaagtgttcgctacgcggggctaccggatcggtcggaaatggactggacctacagagacatctgggattttct

SEQ ID NO: 164768 - DNA, 74 bp, Homo sapiens
ttctcattccttctccagggagagtcgctgcagacagtgatctgacacaaacacagctgaagcaaacagaggtc

SEQ ID NO: 164769 - DNA, 97 bp, Homo sapiens
cgagtcctgagcaccctgaatgtcctcgtgaccccggagctgttggagacaggtgaaggacttaactaagtacttggatcccagtgggctcggcgtg

SEQ ID NO: 164770 - DNA, 96 bp, Homo sapiens
ctcagatgatctccccttgaatgtttcccgcgagactcttcagcaacataaactgcttaagtatgaccagtataagactccaatggagaacattgg

SEQ ID NO: 164771 - DNA, 101 bp, Homo sapiens
caacatttgtgtttttgcagatgaacaggagatctataaggacaggcagaaattctcagaacaggttttcaaagtggcctcctcagacctggtcaacatgg

SEQ ID NO: 164772 - DNA, 82 bp, Homo sapiens
ccctgccctccttcaagattgacttctcggaatggaaggatgacgaggccctgacatccttcaagcgccagcaagaggagag

SEQ ID NO: 164773 - DNA, 83 bp, Homo sapiens
caaacttgccttcctgttctccaagaccaggttaatttggagtggcccctggagtcagtttcctacaccatccgaggccccac

SEQ ID NO: 164774 - DNA, 74 bp, Homo sapiens
acaaaaattcttcaagaaatctaagaccccaccaacaactgaacgctttggtcaggctgctacaatggaaggaa

SEQ ID NO: 164775 - DNA, 100 bp, Homo sapiens
cggcacacgggtgagaagcccttcgcctgcacctggccaggctgcggctggagtgtgtggtgacatccatggccaattttttgatctgatgaaacttttt

SEQ ID NO: 164776 - DNA, 100 bp, Homo sapiens
atcgtcatgcagctgcagcattagctgctatgaatggacggaagataatgggtaaggatgtgcagaacaagttaaaggagtcagcacagtgcgtcgggga

SEQ ID NO: 164777 - DNA, 75 bp, Homo sapiens
gcggcgtcgagaggaccatcctgggtgctggccctgtgctggaggtgttcgaaatccgcaccactgatgacctca

SEQ ID NO: 164778 - DNA, 50 bp, Homo sapiens
tccactttggaaagaagatttctcagaaaacccgcctagtgccaagcaac

SEQ ID NO: 164779 - DNA, 87 bp, Homo sapiens
ggaagagagacccggcccggtgtcacggaggatatgggccctcacattttccaaacctgtccatctgctaactattttgactgcaga

SEQ ID NO: 164780 - DNA, 82 bp, Homo sapiens
tttcctgctggtggcaaccgcctacgagacactcaaggggatgttcgtctaaccccagaagactttgctagagctcagaagt

SEQ ID NO: 164781 - DNA, 95 bp, Homo sapiens
tggactcctgcctactcctaacccacttacccagaaaggtgcaaaattccttagtgatgctgagatcatccagttagtcaatgctaagcatatcc

SEQ ID NO: 164782 - DNA, 97 bp, Homo sapiens
gcgcggaaggacgaggctgaggcgagaaacgaggtgaccatagccgatgactactcagatccctttgatgccaagaatgatctcaagagcaaagcag

SEQ ID NO: 164783 - DNA, 75 bp, Homo sapiens
taattttagggtcctttatatagaagggagagtaggcagcacagcattctcagaagcagtctactgagctcttcc

SEQ ID NO: 164784 - DNA, 98 bp, Homo sapiens
aaatcttagctctctcaatctctgtctgaactggatcataaatgacaggctgtattcatcaccaaagaaaaaacttacaccaatgcagaaatcggtta

SEQ ID NO: 164785 - DNA, 80 bp, Homo sapiens
gggtcgccgccactgccgcaggaggcgtgaggtgcccgtggttgacacgagctgtgtccccagctgttcccgtctacaat

SEQ ID NO: 164786 - DNA, 145 bp, Homo sapiens
aagaccttccaggtcaagctggagacgcgccagatcacgtggagccggggcgccgacaagatcgagggggccaggtgagaaggactggcagaaatacgagactgctcggcggctgaaaaaatgtgtggacaagatccggaaccag

SEQ ID NO: 164787 - DNA, 82 bp, Homo sapiens
caacaccacaataatccacagccaaggctatggatcgaagttgtaatcgtatgtcttcgcacacagagacgtcaagtttctt

SEQ ID NO: 164788 - DNA, 95 bp, Homo sapiens
cttctcctcacacagtttggcttccgtggggccctccccaagctgggaatctgtgctggccttcaggatataattgatacagcatgtgaagtatt

SEQ ID NO: 164789 - DNA, 96 bp, Homo sapiens
ctgtttgcaagagatgtatacataaagctacaaacatggagtttgcagtgaagatcaaaaaccatttctccattgcatttatcatctataaatttg

SEQ ID NO: 164790 - DNA, 100 bp, Homo sapiens
gccgcacgtggaatgacccgtctgtgcagcaggacatcaagttcttgccgttcaagacccgaccgcatgtctgtcatggacctcgccaatacttgctcca

SEQ ID NO: 164791 - DNA, 97 bp, Homo sapiens
caacttcaagaaatagggcaggagaaggagcagttgacccaggaattacaggaggctcggaagaggatggagatgaagatgaggaagctgagtcagc

SEQ ID NO: 164792 - DNA, 90 bp, Homo sapiens
gcgccccccgggacagtctccgaagtctcgagcaggagctctttgttcaatgcctagccacctattcctacagacacggcagtggaaagg

SEQ ID NO: 164793 - DNA, 76 bp, Homo sapiens
aggctaccgggcccagcacagccagcaccgcacgccctgcaagggagagtcatcagaaattgggccttccctcgtg

SEQ ID NO: 164794 - DNA, 87 bp, Homo sapiens
gcttctccagcgctccttgctcgcaaggcgggggaggcggcggcccagccacgatgggagtgcatccgccccaacccttttccccct

SEQ ID NO: 164795 - DNA, 100 bp, Homo sapiens
cgagagcgcggtggccgggccccaggtcggtgagctggtaaaggttacgaagattaatgtgagtggtcagtgggaaggggagtgtaatggcaaacgaggt

SEQ ID NO: 164796 - DNA, 88 bp, Homo sapiens
tagcaccccgagaaccgtcagtttgagccagatgcttccgacttcgactccttaccttaaaagatgctggagtcatatgtaactccaa

SEQ ID NO: 164797 - DNA, 100 bp, Homo sapiens
gcacagccacatatttacctgaggttgctaaggaacaaggcgggaggcagcaccgggctcttgatggacttggcagccaatgaaaaggccgttcatgcag

SEQ ID NO: 164798 - DNA, 89 bp, Homo sapiens
tgctgcattgtgaaaggacctctccagcaatgattacttcagaattaccagtgttacagtcatcatcagatttgaaatatttaaagtgg

SEQ ID NO: 164799 - DNA, 75 bp, Homo sapiens
agctctcctccttcttcctcaactatctcgctgacacgcagggggaaatttgcagtggtgagaaaatgtataaag

SEQ ID NO: 164800 - DNA, 101 bp, Homo sapiens
ctaacgcctcccggctctcgtcagcctcccgccggccgtctccttaacaccgaacaccattcttatattcagctgccttttggatatctctcccaggatgt

SEQ ID NO: 164801 - DNA, 82 bp, Homo sapiens
gacttctcaagtgcaattcaagatatccgaaggttcaattatgtggtcaaaagtttacagatgcttcctcagcaacggaaag

SEQ ID NO: 164802 - DNA, 98 bp, Homo sapiens
ccggttcttggtgcccctgggcatcaccaacatagccatcgacttcggggagcaggagaatggtgttgaacgcgtgtgtcctgagagcctgctgcagt

SEQ ID NO: 164803 - DNA, 100 bp, Homo sapiens
ccaggaggtgatgctggaaaactgtgggctcctggtgtctctggctctctcttccgaatttgtaatgaaagatttactacacaaagggaagagtaataca

SEQ ID NO: 164804 - DNA, 74 bp, Homo sapiens
tcgccttcggagagcagagtcaacacggaggatatcactactttaactggagttccagaagagcatataaaaac

SEQ ID NO: 164805 - DNA, 100 bp, Homo sapiens
ttggggggctcggctgcagacttggccaaatggacgggactattaaggcctcgaaaaagcccaagacagcagaagcagacacctccagtgaactagcaaa

SEQ ID NO: 164806 - DNA, 100 bp, Homo sapiens
gggggaagggcctcaaagccagaaggagtctggtgaaggcagaaattcatcagactgtagagataatgaaattaaaaaatggcagctagctcctcttcgt

SEQ ID NO: 164807 - DNA, 83 bp, Homo sapiens
tgatccgcaagcatgctcagaccttcattgctctgtgtgccaccggtcagcccaaggccaaccccactgtcactctgttcccg

SEQ ID NO: 164808 - DNA, 100 bp, Homo sapiens
gaagcaatgcttgaggctccttacaagaaggtttatgctaaaactatcgatgggcaacagactattattgcatgtattgaaagccaccagtttcagccta

SEQ ID NO: 164809 - DNA, 75 bp, Homo sapiens
tatgatatgcttgcttctattaaaagtggtgatgaacttcaggatgagagggagaaccgaagattacaggaggcc

SEQ ID NO: 164810 - DNA, 82 bp, Homo sapiens
ggtccgattagccttttctctgccttgcttgcttgagcttcagcggaattcgaaatggcccagctgagagccagcctggagg

SEQ ID NO: 164811 - DNA, 100 bp, Homo sapiens
atatgagtccaacaagcaatgaagacctcaggaaaatcccgttggaagctgaaggtgttcctgaagtatctgaaaaatatgaaattagctctgttcccac

SEQ ID NO: 164812 - DNA, 107 bp, Homo sapiens
ggaaggaaccgctctcgcttcgtcctacacttgcgcaaatgtctccggtaaatgagctggatggtatcccgttgatcctggacaactgcaacatcagtgacagtaac

SEQ ID NO: 164813 - DNA, 75 bp, Homo sapiens
ctcatgtccctgaatcagcttttgccacttgcttggcaaggttttttgcatgtctgacacccatgactccacctg

SEQ ID NO: 164814 - DNA, 116 bp, Homo sapiens
gattgcccatcaggatgattttaaccagcttctggccgaactgaacacttgccatgggcaggaaaccacagaaggacagaataacgggctcccagattcacaagccccaccaagag

SEQ ID NO: 164815 - DNA, 100 bp, Homo sapiens
aacaaaacaagaaaaatgaggagcgaatgtttaaggaaaaccaaagtttattcagtgaggtagcttccttaaattacaatgccatcaagtcatataaaac

SEQ ID NO: 164816 - DNA, 75 bp, Homo sapiens
ttgcccatgcacttgttgcagaaacagccaaggcgtgctggtcaccatgacaacagagacaggccccgactctga

SEQ ID NO: 164817 - DNA, 83 bp, Homo sapiens
gcagcgtgcgttcagccctggggtggccagcatcgaaatgttcagccttttagtgatgaagatgcatcaattgaaacaatgag

SEQ ID NO: 164818 - DNA, 88 bp, Homo sapiens
ctgatcacaaacaaatccttgaaagaagaagatggagaagaaatagttacctatgatcgagagaagacgatctgcacttcgcattttg

SEQ ID NO: 164819 - DNA, 100 bp, Homo sapiens
aaggattccaagtaactcttatttgctccacaggatccccatatcctgggccatgagtgagttgaaagactgccccttgcagttccacgacttcaagtct

SEQ ID NO: 164820 - DNA, 103 bp, Homo sapiens
tgaagatggtgaaggagctggagaagcacggagttcgggggatggcacagaatgggttttcggctttgtgagaaaccttaccatcaaacacgatggccagcaa

SEQ ID NO: 164821 - DNA, 75 bp, Homo sapiens
gatggtgaagaaggagggaacaagaggcccatgccctgggaaatgatgtcactctgaaactcaggctggaataca

SEQ ID NO: 164822 - DNA, 100 bp, Homo sapiens
ttcagagtgccaggatctcaggtggaagtcaatgacatcaaaaattcctttgagagaggctgctctttggcgtaaattgcaatcgattagggatcgtttc

SEQ ID NO: 164823 - DNA, 83 bp, Homo sapiens
aagaccggagagataacagcctcctccaacaaatccctcaacttgctaaaaatcaacaaggatggaacattactgtggacctg

SEQ ID NO: 164824 - DNA, 98 bp, Homo sapiens
ttaggcgtggagagggagtgatgtcttccagactcggtgctgtacccgcctgtcggagatgtatgcagtgtgacgccaagtttgactttctcaccaga

SEQ ID NO: 164825 - DNA, 90 bp, Homo sapiens
gtttaatcagacctgctcacacttcagaatagagaaggaaacagagcaaatgcagcgttacaatcaaagacttattgaggaattgaaaaa

SEQ ID NO: 164826 - DNA, 100 bp, Homo sapiens
gctgatcgagcaggcggcgcagtacaccaacgcggtgcgcgaccgggagctggacctccgggaacccagtgacttgattgtaaaaatttacagagcggaa

SEQ ID NO: 164827 - DNA, 126 bp, Homo sapiens
gtgggccccaacttccgcgtcggcaagaagatcggctgcggcaacttcggggagctccgcctaggtctcctctgagcctccggcctccataagacccaaaacagatgacacctcttcccagtcccc

SEQ ID NO: 164828 - DNA, 100 bp, Homo sapiens
ccaggagatgggacagcgtctcaatgtctagtatgttcaacacaccaggaatgcagagcttgttgcaacaaataactgaaaacccacaactgatgcaaaa

SEQ ID NO: 164829 - DNA, 90 bp, Homo sapiens
cccgagaggtcaccatgaagaagggagatatccttaccttactcaacagcaccaacaagaaagtttcctacactactgaggtttaggggc

SEQ ID NO: 164830 - DNA, 100 bp, Homo sapiens
cttctcttcaccagctcttcagatcaatatgaatgtgacagtgatgataacatgggtgccaaaaatacttcaataggagaagaatttatatccacagaag

SEQ ID NO: 164831 - DNA, 125 bp, Homo sapiens
gtggagcgagtggactcctgcgcctccatgtacagccgctccatccagggccaccatgtctgcctcctggtgaaaaaggagatagtggagcaaaccatgcggaggaggcagcggcgagagtggga

SEQ ID NO: 164832 - DNA, 49 bp, Homo sapiens
gttagtcgcagtcttcgctgctaacgagttgctggagaatgtaacccta

SEQ ID NO: 164833 - DNA, 90 bp, Homo sapiens
cagaagcccaagtcaaaatgcatagacctaaagaagctgttctttcatgcagtcaagaaaaaatgcctgtcttaaaggctgaagcgtcac

SEQ ID NO: 164834 - DNA, 100 bp, Homo sapiens
cggcgcgcgcgcggcggaggacgaggaagagttgtggcgaggcagatcctgccccgtggccgcggccgtctcgtaggaatgttttaaaggaagttgggct

SEQ ID NO: 164835 - DNA, 82 bp, Homo sapiens
ggccaacgtgaacctggcatatctgggcgccaagccgcggagcctccagacggggccttcaccgccctgtgctactctgcag

SEQ ID NO: 164836 - DNA, 51 bp, Homo sapiens
gcggtggtccgccatttcgtggacgccgggaggaagaacgtgcaaaacgtg

SEQ ID NO: 164837 - DNA, 100 bp, Homo sapiens
cggtgcccagcggtgtggaatgagagcgctgcaggtgcgcaccgggaagttcaggttgtactcagactatctctactttgcaagttcgaataaatccgcg

SEQ ID NO: 164838 - DNA, 75 bp, Homo sapiens
cgaccaatcctcacgattgagtgtcaaagaagtacctggagtagaacagaaaaattattatgtctgtgttccctt

SEQ ID NO: 164839 - DNA, 82 bp, Homo sapiens
ggccgggcgacctgggcaccagcaggacccgaggccaggagccaggggcccagaaggattttttatcaagcagaaatgcatc

SEQ ID NO: 164840 - DNA, 90 bp, Homo sapiens
ggaaggccaagcagactaagcaggacaaggagaagatcgctgatgtggtgttgctgcagaagctgcagttgagacagggtttcccatgtt

SEQ ID NO: 164841 - DNA, 75 bp, Homo sapiens
gcgcggattcgccgaggcaccgaggcactcagaggagactcgggatccgggatgaaggcggagcttccccctggg

SEQ ID NO: 164842 - DNA, 100 bp, Homo sapiens
gcagagcaaagttaccggacagcaattaaacacagaaggaaatacccagactgttactacaacctcgggcgtctgccttcagtttggaaacctgcagaat

SEQ ID NO: 164843 - DNA, 90 bp, Homo sapiens
gtccgcgcccttcctcggcgggccggactggttcatgtgtgcccagctccctaatcaggtcctggagagcatcagcatcatcgacacccc

SEQ ID NO: 164844 - DNA, 75 bp, Homo sapiens
tttgcaacatttcaggaaaacagagaaagaagtgataggagggctctgtagattccctcccaggctgtccctcgc

SEQ ID NO: 164845 - DNA, 75 bp, Homo sapiens
gtgatattaaaattgaagtcttctgtgagaggacacccaaaacatgtgaggttcaattcccatgaaagtgcagca

SEQ ID NO: 164846 - DNA, 82 bp, Homo sapiens
ccgagcgtcgccgccgccgccgccatgaacaactcgggcgccgacgagatcggtcctggactgctcttcctgctcttcagca

SEQ ID NO: 164847 - DNA, 50 bp, Homo sapiens
aatttgcctcggggacgcctctccaggtgctggagaatctggtaaaagca

SEQ ID NO: 164848 - DNA, 112 bp, Homo sapiens
cgcgctgctgctgttcttcgtaggcggagtcgccgagtcggtgctggagaatctggtaaaagcaccattgtgaagcagatgaggatcctgcatgttaatgggtttaatggag

SEQ ID NO: 164849 - DNA, 101 bp, Homo sapiens
agccgcggtgcgccttctccacgctgggccgggtgttgcgcctggcctacagcgaggctggtgattttacaacgagatgctgctctccatagggatgctca

SEQ ID NO: 164850 - DNA, 101 bp, Homo sapiens
gatcctgaaacacctgtcccggtgaatgaaaactttgccattgatttgatagcagagcagcccgtgagcgaggtggagactcgggtgatagcgtgcgatgg

SEQ ID NO: 164851 - DNA, 75 bp, Homo sapiens
agagttgaaatagaaaagtctctaacacaggtgaccaagaatatggcccaggtgaccaaagccctggacaaggcc

SEQ ID NO: 164852 - DNA, 80 bp, Homo sapiens
cacacaaaaaatgacagaaatgttgaatgttcctttgaggttctgtttggattctgcaaagcagactcgtcagaaagttg

SEQ ID NO: 164853 - DNA, 77 bp, Homo sapiens
gctgcacgtctcgcggatcatgctgtgtccctggccagtgtccttccacctgtccacaagcatggggaacatcttcg

SEQ ID NO: 164854 - DNA, 96 bp, Homo sapiens
gccaggagaaggagttcgtgcaggcgtacgaggatgtgctggagcggtacaaagtttgaagaaaacaggtctgaaacaaggtcttacccccagctg

SEQ ID NO: 164855 - DNA, 75 bp, Homo sapiens
tagaaaacgagaaagtaaagtgcctgctgatctcttaaaattttctaccctagcaaggatggtacgaagattcca

SEQ ID NO: 164856 - DNA, 74 bp, Homo sapiens
ggtcactttccagcagtccagcacggccaagtcagccacctggacggtgccaggaccattgacaccagaaatgg

SEQ ID NO: 164857 - DNA, 83 bp, Homo sapiens
cggatggcagggactgaaggtcacaccacagcgcgattttttatcaagcagaaatgcatcgaacaacgagaatcaagatcact

SEQ ID NO: 164858 - DNA, 82 bp, Homo sapiens
tccacctgcaaggattcaaagaagggttttggccaaattgggcgagggcacaaaataaccacttaccccttctcaccgagga

SEQ ID NO: 164859 - DNA, 82 bp, Homo sapiens
ttttgctgtctcctcctaatacgatattaataaggcagcggaaagaagaaatatgaatacggctccatcaagacccagcccc

SEQ ID NO: 164860 - DNA, 74 bp, Homo sapiens
ctgcatcgactggacggatgactccagataagatttgtgaccaaatcagtgatgctgtccttgatgcccacctt

SEQ ID NO: 164861 - DNA, 80 bp, Homo sapiens
ctgaagattactacacattactgggatgtgatgaactatcttcggaactgtggctgcaccatctgtcttcatcttcccgc

SEQ ID NO: 164862 - DNA, 75 bp, Homo sapiens
gcccctgcagcggaaccggacccagtccctgagccgcccctacacccacaggtttaacaacttactttcatcctg

SEQ ID NO: 164863 - DNA, 100 bp, Homo sapiens
gaaggcaacaggtgtcacagcacgttcttttagaactcatcaaattgaagctgttccaaccagctctgcaagtgatggatttaaggcaaatcttgttttt

SEQ ID NO: 164864 - DNA, 100 bp, Homo sapiens
tgtttgaggatattttcgatgtgaaggatattgacccggagggcaagaagtttgaccgaggtaagtaagatgctgcacttaaaaggatgcttgttttgat

SEQ ID NO: 164865 - DNA, 58 bp, Homo sapiens
tagcacagatggaccaaaggttatgcacaggagagaagaccaagaggtcggagaagag

SEQ ID NO: 164866 - DNA, 98 bp, Homo sapiens
gcttcgcgctcttcttcttcttccagggactcagcacctggcagatcaataagatggagtggtggagccgcttggtgtccagtgaccctgagatcaac

SEQ ID NO: 164867 - DNA, 83 bp, Homo sapiens
caaaaatcccatctaccgcaactctcagttcgagagtaaagctgtgatgcagatccatccgccctagcaaaatatgttctggc

SEQ ID NO: 164868 - DNA, 101 bp, Homo sapiens
taataacaaatagctttgtagagtggtggctgaatacattttggaagagagtttttcatcttagagattggtgaacaagtgtgagggtgtgagaaactcac

SEQ ID NO: 164869 - DNA, 75 bp, Homo sapiens
ctggatgcacgtacagaatacattcagccgtcaggacagtcattttgtttactcattcagccctgttgcaggtcc

SEQ ID NO: 164870 - DNA, 74 bp, Homo sapiens
cccactaccccagacctcatcatcaactccatccaacacttcgtttactccggaagctgtgctgaatggtttgg

SEQ ID NO: 164871 - DNA, 80 bp, Homo sapiens
cagagctgtaccagtacacggcccacgttgccagagcatgaataatctttcatttagtgagctatgttgcctcttctgct

SEQ ID NO: 164872 - DNA, 75 bp, Homo sapiens
ggaccttttcaaactgaagagaggaggctggctgcatcatgggagaagaggaaccaccaaagcccccactaaata

SEQ ID NO: 164873 - DNA, 82 bp, Homo sapiens
gacatgttcacgcacgggatccagagcgccgcgcacttcgtcatgttcttcgcgccctgcaccttctagccaccatggcaac

SEQ ID NO: 164874 - DNA, 75 bp, Homo sapiens
agacaaagggagagggtgaccgacatcccaactagttgcaggaaccttccctctacaccatcaaggctgttttca

SEQ ID NO: 164875 - DNA, 100 bp, Homo sapiens
gctttttctggtgtcctgaacctggaagttgtgctttttaagattacctaggaacagtacgatttggggttatcacaaataaacatcttgcgaaactggt

SEQ ID NO: 164876 - DNA, 100 bp, Homo sapiens
cggcccggtgaaactgaacttataatcgtcactggattgtgttcttcaacggtgccaacgtccggcaggtggacgtgcccacgctgaccggagccttcgg

SEQ ID NO: 164877 - DNA, 74 bp, Homo sapiens
tcaatgaagcagctgagaagtattatgatctggcagccaggctgaggcctaatcctgcctagggtagttaaaag

SEQ ID NO: 164878 - DNA, 98 bp, Homo sapiens
attggagcaagggaaggagccctggatggttgtgagggaagagacaggaagatggtgcccaggtatttacctcctgagtgttttgtagttggaaaaga

SEQ ID NO: 164879 - DNA, 100 bp, Homo sapiens
gaaaggagagcgcgacatcctctccaacggccagcaggttcaaggagcagggacaagttacaggaatgttctccaagcagcaatccaaaagagtctcaag

SEQ ID NO: 164880 - DNA, 75 bp, Homo sapiens
ttggaacaaaaaaaggagatgcctggcagccccgctctctgcaagattttaagcagcaccatcaagccttacaat

SEQ ID NO: 164881 - DNA, 75 bp, Homo sapiens
gctgaaggacaaggggctactcctgcgctgctacacgcaggcttttgaacacttgcagcaattagaattaataaa

SEQ ID NO: 164882 - DNA, 75 bp, Homo sapiens
atgaaatgattgaatctggtgttatcaacttaaaagatgccacctctaaggatatacgtggcatttcaagtgatc

SEQ ID NO: 164883 - DNA, 100 bp, Homo sapiens
ctttgtaggagagtttcatccgccctgaaatcttcccgatcgttaataactcctcaggtccctgcctgcacaggttgaagactgggatagtttccaagct

SEQ ID NO: 164884 - DNA, 90 bp, Homo sapiens
tggcggatccggcctgccctggcccagctcaacacctgatttcgccgagcccaggaagtgcgtcccctccgtggtcgtgggcgtcgtggg

SEQ ID NO: 164885 - DNA, 51 bp, Homo sapiens
ggaggccaaaatctgtcatcaaattgagtaaaataaaacagggtctgttac

SEQ ID NO: 164886 - DNA, 50 bp, Homo sapiens
gatacaatcagtttcacataagataattttccccagatggcccatcagaa

SEQ ID NO: 164887 - DNA, 74 bp, Homo sapiens
ccgaatcgctcctgcagcagagtgtccacaggatgaaatgtccgagtcaggccagtcctcggcggccgccacac

SEQ ID NO: 164888 - DNA, 100 bp, Homo sapiens
ccgcggccaggcagggaggagaccggcacccagacaggtggcgaaggcagaggaaaaccaaggtgtatgttggtaacctgggaactggcgctggcaaagg

SEQ ID NO: 164889 - DNA, 82 bp, Homo sapiens
cggcgagaggggctgtgacagtcggagtcccaagctgcggttcggctgctgccgagtttggtgccctggttgtcagatgttg

SEQ ID NO: 164890 - DNA, 71 bp, Homo sapiens
gtactttgccctcagcatctcccttcatgtctgggtcatgaacctgaaggcggctaacacagaccccacag

SEQ ID NO: 164891 - DNA, 51 bp, Homo sapiens
agtccatctaccctgactccttcacagttcttggctagtgaacaacactct

SEQ ID NO: 164892 - DNA, 100 bp, Homo sapiens
ccgccgagtcgcgcggaggcggaggcttggggagttgatccccctcatattgtgtacagcatgtctacatcctgagcctaaagagcgagatcagcttctc

SEQ ID NO: 164893 - DNA, 100 bp, Homo sapiens
attggagcaagttgtaaactgtagggatgctttggctcaagaatatctcatggagtgtattattcagctgactgcaaggcctctgaggtacaggaattca

SEQ ID NO: 164894 - DNA, 82 bp, Homo sapiens
cgaggcaggcccgacccgcctccccggcgccgccgtggctcgacggagaccagctaggaggccattaactgtttgatgcgag

SEQ ID NO: 164895 - DNA, 83 bp, Homo sapiens
gtgaaatttgttccacaggatgtgccaccagaacccaagaagattccgataagaaacacggatggagcactcatagcaactgg

SEQ ID NO: 164896 - DNA, 100 bp, Homo sapiens
gcagagacaaaagaaacgggccccgactggtctctaattaacagaagatggcaaagcccagccacagcagctatgtccttcagcagctaaacaaccaaag

SEQ ID NO: 164897 - DNA, 98 bp, Homo sapiens
cccggacctcggcggggagatggaatctctggaaacatggctacagaacatgttaatggaaatggtactgaagagcccatggatactacttctgcagt

SEQ ID NO: 164898 - DNA, 75 bp, Homo sapiens
aacatgaccgctgagcccatgaggattgttcaagtttagaagaatacaacattgccgcagcattactccctttga

SEQ ID NO: 164899 - DNA, 85 bp, Homo sapiens
tgcttctgactatcttctcttcaccagctcttcagatcaatatggtaatcaaatgcaaagcagctgtgctatgggagttaaagaa

SEQ ID NO: 164900 - DNA, 74 bp, Homo sapiens
aacctgtgaccacccctgaagaaattgcacaggtcaatattgaaggaggggctatagccttgggccaccctctt

SEQ ID NO: 164901 - DNA, 83 bp, Homo sapiens
aaactgtggtgggatggatcccattccagtcgaggtatgttatgcataaaagtggataatttacatgataaatgaaaatggcc

SEQ ID NO: 164902 - DNA, 82 bp, Homo sapiens
tgagcggcgagtttccgatttaaagctgagctgcgaggaaaatggcggcgggagggtggcccagttgaaatccttcccttcc

SEQ ID NO: 164903 - DNA, 83 bp, Homo sapiens
ttccatcttatcggatccaagcctttttgacagccccccaggttcagatgatgcaaagcttattgatatattttatcccggag

SEQ ID NO: 164904 - DNA, 75 bp, Homo sapiens
gttggaccagttgtacctggatgacggtcttaggagggaatgattccccagtaatattccctgccctgacccaaa

SEQ ID NO: 164905 - DNA, 80 bp, Homo sapiens
gccacctcctaaccttcccttcttgaacccccaggtggtattaaagataatcaaacattatcaagaagaaggacaaggaa

SEQ ID NO: 164906 - DNA, 75 bp, Homo sapiens
tagccaggctaggtgcctgcaggttgaagaactgagctctatctggtatatcagctggacagagcagaactatcc

SEQ ID NO: 164907 - DNA, 82 bp, Homo sapiens
gacctggtccttggagaccattagtcaagccaggaggatgaaattttgaacagatcaccaagaaacagaaagccacgaagag

SEQ ID NO: 164908 - DNA, 50 bp, Homo sapiens
ctttgacctttttgaagcctttgcaaaaagtcatcctttttgaacttcca

SEQ ID NO: 164909 - DNA, 82 bp, Homo sapiens
ggccgctctggagggactctccttctcaccgttccgggaacaaatgctagatactgagaaagatcagtctaaagaaaaggag

SEQ ID NO: 164910 - DNA, 73 bp, Homo sapiens
agagcgtgaccgagagcgcgaatatcgtcatcgttagaaggtgttggtgaaaatttgactgacccatctgtga

SEQ ID NO: 164911 - DNA, 83 bp, Homo sapiens
ggaggaaggaacgaggcaaggagctaaagcagcgtgcgttcagccctgggcctacagacctggtacctggatttttgcccgag

SEQ ID NO: 164912 - DNA, 74 bp, Homo sapiens
ccgaattcttataaagctgtcatcaacctgggaaggaattcaggctggaaactgagtccagattggcaggtgga

SEQ ID NO: 164913 - DNA, 75 bp, Homo sapiens
aaaaatctgttacttgatgaacttcagaaggacaggaagatgtcacccaagcgcatagctaaaagaaggtccccc

SEQ ID NO: 164914 - DNA, 90 bp, Homo sapiens
tgcttatgaatgctcgacttcagattgtgaagaggtctcttgaagtttggggtagtcaagaagcattagaagaagcaaaggaagtccgac

SEQ ID NO: 164915 - DNA, 90 bp, Homo sapiens
gcagcttatcttctggtgtcccttataccaagcaattcattccgtcagatgttccggtcaacaagaggccccacagtatcaaatatccgc

SEQ ID NO: 164916 - DNA, 100 bp, Homo sapiens
cctccaggagaagatcagtgggaagagcatagtatccaaactgggacccctgcctcggatcctgagggacgtccacacagcactgagcaccccaggtagc

SEQ ID NO: 164917 - DNA, 76 bp, Homo sapiens
caagttgccggtggaattggcccaggatgacagctggagaatggagtcaggtaccagcaacttcaaggtttctgcc

SEQ ID NO: 164918 - DNA, 100 bp, Homo sapiens
agaaagttgctgaaggcaggagggccagtcgtctgggattgtattccaaaacttcccagtcagtctcaggagaagaaatagatgcaatggatgttcagca

SEQ ID NO: 164919 - DNA, 74 bp, Homo sapiens
gaagcgagagctgacaggaagcctgttctcaggccagctgcgggccgtccagcggctgtgccacttctacagcg

SEQ ID NO: 164920 - DNA, 75 bp, Homo sapiens
aaatccagctagagaatggcatgtgcaaagatacagaggggttatggttttgtgaaattcacagatgaactggaa

SEQ ID NO: 164921 - DNA, 100 bp, Homo sapiens
agtccgagacacgttttgctcctactccgtgatggagctgtgcaccaaggggctgggctcgcaaacagagtccctcaagctttgtgtccctggtgatgtt

SEQ ID NO: 164922 - DNA, 100 bp, Homo sapiens
cagttacagcagctacagcagctgcgagacagtggcgagaaggccctcagcatcctcatgctccctcacaacatcccgtccagcctgagcctgctcacca

SEQ ID NO: 164923 - DNA, 74 bp, Homo sapiens
cctcactgcagaggtgctggagctggcagagtcatcttagtgggatttggggaagcaacagggctgtgtggggt

SEQ ID NO: 164924 - DNA, 51 bp, Homo sapiens
acagatgctatagtctggtatcaaaagaagatgtaaagaaaagttctaccc

SEQ ID NO: 164925 - DNA, 75 bp, Homo sapiens
catcgccctggatgtcttcgcgctctggctggtctcccctctgctgggaatgcagtttattctactccaagagat

SEQ ID NO: 164926 - DNA, 100 bp, Homo sapiens
tttgggagagttgtgtccaccagcctacttggaggagatccagtcggtccgtcgccataccaacagcatgctggaaggcaccaagaaccggcacccgccc

SEQ ID NO: 164927 - DNA, 74 bp, Homo sapiens
ggagagggtgctggctgccgcgcggccgaggtgttggtaaatcatgcttattgctacagtttacagacaagagg

SEQ ID NO: 164928 - DNA, 99 bp, Homo sapiens
aatccagaagagtatgaacatccaaatccctggaaagagagtttccagcagttgaactgtaagagtaaatgggtccagtaattggaatgactccagata

SEQ ID NO: 164929 - DNA, 90 bp, Homo sapiens
caccaacgcggtgcgcgaccgggagctggacctccgggctccataatgggagaagtaaagaacaaagacttaaggaacagcttggcgctc

SEQ ID NO: 164930 - DNA, 75 bp, Homo sapiens
ttcaggaacctgctgtcagtggtggttagcaggaagaagatgagccttaagtctgaacgccgaggaattcatgtg

SEQ ID NO: 164931 - DNA, 98 bp, Homo sapiens
tctaaggcagcaagtgcagaaatacaagcaggttttcattgaagcggtggctaaagcaaagaactatcagttgagggatttgcagttgataaaatggc

SEQ ID NO: 164932 - DNA, 90 bp, Homo sapiens
ttgaaatctgataagaaagtacggaccataataatcaggagtgaagtcccagggatattctgtgctggttaatgttcgtgaagaaattga

SEQ ID NO: 164933 - DNA, 96 bp, Homo sapiens
agaagatgaagaaagcctattatctgacccagaaaattcctgatcaggcaactgaggagatagaggaccgggaaacgctggctctcctggcagcaa

SEQ ID NO: 164934 - DNA, 100 bp, Homo sapiens
gagattcagccagcacactcctcgcgagcaagaaatgagccgtcagactgctacagcattacctaccggtacctcgaagtgtccaccatcccagagggtg

SEQ ID NO: 164935 - DNA, 75 bp, Homo sapiens
ctggttgaaacaaaattggcgattattcctggtggaggtgcagcagtaccgcgtcgccatgactgccaaggactg

SEQ ID NO: 164936 - DNA, 73 bp, Homo sapiens
aggcagcccaccaagaagatgtccaaagtgaaaggtctggtctttagagcagcccgaatggcactgcaaaata

SEQ ID NO: 164937 - DNA, 96 bp, Homo sapiens
gcgcgggccgaccgggcgcaccgaccatggcctccaaatgccccaagtgcgacaagaccgtgtacttcgacagttgaaccaactggaaaacgtttc

SEQ ID NO: 164938 - DNA, 80 bp, Homo sapiens
aaccccaggactgcgcccccgggagcgggcgcccagagaatgcatacacagccacagctatcaacagcaccaacttctgc

SEQ ID NO: 164939 - DNA, 80 bp, Homo sapiens
ggagaacctgcggcggccggagcgggtaacaagatgctcaactatagtgctcccagtgcagggggttgcctgctggacag

SEQ ID NO: 164940 - DNA, 75 bp, Homo sapiens
ctcatacaaggttgatgacattgacgacaggcgggagtttcaggaaactctgggaatggatttgtaaactcaaga

SEQ ID NO: 164941 - DNA, 100 bp, Homo sapiens
ttacttaagaaaatgggagcagatttacttggatctgtgcaagcaaaagttcaaaaggctctagatgtcacaaggaaagtccatcagcttgataatggag

SEQ ID NO: 164942 - DNA, 90 bp, Homo sapiens
ctttgagaactatattgcggacattgaggtggacggcaagcaggttgttggatatgggaagtatgaactggaagaggatggtaccccttc

SEQ ID NO: 164943 - DNA, 82 bp, Homo sapiens
aagagaagacgctttacccgactctttgggccgttatctcacgttttgtagtgcatccctgagcatgagcacagaatgaagc

SEQ ID NO: 164944 - DNA, 90 bp, Homo sapiens
ggaacttccttaaacttgcaaataatggcactgttctcagatacagcagaatccaggtctggtagaagaacagatgtaaatccgtttttg

SEQ ID NO: 164945 - DNA, 100 bp, Homo sapiens
atactgcagaccgtgaggattccaagccaaaggcaagctattggtattgagtgagttattctccccacctcagaagtaccagcttttggtgtatcatgca

SEQ ID NO: 164946 - DNA, 100 bp, Homo sapiens
ccggcccggtttccctcggcgtgctactgtgcgctcgatccagcaccatggggaagcgggacaatcgggtgaatgtcgtactctcaggaggctccaccat

SEQ ID NO: 164947 - DNA, 100 bp, Homo sapiens
gagaacatggactcatcttcatggaaacgtctgctaagactgcttccaatgtagaagagtatatgagcaacgtggattcatggtgtaaagcttgcggtga

SEQ ID NO: 164948 - DNA, 78 bp, Homo sapiens
tgttatgccagatggtcagtttaaagatatcagcctgtctgactacaaaggcatctctgacacgctgtgggccatcga

SEQ ID NO: 164949 - DNA, 97 bp, Homo sapiens
ccagtgctgccgacaggaacgtggagatctggaagatcaagaagctcattaagagcttggaggcggcccgcggtgacttctgacagctctctccatg

SEQ ID NO: 164950 - DNA, 100 bp, Homo sapiens
ggctctcgcagaggatgtgttagactcagagaacaagttccagttccagtctaccacccaacacctagccagactcggctagcaactcagctgactgaag

SEQ ID NO: 164951 - DNA, 76 bp, Homo sapiens
aggagtgaagctgcataccttcgcgcatggccgaaacagaagccctgtcgaagcttcgggaagacttcaggatgca

SEQ ID NO: 164952 - DNA, 101 bp, Homo sapiens
caggcagggtgccatgaacacagcacagcagcacacacacatccctaggttaatacctgtcataacaagcaactgtacctctaagtctgtcgcagttagaa

SEQ ID NO: 164953 - DNA, 100 bp, Homo sapiens
cagagctttcacgaaggcaccgacgtcatcatgctgaccaccaatcagatccgtaagtgtactaatggtcacttgatgtgcgctggctgttttatccacc

SEQ ID NO: 164954 - DNA, 75 bp, Homo sapiens
agggccaaggccggtgggaatttcccccaaaaaacttgggcagccgggtgagccaggagctgcattacaccaagg

SEQ ID NO: 164955 - DNA, 75 bp, Homo sapiens
cttgccgcggcctgccgcaatggaaacatctatattctgagaagataaccatctcttagagaaggctgagctgct

SEQ ID NO: 164956 - DNA, 112 bp, Homo sapiens
tcaatatctgtcttcggtggactccttcggcagtccacccaccgccgccgcctcccaggtgcccgtggttgacacgagctgtgtccccagctgttcccgtctacaatggcat

SEQ ID NO: 164957 - DNA, 83 bp, Homo sapiens
tactcctcccagtgacgggtctggagtgcgtgggggaccggctgttggcgggcctcaggcccaggcccaaggccaagtgagag

SEQ ID NO: 164958 - DNA, 75 bp, Homo sapiens
ttcgttgttgcctttcataatctcaggatctcaaagatttcatgagacaagctggggaagtaacgtttgcggatg

SEQ ID NO: 164959 - DNA, 88 bp, Homo sapiens
agacggacagtacctcttctgcaggtactggaaacccacaggcacacccaagtcgcccctcagtctccactagagacaggactgacca

SEQ ID NO: 164960 - DNA, 101 bp, Homo sapiens
gggaaaccaggcatctctgggtgggcaacttacccgagaacgtgcgggaagagaagatcatcgagcatttcaaacggtttccaatacttatctacaggaat

SEQ ID NO: 164961 - DNA, 100 bp, Homo sapiens
aaaattaaattttaaccatgagggaaatcgtgcacatccaggctggtcagtgtggcaaccagatcggtgccaagggctactacaaagttctgggaaaggg

SEQ ID NO: 164962 - DNA, 87 bp, Homo sapiens
caattactgggagagctgcagccaggagcaggaggtcaagcagaggagctgagttggcagaccgggcccccctgaaccgcaccccat

SEQ ID NO: 164963 - DNA, 90 bp, Homo sapiens
caacagtggccttctgatgaatactttaattgaaatggatgcagtcagaactgaatgttgaagaagtggtaaatgacaggagctggaagg

SEQ ID NO: 164964 - DNA, 100 bp, Homo sapiens
cagcgactgtgagcacaacccgaagcggcctgtgacctgtgaacagggctgtggaaactggcgatggaatatgagaggagccctctggaaagaaaaggac

SEQ ID NO: 164965 - DNA, 75 bp, Homo sapiens
cccgaccctggccgccccgagcggagcctggaggctgaaggggatgctaagggagataaagcaaaggtgaaggac

SEQ ID NO: 164966 - DNA, 75 bp, Homo sapiens
aatccatgctcagagatgccaagaagaatctagacagacaggcctttctaggcagatccagttcctaatggtttg

SEQ ID NO: 164967 - DNA, 75 bp, Homo sapiens
gaatcactattaccgcaacaataggagtaaacatggaagtactaacttcattccagaacaatttttggatgactt

SEQ ID NO: 164968 - DNA, 98 bp, Homo sapiens
agttcacatcctggagatgtacgagggacctcggacagtgatccaccctaaagcaagaattattgcggaagccgggccaatagtgattggcgaaggga

SEQ ID NO: 164969 - DNA, 100 bp, Homo sapiens
agaaggggctggatccgtgggtcagagaacacaggaccagtttgccatcccaaggccgaagcagtcctgcgttaactgcggccgggaggctatgagcgag

SEQ ID NO: 164970 - DNA, 101 bp, Homo sapiens
gctgcagcacgcatcgaggctatggaccctgccactgtcgagcagctgcacgagaagtttgaccgtctgaagaaactgcaccaggacgagaagaagaaact

SEQ ID NO: 164971 - DNA, 97 bp, Homo sapiens
ttgtatcactttttgcggagcataatgatctgcaatatgctgctccaggcggtcttattggtggtggaggtggatacagcagtcggagaacatctgg

SEQ ID NO: 164972 - DNA, 83 bp, Homo sapiens
aaggataagggcgacagcaacagctctgccggctggaaggtataatgggtctctcccaaatggcgatagaggaaggaggaaaa

SEQ ID NO: 164973 - DNA, 83 bp, Homo sapiens
gccaggacgaaggccctactgggcaagtttgggatatgagattgaaaatgacgactcggaattttcctgagagagaagtaccc

SEQ ID NO: 164974 - DNA, 75 bp, Homo sapiens
gcgcggggaccgctgtgctctcggtcatgcttcaccccttcctccatctgctgcacctaccactgattctacaga

SEQ ID NO: 164975 - DNA, 83 bp, Homo sapiens
ggtatatttgcagccagtactctatatgaacaatccgtctggatcacggatgtaggaagtgggtcagcgccaaactggagggg

SEQ ID NO: 164976 - DNA, 100 bp, Homo sapiens
caacaattacaagatctggaggaatgcaggagtccccagagccaggcagggggatgaaccgcgagggagctcccgggaagagtccggaggagatgtacat

SEQ ID NO: 164977 - DNA, 100 bp, Homo sapiens
tcaggatatgaagttcatcatcaaaaattgcttcacagcgaggtggagaagcccctgatgaacttccgtgagaacttcaagaaagacatgaagaagtgcg

SEQ ID NO: 164978 - DNA, 90 bp, Homo sapiens
tgacgggtctggagtgcgtgggggaccggctgttggcggcctccaagcccttgcctccagcccctgctccagatgagtatcttgtgtccc

SEQ ID NO: 164979 - DNA, 100 bp, Homo sapiens
cgccccgggagccagagggcgggggtcctcgccgggaccctcctgtgggcccagggctgactcctgagttctcacaacgcttgaccaataagattcggga

SEQ ID NO: 164980 - DNA, 88 bp, Homo sapiens
gtgctcgcagcgccttcaaactgctacaactggataaggaattccaactcttccaagacacaacatttgcctgcaacaaggacagcgg

SEQ ID NO: 164981 - DNA, 75 bp, Homo sapiens
ccaagaccagcgcgagggccctgggcaaggcccgacagagaatggatcttggagaatgtctgaaagtccatgacc

SEQ ID NO: 164982 - DNA, 98 bp, Homo sapiens
gaccattcagatgggatctttccggatcaatccagatggcagccagtcagtggtggagcaactgcctgcacgtggtggagcccatgccagtgcctggc

SEQ ID NO: 164983 - DNA, 98 bp, Homo sapiens
aagcacccctttcttgaaccgaacagagtcaagtggaatcaaaggcagacatctggtccctgggcataacagctattgaacttgcaagaggggaacca

SEQ ID NO: 164984 - DNA, 80 bp, Homo sapiens
gtctgtgtaagaagtactccagggaaacctcccagtgtactaatggtcacttgatgtgcgctggctgttttatccaccta

SEQ ID NO: 164985 - DNA, 100 bp, Homo sapiens
tggcggctcagtgcgtgaggttggcgcggcgcagtcttcctgctttggcgttgtctctcagggtgtacaactatgagcctttgacacagctcaagaatgt

SEQ ID NO: 164986 - DNA, 100 bp, Homo sapiens
gggaggatgggggtccagcctgctacggcggatttgacctgtacttcattttggacaaggtgtttttcctgaatgtgccatttgattccatcatggagcg

SEQ ID NO: 164987 - DNA, 100 bp, Homo sapiens
atagtctgttcctgacggataaaggagaagtctattcttgtggatggggtgctgatgggcaaacaggcggggagacaaccccttccccaagaatgctgat

SEQ ID NO: 164988 - DNA, 90 bp, Homo sapiens
ccgcgttcctatggacagacgcacagacacctgcaggtctacatgttcaagtgcgtgtggcggtgctacagattgatcaagtgcatgaac

SEQ ID NO: 164989 - DNA, 82 bp, Homo sapiens
caggaggagtaatgcgtggagcagaatggcatagtcacctgggcagcatgaaggttctgcggcatgaggaatttgaagaagg

SEQ ID NO: 164990 - DNA, 50 bp, Homo sapiens
gggcaacatctgcttctcctcctcagagtctgaagttgcagccggagtga

SEQ ID NO: 164991 - DNA, 76 bp, Homo sapiens
tcaacaacagcattattccagaagacaccttcttccccagcccagatcatcgcagcacaggaagaaatgcttcgga

SEQ ID NO: 164992 - DNA, 118 bp, Homo sapiens
ttcaggaccatctggatgacttggtggtggagtgtagagatatagttggcaacctcactgagttagaatcagagttttttgctccactcaagcctgttagaatcaccatggaatacag

SEQ ID NO: 164993 - DNA, 90 bp, Homo sapiens
gctgcacaatctggagacactggacagtatggaaattaccagcagtgaaaaagtacttacattccagtagccagtatctattagcagcca

SEQ ID NO: 164994 - DNA, 50 bp, Homo sapiens
ctgacagggtatctgaagtaaaagggggtgctggagaatctggtaaaagc

SEQ ID NO: 164995 - DNA, 100 bp, Homo sapiens
ttaaaagatcactgaagttggatggtctgttagaagaaaatgcagtcatcaagtgcctactatgactttaactaccatgatggaagcatgtgccaaggag

SEQ ID NO: 164996 - DNA, 100 bp, Homo sapiens
attatgaagatgacaaggatgatgatattagtgatactttctctgaaccagtagtttatgccaacgtgacttcattcatacagatgaaccaaggatcggg

SEQ ID NO: 164997 - DNA, 98 bp, Homo sapiens
gtaattctgcccccattgagcccctacttcaagtactccgtcatgatcaacaaggccacgccctacaactacccaggcagaagctcctcctggggtag

SEQ ID NO: 164998 - DNA, 82 bp, Homo sapiens
ttatcttccgactgatccagctggtggtcctggtctacgtcatcgggctccccaaaaaggccacaaagacagccccacctgc

SEQ ID NO: 164999 - DNA, 100 bp, Homo sapiens
tctgttcataaaatcttcacttctgggctcaggagagagatcaatgtcttattgtgatgagtctcgactgtcaaatcttcttcagaggatcacccgggaa

SEQ ID NO: 165000 - DNA, 83 bp, Homo sapiens
gcttctcctatgactacgtctttgactggaacatgctgaaattcaagtccattggaatattaagcccaggagttgctttgggg

SEQ ID NO: 165001 - DNA, 90 bp, Homo sapiens
atttaaaccctcaggcagcgtcaggaagcaccgaagccacctcagatgaaaaagcgggacctggagccctcggacgccacctacacggcc

SEQ ID NO: 165002 - DNA, 89 bp, Homo sapiens
aagtgggagcgggagggccgggcaattcccgaccgaaccaaacgcagacgacgttcccgaagcaaaagtccattcagaaaagacaagag

SEQ ID NO: 165003 - DNA, 116 bp, Homo sapiens
catggctacttcatattttggaaagcagtttttaagacaaagcctggcccaactagagaatctgtgcaaacagctgtatgaaaccacagacacaaccactcgactccaggcagaga

SEQ ID NO: 165004 - DNA, 98 bp, Homo sapiens
ctgatgcattacccattcatcggggatgtacactcactgattcttaaggctctgttccttagagatccaaagagctcttcagaaaccaggctgctttc

SEQ ID NO: 165005 - DNA, 96 bp, Homo sapiens
aagagctggtctacctcgtgcagattgcttgtcaggatcaaaatggtttcaatcccagaatactatgaaggcaagaacgtcctcctcacaggagct

SEQ ID NO: 165006 - DNA, 100 bp, Homo sapiens
ttcgtcgtgagatgtttgttttcaagcctagatattatcctactgaagatgtgcctcgaaagctgttgagccacggcaaaaaacccttcagtcagcacgt

SEQ ID NO: 165007 - DNA, 100 bp, Homo sapiens
gtactgtttttgtcatttgcaccagcttctttctccaggaaagatcaaaacgatgcactgcaagaatgacagggagagagtttttctctcgtttcccaga

SEQ ID NO: 165008 - DNA, 100 bp, Homo sapiens
ttcttccttctgccttctatatcaagttggtgaagaaagaacctatgaaatctgtacaaaagattggggtacaaagaacggcaccaggtgcagttgttag

SEQ ID NO: 165009 - DNA, 100 bp, Homo sapiens
ccgtcggccgcatccgtttccacgactttctgggagactcaatgaagagttgagtatcttatatccagctgccattgtgactattgatggatttagcctt

SEQ ID NO: 165010 - DNA, 97 bp, Homo sapiens
cacgttttctcaccggctggctgggcacacagacactgtcactggagtggccttcaacccatcagcgccccagggcaattgaaggaacagactaaaa

SEQ ID NO: 165011 - DNA, 99 bp, Homo sapiens
agcattgatcctaactgtgatgtggtagcagtggtccaaggaatttgccatttgtaaaaaacagtctttctgtttttggcttcttcgatttaatgtgag

SEQ ID NO: 165012 - DNA, 100 bp, Homo sapiens
ctttttactgtacatgattgggagaaaaattttaaagcattaaaaataaaggggaaagaagtagaacgacttccaaggcataaaggcatcacaagtggtc

SEQ ID NO: 165013 - DNA, 50 bp, Homo sapiens
gtcagcactcagcgcgggccgaaaccacccaccttcaccatgtctgacga

SEQ ID NO: 165014 - DNA, 75 bp, Homo sapiens
cacaaatgtacccccagtacacttactactatcctcattatctccaaaccaagataaatttgcgcctcattttgg

SEQ ID NO: 165015 - DNA, 99 bp, Homo sapiens
aaaatggcgccctacagcctactggtgactcggctgcaggtactgtccaagaagctggaacattattatccagcaagaatgttcgtgtcaactgtttgg

SEQ ID NO: 165016 - DNA, 83 bp, Homo sapiens
ggggagtctgattcagatgacaactgtacagatgtcactggtagaacctctgctagccagacaactatattattttgctcaac

SEQ ID NO: 165017 - DNA, 73 bp, Homo sapiens
cagtcctccagtgtttggatattcaggttcgtgctgtaagacctaaagttcttatgagattgtccaaaacaaa

SEQ ID NO: 165018 - DNA, 119 bp, Homo sapiens
ggaaacaagacagttctgtctgcagaagcccattatggctgtaactggagatgacacagatcatggaagggaagtggttgctgtgtatgttactggtgcttggaactgctattgttgag

SEQ ID NO: 165019 - DNA, 98 bp, Homo sapiens
tttggatatgtgcatcagtggtttatgccaagtacatcaggaacgtctctatcaagaatacaatttcagcaaggctgagggccatctgaaacagatgg

SEQ ID NO: 165020 - DNA, 100 bp, Homo sapiens
ctagtggtcctctggtcttccctgaccccgcggccggacgacccaagcccgctgagcaggatgaggaatgattgactggctatcctggccattggctcag

SEQ ID NO: 165021 - DNA, 75 bp, Homo sapiens
ttttgcctgaatacatgatttaaacaagagatttccacagaagcatctggaatcaagagacccatggcatctgag

SEQ ID NO: 165022 - DNA, 90 bp, Homo sapiens
cctggtcatacaccagtactaccaaggacagcttttttcctgcaaggccagaagctgggcttacagagattctctaaaggcagaagaaaa

SEQ ID NO: 165023 - DNA, 74 bp, Homo sapiens
tgaagcagtgcttcgtggtgactgaaaaagcacgagctttcagatggagatctggatctggatcttgtttatga

SEQ ID NO: 165024 - DNA, 100 bp, Homo sapiens
gttgccatgaaatatggaaacgactcctcggccgagctgagtgaggtggagccgccaccaaaatgcagattttcgtgaaaacccttacggggaagaccat

SEQ ID NO: 165025 - DNA, 76 bp, Homo sapiens
cgagaagatcgcgatatggctcaaggactgccggtgcaatggatgagcttcatagtctggatccaagaaggcaaga

SEQ ID NO: 165026 - DNA, 100 bp, Homo sapiens
atcactgtcctggctgtgctggccttagtgccccaggatcagggaggactggttggtggttctgtcagatgaaagcaaagcgaggctggatcccagcgtc

SEQ ID NO: 165027 - DNA, 75 bp, Homo sapiens
gctgtccaccgtggccgcggtggtgctaggtgtcatcaatcttacagaagaagtgctgtgggtcaaagtgaatat

SEQ ID NO: 165028 - DNA, 75 bp, Homo sapiens
attagctgagaccacagataaagtcaaacaaggcttttgggaagaatttgagatgtggaagatgtgaaatttgtc

SEQ ID NO: 165029 - DNA, 75 bp, Homo sapiens
ggaccgtttatcatgagcagcaactcggcttctgcaggagctgaagaagaagctgttcaaacgccggcgggtgtt

SEQ ID NO: 165030 - DNA, 76 bp, Homo sapiens
atttcgcctctggttcttgccaatcctgaatctgcaacaactttcaagacagctctggctctggctattgctcagg

SEQ ID NO: 165031 - DNA, 100 bp, Homo sapiens
aatccaacaagatcccccgtctgaggactgacctttttccgatggtactccaccactttcttggcacatgagatgcaagattgctcagggtgcagctaat

SEQ ID NO: 165032 - DNA, 100 bp, Homo sapiens
aacatctcagatgcttttgaccagaagttctcaaaggtgcctaccaaggtcaaaggctatgacaacctctttgctatgtagagacgggggttcaccatgt

SEQ ID NO: 165033 - DNA, 83 bp, Homo sapiens
agaagataaacgaggggctggaacacctcgccaaagcagagaaatagggagcttttggaagagtcccagatggaagcgaccag

SEQ ID NO: 165034 - DNA, 50 bp, Homo sapiens
cgcacctgcccgttcctatgtcctgcgggccttcctccggatgctcttcc

SEQ ID NO: 165035 - DNA, 80 bp, Homo sapiens
agatcaaaccacttctaaatgataagaacttggagcgtgatgcccagaagtgtgtgaactggtctgtgaccacaaagatg

SEQ ID NO: 165036 - DNA, 90 bp, Homo sapiens
ttgcaagtcatcagactgcataaaatcagccaaaaccccactgcagaggaagtcttgtcctggtctcaaaattttgacaagatgatgaag

SEQ ID NO: 165037 - DNA, 100 bp, Homo sapiens
cataacggggttcgggtgtctcgtgtgtgaacatcacagaaaatccattcctcgctgccgaagaattaacaggatgctctccaatgaatccctccatcct

SEQ ID NO: 165038 - DNA, 75 bp, Homo sapiens
tagcgctagccctgcagacagaggtgtgctgacgacctgctacaacagaaccgagcctcttgaagccattcttac

SEQ ID NO: 165039 - DNA, 75 bp, Homo sapiens
agaaggagattgccctgctcaaggcacagcatgagcaggcgctgaacaacctgcagtccaccttctcaggatttg

SEQ ID NO: 165040 - DNA, 90 bp, Homo sapiens
acttggctagtgcaagccttgtttattttcctcaccactgaatctacaggtcgagcaaatataaatgctaatctgcaagggaaagccaga

SEQ ID NO: 165041 - DNA, 97 bp, Homo sapiens
gacgacagaccgtttgtgtgcaatgccccgggctgtggacaggtgccactgattaatgaacttgaatcagcaatacatcagctgtacaaacagcgag

SEQ ID NO: 165042 - DNA, 100 bp, Homo sapiens
gaaacagtacaaacaaactataggactggatttctttttgagaaggataacattgccagtgttacctggaatgtcagagagctgaaagcagtcatatttt

SEQ ID NO: 165043 - DNA, 75 bp, Homo sapiens
attgtcctgtggggcttccggtggctgatcttcaggatcatgcttggagcacctgcctgctccgcttcagcggac

SEQ ID NO: 165044 - DNA, 51 bp, Homo sapiens
ggatcgctactattcaggactaatctatgaaagaccacagcaagattcttt

SEQ ID NO: 165045 - DNA, 100 bp, Homo sapiens
cagcttccagttagtggatatagcacaccatccccagccagcgtgccgccgccagacggattactggcagttcgtgaaagacatccggtggctcagtccc

SEQ ID NO: 165046 - DNA, 100 bp, Homo sapiens
aggacctctaccgagatgtgatgttggagaactacaggaacatggtcttgctgggtgaccctggcagcaaccccaacaaacgccagaggcagccccctct

SEQ ID NO: 165047 - DNA, 100 bp, Homo sapiens
cttctgctgaaaacagtttccgagcagaccgcccttcatctctgcctctggttgggataattcttcactattccacccttgccacagtactatgggtagg

SEQ ID NO: 165048 - DNA, 98 bp, Homo sapiens
ggaggaggaggaggggctccggctggtctgtggtgagccggtggacaaccagcaagccatggtgcgcagggagtctgtggtcaatctggagaacttca

SEQ ID NO: 165049 - DNA, 100 bp, Homo sapiens
tgaccgccgactgtcaatggagctggaaaacatcgtggccaacacggtcttgctgaaagccagggaagcccaaaatggagttaatcctgactgggagaag

SEQ ID NO: 165050 - DNA, 105 bp, Homo sapiens
gaagaccgcgcgcagggcctgcagcgggagctggacggcgagcgcgagcggcgcgagaaactggtcagtgagaaggtcggaggggccgaggggaccaagctggat

SEQ ID NO: 165051 - DNA, 82 bp, Homo sapiens
ctggtctttctcaacctcatcttctggacaatgcagatcttcgtgaagactctgactggtaagaccatcaccctcgaggttg

SEQ ID NO: 165052 - DNA, 100 bp, Homo sapiens
tgctcctgcagtctctctgtgtggctgtaacttacgtgtactttaccaacgagctgaagcagtgccggatggagtgctgtgatgtgccagccgagacact

SEQ ID NO: 165053 - DNA, 83 bp, Homo sapiens
cccggagccccagcagacaccccagtttctccacagtcgaactcctctaggcccacctgtgcccgtcacctcaccttgggcac

SEQ ID NO: 165054 - DNA, 51 bp, Homo sapiens
attttgcaccactggatgttgtttactgcagtgtttggccagcgcttggat

SEQ ID NO: 165055 - DNA, 83 bp, Homo sapiens
ctgcagagctgtggcttaccaggtccatggttttttggtgaaatcattgatggcaaatttggttgctgcttttcctttgggat

SEQ ID NO: 165056 - DNA, 100 bp, Homo sapiens
ggagacgctcgcgctcaagttcgagaacgcggccgccggggcctagaaattcacaccaccagcaattgccagcactttgtgtcccaagtggacacccagg

SEQ ID NO: 165057 - DNA, 82 bp, Homo sapiens
cgttctgcagaggaccatccagtgtgcaaaagacagatcgaggagctgctagagctgctgatgactgagatcctgcacccca

SEQ ID NO: 165058 - DNA, 96 bp, Homo sapiens
tgacacctcatccataatgtcaggaattattcgaaactcagggcaaaatcaccacccctctccacaggaatacagaacccagaagtaccatggctt

SEQ ID NO: 165059 - DNA, 100 bp, Homo sapiens
gatgctcccagcccggtgagacctgcctgaatggcgggaagtgtgaagcggccaatggcacggaggcctgcgtggactttgaacatgtcggggatcgccc

SEQ ID NO: 165060 - DNA, 50 bp, Homo sapiens
ccgagaccgcggccgggaccgaggagttttgcggcctccaggtggtggat

SEQ ID NO: 165061 - DNA, 83 bp, Homo sapiens
aggaaagcgatggaggagctgagcgctgatgagagattaaaatggcttccagaggaaagacagagacaagcaaattaaagcag

SEQ ID NO: 165062 - DNA, 90 bp, Homo sapiens
ccaagctctgctccacactgccaaccggccagaggacgagtgtggaattcttcttcactccatttgcagccagaggaagggtttccccac

SEQ ID NO: 165063 - DNA, 75 bp, Homo sapiens
gtcaattcaaaggacctgcccccagagagatgttgatgggaaccattttcagcatcctgctggtgactgtcatcc

SEQ ID NO: 165064 - DNA, 89 bp, Homo sapiens
caaacatccatatcataagtggaattttggagatattcaaagttgttcccatgactttgccgactaaagttctaagtgcccaccgtaaa

SEQ ID NO: 165065 - DNA, 75 bp, Homo sapiens
tccgggctacctgtttgaagagattgctaatcgtgttcgacgagtgtcacaaagccaagaatgccggctccacca

SEQ ID NO: 165066 - DNA, 76 bp, Homo sapiens
gcgctgcgcaagcacgctgaggagaccgagacatgggtgcccggcaccgcgcccgagcccactccattcagatcat

SEQ ID NO: 165067 - DNA, 82 bp, Homo sapiens
gagaagacgctttacccgactctttgggccgttatctcactggtactgactgtcctcacccacacccctgcccctcgagtga

SEQ ID NO: 165068 - DNA, 75 bp, Homo sapiens
gtgaggaattttgaagtacaccgtggtgacattgtatcattggtcaatggttgttttgaacaacctggaaccaaa

SEQ ID NO: 165069 - DNA, 100 bp, Homo sapiens
ggcggagtgtaggaagaggcactgctgagggggcgcgaggggaacggaggccagagctgcggactgagcacggaaggcatctaccgggtcagcgggaaca

SEQ ID NO: 165070 - DNA, 100 bp, Homo sapiens
tggactcagtttgtttctgctgattacacccgtgcccaggagcttgacgccttagataacagccatcctattgaagctacagaagaagtttccaaaaatc

SEQ ID NO: 165071 - DNA, 82 bp, Homo sapiens
ctcagacgctggcgggcgcagtttctcacgacgggccgagcctgccactgtctggcggcttctctgttgacaactcagctgg

SEQ ID NO: 165072 - DNA, 97 bp, Homo sapiens
acacaaaagcacacaaagacctcctcctccacaggggagacagagatctagaaatggccattgcctactggaacttagtgcttaatggaagatttaa

SEQ ID NO: 165073 - DNA, 131 bp, Homo sapiens
ggggagagaagtccgtctggtcaagtcccccaatctctgccatcaaggccgattttctttgaaccttcagcaaagtttccaacatggctagatccatcagaaactgaagccgtggagaacgctctcggggc

SEQ ID NO: 165074 - DNA, 82 bp, Homo sapiens
cacctctgcgtttttccctccaggcaacatgagtgagaatgaggaagaggaaatttctcagcaagaaggcagtggggactat

SEQ ID NO: 165075 - DNA, 101 bp, Homo sapiens
aggtgcctaccaaggtcaaaggctatgacaacctctttgctatggcaatgtctacttcgatctgaagtctagaggagacaagtatggcaaattggtcggcg

SEQ ID NO: 165076 - DNA, 74 bp, Homo sapiens
ggagatgcggggcaatgcactagaaaagaagtctaactatgaagtattagaaattctgcttggtcagaatcgtg

SEQ ID NO: 165077 - DNA, 83 bp, Homo sapiens
ccaagtattatatttacctgtatagtgtacttcatgttaggtgccgtgagcgatgtggagatgcaggaacactatgatgagtt

SEQ ID NO: 165078 - DNA, 100 bp, Homo sapiens
tttagatatgctggtcctgaagatgatgctgccattaccttgggggacttaggagccattgatgaaaaatacgacgtggctatatcatcctgttgtcatg

SEQ ID NO: 165079 - DNA, 100 bp, Homo sapiens
ccgagttcaacatcctcctggccaccgactcctacaaggtctctcaggcagctgcagagcttcaacagtactgtatgcagaatgcctgcaaggatgccct

SEQ ID NO: 165080 - DNA, 74 bp, Homo sapiens
cacttttcttcagaagctggtcgccgccggcagctatttgcatgcaaagaacatcatccatagagacatgaaat

SEQ ID NO: 165081 - DNA, 98 bp, Homo sapiens
tcctcctcacggtcctcctggctgtgctcatatacacctggtgcccctgggcgctgggattgctctagcctgtaagtataatggaaaagatgaggtct

SEQ ID NO: 165082 - DNA, 75 bp, Homo sapiens
agagaccacctgtccttcgagcagcttcagctttagctgcagctgcctctgttcagccacttgcaacacaatgtt

SEQ ID NO: 165083 - DNA, 90 bp, Homo sapiens
gaatctcactctgttaaagctggtctgttctaactgaggaaccgcggggaaaggcgaatgggtgcttttgaatgtgttcgtaaagtgtat

SEQ ID NO: 165084 - DNA, 99 bp, Homo sapiens
gaagactttaacagaactcaacaaatgctgtggcctttgtgtctgcccatgtaataggctccggatggtggagacgctgagcaacttgctgcgctccgt

SEQ ID NO: 165085 - DNA, 100 bp, Homo sapiens
gaacggggcgagcctggaggattgtcactccaacctcttttcgctgacagattacatcaatgccagtttcatggatggctacaagcagaagaatgcttac

SEQ ID NO: 165086 - DNA, 108 bp, Homo sapiens
caagatgccggcctattttcagaggccggaaaatgccctcaaacgcgccaacgcttcctgcctgacacagctcacttcaagaagtgcacaatgtcagaacgtggaatt

SEQ ID NO: 165087 - DNA, 83 bp, Homo sapiens
tttttttgtggagtggtttgaatatcgtaagcgcacgtttaaacatctcaaggagcgagcccagggcgtggtgctgaaagtgc

SEQ ID NO: 165088 - DNA, 100 bp, Homo sapiens
ggtgtttcaaagggtggtgaagaactaagttcgaacaactgccacagcagcaagcaacttgattgaagtatttgttgatggtcagtctgtcatggtggaa

SEQ ID NO: 165089 - DNA, 99 bp, Homo sapiens
atcccgtccgagccccggccccaagtaacgccgccgccccggagccgccaaatttaaaagcctgttgattcaagaactttctaaagtatttccggaaga

SEQ ID NO: 165090 - DNA, 97 bp, Homo sapiens
gcccggatgctgaagcaaaattcagagagattgcagaagcttcgatgtttttgaagcaggcatttgaaggagaataccctaaattattacgtcttta

SEQ ID NO: 165091 - DNA, 51 bp, Homo sapiens
ggccagcggagcggccgccacggggcataattggaatatcatttggagaaa

SEQ ID NO: 165092 - DNA, 100 bp, Homo sapiens
accatgggggaggccagtgtggaaaccagcctggacaccaagtctgtgtcagaaggccacctcaagaggaacatcgtggtgaagaccgtggagatgcggg

SEQ ID NO: 165093 - DNA, 74 bp, Homo sapiens
accaaacatttcctgccgctcggttttaaaatcaaagatgggaaaatcggagaaaattgcccttccccatggcc

SEQ ID NO: 165094 - DNA, 50 bp, Homo sapiens
tctagaagctctttgtgaagagggggtgaatctctacattaagaacttgg

SEQ ID NO: 165095 - DNA, 101 bp, Homo sapiens
gagttcttacaacatggcagacattgacaagccccttcacagatgtagtcactacaaatcttaaattgcgaaatccatcggatagaaaagtgtgtttcaaa

SEQ ID NO: 165096 - DNA, 99 bp, Homo sapiens
agcggatttgccaaaagactacctcttgagtgagagtgaagatgagactgcagagatgaatgaacgcctgcaaaaaatgggagagtcttctctaagaaa

SEQ ID NO: 165097 - DNA, 100 bp, Homo sapiens
gctggaaatcgtgcctgtgcggcgctcgctcaaggaactgatcccggtaaaagtgctgtttgtacgcaaccttgccaatactgtaacagaagagatttta

SEQ ID NO: 165098 - DNA, 100 bp, Homo sapiens
ccatggtctgtgacggaatcatccagtgccgcgacgggtccgatgaggatgcggcgtttgcaggatgctatgttggagtccggggtgacctggtctcagt

SEQ ID NO: 165099 - DNA, 73 bp, Homo sapiens
agatgcttaccgaatccggagatcctgaggaggaaattatggaagtggaaattacaatgattttggaaattat

SEQ ID NO: 165100 - DNA, 100 bp, Homo sapiens
cgcaggatccggctgccgaaggtcctcgccaggtgggcttggtgcttgcatttcctgcgttgcagtgtcaggatttttcagggatcagccttggcactgg

SEQ ID NO: 165101 - DNA, 82 bp, Homo sapiens
cccccaagcagcagcaggactcagaggcgagagtggccccagccgggccagaagcaggtgaaaggtgtagcagtcactcggc

SEQ ID NO: 165102 - DNA, 98 bp, Homo sapiens
tcaccatttggaaggaacagtacagagttgtacaggaggaaaaccaggtttctgttgcagcagacggtgcccagaaagagggtaaaaataagtcagaa

SEQ ID NO: 165103 - DNA, 74 bp, Homo sapiens
ccctccaactttgcgacggaaatgtgtcatcgaaagccaggtagacgttacatccaagaggaaataatccaggc

SEQ ID NO: 165104 - DNA, 83 bp, Homo sapiens
ctggaacgcctggctcttggacaagcccagacacatggccccaggccaagcaccccatcaggctaccccgtggagggatgccc

SEQ ID NO: 165105 - DNA, 75 bp, Homo sapiens
accggcgtccccggcgcgaagaggctggactcggattcgttgcctgaggattttttatcaagcagaaatgcatcg

SEQ ID NO: 165106 - DNA, 80 bp, Homo sapiens
cggcaaggagagacgtcgctgaggggcttgcctgaagcgaggggtgctggctgccagctgctgcgccccccatgtagaag

SEQ ID NO: 165107 - DNA, 90 bp, Homo sapiens
ggcccggaatcggggcgcttcgccccgggccccccagcatgaagaccccggcggacacagccggcacagtcttcactaccgtagaagacc

SEQ ID NO: 165108 - DNA, 100 bp, Homo sapiens
gcctggcgggcgaggaggaggcgctgcgtcagtaccagcagccccaaatccagggttttccaaagtgtggttcaagaaccacctgcatctgaatctagag

SEQ ID NO: 165109 - DNA, 100 bp, Homo sapiens
cagcgagctgtttgacccctttgacctcttcgatgtgcgagactttggaaagcccgtggaccgggagcccgtggaccgggagccggtggtgtgccacccc

SEQ ID NO: 165110 - DNA, 98 bp, Homo sapiens
gttaacgctcactggccagatgatcgcagtgtctccagaagaagtagaatttgccaagcaagccatgttttcaagggctgttgataatcaggtgtatg

SEQ ID NO: 165111 - DNA, 100 bp, Homo sapiens
aacaccactgaagcattgccaaggatttgctcgaatatttgggtacccagtaggtatcgttggaaacaacggagttctcttttctgaatctgcaaaaaag

SEQ ID NO: 165112 - DNA, 83 bp, Homo sapiens
atcacagactcctatttgaagtatttgacgaaaatagactggtaactgtgacatttgatgatgtggccttatatttttcggaa

SEQ ID NO: 165113 - DNA, 55 bp, Homo sapiens
caacatggagaacaagaccacgtgggacctgattgatgagtggatagccaaagag

SEQ ID NO: 165114 - DNA, 82 bp, Homo sapiens
cagggcctgcagcgggagctggacggcgagcgcgagcggcgcgagaaactgaataccactagaaacatacctgtaaccagag

SEQ ID NO: 165115 - DNA, 100 bp, Homo sapiens
agctgctggtatatttctgaataatgtgaagtttactcatgctttctccagtgatctcatgaggacaaagcaggcctggttgcagtatgcttgaaatctg

SEQ ID NO: 165116 - DNA, 83 bp, Homo sapiens
ccgggggcgcgggcggcggcgccggcaggaagggccgagaactactggtggcgtggccagaacacacggacgctgtgtgtggg

SEQ ID NO: 165117 - DNA, 97 bp, Homo sapiens
tggagatgctttcagtggtggagaatggactggacccccaggctgccatcccggtgagagaactggagcagaccttgcaggcctctgaggagcagct

SEQ ID NO: 165118 - DNA, 100 bp, Homo sapiens
tctacattgctcatctgggcatctgagcctccttcgaagtttcctgtcacaactgtcctcttgacagcatggatgctacatccgatactcccagatctgt

SEQ ID NO: 165119 - DNA, 75 bp, Homo sapiens
gcgggatagccctggtcctttctccaaaactgttcaggttccattatcaaaacgagcaaaatttgttggacctgg

SEQ ID NO: 165120 - DNA, 95 bp, Homo sapiens
gatcatggctcaccgcagtctcgactttcctgggctcagaattactgggagatgtactcaaagatcggccccaggaagcagatggaatcgattcg

SEQ ID NO: 165121 - DNA, 100 bp, Homo sapiens
cgggatcgtgaccgagaccgtgaccgagagcgtgaccgagagcgcgaatatcgtcatcgttagaagggtttttaatgaccacaacaagcaagcatgcagc

SEQ ID NO: 165122 - DNA, 101 bp, Homo sapiens
ggctggttccggctgcagcccgaccagtccaagagccggcggcatgacgagttttgattcatggattcacccagtcattacttctagatgatgctggctca

SEQ ID NO: 165123 - DNA, 100 bp, Homo sapiens
taaaaatgtctccatcgtatcatcagtccaaaggggatcccactgctaaaaaggtgagcgagtgctgtgctttcatgggcctcttctttatgaagcaaag

SEQ ID NO: 165124 - DNA, 82 bp, Homo sapiens
ccctggtctctgttggtgtagaagccaaaatcaggtttgcctgcaatgagatttcattctctacatttaaaggacatccttt

SEQ ID NO: 165125 - DNA, 82 bp, Homo sapiens
aggatccagccagaaatgcaagaactgtggctgcaccatctgtcttcatcttcccgccatctgatgagcagttgaaatctgg

SEQ ID NO: 165126 - DNA, 74 bp, Homo sapiens
ctggtcaccggggtctgcctgggttaacacagaaatctgcctcctgggccatgccgcttctaaggcctgtttct

SEQ ID NO: 165127 - DNA, 100 bp, Homo sapiens
aagaagcattaatactcatcttgtccagaactctgtcaaatgaagaacactttcaagaaccaggttgaatttttaggagaagaaggaactggcttgggac

SEQ ID NO: 165128 - DNA, 100 bp, Homo sapiens
ctgcggtagcagcgactcatgagagcgcggccggaggacagcttcttaatgaagaggataactcagaatcatcggctatagagcagccacctacttcaaa

SEQ ID NO: 165129 - DNA, 75 bp, Homo sapiens
gcgcctgcgacctgcccgcctggtgcccttgctaccagttccgagccagccgagacctgccgtgggaccccagag

SEQ ID NO: 165130 - DNA, 75 bp, Homo sapiens
gtttgttcaggaaccaccagtgacagacatttctggattaaaagtggtgggggagtccctttctccagcctttca

SEQ ID NO: 165131 - DNA, 82 bp, Homo sapiens
cgccatcaaccgccagatcaacctggagctctacgcctcctacgtttacctgtccatgtgcctccggagccagcgtggtggc

SEQ ID NO: 165132 - DNA, 87 bp, Homo sapiens
ctgtttactacaaatgcttgctctactagtggaaattctaatctttcacagacacagggcaccatgccggtggaaaggatgcgcatg

SEQ ID NO: 165133 - DNA, 75 bp, Homo sapiens
ctgagcccatggcagctccagcctctgcctcccagaaactcagctcaggaatggacgccagccgacccgccttag

SEQ ID NO: 165134 - DNA, 75 bp, Homo sapiens
cgtggcatgtcgatttgtccttcactacaggtggtccagctgctcacctgtgacctgctactgtcgctacggaca

SEQ ID NO: 165135 - DNA, 83 bp, Homo sapiens
gattccggcgccgctctccgagctcgatccgctgctcgcacgggagccagctgggtgggctgtgcttaagagtaaaacttcag

SEQ ID NO: 165136 - DNA, 75 bp, Homo sapiens
gccaatcacattttgcacaagggcagtcaccatgaaagggcattttgtcagtgatgctgatctttgccttcttcc

SEQ ID NO: 165137 - DNA, 101 bp, Homo sapiens
agaacggtgcatttcagagaaggagatgcatatgcgatctaagaggaaagatactattcaagtccagtacatcataatgcagaattctgtatcagtaccac

SEQ ID NO: 165138 - DNA, 100 bp, Homo sapiens
aaaaattcaaggacaacacaataccagataaagttaaaaaaaagtatttttctggccaaggaaagctcaggaagagcagataaaatccccccatctctgt

SEQ ID NO: 165139 - DNA, 54 bp, Homo sapiens
cttcacactggacactctcgtgcaggctaatggaggttggcaggatgctactac

SEQ ID NO: 165140 - DNA, 100 bp, Homo sapiens
tggcttctttccctcagagctccagcgactgtaccccaatggggtcccctttaagcccaagatttcctggttcaagaatggcctggacctgggagaagac

SEQ ID NO: 165141 - DNA, 75 bp, Homo sapiens
cgccagtcttggggacagtgtcagctggcttacagaagagacgaaatgtggtctgagggacgatatgaatatgaa

SEQ ID NO: 165142 - DNA, 75 bp, Homo sapiens
cctgagacggtgtcccgccgaaagttgcaattcagtgcttggagacagtttttaagatcagcccagaagatacac

SEQ ID NO: 165143 - DNA, 100 bp, Homo sapiens
aataccatgaggtcaaaaaggaaatcaccctgcttgagcaaaggaagtccatgaaagacctcctcctccttctccacctccctctacaatatatgagtat

SEQ ID NO: 165144 - DNA, 76 bp, Homo sapiens
ttgctaactttgcacatttcaacagtcatgcagactaatagggatgccaaaggaaaaatatgatcctccagatcct

SEQ ID NO: 165145 - DNA, 50 bp, Homo sapiens
gcggagtcggggctcctgacgccacccacacagaatatgcctatgggtcc

SEQ ID NO: 165146 - DNA, 100 bp, Homo sapiens
acatacttcttttctgcctcagaagaagtggttcctgagcccacagaacttaattgcccaatctcagtctggtactggtaaaacagctgccttcgtgctg

SEQ ID NO: 165147 - DNA, 100 bp, Homo sapiens
cttccctttctccagcaaccttcggagacgggccaggaaggaatactgggagaatcttcggatagcctcaggccggccatacaacccttcaatgtcaaag

SEQ ID NO: 165148 - DNA, 100 bp, Homo sapiens
gcatattaccagcaggagaagtgcctgagacccgaggacatcctgcgcttcatggaaacaaggggatggagaagtttatgtttgggatgtgaactcaagg

SEQ ID NO: 165149 - DNA, 82 bp, Homo sapiens
aggtggagcacctgaagagatgccagcaggtgtccccaggtgtcattgccaacccctttgcggcaggcatcggccaccggaa

SEQ ID NO: 165150 - DNA, 83 bp, Homo sapiens
ggcaaggagctaaagcagcgtgcgttcagccctgggccgccaccggcacggccaggccagcatggtggaccacttacttccag

SEQ ID NO: 165151 - DNA, 71 bp, Homo sapiens
cagatgcagtaccagcagagcatgcagactgtgccctgtccacggtgcctcctgcatgtcctgctgccctg

SEQ ID NO: 165152 - DNA, 91 bp, Homo sapiens
attagattgctgttcctccttagaccacccgacagaccagaaactcatcccagagttcattaagaagattgtgtcagcagctaaggtgtgt

SEQ ID NO: 165153 - DNA, 75 bp, Homo sapiens
cccctcggcccctctgctgagccgctgcgtctccatgccaggggacatctcagattcccaggactccggctctct

SEQ ID NO: 165154 - DNA, 101 bp, Homo sapiens
accctcagtttagtctgatatctgcaactattaaatctatgaaagaagaaggaattacttttcctccagcaggttctcagttggaatcaactggactcggc

SEQ ID NO: 165155 - DNA, 75 bp, Homo sapiens
aaaatcatgctatcagagaagcatcttgtatcagaggatgtggatccctcagttggtcgattcaggaacatggtg

SEQ ID NO: 165156 - DNA, 96 bp, Homo sapiens
gttggcgtggcccagcatctaactaacacggtttttattgacagagctctgatagttgttccttgtgcagaaggaaagaccacagcaagattcttt

SEQ ID NO: 165157 - DNA, 100 bp, Homo sapiens
gaagctgacctccaacagaagccaggtaaaggccgaggggcaaagaaaaggaaagcatctggctctgaaaatgaaggcgattataaccctggcaggaaaa

SEQ ID NO: 165158 - DNA, 100 bp, Homo sapiens
agaacagctgtggaaagaagttgcaaaacactgggatgaccgttcattaataaatttgcatctcatgcacaccagttacttcctctttgtgatggtgata

SEQ ID NO: 165159 - DNA, 83 bp, Homo sapiens
caagaaggctgaagagattgctaatgagatgattgaggcagccaaggaactgtggctgcaccatctgtcttcatcttcccgcc

SEQ ID NO: 165160 - DNA, 74 bp, Homo sapiens
atggcaggaaatggggagaactggagggggacacctatgaccgggtgctggagaatctggtaaaagcaccattg

SEQ ID NO: 165161 - DNA, 75 bp, Homo sapiens
tgtgtttggagacttcaaagatgtatttttgtggggacattcatggacaattctttgatttgatgaagctctttg

SEQ ID NO: 165162 - DNA, 82 bp, Homo sapiens
ttgggctgtgacgctgctgctggggtcagtgccctctggtggtcagaagatgctgtgctgtctcgttaggatgaatggatta

SEQ ID NO: 165163 - DNA, 75 bp, Homo sapiens
cctctccatctgttttaaatgtaacaggtgctggagaatctggtaaaagcaccattgtgaagcagatgaggatcc

SEQ ID NO: 165164 - DNA, 83 bp, Homo sapiens
gccagggctgcgtaggcttgtggcgcgcccgcggagaggccggggattttttatcaagcagaaatgcatcgaacaacgagaat

SEQ ID NO: 165165 - DNA, 76 bp, Homo sapiens
cgtgttgcagagaccatgtgctatgcctacatgaagcagaatgaaactagtgatcgagaagatggcctccccaaag

SEQ ID NO: 165166 - DNA, 75 bp, Homo sapiens
cggccgttgcagctaccgcagccagatcattatgtagaagttctggaatgcaaaatacagtgtgaagagaacctc

SEQ ID NO: 165167 - DNA, 80 bp, Homo sapiens
ctctgctatcctcaccaacaatggaagccatgcttgccaaactattcagaggaatgttacggcatccggagtcatccctc

SEQ ID NO: 165168 - DNA, 90 bp, Homo sapiens
gtgggagacgggtgaggtacaggctcagtctgcggccaagactccgtcctgcaaggtaaagctttccagtttgaatttagatgatcacgc

SEQ ID NO: 165169 - DNA, 75 bp, Homo sapiens
cgagagagcctgcggaacctgcgcggctactacaaccagagcgaggccggggtcaccagtcgttggcacaccaag

SEQ ID NO: 165170 - DNA, 100 bp, Homo sapiens
tcattttaggattgtcaaaaggaggattgaggaggatcagatcaataatggaggcaatggtgtcatggagaaactccagctgggcccagagattctgcag

SEQ ID NO: 165171 - DNA, 75 bp, Homo sapiens
ctggtgtctgagtggatggggacctgcctgctggaaagatgaatgggagggctgattttcgagagccgaatgcag

SEQ ID NO: 165172 - DNA, 101 bp, Homo sapiens
gtcaaggtccacagggcacgcaagaccatgccgaagtccgtcgtgggcctgctcctctggtgcaagtgtggtagctattgacaacaaaatcgagcaagcta

SEQ ID NO: 165173 - DNA, 83 bp, Homo sapiens
ccgaggctgaggatgatggtagattgccagcagaaagatgaaggtcttagaatcattgattggaatgatccagaaattccctt

SEQ ID NO: 165174 - DNA, 100 bp, Homo sapiens
tggaggctccgggcgcggggaagtcatgctcgcttcacggaggcaatagctagccgagcgtttcccaaagtgtattctgcggaactagcacctactgtgt

SEQ ID NO: 165175 - DNA, 80 bp, Homo sapiens
ctgaatgttgtgaccactaatttggcgattcagaagggagcagtgggaagtaatcagtttgtggatcttgaggcaactaa

SEQ ID NO: 165176 - DNA, 50 bp, Homo sapiens
ggaagcccagaagcaacaagccctggctggagtgcaatggcgcaatctcg

SEQ ID NO: 165177 - DNA, 97 bp, Homo sapiens
tgcctccaacctcatctaccccatctttgtcacgttacttcttgctgcagattctgcgcaggatcggagctgtgggccaggctgtgtccaggacggc

SEQ ID NO: 165178 - DNA, 50 bp, Homo sapiens
ctcgtgggatgctcaggcttcctgaagtctgccatcatggatgttctcgc

SEQ ID NO: 165179 - DNA, 82 bp, Homo sapiens
cccatcctgccgtccttctccactttcgccagcccgtgccgcgagcgcggcctgcaggagcgcgagcccagcattgacctgc

SEQ ID NO: 165180 - DNA, 97 bp, Homo sapiens
ctctgccaccctcccatccgtccgcgggtccgtggagctggagcagatcccccagccggctgagacagagctcttcagaaaccaggctgctttcagg

SEQ ID NO: 165181 - DNA, 51 bp, Homo sapiens
gcctgcggcctcctcgcaaaacaagagtggcagaatttagtgacatttgga

SEQ ID NO: 165182 - DNA, 98 bp, Homo sapiens
cgagcggcgagccggagcgcggagcccggctcccgcaccatggaggaggacgacagctacgtgggcatccccaccatcagatggtgcggggcagaggg

SEQ ID NO: 165183 - DNA, 101 bp, Homo sapiens
tggagttcttacaacatggcagacattgacaagtttttgattggtcaaggagcacatgtaggggctgtcaacagtgaaggagatacacctttagatattgc

SEQ ID NO: 165184 - DNA, 73 bp, Homo sapiens
ctgcgatggactattccctggctgcagccctcactcttcatggtcactgggtcttgctctgttgcctaggctg

SEQ ID NO: 165185 - DNA, 101 bp, Homo sapiens
ctgcggagttagcagtcacgacctccagcacaggtctatggattctggggtgccacaactcagactttcggaacagaggcatgaccgccttactgaaggtt

SEQ ID NO: 165186 - DNA, 101 bp, Homo sapiens
ccaaaactgaaagatgtcaagagcagtcaactattctgtcaaccctggccaatttggaaggtgaagaaacttttgaagctgcaatgttgggacaggcagaa

SEQ ID NO: 165187 - DNA, 48 bp, Homo sapiens
cctggtgaagctggtcgtgatggggctcctggtgccgaaggttcccct

SEQ ID NO: 165188 - DNA, 100 bp, Homo sapiens
agcccagatattgtggctgaacaaaagaagctggaagccgcagaccttgtgatattccagggttttgactctgggaggagggctgccttatttggagcac

SEQ ID NO: 165189 - DNA, 97 bp, Homo sapiens
tggaaccctgaccccaggtgctcctggagagaccccaggtttggcagttctctaccagtggaccaatcttttcatccccgtgtacctcaccatcaga

SEQ ID NO: 165190 - DNA, 110 bp, Homo sapiens
taaatttgcacatccttcgaaaagctgccaagttgaaaatggacgagtaatcgcctgctttgattcattgaaagtgggaccagggagattggatctgctctcaccaggat

SEQ ID NO: 165191 - DNA, 75 bp, Homo sapiens
cgcccaactgcatcctcctggccatgttcctcgtccactacgggcatcgaggatcagcactgccagtggagatgg

SEQ ID NO: 165192 - DNA, 128 bp, Homo sapiens
gaggaattgacaatggccatgtcctacgtgaaggatgacatcttccgaatctacattaaagggtggagagattcaaccagttagcgtgaaagttggagataaagttcttctcccagaatatggaggca

SEQ ID NO: 165193 - DNA, 112 bp, Homo sapiens
aaacagccaaaggggactatcctctggaggctgtgcgcatgcagcacctgacagactgaagatggcaaggatcctgatatcaccagaagacagcctcacaagtgccttctta

SEQ ID NO: 165194 - DNA, 50 bp, Homo sapiens
acttgttcttggactgggccaaggtgtggcttttcatggcctgccactga

SEQ ID NO: 165195 - DNA, 82 bp, Homo sapiens
cggggcgaggcagggccagcagcaggcgggagtgtctccaagcagccagccatcatgcctggtcagtcatacgggttggaag

SEQ ID NO: 165196 - DNA, 87 bp, Homo sapiens
cagttggtgagtgtccggccccaggtttggaaagcagagtggagaacaaagagttgattccaatgcaacaaattttagaagaagcgg

SEQ ID NO: 165197 - DNA, 74 bp, Homo sapiens
ccacatcttcctgacccgcttcaagaagcctgctgagttcaccacagatttcagaaatggccaaagaatccata

SEQ ID NO: 165198 - DNA, 97 bp, Homo sapiens
gagaactatacgttcttcatccattagttatagtcaagagtctggagcagcagaaactgccttggcaccagtgaagcccagagtaatttgagtggag

SEQ ID NO: 165199 - DNA, 142 bp, Homo sapiens
ggcttcgatcccttctctgatttgctgtcagccatgaacggatggatgtgatgcctgctagccaaaagggtcaaaatgcagatcttcgtgaaaacccttaccggcaagaccatcacccttgaggtggagcccagtgacacca

SEQ ID NO: 165200 - DNA, 97 bp, Homo sapiens
attcctggtctacatcctgcgggtgcctttgaaaatcaacgacaacttgagcacaggcgaaagggcgtgtggttgcgcctgaggaagatacttttct

SEQ ID NO: 165201 - DNA, 101 bp, Homo sapiens
ctttgccagggacctagtggcccagtggaagaagctggttcctgtggaacggcatagaatgtcaagctaaccaggcgtccgctacttcagaagagtgtact

SEQ ID NO: 165202 - DNA, 87 bp, Homo sapiens
tggcatcaagtggcatccatcataaggaaaacggacgatgtattactaagctggaaaacatggggtttcgagtgggacaaggattga

SEQ ID NO: 165203 - DNA, 50 bp, Homo sapiens
ctcagtgtgcctggtgtgctcaggagactacacttgctgctttgaaggat

SEQ ID NO: 165204 - DNA, 99 bp, Homo sapiens
aaaggaggcatttgacagcactagcagggatcgggctccttttgtgctgacctctgatatggcatatgtcattaatgggggtgaaaagcccaccattcg

SEQ ID NO: 165205 - DNA, 75 bp, Homo sapiens
aaagagtaattcacgcagagccggctttgcaggattaggcagaatctgaaggaaaagcatgctcgacacatagca

SEQ ID NO: 165206 - DNA, 101 bp, Homo sapiens
tgtatgcatccaaagcacacatgaactcagtgctcatggggatgaagaaccagctcggtaatacgaggaaatagtatcatcatgttagaagccttggaacg

SEQ ID NO: 165207 - DNA, 75 bp, Homo sapiens
ctcggaacccgtggtcctccgcttcatcacttcaaatgcttcaccttcagaaggcgcaccactagcaggaagtta

SEQ ID NO: 165208 - DNA, 101 bp, Homo sapiens
ttcaagccctgttcaagattgccagatatcccaggaaagtgggggagctcttaagcccctgccgctgcgacggctcagtgcgctgcacgcatcagccctgc

SEQ ID NO: 165209 - DNA, 100 bp, Homo sapiens
gcttagggtgaaacaaatacctttgaggtttaaatcagaaattatggatccggatgagcaattggaaacccttcatgaagcactgaaactactgccacct

SEQ ID NO: 165210 - DNA, 83 bp, Homo sapiens
agccgcgcgcctttgtgcgcgcgccgagccggcccgctggggctggaggcacgggcccatcaacgtgaaccattacgccagca

SEQ ID NO: 165211 - DNA, 50 bp, Homo sapiens
aaaaatacgcagtacagtcccagaacatacatatgatagttgagaaagac

SEQ ID NO: 165212 - DNA, 100 bp, Homo sapiens
aaaaaataagaaaaacagaaaaataataattacatctgcaaagaccttatttccaggaccatgcagtgctggaggccgagaggcagaagatgtcagccct

SEQ ID NO: 165213 - DNA, 100 bp, Homo sapiens
cccaggagcagttaatgcctgtcatttatcctgcagtgctgtgagtaccagagtgcccactggttccaacagttcttctcagaccacagagtgtcttaca

SEQ ID NO: 165214 - DNA, 100 bp, Homo sapiens
gctgccagcatgtcgctgcctccggagaaagcctccgagctgaagcagctcatccaccagcagctgagcaagcctctgcgacttgatatcaaaagaaagc

SEQ ID NO: 165215 - DNA, 97 bp, Homo sapiens
caacctccgtctcccaggttcaagcgattctcccgcctcagcctcctgagtagcaattacaggtgccttatgcctctggcatgcccatcaagaaaat

SEQ ID NO: 165216 - DNA, 100 bp, Homo sapiens
agcctgggcatcctccatgcctcctacagcgtcagatttcccggcaccttcgtgggcaccacagagcccgcctccccacccctgagcagcacctcaccca

SEQ ID NO: 165217 - DNA, 74 bp, Homo sapiens
gtcaaagagcttattgtcacattcttcttgggaattactgtgctgactggaaataccggcatgcaggattgatg

SEQ ID NO: 165218 - DNA, 101 bp, Homo sapiens
ggggggggcctggatgcttctctctgctctgccctggctgggccactacaggtgcctgattattacaaaataattaaaaatccaatggatttgtcaaccat

SEQ ID NO: 165219 - DNA, 98 bp, Homo sapiens
tgaggatgaagatgatgaagccgaggtagaagaagatgaacccacagatttggaagttcttctaaatcaggaatggattgaaatctaatgaaccgaaa

SEQ ID NO: 165220 - DNA, 89 bp, Homo sapiens
ggtcagcagacatgccttgttggaatcgatggctgatcactgggaaactgcacctcgtcacatgatgcgtctagatattcgttctttgc

SEQ ID NO: 165221 - DNA, 50 bp, Homo sapiens
tgctttcggagtacatgggcaattcagccataatggcaggtgaagaaatt

SEQ ID NO: 165222 - DNA, 82 bp, Homo sapiens
ctgggagcaacgggagtgtcctggacccagctgagcgggcggtcattcgcatcgcaggatgaaacaggcgcctatttaatcg

SEQ ID NO: 165223 - DNA, 100 bp, Homo sapiens
ctttagaagtgcggtttactcctcatgccgagatggaccttgggcagctcagttcacaaggtttggaattcacccagttgcaggccgaatgcctggtcag

SEQ ID NO: 165224 - DNA, 101 bp, Homo sapiens
agacggcgacaagaacaacgacggccgcattgacttcgacgctcccctttgaattggagatttactacattcagcatgttatgctctacgtggtacccatc

SEQ ID NO: 165225 - DNA, 50 bp, Homo sapiens
aacagactatgctgggcttattgtgaacacacagtgttcatcccctcagg

SEQ ID NO: 165226 - DNA, 83 bp, Homo sapiens
cagaaaggcttcactacccttatcccggagagctgacaatgatgaatctcaatcaatgtccgagttaccaccatggatgcaga

SEQ ID NO: 165227 - DNA, 89 bp, Homo sapiens
acttacgcgtcagagcagtgactttgatacgcagtcaggtttttccattaatagatggacagagacgtatgtgcgttggtctcctaagg

SEQ ID NO: 165228 - DNA, 97 bp, Homo sapiens
gagaaccctgagtgtgcccctgacatgacaaggagccgtcgtcgttagaaatggttcaccaaaccaccagccagagccaccccctccagtcacagat

SEQ ID NO: 165229 - DNA, 98 bp, Homo sapiens
tgagaaggtgcgcaaagcgcaccaggaaaccttccctgccctctgccagctgggcaaatacactacggacacacacctcctctacgtactggcagctg

SEQ ID NO: 165230 - DNA, 75 bp, Homo sapiens
ctgacagaactggttcagcggagaataacatatcttcaggagaaatccagcggtcgcaccgcccattacaagttg

SEQ ID NO: 165231 - DNA, 74 bp, Homo sapiens
atccttgtttaatgactttggtgccctcaacatctctcagagacgaaagttgaacaagagatttttcaatcaag

SEQ ID NO: 165232 - DNA, 82 bp, Homo sapiens
taagagcaaagaacactgttgttgccacaggctgtggatggaaaagcaccacttgctactggagaggatgatgatgatgaag

SEQ ID NO: 165233 - DNA, 98 bp, Homo sapiens
gtggaggtgacagagcatgtcggctgcgagtctgccaacacacaggtcctgcaggtgccggaagctgcgaaggtgacacatggcttttcagactcagc

SEQ ID NO: 165234 - DNA, 90 bp, Homo sapiens
gtgtgtccggaggtttgcaggggtgcagtgtgtctggtcttatgagtgaacgagataattgggagagacatgtcccagatttctgtttcc

SEQ ID NO: 165235 - DNA, 100 bp, Homo sapiens
ctccattgcttctaggacctctcagaacacagtggacagtgacaagcaagagtgagccatggagctacgtgtggggaacaagtaccgcctgggacggaag

SEQ ID NO: 165236 - DNA, 98 bp, Homo sapiens
agattcgcagtggtcgcttcttctccttggccaaaggtgtccaaactatacagacccacagaatctaacaacagatgtctcaatattcctcgtcctag

SEQ ID NO: 165237 - DNA, 102 bp, Homo sapiens
ctaccgcgtgctcacctgtatcagctggcccctgtcgagagaagaagaaggaggttcctgctgtgccagaaacccttaagaaaaagcgaaggaatttcgcag

SEQ ID NO: 165238 - DNA, 100 bp, Homo sapiens
cgcgtcggggagggacccgggtcaggacagttcaacgaggacatgatccccaccgtgggtttcaacatgcgcaaaatcaccaaagggaatgtgactatca

SEQ ID NO: 165239 - DNA, 75 bp, Homo sapiens
cctgtaccgcttatgccaggccgatcccgacctggactcagacaagaagaatggctacgtgactgtcagtgagat

SEQ ID NO: 165240 - DNA, 82 bp, Homo sapiens
aggaatttatggtcgcctttttgaatgagatgaggaaactgaggcttggtgaagttacgaaacttgtccaaaatcacacaac

SEQ ID NO: 165241 - DNA, 100 bp, Homo sapiens
gaattgggaggtcggcggccccaaaacatttgacattgtgcagcaaagaaatggttatggagaagcccagtccgctgcttgtagggcgggagtttgtgag

SEQ ID NO: 165242 - DNA, 100 bp, Homo sapiens
tcgaggacgccctggtgcagtacgacgaactggacgccctcttctctcagtatgtggtcaacttcggggccgggggcaatttcttgcaaccaccaccgag

SEQ ID NO: 165243 - DNA, 81 bp, Homo sapiens
gcagagcatccctgacgcacacaggaggcagtggagaaggtgacacagcacatccacggcctgtctgggaagaaggatggg

SEQ ID NO: 165244 - DNA, 95 bp, Homo sapiens
ggccgccgaatctccggccgaagagcggcggcggcagcggcgaactgccattggatgtccagaatcccctgtagttgataatgttgggaataagc

SEQ ID NO: 165245 - DNA, 82 bp, Homo sapiens
ctgaagaagtagagtatttcaaccataaagacatcttaattgggcacgaaagaggaatttatgttgatgcagttaactcctt

SEQ ID NO: 165246 - DNA, 101 bp, Homo sapiens
ccggttcctcaccctcggggagcaacatgggtgctggagaatctggtaaaagcaccattgtgaagcagatgaggatcctgcatgttaatgggtttaatgga

SEQ ID NO: 165247 - DNA, 89 bp, Homo sapiens
catacagatctgggaccgaaatttgactgacccagatgatgtggtaccagttggccaaagaagagcctggtgttggtgcatgtgctttg

SEQ ID NO: 165248 - DNA, 87 bp, Homo sapiens
gggcttgtcgtagcacctggggcggcatccccgcccgacttcggaaggaccgggaggcaaagaatgttgtaccatctttgggtaggc

SEQ ID NO: 165249 - DNA, 82 bp, Homo sapiens
ccgccggcccgcgggtctacttcctcaaaggtttggtgcacctcgatttggaggaagtagggcagggcccttatctggaaag

SEQ ID NO: 165250 - DNA, 101 bp, Homo sapiens
acaaccctttccaagcagttcaagaaggttggactagatttctcccccagatttgctggcactggtgaacagaaggaagagcaaagacaagtcctaatcag

SEQ ID NO: 165251 - DNA, 50 bp, Homo sapiens
acgtccactgcgggccggcgaaagctggaaactttgagggaaattttgag

SEQ ID NO: 165252 - DNA, 75 bp, Homo sapiens
ggatatagttgctgctatacaacacaattataaaatgtcagcttttaagggctggagtgcagtggcgcaatctcg

SEQ ID NO: 165253 - DNA, 75 bp, Homo sapiens
gcgctctcttccaggacatcaagacagctctggctctggctattgctcaggagctgggtagtaaggtccccttct

SEQ ID NO: 165254 - DNA, 75 bp, Homo sapiens
aatgaaatgctgactaaggaacaaggctttccttaaagtttcccatgtctcaatggactcctgaatataacgagc

SEQ ID NO: 165255 - DNA, 100 bp, Homo sapiens
ctgtcaggaaggcagagtgcagaggtatatatccagcacatgcggtccaaggaacatgagcggccgcgccggctgcgcctggtccgcaagggcaatgagc

SEQ ID NO: 165256 - DNA, 100 bp, Homo sapiens
aaacaacagaactcacagctctgtattccagtaccagtacccggagagaacatgtcaaagttaaaaccagctcccagccaggcttcctggaacggctgag

SEQ ID NO: 165257 - DNA, 100 bp, Homo sapiens
ggtaactctgggctacagagtccttgctgggggttcggggagcgcttggaccccggcttctgggacgcgtcagaccgagacatgggtgcccggcaccgcg

SEQ ID NO: 165258 - DNA, 75 bp, Homo sapiens
agagggcagtggaactccttaggaaatgtctggaggaggagagcctgtcccgcctcctgtccacctgtggcctcg

SEQ ID NO: 165259 - DNA, 75 bp, Homo sapiens
tcttcagctacatattctgccttttcaacactacacagggctgttgataatcaggtgtatgtggccacagcctct

SEQ ID NO: 165260 - DNA, 74 bp, Homo sapiens
gcagaggcacttatgcttgtcagggagaagcagaatttgcccgcatcatgagcattgtggaccccaaccgcctg

SEQ ID NO: 165261 - DNA, 74 bp, Homo sapiens
gacaaaagccaagaggaggacagttcgctacacagcaatgcatcgaggtcgatggccaggtggtcttcataaac

SEQ ID NO: 165262 - DNA, 100 bp, Homo sapiens
ttcaagtgtgacgttgtagtagacgcattctgtggagttggaggaaataccattcagtttgccttaacaggaatgagagctgaaaatgtgtgtctgacat

SEQ ID NO: 165263 - DNA, 100 bp, Homo sapiens
tgagctgcgcctggacctggttctgccttctggacaatctttccggtgacaaaaggtgagacactcacctagaacagtgccgtgctgctgctgggaagtt

SEQ ID NO: 165264 - DNA, 100 bp, Homo sapiens
cgtgattccctgggacggtccgtttcctgccgtcagctgccggccgagttgggtctccgtggttcagggatttgtcttggctgttactatgacacgggaa

SEQ ID NO: 165265 - DNA, 75 bp, Homo sapiens
ctgagctgaggagcacagtttgagattgttaaaggaaatgggctggcaggaagacagtgaaaatgatgaaacatg

SEQ ID NO: 165266 - DNA, 51 bp, Homo sapiens
ctggtgcctggcttgcaagacaccatccttcccctgcggagtatgtcgagg

SEQ ID NO: 165267 - DNA, 75 bp, Homo sapiens
ctcaggcttcaagcgttctcgaacccttgaggggaagttaaagggtctgttcctggtttcccagatgcataaagg

SEQ ID NO: 165268 - DNA, 97 bp, Homo sapiens
gaacactgttgttgccacaggaccgagtgacggttctctacaggagcaaagccattcgctatacctggccttgtccatttcctatggccgactccag

SEQ ID NO: 165269 - DNA, 100 bp, Homo sapiens
tcatcatgctcattggctggtcgcaagggaaacaactcctgagtatgttcacgatcggggtcagaatttcgctaaggagtttgtgatcagtgatcggaag

SEQ ID NO: 165270 - DNA, 50 bp, Homo sapiens
ctatcagaccttattttcctaaggatgagagacgaggtctcacctatgtt

SEQ ID NO: 165271 - DNA, 75 bp, Homo sapiens
caaaaaagtctgtggccactacactcaggagcccttcagactcggactcccaagagcccacctatcacaatgtac

SEQ ID NO: 165272 - DNA, 74 bp, Homo sapiens
aattatggaggaggaaaatattggtacttcaaacatgcaagttggaatggtatatttgcttacttaaactacca

SEQ ID NO: 165273 - DNA, 50 bp, Homo sapiens
cagtggtcgcttcttctccttgctctagaggacaaaatcccagtccttgg

SEQ ID NO: 165274 - DNA, 100 bp, Homo sapiens
ccgcaacctggccattgtctgggcacccaacctgctacgtggtattgagcacgctgcggcagctgagcacctccacctccatcctcacagacccggcaca

SEQ ID NO: 165275 - DNA, 75 bp, Homo sapiens
tggagatcctattcagaggggccggtctctctaaatatgccccaggtagaagaagtatgtcttcctggaccccct

SEQ ID NO: 165276 - DNA, 100 bp, Homo sapiens
tgaacgtcttgcaacagtggccgcacgcataggagagaagaccaagaggtcggagaagaggtagaaaatgtggcagaggccataaaggagaaaggcaaag

SEQ ID NO: 165277 - DNA, 75 bp, Homo sapiens
ccactcctgccccttctgggcaggcttctcggtttgcaatggtctggagcagccaaggaagcagcagcgctctga

SEQ ID NO: 165278 - DNA, 100 bp, Homo sapiens
gaatatgagtgatgacaaaccctttctatgtactgcgcctggatgtggccagaccaatgatgcgagctcagagtcaatagcatccttctctaaacaggag

SEQ ID NO: 165279 - DNA, 83 bp, Homo sapiens
gattgtgtctgcttggtgtggagccatgaaggagcacgtttgccgtggacgggaaagattgcaaggtgaataaagaagtggag

SEQ ID NO: 165280 - DNA, 82 bp, Homo sapiens
ggaaaagccgttgagaggaccatcacaacctgagcagcacaggtcaaaatgcagatcttcgtgaaaacccttaccggcaaga

SEQ ID NO: 165281 - DNA, 100 bp, Homo sapiens
cagtattgaagtcaaagccactgaaaactgtgctaaagaagctatttctgaacactcgtgaaactgctcaggccatcaagggtatgcatatacgaaaagc

SEQ ID NO: 165282 - DNA, 87 bp, Homo sapiens
ctcagcattgtgggaggaaaagacacacccttggtgacagaccatgccaccactgccctgctccactatcagctgccccagatgccg

SEQ ID NO: 165283 - DNA, 100 bp, Homo sapiens
gtttggagggaaatgggaatgtacacgataattaaagagtaaagttgtgctcaacggtctttgatttgcgtcagtgtcatcgacagatgcagcagcaggc

SEQ ID NO: 165284 - DNA, 97 bp, Homo sapiens
ggagccgctggctgcggcagcaggggactagcgtgagagtgcaactgcagatagaagacctgactcgtaaactgcgcacaggagacctgggcatccc

SEQ ID NO: 165285 - DNA, 99 bp, Homo sapiens
ctcccggccgggctgactcaagcggaggcgcgcggaacagtcgccgaggcgattcccgcccagggcagagcggcttgggtaaatccaccttaatcaaca

SEQ ID NO: 165286 - DNA, 101 bp, Homo sapiens
cagacgttagcgtgagtgatcactctcaatcccggagtacaggggctcaggtccaggtggcaggggatatgctacccaactcaactgagcgggccatcact

SEQ ID NO: 165287 - DNA, 101 bp, Homo sapiens
ggccaacttcagacgccggcgctgccgcggcgcccaacccaggtccccgaagcaagcctcctgatttaaagatgcaaacgacgctcatcaaacagagacct

SEQ ID NO: 165288 - DNA, 96 bp, Homo sapiens
cagttcgtcatggggctgtttggaaagacccaggagaagccgcccaaagaactggacagctttcctgcccgctttggaggagtccactttgtcaac

SEQ ID NO: 165289 - DNA, 82 bp, Homo sapiens
ccttattcagagaaggaaggatcttctcatgcacagaggcaacaaatggcaactttctgacttccagctgatcttaccaaga

SEQ ID NO: 165290 - DNA, 51 bp, Homo sapiens
ccaaaatctgcctggaagataatgtatcaaacgcctactccaactagattc

SEQ ID NO: 165291 - DNA, 82 bp, Homo sapiens
tctcgttctgcgacttataaaggaccagacaaatcaaattagtggttttgagtactgtggacaaactcattaagaagacaaa

SEQ ID NO: 165292 - DNA, 100 bp, Homo sapiens
ttcagaaggaacttgcagaaatcacattggaccctcctcccaactgtagaagcagcattaagaggtcttctgggagccttaacaagtaccccatattctc

SEQ ID NO: 165293 - DNA, 87 bp, Homo sapiens
tatgacattaacagacaagacacttttcagaaagacaggtgtgtgtctggggaagagacttacagaagtggagttgctgagtcaaag

SEQ ID NO: 165294 - DNA, 75 bp, Homo sapiens
ggctgcaggccagagagggcctcgggaagagatgcgaggatgacaagtatgaccctcaatttggcgatgccttct

SEQ ID NO: 165295 - DNA, 82 bp, Homo sapiens
ggaacagggacagcacctcatcccctggatgggggaccacaagatcctcatcgacaggatgatcggctgaatgtaacagagg

SEQ ID NO: 165296 - DNA, 101 bp, Homo sapiens
gaccacaggccctcgttgcccagatctgcagatctgggacacggccggccaggagcggttccgcaccatcacccagagctactaccgcagtgccaatgggg

SEQ ID NO: 165297 - DNA, 100 bp, Homo sapiens
atgttgaaagatctaaaggagctgtcagatggagaaataaaagtggccattagtactgtgagcatgaaccttgaggactttccgtgacatttctgaagat

SEQ ID NO: 165298 - DNA, 83 bp, Homo sapiens
ccaacgcctggctcggagcagcagcctctgaggctactgcagcactggggtgtcagttgttggtccgacccagaacgcttcag

SEQ ID NO: 165299 - DNA, 74 bp, Homo sapiens
gctgccgccgttgcctccgccgccaagagtgagcgagcggacccgcgatgggctgaccccgcactacatctacc

SEQ ID NO: 165300 - DNA, 87 bp, Homo sapiens
gcaactctttgatgtactactataatgggaaagcggtatttgtggaaacattagacaaatgttttgaaaatgtctgtgagctggatt

SEQ ID NO: 165301 - DNA, 100 bp, Homo sapiens
ttcagttttgcttatctgctcccaaaacagacagctccttaataagcatttatagtcagtttttggcagcaatagaatcactaaaggcattctgggatgt

SEQ ID NO: 165302 - DNA, 75 bp, Homo sapiens
caactgggtccaacagcaggcctatggaatgactccagggattagagctcgatctgcaaggcttcagtggttttg

SEQ ID NO: 165303 - DNA, 80 bp, Homo sapiens
tgcgtggtctccaggtttccctattacaactccctcaaggactgcctttcctgacagtggtgaccgaggattttagccac

SEQ ID NO: 165304 - DNA, 74 bp, Homo sapiens
agaccgagtcagaacccgagtgctgcttggcggcgaggtgtgagcgccactttgaagggcatccaacccgcggc

SEQ ID NO: 165305 - DNA, 73 bp, Homo sapiens
tcagtttgtgcaggacaccgacatggaacagggactcactgggggtcttcatcctccaggtccacctttagca

SEQ ID NO: 165306 - DNA, 80 bp, Homo sapiens
cgcgcccgcgccctccgcgcgacgccagaaatggtggagtcaatgaagaaagtagcagggatggatgtggagctgacagt

SEQ ID NO: 165307 - DNA, 97 bp, Homo sapiens
gaaaaggtggcgtggctggcgattcgtgttcgtgagggccttttctggaaagtggagaatgaggacatgaataaagaccagatcttgctggaaaaag

SEQ ID NO: 165308 - DNA, 98 bp, Homo sapiens
ggcggatgccctgcagtacctgcagaaggtctctggagacatcttcagcagcttgaaggaatccgaataactaaactggactctggttttctgactca

SEQ ID NO: 165309 - DNA, 75 bp, Homo sapiens
gcgcggggcccgccatggctgcgtcggagctctacacaaaggccccaatacctatgaagacgcagccgcctacat

SEQ ID NO: 165310 - DNA, 83 bp, Homo sapiens
cgctcttccgccagtacctgcgtatccgcactgtccagcccaagcctgactatggtcaggcagttcctgctccgactggggct

SEQ ID NO: 165311 - DNA, 73 bp, Homo sapiens
agcatatggacaggtctacgccacatcacttagatgagattgtggggaacctgggtgaaggcacctttggcaa

SEQ ID NO: 165312 - DNA, 106 bp, Homo sapiens
aggagatacaagcactttaaagtcacaacaacgtctattgaaagcccattcaaatttaatccagagactgacttcactatagaacccacagttgtatcaatggttg

SEQ ID NO: 165313 - DNA, 82 bp, Homo sapiens
tcgcctcgcgccggctgctctttccgggtgcccgtggttgacacgagctgtgtccccagctgttcccgtctacaatggcatc

SEQ ID NO: 165314 - DNA, 80 bp, Homo sapiens
agaataatggcccggttggcccgggacgagtggaatggaaaaccaattctgtgtcctcggaggaccacagcccagttggg

SEQ ID NO: 165315 - DNA, 100 bp, Homo sapiens
atatcgacgtcgtgatccagaagtccagagctgaggactgcctgtttgcagcactattcctgatcagagaactccagttgcttcaacacacagtatcagt

SEQ ID NO: 165316 - DNA, 82 bp, Homo sapiens
ggtggagctgagccggagacaggagggccctcctggacccgggagcggaccctggtggcggtgaagcccgatggcgtgcaac

SEQ ID NO: 165317 - DNA, 100 bp, Homo sapiens
cgtcctcttcttggtgctgtggctgatgcatttcatggctatcatctacacgatctcattttgcccaacggtggtactccagcaggtacttcaagtccag

SEQ ID NO: 165318 - DNA, 82 bp, Homo sapiens
tgtgggcttctggtcgcactgggtgtaattgaaaagtgatcctctcttcagagatgtcaaaaacaaacaaatccaagtctgg

SEQ ID NO: 165319 - DNA, 100 bp, Homo sapiens
gtgggccgacatcaagagctgcgagatccaacaggtcctggtgcttgatggtcgaggccatctcctgggccgcctggcggccatcgtggctaaacaggta

SEQ ID NO: 165320 - DNA, 74 bp, Homo sapiens
ggagcgccccttcgcgtcccctgcaccatgagctggggcaccgagctctgggtcacggtctagatcacattctc

SEQ ID NO: 165321 - DNA, 83 bp, Homo sapiens
tgtggggattgaagatcctgtgagacctgagcccgaggagccttcaacacctggtacagtggtcagttcccctagcatctcca

SEQ ID NO: 165322 - DNA, 75 bp, Homo sapiens
gcgggaagatggcggcgccgctcatccccctctcccagcaggtgaagaagatgggcgggcttgggcttctggcca

SEQ ID NO: 165323 - DNA, 89 bp, Homo sapiens
gggagttgggggcaaggagaagatcctgcttatggtgctgctatctggagtaatagctttcatggtgaacttatcaatttattggatca

SEQ ID NO: 165324 - DNA, 101 bp, Homo sapiens
ccatggagaagctgcggcgagtcctgagcggccaggacgacgaggagcagggcctgactgcgcaggctttcatgagaaggacaagaagccatattgccgaa

SEQ ID NO: 165325 - DNA, 100 bp, Homo sapiens
gcagcccaagtcttttctccctctcccagctactccctcagcggaacggatctaccttctgagatatcatccttcttcagggagataaggaaaaaaagcc

SEQ ID NO: 165326 - DNA, 97 bp, Homo sapiens
ggtcgcgctggatcaggagtgaagctgcagaccttcgcgtccacaggaaacgtgtggatgacacacgaggagatggagtcccttacggccacgacca

SEQ ID NO: 165327 - DNA, 98 bp, Homo sapiens
gcccagacaagtccccagggaatgccacagcatcctccagcacctcaggcgcacatggcacagcactcaagcctacggccccaccagtgtagccagtg

SEQ ID NO: 165328 - DNA, 48 bp, Homo sapiens
aaagccatcatcttctttgacccaggttgtaaagctctctgaaatagt

SEQ ID NO: 165329 - DNA, 90 bp, Homo sapiens
cgcgagtgaggaaaggaggtactgtagctcagcaaagacccaaatatcgtcatagccaagatggatgccacagccaatgatgtgccttct

SEQ ID NO: 165330 - DNA, 90 bp, Homo sapiens
ttcaactacagatactttgaagtagaagaagctgatgccttcttagattcttcaaccttgcagctgttttttgacctgtatcattccatc

SEQ ID NO: 165331 - DNA, 100 bp, Homo sapiens
cgcaaacccaaagatccccgttcctggagattctgattgagtgcaagaagaaacacacgctgctgtgccccgactttgcccgcaggggggcgtgtccccg

SEQ ID NO: 165332 - DNA, 100 bp, Homo sapiens
cacctgcgctgtgatgcctgcagagctgtggcttaccaggctcttacagcactactttcagatgatagcaagtttggattcattgtaatagatggtagtg

SEQ ID NO: 165333 - DNA, 100 bp, Homo sapiens
gaatcttttatttgcaaagagaaactagagatctcggctcaccaaattccacaacctgaaggcagtcgtctgcaaggcctgcatgaaggagaacagacgc

SEQ ID NO: 165334 - DNA, 75 bp, Homo sapiens
aagagctcgtggcgtgcgacaacgcggcgcagaagacctccggctagcctgtttcagccacctcgtcgtcctggc

SEQ ID NO: 165335 - DNA, 100 bp, Homo sapiens
atttttacaaaatttgatgaagtccagaaatctggaaacatgatacaatctgcaaatgagtcagcaagccgcttacagatgattctgaatgagattcagc

SEQ ID NO: 165336 - DNA, 90 bp, Homo sapiens
ctggactctgcaacacctgtcaactccatctgcagtgttcaagattttcagctgaactctcatctctcaacactggcaaatattcataag

SEQ ID NO: 165337 - DNA, 100 bp, Homo sapiens
tcccagagtgctgggattacaggtggatattccatctattataaccaagaaactattaaaagcagcaatgaagcatatagaagtgatagttaaagccaga

SEQ ID NO: 165338 - DNA, 75 bp, Homo sapiens
gtatcttggccagggaactcaaacagcagatgcaggtacatcaggaacgtctctatcaagaatacaatttcagca

SEQ ID NO: 165339 - DNA, 74 bp, Homo sapiens
ttgtgccctagcaccccgagaaccgtcagtttgagccagatgacaaatttacatgtattggagaccagaccaga

SEQ ID NO: 165340 - DNA, 75 bp, Homo sapiens
ccggctccaagaaggttatctcctcagccaacagagctgtggttgttttcaccatggagcagctgagctcagcaa

SEQ ID NO: 165341 - DNA, 100 bp, Homo sapiens
aatgcctcctgaggatttctgtgcctggaaaatatctgttaacagactgcttttacacctacagctcatctcctgtcctgggtgtgaacgagtatatctt

SEQ ID NO: 165342 - DNA, 100 bp, Homo sapiens
ggaaaaccgaagttggaagtgtctcttagcagcgcgcggagaagaacggggagccagatcatggaagggaagtggttgctgtgtatgttactggtgcttg

SEQ ID NO: 165343 - DNA, 73 bp, Homo sapiens
aagctcgtagcctgccactccgtgcatgccttcaattaagttgcagagttctgatggagagatatttgaagtt

SEQ ID NO: 165344 - DNA, 83 bp, Homo sapiens
gctccaggagcagttgctggtgctgctgaagtccctagggaaccaccaattcttcccagatcaccagaagctggagagagagg

SEQ ID NO: 165345 - DNA, 108 bp, Homo sapiens
tgaggactggggcctcattttggatatctgtgataaagttggtcagtctcgcactgggttcaaaagagcattaatgggtccgctgatgtcttacctgatatgttacct

SEQ ID NO: 165346 - DNA, 74 bp, Homo sapiens
tgcgaacacagtagtggaagatgtaaagcaatatttcgagcagtttggcaagagatatactgccattggagaac

SEQ ID NO: 165347 - DNA, 100 bp, Homo sapiens
tcaagacggccttcagcgactgcaccagcaagatcggcaggcgagattgcctgacccaggcctgctcggccctcacaggtcaccttcaggccattcagag

SEQ ID NO: 165348 - DNA, 100 bp, Homo sapiens
ggcgacgcggggccatgtgcaggaccctaacgacaggcgcctccggcccatttacgcctagatattatcctactgaagatgtgcctcgaaagctgttgag

SEQ ID NO: 165349 - DNA, 103 bp, Homo sapiens
gcccttaggaggcccaaaagaggggcgacagaacatgatgttgacacgggctgggcgcccccagaagcccgggaacaaacatatttggagttcttacaacatg

SEQ ID NO: 165350 - DNA, 101 bp, Homo sapiens
ctggttacacctggagctggaaattcaacctgaagctgatgctctttcagatactgaacggtggtctttgggaagaagcttcctgcctttgccaccatccc

SEQ ID NO: 165351 - DNA, 100 bp, Homo sapiens
cccagacccgccaaggatcatcctgcctacgattctgaggttgggaccaagaaggaactatctattttaaaccaaaaattttccgaagaagtaaaaaccc

SEQ ID NO: 165352 - DNA, 90 bp, Homo sapiens
ccgcgctccgccgcgccctgctgtcccgcccctggaccggggccgggatgatgactttgagttcactggcagccacctgacagtaaggaa

SEQ ID NO: 165353 - DNA, 112 bp, Homo sapiens
gccctcagggaagagaccctgcaaagatcctgggagaccaagattgactggggcgactttggggtagaggcagtgtctgaggggactgactctggcatctctgccgaggctg

SEQ ID NO: 165354 - DNA, 111 bp, Homo sapiens
attggattccagcacagtgactcacttattcaagataactgaaaacattggttgtgtgatgaccggaatgacaggggatggagaagtttatgtttgggatgtgaactcaag

SEQ ID NO: 165355 - DNA, 87 bp, Homo sapiens
gtcgctcttgtgccctagcaccccgagaaccgtcagtttgagccagatggtagatttcgggcagacaacttgaacaagctgaagaac

SEQ ID NO: 165356 - DNA, 74 bp, Homo sapiens
aggaggagattgaacagagcctgaccaagagggatgagttcgagtttctggagctaatgctgcctaccttgggg

SEQ ID NO: 165357 - DNA, 51 bp, Homo sapiens
ggccggcctgacaacacagggcgtggggtggagagattcaaccagttagcg

SEQ ID NO: 165358 - DNA, 75 bp, Homo sapiens
cggattaaacgccggagagagcgtgaatttgcctcggggacgcctctccagaacagatctcggcccctttccaaa

SEQ ID NO: 165359 - DNA, 95 bp, Homo sapiens
aaatgtgtcttgttgcatttggtaatttagcagaacttggagacggtggctcagggagtaaaggaaggccagttgagcaaacagaagtgttcctc

SEQ ID NO: 165360 - DNA, 82 bp, Homo sapiens
tctcggtgttcccgctggcggcgggcatcttcttcgtgaggctgctcttcgagcgctgcggcatgaagctgaacctggacta

SEQ ID NO: 165361 - DNA, 100 bp, Homo sapiens
agagtaccagcttaatgattctgcagcatagataattctggcctcatagaacaagttgggaagtgttccctcctcccctattttctgaaagtttgcgaag

SEQ ID NO: 165362 - DNA, 82 bp, Homo sapiens
agtgcttctaccagcccatgcccctgaaggcctcgctggagatcgagtaccaagtgagacacagtaacctggttgaactctg

SEQ ID NO: 165363 - DNA, 75 bp, Homo sapiens
cgcgcggctcggagccctggaagcagcagctcaccgaggacggggactcctcgatgcattctatttctcatcatt

SEQ ID NO: 165364 - DNA, 88 bp, Homo sapiens
actcgctcttcaggaagagaaacaaaggcaaatacagccccactgtgcagacccggaggactgagcagggggaggaacatttaagctg

SEQ ID NO: 165365 - DNA, 80 bp, Homo sapiens
catccacctgtgcctcttcaccatgttcggaatgctgctgttcgctggtgggaaggcctactcccaggatgcctacctga

SEQ ID NO: 165366 - DNA, 74 bp, Homo sapiens
ataccacaggatggagactacgagtttgatgtcactgattttatcagtcatttgttcatgcagctgggaactgt

SEQ ID NO: 165367 - DNA, 74 bp, Homo sapiens
actctagaagggacaatggacttctggctttggccactttacttcctgccagatggctatctcagctgttgctg

SEQ ID NO: 165368 - DNA, 82 bp, Homo sapiens
ggaccggcgtccccggcgcgaagaggctggactcggattcgttgcctgagatgacgacaacccccccgtgtcttttgtgaag

SEQ ID NO: 165369 - DNA, 98 bp, Homo sapiens
cttatgctgaagcacttcgagaggcctatgagagctacaagaagaaggactacacccaggtggactacttaatcaacgggatgtatgcggactcagaa

SEQ ID NO: 165370 - DNA, 99 bp, Homo sapiens
ttcatctgggcggtatctggaacttggtgtacgtgaacggagagtgggtgaccaacatcagcgagggaggcagcttcggggagctggcgctcatctacg

SEQ ID NO: 165371 - DNA, 50 bp, Homo sapiens
ctttaatcactgaccatcccaatatacagaacaaaatccagtctcatagc

SEQ ID NO: 165372 - DNA, 100 bp, Homo sapiens
gggatggttccatcatggcgtcaatgcaggactcgctcagcagcagcctgaaaacttgctacaagtatctcaatcagaccagtcgcagtttcgcagctgt

SEQ ID NO: 165373 - DNA, 98 bp, Homo sapiens
tgcaggccgttggggcggctcagaggcaggcaagaggcgcagatgttccagagattcctggagatcttactcttaagacgtgtggcagtacagccagt

SEQ ID NO: 165374 - DNA, 100 bp, Homo sapiens
atttcctgaacacaccattatgatcgcttacaaccttggggttggttatatcatcactggctgaccaggcagctggcaagggtaaaagcaaatttgtgcc

SEQ ID NO: 165375 - DNA, 100 bp, Homo sapiens
gcaagttatcctccatgatgttgaaagatttgataatgggctgcattaaaagtaaagaaaacaaaagtccagccattaaatacagacctgaaaatactcc

SEQ ID NO: 165376 - DNA, 83 bp, Homo sapiens
cctcaccatgcccttctgcttcaaacagatgatatcatcaagttgaatcgaaaggaagggaagaagcagaattttccaagact

SEQ ID NO: 165377 - DNA, 100 bp, Homo sapiens
gggaaactgagcatctgggcgattccatctctgaagcaacaaggggaatggggtcaaaatgagcagggtcaacatatttcactggcacctattcacaagc

SEQ ID NO: 165378 - DNA, 54 bp, Homo sapiens
agcaggagcatcgcattggaggctacaagctaagaagaaatttcctgacttgtt

SEQ ID NO: 165379 - DNA, 100 bp, Homo sapiens
cgaggccgcagagctaaatgggggcctctccagggagtgctctgttcacggctccatcgctgttaactgccttttcaaggtgtgccctatgaacagatat

SEQ ID NO: 165380 - DNA, 96 bp, Homo sapiens
gcaaccccaagctgacccttggcctcatctggacaatcattctgcacttccagatccaagagctcctgtctccccaggagccccccaggcctcccg

SEQ ID NO: 165381 - DNA, 95 bp, Homo sapiens
ggggatttgatcgtggaggcatgagcagaggtgggcggggaggaggacgcggtggaatgggctttacagatactgtgatacggatcagaaaccga

SEQ ID NO: 165382 - DNA, 90 bp, Homo sapiens
atctcgagataaaaccatcaagctatggaataccctgggtgtgtgcaaatacactgtccaggaacttaaaaggagtctagaaaatccagc

SEQ ID NO: 165383 - DNA, 100 bp, Homo sapiens
cgctcaacggcgagccagagctggacctcaccagcaagatgctgaagttccgaacagtccatgggggcctgaggctcctgggaatccgccgaacctccac

SEQ ID NO: 165384 - DNA, 76 bp, Homo sapiens
acagcaggacagccgaactggaatctggatgagcagctcaagcaggaccctgatgctcccataagacagaaaatgc

SEQ ID NO: 165385 - DNA, 100 bp, Homo sapiens
cagaaggagcaggatctgaaagctgaaattgagaagctttgtgagaagggcagaagacgcatcttctctccagactgccgatcccagaaagccaggtgat

SEQ ID NO: 165386 - DNA, 90 bp, Homo sapiens
ggaagacctgcgtcctttttcgtttttcggatgatgccttcaatactacctttatttccaccatagcacgtgcagcacatccgcatcgat

SEQ ID NO: 165387 - DNA, 96 bp, Homo sapiens
ggccagtctgcacccaagaggtggaagaggacgggctttaggctggaagcgccttagaggagccatttttccagactgagcgtgcctaccaaaagc

SEQ ID NO: 165388 - DNA, 50 bp, Homo sapiens
acgcattcaagaaagccgacccccaagaaaaatggctacaaacttcctag

SEQ ID NO: 165389 - DNA, 98 bp, Homo sapiens
aataattcagtgtgacaattgtggcattacagtccatgaagggagaagatgtcaaccggacactagaaggtggaaggaaacctcttcattatgcagca

SEQ ID NO: 165390 - DNA, 87 bp, Homo sapiens
gatactctgcccaaccgcacggtcaccctggagtcctcttggtatatgatattacaaattatcaaagctttgagaatttagaagatt

SEQ ID NO: 165391 - DNA, 100 bp, Homo sapiens
cgagctttcacaattgcagcagatgaagatccattggtaaattgatcaggatttttggcctaccctccaaagaaaagtagccggatcgagctgggagatg

SEQ ID NO: 165392 - DNA, 95 bp, Homo sapiens
ggcaacctccagatccatcacgtggggcaggacggtcagtgtcctcagcctgcgggggctgcgtggaggtggactcggagaccgaggccgtgtat

SEQ ID NO: 165393 - DNA, 100 bp, Homo sapiens
ccggggaaatgtaccgtccagcgagttgcagatctacacttgccttcaaaagtatgttcgggaacagattctactagcagtagcagtaattgtaaaaaga

SEQ ID NO: 165394 - DNA, 97 bp, Homo sapiens
acaatggatggatgattaagattggaaggggacttgattattttaagaaaccacagattgaagatctcaaacagacaaatcatggcttggaagaata

SEQ ID NO: 165395 - DNA, 105 bp, Homo sapiens
ctccaggggaacaatgaggcctacgcagagctcatcgtccttgactggcacagcctccaggttggcgggctcatctgcgctggggttctgtgcgccatgggcatc

SEQ ID NO: 165396 - DNA, 101 bp, Homo sapiens
atcatggtgcagaaataccagtccccagtgagggtgtacaaatacccctttgaattaattatggctaacatccagtcatggataaaaatgagctggttcag

SEQ ID NO: 165397 - DNA, 100 bp, Homo sapiens
aaggaggacgccggcgtcttctgctcaggttactgaagctaaaggagatgtttaactccaagtttggatctattcccaagttttatgttcgagcaccagg

SEQ ID NO: 165398 - DNA, 90 bp, Homo sapiens
aaatttgccatccgagggatgctgaaaacctttgggcttcatggagtcgtcttagatgttgattcagtatggtctgaatatgcgttgctt

SEQ ID NO: 165399 - DNA, 75 bp, Homo sapiens
taactctctacatttctgaatgtctgaagaaactgcaaaagagacgagttgtactgctgtcacaggaaatggacg

SEQ ID NO: 165400 - DNA, 75 bp, Homo sapiens
actcacacatcagtctatcagtgttcggctccagcctgtgaagaagttaactgatttggtgcttccagatgtgag

SEQ ID NO: 165401 - DNA, 75 bp, Homo sapiens
gccggctgcgaagacgcggtgggccgcccctccggtaagaatgattgatgttggctgatattggagtgctcattc

SEQ ID NO: 165402 - DNA, 100 bp, Homo sapiens
ggagtcggcgctccaagttgtggagaagctgcaggcgcgcctggccgcgaacccggaccctaagaagaaatgactgctgtccatgcaggcaacataaact

SEQ ID NO: 165403 - DNA, 49 bp, Homo sapiens
ccaggagaggagggaactgcggagcgggacttagatggtaatctccttg

SEQ ID NO: 165404 - DNA, 100 bp, Homo sapiens
gagaaatcttagagtttcccgcaagggatgtttatgttccaaacactacttacaggaaaatgtttataggaggccttagctgggacactacaaagaaaga

SEQ ID NO: 165405 - DNA, 88 bp, Homo sapiens
cctccaggccaagagggatccttcacccgtgtctggttatgaagacagtatggagtttccagaccatagtagacatttgctacagtgt

SEQ ID NO: 165406 - DNA, 132 bp, Homo sapiens
tctatgacttagtccgaacaattggaggagacctggtggaaaaggttgatctcatagacaagtttgtacatccaaaagactctgacctgtttttgttggacacccgtgtagtatgggcctcagaagaaggct

SEQ ID NO: 165407 - DNA, 100 bp, Homo sapiens
cacatcgcacccaggtggttcagctcgcatagtgggcacgttctcatttgaatttcagcccctgaaagctggagaaaccttcggaagactaactttgcac

SEQ ID NO: 165408 - DNA, 51 bp, Homo sapiens
tgtaattcagaaattagggacagaaacctccacagctgttgagaaaaagga

SEQ ID NO: 165409 - DNA, 82 bp, Homo sapiens
ctctccatgcagatgctcagctttgcctcgaaaaagcccaagacagcagaagcagacacctccagtgaactagcaaagaaaa

SEQ ID NO: 165410 - DNA, 118 bp, Homo sapiens
agaaggaccctacagatggagggaatgcaggaaagctaagaagaatcacacctcattgcagacatatctgaagagatggattaagaatgctttggattaaggattgtggagcacattt

SEQ ID NO: 165411 - DNA, 95 bp, Homo sapiens
gcccggatgagtacgataccgaagcgggctgtgtgccccttctccacccagagtgcaccgtccaggtgaggttagagctggggcatcgcgcccaa

SEQ ID NO: 165412 - DNA, 126 bp, Homo sapiens
cttccttcaaaatgtctactgttcacgaaatcctgtgcaagctcagcttggagggtgattgaataccagggcctggtgaagcacacaggaggctgccactgtggagcagttcgttttgaagtttgg

SEQ ID NO: 165413 - DNA, 98 bp, Homo sapiens
acaccggcagcccagcccgccggaggcgagacagactgtgccctgtccacggtgcctcctgcatgtcctgctgccctgagctgtcccgagctaggtga

SEQ ID NO: 165414 - DNA, 100 bp, Homo sapiens
acgcgggccggaagcggaggaggcccctgcagaaacagttgaaatcacaaagattagacacctttttagataggtgttcttcagcaccactgacaacacg

SEQ ID NO: 165415 - DNA, 75 bp, Homo sapiens
ggaaaaattacctatgacgctttctaggcaagaggaacaacatcaagcctttttgtatcagttaatgcaacatca

SEQ ID NO: 165416 - DNA, 74 bp, Homo sapiens
gcggagcctggcgggcgtgggaacccaggccccgccgaggcggccaggtgctggagaatctggtaaaagcacca

SEQ ID NO: 165417 - DNA, 100 bp, Homo sapiens
aagagcttccagctgagacaccgtgagggtggcccagttgaaatccttcccttcctctaccttggaagtgcctaccatgcatccaagtgcgagttcctcg

SEQ ID NO: 165418 - DNA, 75 bp, Homo sapiens
tcttcccggttccgggctcagggctcgttctggtctgcctagtcctggctgctcaagaagccagaaaaaggagat

SEQ ID NO: 165419 - DNA, 100 bp, Homo sapiens
tccgcaacccggggatgggcccgcggctgcgagggggccgaaggccagagaccaggatttggctacggaggcagagcgtccgactataaatcggctcaca

SEQ ID NO: 165420 - DNA, 51 bp, Homo sapiens
gggggaaaaaatcccaaggtctgcaaaggctgaccccgcactacatctacc

SEQ ID NO: 165421 - DNA, 49 bp, Homo sapiens
ctggagtctattgctgaacatgttggcactacctggcagcaccatctaa

SEQ ID NO: 165422 - DNA, 74 bp, Homo sapiens
gcttcatcaaaaatagtgatagctttgataatctctagtgatccctgaaaagttccagcatattttgcgagtac

SEQ ID NO: 165423 - DNA, 122 bp, Homo sapiens
ccagccgacatgtctctagtggcggaagccttcgtctcccagattgcagtgtggcttcctgttgtggtgcatggccccgagcccttctaatggggctgaactgctctacaagcgcatcatcc

SEQ ID NO: 165424 - DNA, 75 bp, Homo sapiens
cgaagattaaaaaactggagccagtccttttgccaggtctctaattaacagaagatggcaaagcccagccacagc

SEQ ID NO: 165425 - DNA, 110 bp, Homo sapiens
aatcattaagttgttaagactgcaagcagcgaagcagctatcacagaatttcctcctggacttgaggctgacaggatcaaccacaggtttgtctgctaccccccctgcct

SEQ ID NO: 165426 - DNA, 103 bp, Homo sapiens
gttgtcgtggccggagcggcccgcgcctgggctgccggcacttcgcggcaggtgacttaagagattaaaattaatttggttgctgttggttctgaacaaataa

SEQ ID NO: 165427 - DNA, 85 bp, Homo sapiens
acgacgaggaaccgcccaacatggcctcggaggaaagaccacagcaagattctttcattcgtctcctcctagcctgggggaccag

SEQ ID NO: 165428 - DNA, 90 bp, Homo sapiens
agcagatttcccaagagcagcggaaaatgatccagtcacaggtgcagcggaactgctgcctgacgctctgcaacttcagcatccccgagg

SEQ ID NO: 165429 - DNA, 51 bp, Homo sapiens
actggcagagaagaaggctgctgataaggccaatgatgaggccaatcagag

SEQ ID NO: 165430 - DNA, 50 bp, Homo sapiens
gaagaaactgtccgagaagcccaaagcgcatattaaatttcctattgact

SEQ ID NO: 165431 - DNA, 108 bp, Homo sapiens
ttcacagcacagttcctgggaaggtggagccaccagcctctccctgtagccatcctaatggatatgggttggttcctgttttctatttggaactttaaaaaaaattaa

SEQ ID NO: 165432 - DNA, 75 bp, Homo sapiens
gcaggatcctgggcaggagcgaagggtgcttcaaggatgaccgcatcgtcttctggacttggatgttctccacct

SEQ ID NO: 165433 - DNA, 102 bp, Homo sapiens
attggctgacatcacagttgtctgcaccctgttgtggctctataagcaggatggccatgagctacccccaccaattgcctttgatgttgaagcccccacgac

SEQ ID NO: 165434 - DNA, 50 bp, Homo sapiens
ggacaaaaaagacctttagaagatggagggttgaaaggaggagcaggagg

SEQ ID NO: 165435 - DNA, 50 bp, Homo sapiens
ccggcctccctgctcttaccgggagaaatgacctccaccttcaacccccg

SEQ ID NO: 165436 - DNA, 85 bp, Homo sapiens
aaagattcctttcttggcaactggaggtcaaggcgaatatttaacttatatctgcctgtcagcttttagtttggatgctgaacag

SEQ ID NO: 165437 - DNA, 50 bp, Homo sapiens
cctccgactactttctccttcaaggactgagcacggaaggcatctaccgg

SEQ ID NO: 165438 - DNA, 88 bp, Homo sapiens
gatacaaatttttggatgatgatggatccatttctcctattgaggagtcaacgttgcagatatcaagaaagtcaacaacttcatcaga

SEQ ID NO: 165439 - DNA, 87 bp, Homo sapiens
taattgagcctcaaaatgaagatggcacatggcccaggcagaccttgcagtcaaaggtctccaactgaattccttgaagagaaaatg

SEQ ID NO: 165440 - DNA, 75 bp, Homo sapiens
gtttttgacttacatggaaacagataacagcgacttgattgcatgtacagtgatcaccaaggatggcggcatggt

SEQ ID NO: 165441 - DNA, 90 bp, Homo sapiens
aatataccaacaatgaggcctattttgatgtgattgaagagattgatgcaattattgataaatcaggatttgtactgtgttcgcagtgac

SEQ ID NO: 165442 - DNA, 100 bp, Homo sapiens
gctttagtgaaatgggctaataatgctggcaaagtggaaaaatgtgcggatctttaatgacttgctactgtgggaaccaacagctccttcaccagtggag

SEQ ID NO: 165443 - DNA, 74 bp, Homo sapiens
ccagcactgtctccaccctagagttagcagacttgaagaaagagaagcagaactgaagaaggaatataatgcat

SEQ ID NO: 165444 - DNA, 100 bp, Homo sapiens
aagcattcttcatctaaagataaggtgggaatggaagtggccccacatctcaaagaaaccctaaataagaacttttttgacttcctccttacgttcaaac

SEQ ID NO: 165445 - DNA, 50 bp, Homo sapiens
cagctgcctcagttcttagcgcaggttccatcaggcttgttcatccccag

SEQ ID NO: 165446 - DNA, 82 bp, Homo sapiens
gacacaatctattctgctgattcacaattatggagactgtgaattgaatgatctggcacgggaccctccagcacagtgttca

SEQ ID NO: 165447 - DNA, 51 bp, Homo sapiens
ggaggatgaatttgatagagaggaatagaaggacagtctgtggaagtttcc

SEQ ID NO: 165448 - DNA, 100 bp, Homo sapiens
cctgtgtccagggtggaagcagcactgccttactgggtccctctgtccctgagaccccgaaagcaggtgctccatctcgaaaagcgagaaaggcctccag

SEQ ID NO: 165449 - DNA, 110 bp, Homo sapiens
ggagaggattatttccgcatctcctgtctgtgtctgtcctctgcaaagccatgtggctctacctggcggttttcgtgggcctgtactaccttctgcactggtaccgggag

SEQ ID NO: 165450 - DNA, 75 bp, Homo sapiens
tgggtgtgttggtggactgctgtaagactctagaccagcagagtcacctgatatgaaaaaggagcaagacccccc

SEQ ID NO: 165451 - DNA, 50 bp, Homo sapiens
caggacaataacactcagatcgagatatttgatcctgatgacctttattc

SEQ ID NO: 165452 - DNA, 112 bp, Homo sapiens
gttaggaccaaacctcaaagcatggctaagagtgttcagtagaaatggaactgtaagagtaaatgggtccagtaattggaatgactccagataagagagctgaaaccccagg

SEQ ID NO: 165453 - DNA, 82 bp, Homo sapiens
agaatcaccagcactggctgaagaatggcagttcggaaaaccctcattcctcctcagcctcctgatgttgctagtcctcgag

SEQ ID NO: 165454 - DNA, 75 bp, Homo sapiens
tccctgagctcgtcaagcagctgtcggccaagctcatcgccaacggagccttcacgtaaatgggtccagtcatgc

SEQ ID NO: 165455 - DNA, 83 bp, Homo sapiens
ccaatttgtccgtaaccttgtggagaagaccccggcgctggtgaacggcactgaacttaccttcaactacaacctagaatgtc

SEQ ID NO: 165456 - DNA, 90 bp, Homo sapiens
atacaccttgcgaaaagtgatgggtggctttgagtataagcgcgctatcgtggactgcatcatcagcatcattgaagagaactcagagag

SEQ ID NO: 165457 - DNA, 96 bp, Homo sapiens
tctacaatctttgtctggagctggaagatgcatattgagtatcagtgctgatattgaaacaattggagaaattctgaagaaaatcatccctacctt

SEQ ID NO: 165458 - DNA, 98 bp, Homo sapiens
atggatgggcacactgtgggggtgtcctggtgcacccccagtgggtgctcacagctgcccattgcctaaagaagagagccctggaactaagcctggct

SEQ ID NO: 165459 - DNA, 122 bp, Homo sapiens
accaacggagcgctgaggcgggcgttttcttggatgaattgcttgctttggaggttatgatgtgattgctcaagcccaatctgggactgggaaaacggccacatttgccatatcgattctgc

SEQ ID NO: 165460 - DNA, 97 bp, Homo sapiens
gatgacccatggcgtgctagaggaatgggacgtgaagcgcttgcagacgcactgctacaaggtccatgaccgaaagaccacagcaagattctttcat

SEQ ID NO: 165461 - DNA, 98 bp, Homo sapiens
gatgaagaagagtcagagtccgaggtttcaccagtgatcattaaagaatgggcagcttacaaaggaaagtctcctcaaaccccggaactggttgaagc

SEQ ID NO: 165462 - DNA, 90 bp, Homo sapiens
atgtcaactattcaacatggaggcggaggtcgataagctggaactgatgcatcatattctcgaaaagataaagaccaaaggaagcaacag

SEQ ID NO: 165463 - DNA, 75 bp, Homo sapiens
ggattacaggtgcctgccaccacgcccagctggttggtggagaatttgaactggagatgaactctattatccagg

SEQ ID NO: 165464 - DNA, 98 bp, Homo sapiens
agacttcaagattgccttcttgggtgatgatgaatctgcattggataatgatggttacacatcattttggaatgactgtatatcatctggattacgtg

SEQ ID NO: 165465 - DNA, 90 bp, Homo sapiens
ctttgatgaagatcagaatgatccccttctgccagctgtgtgagccacacgccagccctgcggctctggatatcagccatgaagtgggac

SEQ ID NO: 165466 - DNA, 97 bp, Homo sapiens
aagaagatccttcaaaattaaaagaggagcagcatggcatttcagtcactggtttgcagagtccaggtgccagcttaggaataaccagcgatggatt

SEQ ID NO: 165467 - DNA, 100 bp, Homo sapiens
gcgaattggagaaaaagttcagtgggaagcatgtcgtctttatcgctcagcaacacggaggtagtcacgtttcccggaaatccgaacacttgagtgtcag

SEQ ID NO: 165468 - DNA, 90 bp, Homo sapiens
ccccggctctgggctacggactatgggcgaatagctctgaccacccggcgaaggatcctgatggtgaacatgccaggagagcaatgcaaa

SEQ ID NO: 165469 - DNA, 96 bp, Homo sapiens
gtccgccttctctgtcagctctttccccgtcagcatcccagccgtgctcacggttgacatcatggacatatgtgagtccatcctggagaggaagcg

SEQ ID NO: 165470 - DNA, 75 bp, Homo sapiens
cgcgtcggctgagagcccacaggcccccacagggcgaccattgacgaggtggagacggacgtggtggagattgag

SEQ ID NO: 165471 - DNA, 113 bp, Homo sapiens
ggcgcctgaaggcgaggagacggagttctacgtgtcccccgaggatctggaggcacagctgcagtctgacgagagggacaatgcagatcttcgtgaagactctgactggtaag

SEQ ID NO: 165472 - DNA, 90 bp, Homo sapiens
gtaccagttggaacaggatcatgatttgcaagcagtgtggagcagaggatcatgtggaagcagtgaaaaagctccagaactccaccaaga

SEQ ID NO: 165473 - DNA, 75 bp, Homo sapiens
atccgctaaaacatcaatgaatgtaaatgaaatattcatggcaataggtgattgaattactcagatatgaagatc

SEQ ID NO: 165474 - DNA, 107 bp, Homo sapiens
ctcgcctccagagctggtcgccgagattgtactggtcgacgacttcagtgatcgaggggatgaagattttaccaaggacataacagagctgttttcccagctgcacg

SEQ ID NO: 165475 - DNA, 100 bp, Homo sapiens
gacatcactgatgagcagaaaaaggttcgggaggctgacctagtgatatttcagggtgcacatgggtgatccagccactctcacatggaagcatacctcc

SEQ ID NO: 165476 - DNA, 74 bp, Homo sapiens
aaatagcgtctgagatcataggattactgatgctggagtctattatcctcccagtccacaacgctgaaccgtgg

SEQ ID NO: 165477 - DNA, 74 bp, Homo sapiens
tgggagtacagctctttcctttccgtctggcggcagccatcagggcgtggactccctggtgctagaaagcgtga

SEQ ID NO: 165478 - DNA, 100 bp, Homo sapiens
cggacaacggagaccagacctactgcagccacgcgggcgagcggctgtgtggatgtcggcgaagccgcgggcgaggcccctccctgagctgcttccactg

SEQ ID NO: 165479 - DNA, 82 bp, Homo sapiens
atcagatcatcaaggacttggcctccatggtgtcagagcaaggagaagctgttgttgcagagtgggcaggatcttaagaccc

SEQ ID NO: 165480 - DNA, 100 bp, Homo sapiens
atcttctccctcccttgcctcagggaaacctcaaatgaattctgaaggggagataccttccctgccatcaggcagccaatctgcaaaaccagtaagccag

SEQ ID NO: 165481 - DNA, 90 bp, Homo sapiens
ggcgccgctctagcggccgggactctgaactatggcggtggcccacaaactctttaacaacttgaaataaatgtgtggacttaattcacc

SEQ ID NO: 165482 - DNA, 75 bp, Homo sapiens
ccagattctgccaattcgttttcaggagcatctccaggactccctggaggaaaagcggaagcggcagcggtctga

SEQ ID NO: 165483 - DNA, 83 bp, Homo sapiens
ggggaacgctcacggactgtgtggtatagtcgtctccccctccaccacggcaagtcctgcagagggaaccagctctgacagtt

SEQ ID NO: 165484 - DNA, 97 bp, Homo sapiens
cgctccttgcccgagaacatccagtttgatgtttactacaagttcgctttgcaccttataggcctccagatatctccttgaagcctctgctctttga

SEQ ID NO: 165485 - DNA, 90 bp, Homo sapiens
caaactgtaaaggcacttaaatgcacaaacccagtgatctcttattctaaggaggatcagctgatttattcggaggatttgctgactttg

SEQ ID NO: 165486 - DNA, 101 bp, Homo sapiens
ctgggatcccggccaccagcaattgtccgcagcagccgctcttctaaaacattcaaaccaaagaagaatatccctgaaggatctcatcagtatgaactctt

SEQ ID NO: 165487 - DNA, 96 bp, Homo sapiens
tgggcagatgctgattggaccagacggccgcctgatcaggagccttgggcaggcctccgaagctgcggcagtccctgccccggtgggccgagtgca

SEQ ID NO: 165488 - DNA, 88 bp, Homo sapiens
cctgccggaccgcgcctcaggctcccccagcaaattgtggctactaatttgccccctgaagatcaagatggctctggggatgactctg

SEQ ID NO: 165489 - DNA, 100 bp, Homo sapiens
gcagccggcttcaagcagatgacttcctccaggactatactttattgatcaacatccttcatagtgagtctgccaaaaaagaggtggttgctgaagtggt

SEQ ID NO: 165490 - DNA, 88 bp, Homo sapiens
gaggactttcagatgaacagatccacacgtttgaccccaggactcccctacccacaccagactccccagggcctgatgccctatggtc

SEQ ID NO: 165491 - DNA, 100 bp, Homo sapiens
gggagagttggaggaggtggcggcgggcagaggtgatgtctgggagcccttccttgacagcccgggccgagaagatcagtgtgcgtgtgaccaccatgga

SEQ ID NO: 165492 - DNA, 75 bp, Homo sapiens
gttggcacaaccgtacatgattgggtcaatacggtctgccatcatggatgttctcgcagaagcaaatggcacctt

SEQ ID NO: 165493 - DNA, 100 bp, Homo sapiens
ctcagatgcatctggttcttctaaaggagcaattctccaatacttacagtaatctcatattaacagggaccagttactctccacaagaaaattcacacaa

SEQ ID NO: 165494 - DNA, 100 bp, Homo sapiens
ttgcatcctacagatgtgctgtaaacatcaaaagaagacggtgggatcaggagatgcataagctgtggccatgactactgaagtaggctctgtgtctgaa

SEQ ID NO: 165495 - DNA, 101 bp, Homo sapiens
cttctgcgcagcggcgcccgcagccgcagccccctgctccggaggctggtgcagacttaattcagtgcacaaatgagatgaatgtgaacatcccacagttg

SEQ ID NO: 165496 - DNA, 98 bp, Homo sapiens
cgtcacccgctatcctgccaactctatcgtggtcgtaggaggctgtcctgtctgcaggagagggctgaacccccctcatcgtgtcaagtcaatctcca

SEQ ID NO: 165497 - DNA, 73 bp, Homo sapiens
caggatgaaggactcctttctgatgtggtacccttcaaagtaccaggccataggaaaaggatacagagtagag

SEQ ID NO: 165498 - DNA, 100 bp, Homo sapiens
caacagctgccggctctggggaaatgagccgtcagactgctacagcattacctaccggtacctcgaagtgtccaccatcccagagggtgcctgccctgac

SEQ ID NO: 165499 - DNA, 100 bp, Homo sapiens
agaatcttgtgcagcagattggggaggtgggagctgaatgccatgaccaccaacagcaatatcagtcgccccatcgtctcctcccatgggtaggaggaag

SEQ ID NO: 165500 - DNA, 90 bp, Homo sapiens
atctgcttaggattcactgcacatcgaattaagagagcagaaggatgggaggaaggtcctcctacagacaagttggatggcttgaggact

SEQ ID NO: 165501 - DNA, 97 bp, Homo sapiens
aagcatgatgcagtcactaagccagaatcctgaccttgctgcacaggtgaaagaacttgtcctggacaacagtcggtcgaatgaaggcaaactcgaa

SEQ ID NO: 165502 - DNA, 75 bp, Homo sapiens
taaagttttacaagatttaacctgtcatcaagacctgggattttggtgctgaagtgagtagtgaatatagtatgg

SEQ ID NO: 165503 - DNA, 110 bp, Homo sapiens
ctcagaggccgccatcaaccgccagatcaacctggagctctacgcctcctacgtttacctgtccatgaacctggatgacagtgtgttttcgaagcggcatgcaaaactgg

SEQ ID NO: 165504 - DNA, 74 bp, Homo sapiens
tgctcctcctggcatccgcagtggctgcgatggaagatgtcctaaacgatgctatatttgatgaagatcatgat

SEQ ID NO: 165505 - DNA, 100 bp, Homo sapiens
gttttaattgactcgagttgtcttttagaaacactagaaacatatctgcgaaaacacagaggactactgagcccagccaggctgtatgccattgctgcca

SEQ ID NO: 165506 - DNA, 89 bp, Homo sapiens
gcctggcgtcacactggatttgatagaaaagcaggtcttgacgagccctgcccgggccgacgcatgcggaggatggaaacacttgcccg

SEQ ID NO: 165507 - DNA, 106 bp, Homo sapiens
ccggcacccagacaggtggcgaaggcagaggagcgccatggctgcggagcggacccggccgctgcaaggctctggcggtccgagcgtgcctagtagctgtgaaccc

SEQ ID NO: 165508 - DNA, 51 bp, Homo sapiens
cacattggaccctcctcccaactgtaggctttcattaaagatagaaccagg

SEQ ID NO: 165509 - DNA, 100 bp, Homo sapiens
ggatgacaacattgcagcatttaaaaggtggagaccacgtagctttgcaaggccagagttaatgaagatcttatataattcactgaatgattcctttaaa

SEQ ID NO: 165510 - DNA, 83 bp, Homo sapiens
ggcgtccatcttggcatcttcggtagcagcgcttggccccgccccctgttgacatccgggaaactactttgcttcgcactttt

SEQ ID NO: 165511 - DNA, 87 bp, Homo sapiens
gatggtgatggagattttgatgtggatgatgccaaagttttattaggtcagaatggcggcagtggagcatcgtcattcttcaggatt

SEQ ID NO: 165512 - DNA, 50 bp, Homo sapiens
cttatgggacttgaggccctcaagacctgaaagatgtctgaaaattccag

SEQ ID NO: 165513 - DNA, 86 bp, Homo sapiens
tttgtctacaagctggcagaccagatctttgcttactacaaagccatggctggcagctgagtccacctcaggacgaggccagtgcc

SEQ ID NO: 165514 - DNA, 75 bp, Homo sapiens
ccgagcggcggcggtggcggcgaaggccgaggcgggatgtcctttaactccattgcctccagttagtattgctat

SEQ ID NO: 165515 - DNA, 100 bp, Homo sapiens
tctccgattcctccattgcatatgcatgaattgctggaggaagcccggagacaaggtttaccttttgcccaatgggacgggccaacggttgtggtctggc

SEQ ID NO: 165516 - DNA, 85 bp, Homo sapiens
agtagtcaggacatcatgtgggccctgcacgagctcaaaggacactatgcaatcacccgaaagtttgcctgagaatacagatcaa

SEQ ID NO: 165517 - DNA, 120 bp, Homo sapiens
ctaacgcctcccggctctcgtcagcctcccgccggccgtctccttaacaccgaacaccacaatgcagatcttcgtgaagactctgactggtaagaccatcaccctcgaggttgagcccag

SEQ ID NO: 165518 - DNA, 87 bp, Homo sapiens
ggagtatctggcctccatcttcggcaccgagaaagacaaatgtggacgagtgctcactagcagaaaaaacctgtgtgaggaaaaacg

SEQ ID NO: 165519 - DNA, 74 bp, Homo sapiens
gaaagattagccgaggcacataggatccaagaaaaactctgtgatgcaggccctgacttcctgtgagtgcacca

SEQ ID NO: 165520 - DNA, 95 bp, Homo sapiens
ctgcggcacatggaacagcatgtctccttcaaggttatgtcctcacagttggattcatgagttttgcagtatgttacaagtatgggcccttggag

SEQ ID NO: 165521 - DNA, 100 bp, Homo sapiens
gccaagcagaaaattacctaaatgcactctttcgaaagaaaggttttacacatccataagtagacctttttggagcctcaccagccaattcaatggcgtc

SEQ ID NO: 165522 - DNA, 100 bp, Homo sapiens
tatcggccggaggaccacaggcttccagtacgagctggttaggaggcacagggcgtcggacctgcacgagctgtctgcaattgtgggcacacttgaagct

SEQ ID NO: 165523 - DNA, 90 bp, Homo sapiens
ccagttgatgccacttgctattggagttgtgggtggagccgccaccaaaatgcagattttcgtgaaaacccttacggggaagaccatcac

SEQ ID NO: 165524 - DNA, 100 bp, Homo sapiens
tcaccctgcacagccttgttaggtttttcgttggaatatacgttgcacatttatggcgattctgagtgtgagggcagacttctgccaggctcagcacagc

SEQ ID NO: 165525 - DNA, 101 bp, Homo sapiens
caagacccggcaggaccaggactccccgcacagtctgaccgacttgcgaatcaccaggactgtgcctgaaggagactggttttgtccagaatgtcgaccaa

SEQ ID NO: 165526 - DNA, 90 bp, Homo sapiens
tttacagtctgactactggaagctacttgaaggaaattttgccaaagaagtgagccatgaaatggatggacttatttttcagcctactgg

SEQ ID NO: 165527 - DNA, 74 bp, Homo sapiens
ctacagaactaaatatgcatatgggaattgcagaagctgcatcaaaagtatgctttgaggtatatatagtgaaa

SEQ ID NO: 165528 - DNA, 87 bp, Homo sapiens
tagtggattaaaatctcccaagaggaatgacaaacaaccagctcttcagtgatatcagtatcaagataaaagtttggaatgggagaa

SEQ ID NO: 165529 - DNA, 84 bp, Homo sapiens
ggatggtatcccgttgatcctggacaactgcaacatcagtgacagtaacccctcacggatgataccatcggggaccttaagaag

SEQ ID NO: 165530 - DNA, 102 bp, Homo sapiens
ctcaatatctgtcttcggtggactccttcggcagtccacccaccgccgccgcctcccagggtcaggataaacatgaagaatattttgctgagaacttcggcg

SEQ ID NO: 165531 - DNA, 75 bp, Homo sapiens
acggtctgcctcagtccaccctgtaccctgggccaaatacatcctatttgatacttaaataatctcaggagccaa

SEQ ID NO: 165532 - DNA, 75 bp, Homo sapiens
tgcctgccttttcagagcgtacctgtgccactgtcaccattggaggaataaactggcgatggaatatgagaggag

SEQ ID NO: 165533 - DNA, 90 bp, Homo sapiens
ccgcagaggaggagcgcagcccggcctcgtcccccagtcaaccagagaggagaaaagagaaaatgggcttgaagctagatctcctgccat

SEQ ID NO: 165534 - DNA, 100 bp, Homo sapiens
cagacatcataaataatgaccatgaaaatgtaaaatatcttcctggacacaagctgccagaaaatgtggtccatctggttggtattgacatctttactgg

SEQ ID NO: 165535 - DNA, 98 bp, Homo sapiens
tgtgtttcacttaccagaatactacgttcagctaaattaagaatcggaagactttttgatggtacagagcccattgttttggacagtctcaaacagca

SEQ ID NO: 165536 - DNA, 90 bp, Homo sapiens
gtaagctaaaaacaaaatcaaccgggaccccagcttttcagaactgcagggaaacagccatcatgaggtgggtgatggcaccacctcagt

SEQ ID NO: 165537 - DNA, 100 bp, Homo sapiens
cagaacacctggggctgcgggaacagcctgcgtacggctctcatcaactccactggggaagatctgtcacaactcgagaggtggaaattccggtttccct

SEQ ID NO: 165538 - DNA, 75 bp, Homo sapiens
attgtatttgccagagcacatctggagggacagcagtgtgataaaagaggaaatcaaagcctttcttgccaatcg

SEQ ID NO: 165539 - DNA, 96 bp, Homo sapiens
ttgggctgaactgcagtgggagaggagaagagatgctggcgtgaagggatatatttttgccatcatggatcagtttggagatatattagaaggtga

SEQ ID NO: 165540 - DNA, 75 bp, Homo sapiens
agcttgaaatgctacatttccaagaatagcctaacatggcagaccagagacagcgctcactgtctacctctgggg

SEQ ID NO: 165541 - DNA, 128 bp, Homo sapiens
atggtttctaaaatgatcattgaaaacttcgaggcactcaagtcctggctcagcaagactctcgagcccatgttgaatgcctttgagaacttgatgcataaaatttgcatgactcctcactcctttct

SEQ ID NO: 165542 - DNA, 100 bp, Homo sapiens
gtggtgcaggcgctgcgccgcaacgccgagcgcaccgacatctgcctgctcaaaggctaggcagctggaagagaaagaccgagtgctaaagaagcaggat

SEQ ID NO: 165543 - DNA, 75 bp, Homo sapiens
gaactgaaacggattgccagagaattggcagaagcctataaagacctgcagtctcgggaggagactcgaaacgct

SEQ ID NO: 165544 - DNA, 75 bp, Homo sapiens
catctggaattttgccgatttcatgactaaccagtaatcttatggcaagggccttatatgacaatgtcccagagt

SEQ ID NO: 165545 - DNA, 100 bp, Homo sapiens
gcagtccagaaagcggcttatcgaacagagccgggagttcaagaagaacactccagaggaactttatattgctgttggaatatctggagccatccaacat

SEQ ID NO: 165546 - DNA, 56 bp, Homo sapiens
aagaagtttctaggaaaggccggacaccagcacccaccaaggctccggatgtgttc

SEQ ID NO: 165547 - DNA, 100 bp, Homo sapiens
ggcttgccagccgaaacgatcaaggaaccaaccggtgagccctctcctaagagacccaggggaagacccaaaggcagcaaaaacaagagtccctctaaag

SEQ ID NO: 165548 - DNA, 97 bp, Homo sapiens
actaccagccaacactgctgacatttctcagagatttcaaatcatgaaggttgatagggtagtcaaaccacacactccattaataaggtttcctgac

SEQ ID NO: 165549 - DNA, 87 bp, Homo sapiens
aactcatatatttaacccccctccaaaaaaatcactgagcttcagctcaaacttgagagtgcccttactgaactagaacaactccgc

SEQ ID NO: 165550 - DNA, 100 bp, Homo sapiens
tctgcccacgtcgagcgtgcccgagacccgaggccgtcactatggggctgtcagttgtgaaggttgcaaaggtttcttcaaaaggagtgtgaggaaaaat

SEQ ID NO: 165551 - DNA, 80 bp, Homo sapiens
ggcccctggtagcggcgctgttgctgggctcggcgtgctgcggttgtgcccacgtgcctcagggccttggtagaaatggc

SEQ ID NO: 165552 - DNA, 90 bp, Homo sapiens
cgtcgacgccatcatgaccacggcccagagagctggaagtcgagtgtgctactcaactcaggagatttggagacaaactgaacttccggc

SEQ ID NO: 165553 - DNA, 75 bp, Homo sapiens
gttcggcgccgcttctgtggccacggcagtcaccattactttaagtactgcaaaatctcagcattggctctgctg

SEQ ID NO: 165554 - DNA, 98 bp, Homo sapiens
tggtattggaacagtctttggcagccttatcattggttatgccagagtggtgtggcgtacattgcggctccctccggttctgctgctgacaaagttgt

SEQ ID NO: 165555 - DNA, 96 bp, Homo sapiens
ctccacaaatatttacagtcggaggagtactcggtgaaatcctgtcctgaagactgtaaggagatgagtatgatgtatgtgccatttgtttggatg

SEQ ID NO: 165556 - DNA, 114 bp, Homo sapiens
ggccatctacagcaacatgaagcaattcatccgctacctcatctcctccaatgttggcgaggtcgtctgggattaaagatttcatgtgtgaattgtgtgggaagacattcagcg

SEQ ID NO: 165557 - DNA, 95 bp, Homo sapiens
ctcccggccctctcgcgctgcactgtctctccgacgcaagactgtcccggcccgggtccaggtgcaggtacagcagtctccgcaacaggtctcgg

SEQ ID NO: 165558 - DNA, 75 bp, Homo sapiens
ggaatttgattaactcattcaaggttacccagttggaaatctgaaatagagtactatgctatgttggctaaaact

SEQ ID NO: 165559 - DNA, 100 bp, Homo sapiens
gcagctgaagctcatcatgaccttccagaattacgggcaagcgctgttcaaacccatgaaggctccatgaagaaggagttcccgcagaacctgggaggca

SEQ ID NO: 165560 - DNA, 83 bp, Homo sapiens
ccccaccatgtcagacgcagccgtagacaccagctccgaaatcaccaccaaggtgccagaaccctgtggagcatcatgaactg

SEQ ID NO: 165561 - DNA, 75 bp, Homo sapiens
gcggcgggagctgtatggccgccgtcgcaagaagaaataatgcaaaaggtgtcccaaggctcctgaccagtgaac

SEQ ID NO: 165562 - DNA, 73 bp, Homo sapiens
ggcacagtggagaaaccgcctcgaaaacggagaagcaggaaatggaagttccagtattaccgaaaatctctct

SEQ ID NO: 165563 - DNA, 100 bp, Homo sapiens
cgggacacgcctagcgcgggctccagatcttagcaaagcaatgtctcaagatggtgcttctcagttccaagaagtcattcggcaagagctagaattatct

SEQ ID NO: 165564 - DNA, 78 bp, Homo sapiens
gtcggagctgccgcgctgcccaggccatggactgtgagacctcgcgacctgtgtcagcagagccgccctgcaccacca

SEQ ID NO: 165565 - DNA, 49 bp, Homo sapiens
gaaaacacatctttacacactaaactgcaataaggtcactgatcagtgc

SEQ ID NO: 165566 - DNA, 100 bp, Homo sapiens
aggatgaagattcaccaaataagctatatactttggttacctatgtacctgttaccactttcaaaagcctgttacatgaacagaatatggcaaaaatgag

SEQ ID NO: 165567 - DNA, 75 bp, Homo sapiens
ggtgatggagattttgatgtggatgatgccaaagttttattagaagaagctcattcacacagaagacccatttaa

SEQ ID NO: 165568 - DNA, 100 bp, Homo sapiens
ccatattcaacatctgctagtctgtatattcgtcctacattcattggaactgaggacagaactgtaccgctctctttttggccagctccaccctcccgac

SEQ ID NO: 165569 - DNA, 82 bp, Homo sapiens
ttttatttttccccaattcagcagagaatattttcaagggggtgtcaacagcatctccaccctggagcctgtgagccggtgc

SEQ ID NO: 165570 - DNA, 80 bp, Homo sapiens
gtgttcttcagcatcaagcctacaggaacatagaaaggtctgtgtatgatgaccaaccaaatgcgcacaagaagtttatg

SEQ ID NO: 165571 - DNA, 100 bp, Homo sapiens
gggatgcactgctacatctgctaccgcatttggaaaagtaccagcaaggagactttggttactgtcctcgtgtgtactgtgagaaccagccaatgcttcc

SEQ ID NO: 165572 - DNA, 100 bp, Homo sapiens
agatctctctcatctcgctcggctgcgggaaatcgggctgaagcgactgagtccgcgatggagatatgcacccaatgtccagggagcgtgcaaaatttgt

SEQ ID NO: 165573 - DNA, 96 bp, Homo sapiens
atgagctgatggaagatctgtttgaaactaaaaatggctacaaacttcctagcacatgagaagatctggttcgacaagttcaaatatgacgacgca

SEQ ID NO: 165574 - DNA, 75 bp, Homo sapiens
cgcaagctcctacgaaagaaagctcatcgaggagaatacttatctctggcgcacatcactatatttggctgcctc

SEQ ID NO: 165575 - DNA, 82 bp, Homo sapiens
gaaaaatgccagccagaagaggcgttcgctgcgcgtgcacattccgcctcttctgaaacagtctccctggagcaaccatcag

SEQ ID NO: 165576 - DNA, 80 bp, Homo sapiens
cgacctcttaggcgccgggaccctcaggctcagatcagtggccgaggccccagagtgccctgtgggacattgagacaggc

SEQ ID NO: 165577 - DNA, 98 bp, Homo sapiens
aatacagaagcacagtcagcaaaagcaaagacccctcggggctgctcatctctgtgatcaggttaacacagaaatctgcctcctgggccatgccgctt

SEQ ID NO: 165578 - DNA, 100 bp, Homo sapiens
accgccctcaccacccctatccagacggctgcccttcaagtaccagtggggaagctgaggcaggaagccctttagtcacttgccgaaggccacgctgtta

SEQ ID NO: 165579 - DNA, 90 bp, Homo sapiens
ggagcagcactcttcaccctgcacagccttgttagtattttcatctcagcctagtgacgatgaatcaagtagtgatgaaaccagtaatca

SEQ ID NO: 165580 - DNA, 90 bp, Homo sapiens
ggtggccataccgttgaccgctcctccaactaaccagaattgaatgatctggcacgggaccctccagcacagtgttcagcaggtcctgtt

SEQ ID NO: 165581 - DNA, 100 bp, Homo sapiens
gcccgagccggagcgccagctcagcgtgcccatcccggggggcagcaacggcgacatccagcaagatataagccttccaaagtcagcagcaatctgttac

SEQ ID NO: 165582 - DNA, 98 bp, Homo sapiens
gaagattcatctaagcaggcagaaacatatttaaccagttatggaggttttgatgactatggtggctataataattacggctatgggaatgatggctt

SEQ ID NO: 165583 - DNA, 75 bp, Homo sapiens
gaacaaaatgaagtgtgattcaaggtgggaaatagccgcttcaggtcatcatcagatttgaaatatttaaagtgg

SEQ ID NO: 165584 - DNA, 50 bp, Homo sapiens
ctggctacccttctctcgcaagaattgagcccctgagtcctgagttggtg

SEQ ID NO: 165585 - DNA, 90 bp, Homo sapiens
tcctgggcccccactgtccccaggcctcagggggcaagcgcgatgaagagctggttctgcccatcaactcctccctgagcgtcactctgc

SEQ ID NO: 165586 - DNA, 74 bp, Homo sapiens
tcggaggcgttcagctgcttcaagatgaagctgcagaaccttggcctgaaaatgctacattatatcagcaattg

SEQ ID NO: 165587 - DNA, 89 bp, Homo sapiens
cgatgaagataaagaaagcacatttggttatgtgcatggggtctcaggacctggctcagaaatacagctcttcatgaagcaactctgct

SEQ ID NO: 165588 - DNA, 100 bp, Homo sapiens
agctgctgctcgtcttctatgtcaagaaggtcttcgccttgatcgtgttctcctgcatctatggtgagggctacagcaatgcccacgagtctaagcagat

SEQ ID NO: 165589 - DNA, 88 bp, Homo sapiens
cagagaggatggccacctcagtgtaaatggggaagcgctgtgggccaactcaccctatgcagcacagcccaccagctacgactatgat

SEQ ID NO: 165590 - DNA, 96 bp, Homo sapiens
agtctgcggtcgttccctcggctgtggaccgggcggcacgcacgcggtgcagggtaacatggcggatgcggaaggacttgcatgggtattaggaga

SEQ ID NO: 165591 - DNA, 83 bp, Homo sapiens
gacgtttattggtgcatactttggttttaagaagaatgtgttacagggtcttgattatttacataccaagtgccgtatcatcc

SEQ ID NO: 165592 - DNA, 95 bp, Homo sapiens
gccgctccccgcctagtccacggagctcaatggcggcagtcgcgctgagggactcggctcaggaaactgggaagaactggtgaagtacttgcaga

SEQ ID NO: 165593 - DNA, 100 bp, Homo sapiens
gcccattcccgaggtgctcaagaactacatggacaagcggaagttgaaggaaggtggtgagaagataaagaagaagaaaaaagatgacacttatgacaag

SEQ ID NO: 165594 - DNA, 75 bp, Homo sapiens
ttttaacatttgggagaaacacagccagaagaaatgcactcggtgatggaaagagagccactattctgaagaaca

SEQ ID NO: 165595 - DNA, 97 bp, Homo sapiens
gcccagaaaggtgtaagagactctttgaatggacataaaattctgcttgttaagaacaagtttggctctggtatggatcctggcgggagccagtcaa

SEQ ID NO: 165596 - DNA, 125 bp, Homo sapiens
agcaggcggcgcagtacaccaacgcggtgcgcgaccgggagctggacctccgggtactatactggcaattgctggagaagattttgcaattgttgcttctgatactcgattgagtgaagggtttt

SEQ ID NO: 165597 - DNA, 100 bp, Homo sapiens
ccgctccacgagcctggagagctcggactgcgagtccctggacagcagcaacagtggcttcgggccggaggaagccttgttatcagctacagctctgaat

SEQ ID NO: 165598 - DNA, 90 bp, Homo sapiens
caaagctgaggcagatgagattttccaagagttggagaaagaagtagaatattttacaggaccggagtaggccctatgatacttttaact

SEQ ID NO: 165599 - DNA, 50 bp, Homo sapiens
ggcgatctggggccattaacaagaacaaatttcaaggaatggtctttgac

SEQ ID NO: 165600 - DNA, 111 bp, Homo sapiens
cttccttacaaagacaatgctcattgtacatcacagaactcacacgggagagagaccctatggctgtgatgagtgtatctctcctaaatgtgtgatcaaggaattaccacc

SEQ ID NO: 165601 - DNA, 75 bp, Homo sapiens
gggtggacgtggttggtgattggcaggatcctggtatccgctaacaggtcctgaacgaggctgtgggggccctga

SEQ ID NO: 165602 - DNA, 100 bp, Homo sapiens
ctggcgtctcacgggctatgaagacggaatgcctcttaatgccggaattccaagacggaatgcctcttaatgccggtggacccaagtggagagattgtgg

SEQ ID NO: 165603 - DNA, 100 bp, Homo sapiens
gatatgaccatgtatttgtggcttaaactcttggcatttggctttgcctttctggacacagaagtatttgtgacagggagtaactattcccagtcagagg

SEQ ID NO: 165604 - DNA, 75 bp, Homo sapiens
aatgtttgtaaattctccttttaccaagaataatcatgggccagactgggaagaaatctgagaagggaccagttt

SEQ ID NO: 165605 - DNA, 75 bp, Homo sapiens
ccttgctgcactttattatgccggagaaggaatggatttgtaaactcaagagcttctccaaatttgattggagct

SEQ ID NO: 165606 - DNA, 98 bp, Homo sapiens
ctggcacgctctatagccaaggaaggcttcgagaagattagcaaaggtgctaatccagtggaaatcaggagagagccataagtgtgatccttggtgac

SEQ ID NO: 165607 - DNA, 83 bp, Homo sapiens
gtgatggtggcagcaacaaggagggaaaaaagagcaggtggaaaaggaaaggtgtatccagggcagcagtatctgcaaggagg

SEQ ID NO: 165608 - DNA, 100 bp, Homo sapiens
ggaagtttcaacccagctggcccgtgctttcactatggactgtattactttggaaggagaactgtgtttatgaaactgtagttttgcctttggatgaaag

SEQ ID NO: 165609 - DNA, 100 bp, Homo sapiens
gcctggaagtgcacggtgtgcttcgaggacaggaagctatgaagcagataacccagctcctaccagaggacctcagaaaggagctctatgaactttggga

SEQ ID NO: 165610 - DNA, 50 bp, Homo sapiens
aggaggcgctgcgtcagtaccagcagatccgcgttccagccttcctggac

SEQ ID NO: 165611 - DNA, 100 bp, Homo sapiens
ctcacagagctggaaggctgggaagagctggaagataatgagaaggaacagataacccagcacattgcaggtgaccaaccacataactcgagacagggac

SEQ ID NO: 165612 - DNA, 90 bp, Homo sapiens
cttttcggttccgggtcttggccccgtccttacctcacagttgatcatggccttgccaggttggtgacagtatattgtgagcatggtcat

SEQ ID NO: 165613 - DNA, 100 bp, Homo sapiens
tcggagtctgggggttcgcgcccgccgacccgcgccctgctccctctcagcacctgggcggacggctgctgtccccaaggcccagcctcctcaccccgac

SEQ ID NO: 165614 - DNA, 100 bp, Homo sapiens
attctgttagacagtgaatgtggaaaggagattgacagtcacaattttgtaataaggttcacaatggtccgtagtggaaaaaatggtgaccttcatctta

SEQ ID NO: 165615 - DNA, 101 bp, Homo sapiens
ctcgggaccggctgtatgattaggccacaatcttcaatgagtaaacatattcctgtgcatggcggcctgctgcagatcttccctgagggccggcccgtggt

SEQ ID NO: 165616 - DNA, 100 bp, Homo sapiens
atctgaaggtgacactcagtccaattaaaactgatctgataagacctcagatcagacagaggactatgagctcttcgtggaggctgtggaacaaaacacg

SEQ ID NO: 165617 - DNA, 100 bp, Homo sapiens
aaattgaaattaagaaatctaattcagtacaagagcagctgaagtcacctgggagcccccctggacctgagctgcccattgaaacagcgttggatgatag

SEQ ID NO: 165618 - DNA, 75 bp, Homo sapiens
actcatcagattggctgccagtgcaaaatcctgacagatgactttgcagacaaggagggtctggaaatgggtgat

SEQ ID NO: 165619 - DNA, 75 bp, Homo sapiens
tccatagagcagcagaggcagaagctgccggtattcaaggcaagtgtcaattgaggagggagagaggaaagccaa

SEQ ID NO: 165620 - DNA, 75 bp, Homo sapiens
ccttccgtgtactcgggaatccggcacaaggcactgggctacgtgctggacagtgtttgtggagaaggtgctgca

SEQ ID NO: 165621 - DNA, 74 bp, Homo sapiens
caacgacgttccatctgtggaaggacctaccaaccagatgtggacgagtgctcactagcagaaaaaacctgtgt

SEQ ID NO: 165622 - DNA, 99 bp, Homo sapiens
cctgtaactgtacatattgatcatcttgtggtagagagaagtgacgatggctcttttcatatcagagaaactggcagacctttcacttcgtatccaaca

SEQ ID NO: 165623 - DNA, 100 bp, Homo sapiens
gggcgccgaggaggaccgggcccgcttctttctcgagtcggccggctgggacttgcagggccggagttaagatgagtccagcgaagtgcctagagtacca

SEQ ID NO: 165624 - DNA, 99 bp, Homo sapiens
gagacccggtttctaatccctgctctgtcactaacaagctgcgtgatcttcgcccacacatcttgctgacttcactcaagtgcaaaccattcagtattc

SEQ ID NO: 165625 - DNA, 75 bp, Homo sapiens
attcatttagagctgcggaacaggacgccctctgatgtccctggatggccggttgcaggtgtcccatcggaaggg

SEQ ID NO: 165626 - DNA, 101 bp, Homo sapiens
tcgtgatccagaagtccagagctgaggactgcctgtttgcagaaaaagcttgtggtgaaggggggcaaaaaaaagaagcaagttctgaagttcactcttga

SEQ ID NO: 165627 - DNA, 74 bp, Homo sapiens
tcgggccggctgtcctggcgcggtggccaccgagtactaaattcacttgggaataaaagaaaaacataagaaaa

SEQ ID NO: 165628 - DNA, 95 bp, Homo sapiens
tcatactcgtgatggaaatcaaggacagcaacaacaggatctgccccatactgatggagaagctgaacagggtcaggagacaaacaaccagtcgg

SEQ ID NO: 165629 - DNA, 100 bp, Homo sapiens
cttccgtccttcttggagacgactggcgagaggaagagggactaggtccaaacgctaggtggctgggtccagctgatgaacttattagtcctaaagacat

SEQ ID NO: 165630 - DNA, 89 bp, Homo sapiens
ctggacagtggcacacagataccgtttattaaaagagctgtggctttcagacttggttccttcaacctagagaaagttgaaaacccagc

SEQ ID NO: 165631 - DNA, 100 bp, Homo sapiens
tgtggactgggtagagatgaacgagacttttctcagatgttggatatttgcttggaaaaacgtgtgggtacgaccttgatccccgtcgaggtcaagatca

SEQ ID NO: 165632 - DNA, 82 bp, Homo sapiens
gctgagggaccgcggggttagccactgctggctgcttccagtgttcgccgagagccgtactatgccacgagggtgaatgcgg

SEQ ID NO: 165633 - DNA, 75 bp, Homo sapiens
tgcatctcctcggcccctggctcctgctcctggatatgtgttgagacggattctccgccgagctgtccgatacgc

SEQ ID NO: 165634 - DNA, 76 bp, Homo sapiens
tggccagagcctggtcgagccggaggaagccaccagatccagacatttaatgtggatgcaccatgccagaccgtgg

SEQ ID NO: 165635 - DNA, 75 bp, Homo sapiens
tttcgtagcagagaacagctctttgcatccggagagtggacaagaaagaacctcggagagctgatagatcggttt

SEQ ID NO: 165636 - DNA, 99 bp, Homo sapiens
tggctgtttctgagctacctggtaaccccaacgctgtctggacagtgcgtcgacacattgaaggctggatgacaccaaaatcctcccaggcaacatgaa

SEQ ID NO: 165637 - DNA, 50 bp, Homo sapiens
gtgtgcaaacccgagagaactgggcgtccgacctccgatcatgaacgggc

SEQ ID NO: 165638 - DNA, 95 bp, Homo sapiens
atattacatgggccagcactgcttcatccgggaagtgcttggggatggagtgcctccaaaggttgctgaggtttttcgttggaatatacgttgca

SEQ ID NO: 165639 - DNA, 100 bp, Homo sapiens
ccaaatggaaaaagatgaacttctgagttacataaagaagacctaaaactgatggctactaaaaagcagagcatttctgaaaacagctccttgaacacag

SEQ ID NO: 165640 - DNA, 75 bp, Homo sapiens
acacatactcttcaggaaaaatcaagacaggaagaggttttccacactcccatgacgccaggaaagcatgtgcag

SEQ ID NO: 165641 - DNA, 103 bp, Homo sapiens
cccgagaccgtcctggcgcgatgcgtcaagtacactgaaattcatcctgagatgagaaatcgagctatagcagattatcttcgttcaaatggctatgaagagg

SEQ ID NO: 165642 - DNA, 100 bp, Homo sapiens
gacttgcctgggcgctggcattgaggggaatatcccagctacctgatgtgacagtgccggtggtggtgtgcacattgagccccggtatagacagttcccc

SEQ ID NO: 165643 - DNA, 100 bp, Homo sapiens
aggcactgccatggcccctgtgctcagtaaggactcggcggacatcgagttgtaggacagtcccatctggacagcaacattgagaatcaagagattgtca

SEQ ID NO: 165644 - DNA, 75 bp, Homo sapiens
agagagccatgaaactggaacaggagtttactgaacatttcacaggttcttctgtgtggcagttcagaatgatgg

SEQ ID NO: 165645 - DNA, 73 bp, Homo sapiens
aaaggaagattggactatgctaaggagtggaagctggacacactatgtgacttgtatgaaaccctgaccatca

SEQ ID NO: 165646 - DNA, 82 bp, Homo sapiens
gttcggggggccaccgaatcgctgtcacgccggcaggttgatgaaaagcccagaaccttgatgacagattgtctggttataa

SEQ ID NO: 165647 - DNA, 82 bp, Homo sapiens
ctctcaagaaatctcaagatattaaagttactgctgttaaaaaggtcacgagaagagaatgccttctagatgcaaaatcacc

SEQ ID NO: 165648 - DNA, 50 bp, Homo sapiens
gctgaagcgactgagtccgcgatggaggtttacccaaggtccagcctagc

SEQ ID NO: 165649 - DNA, 50 bp, Homo sapiens
cgccgtcagagccgccctatcaggtagcagtagctgatgtgcagtttggc

SEQ ID NO: 165650 - DNA, 50 bp, Homo sapiens
ccccgttcctggagattctgattgagccctctggaccccgaggttggacc

SEQ ID NO: 165651 - DNA, 74 bp, Homo sapiens
tcccgtgtccgggctacctgtttgaagagattgctagaactacatattgtccataagtgcttcatcaggactca

SEQ ID NO: 165652 - DNA, 75 bp, Homo sapiens
agtcattgcaggaagtggatgagttccacctcattttagagtatcaagcagaatccgttcgaaatacccccagca

SEQ ID NO: 165653 - DNA, 101 bp, Homo sapiens
agctgctggaccggcagctgatgttctctcagtttgcacaagggaggcgacagagacagcagcaggttgccaactttgcaacaatggaagatgaagaagag

SEQ ID NO: 165654 - DNA, 75 bp, Homo sapiens
gaagactcgcctgatgaactccaagggggagtatcagggagctgagcacataacgacttacacgttcaatactca

SEQ ID NO: 165655 - DNA, 82 bp, Homo sapiens
cctggccgccaaaccccagctggaactccggccacagccagcatgcagccgcggcgagtcctttgcacatgttggcaacaca

SEQ ID NO: 165656 - DNA, 102 bp, Homo sapiens
caattaggattacaagcgtttcttcaaaatttagtagctcacaaggacattgctaactgtaagaagactgttagaatgccctcggtaacacagaggctgaga

SEQ ID NO: 165657 - DNA, 100 bp, Homo sapiens
ggctgcccgatcgttggcgggagatgtcgaaccccgggacacgcaggaacggctccagcatcaagatccgtctgacagggcttattaaaactactagaag

SEQ ID NO: 165658 - DNA, 75 bp, Homo sapiens
gagcttcaggaatgccaggagcaggatctgcagaagacgcagggctcaagatttatcagcaagactgttgaacgc

SEQ ID NO: 165659 - DNA, 100 bp, Homo sapiens
aaatcactgcaccttaaaaacaaaagattgagctgcactgtattcctataattgtatggaagagatacagtgattttaagaaactacacaaagaactatg

SEQ ID NO: 165660 - DNA, 75 bp, Homo sapiens
caacaaagaagaccacacactgggaaacatcattaaatcccagagcagctgagttccagataaaaactgtcagac

SEQ ID NO: 165661 - DNA, 100 bp, Homo sapiens
ttggaaactgaacaggcaggattagaatcccatgaaccagagaatcagtcagagtgctccagtgaaacagccaccacccctggctccccagagcccacag

SEQ ID NO: 165662 - DNA, 83 bp, Homo sapiens
ggaaagacacacctaccaagaagccagtcaagcggccaggtactccaaagattcaggtttactcacgtcatccagcagagaat

SEQ ID NO: 165663 - DNA, 74 bp, Homo sapiens
ctaccctctgatgcaccaccagatgccaccacctcatccaccccagccagagcatcctggccagaacaagccaa

SEQ ID NO: 165664 - DNA, 100 bp, Homo sapiens
tctgctcttcctcccttcgctcgcaccatgggtttggaaatcccttgtctccaggttgctgggattgacttcttgctcaattgaaacactcattcaatgg

SEQ ID NO: 165665 - DNA, 74 bp, Homo sapiens
tgaatattgagaagaaacttaatcagaatagcaggtcagagtgaggaagggaaactgtctacctctcaagatgc

SEQ ID NO: 165666 - DNA, 83 bp, Homo sapiens
aaactggagaacaacatgcctttcttttatgattaccattttaatgaggaattactctgcttaatgtaagcaagctgaacatt

SEQ ID NO: 165667 - DNA, 100 bp, Homo sapiens
ccacatcagccagtagctcaacccagccagttagtcagaatcccagtacaaacactcagcctcttcagcaaggcagcctgcttctgcaaagtggtacgat

SEQ ID NO: 165668 - DNA, 73 bp, Homo sapiens
tcagttggatcaggagaatgatgatggttgggcagaaatgaagctgttgtcatttctggaaggaaactggccc

SEQ ID NO: 165669 - DNA, 101 bp, Homo sapiens
tttacgacttgggcttatgttcaaagtgaacacagactatgagtctagtttaaagagacatattgatgtctttgactgttggaaaccttgcagagcaagaa

SEQ ID NO: 165670 - DNA, 82 bp, Homo sapiens
actggacagagcccatacacctaccagatgcacggaaatgccagtcctcgattcatccgttgtacaacatactgttttccat

SEQ ID NO: 165671 - DNA, 82 bp, Homo sapiens
tgggcgttcatgatcctggccagcctgctcatcgcctactgcaggaaagcaggcaggatgggagagtcgccgatagaaccac

SEQ ID NO: 165672 - DNA, 78 bp, Homo sapiens
acagatcccatcagaggcaccccagacacaaaaatgaaactgaagccgtggtcacgtgacaggacatgtagtatatag

SEQ ID NO: 165673 - DNA, 100 bp, Homo sapiens
ggttatgtctggaatggaggaagcaacccacagaaatgccagatctggagtaaggaatattgtcatcacctggattttgagaaagaaaaataacttctct

SEQ ID NO: 165674 - DNA, 100 bp, Homo sapiens
acagaaggatgtaaaggatggaaaatacagccagcccagctcaacattggcaatgtgctccctgtgggcaccatgcctgagggtacaatcgtgtgctgcc

SEQ ID NO: 165675 - DNA, 82 bp, Homo sapiens
ggacgccttatggagccagcatattccaggacctgaaggagaagaaggagaaggtggaggagaaggcaagccggaaagagcg

SEQ ID NO: 165676 - DNA, 100 bp, Homo sapiens
tgcgccgcggctacgtgcgcgtccagtggtacccggagggcgtcaagcagcatgtgaaggagaccaagtcgtgccaagcggacctcgtgaaggacaacgg

SEQ ID NO: 165677 - DNA, 90 bp, Homo sapiens
gacgagacctgaccttgcagtacaacatctacaatgttggctcaagtgccggtggtggtgtgcacattgagccccggtatagacagttcc

SEQ ID NO: 165678 - DNA, 73 bp, Homo sapiens
ccagagactgctgagcccgtccgtccgccgccaccacccactccggacacagcccgacggccatggaggctga

SEQ ID NO: 165679 - DNA, 90 bp, Homo sapiens
ctgcacagcaacttggagaagtggtgaagcttcatccccatgaactaaataatctcctgtctaaagtcctctctagagaatccagaaccc

SEQ ID NO: 165680 - DNA, 98 bp, Homo sapiens
cccggacaccatgaacaaccctctttcccactactggatctcctcctcgcacaacacgggaacctcctctgccagggcctgcttctccccagcagtgc

SEQ ID NO: 165681 - DNA, 51 bp, Homo sapiens
ataggatttggctacccagcctacatctcagccctctccccagaagtagag

SEQ ID NO: 165682 - DNA, 82 bp, Homo sapiens
aacatgcaatgaacccaaaaggttgaaaatgaagatgaggctgaaagggttcttttttcctacggctatggtgctaatgttc

SEQ ID NO: 165683 - DNA, 157 bp, Homo sapiens
catgtctcagagaagaacttatcagagattgagaatgtccatggatttgtttctcattctcatatttcaccaataaaggtccatggaaataaaaggcacatgaacaagtgcattctctctcttagagaccttaaagtggctgttgttgaggaaatac

SEQ ID NO: 165684 - DNA, 96 bp, Homo sapiens
cagtccagcaacaatgatgaaggcagaccacagacattttcctgaatgggaggctctgaacaagaaggaacacagagggtgcgacagcccagaccc

SEQ ID NO: 165685 - DNA, 100 bp, Homo sapiens
gaagaaactgtccgagaagcccaaagttccagcaacagatagaaatgctttaagttcactctggggaaagctggcctctgaaatcttaatgcagaattgg

SEQ ID NO: 165686 - DNA, 97 bp, Homo sapiens
catttcgtggttcacccgctgccgggcaccgaggaccagctcaatgacaggagaaaagcctttcagctgtagctggaaaggttgtgaaaggaggttt

SEQ ID NO: 165687 - DNA, 76 bp, Homo sapiens
tgttgaagtacagcgccagcaaaaagtacaacatttcttgggaactgggtaatggaaaatgtttataggaggcctt

SEQ ID NO: 165688 - DNA, 96 bp, Homo sapiens
ggaggcaagagtaagacagctggaggaagaaaatcgcatgctgccccaggttacttcctcagaatgttggcctcctgtatgttggaggttatgaaa

SEQ ID NO: 165689 - DNA, 100 bp, Homo sapiens
attgtgttctgcaaaaaacaaaaaggatagcctccggcattccaggccctgacaagccaattgacagatgaagagctagcccaagggagactttacccac

SEQ ID NO: 165690 - DNA, 100 bp, Homo sapiens
cgggagagtctgccggcggagaatataagatggacctccagttgtagctcattatgatatgtctgacaccaactctgacccagaagtggtaaatgtggac

SEQ ID NO: 165691 - DNA, 100 bp, Homo sapiens
ccgtgtaatggatgtaggaaccttggcttccccatgcttgcccagactctaaaatagagctcaagcttgagaagagagaaccactaaagggcagagcaaa

SEQ ID NO: 165692 - DNA, 116 bp, Homo sapiens
tcctgcaactccccagcagcacgtgttggaatggacttcggaccctggcctcttgggatgcaaagggcggcaccttcctacttctgcccagccacagccctcccctcacagttgag

SEQ ID NO: 165693 - DNA, 100 bp, Homo sapiens
ttcattctggacagctggtaaaagtctgtgccccaatggttcgatattcaaatcaataggcgaaggtttcaaagaagctgttcaatatgttttacccagg

SEQ ID NO: 165694 - DNA, 100 bp, Homo sapiens
gtatgaatgccgggatgctgtgaacgagtgtgatattactgaatattgtactggagactctggtcaggtacatattctcagctcctaaggacctccttcc

SEQ ID NO: 165695 - DNA, 82 bp, Homo sapiens
gacaagaagaacatgctgttttctaggcatttcatccttcatgaagccattcaggattttgaattgcatatgagtgcttggc

SEQ ID NO: 165696 - DNA, 101 bp, Homo sapiens
gctgcattgcacaaccaagttttgtgactacgggaaggctcccggggcagaggagtacgctcaacaagatcagcctcgtcttacagcgtgactgcaaagaa

SEQ ID NO: 165697 - DNA, 100 bp, Homo sapiens
agcagtcatgtaactataagcagcttcggaaaggagccaatgaggatgatgaggagtctgatgaggaagctgtgaagaaaaccaacaaatgtgtactagt

SEQ ID NO: 165698 - DNA, 100 bp, Homo sapiens
tctaagcccggagcccggcgctttccccgcaagatggacggtttcgccggcagtctcggcattgtcttgggaccacttgcacctccacctcctccaccac

SEQ ID NO: 165699 - DNA, 100 bp, Homo sapiens
acttcaagatgtgatatttaaaagtgcttttaaaagtacatcaacagctcttccaccaagaacaccttccaccatgaccacctcagcaagttcccactta

SEQ ID NO: 165700 - DNA, 89 bp, Homo sapiens
tagacaccagctccgaaatcaccaccaaggttcgagaacttgtcttggacaattgcaaatcaaatgatggaaaaattgagggcttaaca

SEQ ID NO: 165701 - DNA, 100 bp, Homo sapiens
gtttatctcaaggcctgagtagccggtaacaaacgagggttcccgggattggaccgacgcagccatgaaaaatcctgggtagaagctggatcagcaagaa

SEQ ID NO: 165702 - DNA, 74 bp, Homo sapiens
gcactgctgcagtccaggctgaagacagagggctctgatctgtgcgacagaggtggcccagttgaaatccttcc

SEQ ID NO: 165703 - DNA, 100 bp, Homo sapiens
aaagcaagagtttgttatatagcacactgtgacttctgccgtgttcaccgtgggagacaacgtggtttcaggcagcgatgaccgcacggtgaaagtctgg

SEQ ID NO: 165704 - DNA, 88 bp, Homo sapiens
tggtacataatggttgcattaaagcattaaaggatagttcttcaggaacagaacgaacagtcttcccatgcacaagatgattaataca

SEQ ID NO: 165705 - DNA, 100 bp, Homo sapiens
acccggctgatcctccagtaccttgattcagagagaagacagcacacttccaccctgggcagcgtgtttggggacgcgtactatgagcagcagatggcgg

SEQ ID NO: 165706 - DNA, 76 bp, Homo sapiens
gaaagttgaccaaggaacactttttgaactcattctggtttaagggaaaccacaggctccgagagtgatgggggtg

SEQ ID NO: 165707 - DNA, 75 bp, Homo sapiens
ccggcgaggatcaaaatcttcgaaggagggacccttgagatgctggctggagaccctctactctcagaagaccca

SEQ ID NO: 165708 - DNA, 49 bp, Homo sapiens
cgaacatcttctggacctttgtccagtgtgccccaggctacgatggaca

SEQ ID NO: 165709 - DNA, 50 bp, Homo sapiens
gcattatccaacggctgctggaagggggggccctcagcctcttggccttg

SEQ ID NO: 165710 - DNA, 83 bp, Homo sapiens
agagacgcaagagaaaaatccactgccttccaaagaaatttgcagagcagtctctgatgaagaatgccataaaaacatcggag

SEQ ID NO: 165711 - DNA, 73 bp, Homo sapiens
gccaagaccagcgcgagggccctgggcaaggcccgacagatggcccactgcgtgaccttggttcagctgtcca

SEQ ID NO: 165712 - DNA, 100 bp, Homo sapiens
ctcaggttgcaattgatgcaaaagtgggcagcaggatgggtgtggaagcagtgatggcacttttggaggggaccccagataccccagcctgtgtagtgag

SEQ ID NO: 165713 - DNA, 82 bp, Homo sapiens
gaaaaatctccagctcctcaaaaggtgtgttccagagaacaagccttcagacatttgctatattgacgctgagctgtcaggg

SEQ ID NO: 165714 - DNA, 122 bp, Homo sapiens
agaaagagaatgtaagacaggaaaataattaaatattcttaccgagaactgatagtgcatcagccgacccaggtaatttaaaatattcttcatccagagatagaggtggttcttcctcttac

SEQ ID NO: 165715 - DNA, 100 bp, Homo sapiens
attatttcttcagcatggctcatattctacttcattcagaagatcaggtacacaaatgcacgcgacaggaaccaggaacgattccaggtgaagaatcctc

SEQ ID NO: 165716 - DNA, 83 bp, Homo sapiens
gcgagctgagtggttgtgtggtcgcgtctcggaaaccggtagcgcttgcagcatgatcatgagcgtcttgttgttcatcgagc

SEQ ID NO: 165717 - DNA, 82 bp, Homo sapiens
ggagcttatactcctcccagtgacgggtctggagtgcgtgggggaccggctgttggcggccatggccatgcagaaaatcttt

SEQ ID NO: 165718 - DNA, 90 bp, Homo sapiens
gttaacatgaaggaaattgtcacagataaacaagatgcactggatttcaagaaggacaaagcatggagatatggaccaaaaggaacgaga

SEQ ID NO: 165719 - DNA, 99 bp, Homo sapiens
tccagccccatgggccggacatctactgggtcagcttcatcctcggcggcggtggccgctagctccaaggaagatgaagatgacgccaacagactcggg

SEQ ID NO: 165720 - DNA, 75 bp, Homo sapiens
gctcaagttcatcaaaggcactgattaccagctcagcaaacatatctgaagagatggattaagaatgctttggat

SEQ ID NO: 165721 - DNA, 90 bp, Homo sapiens
ctctccatccccaccaaccgcctcacccagcgcatcatccccagctttctggtaaacttacagtaccgccgtctctaccgaagcatgaac

SEQ ID NO: 165722 - DNA, 100 bp, Homo sapiens
gaccattgggaattcctgtggcacaatcggacttattcacgcagtggccaataatcaagacaaactgggatttggatgaattaaaccttgctgattctga

SEQ ID NO: 165723 - DNA, 75 bp, Homo sapiens
tttgacatctttgaagatgaaggattaattacacaaggtggaagcgaactgataaatttcaaacggaagagagtg

SEQ ID NO: 165724 - DNA, 138 bp, Homo sapiens
acggcgacctcaagaagcagctccacgaaaggcagccgcggatcgccgcgctcagcgacaaacaagccttctggcggccgcccctggtttctcctggggggtgatgagcgggagcggctctgggccgagctactgcgc

SEQ ID NO: 165725 - DNA, 100 bp, Homo sapiens
cttgaacttattcaaacaaggtcatcatcacgggacagatggctggatgttgagacctggcaacaggaacagcctgtggtgttacatacgtggacgaagg

SEQ ID NO: 165726 - DNA, 96 bp, Homo sapiens
atggtgtttcttaggacttcagaaaaagcagcctctgaagagccaatccattcaggatgggaaaccacgcaggcaaacgagaattaaatgccgaga

SEQ ID NO: 165727 - DNA, 60 bp, Homo sapiens
cctgatgaacaagctagctgggaagaataagggtggttgtgtcaaaccgattggtgacat

SEQ ID NO: 165728 - DNA, 101 bp, Homo sapiens
agagcgcggtcccagcccggccactgcggatccctgaaaccaactcagctcctggacgtgccacagacagaaagcataacatacactcgccaggaagagcc

SEQ ID NO: 165729 - DNA, 50 bp, Homo sapiens
catcagagactggtccacataaaagttttactgcaatcacagcaaccaac

SEQ ID NO: 165730 - DNA, 96 bp, Homo sapiens
ccaagacttggctctttgtgacagggcagtggcactggagctgcaggctaacagggagcccgacttcagcagcctggtgtcacctctcagcccccg

SEQ ID NO: 165731 - DNA, 96 bp, Homo sapiens
catcaaaattgcaccaaacacacctcagctggctgacattgttgcaacagggtggcattggtagggtggtcaacggagccttcatggtgctgaaag

SEQ ID NO: 165732 - DNA, 74 bp, Homo sapiens
aagccacgtgcagacatctacaaccttcgatctcctgacgaacggacctgacattcgtgggtgtagtgggcatg

SEQ ID NO: 165733 - DNA, 100 bp, Homo sapiens
gggcgctgactgcgtgttaacatcagattacctaaaaccagatccatggatgatcttctttctgcctgtgacacaagcagccccctgactcgtacatcca

SEQ ID NO: 165734 - DNA, 100 bp, Homo sapiens
tggatttaagcactgctgcactttatgaggctctgacgcccgctctgcggcttcggtgtttgaacaggccacagtccaggagcgcttacattcaggagct

SEQ ID NO: 165735 - DNA, 100 bp, Homo sapiens
ctaaagagcaagcctaactcaagccattggcacacagggtcagcagttcccagcgctcctcacggatccctctctctcgggccagggtggagcaggctcg

SEQ ID NO: 165736 - DNA, 100 bp, Homo sapiens
agtacaaacaggctgctggcattgagacccaagtcttggattgaggaacaggcaatgggatcattcctcagtgtggccaaaggatctgacgagcccccag

SEQ ID NO: 165737 - DNA, 75 bp, Homo sapiens
cttgctgcccaatctttgccaacaggatgaatcttcaagtcatgaatgtaaccagcgcacaatccttctctatgg

SEQ ID NO: 165738 - DNA, 100 bp, Homo sapiens
acaaatacccctttgaattaattatggctgtcatcatcagatttgaaatatttaaagtggatacaaaactatttcagcaatgcagacaattaagtgtgtt

SEQ ID NO: 165739 - DNA, 100 bp, Homo sapiens
gacgtccagaagaccaagtacctgcagatcctgacctctctgatgagatggatcggaaacatttactagggacaacttttgagtgtcagaccctgtggac

SEQ ID NO: 165740 - DNA, 83 bp, Homo sapiens
atctggtgtaccaggcgaagctggccgagcaggctgagcgatacgacggatctaagcctttcccacgttatggttataaaccc

SEQ ID NO: 165741 - DNA, 83 bp, Homo sapiens
tgcaggagtcggcggctcagttgtccatgaccctgaaggtccaggagtacccgaccctcaagctggtaggtgagtgctgtcct

SEQ ID NO: 165742 - DNA, 90 bp, Homo sapiens
ggttaaatcaaagaagcaggagatttttcgtaagttgaactcctctggtggaggtgactctgatatggggatccagattagatgatcaaa

SEQ ID NO: 165743 - DNA, 76 bp, Homo sapiens
atgagacaaagcctttaaatggttgtcacacttgattgtaggtttccgccagctgtggatgcctttgacattatga

SEQ ID NO: 165744 - DNA, 101 bp, Homo sapiens
catgcctccgcctgtgtcttctgcagtgattttaaccaaggcagttggtggaaatgaggttcaaaccttgtactactcagctgatcacaagctgcttgatg

SEQ ID NO: 165745 - DNA, 83 bp, Homo sapiens
actctctctttctggcctggaggctatccagcgaggaagaggaggtagaacgggaaatcattaaacaggaagaaagtgtggat

SEQ ID NO: 165746 - DNA, 74 bp, Homo sapiens
gttaacttctgtttacatggaactcagacatctgcaaatcatgtgtacttccctttgctgtaaacaatgtcaag

SEQ ID NO: 165747 - DNA, 100 bp, Homo sapiens
cagcccgcagagagttaacttctgtttacatggaactcagacatctgcaaatcatgcttttggaaagaacaaacagtggatttgaagaatcagattctgg

SEQ ID NO: 165748 - DNA, 60 bp, Homo sapiens
ctcttattctggaaaccagtgcaatgatccacacgtcacatggagatgggcgtcaagaag

SEQ ID NO: 165749 - DNA, 75 bp, Homo sapiens
aagtgcagaggtttttttctggctgaagcagctgagcgtcgagccctacagtcaggaagaggcggagagggcagc

SEQ ID NO: 165750 - DNA, 75 bp, Homo sapiens
gacaggatgttctccaagttcacctccatcctgcagcacgccgtggaggcgggagatgcagttaaagacttgatg

SEQ ID NO: 165751 - DNA, 96 bp, Homo sapiens
cggctggggttgccggcaccatggagtcaccttttagcccgggactctttcacaggctggatgaagattgggcgttacagtgtttctgccacctct

SEQ ID NO: 165752 - DNA, 100 bp, Homo sapiens
ctcctgctgctgcccctggccctgcacctggcctgtcatctttacttcagagtgttactgggaacccagttccagccagtgaagctgcctcacagagcac

SEQ ID NO: 165753 - DNA, 139 bp, Homo sapiens
caacatcgccctgtggatgactgagtacctgaaccggcacctgcacacctggatccaggataacggaggctggtggccacagatgtctttaattccaaaaacctggccgttcaggcacaaaagaagatcttgggtaaaa

SEQ ID NO: 165754 - DNA, 74 bp, Homo sapiens
tcggattctcgtagctgtgccggggagaccactgtaattttagccatgacatcgaactcccaaagaagcgagaa

SEQ ID NO: 165755 - DNA, 83 bp, Homo sapiens
gtcctcacctcgctactcgcttgcctacccgccggcccgcgggtctacttcctcaaaggtttgcctgcaatgagatttcattc

SEQ ID NO: 165756 - DNA, 82 bp, Homo sapiens
cctggaatggcaagcgcagcaacaacagagagcacgtgggagcatcgagtacagctgtccggcctccaacgagtgtgagatc

SEQ ID NO: 165757 - DNA, 75 bp, Homo sapiens
cagcactcaaaatggcagcatccttcggacctcaccacgcggtggactttcactgctggatgtgtgggaaaaact

SEQ ID NO: 165758 - DNA, 88 bp, Homo sapiens
aattaataaaagaaatgaattctgccaaagagaaatataaagaagctttagctaaaggatggcaaccttgttcctcggtggcacctgg

SEQ ID NO: 165759 - DNA, 75 bp, Homo sapiens
ggcgtcaccatgggggctgtgctgggtgtcttctccctcgccagctggaactgataaatttcaaacggaagagag

SEQ ID NO: 165760 - DNA, 75 bp, Homo sapiens
tcgctgttgaaaggacaacatcagagaggagtgtgtgcacttgatttttcagctggcagacacaccaaaatctga

SEQ ID NO: 165761 - DNA, 75 bp, Homo sapiens
cgccctcaaggccatgatcaaaactctcttcctcttccggctgggattggcccctcagatacatgatctatacgg

SEQ ID NO: 165762 - DNA, 99 bp, Homo sapiens
gcgggcgtgagcggcggcgtcttatccaaccttgcgctgcatccgctcgacctcgtgaagatccgcttcgccgaaggacagaataacgggctcccagat

SEQ ID NO: 165763 - DNA, 75 bp, Homo sapiens
tcacgccgggagctggtacacagcctcaggtttatgtctgggaaagaaataaagaagaagaagcatttgtttggg

SEQ ID NO: 165764 - DNA, 88 bp, Homo sapiens
tccggctgcagcagcaagtcccatcggaggacctccctgccctgtataccgagggaacagctcttcacagatggaatcacaaataaac

SEQ ID NO: 165765 - DNA, 96 bp, Homo sapiens
caggtctagggagcaacaaagctcctaattctattacccactacatgacatgtgggccaagtgcattcaattcgagcactggcgttaagagttttg

SEQ ID NO: 165766 - DNA, 100 bp, Homo sapiens
ctactccttcagaatcgcctcgtgctcaggctacatctcgcctctctacagcttcctgcccaacaccaaaagtaatcaaatgcaaagcagctgtgctatg

SEQ ID NO: 165767 - DNA, 100 bp, Homo sapiens
cggttgatcggtgatgccgcaaagaatcaagttgcaatgaaccccaccaacacagtttttgaaacactggatactttggaaaagtgggtgactgaaatct

SEQ ID NO: 165768 - DNA, 75 bp, Homo sapiens
gccggccgtacgcggtgctgcgagggcagaacctggattgaaaaggctgtggtgtctcagcgcctgacagaatct

SEQ ID NO: 165769 - DNA, 101 bp, Homo sapiens
gcggcgcccccgccgctgccgccgcgacccttggcgcctgcccctgcaacgggagacaatgcagatcttcgtgaagactctgactggtaagaccatcaccc

SEQ ID NO: 165770 - DNA, 100 bp, Homo sapiens
aagaagttcctaacagacaaataaaaggctgcttaaaggtaaaatcaagcagctctatgccgctcagctggccagcatgcaggtgtcacctggagcaaag

SEQ ID NO: 165771 - DNA, 101 bp, Homo sapiens
cacagacccgcgccgccgacgacccagcagccgccatggctctgctccgagctccaattaaggaacagctatatcctgcttccttctgtaagcagcatcga

SEQ ID NO: 165772 - DNA, 111 bp, Homo sapiens
ctggttggccctgtgatccctcaagactggtccacggagtgtatgaccacaaacagccatcaaggtcggattgtttgtgctgaacgaactgtcctcttgcttcagaagccc

SEQ ID NO: 165773 - DNA, 90 bp, Homo sapiens
atttgatgcaagaaaattacataaattatataagcatgctattaaaaaacggcaggagtctcagggtattcctagttcttctcatgtaag

SEQ ID NO: 165774 - DNA, 100 bp, Homo sapiens
cacaaggggaggtgacatttgaatccctgcaggagaaaagtacactgaggaggggacggctccgtcttcacattgtgcacagatctgaggatgggattag

SEQ ID NO: 165775 - DNA, 100 bp, Homo sapiens
cggatgttgtgttgtatggagtaaacctaattctgcccttgatgtcacaggatctcttgaaggatattaaaggactcagcaaaaagagaaagatgtattc

SEQ ID NO: 165776 - DNA, 75 bp, Homo sapiens
ttccaaaagtacaaattcctctgatgtttcagctaagtcaggtgcagttttgccaaggagtgctaaagaacttag

SEQ ID NO: 165777 - DNA, 75 bp, Homo sapiens
agccatctgtgccatcatcgtggtagttattgtaatatgacgatggcagcggtatgaagcgagaggccactgcag

SEQ ID NO: 165778 - DNA, 50 bp, Homo sapiens
cagcatcctagtggaggacgcccctgtgatgacctgggccccttctcaga

SEQ ID NO: 165779 - DNA, 80 bp, Homo sapiens
gaggaagatgaagaagagcttggtgaagacgatcaccttctccttattatagtcgatatagatcacgatcaagatctcgt

SEQ ID NO: 165780 - DNA, 89 bp, Homo sapiens
gaaataattaatgaccgaacagaaacccctcctcccctagcttcactcaatgttagtaagatgggctcaaggacagcttgcctgactgc

SEQ ID NO: 165781 - DNA, 50 bp, Homo sapiens
gagcaccaactgcacctcaccaggcccagaggcagagctacacaaccatg

SEQ ID NO: 165782 - DNA, 50 bp, Homo sapiens
cagctggcgcctctgcagtgggattattttcgaaataccagtatttcgac

SEQ ID NO: 165783 - DNA, 82 bp, Homo sapiens
catggttaaggaacaggaggaaaccattcagagaatctccctggaaaaggagacatgaatgtctgcaatgatacttcctgac

SEQ ID NO: 165784 - DNA, 90 bp, Homo sapiens
ccgagcagccgcgggcgccgagcagccaccgtcccgaccaagcgccggccctgcccgcagcggcagggtgaccaggcattgatgcacccc

SEQ ID NO: 165785 - DNA, 82 bp, Homo sapiens
ctttgacttcgacctcgagtggttattaacacggggatcaaagtctggtgtagaaataacagcggtgaagagtttgactgtg

SEQ ID NO: 165786 - DNA, 74 bp, Homo sapiens
ggcgtgcacctgaacagcgacctgccccaaatgcagcacctgtggtaattaataatgcttgtgctactcaagcc

SEQ ID NO: 165787 - DNA, 82 bp, Homo sapiens
ggatctctgggtcctgcatttggccaccaagacctgggaacaagtcaagggaacgcccttttgcttgtgactggcagggctg

SEQ ID NO: 165788 - DNA, 75 bp, Homo sapiens
ccagtactctgccgagtgcggcgactggattatggacagaacttggaaatattgagaataatttcttaaagccac

SEQ ID NO: 165789 - DNA, 77 bp, Homo sapiens
tttatagctaagactccaggacacccctgaagccgagaaatgacccaacatgagtgaagtttcctgcaagaaacggg

SEQ ID NO: 165790 - DNA, 74 bp, Homo sapiens
cggagccgctgctcgagctgctgctggattgaactcagagaagccgggggcttcgtgggacacatatgcaacat

SEQ ID NO: 165791 - DNA, 82 bp, Homo sapiens
cggagcgccccttcgcgtcccctgcaccatgagctggggcaccgagctctggccatcccaggcctcaggacctgagttctcc

SEQ ID NO: 165792 - DNA, 83 bp, Homo sapiens
tatgcttcgtttttcgccgtcatgggcgcctcggccgccatggtcttcagcggttttgagcaaaattttggactgtgaagcaa

SEQ ID NO: 165793 - DNA, 90 bp, Homo sapiens
ctttggaaaagtgggtgactgaaatcttctctcagataccaaacaaaggacgggaggggcaagctgcggccaaccaaggccaagagcgag

SEQ ID NO: 165794 - DNA, 75 bp, Homo sapiens
atccggagggggaaaaaatcccaaggtctgcaaaggtcatcttccacgatgttgctgtgctgacggataagctct

SEQ ID NO: 165795 - DNA, 101 bp, Homo sapiens
ctggtgtctacgtcttctcagagtacacccgttcacctcgtcaggacctggagtaccatgtgttcttctctatatttaaagttggagttcgttgctaaaga

SEQ ID NO: 165796 - DNA, 75 bp, Homo sapiens
tcctggaggaatccgagaagagcagagcggagggagccccagacacgctgcggttggatttctcacgatgtccag

SEQ ID NO: 165797 - DNA, 89 bp, Homo sapiens
catatccagaatgaaatccatgctcagagatgccaagaagaatctagacagacaggcctttctaggaccatggccaacctggagcgcac

SEQ ID NO: 165798 - DNA, 90 bp, Homo sapiens
gatgacatatttttggacctgaaacagaaattctggaacacctatatggtactccaaagattcaggtttactcacgtcatccagcagaga

SEQ ID NO: 165799 - DNA, 75 bp, Homo sapiens
tttgggcctgtaatttctgttttcaaagaaatcaggacagtcattttgtttactcattcagccctgttgcaggtc

SEQ ID NO: 165800 - DNA, 83 bp, Homo sapiens
tgattctccagaatttctcctcataaaaaagtgccttgctttccatgacatttcccctcaagcaccaacacattttctggtga

SEQ ID NO: 165801 - DNA, 100 bp, Homo sapiens
ccagcacctttcggcttctgagacggcggcagcagcggcattcaggactatcctattaagtgtaatctcactgcttaatgagcccaacaccttctcccca

SEQ ID NO: 165802 - DNA, 75 bp, Homo sapiens
tcaagaacaaaggccgcgacttggaggctgtctgtccccagaccccagagcacgtccggcaccaccatgactggg

SEQ ID NO: 165803 - DNA, 74 bp, Homo sapiens
ctaccagctgcggcggccggaggaccggcctgccggcccccagaacaagatactagagtaaaaggatggtttct

SEQ ID NO: 165804 - DNA, 90 bp, Homo sapiens
attggatttgatcttccatatggataagagacctttggccagagcaagacataaaagattcttttcaacaagtgatactgagaagacatg

SEQ ID NO: 165805 - DNA, 98 bp, Homo sapiens
gccgcaccaggtcttgtagcagcgcctcctcgtccaagtggtaagaagttcagaagcaagcctcagttggcaaggtacctgggaaatactgttgatct

SEQ ID NO: 165806 - DNA, 75 bp, Homo sapiens
ctccttcggcagtccacccaccgccgccgcctcccagcatttcagatctgctcggtagacctggtgcaccaccac

SEQ ID NO: 165807 - DNA, 100 bp, Homo sapiens
tacaggttacatcattgcagtccaccgaaaaatggttgaatctccagtgatctgtaaaatcttagatacagcagatgaaaatggacttctttctctcccc

SEQ ID NO: 165808 - DNA, 127 bp, Homo sapiens
agggactgcaaatagatgccaaagagaagaagcttctggaaatgagggctaaagcagacaagctgaaggggtctcgggaacagcttgcgattgcagagtttgcaagatcacttcttgttattcccaa

SEQ ID NO: 165809 - DNA, 110 bp, Homo sapiens
atcccatgcaacagccacgatgtgaagcggggcagagccgggggagcccagcccagccagcctccaggacgtggcccagtggaacatcgggagcctccggaccatcctgg

SEQ ID NO: 165810 - DNA, 90 bp, Homo sapiens
gtttcttactcgggagctggctgaagatggctactctggagttgaggtgacaatctccaatagacttgtgtcttcaccttgctgcattgt

SEQ ID NO: 165811 - DNA, 95 bp, Homo sapiens
ctaccatctgtcaaaactttggatggccctactttcaggccttgcttatccaagagtcaaaatggaaattaccacacctactacagttgcctgag

SEQ ID NO: 165812 - DNA, 97 bp, Homo sapiens
tgccacctaaaacattgttatgctggaaatgctagaatataatcactatcaggtgtgcaactgaggaacatggctcaagaaactaatcacagccaag

SEQ ID NO: 165813 - DNA, 100 bp, Homo sapiens
tctgccatggagtcctacgatgtgatcgccaaccagcctgtcgtgatcgacaacatatatgtaatcgacagtgcagacagaaaaagatttgaagagacgg

SEQ ID NO: 165814 - DNA, 100 bp, Homo sapiens
cttcaggaaaggattttgcacttgtgcagaccgggcgagcagagtaagaagcaggttaattggactcctgagattaacaaagaacacttgctacagggtc

SEQ ID NO: 165815 - DNA, 82 bp, Homo sapiens
ccgggcgcggggagctgcgcgaagccggggcggagcacgcgagctatgctgagcgggctttggacaccatgaactttgatgt

SEQ ID NO: 165816 - DNA, 101 bp, Homo sapiens
gcccgggtcctcctagaaattccccccgaagaagactcccccacatctgggaagaattttaaatcgtttctccaaagacattggacacttggatgatttgc

SEQ ID NO: 165817 - DNA, 156 bp, Homo sapiens
tatcagttcacctttagtctatcccaggaagatgatcgctattacacagctatcaattttgtggctactcctgacgaagcaacagatgccctttatgaggtgtttttgggaaacaggcttcgagcagctacgttccgactctttcctcagcttctc

SEQ ID NO: 165818 - DNA, 75 bp, Homo sapiens
tgaaaatgttagaagaactcgtgagccggattgatgccactgaggcggctcccagctgcgttggcgacatggccg

SEQ ID NO: 165819 - DNA, 96 bp, Homo sapiens
tgattctgctgttcagcaggagaaaatttcagagctgcaaaattatcagaccatgccagatgatgtccaaggcactgttgcaaccatttatacaag

SEQ ID NO: 165820 - DNA, 100 bp, Homo sapiens
cctgtgttggaacctctcaatccttctcgtctacaagatgtgacagtcctcagcctaagttgtctgtatgcagctctcgtggcattatccttcagtgggg

SEQ ID NO: 165821 - DNA, 75 bp, Homo sapiens
gcacctatcttaacaaatacaacattgaacgtcataagacttgttgtgtacagtattttctccaaggtacactcc

SEQ ID NO: 165822 - DNA, 51 bp, Homo sapiens
ggtaacccgtgtgactttgactggtacaaaatggttcgttacatcagaagg

SEQ ID NO: 165823 - DNA, 100 bp, Homo sapiens
aagatgaagatgcacatgtctgggaggataattgggatgatgacaatgtagaggatgacttctctaatcagttacgaagtgagttgctgaatgagcttat

SEQ ID NO: 165824 - DNA, 88 bp, Homo sapiens
ctgagtctttgggggcagcctgcagaggctgcgcctcctgacaaggtgatccgggcgggccccgcaggaattttatcccctcaccggc

SEQ ID NO: 165825 - DNA, 100 bp, Homo sapiens
gaatcttttctctaatgccagagaaaaatgaacattcctattgcacaatgatccgaggaatggtgaagcttttccaaaaatgtcaattaatagaacgaat

SEQ ID NO: 165826 - DNA, 98 bp, Homo sapiens
caatatgcagctattgaacgtttgacatgtggcaagtttgaattgagatgtgctatgtccctgggccagctgcagtcagcaagaggtgtggcatgttt

SEQ ID NO: 165827 - DNA, 100 bp, Homo sapiens
caggaaaagactcaggacggacaagcacagtcttcggaaggttggccgccttgaaaatgcaatcgggtggtatcatagccaccctggctatggctgctgg

SEQ ID NO: 165828 - DNA, 75 bp, Homo sapiens
cagtgactttttacttgatccatacaagactatgtcttcagcagtggtgcagttatatgcagcagatcggaactg

SEQ ID NO: 165829 - DNA, 75 bp, Homo sapiens
cacagccatgtgggctacacactctcctacaactgcagccccctaaacccaggaggcgccctggcccgcgctcgc

SEQ ID NO: 165830 - DNA, 109 bp, Homo sapiens
ggacagccgcgcgctgagggtctcggggcgggcgccgcgggacctctccgggccatggcaattctgtggtgttcttggtcacacatttatggagtttctgaagggcagt

SEQ ID NO: 165831 - DNA, 75 bp, Homo sapiens
ggccatccggctgcgggaggaggccatcctgcagatggaggtgacaaggcaactgtatgagccactagttatgca

SEQ ID NO: 165832 - DNA, 82 bp, Homo sapiens
aggacaaaagcaacgacttcgtatgcaacagggagctgccaccaccgtgtactgtgctgctgtcccagaactggagggtctg

SEQ ID NO: 165833 - DNA, 100 bp, Homo sapiens
ccctggtgaagatgggggagctggccagcgagagccagggctccaaagaactcggtggctgagatctgcgttgaaatggagctgcgggacgagattctgc

SEQ ID NO: 165834 - DNA, 76 bp, Homo sapiens
gagaatgtctaaaaaatacagcagctctgtctctgagcaggaggagatgttaaagtaacccatcttgcaggacgac

SEQ ID NO: 165835 - DNA, 100 bp, Homo sapiens
cagggggccagctcaggacacacagacccagctggaactcggagtatgctgctgctgttccgctttgcgtcctcgctacaaacgcctggtggacaacata

SEQ ID NO: 165836 - DNA, 96 bp, Homo sapiens
aatagcaaacaatccaggtggcagggagtgcatcaaaggtgtgaacgcaggtgtccaggaggctgtggtgagctgcttgaacaaacagactcggga

SEQ ID NO: 165837 - DNA, 74 bp, Homo sapiens
gtttccctcccacctttgccattcctcaagctgcaggtgaccctggcaaagatgagagtgcacatttcgtcctg

SEQ ID NO: 165838 - DNA, 100 bp, Homo sapiens
aagcagaccttctgctcttcccagaccaccagtaacacatcccgttatgccgctgcactctacaggcaaggtggagccgccaccaaaatgcagattttcg

SEQ ID NO: 165839 - DNA, 50 bp, Homo sapiens
ctgggctacaaggccaagcaagcgattggattaacctccttcgtcattgc

SEQ ID NO: 165840 - DNA, 73 bp, Homo sapiens
ggagacccccgggtgaagccaccgtcatcatgtctgaccagagtgacagaaggaagtcaaggcaccattatga

SEQ ID NO: 165841 - DNA, 100 bp, Homo sapiens
tcggcccccacaagacatgggccagattggtgtgcgcactcctctgggtcctcgaggttacaatctgccctgggaggatccaagcttccagtatcctggg

SEQ ID NO: 165842 - DNA, 100 bp, Homo sapiens
gaagatatttatgaagtcttgccagtgcttagatgagtacgaagatgatgaagcagggcagaaagagcggaaacgagaagatgcaattacacaacagaac

SEQ ID NO: 165843 - DNA, 89 bp, Homo sapiens
ataagtcgaaggggaaggcgcctgaagaggacgaagacagaaccaagttgtattgttagacacactggaacaagagatttcaaaattta

SEQ ID NO: 165844 - DNA, 80 bp, Homo sapiens
tatttggagttcttacaacatggcagacattgacaacccagtgtttcccgggctctttgagttctgctcgcgttacacag

SEQ ID NO: 165845 - DNA, 50 bp, Homo sapiens
ccttcagagtccttggggtgattgacaagatgttcctcctgctgatcaag

SEQ ID NO: 165846 - DNA, 78 bp, Homo sapiens
cagttaactctgagaagtcgtcctcttcagaaagtgatgtccttgcattgcccatttttaagcaagaagagtcgagtt

SEQ ID NO: 165847 - DNA, 74 bp, Homo sapiens
tgggcggcaccctggccaggaagcggagggcgcgcgagggagactacctaggtggagaagcgtactgggccggc

SEQ ID NO: 165848 - DNA, 83 bp, Homo sapiens
attctcttcagagattctgcaaatgcgacaagcctcccagttaaacaggtgttcaaggagctggagtttctgggttggtatac

SEQ ID NO: 165849 - DNA, 50 bp, Homo sapiens
agcacaaggctggcttccttgatgagggccccaaggctgttgcagctcct

SEQ ID NO: 165850 - DNA, 102 bp, Homo sapiens
gcgcgagagatggagatgggcagacggattcatttagagctgcggaacaggacgccctctgatatgaccgcacctcgagcaggagtggggatgccacgtctg

SEQ ID NO: 165851 - DNA, 74 bp, Homo sapiens
tactccttctacaggtgtgtatggttgcgagttataaggactcagcatcatgtagaagcacttgtggagcatca

SEQ ID NO: 165852 - DNA, 73 bp, Homo sapiens
ttggctgcaaaacactttattgatgtaggaggtggtgctccaaattactaccccaacagctttggtgctccgg

SEQ ID NO: 165853 - DNA, 75 bp, Homo sapiens
aggagaaagtcctacaacagtttggcgtgcaacatggggcttgagaaaggccaccattggttcaggcaatcttca

SEQ ID NO: 165854 - DNA, 112 bp, Homo sapiens
ttcctcgctgtgctctggtctgcggggctactttgcagccaagaggagtttgaaattcttgcttcaggccatatggagtggatattccttccagaaggaaattacagaccac

SEQ ID NO: 165855 - DNA, 111 bp, Homo sapiens
agacttcggagtacctgcgctatgaagacacgcttcttctggaagaccagccaacagtctgcgctcctcagaccaccggcaggtgaacagcctgatgcagaccgaggagtg

SEQ ID NO: 165856 - DNA, 89 bp, Homo sapiens
cagagaggaattcaaaaccaggctgaacccagagagttcctgcaacaacaatacagatctggtaccaaaggagaatttggagagctggc

SEQ ID NO: 165857 - DNA, 75 bp, Homo sapiens
cacctcctcgccagcagccgtccggagccagccaacgagcggttctcccatgggcaggtggtctctctggatgag

SEQ ID NO: 165858 - DNA, 76 bp, Homo sapiens
ctcattctgcacgacgatgaggtgacagtcacgcttctcaataggtttggcatggacaagatctatgaaggccaag

SEQ ID NO: 165859 - DNA, 100 bp, Homo sapiens
gtgatggaatatgttaatgggggcgaggcaaagtgtttcatggatttcaaagctggaggcgccttatgtcacattcttggggctgcttacaagtataaaa

SEQ ID NO: 165860 - DNA, 124 bp, Homo sapiens
accatcacctgcattggttccatccttgactgttactacagaaaaaatcaatgaactgagccatgttcaaatccctgttatgttgatgccagatgacttcaaagcctattcaaaaataaaggtg

SEQ ID NO: 165861 - DNA, 100 bp, Homo sapiens
cagctttggagcaagtggagagccagaaaaggatccagaactggagtggaagagagaagaagaaggaggttcctgctgtgccagaaacccttaagaaaaa

SEQ ID NO: 165862 - DNA, 90 bp, Homo sapiens
ggtagagaagaatgaacattgtattgagaacaatatagatttgcaggtcccttcaataatcaggagatggcagaatggtttcaggcgggc

SEQ ID NO: 165863 - DNA, 98 bp, Homo sapiens
ggaccccgaggatcaggaaaaactatgaatgtttcatccatttgtggaccaaaagatggagttggtttttatttttaaaaagataatgttaatgatct

SEQ ID NO: 165864 - DNA, 75 bp, Homo sapiens
tgcgcttggggatcctctgtacgcccgttcactgtacactaccagaagatcatccaccgtgacatcaaaccttcc

SEQ ID NO: 165865 - DNA, 82 bp, Homo sapiens
gcggactggccgctgccaaacatgtgcaggcatggaagaggagatggttcgtgttacgcagtggccgtttaactggagatcc

SEQ ID NO: 165866 - DNA, 101 bp, Homo sapiens
cccggctgctggatttccagaagacgaaatacgcgagggccttgggaactccaagacagaatggcccgaggcctggacactctctgaggacatctctgcaa

SEQ ID NO: 165867 - DNA, 100 bp, Homo sapiens
gtgaatattcatccctgtggaggaaaatagtggggtctctgagatttatttgtctgcctctgctcattccaaggtggtgatcttcacagtcaactctttg

SEQ ID NO: 165868 - DNA, 76 bp, Homo sapiens
gtctgtgtctcaaatcaaccacaagctggagtggcaagatgtattagatattatttcaaaagctcttactgacaac

SEQ ID NO: 165869 - DNA, 74 bp, Homo sapiens
actggcaactagacaccgcgaaatgctgaagcgctgtaaaactcagcttaaggactcagaattcatgattgaag

SEQ ID NO: 165870 - DNA, 101 bp, Homo sapiens
ctcaccgggcagcgtgggtgagcggcgcagcggcggcagcggagagcgagagaggggagcagctgaaactagaggaccgttctgtggtgccccgagatgtg

SEQ ID NO: 165871 - DNA, 90 bp, Homo sapiens
agcgggagcgcgaggtcgatgaggactcggagcctgagcgggaggtgcgaggaatcctacggcccctgaatattttggcatcttcaacct

SEQ ID NO: 165872 - DNA, 98 bp, Homo sapiens
tatggttccatccctaaacttatactgcgtaatgggaaaactgagtgttacctttccatccagactcaagagaactttccggccaatttaaacgaact

SEQ ID NO: 165873 - DNA, 115 bp, Homo sapiens
gccctggaatatgaagcaacatgagatggtggatgaacccacagatgccaattctcggaagcaagaagcagagtggaaagaaaaggcaataaaggagctagaagaatggtatgca

SEQ ID NO: 165874 - DNA, 58 bp, Homo sapiens
tgggaaggtggagccaccagcctctccctggagagtagttatcttgatggaattagaa

SEQ ID NO: 165875 - DNA, 100 bp, Homo sapiens
atctttgagagaacggaggtcctggcagggtgccgggaaggccacgtggaccttgttctgctggttgatggctccaagagcgtgcgtccacaaaacttcg

SEQ ID NO: 165876 - DNA, 98 bp, Homo sapiens
gcgagttcgcggagcgcggcgccagaaaggaatactcccccagttgcaagaggcgcaggaccgtggaagacttcaacaaattctgcacctttgtcttg

SEQ ID NO: 165877 - DNA, 82 bp, Homo sapiens
atttaaaagacagtcctcgtcagcactgactttcagctatggaatcgaggctgggaggcggcagaatgcagccagaggaggg

SEQ ID NO: 165878 - DNA, 100 bp, Homo sapiens
gccttgtgggattggctgtgtgcaatactcctcacgagactatgtcttcagcagtggtgcagttatatgcagcagatcggaactgtatgtggtcaaagaa

SEQ ID NO: 165879 - DNA, 76 bp, Homo sapiens
aagaaatcccagcaaataggaaaattaagtttagtagtgctcctattaaggtgtatgcaacagcgttattgcaaca

SEQ ID NO: 165880 - DNA, 90 bp, Homo sapiens
tgctgaggctgtcctgtcctcgtccgtctcatcaaagggagtacctgacaggcttccacaagcggaaggtcgagcgaaagaaggcagcca

SEQ ID NO: 165881 - DNA, 90 bp, Homo sapiens
ggacggactcctctctgtaaagagggtgacacatctggagactacaggaaagtactgcttgttctctgtggaggagatgattaaaataaa

SEQ ID NO: 165882 - DNA, 87 bp, Homo sapiens
ggcggccggacagcaaggacatttccaaaggtgaatacgctttggccgaatacacagaagtgaaaactgtcaccatcaaacttggcg

SEQ ID NO: 165883 - DNA, 74 bp, Homo sapiens
aagctatcagcctgggaggccaaggcaggcggatcacaaggtgaccaagaatatggcccaggtgaccaaagccc

SEQ ID NO: 165884 - DNA, 100 bp, Homo sapiens
aaaaaacctcaaaatgggattcctttgcctccccagatcttcaatgaggagcagtactgtggggaagctgacaagaagcacgttgctgagtgatcctggg

SEQ ID NO: 165885 - DNA, 100 bp, Homo sapiens
cctaccgcaggctgctggcagacgagtacaccttcgccttcccgccccaccacgacacgccgaacgaccctgtcaccaacatttgccaagcagccgacaa

SEQ ID NO: 165886 - DNA, 75 bp, Homo sapiens
ggcgcttcctgcgcatcgtctgcaagaccgcgaggcgagacctcttgattgtgctcatggacgatgccatggact

SEQ ID NO: 165887 - DNA, 83 bp, Homo sapiens
cagccgcggatctcaccgccgctcagggttttgtagtgcatccctgagcatgagcacagaatgaagcggcgtttggatgacca

SEQ ID NO: 165888 - DNA, 74 bp, Homo sapiens
cacgctcgacttcatgctcggcgccaaagctgctgccatcttaagtaaagtaaatctgtctgtggatccttgtg

SEQ ID NO: 165889 - DNA, 100 bp, Homo sapiens
cctcctattcctgttcctgcacctataacagtgccacctccacagattgaagtggatattcctcgctgtcatcagtacgatgaactgttatcatcaccag

SEQ ID NO: 165890 - DNA, 75 bp, Homo sapiens
cgaaacagaagacaaatcattctttgtaagaacaaagttactccacaggatccgctgaacataggatgttgccac

SEQ ID NO: 165891 - DNA, 90 bp, Homo sapiens
gagcgaagagctgcttctgtatcttaaggaccagtccaccatgcctgaagtcaaagacctctcagaagccttgccagaaacgtcaatgga

SEQ ID NO: 165892 - DNA, 100 bp, Homo sapiens
tcgtctgggctcgcggcgtctccggggaaagccgtggccccgagggcggatccgagactatgtcttcagcagtggtgcagttatatgcagcagatcggaa

SEQ ID NO: 165893 - DNA, 74 bp, Homo sapiens
ttgcggcaacgcccccgggacatgcatcgtcccctggactctctcaaccatgaggagtggaaccagatgcagag

SEQ ID NO: 165894 - DNA, 97 bp, Homo sapiens
ctgacttttcttatgctgggatgtgccttagaggattatggctgagcgggctttggacaccatgaactttgatgtgattaagggaaagccaatccgc

SEQ ID NO: 165895 - DNA, 82 bp, Homo sapiens
ctccagcccggcccggcagcgacatggaaggtctctaattaacagaagatggcaaagcccagccacagcagctatgtccttc

SEQ ID NO: 165896 - DNA, 75 bp, Homo sapiens
agaagcgggcggcgcgggggagatgcgagtaaccagctcataaatcacatcgaacagtttttggatactaatgaa

SEQ ID NO: 165897 - DNA, 89 bp, Homo sapiens
gacacgggaggcgctacgccaggaccgacgggaaggtggtgaaggcatttgtgatcctggcctcgcagttcctatcccatgacccagaa

SEQ ID NO: 165898 - DNA, 100 bp, Homo sapiens
cggccaagaaagacaaagacccagtgaacaaatccgggggcaaggccaaaaagaagggtcaagggtaggaccggaggacgctatgccccgcatcgtggag

SEQ ID NO: 165899 - DNA, 75 bp, Homo sapiens
tggactgcatccttcttcaacgcaggtgacagtggggccgggtgttggtctgtctctggaagacaccagttccgc

SEQ ID NO: 165900 - DNA, 89 bp, Homo sapiens
gaaccccgggacacgcaggaacggctccagcatcaagatccgtctgacaggtctcagtggcccttagcagcagctccattcgtgtggcc

SEQ ID NO: 165901 - DNA, 51 bp, Homo sapiens
cgagtctggggctgtcgctgtgctctgtgctggagaatctggtaaaagcac

SEQ ID NO: 165902 - DNA, 98 bp, Homo sapiens
aaaagcatctactgggggacatcctgttgtgaaggccccagttgtgacagcgttgaggaagatatgaatgcttctgcccaaggtgcttctgccacagt

SEQ ID NO: 165903 - DNA, 100 bp, Homo sapiens
cgacctgctaacagaactggaccttttcgccctactgccaataaagggaaaataagagatgctcatcgacgaattatgcttttaaatcatcctgacaaag

SEQ ID NO: 165904 - DNA, 97 bp, Homo sapiens
aagctacccccagcatggcctctctgggcccagggtccggtccataatcatgttacaggaaaaggcccaggacagggaacggctgctcttgaagttc

SEQ ID NO: 165905 - DNA, 100 bp, Homo sapiens
gggacttcatcttacctatcagtgatgtccgggccagcataggtgctgggttcatttaccctttggtcggaacgcttgaagaagtcatggaaaaagaaac

SEQ ID NO: 165906 - DNA, 75 bp, Homo sapiens
tgaaatttgatggccttagcatttcttactacaataatgagaagtaccttctccaggcaaattccgttcccctgc

SEQ ID NO: 165907 - DNA, 90 bp, Homo sapiens
taaatagagttcacgatcctgtaactgccaaacccaagttggttggagatgtggattttgaagcggagtttaagagagctgtgaaagtag

SEQ ID NO: 165908 - DNA, 75 bp, Homo sapiens
aaatgcatacttccccttgtgacaagtggggatgaggacatccaggcctgctcggccgcctggaaggctgacggc

SEQ ID NO: 165909 - DNA, 87 bp, Homo sapiens
ggccaagcggagggtgcgcgagctctaccgcgcctggtatcgggaggtgccgaacactgtctatccagaagttaaaggagagattgc

SEQ ID NO: 165910 - DNA, 100 bp, Homo sapiens
tggttagaaatgagtcgcataagaattgcgatttccgtgtaaaagatcttcaatattcaacagactacacttttaagaatcaggaaacccaggcccaacg

SEQ ID NO: 165911 - DNA, 100 bp, Homo sapiens
ctgtggcacctcgggacgtcccgctgctgccctcagatgtgaaactcaaaaaccatatcattctacaggaaaatgcacagcatgccacccggtttatagc

SEQ ID NO: 165912 - DNA, 100 bp, Homo sapiens
gctttaactttgctggccccagccgctggagacacaatcatatctttagattttggcagcaacggaacctgatgaaatgcctggtctaacaggaggatgc

SEQ ID NO: 165913 - DNA, 75 bp, Homo sapiens
agcggaagtatgagttggggcgcccagctgccaacaccaagagcccacaggcggttttgtgagctgcttccccag

SEQ ID NO: 165914 - DNA, 98 bp, Homo sapiens
gggagacgcagctgtgcaccacaagcttataggctttatactgtggtgcctcgcctggtcaagtttgtagatattctgaccaattggtatgttagaat

SEQ ID NO: 165915 - DNA, 96 bp, Homo sapiens
cagcagtctccgattccccatcaccaattcggctggggagctgtcaccatgcctcactcgtacccagccctttctgctgagcagaagaaggagttg

SEQ ID NO: 165916 - DNA, 99 bp, Homo sapiens
ctgtctctccagatggatccctctgtgcttctggaggcaaggatgtacgaagtaggtccaaagttgttgaccgtatttacagtctctacaaacttacag

SEQ ID NO: 165917 - DNA, 87 bp, Homo sapiens
tgccagactgtgagccaaggaattttgtgtttcttgccatcttacaaggtgctggagatcagaatttatttacctctgtttatccaa

SEQ ID NO: 165918 - DNA, 75 bp, Homo sapiens
tacagcacatctcagtgaatttgcaagtgaatatgtaatggatgtgttgatggatcagcactttacagaaccaac

SEQ ID NO: 165919 - DNA, 75 bp, Homo sapiens
cgtgaagcaagtgcagatagatggccttaaaaatatgtcgtaactgcaagtgtggccaagaagagcatgatgtcc

SEQ ID NO: 165920 - DNA, 90 bp, Homo sapiens
agaaattgaaagttcaagggtagaactaagaagtttggaaaagattatatcccagttgccaattcagaatctgataattcagataacaac

SEQ ID NO: 165921 - DNA, 100 bp, Homo sapiens
gagtgcttctaccagcccatgcccctgaaggcctcgctggagatcgagtaccaataaaagaagccttgagccctataaaatttaacagatggggtctccc

SEQ ID NO: 165922 - DNA, 100 bp, Homo sapiens
caccgtgaggcagggggacacagccatcctcaggcgttcgtggcattcagggatgtggctgtgtacttcacccaggaggagtggaggttgttgagccctg

SEQ ID NO: 165923 - DNA, 50 bp, Homo sapiens
gctagagaagcctctatttatactgcttgctgatgaccgtatggcactgg

SEQ ID NO: 165924 - DNA, 83 bp, Homo sapiens
tgtgggaagccgcacttacctatgaggccagcaagcggaggtgctgggagcgagttggctgttacagaatgtctgaaggggac

SEQ ID NO: 165925 - DNA, 82 bp, Homo sapiens
atcctcgtgcctgtgagcagagatggcacctttgatgctgtcagagcaccataacatggtgtgggaagtgaagacaaatcag

SEQ ID NO: 165926 - DNA, 82 bp, Homo sapiens
ggacctcgggtcgcgcagtcaggaggagagacttcagcatgcaaaccttcatctgttcggcttgcaccgtcattttcattcc

SEQ ID NO: 165927 - DNA, 75 bp, Homo sapiens
cgccgcccggggcgaggcagggccagcagcaggcgggaggtgacgcggcgcacggcgcggatggtggccgagtgg

SEQ ID NO: 165928 - DNA, 100 bp, Homo sapiens
gggcatgtaaggtgcgcggagggactgcaccttctccatcaggtgcagaaggtgctgtaaactgcaaaccataatcctgtcttaatactgcaaacaaatc

SEQ ID NO: 165929 - DNA, 100 bp, Homo sapiens
tggggggagctagtggaagttactgccgcgccaccgagtccggaccggagactttggggcctaactaggcaagcttgggctttagttggtgtcattgatg

SEQ ID NO: 165930 - DNA, 83 bp, Homo sapiens
aaacaatttctcctgctctgcagcttctgttcaggcctccccatggccacccatggaccagtcggcattcacttcctcccttc

SEQ ID NO: 165931 - DNA, 83 bp, Homo sapiens
ctccgtacaccaaaaactcaggcttcgccacctgcgtgcaaaatatgatttttcttcagggaacagaggtcatatttaaagtg

SEQ ID NO: 165932 - DNA, 89 bp, Homo sapiens
tgagattacagttgtaacttcatagactcccaaagggaaattcttgccacagaacagcatgcctgacatcatcatctggatgatccggg

SEQ ID NO: 165933 - DNA, 100 bp, Homo sapiens
tgaaattccagagcgctactacaaagaatctgagcatataggttgctgtagatgaatgttcttagctgtcatgtttaaaaatacttctgcttcgttacct

SEQ ID NO: 165934 - DNA, 100 bp, Homo sapiens
gaaatgtgaatctcaggagagagcagccagagtggccaaagaactgccaactctgaaagataatgatttcattaatgagggccaaaagatttatattgat

SEQ ID NO: 165935 - DNA, 100 bp, Homo sapiens
ctggattggacaagcaggcaaagctgaggggcaagattcttgccaagagaattaatgtgcgtattgagcacattaagcactctaagagccgagatagctt

SEQ ID NO: 165936 - DNA, 100 bp, Homo sapiens
atcggttgggcttcctcctgaatctggactctaaacttggagtgtgacaatatgaaccgctttgaccgaccagacagaaatgttcggcagcctcaggaag

SEQ ID NO: 165937 - DNA, 100 bp, Homo sapiens
cctatcaggacatggagtatgaaagacggaaacattggcaaatttggagcgacagatctatgcttttgagggaagctacctggaagacactcagatgtat

SEQ ID NO: 165938 - DNA, 50 bp, Homo sapiens
cacctgtagtcaatcacacgcaggatggatgtggacagtttccatatgat

SEQ ID NO: 165939 - DNA, 96 bp, Homo sapiens
aaaataagcaacttggccacgaagaagactttttcacagggtacctttagtggttgccaatctgggcatgtctgaacaactgggttataaaactgt

SEQ ID NO: 165940 - DNA, 95 bp, Homo sapiens
ggagtgagaagcaagaaggccctggacacagcaatatctctgggctttcacaggcatttgcaagtaaaatcactggcatgttgttggaattatcc

SEQ ID NO: 165941 - DNA, 100 bp, Homo sapiens
accgatgtcggaatgtggcaaaattactgtatatgcacatgctgggctaccctgctcactttggacaggatttgttaaggattccaagtaactcttattt

SEQ ID NO: 165942 - DNA, 75 bp, Homo sapiens
ctccagtcggtgttgagcacggcgagcagtctcaggcctttagtgatgatgtgagagggtccaagcctggtaaga

SEQ ID NO: 165943 - DNA, 75 bp, Homo sapiens
cttcggcctagtgcgccagggcctcaagtgcgatgtctctggcatctctatcccctatgaggcaccacgtaagac

SEQ ID NO: 165944 - DNA, 100 bp, Homo sapiens
tattagcattcctaaacctggacaagacggggaaattggggctttttccctgtcgccttcggcttcctgggcaatgtctgcaacatccccttcctgggtg

SEQ ID NO: 165945 - DNA, 102 bp, Homo sapiens
tcagcggtgttggaacttcgttgcttgcttgcctgtgcgcgcgtgcgcggacatggcctcaaacggtggacatcttcaataaggagctactgctaatcccca

SEQ ID NO: 165946 - DNA, 82 bp, Homo sapiens
ttcgcgtctctctgctgcggcgcggggaccgctgtgctctcgcccatcatcttcgtttcggacagagcaaacagcaacaagg

SEQ ID NO: 165947 - DNA, 100 bp, Homo sapiens
ttctagagttctgcctcgcttcccggcgcggtcgcagccctcagcccacttaggataatggcgacagctgaggcagcagtgttgtactgctacttctata

SEQ ID NO: 165948 - DNA, 100 bp, Homo sapiens
gcaggcccaccaggccccccggctccaggaggccagagctctactgaagcggcggcggccccgggggccagggggccggggactactgagaaggaggccc

SEQ ID NO: 165949 - DNA, 100 bp, Homo sapiens
gcccgactggcgggaccgccccggattccccgcgggccttcctagccgccatggaggacggcgtctatggagtctccccaggacagtgctatcacccggg

SEQ ID NO: 165950 - DNA, 75 bp, Homo sapiens
catggaggctgagcatttattcaggtggagataagtaattaacatttcgaaacaggaaatgaaaggatttatatt

SEQ ID NO: 165951 - DNA, 82 bp, Homo sapiens
gcagaagtgaagtcaatgttccgggaagttcttccaaagcaaggtacatgtcccagagcaagcacacggaggcccgggagct

SEQ ID NO: 165952 - DNA, 100 bp, Homo sapiens
aaagaagaaggcacacgcatggtgagaatccggcctgagccgaagcggaggcatgcccaagagaatcgtaaatgcaaaaattgcttgccttgacttcagc

SEQ ID NO: 165953 - DNA, 100 bp, Homo sapiens
cctgcgaccgccctgcgcttcgtgcaccggggcggtccgttgccaaagccagacttccatggagtcactgattcatcactttaagttgtatactgagggc

SEQ ID NO: 165954 - DNA, 100 bp, Homo sapiens
cttactaaggagctctacccatattggatctctgctttagataaatttgcgcctcattttggtaagcggaaaaacaaaagagttcctgttttctcctaac

SEQ ID NO: 165955 - DNA, 50 bp, Homo sapiens
ccgggagccgggccggcctagccagaacccagcgggtgccgcttctccac

SEQ ID NO: 165956 - DNA, 95 bp, Homo sapiens
acatcgagatcaatgaacctttagatgaatttacaggaatccgagcccgcattttagagactttggtcatgcttcttcttcttgcgttactcatt

SEQ ID NO: 165957 - DNA, 75 bp, Homo sapiens
taccttctggaagctactactacgtggtgcttggaaagatgtgggacctaggaaaaggcctgaagattccccagc

SEQ ID NO: 165958 - DNA, 75 bp, Homo sapiens
agaaggggaggggagtggaaaggctctcagtgaaaaagaaaggatctatgtttatgaaaataaaaaggaagcatt

SEQ ID NO: 165959 - DNA, 100 bp, Homo sapiens
agtactgcttcaccatgtaataataacataaatgcagctacagctgtggctctacagttgattatggaagattcccacaagagtaccacgtcagagacag

SEQ ID NO: 165960 - DNA, 77 bp, Homo sapiens
tacagctctcagatgtcccaaggacctattgctatgcaggagtccaatgtgctgattgctgctaacagtcagggtac

SEQ ID NO: 165961 - DNA, 100 bp, Homo sapiens
cttgatcccagcgatgtgactgctcaatggagagaaggaaagtcaatcgtaggaagaacacagtacagagtgatggtgatgattttaattacatcattgc

SEQ ID NO: 165962 - DNA, 74 bp, Homo sapiens
cgctctgtgtcagcgcccgaacccaaaggggtggacgcggcctccagatcagtgtgcgtgtgaccaccatggat

SEQ ID NO: 165963 - DNA, 90 bp, Homo sapiens
agcgagagaacaaagcttattccttcaaagagcagatcatcgagctggagctgaaggagggagctgagcacataacgacttacacgttca

SEQ ID NO: 165964 - DNA, 74 bp, Homo sapiens
cttcccttgtcactgctgaagacggctcagaatcaccccatggatgagaacaagttgagcagtgccaacggcca

SEQ ID NO: 165965 - DNA, 100 bp, Homo sapiens
ctatgggaacctactctcattagttccaagaaactatgatcctgctttacatccttttgaggtcccacgagaatatataagagctttaaatgctaccaaa

SEQ ID NO: 165966 - DNA, 100 bp, Homo sapiens
gagagcgcggggacgctgccgtgcgcgccagagatcccagactgcgtggagcagggtgtcaaattgagaaccaggtagatccccaccacctacagtaaaa

SEQ ID NO: 165967 - DNA, 100 bp, Homo sapiens
aaatacaaggagctggacatcgagcctgagggaggggaaaggcgcagggctgaagccgacgtagcttctctgaacagacgcatccagctggttgaggaag

SEQ ID NO: 165968 - DNA, 89 bp, Homo sapiens
caagaaccttgacaagctcatccggctggtaaatgcgcaggtccagtgcacgtgccaacattacactgtcagggaagaagcgcagaaaa

SEQ ID NO: 165969 - DNA, 100 bp, Homo sapiens
ggggcgggcagcggctgcctgggcactatggaggtgaagagcaagggccagctctcaatgttgcaagaaaaaatagaccatttggagcgtttgctagctg

SEQ ID NO: 165970 - DNA, 85 bp, Homo sapiens
caccaccactgacctgggacagtgaatcgctactgatgcccgaagggcttttccttgctgggatgagcctgctatcaaagcaact

SEQ ID NO: 165971 - DNA, 51 bp, Homo sapiens
gcgaatatcgtcatcgttagaagctttggacatcagacagtgcaggagaag

SEQ ID NO: 165972 - DNA, 90 bp, Homo sapiens
atatacgtactgtgggtcttgtgctgcccatgcttataaacaagtggatccgtctattacttctggacatggcaagacatgtgccactct

SEQ ID NO: 165973 - DNA, 100 bp, Homo sapiens
aaagtcatctaatgggactcacaattgatttcagcacaggatttatctgctttgatgctgcaacaaagattaaagagcaccttgctaaggggcagcgaat

SEQ ID NO: 165974 - DNA, 50 bp, Homo sapiens
tgagtttcggagaggagtaaagagctcaccatggatgatgatatcgccgc

SEQ ID NO: 165975 - DNA, 75 bp, Homo sapiens
tcaaaactcttcccagtctgctgacggtttgcgctagacgagttgtactgctgtcacaggaaatggacgctggat

SEQ ID NO: 165976 - DNA, 75 bp, Homo sapiens
tgacagtgatgaaatgcaggggacctggatttgatatagataccccagatgattttggcaggacttgtctacatg

SEQ ID NO: 165977 - DNA, 57 bp, Homo sapiens
caagggcccaactggaattccacttacggataaactcatcctgaaagtcgctgttgt

SEQ ID NO: 165978 - DNA, 88 bp, Homo sapiens
gagactttcgaaagaatatgatcaactcctgaaagaacactctgaacttcagagtattgggaaagggtcgttgtggtgcatagaccca

SEQ ID NO: 165979 - DNA, 98 bp, Homo sapiens
gcgcgtttgccgtcggctgctgcatgcctggccactgcagaacaaattagacttgcacagatgatttcggaccataatgatgctgactttgaggagaa

SEQ ID NO: 165980 - DNA, 97 bp, Homo sapiens
gctggttggccctgtgatccctcaagactggtccacggagtgtatgaccacaaacagccatcaagatccaaaatacggagctggcatatacttcacc

SEQ ID NO: 165981 - DNA, 73 bp, Homo sapiens
ttgaatgccaagcagaaaattacctaaatgcactctttcgaaagaaaggatctaagcctttcccacgttatgg

SEQ ID NO: 165982 - DNA, 99 bp, Homo sapiens
gaaagcctcagtgatcttggtgccatagagagtctccgggtccctggaaagtttccaggaatatggatctactggaacagcccatgctgatagtgaata

SEQ ID NO: 165983 - DNA, 51 bp, Homo sapiens
gtcgaggcggacgcgcggctgcgtcaggtgttggggatgtcctttgcactg

SEQ ID NO: 165984 - DNA, 51 bp, Homo sapiens
atggctctggtgaaactggcaaattgacatgaagacaatggagactgcaga

SEQ ID NO: 165985 - DNA, 101 bp, Homo sapiens
cgccgcagcctctgcggagccgggctcgggtcgccggagccgcgccccaccccgccagctccagagccacgtacgatatttggagttcttacaacatggca

SEQ ID NO: 165986 - DNA, 75 bp, Homo sapiens
gtgaacttccagggcaagaacctggacaccgtgaagggagctgcagtccatggctgaccaggagcaggtgtcacc

SEQ ID NO: 165987 - DNA, 88 bp, Homo sapiens
cagactgtggaacttccgtgccccccaccctcaccaagcgtcgtcccccagactacagtaatactcaacaatgatcggcagaacgcca

SEQ ID NO: 165988 - DNA, 97 bp, Homo sapiens
agcagtgggcgctgagagcagcaaggccagacacaggttgctcttgatacatcaaatttctgctgttaaaaacttcagttattttgagtttagttaa

SEQ ID NO: 165989 - DNA, 100 bp, Homo sapiens
gaagagaccaagcatttccctatgaaccacagcttacaaggacgctgccaaggtctgcagagaattcaccgagcgtgagcaaggagaagtccgcttctct

SEQ ID NO: 165990 - DNA, 74 bp, Homo sapiens
ctgggagcgtgctttccacgacggtgacacgcttccctggattggataccattgttcttatcgcttcaatagca

SEQ ID NO: 165991 - DNA, 96 bp, Homo sapiens
gcaagctgtatgcatccaaagcacacatgaactcagtgctcatggggatgaagaaccagctcgaggactactgagcccagccaggctgtatgccat

SEQ ID NO: 165992 - DNA, 75 bp, Homo sapiens
aacgaggggctggaacacctcgccaaagcagagaaatagtgagaagccctaccactgcaactgggacggctgcgg

SEQ ID NO: 165993 - DNA, 100 bp, Homo sapiens
aggtcgcctttgctactaccgcgactggctgctgcggcgcgaggtgtcatggagaaactccagctgggcccagagattctgcagcgggaaaatccaaggc

SEQ ID NO: 165994 - DNA, 96 bp, Homo sapiens
agtggaaccatcacacaaaagcacacaaagacctcctcctccacaggggagacagagggagatggaagggagtcaaggatgttgccatgtatgtgc

SEQ ID NO: 165995 - DNA, 74 bp, Homo sapiens
tcttcactgatgagagaatcttcatgctcttgagatgcatggtcatggaggctatgattctgattttagtgatg

SEQ ID NO: 165996 - DNA, 100 bp, Homo sapiens
tgccactgctgccgccgcccccggagctgctggtttcattcgaggtttcgggccggcttcctatccagtcgggaggagattgcttcttattaccactgtc

SEQ ID NO: 165997 - DNA, 100 bp, Homo sapiens
cgctctgcggggctgagctggtggatgctcttcagttcgtgtgtggagacaggggcttttatttcagtctctacagcggaacaatgtcgttcttccccca

SEQ ID NO: 165998 - DNA, 85 bp, Homo sapiens
cagattgacccagtcgacaggatctgaacttccagtgaccatcccaggaacagaaagcaactgtagacaaggtctcactgtgttg

SEQ ID NO: 165999 - DNA, 100 bp, Homo sapiens
actgtgctgtttttgattggcgcctttctcattattataggctccctcctgctgtcaggctacatcagcaaaggggagaagtttcggtgtccgacatccc

SEQ ID NO: 166000 - DNA, 100 bp, Homo sapiens
agccctggtgtcacctatcagtaaaaggtgtcatggagaaactccagctgggcccagagattctgcagcgggaaaatccaaggcttatttatgccaggct

SEQ ID NO: 166001 - DNA, 85 bp, Homo sapiens
ttcacaataagagcagaggatggaacacttcagtgcattcaaggcaccacctacctatgatgccgtggtacagatggagtacctt

SEQ ID NO: 166002 - DNA, 50 bp, Homo sapiens
ggaaaaggacgcaaagttctccggcgagacaaatcttcctattttcaagc

SEQ ID NO: 166003 - DNA, 75 bp, Homo sapiens
ccaaggagagtgctacccggtgtactggaaccgctgccacctaaaagactttggagatttgagttttactccagt

SEQ ID NO: 166004 - DNA, 100 bp, Homo sapiens
cccggcccctccccttctttgtcttttgcagatgatcgccgggtgtcgatccttttccctccagtcagttactccacaggatccgctgaacataggatgt

SEQ ID NO: 166005 - DNA, 98 bp, Homo sapiens
atggaaaccaccccgagcttggcgtgtgctaataaatgtgtcttctgttggcggtttctgagtcccttcaacatgatcctgggaggaatcgtggtggt

SEQ ID NO: 166006 - DNA, 100 bp, Homo sapiens
atatggctttctgacaaaaggaaacagacacagaaagaggttactgtgctgctagaacatcagaagaaggtgggcgacatgaccaacagaaagccacagc

SEQ ID NO: 166007 - DNA, 75 bp, Homo sapiens
ccttcctatgggctctcggccgaagtcaagaacaagatttcagagacaactgtctgaaccctgccaccccttccc

SEQ ID NO: 166008 - DNA, 75 bp, Homo sapiens
caaacttcctggcaccttgattttggacttcatagcctctagaactgtggtgttcccactgatgaagagcaggcg

SEQ ID NO: 166009 - DNA, 119 bp, Homo sapiens
ggaagtcttgaagaatagagccataaagaaagcaaagcgcagaaatgttggatttgaagaaccctaaggactctgcaatatgaataattccctagagaacaccatctcctttgaagagt

SEQ ID NO: 166010 - DNA, 100 bp, Homo sapiens
gactataccaaccagctgctccaggcaatgcagcgcgtctatggagcccaggttgctataaaatccattcgtaaggacaaaattaaggatgaacaagaca

SEQ ID NO: 166011 - DNA, 100 bp, Homo sapiens
gggcaagagaaagccctaccacaagaagcggaagtatgagttggggcgcccagctgccaacaccaaggtgatctgtgaaaatggttcgctattcacttga

SEQ ID NO: 166012 - DNA, 100 bp, Homo sapiens
tcttcagcctgctcagcttcgagaagattggctacacaggattctttctgaactaccttttttcgggaatggatgatgatggtatggaatccagattcaa

SEQ ID NO: 166013 - DNA, 83 bp, Homo sapiens
aaattcagcctcaaaaccgtcctgctgcttgctgaccaaatgcacacaccagggcgcctcgggtcttccctgctggatgaagc

SEQ ID NO: 166014 - DNA, 100 bp, Homo sapiens
gctgcccccatcaagatgaccggggtgtgccggggggaaaggggcagcatgatggtctgagatgtgtattctggaggtcgaatggtcacatatgaacatc

SEQ ID NO: 166015 - DNA, 88 bp, Homo sapiens
tactttcgaagcaagggctgggtgcccaaagtgggactcaagtacgggacagatttacggacactggcccagggagagctgaatgaga

SEQ ID NO: 166016 - DNA, 101 bp, Homo sapiens
gggcttatgggatacagctggacaagaagattatgacagattacgccccctatcctatccgcaaacaagtgatcagcagctggactgtgccttggacctaa

SEQ ID NO: 166017 - DNA, 73 bp, Homo sapiens
agagaaagagaatgatgaagagaaaggcccggagactgtccctcgtctgagctggctcactcgcccaccaaca

SEQ ID NO: 166018 - DNA, 100 bp, Homo sapiens
attgatttggaagattcagcagggtgggaaagaacatggtgttccaatcctcatctctgagatccatccggggcaacctgctgatagatgcggagggctg

SEQ ID NO: 166019 - DNA, 88 bp, Homo sapiens
gaagccctatgaatcatttgaagaacttacagagtccatgttgtacttagatgggcagcggcatttcaactccatgagtggcccagcg

SEQ ID NO: 166020 - DNA, 100 bp, Homo sapiens
atatatgtaaaagaaatttgcaagactactgggaggacgaatccatgaaccaaccaggaccaatcaaaaccagactggctattagtcagtcacatttaat

SEQ ID NO: 166021 - DNA, 73 bp, Homo sapiens
agtggcgatcacgagaacaataagaaaatgtgatgttctgaatcgtggattttcaggttacaataccaggtgg

SEQ ID NO: 166022 - DNA, 100 bp, Homo sapiens
cgcttcaatgatgggaaggtggatcccgccgggaggtactttgctgttcatggaatgtctgatgattggtcgggatctcgtaagactacttcagaatgtt

SEQ ID NO: 166023 - DNA, 100 bp, Homo sapiens
cgacccctggcacctggcgcccagcgcgcccgtggccgctgccgcctccgccccagtcaaataaagtgcccgtggtgcagccatcccatgcggtccatcc

SEQ ID NO: 166024 - DNA, 89 bp, Homo sapiens
ccctcctcaaccgggttaagaagctgccttgtcagatcaccagattctggcacacagcctggtggtgttccgagtgctcccactggccc

SEQ ID NO: 166025 - DNA, 83 bp, Homo sapiens
ctggctgtgttaatagtggtaatcttagcactggggatgctaaagagcaggtaagccctttggaaacaacattggaaaagttc

SEQ ID NO: 166026 - DNA, 83 bp, Homo sapiens
attcacaatgcctccataatgaatgctgtaggctgctgtggtttacaggagagaaatatgagttggagggaaggaaaagtggt

SEQ ID NO: 166027 - DNA, 100 bp, Homo sapiens
gaagcttggtgctgacaggccagtgggaagctaatggcagcattagccgctgttgggcctcctaatcctcgggcagatccagagtgctgcagtattctgc

SEQ ID NO: 166028 - DNA, 100 bp, Homo sapiens
tcgctctataggagtctatgatgtggtggagttgaaatttgcagagaatcgagcaaatggccagtccaaagggtaaatcgggtccttcctcgctccaaca

SEQ ID NO: 166029 - DNA, 101 bp, Homo sapiens
cactaatggagaggactggatggtgtaccggcatggcaaaaaccacaaggtgtgaagatgccttaagaaaaaataagagcttaattgggccggatcaaaag

SEQ ID NO: 166030 - DNA, 98 bp, Homo sapiens
aggaaaatattccaaggaatttttcaccaaaaaagaatcatcggactcaggtacatctgtgagtgagaacaggtgtcaccttgaaggtgggagtgatc

SEQ ID NO: 166031 - DNA, 51 bp, Homo sapiens
caggcccatttccctttcatctgatgtggtaccacagattgtcccacctac

SEQ ID NO: 166032 - DNA, 74 bp, Homo sapiens
cttctggaatgtcttgggggttttgatcctgtcactgtgtctgaagatgatgagaaactgaaaaagaggaagga

SEQ ID NO: 166033 - DNA, 75 bp, Homo sapiens
tctcttccaaagaatgccacagaatcaggggaggcatgcttcagttgcaagaatgtagtaactctgatcagctac

SEQ ID NO: 166034 - DNA, 101 bp, Homo sapiens
ttcaagttggtcgaccagtccggacctcctcacgagcccaagatgctccagaccttgtatgattacttctggtgggaacgtctgtggctgcctgtgaactt

SEQ ID NO: 166035 - DNA, 50 bp, Homo sapiens
tctgtgccatttctttggtggggaacagtgtgaccttagcaatatattac

SEQ ID NO: 166036 - DNA, 100 bp, Homo sapiens
acagtgacctggctacccggttactgactgagcccgatgtccaaaagttagtgattggcaactttggcctcagctggaatcagcaagtaactcagatggc

SEQ ID NO: 166037 - DNA, 100 bp, Homo sapiens
aagaggcttaccaagaaagggaagtaattcaagttcaaaaggaggtctatgaagcaaaacctgtgataagtcctcttgaacttcggatggaagaattaag

SEQ ID NO: 166038 - DNA, 50 bp, Homo sapiens
ggaaaagcgaggcaaggcaggcgggctggctgttgctccaggcccctcgg

SEQ ID NO: 166039 - DNA, 75 bp, Homo sapiens
gaaatccccactcctccaagaaccaacccccaaattggctgggacaggtgaccagtatgcactgaagatgaggtt

SEQ ID NO: 166040 - DNA, 98 bp, Homo sapiens
gctcttctccaccacaccgggaggaagcagacaatgatccaacaggggaagcagcagctaatacccagcagacacttactttctatgagctagacctt

SEQ ID NO: 166041 - DNA, 75 bp, Homo sapiens
aacagcatcagcatgtcggtggagatcaacggcatcatgtacacagataagaccatcatcatgtggaaactgacc

SEQ ID NO: 166042 - DNA, 116 bp, Homo sapiens
taaaacatcaatgaatgtaaatgaaatattcatggcaataggccgaggagtcttgtaaatgtaatggctggaaaaaccctaacccctcacccactccccccagagccgacctgcag

SEQ ID NO: 166043 - DNA, 50 bp, Homo sapiens
agtttagctcatcgtcctgtcagactagtatgacatgatgggaagaaatc

SEQ ID NO: 166044 - DNA, 80 bp, Homo sapiens
gtgacctggggatcgctacggaccttaaaatacccgcaacagccccttcgtcccaagacctgatggctatagaagagacc

SEQ ID NO: 166045 - DNA, 100 bp, Homo sapiens
atggaaaccacttacaccgttctacaaaatgaagaacccttaggagaaatcttgagagtggacagcaattgtgaagatcgccagagagttctgtgtttca

SEQ ID NO: 166046 - DNA, 100 bp, Homo sapiens
cagcacgcccagcccggacctgctgatggcccgcagcttcggtgacaagactgcttttcaggaagccttggacgctgcaggtgataaacttgtagtagtt

SEQ ID NO: 166047 - DNA, 82 bp, Homo sapiens
atacatgatttaaacaagagatttccacagaagggaattggctcgggaaaaggtaatgcgagaagttaaagccttagccaag

SEQ ID NO: 166048 - DNA, 89 bp, Homo sapiens
atctctgagaatgacccgttctggaatcagcttctctcattttctttccctgcaccaactagcagctgcacatcattgactcctgggcc

SEQ ID NO: 166049 - DNA, 100 bp, Homo sapiens
cagagaaccatcaagccagatgtcagaagctacaccatcacaggtcacagtcgaactgttattggaattgaagagaaaaaaaaccgaacattatgcttac

SEQ ID NO: 166050 - DNA, 82 bp, Homo sapiens
aggttgtatgtgatcagaagctgcgtcccaacatccccaactggtggcagagttatgagaacaccttccaccatgaccacct

SEQ ID NO: 166051 - DNA, 101 bp, Homo sapiens
gaaggaaacctctctgaaatctgacacctgctctcccggcaaggaaacttcgcaggctgttaatcagctgtgttcagcgaatacttatgaacagaaggctc

SEQ ID NO: 166052 - DNA, 100 bp, Homo sapiens
caggaggaaccccaggcccttccagcggtggccacacgtcacacagtggggacaacagcagtgagcaaggtttttgtcatccattggagggacactgtat

SEQ ID NO: 166053 - DNA, 99 bp, Homo sapiens
ctgaggatggccagcagagaaacaagaaaatggactccctggctgctggagagttgaatgccagccaccagccatgggctacaaactctggcacctgca

SEQ ID NO: 166054 - DNA, 82 bp, Homo sapiens
gtcggggaggattgatgtcccttcagcatcatgcagccgccgccgaggaagcattggcatcaacaaaagtcagaattcccgg

SEQ ID NO: 166055 - DNA, 130 bp, Homo sapiens
agagaagacgatctgcacttcgcattttggcattgacatttaattttagggtcctttatatagaagggagagtagttgctagacctgatgcacaccctgcacacgcgggcagcctctatctacagctcat

SEQ ID NO: 166056 - DNA, 90 bp, Homo sapiens
gcttgaattacaacaagagccaaactcattttttgatgcaacagcatcaacaacagcaacttgtgattggcggtgaccggatattcagtt

SEQ ID NO: 166057 - DNA, 100 bp, Homo sapiens
ttgtgattgagtttatattcaaccagctggaagtgaagagttcctatcagactgagattgggcagaccctggacctcctcacagccccccagggcaatgt

SEQ ID NO: 166058 - DNA, 83 bp, Homo sapiens
aagcacctggccccgctacagcaaaccagggctgaaatctctttaatgatggagggaagcaggcagacgcgagtgtctcggcc

SEQ ID NO: 166059 - DNA, 100 bp, Homo sapiens
tataccaagctgtcagaagcagcttcatttaaaaggcctgtgacactcctctgcaccccctgggcaggcttgtggagacactggttgcagtgtatagaat

SEQ ID NO: 166060 - DNA, 82 bp, Homo sapiens
cgggagagtgagcgagccttcacctacagcatcgtgggcgccggctcccagtttggactatgaaatccctggagaatttttg

SEQ ID NO: 166061 - DNA, 96 bp, Homo sapiens
ttacttttattggtactccagtccaggcaacaaatatgaatgacttcaaacgaagctatccatcacactcctcagcagacatcaattccagtcttc

SEQ ID NO: 166062 - DNA, 100 bp, Homo sapiens
cggcgaggaggcgctcatcatcccccccgacgccgtcgcggtggactgcaagtggtgccaccgaacatcgcagaactgaagaatttggaggtgctcaact

SEQ ID NO: 166063 - DNA, 95 bp, Homo sapiens
ccagggcatggtggacggaggctcaaacatcgcagaggccgactgggagagtgtctccagcatcctgcaagtgattatcaccacgaggtgtataa

SEQ ID NO: 166064 - DNA, 75 bp, Homo sapiens
ctggctacctctcatgcacaggcttgcccatgttgagaatggccctgggaggagcggggacactgaggacctctc

SEQ ID NO: 166065 - DNA, 102 bp, Homo sapiens
attttgccagtacagtggtgccttaaaaatggagtcagcctcactcctcccaaaggaaacttggatttaactggccagaagcaggtattcaaagcagagaac

SEQ ID NO: 166066 - DNA, 80 bp, Homo sapiens
ggaggcagccaagctcgtggcctgcctctgcgtgcgtcagcccaagactaccccgtcggtcattctgttcctgccgtcct

SEQ ID NO: 166067 - DNA, 75 bp, Homo sapiens
ccggaggaacggggcagagctttccccgggtgcaatatgtgacttctgtgaagcttgggtttgccatggtaggaa

SEQ ID NO: 166068 - DNA, 100 bp, Homo sapiens
ttcaggaaacctgcattctcgaaaacttgttagctttacattgtcagtaggagagaagtttgctgaggaatgccttcaagcacaaagtgatgaatgactg

SEQ ID NO: 166069 - DNA, 96 bp, Homo sapiens
cttcatcctcgctgtagtaaaagaaaagatgctgctgattttgccatatgtatgcatctttatgctgaaaaggtggccactagaggtctgtgtgcc

SEQ ID NO: 166070 - DNA, 75 bp, Homo sapiens
caaaatggagttgccggagagacagcccagagggagcactatgtctgcggaagtccccgaggcagcctccgcgga

SEQ ID NO: 166071 - DNA, 60 bp, Homo sapiens
acggcgcggcagagtccccgtacgcctacagtaacggtatggatcctggcgggagccagt

SEQ ID NO: 166072 - DNA, 88 bp, Homo sapiens
ggacgcacttgtcttagcagttctcgctgaccgcgctagctgatcttactgtgccgagatcgctcacaatgtttcctccaagaaccgc

SEQ ID NO: 166073 - DNA, 96 bp, Homo sapiens
ttgcactggttcatcttccttctcaacttacctgttgccacttggaatatatatcgaggaatgcagtagcatggatagttgatggtgaatttggag

SEQ ID NO: 166074 - DNA, 90 bp, Homo sapiens
ggaggggctccggctggtctgtggtgagccacagaacagcatgcctgacatcatcatctggatgatccggggagagaagagactggccta

SEQ ID NO: 166075 - DNA, 98 bp, Homo sapiens
acacctccaagaagagtgtgctgaaagccatcgagcaggctgacctactgcaagaggaggatggccgagaccagtccaggttggagacccaggtgtgg

SEQ ID NO: 166076 - DNA, 50 bp, Homo sapiens
ggggctgccgccacggccgcccggaggcaaagcgaaggctggagctagga

SEQ ID NO: 166077 - DNA, 75 bp, Homo sapiens
cttacgcagaaggacctggccacgaggttgacggatatattcagacgttacgacacggatcaggacggctggatt

SEQ ID NO: 166078 - DNA, 100 bp, Homo sapiens
gcgcagcccggcgggacagcggggcggctggcgccgggggccggggagcgccagggagatgcagttaaagacttgatgcttcgctttctgggtgaaaaag

SEQ ID NO: 166079 - DNA, 83 bp, Homo sapiens
cctggtcatcttctatttccaaatgggcctttggagtgacgctgtgggaactcatgactctgggccagactccctacgtggac

SEQ ID NO: 166080 - DNA, 98 bp, Homo sapiens
ctggcaaaagcctctgctctgcctccggggacaagaaactagagcaaataaccgttttgaaattgaactgcaagcacatgttgaccagataactgaaa

SEQ ID NO: 166081 - DNA, 100 bp, Homo sapiens
gcaaggctgttgtttcaagaaatgaaaatgaagggcgccctggaataggttcgccgaagagagaggtaaccatgtgcgaccgaaaggccgtgatcaaaaa

SEQ ID NO: 166082 - DNA, 100 bp, Homo sapiens
cagctccgggccgcagagcgctgggcgagcgcgagcgccagggcaccggcagggcaggcagctgcgcgcggctggagcgcctggaagctgccacccagca

SEQ ID NO: 166083 - DNA, 106 bp, Homo sapiens
atgatattcagtggtgtttttctcaggtgaaaggagcagtagatgatgatgtagcagaaggtgccctcaccaccaatggcatcaaccctgacaccagtactgagat

SEQ ID NO: 166084 - DNA, 96 bp, Homo sapiens
gtcttcatttccctcccaccgaaccttgatttcaaggtggcacccagcatcctgaagccaagaaaggcaaacactggagctgtgtgcagaagttcg

SEQ ID NO: 166085 - DNA, 98 bp, Homo sapiens
acgcggcacctacggtcacgtctacaaggcgaggcggaaagatggatacactgaagagatggtgccttggcacccttgcctggaactcgttagcaact

SEQ ID NO: 166086 - DNA, 75 bp, Homo sapiens
gagtctccgcgtcccgctcgctgggagagagggctgaagaagatgcagagcagcctgaagctggtggactgtatc

SEQ ID NO: 166087 - DNA, 132 bp, Homo sapiens
ctatctcagcccttcgtactgggacgttggggagggggctgtgccgggcggagagaactcagcgaggattctgagccattgtttgatgtcctgtgactgagaaaccaggctttaaactttatgcctttggag

SEQ ID NO: 166088 - DNA, 100 bp, Homo sapiens
tccacgtagaatatgagtggaatcttcgacaggaggagatagatgagagcgatgatgatctggatgacaaagcatctccttggaaacaatgccatctttg

SEQ ID NO: 166089 - DNA, 98 bp, Homo sapiens
tggataagcacaaagtcaagagacagcgattggacagaatttgtgaaggtccctccttgtggtccatttctgggcaccatgggctccacagtgtgcac

SEQ ID NO: 166090 - DNA, 98 bp, Homo sapiens
gggagcccggccggagctgggtctggagacgccgtggcagcctgaacggagtgtgcgacggattgggagacaccattcgcttttcacccaagatgatt

SEQ ID NO: 166091 - DNA, 75 bp, Homo sapiens
gggagaaggaagcgagactcatacgcaacctcaatgggacgatccgtaaggctcagaaccttctgaaacagtatt

SEQ ID NO: 166092 - DNA, 75 bp, Homo sapiens
ggatgggactgtctatgatgtcatgtttgtcagcacagaacatggtccaagacaattcctgggaaagttcagttc

SEQ ID NO: 166093 - DNA, 138 bp, Homo sapiens
gcagcctcaacttcttgtcctcaagtgatcctcccaccttagcctcctaagtagctgggaccacaggaatgatgagaagacagcagctgattacaagattttaggtggttcagtccttcacctggtgttggctctgag

SEQ ID NO: 166094 - DNA, 83 bp, Homo sapiens
ggcgcagcgccgaggccgcggccctgggggcccgcaatccacgccacggaatccccgaggaccgcagctgaatgcacagctag

SEQ ID NO: 166095 - DNA, 85 bp, Homo sapiens
tgcttttgatgtctgacaacgtggatcgttgttttgaaacgaggaagagggtaatctggaagagtttcctgacctactctgctgc

SEQ ID NO: 166096 - DNA, 100 bp, Homo sapiens
cgagccttcgagccgctacgaagctttgccagattatgtttgagaccttcaacaccccggccatgtacgtggccatccaggccgtgctgtccctctacgc

SEQ ID NO: 166097 - DNA, 82 bp, Homo sapiens
agaggtgtgaagagctagagcgaatattgggaattcgatgtcttctttccgtcctgggagaggacataatgatagtcggagg

SEQ ID NO: 166098 - DNA, 75 bp, Homo sapiens
gaaaaactgcctgcttaagccggattctgcaagacctcaaggggctgagcgggtgatcacgctgaagatggagat

SEQ ID NO: 166099 - DNA, 83 bp, Homo sapiens
cttccgcaagctcaacgcgtttggcaacgctttcctcaacagtgaccatgcagcaggtggccaggacagtggctaaagtggag

SEQ ID NO: 166100 - DNA, 100 bp, Homo sapiens
acactgtgagccgctcacagtgtctaagggcaatgacatcattgcagcagccaagcgcatggctctgctgatggctgagatgtctcggctggtaagaggg

SEQ ID NO: 166101 - DNA, 80 bp, Homo sapiens
atcaataaccgagagtgcctcatctacagcaggaactgtggctgcaccatctgtcttcatcttcccgccatctgatgagc

SEQ ID NO: 166102 - DNA, 101 bp, Homo sapiens
agcaggtggaattatgccctgttggttccaatgctgggattggctgcttttcgaattggattcaagtacgtggctctgggagacctcatcatcctcatcac

SEQ ID NO: 166103 - DNA, 82 bp, Homo sapiens
caatatctgtcttcggtggactccttcggcagtccacccaccgccgccgcctcccagatagcagactccttgaaagcagggt

SEQ ID NO: 166104 - DNA, 82 bp, Homo sapiens
gcccggcgctgatctacaagaaaatccacaagaacgcactttcctcccaggtggcatgtctgtgacccagtgctccaaggag

SEQ ID NO: 166105 - DNA, 75 bp, Homo sapiens
cagttcacatcctggagatgtacgagggtgcatgaatacctcagaagtaaactctgttcactgtatgaaaatgac

SEQ ID NO: 166106 - DNA, 83 bp, Homo sapiens
cagggcctgcagcgggagctggacggcgagcgcgagcggcgcgagaaagctgagccagcaacctccttggcacctggggacag

SEQ ID NO: 166107 - DNA, 108 bp, Homo sapiens
agaagcgcagcgacggcgtcgggagagcgcgcctagccggctcgcgatgtcaagctgagctcccagactctgatacaggctggggatgatgagaagaaccagaggacg

SEQ ID NO: 166108 - DNA, 49 bp, Homo sapiens
cctggcccgggcatttctgggacaggagggtttctcttcccctcccagt

SEQ ID NO: 166109 - DNA, 69 bp, Homo sapiens
aggaaaatcatcttatcagacgaaggcaaaatgtatgatgattctttgggattgggacttaaaacaatg

SEQ ID NO: 166110 - DNA, 82 bp, Homo sapiens
gcagcccggccccgctgagcgatcccaccgaagcagcgtgtcctccgtgggagcccgaggtcttgggcgtctttggtactgg

SEQ ID NO: 166111 - DNA, 100 bp, Homo sapiens
gtgtcgtcgctgctggcacttcaggctctgttcctcagatgttagcaatgatggttgatttggaagaagatgaggactgggcaaatgcagatgaactaga

SEQ ID NO: 166112 - DNA, 95 bp, Homo sapiens
gactccggagacagcccaaatatcctcggaagagcgctcccaggagaaacaaatccggaaggctgcccagcatggagtatgctcagtcctcaagg

SEQ ID NO: 166113 - DNA, 74 bp, Homo sapiens
cctgtaatgcagagtcaccagtggccctggaggaggccaaggtgatggcatcagctgagaagggaaggaagccc

SEQ ID NO: 166114 - DNA, 100 bp, Homo sapiens
gagagcacatcgctaaacatagatgtgcagtctgaggcttcagataccacggttgttatgcacccatccaaagttttggaattgcagatgaacaagcgtg

SEQ ID NO: 166115 - DNA, 110 bp, Homo sapiens
tcataacagagatccaatcagcagatgtgtacggatgaaaatacaggaatataaatagtttctggaaaggacactgacaacttcaaagcaaaatgaagttctttctgttg

SEQ ID NO: 166116 - DNA, 100 bp, Homo sapiens
gtcagaatgcctgcatgcagatctcatcaccatggtgcagaatacagaaactgcagccatgaccacgcacgtcaccctggaagatgccctgtccaacgtg

SEQ ID NO: 166117 - DNA, 82 bp, Homo sapiens
acaagactctcttcgctctttgcatcttaactgcaggctggcgcccatgcggctctacacgctctccaagcgccactttgtc

SEQ ID NO: 166118 - DNA, 100 bp, Homo sapiens
aagaccaagactacacagctcattttgctgatcctgatacattagttaactgggactttgtggaacaagtgaaggcctttgagccctacttagagatttt

SEQ ID NO: 166119 - DNA, 83 bp, Homo sapiens
cccggttgtcctcaggcgctgtcaggtctggtctctgatccagctggcgcgcagatacctgcagaagggctacaccacgctgc

SEQ ID NO: 166120 - DNA, 119 bp, Homo sapiens
agcagcgccagcggccgagcgggcggcttcctggcctgggcgctccggtggcggcggaggtttggtgcacctcgatttggaggaagtagggcagggcccttatctggaaagaagtttgg

SEQ ID NO: 166121 - DNA, 100 bp, Homo sapiens
gttcactattatgaagatggcaatgttcagttggttagtcataaagatgtacaggattcactaactgtttcgatgccaacgtccggcggtacctccagct

SEQ ID NO: 166122 - DNA, 83 bp, Homo sapiens
aaccggtacctggatggcatgtgtactaatggtcacttgatgtgcgctggctgttttatccacctactagcagatgcccggct

SEQ ID NO: 166123 - DNA, 114 bp, Homo sapiens
cccttttcctggtgcatgtgaagttatcaaaaacagatggctattcatatgaaaaggaagcaatggaaaattggatcagcaaaaagaaacgtacaagtcccatgacaaatcttg

SEQ ID NO: 166124 - DNA, 100 bp, Homo sapiens
ccctgatcgagcggcgggagcgagtgtagagtatgattttcggcagcaggaaggcaggttccatgaagttttgcagagtctggaggaagcagagccagtt

SEQ ID NO: 166125 - DNA, 96 bp, Homo sapiens
ccttattattggccctccagatacactttacctctcctctcaggctggagcgcagtggcacgattccaactcatggcaacctccacctcctgggtc

SEQ ID NO: 166126 - DNA, 103 bp, Homo sapiens
tcgaggttgtttgcaacgaccgtctggggaagaaggtccgcgttaaatgcgaaagttcaccaaaaaggccccaactagcagctcccagagaagtttcgtggag

SEQ ID NO: 166127 - DNA, 83 bp, Homo sapiens
ctgagggtgccattgcagtacattgcaaaggtaacaacatccattttatacaccgcgataggaataggttggatcacaaacct

SEQ ID NO: 166128 - DNA, 100 bp, Homo sapiens
gccatctgatctataaatgcggtggcatcgacaaaagaaccattgaaaaatttgagaaggaggctgctgagattgcttcacctgtggtatcagacatcac

SEQ ID NO: 166129 - DNA, 75 bp, Homo sapiens
cagagataccgcgatatttgggagcggccccgagacgcgcctggcgcgggctttccatctgatggtcccctggtg

SEQ ID NO: 166130 - DNA, 100 bp, Homo sapiens
tgcagtggcgcctaaagtctgagagagggaagtcgcctctgtgctcgctccccaaaaaggccacaaagacagccccacctgccctgcctacaggttatga

SEQ ID NO: 166131 - DNA, 129 bp, Homo sapiens
gtgttccttccgctagtgatcctttgcaccctgcttggagacggacttgcttccgagggtatattacctctctctggaattttacatgggccgaacattacagaacaccatgatcaacctcggtctgca

SEQ ID NO: 166132 - DNA, 100 bp, Homo sapiens
cctacacctaccgccagcactctgtggtcttcattggcacgcgcagcggcagcttgaagaagcccgtgtcccagcccacccaggtaactctgatcacggc

SEQ ID NO: 166133 - DNA, 100 bp, Homo sapiens
ctgctcccatcattgatgtggtgcgatcgatgtcatgtggcctgtgttttggaccgtggttcgtacctatgctccttatgtcacattccctgttgccttc

SEQ ID NO: 166134 - DNA, 83 bp, Homo sapiens
cgctctgcgggactctgaggaaaagctcgcaccagcagcctcccgcgacgatgcccctcaacgttagcttcaccaacaggaac

SEQ ID NO: 166135 - DNA, 75 bp, Homo sapiens
agtcattcctgcctttgagcggactcccttttaaggccagtacacaacaggccggggctcctcaggagtggggct

SEQ ID NO: 166136 - DNA, 100 bp, Homo sapiens
ggaatgtgacagacaggtggagaaggtggtagacaagttcatcaagcaaagggactaccaccagcaggactgtttgcaacctctaagcatgcaggctctc

SEQ ID NO: 166137 - DNA, 51 bp, Homo sapiens
gattttcgccctacgttttcaacggagggttgaatgcctttgagaacttga

SEQ ID NO: 166138 - DNA, 87 bp, Homo sapiens
aatgacaaacaaccagctcttcagtagccggatcgagctgggagatgtgacaccacacaatattaaacagttgaaaagattgaatca

SEQ ID NO: 166139 - DNA, 80 bp, Homo sapiens
tgaagaccctggactttgtgaagttgttagagtacatgagcattacttgggtaccaggatcatctatgaccggaaattcc

SEQ ID NO: 166140 - DNA, 97 bp, Homo sapiens
cctggatgttatttatatcctggacttcacatcatatccgagatgggattcgtcatgccatacttcccattgcctccagctgttgcacggaggtttc

SEQ ID NO: 166141 - DNA, 100 bp, Homo sapiens
acttcaggctatggccagagcagctattcttcttatggccagagccagaacacccctgggaatcgtggcggatataataggaggggcaacatgccacaga

SEQ ID NO: 166142 - DNA, 83 bp, Homo sapiens
aggacacggtgcgcgtggccttctgctccggtcaacaacggttccagcctcagggatgagtgcatcacaaacctactggtgtt

SEQ ID NO: 166143 - DNA, 82 bp, Homo sapiens
ctgaagaggaggtgcagatggcactttccaaagtggatgcctccggggaggtgctacctttttacccacacttaagtgacgc

SEQ ID NO: 166144 - DNA, 82 bp, Homo sapiens
tatatcaatttaggaaatgtcttgaaagaggcacgcatttttgacaggcccgccaagctgccccctgtgtgctattctttga

SEQ ID NO: 166145 - DNA, 75 bp, Homo sapiens
ttctgttgggcttggaacagggctgcacacctttctgctttatctgacccggatgcagagtctacagcctgaccc

SEQ ID NO: 166146 - DNA, 100 bp, Homo sapiens
tctgtgctacctggaagctgaccaacagtcagaactttgatgagtacatgaaggctctaggaaagaatacccacctcatgtccaaaaagttgaaattaat

SEQ ID NO: 166147 - DNA, 83 bp, Homo sapiens
ctggccgcgcctggcctggccgggaccatgatgaaggatttgggggcagagcacttggcaggtcatgaaggggtccaacttct

SEQ ID NO: 166148 - DNA, 122 bp, Homo sapiens
cagacagtggttctttgtgtaggttgttcaacagtgttgtgccagcctacaggaggaaaggccagactcacagaaggagccaatgaagtgcttttggtggttgggggctttggaagccagca

SEQ ID NO: 166149 - DNA, 83 bp, Homo sapiens
agtcacatctcttactactgctagtcgctgcaacactcctctacagtttgagttcaaatctgaacatcaatgatgtactaggg

SEQ ID NO: 166150 - DNA, 83 bp, Homo sapiens
tccgccgacggcgctggcttgcccggctgggagagggcgtaaggagaatgcagttgaaactaattttgtggatagagaaactg

SEQ ID NO: 166151 - DNA, 87 bp, Homo sapiens
gcatggatggcggcatgagtatctgggatgtgaaggttgtgagaacccaaagccaagcctcacagatctcgtggttctggaacacgg

SEQ ID NO: 166152 - DNA, 75 bp, Homo sapiens
gctggatctaaattgagagaaatggagtcaaagtatcagtttttggaagaagcttttcaaaatcagaagggtgca

SEQ ID NO: 166153 - DNA, 90 bp, Homo sapiens
ctgcgtcaacgtgctcaagagggactggacggctgagctgggcatccgacacgtactgctggatccgagccaggagacactgagcctttg

SEQ ID NO: 166154 - DNA, 100 bp, Homo sapiens
tgaggagccggaccgatgtggaaactgctgcccgccgcgggcccggcaggaggttaatttggagtggcccctggagtcagtttcctacaccatccgaggc

SEQ ID NO: 166155 - DNA, 100 bp, Homo sapiens
cggatctgctcggccgcccgggaccgccagctctgtccgctgcccacagcctagcagtcgggaccgtactgagtgtctatgaaccagatagaaatgcatt

SEQ ID NO: 166156 - DNA, 74 bp, Homo sapiens
caggctctttggagagaaaacttgtcagttcctctcaggattaatgaaaatcaagttccatcctcagacaagag

SEQ ID NO: 166157 - DNA, 132 bp, Homo sapiens
cgaaagcgttggagaggtgttaccggaacggcggcgacaagggtgttcccgaactagagtgggcacagttggtggatctgaaatctgaactgacagaaacccaagcagagaaagttgttttggagaaagaag

SEQ ID NO: 166158 - DNA, 90 bp, Homo sapiens
agcacgcgtttcccgcaacccgataccatcggacaggatttctccgcctcagcccaacggggagcagacggttgatgatgaagcgccggc

SEQ ID NO: 166159 - DNA, 82 bp, Homo sapiens
ccgggggagcggggccttccacaccccctccgtgggtgtgtggctcacagaacatttcctgcctgttgctcacactctgttg

SEQ ID NO: 166160 - DNA, 90 bp, Homo sapiens
cgggatttatacacacatcactaaaaattatccctactacaggactgcggacaagggctggcaggtcctggtccgcgccagagcccagcg

SEQ ID NO: 166161 - DNA, 133 bp, Homo sapiens
tcacacggttcgtcgtctcgggttcgagcccagtgggcttagccactcgccatggactcccagaaacccaaagcagtgtccacaccagcaccagctacaactcagcagtcagctcctgccagcactacagcag

SEQ ID NO: 166162 - DNA, 90 bp, Homo sapiens
gtgatggggaaccttgagattgtgctcacgggacacaatgccgacctctccttcctgcagaggagagcgggaatgacgaggctcgggtgg

SEQ ID NO: 166163 - DNA, 96 bp, Homo sapiens
gtcgggctcagcctcggtgtcccccagttcggcaaagaacacagatatgtagaactcttcttgaattctacagcaggagcaagcggtggtgcttat

SEQ ID NO: 166164 - DNA, 74 bp, Homo sapiens
ctgggagttcccgtccatgctggccctctctgacttaattcagtgcacaaatgagatgaatgtgaacatcccac

SEQ ID NO: 166165 - DNA, 100 bp, Homo sapiens
cgcggtgctgcgagggcagaacctggtcctgcacttcttcctcgatagccgctggggcgcaagccgagagcggctggctatcagcaaggaccagcgagca

SEQ ID NO: 166166 - DNA, 100 bp, Homo sapiens
atctatgatatatatgggaagagaggactggaaatggaaggatgggagggacagagcagaatgggctgatatagatccggtgccgcagaatgatggcccc

SEQ ID NO: 166167 - DNA, 80 bp, Homo sapiens
cttattcccttcaattcaagtaacagttggtgacaaagttcctgctgatataaggttaacttccatcaaatctaccacac

SEQ ID NO: 166168 - DNA, 100 bp, Homo sapiens
cagaagtcatgacaggcgaggtgggttctgagcaaatatttccatggttcaagctgcttcagcaggacccccatctctgagaaaagattcgactccagtt

SEQ ID NO: 166169 - DNA, 83 bp, Homo sapiens
cccccgggacagtctccgaagtctcgagcagcagcctcccgcgacgatgcccctcaacgttagcttcaccaacaggaactatg

SEQ ID NO: 166170 - DNA, 80 bp, Homo sapiens
gtcgccgccgccgccgccgccgcccggaccccggcgcgctgaatgcagggtttccaggcctgaggtgcccgccctggccc

SEQ ID NO: 166171 - DNA, 50 bp, Homo sapiens
aagctgcagaaaccacagtggtagagctaatgctgcctaccttgggggcc

SEQ ID NO: 166172 - DNA, 87 bp, Homo sapiens
agccagctccccagaaatgaacctgcccacggtgtccgcgctcaggtgagaaagatcagtctaaagaaaaggagaagaaagtgaaaa

SEQ ID NO: 166173 - DNA, 75 bp, Homo sapiens
aatgacagtcaagtggaaacaactgtctgcctcccaactgatatccaggctgaatctatcccattgatcttagga

SEQ ID NO: 166174 - DNA, 75 bp, Homo sapiens
tggaaatcctaatgacagtctccaaattcgcctccatctgtaccatgcaatgcagcaagtcttggaaaaccttac

SEQ ID NO: 166175 - DNA, 100 bp, Homo sapiens
accaacaacatcttctgctccaaccccaaccaccgcacccctacgctgaccagggtgtccgcaatgttgccagtgtctgtctgcagattggctacccaac

SEQ ID NO: 166176 - DNA, 101 bp, Homo sapiens
acagaacagttaatcctcaatttaagcctgatctaacccctagaaacaggaaagggggctgtatacagctttgatccagtagggtcttaccagagagactc

SEQ ID NO: 166177 - DNA, 75 bp, Homo sapiens
atatttggagttcttacaacatggcagacattgacaatgctactatatcggggccacagatgatgcagccaccaa

SEQ ID NO: 166178 - DNA, 96 bp, Homo sapiens
attctgatgtcgaaggtggagaggtcctttacttggtgcattactgcggatggaatgtgagattacctaaaaccagatccatggatgatcttcttt

SEQ ID NO: 166179 - DNA, 76 bp, Homo sapiens
cttggagcccctaaagaatctggccttctccccagccaccatggcggtacaataagaacatgtcagaagttcctaa

SEQ ID NO: 166180 - DNA, 100 bp, Homo sapiens
cagaaggtgaaggtgctcacgggcacggttaacttgagaaagtggaatcgaattccgatgttgaattttccttctggccccattcatgtggcaggtggtg

SEQ ID NO: 166181 - DNA, 100 bp, Homo sapiens
ctgggatcagggcctatccaactgttaaattttatttctacgaaagagcaaaggtgccactgattaatgaacttgaatcagcaatacatcagctgtacaa

SEQ ID NO: 166182 - DNA, 100 bp, Homo sapiens
gaaaatacaaatcacacgcataatggatgaaaggaaccgacagcgagtaaccagctcataaatcacatcgaacagtttttggatactaatgaaacaccgt

SEQ ID NO: 166183 - DNA, 50 bp, Homo sapiens
gtgcatcgaggacctgtctgaagctgccccagagcacatcagctatgtgc

SEQ ID NO: 166184 - DNA, 75 bp, Homo sapiens
atggaaacgaactgaatactgtccgagaaattataggtgatgaactagtccagggatttttggacaaactccata

SEQ ID NO: 166185 - DNA, 101 bp, Homo sapiens
taataccatactgcaccatttggggatgtacgtatttttgcatgcagtgaaaggaacacctttcgaaactcctgaccagggtaaagcaaggctcctaactc

SEQ ID NO: 166186 - DNA, 101 bp, Homo sapiens
cagggatgacgtttgctttttcatcagccagtcaggccatgaccacaatgtttcttcagtagccatcatgcccaatggagatcatatagtgtctgcctcaa

SEQ ID NO: 166187 - DNA, 80 bp, Homo sapiens
ctcagttggaagcagccgatccagcctgcggagcctgtggggcagcccatctcagcactagcacagtgcatggtgcaaca

SEQ ID NO: 166188 - DNA, 83 bp, Homo sapiens
ggccaagggacaatggtcaccgtctcttcagacctgcctagagctggaacgttacctccagagcgagccctgctatgtttcag

SEQ ID NO: 166189 - DNA, 74 bp, Homo sapiens
gagctggcatgacgtgcaggtctctagcgcagctccacgcaggagatcggtgaggagctgatcaacggagtcat

SEQ ID NO: 166190 - DNA, 100 bp, Homo sapiens
cgacctgtcctttaatgacctgacttccattgaccctgaatagatggacatggcctggcagatgatgcagctgctgcttctggctttggtgactgctgcg

SEQ ID NO: 166191 - DNA, 82 bp, Homo sapiens
gcaggagcgatggcagcgaccgatatagctcgccaggtgatcgaccttcagaagatgcccttggggaagctgagcaaaaggc

SEQ ID NO: 166192 - DNA, 101 bp, Homo sapiens
cgtgctcagacagtgcaccgctgtcccatctaaagaaacctgtcaggaatacgagcttctgggcctactactactgtgccataatagaggatgtgattctg

SEQ ID NO: 166193 - DNA, 51 bp, Homo sapiens
ctgactagcagcttcattttgaaaagaggacgagtcagcattaaagaggag

SEQ ID NO: 166194 - DNA, 100 bp, Homo sapiens
ggatcctagccctcgtgcctccatggactcgagtgtaccgagtacagagagctgccaacttcaggaactttaccttcatccagctgaatggagaattttc

SEQ ID NO: 166195 - DNA, 80 bp, Homo sapiens
aaatgaggaatgtctttcctaccatctaaaatacgaaggtttctggctgggctctggaagaggatctgaaccagaagaag

SEQ ID NO: 166196 - DNA, 75 bp, Homo sapiens
ccagaagcgggcggcgcgggggagatggctgaaggtgatgtggccgccctcaaccgacgcatccagctcgttgag

SEQ ID NO: 166197 - DNA, 50 bp, Homo sapiens
actaacatcgctgggaacattatgacgcaaacatgcagatctttgtgaag

SEQ ID NO: 166198 - DNA, 89 bp, Homo sapiens
tactataaagctttggaagatgcagatgagaaggttcagttggcaaaccagatatatgacttgtgaatttcataaaggacaatagccga

SEQ ID NO: 166199 - DNA, 82 bp, Homo sapiens
aacagcctcaccctctgggtcatcgaccaagatgaaattgtgctccaagtgttttccaaggttccgtatgacccatcatttg

SEQ ID NO: 166200 - DNA, 50 bp, Homo sapiens
gtggagcacctgaagagatgccagcagactcggtgaaatacctggagtgc

SEQ ID NO: 166201 - DNA, 80 bp, Homo sapiens
ggtcgcgtctcggaaaccggtagcgcttgcagcatggtatgtgacgcattcccagactcttcagccaactgagcatcagc

SEQ ID NO: 166202 - DNA, 98 bp, Homo sapiens
tcctcatcaagttcgtcccctgtcctgccatctgctctgaggctttctcgcttgtctctcagagtggccagacgctaaggactggagcttgcaggaca

SEQ ID NO: 166203 - DNA, 75 bp, Homo sapiens
ccgctctccagcccgcttgaacggttgtagatgagcatgagagtgtggagcagagtcggcgagcgcaagtcgagc

SEQ ID NO: 166204 - DNA, 90 bp, Homo sapiens
ggaacagtctacaggaccaattaagtatggaggaagaggacctcccctatgaggaggaaatcatgcggaaccaattctctgtcaaatgct

SEQ ID NO: 166205 - DNA, 126 bp, Homo sapiens
gcaagaccaaaatttgaacaggttaatctgttggattctaatgcagttcatcacatcattcatgattttcaggtctctaattaacagaagatggcaaagcccagccacagcagctatgtccttcag

SEQ ID NO: 166206 - DNA, 149 bp, Homo sapiens
cgaactctatcagtatttactacagccattccgagacatgagagaacttgccatgctacgaagacagcagatcaagttggttatcctaaagaagaacggtttgctgggaggccgactcaacgagtcagtgggctctatcaaaggctgga

SEQ ID NO: 166207 - DNA, 102 bp, Homo sapiens
cacagttttcgaaggaggatgccctggagacacacaggcagacccatactggaaattcagttcatgaagataagaagtttcttgacaaatacatgccccagt

SEQ ID NO: 166208 - DNA, 82 bp, Homo sapiens
aacggctgcacctggagattgacgcagagtgggcggcggtggtgagatcaagtcactctttgtgcatcccttcctggctgag

SEQ ID NO: 166209 - DNA, 100 bp, Homo sapiens
cgaatggccttgttttcttgctctggggctcttatgctcagaagaagggcagtgccattgatagggagagaccttcctgccctactacacgggccgcgcc

SEQ ID NO: 166210 - DNA, 82 bp, Homo sapiens
ggacaggatcaaccggttcctcccaggcggcaaggagaagtacagcatcggggagcccacagtgccatccaccctggcagag

SEQ ID NO: 166211 - DNA, 100 bp, Homo sapiens
gaggaagcgatggcttcagacagcatatttgagtcatttccttcgtacccacagtgcttcatgagagtggctgcttcaacccccaactccactgctggtg

SEQ ID NO: 166212 - DNA, 75 bp, Homo sapiens
gaaaactgtggtctccagatgaagaggtttcccctgaagtactagcaaaggtgtgagttcttgatacgaatgaaa

SEQ ID NO: 166213 - DNA, 90 bp, Homo sapiens
ctgcgctcccctaggagtgctgagcccgcggaaccgcagccatggagaccagccactaactggggcgtacacagtgaccctggatggacg

SEQ ID NO: 166214 - DNA, 83 bp, Homo sapiens
tgtgtggcacaaaatgcaacacggggttgtagaaggtgatttagctgccatagaagcatacaagtcatcaggaggagacattg

SEQ ID NO: 166215 - DNA, 90 bp, Homo sapiens
ggtaatggggggtcagagtgccggaccccagcacacagaagccgagacgtcactcagcctctgaagaagcttcgggttcagactcaggca

SEQ ID NO: 166216 - DNA, 98 bp, Homo sapiens
aagggatacccttccatttcaaagaacagaatgctaaggaagctgtggcaagatccggaaagtatggcagaggaggaagtgttcagtcaagaatggga

SEQ ID NO: 166217 - DNA, 101 bp, Homo sapiens
gtcagtacggcccctgggtccacgtggcgcgaaagtaggagacggagtttcactcttgttgcccaggctggagtgcaatggtgtgatctcggttcactgca

SEQ ID NO: 166218 - DNA, 100 bp, Homo sapiens
ggaggccggcccccgagagccgccgacatgaagaaagacgtgcggatcctgctggtgggagaacaatcagcatgattcttcagaggctcttcaggttctc

SEQ ID NO: 166219 - DNA, 83 bp, Homo sapiens
ctctgtgttgttatctgcaagcgctgtgcaggcccagctgagagccagcctggaggttacccagcagcaggccacccaggccg

SEQ ID NO: 166220 - DNA, 100 bp, Homo sapiens
cccgggagatcccaggcggtgacagagtggagccatggctagagacaccattcgcttttcacccaagatgatttgatgtcttataaaactctgatgaacc

SEQ ID NO: 166221 - DNA, 83 bp, Homo sapiens
ctgcgcgtcaacgacaaatccctggcccgggtgacccacgcggaggccgtcaaggaggcaagtgaggcctatctggttggcct

SEQ ID NO: 166222 - DNA, 90 bp, Homo sapiens
agcagctgctgtggaagggctccttcaagcccagcgagcatggtggtcgtgtgatggtaacagatgctgacaggtcaatactatctccag

SEQ ID NO: 166223 - DNA, 100 bp, Homo sapiens
ggtcaggtctggagctcgaccgggccagcttgcagtgagctgcatactccatcgctagatcgaaagccaaatagttttgttgcggtgagtgtcaccaccc

SEQ ID NO: 166224 - DNA, 103 bp, Homo sapiens
cgccgcgaaggcggtgctcgggccagcccttctctgccgtccctgggaggcacgtctgagaatggtggatgtggtggagaaagaagatgtgaatgaagccatc

SEQ ID NO: 166225 - DNA, 100 bp, Homo sapiens
atgcactgagcggctgcggcgcggcttccatcctcccgccctcctgacgcggccggagcgcagccctgaggcccagggaatccagcactacgccctgccc

SEQ ID NO: 166226 - DNA, 75 bp, Homo sapiens
attcagccttctgcatctggatctcttgttggaagagaaaatgagaagaagcctgagaagatgatgcacagatag

SEQ ID NO: 166227 - DNA, 98 bp, Homo sapiens
caggctgataaatgaagaagccatggtttagcccaaaggcgtcccttcaaccacctttgcagatgcatctctcaagaacctctactaaggaaatgagt

SEQ ID NO: 166228 - DNA, 102 bp, Homo sapiens
ggaacagaccgccgtgagagaggaggggtgccggccgggattcgcggcccggagctcgggaccgacccaacatgagtgaagtttcctgcaagaaacgggacg

SEQ ID NO: 166229 - DNA, 90 bp, Homo sapiens
tctaattcagatactggggatttacaagagtctttaaagcacggacttacacctattggagctcttgtccctggcaaagcgaaagcgcag

SEQ ID NO: 166230 - DNA, 100 bp, Homo sapiens
gtgttcggtccttccgaggaagctaaggccgcgttggggtgagaccctcacttcatccggggaaggagttcgagacacgactgaaggagaagaagccagg

SEQ ID NO: 166231 - DNA, 97 bp, Homo sapiens
gaaacttgcagagaatgaaatcactttgtgtcaaaaagaaataactcagctgaagcatcaggttcatctgcagaagccagcggacgcctctgttcaa

SEQ ID NO: 166232 - DNA, 50 bp, Homo sapiens
cagcgctcagcccacctgtgattatgttcagctctggactgttggaaact

SEQ ID NO: 166233 - DNA, 100 bp, Homo sapiens
atgaagatggcggtggagataagagagtatgctgctgctgttccgctttgcgtcctcgctacaaacgcctggtggacaacatattccctgaagatccaaa

SEQ ID NO: 166234 - DNA, 87 bp, Homo sapiens
ctcctaggtgccggccgggagggcggccgcagcagtactatactggcaattgctggagaagattttgcaattgttgcttctgatact

SEQ ID NO: 166235 - DNA, 100 bp, Homo sapiens
ctccagtcaagtacatgaccgggaccactgtccttccatttaacccagcagcctttggagaggctaaagtaaataatgccagcctgattggactgggtta

SEQ ID NO: 166236 - DNA, 74 bp, Homo sapiens
gcccagctcgtgcagcggctccagaggagcccatcatggcgacgccccctaagcggcgggcggtggaggccacg

SEQ ID NO: 166237 - DNA, 90 bp, Homo sapiens
agcatcctagtggaggacgcccctgtggagcttcaggatggttcgtactaagacatggaccctgaagaagcactttgttggctatcctac

SEQ ID NO: 166238 - DNA, 75 bp, Homo sapiens
cttggaccatgggcgcccgcggtctggacaagcgaggaagtttctttaaggttgctgcttttgctcagaggacat

SEQ ID NO: 166239 - DNA, 74 bp, Homo sapiens
gcacctggatgagacatttgctacagcatcccacattaagtcaacggttggcaacattgtacaagtcacccagc

SEQ ID NO: 166240 - DNA, 82 bp, Homo sapiens
gccgagtctgacggcgccggttcgctgcccggtccgcccgcggtgagaggttggctggctcctctggctgatggcatgttga

SEQ ID NO: 166241 - DNA, 100 bp, Homo sapiens
tctccagcggccacttcttgcgggagaacatcaaggccagcaccgctctcgtggcattatccttcagtggggctattggactgacttttcttatgctggg

SEQ ID NO: 166242 - DNA, 90 bp, Homo sapiens
gatggaaccagtgagcaacccgagtggaacttgcagagggtgaccaagaatatggcccaggtgaccaaagccctggacaaggccctgagc

SEQ ID NO: 166243 - DNA, 90 bp, Homo sapiens
gctcattttgcagttgttgaaattgtccccgcagttttcaatcatgtctattgcgtctgcagacatggatttcaaccagctggaggcatt

SEQ ID NO: 166244 - DNA, 100 bp, Homo sapiens
cttccttgctttcagaatttcacccaggttctgacagcagatataatttctacagtagaatttaatcattctggagaattactagcaacaggagataaag

SEQ ID NO: 166245 - DNA, 75 bp, Homo sapiens
ttttcctccaggcctttgagaggagtctgaagatacagtattgctcgtcctcaaagagatctaccaaacccaggg

SEQ ID NO: 166246 - DNA, 100 bp, Homo sapiens
ggggccagggcagagggcacctgagcggctggagagcctgttggagaaacacaaagagaacaagcgggagcctgtgtcaggaaagcatgtcagagcagag

SEQ ID NO: 166247 - DNA, 100 bp, Homo sapiens
caggattcgtgcatgggaatcggagaccatggcagtgcagctggtgcccgactcagctctcggcctgctgatgcggctctaattagaggaaatcgtaaaa

SEQ ID NO: 166248 - DNA, 82 bp, Homo sapiens
cccgcactcgctgccgccgccactcacgctccactgcaacatcacgctgatgttctaatcatgtcagataaagatgatattg

SEQ ID NO: 166249 - DNA, 83 bp, Homo sapiens
gctgggagagaggtacctctccttttccctctccctttccctaaggtaagtaaggaggtctctgtaccatggctcgtacaaag

SEQ ID NO: 166250 - DNA, 87 bp, Homo sapiens
ctgaagcaaaagatcagcgaggagcagcagcagctccagcaggcgctggctcctgctcaggcagttgtgaaaaacttcaggacaaaa

SEQ ID NO: 166251 - DNA, 100 bp, Homo sapiens
ctttcctgcttttggtttccctggcaggggttgaactgtggagtgtgtggtttcatgatcaacatgggagactcccacgtggacaccagctccaccgtgt

SEQ ID NO: 166252 - DNA, 100 bp, Homo sapiens
gggctgagcttcctggagaagaggaagaacccagcgggtgccgcttctccacccgaggcttccacctccaacgagccatgttccaggctgcaggagccgc

SEQ ID NO: 166253 - DNA, 88 bp, Homo sapiens
gatctgtgggactggtttgaatccttccttgatgatgaagaggctcatgctgaagattcggttatggaccatcatttccggaagccag

SEQ ID NO: 166254 - DNA, 74 bp, Homo sapiens
agagaggcatcctccttgaagtatttggctgaggagttttcaatcccaagtttgtacaaatgatgacagcaaag

SEQ ID NO: 166255 - DNA, 75 bp, Homo sapiens
gacctcgggcggccccggcccgcgcccttgcccctcggccgggcggacggttttataggatcacattgacaaaag

SEQ ID NO: 166256 - DNA, 100 bp, Homo sapiens
aaggatgctttcaaatcaaatgactcacagcaggcctgatggaattgggactgtttcagtggaagaaaaagaaagatttgaggagataaaagagagactc

SEQ ID NO: 166257 - DNA, 100 bp, Homo sapiens
cttgtcaaaaatcagaggcaactaacactgcggcttcctgaggtgtcatggagaaactccagctgggcccagagattctgcagcgggaaaatccaaggct

SEQ ID NO: 166258 - DNA, 100 bp, Homo sapiens
gcgagaatgaggaggacaacagctacaaccgggggttctagtaaataccgcttgctgtgttttgatgttggtggctaagctcatccagtgtattgtgttt

SEQ ID NO: 166259 - DNA, 83 bp, Homo sapiens
gggcgcgcggcacgcagccgggaggccgaggactcggagttcacctgcagcgtttgcctcagcatggagggcggggccgcggc

SEQ ID NO: 166260 - DNA, 100 bp, Homo sapiens
acaccccgtactggcaggcatggagccaacaaggagaacctggagctcaacggcagcatcctgagtgacatcgctattgcggttccgaggcagtgggaag

SEQ ID NO: 166261 - DNA, 75 bp, Homo sapiens
gttgtaaattacagagaacctaagtctgtttgcaaagcacctgaactgattggtccagaaaagggcgtggtgcac

SEQ ID NO: 166262 - DNA, 82 bp, Homo sapiens
acagggcgtgctgtctgtggaaacgcgagggcacactagcactttccttggtcccaggctgcacccatggcagaaggaggag

SEQ ID NO: 166263 - DNA, 101 bp, Homo sapiens
ttatcagcatggacatattaactcttacctgaagcccatgttgcagcgggactttattaccgctttaccaggccaagaataaggagacgggtgctttggct

SEQ ID NO: 166264 - DNA, 74 bp, Homo sapiens
acttcatatttggcttcaatgtcatattttgggtacagcagggaagaactggaaactcagagaaagaaactgcc

SEQ ID NO: 166265 - DNA, 75 bp, Homo sapiens
ccaggagtcatcggacgccagaatctgcaaccatgtccaagggacctgcagttggtattgatcttggcaccacct

SEQ ID NO: 166266 - DNA, 95 bp, Homo sapiens
agtcagagctggagctccggggaatcagacgggcagccaaaggagcagacgcccgagaagcccagatctacacacaatgagctggaaaagaatcg

SEQ ID NO: 166267 - DNA, 124 bp, Homo sapiens
cagagccaaggtgcagggcaacacctctacaaggatctgcagccatttatattgcttaggctactggaaagaccacagcaagattctttcattcgtctcctcctagcctgggggaccaggctcg

SEQ ID NO: 166268 - DNA, 98 bp, Homo sapiens
ctcctcgagaaattgtcacgtatacaaaggaaactcagactccagttatggctcaacccaaagaagaagctgttctggatttcttacagtggtgagtg

SEQ ID NO: 166269 - DNA, 100 bp, Homo sapiens
ttctatgacgtgctgtccccctactcctggctgggcttcgaggatattgggagtgtgtggcatgcatcctcatcatcaggaaactctaaaaaagaaccga

SEQ ID NO: 166270 - DNA, 100 bp, Homo sapiens
tgcctcgccaggtgtgtgggactgaagttcttggagaagggagtccaactcttcaaggcgcatattaaatttcctattgactacccctattcaccaccta

SEQ ID NO: 166271 - DNA, 100 bp, Homo sapiens
ctcctgagtggctgggactacagtcacggacaagttcactgagagcgtctacgtcctggccaacgagccatccgtggccctgtaccggctgcaggagcat

SEQ ID NO: 166272 - DNA, 75 bp, Homo sapiens
ctgtcacctgcacggtgtggctggcggcctacggactcttcaccctctgcgagccacggactttacgttgaaggc

SEQ ID NO: 166273 - DNA, 108 bp, Homo sapiens
gtgatggcctcccaccattccaagcggagaggccgggcgtcttctgagagtcaggagatctattgggaaactgattataaccactcgggcaccatcgatgcccacgag

SEQ ID NO: 166274 - DNA, 74 bp, Homo sapiens
atggtgaaacaccactgaagcattgccaagagtactattaatcccgtagatgcaatatatcaacctagtccttt

SEQ ID NO: 166275 - DNA, 100 bp, Homo sapiens
ccttgcccgaggacagagatggcgagcgcccggattggggatgagtatgcggaggacagctctgatgaggagggccgagaactactggtggcgtggccag

SEQ ID NO: 166276 - DNA, 50 bp, Homo sapiens
agtttatcgcatacttgtactgggttagatacgaaaaccggtgaggtcca

SEQ ID NO: 166277 - DNA, 98 bp, Homo sapiens
tggacaaagagaggctgtttgagcctctgagccagattgccaaaatgctttggagtttttaactgaatctaagaaaagtccaaaatagatttgagact

SEQ ID NO: 166278 - DNA, 75 bp, Homo sapiens
agataagaaaggaaatgagagttgttgacaggcaaataagggaactcctgggacccttggacagaggggatatgc

SEQ ID NO: 166279 - DNA, 100 bp, Homo sapiens
gcttctctgaggcggcgagagatggtcaggtctggagctcgaccgggccaggtgctgatattcgtggcttcagtgctcctaggacatttggccttacact

SEQ ID NO: 166280 - DNA, 100 bp, Homo sapiens
ctagaactcaggaagagtgatgtggttttggataagattattgctatggcagctttggtccatcacagttttgcattggataaagcagccccaaagcctc

SEQ ID NO: 166281 - DNA, 100 bp, Homo sapiens
aaggccgtctatgaggcagtgctgcggagctcccgtgccgtcatgggtgccatgaagccagaattctctggtggttgagatcccgccatttcggaatcag

SEQ ID NO: 166282 - DNA, 51 bp, Homo sapiens
ttgatgcagacgtcaaagattttagggacagtcttcattgatgaccttact

SEQ ID NO: 166283 - DNA, 90 bp, Homo sapiens
gaagagcattgagatcgagaacctgcagaccaggtggtgttcccactgatgaagagcaggcgactgggttggagagggagatcatgctgg

SEQ ID NO: 166284 - DNA, 95 bp, Homo sapiens
tatggcggcgatcggccgcggccgctctctgaagaacctccgagtacgaggttaaacccatccagagtaatggctgcggccttacccaggaccct

SEQ ID NO: 166285 - DNA, 50 bp, Homo sapiens
tctttgctcaaaatagacctgagatcacctctgcagcctgcacagccggg

SEQ ID NO: 166286 - DNA, 110 bp, Homo sapiens
ttagtgcgcctctaagatggcgacgcctttggcggtaaattcgggttgaaatcacaaagattagacacctttttagataggtgttcttcagcaccactgacaacacggtt

SEQ ID NO: 166287 - DNA, 99 bp, Homo sapiens
gaagccagtagggcagaaacccgagccggtgcagtacacacactggaacacacaccagccgcgtcgctcaagccctcagttagaccctttgagaaaaag

SEQ ID NO: 166288 - DNA, 90 bp, Homo sapiens
ttcgtggtgaaggtccggggcttgccctggtcttgctcggccgatgaagtgcagaggtttttttctggcatttgcaagtaaaatcactgg

SEQ ID NO: 166289 - DNA, 83 bp, Homo sapiens
gagtccctcaactctctacgctttgcctccaagcatcatggcagaacaggatgtggaaaacgatcttttggattacgatgaag

SEQ ID NO: 166290 - DNA, 100 bp, Homo sapiens
aggagaggcggagggaaaaggccgaggagttagcagccagtttgcctatctggggcgcctggctcacgaggttggctggaagtaccaggcagtgacagcc

SEQ ID NO: 166291 - DNA, 75 bp, Homo sapiens
gtatttgatcctgattctacccaagtacatatgatttcagctgcaatggcaggaagcaagatttccagatgtagc

SEQ ID NO: 166292 - DNA, 91 bp, Homo sapiens
ggctgctgctggccgggctgctgtgcggcggcggggtctgggccgcgcgagggcggcaccttcctacttctgcccagccacagccctcccc

SEQ ID NO: 166293 - DNA, 100 bp, Homo sapiens
ggtactgcgggattcagccgatttccttcttcctctgactgcccggaaatatcagccaaaggccagcgatataaagatgaagcgcagctgtataaagaag

SEQ ID NO: 166294 - DNA, 74 bp, Homo sapiens
ctaaggccgcgttggggtgagaccctcacttcatccggttattcagcttctcaaggctggaaaagcgaaggaag

SEQ ID NO: 166295 - DNA, 75 bp, Homo sapiens
ctgcagagcgcgcagtacctccgatatttgatttaatggatgccaaagcacgtgctgattgcatcaaagaaatag

SEQ ID NO: 166296 - DNA, 51 bp, Homo sapiens
acgcacctcgtcaccaaggccaaggaatcctacgccaacgtgaagcagtgg

SEQ ID NO: 166297 - DNA, 90 bp, Homo sapiens
tgagcttcctggagaagaggaagttgctgatagtccaactccaccgccaccacctccaccagatgacattcccatgtttgatgactctcc

SEQ ID NO: 166298 - DNA, 100 bp, Homo sapiens
gatctccattcctgaggaggagtctgaagatgatgagaaactgaaaaagaggaaggagcgatttgggattgtcacaagttcagctggaactggaaccaca

SEQ ID NO: 166299 - DNA, 74 bp, Homo sapiens
aagatccctggaatatgaagagacacagtatggtagccacacccccagaacagatctcggcccctttccaaaca

SEQ ID NO: 166300 - DNA, 75 bp, Homo sapiens
ttcaccaaatactcaaggtcactacagaattagcccaagcagattcctcccagattgaagaatggcggtcacgag

SEQ ID NO: 166301 - DNA, 80 bp, Homo sapiens
cagcaccaggctctgcagcggcaacccccagcggcttaagccatggcgctggggccgggctggcggggccctcccgactg

SEQ ID NO: 166302 - DNA, 100 bp, Homo sapiens
cgctctggttttcggtgggtgtgccctgcacctgcctcttcccccattctcacatcctgaggttagcattacacttctcccagtggagcccatgacttct

SEQ ID NO: 166303 - DNA, 98 bp, Homo sapiens
ctcctggacaggatggattgccagggcttcctggcccgaaaggagagcctgtgacaaccagggcatccccatcatgtccagcatcaagctgaaagagg

SEQ ID NO: 166304 - DNA, 100 bp, Homo sapiens
tgaaggagcagatttacaaactggccaagaagggccttactccttcacagatcgcattgtaggtttaacactcaatgtacaagaccggactgcacattct

SEQ ID NO: 166305 - DNA, 99 bp, Homo sapiens
agggccctgctggcacgaggcactaagacagctgaggatgccaaggacttcttcaagaggaagatagattttctaaccaagcagatggagaaaatccaa

SEQ ID NO: 166306 - DNA, 87 bp, Homo sapiens
aacagatgactacccagggagaggaattacgggaacagaaagaaaagtccgaaagagctggatggaacaaaattcatctgtattggg

SEQ ID NO: 166307 - DNA, 116 bp, Homo sapiens
ctgaagtggtttgcaacatccttcttctggataacactgtacaagctttcaaagtcaattggccaatccgccatggtatagttgaagattgggacttaatggaaaggtttatggag

SEQ ID NO: 166308 - DNA, 100 bp, Homo sapiens
tggacaccttgaagcagaggagcagcaggaccaggcccaagtctgttttggtggtctgagaggaaaaaagatgagcttctaaagttttgggaaaattata

SEQ ID NO: 166309 - DNA, 98 bp, Homo sapiens
tccgcggttcctcctcctgtcgctgcccgtgtgattactgagactcagattcctgaacaagatgaaacctatttagaggatagtttttgtgttgatga

SEQ ID NO: 166310 - DNA, 83 bp, Homo sapiens
cagaccctggagcctcagttggaagcagccgatccagcctgcggagcctgtggggcaggccgttgatgctcactgccatcagc

SEQ ID NO: 166311 - DNA, 98 bp, Homo sapiens
gccgcagcgggaccccagttcctccgccaagcgcggccgccgcccccgcctcaggtactgggcctaatcgctacgtgcctctttggctatgatgccta

SEQ ID NO: 166312 - DNA, 100 bp, Homo sapiens
gcggggagaaggccatcacccaggtcagcaagggcacctgcgagcaaggtcacccaattgacaggtttctcagatcctgtatatgcagaagcttacgttc

SEQ ID NO: 166313 - DNA, 100 bp, Homo sapiens
caggaatgcagcagagaggactcgccatcgtggccttggctgtctgtgcggccctacatgcctcagaaggctgctttgactctcccgcgaagacctttcc

SEQ ID NO: 166314 - DNA, 75 bp, Homo sapiens
gtgatgattagagacatactaatgtacatggcatcattcttaacaaagaagttaaatattggtgggaaaagagta

SEQ ID NO: 166315 - DNA, 75 bp, Homo sapiens
agttccgccatgagctggggcacggagctgtgggtaccagaaagcagctgaagaaacaaacatggagaagaagag

SEQ ID NO: 166316 - DNA, 100 bp, Homo sapiens
gagcctcgtggtgtggtgtatggccgtgggcatctcctacattagcgtctacgaccaccaagactgtgatcaaccactctatgattgtcctatgtgtggg

SEQ ID NO: 166317 - DNA, 50 bp, Homo sapiens
tttgagtgcaactgccttccagatgccatggacaatattaccaggcagaa

SEQ ID NO: 166318 - DNA, 104 bp, Homo sapiens
gcaacattctgaagaggtttgcagagatgaatccaccacgacaaggtaattaaatgtcgtaatgagatcatgcactcttcagagatgaaagtatcttctacgtg

SEQ ID NO: 166319 - DNA, 82 bp, Homo sapiens
gctccggccgcctggctccccatactagtcgccgaagctccaccatgaggcgaggtggatggaggaagcgagctgaaaatga

SEQ ID NO: 166320 - DNA, 100 bp, Homo sapiens
tcatcaacgttgactctgtggctgagagaagggcccagcagattaccaggatatgcttcacatcaagtaggagttgcagtggcatgccctctcccgtgaa

SEQ ID NO: 166321 - DNA, 75 bp, Homo sapiens
gaagcatctgaagaccatggatcacaaccggaaccgcaggggtccaggtgcggaagtatggagagcagaagacgt

SEQ ID NO: 166322 - DNA, 100 bp, Homo sapiens
agtttactgaagataagccaactttgaatttcttctatcaacagtggtgcctgtggagaggtaaagctggctttcgagaggaaaacatgtaagaaagtag

SEQ ID NO: 166323 - DNA, 80 bp, Homo sapiens
agttggaagcagccgatccagcctgcggagcctgtggggcagggaggaataagtttttttcatctgtaatttggaagcca

SEQ ID NO: 166324 - DNA, 82 bp, Homo sapiens
tggtcatcaatgttactcaggtagagatcaggcctttgtgacactaaccacaaacgatgcctacgccaaaggtgccctggtc

SEQ ID NO: 166325 - DNA, 88 bp, Homo sapiens
tcctggacttcgcctttcccgagccctggaggtggggagaaaagggtaccgtgagggttttctctggaagcgtggccgggacaacggg

SEQ ID NO: 166326 - DNA, 110 bp, Homo sapiens
tgttcattccatctctcttcctttctcatgttttggctttggggctagggctcatgcacaattagttcgagaagttgatgtggagaaggtgtctgcttttgagaatccat

SEQ ID NO: 166327 - DNA, 100 bp, Homo sapiens
tggtggatgcggccaactccaatgggcctttccagcccgtggtccttctccatattcgagggctttttggtggtgctggagttggcaagactgtactgat

SEQ ID NO: 166328 - DNA, 90 bp, Homo sapiens
agcaaagctacttccattccagaaagatggcatcatttttgccctcaaaagaaatggcagcaccaaggatgacattgatcttgatgcctt

SEQ ID NO: 166329 - DNA, 88 bp, Homo sapiens
gaccatcagtgagaaagtgctgacgaaggaagtggagctggacagaagtgatgagagcctatttacaacagctaaggcaagagactgg

SEQ ID NO: 166330 - DNA, 75 bp, Homo sapiens
gccggcggagcctctggaatcacccgggtcgctgttcctgaggaattgcgcagtacctggccacttatggcccca

SEQ ID NO: 166331 - DNA, 75 bp, Homo sapiens
tattagatggtgacactgcagttggcctttttgcaaatgtgtaacttgcctatcaaagtagtttgtagggcaaat

SEQ ID NO: 166332 - DNA, 100 bp, Homo sapiens
cggcggcctcctcaccagccaaggtgctgttggcagcagcggtctgcacaaaagcaggaaaggctattgtttctcgacagtttgtggaaatgacccgaac

SEQ ID NO: 166333 - DNA, 75 bp, Homo sapiens
gctcatcgagaagcgggctttccaggacaagtactttatgataggtaaaaagcctcacccagatgacccccatcc

SEQ ID NO: 166334 - DNA, 101 bp, Homo sapiens
gcgctgaaggatggctggaccagaagccgctggagttctggagtgggtggaagtggtggaggatcctctggtaggtcatcagctggagctcgagattcccg

SEQ ID NO: 166335 - DNA, 75 bp, Homo sapiens
gaatgagcctgaagacaaggatgtgactcattatccttcaattcacataacggcatatgaaaacgatgaacgggt

SEQ ID NO: 166336 - DNA, 75 bp, Homo sapiens
gcagcttcagcagaggctgcagggccagcagtggaaagaggcaaaacctgatgaattaatggattccaaattgag

SEQ ID NO: 166337 - DNA, 90 bp, Homo sapiens
ggccgtcgctatgagcgggaccaccctgggcacagcaggcatcggaggttatgccaaggacgccctgaatctggcacagatgcaggagca

SEQ ID NO: 166338 - DNA, 98 bp, Homo sapiens
aagtgcctctccgacagcagatccaggctcggagctccagacgctgggacagctccaccgggggacggctacgtgcaggcggacgcccggggcccccc

SEQ ID NO: 166339 - DNA, 50 bp, Homo sapiens
tcagattaatactgctgtacctttaccagtcatgatgctatggactccta

SEQ ID NO: 166340 - DNA, 100 bp, Homo sapiens
agatgaattaatccttgaaggaaatgacattgagcttgtttcaaattcagcttcttggacacttaatgattgttggcaagaaatgtgctgctgatctggg

SEQ ID NO: 166341 - DNA, 100 bp, Homo sapiens
cgccgacgccgctgctgtggccgctgctgctgctgctgctcctggaaaccgatgttgacgatgagtatgaggacgaggaccagtgggaggatggagcaga

SEQ ID NO: 166342 - DNA, 110 bp, Homo sapiens
ctggagatgcattatgtgaaattgagactgacaaagctgtggttaccttagatgcaagtgatgatggaatcttggccaaaatcgtggcgagacttgaaatctgtgctttg

SEQ ID NO: 166343 - DNA, 82 bp, Homo sapiens
ttttttctaatggctattcaagctagagaccgttggatggcagcttaaccttcagatggctcactctgctcaagcaaaacta

SEQ ID NO: 166344 - DNA, 101 bp, Homo sapiens
cgtcggattgcccatgcacttgttgcagaaacagccaaggaaggaccatcgagacctgttcttgaatacatcgatctggtctgtggtgatgatgaaaaccc

SEQ ID NO: 166345 - DNA, 90 bp, Homo sapiens
atcctggccgatgccacggagcaagtgggccagagctatcagcttcccagtttgcacaattcatcaagaaattatgcggggtcaccggca

SEQ ID NO: 166346 - DNA, 100 bp, Homo sapiens
agctgcaccgtgcggctgctggacgacagcgagtacacctgcaccatccagtgcaaggatgatgctgaaaggaataacaaggcttatctctaggatccat

SEQ ID NO: 166347 - DNA, 75 bp, Homo sapiens
cagtctggaaagctttaggagttcacagttgtgtagcccacaatgccctggagtgtgcacgagccatctacgcct

SEQ ID NO: 166348 - DNA, 100 bp, Homo sapiens
cgacagtagaggagctttaccgcaattatggcatcctggccgatgccacggagcaagtgggccaggtgtcagttgtacccgaggcgttctcagcagcagc

SEQ ID NO: 166349 - DNA, 75 bp, Homo sapiens
gcggggacctggtgttcgccaagatgaagggctacccacactggccggcccgggagtgtggccatctggggccgt

SEQ ID NO: 166350 - DNA, 98 bp, Homo sapiens
gcgaacctctgctcacgcgtgttcttctggtttggacatatttgactcttttccccccaggttgaattgaccaaagcaatggtgatggagaagcctag

SEQ ID NO: 166351 - DNA, 100 bp, Homo sapiens
gagggccgctaccaatgtgtcatcaccaaccactttggctccacctattcacataaggccaggctcaccgtgaatgaggagaatttgcgctttggcttga

SEQ ID NO: 166352 - DNA, 75 bp, Homo sapiens
tcgcgctactctctctttctggcctggaggctatccagcgtgtaccttccggtttcccagcacggccatcaagat

SEQ ID NO: 166353 - DNA, 83 bp, Homo sapiens
ggacctgaacctgcggcctgacccagagccacttctcaccgagatgattcatgaaactgcaagtttaactgtcacaaacgctg

SEQ ID NO: 166354 - DNA, 96 bp, Homo sapiens
ccgatcttttacatgttccacaagaagtgcagcttataatccaagctattactcagttttcggctttgtgagaaaccttaccatcaaacacgatgg

SEQ ID NO: 166355 - DNA, 100 bp, Homo sapiens
cttccatcaacgcaacgggatcagtgttgtgataaggcagctgcaaaaagcggcagaagaatatgaaagtgttactcagacttatttgtttcatagctct

SEQ ID NO: 166356 - DNA, 98 bp, Homo sapiens
gcttgatgagaaggacccacggcgtctgttcgaagacacagagattgactggaaggcctacatggccgaggtagaaggcgtcatcaatggtacctatg

SEQ ID NO: 166357 - DNA, 100 bp, Homo sapiens
gaatatgttggattcagtaatgcaactttctcttcagcaacgggtagcagaattggaaaaaattaatgcagaatttttacgtgcacaacagcagcttgaa

SEQ ID NO: 166358 - DNA, 75 bp, Homo sapiens
gtgacaagccagcaccagtccagaagcctccatccagtgaatgtgccataccgaatccgtgtgcggctgtccaga

SEQ ID NO: 166359 - DNA, 82 bp, Homo sapiens
caagcgcaaccgtcggtgggtcggggatcggtcgcctgagagggtgctttcttctgcgacctggtactcatctacctcatca

SEQ ID NO: 166360 - DNA, 100 bp, Homo sapiens
ggttgctcactcggattcttcaaaaacttcacctgaaggtggttgaccagattgacaccctgacctctgacctacagctggaggatgagatgactgacag

SEQ ID NO: 166361 - DNA, 76 bp, Homo sapiens
agaggcttcagttccaagtcagcaaatgggatctgagtcatgatgtatatgagctcagaggacgaatcaaaatggg

SEQ ID NO: 166362 - DNA, 100 bp, Homo sapiens
ttaacttgggagaaagtttcatctgtggatggagtattgatccaaaatacggagctggcatatacttcaccaagaacctcaaaaacctggcagagaaggc

SEQ ID NO: 166363 - DNA, 83 bp, Homo sapiens
tattggagaaacatgcagattatatcgcatcctatggctcaaagaaagatgattatctaaggcaggaacggatccaaattcag

SEQ ID NO: 166364 - DNA, 83 bp, Homo sapiens
aaccatttgttcttcatgtgcagtgtcgacaattgcaggatgcacagattctggctgcagaagatgtcaatgttactttcgaa

SEQ ID NO: 166365 - DNA, 74 bp, Homo sapiens
ggaagcaggagcagcccaagcgccttccctcacggcagctggtggaatttttgaagaaaatggaatctcgaggc

SEQ ID NO: 166366 - DNA, 122 bp, Homo sapiens
gagcctgttgcgccagtgccccctgcttctgccccagaaccggtcgaaaaccgtgtatgagggattcatctcggctcagctttccccacaaataaaccagagaaagatgcaagacatgtagt

SEQ ID NO: 166367 - DNA, 100 bp, Homo sapiens
gtctggcttcttttctgaagtgttcaagcctgccacagtgactcaggtcactcaaggaactatccgaccagctgccaacttcgatgctataagagatgca

SEQ ID NO: 166368 - DNA, 75 bp, Homo sapiens
cgccccgaacgggggtcttcctcctccgccgttgacagagttgcatgctgagaatttgaaaaatgaagatgatgt

SEQ ID NO: 166369 - DNA, 88 bp, Homo sapiens
aaaacctgaggctgatgacccaaaggtggttttttggcaaaatccccagagccaaggcagaagaaatgcttagcaaacagcggcacga

SEQ ID NO: 166370 - DNA, 100 bp, Homo sapiens
ggtgtacacactgctgtttaccttggcgaggcctttcaccaagtccatgaaatgagccgtcagactgctacagcattacctaccggtacctcgaagtgtc

SEQ ID NO: 166371 - DNA, 49 bp, Homo sapiens
tctgttcacggctccatcgctgttagaaattcgaaatgagtcccatgac

SEQ ID NO: 166372 - DNA, 100 bp, Homo sapiens
tggacctgcaggtacttggatctccagtgggagctgccctctcgaaggcaggacagcggtggcggcaggttgaagaaatatggagatcaacacaaaactg

SEQ ID NO: 166373 - DNA, 100 bp, Homo sapiens
ggaatcagcttggtgggtgtgacacagaattttgcagcaacagttctcagaaacaccaagggcaacgtcagatggggtcgaggatttggtcttttgggtt

SEQ ID NO: 166374 - DNA, 73 bp, Homo sapiens
accgggtggctggtgcagccgaggtcttcgggaattccagcgaggacaatggcgatgaccactcagaaggagg

SEQ ID NO: 166375 - DNA, 80 bp, Homo sapiens
tgccacaatgggacatgtgcaaatgatcaagcggtgctgattcacgagagtggaagcctccagagcttggggctttctgg

SEQ ID NO: 166376 - DNA, 100 bp, Homo sapiens
aagcagagaatggagaagaaggttgattccaggctctggctccgctactgcatcgtgtgcttctgtccaagaggcagagagactgaaactatctgctgcc

SEQ ID NO: 166377 - DNA, 75 bp, Homo sapiens
ttaaaatggatatgaaaagtgaagaaagtgatcataggagaaaaccatttcagagcctggcccaactagagaatc

SEQ ID NO: 166378 - DNA, 75 bp, Homo sapiens
ggatgtgatgcctgctagccaaaagggtcgatggccaggtggtcttcataaactatactgccttgtgatgcctcc

SEQ ID NO: 166379 - DNA, 100 bp, Homo sapiens
taatctaaatggatgtagccgactcattattgcgatggagaggagaaaacctatggtggctgtgaaggacctgatgccatgtatgtcaaattgatatcat

SEQ ID NO: 166380 - DNA, 100 bp, Homo sapiens
gagcttcatcaaaaatagtgatagctttgataagggatgtggagacgctggtagcggggccaggaaggctccggacggagcaggttttctggaccacaga

SEQ ID NO: 166381 - DNA, 100 bp, Homo sapiens
cgcaccacagcccatccccagaagatcctggtcccctgctttaaccatcgaaaatgaggcatagaatgtcaagctaaccaggcgtccgctacttcagaag

SEQ ID NO: 166382 - DNA, 83 bp, Homo sapiens
cgggaagtgtgaagcggccaatggcacggaggcctgcgtaacccagtgacttgattgtaaaaatttacagagcggaatcatat

SEQ ID NO: 166383 - DNA, 74 bp, Homo sapiens
aaccttcgatctcctgacgagtggagttctacttcctttcccagtacgtgtcgccagccgactccccgttccgc

SEQ ID NO: 166384 - DNA, 75 bp, Homo sapiens
tttacttcagcaagctgaaggaggaccagatcaagaaggaagtgctcctgtcctctcagctgtggccaccgtcgg

SEQ ID NO: 166385 - DNA, 82 bp, Homo sapiens
cgacctcgacgtcttgcctgtgtcccacttgttcgcggcctatagacttcccagactcccggccagccatcgaggacctcaa

SEQ ID NO: 166386 - DNA, 100 bp, Homo sapiens
aaaatgttcgcctgctccaagtttgtctccactccctccttgctccacaggcatccgggaggctgagcgttttggaacgccccctggcagggcctccagc

SEQ ID NO: 166387 - DNA, 100 bp, Homo sapiens
ccccaggaggccaaatcaaccctaactctggctaccagtacaagagactagaagagtgtctacccacagggatcgtgctatctaaacaagcatcattcag

SEQ ID NO: 166388 - DNA, 75 bp, Homo sapiens
gcgccttgtcactggagtgcaagaagaaattcccacctgtcaaagaggtttatggctacaaatgatttgatgacg

SEQ ID NO: 166389 - DNA, 100 bp, Homo sapiens
caattaaccagatcttgccctggtgcagacaagacttaggagactctggatttcccacggagctggctgctgcctgtcatccgagaccatgttcaggaaa

SEQ ID NO: 166390 - DNA, 98 bp, Homo sapiens
tcaaggtaactctgggctacagagtccttgctgggggttcggggagcgcttggaccccggcttctgggacgcgtcagatgagacaaaaggacccagtg

SEQ ID NO: 166391 - DNA, 100 bp, Homo sapiens
ccagcctgagcaagcaagaattttcttcccaggaagctcctctcgctccccggccgcccacccccagcctggaaataaactatcaatcttgcccagactg

SEQ ID NO: 166392 - DNA, 100 bp, Homo sapiens
aagaggggaacatggacatgaagaggaggatccacctggagctgaggaaccggaccccggcagctgttcttctgtgtggcagttcagaatgatggatcaa

SEQ ID NO: 166393 - DNA, 85 bp, Homo sapiens
ctggagctcttcgacccacccaagtttggaaattttagcattcaggtgccaggaatgcagatgggacagccagtgccagaaacag

SEQ ID NO: 166394 - DNA, 82 bp, Homo sapiens
cacgcggttcttctccagcgccctggcctccctcaccttggacacctcgcttggtacctggagtagaacagaaaaattatta

SEQ ID NO: 166395 - DNA, 51 bp, Homo sapiens
gaaagaggagcgttagttgttggaattgtggtgcttggaataaacagagct

SEQ ID NO: 166396 - DNA, 100 bp, Homo sapiens
gcatcacgtacggtgttttcttgtgcattgactgttccggggtgcaccgctccctgggcgtccatctgagcttcatcagtgaccttggggtccatgtgga

SEQ ID NO: 166397 - DNA, 88 bp, Homo sapiens
tcgcagtagcagtggaatgggaggaagagacatctaggcttgctgtcaaggcttctgatcaacatgagatgaccgccgtgtggtaaac

SEQ ID NO: 166398 - DNA, 49 bp, Homo sapiens
tcatgaactagtgacctggaaaggtcttcatcctccaggtccaccttta

SEQ ID NO: 166399 - DNA, 75 bp, Homo sapiens
tgcgcgacacgtgcccagcctcatcctggaaaccaagggcatcccgaaactggcagacctttcacttcgtatcca

SEQ ID NO: 166400 - DNA, 100 bp, Homo sapiens
agcccctctccagctcgaaatcggctttgttcgcgggggtcacagctctcatggctgcagctagcgtgaccccccctggctccctggagttgctacagcc

SEQ ID NO: 166401 - DNA, 98 bp, Homo sapiens
tgaatattacatcatataccgaaatgtttttgataaggggctgcttgctctcggtgactacatgaatgtccagtgccatgcctgcattggaggcacca

SEQ ID NO: 166402 - DNA, 75 bp, Homo sapiens
aaaaggaaatgcatctttatgtcagaaacacaaagcagcccaaccaaaggattacgtggagaaccaccctttttg

SEQ ID NO: 166403 - DNA, 75 bp, Homo sapiens
aaatcgcttggttaaaacctgacacttttaacagatgaagttgcggagaataatgaacatgatgtcacttctact

SEQ ID NO: 166404 - DNA, 82 bp, Homo sapiens
cagccgcccgctggccgggagcggagcccctgtggcttgatgattccctgaatcagatccgtaagctccagaggtctctgga

SEQ ID NO: 166405 - DNA, 75 bp, Homo sapiens
ccgcgctcccctcgcccgcccgggccgccaggctctagaccaagatagaacagcccttcagaaagtgaagaagtc

SEQ ID NO: 166406 - DNA, 99 bp, Homo sapiens
cagaagcaggcggaggagacggcggccttcgaggaggtcatgaaggacctgagcctgacgcgggccgcgcggctacaaaagaccccacagctgtagaga

SEQ ID NO: 166407 - DNA, 100 bp, Homo sapiens
agaggggagccggaggaggatgctcctgcctcccagagaggggagccggcgaggatcaaaatcttcgaaggaggattgaaaaggctgtggtgtctcagcg

SEQ ID NO: 166408 - DNA, 100 bp, Homo sapiens
cctgcacagccctcagcagaggattcggacacagaggacgactctgatgtcgtgatctcaacagcttgtcacccaacagaaaacatcatcgcctctgctg

SEQ ID NO: 166409 - DNA, 90 bp, Homo sapiens
cgggttcagttcgtcatggggctgtttggaaagacccaggagaagccgcccaaagaactggtgcataaggcaaatccaatacgcaagtac

SEQ ID NO: 166410 - DNA, 83 bp, Homo sapiens
tgtatttggaacaaaaaaaggagatgcctggcagccccgctctctgcagaactgtggctgcaccatctgtcttcatcttcccg

SEQ ID NO: 166411 - DNA, 100 bp, Homo sapiens
atgtacggatgcccccatcttgatcttacagaatcagaggtgcagccgcaagaaagctgacgaagaatttgatgaactatgttttgaatttggtctggag

SEQ ID NO: 166412 - DNA, 90 bp, Homo sapiens
ttccataagttttactttgagaatcgttgttcctcaaagtcattcaagctgtactcgccgaaggagcccccgaacggcaacgcctttccc

SEQ ID NO: 166413 - DNA, 74 bp, Homo sapiens
ccctggacggcattcagtgttttggagggtcagtgctgtagcccctcctaccctggctgctccgggaagtccct

SEQ ID NO: 166414 - DNA, 126 bp, Homo sapiens
tgagaccctaacgcaggtttccccgcaaatgactggtcacgcgggactgaacaccgcacaggcaggaggcatggccaagcctgcagaagaacagcatcgggcccatgggagcccagcggatggcag

SEQ ID NO: 166415 - DNA, 75 bp, Homo sapiens
cgtccccagccatgtggaactatcaaatgatgccgtttggaaaaatttcccagcagttgtgtggcgtaaagaaac

SEQ ID NO: 166416 - DNA, 86 bp, Homo sapiens
agcagccgatccagcctgcggagcctgtggggcagatcagcttgaacgggtctttttacgacttggccatgctgaaacagatgaac

SEQ ID NO: 166417 - DNA, 80 bp, Homo sapiens
gtgaataaagaagtggagcgtgtcctgaaggagttccaccaggccgggaagcccatcggtgggtaattccagaattgatt

SEQ ID NO: 166418 - DNA, 82 bp, Homo sapiens
gaacagcaaagagatttaacgtcacagtttttgaagaccaagaggacagtccagcttatctgccgaggattccccctggaaa

SEQ ID NO: 166419 - DNA, 101 bp, Homo sapiens
tgacgataagatcaattcggaaccgaagattaaaaaactggagccagtccttttgccagattcaaccctatgaaaagataaaggccaggggcttgcctgat

SEQ ID NO: 166420 - DNA, 75 bp, Homo sapiens
cttgccctggtcttgctcggccgatgaagtgcagaggtttttttctggagttttgagagcaaaatgacaacaccc

SEQ ID NO: 166421 - DNA, 83 bp, Homo sapiens
cccgaggacaccgactaccagcaggttgaaatcacaaagattagacacctttttagataggtgttcttcagcaccactgacaa

SEQ ID NO: 166422 - DNA, 75 bp, Homo sapiens
gaggtcgacgaggacacgacagtcacaatcccctcggccgtggcacactacaaagagtatcttgtgagcctcatc

SEQ ID NO: 166423 - DNA, 82 bp, Homo sapiens
ggactctttctgttcaggccagaccctctgggagcttctcagccattttccacagatcagtgcctccggagccagcgtggtg

SEQ ID NO: 166424 - DNA, 82 bp, Homo sapiens
gctcgccgctccctagcaccttctccagtcgacactctcgcgcccggaggcacgtgtggttctcaaatataggcattctgat

SEQ ID NO: 166425 - DNA, 82 bp, Homo sapiens
gctgagcgtctccaacatcatccagctgaacttccggctggtgtcctcagagcaagccctcaaagagctgggtctggctgag

SEQ ID NO: 166426 - DNA, 51 bp, Homo sapiens
gtggacctcaggagcctcctaaaaccacagattctctttgtggccagatgg

SEQ ID NO: 166427 - DNA, 76 bp, Homo sapiens
cccgtctgaggactgacctttttccctctacaacgaggagatccttgacctgtttgacagcacccgtgaccctgac

SEQ ID NO: 166428 - DNA, 80 bp, Homo sapiens
aacccgggaggcggaggttgagcccctgggaatcgtggcggatataataggaggggcaacatgccacagagaggtggtgg

SEQ ID NO: 166429 - DNA, 75 bp, Homo sapiens
cgccttaacccaaggaagtgactcaaactgtgagaacttcagcatgcttttcacttccactgcatctctcgctgg

SEQ ID NO: 166430 - DNA, 100 bp, Homo sapiens
ttgatggccatggcataaggaactctatcccaggaatacagctttgcattagggtttttaatgaccacaacaagcaagcatgcagcttactgcttgaaag

SEQ ID NO: 166431 - DNA, 82 bp, Homo sapiens
cgccaggacaatggggacccgggacgacgagtacgactacctattcaaagctccttccgcttccagccgttcgagtcctatg

SEQ ID NO: 166432 - DNA, 100 bp, Homo sapiens
tgtagtcctgttcttctggctctaagatctgaatgttgtgaccactaatttgtatgaccctcaatttggcgatgccttctggaacagcagcaaatacggg

SEQ ID NO: 166433 - DNA, 75 bp, Homo sapiens
aaacccctcctcccctagcttcactcaatgttagtaagggctccgtaggcaccaactgcaaggacccctccccct

SEQ ID NO: 166434 - DNA, 89 bp, Homo sapiens
atcactggatctgctgccagcattagcctggctcaatatctaatcaatgtcaggttggccgactgcgatgtgagtgacagcagctgcag

SEQ ID NO: 166435 - DNA, 100 bp, Homo sapiens
ctaacatcacctgcttcatccttgtttaatgactttggtgccctcaacatctctcagagacgaaaggtaccaaccaagaagctgaagaaatatgagaaag

SEQ ID NO: 166436 - DNA, 75 bp, Homo sapiens
gctggccaaagcctgcccagacggctcacctgtgcgggatggaacaaaagaggaacagctgccccctgggttccc

SEQ ID NO: 166437 - DNA, 75 bp, Homo sapiens
gattcaaacaataatgttcccagaactacagttcctgaggaagaactaaatccaaagatactagctttgcagaat

SEQ ID NO: 166438 - DNA, 75 bp, Homo sapiens
gctcaggaaagcccccaacagagatcatgagaaagatcagtctaaagaaaaggagaagaaagtgaaaaaaacaat

SEQ ID NO: 166439 - DNA, 100 bp, Homo sapiens
ttgaagacctctatgattatatgaactctttaaaagagttattgaaaatcaaagctgatattatatatccagctgcaattctcattgcaagatcatcgcc

SEQ ID NO: 166440 - DNA, 90 bp, Homo sapiens
ctgaagaacacagaaatggtgatcagctgattgggcagaaagtggcccatgctctggcagagggactcggagtaatcgcctgcattgggg

SEQ ID NO: 166441 - DNA, 83 bp, Homo sapiens
ccagctccgaaatcaccaccaagcgcccggcagaatggcgggaaggtgaggcacaagcggcaggccctgcaagacatggcgcg

SEQ ID NO: 166442 - DNA, 120 bp, Homo sapiens
tggaccaagatcgagcccagcgtcaacttcctcaagtcgcccaaagggcagctggtggaatttttgaagaaaatggaatctcgaggccccctttcgtgcgacacggttctgaagatcttc

SEQ ID NO: 166443 - DNA, 100 bp, Homo sapiens
cataaaatcatggagaaatgtacattaccattgactggaaagcaatgtgtcaaccgcattattactgaaaagatgcgtttagcccagcccctgctggtaa

SEQ ID NO: 166444 - DNA, 98 bp, Homo sapiens
tttggacctgaaacagaaattctggaacacctatatggtgctggaaacatgcatgaagagctgcggcaagcggttccacgacgaagtgggcaagttcc

SEQ ID NO: 166445 - DNA, 88 bp, Homo sapiens
aggagacaagggcggcagagttgttatttttcagcgtgaacaagaggctcctgggtagaactgcacttcagcaataatgggaacgggg

SEQ ID NO: 166446 - DNA, 100 bp, Homo sapiens
ttacactgtgatacgactgactggagttgaccacatttggccatttcccagaagggccccaccccaagggtgagtggccaatggggagctgtttctgctg

SEQ ID NO: 166447 - DNA, 74 bp, Homo sapiens
agaactgagcccaggccacagtaccctattcacgctctgtgcttgtgccaaggcacgtgtggttctcaaatata

SEQ ID NO: 166448 - DNA, 75 bp, Homo sapiens
gcaatgcttgtcatctctttataagaagaatattcagaggctaacaaagagaagagaaggtgttcttagatcaga

SEQ ID NO: 166449 - DNA, 100 bp, Homo sapiens
gccccagaccgtgctgatcttcgatgagctctcggattccttatgcagagtggccgacttgacacgaatgcagagtttgagtccagatcccaaagcccag

SEQ ID NO: 166450 - DNA, 83 bp, Homo sapiens
caaaagttcatctccttctgcatccttaactgagaatgagagtgctgatggcagagattggtgaggatttggataaatctgat

SEQ ID NO: 166451 - DNA, 75 bp, Homo sapiens
ggtttgatgaaggtggaggcagcgcggctctcaggtgccagaaccctgtggagcatcatgaactgggaagagtag

SEQ ID NO: 166452 - DNA, 75 bp, Homo sapiens
gctcagggtgccagacctcatcgaaacaagcctccaggtctgcttccccgcaaaggactatacatggcaaatgac

SEQ ID NO: 166453 - DNA, 90 bp, Homo sapiens
ataaggcagctgcaaaaagcggcagaataactgaagtgaagtgatggactccgatttggagagtagtaagacgtgaaaggaatacacttg

SEQ ID NO: 166454 - DNA, 74 bp, Homo sapiens
gtatttgagagcaatcgccaccgctttcctggaacttgaggcaaggggagagccagttgcgcagagccctgcaa

SEQ ID NO: 166455 - DNA, 75 bp, Homo sapiens
ccgtgccgcgagcgcggcctgcaggagcaaaagctggcaggctgacagaggcggcctcaggacggaccttctggc

SEQ ID NO: 166456 - DNA, 100 bp, Homo sapiens
gtcggggggcacgcagctgaagctcatcatgaccttccagaattacgggcaagcgctgttcaaacccatgaagtctgtttatgatggtgaagaacatgga

SEQ ID NO: 166457 - DNA, 100 bp, Homo sapiens
gccggggtgatggcggtggagactctgtccccggactgggagtttgaccgcgttgacgacggctcgcagattgtcatctatcccaggcctagatgatgtc

SEQ ID NO: 166458 - DNA, 102 bp, Homo sapiens
ctcaaggactacctgcggttcgccccgggcggcgtcggcgactcgggccccggagagacaatgcagatcttcgtgaagactctgactggtaagaccatcacc

SEQ ID NO: 166459 - DNA, 82 bp, Homo sapiens
ccggcctccccgggcctcccattgcagcatctgtgacaactgtgtggaaaagcacttggttctgcttcgagatggaaggaca

SEQ ID NO: 166460 - DNA, 75 bp, Homo sapiens
cctctggggtgacgcggggtacaccacaagcacgaaactgattattgatgagaagaagtattacttatttgggag

SEQ ID NO: 166461 - DNA, 100 bp, Homo sapiens
tttatgttgagtccaggcaatgcagacattctcattcaaactaaaggtcctgctgtactagccaccaaagcagctgctggtactaagaaatatgatctta

SEQ ID NO: 166462 - DNA, 100 bp, Homo sapiens
ccttaaggatctctttggcaagtttgaatcctcactatggatgggctcattgaggacattaagcatcggcggtattatgagaagccatgccgccggcgac

SEQ ID NO: 166463 - DNA, 100 bp, Homo sapiens
atcctttgggggcagtaacattgagccaagtgtccggagctgcttccaatttgtcctcctagccagcagttttgtgcccatttatgcaggactgaagcta

SEQ ID NO: 166464 - DNA, 75 bp, Homo sapiens
aaatgtccggcaagatcgagaaagcaggtccagctgggagctccccgacctccaggagggcaagatccaagccat

SEQ ID NO: 166465 - DNA, 75 bp, Homo sapiens
ccttttcgaccttcaatccagttccaaggactccacgggagtgtggtctgtggagtcacagcgttacctgggagc

SEQ ID NO: 166466 - DNA, 100 bp, Homo sapiens
ccgctttcggctcgggcctcagaaaattggcaacttctccatcgtgcggcggcttggcgtgcaggagtgcattctcctggttacacaacgcataaccaaa

SEQ ID NO: 166467 - DNA, 96 bp, Homo sapiens
cgggtgttcgtggtgggggttggcatgaccaaggcctcccagtagcattggatgcaggaaaaaatacattgacggtgaaaaacaagccgaaccagt

SEQ ID NO: 166468 - DNA, 100 bp, Homo sapiens
gagctgcctacttaactgtcttcaaaagcagcttggaaaacattatttctaaagatcaactttacttagggccacaacacacagtgatcttgttctaaga

SEQ ID NO: 166469 - DNA, 75 bp, Homo sapiens
cgacccgcagtccatctgactcctgcttcccgggtgttgctcgtcgtgcctgccagtgtagagccggtggagcag

SEQ ID NO: 166470 - DNA, 100 bp, Homo sapiens
cactgggccgcgcatttcggcaaggtcacggagctgctggacgtctccatggagctgggctgtttcctggctggagcgctcgtctcctctcagggccccg

SEQ ID NO: 166471 - DNA, 100 bp, Homo sapiens
tctgcttcccagtgggactgccccctgggcctgatcccgcaccctcaccgtcacttccagcacctcacacccatcaagatgcaaccttaaaatcagtgac

SEQ ID NO: 166472 - DNA, 75 bp, Homo sapiens
aggaaacggaccaatgtctgtgggcaagattcttgccaagagaattaatgtgcgtattgagcacattaagcactc

SEQ ID NO: 166473 - DNA, 101 bp, Homo sapiens
ggtatggcaagagcccatatttatacccgctctacggcttgggcgagctgccccagggttttgcaaggcacagaaaactgaatctgtagataacgagggag

SEQ ID NO: 166474 - DNA, 98 bp, Homo sapiens
aactaatagcccttgaacagctatgcatgctgcttttgatgtctgacaacgtggatcgttgttttgaaacgtatgtgcactgcgcgtgaccagccggg

SEQ ID NO: 166475 - DNA, 83 bp, Homo sapiens
ccggcacacgcgcagccccggcctctcggcctctgccggagaaacagacccctttgctgatgcaagtaagggtgatgacctgc

SEQ ID NO: 166476 - DNA, 100 bp, Homo sapiens
gagagaaacagtgttgatagagactcagctgaaagcatgtgcctcttttatacgaaccagccttggagggggtacctttctgggtttatgcagtttattg

SEQ ID NO: 166477 - DNA, 80 bp, Homo sapiens
cccagttcatggccaccgtggtgtataagccacgccgcaatgaagagcttcttacagtgaaagcaaagtaggtcgagtcc

SEQ ID NO: 166478 - DNA, 100 bp, Homo sapiens
ggcctctctcctgatacagcaggcgctcaccatgttccctggagccaaaacagagtggagtacgagaaaagggtccgagcacaagccaagaagtttgcgc

SEQ ID NO: 166479 - DNA, 75 bp, Homo sapiens
gtcatcttcttctaaaagggccgtgactcaaggagctgctgctcttcctccagaacctgcccacagcccactggg

SEQ ID NO: 166480 - DNA, 75 bp, Homo sapiens
ggctacggtggccagagcagcatgagtggatacggtgctggagaatctggtaaaagcaccattgtgaagcagatg

SEQ ID NO: 166481 - DNA, 75 bp, Homo sapiens
cagttctgtaacccaaaaccaaagtgcaacagctgcagcccggaaagaggtgataaggaacaagatccgagcaat

SEQ ID NO: 166482 - DNA, 88 bp, Homo sapiens
tcccgctctgtgctgccgacatccaggaccagctaaagaagcgctttgcttacctgtccggtcagagttgcctctgaagctgctgccg

SEQ ID NO: 166483 - DNA, 90 bp, Homo sapiens
gccaaggaaaaactggagagcttcatcaaaaatagtgatagctttgataagtctcttatgctattggagtttctcatccattatctatct

SEQ ID NO: 166484 - DNA, 100 bp, Homo sapiens
gcctggcctacagcgaggctgagtattgggaaagggtcgttgtggtgcatagacccagagtatagacaaaatctaattcaggctttgaaaaagacacctt

SEQ ID NO: 166485 - DNA, 83 bp, Homo sapiens
aacaagaggacccaggagaaattcgccctcaaatgaagatagtgatccggggagacaggaacacgggcaagacagcgctgtgg

SEQ ID NO: 166486 - DNA, 100 bp, Homo sapiens
tgggactaacagctggagagaacagttcattgaagctatcactgtcagtgctggggtccagcttatcatgggcatgctgtctgaaaaaccaaggtctggg

SEQ ID NO: 166487 - DNA, 90 bp, Homo sapiens
ttgtctttcatacactttctcctgtcaaggctgaggcggcaaaggaatcgtctaagtctcaggtacgagtggctgctttacagaatctgg

SEQ ID NO: 166488 - DNA, 91 bp, Homo sapiens
cttttggatcaaagggagcctttgggtttcagcatcctgtaaggtgatcgccatgatcaaaggcctgcaggtgctgatgggcaggatggag

SEQ ID NO: 166489 - DNA, 97 bp, Homo sapiens
gcccggggacggcgaggccctcatgtaccacacgatgcacccactgggcctatgtaataacaatgacgaagaggacttgtatgaatatggctgggta

SEQ ID NO: 166490 - DNA, 100 bp, Homo sapiens
gcacccgcgccctgctccgcgtcctcagccgctacctgctgttggccagggtgttccctcaggtcaatgtcacgaagatgggcagttggggccactttaa

SEQ ID NO: 166491 - DNA, 100 bp, Homo sapiens
cagctggtggtgattgcacacgacgtggatcccatcgaggagtcagtggatcggtggggaaaatgctgcttaccctgggccctgggctgtagaaagaaga

SEQ ID NO: 166492 - DNA, 75 bp, Homo sapiens
gacccaggggaaaaattagactcaaaaattggagtccttataggaaaaggtcttttgccaactcctattactcag

SEQ ID NO: 166493 - DNA, 83 bp, Homo sapiens
atgaatgtggcagttctagtcaaagaacgctttctgttcaagaggcagctgcgtatttaaaacttgtcaaaattcccaaaaat

SEQ ID NO: 166494 - DNA, 101 bp, Homo sapiens
gcctggggacttagtttcctgcttgccttcccccagatgagcagcagctgctcagggctgagcagggtcctggtggccgtggctacagccctggtgtctgc

SEQ ID NO: 166495 - DNA, 116 bp, Homo sapiens
attcctctttgttaacctataagctgcccgtggcagacgtttaccctctatcacagacctttcacaaattagaagcagggccagctctcaatgttgcaagaaaaaatagaccattt

SEQ ID NO: 166496 - DNA, 75 bp, Homo sapiens
gccggaacgggagccaacatggcagcggggttcgggcgatgctgcagggtatgatccgaaggagaacaagtggac

SEQ ID NO: 166497 - DNA, 76 bp, Homo sapiens
acaaagtgtgctgggttaaagaagcaggagacccccgaccagaataactgaagtgaagtgatggactccgatttgg

SEQ ID NO: 166498 - DNA, 82 bp, Homo sapiens
gtgtggctgtaacttacgtgtactttaccaacgagctgaagcagtcagaaaaagtggacagggcagtgctgaaggaactgag

SEQ ID NO: 166499 - DNA, 120 bp, Homo sapiens
ttgaaaacagctggtggacaaaattttgtggcgctctgcgtcccctgaagaacaatatgatgcgtttgtgaagtttacgcatgatcaaataatgcgacgatatggagaacagcctgctag

SEQ ID NO: 166500 - DNA, 97 bp, Homo sapiens
caactccaaccacgacggggccgacgagacctcagtaagactttgaccccgacgcaggcttcagtgattgccgcggatcagaagcctgagcactttg

SEQ ID NO: 166501 - DNA, 82 bp, Homo sapiens
ccgggctcgaacccggcaccttccgggttgcatctgcactggagaaatggaagacagcaatccgggaagctcagactttctc

SEQ ID NO: 166502 - DNA, 99 bp, Homo sapiens
ctcgggcaccatgagcgacgtggctattgtgaaggagggttggctgcacaaacgagcgctcctttaccctcatcgtggaggcctgggactgggacaacg

SEQ ID NO: 166503 - DNA, 83 bp, Homo sapiens
gggctgtgctggttctgcctgggcagccccacgctgaggtgcagagcattgtagaccaaggagccatggataggagaagtatg

SEQ ID NO: 166504 - DNA, 75 bp, Homo sapiens
ggctgtagctgccctttccgtttccagggttccgaccaggaaagatatggatgaagttgaagagaaatctaaaga

SEQ ID NO: 166505 - DNA, 105 bp, Homo sapiens
tgaagaccacaataaaagagacctctacttagctcagcaattcttaccttgctggattctagtgacatttataacgaattgaaagaaacatatcctaattatctt

SEQ ID NO: 166506 - DNA, 100 bp, Homo sapiens
tgcccactggtggtcccccgctcccggggtccccggccggccaagcagcactattcctgatcagagaactccagttgcttcaacacacagtatcagtagt

SEQ ID NO: 166507 - DNA, 51 bp, Homo sapiens
caccgtgacttcccggacgctgggaaatgattctctttgtggccagatggg

SEQ ID NO: 166508 - DNA, 100 bp, Homo sapiens
actgaggcccccgcctgtggccggtgacctccctcctccgagggaggggggttgtgaccccaggtggactttgacaatcccgactacgagaggttcccta

SEQ ID NO: 166509 - DNA, 75 bp, Homo sapiens
gctgcaaaaatggaacaagttccagcacaagtgcaattctgtggtgttcttggtcacacatttatggagtttctg

SEQ ID NO: 166510 - DNA, 80 bp, Homo sapiens
gcccgggaggagaaggaaggcatggaaagttccagccggttcgagagctaggaagctcttcgtgggcggtcttgactgga

SEQ ID NO: 166511 - DNA, 89 bp, Homo sapiens
cagactgaagatgcagagcccatttcagaacctgagaaagtagagactgaggaagaaattgttgagcttccagatttggattacctgcg

SEQ ID NO: 166512 - DNA, 89 bp, Homo sapiens
gaatgtggcaagcaggggcttctgtctgaggccagcgtcaacaaccttatggctaagcgagcaaaatatgctgtgaattccatcaagaa

SEQ ID NO: 166513 - DNA, 113 bp, Homo sapiens
cccagggcggcaccggctcatcactcaggtttatctctcccacaccgcttggacagatcctcgttcctagctgcctgccagcgtcctcggcccggccctgaggatggacccag

SEQ ID NO: 166514 - DNA, 75 bp, Homo sapiens
aacgcagaaggactgcctcactgagcaaccaagagttctgactcagaagatcttttggaagaattgctgtgctgt

SEQ ID NO: 166515 - DNA, 73 bp, Homo sapiens
ggaaaagctcctattctgattgctacagatgtggcctccagagggctaggcatcatggccgccctcagacccc

SEQ ID NO: 166516 - DNA, 90 bp, Homo sapiens
ggccagtaggcaatcacctgaaggatctgacttccagaaggtggcatgctggttactagatccagattctcaggagccgactcttcatag

SEQ ID NO: 166517 - DNA, 99 bp, Homo sapiens
tctgttccagaagagaaaaagcccaggcataaaatcatctccatattctcaggcacagagaaagctttccgcttggccctcatccagcttcagatttct

SEQ ID NO: 166518 - DNA, 75 bp, Homo sapiens
ggtgggagtgacccgattttccagcatggtaagacacaaggatggtggctattccgaggaagaggacgtgaagac

SEQ ID NO: 166519 - DNA, 83 bp, Homo sapiens
ctcatgggcacggctcgggacggatgaccgagtgggagacagcagcaccagcggtggcagagaccccagacatcaagctcttt

SEQ ID NO: 166520 - DNA, 100 bp, Homo sapiens
gcgagaaattgctcaggactttaaaacagatctgcgcttccagagcgcagctatcggtgctttgcaggagatggtagctgacctggagctgcagcaagac

SEQ ID NO: 166521 - DNA, 83 bp, Homo sapiens
ctaatatttaagaaagaagatgttaactttcaggcaagccaaaattccttccggatagaatatgatacctttggtgaactaaa

SEQ ID NO: 166522 - DNA, 100 bp, Homo sapiens
gaagaagtctcaaaaagctcccgactagctcactccatcactcgatgagataatatgagatttctacttcggagaggccaagtctaatgaagagaaaaaa

SEQ ID NO: 166523 - DNA, 83 bp, Homo sapiens
cccacgctaggagctaccacaacaggtactggctgtgatcgaacttctcaaccctcagagacttagatcttccacctcactcc

SEQ ID NO: 166524 - DNA, 100 bp, Homo sapiens
agaacttactgcgtctagctggaggattgtaaatgcaccaatcagcatgctgtgtctagctcaaggttaacacagaaatctgcctcctgggccatgccgc

SEQ ID NO: 166525 - DNA, 88 bp, Homo sapiens
tcgctgggctgctcttcctgaggttttcctaagccatcccctggcggaaccgcccccagatataattgaccctgcaatcctgcgcccg

SEQ ID NO: 166526 - DNA, 75 bp, Homo sapiens
cgaagccgttagtcccttaatacaaaggccactgaggcggctcccagctgcgttggcgacatggccgacaccccc

SEQ ID NO: 166527 - DNA, 144 bp, Homo sapiens
aattgaacaatgcctcagctatacatttacatcagattattgggagcctatttgttcatcatttctcgtgttcaaggctttccttaaagtttcccatgtctcaatggactcctgaatataacgagctctacaccttaaaagtgg

SEQ ID NO: 166528 - DNA, 74 bp, Homo sapiens
ctacgcctgctcaatgagatcattgccgacttcgacgagattggaaccaaccagatggctgtgtgtgccaaagc

SEQ ID NO: 166529 - DNA, 100 bp, Homo sapiens
gttatagccagtgtgcagctccctaatgatgatgctcagtttgatgcgtcacactacgacagtgagaaaggagaaattccaacagaatgggtttcctgaa

SEQ ID NO: 166530 - DNA, 87 bp, Homo sapiens
tcttttgcatcctacgtaaccagaccaagctgtgggcgtaactggcggaaacccagaggcattgacaacagggttcgtagaagattc

SEQ ID NO: 166531 - DNA, 100 bp, Homo sapiens
ctgctacatgaagtgccccacgaggtcggagactttgccatcttggtccagtctggctgcagcaaaaagcaggataaaaactttgaatctggtcctagga

SEQ ID NO: 166532 - DNA, 100 bp, Homo sapiens
ctctggcgggcataccagcgggccctggccgctcacccgtggaaagtacaggtcctgacagctggtgaaatgacaatggatgctctgttggctcgattga

SEQ ID NO: 166533 - DNA, 100 bp, Homo sapiens
cacgtgattcggcacagctctctgactctggctctgctgatgaggttgatgaatttgaaatccaaggtgctggagaatctggtaaaagcaccattgtgaa

SEQ ID NO: 166534 - DNA, 83 bp, Homo sapiens
ctacctttttcagaaatgcgcagagcaaacatctttcaaagatcaatgtccgagttaccaccatggatgcagagctggagttt

SEQ ID NO: 166535 - DNA, 50 bp, Homo sapiens
cgccgccagccccggaaggccgagaggagaacaatgttttttatggacac

SEQ ID NO: 166536 - DNA, 100 bp, Homo sapiens
gccatattgtgtcttccccggccggtccctcgcctcccggccgagctgacgcaaatggttatgagccttagagtttctgaactccaagtactgttgggct

SEQ ID NO: 166537 - DNA, 100 bp, Homo sapiens
caggctcaagcaatcctaccatgtcagccttcccagtagctggaactacagaatcttctgctgactctcaacttttcctggaaaaaatggatcattccca

SEQ ID NO: 166538 - DNA, 100 bp, Homo sapiens
aacagactgagcgcgtccaggcctgacagctctgcggctcgggccctgagggagccttttcataagctgctggcccaaggccttatcaaggggcagacat

SEQ ID NO: 166539 - DNA, 82 bp, Homo sapiens
cgggaggccgccggttttctccccgcttgccggggtggtcctcttccctttgtcgcttcctgcctgacacagctcacttcaa

SEQ ID NO: 166540 - DNA, 80 bp, Homo sapiens
ccgtgaccgagagcgtgaccgagagcgcgaatatcgtcatcgttagaaggagctgactaaggctttggaacagaaaccag

SEQ ID NO: 166541 - DNA, 83 bp, Homo sapiens
cagctgtcagtctgtctttctgtctaacaggcaaccagccaagttgaaccttctcacctgccaagtaaaacctaatgccgaag

SEQ ID NO: 166542 - DNA, 101 bp, Homo sapiens
gcctccggagtagctgggactacaggggaagaagttcctgggcgacctgcagccagacggaaggatcatgtggcaggagaccgggcagaccttcaactcac

SEQ ID NO: 166543 - DNA, 90 bp, Homo sapiens
tcagagcaaaaactaacagggatcttgaaattaaagatcaggtggagccgccaccaaaatgcagattttcgtgaaaacccttacggggaa

SEQ ID NO: 166544 - DNA, 100 bp, Homo sapiens
aggcccgggaaccccgagaggagagcccagcccctggtggaggcggcttggcggagattcggagccgtcagcagcaggaggccactgtctgcagctcccg

SEQ ID NO: 166545 - DNA, 100 bp, Homo sapiens
ggccaatctggctagtaaaaaggacagaattgaatcacttgaaaagaggctcgaggtaagaactcagggccctatcctcacagcaagtggcaaaaaccct

SEQ ID NO: 166546 - DNA, 82 bp, Homo sapiens
aggcctgacagctctgcggctcgggccctgagcattggggctttccagctctcacagaaccttcagcatccccagctgccgg

SEQ ID NO: 166547 - DNA, 73 bp, Homo sapiens
ccatcaaggaggaaggcctggttcttcaagccgcccccgaagcccaccatgcctagccgtcccattgctcctg

SEQ ID NO: 166548 - DNA, 91 bp, Homo sapiens
ccgcttcagtgcaacacgtggaggcggagctgtcagctcagatccgctacctcacccagaatgcttcagacatgcctgaaacaatcaccag

SEQ ID NO: 166549 - DNA, 90 bp, Homo sapiens
gaggcctacagaacctagcctatcagctggggctggatgagtattccagagtgtttgagggatagttatcccagacctgatcagccctgt

SEQ ID NO: 166550 - DNA, 75 bp, Homo sapiens
ttacctgcatgacttccagaggtttctcatacatgaacagcaggtcagaagccaatgacctggccctgaggctgg

SEQ ID NO: 166551 - DNA, 100 bp, Homo sapiens
tgagacatttgctacagcatcccacattaagtcaacgtgccaggcttcccgtatccagcagccaccgccgcggccgcctaccgaggggcgcacctgcgag

SEQ ID NO: 166552 - DNA, 100 bp, Homo sapiens
acatattcaccttgaagaggaagacggggcggaagaccaagatcatcgagatgcttagaccatgctcagcctccaagcagccttgtcatcgacaaagaat

SEQ ID NO: 166553 - DNA, 51 bp, Homo sapiens
aaatacccctttgaattaattatggctaagaggaatctcttgttggcattt

SEQ ID NO: 166554 - DNA, 100 bp, Homo sapiens
aaccacttgtgctaccatctgtcaaaactttggatggccctactttcaggaggcaggtggaagtcatcataaagtttctgtttcacccgtcgtccatgtt

SEQ ID NO: 166555 - DNA, 82 bp, Homo sapiens
ggagatcctgatgtttctcagtgccattgtgatgatgaagaaccgcagatccacaattctgtggtgttcttggtcacacatt

SEQ ID NO: 166556 - DNA, 100 bp, Homo sapiens
tattacttacagcaagagcaaactatcagaatgggaagaacaatgtgccaaggctgaaattatcctacaaagagagaatttcccaagagatttgtgtagt

SEQ ID NO: 166557 - DNA, 100 bp, Homo sapiens
aggctgaggtgtttggcagtgatgatgaccacattcagtttgtgcaggttggtgtcattggatacctggaggatcagattatgtctttgcatgctgaaat

SEQ ID NO: 166558 - DNA, 97 bp, Homo sapiens
atttttgctgtctctggcctcatttctgatcgggaagcctcatctagcccagaggatcggaatgacagatgtccaccatctgctcccctgaacttga

SEQ ID NO: 166559 - DNA, 100 bp, Homo sapiens
caactcttcgttcgattattagctttagtgaaatgggctaataatgctggcaaagtggaaaaatgtgcgggcaaatcataccccttcagggggccattcc

SEQ ID NO: 166560 - DNA, 101 bp, Homo sapiens
gcaacagttagactctaatttgaactcaacccggagtcaatgcaaccaggttcaagacgaatgtttctttctcagcaaaatagaggagaagcttacccctc

SEQ ID NO: 166561 - DNA, 90 bp, Homo sapiens
cgggtgctgaaggctgcagccgcgaatgccgtagatacgtcggtaacctttccagagatgtgacagaagctctaattctgcaactcttta

SEQ ID NO: 166562 - DNA, 51 bp, Homo sapiens
aggaggaagcggtgattctccaggccttggtaccacaaagcctgctccaca

SEQ ID NO: 166563 - DNA, 100 bp, Homo sapiens
aagaatgtaccttgtgggactaggatctcccagccatccagccccggctagtggcggtcagcaaaaccaaacctgcagacatggtgatcgaggcctatgg

SEQ ID NO: 166564 - DNA, 80 bp, Homo sapiens
tgggaacccaggccccgccgaggcggccaggtttttcgttggaatatacgttgcacatttatggcgattctgagtgtgag

SEQ ID NO: 166565 - DNA, 101 bp, Homo sapiens
gttgattccaaagatcctgtgtcttccttgcaggttatcccatcatcaggtagcaagttgaaacgaccaacaccaacttttcattctagtcggacatccct

SEQ ID NO: 166566 - DNA, 75 bp, Homo sapiens
tctgactcgtgatctgcccatcttgttactccctagcagtgtggtaaggcagctgacacacaagagttcaggacc

SEQ ID NO: 166567 - DNA, 100 bp, Homo sapiens
attttggccatgtaactgaggaatggcgtgacctgcaaagtgctgagaaggaagagggaaaaccgatgatgccaaagcttctgagaaaggaaaagctccc

SEQ ID NO: 166568 - DNA, 100 bp, Homo sapiens
ctagagttgttcagaatcctccaaaaccagtcatgaccactagacccacagctgttaaagcaacaggaaagaccacagcaagattctttcattcgtctcc

SEQ ID NO: 166569 - DNA, 74 bp, Homo sapiens
cgtcccgctcgtcatggcctacccgggatacggaggagggtttcaccagtgatcattaaagaatgggcagctta

SEQ ID NO: 166570 - DNA, 100 bp, Homo sapiens
gagacagctgccccgagggtctcctccagtagacggtacagcgaaggcagagagttcaggtgacagagctgaatgaacctctctccaatgaagatcgaaa

SEQ ID NO: 166571 - DNA, 50 bp, Homo sapiens
cagcacttggagcgtgaggaacttcctggttggggatgatggcagggtgt

SEQ ID NO: 166572 - DNA, 100 bp, Homo sapiens
gcggcacagagagggcctgggagcttgctgcagcttcaggattacggggcgctgaaagacatcgtgatcaacgcaaacccggcctcccctcccctctccc

SEQ ID NO: 166573 - DNA, 82 bp, Homo sapiens
tccagaaatctggaaacatgatacaatctgcaaatggactatttgccacgacatttcaaaggattccaagagagaatattgg

SEQ ID NO: 166574 - DNA, 97 bp, Homo sapiens
gggtctgtggccagaactgctggatagtggcaggattgagatttgtgtctctgactggtctctgcttggggtggttatgtatttatcatcaatctta

SEQ ID NO: 166575 - DNA, 74 bp, Homo sapiens
aaaagccaagaggaggacagttcgctacacagcaatgcatcgagatttatgtgatcagtttggctgaaccccgt

SEQ ID NO: 166576 - DNA, 96 bp, Homo sapiens
ccaaagtgcccggacccaaaacaggaatttttggctttcacccccaaccagtgaccaaagacttgaccactcaaagtccagctccccagaacactg

SEQ ID NO: 166577 - DNA, 80 bp, Homo sapiens
tgcagctccgcctcctccgccgcgcagagaaccatggagtctggcagtaccgccgccagtgaggaggcacgcagccttcg

SEQ ID NO: 166578 - DNA, 82 bp, Homo sapiens
ggaatacttagatctcgacttagattctgggaaatccacaccaccacgtaaggaacaagagttgaatgctcgagcccgggcc

SEQ ID NO: 166579 - DNA, 83 bp, Homo sapiens
gcccaggctcgcctcgactccaaatggttgaaaacagatatacaggtttgaagactgcttcattctgcctctagtaccagcgg

SEQ ID NO: 166580 - DNA, 76 bp, Homo sapiens
attccaagtaactcttatttggagaccctcctgttcttaactgtgggcgatgagaaaggtggtggactcttcttac

SEQ ID NO: 166581 - DNA, 100 bp, Homo sapiens
atgtgcgcaaggagatgggatggagagcctgagttggcattcgtataaatgacctgcccaagaagatgaaaggattgttcttgttgacaacaaatgtaag

SEQ ID NO: 166582 - DNA, 75 bp, Homo sapiens
tgctgtattggagctcatgcagtcttcagtggataataccaaaatggctttagtcaacaatcccaaaattgaagt

SEQ ID NO: 166583 - DNA, 90 bp, Homo sapiens
cttgattaaagagctccatcacttcaggattctgggagaagagcagacttttcttcacaggaattagagattttcatttgctccttttcc

SEQ ID NO: 166584 - DNA, 75 bp, Homo sapiens
gaagaaccagtcagtaaagcaaaacagagtcggagtgaaaagaaggcacggaagtgagctggagattggatcaca

SEQ ID NO: 166585 - DNA, 82 bp, Homo sapiens
cgcagaaaccccgttgacaaggcactgctttttcatgacggtggccagcatcgaaatgttcagccttttagtgatgaagatg

SEQ ID NO: 166586 - DNA, 89 bp, Homo sapiens
aagagcgaataaagtttatcacgccggggtggatccataaagaacccagccaacccgcagagggaggggaggggctgagctgtgaggag

SEQ ID NO: 166587 - DNA, 90 bp, Homo sapiens
attattatgaggcctcccagccctgtgtaactgagctgatgaggatgtagagagtccagagctgacaacatctcgaccacttccaaagat

SEQ ID NO: 166588 - DNA, 100 bp, Homo sapiens
gctgaagtccaacgtctctgatgcggtggctcagagcacccgtatcatttatggagaaaacgccaggtcttcaagggtgtctgccaccaccatgcctgac

SEQ ID NO: 166589 - DNA, 76 bp, Homo sapiens
cggtttcgtaggatggtttgaaacatcagcaaagggatgactggaaaccatacaagcttagaagactatactttat

SEQ ID NO: 166590 - DNA, 100 bp, Homo sapiens
ccacttgggggccgtgtactccctggtgctcatccccaaagccaagccactcactctgctctgggatcctaattatctcatggctaatgaacgcatgaac

SEQ ID NO: 166591 - DNA, 74 bp, Homo sapiens
ttacggcgcagagtgctgtcgccttaagcaggaaagggtcactcagctgccgcaaggagcaaggcaagttctat

SEQ ID NO: 166592 - DNA, 75 bp, Homo sapiens
cagagattcatctttcatgcagtgacatgttgataaaaaatgatgagctccacgcaggagatcggtgaggagctg

SEQ ID NO: 166593 - DNA, 100 bp, Homo sapiens
ggctgctggtagttccatgctgtctgttcagacttcagcttggtatagtgtgtgtaccatatcagtggcgtgtaactatgctcatcattgttcttgtcaa

SEQ ID NO: 166594 - DNA, 100 bp, Homo sapiens
cctctcgggagccgtggggcagaggctgcagagccccaggagggacactttcttcatgagcaacaaaccccaaagatacaaagacaagctaccagatagt

SEQ ID NO: 166595 - DNA, 80 bp, Homo sapiens
cgctctcttcctggctgcgtccctagtgggcctttggagtgacgctgtgggaactcatgactctgggccagactccctac

SEQ ID NO: 166596 - DNA, 100 bp, Homo sapiens
ttacctttcaaagtggtgggatattatagatattcagaagaaggatgctgttaaaagtcacagcaaactgtacaatggcagttgagtgggttttgaaaaa

SEQ ID NO: 166597 - DNA, 50 bp, Homo sapiens
caacgatatatgtcagatctaaaggatgagaacaagttgagcagtgccaa

SEQ ID NO: 166598 - DNA, 101 bp, Homo sapiens
agaagcggcagcagtcccttgggggcttctttaaaggcctggtacgagcggctggaggagcagctcaacgacctgactgagcttcatcagaacgagatgac

SEQ ID NO: 166599 - DNA, 101 bp, Homo sapiens
ataaagtcatctctctagaccataaaaataaaaaacatatccgagggtgtcctgttacttccaagtcatcaccagaaaggaaggagctcattgccaagtta

SEQ ID NO: 166600 - DNA, 100 bp, Homo sapiens
ttacaaaaaacaatagggaagggaaattttgccaaagtcaaattggcaagacacgttctaactggtagagaggactcagaattcatgattgaagaaatgc

SEQ ID NO: 166601 - DNA, 100 bp, Homo sapiens
aaagagcagagcatcctggaactgggatctctcctggcaaagactggacaagctgcaggtgctccgggaacgccttccgcggaatgaagcggcccatgcc

SEQ ID NO: 166602 - DNA, 98 bp, Homo sapiens
gaattctatgatgcccctgaagatgtgcacctagggggcggctaccccgtgggctcccctttgaattggagatttactacattcagcatgttatgctc

SEQ ID NO: 166603 - DNA, 120 bp, Homo sapiens
ctttctgctgctgaagtaatgcaatggtctcaatctctggaaaaacttcttgccaaccaaaataacactgaggttgcatatttaaagacacttaccaaggaagatatcatcaaattctac

SEQ ID NO: 166604 - DNA, 100 bp, Homo sapiens
attaaaccagccaaacagtgtctttggacttatattttatatactacagttattacttggagttgtaagacgttcatcgccgtgttatccttgagtaaag

SEQ ID NO: 166605 - DNA, 82 bp, Homo sapiens
cgccccgcctcccccgtccggtccctctctccacggtaaggggtgacttaagagattaaaattaatttggttgctgttggtt

SEQ ID NO: 166606 - DNA, 75 bp, Homo sapiens
agcggaggaggaggaggaggcgaggaggagagactaaaccaaggtgtatgttggtaacctgggaactggcgctgg

SEQ ID NO: 166607 - DNA, 75 bp, Homo sapiens
ccggcgagccaagttccgcagcctggcatggcttctggggacctttacgaggtgcaaactgaacaatgaggacgc

SEQ ID NO: 166608 - DNA, 100 bp, Homo sapiens
tggactctttgcctgtttggatagctgtgagtaccagagtgcccactggttccaacagttcttctcagaccacagagtgtcttacacctgaatcctgttc

SEQ ID NO: 166609 - DNA, 98 bp, Homo sapiens
gtcagctgtgtgtccagaacgtgccatggagacgcttaacgattgagaggatccagaatccagatctctggaatagctaccaggcaaagaaaaaaact

SEQ ID NO: 166610 - DNA, 124 bp, Homo sapiens
cttagaaaaacacttgaatttgtcttccaaaaagaaagaatctcagcttcaggagggtatgcagaagttggctagtcaatacctgaagagagattggcctggagtaaaagctgatgatcggaat

SEQ ID NO: 166611 - DNA, 122 bp, Homo sapiens
cgaagcgctggtggcgggcccgggctgcggcgtgtgcgcgcccgccagctgctccggagatacgatgcctgaggaaacccagacccaagaccaaccgatggaggaggaggaggttgagacgt

SEQ ID NO: 166612 - DNA, 82 bp, Homo sapiens
gccagcccgtgccgcgagcgcggcctgcaggaggggtgagcccctccagactccgaataggagatcaagagtttgattcatt

SEQ ID NO: 166613 - DNA, 74 bp, Homo sapiens
taaacacatcaccttgatttttaatcccacggacagagcgggatgccaccagcttgtccaaagggaagttccag

SEQ ID NO: 166614 - DNA, 90 bp, Homo sapiens
gccagagccgcctgccatgccccagccagtccccacagcataacagatcaaagtggtcaaagcgttccatagttccctccacgaaagcat

SEQ ID NO: 166615 - DNA, 82 bp, Homo sapiens
agagcgtctggccaagaatcagaggaagtgggaaaatctggagagctgaagagttggagctattcacgagactgaacatcac

SEQ ID NO: 166616 - DNA, 74 bp, Homo sapiens
ccagaaactttaaatcttgagaaaagaagattgtctatcatgaaggagaactgccattggatgtccagaatccc

SEQ ID NO: 166617 - DNA, 75 bp, Homo sapiens
ggcactcatcctgcacgccggcgagtgccagcgcaattctgtggtgttcttggtcacacatttatggagtttctg

SEQ ID NO: 166618 - DNA, 98 bp, Homo sapiens
cagatattaatgggagcatatatgatgagttggaaaatggatataccttatttgattatgatgttggactgaatgatataattcagctgctagttcgc

SEQ ID NO: 166619 - DNA, 75 bp, Homo sapiens
tggattgggtaaatgctgtttgtgccttctataataaaaaggaaaatatgagagccacacccgtgttcacacagg

SEQ ID NO: 166620 - DNA, 100 bp, Homo sapiens
atgagcttgtggaagacacaaaagatggcatctggctggttcaggatgagcaattcttaggttttggctcagatgaagaagtcagagtgcgaagtcccac

SEQ ID NO: 166621 - DNA, 100 bp, Homo sapiens
tttccatctttttctggatgaacctgggcggatgtcagaccagagaagagcacagaatgtaccagagaggctctgtgtgctccgggatggagcaggtgtg

SEQ ID NO: 166622 - DNA, 83 bp, Homo sapiens
cacaaccaccaccttcaagggagtcgaccccaacagcaggaatagctcccggttatcccatcatcaggtagcaagttgaaacg

SEQ ID NO: 166623 - DNA, 90 bp, Homo sapiens
tggcaagtggacattttactggctcaaaatagctctccagacccccagctggccatgtggtgagttcagggcccaaatcaagtagtacca

SEQ ID NO: 166624 - DNA, 75 bp, Homo sapiens
gttgagcaatgccaccattatcaatgaagagcgtgaccgaattacaagttttagaaaatctactgtcaaaaaaga

SEQ ID NO: 166625 - DNA, 100 bp, Homo sapiens
atcaggttcacgccaacagtacctcattgctctttggcgactcttattggtgctgcaggaggcttctcacatgctttgggatatcttcagggaaatacgc

SEQ ID NO: 166626 - DNA, 88 bp, Homo sapiens
tcccgcaggaaggcatatgtttgtatttcagaactggcatcaaatactcacaacatagctcaggatctgtcaaacaaaagttcttatg

SEQ ID NO: 166627 - DNA, 100 bp, Homo sapiens
cctgtttttccagctcacccactgccagcagagggccatgctatgatagtggaagcttatccaaaataatagatccagaagaagtgacctgaagtttctg

SEQ ID NO: 166628 - DNA, 99 bp, Homo sapiens
gaggagatcctcatgctgcacaacaagcttcggggccaggtgcagcctcaggcctccaacatggagtacatgattatgtttgagaccttcaacaccccg

SEQ ID NO: 166629 - DNA, 76 bp, Homo sapiens
ttttcgaggcatttgacttgtttgatgttcgtgactttggaaaggaacttagtgatttggcccgtgaccctccagc

SEQ ID NO: 166630 - DNA, 101 bp, Homo sapiens
ggatcgtgaccgagaccgtgaccgagagcgtgaccgagagcgcgaatatcgtcatcgttagaagatacacgataagaatactccatggaagtctttccttg

SEQ ID NO: 166631 - DNA, 100 bp, Homo sapiens
ggccaacatcgcggtgcagcgaatcaagcgggagttcaaggaggtgctgaagagcgaggagtatggtttgaagtggtgaacatggatttttctcggcttc

SEQ ID NO: 166632 - DNA, 75 bp, Homo sapiens
gcattgacatttaattttagggtcctttatatagaagggagagtagttgctcaaaatgtggtaagcatgagtaaa

SEQ ID NO: 166633 - DNA, 98 bp, Homo sapiens
accacgccatggagaagatggaagagtttgtgtacaaggtctgggaggggctgaacgtggtgaagacaggccgagtgatgcttggggagaccaatcca

SEQ ID NO: 166634 - DNA, 87 bp, Homo sapiens
atggatttcagaaactgttggagtttatatacacaggaactttaaatcttgacaggccttgtacctaatagcaactaatggaacccc

SEQ ID NO: 166635 - DNA, 100 bp, Homo sapiens
aggacttcatccggtcaccatctacctattcttcaaatgaatatgagttggaagtaaagagggtgcaagacattctttcgggaatagagaaaccacaggt

SEQ ID NO: 166636 - DNA, 101 bp, Homo sapiens
ggctggcggcccaaggctgaagagacctccagcaagcagaggctgtggaaaatctctgttctcacaaagtctccccaatgctctacaagcaactgcgtcag

SEQ ID NO: 166637 - DNA, 100 bp, Homo sapiens
agatgcagcttatgctccaaaacgctcaaatgtcatcacttgttaattttctgcaaaagagagcttccatccttcaggaagaactgactacatatcaagg

SEQ ID NO: 166638 - DNA, 75 bp, Homo sapiens
ctcaagatattaaagttactgctgttaaaaagcatgtgcagtctttgccaacaaaaaaaattaccaagaaaccta

SEQ ID NO: 166639 - DNA, 50 bp, Homo sapiens
tatcctttttaacctgactcatcgagatttctctatgaatcatcatcaag

SEQ ID NO: 166640 - DNA, 100 bp, Homo sapiens
gtcaccagtcccaagtcgtccccctctccgccccccaggaggggcgagagggagccgcagctgatgtcagggctcaagggttcttgttgatgcacgagat

SEQ ID NO: 166641 - DNA, 83 bp, Homo sapiens
taattgtctttgtacctatgattgaaaacagtagttggtctatgacttttgaggagcagcccctgtcaaagggaacaggaagc

SEQ ID NO: 166642 - DNA, 75 bp, Homo sapiens
tccaagaagatggttcagttgactattgcaaagggagagtcccgtattctcagagtaaaagttgtttctggaatt

SEQ ID NO: 166643 - DNA, 100 bp, Homo sapiens
gctctaccaggatcaagaggtgcccaagccaaaatcctgacctacaacaagaaaggggcctcccgaaggaaagaccacctgaaggaccaccagaatgggt

SEQ ID NO: 166644 - DNA, 121 bp, Homo sapiens
ccgccgcctcgggaccggctgtatgattaggccacaatcttcaatgagtaaacatattcctccctgggcgctgcctatggcacagccaagagcggtaccggcattgcggccatgtctgtca

SEQ ID NO: 166645 - DNA, 74 bp, Homo sapiens
gcctgcttcgccagatcgtcatccagaatgagaacacgatgccacgcatgatcaagcggtgctgattcacgaga

SEQ ID NO: 166646 - DNA, 100 bp, Homo sapiens
cagatgcccctgataaaggatacgttggtttgtgactggttatatcctctagttcctgatagatctccggttctgaaatgtactgcgggagcctacatgt

SEQ ID NO: 166647 - DNA, 82 bp, Homo sapiens
cctgcctcagcctcccgactagctgggattacagactgagggagctggccgtgcgactgggcttcgggccctgtgcagagga

SEQ ID NO: 166648 - DNA, 50 bp, Homo sapiens
tacccgactctttgggccgttatctcactacttggaccatgagactgttt

SEQ ID NO: 166649 - DNA, 99 bp, Homo sapiens
atagtttggtgtttcggaagccaagaaattgaaaagggagggtgtggggatcctggaatccccgcctatgggaagcggacgggcagcagtttcctccat

SEQ ID NO: 166650 - DNA, 100 bp, Homo sapiens
cgggcggtggccgcactgggaccccggaatcccgcgcgctgcccacgattcgcttctgagaattgcagaatttacctcaagaactctttgctgttgaccc

SEQ ID NO: 166651 - DNA, 100 bp, Homo sapiens
tgatgaacttgtgaaaaaattcaaagtcgaatatcatgctggtggctctacccagaattcaattaaagtggctcaggctgacaacaagaatgatatccag

SEQ ID NO: 166652 - DNA, 141 bp, Homo sapiens
agacgccattggatgttttgtccagggcagcatctctggtgcatgctgatgacgaaaaacgaaaagccatggagacttcagcatcctcctcccagcctcaggacaacagtcaagtccacagagaaacagaagatgtagact

SEQ ID NO: 166653 - DNA, 75 bp, Homo sapiens
aaaaacacattctgggatgtggatggaagcatggtgcctcctgaatgggaactcaaagttggcattcccgtcacg

SEQ ID NO: 166654 - DNA, 82 bp, Homo sapiens
ctctgctgcggcgcggggaccgctgtgctctcggactggagactgatgcatgagggggctacggaggcgcaggagcggtggt

SEQ ID NO: 166655 - DNA, 75 bp, Homo sapiens
atgaaggagaattttcagatgactggactcttagtggaaagttgttgaatgttgggtcacgaagatctcaacctg

SEQ ID NO: 166656 - DNA, 100 bp, Homo sapiens
actcactgctgacaggaatggctttctttaggatgaaagagaacactctgctccagccaaggtggtgagggcagctgttcctaaacagcgcaaaggcagc

SEQ ID NO: 166657 - DNA, 50 bp, Homo sapiens
gtggacttcacgaggcctgggacggaatttgcactacacaaattgaatgc

SEQ ID NO: 166658 - DNA, 82 bp, Homo sapiens
ctggtgcagctcctggtgcgtggcccagcctcagagagacaacaaccggatcccagtcatcgggcccctgaagatccgggag

SEQ ID NO: 166659 - DNA, 83 bp, Homo sapiens
cccagaccctggagcctcagttggaagcagccgatccagcctgcggagcctgtggggcaggtgtgggacgccattgaaggggt

SEQ ID NO: 166660 - DNA, 82 bp, Homo sapiens
atcagcgtggcagagctggaggaaggagctaccctcatcgcccataaagtggatgagcaggcatgttatttgaaagcaattg

SEQ ID NO: 166661 - DNA, 83 bp, Homo sapiens
gggcattcatttcaggctccttctaaatggccaaggagtgaacaaccaaggcgatgggctgtaggatgttgatacatctgagg

SEQ ID NO: 166662 - DNA, 90 bp, Homo sapiens
ctggattctaaggcaacacttccttgaagaaacaagcttacagaccaatgaatgactgcaagcccatgaagccaacactgacgaagttgc

SEQ ID NO: 166663 - DNA, 100 bp, Homo sapiens
ataatggccgagccatggggaatatgaggaagacctactggagcagtcgcagtgagtttaaaaactaataaggcagtggattttacaacagtcaaattct

SEQ ID NO: 166664 - DNA, 85 bp, Homo sapiens
cccgcgagcacagagcctcgcctttgccgatccgccgcccgtccacacccgccgccagagagcgcctgctcgctgtgcccccggg

SEQ ID NO: 166665 - DNA, 51 bp, Homo sapiens
gtggtgacggaggacgatgaggcgcagtgagtgatagttgcttcaggaatc

SEQ ID NO: 166666 - DNA, 50 bp, Homo sapiens
cttatcagtagtgacttacagtaaggggtctaatgtgatggaagagcagg

SEQ ID NO: 166667 - DNA, 74 bp, Homo sapiens
agagtatggctgcagaggatccatctgtcttagcaaggctgtcatcacagaaggatatggagtaatagtactaa

SEQ ID NO: 166668 - DNA, 101 bp, Homo sapiens
cggatcaccgagggcatttacggcagctgagatctgtatctgtggacctgaatgttgatccctcgcttcagattgacatacctgatgcgctcagtgagaga

SEQ ID NO: 166669 - DNA, 96 bp, Homo sapiens
agcagcgactcccggaccgagtcgcgagtgtgcgccgtccgccgcccgccggatcccccggaccccccgaccggagtaccctgacttctaccggaa

SEQ ID NO: 166670 - DNA, 83 bp, Homo sapiens
caggcctgtcaggccatggggaacctctaccatgacacatgcttcacctgtgcagcttgcagaggcaagtgaggcctatctgg

SEQ ID NO: 166671 - DNA, 90 bp, Homo sapiens
ggaaaatggcggtgtctacagtgttctcgacttcgtcgctggaagcccagagctgcggttcgcaggcctgctaagcagccggcggccgga

SEQ ID NO: 166672 - DNA, 74 bp, Homo sapiens
ataaagaaaaacaagcatttgtcaaaacagttaaagctgccactggtgacatgccaacttaccagatccgagct

SEQ ID NO: 166673 - DNA, 80 bp, Homo sapiens
tctcaacttattcccttcaattcaagtaacagatgccatggacaatattaccaggcagaaccaattctacgatacccaag

SEQ ID NO: 166674 - DNA, 50 bp, Homo sapiens
atttagcaaggattcaaggctttcaggatgaagatgagctggattcccac

SEQ ID NO: 166675 - DNA, 98 bp, Homo sapiens
aggcctagaaaggaatgatagctggggttcttttgacctgagggctgctattgtatatcacactaaaggtggtgaaaacaggaatgagaacgaggagt

SEQ ID NO: 166676 - DNA, 100 bp, Homo sapiens
ggagttcgagcagatcgacaagtccgggagctgggcggccatttaccagatgccttcaattaagttgcagagttctgatggagagatatttgaagttgat

SEQ ID NO: 166677 - DNA, 75 bp, Homo sapiens
gccctgagggccttcgagagctaccgcgccagacagaattttgtagccaccttggctaatgggatgagcctccag

SEQ ID NO: 166678 - DNA, 89 bp, Homo sapiens
acatcgcggtgcagcgaatcaagcgggagttcaaggaggtgctgaagagcgaggagggactttgaatccaaagcaaaccatcttggtga

SEQ ID NO: 166679 - DNA, 90 bp, Homo sapiens
gttcagaagagccaaggaataaacatgcaatgaacccaaaagggatcttgtgctgtgaagacatttcccaagtgcttcatgttagccagc

SEQ ID NO: 166680 - DNA, 50 bp, Homo sapiens
tgtactatggacttcatcgctttatacatggcctgtatgagaagaaaaag

SEQ ID NO: 166681 - DNA, 100 bp, Homo sapiens
aatattggggccatttagtaacttctttgcaagataggagcatgctgctatgtggaatgttcagctttaacccagaagggattgaagactgtttttgatg

SEQ ID NO: 166682 - DNA, 109 bp, Homo sapiens
aggagttcgtctcttacgtctgcggaagtgcagctgcctcagttcttagcgcaggaacatcgtgatcaattagccactgccaaagatccctgctggccaaaacattctg

SEQ ID NO: 166683 - DNA, 82 bp, Homo sapiens
cctccactccgtcccccgcgggtctgctctgtgtgccatggacggcggaagaccctgaagaccctgcgggaccaatgggaga

SEQ ID NO: 166684 - DNA, 119 bp, Homo sapiens
cgcgtccgccgattcctcctccttggtcgccgcgtccttggctggcgtctgcagatctgggacacggccggccaggagcggttccgcaccatcacccagagctactaccgcagtgccaa

SEQ ID NO: 166685 - DNA, 76 bp, Homo sapiens
cggctggttatgaaagacagtgcagctgtgaagcttcatggaggtatcgatatcctagtctccaatgctgctgtca

SEQ ID NO: 166686 - DNA, 75 bp, Homo sapiens
ccactcatgttttgccaccgtgtgcaaatttacagggcggcgactggcggcgcgatggacctgaccgggctcctg

SEQ ID NO: 166687 - DNA, 90 bp, Homo sapiens
actggaaggacgacgacaaacacgtcatgaggaaggagcagcgcaaggacccatccattttcacagtattgactgctaagtctgtccgcc

SEQ ID NO: 166688 - DNA, 51 bp, Homo sapiens
gttcgggctcctggaggacgagtggtggtgaccgcggtggcttcaaaaatt

SEQ ID NO: 166689 - DNA, 100 bp, Homo sapiens
cgtctctgcaggccctcgtcccatatccacccctttgctgtgaagttgcttgcgctctgtaagaaagaaatcaagaattcaaaagatatccagaagctcc

SEQ ID NO: 166690 - DNA, 96 bp, Homo sapiens
gcctgtcagttatcgggtgtgaccgccgccgcccagggaacactgactatgccaaatggagactacattgaaggttattttagtggagaatgggga

SEQ ID NO: 166691 - DNA, 100 bp, Homo sapiens
aacttaaggtgccaggtgtcagcctctggtggccgtacctgatgcacgaacgccctgcctatctgtattcattggaggatgctttcattggatttggagg

SEQ ID NO: 166692 - DNA, 112 bp, Homo sapiens
tcaagatgaatatgaccctatggaagcagaagaagctgaggatgaagaagatggttatggaggttttgatgactatggtggctataataattacggctatgggaatgatggc

SEQ ID NO: 166693 - DNA, 83 bp, Homo sapiens
cggactgcgacgcggattacccgagcgcacgccggcttctgcagatctccaggggagcccaccagcctagtcaacatggcctc

SEQ ID NO: 166694 - DNA, 75 bp, Homo sapiens
cctacatgtgctgaaggccaaaagttctgggattaccgccagcctcggaaatacctcaatattcttccttgccag

SEQ ID NO: 166695 - DNA, 100 bp, Homo sapiens
caggagcacccggcgtcccagacaaactgattcttgctattccaaatcctcttccacgttgacagcccttcagatatttcaacactcctctcagcatcct

SEQ ID NO: 166696 - DNA, 100 bp, Homo sapiens
cccgcccaaggagaatgcgctcttcaagcggatcttgctctctgacacagctggctattctagtcccagaagaaagaggagagacttgctgaagatctgg

SEQ ID NO: 166697 - DNA, 90 bp, Homo sapiens
cggcggagcaggttactcgcacgcggatttggctggcgtcccgcgatagaatcacttgaattcctggatgaaatggagctgctggagcag

SEQ ID NO: 166698 - DNA, 88 bp, Homo sapiens
gaatctgcggtgctctgctggcgactggcaggacgcggtgcagagagcggacttccgcgacgcgggctatgaccagggccagagcact

SEQ ID NO: 166699 - DNA, 100 bp, Homo sapiens
gaccatctcacaactgctcgcgtgacgaccgcattcgtggcagatactagagtaaaaggatggtttcttctggacaattatatacccacatttatctgct

SEQ ID NO: 166700 - DNA, 91 bp, Homo sapiens
cagtcgcttgaacagattggcacccgaattgccaaagttttggaaaagcataaagatgcctatcaagtgatattggatggtgtgaaaggtg

SEQ ID NO: 166701 - DNA, 100 bp, Homo sapiens
ctcatcaggaaaccacacactgagagcctagagttgcagtactgctgcgcacggccactgccaacggcttccagatggtcaccagcggggtacagagcaa

SEQ ID NO: 166702 - DNA, 101 bp, Homo sapiens
gctagcgtggagcagtcctcccagaaggagtgtgggcaacctgcagggccctagactggagctggttacagacggaagaagaagagcacagctgcctggag

SEQ ID NO: 166703 - DNA, 82 bp, Homo sapiens
acggggagatcagcatttgcatggaacacatggttaaaaataagaagttggttgagctgctgagaaggaaagttcgtctcgc

SEQ ID NO: 166704 - DNA, 76 bp, Homo sapiens
cagccacagatactattaggaggttctggtgttgtttgggaggtgaaaccaaagcagaaatggaagccatttagtc

SEQ ID NO: 166705 - DNA, 75 bp, Homo sapiens
agcgcctggcctgcgcgccgctgcccgcgccacagattgcagagggaatggcatacatcgagcggaagaactaca

SEQ ID NO: 166706 - DNA, 82 bp, Homo sapiens
acacccaggatgcccagcggctcgtcaacgtgaccctcattcgccgggtgaatgagacaaatcccaatctgctgaaatatgg

SEQ ID NO: 166707 - DNA, 50 bp, Homo sapiens
cgcgaccacagctatgcgaccgaagaacactctgctccagccaaggtggt

SEQ ID NO: 166708 - DNA, 100 bp, Homo sapiens
cggcagccccatgggagcccgcgggaggcccaacggcgccgtggccaaggccgtgggaggtgaatgattccaattgtgaccaagaacttctttccctgct

SEQ ID NO: 166709 - DNA, 75 bp, Homo sapiens
aaactccaccagccccgtgtccttcattgccacgtacaggcccagctcatcgcccaggccattggccaggccttc

SEQ ID NO: 166710 - DNA, 76 bp, Homo sapiens
ccgacggctaccgggcctacctgccgtccaggctgtgtatcaaaagctgaccaggtgtatggagaccaggacatgc

SEQ ID NO: 166711 - DNA, 100 bp, Homo sapiens
ggtgctggaggcccctggtgtctacgtgtttggagaactgctggacatgcccaatgttagagagctggagttggccacggccaagaacgacatgaaccgg

SEQ ID NO: 166712 - DNA, 75 bp, Homo sapiens
cgatctgctggcctcggcctctcaagcaaatacttccctggacaagaaagccagatgaaactgatctaccagggc

SEQ ID NO: 166713 - DNA, 83 bp, Homo sapiens
aactcaggcccagatctttgactacggtgaaatccccaactttccccgaagtacagctggggatgttcaaaagaagtctggct

SEQ ID NO: 166714 - DNA, 90 bp, Homo sapiens
acctccaaacccctttggccctgtatcaggagcacagcaggcgcggggcgaaggagctgctagaacaatgctgaggcgggtgaggtgagg

SEQ ID NO: 166715 - DNA, 83 bp, Homo sapiens
tcgggctgaagcgactgagtccgcgatggagggcgtctctggccgagcctctttttgtggaaaacgacagcagcagcagtggc

SEQ ID NO: 166716 - DNA, 83 bp, Homo sapiens
actcagcccacatgcccgctcacctgcgctgtgatgcctgcagagctgtggcttaccaggctgcccaagcgccagaggtgacc

SEQ ID NO: 166717 - DNA, 96 bp, Homo sapiens
cttaaggaagtaaaatggcggacctggcgaacgaagacaatgcagatcttcgtgaagactctgactggtaagaccatcaccctcgaggttgagccc

SEQ ID NO: 166718 - DNA, 83 bp, Homo sapiens
agcaacagctctgccggctggaagcttcttaatgaagaggataactcagaatcatcggctatagagcagccacctacttcaaa

SEQ ID NO: 166719 - DNA, 83 bp, Homo sapiens
tcgacctgcagggagcagaggggacagaggcaccaaggacctccaagacagacggagggcacccggctgcagaaggatctccg

SEQ ID NO: 166720 - DNA, 49 bp, Homo sapiens
ggagactggatgatagaattgctttctggctcatctgctggaggaatcc

SEQ ID NO: 166721 - DNA, 99 bp, Homo sapiens
ttcttgctatttaaagatttttgtttgaatgaaattaatgaagctgtacctcaggtgaagttttatgaagagaacctgggatcctcatcgccaagcaaa

SEQ ID NO: 166722 - DNA, 100 bp, Homo sapiens
tttcgatcagagatcggcggagaccctcgaagtgcgcaaacttgacactcaccctgaccgggagaatgctggagaaccagactcctggagcagtttatcc

SEQ ID NO: 166723 - DNA, 108 bp, Homo sapiens
ccatttgccagtgatggaccgtgctagtgacctgactgatgccttcgtggaggccaaatttgagtttcatcatggtgactatgaaaaacagtttctgcatgtactgag

SEQ ID NO: 166724 - DNA, 90 bp, Homo sapiens
ctgcggcatcgccggcctcgctatggaatcctatgaggatggttgtgaggattatcctactctatcagaatatgttcaggattttttgaa

SEQ ID NO: 166725 - DNA, 101 bp, Homo sapiens
ctacatcctgcgggtgcctttgaaaatcaacgacaacttgagcacaggtatcatgaactgatcactaaatatgggaagttggagcctttggcagaagtgga

SEQ ID NO: 166726 - DNA, 100 bp, Homo sapiens
acctaaccatgaagacttgaacttaatacagcaagaaagaccatcaagtttaccaaaacctctgtagaggagcaggatgcaaccgacaggctgtggccgg

SEQ ID NO: 166727 - DNA, 100 bp, Homo sapiens
tggagaactacagaaacctggtctccctaggacttggatgttgtgggtgatggtatgcagtgtcctccttcacctttgctttttgatccttcactaaccc

SEQ ID NO: 166728 - DNA, 73 bp, Homo sapiens
agagaaggatgacctcatggacatggatgcctctcagcaggattccagacagcattggaaaagacatagaaaa

SEQ ID NO: 166729 - DNA, 116 bp, Homo sapiens
gagtggcctgggccggagcaggcgaggtggccggagccgtgtggaccaggaggagcgctatacacgataagaatactccatggaagtctttccttgtcattgtagatggctcgccc

SEQ ID NO: 166730 - DNA, 87 bp, Homo sapiens
ggggactgggaaatcagggcatcggagagtgccacattaatggattgagaggatccagaatccagatctctggaatagctaccaggc

SEQ ID NO: 166731 - DNA, 90 bp, Homo sapiens
cccagttcttcatctgcaccataaagacagactgggggcaggaacaaaggaccggaccctgattcgcatcatggtgtctcgcagcgagac

SEQ ID NO: 166732 - DNA, 75 bp, Homo sapiens
gaaattcgactatggcaacaagtacaagcggcgggtgccccgggccacggcgtatgcctccgaggacggggtcct

SEQ ID NO: 166733 - DNA, 89 bp, Homo sapiens
ctctgtgtgagggaaagaaaacaatttctcctgctctgcagcttctgttcaggatgtaatccctgttcattactacttaatacctccac

SEQ ID NO: 166734 - DNA, 50 bp, Homo sapiens
ttcagattctagtcccatggctaattggcagagggggtcgatttgggagg

SEQ ID NO: 166735 - DNA, 128 bp, Homo sapiens
aggtcaccagtcccaagtcgtccccctctccgccccccaggaggggcgagagggagccgcagctgatgtcaggtactccaaagattcaggtttactcacgtcatccagcagagaatggaaagtcaaat

SEQ ID NO: 166736 - DNA, 101 bp, Homo sapiens
acgaggaggaagaggtggccataccgttgaccgctcctccaactaaccagtaccttgtggtctataatcctttagaacaagaccgaatctcgttggtctca

SEQ ID NO: 166737 - DNA, 74 bp, Homo sapiens
tgatttacgaacagaactgagtaaaagaatagctccgtgttatcaagctgcagaaccttggcctgaaaatgcta

SEQ ID NO: 166738 - DNA, 74 bp, Homo sapiens
ccaggatggctctgatgagtcccaggagacgtgctgccatcgaggagggcacgctggaggagatcgaagaggag

SEQ ID NO: 166739 - DNA, 147 bp, Homo sapiens
tgaagcaagtggtttctcctttcctcggcatcagcggggaccgtagcttctcaggccccacgtacacgctgggggacaagggcctgtccgacacgccctacgacagcagcgccagctacgagaaggagaacgaaatgatgaagtccc

SEQ ID NO: 166740 - DNA, 50 bp, Homo sapiens
cgtcaatcagagcgtcctgtgcggcccagctgagagccagcctggaggtt

SEQ ID NO: 166741 - DNA, 83 bp, Homo sapiens
ggaacttgcagaaatcacattggaccctcctcccaactgtagcatgttggcagataaattgaacatgactccagaagaagctg

SEQ ID NO: 166742 - DNA, 73 bp, Homo sapiens
ttcaagaaccttgacaagctcatccggctggtaaatgcgcaggggcaagattcttgccaagagaattaatgtg

SEQ ID NO: 166743 - DNA, 51 bp, Homo sapiens
cagaatcaaacctgactcgaaagatcctgcccggcctgtacatcggcaact

SEQ ID NO: 166744 - DNA, 87 bp, Homo sapiens
ctggaacacacatcagtcacgctaaagaattacctccaaagccattgtcaagaccacagcagtcatctgcaccagtccagctgaact

SEQ ID NO: 166745 - DNA, 100 bp, Homo sapiens
gagatggaggcgtcgggcgtgagcggaaatgaggaggagatggtggaggaggctgaagggtcctcactgagcagcgagtcgtcccccgtgtcctctccgg

SEQ ID NO: 166746 - DNA, 98 bp, Homo sapiens
ctgctccggcctagcctggcggagctccacgacgagctggaaaagaattgccattgccttcagaaagtgttgatattattatttctgacattccattt

SEQ ID NO: 166747 - DNA, 100 bp, Homo sapiens
cgacctagacctcctggggaagaccctcctgcagcagtcgctgcccccggaatcccagcaagtgcggtgaggtctgcggggtttccgagaggctcgccgg

SEQ ID NO: 166748 - DNA, 130 bp, Homo sapiens
acctctccaagtacaagcaacgccgcctggcaggggccgaggagtgggtcggcgacaggaagcagtggatctccgtagcagtagctgatgtgcagtttggccccatgagatttcatcaagatcaacttca

SEQ ID NO: 166749 - DNA, 80 bp, Homo sapiens
aatgtccatggatttgtttctcattctcatatttcaccaataaaggatgctgaaatttctggaaaagacaatggaaatca

SEQ ID NO: 166750 - DNA, 100 bp, Homo sapiens
gtctggaggtggcagcagaaatcctactccacccataggaagacccacgtccacacctactcctcctcaggaaaatgtttcaacgtgcgcaagagttgcg

SEQ ID NO: 166751 - DNA, 83 bp, Homo sapiens
caggctgcggcagacggcgacagtggcggcggcgccatggcagggcttgcaggaggctactcacagtcgaactacaactcccc

SEQ ID NO: 166752 - DNA, 82 bp, Homo sapiens
agaagaaggatgctgttaaaagattgaggtggtgccttctgcctctgccctgatcatcaaagccctcaaggaaccaccaaga

SEQ ID NO: 166753 - DNA, 88 bp, Homo sapiens
gagcagatcttccaacctgggaagaaaggtgctgcagcgcagtaaatgtaatttgaagaaggcagaaggaacccatggctttagccgg

SEQ ID NO: 166754 - DNA, 100 bp, Homo sapiens
gaatatcggattcctctgccaatgaccgtggaggagtaccgcatcgcccagctgtacatgatacagcaaaaaggcattgggatgaacgagccgctggtgg

SEQ ID NO: 166755 - DNA, 100 bp, Homo sapiens
ggctgcgtcggagctctacacaaaggtccggtgtctaaaagactatggagaatttgaagttgatgatggcacttcagtcctattaaaaaaaaatagccag

SEQ ID NO: 166756 - DNA, 98 bp, Homo sapiens
cagccagggctgaacccccgcagctctagccggcccggtccttggactgaaagaatgcaccaggggctcggcagtgtggtgccagaatgtgaagacgg

SEQ ID NO: 166757 - DNA, 89 bp, Homo sapiens
gcggtacatcgcctcggtgcagggctccaccccgtcgcctcgacaggtatgcagtggaactgatgaagaccctgatgataaaaacgcac

SEQ ID NO: 166758 - DNA, 75 bp, Homo sapiens
agaagcatgttagttcgacatcatcatcttttcttgaaaactctcttgatagagcccaagcagccaagaataaag

SEQ ID NO: 166759 - DNA, 96 bp, Homo sapiens
agaggtgatgctggagaactacaggaacgtggtctccctgggacagagcgggatgccaccagcttgtccaaagggaagttccaggagctcctggtg

SEQ ID NO: 166760 - DNA, 100 bp, Homo sapiens
ctcggtctgggcttctctgaggcggcgagagatggtcaggtctggagctcgaccgggccagattttaccaaatgttgcaagaactctggagttcttatgg

SEQ ID NO: 166761 - DNA, 95 bp, Homo sapiens
caaatggcacttcattggccacctacagaaacaaaatgtcaacaaattgatggatcaggagaacctcagtctgacgacattgaagctagccgaat

SEQ ID NO: 166762 - DNA, 74 bp, Homo sapiens
tgtggcaaggcttttgcttccaaatacaagctgtataggtggtgttcccactgatgaagagcaggcgactgggt

SEQ ID NO: 166763 - DNA, 74 bp, Homo sapiens
aataaaactaacagtctatgatgtcaaggataagtctcatgacaccttgtgattccaaagaatccctatcctgc

SEQ ID NO: 166764 - DNA, 88 bp, Homo sapiens
cgccgtgaagagccttcaggcgctgggcgagctacgagagtacaaggtagtgggtcgctgcctgcccacccccaaatgccacacgccg

SEQ ID NO: 166765 - DNA, 98 bp, Homo sapiens
ccacttgcatcaagctgggcatccagggctcgtacttctgctcgcagatctgttcgcagttgagtaccaggctggagaaacagcaagcagccagcaag

SEQ ID NO: 166766 - DNA, 153 bp, Homo sapiens
ggcagctgcggcgcgaccaggccgggcacctccgagcgcaaggacagcgcgaggtccgcgcagcccagcgcagccatgtctccgtgaggccgggtgacgctccagaatgggagacaagccaatttgggagcagattggatccagcttcattca

SEQ ID NO: 166767 - DNA, 50 bp, Homo sapiens
cggccgccggctcccccacgaggtactccaaagattcaggtttactcacg

SEQ ID NO: 166768 - DNA, 90 bp, Homo sapiens
cctggatctgcgatctgtttgtggttttataggatcacattgacaaaagtaccatggagttttatgagtcagcatattttattgttctta

SEQ ID NO: 166769 - DNA, 100 bp, Homo sapiens
cccggaaaagggcactcgtctccgtgggtgtggcggagcgcgcggtgcatggcgaaagggcgtgtggttgcgcctgaggaagatacttttctgtgttttg

SEQ ID NO: 166770 - DNA, 137 bp, Homo sapiens
gcgagccatggtcgcgctggagaaccccgagtgcggcccggaggcggcggagggcaccccgggcgggcggcggctgctcttcggaaccaaaaagaagcttcccagagccggggccaggagccccaagcgccctctag

SEQ ID NO: 166771 - DNA, 82 bp, Homo sapiens
aaggacacggtctacaccgacttcgacgcttgccttgcgccatggactggcagccagacgagcagggcctgcagcaggtcct

SEQ ID NO: 166772 - DNA, 100 bp, Homo sapiens
ggaattttactgggataattatccaaataaattgcaagcattctatccaaatgtttgccagggtttggatacctgatccagaggaagtctggaagtcagc

SEQ ID NO: 166773 - DNA, 100 bp, Homo sapiens
tgcaggagaggattgtgtctgcttggtgtggagccatgaaggattttttatcaagcagaaatgcatcgaacaacgagaatcaagatcactgagctaaatc

SEQ ID NO: 166774 - DNA, 98 bp, Homo sapiens
atcgcgggcatcttgctgttcgtgattatatttcttggagttgtgttggtaatgaagaaaaggtatcagcagatgttgcacacaaacttggtatacct

SEQ ID NO: 166775 - DNA, 100 bp, Homo sapiens
gcaaaaccaacgcctggctcggagcagcagcctctgagattcacgatttgcctgaacatcattatgaaacacttaagttcctttcagctcatctgaagac

SEQ ID NO: 166776 - DNA, 74 bp, Homo sapiens
cgccctcatggggaaaatctccccggtgactttcaggtctcacagatttcaagcctggctactggattggtgtc

SEQ ID NO: 166777 - DNA, 75 bp, Homo sapiens
aaacattcgtctcggaaaccccgcctcttacagtcacgagcgcaccctttgcatatctctacctacttgtgcata

SEQ ID NO: 166778 - DNA, 100 bp, Homo sapiens
ggcgccggccccggctcaacggattcttctcgctcgctgcccggaaagaaccaatggtgacaaatatcccatggaaagtgataattcatttgatctgttt

SEQ ID NO: 166779 - DNA, 75 bp, Homo sapiens
cgacattcccttcgagctgcgcatcgtggatctgattaaagctgcaagctttcttcctggtggcagatgacatca

SEQ ID NO: 166780 - DNA, 98 bp, Homo sapiens
atcgaatgaaggaatcctctccatctggttcgaagtctcagcggtattctggtgcttatggtgcctcaggtattaatctctggagaagacacatccac

SEQ ID NO: 166781 - DNA, 100 bp, Homo sapiens
ctgacactgcttgaatacactgagacccggaatcagttccttgatgagctcatggaggttatcatagcaacccctgggcgacttctggatataataaagc

SEQ ID NO: 166782 - DNA, 75 bp, Homo sapiens
ctcagacatctgcaaatcatgaggcaattaaaggcagatgctaaaaaagctattggaaggcttcaactacgcaca

SEQ ID NO: 166783 - DNA, 51 bp, Homo sapiens
tttgtcagattatcaggatgaggggagtaactattcccagtcagaggcgct

SEQ ID NO: 166784 - DNA, 75 bp, Homo sapiens
cgcagcccgtcacccacctcatctttgacatggacggacttcttctgggtttttcccactcggctttcacgtttg

SEQ ID NO: 166785 - DNA, 75 bp, Homo sapiens
acgacctcaagcggcagaatgctcttctggagcagcaagttgtaatccagtcttctggtggattaagcaaagatg

SEQ ID NO: 166786 - DNA, 98 bp, Homo sapiens
ctggccgtggctctcttggcagccttcctgatttctgcagctctgtgtgaaggtgccgtgagcgatgtggagatgcaggaacactatgatgagttttt

SEQ ID NO: 166787 - DNA, 75 bp, Homo sapiens
gttggaaagcactatggtgtgccacacctgcatgctgtggcgggcgctggcggtggagcctcgcctagctgccca

SEQ ID NO: 166788 - DNA, 100 bp, Homo sapiens
ctgaggaagagaaccgctggacatgggttctctgaggatgggcttgaaggatgccaatgatgtaccaatccaatgtgaaatctctcctcttatctcctat

SEQ ID NO: 166789 - DNA, 109 bp, Homo sapiens
tctcgctccgtggccttagctgtgctcgcgctactctctctttctggcctggaggctatccagcatctcccttgagtttagaaatctggctgagaaataccaaacagtg

SEQ ID NO: 166790 - DNA, 74 bp, Homo sapiens
cccggactctgctcaacgccagccggagcctagaagtcagctgctacagcatgctggccatagggattggaacc

SEQ ID NO: 166791 - DNA, 98 bp, Homo sapiens
acgatcagtgacgagtgggatattccagagaaacagcctttcaaagacctgggagaagagaagtttacctttattgagaaatgtaacaaccctcgttc

SEQ ID NO: 166792 - DNA, 90 bp, Homo sapiens
tggattcatacctgctgatgtggggactgctcacgttcatcatggtgcctggctgccaggcagcaacatggccaatctttcctaagctgc

SEQ ID NO: 166793 - DNA, 100 bp, Homo sapiens
gggattgctactgcacggtgaacctggaccaggaggaggttttcaggaccaaaattgtggaaaagtcactctgatttccatcgttgcatttacaactgct

SEQ ID NO: 166794 - DNA, 98 bp, Homo sapiens
cgccttcctgggccacaacggggccggcaagaccaccaccctcccccgcctctcctggactcttttcaagaccagtctccatctccagcctccttcaa

SEQ ID NO: 166795 - DNA, 100 bp, Homo sapiens
tgccgctcccggcagctgtccgcgcccacggtcctatggcggagctaacggactccgcgcgggtctctgaaggtcggcctgcagatctccctggactact

SEQ ID NO: 166796 - DNA, 100 bp, Homo sapiens
tacttgcctaaatgaggaatgtctttcctaccatctaaaatacgaaggtttctggctgggttcactggttgaggacccagttcccatctttggatataga

SEQ ID NO: 166797 - DNA, 98 bp, Homo sapiens
ctcacctggcggtgcccgaggagtagtcgctggagtccgcgcctccctggctttggcagcatgtaagcagctgtttgccaagaacccaggtcactgct

SEQ ID NO: 166798 - DNA, 74 bp, Homo sapiens
attgctttgaacatctcatacgactgctacagaactgcaagaacaccgaaaatctctcccagcactttagaaag

SEQ ID NO: 166799 - DNA, 75 bp, Homo sapiens
cccggatctcaacaatcccttcaagatgggaaactcttgtctagtgatgtgactcattacgtgatcccagactgg

SEQ ID NO: 166800 - DNA, 100 bp, Homo sapiens
agcaagtctcctcgcagtaagagaaaccgaagtcctcaccactcaacagtcaaagtgaagcagccatccagtccaatggatcagatgggcaagatgagac

SEQ ID NO: 166801 - DNA, 97 bp, Homo sapiens
cgcctctcgatgggcagctcgcacttgctcaacaagggcctgccgcttgggtgactatgaccagagcaggaccaaagtgctgcacatgagcctgaac

SEQ ID NO: 166802 - DNA, 76 bp, Homo sapiens
gggaatcatcgtcgtgaacacagaagccagctgaagatgagtggggtaaaaccccagacgccatgaaagctgccat

SEQ ID NO: 166803 - DNA, 50 bp, Homo sapiens
ggaacggaaacaaagttattttgctcggagtacgagacccaatctagtgc

SEQ ID NO: 166804 - DNA, 91 bp, Homo sapiens
ccacagctatcccctgaggcccgacccagcattgtcttcagtgttaagaaatgtggactcctgtgaggtgctggaggtttgaatcatcttg

SEQ ID NO: 166805 - DNA, 82 bp, Homo sapiens
ttcgatgacttcgtcacctatgaggtgaagatcatgacggagaaggaactcctggccgtggcttgtgagcagtttctgggta

SEQ ID NO: 166806 - DNA, 101 bp, Homo sapiens
accttccaagtcctggcatctcaatgcatctgggaagctacctgcattaagtcaggactgaggatttttcaagccacattcaattgataggatgaaaaaat

SEQ ID NO: 166807 - DNA, 100 bp, Homo sapiens
gtccaatttaagttttgaagatgaacaccaagatgaaagcagcagttttcatcatctaagtgaaagtaaatacctgggcacaggacttcaaagcaaacac

SEQ ID NO: 166808 - DNA, 100 bp, Homo sapiens
cgaagaggtacgattccggagaatcgcgaggcagagcgggagcgcgcagccaggcgtcctgcctctgcggctctgccccctgcatcctgtgcagctgctg

SEQ ID NO: 166809 - DNA, 75 bp, Homo sapiens
agccagagactcacacctccttgtgataacggacaatcaggaaatgccatcactggtgcaagctatatttaacgg

SEQ ID NO: 166810 - DNA, 98 bp, Homo sapiens
ccatcttcaaaatttcaggtcttaaatctggacagttttggcatgtgactgacttacacttagaccctacttaccacatcacagatgaccacacaaaa

SEQ ID NO: 166811 - DNA, 124 bp, Homo sapiens
gaggaaaacgaggatggaaaaccttttatgctgtactgaagggaacagttctttacttgcaaaagaacattgacatcaccaatttcagcagcagctggagcgatggcctggccttctgtgctct

SEQ ID NO: 166812 - DNA, 96 bp, Homo sapiens
ctgcccagaatgcccttcgggagcttccactgcgattccaaagacttggacacctagtggctctgatggcactgctctgtggggacccacaggaaa

SEQ ID NO: 166813 - DNA, 82 bp, Homo sapiens
cgaatctcttctccctccccttcttggccagaagcggactcctagaagaggggagcagcaaggatggaatgacagccgtggg

SEQ ID NO: 166814 - DNA, 90 bp, Homo sapiens
cggaaaacctgatcccaaaattattgaaaacactcgaagggaaatttctcctcttctctccatggaggctatggcatttgttactgaaga

SEQ ID NO: 166815 - DNA, 126 bp, Homo sapiens
acagtctgcacgggcaagaatgatacctaaatcactactcaggcacaggagagagcaggactggcatggctggcaggcttgcagccaatttactggagcagggatgacgtagcccagtggctcaag

SEQ ID NO: 166816 - DNA, 97 bp, Homo sapiens
gtctacaagactctcttcgctctttgcatcttaactgcagtgatcagggccaaagcggtcagtgagaaggaagtggactctggaaacgacatttatg

SEQ ID NO: 166817 - DNA, 82 bp, Homo sapiens
agataacagggatagaaggactgcagatcggtggaaaactgataagccagtggaatggatatgaaagcatacctgagatcta

SEQ ID NO: 166818 - DNA, 100 bp, Homo sapiens
gatgttctgagattgcatcaggatattaatgattataaccggagattctcagggcaacccagatctgaatcagagatcattgatttcttcctgggggcct

SEQ ID NO: 166819 - DNA, 74 bp, Homo sapiens
agcctggacaaaggagagaatgggactctcaggtgtcatggagaaactccagctgggcccagagattctgcagc

SEQ ID NO: 166820 - DNA, 100 bp, Homo sapiens
cagcaccctgcagcagctgctaatgcagacaggcacccacagctaccacacggaagtggttacctggaaggaaaggagctgcagaacttgatccaggagc

SEQ ID NO: 166821 - DNA, 75 bp, Homo sapiens
gctgatgaagacgttatttaccatatccagtatgatgaggaagctgtgattaagcactcattggtgcataaagta

SEQ ID NO: 166822 - DNA, 100 bp, Homo sapiens
gcagaatggaataggcattaatccatactgtgctctcattgaagaagcatatgatttgatccatatggaaagaataagttctccacttgtagaatttgta

SEQ ID NO: 166823 - DNA, 100 bp, Homo sapiens
attggctgactccacttctatggtgagagagaggagtgcatcaaagattactcccaggctgcacgatgtgctgatggaactgcagaagaagcaactgcag

SEQ ID NO: 166824 - DNA, 100 bp, Homo sapiens
gcggcggcggggccggggtccgcaaggccggagaaggccgccgggcccgggcatggtggtctggggcaacgcggaaggcactgtccaaaaaattgaatga

SEQ ID NO: 166825 - DNA, 101 bp, Homo sapiens
cggagcgctgaggcgggcgttttcttggatgaattgcttgctttggaggagccatgtggctagaaatcctcctcacttcagtgctgggctttgccatctac

SEQ ID NO: 166826 - DNA, 96 bp, Homo sapiens
tagaggacttgaagcagaaagcaagtgaatacgagtcagaagctgcaggtggagctggagcaagaataccaagacaaattcaaaagactgcccctc

SEQ ID NO: 166827 - DNA, 98 bp, Homo sapiens
ctttggaagagtatgcctgggtcccgccgggtctgaagcctgaacagatggtccccatccctgctggagtatttacaatgggcacagatgatcctcag

SEQ ID NO: 166828 - DNA, 83 bp, Homo sapiens
cgacgtcttccacctgagcttcagcgacggcgcctaccggatccgagccactgaggcggctcccagctgcgttggcgacatgg

SEQ ID NO: 166829 - DNA, 56 bp, Homo sapiens
tttagatttgatttgtcgagctcatcaggaggcccacttggccacggaatatgttc

SEQ ID NO: 166830 - DNA, 87 bp, Homo sapiens
aactggccacccgagagtgaccgcaaaccaaacgtggtcctgggagtcacaaaccctttctttatcaaaacactccagcactggccc

SEQ ID NO: 166831 - DNA, 83 bp, Homo sapiens
ctcaacttctaccagttcctcggggtgcagcaggtgagtcgttcctctttgctaatagaacagcctgtgaaaaaacggcctct

SEQ ID NO: 166832 - DNA, 90 bp, Homo sapiens
accagcagttatttgcagctatcatgtgagactgctgagaaggaagaatttgaacatcaacagaaagagctggagaaagtttgcaacccc

SEQ ID NO: 166833 - DNA, 75 bp, Homo sapiens
ggcaaacaatggaggatttaatttcactggaattaagtagactggctggacagattcgaaggttgtatggttcaa

SEQ ID NO: 166834 - DNA, 98 bp, Homo sapiens
ggaattgatctcgccaaaaaggacatctttggagccagacaaagctctgatggcaccaaatcttgactcctttggacgcgatcgggcactgtatcaag

SEQ ID NO: 166835 - DNA, 101 bp, Homo sapiens
caggtgcagagctgtgggtctggttccaagacactgtcactgagctgactttgccatcgaggccttggccaaggcgacctatgagcggatgttccgctggc

SEQ ID NO: 166836 - DNA, 99 bp, Homo sapiens
caggtctgtttctgggttccttcactttgacactgctacaaaaggggcgtgaggtcccaggaagtggccaaaagctagacagatccccgttcctgacat

SEQ ID NO: 166837 - DNA, 74 bp, Homo sapiens
ctcaagtacagggtcatcaagggcactgtgctcaagtacatgggcgactacccgtccaagaggacacgctccgt

SEQ ID NO: 166838 - DNA, 87 bp, Homo sapiens
gacccgttaacgcgttgattcgttccgtgctgctgcagggtgtcaaattgagaaccaggtagatccccaccacctacagtaaaaagg

SEQ ID NO: 166839 - DNA, 100 bp, Homo sapiens
tcccagcggcgcgtgagcggcactgatttgtccctggggcggcagcgcggacccgcccggagatgagattgataaaggaagctggcaaacaagatccaga

SEQ ID NO: 166840 - DNA, 90 bp, Homo sapiens
gtcttcggagcgaccccggcagaacagtaaatgtcctgagggaacaaaacccatgctgatatttgctggcgatgatttcgatgtaacaga

SEQ ID NO: 166841 - DNA, 78 bp, Homo sapiens
acggtcttgctgaaagccagggaagctgaaccttagccggccgatcgaggagcagggccccctggacgtcatcatcca

SEQ ID NO: 166842 - DNA, 75 bp, Homo sapiens
cagcctcaaacaggagctggagcagctcaaagagatttggaggccaatcactgccaccttttatttccctgtggg

SEQ ID NO: 166843 - DNA, 82 bp, Homo sapiens
ccctccccctcggcctcgcggcgacggcggcggtggcggcttggacgactcggagagccgggaagcccgtcagcctgagcta

SEQ ID NO: 166844 - DNA, 75 bp, Homo sapiens
tgcggcgcggggaccgctgtgctctcggatgactttgacaacgatgtggatgctctgctggaagaaggcctttgt

SEQ ID NO: 166845 - DNA, 100 bp, Homo sapiens
cgccttatcccagatgatctatccctcctgaaactctaccctccaggggatgaggaaggttatcaatagtctggctgtctatcgtcatcgtgagactgac

SEQ ID NO: 166846 - DNA, 100 bp, Homo sapiens
gcaaacggagaaagcagccagagtactggtttgctgttcctcgggagaggccaaccaagccctcgagcagttattcccatgtcctgtataaccaatggaa

SEQ ID NO: 166847 - DNA, 83 bp, Homo sapiens
gaaaaataaagtgttgagtaaacagaccaagttggagggagaaccgaagattacaggaggccagcatgaggttggaacaagag

SEQ ID NO: 166848 - DNA, 100 bp, Homo sapiens
ggaggaaatagtggcaggtgacagtctgcatgtgcagttttcagggccgcctttttgcctatcctgacactcaccgccatcgcctgggacccaattatct

SEQ ID NO: 166849 - DNA, 75 bp, Homo sapiens
aaattccgaagcaatcttcctgctaaggccattggacacagaatccgagtgggacgtccagatcggtgacatcgt

SEQ ID NO: 166850 - DNA, 83 bp, Homo sapiens
ctccgccgcggcactgatccccacagatgactctggccactggggcagaggtggtttatttacagctctggaaaagcgatccg

SEQ ID NO: 166851 - DNA, 74 bp, Homo sapiens
atactttcaagtcatcccaaatatggttccatccctaaacttatacctcatcatgtcactacagtgaacagtac

SEQ ID NO: 166852 - DNA, 75 bp, Homo sapiens
taggcaactccggccttccctgccctgacctggaacctctgggagggctgcagaagcgccatgctgcactgcccc

SEQ ID NO: 166853 - DNA, 50 bp, Homo sapiens
gccatggccgccgccgatgccgaggtgggaagtctgaagctcagagagcc

SEQ ID NO: 166854 - DNA, 82 bp, Homo sapiens
cggcgccgagaggccgtgcgggacgcgggcgccaggaccggccgaacgcagagggctccagcaagagcttcccatgtggctc

SEQ ID NO: 166855 - DNA, 100 bp, Homo sapiens
ccctttgctgctgaggtcctgggtgccatcccagcacttgaactgctttctccaggggttaaaaataagaattttaaatgccaccgaacctatcggctct

SEQ ID NO: 166856 - DNA, 75 bp, Homo sapiens
caaaaatccagaagtacaagcagtctgtcaggatggctaaaggtgaccccaagaaaccaaagggcaagatgtccg

SEQ ID NO: 166857 - DNA, 74 bp, Homo sapiens
tcctgagtagccgggattacagatttccatgcgacagaatcccaaacagttctgaatgtctccaagggagaagc

SEQ ID NO: 166858 - DNA, 97 bp, Homo sapiens
gtgtttctggaaagtgacagcagtgagaaagatcagtctaaagaaaaggagaagaaagtgaaaaaaacaattccttcctgggctaccctttctgcca

SEQ ID NO: 166859 - DNA, 101 bp, Homo sapiens
ggaagctcgggcgctccggctgtaaggagccgcggcggggggaaaatggagcccttcaccaatgaatggactcaacgctctccatctggctgccaaggaag

SEQ ID NO: 166860 - DNA, 90 bp, Homo sapiens
ccagccggcaaataaattcaacaagaagagaaaattccagccagatggtagaagcgatggtatgttgagtcgatgggatgatagccagag

SEQ ID NO: 166861 - DNA, 75 bp, Homo sapiens
ggaaaccagtggccacagcatctttgtctagccccagtgcagtgaattttgaagattgcaccggtcgacaaagga

SEQ ID NO: 166862 - DNA, 100 bp, Homo sapiens
tacaaaggacatgtggagatccccaatttgtctgatgaaaacagcgtggatgaagtggagaaaataatgttgagtttccatgaagaacaggaagtactgc

SEQ ID NO: 166863 - DNA, 100 bp, Homo sapiens
agggtgacaagctcctcgcacaggaccaggaagaaacaggctcctgccagcaccgacagcaacgaaaatgttcccacggagatcaggatgacttgctgaa

SEQ ID NO: 166864 - DNA, 48 bp, Homo sapiens
gcagctggctggcttcagtggaccagattggcagccaccatttgcatg

SEQ ID NO: 166865 - DNA, 88 bp, Homo sapiens
gggcaggggcggaggcggaggcagaggtggaggcgctttgaaagagacacctatggctgccgatgaaggctcagcagagaaacaggca

SEQ ID NO: 166866 - DNA, 82 bp, Homo sapiens
cgggagatcccaggcggtgacagagtggagccatggctagagccgaggtgctcggtggagtcatggcagtgccctttgtgga

SEQ ID NO: 166867 - DNA, 95 bp, Homo sapiens
tgtttttggactctaatttcacggacactgaaagcagagaccatggagcttcttggctaaactgtgaaaatgcagtcctcaaagagaatttgaaa

SEQ ID NO: 166868 - DNA, 75 bp, Homo sapiens
cattttaaactatggacgactccgaggaacattgaggtgaatgtgcctcttaggagcacttgtccagaagtgtct

SEQ ID NO: 166869 - DNA, 100 bp, Homo sapiens
cctcagaagaagtggttcctgagggcaagtgtccagagaatggctgggatgaaagtacacttgaactctttttacatgaacttgcaatcatggacagcaa

SEQ ID NO: 166870 - DNA, 82 bp, Homo sapiens
ctgagagggacacgcagtgacgagcggccgaagcagctttgcgactcggtgaaatacctggagtgctcagctctcacccaga

SEQ ID NO: 166871 - DNA, 50 bp, Homo sapiens
gtaacacccttccagatgatttttgaggccacggaatgaattgtcccggg

SEQ ID NO: 166872 - DNA, 96 bp, Homo sapiens
ccaatcccccctcacccaggcccctgtcaagaaggtgccggtggtgcgagtcttcggagcgaccccggcagcttgccaattctgtaactccttggg

SEQ ID NO: 166873 - DNA, 100 bp, Homo sapiens
tcaacattttctgggttcaaaacagtagccgtgttaacgaacagcctgaaaaatccccctccgtgctaactgttccagagaagcaaatgctggcacaagg

SEQ ID NO: 166874 - DNA, 75 bp, Homo sapiens
cagccatcctgggaccccaggcgtgcaggttctctttgagggtgaaatgacaatggatgctctgttggctcgatt

SEQ ID NO: 166875 - DNA, 100 bp, Homo sapiens
ctgctggacaacaccatggaaatatttgacattgagtttggtgaggattcatcaacctccagtatgatgtctgtgaactttgatgttcaatcaaatcaga

SEQ ID NO: 166876 - DNA, 75 bp, Homo sapiens
tggacgagaaccagaaggcctattaccccagcatcgtggccaacagggaaatgtttcaacgtgcgcaagcgttgc

SEQ ID NO: 166877 - DNA, 99 bp, Homo sapiens
ctgtactacaagcccaccaagctaaagaggctgcccagaaagcagttaacagtgccaccggtgttccaactgtttaaattcatttctgtgtgacgtgac

SEQ ID NO: 166878 - DNA, 100 bp, Homo sapiens
cagaggcgcctcctccacaccccccgccgcagcagcaccggcgacaggttttaaaatcaaagatgggaaaatcggagaaaattgcccttccccatggcca

SEQ ID NO: 166879 - DNA, 97 bp, Homo sapiens
ccgcatcagcaccgatttacgccagaaaaatacgcgtgcaacacctgaactcctggggggaccgtcagtcttcctcttccccccaaaacccaaggac

SEQ ID NO: 166880 - DNA, 75 bp, Homo sapiens
cctggtgtctggtggactaggtgggctcatgaacatttggtctttaaggctcaagactgcagtgcagatgacgac

SEQ ID NO: 166881 - DNA, 100 bp, Homo sapiens
ccagggctatgccgccaagaccgtctttgagtttaattggttggggtcagataagaagaggagtgacaatcaagccaacagtagatgatgactgaagaat

SEQ ID NO: 166882 - DNA, 95 bp, Homo sapiens
aggaggccaaggacggcgttctggatctcaaagcgcaacccaaggagatctgtgcgctggttgggttctgtgatgaggtgaaagagatgcccatg

SEQ ID NO: 166883 - DNA, 97 bp, Homo sapiens
gactccgttatctgcaggtattgggagatgcacagctaagatgccaggaccacctggaagcctagaaatgtgagaaagatcagtctaaagaaaagga

SEQ ID NO: 166884 - DNA, 74 bp, Homo sapiens
taccaccacttggatggtaccaactgctcaagaagacaggatttcaccatgttgcccaggctggtctcaaactc

SEQ ID NO: 166885 - DNA, 75 bp, Homo sapiens
acaggccgacaagatacctctcgcatgtccacctcacaggttctggaggacacgtgccggcggcaggacttcaac

SEQ ID NO: 166886 - DNA, 80 bp, Homo sapiens
gtgctggagcccggacgggcgccacattctcaacaccacggaattccatctggtaggtgagtgctgtcctcggctcactt

SEQ ID NO: 166887 - DNA, 82 bp, Homo sapiens
gaggacatcctgcatgtatggggcaaactgctataggctatcaagtactagctccaactgcctattatgatcagactggtgc

SEQ ID NO: 166888 - DNA, 75 bp, Homo sapiens
gcctcggcggagcagaggaaccacacgctgatcatggattttttatcaagcagaaatgcatcgaacaacgagaat

SEQ ID NO: 166889 - DNA, 83 bp, Homo sapiens
ttacttcatcgtctccatcctctacctcaagtatgagccaggtcgcaatggaagaagagatcgccgcgctggtcattgacaat

SEQ ID NO: 166890 - DNA, 76 bp, Homo sapiens
acactcctgaagtcgggaaatggtgcatgcctacatcatcagctacctgaagaaggagatgccaagtgtatttgga

SEQ ID NO: 166891 - DNA, 82 bp, Homo sapiens
agaaagtgatggctcagggcagcattggggtggcacctggtatgaacaggttctccccatgacaccacctgaacgtctcttc

SEQ ID NO: 166892 - DNA, 83 bp, Homo sapiens
gaaggggagaagagcccagagcccttggggcttccccaaagccagagcattttgaaagcgaagcagaagccgtagaatcagcg

SEQ ID NO: 166893 - DNA, 82 bp, Homo sapiens
ccgcccccagcgggatgtgaaggactccgggtgaggccggccacgccccgcacgacaatgcagatcttcgtgaagactctga

SEQ ID NO: 166894 - DNA, 75 bp, Homo sapiens
ccggcgtttgggctacggttgttgttggcgactgtgcttcaagcgatgcaggacagctggagcacacattgatga

SEQ ID NO: 166895 - DNA, 127 bp, Homo sapiens
aagcacacaacctccatcttcgacgactttgctcactacgagaagcgccaggaggaggaggaggtggtgcgcaagagtctgtagaagaggcgacaccagggcttccaaatgaacaaccgaaaggaag

SEQ ID NO: 166896 - DNA, 90 bp, Homo sapiens
cttgtgctgagttttcttttcatgtaccaagtcttgaagagcttgctggagcttttccaaaaatgtcaattaatagaacgaatacttgaa

SEQ ID NO: 166897 - DNA, 75 bp, Homo sapiens
actacaaatgcttgctctactagtggaaattctaatctttcacagacacaggcagtcgactacgagctcaacaga

SEQ ID NO: 166898 - DNA, 90 bp, Homo sapiens
cccgtttccgagccataaaaggtctaggaccgcttcccccgagccagcagaaagaagcttccggttctgaggtcctggaggtgccatttc

SEQ ID NO: 166899 - DNA, 74 bp, Homo sapiens
accagcccaagaaacatctcaccaatttcaaatccgaccaggagacgctgctgatgtaccagctacagtgccag

SEQ ID NO: 166900 - DNA, 98 bp, Homo sapiens
ctgcatctgccaacaagactggaagcagattttgtagatcaggaatgtgggtgcagttggcacctatgattcagggtctctcacaaggctgcagtcat

SEQ ID NO: 166901 - DNA, 98 bp, Homo sapiens
cctgaggttcagattaagaaatctgccccaaagtcttagaactgatctcacattcttgaaggtggcattgaagagcactaagatcggaagatgagtga

SEQ ID NO: 166902 - DNA, 120 bp, Homo sapiens
ttgacctcacctcaagcacacccaatggacagcatgcctcaccaagtcacatgacaagcaaaaaatccagttacactcttaaaggaattgtcagtgataaagtctcgatatcaaactttg

SEQ ID NO: 166903 - DNA, 100 bp, Homo sapiens
ctgctgcctgggcagctctgccaacctgcggaacagctgcctcttcctccagagcgacatcaggtcccgcagcccccggaagccaatagactccctcagg

SEQ ID NO: 166904 - DNA, 101 bp, Homo sapiens
gttgactgcggatccagacagtgaaatagctacaaccagcctaagggtttctctactatgtccagattcgcccgtccttccagttggagagttctcggagc

SEQ ID NO: 166905 - DNA, 80 bp, Homo sapiens
caagaaagacaaagacccagtgaacaaatccgggggcaaggccaaaaagaagatcaacgttcttctgcaagccttcatct

SEQ ID NO: 166906 - DNA, 50 bp, Homo sapiens
accagtacctgcccaggaaactgacaggggcaagtgtccgagtggtgaat

SEQ ID NO: 166907 - DNA, 100 bp, Homo sapiens
ctcccagctacagagggtaccgggatgcctgcaccattactggaatgaagccaagagtgatgaaagaagctgtatctactccatcacgaatggcccacag

SEQ ID NO: 166908 - DNA, 73 bp, Homo sapiens
gctgctgtaggacggttgctccgagcgtcgaatgtctactagagtccttttagccactctttccatccctatt

SEQ ID NO: 166909 - DNA, 100 bp, Homo sapiens
gcgcttgctacagtccgggcgtcggcttcgagagctgtgcccaggagtgaacaaccagccctacctctgtgagagtggtcactgctgcggggagactggc

SEQ ID NO: 166910 - DNA, 98 bp, Homo sapiens
ggtggccagcgcgcagaggcgggcgcggaggcggctagaaggtgaccgcggatcccagcttcctgcagccagggaaagtacggtggccagactttaac

SEQ ID NO: 166911 - DNA, 100 bp, Homo sapiens
tatctgcatttgctttataaaagaccactggatcccaagagtgaagctcagcttcaggtggcacaagaatggctcaactctccaaatagagagaatttct

SEQ ID NO: 166912 - DNA, 105 bp, Homo sapiens
tgggaatatgacgaagaggaggagaaaaaccagctggagattgagagactggaggagcagaattctccactttaccaatacttacaggatctgggacacacagac

SEQ ID NO: 166913 - DNA, 100 bp, Homo sapiens
ctcgtcatgctctttgtagcgtggtgcttctgttgctcacagagcgcctggacaccggaaaaggcgattccctgagcgcctggagttggagacaattcct

SEQ ID NO: 166914 - DNA, 91 bp, Homo sapiens
caacaagaggacccaggagaaattcgccctcaaagtcaaaatgcagatcttcgtgaaaacccttaccggcaagaccatcacccttgaggtg

SEQ ID NO: 166915 - DNA, 97 bp, Homo sapiens
agcaagcggaggacctacgccggcctgggtacatgtcccagagcaagcacacggaggcccgggagctcatgtactcgggagccctgctcttcttcag

SEQ ID NO: 166916 - DNA, 100 bp, Homo sapiens
acgagtcggccaagttgatgaatgtgtctgaggtcaccaagcctcctccttgcttggagaactcctcgcctccctccaggattccggagcctgaatcccc

SEQ ID NO: 166917 - DNA, 101 bp, Homo sapiens
ccgagctccagccgaaggagaagggggttgggttcgagttctggaaacagctgtgcgccgagcatggtatcagccccgagggcatcgtggaggagttcgcc

SEQ ID NO: 166918 - DNA, 100 bp, Homo sapiens
gtcacctgcgctgtgacctgctccggagtcataaagaggacgccgggacaccaagaagcagggaaatggaagatgaagatcctgccaaaggtgatcagag

SEQ ID NO: 166919 - DNA, 98 bp, Homo sapiens
ctgctgggcctgaaggaggcactgctgttcaacctcgggacactggggttgggaaatcaagcatcgtgtgtcgatttgtccaggatcactttgaccac

SEQ ID NO: 166920 - DNA, 100 bp, Homo sapiens
ccgcgcgaccgtctggatccccgcccaggaagcccctctgaagcctcctcgccgccgtttctgagaaggctgggcggggagcgtcggaccagaagagaat

SEQ ID NO: 166921 - DNA, 101 bp, Homo sapiens
ccggggcggagcacgcgagctatgtggtaagcatccgtggcattcaagacgaagatccccctgacgcccagctcctgaggctggataacatgctgctggct

SEQ ID NO: 166922 - DNA, 100 bp, Homo sapiens
catcaccacgcagaacgtcaacaccaagtgcatcaccatccccaggcccctccagccagcgtcaggtgcagaatggcccctctcctgatgagatggacat

SEQ ID NO: 166923 - DNA, 75 bp, Homo sapiens
ctggagacggtcgtagctgcggtcgcgccgagaaagattactcttgtctctgctgctcctgggaaagtgatttgt

SEQ ID NO: 166924 - DNA, 87 bp, Homo sapiens
gaagcgcagcgacggcgtcgggagagcgcgcctagccggctcgcgagcagtggagctactgctgtggttcaggcagccctatgcaaa

SEQ ID NO: 166925 - DNA, 75 bp, Homo sapiens
gacgctgctgggtccgctgagcggggcgacccgaggttgatatccctgaaagtacttaatagcatcgtgctgttg

SEQ ID NO: 166926 - DNA, 82 bp, Homo sapiens
ggtgccactgctgccgtgtacagtgctgcgattctggagtacctcactgcagaggcccggaggctgtttgatgtcctgcacg

SEQ ID NO: 166927 - DNA, 75 bp, Homo sapiens
cgtcgctgctggcacttcaggctctggtaagcctgcccacggcagagattgattgcagcctggcagagtacattg

SEQ ID NO: 166928 - DNA, 96 bp, Homo sapiens
atcttggagaaaaagtgtcccaggaactgaaagagcctctccataaagcattgcaaatgctcctgagccaagagtcaagtacctgctgaccccaag

SEQ ID NO: 166929 - DNA, 90 bp, Homo sapiens
gcttgggagagctcctgggccacccctcctttcaggtcaagctggctggaggcgtgatcctgggtgtggccctgtggctccgccatgacc

SEQ ID NO: 166930 - DNA, 101 bp, Homo sapiens
gtgaattttccccccaaactgcaataagccgccttccaaggaaagatctaggagagagggagaaattgatgctgccagaaagaggggacagttacagaagc

SEQ ID NO: 166931 - DNA, 100 bp, Homo sapiens
gggcaacttctgaagacttcaacaaggacacttcacggccatggtatggaagaacaccaagaagatgggcgtggggaaggcgtccgcaagtgacgggtcc

SEQ ID NO: 166932 - DNA, 100 bp, Homo sapiens
ttaacagacaagacacttttcagaaagacagaaccaacgaaacgtatgctttccttccaagggttagctgagttggcacatcgagaatatcaggcaggag

SEQ ID NO: 166933 - DNA, 100 bp, Homo sapiens
cttttactttgccggtagaacacagttatgggtcgcaagaagaagaagcagctgaagccgtggtgctgggcttggcaactcttgtgaaatttcatagatc

SEQ ID NO: 166934 - DNA, 100 bp, Homo sapiens
ggtttccaagcaacaatcagtgctccacacatggttccaattgtggacaagataaggaccattgctcaggctgtctatggagccaaagatattgaactct

SEQ ID NO: 166935 - DNA, 75 bp, Homo sapiens
aaaatggcgattctgcaaccaagcacctgaaacagcagaacactcgtgaaactgctcaggccatcaagggtatgc

SEQ ID NO: 166936 - DNA, 83 bp, Homo sapiens
gaagtatgttaatttcatggtacatgagtggctatcatactggctattatatgtgaaacgctgcagtattttgatttggtcag

SEQ ID NO: 166937 - DNA, 107 bp, Homo sapiens
gattcgcgctgctgggcacccacggagcctccggggctggtgcccgtggttgacacgagctgtgtccccagctgttcccgtctacaatggcatcatcttcctctttg

SEQ ID NO: 166938 - DNA, 117 bp, Homo sapiens
gtctccttagactcctcttggctgtgacagtttctcagacttttgttcttgaggagtactgatcagtcccagggcctgattggttcagcaccaagtgaagtcatagtcactatggtg

SEQ ID NO: 166939 - DNA, 98 bp, Homo sapiens
gggtttggtagagtgacttctattcactaaaaccatgtgtctgaactgaagaagcttgggctcacttccacaaatctgccactgcagagccccgccat

SEQ ID NO: 166940 - DNA, 100 bp, Homo sapiens
atttgctacagcatcccacattaagtcaacggtgtcagttgtacccgaggcgttctcagcagcagcaagtacctgtggtggatttccaggctgaactgag

SEQ ID NO: 166941 - DNA, 50 bp, Homo sapiens
caacaccgttcccccagccgggctgactgtgccctgtccacggtgcctcc

SEQ ID NO: 166942 - DNA, 82 bp, Homo sapiens
aagtggacaagttcaaggccaagttcctgacagcctggaacaacgtcaagtacgacgcaaacatgcagatctttgtgaagac

SEQ ID NO: 166943 - DNA, 82 bp, Homo sapiens
tctgtcttcggtggactccttcggcagtccacccaccgccgccgcctcccaggcctgtcctcctcggtacacatgctgtccc

SEQ ID NO: 166944 - DNA, 75 bp, Homo sapiens
ggcctggctgctgcctactacagcggagacctgtactccggctggttggcagcagcccttggtaccaacctgcag

SEQ ID NO: 166945 - DNA, 75 bp, Homo sapiens
cagcagtacaactatgcctacccctacagctactactatcccatgattgcccgtgaggcagaggctgccatctac

SEQ ID NO: 166946 - DNA, 101 bp, Homo sapiens
tgcagtccgactccgaggacggggaggaggaggaggcggcgcccgcggacgcaggggcgttcaatggccaaatttgagtttcatcatggtgactatgaaaa

SEQ ID NO: 166947 - DNA, 82 bp, Homo sapiens
cgagacggcgatccgggcgctcgagacttaccagagccacaaggctcgggacgtgtacgaggaggccatccggacagtgatg

SEQ ID NO: 166948 - DNA, 89 bp, Homo sapiens
cggctgcccttcaagtaccagaggttctgggggaagagaagctgaaggagatactgaaggagcgggaacttaaaatttactggggaacg

SEQ ID NO: 166949 - DNA, 100 bp, Homo sapiens
tctgagctcactttgtgcactgaggtggtgaaaacaggaatgagaacgaggagtcaacctcaaaggctgaaacctcggaagattcagcatcacgcgggga

SEQ ID NO: 166950 - DNA, 75 bp, Homo sapiens
cgaagtacaagatctaaggctcttgtctgggtgctgataagactgtgaaaggcccagatggactgaccgcctttg

SEQ ID NO: 166951 - DNA, 50 bp, Homo sapiens
ggagtcttccatcaatcatatctcacaggaagggaacctgattggattac

SEQ ID NO: 166952 - DNA, 88 bp, Homo sapiens
gatcttgcacaggaaggaattaaagacatcccagttaccagtgtccttgaattgatagtggcttctgtttgtcagtctcatataagaa

SEQ ID NO: 166953 - DNA, 83 bp, Homo sapiens
aatgaaatcttccaagtccaaggatgtagcactacaaacaccactggtttcccgaaaagccgtccaagggctccggctaccgc

SEQ ID NO: 166954 - DNA, 75 bp, Homo sapiens
ctgcgcttggggatcctctgtacgcccgttcactggaatgtggttcctgttttaacgtagtacatgtcaggtaaa

SEQ ID NO: 166955 - DNA, 105 bp, Homo sapiens
gccggcgaaaggagctggtgcctgtgcaagttgttgagggtcctgtattaataggaagttcacatggtggtgtcaacattgaagatgttgctgctgagtctcctg

SEQ ID NO: 166956 - DNA, 100 bp, Homo sapiens
tgcatctttgacaagtttgagtgttgctggaacggttcggatagggaaaggtggcccagacagcgtgtatgtcagcttgcaagcatttagccacatcctt

SEQ ID NO: 166957 - DNA, 100 bp, Homo sapiens
caaagacacaaagagaaaaaaaggtctgcaagagaagaacggaaacgaaggcggaaaggatccaaggagggagttgcaggaagcagagaggttcagcaga

SEQ ID NO: 166958 - DNA, 107 bp, Homo sapiens
catgtgaactgctggcaggctgccttccctgacccccagttacgcctggaatatgaaggcttccccgtcccggtgaatctggattgggaaagtcgacattaatcaac

SEQ ID NO: 166959 - DNA, 83 bp, Homo sapiens
gcacctgcagctggcgcctctgcagtgggagatcctgaaggagctagacgagtgctacgagcgcttcagtcgcgagacagacg

SEQ ID NO: 166960 - DNA, 100 bp, Homo sapiens
gactggttgatcagcagattggaaagactggaagcttcttcaggttgtttttgagcacgttcactctcgcagtgtcagctggggctgttttgcttttacc

SEQ ID NO: 166961 - DNA, 50 bp, Homo sapiens
gtggataccccagaatgaccttctaggcacctatgatgttgagacaagtt

SEQ ID NO: 166962 - DNA, 50 bp, Homo sapiens
caagatctaggaagacggctacaaatgatcttgctagaagagcactggag

SEQ ID NO: 166963 - DNA, 100 bp, Homo sapiens
gaagaggagaggaggatagcagcagaagagaagaagaagcaggatgaactgaaacggattgccagagaattggcagaagcaattggtgctgaaaattcag

SEQ ID NO: 166964 - DNA, 83 bp, Homo sapiens
cgggcgccgctggacgctggtggggactcgctctcggcttgaccgcattcttcctcccagcaccagaaatgtcagcagcccag

SEQ ID NO: 166965 - DNA, 90 bp, Homo sapiens
gctctggcccagatgaagccttacagcagatgtgttcagagcaacattgttttgttgacacaagcatttagaagaaagtttgtgattcct

SEQ ID NO: 166966 - DNA, 90 bp, Homo sapiens
ggcgcgggagcagcacttccacagccaagtgcgggagtccacgaatagcctaacatggcagaccagagacagcgctcactgtctacctct

SEQ ID NO: 166967 - DNA, 100 bp, Homo sapiens
caaagtgttaatccaggcctaaagacaagtgtcatagagacgtcagatcgactggaccgtgaatcgacctcccattattggctaacagtctttgcaaccg

SEQ ID NO: 166968 - DNA, 83 bp, Homo sapiens
cttggtgaaacctcatttagtaaagattgtagaaggcatgaaacaaaaaatgtggagtattgaaaatattgccttcggttctg

SEQ ID NO: 166969 - DNA, 100 bp, Homo sapiens
agccgcctccaccatgccgccgaagttcgaccccaacgagatcaaagtcgtctctagtgatccctgaaaagttccagcatattttgcgagtactcaacac

SEQ ID NO: 166970 - DNA, 80 bp, Homo sapiens
tctgggtcctgcatttggccaccaagacctgggaacaagtcaaggcgtctctggccgagcctctttttgtggaaaacgac

SEQ ID NO: 166971 - DNA, 50 bp, Homo sapiens
gctggagaatatttcctagtgcatttgatgaagcaattgctgaattggat

SEQ ID NO: 166972 - DNA, 73 bp, Homo sapiens
attcctgggaagaaatacagcagagacttttaacatattaataaggcagcggaaagaagaaatatgaatacgg

SEQ ID NO: 166973 - DNA, 100 bp, Homo sapiens
ccccggcctggtcctggccccggagctgttgctggacccctggcaggaacatgaacgattggatgcccatcgccaaggagtatgatccactcaaagcggg

SEQ ID NO: 166974 - DNA, 100 bp, Homo sapiens
ctgacatcgaaaacccggacctcgcttacctgcatgctggtggaagcagggaaaggcctggagatgaggaagctggttctctcggggttcttggccagcg

SEQ ID NO: 166975 - DNA, 100 bp, Homo sapiens
gattgctgtgtgaaaaccgagctgctgggagaagtgatgatgacagcctcttcatctatgactgcagtgctgcagaaaagaagtcacaagaaaataaagg

SEQ ID NO: 166976 - DNA, 90 bp, Homo sapiens
atcactgaaaactgccatctatcgaataactactacatttggtgaacatctgaagtcacctagaccccaggccacgtatgtgaacggcag

SEQ ID NO: 166977 - DNA, 74 bp, Homo sapiens
tacgccctcatggggaaaatctccccggtgactttcagggggcaatggcggcttcctgtgttctactgcacact

SEQ ID NO: 166978 - DNA, 100 bp, Homo sapiens
agccgaccttgagctccaggagttcgtctcttacgtctgcggaagtgcagctgcctcagttcttagcgcagttgctctaggtcgtaaccagcctttgaaa

SEQ ID NO: 166979 - DNA, 100 bp, Homo sapiens
gggaggctgagctggagagcccagaggtggtggcagtggtggtggtggccgaggaggatttcccagtggaggtggtggcggtggaggacagcagcgagct

SEQ ID NO: 166980 - DNA, 75 bp, Homo sapiens
gtggtgaatcccctgtttgagaaaaggcctaagaattttggcattggacctgatcccaaccttgaagaaagtcct

SEQ ID NO: 166981 - DNA, 75 bp, Homo sapiens
accctaaaaatggcgattctgcaaccaagcacctgaaacagcagcaaacaaagctctcaagttggtgatcctcag

SEQ ID NO: 166982 - DNA, 74 bp, Homo sapiens
tggcatgtgccttatgaccctcgtgggtgatggcaccacctcagtgaccttgctggctgcagagtttctgaagc

SEQ ID NO: 166983 - DNA, 98 bp, Homo sapiens
aagggaaattttctacagataccaaaggaaaaccaacttctcggacacaggtggtggatgcccggagcataccagtgttagcaaaatggcaaaattca

SEQ ID NO: 166984 - DNA, 80 bp, Homo sapiens
accctggagcctcagttggaagcagccgatccagcctgcggagcctgtggggcagatcacaaaatttgtccaggatagac

SEQ ID NO: 166985 - DNA, 75 bp, Homo sapiens
tctgctcagattgaggaaacaatggaagagaatgttggctcaattaagaaacatcagggagataaattcaaccca

SEQ ID NO: 166986 - DNA, 90 bp, Homo sapiens
gcagacgctgtgctcgctggcaccccgaacgggttgcttcccccgctgcgaggtactccaaagattcaggtttactcacgtcatccagca

SEQ ID NO: 166987 - DNA, 51 bp, Homo sapiens
agggcgcctacggcatggtgtggtacaaagaattttacgtgaaagattttg

SEQ ID NO: 166988 - DNA, 100 bp, Homo sapiens
ctccaggttaggccgagctttgcgggaaagcagcgcaggtattaatctctggagaagacacatccacagttagcactttcttcagatgctgacgctcggt

SEQ ID NO: 166989 - DNA, 100 bp, Homo sapiens
tgtcgctgccctcggggctgctggagctctgcgcgctgctgggcgccccccgggacagtctccgaagtctcgagcagtcaaacgcttcagagaaccaaag

SEQ ID NO: 166990 - DNA, 50 bp, Homo sapiens
caccactgaagtgaccgaatgagtaatctcaggggcgatataatcaatga

SEQ ID NO: 166991 - DNA, 90 bp, Homo sapiens
gacttaggctgcacatcggaggaaaactcgccactgaggcggctcccagctgcgttggcgacatggccgacacccccagagatgccgggc

SEQ ID NO: 166992 - DNA, 82 bp, Homo sapiens
ggtgatgaagagttggattctcttatcaaggctaccatagctgggggtggacagtcattttgtttactcattcagccctgtt

SEQ ID NO: 166993 - DNA, 52 bp, Homo sapiens
ccagtaatgtcccggcggatatgttagtgtgactctggatccagatacagct

SEQ ID NO: 166994 - DNA, 75 bp, Homo sapiens
gatgaaatcaacaaagcctttgaactgatgcattctggaaagagggacagtggccttagagctattgagaatttg

SEQ ID NO: 166995 - DNA, 137 bp, Homo sapiens
tgtatatgccataaaaaatcattactggtaccagatgtacatagatgatttaccaatatgggattctggctgtgactcagtcactgacactgagcctgaggacgagaaggttgtttcctactcgaagcagcagaacc

SEQ ID NO: 166996 - DNA, 50 bp, Homo sapiens
ggaggctcccgggcttgcgtggaccttcacggcatggtgcaactcccacc

SEQ ID NO: 166997 - DNA, 96 bp, Homo sapiens
gaagaggtgagggcggtcgtcagctaagggccccggggctcgcggggggtgcgcagggcagggagctgggacagatgatcataccctcatcagagt

SEQ ID NO: 166998 - DNA, 90 bp, Homo sapiens
ttagattatattcgcaccacgttttttcatcatgttgggcccatgagatgtgtgctctgtatattccggaggtacaatttgccagtgttt

SEQ ID NO: 166999 - DNA, 100 bp, Homo sapiens
ctcgaggttgcaggactctttctgttcaggccagaccctctgggagcttctcagccattttccacagatcagaagtcggccagagcagcatgtggatctc

SEQ ID NO: 167000 - DNA, 100 bp, Homo sapiens
gaaaagatccctggaatatgaagagacacagtatggtagccacacccccaggttagcatggcctcattgaaagaactagatcaaagactctttgaaaatt

SEQ ID NO: 167001 - DNA, 75 bp, Homo sapiens
ttgcgggggggaagtgactgggcggtgccggcgccggagacgatgccgttggctcattgtcatccccaagccagg

SEQ ID NO: 167002 - DNA, 82 bp, Homo sapiens
tgataacaccctgtaacagctgagccagaagcggactcctagaagaggggagcagcaaggatggaatgacagccgtgggccg

SEQ ID NO: 167003 - DNA, 100 bp, Homo sapiens
aattgatgctactcaggtggaagtgaatccctttggtgaaactccagaaggacaagatcttccaccaccaccagatcccccgccaggtcagggtttaagg

SEQ ID NO: 167004 - DNA, 100 bp, Homo sapiens
acaggaaagccgctggttgtgatggtggctatgacaaaccttcagcctgaagacccgggagggaaaaatggatcagagaaggctgaagaaggtggagaaa

SEQ ID NO: 167005 - DNA, 100 bp, Homo sapiens
ctaactacaattgtattggcagctagagaggcaaagtgtttcatggatttcaaagctggaggcgccttatgtcacattcttggggctgcttacaagtata

SEQ ID NO: 167006 - DNA, 100 bp, Homo sapiens
cagccacaggaactagagacagcttgctttctgtcgtggcaatgttttgaaactggcaaaatcagctccggaccaaaatttaacagtgccatccgaggaa

SEQ ID NO: 167007 - DNA, 96 bp, Homo sapiens
cgggaccggagcttcatgcctgcaaagaggcaatctgaaagcaaatcctgtttagatgcaggcgaaggttcctggtgacccaggctctcaccttac

SEQ ID NO: 167008 - DNA, 126 bp, Homo sapiens
ctggacccatttatgaggaggtggcttatgaaagtgtgatgttcgcgtatttcttgacaggtgtacgtggttgggaatgaacctttaacagttttgatggattccctgcttccagtcctgggagtg

SEQ ID NO: 167009 - DNA, 73 bp, Homo sapiens
ctgggaccccggaatcccgcgcgctgcccacgattcgcttctgaggatttttttcccaggaagccatcccgtc

SEQ ID NO: 167010 - DNA, 98 bp, Homo sapiens
cgcggagaggaggctggaagaggaagatgcctagcacagaccttctgatgttggtccctggaatgcaggagattctgctcattggcttctaccaacct

SEQ ID NO: 167011 - DNA, 75 bp, Homo sapiens
ccctgactacagctggagcgcccagaggcgagccctggtggaggaagaggatcccggctactcaacagaaatgaa

SEQ ID NO: 167012 - DNA, 50 bp, Homo sapiens
gttgacaggagttgtgaagacttggtggtgttggtgaaaatttgactgac

SEQ ID NO: 167013 - DNA, 90 bp, Homo sapiens
tgcggttcgggtccaagatgatgccgtgttggagtttccagatcaaaagatgtgccaccatttggcccaccgattcccaaaggtgtaact

SEQ ID NO: 167014 - DNA, 89 bp, Homo sapiens
accttcagtcctggctctgacaagccctccaggtgttgacagctcttctaccacaagcagtgcttctccaatgcccaacagttatgatg

SEQ ID NO: 167015 - DNA, 100 bp, Homo sapiens
cctgtcaagatgtggcacctcaaactttgtgcagtcctcatgatcttcctgttgctgttgggccagcccatggatgacagtctcattgcatttcgaacgc

SEQ ID NO: 167016 - DNA, 75 bp, Homo sapiens
gccgctgtttaaatcctgctggacaggtggcagtgctccttttggacttttctctaggtttggcgctaaactctt

SEQ ID NO: 167017 - DNA, 50 bp, Homo sapiens
tcccgagcagctgggactacagattgagtggggagcttgtgcacttgttc

SEQ ID NO: 167018 - DNA, 97 bp, Homo sapiens
aattgcttggattagaatatgccggccaggctctattataggaccccagcagcacttcctggaagaacagagtctcgttctgtcacccagcctggtg

SEQ ID NO: 167019 - DNA, 80 bp, Homo sapiens
cccattttcttttttggaactcatgagacaagccccatgtgccactcccctgatctgcagcttcggtaggccggtggacc

SEQ ID NO: 167020 - DNA, 75 bp, Homo sapiens
ttggtctcagaggagcatcgctggggcctttgaactggccacaggtgactatttgtttgaacctcattcagggga

SEQ ID NO: 167021 - DNA, 75 bp, Homo sapiens
ggtggaagctgggccagggattgggaaaatctcttcaggtttgaagaaaacaggtctgaaacaaggtcttacccc

SEQ ID NO: 167022 - DNA, 100 bp, Homo sapiens
gttcagactcttggagccagaagctacatgacccctaaacgtgcaatgcgtgttttactatctaaattaccaagaccatggattgtggatgagaagaaag

SEQ ID NO: 167023 - DNA, 100 bp, Homo sapiens
tcgctacgcatttcggatctggaaacctctagaacaagttatcacagaaactgcaaagaagatttcaactcctgacccagatgatgtggtaccagttggc

SEQ ID NO: 167024 - DNA, 51 bp, Homo sapiens
cggcagcgtcccggacgaggaggctgaaggggatgctaagggagataaagc

SEQ ID NO: 167025 - DNA, 82 bp, Homo sapiens
gggaggcagagggaggaacctggacgccggaagccgggaaatgcccgagcgggaagaagttccgcagcaagccgcagctggc

SEQ ID NO: 167026 - DNA, 82 bp, Homo sapiens
ccgacctcgacgtcttgcctgtgtcccacttgttcgcggcctatagaaattattcttgacagaagtattttaaaagaaaaat

SEQ ID NO: 167027 - DNA, 100 bp, Homo sapiens
atggtgaacatgccaggagagcaatgcaaaaggttggcacagttaattatatgccaccagaagcaatcaaagatatgtcttcctccagagagaatgggaa

SEQ ID NO: 167028 - DNA, 100 bp, Homo sapiens
tcatgggccagacctcggtgtccacgctgtccccgcagcccggcagcggtcatgaatgaaaaacttcagcactgcatggaactaacagatctaatgcgga

SEQ ID NO: 167029 - DNA, 73 bp, Homo sapiens
agcttcgccaaggctggcgcagtcgaataccctctaccatctgctttggtcagggtgccgctcgaggatttaa

SEQ ID NO: 167030 - DNA, 80 bp, Homo sapiens
ggtagagtgaagtcctacagagttatcaggttccagaccctgccttctcttctgaaagatttttcggacgccgcccgata

SEQ ID NO: 167031 - DNA, 48 bp, Homo sapiens
gtgaccagtgtggaaacccaaaggtgaacttcacggtagaccagatcc

SEQ ID NO: 167032 - DNA, 131 bp, Homo sapiens
ggtgggccccaacttccgcgtcggcaagaagatcggctgcggcaacttcggggagctccgcctaggttcgtgctggccgtgggcagcgccgtctttgatgccatgttcaacgggggaatggccacaacatc

SEQ ID NO: 167033 - DNA, 73 bp, Homo sapiens
tgtgtcccgtgttttctgcgtgaggcagcacagcattctcagaagcagtctactgagctcttccagtgcatgt

SEQ ID NO: 167034 - DNA, 100 bp, Homo sapiens
ccctgcagagctggaggtgcaggcctcagagtgtgtcgtgtgcctggaacgggaggtctccaccagctcctggccgggttcgaggacaagtcagcctatg

SEQ ID NO: 167035 - DNA, 97 bp, Homo sapiens
gtgaccagttgggatggacaaaacccaccaagatccagattgaagctattcctttggccttacaaggtgactctgacatcattagaagcatgccaga

SEQ ID NO: 167036 - DNA, 135 bp, Homo sapiens
ccgacttgccggcagaacttacgctgcgggaccccgggcactgttgctgctgcgggagattcatgatgttgctatcaaaagttgagaaattgtcagaagaaatcatggagataatgcaaaatttaagtagtatac

SEQ ID NO: 167037 - DNA, 90 bp, Homo sapiens
ttaccaaaagagaggcaccgctggaacactaatgaggcttacagcttcgccatgggctgctggcccaagaatggacttctagacatgaac

SEQ ID NO: 167038 - DNA, 75 bp, Homo sapiens
tgcctcaggccagtcgcctccaggccaagagggatccttcacccgtgtctggttatggaaacaaaggacatgctt

SEQ ID NO: 167039 - DNA, 83 bp, Homo sapiens
cccctggatgggggaccacaagatcctcatcgacaggtgagttccaacaaattggttcaaaaagaggggggataaacacgctg

SEQ ID NO: 167040 - DNA, 89 bp, Homo sapiens
gaacctgtgtgagattctttttattgaagtggccccagggattgtcaatgaggcagatcagattccgatttgacgggcaaccaatcaat

SEQ ID NO: 167041 - DNA, 50 bp, Homo sapiens
acgagatcttccgccactacgagcctgtttaaagaagaaaacccgtatgc

SEQ ID NO: 167042 - DNA, 71 bp, Homo sapiens
gggcttttcctcctgagccatggaccttccccgggccgcgacctcggaagagaagccagattgctccaagg

SEQ ID NO: 167043 - DNA, 75 bp, Homo sapiens
caggaacagggcagacgttagcgtgagtgatcactctcaatcccgggtaatgtctcgctgggaagagtatatcag

SEQ ID NO: 167044 - DNA, 100 bp, Homo sapiens
cagaatgttaatgcttgatgggatgccggcagtcagagtcaaaacagagcttttggaatctgaacaagggttgatttggagcatatgcgaacaataaaac

SEQ ID NO: 167045 - DNA, 75 bp, Homo sapiens
caggtttttcctaagctcaactctagccagctaggttcctggtgctttggggtagagacggggtttcacgatgtt

SEQ ID NO: 167046 - DNA, 100 bp, Homo sapiens
ggtgattctgctggaaatcctgatcagctgcttagcttttcagccgcaactttgttagactttagaagacagctttccatcgacactaggccctttagac

SEQ ID NO: 167047 - DNA, 51 bp, Homo sapiens
gcggtgcctgccttcgctctcaggcaaacagctcactgtcctctggatctg

SEQ ID NO: 167048 - DNA, 75 bp, Homo sapiens
taaatctcaaagatctcgtacaagatccttctttttggcttcctgaggctcaggtagtccaaagagccctgaatt

SEQ ID NO: 167049 - DNA, 100 bp, Homo sapiens
atgtgctctgcgtgttgctggaggatgaaagtcctggacagacttatcacagagagagaagaaacgcaatcactatgcagccacagaatgtccaggggct

SEQ ID NO: 167050 - DNA, 100 bp, Homo sapiens
ccaccagagggaaagctggggcggaatttgaagcctacattaatgcttctggagaacatggaattgtggttttctctttgggatcaatggtctcagaaat

SEQ ID NO: 167051 - DNA, 75 bp, Homo sapiens
ggcgggagggggggtggtgcgcacgcccccgaggacgcagggcgaagctgtgctcaggcccgggctggacgcaga

SEQ ID NO: 167052 - DNA, 78 bp, Homo sapiens
ctgggcacccggctcaccgtcactctgacccagcatggagtctatattctgatcggagccggcgccctcatgatgctg

SEQ ID NO: 167053 - DNA, 100 bp, Homo sapiens
aacttcctgctctcccacccacgcctcagcaacagccacccttgaataatcacatgatctcacaggacccgtcgccatgggccgtgtgatccgtggacag

SEQ ID NO: 167054 - DNA, 90 bp, Homo sapiens
cgggtacgcaggggtgcctcaaccacactccgtccacggactctccgttattttaggagaagctgacgggtcgcctcatgctggccgtgg

SEQ ID NO: 167055 - DNA, 82 bp, Homo sapiens
gacggtgtggggcggtcccggccccgcagaaatgagccgtcagactgctacagcattacctaccggtacctcgaagtgtcca

SEQ ID NO: 167056 - DNA, 98 bp, Homo sapiens
ggatcctggttccgtccgctaggagtctgcgtgcgagatagactgggagctccatgaggtccgagacaacctgaagacgcccagctcagcagagactg

SEQ ID NO: 167057 - DNA, 100 bp, Homo sapiens
ctgtgaccctgggagattactaccagggccggaggattaccatcaccggaaatgaagactggcccatttgcagagcactccaaccagctgtggaacatca

SEQ ID NO: 167058 - DNA, 82 bp, Homo sapiens
acccctccaaaaacagtcctggacgaccacacgcagaccctctttcaggtctcggcgcggaagatggccggcggcgtggacg

SEQ ID NO: 167059 - DNA, 113 bp, Homo sapiens
aacaaatgctgctgctatgaatatgggtcgaccattccaaaaaaatcggtttctaagcatgaattgaggaacagaagaagcagagcagatgatcggagcagcatttgtttctc

SEQ ID NO: 167060 - DNA, 75 bp, Homo sapiens
ggctgcccaggctcgcctcgactccaaatggttgaaaacagatatacagaatccacattcatctcaatggaagga

SEQ ID NO: 167061 - DNA, 98 bp, Homo sapiens
acagctttgatcgatttctgggataagcctcttagcaaatatccggctgtgatcaatgatatttcattctggttgccctctgagaattacgcagaaaa

SEQ ID NO: 167062 - DNA, 98 bp, Homo sapiens
gtcaatgaggcagatcagattccgatttgacgggcaaccaatcaatgaaacagacacacctgcacagactgtcccaggtgccctccggctctttgtaa

SEQ ID NO: 167063 - DNA, 75 bp, Homo sapiens
agaacctggagcccaagtataaagaacttggcgagaaggcattcactcatacggcacaatatgatgaagcaattt

SEQ ID NO: 167064 - DNA, 101 bp, Homo sapiens
acgtggatatgggcgtctccagtgtgagggagaagtatgagcttgctcacccaccagaggagtggaagttctcctgaaaagaaagctgaacattcatctat

SEQ ID NO: 167065 - DNA, 50 bp, Homo sapiens
tccctaaactagcagtttagggtgtcagatcttcagtttagatcttggag

SEQ ID NO: 167066 - DNA, 83 bp, Homo sapiens
cccgacgcgactgggcccctcagaacaccttccaccatgaccacctcagcaagttcccacttaaataaaggcatcaagcaggt

SEQ ID NO: 167067 - DNA, 99 bp, Homo sapiens
ctttatcgaacttaccctgaaggccgagcagttttaacaggttttgaaactaataacaaatatgaaattaagaacagctttggacagagggtttacttt

SEQ ID NO: 167068 - DNA, 98 bp, Homo sapiens
gtcaaggtggcctaccaggaggccaggggtgtcgccatgcaacacagtcactcctggcggcaaaccaaacaaaaccagagtcatctggggaaaagtaa

SEQ ID NO: 167069 - DNA, 90 bp, Homo sapiens
cttgaagggattacaccaaatatacagttgactatagtcaatggggccaatggagccaagtgtatggaaacccacaacagtatggacagt

SEQ ID NO: 167070 - DNA, 75 bp, Homo sapiens
ctttaaaaagcagtgggctctggaacaacacggtgttcatcttttctacagaagatgctgtggacaattatcgag

SEQ ID NO: 167071 - DNA, 100 bp, Homo sapiens
cccagagctccgatccctgcgcgggctcgagagctcgccccgaacgggggtcttcctcctccgccgttgacagactatggaaatgatgttagacaaaaag

SEQ ID NO: 167072 - DNA, 100 bp, Homo sapiens
acggaggagccaggtccctgtctgagccagccggagctattgggagtggcggatcctcccaccccagccggatctgggccatggccgagcctggagaggg

SEQ ID NO: 167073 - DNA, 100 bp, Homo sapiens
ctatgaaaacatgaaaaggactttaaatgacgttttccaccaccaaggaaacagccacctagccaacgaggatgctgtgttcctgaagaatgaggctcag

SEQ ID NO: 167074 - DNA, 106 bp, Homo sapiens
ctcagatctgtggagcagatccgatggagaggctgagctgctccaggacttgggggggatatgagactttctactcggaatatcctgagtgttgcgtggatgtaaa

SEQ ID NO: 167075 - DNA, 50 bp, Homo sapiens
tccaaaggacgcgaccataactctaaaagattggcccccgccgcatccac

SEQ ID NO: 167076 - DNA, 100 bp, Homo sapiens
gagcaagtgtgcttgcagtagatgaaaatggacatctggaggacctgttgatgctagttcagagtatcagcaagagctggagagggagctttttaagctc

SEQ ID NO: 167077 - DNA, 75 bp, Homo sapiens
agccggggcgccgggagctattgggacctgcggggaaagattttcaagggagcaaacttaaagtctcccttgctc

SEQ ID NO: 167078 - DNA, 83 bp, Homo sapiens
cttgccctcatcctggttctggaatcctcagttcaagctcccagatggacgtatcatcaaagttgggggagagagatttgaag

SEQ ID NO: 167079 - DNA, 101 bp, Homo sapiens
acgctcgtgctcatctcctactgtcccacggccaccgaagagcagatcgacccatctgagcaaaagactctggccaatctaccgtggattgtggagccggg

SEQ ID NO: 167080 - DNA, 89 bp, Homo sapiens
tgagcaagctgtatgcatccaaagcacacatgaactcagtgctcatggggatgaagaaccagctcggccaagatgctgaattatcaggg

SEQ ID NO: 167081 - DNA, 100 bp, Homo sapiens
gaactcactccattgggtatattttataacaacagggtccattcaaattttaagaggcgtagaggctccggtgttttttgtgccaattgcctgaccacaa

SEQ ID NO: 167082 - DNA, 76 bp, Homo sapiens
aaagattctgtcactagtccagacatggatgaaataactcacggtggtttcagacaccctcacaggttttctacca

SEQ ID NO: 167083 - DNA, 88 bp, Homo sapiens
taaaagagacctctacttagctcagcaattcttaccttatactccactatgagctactggccattcgtgatgcctgcatcaaactgga

SEQ ID NO: 167084 - DNA, 100 bp, Homo sapiens
gagaaccagtaccggctgacctcgctgtacgccgagcacccaggcgactgcctcatcttcaaggtgaagccaaaaaccttccctcttacccggggccgag

SEQ ID NO: 167085 - DNA, 100 bp, Homo sapiens
aaggatgccactgacccagtttataaaactgtcacttcaagtacagaaaagggcttgattgaagtgtgatggcaccttgtccaccctgtcgtgattattc

SEQ ID NO: 167086 - DNA, 75 bp, Homo sapiens
ccgcgaccactggcacattcttgctgacaggcagcgagtatgacgaggaggaggtggactatgaggagtcggaca

SEQ ID NO: 167087 - DNA, 113 bp, Homo sapiens
ccgggaggaaggaacgaggcaaggagctaaagcagcgtgcgttcagccctgggatcagaccaaacattgtctggcttgcactgtaaaactagttagctgaagacgacttctca

SEQ ID NO: 167088 - DNA, 82 bp, Homo sapiens
ctggccctggtggggattgacagccacgggaaggtttggtgcacctcgatttggaggaagtagggcagggcccttatctgga

SEQ ID NO: 167089 - DNA, 100 bp, Homo sapiens
ttcggccatgagccgctacatactcatcatggggctcctgtacaagactcggtgaaatacctggagtgctcagctctcacccagagaggcctgaaaaccg

SEQ ID NO: 167090 - DNA, 100 bp, Homo sapiens
tcagccgggtgctgtgcaagcggtgcgatgggaatttcttagccataggctcacatgacaactgcatctatatatatggcgttagtgacaacgggaggaa

SEQ ID NO: 167091 - DNA, 74 bp, Homo sapiens
atggctgatgcagcaggcatcatccgctatgcaattgggctgctgtggcaccgcgcccagtatgagccgctctt

SEQ ID NO: 167092 - DNA, 100 bp, Homo sapiens
ctcccaaggtgctgggattacaggctgcaagggagacgaatgtgtctgaggctcaggggtaagaaagtggttaaagacaccgaagacagagatgtgtgat

SEQ ID NO: 167093 - DNA, 100 bp, Homo sapiens
agaccaagtacctgcagatcctgacctctctgatgagatggatcggtacaatgactcttcttgcttttcacctaagttgaataagcaccctgtgcacttt

SEQ ID NO: 167094 - DNA, 75 bp, Homo sapiens
cctgggtgtgtgcaaatacactgtccagatcgccacatcacagaatcgtatctatctcacagctgacaaccttgt

SEQ ID NO: 167095 - DNA, 75 bp, Homo sapiens
tcctgctgttcccagaagcgaagtggagagcgccagagtaatggcatgggtggtaaagtaccacctgctactcag

SEQ ID NO: 167096 - DNA, 88 bp, Homo sapiens
aagaggcactgctgagggggcgcgaggggaacggaggccagagctgcgattttggaggcaacatcaacgtggagaccatcagtgcctt

SEQ ID NO: 167097 - DNA, 110 bp, Homo sapiens
ccgacttcgatgatcgtgtgtcggatgaggagaagagaatgtggtcttttgcaaaatgaaaaggtaagagaacgaagctcagtaacacaaactccaattctgttcccttg

SEQ ID NO: 167098 - DNA, 98 bp, Homo sapiens
ggaggatcgcggagtcccaatgaaacgggcagccatggccctccacagcccgcagacttaattcagtgcacaaatgagatgaatgtgaacatcccaca

SEQ ID NO: 167099 - DNA, 98 bp, Homo sapiens
caatcagtttctcaggggtaaggaagaatccagtgaaaagttcaggcaggtggaaaagagtactgaggaaatgggtcctgatgaatatgaagagatgg

SEQ ID NO: 167100 - DNA, 133 bp, Homo sapiens
ggaacagtcagaatataaaaaggaagcagcaggacacgcccggaagccctgaccacagagacgcgtccagatgagcccatggattccacaatggatgatgctgttgcgggtgactttgcattgataaataaac

SEQ ID NO: 167101 - DNA, 100 bp, Homo sapiens
tagagccagagcagaagatgggcagagtctgcatgtggctgcaggacctctgtcagagaatgaaacactcatcgcatgacaatacaatggtgggtgaaga

SEQ ID NO: 167102 - DNA, 74 bp, Homo sapiens
gtacagatctctgcagttacaggaacatcgtctgcttcatgaatgactgatggatactcaggaagtgacctaac

SEQ ID NO: 167103 - DNA, 129 bp, Homo sapiens
gccgcgctcttcttcttttctctctcgtcctcgctgctgtacttcgtctatgtggcgcccggcataggcaggatgacgcaaaacacggtgattgtgaatggagttgctatggcctctaggccatcccag

SEQ ID NO: 167104 - DNA, 98 bp, Homo sapiens
tgactcttatcctgcccgccagttccaagggtttctaactttttgtcttggaaaggaaaaccactacctctgcaagctttcttcctggtggcagatga

SEQ ID NO: 167105 - DNA, 100 bp, Homo sapiens
cgacgagctcagcaacatcgctatgcaggtgcggaagctggtgggcactcagcaccctctgcttaccacagccagacatgtcatgctgcccaaggacata

SEQ ID NO: 167106 - DNA, 51 bp, Homo sapiens
cctgagaccaacccccggccaggcagtggcttagtgaaagtaatgacactt

SEQ ID NO: 167107 - DNA, 75 bp, Homo sapiens
gggtcttccagaaggctgtagaccagagtatcgagaagaccattgacttcctgaacgacaacattcgaagaggaa

SEQ ID NO: 167108 - DNA, 82 bp, Homo sapiens
gagagccggacgggcactgggcgactctgtgcctcgctgagggatggtgctgctccactggtgcctgctgtggctcctgttt

SEQ ID NO: 167109 - DNA, 82 bp, Homo sapiens
gcgttggtgcaactgcacaacaacgaggcgggcaggctgagtcttttattcaaaacttcagcgttctctatagtcccttgaa

SEQ ID NO: 167110 - DNA, 90 bp, Homo sapiens
gtacaggcgcgcgcttggctgtcgcctctgccgctgtgtttgggaggactcgaactggcgccaggcagaggtggaggagacactgaagcg

SEQ ID NO: 167111 - DNA, 75 bp, Homo sapiens
gcgcccgccagctgctccggagatacgctctaatggtaccaagtgacaggttggctttactgtgactcggggacg

SEQ ID NO: 167112 - DNA, 131 bp, Homo sapiens
ctggagtctgcgaaggccgggacccggttccccggcccacagtgggggtgtgcaaacccgagagaactggagcaatgttgatcccagggatgatgtatttggatatcctcaacaatttgaagataaaccag

SEQ ID NO: 167113 - DNA, 100 bp, Homo sapiens
caaaattgataagtgtgcttaaggtacatcaggaacgtctctatcaagaatacaatttcagcaaggctgagggccatctgaaacagatggagaagatata

SEQ ID NO: 167114 - DNA, 74 bp, Homo sapiens
cctgatcgccggcagtgctggggccgcgccacttccgcaaacaggtgcaggctgtgcacacggggatgcgagcg

SEQ ID NO: 167115 - DNA, 100 bp, Homo sapiens
gctgccgccgaacgacaggacgttggggcggcctggctccctcagaaatgaccatggttgacacagagatgccattctggcccaccaactttgggatcag

SEQ ID NO: 167116 - DNA, 82 bp, Homo sapiens
cggaagatcgggagcgggtccttcggagatatctacctgggtctaacttcaaacttgtggctgttaattcaaaactctatgc

SEQ ID NO: 167117 - DNA, 101 bp, Homo sapiens
gcccgatatgctagcatcaatgcacatcttggtattgagcagaggactactgttcgaagatttttggaagaatactgagaacggcataaagtgaagatcga

SEQ ID NO: 167118 - DNA, 100 bp, Homo sapiens
atacaaatgttgccactgctgttttagaacatataaagatggattcttgtattgaagcctttggtaccaccaaacagaagcgagctctgaacaccaggag

SEQ ID NO: 167119 - DNA, 90 bp, Homo sapiens
caccttgaagcagaggagcagcaggaccaggcagctgacaccctagctgtacgccagaagcggcggatttacgacattaccaatgttttg

SEQ ID NO: 167120 - DNA, 98 bp, Homo sapiens
gcgaagctggccgagcaggctgagcgatacgacgtaacaaatgtggcaattattttggatctatcacctgtcatcataactggcttctgcttgtcatc

SEQ ID NO: 167121 - DNA, 51 bp, Homo sapiens
taggaccacccaccatgcctatccaggatggatggcaagcggcggccaggc

SEQ ID NO: 167122 - DNA, 83 bp, Homo sapiens
tgatgagcgccttaaggatctctttggcaagtttgcccaagaagatgaaaggattgttcttgttgacaacaaatgtaagtgtg

SEQ ID NO: 167123 - DNA, 75 bp, Homo sapiens
aagcagaaagtagatgaagatgagattcagaagatgcacatgttggcagataaattgaacatgactccagaagaa

SEQ ID NO: 167124 - DNA, 100 bp, Homo sapiens
ctggcatattagcgctagccctgcagacagaggtgtgctgacgacctgctacaacagaaacatccccgattgaaagaaccagagaggctctgagaaacct

SEQ ID NO: 167125 - DNA, 75 bp, Homo sapiens
agaggaagcccgctgccttgtggaggagttgagaaaaaccaaggtttaattagacacttcagaattttgatcacc

SEQ ID NO: 167126 - DNA, 100 bp, Homo sapiens
actactccccttcctaaggccgccgcttaccccggggtctatggaagtaatggaaggacccctcaacctgttgttggaattggaagcggaacaaaaatgt

SEQ ID NO: 167127 - DNA, 95 bp, Homo sapiens
aaatgctactatgactcttcctggaatacacccacctaccttgaaccaggacttggatgttgtgggtgatggtatgcagtgtcctccttcacctt

SEQ ID NO: 167128 - DNA, 98 bp, Homo sapiens
acccatccatgggaagccctgctactgctggattagcgccaggatctcatagatcagaacatactggagcctgtaacccgtgcacagagggtgtggat

SEQ ID NO: 167129 - DNA, 100 bp, Homo sapiens
acgatcattctgcaagcaggcaacctgaatacaggtaaaacttccttttcctgtagatcaaatcacagatcttccaaggaacgatttccagatgatgatt

SEQ ID NO: 167130 - DNA, 95 bp, Homo sapiens
ctggtggggagatgaacccaacctagtgggtgtaatacatcatgaactgcaggcttcatcactggtccagctgtaataccagggtacttctccgt

SEQ ID NO: 167131 - DNA, 75 bp, Homo sapiens
ttacagagaaagactatgaaatacttttcaaatctattaatggaatgtttctccatcccagagagatgaagtaat

SEQ ID NO: 167132 - DNA, 101 bp, Homo sapiens
aggttggagatgggaccacatcagtaattattcttgcgtatctgtgaggtctatagccggaaccccgccagcctactggaagagcagatcgaaggtgcccg

SEQ ID NO: 167133 - DNA, 95 bp, Homo sapiens
tgaaggacaagtacaagttagaactctttatctttctgtggatccttacatggtggtgttatcaaggagaagaaattcctgccttgaccagatgt

SEQ ID NO: 167134 - DNA, 100 bp, Homo sapiens
ctggcacgtcacttccgactagtggagtttttagccttttaacattcaaggattagaatcagtcggatttgtcagatgaagagctaaatgatgatctttt

SEQ ID NO: 167135 - DNA, 90 bp, Homo sapiens
ccccgtcccgaccctggccgccccgagcggagcctggaggtgatcagaggactgctgaaattttggccaaaaacctgcagtcagaaagag

SEQ ID NO: 167136 - DNA, 75 bp, Homo sapiens
atgggtcctcagtggtggttgaaaactgtaattgaacagggttacacatcattttggaatgactgtatatcatct

SEQ ID NO: 167137 - DNA, 50 bp, Homo sapiens
atagcattcgcctactccgtgaaggtctgcagggaactggccaggcaagg

SEQ ID NO: 167138 - DNA, 50 bp, Homo sapiens
cccagacaggtggcgacggcagaggactaaagcttgctttcactctggac

SEQ ID NO: 167139 - DNA, 100 bp, Homo sapiens
gggacactcacccaggacacactatggtgcttcagccaagtgaaaggcactatcgagattggaaccacagaagttcagctgcagctcagtgcggaaagcg

SEQ ID NO: 167140 - DNA, 50 bp, Homo sapiens
ccacaaggcaggcctcttccgaccaaggaccatggccaacctggagcgca

SEQ ID NO: 167141 - DNA, 105 bp, Homo sapiens
gagcagggccttggaccccgcggcgcccctcggcctcggagcaacgagcgcagcgccggtgtcgtgaaaactacccctaaaagccaaaatgggaaaggaaaagac

SEQ ID NO: 167142 - DNA, 82 bp, Homo sapiens
gtgacccgggtgccgaggagcgggaagagttgctgggctgtggcggggccttcgtgggcccgcgatgccaggaccccaaccc

SEQ ID NO: 167143 - DNA, 100 bp, Homo sapiens
ccgagatgccgggggagcggggccttccacaccccctccgtgggtgtgtggctctgacgcccgctctgcggcttcggtgtttgaacaggccacagtccag

SEQ ID NO: 167144 - DNA, 100 bp, Homo sapiens
acacccccagctacatccgaggaggttctaggacctgctacgagactgtgccctgtccacggtgcctcctgcatgtcctgctgccctgagctgtcccgag

SEQ ID NO: 167145 - DNA, 83 bp, Homo sapiens
gctgcgctggcgcggcttttggcggcctttctgctcctcgcggcccagaaagaagatgctgatatgctacaacacggatgaac

SEQ ID NO: 167146 - DNA, 100 bp, Homo sapiens
gccggacgcctccattgtttgaccacaacaagggccggattctcacccagagttgtctgatgtcctgtgggccatgctgatgcgcgtgggcctccgcgtt

SEQ ID NO: 167147 - DNA, 75 bp, Homo sapiens
agttcatcagctctttgattacatttgtggtgtaagcacaggtgctggagaatctggtaaaagcaccattgtgaa

SEQ ID NO: 167148 - DNA, 97 bp, Homo sapiens
ttcatgtttttccgaagcctgcatttttttgtggagtggtttgaatatcgtaagcgcacgtttaaacatctcaagggtctcactctgtcgcccaggc

SEQ ID NO: 167149 - DNA, 75 bp, Homo sapiens
agaacagataactggcaaaggtgcttcggggacattccagaaaactttagaaactgttcctttggagaggaaaaa

SEQ ID NO: 167150 - DNA, 87 bp, Homo sapiens
tcttgttccatggactgtaaaattaagctcactggacagccagtgctcattggtggcaccatgggaacctgtagttatgttcttact

SEQ ID NO: 167151 - DNA, 100 bp, Homo sapiens
ttaaaacaattgctgcacgaaacactgaaattttggcagatgctggcatcaccatctacatcaggtcagctgtctcagtttggggcaagtttatacgggc

SEQ ID NO: 167152 - DNA, 75 bp, Homo sapiens
ctgagctgccaggatgggctccagccactcaacactctgaactgaaacaagaagccaattccactgatcctgtga

SEQ ID NO: 167153 - DNA, 101 bp, Homo sapiens
caagacccgacatgagggaaaagggacgtaggaagaagggcaggacctgggcggaggccgccaagacggtactaggttttgacaagcttgcatcatgcgtg

SEQ ID NO: 167154 - DNA, 88 bp, Homo sapiens
gagaaccagtaccggctgacctcgctgtacgccgagcacccaggcgactgcctcatcttcaagactctttttgatcagaacaatgctg

SEQ ID NO: 167155 - DNA, 90 bp, Homo sapiens
cttgaaccccggaggtggaggctacatcaccaggagactaaagtccatcaaaaacatccagaaaattaccaagtctatgaaaatggtagc

SEQ ID NO: 167156 - DNA, 88 bp, Homo sapiens
tggctgactggatccacagcagtgggggctgggctcatcttcaggtggaactaatctggttaagattcctacagaaaaaagaactcgg

SEQ ID NO: 167157 - DNA, 95 bp, Homo sapiens
cccccgagcacgccggccccgcgcgcgcctcgaggccgagtcaagttttgcgtttggctccctaatatctgctgtcgatccagtggccactattg

SEQ ID NO: 167158 - DNA, 88 bp, Homo sapiens
aggcgggactcaaatgctggaggaaggaggttgaaccatgattccggtgacagagctccgctactttgcggacacgcagccagcatac

SEQ ID NO: 167159 - DNA, 99 bp, Homo sapiens
gaaaaccgacaaccttcccagaaagtccaagctcgtgggcatcgagcgcctcaaacgaaagaaccagcccagggagcacatggggagctggcagtcagt

SEQ ID NO: 167160 - DNA, 50 bp, Homo sapiens
ctcatcgccctcgactcggaaaagaatatgaagacaaggctggaagacct

SEQ ID NO: 167161 - DNA, 83 bp, Homo sapiens
cgggccatggccgccgccgatgccgaggtattgttgcagcatctggcagtgagactgaggatgaggacagcatggacattccc

SEQ ID NO: 167162 - DNA, 100 bp, Homo sapiens
aagctgctggaggtttggttctcccggcagcagcccgacgcaaaccaaggatctggggatcttcgcactatcccaaggcatcagtgtttttctgaccgaa

SEQ ID NO: 167163 - DNA, 100 bp, Homo sapiens
gagcaagagcaagatcaccgtgacatccgaggtgcctttctccaaaagcttttctccatggaatccttctgtacatgatgaagccagagaaaagatgctg

SEQ ID NO: 167164 - DNA, 103 bp, Homo sapiens
cataaatggaagcaggggatgtggtccaaggaagaaattgatattttgatgaacaatattgaacgctatcttaagtgtgcaacttgctttggtgtttgctgtt

SEQ ID NO: 167165 - DNA, 100 bp, Homo sapiens
tgataatagagtgacatccttcagagacctcattcatgaccaagatgaagatgaggaggaagaggaaggccagagcatccgcacttccactaatagccaa

SEQ ID NO: 167166 - DNA, 75 bp, Homo sapiens
tgctgcttactggtgggaaatcaagtcgtaaaaacaggtcaagtggtactccaaagattcaggtttactcacgtc

SEQ ID NO: 167167 - DNA, 82 bp, Homo sapiens
gacggagcggccggggcctggggctgcctgccgggcggccgggcgcggcgagcccagggagaagcatgacactggccaacac

SEQ ID NO: 167168 - DNA, 90 bp, Homo sapiens
gctggcaaagtggaaaaatgtgcggcagttccttttagtcttgacagtgttgcaaattccattcactccttattttctgaggaaactcct

SEQ ID NO: 167169 - DNA, 75 bp, Homo sapiens
ccatcacaggggaacacagccaactgttagagagaagagtgacacctactattgcatgctgtttaatgatgaggt

SEQ ID NO: 167170 - DNA, 95 bp, Homo sapiens
tggactggctgactgagaagatgcatgccagagacttcacagtttctgctctgttggtagctggcagtgttgtgatggcttttgaagaagtatgc

SEQ ID NO: 167171 - DNA, 74 bp, Homo sapiens
cttcgaggccgctttggcgccaaatcctgagatagggccagatttgagtgtgtgaatttttgagtgaaacctgg

SEQ ID NO: 167172 - DNA, 83 bp, Homo sapiens
tggagaagctggagaatgacaagagcttccgcggtgtcattctgacctcgatgaagatctccttcaacgacaaaagcctgcag

SEQ ID NO: 167173 - DNA, 100 bp, Homo sapiens
gcgacggtggcggctctcggagccggcgcgaatccggcccccgcagcgggacccgggttaatttggagtggcccctggagtcagtttcctacaccatccg

SEQ ID NO: 167174 - DNA, 50 bp, Homo sapiens
agctggctggctttgataagtacaaggggcagccattttggggggtgctg

SEQ ID NO: 167175 - DNA, 89 bp, Homo sapiens
tgccaggggcagtgccaggcagcgggcacccaggcgtggcggagaatgaacagccttccctcgtttggtttgacagaggaaagttttat

SEQ ID NO: 167176 - DNA, 119 bp, Homo sapiens
gagcaccaagactcacagcattctttcttggcatttttgaatacgcctaccgatgctctggatcaatttgaagtgaagaccttgctgctaaatgctgctcagaacaccatggagccacc

SEQ ID NO: 167177 - DNA, 90 bp, Homo sapiens
accgagggagggagagagacagcgatcgagagagaccggagaggtggagagatgatatcatcaagttgaatcgaaaggaagggaagaagc

SEQ ID NO: 167178 - DNA, 83 bp, Homo sapiens
cgaaaattggatgtgaaaatgaagccagaccgagagccagagcccagaggtggagcagttagggagggttgtggaactggaca

SEQ ID NO: 167179 - DNA, 110 bp, Homo sapiens
aaaaaatccaacagcgcactcggattgaagatgaatatagaacccatcacacagtacaactacacttttccagccattaactccaggctctcgagaatttgaagatgttg

SEQ ID NO: 167180 - DNA, 101 bp, Homo sapiens
tttgtggaagcctcgcccgcatcctacagcccagacgagttagataaatatgggatatcttctggtgatgctggaagtaccttcatggaaagaggtgtgaa

SEQ ID NO: 167181 - DNA, 90 bp, Homo sapiens
gcggcagtcgtcgcccctgccgccgctgccaccgaaggaagcatcccagacaccgggaagatgccttcaattaagttgcagagttctgat

SEQ ID NO: 167182 - DNA, 76 bp, Homo sapiens
ttgtgagcctgcaagagctgctggaaagagagatggctaatgaatggcgcttgatgacagatgagtaatgcctgtt

SEQ ID NO: 167183 - DNA, 82 bp, Homo sapiens
tgcagctggcgcctctgcagtgggcaaattgtggctactaatttgccccctgaagatcaagatggctctggggatgactctg

SEQ ID NO: 167184 - DNA, 98 bp, Homo sapiens
aaccctcatgtgcgctacggagctgcaatggccttggggatatgctgtgctggtacaggaaacaaggaatacattcctgacctgtacaaccacttcct

SEQ ID NO: 167185 - DNA, 50 bp, Homo sapiens
tggcagttccaaaggcacatcggccagtgctttctcctgctcaagacagc

SEQ ID NO: 167186 - DNA, 51 bp, Homo sapiens
gggagaagcccaacaagtgtacggtaagacatgactttcaccttccgccat

SEQ ID NO: 167187 - DNA, 101 bp, Homo sapiens
ccccaatggcagccagtttggattttcactggacttccacaaggacagccatgggagctgccaatttgtggtgtctgaagaccaagactacacagctcatt

SEQ ID NO: 167188 - DNA, 82 bp, Homo sapiens
aggttgccgacgccatcaggctcaacgaggaactcaaagtggatgaggaaagaagccatcttcgacaagagcacagggaagg

SEQ ID NO: 167189 - DNA, 75 bp, Homo sapiens
gcgcccacgtgtcctgttgtgcttcattcccacaggccgcataagggcaccatgccggtggaaaggatgcgcatg

SEQ ID NO: 167190 - DNA, 123 bp, Homo sapiens
caagatgcagttttttgatgctgaggagctcctggtcgatgaagaggatgatgtttttggtgaaggtgctggagaatctggtaaaagcaccattgtgaagcagatgaggatcctgcatgttaa

SEQ ID NO: 167191 - DNA, 100 bp, Homo sapiens
cggagtcgccgctgggcctgtccgctggcgtcatggtgttggagcgggccggagagaagtagagtgggctgcgaggagaaggaaacaggcctttcggagg

SEQ ID NO: 167192 - DNA, 98 bp, Homo sapiens
taaaaagctgcacgcaagtgttaaacttctggaaaccagaatccgggcaatggataaggatgccaagaaaagaatccataatttctctgtcatcaatc

SEQ ID NO: 167193 - DNA, 82 bp, Homo sapiens
cttccttttgagccaaaccaagaagttcctgtagcaccttcacagtccaggcaagtctttcccagggaactccgatgaagtg

SEQ ID NO: 167194 - DNA, 82 bp, Homo sapiens
atagctctgtatgagaaggacaacacctacttaggtcccaggtcaagttcatggacctgagatgctcgcaagggggatggtg

SEQ ID NO: 167195 - DNA, 82 bp, Homo sapiens
gaagtttgtcatgcaggaggagttctcgaaacccagaagttctgtgaacaagtccatgctgccatcaaggcatttattgcag

SEQ ID NO: 167196 - DNA, 74 bp, Homo sapiens
tttgattatcttgcgtcattacggtctttctttcaccaacaatcaccagtggtttacacaacattgcaaggagc

SEQ ID NO: 167197 - DNA, 82 bp, Homo sapiens
tggaattttggagatattcaaagaacgctttggataaacaagaagaattgacacctcttggagtccacttggcacgattacc

SEQ ID NO: 167198 - DNA, 80 bp, Homo sapiens
aacaagaaatttcaaaacttgatcaaggcaaaatacatatctcagtgcattgatgagatcaagcaggagctgaagcagga

SEQ ID NO: 167199 - DNA, 75 bp, Homo sapiens
ccacctacgttgccgaccagcgccacctccctggcctatcaactctaccagcaacttgagcaaaatcgccgcctc

SEQ ID NO: 167200 - DNA, 100 bp, Homo sapiens
cgcagcccccgggcacgacctctcggacacggtgcaggcaggaccaagaatcgccttcagccctgtctggtgcatccttggcagaaagtgaggaggaaaa

SEQ ID NO: 167201 - DNA, 100 bp, Homo sapiens
gcattggtgctaaaagtttcttggatcacatttttattagctaaagagcagctgcaggagccccaagtcaccatgaagtctgtgaaggtgtctgagaact

SEQ ID NO: 167202 - DNA, 98 bp, Homo sapiens
tctccaaggaggaaacccccaagttctgcagccagtgcggagagaggctgcctcctgcagcccccatagcagaccactctgcttcatttttgggagaa

SEQ ID NO: 167203 - DNA, 76 bp, Homo sapiens
ttccaacacataaaaattatttatccaacagctcctcccagacggatgtttccagtcctaaagattagtgtcacag

SEQ ID NO: 167204 - DNA, 75 bp, Homo sapiens
gtcgccggagcctggagccgtgaacccagccgcgccagtgtccccaactcctgcccagccagtccacgcggtgcc

SEQ ID NO: 167205 - DNA, 100 bp, Homo sapiens
gtggtctgagctagagggtgaagctggcggagcaggaggatgggcggcgttggagaccagggccagccctggccacaccccaggctgtgtcaccttcgtc

SEQ ID NO: 167206 - DNA, 112 bp, Homo sapiens
ccgatgcctgagccctgtgagctggaggaaaggttcgccctggtgctgagacgaggtcttgctacattgtccaggatggagaagtaggaattcttaaggatattgttatgga

SEQ ID NO: 167207 - DNA, 98 bp, Homo sapiens
ccggatctcttcgtctttgcagcgtagcccgagtcggtcagcgccggagggtcacggagactcaccagttggcagaattaaatgagaagaagaatgaa

SEQ ID NO: 167208 - DNA, 83 bp, Homo sapiens
cccgcatcttcgccgtctggaaaggtgagaagccctaccactgcaactgggacggctgcggctggaagtttgcgcgctcagac

SEQ ID NO: 167209 - DNA, 100 bp, Homo sapiens
gcggcctcaccatacaggaacagggcagacgttagcgtgagtgatcactctcaatcccggtgaacctccttggcctgggcgaagctgtgtggaccaagca

SEQ ID NO: 167210 - DNA, 89 bp, Homo sapiens
catggagatggcacagacggagaagacgagggggcgtctgaggaggaagacctggaagacagatctgcagtcctgcgttaactgcggcc

SEQ ID NO: 167211 - DNA, 50 bp, Homo sapiens
ctcccgatggcgggagctccaggaaagtttgcagttaacatgtttcgaac

SEQ ID NO: 167212 - DNA, 101 bp, Homo sapiens
gttcttcttcgagtatttgtagaaggccgaatttgccacatacctgaatttctgccgttccttgcgttttgacgacaagcctgactactcgtacctgcggc

SEQ ID NO: 167213 - DNA, 75 bp, Homo sapiens
aatgatgtcatgatcagaaaagagagacaacattttgctctgtcacccaagctgaactgaactgggctccagaaa

SEQ ID NO: 167214 - DNA, 96 bp, Homo sapiens
tggtcacgctgtgctcatcgcatctgaggagcagttcaaggttgatgagctgcggagccgcatccgggaattggaggagagggatcgaagggagag

SEQ ID NO: 167215 - DNA, 96 bp, Homo sapiens
cgaggccaggggcttttctaccaggattctggggtgtttctcctcctttcctccctcccagatcttctcacggtttctataatccaggaacttgtt

SEQ ID NO: 167216 - DNA, 75 bp, Homo sapiens
attggagcgcagactgatggcgcaaaggcctcctgacaaggtgatccgggcgggccccgcaggaattttatcccc

SEQ ID NO: 167217 - DNA, 76 bp, Homo sapiens
gaacgaggcaaggagctaaagcagcgtgcgttcagccctggggcctccaggcccaaggtcagcatcccactgtcag

SEQ ID NO: 167218 - DNA, 100 bp, Homo sapiens
tggagcctacaatggcccagtaccaggctatcagcaaacacctccccaagaaggagcgatatatagttatcagcaaagtagatgaagaagaacgcaaaag

SEQ ID NO: 167219 - DNA, 83 bp, Homo sapiens
ctgccatattgtgtcttccccggccggtccctcgcctcccggccgagctgacggtctttggtttcataagagcctgagagaga

SEQ ID NO: 167220 - DNA, 51 bp, Homo sapiens
cagctgttctgcaggatcccatgagaaggaagttggtgaaccatctaaaga

SEQ ID NO: 167221 - DNA, 90 bp, Homo sapiens
gggacgcggaactggtgtaccctggtggacgtgcacccagaggaccaggcggcgcttctcaataggtttggcatggacaagatctatgaa

SEQ ID NO: 167222 - DNA, 100 bp, Homo sapiens
ctctggccactatggaattctaatttgaaccatgtttggattgaagccgcctctgtattacttaccagcttgatactgatggacattgtgtgggccagag

SEQ ID NO: 167223 - DNA, 96 bp, Homo sapiens
gggccgtcaacgagctgggcgaggcgctggctgagtgcaagctggaggtccgaggctggggcggaaggtcgagagggcgaggcctgtggcacggtg

SEQ ID NO: 167224 - DNA, 100 bp, Homo sapiens
agtctcctgggagaatggatgagcctaagcaacccagctcccagggctgttttgctgcagcttctgaagtgttaaagcacttgaaggaacgatttccgcc

SEQ ID NO: 167225 - DNA, 100 bp, Homo sapiens
ggcggtcttccccggctcgccaactcggctgctctgggggattcgtgcgcggtggaagttgatgggtcgaaactaaatgtgaccagcacgtggaacctgg

SEQ ID NO: 167226 - DNA, 98 bp, Homo sapiens
cccgtcctccgttagctaattaaaacatttttcagggacgtagccatccagagggcttccgttacaagatgaggtctgtgtatgctcacttccccatc

SEQ ID NO: 167227 - DNA, 89 bp, Homo sapiens
aacaatgagatcgtggacaagatcatgggcaaaggacagatccaggtacggacattgctgcaggagaagaggttgccatcaagcttgaa

SEQ ID NO: 167228 - DNA, 90 bp, Homo sapiens
ctctgaaggcgaacgcttcgctggccatttaggagctctgctcaaagccagacgtccttaatggatcagtactttgcccgaatgtgctcc

SEQ ID NO: 167229 - DNA, 101 bp, Homo sapiens
gaggtccccaggagctgctgctggcgagcccgctactgcagggacctatgggcctagatctagggtccctggctgccctctgctggtactcccggcccctt

SEQ ID NO: 167230 - DNA, 100 bp, Homo sapiens
ttgttgtggaaatcccggttacctggcattaccacaggagtcttggttcgagaacacagcaacctctcaactctagagaaattctactttgcttttcctg

SEQ ID NO: 167231 - DNA, 100 bp, Homo sapiens
tttgaacaccatgtcccaagaggagaaggcggcttacctgagaaccccatgcatcccagctcaaggtggtcagagctagaccttcttattctgttgggga

SEQ ID NO: 167232 - DNA, 128 bp, Homo sapiens
cacccagtcccacttcaaacattcgtctcggaaaccccgcctcttacagtcacgagtatggtttgaagtggtgaacatggatttttctcggcttcacatgtacagtcctccccagtgtgtgccggaga

SEQ ID NO: 167233 - DNA, 96 bp, Homo sapiens
cccgctatgacgtgctgggggtcatcgacagctgcaaggaggccgtcaccttcaaggccgtcagacaagccctggacccatccaaggacccctgcc

SEQ ID NO: 167234 - DNA, 100 bp, Homo sapiens
ctggatatgtctattctgaactcaacttctgaaatttacagaaacaaactacatctcagggtccagtgcacgtgccaacattacactgtcagggaagaag

SEQ ID NO: 167235 - DNA, 75 bp, Homo sapiens
ttgggagcaagagccatctactcgtccgttaccgggttgtctgcattcaaaagagcattctattaaagctacctt

SEQ ID NO: 167236 - DNA, 100 bp, Homo sapiens
tagagcagagtacgagtctgaggcggagggagtaatgttggttgaatctggcgatgtggaacccatggatatggagggctgactatatacaccatgtttt

SEQ ID NO: 167237 - DNA, 75 bp, Homo sapiens
gacactatagtcgagccaaacagacgctccctgtgatttatgtcaaggataaagtagccaatatttggtgcagct

SEQ ID NO: 167238 - DNA, 100 bp, Homo sapiens
agcacatcgagaccgcttaccgcatctggctggagccctgcattcgcggcgtgtgcagataatagaatctgtccctccagctggccctgaggcatctgag

SEQ ID NO: 167239 - DNA, 90 bp, Homo sapiens
cctgtaacccagcctgtttcacttcttgatcacgatgatggctcctgtggagtccaaattttcccaatcaactggagatatagataaagt

SEQ ID NO: 167240 - DNA, 75 bp, Homo sapiens
agcggctgccgaagatggcggaggtgcaggaagatgacgattcagagactgaaaaacctgaggctgatgacccaa

SEQ ID NO: 167241 - DNA, 100 bp, Homo sapiens
gtgattctgaggcctccccaaccatgtgcaattgtctcctctgagcctccggcctccataagacccaaaacagatgacacctcttcccagtcccccgcgc

SEQ ID NO: 167242 - DNA, 98 bp, Homo sapiens
aaatgaagaagtagcagaagcaatcactcagtttcttcctaactgtgatccagatgatcctcacaggacagagcgggatgccaccagcttgtccaaag

SEQ ID NO: 167243 - DNA, 90 bp, Homo sapiens
tgagggaattgggaggtcggcggccccaaaagtggcgtatgtgttcgtgttttaatgtattcagagccattgggcaataagcagtccaga

SEQ ID NO: 167244 - DNA, 100 bp, Homo sapiens
cgtgggaacccaggccccgccgaggcggccagtgtgatttggaaggaatcatgccaaatgttaccatcagcttgagtctccccaccaatggatctccact

SEQ ID NO: 167245 - DNA, 73 bp, Homo sapiens
ggaaggcattgcccagatataccaactgattgagtatctacacaaaagaaactcattatctgcaatattagag

SEQ ID NO: 167246 - DNA, 75 bp, Homo sapiens
cccgagaccgcaccacccgcctctgggccccagacagtctctgcaccaccttgtcactgcagtgggaaccagaga

SEQ ID NO: 167247 - DNA, 75 bp, Homo sapiens
aaagtatgttgtaccttgtgacagaatatgccaaaaatggagaaatttttgagttgatctctctaatgtattaga

SEQ ID NO: 167248 - DNA, 99 bp, Homo sapiens
tgcacctggccaggctgcggctggaggtagtgttggtgtaaaaggcaaacccgtgtcatgagggatggtcatcatcttgtgtgatccttggagatggca

SEQ ID NO: 167249 - DNA, 101 bp, Homo sapiens
gccaccatcttcgacttgagcgaagttttatgcaaggctcgggctcaagttcactacaggtcacaaaacatgatgtcttgttggctactttaaaatctaac

SEQ ID NO: 167250 - DNA, 100 bp, Homo sapiens
cacttcaacctggatgagagtggcgtgctcagtctagacaggggaagaaggagaaagggccaacccctgaagaagcaatacagaaactgaaggagacaga

SEQ ID NO: 167251 - DNA, 100 bp, Homo sapiens
gaaaaagctgccctgagacggtgtcccgccgaaaggaatgaatctgaagtctgctgcagtaaaacacagaaggctttaaaatgttttcttgcataaaatt

SEQ ID NO: 167252 - DNA, 100 bp, Homo sapiens
cctgtgctgcaaggtgtctgactttggcctgactcgcctcctggatgactttgatggcacatacgaaacccaggagtctactcttcatcttgtgttgaga

SEQ ID NO: 167253 - DNA, 75 bp, Homo sapiens
ctcgacgtggggcggccagcgatgaagccggactttctgtctcttctgaaggcccttctcaaagacttggaacac

SEQ ID NO: 167254 - DNA, 100 bp, Homo sapiens
cagatcctggtcctcgatccgcccacagacctcaaattcaaagtgctgaagctgctgaaagatggcagaagaagtggtggtagtagccaaatttgattat

SEQ ID NO: 167255 - DNA, 98 bp, Homo sapiens
cagactcagatccaagtcaacagtgaactgcaagcacatgttgaccagataactgaaatggcagcagtaatgaggaaagccattgaaattgacgagca

SEQ ID NO: 167256 - DNA, 101 bp, Homo sapiens
agagtattggattacctaaggaaagaagcagaggatggaatttgaggttgcaaattgctttataaacatgacttggcaaaacgctggggaaatcactgtaa

SEQ ID NO: 167257 - DNA, 75 bp, Homo sapiens
aaagagaagaagatgaagaaaccagcttgatatgttgccctgccaaggtaaccctgctggggtcagttatcttca

SEQ ID NO: 167258 - DNA, 90 bp, Homo sapiens
gtggactcagagaccaataaaaataaactgcttgaacatcctttgactggttagccaggtgtttgctgagaacaaggatgagattgcttt

SEQ ID NO: 167259 - DNA, 100 bp, Homo sapiens
aaaagcacaaggattctcgctgtgacagagacaacaccgagtatgagaaatcatcaatgctgtggtactgttgattttattgagtgccctggctgatccg

SEQ ID NO: 167260 - DNA, 90 bp, Homo sapiens
gcggcctgtatcaccagaggagattagacgtagcagattagaatcctcactatggatgggctcattgaggacattaagcatcggcggtat

SEQ ID NO: 167261 - DNA, 83 bp, Homo sapiens
cttcacctttgatcccctgacctgcattaccttgaggacaaaagcatgtcttcccttcctgggtgcattggtttggatgcagc

SEQ ID NO: 167262 - DNA, 51 bp, Homo sapiens
tgaggatgctttccacatgaaccctgaaggctttggcaaaacaagccaaga

SEQ ID NO: 167263 - DNA, 100 bp, Homo sapiens
ctcggaacccgtggtcctccgcttcatgtgcactttacaggtccccgatgaaccaagagaaccctccaccatatccaggccctggtccaacggccccata

SEQ ID NO: 167264 - DNA, 120 bp, Homo sapiens
ttttcagcgaagagaacgcgcccaagtggcggggactactggtgcctgcgctgaaaaaggtgagaattatgaagatgatgacctagtaaattctgatgaggttatgaagaaaccatgtcc

SEQ ID NO: 167265 - DNA, 82 bp, Homo sapiens
aaaaaggaggccaaagactttatactggtagacacagtctgggccctctcttaccttactgatgctggcaatgaacaaatac

SEQ ID NO: 167266 - DNA, 100 bp, Homo sapiens
tttgccgctgacccagagatggccccgagcgagcaaattcctactgtccggctgcgcggctaccgtggccgagctagtgacatctgccatgagctgttgg

SEQ ID NO: 167267 - DNA, 74 bp, Homo sapiens
tgaatcagatggtacagattgctgcagtggaaaatcagattttcttcaatcacatctgaataaatcacttgaag

SEQ ID NO: 167268 - DNA, 50 bp, Homo sapiens
atctctacgagctcctcagcgctctgcagatgctgggtgcggagccccgt

SEQ ID NO: 167269 - DNA, 100 bp, Homo sapiens
tggtaactttcctcctgctcctggactctttacacaaagagcataatggcagcgtctgaggttgctggtgttgtggccaatgcccccagtcctccggaat

SEQ ID NO: 167270 - DNA, 74 bp, Homo sapiens
agccagcgagccgccgacccgccgagcaaaatgacgcccagcggcagcaggatgagtgcggaggcaagcgcccg

SEQ ID NO: 167271 - DNA, 100 bp, Homo sapiens
gaaacggcctcgacccctcacagagcctgggcagaggagcagaataagttggtgcatggcggaccctgcgacaagacatctcacccctaccaagctgccc

SEQ ID NO: 167272 - DNA, 121 bp, Homo sapiens
ctcggcagggaggatgacggagctgcagtcggcactgctactgcgaagacagctggcagttggaatcgaagcctcttaaaatggcagatgacttggacttcgagacaggagatgcaggggc

SEQ ID NO: 167273 - DNA, 78 bp, Homo sapiens
taaaggcaagaaatgcacaattattgaaaatgcttcaggaaggtgaaaataatgctcggaatatttttcaatgtccat

SEQ ID NO: 167274 - DNA, 100 bp, Homo sapiens
ggagcctcagttggaagcagccgatccagcctgcggagcctgtggggcaggggtcctgtctttgtgatgtcagcgtgaagtggaattcgcagaatggcta

SEQ ID NO: 167275 - DNA, 99 bp, Homo sapiens
acgggccccgcggggcccgagggcaaggagcagggccatgtgaaactttctgactttggtctttgcacaggactgaaaaaagcacataggacagaattt

SEQ ID NO: 167276 - DNA, 98 bp, Homo sapiens
agtggacgcctaccgcatctacttggcagtcgatgatgtgaagaaaggttacatcaaagcagaagaaaagtcctatcaattacagaagctatacgaac

SEQ ID NO: 167277 - DNA, 88 bp, Homo sapiens
tttgatccagaacttgcagcaacaataggaggaatgcaggctcaggttggaatgccaggaagtggaccagtgtccatggaacgggggc

SEQ ID NO: 167278 - DNA, 100 bp, Homo sapiens
actgttggatcttactgaatatgagatgcgtaatgctgtggatgagtttttactccttttagacaagggagtatatggtggagccgccaccaaaatgcag

SEQ ID NO: 167279 - DNA, 96 bp, Homo sapiens
tgatgaaggcgtggatagcctgaaggcagccattcaggtggatatgcagtgggtgcaggttttggcagaaggttgggcaaccccattgaatggctt

SEQ ID NO: 167280 - DNA, 82 bp, Homo sapiens
atggagaccggttcccggcgcaccatgtcatcgtcaccgtgcccttaggtctgggatctgccgatatgggggatatgaagac

SEQ ID NO: 167281 - DNA, 100 bp, Homo sapiens
ggaagactcggacgagaaaacaggatttctctctgatcaaacggacagttcaggactcagaatctaaggatgaatgttcaccgtggcagtgacagtgaca

SEQ ID NO: 167282 - DNA, 96 bp, Homo sapiens
cctgtcacagctagaggcacacaacacaggttgaaatcacaaagattagacacctttttagataggtgttcttcagcaccactgacaacacggttc

SEQ ID NO: 167283 - DNA, 75 bp, Homo sapiens
ggaagaggcccaccctggagtaaccctcactggagaatccagaggtgcagcggaactgctgcctgacgctctgca

SEQ ID NO: 167284 - DNA, 100 bp, Homo sapiens
ggacggacggtgatggtggtcgccgcggcggcgtgtgcgcccctcaggagaagaaactgaggcctggaatttgattaactcattcaaggttacccagttg

SEQ ID NO: 167285 - DNA, 75 bp, Homo sapiens
gagcgttctaaaggaaggcgtccgttggccttcgtacccgtcttgattgagtatgaagtgtaacagaacagactt

SEQ ID NO: 167286 - DNA, 88 bp, Homo sapiens
cctgttccccgcgctgcggcctggcggcttccaggcgcactaccgcgattgtcctaaagcagttggatgggaaaagaaccagaaagga

SEQ ID NO: 167287 - DNA, 95 bp, Homo sapiens
atgcaacagtttaaccaacgatacctctattcgcatgtgatccgagggaaccgccccatcaaaactgagatggcccatcagctatatgtccttca

SEQ ID NO: 167288 - DNA, 100 bp, Homo sapiens
atacttcaagaaaaatataaaaatcactggtatccagaaaaaccatcgaaaggacaggcctacagcggttgtggaacaggaaatgaaaaaggactggctt

SEQ ID NO: 167289 - DNA, 119 bp, Homo sapiens
ccgaaacctagccccggacgagaagcgcagcaacgtgcggtgggaccacgagagcgctgaccggttccctgatgtgttacctgcttctgctactgatccaaactgcagaacttctcatt

SEQ ID NO: 167290 - DNA, 75 bp, Homo sapiens
ctttgcgacggaaatgtgtcatcgaaagccagggcctgccttaagtgtgaaagtaatgactgatgaaagtggaaa

SEQ ID NO: 167291 - DNA, 83 bp, Homo sapiens
aacaagcacattaacatcagcttccacagggggatatgagactttctactcggaatatcctgagtgttgcgtggatgtaaaac

SEQ ID NO: 167292 - DNA, 100 bp, Homo sapiens
ctgggaaatagtaaccctgccaaatacatcagcttgtaggagacagaggatttccagatgtgacttgcactcagaagatcagtggtcaacttcagaagct

SEQ ID NO: 167293 - DNA, 74 bp, Homo sapiens
gttggtacacccgggagagtgtttgatatgttaaacagaagatacctttgtacaggtttgcagattccgccagc

SEQ ID NO: 167294 - DNA, 83 bp, Homo sapiens
cttcaatccagttccaaggactccacgggtgcctttgttccattgaatgttcccaataacaaaaattctacagagtgggaaaa

SEQ ID NO: 167295 - DNA, 98 bp, Homo sapiens
gaccgccgccgccgccgccaccatgtgaatcagaaatcctgcaccatgagaagcagtacgagccattctactcatcttttgttgcactttccacacac

SEQ ID NO: 167296 - DNA, 100 bp, Homo sapiens
aagaagctgaaatccattgcatttccatccatcggcagcggcaggacagttctttttactctgacgtctgtggttgtacttgtgattacaacggactgga

SEQ ID NO: 167297 - DNA, 90 bp, Homo sapiens
gtacagcggaggtggcggcgcgggcaggtgtttgagaagtcccccctgcgggtgaagaacttcgggatctggctgcgctatgactcccgg

SEQ ID NO: 167298 - DNA, 75 bp, Homo sapiens
actcacaggctccgatggcggcggccgccctgagggaccccgctcagaccttgccaccatggaagaaagagtaca

SEQ ID NO: 167299 - DNA, 100 bp, Homo sapiens
gattgagaatgtccatggatttgtttctcattctcatatttcaccaataaagacctgtcgcgaaatcgcctttcagaaattcctatagaagcatgtcact

SEQ ID NO: 167300 - DNA, 90 bp, Homo sapiens
gtggtcatgagctggcgtggaaaagacatgtcatgctgcccaaggacatagccaagctggtccctaaaacccatctgatgtctgaatctg

SEQ ID NO: 167301 - DNA, 82 bp, Homo sapiens
tgccctcgcactggcgctgcaacaagacgctgcccgtcgccttcaaggtttggtgcacctcgatttggaggaagtagggcag

SEQ ID NO: 167302 - DNA, 100 bp, Homo sapiens
cagaggaggcgtgagtttaaggaccgtcactttttaacggggtgacagtccaaagattgacttggccggcagttcgctatctggcatcctggacaaagat

SEQ ID NO: 167303 - DNA, 75 bp, Homo sapiens
tctacaaccttcgatctcctgacgagagtggaagctggacacactatgtgacttgtatgaaaccctgaccatcac

SEQ ID NO: 167304 - DNA, 101 bp, Homo sapiens
ttcctcccaggagacagctatatttgcccatgttattcaaggcaactcatgcagcaattccagaaccccgacttcccacccgaagtagaggaacaggatgc

SEQ ID NO: 167305 - DNA, 100 bp, Homo sapiens
aaatgggaccaaccttgatgaatatgtggctttggtggatggggtattcttgaaccaggtcatgctccaaatgaagtcctggctgagcaaggttggaagc

SEQ ID NO: 167306 - DNA, 98 bp, Homo sapiens
gcgctcccgcctccgtgctcggcctgctcctacagaagctgcgcgacgacggctgccaggcctactacctccaagggattgtggtccatcaggagtct

SEQ ID NO: 167307 - DNA, 50 bp, Homo sapiens
tgaaagtaaagcagatcctgggcagaagcctctacggcagacacatgcag

SEQ ID NO: 167308 - DNA, 50 bp, Homo sapiens
gttcgcctgagccagatcccagccataaccagcagaccacagcattcagg

SEQ ID NO: 167309 - DNA, 101 bp, Homo sapiens
cggcctttctgctcctcgcggcccaggtgagtggcatcaaggcgctgtacgagtcggagctggccgatgcccggagagtcctggatgagacggctcgagag

SEQ ID NO: 167310 - DNA, 100 bp, Homo sapiens
gatcagagatcggcggagaccctcgaagtgcgcaaacttgacactcaccctgaccgtctgagggaaaaggccataccaatgctggagatgcaatatatga

SEQ ID NO: 167311 - DNA, 50 bp, Homo sapiens
tgatggacggcaccctcttcgattccaggcatctggtgtcgaaggctcag

SEQ ID NO: 167312 - DNA, 82 bp, Homo sapiens
agcgggccaggaagcgcatccaggagcatttaaatcaaacggtattgagatggattgggttatgaaacataatggtccaaat

SEQ ID NO: 167313 - DNA, 90 bp, Homo sapiens
ccgatttaaactgcacataccatatgctggagagacattaaagtttcataggctgaagccggctgacatcaacgtaattggagccctggg

SEQ ID NO: 167314 - DNA, 80 bp, Homo sapiens
ccttggtttcaacactatcggaatggaaggatttgatgccctggatccctttattcccatcctggtttccaactataacc

SEQ ID NO: 167315 - DNA, 80 bp, Homo sapiens
ggctgacgctgctgctgtgtgcggtgctgctgagcttggcctcggcgtcctcgggacccagatcaacttcactgtggcca

SEQ ID NO: 167316 - DNA, 50 bp, Homo sapiens
ggagatgaagcctaagaatatgatcagagtggagcctctaaggatctgct

SEQ ID NO: 167317 - DNA, 68 bp, Homo sapiens
aaattcctttgtgctgactatgccgagcaagatgagggtcatgtggttatgggtaacaatgcagtctc

SEQ ID NO: 167318 - DNA, 100 bp, Homo sapiens
cggcgggcgcgccctcctgaaggaagccgcccgccccccaccgccgccccctccggcgtgttcatgcccccgggacatttatgcagtgtgtgattctttc

SEQ ID NO: 167319 - DNA, 75 bp, Homo sapiens
cagagcggtatccctgtctcagcgaagtggtgaaagagcatcagccaccagctgaacaggccaaagccagactac

SEQ ID NO: 167320 - DNA, 97 bp, Homo sapiens
acgtcattcacaacaacaagtgcatccctgagtgtccctccgggtacacgatgaattccagcaagttttgcacactagggaccaagaagccctcggg

SEQ ID NO: 167321 - DNA, 83 bp, Homo sapiens
tggttcagttgctgagaagcctgacataccaggactgcctgagacaagccacaagctgggaaaagttaaccattggatgccgc

SEQ ID NO: 167322 - DNA, 82 bp, Homo sapiens
cagtgatctgtacaacttccaggtgtcacccatgccctccacctctgaaggtagcccctgaagaagatgaaaggaaaaagag

SEQ ID NO: 167323 - DNA, 75 bp, Homo sapiens
gcagctggagggcttgaaaccaggcaccaaggaaatctgagaatgaagatgacagcgagtgggaagatgtggatg

SEQ ID NO: 167324 - DNA, 75 bp, Homo sapiens
cgagtccagcccaggaaaatggagagaatccagactccaaaatgatgcaaatcaacctgactggatttttgaatg

SEQ ID NO: 167325 - DNA, 100 bp, Homo sapiens
cccagctgaggtcactgccttgggcatctccaaagactttagaagacagctttccatcgacactaggccctttagaccagcctctgaagggaatcctagc

SEQ ID NO: 167326 - DNA, 98 bp, Homo sapiens
ctcaacgagctgctggaggacgagggccagctgacggagatggtgcagaagatggaggaggtccgggagtggcggcggccaatcagcgcgcggcttcc

SEQ ID NO: 167327 - DNA, 100 bp, Homo sapiens
cctggtgcggaccctccggccgcagccatgtgggacccgcgggcagctaggtggcggctttgaaatacatcccatctgtcctgcatgatgtagaaatggt

SEQ ID NO: 167328 - DNA, 90 bp, Homo sapiens
cggaaggggtcccgaagccccctgcaggaactctacaacccaatccagcagaaatgatggaagaattgcatagcctggacccacgacggc

SEQ ID NO: 167329 - DNA, 127 bp, Homo sapiens
atagcccttgaacagctatgcatgctgcttttgatgtctgacaacgtggatcgttgttttgaaacttgagacatttgggaaatgatgaagtgcacattgtttggtcagagcatactagagactacag

SEQ ID NO: 167330 - DNA, 75 bp, Homo sapiens
gaaggactgcctcactgagcaaccaagagcacaacgactctgtaaacgctgtggtcaagcatggagagctgcaac

SEQ ID NO: 167331 - DNA, 80 bp, Homo sapiens
caaactcgaagaacagctgtggaaagaagttgcaaaacactgggtgcaatggatgagcttcatagtctggatccaagaag

SEQ ID NO: 167332 - DNA, 74 bp, Homo sapiens
tttgcactccagcatgccgatagttcaaacttctatatcacagaaaaggaatactcccccagttgcaagaggcg

SEQ ID NO: 167333 - DNA, 90 bp, Homo sapiens
ctctgctagatgttgtggttgaaaataatctagatattgatggctttggcaggtgacaaacattaccaccccagctgtgcacgatgcagc

SEQ ID NO: 167334 - DNA, 75 bp, Homo sapiens
gccgtcttctttgcctgcactaatggtcaccaggcagcagggattggaaaccaggcaacaggaattggacatcag

SEQ ID NO: 167335 - DNA, 100 bp, Homo sapiens
caactattcaacatggaggcggaggtcgataagctggaactgatggaatttatgttgatgcagttaactccttgggccaaacagcactttttgttgcggc

SEQ ID NO: 167336 - DNA, 100 bp, Homo sapiens
tcgcctttgccgatccgccgcccgtccacacccgccgccagggcaccggcagaagctggaggaccagaccaagccgttccctgaccgctttggggacctg

SEQ ID NO: 167337 - DNA, 74 bp, Homo sapiens
ggaagtggtatcatgagagatatagcccacttagaaatcacaccagttcctgttgcacgaaaactatctgctcg

SEQ ID NO: 167338 - DNA, 50 bp, Homo sapiens
gagcgaacgccacgccgttgggaccatcagcacgtgcccatcgacatcca

SEQ ID NO: 167339 - DNA, 75 bp, Homo sapiens
aacaccgttgtgcccatttcactctatgtcagcagtgattccagcagtagttcaagtgatgattctccagctcga

SEQ ID NO: 167340 - DNA, 83 bp, Homo sapiens
ataagacagttcgtaccaattaaaacacgatgaggcgagtggtacgacagagcaagtttcggcatgtatttgggcaagcggtg

SEQ ID NO: 167341 - DNA, 96 bp, Homo sapiens
ctgtatggatgggcgggctgacctcatcctgccttgtgctcacagcttttgtcagaagtgtattgataaatggaaatgggtcctgatgaatatgaa

SEQ ID NO: 167342 - DNA, 101 bp, Homo sapiens
agaaaattgagacggagctaagagatatctgcaatgatgtactggttccagcaacagatagaaatgctttaagttcactctggggaaagctggcctctgaa

SEQ ID NO: 167343 - DNA, 100 bp, Homo sapiens
ctggctcggacccacggagccggcagcccagcactccgacatgcgtcgggatgtccaggaaatttttcgcatgaccccccacgagaagcaggtcatgatg

SEQ ID NO: 167344 - DNA, 100 bp, Homo sapiens
ctggtgtaccaggcgaagctggccgagcaggctgagcgatacgacgatggactctcgtcctgtcacccaggctggagtgcagcggcgcaatctcggctca

SEQ ID NO: 167345 - DNA, 100 bp, Homo sapiens
ttggctctcctcgcccctcgttcccttgggaaccgcctgggaactccgccatgtcatccacttcgcccaacctccaggttcaattcccatgaaagtgcag

SEQ ID NO: 167346 - DNA, 107 bp, Homo sapiens
ccgctgtgggttccagcccttcaaccaacatcttctgccctgggtcaagtgtacaaccgtcttcagatctcgctggtgtttggaatgctttatcctgcatattattc

SEQ ID NO: 167347 - DNA, 74 bp, Homo sapiens
tgggccccagggtgtcccccatggcggggccgcgggtggaggtcgatgagcagatgcttaacgtgcagaacaag

SEQ ID NO: 167348 - DNA, 145 bp, Homo sapiens
ccctgatgcgggagctggatgaggagggctctgatccccccctgccggggagggcccagcgcatccgacagatcccgactgggcctcctacactctgggcgtcttcatctgcctgagctgctcgggaatccaccggaatatcccc

SEQ ID NO: 167349 - DNA, 75 bp, Homo sapiens
cagcggaggctggacgcttgcatggcgcttgaggtgctgtgcctgaggaacaataccatttttaagcaagccttt

SEQ ID NO: 167350 - DNA, 90 bp, Homo sapiens
gccacagctacactccaaccacgtcccgctctccccagcatttccacagacctggtaatatctcagtaagctcaagcacttcagatggaa

SEQ ID NO: 167351 - DNA, 101 bp, Homo sapiens
tccaacacataaaaattatttatccaacagctcctcccagctggcggaggcagtgacctcagactctggacggtgaacggggatctcgttggacatgtcca

SEQ ID NO: 167352 - DNA, 100 bp, Homo sapiens
tctggaagatcaagaagctcattaagagcttggaggcggcccgcgggtgtcatggagaaactccagctgggcccagagattctgcagcgggaaaatccaa

SEQ ID NO: 167353 - DNA, 82 bp, Homo sapiens
caccacccctcttctttcagatctgctggcgcttcgtctctcccgccatcatcttcgttggtgaaaaccctgtgtccttgga

SEQ ID NO: 167354 - DNA, 100 bp, Homo sapiens
aaacctttgatcagtactcctcctgtttcatcacagccaaaggttatcaatagtctggctgtctatcgtcatcgtgagactgactttggtgtaggagttc

SEQ ID NO: 167355 - DNA, 100 bp, Homo sapiens
ccaacttctttggcaagtggacattttactggctcaaaacactatggctatgcatcctccaacgtcagccccgccctgccgctccccacggcgcactcca

SEQ ID NO: 167356 - DNA, 83 bp, Homo sapiens
ttgtatgcctcaatttgctggatttaagcactgctgcactttatgagtgctgcattagacgtggaactatctgatgattcctt

SEQ ID NO: 167357 - DNA, 75 bp, Homo sapiens
tgagcaagctctctgagagccttggtttcccccaccagcagcctcccgcgacgatgcccctcaacgttagcttca

SEQ ID NO: 167358 - DNA, 100 bp, Homo sapiens
tgctcccaagagggcggcggcagcgggtcctacgaggagggctgtcagagcctcatggagtacgcccctaaagacaatgaagagcgtgtgttcagggaac

SEQ ID NO: 167359 - DNA, 75 bp, Homo sapiens
atttactcgatgatggaactctggtggtttcaggaagcggggccttttccgaagtggttttagctgaagagaagg

SEQ ID NO: 167360 - DNA, 98 bp, Homo sapiens
tcgactccaaatggttgaaaacagatatacagctcatgatggagcagtccaagaagtcctccctcatggtggcccgcagtattctcaacaacaagctc

SEQ ID NO: 167361 - DNA, 110 bp, Homo sapiens
aagatcagcgaggaaaacatcaagaacaattttgtgctcatatatgagctgctggatggcctttccatgggtaaggagaaggcacttagcctccagatgatgaaatactg

SEQ ID NO: 167362 - DNA, 90 bp, Homo sapiens
atgatgttgacttggggatccaaaggcacagcccaggcagaaggggatgaggaggaagaaggggaggaggagagttcgctgatagagatc

SEQ ID NO: 167363 - DNA, 50 bp, Homo sapiens
cccacccaaggctaaaggcagagccaggaaaacggacgatgtattactaa

SEQ ID NO: 167364 - DNA, 100 bp, Homo sapiens
aaaaggaatcagaatcgagagggcctgagggccctgcagaaggatctcagcctctctgaccccagttattaaagcttttggcatcttgaagcgagcggcc

SEQ ID NO: 167365 - DNA, 90 bp, Homo sapiens
gaggaatggcaggacgaagatcttcccaggaagcagcttcgtggtgagtgaagggagctacctggacatctccgactggttaaacccggc

SEQ ID NO: 167366 - DNA, 100 bp, Homo sapiens
gcgttagttccgagcttgaagtcagtacaagaatattccacagatgtcctttgatgatacagaaagggagccagatcagacctttagtctgaaccgggat

SEQ ID NO: 167367 - DNA, 101 bp, Homo sapiens
cctggagagtcgaagcagcagctctcgctccagaagcttcactttggtgtgatgaatgcagactctgctaccattttggctgtttggatcctcctttgaaa

SEQ ID NO: 167368 - DNA, 75 bp, Homo sapiens
ggaacaggacgccctctgatacatttatgcagtgtgtgattctttctaaaacaactccctggaagagaggacatt

SEQ ID NO: 167369 - DNA, 75 bp, Homo sapiens
aagagccgacagaggcagacacagaaggccgacaccctgcacctggtactccaaagattcaggtttactcacgtc

SEQ ID NO: 167370 - DNA, 90 bp, Homo sapiens
ggggtcacagacatttcatggggctccactaacaggaatttatgttgatgcagttaactccttgggccaaacagcactttttgttgcggc

SEQ ID NO: 167371 - DNA, 83 bp, Homo sapiens
cttaggaccacccaccatgcctatccagtgtctccagaacgctatagctatggcacctccagctcttcaaagaggacagaggg

SEQ ID NO: 167372 - DNA, 100 bp, Homo sapiens
ccctgctgatgtcagtgttatatcctccaggaatactggccagacagccgatcgccagtacatggagggcttcaacgacgagctggaagccttcaaggag

SEQ ID NO: 167373 - DNA, 100 bp, Homo sapiens
ggagctgctgggcgaagcacgctactacctggtgcagggcctgattgaggactgccagctggcgctgcaggctccgtatgtggatgtgatctgtttgaac

SEQ ID NO: 167374 - DNA, 100 bp, Homo sapiens
atgtgcaccgagaaattcacaagattagcctgaggcctgctcagtcgttcctaatgaataaaaatcaagtgccaaagcttcagccccagataactatgat

SEQ ID NO: 167375 - DNA, 50 bp, Homo sapiens
ggagcccagagccacgtcaaaatggggcgcctacccttcttcagcaagat

SEQ ID NO: 167376 - DNA, 82 bp, Homo sapiens
tccgggaccggccgaaaggcgaggaaccgtgcagagcagagcgggcggaggaccccgggcgcgggcgcggacggcacgcggg

SEQ ID NO: 167377 - DNA, 75 bp, Homo sapiens
agttagacaataccctcaaactacctccaacagctactcagggcaccgaccgtcacgagctaacttcctggaaga

SEQ ID NO: 167378 - DNA, 82 bp, Homo sapiens
caaaattgtggaaaagtcactctgtgaagatagtgatccggggagacaggaacacgggcaagacagcgctgtggcaccgcct

SEQ ID NO: 167379 - DNA, 75 bp, Homo sapiens
acccccagccgcagcccccgctggtttccacttgagcggcacagtgacagaacctgcaatacaatcggagccaga

SEQ ID NO: 167380 - DNA, 100 bp, Homo sapiens
caagatacaattgaataatcaaagggtggagcctggacaaaatgtttacttgtctgatgaagatgaagatggtgatcgaattacagtgagaagtgatgag

SEQ ID NO: 167381 - DNA, 50 bp, Homo sapiens
cgggaattcacagtctgcagcattgttggtgtaatacggtgcccagtatg

SEQ ID NO: 167382 - DNA, 100 bp, Homo sapiens
gagcgggcggtcattcgcatcgcaggcttatcaggagggcagacttcaaaagctactaaaaatgaacggccctgaagatcttcccaagtcctatgactat

SEQ ID NO: 167383 - DNA, 89 bp, Homo sapiens
cctcaggatcagaccgtagcccttccggaaacctccatggcacgggcgagagcgggaagagcacgttcatcaagcagatgcgcatcatc

SEQ ID NO: 167384 - DNA, 50 bp, Homo sapiens
cttaaggcggtggatgctgacacagagaccattcctcaagaattttgtat

SEQ ID NO: 167385 - DNA, 100 bp, Homo sapiens
aagacgattcacctgtccagcatccgaccaccgaggctggagggggagaacacccagatcactttgggaagcagtgacatccaacctgtatcaagtcttc

SEQ ID NO: 167386 - DNA, 100 bp, Homo sapiens
cctgggcgtgctggccccgggtggcgcctccctgcgactcctggaccaccgggcgctggtctgctcccagccgattgaggaaactcggcttaacattgac

SEQ ID NO: 167387 - DNA, 100 bp, Homo sapiens
tgcttctgaaacgtcagctgcgctcccctaggagtgctgagcccgcggaaccgcagccatgatgaactctttgccagcagagaggatccaggaaatacag

SEQ ID NO: 167388 - DNA, 118 bp, Homo sapiens
atcggggaggtggccctagctgtgatatttgatgttgcaagtatcatcctgggctccaaggagaggggtgtccgcaatgttgccagtgtctgtctgcagattggctacccaactgttg

SEQ ID NO: 167389 - DNA, 74 bp, Homo sapiens
gtcgtcggcctctgggcagcagggaagaatggacagaagctatccaggctgtagcagacagactgcagaggcaa

SEQ ID NO: 167390 - DNA, 101 bp, Homo sapiens
ccctggagtaaccctcactggagaatccagaggaacgtgttgtgggctttcacgtactgggtccaaatgctggagaagttacacaaggctttgcagctgcg

SEQ ID NO: 167391 - DNA, 100 bp, Homo sapiens
aggacattcacttacgccaccgccatcactttcatcacatggatcctcatccagtttgcatttaggcaacctaatgaggcctctcttgaattatggtatt

SEQ ID NO: 167392 - DNA, 90 bp, Homo sapiens
acctggcggtggggctgcggcgcctgggactgcaccgcaccgagggcgagctccaggttgtggcagcactgcctgaaggtatgagaccag

SEQ ID NO: 167393 - DNA, 100 bp, Homo sapiens
gctgtttcatctctatggctgtcagaggtgggcggctttgaccgagaggctgctggagctcgtgtttggacgcctcttggagtttgacaaggagttgtct

SEQ ID NO: 167394 - DNA, 115 bp, Homo sapiens
ttgaatcacacgtgtaactactacctgcagccagaggaagacgtgaccattggagtctggccaaatttgagtttcatcatggtgactatgaaaaacagtttctgcatgtactgag

SEQ ID NO: 167395 - DNA, 100 bp, Homo sapiens
gcgcaccaagactcttatcaaggatcagttgcctaagaaggaagaccggctattgctctggccatgagccgggatggctcaagcgggggtgtcatctacc

SEQ ID NO: 167396 - DNA, 75 bp, Homo sapiens
agatgcaagtgatgatggaatcttggccaaaatcgtgtcctattttgtaacggattatgatccaaccattgaaga

SEQ ID NO: 167397 - DNA, 100 bp, Homo sapiens
ctcggtcccgcgctgcgcatccccgcggacgccacagcgcttaatctatgccagcaattatgacaatgttagcagaccatgcagctcgtcagctgcttga

SEQ ID NO: 167398 - DNA, 75 bp, Homo sapiens
ggcgcttcccctttccagagagccagaaagaagagtatctaactatcaagttgaagaagatataggaaagttgaa

SEQ ID NO: 167399 - DNA, 82 bp, Homo sapiens
ccatatttgataaacaggaacttgagcgagttcctggggaaaaccccagggcaaaacgctcagaaatggattcctgcacgaa

SEQ ID NO: 167400 - DNA, 83 bp, Homo sapiens
atcgccaccatctttgtctttgcagtggtcatctatttccaggctccttctcctgaaaaagccgaggaggagagtgagaggct

SEQ ID NO: 167401 - DNA, 83 bp, Homo sapiens
gcctgcggagcctgtggggcaggttattctggtacaagttaacccaggagaagcatttacaataagaagagaagatggacagt

SEQ ID NO: 167402 - DNA, 49 bp, Homo sapiens
ccaatatttccattggagatgagtagacccaaatgatttgtacattgta

SEQ ID NO: 167403 - DNA, 75 bp, Homo sapiens
tttgaggaggttctggatttggtggacgccgtcatccttacggaaaaggtcaggaattgggctgggctggcctgg

SEQ ID NO: 167404 - DNA, 96 bp, Homo sapiens
agggcttcaagaagcgggcggcgtgcctgtgcttccggagcgagcaggaggacgagagatgcgacttgctctgttgtccagacttgagtgcagtag

SEQ ID NO: 167405 - DNA, 75 bp, Homo sapiens
cccacacccagtgcgccgcggcccgcgctcggccgcccgccgatgagcagcaccagcagtaagagggctccgacc

SEQ ID NO: 167406 - DNA, 100 bp, Homo sapiens
attcctgcagatgaaaaagtgtgacttggcagctgacaatgcatgcccactctcagttctgcatgagtggggaccacacgttagaagggacagaacatgc

SEQ ID NO: 167407 - DNA, 90 bp, Homo sapiens
ggaagttttggaactgtctatctggtttcagacaagaaagccaaacgaggagaggaattataaacattgacgatcttgaggatgaccctg

SEQ ID NO: 167408 - DNA, 100 bp, Homo sapiens
tccgtgtgagccgtgccctccatgcctctgctttgaagcacagggccctgagcctccaggtgcaggcaagccgattttttcagttgatattcaccctgac

SEQ ID NO: 167409 - DNA, 50 bp, Homo sapiens
tgaagctccccaaggagctgcaggtgaccaagaatatggcccaggtgacc

SEQ ID NO: 167410 - DNA, 99 bp, Homo sapiens
agagtgaatgtagttgcaccaggttagagccacagctgaaacaactacaaacaaaatatgatgaacttaaagagagaaagtcttcccttaggaatgcag

SEQ ID NO: 167411 - DNA, 90 bp, Homo sapiens
gactctgcttgtgttcgtggccacgctgctgatcgtcctgctgctgatggtgtgcggttccagcaacagatagaaatgctttaagttcac

SEQ ID NO: 167412 - DNA, 75 bp, Homo sapiens
cctggctactcacagttgaagcctgattgcaggtacctgtgtgacaaggtcgtccctgggaacagggttaccatc

SEQ ID NO: 167413 - DNA, 102 bp, Homo sapiens
ccgagggcggaggcgacactctcagtcactgtatatatgccttatttcctgggtccatgggaagcatgagtctgttgggacttgggacaagaagaaaacaag

SEQ ID NO: 167414 - DNA, 83 bp, Homo sapiens
ctggtcttggtagcggaggcacccgaatgctgcccgggtgaggatggattggatgctttggtatatgatttggattttcctgc

SEQ ID NO: 167415 - DNA, 90 bp, Homo sapiens
cccagcacccactctctgggggcaggtgggcccggtgacagacttaattcagtgcacaaatgagatgaatgtgaacatcccacagttggc

SEQ ID NO: 167416 - DNA, 75 bp, Homo sapiens
cgaaaatggaacagcaacaattagagcctctgctgcgagaagttctggagaagcagccagtgctaagccagaccg

SEQ ID NO: 167417 - DNA, 90 bp, Homo sapiens
ggaatgtcggattgcacatcctattgtaaaatgtacttactgcagatcagaatttcaacaagagaggtcctggcctggttcgaggagggc

SEQ ID NO: 167418 - DNA, 83 bp, Homo sapiens
ctaaaaacaaaattgccagaaaatctttcctctaaagtcaaactgcttcattaccatctcagaagcagcaaaggagccagcaa

SEQ ID NO: 167419 - DNA, 90 bp, Homo sapiens
tggcaatcggcccagaagaaggaatcagttacctaacggacaagggctgcaatgtctcggaggaccccatcctagccctacctgtctcgg

SEQ ID NO: 167420 - DNA, 98 bp, Homo sapiens
aaacgttcgaagaatgacagcaagccctactgagcgtgctcccctctgagactggagtgagagggtcttctggtgccgtggccagcacagaagtgaag

SEQ ID NO: 167421 - DNA, 80 bp, Homo sapiens
tgccagaatttcctgcgctgttccacctcattcaacttcagtggagacctttggcgacttggcctttggcgacatcttcc

SEQ ID NO: 167422 - DNA, 50 bp, Homo sapiens
gccctcaaggccatgatcaaaacgcccgggaggtcaagcgggaggccctg

SEQ ID NO: 167423 - DNA, 78 bp, Homo sapiens
aaacaggtccctggcgagccccttgcaggggtttgttaaagttgttaagaataaggcctactttaagagataccaagt

SEQ ID NO: 167424 - DNA, 74 bp, Homo sapiens
tgggcatctaccagatgtacttgtgcttcctgctggccgtgctgctgcaggagaaatccctccctggtgtagtg

SEQ ID NO: 167425 - DNA, 82 bp, Homo sapiens
aactttctgggcgttcatgatcctggccagcctgctcatcgcctactgcaaaggatatggccctgaagccacatgagcggaa

SEQ ID NO: 167426 - DNA, 93 bp, Homo sapiens
cggaattcgggaccgactgacggccggccggcttcccggaactggaaggattgccaaggatccaagatttgaacgattaccatgtacacacaa

SEQ ID NO: 167427 - DNA, 83 bp, Homo sapiens
ccttaaactccctaaaatctccgcagctctggttcctgttgcggccgatcaatgtccgagttaccaccatggatgcagagctg

SEQ ID NO: 167428 - DNA, 100 bp, Homo sapiens
gctagcactcatccgcttccgggtcaagggtgccactgcggtgcacattcagcttataatggaacggctgctgagaaggatcaaccggacagtgattggg

SEQ ID NO: 167429 - DNA, 100 bp, Homo sapiens
gcgccacggtggatcagcgcctacccgagtgtgcgaagctagccaagaatgcctctctgtatggaacataaaatttcaaacactacagacttcaaaagag

SEQ ID NO: 167430 - DNA, 100 bp, Homo sapiens
cacaggagcctggaagggctcaaccaagagctggaggaggtatttgtgaaggagcagggagaagaggagctgctgagggaggcactggctacaattaggc

SEQ ID NO: 167431 - DNA, 74 bp, Homo sapiens
gaccgggacctgttggttgtcgcccatgatctgatccggaagatgtcacctacaatgcagatcttcgtgaagac

SEQ ID NO: 167432 - DNA, 90 bp, Homo sapiens
ccggtttgacgcacacggcaccaaactgcttccagctggtctttttaccctttgctgatgataaaaggaagatgccctttactgaaaaaa

SEQ ID NO: 167433 - DNA, 50 bp, Homo sapiens
cccggggcagggctcgggagagcggagtgaagacatttccacctggacac

SEQ ID NO: 167434 - DNA, 80 bp, Homo sapiens
ggtctcactgagttctagaatgaagctgcagaccctcgcagttaattatagaaaatgccaagtaggaaatttgccgatgg

SEQ ID NO: 167435 - DNA, 75 bp, Homo sapiens
ctcatcaagtatggacatttaagagtgaatcagaccttcaactggaatacaagaatgaatctgaagtctgctgca

SEQ ID NO: 167436 - DNA, 83 bp, Homo sapiens
cgcctgctgggagcgccgctcaagaataaatccaccagtaccccaacttctccggggccccggactcattcaactccctccat

SEQ ID NO: 167437 - DNA, 82 bp, Homo sapiens
gtggtgtccccactgagctcttggaagagagcttcaaggttactgactttttatgatgtttggtggctatgagactatagaa

SEQ ID NO: 167438 - DNA, 100 bp, Homo sapiens
cagtgtttccacaatggaaccaattgttttacagtctgttccacatgatcattgtaataaggatgatgatgacgacatgggagaggatgaagatgaggac

SEQ ID NO: 167439 - DNA, 100 bp, Homo sapiens
ctaagaagagccagggcctgtggagtgactactcaggatcgacgattcaatgatgaaatcgacaagctaactggatacaagacaaaatcattattgtgca

SEQ ID NO: 167440 - DNA, 76 bp, Homo sapiens
ccctgacttcctgcctggactccaaagccttcttattgactcctaggaatcaagcgctagtcctgctgatgggcaa

SEQ ID NO: 167441 - DNA, 75 bp, Homo sapiens
gcattgtccattcgaagtgttggcagtcacaggggcatcagtgggagaagattcctctgagtggcagtaaccagg

SEQ ID NO: 167442 - DNA, 100 bp, Homo sapiens
ccatcaccgagcgcttgatgtgcgcggagagcaatcgccgggacagctgcaaggccaggtcagagcagcccaccatgggatggggagggggtggaggctg

SEQ ID NO: 167443 - DNA, 51 bp, Homo sapiens
ctacaaccttcgatctcctgacgaagcaaaatatgctgtgaattccatcaa

SEQ ID NO: 167444 - DNA, 141 bp, Homo sapiens
gcaaagggcaacagccgccccgctccgcctcggcggggccagccggcgagtctaaacccaagagcgatacatgtcctgaaactgaacaaaatggaactgttaccatttcatgctgatgtggagattggccagattatagaa

SEQ ID NO: 167445 - DNA, 82 bp, Homo sapiens
gcggcagcgggtcctacgaggagggctgtcagagcctcatggagtacggtgttggagagcacaatggctgaacaagtccttc

SEQ ID NO: 167446 - DNA, 98 bp, Homo sapiens
tcgccccctacccgcttctcgtagtcctgggagcacagcagaagtgacttggatgttgtgggtgatggtatgcagtgtcctccttcacctttgctttt

SEQ ID NO: 167447 - DNA, 73 bp, Homo sapiens
ccctcgcttatcctgtgggggccgccgggctgcggcaaggttgaaaggattgttgacaaaaggaaaaataaaa

SEQ ID NO: 167448 - DNA, 100 bp, Homo sapiens
ggccagctctaagaattcctgctacgacactgaattcaaccaggagttaaaagatgttgatactcggaaaatcataaaagcaatgctttcttatgtgtgg

SEQ ID NO: 167449 - DNA, 100 bp, Homo sapiens
gggagctgaacgtggacagcctcatcacccggctgctggaggctgccgcagcgggaaccgcaagagcttggtggtaggaacgccctccccgaccctctcc

SEQ ID NO: 167450 - DNA, 96 bp, Homo sapiens
ggagactgcaggctacctcaggggccgtccccaggacactgtccggatcttccctccctgatacactgcctctaggactgggacagatagccactg

SEQ ID NO: 167451 - DNA, 100 bp, Homo sapiens
cccagacgcggcacagagagggcctgggagcttgctgcagcttcagacggaatcagtccccaatgcctggaaattcctcattggattactgtgttttaaa

SEQ ID NO: 167452 - DNA, 75 bp, Homo sapiens
atgtaatttataaacgtgatgttggaggtgatcttgatactgcagcagtaaaagtggaatttgatgaagaattca

SEQ ID NO: 167453 - DNA, 100 bp, Homo sapiens
gcggcgcgcgaggtcaagctgctgctgctcggtgaatgaaaactttgccattgatttgatagcagagcagcccgtgagcgaggtggagactcgggtgata

SEQ ID NO: 167454 - DNA, 83 bp, Homo sapiens
cagagcgcggatggccgtaaccccgaaggaaatgaagcggggagaggtggtgagagatgacccctgttgaggatttcattggt

SEQ ID NO: 167455 - DNA, 83 bp, Homo sapiens
cgatccgggcgctcgagacttaccagagccacaaggaaacctcgacctgtctcccagttggttgcacagcaggttactcagca

SEQ ID NO: 167456 - DNA, 75 bp, Homo sapiens
ttaatcctgaaagccatgcagcgggcggctgccgagtgatagagcagaaggaggttcccaatgggctcagggacg

SEQ ID NO: 167457 - DNA, 75 bp, Homo sapiens
cccaagtagtccgatggctgcggctgcgccgaggcgccctactcaggttttgcactgattgcaaaaataaagtcc

SEQ ID NO: 167458 - DNA, 101 bp, Homo sapiens
ttttccttctgaaccagggttctgcatccactacaacattgtcatgccattgtctgagggaagtcaaaagcatgcaagcctacagaaaagcattgagaaag

SEQ ID NO: 167459 - DNA, 101 bp, Homo sapiens
cctgaacaggcagggccagacccagtgggaagttgctgaggtggttttggaggtgttttataaattgctcagagattatgagcctcagcttgaagattttg

SEQ ID NO: 167460 - DNA, 108 bp, Homo sapiens
aagattttggtagagaagaatgaacattgtattgagaacaatatagatttgcaggtatgggctacgtgagttcgtggtgattgcccctgctgcacacagtgacgctgt

SEQ ID NO: 167461 - DNA, 80 bp, Homo sapiens
gcagaggaaccacacgctgatcatggtaccactgatgaaattatgaccaggtgggcccgagttagtaccacatataacaa

SEQ ID NO: 167462 - DNA, 100 bp, Homo sapiens
tgaaggaaaaccctggaggttcagctttagcttgaggtttcaggatttggagttccatggagtgatgagattttattttcaagataaagctgctggaaac

SEQ ID NO: 167463 - DNA, 100 bp, Homo sapiens
actccaggatttctgaagactattgtggaagaagcatccattaaggtatgcccaaccatatacacatgggagcaggacctccacctcagtttaaccggat

SEQ ID NO: 167464 - DNA, 80 bp, Homo sapiens
gtcacaggccatgctctggcaaaaacgtcctctcagggtgcgccatcattgtccgaggtcagcctcgtggtgggcctcct

SEQ ID NO: 167465 - DNA, 89 bp, Homo sapiens
aagtttgcagatcgggagcgcaaggtcgccctcaaggccatgatcaaaacgtggcggtggaaatcgcaaaggcaaaagcaagaaatggc

SEQ ID NO: 167466 - DNA, 108 bp, Homo sapiens
ctctgaactgactgccccgcatcaccggagcgtcccagctgcgaggaggtgctggagaatctggtaaaagcaccattgtgaagcagatgaggatcctgcatgttaatg

SEQ ID NO: 167467 - DNA, 74 bp, Homo sapiens
tcggggcgcgatgcccaggccgcgccgccacgagatccagacatttaatgtggatgcaccatgccagaccgtgg

SEQ ID NO: 167468 - DNA, 99 bp, Homo sapiens
ctcgatcctgctggctgctgtctctattctctcggcctgtcagcaaaggcagagcggcttgggtaaatccaccttaatcaacaccctcttcaaatccaa

SEQ ID NO: 167469 - DNA, 98 bp, Homo sapiens
atagccactgcgaagtgaacaccgagtggctgccgcccatgctgcagcgggtgaaggaggatatggcctaccagatgacattgtgatagaaaagaggg

SEQ ID NO: 167470 - DNA, 110 bp, Homo sapiens
agacggagctaagagatatctgcaatgatgtactggaggactcagagagagtaatgataattaccggaccaaacatgggtggaaagagctcctacataaaacaagttgca

SEQ ID NO: 167471 - DNA, 98 bp, Homo sapiens
gttctcgcaactgttacaaaaccagttggtggtgacaagaacggcggtacccgggtggttaaacttcgcaaaatgattgtgatacaggttccagccct

SEQ ID NO: 167472 - DNA, 101 bp, Homo sapiens
cgacgagggagtcgatttacctggagaaaggagtgcctggctgttatggaaagtcatggctccgatcttcatcttgaagaagagtgacattgggtgactgc

SEQ ID NO: 167473 - DNA, 98 bp, Homo sapiens
gccttcgtacccgtcttgattgagatgagcagcagctgctcagggctgagcagggtcctggtggccgtggctacagccctggtgtctgcctcctcccc

SEQ ID NO: 167474 - DNA, 100 bp, Homo sapiens
ctctcagccagcacagctcaggccagttcgtcggctgccagcaacaatcaccagcctttatgaaattccagctgtgtcctcatcatccttttttgaagag

SEQ ID NO: 167475 - DNA, 97 bp, Homo sapiens
gctatgtggcgaatatcttcccttacaagggttatatatggaattatggtaccctccctcaggaatgttttaaaggaagttgggctactcacaagtt

SEQ ID NO: 167476 - DNA, 82 bp, Homo sapiens
gtcattcctgcctttgagcggactcccttttaagatttttattgaaggatggtcagctgtggctatgtgctcctcaggcaaa

SEQ ID NO: 167477 - DNA, 75 bp, Homo sapiens
gcggggtccgggtccggagcgccacattgagaagctgatgtctcctcgacttccaactggaaccttgaaccccca

SEQ ID NO: 167478 - DNA, 50 bp, Homo sapiens
tggtctcgaactccggacctcagagaagctggacgagatgctggcagccg

SEQ ID NO: 167479 - DNA, 74 bp, Homo sapiens
ctgcgtgaggtcaacctgcgcccccagatgtcccaggggcttgcttctgacatgtctgatgagcgcattcctgc

SEQ ID NO: 167480 - DNA, 106 bp, Homo sapiens
gggaagatcgcaccgcggacgcccgctgagcttggcgcacgggccgaccaggattatatctgtccaagatgcgagtctggttttatcgaggagcttccggaagaga

SEQ ID NO: 167481 - DNA, 89 bp, Homo sapiens
gctatattctcgtctgtggcttctgggataaaagtttcagagtctattctacagacacaggattttctgccgtctcttggcaaaaatgg

SEQ ID NO: 167482 - DNA, 51 bp, Homo sapiens
tcgtgaagaacctgaaggacacactaggggctaagccagctctaccataac

SEQ ID NO: 167483 - DNA, 100 bp, Homo sapiens
tctttctatgtgcagattgacttcagtcgtccatatgaccccagaagggatctcttcagggtggaatacgtcattgagtctagctctgttgcccaggctg

SEQ ID NO: 167484 - DNA, 74 bp, Homo sapiens
aaaggtctggacactgaaaccaccgtggaagtcgcctggtgtgaactgcagtcggcagaaccaattgaaagacc

SEQ ID NO: 167485 - DNA, 51 bp, Homo sapiens
tatccattgggcagcatatatgggattactacagcatcccatttcccacac

SEQ ID NO: 167486 - DNA, 83 bp, Homo sapiens
gggctctggtgatggactcatccccacagaaactggaggcggcccactttgacgaaaagaaggagatcaacaaacggaagcag

SEQ ID NO: 167487 - DNA, 49 bp, Homo sapiens
aaagttcgtgaatctcaacttgtatgtgtacattccagtgggcgggtcc

SEQ ID NO: 167488 - DNA, 75 bp, Homo sapiens
acataccaattcttgaatgacatccgagcgaaagagaaagagtgggctcgggatgagtttgaaggcctcttcaag

SEQ ID NO: 167489 - DNA, 100 bp, Homo sapiens
gccgggcggagagaactcagcgaggattctgaggttcctaaaagtaaagctctagaggccgtcaaattggcaatagaagccgggttccaccatattgatt

SEQ ID NO: 167490 - DNA, 87 bp, Homo sapiens
tggcgtggagatatggcgcaactgcggcgcgtgtacgaagccatcgacagcagagatggagcatcttgtgcagagttggtgtctttt

SEQ ID NO: 167491 - DNA, 100 bp, Homo sapiens
cacgcaccacgacggcgccatcaccgagcgcttgatgtgcgcggagagcaatcgccgggacagctgcaagtaatagctcttcaagtctgcaataaaaaat

SEQ ID NO: 167492 - DNA, 100 bp, Homo sapiens
ggaggagcagttccagcagggcaagcttcttggccaccagcccctcgggttccaagatgcagctactggagacagagttctcacacaccgtgggcgagct

SEQ ID NO: 167493 - DNA, 82 bp, Homo sapiens
caggagctcctgacttgggaccatggtgattcttcagcagtggaagatagatgataagcctgtaaaaattgacaagtgggat

SEQ ID NO: 167494 - DNA, 73 bp, Homo sapiens
ccgcaagtacccgtccatcatagtcaactgcgtggaagagaagtgtttgctttcacaaccaaagttctgggcc

SEQ ID NO: 167495 - DNA, 82 bp, Homo sapiens
tcggataccagcgctcagcccacctgtgattatggtgacttaagagattaaaattaatttggttgctgttggttctgaacaa

SEQ ID NO: 167496 - DNA, 90 bp, Homo sapiens
cggggcgtctcgggcgaggagaggaggtgaccccgcgaaagtgcaagcagctaatgactcagtctgtagactccaacagagggaacagga

SEQ ID NO: 167497 - DNA, 75 bp, Homo sapiens
ggaaccaaggagaaaccatttaaaacaggtctaaaggtgcataaggcaaatccaatacgcaagtaccagggtctg

SEQ ID NO: 167498 - DNA, 75 bp, Homo sapiens
cattgggtcttcgggagtttcttgtgcaagatgaattcctcagagagagaagactgtaataatggcgaaccccct

SEQ ID NO: 167499 - DNA, 50 bp, Homo sapiens
cgccgctaggatgaagctcgtgagatagacgatcagctgaacactctctt

SEQ ID NO: 167500 - DNA, 98 bp, Homo sapiens
tcaaccttgtgggatgtgaaaactctgttactgaagattttgaagccagcttcataaggctattggacaaaataacgaatggttctcgaattgaaata

SEQ ID NO: 167501 - DNA, 101 bp, Homo sapiens
gaggctgtcatcaccgccatgcccaagaataaagcatcatggcagaacaggatgtggaaaacgatcttttggattacgatgaagaggaagagccccaggct

SEQ ID NO: 167502 - DNA, 100 bp, Homo sapiens
cctcgtcctggtcaactatatcttcttcaaaggcaaatgggagagaccctttgaagtcaaggacaccgaggaagaggacttccacgtggaccaggtgacc

SEQ ID NO: 167503 - DNA, 49 bp, Homo sapiens
cctgctaacagaactggaccttttcggttggtaacaaggaagatgctga

SEQ ID NO: 167504 - DNA, 52 bp, Homo sapiens
agcgggcagagaagcggcccatcctgtctcatgtcctcctcacattcttcca

SEQ ID NO: 167505 - DNA, 128 bp, Homo sapiens
aagtatgttgtaccttgtgacagaatatgccaaaaatggagaaatttttgcatgctacaagtgaaaactgatgagaaactgaatgtgtctgatgagaatacagcaagttgccctttgagccccattaa

SEQ ID NO: 167506 - DNA, 82 bp, Homo sapiens
cgagcagcgccagcggccgagcgggcggcttcctggcctgggcgctccggtggcggcggagacgccgcaccaggctgcaggc

SEQ ID NO: 167507 - DNA, 73 bp, Homo sapiens
atgtcgggacaccccggaagctgggaaatggttgaggaacaggttagcaccactgagagagtgtttcaggata

SEQ ID NO: 167508 - DNA, 75 bp, Homo sapiens
tgggggccacaaatgctccttctcctggagacgcaactcaagtgtaggtggtaagagacgtcggggactgaggcc

SEQ ID NO: 167509 - DNA, 97 bp, Homo sapiens
caaagccagcgttacagtaatgttccaggttctgggaacactttttatttatgtcttatttatggttgaggaattcagaaaagagccagtggaaaac

SEQ ID NO: 167510 - DNA, 90 bp, Homo sapiens
acttgactgtatacagaatcttgaatcagaaattgagaagctggtgctggagaatctggtaaaagcaccattgtgaagcagatgaggatc

SEQ ID NO: 167511 - DNA, 51 bp, Homo sapiens
tggagaacctggcacttatgtcctccctggaaatgcactcggtgatggaaa

SEQ ID NO: 167512 - DNA, 100 bp, Homo sapiens
ctcccccgcgtccctgcgaccgccgcggcgaagatggagatggcagcagaaaaggccaaagcagcagccggggaggccaaagtgaaaaagcagctggtgg

SEQ ID NO: 167513 - DNA, 98 bp, Homo sapiens
ggccatcaaatgtagcacataattttctttctaagcaatggtatggagagatttcccgagacaccaagaactggaagattatcctgtgtctgtttatt

SEQ ID NO: 167514 - DNA, 83 bp, Homo sapiens
ccggcttctgctgttgctcttctccgccgcggcactgatccccacagtacctggagtagaacagaaaaattattatgtctgtg

SEQ ID NO: 167515 - DNA, 74 bp, Homo sapiens
gtcttccgggaaagtatggaaaacccaaattgcattgccatttttgaaaaatacagtaattcttctgtatccat

SEQ ID NO: 167516 - DNA, 50 bp, Homo sapiens
aacaaacttcaccctcaactacctcaggctgcaggacaagttcgagcatc

SEQ ID NO: 167517 - DNA, 100 bp, Homo sapiens
caggacatcatctgcgacgtggggatctagaggaagcagagcactttgccatgatggtgatcagcctcggagaggaagccggggagttcctccccaaggg

SEQ ID NO: 167518 - DNA, 100 bp, Homo sapiens
gtgcgacgtgcacttcctggtgggcaaggggctcagctcgcagcgcatccccgcgcacaggtaactaggatttctacctcaaccgcgagacctatgcaag

SEQ ID NO: 167519 - DNA, 90 bp, Homo sapiens
ccaggctcagcatcctaaccccgcggcaccacctgcagaggagctgctcctgcaatggttactataacaacagtaccaaggtggctgtga

SEQ ID NO: 167520 - DNA, 82 bp, Homo sapiens
ctgtgacggctttgaggccagcaccgacgcagccctggaggtttaactatagatcaacacatcatcttgcatctcatgggtt

SEQ ID NO: 167521 - DNA, 100 bp, Homo sapiens
tgtggctgcggttgtaccagtccaacctggtgctggtctccgccatcaacgtaccgggtgtctggtccgagccgtggagatggccgcccagcgccaggcc

SEQ ID NO: 167522 - DNA, 75 bp, Homo sapiens
ccagtcaataggaagtacgagtgaactttatattgctgttggaatatctggagccatccaacatttagctgggat

SEQ ID NO: 167523 - DNA, 75 bp, Homo sapiens
ctttataccacctgcgattactgagaagtgccagaaagcccggaagcaaggaaggaaagtgaccaagcatgtggc

SEQ ID NO: 167524 - DNA, 74 bp, Homo sapiens
ttatacaggattagatgcagacctcatcttgacctaacatctgtaaccagctacagaagtcaagattccaaaac

SEQ ID NO: 167525 - DNA, 90 bp, Homo sapiens
ttttgaagatggaatccgtagcgcccagctcattgcctcagctaagttttactgcaatcacagcaaccaaccccatttggcttataaaga

SEQ ID NO: 167526 - DNA, 88 bp, Homo sapiens
cccttagcgtggactgggctggccccggaagcccccacgggctctacctgaccctgcagatggagaggagaaaacctatggtggctgt

SEQ ID NO: 167527 - DNA, 100 bp, Homo sapiens
agcgagaggctgttttagaaagaaatgaaatgataaaactacaaaggactagaattctcaaggaaaaactgaagtaccgacaccggagcctcttgcagcc

SEQ ID NO: 167528 - DNA, 100 bp, Homo sapiens
aatcccagaggaaactgacggagacgcagatgtggacttgaaagaagctgcagcggaggaaggcgagggagagaagtcttttttcctccagccaggagag

SEQ ID NO: 167529 - DNA, 74 bp, Homo sapiens
ccacactatttatatcaacaacctcaatgagaagatcaagaaggatggattttgaatgtggaaatgacgtggaa

SEQ ID NO: 167530 - DNA, 75 bp, Homo sapiens
ccaagatacactgtactggaacaactataagccatgcactgaagtattatttatagatatattccatgaatataa

SEQ ID NO: 167531 - DNA, 82 bp, Homo sapiens
aaatattggttgacttccggctttctaagacattggaagagcatgaggcagagacaggaatgaagtctaaagaagccagaaa

SEQ ID NO: 167532 - DNA, 75 bp, Homo sapiens
tccatcctctggaaatcagctgtgctggctggaggcgtgatcctgggtgtggccctgtggctccgccatgacccg

SEQ ID NO: 167533 - DNA, 75 bp, Homo sapiens
aatctaaaaagaattaggaaggtccttcagtttccaaggcaggaaaggtaaagagacaaagaaagtgccttgtac

SEQ ID NO: 167534 - DNA, 99 bp, Homo sapiens
caccatggacagcgtgcggtctgggccttttgggcagcttttccggcctgacaacttcatctttgacacagaaactgatgaccagcaacttgaggaagt

SEQ ID NO: 167535 - DNA, 50 bp, Homo sapiens
ccccattgctgagccagcggagctgcttgatcgaagccgcggtcaaggcc

SEQ ID NO: 167536 - DNA, 75 bp, Homo sapiens
gagctggggcaccgagctctgggtacctgtgcgtgcacgcagacgggaagggctggggaagcgggaggactgaga

SEQ ID NO: 167537 - DNA, 90 bp, Homo sapiens
tttatgttgcagactcctacaatcacaaggtacttaaacttcacccttgtttagcccctattaaggttgctttggatgtaggaagaggcc

SEQ ID NO: 167538 - DNA, 90 bp, Homo sapiens
tggcttcacatttcaacctgaaagaaaaggagtattttggaataacattcatagatgacacactcaagaatgaacaatccgtcagaaacc

SEQ ID NO: 167539 - DNA, 107 bp, Homo sapiens
atcctgccgtccttctccactttcgccagcccgtgccgcgagcgcggcctgcaggaggggccaaaccagtgctcctgccacctctctggctgccccctagagcctgc

SEQ ID NO: 167540 - DNA, 78 bp, Homo sapiens
tttttgcttgtgttttttggagcattttttgcagtgtggtgctacagaatgcagagagctggaattccttgtccaaca

SEQ ID NO: 167541 - DNA, 75 bp, Homo sapiens
ccctcttcactttcctcggcaagaaatgtgtgattcaaacgctcaagaaattaaggacatttatggactaaatgg

SEQ ID NO: 167542 - DNA, 75 bp, Homo sapiens
gttcgctgcccagaagaagggaaggcgcgagtgaggaaaggaggtactgtaggttatgtgactacaattctggat

SEQ ID NO: 167543 - DNA, 78 bp, Homo sapiens
agctgcagccgcctgaccacggcgactggacttacgaggagcagtttaagcaggaccatgaatggcacctacaacacc

SEQ ID NO: 167544 - DNA, 80 bp, Homo sapiens
aactgggagacctgggtcccagtggagaggcctcaccatgtaaagtgacagtgtgttcgtgttcttctgaggtgtcagca

SEQ ID NO: 167545 - DNA, 90 bp, Homo sapiens
aacaccaagtgaattagtgaacactggagaacacatgattctgtgcagatttgcagaccagacagctgtccagctcccaccccaacgaag

SEQ ID NO: 167546 - DNA, 98 bp, Homo sapiens
tctgaaagctttattgggaagaaagcatcaggccaagccatcggaaaggattcagaatccatggctggaagaggtagtaaggccattgggagggcatg

SEQ ID NO: 167547 - DNA, 100 bp, Homo sapiens
tctcaattgttttaggggccagcagatgcaggaaaatttcgatattgaagtgtcaaaatccatagatggaaaagatggtgctggagaatctggtaaaagc

SEQ ID NO: 167548 - DNA, 97 bp, Homo sapiens
gggatctgaagacctcaccaagatcttcgtgaagactctgactggtaagaccatcaccctcgaggttgagcccagtgacaccatcgagaatgtcaag

SEQ ID NO: 167549 - DNA, 101 bp, Homo sapiens
caggtgggcagatcctcagatcagggatgccagatgatatgaacttcagtgatgtaaagcaaatccatcaaacagacactggcagtactttagacacaaca

SEQ ID NO: 167550 - DNA, 90 bp, Homo sapiens
gggtgtgtgggcgcccagcacgactcctcgggcagcctcaacgagaactcggagggcaccggaggtgaagaacgaggtggagaagctccc

SEQ ID NO: 167551 - DNA, 100 bp, Homo sapiens
tgctaaatatggagaaccaggagaagtttttatcaacaaaggcaaaggattcggatttattaagcttgccaagaagcttgagagaagaaaaatttcagaa

SEQ ID NO: 167552 - DNA, 75 bp, Homo sapiens
gatggaaatcctaatgacagtctccaaattcgcctccatctgtaccatgggagtgcatccgccccaacccttttc

SEQ ID NO: 167553 - DNA, 75 bp, Homo sapiens
tcttctgggagccagctgtgaccagaggaatagctccagccatccgggtgtggacactgccagcggctgcagccg

SEQ ID NO: 167554 - DNA, 73 bp, Homo sapiens
gtaaggccaaaaatgtgcatactcacagagttagagagagggatggtgactgggctggcttagatgaagatga

SEQ ID NO: 167555 - DNA, 101 bp, Homo sapiens
gaccaggaacctgggcgagcagcggcgggggcccgagggctgtccaggcagccatcttgtctggagacaagtctgagaatgttcaagatttgctgctcttg

SEQ ID NO: 167556 - DNA, 100 bp, Homo sapiens
ctcctgggatcggcccaaggccagttctccgcagatgttggggatcagccaggtgaggtaggttattcaggctctcctgctgaagctcctccaagcaagt

SEQ ID NO: 167557 - DNA, 110 bp, Homo sapiens
gagctacttcaacggaaactagctcatctgtagagactgatttgcaacccttccgggaagccatagctctgcatggggcctttacaacaactaaacggacaggcattcca

SEQ ID NO: 167558 - DNA, 102 bp, Homo sapiens
taagaagtttgccacagaggatgaggcctgggcctttgtcaggaaatctgcaagcccggaagtttcagaaggaatgatgagaagacagcagctgattacaag

SEQ ID NO: 167559 - DNA, 80 bp, Homo sapiens
accatggatcacaaccggaaccgcagggtggacatcgagcagctggatccccgcggccggactcccctgcacctggccac

SEQ ID NO: 167560 - DNA, 88 bp, Homo sapiens
gagttttcatggattctaatggaatcaggcagttttgtgtccatgtgaacaactatggagtcgggtggtacagttttgagtaccaact

SEQ ID NO: 167561 - DNA, 75 bp, Homo sapiens
gcagtggcgtcctggagccctcctcaggaagctgttttaggttatgtgaaagagatgtttcctcatctctaaggc

SEQ ID NO: 167562 - DNA, 51 bp, Homo sapiens
tggagtgcccccagcccagagcccggtgaaatgacaatggatgctctgttg

SEQ ID NO: 167563 - DNA, 75 bp, Homo sapiens
ggtgccgcagggtcgggctggcgcgaccctcgggaggaagaaataccaggtgcgcatgctccaagaaaaagccat

SEQ ID NO: 167564 - DNA, 74 bp, Homo sapiens
gttctccccggcacccgggagtcatcttcaaagccctgaagcaaacggggattcagcgtccgatcctttggaac

SEQ ID NO: 167565 - DNA, 101 bp, Homo sapiens
ccatggccagaaaacttttgggagcagcggaaagagctcagtgctagaaagcctggtggggagggacctgcttcccagaggtactggaattgtcacccgga

SEQ ID NO: 167566 - DNA, 75 bp, Homo sapiens
agactgtggatgaataatgctggccaacgagacttttgcttttgtgggcaacgtgactcactatgcccaggtctg

SEQ ID NO: 167567 - DNA, 74 bp, Homo sapiens
tcagcctcccgagtggctgggattacaggaagtcctggctgagcaaggttggaagccctagttctcgcattgac

SEQ ID NO: 167568 - DNA, 100 bp, Homo sapiens
tgtggactgcagtgctgcagtgccaggaacaagaccattttgttttactttaacctgttacgctgtaccagtccctccgtgttgctaaacctacagtgcc

SEQ ID NO: 167569 - DNA, 100 bp, Homo sapiens
gtatgatggcctggcgacccattcaggcacttatggccatttcagccagtgccaagtcctgccctgccaacttcttggcagctgccgacgacaaactcag

SEQ ID NO: 167570 - DNA, 75 bp, Homo sapiens
agacaatttagcatagacccagatctcctggttgatgtatgatctcgtgaaatcttgagagaaactgaatgacga

SEQ ID NO: 167571 - DNA, 74 bp, Homo sapiens
ggtacacaatggttatggatttttctaccatatcagagatgacagggcttacctgttgctttagacaaacatat

SEQ ID NO: 167572 - DNA, 59 bp, Homo sapiens
gcgcgagcgcgacgagtataagcggaggctgcacatggtccgtctaatgctgttggaga

SEQ ID NO: 167573 - DNA, 83 bp, Homo sapiens
aattcaaggtcacacaatgtcggggatggacctccagatttccttactggtgaattatgtaacctcattacgctggatgtagc

SEQ ID NO: 167574 - DNA, 75 bp, Homo sapiens
gaggaccccggcggcagacgcaggttcgggaccatgagctgatttcctcctctgatgctcctcttcagcctttgg

SEQ ID NO: 167575 - DNA, 80 bp, Homo sapiens
tggggagggttcgaagaaaacatccaggttatggaaacaaaggacatgctttacatcgtcactgaatttgctaaaaatgg

SEQ ID NO: 167576 - DNA, 82 bp, Homo sapiens
gccttgtttattttcctcaccactgaatctacagcttggatcctagcatgactatacattgtgacatggtcattacatatgg

SEQ ID NO: 167577 - DNA, 74 bp, Homo sapiens
ccaaggcaggcgagaagaccatctctgtggtcctacagctcctgcagtgtgatagtcctcggacagaatcacaa

SEQ ID NO: 167578 - DNA, 83 bp, Homo sapiens
ggctgtgtcaatgccattgaattctccaacaatggaggccagtggctggtctcaggctgatcagctgaccgaagaacagattg

SEQ ID NO: 167579 - DNA, 73 bp, Homo sapiens
cgccatgcgacctctccatgcagtcagtggaagtggcgggcaccatgccggtggaaaggatgcgcatgcgccc

SEQ ID NO: 167580 - DNA, 90 bp, Homo sapiens
tgtggatgcggcaagtctggatccagaatctttatatcaacggacatatgccgggtctttggccagaatgagtacctacgctatcaggag

SEQ ID NO: 167581 - DNA, 82 bp, Homo sapiens
gtttgagcccaaccagacctggcctgggctgcacagcctttgggtggatgacactgcagggcaggaagagcaggggcactga

SEQ ID NO: 167582 - DNA, 74 bp, Homo sapiens
gcacgtctaaagagccagttgattttgagcaatggattgaaaaagtagagatggggtttcgccgtgttagccag

SEQ ID NO: 167583 - DNA, 75 bp, Homo sapiens
ctgtgatgggccttcgcactcccaggggtagatgtgattaatggggccctcgagtcagtcctgtcctccagcagc

SEQ ID NO: 167584 - DNA, 96 bp, Homo sapiens
agcgagggtctgaagttcacgactactagaaggggaggggagtggaaaggctctcagtgaaaaaggtacaggtttgcagattccgccagcagcaca

SEQ ID NO: 167585 - DNA, 83 bp, Homo sapiens
tcttaacccagaagtagctgaatgtgttactccattgctgaggagtgttcctgagggaagacctcaattaccatgacccaaca

SEQ ID NO: 167586 - DNA, 115 bp, Homo sapiens
gctgatggtgatggagattttgatgtggatgatgccaaagttttattagggaataccttggcaagcagctccagtccgagcagccccagaccgctgccgcccgaagctaagcctg

SEQ ID NO: 167587 - DNA, 74 bp, Homo sapiens
gataccattaagtgcctaattcaaatgggagcagcggtggaagcgaaggttcttggtgagattcaggaaattgt

SEQ ID NO: 167588 - DNA, 101 bp, Homo sapiens
cctgatgcctgcaaagagtttcaagatgcaggtgaacaggctggacgtaaagaaagaagtgatgcactcaattctgcaatagataaaatgaccaagaagac

SEQ ID NO: 167589 - DNA, 97 bp, Homo sapiens
agagtttgtagcctattggaggaaaacacaccaaggaccgtataatagacgctggccccaaaggaaactactctcgatttatgaatcacagctgcca

SEQ ID NO: 167590 - DNA, 80 bp, Homo sapiens
tccgtggccttagctgtgctcgcgctactctctctttctggcctggaggctatccagcatatttggagttcttacaacat

SEQ ID NO: 167591 - DNA, 100 bp, Homo sapiens
acccttactcacttctgtgggagatgctatagaggccataatcatcaccatgcatcaagaagacttttctgggcatcctagaatacgtttccacacgggt

SEQ ID NO: 167592 - DNA, 96 bp, Homo sapiens
cccgaagccagttctaaatttttatgaagccaatttccctgaaaccagcctggacaccaagtctgtgtcagaaggccacctcaagaggaacatcgt

SEQ ID NO: 167593 - DNA, 75 bp, Homo sapiens
actcgctggagagggagacgcaggaagcgatgaaagagatgtctgcgaacagggcggatacctgaccaactcgtg

SEQ ID NO: 167594 - DNA, 51 bp, Homo sapiens
ccctgagcgaagccaagccgggcggcagggggtggcaccgagagccgacca

SEQ ID NO: 167595 - DNA, 88 bp, Homo sapiens
gcggggctgaggcggccgcggggcccgagcgcaggtttgtccagaggggttgcgtttatccggtttgacaaacggtcggaggcagaag

SEQ ID NO: 167596 - DNA, 101 bp, Homo sapiens
tgtcgctggagcacaaaagagtctccgcggtggaggtctgcgttgctcttgcttttcctcgctggggtgtacgtattatcagaaaatccacccagcttcac

SEQ ID NO: 167597 - DNA, 90 bp, Homo sapiens
cgccgagccacagccacgatgatcgcgggctcccttctcctggtccaagggcagccattaatggtgcaggtcagtggaggccagctaatc

SEQ ID NO: 167598 - DNA, 75 bp, Homo sapiens
atgatgttgtttgaagttgttaaaatgggcaagagtgctatgcagaagtccaaggcttgcgagaaggtcatttcc

SEQ ID NO: 167599 - DNA, 75 bp, Homo sapiens
ttcttcgatcgcagctacgacaagggcctcgcttggtaccggtcaaaatgcagatcttcgtgaaaacccttaccg

SEQ ID NO: 167600 - DNA, 100 bp, Homo sapiens
ctgagagtgaactttccatccggataggtagagctgggcttctttcaggatcagtgaatgcttgtgaaaagacctcatttatgtttctgcggcaagagtt

SEQ ID NO: 167601 - DNA, 100 bp, Homo sapiens
gcctggcctgcgcgccgctgcccgcgccacaggtgctggctgccagctgctgcgccccccatgtagaaggtgcacctcctgggagcaggcacgtcttttg

SEQ ID NO: 167602 - DNA, 99 bp, Homo sapiens
ggcaacctggacgagctggggcaacctgatctcggctgtcggagtgggtgtcctcaagaaaggtgtttggagaagagggattgaccctgaatcttgaag

SEQ ID NO: 167603 - DNA, 100 bp, Homo sapiens
ccctattgtgctcacacattcagaacctgttacccaaggaattccctaaagagtaaagctaaaacattttgagaaatttcaggatacagcagaagcatta

SEQ ID NO: 167604 - DNA, 83 bp, Homo sapiens
cctcagcgactcttctgacctccgcgcgacgtacccgccgccgccgttggctggaggatttcagatgcatgccaggtttccac

SEQ ID NO: 167605 - DNA, 100 bp, Homo sapiens
aagcaaggacaagaagctgtccgggacagactcggagcaggaggagcctgctgcaggcctgggagcggcagcggcaggaggagcggcagcaggccgagct

SEQ ID NO: 167606 - DNA, 100 bp, Homo sapiens
gccggggaggcagcgcgggatcccagcctcaggcgtgcgcggacggtgtgcggaatcccccacagcggtccacgccccttgccaacttccttccactatc

SEQ ID NO: 167607 - DNA, 50 bp, Homo sapiens
cccaagctcactgcactcctagggactatggcagttccaagaggaaatca

SEQ ID NO: 167608 - DNA, 100 bp, Homo sapiens
aagcagttcagaagagccaaggaataaacatgcaatgaacccaaaaggctccatcaagtatgatggtgaaggatgaatatgtgcatgactttgagggaca

SEQ ID NO: 167609 - DNA, 90 bp, Homo sapiens
aagtatcggaagaaagcagttccaaggtcacaagacacccacttcaggagtcctgcctcacacccacaggaaggaatcctgcacagagag

SEQ ID NO: 167610 - DNA, 75 bp, Homo sapiens
ttccaggttacatacagcttacatcttgcatcctcaagcgggaactgctcgcagaaagaagaaggtggttcatag

SEQ ID NO: 167611 - DNA, 75 bp, Homo sapiens
gttggatatttgcttggaaaaacgtgtgggtacgaccttggggccatggcacctgcaaggtgtttctcagcaaga

SEQ ID NO: 167612 - DNA, 100 bp, Homo sapiens
gctataatggatttggtaatgatggtatttgaaataccttaccaagaaataccttaagaagaacaatcttcgtgattggcttcgagtggttgcatctgac

SEQ ID NO: 167613 - DNA, 75 bp, Homo sapiens
aaatctagctcaagagttgatggccgttgctccagggagaactgcaaatatcttcatccacccccacatttaaaa

SEQ ID NO: 167614 - DNA, 75 bp, Homo sapiens
ggtgggcccagtcctcggtgcggcgcggccagaattactggaagaatttagtccagttgttgagagacttggatt

SEQ ID NO: 167615 - DNA, 101 bp, Homo sapiens
ttcacccggccggctgcggcgtggatcttggcatatacagaagggctgcatggaaaatggctgttcacagagatacgatcaatcttttctcgtcgttatct

SEQ ID NO: 167616 - DNA, 100 bp, Homo sapiens
cgaggagtctctgtccgggggcctggctaaggaaaccctattacctccaggccaaagaggtgctgaaaaaatatttggagtccaaggaggatgtggctga

SEQ ID NO: 167617 - DNA, 73 bp, Homo sapiens
gatggtgaatcatttgaactgaaggagcttgaagaaatccgcaaatgtgggatgaaaaacttccgtaacatcc

SEQ ID NO: 167618 - DNA, 49 bp, Homo sapiens
gttgaagactgtaaagatgaaggaaaattgcctaagaattatgacccaa

SEQ ID NO: 167619 - DNA, 82 bp, Homo sapiens
ttaaaaggaatcttggattataatcatgagcagcctcccgcgacgatgcccctcaacgttagcttcaccaacaggaactatg

SEQ ID NO: 167620 - DNA, 83 bp, Homo sapiens
ggggaagtggagtccgcagcccccgaatcggcagacaaatttacatgtattggagaccagaccagaagcccttctgaattaag

SEQ ID NO: 167621 - DNA, 75 bp, Homo sapiens
cacaggtccatacatgaagtcaccataagaatggtagctgagtggaggttgtctcgaggtgttgaagaacagaca

SEQ ID NO: 167622 - DNA, 96 bp, Homo sapiens
aagctccagagcctgccggaaggctccctcggtcgcgagtatctccgtttcctggatgtgaactacaagttgtgcaaagtgaggaagattactgtg

SEQ ID NO: 167623 - DNA, 90 bp, Homo sapiens
gcggagctgacggtggaggttcgcggctctaacggggctttctacaagccacagtacacgaacctggggctcctgaacagcatggaccag

SEQ ID NO: 167624 - DNA, 75 bp, Homo sapiens
cagccagcgtgtgcttacttcatgtctctgggtcacattttggagttccatctggaatatgacaaattagaagaa

SEQ ID NO: 167625 - DNA, 51 bp, Homo sapiens
atgggcatctattacattccactgccactgcagagccccgccatggaagac

SEQ ID NO: 167626 - DNA, 96 bp, Homo sapiens
cataactgatgatgtgcgggttcaggaggtacccaaactgaaggtctccataacccctcggacaaacgccgccctgggctttgctcagatgctccc

SEQ ID NO: 167627 - DNA, 126 bp, Homo sapiens
cgggctgcctttgaagtcctatcctccatggtgggggagggaggagccttccctcaggctacgtcatgtccattgacagcctccagctgggctatgcggaggatgggcactgcaaaggcgacatca

SEQ ID NO: 167628 - DNA, 99 bp, Homo sapiens
caagaagcatgcacttctcctcttgcaaagacccatacatcacaggtgctgatgtatggacagccgtatcgtgttaccttagagcttgagctgccagag

SEQ ID NO: 167629 - DNA, 100 bp, Homo sapiens
tcaatgtctggaacatctgtcccctgttcaaagtggatatcaaagtattgcagagtgccttagcagccatccgacatgcccgctggttcgaggaaaatgc

SEQ ID NO: 167630 - DNA, 100 bp, Homo sapiens
ctggtgctcagcgccgcggggatgggggcctcgggcgccccgcagccccccaacatcctgctcctgctcatggacgacgagtttcggacgtggctgaggg

SEQ ID NO: 167631 - DNA, 100 bp, Homo sapiens
caagagccaggaccccctagaagtctagaaatggtgttaataatgcagtttatggaatagatgctatgaacccatcttcaagagatgactttacagagtt

SEQ ID NO: 167632 - DNA, 100 bp, Homo sapiens
cgcccgggcgatgcccgcggggacgccgccggccagcagagcgaggacctgaaggagaagaaggagaaggtggaggagaaggcaagccggaaagagcgaa

SEQ ID NO: 167633 - DNA, 75 bp, Homo sapiens
ggaaaatatcccaaggactaatctgatcgggtcttccttcattagtcgtgaaaggtgccaaattggcagaggctc

SEQ ID NO: 167634 - DNA, 75 bp, Homo sapiens
ggaatctatagttaatcttggcgacattgacaatgatggctttgaaggttgaaactgatttctcaactccaacac

SEQ ID NO: 167635 - DNA, 51 bp, Homo sapiens
gctaaatcctaccagtctacaaaaggctgagtatgagtttatcagctctgg

SEQ ID NO: 167636 - DNA, 94 bp, Homo sapiens
cgacgcgctcaccggctgggtgggttcgagcaactaccggaaaatgcttggacagaagagatgagtactatttccactaaggcctagaattgcc

SEQ ID NO: 167637 - DNA, 74 bp, Homo sapiens
gcggcggtggaggaggaggaagaggtggcttccgaggaggcagaggaggaggaggtgaccacaagccacaagga

SEQ ID NO: 167638 - DNA, 101 bp, Homo sapiens
ttaacacctctgccgctgctaaaagtaggataagttctgaacgtcgaaaagaaaagtctcgagatgcagccagatctcggcgaagtaaagaatctgaagtt

SEQ ID NO: 167639 - DNA, 100 bp, Homo sapiens
accaggacaagagccgcgagtatgaccagctttatgaagagtacacacggacctcccaggagtggtatgaggagcatgccagggagcaagagcagcagcg

SEQ ID NO: 167640 - DNA, 100 bp, Homo sapiens
gcgggcggtgcggggccaagcgggcggcggcgggcccggcaccgggccgggactgggggaggcagatttcttataggaaagacgtgcaggacacccacac

SEQ ID NO: 167641 - DNA, 95 bp, Homo sapiens
aaaagcgaaggattgtggtcccgcctcacctggggtatggagaggaaggaagagtacatccagcagtggtcattcgacaacgaaagtcataccgt

SEQ ID NO: 167642 - DNA, 100 bp, Homo sapiens
gactgcccagagtccgcggccggggcgcgggaggaaacctgtaggaagtgtcagggactctggaaagaacataatggcctcacctgtgaagagctggctg

SEQ ID NO: 167643 - DNA, 83 bp, Homo sapiens
cagcgatggcagtttcatagtattgtttcaccagtgatcattaaagaatgggcagcttacaaaggaaagtctcctcaaacccc

SEQ ID NO: 167644 - DNA, 106 bp, Homo sapiens
ccggggcagccccgcggggagagcaccatgaggactgactcgggggctcggctggaggagggccacctggttcgagaacttgtcttggacaattgcaaatcaaatg

SEQ ID NO: 167645 - DNA, 100 bp, Homo sapiens
ctgtgccgggacccgaaatccttcctgtaccgcttatgccaggccgatcccgacctggactcagacaaggtctctaattaacagaagatggcaaagccca

SEQ ID NO: 167646 - DNA, 100 bp, Homo sapiens
gcggaggcggcgggactggtccctgggaaggtgaagaaggagctggaccctgacgacagccatttgaacttggatgagacgacgaagctcctgcaggacc

SEQ ID NO: 167647 - DNA, 95 bp, Homo sapiens
cagccaaccatgatgctgccatctttccaggaggctttggagcggctaaaaacctaatgaagatgttcgaccacacatcagagacagatttcgct

SEQ ID NO: 167648 - DNA, 80 bp, Homo sapiens
cagaggggccactgctgggccctgaggctgcaccaagtggcgaaggagccggctccaagaagctggcagggcggagatgc

SEQ ID NO: 167649 - DNA, 82 bp, Homo sapiens
ccgcatcctcatgtccccgtctgccaaggagctggtgctgcgggcgccatgtcagaaccggctggggatgtccgtcagaacc

SEQ ID NO: 167650 - DNA, 75 bp, Homo sapiens
gaggatctttgctcttccatccgcctttgatcgtcttcctcttcagccatccagtaccaaacgattccctggtta

SEQ ID NO: 167651 - DNA, 75 bp, Homo sapiens
gccgtcctcggcggcagtgtcaggattcaggaattgtagggcctcaacctatagactttgtcccaaatgctctcc

SEQ ID NO: 167652 - DNA, 75 bp, Homo sapiens
ccgctctccatcaaacaattcctggacttcggtgaagatggagctggaaaaacaagcttaataagaaaaattcag

SEQ ID NO: 167653 - DNA, 83 bp, Homo sapiens
gtgtggcgatggtcttcctgctggggctcatgtttgagggggatatgagactttctactcggaatatcctgagtgttgcgtgg

SEQ ID NO: 167654 - DNA, 75 bp, Homo sapiens
gattgcattggcaatgagacaggaggcaggtggaagtcatcataaagtttctgtttcacccgtcgtccatgttcg

SEQ ID NO: 167655 - DNA, 51 bp, Homo sapiens
ggggacagtttggtattaaaagtgtcagtgtgaagaaggggcatgagctgg

SEQ ID NO: 167656 - DNA, 98 bp, Homo sapiens
gccctctttatcgaggaccccactcctgctgggctgaagagcatcttggaggtttgggatgtacattccgttcctgcagctgaattgcgacctccgca

SEQ ID NO: 167657 - DNA, 82 bp, Homo sapiens
ccgcaaccattgacgccatgtcgggttattcgagtgaccgagaccgcggccgggaccgaggacacgatgaggcgagtggtac

SEQ ID NO: 167658 - DNA, 101 bp, Homo sapiens
tgcggctgtatggagcgattttgcagatgatcatagcaatggatcatttaacttgaaagctttgtcaggaagctctggatataagtttggtgttcttgcta

SEQ ID NO: 167659 - DNA, 87 bp, Homo sapiens
ccccagcttgttccaggcattgctggagatggatctgctgaccgcagcagggaatacagcagacagcccctcctcaacagacagtgc

SEQ ID NO: 167660 - DNA, 100 bp, Homo sapiens
ggatgatgtaaatgagcaacactccggatcagacactggaagtgtagaacgtcattcagagatagccgcaatggctgaaaatggtgataatgaaaagatg

SEQ ID NO: 167661 - DNA, 90 bp, Homo sapiens
ggaaagggtatcatggaaggcaactgtgtttcacttaccagaatactacgttcagctaaattaaggcgctacactaagtatgagaccagc

SEQ ID NO: 167662 - DNA, 100 bp, Homo sapiens
tctgggtagccggctgcgcgtggctggggaggcgaggccggacgcacctctgtttgggggtcctcagatcttggagtctctgtggatcgttatgagccgg

SEQ ID NO: 167663 - DNA, 83 bp, Homo sapiens
ggagtttgcaatccagccaaatacaactggaaaacagctttttgatcagggacccgagtgtatagccctccagagtggatccg

SEQ ID NO: 167664 - DNA, 51 bp, Homo sapiens
cgtgaagaacctgaaggacacactagctttccagagtgttgaatcttccac

SEQ ID NO: 167665 - DNA, 102 bp, Homo sapiens
gctagggaggacctcacttccccggggtgtaataatgttaactgaggccatccggctgtccttagagcaagccctgcctcctgagccaaaggaagaaaatgc

SEQ ID NO: 167666 - DNA, 100 bp, Homo sapiens
ccagttggcccagaggatctcttctaacatccagaagatcacacagtgttcaaagaagtttgtcatcctgatattggtggcaagatcataatgtgtcctc

SEQ ID NO: 167667 - DNA, 82 bp, Homo sapiens
cagaacctcaagcttttcaggcatcctcatataattaaacttgtgaaggaagaagtgttctggaggaactacttttaccgcg

SEQ ID NO: 167668 - DNA, 100 bp, Homo sapiens
ctgagttttgactagcggaagaaaagaaattggcgtgttagccaaggctttcattgaccaagggaaactcatcccagatgatgtcatgactcggctggcc

SEQ ID NO: 167669 - DNA, 100 bp, Homo sapiens
acggcgactgccagtggatcaccgcgctgcactacgcctttcaggacgagaaccacctgctacgagttccagggagctctgtcctggtgaccgtgcccgg

SEQ ID NO: 167670 - DNA, 90 bp, Homo sapiens
ggagttctggaacgggactttgcagaaatgtgtgcagactacatggcatctaccatagggatgccatggacaatattaccaggcagaacc

SEQ ID NO: 167671 - DNA, 83 bp, Homo sapiens
ctcatcgacttcggttcgggtgcgctgctcaaggacacggtctacaccgacttcgacggggttgcagatggtgtaggaggctg

SEQ ID NO: 167672 - DNA, 100 bp, Homo sapiens
gccttcccaaagtgtactgcatcatcagctgcatcggctgcttcggcttgttctccaagggttatgtgcttcacatgatcactactgcagcagaatggtc

SEQ ID NO: 167673 - DNA, 75 bp, Homo sapiens
tacccttcaaaaatttaaacaagaatccactgttgctactgaaaggggtctttacggaataaaggatgatgtctt

SEQ ID NO: 167674 - DNA, 99 bp, Homo sapiens
tgcgctgctgaggccgggccggccgcccagacgctgcccgcgggcccggccacggcggagccaagggatggaagcttcctggcgccaggtggccggtgg

SEQ ID NO: 167675 - DNA, 90 bp, Homo sapiens
tcacttccttcattggtattgaaagcaacaagggcaaagtatgtttagtccagcaagtatcggtcagccacgaaagacgacattatctcc

SEQ ID NO: 167676 - DNA, 98 bp, Homo sapiens
tcggaccagccatttcggtgtagaagtggcagcacggcaggactacaatgatgaaattcgtcaggaacaactacgtgaattatcttacttaaatggct

SEQ ID NO: 167677 - DNA, 101 bp, Homo sapiens
cgggtcttccagaaggctgtagaccagagtatcgagaaggctttcttagaaatggcttctgaggaagctgccgttactatggtgaattattacactcctat

SEQ ID NO: 167678 - DNA, 100 bp, Homo sapiens
tgagtcttccaaccagagcttgtgtagcgtcagatccttgagtgataaaggagtagagctgattgctgaggaaggggtggacagcctgaatgtcaaggag

SEQ ID NO: 167679 - DNA, 97 bp, Homo sapiens
caactggccatcagagtcaccaaccccaatgccaggctgcgcagtgaagaaaatgagttcctcatgagagtgctggactcctacggggatgactacc

SEQ ID NO: 167680 - DNA, 98 bp, Homo sapiens
tcacagagggagatgtcaggtgggagaaagggagcatcgagtacagctgtccggcctccaacgagtgtgagatcaccaagcggagacgcaaggcctgc

SEQ ID NO: 167681 - DNA, 75 bp, Homo sapiens
cgaagaatgaactctgagaatgtttggagggtgtcaaattgagaaccaggtagatccccaccacctacagtaaaa

SEQ ID NO: 167682 - DNA, 100 bp, Homo sapiens
tttcacagtttgcgggactcagtcccatcactccaaggagagaagccttacgacagtctgcctacctcacagacctgcttcttccagctgaggctgcccc

SEQ ID NO: 167683 - DNA, 101 bp, Homo sapiens
ccgaagggtccccgggacccgcctgctgagtggacccgggttgcaaagaaaggaggtacaggcccgagctgtgttctaccccctcttagggttgggaggag

SEQ ID NO: 167684 - DNA, 90 bp, Homo sapiens
tatattccctttgatgaaatgaaggaaagaatactgaaaattgtcactggatttaatggcatcttcacaactatttcacagtgactcttg

SEQ ID NO: 167685 - DNA, 115 bp, Homo sapiens
ctgggcagggcccccacgcacgcggacgggcaccagcacgtgcacgtgctcccaggacaaccctccatatgataagggagccttcagaatcgaaatcaactttccagcagagtac

SEQ ID NO: 167686 - DNA, 97 bp, Homo sapiens
acagtgggggtgtgcaaacccgagagaactgggacaccttgttggagtgtgtgaataagaaggtccccgtactgctgtctcggggcatggctcgcct

SEQ ID NO: 167687 - DNA, 90 bp, Homo sapiens
caacatttcaaagggaatacattgccagaacttggaatactctactggacaaacatttcctccaaggccgactgcagcagtggcccaggg

SEQ ID NO: 167688 - DNA, 100 bp, Homo sapiens
gtcggcaccagctgcggggcaagatggaggcgctgattttggagatctattgggaaactgattataaccactcgggcaccatcgatgcccacgagatgag

SEQ ID NO: 167689 - DNA, 98 bp, Homo sapiens
tggctctcgccttccagcaattccccgacttcacagagaatgcagttgtcttgacttcaggtctgtctgttctgttggcaagtaaatgcagtactgtt

SEQ ID NO: 167690 - DNA, 75 bp, Homo sapiens
attttgaaaagccttcatcatccaaacattgttggtttgaagatgccgcatttggattggatgaattccaaattc

SEQ ID NO: 167691 - DNA, 77 bp, Homo sapiens
tgatccccagaaagttctacaaggtgtcatgagactacctaggtggagaagcgtactgggccggcggcctgcacctc

SEQ ID NO: 167692 - DNA, 74 bp, Homo sapiens
cgtccgctcgccgccgttatcccaggttaaagagcaagtgtacaggaggattgcagcctcccgttcagtacgaa

SEQ ID NO: 167693 - DNA, 100 bp, Homo sapiens
ccagaaacccaggaaatcgagactcatgactcccagagaggatggcatctagaagaccccatatcatgtgaacctcctcctggctggctatgatgagcat

SEQ ID NO: 167694 - DNA, 49 bp, Homo sapiens
cgcggctgcgcgaggagcaggaaaagcgttttaccaacgaggatcattt

SEQ ID NO: 167695 - DNA, 75 bp, Homo sapiens
ccaaaagagccaaactcagctcgcccggtttctcggcgaatgacagcacaggaccagaggagcgagagcagcaag

SEQ ID NO: 167696 - DNA, 100 bp, Homo sapiens
ccaccccactatgccccttattgtatctggggcagatgatcgtcaagtgaagatctggcgcatgaatgttgaaatggatgcagtcagaactgaatgttga

SEQ ID NO: 167697 - DNA, 117 bp, Homo sapiens
aggactacagtaaggctgaaatcattgaagtgcttggagtgcagaactgaaagaggtactaggttttgacaagcttgcatcatgcgtgagtataagctagtcgttcttggctcagga

SEQ ID NO: 167698 - DNA, 75 bp, Homo sapiens
ggacactaccgagagaaacaacaactgcccaggtgctatgggcataaacaacagaggtgccatgccccctgctcc

SEQ ID NO: 167699 - DNA, 75 bp, Homo sapiens
ggagcaccaggatctcgggctcggaacgagactgcacggatggtgctgctccactggtgcctgctgtggctcctg

SEQ ID NO: 167700 - DNA, 114 bp, Homo sapiens
ctgtcttctatgcggaatttcagaatatccgatacaaaggagaatctggcccgatgagagaaagggaaagttaaggatgctggagcagaacaatggatttctctttctctttca

SEQ ID NO: 167701 - DNA, 100 bp, Homo sapiens
gtaaaagaaagtcaggctaaagaacaatacgagcagatccttgcatttgtccaaggggccctctctgaggaagggctgctggtgtatttgcgggtgctgc

SEQ ID NO: 167702 - DNA, 50 bp, Homo sapiens
cttcgacatactctccagcttcaaggctgaaagacacacagaagtcttca

SEQ ID NO: 167703 - DNA, 87 bp, Homo sapiens
tcgagaggaagattcttacctctttgatctcgacaataaggtgaaagaacttgtcctggacaacagtcggtcgaatgaaggcaaact

SEQ ID NO: 167704 - DNA, 100 bp, Homo sapiens
tcctacagagattcatatgagagttatgtggcctggtttgctttcgaccctggctcggcgcactcggacatcatcctctccaatgacaacctgacagtga

SEQ ID NO: 167705 - DNA, 101 bp, Homo sapiens
agacagcagcgactagggctcgggcgccggcgagatgcctttgttcaccgccaaccccttcgagcaagacgtgggtattttggcctctccccagtctgctc

SEQ ID NO: 167706 - DNA, 82 bp, Homo sapiens
caacatcgatgggcggcggaaaatagcctttgccatcactgccattaaggactgtggtctggagctcaatgatgaagatggc

SEQ ID NO: 167707 - DNA, 98 bp, Homo sapiens
gatgggatccggctcctccagctaccggcccaaggccatctacctggacatcgatggacgcattcagaaggggcacccacgggtacatggctccggag

SEQ ID NO: 167708 - DNA, 76 bp, Homo sapiens
cacaaggccatgaacgcccggtacatcatcctgtgctcggaaatcccaaagctccccgcagtctccttccttcttg

SEQ ID NO: 167709 - DNA, 75 bp, Homo sapiens
aatctgtataaccttccaggggacaagtactctgtggatatccccttggacaaaactgtcgtcaataaggatgtc

SEQ ID NO: 167710 - DNA, 98 bp, Homo sapiens
cgcgaaccgcagtatcatgctggccaagaagatcatcattaaggacggaggcacgggttgcttttgtaatgaagaagcacttaaatactcatctacta

SEQ ID NO: 167711 - DNA, 96 bp, Homo sapiens
caggctttatgggagcatgggttaccagcgacgcaccctgccctgggaggagcggggacactgaggacctctctccaaattggcctctcaactcac

SEQ ID NO: 167712 - DNA, 90 bp, Homo sapiens
gaggggagacccctcgggtggaagaagtggggccatacacctacagcattaggtggtctcttcagtcagcctacacaagctcctacccag

SEQ ID NO: 167713 - DNA, 82 bp, Homo sapiens
tggaggacgaggggctccgggtcttccagagcgtgaagatcaagatcgtaaaatgtttattggaggcttgagctgggataca

SEQ ID NO: 167714 - DNA, 75 bp, Homo sapiens
cgaattcgtcagcaaacagacatttacaaacagatacgtgctaataaggtatccacaaattacccattatcaaaa

SEQ ID NO: 167715 - DNA, 87 bp, Homo sapiens
agcgtgctgagcaaccgcagcctccgcggccgagagtgcagcgagtgctggagaatctggtaaaagcaccattgtgaagcagatgag

SEQ ID NO: 167716 - DNA, 100 bp, Homo sapiens
caacactactaggtcttcaagccccaccgacacgaattggccttattaatgatatgaatccgtctcttgctcaagtgaaaattgaagaagcaaagcgaga

SEQ ID NO: 167717 - DNA, 80 bp, Homo sapiens
ttcgagtttggggagaagctgaaacgccagaaatatgacggagcatcgagtacagctgtccggcctccaacgagtgtgag

SEQ ID NO: 167718 - DNA, 100 bp, Homo sapiens
cagaaatgttgctccaagaagctgaagaagagaaaaagatccggactctgctgaatgcaagtgggaccagggagattggatctgctctcaccaggatgtg

SEQ ID NO: 167719 - DNA, 82 bp, Homo sapiens
cgggggtgacagctccgggaccggccgaaaggcgaggaaccgcacttgcacctcctgcgccgccgccccccatccaaggata

SEQ ID NO: 167720 - DNA, 51 bp, Homo sapiens
atgatgttgatttcccaatagggaggaagaacgtgcaaaacgtgaggagct

SEQ ID NO: 167721 - DNA, 113 bp, Homo sapiens
cccgttcttgcctcaggccagtcgcctccaggccaagagggatccttcacccgtgtctgatgccatggacaatattaccaggcagaaccaattctacgatacccaagtcatca

SEQ ID NO: 167722 - DNA, 73 bp, Homo sapiens
taccaggtggacggcacggacgacagaagcgactttggtgagactctgatcatcacttaccgggactacctgc

SEQ ID NO: 167723 - DNA, 102 bp, Homo sapiens
ctggattgaatattgaagaattaatagagaaacttcagtctggaatggtgcttcttggacacttaatgattgttggcaagaaatgtgctgctgatctgggcc

SEQ ID NO: 167724 - DNA, 100 bp, Homo sapiens
ttatgaggaacagagaaagttagaagaaagttttaccattcacttaggacctaaagtgatccagacttctgcggctaatttttcactaaataatagcaaa

SEQ ID NO: 167725 - DNA, 100 bp, Homo sapiens
cgctcagctcgccaggcggcgcagggtcatcatcagatttgaaatatttaaagtggatacaaaactatttcagcaatgcagacaattaagtgtgttgttg

SEQ ID NO: 167726 - DNA, 101 bp, Homo sapiens
taaagattttcgaattattcagttggatattcctggaatggaggaatgcttgaatatagccagttccattgaggcggttttggtgaataacatcaccacag

SEQ ID NO: 167727 - DNA, 100 bp, Homo sapiens
gctgctaccccaagcccgggagcttctcagatggcaggagaggagaacttcaaggaagagctcagatcccaggatgcttccaggaacttgaaccagcatg

SEQ ID NO: 167728 - DNA, 75 bp, Homo sapiens
ccgtcgctatgagcgggaccaccctgggcacagcaggcatcggaggctgctgtccccaaggcccagcctcctcac

SEQ ID NO: 167729 - DNA, 96 bp, Homo sapiens
atggaaacaccatggctgcggcggcccagctctctctgacacaggtccccagtctatgtgaggatctcctgtcttctgttgaccagccactgaaaa

SEQ ID NO: 167730 - DNA, 73 bp, Homo sapiens
gtcggaatcagatttgaaaatgaaagtcagatgatatgggcttaggaaaaaccctgacaatgattgcgctcat

SEQ ID NO: 167731 - DNA, 95 bp, Homo sapiens
ggaaatcctaatgacagtctccaaattcgcctccatctgtaccatgatgcagcagcttttttatgagaattacgagcagaacaaaaaggggtaca

SEQ ID NO: 167732 - DNA, 82 bp, Homo sapiens
ggaccagcgggcgggggcccacgagagaactacgatgacccgcacaaaacccctgcctccccagttgtccacatcaggggcc

SEQ ID NO: 167733 - DNA, 74 bp, Homo sapiens
cacatatggcgatgccaatgccgctggtgcttattatcaggatgtttggatctggccgagaacataactttaca

SEQ ID NO: 167734 - DNA, 90 bp, Homo sapiens
ggaagatggtgttgctgagagtgttaattctgctcctctcctgggcggcggggatgggaggtaacccaggtttttctgccttttatgtgc

SEQ ID NO: 167735 - DNA, 75 bp, Homo sapiens
cagggaggctggcggactcttcatcctggacagtcccttactgtatgtcaacaaatatttccatggttcaagctg

SEQ ID NO: 167736 - DNA, 100 bp, Homo sapiens
aggattcgttacagccagagattgagccccagtttgagggacagcgggatatccaccatgctgctgtgagactcgggcagttgtgactggtttagaagtg

SEQ ID NO: 167737 - DNA, 96 bp, Homo sapiens
atctgtcctttaaattacaaagcgtagaggttaatttggagtggcccctggagtcagtttcctacaccatccgaggccccacccagcacgagctac

SEQ ID NO: 167738 - DNA, 83 bp, Homo sapiens
ctgggggcaccattaacatgatggagtacctgttgcagggcaatggcgaactgagcaataaggaatttgtttccatcatgaag

SEQ ID NO: 167739 - DNA, 74 bp, Homo sapiens
gcccgaccccctgcttgccactctagaaaagtctgaaggggcgtctcgattacctgagctctctgaaggtgaag

SEQ ID NO: 167740 - DNA, 75 bp, Homo sapiens
cttcctggacccaggaagggagagtcttcttccaagtgtaatgttcaagctcagaaatgccttatgtggatcgtc

SEQ ID NO: 167741 - DNA, 75 bp, Homo sapiens
ttacgtctgcggaagtgcagctgcctcagttcttagcgcagttccaaaagctgagacaagatcttgaaatggtac

SEQ ID NO: 167742 - DNA, 75 bp, Homo sapiens
ggaaatacatttgtacacgatcccaaggcagaatatgaagttactccagatgaaaaactgggagagaaagggaag

SEQ ID NO: 167743 - DNA, 100 bp, Homo sapiens
ccacaacatgaccccagctacctccccaataggtgcatcaggtgatcgagaaaaacttgagtggctggtggtacattcagattgaagataaggaagggtg

SEQ ID NO: 167744 - DNA, 74 bp, Homo sapiens
ctgtaggctcgggcgacatggacgggttgccgaaggtgagaagccctaccactgcaactgggacggctgcggct

SEQ ID NO: 167745 - DNA, 100 bp, Homo sapiens
ccgtgcccctgcccgcgaccatggcctcctccgaggtggcgcggcacctgcaacatggccaacgccctggccagcgccacttgcgagcgctgcaagggcg

SEQ ID NO: 167746 - DNA, 100 bp, Homo sapiens
acggtccagacaggaacaagacccggacattccaggccacagtcctgggaagtcagatgggattgaaagggggcagtacccaaaggaaacgctacgaaag

SEQ ID NO: 167747 - DNA, 101 bp, Homo sapiens
aggcaaaggagtggaagtttgagagaagtttaagagaagaaatggacatgattgcctaaatcagccaaacacagggcatagaatgtcaagctaaccaggcg

SEQ ID NO: 167748 - DNA, 100 bp, Homo sapiens
cgactgtcttggcaactgtgttgctcttgtccttcggcagcgtggccgctagtcatatcgagatgcctgaaatgtgcagatgccccgtgtcagaagagct

SEQ ID NO: 167749 - DNA, 75 bp, Homo sapiens
ccagctctgtccgctgcccacagcctagcagtcgggaccgtactgaggctctctttttgcctgctgccatccatg

SEQ ID NO: 167750 - DNA, 100 bp, Homo sapiens
gaaaagactgcgaggtggccgcagctgtggccggagagtactatactggcaattgctggagaagattttgcaattgttgcttctgatactcgattgagtg

SEQ ID NO: 167751 - DNA, 75 bp, Homo sapiens
gggcactgttgctgctgcgggagatggcagtgaacgtatactcaacgtcagtgaccagtgataacctaagtcgac

SEQ ID NO: 167752 - DNA, 101 bp, Homo sapiens
aaaggagatggaagtgatgtaccatcatgggtagcctttgataaacaggaagcaaaatgaaatttctgcaaaagaaatgaaatctctgattgtctccatcc

SEQ ID NO: 167753 - DNA, 75 bp, Homo sapiens
ggcagctgcaatatttaattcagcctttggaagttttttggtcctcagaatggttggaatgaccctccagctttg

SEQ ID NO: 167754 - DNA, 132 bp, Homo sapiens
ggtgtacagcagcgggcgccaggacaccgaggagaatatcttgctgggagtggacttttccagtaaggaaaggaagaagagtgacaggaccaccctagattcacaggaaggggactacacaacgttatgaac

SEQ ID NO: 167755 - DNA, 76 bp, Homo sapiens
gaggatcctggaggcctgggaagccaacgaccacacgcaaacccgaaagtttgtaagaggaagagagcgcgcggcg

SEQ ID NO: 167756 - DNA, 83 bp, Homo sapiens
cgccgcgggacctctccgggccatggcgccgtgccgtccctgcagtgacaccgaggtgctcctagccgtctgcaccagcgact

SEQ ID NO: 167757 - DNA, 75 bp, Homo sapiens
acccaaacaacatctcctgctattccttgggctgcctttcctgcagcaaaaaatcgtggaattgccattccagtg

SEQ ID NO: 167758 - DNA, 100 bp, Homo sapiens
agagcatctacctgaaaaccttcctccaagagcaggcccgtttctggaatgtccgtaccttctttgtactcagccagcttatgtccctgatgccaaaaat

SEQ ID NO: 167759 - DNA, 100 bp, Homo sapiens
gatgaacaacatgggtggtgatgaggatgtagatttaccagaagtagatggagcagatgatgtagacaagggcgtggtccccctggcagggacaaatggc

SEQ ID NO: 167760 - DNA, 90 bp, Homo sapiens
cacatcgggggcaccaccctccatgcctttgcaggcagcctgcttctgcaaagtggtacgatcgaagggactatgtcttcattgaatttt

SEQ ID NO: 167761 - DNA, 96 bp, Homo sapiens
gccgtcggcagcaagaacagagagagaggtggacagatctgagagatactgagatgagtaacgaaagaggctttgaaaatgtagaactgggagtca

SEQ ID NO: 167762 - DNA, 96 bp, Homo sapiens
cgggtggcggctcgggacggaggacgcgctagtgaattgaatgatctggcacgggaccctccagcacagtgttcagcaggtcctgttggagatgat

SEQ ID NO: 167763 - DNA, 100 bp, Homo sapiens
acgagaagctcctgtccctcaagtatgaggagtacgagagggcctccaaagtggaccagtttgtgacgcgcttcctgctgcgggagacggtgagccagct

SEQ ID NO: 167764 - DNA, 90 bp, Homo sapiens
ggggatgactgattctcctccgccagcatcatcggctggttcgtgcgaagcttcaagtacttttacgggctccgcttcgaggtgcgggac

SEQ ID NO: 167765 - DNA, 82 bp, Homo sapiens
aggaactggagcaattgaagctgactactaaggagaataagaactcaagacatggctgcccagtgtgtcacaaaggtggcgc

SEQ ID NO: 167766 - DNA, 80 bp, Homo sapiens
tgcctttccttccccctcggaaaatggttcccactgccgggcgagtgccctctggtggtcagaagatgctgtgctgtctc

SEQ ID NO: 167767 - DNA, 75 bp, Homo sapiens
gagcaacttgatgaaggtacacccaatagagagggagacattacctcatccctcaagattgctcgctgcaaacac

SEQ ID NO: 167768 - DNA, 90 bp, Homo sapiens
aaaaaatgacatccagcgacaaggactttaggtgtaaagggtcaagtttttgatcagaatggaaatccattacccaatgtaattgtggaa

SEQ ID NO: 167769 - DNA, 100 bp, Homo sapiens
gggaattgctgctttgaggagagtcttgacggcctatgcccaccggaaccccaagattggatactgccagcttcgccgacacgaggtgaccatctgcaat

SEQ ID NO: 167770 - DNA, 100 bp, Homo sapiens
ataaccaccacctcatcaatgactttaccataaagcaggtccacctaatcatcctgtgaaagtggtttctctatggaaagctttgtttgcttcctacaaa

SEQ ID NO: 167771 - DNA, 80 bp, Homo sapiens
cttctctgctggactcctggactcccacaatgttggtacgccttattacatgtctccagagagaatacatgaaaatggat

SEQ ID NO: 167772 - DNA, 89 bp, Homo sapiens
ccggaaaagggcactcgtctccgtgggtgtggcggagcgcgcggtgcatgggtaaaggagctggaagtgcgaaaattgatgcatgtgag

SEQ ID NO: 167773 - DNA, 116 bp, Homo sapiens
taatcctgatattaagccatcaaatgtggaacctatggaaaaggtctatgttaacaatgaatgggcaaccagtgttggggaaggagggagctttggagaacttgctttgatttatg

SEQ ID NO: 167774 - DNA, 75 bp, Homo sapiens
gtggagtccaccctggctgtgaggccagtaatagtagccatgagtctcgtattggtctagctgaggggttggaat

SEQ ID NO: 167775 - DNA, 83 bp, Homo sapiens
tgtagctgacgaagcattttgcaacgcagttcggagttattatgagcttcagtatcagacacagcacagcagccatctgaaga

SEQ ID NO: 167776 - DNA, 83 bp, Homo sapiens
cccccgagcagtggcccggcatcggcgccttcccggcgggacaatgcagatcttcgtgaagactctgactggtaagaccatca

SEQ ID NO: 167777 - DNA, 83 bp, Homo sapiens
gtgaaactgaatcacaggagatatttccaggtttttagaacttcagccataaaaatgggcagaattttccttgatcatatcgg

SEQ ID NO: 167778 - DNA, 110 bp, Homo sapiens
cctcccctgcagcgactcggaagattcgaggcggcgggggacaagtcggcgccccagagcggacgagaaatgtagacaaccaatttcctgggcaagctgctccacctgga

SEQ ID NO: 167779 - DNA, 100 bp, Homo sapiens
ctttctcttcgtgggagtcatgaccgcccagaaatacctgcagactcgggccgtggccgcctacaggtgcagaccatgaattacgtggggcagttagccg

SEQ ID NO: 167780 - DNA, 51 bp, Homo sapiens
caccacccagccgtcctccccaggtgccgtgagcgatgtggagatgcagga

SEQ ID NO: 167781 - DNA, 100 bp, Homo sapiens
ccaagaagatcatcattaaggacggaggcacggcaaatgttctgaaaaagactctgcatgggaatggcctgccttacgatgacagaaatggagggaacat

SEQ ID NO: 167782 - DNA, 50 bp, Homo sapiens
cctgccttttgagtccaggtgtaaatctgtaggtgtgtctaaccggcaga

SEQ ID NO: 167783 - DNA, 83 bp, Homo sapiens
gtgcaccgtccgggattttatccaccggcactgccaagatcagatatgactccaattctggtggtgagagagaaattcagcga

SEQ ID NO: 167784 - DNA, 113 bp, Homo sapiens
gctgttccggcccttccacacgttgctgcggaaaataaggtttggagcagtcttcctctgggatagtggctcttctgtgggcgagattacaggacacaacaaagtcatcaaca

SEQ ID NO: 167785 - DNA, 75 bp, Homo sapiens
gaaaaaaacgcaccttggagaaaaattttaacgtttgaggtttatgaaggcgagcgtgccatgacaaaggataac

SEQ ID NO: 167786 - DNA, 100 bp, Homo sapiens
ctgcagcggccacctgtagtctccaagccgttgaccccattgcaggaagagatggcgtctctactgcagcaggtgaatgaaaactttgccattgatttga

SEQ ID NO: 167787 - DNA, 100 bp, Homo sapiens
gtcaggaagatcccgctgcgctgcacggcccactatgtggcttaccacgtggagtctaagggaccctaggagccctggccatcaccccagctgatggggt

SEQ ID NO: 167788 - DNA, 97 bp, Homo sapiens
cgaaggaggaggcgttgccgggtctgtttatgatggtgaagaacatggacgtttcatggagaagcttgaaactcgtatccgtaatcacgaccgagaa

SEQ ID NO: 167789 - DNA, 97 bp, Homo sapiens
ctggagctggagaacgaccggctcctgctcaagatctcagagaaggaggaggtgaccacgcgcgagccgctgccatggcccagacactgcagatgga

SEQ ID NO: 167790 - DNA, 75 bp, Homo sapiens
agttattgaatatcaagaggaggagttgttggtccttgaatgggcaagagggcacatgaagtacggcgtcctcca

SEQ ID NO: 167791 - DNA, 100 bp, Homo sapiens
gggagcctgtcacatcaccatggaggtttttcccactcggctttcacgtttgggattgagagccacatcagccagtccaacatcaatgggacgctagtgc

SEQ ID NO: 167792 - DNA, 90 bp, Homo sapiens
agacatgcttataagacaactcttagcttcaagtaagggagaattgactacgcttatacatcagcttcaagaaaaggacaagttactcgc

SEQ ID NO: 167793 - DNA, 100 bp, Homo sapiens
tgagtctcgaggaggccgcgggagcccgccggcggtggcgcggcggagacccggctggggttggatgaaagcactggcatggtggtcaacagcccaacaa

SEQ ID NO: 167794 - DNA, 100 bp, Homo sapiens
caccagtgttcagccacaaacccagcaagaacagcagatccaggttcagcagccgcagcaggttcagggcatccgtttccgaggctttagtatccctgaa

SEQ ID NO: 167795 - DNA, 100 bp, Homo sapiens
ggttccattctctgcaatggaaggagcattgggctcaggatctgaacaaagtccgtgagcggatgacaaagttcattgatgacaccatgcgtgaaactgc

SEQ ID NO: 167796 - DNA, 98 bp, Homo sapiens
gaaagaagttgcaaaacactgggcaaatacgccatgcgagacctagtccacaggcttccaggagggaacaacagcaacaacactgcaagcaaggccat

SEQ ID NO: 167797 - DNA, 71 bp, Homo sapiens
acatacttccaacaatatttacgaggcagtcaacctgaagaataagtagtgaaagcatcaatcaagacata

SEQ ID NO: 167798 - DNA, 101 bp, Homo sapiens
aaaaaagagaagaaagaaagattgaaaccagcaggaaggaagatgtctctcagaaacaaaggtgatctttgcagagctgtttcaacttccagcaccccctc

SEQ ID NO: 167799 - DNA, 75 bp, Homo sapiens
ctctctttcgctgtttgagagtctctcggctcaaggaccgggagggaggttttacataaatggagtcctaaacaa

SEQ ID NO: 167800 - DNA, 100 bp, Homo sapiens
cttcattcagatgtggtggaatatgccaaggaaaaactggagagcttcatcaaaaatagtgatagctttgataaccacagttgaggctattgaggctgaa

SEQ ID NO: 167801 - DNA, 82 bp, Homo sapiens
gtctacactgagtcggaggcgaagggggatatgagactttctactcggaatatcctgagtgttgcgtggatgtaaaacccat

SEQ ID NO: 167802 - DNA, 100 bp, Homo sapiens
gatgtccaaccgagtggtctgccgagaagccagtcacgccgggagctggtacacagcctcaggcctcatgcattgtgcgtcagcagcaatgtttatggtg

SEQ ID NO: 167803 - DNA, 94 bp, Homo sapiens
caggaatgctgcccgcctttgcttcatctacagtcaggatgctggatgttcatggagtgagcttggtaaaatgcggctgacaattccgtgtcgg

SEQ ID NO: 167804 - DNA, 90 bp, Homo sapiens
ctcagtcaggccacggtggaagacgcgtgccgcggcgcctggttgcctgcagcggcccggacccgagagaggcaaatttctggagatgtg

SEQ ID NO: 167805 - DNA, 100 bp, Homo sapiens
caacagaaaatgaaaagtagtgtggcacagataaaaaatggccacatctgttgctcagtggatccacagtgccttcaggaactgtgaagttaactgtctc

SEQ ID NO: 167806 - DNA, 51 bp, Homo sapiens
ggagtcagtttattactggaaagctactgggaacgttatttggaaacattc

SEQ ID NO: 167807 - DNA, 101 bp, Homo sapiens
ctttttcattggaggagaagaagggatggcagagaagggaaaatttcatggaaatccaatgcatgtagctgtggttatttcaaactgtttaagggaagaga

SEQ ID NO: 167808 - DNA, 82 bp, Homo sapiens
gagattatagctctgtatgagaaggacaacacctacttaggcaaacgtggtgtgtgtggtgtatgacgtctctgaggaggcc

SEQ ID NO: 167809 - DNA, 76 bp, Homo sapiens
cccatcgcgttttgccagcgataatacgcctcaggatttccagatgtgacttgcactcagaagatcagtggtcaac

SEQ ID NO: 167810 - DNA, 75 bp, Homo sapiens
ctggagggactgtgaggtaaacagctgagggggaggagacggtggttagtggatctggctcttcttgtgaggcaa

SEQ ID NO: 167811 - DNA, 89 bp, Homo sapiens
tggaccgggctggctaccactacacatccacacctgaacggccatggctctgcagccgcagaagctactctttgtccgtgcgagactac

SEQ ID NO: 167812 - DNA, 100 bp, Homo sapiens
ctcacacagtggcttctgctcaccaacagatgaagacagatgcaccaacgaggttaaccccaaagattggctttccttggagtgaaatcaggaacatctc

SEQ ID NO: 167813 - DNA, 100 bp, Homo sapiens
tgggatcccggccaccagcaattgtccgccccgactatctgagatcggccaagatgactgaggtgatgatgaacacccagcccatggaggagatcggcct

SEQ ID NO: 167814 - DNA, 83 bp, Homo sapiens
ctgaacaaattttaggaaaagttagcattgctgaagcaaatgtcacccttatagtgattggacagtcatcctaccatcatatt

SEQ ID NO: 167815 - DNA, 100 bp, Homo sapiens
catctgtaaggtgcggccgccgccgaacgtgcgcatcgaccccagtagcctgtccttcaacatgtggaaggagatccctatccccttctatctctccgtc

SEQ ID NO: 167816 - DNA, 100 bp, Homo sapiens
ctggggacaagcccgcggcgccgcgggaacgcaccacgcggctgggatatgtgaacttttgcaaagcggagccataatgaataaattttaccagcctcat

SEQ ID NO: 167817 - DNA, 80 bp, Homo sapiens
gtttactggagtaggtgttagtaagtgaacacttgtcctgctccttcacctttttcttgcatggagacagcaatgtttgt

SEQ ID NO: 167818 - DNA, 83 bp, Homo sapiens
attaaaacatttttcagggacgtagccatccagaggatattagaaatggctactccccagtcaattttcatctttgcaatctg

SEQ ID NO: 167819 - DNA, 75 bp, Homo sapiens
atgtccagaagatccttacatgaagattcggagagagattgctagtcatagtggctatgtgcagattgactggaa

SEQ ID NO: 167820 - DNA, 95 bp, Homo sapiens
atagctcagttaatgaaggatcaacgtatcataaaaggtcgttccaggggtagaggaggcatgaaggatgaccgtcgggacagatactctgcggg

SEQ ID NO: 167821 - DNA, 100 bp, Homo sapiens
agatatagccgttggtacaaaggacaagatcgcagaggaaggtgggcggcgggagtgcccagccgtgtgacagcatcgttgtggcgtactacttctgcgg

SEQ ID NO: 167822 - DNA, 76 bp, Homo sapiens
aaacactcaacaccccatgctgcattccagccaaattcccagattcatgttacatgtaaagctgtcctcatttgtg

SEQ ID NO: 167823 - DNA, 90 bp, Homo sapiens
caaaattgcccagtttactatggatccagatgtgcctctgcaggttgtggacctggcctattagcagatgccaagatgcgggtatttgaa

SEQ ID NO: 167824 - DNA, 75 bp, Homo sapiens
caaggaggaagggttgtccggggtggtgattccactgaagcaactgccaaaccaaagagaagtttttatgctgcc

SEQ ID NO: 167825 - DNA, 78 bp, Homo sapiens
tccgcagaaggggagacacattttatgttgtgtcatttcgaagggcagaagctcctcctggggtagagacagatctta

SEQ ID NO: 167826 - DNA, 98 bp, Homo sapiens
atgctgcgaaagctgccaaaagtgacatgcagtgcccaaggttgaagcaatgaataaaagactgggctccttggtggatgagtttaaggagcttgttt

SEQ ID NO: 167827 - DNA, 100 bp, Homo sapiens
agctggacatcgagcctgagggaggggaaaggcgcaggatgaagggcgccctaatggagatcatccagctcgccagcctcgactcggacccctgggtgct

SEQ ID NO: 167828 - DNA, 82 bp, Homo sapiens
gcagatgttgtcaaggtggcctaccaggaggccaggggtgtcgccatggtgacaatctccaatagacttgtgtcttcacctt

SEQ ID NO: 167829 - DNA, 100 bp, Homo sapiens
tgcgtttctactgtgtgattctgccaccttcctggcccgacgccatgggagtgacttgtgtgtaaatatgttgctgtggagctgaagtcagcctttgagg

SEQ ID NO: 167830 - DNA, 100 bp, Homo sapiens
ttttaatgtcactgttgaacgtgtgtgtcctgagttctcatctgaaagctttcatatcggttgactgcagattgtaaaccatggctgtgtggatacaagc

SEQ ID NO: 167831 - DNA, 50 bp, Homo sapiens
gcagaatacagagatatggaatcaggtgttgcaccctggcctgctcgctc

SEQ ID NO: 167832 - DNA, 74 bp, Homo sapiens
aaggccctacgggagaaaaccgggcgcaaggtcacaccgacaaatctgaagcgggtttgccaggggagtgtacc

SEQ ID NO: 167833 - DNA, 95 bp, Homo sapiens
gtttcgaaaatgtgtgtgaattggatttgatcttccatatggataagaagaaaaagtcagcactttttgaagtgtctgaggttataccagtcatg

SEQ ID NO: 167834 - DNA, 90 bp, Homo sapiens
catgtcctcagtacttgcaaaagcacttgaagtcattaaaccagctcatatactgccaccttttgtggtgacattggatgaggtagagct

SEQ ID NO: 167835 - DNA, 98 bp, Homo sapiens
agttcctcaaatatgcagcaaagattacaccaagatctgtgctgaccacaggaattggatctactagtgcagtcctggctggtgccttgttagaagaa

SEQ ID NO: 167836 - DNA, 50 bp, Homo sapiens
accaagtgcatcaccatccccagggacttgccatgaggtgttgaagcctt

SEQ ID NO: 167837 - DNA, 100 bp, Homo sapiens
tgatccagaacttgcagcaacaatagctattgtggaaaacatggctgagttccggcctgagatgtgtacagagggtgcccagcagggtcttctacagtgg

SEQ ID NO: 167838 - DNA, 100 bp, Homo sapiens
agattcttcaagtttacactcctagcatcattgtttcttctctctctcaaccttcacctatgagggctgtgctgaagtttgctgctgccactggagccac

SEQ ID NO: 167839 - DNA, 75 bp, Homo sapiens
gacagactgcacagggcatggatttaatagaaaatggtcagcttgaaattgtgacaggtggctgggttatgcctg

SEQ ID NO: 167840 - DNA, 80 bp, Homo sapiens
gggaaacacaaagccggctacgcgctgcgaggtgtgtgtctggggaagagacttacagaagtggagttgctgagtcaaag

SEQ ID NO: 167841 - DNA, 75 bp, Homo sapiens
cctgaaaaacggagacttggatgaggtgaaagactatgtggccaagagagatggaaaacttgatgactagctcca

SEQ ID NO: 167842 - DNA, 83 bp, Homo sapiens
cgataagtttgatttgccctatgggatgagaacatcaggatatgatgtttcagcttctccgaggtctggactttcttcattca

SEQ ID NO: 167843 - DNA, 75 bp, Homo sapiens
ctaaagtctgcgaggaggaagtcgcctctgtgctcgtgagtccagggatctaagttccacttacttacatgatca

SEQ ID NO: 167844 - DNA, 88 bp, Homo sapiens
aagaaatacaggatgcctctcagctgccacctgcctttgacctttttgaagcctttgcaaaagtgtcctggggaagtgtcgctacgtt

SEQ ID NO: 167845 - DNA, 75 bp, Homo sapiens
tctgagctagagggtgaagctggcggagcaggaggatgggcggcaattaagttggaatatgcaaggttggttaag

SEQ ID NO: 167846 - DNA, 100 bp, Homo sapiens
gtgaagttgaacaaattgctatgatgaaaccaaaaggccagactgaacacgatgaggggcggcgactggcggcgcgatggacctgaccgggctcctgctg

SEQ ID NO: 167847 - DNA, 100 bp, Homo sapiens
ccttcgtggtcgtctggtcctactacgcgtacgtggtggagctctgcgtgtcaatggctgccatccggaagaaactggtgattgttggtgatggagcctg

SEQ ID NO: 167848 - DNA, 96 bp, Homo sapiens
gatggctttggtcacggtccagcggtcacctacccccagcaccacctccagcccctgcgcctcggaggtgaagtgaaatctgcaagagtcctgctc

SEQ ID NO: 167849 - DNA, 101 bp, Homo sapiens
caatatgttatctccagatgccgcgcaactgtctgatctcagttcatggtttctgctttgggacaaccatacatctaattccttaaagtagttttatatgt

SEQ ID NO: 167850 - DNA, 51 bp, Homo sapiens
gggagccgcgggatggaccgcaggaccgactgtgattcctccaccacctca

SEQ ID NO: 167851 - DNA, 80 bp, Homo sapiens
aggtcctgtacagcatcgccgagaaggcagggcaagaatcctttcgttccatcacaaggtcgtattacagaggtgcagca

SEQ ID NO: 167852 - DNA, 96 bp, Homo sapiens
aacttgaagatgatttacttggagaagatttgctatctggcaaaaagcaagctgcctcgtacccagccagacggcaccagcgtccctggagaacca

SEQ ID NO: 167853 - DNA, 100 bp, Homo sapiens
gagtatgcacgaaacaaaaacatccattactatttcatggccctgaagaatgatgaggcgcagttgtgtagcagttgagtaatgctggttagctgttaag

SEQ ID NO: 167854 - DNA, 100 bp, Homo sapiens
gctgctcctgggcaggagcgactcgctctacccggccccagggtacgctgccggtgtgcacagcagatgccgacctggccgaggggccccctccctggac

SEQ ID NO: 167855 - DNA, 80 bp, Homo sapiens
gaagcagctctcatcctacaaagcgccctgtcgaggctgcaacaaaaaggtctcgaagtgctgcagctaaaactcataca

SEQ ID NO: 167856 - DNA, 50 bp, Homo sapiens
aaagagtcaacagcagtggcaacagggcggcgactggcggcgcgatggac

SEQ ID NO: 167857 - DNA, 83 bp, Homo sapiens
ctggtagacggagaagagcacgtcggtttccttaagaggaggacttcatccaacccagcagccgagaagaggcccagcagctg

SEQ ID NO: 167858 - DNA, 76 bp, Homo sapiens
ctgtgacttgcagtcatcatccattaccacaaaattaggcatgttttccacaaatcctgcgtggatccctggctta

SEQ ID NO: 167859 - DNA, 98 bp, Homo sapiens
ggagcagcaggcctccgggcccggcgccgccgcccgcaggctgctctttggcgtaaattgcaatcgattagggatcgtttctcagaatcaagttagaa

SEQ ID NO: 167860 - DNA, 100 bp, Homo sapiens
cttgtctctgaggacaaatcagtcactgtgcctgaagcagaaaatcctagagacagagatcgcggattcaggtgtggctctatgagcaagtgaatatgcg

SEQ ID NO: 167861 - DNA, 75 bp, Homo sapiens
gaggagtgagactgcaggagatgtgggccgacaaaaggatgccacggagaaagaaaaaagttaaagaagtctccg

SEQ ID NO: 167862 - DNA, 100 bp, Homo sapiens
gaaccctctcgtggacgtggggtgccagtgagaggccggggagctgcacctcctccaccacctgttcccagaaaattttcgtgctctgagcactggagag

SEQ ID NO: 167863 - DNA, 100 bp, Homo sapiens
actggagaggcttctctggtggaatgaaaggacagaactgtaccgctctctttttggccagctccaccctcccgacgaaggccacggggattgacatcgc

SEQ ID NO: 167864 - DNA, 76 bp, Homo sapiens
tataaaccacagctatctgtctgcaatccccattctggaaaggagacttttcttcacaggaattagagattttcat

SEQ ID NO: 167865 - DNA, 51 bp, Homo sapiens
ctagggtcgccggggaagcggctgcagaaccttggcctgaaaatgctacat

SEQ ID NO: 167866 - DNA, 97 bp, Homo sapiens
cggcgttagtattggccgtgtacccgaaaaactgattgactgggctggcgttaactgtgcggaggcaggaggcactggctacaattaggcttctcga

SEQ ID NO: 167867 - DNA, 100 bp, Homo sapiens
ctgcctggctagccggcgacttgagtgacgatactgtaagattgatgttaaaggcatggtgttcaccccacttcatcagcgtacataagttatctcttct

SEQ ID NO: 167868 - DNA, 100 bp, Homo sapiens
caagacgcggctgccgtacgtggccctcgatgtgctctgcgtgttgctggatgccactgccgccaggagccctgtaacatcagccatcgtcaaccccacc

SEQ ID NO: 167869 - DNA, 100 bp, Homo sapiens
ggacccaaatgtcaaactaccaaatgggcgagacacacctgcactcttcaacttcaccactcaagatcttatgccttcattcatccggcatggtccaaca

SEQ ID NO: 167870 - DNA, 100 bp, Homo sapiens
accccccagcatgtactggtgtgtggggccggaggagtcagctgtgtgtccagaacgtgccatggagacgcttaacgggtgatcagcccatgacctaaac

SEQ ID NO: 167871 - DNA, 75 bp, Homo sapiens
tcagcgtcccggcgccgtcgcgccactcctccgatgtgctcactgatccgcctccagggccaccgccatgtcgag

SEQ ID NO: 167872 - DNA, 100 bp, Homo sapiens
aatgaatacccatcccgggtggcctttaccttgctggagaaggatgcagcagtctcggccctggctgctctatgcagtgaatattacatgaaggagccgg

SEQ ID NO: 167873 - DNA, 90 bp, Homo sapiens
cggaggagcagtcgcagctgctttccgaggaagccggtgttgccgagatactgtgttgacaagtggtcatgctaccgactatttatttgt

SEQ ID NO: 167874 - DNA, 74 bp, Homo sapiens
gccatacgcgctctccctgtttagtctcacagaaagttctccgctcccagacatgggtccctcggcttcctgcc

SEQ ID NO: 167875 - DNA, 82 bp, Homo sapiens
ctttttatccactcattggcagagaagctatgttgatgttagtgaagattcacctcctcccctacctgaaagaactcctgaa

SEQ ID NO: 167876 - DNA, 100 bp, Homo sapiens
agctgcgctacatgcactcgcgtgtggtggccaactcggaggagatcgccttctatgggggccatgagaaactcctccgacttggtgggactgcttccgg

SEQ ID NO: 167877 - DNA, 90 bp, Homo sapiens
attctgcagcaggcgggatttatacagtttgcacaacttcagttcctggaagctaaagagctcttcaggacttgtcttacaaggaccggc

SEQ ID NO: 167878 - DNA, 89 bp, Homo sapiens
agcagacctcggagatcatcacgtttgccgagtcaggtctgcctcagccacctccctgacgctgtcccactgtgtggatgtggtgaagg

SEQ ID NO: 167879 - DNA, 100 bp, Homo sapiens
catgcagtaaaggagctgaaccttcaagaatacatattcagagcggaagactctaatacccatagacatctaactgagtttgttggtttggacattgaaa

SEQ ID NO: 167880 - DNA, 83 bp, Homo sapiens
cctgcaccgcgcctcgcaaaaatcttatcttggctttggatcttagaagagaatcactaaccagagacgagactcagtgagtg

SEQ ID NO: 167881 - DNA, 100 bp, Homo sapiens
ctgaagggaagctgcagaatatggaaaacatatattggagctacatggatgcaattaagttggaatatgcaaggttggttaagttggcccaagaagacac

SEQ ID NO: 167882 - DNA, 82 bp, Homo sapiens
tcatcagatccaccatctgcttcaacgcctagacagcctgactgtcaggaatgcagaggtacagaacaagctgcagagccac

SEQ ID NO: 167883 - DNA, 100 bp, Homo sapiens
tccaccatcttcctcttgctgccagtggtagcgctcgtctggcggagctggctttgccctttcggatgaagcatacagatccctacgagatcaagataag

SEQ ID NO: 167884 - DNA, 100 bp, Homo sapiens
gaatgggccaaggaaaaatcgagcagaaagaatgtctttcaggactttctgaagaccttttcccccgatgtcttccggttcttctgcctgcggagcagct

SEQ ID NO: 167885 - DNA, 90 bp, Homo sapiens
cctcgggtaggggggctggagagcccccaggtggaccatggcggtgagattccaggtatcgaaggatgatcgcagtgatgtggagagcag

SEQ ID NO: 167886 - DNA, 100 bp, Homo sapiens
ggcctggcgcccgtcaacttctgcgacgaagaaaaaaagagcgacgagtgcaagagggtatattacctctctctggaattttacatgggccgaacattac

SEQ ID NO: 167887 - DNA, 98 bp, Homo sapiens
cttggaaggtcgctgggaggtggcattcaaaggcatgaacaaccgggaggtgctggagcaggtggagcgaggctacaggatgccctgcccgcaggact

SEQ ID NO: 167888 - DNA, 100 bp, Homo sapiens
ctccacagattctgttgcgaaggcagccatctttagttcgtctttcctagagaggggtcccttcagtgttgtacgacgatgtatcaacagagaaactggg

SEQ ID NO: 167889 - DNA, 100 bp, Homo sapiens
ggaagaaaggcggaagcaggaagaattgttacgcaaacaggagttcaaagaaggacgcagagccagccacacagccccacaggtcctctttagccacagg

SEQ ID NO: 167890 - DNA, 75 bp, Homo sapiens
caagcgcggggaaccaaggagacgctcctggcactgcaggttcacgcaaagaatctgctccacaagttttgcttc

SEQ ID NO: 167891 - DNA, 50 bp, Homo sapiens
ctgatttcactgccaagattctcaatacaaagccagcctgcgtatttaac

SEQ ID NO: 167892 - DNA, 100 bp, Homo sapiens
caagaaatgaagaacgagattcagacacagctctttacaatattggagacatggtacatgctgcccggggcaagtggggaattaaagcaaactgcccttg

SEQ ID NO: 167893 - DNA, 100 bp, Homo sapiens
ccttgccagagacctggcaaatgacatcatgacactggaggtcaccatcaaccagagcttgctcacccccctccacgtggagattgaccctgagatccag

SEQ ID NO: 167894 - DNA, 51 bp, Homo sapiens
aggaagaagccacccgagcggactcccgagaaaatgaaactgaagccgtgg

SEQ ID NO: 167895 - DNA, 100 bp, Homo sapiens
gtggattcagaggaggtcgtgggggccgggagtttgcggattttgaatataggagggaatctggaaaaattgcaatcaaaacatcatttctctaagaaaa

SEQ ID NO: 167896 - DNA, 82 bp, Homo sapiens
ggatgatgctgactttgatgaagaactcctctttcctaaaatggagtcgagtaaaaagatggactctcctggcgcgctgcag

SEQ ID NO: 167897 - DNA, 75 bp, Homo sapiens
agcagccgatccagcctgcggagcctgtggggcagttgttagagttggaagcttggcagttggcctcccttcttc

SEQ ID NO: 167898 - DNA, 100 bp, Homo sapiens
taaaccccaaggaggactgaccagttcttgaatttctataccatggccctttcctcactaggctcatcgacttcttcattccagtccatgggttcttatg

SEQ ID NO: 167899 - DNA, 50 bp, Homo sapiens
ccgggaccgtttaaaaaactggtgaaatgacaatggatgctctgttggct

SEQ ID NO: 167900 - DNA, 51 bp, Homo sapiens
ggaaattaactatctgtacttataagttagtgtgactctggatccagatac

SEQ ID NO: 167901 - DNA, 74 bp, Homo sapiens
aggtccaatggttttttgccttgcttttggagccacattgctactgagccatcatgaagctgaatggccaccag

SEQ ID NO: 167902 - DNA, 82 bp, Homo sapiens
tcgttgctgccttcttcgtcaagctgatcttgcatctttaatggataaaacatttgagagaaagttgcctgttagttcttta

SEQ ID NO: 167903 - DNA, 74 bp, Homo sapiens
cggcaaagggtttggctatgtgctctttgaggatatatgattggatgcctgaacaaccaaatatattccaagtg

SEQ ID NO: 167904 - DNA, 100 bp, Homo sapiens
gttcctacagcatttgaatgaagaggcctgggccgaggccactggtgcatatgttcccgggagggataagccagacctgccaacctggaagaggaatttc

SEQ ID NO: 167905 - DNA, 87 bp, Homo sapiens
ccagcggcgcgtgagcggcactgatttgtccctggggcggcagcgcggacccgcccggagatgagccccgcagcgcctccaccccag

SEQ ID NO: 167906 - DNA, 100 bp, Homo sapiens
agcaaagtcgccgggggtgtggggtgttccacgctatgttgggagtgttcgctttcgaggtactactgagcgagtgtgcttgatccagggaacggttgaa

SEQ ID NO: 167907 - DNA, 117 bp, Homo sapiens
gtgggtgagcggcggccacggcatcctgtgctgtgggggctacgaggaaaggttgcagagaacacatcttagaagatgaaaaacctgaatctatcagtgacactactgacttggctc

SEQ ID NO: 167908 - DNA, 100 bp, Homo sapiens
gggcccacgggtcccggggatggcgtcggagccgcgctaactccggatgaccagtgtcccagtgaaggaacgagtgaaggtgtctcagaactggagactg

SEQ ID NO: 167909 - DNA, 82 bp, Homo sapiens
ctgctatcagtgcccgctttgttcagctgcagcatggagagatagataaacgggtttactcctggcttgggggcattaggaa

SEQ ID NO: 167910 - DNA, 100 bp, Homo sapiens
gtcaagtgcaacagcagcccaggtgtgctgaaggttctggcccagctggggctgggctttagctgtgccaacaaggtatctcgggggagctttgtgcctt

SEQ ID NO: 167911 - DNA, 88 bp, Homo sapiens
ggtcggtcggcgcctgttctcgggctgtttggcggggttcaggataagtttgaggtgctgaattacacaagcattcctatctttctcc

SEQ ID NO: 167912 - DNA, 74 bp, Homo sapiens
gcagccgatccagcctgcggagcctgtggggcagtcgactggcacaggctgaggaaagacaacagctcgagtca

SEQ ID NO: 167913 - DNA, 75 bp, Homo sapiens
gcggcttccaggcgcactaccgcggtgaaaggtgtagcagtcactcggcctacacccacagcatcgaccttgtga

SEQ ID NO: 167914 - DNA, 82 bp, Homo sapiens
ttcgttgtgccagcgactaaaaagagagtgcctggtgaagaatgtgatgggatcactagcatgtctgcggagagcggccctg

SEQ ID NO: 167915 - DNA, 97 bp, Homo sapiens
aataagtgcagtatgagctacatgtttgagtacccggagtatcagggctcagaagcagctagtaaaggagactttctcttcagcagtgatcacctga

SEQ ID NO: 167916 - DNA, 75 bp, Homo sapiens
ggcaccgagagggactacgtgggcaccttgcgcttcttgcagtcgagatcctgaaggagctagacgagtgctacg

SEQ ID NO: 167917 - DNA, 98 bp, Homo sapiens
cagtgctgaagtcccaaggagccgccctgcaggatcagttacagttgtggattcgaggcaacgtgagtgcctgtgcgaggtccatcttcatatttgat

SEQ ID NO: 167918 - DNA, 100 bp, Homo sapiens
cttgagtcgggaaatggccgctgtgtggttgcaacggagataaattcccggaaccgcgattcggcgtgtcaggtgccatgctatgtgtttgatgaagagt

SEQ ID NO: 167919 - DNA, 97 bp, Homo sapiens
gaccgggaatgggctacctacacctgtgtgctgggctttcacgtctacgtgcctccggagccagcgtggtggccatagacaacaagatcgaacaggc

SEQ ID NO: 167920 - DNA, 119 bp, Homo sapiens
attggaaatgtccatccagttgggagctatgagtcctctgaaatgaacagcatatcacccacaaaagctgtatataatgccagacattggaatcatccagattcagaagaactgcctgg

SEQ ID NO: 167921 - DNA, 88 bp, Homo sapiens
tctgcacttcgcattttggcattgacatttaattttagggtcctttatatagaagggagagtagattctcagagagagttcaacagca

SEQ ID NO: 167922 - DNA, 100 bp, Homo sapiens
ctacagactccaaaaggcccttttcagggcccccaaactgtcacagaaagagctgttaacacttcctagataacgggcttcaacgtggaaaccgtggagt

SEQ ID NO: 167923 - DNA, 74 bp, Homo sapiens
cccagccccacagaccagcccagcattcaggtggaaaggagactatggaaccaggatccagcagtacttcccat

SEQ ID NO: 167924 - DNA, 82 bp, Homo sapiens
gccgagtcaagccgccgcctcgacccagggcccgcgggccaggagagcgctcggcggtacctggagtagaacagaaaaatta

SEQ ID NO: 167925 - DNA, 105 bp, Homo sapiens
ggagatccagtggtggtatgtacggagccaccgggactggaccgacaagcaggcgtgggcctcgaaccaggacatggtccggcgaggagagatcatcgacaatga

SEQ ID NO: 167926 - DNA, 75 bp, Homo sapiens
aaggattccaagtaactcttatttgcatgattccacctttccactgatagactcaagttcccagaaccagattag

SEQ ID NO: 167927 - DNA, 99 bp, Homo sapiens
gacaaccctggcgtccatgagcctggtgtgccacgtcatcaccgaggtgaaatctggaaatttctagctgagcaattccaccttaaacaccagtttccc

SEQ ID NO: 167928 - DNA, 100 bp, Homo sapiens
gggcggccacctatgagacttcatctgtgtggtaaaaatgcatttgcaaagggagaaaatgaaggccaaacagaagcaggctccagcttctgcaaaaact

SEQ ID NO: 167929 - DNA, 75 bp, Homo sapiens
gaccttcacccattgtttgatgagacctttgaattgcaaaatacatatctcagtgcattgatgagatcaagcagg

SEQ ID NO: 167930 - DNA, 50 bp, Homo sapiens
aatgcattcagaagccaaaatgcacgtgtggagtgagagcgaggactgcc

SEQ ID NO: 167931 - DNA, 74 bp, Homo sapiens
cgagctgaccctgggagacatcgacgggagtgcatccgccccaacccttttccccctcgtctcctgtgagaatt

SEQ ID NO: 167932 - DNA, 100 bp, Homo sapiens
ctccgaagatgggggatttctacgacccggagcacccgacccctgaagaggagtctgcaatgccgagtggaggaaggaggaaccggagtgtgagcagtag

SEQ ID NO: 167933 - DNA, 90 bp, Homo sapiens
cctgattacctgccacccattgtgtcttctcaagaagatgattctgggcctcccccatctactgtcattaaccaaaatgaaacatttgcc

SEQ ID NO: 167934 - DNA, 98 bp, Homo sapiens
gccgccagtacccgctgttctgcttcctgctgctctgtctcagcgccgcctccctgcttcttaacaggagcccgagcggcagtacatgcacattggca

SEQ ID NO: 167935 - DNA, 100 bp, Homo sapiens
gagaacccaaaggaaaagcgaccagggagagtcccgtattctcagagtaaaagttgtttctggaattgatctcgccaaaaaggacatctttggagccagg

SEQ ID NO: 167936 - DNA, 50 bp, Homo sapiens
ccgagctttgcgggaaagcagcggccggagagaagcactaccacccttcc

SEQ ID NO: 167937 - DNA, 74 bp, Homo sapiens
ccgtcccgtccgacagccaggcccgggagaagtacttgaagctggtgtgtgtttcctttcagcgtcaagggttc

SEQ ID NO: 167938 - DNA, 75 bp, Homo sapiens
aagcctgaaaagtcgcagcgagctggagccgccggagctcctttggtgaagattaaacagagcttaacaaaactg

SEQ ID NO: 167939 - DNA, 98 bp, Homo sapiens
ctgcagcagagggagcttgccttgaaggacaagaacagcgccgtcaccagcagcctccaactgaagaaagtcaaacggaaactgccctgcaagagaga

SEQ ID NO: 167940 - DNA, 90 bp, Homo sapiens
agagactgattctggagaaccatgcagccaagattccagctaaggacctgaaggagaagaaggagaaggtggaggagaaggcaagccgga

SEQ ID NO: 167941 - DNA, 100 bp, Homo sapiens
agactgttactacaacctcgggcgtctggttatcaatagtctggctgtctatcgtcatcgtgagactgactttggtgtaggagttcgagaccaccctggc

SEQ ID NO: 167942 - DNA, 95 bp, Homo sapiens
tttaattacttgagaatttataatggaattggagtcagcagaactgaaatagcctctgctttaggcccagaaggaaaagaagcttacaggagaca

SEQ ID NO: 167943 - DNA, 98 bp, Homo sapiens
gccgatcccggagcccgagccgggagagggagccgccgcagccgccggcgctgtggagctcaaagcttggattctgccgtgccactcacgaatggcga

SEQ ID NO: 167944 - DNA, 83 bp, Homo sapiens
cctcgctggggcggggaccttgccttgcccgggattttccgcagatttccagtggccccactgatcccttatccactcatcac

SEQ ID NO: 167945 - DNA, 100 bp, Homo sapiens
ttaggatttgttagaaaggagacccgactgcaactgctggattgctgcaaggctgagggacgagaacgaggtaggaactatatccaagcatctggactgg

SEQ ID NO: 167946 - DNA, 136 bp, Homo sapiens
gcgactacatggcccaggaggacgactgggaccgggacctgctgctggacccggcctgggagaagcagcagcgcaagcacaaggccaatcagcccccccacggtgtcccccaactctctctctacgaacatttcaa

SEQ ID NO: 167947 - DNA, 75 bp, Homo sapiens
gtcaaaatccatagatggaaaagatgtgtttctgaaagatctatccagcactccgatggccagcaacaacaccgc

SEQ ID NO: 167948 - DNA, 82 bp, Homo sapiens
gccctgtgtgacaccaagataagtaacgatgtgagctgcaatgaaattcaaactataccttcccaaattggtaacctggagg

SEQ ID NO: 167949 - DNA, 75 bp, Homo sapiens
aggacaccaagatgcggatccgggcctttccggttcatctgcagaagccagcggacgcctctgttcaacttgtgg

SEQ ID NO: 167950 - DNA, 75 bp, Homo sapiens
cgactcccccggctcttagactatgaaacaaagagtcctcttcgtggaaaagaaaaaaatacgctccctttaaac

SEQ ID NO: 167951 - DNA, 75 bp, Homo sapiens
ctggacggagctccctggctgagccgcagcaatggcgctgagttcctctgctggagttcatcctgctagctgggt

SEQ ID NO: 167952 - DNA, 100 bp, Homo sapiens
gatatgcaatgtcacttacaacattaatcagatactgcatttaaggctttgaattgtattccatggtgccatctatttgtcctctagaaactcttcataa

SEQ ID NO: 167953 - DNA, 90 bp, Homo sapiens
cggcggtgtgggcgcgtcaggccgcgacgagggcgctgagttacagaatgtctgaaggggacagtgtgggagaatccgtccatgggaaac

SEQ ID NO: 167954 - DNA, 75 bp, Homo sapiens
ctcaggatttacttgaaatgaaaggagattccaacctacttcaggtgctggagaatctggtaaaagcaccattgt

SEQ ID NO: 167955 - DNA, 100 bp, Homo sapiens
agactacaaggacagcagcgactttggggcccgtcaccctcagtcctcaaccactgaagaagaagcttgatgcttggctgtcagaagacatgaattacgc

SEQ ID NO: 167956 - DNA, 50 bp, Homo sapiens
cctgtacagcctgcagaacttctggcatggaaaagcccccgtgcaactgg

SEQ ID NO: 167957 - DNA, 50 bp, Homo sapiens
gtgtgactgtggtactccaaagagttcgcagtatgtgcagtgcgtggccg

SEQ ID NO: 167958 - DNA, 150 bp, Homo sapiens
ctggctgtgctcctgcttaaagaaatcagtccttcctttccgacttagtcctcgggaagaagtttcagactacaagcctctgaagagccaatccattcaggatgggaaaccacgcaggcaaacgagaattaaatgccgagaaggccagta

SEQ ID NO: 167959 - DNA, 100 bp, Homo sapiens
aacacgggcactggcaagacctccttgctccgggttctgggtggcctctggacgagtacacggggcccagggaggggagcaaggagaaggcaggtgcgcg

SEQ ID NO: 167960 - DNA, 99 bp, Homo sapiens
tggagtgaaccggagaccccgaaaacggaagcgcagggagaaggaagaggtgtttgaaaaggggaaagtgcagtgttgcccttctgaatgagacagaat

SEQ ID NO: 167961 - DNA, 100 bp, Homo sapiens
ttccaagtgatgcagtcaagccttgcccatgtgtgtatactcttgatgtaccagatgcattctattactgttatagtccagaccctggtaatgcaaaggg

SEQ ID NO: 167962 - DNA, 75 bp, Homo sapiens
gcgcttcagcgtcccggcgccgtcgcgccactcctccgatcctccgggcctcatatgaacaggagaaagaagcgc

SEQ ID NO: 167963 - DNA, 83 bp, Homo sapiens
aaggagctggacatcgagcctgagggaggggaaaggcgcaggacgagccaaactcaggctgtaccttgagcagctcaagcaac

SEQ ID NO: 167964 - DNA, 75 bp, Homo sapiens
ggatttgacaaagccacttttgaaagtcagatgtctgtgatgaggggtcaggtcagggccaaaactggaaccaag

SEQ ID NO: 167965 - DNA, 100 bp, Homo sapiens
gtcaagaatccttttggcttagagatcactaatccatcttcagcttcaattacaaggaaaaaatgcatttttcaaagacctaacttcaattcagttatta

SEQ ID NO: 167966 - DNA, 83 bp, Homo sapiens
ccctttggatgtagcaaggaagaaattgttcagttcttctcaggtgtgcatcctcgagtgtgaagagaaggtcttccccagcc

SEQ ID NO: 167967 - DNA, 89 bp, Homo sapiens
tgggacatttcatgagtcattcaagcaacatttctaagatttcagaagaaagtggtagcttcctttccaagaacagttctgagcacagg

SEQ ID NO: 167968 - DNA, 100 bp, Homo sapiens
gtcaagagcggcaggggctgcaggagataagagaaacggagcgcatcagcgaggaggtggggctgctgcagctccttggggaccccccgccccagcaggt

SEQ ID NO: 167969 - DNA, 90 bp, Homo sapiens
attacctgtttgcaattcaaccccaagttcatgacttttgccagtgcgtgttccaacatgatgtatgagaactttgtggaggaggtggat

SEQ ID NO: 167970 - DNA, 100 bp, Homo sapiens
tggaaagcagtttttaagacaagtggataatattaatgcagctgtgatggatttgaaaaaaaagaagatccgcagtctaagtgaagaggtcaaaatagga

SEQ ID NO: 167971 - DNA, 101 bp, Homo sapiens
taacgtcatggaggatgaacgacagaacccattaaaagagccagtaaatcctgtggaaaatggccttcagtgatcttacatcgaggactgtgcatctttat

SEQ ID NO: 167972 - DNA, 100 bp, Homo sapiens
gaggagccgcagtgggtcccggacaaggagaggctgggaggcggcagaatgcagccagaggagggcacaggctggctgctggagctgctgtccgaggtgc

SEQ ID NO: 167973 - DNA, 100 bp, Homo sapiens
tttcaggaggaagcgatggcttcagacagcatatttgagtcatttccttcgtacccacagtgcttcatgagaggtgttggtaaatcatgcttattgctac

SEQ ID NO: 167974 - DNA, 75 bp, Homo sapiens
accatgcttcaagagccattccttttggaacaatgctacaagcctatcgtggaattcatcgatgcacaattcgag

SEQ ID NO: 167975 - DNA, 74 bp, Homo sapiens
tttgacctccctgaaatcagtaatggttccgccacacttcaccactggcagcagttggcccaacctcaccttgg

SEQ ID NO: 167976 - DNA, 50 bp, Homo sapiens
cgggacacagacccccagcccgcccagctggagtgcaaaggcgtgatctc

SEQ ID NO: 167977 - DNA, 50 bp, Homo sapiens
atcgaatctcttctccctccccttcttgatatcagttttagagaatgtgg

SEQ ID NO: 167978 - DNA, 82 bp, Homo sapiens
gcagagctagttcctctccagctcagccgcgtgcagcagtaccgcgtcgccatgactgccaaggactgctccatcatgattg

SEQ ID NO: 167979 - DNA, 100 bp, Homo sapiens
cgccaaacgcacgagtattacccctatctcagcagtgatggggagagccatagcggggtagaaatatttctgtcatggctcattcaaagactaggaccaa

SEQ ID NO: 167980 - DNA, 75 bp, Homo sapiens
agaggaagaacaagaagagaaccttgaagcaagtgaaatgttcccactgccaggaggcaggcgccaccttgggct

SEQ ID NO: 167981 - DNA, 95 bp, Homo sapiens
accttcgacttccttcagggtttaggagaagcactgttgttttccacacagggaatggcatttactttacaagaacgacaaatgcttggtcttca

SEQ ID NO: 167982 - DNA, 100 bp, Homo sapiens
gacgacgtgaaggagcagatttacaaactggccaagaagggccttactccttcacagatcggatgccatagaagtttgcaagaagtttatggagcgcgac

SEQ ID NO: 167983 - DNA, 125 bp, Homo sapiens
gtttgacatagacctggaccagccagaggacgcgggctctgaggatgagctggaggagggggtccccttcccctgagcccatctacaatagcgaggggaagcggcttaacacccgagagttccgc

SEQ ID NO: 167984 - DNA, 74 bp, Homo sapiens
tgggacagtgcggctactcttgatcctctccggctgcttggtctacggcacagattataagaagaccagtctag

SEQ ID NO: 167985 - DNA, 82 bp, Homo sapiens
tgatggtgctgtaaccacctcacagattccagcttcggaacaagagaccctgtgggccagatggagaacatatccccaggac

SEQ ID NO: 167986 - DNA, 82 bp, Homo sapiens
gcgaggcctcccgggctccgggaaaactacactggccagtttggtgccctggttgtcagatgttggaaagcagtaggacgga

SEQ ID NO: 167987 - DNA, 73 bp, Homo sapiens
ccttctttgtggttctcattgtcatccttgtgctgttggtcatcgatatgagggaaggcaccattggagatat

SEQ ID NO: 167988 - DNA, 48 bp, Homo sapiens
gtcccatcactccaaggagagaaggttggatggcaagcatgtggtgtt

SEQ ID NO: 167989 - DNA, 76 bp, Homo sapiens
cgctgcacttccatcccacggtcagatcttggcatatacagaagggctgcatggaaaatggctgttcacagagata

SEQ ID NO: 167990 - DNA, 89 bp, Homo sapiens
cataagcgaggctgtggaagatgctcccagctacagagggtaccgggatgcctgcaccattactgacccaacatgagtgaagtttcctg

SEQ ID NO: 167991 - DNA, 90 bp, Homo sapiens
atagcctgtttcgtagccatattaattctgaagctgagggtcagaatgatacaattgaggaacccaacaaggtccagaaaaggaagaggg

SEQ ID NO: 167992 - DNA, 100 bp, Homo sapiens
ggacagcgccgacgtccgggtgcacgtgccacgcacgcccgtggaccgggagcccgtggaccgggagccggtggtgtgccaccccgacctggaggagcgg

SEQ ID NO: 167993 - DNA, 100 bp, Homo sapiens
tcggcttctgagacggcggcagcagcggcattcagagagatggtagagtgcttcaacaagatttcgagagacgctgactgtcgggcggtggtgatctctg

SEQ ID NO: 167994 - DNA, 50 bp, Homo sapiens
cataaatggatgctgcaattacaaggctcaagatgtgttgctcggtttga

SEQ ID NO: 167995 - DNA, 100 bp, Homo sapiens
ctgcccttcgacgggcacaacctcaagatcactccaagaactgaggcccctgtcagcagtgtcagtaatagtttggagaatgccctgcacacatcagcac

SEQ ID NO: 167996 - DNA, 51 bp, Homo sapiens
gacacagtttatgaatgtgttgtggaggtttttcgttggaatatacgttgc

SEQ ID NO: 167997 - DNA, 83 bp, Homo sapiens
ggtcgccctcaaggccatgatcaaaacattgagtttgtgacgggcaccaaaaaaggcaccacgaccaacgccacgtccaccac

SEQ ID NO: 167998 - DNA, 50 bp, Homo sapiens
gtggaatatgccattgaggctatcaaggctatcaatatgacggctgaaga

SEQ ID NO: 167999 - DNA, 100 bp, Homo sapiens
gggccgttgccgccgtccgcgctcggcccccgcggagagcttccatgaggcaggctgaacctgcagatatgcgcccagagatatggatcgcccaagagtt

SEQ ID NO: 168000 - DNA, 101 bp, Homo sapiens
agctcaaggctggcaaaatcccaaaaccagggccaagtgtatgggtttcgacagaccatgatgaaattgagaatgtggccaaacaatttggtgcacaagtt

SEQ ID NO: 168001 - DNA, 97 bp, Homo sapiens
agcgcccaggaccctgttccatccaaactcttgccctttgagggaccaggtgtcatggagaaactccagctgggcccagagattctgcagcgggaaa

SEQ ID NO: 168002 - DNA, 75 bp, Homo sapiens
gcctccccagccacgtggaactcatcaaccacgaccccagccgtatccccgtggacctgccggaggcacggtgcc

SEQ ID NO: 168003 - DNA, 100 bp, Homo sapiens
ggaacggctcgctggagctgcccggggcggtccctggctgcgtgcacagcgccttgttccagcagggcctgatccaggatgacagtgatgggattccgtg

SEQ ID NO: 168004 - DNA, 49 bp, Homo sapiens
cagagggggccgacactactgtgtcgcttggtgctaacagtggtttgca

SEQ ID NO: 168005 - DNA, 98 bp, Homo sapiens
agaaaacctccacgcaggagtacgcagcaaaaatcatcaataccaagaagttgtctgcccgggcaatgtgtattcctccatcatatgctgaccttggc

SEQ ID NO: 168006 - DNA, 100 bp, Homo sapiens
cccctacaacttattcctgtccggagacagcctaagggtcggatcatgctaaaaggagataatattactctgctacaaagtgtctccaactagaaatgat

SEQ ID NO: 168007 - DNA, 100 bp, Homo sapiens
acatcctcatctccgatgaccagcttcccgaaaacatcatccttgtcaacacctcggactggcaggggcaggttgaggcctctggtgtctacgcagccag

SEQ ID NO: 168008 - DNA, 98 bp, Homo sapiens
gacgtggaaagattcttcaagggatatggacggataagagatattgatctgaaaagaggctttggttttgtggccaagtcagaacttcgagcagccat

SEQ ID NO: 168009 - DNA, 82 bp, Homo sapiens
ggaccttcagttccaaagatgatgaatctgaaaggaaatccggaattatcacagacagaaaaatatggctcaggagactaac

SEQ ID NO: 168010 - DNA, 76 bp, Homo sapiens
ggtcttccagagcgtgaagatcaagatcgttcccagtgacctgacagcagaggagcgtcaagaactggagaacatc

SEQ ID NO: 168011 - DNA, 100 bp, Homo sapiens
aagtgcgtgccgccacccgatggaagattcgatggacatggacatgagccccctgaggccccagaactatcttttcggtgagaagccctaccactgcaac

SEQ ID NO: 168012 - DNA, 100 bp, Homo sapiens
caacatcagtgaggaggcactgaaccacctgggggagattggcaccaagaccacactgaggtactgaggacaaatcagttctctgtgaccagacatgaga

SEQ ID NO: 168013 - DNA, 74 bp, Homo sapiens
aaacagagagatgagcagcttctgacctatgctattggcatgatacttacatttgttgttctggtgctgatgaa

SEQ ID NO: 168014 - DNA, 48 bp, Homo sapiens
cagacgggaaaaatagtagcaccactgttacagacggccatgtacgaa

SEQ ID NO: 168015 - DNA, 99 bp, Homo sapiens
gctgactggtagaagcattcgtgcagacagggcaaagaaaatgggactggttgaccaactggtggaacccctgggtggtggagtctatggcccttctcc

SEQ ID NO: 168016 - DNA, 90 bp, Homo sapiens
tctcgctcggctgcgggaaatcgggctgaagcgactgagtccgcgatggagaccctcaggcagtttgattgcatctacacaagataaacc

SEQ ID NO: 168017 - DNA, 112 bp, Homo sapiens
ccagccagaagaggcgttcgctgcgcgtgcacattccgtaagactttgaccccgacgcaggcttcagtgattgccgcggatcagaagcctgagcactttggctcgagacaat

SEQ ID NO: 168018 - DNA, 75 bp, Homo sapiens
aagtgcagctgcctcagttcttagcgcaggtgtttgctgactagcactttggagagtgtatgcttatctgccatg

SEQ ID NO: 168019 - DNA, 96 bp, Homo sapiens
ggcgtcgccgcatcccggacggtacttctgccactgctgctccgtggagatcgtcccgcgcctgccgatgaaggatttgggggcagagcacttggc

SEQ ID NO: 168020 - DNA, 95 bp, Homo sapiens
gatgtacggcaagcagaagatctattttgcggatcagattttgtggaagtataatactttgtcattatgagatgtcgtctctcggtgcctccttt

SEQ ID NO: 168021 - DNA, 73 bp, Homo sapiens
ccaaacgagattggggccatgccaaggactatgtggaggaaggcccttttgtctacttgtctttagtaggaaa

SEQ ID NO: 168022 - DNA, 100 bp, Homo sapiens
gcaccgtgacccgcactattcacgggagccctagagaggacaccgggacacccagaagccgggaaatgattcttctgctgatcgacattgagcagtccta

SEQ ID NO: 168023 - DNA, 97 bp, Homo sapiens
agccacccccagctcttcagcattgtccgccaggcctgtgtccggagcctgagctgtgagggtggcatggagaaatcgttgtcaaaacagagatgtc

SEQ ID NO: 168024 - DNA, 100 bp, Homo sapiens
ggccagaaagtttactcatatttcagctctgttacaggaattcctgcccctagaggagtgttactttatggtcctccaggtactggaaaaacaatgatcg

SEQ ID NO: 168025 - DNA, 76 bp, Homo sapiens
agaccatgcgccggaacaccattcttcgccaggccaggaatgaccctgatgctcccataagacagaaaatgcccct

SEQ ID NO: 168026 - DNA, 50 bp, Homo sapiens
cagcgctgctggcgggcgttaggtctattatcctcccagtccacaacgct

SEQ ID NO: 168027 - DNA, 100 bp, Homo sapiens
ggaacgaggacgcggactgcgaaggcaggctcatgagcgctcagagagctcagaagtggcttttgtgatgcagctggtgaaaaagctgatgattatcatt

SEQ ID NO: 168028 - DNA, 50 bp, Homo sapiens
caccagggctacagcactgaggctggctcttgtcaggatggtgaagctgt

SEQ ID NO: 168029 - DNA, 83 bp, Homo sapiens
aggactgcggcctcttctgaggggcagcggggcctggcgggatggtgtgcctaccgcatgttgccgctgctgtttctgctggg

SEQ ID NO: 168030 - DNA, 100 bp, Homo sapiens
gttacatcagaaggatacagttcatgacaatgactttgagccctaccttactggacagtcaaatcaggggcgacctgacggaagataacatggagacaga

SEQ ID NO: 168031 - DNA, 107 bp, Homo sapiens
agagatcaaggcagagttatttggtcatggaagaacaactgacttgtccaagtatttgactacagtcattccttatgagaaaaaaaacggaccaccgtctgttgaag

SEQ ID NO: 168032 - DNA, 100 bp, Homo sapiens
accagaagaaaacctgaatctctgagccttgaccttatgtcatgggttcaacttggacactgaaaacgcaatgaccttccaagagaacgcaaggggcttc

SEQ ID NO: 168033 - DNA, 50 bp, Homo sapiens
gtcctgaaacagttttgcagtcgagacaggagactctctccatcatgtga

SEQ ID NO: 168034 - DNA, 100 bp, Homo sapiens
ggacagtctatggatctacattataccaataacgagctctgggttcccttcattatcctgtggaagtagcggtagcagttcatccaacacggctgtgaat

SEQ ID NO: 168035 - DNA, 90 bp, Homo sapiens
agccgaggagaccccgcgcagtgctgccaacgccccggtggagaagctgaggtgtctcaaaggctgttgagcacatcaataaaactattg

SEQ ID NO: 168036 - DNA, 83 bp, Homo sapiens
caggtgcaggtgtctcttctcgccctggcggggaaggtaactaggatttctacctcaaccgcgagacctatgcaaggacggtg

SEQ ID NO: 168037 - DNA, 75 bp, Homo sapiens
tgaagctgtacctcaggtgaagttttatgaagaggttttataggatcacattgacaaaagtaccatggagtttta

SEQ ID NO: 168038 - DNA, 82 bp, Homo sapiens
cctcgctgcgctcatggcgtcgcccggcgtgagtgcatctccatccacgttggccaggctggtgtccagattggcaatgcct

SEQ ID NO: 168039 - DNA, 87 bp, Homo sapiens
ccttctttccagtgctaaaggatctctgatctgggcccaggtgttttcagccacacctttgacaaggtgaacactaaagcagggcgg

SEQ ID NO: 168040 - DNA, 131 bp, Homo sapiens
aaactgccagagtggaaataaaccgcaaggatgaagaaataagtaatcttcaccaaagccggatcgagctgggagatgtgacaccacacaatattaaacagttgaaaagattgaatcaggtcatctttcca

SEQ ID NO: 168041 - DNA, 75 bp, Homo sapiens
catgtggaaaatgatgcttaatatcgatggaacaagttccagttccagtctaccacccaacacctagccagactc

SEQ ID NO: 168042 - DNA, 83 bp, Homo sapiens
cggcagtccacccaccgccgccgcctcccaggcagttgtgaaaaacttcaggacaaaaatgtttcatttaaggacttgtgctg

SEQ ID NO: 168043 - DNA, 100 bp, Homo sapiens
ctgaaagggaagcagaaccatactatctggaaacaacgtggaggtagatgagtctttgttccaagaaatggatgacttggagctggaggatgatgaagat

SEQ ID NO: 168044 - DNA, 107 bp, Homo sapiens
cggaaactgagtatgggatctgatgatgctgcctacacacaagagcacaggaagcttggaaacatgactgtgacggtgaagaagactgtcccctctcctgaggctgt

SEQ ID NO: 168045 - DNA, 75 bp, Homo sapiens
gcgtgccctacttcaaggataagggcgacagcaacagctctgccggctggaaggctaactcaggtgagatggagc

SEQ ID NO: 168046 - DNA, 89 bp, Homo sapiens
aaaatctggcatggagcgttgccgaatccttttggaggctgccaggataataagggctgaagccgacgtagcttctctgaacagacgca

SEQ ID NO: 168047 - DNA, 95 bp, Homo sapiens
acagaaacacctaggaagggagaactgattaactgctgaagtactgatcgagttctgcatttcttcaatgaggaactacaggctgatcttctgcc

SEQ ID NO: 168048 - DNA, 75 bp, Homo sapiens
gtgaacattcatgcacaaatttttatgtggagattcctgacattcagacaactgacttgtaactgacttataact

SEQ ID NO: 168049 - DNA, 96 bp, Homo sapiens
cacaatcaaagaactggatctttatctggcttactttgtccacactccgggcttcccagcagcggcttatggaccagtggcagcagcggcggtggc

SEQ ID NO: 168050 - DNA, 50 bp, Homo sapiens
gcacggagtcgccgcggagcgcaggtgaaagaaaagatgttgtcccggtt

SEQ ID NO: 168051 - DNA, 74 bp, Homo sapiens
ttggagagacttgaaaggtctgtatgaggacattagaaagaatgagtccctggaacgccagatgcgtgaaatgg

SEQ ID NO: 168052 - DNA, 90 bp, Homo sapiens
cgctggcggcgggcatcttcttcgtgaggctgctcttcgagcgcatgcttttcacttccactgcatctctcgctggctcaaaacacgaca

SEQ ID NO: 168053 - DNA, 49 bp, Homo sapiens
cgtcagtcgaatcacaggcaggagggtctccctctgtcacccaggctgg

SEQ ID NO: 168054 - DNA, 75 bp, Homo sapiens
aaaaagctgaaggtggaggcgccgcaagcgctgagcattagtgaccagaaggatcccaaggatcgaatggttcag

SEQ ID NO: 168055 - DNA, 76 bp, Homo sapiens
caagcagccttagccctagtgtagaggaatctttgtctgaagtggaagaaaaatacaagaaagccatggtttccaa

SEQ ID NO: 168056 - DNA, 100 bp, Homo sapiens
aatttatatagagatgtgatgttggagaactacagaaacctcgtctccctggatccaggatgagaagactgataaaagaagaagctagctgaacagctgt

SEQ ID NO: 168057 - DNA, 100 bp, Homo sapiens
ttctgatcgggaagcctcatctagcccagaggatcggaatgacagatgctggcctgccactcctcctgctatgatgcctgggcagatcccggacccttcg

SEQ ID NO: 168058 - DNA, 82 bp, Homo sapiens
agaagacattgtagaagctgccagaggagccacagaaaacagtgtttacttggagttttcttgaagtacaactaaggacagg

SEQ ID NO: 168059 - DNA, 87 bp, Homo sapiens
ggagagcaggagcctcggggtccggaaccagacgatgagacagagttgcgaccgcgcggcaggatacaatgtctctttgctatatga

SEQ ID NO: 168060 - DNA, 83 bp, Homo sapiens
atcgcaaccaccgccctggccatctaccatgtgccttcacagttgttgatcacatagcatggtcatccactcacagcttaaaa

SEQ ID NO: 168061 - DNA, 100 bp, Homo sapiens
gagaagtctggcaggggtgtgaattctctcttcccttcagggagagctccccctccggggctccgcgggacactggatctccaggttatccgcgtgcgga

SEQ ID NO: 168062 - DNA, 75 bp, Homo sapiens
gccgcagatgcccaccggaatggagaaggaagaggagtcgatgttatacatccaggctctaccagggcctttcct

SEQ ID NO: 168063 - DNA, 100 bp, Homo sapiens
atggaccatcctgctggtcagcactgcggctggtcatcctgtacagttctacagcatgaataggcctgcctctcgccatactcccccaacaatagggggc

SEQ ID NO: 168064 - DNA, 75 bp, Homo sapiens
gattgactctacagactcagaagatgatgctaacagtgatgaatttcatcctttcatcgaagcacttctgcccca

SEQ ID NO: 168065 - DNA, 88 bp, Homo sapiens
gggttgggctgtgacgctgctgctggggtcagactgctgagaaggaagaatttgaacatcaacagaaagagctggagaaagtttgcaa

SEQ ID NO: 168066 - DNA, 75 bp, Homo sapiens
agtacttggacaagatgaacaacaatatcggcattctgtgctacgaaggaccgcagctgaatgcacagctagaag

SEQ ID NO: 168067 - DNA, 82 bp, Homo sapiens
tgcagccccaagacagagcgctactcctggcagtgcgtcaatcagagcgtcctgtgcgctgtttgcagacaaggtcccaaag

SEQ ID NO: 168068 - DNA, 100 bp, Homo sapiens
aaaaccatccagccaaaaatgcacaattctatctcttgggcaatcttcacggggctggctgctctgtgtctcttccaagtttctctgcaggtggatattg

SEQ ID NO: 168069 - DNA, 74 bp, Homo sapiens
gtaataacccttaccgggagtttcactgaagcttgggcaatggtagatggtggttcaaatgtgaaagcccgctc

SEQ ID NO: 168070 - DNA, 75 bp, Homo sapiens
gcggcctcggctgaagaaagaaggtgggagcggagagcgcaggcgtgggaccctgaagtggctgatggaggagag

SEQ ID NO: 168071 - DNA, 84 bp, Homo sapiens
caggcgctggcgtccggcctgagtgagaagccctaccactgcaactgggacggctgcggctggaagtttgcgcgctcagacgag

SEQ ID NO: 168072 - DNA, 98 bp, Homo sapiens
gaagggcttcatcatcaagcagatgaaggaggatggcgcctgtctcttccgggctgtagatcctcccaagaaggtgaccacagtgattcaaaacccca

SEQ ID NO: 168073 - DNA, 100 bp, Homo sapiens
ggagggcaacgagcacaacaggagctacgaggagttggactcacaccacccggcaagaactgctcactacggctccctgccccagaagtcacacggccgg

SEQ ID NO: 168074 - DNA, 75 bp, Homo sapiens
tttatggctaaaaggcttaacccaggcatttggagggtttctcatttggcctgggtctgtccccttacgcaagag

SEQ ID NO: 168075 - DNA, 83 bp, Homo sapiens
tggggacggagcagcgcgtcgtggggcgagcggcaggatgatcggctgaatgtaacagaggaactaacgtccaacgacaagac

SEQ ID NO: 168076 - DNA, 90 bp, Homo sapiens
gcaagaacagagatggcggggagagacggccaagcagcaccagcgtgcctttgggtgataagggagccgatgatgagcaccccacctcct

SEQ ID NO: 168077 - DNA, 98 bp, Homo sapiens
tggaactggcttagcgcacccatcccaccttcccgcaccctgggaccgagcccacccacctttgggttcctgttggacatcgatggagtgcttgtgcg

SEQ ID NO: 168078 - DNA, 83 bp, Homo sapiens
catggttccccttctactacatgctgaaggtcagagagcttcaaactcgactacagagcgtgcaggccacaggtccctccagc

SEQ ID NO: 168079 - DNA, 83 bp, Homo sapiens
acagattccagcttcggaacaagagaccctgggtcctaacctgattataaaacaaccagatgagttgctggacagcatgtcag

SEQ ID NO: 168080 - DNA, 73 bp, Homo sapiens
tgaggcacttagagagcgtgtggactgtttcaatcttggagcagcgactgactttgacagaggataagctgaa

SEQ ID NO: 168081 - DNA, 90 bp, Homo sapiens
cgcggcctccttcaccctgctggttggcatctacttcccttccgtgaccgattcttctgatgtagagcgactggaaagattcttcgactc

SEQ ID NO: 168082 - DNA, 74 bp, Homo sapiens
gctaccggaatgtcatccagcgagtgattagtttccaaggcaggaaaggtaaagagacaaagaaagtgccttgt

SEQ ID NO: 168083 - DNA, 100 bp, Homo sapiens
caaaggtgaatcttttggttggtgattttgatgatagccacaaagcaagcaggattggctgatgttagaaatcagataatatttgctgttcgtcaagaat

SEQ ID NO: 168084 - DNA, 51 bp, Homo sapiens
aaggggacacggcggtgcttaggtcactggaaggactgagcgcattcagga

SEQ ID NO: 168085 - DNA, 82 bp, Homo sapiens
acctctgaagttgccaggcttcccaacattcttgtctgtggaattgaatgatctggcacgggaccctccagcacagtgttca

SEQ ID NO: 168086 - DNA, 50 bp, Homo sapiens
ggatagcctgaaggcagccattcagggtaagcttgatgattaccaggaac

SEQ ID NO: 168087 - DNA, 83 bp, Homo sapiens
ctcctgcagaccttcccaggaagccagagccacacacaccatcatggtcctggaacagtaagaggaccttgtgcatgaataat

SEQ ID NO: 168088 - DNA, 75 bp, Homo sapiens
cacgtcccatttcgcccctcgcgtccggagtccccgtggccaggaatgtatcctgtcaggtataatgtcagtgaa

SEQ ID NO: 168089 - DNA, 100 bp, Homo sapiens
acattagccaaagaatgccctctctcccaggctaaggcagctggataagcacagccaggccacagcccagcagctggtgcagctcctcagcaagcagaac

SEQ ID NO: 168090 - DNA, 95 bp, Homo sapiens
tgctcctgcctcccagagaggggagccggcgaggatcaaaatcttcgaaggaggggaaggacatggagcccaacggcccgtcgctgcccagggat

SEQ ID NO: 168091 - DNA, 100 bp, Homo sapiens
ctttgattgaatacttacataatgcattggaacatgacatgagattaagatctattaatgagatgaagcggttggaagaaatgtcaaatatgtttcagag

SEQ ID NO: 168092 - DNA, 101 bp, Homo sapiens
gtttttcaagggacggatacaacgactagaggttatcaatactctggctgaccatcatcatcgtgggactgactttggtggaagtccttggttacatgtca

SEQ ID NO: 168093 - DNA, 75 bp, Homo sapiens
agaatgtccatggatttgtttctcattctcatatttcaccaataaagtgtttacaggcattggagtttttacatg

SEQ ID NO: 168094 - DNA, 100 bp, Homo sapiens
atccacgcacctgcagctctgctgagagagtgcaagccgtgggattggtgctctcctctgtctcagactattttgctgccatgtttactaatgatgtcag

SEQ ID NO: 168095 - DNA, 74 bp, Homo sapiens
acagttcgctacacagcaatgcatcgagttcttttagaactcatcaaattgaagctgttccaaccagctctgca

SEQ ID NO: 168096 - DNA, 144 bp, Homo sapiens
aaaagtttagttttcgaagccaagaagatctgaatgagccaattaaacgagatggcaaaaaggagtgtgatatttctcacagaaagttctccgctcccagacatgggtccctcggcttcctgcctcggaagcgcagcagcaggc

SEQ ID NO: 168097 - DNA, 87 bp, Homo sapiens
gcgactggacttacgaggagcagtttaagcagggctcggagcccagctacctggaccgcacggagcagctgcaggccgtcctgtgca

SEQ ID NO: 168098 - DNA, 75 bp, Homo sapiens
agacacgtacattctcttcaatccttggtgtgaaggtatctctgcattagccagattggacatatgtaaagggac

SEQ ID NO: 168099 - DNA, 82 bp, Homo sapiens
gacagatccgtagggaggacaccgtgacttcccggacgctgggaaatggggttggccggagacctacgacatgaatacctcg

SEQ ID NO: 168100 - DNA, 73 bp, Homo sapiens
atcatattcattggaggacactggaagatgggaagaaagaagcagctgccagctttctctcttcctaaaggag

SEQ ID NO: 168101 - DNA, 74 bp, Homo sapiens
aaccataaagatccaagtgctgttcacacagtgagatgcattctgataagaatgtgccttttgatgaaagaact

SEQ ID NO: 168102 - DNA, 90 bp, Homo sapiens
cgaggcgcttctgcatctgtgggccgaggacgtcgtgtccaagatgctccacgtggaccctcatcagcgcctgacggcgatgcaagtgct

SEQ ID NO: 168103 - DNA, 100 bp, Homo sapiens
tccctctgaaaactgaggaatttgaagtgaccaaaacagcagctttgaagatactgctataatttgaaaatttgaaattagtgtttcagctgaaccatcc

SEQ ID NO: 168104 - DNA, 90 bp, Homo sapiens
gcaatgtttgccatgaaagtctatggagcttaccttctaattcaactttgtggggaaacttttgggtccacgtggcaattctctgaagcg

SEQ ID NO: 168105 - DNA, 99 bp, Homo sapiens
tagtctcctcctcggcgggagccctcgcgacgcgcccggcccggagcccccagcgcagcggccgcgagcaggaaagtccaatccaaccttttatctcca

SEQ ID NO: 168106 - DNA, 97 bp, Homo sapiens
gcattttggaagaggaaccacaagaaaatcaaaagaaacttttgcccttatcagtaacacctgaggtgaccaagaatatggcccaggtgaccaaagc

SEQ ID NO: 168107 - DNA, 83 bp, Homo sapiens
gtgtctccatcgtcatcagaaactgaaggcaactttgtctatcgcacaggtttgcaacacaactacagacaggaaacatgcag

SEQ ID NO: 168108 - DNA, 100 bp, Homo sapiens
gggaacacttcacctgtcaccttgcaaacatttgctattccaggctctatatttctcagtatactctcagggtttctttatccctttccactagccttat

SEQ ID NO: 168109 - DNA, 101 bp, Homo sapiens
caagtagcccttggaaccatgatgcattgtcagaccctaaaggatcaaccctctgcatacagtaaattgaggagctcaagcttgggaaaatggtgtgcatt

SEQ ID NO: 168110 - DNA, 100 bp, Homo sapiens
gaagaggactgggaccgggacctgctcctggacccggcctgggagaagcagcagagaaaggtcttatgaacttacccggaaggaccgactgtacaaaaac

SEQ ID NO: 168111 - DNA, 75 bp, Homo sapiens
ccgcgttggcctcgccgcccctgctcggccgagccacatcgctcagacaccatggggaaggtgaaggtcggagtc

SEQ ID NO: 168112 - DNA, 51 bp, Homo sapiens
cccagcggaggaggagctctcaaaagagcgggatgccttcgacacgctgtt

SEQ ID NO: 168113 - DNA, 90 bp, Homo sapiens
ccagtgatggtgccatttcagtaccaagcctttctgctccaggtcaagatggaggaaaggaagtgctgtccatgcaccagattctcctgt

SEQ ID NO: 168114 - DNA, 100 bp, Homo sapiens
cgcgatgacgcagactggagggaggtgatgatgccctattcgacagaactgatattttatattgaaatggatcctccagcccgtgatgctgatgagcgag

SEQ ID NO: 168115 - DNA, 75 bp, Homo sapiens
gaaaccatgtgctgaaatgtttgacgacactgatggtttgtttgctggcctagacctgaactcttcagataatca

SEQ ID NO: 168116 - DNA, 107 bp, Homo sapiens
aagggaaggcgcgagtgaggaaaggaggtactgtaggttggatggcaagcatgtggtgtttggcaaagtgaaagaaggcatgaatattgtggaggccatggagcgct

SEQ ID NO: 168117 - DNA, 80 bp, Homo sapiens
gttataaattatgatctacctaccaatcgtgaaaactatattcacaggcaaagcagagagcagaggttcttcagtccacg

SEQ ID NO: 168118 - DNA, 75 bp, Homo sapiens
ccgcgttcccagcccgggtccccgcgttcacagccccagcgcaggaatgtctgaatctgaacaggctcttaaagg

SEQ ID NO: 168119 - DNA, 100 bp, Homo sapiens
tacacaatttgggggtcagtgatggaagcagaatctggtaatataagtcaaaagtctgatgaagaagattttgtaaaagttgaagatttaccactgaaac

SEQ ID NO: 168120 - DNA, 100 bp, Homo sapiens
ggccgcgctgctcatccccaaggaggacggcgtgatcacggccagcgaggacagcagtgattccagcagtagttcaagtgatgattctccagctcgatca

SEQ ID NO: 168121 - DNA, 82 bp, Homo sapiens
ctgtgagcccataattcagaacttctgccacaaaccagactgtgatgactgggagagcgggctgaatgcaatggagtgtgca

SEQ ID NO: 168122 - DNA, 100 bp, Homo sapiens
tcgggtcgcttccccgcagcatggaggacgatgcaccagtgatctacgggctggagttccagatggatcacgacccgaggaaccccgcgtacatcgccac

SEQ ID NO: 168123 - DNA, 82 bp, Homo sapiens
ccccacaatgagcagaagcacaaggctggcttccttgattttgacgaagtatattatgggcagtacatctctttttacatga

SEQ ID NO: 168124 - DNA, 100 bp, Homo sapiens
aaagttggtctcatcttggaaatgtcagctcttccgcagtgattgaagctttgataaatgaaatcttcctaagtatagatccaggatgagaagactgata

SEQ ID NO: 168125 - DNA, 119 bp, Homo sapiens
atcagtgcccgctttgttcagctgcagcatggagagatagataaacgggttttagtatggaatagagtatacaaagtcatttcaagaatgcttgaagaaaatgaaaaatatagacacag

SEQ ID NO: 168126 - DNA, 51 bp, Homo sapiens
cttagaaagctgaaagctgataagacatcccccatttgagaccaaagcctg

SEQ ID NO: 168127 - DNA, 80 bp, Homo sapiens
cacaacatcttgtatccctatcgtttcaccaaaggaatgattcattcaatgcaggaaaatgtttataggaggccttagct

SEQ ID NO: 168128 - DNA, 101 bp, Homo sapiens
agtattacatattcttctttgccttgagcctcatcactcagaaggcgttcccgttgcccgctctctcccggaagcagaggacggtgctggtcgtgtgtggc

SEQ ID NO: 168129 - DNA, 96 bp, Homo sapiens
cctctcccgctaaggtccctcagccactctgccccaagatgggccgtgggctttaatgaagcaccagttgagattcccagtccttctgaaacccca

SEQ ID NO: 168130 - DNA, 98 bp, Homo sapiens
cttcttttttggcacccatgaaacgagattgtgactgctttaagctgcggcaagaacattgtgcccatcattgatggcttcgagtggcctgagcccca

SEQ ID NO: 168131 - DNA, 75 bp, Homo sapiens
ctcactggctcggagactcctgcctgctgaggattcctacaggaagcaagtagtaattgatggagaaacctgtct

SEQ ID NO: 168132 - DNA, 73 bp, Homo sapiens
agaaaaagaaacagcgtgaaattgagtttaattggttggggtcagataagaagaggagtgacaatcaagccaa

SEQ ID NO: 168133 - DNA, 90 bp, Homo sapiens
gtgaagtttgccgccttgatgcagcatcagatcaacgccagcgcagagagaaactggctccacatcagctcggatgcatcccgcctggcc

SEQ ID NO: 168134 - DNA, 50 bp, Homo sapiens
agaagagcacagaatgtaccagagagatgcctttgaagatgagaaacccc

SEQ ID NO: 168135 - DNA, 83 bp, Homo sapiens
ttcgcattgacgccaagacaggtggagttgatccggaactccaggaagcggggagaggtggtgagagatgacccctgttgagg

SEQ ID NO: 168136 - DNA, 75 bp, Homo sapiens
tgggccgccgctgctacctgcagcgccgtgtggcacgacacaaaaatcaggtgtctttcctgaagactatcttcc

SEQ ID NO: 168137 - DNA, 89 bp, Homo sapiens
gagcagctggcccggctgggcccggggcgcgcagctgcccgccggggcggggccatgaatattgtggttcccttcatgtttaaatatgc

SEQ ID NO: 168138 - DNA, 122 bp, Homo sapiens
gctgagggagcaagaggtgtcggaggtctcatctttgaactactgccggagcttctgccagggagcggacatggactacgactcgtaccagcactatttctacgactatgactgcggggagg

SEQ ID NO: 168139 - DNA, 80 bp, Homo sapiens
caggaggaagcaggagcagcccaagcgccttccctcacgttcgagaacttgtcttggacaattgcaaatcaaatgatgga

SEQ ID NO: 168140 - DNA, 82 bp, Homo sapiens
tgcaggcattaatgtccgaaagagcaacaagatatggatttggatatagaatttgatgtacaccttggaatagctcataccc

SEQ ID NO: 168141 - DNA, 90 bp, Homo sapiens
attctgatgggaacttgtgtgttaaagtaacagatgatttagttggattcttcagcaagcgcctgaaaggctccatcaagaggaccaaaa

SEQ ID NO: 168142 - DNA, 75 bp, Homo sapiens
gggttctggactttgggcgtcccattgccatgagaatgttggaccgacgacacaagacctcagacttgtgttatt

SEQ ID NO: 168143 - DNA, 100 bp, Homo sapiens
atcactttgcattggtgtctgtgcatttgaaggagcaaacacctctaccagtttttataaactggtttatacagcgggaagatcagcttctatataccac

SEQ ID NO: 168144 - DNA, 100 bp, Homo sapiens
gtcctccccaccccacctgccaccgaggccccctcttcgcctcctccagatctgttacctaaagcaataaaaaatggccagaggatcagtgtccgatgag

SEQ ID NO: 168145 - DNA, 100 bp, Homo sapiens
aggatgaagattcaccaaataagctatatactttggttacctatgtacctgttaccactttcaaaaatacctgggagagaggatttttcatgttaccaac

SEQ ID NO: 168146 - DNA, 82 bp, Homo sapiens
tagttttgtacccatcagcgcaggagaaggtgctccagagatcttctgttcttcagttgatattcactgatggactccaaag

SEQ ID NO: 168147 - DNA, 100 bp, Homo sapiens
ggggaagacaccctgttctcggaacccaagtttgcacaggtctatgtacagacatggagcactcagaatctttctatgaccattacacgagatgagtatc

SEQ ID NO: 168148 - DNA, 100 bp, Homo sapiens
ctgctaaaggagagaagtttgtcatgcaggaggagttctctccccagaagaccatgtctgtgttgagctgtatctgtgaagccaggcaagagaatgaggc

SEQ ID NO: 168149 - DNA, 100 bp, Homo sapiens
cccggggtgtgtcgggggtactcggccggaggcggccggtgagtgaggcttacagggccccgggaccaaggcatttcagaagatggacacaaagaagaag

SEQ ID NO: 168150 - DNA, 100 bp, Homo sapiens
gacgcgggcgagcggggctttggacgccggtggagacgcaggcgagaaacaagtcaccaagctctccagaacatgcccaaagtgctccgtgatgttgaag

SEQ ID NO: 168151 - DNA, 100 bp, Homo sapiens
cctgcagccgcccgaagagccaagagtcagtattccggccagcttcacgaagtcagagaggtccactcagctgttgaagaaatggatggattagatgatg

SEQ ID NO: 168152 - DNA, 100 bp, Homo sapiens
cggtggccccgacatgattccttacttctccgccaacgcggtcatctcgcagaacgccatcaaccagcttagccatcctaatggatatgggttggttcct

SEQ ID NO: 168153 - DNA, 98 bp, Homo sapiens
tacaccagctgcgaggacgtggagctggagagcgagagcgtcagcgagaaaggtcctcttcctgatggatgggaacaagccatgactcaggatggaga

SEQ ID NO: 168154 - DNA, 75 bp, Homo sapiens
caaatttattgtaccttatgatgtgtgggccagcaactacgtagatgcccattacgcagtccaggcaagaagatc

SEQ ID NO: 168155 - DNA, 99 bp, Homo sapiens
gttgctgccgactcacaggaggagctgcaggactgggtgaaaaagatccgtgaagtggcccagacagcagacgccaggactgcccccaggtccagtgcg

SEQ ID NO: 168156 - DNA, 100 bp, Homo sapiens
cgcagacaccatgaaggtgctgggagtgcagcggcctctcctacagctttcggaaaatgtgattgatcgaatgaaggaatcctctccatctggttcgaag

SEQ ID NO: 168157 - DNA, 100 bp, Homo sapiens
aaatatatagatcagaaatttgtattacaggttgctgcttttgctcagaggacatccatgaccctaatggtctttttgttcaagataaagtgattttttg

SEQ ID NO: 168158 - DNA, 101 bp, Homo sapiens
gagaaaaactggacccaattcctgacagcttcattctgcaaccaccagtcttccacccggtggggaacgccaagcacaacgtgcatgtcatgaacatctcc

SEQ ID NO: 168159 - DNA, 98 bp, Homo sapiens
ctcggctggacaagcaaggcaaagtgaatgcctggacctctggccacaatgaccagtcacaatggttacagtaaaccaagaggagttcattgctatta

SEQ ID NO: 168160 - DNA, 98 bp, Homo sapiens
tcatcaagacctgggattttggtggaggaccccgttctggagcgttatttcaaaggccacaaagctgcgatcacctccttggacctcagccccaacgg

SEQ ID NO: 168161 - DNA, 95 bp, Homo sapiens
ggcgtcaacgccgtatccagcgactacgcggccgcggagacctacctgcggcgtcggcagctgctgctccgagggtgcgagatttactcagacgc

SEQ ID NO: 168162 - DNA, 90 bp, Homo sapiens
ctggacaccctgtcgcagcttctgaaggtggttcagtacatcggggagatctgccgctacctgctgaagcagccggtgcgcgaggcggag

SEQ ID NO: 168163 - DNA, 100 bp, Homo sapiens
ggcttcggccaagctaaccacgctggtggatgccgacgccgaggccttcaccgcctacctgagcgcatcagcgaggaggtggggctgctgcagctccttg

SEQ ID NO: 168164 - DNA, 46 bp, Homo sapiens
tacaagctttcaaagtcaatctgcagaaccttggcctgaaaatgct

SEQ ID NO: 168165 - DNA, 51 bp, Homo sapiens
ggcgcgccgtgcactggagacaccctcgtggagctggccctgctacagcgc

SEQ ID NO: 168166 - DNA, 75 bp, Homo sapiens
gtttagaaagctcagtcgctttggaaacgctttcctgaatcgggaggttcccctgaaggatgctaaggaatacgc

SEQ ID NO: 168167 - DNA, 98 bp, Homo sapiens
agaatcaccagcactggctgaaggagtgtcatgggccggcagacatgcctggagtgcagcttcgagatcccagacttccctaatcatttccctactta

SEQ ID NO: 168168 - DNA, 75 bp, Homo sapiens
cagcgccttcatcctggggctgcgatgccacccacacagaatatgcctatgggtcctggagggatgaatcagagc

SEQ ID NO: 168169 - DNA, 100 bp, Homo sapiens
tgacgtcctcctgcactgggctcctgtagaggaggctggagattccacccaaatcctcttctccaagaagcccgagggcaacatccttcgagaccggttc

SEQ ID NO: 168170 - DNA, 80 bp, Homo sapiens
cccatgtctacatgagaaagcagagccaggtgtacggagagctgtgagccgtgagctttgaggcggtgggatgtgtcagc

SEQ ID NO: 168171 - DNA, 100 bp, Homo sapiens
cgaaaattggatgtgaaaatgaagccagaccgagtattggtaaaggttttcaaggtgtcatgaaaagatggggatttaaaggccagcctgctacgcatgg

SEQ ID NO: 168172 - DNA, 103 bp, Homo sapiens
ttttgagtcccagagagccattctatgtcaaacattccaagtactctttgagtgctctacggaaacgtattcgagaggacagaaaggccaccacagctcagaa

SEQ ID NO: 168173 - DNA, 83 bp, Homo sapiens
cgacagcctcaaacaggagctggagcagctcaaagaggtgatgaagatgatcatgaccctgaacgttcaggaaagaggccggg

SEQ ID NO: 168174 - DNA, 74 bp, Homo sapiens
gaggaagcgggagtggaccatcgggcggagacgagggcaagttaaagtcttcagagccctgtatacgtttgaac

SEQ ID NO: 168175 - DNA, 90 bp, Homo sapiens
ggcgggagcgcggttcggggccgcagaggtgctggagaatctggtaaaagcaccattgtgaagcagatgaggatcctgcatgttaatggg

SEQ ID NO: 168176 - DNA, 83 bp, Homo sapiens
agcgagcggcggcgacttgccagtaaggtgtggacactgccagcggctgcagccgacttggaatgacctgggagacaaataca

SEQ ID NO: 168177 - DNA, 83 bp, Homo sapiens
atggaaagttccagccggttcgagagctagatgagcagcaccagcagtaagagggctccgaccacggcaacccagaggctgaa

SEQ ID NO: 168178 - DNA, 75 bp, Homo sapiens
aaaaggcaaagtgtgttttgagatgaaggaagcacaagcctatgcagacgacaacagtttgctgttcatggagac

SEQ ID NO: 168179 - DNA, 95 bp, Homo sapiens
gccgtggccgcgtcccactcctcaggccggggcgcacgtcggctcccacgcttagccagctcccgtggtcccagtgtgtgaccaaccacacgctg

SEQ ID NO: 168180 - DNA, 100 bp, Homo sapiens
aaaaccagcatcgagatgtagttcctgagcatgaggctcccagcagtgaggttccatcaggcttgttcatccccagcatggccattggagcgatcgcagg

SEQ ID NO: 168181 - DNA, 101 bp, Homo sapiens
tgcttgcccggcccccgcctgcctccgccggctacagcgggaagagcgcatcaagatggtgctcatgtggaccagtggtgacgccttcaagacggcctact

SEQ ID NO: 168182 - DNA, 100 bp, Homo sapiens
cagcttcaagcttaggaccacccaccatgcctatccagagacagaagagatgggtgatgaagaagttttctcctggttgaagtgtgcaaagggacagtcc

SEQ ID NO: 168183 - DNA, 73 bp, Homo sapiens
aaattaccggaaaggactgttcttgaggtattcagctggaggagctcacagaggctgaggatgctctttctga

SEQ ID NO: 168184 - DNA, 50 bp, Homo sapiens
agtgggaggtgctgagccgctcagggacagcaatcagacctattgctttg

SEQ ID NO: 168185 - DNA, 100 bp, Homo sapiens
gagagaagcaataattattattaacatttattaacgatcaataaacttgatcgcattatggccagcactattaaggtaaacagaatctggtgattatggg

SEQ ID NO: 168186 - DNA, 97 bp, Homo sapiens
cgcaaggccaaacccccaacccgcaaacctcatcatccacccacttctagatgagccggtgttaatctttatgtgaaaaatcttgatgatggtattg

SEQ ID NO: 168187 - DNA, 82 bp, Homo sapiens
ttcggggggccaccgaatcgctgtcacgccggcaggtcgcaatggaagaagagatcgccgcgctggtcattgacaatggctc

SEQ ID NO: 168188 - DNA, 75 bp, Homo sapiens
cgtttccccaaattcaacttctccaagtcccgcagcccccggaagccaatagactccctcagggactctcggtcc

SEQ ID NO: 168189 - DNA, 90 bp, Homo sapiens
ccaagcaaaacttcagatgcacacaacattctgaaattttttggttattgtaatgatgttgatcgggagttgagaaaatgcctgaagaat

SEQ ID NO: 168190 - DNA, 96 bp, Homo sapiens
ccagagactgctgagcccgtccgtccgccgccaccacccactccggacacaggggggtcctgtggagatccttcccttcctctacctcggcagtgc

SEQ ID NO: 168191 - DNA, 101 bp, Homo sapiens
accccgaaaacggaagcgcagggagaaggaagaggtgtttgaaaagaaatggtggagtcaatgaagaaagtagcagggatggatgtggagctgacagttga

SEQ ID NO: 168192 - DNA, 87 bp, Homo sapiens
cctgcctttccttccccctcggaaaatggttcccactgccgggcgaggaaacctcgacctgtctcccagttggttgcacagcaggtt

SEQ ID NO: 168193 - DNA, 88 bp, Homo sapiens
cgatttcttcaatgattaccaccttcaaaatggagatgttgttgggcagcattcatttcctggcagatctgcttggctttgaggaaga

SEQ ID NO: 168194 - DNA, 100 bp, Homo sapiens
tgccacatcccacctgtggaaagtgagaagatggcatcaggcagggcacgctgcacccgaaaactccggaactgggtggtggagcaagtggagagtgggc

SEQ ID NO: 168195 - DNA, 115 bp, Homo sapiens
tgacctggcgggagtggagacctgcaagtcattagagtcacaggggccctgtgtctggaggctgcatgaatcccgcccgtgcttttggacctgcggtggtggccaaccactggaa

SEQ ID NO: 168196 - DNA, 130 bp, Homo sapiens
accattctggataatgttaagaacctcttagaatttgcagaaacactccaatttatagattctgagctgcgggcgtctttggagacacagcgtgctcagagcagtcgactctgcgtggcactgaaacacg

SEQ ID NO: 168197 - DNA, 75 bp, Homo sapiens
agcataggcggaccatgataatttccccagagcgtcttgatccttttgcagatgataactggtggtctcaggtat

SEQ ID NO: 168198 - DNA, 96 bp, Homo sapiens
cagcatcgcaaacttcaccaacgtggctgccacgttcaaggccctccacgcccttcaggaggagcaggccagactcaagatgaggctgtgggacct

SEQ ID NO: 168199 - DNA, 100 bp, Homo sapiens
agtttcggtcatctaaaggaggttttaaacagtataacagtatccctctgaagaagatatgatcgaatgggccaagagggaaagtgagagagaggaagag

SEQ ID NO: 168200 - DNA, 74 bp, Homo sapiens
agtgagaccaagtctggggtggcaccccaaaagatggcagtttgtgaaagagacagacaatgaagtaagaatgc

SEQ ID NO: 168201 - DNA, 90 bp, Homo sapiens
gttctcagcctcacctgacccggtccttcagtggactgagaggggctgccgacagcaaacggggattcagcgtccgatcctttggaacag

SEQ ID NO: 168202 - DNA, 82 bp, Homo sapiens
ctgacaacacaatggtgacccacgcttgggcactgtttaaaggaaagttccgagaaggcatcgacaagccggaccctcccac

SEQ ID NO: 168203 - DNA, 50 bp, Homo sapiens
tgagctgctccaggacttgggtgttctaagaacggaagcatctgggctgg

SEQ ID NO: 168204 - DNA, 100 bp, Homo sapiens
tgtagaggaaaagaaggatggatacacacagtctgcataaatggaagatgggatccagaagtgaactgctcaacaatgttctgtgattttccaaaaataa

SEQ ID NO: 168205 - DNA, 96 bp, Homo sapiens
gggttcctggtcatacaccagtactaccaaggacagcttttttcctgcaagcacttttcaggattagaagaggctgtgtatagaaacatacaagct

SEQ ID NO: 168206 - DNA, 82 bp, Homo sapiens
cgctgctggacgaagagctctcctccttcttcctcaactatctcgctgacacgcagcaaattgtggctactaatttgccccc

SEQ ID NO: 168207 - DNA, 98 bp, Homo sapiens
tggaaatgaacttcacaagttcctcatctgggacactgctggtcaggaacgggagagcgaagaggaactttactcctcctgtcgccagctgaggaggc

SEQ ID NO: 168208 - DNA, 90 bp, Homo sapiens
gaaccgcaaatagtcatctctctaatcttgttcttcacggtgatattccacaagacaaatttacatgtattggagaccagaccagaagcc

SEQ ID NO: 168209 - DNA, 100 bp, Homo sapiens
ggcagcccaatgtctcctgcacgtgcaactgcaaacgctctttgttccagagcatggagatcaacaccattcgcttttcacccaagatgatttgatgtct

SEQ ID NO: 168210 - DNA, 74 bp, Homo sapiens
tgatgcctgctagccaaaagggaatccggtcagtgagtttctacgagcacatcatcactgtgggaacagggcag

SEQ ID NO: 168211 - DNA, 100 bp, Homo sapiens
gagctgtgtaggcaagatgagaaattgcgaacttgttcggccaaaggaattacatgaacgacagccttcgcaccgacgtcttcgtgcggttccagccaga

SEQ ID NO: 168212 - DNA, 83 bp, Homo sapiens
tacaagtgcactgtgtgtggccagtcatttaccaccaatgggaacatgcacaggttttaaaatcaaagatgggaaaatcggag

SEQ ID NO: 168213 - DNA, 96 bp, Homo sapiens
aacaatgacaaaagacaatttctgctggagcgactgctggatgcagtgaaacagaccgtagctttatgggatctgcgtaacttaaaattaaaactc

SEQ ID NO: 168214 - DNA, 86 bp, Homo sapiens
tgtcttcggtggactccttcggcagtccacccaccgccgccgcctcccaggcgagaaccactgtctctgatcaacgtgcggaagag

SEQ ID NO: 168215 - DNA, 75 bp, Homo sapiens
tttttctcatggatgttcttcttcgagtatttgtagaaggggctcacccacctcattggatctcctttcctccgg

SEQ ID NO: 168216 - DNA, 80 bp, Homo sapiens
acaggaagatgctgagaaactgcggaaagaattgcatgaagagcccccctccatgcgcctgaaggcccgacccagcagcc

SEQ ID NO: 168217 - DNA, 90 bp, Homo sapiens
cagcacctcctcgccagcagccgtccggagccagccaacgagcgcaaaaattggatgcagagtttcagaaaagactggaaaagaataaaa

SEQ ID NO: 168218 - DNA, 75 bp, Homo sapiens
gaacatccagtttgatgtttactacaagtctccttatatacatttgacaaagccaaacagtgtattggcacaatg

SEQ ID NO: 168219 - DNA, 82 bp, Homo sapiens
tctccaaggaggaagatggtccaggctgggagcatccccttagcagcagcctctgttctggagagtcttggcttctgggagg

SEQ ID NO: 168220 - DNA, 98 bp, Homo sapiens
ctcgaagtgcgcaaacttgacactcaccctgaccggaatcacatgcagcccaactacagattcttatggaattcctcaaggttgcaagaagaaataag

SEQ ID NO: 168221 - DNA, 100 bp, Homo sapiens
gtgaactatagagtttgtggacagatttatattgtgtactaatggtcacttgatgtgcgctggctgttttatccacctactagcagatgcccggctgaag

SEQ ID NO: 168222 - DNA, 111 bp, Homo sapiens
cgccccgcagccccccaacatcctgctcctgctcatggacgacgtctcctctgagcctccggcctccataagacccaaaacagatgacacctcttcccagtcccccgcgcc

SEQ ID NO: 168223 - DNA, 100 bp, Homo sapiens
aggacatcattgatggatttgccatgaccagctttgtcacttttgaagcgctggagggtcgtcatgtcaaaacgggccagcttgcagccatcaaggttat

SEQ ID NO: 168224 - DNA, 100 bp, Homo sapiens
cgctgctacctgcagcgccgtgtggcacgacacaaaaatcaggttgcctgcggacacgctgggcctctgtcctgatgctgctgagctccctggtgtctct

SEQ ID NO: 168225 - DNA, 83 bp, Homo sapiens
ggcgtgggcaagtcggcgctcaccatccagttcatccaggatggtgctgctccactggtgcctgctgtggctcctgtttccac

SEQ ID NO: 168226 - DNA, 74 bp, Homo sapiens
taaggattccaagtaactcttatttggaatgaatctgaagtctgctgcagtaaaacacagaaggctttaaaatg

SEQ ID NO: 168227 - DNA, 82 bp, Homo sapiens
cagagaccttgagggatatctttcttcactcctcttcacttcttcagcatcaagcatgatggaaccatgtgtgatacctgcc

SEQ ID NO: 168228 - DNA, 98 bp, Homo sapiens
tcgggagctcatcttcgtggggcgtgaggagtgtgagctcatgctacagaacgtgctggccaaagcgctctatgacaatgtggccgagtccccggatg

SEQ ID NO: 168229 - DNA, 74 bp, Homo sapiens
gccctgcgcttcgtgcaccggggcggtccgttgccaaagccagtgtatgtggtagaagaccaaagaagagatga

SEQ ID NO: 168230 - DNA, 83 bp, Homo sapiens
caggtgcccccggcctgcgctcccatccacacgctcgaccatgccagagtaatctcagctttctttagttactggatcacaca

SEQ ID NO: 168231 - DNA, 100 bp, Homo sapiens
ctgttctccaggctgaagtatatggggcgagactagctgccaagtacttggataaggaactggcaggaagtatgagcaagctgccgatgcagaactagct

SEQ ID NO: 168232 - DNA, 83 bp, Homo sapiens
ggaggatcgtcaggctctaaacaaaattctgtgtaaacaggaacatcgataagtagtgtaaaaacttgcacaatgaaatccga

SEQ ID NO: 168233 - DNA, 100 bp, Homo sapiens
cagacccggaggaccgaagcttccggacgacgaggaaccgcccaacatggcctcggagactctggtggagcaacgttcaggtggttcaggaaagggcagc

SEQ ID NO: 168234 - DNA, 100 bp, Homo sapiens
catgctctccatcctgctcttcttccacaggatttttttcccaggaagccatcccgtcagaggggttcaagtgatgaaagttggcaaactgcagctacat

SEQ ID NO: 168235 - DNA, 100 bp, Homo sapiens
gagagcaagtctgctcatgtgcagactcagactggccaaaattcaatccctgctttagctcaggggagattagtaatttttaggtattaaagatacactc

SEQ ID NO: 168236 - DNA, 75 bp, Homo sapiens
aagtctttcattggcacaccatattgggtggtgttggtatccaactatacacaaaccttgaacattttacaagaa

SEQ ID NO: 168237 - DNA, 100 bp, Homo sapiens
ctcagcggcgccttgcggagggaccccaggaagctgcccgggagtgtcgcaggaagaagaaagaatatgtcaaatgtcttgaaaatcgtgtggctgtgct

SEQ ID NO: 168238 - DNA, 87 bp, Homo sapiens
cgattccaaggagggcaaagcgtcctgcgatgccgacaaaaggatcaaggtggcgaagcccgtggtggagatggatggtgatgagat

SEQ ID NO: 168239 - DNA, 51 bp, Homo sapiens
actgacaaaaatgacccccatgtttctaccatgaatgaaatgaagagttat

SEQ ID NO: 168240 - DNA, 75 bp, Homo sapiens
cagaaagcgggcgagcagcagttgagcgagcccgaggacatggagatggaagatgacgtccggttgtttgccttc

SEQ ID NO: 168241 - DNA, 50 bp, Homo sapiens
aaggagcccctcatccccatccaggcacaggtaacagcatcatggtcatg

SEQ ID NO: 168242 - DNA, 75 bp, Homo sapiens
gggtgaaaaatatatccgcagggttcggatgagaccaggtcacagatgtgacattgatgtgtccactgaagccat

SEQ ID NO: 168243 - DNA, 51 bp, Homo sapiens
atgcaatagcccttcagtactgttgtacgattctgtttctggcgtctgcat

SEQ ID NO: 168244 - DNA, 74 bp, Homo sapiens
gatttgattgtgcaggacggacaggaggcacccagcacttgcacctcctgcgccgccgccccccatccaaggat

SEQ ID NO: 168245 - DNA, 90 bp, Homo sapiens
aatctggacaggcactgcttgctgctggtcactatgcctcagatgaagtgagggagaaggagccatattgtctgaagaagagcttgccgc

SEQ ID NO: 168246 - DNA, 50 bp, Homo sapiens
gttgtcctgtgctggggctgacagatggaattactctgatcaccaaagag

SEQ ID NO: 168247 - DNA, 105 bp, Homo sapiens
acccatcctgccgtccttctccactttcgccagcccgtgccgcgagcgcggcctgcaggagatgggggctccggaggtggcgcccaggctctgagctaccctagg

SEQ ID NO: 168248 - DNA, 87 bp, Homo sapiens
cccaatggacagcatgcctcaccaagtcacatgacaagcagcctcggcaagacgcgcaggaagaccagcgcgcgggatgcgtccccc

SEQ ID NO: 168249 - DNA, 75 bp, Homo sapiens
tccatcctgatgcttctggtagaataatacatgttggtccaaatcaagtcaagtatgggcactaggaaaagactt

SEQ ID NO: 168250 - DNA, 89 bp, Homo sapiens
ttggcttaataaagcttgatttgaaaacaaaatctgagaatggattggaaagtgactattttaccccacagggagaattccgtgtagac

SEQ ID NO: 168251 - DNA, 101 bp, Homo sapiens
gtcgggctctggaggaaaagaaagcggaagatggacagcatatgttcctgcaccctgtgaatgtgcgctgcctcgtgcgggagtacggcagcctggagagg

SEQ ID NO: 168252 - DNA, 73 bp, Homo sapiens
cggttttcgtacgggcggccgtgcgcgaggcgagttccagggtctccctccactgctgtagtaacccgggtcc

SEQ ID NO: 168253 - DNA, 73 bp, Homo sapiens
tgaacaaaaaagtggtgcagtttttgatgaaattgtagagaactgattctcaaagttggattggtggaaacaa

SEQ ID NO: 168254 - DNA, 100 bp, Homo sapiens
ttccctgtgttctgcttttttcattgttccactggacgctcatcagagggaagatctttttcctcaattgtgtcgagttatagcagtgctggattgggag

SEQ ID NO: 168255 - DNA, 103 bp, Homo sapiens
ctcgccagcagccgtccggagccagccaacgagcggtgctggagaatctggtaaaagcaccattgtgaagcagatgaggatcctgcatgttaatgggtttaat

SEQ ID NO: 168256 - DNA, 75 bp, Homo sapiens
tgacgacatcaaccaggaattcaaggcaccatcatgactccaagcggaggagatccgatgaatttaggcctcaaa

SEQ ID NO: 168257 - DNA, 100 bp, Homo sapiens
caccgtcctgctcttccagttcgggatggtgacagagctgaatgaacctctctccaatgaagatcgaaatctcctctctgtggcctacaagaatgtggtt

SEQ ID NO: 168258 - DNA, 101 bp, Homo sapiens
cccagttccaaagtgtcttaaaggaaggaaaggaggtgagctggcctcagctgtccacgcctacacaaaaacaggagacccgtacatgcggtctctggtgc

SEQ ID NO: 168259 - DNA, 100 bp, Homo sapiens
gccttggaacgccgacctgaaaccatctctgagcccaagacctagtcctcagaatggttggaatgaccctccagctttgaacagagtacccaaaaagaag

SEQ ID NO: 168260 - DNA, 98 bp, Homo sapiens
ggcgagaggccttacaagtgcactgtgtgtggccagtcatttaccaccaatgggaacatgcacagagtcgacttcaatgttcctatgaagaacaacca

SEQ ID NO: 168261 - DNA, 100 bp, Homo sapiens
ggacggacaagcacagtcttcggaagcttttctgaagctcagcagcagctatgcaacaccagacaggaagtgaatgaattaaggaagctgctggaagaag

SEQ ID NO: 168262 - DNA, 51 bp, Homo sapiens
cgggtccaggtggcagaacatcctaggcatagaatgtcaagctaaccaggc

SEQ ID NO: 168263 - DNA, 100 bp, Homo sapiens
ctcccaaagtgcttggattacagggtgtgcagatgcctaatttagatcttaaagaaaaagtggagcctgaggttctcagcactgatacccaaacttcccc

SEQ ID NO: 168264 - DNA, 102 bp, Homo sapiens
cggcgcgggctgcagacggctgcgaggcgctgggcacagtgggtgaatttgtaagtgatgtcctgctagttccagaaaagtgccagtttttccacaaagagc

SEQ ID NO: 168265 - DNA, 82 bp, Homo sapiens
actgaaatcactgcaccttaaaaacaaaagattgagctgcactgtattccttataaggatgcatttatgaaagcaaatcctg

SEQ ID NO: 168266 - DNA, 96 bp, Homo sapiens
gtcgaatataatgtcctatactttgcacaatcagagaatatagctgctcatgagaattgtttgcattcctctgaatattgatttgctgaatagccc

SEQ ID NO: 168267 - DNA, 100 bp, Homo sapiens
gcgcactgtggcccacagcccaacagcgctgatatctggaggtgagcgtgtaggagccttcactatggtctgcaaagatgcggatgaagccaaaagggta

SEQ ID NO: 168268 - DNA, 50 bp, Homo sapiens
ctgatccgtggacttctgtatgatcagggttgctcctggacgccaccaac

SEQ ID NO: 168269 - DNA, 99 bp, Homo sapiens
ggcgtattccacatagcaaacagtatatgaaaatgatgatcagctcctgtgggaccctgagtacttaccagaagataaagtgattatatttcttaaaga

SEQ ID NO: 168270 - DNA, 75 bp, Homo sapiens
gctgtggaagaacgtccgggagaggcggctggcagaaatgaaagctcattagcatctacactgaagacgctcctg

SEQ ID NO: 168271 - DNA, 75 bp, Homo sapiens
tgcggagtgagctactaggcacggccaaccccttcaaggagcgaatctgcagggtcttctccacatccccagcca

SEQ ID NO: 168272 - DNA, 98 bp, Homo sapiens
aagatgctgtaaatgatgatgattttgagccatacttaagtagccagacaaatcaggttgccaatttggcctgttccatctccaacaatgaagaaggg

SEQ ID NO: 168273 - DNA, 100 bp, Homo sapiens
cttgcatgaaactggaggagcaatggtgtatgatgaataatacggcagctagtccaatgtctactgcaacttcaagtagtggaaggagtacagggaagtc

SEQ ID NO: 168274 - DNA, 75 bp, Homo sapiens
ctgaggtgaaccttcgaccttggacttctcagcctccagaatggtcctcagaatggttggaatgaccctccagct

SEQ ID NO: 168275 - DNA, 74 bp, Homo sapiens
gagaggacagaagtgtgtagaatttagcagtgtagacaatattgtccagggccatcactgtgcatgtccccatg

SEQ ID NO: 168276 - DNA, 100 bp, Homo sapiens
agtgaattttccccccaaactgcaataagccgccttccaagaaagaagatgctgatatgctacaacacggatgaacctggaggacgtggtgcagtgaaat

SEQ ID NO: 168277 - DNA, 100 bp, Homo sapiens
ggccgggagctgtacttctatatctacaagggggtccgcaaggttccccctactgagacagttcctcaggtcaaaaaagaaaaacatagcacacaagcta

SEQ ID NO: 168278 - DNA, 97 bp, Homo sapiens
ctactgcgacgccaaatacgtctgggcagccacggccgggggcgtctttcagagcattacgaagaagctgtgaataaggtgaaaattcaggccatgt

SEQ ID NO: 168279 - DNA, 101 bp, Homo sapiens
ccctgacttcctggacatcaccaaccccaaagccgtgctattcaagatctctggcagtggaggaagtctctttaagaaaatagtttaaacaatttgttaaa

SEQ ID NO: 168280 - DNA, 82 bp, Homo sapiens
atagcgcggctgtgcaagtacctgccagagaacgacctgaaggtttttagaacttcagccataaaaatgggcagaattttcc

SEQ ID NO: 168281 - DNA, 100 bp, Homo sapiens
gaagcaacatgagatggtggatgaacccacaggaaagcagatggtggagctgaatatgccacttaccagactaaatcaaccactccagcagagcagagag

SEQ ID NO: 168282 - DNA, 87 bp, Homo sapiens
ggggaggaagaatgccggtcacagcccaggagctcaatctgaaattgaagtgtctgtctctgcaaggaatatcagaaggctactaag

SEQ ID NO: 168283 - DNA, 73 bp, Homo sapiens
tggaaatacagaaccacagtttatcatcccttcctgcataaacttggaggaggcagtggagagagcatcctgg

SEQ ID NO: 168284 - DNA, 74 bp, Homo sapiens
ggtaatgatgagactattggatttgaggatattcttaatggctgtggaaaatctctgttctcacaaagtctccc

SEQ ID NO: 168285 - DNA, 96 bp, Homo sapiens
agagcaagcagggaaagagagcgccaggtgcttagcagtaaagatgacggcgccttgaggtaagctacaggcaacaccacttccgcgtttctcttg

SEQ ID NO: 168286 - DNA, 127 bp, Homo sapiens
tagaccagaagcaaagactatgcccaattcttcaactcctaccagccagatcaacacaattgatacactgccagtgaaagatgtagaagataaacctgaacaacaaaccagaacaagagagactgac

SEQ ID NO: 168287 - DNA, 126 bp, Homo sapiens
tttagtggaggactacagagccggtgatatgatctgtcctgaatgtggcttggttgtagaaagacagcacactggatgctgctgaagaaatcatcaaggcatggagtgtacagaagtcttgatttg

SEQ ID NO: 168288 - DNA, 100 bp, Homo sapiens
gccatcacagacaccgcctacaggagtatgatgcaaggaacaggaaatatagtggtcattatgattagctatccaaaaggaagagaaattttggagctgg

SEQ ID NO: 168289 - DNA, 100 bp, Homo sapiens
aattacgtcaggcgtcagatccgcgcacgactagagggcgggaaagatttgagctacgcctgcgcagagagatcctgaattaatttacttttgagtattg

SEQ ID NO: 168290 - DNA, 74 bp, Homo sapiens
gagcgttgcatcaccatcaagtcaaccgtctgaccaaacacaccaagttcgtgcgggacatgattcgggaggtg

SEQ ID NO: 168291 - DNA, 50 bp, Homo sapiens
ggccaagaggcagacctaggaaatggctccagggtttgagccacaatgtg

SEQ ID NO: 168292 - DNA, 100 bp, Homo sapiens
tgagaaaacatggtcaacgtcttgaaaggagtgcttatagaatgctggcctgctgctgtgggtctgcaggctgctctctctgctgtgattgctgccccag

SEQ ID NO: 168293 - DNA, 96 bp, Homo sapiens
cgagtcctcgggctgaaggcacactgtgaaaacttcaacctgctgctcccgatgaactgcctctcctcctccctgcctggggagcccagtggccag

SEQ ID NO: 168294 - DNA, 100 bp, Homo sapiens
tgggagtaacaacacccgttttggcattgctgctaagtacatgctggattgtagaacttctctctctggtgaaaatcctatttataagagtgccgtaaca

SEQ ID NO: 168295 - DNA, 74 bp, Homo sapiens
tcacttttacctgtttggattaatatgtctctgttcagagaatggaggtgttgtccaagttggagaattgttac

SEQ ID NO: 168296 - DNA, 51 bp, Homo sapiens
agcttcctcctcactgtctgtgtccagctcctgaaggtattgattctgatg

SEQ ID NO: 168297 - DNA, 101 bp, Homo sapiens
gcctgtagaagcagacattttagcagtggtggctattgatgtggacatggccttttttgaacctaaaatgagggaaatccttgagcaaaactgcacaggag

SEQ ID NO: 168298 - DNA, 134 bp, Homo sapiens
gctaatgccagatgacttcaaagcctacagcaagatcaaggtggacaatcatctcttcaataaagcacctgttccttcaggccttctggcagaccatgaatcgcgagtggacgggcattgacaggctgcgcctg

SEQ ID NO: 168299 - DNA, 75 bp, Homo sapiens
gagatttctgaaattattgatgggctctctgagcaggagtgaataccagggcctggtgaagcacacaggaggctg

SEQ ID NO: 168300 - DNA, 83 bp, Homo sapiens
ctcgtgactgcccacatatagtgtcagttgtacccgaggcgttctcagcagcagcaagtacctgtggtggatttccaggctga

SEQ ID NO: 168301 - DNA, 100 bp, Homo sapiens
ttttatgataactaagctgcagggaaataaatcggctggccctactgcaatctactgcactcgagatttctcactatgtgcaatagacactttggcagtg

SEQ ID NO: 168302 - DNA, 100 bp, Homo sapiens
ctggaaccgttgattggagatatgcccttagttggagctttgtctatcttcttccttaggaaaccagtaaagtgaatgccgaagacagaagatttggatg

SEQ ID NO: 168303 - DNA, 100 bp, Homo sapiens
cggatgccctgcagtacctgcagaaggtctctggagacatcttcagcaggagacgcaggtgcccgcgctgctggaggccggcttccggagggagaacatc

SEQ ID NO: 168304 - DNA, 82 bp, Homo sapiens
tccatacaaatgttgccactgctgttttagaacatataaaggctgcatctcggggaattttagatgttcaatctgtgcaaga

SEQ ID NO: 168305 - DNA, 122 bp, Homo sapiens
gaaattccacttacttggatgaccatggaccacctcctagtaaggacggttcactgggaaacatcgatgacctggcgcagcagtatgcagattattacaacacctgtttctccgacgtgtgc

SEQ ID NO: 168306 - DNA, 100 bp, Homo sapiens
tcccaaagcgctgggattacagaagatgcctctaatggaggagtttctgagcagcacccctggcccagtggctttgaaagggagctcaaaccagagacta

SEQ ID NO: 168307 - DNA, 101 bp, Homo sapiens
ccgctgtgtggttgcaacggagataaattcccggaaccgcgattcggcgtgtcaggtaattcatttgcacacctgttagcaagaaacagaagttgaaggac

SEQ ID NO: 168308 - DNA, 90 bp, Homo sapiens
agatcaatgactcggtcacactcagatgtatggcttatttcaaacatcattttactttggatatatggcggtatttagcacagccttggg

SEQ ID NO: 168309 - DNA, 100 bp, Homo sapiens
gaagctggccaaagcctgcccagacggctcacctgtgcgggatggaacaaaagattgatctccgtgatgacccaaaaaccttggcccgtttgctgtatat

SEQ ID NO: 168310 - DNA, 100 bp, Homo sapiens
ccgggacctggaggggacgctggggccgaagcagcatgtgacaccgaccaggaatcagtgtctgtccctgaagggtcattaaatcagctatgttcttcag

SEQ ID NO: 168311 - DNA, 100 bp, Homo sapiens
gagccgccagggctctatcaaggggctggtgtactccagcaacttccaggtgacgatgcctggggagcctgtggacgtggcatgtggcgtggaccacatg

SEQ ID NO: 168312 - DNA, 50 bp, Homo sapiens
aagcagcagcggcagcacctaagggaagtgacacagccctagaggaggca

SEQ ID NO: 168313 - DNA, 83 bp, Homo sapiens
agataacaaaagctgctcagagtctcaatgaacttgcacttttgtgtaatggaaaatttcacaaacacttgcaagaaatcttt

SEQ ID NO: 168314 - DNA, 76 bp, Homo sapiens
caattggaggtgtccaggtacagattctgaaaaggagctgctaagacacatggttgcacagaaggtgaaaccaaat

SEQ ID NO: 168315 - DNA, 118 bp, Homo sapiens
ggccacaaagctgcgatcacctccttggacctcagccccaacggcaagcaacttggttgtttacattcagagctctatcaataagaggaatacatattacagtgaattcgacaaccgc

SEQ ID NO: 168316 - DNA, 100 bp, Homo sapiens
cttcctacacagcctgctgaagaagcagcacgaaagagagaggtccgtctaatgaagaacagagaggtgagagacttcagaggctgccctttcttttcat

SEQ ID NO: 168317 - DNA, 75 bp, Homo sapiens
tctcctgttaaaaattatactgaggaggagtgggctttgctggatatttcccagaggaaactctacaaggaagtg

SEQ ID NO: 168318 - DNA, 80 bp, Homo sapiens
cccgtccgtccgccgccaccacccactccggacacagatccagagacaatggccccgatgggatggagcccgaaggcgtc

SEQ ID NO: 168319 - DNA, 100 bp, Homo sapiens
ctgctcagaggactctatacagggacgtgatgctggagaattataggaacctggtctccctgggtacaggtttgcagattccgccagcagcacagcaagc

SEQ ID NO: 168320 - DNA, 100 bp, Homo sapiens
agaagagtgagagagagctattagagattgtgaagaagaatttcgatctccgccctggggtcattgtcaggagccaagccgccatggcctaccacagctt

SEQ ID NO: 168321 - DNA, 82 bp, Homo sapiens
gccggttcttggtgggatctgagcaggctgaccccgcactacatctacccaccagccatcgtgcagcccagcgtggtgatcc

SEQ ID NO: 168322 - DNA, 82 bp, Homo sapiens
gaggccaaaggcagttgtattggcacagaccccacaggctcctcggacactgggtccatcacctcctgccccatcatccact

SEQ ID NO: 168323 - DNA, 75 bp, Homo sapiens
ggctacagtccactccagcatgatatgaagagcattttaagaggtgcagcctctggaagtggatcaaactagaac

SEQ ID NO: 168324 - DNA, 100 bp, Homo sapiens
cccagtacctggaagtcaagtgcggtgctatgatccttaagctgaggaaagctgtgtgaagagacaaagggagaatgccatgtgaagatggaggatcgga

SEQ ID NO: 168325 - DNA, 99 bp, Homo sapiens
gtgtgagagtccgtaaggagcagcttccaggatcctgagatccggagcagccggggtcggagcgggcttgtgcagacataagagccagttcagtgtttt

SEQ ID NO: 168326 - DNA, 115 bp, Homo sapiens
agaagctccagatggcgtcttccgtgggcaacgtggccgacagcacagagaccttgtacacagacagacggctagtgcagtggtacagcacatgtcacttggggtttatggattt

SEQ ID NO: 168327 - DNA, 83 bp, Homo sapiens
gtagaaggccagagtcacacacggtcctaagagctgggcaccaggaagcgaaggctgcaaaatgatgcttcaacacccaggcc

SEQ ID NO: 168328 - DNA, 107 bp, Homo sapiens
tgcggggagcggagccatggcctccgacttgtgtatgcggatacctgcttcagtaccatcaagttaaaagcagaagatgcttctggtagagagcatttaatcactct

SEQ ID NO: 168329 - DNA, 100 bp, Homo sapiens
acgtcccgctggatctgacccgagggtaaccaggagccgacaacaactcctgacgcaatggttcagccttttactaccatcccatttccaccacctccgc

SEQ ID NO: 168330 - DNA, 75 bp, Homo sapiens
cccaggagaaattcgccctcaaacaattctgtggtgttcttggtcacacatttatggagtttctgaagggcagtg

SEQ ID NO: 168331 - DNA, 51 bp, Homo sapiens
tggggcagtatcaacggagtctccggggagtggttaatgtgttgctaacaa

SEQ ID NO: 168332 - DNA, 99 bp, Homo sapiens
caaccttctgtgagcctagggacccatttctcctcctttgacagggacatcagtggagccttctcagacccacaggaaccttccctgtatactgtcaaa

SEQ ID NO: 168333 - DNA, 90 bp, Homo sapiens
ctgagttctagaatgaagctgcagaccctcgcatcactcttgcaggactgatcctttgaaatactccagccatgactaaaagagaagcag

SEQ ID NO: 168334 - DNA, 51 bp, Homo sapiens
cgagaagaagaagaagtgttagaccaggcaaaatgatgcttcaacacccag

SEQ ID NO: 168335 - DNA, 75 bp, Homo sapiens
gagactaaggaaagagcctggaaaatggagcagacctggacgaggaaatagacagacggttggaaaaaaaactga

SEQ ID NO: 168336 - DNA, 74 bp, Homo sapiens
gtgaccaccctccagctacccccggttgcagattttaaagatgcccttgccagagtatatggagtgatacccaa

SEQ ID NO: 168337 - DNA, 80 bp, Homo sapiens
cacgtcagaaatggaagcaggaagtcctggtattggtggcatggatggaacacaacagcagatttttaaaatgttagcag

SEQ ID NO: 168338 - DNA, 74 bp, Homo sapiens
gggtcccgaagccccctgcaggaactctacaacccaatccagataatgctcggaatatttttcaatgtccattc

SEQ ID NO: 168339 - DNA, 75 bp, Homo sapiens
taagaagcacctggatgagacatttgctacagcatcccacattaagtcaacggagaggcacatgatcatgcacaa

SEQ ID NO: 168340 - DNA, 96 bp, Homo sapiens
gatttaaacaagagatttccacagaaggttatgaagacagtatggagtttccagaccatagtagacatttgctacagtgtctgagcgagcagagac

SEQ ID NO: 168341 - DNA, 82 bp, Homo sapiens
tttggattgaagccgcctctgtattacttaccaggcttgggcactgtttaaaggaaagttccgagaaggcatcgacaagccg

SEQ ID NO: 168342 - DNA, 75 bp, Homo sapiens
tgttcatctacttcaggaatcagaaaggtctcctggaacacggccgcaactggtcggccatcgcccggatggtgg

SEQ ID NO: 168343 - DNA, 100 bp, Homo sapiens
cttccagctgtttgaccgaacagatttggagtccagccttccacacctgatcttatacaccagcctcgctttacatcatgctgcaaaatcctcaggtaat

SEQ ID NO: 168344 - DNA, 95 bp, Homo sapiens
cggcgagccgagcgaggcagctctgagccgcgcggacgtcgggctcctggagtaccagcaccactcccgcgactatgcctcccacctgtcgcccg

SEQ ID NO: 168345 - DNA, 75 bp, Homo sapiens
cgccgcggccaggccccccaacatggactgtctctgtatagtgacaaccaagatccagagacaatggccccgatg

SEQ ID NO: 168346 - DNA, 100 bp, Homo sapiens
agctgggattatgaaggggtggcctgcccctccacatctgtgggatatctcatcagtgcagtcattggagaaatcgatgaagaaacagattctgcgcttg

SEQ ID NO: 168347 - DNA, 87 bp, Homo sapiens
cgtccaccacggatgcccagctgaagagcctgctgatgtcagtgggacccattcagttttctggatatgccgcagaaggatccgtgc

SEQ ID NO: 168348 - DNA, 100 bp, Homo sapiens
agaaaccgagcgaggtttaagccgaaagcacatcattgaggaggagaaggcagagcccccccaggctatgaatgccctgatgcggttgaaccagctgaag

SEQ ID NO: 168349 - DNA, 100 bp, Homo sapiens
ggtcccagaaacgtcactatcaagaagtggatatcaaagtattgcagagtgccttagcagccatccgacatgcccgctggttcgaggaaaatgcttctca

SEQ ID NO: 168350 - DNA, 101 bp, Homo sapiens
ctgaacacagcttaaatcaaaagtctatacttcagattttcctgtccttgatcccagctggactgctcaagaagaaatggcccttttagaagctgtgatgg

SEQ ID NO: 168351 - DNA, 100 bp, Homo sapiens
agggaagccccttggatattccagtcgatgtatttgtacaccaaattctgctcagcaatcctcagatgtggtggttaaatgattccaatcctgaaaccga

SEQ ID NO: 168352 - DNA, 80 bp, Homo sapiens
cgacaagccgctggcagccgcggatctcaccgccgctcaggctcaaactggaggattataaggatcgcctgaaaagtgga

SEQ ID NO: 168353 - DNA, 100 bp, Homo sapiens
cgagggcgatctatacaactgggaggtggccatcttcgggccccccaacacctactacgagggcggctacttcaagaacccagcgggtgccgcttctcca

SEQ ID NO: 168354 - DNA, 101 bp, Homo sapiens
gcgcgcggaggccgcgacggacgcaagatggcgacggcgaccatagctctcatttggtcgtattgggcgcctggtcaccagggctgcttttaactctggta

SEQ ID NO: 168355 - DNA, 98 bp, Homo sapiens
gaaaggtgaagtaacttgtccaagatcacaaagctgctatatcgagaagtttactgactttcttcggctctttgtgagtgttcacctaagaagaatcg

SEQ ID NO: 168356 - DNA, 100 bp, Homo sapiens
gaaactcccagggcccgcccaggacccccaagccgccgcggacgcagccgcagcaatggcgctgagttcctctgctggagttcatcctgctagctgggtt

SEQ ID NO: 168357 - DNA, 75 bp, Homo sapiens
gacgagcccctacctccccaacggatcgctctcgcccaccgcccgaaccgtatccgttacagcactgatgtgagt

SEQ ID NO: 168358 - DNA, 87 bp, Homo sapiens
gaggaaggccccgagatcccaggcactgagtgactgcatactggcgaactttctgaccaagtatacaactacccagagggcctagga

SEQ ID NO: 168359 - DNA, 100 bp, Homo sapiens
ttgtgttcctggcttccctctggatgctgacagaaacaagggagatgcgctctgtgctgcggaaggcgggctccccgcgcaaggcccgccgcgcgcgcct

SEQ ID NO: 168360 - DNA, 100 bp, Homo sapiens
tgaaagacgagggagaaatgttttgtttgactccagtgttaagagaagaaatgaggacatatcagtatcggaacaagaccctgcagatggagaagatcaa

SEQ ID NO: 168361 - DNA, 100 bp, Homo sapiens
attacaaagacattctcccctgcctggatggatacctgaagacttcagccttgtcagacattgaccagctcatcaccatcagcggcatggtgatcaggac

SEQ ID NO: 168362 - DNA, 100 bp, Homo sapiens
ctggtgggcactcagcaccctctgcttaccacagccagtcagctgagcaagttgcaagaagtttctctgaggaactgtgcagtaagttgtgctggtgaaa

SEQ ID NO: 168363 - DNA, 100 bp, Homo sapiens
gtgagaaacgcgcacaagatttggagatgatggctgatgacaatatagaagattctacagcaagatgccttcaattaagttgcagagttctgatggagag

SEQ ID NO: 168364 - DNA, 97 bp, Homo sapiens
caagttcggggcaaagtgttcccaccggcagcaaatatggaatatatgttggattgaatgaacaaatgaaggctgttcgaaagagaaatgagacctc

SEQ ID NO: 168365 - DNA, 101 bp, Homo sapiens
ctaaggacgctaggtgggcagggctcttcacttgcagtatggaagctccaaaaggaaagataccagattgatcttgatcacctctgcctccccagcaccta

SEQ ID NO: 168366 - DNA, 100 bp, Homo sapiens
cactgtacatgctttttattacaagactacggagcataggaggaaaattcatcatctgaacctgagccagcagaagagtacactgagcaaagtgaagttg

SEQ ID NO: 168367 - DNA, 75 bp, Homo sapiens
catttcttttgtgcaagatgagcctcaagtgcttctgcattacacggacaaggcaaaatctcagcaagttcggac

SEQ ID NO: 168368 - DNA, 74 bp, Homo sapiens
acaaagggaggagctggactccatcctcttcctttttgaactgagatctgtatctgtggacctgaatgttgatc

SEQ ID NO: 168369 - DNA, 98 bp, Homo sapiens
aagagccaagagaaggtccttttctacaaatatcagagccatggctcagattcaagtcaatctgaaagtcccagccagccaagtgacgctgacattaa

SEQ ID NO: 168370 - DNA, 74 bp, Homo sapiens
catacattacagtggttggaataaaaatatgacgaggaagcgatggtggaggctgtggccctctacaaccctgt

SEQ ID NO: 168371 - DNA, 90 bp, Homo sapiens
aacagaccgtgtctcagtaactggccagaggtctataagaaggagaaagctcgagtcatcactgaggaagagaagaatttcaaagccttc

SEQ ID NO: 168372 - DNA, 83 bp, Homo sapiens
gtcgtccgttctctcaggctcccgttcagattcctggtcgggtggcttccagtggtcttcagtctgtcgtgcaccgatgagaa

SEQ ID NO: 168373 - DNA, 129 bp, Homo sapiens
cactgcactgggtgattcacgtgtgcccaggccctgaggtgggccggacctgggagtggcagggccatgaagcccccaggaggagaatcgagcaatctttttggaagtccagaagaagctactccttcc

SEQ ID NO: 168374 - DNA, 100 bp, Homo sapiens
tttaaccactgtgatgcctgagaatccagtgaagaaactggagagtgagaagctaaatgtggctgaggtcacccagtcagagattgctcagaagcaaaaa

SEQ ID NO: 168375 - DNA, 100 bp, Homo sapiens
tgataggggggaaacctcaagatataatcttcacttccgggggcactgagcccctcaggatcaatggtgttaaggtatacactgaaaatgtagacaaaag

SEQ ID NO: 168376 - DNA, 75 bp, Homo sapiens
gtgaaaacataaggaggcgaacccagagatgtgtggaagacgccaagatatttgcctctgcaatcccagataatg

SEQ ID NO: 168377 - DNA, 100 bp, Homo sapiens
caaaatcaaccgggaccccagcttttcagaactgcagggaaacagccatcatgagggtgctgacggagcttgtgtccaagatgcgggacatgcagatgga

SEQ ID NO: 168378 - DNA, 90 bp, Homo sapiens
tgaacagcatcgtaggggtcagtgtcctcaccatgcccttctgcttcaaacagggaatacccactctggtgtacagacacgactggaact

SEQ ID NO: 168379 - DNA, 51 bp, Homo sapiens
agaaactggagcaagagtttcagatctctctcagccttgtctgcttatcac

SEQ ID NO: 168380 - DNA, 75 bp, Homo sapiens
gggaggccgaatgtgcaggatcaccgaggggaaagtgagcttgacagccctgggcgctgcctatggcacagccaa

SEQ ID NO: 168381 - DNA, 83 bp, Homo sapiens
agcagccaagatggtgaagcagatcgagagcaagacaaatttacatgtattggagaccagaccagaagcccttctgaattaag

SEQ ID NO: 168382 - DNA, 100 bp, Homo sapiens
ctcgggcgccccgcagccccccaacatcctgctcctgctcatggacgacacacagaatgttcagcttaacaaagaaatgacacttgccagcaaccggagc

SEQ ID NO: 168383 - DNA, 82 bp, Homo sapiens
atgaatccagctagcaaagtaattgcactgaaaggtctatgttaacaatgaatgggcaaccagtgttggggaaggagggagc

SEQ ID NO: 168384 - DNA, 101 bp, Homo sapiens
cttatccaacgccaaccaaagatttgcatcagccatctcttagtccagcaagtcctcatagccaggaccttagctggatctccaaaatacaagtgaatcac

SEQ ID NO: 168385 - DNA, 100 bp, Homo sapiens
ccttccacccacacataaaccacctcctctgtatgaagaacgatccccacctttgcctcagaaagacctatttcaggtaagagcttctgttcgtgtgcag

SEQ ID NO: 168386 - DNA, 100 bp, Homo sapiens
cgcagctggagctgcagaagctggtcctctggcttctgtccctgctcagtcggccaagaagccctgcccagcggggatctgatgagcttctttcttctgg

SEQ ID NO: 168387 - DNA, 75 bp, Homo sapiens
gatacattgatcgcatccatatttttttcaggtatggatcctggcgggagccagtcaacccctattatgtcaatg

SEQ ID NO: 168388 - DNA, 101 bp, Homo sapiens
gcgggctccgtggaagcgtggccggcagcgtcccggacgaggaggctgagagcacagacaaaacaacaactcttagaatataaatcaatggttgatgcaag

SEQ ID NO: 168389 - DNA, 76 bp, Homo sapiens
cctcaggagcctcctaaaaccacaggtgagccgttctccaaccctttggcccccgatggccacgatgtggatgatc

SEQ ID NO: 168390 - DNA, 100 bp, Homo sapiens
cagtatctcacctccctaaactggttaatagtggcatggaagatccatttggcaattttcgttctgctctcaatgatgtgacagctgccagaaagctaaa

SEQ ID NO: 168391 - DNA, 100 bp, Homo sapiens
cccagcccccaccgtcgcgccaggacccgaggacagcaccgcgcaggagcggctggaccagggcggcgttgattatggaagattcccacaagagtaccac

SEQ ID NO: 168392 - DNA, 90 bp, Homo sapiens
tcatgacctttctcatctgactcgtgatctgcccatcttgttactccctagcagtgtggtaagcctcctgtataagaagtaccgtatttt

SEQ ID NO: 168393 - DNA, 100 bp, Homo sapiens
ccgccgacatgaagaaagacgtgcggatcctgctggtgggagaactacaaaattggacagctgtacatgatcagcaaacacagccatgaacagagtgacc

SEQ ID NO: 168394 - DNA, 100 bp, Homo sapiens
gaaatttggagtgtgcgtgcgcgccgagcggttgttcctcaaagtcattcaagctgtactcgccgaaggagcccccgaacggcaacgcctttcccccctt

SEQ ID NO: 168395 - DNA, 100 bp, Homo sapiens
ccaggaagcgcttcgaaatcgcctgctacagaaacaaggtcgtcggctggcggagcggcttgtctaattgtccaaaatgtggctctactggtgaatctgg

SEQ ID NO: 168396 - DNA, 84 bp, Homo sapiens
ccatcaccacttcccaagatggctgatgtctcagcagaagaaaagaccccctcgaggacggtgccagactcggaggccccccca

SEQ ID NO: 168397 - DNA, 83 bp, Homo sapiens
cgctgatggtgcagcaccgcatgatggtacccaaagtcagcacactgatttatgtcagtacatggacaagcaccctggggggc

SEQ ID NO: 168398 - DNA, 101 bp, Homo sapiens
gggctgcctcgccgcgtctcgccacgcaacatggccaacgccctggccagcgccacttgcgagcgctgcaagggcggctttgcgcccgctgagaagatcgt

SEQ ID NO: 168399 - DNA, 101 bp, Homo sapiens
cagtgcatgaccttactattgcattccccgtcggagccctttctagagaaaccagtgccggatatgactcaggttagtggaccgaatgctcagctagtgaa

SEQ ID NO: 168400 - DNA, 75 bp, Homo sapiens
tcattcaaggttacccagttggccaatggaagcactgttgtgaagaacttatgaaaattgagattatgtcaccac

SEQ ID NO: 168401 - DNA, 80 bp, Homo sapiens
gccggagccgcaatgcctaaaggaggcaacatgagtgagaatgaggaagaggaaatttctcagcaagaaggcagtgggga

SEQ ID NO: 168402 - DNA, 100 bp, Homo sapiens
gagaggcaccgggatcgtgaccgagaccgtgaccgagagcgtgaccgagagcgcgaatatcgtcatcgttagaagattactgagagtcttcagttactag

SEQ ID NO: 168403 - DNA, 75 bp, Homo sapiens
ttgcagaaccttccctgattacagaatcttgggtccggaccctatttgtcagtggccttcctctggatatcaaac

SEQ ID NO: 168404 - DNA, 83 bp, Homo sapiens
gtcggcggtgcccagcggtgtggaatgagagcgctgcaggtgcgcaccgggaagttcagatgtgaagttcatttccaatccgc

SEQ ID NO: 168405 - DNA, 107 bp, Homo sapiens
gcagaagtcgcgtgtctaggtgagtcgcggtgggtcctcgcttgcagttcagcgaccacgaacaccttccaccatgaccacctcagcaagttcccacttaaataaag

SEQ ID NO: 168406 - DNA, 100 bp, Homo sapiens
tgctcgccgcccagctccagggagaggaacccgcggaggagaggatcccggcccaggtcgcccggctcatggagatgggattttccagaggtgatgcttt

SEQ ID NO: 168407 - DNA, 100 bp, Homo sapiens
gtaaaatgcttatcactcaagtctgtgagctttacttctctatataatttgctgaagacaaaactttgcccctatttctacgtttgtacctatcagttta

SEQ ID NO: 168408 - DNA, 74 bp, Homo sapiens
tttttattcgttactatgtggatgttccacaggaagaagtgccattcaggtgctggagaatctggtaaaagcac

SEQ ID NO: 168409 - DNA, 51 bp, Homo sapiens
tttttcatccaaagccagttccggccctggccaacgtcaacattgggagcc

SEQ ID NO: 168410 - DNA, 100 bp, Homo sapiens
gctgccgagggtgttcttgacgattaatcaacagcctttccgctgtgcccattgccattactcctgcaacatatctggctctctgaagcggcactacaac

SEQ ID NO: 168411 - DNA, 101 bp, Homo sapiens
ctcagagtgacacatgtccgctggcccaggaagaaattttagaaattaacagagcagccgggaccacatacatctttgggaaggggggagcgctcatcacc

SEQ ID NO: 168412 - DNA, 98 bp, Homo sapiens
tcgtgaacggggtcctcttctgcaaggtccggctgctggatggaggggattttgtcagcttgtcgtcaagtgcactggtgattgctgcggtgtttgac

SEQ ID NO: 168413 - DNA, 97 bp, Homo sapiens
cttcttcaaggaggtcacggacatgaacctgaacgtcatcaacgagggcggcattgacaagctgggcgagaggagaaggcagagcccccccaggcta

SEQ ID NO: 168414 - DNA, 75 bp, Homo sapiens
catccatctaaagcaccagtaaaatatggtgaactcattgtcttaggtctattgcgtctgcagacatggatttca

SEQ ID NO: 168415 - DNA, 112 bp, Homo sapiens
gaaaaacatggcagctggggaagtggtttggacatgcacaccaaaccctgggttagagcaaggcgtgagattcaacattttggggtgaaaatcagcatagttgaacctggct

SEQ ID NO: 168416 - DNA, 98 bp, Homo sapiens
ttgctgctcacctagataaccaggttccagttgagagtccgagagctatttcccgcaccaatgagaatgacccggaacctagtgctgaagacagtaaa

SEQ ID NO: 168417 - DNA, 50 bp, Homo sapiens
gatgatgctgccattaccttgcgatgtgcattttgtaagcactttggagc

SEQ ID NO: 168418 - DNA, 101 bp, Homo sapiens
cccgggcggacgccgcagagcgccgaggaggctttcctgctggtggcaaccgcctacgagacactcaagtgccatttttgtgacaaggcctttatgaacca

SEQ ID NO: 168419 - DNA, 86 bp, Homo sapiens
gtttataatgtcagaaattgaggaaaagaaactaaggtggcctgaatgatccaggttttgattcccaccatggccatcacccagtt

SEQ ID NO: 168420 - DNA, 51 bp, Homo sapiens
attccaagtaactcttatttgatacacatggtctacagtaagcggtcagga

SEQ ID NO: 168421 - DNA, 51 bp, Homo sapiens
cttcagcggctagtttctgctctgctccagaaagcagtggggcctgagatc

SEQ ID NO: 168422 - DNA, 100 bp, Homo sapiens
ctgatttgctttgacatcagtagaccagagaccctggacagtgtcctcaaaaaggaaatcatggatcggatctacaaaaatgtcatgaataaagtcagtg

SEQ ID NO: 168423 - DNA, 100 bp, Homo sapiens
gtttaaaaagaaatgttttaagctcaccaggaagatgcccattattggtcgtaaggccctagactggagctggttacagacggaagaagaagagcacagc

SEQ ID NO: 168424 - DNA, 75 bp, Homo sapiens
gggagttttccggggccctctcagcaagaacgggaacaaaactctgacctgatggccaaaagaaaggaagaaaat

SEQ ID NO: 168425 - DNA, 103 bp, Homo sapiens
tttgccaatagcccctgggtggttcagggccgttgctccagggagaactgcaaatatcttcatccacccccacatttaaaaacgcagttggagataaatggac

SEQ ID NO: 168426 - DNA, 75 bp, Homo sapiens
aacctggaactagcgtcaaccttgaaggcatcgtgtggcaggaaacagaagatgatgctgacatcagaaggaaca

SEQ ID NO: 168427 - DNA, 82 bp, Homo sapiens
aaatctggcaatattatcaacatgtcttctgtggcttccagcgtcaaaggtcagctgagttctggctccacacccagccccg

SEQ ID NO: 168428 - DNA, 100 bp, Homo sapiens
aggaacctgctttctctcgatgaggataacatccctccagaagatgatcaagttttatcagccagtaatcctacagtttttaatttctacaattatctaa

SEQ ID NO: 168429 - DNA, 50 bp, Homo sapiens
actacgacaatgccgacaagctccacaagattttgttctaaacactgagg

SEQ ID NO: 168430 - DNA, 101 bp, Homo sapiens
tgcccaggctcgcctcgactccaaatggttgaaaacagatatacaggctctgaaaattggaaaaccaagaaggttttgatgttttgtgtgacgccacctga

SEQ ID NO: 168431 - DNA, 100 bp, Homo sapiens
ggatgtcttcttcggcttcgaggagaataagtgcagtatgagctacatgtttgagtacccggagtatcagcgagtaaccagctcataaatcacatcgaac

SEQ ID NO: 168432 - DNA, 87 bp, Homo sapiens
cactttggaacaaatcggaagctagggccttccaggttgtgcagcctgactctgaagaagctggtggtcttcaaggagctggagaag

SEQ ID NO: 168433 - DNA, 100 bp, Homo sapiens
tccaaagcacaggaatctcactctgttaaagctggtctgttctaactgaggtaatgaatttgggcatcctgaatggttagacttcccaagaaaaggaaat

SEQ ID NO: 168434 - DNA, 80 bp, Homo sapiens
gccagcgcgcccgtggaggtctttgtcggcgaggctggacagctggcctgaagctcagagccggggcgtgcgccatggcc

SEQ ID NO: 168435 - DNA, 90 bp, Homo sapiens
cccacgctgaacgagagggacacggagcaggaagagagaagggcacagttacctaagtatcaacgtaatcttcctcggccaggacaggcc

SEQ ID NO: 168436 - DNA, 100 bp, Homo sapiens
acgccggccgtggacatcggggcagctgacctcgcccacgcccagcagcagcagcaacagttgagccccatatgggggttggcaggcagcagagaggccc

SEQ ID NO: 168437 - DNA, 82 bp, Homo sapiens
ttcacagctataccaaacttaaagatgaagctactgaatctttacatcaaacgtgcacaaacaggttctggaggagctgatc

SEQ ID NO: 168438 - DNA, 100 bp, Homo sapiens
ttccaagacagagcacctaggattaaattggtttcctaaccctctggaccccgaggttggaccctactgtgacacacctaccatgcggacactcttcaac

SEQ ID NO: 168439 - DNA, 75 bp, Homo sapiens
gacataagaaaccagtcaattactcacagtttgaccactctgacagtgatggagatgtttcacaaagcagaagaa

SEQ ID NO: 168440 - DNA, 99 bp, Homo sapiens
atgtgtggaatattggggggctcggctgcagacttggccaaatggacgggactattaagatgatatcatcaagttgaatcgaaaggaagggaagaagca

SEQ ID NO: 168441 - DNA, 98 bp, Homo sapiens
cagctccacgaaaggcagccgcggatcgccgcgctcagcgacaaacaaagtttattaaccacttaacctctcagaactgaacaaagacaacattgttc

SEQ ID NO: 168442 - DNA, 90 bp, Homo sapiens
gcgacggtggtggtgactgagcggagcccggtgacaggatgacacctgaaagaccccgccgtggcatcccagggcttcctgatggccgct

SEQ ID NO: 168443 - DNA, 100 bp, Homo sapiens
acatgtctgatcccttgctcccatccctgcagcatgaacaagggggaccagaccgccttgcaccgggccacagtggtggggaacacggagatcatcgcgg

SEQ ID NO: 168444 - DNA, 87 bp, Homo sapiens
atgagactgaccgagaggtggagtactttaagaggcggcttacagggagaacacagttggcctccaccgtttctgccccacagaaaa

SEQ ID NO: 168445 - DNA, 75 bp, Homo sapiens
ctcagacctgggcacagcaaatgctgaggactcagaccagtctctgcaagactttggtgtcatccccagcactcc

SEQ ID NO: 168446 - DNA, 90 bp, Homo sapiens
gaagagtacgctactcctgctgctgactggcaagctgacaccggtggttgtggcaacgaacattgctgagacatcactcaccattgaggg

SEQ ID NO: 168447 - DNA, 73 bp, Homo sapiens
acagatgtccaagctgccaaaggtatgaaggttattgaaaaccgggccttaaaagatgaagaaaagatggaac

SEQ ID NO: 168448 - DNA, 73 bp, Homo sapiens
tgtaatcaattgtgctgacaacacagggaggctgccggcgtggaccgcgggaaggcggggctggggctcggcg

SEQ ID NO: 168449 - DNA, 83 bp, Homo sapiens
cttggttccgcgttccctgcacagaactgtggctgcaccatctgtcttcatcttcccgccatctgatgagcagttgaaatctg

SEQ ID NO: 168450 - DNA, 90 bp, Homo sapiens
atcatggtcaagacttttgaagatagaatggtcaccatggctgttattggctcccttgctgtccccagctgttccccaggtcacctcccc

SEQ ID NO: 168451 - DNA, 50 bp, Homo sapiens
cccagcggcttaagccatggcgaccctcactacgtccagcaggcgctgac

SEQ ID NO: 168452 - DNA, 100 bp, Homo sapiens
gaaaaacagaatcagctgttccctgcgaaaggtacatcaggaacgtctctatcaagaatacaatttcagcaaggctgagggccatctgaaacagatggag

SEQ ID NO: 168453 - DNA, 83 bp, Homo sapiens
gcgccagcctgcgaaggtggcggcgctgctgctcgggctgctcttggagtgtgtcccggcatggatatccggaacaacctcac

SEQ ID NO: 168454 - DNA, 136 bp, Homo sapiens
gacagtgtggagagccgtgatatgttccagttgcacatttcctgcaaggactccaaagtggtgagaatttatccagttggcgaaggactttgaggatttccgtaaaaagtggcagaggactgaccatgagctgggg

SEQ ID NO: 168455 - DNA, 100 bp, Homo sapiens
aaatgggtcgcatggattgattaacgtcatgtgattttcccgggtgctggtgatgaagcgatttcagagtacaaatctgtgatttactaccaagtaaagc

SEQ ID NO: 168456 - DNA, 90 bp, Homo sapiens
ctctctcatttgctggccatcggattggggaagggaggcaataataagttaataaagatctatcaccgggatggtaaatatggcttttct

SEQ ID NO: 168457 - DNA, 90 bp, Homo sapiens
ctttatccaatcaagtgcccttggacaaagcctgaaaccaggtaagaatgattgatgttggctgatattggagtgctcattcacatgaag

SEQ ID NO: 168458 - DNA, 82 bp, Homo sapiens
cgcaatcggctccagtgcgcctgcggaggcggtcctatgacgtaagactttgaccccgacgcaggcttcagtgattgccgcg

SEQ ID NO: 168459 - DNA, 100 bp, Homo sapiens
gccgctcccgggggccgtgacgcacccttacccttctgaagaacagaaaaagcagttggcacaagacacgggactcaccatccttcaagtgaacaattgg

SEQ ID NO: 168460 - DNA, 49 bp, Homo sapiens
ttcaggctgaaggtttagcgggtgccggcacatagcagtatttccctgc

SEQ ID NO: 168461 - DNA, 82 bp, Homo sapiens
gcgcactcgcctcagctgagcctgggaccctttgaggatgccctgaagttgcatgagtgctcagtggcggcaggcgtgacag

SEQ ID NO: 168462 - DNA, 75 bp, Homo sapiens
ttccactctctaaaaatgcagatcatttactgcacctaaagacaaagcaccctggaggagaagaggttctgctgg

SEQ ID NO: 168463 - DNA, 51 bp, Homo sapiens
gaagagaagatcgtcaagaagttgtgagacttttcttggtctcctggtggt

SEQ ID NO: 168464 - DNA, 75 bp, Homo sapiens
gagactgctgataaagagcttggggaagcaaagataacacttgttatttgggccgtgattcgcattggaccaaat

SEQ ID NO: 168465 - DNA, 97 bp, Homo sapiens
tgagctgccctttgatgctcatgcccacatcctgcccagagcaggcaccgtagccccagtgccctgtacaaccctgacggagtctcgctctgtcacc

SEQ ID NO: 168466 - DNA, 95 bp, Homo sapiens
ccacgttagcccggctgcaagctaggtcgtcgactgtaggaaatcagtactactttaggaacaggatactggtatcgggatgacacaggaagagc

SEQ ID NO: 168467 - DNA, 101 bp, Homo sapiens
ccagaagcctttcgcggagaaaaggctgacatgcccgtcctatatgacagggtcacctgtctgtgtgcccagtttgaagccgtcctgcagcatggcttgaa

SEQ ID NO: 168468 - DNA, 75 bp, Homo sapiens
tagacttgctaaaggagaagtctggtgtaatacaagatgctttaaagaagcccttgccctgttggatgaataggc

SEQ ID NO: 168469 - DNA, 75 bp, Homo sapiens
ttgatggcttctaagacaaatgctaaattcttgtcagattacgcaggaaagtcttcagatggcagtaggcccatt

SEQ ID NO: 168470 - DNA, 100 bp, Homo sapiens
gaggagctgagcaagaccgtggtccaggtggcaaaggtcgcaatggaagaagagatcgccgcgctggtcattgacaatggctccggcatgtgcaaagctg

SEQ ID NO: 168471 - DNA, 100 bp, Homo sapiens
acgaagacagtccctggatcaccgacagcacagacagaatccctgctaccaattactctcgtggctttggtggccggtacggggtggagaaggataaatg

SEQ ID NO: 168472 - DNA, 75 bp, Homo sapiens
ctgagatacgagaagcatcacttccttcagacagagtcggatgaagatgcatcagggggcgatcaagatcaggaa

SEQ ID NO: 168473 - DNA, 102 bp, Homo sapiens
tgaagcctggtgcctctcttttaatcaacatcttggcaagagtcttctggtccctgttgacacatatctgaagagatggattaagaatgctttggattaagg

SEQ ID NO: 168474 - DNA, 82 bp, Homo sapiens
ggcaagggtgtgtgctgaatgactcaaggattttttggtcctgtgcctcctgattgctgagtgttcacctggaccttctgac

SEQ ID NO: 168475 - DNA, 75 bp, Homo sapiens
aagtccaagaggaacatcattctgggcgcagggatcctgttcgtggcagcagcggatggtttctcgctctttggg

SEQ ID NO: 168476 - DNA, 89 bp, Homo sapiens
cgcttttctctaaggaacccgattgaccgactcatcagtcacggggccgacatcctgaagcctgtaatgctcaggcagggagaaaagga

SEQ ID NO: 168477 - DNA, 88 bp, Homo sapiens
cagaagcagggacagggagctggttggggaggaccagaaatcaggaaactcgaactatctaccagtttcattacaagaattggccaga

SEQ ID NO: 168478 - DNA, 100 bp, Homo sapiens
tgaacaaagtctgctcaaatctcctgctgtgaaccagcagaatttttgaacagagctcaaatgatacttttcccacagcaatgcacattgctgctgcaat

SEQ ID NO: 168479 - DNA, 75 bp, Homo sapiens
gtgcggtgctcgtcgggagtgatcacctaccctacaggtgaactgtcacccctacaactcagcttgcaaccagcc

SEQ ID NO: 168480 - DNA, 100 bp, Homo sapiens
gcttgtggtgcggcctcaccatacaggaacagggcagacgttagcgtgagtgatcactctcaatcccgggtgtggatgaggtcaccattgtcaacatttt

SEQ ID NO: 168481 - DNA, 75 bp, Homo sapiens
aagtgatgatgttggtttatcctgaagagttaaagtcaaaatgtggagaaagagatgaattatccccaaagagaa

SEQ ID NO: 168482 - DNA, 90 bp, Homo sapiens
gcggcgggcatcttcttcgtgaggctgctcttcgagcggggtattccctcagcggatactacacccatccatttcaaggctatgagcaca

SEQ ID NO: 168483 - DNA, 74 bp, Homo sapiens
ccttcatctaatccatggaaaggaaccccagacgcacgggccttgtgctgtcgctgccgtggcaccccttctag

SEQ ID NO: 168484 - DNA, 86 bp, Homo sapiens
ctgtcagtgctgttctccaagaggcccagagacatgctgaaacatcgaagacctgcctagagctggaacgttacctccagagcgag

SEQ ID NO: 168485 - DNA, 84 bp, Homo sapiens
attcatgctctacatccccatagagacaatgcagatcttcgtgaagactctgactggtaagaccatcaccctcgaggttgagcc

SEQ ID NO: 168486 - DNA, 83 bp, Homo sapiens
cagggatgaacgatatcgatcagattacacagatgaatcttgcactttcaagatatcattgcgaaatttccggtccatcttat

SEQ ID NO: 168487 - DNA, 100 bp, Homo sapiens
ctgaaagatcagatagcagagctgaatcatgagatgttttcatcttctgcccctgtggatcaggagattaaaagccttcgagagaaactaaataaactta

SEQ ID NO: 168488 - DNA, 96 bp, Homo sapiens
cagggccttgcctagtgggccttccttcccagcaaaacaagctatcgatcagggaagatctccagttataatagataacactaatatacaagcttg

SEQ ID NO: 168489 - DNA, 89 bp, Homo sapiens
agaatgcatcagtgcccttgtggcgaatggggctcacgtcgagttcaaaccttgtactactcagctgatcacaagctgcttgatgggaa

SEQ ID NO: 168490 - DNA, 115 bp, Homo sapiens
ttggggagaagaggattggaggtgtcagtgttaaaggaacctctacaacgaaggtgaagccacggaagataaggcaaagcgaaggctggagctaggagaaagcggtcatcagtac

SEQ ID NO: 168491 - DNA, 90 bp, Homo sapiens
tgcagatgcagtgtggctctggatagcaccttatggacaggcttgaccactatgctatcatcaagtttccgctgaccactgagtctgcca

SEQ ID NO: 168492 - DNA, 75 bp, Homo sapiens
cggaggagtcagctgtgtgtccagaacgtgccatggagacgcttaacggctcctggaatcccagctgcagtcaca

SEQ ID NO: 168493 - DNA, 100 bp, Homo sapiens
ccgctcttctccctgcttaacgagaaccatagatcagccaaatggccgatgacacagtggcagaactggacaggcatctggcagtgaagaccaaagaact

SEQ ID NO: 168494 - DNA, 98 bp, Homo sapiens
gaggatcgcccagaactttggtctccagcatctctccagcggccacttcttgcgggagaacatcaaggccagcaccgctatctcacgtgagagggcag

SEQ ID NO: 168495 - DNA, 98 bp, Homo sapiens
ctctggtgcatgctgatgacgaaaaacaagactgtgcagtctttgtaactgatgaagagcaaggctttgtctctaattctgcccagttaaagtgcagg

SEQ ID NO: 168496 - DNA, 100 bp, Homo sapiens
ttgtgacccctacggagccccagcttgcccacgcaccccactcggcgtcgcgcggcgtgccctgcttgtcacagctgttgaaaatggacagatagatgtg

SEQ ID NO: 168497 - DNA, 87 bp, Homo sapiens
agatgtgatgttggagaactacagaaacctggtctccctaggaatccgctgtgtggcttacaataaccagtcaaacagattggctgt

SEQ ID NO: 168498 - DNA, 75 bp, Homo sapiens
gaataaagctgttttggaactgtcaggtacctcaaagcaatgtgaaagatgttgcagaagtgttccagaagtggc

SEQ ID NO: 168499 - DNA, 90 bp, Homo sapiens
gtgctactgagttcggccggtccgagtcactgtgcgtcgcctgggcccgttcctggtcttctcccccagacttaattcagtgcacaaatg

SEQ ID NO: 168500 - DNA, 83 bp, Homo sapiens
tgaagatcctggtgtcgccatgggccgccgccccgcccgttggcctacatacagatcacttttgtggagccctactttgatga

SEQ ID NO: 168501 - DNA, 141 bp, Homo sapiens
actgcgtcacgcagagcacggggatgatgagctgcaaaatgtacgactcggtgctcgccctgtccggtgagccagtggtacgagctggtggtgtttacagcaagcatggagatctatggctctgctgtggcagataaactg

SEQ ID NO: 168502 - DNA, 80 bp, Homo sapiens
cagggccacgcacctgatcgccgcgcgagctgtaagactttgaccccgacgcaggcttcagtgattgccgcggatcagaa

SEQ ID NO: 168503 - DNA, 82 bp, Homo sapiens
aggaaacctactgttgcactgtctgctgttggtagatgacattaatgctgataagaatatctcttctgcacagattgttggt

SEQ ID NO: 168504 - DNA, 100 bp, Homo sapiens
ttctcgctggccatgcactggcaactgcagcccgaggacaagcggctgtcttatgaacttacccggaaggaccgactgtacaaaaacattattcgaatgc

SEQ ID NO: 168505 - DNA, 75 bp, Homo sapiens
tgatcttgctgtaaccttcccaggaccaggagaagatgggctggaaccaataaaatcacgtgctccacagcttca

SEQ ID NO: 168506 - DNA, 100 bp, Homo sapiens
ctgagggtgaagtggcaggaggaggaggaggggctccggctggtctgtggtgagacgagatgatgcctattggccagaaggaaagcgtgtggcaatggag

SEQ ID NO: 168507 - DNA, 82 bp, Homo sapiens
agctagtggcttctatactcagactgaaatcgccaagagattgaatacgatttgtgcacaagtcatcccatttctgtctcag

SEQ ID NO: 168508 - DNA, 100 bp, Homo sapiens
gctggagcacttgagccacgtgcatgaaccaaacccacttcgttcaagacaggtgtttaagcctatcatggtgaacttacttcagattgtgcgggaccac

SEQ ID NO: 168509 - DNA, 100 bp, Homo sapiens
aagtgatcataggagaaaaccatttcagccagaggaagagcatttggcctgtgatatcaccggatccagttcatccaccgatgacacggcttcactggac

SEQ ID NO: 168510 - DNA, 83 bp, Homo sapiens
gaaacacaaagccggctacgcgctgcgaggaaaaatatattcagggggaagagatgtaatagatttcacattatggcagttac

SEQ ID NO: 168511 - DNA, 100 bp, Homo sapiens
ggctgggatcccatcaccctccacggccgtccgtccagcaatatgtcggacgccttggccaacgccgtgtgccagcgctgccaggcccgcttctcccccg

SEQ ID NO: 168512 - DNA, 75 bp, Homo sapiens
ccacaaatgggaagcaagagaaaaagaacattactgtcttggcaatgaatcgctccctggctaatgtgattcttg

SEQ ID NO: 168513 - DNA, 75 bp, Homo sapiens
tgtctcccgcaggaggcaggcagagcctgagcagagtgatggtgaggaagaggatggagatgaagatgaggaagc

SEQ ID NO: 168514 - DNA, 90 bp, Homo sapiens
atacgtacaggcacatttaactgttccagtgatcccagcactcacctttgccctgggtactcttcttgtatgtgtttccatatatctcta

SEQ ID NO: 168515 - DNA, 87 bp, Homo sapiens
ggtggtttggacgccggcggagacgcgggcgagagagaagaagaaggaggttcctgctgtgccagaaacccttaagaaaaagcgaag

SEQ ID NO: 168516 - DNA, 100 bp, Homo sapiens
tgccatggctgtgatgaaccaccatgtatgccctgtggagaactggactccagtgggggtgactcatgtgcttctgaggaggaaccaacctttgaccccg

SEQ ID NO: 168517 - DNA, 51 bp, Homo sapiens
atccagcctgcggagcctgtggggcaggttcgctttgtgaacagcacatgg

SEQ ID NO: 168518 - DNA, 100 bp, Homo sapiens
aaaaatggctctgtcggcagtgtgtttttgcaacaacaacaaaggtctcagctcgcgtacatggacatagggtactctgggaggaggtagtacattcagc

SEQ ID NO: 168519 - DNA, 99 bp, Homo sapiens
cccgaggcgaggaggagcgctggcgtggaatttctgtggagccacacgacggagagcatgtgtgtcggatatatgtcagcccaggatgggaaagccaag

SEQ ID NO: 168520 - DNA, 90 bp, Homo sapiens
ggcggacatcactttagaccctccacctaattgcagcaaatgcagccctgaggatttggctactgcatataacaacagggggcaaatcaa

SEQ ID NO: 168521 - DNA, 97 bp, Homo sapiens
gtaattacattctctcggccagcgcctccgcgattatgtttgagaccttcaacaccccggccatgtacgtggccatccaggccgtgctgtccctcta

SEQ ID NO: 168522 - DNA, 100 bp, Homo sapiens
ttcacggatcagcgaaccaaagctgaacaaggcaactgttcaaccaggagaaaagacagcaatggaccgagcctgaggaagaacttgatcctgaagagag

SEQ ID NO: 168523 - DNA, 90 bp, Homo sapiens
tggaaagtcattgccattaatgtggatgatcctgatgcagccaattataatggtcttgtggatgagcagcagaaagttcggaccatcagt

SEQ ID NO: 168524 - DNA, 75 bp, Homo sapiens
gcgggtggaggttcgagcgctgttctcgctccggagccgctgcacatttcgtgtccaacaagcacccatttgtgg

SEQ ID NO: 168525 - DNA, 90 bp, Homo sapiens
aatgtggtgaattgcttataccatggagaaggagcccagttggatcacaaggacgagtcataagttttgaggtacgaaaagaccaccatg

SEQ ID NO: 168526 - DNA, 100 bp, Homo sapiens
acagagcctatttacccagaagtagtccatatggagttttttgagaaccctgcttttcgtcccgatgggctgaaactctatcctaccctggtgattcgtg

SEQ ID NO: 168527 - DNA, 50 bp, Homo sapiens
ctggaaagacctcacttcaccttaccagatattgatgatgttaagaagtt

SEQ ID NO: 168528 - DNA, 87 bp, Homo sapiens
cgaaacagaacaagttaaaggcttgttctaagtggacaaggctctcacaggacccgatgcagtctccagagaatacagagggcaaag

SEQ ID NO: 168529 - DNA, 100 bp, Homo sapiens
gaaaaacaatcgcttcaatgatgggaaggtggatcccgccgggaggtactttgctggtttaattcacagtgccaatgtaaggactgtgaacttggagaaa

SEQ ID NO: 168530 - DNA, 100 bp, Homo sapiens
tcaacctcccactggagagcccctgttgggaaatgattctactcggacagaggaagttcaggttcagcagactgtacaggatctttttggcagagcccca

SEQ ID NO: 168531 - DNA, 51 bp, Homo sapiens
ctgggacgtccggttgaccgcggtgctccagtgaaccacccagggaatgac

SEQ ID NO: 168532 - DNA, 51 bp, Homo sapiens
caaggcgcgagtgctgtacgatgccaagtaagactttgaccccgacgcagg

SEQ ID NO: 168533 - DNA, 98 bp, Homo sapiens
cagaacgaagaccctactaggcaaggacatggatttgattgacatactttggaggcaagatatagatcttggagtaagtcgagaagtatttgacttca

SEQ ID NO: 168534 - DNA, 75 bp, Homo sapiens
ctgccacatcatcatgtgcagcagcggtgtgcatcggaaaatgtttataggaggccttagctgggacactacaaa

SEQ ID NO: 168535 - DNA, 101 bp, Homo sapiens
agatggtgacttctacgaaaaagccctggtggagctgaaggttgcaggggctcccacaggatcagaggctggggccaactggaaccattggcagctgcacg

SEQ ID NO: 168536 - DNA, 96 bp, Homo sapiens
gctatggctggcagtcaggacatattcgatgccatcgtgatggcggatgagagcaaattgaaccatctttgtatcctaagttgtttcagaaaaatc

SEQ ID NO: 168537 - DNA, 100 bp, Homo sapiens
gagattactaccagggccggaggattaccatcaccggaagtaagacagaagaagtggtcctgaagaagctagagtatatttatgcaaaacagcaagcact

SEQ ID NO: 168538 - DNA, 98 bp, Homo sapiens
ggagtaaatagctctgtggggactgtcactactgccacagatgagcagcaccagcagtaagagggctccgaccacggcaacccagaggctgaagcagg

SEQ ID NO: 168539 - DNA, 100 bp, Homo sapiens
cccccatggtatgcatgtgaagctcatggccaccatgttccagaacctgttcccctccatcaacgtgcacaagagctatgccaagaccaagacgagagcc

SEQ ID NO: 168540 - DNA, 75 bp, Homo sapiens
ccgcggtcaacgcgcagctggatgggatcatttcggacttcgaagtgtactaatggtcacttgatgtgcgctggc

SEQ ID NO: 168541 - DNA, 75 bp, Homo sapiens
ctgtgcactattctttcccaggaaccattggataaggataaagtatgaaagttttcaagacgcctacaagtggaa

SEQ ID NO: 168542 - DNA, 88 bp, Homo sapiens
tgttccaaatcatcgcctttctggtgggaggcttgattgctggctggatcggccgtcattgcttttggactatggtttcggttcggag

SEQ ID NO: 168543 - DNA, 82 bp, Homo sapiens
cctcagcgagtggcagcagctgcctcaagaggagcagacttcccaagtaagaagcggaagaggagccgctggaaccaagaca

SEQ ID NO: 168544 - DNA, 88 bp, Homo sapiens
gaaaacctaaccatgaagacttgaacttaatacagcaagaaagaccatcaagtttaccagtgaatcaaaaactctggttttaagcaac

SEQ ID NO: 168545 - DNA, 75 bp, Homo sapiens
gtggggcgcggaaggcctcccggcgctcttcctcccggagtatgggttcaactccaccagtaactgttttcaaag

SEQ ID NO: 168546 - DNA, 75 bp, Homo sapiens
gatgtggggggattctcgacctgctaacagaactggaccttttcggtgtgtagtaatgaagccacctgcatttgt

SEQ ID NO: 168547 - DNA, 87 bp, Homo sapiens
tggttatagatggacaagagacgatcattctgcaagcaggcaacctgaatacaggtttcaggtacgttcaccaactttctttcaaaa

SEQ ID NO: 168548 - DNA, 79 bp, Homo sapiens
agcaggactgcgccgcgtcttcctcaaggatgcctaaatcaaaggaacttgtttcttcaagctcttctggcagtgattc

SEQ ID NO: 168549 - DNA, 85 bp, Homo sapiens
ggcggcggcggtaggaagccggagacagcagggtgacagttgacggactggacaaagcttctatagcaaactcagatggccccac

SEQ ID NO: 168550 - DNA, 97 bp, Homo sapiens
ggggcggcggccacgccaaggacggagtctgtagaagaggcgacaccagggcttccaaatgaacaaccgaaaggaagatatggaaatcacgtcccac

SEQ ID NO: 168551 - DNA, 90 bp, Homo sapiens
ggaaccagcccttgggcctcacggacccagccgacacaagggtcccgacggcctacacatggggcgctgtgggcgccgtggggctggtgt

SEQ ID NO: 168552 - DNA, 80 bp, Homo sapiens
ctccagccgaaggagaaggggggctccctggggaagggaatgcagggttgctggggctgggcccagaagcagcagcacca

SEQ ID NO: 168553 - DNA, 74 bp, Homo sapiens
aagttgttcattgtttgtcaccacaaaaaggacaggtgctggatagtttactagtccagtatggagtggtggag

SEQ ID NO: 168554 - DNA, 112 bp, Homo sapiens
aatctcccaaatcaagtatacagaaaatcggtgaagagaggttttgaattcacgcttatggtagtgggtgtcatggagaaactccagctgggcccagagattctgcagcggg

SEQ ID NO: 168555 - DNA, 76 bp, Homo sapiens
cttgggatcctttatcctggtcatcttctatttccaaacctcctctattggcccaggaagcccacccagccccgcc

SEQ ID NO: 168556 - DNA, 82 bp, Homo sapiens
aaacatcaagcagaatgtgatttgcttgaagatatgagttttcggctttgtgagaaaccttaccatcaaacacgatggccag

SEQ ID NO: 168557 - DNA, 135 bp, Homo sapiens
ctggatgtctctgtcaagtctaattcctccttcatgtcaagagagcgtgagctgctggggaagttgcttcagattgactattacaacctgaccaagttctacggcacagtgaaacttgataccatgatcttcggg

SEQ ID NO: 168558 - DNA, 98 bp, Homo sapiens
gcagctcctgaaaggagagacacttgtgaacattcaagtgaagcaaaagcctttcatgattatataacagctttgacctgaataatggtagtgacgct

SEQ ID NO: 168559 - DNA, 100 bp, Homo sapiens
acggcagtggccgcctggaccagctgctctccctctccatggtctgggccaaccatctcttcctaggctgcagcccgaggagccttcaacacctggtaca

SEQ ID NO: 168560 - DNA, 75 bp, Homo sapiens
tgacatatttttggacctgaaacagaaattctggaacacctatatggctggacaatttgcttaatatggcctatg

SEQ ID NO: 168561 - DNA, 99 bp, Homo sapiens
gggagcgagccagcaagcggaagctgcccttcaccgcgggcgccaatggggagcagaaggactcggacacagttgttttggagaatcatgtagtgacag

SEQ ID NO: 168562 - DNA, 90 bp, Homo sapiens
gcccttttcagggcccccaaactgtcacagaaagagctgttaacacttcctagataacggatcaatgtccgagttaccaccatggatgca

SEQ ID NO: 168563 - DNA, 75 bp, Homo sapiens
aaagacgctaaacgtgccctactctgccccgggggagaggtatcatgatattagctggtttgacatcaagtcatt

SEQ ID NO: 168564 - DNA, 96 bp, Homo sapiens
agcttcgaaggcgaccttccttgctttcagaatttcacccaggttctgacaggataggaaaaacttgttggagacccgattgcacatcactggcag

SEQ ID NO: 168565 - DNA, 101 bp, Homo sapiens
cacatacatggcagcaacaggtctgagcgctgtgcccagccaggagcactcccagatctgtgacttcctccgcggagccacagtccatagaatcctcggcc

SEQ ID NO: 168566 - DNA, 83 bp, Homo sapiens
ggaactagatctttctgacaacaaactcgaagactggcatgagctggtgagagagtgtaaggaggtcctgaagggcggcctgc

SEQ ID NO: 168567 - DNA, 82 bp, Homo sapiens
acctgtagttcagccaagtccaagtttcactgttacatgccttgaagtgatgaggaggtttctgttactatatgctacacag

SEQ ID NO: 168568 - DNA, 75 bp, Homo sapiens
gacgagctgaccctgggagacatcgacgagtgtgaacatggctacgcctcttcattcccgtccatgccgagcccc

SEQ ID NO: 168569 - DNA, 135 bp, Homo sapiens
gattttgattatccatgagattacagttgtaacttcatagactcccaaagggaaattcttgtggaagatagatgataagcctgtaaaaattgacaagtgggatggatcagctgtgaaaaactctttggatgattc

SEQ ID NO: 168570 - DNA, 100 bp, Homo sapiens
gcgatcttaagcgcgcatctgtggaaacaattaagatgatcgtggagctacatcgaaaggtctccagcctcatcgaattcttgaagcagaagtgggcgct

SEQ ID NO: 168571 - DNA, 80 bp, Homo sapiens
cagcatggctacttcatattttggaaagcagtttttaagacaatatctttacgcgttcagtattgttcccatgaagctaa

SEQ ID NO: 168572 - DNA, 83 bp, Homo sapiens
cgcaaacccaaagatccccgttcctggagattctgattgagggtgtcttttatgaataatcaaaagcagcaaaagccaacgct

SEQ ID NO: 168573 - DNA, 75 bp, Homo sapiens
agcctgcggagcctgtggggcagtataaccccgttttcacacgaatggccccttcacatatttgaagactaccgt

SEQ ID NO: 168574 - DNA, 75 bp, Homo sapiens
cagcaacgtgcggtgggaccacgagagcaaagcataacccctactgtagaactaaatgcactgtgcatgaaactt

SEQ ID NO: 168575 - DNA, 98 bp, Homo sapiens
tcgtgcacgagctgcgcctcagcgccctgcagaaggcccagggaactctaatgatccaggacaaagaagttaccctggagtatgtatcaagcctggat

SEQ ID NO: 168576 - DNA, 50 bp, Homo sapiens
cctgtacagcctgcagaactatggagtctcgctttgtcgcccaggctgga

SEQ ID NO: 168577 - DNA, 101 bp, Homo sapiens
gaacaaacgcgccgactacagaggctggacgtaagcttagcggtggcgcgcgtgcgcagcgccggcccgagccatgaagatggacctacagctaaaaaatt

SEQ ID NO: 168578 - DNA, 100 bp, Homo sapiens
tcaattttggtatgcagataatcactgggctcatgggtcttgctctttacaaagagactggctctcttgcccaagctggagtgcagtggcttaatcatgg

SEQ ID NO: 168579 - DNA, 107 bp, Homo sapiens
gaccctggagcctcagttggaagcagccgatccagcctgcggagcctgtggggcaggtgaggctccaggttgggctctatgctgtgtaccttctggactggctcagc

SEQ ID NO: 168580 - DNA, 100 bp, Homo sapiens
agcctcccaagtagctggggctacaggagccgggtgtgggctgagccctgcctgattgatgctgccaaggaggagtacaacggggtgatagaagaatttt

SEQ ID NO: 168581 - DNA, 51 bp, Homo sapiens
cagggctcctgtggctcctgctggaagatgggtgtgaacctgacacgcagc

SEQ ID NO: 168582 - DNA, 50 bp, Homo sapiens
gcggtactcagccttttaaagcttgaggttgggggccgtcccgctcctaa

SEQ ID NO: 168583 - DNA, 100 bp, Homo sapiens
gtggtacgctggattcaaggatgcctggactatgatgatggatatggcactgcttatgatgaacagagttatgattcctatgataacagctatagcaccc

SEQ ID NO: 168584 - DNA, 100 bp, Homo sapiens
agaaggagaagtggagaagaaatcagtcagccgcaggtgaacggaagagtccttatgttgcagtatgctgtatagtaatggccttcagcatcctcttcat

SEQ ID NO: 168585 - DNA, 75 bp, Homo sapiens
cggccgatgaagtgcagaggtttttttctgtgacctgaccaacggtgcagatgggatgctggccacaagctccaa

SEQ ID NO: 168586 - DNA, 50 bp, Homo sapiens
tggatcttcaacggatactaattcttcagaaaccaaccccagaattcaag

SEQ ID NO: 168587 - DNA, 51 bp, Homo sapiens
atttcatccaccacattacttaggtatgcaaccactcatgtattcggttca

SEQ ID NO: 168588 - DNA, 98 bp, Homo sapiens
ttgagtctctcctgcgccgagccttcggggcgatgtgtagtgccttccatagggctgagtctgggaccgagaattgcttcagattgctggaattagcc

SEQ ID NO: 168589 - DNA, 83 bp, Homo sapiens
cccaggaatgtggtcgacgagaagccccaacagcacggcgtggcctctcagcctcgaaatgcacagcggtattgatgagtaga

SEQ ID NO: 168590 - DNA, 75 bp, Homo sapiens
cgaagctggccgcctgcggcatcgtcctcagcgcctggggagtgatcatgttgctggaaaacctcatgctggaca

SEQ ID NO: 168591 - DNA, 100 bp, Homo sapiens
atttgagaactgtaaataccaagccttgaaagggaccatggtgcggcctgtgagaaagttcaggagccctggaaaggagaaggaataagacggcaggagg

SEQ ID NO: 168592 - DNA, 51 bp, Homo sapiens
cctcaggcgtgcgcggacggtgtgcggaattacatgatgcgtaatgctgtg

SEQ ID NO: 168593 - DNA, 100 bp, Homo sapiens
acgagcagctcatcacccagtacgagcgggagaaggcgctgcgcaagcacgctgaggaggttttttgccctgacatctcttcgtcttgtgtttttacttg

SEQ ID NO: 168594 - DNA, 100 bp, Homo sapiens
ccatcatcacccaggtgaccaaccccaaggaggacgagggccggttgccgggcgcgggcgagaaagatgatgataattccgaagaaggcttccacactat

SEQ ID NO: 168595 - DNA, 90 bp, Homo sapiens
cagcgacagtacaaagaagactcttgtcacactaattgccaacaacaatgcaatagcgtttatggcagcatttagcggacacagaagcac

SEQ ID NO: 168596 - DNA, 110 bp, Homo sapiens
cgtcccagcctgacaaccttggaacagaacaagaggacaggaggtgtcgttccagacaatgcagatcttcgtgaagactctgactggtaagaccatcaccctcgaggttg

SEQ ID NO: 168597 - DNA, 76 bp, Homo sapiens
catgtctaccaggagaggagggaactgcggagcggggccgttgctccagggagaactgcaaatatcttcatccacc

SEQ ID NO: 168598 - DNA, 75 bp, Homo sapiens
gggcccaagctactggtgccagaacacagagacagcagcccagtgcaatcccgtggaccgggagcccgtggaccg

SEQ ID NO: 168599 - DNA, 96 bp, Homo sapiens
aagataaagtgttttggttttgatatggattatacccttgctgatgatgtctttctacctaaagatattgacctagacagtgtggatatggatgag

SEQ ID NO: 168600 - DNA, 96 bp, Homo sapiens
atgcaccggacactttgttattggagaaacatgcagattatatcgcatcctatggctcaaagaaagatgattatcttgacaaaagtaagctgaagc

SEQ ID NO: 168601 - DNA, 108 bp, Homo sapiens
gtgacgatgagccagagacctacgtggcagctgtgaaaaaagccatttccgaagggctcattgtcatccccaagccaggccagttctccaggtggaactgtagtgtag

SEQ ID NO: 168602 - DNA, 100 bp, Homo sapiens
tgattgcctcgcatctgcttgcctacttcttcacggagctcaaccatgaccaagtgcagaagtcccacaggatcacatgttgaatggtgtaaacagctta

SEQ ID NO: 168603 - DNA, 90 bp, Homo sapiens
ccgccgccgcctcggccgaccagggacctgcccgcctgcggctgctccggtatcaccttttgccatgatagcatttctttcattggacag

SEQ ID NO: 168604 - DNA, 100 bp, Homo sapiens
gaaaattgagacggagctaagagatatctgcaatgatgtactggggatggcattcctactgtatttgtggcagtggcaggcagaagtaatggtttgggac

SEQ ID NO: 168605 - DNA, 90 bp, Homo sapiens
acgtaaccaggatagctggagccaggattcaaggagagagattctccctgactctgctcatctggaccttttctgtgtgtctgccacccc

SEQ ID NO: 168606 - DNA, 51 bp, Homo sapiens
cgcggcgccggagttgcataagggagatgatgaagatttgataaagtggaa

SEQ ID NO: 168607 - DNA, 83 bp, Homo sapiens
cgcgcgtgcgcggacatggcctcaaacggagaggagaggcagcagcatggcgagtgtcctgtcccgacgccttggaaagcggt

SEQ ID NO: 168608 - DNA, 97 bp, Homo sapiens
tttacacagatggaaccagaaaagatacgaggctctaggagaggtatctcagatgaagacatcatcaacattactcttcctactggagtccccattc

SEQ ID NO: 168609 - DNA, 100 bp, Homo sapiens
acagctcccacgactcggccattgacacggattccatggagtgggaaacggaagttgtagagttcgagagggagacgaaacgctatgtattagaggaagc

SEQ ID NO: 168610 - DNA, 83 bp, Homo sapiens
ctggctgagccctgcgcggtcctgccgaccgtgtgcgctccttatattcccccgcagaggttgattcttcaccacactgaaac

SEQ ID NO: 168611 - DNA, 82 bp, Homo sapiens
gggtgtggatttgtcttgacgcaaccatgtccaagggacctgcagttggtattgatcttggcaccacctactcttgtgtggg

SEQ ID NO: 168612 - DNA, 75 bp, Homo sapiens
ctacttagctcagcaattcttaccttgatctctgtcgaagtttgccttacctgggaaatcagaagtgacatcttc

SEQ ID NO: 168613 - DNA, 98 bp, Homo sapiens
ctgcgccttgctccttttgtctaccttcttctgatccagacagatgtcatccgtgggtctttaagcctcaccaacctttcgtcttccatggctggagt

SEQ ID NO: 168614 - DNA, 100 bp, Homo sapiens
agggagaatttcaagaactgcaggaatggaagttggatacactttgtgacttgtacgagacactgaccattacacaggctgttatttttctcaatacgag

SEQ ID NO: 168615 - DNA, 110 bp, Homo sapiens
tcaaaagcccacttggcgatgggttacagtaagagatgttccaggtcatccagccagagcgtgcgctgtacatccaggccaacaactgcgtggaggccaaggactggatc

SEQ ID NO: 168616 - DNA, 75 bp, Homo sapiens
tgaagagggaagacacgcggaaacagaggagaacgaggagcgcacgatgattgaccccacttccaaggaagaccc

SEQ ID NO: 168617 - DNA, 75 bp, Homo sapiens
gcagctgttgggccaactacacagaccttactccccttagaacagagggcacatctgctcgataacacagagagg

SEQ ID NO: 168618 - DNA, 100 bp, Homo sapiens
gccggattgtactgtatggggactccaattgcttggatgacagtcaccgacagaagggccatgaagtacttgtcatacctgctgtaccctctctgtgtcg

SEQ ID NO: 168619 - DNA, 82 bp, Homo sapiens
cgctggcagccgcggatctcaccgccgctcaggaattcaattcgtcataatctgtccctacacagcaagttcattcgtgtgc

SEQ ID NO: 168620 - DNA, 82 bp, Homo sapiens
ccgccgtgagagaggaggggtgccggccgggattcgcggcccggagctcgggaccgacaatgcagatcttcgtgaagactct

SEQ ID NO: 168621 - DNA, 98 bp, Homo sapiens
tttatctaaacggttaggaaggagtatagatgacataggtcacctcattcatgaaggcctacagaaggtataatggacagtgggaccttggccaggaa

SEQ ID NO: 168622 - DNA, 100 bp, Homo sapiens
gtcaagttttcattgcaagaaagtagcagccgtgtttaaggctgacagataaggcagtgaaggactattccgcttaccgttcttcccttctcttttgggc

SEQ ID NO: 168623 - DNA, 100 bp, Homo sapiens
cgccgaggcgcttctgcatctgtgggccgaggcacatggtgcttctgaaggagcagtacgggcagcaggtggtcgtgaaccttctgggaagcagaggcgg

SEQ ID NO: 168624 - DNA, 82 bp, Homo sapiens
gagagtggcagaggagctggcggagagcggcctgcgggcgatcgggccgaggtgctggagaatctggtaaaagcaccattgt

SEQ ID NO: 168625 - DNA, 74 bp, Homo sapiens
ggaggaattcattttcagcagacacaagaaaagcagtttttttttcaggctcgtggtcccaagaagcatctgaa

SEQ ID NO: 168626 - DNA, 100 bp, Homo sapiens
tattctctgcagaatttctgaaagttttccttccatctctgctgctctctcatttgctggccatcggattggggtcatcctcatagaatttttaccaaag

SEQ ID NO: 168627 - DNA, 83 bp, Homo sapiens
ctcgccggggctgcggccgcccgagcaaattgtggctactaatttgccccctgaagatcaagatggctctggggatgactctg

SEQ ID NO: 168628 - DNA, 83 bp, Homo sapiens
cggaggcagagcggctgccatgtttggtgccctggttgtcagatgttggaaagcagtaggacggaacatactcttcgtggttg

SEQ ID NO: 168629 - DNA, 95 bp, Homo sapiens
tgccatgaaacccattgactactacacagagactaagatcttacaggagaggaaactggcgatggaatatgagaggagccctctggaaagaaaag

SEQ ID NO: 168630 - DNA, 75 bp, Homo sapiens
aaaatgtctgtttctctgtcgggagggagacggctgttgtaaaatggtgaccttgaggaaccctgggagctcagg

SEQ ID NO: 168631 - DNA, 75 bp, Homo sapiens
agcactggcacaagaatctgcctgtaacaatactcttcagcagcagaaacgggattaatgaaaatcaagttccat

SEQ ID NO: 168632 - DNA, 100 bp, Homo sapiens
ccagcatccctgcagccttctggtataccatcgtcaccatgacaacactaggcttgccaacaacatttgcaactttggatattgatggtgtaagaaaaat

SEQ ID NO: 168633 - DNA, 99 bp, Homo sapiens
gacaggagctgcacaagctgctggacaaggaccctgacctgcctgtcgtcgtggtggccaacaagcagactgtgtacagtgccctgggcctgagggatg

SEQ ID NO: 168634 - DNA, 89 bp, Homo sapiens
aaagtgagaggtcagactcctaagacaagttggatggcttgaggactggtactaaaaggaaacgtgactgggaggccattgccagcaga

SEQ ID NO: 168635 - DNA, 100 bp, Homo sapiens
ggtgctgtgctgcaccgtgtgcctggacctgcccaaggcctccgtgtaccagatgccaacgtccggcggtacctccagctgacacagtcagaactcagca

SEQ ID NO: 168636 - DNA, 75 bp, Homo sapiens
ccacattaagaagtacaatagcattcgcggtcagtactcctgcatttgtaccaacgaaaactcacgtgctgcttc

SEQ ID NO: 168637 - DNA, 88 bp, Homo sapiens
cggtggtgaggcaggctcgcctcctccagctgttgttgctgctggtaaataccagctgtcccctacagtgaatatgccccaagatgac

SEQ ID NO: 168638 - DNA, 99 bp, Homo sapiens
cggcggcgggcgagtgactgcggccacgcctgaaaggcgactctccttactatactggcaattgctggagaagattttgcaattgttgcttctgatact

SEQ ID NO: 168639 - DNA, 99 bp, Homo sapiens
gaagatctaaaaatgtatgaacaccttttccctgagcttgttgatgattttcagaatgctgcctttttatatggtcttggtttggtctacttccattat

SEQ ID NO: 168640 - DNA, 89 bp, Homo sapiens
gaatgatcatcaaacagctatggtgatgattagagacatactaatgtacatgctcagagtcaagatctccactgaagttggcatcacaa

SEQ ID NO: 168641 - DNA, 100 bp, Homo sapiens
gcggcggccgcgctgggcgtgaggggggccttagagggcctccccaggccgcctccgcccgtgaaggttatagctcagcaagtgtcagataaacacttgg

SEQ ID NO: 168642 - DNA, 98 bp, Homo sapiens
ctacgaggcctccatgtcccacgtggacaagttcgtcaaggggatatgagactttctactcggaatatcctgagtgttgcgtggatgtaaaacccatt

SEQ ID NO: 168643 - DNA, 131 bp, Homo sapiens
gcacctgcgcgaagctggccaaagcctgcccagacggctcacctgtgcgggatggaacaaaaggttcctgcacttggccatcatccatgaagaaaaggcactgaccatggaagtgatccgccaggtgaagg

SEQ ID NO: 168644 - DNA, 98 bp, Homo sapiens
ggaagccaggttacctctgttggacctgcctgctcccagcatctccagcaacaagctgtctctgccgggaaatcctcattgacgattcaatttgttga

SEQ ID NO: 168645 - DNA, 100 bp, Homo sapiens
gccgttcactggaagctgagggctttcaggtcacctacctcccagtgcagaagagtgggatcattgacctaaaggtcaagaaagtagtgaagactgtgac

SEQ ID NO: 168646 - DNA, 100 bp, Homo sapiens
gagcaggatctgtaaaagcataattgaatttgtttcacccccgtggattccagtgggcccgacagcgcaacagccagaagatcagctgccatgttacttg

SEQ ID NO: 168647 - DNA, 75 bp, Homo sapiens
cggatccggttcattctggacgtgcttctgcccgagacccgcggcccccacgtgcgcactccgatgacctttccg

SEQ ID NO: 168648 - DNA, 100 bp, Homo sapiens
ctcggcgtcgtggccttcagcacgttaatgcgtgtttctagctgtgtacagggactgattggctgaggactcacattggagagctgcagacaacataacg

SEQ ID NO: 168649 - DNA, 100 bp, Homo sapiens
ccagaggttacccagcagaccatagagctgaaggaagagtgcaaagactttgtggacaccccaactggaccctaggcaaaagtgagtggcactcctctgc

SEQ ID NO: 168650 - DNA, 74 bp, Homo sapiens
gcaaattgtcctgataggatcaaagacaaatggaaagttcctgttcgagaacttgtcttggacaattgcaaatc

SEQ ID NO: 168651 - DNA, 74 bp, Homo sapiens
cctacgcagagctcatcgtccttggtgttggtaaatcatgcttattgctacagtttacagacaagaggtttcag

SEQ ID NO: 168652 - DNA, 100 bp, Homo sapiens
cgcggagtgtcctggagcttgacgcgctggagcttgagagaaaaagaaggggagcgttcaattccaaacagctgctttatttggagaaataccgacctaa

SEQ ID NO: 168653 - DNA, 82 bp, Homo sapiens
ggacgctttcgatggacacgctgctcgcgctcttaatcaagtgcacgtgccggaaggacatggtcaagatctccatggacgt

SEQ ID NO: 168654 - DNA, 75 bp, Homo sapiens
tgttcgttgtgccagcgactaaaaagagaaacatgattcccgtgacagaattccggcagttctctgagcagcagc

SEQ ID NO: 168655 - DNA, 75 bp, Homo sapiens
cgtgaggctgctcttcgagcgggtggttctcttcccaaagtggaagccaaattcatcaattatgtgaagaattgc

SEQ ID NO: 168656 - DNA, 101 bp, Homo sapiens
gcaatgaaaccaggcgggtaaacatggtggacagaaagtcagcctcttgtgaggcgtagaggctccggtgttttttgtgccaattgcctgaccacaaagac

SEQ ID NO: 168657 - DNA, 82 bp, Homo sapiens
caagttaacccttaccacccagcagcagggcatcaagctcaccatggatgatgatatcgccgcgctcgtcgtcgacaacggc

SEQ ID NO: 168658 - DNA, 86 bp, Homo sapiens
cacagacacagccggggtcgggagccgcccggggcagggctcgggagagcggtttggtgccctggttgtcagatgttggaaagcag

SEQ ID NO: 168659 - DNA, 75 bp, Homo sapiens
accctggccattgcgtatttcacaggagatgcacaaaagcaaatcaccgatgttcatatggttagtgatagcgat

SEQ ID NO: 168660 - DNA, 83 bp, Homo sapiens
gcaatggatagatgccattgaacagcacaaggatatatgattggatgcctgaacaaccaaatatattccaagtggagcaattg

SEQ ID NO: 168661 - DNA, 75 bp, Homo sapiens
cttgacatttccgtggcaaccaaagacgggcgcctatcagtacacaataaggggagaccagtgtaaatttgatca

SEQ ID NO: 168662 - DNA, 98 bp, Homo sapiens
gaaatggctagaacagtttgaaatggctttatccataatgagatggcatcaacatcagataaaggtgcccaaggaagaaatgacaagaaagattctca

SEQ ID NO: 168663 - DNA, 75 bp, Homo sapiens
ggctgcgcgctgctcctcgccctcaagttcacctgcagcctgaaggacttcctgcccaaggagtatgtgaagcag

SEQ ID NO: 168664 - DNA, 100 bp, Homo sapiens
ctcagccctccacggcctccaacagcttacctgagccagccaagaagagcggtggtgacgctgattgaagacgggaagaatgactccctgccgtctgagt

SEQ ID NO: 168665 - DNA, 82 bp, Homo sapiens
agcctctacaggggcctcccgcgccccccgggacccccacgccgccgccagacctcctgccccccgaggtctgcagtctcct

SEQ ID NO: 168666 - DNA, 106 bp, Homo sapiens
ccagcaatctacagtcctggcctgaggaagcagtagaagactcagaaagtggtgtttacatgcgattcatgaggtcacacaagtgttatgacatcgttccaaccag

SEQ ID NO: 168667 - DNA, 75 bp, Homo sapiens
cactgctcctgctggccgcctggacggctcgggcgctggaggtttacccaaggtccagcctagcccctaggcacc

SEQ ID NO: 168668 - DNA, 87 bp, Homo sapiens
cggaagggtgatgtggctgcggcatcgccggcctcgctatggttgaccccctgtttacagtgccagcgccaccaccgccgatttcca

SEQ ID NO: 168669 - DNA, 82 bp, Homo sapiens
tggggaatctatagttaatcttggcgacattgacaatgatggctttgaagggcctgctttcttccccgggcgatgtgcagag

SEQ ID NO: 168670 - DNA, 75 bp, Homo sapiens
cggaaaccggtagcgcttgcagcatgatgttgaaatgcttcaggccagtacatctaacccaatccctggagatgg

SEQ ID NO: 168671 - DNA, 100 bp, Homo sapiens
tgcggaacaggacgccctctgataagcccccgagcgcccacagcatgaaggaggaggccttcctccggcgccgcttctccctgtgtccaccttcctccac

SEQ ID NO: 168672 - DNA, 101 bp, Homo sapiens
cgcccactggggatggcaaagacgacatccggtgcgccgaggctgctcacaaaagagatcatgaatcagacagataaaaatcaacaagaaatcccatcata

SEQ ID NO: 168673 - DNA, 50 bp, Homo sapiens
ccagcaagtcctcatagccagggttctgaatgatgactgacgcgggtttg

SEQ ID NO: 168674 - DNA, 88 bp, Homo sapiens
ggcggcgggagcggcgccgagaggccgtgcgggacgcgggcgccaggaccggccgaacgcagagtactatactggcaattgctggaga

SEQ ID NO: 168675 - DNA, 100 bp, Homo sapiens
gaatactggaacaatagagctcgaccttatctctgttgacttccccagaaatctggccaagtctgtaactgtggaatgaggctgagaccgtgacaagacc

SEQ ID NO: 168676 - DNA, 100 bp, Homo sapiens
tgtcctgtctggagaatgggctgctgcctcggggacagctagagcccccgctgtggacccagcaagggaagctgattggcatccaggatgggtacctatc

SEQ ID NO: 168677 - DNA, 75 bp, Homo sapiens
cttgcggtgaggctgcgcggggccgaggccgcctccgagcgccagagccgagactgtctgaagctgggcccacct

SEQ ID NO: 168678 - DNA, 90 bp, Homo sapiens
gtaatgcctggaatgatgatgtctcatatgtctcaggcttccatgcagcctgccttaccggtgacatttgctctgaactggatgatacga

SEQ ID NO: 168679 - DNA, 98 bp, Homo sapiens
aaccagtggccacagcatctttgtctagccccagtgcagacaagttggatggcttgaggactggtactaaaaggaaacgtgactgggaggccattgcc

SEQ ID NO: 168680 - DNA, 101 bp, Homo sapiens
ccggcagaggcgctctgtccgctgcagccgcgcgggtggaggaggcagagtctgaggcaggaaactgcatatcttctggtttacatgaagatggagtgcta

SEQ ID NO: 168681 - DNA, 50 bp, Homo sapiens
ctgcttcctcctcctcggcctcaccattggcagattgctactctggcttt

SEQ ID NO: 168682 - DNA, 75 bp, Homo sapiens
aaaatctcccaagaggaatgacaaacaaccagctcttcagcggggatctgatgagcttctttcttctggcatcat

SEQ ID NO: 168683 - DNA, 75 bp, Homo sapiens
cgcattgccgccggtcctgaccaccgtgaacggacagtcccccccagctgagtccacctcaggacgaggccagtg

SEQ ID NO: 168684 - DNA, 83 bp, Homo sapiens
catgcctggggttacacctaaacagctatgtttccagtgtcctctgggtgtttccaagagcaacaagaaacgaataaatctct

SEQ ID NO: 168685 - DNA, 100 bp, Homo sapiens
cttttgatcctcagcgtcgtgcccgagaagctaaacaaccagctcctgagcctcccaaaccttacaggtggacccaagtggagagattgtggaactggcg

SEQ ID NO: 168686 - DNA, 83 bp, Homo sapiens
gtcgcgtctcggaaaccggtagcgcttgcagcatggaatgtatcctgtcaggtataatgtcagtgaatggcaagaaagttctt

SEQ ID NO: 168687 - DNA, 82 bp, Homo sapiens
tccctggaggcttatctgaccacaggtgaagctgagacccgcgtccccactatgaggattttttatcaagcagaaatgcatc

SEQ ID NO: 168688 - DNA, 75 bp, Homo sapiens
gacttttaaagatgcagaggatgctttgcagaaacttcataaatatatgcagactcctcgtgaagtggcccagca

SEQ ID NO: 168689 - DNA, 51 bp, Homo sapiens
ccgagactccatcccaacaggtctttcatgaatgtagaatggaattttcca

SEQ ID NO: 168690 - DNA, 100 bp, Homo sapiens
tgagccatcttccctcctgtcactatcagcaagtcacaatcagggaagatcagttttcctgccatccaggctgctccctccttcagcaactcattcccac

SEQ ID NO: 168691 - DNA, 75 bp, Homo sapiens
aaaggttaaaggatcaagcagatggaaaatacgtcttagttgctgggtggagccgccaccaaaatgcagattttc

SEQ ID NO: 168692 - DNA, 98 bp, Homo sapiens
ggaccacattgctccaagccagatatggtacaggactgtcaacgaaacctggcacggctcttgcttccggaaccagcacctatgacagaagatctgct

SEQ ID NO: 168693 - DNA, 75 bp, Homo sapiens
gagctagccggacgtcctccgactcaagaaggacagaataacgggctcccagattcacaagccccaccaagagga

SEQ ID NO: 168694 - DNA, 82 bp, Homo sapiens
tccagccctgcccgggcgggcactgggctctccagggtcgaaggcagggggggggccctcagcctcttggccttgaacgggc

SEQ ID NO: 168695 - DNA, 80 bp, Homo sapiens
gcaaacccaaagatccccgttcctggagattctgattgagtgtcaacagcatctccaccctggagcctgtgagccggtgc

SEQ ID NO: 168696 - DNA, 74 bp, Homo sapiens
gcacagccaggacatcctggaacctgggaaagggttgatgataattagaagcatgctttccactgaacttcccg

SEQ ID NO: 168697 - DNA, 82 bp, Homo sapiens
gaaaatgcgcgtcccgggcgcgggcacagttggcgggcagctcccaggtctccatgagtacggcgccgtcgggggctccaca

SEQ ID NO: 168698 - DNA, 110 bp, Homo sapiens
agcgatgaaagagatgtctgcgtccaggggcaagttcatcctactctcgagtctaatgatgatgctcttcagtatgttgaagaattaattttgcaattattaaatatgct

SEQ ID NO: 168699 - DNA, 82 bp, Homo sapiens
gcagcccgacgttccgctgctggggaggccactgtctgcagctcccgtgaagatgtccactccagacccacccctgggcgga

SEQ ID NO: 168700 - DNA, 82 bp, Homo sapiens
gcctgcgacctgcccgcctggccccaccattgctctctctgtcttcagttccccaggagggcaatggcatcaaacagcacag

SEQ ID NO: 168701 - DNA, 100 bp, Homo sapiens
tgcgcggccccgctgagcctcggtgcggcggcgagcgcggtcgagatcgccatgcctaccctgaagtacatgcgagaagccacgccctatgtgaagaaag

SEQ ID NO: 168702 - DNA, 90 bp, Homo sapiens
gggctcccttccccctctgtgggtcccgcgaggagactctcgggctttgaggcagggaatgtggtaacaggagagatggtagaagagctc

SEQ ID NO: 168703 - DNA, 74 bp, Homo sapiens
aagctcagaactgagaagctgtcaccacagtctgaagttgcagccggagtgaagaagagcggaccgctgcccag

SEQ ID NO: 168704 - DNA, 100 bp, Homo sapiens
gccgattcctcctccttggtcgccgcgtccttggctggcgtgttggacgtgataagtatgagcctgcagctgtttcagaacaaggtgataaaaagggcaa

SEQ ID NO: 168705 - DNA, 75 bp, Homo sapiens
cctgccaatacccaccagtttgcagtgggtggacgagatcagtttgtaagtctattatcctcccagtccacaacg

SEQ ID NO: 168706 - DNA, 101 bp, Homo sapiens
ggaaccgagagccgcgtccccgagttacaggggctggtgaccgagcacgtcttcttactagacaagcaagaagtctatgtgccccaggatcctggattacc

SEQ ID NO: 168707 - DNA, 100 bp, Homo sapiens
ccccgatccgatcacctttcaaggagtcctgtgatccatcactcggattggcaggacctggggccaaaagccaagaagcatcagatggtgaaggagaagg

SEQ ID NO: 168708 - DNA, 98 bp, Homo sapiens
acctgctctattaccagaccaactacctggtggtggctgccatgatgatttccattgtggggctggagtgcaatggcaagatctcggctcactgcaac

SEQ ID NO: 168709 - DNA, 90 bp, Homo sapiens
cggggagcgcgggcgtccggggctggagtcgcgcaggtgattgtagagaaggctccaaaagccagggtgcctgatctggacaagaggaag

SEQ ID NO: 168710 - DNA, 98 bp, Homo sapiens
cggcctggagctcccagggccgaggtgaggtttttgtgctggatgatggtggggaagtagaccttgacctgggtaactatgagcggttccttgacatc

SEQ ID NO: 168711 - DNA, 90 bp, Homo sapiens
gcatcaagtggcatccatcataagatatcagacaccccgaagaactttctctcttaaagaaacccagagatccaacaaagaaaaaaaaga

SEQ ID NO: 168712 - DNA, 75 bp, Homo sapiens
tcttggccttgtctcttggcgatgactttcatctgcaggtggataagttctgaacgtcgaaaagaaaagtctcga

SEQ ID NO: 168713 - DNA, 75 bp, Homo sapiens
tggagatcgacccgtacttgaagccctacgccgtggacttccagcgcaggcttgaccactatgctatcatcaagt

SEQ ID NO: 168714 - DNA, 100 bp, Homo sapiens
cggcagccccaagaacggaaagtccctgaaaaacagctgaatgatattgaagattgtgacctcaatgtggtgagactgtgttttcaagtttttctccctg

SEQ ID NO: 168715 - DNA, 96 bp, Homo sapiens
gctgcattcactgcagagctcacttggccaatcatgatgaactaatttccaagggccaattcctgtccccccagcagcatggcatcgtgtgctgaa

SEQ ID NO: 168716 - DNA, 101 bp, Homo sapiens
cagactccagacgcgccaccacatccacgacagcgatggcagttccagcagcagccaccagagcctcaagagcacagccaaatgggcggcatccctggaga

SEQ ID NO: 168717 - DNA, 75 bp, Homo sapiens
cagccaggacggagataacaccatcttcaaggccatcaccatcgaggctgagccaagagctgatggcagccgccg

SEQ ID NO: 168718 - DNA, 98 bp, Homo sapiens
ggcggaggcgacggcagcggtcccagcggcagcagcagcggcgggaggagcctccgggtttaatggatcgagaagtggcgttgcttgctgaaatggac

SEQ ID NO: 168719 - DNA, 95 bp, Homo sapiens
gattgggctgagcagaggacgacatgttgcttttcgtggaggttgccacatgaacatcttccagcatcttgcgttctcagatgtggatgttgcca

SEQ ID NO: 168720 - DNA, 51 bp, Homo sapiens
gaagaaagatgaaacttcgagctcctctggactactgttcgaagatttttg

SEQ ID NO: 168721 - DNA, 97 bp, Homo sapiens
ggctggcctgcggcgcctgggcgctctgagatgttttactgtgcctggctaactatagtcgagggggtgatggtcctatgtgtcgcccagtaattct

SEQ ID NO: 168722 - DNA, 80 bp, Homo sapiens
aagagccaaactcagctcgcccggtttctcggcgaatgacagcacaggctagcttgtcactttctgcaaaggtttccctc

SEQ ID NO: 168723 - DNA, 100 bp, Homo sapiens
gcagtggtcgcttcttctccttggggaaagacatgtacctgatcctggagaatgacatgctcagcctggtggaccccatggaccgcagcgtgctgcactc

SEQ ID NO: 168724 - DNA, 85 bp, Homo sapiens
tggaacagctacgcatagaagccgggattgagcgcatcaagctgcagaaccttggcctgaaaatgctacattatatcagcaattg

SEQ ID NO: 168725 - DNA, 100 bp, Homo sapiens
gcgtgccccaccatgtcagacgcagccgtagacaccagctccgaaatcaccaccaagggagaagaaatgggtgaccgttggtgacacatccctacgaatc

SEQ ID NO: 168726 - DNA, 75 bp, Homo sapiens
ggtggactccttcggcagtccacccaccgccgccgcctcccaggaacctgaagggccgagaagtcctgctgtgtt

SEQ ID NO: 168727 - DNA, 51 bp, Homo sapiens
gtatgcaacctcaggcttcagccaataacaacgaacttgatgcaagtgata

SEQ ID NO: 168728 - DNA, 96 bp, Homo sapiens
tggtcgcggcggctatcgacggtctaacttcaaacttgtggctgttaattcaaaactctatgccatcggagggcaggccgtttctaacgttgagtg

SEQ ID NO: 168729 - DNA, 75 bp, Homo sapiens
ttcaactcctaccagccagatcaacacaattgatatgctgggagagcaggcaatttagataaaatccttcatcag

SEQ ID NO: 168730 - DNA, 75 bp, Homo sapiens
gctgaattctggagaaagttttttggagacaagaagaagctgtttgttttgattctgagctagatgaacatatta

SEQ ID NO: 168731 - DNA, 100 bp, Homo sapiens
caacaagcaagcatgcagcttactgcttgaaagcatatccccaccccactttttgtcctggagatctggaaagcttgcttcgtggggctcattgagtctc

SEQ ID NO: 168732 - DNA, 99 bp, Homo sapiens
caaaatctgctcccagttttcggccgaagcttgctccagtagtgattcctgctcagttcctggaggcccgggaggtcaagcgggaggccctggagtgca

SEQ ID NO: 168733 - DNA, 100 bp, Homo sapiens
ctacaatgaggcctccaatctgcaggtggccctgctcagagcccatgctggcgagcacctgctgctcggagccaccaagagatccatggtgttcaaggac

SEQ ID NO: 168734 - DNA, 75 bp, Homo sapiens
gatctcgggctcggaacgagactgcacgactctaaaatagagctcaagcttgagaagagagaaccactaaagggc

SEQ ID NO: 168735 - DNA, 95 bp, Homo sapiens
ttcccatggttgccggctcccctctcaggacaacccagatgtgcaacaaagtgcgatgattttgcaagaacgaggctcaaggatgtgagggacac

SEQ ID NO: 168736 - DNA, 100 bp, Homo sapiens
gatggtaggcgtccctggagcggccgccttccagccttcaggggccctgtcaaagttaacccgtggattgaaagatgaatcgctggcttatatctatcat

SEQ ID NO: 168737 - DNA, 82 bp, Homo sapiens
tagaacgtgcccttgagactcggcacgagcaggaacaaactcatcactgctatatatgcagattatgcccggagtttgaaga

SEQ ID NO: 168738 - DNA, 90 bp, Homo sapiens
atcttgacgaggctgcggtgtctgctgctattctccgagcttcgcaatggtggggtcctggatcggtttcgccatcatgacgcagtgtct

SEQ ID NO: 168739 - DNA, 98 bp, Homo sapiens
atgccaaattatacagcaatcgagctgcctgctacaccaaactcctggagttccagctggcactcaagtcataccctaatgatcccagcaagataatg

SEQ ID NO: 168740 - DNA, 100 bp, Homo sapiens
ggaggttttggctctgcgtgagtgtggtctacgagctgtttctcatctttatactcttccaggagggtgaggacaaaatcttcttaatcaacaagcttca

SEQ ID NO: 168741 - DNA, 48 bp, Homo sapiens
actagtctagcttcagatgaacagagtaaagctaaaacattttgagaa

SEQ ID NO: 168742 - DNA, 100 bp, Homo sapiens
tatacagaaaatcggtgaagagaggttttgaattcacgcttatggtagtgggtgccgtgagcgatgtggagatgcaggaacactatgatgagttttttga

SEQ ID NO: 168743 - DNA, 75 bp, Homo sapiens
aaagtgatgtccctctgaaaactgaggaatttgaagtgaccaaaacagcagaaatcctaagtaatgcactgaaga

SEQ ID NO: 168744 - DNA, 100 bp, Homo sapiens
aaccggtggcagaatgttcccgcgtttctggtcctcatcagtcaggttaacacagaaatctgcctcctgggccatgccgcttctaaggcctgtttcttct

SEQ ID NO: 168745 - DNA, 100 bp, Homo sapiens
tctctgctctgccctggctgggccactacagctctagaggacaaaatcccagtccttggcacaaactcaggaaatggaagccggagtctgttttttgtgg

SEQ ID NO: 168746 - DNA, 90 bp, Homo sapiens
cgggaaagggccgaatgcgatcaaacctaatccgcgagacttgctaattataccgtttggaacgctatgatgaatgcttagcagtgtata

SEQ ID NO: 168747 - DNA, 83 bp, Homo sapiens
ctgaggactgactggggttctgagactccctgtcccggaccgcagactgtgccctgtccacggtgcctcctgcatgtcctgct

SEQ ID NO: 168748 - DNA, 50 bp, Homo sapiens
gaggtcgaggatccgctcgtccgtgggtcgaacaagtaaaattacttgac

SEQ ID NO: 168749 - DNA, 100 bp, Homo sapiens
ggctgcgcggcctgcgcgcgcctcccgggcggattccagccccgagcgggacagcgcggcggggagcgacgagatcatggggttgacagcagcattttcc

SEQ ID NO: 168750 - DNA, 85 bp, Homo sapiens
gtctacgataacgcgcttttgctcctcctgaagtgtctttggtccaacgttgttccagggtgtcgtagtcattcttcagcacaat

SEQ ID NO: 168751 - DNA, 49 bp, Homo sapiens
cactggttgccttggtaggcaataaaatatttccaacttggggatgttt

SEQ ID NO: 168752 - DNA, 75 bp, Homo sapiens
tgtgacttaccttaacatgttcttgaagtaccatggcgtggattaaaagggaccatggctaaacctcctggatca

SEQ ID NO: 168753 - DNA, 109 bp, Homo sapiens
atgaacagactagccactttgcattgactggaaacaatggcatttacagaaagagtcaacagcagtggcaacagacaagttggatggcttgaggactggtactaaaagg

SEQ ID NO: 168754 - DNA, 100 bp, Homo sapiens
gcgagggtctgaagttcacgactactagaaggggaggggagtggaaaggctctcagtgaaaaaggcttggacttaaggatcagcaggagagagaaatcat

SEQ ID NO: 168755 - DNA, 75 bp, Homo sapiens
cgcagtggtcgcttcttctccttgtgatgactatgactccaagaaacgcaaacagcgggctggtggagagccctg

SEQ ID NO: 168756 - DNA, 126 bp, Homo sapiens
acatttctggctctgaaggcgaacgcttcgctggccatttaggagctctgctcaaagccagacgcccacaggtgctgagaacaagagaaatcaagtgaaggaaggaggcggagtttccaagacttg

SEQ ID NO: 168757 - DNA, 100 bp, Homo sapiens
gaattgccgaaatcacccatctacagcaacaattacaggacacagcattgttggttttgccatgtactattttacctatgacccgtggattggcaagtta

SEQ ID NO: 168758 - DNA, 101 bp, Homo sapiens
tgggatcaaatgtgagcctatggatcaaggccccatcacaggtatatggaggagtgacctactataaccccgcccagcagcaggtgcagccaaagccctcc

SEQ ID NO: 168759 - DNA, 75 bp, Homo sapiens
tgtggagcagatccgatggagaggctgagctgctccaggacttggggacatggatttgattgacatactttggag

SEQ ID NO: 168760 - DNA, 100 bp, Homo sapiens
gtgctggaggccatcttacccctggtgcagaacgatcctcgaattcagcacagaaaggcctaaagaatgtatttgacgaagcaatattggctgccctgga

SEQ ID NO: 168761 - DNA, 115 bp, Homo sapiens
acctggccaattctgacgccctcaaggtcgccaaggaggtggacccccagggagagaagtttgctgaggaatgccttcaagcacaaagtgatgaatgactgccttcaagtctcaa

SEQ ID NO: 168762 - DNA, 75 bp, Homo sapiens
ctgctgtctccttagctgctcacatatggatactttcacagttcagctgcaagctttcttcctggtggcagatga

SEQ ID NO: 168763 - DNA, 50 bp, Homo sapiens
gtgctacttctactccaagttcgttacatggacacagaacagtatgaaga

SEQ ID NO: 168764 - DNA, 106 bp, Homo sapiens
atacaaaagatcttccgggggctgcacctgcctgcctttgcctaaggcggatttgaatcctgctggagtatgatactgtgaccagggaagtaaaagttttattgga

SEQ ID NO: 168765 - DNA, 100 bp, Homo sapiens
gctgctgcagagctcggaggggcgctgtgtgtacatcacccccatggaggccctggcagagcaggtaatttcatctgtgccaaagcctccagaggacaag

SEQ ID NO: 168766 - DNA, 71 bp, Homo sapiens
tgcctccgggccttgtggcataaggtgattatcctgaaccatccaggccaaataagcgccggctatgcccc

SEQ ID NO: 168767 - DNA, 100 bp, Homo sapiens
caactggattttttaactgaagatagtgcctttcagccctaccaggctgcctctaagaatcaaacttcactcttgggagaaccaccaaaagaaattcggc

SEQ ID NO: 168768 - DNA, 90 bp, Homo sapiens
ggacagtatgaggcaagcgcagggggacggggaccagcagctgtcgccgccgctctcaggggatgtggagacgctggtagcggggccagg

SEQ ID NO: 168769 - DNA, 82 bp, Homo sapiens
ggcggaggccagagggaggagagtcaccccaaaccagaaggcctggctgctgccaagaagctttgtgagaatcttttgcaaa

SEQ ID NO: 168770 - DNA, 87 bp, Homo sapiens
ctcttgacctcacttgcagcaccaagggaagtcgagacaacatgagtgtgattttgatctgttttccaaatgcacccaaagtatcgc

SEQ ID NO: 168771 - DNA, 100 bp, Homo sapiens
cctgacctctgactcccctggagctaggactctgctccctggggctgcttctagctcaggtctggagcccccaactcccttgacagtgtacgctggagca

SEQ ID NO: 168772 - DNA, 100 bp, Homo sapiens
cgcgcgccccccgcgactggggcgcgctgttgctccacaaggcccagatcctggcgctggcaggttcatcttccttcctgtacagtattttcaaacttcc

SEQ ID NO: 168773 - DNA, 75 bp, Homo sapiens
agctgtccagatgctgaaaagagaaggtcaaacagctgaagtgagatacatgtttattcaaacacaagatacccc

SEQ ID NO: 168774 - DNA, 97 bp, Homo sapiens
gtccacagctcatcatgatggacttggagctgccgccgccgggactcccgtcccagcaggtggcgggacaggcttcattgggacagccctaacccag

SEQ ID NO: 168775 - DNA, 50 bp, Homo sapiens
gccccctcaagtatgaattccagacgccaaccccttcctccagtcggtgc

SEQ ID NO: 168776 - DNA, 100 bp, Homo sapiens
gggaccggctgccatcttagtctagggactgaggagtcgccgccgccccgagtcccggagccaccttcctcgtcacgtttggaaactcagagaaacctga

SEQ ID NO: 168777 - DNA, 100 bp, Homo sapiens
gaaagctgctcatgaactcggaacagcgcatcaaccggatcatgggctttcacaggcccgggagcggcgcggtttgaatcagcttgggtactgacaaata

SEQ ID NO: 168778 - DNA, 100 bp, Homo sapiens
cttaatttcatccacaaatcaaatctggatggaacaaatcggctgccttggagttttcataagaaattgtccctggaggtgttggatgatcacagcttcc

SEQ ID NO: 168779 - DNA, 90 bp, Homo sapiens
atctgccccagagaaagtcctcgctcgtcaccagcaagcttgcgggcttacagggatcttcagaccagggaagacatacggaatgcagca

SEQ ID NO: 168780 - DNA, 75 bp, Homo sapiens
cgaccccaacagcaggaatagctcccggttgcttatggaaccacagagaacagtcccgtgacattcgcgcacttc

SEQ ID NO: 168781 - DNA, 100 bp, Homo sapiens
acgcccgccgcgcacagagcataaagaatctgcgctgaggaggcaggagaagaaagccggtaaagtcagtgataaatcttttgtttgctgcatatactgg

SEQ ID NO: 168782 - DNA, 83 bp, Homo sapiens
gtgctactcaaggcccgggaagggttgtgagtcccggcccagcccctccacccccctgcccccccgatgcgaccatgggctct

SEQ ID NO: 168783 - DNA, 100 bp, Homo sapiens
tgctcacagctgcccattgcctaaagaaggatctggacaactctcctctgtccccaccttcaccaaggaccaaaagcagaacgcatactcgggcactcaa

SEQ ID NO: 168784 - DNA, 121 bp, Homo sapiens
cgctccctggcaccgttggcccccggagggtcgggcccagttgcggcgagcgggtacaccaggggttggaaaaaccacactaggcaaagaacttgcgtcaaaatcaggactgaaatacatt

SEQ ID NO: 168785 - DNA, 51 bp, Homo sapiens
agaacaagctatgggcacctccagcatcggtatcaagtcccattgttgcag

SEQ ID NO: 168786 - DNA, 74 bp, Homo sapiens
cgcccaggaggagcaagtccgatggagaggctaagcattcccaggactccggctctctctgcttctgtttccgg

SEQ ID NO: 168787 - DNA, 50 bp, Homo sapiens
accgggacacccgcgaggccggaaaatgcggacaaggcaaaatctcagca

SEQ ID NO: 168788 - DNA, 100 bp, Homo sapiens
agaacatacacttacatctctagataacagtctgcactttcacccgtttcagatcagaccccaacaccaacaagattcttgaaaaactgtgaagaagtgg

SEQ ID NO: 168789 - DNA, 100 bp, Homo sapiens
atggggccctggggctggaaattgcgctggaccgtcgccttgctcctcgccgcggcggggactgcagctggcagagaggctgatgacatcgtgaactggc

SEQ ID NO: 168790 - DNA, 100 bp, Homo sapiens
tgcaaatcattttgaaattgccaagtgccacatacacctgtgaagttgaagcagggaaagtataccaggtctcctcaaaagagcatatgcagcctttcaa

SEQ ID NO: 168791 - DNA, 75 bp, Homo sapiens
caaatctaaaaaatgtcccttcattgttgcactcaataagttcctggcagacatggaaaataatgtactttttcg

SEQ ID NO: 168792 - DNA, 100 bp, Homo sapiens
cctcgttacctgcaggtattgggagatccacagctaagacgccaggacccactggaagcctagaaatgttaagtgggcagaccaacatccacctcagcaa

SEQ ID NO: 168793 - DNA, 131 bp, Homo sapiens
gacggacatgggctcctgaagttgcgccgctgccggtcgggggaagagacctgacaggtatcatgaactgatcactaaatatgggaagttggagcctttggcagaagtggacctaagaccccagagcagtg

SEQ ID NO: 168794 - DNA, 90 bp, Homo sapiens
cgggagtgatgtctgtggggccgccggcggcccggcttcaggctgaaggtgatgtggccgccctcaaccgacgcatccagctcgttgagg

SEQ ID NO: 168795 - DNA, 75 bp, Homo sapiens
agcaggagggaaaatgaagaaggaacgatctcgtaagaaggattcagctacagatgcacatgttgaatggagctc

SEQ ID NO: 168796 - DNA, 88 bp, Homo sapiens
gcagcgctgccgccgcgtcctcagccaccgctccctcttcccacgtgccggtggtggtgtgcacattgagccccggtatagacagttc

SEQ ID NO: 168797 - DNA, 74 bp, Homo sapiens
cctgtggacttggaaattagtaaaggtccttggtatagtagtgggagttctccttcaggatcatgatgttcgtc

SEQ ID NO: 168798 - DNA, 100 bp, Homo sapiens
agttgagcctgatgaagaagaaatcatacatctgtcggtggcctgggagacagtttttatgaatacttactgaaagcatggttgatgtcagataaaacag

SEQ ID NO: 168799 - DNA, 50 bp, Homo sapiens
agaccgcggccgggaccgaggttttacatgtggcacccataaaagatgag

SEQ ID NO: 168800 - DNA, 100 bp, Homo sapiens
cacctgtacgcagaggctgctgtgccccaggctgcagagcccatagccaccttctatgggttaaggcaacaggttcagcagctggacatggagaaccaac

SEQ ID NO: 168801 - DNA, 97 bp, Homo sapiens
ctgctgcccggcgagctggccaagcacgccgtgtccgagggcaccaaggcggtcaccaagtacaccagctcgaatgccttcgtgcatcgctgcggtc

SEQ ID NO: 168802 - DNA, 100 bp, Homo sapiens
aaacatcagttgaaacatagggaactctttttgtcacgccagtatgaatctctgcccgcaacacatatcagatcgccaaactgaggcagcaactacaacg

SEQ ID NO: 168803 - DNA, 80 bp, Homo sapiens
cagagagggcctgggagcttgctgcagcttcagagagaagaagaaggaggttcctgctgtgccagaaacccttaagaaaa

SEQ ID NO: 168804 - DNA, 50 bp, Homo sapiens
gaagagactttccgttacatgaatactcatttcaaagaacttccaactct

SEQ ID NO: 168805 - DNA, 75 bp, Homo sapiens
catgagtcgcttcaagtttatcggttcagcgtcttccatttctttcaagctcaaatctttcactggatgttttga

SEQ ID NO: 168806 - DNA, 98 bp, Homo sapiens
gtgcccgcgtggccccttaccgcatcctgcaccagacccaggactcccaggtctactggacagtggcgtgtggttgtcggggccaaagtggtaacgaa

SEQ ID NO: 168807 - DNA, 100 bp, Homo sapiens
cccgccatgggctgctgcagctccgcctcctccgccgcgcaggtaacttgggtttttactcctgtaacaactgaaataacaagtcttgatacagagaata

SEQ ID NO: 168808 - DNA, 88 bp, Homo sapiens
cttgaccagttacggcaggaggccgagcaacttaagaaccagattcgactaatatgcaagtgaaccagtgacctgcagttctgcccac

SEQ ID NO: 168809 - DNA, 60 bp, Homo sapiens
agagctgaccaaacactaaggataggaaccaaggctttagccttctcaactcattgactg

SEQ ID NO: 168810 - DNA, 100 bp, Homo sapiens
ctttcgaggaaacttgctcaacttcctgatagatgtacactgaaaactggacattataacattaatggaatgcagtagccctctgggcctgggatattgt

SEQ ID NO: 168811 - DNA, 73 bp, Homo sapiens
ctttctccttcctgggagcctgggcgcagtgccggatggagtgctgtgatgtgccagccgagacactctacga

SEQ ID NO: 168812 - DNA, 75 bp, Homo sapiens
aatcattgatcctcttccccccattgatcattcagagaattatatccagatcgagagacagaagattctgaaagg

SEQ ID NO: 168813 - DNA, 82 bp, Homo sapiens
ctgtgagcaagaggaagctgcagcccacccgggcagccctcaccctgccaaaatgaagtttaatccctttgtgacttccgac

SEQ ID NO: 168814 - DNA, 75 bp, Homo sapiens
gtggtttggggagtctgaggccaatgtcagagaaatctttgacaaggagcgagcccagggcgtggtgctgaaagt

SEQ ID NO: 168815 - DNA, 87 bp, Homo sapiens
accacgaagcttggcagaagctctgtagtgctcatgagaaagatcagtctaaagaaaaggagaagaaagtgaaaaaaacaattcctt

SEQ ID NO: 168816 - DNA, 100 bp, Homo sapiens
gctggaaggaagatggcgcctggtggacagcaaaggctttgatgaatacatgaaggagctagcacattttctgtgacaagtttccaaacctagcagtcgg

SEQ ID NO: 168817 - DNA, 100 bp, Homo sapiens
gtctggtcggatggggcaggatggctgcgttgacacgtcttatttaatccacatcatagctattcaaagtgtgattagagctgggcttggtggcttgcat

SEQ ID NO: 168818 - DNA, 100 bp, Homo sapiens
tggacagtgacagcgatgctgaggatcgaggaacgttgtctggtcaaaatgcagatcttcgtgaaaacccttaccggcaagaccatcacccttgaggtgg

SEQ ID NO: 168819 - DNA, 83 bp, Homo sapiens
cctacaatccatcctttgaagaccaccagcgagcagctgatgcagctgtacagtgcgcgccagcggcggcggctgaaccgggg

SEQ ID NO: 168820 - DNA, 100 bp, Homo sapiens
gggacccacaacctttaagcagcagaggagcacgaggatcgtgggagctaagaaagtgtgaacatggctacgcctcttcattcccgtccatgccgagccc

SEQ ID NO: 168821 - DNA, 75 bp, Homo sapiens
gacccagctattgctgcagcatttgccaaggagacatccctcttagaccgcaacagatgaccaaggaagtttggg

SEQ ID NO: 168822 - DNA, 80 bp, Homo sapiens
catcagccggcagcccgggcgggtcccggggtgcgagcagcgcacttccgatgctgtgggccctgagggaaaggatcaca

SEQ ID NO: 168823 - DNA, 75 bp, Homo sapiens
gtccaccagggcctccatgagccgacacatgcggcgcaagcaccccgagatttggagcaagaggtggtggtggcc

SEQ ID NO: 168824 - DNA, 83 bp, Homo sapiens
aagaggacgcacactggagaaaagccttttcagtgtgatactgtgccctgtccacggtgcctcctgcatgtcctgctgccctg

SEQ ID NO: 168825 - DNA, 51 bp, Homo sapiens
gggactgggagtcgttagtgaggttcatgggcgggggtggtgagagctgca

SEQ ID NO: 168826 - DNA, 75 bp, Homo sapiens
ctgatcaagtatatgactgaagaaggagccaggtgagaatttcaaggattatcgacttcatattgcacattaaag

SEQ ID NO: 168827 - DNA, 75 bp, Homo sapiens
cggcgaacgcggagagcacgccatgaaggcctcgggcacgtacctggagtagaacagaaaaattattatgtctgt

SEQ ID NO: 168828 - DNA, 100 bp, Homo sapiens
tccgtaatgagagcccggaaccactctttgtgccgcagcttcgcaggtcagttcaccgggacctggaggcccagattgcgatcgtgacggagaaccaggc

SEQ ID NO: 168829 - DNA, 84 bp, Homo sapiens
aaggtctacagagcggcctgcgccagcgaatgcggcattccaaaagaactcactgtcctgattgggatagcagagaaagctggg

SEQ ID NO: 168830 - DNA, 75 bp, Homo sapiens
aagccgcctctgtattacttaccagtgagacggtttaagcggaagcatcttactgccattgactgccagcatttg

SEQ ID NO: 168831 - DNA, 50 bp, Homo sapiens
attcattccgttatcctaaaacagagaggcgaaaaaaggcttcagcatgg

SEQ ID NO: 168832 - DNA, 50 bp, Homo sapiens
ggagcaccaggagactgcctatgatgagttctggttctccgatgggtcct

SEQ ID NO: 168833 - DNA, 100 bp, Homo sapiens
ggccccgcccccgccggttcgcgtctctctgctgcggcgcggggaccgctgtgctctcggtgatagaattacctcttacaaacccagagttatttcagcg

SEQ ID NO: 168834 - DNA, 82 bp, Homo sapiens
actcctctatgatgaagaagaccttgaaatgcatccgctggtcgctgccggaaatggccagagcagcccgacggccatggag

SEQ ID NO: 168835 - DNA, 100 bp, Homo sapiens
aacgcggtctgcaagctgacgtatgtttacccaaggtccagcctagcccctaggcaccatgtcggacagtgatctaggtgaggacgaaggcctcctctcc

SEQ ID NO: 168836 - DNA, 75 bp, Homo sapiens
cagagcaccaggcccaccgtgaaagctgccactgcagagccccgccatggaagacacgccgttggtgatatcgaa

SEQ ID NO: 168837 - DNA, 123 bp, Homo sapiens
tgtgggacttcgaaggagggctctcctgtctgccaccatcctgggttgacaattctacacaaggaggtccgtggcactcaggtagttggttctgacatgactgtgacagttgagtttaccaat

SEQ ID NO: 168838 - DNA, 100 bp, Homo sapiens
gaccacttttggaccaaaggcctgtgtgctgcagaacccccagaccatcatgagccagagccaggatttaagcgcctggcttggggccagcctgtgggcc

SEQ ID NO: 168839 - DNA, 90 bp, Homo sapiens
cggggctgtggcaggggcgggcgcggccaccgggaccggcgtgggagcgacgccagcgcctcaacagcttgaccacatattatcccctcc

SEQ ID NO: 168840 - DNA, 100 bp, Homo sapiens
atattatacagtgcgacagctagaattggaaaaccttacacaacacagtcactcctggcggcaaaccaaacaaaaccagagtcatctggggaaaagtaac

SEQ ID NO: 168841 - DNA, 82 bp, Homo sapiens
gcgcgtgcgcctgggggcaccgctgccgttccgagcaatggctgccatccggaagaaactggtgattgttggtgatggagcc

SEQ ID NO: 168842 - DNA, 75 bp, Homo sapiens
ctgctgcagaggtggctgatgcaggtctaaagacattgccctcacagagtgaaatgatggcagaaatatctaaag

SEQ ID NO: 168843 - DNA, 75 bp, Homo sapiens
gcgcttcgtgcaccggggcggtccgttgccaaagccagcaaagtgcagaggaaagttccacttccagaaaaagaa

SEQ ID NO: 168844 - DNA, 75 bp, Homo sapiens
agatgggatctttccggatcaatccagatggcagccagtcagtggtggaggttggagtgcagtggcgtgatctcg

SEQ ID NO: 168845 - DNA, 80 bp, Homo sapiens
atgatagagcagagtggaccaccccatgaacctcgaatggcttcagttctgtgcaggccacgcagttacagaccacacaa

SEQ ID NO: 168846 - DNA, 50 bp, Homo sapiens
ctatgccggcatcttccatttccagagcactgcagtttcctcctgaaggc

SEQ ID NO: 168847 - DNA, 100 bp, Homo sapiens
gttggaggctggcagcgaagaagatcgaaaattaaacctcagaatctgaattatccagaacagaaagttgtgactgttggacagttcaaaattggtctga

SEQ ID NO: 168848 - DNA, 51 bp, Homo sapiens
cttgactggctccttttaactggatatgttaaggtgagctcatcgattcag

SEQ ID NO: 168849 - DNA, 98 bp, Homo sapiens
tctatgagaactacaacaagttcatctcagccacaggcctacagattcctggaggagatgcggcggcggcttcccttggccaacatgtcctactacgt

SEQ ID NO: 168850 - DNA, 82 bp, Homo sapiens
tgtggtctctgcacctcctttctttccagtgtctcgccccatcctcaccctcagggttcccagggcccaggctgtggtgggg

SEQ ID NO: 168851 - DNA, 75 bp, Homo sapiens
tgaattttgtggatgatttggaacctttagacaaagctagtaaaggtgttggaaatcaatagctcttctagcctt

SEQ ID NO: 168852 - DNA, 75 bp, Homo sapiens
gacctcagcaacctgcacttgaaccggcactgtgagaagagattatatctgtccaagatgcgagtctggttttat

SEQ ID NO: 168853 - DNA, 74 bp, Homo sapiens
tcttgtttgtggatcgctgtgatcgtcacttggaccaagaatcgccttcagccctgtctggtgcatccttggca

SEQ ID NO: 168854 - DNA, 97 bp, Homo sapiens
ccggcgctgccaacggaagggcggctgagatatggggagcctacactccggagggctgtacctttagcactggccctcatctctgtttcaaatccac

SEQ ID NO: 168855 - DNA, 100 bp, Homo sapiens
ggaaccagcagcaaagaagtgctatctggaaagagaggagcggacaggggtgaagatggtcatgatccaggatggcccattgcccacgggagcagacaag

SEQ ID NO: 168856 - DNA, 100 bp, Homo sapiens
gccctccccccatggccaatggaaaacctggcgaccctaagtcagccatcatctgccctccaccatccatacctacgtttgcaacacttcgtgtttataa

SEQ ID NO: 168857 - DNA, 74 bp, Homo sapiens
ccccggcggcggcacgatgccctttgacttcaggaggtttattcttcagtccaaggaagcaattcacagtcagc

SEQ ID NO: 168858 - DNA, 87 bp, Homo sapiens
gaaactctacttgtgcatgagaagaaagaagcagttgacctcactcaatatattctgcagtcatccgtccttggctcaggatttgga

SEQ ID NO: 168859 - DNA, 82 bp, Homo sapiens
gccaaaacttggaagtcactttccaaacagattcaagatggaaaaggtgatgtaaccattacaaatgatggtgctaccattc

SEQ ID NO: 168860 - DNA, 117 bp, Homo sapiens
ctatcagcaggctccgggctgaagattgcttctcttctctcctccaagaggtgaatgacgggctgtgcaacctgctcatcgcgccctgcaccatcatgaagccgcagacgctgggcc

SEQ ID NO: 168861 - DNA, 75 bp, Homo sapiens
gaatgtctttcctaccatctaaaatacgaaggtttctggctggctctttcgacgtgtagcagcagctttgccggg

SEQ ID NO: 168862 - DNA, 100 bp, Homo sapiens
actcgcttcatcaaggaaggcaagcctgcctgcttctgcatcgacagatagccgtcttcagcttgagccccatcactagaaaggtgggagacaatgcctt

SEQ ID NO: 168863 - DNA, 100 bp, Homo sapiens
cacaacatgcgatgtttggaaatgatacaattacctgcacgacacatggaaattggactaaattaccagaatgcagggtgaagctgtggtctaccaatct

SEQ ID NO: 168864 - DNA, 90 bp, Homo sapiens
tcagtagggacaacaggcaggagaattatgggagcgcatttccccaggtatctggagtccatctttcaccatcttctcctgagattgtac

SEQ ID NO: 168865 - DNA, 83 bp, Homo sapiens
gaggatgcggacgcggaggccgcctggggtagcggcggcgggagtcctggcgctctgcagatcttgatgtggaagaaatggag

SEQ ID NO: 168866 - DNA, 116 bp, Homo sapiens
cggcgccgggcactgagcaccgccaccatggggaaggggctttggaaacatgatgagcaaggagaagcgagaggctgtcagtaaagaggacctggccagagcgactttgatcacca

SEQ ID NO: 168867 - DNA, 90 bp, Homo sapiens
tagacccacagctgttaaagcaacagcacagctgaaggtttaacaagaaaaaatatgtcagatgtcagtgggtggcaaacatttttacaa

SEQ ID NO: 168868 - DNA, 101 bp, Homo sapiens
ggggaactgccatggggcctcgatccctgggaacctatgggcagggaggctctcagaggtatctgtccagatgatccgagccgcgccgccgccgctgttcc

SEQ ID NO: 168869 - DNA, 98 bp, Homo sapiens
agcccgctgagcaggatgagggtttggaagaggacagttgccctttattctggcggcagatagcagcaggtgaaaaagtgctacacaagtttgatgtt

SEQ ID NO: 168870 - DNA, 75 bp, Homo sapiens
gctgctgtcccgggcctaccccctggactccctggagaagcagatggaaaaggagaagtttgaagtgcagcactc

SEQ ID NO: 168871 - DNA, 83 bp, Homo sapiens
ttgtcctggctcttgccctcatcctggttctggaatcctcagttcaaggttgtgaccgagattcccgacgagagagactgagg

SEQ ID NO: 168872 - DNA, 100 bp, Homo sapiens
gcaaccattgacgccatgtcgggttattcgagtgaccgagaccgcggccgggaccgagggactggtaccatcagtcctatgactgcgtctgtgtcatgtt

SEQ ID NO: 168873 - DNA, 74 bp, Homo sapiens
gcatgaaatggaagagagggtggtgcggatagcttgaggaagcccccagtgagcctttgctgtgcaaattcgct

SEQ ID NO: 168874 - DNA, 96 bp, Homo sapiens
cggaggggcccagtgtggacggggccaccggctggagcggatcccacacctccggaccgagggacgcgggaaccttgggtaatgtggaacatggga

SEQ ID NO: 168875 - DNA, 75 bp, Homo sapiens
gcaaaggatgagcggaaccttggaaaagagtgagcgattacagtctgacctggtagtatgcattgtaattggtgt

SEQ ID NO: 168876 - DNA, 90 bp, Homo sapiens
gcgactcggttaagggaaagcgccgagatgacgggctttctgctgccgcccgcaagcagaggggccctggcctccagtctgagtgctgac

SEQ ID NO: 168877 - DNA, 110 bp, Homo sapiens
cctgaatggctgtgatactggacatgcaaaaatcacatgtggctatgaccttcctgcaaaatggaaatcctcattgacgattcaatttgttgaaggccaatttgtggact

SEQ ID NO: 168878 - DNA, 101 bp, Homo sapiens
cggaggccaaacacaccgtatttcatctgtagcattcaagacttcaaactgattgccacggcagtgaagtttctacagaattcccgggtccgccagagccc

SEQ ID NO: 168879 - DNA, 75 bp, Homo sapiens
cgggagcctagatcctgtgctttactctgaagactctgcctgtccattggggtcctggacatcttcgggtttgaa

SEQ ID NO: 168880 - DNA, 83 bp, Homo sapiens
gctgagtttacttctcctccttctttgttcaagactgggcttccaccgagcagcgagcccacagcctcggtgccccccgagtc

SEQ ID NO: 168881 - DNA, 87 bp, Homo sapiens
atgtcggaggagaagctgcaggagaaagtcaccaccaagtaagcgaagaaaattagagaaaccgagaaaacccataacattcgtggt

SEQ ID NO: 168882 - DNA, 74 bp, Homo sapiens
cacctgtccagcatccgaccaccgaggctggagggggagaacacccagaagtcaatgaaaggattctattttgc

SEQ ID NO: 168883 - DNA, 100 bp, Homo sapiens
gagtccgatgggcctcggggttctgaagttcataccacctccgcagacgcccccaaacaaggtgtgctgggtgcatcatgtaactggcatgtgggtgtac

SEQ ID NO: 168884 - DNA, 100 bp, Homo sapiens
tccctcactaccgaggccctcagcttcgcgaagacgcccagctccaagaacacactgttgcagcagctaggagtggctcctttttctgagggcccttggc

SEQ ID NO: 168885 - DNA, 90 bp, Homo sapiens
ccgcgaccactggcacattcttgctgacaggaaatgcttccagactgcacacttttacttagaggacagtacatcccctagagttatatc

SEQ ID NO: 168886 - DNA, 75 bp, Homo sapiens
aggcctacgcagagctcatcgtccttggttaatttggagtggcccctggagtcagtttcctacaccatccgaggc

SEQ ID NO: 168887 - DNA, 95 bp, Homo sapiens
tccagcgtggccttcagttctgcacacgtgcgtcaaaggaatggaagttggatacactttgtgacttgtacgagacactgaccattacacaggct

SEQ ID NO: 168888 - DNA, 76 bp, Homo sapiens
ctttcacggacaacctcagaggacaacgaagtgttcgttgatattcactgatggactccaaagaatcattaactcc

SEQ ID NO: 168889 - DNA, 111 bp, Homo sapiens
cgagttccccgaaattgacggacaagtcttcgactacgtgaccgagcgcctcacgaagacgtccaggtgtggcccgtgggcacgtttttgcaaccggttcgttgatacctg

SEQ ID NO: 168890 - DNA, 75 bp, Homo sapiens
ggaattcgcgctgctcgccgacaaggctgcacaacagcgcccgggggctggagaaggccaggcagcagctgcagg

SEQ ID NO: 168891 - DNA, 83 bp, Homo sapiens
cgcgcgagctctacccagtcgagtaaaatgtttattggaggcttgagctgggatacaagcaaaaaagatctgacagagtactt

SEQ ID NO: 168892 - DNA, 140 bp, Homo sapiens
ggccggggcatttgatctcaaggctgccgtactggaggccatgactgccttccgcagagcaggatcttgtgctgtgaagacatttcccaagtgcttcatgttagccagcaaatctgacccacaaggcctggaaagaggtg

SEQ ID NO: 168893 - DNA, 83 bp, Homo sapiens
aagctttgttaggttctgctggtcacacaaccctcgggatcacacttatgattgaatccaggagtcctccagctgagaacgag

SEQ ID NO: 168894 - DNA, 83 bp, Homo sapiens
tgcagcgggagctggacggcgagcgcgagcggcgcgagaaagaatgtcggattgcacatcctattgtaaaatgtacttactgc

SEQ ID NO: 168895 - DNA, 50 bp, Homo sapiens
cagccgtccggagccagccaacgagcgacacttccctctgtgaccatgaa

SEQ ID NO: 168896 - DNA, 98 bp, Homo sapiens
gggtctgtgactacaacatattgctgcaatcaggaccattgcaataaaatagaacttccaactactgattctcttcctggacattctgttgccctctg

SEQ ID NO: 168897 - DNA, 75 bp, Homo sapiens
gaaacagttaatcgtgatatcccaccccttacagatgatgaagaacgagagcttcaaatggatcctgcagactat

SEQ ID NO: 168898 - DNA, 100 bp, Homo sapiens
gatctgcccgttgtgtttgtgaaacagagaaagataggcggccatggtccaaccttgaaggtgtgagttcttgatacgaatgaaaggccaagagtttgtt

SEQ ID NO: 168899 - DNA, 80 bp, Homo sapiens
acaggtcaggaagcagaatattccttatatggtaaaatgatccattctatggtagctcacttggatgctgttacaagtct

SEQ ID NO: 168900 - DNA, 82 bp, Homo sapiens
gccacaacttcattgctgggaaaaggaactgtggctgcaccatctgtcttcatcttcccgccatctgatgagcagttgaaat

SEQ ID NO: 168901 - DNA, 83 bp, Homo sapiens
gaagccggcatgctggagaagctggagttcgaggacgaaggcggtgcgtctttctacgtgaataggattttgtggctggccag

SEQ ID NO: 168902 - DNA, 88 bp, Homo sapiens
cgcccctcaccccccgagagccgcatgcagccagtaaagatcccagagaagttcgagaagctagagatcataaggaaccaaaagagga

SEQ ID NO: 168903 - DNA, 82 bp, Homo sapiens
cctgtctgacttcctggtcaagacctacccgcgcctggtgcgccagggggatgctgagaacttgctggagtcacagccactg

SEQ ID NO: 168904 - DNA, 82 bp, Homo sapiens
gcaggagtcccctggagctggagcccgaggccaagaagctctgtgcgaagggctccgttttaaaagaaggtagacagctgac

SEQ ID NO: 168905 - DNA, 100 bp, Homo sapiens
aagaagaaatgtgcagatcctgatttgaatgctgtcctttataccaaccgggcagcagcacagtactatctgggtgtcatggagaaactccagctgggcc

SEQ ID NO: 168906 - DNA, 97 bp, Homo sapiens
ttctggccaaggtgattcagattgcaacgtcatcctccacagctaaggccccatcacaggtatatggaggagtgacctactataaccccgcccagca

SEQ ID NO: 168907 - DNA, 98 bp, Homo sapiens
tccccgcggggcgtgcagctccgaagctctttggacctagcaggttcggcggccggggtgctaagttccctattaagtggacggctccagaagcaatc

SEQ ID NO: 168908 - DNA, 100 bp, Homo sapiens
tggtcccggaacctctcgtaaaccagacgcaaacatgcagatctttgtgaagaccctcactggcaaaaccatcacccttgaggtcgagcccagtgacacc

SEQ ID NO: 168909 - DNA, 71 bp, Homo sapiens
gcgagtgaggaaaggaggtactgtagggtatcggtacagcaatcggagagctgcctccatatttcatggcc

SEQ ID NO: 168910 - DNA, 83 bp, Homo sapiens
cgcgggtcggcagcgggagggcgcgcggccgagcggaggcggagtcggcgccgagaacatggattatttttacccaagatact

SEQ ID NO: 168911 - DNA, 75 bp, Homo sapiens
gtcctcgtcagcactgactttcagctatggaatcgttcaaaaggtgatgacctatcaacagccattctcaaacag

SEQ ID NO: 168912 - DNA, 51 bp, Homo sapiens
cctaaatcgaagttctttgagctaatccagtgtgatgccattagtgtattg

SEQ ID NO: 168913 - DNA, 101 bp, Homo sapiens
gccctgctgacttcgaccagcggccctggtttccatctcatgctccctttcatcacatcatataagtctgtgcagaatgagtccctggaacgccagatgcg

SEQ ID NO: 168914 - DNA, 85 bp, Homo sapiens
cggaggaggcgtgccctggcatctccgacaccatggtggcccagctcgtgcagcggctccagagtacaaaattggacagctgtac

SEQ ID NO: 168915 - DNA, 50 bp, Homo sapiens
ttctctaggccttttagaaaacatgatccaggtccagagagcatcgcaga

SEQ ID NO: 168916 - DNA, 105 bp, Homo sapiens
gccagggaaccctggtcaccgtctcctcaggttaatttggagtggcccctggagtcagtttcctacaccatccgaggccccacccagcacgagctacagcctcca

SEQ ID NO: 168917 - DNA, 90 bp, Homo sapiens
aacaaaattctgaactcaggacttggcaagtggtgttcccactgatgaagagcaggcgactgggttggagagggagatcatgctggctgc

SEQ ID NO: 168918 - DNA, 100 bp, Homo sapiens
cctgcttggagacggacttgcttccggagttgctctgaaacctaccgcatgccagtgatggagtacaaaatgaatgaaggtgtttcatacgaattcaagt

SEQ ID NO: 168919 - DNA, 100 bp, Homo sapiens
gcaccgccgaggacaaccgcagccacagcgcccacttctttgagtttctcaccaaggagctagccctgggccaggaccgaaacattgtcaattgttgctg

SEQ ID NO: 168920 - DNA, 48 bp, Homo sapiens
cagcggagaataacatatcttcaggaccgtataatagacgctggcccc

SEQ ID NO: 168921 - DNA, 74 bp, Homo sapiens
aagcatgtggtttggcacccaagtcaggagatgaggagcgggaaggcctcctgcaccctggagaccgtgtggga

SEQ ID NO: 168922 - DNA, 75 bp, Homo sapiens
aacagttggccaatactggtgcccaagcctggattaaaaagaaatgcactcggtgatggaaagagagccactatt

SEQ ID NO: 168923 - DNA, 75 bp, Homo sapiens
cgcaacctggagaacgccaagcgcttcgccatcgacatagaacacagatatgtagaactcttcttgaattctaca

SEQ ID NO: 168924 - DNA, 73 bp, Homo sapiens
ccagctcaagaaaatggtgtccaagtggatatcttgacctacgtggcttggaagataagtggttttcccaaaa

SEQ ID NO: 168925 - DNA, 82 bp, Homo sapiens
actacccagggagaggaattacgggaacagaaagaaaagtccgaaagagctgatagtttctaatggtgatgaacaattggaa

SEQ ID NO: 168926 - DNA, 100 bp, Homo sapiens
agtcaccgcaccgctcccgggatcatggtgttctacttcaccagcagcagcgatgtgtcttgctgaatcagggctctcttatccctgccatcgacttaca

SEQ ID NO: 168927 - DNA, 51 bp, Homo sapiens
ggaacgagccaagaaatttccaactggagatgcatcaatctcaaataattc

SEQ ID NO: 168928 - DNA, 75 bp, Homo sapiens
ggactgcagtgctgcagtgccagaagacttgcactatctgccagatgctgcttcctaaccagtgcagttatgcat

SEQ ID NO: 168929 - DNA, 100 bp, Homo sapiens
cgatctgcaccgggggaagcgcatggtccacaaggcgattacaatttccagtcccctaaccacagacctgactgcagagctgtctggtgggccaaagaat

SEQ ID NO: 168930 - DNA, 100 bp, Homo sapiens
cggatcaatccagatggcagccagtcagtggtggagggtggagccagccatcctgagacgtccgtacagcccgtactggtggagtgtcaggaggccactc

SEQ ID NO: 168931 - DNA, 75 bp, Homo sapiens
aaggggattaacatcagcaatagattggaaccaaccagatggctgtgtgtgccaaagcacagaacaaacctttct

SEQ ID NO: 168932 - DNA, 83 bp, Homo sapiens
cgcagggcctgcagcgggagctggacggcgagcgcgagcggcgcgagaaaatcttcgtgaagactctgactggtaagaccatc

SEQ ID NO: 168933 - DNA, 100 bp, Homo sapiens
acggattcatttagagctgcggaacaggacgccctctgattttgggagagcccatggtgactgcgtgagtggagcccagctgtgtggatgccccagcatg

SEQ ID NO: 168934 - DNA, 90 bp, Homo sapiens
ggctccaccccttccacgtcatccgcatcaacaagatgttgtcctgtgctggggctgacagtgacagcctcatcaagggtaagaaatgag

SEQ ID NO: 168935 - DNA, 100 bp, Homo sapiens
cttaatcctactcagaagaacttgtacagagatgtgatgttggagaactatagcaatctggttttcttggggatagctgggagtatggccaccctgctcc

SEQ ID NO: 168936 - DNA, 100 bp, Homo sapiens
gtggatcctttcatttctcagctccctggattccttcccctaaattaggacctattatttacctgtaggtaagcggaagggtacagccaatgcccgaatg

SEQ ID NO: 168937 - DNA, 100 bp, Homo sapiens
cgagcggcgagccggagcgcggagcccggctcccgcaccatggaggaggacgacagctacgggctcttccgtgggcggcggcttcgcgggcttggagttc

SEQ ID NO: 168938 - DNA, 75 bp, Homo sapiens
cgggtaggggggctggagagcccccaggtggaccatggcggtgagattccaggaggcatacacggaatacctgag

SEQ ID NO: 168939 - DNA, 96 bp, Homo sapiens
caactcgaggggatctccctaggtcctggggcctctctcaagagtcagaatggcggcagtggagcatcgtcattcttcaggattgccctactggcc

SEQ ID NO: 168940 - DNA, 100 bp, Homo sapiens
aggaagaatccttgggacaggtgaccgaccaggtggaggtgaatgcccagaacaggtccaggtgcaggtacagcagtctccgcaacaggtctcggctcag

SEQ ID NO: 168941 - DNA, 100 bp, Homo sapiens
accaggacagaaaagacagtgttctgctttcatggagttcacagaagagtcgaggagactacacttgctgctttgaaggatgaagttgtatctgttgaaa

SEQ ID NO: 168942 - DNA, 100 bp, Homo sapiens
caagctgtctggccacccccaaagacaaaagacacagaagaaaaagtgggactgaagtacactgaagcagcctgatcctgcctgaagatggtgccactgg

SEQ ID NO: 168943 - DNA, 50 bp, Homo sapiens
gccaaggggtccttctactcctaagaaccatctctttttgctgttgccaa

SEQ ID NO: 168944 - DNA, 75 bp, Homo sapiens
cgggcaggggacgcggcggagctgcgcaagaggaattccagggaagaaatgtggtacaatcatacttacagcaga

SEQ ID NO: 168945 - DNA, 95 bp, Homo sapiens
attcccagaagaggcagcatgcggaaggcattgctgggagcctgaaaactgtgaatgcttacagttgaacatgagtcttcttatgattagtgaga

SEQ ID NO: 168946 - DNA, 75 bp, Homo sapiens
ctgtactctggtggcttccagtggaaaaggcattttggaggcagcaagaggtggaaacatacagaagaagcaagg

SEQ ID NO: 168947 - DNA, 100 bp, Homo sapiens
tccttctggaccaggctctcctctctcaatttctggatatgtgcatggatctgaaagttcatcctgaacaggaaaagaccccattgaccccagagcagct

SEQ ID NO: 168948 - DNA, 75 bp, Homo sapiens
gtgaccgagagcgtgaccgagagcgcgaatatcgtcatcgttagaagttcccagtgacctgacagcagaggagcg

SEQ ID NO: 168949 - DNA, 97 bp, Homo sapiens
caggatgtgaccgcagagcaccacacgagcgatgacggtatggcatttcaaatatagatacaaccattgaaggaacgtcagatgacctgactgttgt

SEQ ID NO: 168950 - DNA, 113 bp, Homo sapiens
aaacacaaaaagaatgcggcaagagttgctttgttagaacaactggggacaaccctggatatgggggaactgagagatccaaatcagaagatagtgctgaagcatatactagc

SEQ ID NO: 168951 - DNA, 95 bp, Homo sapiens
aagagcaggaagtcattacatggtctgggatctgccgatatgggggatatgaagacccctgattttgatgacctccttgctgcctttgacatccc

SEQ ID NO: 168952 - DNA, 74 bp, Homo sapiens
ggccgagcaggctgagcgatacgacggggatttgggagcagcttgtcttacacaaggacgaaggaaaaggtcag

SEQ ID NO: 168953 - DNA, 98 bp, Homo sapiens
ggacgcaccgctccagccgcccgcgggccagcgcaccggtcccccagcggcagccgagcccgcccgcgcgccggtttacccaaggtccagcctagccc

SEQ ID NO: 168954 - DNA, 98 bp, Homo sapiens
ttcagatattttccgacgagcatttgcttcccgagtatttcctccagagattgtggagcagatggatgttttctggcaaaggccttcctgcatttatg

SEQ ID NO: 168955 - DNA, 100 bp, Homo sapiens
atggcggcttgtccctgtttcgccacagttcctaccttatgagctcggttttcttatgcttataagagtggaacaggtggttgtgtcaaaccgattggtg

SEQ ID NO: 168956 - DNA, 50 bp, Homo sapiens
aacatatctacaatctcggtactacaggtcgcccggctcatggagatggg

SEQ ID NO: 168957 - DNA, 74 bp, Homo sapiens
caaggcatacatgcagctggtccaggtgcctagagagaaccatggagtctggcagtaccgccgccagtgaggag

SEQ ID NO: 168958 - DNA, 98 bp, Homo sapiens
ggggcagctggagagtttggagccctgcagactgtccgcctggagcgttacaaggccttctacattaccggtgttatcttcaggaaggcacactggac

SEQ ID NO: 168959 - DNA, 100 bp, Homo sapiens
tctgcacttcgcattttggcattgacatttaattttagggtcctttatatagaagggagagtagctccggctcccaccttgtctttgtcccgtcattgag

SEQ ID NO: 168960 - DNA, 104 bp, Homo sapiens
cgtccatccatttcgtggttcacccgctgccgggcaccgaggaccagctcaatgacagagatcatcttcagacaccaacgaaagtgaaataaagtcaaatgaag

SEQ ID NO: 168961 - DNA, 98 bp, Homo sapiens
ggaattttgagctgggggagctgatccgaaaccaccgagaacaggatgtgggccagcgagaccgaggagaatggctccgacagcttcatgcattccat

SEQ ID NO: 168962 - DNA, 90 bp, Homo sapiens
cagaagacagagggttttcttttgagtacctggagtagaacagaaaaattattatgtctgtgttcccttgggactcattggaaattgtac

SEQ ID NO: 168963 - DNA, 75 bp, Homo sapiens
gaaaagaactgaccccatcctttcattaagagtagaatgcatgattattgccaatgatgccaccgtcaaaggagg

SEQ ID NO: 168964 - DNA, 82 bp, Homo sapiens
gacaagccgctggcagccgcggatctcaccgccgctcagggcgagaaccactgtctctgatcaacgtgcggaagaggaacgt

SEQ ID NO: 168965 - DNA, 96 bp, Homo sapiens
cttgcccaaaccacgatgggaatagctcccccatccaggaatccactgctcccgagctgccttcggagacccaggagaccccaggccccgccctgt

SEQ ID NO: 168966 - DNA, 82 bp, Homo sapiens
cccgcgagtggcgcgccggggatgcttgggcactgtttaaaggaaagttccgagaaggcatcgacaagccggaccctcccac

SEQ ID NO: 168967 - DNA, 51 bp, Homo sapiens
gggagactggagtcgaaggccgtgaggttgggggccgtcccgctcctaagg

SEQ ID NO: 168968 - DNA, 96 bp, Homo sapiens
gtgaagcaagggtacgtgaggatccggagcagacgcctcgggggtaaaggcagcagtaatgctaacgctagcaagtaaactgaagcgtgacgatgg

SEQ ID NO: 168969 - DNA, 98 bp, Homo sapiens
atgaccagaatctagaagagccatccagatatgataaatgaatgattctgccttttgttatgtgcgtgaacagaatggaacaactcaagtagcttcat

SEQ ID NO: 168970 - DNA, 118 bp, Homo sapiens
ccgtgacccgtgtattattgtccgagtggccggaacgggagccaacatggcagcggggttcgggcgatgctgcagggacagagcgggatgccaccagcttgtccaaagggaagttcca

SEQ ID NO: 168971 - DNA, 100 bp, Homo sapiens
aagatgagctccttgggaatctgtcagaaacagaactgaaacaactggaaactgttttggatgatcttgaccccgaggactgggctaatgctaatgtcag

SEQ ID NO: 168972 - DNA, 90 bp, Homo sapiens
cgaggacataaggaactagtcacagtgttgctgcaacatagagctgacattaactgtcagctgatggtgagaccattctaaaaggcctcc

SEQ ID NO: 168973 - DNA, 75 bp, Homo sapiens
agcaggtctccttgcaagacttcgaaagagagacaagagagacacctccaacttcgacaaagagttcaccagaca

SEQ ID NO: 168974 - DNA, 83 bp, Homo sapiens
ctggatgctgcagacactgaacgaggagccagtgccatcactggtgcaagctatatttaacggagatcctgatgaagttcgag

SEQ ID NO: 168975 - DNA, 75 bp, Homo sapiens
caagtggaccctgagattgagctttttgtaaagggcctctgaaaaatggaaccaaattctctgaggactaaagtc

SEQ ID NO: 168976 - DNA, 100 bp, Homo sapiens
agaaacataagaaggaggaggaggatgaagaacttgacctcaataaagtgagttttatgagtatcacgcactaatgatggaagaagaaggagcagtaatt

SEQ ID NO: 168977 - DNA, 115 bp, Homo sapiens
gaatttgaaaaccttgtggaagagacaagccattttgtgcgcaccacttttgtgtccaggcataagaaatttgacgttgaagcttcttgtcatgacggggatgaaacaattgaaa

SEQ ID NO: 168978 - DNA, 90 bp, Homo sapiens
ggggaaatggcgatggggataagggtggagataaacagtttttccagaaaggaggagtcaaggaagcccttagtgaacgagaactcttca

SEQ ID NO: 168979 - DNA, 100 bp, Homo sapiens
aggaagagggactggaaccatctcagaagccatgcccctcaggctggaacttgccctgtctcctcgcagatgaggttcaaatggtgaaagacgatgaccc

SEQ ID NO: 168980 - DNA, 118 bp, Homo sapiens
ctcgtggacaagtttgcagatcgggagcgcaaggtcgccctcaaggccatgatcaaaacggtcctgccctccggaggagcagcctcgaggctggtggttttcagagcaggaggccgac

SEQ ID NO: 168981 - DNA, 71 bp, Homo sapiens
gagaaccgtcagtttgagccagatgaaatggaagcaactgtcgagattgcagcggaatatgattctcttcc

SEQ ID NO: 168982 - DNA, 102 bp, Homo sapiens
agagcgagctgagtggttgtgtggtcgcgtctcggaaaccggtagcgcttgcagcatggacactcatgaggaccatgatacttccactgagaatacagacga

SEQ ID NO: 168983 - DNA, 48 bp, Homo sapiens
agagtgaggtttctgcagacaatcaatgataatatgcagcatgcatac

SEQ ID NO: 168984 - DNA, 82 bp, Homo sapiens
tccgccgccgccgccttgctgctgctcaaagctgctgccgccccttgggctaaaaggtgctggagaatctggtaaaagcacc

SEQ ID NO: 168985 - DNA, 83 bp, Homo sapiens
gccaaagaactggctaggcaaataagctttaaggtctcctttacagaaaggggcttggataaggaggaaagaccatcagaaga

SEQ ID NO: 168986 - DNA, 82 bp, Homo sapiens
cagcagaagctggtggaccagaacatcttctccttctacctgagcagggctgggttacgacccctacaaccctgagctgccc

SEQ ID NO: 168987 - DNA, 96 bp, Homo sapiens
ctgcagaggacacgaggcggcgggctggagacatggaccgcggcgagcaagagttgctggagaatgtaaccctaatccataaaccagtgtcgttgc

SEQ ID NO: 168988 - DNA, 50 bp, Homo sapiens
tgacagtcacaattttgtaataagagtcactgctagttggattgaagcac

SEQ ID NO: 168989 - DNA, 82 bp, Homo sapiens
ctggaggaagcacaccctgtcctatgtggacgttggcactgggaaggttgaaaggattgttgacaaaaggaaaaataaaaaa

SEQ ID NO: 168990 - DNA, 90 bp, Homo sapiens
gctgacttctctagcatgctctctgaggaggaaaaggaagagttaaaagcagagttagttcagataccatgtttgtgtggaagtgccccg

SEQ ID NO: 168991 - DNA, 90 bp, Homo sapiens
ccgagctggacccggaccggttttggctacaggcctcgggcctccccggcagcgcggagctgacggtgggcgcggcggtcgcctgcttcc

SEQ ID NO: 168992 - DNA, 75 bp, Homo sapiens
ggagtttgacagctattaaaaccagggctccacagttaggaggccaaatttgagtttcatcatggtgactatgaa

SEQ ID NO: 168993 - DNA, 97 bp, Homo sapiens
tccatgtaccctgtgaaaccctcgaatacattgaagccaactatggcaacaaacaggcatttcccacaaactgttacaggggcatatttgagtggcg

SEQ ID NO: 168994 - DNA, 99 bp, Homo sapiens
atttttcaggcctctggtgccaaatacattgtcttaacttccaaacatcatgaaggaaccctaaggactctgcaatatgaataattccctagagaacac

SEQ ID NO: 168995 - DNA, 100 bp, Homo sapiens
gaaagagtcctgcatggtttcaagggacgtaccaggaggatggtgcccagggcaagaggattatgacagattacgaccgctgagttatccacaaacagat

SEQ ID NO: 168996 - DNA, 74 bp, Homo sapiens
caaactccaccagccccgtgtccttcattgccacgtacagtgcaacaggtgatcgagaaccacatcctcaagct

SEQ ID NO: 168997 - DNA, 100 bp, Homo sapiens
cagtttacctgcaacaatggcagatgtatcaacatcaactggagatgcgacaatgtctagggacaggaagatggttggcgacgtgaccggggcccaggcc

SEQ ID NO: 168998 - DNA, 101 bp, Homo sapiens
tagctcatttcgacagccttttagtgattggcaactttggcctcagctggaatcagcaagtaactcagatggccctctgggctatcatggctgctccttta

SEQ ID NO: 168999 - DNA, 75 bp, Homo sapiens
cagccgctgttttgccggaggagcccctcaggccacccaacatgagtgaagtttcctgcaagaaacgggacgact

SEQ ID NO: 169000 - DNA, 97 bp, Homo sapiens
tcggctggagagcagaagaccgaaagcaatgctggacgaggacgaggatgagcgtgtggacgaggctgccctgcggcagctcacggagatgggcttt

SEQ ID NO: 169001 - DNA, 82 bp, Homo sapiens
cgagaggtggttacattcgttgaaggacaccagctgcggaatttgcggctttggcaggtctttgaggtactgtgacctgcga

SEQ ID NO: 169002 - DNA, 74 bp, Homo sapiens
cccacagacctcaaattcaaaggtgtgggaattaacagctaacaatgtaatcatggtttctgctattggcaatg

SEQ ID NO: 169003 - DNA, 100 bp, Homo sapiens
cagaggctctggtgccaggttagcagcaggaccgacggcagacccagcagccagagagtgaaaggttttgggtctagtaatactggttctgtgtttggtc

SEQ ID NO: 169004 - DNA, 83 bp, Homo sapiens
gtggatcacaacttggttcaatgggtagcctcaccatgaaatcacagcttcagatcactgatttaaattccaggttgtcatca

SEQ ID NO: 169005 - DNA, 50 bp, Homo sapiens
tgctgcgtgctcagccccagagcaggcctcaggctgggacaggactgccc

SEQ ID NO: 169006 - DNA, 75 bp, Homo sapiens
gtcctcaatctccttttccttggctacccgatgacaggtattttctaagtgggtctttggatggaaagctccgcc

SEQ ID NO: 169007 - DNA, 75 bp, Homo sapiens
aaaagagtctttggaggatgcggctttgatggggtaaaggagctggaagtgcgaaaattgatgcatgtgagagga

SEQ ID NO: 169008 - DNA, 101 bp, Homo sapiens
aacatcgtagcgaacacggtgctactcaaggcccgggaagcttcggaaccaaaaagaagcttcccagagccggggccaggagccccaagcgccctctagca

SEQ ID NO: 169009 - DNA, 50 bp, Homo sapiens
cgggctacctgtttgaagagattgctaagcgacgagctggggctgcagaa

SEQ ID NO: 169010 - DNA, 101 bp, Homo sapiens
atccatccgacagccgcgggtgcgtggtcgtgcggcaagtgagcgatttggtgaacagacactcccttctgtaggatcccactttgcgcaccaaacagcct

SEQ ID NO: 169011 - DNA, 90 bp, Homo sapiens
ggacaaggaagtcaactcccaggtctacagccggctcacagcacgaggtggcaattttggaggtagccccggttatggaggaggaagagg

SEQ ID NO: 169012 - DNA, 87 bp, Homo sapiens
gcgcacttccaggtgcgcagcgcgggagccgccacggtgcttgagttgagtcgtttaggatctagttcacttacaaatatacctgag

SEQ ID NO: 169013 - DNA, 83 bp, Homo sapiens
aaaacttcaaaaattaccattttatgatttactggatgaactgataaaacccaccagtctagatgctaaagaaaacccttatg

SEQ ID NO: 169014 - DNA, 101 bp, Homo sapiens
cttgcagatcggtgacacagttcacatcctggagatgtacgagggttgaaatcacaaagattagacacctttttagataggtgttcttcagcaccactgac

SEQ ID NO: 169015 - DNA, 97 bp, Homo sapiens
gctgggaactggcaataaaaataacctgctaagcccagcacacatcatggtggagaaagaaagctgcgctgagcacagacccaagtgtgctggggaa

SEQ ID NO: 169016 - DNA, 82 bp, Homo sapiens
ccgatttaaagctgagctgcgaggaaaatggcggcgggaggttcagccgtctgtatatctccccagatacctgaaactgacc

SEQ ID NO: 169017 - DNA, 50 bp, Homo sapiens
attgggaggccctaaactcggagcagctgcatatctatgtgagactgaat

SEQ ID NO: 169018 - DNA, 133 bp, Homo sapiens
cgcatcgaggatttggcgctgcagaaccagatccgggagcacgtcatctccatcgagggtcaaaatgcagatcttcgtgaaaacccttaccggcaagaccatcacccttgaggtggagcccagtgacaccatc

SEQ ID NO: 169019 - DNA, 97 bp, Homo sapiens
cattgagataatcaccagcagcatcaagaaaatcgcagactttctcaactcgttcggtatcctgtggtctgaggccatcttcctcgaggcaaggccc

SEQ ID NO: 169020 - DNA, 97 bp, Homo sapiens
ttgcggcaaacccttcccaacctgaaaaacttcatggagcatggactaatggtcaggtggtacaaacccgtagtgctgatgaaccaatgacaacatt

SEQ ID NO: 169021 - DNA, 74 bp, Homo sapiens
aaacaagccgtggaataggtgtatcaagtaatggtgcaaagcctgaaatgtcatcggtgggctccaagggggac

SEQ ID NO: 169022 - DNA, 89 bp, Homo sapiens
acataggagaagtgattcttgtgggtggcatgactaggatgcccaagcactatcctgaggagcgacatgtggttgaacgccatggacgg

SEQ ID NO: 169023 - DNA, 75 bp, Homo sapiens
tctgagtggatggggacctgcctgctggcctccggtgtggctgtctctgatggtgtcatcaaggtgttcaacgac

SEQ ID NO: 169024 - DNA, 98 bp, Homo sapiens
cttagtgatgaagagatgagtttgtttacagctgttgtcctggtatctgcaggagcaaattgacatttttgaaggaataaaggacagccaagctcagc

SEQ ID NO: 169025 - DNA, 100 bp, Homo sapiens
gctgccgcttcagtccgaaggaggaagggaaccaacccactttctcggcgccgcggctcttttctaaaagtgagtggcaaaattctattcagaagaatgc

SEQ ID NO: 169026 - DNA, 75 bp, Homo sapiens
cgggcaccgaggaccagctcaatgacagacctcctgccccccgaggtctgcagtctcctgaacccagcagccatc

SEQ ID NO: 169027 - DNA, 83 bp, Homo sapiens
agttcatgagcacatatgtcatgatgagaggaggttcagatgagcccctgctgacttgagagagacagagagaccacgccgat

SEQ ID NO: 169028 - DNA, 100 bp, Homo sapiens
gagtgaccggggcatctccaacatgctggatgtcaacggcctctgtactgagcagtacagtgaatacacaggctatgctgagacatatcgttggtcccgg

SEQ ID NO: 169029 - DNA, 100 bp, Homo sapiens
gcacggtgccaggaccaagtatctgacccagccgatgcccaatcctgtggcgtactacctgcaccactcaccctggtggttccatcgcttcgagacgctc

SEQ ID NO: 169030 - DNA, 89 bp, Homo sapiens
acccttcctctttgtggtccggcacaaccccacagcccatactgaatgaacacaccttctgtgctggcatgtctaagtaccaagaagac

SEQ ID NO: 169031 - DNA, 75 bp, Homo sapiens
gatggtgctgtaaccacctcacagattccagcttcggaacaagagaccctgtaaaagatgatgaatgcgagtcag

SEQ ID NO: 169032 - DNA, 82 bp, Homo sapiens
tgggactcagcagccttggtgctcaggtgccagatgcaaaggcccgggtcctttttgtgctgattgtgctgagccagctcac

SEQ ID NO: 169033 - DNA, 74 bp, Homo sapiens
tatctgcctaggcattttgctgtctcctcctaatacggtgaagatgccagatgtggagctctttgttaatttgg

SEQ ID NO: 169034 - DNA, 75 bp, Homo sapiens
aagtccctgatggcctcagaggaggagggaagtcgcggccactgcctgtgtgacggatgtgaccccgctgggcct

SEQ ID NO: 169035 - DNA, 100 bp, Homo sapiens
gcctggagtgtgtgcccactgaggagtccaacatcaccatgcagagtccatttctaagaagatgtggttcgaacatacagagctacataatatgagtaaa

SEQ ID NO: 169036 - DNA, 100 bp, Homo sapiens
gcagctcggcctgcagatgagcctacccctgccagcaagtgctgcagcaagccacaggtgactctttggcagttgcactgggtactggctgagttctgga

SEQ ID NO: 169037 - DNA, 82 bp, Homo sapiens
ataaaaacagagtccgatgaaaggaatgggtctgggaccttaacagggagccatggagtctgtgaccttcgaggatgtggct

SEQ ID NO: 169038 - DNA, 85 bp, Homo sapiens
ttttccgggtggggatctctgaaattactcaggtggattttgcaaatcgttttgttggaggtggtgtaaccagtgcaggacttgt

SEQ ID NO: 169039 - DNA, 90 bp, Homo sapiens
tagtagctgccttctgctctccagcgctctcagcaccaatgtttctgaaagatctatccagcactccgatggccagcaacaacaccgcca

SEQ ID NO: 169040 - DNA, 75 bp, Homo sapiens
gagcgtgccacgcgctacaactacaccagcgaggagaagtttgccctagtggagtggaggaatcagacatcattg

SEQ ID NO: 169041 - DNA, 100 bp, Homo sapiens
aaggaataactttgcagtgggctacaggactggggacttccagctacacactaatgttttaattggttggggtcagataagaagaggagtgacaatcaag

SEQ ID NO: 169042 - DNA, 76 bp, Homo sapiens
ctggaaagctttaggagttcacagtgtgtgggtcctgtggtagctggagtgttggtggccatcttggtgctggcgg

SEQ ID NO: 169043 - DNA, 90 bp, Homo sapiens
gacaggggtcatgacagatgaggcagagcccagcaaggccctggccaacgtcaacattgggagcctcatctgcaatgtaggggccggtgg

SEQ ID NO: 169044 - DNA, 100 bp, Homo sapiens
cgtctgactgggagtacaccatcaccgtcagcgctgcggagatctacaatgaggtcctcagggccaggtggagatcgaggaccaggtggagggcctgcag

SEQ ID NO: 169045 - DNA, 100 bp, Homo sapiens
gggagagcaagcctctgactgctcaacagacaaccaatcggtttgggcttggccagccaggaagaatacctggttctgtgaatgccatgagagttctgag

SEQ ID NO: 169046 - DNA, 98 bp, Homo sapiens
aatcatcaggaatccattatggtgtcattacatgtgaaggctgcaaggaactgggcaggcaaaaggcttctcttcccctccattcatgcacatggagc

SEQ ID NO: 169047 - DNA, 110 bp, Homo sapiens
gtttttcctgtcgtacgtgggacaggccacgctgtccgtccgcagtaccgacgcctgcaggtgagaagccctaccactgcaactgggacggctgcggctggaagtttgcg

SEQ ID NO: 169048 - DNA, 83 bp, Homo sapiens
ctagaggtcaagatcagctctggctaggcaagtgaaccggagcaaacgacttccgatccagtctgcgctgttgcggctcccgt

SEQ ID NO: 169049 - DNA, 82 bp, Homo sapiens
gctgacaatgatgaatctcacatggggtaaccttggaaatgttctgaagagtcagagcaaaatttctgaagctgaaagcgcc

SEQ ID NO: 169050 - DNA, 97 bp, Homo sapiens
acaccctggcacagcttatttctgcttactcacttgtagatccagagaaagccaaagcatattaccgtgaagtcttgcctggagaaattgtggaaat

SEQ ID NO: 169051 - DNA, 90 bp, Homo sapiens
cggctgtggaggccacgctcagctcgccaggcggcgcagggtagcagcactgtctggagatgcacgacggtgcctggacatctgcaggcg

SEQ ID NO: 169052 - DNA, 86 bp, Homo sapiens
accaagccggagtaccacagcctgctgcaggagctgggcgtgggtatcacctgattttgatacagcagcaggaagcttgttcccag

SEQ ID NO: 169053 - DNA, 74 bp, Homo sapiens
ctgctcagctgctgactgatgaggcactggttcaaaccttgtactactcagctgatcacaagctgcttgatggg

SEQ ID NO: 169054 - DNA, 140 bp, Homo sapiens
ccggggtgatggcggtggagactctgtccccggactgggagtttgaccgcgttgacgacggctcgcagagtgctggagaatctggtaaaagcaccattgtgaagcagatgaggatcctgcatgttaatgggtttaatgga

SEQ ID NO: 169055 - DNA, 75 bp, Homo sapiens
gcttcctctcctctcttagacctttcctcatgtgtttctaactggggaggctatgccctggcctgcgcactctac

SEQ ID NO: 169056 - DNA, 78 bp, Homo sapiens
ctggatatatgatggggagcttgaggacacttaccacgaagaggtggatcttactaatcccaagacgtttagaaacct

SEQ ID NO: 169057 - DNA, 51 bp, Homo sapiens
cggcacctaacccccgaagaggaggctccaaacaggcatgcgaggtgcctt

SEQ ID NO: 169058 - DNA, 89 bp, Homo sapiens
gtgcggcggatgaacaagcggcaggtcagtaaaatcagcttggtggatctagcaggaagtgaacgagctgattcaactggtgccaaagg

SEQ ID NO: 169059 - DNA, 100 bp, Homo sapiens
cttcttgaactggaccgtggggaaactaaaaacgcatctatctaacgtttaccctagcaaaccaatgacattcctgaaagctcactcttctcaccaatgc

SEQ ID NO: 169060 - DNA, 82 bp, Homo sapiens
gcccttgttcccccaaatgtctgactctgactctcggactgagaaacgcaaggtgctttgcaagatatcaccttgtcacagc

SEQ ID NO: 169061 - DNA, 90 bp, Homo sapiens
tgaagatgtttacagtgcagtcttatcgaaggatgtgcatgaaggacagcctcttctcaatggacagtcggcccaatatgtcaagacctc

SEQ ID NO: 169062 - DNA, 50 bp, Homo sapiens
cggagcctggccagctgcacttcaaccagacttgggaagatccccatgaa

SEQ ID NO: 169063 - DNA, 75 bp, Homo sapiens
ccagcacccctggagaagcgcgttaaggagctggctcagggtctccaactgaattccttgaagagaaaatggcct

SEQ ID NO: 169064 - DNA, 74 bp, Homo sapiens
acttaatacagcaagaaagaccatcaagtttaccaaaagcgtggatacccatcaacgaagttttgatattggaa

SEQ ID NO: 169065 - DNA, 100 bp, Homo sapiens
ctccaggagttcgtctcttacgtctgcggaagtgcagctgcctcagttcttagcgcagatttcaggtatgctgctgaaagtgggaatcctctacattggt

SEQ ID NO: 169066 - DNA, 100 bp, Homo sapiens
ttttgattggcgcctttctcattattataggctccctcctgctgtcaggctacatcagcaaagggataaactgccagggagaagaatgagaagacaggag

SEQ ID NO: 169067 - DNA, 100 bp, Homo sapiens
ctcgcttcatcaaggaaggcaagcctgcctgcttctgcatcgacagatagccgtcttcagcttgagccccatcactaggatttgaactcagaggatcaaa

SEQ ID NO: 169068 - DNA, 83 bp, Homo sapiens
gctggacggcgagcgcgagcggcgcgagaaagaggccccgtgtgggccgcggcccggccctcaccatggagtccatgttcgag

SEQ ID NO: 169069 - DNA, 75 bp, Homo sapiens
gtaagatctcaagagagcgagaagactggaatcaggaatgggtaccacagaccatgtcatcgtcctggcgtccac

SEQ ID NO: 169070 - DNA, 100 bp, Homo sapiens
gaccaggaggaggttttcaggaccaaaattgtggaaaagtcactctggaggaattttgttgtcagagaataaaaggaggttgtccataattgactttaag

SEQ ID NO: 169071 - DNA, 83 bp, Homo sapiens
agtggagacaatccagtcttcgtacagtctgtcaaagaagattattttgaaagaacggcaagagagaaagcagcgtctccaag

SEQ ID NO: 169072 - DNA, 100 bp, Homo sapiens
tggacatgagggtccccgctcagctcctggggctcctgctgctctggctcccaggttcgtggtttacagctacaagtacgtgcatgacgatggccgagtg

SEQ ID NO: 169073 - DNA, 100 bp, Homo sapiens
catgttggctgcagagtcaatcaataggagctatgaagacatgattggtgaggaggtgccatcggatcaatactactgggctcctttggcccagcatgag

SEQ ID NO: 169074 - DNA, 89 bp, Homo sapiens
gagactgctgagcccgtccgtccgccgccaccacccactccggacacagttgagccccatatgggggttggcaggcagcagagaggccc

SEQ ID NO: 169075 - DNA, 100 bp, Homo sapiens
atgacttttgtcggccatgcctcagggaaaagcacgaagggttttacccagaaggagcaactggagattccagctaagaaagagtcttgtccaaacactg

SEQ ID NO: 169076 - DNA, 75 bp, Homo sapiens
ctcctagctcatttcgacagccttgcacctacaaaggcagcacctaagcaaaagattgtgaagcctgtgaaagtt

SEQ ID NO: 169077 - DNA, 82 bp, Homo sapiens
ccatccttggaaatcctgccgcggacttctctgcacagcatccctgtgacagggggggccctcagcctcttggccttgaacg

SEQ ID NO: 169078 - DNA, 120 bp, Homo sapiens
cgcgggcgtaagcggactgcagccgcgagctcctggaggcggcgggatggaggcggcggccgttccagggtctccctccactgctgtagtaacccgggtccggggcctcggtggtgctcc

SEQ ID NO: 169079 - DNA, 88 bp, Homo sapiens
agggcaaggcggcggacggctgcgtcgcccgaggcgaggaggagcgctggcgatcctgaggtgcagaggcaattcccggaggactaca

SEQ ID NO: 169080 - DNA, 97 bp, Homo sapiens
ggaaggccaacgtggaggcctcacgcagctccacagacagccccagctcggtgttcctcagctatgctaagaaggaatctgatcttaatggcgccca

SEQ ID NO: 169081 - DNA, 100 bp, Homo sapiens
tactacacagagactaagatcttacaggagaggaatacagattctgttcatcttgctctgaaattaaataattctgaactcatggggagaaaactcagag

SEQ ID NO: 169082 - DNA, 100 bp, Homo sapiens
ctcagcttccggcttgtacacacaaccgctattgagcacttccagcccaacgccgatctgctgttcaggaagccctcctatgacactgaaacagatccta

SEQ ID NO: 169083 - DNA, 83 bp, Homo sapiens
ggctcgcgagatccgcatgaaggagctggagcggcagcagaaggagttcgtgccctcgtgaggctggcatgcaggatggcagg

SEQ ID NO: 169084 - DNA, 54 bp, Homo sapiens
ctttgccaccagcagccacaacagatcagtgactgcattattgaggagaagacg

SEQ ID NO: 169085 - DNA, 75 bp, Homo sapiens
cgcccctccgagctggggttggacgctgccagtttgcacagcagcaggattgttaaaatgagtcttcggaagcaa

SEQ ID NO: 169086 - DNA, 100 bp, Homo sapiens
cacaagaggttctacagcaggaacttcagggcattcacagtttccgtttctctgtttgaagaacataaggacatttctcacggcctgttgtgagacgttt

SEQ ID NO: 169087 - DNA, 90 bp, Homo sapiens
cttcagggttccattttcatcccagccatttgagaacagtgcatcctcagaacgacaccgtaactatccgcactagaaagttcatgacca

SEQ ID NO: 169088 - DNA, 75 bp, Homo sapiens
tcggccgcgccccggccaccgcgggcccagcaggaataggatgagtgataatccacccagaatggaagtgtgtcc

SEQ ID NO: 169089 - DNA, 100 bp, Homo sapiens
atttttacagttttccagaactccacaaagtctttaacacctctgtgtgaagatgacaaccaggcacaggaaatcattaagaagctggagaagagtataa

SEQ ID NO: 169090 - DNA, 101 bp, Homo sapiens
aatatcctggaaccttcttttgtttgtcagcagccaaggtgtttccaggaagttcagagagaacagcctcgaagcggaggatccctgtgtcccagccgggc

SEQ ID NO: 169091 - DNA, 96 bp, Homo sapiens
aagagtgctgcgtgtttggcagcaggcaataccttagtgctcaagccagcacaggttaattggactcctgagattaacaaagaacacttgctacag

SEQ ID NO: 169092 - DNA, 137 bp, Homo sapiens
ttcgggtccgaggagcctcgcgcggcgctggagagagacaagatgtccgccagagctgcggccgccaagtgttctcaggcgctgtggtctcaccttccactggggcaacaatgggccatttccagcagggacggcgc

SEQ ID NO: 169093 - DNA, 100 bp, Homo sapiens
ttctatgtttccacatcggtcagaaaaagattgtttgccagctctgagcctgtgccaggattccagggggataccctgcagctagcattcattgacctca

SEQ ID NO: 169094 - DNA, 83 bp, Homo sapiens
tggagcaaaaacattccaccattcaacaaaaggcaatggatcacttggagtcctttattgctgaatgtgatcggagaactgag

SEQ ID NO: 169095 - DNA, 100 bp, Homo sapiens
gcgaccagcgctggaactgctccgcgcttgagggcggcggccgcctgccgcaccacagcgccatcctcaagcgcgtgggtaattccagaattgattggcc

SEQ ID NO: 169096 - DNA, 100 bp, Homo sapiens
tattactcagatccaaccacagcagttggttttgcgattaagatcagggcagccccgagaaccacaggtgtacaccctgcccccatcccgggatgagctg

SEQ ID NO: 169097 - DNA, 75 bp, Homo sapiens
cagcgatgttcggccaggtggctccaaggagaggaagcagtgatgcattgagtttttcagaagaagtgaagtcaa

SEQ ID NO: 169098 - DNA, 75 bp, Homo sapiens
taagccacaggacaccaagcttcacatggccctttatgttctccagttactccacaggatccgctgaacatagga

SEQ ID NO: 169099 - DNA, 100 bp, Homo sapiens
gagtttggcttcatccagaagacaatgagtacaagcgtgggggacctatcattgccgtgcaggtggagaatgaatatggttcctataataaagaccccgc

SEQ ID NO: 169100 - DNA, 51 bp, Homo sapiens
agctgcagcaggacatgggagtccaccagacttaattcagtgcacaaatga

SEQ ID NO: 169101 - DNA, 132 bp, Homo sapiens
gaggatcgggccgtggaaagccgcaccaccgacctgctgactgactgggagaagaccaagcctgtcacggtattgatgaagatgaccctactgctgatgataccagtgctgctgtaactgaagaaatgccac

SEQ ID NO: 169102 - DNA, 102 bp, Homo sapiens
gacgaagatgatgaggatgacgatgacgatgaggaagatgtctatccagaagttaaaggagagattgctcgtaaagatgaaaagctgctgtcgtttctaaaa

SEQ ID NO: 169103 - DNA, 100 bp, Homo sapiens
cgtcatgatatccctgtatctgctgctgctgctcatagtatcataatgacacattgctggatccttccctctacaagcatgagagcaagctggtgctgag

SEQ ID NO: 169104 - DNA, 90 bp, Homo sapiens
taaaaacgcatctatctaacgtttaccctagcaaaccatgtctcagtttgaaactgaattctacatcagtggacttgcacctctctgtga

SEQ ID NO: 169105 - DNA, 104 bp, Homo sapiens
aaggatgtcatccccatggctgatgcagcaggcatcatccgctatgcaattgggggccacgactgcttcccggtgctgttcacctatgacgccgccgcggggat

SEQ ID NO: 169106 - DNA, 82 bp, Homo sapiens
ctcgctccgagatccccggccacgatgatcggctgaatgtaacagaggaactaacgtccaacgacaagacgaggattctcaa

SEQ ID NO: 169107 - DNA, 74 bp, Homo sapiens
cgacctgcctctgaaacatggcaggctcggatgctggacactttcttcatgagcaacaaaccccaaagatacaa

SEQ ID NO: 169108 - DNA, 100 bp, Homo sapiens
agacgcctggggaaaccttcagggcctctgtactggcctgtcatgtggtcaaccaggcttttgatgaggccattgctgaacttgatacactgaatgaaga

SEQ ID NO: 169109 - DNA, 100 bp, Homo sapiens
ctggaccaccatcctgaatggtttaacgtgtacaacaaggtgaccaagaatatggcccaggtgaccaaagccctggacaaggccctgagcaccatggacc

SEQ ID NO: 169110 - DNA, 100 bp, Homo sapiens
ctgaattggatgaaagataaagcccttaaggacaaggcagaagctcctcctggggtagagacagatcttattgatgttggattcacagatgatgtgaaga

SEQ ID NO: 169111 - DNA, 90 bp, Homo sapiens
accatcacgctcaaaacgctgcagcagcagaccttcaagatccgcatggagcctgacgagacggcacaacaaggcaatagcatttaaaag

SEQ ID NO: 169112 - DNA, 82 bp, Homo sapiens
cccagggagaggaattacgggaacagaaagaaaagtccgaaagagctggtatctcattcagttgctaaacttatattagtta

SEQ ID NO: 169113 - DNA, 75 bp, Homo sapiens
gcctccaggccaagagggatccttcacccgtgtctggagtttggagacacggagctgacgcagatgttcctaccc

SEQ ID NO: 169114 - DNA, 90 bp, Homo sapiens
acagagggacaacaaaagcctcctacaagagtcctaccaaaaaaggcaacagactactgcaacagaaactatccttagatgggaacccca

SEQ ID NO: 169115 - DNA, 82 bp, Homo sapiens
gccgggcccacctccccaccaaggaaggcccagctgagagccagcctggaggttacccagcagcaggccacccaggccgaag

SEQ ID NO: 169116 - DNA, 100 bp, Homo sapiens
gtgaaacctcctagtagaaaaagttcttgggacaaacttcatttgtgatcggagggtatggttggcatggaattgaatttcatctgtctgtgggaattgt

SEQ ID NO: 169117 - DNA, 100 bp, Homo sapiens
cacaaatgaaggatgagctttgtggcaagcaaaatcagcagactgcctgacagggggttttgcgtctcccttctctcctggacagaaggccgtgtcctgg

SEQ ID NO: 169118 - DNA, 98 bp, Homo sapiens
caaattgatgtgtctgacgtcatcaggcttgttcaagacacaccggaggcgacggccatggccacagtatccggctgctttgatgaacctgggagcca

SEQ ID NO: 169119 - DNA, 101 bp, Homo sapiens
atgttctgtttacttgaaccagtgagaagatggccgagcaagcaaggataagtatggactagaggcttttaccagatttcttaaaactgaattcagtgaag

SEQ ID NO: 169120 - DNA, 75 bp, Homo sapiens
tggctgagggactcacagctgatgacctgctgctcgtgctgatctcagatgatatcatcaagttgaatcgaaagg

SEQ ID NO: 169121 - DNA, 75 bp, Homo sapiens
agaagcacaagaaggaccttcacccattgtttgatgagacctttgaattgctgttggagaagtctgggggcttgg

SEQ ID NO: 169122 - DNA, 90 bp, Homo sapiens
cagattcgcagtggtcgcttcttctccttgggttcagttctgacaccagggatggaccatcccatttctctccagcctgcctccatgatg

SEQ ID NO: 169123 - DNA, 100 bp, Homo sapiens
tatcagagaagttctagttctggatcagatgactatgcctacacacaagttttgcacagtaataagttgactcacacagacttaaagcctgaaaacatct

SEQ ID NO: 169124 - DNA, 98 bp, Homo sapiens
tgggctcacatatcagagggcattatgaacgaattctcaacccctacaacttattcctgtccggagacagcctaaggtagtattattgattccacaga

SEQ ID NO: 169125 - DNA, 101 bp, Homo sapiens
tattcttcatgggaacagaggtgtttaccatgacgataagcaaccagcatttagagctgtttatgaagcactgagaaatcatgctacaagtgaaaactgat

SEQ ID NO: 169126 - DNA, 75 bp, Homo sapiens
aaatcagaggagatgtaactatcgtcacgctctgtcgccaggctgaagtcagtggcaccatctcggctcactaca

SEQ ID NO: 169127 - DNA, 80 bp, Homo sapiens
ggcattcatttcaggctccttctaaatggccaagaactgcagctgtgcacgtggaacattctgtattcatctgctatttg

SEQ ID NO: 169128 - DNA, 100 bp, Homo sapiens
gctcctccaatgtgggcatcaacaggtggcgatagaatgagtccatttaagtcccaggacggtggaaactagctagtagattgcagccatgttgtggaag

SEQ ID NO: 169129 - DNA, 82 bp, Homo sapiens
ttgcttggaaaaacgtgtgggtacgaccttgagtaattccctcctggtcccagacagtctaagaggcacagataaacgcaga

SEQ ID NO: 169130 - DNA, 75 bp, Homo sapiens
tcacactacgacagtgagaaaggaggttgaagaagcctcagcggaggcgatacggcctcctcgccaacactgagg

SEQ ID NO: 169131 - DNA, 100 bp, Homo sapiens
ctgtaaatggagtttctgacttaagccgatcccagaggctctttgctgctgtcagtatcaccactggtcaagcaggtggtgcccaggcaacatgggtgac

SEQ ID NO: 169132 - DNA, 100 bp, Homo sapiens
ggttttgggccgaggcctgggttacaagcagcaagtgcgcggttggggccactgcgaggccgttttaggtgtcatggagaaactccagctgggcccagag

SEQ ID NO: 169133 - DNA, 74 bp, Homo sapiens
tcaacatcctgtgcatcattggtgtctgtgggctctttgctgggcagcatcttcacaactatttcacagtgact

SEQ ID NO: 169134 - DNA, 75 bp, Homo sapiens
ggaacttaaagaagaatggcaagatgaagattttccgatagagatcgatgtcttattgtgatgagtctcgactgt

SEQ ID NO: 169135 - DNA, 100 bp, Homo sapiens
aaatgtctgccgccgccggctctcgggagcgcaacactgcagaatatccaagggactgagtgaaaagatatttgcaaaacctgaagaacaaagaaaaaca

SEQ ID NO: 169136 - DNA, 100 bp, Homo sapiens
ctggacatccagatgattatgatcatgaacggaaccctctacattgctgctaggcagtgtatcacaatgtgaagccagcagctttgcagcagcaattaga

SEQ ID NO: 169137 - DNA, 75 bp, Homo sapiens
gaggaggcgagctagccgggagttacaccgccaccgccagtggagacctttggcgacttggcctttggcgacatc

SEQ ID NO: 169138 - DNA, 50 bp, Homo sapiens
gtcaaccgcattattactgaaaagaaaagtagcagctctgaatccttaag

SEQ ID NO: 169139 - DNA, 100 bp, Homo sapiens
gtggagcttctgctcagctacaggcggcccagcggagagaagcagtgactgtcatgtggcatgggtctctgcccaagctcgtaatgagactatagcaagg

SEQ ID NO: 169140 - DNA, 82 bp, Homo sapiens
gctggttctctccaggacatctaccaagttgatcatggccttgccaggttggtgacagtatattgtgagcatggtcataaag

SEQ ID NO: 169141 - DNA, 82 bp, Homo sapiens
ccaatcttgatgctttaatacagaaccagcatggtcatgtgaaggtggtgcgctacttagtcaaagaagtcaatcagtttcc

SEQ ID NO: 169142 - DNA, 73 bp, Homo sapiens
gagcaccgccgaggactccagcacaccgaggggcgtgatggtgggcatgggtcagaaggattcctatgtgggc

SEQ ID NO: 169143 - DNA, 98 bp, Homo sapiens
tctgggggccacaaatgctccttctcctggagacgcaactcaaggcgcattggagtgactgtctggcatcaccaagatgacactccacgccacccggg

SEQ ID NO: 169144 - DNA, 75 bp, Homo sapiens
gtcttacattgctgcatcaagaaacccaagctgctgagatcctgggcttttccacccctccaggccggctctcca

SEQ ID NO: 169145 - DNA, 87 bp, Homo sapiens
cggcgtgccccaccatgtcagacgcagccgtagacaccagctccgaaatcaccaccaaggctcttgtcaggatggtgaagctgttca

SEQ ID NO: 169146 - DNA, 96 bp, Homo sapiens
gcaagacatgtagtaaaagtgatccacagaccagcatggctgccactgctgctgtgagtcccagtgactacctgcagcctgccgcctccaccaccc

SEQ ID NO: 169147 - DNA, 50 bp, Homo sapiens
ctggtgttcgcccacgaccatgagccatgtccattggagcccgttcccaa

SEQ ID NO: 169148 - DNA, 75 bp, Homo sapiens
ggcctctcgtccgatgctcaggagagcttggaaggattgtcagtggcttcgccccgaggagagctgactgccctg

SEQ ID NO: 169149 - DNA, 51 bp, Homo sapiens
gaggtggagcacctgaagagatgccagcagaaaactctcccaccatgtcgc

SEQ ID NO: 169150 - DNA, 99 bp, Homo sapiens
cttcctacacagcctgctgaagaagcagcacgaaagagagaggtccgtctaatgaagaacaggattgagcagtactacgaagccatcttggctctgtgg

SEQ ID NO: 169151 - DNA, 75 bp, Homo sapiens
cgctacagtatgtcaatcgcttgccccagcacaggtccggcctctttggcctacccccgttggctccgctgcccc

SEQ ID NO: 169152 - DNA, 100 bp, Homo sapiens
caagaggaggacagttcgctacacagcaatgcatcgagagggagacgtggtgggcggtccttcctgtgacacgacccttgagtgacagttctatttgatt

SEQ ID NO: 169153 - DNA, 80 bp, Homo sapiens
ggagctgctgctggcgagcccgctactgcagggacctatggttcttcacacacccccattcggcgtagtacccagagagc

SEQ ID NO: 169154 - DNA, 110 bp, Homo sapiens
ctcttttatggtagtaaatgctttaggagacaggcagcgttggcttgtattgcaatcactgaaataactttctttatgggatacacaattgcaactattcttcattatgc

SEQ ID NO: 169155 - DNA, 98 bp, Homo sapiens
gcctatctgcgagaacagagaagggagctctatagtcggagtggagaactgcaagacaatacaatggtgggtgaagagaagatgtctctaagaaaccg

SEQ ID NO: 169156 - DNA, 100 bp, Homo sapiens
agaccatctacatctcccacaggaagtgtcacacagcagtcaagtatgtcccaaacgtctttatttcaagtaccattggaagaggaaggacaacgtggtg

SEQ ID NO: 169157 - DNA, 82 bp, Homo sapiens
cgtacgccctcatggggaaaatctccccggtgactttcagccacttccggctcctgcgtcgctccggaagcctgcgagttcc

SEQ ID NO: 169158 - DNA, 98 bp, Homo sapiens
gaaaacgctacgtgagctgggccctgggccagaggcagaaaacggacggaagaaaaggtctggccgggcagcgaggtcacaggccccacctttgctga

SEQ ID NO: 169159 - DNA, 74 bp, Homo sapiens
tggcatctgccggctgctccgcaccccggggtcccaggaagggcggcccagattttgcaagaacgaggctcaag

SEQ ID NO: 169160 - DNA, 50 bp, Homo sapiens
ggtccgctgagcggggcgacccgagatgcagaggccgtgaagaaggcagc

SEQ ID NO: 169161 - DNA, 100 bp, Homo sapiens
tgaaacaccagcgcgtgcacgggaaggcatacgatgacttgctggatgagttcatgcaggctgtgacagacaagttgtatctcccacttcacccttctag

SEQ ID NO: 169162 - DNA, 83 bp, Homo sapiens
gcaaggacagttgtttggtgttttgcttcaggttatagatggagagacctataaaggtttattgggcacttcctagcaccagg

SEQ ID NO: 169163 - DNA, 120 bp, Homo sapiens
gtcaacattcatgctgtttgtgggaagaatgcgcatgagtatcagcagtacctaaatactatactggcaattgctggagaagattttgcaattgttgcttctgatactcgattgagtgaa

SEQ ID NO: 169164 - DNA, 100 bp, Homo sapiens
cccaagctccactatcccaacggaagaggccggatggagtccgtgagatgggttttagctgccgccggagtcgaggctcatcagattcaagagatgtttc

SEQ ID NO: 169165 - DNA, 90 bp, Homo sapiens
gccttaaccgaattcctcatgggaggaagaaccattctgacaaagggtgatgatgatgcttatctgtgtattcatgaagatcagactgtg

SEQ ID NO: 169166 - DNA, 48 bp, Homo sapiens
tacattctcaggtggagacctatcaataacacagcagtggggcatgcg

SEQ ID NO: 169167 - DNA, 95 bp, Homo sapiens
caggggtgcagtgtgtctggtcttatgagggcccccagatgccgacggccctctctacctcccctacaagacgctggtctccacggttgggagca

SEQ ID NO: 169168 - DNA, 75 bp, Homo sapiens
aaaggcaagagtaacagcagcgccgtcccgtccgacagccaggcccgggagaaaacaactctgctcatggtgatt

SEQ ID NO: 169169 - DNA, 98 bp, Homo sapiens
aaaaatttgttactcaacaacaatatagagatcacctttttgataaggaagagagagaaaatccttcaaaacggagtagaattgaacgtgatatagat

SEQ ID NO: 169170 - DNA, 82 bp, Homo sapiens
gaagaccccgaaggaaaaggaggaattcgccgtgcccgagaatagctccgtccagcaggtactccaaagattcaggtttact

SEQ ID NO: 169171 - DNA, 98 bp, Homo sapiens
agctattgctgggattttgaggagactgcttttcaggaagccttggacgctgcaggtgataaacttgtagtagttgacttctcagccacgtggtgtgg

SEQ ID NO: 169172 - DNA, 74 bp, Homo sapiens
cgggagatcccaggcggtgacagagtggagccatggctagagcagaaaaatatggctcaggagactaaccagac

SEQ ID NO: 169173 - DNA, 60 bp, Homo sapiens
gtgcagtaacacaagtagccaagatgttaaaaagtgctctgggtgatcggattaaagaaa

SEQ ID NO: 169174 - DNA, 90 bp, Homo sapiens
ctgcagagcaacatgcccaaatgtgtcttgctgaatcagggctctcttatccctgccatcgacttacagtgggaagaagatcttcacctg

SEQ ID NO: 169175 - DNA, 90 bp, Homo sapiens
caatacttgggacttgatgggtttgtggagaggatcaagcatgcctgtcaactgctctctgatgtaaaggatggagtaaatcaagcagca

SEQ ID NO: 169176 - DNA, 100 bp, Homo sapiens
gggtgtgagctgcctgaaaatgcactcggatgccgccgctgtcagtttgaacttgttctggaagctgtgcgtcaccgtaatgaggcttgtaattcttgat

SEQ ID NO: 169177 - DNA, 100 bp, Homo sapiens
gaaactcggagtgtactccgcctgcaagactctttttgatcagaacaatgctgcaaaaaaagaagagtcagaaactgccaacaaaaatgattcttcaaag

SEQ ID NO: 169178 - DNA, 98 bp, Homo sapiens
actccatccggctgcccctggagcacctggtggaagaacaagtggcaggttttggagatcatattcattggaggacactggaagatgggaagaaagaa

SEQ ID NO: 169179 - DNA, 82 bp, Homo sapiens
aaagagaagactcatgttgctgactttgccccagagttcgtaatggacctgaaagtggcagcaagattatggttcagtttcc

SEQ ID NO: 169180 - DNA, 50 bp, Homo sapiens
tttccccagcagtagcctctgcgaccagctggaggagcaccggaattcac

SEQ ID NO: 169181 - DNA, 51 bp, Homo sapiens
ttaactcattcaaggttacccagttggcttccaaaagccaggatcgcaaat

SEQ ID NO: 169182 - DNA, 82 bp, Homo sapiens
agaacacagttggagaaaatcggcagctgagacggccttggccgaaaggacctaagtgtgaaataccccgaagacgtcccca

SEQ ID NO: 169183 - DNA, 97 bp, Homo sapiens
gcggcagagagggaatggtgcaggcaggcgctgagaaggacgcgcagtccatctctctcagaggagctctacggtgactttgaagacttggaaacag

SEQ ID NO: 169184 - DNA, 74 bp, Homo sapiens
gaaaatacaaggagctggacatcgagcctgagggaggggaaaggcgcagggtattgttgcagcatctggcagtg

SEQ ID NO: 169185 - DNA, 82 bp, Homo sapiens
gtggacgcgaggagccgggcgcttagaacagaggcttgcacaggtggagaaaaggtggacaagtcctattttcaagagaaga

SEQ ID NO: 169186 - DNA, 50 bp, Homo sapiens
ctaacttctctctcagatgttgaaaagcagacctactccaatgaagtcca

SEQ ID NO: 169187 - DNA, 75 bp, Homo sapiens
ctggacagctcgccctgttcgctctggatacgtcggtaacctttccagagatgtgacagaagctctaattctgca

SEQ ID NO: 169188 - DNA, 105 bp, Homo sapiens
ccgcggtagcagtgctggcggcggcgggtcaggagcagccgcagcgacggcggcgacagcagcaaaatgatgcttcaacacccaggccaggtctctgcctcggaa

SEQ ID NO: 169189 - DNA, 78 bp, Homo sapiens
tctgctgcttctgggccctacgcgcggcttgcgcgtatcattaatgggattggaaattttaagtgcctttgtggacag

SEQ ID NO: 169190 - DNA, 113 bp, Homo sapiens
aggcaacgtgttggaccttccggagcttctcagaagacagagggttttcttttgagatatttaacaccgtgcccgatatgcctctcaccaatgcccagctgcacctgtctcgg

SEQ ID NO: 169191 - DNA, 75 bp, Homo sapiens
tttggttggaatgctcttttaccgatgctttaacatacagccactagttttctgaatttccagatcccatgtggg

SEQ ID NO: 169192 - DNA, 116 bp, Homo sapiens
gccgaattccagacaaccatcccagacggcatcagcttccaggcaggcctgaaggtcgagttgctctaggtcgtaaccagcctttgaaaaaggagaaaccaaaatggaaaagcgat

SEQ ID NO: 169193 - DNA, 83 bp, Homo sapiens
cgctcgtggtggaggacttcgtgaaggattcgggcgcctgcttcagtgtgtactaatggtcacttgatgtgcgctggctgttt

SEQ ID NO: 169194 - DNA, 90 bp, Homo sapiens
ctctcgcggcggccggcggggcccgcgctgcagccggagacccggagaaagggttgatgataattagaagcatgctttccactgaacttc

SEQ ID NO: 169195 - DNA, 101 bp, Homo sapiens
tctatgggatgattgcagatggcacgcacaccaaccccgccgccctgcggatcgcccaccgtgcccatccccaggtatgacgccgtgcccatccagtccag

SEQ ID NO: 169196 - DNA, 82 bp, Homo sapiens
tcttgtgtgctccatagtttatcaaaagtgcctgagattgtgagggagacccaggacctaattgaacaaggggcactcctgc

SEQ ID NO: 169197 - DNA, 96 bp, Homo sapiens
tccaagaaaaaaaccacaaatgtttttctgttttgcctgaatacatgatttaaacaagagatttccacagaagatgtcaccgggtgcgcatcaatg

SEQ ID NO: 169198 - DNA, 75 bp, Homo sapiens
ctttcagctacttgaagatagccatcagccgctacgtgactcttttctccagatacgtcggtaacctttccagag

SEQ ID NO: 169199 - DNA, 82 bp, Homo sapiens
aagcatgaggctgagagaggaggagtcacccggacccagccacacacccatgacagacctggacacaaagatccaagaaaag

SEQ ID NO: 169200 - DNA, 76 bp, Homo sapiens
cggcatgagatgaagctgtgacagccaaactatgaattactggaaaaagaagtagaaaaaagaaaagtagccttac

SEQ ID NO: 169201 - DNA, 152 bp, Homo sapiens
gctggcggcaatagggaaagtgaggcagctgcaaggagggcggcgggactgcactcgagtgtccagacctgctcgatggagaataaaggcagccccgttgatgactgaaaatgacaaagcatccacctaacagacgaggaatcagctttgaa

SEQ ID NO: 169202 - DNA, 100 bp, Homo sapiens
gtggtgacagaaacttgcatggatgaaggccaaattgcagctgtgtgccgtgagtttcgagaggcccgtgccatgagaccgcctggggtgagcaaggcga

SEQ ID NO: 169203 - DNA, 75 bp, Homo sapiens
gttttctttactctggggtcccggctgccctgtggcctcgctcctcggagggctcttgatggaaatgtgtatgat

SEQ ID NO: 169204 - DNA, 101 bp, Homo sapiens
atttccatcaaaaagtgattaagcagagaatggagaagaaggttgattccaggtgggaaagcagtgccactctccgcttcacagatgccccctgccaagat

SEQ ID NO: 169205 - DNA, 101 bp, Homo sapiens
tagaatctgccgtcttttgaagcaccctaatattggcagatccagttcctaatggtttgcgagctttgccagttttctatgcctgcacagttggaataaac

SEQ ID NO: 169206 - DNA, 101 bp, Homo sapiens
tcaggactcctcgcctggctcggaaggtactccaaagattcaggtttactcacgtcatccagcagagaatggaaagtcaaatttcctgaattgctatgtgt

SEQ ID NO: 169207 - DNA, 80 bp, Homo sapiens
gcaccgcggcttaaatgatgtattttgtgatcgcagcgatgaaagagacggtctcgccacattgcccagactggtctgaa

SEQ ID NO: 169208 - DNA, 75 bp, Homo sapiens
cttcttggcttctcccagcatagccccagctcggattctgaaggtaattttgagactcctgaagctgaaaccccg

SEQ ID NO: 169209 - DNA, 82 bp, Homo sapiens
tagcagcgatggttctgaactaagtgaagagacctcatggcctgcttttgaaagtttggaaattttagcattcaggtgccag

SEQ ID NO: 169210 - DNA, 100 bp, Homo sapiens
ggacgccgctccgggcagccgagcctctgtgggagccggggccgcggcggcgcgggtgctccgggccgaggccgcgggagttgaccacatttggccattt

SEQ ID NO: 169211 - DNA, 100 bp, Homo sapiens
gcagggtctgaggtcatcggggatgtggacgaaggggccgacctcctagcgggcgatgatgagatctcatttgaccctgatgacatcatcaccaacatcg

SEQ ID NO: 169212 - DNA, 90 bp, Homo sapiens
ggctggagctggaggcgcggcgccggtgagctgagtattgcctaagtgtaatcttgaacatgggcggtgctgtgagtgctggtgaagaca

SEQ ID NO: 169213 - DNA, 82 bp, Homo sapiens
cccgtacgtcactaccactgtctctgctcacagtgccaaggtgctggagaatctggtaaaagcaccattgtgaagcagatga

SEQ ID NO: 169214 - DNA, 88 bp, Homo sapiens
aaaatgatgactaatttggttatggccaaggaccgcttacaacttctagatcacccggaagttcaggctgaattctgaaggcaaactt

SEQ ID NO: 169215 - DNA, 82 bp, Homo sapiens
cgcggcccggcctcggggcagccatggactcgcaggaattgaagcactgccctgggaagaactaggatgaggtattgacttg

SEQ ID NO: 169216 - DNA, 83 bp, Homo sapiens
ctgtattggtctcctgctcctagagggcgaactttctgaccaagtatacaactacccagagggcctaggagaagtgctgtata

SEQ ID NO: 169217 - DNA, 75 bp, Homo sapiens
ccagactcagaccaccaccagaaccatcacctcggagacccagacaatcacagataaagactatttcctgattgt

SEQ ID NO: 169218 - DNA, 98 bp, Homo sapiens
gtaatcagtctttgacaagtgatgagaagctgtcggagcttcccaaggatgctgtatgattatgttgaaaggaaacgaaaagaaaattcaggagccca

SEQ ID NO: 169219 - DNA, 50 bp, Homo sapiens
gaaagagctcgtgcagaatttactgtgtactaatggtcacttgatgtgcg

SEQ ID NO: 169220 - DNA, 100 bp, Homo sapiens
ataatattatcaacattgatctcctatttttggcttcaagattttgtgccaaccagagaggtgagagacttcagaggctgccctttcttttcatctgctg

SEQ ID NO: 169221 - DNA, 75 bp, Homo sapiens
ctcttactcgtgttccctgccactgtcttgttccgaggcggccccagagttgctgatgtatattcaagatgagtg

SEQ ID NO: 169222 - DNA, 89 bp, Homo sapiens
tagaagttgatgaatcaagaggaatgcacatctgtgaagatgctgtaaaaagattgaaagctttctctcctgcgctatggtggaaacct

SEQ ID NO: 169223 - DNA, 96 bp, Homo sapiens
tttctcagcaccttggcgaagccttgggtttctttcttaaaggactgatttttagaactccacatttgagcagagtcacctgatatgaaaaaggag

SEQ ID NO: 169224 - DNA, 75 bp, Homo sapiens
gattctgactttggctgttggtcaacagtgtcataaggtaaaataagcctcaaactccgatctcttcgagttaac

SEQ ID NO: 169225 - DNA, 100 bp, Homo sapiens
tacatgaagggacttgggatatttaattggataatagaagattgaaggttggtgttggtattaggagatctgcacatcccacaccggtgcaacagtttgc

SEQ ID NO: 169226 - DNA, 50 bp, Homo sapiens
gcggagctgcttcgccgctgcggctttatcctgtggataaacgcagagtg

SEQ ID NO: 169227 - DNA, 51 bp, Homo sapiens
ggattgactacggcaaagtggccactcagagcgccatgctgcactgcccct

SEQ ID NO: 169228 - DNA, 100 bp, Homo sapiens
cttggaaatcgatcacaaccaggcattaagttcacagtcccgcggcagtgctggtggccatggttcccgtagccagaaggagttgcccacagagcccccc

SEQ ID NO: 169229 - DNA, 75 bp, Homo sapiens
ctgtgctgccttaaaagtgtttacggaggaagaacgtgcaaaacgtgaggagctagagcgaatactggaagagaa

SEQ ID NO: 169230 - DNA, 98 bp, Homo sapiens
ccaaaatgacgaacacaaagggaaagaggagaggcacccgatatatgttctctaggccttttagaaaacatgggttttggccaaattgggcgagggca

SEQ ID NO: 169231 - DNA, 75 bp, Homo sapiens
catacagaattacgcatttccacttctaatggcagggaagcccacgaggagataaacatcaccttcaccctgcct

SEQ ID NO: 169232 - DNA, 76 bp, Homo sapiens
gtttacctccagtgtcccttcttccacatgaaaaggataagcctccagctgttccagacaatagaagacaggcaga

SEQ ID NO: 169233 - DNA, 75 bp, Homo sapiens
aagagtcaaccagaaagagattgggtacttaatggtaaactgtcttgagccccaccctcacctgcctgtgctggc

SEQ ID NO: 169234 - DNA, 100 bp, Homo sapiens
cttcgaggccgctttggcgccaaatcctgaggctactgcagcactggggtgtcagttgttggtccgacccagaacgcttcagttctgctctgcaaggata

SEQ ID NO: 169235 - DNA, 145 bp, Homo sapiens
tcctcagaaacaggctccaggccctgcctgccctgtgcctctgcgtgctggtcctggcctgcattgggggcccagccccagcccaggggaccccagacgtctccagtgccttggataagctgaaggagtttggaaacacactgga

SEQ ID NO: 169236 - DNA, 83 bp, Homo sapiens
ctcagaagaaagattctggaggaaaggtttacaagcaggccacgattgaatctctgaagtttggggattctcagcagttgcgg

SEQ ID NO: 169237 - DNA, 75 bp, Homo sapiens
tggagtggtggatcagaccaaagatggggtctcactctgtcacctgagctagagtgcagtggtgcgatcacagct

SEQ ID NO: 169238 - DNA, 100 bp, Homo sapiens
gccgaagagcggcggcggcagcggcgggaagatgtgccacctccaaagagccgtacgtccactgccagaagctacatcggcagtaatcattcatccctgg

SEQ ID NO: 169239 - DNA, 85 bp, Homo sapiens
ccatcaccttcaatccgctctactggaatgtgctccttcaggcagtgagagccttcctcccgccagcggtgcttccagcaactcc

SEQ ID NO: 169240 - DNA, 97 bp, Homo sapiens
gtgttgatgaagaaattgtttatgccaaatcaactgccttacaggtacatcaggaacgtctctatcaagaatacaatttcagcaaggctgagggcca

SEQ ID NO: 169241 - DNA, 83 bp, Homo sapiens
ctggagctgggtcagtccgccgctcaccccgcggccgcaccttcccgccttctcagatatctcccggggccaattcagcatct

SEQ ID NO: 169242 - DNA, 85 bp, Homo sapiens
gcttcacccgtacaggtagccccgccgccgcgcacctgccttcgctcccgcaccggacttggcctttaccctggaagagagacag

SEQ ID NO: 169243 - DNA, 75 bp, Homo sapiens
acagatctgtgggactggtttgaatccttccttgatgatgaagagggaaggtcagcctttaaagctacctgacac

SEQ ID NO: 169244 - DNA, 82 bp, Homo sapiens
tcttcaatgctgttaactggattgagtccagctcttgggatgagggactatgatgaaaatgaggtggacccttaccatggca

SEQ ID NO: 169245 - DNA, 100 bp, Homo sapiens
ccttcccggacacacaggatgacttcctcaagatgtatgtccctgggaagctgcatgatgtggaacacgtgctcatcgatgtgggaactgggtactatgt

SEQ ID NO: 169246 - DNA, 87 bp, Homo sapiens
ggagggtcgtggtctggctgtggcggaggagcataagaagaattccttcgacaatcctgagtggttttatcggcatgtggaagcaca

SEQ ID NO: 169247 - DNA, 82 bp, Homo sapiens
cacgtctcgtccacgacctccctaggctaactatatgtcagaaagcatcagcttttctcgatggacccattcatctaatgaa

SEQ ID NO: 169248 - DNA, 83 bp, Homo sapiens
atcggaagcctgcgtaactttctcccttgatccgggagtctttccactggatgcagaaactgaggcccagcagagattgagta

SEQ ID NO: 169249 - DNA, 105 bp, Homo sapiens
gcgtcggcttgtataacctgaaaacgctcctgtttttctcatctgtgcagtggggttgtctcctcacagactatgagctccttgaaagagggaatcgtgtcttac

SEQ ID NO: 169250 - DNA, 100 bp, Homo sapiens
cgaggaaccaccggatcgaagacagtcaagtgtagactctcgccaaagccgctctgggcaagacagcgtggaagatgaactggagatggccaccgtcagg

SEQ ID NO: 169251 - DNA, 98 bp, Homo sapiens
gtggaaaggctgttggagccacttgttacacaggtatccgttacagcactgatgtgagtgtagatgaagtaaaagctttggcttctctgatgacatac

SEQ ID NO: 169252 - DNA, 90 bp, Homo sapiens
ggacggtttcgccggcagtctcggaaggatcgagatcgagaccgggatcgtgaagatcggtctaaagatcgagaccgagaacgtgataga

SEQ ID NO: 169253 - DNA, 83 bp, Homo sapiens
ctaagaaagaatcttgtcactttagccactgctactacaggtgtggagcagaggatcatgtggaagcagtgaaaaagctccag

SEQ ID NO: 169254 - DNA, 140 bp, Homo sapiens
gcccagaccccgggatcggtggaggaagatgctttgctctgtggacccgtgagcaagcataagctgccaaaccaaggacactgcccatctctaagataagaacctggaaaggggactctgttggccattggaaattgcag

SEQ ID NO: 169255 - DNA, 82 bp, Homo sapiens
ccagggtaggacggactgttcgaatccacattcatctcaatggaaggatcctgccttaagtcaacttatttgtttttgccgg

SEQ ID NO: 169256 - DNA, 50 bp, Homo sapiens
aactgcacaatgaggaggagaatgagatcaataagatggagtggtggagc

SEQ ID NO: 169257 - DNA, 75 bp, Homo sapiens
agctggggcagaagcgcgtggtcaaggtccatccagaaccacccactgcatgcagagaaaaacagtacctaataa

SEQ ID NO: 169258 - DNA, 100 bp, Homo sapiens
aaaagtgaagaaagtgatcataggagaaaaccatttcaggttcccatgcctacctcaccttggccctgcattgggtggagccacgtgaacacataatccc

SEQ ID NO: 169259 - DNA, 75 bp, Homo sapiens
cttgaaggcatcgtgtggcaggaaacagaagatgacacgatgaggcgagtggtacgacagagcaagtttcggcat

SEQ ID NO: 169260 - DNA, 96 bp, Homo sapiens
attgaacgtttgacatgtggcaagtttgaattgagatgtgctatgacagaaggcaggcactgccaggtgcacctcctggatgataggagactggag

SEQ ID NO: 169261 - DNA, 82 bp, Homo sapiens
tctgcagtgtcttccacaacctgggtatcatgaactgatcactaaatatgggaagttggagcctttggcagaagtggaccta

SEQ ID NO: 169262 - DNA, 98 bp, Homo sapiens
agacggaaaaagtcgatctggagcttttcccctccccgggcacggaatgttaacactggtgaattagcagcaattaaagtaataaaattggaaccagg

SEQ ID NO: 169263 - DNA, 97 bp, Homo sapiens
aaaagccacaagacattgtacagaacattgtagaagaaatggtgaacattgttgttggagaatgtatccgttgcctacattgggatattaatcggtg

SEQ ID NO: 169264 - DNA, 96 bp, Homo sapiens
tgcccggggccctcatggacggttggatcagggccgaaggagtcagtggatcggtggggaaaatgctgcttaccctgggccctgggctgtagaaag

SEQ ID NO: 169265 - DNA, 145 bp, Homo sapiens
gccagaaacagaagactggcccagcagatggagaatagaccctctgtccaggcagcattaaaacttaagcagaactgtgccgcataaatgaggatcagaaggtggccctggatcttgacccctatgttaagaagctacttaatgc

SEQ ID NO: 169266 - DNA, 100 bp, Homo sapiens
ctgggacgcacagagaccgtgaagattccaagttcaggagaactcgaccggagtgggaatagctttgcgaaaaatgggcgcaatggccaagccagattgt

SEQ ID NO: 169267 - DNA, 83 bp, Homo sapiens
ccgcccgtgcccacggagcccaaacaggttcaaggtgtttgcagactatgaagcctacatgcagtgccaggcacaggtggacc

SEQ ID NO: 169268 - DNA, 71 bp, Homo sapiens
agccctcaaggaagatggtgtcctctgctgccaggaggcttcaggtacaactggccacagagatagtcctg

SEQ ID NO: 169269 - DNA, 83 bp, Homo sapiens
cgagctgtcagagcccggggacggcgaggccctcatgtaccacacggactacgagaaagccctgttcttcccctgcaaggcgg

SEQ ID NO: 169270 - DNA, 98 bp, Homo sapiens
agtgtctagtgaatatcagctcctgggtcatttttctccctgaggacaacctgagggtatgttagagcccaccaaggaaccactgaaaccactttctg

SEQ ID NO: 169271 - DNA, 80 bp, Homo sapiens
ttcccataagagaatcccattatatgttgatgtattaaaagacctgagaacctggtgggacctatattcagagacttaac

SEQ ID NO: 169272 - DNA, 82 bp, Homo sapiens
ctgccgtccatgcggaagatcgtcgccacctggatgctggagtgtactaatggtcacttgatgtgcgctggctgttttatcc

SEQ ID NO: 169273 - DNA, 100 bp, Homo sapiens
tccaggagcccctttttaagcaggtggctcgctgtgtttccagcccccatttccagtgctcctggaaggaccccgaggcagaagccgcccttgagctggc

SEQ ID NO: 169274 - DNA, 97 bp, Homo sapiens
gcagcaccacccaagggtccattcagattgaactacatttcagtttcaccagtgatcattaaagaatgggcagcttacaaaggaaagtctcctcaaa

SEQ ID NO: 169275 - DNA, 82 bp, Homo sapiens
gtcccgctgccgtcgccgccgccaccatgcccaagagaaagatccacatgaagaccatgcccgccgccatgttcaggctcct

SEQ ID NO: 169276 - DNA, 75 bp, Homo sapiens
ccacttgaaaccattagtgagctgcacccagtcagcttgaagagtttcaaatggaccctaccactgagaaatcaa

SEQ ID NO: 169277 - DNA, 95 bp, Homo sapiens
ctgggatttctgctcctggctgcaagattgccacttgatgccgccaaacgtggaatgaggtaccatctactgtctccagaggaccgagaagaact

SEQ ID NO: 169278 - DNA, 80 bp, Homo sapiens
ccctcaaagccaggagctcgatgtgcaagtgccttatgcccgctcagaggcccacctcacagagctgctggaggagatat

SEQ ID NO: 169279 - DNA, 96 bp, Homo sapiens
aaggaaccagtgaaatttgttccacaggatgtgccaccagaacccaagaagattccgataagaaacacgtcctgacacagctctccctgaggagca

SEQ ID NO: 169280 - DNA, 100 bp, Homo sapiens
atttgctgaggatggagactgcagccaactcaacaacttctctgtccatctcaccaccaagtctgaatatcgataacttgatgaccccagaaggagttgg

SEQ ID NO: 169281 - DNA, 83 bp, Homo sapiens
cgacaagccgctggcagccgcggatctcaccgccgctcaggaaggatatggccctgaagccacatgagcggaaggagaagtgg

SEQ ID NO: 169282 - DNA, 96 bp, Homo sapiens
ttacccatttcaaaggtggatacctgaaaggtctcctaaccgctgcagagagtgctttcttccagaggttaacaggaagatctcgagggccctggc

SEQ ID NO: 169283 - DNA, 75 bp, Homo sapiens
ctcgtcgccgttcgccacccaagatgaggtggaaagtgagaaatggtacctgtctacagacttcccttcaacatc

SEQ ID NO: 169284 - DNA, 100 bp, Homo sapiens
cagcaactggctgagggactcacagctgatgacctgctgctcgtgctgatctcagctcctgcccctcctaaagctgaagccaaagcgaaggctttaaagg

SEQ ID NO: 169285 - DNA, 100 bp, Homo sapiens
cagagagtcaaatcattcctgtgatgccagataaccagttcaggatgtccatcctggaacgactggagcagatggagaggaggatggccgagatgacggg

SEQ ID NO: 169286 - DNA, 88 bp, Homo sapiens
ccgccaccatgcctcggggaagccgcagcgcggcctcccggccagccagggaggtatggaaacattggaacttcaaaaggacatcaaa

SEQ ID NO: 169287 - DNA, 75 bp, Homo sapiens
cctccttcgccgccgcgcacaaccgcacgtgcaggttacctgtcctgctgccgattcctggatgacaatcagatc

SEQ ID NO: 169288 - DNA, 98 bp, Homo sapiens
tccagggccgccccgcccgcaggtgctatgctgtgggccccgctcaggtagttaaaccagagagcaatgacaaagaaacagaagctgcgtatgaatca

SEQ ID NO: 169289 - DNA, 74 bp, Homo sapiens
tggaaccatcatatgcaccagcacgcctggctaaatctcagtgaatatcttccggactctgccgcccagtgaga

SEQ ID NO: 169290 - DNA, 79 bp, Homo sapiens
agcggagacgggagtattatgaaaagatcggacagaagatgagcctgtcggtcctggagggtatggggttccgtgtggg

SEQ ID NO: 169291 - DNA, 100 bp, Homo sapiens
gaatccgcccgcaagagcgagccgcctgccccggtgcgcagacagagctattccagcaccagcagagggaatgaaagctactggttgattttaaagtgcc

SEQ ID NO: 169292 - DNA, 100 bp, Homo sapiens
caccacaataatccacagccaaggttggtactaagaagtgcctttcctgacgtctctgctgcttggaaccgcttctagagcagtctctgcttttgccttg

SEQ ID NO: 169293 - DNA, 100 bp, Homo sapiens
gtagtttcctgacctctgacacgtattgtctcaagattaaagctctacccttctccaaaagaagagccaagagaaggtccttttctacaaatatcagagc

SEQ ID NO: 169294 - DNA, 101 bp, Homo sapiens
cagcccagacgcggcacagagagggcctgggagcttgctgcagcttcaggtctcctctgagcctccggcctccataagacccaaaacagatgacacctctt

SEQ ID NO: 169295 - DNA, 75 bp, Homo sapiens
ccaggatctcccaagtcgggaccaccaccagaacagtcgatgacagcattcagaggagacggcaaagttataaaa

SEQ ID NO: 169296 - DNA, 74 bp, Homo sapiens
caaccgcgaggaggacgccgcgctcttcaaggttggtgttcgaggaagagacattgttgttcttggtgtggaga

SEQ ID NO: 169297 - DNA, 80 bp, Homo sapiens
ttgccattggggtgcagcagctgcaccccaccttgatccagcggacttacggggactggtgattgcagctggaagtgccc

SEQ ID NO: 169298 - DNA, 100 bp, Homo sapiens
tgggaatggcaggctgcgtcccactgctccagggcctggtcctggtcctcgccctccatcgtgtggagccctcagcgattattggagccggaattggtgg

SEQ ID NO: 169299 - DNA, 101 bp, Homo sapiens
aacattaatcagaaggtgaagtttcagatcttggagaaattcattcaaggcttttggatcacagaccagttattcaaggtgaaactcgttattttgtaaaa

SEQ ID NO: 169300 - DNA, 148 bp, Homo sapiens
cagctccggcggcagcaacattgactacgaggaatggcggcggctgccgcaggacctgcagcatcccagagaattgagcccctgagtcctgagttggtggcagctgcatctgctgtggcagattctctcccttttgataagcaaacaa

SEQ ID NO: 169301 - DNA, 75 bp, Homo sapiens
ctccaaggtttgaaaagcagctggcctgcaaggaaatacaactggagcacgcaaagcaagcctttgtgcaacggg

SEQ ID NO: 169302 - DNA, 100 bp, Homo sapiens
gataatcagagtggaggaagtacagccagcatctctgctggatgaaccgaatcctaacagtccagccaatagccaggcagcacagctttatcaggaaaac

SEQ ID NO: 169303 - DNA, 58 bp, Homo sapiens
gtttattctcccatagcatgtgaaaatatttacaccagcagctccagttcataccaat

SEQ ID NO: 169304 - DNA, 100 bp, Homo sapiens
cccaagaagaccattcagatgggatctttccggatcaatccagatggcagccagtcagtggtggagtttcagagtcaagtggtgagatcaaagacttttc

SEQ ID NO: 169305 - DNA, 101 bp, Homo sapiens
caaccaaccctgatttcctgcttctccttttcatgagtgttcctgtggtctctgcacctcctttctagagacaagagagacacctccaacttcgacaaaga

SEQ ID NO: 169306 - DNA, 124 bp, Homo sapiens
cctggatggaagatagcttgaacagggctgacaacatttttccttttccggtcttccgaccccgaactccaccggaggcaattgcactgtgtagccgtctgctggagtatacaccaactgcccg

SEQ ID NO: 169307 - DNA, 50 bp, Homo sapiens
ggaaaatgtagcttcccggttaagccacatccgagtctatttgcccccac

SEQ ID NO: 169308 - DNA, 75 bp, Homo sapiens
gatgcacgttccatccggcgctcagctgggcttgagaaaaagcttgtggtgaaggggggcaaaaaaaagaagcaa

SEQ ID NO: 169309 - DNA, 98 bp, Homo sapiens
atggaggcggaggtcgataagctggaactgatggtatgccattttgaagactgagacgttggagttttatcctagaggataaaggaaatctttgggaa

SEQ ID NO: 169310 - DNA, 100 bp, Homo sapiens
ggagaaggacgaagaggaagccttggaatttatcatggcatccagcattgaccactacaagtaaaatgcgaattccacattctcatgcatttattgatct

SEQ ID NO: 169311 - DNA, 76 bp, Homo sapiens
aagagaagatggttggcggcattgcccagatcatcgcacccccagagcgcaagtactcggtgtggatcggtggctc

SEQ ID NO: 169312 - DNA, 100 bp, Homo sapiens
caaggaggccttccagctgtttgaccgaacagtttctccacagacactacccaaagcagtccttcactacagtggcagacagacctgaaaattttcatct

SEQ ID NO: 169313 - DNA, 100 bp, Homo sapiens
ctggtcgtagagaggagtaaagtcacacccaaaggactcgctgattcttgagaagagtcaaaactggagctctcaaaaaatggaccatattctgatttgc

SEQ ID NO: 169314 - DNA, 75 bp, Homo sapiens
gatcctactgttccagctgtgaaacatcgtgagaaagatcagtctaaagaaaaggagaagaaagtgaaaaaaaca

SEQ ID NO: 169315 - DNA, 98 bp, Homo sapiens
ccgcgatggaataatgcccagcggcccgccaggtcccggcaggtgacagcagggacatgtctcgggagatgcaggatgtagacctcgctgaggtgaag

SEQ ID NO: 169316 - DNA, 75 bp, Homo sapiens
aactcagtcactggctgcaacaggaccacagtcaagacgatcatagtcactggttgaaaatcgatgactttaatg

SEQ ID NO: 169317 - DNA, 100 bp, Homo sapiens
ggcgtgaacgctctggggctcagccaggcctgcgcgggcccgaggccggaggaacccggactccggcgtagcgttcagtgatcggattttgtggttggtt

SEQ ID NO: 169318 - DNA, 100 bp, Homo sapiens
gttttatacttgcttttgcttcagcgttctgtggttgtcaacaggtgtggccgacgacgatgccctcgctgaggagcgcatgcggagaggccagaacgcc

SEQ ID NO: 169319 - DNA, 100 bp, Homo sapiens
gcggctgccgcaggacctgcagcatcccagagagaccatcatgcagacatcagagactgggtcggacacaggctcgacagtgaccttacaaacatctgtg

SEQ ID NO: 169320 - DNA, 88 bp, Homo sapiens
gggaccatgtggaactggctaaaaatgtcatttacagctgatttcatgccaatattgggaaccaacctaaatccagaattcatttcag

SEQ ID NO: 169321 - DNA, 75 bp, Homo sapiens
ctctggataaggaccagtacctgcccaggaaactgatatttgaatggtggtacttccataagcatggcacatctt

SEQ ID NO: 169322 - DNA, 99 bp, Homo sapiens
ctggttctgaaagacatctcacatatattcaaaagatcttcaggatggaggaatctgtggagcttcctctcacccatcctgaatattatgaagagatgg

SEQ ID NO: 169323 - DNA, 90 bp, Homo sapiens
ccaagagcgtcagtgaccgcagcagcctcaacaagtctattatcctcccagtccacaacgctgaaccgtggctggacgaatgtttgaggt

SEQ ID NO: 169324 - DNA, 51 bp, Homo sapiens
tggcaaagatgagggggattcttaagttgctctatatgcaatcagtgctgt

SEQ ID NO: 169325 - DNA, 75 bp, Homo sapiens
cccaggccctggaccgccaaacaggagtctccccaggacagtgctatcacccgggatattaaccgaacattccca

SEQ ID NO: 169326 - DNA, 100 bp, Homo sapiens
aggacttagaggaaccccgggctattgtgttagatcccatggttgggtatcgtcagatcctggaaaaagccattcagttatctggagcagaacaactaga

SEQ ID NO: 169327 - DNA, 83 bp, Homo sapiens
ccccgggcccccccacggcctggcccggccggaggcgctttactaccccgatgcagagagaacttgtttatgcaagaggagat

SEQ ID NO: 169328 - DNA, 98 bp, Homo sapiens
aagccaagagattattccttttccaagtaccaaaatgatgagaaaccttttatgtgtgcatgcagcagaacaaggacggccccctgagcacaccagca

SEQ ID NO: 169329 - DNA, 100 bp, Homo sapiens
cctatggaagcagaagaagctgaggatgaagaagatgctggttcgatgcccagaactgaatgctgtgctccagctgtggcctcaccggtgctgaatagag

SEQ ID NO: 169330 - DNA, 90 bp, Homo sapiens
gttaggccgagctttgcgggaaagcagcgtgggttgccagcgttgatgtggtggagaatgaagaggccagcgctagcatcattgttaaaa

SEQ ID NO: 169331 - DNA, 83 bp, Homo sapiens
aaggactcctgaaccagctcgtcctggagcacctgcagctggcgcctctgcagtggggttgtgaccgagattcccgacgagag

SEQ ID NO: 169332 - DNA, 100 bp, Homo sapiens
gcacacaagtgtgaggagttgctaaatgctcagttaatcagctgtgttcagcgaatacttatgaacagaaggctccagcagcagtacaatcagcagcaac

SEQ ID NO: 169333 - DNA, 100 bp, Homo sapiens
tcttaaaaatatggcccatcataagctacaaacccttgcaactaacctcttggcttctgaggcatctgacaagcacttgcacctcctgcgccgccgcccc

SEQ ID NO: 169334 - DNA, 82 bp, Homo sapiens
gtcctgccgtccatgcggaagatcgtcgccacctggatgctggaggacactcatgaggaccatgatacttccactgagaata

SEQ ID NO: 169335 - DNA, 75 bp, Homo sapiens
gaatgtcattatcagacacaatgggtgctcgaatcattgtgactccagaagatgcactttatggatggaaattta

SEQ ID NO: 169336 - DNA, 100 bp, Homo sapiens
agtgccgcgcagagctcaaggactacctgcggttcgccccgggcggcgtcggcgactcgggccccggagaggtatatcccgtgccttacctgactggggg

SEQ ID NO: 169337 - DNA, 88 bp, Homo sapiens
tctcaaggacactgcatcgtcaaactgatcccctggccgttggaggagcagttctgcaggacaagttcgagcatcttaaaatgattca

SEQ ID NO: 169338 - DNA, 98 bp, Homo sapiens
ctccagccatggagccgcacgtgctcggcgcggtcctgtactggctgctgctgccctgcgcgctgctggctgagacacctatggctgccgatgaaggc

SEQ ID NO: 169339 - DNA, 100 bp, Homo sapiens
ggagacggagccgatcccggcctgagcaagcggccgcgcactgaggaggcggcggccgacggtggcggcgggatgcaggctgaccggttccctgatgtgt

SEQ ID NO: 169340 - DNA, 82 bp, Homo sapiens
caccatgcatgttatgaaagatctccttccagaaaccacctaccggcaacataagctttacaacaaggagttgtatgctgac

SEQ ID NO: 169341 - DNA, 98 bp, Homo sapiens
caacagtgtagtggcgtattccacatagcaaacaggatcagttcgacagcttagacaagcatacacaatggggaattgacttcttggaaagatatgcc

SEQ ID NO: 169342 - DNA, 101 bp, Homo sapiens
tgaccaagaacgtgagcaagcccaggcacagccgacgccgcggggtgcgcacacggtcagtgggcgagtgtgtcgagtactactacctgtggaagaagtcg

SEQ ID NO: 169343 - DNA, 75 bp, Homo sapiens
cagatgttgtcaaggtggcctaccaggaggccaggggtgtcgccatgggttttcagagaaagatgctgatgaggt

SEQ ID NO: 169344 - DNA, 49 bp, Homo sapiens
ggcagatctctacatttctgaaggagaagagaagtttacctttattgag

SEQ ID NO: 169345 - DNA, 83 bp, Homo sapiens
atccttaggagctctgcagaacctcacggccggaagtggaccagaaggtgggagtcaatcattttgacaagtctcctgaaagg

SEQ ID NO: 169346 - DNA, 75 bp, Homo sapiens
atggtcagaatcaacaagattgggaagaagttcggcctgaagtgtgagctctccccactcaaaggcatcccgaag

SEQ ID NO: 169347 - DNA, 51 bp, Homo sapiens
cagcactaccactaaaccaatggggatgagaagagacgtagagttacatcc

SEQ ID NO: 169348 - DNA, 99 bp, Homo sapiens
gatgagttaaataaagaaattcagaaggagatggatcaaaggtatctgtgcctaggtttgctgtggggattgtaataggaagaaacggggaaatgatca

SEQ ID NO: 169349 - DNA, 50 bp, Homo sapiens
cggcagctgccccgtctgagaaattgcagtgagtgccagcaccatccccg

SEQ ID NO: 169350 - DNA, 82 bp, Homo sapiens
ggaggggcggagggagacgcccgaggacagggaggtgcgtctgcagctggcgcggaagagatgccatggacaatattaccag

SEQ ID NO: 169351 - DNA, 100 bp, Homo sapiens
acacgggctgcaacctgcagcacatcagcgaccgggagaacatagacggtgtatgtggaatttgatgatcttgaatgggataaacgagagtgggttaaag

SEQ ID NO: 169352 - DNA, 100 bp, Homo sapiens
ggtggtcaccaaagcaggactcatcctctttgggaatgatgacaaaatggtctgtgctgccaacatagtctcacaagatggtgaacagaatggtctcatg

SEQ ID NO: 169353 - DNA, 100 bp, Homo sapiens
tttcaagccttggaaatggaggaagaagaaaagcgaaaagttcaaacacacgtcagcagacacagggaatatggaggttctgcacctgtatggaagtgag

SEQ ID NO: 169354 - DNA, 101 bp, Homo sapiens
agaaagttccgccatgagctggggcacggagctgtgggtgattcgcaaggggtggctcaccatcagcaacattggcatcatgaaaggcggctcgaagggat

SEQ ID NO: 169355 - DNA, 98 bp, Homo sapiens
tctcattctgcagctcatcttctcaaaaacaggtactccaaagattcaggtttactcacgtcatccagcagagaatggaaagtcaaatttcctgaatt

SEQ ID NO: 169356 - DNA, 75 bp, Homo sapiens
caaaaatgacccaccaatggaagcagctggcttcactgctcagtgaagacgacccgggctttccaccgcttgcgc

SEQ ID NO: 169357 - DNA, 82 bp, Homo sapiens
gttggcacacatggttaaggaacaggaggaaaccattcagagagatggggtgatgattatgatgaagaaggtgaagaagcag

SEQ ID NO: 169358 - DNA, 75 bp, Homo sapiens
cagagaaggaaggatcttctcatgcacagaggcaacaaatggcaactttctgaaatgattacggacctgaagcca

SEQ ID NO: 169359 - DNA, 100 bp, Homo sapiens
gccctccattcttgctgatgtattctgcatattagttccagggtcacccccgagaggacaacaggcatctggaagtgctctctcgccactctgggtgctt

SEQ ID NO: 169360 - DNA, 75 bp, Homo sapiens
cgagaattaaatgccgagaaggccagtacgggaatgaaggatggcagcatgccgtgcattaaaagctgttttggt

SEQ ID NO: 169361 - DNA, 100 bp, Homo sapiens
actgaaaggcaaggccatttaaatgtgtgtcagttgtacccgaggcgttctcagcagcagcaagtacctgtggtggatttccaggctgaactgaggcagg

SEQ ID NO: 169362 - DNA, 100 bp, Homo sapiens
acaaagatgatgatgaggtttttgagaagaagcaaaaagagatggatgaagctgctacggtgttggggatgtcctttgcactgaccctgaactgccagat

SEQ ID NO: 169363 - DNA, 132 bp, Homo sapiens
ggcccgtaagctggtcatcattgagagcgacctggaacgtgcagaggagcgggctgagctctcagaaggaacacggctctagataaggaggggcagattttctgcagcaagcactgtcaagacagcggcagg

SEQ ID NO: 169364 - DNA, 104 bp, Homo sapiens
atacccagaactgcctcccgattttatctttggagaagatgctgaattcctgccagacccctcagctttgcagtgcatttgcacagtataacttggaccagttt

SEQ ID NO: 169365 - DNA, 83 bp, Homo sapiens
ttttcgaaagctgggtttcccgggagatcccaggcggtgacagagtggagccatggctagagaggctgtggccaggccagctg

SEQ ID NO: 169366 - DNA, 101 bp, Homo sapiens
agcaaatgcattgagcttgggtcaggacaattccatttggggaccagagatggacggtcactcagcctatggaggtgctgctacccccgtatgatgatgcc

SEQ ID NO: 169367 - DNA, 100 bp, Homo sapiens
cttaacagcaattgctttgaacatctcatacgactgctacagaactgcaaggtcatgactgtccaaagtatgataatcacatgagagtgctcgttgctac

SEQ ID NO: 169368 - DNA, 96 bp, Homo sapiens
aggacagcgacagcgatcagctgttttacaccaagatcttcttggacccggagaagaggcccgaggaggcagagagagtgaaggcccaggttcagg

SEQ ID NO: 169369 - DNA, 118 bp, Homo sapiens
gtttacccccctattcaagttcatgtcacgctgggtaatgaggatttgactgtgaaggcagatgatgttgagggcaaaattagacaaatcattccacctggattttgcacaaacacga

SEQ ID NO: 169370 - DNA, 75 bp, Homo sapiens
ctggttccatagactacattagtgtgtttgatgtcaaatcagccagagctgtgattgtgcccgctgagtggactg

SEQ ID NO: 169371 - DNA, 50 bp, Homo sapiens
ttccaggccttcgccgagctgtgcaggttcgatacaagaggctgttttcc

SEQ ID NO: 169372 - DNA, 100 bp, Homo sapiens
tccagatcgggatttacgtggagatcaagcgcagcgatgggcgccctgcgtccggcagaggaggcgagcatcccgctcaggtgatgaggaacccctcgcg

SEQ ID NO: 169373 - DNA, 98 bp, Homo sapiens
ccagaaaggaactcccaagcgactgcaggcagaagctgagacggctaagataatatccctgttcacttttgccgttggagtcaatatctgcttaggat

SEQ ID NO: 169374 - DNA, 100 bp, Homo sapiens
acgagggcttcggcttcgtcatcgtgtcctcggtgagcaggcccgaagcaggcacgacctttggtagacgttacatccaagaggaaataatccaggcaag

SEQ ID NO: 169375 - DNA, 100 bp, Homo sapiens
ttaatttcaaagcttttcccatggaggctaacatttccaatgatcactggccatctttggttcaagaggctacaactgaggccttgaagctttgcttttg

SEQ ID NO: 169376 - DNA, 100 bp, Homo sapiens
ctcaaatacacacacctgttgccattatagagctggaattaggcaaatatggacagggtctaaaattcccaggactccacagctttgcaccagataagcc

SEQ ID NO: 169377 - DNA, 83 bp, Homo sapiens
ctttgggtcctgaatcttctgggagctgaggaaccagatatcttgaaaagctgccagaaagacagccctcagcgcctttttcc

SEQ ID NO: 169378 - DNA, 135 bp, Homo sapiens
gatggctgcccacgggggctccgcggcgtcctcggcgctgaaggggttaattcaacagttcaccaccattaccggaatgaatctgaagtctgctgcagtaaaacacagaaggctttaaaatgttttcttgcataa

SEQ ID NO: 169379 - DNA, 98 bp, Homo sapiens
agtcacacatgccagagattgctcaggaagcaatggagttccagaaacgccgctggactgcgaggtctccctgtggtcgtcctggggactgtgcggag

SEQ ID NO: 169380 - DNA, 100 bp, Homo sapiens
ctctaacggggctttctacaagtgctgtccccggcataggtccatctctgcagaagccatttcaggagtacctggaggctcaacggcagaagcttcacca

SEQ ID NO: 169381 - DNA, 59 bp, Homo sapiens
caccgtgacttcccggacgctgggaaatggactaatggctgaaggataaatcaacatgg

SEQ ID NO: 169382 - DNA, 82 bp, Homo sapiens
cctgcactatgcagctacatcagacacagatggcaaccagaagttattgagtttctgtgggagatactgtgctttgaaaatt

SEQ ID NO: 169383 - DNA, 98 bp, Homo sapiens
tggaggaactggcccggaaacaggaggacgtcttgaggaccggcccagctcaggctcctggggcagcggcgaccagagcagctcctcctttgacccca

SEQ ID NO: 169384 - DNA, 96 bp, Homo sapiens
caaagagcttgctccctacgatgagaactggttctacacgcgagctgtgccaggtggagctcaacaggaaagtcctagcggatctggccatctacg

SEQ ID NO: 169385 - DNA, 90 bp, Homo sapiens
ctggagagggggcgctgagctgttggggcagaggtggaggagacactgaagcgactgcagagccagaagggagtgcagggaatcatcgtc

SEQ ID NO: 169386 - DNA, 75 bp, Homo sapiens
cgagcgcggaggaccgggaggctcccgggcttgcgtgggctgcctgctgtttcccggggagatcatgaaacgagg

SEQ ID NO: 169387 - DNA, 51 bp, Homo sapiens
aaggattccaagtaactcttatttgatcagcacttgactgtttattttcaa

SEQ ID NO: 169388 - DNA, 74 bp, Homo sapiens
tcgtgaagaacctgaaggacacactagtacgaggatgtcgtccaggaaagattgtgcagatgactgaagcagaa

SEQ ID NO: 169389 - DNA, 50 bp, Homo sapiens
cgtgtggcatgaaacagaagaagatggtatacctcaagtttactatttcg

SEQ ID NO: 169390 - DNA, 73 bp, Homo sapiens
cccccaaggggcgggcgctgtgagtgcctggaagagctgggatgtctggttgagtcctatggcatgaatgttt

SEQ ID NO: 169391 - DNA, 82 bp, Homo sapiens
gaggcgcgggaggtgttcgagaacgaccccgagacggatgaaacgaggaggaagagatagtgaccgtaattcatcagaagaa

SEQ ID NO: 169392 - DNA, 95 bp, Homo sapiens
ctgcagtactgcgtggtcaacatcctctctgtcacttccgccatcgtgatcaccggggaacccttgatccgtcgatcagatgataatgaaaaggc

SEQ ID NO: 169393 - DNA, 75 bp, Homo sapiens
gttattcgagtgaccgagaccgcggccgggaccgaggtgccggtggtggtgtgcacattgagccccggtatagac

SEQ ID NO: 169394 - DNA, 75 bp, Homo sapiens
ccgcccgaccccgtcccgaccctggccgccccgagcggagcctggaggagcctcctcaacaagcccaagagtgag

SEQ ID NO: 169395 - DNA, 83 bp, Homo sapiens
ggaccaaccacgtcttcctgggctgcagctccgacagttagttaatatgtgcatcaacccagatccagagaagcgaccagacg

SEQ ID NO: 169396 - DNA, 82 bp, Homo sapiens
gggatgacaaaggtgcttcaaaggagaatgcagcctcaaggaataggttctcctagtgtctatcatgcagttatcgtcatct

SEQ ID NO: 169397 - DNA, 100 bp, Homo sapiens
gagtgggctcggttcgagatggagcgggcgcactgggaggtggaacgggccgaactgcagaactgataaatttcaaacggaagagagtggcagcatttag

SEQ ID NO: 169398 - DNA, 75 bp, Homo sapiens
agcgccagcagctggactatggcatctatgttatcaaccagaatcatttgctgtttcaaatagagaactgtgcga

SEQ ID NO: 169399 - DNA, 100 bp, Homo sapiens
ggacaaaggcgcaagtcgagaggaaactgttgtgcctcttcatattggcgatcctgttgtgtgtcatggagaaactccagctgggcccagagattctgca

SEQ ID NO: 169400 - DNA, 100 bp, Homo sapiens
gacctcctcttagaagagtcaaatgttcagccagtatcaacaccagtaacagtgtgtggagatatccatggacagatggagtttcactcttgtcacccag

SEQ ID NO: 169401 - DNA, 100 bp, Homo sapiens
agaggccaagaaggaagaccgggagctccaggacccattggagttggtgagcctggacagccatctcttgcatggcaccaagaatgttaccaattcaagc

SEQ ID NO: 169402 - DNA, 87 bp, Homo sapiens
gaatcaagcgggagttcaaggaggtgctgaagagcgaggagggtgtaccagtgatggcaataagaaacaaaatgatatcagaaggac

SEQ ID NO: 169403 - DNA, 100 bp, Homo sapiens
tctccgcattgcttaactggagcaactgagcaaacggggattcagcgtccgatcctttggaacagggactcacgtgaagcttccaggaccagctcccgac

SEQ ID NO: 169404 - DNA, 88 bp, Homo sapiens
caaggaaacataagttggaggttctggaatctcaggaaggatttgatgccctggatccctttattcccatcctggtttccaactataa

SEQ ID NO: 169405 - DNA, 75 bp, Homo sapiens
caactccaactccatgtacatcgagtcactttgtggcatgtatgacagccatcttaaaccagatgggtgaccagc

SEQ ID NO: 169406 - DNA, 75 bp, Homo sapiens
cggtgacctcaccgcctcggttcgccctcagccgccccgcttgttctaaagacgaaggggaactccctagtgcta

SEQ ID NO: 169407 - DNA, 83 bp, Homo sapiens
cccgggcctgcttccggcagttcttcactaagattaagttccgatgaagttaaattccgtcaagatttaatgaatattgcggg

SEQ ID NO: 169408 - DNA, 100 bp, Homo sapiens
tcgtcccgataagaagaaaatacttttcttcaatgataagagctgtcagttttctgtggatgaagaggcgtggagctatttcctatgacagttctgatca

SEQ ID NO: 169409 - DNA, 90 bp, Homo sapiens
gtattacttttggagtgtttggaagtaaattcagggactgttcagtcttacactgaatgaacgtttcagtataaatggtggttatctggg

SEQ ID NO: 169410 - DNA, 80 bp, Homo sapiens
ggtgaagacaaggggggatatgtgatcaaagcatcagaagctgctctgttaaaagcgaaaatgaaacaattgcctgcggc

SEQ ID NO: 169411 - DNA, 75 bp, Homo sapiens
atcatttctaagcaggttcatgccagcccagaacagagaatcagaattcaaagaagctttttcactatttgacaa

SEQ ID NO: 169412 - DNA, 83 bp, Homo sapiens
ctggagtttgccatccagcccaacaccaccgggaagcagctatttgaccagcacgcttcctgggctgttacagtcaatggact

SEQ ID NO: 169413 - DNA, 98 bp, Homo sapiens
ttcaggtccacagtctggatggatgaaacaagaggaggaaacatctggacaggttatctgccatgttgtgggtatcacttaccagcacattgaccgct

SEQ ID NO: 169414 - DNA, 74 bp, Homo sapiens
ggagggtaaaaggctgagaagcttaagctgcttcattgagagaatcagaccagcagagagagagagttatatga

SEQ ID NO: 169415 - DNA, 75 bp, Homo sapiens
acctcactgcagaggtgctggagctggcaggtggtgtacacaatccctgcagtactgaccctgcttgttggactt

SEQ ID NO: 169416 - DNA, 83 bp, Homo sapiens
cttggactgagtcctgcaggacacaggttatcaatactctggctgaccatcatcatcgtgggactgactttggtggaagtcct

SEQ ID NO: 169417 - DNA, 100 bp, Homo sapiens
agcagttcttccactgctactgccctgtgggctttggccgtcgcacggaccccagtggggactacatcaggctcacccatgacatcagcctggaggagtt

SEQ ID NO: 169418 - DNA, 75 bp, Homo sapiens
gaaacgcaagtccatgtacacgcgagattataagaagcttgggttcattttaatgaaggagttcccccttctgag

SEQ ID NO: 169419 - DNA, 101 bp, Homo sapiens
atcccagcagtgcaaacagacttcggagtacctgcgctatgaagacacgcttcttctggaagaccagccaacaggtctctgcatggattcccccagcccta

SEQ ID NO: 169420 - DNA, 100 bp, Homo sapiens
ccgttctgagacatacaaataataacaacgaacttgatgcaagtgataggtttgccaaggtcagacctctcatcatccggatgaactgcaatttccagaa

SEQ ID NO: 169421 - DNA, 90 bp, Homo sapiens
agaatgttccacttacaacacacaactttattagaaatgatatttgccaaatttgatgaagtgcaaagttcaggcggtatgattttgagt

SEQ ID NO: 169422 - DNA, 74 bp, Homo sapiens
cggaaatgtgtcatcgaaagccaggtcctatggcagcgtatacaaagctattcataaagagaccggccagattg

SEQ ID NO: 169423 - DNA, 100 bp, Homo sapiens
gaaaccagtaacaacggaacctctgttgaaggaggatgttcccatcttggtcagtcctatgcggatagagatgtctggaagccagaaccatgccaaatat

SEQ ID NO: 169424 - DNA, 102 bp, Homo sapiens
ccccaagatggaagggagcggcggccgcgtccgcctcaaggcgcattacgggggacaaatttacatgtattggagaccagaccagaagcccttctgaattaa

SEQ ID NO: 169425 - DNA, 101 bp, Homo sapiens
gacaaacgtacctgtggtccctggatccagtgctactgctacaaataaggtttcgacacagccccaactgctggtacctgagaaactggactatccacacc

SEQ ID NO: 169426 - DNA, 100 bp, Homo sapiens
ccttcaccaaggagactgctatttcatgcttggattctttctactaatccagatacttgttgaagtgctgactagtttcttggggaaagatgtcaaggaa

SEQ ID NO: 169427 - DNA, 100 bp, Homo sapiens
tgctggcgtgtctcctcctagtgcttcccgtctcagaggcaaactttgccaaaacaaaggggatttggtgatggaggctttgttagaaggaatacaaaat

SEQ ID NO: 169428 - DNA, 100 bp, Homo sapiens
tctgacgacgtgaaggagcagatttacaaactggccaagaagggccttactccttcacagatcgatcctcccactatcacagaatccaagagcaatgaag

SEQ ID NO: 169429 - DNA, 101 bp, Homo sapiens
aggagaagcaaccaagcctgatggaacagtggagcagattggtcacattctcgtgagctgggtgaaggtgctaaaggagaagatagaagctgagaagggtc

SEQ ID NO: 169430 - DNA, 50 bp, Homo sapiens
tctgctggtggagatgctgaaggagctggtgtcatagatgaagattatag

SEQ ID NO: 169431 - DNA, 101 bp, Homo sapiens
caggctcaagcaatcctaccatgtcagccttcccagtagctggaactacaggtgccgtgagcgatgtggagatgcaggaacactatgatgagttttttgag

SEQ ID NO: 169432 - DNA, 50 bp, Homo sapiens
gttatcagatcacagaccatggtctcagacatgtagactgccaaagtgta

SEQ ID NO: 169433 - DNA, 76 bp, Homo sapiens
gaccagtcctgtttgcctcatgatatcagggcaattgaaggaacagactaaaaatcgtgtcctggaaggaaactac

SEQ ID NO: 169434 - DNA, 74 bp, Homo sapiens
ggaggtgcggcagaaccggcagagggctgacgaggatgtggaggctgatgggaaccaccctgtagaggtccatc

SEQ ID NO: 169435 - DNA, 100 bp, Homo sapiens
ccgccagggtctgcagggcctgggccgccgctgctacctgcagcgccgtgtggcacgacacaaaaatcagctctttgctgaagagcaagcagagggtccc

SEQ ID NO: 169436 - DNA, 100 bp, Homo sapiens
ccagagtcggcgtaactatcgcctgacagggtgtcatggagaaactccagctgggcccagagattctgcagcgggaaaatccaaggcttatttatgccag

SEQ ID NO: 169437 - DNA, 90 bp, Homo sapiens
aagataatgaactaaacatagttttggaactagcagatgctggcgacctatccagaatgatcaagaccgagacatgggtgcccggcaccg

SEQ ID NO: 169438 - DNA, 101 bp, Homo sapiens
gtcagtgaacagacacgggtgaatgctgctaaaaacaagactggggctgctcccatcattgatgtggtgcgatcgatgccttcaattaagttgcagagttc

SEQ ID NO: 169439 - DNA, 78 bp, Homo sapiens
ggccattgagcacagcagccgtcctatcaatgtgattaattggaggtccccctccccactaagtgcctctttgcatag

SEQ ID NO: 169440 - DNA, 74 bp, Homo sapiens
agtaggaagctgctttgaagacttagcagaggaatttcttcacatggctcctggagaagtgaccatcacagttc

SEQ ID NO: 169441 - DNA, 95 bp, Homo sapiens
gttacaagttggcttatgagtggaacatggctagcaggaatgcttactgttgcgtggttcgttattaacaggcctggacagcgagtccgcctcca

SEQ ID NO: 169442 - DNA, 100 bp, Homo sapiens
ccgccagggctctatcaaggggctggtgtactccagcaacttccagctcattctcaatgcaagatcctccgctgcaatgctgagtacgtatcgtccactc

SEQ ID NO: 169443 - DNA, 75 bp, Homo sapiens
cagcaccacctccagcccctgcgcctcgctcagagtcaagatctccactgaagttggcatcacaaatgttgatct

SEQ ID NO: 169444 - DNA, 50 bp, Homo sapiens
tgatccgggatagcgagaccactaaaggtactccaaagattcaggtttac

SEQ ID NO: 169445 - DNA, 101 bp, Homo sapiens
tattaaaggccagtgggatagactcgtaatcaacacacatgcgccagtatgcagacatctgccttttcaacacagctcagtacaagtgccctgttgccatg

SEQ ID NO: 169446 - DNA, 110 bp, Homo sapiens
gcgcctcctcggagtccttggggacggagcagcgcgtcgtggggcgagcggcaggctgaaggggatgctaagggagataaagcaaaggtgaaggacgaagtaagtcattc

SEQ ID NO: 169447 - DNA, 75 bp, Homo sapiens
gtgaaattcgcttctggtaatactgtagattttgctgctgcctcagggaaagtcagtcccacagcgtccaggttc

SEQ ID NO: 169448 - DNA, 97 bp, Homo sapiens
gcagaagttcatggattctcaatgggaaaaaagctatcacccaagatagatcgagacctaagagaaggcacattgcaagcaacccgtgccttgatgg

SEQ ID NO: 169449 - DNA, 73 bp, Homo sapiens
gctgctgcccctgctgtcgctcctggtcggcgcgtggctcaagctaggccaggaatagttgctgaacacccca

SEQ ID NO: 169450 - DNA, 90 bp, Homo sapiens
atggcgtgcagcgcaaccacgagacggccttccaagtatctggagtccatctttcaccatcttctcctgagattgtactggaccgtgacc

SEQ ID NO: 169451 - DNA, 75 bp, Homo sapiens
tgggaacactggagacctgatttctaactgacgctaccgtcgcggccgccgattgttcagattccattctgtggg

SEQ ID NO: 169452 - DNA, 75 bp, Homo sapiens
cgggcagccttccaggtggacagtttgtgaatagcacaatggaagaagctggactttgtgggttaagagagaaag

SEQ ID NO: 169453 - DNA, 110 bp, Homo sapiens
ggtcaaagtctagatcacagtctagttctcgatcaagatcaagatctcattctagaaagaagcgatacagtgtgaagcagtatgcagatgttgaaggattctaatgcaag

SEQ ID NO: 169454 - DNA, 95 bp, Homo sapiens
acaaggaagatggggagccaaagaccaagcatctcagagaagaggaggaagaaggcgagaagcacaggtgtcagttgtacccgaggcgttctcag

SEQ ID NO: 169455 - DNA, 100 bp, Homo sapiens
tctccggggcgcagcgtgacggctggcatcatcattgttggagatgagatccttaagcagtcctgcgttaactgcggccgggaggctatgagcgagtgca

SEQ ID NO: 169456 - DNA, 75 bp, Homo sapiens
ctctttgtcattttcaacagtctgcaggttaatgttgaagaaggaaaatgcggaagtcgtcatttgacaagtttt

SEQ ID NO: 169457 - DNA, 74 bp, Homo sapiens
gcgcaaacaagccaatcccaggaggaaaaacggtgtaatctagctcctgtggtggagtttgctgcagatgtggg

SEQ ID NO: 169458 - DNA, 90 bp, Homo sapiens
attgacatttaattttagggtcctttatatagaagggagagtagaccactctgcttcatttttgggagaaaacttctcacactatggcag

SEQ ID NO: 169459 - DNA, 90 bp, Homo sapiens
agcccgaccccctgcagatgccaaccttcccgccagactacggcttccccgaacgcaaggagcgcggtttctgccattattacctgcccg

SEQ ID NO: 169460 - DNA, 98 bp, Homo sapiens
ggtgaaaaatgcgtacccagcggaggtgcagtgtttaaaaaggatgatattggacgaaggaatgggcaaggatttgttgagaaagagataagaaaagc

SEQ ID NO: 169461 - DNA, 95 bp, Homo sapiens
aaccgagacaagttcaccccgaagtctgccggacccagatgatgtggtaccagttggccaaagaagagcctggtgttggtgcatgtgctttggac

SEQ ID NO: 169462 - DNA, 83 bp, Homo sapiens
gtccacccaccgccgccgcctcccaggctggctacagcaaacatcattcaagatgtccagcaaagggagcagcacagatggca

SEQ ID NO: 169463 - DNA, 83 bp, Homo sapiens
ctgccctcctggttcggcctccccgcgcactagaacggtagttgatgtcacttggcgatattcctgcaaacatgaagaggtga

SEQ ID NO: 169464 - DNA, 82 bp, Homo sapiens
ctgcgcccaggtcgtgctgcaggcggccaacgagaggaacgtgtccacgcgccagggtgagaagccctaccactgcaactgg

SEQ ID NO: 169465 - DNA, 90 bp, Homo sapiens
cttctttgcagactttggttggtggaggctgtggcaatggaacaggcttgagaaacaggactcaactattgttactccaattattttgag

SEQ ID NO: 169466 - DNA, 75 bp, Homo sapiens
ggcagcttttccggcctgacaacttcatctttgtggccataaaatgcagtaaaaacaaatccagttcccaagaag

SEQ ID NO: 169467 - DNA, 100 bp, Homo sapiens
aagtgctgggtctttcttgtcaactgctcacgacagaaggcgtctcatggcgttggaataccggctctcagcggctaatccagactccaaaatgatgcaa

SEQ ID NO: 169468 - DNA, 75 bp, Homo sapiens
gtgtcaccagcagcggcccggtcatcaaccatggcatgtggcagacattggaatcgaagcctcttaaaatggcag

SEQ ID NO: 169469 - DNA, 100 bp, Homo sapiens
gttggagaggtgttaccggaacggcggcgacaagggtgttcccgaactagagtgggagttccactatatagaagaagatctttatcgaacaaagaacaca

SEQ ID NO: 169470 - DNA, 100 bp, Homo sapiens
cccaagtcgtccccctctccgccccccaggaggggcgagagggagccgcagctgatgtcaggcctaagatctggcaaacttggtgaacagtgtgaagcag

SEQ ID NO: 169471 - DNA, 90 bp, Homo sapiens
acgagttgaatcattgttcaaataaggtcatacttacctggttgcttgcgcatctagtaatgttggatcatattctggatgttttgaata

SEQ ID NO: 169472 - DNA, 99 bp, Homo sapiens
ccgggcgctgctgggccgcctgcgggaggtgcacggcggcggcgcggagcgcgaggtggccctggagcggttccgcgccgcggcgagtcctttgcacat

SEQ ID NO: 169473 - DNA, 100 bp, Homo sapiens
gagcaacgaggccttcccgttctccacccacaagctactgagagccgcagggcacctggaagcaatgaggctccccaagaacacacctgaggaaaaggac

SEQ ID NO: 169474 - DNA, 100 bp, Homo sapiens
tgcccacccctcctgtaacccagcctgtttcacttcttgcggttcaagctctacgttcgtgacatcaaacctcctgttgggccatttccgagaactccca

SEQ ID NO: 169475 - DNA, 100 bp, Homo sapiens
gtggccgtggtgcgggctctgcagcgagcgctcgatggaacctcatcccagcaacgcacctcttgctttttcctccaaagtatgttatgttaagtttcgt

SEQ ID NO: 169476 - DNA, 50 bp, Homo sapiens
agcaatcagatttatcattcggacacattccttaacccagcgcagggctg

SEQ ID NO: 169477 - DNA, 100 bp, Homo sapiens
ccggccccggccccggcaccatgtcggagaaaagcgtggaggcagcggccgagttgagcgccaaggtgctcctggagctgttggtgggaatatacccctc

SEQ ID NO: 169478 - DNA, 75 bp, Homo sapiens
ccgggcgggagcccctcggccaggcccggcctgcatgcctacgaaaaggaggacagtgatgaagtccacctggag

SEQ ID NO: 169479 - DNA, 82 bp, Homo sapiens
catctctctgtggatcattgctgcctggaccgtccgtgtctgtgaaagaatgccgaactggggaggaggcaagaaatgtggg

SEQ ID NO: 169480 - DNA, 100 bp, Homo sapiens
cgagagaggcaccgggatcgtgaccgagaccgtgaccgagagcgtgaccgagagcgcgaatatcgtcatcgttagaagggttggggagcagaatatcacc

SEQ ID NO: 169481 - DNA, 100 bp, Homo sapiens
atcactaggagtattgagctacgcatcaagagtcttgtggatgagcagcagaaagttcggaccatcagtgctttggccattgctgccttggctgaagcag

SEQ ID NO: 169482 - DNA, 75 bp, Homo sapiens
gaatgtgtttgttatctgcttctatttggaggctggggacctctcaaagggtctcactgttgtgcagtctggagt

SEQ ID NO: 169483 - DNA, 96 bp, Homo sapiens
ctaccataatgtgaaatgcagacgtgagatgtttgacaaggatgtagtaatgcttcagggtctaaaattcccaggactccacagctttgcaccaga

SEQ ID NO: 169484 - DNA, 100 bp, Homo sapiens
gcaaggcctggtggttcagtacactccactgccttcttaccaagtgcccaaggaccaagtccttgacactgtctacctgttccatatgccccgaaaacga

SEQ ID NO: 169485 - DNA, 100 bp, Homo sapiens
cggccttgagcgaggaggagctggacaatgaagactattactcgttgctgaacgtgcgcagggagtgctcaccggacaaccgaggttgcccacagggatt

SEQ ID NO: 169486 - DNA, 100 bp, Homo sapiens
ctctgctgcggcgcggggaccgctgtgctctcgtgctgccgtggtcaacgccattggcctgtacatgcgccaccttggggtgcggaccaagagtggagac

SEQ ID NO: 169487 - DNA, 90 bp, Homo sapiens
ggcaatgacatctacgtgacggagcgtttcccaaagtgtattctgcggaactagcacctactgtgttctcaacaccgtgccacctataga

SEQ ID NO: 169488 - DNA, 90 bp, Homo sapiens
aaagatgagctctgaaaattgtttcgtagcagagaacagctctttgcatccggagagtggacaagaaacccagggccttgctgccgccat

SEQ ID NO: 169489 - DNA, 75 bp, Homo sapiens
gggtttagcacgatgagctcaatcggcactggggtatctgatgtgtagccatgcagaagacctacgtgcaaaagc

SEQ ID NO: 169490 - DNA, 50 bp, Homo sapiens
cggcgaccggcggcgtccgaggagatacagaattcgttgttgggaaggac

SEQ ID NO: 169491 - DNA, 100 bp, Homo sapiens
aaagccatctggcacgccttcaccgcactcgaccaggaccacagcggcaaggtctccaagtcccagctcaaggtcagactatgatgactggagaccgtct

SEQ ID NO: 169492 - DNA, 87 bp, Homo sapiens
ccgcccccgtggatctagagctgaagaaggaactgtggaaggtgcatcagtgaagaaatggaccaatgtgtataatcatggaatctc

SEQ ID NO: 169493 - DNA, 98 bp, Homo sapiens
tctcaccttgtatgctttacccactgtgtcgaactcccagcaggcttaccaggaagcatttgaaattagtaagaaagaaatgcagcctacacacccaa

SEQ ID NO: 169494 - DNA, 100 bp, Homo sapiens
gacagcagattttggtttaatatctgattgggacaacattcagacccatttccagtcatgagtcgttgaggacttccacatggagattggcacaggacca

SEQ ID NO: 169495 - DNA, 90 bp, Homo sapiens
ggcctggagaggttaaagagacccgttcagagtcctacagtggcaggtagagtcactgaccacagagctgtcagctgagcgcagtttctc

SEQ ID NO: 169496 - DNA, 90 bp, Homo sapiens
atcatttgtgatgggtcagctagtatgcaggctaggcaaactgaagtcaaagtgaattgggcaacaacccctagcagtcaaaagaaagat

SEQ ID NO: 169497 - DNA, 75 bp, Homo sapiens
cttccctgccagaaatgaaggttcagttatgaggcaaccctctaaataaacagccattggactcttcaaacaaaa

SEQ ID NO: 169498 - DNA, 75 bp, Homo sapiens
attaattagcccaacctgttcttgcaaacaagcagatatttgtgtgatgctgaagagtttctggcagaaggtttg

SEQ ID NO: 169499 - DNA, 95 bp, Homo sapiens
caatctcctcagggaaggggcagcacagcactggtgaggtggattgatgatgaatcttctggcacacctggagcaactccagaacacagtcgtga

SEQ ID NO: 169500 - DNA, 89 bp, Homo sapiens
tctggacaccgaaggtctgggcgatgtggaaaagatgtatatgccatgaagccactgtcaccatcaacatgcagaacacttccatcgcc

SEQ ID NO: 169501 - DNA, 96 bp, Homo sapiens
aagaagacgtttggtttaaagaattaaaaggaagaacaacttaagagcttcttcaaagattcccaaatgctggaaaatcctctttgctaagttgtg

SEQ ID NO: 169502 - DNA, 74 bp, Homo sapiens
aaaatgtcaacaaattgatggatacgtgcttttcaacatgccttcagcactaatgactgctccaggaatgtcta

SEQ ID NO: 169503 - DNA, 75 bp, Homo sapiens
atgaagatggacgaggtcctgtacagcatcgccgagaagaataactgaagtgaagtgatggactccgatttggag

SEQ ID NO: 169504 - DNA, 74 bp, Homo sapiens
gtggcagccatctccttctcggcatgcccaagagaatcgtaaatgcaaaaattgcttgccttgacttcagcctg

SEQ ID NO: 169505 - DNA, 99 bp, Homo sapiens
gtggcacagcgtcgggctgactctgcttgtgttcgtggccacgctgctgatcgtcctgctgctgatggtgtgcgagatgtggtactggatcttcctctg

SEQ ID NO: 169506 - DNA, 100 bp, Homo sapiens
atgctttcttcaagatggaacaaagactgttgagtatgctccatgtagatcactggatatcactctttatcgcaatggttatcatggggacctgaatgag

SEQ ID NO: 169507 - DNA, 76 bp, Homo sapiens
ggagagcacgccatgaaggcctcgggcacgaccatggtgaatccgggcagcagctcgcagccgcccccggtgacgg

SEQ ID NO: 169508 - DNA, 50 bp, Homo sapiens
tcccagtgccgggagcgcatcaagtttgaagaaaacaggtctgaaacaag

SEQ ID NO: 169509 - DNA, 98 bp, Homo sapiens
gagagccggagtcggggacccaggagtttcctgtgtccagcgctgccggagccgcctgagcttggctctctggcagatttcctctagtaagaggtggc

SEQ ID NO: 169510 - DNA, 101 bp, Homo sapiens
aaagagatccgattggaacatgaagaaggtgcaccctgcacagctataagagaagggtcaatgcaaccaacttcatggaggcaggagccccagttatgtgg

SEQ ID NO: 169511 - DNA, 100 bp, Homo sapiens
caggaattgatggagaaagaaaccgcaaaaccaaaaccagatcctttcaaaggtgagaaataaggctcagcaaacattttttgctgccttgggagcatat

SEQ ID NO: 169512 - DNA, 100 bp, Homo sapiens
tgcacgttccatccggcgctcagctgggcttgaggttgcaagaaagctcaagtagcctatggagaggatgcaaggcttccagctgatgccctcagccagg

SEQ ID NO: 169513 - DNA, 100 bp, Homo sapiens
ttaaagcccgagtggattcatttttctacatattaggatataaccctgagacaagcttcctgcctgacacagctcacttcaagaagtgcacaatgtcaga

SEQ ID NO: 169514 - DNA, 100 bp, Homo sapiens
aaaatggttcacggctgacacatttggcatagatacctcgacttggaaaaggagagtgacacacccctccagcaagtatccattgaagaaattctagaag

SEQ ID NO: 169515 - DNA, 88 bp, Homo sapiens
atccttggaccaagctatcagccgctttgagagtgaggacctgacctccattgtggtctctacagcggaacaatgtcgttcttccccc

SEQ ID NO: 169516 - DNA, 83 bp, Homo sapiens
ggaggtcctgccgtccatgcggaagatcgtcgccacctggatgctggagagactggctccagctttccttgaaatcctgcaga

SEQ ID NO: 169517 - DNA, 75 bp, Homo sapiens
tatctcgtacacttcttggcagtcatggacaagagctattgatagaagatatcccatattatccgagagattcgc

SEQ ID NO: 169518 - DNA, 71 bp, Homo sapiens
tcttcctatgcaagaaacgcaactgttgaaactggaacgccaagctgaagaagaacgaatacggaagcaca

SEQ ID NO: 169519 - DNA, 98 bp, Homo sapiens
ataaagtttaagcagctcgggcagctcggtggggtcaaacgtctccattgagcgcggaactcgccacgagagattctccctgagaaacaagcagaatt

SEQ ID NO: 169520 - DNA, 75 bp, Homo sapiens
agatagccgtcttcagcttgagccccatcactaggtatattgaagcaagtcaaagattacattaaacagtgtagc

SEQ ID NO: 169521 - DNA, 75 bp, Homo sapiens
atgggaacgccagtatcaacatcacggacatctcaaggaatatcacttccatgtgaaaggtgtagcagtcactcg

SEQ ID NO: 169522 - DNA, 88 bp, Homo sapiens
tggacctatgaatatccagtttgagccatcggatctaagatccaaaagattaaatcggatttctttgaactattatctaatcatcact

SEQ ID NO: 169523 - DNA, 106 bp, Homo sapiens
aagcctccattctccatccgctgcgtggaggtgtcggacgatcagccagaagacgcatctggaggctccagtcccagtgggacctcaaagtccgatgccaaccggg

SEQ ID NO: 169524 - DNA, 83 bp, Homo sapiens
cgaacctgaaattccgctttgacaagctcagccatgccagctctggtgcgtgagaagcgccaccttcaagtgaacgtcaccaa

SEQ ID NO: 169525 - DNA, 100 bp, Homo sapiens
tgcaccggatgattcacactggcgagaagccattacagtggatgaaaatactaggaaaagtttatttaagttacgttctacatgggatgaaatattccct

SEQ ID NO: 169526 - DNA, 51 bp, Homo sapiens
gccttcgcgagcgtctgggcgggtggtaggctaaggcagctggataagcac

SEQ ID NO: 169527 - DNA, 100 bp, Homo sapiens
cgatttctcaatctctggcttaaattacctcagggatttagagatactgttgttacttctgcatgttcattgcaaacagaaggttccttgagcacccgga

SEQ ID NO: 169528 - DNA, 75 bp, Homo sapiens
gagactgaccgcaacggcagggtgaaaggtgtagcagtcactcggcctacacccacagcatcgaccttgtgaacc

SEQ ID NO: 169529 - DNA, 50 bp, Homo sapiens
accgctgaggagctgcagtctctgtcaagaaaataatgttgagtttccat

SEQ ID NO: 169530 - DNA, 110 bp, Homo sapiens
cggagacctgagagatgttaaccaaattcgagaccaagagcgcgcgggtcaaagacaatgcagatcttcgtgaagactctgactggtaagaccatcaccctcgaggttga

SEQ ID NO: 169531 - DNA, 82 bp, Homo sapiens
cgacgactgtgacgaggacgaggaggcagccacggggcccctgggctttatcctgtggataaacgcagagtgaacgagtttg

SEQ ID NO: 169532 - DNA, 100 bp, Homo sapiens
ccgggacaccctggaagccaggaaatggtaattcagaggtccgtggggccagccagcctgagcttgctcaccttcaaagtctatgcagcaccaaaaaagg

SEQ ID NO: 169533 - DNA, 100 bp, Homo sapiens
ctgtttcagccatcttcgataaaggcaaaaaggtcaaaatgcagatcttcgtgaaaacccttaccggcaagaccatcacccttgaggtggagcccagtga

SEQ ID NO: 169534 - DNA, 75 bp, Homo sapiens
tcaaacagaatttcacacagggtattccatggagaatgagcacccccaaattcagaaggagtcccagtatatcaa

SEQ ID NO: 169535 - DNA, 128 bp, Homo sapiens
aagatggtttactctgcacaggaatgaactgaaatacttcaaagaccagatgggatgtagaaatgctccttaatgttgctgcaaaatgggggatccaagaagcccaagaacttctggagaatgttatt

SEQ ID NO: 169536 - DNA, 89 bp, Homo sapiens
ctggtgccggcgtttgggctacggttgttgttggcgactgtgcttcaagcggctcacagaacatttcctgcctgttgctcacactctgt

SEQ ID NO: 169537 - DNA, 117 bp, Homo sapiens
catcatcgtgtccatcgtcatctgcagcgtcctgctgctgctctccgtggtgggagctgtaccagcccagtgcagagagcttgcgccagcaagaagaacgcaagcggctctaccaga

SEQ ID NO: 169538 - DNA, 100 bp, Homo sapiens
gtcggtggcggaggctgaggagaaggaggagcgggccgtggaggcttcgccgcctagtctcttcaagaaaatgaggaggaggagattgggaacctagagc

SEQ ID NO: 169539 - DNA, 82 bp, Homo sapiens
gtcagacggcagtggtggaaaagatccatgccaagcaattctgtggtgttcttggtcacacatttatggagtttctgaaggg

SEQ ID NO: 169540 - DNA, 74 bp, Homo sapiens
tgatgatttgccgaaatggatgaagatgattgataagacaaaattgcttacccagtacatattaaatctcggca

SEQ ID NO: 169541 - DNA, 90 bp, Homo sapiens
aggacgacgacgatggggatatcggagcaatttacagcaatgagggatttatacatgaaaaatggacaaggatttgcattagtttattcc

SEQ ID NO: 169542 - DNA, 98 bp, Homo sapiens
agactcctgccgcgtataccaggcatccagccccgatgagagctcaaatgatacttttcccacagcaatgcacattgctgctgcaatagaagttcatg

SEQ ID NO: 169543 - DNA, 100 bp, Homo sapiens
ctgggagtttcttcaggctccagccttcacgggatatggagagaaaatcaattgtgagatgctgagatgaatcgtcacctgtgtgtttggctttttagac

SEQ ID NO: 169544 - DNA, 100 bp, Homo sapiens
atcaggtcccgaaagtgctaaaaagatctgtacccccgatttggtggtattcctggcttgtgctaatcagagactcaaagaaagattactgaagcgtgca

SEQ ID NO: 169545 - DNA, 100 bp, Homo sapiens
gggcaagagaccgactggcggagcaccgccttccggcagaagctggtcagtcaaatacaatgcagatcttcgtgaagactctgactggtaagaccatcac

SEQ ID NO: 169546 - DNA, 100 bp, Homo sapiens
tgtgacattgtgcaagtgttaaattgtgtgccttttgttcctgaagaaagaggttgaaactctggaaaaattagtggagctgacacagaagctatttgaa

SEQ ID NO: 169547 - DNA, 50 bp, Homo sapiens
gttaacacttcctagataacgggtccatggctaatgaaacacagaaggtt

SEQ ID NO: 169548 - DNA, 100 bp, Homo sapiens
gccaaggccaaggccagccggactaaaacaaagcaataatgacgatgaggacctgacaccagagcagaaggcagagcgtgagaaggagcggaggatggcc

SEQ ID NO: 169549 - DNA, 139 bp, Homo sapiens
ggggctgcggcctagaggtccgggcttggagttcgcctcagacgcggtggagccgccggagtctgagaaggttcagcagactgtacaggatctttttggcagagccccaagtaaagctgtcaatcctgatgaggctgtg

SEQ ID NO: 169550 - DNA, 141 bp, Homo sapiens
gccagccccctgcgccgcggctacgtgcgcgtccagtggtacccggagggcgtcaagcagcatgtgaaggagaccaagaccgcgctgagcacgttcttccaagaaaccaacattcccaacagccaccaccaccaccagatg

SEQ ID NO: 169551 - DNA, 101 bp, Homo sapiens
gttgcaaagttccataaagaatggcccttgtggataagcacaaagtcaagagacagcgattggacagaatttgtgaaggttcatctgcagaagccagcgga

SEQ ID NO: 169552 - DNA, 88 bp, Homo sapiens
gctgctgccgccccttgggctaaaaggttgcataccctgtcctgagggcgcggcacggagtgcatgcgggccgctgccatgacgaccg

SEQ ID NO: 169553 - DNA, 51 bp, Homo sapiens
cttgaccttcgagtgtttgccaataatcgggaggaagcactgaaacaacac

SEQ ID NO: 169554 - DNA, 74 bp, Homo sapiens
ccctgacctgcctgtcgtcgtggtggccaacaagcagtcttcccaagggattgttgaagaaacttctgaagagg

SEQ ID NO: 169555 - DNA, 74 bp, Homo sapiens
gcagattgttgtccaggcaggacagattcagcagcaggcgttggagaccagggccagccctggccacaccccag

SEQ ID NO: 169556 - DNA, 98 bp, Homo sapiens
gtagcaacctcgccccttgcaacaaaggcagactgagcgccagagaggacgtttccaactcaaagtttgagacagttccagaaagaacccaagctcaa

SEQ ID NO: 169557 - DNA, 74 bp, Homo sapiens
cagcgccgacggcgacgtcggggccgagctaacccggcctctggacaagaggtgtttgctttgatgtacctacc

SEQ ID NO: 169558 - DNA, 119 bp, Homo sapiens
ggagtcggggcctcggcctacagcgaccccgtgcggctgcgttaagccggctctggagacagccaggcgggcaccacggcaggggctgagctaccctcatggaagggagaggaccgtac

SEQ ID NO: 169559 - DNA, 75 bp, Homo sapiens
ctggactccctggagaagcagatggaaaaggacatcacacccctgcaggtggttctgcccaacactgccctccat

SEQ ID NO: 169560 - DNA, 100 bp, Homo sapiens
actgtggaagcctgtcccgttgtcagagtggaagggattgtcgatcagtcacaacaagcataccaagaagcttttgaaatcagcaaaaaggaaatgcaac

SEQ ID NO: 169561 - DNA, 75 bp, Homo sapiens
acctcattcagacagaatctattaccttggttgtcctggtgacagacggctgtcttggcattggtagagggtcac

SEQ ID NO: 169562 - DNA, 75 bp, Homo sapiens
tggtcttggtagcggaggcacccgaatgctgcccgggtgagtctgaacaacccagtcctgccagctccagctcca

SEQ ID NO: 169563 - DNA, 81 bp, Homo sapiens
aagagaagctgcaagagcaacatctttcctcaccccaagtccagaagcactggaaatccatggatcattcacatggcttgg

SEQ ID NO: 169564 - DNA, 50 bp, Homo sapiens
ctgggatgtgccttagaggattatggctctcctgccacagctcctcaccc

SEQ ID NO: 169565 - DNA, 82 bp, Homo sapiens
ggagaagcaggccctgaagagccagatctcggagaagcagaggcactgcctggagctgcagtggctgtcgctgggcgcggac

SEQ ID NO: 169566 - DNA, 95 bp, Homo sapiens
agaacagttggatcttgctcagtctctgtcagaggaagatcccttgcactatgttggccatggaaatgctatcaatgagctgaaattccatccaa

SEQ ID NO: 169567 - DNA, 100 bp, Homo sapiens
ctcaagtactaccggccaactgaagtggttgaaaggattgttgacaaaaggaaaaataaaaaagggaagacagagtatttggttcggtggaaaggctatg

SEQ ID NO: 169568 - DNA, 75 bp, Homo sapiens
atgaagtgcagaggtttttttctgattatttgacttccaacgggcacctgagtgagaacgaggcgcggaagaagt

SEQ ID NO: 169569 - DNA, 90 bp, Homo sapiens
cgcgaggtgggcgactaccagagcgaagcgagcggcgtgtaagcggggtgaagacaacgccaggtgctggagaatctggtaaaagcacca

SEQ ID NO: 169570 - DNA, 82 bp, Homo sapiens
ggctactctgcctcggggacgaaagcagcgaatcaatccctctgctgagatggtgatgatcgataggatgttcaaccaggag

SEQ ID NO: 169571 - DNA, 50 bp, Homo sapiens
cgcgcctgtagctcgcgggcctcgcaggtttttcgttggaatatacgttg

SEQ ID NO: 169572 - DNA, 80 bp, Homo sapiens
cgacgtccctcaaaccttgcttctaggagataaaaagtgcagagcagagcgggcggaggaccccgggcgcgggcgcggac

SEQ ID NO: 169573 - DNA, 100 bp, Homo sapiens
tggagtatacacatgatagcgacacagacatgttccaggatgcagcagtctcggccctggctgctctatgcagtgaatattacatgaaggagccggggga

SEQ ID NO: 169574 - DNA, 75 bp, Homo sapiens
cggcaaaaccacttacagctgaaaaggtgaccatgctttgggattttcatagtttgagtaattcctatgggctct

SEQ ID NO: 169575 - DNA, 83 bp, Homo sapiens
tcgcgaagagaccgcccttacaaagcctgcaggagcggggtctgctccgagttcgcaggacagatggcggctctgtgttcccg

SEQ ID NO: 169576 - DNA, 75 bp, Homo sapiens
aggatttctgaagactattgtggaagaagcatccattaagctccagtgatccacaagctcagaaatacatcgcgg

SEQ ID NO: 169577 - DNA, 75 bp, Homo sapiens
attcattgagaaatatgacaagtctctccaccaagccattgaggaaaggactcaaatgtcacagcatctcccaca

SEQ ID NO: 169578 - DNA, 123 bp, Homo sapiens
cactgctcaacctcaaactggaccgggtcatgcaggacatcgtgtataagctggtgcctggcttgcaagacatacataccgagcatcaaatattaaggcacccggagaacagacagtaccagc

SEQ ID NO: 169579 - DNA, 100 bp, Homo sapiens
acaccgacatgtacagccccaatgtcaagcccgagcggaaaatgaagctagaggacttcatcaagaacctccgagttatcaatccacctcctgtggctgg

SEQ ID NO: 169580 - DNA, 100 bp, Homo sapiens
agggcggacacctccacatcgccttttgccacctttccctttatttccggagccctgggcgctgcctatggcacagccaagagcggtaccggcattgcgg

SEQ ID NO: 169581 - DNA, 100 bp, Homo sapiens
ctgaagctgaggacacacccaggaaaagactcaggacggacaagcacagtcttcggaagggtgtactctgtgtgaccgcgcctatccctcggactgtccc

SEQ ID NO: 169582 - DNA, 82 bp, Homo sapiens
ggaaccctggtcaccgtctcctcagagagctggcggtcaccatggcaatgcgggagctggtggaggccgaatgcgggggtgc

SEQ ID NO: 169583 - DNA, 131 bp, Homo sapiens
gaagatttctttcttcatgaccctgcccttgccagaatttcctgcgctgttccacctcattcaacttcaggtgctggagaatctggtaaaagcaccattgtgaagcagatgaggatcctgcatgttaatgg

SEQ ID NO: 169584 - DNA, 75 bp, Homo sapiens
ggatgatgacaatgtagaggatgacttctctaatcagttacgatggacacttttgtaaatccacttcgcaattca

SEQ ID NO: 169585 - DNA, 75 bp, Homo sapiens
ctgctcacatatggatactttcacagttcagggcggcgactggcggcgcgatggacctgaccgggctcctgctgg

SEQ ID NO: 169586 - DNA, 82 bp, Homo sapiens
cgtccagcacctacgtcccgctgccgtcgccgccgccaccatgcccaagagaaaggttgagaacttgttgcttagtaaccaa

SEQ ID NO: 169587 - DNA, 75 bp, Homo sapiens
caaaactgtaatactaaatgtgttaccataccaaggtgaagatgcaatgaccggggacacagacaaatatcttgg

SEQ ID NO: 169588 - DNA, 100 bp, Homo sapiens
atttgtgaaatggaagggctccctgttcttccgatttgtcagcactctgatcgattcacacccagacattgccagataaagtcagacctaaagccaaaag

SEQ ID NO: 169589 - DNA, 82 bp, Homo sapiens
ccaatgccaatccctcccagctcttcggtcagcccaaggccaaccccactgtcactctgttcccgccctcctctgaggagct

SEQ ID NO: 169590 - DNA, 99 bp, Homo sapiens
catgaactcagggccggttgtggccatggacacatgacggaagtgtgtatttttgggccactccacggcaggtccctagcctgcaacatttatgtcgca

SEQ ID NO: 169591 - DNA, 88 bp, Homo sapiens
cgtcccggccttcatcgacatcagtgaagaagatcagatgcccttggaaatcacccgtagctttatccagaaccgagatgggacttat

SEQ ID NO: 169592 - DNA, 100 bp, Homo sapiens
tcaagatagagatgatctctatttttacattgccacatacctagattcctataggcaatggaaactgatctcaattcccaggacagaaaggacctggaca

SEQ ID NO: 169593 - DNA, 145 bp, Homo sapiens
gtcttcagtggttctcgtctcaaactctatttgccaaaggaaacttgccttatcaccttcttgcttgcagatctaattatcatggacctgcgacagtttcttatgtgcctgtccctgtgcacagcctttgccttgagcaaaccca

SEQ ID NO: 169594 - DNA, 90 bp, Homo sapiens
ctggccgagcaggaggcgccatcatggacctgaaggagaagaaggagaaggtggaggagaaggcaagccggaaagagcgaaagaaagaag

SEQ ID NO: 169595 - DNA, 87 bp, Homo sapiens
gctgtatggccgccgtcgcaagaaataatcgttatgtaccttcaggtgttagagtgtgagcgtaaccaacacctggtccagacctca

SEQ ID NO: 169596 - DNA, 100 bp, Homo sapiens
attgtaccccacgagctgccacacggcctgcactctgcgctttgagctactgggctgtgagctgaacgaggagggggctgatcctgatagcattgaaatg

SEQ ID NO: 169597 - DNA, 74 bp, Homo sapiens
tggcctctaactgctctgccaaagaaatgtaaaatgtcggttccaggaccttaccaggcggccactgggccttc

SEQ ID NO: 169598 - DNA, 80 bp, Homo sapiens
cgtgaacaacatcctgctgccccagggcagatcagtcgcatcgaatacattcattcaaagaacttcatccaccgggatgt

SEQ ID NO: 169599 - DNA, 100 bp, Homo sapiens
ggcggcagcccgtcggccgccgccaactacctgctctgtaccaactgccggaaagtgctgcggaaggttccagcaacagatagaaatgctttaagttcac

SEQ ID NO: 169600 - DNA, 75 bp, Homo sapiens
gggctcctgttccctgtgagctgcctggtcctgctgcaggtggcaagctctggctggtgcagacatctccatgat

SEQ ID NO: 169601 - DNA, 98 bp, Homo sapiens
gttcctgccggacttgcctccttcccgcagcgccgtagagatcgctcccactcaggtcacaggctgctttgctggctctgcaagaaaatggactagac

SEQ ID NO: 169602 - DNA, 98 bp, Homo sapiens
cacatttctacccaagtttaaatgacctgctatgcccacagagcttgatccagaagtgcacagatcagtcgcatcgaatacattcattcaaagaactt

SEQ ID NO: 169603 - DNA, 100 bp, Homo sapiens
gggagcagccggaacgatgccggccgtgagcctcccgcccaaggagaatgcgctcttcaagcggatcttgtgaagcctggtgttcggtacagagaattgg

SEQ ID NO: 169604 - DNA, 83 bp, Homo sapiens
ctatccaccgtgttgcagatatatctggggttacctacatctcatacttgctttaatgtgcttttacttccggaatactcaag

SEQ ID NO: 169605 - DNA, 101 bp, Homo sapiens
tcgcgacggagccggctcggaacatcagatcaaccaccagggcttctctgctgaggctattttcaaaatgatcactcccgaggacgtgaagctccttccag

SEQ ID NO: 169606 - DNA, 75 bp, Homo sapiens
gagaaacacggaaactaggaagaggaaattaactatctgtacttataagaattccttcgacaatcctgagtggtt

SEQ ID NO: 169607 - DNA, 75 bp, Homo sapiens
cggagacctacctgcggcgtcggcagctgctgctccgagcagaaaccaatgatagctatcatatcatactgaagt

SEQ ID NO: 169608 - DNA, 98 bp, Homo sapiens
tctcccagagtgctccaacgggactgaaccacatgggctggccagagcacacaccaggcactgcacattggagatatatttccacagcatctggcttt

SEQ ID NO: 169609 - DNA, 74 bp, Homo sapiens
agcaacagggtcagctccatttcccctggctctgcaacgcttctcagtaatactggtagacacagtctgggccc

SEQ ID NO: 169610 - DNA, 96 bp, Homo sapiens
ccgcggacccactgggttgccaagctcgcgccggatgcggagcgcggtgctgccggtggagcttcaggtaagaatgattgatgttggctgatattg

SEQ ID NO: 169611 - DNA, 98 bp, Homo sapiens
taattcttaatcagcctttggacaactattttcgtcatctttggaacaaaggctcggggcccccagttcccgccccagacctcttgatgcagatcaag

SEQ ID NO: 169612 - DNA, 100 bp, Homo sapiens
gggaaatcgtgcacatccaggctggtcagtgtggcaaccagatcggtgccaagttgcgtctgatccaggtgccgaaagggccggttgagggatatgagga

SEQ ID NO: 169613 - DNA, 95 bp, Homo sapiens
cccctcccctggcagtgtgacggctgggcgacttgcgaggatgagagcgacgaagccaactgtccaggtggtgcgcgtgggcagggcgcggggac

SEQ ID NO: 169614 - DNA, 51 bp, Homo sapiens
tgaatgtccaaagtttgaagagggaaagaatatggcaaagctgatgcaaga

SEQ ID NO: 169615 - DNA, 100 bp, Homo sapiens
ccagatagcacctgaggacagaacatatcaggatgacttgaaagtagggcatccttcacccatctgaagggaggaaatagtggcaggtgacagtctgcat

SEQ ID NO: 169616 - DNA, 75 bp, Homo sapiens
gttttgacacaagaacagttggccaatactggtgcccaagcctggattaaaaagctgattttggagtatctgcac

SEQ ID NO: 169617 - DNA, 74 bp, Homo sapiens
atgagaagcaggcagaagattgcatcacacgggtatatttacttctggcacatgggaagagaaatcagatgaaa

SEQ ID NO: 169618 - DNA, 50 bp, Homo sapiens
ctttgggcgtcccattgccatgagaaagcttcttgctatctacctccacc

SEQ ID NO: 169619 - DNA, 80 bp, Homo sapiens
tggctgacctcctgatgcctcacttggttgcagaggcagtgttaacatcccaactgaaagcacatcaagagaaaccaaat

SEQ ID NO: 169620 - DNA, 96 bp, Homo sapiens
ccggccttcatcgacatcagtgaagaagatcagatgtgtacgcctagccctggttcatgatatggcagaatgcatcgttggggacatagcaccagc

SEQ ID NO: 169621 - DNA, 87 bp, Homo sapiens
gaaaatgatagaatgagaatgaagtatgggtgaaagaactcttttcttctttgggagtcgaatgtaatgtcttggaacttgatcaag

SEQ ID NO: 169622 - DNA, 109 bp, Homo sapiens
tgaagagcgacaagccgctggcagccgcggatctcaccgccgctcaggggcgtgatggtgggcatgggtcagaaggattcctatgtgggcgacgaggcccagagcaaga

SEQ ID NO: 169623 - DNA, 82 bp, Homo sapiens
caagggccacaaagtgaccaagaacgtgagcaagcccaggcacagccgacgccgcgggaattaaatgtgagggagtctgacg

SEQ ID NO: 169624 - DNA, 75 bp, Homo sapiens
cagtcacctgctgaagacacatgttcagcggtctgtatggacccaggcttgtcaaactgtactatacacatcgtg

SEQ ID NO: 169625 - DNA, 100 bp, Homo sapiens
ctgaaataatgtttgagtccttcaatgttccaggcttgtacattgctgtgcaggctgctggtggtctacccttggacccagaggttctttgagtcctttg

SEQ ID NO: 169626 - DNA, 100 bp, Homo sapiens
tcaaaaacaaaattctgaactcaggacttggcaaattatatctgggtgttggcacccagccactattctgccaatgaagtacatcctggtcacgggtggg

SEQ ID NO: 169627 - DNA, 100 bp, Homo sapiens
aactaggaatctatgatgctgatggtgatggagattttgatgtggatgatgccaaagttttattagtgaagctgtggtctaccaatctagacaactcagt

SEQ ID NO: 169628 - DNA, 83 bp, Homo sapiens
gatgaatcctgcggcagaagccgagttcaacatcctcctggccaccgactcctacaagacctgcctagagctggaacgttacc

SEQ ID NO: 169629 - DNA, 164 bp, Homo sapiens
ggaagatgaaagctccgattccacacttgattctcttatacgctacttttactcagagtttgaaggttgtgaccaaaagaggctccggctggacgtaaagaaagaagtgatgcactcaattctgcaatagataaaatgaccaagaagaccagggacttgcgtag

SEQ ID NO: 169630 - DNA, 75 bp, Homo sapiens
cgagaatccactcaccggagagatgtcgagtgacatctatgtgaagagctgttaagaagaaatcctgaacggcgc

SEQ ID NO: 169631 - DNA, 82 bp, Homo sapiens
cgggcgccaggaccggccgaacgcagagtgtctccagaacgctatagctatggcacctccagctcttcaaagaggacagagg

SEQ ID NO: 169632 - DNA, 101 bp, Homo sapiens
gactaaaccagaggtagccagaagaagcagaataactaaaaatgtgcctaaacaaagctctcagcttgatgaggagccagatgaccaggatgccccagatg

SEQ ID NO: 169633 - DNA, 118 bp, Homo sapiens
ctgagaggcccctcttctcctccaacccagaactggacaatctggccttaaagaaagacgagggtgtgccctggactgggatgctggccatcgtgcactcttatgtcacccacaagac

SEQ ID NO: 169634 - DNA, 88 bp, Homo sapiens
cggagtgattgcccggcagagcgcgtgacagtggtgctgtttgcagctctgaggcggcagcgaaaaaaagagcctttgatcatttcca

SEQ ID NO: 169635 - DNA, 95 bp, Homo sapiens
ccccgcgcatcaaggtgggacgggattacgtccagaaggcgcagactaaagagcaggctgaccggcgccagtcgatggccttcagcatcctcaac

SEQ ID NO: 169636 - DNA, 73 bp, Homo sapiens
gatcaccgtgacatccgaggtgcctttctccaaaagggaggctgccggcgtggaccgcgggaaggcggggctg

SEQ ID NO: 169637 - DNA, 90 bp, Homo sapiens
tctcctctggggactgcagagaagcaggacctcgggccatggctatgaagtcttacactccatatttcattctcctgtggagtgctgttg

SEQ ID NO: 169638 - DNA, 82 bp, Homo sapiens
tgacgtggacatcgtcttcagcaagatcaagtggacgacatccttggagaaggcagcgacgacagcgacagcgagaagagga

SEQ ID NO: 169639 - DNA, 74 bp, Homo sapiens
aatatggaaaatactcaagccaggtggaatttggataaatctaggcatgggactcgctgtgctggagaagtggc

SEQ ID NO: 169640 - DNA, 83 bp, Homo sapiens
ctgctttccactcggctcctgtcgtccgttctctcaggctcccgttcagattttgagaagagggggaaaaaggaagtttgtcc

SEQ ID NO: 169641 - DNA, 108 bp, Homo sapiens
aatgggcagaacgaattcagtgatatcattaagtccagatctggtgtcatggagaaactccagctgggcccagagattctgcagcgggaaaatccaaggcttatttat

SEQ ID NO: 169642 - DNA, 100 bp, Homo sapiens
attaaattgattagcaatggagcctatgggcgatctccggagatgtgaagaaggggggcgagcggacaggaagatgaagggagcaaagctgcccgccgcg

SEQ ID NO: 169643 - DNA, 75 bp, Homo sapiens
tgcggcagacggcgacagtggcggcggcgccatggcagggcttgcagatggcccactgcgtgaccttggttcagc

SEQ ID NO: 169644 - DNA, 98 bp, Homo sapiens
taatgtttacggcgaagtctactcaacgtttccaagttgggccggtgcacaaacagcgtggtcaagtatgagctgatgcgcccctccaacaaggcccc

SEQ ID NO: 169645 - DNA, 89 bp, Homo sapiens
tcatcatcccgtcagagctgaggtacttcgtgaagacactgccctaaccatcatggaggtggccgaggtggaaagtcctctgaacccca

SEQ ID NO: 169646 - DNA, 80 bp, Homo sapiens
tcccttcccccaagttatcaaatccaagggcggtgttgtgggcatcaaggttcagcggcagtggatctgggacagaattc

SEQ ID NO: 169647 - DNA, 109 bp, Homo sapiens
cgctagggaagatcgcaccgcggacgcccgctgagcttggcgcacgggccgaccaggccctgtttgtgctcttcgtcctggcctacatccacatcgtcttctcccgctc

SEQ ID NO: 169648 - DNA, 84 bp, Homo sapiens
tgtggcaaccagatcggagccaagttctgggaggtgatcagtgatgaacatggcatcgaccccaccggcacctaccacggggac

SEQ ID NO: 169649 - DNA, 80 bp, Homo sapiens
tggagtaagaggggttggctgtgaatgaacttcatgcccacttgaatggatccattagttctcataccatgaagaaatta

SEQ ID NO: 169650 - DNA, 74 bp, Homo sapiens
aatgaataaatttggtgaagcacttaagaaatgtcatgagattgagagagaggagatgttaaagtaacccatct

SEQ ID NO: 169651 - DNA, 75 bp, Homo sapiens
tcagctacgaggaggcgctgaggagaggcaagaaaattggatgtatattttgaatatgaagaaaaaataatgagc

SEQ ID NO: 169652 - DNA, 83 bp, Homo sapiens
ggcagctgcagtagcggcagcagccccagcctcaaggccagacaatgcagatcttcgtgaagactctgactggtaagaccatc

SEQ ID NO: 169653 - DNA, 99 bp, Homo sapiens
gccagcgccagctgcagccctggccgcgcactcgcctcagctgagcctgggtctcctaaagcgtgcttttcaaaagtcggcatcagtccggaatattct

SEQ ID NO: 169654 - DNA, 50 bp, Homo sapiens
ttgcgcaacgccaacctcaggcgagatggctgatcagttgatgttcgctt

SEQ ID NO: 169655 - DNA, 74 bp, Homo sapiens
tttgatagatgtcataacagtatttggagaactcactgatgaatgaggactcagaagacaaagatgtgaagacc

SEQ ID NO: 169656 - DNA, 100 bp, Homo sapiens
tggtcgtggctgaacattgtgaacgtagtctggaagacttgcttcgagaaaggaaacctgtgaggagctgaccagtgctttggtgcatctaaaactgcat

SEQ ID NO: 169657 - DNA, 123 bp, Homo sapiens
aatctgcccttttgaagaaaagacaaaggtagaaaggatggtggaggactacctggcaagtggttatcaggtgaagtcatgggcattgggcgttcatttgaggaggccttccagaaggccctg

SEQ ID NO: 169658 - DNA, 112 bp, Homo sapiens
gcattgctgctcacctagataaccaggttccagttgagagtccgagagctatttcccgcaccaatgagaatgacccgaacaaagtgttcatctaccgcgggaaggaatatga

SEQ ID NO: 169659 - DNA, 80 bp, Homo sapiens
ccagcccgtgccgcgagcgcggcctgcaggaggtgaccatggaggaagaagatgagtctcgagggaagacagaggagtcg

SEQ ID NO: 169660 - DNA, 88 bp, Homo sapiens
acacccgtgggtgatgcagacgcaagctttcattgtactgacaacctcagctggcatcatggaccatgaagaagcaagacgaaaacac

SEQ ID NO: 169661 - DNA, 98 bp, Homo sapiens
ccactttcacagaacacccgatggctggcgcagatgagaagacagcatctctgtgtcagggaaccagacagcacctacttcgaccttccccagtcaag

SEQ ID NO: 169662 - DNA, 100 bp, Homo sapiens
cagcctcgtcaaccagcagagcttccaggacatcaagcccatgcgggaccagatcatccgcgtgaagcgagaaatccaagaccagtgacttatcaattcc

SEQ ID NO: 169663 - DNA, 100 bp, Homo sapiens
ggcgggcccgggctgcggcgtgtgcgcgcccgccagctgctccggagatacgcccccaggctccgctcttgccagagggacaggagccatggctcagaaa

SEQ ID NO: 169664 - DNA, 75 bp, Homo sapiens
gtggcacacagataccgtttattaaaagagctgtggctcttagcagtgtctgcaaaaacgaatcttttcctacaa

SEQ ID NO: 169665 - DNA, 83 bp, Homo sapiens
cacgaaggcaccgacgtcatcatgctgaccaccaatcagatccgtaagggcagctggtggaatttttgaagaaaatggaatct

SEQ ID NO: 169666 - DNA, 74 bp, Homo sapiens
gaaaaggaaaatctgcaaagaactttcctgcttacaacctcaagtaaaggaaaaaatgcatttttcaaagacct

SEQ ID NO: 169667 - DNA, 101 bp, Homo sapiens
aaaccgcaaccgagggaaccgaggcagcggaggtggtggtggaggaaattatggaagtggaaattacaatgattttggaaattataaccagcaaccttcta

SEQ ID NO: 169668 - DNA, 75 bp, Homo sapiens
atgtggtttttctacgcattgattccatgtttgctcacagttgctgatgtatattcaagatgagtggattaggag

SEQ ID NO: 169669 - DNA, 97 bp, Homo sapiens
gccgagtcctagcgcctggcctgcgcgccgctgcccgcgccacagatccccagacttcaagggagatttttaattttgtactaaaggcaattcgtcc

SEQ ID NO: 169670 - DNA, 100 bp, Homo sapiens
cttctggttgtgagtgctgcctgattcgtgagttgtttgttgctcaggttttctgtctcaactggtctctgacaagcctctgactgaatgtatccgtgct

SEQ ID NO: 169671 - DNA, 76 bp, Homo sapiens
atgacttgggctcatatccacaatacttggtataaggtaccgaaagcacagtaatcactggtgtcgatattgtcat

SEQ ID NO: 169672 - DNA, 75 bp, Homo sapiens
acgatcccaccgcacgttcagaagtcgggttctggggctgctggtatggacgcttattgctggaactgagtactt

SEQ ID NO: 169673 - DNA, 88 bp, Homo sapiens
tgggaggatgggttcgccatcccggtggcgaacgaggagaacaagctactggaagatcagtggtgctgattactatgattacggacat

SEQ ID NO: 169674 - DNA, 90 bp, Homo sapiens
gatggccgtattattcccaatgaaggtggctgacggcctggtcaaggtgcaggtggctttggggaacatttccagcaagagggagagggt

SEQ ID NO: 169675 - DNA, 100 bp, Homo sapiens
gctgctgtctctgggaggacccgggcgtccttggcagcccagctgataaccatctcttagagaaggctgagctgctggacaagttctcaaagaagctgca

SEQ ID NO: 169676 - DNA, 98 bp, Homo sapiens
tggggctgaatccgcccgggctacgctcctccatcacgtgagccaaagaaatgtctgaggaccaggaatgtttcaaagtctctggaaaaattgaaaga

SEQ ID NO: 169677 - DNA, 100 bp, Homo sapiens
aatcctgcagggggcaccagagatcttggacaggcaaactgcagcccttctgcatgacgccacaggtcatcatctggatcatcccattctggttcccgtt

SEQ ID NO: 169678 - DNA, 100 bp, Homo sapiens
gaagccccctgcaggaactctacaacccaatccaggagaggaagaagcggggagagaccaacaatgacctgtttctggcagatgtgttttcctaccaggg

SEQ ID NO: 169679 - DNA, 50 bp, Homo sapiens
ggcctacccgggatacggaggagggacaccccatcacagagggtacagtt

SEQ ID NO: 169680 - DNA, 98 bp, Homo sapiens
gggcgggcagggccgggctccgcaggtgtcatggagaaactccagctgggcccagagattctgcagcgggaaaatccaaggcttatttatgccaggct

SEQ ID NO: 169681 - DNA, 75 bp, Homo sapiens
tgtttctcatcatcaccaaacgaaacctgtttggaggttatggatgataaacccaatcctgaagccctaagtgac

SEQ ID NO: 169682 - DNA, 83 bp, Homo sapiens
cttcctcctcggaatctgcaaggtattgcattcctgctgaggaggagaacaagctggaagatgtggtccacaccctgctgcaa

SEQ ID NO: 169683 - DNA, 83 bp, Homo sapiens
aaactatactaaaacacctacagaatctttttgtaccaagtatgttttagctgttgggagctctgtgttccatgcgatgtttt

SEQ ID NO: 169684 - DNA, 100 bp, Homo sapiens
gaggtgaatttccatgtcaacatagtccagtttaaactcatatcccaggcatatgaagtgctttcagatccaaagaaaagggatgtttatgaccaaggcg

SEQ ID NO: 169685 - DNA, 51 bp, Homo sapiens
acttcactgatcctttgctgggctggtgtacagggagcaacaccggagctg

SEQ ID NO: 169686 - DNA, 50 bp, Homo sapiens
cctggcttcctaccctgccccccaggaggacaaatttacatgtattggag

SEQ ID NO: 169687 - DNA, 82 bp, Homo sapiens
aagttggacgctatgctggaagaatttaagaaagtactttggaagtgttgctgaaatcatcaggaatcatcaacatagtcct

SEQ ID NO: 169688 - DNA, 83 bp, Homo sapiens
attaaaatggtcgccccgtccatggcctcccgagtgattgatcgtgcgattcagacaatgcagatcttcgtgaagactctgac

SEQ ID NO: 169689 - DNA, 97 bp, Homo sapiens
ggattcaggtcccggtttgagtcttgaagaatttattgcttttgagcatcctgaagaagttgattatatgacggagcatctttccttgaagaagtac

SEQ ID NO: 169690 - DNA, 97 bp, Homo sapiens
ctgggattcccgcgcccctcggacggccacgagactcgggtcacgaacgagatcacgccggtgctgtcgtactcctacctggccgtgctggtgcccg

SEQ ID NO: 169691 - DNA, 117 bp, Homo sapiens
taaaaacgcatctatctaacgtttaccctagcaaaccaggatatctgtgtttgccttacatggcattgcagcagcatcatcttctctccgatgtcaccgttcgggggtttgttgctg

SEQ ID NO: 169692 - DNA, 83 bp, Homo sapiens
cctggagcctcagttggaagcagccgatccagcctgcggagcctgtggggcaggcgggggcacgaacagcatcaccgtgagga

SEQ ID NO: 169693 - DNA, 74 bp, Homo sapiens
caagggttcggccgtgccctccgacagccaggcccgcgagaacatgagtctgagattcttccattcccgaatcc

SEQ ID NO: 169694 - DNA, 75 bp, Homo sapiens
cccacgctaccgggagctggtcaagaactgagcgcttgcatcaaacacccctaactcagaagtgtgcagccacac

SEQ ID NO: 169695 - DNA, 86 bp, Homo sapiens
aaaggagcagccctggtgtcacctatcagtaaaaggtttcagaaaacaaaaggcgatacacaagggatggatttgacctagacctc

SEQ ID NO: 169696 - DNA, 100 bp, Homo sapiens
cacagtgcctctgaccagcatcgtctgtaaagggcagcccaatggatccaatggtgatgaagagacctcagttgtatggcatgggcagtaaccctcattc

SEQ ID NO: 169697 - DNA, 75 bp, Homo sapiens
gattcgcagtggtcgcttcttctccttggtggcagtgctggcagcacggtggcggtggccgtgaaggccgcgcag

SEQ ID NO: 169698 - DNA, 100 bp, Homo sapiens
ccgtggaggaggtcggctcagccgggcagtttgaggagctgctgcgcctcaaagccaagtctacttccccagcaggacagcatcattctcctatatcttc

SEQ ID NO: 169699 - DNA, 82 bp, Homo sapiens
ccggagtttgacgaagaggtggtttttgaggtcaaaatgcagatcttcgtgaaaacccttaccggcaagaccatcacccttg

SEQ ID NO: 169700 - DNA, 101 bp, Homo sapiens
gtgattgctgcggtgtttgaccgagacataaactgcagaagagcagcctctatgtgaagttcatttccaatccgccctccatggtggcagcggggagcgtg

SEQ ID NO: 169701 - DNA, 100 bp, Homo sapiens
gcagcgggggggcaggcgatcgaaggctcggggaccagttctacaaggaagccattgagcactgccggagttacaactcacggctgtgtgcagagcgcag

SEQ ID NO: 169702 - DNA, 50 bp, Homo sapiens
atggacctcgggaacccagaaacgcaggaggagggagacgcactgatgac

SEQ ID NO: 169703 - DNA, 107 bp, Homo sapiens
aagagtggattatttggtcactgaggaagagatcaatcttaccagagggccctcaggtccactggctattctgaggtgatagttgtcgttggaggatgtgagcgagt

SEQ ID NO: 169704 - DNA, 83 bp, Homo sapiens
ttgcgcgtggaacggctgcttttggaagaagtccattggaatattaagcccaggagttgctttggggatggctggaagtgcaa

SEQ ID NO: 169705 - DNA, 90 bp, Homo sapiens
tgaagtcattgatctgaggactataataccttgggatgtggacacaatttgtaagataactcgggaactgttaaccaaattatgatgatg

SEQ ID NO: 169706 - DNA, 100 bp, Homo sapiens
gggagacagctgccatccactgactcgtaaagctcagcttgtcaatcggaaacagaaattagagtctgtggaactttctagccaatcagaaattcaacac

SEQ ID NO: 169707 - DNA, 75 bp, Homo sapiens
agactcgtcgaagagcggctaaaaacgttagattagctttatttgctcaccgtgaagatggacctggaatcccag

SEQ ID NO: 169708 - DNA, 100 bp, Homo sapiens
agtgatatccaggaaggcgatcttattgaagtggtcttgtcagagctttggatgtagtcgatggaaaatatgtggttcgagactcccaggaatttccact

SEQ ID NO: 169709 - DNA, 83 bp, Homo sapiens
tctctctttctggcctggaggctatccagctttccaacatggctagatccatcagaaactgaagccgtggagaacgctctcgg

SEQ ID NO: 169710 - DNA, 100 bp, Homo sapiens
ggcggatggccccaggtgtaagcgcagaaagcaggcgaacccgcggcgcaataacgatgattctttgggattgggacttaaaacaatggtataagcctca

SEQ ID NO: 169711 - DNA, 100 bp, Homo sapiens
cgggcaccatgaagcacttcctgagttggttcgactatgcaatgagggcgcccggaagatggaaaggactgagatgatgtacacaattaactcccagctg

SEQ ID NO: 169712 - DNA, 100 bp, Homo sapiens
tgcagctctactctggacgcctgcagatcaataagatggagtggtggagccgcttggtgtccagtgaccctgagatcaacaccaagaagattaaccctga

SEQ ID NO: 169713 - DNA, 82 bp, Homo sapiens
ggcgtgccccaccatgtcagacgcagccgtagacaccagctccgaaatcaccaccaaggctccataaaaatacagactcacc

SEQ ID NO: 169714 - DNA, 82 bp, Homo sapiens
ccggagaagccgccgcggccaccccggcccctgcatctgtccgatcgctctttcagttcaaacttctcatggaacatctgga

SEQ ID NO: 169715 - DNA, 96 bp, Homo sapiens
agtcattcgtaatcagcaggccaaagactcagagtgccgcagaatggaattcggcattgttcctacacagcttctcggcaacatctctatgttgat

SEQ ID NO: 169716 - DNA, 98 bp, Homo sapiens
ccatcgtcaccgtgtgggagcgggagctgcggaaagccaacacatatctctttatggtacaagctcgaggtataatgttgagagaaaatgtgaaaaca

SEQ ID NO: 169717 - DNA, 74 bp, Homo sapiens
tgcattaacatcaggcacgataaaagccatgttgagtggcccaggcctgtgatacttgggctgtgatcctctag

SEQ ID NO: 169718 - DNA, 74 bp, Homo sapiens
tgaatttgtttcacccccgtggattccagtgggcccgacagcgcaacagttacagatgtagagctaaaacgact

SEQ ID NO: 169719 - DNA, 100 bp, Homo sapiens
cacgcatttgattgttccagagccaaagggggtctatgaaaattatcctacttatgatttaactgaaagaaaagatttcataaaaacaactgtaaaagag

SEQ ID NO: 169720 - DNA, 75 bp, Homo sapiens
ggagatcatagcagagtacgatactcaggtcaaaggtactgaacgacacctgggtctccttcccttcctggtctg

SEQ ID NO: 169721 - DNA, 78 bp, Homo sapiens
tgatgacacctttattttaaaagctgatgttccaagtcaagtccatcatctccagaaccagctagtcttcctgcagaa

SEQ ID NO: 169722 - DNA, 100 bp, Homo sapiens
gaggccgaggcggagaaggggcttcctgagcgtcccagtacactgacagagacttaattcagtgcacaaatgagatgaatgtgaacatcccacagttggc

SEQ ID NO: 169723 - DNA, 88 bp, Homo sapiens
tttattccacaaacttatacaacctgatcatccgcagatatctcagcagacgctgaccggaaaggagattgagattgacattgaacct

SEQ ID NO: 169724 - DNA, 122 bp, Homo sapiens
gctgctgctgctggtcctcctgatcgccggcagtgctggggccgcgccacttccgcaaacaggtgcaggacatgtcctcatagagatttcaagtacccacaagaaactcaacgagagtcttg

SEQ ID NO: 169725 - DNA, 98 bp, Homo sapiens
attctcaagggaggagttagagtggcaggttgcagtccatgagctgggaaaggaggcagtgctcttgggagaaacagcagaggcctcaagtttcgggc

SEQ ID NO: 169726 - DNA, 100 bp, Homo sapiens
tagcagggaataatgctgtggaagtgagagaagaactcagaaaactgatagatttggcatatacgcctttccatgctgttctcaagtgtggccacctaac

SEQ ID NO: 169727 - DNA, 75 bp, Homo sapiens
ttaaatccggagggggaaaaaatcccaaggtctgcaaagctggagaagaagcaggcgctccctccattccagcca

SEQ ID NO: 169728 - DNA, 51 bp, Homo sapiens
tacacagcagcaacagcctgctacaggaaccctcacccagaatgaaatgat

SEQ ID NO: 169729 - DNA, 51 bp, Homo sapiens
tcctcaggtccctgcctgcacaggcatggtgacatggaccagaaggagaga

SEQ ID NO: 169730 - DNA, 130 bp, Homo sapiens
cgcagggtctggagagtcaccgcggcggcgccgggtggtggttaaaccatgttaaggaggattttacagagggtgctgctggtgagtagcagccggtacccagaccagtggattgtcccaggaggaggaa

SEQ ID NO: 169731 - DNA, 100 bp, Homo sapiens
gagacgtaccggctctggaaaatccgcaagaccatcatgcaggctgcgggaacaccatcgggccaccattaaggtcattcgacgcatgcagtactttgtg

SEQ ID NO: 169732 - DNA, 50 bp, Homo sapiens
tggagatccagggcaagcgggtcaaggtgattgtagagaaggctccaaaa

SEQ ID NO: 169733 - DNA, 75 bp, Homo sapiens
cgcgcctgcttcccgtctgcgcgagtccacgcagctccccagggtctctgtcacccaggctggagtgtagtggcg

SEQ ID NO: 169734 - DNA, 75 bp, Homo sapiens
cggaagctggttttcaggccacaaatgctttcacaggctctccctgcatgtcctatccaggccacctgtgaggct

SEQ ID NO: 169735 - DNA, 96 bp, Homo sapiens
gacgcacagctaagatgcccggacatcctggaagctgggaaatggaccagttgctcttctgtgatgactgcgatcgtggctaccacatgtactgtc

SEQ ID NO: 169736 - DNA, 98 bp, Homo sapiens
gacgccgcgcagctacctcatgactattgcaccacgcccggggggacgctcttctccaccacaccgggaggtggataggcatgtagacctgctagaag

SEQ ID NO: 169737 - DNA, 82 bp, Homo sapiens
tcctgctgctgctgctgctactacttacaaccatcactggtgcaagctatatttaacggagatcctgatgaagttcgagcac

SEQ ID NO: 169738 - DNA, 74 bp, Homo sapiens
gccaactgcatctttctcaacatcacaaacagtgagctcttcattctggtgcaggtgatggtcctaccagtgtg

SEQ ID NO: 169739 - DNA, 75 bp, Homo sapiens
ttgcttcggtttccctccagacagatgttgatgcctaagaagaaccggattgccatttatgaactcctttttaag

SEQ ID NO: 169740 - DNA, 75 bp, Homo sapiens
tccagaagaccaagtacctgcagatcctgacctctctgatgagatggatcggtggtgatgatgtccagcaactct

SEQ ID NO: 169741 - DNA, 100 bp, Homo sapiens
ccgagtggatcggggacggagagaacacgagcccatcaggctctgaaccaagttgtcctatgggacaagattgttttgagaggtgataatccgaagctgc

SEQ ID NO: 169742 - DNA, 82 bp, Homo sapiens
cctcaactacagcctccggcagcgcatggacatcctggatgtgagaagccctaccactgcaactgggacggctgcggctgga

SEQ ID NO: 169743 - DNA, 128 bp, Homo sapiens
gtcattacaccttaactccatatattcatccacatccaaaagattgggttggtatattcaaggttggtcaaagaaaaagtgatgtatgaaaaagaggcaaaacaacaagaagaaaagattgaaaaaat

SEQ ID NO: 169744 - DNA, 98 bp, Homo sapiens
cgagtgggaggatggcggaagagaactacgatgacccgcacaaaacccctgcctccccagttgtccacatcaggggcctgattgacggtgtggtggaa

SEQ ID NO: 169745 - DNA, 98 bp, Homo sapiens
atcgcctgacagggtatctgaagtaaaaggggtcctgctgccggccacagagatggcatcgctgctgtcgctgcaggaggagaaccagctgctgcagc

SEQ ID NO: 169746 - DNA, 75 bp, Homo sapiens
tgggccgcgccgacctggtcatgagcttcgttaacatggacctgcctagagctggaacgttacctccagagcgag

SEQ ID NO: 169747 - DNA, 75 bp, Homo sapiens
tgtcattccacctggagatcactgctcggccagaaggtggtcggtacctgtgctcaggggaaggcatgttccgaa

SEQ ID NO: 169748 - DNA, 75 bp, Homo sapiens
ctttattgtggtggagtccaccccgctgtgttcaaaaggtgatgacctatcaacagccattctcaaacagaagaa

SEQ ID NO: 169749 - DNA, 75 bp, Homo sapiens
atttcagtggagagcattccatccctacggggctctatcactcaggttgcatctggaggtggtggggttggagat

SEQ ID NO: 169750 - DNA, 100 bp, Homo sapiens
gtgcatattgtagggggtgaactggcatttaaatcaaacggtattgagatggattgggttatgaaacataatggtccaaatgacgctagtgatgggacag

SEQ ID NO: 169751 - DNA, 100 bp, Homo sapiens
atggctggacagctagctgcttatggctataaaattacaggtgtgtacattctcacgaccggcctgatccctgtgctggagaaagaacacgacccccgag

SEQ ID NO: 169752 - DNA, 73 bp, Homo sapiens
agtggccctgcatgaactctacaagtacatcaacaagtactatgaccagctgagatatggggagcctacactc

SEQ ID NO: 169753 - DNA, 83 bp, Homo sapiens
acccggtgtctgctcctgtcgccttcgcctcctaatccctagccactatgataacgaaggaggcccaacttcattcaataagg

SEQ ID NO: 169754 - DNA, 130 bp, Homo sapiens
ccgaagcgtggggcgcgcgtgcggaggaccaggcgcggcgcggctgcggctgagatccagatgcagaggtgtgccttcatgtactgaggcttgtccagtctgtggttctggaacctgaagtcttctccaa

SEQ ID NO: 169755 - DNA, 75 bp, Homo sapiens
tattattaaagatgaagagagttcttcaagaggtagttacttttggtgacgctgtccagttcccacaatgtatca

SEQ ID NO: 169756 - DNA, 90 bp, Homo sapiens
tggcgctggtggggggagtcctcatcatcatcgcctcctgcgtcatcaacttaggcgggattgtttccattgccaccctaaccgtgctgg

SEQ ID NO: 169757 - DNA, 82 bp, Homo sapiens
caagcagaaggcccggaagaaagaggagcggcagagcctgctgggtgacacttaactccgccatctgcgttttgagcactgt

SEQ ID NO: 169758 - DNA, 82 bp, Homo sapiens
cagagccattggagggcgcggggactgcaaccctaatcagatgtctttggtggacttgggaaagaggttgctagaagcagca

SEQ ID NO: 169759 - DNA, 100 bp, Homo sapiens
aaaggcactctctctgttaactttgtgttggggatgtcctttgcactgaccctgaactgccagattgacaaaaccagccagaccatagggctatgatctg

SEQ ID NO: 169760 - DNA, 100 bp, Homo sapiens
gcgtcctttttcgtttttcggatgatgccttcaatactacctttatttccaccataggtgtgtgtggctgctgtggtgccctacgccccaggtacaaaag

SEQ ID NO: 169761 - DNA, 82 bp, Homo sapiens
ctgccgtccttctccactttcgccagcccgtgccgcgagcgcggcctgcaggaggttgtggcagcactgcctgaaggtatga

SEQ ID NO: 169762 - DNA, 89 bp, Homo sapiens
gccaccatgtaagaagtgcctttcgcctcccaccatgattctgagacctccccagcaatgtggaactttttcggctttgtgagaaacct

SEQ ID NO: 169763 - DNA, 50 bp, Homo sapiens
ggcggacggctgcttcctgggcgacgtggcatcctgaggttagcattaca

SEQ ID NO: 169764 - DNA, 79 bp, Homo sapiens
tcagctgccacctgcctttgacctttttgaagcctttgcaaaacttaccacagtgcggagactcctttctgaaaaggcc

SEQ ID NO: 169765 - DNA, 98 bp, Homo sapiens
gagcgagaagatcacctactccatcaaggtcatcgaggccaacaacccattccaggctgtgcaggaagggaccgacgtcatggttcggtgcctcaagc

SEQ ID NO: 169766 - DNA, 100 bp, Homo sapiens
tgaagaggcaaatcatgcgctttgcaatgaaatctcgaaggggacctcatgtccctgtgggacacaatgcccccaagtgtgaaatggcctttccccgggt

SEQ ID NO: 169767 - DNA, 100 bp, Homo sapiens
ggggacggctgcgcgggacggctctgtaggaaggaacttggttccccctccctcagcttccgccccaaaaggcagcatggtgattcatttgatgcttcca

SEQ ID NO: 169768 - DNA, 100 bp, Homo sapiens
ctgcggctctttgtggagcagctgtcccacaagacacccgactggctcggctacatgcgcttcctggtcatcccactggagttctgccttctccgaggga

SEQ ID NO: 169769 - DNA, 83 bp, Homo sapiens
ctccagggaccgatccgtatactgcagcaggattggctgcagcagctacattagcagctttagccacagtagaagacttccag

SEQ ID NO: 169770 - DNA, 83 bp, Homo sapiens
tggaatgacgtaaaagaccctgtctcaattgaagaaagagcgctctggattaatcgaattacagctgctagccaggaacatgg

SEQ ID NO: 169771 - DNA, 98 bp, Homo sapiens
gcagaaatagcgaccatggcgagattagtgatgatgaaccaggttatgaccttgatttattttgcatacctaatcattatgctgaggatttggaaagg

SEQ ID NO: 169772 - DNA, 121 bp, Homo sapiens
ccggggtaagatggctgcagtccgtatgctgagaacctggagcaggaatgcggggaagctggttatagaaacattatcacgactttctcgaacacctatagcattggccacaggaatcagg

SEQ ID NO: 169773 - DNA, 76 bp, Homo sapiens
aagccgggagagggcctgtagggagaatgtaactggtcactacatttccccctttcatgatattcctctgaaggtg

SEQ ID NO: 169774 - DNA, 100 bp, Homo sapiens
tggtgctcagctggaagccccctggccagcgtggtcatgagggcattatgtactttgtggaaaagggaaggccacgcttccatcgtgaaagagctgaagg

SEQ ID NO: 169775 - DNA, 146 bp, Homo sapiens
ccgctctccaccatccgcgaggtggcggtgctgaggcacctggagaccttcgagcaccccaacgtggtcaggcctatatgaacccaatagcaatggcgagatcaaggggtccaatccagtcttcagggccaacaatacaggattat

SEQ ID NO: 169776 - DNA, 75 bp, Homo sapiens
atcccgcagtacaagaactggagagcctatttgatggctttgcagatggactaggagttgctgaagctatttcat

SEQ ID NO: 169777 - DNA, 98 bp, Homo sapiens
gaggcagaagtgtttcagggggtcgaggtcgtggtggaccacgtggtggcaaatcctccatcagttctgctgactcctgagttctcacaacgcttgac

SEQ ID NO: 169778 - DNA, 100 bp, Homo sapiens
gtaggtgagcactctcccagcctggagcagccggaccagcccagaaggcagcggcggcccaggccagcattcccgcagttgcttgtctggagatggagcc

SEQ ID NO: 169779 - DNA, 87 bp, Homo sapiens
tactttctacatcaatggatagagatctgactttggtgtgtctgccaagaatctgaagactctacagaaacgagattccttcatcgg

SEQ ID NO: 169780 - DNA, 100 bp, Homo sapiens
tcttctgcccgggagacctaaccgccgaatgcgttcggaggtcatggaaaatggaagatttgcaaaatacaaatattttacccatgtcatgatcaataag

SEQ ID NO: 169781 - DNA, 82 bp, Homo sapiens
atggaattctaatttgaaccatgtttggattgaagccgcctctgtattacttaccagctggccatgggcaagatgatggagc

SEQ ID NO: 169782 - DNA, 98 bp, Homo sapiens
tgaaacctcctagtagaaaaagttcttgggacaaacttcatttgccactgaggcggctcccagctgcgttggcgacatggccgacacccccagagatg

SEQ ID NO: 169783 - DNA, 75 bp, Homo sapiens
aaaggtgctaatccagtggaaatcaggagagatgaatacgttgccagcttgcatctgccatcatttgatgcccac

SEQ ID NO: 169784 - DNA, 100 bp, Homo sapiens
tggagaaaaggactcaggtgaggactggaggaggcaggtggaagtcatcataaagtttctgtttcacccgtcgtccatgttcgaggactctgtgaatctg

SEQ ID NO: 169785 - DNA, 50 bp, Homo sapiens
gttagacttgtgcaaccagggcaactctgcatccctctctacctgccaac

SEQ ID NO: 169786 - DNA, 75 bp, Homo sapiens
gttcacggcaggattcggttagcttaaagaaagtggttattgtacaggtcatgaaccagattccctggagttcag

SEQ ID NO: 169787 - DNA, 100 bp, Homo sapiens
gcggacagggcgatggcaggttcgccgggtgtgaggcttcacagcggtccggtgaccaagtcgagcgaatgctgatgtcttaaaggcgatggtagcagat

SEQ ID NO: 169788 - DNA, 82 bp, Homo sapiens
agaatgtgaaggattatttactcgatgatggaactctggtggtttcaggaagaggaattaaggaatttgcaagagcaaatga

SEQ ID NO: 169789 - DNA, 82 bp, Homo sapiens
gccgcccgtccacacccgccgccaggtcgcaatggaagaagagatcgccgcgctggtcattgacaatggctccggcatgtgc

SEQ ID NO: 169790 - DNA, 74 bp, Homo sapiens
tggaattttggagatattcaaaggtctcctctgagcctccggcctccataagacccaaaacagatgacacctct

SEQ ID NO: 169791 - DNA, 115 bp, Homo sapiens
gaccgcgcgcagggcctgcagcgggagctggacggcgagcgcgagcggcgcgagaaaatgtccagctcgccgctgtccaagaaacgtcgcgtgtccgggcctgatccaaagccgg

SEQ ID NO: 169792 - DNA, 100 bp, Homo sapiens
cgggagccgccgccatgggggcctgcctgggagcctgctccctgctcagctgcgtgaatgaaaactttgccattgatttgatagcagagcagcccgtgag

SEQ ID NO: 169793 - DNA, 80 bp, Homo sapiens
tatactgcaaattttccaaatggaactgtggctgcaccatctgtcttcatcttcccgccatctgatgagcagttgaaatc

SEQ ID NO: 169794 - DNA, 75 bp, Homo sapiens
atgagacatttgctacagcatcccacattaagtcaacgtgttcccagctgttagatgaaaatctaaaggatgaat

SEQ ID NO: 169795 - DNA, 100 bp, Homo sapiens
aggatggggccctggatgagggggaagggcctcaaagccagaaggtgtgcgactctgacactgtgctggatccagcctgcaccatcgagatgcttcgagt

SEQ ID NO: 169796 - DNA, 76 bp, Homo sapiens
tctccagttaaggttggaaagatggatgctacttcctattctagaatctgagaaaaaggggttgattgaaagaatc

SEQ ID NO: 169797 - DNA, 50 bp, Homo sapiens
gggtttggctatgtgctctttgaggagaccctcctgttcttaactgtggg

SEQ ID NO: 169798 - DNA, 121 bp, Homo sapiens
aaaaaggaagcatgttggacgatatctaatattacagctggaaatagggcacagatccagatagctgatctggccaatgaagatactccacagttgtatgtggcctgtggtaggggacccc

SEQ ID NO: 169799 - DNA, 82 bp, Homo sapiens
aaaggattttgcacttgtgcagaccgggcgagcagagtaagaagcagtttttcagaagaagtgaagtcaagatgaagaacca

SEQ ID NO: 169800 - DNA, 85 bp, Homo sapiens
tttcagagcaacctctttcaggctttaataggcttgctatgggtgttctccaggatcaaagtgtgactgcagtggcataaaaggg

SEQ ID NO: 169801 - DNA, 106 bp, Homo sapiens
cccgccccacccgcatgctctttgtcactccccggcggcagcacgaaagtaccatatctttaatctcatgaagtacgacagctacagccgcttcttaaagtctgac

SEQ ID NO: 169802 - DNA, 100 bp, Homo sapiens
gactgtgacaacgaccacgtctccaaaatgagtcgcatcttcaacccccatctatcgaaagctgctttgcgtcgcagttggagcagcacccccaccgcag

SEQ ID NO: 169803 - DNA, 96 bp, Homo sapiens
caccacgcggcctacgtgaacaacctgaacgtcaccgaggagaagtaccaggaggcgttggccaaggctgtccaggcagccatcttgtctggagac

SEQ ID NO: 169804 - DNA, 98 bp, Homo sapiens
tggacttcgcgcagtgcctggggtactacggctacagcaaggtgagccccaggtgtatcccagagggatccgggtgacttctctgcagactgtttgcc

SEQ ID NO: 169805 - DNA, 100 bp, Homo sapiens
tggaattaaagaaatcattcaccagacatcatggagcctatatatccttttgcacggccccagatgaataccaggaaatggatcagacaatggctgccaa

SEQ ID NO: 169806 - DNA, 74 bp, Homo sapiens
gacgctgctgggtccgctgagcggggcgacccgagacagagtctagctctttcacccaggctggagtgaagtgg

SEQ ID NO: 169807 - DNA, 75 bp, Homo sapiens
atcagcaaagaggaggccatgcgctggttccagcagaagtctccaaaaaaagttggtgatgacattgccaaggca

SEQ ID NO: 169808 - DNA, 100 bp, Homo sapiens
agcacatccaaggcggtgggctcctccatggcacagctgctgacctgtgctgctcaaggcaacgaacactacacaggtcccccccgcctccagccagcct

SEQ ID NO: 169809 - DNA, 50 bp, Homo sapiens
gagcagcggaaaatgatccagtcacaggggtcatcctgtatatcctcctg

SEQ ID NO: 169810 - DNA, 75 bp, Homo sapiens
caagtactcggcaagttgtcaggcgacagggtctcactgtattgcccaggttggtctcgaactcctggcttcaag

SEQ ID NO: 169811 - DNA, 100 bp, Homo sapiens
gatttccattctgcagttgaggaaacggaggctgcaagattaaatgaatgacttatacacggatatgtagaaatctaccactgtcgaagacaaataaaat

SEQ ID NO: 169812 - DNA, 100 bp, Homo sapiens
gaatggcagtctgatctgcacagcttccaaagacaagaaagtgagagtcattgatcccaggaaacaagagattgttgcttctctgctggatgaaccgaat

SEQ ID NO: 169813 - DNA, 75 bp, Homo sapiens
gaggaggcgagctagccgggagttacaccgccaccgccaggttaaaaagatcaagtggcatgagcagccttttgg

SEQ ID NO: 169814 - DNA, 100 bp, Homo sapiens
gcaaaattaaaacgactcctgaagggcagttaatagtatcatatctatcgtttttggtactcgaagaattgcctgggctcaccttgatcgtaagttgaca

SEQ ID NO: 169815 - DNA, 100 bp, Homo sapiens
ggcagagattgcggagattgccagccgagaaggtgagctccctggggaaggactggcacaagttctgcctcaagtgcgagcgctgcagcaagacgctgac

SEQ ID NO: 169816 - DNA, 100 bp, Homo sapiens
cccgggcttgaccgccgcgaaggccaaccccgggaaggggaaatctcaggaagaaattgcagcatgggaagatggacagcaaagcaccgatgtcctgcta

SEQ ID NO: 169817 - DNA, 87 bp, Homo sapiens
acgcacacaggagagccaggattcatgctctacatccccatagaggttatccggtgttggctcctgctgcttactatgaccaaactg

SEQ ID NO: 169818 - DNA, 101 bp, Homo sapiens
ttcagcctcagtgatgtccatgaggccgagacagcggctaacaggatatgtaaggttcttgctgtgaatcaagagaatgagaggctgatggaagaatatga

SEQ ID NO: 169819 - DNA, 100 bp, Homo sapiens
gtcattgcaagcactattggcagctgcagagccagatgatccacaggatgctgtagtagcaaatcagttgacatcacttgttagaagagcaactctgaaa

SEQ ID NO: 169820 - DNA, 50 bp, Homo sapiens
cctagagaagcgtttgcacaagagtgagtgtcgtggttggggtgctggac

SEQ ID NO: 169821 - DNA, 75 bp, Homo sapiens
tggaggacgagatgcccaagactctcccacaccagttatcctattgaaagaggggactgatagctcccaaggcat

SEQ ID NO: 169822 - DNA, 75 bp, Homo sapiens
catggaatacctggagtcaaagcagttccttcaccgagacctggacgcagagggctctacgtgtttgcacctggc

SEQ ID NO: 169823 - DNA, 100 bp, Homo sapiens
ggaacgccccaaaatccaacagcagttctcagacctcaagaggaagctacgttgggatatgtgagcagtgtgctccgtggtgctgctgtgtgacccgcct

SEQ ID NO: 169824 - DNA, 76 bp, Homo sapiens
ttccttttaaagtcaaggctggccaaattggacctgagagtcagtatactaagactgcccaggagattgtgaacgt

SEQ ID NO: 169825 - DNA, 100 bp, Homo sapiens
tcaagttcctctggaagctggagcagggtggcaattttaagcccagccagaaaggttttgcaggaggaaccaaatctttcatggacttcggcagctggga

SEQ ID NO: 169826 - DNA, 98 bp, Homo sapiens
ctccagcaggcgctggctcctgctcaggaacatcaggagagcattctgggtaataccatgcaaagtgtgattgcattactcagcaatctagttgcctg

SEQ ID NO: 169827 - DNA, 100 bp, Homo sapiens
cttgcttctgagcaaggtagttttgatgtgttccttgcctgtatctccccttggttcaatagctaccagatttttggaagaggaggaactgaggtctcat

SEQ ID NO: 169828 - DNA, 75 bp, Homo sapiens
atcagcgcctcaatctctactcgaagaagaaagagaagaaacgttttctcaggttctggagccattgttgctgcc

SEQ ID NO: 169829 - DNA, 75 bp, Homo sapiens
tgaaacatgaaaacatcgtggccctgtacgacttccaggtgcccagtcccctggaaggcagtgaaggggacggag

SEQ ID NO: 169830 - DNA, 87 bp, Homo sapiens
tggtgacaactcaagagcaatcagtaccatctgatttatgatattcagactggcaacaagctgttgactctgtttaacccagatctt

SEQ ID NO: 169831 - DNA, 100 bp, Homo sapiens
agttcaactttcccagaagttgttctaacgctgcctttgctttaaaacagtattacttgcgctcttcacagatggaatcacaaataaacttattggctgt

SEQ ID NO: 169832 - DNA, 98 bp, Homo sapiens
cgagtgtacacactgcgagctactttctgactgcccgcctggcactgaagccgagctcaaagaacctgcagatgacagcagcttctcgctgtcccagg

SEQ ID NO: 169833 - DNA, 100 bp, Homo sapiens
aatcaatgtctggtagccaccggcactcacggaggcccgggcagtcctgacctttgccctggacagcgtggaacggaagctgctgatgtccagcaccaag

SEQ ID NO: 169834 - DNA, 75 bp, Homo sapiens
gaaaagggagatcaatgaggagatgaaggatctgtctggctccattgatgacctccccacgggaacggaagcaac

SEQ ID NO: 169835 - DNA, 75 bp, Homo sapiens
cgccgggatccgaggtgccgggtgacaaggccgccgaggaacagggggttgtgtccactgtggtccccgactctg

SEQ ID NO: 169836 - DNA, 101 bp, Homo sapiens
agcagccgctgccgccgccgcgggagccgctgcccgaactcccggcccgaactccaggcatgaaagaattactgatgtccttgatcaaaaaaattatgtgg

SEQ ID NO: 169837 - DNA, 50 bp, Homo sapiens
ctggggactggccccaccgacctcatagacctgtggatatctgggctttg

SEQ ID NO: 169838 - DNA, 100 bp, Homo sapiens
gttaaggattccaagtaactcttatttggatgtacagttacccagcacgtgtacctcctcctcctcctattgctcgggctgtagtgccctcgaaacgtca

SEQ ID NO: 169839 - DNA, 100 bp, Homo sapiens
cagctgggctgcagtgaccccgctttcctcacgcccaggagtcagtggatcggtggggaaaatgctgcttaccctgggccctgggctgtagaaagaagac

SEQ ID NO: 169840 - DNA, 83 bp, Homo sapiens
gaccggagctcgtccagctgcgtgcctagctcaaagtctccactgcctcctgaagaagaggcaaaagatgaggaggaggatca

SEQ ID NO: 169841 - DNA, 100 bp, Homo sapiens
ttcggttccgggtcttggccccgtccttacctcacagttgggccatatggtgctcttcccagtctggttcctgtacagtctgctcatgaagctgttccag

SEQ ID NO: 169842 - DNA, 83 bp, Homo sapiens
gtcgcctctgatctgcaaagaaggagaaagcgtgcaggggcactatggcagacaaagttaggaggcagaggccgaggaggcga

SEQ ID NO: 169843 - DNA, 100 bp, Homo sapiens
ggaatcttggccaaaatcgtggaatatgaaaacgggggccactgccttggctcaacagccctgacaggatacacgctcctgacttcccagcgagaatatc

SEQ ID NO: 169844 - DNA, 100 bp, Homo sapiens
gtttgagagtgggaacatgacgcaggtgcaggtgtctcttctcgccctggcggggaagggcagctggtggaatttttgaagaaaatggaatctcgaggcc

SEQ ID NO: 169845 - DNA, 90 bp, Homo sapiens
cgcccagaagctgcagttggatagccccgaagatgcagagttcattgttgccaagaacccttgctggcctcagaacaccagcgccctccc

SEQ ID NO: 169846 - DNA, 75 bp, Homo sapiens
tcaaaactcatctcctgggtgactgctgcagaagaaagatcagcaactggagcctaaaaaaagtaccagccctaa

SEQ ID NO: 169847 - DNA, 100 bp, Homo sapiens
cgccttccgcaggccgtttccaccgaggaaaaggaatcgtatcgtatgtccgctatccagaacctccactctttcggtgttataactaaggctatttata

SEQ ID NO: 169848 - DNA, 82 bp, Homo sapiens
aggagcagccctggtgtcacctatcagtaaaagcatgttggcagataaattgaacatgactccagaagaagctgaaaggtgg

SEQ ID NO: 169849 - DNA, 95 bp, Homo sapiens
ctgttttgaagagaaggggaataagactgcatctgttcatatgagacatatctgaagagatggattaagaatgctttggattaaggattgtggag

SEQ ID NO: 169850 - DNA, 83 bp, Homo sapiens
ggcggcagcggcgggcctgaggcgaaggagcggccgggagcccgccgcgctggtagcggtgacttaagagattaaaattaatt

SEQ ID NO: 169851 - DNA, 100 bp, Homo sapiens
ttccttgtgcctccattcccgggaggggggagcggcgttggaggccaccgtttccaggttgtcggggtaccagttgggtctgctttaccttcaacagtga

SEQ ID NO: 169852 - DNA, 98 bp, Homo sapiens
cgaggaccgcaccatcccgctcattgagctgacatggacccaaatcctcgggccgccctggagcgccagcagctccgccttcgggagcggcaaaaatt

SEQ ID NO: 169853 - DNA, 82 bp, Homo sapiens
ccgcgcctgggctgccggcacttcgcggcaggcggctatgagaggttttcctccgagtacccagaattctgttctaaaacca

SEQ ID NO: 169854 - DNA, 100 bp, Homo sapiens
ctcttccccagaactacaggggctctggccatcttcgtgatgcctgaagggaacagcactgtctacatccctgaggaccccaccttcaagccctcaggac

SEQ ID NO: 169855 - DNA, 100 bp, Homo sapiens
ttgcaaaaatagcacagagagagtggacttctggaatggcacgatttggtgtgaagaagaaaccaatttacattaatgtcataagggatcctattgagag

SEQ ID NO: 169856 - DNA, 100 bp, Homo sapiens
cttttctctctgattctccagcgacaggacccggcgccgggcactgagcaccgccaccatggggaagggggaagtgtttggattgtgagctatttcagaa

SEQ ID NO: 169857 - DNA, 99 bp, Homo sapiens
tgtatcgacatacacactgggtacgctgtgccaagtatcagtgaatgctccagccagccttgtcaaaatggtggtacatgtgtagaaggagtcaaccag

SEQ ID NO: 169858 - DNA, 58 bp, Homo sapiens
ctttggagcaaattaagataattagctcatcttcattatttgctggtataaaggatgg

SEQ ID NO: 169859 - DNA, 100 bp, Homo sapiens
gctaatcccagctgctccatcactccaatcacaggcaacaactctgacaaatcagtttatttggcaacccaaggagttaatcctaaggaacatccagtaa

SEQ ID NO: 169860 - DNA, 73 bp, Homo sapiens
acaggccccagccacagtggggctggccttccgggcagcttcgtcagcaattgaagtggttgatatgtgaact

SEQ ID NO: 169861 - DNA, 100 bp, Homo sapiens
caagaaaccatcatggaatctttggatggcttacatcttcctgaatcgagcagagaaactgtgctgctacccccgtatgatgatgccactgtgaatggtg

SEQ ID NO: 169862 - DNA, 100 bp, Homo sapiens
taccagtgtaagaactactacaaactgcgcacagaaggagatgatgatgaggagtctgatgaggaagctgtgaagaaaaccaacaaatgtgtactagtct

SEQ ID NO: 169863 - DNA, 75 bp, Homo sapiens
tcaaatgctagcagacacggtggctactctgcctcggggacgaaagcaggtcctctcaaactgtgagtaactaag

SEQ ID NO: 169864 - DNA, 74 bp, Homo sapiens
tagagaacttgctcgtcatcagagaattcatactgttccagtgtctcgccccatcctcaccctcagggttccca

SEQ ID NO: 169865 - DNA, 75 bp, Homo sapiens
accagccaggagagcaaggagcctgtgttcattgcagcaggggacatccgtgagaaagatcagtctaaagaaaag

SEQ ID NO: 169866 - DNA, 98 bp, Homo sapiens
ctcttacgtctgcggaagtgcagctgcctcagttcttagcgcagagggcgatgagacaggtgtgatggacagtcttctagaagccctgcagtcagggg

SEQ ID NO: 169867 - DNA, 74 bp, Homo sapiens
gggcacgacctctcggacacggtgcaggcaggcgacattgactacagcaccgtgctcctcggcatgctggtgac

SEQ ID NO: 169868 - DNA, 82 bp, Homo sapiens
gttctggtctcctggatcatgtggccgagacgcatccagagctttcgtgaccggggactgttctgaagcaggcctcgtggat

SEQ ID NO: 169869 - DNA, 50 bp, Homo sapiens
gtgcgcgagctggtggacaaagcgtgaccctggcagcaaccccaacaaac

SEQ ID NO: 169870 - DNA, 90 bp, Homo sapiens
cgggaggctcccgggcttgcgtggttcattccttggaagaagctgtaccatcgatacctgatgaatgaagagcaagctgtcagcaaagtg

SEQ ID NO: 169871 - DNA, 82 bp, Homo sapiens
ggacaatggggacccgggacgacgagtacgactacctattcaaaggttgaaatcacaaagattagacacctttttagatagg

SEQ ID NO: 169872 - DNA, 96 bp, Homo sapiens
ccgcgaccgagtctggcagatccagtcttgctcagctctcacaggagagggcgttcaggtgactaataaaggtaccagaagaatatggctgcacaa

SEQ ID NO: 169873 - DNA, 96 bp, Homo sapiens
ctggaacctctgttcactcaaggtgtgagcgccactttgaagggcatccaacccgcggctatccatgtggaatcgctttcagtccttgtggacgat

SEQ ID NO: 169874 - DNA, 90 bp, Homo sapiens
caccggggagcccgtcaactcgggccacatgatccgctcagacttaattcagtgcacaaatgagatgaatgtgaacatcccacagttggc

SEQ ID NO: 169875 - DNA, 49 bp, Homo sapiens
aaactgactttgcagccacggagaggctcagctggaagctcagaaagcc

SEQ ID NO: 169876 - DNA, 75 bp, Homo sapiens
gagaactatggcaacatcaggtgactgtcccagaagtgaatcgcaggacgctgtgcagagctgcaagtccgtatc

SEQ ID NO: 169877 - DNA, 51 bp, Homo sapiens
tcgtctgctctgacatcaactccagcagctttgtgacaacaaactgtgctc

SEQ ID NO: 169878 - DNA, 87 bp, Homo sapiens
tgattaaggactatcgggagaaagtggagtccgagctgagatccatctgcaccacggtgctggccctcgggaccaaggatcacgtca

SEQ ID NO: 169879 - DNA, 83 bp, Homo sapiens
ggaggagatcccctcagttctgcgctgctcccgttccccctccccagagcaaggagccttcacgtaaatgggtccagtcatgc

SEQ ID NO: 169880 - DNA, 100 bp, Homo sapiens
cgttaatacctgtagatgaagatggcctggaacctcaagtgtgtgttattgagctgtcggaaaaggtaacagaagatggaactcgaaatcccaatgaaaa

SEQ ID NO: 169881 - DNA, 102 bp, Homo sapiens
gaggaagaaggtggggaggaagaggaggaggaagaagaaggtgatggtgagaagatgacagaggaagaagtagagatgctggtggcagggcatgaggacagc

SEQ ID NO: 169882 - DNA, 98 bp, Homo sapiens
ctgaagtcccttcatggaactgttatgaaaattaaccaggagcgagcagagggttatgtggtccgaatcagtggtgggaacgacaaacaaggtttccc

SEQ ID NO: 169883 - DNA, 75 bp, Homo sapiens
aaggaggacctcactgagatcagggacatgttgctggccaataagggcacactgcagaagttcgtggatgacctc

SEQ ID NO: 169884 - DNA, 90 bp, Homo sapiens
gagagagcgaacgccagggaccctgtgcaggcctgctcctccgtttgcaagatgtatgccatgaagtcctccctggaggacatggacgcc

SEQ ID NO: 169885 - DNA, 83 bp, Homo sapiens
gccggaatgttgtacaaacaggaaaagctgttggatcccggctactcaacagaaatgaaggaggaatctgtaaagaaacacca

SEQ ID NO: 169886 - DNA, 100 bp, Homo sapiens
tggtgtctgaagccgctcgcgcccagcattttgaaagcgaagcagaagccgtagaatcagcggcgagcctgttgaaagaacccacaggtgcatttcacag

SEQ ID NO: 169887 - DNA, 100 bp, Homo sapiens
cggggatgggggcctcgggcgccccgcagccccccaacatcctgctcctgctcatggacgacaattctgagggggatgcccagacgctgacggaagtgga

SEQ ID NO: 169888 - DNA, 100 bp, Homo sapiens
agaaaacccatatatccgaatgaatgctgaccccctgaaggtgtacccgccactgaaggggagcttcccggagaacctgagacaccttaagaacaccatg

SEQ ID NO: 169889 - DNA, 100 bp, Homo sapiens
aggcccgaaaagtacctggggtgaccgccattgagttgggtgaagagacctgcactttccgcatctatggggagagtaactggaatgagattgttgacag

SEQ ID NO: 169890 - DNA, 75 bp, Homo sapiens
tggaaatgtacagaaagaagtctcatcttcctttgaccacgttatcaaggaggaatggagcagaagtcatattct

SEQ ID NO: 169891 - DNA, 100 bp, Homo sapiens
ctggacaaaggaacaggtatctcagagaaactggtagtctgggtagattcaaagcatctttaagagaaaatgtcttggggagccccaaggaactgttgaa

SEQ ID NO: 169892 - DNA, 99 bp, Homo sapiens
catccatggtttctatgcccctctatgcagtcatgtatcctgtgtttaatgagttcaaaagaatgctgaaccgggagctgacacacctctcagagatga

SEQ ID NO: 169893 - DNA, 100 bp, Homo sapiens
ctggagagggagtgcgtggaggagctgtgcagccgcgaggaggcgcgggaggtgttcgagaacgaccccgagacgctgttcctgttccagctgctccgtg

SEQ ID NO: 169894 - DNA, 82 bp, Homo sapiens
gagagccactattctgaagaacacttggccaaagtgttcctctgaacaacagggagaatatctctgatcccacctcaccatt

SEQ ID NO: 169895 - DNA, 50 bp, Homo sapiens
ggggtatatccaccctcaagtgtgacttaaaccattggatattgagttta

SEQ ID NO: 169896 - DNA, 87 bp, Homo sapiens
gagcggccgggagcccgccgcgctggtagcgcccgtgaaaacagaaaccatgactgtcagcagtctggccattagaaagaagattga

SEQ ID NO: 169897 - DNA, 75 bp, Homo sapiens
gatttcccggatctggtaacatggcaaaagatgtagtgaagcgcgcagtggcgagccagccagactctgtggatg

SEQ ID NO: 169898 - DNA, 75 bp, Homo sapiens
ggagattgtttgcagcatagaagctccgcggacgggaaggtaaactgaggcctttgcccagaatgtgttgtcaaa

SEQ ID NO: 169899 - DNA, 83 bp, Homo sapiens
ctgtgctcgcgctactctctctttctggcctggaggctatccagcggctgaagaagatgcagagcagcctgaagctggtggac

SEQ ID NO: 169900 - DNA, 100 bp, Homo sapiens
ggccttggcagcccccatcctgtgcctcttctggctctacttcttttccttcctgcgcctgggtgctttgcccgtgtgcagacgctggctcagacagcac

SEQ ID NO: 169901 - DNA, 100 bp, Homo sapiens
ccagcctttctggagggatgcagagcctttccttaggacaaacaaggtatggcacagtcacaagggtgggtgaaaagatacatcaaggccttttgtaaag

SEQ ID NO: 169902 - DNA, 82 bp, Homo sapiens
tttagtggaagacatatggtgtggaatgacccagaaggactacatcacagcaagttactggaccattatcagaattgcaaat

SEQ ID NO: 169903 - DNA, 75 bp, Homo sapiens
ggaataggtgtatcaagtaatggtgcaaagcctgaaaattggcagagggggtcgatttgggaggaaaggtgtggc

SEQ ID NO: 169904 - DNA, 75 bp, Homo sapiens
accccgagaaccgtcagtttgagccagatgattcccaaatgctggaaaatcctctttgctaagttgtgtttctca

SEQ ID NO: 169905 - DNA, 74 bp, Homo sapiens
tgctacagaaacaaggtcgtcggctggcggagcggcttaccctctttcccagctgcccgctcctcagcacccga

SEQ ID NO: 169906 - DNA, 83 bp, Homo sapiens
aggaacctgacagaacttcacaggagaactctcctgcccttttaggagtgcaaaaagggtctcacttgtcacccaggctggag

SEQ ID NO: 169907 - DNA, 74 bp, Homo sapiens
ggggccgctggattctgaggaccagcagatggccagtcacgagaacccaggcttttctttgtgggctcaagaga

SEQ ID NO: 169908 - DNA, 100 bp, Homo sapiens
cggggtggaatggcagagcttgcttggtaaaatgcggctgacaattccgtgtcgggcccttacatgttctcatctacaatgttttgacgcaactctttac

SEQ ID NO: 169909 - DNA, 75 bp, Homo sapiens
gctgcacatccagatgaatgatgtcatcaccgtcatcgagggaaggtgtcgtgaaaactacccctaaaagccaaa

SEQ ID NO: 169910 - DNA, 100 bp, Homo sapiens
tccagcccagcgattctcagtcagttttatgtgctgaaagagttggccagatgactaagacatataatgacatagatgctgtcactcggcttcttgagga

SEQ ID NO: 169911 - DNA, 75 bp, Homo sapiens
cgtcctccgttagctaattaaaacatttttcagggacgtagccatccagagatgttggagtccggggtgacctgg

SEQ ID NO: 169912 - DNA, 74 bp, Homo sapiens
ggagaccattgaccagatagaggctgagtatgcccatcgtggtttctccgaggtgaaaactcccacactgtttt

SEQ ID NO: 169913 - DNA, 82 bp, Homo sapiens
ttggccaggccgtgttccgtgtctctggattcaagtcccaggagtcctgaccagagagcagcattactctactgactggcag

SEQ ID NO: 169914 - DNA, 100 bp, Homo sapiens
cagccgaccttgagctccaggagttcgtctcttacgtctgcggaagtgcagctgcctcagttcttagcgcagaccctacagcttggggcctgggctcctc

SEQ ID NO: 169915 - DNA, 100 bp, Homo sapiens
cagccggatccagcatctctccaccatcgactacgtggaggacggtgctcagaaccacacgttgcagaggctgcaacaggtgctgcacgcaggctcaggg

SEQ ID NO: 169916 - DNA, 74 bp, Homo sapiens
caagatccagaaacaactggatcaggaaaacatggctggcaagggcttctccttctgggtctggctggacaata

SEQ ID NO: 169917 - DNA, 82 bp, Homo sapiens
atatcagcgacaggactacatggatgccatggctgagaagctccatgatgcgttatctgggtctggaaacccaaaccctcaa

SEQ ID NO: 169918 - DNA, 83 bp, Homo sapiens
aaatccacatatcttcaaagacaaggtggacccccaaaagtacaagggcatatttaacggattctcagttacacttaaagagg

SEQ ID NO: 169919 - DNA, 76 bp, Homo sapiens
ccgagtttgtaatgtgactagacggccagccagtcatcaaacgttcacagcaaggccactggtacagacaatcttt

SEQ ID NO: 169920 - DNA, 100 bp, Homo sapiens
gcctttgctggacagatgaagagtgacttgtttctggatgattctaagaggtgcttttctgctttgggccaagtagcaaaagctcgattcctgcatgaga

SEQ ID NO: 169921 - DNA, 100 bp, Homo sapiens
gccacctccgctgctgctgctgctcttcccgctgctgctcttctccaggctctgtggctgaccggttccctgatgtgttacctgcttctgctactgatcc

SEQ ID NO: 169922 - DNA, 100 bp, Homo sapiens
ccggttcagggacctggcgatttctgagtgttccggtgggcaccatgtccttgaagcttcaggcaagcaatgtaaccaacaagaatgaccccaagtccat

SEQ ID NO: 169923 - DNA, 101 bp, Homo sapiens
tgttcttcactgtctgggtatttggaggaggaacaacccccatgttgacttggcttcagatcaggacatactgggttttgagaacacagacttggagacta

SEQ ID NO: 169924 - DNA, 100 bp, Homo sapiens
ggaagatgtagtccaacccacatcagcagacctgatggccaaaagaaaggaagaaaatttttcctctcctaaaaatgccaaaaggccaagacaagaagaa

SEQ ID NO: 169925 - DNA, 50 bp, Homo sapiens
gggagccccgggagccgcacgaccatggtgaatccgggcagcagctcgca

SEQ ID NO: 169926 - DNA, 100 bp, Homo sapiens
tttgaggactttgtctctgatgagctgagaaacaaagccacccagccaatgaaggatgatgatgctgaagctatccttgctgcagacttcgaaattggtc

SEQ ID NO: 169927 - DNA, 82 bp, Homo sapiens
cttgccctggtcttgctcggccgatgaagtgcagaggtttttttctgaacgtcctgactgccatcctgctgctgctgcggga

SEQ ID NO: 169928 - DNA, 75 bp, Homo sapiens
atagcttcagatgcatttgccacattcaagagagaaaaggaacagttccgtaagctctttattggtggcttaagc

SEQ ID NO: 169929 - DNA, 75 bp, Homo sapiens
cgacatccggtgcgccgaggctgctcacaaaaaacacttaaggagttccgtgatcgaccgaaaggacttaataat

SEQ ID NO: 169930 - DNA, 82 bp, Homo sapiens
ctggaggagattctggggcagtatcaacggagtctccgggtgacagctggagtatcagccttggaagtatatacgccaaaag

SEQ ID NO: 169931 - DNA, 85 bp, Homo sapiens
aagcagaaggaacaccctgtatatccaaggaagtcatgtgccagttaggtttacatcaaaagacattccgtccagctgctatgct

SEQ ID NO: 169932 - DNA, 100 bp, Homo sapiens
ggcatcttgagaaaaaattcctggaaaacccaggaagacataggccaaggagccagacttcctgtgttaactccttcctctgccactttttaccttgggg

SEQ ID NO: 169933 - DNA, 100 bp, Homo sapiens
gcaccgacagcctggatgacttctcagacggggatgtctttggcccagagctggacaccctcctggactcgctgatggcttcccagttacgactcttcga

SEQ ID NO: 169934 - DNA, 100 bp, Homo sapiens
tgataatctaaatggatgtagctgactcattattgcgtattctaccttgtaaatactgttatttgtatatactgtaaatgatgacatcggtgggcactaa

SEQ ID NO: 169935 - DNA, 80 bp, Homo sapiens
gccactggctccctgcactgtgtgtgctgcacagaggatgaaatggtggagtcaatgaagaaagtagcagggatggatgt

SEQ ID NO: 169936 - DNA, 125 bp, Homo sapiens
gttgagctttgaaacaactgatgagagcctgaggagccattttgagcaatggggaacgctcacggactgtgtgacctgtgaccgcatcaagcagtcagcagctggcaccaagcgtcgggtgttta

SEQ ID NO: 169937 - DNA, 90 bp, Homo sapiens
ggcattttggggcagaatacagagatatggaatcagatgaagatgtgtgtgtctttaagtgctcagtgtcccgagagacagagtgcagcc

SEQ ID NO: 169938 - DNA, 73 bp, Homo sapiens
tgagccaagggatcatgccgcgtgtgagatgcacaatgcgaaacctaggccccagcttttacaccatgatgcg

SEQ ID NO: 169939 - DNA, 74 bp, Homo sapiens
ctgaagttgcgtgtggtgatgatcgaaaacgtgggcagaaacagcggattgcgattgcccgtgctctgctaaag

SEQ ID NO: 169940 - DNA, 75 bp, Homo sapiens
ctacaaactgcgcacagaaggagatggagatacaactcgtcaacgaatcaaattcagtgatgacagagtatgcaa

SEQ ID NO: 169941 - DNA, 100 bp, Homo sapiens
cataggattagatgatccaagtcaccaagaaattactgtctcaagtgatacgcatttgaagacacttcgtcacccttgcttgctaagatttttatcttgt

SEQ ID NO: 169942 - DNA, 100 bp, Homo sapiens
ctgggctgaagtacaaagtcaaggaatgactgtgataaatatgtttttcgtatgcaaaaatatcataaaagtaatggtggtattgtctggggcaacatca

SEQ ID NO: 169943 - DNA, 75 bp, Homo sapiens
ttgaacagtcctgtatcaaaactgaagatggtttgaaacagcttcacaagtgtaaacaggaacatcgataagtag

SEQ ID NO: 169944 - DNA, 75 bp, Homo sapiens
ggcggttgcgtctgcggccagcgctggtcccgcagacgccgagatggaggaaaatatgcaagtcttgcaaatgca

SEQ ID NO: 169945 - DNA, 90 bp, Homo sapiens
accaatccgccctggatcttcacccaggaggccccggaggaggggaccgggggcttcgagtcttcttcaagatcaaaagccgaaatgcac

SEQ ID NO: 169946 - DNA, 98 bp, Homo sapiens
aacttttacaacaacaacatgctggaaaacagcctaaagagaaaaatatgtcgtaactgcaagtgtggccaagaagagcatgatgtcctcttgagcaa

SEQ ID NO: 169947 - DNA, 88 bp, Homo sapiens
ttatgtcaaatctttaagagatttttctacagaatcaatgtctttgtgctttctcctgctcaagacagccacacgaacacggatctcc

SEQ ID NO: 169948 - DNA, 100 bp, Homo sapiens
gcccccttaaagggacagggactgctgcaacctacggggtgtacttgggaacgaggggtgaagcggcccaggtgagggtcacccgccatgtcgaccttgc

SEQ ID NO: 169949 - DNA, 50 bp, Homo sapiens
cattggcaacgagttaaatatcacccacgacttagaaggttttgactccg

SEQ ID NO: 169950 - DNA, 82 bp, Homo sapiens
ccgccccgcccggagccccggcccccacagctgtgagtacccaggaagctgcaccgtgtggcctggagctgtctatctgtcc

SEQ ID NO: 169951 - DNA, 75 bp, Homo sapiens
gccggtgaccaagctcggggccgagcgggaggcagccgtggccgaggaactctaatgaatcattgattgaccagc

SEQ ID NO: 169952 - DNA, 80 bp, Homo sapiens
atcagagtatcctacacaaagttgtctctgaccaaggaactcatttaatggtagcctttccagtaaatatatgactcagg

SEQ ID NO: 169953 - DNA, 153 bp, Homo sapiens
ggcgcctcagagcccggcccaggccgcggaacggtgatgctcgggccggacgggcgggcgcggatccctgcgtcccggagcatttagacagcacccgtggctcagttcattccttagatgcaggcttgctgttgccatctggagatcctttca

SEQ ID NO: 169954 - DNA, 75 bp, Homo sapiens
cagggccttgcctagtgggccttccttcccagttggcaaacatgaattgactgggcataaagtagctgtgaagat

SEQ ID NO: 169955 - DNA, 135 bp, Homo sapiens
atcctaatattagttccgtcacaggggctatttgtttggatatcctgaaagatcaatgaacatacatatgatagttgagaaagacacatattctgatcatgaagaaataaacacaagttaaatatgactaagcag

SEQ ID NO: 169956 - DNA, 118 bp, Homo sapiens
tcacttctttacttggtgcaggaaggcagtctttgctacgtacagcaaaagtgacctgaaaaaaatgtctggatttctagagggcttgagatgctcagaatgcattgactggggggaa

SEQ ID NO: 169957 - DNA, 100 bp, Homo sapiens
ttctgatgctccatcccactactctcaagatacgccaatgcgctcaaaggcaaaaaggatatgcacccaatgtccagggagcgtgcaaaatttgtcaaaa

SEQ ID NO: 169958 - DNA, 50 bp, Homo sapiens
cctgagccttgagctcccagtcgcagatgtggatgagtgtgtggagggga

SEQ ID NO: 169959 - DNA, 100 bp, Homo sapiens
cttgtagctgtcaatgagtatcaggaggcaatggaccagtatagtatagcactaagtacatgggctgtgttgaagtgctgcaatcaatgagatcactgga

SEQ ID NO: 169960 - DNA, 100 bp, Homo sapiens
aagaagaagatcgccaagagatcaaagataaaatcttttgtgaaagtgtataactacaatcacctaatgcccacaagtttgttagctttaggactgaagc

SEQ ID NO: 169961 - DNA, 80 bp, Homo sapiens
agcctttgccatcactgccattaagggtgtggctgggaatcctatggtgaagtctgtgcttgataagacaaaacattcag

SEQ ID NO: 169962 - DNA, 97 bp, Homo sapiens
tgcattattttcagaactccacagaaaacttcattcacaggttgcttataaaaagggagtcaaacatctttctgctcttcttgatccagaggtcctg

SEQ ID NO: 169963 - DNA, 82 bp, Homo sapiens
gtgccttttgcctcccaccgtgattctgaggcctccccaaccatgtgcaattgtcctgaacgaggctgtgggggccctgatg

SEQ ID NO: 169964 - DNA, 100 bp, Homo sapiens
gaacagcataactggaacatagagtgtgatcacagtgtgcgtttgtgagatgctgaccttgggtgttcaatagaacagaatgaactgaccagaaactaag

SEQ ID NO: 169965 - DNA, 100 bp, Homo sapiens
tgggcccgcatcatcgcttgttcgaggcgtagaggctccggtgttttttgtgccaattgcctgaccacaaagacctctctctggcgaaagaatgcaaatg

SEQ ID NO: 169966 - DNA, 50 bp, Homo sapiens
aagagggaagacacgcggaaacagggctatcattaagaaggcttccgatc

SEQ ID NO: 169967 - DNA, 82 bp, Homo sapiens
cgaaaggaagcaagcagttcagaagagccaaggaataaacatgcaatgaacccaaaaggggagcttctgataattggaggtg

SEQ ID NO: 169968 - DNA, 123 bp, Homo sapiens
gccgcatggaggagattctgcatgagcacagctacatcgctgaggattatgtggaagggatgctgccttgggtctggaaactgttagaggaaaccccaagaggtgcaggcactgagcctctca

SEQ ID NO: 169969 - DNA, 74 bp, Homo sapiens
tgagaaacggaaaaataaaggcacttcgattgaagatggaaaatccccaagacattttctcaagtaatggtggc

SEQ ID NO: 169970 - DNA, 99 bp, Homo sapiens
ctcagctacgaggaggcgctgaggagaggagggagcactggcagttgctgggtaatttgaagacgacggtggagggtttggtatcaaccaacagcccca

SEQ ID NO: 169971 - DNA, 96 bp, Homo sapiens
cgctgcacgagctccacgcccgtaccccggcgtcacgctcagggccaattcctgtccccccagcagcatggcatcgtgtgctgaaccctctgagcc

SEQ ID NO: 169972 - DNA, 51 bp, Homo sapiens
tcagtgcagagcctggcaacctgcataaggaatcaatagtggatgaacaag

SEQ ID NO: 169973 - DNA, 78 bp, Homo sapiens
accctccgccccacgccggctcggcctcgaaacagcttgaagaaagccacagtgcctacaccaactaatgttacaatt

SEQ ID NO: 169974 - DNA, 75 bp, Homo sapiens
cccatcactgcttccctcagccataacagggaagaggaagaacgtctgagaaataaaattcgagctgatcatgag

SEQ ID NO: 169975 - DNA, 82 bp, Homo sapiens
gcaagttaaaggcaagatcgacaccatgaagggaacgggtatggcaatccccgaaactcaccaggtctgctggtctcacctg

SEQ ID NO: 169976 - DNA, 102 bp, Homo sapiens
ttctccactttcgccagcccgtgccgcgagcgcggcctgcaggagtaagactttgaccccgacgcaggcttcagtgattgccgcggatcagaagcctgagca

SEQ ID NO: 169977 - DNA, 98 bp, Homo sapiens
aacaatgaggcctattttgatgtgattgaagagattgatgcaattattgataaatcagattttaccaaatgttgcaagaactctggagttcttatggt

SEQ ID NO: 169978 - DNA, 75 bp, Homo sapiens
ccgaaggggagccatggcggctgacagtcgggaggagaaagtagccatccctgccattggggctcagtattccat

SEQ ID NO: 169979 - DNA, 90 bp, Homo sapiens
ctcctcccgcctgccccctcagccctgtggctgggggcagagctcagtaaatacctgggcacaggacttcaaagcaaacacagattcccc

SEQ ID NO: 169980 - DNA, 75 bp, Homo sapiens
cccaccgaggcccccaatgccccaagcaccgtgtccagcacctgaactcctggggggaccgtcagtcttcctctt

SEQ ID NO: 169981 - DNA, 73 bp, Homo sapiens
ccgcggacgcgtcatcgagtgtgacgtggtgaaagagatagggtttcatcatgttggctcggctggtctcgaa

SEQ ID NO: 169982 - DNA, 51 bp, Homo sapiens
ggggggagattctgctcacggaactgcagcaaatccagtttgctgatgaca

SEQ ID NO: 169983 - DNA, 75 bp, Homo sapiens
tcttaatttgcctgtatgggacccaagggtatggcccatctcctgtacgcttggagcgacctttggctacgtggc

SEQ ID NO: 169984 - DNA, 96 bp, Homo sapiens
ccaagatggcggacggcccggatgagtacgataccgaagcgggctgtgtgccccttctccacccagagagctctgaggaacatgaatacagtgatg

SEQ ID NO: 169985 - DNA, 95 bp, Homo sapiens
accaagatcgagcccagcgtcaacttcctcaagtcgcccaaagggactttaactgcacttcgaatgtgttaccaaggttatggttaccctttgat

SEQ ID NO: 169986 - DNA, 89 bp, Homo sapiens
ccaacagtgacgtgttctccaaataccagctcgacaaagatggggttgtcctctttaagaaggccaagactaaggggctgcagagcggg

SEQ ID NO: 169987 - DNA, 102 bp, Homo sapiens
tcaacagcagcaggcagcgcagccagtgcggatgcggacgcgggtcctgtcactgcagatagatggctccccaataccagaagtgagttcggcaaagagaag

SEQ ID NO: 169988 - DNA, 49 bp, Homo sapiens
ggtgtcctgtaaaatcacagattatggtgtcatcaatcttacagaagaa

SEQ ID NO: 169989 - DNA, 100 bp, Homo sapiens
aagctcgcgccggatgcggagcgcggtgctgccggtggagcttcaggttcccagacgttatgatgataagcggaataatattttattggaactcatacaa

SEQ ID NO: 169990 - DNA, 114 bp, Homo sapiens
cggccgaggcggccagttgggtaccgggaggggcgaaggcgggcggcagaggcgatcaggtgtctcccagtctgctaaagccctaaggccatcaccatggacttccagcatcgc

SEQ ID NO: 169991 - DNA, 100 bp, Homo sapiens
tggcgtcttccgtgggcaacgtggccgacagcacaggacacaggttgaacatcacggcggagaacgactgccggcggctgcactgctccctgagagactt

SEQ ID NO: 169992 - DNA, 129 bp, Homo sapiens
cgctggtcgggcttcagtactcgggcaagaccaccttcgtcaacgtgatcgcgacaatgcagatcttcgtgaagactctgactggtaagaccatcaccctcgaggttgagcccagtgacaccatcgaga

SEQ ID NO: 169993 - DNA, 50 bp, Homo sapiens
agaggcctggaggacaccaacatgactgccactctccgcccctacctgag

SEQ ID NO: 169994 - DNA, 100 bp, Homo sapiens
gcgcggggaactcgacttgaccggcgccaaacagaacacaggagtgtggctagtcaaggtggtctatgttgcccgcaacgcaaaggatgtggcagtttcc

SEQ ID NO: 169995 - DNA, 74 bp, Homo sapiens
ggtatctaagagagatgaaaatgtttgtaatttcctagaaggaggattgttcggctttccagtttggcagcagc

SEQ ID NO: 169996 - DNA, 82 bp, Homo sapiens
caattgtgttgctccatatgctgctttctgtgggctgcttgtgggctcgggatgagtttgaaggcctcttcaagcagccagc

SEQ ID NO: 169997 - DNA, 96 bp, Homo sapiens
ccaaagtgtgccctgtcctcatagagctgacagccccagatagcaatgatgatgtgaaaacagaagctgtggctgagctctgccagtgccggccgg

SEQ ID NO: 169998 - DNA, 75 bp, Homo sapiens
gaagaagatggaaaaaacttgtttaatgggtagctacagcaagctgggtagcaggcagatccaaaggatatcatg

SEQ ID NO: 169999 - DNA, 134 bp, Homo sapiens
ccggaagaaacctccagtctgtgcagtatgtaaggtgaccatcgatgggacaggcgtttcgtgcagaggtggcttctggcacagcagcttaattgaccggaacctcattgattattttgttcccttcctccccc

SEQ ID NO: 170000 - DNA, 82 bp, Homo sapiens
caaataaccgttttgaaattggtcaaaagcggctggtgctttccgaaagctgctcccgggactccatgagcagtcagcctag

SEQ ID NO: 170001 - DNA, 100 bp, Homo sapiens
ccgaggctatcgaagagttccccgtgccggctcttcaccatcccgttttccagcaaggcccaggaagtacacgagaagctccgaggatggctgaagtcca

SEQ ID NO: 170002 - DNA, 90 bp, Homo sapiens
gtgaccgctgcttcctcctcatcttccgcctctggcagaatgcactgcttgaaaaggtctccaccgggaaccttctggtcatcctgagtc

SEQ ID NO: 170003 - DNA, 50 bp, Homo sapiens
tcccttttgcctcagatactattttgaagaaaataaacagagttgtcttt

SEQ ID NO: 170004 - DNA, 88 bp, Homo sapiens
aagcggagaggccgggcgtcttctgagagtcaggcctcaggagtgcaagtagctgatgaagtatgtcgcattttttatgacatgaaag

SEQ ID NO: 170005 - DNA, 97 bp, Homo sapiens
gagaccgggtccacaaagacgagtgcgccttctccttcgacacgccggagcccagcagccggggccgccctattacaccgacccaggaggaccgggg

SEQ ID NO: 170006 - DNA, 109 bp, Homo sapiens
gaataggaatcatggcggctgcgctgttcgtgctgctgggattcgcgctgctgggcacccacggagcctccggggctggccgagacgcatccagagctttcgtgaccgg

SEQ ID NO: 170007 - DNA, 100 bp, Homo sapiens
tgacattcagctggagtttgtccgcattgatccttttgtgaggaccttcctgaagaagaaaggtacaacagaatatctcgggaatggactcagaagtatg

SEQ ID NO: 170008 - DNA, 74 bp, Homo sapiens
agctgtggcaaccgaaatgagactccctcagatccagtgataattgacaggctttatgaaggcaaagaacagat

SEQ ID NO: 170009 - DNA, 82 bp, Homo sapiens
aggacagcaccaaaatgagaagacgttggctttggtttgaggaggctgaggagatctaccccaacgagagacacagtattcg

SEQ ID NO: 170010 - DNA, 88 bp, Homo sapiens
cagtccaccagtgcagcagaatatgatgaactcggcttcaggtgcttttgaagatgatgatatcacgcacgttgaaggaagtgtagat

SEQ ID NO: 170011 - DNA, 51 bp, Homo sapiens
gccaataaatacatcatgcaaccccacgggtcttgctctgtggcccaggct

SEQ ID NO: 170012 - DNA, 104 bp, Homo sapiens
cagcctcccgagtaactgggactacagttattaccccattcaagttgacaactgaggcaacgcagactccagtctccaataagaaaccagtgtttgatcttaaa

SEQ ID NO: 170013 - DNA, 100 bp, Homo sapiens
gctggcattctcttaaaacacaaatacagtttcctggtgggatgtgcctcaatctcagatgtcatagctcagggtgagtggaagccccggcagatcgaca

SEQ ID NO: 170014 - DNA, 73 bp, Homo sapiens
aggattccaagtaactcttatttggctaatgtataccatgctagcacagcaaatggagagagcagagcaatca

SEQ ID NO: 170015 - DNA, 90 bp, Homo sapiens
cgcggaggcagccatggtgcggttcaagcacaggtgcagtagacattgttgcaatcatgatcggcaatctgaaaggcacaaaaattctgc

SEQ ID NO: 170016 - DNA, 98 bp, Homo sapiens
ggccaccgacctgctaatcaagacctttgtacagacgcaatcggcccagggtccatgtgaaatctgaggtccttgctgtcaagttgtcacaagaaata

SEQ ID NO: 170017 - DNA, 75 bp, Homo sapiens
gctggacagtgggggaaactgaggcctgagcgggcgcaggccaaggcaaaggccaaaacttacgagtttcgaagt

SEQ ID NO: 170018 - DNA, 90 bp, Homo sapiens
tccagtgcagcgcggagtgggcgatgccagcgtgccagtccaagtggtaagaagttcagaagcaagcctcagttggcaaggtacctggga

SEQ ID NO: 170019 - DNA, 100 bp, Homo sapiens
tgtgaggcctccccagccacgtgaaactagcaaagactcaggtggactgaaggccgctatgatcgaattggtggaaaggttgaagttcaagagctcagac

SEQ ID NO: 170020 - DNA, 105 bp, Homo sapiens
ccggcgcacgcaccacgacggcgccatcaccgagcgcttgatgtgcgcggagagcaatcgccgggacagctgcaaggtggaagcagggaaaggcctggagatgag

SEQ ID NO: 170021 - DNA, 75 bp, Homo sapiens
tggaggagttgatgagaaaggaccccagctgttctccacagacgaaggtcaatgctggcaaacctacacgttcac

SEQ ID NO: 170022 - DNA, 101 bp, Homo sapiens
atgattataaaggaatatcggattcctctgccaatgaccgtggaggagtaccgcatcgcccagctgtacatgatacagcatccgcacttccactaatagcc

SEQ ID NO: 170023 - DNA, 100 bp, Homo sapiens
cgagctgagtggttgtgtggtcgcgtctcggaaaccggtagcgcttgcagcatggcgccatgtcagaaccggctggggatgtccgtcagaacccatgcgg

SEQ ID NO: 170024 - DNA, 89 bp, Homo sapiens
cagatgcagtaccagcagagcatgcagtgatcgatggcctggatttgctgaagaaggaacacccaggggcccgggatgggattcggtac

SEQ ID NO: 170025 - DNA, 97 bp, Homo sapiens
acttcaaactcgtctttggcgaggacggggcgccggcgccgccgcccccgggctcgcggcctgcagaccaaagagaaccctgtacagtaagaaatat

SEQ ID NO: 170026 - DNA, 74 bp, Homo sapiens
ccacagctaagacgccaggacccactggaagcctagaaatggtgcagttttgccaaggagtgctaaagaactta

SEQ ID NO: 170027 - DNA, 50 bp, Homo sapiens
tggaggccggactcaaccgcgtaaaaagaggatctgacgaactactctca

SEQ ID NO: 170028 - DNA, 75 bp, Homo sapiens
ctcgaaaaatctcctcccctacaggctccaaaggaactgtggctgcaccatctgtcttcatcttcccgccatctg

SEQ ID NO: 170029 - DNA, 82 bp, Homo sapiens
tggtcatgagctttgtgaacctggatgcggcattccaaaagaactcactgtcctgattgggatagcagagaaagctggggac

SEQ ID NO: 170030 - DNA, 83 bp, Homo sapiens
cttcggcagtccacccaccgccgccgcctcccagcagcaaagtggggcaccaaggccctgtgctaagcactcataatcctctg

SEQ ID NO: 170031 - DNA, 80 bp, Homo sapiens
cgatgtttcaatattggaagcgctttgatttacagcagctgcaggactttttttatgaagacatggagtccttgacgcag

SEQ ID NO: 170032 - DNA, 75 bp, Homo sapiens
tacaagggctatctggtatctgtagatggctacatgaacatgcagacattaaaactaccactactatggaagtac

SEQ ID NO: 170033 - DNA, 100 bp, Homo sapiens
gctttttcttctcaccatttctggccaaaactacaaacaagacttcgcaggtgctggagaatctggtaaaagcaccattgtgaagcagatgaggatcctg

SEQ ID NO: 170034 - DNA, 75 bp, Homo sapiens
aaccgctacagcagccgcaggaagcagctcaccttccaccgtttggtgccctggttgtcagatgttggaaagcag

SEQ ID NO: 170035 - DNA, 90 bp, Homo sapiens
tctgcaggggagttccagctgatccggcagacactcctcatcttcttccaagacctgcacatccgactggttatattctgggcactaaat

SEQ ID NO: 170036 - DNA, 100 bp, Homo sapiens
ggagagcatggctcagcggatggtctgggtggacctggagagacccccctgaccttagccgctcagctggacgactctgtggaggtcatcaaagctctca

SEQ ID NO: 170037 - DNA, 96 bp, Homo sapiens
gccctccttcgtgtcgtacgtacgccctgaggaaacattggcaaatttggagcgacagatctatgcttttgagggaagctacctggaagacactca

SEQ ID NO: 170038 - DNA, 80 bp, Homo sapiens
tgtcatgctcagggaccctgtggagaggcataccaatcccattgtggaaaatggacagactcatccgtgtcagaaagtca

SEQ ID NO: 170039 - DNA, 98 bp, Homo sapiens
ccgaggataccttggtccagatggagaagctcgctgacgcaaacatgcagatctttgtgaagaccctcactggcaaaaccatcacccttgaggtcgag

SEQ ID NO: 170040 - DNA, 83 bp, Homo sapiens
ggtgcagccaccctcgctccctctgctcttcctcccttcgctcgcaccatggagctgagagaagataatatcattttaattga

SEQ ID NO: 170041 - DNA, 98 bp, Homo sapiens
gcctcagggcttgtgggccaggagaacgcgcgagaggttcacaaccagtatccaactgagtttgaattcaatctctattacttaaagttcttggcttt

SEQ ID NO: 170042 - DNA, 83 bp, Homo sapiens
tgtggccagttatttgcctcagtaaaagagtagctacagcaagctgggtagcaggcagatccaaaggatatcatgaagtttcc

SEQ ID NO: 170043 - DNA, 75 bp, Homo sapiens
cgacaagcacacactatggcgctgaaacggattaataagtattctaccttgtaaatactgttatttgtatatact

SEQ ID NO: 170044 - DNA, 104 bp, Homo sapiens
ctcgcgtcgtctcgcgagagtccaagttaaagaacatggcgacgtctaatctgttaaagcagtccagagcgtgagtccattcacatcctgagtgttgatgagaa

SEQ ID NO: 170045 - DNA, 100 bp, Homo sapiens
tcagaaaacaaagaatttgccagatgtttgattcaggaggaagagtgtccaccaagagatgacttcagtgatgcagaccagctcagagtggggaatgatg

SEQ ID NO: 170046 - DNA, 74 bp, Homo sapiens
ggcttctgagacggcggcagcagcggcattcagtctattatgtcctataacggaggggccgtcatggccatgaa

SEQ ID NO: 170047 - DNA, 100 bp, Homo sapiens
ccgagcagcccgggggcggcggccgcgaggcgagcggcgatggtttttcgttggaatatacgttgcacatttatggcgattctgagtgtgagggcagact

SEQ ID NO: 170048 - DNA, 75 bp, Homo sapiens
cactacagcaagatctctgcagggagatcaaagacgctggccttcagacctgatcagactcccaggggcagccac

SEQ ID NO: 170049 - DNA, 83 bp, Homo sapiens
cgagcacgcgggtctgtcatcatgtcgcgttacgggcggtacggaggagagaagcagggccctgagcggaagaggattaagaa

SEQ ID NO: 170050 - DNA, 100 bp, Homo sapiens
cacggccgcctccggagcccgacgcgggagaccaaattttgaggaaggtggaccaacatcagtagggagaaagcatgaatttatacgctcagaaagtgaa

SEQ ID NO: 170051 - DNA, 75 bp, Homo sapiens
ggctgcgggaaatcgggctgaagcgactgagtccgcgatggaggttgaaccctcggatacgatagaaaatgtaaa

SEQ ID NO: 170052 - DNA, 82 bp, Homo sapiens
gagcacaagctccagcatcccgtcaggggttgcaggaaaaccagtagattcccagacatcgcgaagtgaatctgaaattgtg

SEQ ID NO: 170053 - DNA, 100 bp, Homo sapiens
ctcccagcgaccactgcagcctgcggacgaggccgggacttggccgagcggatcctaataaggggaaaatgggaccagttactctccacaagaaaattca

SEQ ID NO: 170054 - DNA, 87 bp, Homo sapiens
gcagtttgaagacttgctagttaggattttattactggcagcatgtatatcttttacgcccactattgcttggttctacttccttta

SEQ ID NO: 170055 - DNA, 106 bp, Homo sapiens
tgatccccgagctgctggagaactgaaggcggacagtctcctgcgaaaccaggcaatggggggatatgagactttctactcggaatatcctgagtgttgcgtggat

SEQ ID NO: 170056 - DNA, 100 bp, Homo sapiens
ctgaagtgtcttcaatgcctgcttgaaagtacacaggaagatgctatgaaatttccatcttcccaatcttcccagccttccaggcttttaaagaacaaag

SEQ ID NO: 170057 - DNA, 100 bp, Homo sapiens
attttggcattgacatttaattttagggtcctttatatagaagggagagtagtgcccaaggttgaagcaatgaataaaagactgggctccttggtggatg

SEQ ID NO: 170058 - DNA, 74 bp, Homo sapiens
aagatatcaaatcagcatttgccccctttggtaaaatatcatacttggtgcttgaaaaactgaagaaggaagac

SEQ ID NO: 170059 - DNA, 75 bp, Homo sapiens
taacaaacgagggttcccgggattggaccgacgcagccatgctcccagatggacgtatcatcaaagttgggggag

SEQ ID NO: 170060 - DNA, 100 bp, Homo sapiens
cggaaaccccgcctcttacagtcacgaggtgaagatggttctggtaaaacaaccctcatgactaaactacaaggagctgagcatggcaaaaaaggaagag

SEQ ID NO: 170061 - DNA, 82 bp, Homo sapiens
cccggtgtctgctcctgtcgccttcgcctcctaatccctagccactatggcgaggcggctttgcacaaggtggacattccca

SEQ ID NO: 170062 - DNA, 74 bp, Homo sapiens
caggagttcatctacccggagaagcaggagccctactcggcagcatggggaaatgattgatgactgacagctgc

SEQ ID NO: 170063 - DNA, 83 bp, Homo sapiens
ccgaccatggcctccaaatgccccaagtgcgacaagaccgtgtacttcgatctggtggctggacccagagctgacctatggct

SEQ ID NO: 170064 - DNA, 75 bp, Homo sapiens
catgctatcagtcgatactggtattacttgtatgatacttcacagagaatgcagttgtcttgacttcaggtctgt

SEQ ID NO: 170065 - DNA, 75 bp, Homo sapiens
tggcatgtcgatttgtccttcactacagttttttaaagcatcacttaggagctgctactccagaaaatccagaaa

SEQ ID NO: 170066 - DNA, 90 bp, Homo sapiens
cgcgcaggtgctagcggccccttcgccctgcagaagcttttgagattgctctgccacgagaaagcaacattacagttctcataaagctgg

SEQ ID NO: 170067 - DNA, 125 bp, Homo sapiens
ttcaggaaaactcgtgtccatcaaaatccagatgctggatgacacccaggaggcatttgaagttccagctgtggaaaatctctgttctcacaaagtctccccaatgctctacaagcaactgcgtc

SEQ ID NO: 170068 - DNA, 100 bp, Homo sapiens
ctgtactctcatcgctctcggcctccgacacgcaaaccaagagtttcactgttgacatccgcgccaagccagaataccacaaattcctcatcggcaaggg

SEQ ID NO: 170069 - DNA, 102 bp, Homo sapiens
cagactctttttaagaggcttcgcgcagttccaaccaacaaggttgaaggcattcaaggtggccctcttggatgtgttccgggaagctcatgcgcagtcaat

SEQ ID NO: 170070 - DNA, 100 bp, Homo sapiens
ccagaaaatgccatcatctataacaacaatgaggacttccaggtcggacaagccaagattcaggtttactcacgtcatccagcagagaatggaaagtcaa

SEQ ID NO: 170071 - DNA, 100 bp, Homo sapiens
aaatgacagttcacataagaagttcttcgatgtatctaaacttggcaccaagtatgggtgatcagcccatgacctaaacctccagacaaaataaaacgga

SEQ ID NO: 170072 - DNA, 75 bp, Homo sapiens
gctagaggccgacgccagccagagagcggttgtatgaaataaatgtggaagatactaatgaaatagactgggaag

SEQ ID NO: 170073 - DNA, 100 bp, Homo sapiens
gccaatcctggagctgctgttgcagcacttgttccccaaacaagtgctcctacattctgcaaacttccttgataacatgcttttgcgaagtgcaggaaaa

SEQ ID NO: 170074 - DNA, 75 bp, Homo sapiens
cactttatgaagccaacggacaagctagatcatgatgcagccgtccttttggatttctttttaataatgtgtgac

SEQ ID NO: 170075 - DNA, 100 bp, Homo sapiens
cgggaatcaggagtgacctggagcactgtggtccacacacaggcacagccaagcgtccagccacaggagcatcctccagcgcaggtgtcagtacagccac

SEQ ID NO: 170076 - DNA, 100 bp, Homo sapiens
atcttcttgtggaacaatcccaggaaatccatatcccaaaggaagacctagccgcataaatggaattttcccagcagcaaaggaacagactcaagattta

SEQ ID NO: 170077 - DNA, 75 bp, Homo sapiens
ttacgcgaagtccacccagcgtttctgagaggagaaggcagagcccccccaggctatgaatgccctgatgcggtt

SEQ ID NO: 170078 - DNA, 75 bp, Homo sapiens
caaaggtcgcgataatattattgacctcttcctttatcagccacaaggaaccccaaaacgttgcctcgatctttc

SEQ ID NO: 170079 - DNA, 100 bp, Homo sapiens
gtggtactggtggccgtggacaagggcgtgttcgtgctgaataagaagaacaaactgacgcagagtaagctgcaagctttcttcctggtggcagatgaca

SEQ ID NO: 170080 - DNA, 76 bp, Homo sapiens
tcctgagcagagctctccgggttccccggctcgcggggcccggcgaagggcaggattttttatcaagcagaaatgc

SEQ ID NO: 170081 - DNA, 90 bp, Homo sapiens
catggccgccgccgatgccgaggtagatttcgggcagacaacttgaacaagctgaagaacctatgcagcaagacaatcggagagaaaatg

SEQ ID NO: 170082 - DNA, 98 bp, Homo sapiens
agtctgcggacgaccgcggcgccgaggagcccatttccgtgagtcagtactactataattccttgacccagcagtacctttactgggatggggaaaaa

SEQ ID NO: 170083 - DNA, 75 bp, Homo sapiens
cttggaatcaaagataaatccaaatactgcatatcagaaacaacagagtcatcttagtgggatttggggaagcaa

SEQ ID NO: 170084 - DNA, 96 bp, Homo sapiens
ggtgccccattattgcttcactaagttttggtgccacacgcacatttgagatgagaaagaagccaccaccactatgcgtcggttctgtgatgtgct

SEQ ID NO: 170085 - DNA, 90 bp, Homo sapiens
ggactcagtgcagcgtgtcctgttacacagatacactgcctctaggactgggacagatagccactgagtacctgcttcaaatcaccctgc

SEQ ID NO: 170086 - DNA, 90 bp, Homo sapiens
tcagattccatttcaacttctgccgacaacttttctcctgatttgaggggctgggagagggttctgccctccttcatccagacagcaggt

SEQ ID NO: 170087 - DNA, 82 bp, Homo sapiens
ccaaggaaaggagaaagacgatcatctagggtcagacaggtatgcccaagaggacagagaacgaatgcacagaaatattgtc

SEQ ID NO: 170088 - DNA, 100 bp, Homo sapiens
caggtggtggagcggctgctggaaacgcaagacggtgccgagaagcagctgcgaggacgagattgaggagctgcgggccgagatgctggagatgcgggac

SEQ ID NO: 170089 - DNA, 83 bp, Homo sapiens
caggtgcttggcaaaatcgagcgggccattggttgcagccccacccacgtcacggtgtacagcgagtatggcgtggacgtctt

SEQ ID NO: 170090 - DNA, 100 bp, Homo sapiens
cgcgcccgccagctgctccggagatacgctatgtgatgatgatgccatttaaacgacaggctctagtggaatttgaaaacatagatagtgccaaagaatg

SEQ ID NO: 170091 - DNA, 98 bp, Homo sapiens
gagtgacacagaggacaatgatgaggccttagaatggcttctgcaaggaaagccagccgtcccatgcgtgatgtttttggtgacttcagtgatgtttc

SEQ ID NO: 170092 - DNA, 89 bp, Homo sapiens
atggcatccggggatttctgctcacctggagaagggatggaaatacttcaacaaggaggtatatcgaattccaaagaaaagtcaaactg

SEQ ID NO: 170093 - DNA, 83 bp, Homo sapiens
cacgctactacctggtgcagggcctgattgaggactgccagctggcgctgcagctctgggtgaaccaggaggatgaggtggag

SEQ ID NO: 170094 - DNA, 100 bp, Homo sapiens
aggatgttcatgaagattcaataacagttgcatttgaaaacaaccatggtgcccagtctggccccaccaggagacaccagaacgactgtccatgtgtcta

SEQ ID NO: 170095 - DNA, 88 bp, Homo sapiens
gctgtgacgcgcgcgccggagcggggtccgatggttctcgaaggcccgcggcgccccgtgctgcaggattctaacattttcagagaac

SEQ ID NO: 170096 - DNA, 100 bp, Homo sapiens
ccaatgaagaggaaaagaacagagccatcattcaagaagtttgcttcatgctggctgtcttcatgtggctgatgacctatgttggtgctgtttttaacgg

SEQ ID NO: 170097 - DNA, 83 bp, Homo sapiens
gatggtcagtttaaagatatcagcctgtctgactacaaagagataagcatcaggtaatcattggagatgaaaatcaccttatg

SEQ ID NO: 170098 - DNA, 75 bp, Homo sapiens
ggaggttgctaacccagaacactatattaaacatcccctacagaacagtttcaggagacaagtattatctttaaa

SEQ ID NO: 170099 - DNA, 100 bp, Homo sapiens
cagatggcggatgccctgcagtacctgcagaaggtctctggagacatcttcagcagtgcaggtcagctctgcggacgctcggctcatggtctttgacaag

SEQ ID NO: 170100 - DNA, 98 bp, Homo sapiens
tctctcaatactatgagacttatgtttgtgaaaatgcaggctctggtcagggtgttcctgaaaagaaggtacttccaatcaccgtccccaagtcacca

SEQ ID NO: 170101 - DNA, 82 bp, Homo sapiens
caggaattgagagtcacagaggaaggacagtggagtctggcatcttattgggcttaccacccaaaagatgggaggcagaaga

SEQ ID NO: 170102 - DNA, 100 bp, Homo sapiens
tttttcagccacctccactgactcctacctccaaagtttatactatcagaccttattttcctaaggatgagcttctcaaaagtgaaataagaagattgga

SEQ ID NO: 170103 - DNA, 74 bp, Homo sapiens
cctatgttgaccttgatcgtcaggctaaagtaaataatgccagcctgattggactgggttatactcagaccctt

SEQ ID NO: 170104 - DNA, 78 bp, Homo sapiens
tttacagtacctaaaaacaggtccctggcgagccccttgcagtgagaaagatcagtctaaagaaaaggagaagaaagt

SEQ ID NO: 170105 - DNA, 100 bp, Homo sapiens
gctggatgtggacttggtttgtgaggccctgcagaagtggatgcacccccaagtgacacctactgatgactcaaacccttggtgggcagcttttagccgg

SEQ ID NO: 170106 - DNA, 74 bp, Homo sapiens
gtggctgtgggtattgctgcggctggtgcgtcgtcgctctagggccccacggttcccctgatagacctggagca

SEQ ID NO: 170107 - DNA, 73 bp, Homo sapiens
gccatgaggaaagaattctccgagctccatcaagtatgatggtgaaggatgaatatgtgcatgactttgaggg

SEQ ID NO: 170108 - DNA, 132 bp, Homo sapiens
gccctggaggagcagctgctcaagtactcgccggacccggtggtcgtccgcggctccggtcacgtcaccgtgcctccccatggccacccatggaccagtcggcattcacttcctcccttctgcggcccataa

SEQ ID NO: 170109 - DNA, 89 bp, Homo sapiens
cccttggcattacttctatagaaatggctgaaggaaaacctccttatgctgatatacatccaatgaggatatctgagaaatatgggctg

SEQ ID NO: 170110 - DNA, 98 bp, Homo sapiens
atggagagacagtctcatgattataactggtccttcaagtggacatgagcaaagtaaatttggaggttataaagccttggataacaaaaagagtaacg

SEQ ID NO: 170111 - DNA, 73 bp, Homo sapiens
caagtgaaaggtggtgaagagccaattgaggccataggaaaaggatacagagtagagtttcatgaacctgaaa

SEQ ID NO: 170112 - DNA, 100 bp, Homo sapiens
cccactgaagacgtctgcgtgagaatagagaccaccgaggtgtttcccattaaacactaccaggacaaaatcaggccttacatccagctgccatcgcaca

SEQ ID NO: 170113 - DNA, 100 bp, Homo sapiens
gccccttcgcgtcccctgcaccatgagctggggcaccgagctctggggcagtcagggcgacagcaagaatgccaagaagaagaacaacaagaaaaccaac

SEQ ID NO: 170114 - DNA, 101 bp, Homo sapiens
gggccccgacgatagcgaggtcacctttgcattgcactcagatgctactcaggcaagagaagggccttctcgggaaacttctccccgggaagcccctgcat

SEQ ID NO: 170115 - DNA, 75 bp, Homo sapiens
gatcactaccgctactgagagccagattgtgaagaggtctcttgaagtttggggtagtcaagaagcattagaaga

SEQ ID NO: 170116 - DNA, 100 bp, Homo sapiens
tcaggtgctgattgatgctcgtgactgcccacatatacgtgagtgcatctccatccacgttggccaggctggtgtccagattggcaatgcctgctgggag

SEQ ID NO: 170117 - DNA, 74 bp, Homo sapiens
tccgtgtattactgggcccagaagttccagggtcacccccgagaggacaacaggcatctggaagtgctctctcg

SEQ ID NO: 170118 - DNA, 75 bp, Homo sapiens
aggcagcgcgacctccgcacggagttggcatcctttggaagagttcgtgaaagctttctgcccagagctcctgga

SEQ ID NO: 170119 - DNA, 89 bp, Homo sapiens
cttcccgcttgcgtcagggacctgcccgactcagtggttttggctacgggcctccacctccaccgccagatcagtttgcccctccgggg

SEQ ID NO: 170120 - DNA, 96 bp, Homo sapiens
attaaatagaggagtcatcaaacaggtactggtcttcttggacattaatctttgaatacttgctgactgctaagaaatgaccagaggggaagagga

SEQ ID NO: 170121 - DNA, 50 bp, Homo sapiens
ctcaccttggacacctcgcttgggtagtgaagcgcgcagtggcgagccag

SEQ ID NO: 170122 - DNA, 75 bp, Homo sapiens
aggaaaatatggctgctctttgccggacagcagagtcccagggcttatttcaaaacctttgtccctcagttccag

SEQ ID NO: 170123 - DNA, 82 bp, Homo sapiens
gaagaaaatacactactcatcaaggaagaaccagactgtctgcaactttacagatggtgcattggttcagcatcaggagtgg

SEQ ID NO: 170124 - DNA, 83 bp, Homo sapiens
gaaccggtacctggatggcatgctgcagatctgggacacggccggccaggagcggttccgcaccatcacccagagctactacc

SEQ ID NO: 170125 - DNA, 100 bp, Homo sapiens
tttacgcacagctgcctgtcaccccagatgtcctcatcatcccgtcagagctgaggtacttcgtgaagatcatggaagggaagtggttgctgtgtatgtt

SEQ ID NO: 170126 - DNA, 100 bp, Homo sapiens
gaagatatagataagaatgctgatggtttcattgatctagaagagtatattgttatcaggaactgttgccgttattacatcagatgggagaatgattgtg

SEQ ID NO: 170127 - DNA, 82 bp, Homo sapiens
tggaagagcttgtcagccggattgatggtgctgttgatgggtaaaagtgggtctggtaagaccagcatgaggtctattatct

SEQ ID NO: 170128 - DNA, 75 bp, Homo sapiens
ctgtgcagtcctgttggaatttaaatatccgcgcaagatgttgacgttgcagacttggctagtgcaagccttgtt

SEQ ID NO: 170129 - DNA, 97 bp, Homo sapiens
ggtggagtacatcagtgtcctttgggcattcctcatgccaaaggaaaggtctgcgcaggcatggcactaagtgtcccatggcacatttggccctcat

SEQ ID NO: 170130 - DNA, 101 bp, Homo sapiens
cgagccatggttgctgggagcgacgcggggcgggccctgggggtcctcagcgtggtctgcctgctgcactgctttgcttggtgatccagctatttttcctg

SEQ ID NO: 170131 - DNA, 100 bp, Homo sapiens
ttcagatgtgccggagcagagggatagcaagtgcaaggtcaaatggacccatgaggagtttggggattctcagcagttgcggctggtccgtattctgcgc

SEQ ID NO: 170132 - DNA, 71 bp, Homo sapiens
gcttgtgatctccgctttcgaagcattgtacagtgtgactgacagacttcaaggatgcagctgctactacc

SEQ ID NO: 170133 - DNA, 89 bp, Homo sapiens
acccgggcagccctcaccctggaacaagatcactcaaggtgaaggataatctactaataccagcactttgaatgaaaatttgtttctct

SEQ ID NO: 170134 - DNA, 50 bp, Homo sapiens
gcctcctgagcagctgggactacaggacctaaagggagcatcgttaccga

SEQ ID NO: 170135 - DNA, 100 bp, Homo sapiens
aaggagggaagccacaagcagactgacaacgtttctagcttcccatcgacggtcagtgcgcacgttgtaatcagctgaggccatgtcaggagacggagcc

SEQ ID NO: 170136 - DNA, 74 bp, Homo sapiens
gcagcggagggacggcagtctcgcgcgccttaaattggaatgtgagaaactggcaagtgaaaagacagaaatgc

SEQ ID NO: 170137 - DNA, 90 bp, Homo sapiens
gctggctttaatcctgaaagccatgcagcggattttaggtgatgggcaagtcagaaagtcagatggatataactgatatcaacactccaa

SEQ ID NO: 170138 - DNA, 100 bp, Homo sapiens
cagactgagcaagtggagtagcagaaccaggagcctcttccatacatgaggttgggggaaatttgcattgcatcatagcattccagagacttaactggca

SEQ ID NO: 170139 - DNA, 82 bp, Homo sapiens
tccttccagaaaccacctaccgtataataagcctagtgaaacggtcatccctgaatctgtagatggcttgcaagagaatctg

SEQ ID NO: 170140 - DNA, 74 bp, Homo sapiens
ggccacatcttctatgtgctgggaaaccacaggaacttgtcacaaacaccagtgcttagagaactactaaaaga

SEQ ID NO: 170141 - DNA, 96 bp, Homo sapiens
ttaaagtctctcttcaccctgccgtcatgtctaagtcagagaaagtcattgggtggtacagattccggcgcaatacgcagcagcagatgtcctaca

SEQ ID NO: 170142 - DNA, 100 bp, Homo sapiens
tcaatctgagtggaaacaaaataaaagatctcagtacagtagaagctctggtggacccaagtggagagattgtggaactggcgaaaggtgcatgtccctg

SEQ ID NO: 170143 - DNA, 87 bp, Homo sapiens
gaacggctccagcatcaagatccgtctgacagggtgaacttctcacctgagggctgtaaagactcgtttgaaaatggagagccaaga

SEQ ID NO: 170144 - DNA, 100 bp, Homo sapiens
cgtctgtgcgaccgtccgtcccgagcgcgcagccgcggcagatctgccgacaccccaggccatcgagccccaggccatcgtgcagcaggtcccagccccc

SEQ ID NO: 170145 - DNA, 82 bp, Homo sapiens
gaatatttcagaaaagatccaagaccattcttcaagtttgcaaaggtactccaaagattcaggtttactcacgtcatccagc

SEQ ID NO: 170146 - DNA, 75 bp, Homo sapiens
acatgcgtttgagatctactgtgacatgactatatgaaggaagaggaaggttttcctgaagatgaggcgactgaa

SEQ ID NO: 170147 - DNA, 98 bp, Homo sapiens
gcaccctgcttggagacggacttgcttccggtctgcggatcaatggagagctaatcactgcctacccacaagtggtggtagtcagagtaccaacccct

SEQ ID NO: 170148 - DNA, 89 bp, Homo sapiens
tctggatccccgcccaggaagcccctctgaagcctcctcgccgccgtttctgagaaggcgcattctacattctaaaggggagctcagtg

SEQ ID NO: 170149 - DNA, 90 bp, Homo sapiens
tccgataacatggatgtgcccccagaggacgacagtaaagaaggggctgggaaacagacacggacttagaggtggtgttggaaaaaaaag

SEQ ID NO: 170150 - DNA, 75 bp, Homo sapiens
ttgcctccagtccagcttcctcctccaccacccagtcctgagatactggcatccaaagcctctgggatgtgttct

SEQ ID NO: 170151 - DNA, 90 bp, Homo sapiens
caaaccaaatgaccaatcttcaagatggtcttcagagagcaactatcctccccagggagatcttgtgcgaaaactcaaagaagataaagc

SEQ ID NO: 170152 - DNA, 100 bp, Homo sapiens
cagccattgagattatacggaaccagaagcagattgccaacattgaccgtattacaaaactttcaaacctctggttgaaagaaatatacccagttcagtc

SEQ ID NO: 170153 - DNA, 100 bp, Homo sapiens
ttggagtcgaggaccacacttctcagctatgacctatggccttcgagaggcaggaagaggcctgggaggtcagtgtggggccggaaacaactgggccaag

SEQ ID NO: 170154 - DNA, 75 bp, Homo sapiens
cagccacccgctgggaatcgtgcagggattcttcgactcctttctacgaaaccgttcaagttctgaccatgaagc

SEQ ID NO: 170155 - DNA, 80 bp, Homo sapiens
cggaaacaaagttattttgctcgagagtcccacgaactggctgggtatacagaaatgtccagaggccggagagcgtttca

SEQ ID NO: 170156 - DNA, 100 bp, Homo sapiens
gccgactcctggcagaggcccttcagcacctggatgcaggagggtctcctatggacagaagtgcgggcaaggagctttgttcctccccgatgtcaccctc

SEQ ID NO: 170157 - DNA, 100 bp, Homo sapiens
gggcatcgactcagacgcttcctatccctacaaagccatggcccaagttgttttacaaggcaaatccagaagtgtcattattcgagaacttcagagaaca

SEQ ID NO: 170158 - DNA, 136 bp, Homo sapiens
cgctatggatgatcgagaggatctggtgtaccaggcgaagctggccgagcaggctgagcgatacgacggtttggtgcacctcgatttggaggaagtagggcagggcccttatctggaaagaagtttggaaaccctg

SEQ ID NO: 170159 - DNA, 90 bp, Homo sapiens
ctggacgctttcgatggacacgctgctcgcgctcttaatcaagagctccaggcccggattcgaacttacaatcagcattacaacaacctg

SEQ ID NO: 170160 - DNA, 126 bp, Homo sapiens
ggaggacagagaagccttttccgttgccggtgccggcctagcgtcctggaattacttcaatcaaaaacactttgtgctactctgtggggctttggaaaagcatgttaaatgtgatattagggaaga

SEQ ID NO: 170161 - DNA, 82 bp, Homo sapiens
actctttctgttcaggccagaccctctgggagcttctcagccattttccacagatcaggcctccggtgtggctgtctctgat

SEQ ID NO: 170162 - DNA, 100 bp, Homo sapiens
cacatattcatcatcatgggtgcatcgagtggagactgctgcacggactctggaaccatgaacatatttgatcgaaagatcaactttgatgcgcttttaa

SEQ ID NO: 170163 - DNA, 100 bp, Homo sapiens
atcaacaatgagctttcccatttcttagaggtgggtaaagcaggaatctgagatttccaaggaatctcaagaaatggatgctcgtcctaagttggatctg

SEQ ID NO: 170164 - DNA, 90 bp, Homo sapiens
ccctctggaataccttgggcattgctgaatatgaaaaggaagaagcactgcatgggtttcgagtgagtgattattttgaatacatggaaa

SEQ ID NO: 170165 - DNA, 50 bp, Homo sapiens
gtgaccacccctgaagaaattgcacaggtcaatgtgacggtggactacat

SEQ ID NO: 170166 - DNA, 101 bp, Homo sapiens
tgctgttgggcctgggggcctgctacacctggaggtggttatggatctggtggtggaagtggtggatatggtagcagaaggttctaaaaacagcagaaaag

SEQ ID NO: 170167 - DNA, 75 bp, Homo sapiens
gttggagctggagcttacatcctcagcagatttgcagtgattgcatactcggaacatcgttaccgtatctttggg

SEQ ID NO: 170168 - DNA, 75 bp, Homo sapiens
cgcaaacatgctccgccagatcatcggtcaggccaagaagcatccgagcttcccgatgggtcccggctcggacgg

SEQ ID NO: 170169 - DNA, 98 bp, Homo sapiens
gacccccaggacgacgtgtacctggacatcaccggtaccggcggacgtcgagaaatgtcaggatcggatggagtgtttcaatgctgacctgaaagctg

SEQ ID NO: 170170 - DNA, 82 bp, Homo sapiens
tggcggatggaagggaggagactcctgaccctcagaatgatataagagttcggaccgcccagcacacaaggtcagcatgctg

SEQ ID NO: 170171 - DNA, 51 bp, Homo sapiens
agaagaaggccagctttgaggaagggaagcttcctgcaggatccgcctgtt

SEQ ID NO: 170172 - DNA, 101 bp, Homo sapiens
ggatgaactgcaatgtttgcgatgactttgatctttgctacggatgctatgcagcgaagaaatactcctacggtgcacacttcttcctggagatagaaggg

SEQ ID NO: 170173 - DNA, 50 bp, Homo sapiens
cggaagagcgctcccaggagaaacaagggaggatactgaggcacacagag

SEQ ID NO: 170174 - DNA, 83 bp, Homo sapiens
cggatggctccgcaagtcccccccggagaaaaagttgaagcgttatggtccggtccataatcatgttacaggaaaaggcccag

SEQ ID NO: 170175 - DNA, 75 bp, Homo sapiens
gtcaaagacttagcttttaaattaaaaaggaagctattcaccattgagatgctgcacaacaaacatgtcatggtc

SEQ ID NO: 170176 - DNA, 90 bp, Homo sapiens
gaactacaggctttacttttgtggtagaccgtctaagagaagggaatgggtactgttcaaaaaggaatgccccacaagtgttaccatggc

SEQ ID NO: 170177 - DNA, 100 bp, Homo sapiens
tatctgggatgtttctatttgccacaaggttgactatagtcaatggggccaatggagccaagtgtatggaaacccacaacagtatggacagtatatggca

SEQ ID NO: 170178 - DNA, 83 bp, Homo sapiens
tgaaggcacctctgctgggccaagcactcttagggccgaggggcactgcagctgacaagagatgtggacgagtgctcactagc

SEQ ID NO: 170179 - DNA, 82 bp, Homo sapiens
agacttcgccagtggctccaggagacccacaagggcaaagttgctccttgagggcaggacagttcttatggctttatccgtt

SEQ ID NO: 170180 - DNA, 100 bp, Homo sapiens
acccgaggagagatattttatatcccatgttctggctttctttgcagcaagcgatggcatagtaaatgaaaacttgtatcagcaaacctggtatcatgaa

SEQ ID NO: 170181 - DNA, 90 bp, Homo sapiens
gacccgaacccttgtagtgcaacatacagcaacttagaggccagtaatagtagccatgagtctcgtattggtctagctgaggggttggaa

SEQ ID NO: 170182 - DNA, 101 bp, Homo sapiens
atagcagtctgccagacaatagagcatatggctcctcagtgggtagtgcacttccacgaagacgctgctgtgcatatattaccattggaatgatatgtatt

SEQ ID NO: 170183 - DNA, 82 bp, Homo sapiens
gctcatcgtgatcccggcgacatactacctctggccccgagatcagaatgccggttgggacagcgtcttcgctgctgctgga

SEQ ID NO: 170184 - DNA, 75 bp, Homo sapiens
atataggttcaaaccgtcctctgtctccccacattactatctacaggctctgtggatagcaactggatcgtgggt

SEQ ID NO: 170185 - DNA, 98 bp, Homo sapiens
tcgatgatcccacagactccaagcctgaggtggagcttctggtgatgaaggccctttcggtggggctggtgaaaggcagtatagacgaggtggacaaa

SEQ ID NO: 170186 - DNA, 76 bp, Homo sapiens
ctgcagcgtcctgctgctgctctccgtggtggatgcggcattccaaaagaactcactgtcctgattgggatagcag

SEQ ID NO: 170187 - DNA, 100 bp, Homo sapiens
ttgggaaaacacttcaaatgctgaggaaatgactgttgaaaacagaattgctgaaactcacagcaagagctgtgttccagttagctttgctaccagttat

SEQ ID NO: 170188 - DNA, 75 bp, Homo sapiens
gaatcacgccttctacagactgcagccactgcggcccagagctatgccaagaccaagacgagagccgaggtgcgg

SEQ ID NO: 170189 - DNA, 99 bp, Homo sapiens
aaggctggatggactgggccgcctccaaggacgggctctacgagtgcattctctgtgcctgctgtagcaccagctgccccagctactggtggaacggag

SEQ ID NO: 170190 - DNA, 75 bp, Homo sapiens
gcgtgaatttgcctcggggacgcctctccagggccaattcctgtccccccagcagcatggcatcgtgtgctgaac

SEQ ID NO: 170191 - DNA, 75 bp, Homo sapiens
atcataactgctcttcctactatttatcaatggaggtgaaggtggtcatggcaaagctgctgcagaggctggagt

SEQ ID NO: 170192 - DNA, 52 bp, Homo sapiens
gctgtggttcggggggtgctcgcagtcaccgcagaagggcctgcagcggacg

SEQ ID NO: 170193 - DNA, 83 bp, Homo sapiens
cagatatagccgttggtacaaagagctgaagaagcaggtggagagtgccgagctgaagaaccagcggctcaaggaggttttcc

SEQ ID NO: 170194 - DNA, 100 bp, Homo sapiens
attaccagaagagataggtcagctcaaacagttaatggagctggttcctaaatatttgtcacagcaatgggctaaagcctctggaagaggtgaagttggg

SEQ ID NO: 170195 - DNA, 82 bp, Homo sapiens
tggatgtgaaaatgaagccagaccgaggtcaggagaggctcacggatcaggaaataggggatgggaaaggccttgacatggc

SEQ ID NO: 170196 - DNA, 75 bp, Homo sapiens
ggagtgcgtcaaggactccccgcgcttcagacctcctgcccgaaccgcggatcctgcagaaactcgctgtgccca

SEQ ID NO: 170197 - DNA, 50 bp, Homo sapiens
ggctgttgctgttgatctgtgaagtagatttgctgaccaaggagctagag

SEQ ID NO: 170198 - DNA, 75 bp, Homo sapiens
ttccagcttttttttatacctcagacagacacttggagaccagaaagcttctttgacaaagtgaagaagaacaga

SEQ ID NO: 170199 - DNA, 100 bp, Homo sapiens
agaactcgcaaactttgagaagaacgtgagccaagctatccacaagtacaatgcttacaggtatcgtgatttccgatacccacctggacacccccaggag

SEQ ID NO: 170200 - DNA, 74 bp, Homo sapiens
aacccatttccaatcagtcatgggaccagaagtttacactggaactggacaggactacacttgctgctttgaag

SEQ ID NO: 170201 - DNA, 75 bp, Homo sapiens
atgttatcaacagtgctacagatacagaaggatcttcctctgttgcccaggctgcagtgcagtggcatgatcttg

SEQ ID NO: 170202 - DNA, 75 bp, Homo sapiens
atgtaagacaggaaaataattaaatattcttaccgagacaagttggatggcttgaggactggtactaaaaggaaa

SEQ ID NO: 170203 - DNA, 75 bp, Homo sapiens
cttgtgggaaacaatccctcgcctccggaggcggcgaggagcggcggctggtgctcaagaccgaatcggctgggc

SEQ ID NO: 170204 - DNA, 51 bp, Homo sapiens
gtcgggacaccccggaagctgggaaatgcaattaccagctctggctgggtc

SEQ ID NO: 170205 - DNA, 100 bp, Homo sapiens
gtcaaccggggcctggacaccgggcgcaggagggcagcaccagaggccagtggcactcccagctcgagttgcactccctttggcagaatgaagagcgggc

SEQ ID NO: 170206 - DNA, 83 bp, Homo sapiens
ctgaggagcaccaggagacgcaactcatcggagttgaaactggttgacaaccattaacctgggttgcaactacaggtggcact

SEQ ID NO: 170207 - DNA, 100 bp, Homo sapiens
tatggcaagaagggcgctgttttcgacaggtgtgcaggtttcggcacatggagattgatgctgattcaccccaagagtggccgttcctaccacgaggagt

SEQ ID NO: 170208 - DNA, 75 bp, Homo sapiens
catccacgcacctgcagctctgctgagagagtgcaagccgtgggctctcatttcactcttcagtgttcctgttat

SEQ ID NO: 170209 - DNA, 100 bp, Homo sapiens
gctttctctcgatgaggataacatccctccagaagatgaagcctaaagaaactgttccaactcttgctccaaaaactctttcagtagcagcagcttttaa

SEQ ID NO: 170210 - DNA, 95 bp, Homo sapiens
tcagttcaaacctggacaggacagatattttacactgggtttaccaacaggagttgatccctgaattttattatctccctgagatgtttgtcaac

SEQ ID NO: 170211 - DNA, 104 bp, Homo sapiens
gagctttcacgaaggcaccgacgtcatcatgctgaccaccaatcagatccgtaaggcttcttccccgggagctcgcagggctgcgacgccttcctgcggcataa

SEQ ID NO: 170212 - DNA, 75 bp, Homo sapiens
gagagacacgctgggccgaccccagagcggcgctggacagggctccacgtgttccccacgtttgtggcgtacgag

SEQ ID NO: 170213 - DNA, 98 bp, Homo sapiens
aggaggaggaagaggaagaggaggatgacccacttgagccagaggccaagaagagtaagacggccgcaaagaaaaatgacaaagaggcagcaggagag

SEQ ID NO: 170214 - DNA, 110 bp, Homo sapiens
ggacgaagttgtatccccctccatggtacaccaggggttggaaaaaccacactaggcaaagaacttgcgtcaaaatcaggactgaaatacattaatgtgggtgatttagc

SEQ ID NO: 170215 - DNA, 80 bp, Homo sapiens
aaggaccagaagaaactgcaccggaaatgtgcctaccaggagccttcacgtaaatgggtccagtcatgcctcccagtaag

SEQ ID NO: 170216 - DNA, 75 bp, Homo sapiens
aaaggcaaaaatcccatctaccgcaactctcagttcgagagtaaaggagccttcacgtaaatgggtccagtcatg

SEQ ID NO: 170217 - DNA, 74 bp, Homo sapiens
gggggcttcagaggaggaagaggtggtggtttcagaggatggagatgaagatgaggaagctgagtcagctacgg

SEQ ID NO: 170218 - DNA, 74 bp, Homo sapiens
agaagataagaaaatcactgtgttactggatgaagttgcagaaggaaaaagtgctgcaaaggatataaatttgt

SEQ ID NO: 170219 - DNA, 74 bp, Homo sapiens
tgaggctctggaacttctgcccagctctccttggtagtaagcattaataatgtctttcatctttgagtggatct

SEQ ID NO: 170220 - DNA, 83 bp, Homo sapiens
gggcccctgccctttccctcctggctgggtgagcttgtcggccacagactgctacattgtgcatgagatctacaatggggaga

SEQ ID NO: 170221 - DNA, 50 bp, Homo sapiens
gtacgcggtgctgcgagggcagaacctggctgaaaaaaggaagggtgggc

SEQ ID NO: 170222 - DNA, 98 bp, Homo sapiens
gagccgatactgagcttcttcctatttgccatggaaatctcctgcaaagaagctgagccatgcaattagtaaatctttggggtgtgtacccacgagag

SEQ ID NO: 170223 - DNA, 101 bp, Homo sapiens
cttcgggcggaggaggaagtaggggtgcacctcagcactatcccaagactgctggcaacagggaaatccctaagtcagccaacccctcctcccatgccaat

SEQ ID NO: 170224 - DNA, 90 bp, Homo sapiens
atctacgtgggctccattgagacagaccggggggtgcgagagcagggggtcgatgctggaggttccggggccccaagccagtgtggggtc

SEQ ID NO: 170225 - DNA, 75 bp, Homo sapiens
tggttcccctccatcctcacggctgtgctccacatggcaggcagtgctttcctcagtgctatttttcttgcctta

SEQ ID NO: 170226 - DNA, 100 bp, Homo sapiens
tacccactgccctcggcccgcggtgatgctgacgttagaggacaaggacatgaagggattctcctgggccatagtcccagccttaacctccctaggctac

SEQ ID NO: 170227 - DNA, 73 bp, Homo sapiens
ggcccctgccgctggcccctaccccagcatgcccagcactgcggctgctggcagagaggctgatgacatcgtg

SEQ ID NO: 170228 - DNA, 100 bp, Homo sapiens
gcgaggcctttcaccaagtccatggctaggcagctggaagagaaagaccgagtgctaaagaagcaggatgcattctacaaagaacagctggctagactgg

SEQ ID NO: 170229 - DNA, 83 bp, Homo sapiens
cttcccgacggagtgcgtttcttctatgaagacctgcctagagctggaacgttacctccagagcgagccctgctatgtttcag

SEQ ID NO: 170230 - DNA, 98 bp, Homo sapiens
tccgccgccccgaaactttcaccgcgagcggtccagatggcccctccatccctcaacgtgaccaaggatggagacagctacagcctgcgctgggaaac

SEQ ID NO: 170231 - DNA, 90 bp, Homo sapiens
cccgagatgaatcctgcggcagaagccgagttcaacatcctcctggccaccgactcctacaagggaagaaacccttttttcttggagcca

SEQ ID NO: 170232 - DNA, 75 bp, Homo sapiens
aaggccaacctgcagctggaaagtgaagaactgaatatcctcatcagggagtttgaggacatcaccaatgcgagc

SEQ ID NO: 170233 - DNA, 48 bp, Homo sapiens
tggagaagtccccttatgaccaggatgaaaactttcggaagagaaagt

SEQ ID NO: 170234 - DNA, 75 bp, Homo sapiens
ccacacacaggtgaatttaaaggagcagccctggtgtcacctatcagtaaaagggaacagaaagaacagcttcaa

SEQ ID NO: 170235 - DNA, 100 bp, Homo sapiens
ctcgggcggcggcgtctcctgggtcccggcagccgtccgcgcgcccgggcgcaggcctgtcccctcagttcccaggtgccatgaggaagcctcgtcggaa

SEQ ID NO: 170236 - DNA, 75 bp, Homo sapiens
agcagttctacaaggcgagccagaataatccagaatggctactctgatctatgttgataaggaaaatggagaacc

SEQ ID NO: 170237 - DNA, 98 bp, Homo sapiens
gcctggacaacagacctctgtttggggagacgtccgccaagattgttctctggggccggactgagaaatgcctgaaggagacgacggaggagatccgg

SEQ ID NO: 170238 - DNA, 82 bp, Homo sapiens
cccgctctgctgtgggcgctgctggcgctctggctgtgctgcgcgacccccgcgcatgggccaattcctgtccccccagcag

SEQ ID NO: 170239 - DNA, 82 bp, Homo sapiens
ggaaagacccagaatatgccaagtatctaaagtgtggtcactcacctgtctaccactcccgtgaaatggcagctcgtgcctt

SEQ ID NO: 170240 - DNA, 98 bp, Homo sapiens
gcggagctccccgaggtcgctatggccccccatccaggcggtctgaaaacagagtggttgtctctggtgaactgtcacccctacaactcagcttgcaa

SEQ ID NO: 170241 - DNA, 80 bp, Homo sapiens
gctgaagaggaggcggaagccaaggttcgatacaagaggctgttttcctagcgtggcttgctgcctttggtaagaacatg

SEQ ID NO: 170242 - DNA, 140 bp, Homo sapiens
tgtagtgactcactggcaccgagatcattctggaggcataggagatatttgtaaaagcatcaataatggtatggaacccttcagatcaaagcttaccaataaattcagtatgtagaacagattaacgtagttgaaatgag

SEQ ID NO: 170243 - DNA, 82 bp, Homo sapiens
ccgacctgggggtggcacagcccaccggggcacagccagagcagcacccagcctggtggagttgacagaagagatcctgaag

SEQ ID NO: 170244 - DNA, 75 bp, Homo sapiens
gcttttcagaactgcagggaaacagccatcatgagctgtgatgcagatccatccgccctagcaaaatatgttctg

SEQ ID NO: 170245 - DNA, 83 bp, Homo sapiens
ccgccatgaacaactcgggcgccgacgagatcgggctaccggctctctgaccagttccacgacatcctcattcgaaagtttga

SEQ ID NO: 170246 - DNA, 75 bp, Homo sapiens
ggcactttatgatactttttctgcttttggaaacatactgtcctgcaaggcgaaccctcctggtgtactggccct

SEQ ID NO: 170247 - DNA, 100 bp, Homo sapiens
caaaaagaaaaaaaagaaaaagaagaagcaaggtgaagataactctactgcacagacctggaatggccaaatatcaaggtgaagttcaaagtttgaaact

SEQ ID NO: 170248 - DNA, 77 bp, Homo sapiens
gattctccgttcaatgtccagaaagtcacttcctcctaacccatctgctgctagagaaactaaaggaatcagcccca

SEQ ID NO: 170249 - DNA, 97 bp, Homo sapiens
ttattgtatctggggcagatgatcgtcaagtgaagatctggcgcatgaatgattatttatgtaaacccgaagacaacatctacagtattgatttcac

SEQ ID NO: 170250 - DNA, 50 bp, Homo sapiens
gcagcaaatgcattccacgtgtatcaggtttggtgcacctcgatttggag

SEQ ID NO: 170251 - DNA, 75 bp, Homo sapiens
gcttcacatcccatcctttgtagagacaaaatcttctatctgtttttaacacagattaaatctcttgatgaacag

SEQ ID NO: 170252 - DNA, 100 bp, Homo sapiens
ccctgactcatatcaaggaccagaaaggagcccaagagttccatggcctccacttcccgccgccaacgccgagaacgtcgctttcgtcgttacttgtctg

SEQ ID NO: 170253 - DNA, 74 bp, Homo sapiens
aggctgtcaagtatgtggagtgttctgcacttacacagatttggagcaagaggtggtggtggccttcccccgaa

SEQ ID NO: 170254 - DNA, 112 bp, Homo sapiens
agatccaaaacaagtggctgcggccgtcgcccaggagtcatcggacgccagaatctgggaaatcctcattgacgattcaatttgttgaaggccaatttgtggactcctacga

SEQ ID NO: 170255 - DNA, 75 bp, Homo sapiens
ctcatttacagatgtggaaccaaagaccaaacaattatctgtgagaggccaggaagtatcaaaactccgctgtca

SEQ ID NO: 170256 - DNA, 97 bp, Homo sapiens
caagctcatctctgagacccggaggaggttcgaagctgagtatgtgacaggtgtcagctgtgatgcatgtttaaaaggaaattttcgaggtcgcaga

SEQ ID NO: 170257 - DNA, 80 bp, Homo sapiens
ggggaaaaggcaaaaatcccatctaccgcaactctcagttcgagagtaaaggtgacttaagagattaaaattaatttggt

SEQ ID NO: 170258 - DNA, 83 bp, Homo sapiens
gcacggagcagcagctggagcattaccacgacccttgcaaagccggtcttgccccagaagctgcgggcacatccacgcctgaa

SEQ ID NO: 170259 - DNA, 75 bp, Homo sapiens
gcttccggatcgggggcaagcggaaggtgatgcccaagatggaccagagctctcagcatggcggctcctctacgt

SEQ ID NO: 170260 - DNA, 75 bp, Homo sapiens
agatatcaagtctttggagaagtatatcattgagccaatggagatcttcgtggatgatgagacgaagttgacgct

SEQ ID NO: 170261 - DNA, 100 bp, Homo sapiens
tgtagagttcggtgctcgaatgataactattgatgggaaacagataaaacttcagatatgggatacggagaggagaggcagcagcatggcgagtgtcctg

SEQ ID NO: 170262 - DNA, 99 bp, Homo sapiens
gaaagagaagacagccatggaaggctctgtgtgctccgggatggagcaggtgtgcagagggtgagaacccagctctgggaccaagtcacttgcttcctt

SEQ ID NO: 170263 - DNA, 75 bp, Homo sapiens
gcgcctgttctcgggctgtttggcgggtgagcctgaatttaaatacattgggaatatgcatgggaatgaggctgt

SEQ ID NO: 170264 - DNA, 127 bp, Homo sapiens
gacctcaccgcgcccgtggccgccgtgcaggcggccgtcagcaacctcgtccgggatatgttcaaggaatgagtgatttactttcccctcttttatatgtgatggaaaatgaagtggatgccttttg

SEQ ID NO: 170265 - DNA, 87 bp, Homo sapiens
gggcgccgcgccgcacgagcaccagcctagagccagggcggcgactggcggcgcgatggacctgaccgggctcctgctggacgaaga

SEQ ID NO: 170266 - DNA, 92 bp, Homo sapiens
tgaagatctcccaacctcaggagcctgagcttatgaatgccaacccttctcctccagcaatgtggctgggataccctgggacgagtggtgcg

SEQ ID NO: 170267 - DNA, 100 bp, Homo sapiens
gcccgtgtggcgctgattggatttccctctgtgggtaagaaacccgcgctgaccgcagcaagaagcttttcaggcactacaccgtgggctcctatgacag

SEQ ID NO: 170268 - DNA, 122 bp, Homo sapiens
ttccatcggtccttacagccgctcgtcagactccagcagccaagatggtgaagcagatcgagagcaagacaatgcagatcttcgtgaagactctgactggtaagaccatcaccctcgaggtt

SEQ ID NO: 170269 - DNA, 75 bp, Homo sapiens
tgagagcatcaagctcgtgtccatcgctacaaaagaccccacagctgtagagagagcaaacttgttaaacatggc

SEQ ID NO: 170270 - DNA, 106 bp, Homo sapiens
aaaattatggataataatggaatatcttggtggaggctccgcactagatctagtactccaaagattcaggtttactcacgtcatccagcagagaatggaaagtcaa

SEQ ID NO: 170271 - DNA, 100 bp, Homo sapiens
tactttgccctcagcatctcccttcatgtctgggtcatggtatctgctgtgcgtttcagtcaacaatacagcttgtgttcgacaatattccttgatgaca

SEQ ID NO: 170272 - DNA, 75 bp, Homo sapiens
caagcatgttcaatctcttggagatggatgtgctgggcttcaatgcccgacagcggaaggcctttctgaacgcca

SEQ ID NO: 170273 - DNA, 75 bp, Homo sapiens
cactaggcagcggaggagcccgaccgacccgtatgaaaacccatggacaatcccgaatatgttgtcaatgacgag

SEQ ID NO: 170274 - DNA, 75 bp, Homo sapiens
ctcgtcgccgctgtccttcggtgtcagggccaggatgtccggcgtctctggccgagcctctttttgtggaaaacg

SEQ ID NO: 170275 - DNA, 101 bp, Homo sapiens
atttacctgtgagatgtttcatcccaacagtcggattgtttgtgctgaacgaactgtcctcttgcttcagaagccccttttgagtgtggtctctggtgcaa

SEQ ID NO: 170276 - DNA, 100 bp, Homo sapiens
tggctctcgcttcagagatgcgctcagctttcgcctgcatcacactgcaaatcgatgtccaccgtaaagaaaatgcgggggctgctgagaagtcgattac

SEQ ID NO: 170277 - DNA, 75 bp, Homo sapiens
aaggctggaccctgagccctgggacctctgaagtgaacactgcagggccatttgattagaagcccaggacccagg

SEQ ID NO: 170278 - DNA, 90 bp, Homo sapiens
ttggcatgggttacccgctaatcccgggtcaatatgacccttttcaagaaatgcatatgtatctttggaagaaactctgaagtaaaggcc

SEQ ID NO: 170279 - DNA, 75 bp, Homo sapiens
ggagaccgttacgacggcatgaatagttctgtcccaagaagaactctgaagatgattcagccttctgcatctgga

SEQ ID NO: 170280 - DNA, 46 bp, Homo sapiens
ctttgtcagctcccgcacagtaacattgccagcagatggatctggg

SEQ ID NO: 170281 - DNA, 105 bp, Homo sapiens
tgctcctcggcttgcatttgtttctgctgaccgcgggccctgccctgggctggaacgaccctgcagatataatttctacagtagaatttaatcattctggagaat

SEQ ID NO: 170282 - DNA, 90 bp, Homo sapiens
taatgaatcctctcaggacattgtgtagcctatggtgaccaagaatatggcccaggtgaccaaagccctggacaaggccctgagcaccat

SEQ ID NO: 170283 - DNA, 96 bp, Homo sapiens
agctaagatgccaggaccacctggaagcctagaaatggtgtggatgaggtcaccattgtcaacattttgaccaaccgcagcaatgcacagagacag

SEQ ID NO: 170284 - DNA, 82 bp, Homo sapiens
gcagccggcacctgacggcgtgaccgacccgagccgtcttatgatgtaatcagcgcgatttcacttcctgaatttcgatgaa

SEQ ID NO: 170285 - DNA, 100 bp, Homo sapiens
taggagggcagacaataggaggcaaaatgttggataaatatatctatggagcacagttcatccagagcagcttcctccgaggccatggattacattaaaa

SEQ ID NO: 170286 - DNA, 83 bp, Homo sapiens
gcggggagatgctcttcggcctagtgcgccagggcctcaagtgcgatgggaggagattggacaggctggactccccattgctt

SEQ ID NO: 170287 - DNA, 74 bp, Homo sapiens
caagtcccactatcaaggataagccaaaaataatgttgagtttccatgaagaacaggaagtactgccagaaact

SEQ ID NO: 170288 - DNA, 100 bp, Homo sapiens
acggcgcacgacgagtactggcatgcgcacgtggacaaggtgctggaggcctggcagaagggtccaaatcctcctggaaccctgggccacactgttgctg

SEQ ID NO: 170289 - DNA, 50 bp, Homo sapiens
gctggagacagtggtggtgactggtaccaccctcgggtgctctacattga

SEQ ID NO: 170290 - DNA, 100 bp, Homo sapiens
caagacaagaaggaaagaaagtattgggaataatgctgccctcccatcctcaagggccagtgggaactctaatattgacagccattgatatcctgacaac

SEQ ID NO: 170291 - DNA, 82 bp, Homo sapiens
tcactgtataaccacccagtaccaaaggcaaatactcctgtaaatttgagtgtggaatcccactgtaagatggggttatgtc

SEQ ID NO: 170292 - DNA, 100 bp, Homo sapiens
actcagcggaggtggcagaagcaagtacgccaaaatctgctttgaggataacctgtgtaatggataggtaacagagaagacctcgtcccttcctagtcag

SEQ ID NO: 170293 - DNA, 100 bp, Homo sapiens
gcgggggtccgcgctgcgctgctgaggccgggccggccgcccagacgctgcccgcgggcccggccacggcggagccaagtgtcaacagcatctccaccct

SEQ ID NO: 170294 - DNA, 100 bp, Homo sapiens
gggaccgagcctgggaggccggccggtgccagcacctttcggcttctgagacggcggcagcagcggcattcagatctcacattcttgaaggtggcattga

SEQ ID NO: 170295 - DNA, 112 bp, Homo sapiens
agctggccgtggctctcttggcagccttcctgatttctgcagctctgtgtgaagatctcagtggttcaatagcatccccagatgtcaaattaaatcttggtggagattttat

SEQ ID NO: 170296 - DNA, 90 bp, Homo sapiens
gcattctgaatgggtcccgccagggtcccaacatcgatgcccatgactatgtattcaggcttcactcctggggccaaggagcttttcaag

SEQ ID NO: 170297 - DNA, 90 bp, Homo sapiens
gcctggagtctgccccattctgagagcagcagcctggctcctggtggctccagcagcagatcttatgccttcattcatccggcatggtcc

SEQ ID NO: 170298 - DNA, 75 bp, Homo sapiens
tgggacccagctgcttgatgttgctggaggcacagtgccattcaggaattctgggtgggggccattacgtcactt

SEQ ID NO: 170299 - DNA, 110 bp, Homo sapiens
cttcacgagtacaatgacatcaaggatgtggggcagatgctgatgggcaaactagggtctccgtctctccaccgggggcttcatccttccagggaggagaagagggactc

SEQ ID NO: 170300 - DNA, 90 bp, Homo sapiens
agcgaggacttctaccgctgcggctactgcaagaacgagtcgggcagccgctccaatggaaatggctagtgatgagctgaaagagatgcg

SEQ ID NO: 170301 - DNA, 75 bp, Homo sapiens
gccgtcaggtggaagcgacccaaggatgaccgagtgggagacagcagcaccagcggtggcagagaccccagacat

SEQ ID NO: 170302 - DNA, 100 bp, Homo sapiens
ttggtggttctcttcgtcatgatcaacaaatatggtcgacggtccaaatttggaatgaaggaatgttgctgaggcacagtgcatcgccaaccaagttcag

SEQ ID NO: 170303 - DNA, 83 bp, Homo sapiens
caaaaggcaaagtgtgttttgagatgaagcccaaagagtcgattgatccaattaaagaaagagaagctggagtatactccagg

SEQ ID NO: 170304 - DNA, 75 bp, Homo sapiens
gcaagaaagctctggagacttgtggcggggacctcaaacagggatgagtgacagcgtcaaggacaaattttccat

SEQ ID NO: 170305 - DNA, 105 bp, Homo sapiens
gatcgatctaagatggcgactgtcgaaccggtcgcaatggaagaagagatcgccgcgctggtcattgacaatggctccggcatgtgcaaagctggttttgctggg

SEQ ID NO: 170306 - DNA, 90 bp, Homo sapiens
aatgaattaatccacgagaagctcctagaatggtgcctggtactgtagaagaagctggaggagttctccgtggaagaggccgaggtgcta

SEQ ID NO: 170307 - DNA, 75 bp, Homo sapiens
ctccgcaagagaaggaagctctttatgccttaacggtgtgcctaccgcatgttgccgctgctgtttctgctggga

SEQ ID NO: 170308 - DNA, 100 bp, Homo sapiens
ccgcacgccgcgcccgcgcccccgctccgccgcggagtttctgcatgactgtcacaaagatacgtaggtaacctttccagagatgtgacagaagtcctta

SEQ ID NO: 170309 - DNA, 90 bp, Homo sapiens
tcttacgtctgcggaagtgcagctgcctcagttcttagcgcagtgttatccaagataaattctgtgggattataaacatttcagtagaag

SEQ ID NO: 170310 - DNA, 83 bp, Homo sapiens
ccccaccactcagccctccagtgctgggtctgcatggccacgaaactggctactgctttcggatgtccttaagaaattgaaaa

SEQ ID NO: 170311 - DNA, 87 bp, Homo sapiens
gagagagaggtaatgaggactcagttttgaccaaggcaaggaggctgaaccgtctgagcccagaagtgctgaggtgacgaggaagcc

SEQ ID NO: 170312 - DNA, 98 bp, Homo sapiens
cctcttacctgctacacagtgtacaaaactcctacgactttcctgctcttcagtcaaaagagtgccatcaaccgcatggtgattgatgaacaacagag

SEQ ID NO: 170313 - DNA, 78 bp, Homo sapiens
ggggcccatggccaggaccaccagccagctggtggtctttgggaagaagcttcctgcctttgccaccatccccatcca

SEQ ID NO: 170314 - DNA, 75 bp, Homo sapiens
gcagtcctaccatgtcagccttcccagtagctgggaccacagagctggaccctgagagcgagctgggcaagaacc

SEQ ID NO: 170315 - DNA, 100 bp, Homo sapiens
cagcccatgtcctatgacaatctcacccagaggctaacggtggaggcggcccagttcatacagcggtttctaagcatgaattgaggaacagaagaagcag

SEQ ID NO: 170316 - DNA, 100 bp, Homo sapiens
ctgcttcaaacgagaataaagaaaaaaatcctataaaagagaatttccctttcaacaacccctggcggtttggtgcaattctccattaatgaagataaca

SEQ ID NO: 170317 - DNA, 90 bp, Homo sapiens
ccgggcggcgctcgtacttctggccactgggcgagcgtctggcagtatgccgagattttgctgtcctggaggaccacaccctggctcaca

SEQ ID NO: 170318 - DNA, 50 bp, Homo sapiens
gtgaaacaccactgaagcattgccaagaatgaagaatccctccattgttg

SEQ ID NO: 170319 - DNA, 100 bp, Homo sapiens
gcttcccaggtgcccctggccccaagggtgctgctggtcctcctgggccacctggtgctgctggtactcctggtctgcaaggaatgcctggagaaagagg

SEQ ID NO: 170320 - DNA, 100 bp, Homo sapiens
agctgtggaaagaagttgcaaaacactggacaagttggatggcttgaggactggtactaaaaggaaacgtgactgggaggccattgccagcagaatggag

SEQ ID NO: 170321 - DNA, 90 bp, Homo sapiens
ggacaacgagaagaaccggaagctctttgaccttctggatgtccttgagttcaaccaggacagagcgggatgccaccagcttgtccaaag

SEQ ID NO: 170322 - DNA, 87 bp, Homo sapiens
gccggctcccctctcaggacaacccagatgtgcaacaaagtgcgatggaggatctcctgatgcagtccagcaaagaactttcacatg

SEQ ID NO: 170323 - DNA, 110 bp, Homo sapiens
cgcagagccgagtgcagaagatctgggtgcccgtggaccacaggccctcgttgcccagatgcatgtcgggccccaggcctgtggtgctgagcgggccttcgggagctggg

SEQ ID NO: 170324 - DNA, 75 bp, Homo sapiens
acctcctgcaaaagtggaagcgaagccgaaaaaggcagcagcgaagggtttgaagactgggatgtattatttaag

SEQ ID NO: 170325 - DNA, 75 bp, Homo sapiens
gcggctaggtgcctgggaagtaacagcaagagggtgagaatccttttgaaattcaagaccattctcaggatcagc

SEQ ID NO: 170326 - DNA, 100 bp, Homo sapiens
cttgaaacacaaatggtttttgtgatgcagccaacacgaacggttgtcatgtgtaacacaactttcgatcaccgcgaaaacaccgtcctgggaaagcgtc

SEQ ID NO: 170327 - DNA, 82 bp, Homo sapiens
accgagcgtgctgagcaaccgcagcctccgcggccgagagtgcagcgagtagtaaacctattgatggcaattttgctgactg

SEQ ID NO: 170328 - DNA, 98 bp, Homo sapiens
cgccgcgggtcctggagaagcggccgcggccagggaacggggcatcgcggttccaacgtgtgctgctctggttggtgaagaccagcctctttgcccag

SEQ ID NO: 170329 - DNA, 75 bp, Homo sapiens
cccacacccacacgtgttcaatacacctcccacctgtcctcaggcatatcaaagactggctatgtggatgctgga

SEQ ID NO: 170330 - DNA, 100 bp, Homo sapiens
aggagccgcgtgtggaggaggctgaagtctcacatcagaggtgtcaaggtctctaattaacagaagatggcaaagcccagccacagcagctatgtccttc

SEQ ID NO: 170331 - DNA, 137 bp, Homo sapiens
aaaactaagaatgatatgactgtttggagtgaagaagtagaaattgaaagagaagtgctcttagaaaagatattttcaggaacatctaagaggacagtgcttctgacaggaatggaaggcattcaaatggatgaaga

SEQ ID NO: 170332 - DNA, 82 bp, Homo sapiens
cgggcctctggaatttagcgctcgcccagctagccgcaggaccaggaatcaccttcaagcctatgtcgtgaggctttggcag

SEQ ID NO: 170333 - DNA, 82 bp, Homo sapiens
gcgcccccgccgctgccgccgcgacccttggcgcctgcccctgcaacgggaggctcttttccacaatggcccccctgaccag

SEQ ID NO: 170334 - DNA, 96 bp, Homo sapiens
gctttgtctccttcgacttggagtctttgtccaggacgggatcgcttacacctgagacgaactacagaacagcacgtaccagaggtggaagtccaa

SEQ ID NO: 170335 - DNA, 82 bp, Homo sapiens
gtactctccgagaggtcgttttcccgtccccgagagcaaggaacaagatcactcaaggtgaaggataatctactaataccag

SEQ ID NO: 170336 - DNA, 90 bp, Homo sapiens
gcatcacaggccgcgtctttgacggcaccatgagccaggacaccgaggtggatatgaaggaggtggagctgaatgagttagagcccgaga

SEQ ID NO: 170337 - DNA, 75 bp, Homo sapiens
ctcgggagctggctgaagatggctactctggagttgagcccgacggccatggaggctgaagagacgatggaatgc

SEQ ID NO: 170338 - DNA, 98 bp, Homo sapiens
gagaattaaatgccgagaaggccagtacggtaccagctggaggatgagtctgcgcatttggatgaaatgccactaatgatgtctgaagaaggctttga

SEQ ID NO: 170339 - DNA, 80 bp, Homo sapiens
gtttctctgggtttgcccctctgcaaccacagctttctgagaccaagatcttcactgcctctaatgtgtcttcagtgcct

SEQ ID NO: 170340 - DNA, 97 bp, Homo sapiens
cagcatcctgcccagccgacgtgggggattcttacagaagcagagattgatgctcaccttgttgctctagcagagagagactaaacattgtcgttag

SEQ ID NO: 170341 - DNA, 82 bp, Homo sapiens
tggcacaaatactattatggataagatgatgggcttccgagtggacctgccaatcaagtcggcccgctaccgtggccagtac

SEQ ID NO: 170342 - DNA, 88 bp, Homo sapiens
tgttcacataatgctgtcaggaactgtgaccaagcacacagcaagaaggaggccatcagcaaactgggaagaggaccctcaccaggaa

SEQ ID NO: 170343 - DNA, 100 bp, Homo sapiens
agcggcgcgatggggcccctccgcgagagcaaggcacagaccccacaggctcctcggacactgggtccatcacctcctgccccatcatccactccaacac

SEQ ID NO: 170344 - DNA, 94 bp, Homo sapiens
gaaaatacgctatgttggggaaatactccaaggagtttttcaccagaaaagccttaaagatggagatgacagaaatgactggtgtgtcgctgaa

SEQ ID NO: 170345 - DNA, 82 bp, Homo sapiens
ggatctgcagaagacgcagggctcaaggtgagaagccctaccactgcaactgggacggctgcggctggaagtttgcgcgctc

SEQ ID NO: 170346 - DNA, 75 bp, Homo sapiens
aatctcttctccctccccttcttgggagtgcatccgccccaacccttttccccctcgtctcctgtgagaattccc

SEQ ID NO: 170347 - DNA, 50 bp, Homo sapiens
ctgaccctgggagacatcgacgatgggggctccggaggtggcgcccaggc

SEQ ID NO: 170348 - DNA, 100 bp, Homo sapiens
aaggtccaccacaaatccagctgaagaactgctccaaagtttaggtcatggcaagaacaaggaatagagctgtgcccccctggaaaacggttcatgatta

SEQ ID NO: 170349 - DNA, 88 bp, Homo sapiens
tgacaatggaccaaagacgatcaatcaaattcgtcaagatgcagtaaaagatccgagccaggagacactgagcctttggagttaggag

SEQ ID NO: 170350 - DNA, 100 bp, Homo sapiens
aacaaggagaagagccatggaaacaggaggaagaattcccaagccaaagctttccagtgccggtggtggtgtgcacattgagccccggtatagacagttc

SEQ ID NO: 170351 - DNA, 75 bp, Homo sapiens
acttcatagtgcctatagagattgaggggaccactcaccagggtctcccttgatctgagaatggctacctctcga

SEQ ID NO: 170352 - DNA, 100 bp, Homo sapiens
acagctcttcagcatctacgggaggcaaacttgtaaaacctggaacagcagcatcattgtcaaaggctctggctccgctactgcatcgtgtgcttctgtc

SEQ ID NO: 170353 - DNA, 87 bp, Homo sapiens
ggatattcagttgcacatccccacatcaatgcactgccaatgatcttatgccttcattcatccggcatggtccaacaattccaagac

SEQ ID NO: 170354 - DNA, 96 bp, Homo sapiens
ggagattgtcaacaccctagataagatgatccggaacccggcaagtctcaagactgtggcaaccatcaccgccgtcccctggcaaccaccattcta

SEQ ID NO: 170355 - DNA, 82 bp, Homo sapiens
ggggcatcctctgcgccctccggaggaggcggacactgtgcccctctcagctgaggaggaaccgagagcggcgctggggcac

SEQ ID NO: 170356 - DNA, 100 bp, Homo sapiens
ctgaaatgccagaggacatggagcagtaatatatttggtctgcggcctgtcgattatacagatgatgaaagtatgaaatcgctattgctgctaccagaga

SEQ ID NO: 170357 - DNA, 74 bp, Homo sapiens
aaaattttcaagtaacattaacgaaaagaagagccatgcaggttctagagccttctttccgccaggcctttccc

SEQ ID NO: 170358 - DNA, 86 bp, Homo sapiens
ggcaactctgtaggaggaagctatctagagctggccaacacagtgtcatggagaaactccagctgggcccagagattctgcagcgg

SEQ ID NO: 170359 - DNA, 123 bp, Homo sapiens
cccactctcactgtgtctttctgtgttacaggtgcagcttcaagcttaggaccacccaccatgcctatccaggtatggtgctgggtgcagatgcagtgtggctctggatagcaccttatggac

SEQ ID NO: 170360 - DNA, 50 bp, Homo sapiens
ggaaatcaaaccgaaaatgtgtatatagatgttccatttaagcagacctc

SEQ ID NO: 170361 - DNA, 90 bp, Homo sapiens
cgccgctgggcctgcaggtctctgtcgagcagcggacgccggtctctgttccgcaggatgggaatgtggtgagcaacttgggacattcct

SEQ ID NO: 170362 - DNA, 100 bp, Homo sapiens
gcgtcggggaggcaagatgatccaccagcggttccatcctacacttggattcacagtctgagaatgaggcttcaccagtaaaacggccacgactacttga

SEQ ID NO: 170363 - DNA, 100 bp, Homo sapiens
gacgctttacataatttggacagaaagtggatttgtggacggcagattgaaatacagtttgcccagggggatcgaaagaagacggagtttcgccatgttg

SEQ ID NO: 170364 - DNA, 75 bp, Homo sapiens
tctcaggttcctctgccaaagatatcattaaaatccgtgcccagacggaaggaatcaacatcagtgaggaggcac

SEQ ID NO: 170365 - DNA, 50 bp, Homo sapiens
gttctctaggccttttagaaaacatgcctcctgacaaggtgatccgggcg

SEQ ID NO: 170366 - DNA, 98 bp, Homo sapiens
agcccagctcacagccaccggtaccttcttccagacacgatgaggcgagtggtacgacagagcaagtttcggcatgtatttgggcaagcggtgaaaaa

SEQ ID NO: 170367 - DNA, 101 bp, Homo sapiens
agcctgcggagcctgtggggcaggttgctgcttttgctcagaggacatccatgaccctaatggtctttttgttcaagataaagtgattttttgcctttgtt

SEQ ID NO: 170368 - DNA, 76 bp, Homo sapiens
ccaaacctgtaaaaccagtgacgttttccacaggcatcaaaatgtacgctggggaggaggaggaggaagggagcgg

SEQ ID NO: 170369 - DNA, 90 bp, Homo sapiens
gaaaaagctgccctgagacggtgtcccgccgaaagttgatattcactgatggactccaaagaatcattaactcctggtagagaagaaaac

SEQ ID NO: 170370 - DNA, 80 bp, Homo sapiens
ataagggaaaagcaattacatttttcactgaggatgataagccattattaagaagaattggcagagggggtcgatttggg

SEQ ID NO: 170371 - DNA, 82 bp, Homo sapiens
atgaagtccgtgtccctggaggggcccaggaagggcgaggaaagcggagtggaggcgaccattgacgaggtggagacggacg

SEQ ID NO: 170372 - DNA, 100 bp, Homo sapiens
gtgggagtgttccaggattcgccttggtgacagccgtgagggtgtatgtgaacagttcctctgagaatctcaactacccggtccttgttgtggttcgcca

SEQ ID NO: 170373 - DNA, 78 bp, Homo sapiens
gtgcccttcgccttcgtgcgcttcgaggacccccggtgaaatgacaatggatgctctgttggctcgattgaaacttct

SEQ ID NO: 170374 - DNA, 100 bp, Homo sapiens
ccgatggcagaatacaacatgcctcagtatatcctgcgagagttcaaggtcacagatgcccggcaatctgcacatcgtgctgccacacgaggcttcattc

SEQ ID NO: 170375 - DNA, 90 bp, Homo sapiens
cgcggaggccgcgccgggccctgtcgcgaacctccggcgcgctgccccgccggaccgtgccgtgcttcctcaaagactgggaaatgcacg

SEQ ID NO: 170376 - DNA, 83 bp, Homo sapiens
gcccccggcctgcgctcccatccacacgctcggagcatcagatccatgctgctgctgactcggagccccacagcttggcacag

SEQ ID NO: 170377 - DNA, 75 bp, Homo sapiens
cccagaggcctttgctgactgacccctcaggtgtcgtgaaaactacccctaaaagccaaaatgggaaaggaaaag

SEQ ID NO: 170378 - DNA, 100 bp, Homo sapiens
cgacgacaggggcatccgcttcctggacaatcggacaggacaatgccgtcttctgtctcgtggggcatcctcctgctggcaggcctgtgctgcctggtcc

SEQ ID NO: 170379 - DNA, 75 bp, Homo sapiens
ctatctatggtgcagatattaatgggagcatatatgatgagatcctgtttgaccaaactcagagatcaattaagg

SEQ ID NO: 170380 - DNA, 75 bp, Homo sapiens
gctccaaccgcctcctcctcctcagtaacgcgggtgctggagaatctggtaaaagcaccattgtgaagcagatga

SEQ ID NO: 170381 - DNA, 90 bp, Homo sapiens
ttgcgatggcgcagaaaccccgttgacaaggcactgctttttcatgacgtttcaggtttagctgtgcctcccagtgactataatgacaag

SEQ ID NO: 170382 - DNA, 95 bp, Homo sapiens
ggcaactgcctgccttcaacaccaagatcactccatggatgaaatgacagctgtggtgaaaattgaaaaaggagttggtggcaataatgggggca

SEQ ID NO: 170383 - DNA, 125 bp, Homo sapiens
cgcggcaggtgaagcggtggtggcagaggcgcctgcggttactggccgggccgacgggtcctgagtctccagagctcgaccacctcctccaccctgaagggtgccatccagctgggcatcggcta

SEQ ID NO: 170384 - DNA, 83 bp, Homo sapiens
cttcctctacccctgtatttcgctgggctctctaaatggattcagctccagaaatacagtccatactgcccggaatctctgca

SEQ ID NO: 170385 - DNA, 95 bp, Homo sapiens
tattcccaaaacagaagaggaagcatatgcactgaagaaaatatcctatcaacttaagattcaaccctatgaaaagataaaggccaggggcttgc

SEQ ID NO: 170386 - DNA, 90 bp, Homo sapiens
caccagtggaagatgatcacatcccaggtctcttggtcttgctgtggcaccacgcgtaagatttcttcagaaaatgcagaaacaacccac

SEQ ID NO: 170387 - DNA, 75 bp, Homo sapiens
aattcgaagatcctagagatgcagaagatgcagtacgaggactggatggaaaccccttcatgaataagttttttc

SEQ ID NO: 170388 - DNA, 75 bp, Homo sapiens
ttggagattccacccaaacttgctggtcactgggagaactgccattggatgtccagaatcccctgtagttgataa

SEQ ID NO: 170389 - DNA, 75 bp, Homo sapiens
aacaaacctgaaggatgtgattggcgccgggttgcagcagttactgggaagagtgacccattttgcttgttggag

SEQ ID NO: 170390 - DNA, 100 bp, Homo sapiens
ggcgactagcggcggcgggagcggcgccgagaggccgtgcgggacgcgggcgccaggaccggccgaacgcagaggcttgggcactgtttaaaggaaagtt

SEQ ID NO: 170391 - DNA, 100 bp, Homo sapiens
gaaaaaggaagaattgacccttgaaggaatcaaacagttttatattaatgttgagagagaggtggaaccgtcccaaaatgtcccttgctcagaagaagga

SEQ ID NO: 170392 - DNA, 75 bp, Homo sapiens
cctcactgaaaattggtattgttggattgccaaatgttggcttcagaggatgattccgaagaagacggagaccat

SEQ ID NO: 170393 - DNA, 96 bp, Homo sapiens
atcaagcaggttttaaatcaagatttaacattccaacacataaaaattatttatccaacagctcctcccagtgaagctgtggtctaccaatctaga

SEQ ID NO: 170394 - DNA, 90 bp, Homo sapiens
gcgctgctaggcattgaggagaaggcagcggacaaagagcttccttcaaaatgtctactgttcacgaaatcctgtgcaagctcagcttgg

SEQ ID NO: 170395 - DNA, 100 bp, Homo sapiens
ctccccagcaaatcgagaaaaacctcagcgacctgatcgacctgcttcgagagctgtgcccaggagtgaacaaccagccctacctctgtgagagtggtca

SEQ ID NO: 170396 - DNA, 100 bp, Homo sapiens
ctctctgagattgaccctgctggttttgaggacttgccgaacctacaggaagtgtacccatttcccatggtgttcagcagttgcagcaggaaggacttgg

SEQ ID NO: 170397 - DNA, 90 bp, Homo sapiens
actttatagtcctgattcaagtgttggcggatggaagggaggagactcctgaccctcagaatgtgttctggacttggtgcctctttctgt

SEQ ID NO: 170398 - DNA, 100 bp, Homo sapiens
taaattatcacttcgaaaacttgctttcccacactaaggagttaacaccgtcaccaccttggtggagaacaagaaagctcagctggtggtgattgcacac

SEQ ID NO: 170399 - DNA, 82 bp, Homo sapiens
atgtgatgcaggaaaccatcagaaacctggactgtatagggtatagcacgtgtcactcccggtcatctagtttctctgagct

SEQ ID NO: 170400 - DNA, 50 bp, Homo sapiens
cggagggtgaacatggtgcaaacagagggccctcaaggtacaccagggct

SEQ ID NO: 170401 - DNA, 75 bp, Homo sapiens
ctggtggctatgggggctctggtgatggactcatccccacaggtcagcccaaggctgccccctcggtcactctgt

SEQ ID NO: 170402 - DNA, 82 bp, Homo sapiens
ggcggcccagcgaggatccgcgggagctgcccggcagggcggagcctcccctcgcagtttgcagaaaaaacttcagcatgtg

SEQ ID NO: 170403 - DNA, 100 bp, Homo sapiens
gccaaacccaagttggttggagatgtggattttgaaggtgtgggcccatcgctggatggatctgtcagaacacggctttgggctggccctgctcaacgac

SEQ ID NO: 170404 - DNA, 50 bp, Homo sapiens
gcagcagagaccaccagaaggcaattctgtggtgttcttggtcacacatt

SEQ ID NO: 170405 - DNA, 80 bp, Homo sapiens
gggtccctcgcccaggtccccttggacaaatggcattcaacagaaggtgtcaaattgacagctctcaatgacagcagcct

SEQ ID NO: 170406 - DNA, 75 bp, Homo sapiens
atgtggatgatgccaaagttttattaggtaagagcttctgttcgtgtgcagggaaagcagctcacagacgccgtt

SEQ ID NO: 170407 - DNA, 74 bp, Homo sapiens
ttcggcctgagtgatctctatggtgacaacagagtccatgagttccccacgtgtgaaagtcaagaatctgattg

SEQ ID NO: 170408 - DNA, 96 bp, Homo sapiens
ccacttcttgcaaaccacatacacagcacaaagaatgtcagacagtttgacaactttaaacgggtcttcaaggtggtagaggaaatgcggggctcc

SEQ ID NO: 170409 - DNA, 98 bp, Homo sapiens
cagaaatcaaattgaagagagcagttgaagaagtgaagaaattattggtacctgcagtatggcccatctcctgtacgcttggagcgacctttggctac

SEQ ID NO: 170410 - DNA, 75 bp, Homo sapiens
ccgccccccgccgccccctccttccgccagcttcctaaccaagcgaagccggcaggtctgtgctgaccccagtga

SEQ ID NO: 170411 - DNA, 100 bp, Homo sapiens
tgccttgctgatctgagctcagacctgccaatttaccagagataattgataacaccctgtaacagctgactgctgtatcttggacgagactatccaaaag

SEQ ID NO: 170412 - DNA, 100 bp, Homo sapiens
caactttgaatttcttctatcaacagaggtcctcaaagagggcagcgggctgttcccagatctcctggtgagggagacggaggccgtcatccacaagcac

SEQ ID NO: 170413 - DNA, 74 bp, Homo sapiens
cgaatatcgtcatcgttagaaggctgaccagtgcaccggtcttcagggcttcttggttttccacagctttggtg

SEQ ID NO: 170414 - DNA, 101 bp, Homo sapiens
cctaaatatggcagtataaatggagcaacaaggctgactataagaggggaagacatgggagatgaagtttacgatgatgtggatacctctgatttccctgt

SEQ ID NO: 170415 - DNA, 99 bp, Homo sapiens
tccttcttacgtcgggtggttttactggagtattggaactcaggtttctaagcatgaattgaggaacagaagaagcagagcagatgatcggagcagcat

SEQ ID NO: 170416 - DNA, 83 bp, Homo sapiens
gagttcctgcctccagctgccaggggggacagccagccagcagcaggagggaactgtggctgcaccatctgtcttcatcttcc

SEQ ID NO: 170417 - DNA, 93 bp, Homo sapiens
tctactgtaaagtcaccaacgagatcttccgccactacgaatctggtcatgctgtggggaagacgtatccgaataccgagctttcttgctgtc

SEQ ID NO: 170418 - DNA, 74 bp, Homo sapiens
ccgtgaacggacagtcccccccagttaaacgagaagattcatcaccgctttgatggctgcctcacaaacttcac

SEQ ID NO: 170419 - DNA, 100 bp, Homo sapiens
aaatctctgcactcccggccgggtggtgggcgcatatcctgggtagcctctaggaagcgctagacacatgtcatcatcagatttgaaatatttaaagtgg

SEQ ID NO: 170420 - DNA, 82 bp, Homo sapiens
gctgtgaaaaactctttggatgattctgccaaaaagctatgaaatggccacctcacggggcatcatgggaatcaaagtgtct

SEQ ID NO: 170421 - DNA, 75 bp, Homo sapiens
ctctctccgctcgattttgtcaccgttatgtgggaagcgaatccaattgggaaaatgaggtacgttagtgttcgc

SEQ ID NO: 170422 - DNA, 50 bp, Homo sapiens
cgacgggggagagccagaaagagctgaagagtcttgctgtgtggcccagg

SEQ ID NO: 170423 - DNA, 100 bp, Homo sapiens
ataatgtcatctctatggaagaaattggaccatacactttctcagatcaggactctatctgtcctcctcagccatctccacctcttcaggctgcatgtga

SEQ ID NO: 170424 - DNA, 75 bp, Homo sapiens
atcgcaagctggatgagcttctaggcaaggaccacacgcaggtggaaatcatcgagttccccatcctaaagctaa

SEQ ID NO: 170425 - DNA, 75 bp, Homo sapiens
cacgtctccaaaatgagtcgcatcttcaacccccatctgaagtttgtgtttttcaacatacctcagattcaatac

SEQ ID NO: 170426 - DNA, 75 bp, Homo sapiens
ttcgtctcttacgtctgcggaagtgcagctgcctcagttcttagcgcaggtactgcttctccgagatggccccag

SEQ ID NO: 170427 - DNA, 50 bp, Homo sapiens
ggagttcagcccactactctgaaccagggtgaggtggctttgaccccggg

SEQ ID NO: 170428 - DNA, 100 bp, Homo sapiens
caagattcaactggcagtttcccacatgggtgtactcgtgttccaggtgaatcaggtctaggaaaatcgactctcataaacagcctattcctaactgatc

SEQ ID NO: 170429 - DNA, 90 bp, Homo sapiens
tgcagtacctgcagaaggtctctggagacatcttcagcagatataaagatgaagcgcagctgtataaagaagagcacctgaggaatcggc

SEQ ID NO: 170430 - DNA, 112 bp, Homo sapiens
caaagtccaagcattgtatcacttcatctgcaaatatttcaataagtacccaaaaggatctgctgtatatccttccaactcacattcaggcagcaagagccggcaacgccat

SEQ ID NO: 170431 - DNA, 90 bp, Homo sapiens
gtcttggccccgtccttacctcacaggagcattccggaagagtttttcgactacagtttgatgaattccagattgtcagtagttcacatg

SEQ ID NO: 170432 - DNA, 83 bp, Homo sapiens
ccagaaaggattgtgacatatcgttggacccagaattgagacaatgcagatcttcgtgaagactctgactggtaagaccatca

SEQ ID NO: 170433 - DNA, 100 bp, Homo sapiens
aattatatgatcattctcttggcacctatgactttgatttggtcctcatggtagctgagaagtcacagaagtaaaattggttctccacccaagactcctg

SEQ ID NO: 170434 - DNA, 75 bp, Homo sapiens
tatgattggctctttagctgaaatacttctgaagggtgtccgcaatgttgccagtgtctgtctgcagattggcta

SEQ ID NO: 170435 - DNA, 99 bp, Homo sapiens
ccgcagcaagatggcggacgagaaggacagggaagtattggatgaacgaatatacctcatccattggaattggagtttttcattcaggaattgaagtct

SEQ ID NO: 170436 - DNA, 90 bp, Homo sapiens
gctgatcttgtacttggattcagcaaggaaccttccggtaatacaggagttgatggcaacgatggttactcattatgaaccacactgaaa

SEQ ID NO: 170437 - DNA, 100 bp, Homo sapiens
gtgcaatccagtttatggcatttgagcattataaaacgaatacagattctgttcatcttgctctgaaattaaataattctgaactcatggggagaaaact

SEQ ID NO: 170438 - DNA, 75 bp, Homo sapiens
cgaaggtggagcaggtcctgagcctcgagccgcagcacgagctcaaattccgagcagtcagtcccctcttctgca

SEQ ID NO: 170439 - DNA, 103 bp, Homo sapiens
gcctgcccgcgcctagaccccattcagtaaaagtcttgcagtgaaaaacccgaggacccttaccgcaagtgtcttttgctcccagctactgatactggattcc

SEQ ID NO: 170440 - DNA, 96 bp, Homo sapiens
aaggatttagaaatcttcaagaatttctgaggacgagctcacatctggaagggtatttgaagtataccatacaactgttttgaaaatccagcgtgg

SEQ ID NO: 170441 - DNA, 82 bp, Homo sapiens
gtaaacggggctgctggtgggccgcgtcgaagacatggaccagggctacggagagagtcacaccccaaagcctctttattct

SEQ ID NO: 170442 - DNA, 100 bp, Homo sapiens
gaagaccagcccttgcctgcccgacggctctcctctgactgcagcgtcactcagcaccaaacaccaaagatttggatgtttttcttcgaaaacaagagtc

SEQ ID NO: 170443 - DNA, 75 bp, Homo sapiens
cactgggtgtgccctatgaacagtggaaggtcctcaacgagatcgatgcgattcaggcttcttcaggagaaagca

SEQ ID NO: 170444 - DNA, 75 bp, Homo sapiens
tcgtttttcggatgatgccttcaatactacctttatttccaccataggtgtgctgggcatcaaggtgaagatcat

SEQ ID NO: 170445 - DNA, 98 bp, Homo sapiens
ggcgcagcgggcagtgtcggaggccagcggggccggaagcggcggcgcagggaaatcctcattgacgattcaatttgttgaaggccaatttgtggact

SEQ ID NO: 170446 - DNA, 100 bp, Homo sapiens
tgaccctttctgcagatgtgagagtacccaagtggccttggaccatctggagtctgtgcctgagaaactgagcctactagaagatttcaaagacttcaga

SEQ ID NO: 170447 - DNA, 100 bp, Homo sapiens
tatatctacaagggggtccgcaagatgtcatctgggtgattctcagtgtggaggtgggtggacttttaggagtaacgcagcagctgtcatcttttgaaac

SEQ ID NO: 170448 - DNA, 82 bp, Homo sapiens
gagccgggcggggcgagggcagctccgacatggatgggtgcaaaaaagagctgccccgcttgcaagagccggaggaggacga

SEQ ID NO: 170449 - DNA, 100 bp, Homo sapiens
agaaggaatcatatatggctcacatgtttatgttctgacttcgtattagtttgaagaaaacaggtctgaaacaaggtcttacccccagctgcttctgaac

SEQ ID NO: 170450 - DNA, 101 bp, Homo sapiens
ccgagctcgatccgctgctcgcacgggagccagctgggtggtccaggggcaagttcatcctactctcgagtctaatgatgatgctcttcagtatgttgaag

SEQ ID NO: 170451 - DNA, 88 bp, Homo sapiens
agctttgcctgtgagaggaacaagcgtccctgatccagaaggtgatgagattgtggggaacctgggtgaaggcacctttggcaaggtg

SEQ ID NO: 170452 - DNA, 100 bp, Homo sapiens
ttaaatacgactgcttccttcaccgttcaactccaatttgtgaagatattggtaggcaaatgttatgctataatagaaggattcccatccctgagcttga

SEQ ID NO: 170453 - DNA, 117 bp, Homo sapiens
ctgtttctctgctgcaccgacctcgacgtcttgcctgtgtcccacttgttcgcggcctatagacgttggaacttgccaggaatccagcaatgatgcaggagatgatgaggaaccagg

SEQ ID NO: 170454 - DNA, 75 bp, Homo sapiens
gaaagtggtgaatcccctgtttgagaaaaggcctaagaattttggcattgacttcaaatcatcccaacaccagag

SEQ ID NO: 170455 - DNA, 100 bp, Homo sapiens
gccctctgatgtttgtggaatgaactgcttttgggaagcggcttttaggacagttctttttactctgacgtctgtggttgtacttgtgattacaacggac

SEQ ID NO: 170456 - DNA, 89 bp, Homo sapiens
ccgcggctgggcgttcatctaccacgctttcgtattcttcatttagagacatcccacagcctggtctctccttgcacccttcttcctcc

SEQ ID NO: 170457 - DNA, 50 bp, Homo sapiens
gagagccagtggatttgccagcagtctgcacccgacagctacaaagtgca

SEQ ID NO: 170458 - DNA, 100 bp, Homo sapiens
ccttgtggataagcacaaagtcaagagacagcgattggacagaatttgtgaagacccgagagggactcacttatgggaattcatccgcgacatcctcttg

SEQ ID NO: 170459 - DNA, 51 bp, Homo sapiens
ggcgaagccgcgctcggtgaaaggttaagtagcctgtcttctctgggagat

SEQ ID NO: 170460 - DNA, 83 bp, Homo sapiens
aagaagccggactacaaggtcgcctacgtgcagctgctcaccatggatgatgatatcgccgcgctcgtcgtcgacaacggctc

SEQ ID NO: 170461 - DNA, 101 bp, Homo sapiens
ttctgagtgcatttataacctcatacccagtgacttgaaggagcctccccagcctcctagcctgccacagtgactcaggtcactcaaggaactatccgacc

SEQ ID NO: 170462 - DNA, 73 bp, Homo sapiens
atgctgagctgaaatatgaattacacctcaagagttttgaaaaggccatgaagaagatgtacaaggcgtgcct

SEQ ID NO: 170463 - DNA, 100 bp, Homo sapiens
aagagcttttccagggcgatgccttccatcagtcggatacacacatattcatcatcatgggtgcatcgattcgggaactggagcctctcctctgtcacag

SEQ ID NO: 170464 - DNA, 83 bp, Homo sapiens
cagagcgtgaagatcaagatcgcagcccctgtcaaagggaacaggaagcagtccacggagggtgacgccctagacccacctgc

SEQ ID NO: 170465 - DNA, 121 bp, Homo sapiens
aataatgaaagtggagagtcacagaggggaacagatttcagtgtcctccttagctctgcagtcccacgcctttgacatctcatccttcagtccctttgctgtaaaggcaacttgaacaagc

SEQ ID NO: 170466 - DNA, 50 bp, Homo sapiens
atggacgtggcaaggacctggagcagaacatggcggcccagagggaatgg

SEQ ID NO: 170467 - DNA, 51 bp, Homo sapiens
aagcctcctacaagagtcctaccaaaatgaaaagttggaagactgttcacg

SEQ ID NO: 170468 - DNA, 82 bp, Homo sapiens
ccaggcgccgccgcgccggccccgcggctctgaggttgctcgcgcgcccccgccggttttaaaatcaaagatgggaaaatcg

SEQ ID NO: 170469 - DNA, 100 bp, Homo sapiens
tgttgtgaaagaagcagtagcagtgaatctacagggacgccatcgaatccgaaactaatctggattcactccctctggttgatacccactcaaaaaggac

SEQ ID NO: 170470 - DNA, 100 bp, Homo sapiens
tccgggtccggagcgccacactccgaagcgacacatgttgtgatggaagagacctcagcagaggaggccgtcagctggcaggagcgcaggatggcagctg

SEQ ID NO: 170471 - DNA, 100 bp, Homo sapiens
catcaccatgaacactagcagtgggaccagggagattggatctgctctcaccaggatgtgcatgaggcacagaagcattgaagccaagctgaggcagttt

SEQ ID NO: 170472 - DNA, 95 bp, Homo sapiens
aagttgggtgcgactaaggggtatgcggtgcccacatgccactgggtcctcagcagtaccacctgcgtgagtgcatctccatccacgttggccag

SEQ ID NO: 170473 - DNA, 74 bp, Homo sapiens
ttatattcatctcaaaaacaaaattctgaactcaggacttggcaaactgttggcaagagtagcaagatgctgca

SEQ ID NO: 170474 - DNA, 75 bp, Homo sapiens
ctatcagaccttattttcctaaggatgagatacctgggagagaggatttttcatgttaccaacacaaagaaatga

SEQ ID NO: 170475 - DNA, 100 bp, Homo sapiens
ctttgaccgagaggctgctggagctcgtgtttggacgcattctgaagggagtggtaatggaagtgaagatgcttcaaaggacagtggagaaggttcctgt

SEQ ID NO: 170476 - DNA, 101 bp, Homo sapiens
ctgccagcgtggactgccacgggctgggcctccgcgcggttcctcggggcatcccccgcaacgctgagcgcctagttatcattaccatgttggtgacctgt

SEQ ID NO: 170477 - DNA, 96 bp, Homo sapiens
gggagaaggaagaggtgtttgaaaagattctgctcctaagtgtaggagagaacttggtgcctcttccactctggagtgaagttaatgaaagtcttt

SEQ ID NO: 170478 - DNA, 75 bp, Homo sapiens
agacgggatactgctcagcaaggagtggctgtaaggtgaagaagcatgaaactcagtctctcgccctggatgcat

SEQ ID NO: 170479 - DNA, 100 bp, Homo sapiens
ccggcagctgtccgcgcccacggtcctatggcggagctaacggactccgcgcggatggcccactgcgtgaccttggttcagctgtccatttcctgtgacc

SEQ ID NO: 170480 - DNA, 97 bp, Homo sapiens
ggcccctgtaggccaaggcgccaggcaggacgacagcagcagcagcgcgtctccttcaggttacttcttgctgcagattctgcgcaggatcggagct

SEQ ID NO: 170481 - DNA, 104 bp, Homo sapiens
atgaaagaccctttgcacaaatcaaggtactgaccccaccggcaagaacatttacctgcatgatatttggcctagtcgagaagaagttcatcgagtagaggaag

SEQ ID NO: 170482 - DNA, 75 bp, Homo sapiens
gttggatttatgcaaacttgggccaaaggacagttagaagacagtagcaattttgcaggcagtaatagctggtga

SEQ ID NO: 170483 - DNA, 100 bp, Homo sapiens
ctcagaactgttccttcagccaaagaaacaagccgtggaataggtgtatcaagtaatggtgcaaagcctgaagtcttggcctatattctccagcgggaga

SEQ ID NO: 170484 - DNA, 48 bp, Homo sapiens
attgtggaaacctactttcctgatttttagactctgaggagcagttgg

SEQ ID NO: 170485 - DNA, 80 bp, Homo sapiens
cgcagtggtcgcttcttctccttgttctccaaggagaagtacatcctggactcatcgccagagaaactccacaaggaatt

SEQ ID NO: 170486 - DNA, 83 bp, Homo sapiens
gttcctgggaaggtggagccaccagcctctccttgccggattgagcacctcaaatcccaaaatgacctcctgaccataacctt

SEQ ID NO: 170487 - DNA, 80 bp, Homo sapiens
agactcgtggggctggatgggaatcgtagtcttcctaggagttgaatactcccccagttgcaagaggcgcaggaccgtgg

SEQ ID NO: 170488 - DNA, 74 bp, Homo sapiens
gctgaaaaaggtgatgtacaagcacagaaaccagactgtgatgactgggagagcgggctgaatgcaatggagtg

SEQ ID NO: 170489 - DNA, 75 bp, Homo sapiens
ggacagtatgtggatgtcacagccaaaaccctgcctagggtagttaaaagacgagtgaatgctctcaaaaacctg

SEQ ID NO: 170490 - DNA, 74 bp, Homo sapiens
cagatttacaaactggccaagaagggccttactccttcacagatcggttatcaatagtctggctgtctatcgtc

SEQ ID NO: 170491 - DNA, 113 bp, Homo sapiens
ccgggaagtttcgcgaatgtcagcattgacatgtgtgcgatcatagacaggtggcgaccacaccaagccttgtgactagcagtgcagcaactaccctcacagtcagccctgtc

SEQ ID NO: 170492 - DNA, 75 bp, Homo sapiens
gagctggcggagagcggcctgcgggcgatcgggccgagggctacaccaagtccattgatatttggtctgtaggct

SEQ ID NO: 170493 - DNA, 98 bp, Homo sapiens
ggcccccgagagccgccgacatgaagaaagacgtgcggatcctgctggtgggagaactagtttatgccaacgtgacttcattcatacagatgaaccaa

SEQ ID NO: 170494 - DNA, 100 bp, Homo sapiens
tgggaaaaggcataccgctcaatgaccagttatttctcaaactctgaggctgcggagttcacacattgaaatctgtcatctttttcagagagaaactttc

SEQ ID NO: 170495 - DNA, 51 bp, Homo sapiens
tccagagattgtggagcagatggcgatgtgcattttgtaagcactttggag

SEQ ID NO: 170496 - DNA, 83 bp, Homo sapiens
cggatggagtccgtgagatgggttttagctgccgccggagtcgaggtggatatggttatagaagaagtggccgagataaatat

SEQ ID NO: 170497 - DNA, 50 bp, Homo sapiens
ctttccacctcgcggcagttcgctgaactttgacctggaccggggcgtgt

SEQ ID NO: 170498 - DNA, 75 bp, Homo sapiens
atattcgatgccatcgtgatggcggatgagaggtgaagaacaaattggttttgagctagtggagaaattatttca

SEQ ID NO: 170499 - DNA, 82 bp, Homo sapiens
cggagcagcagttccatcccgaggaatcagagatcattgatttcttcctgggggcctctctcaaggatgaggttttgaagat

SEQ ID NO: 170500 - DNA, 99 bp, Homo sapiens
gctccggtcccagctcttcgcgcccctgggagggaggtgggaggctctaggctccaagacgccgtcgcttgaggttacgaggcaaatgcaagaacatga

SEQ ID NO: 170501 - DNA, 100 bp, Homo sapiens
ggctggaatttactatatgttaatgcagaacatggacttcccgtgcctctggctagggctgttgctgcctttggtagctgcgctggatttcaactaccac

SEQ ID NO: 170502 - DNA, 96 bp, Homo sapiens
tcagcactgactttcagctatggaatcgtgcctgagattgtgagggagacccaggacctaattgaacaaggggcactcctgcaagcccaccggaag

SEQ ID NO: 170503 - DNA, 87 bp, Homo sapiens
tatggctcattatgacgtggagaactgggcacctccgggctgtgaaaagttagggaagtgtctgacacctccagaatccattcccaa

SEQ ID NO: 170504 - DNA, 74 bp, Homo sapiens
cagcatcccagccgtgctcacgggcaacaggtttgtctatgctggctctaactcgggcgtggtccaggccccgc

SEQ ID NO: 170505 - DNA, 51 bp, Homo sapiens
atggcggagtcggggctcctgacggtgctgtacttctttgcagtatacaag

SEQ ID NO: 170506 - DNA, 100 bp, Homo sapiens
gttgccagccggaacctatgctgtgtagatgaagtagattcagtccacctctggaggtatgaaggaggctatccagccctcacagaagtcatgaataaac

SEQ ID NO: 170507 - DNA, 100 bp, Homo sapiens
gccgccgcttgtgctgcagccatgggtgattctgggggtccacttgtctgtaatggtgtgcttcaaggtatcacatcatggggccctgagccatgtgccc

SEQ ID NO: 170508 - DNA, 83 bp, Homo sapiens
atttagaggaccactagttggaccccatcctcgtgctggaggaacaggtccaaggatcttataaaggaagctatccttgacaa

SEQ ID NO: 170509 - DNA, 82 bp, Homo sapiens
cggcgtctccttctatgtgctgtgtccggacaacggctgcggcgacaattttgtgacagagctgaatgaacctctctccaat

SEQ ID NO: 170510 - DNA, 51 bp, Homo sapiens
tcacactcatgaggagccggaagtatggtttgaagtggtgaacatggattt

SEQ ID NO: 170511 - DNA, 90 bp, Homo sapiens
caaagatgaagatgaaaccaagcccttgggatcagtgtccttcagtgatgtggctgtgggcttcacccaggaggagtggcagcatctgga

SEQ ID NO: 170512 - DNA, 100 bp, Homo sapiens
cgtgaaggtggcagaaggacagcataaggaagccaagttggaccgttctgatgtgactgagagagaagggcccactggaaaatgacttggtagttcatgt

SEQ ID NO: 170513 - DNA, 100 bp, Homo sapiens
cccacttcgacctgagctgggaggccactagcagccagttccggcccgaggacaccgactaccagcaggagaagaaactgaggcctggaatttgattaac

SEQ ID NO: 170514 - DNA, 100 bp, Homo sapiens
gaagaagagagagcatggcacagtgatggcagttctagtttcgcaagagggaagtcctgaaagaaatagatgtgaactatgttccttcgcctcctcctcc

SEQ ID NO: 170515 - DNA, 100 bp, Homo sapiens
ctgaagctcctcttcttgatgactttgtcatgtcttacctctttgctcagggaagaacagtgattattgagcagagttggggaagtcccaaagtaacaaa

SEQ ID NO: 170516 - DNA, 100 bp, Homo sapiens
aaacaattgacattcacgttaaagaggcatttatgaatgcagccttttgtgcaaatgtaatcgacaattgtgtcaaaaccgagttgtccaacatggtcct

SEQ ID NO: 170517 - DNA, 75 bp, Homo sapiens
cagcgagactccgtgggcgtaggaccctccgagccaggcatgaagcaggagctgcagaacctgcgcgatgagatc

SEQ ID NO: 170518 - DNA, 75 bp, Homo sapiens
ggccaggccaggcccggagcctgccccagccacaggttatgaagacagtatggagtttccagaccatagtagaca

SEQ ID NO: 170519 - DNA, 98 bp, Homo sapiens
caacaacctcaccgtgcaccttcgcaagaagcaccagttcaagtggccctcagggcatccccgttttcggtaccattgttggatactggtgacatcat

SEQ ID NO: 170520 - DNA, 82 bp, Homo sapiens
ggctatgtgcacccggacctgctgaaaggtcccgcagcccccggaagccaatagactccctcagggactctcggtccctcag

SEQ ID NO: 170521 - DNA, 96 bp, Homo sapiens
tctccttcatgcagagtgacatgggtcgggaagcagcatatggccaaaatcctgagcatgatggaagacaataagcagctcgcgctccgcatcgat

SEQ ID NO: 170522 - DNA, 75 bp, Homo sapiens
caaaagctgacagagcagtccaacaccccgtcctcttactcccagttactggcagctacatgccttaccaagctt

SEQ ID NO: 170523 - DNA, 75 bp, Homo sapiens
gtcgacaggggatgggaccctaggacaggacatccagcccaaaagagacctcacccgctttgtgaaatggccccg

SEQ ID NO: 170524 - DNA, 75 bp, Homo sapiens
gccgcctggctccccatactagtcgccgacactgccctaaccatcatggaggtggccgaggtggaaagtcctctg

SEQ ID NO: 170525 - DNA, 99 bp, Homo sapiens
cgaaggtgcggcggcggaggggagccagggcgccccagcagttcagagaagccgaactgggattaccatgcagaaatacaagcttttggacatcggtta

SEQ ID NO: 170526 - DNA, 83 bp, Homo sapiens
tggaagacgcgctcctgcgccggcggctatgagaggttttcctccgagtacccagaattctgttctaaaaccaaggccctggc

SEQ ID NO: 170527 - DNA, 75 bp, Homo sapiens
gcagaggctaaaaataaaggagaagtatttccaacaactgaagctttcagcttatgtggagaagtcgctgtgaag

SEQ ID NO: 170528 - DNA, 100 bp, Homo sapiens
cttcggacatagaggccaaccaacctttggaggttaatgttcgtgaagaaattgaagagttttttccaagaatgtggaagataaatcaagataaaagaag

SEQ ID NO: 170529 - DNA, 96 bp, Homo sapiens
ggcgcggcgggaaggagcgggcgacccggtgtgtgggccagcggagctccgtccataaaagaattccaatcagaagaatatcttcagattattaca

SEQ ID NO: 170530 - DNA, 100 bp, Homo sapiens
aagaaatgtttggagaccagaatgatgatactctgtttaaggaagaaatctctaaacgttttaaatcacatactgaccaacttgtgttgatatttgctgg

SEQ ID NO: 170531 - DNA, 100 bp, Homo sapiens
tagaaacagtggtgcgcggagaggagaggtcaaggtgaagatgttcttaaagggtcccagattacgtatgttacaggtgtagaaggggacgacgttgttt

SEQ ID NO: 170532 - DNA, 100 bp, Homo sapiens
cgaggcgccctcaggcagggcgcgggggcagagcctcgcctgggttctggaggctgcggggccatcgctccagtactatactggcaattgctggagaaga

SEQ ID NO: 170533 - DNA, 51 bp, Homo sapiens
ggaaacaaggcttccagtgccaagacgcaagatggctgtcctctctaagga

SEQ ID NO: 170534 - DNA, 80 bp, Homo sapiens
tttgtgaaagtcagtttctgaggaatttcatcaggacgtcccagtgatcgggaggagtgggaagagcttcagctacaacc

SEQ ID NO: 170535 - DNA, 96 bp, Homo sapiens
actgcggtgggactgcctcgactggcagcgcgggaaacgtcaaactcgagtggtggatctgaaccttctaacagaggaggtaagattatacagctg

SEQ ID NO: 170536 - DNA, 100 bp, Homo sapiens
ctgcttcaaacgggcagggctctaggaaacatatgttacgatagccgtggtgaagctgctgctgcggtacggagggaacccgcagcagagcaacaggaaa

SEQ ID NO: 170537 - DNA, 96 bp, Homo sapiens
cggctgtggctcagcatggtcagtgccgtttaacctttattgtggtggagtccaccccgctgtgaatctccctggaaaaggagacatgaatgtctg

SEQ ID NO: 170538 - DNA, 75 bp, Homo sapiens
cgcagcaggagcaggggacgaagtgaaattaaatggtggcagacatgtccaaggaatattgcggggatttgatcc

SEQ ID NO: 170539 - DNA, 75 bp, Homo sapiens
ctcttctggtgtcaaagcttttggacattcctggggtgacttcatggtcatgacgattttcttcaatgtgagcag

SEQ ID NO: 170540 - DNA, 83 bp, Homo sapiens
aggcggccgagtacctggagcgcagggatcgagacatgcaagaaagcacttcagccaagcagaagggagccagctggacgagg

SEQ ID NO: 170541 - DNA, 51 bp, Homo sapiens
accaaaaactatgaatggagacatgaggacagcccacctgaggatattgac

SEQ ID NO: 170542 - DNA, 100 bp, Homo sapiens
ctgggctggagtgaaggtggctacgaggtacaggtttgcagattccgccagcagcacagcaagctctacagatgagtggctctttggcatttggtgctgt

SEQ ID NO: 170543 - DNA, 51 bp, Homo sapiens
ccagaatatcccttcaagcctccaaagtggtagagctttgtgttcagtatg

SEQ ID NO: 170544 - DNA, 75 bp, Homo sapiens
gaacgcttaaaacaacagaatgaagacttgaggcgaatggccgaatctctccgggttctcatgtatcagccatct

SEQ ID NO: 170545 - DNA, 89 bp, Homo sapiens
ttgtgttgttgaggctgaggactgactggggttctgagactccctgtcccggaccgcaggtggatccataaagaacccagccaacccgc

SEQ ID NO: 170546 - DNA, 98 bp, Homo sapiens
ggggctgaagaagcagttctacaaggcgagccagtacctggttgactgtgatgaagtgatcttcatgaaagagggctgtattacggaaagaggcaccc

SEQ ID NO: 170547 - DNA, 75 bp, Homo sapiens
agccatccaatggatgcaggaaaactgcagtatcctggtgtgaaccagctatcctccagtataggaggattgagt

SEQ ID NO: 170548 - DNA, 83 bp, Homo sapiens
cggagcccggctcccgcaccatggaggaggacgacagctacgaaatcttcccaaggctgcagacaccgacggatttgctttgg

SEQ ID NO: 170549 - DNA, 90 bp, Homo sapiens
tcgggtgagagtctctctgagcaacccaaacagaagattggagctggagggagcatcactgggctgaagtttaaccctctcaataccaac

SEQ ID NO: 170550 - DNA, 100 bp, Homo sapiens
aaacgtgggacggggtgctgcaaggggagcggctgctcaccatgtcctgcagtgacaagattgcacgctgcagaaccttggcctgaaaatgctacattat

SEQ ID NO: 170551 - DNA, 82 bp, Homo sapiens
agggaccacggtcaccgtctcctcaggctaccggctctctgaccagttccacgacatcctcattcgaaagtttgacaggcag

SEQ ID NO: 170552 - DNA, 100 bp, Homo sapiens
caacaggtgtttcaaggaactaattctctggaacacagatatgtagaactcttcttgaattctacagcaggagcaagcggtggtgcttatggtagccaaa

SEQ ID NO: 170553 - DNA, 98 bp, Homo sapiens
cggtgtccagcggggctgcgggctacggctgttggtccccttcccctgagcccatctacaatagcgaggggaagcggcttaacacccgagagttccgc

SEQ ID NO: 170554 - DNA, 118 bp, Homo sapiens
cgccgcgggcgccgggagcgagctgggagggagccgcgcgcctttgtgcgcgcgccgaggattttttatcaagcagaaatgcatcgaacaacgagaatcaagatcactgagctaaatc

SEQ ID NO: 170555 - DNA, 98 bp, Homo sapiens
gtttgatgtgaatgccattgtcgcccatgttctcttttatgccccgtggtgccctgcttgtcaaaatcttcaaccggaatgggaaagttttgctgaat

SEQ ID NO: 170556 - DNA, 87 bp, Homo sapiens
ttatgccaccaactcctgcaagaacttctcagaactgcccctggtcatgtggcttcagttgaaggagaagagccaggcgtgcggagg

SEQ ID NO: 170557 - DNA, 90 bp, Homo sapiens
gagctcctgggccacccctcctttcaggtcaagcagcaatgcagagtccctggacaggctcctgccacctgtgggcactgggcgctctcc

SEQ ID NO: 170558 - DNA, 100 bp, Homo sapiens
aaggaacgtccacctgcacacaaaggcaccagttagaagacaaatgaaagctaagcaactcagtgcacaatcttacggtgtgaccagttcaacagctcgg

SEQ ID NO: 170559 - DNA, 83 bp, Homo sapiens
agagagataaaaaggagacccctcttccgctcctgttttatactgcttccatatttacagaattacatgaatgacagtcttcg

SEQ ID NO: 170560 - DNA, 97 bp, Homo sapiens
aagatcattgagaaaagtggttaccaggccctgccctgggttcgctacatcacccagagtggcggtcataatgctgagctccgtaccagacttacac

SEQ ID NO: 170561 - DNA, 88 bp, Homo sapiens
aggagaactggtcgccatcaagaaagtattgcaggacaagagatttaagcctatatatgcaaacagatttgcagtaccaacctatgca

SEQ ID NO: 170562 - DNA, 80 bp, Homo sapiens
tctcgcagagtgctccctgctaacggggacagcaggaacgaatgcaggaatttgggaactgagctgtgcaagtgctgaag

SEQ ID NO: 170563 - DNA, 96 bp, Homo sapiens
ggagctcagaccggtgggctagcgcctagaacactgcctgtaacgtggaaggtgttcgatctatagagttttgtcgaatgaatgaatgaagccgac

SEQ ID NO: 170564 - DNA, 75 bp, Homo sapiens
tgggactcaggtgttactcaccttgctggaaaccaggcgggttgggagaactacgatgacccgcacaaaacccct

SEQ ID NO: 170565 - DNA, 75 bp, Homo sapiens
gaggccgaggaggagtgggagagctttcaagatgttagaaagttcaagccagaagtttcttcagggtttggtcta

SEQ ID NO: 170566 - DNA, 83 bp, Homo sapiens
aggaggtgatgctggaaaactgtgggctcctggtgtctctggataacgaaggaggcccaacttcattcaataaggagcctgac

SEQ ID NO: 170567 - DNA, 75 bp, Homo sapiens
cggactcatacagagattgaaatgttccttagaaaggagcagcagctttacaacaaatacccagatgctgtggcc

SEQ ID NO: 170568 - DNA, 76 bp, Homo sapiens
aaaatagcatatgatgtgcagtgtccaaagagagttaaatcgtcgatctgaaattgttgctaatagctctggtgaa

SEQ ID NO: 170569 - DNA, 101 bp, Homo sapiens
caagtggtttgtcatctttaaaaagaacggaaaacagttcttccttcaaagcatgcagtacctgaagtaatagaagactttctctgcaatttcttgatcaa

SEQ ID NO: 170570 - DNA, 109 bp, Homo sapiens
ctcccgcggtactacaagaacatcggtctgggcttcaagacacccaaggaggccgctatgcagggtagcactgggaacaggagacccacctgaggctcagccctagccc

SEQ ID NO: 170571 - DNA, 75 bp, Homo sapiens
gagccagctgtgaccagaggaatagctccagccatccggtacagaacctgctaaggccatcaaacctattgatcg

SEQ ID NO: 170572 - DNA, 82 bp, Homo sapiens
actccatggcaccgggctgagcgggtgtggacactgccagcggctgcagccgacttggaatgacctgggagacaaatacaac

SEQ ID NO: 170573 - DNA, 100 bp, Homo sapiens
tgatgccccaggacacagagactttatcaaaaacatgattacagggacatctcagcctggaacaagtacagttgactctgaacaagtcaggtttgaactg

SEQ ID NO: 170574 - DNA, 100 bp, Homo sapiens
gagtccgccccgtgaggagaatggcgtgagattcaacattttggggtgaaaatcagcatagttgaacctggctacttcagaacgggaatgacaaacatga

SEQ ID NO: 170575 - DNA, 98 bp, Homo sapiens
cctccttcacgccacacacacgtactccaaagattcaggtttactcacgtcatccagcagagaatggaaagtcaaatttcctgaattgctatgtgtct

SEQ ID NO: 170576 - DNA, 80 bp, Homo sapiens
ctgccctagtagatgggctgcgccgggagccgggcggaccccggagatggctgcaagctttcttcctggtggcagatgac

SEQ ID NO: 170577 - DNA, 97 bp, Homo sapiens
ggaacagccagcttggcctgcggcccggccagcacctcatcctacgatccggaacatggtggcggtgctggaagtcatctccagcctggagaaatac

SEQ ID NO: 170578 - DNA, 82 bp, Homo sapiens
gcgactgccagtggatcaccgcgctgcactacgcctttcaggacgagaaccacctgaatccacattcatctcaatggaagga

SEQ ID NO: 170579 - DNA, 75 bp, Homo sapiens
cacggaggcaccatgaagaagtcttactcagggactttgaacatgtcggggatcgccctcagcagactcgcccag

SEQ ID NO: 170580 - DNA, 83 bp, Homo sapiens
gccgtcgaggagctgcctggggacgacaatgcagatcttcgtgaagactctgactggtaagaccatcaccctcgaggttgagc

SEQ ID NO: 170581 - DNA, 99 bp, Homo sapiens
catggtgtacttgtggttggctatggtgatcttaatgggaaagaatactggcttgtgaaaaacagttacacccccagattaccagcctcccggttttaa

SEQ ID NO: 170582 - DNA, 100 bp, Homo sapiens
gggcgtcccttcccccaagttatcaaatccaagggcggtgttgtgggcatcaaggttatcagtgagctgaatggaaaaaacattgaagacgtcattgccc

SEQ ID NO: 170583 - DNA, 90 bp, Homo sapiens
ctcaggatggaggaagactcgatccgcctgcctgcgcacctgcgaaagtatgcctcagactcctcccttttcagcaatgtttgacagcag

SEQ ID NO: 170584 - DNA, 82 bp, Homo sapiens
gaaaaagcaagctgaagacatcaagaagatcttcgagttcaaagagaccctcggaacttactccacaggatccgctgaacat

SEQ ID NO: 170585 - DNA, 100 bp, Homo sapiens
cattgacaatgatggctttgaagggattttttaacctggccctgctaatcgaggaaggtacgataatcccacaccatatcttggatttcttggaaattga

SEQ ID NO: 170586 - DNA, 83 bp, Homo sapiens
caagagggtgttcgactgctagagccgagcgaagctacctggagtagaacagaaaaattattatgtctgtgttcccttgggac

SEQ ID NO: 170587 - DNA, 97 bp, Homo sapiens
gctcactgcagcctccgcctcccaggtaatgcatgtccatggtacacaaattcacaaggtttgtaaatgagaaaagacgtgaggttccttttgttct

SEQ ID NO: 170588 - DNA, 59 bp, Homo sapiens
tcgcatcctatggctcaaagaaagatgattatggaaaaagaaatagtggtttcagacag

SEQ ID NO: 170589 - DNA, 82 bp, Homo sapiens
ctcgtggcctgcctctgcgtgctcacattaactttgctctagaagacaactttacaaggatctaaaaggaacaggattaaag

SEQ ID NO: 170590 - DNA, 100 bp, Homo sapiens
tggggctcctgctctttctccttcctgggagcctgggcgcagggcagagcggcttgggtaaatccaccttaatcaacaccctcttcaaatccaaaatcag

SEQ ID NO: 170591 - DNA, 75 bp, Homo sapiens
ggtgaaagctaaggagcaagtaggagttctcaagatgaaatggatgttgtatcacggactgattcaccgagccca

SEQ ID NO: 170592 - DNA, 98 bp, Homo sapiens
gatcgcagaagcctacgctaccaaaggccatggtaggggaggagtgtgtaggtgccatcgtttgcaagttggatatgcacaaaaagatgttccgcaga

SEQ ID NO: 170593 - DNA, 89 bp, Homo sapiens
tggacattagtgggcttcagttagccttggccgatggcagtcttgggcacgtccatctgtaaacctgctgagagctctggtgacaagaa

SEQ ID NO: 170594 - DNA, 82 bp, Homo sapiens
aagcaagtccagatcagaatgcttcaacccacacacctcagtcttcagttaaggttcgagatgtgaggatgatttctgacag

SEQ ID NO: 170595 - DNA, 101 bp, Homo sapiens
ccatgttcgtgaacggcgcttcccttggtgcacctgtggccgccatgtttgagcgaggtgctggagaatctggtaaaagcaccattgtgaagcagatgagg

SEQ ID NO: 170596 - DNA, 80 bp, Homo sapiens
ccagcccgtgccgcgagcgcggcctgcaggagaagggtcccagcaccatggaggacccgaaccctgaagagaacatgaag

SEQ ID NO: 170597 - DNA, 74 bp, Homo sapiens
ggttcctgtgtgcctgcgccgcgctgcagaagagcaggcacctcctggaccagatgtggacgagtgctcactag

SEQ ID NO: 170598 - DNA, 75 bp, Homo sapiens
ctttctggcctggaggctatccagcagctgcagagagacaaggcggcggcggctgctgtgctgggtgcagtgagg

SEQ ID NO: 170599 - DNA, 50 bp, Homo sapiens
cccagtggagcttagacaatctctgttaaaagcagccttcgccttatccc

SEQ ID NO: 170600 - DNA, 100 bp, Homo sapiens
agcctggattataaggatgtcatccccatggctgatgcagcaggcatcatccgctatgcaattgggatatcatggtgacagagtacgtggagcacggacc

SEQ ID NO: 170601 - DNA, 100 bp, Homo sapiens
agttcagtcactgcaatcttcatgcccatcagtttcttgtgagaagaaaacaatgctacacacgcagggccctgtcgatggcagcctttacgcgaaggtg

SEQ ID NO: 170602 - DNA, 82 bp, Homo sapiens
gggccgtggaggcttcgccgcctagggttttcagagaaagatgctgatgaggtgaaaggaatttttgtagataccaacttat

SEQ ID NO: 170603 - DNA, 74 bp, Homo sapiens
ctgaacatcatgaattcccaagaaggagggaagatcagttttcctgccatccaggctgctccctccttcagcaa

SEQ ID NO: 170604 - DNA, 83 bp, Homo sapiens
tctgctgtgggcgctgctggcgctctggctgtgctgcgcgacccccgcgcatgcaattctgtggtgttcttggtcacacattt

SEQ ID NO: 170605 - DNA, 100 bp, Homo sapiens
ttttccctctccctttccctaaggacactggggttgggaaatcaagcatcgtgtgtcgatttgtccaggatcactttgaccacaacatcagccctactat

SEQ ID NO: 170606 - DNA, 95 bp, Homo sapiens
aagcaggaaatactggtggaaccagaaccattatttggtgtgtgtcatagctaccatagcttttggaatgggcattaataaagctgacattcgcc

SEQ ID NO: 170607 - DNA, 51 bp, Homo sapiens
cagacctgcgtggtgcactacaccggcccggcatcatcccttactgcgctg

SEQ ID NO: 170608 - DNA, 75 bp, Homo sapiens
caggaaggcagtctttgctacgtacagcaaaagatgctggcatcaccatctacatcaggtcagctgtctcagttt

SEQ ID NO: 170609 - DNA, 98 bp, Homo sapiens
tgaatcccaatgatgtgacactctcaggctgtactgatgcgatactgaaagctgccaaacggaggcccgaagaaaaagaacctgaaaaagtaaatcca

SEQ ID NO: 170610 - DNA, 75 bp, Homo sapiens
cgccggttcgcgtctctctgctgcggcgcggggaccgctgtgctctcgtgagccaagccccccgagaggcccctg

SEQ ID NO: 170611 - DNA, 100 bp, Homo sapiens
cgggcacacaagaatggtcactcaggatacagacgtccctcaccagtgccagcttggggtctgcagatgagaactccgtggcccaggctgacgatagcct

SEQ ID NO: 170612 - DNA, 95 bp, Homo sapiens
tctgtggactcaacagtttgtggcaagacaagctcagaactgagaagctgtcaccacaggttttgaacgaagaatgtgatcagaactggtacaag

SEQ ID NO: 170613 - DNA, 100 bp, Homo sapiens
tctctagtggcggaagccttcgtctcccagattgcagctgcagaacaaggagcatgtgattgaggccctgcgcagggccaagttcaagtttcctggccgc

SEQ ID NO: 170614 - DNA, 98 bp, Homo sapiens
atttaaatatatatgtcccgactgaggatggcgtctgctatgcagagtttggagttcgagtccccaagaccacaggatctgcctacacctacagctat

SEQ ID NO: 170615 - DNA, 90 bp, Homo sapiens
gttcgtctcttacgtctgcggaagtgcagctgcctcagttcttagcgcagagagatgccaaaggccagtacctgtttgaccttctttgcc

SEQ ID NO: 170616 - DNA, 74 bp, Homo sapiens
tcttcattcatgactccagacaggtctccaggaaacctagagaaaaaccgttatggggatgtaccctgcctgga

SEQ ID NO: 170617 - DNA, 80 bp, Homo sapiens
agccgcaccatgccgctcctaagcctgcacagccgcggcggcagcagcagtgagaggtgacagcgggaaggtgaccacag

SEQ ID NO: 170618 - DNA, 90 bp, Homo sapiens
ggaggagcttcttaggaaagaagagatgaagtcattgctgtttccgaaaaggtgattgtgaagcttgaagacctggtcaagtgggtacat

SEQ ID NO: 170619 - DNA, 50 bp, Homo sapiens
ggcacgatgccctttgacttcaggagagttatcattaccatgttggtgac

SEQ ID NO: 170620 - DNA, 82 bp, Homo sapiens
cgcatgcagcagtacgacctgcagggccagccctacgggactttgaacatgtcggggatcgccctcagcagactcgcccagg

SEQ ID NO: 170621 - DNA, 82 bp, Homo sapiens
gctcaaccagatcgcgcgggagcaaattgtggctactaatttgccccctgaagatcaagatggctctggggatgactctgac

SEQ ID NO: 170622 - DNA, 82 bp, Homo sapiens
actgacagcgggaggcagagggaggaacctggacgccggaagccgggaaatggttgcactagtcgggggttccatgctgggg

SEQ ID NO: 170623 - DNA, 73 bp, Homo sapiens
acagttcgctacacagcaatgcatcgaggtggcagtagagaagagcatcacagaagttgctcaggagctgaca

SEQ ID NO: 170624 - DNA, 90 bp, Homo sapiens
gagtacacgcagccaatgatagaccacctggttaccatgaagatcagccactgggatggggattaaagcctgtggtttccacagaagcac

SEQ ID NO: 170625 - DNA, 90 bp, Homo sapiens
catatacaagatggccgcagtcggcaaggagagacgtcgctgaggggcttgcctgaagcgagggggcttcgtgggacacatatgcaacat

SEQ ID NO: 170626 - DNA, 95 bp, Homo sapiens
ggcaaatggcggacttcgacacctacgacgatcgggcctacagcagcttcggcggcggcagaggaaatattgctgacactgctgaagccagttgc

SEQ ID NO: 170627 - DNA, 98 bp, Homo sapiens
ccgggaggggacggccgccggagccgcgaggccaagctcttgtcaggatggtgaagctgttcatcggaaacctgccccgggaggctacagagcaggag

SEQ ID NO: 170628 - DNA, 74 bp, Homo sapiens
agagtcggcgtaactatcgcctgacaggggcgacatggagtccaatgggaaatacatcaccaaatctggaaccc

SEQ ID NO: 170629 - DNA, 75 bp, Homo sapiens
tgcgatcccgggtcatctccagatgctagggttatggaaaaagctgttcatttgcaagaggagctcatagctatt

SEQ ID NO: 170630 - DNA, 101 bp, Homo sapiens
cgttggctgccgtccccgctgctgtgcattggcaacatggccaacgccctggccagcgccacttgcgagcgctgcaagggcggctttgcgcccgctgagaa

SEQ ID NO: 170631 - DNA, 100 bp, Homo sapiens
tcagctggcctggtttgatactgacctgtaaatcatcctttagttttggttacctgcagcaaactgtggtttgaaaataggtgagtatagtacaataaga

SEQ ID NO: 170632 - DNA, 75 bp, Homo sapiens
tggcgaccgagacggtggagctccataagctaaaggcgatcattgaggaggctgaaattcgatggagtgaagttt

SEQ ID NO: 170633 - DNA, 100 bp, Homo sapiens
tcgcactatgactctggaagaagtccgcggccaggacacagttccggaaagcacagccaggacttggactaaagtctgatgaacttcccaatcagatgag

SEQ ID NO: 170634 - DNA, 95 bp, Homo sapiens
gcgcagggcctgcagcgggagctggacggcgagcgcgagcggcgcgagaaatacctggagtagaacagaaaaattattatgtctgtgttcccttg

SEQ ID NO: 170635 - DNA, 98 bp, Homo sapiens
tggaaatgcgaatcctaaagcgtttcctcgcttgcattcagctcctctgtgtttgccgcctgggtgatctgggctcttgggatctgctcatttgcctg

SEQ ID NO: 170636 - DNA, 82 bp, Homo sapiens
agaaaaggcaacatcctgtcacaggccatgctctggcaaaaacgtgcatggctgcctcctaatcccatagtccagaggaggc

SEQ ID NO: 170637 - DNA, 50 bp, Homo sapiens
cccgtttccagcctccggtgctcaccgtgctggagaatctggtaaaagca

SEQ ID NO: 170638 - DNA, 100 bp, Homo sapiens
tgccccagagaaagtcctcgctcgtcaccagcaagcttgcgggactggggcagcacctactccgtgtcagtggtggagaccgactacgaccagtacgcgc

SEQ ID NO: 170639 - DNA, 100 bp, Homo sapiens
cggcggtggcagcggcggaaaccgaaggggagccatggcggctgacagtcgggaggagaaagcctccacctcagatatatgacaagcagttggatgaaag

SEQ ID NO: 170640 - DNA, 96 bp, Homo sapiens
cttcctggagggggtgactgtccagagcctggaactgtgcccacaccagaagccatcagcagcaagttgatcctgaaaacgtgtttattggtcgcc

SEQ ID NO: 170641 - DNA, 98 bp, Homo sapiens
cggaggacctgttgggaacggctaattagcaggatgctgtggctgtgctgtcgtcatgcctcaaacccgatcccaggcacaggctacaatcagttttc

SEQ ID NO: 170642 - DNA, 50 bp, Homo sapiens
gtcaccaagtacaccagctcgaagccggaaggtggtggtcgtacgctgtg

SEQ ID NO: 170643 - DNA, 88 bp, Homo sapiens
tagagggccaccagagggccatcatggcccacatgactgtggagagatggggttttgccatgttgcccagactggtctcaaactcctg

SEQ ID NO: 170644 - DNA, 50 bp, Homo sapiens
gaagcacaagatcatgcacagagcccttcctttgaagaaaggaaacagtt

SEQ ID NO: 170645 - DNA, 100 bp, Homo sapiens
cgcggtaatgctggtggtctgcatcaccaccggatcaacttcgacaaatatattggtaaaggttttcaaggtgtcatgaaaagatggggatttaaaggcc

SEQ ID NO: 170646 - DNA, 100 bp, Homo sapiens
ctcagcgcccccagcacgccgccgagtcccgctcgccatgggggctggggagaacaccaaaacaaacctggagagcatcctctcttaccccaaggacttc

SEQ ID NO: 170647 - DNA, 82 bp, Homo sapiens
cctggcggtttttattaaggctgttcatgtgaaagacctagaggatcaagacataatgggagcatttttagacaagccaaag

SEQ ID NO: 170648 - DNA, 74 bp, Homo sapiens
gggctcaaggagatcgtttatttgccgaatgagggaccacgggatcattcgaactctggatttacccatctatg

SEQ ID NO: 170649 - DNA, 96 bp, Homo sapiens
tgggaaatgggaacctgatccaacaggcaccggtggccgagctccgtgaccatgaaggtcaaggtcatccccgtgctcgaggacaactacatgtac

SEQ ID NO: 170650 - DNA, 51 bp, Homo sapiens
gttggtgatttttcactgacattgaagaactgaatgtcatcatgtctggaa

SEQ ID NO: 170651 - DNA, 100 bp, Homo sapiens
atgaagaaacggtggcagagattaacgcaacaatgagtatcatatctgaagatattagtgagctacaaaagaatcaaactacatctgtagccaaaattgc

SEQ ID NO: 170652 - DNA, 100 bp, Homo sapiens
aggtggaaaagctaatcaagtgcgacgaaattcagggtggagagattcaaccagttagcgtgaaagttggagataaagttcttctcccagaatatggagg

SEQ ID NO: 170653 - DNA, 75 bp, Homo sapiens
ctttgtctcctcagcagacgcggaaggaaatggaaaggtcagtagttgcacagctgctgagggtagtttcacatc

SEQ ID NO: 170654 - DNA, 101 bp, Homo sapiens
ccggcgggccgcgcctggtgatcggctccttaccagctcacctctcaccgcgcatgtttggagctcttttgaaacagatggtcaccatgtttagatattag

SEQ ID NO: 170655 - DNA, 100 bp, Homo sapiens
gggggagcacgattggatttgccgaagattaggaagaatccactgatagaaatcatttccatcaataccggatttggagcaagaggtggtggtggccttc

SEQ ID NO: 170656 - DNA, 100 bp, Homo sapiens
tcgcattttggcattgacatttaattttagggtcctttatatagaagggagagtagcccccggtccctgagaagcggccccctgaaatacagcatttccg

SEQ ID NO: 170657 - DNA, 82 bp, Homo sapiens
cgcgtcatcgagtgtgacgtggtgaaaggagccttcacgtaaatgggtccagtcatgcctcccagtaagaagccagaaagct

SEQ ID NO: 170658 - DNA, 82 bp, Homo sapiens
cggcctccaggcctcaggccccctcaccatcctagaggtcaagatcagctctggctagatgtacctgtgtggtctaagctgg

SEQ ID NO: 170659 - DNA, 75 bp, Homo sapiens
gaacaggcaagaagtggtccagccggcgaagggaggacatgtatgcccaggactctatagagctactaacaacat

SEQ ID NO: 170660 - DNA, 100 bp, Homo sapiens
agcagtaccaccctgttgtacatccactggacctaaaatatgaccctgatccagatgccacttcaaatgaacaacaagagcttttctgtcagaagttgca

SEQ ID NO: 170661 - DNA, 100 bp, Homo sapiens
gatggcggacggcgccgcagctggcgctggcggcagcccatccttgagagagctgcgggcacggatgggtacatgtcccagagcaagcacacggaggccc

SEQ ID NO: 170662 - DNA, 100 bp, Homo sapiens
attgggagaaacttgaacgcaaagagatccagcccccttataagccaaaagctacagccgctcaggaagcaatcttgcatgcgtctggaaatggcacaac

SEQ ID NO: 170663 - DNA, 101 bp, Homo sapiens
gggcaacgagcacaacaggagctacgaggagttggccatttcataattctgaatcatgtctgataacggagaactggaagataagcctccagcacctcctg

SEQ ID NO: 170664 - DNA, 74 bp, Homo sapiens
ttcaccttttggctttcttggcctgatgctgaactctcgagggtgctgctggtgagtagcagccggtacccaga

SEQ ID NO: 170665 - DNA, 98 bp, Homo sapiens
gatctccatgtcctgttgtggggcttttacagcctttgggtttcaggcacagaactgtatatccaataatagtgaaatggatcccactaattatgaca

SEQ ID NO: 170666 - DNA, 96 bp, Homo sapiens
aagccacgaataacctataatgggtcatgtaggtacaacagcaaccaagaagatcgatgtctacctccctctgcactcgagccaggacagactgct

SEQ ID NO: 170667 - DNA, 87 bp, Homo sapiens
ttcctaccattaagatttttggatccaacaaaaacagaccagaagattaccaagattggcccccgccgcatccacacagtccgtgtg

SEQ ID NO: 170668 - DNA, 100 bp, Homo sapiens
ctcgccgccaccgcccaggaccgccggccgggggacgagctcggagcagcagccaggagctgacatggacccaaatcctcgggccgccctggagcgccag

SEQ ID NO: 170669 - DNA, 80 bp, Homo sapiens
ggcagcccttcaggagctccttagtaaagttaattgctggccctcggagagtggaaatggctgtgatgtcaacatagaat

SEQ ID NO: 170670 - DNA, 75 bp, Homo sapiens
gagcgctcaggatggaggaagactcgatccgcctgcctgcgcacctgccatggacaaggacagcccggaggtcca

SEQ ID NO: 170671 - DNA, 90 bp, Homo sapiens
cttggcggcgccgaggcggcagcagaagtccggagtcagggcgtgtggctgaggagatgagtctgcaaactacggccacatgcaggcttc

SEQ ID NO: 170672 - DNA, 100 bp, Homo sapiens
taagaaagagaatgtaagacaggaaaataattaaatattcttaccgagatgccttcaattaagttgcagagttctgatggagagatatttgaagttgatg

SEQ ID NO: 170673 - DNA, 82 bp, Homo sapiens
cggggaggcaagatgatccaccagcggttccatcctacacttggcacatggattaattgatgtatgttgagtttatggagct

SEQ ID NO: 170674 - DNA, 75 bp, Homo sapiens
tccagctttgttgaaaagcgaagccgttagtcccttaatacaaaggggacactccggacgcaggcccggccagga

SEQ ID NO: 170675 - DNA, 97 bp, Homo sapiens
aacgccattatgggcagtgggattttgggactcgcctttgccctggcaaacactggaatcctactttttctgcctggtctccaagtcctctcctaag

SEQ ID NO: 170676 - DNA, 100 bp, Homo sapiens
acgccagctgcccaggcgcaagtctgtgtggtccaggaaagaccacagcaagattctttcattcgtctcctcctagcctgggggaccaggctcgaactga

SEQ ID NO: 170677 - DNA, 74 bp, Homo sapiens
ctcccatcacctacccgcagggcctggcactggccaaggagattgtctctaacgaagtgccggagcacccatgt

SEQ ID NO: 170678 - DNA, 100 bp, Homo sapiens
ttcataccagctgaagagcgacaagccgctggcagccgcggatctcaccgccgctcagggttgaccagtatctctaccacatgcgcctctctgatgagac

SEQ ID NO: 170679 - DNA, 50 bp, Homo sapiens
caaggctgtgctggatggagtgaaggtgctgaaggtcgccatcctggctg

SEQ ID NO: 170680 - DNA, 75 bp, Homo sapiens
tgaaccgtgcagtgctcgctgccatggatgccaccaagctgggcgcaccctacgacgcgcacaccaccggcatga

SEQ ID NO: 170681 - DNA, 100 bp, Homo sapiens
ctggaggagtccctgaagatctatgctcctctgtacttggtgttacagcacatgaaggccgtgcaggcagatcaggagcgggagaggcagcggcggctgg

SEQ ID NO: 170682 - DNA, 74 bp, Homo sapiens
aaaggcagaatgggtggttgcccatctctgctatgaacaagagaagcatatgcaattgggaagaaagagaaacc

SEQ ID NO: 170683 - DNA, 98 bp, Homo sapiens
gattgactgctgctggggctgggctcgccagtcttggggacagtgtcagcgttaaagtattgcacaatcagctggtccttttccacaatgccattgcc

SEQ ID NO: 170684 - DNA, 100 bp, Homo sapiens
ttcccccaggcttctgcgcagaatgcttctcagcagcaacatccccaaacagcggcgtttcacggtggcacatacatggaacatggagctgatccaggac

SEQ ID NO: 170685 - DNA, 90 bp, Homo sapiens
cgctcagtacatggagcggctgaacgcgcgccacggcgggctgaccagtgcaccggtcttcagggcttcttggttttccacagctttggt

SEQ ID NO: 170686 - DNA, 100 bp, Homo sapiens
ggcacgcgagcccgggcgttcgcaggggaggagcttacaagaccctatgaaaaaattagttgagaaagaagagaagaagaaaatcaaccagcaggaaagt

SEQ ID NO: 170687 - DNA, 76 bp, Homo sapiens
agcaggagcccggccaggcgctggggaaaggccatgtagggcaggaccgggtggactttggccagactgagccgca

SEQ ID NO: 170688 - DNA, 90 bp, Homo sapiens
agaaatgcgagggtatgtccaagacttgcttgagtgtttcagtgaaaaggtatgcagaatctgtgggagcaaaacattatcatacttcag

SEQ ID NO: 170689 - DNA, 78 bp, Homo sapiens
gcactttcttctcaatttcatatggcaacaaactgtaagaccatgaattatggcatttcttaaatgaagcgttcaaga

SEQ ID NO: 170690 - DNA, 88 bp, Homo sapiens
ctcgctgtgagacatgtctgagactcctgctcagtgtagcattaaggtaagaatgattgatgttggctgatattggagtgctcattca

SEQ ID NO: 170691 - DNA, 88 bp, Homo sapiens
ttgaatacatctgcacccaacagaatattttgttcatgttattgaaagggttaactacatcctggaatcgcgagctagcactgcccgg

SEQ ID NO: 170692 - DNA, 75 bp, Homo sapiens
tattggaaaaacatttcttacaggtggggctggtgtccgagcacttctcgcaggccccgcagaggctgtccttct

SEQ ID NO: 170693 - DNA, 100 bp, Homo sapiens
cgagaagcagctgcagaaggacaagcaggtctaccgggccacgcaccgcctgctgctgctggatgaggtggaaagtgagaaatggtacctgtctacagac

SEQ ID NO: 170694 - DNA, 75 bp, Homo sapiens
tcgacatgagtgatgtggaggaaaacaacttcgagggcagacgctggctgacagagcagagagctcaatgtcctc

SEQ ID NO: 170695 - DNA, 82 bp, Homo sapiens
tgtagacacaactacaggctgggcgcacccttcactgtggggagaaaagggcattgctcagattaacctggctgactatgac

SEQ ID NO: 170696 - DNA, 89 bp, Homo sapiens
tccagttggaattgaagaatattcccaagtccttcacccgggctcagctgtcgcaggccctggaggagctgggaggccagaaacaaaga

SEQ ID NO: 170697 - DNA, 100 bp, Homo sapiens
ctgagctcgtagctggcatttcagggtttgtgtttcgtcatgagcagagtctccttggaggtgacatggatatgggcaacccaggaaccctttcgcccac

SEQ ID NO: 170698 - DNA, 152 bp, Homo sapiens
aaaatattaatgacagaagatctgcgaacatgatgcacgtgaataattttccctttagaaggcattcctggatatggcaccgaccgtcacgagctaacttcctggaagagctttccgtctattttcaaattctttaccgaagcctcagaggc

SEQ ID NO: 170699 - DNA, 100 bp, Homo sapiens
gattatggaaaatgggagctgtatatcccaccaaagcagaataaatctgtactcgtgcctcatggatccaaattaaagactgatgaagagaagcagcagg

SEQ ID NO: 170700 - DNA, 82 bp, Homo sapiens
cggcttgaccgcattcttcctcccagttcgtgccctcgtgaggctggcatgcaggatggcaggacagcccggccacatgccc

SEQ ID NO: 170701 - DNA, 127 bp, Homo sapiens
ccgccgtcgcagcccccgcgctggtgcagccaccctcgctccctctgctcttcctcccttcgctcgcaccatgttgatattcactgatggactccaaagaatcattaactcctggtagagaagaaaa

SEQ ID NO: 170702 - DNA, 51 bp, Homo sapiens
gaagccaggagcacccggcgtcccagacaaacggagtctcactctgttgcc

SEQ ID NO: 170703 - DNA, 101 bp, Homo sapiens
aaaggaagttggttttccagaaagctgtaatcatgtcttctgtatgacttgtattcttaaatgggcagaggaccgtatccttgatgagcttgacaaagacg

SEQ ID NO: 170704 - DNA, 99 bp, Homo sapiens
aagacatggatttactgtgcatattagcagatccatactggaaaatgcatggaggtttcatatacaccacttacagctggagtgcaatggcatgatctc

SEQ ID NO: 170705 - DNA, 51 bp, Homo sapiens
attaaacccatcgacaagaaggcacctgtgttggagagcacaatggctgaa

SEQ ID NO: 170706 - DNA, 100 bp, Homo sapiens
tagtgagtcataaagatatacaagattccctaacagtgtctggtagggctctacttcactgggcctgtgatcgaggacataaggaactagtcacagtgtt

SEQ ID NO: 170707 - DNA, 143 bp, Homo sapiens
cagaggcccagaagctggggaagccctctgcccatgcctcacaaagcttctgtgaaagttctagtgctatatgtgagacagagcctgaacagcctgttcgacattacccattatgggtaaaagtagaaggtgaagtagatcca

SEQ ID NO: 170708 - DNA, 100 bp, Homo sapiens
ccgagacggccattcagcttatggggatcatgtgcgtgctgtcggtctgctggtctccgctcctgaggcaaggaactgctccaccgccaatgaaacttcc

SEQ ID NO: 170709 - DNA, 75 bp, Homo sapiens
accattgcaataaaatagaacttccaactactgtacgaattggagcaatgttggcttatacacctctggatgaga

SEQ ID NO: 170710 - DNA, 82 bp, Homo sapiens
gcgggctcgagagctcgccccgaacgggggtcttcctcctccgccgttgacagacccgggaaaaggagaagatgaaggaagc

SEQ ID NO: 170711 - DNA, 101 bp, Homo sapiens
cagcgggtcaagtgcagtacctggatctcatcaaaaaggacaccagcaagctgttcaatgaggaggtgctgtctggatgcggagtctacgatgggaccgag

SEQ ID NO: 170712 - DNA, 82 bp, Homo sapiens
cccccgaaaccccagacatcaaccagctgccgccgtccatcctgctcaagtatacgctcaacggcaagaaagtggaagttgc

SEQ ID NO: 170713 - DNA, 75 bp, Homo sapiens
ggtaccttgaaggcagtgatacagtgtctgagaagtaaagaggttacaggaggttccagtggcatcgggaagtgc

SEQ ID NO: 170714 - DNA, 100 bp, Homo sapiens
tgccattctggattccagaagatttaactacgtggtccgggatgggtcatcagttaaggaagttgaaacctaccaccggacacgtgctttaagatctttg

SEQ ID NO: 170715 - DNA, 90 bp, Homo sapiens
tcgctcccttgatgatcttgagaatatgacagatacctagcatctagcaaaataatggcagctgcttaccttgaccccaacttgaatcac

SEQ ID NO: 170716 - DNA, 100 bp, Homo sapiens
gataagccgggcgggagcccctcggccaggccacggcgtatgcctccgaggacggggtcctgaccgaggccatgatggacacccgcgtgcaagatgctgt

SEQ ID NO: 170717 - DNA, 75 bp, Homo sapiens
gggcaacttcgctgtggtgaagctggggcggcaccggatcaccaagacggaggaaataatgcaaaaggtgtccca

SEQ ID NO: 170718 - DNA, 98 bp, Homo sapiens
gctcctggccggagcaagatggctgagggcgagcggcagccgccgccaggacttcaggatgcatttgacagtgactgggaaaccgggaaaatcatgcc

SEQ ID NO: 170719 - DNA, 100 bp, Homo sapiens
ccgcaacaaaccctatcctgtccgagcaaagattacctattaccagaacacactgacagtacatcaggaacgtctctatcaagaatacaatttcagcaag

SEQ ID NO: 170720 - DNA, 100 bp, Homo sapiens
ggagaaggaagaggtgtttgaaaagccagagactgctgctactttgaaacgtacgatagaggccctgatggacagaggagcaatagtgagggacttggaa

SEQ ID NO: 170721 - DNA, 100 bp, Homo sapiens
aagtagaagaaataaaggcagaaaaagaggctaaaactcaggctatacttttggagatggtgatactctctggaatcataggattaacaacttggaaaag

SEQ ID NO: 170722 - DNA, 96 bp, Homo sapiens
gctccagtcttttgactctccagaaaggaaacggattaagtactccagggaaactgacaggagagctcaaaggatggctactgacatgcagaggaa

SEQ ID NO: 170723 - DNA, 75 bp, Homo sapiens
catattttgaagtgtttacggcaaacggggattcagcgtccgatcctttggaacagggactcacgtgaagcttcc

SEQ ID NO: 170724 - DNA, 98 bp, Homo sapiens
ccaggaaagacatggagattctcttaaaaaggtgtctttcctgaagactatcttcccgtctcaaaatggacatgatggatccacggatgtacagcaga

SEQ ID NO: 170725 - DNA, 75 bp, Homo sapiens
ctagtctttccgcttcttgaatttctctctgtaaaggagatgatcatgacgcagtcctgaggtttaatggggcac

SEQ ID NO: 170726 - DNA, 100 bp, Homo sapiens
gcggccgctaagaggagaccaagaggcgggggctgcacttgacaaccagcatgccgagatggatgaatttcacccattcatcgaggcacttcttccacat

SEQ ID NO: 170727 - DNA, 75 bp, Homo sapiens
tgctgcggcgcggggaccgctgtgctctcgatggggcattctcttctcccaccctcgggactttaccccagtgtg

SEQ ID NO: 170728 - DNA, 79 bp, Homo sapiens
cagtcagaagaaggctgctattgaaagagagtatgcacagactccctgagaaatgtttcctcagccggtcatggccccc

SEQ ID NO: 170729 - DNA, 88 bp, Homo sapiens
tgggggattgctgttcagttctcgctttgattcagggaatctagcccacgtggagaaggtgaagctagaggaaccagacctcatcagc

SEQ ID NO: 170730 - DNA, 103 bp, Homo sapiens
ctgtgctcgcgctactctctctttctggcctggaggctatccagctgatcagggccaaagcggtcagtgagaaggaagtggactctggaaacgacatttatgg

SEQ ID NO: 170731 - DNA, 75 bp, Homo sapiens
gggctgagatgttgggagccatcaatcaggactcctctgatgatggcctgcacaaggaagaacctgggggtgatc

SEQ ID NO: 170732 - DNA, 97 bp, Homo sapiens
gagaggaccatcctgggtgctggccctgtgctggagtttgaacgccatgaccctgtggatgggagaattactgagaggcagtttggtggcatgctac

SEQ ID NO: 170733 - DNA, 96 bp, Homo sapiens
cacgaggttggtcatgaaagagattccttgcagagacagctcaacacggcacttccacagttgcttctgcaggaagcctttttggtggcatggtcc

SEQ ID NO: 170734 - DNA, 51 bp, Homo sapiens
gccgccgcttgtgctgcagccatggtggtcgtgtgatggtaacagatgctg

SEQ ID NO: 170735 - DNA, 80 bp, Homo sapiens
cagacagatcgctgtcaaaaccctaggtgctggagaatctggtaaaagcaccattgtgaagcagatgaggatcctgcatg

SEQ ID NO: 170736 - DNA, 86 bp, Homo sapiens
cctgtgcaggagctgaaaggcgggaaggcttattccaaggaaagaccacagcaagattctttcattcgtctcctcctagcctgggg

SEQ ID NO: 170737 - DNA, 100 bp, Homo sapiens
tgggtcgcagtcgcagccgctctccacggagggcaaagacccaagacggagtggccctggaaatccagccactcaacagccaggagggaatcgacaatga

SEQ ID NO: 170738 - DNA, 50 bp, Homo sapiens
ctaccgcagcctggaggagctggccgagctgaccccgcactacatctacc

SEQ ID NO: 170739 - DNA, 87 bp, Homo sapiens
ttgccctgggaaatagtaaccctgccaaatacatcagcttgtaggagacagaggtgtacgaagccatcgacagcagagatggagcat

SEQ ID NO: 170740 - DNA, 50 bp, Homo sapiens
tgaaggaccagatcttgatctaggatgtacagttacccagcacgtgtacc

SEQ ID NO: 170741 - DNA, 90 bp, Homo sapiens
ggaaaattaaagatgattatagccaaaaatggcccagacacagaaaggtccaatgatgcatcagcagcctccttctcagcaatacaatat

SEQ ID NO: 170742 - DNA, 100 bp, Homo sapiens
atactctagaatatacaaagacaaaaggagattctgatgaagaagttattcaagatgatgtgtcttgctgaatcagggctctcttatccctgccatcgac

SEQ ID NO: 170743 - DNA, 101 bp, Homo sapiens
actttcacggacaacctcagaggacaacgaagtgttcgattcatgatgttgctatcaaaagttgagaaattgtcagaagaaatcatggagataatgcaaaa

SEQ ID NO: 170744 - DNA, 100 bp, Homo sapiens
agagcgctactcctggcagtgcgtcaatcagagcgtcctgtgcggcatgatgggcccacctcctggtatgagacctcctatgggtcccccaatggggatc

SEQ ID NO: 170745 - DNA, 82 bp, Homo sapiens
taggcgaggaggatcagatctccgctcgagaatctgaaggtcacaccgacaaatctgaagcgggtttgccaggggagtgtac

SEQ ID NO: 170746 - DNA, 75 bp, Homo sapiens
gttttctatcagatgttccacgtaataatgctggtagacatagctgacattgagaatgaagagaaccgctactgt

SEQ ID NO: 170747 - DNA, 50 bp, Homo sapiens
ccattttctactgtccctgcgcgagatttgtttagtgaatgaccctaggc

SEQ ID NO: 170748 - DNA, 51 bp, Homo sapiens
ctgcgcgccgctgcccgcgccacagcttatctggatgtcctctcaatgcac

SEQ ID NO: 170749 - DNA, 100 bp, Homo sapiens
gatttttgggatgtttggaattgttgttatggtgatagagaccgagctctcttggggtttgtactcaaagaatatccaaggtatctccaagcacccaatt

SEQ ID NO: 170750 - DNA, 50 bp, Homo sapiens
cgcagaacgccatcaaccagctgtggtggctaatgccgtagcggcattat

SEQ ID NO: 170751 - DNA, 75 bp, Homo sapiens
ttggggccatttagtaacttctttgcaaggcacgtggactccctttaatccagtgactgtcaggtcgatcatatg

SEQ ID NO: 170752 - DNA, 96 bp, Homo sapiens
ccagcccagaattgttcagtggaagcccctgcttggatgcctgtccaccactgtactgacaagattagatgcaccccggttggaaacaaagtccct

SEQ ID NO: 170753 - DNA, 100 bp, Homo sapiens
tgcattgatgaaattaaagatgcatgctgatggcgataagtcattaccacagagaccttttaatcaaagtgaagtttggggaaagcattgaggacttgca

SEQ ID NO: 170754 - DNA, 100 bp, Homo sapiens
tccatgcatttggaaaccagacttgttcagctggacagtgctatcagcatggaattgtggcagctgtttgatcacattgtctcctgcatctctgacttct

SEQ ID NO: 170755 - DNA, 80 bp, Homo sapiens
ccctccagtgggggccatgcttcccagagcggagacaacagcagtgagcaaggaactttatattgctgttggaatatctg

SEQ ID NO: 170756 - DNA, 75 bp, Homo sapiens
cgcggtcaacgcgcagctggatgggatcatttcggacttcgaaggttgtggcagcactgcctgaaggtatgagac

SEQ ID NO: 170757 - DNA, 100 bp, Homo sapiens
ctactcccctgctatccccaacaagaggaaagacacacctaccaagaagccagtcaagcggccaggccgtttgagcaaggaagacattgaacgtatggtc

SEQ ID NO: 170758 - DNA, 75 bp, Homo sapiens
gacgctcacagtgctgggaaggaatctatccaagcggacaaggcaaaatctcagcaagttcggacctctagtaca

SEQ ID NO: 170759 - DNA, 51 bp, Homo sapiens
cttcgcgggcgattcgcgtagcctcagcttccgacttcgactccttacctt

SEQ ID NO: 170760 - DNA, 50 bp, Homo sapiens
ggctcactgcaacctctgcctcccgggctcaagcgatccttctgcctcag

SEQ ID NO: 170761 - DNA, 88 bp, Homo sapiens
cttgccatccctgtgtgacagcaatgaggtgaacccaggggccgaagcccacccagggagttgatgggaatggcatttactttacaag

SEQ ID NO: 170762 - DNA, 75 bp, Homo sapiens
gtcaccttgaactctgcacagcaagcccaggctcattatcaggtagttacttttggtgacgctgtccagttccca

SEQ ID NO: 170763 - DNA, 73 bp, Homo sapiens
gcgccacatgttcgtctggggcggctacaaggatcttaagattgaaagtgatgttcaagaaccaactgaacca

SEQ ID NO: 170764 - DNA, 100 bp, Homo sapiens
ccgaaccccagtcagaccgatctgctctgctctcgaataacatagctgatccagaagaactgttcacaaaattagagcgcattgggaaaggctcatttgg

SEQ ID NO: 170765 - DNA, 126 bp, Homo sapiens
aataaatagagttcacgatcctgtaactgccaaacccaagttggttggagatgtggattttgaagccgcttacaaacacgcagatggcaagaagattgatggcaggagggtccttgtggacgtgga

SEQ ID NO: 170766 - DNA, 100 bp, Homo sapiens
aatgagagggacaggagtatctgaggatggagaactcagcatgtggcaaaggagcagagaactttgacaagttcttcacacgaggacagcccgtcttaac

SEQ ID NO: 170767 - DNA, 75 bp, Homo sapiens
gggggaactagctggagggcaaggcgggaacacttttgtgccagaataatatccataatcaggcccatatgaaca

SEQ ID NO: 170768 - DNA, 82 bp, Homo sapiens
ggctgcttccagtgttcgccgagagatgtccagctcgccgctgtccaagaaacgtcgcgtgtccgggcctgatccaaagccg

SEQ ID NO: 170769 - DNA, 100 bp, Homo sapiens
cctggatcccgggctcgcgggggcgcggagaagaggatccaggaaagattcccctcttcccgcggcctcgccatggcgacccacggacagacttgcgcgc

SEQ ID NO: 170770 - DNA, 74 bp, Homo sapiens
aggggctgggctcctactgttcttagagatgtacctttctcaggtcaaatgggctctctcattcttggagtgaa

SEQ ID NO: 170771 - DNA, 100 bp, Homo sapiens
cccagtttggccgtcctagatcgggaacaaaggagtcaacgtgtggccgggcggccaaaggtaatccacgacttcttattctccttgaaggaaagcccag

SEQ ID NO: 170772 - DNA, 93 bp, Homo sapiens
tctcgctcggctgcgggaaatcgggctgaagcgactgagtccgcgatggagatgaaggatttgggggcagagcacttggcaggtcatgaaggg

SEQ ID NO: 170773 - DNA, 50 bp, Homo sapiens
gacaacatgtcccaacattacatcccacatttatgacattaacagagaac

SEQ ID NO: 170774 - DNA, 82 bp, Homo sapiens
gattcctctaaacaggcacagccaccctctgggactgcctccgggcctgccaggagcagatcgaagccctgctggagtcaag

SEQ ID NO: 170775 - DNA, 75 bp, Homo sapiens
cctgctttgattcattgaaaactttctaagaagatcactaataatattgtttattttcttccaagaaatgctgat

SEQ ID NO: 170776 - DNA, 100 bp, Homo sapiens
gtagctacaggggaaaatattctgaggccattgagaaactagtcgctcttctcaacacgctggacaggtggattgatgagactcctccagtggaccagcc

SEQ ID NO: 170777 - DNA, 75 bp, Homo sapiens
acaagtccagacccaggagagcaaggcccagaaagagctgagatctgtatctgtggacctgaatgttgatccctc

SEQ ID NO: 170778 - DNA, 76 bp, Homo sapiens
ccagccatgacggcgatgtgcggatatgggataagaggaaggaccctctattgtcccaggcctgtgttggctgcct

SEQ ID NO: 170779 - DNA, 100 bp, Homo sapiens
ggaacacggaggataaagtcagccatgtgagcactgggggtggtgccagtttggagctcctggaagggccgcgatgggcctcttggaacattggtgtgtt

SEQ ID NO: 170780 - DNA, 80 bp, Homo sapiens
cggcccgtggccatcggcagctgcggccacactaagactttgaccccgacgcaggcttcagtgattgccgcggatcagaa

SEQ ID NO: 170781 - DNA, 51 bp, Homo sapiens
cctgtacagcctgcagaactgtgcagacccacctcgaaaaccccaccaagt

SEQ ID NO: 170782 - DNA, 83 bp, Homo sapiens
gataaaaagagatgtggggggattctcgacctgctaacagaactggaccttttcggaattcgaatttagagtttaatttctca

SEQ ID NO: 170783 - DNA, 100 bp, Homo sapiens
gtcaccagcttttcggaacagcagagacacagagggcagtcatgaggaatagctattcagtcagacagaaccacttatcacgttttgcagtatctcctga

SEQ ID NO: 170784 - DNA, 98 bp, Homo sapiens
cggagaagttccagctcttcacgcccttctccctgggcttcgagttccggcccggccacgagtattactacatctgacacattggcgtgagacctggg

SEQ ID NO: 170785 - DNA, 73 bp, Homo sapiens
aaagtctgtgccccaatggttcgatattcaaaggcaagtgtccagagaatggctgggatgaaagtacacttga

SEQ ID NO: 170786 - DNA, 82 bp, Homo sapiens
gacggcgccttcggcaaggtttacaagggttctcatgtatcagccatcttctgtaagggtgcccagtgtgacttcggttgat

SEQ ID NO: 170787 - DNA, 119 bp, Homo sapiens
ggacggggatggggacggtttcgtccgcatcgaggacttcatccagtttgctacggtctacggggcagagcaggtatggatcctggcgggagccagtcaacccctattatgtcaatgcc

SEQ ID NO: 170788 - DNA, 100 bp, Homo sapiens
tgtatttcatgccagagagtttggaaaaataattaacttcaagaccccagaggatgccaggccccactgtgttctccttgcctcaaaagaaaactcggca

SEQ ID NO: 170789 - DNA, 75 bp, Homo sapiens
atcccagccatcacctggatttacctgttttctgggagcttcgaaggaatggttccccaaggtgaggccaacttt

SEQ ID NO: 170790 - DNA, 75 bp, Homo sapiens
tggatatggtggcagtggggatggctataatggatttggtaatgatggtaactatggtggtggtgggaactataa

SEQ ID NO: 170791 - DNA, 50 bp, Homo sapiens
gagcggagccaagatgcgaatgggagttttccgtctgatgaaggttggcc

SEQ ID NO: 170792 - DNA, 75 bp, Homo sapiens
gcctcttcttagttgatgatttagttgattctctgaagtcccaggacatcaaagctctgcagaaagaactcgagc

SEQ ID NO: 170793 - DNA, 50 bp, Homo sapiens
cggaactttggaaaaactgtgaggagattgcatcctacctgatcaccttt

SEQ ID NO: 170794 - DNA, 82 bp, Homo sapiens
tctcagttcacatcaccagtaattatctcaaacagaaacaggaccttgccctgtcactcaggatggagttcagtggtcctat

SEQ ID NO: 170795 - DNA, 75 bp, Homo sapiens
agctgccaagttgaaaatggacgagtaatcgcctgctttgattcattgaaatgtgtatgtacagagaaccatcgc

SEQ ID NO: 170796 - DNA, 83 bp, Homo sapiens
ggagttcgagcagatcgacaagtccgggagctgggcggccatttaccagggtttggaaatcccttgtctccaggttgctggga

SEQ ID NO: 170797 - DNA, 75 bp, Homo sapiens
gattggggaaaaatccagagaccccctgaagattcgtattggtaaaggttttcaaggtgtcatgaaaagatgggg

SEQ ID NO: 170798 - DNA, 75 bp, Homo sapiens
gagatccgcgaaacggagaggcggcgataaaggataggttacagttacgggtgctcttgcgtcgggaagacgtcg

SEQ ID NO: 170799 - DNA, 96 bp, Homo sapiens
atttaatgtagagacggtgacgtacaaaaaccttaaattccaagtctgggatttaggaggacagacaagtatcagagtttcgctcttgttgcccag

SEQ ID NO: 170800 - DNA, 75 bp, Homo sapiens
tggcctggaggctatccagcctgaataccactagaaacatacctgtaaccagagacagctgattatagctttctg

SEQ ID NO: 170801 - DNA, 96 bp, Homo sapiens
agcaatcctaccatgtcagccttcccagtagctggaactacaggaaacccagaagttctgtgaacaagtccatgctgccatcaaggcatttattgc

SEQ ID NO: 170802 - DNA, 100 bp, Homo sapiens
cctggggtcggcgacggctgctcttttcgttctgtcgcctgcccgatggacgagcctcccgggaagcccctcagctagatgggcagtagcgaaccccttc

SEQ ID NO: 170803 - DNA, 100 bp, Homo sapiens
cggctgctgcagcccgcgcacagctgctcccttcgccttcgccctttccacctcgcggcagttcgattgttgatccatttcagatacttgtggcagcaaa

SEQ ID NO: 170804 - DNA, 100 bp, Homo sapiens
ttatgatgggaacgttcacaaagagttttggtgcttctggaggatatattggaggcaagaaggttatgagccaagaaatccaggaacagctgcataagca

SEQ ID NO: 170805 - DNA, 50 bp, Homo sapiens
cagcttcggaacaagagaccctggactctgaaaaggaatcttgcccaagc

SEQ ID NO: 170806 - DNA, 74 bp, Homo sapiens
acatctgggggccacaaatgctccttctcctggagacgcaactcaagatatcagttttagagaatgtggcgtgg

SEQ ID NO: 170807 - DNA, 90 bp, Homo sapiens
gatgaatctggttatagatggacaagagacgatcattctgcaagcaggcaacctgaatacaggtaaagtgttgagagaggagaaccagtg

SEQ ID NO: 170808 - DNA, 120 bp, Homo sapiens
tgtgtaaaggttgccataaaggacaaacaagtgaaatacttcatacattacagtggttggaataaaaaaactgctagtgtgcctgagacttacattgtgaagatacttttttaaaacttg

SEQ ID NO: 170809 - DNA, 100 bp, Homo sapiens
ccttggtcaaagaagtgaccaaaaagtcatctacatttcaggcacagagcagatgctgtcccatggcaccgctgatgtggtcttagaggcctgcacagac

SEQ ID NO: 170810 - DNA, 83 bp, Homo sapiens
ggacagatcaacggcaggagaggtttgttccctgacaactttgtaagagtataatgggtctctcccaaatggcgatagaggaa

SEQ ID NO: 170811 - DNA, 82 bp, Homo sapiens
agaacgcttagaaagagatcacatctttcgacttgaaaaacaatttcctgatcaaattgtaggatttgttcctagaaagcac

SEQ ID NO: 170812 - DNA, 134 bp, Homo sapiens
gttcaaggcaagaccgaattcagaaggatatcgacgtcgtgatccagaagtccagagctgaggactgcctgtttgcagacaatgcagatcttcgtgaagactctgactggtaagaccatcaccctcgaggttga

SEQ ID NO: 170813 - DNA, 100 bp, Homo sapiens
gacatttcttcggcattctgcaacagcccaagagacgatgaagatattatctctgaaaaagaagaaaatattttatctttatctttgaagcatctagagt

SEQ ID NO: 170814 - DNA, 100 bp, Homo sapiens
agtgctgctcaactgcctcatgtacaagatgtgttactatcgctttggacaggtttacacagaagccagatctaaacgctcttcccacagcaatgcttat

SEQ ID NO: 170815 - DNA, 95 bp, Homo sapiens
tgggggttcagattgcaaggtggcaaggagcagaagcagcccttacaagttgcaaagacacggaatcgatttgaaggaacaaggtcagaagtgga

SEQ ID NO: 170816 - DNA, 98 bp, Homo sapiens
cgctccccggggaccgggccggcgccatggaccgaggccaggatgaagattatggaagagattcgggccctcccactaagaaaattcgatcatctccc

SEQ ID NO: 170817 - DNA, 98 bp, Homo sapiens
ccaataaccaggtgcttggcaaaatcgagcgggccattgactacgtctactttgagaactcctccagcaacccatacctgatccggagaatcgaggag

SEQ ID NO: 170818 - DNA, 56 bp, Homo sapiens
agagagagcgcagaatatcaagtgctgtctttcatgaatgtagaatggaattttcc

SEQ ID NO: 170819 - DNA, 101 bp, Homo sapiens
ggggccacgctgcgggcccgggccatggccgccgccgatgccgagatgagcagcaccagcagtaagagggctccgaccacggcaacccagaggctgaagca

SEQ ID NO: 170820 - DNA, 100 bp, Homo sapiens
acaaggcagctcgctctgggagcctagaatgcatcagtgcccttgtggcgaatggggctcacgtcgactccctcgtgaaagatgcttctgttcctctgat

SEQ ID NO: 170821 - DNA, 83 bp, Homo sapiens
cactttgcatcccacgccggaggaggcattaacgagaccgggtaaggaaatctggcattttttaaagtttgcgccccacaaag

SEQ ID NO: 170822 - DNA, 82 bp, Homo sapiens
ttccactgttcctgccacagcggcttcgagctctcctctgatggcaggacctgccaagacttcccaagtaagaagcggaaga

SEQ ID NO: 170823 - DNA, 100 bp, Homo sapiens
cgagcgccgcgaacttggtggccagcgccgcgcccggggccgtgcgctctcgggccactcggccgcaggatgaagtaggtgttccaggtagcaattcagc

SEQ ID NO: 170824 - DNA, 75 bp, Homo sapiens
tttggaagatgcagatgagaaggttcagttggcaaaccagatatatgacttggcaacgcggtaaaaatattgctt

SEQ ID NO: 170825 - DNA, 100 bp, Homo sapiens
gcctcgacccagggcccgcgggccaggagagcgctcggcgggtgaccgaactagcagttgcccagtgatcttcatattagatgaatttgatctttttgct

SEQ ID NO: 170826 - DNA, 90 bp, Homo sapiens
ctccggaggccggggtaactggcagtttggcaatgaggagcagcagctggcgtgggccaagcgggagagcgagaaggcggaacaggagag

SEQ ID NO: 170827 - DNA, 108 bp, Homo sapiens
tccaatgggcctttccagcccgtggtccttctccatattcgagagccaaggattgtcaccagtgaagaggtcattattcgagacagccctgttctccctgtcaccctg

SEQ ID NO: 170828 - DNA, 50 bp, Homo sapiens
atatggcaactttgaaagatagctgctttgctggctctgcaagaaaatgg

SEQ ID NO: 170829 - DNA, 100 bp, Homo sapiens
catgaacagccggaagatggatgcccctttggtgccctgacgcagcgcctcctgcaggccctggtggaggatgagaaatactacttacggtcacttggag

SEQ ID NO: 170830 - DNA, 75 bp, Homo sapiens
gattctcgacctgctaacagaactggaccttttcggaacttgtaatagctggcatcgttgagaatgaatggaaaa

SEQ ID NO: 170831 - DNA, 90 bp, Homo sapiens
gtttctcggaaagtagcctcttctgcaagtggggcattcacacaggttacgaagtgacagtgctggtgcgggactcctccaggctgccat

SEQ ID NO: 170832 - DNA, 82 bp, Homo sapiens
gcggtggcggcggcggcagctgcagtgacatgtccagcatgaatcccgaataggatcgatttgcttagtggtataatacctg

SEQ ID NO: 170833 - DNA, 82 bp, Homo sapiens
ccgcatcaagagcttcaagaacaagggccgcgatgtggaaataaccgtctcctcaggaggaatgttggttcagaaactgaac

SEQ ID NO: 170834 - DNA, 50 bp, Homo sapiens
gcattttcccgcgtgcgtgtggtgtcttttatgaataatcaaaagcagca

SEQ ID NO: 170835 - DNA, 82 bp, Homo sapiens
tgattatctaccgggacctcatcagccgccaagaagcttgagagaagaaaaatttcagaaaaattgtctcaatttgactaga

SEQ ID NO: 170836 - DNA, 94 bp, Homo sapiens
ctgtcttcggtggactccttcggcagtccacccaccgccgccgcctcccagttcaaaaggtgatgacctatcaacagccattctcaaacagaag

SEQ ID NO: 170837 - DNA, 75 bp, Homo sapiens
acttgactggtcttacattgctgcatcaagaaacccaagctgctgaggtccccagtctatgtgaggatctcctgt

SEQ ID NO: 170838 - DNA, 100 bp, Homo sapiens
tgccgtccgaagtcggcgacagcggccggggcgcaggcgcccgtgcggaatggcaggtcaaaatgcagatcttcgtgaaaacccttaccggcaagaccat

SEQ ID NO: 170839 - DNA, 82 bp, Homo sapiens
gcgggggggagagccactgacgccgggaccgggaccgccgccgccgccgccaccatgcaaacggggattcagcgtccgatcc

SEQ ID NO: 170840 - DNA, 75 bp, Homo sapiens
gagaagatcttctgttgtcatggaggtgtgcaactgaggaacatggctcaagaaactaatcacagccaagtgcct

SEQ ID NO: 170841 - DNA, 100 bp, Homo sapiens
tttgttattggagaaacatgcagattatatcgcatcctatggctcaaagaaagatgattatcaattctgtggtgttcttggtcacacatttatggagttt

SEQ ID NO: 170842 - DNA, 100 bp, Homo sapiens
atactgcggaggctggtggccctgctggaggaggaggcagaagtcattaaccagaagggacgtccagatcggtgacatcgtcacagtgggcgagtgccgg

SEQ ID NO: 170843 - DNA, 101 bp, Homo sapiens
tctctgctctccacagggctccccgccccacccggcctgataaagcgcgccgactgggctacaaggccaagcaaggtggttatcaccaggctaaaactgga

SEQ ID NO: 170844 - DNA, 75 bp, Homo sapiens
ggagacactgtggaaagtctggaccgagctcttggatgttcttggacttgacggctggagtgcaatggcatgatc

SEQ ID NO: 170845 - DNA, 74 bp, Homo sapiens
cttgtgaacattcaagtgaagcaaaagcctttcatgattatgagcttgaaatcgtcattggagatgaacacatt

SEQ ID NO: 170846 - DNA, 82 bp, Homo sapiens
tgcgaccccagtcggtgctccggggaggtcacctgacgaggagatgaataatacggcagctagtccaatgtctactgcaact

SEQ ID NO: 170847 - DNA, 100 bp, Homo sapiens
ccctgtttcgccacagttcctaccttatgagctcggttttcttatgcttataagagtggaacaggtggatctaggatccggcttccaacatgtggcagct

SEQ ID NO: 170848 - DNA, 100 bp, Homo sapiens
cctttcctcttgacactgcagctgcagtcaacctcttccccaatttcaatgcgcacaagtgaagctgatgtggaggctgtcatggataagttgtttgatg

SEQ ID NO: 170849 - DNA, 100 bp, Homo sapiens
aagatttctggccagtggagagaggaattcctcaagacaccattccaggtgccgacgccaccgccgagcccatgatcctggaacagtacgtggtggtgtc

SEQ ID NO: 170850 - DNA, 100 bp, Homo sapiens
cccacgtcccatttcgcccctcgcgtccggagtccccgtggccagatggctctgagagattcctctgcgaatctgtttttagctatcaagtggcatccac

SEQ ID NO: 170851 - DNA, 101 bp, Homo sapiens
gccgggagcgagctgggagggagccgcgcgcctttgtgcgcgcgccgagacatccacgacagcgatggcagttccagcagcagccaccagagcctcaagag

SEQ ID NO: 170852 - DNA, 100 bp, Homo sapiens
tcagggcatacatctttcttcgacaaaggatggagtcccctgtttccacaccagcagtgctgccaatacaccttttggtgccagtggtcaacaatgacat

SEQ ID NO: 170853 - DNA, 131 bp, Homo sapiens
cgggtttccgcggagtgccgcccggctccgctctgccgccggcgcggctcatgggcagagtcggccgggcgggccggaacatgaaaggctcccggagcagcgctgactcctccaggaaacactgaggcaga

SEQ ID NO: 170854 - DNA, 82 bp, Homo sapiens
taatcatgtgggaaagcctttactgaagaagccaatgggaccagcccactggatccccgtcgaggtcaagatcaagatccag

SEQ ID NO: 170855 - DNA, 100 bp, Homo sapiens
gtgggaaccgccgcagctccacactccaggtacttcttccaaggacctaggtctctcgcccatcggaaagggttgctttttgtgaccaacattgatagct

SEQ ID NO: 170856 - DNA, 102 bp, Homo sapiens
caaaattacaagtggaaatccacaaggattcttttcaatacatcctaaaacaggctgccaacatgaagacactggatgcggaatcaggaggagatgtataca

SEQ ID NO: 170857 - DNA, 99 bp, Homo sapiens
tcagtcttcccactcagtcatcttcagtacttctacccggaggaaattgctggactcgctgaagagagactacgcaggaaagccccagccacccatcaa

SEQ ID NO: 170858 - DNA, 101 bp, Homo sapiens
gattccagaattggaaataacgggagggaggacctggtccagcttcccttcctcaaataaggaaattgacacctggcgtgctgtgcaaccatattgcttct

SEQ ID NO: 170859 - DNA, 75 bp, Homo sapiens
gcgggcccgggctgcggcgtgtgcgcgcccgccagctgctccggagatacgggaagagtgacccattttgcttgt

SEQ ID NO: 170860 - DNA, 98 bp, Homo sapiens
tcagaacatgggtccgtggtcgtttgtttctccaaggtttgaaaagcagctggcctgcaagaaatctcctgcaaagaagctgagccatgcaattagta

SEQ ID NO: 170861 - DNA, 100 bp, Homo sapiens
caaagaagcatgcggtggcaatcatctttcacgatgaaacatcgaagacatttgcctgtgagtcagaattttgtacgtcatcactgggtgcacaggcgtc

SEQ ID NO: 170862 - DNA, 95 bp, Homo sapiens
taaggattccaagtaactcttatttgatttcctcctctgatgctcctcttcagcctttggtatcctctccttctctgcaagctgctgttgacaaa

SEQ ID NO: 170863 - DNA, 124 bp, Homo sapiens
accagcagggctgtgatggaaataatgactaaaacaattgaataccttcaacccaatccagatccaaattccagaatttgtggacatttactcataggtgcagccaagaattcttttgcaaaac

SEQ ID NO: 170864 - DNA, 100 bp, Homo sapiens
acacactaaagattgggcagtcactggggagaacgccaaatttgagtttcatcatggtgactatgaaaaacagtttctgcatgtactgagccgcaaggac

SEQ ID NO: 170865 - DNA, 116 bp, Homo sapiens
attgttcccatcatccaccgcgaccttaagtccagcaacaacaatctgctgggaatttcttgggttgacagctcttggatccctattttgaacagtggtagtgtcctggattactt

SEQ ID NO: 170866 - DNA, 75 bp, Homo sapiens
tggagtccggacatctgaaacttgaataactgaagtgaagtgatggactccgatttggagagtagtaagacgtga

SEQ ID NO: 170867 - DNA, 82 bp, Homo sapiens
gcctctcgaacgagtgtgggcgcgaggcagcttccccgggcgctgcctggacaggcctgcctgcgtgctgggacatgtctgg

SEQ ID NO: 170868 - DNA, 75 bp, Homo sapiens
accgttataactttcccaatctcaatatggatgtgcataaaggaagcttaaagaacctgcttctttctgcagtag

SEQ ID NO: 170869 - DNA, 78 bp, Homo sapiens
aaacatcaaagctggattagaacatctggttcgtaatgttcttaatgatgcagtggatttactggaattccgtgatag

SEQ ID NO: 170870 - DNA, 100 bp, Homo sapiens
aagtgcagctgcctcagttcttagcgcaggttgaaatcggctcgagatgttgtatctaggactggtcattcattggctcttggttgtttgcatcgttatg

SEQ ID NO: 170871 - DNA, 100 bp, Homo sapiens
ggattcgaactgcacttctggagatcttcgtgaagactctgactggtaagaccatcaccctcgaggttgagcccagtgacaccatcgagaatgtcaaggc

SEQ ID NO: 170872 - DNA, 82 bp, Homo sapiens
caaggctgcagaagccaaagccacggccctgggaggagcggggacactgaggacctctctccaaattggcctctcaactcac

SEQ ID NO: 170873 - DNA, 98 bp, Homo sapiens
tttgaccatcagtctgtgacctgccccttctctttacgctttttctcctccgtgacagccagagtaatccaaaggcatttgtactcacactgtgtcat

SEQ ID NO: 170874 - DNA, 83 bp, Homo sapiens
gcagaacgccatcaaccagctgtggccagcatcgaaatgttcagccttttagtgatgaagatgcatcaattgaaacaatgagc

SEQ ID NO: 170875 - DNA, 50 bp, Homo sapiens
aagagtttggcgttgaaagaagtggccctcgggaccaaggatcacgtcat

SEQ ID NO: 170876 - DNA, 75 bp, Homo sapiens
cgaggaggtcatgaaggacctgagcctgacgcgggccgcgcggttactccacaggatccgctgaacataggatgt

SEQ ID NO: 170877 - DNA, 103 bp, Homo sapiens
gcaacaggaaagtctaagggatatggctttgtctcctttttcaacaaatgggtaatacgaggaaatagtatcatcatgttagaagccttggaacgagtataaa

SEQ ID NO: 170878 - DNA, 83 bp, Homo sapiens
gcccgggcggcgggcggagacgtgggcgccctccccgccaaggcccgtgcgaggaagctcttcgtgggcggtcttgactggag

SEQ ID NO: 170879 - DNA, 100 bp, Homo sapiens
accatgagaatgtgtctcttgccaaagcgaaggctccctacacaccttttctcactgaattgatgtaccagaatctaaaggtgctgattgaccctgtttc

SEQ ID NO: 170880 - DNA, 100 bp, Homo sapiens
ctaactagctccaggttaggccgagctttgcgggaaagcagcgagacacctatggctgccgatgaaggctcagcagagaaacaggcaggagaggcccaca

SEQ ID NO: 170881 - DNA, 100 bp, Homo sapiens
tggggagctgcatcgagaaagcccggccctactatgaggctcggcggctggctaaggaggtctcggtccagctcgacttccagctcaggctccagcacca

SEQ ID NO: 170882 - DNA, 128 bp, Homo sapiens
ccgaatcaagcggaagaataactcaacaacaacaaacaacagtaagccttcgtcactgccaaccttagctgcactgggtgttcaacagccatcactccttggagcatctcctaccatttatacacagc

SEQ ID NO: 170883 - DNA, 100 bp, Homo sapiens
ctcggtgcagggctccaccccgtcgcctcgacagatgaaggatttgggggcagagcacttggcaggtcatgaaggggtccaacttctcgggttgttgaac

SEQ ID NO: 170884 - DNA, 100 bp, Homo sapiens
cggccgggagaagcatgggaaggaggccgagccgggatctcaggtcctcgggggcggcggccacgccaaggacggagctccttaataagcatttatagtc

SEQ ID NO: 170885 - DNA, 75 bp, Homo sapiens
tctcgctcagaggagatgcaccggctcacggaaaatgtctataagatcccagaagagcacgacctggagagtcag

SEQ ID NO: 170886 - DNA, 76 bp, Homo sapiens
gtggtttgccaccctgaccaccacacccaccagatccgccgtcactggggtggcaatgtcctgggtcctaagtctg

SEQ ID NO: 170887 - DNA, 100 bp, Homo sapiens
acaggcttactgaatatcctcttgtaattaatgcagtaaaacgcttccatatttatccagagccatgctgtgacctacaagcaaactaaatagccaacat

SEQ ID NO: 170888 - DNA, 50 bp, Homo sapiens
attaagagagctcaaataatggatcttttgggaaccaggcttgaaaatga

SEQ ID NO: 170889 - DNA, 100 bp, Homo sapiens
attcattattacatgaagtatcatgtttctgtggacccccaaaagtacaagggcatatttaacggattctcagttacacttaaagaggatggtgttcgtg

SEQ ID NO: 170890 - DNA, 96 bp, Homo sapiens
ctcacccaggcccctgtcaagaaggtgccggtggtgcgagtcttcggagcgaccccggcaggttgctgttgaagaaatctggttgcagaacaccac

SEQ ID NO: 170891 - DNA, 73 bp, Homo sapiens
agactcctcctatgcagaggccggtggagccccaggagggaccgcacaagatacagaaggtggtcatggcact

SEQ ID NO: 170892 - DNA, 75 bp, Homo sapiens
atttacctccctggtctcaggtgtctctcacagacatagggcctgattacattccaacagaggaagaaaggagag

SEQ ID NO: 170893 - DNA, 90 bp, Homo sapiens
taccatcacctcatccagttcgctattttgataactcaagtttaggcctttgtccaggacaaggacacactcagcattcactacctcatg

SEQ ID NO: 170894 - DNA, 98 bp, Homo sapiens
tttgccacttcttcacggaccagtttcagttcgccgatgggaaacccggagaccaaatccttggtgatgcagaagatggggaagaatatgatgaccct

SEQ ID NO: 170895 - DNA, 50 bp, Homo sapiens
gcctccccagtagctgggattacagcatgaccaacggcggcaagaccacg

SEQ ID NO: 170896 - DNA, 74 bp, Homo sapiens
tgaagagggaagacacgcggaaacagacatagggcctgattacattccaacagaggaagaaaggagagtcttcg

SEQ ID NO: 170897 - DNA, 80 bp, Homo sapiens
gaggggctccggctggtctgtggtgagatgttggcgccagcagctggtgagggccctggggtggacctggcggccaaagc

SEQ ID NO: 170898 - DNA, 116 bp, Homo sapiens
gtcatggatctggaagctgagggcacgtgtttgcggttcagccctttgatgaccgcagcagttccaggcgaaccctgactatcaaatgagtggagatgacacccagcatatccagc

SEQ ID NO: 170899 - DNA, 130 bp, Homo sapiens
ggctcccttcgcctccaggatgcgctgagccctacaacacccccagcggccgccggctcccccacgaggtcaaaatgcagatcttcgtgaaaacccttaccggcaagaccatcacccttgaggtggagcc

SEQ ID NO: 170900 - DNA, 98 bp, Homo sapiens
cgcggcggctgctgctgctgcagtgggacaggtggcggcgaccggcggcgtccgaggaggtctcggcgcggaagatggccggcggcgtggacggcccc

SEQ ID NO: 170901 - DNA, 75 bp, Homo sapiens
ggggatggacgagtggactttgaagagtttgtacagatgatgactgcaaagtgaaggccccccgggcagctggcg

SEQ ID NO: 170902 - DNA, 82 bp, Homo sapiens
cctggagcctcagttggaagcagccgatccagcctgcggagcctgtggggcaggattttggccccaaacagtaattatcaag

SEQ ID NO: 170903 - DNA, 100 bp, Homo sapiens
ttccagttcattcctagctcagaaagcaacgttttgagccacaactgtcacaactccaggacctccggctagcctgtttcagccacctcgtcgtcctggc

SEQ ID NO: 170904 - DNA, 83 bp, Homo sapiens
ctcagtactctttgccgtacccaccggagcctggcgcagcctccctctattaccagagaaccatggagtctggcagtaccgcc

SEQ ID NO: 170905 - DNA, 90 bp, Homo sapiens
gcgccgctgaacggatggctgagggagccccgcggatcgtttaggaaagccggccaggagaccctcctgttcttaactgtgggcgatgag

SEQ ID NO: 170906 - DNA, 75 bp, Homo sapiens
cagaacagttggatcttgctcagtctctgtcagaggaagatcccttgtttacaggcagcattaagagcagaccca

SEQ ID NO: 170907 - DNA, 100 bp, Homo sapiens
gaaaaaatcccaaggtctgcaaaggtagacgttacatccaagaggaaataatccaggcaaggaagcacaagctgatcaagatgtgtagttctgtggctgc

SEQ ID NO: 170908 - DNA, 100 bp, Homo sapiens
ctggattacaggccaaattagcaagttaatgttgaagaaggaaaatgcggaagtcgtcatttgacaagttttataaatgagtatttgaagctcaggaata

SEQ ID NO: 170909 - DNA, 101 bp, Homo sapiens
gtggcagcggcaggagagtccggccgcgacaggacggagcctatcaacccagataaagcgggacctcctctctggtagaggtgcagggggcagtactcaac

SEQ ID NO: 170910 - DNA, 82 bp, Homo sapiens
atcaagttcaagagcgcgggacccggtcagaagctcaaagagtccgtggggctccccacaggtgcaggaagccgccgcccag

SEQ ID NO: 170911 - DNA, 74 bp, Homo sapiens
cctgtctgatggccgctttctcggtcggcaccgccatggtgaccctggcaaagatgagagtgcacatttcgtcc

SEQ ID NO: 170912 - DNA, 50 bp, Homo sapiens
caaccaaataggaccaatggagtctgaaaacttagagaatacagtaatca

SEQ ID NO: 170913 - DNA, 104 bp, Homo sapiens
agaagaccaagtacctgcagatcctgacctctctgatgagatggatcgatgatatcatcaagttgaatcgaaaggaagggaagaagcagaattttccaagacta

SEQ ID NO: 170914 - DNA, 140 bp, Homo sapiens
gcgatggcgggggcggcgggactcacggcagaagtgagctggaaggtcttggagcgaagagctcggaccaagcgctcagagataattgacgaccttgccaacctagtggagaacacagatgaaaaacttcgcaatgaaac

SEQ ID NO: 170915 - DNA, 100 bp, Homo sapiens
gcagcgcagtgcagatccgcaggcgcaaggcttcaggcgacccgtactgggcctactctggattcactccttctccagttgcacagccacacccttcagc

SEQ ID NO: 170916 - DNA, 82 bp, Homo sapiens
caaacacaggattcaccacagtacttcacatcgtcgttcacatgggctggatgaacatcgtactgagcaaaagaagttaaag

SEQ ID NO: 170917 - DNA, 50 bp, Homo sapiens
gggacacagacccccagcccgcccaacggaatctcgctctgtcacccagg

SEQ ID NO: 170918 - DNA, 100 bp, Homo sapiens
agatcaaaacagttgaattacaaggaaagaagatcaagctacagatatggttgcacgttttcaaaaaatacctaatggtgaaaatgagacaatgattcct

SEQ ID NO: 170919 - DNA, 98 bp, Homo sapiens
gccggtactgttgaaagcgacaagtggaggcgccgctctagcggccgggactctgaactatggcgctcgcaaaggatctccttcatccctctccagaa

SEQ ID NO: 170920 - DNA, 73 bp, Homo sapiens
gctgtcctcgtccccagcggtcccgcccaacgcccgactcttttgaagaaaacaggtctgaaacaaggtctta

SEQ ID NO: 170921 - DNA, 100 bp, Homo sapiens
cggggacccaggagtttcctgtgtccagcgctgccggagccgcctgagagtgtgaacatggctacgcctcttcattcccgtccatgccgagcccccgact

SEQ ID NO: 170922 - DNA, 74 bp, Homo sapiens
aagactaactcaaagcttcaagaagaggttcaaaatggaaagtatttattgaccaaattaacaggtctttggag

SEQ ID NO: 170923 - DNA, 100 bp, Homo sapiens
ctggaatagaagagaatgacctagcaaaagttgatgatcttccccctgcagacagtgagcaagctgacattgcgaggatgctatataaagacacatgtca

SEQ ID NO: 170924 - DNA, 96 bp, Homo sapiens
cctctctataggcctctccgcttatattggcttcattgatggcccatggccttttacccacccaggatgaaatctttgacatggtaaaaccaaagg

SEQ ID NO: 170925 - DNA, 74 bp, Homo sapiens
ctcgacctcgtgaagatccgcttcgccggctgtctctaccaggccagaatttggggcaggcaagattttcagca

SEQ ID NO: 170926 - DNA, 74 bp, Homo sapiens
gccgccacctcctctgatctacgaaagtcatgttacccaacaccgggcaaagggcgttgtgaatacagctgtgt

SEQ ID NO: 170927 - DNA, 97 bp, Homo sapiens
ggctgttggcttcacccttggagcggcttttgtctacttggctgacctcctgatgcctcacttgatgaagaactgccagcatgcgaatgctgaacgt

SEQ ID NO: 170928 - DNA, 75 bp, Homo sapiens
aaagggcaggagtgcggccaccaagacttcaccacaaagaaaacaccagcagccccagcaaagaaaaccagcact

SEQ ID NO: 170929 - DNA, 100 bp, Homo sapiens
cagcactggactcatggaggctgagcatttattcaggtggttagacgatgctattattgacgagattacacccaagctgatcagagattggcccaatatt

SEQ ID NO: 170930 - DNA, 100 bp, Homo sapiens
tgaaacgaaatgtctgaagccccagctgcctcttgaggaggcaagtgaggcctatctggttggcctttttgaagacaccaacctgtgtgctatccatgcc

SEQ ID NO: 170931 - DNA, 82 bp, Homo sapiens
tgctcgtgattgcatttgattgcaaggagacaggggtggcccagttgaaatccttcccttcctctaccttggaagtgcctac

SEQ ID NO: 170932 - DNA, 98 bp, Homo sapiens
gtgggtttatctcaaggcctgagtagccggtaacaaacgagggttcccgggattggaccgacgcagccatgggtgtcctgatgtcagaagaagaagtg

SEQ ID NO: 170933 - DNA, 97 bp, Homo sapiens
gtgtgattgaaccagacactgatgctcctcaagaaatgggagatgaaaatgcggagtttgggcgtcatagactaaacccagaaaacagaacattggg

SEQ ID NO: 170934 - DNA, 82 bp, Homo sapiens
tggagagagaccagacctgcaagctctttgacacacagcagttcttgtcagtgactgagttttcaaagaaaacaggagacta

SEQ ID NO: 170935 - DNA, 75 bp, Homo sapiens
gctggattgagtcagataacagactttgaagaatatcctgaacatagaacgaactttttcttactacttcaggct

SEQ ID NO: 170936 - DNA, 83 bp, Homo sapiens
cttcaaggataagggcgacagcaacagctctgccggctggaaggcttcaacggaccacaccaaaatgccatctcaaatggaac

SEQ ID NO: 170937 - DNA, 101 bp, Homo sapiens
tgtgcaccggctggctgaggaaatcgcctcccgagaagaagttgaggcgctatatcagcggtttgagtgctacgtttgcagaaattttcttggaaataatc

SEQ ID NO: 170938 - DNA, 100 bp, Homo sapiens
ccgggttgggctgtgacgctgctgctggggtcagggccaattcctgtccccccagcagcatggcatcgtgtgctgaaccctctgagccctctgccccact

SEQ ID NO: 170939 - DNA, 98 bp, Homo sapiens
caagaagcagccgccaaagtccttgaggagtatggagctggagtgtgcagtactcggcaggaaattggtctctaattaacagaagatggcaaagccca

SEQ ID NO: 170940 - DNA, 74 bp, Homo sapiens
tccatttcaactacagatactttgaagtagaagaagctgatgacatgcacatgatggtgtccaagccagaacag

SEQ ID NO: 170941 - DNA, 74 bp, Homo sapiens
tgaaccggcacctgcacacctggatccaggataacggaggctggttgatgaggaatctggattaaaggattcag

SEQ ID NO: 170942 - DNA, 130 bp, Homo sapiens
acactcattccagagctctcatgttctgcacctcaggagggaattcagcctcagtgatgtccatgagtgttacctggaatgtcagagagctgaaagcagtcatattttgggatcatgcacctactgcggc

SEQ ID NO: 170943 - DNA, 75 bp, Homo sapiens
aagtatttgatgtcttagagaaacttggagaaggttacatcatgctgatgacagcttcctggtcctcaccacaga

SEQ ID NO: 170944 - DNA, 100 bp, Homo sapiens
gcgtttaagagctgcgggccgggtgcggacggcggaggcggcgggactggtccctgacaagttggatggcttgaggactggtactaaaaggaaacgtgac

SEQ ID NO: 170945 - DNA, 90 bp, Homo sapiens
agcagtacgagaactggcagccaagggatgattcaaagccgccttactcctacgcgcagctgatagttcaggcgattacgatggctcccg

SEQ ID NO: 170946 - DNA, 75 bp, Homo sapiens
cctttgtgaccaactccacctacgcagcagacaaggggtttaattggttggggtcagataagaagaggagtgaca

SEQ ID NO: 170947 - DNA, 73 bp, Homo sapiens
cttagctgtgctcgcgctactctctctttctggcctggaggctatccagcgttcatctgcagaagccagcgga

SEQ ID NO: 170948 - DNA, 98 bp, Homo sapiens
gcagcaggcatcatccgctatgcaattggggaaggcagcctggaggaggtggccatggaggatagccttcgttatcgtcagcctctggtgagaagcag

SEQ ID NO: 170949 - DNA, 100 bp, Homo sapiens
agcacggcgagcagtctcaggcctttagtgatgatggaggagatgttaaagtaacccatcttgcaggacgacattgaagattggtcttctgttgatctaa

SEQ ID NO: 170950 - DNA, 87 bp, Homo sapiens
gaagagacaggaggcagtagccaaacacccagagaggtgagagacttcagaggctgccctttcttttcatctgctgcttgtgaaagg

SEQ ID NO: 170951 - DNA, 87 bp, Homo sapiens
cgggcaccgaggaccagctcaatgacaggccagccctccagatctctatattgaaagatttaatatagctcttggacaatatatggg

SEQ ID NO: 170952 - DNA, 124 bp, Homo sapiens
gcgagaagcggcggccgcgtcctcaagccggcacctgagcggcggagacggctgtagcacaaggaaaacaatgaagagtcgttatatggaactctatgaccttaatagagacttgctaaatgga

SEQ ID NO: 170953 - DNA, 51 bp, Homo sapiens
cgggaacgtctgtctgtaccagcatcgggatcagaaatgtcaatatgactc

SEQ ID NO: 170954 - DNA, 100 bp, Homo sapiens
agaaactgatgaagctgcagaaccaacgaggtggccgaatcttccttcaggatatcaaggtgaaggtgctaaaggagaagatagaagctgagaagggtcg

SEQ ID NO: 170955 - DNA, 50 bp, Homo sapiens
cttgctcgtgcactttacacacatgagggacctcaggatggaaaccagca

SEQ ID NO: 170956 - DNA, 100 bp, Homo sapiens
catggccggcccgctgcccgacgagcaggacttcatccaggcctacgaggaggtgcgcgagaagtacaaagtattaaaggtggaagaaggtccatatctt

SEQ ID NO: 170957 - DNA, 75 bp, Homo sapiens
tcaggagtcgtcaagaggctctgcaccctggatggaaagcaggatgagctttctgatgttagccaaggcggatct

SEQ ID NO: 170958 - DNA, 83 bp, Homo sapiens
ctgtcgccttcgcctcctaatccctagccactatggacatggatttgattgacatactttggaggcaagatatagatcttgga

SEQ ID NO: 170959 - DNA, 82 bp, Homo sapiens
cgcagagcaaacatctttcaaagcaggcattttggagatcaaagatgggtagaaaagatgctgctactataaaacttcctgt

SEQ ID NO: 170960 - DNA, 96 bp, Homo sapiens
tcggccttgtccgagcaaacagaggcgctcatccacagagccacatctgttaggttggtcaaagaaaaagtgatgtatgaaaaagaggcaaaacaa

SEQ ID NO: 170961 - DNA, 74 bp, Homo sapiens
tcaaggtggcctaccaggaggccaggggtgtcgccatggtggaaccgtcccaaaatgtcccttgctcagaagaa

SEQ ID NO: 170962 - DNA, 100 bp, Homo sapiens
tcatagattgtgtaggcgttggtcttctgatagcaactttaatgtgggaatgaaggatggcagcatgccgtgcattaaaagctgttttggtagatctcag

SEQ ID NO: 170963 - DNA, 83 bp, Homo sapiens
ctccactccgtcccccgcgggtctgctctgtgtgccatggacggtgagaaagatcagtctaaagaaaaggagaagaaagtgaa

SEQ ID NO: 170964 - DNA, 75 bp, Homo sapiens
ttagaagaagaagctgccgtttttcctgaagttgcctccctgatggctcggagatcccgctccctcctattctgc

SEQ ID NO: 170965 - DNA, 100 bp, Homo sapiens
catctctaccgaagttgatgttcatttttaatcttttcgcccctcacgcttttgtaataatgaatgactgctgatggagcgccagaattgaagatagaga

SEQ ID NO: 170966 - DNA, 100 bp, Homo sapiens
tgtttaatgactttggtgccctcaacatctctcagagacgaaaggagttcgcagcacttactaaagaactcaatgtatgcagggaacagctccttgaaag

SEQ ID NO: 170967 - DNA, 95 bp, Homo sapiens
ggaaccggaccccggcagctcatgatgccttcttctgtagagtgggcgctttgcagaatacgtgttgaatgaaatcactgatctaggaaaagtaa

SEQ ID NO: 170968 - DNA, 51 bp, Homo sapiens
ggaccgcgctgcgctatggagcaggtcacactcagccggtaccagagggaa

SEQ ID NO: 170969 - DNA, 75 bp, Homo sapiens
gtgacggctggcatcatcattgttggagatgagatccttaaggtagatataatctgtggtgatcacctgttggag

SEQ ID NO: 170970 - DNA, 75 bp, Homo sapiens
aggcgactgcctcatcttcaaggaaggttgtgcaggaccagcgttccctgtgcaggcgccactgcgtttcctgca

SEQ ID NO: 170971 - DNA, 90 bp, Homo sapiens
cctaagaagaggcgccagaggagccgccttctgcctcagaacggcgtgactcggagctgatgtagcccagcagttccagtatgctgtgcg

SEQ ID NO: 170972 - DNA, 74 bp, Homo sapiens
ttgatgaagaaattgtttatgccaaatcaactgccttacagatctacggaatccagaggcagcattgtctccaa

SEQ ID NO: 170973 - DNA, 108 bp, Homo sapiens
ggaattttgaagtacaccgtggtgacattgtatcattggtctccctcgtgaaagatgcttctgttcctctgattgatgttacaaacctccctactcctcgaaaattcc

SEQ ID NO: 170974 - DNA, 119 bp, Homo sapiens
atgtatcaacgccagcagctccctctgccctatgaacagcttaagcacttttaccgaaaaccttctccccagctatcagttgagggatttgcagttgataaaatggctggagaggttaa

SEQ ID NO: 170975 - DNA, 100 bp, Homo sapiens
gccggacacgctctgcttcgacaaggacgagttcatgaaggctaaatgggagctatgaagctctgaagggaggcagcgccatcgaggccatggaagactt

SEQ ID NO: 170976 - DNA, 100 bp, Homo sapiens
gctacagctctgagatgaagacggaggacgagctgcgggtgcggcacctggaggaggagaaccgagggataccaataactagtgcctcgtactacgcgac

SEQ ID NO: 170977 - DNA, 83 bp, Homo sapiens
ggtgcctggagatgaagctggaaagtaatcaacaagatgccacatcagtagcaactgagtcttcagaatcaagcacttcagat

SEQ ID NO: 170978 - DNA, 100 bp, Homo sapiens
gttatattccatctactgtctttttcttcaatgggcagcatatgaaagtggattatggagaccacaccgctgttccagaccctctccatggatgatgtcc

SEQ ID NO: 170979 - DNA, 83 bp, Homo sapiens
ctcgccggccgagggtggccctaggggcagcgagcaagacagcaagcagacctgcctagagctggaacgttacctccagagcg

SEQ ID NO: 170980 - DNA, 95 bp, Homo sapiens
gcccagcctctcgaatgggcacacctgtgtagatgatgattattctccaccgtctaagagaccaaaggccaatgagctaccgcagccaccagtcc

SEQ ID NO: 170981 - DNA, 145 bp, Homo sapiens
attatcatcacaggcaagcgagccaactgcgaagctgcccggagcaggattctgtctattcagaaagacctggaaacccagcgtttgctggcagaaccagttcctggcatcaaagccgaaccagatgagagcaacgcccgttatt

SEQ ID NO: 170982 - DNA, 82 bp, Homo sapiens
cgtcagtccctaggtatccgcactgctcagggaacactcctatgccaccttcaccagctgtacaagtgcagggccagcctaa

SEQ ID NO: 170983 - DNA, 100 bp, Homo sapiens
ctgagaagtgtttgcataaaattaatgggaaaccccttccaggagccacacctgtgtatgcccacgcaggcgcgacgctggaggggaagatgtatatcac

SEQ ID NO: 170984 - DNA, 74 bp, Homo sapiens
ctcgcgctactctctctttctggcctggaggctatccagcctatacacagaatgggattttacatatgctggac

SEQ ID NO: 170985 - DNA, 78 bp, Homo sapiens
gacgatgaggtgacagtcacgtttcttaaacaattaggtctacatcctaactggcaattcgttgatgtatatggaatg

SEQ ID NO: 170986 - DNA, 75 bp, Homo sapiens
ccttgggctcccgcggccactcgggcagaagagcactgatcgtactggctcactcagagaggacgtccttcaact

SEQ ID NO: 170987 - DNA, 82 bp, Homo sapiens
cggcgcctcaggcacctcggcccggtttccctgaaacctgggctcttgaagacgcatcactggagcagatggataatggaga

SEQ ID NO: 170988 - DNA, 90 bp, Homo sapiens
agagtgcttccccttgccgagcactggaccatacccctttgtgctcttctactcaaaattcaatggtgtagagatgtgtgtggatgcccg

SEQ ID NO: 170989 - DNA, 100 bp, Homo sapiens
ttttgatgtggatgatgccaaagttttattagggccgcgatgggcctcttggaacattggtgtgttcatctgcattcgatgtgctggaatccacaggaat

SEQ ID NO: 170990 - DNA, 75 bp, Homo sapiens
ttcgcagtggtcgcttcttctccttgagaccgtccaggctggacttgaactccttcctcggctgaagtgatcctc

SEQ ID NO: 170991 - DNA, 74 bp, Homo sapiens
ccctgcagacagaggtgtgctgacgacctgctacaacagaaattattttcgaaataccagtatttcgactccag

SEQ ID NO: 170992 - DNA, 90 bp, Homo sapiens
agcaattctaggggcttatagctccaataatggaatgctttggggagctgacacctgctgtccttccacctttggtctgcaagtctggat

SEQ ID NO: 170993 - DNA, 100 bp, Homo sapiens
aagagatgaaagtctgaaagtggatgagcatctggccaaacaagatgcccagtggaaggactaaaagtggtggagattgagaaatgcaagagtgacatta

SEQ ID NO: 170994 - DNA, 96 bp, Homo sapiens
agtcccctctacaatgccagcgccaagttctactgtgtctccttcttctaccacatgtacgggaaacacatcgaaacccttgggagagcagttccg

SEQ ID NO: 170995 - DNA, 110 bp, Homo sapiens
ggaggtctcatctttgaactactgccggagcttctgccagggaaaaagttggattgttaaaagaagttatgaagattttcgggtacttgataaacatcttcatctgtgta

SEQ ID NO: 170996 - DNA, 100 bp, Homo sapiens
ctcccaagtagctgggattgcaggtttctgagtcccttcaacatgatcctgggaggaatcgtggtggtgctggtgttcacagggtttgtgtgggcagccc

SEQ ID NO: 170997 - DNA, 108 bp, Homo sapiens
gtcaagacaagaaaatcaacaggctttcagccttgaggcaacattggatattattgagccagtatcttgaaaattatctctggatgaattattctcctgaggtatcta

SEQ ID NO: 170998 - DNA, 74 bp, Homo sapiens
accagatccgggagcacgtcatctccatcgagggtgaagatttggttccagaaccggcggatgaaatggaaacg

SEQ ID NO: 170999 - DNA, 101 bp, Homo sapiens
ccagcctccgcaggcccaaccgccgccagcaccatggccagcaccatttccggggacggcaaaacagaacagaaaggcggagataaaaagaggggtgttaa

SEQ ID NO: 171000 - DNA, 100 bp, Homo sapiens
gaagctgtttcgggccagcgacccgctgctcagcgtcctcatgtggggggtaaaccactcgagatgtgaactttgtccccataaggatggagctttaaaa

SEQ ID NO: 171001 - DNA, 98 bp, Homo sapiens
aaaaattggactcaggcttaaatcaatagataatgtgcagagattcttagaagaggaggtgtatcccctgttaaaaccatatgaaagcgtgatgaagg

SEQ ID NO: 171002 - DNA, 75 bp, Homo sapiens
gcccaaaccagtagattattcttgccaaccctggaggcaagtgaggcctatctggttggcctttttgaagacacc

SEQ ID NO: 171003 - DNA, 100 bp, Homo sapiens
gggagctgaggaaccagatatcttgaaaagctgccagaaaggtacaggtttgcagattccgccagcagcacagcaagctctacagatgagtggctctttg

SEQ ID NO: 171004 - DNA, 90 bp, Homo sapiens
ttgatggagaatactcctgggtctgaaaaccatgaagacatagagcttctgcaggtttaccttatgggtgggaggaagcttacacagcag

SEQ ID NO: 171005 - DNA, 74 bp, Homo sapiens
tggaaggtgtaaatgtggaacgttacaaacagcaatgcttggaagaggatatcagtcattaaaagtgtattttc

SEQ ID NO: 171006 - DNA, 98 bp, Homo sapiens
ttcggctccgccatgccggccgccgggagtaacgagccggacggcgtcctcagctatcagctctgctgtgtgcgtgcaccagctgcctccaggccaac

SEQ ID NO: 171007 - DNA, 95 bp, Homo sapiens
cgaccaccgtcagcactcagcgcgggccggcccactgctcagtggagcgtggaggacgaggaggaggccgtccacgagcaatgccagcatgagag

SEQ ID NO: 171008 - DNA, 100 bp, Homo sapiens
catcactttagaccctccacctaattgcagaatgcaggctcaacagtaccagcagcagcgtcgaaaatttgcagctgccttcttggcattcattttcata

SEQ ID NO: 171009 - DNA, 100 bp, Homo sapiens
ataaaatcattatgcaacttggaagaaagtatcacgtctgctggaacaacatgccagaatttcacaaattaaaagcaaagttgataaagaagaaaggaac

SEQ ID NO: 171010 - DNA, 50 bp, Homo sapiens
agcgattgcgtggtcagtgattgcgagacgaagttatacggaagcgtctc

SEQ ID NO: 171011 - DNA, 75 bp, Homo sapiens
cggagggggagactgtgccgtggagggcctcgccatgtcctgctgcccgggatttcaaggatttggatttggaga

SEQ ID NO: 171012 - DNA, 75 bp, Homo sapiens
cagggtccctgaagagggaagacacgcggaaacaggcccaaccgcttgcttatcctccacggcttcctggacgaa

SEQ ID NO: 171013 - DNA, 90 bp, Homo sapiens
gatgctcagtgtatagatggcactatcgaagtccccaaatgcttcaaggctgacaatggcaccatgcatctttgggactggagaactggc

SEQ ID NO: 171014 - DNA, 104 bp, Homo sapiens
cagccgcagctggactggcaggcccgagggcgaggtcaaaatgcagatcttcgtgaaaacccttaccggcaagaccatcacccttgaggtggagcccagtgaca

SEQ ID NO: 171015 - DNA, 74 bp, Homo sapiens
agtcccaaagctttcatggcagaccagcaactcccctactggtgtctcatagttgggggaggaccctgtggctt

SEQ ID NO: 171016 - DNA, 83 bp, Homo sapiens
cagagcctcagtttgtgcaggacaccgacatggaacagggactcactgggggaactgtggctgcaccatctgtcttcatcttc

SEQ ID NO: 171017 - DNA, 100 bp, Homo sapiens
tgtattagtaactcaaaataaattatcacttcgaaaacttgctttcccacactaaggaaggaggctgaactggagaaaagtagtgctgctcatacccagg

SEQ ID NO: 171018 - DNA, 90 bp, Homo sapiens
tgggcagctgatgtctcagccctccacggcctccaacagcttacctgagccagccaagaagagttgcatttgctggtctggcctttgcgt

SEQ ID NO: 171019 - DNA, 50 bp, Homo sapiens
tgcaggccatcgacccccagagcaacgtgctggagaatctggtaaaagca

SEQ ID NO: 171020 - DNA, 100 bp, Homo sapiens
gcttaattcctgaaaccactcaagagtcataggattagatgatccaagtcaccaagaaattactgtctcaagtgatacgcaaatgcagccctgaggattt

SEQ ID NO: 171021 - DNA, 90 bp, Homo sapiens
gcctaaatgaggaatgtctttcctaccatctaaaatacgaaggtttctggctgggtgatggcatcagctgagaagggaaggaagcccatg

SEQ ID NO: 171022 - DNA, 80 bp, Homo sapiens
gttggaagcagccgatccagcctgcggagcctgtggggcagtacaacaaacacctcttcgtgcacattgggcatgccaac

SEQ ID NO: 171023 - DNA, 75 bp, Homo sapiens
gcttccggcccactcagcgcctccagaggcctcagagtgtgaacatggctacgcctcttcattcccgtccatgcc

SEQ ID NO: 171024 - DNA, 99 bp, Homo sapiens
caacaccacaataatccacagccaagatgactccaaactgcctcctccgccaaccctggagcccactgggcctgcaccttccttgtctgagcaagaatc

SEQ ID NO: 171025 - DNA, 100 bp, Homo sapiens
tgaaaaaaatcaaagcccctctgagtaaggaccgcctggcccggtgcaccatgcattgcaacgacaaagccaaagattcaatagatgctgggagtaagga

SEQ ID NO: 171026 - DNA, 100 bp, Homo sapiens
aggggctgcagtttggaaatgagtgtctgaacaagatgcaccaggtgtgacgtatgcagccaaaggctactttgacgccctggtgaagatgggggagctg

SEQ ID NO: 171027 - DNA, 100 bp, Homo sapiens
cagacacttcaggcgggaatcttggacccttgaacatctgtgaagaaatgactattctgcatggaggcttcttgctggccgagcagctgttccaccctaa

SEQ ID NO: 171028 - DNA, 97 bp, Homo sapiens
ccccctgttgcagggttttgtttatataactcaagttgtttggctaaattcttcagttcctggtccagaactttacacagaaaaggtgctcaaagga

SEQ ID NO: 171029 - DNA, 97 bp, Homo sapiens
atgcgagcagagaacttctttatccttcgaaggaagcctgtggagattgcccccgaggaattagcacttgttcacaacttgaggaaaatgatgaaaa

SEQ ID NO: 171030 - DNA, 98 bp, Homo sapiens
cgcgacggacgcaagatggcgacggcgaccatagctctcctgctcagatggaagataaaaagccctttatcctgtcttccatgaggcttcctctcctg

SEQ ID NO: 171031 - DNA, 51 bp, Homo sapiens
cgccgaccggcgccgggagatcctgggcacccagattggctgaaaacttct

SEQ ID NO: 171032 - DNA, 90 bp, Homo sapiens
tatagcattaattatctccactttggagagcccaagtcttgtgcttttttaggaccaaaggatatatttccttactcagaaaataaggaa

SEQ ID NO: 171033 - DNA, 100 bp, Homo sapiens
ctgaagatcacattaatcgcaaatatgcttttaaggaacaagagtttgttcagaaacaacagcaagaattagatggctctctgaaaaagatcatccagca

SEQ ID NO: 171034 - DNA, 75 bp, Homo sapiens
cctccgacagccaggcccgcgagaaacgctggtgacatgatcgagatgcagggctttgggcccagcctgccagcc

SEQ ID NO: 171035 - DNA, 96 bp, Homo sapiens
tggcgcttgagttggtcgggggcagcggcagggttatgtaccgaaggactctaccgtgtcagcgggaataaaactgaccaagacaatattcaaaag

SEQ ID NO: 171036 - DNA, 100 bp, Homo sapiens
aaagctcataaaaagatgcacaagcaccaaaagcaccacaagtaccacaagcatggcaaggatgcagagattgtgcggacccgggatcccgaaaaactcg

SEQ ID NO: 171037 - DNA, 90 bp, Homo sapiens
ctcatggaggctgagcatttattcaggtttatggctacaaatgatttgatgacggaactgcagaaagattccatcaagttggatgatgat

SEQ ID NO: 171038 - DNA, 100 bp, Homo sapiens
gaatcctgcggcagaagccgagttcaacatcctcctggccaccgactcctacaaggaaacaatgtgatgagaaccattcatggggtgggagagatgatga

SEQ ID NO: 171039 - DNA, 100 bp, Homo sapiens
gagacagccggttgctgagccgggagcgctgactggcccggctgggcagggactacaaatccctccaggatatcattgccatcctgggtatggatgaact

SEQ ID NO: 171040 - DNA, 100 bp, Homo sapiens
cccattcggtgcaccaagagcaacctcacacggtgtgggctgaatgaagagctgccagatcccacaggaatacaaacagaagcttgcacgagtaacccag

SEQ ID NO: 171041 - DNA, 100 bp, Homo sapiens
cttgcccggggccgcgggaaggccgaccgactgccgcgaatgatatggaacctagcaaagctgttccactgaatgcatctaagcaagatggacctatgcc

SEQ ID NO: 171042 - DNA, 75 bp, Homo sapiens
ctcctgacccatcccagcttcacttcagaatcaaccaaacaggtctttggtttcataagagcctgagagagattt

SEQ ID NO: 171043 - DNA, 90 bp, Homo sapiens
gggatcatccagaagcatctgaagaccatggatcacaaccggaaccgcagggaattggagaatgatgcagcttttcagcaagctgtgagg

SEQ ID NO: 171044 - DNA, 88 bp, Homo sapiens
acattccttatccaatcccttaccggagtttcataatagaagagcagagtttcttactatgtgaagatcttctctatggaagaatgtc

SEQ ID NO: 171045 - DNA, 74 bp, Homo sapiens
gattccagatgttcctgtggaccccagtccaggcttcagggatgacttcttagggggcaggggaggtagtcgcc

SEQ ID NO: 171046 - DNA, 74 bp, Homo sapiens
gcacatttcaacagtcatgcagatctcaggaaacaggctcgacagctggaaaatgaacttgacctgaaactagt

SEQ ID NO: 171047 - DNA, 80 bp, Homo sapiens
cgcagctatcggtgctttgcagggaaaatttgttggcagattgtttgcagggttgttttgtggtgacgtgcacactgtgt

SEQ ID NO: 171048 - DNA, 83 bp, Homo sapiens
gttcacgatgctttctattcggaataaaccttttgcttatgtctcagaaggtccaatgatgcatcagcagcctccttctcagc

SEQ ID NO: 171049 - DNA, 75 bp, Homo sapiens
ctccggggcatcatcaagagcatgactccacaggcaaatactggacggtgggcagtgactccgcggtcaccagca

SEQ ID NO: 171050 - DNA, 85 bp, Homo sapiens
gcgagctgagtggttgtgtggtcgcgtctcggaaaccggtagcgcttgcagcatggtccagcaagactatgaatctctgttccaa

SEQ ID NO: 171051 - DNA, 100 bp, Homo sapiens
ccgagtctggcagatccagtcttgctcagctctcacaggagagggcgttcaggagagcgacttgcagttgtggaggtacagtgtgaacggctgaggatgc

SEQ ID NO: 171052 - DNA, 100 bp, Homo sapiens
aagtttagggagtccatggccagaaaacttttggggttcttgagttcatgtaagaggacagtcttaaaacggaagaagaaaaagaagcagttcagtcttt

SEQ ID NO: 171053 - DNA, 83 bp, Homo sapiens
ccaagagggtgttcgactgctagagccgagcgaagcgccctggagggacaggaaagccagaaatggacttcgtgagactcgct

SEQ ID NO: 171054 - DNA, 73 bp, Homo sapiens
gctgctccgcgggtgcatcgaagccttcgcactgcagaaggatctggacgacaacctctttggacagcatctt

SEQ ID NO: 171055 - DNA, 82 bp, Homo sapiens
tcgtggggcccgcgaggcgggcagccggggcgtccaggttttaaaatcaaagatgggaaaatcggagaaaattgcccttccc

SEQ ID NO: 171056 - DNA, 83 bp, Homo sapiens
cctactacaagtcctcgcacctaaagtcgcacctgcggacgcacacagggactttgaacatgtcggggatcgccctcagcaga

SEQ ID NO: 171057 - DNA, 95 bp, Homo sapiens
ttggcggtccctgtgacctgtggagacacggccagatctgccctccatggttgcaaatgatggattttatgtaatactgaaaggcctagctcgac

SEQ ID NO: 171058 - DNA, 51 bp, Homo sapiens
gccgagcaggctgagcgatacgacgcgattattggagccggaattggtggc

SEQ ID NO: 171059 - DNA, 100 bp, Homo sapiens
gaatgaagaaatcctggctcgagtcgtccccctaaaccagagcttccaggaaaactatgcagggatctttcacttccagatcccggtctccagaatctcc

SEQ ID NO: 171060 - DNA, 100 bp, Homo sapiens
agcacagagtggggactgccttccattgtgaagtctcttcagaggatgattccgaagaagacggagaccataacaggacatttgatattgcctaacttca

SEQ ID NO: 171061 - DNA, 75 bp, Homo sapiens
ggcgggtcgggccgggcaatgcctcgcgggcgcaatgaatccgcggcaggaagccagttgagggaagttctccat

SEQ ID NO: 171062 - DNA, 75 bp, Homo sapiens
ggggccagggaaccctggtcaccgtctcctcaggaatcttgtcgattggcctggctgctgcctactacagcggag

SEQ ID NO: 171063 - DNA, 90 bp, Homo sapiens
tgagaaggcgcagcgttgaaaggaatgtctacacaaggaagtacaggatttggcttttctagatgtcgtatccaaacttcgcagtcatga

SEQ ID NO: 171064 - DNA, 131 bp, Homo sapiens
cggattaaggaataatttatgaagctccgttgactaccgtggagagatcataatttggggttcaagattccaggatctagtgaaaagccatttgatgtatgcggtcagagaagaagtggaggtcctcaaag

SEQ ID NO: 171065 - DNA, 75 bp, Homo sapiens
tacattgccagaacttggaatactctactggacaaacatttcctccaaggtcagaacaaaatctgcttcatccca

SEQ ID NO: 171066 - DNA, 83 bp, Homo sapiens
acccggctttcgcatttgggaccctgcaggggcgccctgcgtccggcagaggaggcgagcatcccgctcaggtgatgaggaac

SEQ ID NO: 171067 - DNA, 95 bp, Homo sapiens
taaacttctgaatgaaagagggcctgctcattcaaaggctggagcattggatttgctaaaggagcttaagaatattcctatgaccctggaattac

SEQ ID NO: 171068 - DNA, 82 bp, Homo sapiens
aggagggttggctgcacaaacgagggactggtgattgcagctggaagtgcccatgaccgagctggcgtcctccgggggcggg

SEQ ID NO: 171069 - DNA, 100 bp, Homo sapiens
ccagtggccacagcatctttgtctagccccagtgcaggtgaaatgacaatggatgctctgttggctcgattgaaacttctgaatccagatgaccttagag

SEQ ID NO: 171070 - DNA, 90 bp, Homo sapiens
ctgcattggtcgtgctcgcttaggtggcagcacccagcccagtgccaggcatacattgggcgctcgaaatgcttcggttacccacagtct

SEQ ID NO: 171071 - DNA, 83 bp, Homo sapiens
ccacaggccctcgttgcccagatgttatcaatactctggctgaccatcatcatcgtgggactgactttggtggaagtccttgg

SEQ ID NO: 171072 - DNA, 75 bp, Homo sapiens
caggcccgccatccacagccgagatttccacaagacggcaccctatgtcgtcactggcagcgtagatcaaacagt

SEQ ID NO: 171073 - DNA, 98 bp, Homo sapiens
ggaaagttccagccggttcgagagctagagtggagcctttcaggctggcatggagagcttaaggggcaactgaaggagacacactggccaagcgcgga

SEQ ID NO: 171074 - DNA, 96 bp, Homo sapiens
gccagagccctggatgtcatttggaaaaacactagagacagacggctggcagaacccagtgacttgattgtaaaaatttacagagcggaatcatat

SEQ ID NO: 171075 - DNA, 90 bp, Homo sapiens
acagagttagagagagggatggtggcgcattctacattctaaaggggagctcagtgaagatagacataaacagtatgaggaatttgctat

SEQ ID NO: 171076 - DNA, 100 bp, Homo sapiens
ctgcagagggagtagtgcgatcctgcgcgcgggggaactagctggagggcaaggcgggaacacaacactcctatgccaccttcaccagctgtacaagtgc

SEQ ID NO: 171077 - DNA, 100 bp, Homo sapiens
gtggtgaatgggagcgcgcagggcgcacagatcggggtgaatgtgatgctgaggaagattgctgtggctgcagcgtccaagccagcagtggagatcaaac

SEQ ID NO: 171078 - DNA, 100 bp, Homo sapiens
tctcgatcaagatcaagatctcattctagaaagaagcgatacaggtcacctggcggtagacccattcataagaggaaaagacagaattcacattgggatc

SEQ ID NO: 171079 - DNA, 100 bp, Homo sapiens
tgcagtacctgcagaaggtctctggagacatcttcagcagtcctgacacagctctccctgaggagcagccacattccagctcccagtgcgcccctctcca

SEQ ID NO: 171080 - DNA, 97 bp, Homo sapiens
gacagtgatgctgacttggatgtggatggggatgacactctggagtatgggaagccacatgtggcgggcgtgtttgtgtgcctgctggagtaccccc

SEQ ID NO: 171081 - DNA, 100 bp, Homo sapiens
tttaggtatcaccactaaaatctccaggggcaccattgaaatcctgagtggaggtggaggaagcgtccctgggatcgagaggatgggtcctggcattgac

SEQ ID NO: 171082 - DNA, 100 bp, Homo sapiens
caacagtcgcttgaacagattggcacccgaattgccaaagttttggaaaagggtctcctatggacagaagtgcgggcaaggagctttgttcctccccgat

SEQ ID NO: 171083 - DNA, 82 bp, Homo sapiens
gagaggcgatttcctctcagaagagtggagggagcgaatcgccaacacgagctcaccatggatgatgatatcgccgcgctcg

SEQ ID NO: 171084 - DNA, 100 bp, Homo sapiens
ccacgctatgttgggagtgttcgctttcgagttaatggaatttctcagtgacaacaacgaagcagcagctgctgatgtcttggagtttgttcgtgaagcc

SEQ ID NO: 171085 - DNA, 74 bp, Homo sapiens
acctctggccccgagatcagaatgccggtaattaataatgcttgtgctactcaagccatagtgagtgtgttact

SEQ ID NO: 171086 - DNA, 98 bp, Homo sapiens
gttggtcggtgcctgcgttctgaagcccgagaggagccacaatggagacgccgccgctgcctcccgcgaacggaaaacagttcttccttcaaagcatg

SEQ ID NO: 171087 - DNA, 75 bp, Homo sapiens
aagtctcaggcccttaaatctactccagccatcatctgccctccaccatccatacctacgtttgcaacacttcgt

SEQ ID NO: 171088 - DNA, 75 bp, Homo sapiens
agtctgtgtaagaagtactccagggaaacctcccaggaaattgcagcttatttaataacatttgagaaacacgaa

SEQ ID NO: 171089 - DNA, 50 bp, Homo sapiens
cccaccgcgccgcatccatgttcgatgtgcatgaccaactgcccaactct

SEQ ID NO: 171090 - DNA, 50 bp, Homo sapiens
gcggggacctggtggccatcggccctatgatgccaagtagagaaatccag

SEQ ID NO: 171091 - DNA, 101 bp, Homo sapiens
aacaaactttcagatcaatcaattacatgcagcaaactggaggtcaagcacatctattcttttggatgacagtggaaggataccgggttaccgcccaacag

SEQ ID NO: 171092 - DNA, 101 bp, Homo sapiens
gtcactttggaagaagtatatgcaggaaattttgtggaagaaacctatgagaatatcccaggccagtcaaagatcacattcctcttacaagccatcagaaa

SEQ ID NO: 171093 - DNA, 74 bp, Homo sapiens
cagatggtggctcccggagtccaggttaatttggagtggcccctggagtcagtttcctacaccatccgaggccc

SEQ ID NO: 171094 - DNA, 135 bp, Homo sapiens
cagaagaaagattctggaggaaaggtttacaagcaggccacgattgaatctctgaagttaattggccttggtcctcacagctccaaaaagaaacaggatctcgataagctctatgagctgaagtccaaagctcgg

SEQ ID NO: 171095 - DNA, 82 bp, Homo sapiens
ccatgtcagacgcagccgtagacaccagctccgaaatcaccaccaagagctgttgcgcagccattggtacctgtattgggga

SEQ ID NO: 171096 - DNA, 83 bp, Homo sapiens
tctaccagcagcatgtcaagtttggcaaggccgccatggcatcagatgaaggcaaactttttgttggagggctgagttttgac

SEQ ID NO: 171097 - DNA, 100 bp, Homo sapiens
cttttgtcctgattcccagtcaacagatcaagccgcctcctgccaaggaaacagtactgctaaatcctgaagatgacctcttaccagggaagattcgaga

SEQ ID NO: 171098 - DNA, 49 bp, Homo sapiens
tgcatggggaggaccagtcgtggaagtcagcctcataccaaaccatccg

SEQ ID NO: 171099 - DNA, 83 bp, Homo sapiens
ggggtgctgcgctgcgccgacggctccacctacaaggtaactaggatttctacctcaaccgcgagacctatgcaaggacggtg

SEQ ID NO: 171100 - DNA, 99 bp, Homo sapiens
gccggaaggacaccaagatgcggatccgggcctttccgggcctgctttcttccccgggcgatgtgcagagatctttgccaggggtcaaagcgtcgggaa

SEQ ID NO: 171101 - DNA, 102 bp, Homo sapiens
ggagacgcacgcagctgactttgtcttctccgcacgactgttacagaggtctccagagccttctctctcctgtgtatgggtttcgacagaccatgatgaaat

SEQ ID NO: 171102 - DNA, 50 bp, Homo sapiens
ctacaaggtcgcctacgtgcagctgcatttgacattgtgcagcaaagaaa

SEQ ID NO: 171103 - DNA, 100 bp, Homo sapiens
agggctccaccccgtcgcctcgacaggcatgtgaaactattgaaccttcctgctagcctccggccacacaaaatgaaaagcttgctgggtcagaacgtgt

SEQ ID NO: 171104 - DNA, 83 bp, Homo sapiens
gcctggttgcagaagtgccgaaagagcactggactccggaagctacaagccagcccccttcttcgtcctggatgagattgatg

SEQ ID NO: 171105 - DNA, 75 bp, Homo sapiens
gggagcacacggagcactgcaggcgccgggtggagccgccaccaaaatgcagattttcgtgaaaacccttacggg

SEQ ID NO: 171106 - DNA, 80 bp, Homo sapiens
tcgtcgttctggtgttatgaaaaacgcaaccgatccagatctagattttaggtggatgttcccaaggccttgattattgt

SEQ ID NO: 171107 - DNA, 51 bp, Homo sapiens
ctcctggccaccgactcctacaagtgcctacaccaactaatgttacaattg

SEQ ID NO: 171108 - DNA, 75 bp, Homo sapiens
ccctgcttggagacggacttgcttccgctcaaatagctataactgtaccaaagacatggaagaaaccaaaagatc

SEQ ID NO: 171109 - DNA, 50 bp, Homo sapiens
gacagaagcgactttggtgagactctgaatcaggaaacccaggcccaacg

SEQ ID NO: 171110 - DNA, 98 bp, Homo sapiens
ggaagctaaagctaccaaagacgtagaaagaaatcttagcagggaggcagcagatggctgaaattctgatccgatgtggctggttaatgcatgatctg

SEQ ID NO: 171111 - DNA, 75 bp, Homo sapiens
cagtcttccctggcaagattcttctgaattgtgctgccttggccaaaagagatggagtctcgctttgtcgcccag

SEQ ID NO: 171112 - DNA, 83 bp, Homo sapiens
cagcccttgagatttgaggccttggagactcagtgatcagggccaaagcggtcagtgagaaggaagtggactctggaaacgac

SEQ ID NO: 171113 - DNA, 51 bp, Homo sapiens
agaatactggaaagttgctatgttttgttgtcgagatgtccacagaaggag

SEQ ID NO: 171114 - DNA, 75 bp, Homo sapiens
tgccgaagactgcatttcaacttcaagaatggaagaaatgcagagtaacgtggaagtggtccacacctaccgcca

SEQ ID NO: 171115 - DNA, 100 bp, Homo sapiens
ctagacctacaggtggagttggagcagtagctctgctaattgggccaaatgctcctttaatttttgaacgagctccgccgcatgcaagagatgattgcaa

SEQ ID NO: 171116 - DNA, 95 bp, Homo sapiens
agatgctggcgacctatccagaatgatcaaggtcacccttgtggttggagcgtcccaggacatcatcccccagctgaagaagaagtatgatgtgg

SEQ ID NO: 171117 - DNA, 102 bp, Homo sapiens
tacttgggcttgccagtggcggattacttcaagcagtggattaatctgaaaaaggcagcagctaccaagaaaccagcccctgaaaagaagcctgcagagaag

SEQ ID NO: 171118 - DNA, 101 bp, Homo sapiens
gagaccagaaagctgggagccctgcgtggagttctcagcacagatattctacacctcacgccttcacctttaacacctccagtccctcatctgaaggttcc

SEQ ID NO: 171119 - DNA, 74 bp, Homo sapiens
tcgaccagaccatgctctccatcctgctcttcttccacaggatgaccagtgtcccagtgaaggaacgagtgaag

SEQ ID NO: 171120 - DNA, 100 bp, Homo sapiens
aatgctgatcaacagctaacagcaacacagaaatttagaaagctgctttctaaaggtgttaaaatcatcacacaacaggttcaaccaagtaaaatcttac

SEQ ID NO: 171121 - DNA, 100 bp, Homo sapiens
aatggggtgaaaaatgcgtacccagcggaggtgcagtgtttaaaaaggatgatattggacgaaggaatgggcaagtgctacaactgtgaggaggaggcca

SEQ ID NO: 171122 - DNA, 115 bp, Homo sapiens
tccatgtgcagaaacctgcatcttcaaggcaaatttgtcaaacatcagcaaaatcatagggcagaaacactaaggagggaggtgtagaaagaggtacatggagaacaagtttgtc

SEQ ID NO: 171123 - DNA, 75 bp, Homo sapiens
ggcgagtctacgatgtcacccgcttcctcaacgagtcaaatgccctacctagccacgtgaagatcagcgtttcca

SEQ ID NO: 171124 - DNA, 100 bp, Homo sapiens
caaatacccaagcctaggacaaaagcctggaggctccgacttcctcatgaagagactccagaaaggggtgctgtcatctatatgatctcagtattttaaa

SEQ ID NO: 171125 - DNA, 82 bp, Homo sapiens
gcctggactgtgcagtatttccagtctgtctcagggaggaagttttattttgtcttcatcaggaagccaactaattcggttg

SEQ ID NO: 171126 - DNA, 98 bp, Homo sapiens
ggtgtatgtaaatgacttacctgtaaatagtggtgtaacccgaataagctgtcagactttgataggtatgttgagtcgatgggatgatagccagagat

SEQ ID NO: 171127 - DNA, 100 bp, Homo sapiens
cggcgggcagccgggcacctgcaagtactggatcctcgacctagggctggctgtgtgaactgctccgctggaaggagaacccaagcccagaaaaccgcac

SEQ ID NO: 171128 - DNA, 73 bp, Homo sapiens
cccgaaggccctatcaggacatggagtatgaaagacgggtgtcagatgcctgatacattcaattcatggtttc

SEQ ID NO: 171129 - DNA, 151 bp, Homo sapiens
ctactcgcctgcgcagcatgcaagagctcagcacgatccacatccagggcagtgagcagccctccctcacaaccagatgtccatgaaggaggtgggtgatggcttacaggatcagatgaactgcatgatgggtgcactgcaagaactgaag

SEQ ID NO: 171130 - DNA, 98 bp, Homo sapiens
gttgaatcgccaggatcccttcactgttcatatgcacccagtcagcttgaagagtttcaaatggaccctaccactgagaaatcaagatggcagtctac

SEQ ID NO: 171131 - DNA, 75 bp, Homo sapiens
attatgcccagacaagtccccagggaatgccacagcatcctccagcacctcaggaaaatcctgccttgcttcgtt

SEQ ID NO: 171132 - DNA, 100 bp, Homo sapiens
gccggagctgcagcccgagcgcggtggtgccctcagccccgtcctcttgtcctcctcagcctcgtaatcagttcaagaagttccctcagatgacctcata

SEQ ID NO: 171133 - DNA, 50 bp, Homo sapiens
gatgatgagttcttcgatgcgcacgacaatgtggagctcatactgaaaac

SEQ ID NO: 171134 - DNA, 75 bp, Homo sapiens
ctcaaaggtgcctaccaaggtcaaaggctatgacaacctctttgctatggaactgtggctgcaccatctgtcttc

SEQ ID NO: 171135 - DNA, 100 bp, Homo sapiens
cgacctctggttctacttcacactgcagaactgggttctggactttgggcgtcccattgccatgaaaccagcctggacaccaagtctgtgtcagaaggcc

SEQ ID NO: 171136 - DNA, 76 bp, Homo sapiens
caagatggacggtttcgccggcagtctcgacccatccctggaaggcatgtgtggcactgagcatgcccagttggga

SEQ ID NO: 171137 - DNA, 100 bp, Homo sapiens
gcacgtgggcacggaccaattcgggaacaaatactactacatcccgcagtacaagaactggagaggagtgcgccggtctcggggaaatgcccggttcctt

SEQ ID NO: 171138 - DNA, 100 bp, Homo sapiens
ctggggcgtcgtgcgcaaaggcctgcagtgcgcgcgttcatctgcagaagccagcggacgcctctgttcaacttgtgggttacctggctcatgagacctt

SEQ ID NO: 171139 - DNA, 75 bp, Homo sapiens
ggagaactacagaaacctcgtctccctgggtgccagcgagatttcagattcctgtaaacctctaaagaaaaggag

SEQ ID NO: 171140 - DNA, 100 bp, Homo sapiens
gagaaagcttctggcaagaggtgctgatatcaacacggtcaacgtggacggcttgacagccctgcaccaggatcacctgctgttaccagctaccacccat

SEQ ID NO: 171141 - DNA, 74 bp, Homo sapiens
ttccttgtcctccctctgcacaaggacctcaccacggaatgtgctactgcaaacaaccccacagccatcacgcc

SEQ ID NO: 171142 - DNA, 82 bp, Homo sapiens
ccagcgtggatgagggcgcctgcagatcccggctagggcacggaccgcctaggccgagttgatttggagcatatgcgaacaa

SEQ ID NO: 171143 - DNA, 75 bp, Homo sapiens
tggcgtgctgggcctggacctctggcaggtggatagatacttctcaagacatcacacagcgtgagtcaatcaagg

SEQ ID NO: 171144 - DNA, 83 bp, Homo sapiens
ccaaagactgtggaacttttaagtggagtggtggatcagaccaaagatggctccctctgaatgttttcaataactacttcagc

SEQ ID NO: 171145 - DNA, 100 bp, Homo sapiens
gacattcaacaagaaatcacagtgctgagtcagtgtgacagtccatatgtaaccaaatattatggatcctatctgaagtgtctttctcgagaagcaggtg

SEQ ID NO: 171146 - DNA, 100 bp, Homo sapiens
catgaggacgtggaggtgggaaggtgtgtccggaggtttgcaggggtgcagtgtgtctggtcttatgagagacaaagcatggaggacacaagaatgggag

SEQ ID NO: 171147 - DNA, 100 bp, Homo sapiens
tgattcctccaccacctcactctgctccttccctgttgccaatgtctcgctgactaagggtggacgtgatcggaaccctcggcctcaggaaagtcggaca

SEQ ID NO: 171148 - DNA, 98 bp, Homo sapiens
gcggcttcctagtgagtcggcggctgatttagaaggaggttcaggctacggtgagccgaagctccgccgcatgcaagagatgattgcaaggatgcagg

SEQ ID NO: 171149 - DNA, 100 bp, Homo sapiens
gagctgccccagccgcttctgaccttccaggcctacgagcagattctcgggatcacctggactggtgattgcagctggaagtgcccatgaccgagctggc

SEQ ID NO: 171150 - DNA, 87 bp, Homo sapiens
tcgggatttacgtggagatcaagcgcagcgatggcatcaagcatgatggaaccatgtgtgatacctgccgccagcaaccaatcattg

SEQ ID NO: 171151 - DNA, 75 bp, Homo sapiens
gagctccccaggggagttctctgtgtctgtgaagttcatcatgcctagtggcgtataagaagaccccgccaccgg

SEQ ID NO: 171152 - DNA, 100 bp, Homo sapiens
tgggggcgagctgagcacctgtagtcaatcacacgcagttctgtgatatgagcaacaatggaccagaagattttatctctagcagcagaaaaaacagcag

SEQ ID NO: 171153 - DNA, 90 bp, Homo sapiens
ccctgctttttctggtgtcctgaacctggaagttgtgctttttaagggtggttctcttcccaaagtggaagccaaattcatcaattatgt

SEQ ID NO: 171154 - DNA, 75 bp, Homo sapiens
cttttcatgagtgttcctgtggtctctgcacctcctttctccaactcagacagtaatgccaggacaagtcatgcg

SEQ ID NO: 171155 - DNA, 71 bp, Homo sapiens
gaagctttgataaatgaaatcttcctaagtataggtgcccagcagagtgccaccgtggccaacccagtgcc

SEQ ID NO: 171156 - DNA, 50 bp, Homo sapiens
ccgccgccgccggagctctgcagcacggggggctttctctgtggtccgac

SEQ ID NO: 171157 - DNA, 83 bp, Homo sapiens
ctgcctcgtgccgctgagcctggcgcagatcgatgtcggtgcagatctcttgtccatgtgccagcgaaacattgccctcaaca

SEQ ID NO: 171158 - DNA, 100 bp, Homo sapiens
gttttcctaagccatcccctggcggaaccgcccccagagaatggatcttggagaatgtctgaaagtccatgacctggctttaagagcggattatgaaatt

SEQ ID NO: 171159 - DNA, 100 bp, Homo sapiens
gccctcaaggccatgatcaaaacagcactccgctggtccaggcggcaacatgtccatgcttttagtgatgtccctgcctctaatccagaagccatggagg

SEQ ID NO: 171160 - DNA, 131 bp, Homo sapiens
atagtcctggatcttctggggttccctatgcaaatgccaaaggaattggttatccaggtactattttgaagcgctggaagaagaactggtttgatctgtggtcggatggtcacctgatctattatgatgac

SEQ ID NO: 171161 - DNA, 90 bp, Homo sapiens
ccggcaagagggagttaaggacattccaggcagaggcaagacaaacatcatatctgaactaagtaaatggagacttaattttattgactg

SEQ ID NO: 171162 - DNA, 96 bp, Homo sapiens
cgagagccgccgacatgaagaaagacgtgcggatcctgctggtgggagaacgtgtggatgaggtcaccattgtcaacattttgaccaaccgcagca

SEQ ID NO: 171163 - DNA, 90 bp, Homo sapiens
tgaatatcagctcctgggtcatttttctccctgaggacaacctgagataagccaatggacacgtcagtgttatctgaagaaggaggagag

SEQ ID NO: 171164 - DNA, 75 bp, Homo sapiens
aaaacccacctagagcatcaggaagctatgcgaaattatttaaaagagcgaggggatcaaacagtacttattctt

SEQ ID NO: 171165 - DNA, 125 bp, Homo sapiens
gacagaaggcgtctcatggcgttggaataccggctctcagcggctgacttccttcgctgggcatctggctgggattcttgttggactaatgtacactcaagggcctctgaagaaaatcatggaag

SEQ ID NO: 171166 - DNA, 100 bp, Homo sapiens
cttgagtatcctattgaacctagtggtgtattagggaggtggggaagacagggctccagctaccacaggacgggctctgggtatagccgttccagtcagg

SEQ ID NO: 171167 - DNA, 75 bp, Homo sapiens
ccatggcactggcaccggcagcggcggcgcgggcggaggcagcagcaggcggacctcagcagccatgtcgaagcc

SEQ ID NO: 171168 - DNA, 101 bp, Homo sapiens
atgtcatatgctaggccactatacagatgtcacggtctagatcacattctcgatccagaggaaggcgatactctcgctcacgcagcaggagcaggggacga

SEQ ID NO: 171169 - DNA, 82 bp, Homo sapiens
caaaagggaactctaaagatttagttggaaaagtaggacagagcgggatgccaccagcttgtccaaagggaagttccaggag

SEQ ID NO: 171170 - DNA, 97 bp, Homo sapiens
aaccactccaaggtcccccaaaggaccaagatgatgaggatgacgatgtcgataccaagaagcagaagaccgacgaggatgactagacagcaaaaaa

SEQ ID NO: 171171 - DNA, 100 bp, Homo sapiens
ctgtgaagaggtgcacctggagaggaactgaggcctcccaccaaaaccaagcactgacatgccactcatgggcgaagctgctctcaggggagaacccaga

SEQ ID NO: 171172 - DNA, 75 bp, Homo sapiens
ctggatccaaagcatgtctgcaacccagccattttcaggtgtcagctgtgatgcatgtttaaaaggaaattttcg

SEQ ID NO: 171173 - DNA, 100 bp, Homo sapiens
ggagatgcctggaatacagtaagatcctaatgctttggctggccagaatggccctgaccatgctctcataggaggaatagtggctgtagttgtatttgtc

SEQ ID NO: 171174 - DNA, 100 bp, Homo sapiens
ctggctactatggctaccagccctgggcagcgagctgcaaaatgtctacttcttgggaagaagcagtaaacagttgggaaatgcagtcactacctgagta

SEQ ID NO: 171175 - DNA, 50 bp, Homo sapiens
atccctgcagctgtgtttgaacaggacccattccaacaatctcgtaaaac

SEQ ID NO: 171176 - DNA, 100 bp, Homo sapiens
cggcgtgcgagagactcacgggacgcgacgcgccccgcctcccccgtccggtccctctctccacggtaaggggtgtcccgacccaggctaagcttgagca

SEQ ID NO: 171177 - DNA, 74 bp, Homo sapiens
agcccaaaaagctgaaggtggaggcgccgcaagcgctgagacaaatttacatgtattggagaccagaccagaag

SEQ ID NO: 171178 - DNA, 100 bp, Homo sapiens
ctggcgcggaacggtcgtggagaagaagagctgctgatgaggactgggacagcaaccgcctccacgtttgataaactttcagaatcacagccccaaaccc

SEQ ID NO: 171179 - DNA, 143 bp, Homo sapiens
ggactatttttgtatgcgatgaagatgctactttagaattaagagttaaaactgtgaaatactttaaagacaacaagctggtgagcagcctcagcctgcctcctttgttccatcagagatgctcatgtcatcgggttacgcag

SEQ ID NO: 171180 - DNA, 119 bp, Homo sapiens
tactccatgtgacatggtttctccctatgttacgtggatgtttgtaaccctagtgtgttaattgtaacctacaaggagcctgcaaaatcatctactcagtttggatcctacaagcaagc

SEQ ID NO: 171181 - DNA, 75 bp, Homo sapiens
ggtatcaacttgagaagacaaaccctggtttctaagcatgaattgaggaacagaagaagcagagcagatgatcgg

SEQ ID NO: 171182 - DNA, 100 bp, Homo sapiens
aggaatccaggagaactgtgtgtggcctccgttgtgagtgtgaaggggcggctaatgtggcttcacctggaagatatttggagttcttacaacatggcag

SEQ ID NO: 171183 - DNA, 82 bp, Homo sapiens
actattaaccaccattcttcagtgggctgtgattttcagaggggaatactaagaacaatggctgccatccggaagaaactgg

SEQ ID NO: 171184 - DNA, 82 bp, Homo sapiens
cttggactgagtcctgcaggacacagagaggacatgtactcccaggattccatagatctccttgctaactcaggactacagt

SEQ ID NO: 171185 - DNA, 74 bp, Homo sapiens
gtcactgtgcgtcgcctgggcccgttcctggtcttctcccccagggaactcttgcagcagacaagaatgagatt

SEQ ID NO: 171186 - DNA, 50 bp, Homo sapiens
gtggagtgtaggtcatatcgccgcggagcagacaagatggagacaaattc

SEQ ID NO: 171187 - DNA, 95 bp, Homo sapiens
ccagctccaagtccccctgggtggagtccgaatacctggattacctttttgaagtgttaaaagatcactgaagttggatggtctgttagaagaaa

SEQ ID NO: 171188 - DNA, 75 bp, Homo sapiens
cagcaagaagtggagacagagcttaaaatgtaccaagatcactccatggatgaaatgacagctgtggtgaaaatt

SEQ ID NO: 171189 - DNA, 100 bp, Homo sapiens
tggacagagtgtggacttcccctgggcggccgtggacaacatgatggtcagaaaaggggacacggcggtgcttagaaccaatttagaacttgaattgatt

SEQ ID NO: 171190 - DNA, 96 bp, Homo sapiens
gtgcctccaaccagcagagagggattgagcttcattgaactcaacagagccaacatttcatagcaccatgagactcttgaagacaactctgaaaag

SEQ ID NO: 171191 - DNA, 100 bp, Homo sapiens
caaggacatcaggacaccgggagtgggagagattggactgggagactcagcagtactatactggcaattgctggagaagattttgcaattgttgcttctg

SEQ ID NO: 171192 - DNA, 75 bp, Homo sapiens
gcggcggcacgatgccctttgacttcaggaggacaggcgacactaacaggtgaagatctcgggagaccatgacta

SEQ ID NO: 171193 - DNA, 100 bp, Homo sapiens
gagaatgtcaagctgaaggcgtcctcttcttccaagccaacaggctcagtttacaaacctgtgagctactgttggctgctgccctccttcccagtgaaag

SEQ ID NO: 171194 - DNA, 98 bp, Homo sapiens
aacgtacagctgtatccactgcagagcacacctggccaatcatgacgagctcatctccaaggacaaccctccatatgataagggagccttcagaatcg

SEQ ID NO: 171195 - DNA, 87 bp, Homo sapiens
gatgaaggaaattatctggacgatgctctcgtgagacaggatgcccagggaagtgttcgccagttactacatgaaaagataagagat

SEQ ID NO: 171196 - DNA, 98 bp, Homo sapiens
gcctgcaggacggcgcggcagagtccccgtacgcctacagtaacgcccaggtggggaagacgtcgctgatcctgtccctggtgggcgaggagttcccc

SEQ ID NO: 171197 - DNA, 97 bp, Homo sapiens
tgctagacaccaagaaggacgcactgactcgcctcaagcacctgcgcatcgtcatcggctcagaagtgacaaaagagaattatcaggatggcagtcc

SEQ ID NO: 171198 - DNA, 98 bp, Homo sapiens
catcaacgcgggagacttccacggcctgcagggcctgagcccaggctgctatgacacctacaatgcggacatcgactgccagtggatcgacataaccg

SEQ ID NO: 171199 - DNA, 88 bp, Homo sapiens
tgacagagtgtttcacatttgctgccatgagcaaagaggaggtcgacagatccaagtattttagaacatgctcaagaggtgagcactt

SEQ ID NO: 171200 - DNA, 74 bp, Homo sapiens
aggatcatgtctgcgagccaggattcccggtccggcctctttggcctacccccgttggctccgctgccccaggt

SEQ ID NO: 171201 - DNA, 100 bp, Homo sapiens
aagctcatgagcagcctgcccaacttctgcgggatcttcaaccacctcgagcggctgctggacgaaggatctaacttggcaagatgagcactctgcccct

SEQ ID NO: 171202 - DNA, 85 bp, Homo sapiens
gttgattggagatatgcccttagttggagctttgtctatcttcttccttaggaaaccatgggcaagttacggaagcaatggctaa

SEQ ID NO: 171203 - DNA, 99 bp, Homo sapiens
gcgggaggagatcctcagcggcgccttgcggagggaccccaggagttcccattagacttgaagttgggccacgtgatatgaagagctgtcagtttgtag

SEQ ID NO: 171204 - DNA, 100 bp, Homo sapiens
ccggatatttaagtacaatggtgggcttaattttagaacctctgtattactggcaacagactgaagatgatttgacagtaaccatacggcttccagaaga

SEQ ID NO: 171205 - DNA, 100 bp, Homo sapiens
aatcatcagggagactttccatttggtatctaagagagatgaaaatgtttgtaatttcctagaaggaggattaaacctctgtagaggagcaggatgcaac

SEQ ID NO: 171206 - DNA, 83 bp, Homo sapiens
ccgaagcggggaagtgggacaagatggtttacatctcgaacggtcaaaatgcagatcttcgtgaaaacccttaccggcaagac

SEQ ID NO: 171207 - DNA, 98 bp, Homo sapiens
aagctcctacagtttcttgctggacaacaagtaaatcccacaaaggccttatgcagtctggagcccggcactgtggtcataacagagcaggcagtgga

SEQ ID NO: 171208 - DNA, 75 bp, Homo sapiens
ctggtaccctttacatcgctgagagatttgatgagtttgatgaagcaattgatgaagctattgaagatgacatca

SEQ ID NO: 171209 - DNA, 100 bp, Homo sapiens
attgcctgagcgcgtcgagccagacagactgctgagcgactatattgagaaggaggtaaagctggggtatggccgtcaatgtgtactccacatctgtgac

SEQ ID NO: 171210 - DNA, 75 bp, Homo sapiens
gagaccatattaaacttacatcctttgaagaagatggtggagagaattcgcaagttccagattctcaatgatgag

SEQ ID NO: 171211 - DNA, 98 bp, Homo sapiens
gcgcctcatcccactctggaagctgagccggcggcgggaggagctagggctggagcctctccagcctcccgcgaagggtcgagctgtgcagttttagc

SEQ ID NO: 171212 - DNA, 85 bp, Homo sapiens
gcttcaagacgtgttctcctgaaagccagcagatttatggagcatttgccaagcggcagcagcagcttaccgccatgaaggtcct

SEQ ID NO: 171213 - DNA, 74 bp, Homo sapiens
tgacagggtatctgaagtaaaaggggggagatgcagttaaagacttgatgcttcgctttctgggtgaaaaagct

SEQ ID NO: 171214 - DNA, 100 bp, Homo sapiens
ggattaaagctaaagacatagttcctggtgatattgtagaaattgctgtgaaacaaagagtcctcttcgtggaaaagaaaaaaatacgctccctttaaac

SEQ ID NO: 171215 - DNA, 75 bp, Homo sapiens
cgacccgaggcctccgctgcgcgacgctgtcagagatggattggggacaatcctgcggggaggtgctgaggaggg

SEQ ID NO: 171216 - DNA, 98 bp, Homo sapiens
cttgtttcttatatgtgatgccattccagcactggactcatggaggctgagcatttattcagacctctgtgagtgaaagccttcagagggaagctgct

SEQ ID NO: 171217 - DNA, 109 bp, Homo sapiens
aagctcgcacatttgacttggaagcaatgtttgaacaaactcgaagaacagctgtggaaagaagttgcaaaacactggtggatatatggtctgtgggatgcattatggg

SEQ ID NO: 171218 - DNA, 136 bp, Homo sapiens
accacaggccatcacagtcccctgttccgaggtcaggaggatgcaagtcctgacagattcagcaacactctgggtccatggctggcagtggaaatccctgatctgattcagaagggcgtcatccaacacaaagaga

SEQ ID NO: 171219 - DNA, 100 bp, Homo sapiens
caggactcagttctgaccaaggagctgagatgtgatggctggagactcaacaccattctggacggtttaccaaagatgcaggtcattaggaactattctg

SEQ ID NO: 171220 - DNA, 82 bp, Homo sapiens
tcaggggaacagcgagcagatcaaagaagctccaccatgaggcgaggtggatggaggaagcgagctgaaaatgatggctggg

SEQ ID NO: 171221 - DNA, 100 bp, Homo sapiens
ggattgccagagaattggcagaagctcccacgtgggacaagatggtgtcttcggcgcagatgggcttcaacctgcaggctctcctggagcagctcagcca

SEQ ID NO: 171222 - DNA, 96 bp, Homo sapiens
gacccttcctgtcgctgacggcgactgcgggaggccaggatctgtgccagttcagaagcaggcgagcctcttccctgatgaaaaagaagataactt

SEQ ID NO: 171223 - DNA, 100 bp, Homo sapiens
gtccatcgtgtgcctgatgatcacgcagctggctggcttcagtggaccaaaagaggaggccgaagctcggtcgcgggaagaggcggagcggcagcgtctg

SEQ ID NO: 171224 - DNA, 75 bp, Homo sapiens
atgtgggccgggagctgtacttctatatctacaagggggtccgcaagacctccaggttcctcctacttccgctat

SEQ ID NO: 171225 - DNA, 100 bp, Homo sapiens
gcgcgggccgaccgggcgcaccgaccatggcctccaaatgccccaagtgcgacaagaccgtgtacttcgctgatgtcactcgcagttgtgagcggccgcc

SEQ ID NO: 171226 - DNA, 132 bp, Homo sapiens
caaaaccgacatcctggaggagaaaatccccacctcccacctggctacctatttccccagtttccaggatatgattggccagagaagtcggtccagcaaatgtccagtagaggcgaaagtgaccagcgggag

SEQ ID NO: 171227 - DNA, 100 bp, Homo sapiens
atgggccctggggccacagggacaggtttggtcattttccccggagcctttgactggtttctggagaaacgcttcgttaagggactcaggcagtacggga

SEQ ID NO: 171228 - DNA, 99 bp, Homo sapiens
cagatttcaattacaaacccccacagaacataccagaagacattgtggatatcaagcctgccaatatggaagagctaacagaggtgattacagcagcag

SEQ ID NO: 171229 - DNA, 100 bp, Homo sapiens
gccagttccggcccgaggacaccgactaccagcaggggacggcaaaacagaacagaaaggcggagataaaaagaggggtgttaaaagaccacgagaagat

SEQ ID NO: 171230 - DNA, 100 bp, Homo sapiens
ccgcgatgtcaccctgagagtgaccggcgaggtgcacattggaggcgtgatgcttaagctggtggagaaactcgggcgtctctggccgagcctctttttg

SEQ ID NO: 171231 - DNA, 90 bp, Homo sapiens
tactcaaggctgcctctctgcaaagttgaggatttaagtgccctgtatgctcaaaatttgtatcctcagatgaaatggatttgcatcttg

SEQ ID NO: 171232 - DNA, 100 bp, Homo sapiens
tatgaatttgctaaacttaaaagcaagctggttctctgggatataaataagcacgaaagcaagagattatcaaagtcactgaacaactgatcgaagctat

SEQ ID NO: 171233 - DNA, 100 bp, Homo sapiens
ttgaaaattcacccttgtagagtcattcctgcctttgagcggactcccttttaaggtctctaattaacagaagatggcaaagcccagccacagcagctat

SEQ ID NO: 171234 - DNA, 75 bp, Homo sapiens
gggagatcccaggcggtgacagagtggagccatggctagagccacctgtctgtccagccacccttccacagactg

SEQ ID NO: 171235 - DNA, 50 bp, Homo sapiens
aatcgttaaacatctgaaagggtcagagctgttgcgcagccattggtacc

SEQ ID NO: 171236 - DNA, 101 bp, Homo sapiens
gcctcttccgccgccgggctcggggcctccgcagcgacaacatggaggccgtgaagaccttcaatagcgagatttcagaagttgattgcaaagatgcactg

SEQ ID NO: 171237 - DNA, 100 bp, Homo sapiens
cagagcgacttccttaaagatgtcgaactcagcaaaatggctcctccagatgcatttgcccagtataacatggatcagttcacgcctgtgaagatagaag

SEQ ID NO: 171238 - DNA, 100 bp, Homo sapiens
agacaaaagttttcctaatgcctacaacactgccatggaaacctccacagctgttgagaaaaaggagaaacctcttccaagacttaatatccattctgga

SEQ ID NO: 171239 - DNA, 75 bp, Homo sapiens
cattgtgcccaacaccatcacctatggctactacaataaggtagcaccggtgacatacctgcgagtgagcagcca

SEQ ID NO: 171240 - DNA, 98 bp, Homo sapiens
tgctgggacttcccgtccgcggcgtggaggacacgatgaggcgagtggtacgacagagcaagtttcggcatgtatttgggcaagcggtgaaaaatgac

SEQ ID NO: 171241 - DNA, 101 bp, Homo sapiens
tctgcgctcctgcatctgcctccccatgatgagcagcagcaagagatggccgcttctgccgccttcatagaccggcattacgggcacctggtagacgccgt

SEQ ID NO: 171242 - DNA, 150 bp, Homo sapiens
caagtaagaagctggcgaaacatagagctgcagaggctgccataaacattttgaaagccaatgcaagtatttggttgttttccagtctcagtattatcacagagctaactcaccccgccaacatgagattcatgcaattcagagccaaag

SEQ ID NO: 171243 - DNA, 100 bp, Homo sapiens
cacacttgaaggccttgcacacctgcagccctaccaagcattatccaattggtttgctatttgatcttcttgcatcaagttcagctcttccttggaacat

SEQ ID NO: 171244 - DNA, 95 bp, Homo sapiens
cacatggtggaatgtatccgggaggtcaacgaggtcatccagagcactgcagcctgtggtgttgaggctcacagcgatgccatccagccctgcca

SEQ ID NO: 171245 - DNA, 98 bp, Homo sapiens
gttgatatcggtggtaacgacggcctcagcaggcggggaagatgaaaggcctgaacacttgcctttgcagactcagttcaaagaaagagaagttggca

SEQ ID NO: 171246 - DNA, 98 bp, Homo sapiens
cagcctcccaaggagcctcacatgctgttcgatcgcatccgcttggtggtgaccaaggaattaactcctgaggagagagcccaaaagattgccaaagc

SEQ ID NO: 171247 - DNA, 83 bp, Homo sapiens
ctggagcggcgcagccggagtggggccgtgaggttgcacactgggccacagaggatccagcaaggatgaagaaatggagcagc

SEQ ID NO: 171248 - DNA, 75 bp, Homo sapiens
cagagacatggagagttgctacaacccagcgtccgagctgggccacagcctgaacgagaacgtcctcaagcctgc

SEQ ID NO: 171249 - DNA, 100 bp, Homo sapiens
tgaaattatcaactggcttgataagaatcagacaggggagaagaaagtgaggaccatcaagtgataggagaccaaagagtcttgtcaaggcatgccaaga

SEQ ID NO: 171250 - DNA, 99 bp, Homo sapiens
ctgacggccaagcactgccagaaatggagattcacttgcagaccaatgccgagaaaggcaccatcaccatccaggtagcctttccagtaaatatatgac

SEQ ID NO: 171251 - DNA, 82 bp, Homo sapiens
tcctcttctctgccaccatgaccaagaagcttcgggcagtacatgaacaactggctgctctgtcccagggtccaatatccaa

SEQ ID NO: 171252 - DNA, 87 bp, Homo sapiens
tactctcaacaagttcacagagcaagccaaggaaatggtgttagagttaattcgtgatcaaggcggtttcagagaagttcggaatga

SEQ ID NO: 171253 - DNA, 100 bp, Homo sapiens
atgcacagctaagatgccaggaccacctggaagcctagaaatgcactactgggttggggtctccacgaccgagctggtctcatcaagtggcgtccaacaa

SEQ ID NO: 171254 - DNA, 50 bp, Homo sapiens
ggaagaggaggatgacccacttggtagcacagagctgacaggcagcacga

SEQ ID NO: 171255 - DNA, 100 bp, Homo sapiens
tactcagaagaacttgtacagagatgtgatgttggagaactatagcaatctggttttcttgggctgtggaaaatctctgttctcacaaagtctccccaat

SEQ ID NO: 171256 - DNA, 100 bp, Homo sapiens
gactcctacctccaaagtttatactatcagaccttattttcctaaggatgagcggaaaccctttctgtgagtgggattccaaatgctaggaagctagggg

SEQ ID NO: 171257 - DNA, 100 bp, Homo sapiens
tttcattgttccactggacgctcatcagagggaagatctttttcctcaattggcacattgcaagcaacccgtgccttgatggtggttggcatcctcctgg

SEQ ID NO: 171258 - DNA, 96 bp, Homo sapiens
gaaaaggatccagcttccttctgaaaaggcgatcttcctgtttgtggataagacagtcccacagtccaggtcgggaaagaggttaaagaagacacg

SEQ ID NO: 171259 - DNA, 74 bp, Homo sapiens
gaaaaagaagagaggtgaacttaatgcttgtcatatgagtctagaaggaagctcataccgggggagcttgaaag

SEQ ID NO: 171260 - DNA, 90 bp, Homo sapiens
cggcaaatggcggacttcgacacctacgacgatcgggcctacagcagcttcggcggcggcagaggcatcacaggacatggccccctcagc

SEQ ID NO: 171261 - DNA, 100 bp, Homo sapiens
gcaagtttgtgccccatagctgcacaggttccagcaacagatagaaatgctttaagttcactctggggaaagctggcctctgaaatcttaatgcagaatt

SEQ ID NO: 171262 - DNA, 110 bp, Homo sapiens
ggacttggctggacggcgcggccacggagaagggcgcgtctgtgatcaaaacagggcgactgctaatcagtcacgaggctcccttgacaggcggctttgcatcggaaatc

SEQ ID NO: 171263 - DNA, 75 bp, Homo sapiens
ttattgttgaagacctagtagaagaggtgacctcagaaagtactactacagtaaaaagcaaagttgatgaaagag

SEQ ID NO: 171264 - DNA, 100 bp, Homo sapiens
atgactttgaatgggtgcatgttagtgctcaagagcctcattatctaccacccgagatgccccaaggtcgtttatacgcaatgcagactggaatgaagat

SEQ ID NO: 171265 - DNA, 95 bp, Homo sapiens
agaaacacaggagagcgagcgcaagcccccaccatacaagcacatcaaggtgagccccacgggggcagccgggcgcgacggtcggctgcgtgtgg

SEQ ID NO: 171266 - DNA, 82 bp, Homo sapiens
gcgcccatatgggggttctggagagcggggtgtggggagttagaagccgctcttcacagagatgacgtggagtttatcagtg

SEQ ID NO: 171267 - DNA, 82 bp, Homo sapiens
aaggaaatgagggcaacttctgaagacttcaacaaggcagagggtaccagacttcagcgagaactccgaggatatttagcag

SEQ ID NO: 171268 - DNA, 51 bp, Homo sapiens
cctactgcaatctactgcactcgaggagatgcctcataaatttgtgatagc

SEQ ID NO: 171269 - DNA, 95 bp, Homo sapiens
cagattattagcaatattatatagtatcgtggacagcagagttgctccaacagcaaatattttttcccagaaacctctgcgccatgagagccaag

SEQ ID NO: 171270 - DNA, 82 bp, Homo sapiens
gcttggagatgaagaccccagggtgcgacatgttgccgcagcatcactaattaggtatggtttaggaatgatttattacaag

SEQ ID NO: 171271 - DNA, 142 bp, Homo sapiens
ccgccgcctccggggagcctgccgggggcagcagcactgacgccgaggagcctggggaggcccagacacaggcagccatgccgcgcagcccaacatccagcgaggacgagatggcccagagcttctccgactactccgtggg

SEQ ID NO: 171272 - DNA, 134 bp, Homo sapiens
cggcgaaggtcagcgccgacggcagccggcacctgacggcgtgaccgacccgagccgaacatccagtcatggataaaaatgagctggttcagaaggccaaactggccgagcaggctgagcgatatgatgacatg

SEQ ID NO: 171273 - DNA, 98 bp, Homo sapiens
actgaagaaagcatcgtcctaggaatggatttctcctctaatgacagttgacattttgctaaaggctgtgggagacactcctattatgaaaacaaaga

SEQ ID NO: 171274 - DNA, 98 bp, Homo sapiens
gacgatctcattgacagctgcattcaatcttttggcacaagtgatccttatgtgaaatttaagctgaatgggaagacgctgtacaaaagtaaagtcat

SEQ ID NO: 171275 - DNA, 98 bp, Homo sapiens
tcctgctgctctgtctcagcgccgcctccctgcttcttaacagctctgtttaacctcatccctgtgggtctgcgagtggtggctatccaaggagttca

SEQ ID NO: 171276 - DNA, 51 bp, Homo sapiens
gacagatcgctgtcaaaaccctaggaagatgaagtcctcagtacattctga

SEQ ID NO: 171277 - DNA, 75 bp, Homo sapiens
gccgtaaggtgcatgggtagaggtgagactgctgctcctcgggccattttgaccggccatgactatgaggtcaca

SEQ ID NO: 171278 - DNA, 98 bp, Homo sapiens
gccgacgaggcggcggagcagcctgcgcacttccaggtgcgcagcgcgggagccgccacggtgcttgagctacaagagactgtgaaaaggaagttgga

SEQ ID NO: 171279 - DNA, 75 bp, Homo sapiens
ctccaaactccaccagccccgtgtccttcattgccacgtacaggtctctaattaacagaagatggcaaagcccag

SEQ ID NO: 171280 - DNA, 100 bp, Homo sapiens
gttttgatgactatggtggctataataattacggctatgggaatgatggctttgatgacagaatgagagatggaagagatttatcatagaatccccgact

SEQ ID NO: 171281 - DNA, 100 bp, Homo sapiens
cctctatatccgaggactgcctccccacaccaccgaccaggacctggtgaagctctgtcaaccgggccacctacagatgctcctgcagtggacacagcag

SEQ ID NO: 171282 - DNA, 50 bp, Homo sapiens
aagcattcagatgcatgacacaagggtgtcctgggccgggtctatgagac

SEQ ID NO: 171283 - DNA, 100 bp, Homo sapiens
cctcattcttattgttttattagggcaatttgtctcaataaaagcccaggaagaagacgaggatgaaggacagaataacgggctcccagattcacaagcc

SEQ ID NO: 171284 - DNA, 96 bp, Homo sapiens
ctggagtgtgcggcccgataagcgctttcgcttggcgctgggcagcttcgtggaggagtacaacaacaaggccgagacgcatccagagctttcgtg

SEQ ID NO: 171285 - DNA, 100 bp, Homo sapiens
gaagcggcctgaaagtggtggcgctggccagactgacacccataccttttgggcttcagaatgcagtgttttcggcatttgcaagtaaaatcactggcat

SEQ ID NO: 171286 - DNA, 100 bp, Homo sapiens
ggagcccgccggggcagccgccggacaccaggaccgcgagccagacagctcccggaagccgcgccgccgccgccagccaaaagaatgcaatggtgtaaag

SEQ ID NO: 171287 - DNA, 98 bp, Homo sapiens
ccaaagagctgaatgttatgtttattgaaactagtgcaaaagctggatacaatgtaaagcaggaggagatgttaaagtaacccatcttgcaggacgac

SEQ ID NO: 171288 - DNA, 83 bp, Homo sapiens
cttgaaggtgacaacttagagaccttgcctacatgtagcctgtgttgtacagcagaaagatgccaggcaatggtttgctgagc

SEQ ID NO: 171289 - DNA, 80 bp, Homo sapiens
caagcagttcagaagagccaaggaataaacatgcaatgaacccaaaagggtttatgatagttctcaatctcatgagagct

SEQ ID NO: 171290 - DNA, 99 bp, Homo sapiens
cagtagtgcccgccccacccgcatgctctttgtcactccccggcggcagcacgaaagtaccatgtgcaggttttgcagcatttggacaaacaaagccag

SEQ ID NO: 171291 - DNA, 98 bp, Homo sapiens
cggaacctgaaaaattcaagaagttgaaaaacgcttttcacgtcacctggagagatgcacagctgatttgaataggatgcacagacaaaatatagatg

SEQ ID NO: 171292 - DNA, 75 bp, Homo sapiens
tatatgttgaagtggcctatcccaggacaggtggcactctttcaggtctctgacatcctccgatacctatttccc

SEQ ID NO: 171293 - DNA, 97 bp, Homo sapiens
ggccgtggctcaagcaggacaatcgcactttataccacctgcgattactattgcaaatagaagagtcttccaaaccagtgaggctatcacaacagct

SEQ ID NO: 171294 - DNA, 115 bp, Homo sapiens
gcggtccaggctgctgccgcgacggggccggcggcggggcagctgccaggaacgagggtagcagctgatgactatcagccagttcgtctgctcagtaaacctggggaactgagaa

SEQ ID NO: 171295 - DNA, 75 bp, Homo sapiens
aagaggaggaggaggaggactatgacgaggaggaggaagagtccagtgaagtgctgggctttgacaaacttcctc

SEQ ID NO: 171296 - DNA, 83 bp, Homo sapiens
cccagtgcttctgtctcgactgcactttgagaagacagcccacctgaggatattgaccataaggactcatatctcattacaag

SEQ ID NO: 171297 - DNA, 83 bp, Homo sapiens
cttggactgagtcctgcaggacacagactgcctctgtcaccgggtccctccacccttgtctcctgtgcggccagcgtcagagc

SEQ ID NO: 171298 - DNA, 115 bp, Homo sapiens
ctcagtgatgatgttgttaaagccactcaagcaatctatctgtttgaactctccgggcaaggggacgcgagataaggtcctgatcagaatcatggtctcccgcagtgaagtggac

SEQ ID NO: 171299 - DNA, 51 bp, Homo sapiens
cggcaacgtcgccaagacctcgatgccttcaattaagttgcagagttctga

SEQ ID NO: 171300 - DNA, 99 bp, Homo sapiens
gtcctcctggcctcagcaacctgacaattctgtcgtgtcccggggttgagcattcatgatggtacctggaagtcagcaatttatggttttggagatcag

SEQ ID NO: 171301 - DNA, 100 bp, Homo sapiens
cctgtataaagatgtcatgatggagaattatggaaacctggtctcactgggtatgatgatgtcaaacgtgatgctgatgctacagttacagcccctgctg

SEQ ID NO: 171302 - DNA, 100 bp, Homo sapiens
gaggcttgagcgtgagcacttctggaagatcattaatgccttccgctactacggagtaaagccaatcccagctgaaggaatcaagtcaaatccttccaag

SEQ ID NO: 171303 - DNA, 96 bp, Homo sapiens
gtgttgccctgttcagtctgaggtgactctgacatcattagaagcatgccagaacagactggtgaaaagtaaaccttttcacctacaaaatttcac

SEQ ID NO: 171304 - DNA, 75 bp, Homo sapiens
gtgtgggagcgggagctgcggaaagccacagacccctttgcttctgtttttgggaatgaatcatttggaggtgga

SEQ ID NO: 171305 - DNA, 50 bp, Homo sapiens
cggcaaccgagggacccgcgtccaggaagggatgagaccatgcagcctgc

SEQ ID NO: 171306 - DNA, 82 bp, Homo sapiens
cgcagtggtcgcttcttctccttgatggcactgatggggaaacagaagttggagaaatacaacagaataaaagtgtcactta

SEQ ID NO: 171307 - DNA, 50 bp, Homo sapiens
ctcccgagtatctgggattacaggtgtacatgtaccagctcttccgcagc

SEQ ID NO: 171308 - DNA, 100 bp, Homo sapiens
tagaagatcacaataaacagctggagtctcagctccaccgcctccgacagctgctggagcaggagtgcatcagagccttaggtagaaataaacctcatac

SEQ ID NO: 171309 - DNA, 83 bp, Homo sapiens
ctggccaggaagatggccctgcggcgcgcctttactcactggaaacactcacggatgataccatcggggaccttaagaagctg

SEQ ID NO: 171310 - DNA, 50 bp, Homo sapiens
aggacaagaacagcgccgtcaccagcaggcagatcgggagcggtgccgag

SEQ ID NO: 171311 - DNA, 100 bp, Homo sapiens
gtctggagggctgagcagtcaactcaaatgcaagtccaagaggaggaggaggcggaggtccaagcggaaagcaacagggagctgccaccaccgtgtactg

SEQ ID NO: 171312 - DNA, 100 bp, Homo sapiens
gccaggactactagaactgtgtcaaaacagctgctacactaacgggcatctttgtcttgttctcagtcttaaaaagagatggcatgaactgggtctgcaa

SEQ ID NO: 171313 - DNA, 98 bp, Homo sapiens
acccgctaagctgatctcctgtacagtagtgctacttaaaatatgctggggaccatcaccatcacagttgattatggaagattcccacaagagtacca

SEQ ID NO: 171314 - DNA, 82 bp, Homo sapiens
tgacagtcacaattttgtaataaggcgcagtggctcacacctgtaatcccagcactttggcaggtcgaggctggcggatcac

SEQ ID NO: 171315 - DNA, 83 bp, Homo sapiens
cggaagggtctttgttccctgcagccctcccacggaaattcgaaatgagtcccatgactatcctcatagagtggccaagtttc

SEQ ID NO: 171316 - DNA, 90 bp, Homo sapiens
aatctgcccacccctcctgtaacccagcctgtttcacttcttgggtctcctatggacagaagtgcgggcaaggagctttgttcctccccg

SEQ ID NO: 171317 - DNA, 100 bp, Homo sapiens
gtgctacttcatgacatcatccataccaaggagacgctgacacttgtgtttgaatatgtgtttcctccagcttatggaggcatatctgaggtgaatcaac

SEQ ID NO: 171318 - DNA, 75 bp, Homo sapiens
ctcttggatttggctacacacttatagatcttctgcactgtttacaggcacagcatgacgacagagatgatggtg

SEQ ID NO: 171319 - DNA, 83 bp, Homo sapiens
ctcagttggaagcagccgatccagcctgcggagcctgtggggcagctgctggaagtgaacaagcagtgggaccagcatttccg

SEQ ID NO: 171320 - DNA, 98 bp, Homo sapiens
gtgctgggaggagactggagcccggttaggaagaatggagttggcgactcgctaccagaatcatgtcaaccctgccatggacttcacgcagactccac

SEQ ID NO: 171321 - DNA, 94 bp, Homo sapiens
cagccttcatttctctgaacatactgccttatgggacagatcaagtcgcttatgatgaagctacagatgaatttgcttcttacttcaacaaaca

SEQ ID NO: 171322 - DNA, 73 bp, Homo sapiens
aaagccagcctgtcccttgagacctctgagagtgtctttggtgcaacactaacaaggcttgtctggactaccc

SEQ ID NO: 171323 - DNA, 90 bp, Homo sapiens
cccgagggcggggaccggcggcgctggaggagcgaggcagctgtactaggactgggaacggataatctcagtgataccttgaagaagctg

SEQ ID NO: 171324 - DNA, 75 bp, Homo sapiens
tgcatacttggaatgaatccttctagagacgtccacgacctgcctagagctggaacgttacctccagagcgagcc

SEQ ID NO: 171325 - DNA, 75 bp, Homo sapiens
gatcaacctgtttatgcagtttcgggaccacctggaggaggtgttgaaagggacaccttggaagagcttaaggaa

SEQ ID NO: 171326 - DNA, 85 bp, Homo sapiens
ggaggataaaatttggagcaagattctcaaggaagcaacaagatcctaagctgagtcagtgctgattctctcaaatagagcttga

SEQ ID NO: 171327 - DNA, 50 bp, Homo sapiens
aggacctcagggacccaggctctgtgattgtggccttcaaggaaggggaa

SEQ ID NO: 171328 - DNA, 98 bp, Homo sapiens
cttttggagccaattattcctcacagcctctggatgagagttggccaaggtgggatgctatggaatatgatgagaagctggcccgtttccggcaggcc

SEQ ID NO: 171329 - DNA, 100 bp, Homo sapiens
ttccgggagcctagatcctgtgctttactctgaagactcgttacaagtgaacctgaaatgattggagctgaagttatttcagagttcttaattaatggcg

SEQ ID NO: 171330 - DNA, 75 bp, Homo sapiens
tccgagggtgcctgggaatcggtcgcctggaggaccagtatttcccatggaggggatcagtgtccttcagtgatg

SEQ ID NO: 171331 - DNA, 97 bp, Homo sapiens
gaaaatttcaggctgaaggtttagcgggtgccgatctattaatgagatgaagcggttggaagaaatgtcaaatatgtttcagagctctggagtccag

SEQ ID NO: 171332 - DNA, 50 bp, Homo sapiens
gccagccttggatttggcatgagggccttcagaacaacctgtcccccaag

SEQ ID NO: 171333 - DNA, 100 bp, Homo sapiens
ctggcagctgctagcaggctgtcataacaatgaccacctggtagagaaataccgcattcttatcacaaaggagaatgaagtttctagattagaagacata

SEQ ID NO: 171334 - DNA, 101 bp, Homo sapiens
gacggcggtggtgacgggcaccgggctcgcggggtcggcccgaaataggcggagttgggattcgaactcatttcacaggcagagggaggagagcagccata

SEQ ID NO: 171335 - DNA, 80 bp, Homo sapiens
cggttcgctgcccggtccgcccgcggtgagagaggactaccccaatggcacctggctgggcgacgagaacaaccccgaga

SEQ ID NO: 171336 - DNA, 82 bp, Homo sapiens
aaacaagtgtgtgcatctggctgttagaagaattcatgctcatccgggtgaccggaatgagaagatgaaaaatcaaattaag

SEQ ID NO: 171337 - DNA, 50 bp, Homo sapiens
ccagattttcagtctgataaccggcacttgatgacattagtgaaagcatc

SEQ ID NO: 171338 - DNA, 74 bp, Homo sapiens
agcggaggagcgcggccgtcttagcctgcgccgcgaggtctgcggcctcgtctgcagatctccaggggagccca

SEQ ID NO: 171339 - DNA, 75 bp, Homo sapiens
gctgacatcacagttgtctgcaccctgttgtggctctataagcaggccttcgatggcttcgcggctctgggcgtg

SEQ ID NO: 171340 - DNA, 82 bp, Homo sapiens
cctgggaactgggagacctgggtcccagtggagaggcctcaccatgtagaggagtatttgaagacttctgagcggaggagtc

SEQ ID NO: 171341 - DNA, 100 bp, Homo sapiens
ttcctttccgacttagtcctcgggaagaagtttcagactacaaggagcatattaatgaaaagtgccataaactgaaaaaccaaacatgagggtagcaggt

SEQ ID NO: 171342 - DNA, 98 bp, Homo sapiens
aggacgagggccggttgccgggcgcgggcgagaaaggtttgatctgtggatgaaatgaatcatgattttcaagctcttgcattagaatctcggggaat

SEQ ID NO: 171343 - DNA, 76 bp, Homo sapiens
ccgcgccccgcagcgccccgcagagcagtcgaggctatgaccagggccagagcactcagatctcagtcagaggagt

SEQ ID NO: 171344 - DNA, 75 bp, Homo sapiens
ccttttccgggtggggatctctgaaattactcaggctatgcctttctgctgttccaagaggaaagctcagtacaa

SEQ ID NO: 171345 - DNA, 75 bp, Homo sapiens
gcaggacagcatgctgcctgagttccaagatgagatgggattctccaacatggaagatgatggcccagaagagga

SEQ ID NO: 171346 - DNA, 75 bp, Homo sapiens
tttacttatatcaattcctggacacagaggtaccgttttgcagagattcgctaccatcgccctgaggagacccac

SEQ ID NO: 171347 - DNA, 49 bp, Homo sapiens
ccttgtttggatccccttttgagcagttcgatcctttggtacagaagac

SEQ ID NO: 171348 - DNA, 50 bp, Homo sapiens
caggcaccgagctgtctgtgcgtgtccccgcatcagagacttctcctggg

SEQ ID NO: 171349 - DNA, 97 bp, Homo sapiens
gggagagcgagttcggctcaaaggatttgagaagtatcgagcacagcttgataccaaaattgttgacctcctgtactggagagacattaagaagact

SEQ ID NO: 171350 - DNA, 75 bp, Homo sapiens
cacggccggaatggcagcaagctcaggtattatagctgcaaatgtccttgtattctgtttatggagagtaccttc

SEQ ID NO: 171351 - DNA, 100 bp, Homo sapiens
cagcatccctgcagccttctggtataccatcgtcaccatgacaacactagggatctttggaattagacactccttcacagccagtgaacaatcaccatgc

SEQ ID NO: 171352 - DNA, 78 bp, Homo sapiens
ccagacctgtgcttctgactatcttctcttcaccagctcttcagatcaatatggatctttcgaagatggtttggctgc

SEQ ID NO: 171353 - DNA, 100 bp, Homo sapiens
atcagtcggatacacacatattcatcatcatgggtgcatcgacagtgctgaagtaaccccgcctgtcctctctgtgatgggggaggccaccccagtgagc

SEQ ID NO: 171354 - DNA, 50 bp, Homo sapiens
aagacaattacctaatcaaggtttgggctggagcattggatttgctaaag

SEQ ID NO: 171355 - DNA, 75 bp, Homo sapiens
acatcgagatcaaccgggagccggcagagagtgaggaagaagatgaaatggaagttgaagaccaggatagtaaag

SEQ ID NO: 171356 - DNA, 73 bp, Homo sapiens
ttctggactttgggcgtcccattgccatgagacgagttgtactgctgtcacaggaaatggacgctggattaca

SEQ ID NO: 171357 - DNA, 101 bp, Homo sapiens
ggccgggagagggagaacacagttggagaaaatcggcagctgagacggccttggccggcgcaggccaaggcaaaggccaaaacttacgagtttcgaagtga

SEQ ID NO: 171358 - DNA, 100 bp, Homo sapiens
agcgcggtccctgtattggtctcctgctcctagagataaaataccatgaggagtttgagaagagccgcatgggccctagcgggggcgagggcatggagcc

SEQ ID NO: 171359 - DNA, 83 bp, Homo sapiens
aaggtctctggagacatcttcagcagggtccaaattccaagcctgtagtgtccttcattgctggtttaactgctcctcctggg

SEQ ID NO: 171360 - DNA, 74 bp, Homo sapiens
aaggattccaagtaactcttatttggtctcggcgcggaagatggccggcggcgtggacggccccatcgggatcc

SEQ ID NO: 171361 - DNA, 82 bp, Homo sapiens
gggtcgcagttcttgtttgtggatcgctgtgatcgtcacttggaagtttatctcgacaatgctagttgcagtctgtgtgacc

SEQ ID NO: 171362 - DNA, 98 bp, Homo sapiens
tcattgctcgtgggaacgcttattcaacggcaaaaggaccctgatgctcccataagacagaaaatgccccttgatgatctggatagagaagatgaagt

SEQ ID NO: 171363 - DNA, 96 bp, Homo sapiens
cttcgatgatcgtgtgtcggatgaggagaagtcggccgtatactaacaaggtaattactttatggtaccgtccacctgaactgctactgggagaag

SEQ ID NO: 171364 - DNA, 51 bp, Homo sapiens
agcaccccgcttctcgtcagctaccagggggagaagcgagcggacatccag

SEQ ID NO: 171365 - DNA, 100 bp, Homo sapiens
aggtaaagtccatggttccctggcccgtgctggaaaagtgagaggtcagactcctaagggcgaagagagcctccggatcctggtggagcccgaaggggac

SEQ ID NO: 171366 - DNA, 74 bp, Homo sapiens
aggaaccaattccggacacataacaagcagcagtgaggacaccaaagcgatctgcctgcctggatgtgatgagc

SEQ ID NO: 171367 - DNA, 101 bp, Homo sapiens
agggaacacaacaatggtccaagggggtttcccagattttaccaaatgttgcaagaactctggagttcttatggtagtaaaatgccggaaagaaaattctg

SEQ ID NO: 171368 - DNA, 100 bp, Homo sapiens
ccctctggaccctggagtacaccccgcagcacagccgcgacttcaaggaagggaaaaggccgaggcatcagcgtgtgaagaccgcaaagacgatcccgag

SEQ ID NO: 171369 - DNA, 46 bp, Homo sapiens
tggaccattatctcacccttcgaagcatctggaatcaagagaccca

SEQ ID NO: 171370 - DNA, 99 bp, Homo sapiens
gagagagcgagctgagtggttgtgtggtcgcgtctcggaaaccggtagcgcttgcagcatggcatatcacacctgaaaaattttatgtggaagcttgtg

SEQ ID NO: 171371 - DNA, 80 bp, Homo sapiens
gccgatccagcctgcggagcctgtggggcagtgaagccctcagtgagctgccactgagtcgggagcccagaggaacggcg

SEQ ID NO: 171372 - DNA, 100 bp, Homo sapiens
ggacatctgtagctgtcgtttggtttgatcttgttgactatgaggaagttctaggaaaatcatcagcgtgttagcattttctttgactatgcaagatgta

SEQ ID NO: 171373 - DNA, 100 bp, Homo sapiens
atactgtctttgatccaggaggcttgtgtcatctgccagcatttatgaaactgtgctccaagtaggatcaggatcctcatgaccagccaaagagaagaag

SEQ ID NO: 171374 - DNA, 75 bp, Homo sapiens
catcgcagttggaagcccatggggcagtgatgaattgactctggaaggcatcaagcaatttttcgtggcagtgga

SEQ ID NO: 171375 - DNA, 100 bp, Homo sapiens
agtatctatgcctatgataactttggcgtgctgggcctggacctctggcaggtgccactggacgagcgcatcgtcttctcggggaacctcttccagcacc

SEQ ID NO: 171376 - DNA, 81 bp, Homo sapiens
ccagcagcaggagcaagagcggcaagagcgcagaaagaccacagaggataagggctggtgggaaggagagtgtcaaggacg

SEQ ID NO: 171377 - DNA, 90 bp, Homo sapiens
gccgctgtgtggttgcaacggagataaattcccggaaccgcgattcggcgtgtcagaaatgcatcgtgattcctgtccattggactgtaa

SEQ ID NO: 171378 - DNA, 100 bp, Homo sapiens
tgccgccgccgccgccgcggtttgtcgccagaaggaagatggcggatctggaggagcagttgtctgatgaagagaaggtgactttcggatggtggttgga

SEQ ID NO: 171379 - DNA, 50 bp, Homo sapiens
aacagtgcaaccacatcttcctccgcagcagtgttgtactgctacttcta

SEQ ID NO: 171380 - DNA, 75 bp, Homo sapiens
cccacataacgatcaggtcattgccagcggttcagaggactgcacggtcatggaaggcgcaatggcgaggaagtt

SEQ ID NO: 171381 - DNA, 100 bp, Homo sapiens
tgaacaacctgaacgtcaccgaggagaagtaccaggaggcgttggccaaggagagttaagaaagacgtggacaagggcacacggcactcagacatgttcc

SEQ ID NO: 171382 - DNA, 74 bp, Homo sapiens
atgaggaccggagcggaaaaccttctgaagagcaggggagagaagacagaagaggttggagaggtcagggaggt

SEQ ID NO: 171383 - DNA, 100 bp, Homo sapiens
ctccagcgctcctgatctccgtgtgcagtacctccgccagatccacgccaaccacgagaacaatgtgagcttcgtggatgacagcttccctcccgggccc

SEQ ID NO: 171384 - DNA, 82 bp, Homo sapiens
agcgggcagccgagaaggtgtccgaggcccgcaaaaggtgttggaactcgccataaggcattgatcaggattatggtttccc

SEQ ID NO: 171385 - DNA, 100 bp, Homo sapiens
ctcagcttctcaagtagctgggattacagtgaaaaaagttgcctgtgaaggagtgaataatgatccagatgagtctatgagttctagaatttcagacacg

SEQ ID NO: 171386 - DNA, 74 bp, Homo sapiens
agcagtcggctacgaaacagcagcggaagtagccgggtcattcctgtcccaatcagctgctctactactgatga

SEQ ID NO: 171387 - DNA, 98 bp, Homo sapiens
gcttccagaacgctctgccactctaatggtatatgaagatgtcgtccaaatagtatcaggattccaaggaaacttggatttaactggccagaagcagg

SEQ ID NO: 171388 - DNA, 75 bp, Homo sapiens
cctcagcctctcaagtagctgggactacaggacctcaggctcatgctacagacccgggtatattttcttctcctg

SEQ ID NO: 171389 - DNA, 74 bp, Homo sapiens
agatattaggtcacagcagaagcagccaaaatggatccccagtggccaccaccacctatcatgacagatggtga

SEQ ID NO: 171390 - DNA, 90 bp, Homo sapiens
cgccggagcctgaggacacttctctgtcgtcacagttagaacactctgctccagccaaggtggtgagggcagctgttcctaaacagcgca

SEQ ID NO: 171391 - DNA, 100 bp, Homo sapiens
ggaaaaacgagccaaacttcgtgaaattgagcaagatggaaagttgccttttgttcctccggaggaagaatttattatgggagtttccaagtatggcata

SEQ ID NO: 171392 - DNA, 76 bp, Homo sapiens
aactacaacagaaacacccagaagatgtgctcagaaatgattctggggaccattctgaccacatgcattactatca

SEQ ID NO: 171393 - DNA, 82 bp, Homo sapiens
atttgttaaggattccaagtaactcttatttgttgcgagaaagaatcaaagctggcaaaggtgtgacttcagctattgacct

SEQ ID NO: 171394 - DNA, 96 bp, Homo sapiens
ctttggctttggatgagacttttaaagatgcagaggatgctttgcagaaacttcataaatatatgcaggtcagatgggcagacctggaagagaaga

SEQ ID NO: 171395 - DNA, 100 bp, Homo sapiens
cggaagcgttggaggacattccctgttgactgcgtcgcgatgtgtggcgactgtgtggagaaggaatatcccaaccggaatttacatagtacatgacgaa

SEQ ID NO: 171396 - DNA, 90 bp, Homo sapiens
attcagaaaagggatttaatggtgaagattttgaacggcttacgaaaatttgtgcaacacatcaagaagggagcactatgtctgcggaag

SEQ ID NO: 171397 - DNA, 116 bp, Homo sapiens
cagctataccagccaccctgcccccaagaaggaagtcatcatgggccggcctggaacagtgtctccagaacgctatagctatggcacctccagctcttcaaagaggacagagggta

SEQ ID NO: 171398 - DNA, 90 bp, Homo sapiens
atgaaagtgtgatgttcgcgtatttcttgacagcaagaagacagtttcgtggtgggcacagccgagggaacagtcttccattttcagctg

SEQ ID NO: 171399 - DNA, 90 bp, Homo sapiens
ccgacctcgacgtcttgcctgtgtcccacttgttcgcggcctataggcctccggtgtggctgtctctgatggtgtcatcaaggtgttcaa

SEQ ID NO: 171400 - DNA, 112 bp, Homo sapiens
tggtgaagctggcagacaagctgtacaatctgagggacctgaatcgctgcaccccagaggattgagaaaatcatgagttctattggagaagggattgacttttctcaggaac

SEQ ID NO: 171401 - DNA, 100 bp, Homo sapiens
ctctacctctgcacatcgcacccaggtggttcagctcgcatagtgtccacaggtcctggctaccctgggaagagacaagaagtaaatgaagaaagaggaa

SEQ ID NO: 171402 - DNA, 75 bp, Homo sapiens
ggaagaccaagatcatcgagatggtaactgtgacatttgatgatgtggccttatatttttcggaacaagagtggg

SEQ ID NO: 171403 - DNA, 82 bp, Homo sapiens
ggaagaggaacagcctatgtgggcttccacggaggtccatcttgagtggcctcttcccacccagtggtggctctgccttcat

SEQ ID NO: 171404 - DNA, 100 bp, Homo sapiens
cacagataccaaaaaaatctggggtagagaaagtttcctacactactgaggtttaggggcactgtgaagcaaaagccacgcctcagaatcccaggcggag

SEQ ID NO: 171405 - DNA, 100 bp, Homo sapiens
agagcccatagggcagagctgagtcggcagaaaaggagtggaggcagcacagacagtgaggacgaagaagaggaggacgaggaggaggaggaagacgagg

SEQ ID NO: 171406 - DNA, 100 bp, Homo sapiens
gccctcatgtccaactttgagcagctgctccgaggggtctggaagccagagaccaacgagatcctgcacatgtcttttgacaaatggcctacagctgtga

SEQ ID NO: 171407 - DNA, 83 bp, Homo sapiens
agttcctgccgtctgctcttctgcctcttgatctccgccaccgtcttcaggccagcatttgcaagtgaggaagcagcacaacc

SEQ ID NO: 171408 - DNA, 100 bp, Homo sapiens
caacaccatgccgtccgccttctctgtcagctctttccccgtcagcatcccagccgtgctcacgatttattgctaaacatgggtgcatttttggataaac

SEQ ID NO: 171409 - DNA, 75 bp, Homo sapiens
gtcaaaatagatcgttacactcagcaggacccatgtgggcagagaggagagttctcacctggagttcagcatggt

SEQ ID NO: 171410 - DNA, 74 bp, Homo sapiens
agacttggaacgcacagaggaacgagctgagctggcagagtccatccgcacttccactaatagccaagtagaca

SEQ ID NO: 171411 - DNA, 95 bp, Homo sapiens
acttaagagaaaacaaatgataggacacagggtggtggaagatctcaaagaggatgatatcgctgatttagtagaagctaaaaagttgcttaagg

SEQ ID NO: 171412 - DNA, 74 bp, Homo sapiens
tgtcctccatcgtgatgaaggcagagagcagagacatcccgatctggggaacaaattgtggctactaatttgcc

SEQ ID NO: 171413 - DNA, 130 bp, Homo sapiens
gccgccatggcctaccacagcttcctggtggagcccatcagctgccacgcctggaacaaggaccgcacccgagataccctcttggccatccgggccccatcaggcaccagcctggaggtgcccatcccag

SEQ ID NO: 171414 - DNA, 100 bp, Homo sapiens
aagaagctgaggatgaagaagatggacacattcagctaacgtattttagcaggtggagtgaggttgaagattcctgtgacagcgatgccatagagagaat

SEQ ID NO: 171415 - DNA, 100 bp, Homo sapiens
cggaccgagtgcacactggaggtcccagagcacgacgagcgcggaggaccgggaggctcccgggcttgcgtgggtggcattagaggtgacgcaaaggggc

SEQ ID NO: 171416 - DNA, 76 bp, Homo sapiens
ccttggacgatgccaaccacaccttctctgggatcgatgctctgttcatggcctcccacgggaacgacgccgcgag

SEQ ID NO: 171417 - DNA, 101 bp, Homo sapiens
tgtgaccacccctgaagaaattgcacaggtatttaaagcatgtgatgaagatcacaaaggatatctcagcagagaggactttaaaactgctgttgtaatgc

SEQ ID NO: 171418 - DNA, 75 bp, Homo sapiens
cactttcatagcaagtgtgatcggcacccgagggcttgcggctgaagcctcctctattggcccaggaagcccacc

SEQ ID NO: 171419 - DNA, 100 bp, Homo sapiens
cccccatcaagatgaccggggtgtgccggggggaaaggggcagcatgatggtctgagatggtgggtttgctgagttctctcgttgtttccctggcctctg

SEQ ID NO: 171420 - DNA, 113 bp, Homo sapiens
ttcgatgtctatatttaagtatctccgctacttcactcgcactatccttgatgctaggtgtggatgaggtcaccattgtcaacattttgaccaaccgcagcaatgcacagaga

SEQ ID NO: 171421 - DNA, 90 bp, Homo sapiens
gaacatttcagatttcgaaggacattccaatccagaggggaccccagtatttgcagatcgaacaatccatttcacagatgaagaaacaga

SEQ ID NO: 171422 - DNA, 98 bp, Homo sapiens
ctggtgacagcaaaaatgacccaccaatggaagcagctggcttcactgctcaggactctccagtcctcagtcaccttggacaaagaagtgtggatcct

SEQ ID NO: 171423 - DNA, 51 bp, Homo sapiens
catggtcctcaagaagttcctaaaaggaaaatagggatgctgataatacct

SEQ ID NO: 171424 - DNA, 75 bp, Homo sapiens
aacggactcatgtactttgtcagctttgtgacaacaaactgtgctctgcagttttcatcccgtggaatccgaccc

SEQ ID NO: 171425 - DNA, 89 bp, Homo sapiens
tggcccattcccaggcaggctgctaccgcccctccgcttccagacattctcagctgtcaggatgaaactgattccaagacagcctcccc

SEQ ID NO: 171426 - DNA, 75 bp, Homo sapiens
ggccgaagccgagcagaggatctaaatacaagagtggcctattggtcgttgaggacttccacatggagattggca

SEQ ID NO: 171427 - DNA, 75 bp, Homo sapiens
ccctacagatctgtgggactggtttgaatccttccttgatgatgaagaggactccctggaggaaaagcggaagcg

SEQ ID NO: 171428 - DNA, 87 bp, Homo sapiens
tgcatcggtcggctcaggacttacggaaacaggccagtctatccatatggggatggggaagccttggcattgtcctttttctgataa

SEQ ID NO: 171429 - DNA, 100 bp, Homo sapiens
aagtgtggcagcagttcgtgaagtctgtgaggaggtttattccctgctgtcctgaatcttgcttctaatgctcttatcacgaccaatgcaacatgtggag

SEQ ID NO: 171430 - DNA, 83 bp, Homo sapiens
acgagtgcaacatctgcaaggtccgcttcaccagcttttcctccgcaaccatgtctgacaaacccgatatggctgagatcgag

SEQ ID NO: 171431 - DNA, 50 bp, Homo sapiens
ctatgccctgcaactgcaccagttacagcaacattaaagatatccattca

SEQ ID NO: 171432 - DNA, 96 bp, Homo sapiens
gcggcacgaggggccttcgccaccacgcactgggtcgtcacggaggacgggaaaatccagcagcagtagagatggggtttcgccgtgttagccagg

SEQ ID NO: 171433 - DNA, 83 bp, Homo sapiens
caagtacctttatgaaccagtgtatcccaacttatgtccctgatgccaaaaatgcacctactctttcctctaactctggtgag

SEQ ID NO: 171434 - DNA, 76 bp, Homo sapiens
ccaggaggccaggggtgtcgccatgaggaagtatcattctgcaaaggaggcatatgaacaacttttgcagacagaa

SEQ ID NO: 171435 - DNA, 90 bp, Homo sapiens
agtggagaccagcagaactccaccagagcaaggtccgtggtcctgtcagtggaagcccggatagcatgaatgcctctcgacttagccagc

SEQ ID NO: 171436 - DNA, 101 bp, Homo sapiens
ccagctgtgagcagagtgttctgttcttcacttccagcaagccagtacaaaattggacagctgtacatgatcagcaaacacagccatgaacagagtgaccg

SEQ ID NO: 171437 - DNA, 100 bp, Homo sapiens
tggagatgaagaccccagggtgcgacatgttgccgcagcatcactaattagagttactgtgacaacaacatactttggccactctgaacagatatcccag

SEQ ID NO: 171438 - DNA, 76 bp, Homo sapiens
cacgattgttgtttcttggactgcagaaattggaagaggcttccgagtggacctgccaatcaagtcggcccgctac

SEQ ID NO: 171439 - DNA, 75 bp, Homo sapiens
agcggtttaagtcttcagccaggtggattggtgatagaaaagcagtgctttgatcccacctgtacacacattgtt

SEQ ID NO: 171440 - DNA, 75 bp, Homo sapiens
ctgcggtggctgcgggactgacgagagtgaaagctggacattgaagaagccaaaatctgtttccaagaaactaaa

SEQ ID NO: 171441 - DNA, 114 bp, Homo sapiens
caaaaatcccatctaccgcaactctcagttcgagagtaaaggcagtggagctactgctgtggttcaggcagccctatgcaaacccaggcaagaacgtgtagcaataaaacggat

SEQ ID NO: 171442 - DNA, 100 bp, Homo sapiens
agaagcaggacctcgggccatgggtggagtctttcattttggatcaggatgatttggaaaatccaatgctggaaacagcttccaagttgctcttatcagg

SEQ ID NO: 171443 - DNA, 96 bp, Homo sapiens
catccagagctgtgcctcccagcaccacagtccttctgcagtccctcgtccagccacccccagagagtgggaccgtggccgtgagcgccgtagtcg

SEQ ID NO: 171444 - DNA, 74 bp, Homo sapiens
gcagcctgttcggcgaggacaacgtgcgcgccgctcagaaggcgaacagctgcttggagaactacaagtgaaga

SEQ ID NO: 171445 - DNA, 102 bp, Homo sapiens
tcaagagtcataggattagatgatccaagtcaccaagaaattactgtctcaagtgatacggtacagcagggaagaactggaaactcagagaaagaaactgcc

SEQ ID NO: 171446 - DNA, 95 bp, Homo sapiens
ccggagcgcagccctgaggcccagggtattagaaaactactcggatgctccaatgacaccaaaacagattctgcaggtcatagaggcagaaggac

SEQ ID NO: 171447 - DNA, 82 bp, Homo sapiens
ggatcatgtctgcgagccaggattcccgctcagttcctacccccggttgcgagaggagacagagcgaatcgtcaccacttac

SEQ ID NO: 171448 - DNA, 101 bp, Homo sapiens
gggaaatcgggctgaagcgactgagtccgcgatggaggtttgaaagagaagatagtgaggagctttgaagtctccccagatgggtccttcttgctcataaa

SEQ ID NO: 171449 - DNA, 82 bp, Homo sapiens
cagatctgcaaaggacaaccagccaggtcaatgagtggtcattgaagataagaaaggaaatgagagttgttgacaggcaaat

SEQ ID NO: 171450 - DNA, 74 bp, Homo sapiens
ttggaggatgaaaagaggctggcccaccccttctccttggccgtctttgagggaaatgcaataccttatttcca

SEQ ID NO: 171451 - DNA, 75 bp, Homo sapiens
ctggtgacccaggccaggaagaacaccatcaccctggagaagggtcaaggtggaaggtccaaggactgagaaaga

SEQ ID NO: 171452 - DNA, 90 bp, Homo sapiens
ctggaaatgtcagccaagatccgagtaccatttttacgtcaggttgttcccattagtaaaaaggacacatgacggaagtgtgtatttttg

SEQ ID NO: 171453 - DNA, 100 bp, Homo sapiens
ctgtactctcatcgctctcggcctccgacacgttgtatcacggactgattcaccgagcccaaccgtactcaactcacatatttctaccccaaatgtgaat

SEQ ID NO: 171454 - DNA, 75 bp, Homo sapiens
aaattatgtgcatttgttacttggtcagatgtatcggaacagtacaacatctaaagagtaaatttggaaaaggct

SEQ ID NO: 171455 - DNA, 75 bp, Homo sapiens
cgcagtggtcgcttcttctccttggtaccctcttaccaattatacttttggtacaaaagagcccctctacgagaa

SEQ ID NO: 171456 - DNA, 50 bp, Homo sapiens
gcgaagacgcggtgggccgcccctccgatgagacaccaattattgcggtg

SEQ ID NO: 171457 - DNA, 90 bp, Homo sapiens
gaagatgtgccgccgctgccaacgtcgagcggcgacggctgctgagacgttacaacaaagattagaagacctggaacaagagaaaatcag

SEQ ID NO: 171458 - DNA, 50 bp, Homo sapiens
gcttctgcagtgcattgttgatgagtcttggacgagcctgaggatgtcta

SEQ ID NO: 171459 - DNA, 80 bp, Homo sapiens
ttgctgtgctgagaggctatgatataacagtcttcactcctatgctgatttttctggtgccactgaagttattttggaag

SEQ ID NO: 171460 - DNA, 96 bp, Homo sapiens
gtcggctaagaagccaggctgcgtgtgtggtgatgatgtccagcaactctgtgaagcaggagaagaggagtttttggaaatcatggcactcgtggg

SEQ ID NO: 171461 - DNA, 74 bp, Homo sapiens
agtttgtagcctattggaggaaaacacaccaaggtaaagaaactgcggcaatgaaagctgatctcctgagggcc

SEQ ID NO: 171462 - DNA, 100 bp, Homo sapiens
ttcgtgtctggctctggaattgctactgctgcctctgtcactcctggtgaccagcattcaagatggagttttaacattgaatgcggagaacactaattat

SEQ ID NO: 171463 - DNA, 75 bp, Homo sapiens
ccccggggtcccaggaagggcggcccaggctcgggctcaagttcactacaggtcacaaaacatgatgtcttgttg

SEQ ID NO: 171464 - DNA, 75 bp, Homo sapiens
gccacctacagccgcttgctagaggttgaggacgctcagttaatttggagtggcccctggagtcagtttcctaca

SEQ ID NO: 171465 - DNA, 90 bp, Homo sapiens
gaatctacagggacgccatcgaatccggtttatttttcaggaaaaagacaggcgtgtcctaattgggttttccagaccttggttataact

SEQ ID NO: 171466 - DNA, 75 bp, Homo sapiens
agcactttcactctggaaaacattactgggaggaagaggaggtagaacgggaaatcattaaacaggaagaaagtg

SEQ ID NO: 171467 - DNA, 74 bp, Homo sapiens
actttgaggtcactttccagcagtccagcacggccaagtcagccacctggacgctcaccatggatgatgatatc

SEQ ID NO: 171468 - DNA, 78 bp, Homo sapiens
ctgggccgcgtgaaggccttcgataggagccttcacgtaaatgggtccagtcatgcctcccagtaagaagccagaaag

SEQ ID NO: 171469 - DNA, 99 bp, Homo sapiens
ctcgatgaggataacatccctccagaagatggaatgatgagaagacagcagctgattacaagattttaggtggttcagtccttcacctggtgttggctc

SEQ ID NO: 171470 - DNA, 96 bp, Homo sapiens
ctcagctcaaatacacacacctgttgccattatagagctggaattaggcaaatatggacagaaggaatgactgcatggacggaagaagaatgccga

SEQ ID NO: 171471 - DNA, 95 bp, Homo sapiens
gggacacacagcaggtgaccaccctccagctacccccggtgctggaaacatgcatgaagagctgcggcaagcggttccacgacgaagtgggcaag

SEQ ID NO: 171472 - DNA, 75 bp, Homo sapiens
aaaactttgggcttgcaacttttgttaccaaaggaatcaggccataggaaaaggatacagagtagagtttcatga

SEQ ID NO: 171473 - DNA, 74 bp, Homo sapiens
atacacacacctgttgccattatagagctggaattaggcaaatatggacaggtttactcctggcttgggggcat

SEQ ID NO: 171474 - DNA, 101 bp, Homo sapiens
caagaaacaggagaacgggaagcctcctgccgagataaagccaccacgtctgccaatggagatcttcgtggatgatgagacgaagttgacgctgcatgggt

SEQ ID NO: 171475 - DNA, 98 bp, Homo sapiens
ttagctgttgctgctcacgatgttggagaatatgtgcggcattatccacgaggcaaacggttatgaagttcatggaatggaaaaaataccagaagatg

SEQ ID NO: 171476 - DNA, 75 bp, Homo sapiens
gtcttttgcagatgatcgccgggtgtcgatccttttccctccagtcagcacaacagctccagctggcagcatcac

SEQ ID NO: 171477 - DNA, 100 bp, Homo sapiens
gtcatatgctagtgatctctataatggttccagtatagtctctaggttgaatgcctttgagaacttgatgcataaaatttgcatgactcctcactccttt

SEQ ID NO: 171478 - DNA, 100 bp, Homo sapiens
ccaagatcttggcaaagcttctccctcagtatttagaccagccaggtgactttatacacactttgggagatgcacatatttacctgaatcacatcgagcc

SEQ ID NO: 171479 - DNA, 100 bp, Homo sapiens
tttctctgccatgttgctattgcaggacggagaggtcacaagccccaaagtggacgtgttcaatgctaacagcaacctcagttctgggcctctgcccatc

SEQ ID NO: 171480 - DNA, 89 bp, Homo sapiens
gtgacagcgagagcggcccggacgacaagggggggccctcagcctcttggccttgaacgggctgttcatcttgattcacaaacacaacc

SEQ ID NO: 171481 - DNA, 98 bp, Homo sapiens
agcactgcgcagccgtggtgtccagcctcctgggcagccccttgcccttggacagagcgggaacagcttccacgtgttcgaccagggccagtttgcca

SEQ ID NO: 171482 - DNA, 75 bp, Homo sapiens
gtggagcagctgggtcagctctacggctgcgaggggacacctgtgttcgtgcatgcgggcccttttgctaacatt

SEQ ID NO: 171483 - DNA, 100 bp, Homo sapiens
cttcccctggggaccgaagaaagatcagccctttttggaaacatacaggatatctaccacttcaataggttggcgtgcagtggtgtgatctcagctcatt

SEQ ID NO: 171484 - DNA, 88 bp, Homo sapiens
ctactatccatttcaactacagatactttgaagtagaagaagctgatggttcaaaatcaaaggaagcccagaagggaggtcattttta

SEQ ID NO: 171485 - DNA, 75 bp, Homo sapiens
cagcaatctcctcctccactgccactacagggaagtgcatcacatgtcagggcaaagcccaacaccttcccccac

SEQ ID NO: 171486 - DNA, 75 bp, Homo sapiens
ccgtcttcggtctcctggggtcggcgccgagtgggaggatggcggaagcatccgtgggctctgagaagctctttg

SEQ ID NO: 171487 - DNA, 75 bp, Homo sapiens
tgcgtcatgggggagtgctgatcaactaaaagaggaactgtggctgcaccatctgtcttcatcttcccgccatct

SEQ ID NO: 171488 - DNA, 74 bp, Homo sapiens
ggtggaggaggtggaggaggcgccggaccgggggggatgatgcccggcaattatttgttttagctggcagtgct

SEQ ID NO: 171489 - DNA, 100 bp, Homo sapiens
cagccacagagacagtgcctgccttttcagagcgtacctgtgccactgtcaccattggaggaatattagtgggatggtttggccatgaactcagcaccag

SEQ ID NO: 171490 - DNA, 75 bp, Homo sapiens
gcttcttccccactcccgagacagggtgatgaattagaagacaatggaaagaatttctacgaatctgatgatgat

SEQ ID NO: 171491 - DNA, 82 bp, Homo sapiens
gctgcgagtgcggcctcggctggcggcggcaccagaatagcctaacatggcagaccagagacagcgctcactgtctacctct

SEQ ID NO: 171492 - DNA, 51 bp, Homo sapiens
cagctgcggaatttgcggctttggcaggtattgctggatgctgtgccaaaa

SEQ ID NO: 171493 - DNA, 133 bp, Homo sapiens
cttgaacttcgtgagtttcgctctaaactgcccttgaaatgaagctggacttggagccacataaagaagatccctaatagtcatttctcaacaattatatagtcaactgatgtaacaatggtactaatattgg

SEQ ID NO: 171494 - DNA, 73 bp, Homo sapiens
aagaaaccgaagcagaatgtaccagggacacatgcagcatatgagctatttgcattcatcagtcacatgggaa

SEQ ID NO: 171495 - DNA, 97 bp, Homo sapiens
tgccctgtggcctcgctcctcggagggtggacctgtggcagcccagcagtatctcctatgtatcagagggaacagttactgatgtccatatccccca

SEQ ID NO: 171496 - DNA, 100 bp, Homo sapiens
ggctgcctcggcggagcagaggaaccacacgctgatcatgaaaaagcttgtggtgaaggggggcaaaaaaaagaagcaagttctgaagttcactcttgat

SEQ ID NO: 171497 - DNA, 100 bp, Homo sapiens
tcgaaaggagcaagagcaagatcaccgtgacatccgaggtgcctttctccaaaagctcaaggagttatgaccactcagaaaattctgatttggtctttgg

SEQ ID NO: 171498 - DNA, 100 bp, Homo sapiens
cacgacctccacgctggactggtgcgaggagaactactccgtgacctggtacatcgccgagttctgaagcagacagtatgagcatgaccagtggagaagg

SEQ ID NO: 171499 - DNA, 96 bp, Homo sapiens
aaaagataaagaatcagataaagaagatggacgggaatctccttcttatggtgagaatgagatggtgatcatgagacctggaaacaaatatgagta

SEQ ID NO: 171500 - DNA, 100 bp, Homo sapiens
ttgcaacagaattacagagtatgatgtgagacaggggaaaaggtggaaacagacatggagaatgagaaagtgagtgaaggggctgaaaccaaagaagaag

SEQ ID NO: 171501 - DNA, 75 bp, Homo sapiens
atcccggcctcacttcgtcccactgtggttaggggtaaagtcactgatctttgaccagagtggtacctacctggc

SEQ ID NO: 171502 - DNA, 75 bp, Homo sapiens
gaggttttcaggaccaaaattgtggaaaagtcactctgaaagtttcctacactactgaggtttaggggcactgtg

SEQ ID NO: 171503 - DNA, 75 bp, Homo sapiens
cggccgctgagattctgtcgtgtcgtcgctgctggcacttcaggctctggatgtgaaggtcttccgggccctgat

SEQ ID NO: 171504 - DNA, 98 bp, Homo sapiens
tgggaactcccagaacataggagaacagggctactcctccacaaactccagtgacagcagacctggtcctgtagacgggaaggagcctggacacagtg

SEQ ID NO: 171505 - DNA, 100 bp, Homo sapiens
gggaaaagtggcactgaggctctggaacttctgcccagctctccttgacctcgggactcaacaataaaccagaccagtatggctctatcttcatgaagaa

SEQ ID NO: 171506 - DNA, 121 bp, Homo sapiens
gagcaaccagtctgctgtccagaaattggaaacaaacacgacggagtgtggcgatgaggcgaagaaggatctaagggcttggcttgtttgaaagaaccacaccccgaaagtaacatctttg

SEQ ID NO: 171507 - DNA, 82 bp, Homo sapiens
gccagatcatcggtcaggccaagaagcatccgagctgggtaattccagaattgattggccataccattgtcactgtattact

SEQ ID NO: 171508 - DNA, 90 bp, Homo sapiens
aggagtctcagagctgtcagaaagtgggcctttggagtgacgctgtgggaactcatgactctgggccagactccctacgtggacattgac

SEQ ID NO: 171509 - DNA, 117 bp, Homo sapiens
agatcgccggggaggcagcgcgggatcccagcctcaggcgtgcgcggacggtgtgcggatacctgggagagaggatttttcatgttaccaacacaaagaaatgataaaggtttgagg

SEQ ID NO: 171510 - DNA, 96 bp, Homo sapiens
gccaatcccccctcacccaggcccctgtcaagaaggtgccggtggtgcgagtcttcggagcgaccccggcaggcagtcttgattgatatggaagaa

SEQ ID NO: 171511 - DNA, 100 bp, Homo sapiens
gccacaaacaaatcaaccgccttgaggatctttctgcccgcctgagtgatcttgaaatgaatagatggcgattttgctgacagctgccaagaaaatgctt

SEQ ID NO: 171512 - DNA, 75 bp, Homo sapiens
atcagatgtgatatggaagatattcatactcttcttaaagaagatcagccagcattactaacctgtcactggata

SEQ ID NO: 171513 - DNA, 74 bp, Homo sapiens
gttctcaacttggttattgtaaaaaaaggagaaggtgctggagagggtgaatgccgtcaagaccaaagtggaag

SEQ ID NO: 171514 - DNA, 100 bp, Homo sapiens
ttcgtcgtgctcagcggtgggaggaggcggaagaaaccagagcctgggagagataattgacgaccttgccaacctagtggagaacacagatgaaaaactt

SEQ ID NO: 171515 - DNA, 100 bp, Homo sapiens
taccgcatctggctggagccctgcattcgcggcgtgtgcaggaaatctgaaatagagtactatgctatgttggctaaaactggtgtccatcactacagtg

SEQ ID NO: 171516 - DNA, 98 bp, Homo sapiens
gaagacataggccaaggagccagacttcctgtgttaactccttcctctgccactttttaccttggggacctcagcataagcagtactataatggatgt

SEQ ID NO: 171517 - DNA, 100 bp, Homo sapiens
cgccgccgccgttttcgcctgcagctgctcaccgatggagtctcgccctgtcacccaggctggagtgcaatggcgtgatctcggcgcacttcaacctcgc

SEQ ID NO: 171518 - DNA, 101 bp, Homo sapiens
ctgcgatggccgtggccgtggggagaccgtctgttgccaacttggcctgttccatctcaaataatgaagaaggtgtaaagcttgttcgaatgtctgcaagc

SEQ ID NO: 171519 - DNA, 100 bp, Homo sapiens
ctatacagggaggtgatgctggagaattatgcaaatgtgacttccttgtgaaggaaaacaggcttcgttggctgcagacttctccatcactcaatttaag

SEQ ID NO: 171520 - DNA, 87 bp, Homo sapiens
tctttgtggtttatctaaaaaccaaaggaacattttagtggacaaaccaaatgaccaatcttcaagatggtcttcagagagcaacta

SEQ ID NO: 171521 - DNA, 100 bp, Homo sapiens
gcctggcccaggcgcacacggaagtgaatgcctaccgcaggaatgggatggcttttctagcctgctgatgtgacaactgtgatgtgcctgcaacaacagg

SEQ ID NO: 171522 - DNA, 82 bp, Homo sapiens
gagagagcgttctgggacgtgcacaggcccgtggaagatcagcccatctacttggcagtgaagggagtggtgtttgatgtca

SEQ ID NO: 171523 - DNA, 100 bp, Homo sapiens
gcagcagtaccaggaggtgtgcgcacagagagatgcctaccagcagaagctggtacaacttcaggaaaaggcatacccagatggaagtagcaaagaaaag

SEQ ID NO: 171524 - DNA, 100 bp, Homo sapiens
tagagactgaaatcactgcaccttaaaaacaaaagattgagctgcactgtattcctcatcaacaacagcaacttgtgattggcggtgaccggatattcag

SEQ ID NO: 171525 - DNA, 87 bp, Homo sapiens
tcgcaggagcacatcgagaccgcttaccgcatctggctggagccctgcattcgcggcgtgtgcagctgcaagctttcttcctggtgg

SEQ ID NO: 171526 - DNA, 88 bp, Homo sapiens
cggcgctggccgagagccgcggctccgtgtttctggaaagtgacagcagaaacgcttcgttaagggactcaggcagtacgggaagaac

SEQ ID NO: 171527 - DNA, 125 bp, Homo sapiens
gtccaaggccatgggcatcatgaattcgtttgtgaacgacattttcgagcgcatcgcaggcaaagtccaatccactgccgatatctttggtgacgaagaaggagatctgttcaaagaaaaagccg

SEQ ID NO: 171528 - DNA, 82 bp, Homo sapiens
cagacgtcaacgtcaaggacttcgcagatcgggtgctaccaaggttttgcttttgcatggaaatgtctactgcacagttgca

SEQ ID NO: 171529 - DNA, 90 bp, Homo sapiens
cgtgggcagcggcggctggcgcttcctgcgcatcgtctgcaagaccgcgaggcgagacctcttgtgatgctgtggagtcttcaaaaagcc

SEQ ID NO: 171530 - DNA, 51 bp, Homo sapiens
cttgtctcagctgctgaagctggtattagtgctttggttgaaatacctaag

SEQ ID NO: 171531 - DNA, 111 bp, Homo sapiens
gcggcggggaggggagaggctctgagaggcgaggccgggtgagaagccctaccactgcaactgggacggctgcggctggaagtttgcgcgctcagacgagctcacgcgcca

SEQ ID NO: 171532 - DNA, 100 bp, Homo sapiens
ttaaaacaattgctgcacgaaacactgaaattttggcagataatccttcctcagacagttttcttggctcaggcgatttaagaacctttggccagagtgc

SEQ ID NO: 171533 - DNA, 100 bp, Homo sapiens
gccagccctgctcgcagaattaccgcctcttctttagagcatgttaaatgggttcatgctgaaatggtaaataaaaactccgagttaaagctgatttatg

SEQ ID NO: 171534 - DNA, 133 bp, Homo sapiens
ctgcaggaagtggctttttatcagttgcaacaggactgtgacctgagctgtcagatcaccattcccaaagcttagcctgcgacgcttatgattagagccaacaatttgaaatggcctgctcacctgatgcagt

SEQ ID NO: 171535 - DNA, 51 bp, Homo sapiens
caaagacctgacgggagaggtggaggatatgctgcaggctgctagtcatta

SEQ ID NO: 171536 - DNA, 100 bp, Homo sapiens
gcctttcttatactctagaatatacaaagacaaaaggagattctgatgaagaagttattcaagatggttacaggaggttccagtggcatcgggaagtgca

SEQ ID NO: 171537 - DNA, 82 bp, Homo sapiens
aagagcaacatctttcctcaccccaaggaccggaacagggacctggccactgccctggagcagctgctgcaggcctacccta

SEQ ID NO: 171538 - DNA, 83 bp, Homo sapiens
tttgaaggatcctattgtttctataggattttattgcacaaaggcaacggtgactttcaaaaatatcgataacttgatgaccc

SEQ ID NO: 171539 - DNA, 75 bp, Homo sapiens
agctggagttcccttcccttccacagtgcaaggaagacgccgaggtaagaatgattgatgttggctgatattgga

SEQ ID NO: 171540 - DNA, 75 bp, Homo sapiens
ccccagcgtgggtgaagataggatcaagatggccatgtggcaggcatcaagcttctagctgtgcaagaactgctt

SEQ ID NO: 171541 - DNA, 100 bp, Homo sapiens
tgaacctcaccattctaagaatgaaaggccagcacgaacgctgcgatgactggggactagacaccatgaggcaaatccaagtgtttgaagatgagccagc

SEQ ID NO: 171542 - DNA, 71 bp, Homo sapiens
caagtgtggctgcaggtggccacttgatactgatggacattgtgtgggccagaggcagggatggttggcta

SEQ ID NO: 171543 - DNA, 99 bp, Homo sapiens
gagaggttttgaattcacgcttatggtagtggaaaacgttgtgtgacgtgatcctcatggtccaggaaagaaagatacctgctcatcgtgttgttcttg

SEQ ID NO: 171544 - DNA, 82 bp, Homo sapiens
ctgtcagctctttccccgtcagcatcccagccgtgctcacgcccagggccttgctgccgccatgactgaggaatcagaggag

SEQ ID NO: 171545 - DNA, 75 bp, Homo sapiens
ctggcagtagcgccctgtaggacccccaggacccgatggattactacagcatcccatttcccacacccactactc

SEQ ID NO: 171546 - DNA, 87 bp, Homo sapiens
agggactcggcctcggaggcgacccagaccacacaggtaaaacttccttttcctgtagatcaaatcacagatcttccaaggaacgat

SEQ ID NO: 171547 - DNA, 100 bp, Homo sapiens
tgcggaggatggtgcaggagcgcgagaaggatatcctgacggccatcgccgccgacctgtgcaaggatcacagtcaccttctatatagcaccatccccag

SEQ ID NO: 171548 - DNA, 75 bp, Homo sapiens
gaaaatggagcccttcaccaatgccagtcggatgatgattctgggtcagcttcaggctctggatctggttcgagt

SEQ ID NO: 171549 - DNA, 100 bp, Homo sapiens
gtgagcaccttttggcccaatgaatatcagctccagggtttgagccacaatgtgatcttcaccttggattctttgttaaaaggagacctaaagggagtca

SEQ ID NO: 171550 - DNA, 82 bp, Homo sapiens
aaggtcatttcactgcctgagctgaagggctgcctgggtgttagcaaagaagacagtgggagtagctcaccgttacccaagt

SEQ ID NO: 171551 - DNA, 75 bp, Homo sapiens
cctcaggggaagaagctggacttcagccgtccaagcttatcacacagactttcagccaccacaatcagctggcac

SEQ ID NO: 171552 - DNA, 83 bp, Homo sapiens
ggatggtggaggcgagaacactgaggaggtagcccgggaccctcgctttgatgatctgtcaggggaatataatcctgaggtgt

SEQ ID NO: 171553 - DNA, 90 bp, Homo sapiens
atttctgagtattgtctttatatcctgacactatgaatgctacttggatgcctcttaagaaactggcgatggaatatgagaggagccctc

SEQ ID NO: 171554 - DNA, 100 bp, Homo sapiens
agcagatatgcctgctaacatggataagcatgccctgaaaaagtatcgtcgagaagcctatcatcggagcagccaaaccaagtgaactatgggaatatct

SEQ ID NO: 171555 - DNA, 74 bp, Homo sapiens
gactagcattcctaaggaagaactaccacactgtcctgcaggtcctggtgaacgccatcatcaacagtggtccc

SEQ ID NO: 171556 - DNA, 90 bp, Homo sapiens
tgtaccacaaatgtacccacaagggccggccaggccctcagccctggtgacagtttcctgaggagaggggtgtatccaggcttacctccc

SEQ ID NO: 171557 - DNA, 82 bp, Homo sapiens
cttattcagagaaggaaggatcttctcatgcacagaggcaacaaatggcaactttctgagactctccttcagcaactccaga

SEQ ID NO: 171558 - DNA, 100 bp, Homo sapiens
gccggatggtgctggccacttgcttgggatcctttatcctggtcatcttctatttccaaagtatgttgcacccagatggactttctggccgagaccagcc

SEQ ID NO: 171559 - DNA, 109 bp, Homo sapiens
ggcggcccgagcgcgccccaagcccgggcgccaccgctgccacctccgcgagggcgccctgcgtccggcagaggaggcgagcatcccgctcaggtgatgaggaacccct

SEQ ID NO: 171560 - DNA, 75 bp, Homo sapiens
cagaagctacgctggtattgccagatgtgccagaagcagtgccgggacgaggattcaagttcgaaatatggcaac

SEQ ID NO: 171561 - DNA, 83 bp, Homo sapiens
ctgtatctgtgcaggcaatgtgcgacatggtatgcttaagcaacaggatctaagtattgccatggtggtgacatcacgcgaag

SEQ ID NO: 171562 - DNA, 75 bp, Homo sapiens
catgttcctgggcacctctgggtactcatggctgtgatgactggcacagcctccaggttggcgggctcatctgcg

SEQ ID NO: 171563 - DNA, 101 bp, Homo sapiens
cggaggcggagtcggcgccgagaacatgcaatggcaccagcatgatatcattgatcattcctcccaaagaccagatttcacgagtggcaaaaatgttagcg

SEQ ID NO: 171564 - DNA, 82 bp, Homo sapiens
acttcacacttcatccagatgtcagcacccgcatcgagaatcagaactcacgccaggtcacgcatgaagggagcaccgtgga

SEQ ID NO: 171565 - DNA, 82 bp, Homo sapiens
accgttcccccagccgggctggcacaggctgttaccctcaccgtagcccaggccttcaaagtcgcctttgagttttggcagg

SEQ ID NO: 171566 - DNA, 82 bp, Homo sapiens
ggagctaacctcggggaccgagatgcagagctcaggccccggggcctccagcggcaccagcggagaccacggtgagctcgtc

SEQ ID NO: 171567 - DNA, 90 bp, Homo sapiens
gggcccgggcggctggcctcaccgcccactggtggaaagaggcaaaacctgatgaattaatggattccaaattgagatgcgtatttgaaa

SEQ ID NO: 171568 - DNA, 75 bp, Homo sapiens
aatcctgaattttgtcccgagaagacatttctcttgggaagttgtgcatctgacaggaatatagtactgtacgat

SEQ ID NO: 171569 - DNA, 75 bp, Homo sapiens
gctggggtggtggttccaatgagacagggcacaccaaactccatctggtgctggagaatctggtaaaagcaccat

SEQ ID NO: 171570 - DNA, 100 bp, Homo sapiens
gctcgatctaggttctgcggcacgggatggcggaggcgcctcctgtctcagatatgtcttctccgactactatgaagaagcctgaaaagccattgttcag

SEQ ID NO: 171571 - DNA, 75 bp, Homo sapiens
aaggattccaagtaactcttatttggtgaagaagaattttcttatgggtattctctaaaaggaataaaaacatgc

SEQ ID NO: 171572 - DNA, 75 bp, Homo sapiens
agactccgttccctaccacagccttgacttaaagagagatctacttcagagccagcagtcccgccagaagaggct

SEQ ID NO: 171573 - DNA, 100 bp, Homo sapiens
ggatgtccggctaccacctccagctgactataataaggagatcacagaaggggatgaagtggagactctgtttgctggctacacggacaacctggtgcga

SEQ ID NO: 171574 - DNA, 76 bp, Homo sapiens
caggtccaagcgattctcctgcctcagcctcctgagtagctggcattacagattcaagatggaaaaggtgatgtaa

SEQ ID NO: 171575 - DNA, 82 bp, Homo sapiens
ctgcgttcacggcaggattcggttagatttggagcaagaggtggtggtggccttcccccgaagaaatttggtaatcctgggg

SEQ ID NO: 171576 - DNA, 132 bp, Homo sapiens
tacacaagctttttagccttagcaagaggtgtcataaacaacccctcatcagcctgccaagacaaaggtgagaagccatttaaatgtgatcagtgcagttatgtggcctctaatcaacatgaagtaacccgc

SEQ ID NO: 171577 - DNA, 100 bp, Homo sapiens
cacgggggtactttctgcttaggggagctggtggagctggctgtgaccatggagaacaaagcagaggctcctgcttacattcgggagtgtgcgagattgc

SEQ ID NO: 171578 - DNA, 144 bp, Homo sapiens
cccctaggagtgcaccacccccggagcccccctcaacacggaccgcgcccgccgggcacacaagaatggtcacttaagactttgaccccgacgcaggcttcagtgattgccgcggatcagaagcctgagcactttggctcgaga

SEQ ID NO: 171579 - DNA, 80 bp, Homo sapiens
tggagcctcagttggaagcagccgatccagcctgcggagcctgtggggcaggatgctctggagttttggctgcaagctgg

SEQ ID NO: 171580 - DNA, 100 bp, Homo sapiens
gcggaaggacgaggctgaggcgagaaacgagtggtatgtgtgcaacagagagaaattatgcgaatcactccaggctgtctttgttcagagttaccttgat

SEQ ID NO: 171581 - DNA, 82 bp, Homo sapiens
ctggcctgggcgctccggtggcggcggagttctccaaggagaagtacatcctggactcatcgccagagaaactccacaagga

SEQ ID NO: 171582 - DNA, 96 bp, Homo sapiens
ccgcgcgcagggcctgcagcgggagctggacggcgagcgcgagcggcgcgagaaaaaaaatggctacaaacttcctagcacatgagaagatctggt

SEQ ID NO: 171583 - DNA, 82 bp, Homo sapiens
cacaacttggttcaatgggtagcctcaccatgaaatcacagcttcagatcactggtctggtgagctgtaccttctttctggc

SEQ ID NO: 171584 - DNA, 82 bp, Homo sapiens
cgcctcctccacaccccccgccgcagcagcaccggcgacaggtactccaaagattcaggtttactcacgtcatccagcagag

SEQ ID NO: 171585 - DNA, 109 bp, Homo sapiens
ctagtttgactctgacagtcctcccactaagacaatgcagatcttcgtgaagactctgactggtaagaccatcaccctcgaggttgagcccagtgacaccatcgagaat

SEQ ID NO: 171586 - DNA, 82 bp, Homo sapiens
gctggtcctgaagatgatgctgccattaccttgctcttagaacaagctctggtgattgaggaacagctgcgccgggctgctt

SEQ ID NO: 171587 - DNA, 75 bp, Homo sapiens
ggcatttacagaaagagtcaacagcagtggcaacaggtgaaagcaagtattaggacttttactccccgggaaaag

SEQ ID NO: 171588 - DNA, 101 bp, Homo sapiens
gtggggtctcgctggacgttggaggaaagaaggaatatctcattgcaggacacggagttgcagaggaagctagaccatgagatccggatgagggaaggggc

SEQ ID NO: 171589 - DNA, 96 bp, Homo sapiens
gctgccgctgccgccctgagtcactgcctgcgcagctccggccgcctggctccccatactagtcgccgaggctgaggggatctggcggtggagcgc

SEQ ID NO: 171590 - DNA, 145 bp, Homo sapiens
tgccctttaggatttgttagaaaggagacccgactgcaactgctggattgctgcaaggctgagggacgagaacgaggcactactgcagtcttcagttaagcaacaagtagaagctattgaaaaacagtacatttctgcaattgag

SEQ ID NO: 171591 - DNA, 90 bp, Homo sapiens
agcagagcaccgaaagtggccactaccagcatgaagagcccaacaattcaaactggcgggagacactatattcaatcgtgctaagctcct

SEQ ID NO: 171592 - DNA, 73 bp, Homo sapiens
tttaaaaatgatgccagagcattagaagctcaccagaacaagctagaagaaatgatcaatgagctagcagtgg

SEQ ID NO: 171593 - DNA, 100 bp, Homo sapiens
gaaaagaaaggaatccgtaaagacccatttctctatgaggattaacctccatttcagctaatcatgggagagattaaagtctctcctgattataactggt

SEQ ID NO: 171594 - DNA, 78 bp, Homo sapiens
attcagacgcctttacctggaagacgtggcagagctctgattatacaaaaccaggagacattgaccctacatcagtag

SEQ ID NO: 171595 - DNA, 100 bp, Homo sapiens
gctctgtatgagaaggacaacacctacttagggactttgaacatgtcggggatcgccctcagcagactcgcccaggagaggaaagcatggaggaaagacc

SEQ ID NO: 171596 - DNA, 111 bp, Homo sapiens
tggagccctcgccgctgccgttctcagccggctctggagtgcgggcgggggcgacagggccgattccggagtggtggctccagcagttccatcatgtgaagtaccctcttc

SEQ ID NO: 171597 - DNA, 75 bp, Homo sapiens
ggtgtaccaggcgaagctggccgagcaggctgagcgatacgacgcacacggaccctgactactcggctgcctatg

SEQ ID NO: 171598 - DNA, 90 bp, Homo sapiens
ccatgcccgggcagctgtgctgggagagaatgggcgggtgctggccgggcagaccctgggatcgaggccatcaagctacagatggtctta

SEQ ID NO: 171599 - DNA, 75 bp, Homo sapiens
ccaaagactacattatgaacccaccactgggcaaagaaagtatccctttggccgttgctccagggagaactgcaa

SEQ ID NO: 171600 - DNA, 90 bp, Homo sapiens
tgcggcctcctcgcaaaacaagtttctacagcagtataatcactacaaatccaatgtggagattttcaaattgcaaccaaataaacccag

SEQ ID NO: 171601 - DNA, 73 bp, Homo sapiens
tcagcgcggccgtcggagacatgggagacccggggtcggagggttgaagctttgagagaagcagcaactgctg

SEQ ID NO: 171602 - DNA, 89 bp, Homo sapiens
cgatgaggaagtactgagcctgttggaggaactggcccggaaacaggaggacgtgagtggcatcaaggcgctgtacgagtcggagctgg

SEQ ID NO: 171603 - DNA, 139 bp, Homo sapiens
agaacacatcttcccagctttggttggaagacctattatcagatcaaccaccaaagtgggaaacattgaaatcaagtaagagatgctaaaaaccttgtacctatggaccccaatggcctgtcagatccctacgtaaaac

SEQ ID NO: 171604 - DNA, 100 bp, Homo sapiens
gctgcctctaggttctgggaagatggcgaaggtctcagagctttacgatgtcacttgggaagcgggagaggacctgctggccccaccgcacgacaccagc

SEQ ID NO: 171605 - DNA, 99 bp, Homo sapiens
caagaatctcatcttggcaggagtgaaaggactgaccatgctggatcacgaacaggtaccatcaaggatggagggattctcccccggtccctggcgctg

SEQ ID NO: 171606 - DNA, 90 bp, Homo sapiens
ttcctttttgcctctgtgatggctgataagcacaagtacacgtcgattgcagaggtccaggcacagatggaggaggaatacctccgctcc

SEQ ID NO: 171607 - DNA, 75 bp, Homo sapiens
aatggagccaaatttaataaagaccctatcagatttggatatgtccttcatatttgattggatttacagtggttt

SEQ ID NO: 171608 - DNA, 99 bp, Homo sapiens
gatgagcagaacctgctgcagcagaagaggtcttcaaagcttcacctttctccaaaggcagatgtgaagaacttgatgtcttatgtggtaaccaagaca

SEQ ID NO: 171609 - DNA, 75 bp, Homo sapiens
cctcgcctcgggacccgcggtccccgctcttgctggccaaacaccagagcaccctagaaggtttaactaaaagaa

SEQ ID NO: 171610 - DNA, 87 bp, Homo sapiens
tctgccccagaaccggtcgaaaaccgtgtatgagggattcatctcggctcagccataaggatgagtttaccattattcctgtactgg

SEQ ID NO: 171611 - DNA, 85 bp, Homo sapiens
tgggtggacgtggttggtgattggcaggatcctggtatccgctaacaggagcctcacagtctactcagagaaaaataaaagaagg

SEQ ID NO: 171612 - DNA, 75 bp, Homo sapiens
ctcttggcttcgagatggcttcgcttggatttacactgggcaacgtggttggaatgtatctggctcagaactatg

SEQ ID NO: 171613 - DNA, 75 bp, Homo sapiens
ttatatcaattcctggacacagaggaagtcctggctgagcaaggttggaagccctagttctcgcattgaccgcac

SEQ ID NO: 171614 - DNA, 76 bp, Homo sapiens
aaagatagattttgttggagagctgaatgacaaaatgaaaggtttctatagaactgggatagatgggcagcagaag

SEQ ID NO: 171615 - DNA, 101 bp, Homo sapiens
attcgggcatcttggctcctccttgagaatggttagactctccgaactcaaatcgacagttcagaattccaggcccatcaaaacggccaccaccttgcccg

SEQ ID NO: 171616 - DNA, 98 bp, Homo sapiens
cggatgagcatttagtgaaggatttgggcagcctcaatgggatcatatactcctatgaaaggaggaatctccaatgtatggtttgacagatttaaaat

SEQ ID NO: 171617 - DNA, 88 bp, Homo sapiens
agtacaagatcctggatgccacggatcaggaaagcctggagctgaagccaacctcccgagcagcgctgggaatggccatgtggaacag

SEQ ID NO: 171618 - DNA, 90 bp, Homo sapiens
ccggaatgcagaggcgtacatggctaagagacgagctacctgggacacaaaatgctgaagttccgaacagtccatgggggcctgaggctc

SEQ ID NO: 171619 - DNA, 75 bp, Homo sapiens
gctgaggctacctgtgaacagtacgcagtgaatgttctgtcggaaaaggtaacagaagatggaactcgaaatccc

SEQ ID NO: 171620 - DNA, 101 bp, Homo sapiens
cgccggtggagtctcggcggccgggtatgagcccagaggacctggtcggcccttgtaccaaagaagaatctcatctagctcagttcaaccttgttctgaag

SEQ ID NO: 171621 - DNA, 75 bp, Homo sapiens
gcattgctctcgccatggctctcagcgatgctgacgtgcaaaagcagtattcgaaggacccaagtcattgatgat

SEQ ID NO: 171622 - DNA, 78 bp, Homo sapiens
agtagagaggagctgataagaaggggagtgcttaaggaattgcctgatcaagttactccacaggatccgctgaacata

SEQ ID NO: 171623 - DNA, 88 bp, Homo sapiens
gctcagctcttactgcgggccgctccgacggcggtccatcctgacaaggcgaccagccagctcctgttggagacagattgggagtcca

SEQ ID NO: 171624 - DNA, 100 bp, Homo sapiens
aagaaaggaaaataatttaacagaagataatccaaatctttcatgaaattgacagttcttcaatgtcagatgatgatagaaaagaggttgtaaacattca

SEQ ID NO: 171625 - DNA, 100 bp, Homo sapiens
aaaggacatgcacctgtggagcagcagcacatcacccacaagtgtttggtgctggcaccaactcgggaactggcccaacaggtgcagcaagtagctgctg

SEQ ID NO: 171626 - DNA, 82 bp, Homo sapiens
tggagcttggtttcgggatctcggtgctgcagacggcgagacctcctgcacaggcgtctacggtgacgtgcagcgcgtgaag

SEQ ID NO: 171627 - DNA, 76 bp, Homo sapiens
gaaacggattgccagagaattggcagaaggactcatatgaacgagcaaaacatatcttgaaaactcatgcaaagga

SEQ ID NO: 171628 - DNA, 83 bp, Homo sapiens
ctgtggggccgcggccggaccgagcgcctcgacctcggtctgaggcataatcaccagcaacacccgggacaataatacggggg

SEQ ID NO: 171629 - DNA, 118 bp, Homo sapiens
ggcgacgagacgcggctgcctttccgccggggcatcgcgctgttggaaagcggctgcgtagacaacgtcctgcaagtcgctattgtggacgatgaaaggctctctgcagaggagatgg

SEQ ID NO: 171630 - DNA, 98 bp, Homo sapiens
cgcttaggtgcaggtgccctgaatgcaggttcctatgcgtcactagatcagggagcagagaaacatgaaggcacaggtcagtcctctgggatcactga

SEQ ID NO: 171631 - DNA, 100 bp, Homo sapiens
ctttaagggacaaatactgtcagactgaccaccatcatcacggatgctgtgaaccaggaatgaatctgaagtctgctgcagtaaaacacagaaggcttta

SEQ ID NO: 171632 - DNA, 95 bp, Homo sapiens
cagggggtcatcaccatggatgggacgctgcaggccctgttcctccgtgtcacaaagcagtacctgccccacgtggcgcgcctctgtctgatcag

SEQ ID NO: 171633 - DNA, 82 bp, Homo sapiens
ggaggctccaagacctcatcaacaattaagtttcactaggccagtacctgtgggctgcttctctagcagagaaatactgtga

SEQ ID NO: 171634 - DNA, 72 bp, Homo sapiens
aagagttttctccatttggtacaatcactagtgcaaagggcctcatctttgtggtggacagtaatgaccggg

SEQ ID NO: 171635 - DNA, 100 bp, Homo sapiens
ggagacggcggccttcgaggaggtcatgaaggacctgagcctgacgcgggccgcgcggctggcccccaagaggaccctttccaagtccccagctgggggc

SEQ ID NO: 171636 - DNA, 103 bp, Homo sapiens
gcaaggaaaagatccctggaatatgaagagacacagtatggtagccacacccccagtttcgagaggcccgtgccatgagaccgcctggggtgagcaaggcgac

SEQ ID NO: 171637 - DNA, 100 bp, Homo sapiens
ggagggaggagctccctggggttttactctaaagggtggcctggagcacggagaaccattaatcatctctaaggctctgaaactgcggagcggccaccgg

SEQ ID NO: 171638 - DNA, 98 bp, Homo sapiens
ctcagtctgcggccaagactccgtcctgcaaggaactctcctgatgaatgcagtgtggccaaaggcgggaagatggtgggcagcccagacaccgttgg

SEQ ID NO: 171639 - DNA, 110 bp, Homo sapiens
agaccattgatgaggaatatgatagcatcaaaaacaacattgaagaggaggaaaaagaggttggctcagcggaaagaacacccggaaatgaaaggccaccaagaagaaag

SEQ ID NO: 171640 - DNA, 100 bp, Homo sapiens
tagaagctgggattaaatctggacgctatatccagggaatgatgaaaggtggaaacaaacaagaagaagcgtggataaatccatttgttaaacagttttc

SEQ ID NO: 171641 - DNA, 98 bp, Homo sapiens
ccgtatctgcctaggcattttgctgtctcctcctaatacggttgtcaagttattaagcaacaaaagatcacaagcagttggaatactaatgtctagcc

SEQ ID NO: 171642 - DNA, 74 bp, Homo sapiens
tcacattggaccctcctcccaactgtaggtgcaacacgcaggactacatctggcacaaggggatgcgctgcgag

SEQ ID NO: 171643 - DNA, 90 bp, Homo sapiens
tagcctaacaagatggaagcaggtttaaaattttacataagaagttacctttttcagcattcctctgaatattgatttgctgaatagccc

SEQ ID NO: 171644 - DNA, 100 bp, Homo sapiens
agggcaaaaaaagggctggaaacttcgctatcatggagatcctattatacagctcgctcctaaagctcctgttgacctgtgtgagacagagaaactgagg

SEQ ID NO: 171645 - DNA, 74 bp, Homo sapiens
gagagcgcgaatatcgtcatcgttagaaggagtctatgggtaaaacatcagggaagctgtttgatagcagtgat

SEQ ID NO: 171646 - DNA, 82 bp, Homo sapiens
catgcaggcaggccctgagcacgctgctgtgtgagcagcaggttcctgacggagacttcgcccttcatgtggtccaacctgg

SEQ ID NO: 171647 - DNA, 98 bp, Homo sapiens
ggcaaaactccaacaggagaacagcgaggagacggatgagaacgaggcggaggagccgctgtacaaccagccctccgacacccggcagtatcatgaga

SEQ ID NO: 171648 - DNA, 86 bp, Homo sapiens
atagtcatcgactgtggaatcaattatgtcccaggaggattctgaggttccattcactgaagaagattatcgaagaagaaagtctc

SEQ ID NO: 171649 - DNA, 100 bp, Homo sapiens
cttctcaaccttgtgggatgtgaaaactctgttactgaagtattgcctaagtgtaatcttgaacatgggcggtgctgtgagtgctggtgaagacaatgat

SEQ ID NO: 171650 - DNA, 94 bp, Homo sapiens
ccgggatttgggtcgcagttcttgtttgtggatcgctgtgatcgtcacttgctacgagttccagggagctctgtcctggtgaccgtgcccgggt

SEQ ID NO: 171651 - DNA, 75 bp, Homo sapiens
tgtaaccaaaagaaccccacttcatgcctcagttgtattccctgaatgactataaaccacccatttcgaaagcga

SEQ ID NO: 171652 - DNA, 90 bp, Homo sapiens
gagaacagtccgaaatggcggggactgttggtctcggccctgcggaagatggaccacacatccccgacctacatgcttgctaacttaacc

SEQ ID NO: 171653 - DNA, 83 bp, Homo sapiens
tgttatagcaaaatacccacacaaaataaagagtggagctgaagctaagaaattggtggctttctagaagatgaccatagagg

SEQ ID NO: 171654 - DNA, 100 bp, Homo sapiens
aggcctgatcacctgcctggagcaacgaaaagagccctggaatgtgaagagacaggaggcagcagacggacatccagagtaaagacaagattgcatccta

SEQ ID NO: 171655 - DNA, 98 bp, Homo sapiens
agaagcacgtggtgcaaagcatctccacacagcaggaacgtttggaaattgctagtttgtcaaaccaagatcatacctctaagaaggacccaggagga

SEQ ID NO: 171656 - DNA, 76 bp, Homo sapiens
tccaggttaggccgagctttgcgggaaagcagcgattatgtttgagaccttcaacaccccggccatgtacgtggcc

SEQ ID NO: 171657 - DNA, 90 bp, Homo sapiens
gcccgcagaacctccacagtcaagaggacggattcactccttctccagttgcacagccacacccttcagctggccttaatgttgactttg

SEQ ID NO: 171658 - DNA, 119 bp, Homo sapiens
aagatcggccactacattctgggtgacacgctgggggtcggcaccttcggcaaagtgaaggagcaaacgaggcccctgagagctccacctagttcacaggataaaatcccacagcagaa

SEQ ID NO: 171659 - DNA, 100 bp, Homo sapiens
gtaggcgcgcggggcccgccatggctgcgtcggagctctacacaaagacaatgcagatcttcgtgaagactctgactggtaagaccatcaccctcgaggt

SEQ ID NO: 171660 - DNA, 100 bp, Homo sapiens
ccgagagttccttgctgccatggagcccgagcccgccccagccccggccccagaagagtggctggacattctgggtgcgatgcttcagtacctctgtggt

SEQ ID NO: 171661 - DNA, 100 bp, Homo sapiens
ggaccaggtgaagagtcctggatggcagatggggggaccccggtacggacctgtgcaggggtcccttcagtgttgtacgacgatgtatcaacagagaaac

SEQ ID NO: 171662 - DNA, 82 bp, Homo sapiens
acagctgaagcgaatgtttgagcctactcgtttgattgcaactatcatggtgctggtgtgagttcttgatacgaatgaaagg

SEQ ID NO: 171663 - DNA, 103 bp, Homo sapiens
tgattgtcagtgacaaggcccgagatgcagctgctgtccttgtgtccagccgcggcgagtcctttgcacatgttggcaacacacgcatccgcatcggcctccc

SEQ ID NO: 171664 - DNA, 60 bp, Homo sapiens
atctcacagctgcagtctaatagtaacacagagatacagtaccaatgaaggggagacctg

SEQ ID NO: 171665 - DNA, 101 bp, Homo sapiens
ccttgctcgggatggtgccacaggaggctgtgcgggccccgctccgcttcgaatgggcaatagccctctggaacaagacaattcatgtgagataagaaaga

SEQ ID NO: 171666 - DNA, 75 bp, Homo sapiens
ctggagcagaaccccaggactgcgcccccgggagcgggcgcccagagtctgttctctggggaggcagtaaggggc

SEQ ID NO: 171667 - DNA, 75 bp, Homo sapiens
tccctggtgcatccagcctgggggaggagatgttaaagtaacccatcttgcaggacgacattgaagattggtctt

SEQ ID NO: 171668 - DNA, 74 bp, Homo sapiens
ctgtggccctcagaatttaaacttaaggaaagagtgggaaagtgagggtccaagacaagctgctgctatctgcg

SEQ ID NO: 171669 - DNA, 75 bp, Homo sapiens
agaaactggaaaagaccctcttcagacttgaacaaggtaaaaaagctccagttttatttaataaagaaatgattg

SEQ ID NO: 171670 - DNA, 90 bp, Homo sapiens
gaccaccacagccaccccagcagaggccttatggatatgaccaggctgaggcccgcaggtctaagaccaaggaagcacgcaagcgccgtg

SEQ ID NO: 171671 - DNA, 118 bp, Homo sapiens
cccacctgcccggtgcccgaggaggcagccaagctcgtagcctgccactccgtgcgtgtcatggagaaactccagctgggcccagagattctgcagcgggaaaatccaaggcttattt

SEQ ID NO: 171672 - DNA, 75 bp, Homo sapiens
gatctgcaccttcaggaccagttcgcagtagcagtggaatgggaggaagagggtttttaatgaccacaacaagca

SEQ ID NO: 171673 - DNA, 83 bp, Homo sapiens
ctctgaccgaggcgcctcgctggggcggggaccttgccttgcccggggtgagaagccctaccactgcaactgggacggctgcg

SEQ ID NO: 171674 - DNA, 75 bp, Homo sapiens
ccccagccctgcctctccctgggctctgaatcagatgggtgactcaaatatctccagccctgggttacagccaag

SEQ ID NO: 171675 - DNA, 90 bp, Homo sapiens
aatacacttctatataccagtcaattgagtggtgttaaagaatccaagcaaaaatccctggattgaagcgcaaagctgaatgaaaacgcc

SEQ ID NO: 171676 - DNA, 113 bp, Homo sapiens
cacacagtgcaagcgcgtaggaacacaatgctgggtgtttgggaaatctgaaatagagtactatgctatgttggctaaaactggtgtccatcactacagtggcaataatattg

SEQ ID NO: 171677 - DNA, 73 bp, Homo sapiens
gaagcgctgtgagtgccgatcaccgaatgggccgagagaaaaggaatcagagatcattgatttcttcctgggg

SEQ ID NO: 171678 - DNA, 75 bp, Homo sapiens
cctgcctcagcctcccaagtagctgagattatagtacgcctgcctcacaccttgcgatgcgccaacatcaccatc

SEQ ID NO: 171679 - DNA, 100 bp, Homo sapiens
ctactactacgtggtgcttggaaaggatctggaacagtacgcggccagctacagcggcctgatgcgcatcgaacggctgcagttcattgctgatcactgc

SEQ ID NO: 171680 - DNA, 100 bp, Homo sapiens
aatatatcacctagcatgaccttgaggatagaacgactagtggtcgtggctgaacattgtgaacgtagtctggaagacttgcttcgagaaaggaaacctg

SEQ ID NO: 171681 - DNA, 101 bp, Homo sapiens
gcaatggcggaaggagaagatgtgccgccgctgccaacgtcgagcggcgacggctgtgctgaagctgctgaaagatggcagaagaagtggtggtagtagcc

SEQ ID NO: 171682 - DNA, 98 bp, Homo sapiens
ccgcagaccagcgcccgaaggccgacacgctggccctgaggcaacggctcatcaggttgactgcattcagccagtgccaaaagaggagcccagtcccg

SEQ ID NO: 171683 - DNA, 98 bp, Homo sapiens
cggacgggccggagggaggatgttaaagccccgcggtgatggtgtttgtacatgctcgaaatgccactgtaagaacagctatgtctctaatagaaaga

SEQ ID NO: 171684 - DNA, 97 bp, Homo sapiens
ccacactcgtgcccgaagccccttaccccgccccgggctgtggtctgtgggctgtgggacgagctgcggcgcggcatagcgcgctggctaggactcc

SEQ ID NO: 171685 - DNA, 87 bp, Homo sapiens
atcggggcgcttcgccccgggccccccagcatgaagaccccggcggacacaggaggccatgtcgggtgaggacgctgaggtccgggc

SEQ ID NO: 171686 - DNA, 83 bp, Homo sapiens
aaaaaatttattaaaggaagcacacctaaggtaatctgtaagtcagatgctccaacaggggatgttcttcttgatgaagctct

SEQ ID NO: 171687 - DNA, 83 bp, Homo sapiens
cgtggactccctttaatccagtgactgtcaggtcgatcatatgttttaaaatcaaagatgggaaaatcggagaaaattgccct

SEQ ID NO: 171688 - DNA, 100 bp, Homo sapiens
atttctggctctgaaggcgaacgcttcgctggccatttaggagctctgctcaaagccagacgggaggctgccggcgtggaccgcgggaaggcggggctgg

SEQ ID NO: 171689 - DNA, 83 bp, Homo sapiens
cagctaggagcgctctgtggtgcctggggctgaacgcggctttctgctgacatagcccagagatacaggataagcaaataccc

SEQ ID NO: 171690 - DNA, 87 bp, Homo sapiens
atgacttcctggggtgcctcaacatacctgtccgggctccgtgcccctggaccctgcgctcatgaggaccctggaggagggccacga

SEQ ID NO: 171691 - DNA, 83 bp, Homo sapiens
aaccacagttacaaggaattccaacttcacagagaatgcagttgtcttgacttcaggtctgtctgttctgttggcaagtaaat

SEQ ID NO: 171692 - DNA, 100 bp, Homo sapiens
tgccggggcccaaccacaagacgactcaataggaggaaggtgggagatctaaaagccagacttgcctctcaagaagccgagctgcaactgagaaatcatg

SEQ ID NO: 171693 - DNA, 75 bp, Homo sapiens
acgcagtcaaagagaaactgctgtggaacgtgaagaaggaggtgaatgactggcaggaggactgggtcgtgttct

SEQ ID NO: 171694 - DNA, 98 bp, Homo sapiens
ccgcatctgcctccctgccccagcccatcctctctaaccaagctgtcccctaccaccaccggtcacagacgtgagccttgagttgcagcagttgcggg

SEQ ID NO: 171695 - DNA, 87 bp, Homo sapiens
caccatgagcaaagctcaccctcccgagttgaaaaagaaatctggcattttttaaagtttgcgccccacaaagaggaaatattccaa

SEQ ID NO: 171696 - DNA, 75 bp, Homo sapiens
cggacaaagggaaaaactgttccaatcgatgattcctctgaaactttaggataaacgtcttgtacccggaggtgg

SEQ ID NO: 171697 - DNA, 96 bp, Homo sapiens
gaaaagtggcactgaggctctggaacttctgcccagctctccttggatatccgacatgaagccagtgacttcccatgtagagtggccaagcttcct

SEQ ID NO: 171698 - DNA, 100 bp, Homo sapiens
gagaatatttaatggaaaatcgcttggttaaaacctgacacttttaacagcaggactctggactgtcttcacactaggtggtgtgggcagcaaagcggct

SEQ ID NO: 171699 - DNA, 96 bp, Homo sapiens
gagatctcttctgttctccactgctaggttgactatagtcaatggggccaatggagccaagtgtatggaaacccacaacagtatggacagtatatg

SEQ ID NO: 171700 - DNA, 75 bp, Homo sapiens
cagcctgcggagcctgtggggcaggatgccggctccaggagcagcagtggaggtcgggaacgcctcattgtggag

SEQ ID NO: 171701 - DNA, 100 bp, Homo sapiens
gtccagtgctgggctcacaagccagaggacagacccacgtttgtggccctgcgggacttcctgctggaggcccagatgaaggactgcatgcgcgagctgg

SEQ ID NO: 171702 - DNA, 145 bp, Homo sapiens
cttcataacaataattttgaaaatgctttgtgcagaaaggaatcaaaagaatatttagaatgcaggatggagagagctgaagaagcaggtggagagtgccgagctgaagaaccagcggctcaaggaggttttccagaccaagatc

SEQ ID NO: 171703 - DNA, 100 bp, Homo sapiens
agatgccaggaccacctggaagcctagaaatggatcttctgcaggacaactggtccttatcacagccagggtgaccacagaaaggactgcaggaacctgc

SEQ ID NO: 171704 - DNA, 98 bp, Homo sapiens
caccgggcacgtctcctccacttacgtggaggagctcaaggggatgtcgctgctggttcgggcagagtccgacggtcctggacccaagccagaagcct

SEQ ID NO: 171705 - DNA, 78 bp, Homo sapiens
ctcatgcggatcaccctgcggaacctggaggaggtggagttctgtgtggaagcacaggaagtcctggagaacctgaag

SEQ ID NO: 171706 - DNA, 100 bp, Homo sapiens
cgaaatctgcctgttgctcgtgctagattgaggttacgtagattggcgtgctgcaaaccagctctaggcggctctgggacacagcattgttggttttgcc

SEQ ID NO: 171707 - DNA, 90 bp, Homo sapiens
ttttattactggcagcatgtatatcttttgcgaatctggctttgggggaagaggaagaaaagtcggattacaagatcaaccaccaccaac

SEQ ID NO: 171708 - DNA, 83 bp, Homo sapiens
ctcagctttattttggatcatgtcttcattgaacaggatgatgataataatagtgcaggggtattgtccagtcagaagaaaaa

SEQ ID NO: 171709 - DNA, 100 bp, Homo sapiens
cgtaccctggatatgttgattagatctttacaccaggatttgatgccagatttgcataagaaagtttcctacactactgaggtttaggggcactgtgaag

SEQ ID NO: 171710 - DNA, 75 bp, Homo sapiens
gtgccccctcaccctgctgaccaaaaaggtggtgaagcagtattttccaatttgaagattcatttgaaggtggct

SEQ ID NO: 171711 - DNA, 98 bp, Homo sapiens
ggagttccggcgcgccgggagccggaatactcccccagttgcaagaggcgcaggaccgtggaagacttcaacaaattctgcacctttgtcttggccta

SEQ ID NO: 171712 - DNA, 100 bp, Homo sapiens
caacagagttgccctgtcaccatttctttcacaaaccttgtgtctcaatttggctacaaaagcactgatagccattgggcgatacagcatgacaatagag

SEQ ID NO: 171713 - DNA, 100 bp, Homo sapiens
cacgcacctcgtcaccaaggccaaggaactggcccaaataaggaaggaggaaaaagagaagaaaagacgccgcctcgagaacatcaggtttctgaaaggg

SEQ ID NO: 171714 - DNA, 75 bp, Homo sapiens
cggagtcggggacccaggagtttcctgtgtccagcgctgccggagccgcctgagatggagtcttactctgttgcc

SEQ ID NO: 171715 - DNA, 100 bp, Homo sapiens
ctaactccaagccttgtgccaactgtaagtctccaatacagaagaatgaaggctgcaatcacatgcagtgtgctaagcaccttctaagtgagcaacacag

SEQ ID NO: 171716 - DNA, 100 bp, Homo sapiens
gtgagccctctcctaagagacccaggggaagacccaaaggcagcaaaaacaagagtccctctaaagcagctcaaaagggtgtcaaattgagaaccaggta

SEQ ID NO: 171717 - DNA, 83 bp, Homo sapiens
tgctggaacagtttgaggacctcctggtgcgcatcctgctgctggctgcccttgtctccttttcgggcgcctccagcttcggg

SEQ ID NO: 171718 - DNA, 99 bp, Homo sapiens
ttcccagagggaacacagatggctgtatttgatgtaaaaaaagattggtctgaccatgctctctggtgggaaaagaagagaacttggcttctgaagaca

SEQ ID NO: 171719 - DNA, 87 bp, Homo sapiens
cgccgccgcctctccttgctgcagccatggaggcgccatgttttggaagtttgacctgcacacaagctcgcacctggacacgctgct

SEQ ID NO: 171720 - DNA, 100 bp, Homo sapiens
cgcggagttaccccagacccctcagcgtctggcatctggggcagctggcattttatgctatgtgggagcctatgtcttcatcacttatgatgactatgac

SEQ ID NO: 171721 - DNA, 100 bp, Homo sapiens
tgagggcacctacattgacaagaaatgccccttcactggtaatgtgtccattcgagggcggatcctctctggggcaatttgaaattcgatatgcaccgtg

SEQ ID NO: 171722 - DNA, 80 bp, Homo sapiens
gggagaaggaagcgagactcatacgcaacctcaatggcttggaagtcctaagcgatgaccctgatctagtgaaggtggtt

SEQ ID NO: 171723 - DNA, 101 bp, Homo sapiens
ctcgcctttgccctggcaaacactggaatcctactttttctgcatcgttggcttcacagtatgactgatgatcctccaacaacaaaaccacttactgctcg

SEQ ID NO: 171724 - DNA, 82 bp, Homo sapiens
cggcggccgaacgatgtgcgagaactgcgcagacctggtggaggtgttaaatgaaagattttttatcaagcagaaatgcatc

SEQ ID NO: 171725 - DNA, 75 bp, Homo sapiens
cacgtatagctgaactcatggacaaggtcatgcaagacaagataatctgccttccgaaaagagtgcagcctgctc

SEQ ID NO: 171726 - DNA, 100 bp, Homo sapiens
cttcaccacaaaagcgaaatgggcacaccacaggagttcaaagaaggacgcagagccagccacacagccccacaggtcctctttagccacagggaacctc

SEQ ID NO: 171727 - DNA, 49 bp, Homo sapiens
agtgacagttgaaaatcctaaattcagaacattctagtatgccagtaga

SEQ ID NO: 171728 - DNA, 82 bp, Homo sapiens
cgccggcccgcgggtctacttcctcaaaggccttggacaagattcgctatgagagcctgacagacccttcgaagttggacag

SEQ ID NO: 171729 - DNA, 73 bp, Homo sapiens
caggagttgtgaagacttggtggaaaaagagcctgtggatttctcagtcaaatctcaagcggatagagaattt

SEQ ID NO: 171730 - DNA, 102 bp, Homo sapiens
tgcgaggagctgagaacagaagtgagacagctgaagcgtgttggggaaggagctgtaaagagagaactccattctccaactttaaaaatatctacatgtgcc

SEQ ID NO: 171731 - DNA, 90 bp, Homo sapiens
tgaaggagagtggagtggcccaccacctgaatgcagaggacacattcagctaacgtattttagcaggtggagtgaggttgaagattcctg

SEQ ID NO: 171732 - DNA, 75 bp, Homo sapiens
cttgcttttgcttcagcgttctgtggttgtcaacagaataactgaagtgaagtgatggactccgatttggagagt

SEQ ID NO: 171733 - DNA, 75 bp, Homo sapiens
gagcctatttacccagaagtagtccatatggataatgttgtctgtctgtctccaaaactggcacaaagcctggga

SEQ ID NO: 171734 - DNA, 98 bp, Homo sapiens
ccgagaggccgtgcgggacgcgggcgccaggaccggccgaacgcagagcagaaccttctaagtctcagacacgtaaacccaagtgtggcaaaggaact

SEQ ID NO: 171735 - DNA, 100 bp, Homo sapiens
gcacatagtaaagagggacatagataacttagtgcagcgaaatatgaacactcgtgaaactgctcaggccatcaagggtatgcatatacgaaaagccacg

SEQ ID NO: 171736 - DNA, 100 bp, Homo sapiens
gacaaaacaaaagtgatggtcagtatttctttgaaattctacaaggaacttcaggcacatggtgctgatgagctgtgttcaattacaaaaaaagatggaa

SEQ ID NO: 171737 - DNA, 100 bp, Homo sapiens
ggcgttcaagcgaaaacatgaccgctgagcccatgagagagaagaagaaggaggttcctgctgtgccagaaacccttaagaaaaagcgaaggaatttcgc

SEQ ID NO: 171738 - DNA, 50 bp, Homo sapiens
gaaaacatcaaagaggtctagcaaaggccggaaggtggtggtcgtacgct

SEQ ID NO: 171739 - DNA, 100 bp, Homo sapiens
cgtgcatgaaccaaacccacttcgttcaagacaggtgtttaagcccggagcggttgcagggcacacattactcggtgcagtcggacatctggagcatggg

SEQ ID NO: 171740 - DNA, 100 bp, Homo sapiens
ggataaggggcggatcgggaatgtgctatgctggaaaatgagaagaagaagcgtgaaatggcagagaaggagaaagagaagattgaacgggagaaggagg

SEQ ID NO: 171741 - DNA, 100 bp, Homo sapiens
ggaaacagcagatgtaccctcagtacgccacctactattacccccagtatctgcaagccaagcatcagacaacagtcagcgctttcgagaaacctgtttt

SEQ ID NO: 171742 - DNA, 75 bp, Homo sapiens
gctgtattctgacgtttacaaaactacagagcaagtatatcgcgtcaacacagcgacctgacgggacctggcgca

SEQ ID NO: 171743 - DNA, 103 bp, Homo sapiens
atgcatgctgcttttgatgtctgacaacgtggatcgttgttttgaaacgaattacatgaatgacagtcttcgaaccaatgtgtttgttcgatttcaaccagag

SEQ ID NO: 171744 - DNA, 83 bp, Homo sapiens
ggatcgcctcacagtgggggtgtacgagtcggccaagttgatgaatgtgttgtgaccgagattcccgacgagagagactgagg

SEQ ID NO: 171745 - DNA, 83 bp, Homo sapiens
cgagggcaccatggaggtgaatgcaggaacaagatcactcaaggtgaaggataatctactaataccagcactttgaatgaaaa

SEQ ID NO: 171746 - DNA, 100 bp, Homo sapiens
acgacgttgaccgcacactggatgaatggaagcgagaactacgatgacccgcacaaaacccctgcctccccagttgtccacatcaggggcctgattgacg

SEQ ID NO: 171747 - DNA, 82 bp, Homo sapiens
cagggcttctcctatgactacgtctttgactggaacatgctgaaattccccttcagatatttcaacactcctctcagcatcc

SEQ ID NO: 171748 - DNA, 87 bp, Homo sapiens
tcgcagtggtcgcttcttctccttggtttgtccagaggggttgcgtttatccggtttgacaaacggtcggaggcagaagaggcaatt

SEQ ID NO: 171749 - DNA, 80 bp, Homo sapiens
gatcgccgagcgcgccgcgtagacctccgctcccccaggcactgccgccctgcactgtagcagatgcctaaataaagtgt

SEQ ID NO: 171750 - DNA, 83 bp, Homo sapiens
acagagacctcctccgccttcaggacacgtcttctgggggcccagcacgtgcttatccagttggtggcctttgctattacctg

SEQ ID NO: 171751 - DNA, 74 bp, Homo sapiens
gacaaacgtacctgtggtccctggatccagtgctactgctacaaataaggacatatttgacagtgattggtaca

SEQ ID NO: 171752 - DNA, 97 bp, Homo sapiens
gctgatccagcaggaggatataaaaaagaaggagccatattgtagggttcaggaacaagtgcatcccactctctcagctaatgaagagtctctctat

SEQ ID NO: 171753 - DNA, 82 bp, Homo sapiens
cgcgctgctggacgaagagctctcctccttcttcctcaactatctcgctgacacgcagatggaatcttgctctcttgctcag

SEQ ID NO: 171754 - DNA, 75 bp, Homo sapiens
gccgctgccgctgccgcacctccgtagctgactcggccatcaccatcgaggctgagccaagagctgatggcagcc

SEQ ID NO: 171755 - DNA, 100 bp, Homo sapiens
gggcacattccttttcacctcagagtcggtcggggaaggccacccagggtgtccgcaatgttgccagtgtctgtctgcagattggctacccaactgttgc

SEQ ID NO: 171756 - DNA, 90 bp, Homo sapiens
cctgatccccaaccgcactgaggataaggaggagaacaggaagagcacgatgggtgctggagaatctggtaaaagcaccattgtgaagca

SEQ ID NO: 171757 - DNA, 75 bp, Homo sapiens
tgctgacttacctgaacttgagagaacggagaccaacctgggctgaagaaagaagattaaatgctgaaacatttg

SEQ ID NO: 171758 - DNA, 96 bp, Homo sapiens
ctactggctctctaccatccccctccggggtcaggaaagaaactgctgtgccagcaaccaaaagcctctgaagagccaatccattcaggatgggaa

SEQ ID NO: 171759 - DNA, 75 bp, Homo sapiens
ctggatccccagagcctcaggcccaactcggaggaggtgctgggcgtcctcttctttgccatagcctgcttctta

SEQ ID NO: 171760 - DNA, 100 bp, Homo sapiens
gcctggcccccagccagttccctgctgaagatggccagatccccttgtctggaattgtgggaacgtattctgctccagttgttgtaaccagaaggttcca

SEQ ID NO: 171761 - DNA, 100 bp, Homo sapiens
aaactggctgaagcccatccagactgtttgatgctgaacttcaccgttaagctcctgggcaacgtgctggtctgtgtgctggcccatcactttggcaaag

SEQ ID NO: 171762 - DNA, 100 bp, Homo sapiens
attgtaagtgcagatggaacacaacaggttttgacctgtagcagagaaccaattctggagaacagcctcacttctttgattgaatacttacataatgcat

SEQ ID NO: 171763 - DNA, 83 bp, Homo sapiens
gctagccccaccagacccctgctacacgtgccagtgccaggtgatgtgtccaatctagatcccaacttctcatttgaaggcac

SEQ ID NO: 171764 - DNA, 109 bp, Homo sapiens
cgagagctggagaagctgggattggagattccacccaaacttgctggtcactgggagtttcccatatggaagaccagccacactgtcaagtgggaaggcgtatggcgag

SEQ ID NO: 171765 - DNA, 100 bp, Homo sapiens
acaaagtgtacaggattgttcctgagggagccaaaaaagaaactaatctggattcactccctctggttgatacccactcaaaaaggacacttctgattaa

SEQ ID NO: 171766 - DNA, 82 bp, Homo sapiens
agggacgagatctagaatcaactgagagagatgcttaaaaatcaccagttactttaatgacgatgactacctgtccctggag

SEQ ID NO: 171767 - DNA, 74 bp, Homo sapiens
ccaaacctgtggcgggagttggagattctgcggcgaatacgccagctccataatgggagaagtaaagaacaaag

SEQ ID NO: 171768 - DNA, 82 bp, Homo sapiens
aaacagtacaactgcctccaccagaggaaaatagtatgggaattcctattatgcagcccctgtcaaagggaacaggaagcag

SEQ ID NO: 171769 - DNA, 90 bp, Homo sapiens
cgtgatgctgaggtgactcgactaagagaattaaccaggtatattgaagcaagtcaaagattacattaaacagtgtagcaaatgccagga

SEQ ID NO: 171770 - DNA, 100 bp, Homo sapiens
ccgagtctgcggaagtggtgacccgtgggacgcggctgagacaggccagaagcggactcctagaagaggggagcagcaaggatggaatgacagccgtggg

SEQ ID NO: 171771 - DNA, 73 bp, Homo sapiens
accgacgtcatcatgctgaccaccaatcagatccgtaaggttgtacatcctggagacctgaagaattctgttg

SEQ ID NO: 171772 - DNA, 100 bp, Homo sapiens
gcgattcggtgaagcgattcctgcaggcgttggttcccctctttgacctggacacctaccatggcaggaggccttttttcaatagacagagattactttc

SEQ ID NO: 171773 - DNA, 76 bp, Homo sapiens
cgaacatttctgggtgacactcaacaggattcccgatgggaaactcttgtctagtgatgtgactcattacgtgatc

SEQ ID NO: 171774 - DNA, 100 bp, Homo sapiens
ggacgaagccttcaaatccatcaagctcatcaaaagggcggcgactggcggcgcgatggacctgaccgggctcctgctggacgaagaaggcaccttctcc

SEQ ID NO: 171775 - DNA, 90 bp, Homo sapiens
atcctggagggcatgtcctacctgcacagcaacatgattgttcaccgggacattaaggggtcgggaccctgagttaggcctgaagtctgt

SEQ ID NO: 171776 - DNA, 90 bp, Homo sapiens
tgatgcggagtgtgcactggagaaacttactaccgatcatgagaaaggtattgttgcagcatctggcagtgagactgaggatgaggacag

SEQ ID NO: 171777 - DNA, 75 bp, Homo sapiens
ctagaccggtttttagtccattgactatgcagcctaatgtttctctgcaggtggatattgttcccagccaggggg

SEQ ID NO: 171778 - DNA, 100 bp, Homo sapiens
gaatttgagaaggaactggaagggatcctgcttccgtcagaccgagaccggctccgttcggaggtggagcgcgacaacctggccgaggacatcatgcgcc

SEQ ID NO: 171779 - DNA, 96 bp, Homo sapiens
cggccatctcgctgcccgacgatgtccgcaggcgccttggccaagcatttcccacttggcgaaggactttatagacaaactactgattttggaggc

SEQ ID NO: 171780 - DNA, 98 bp, Homo sapiens
aagaaagaaagaagagtaggaactcctcaaagagcagcatttctttctattactactatctatgctgagactggttcaggttttgtagtaccaagtgc

SEQ ID NO: 171781 - DNA, 100 bp, Homo sapiens
ctacgccaccaatccgccctggatcttcacccaggaggccccggaggaggggaccgggggcttcggaacttgatactaaatttgggactctttgctgcgg

SEQ ID NO: 171782 - DNA, 95 bp, Homo sapiens
cttgtgcagattgtggcagtagtggcttcaccgtatgttgtggaccatggggaatctggccctttgcgctgcaaccgctgcaaagcatacatgtg

SEQ ID NO: 171783 - DNA, 100 bp, Homo sapiens
tgagaaacggaaaaataaaggcacttcgggggaagagaaaattgaaggagggtcaagggcgctgactccttcaatgccctggaagttgcttctcctggag

SEQ ID NO: 171784 - DNA, 100 bp, Homo sapiens
gaatttctcaccaaacatcttagggcagataatgcctttatgttacttactcagacccctgagccccttccagtgctgcctgaggtgccctctacctgtg

SEQ ID NO: 171785 - DNA, 84 bp, Homo sapiens
tggaagaagaagaagagcatgatcggcatgtccaccaagtgtactaatggtcacttgatgtgcgctggctgttttatccaccta

SEQ ID NO: 171786 - DNA, 76 bp, Homo sapiens
ccggcggctcagccccatcatgctgggctgggctaagcagttccaagctttccatgtccaaggccctccctctcac

SEQ ID NO: 171787 - DNA, 82 bp, Homo sapiens
ccatctccagagtcccctaaggcaaggtccttcgcaacatggtacactgtgcagacctgagcaaccccaccaagtccttgga

SEQ ID NO: 171788 - DNA, 75 bp, Homo sapiens
ggtgtggcgtctctgtccccatctggttttagtggacatgacgttcgaggaggaggcacagctcctgcagttgaa

SEQ ID NO: 171789 - DNA, 90 bp, Homo sapiens
gggccgccctactctggggcttcctgctccagctggatcaccattaacaaggacaccaaggtacccaatgcctgtttattcaccatcaac

SEQ ID NO: 171790 - DNA, 98 bp, Homo sapiens
tctttagatgctgtcattttcagaagaagctgatgtaaatgcctctacaacctaaagcccagcttggctgaagaggaaataaaaacagaacaggaggt

SEQ ID NO: 171791 - DNA, 83 bp, Homo sapiens
caacttcgcacttctccagttagttggagcccagcctcttctgaaacagtctccctggagcaaccatcagagcagtggctggg

SEQ ID NO: 171792 - DNA, 100 bp, Homo sapiens
cacacacggtgccccacaggccactgtgcaggatctccactcggccctgacacagcttgtacaataactgcatctgcgacgtgggagccgagagcttggc

SEQ ID NO: 171793 - DNA, 83 bp, Homo sapiens
ctgcagcctcgtgcggacgctcgtgcacagatacatctggtggctggacccagagctgacctatggctgcgccaagcccttcg

SEQ ID NO: 171794 - DNA, 75 bp, Homo sapiens
gaaaataattcttaccatatgcacccagcagatggccgccaagaacgagtcatgtttgacaaaattacatctcga

SEQ ID NO: 171795 - DNA, 75 bp, Homo sapiens
agaagctggcggccgacgcaggcaccttcctcagtcgcgccgtgcaggtcactctgtgagactgctgggtcagaa

SEQ ID NO: 171796 - DNA, 100 bp, Homo sapiens
atgatttatagctaagactccaggacacccctgaagccgagaaatggagaatttttggaaaaggtacgacagaagaaaaaacgtgatatcactgttttgg

SEQ ID NO: 171797 - DNA, 80 bp, Homo sapiens
agcgcaacctcgagggccaggcagctgcagaaggcggtggctgagagtgaggaagcttcctgcctgacacagctcacttc

SEQ ID NO: 171798 - DNA, 100 bp, Homo sapiens
aaaaacagagtccgatgaaaggaatgggtctgggaccttaacagggagccatggactgatcctttgaaatactccagccatgactaaaagagaagcagag

SEQ ID NO: 171799 - DNA, 74 bp, Homo sapiens
tgtcggccaagttcgaggggaaaccgctgcttcagagacacagatatgtgcagcgggggctacagcgagtgggg

SEQ ID NO: 171800 - DNA, 100 bp, Homo sapiens
tgcgggcgcagctggcggagctggagctggagctctcggagggcacctctaagatactgatggctctgcagaggacccattcattgcttctgcttttgct

SEQ ID NO: 171801 - DNA, 101 bp, Homo sapiens
ctgaggcgacggccgcggctgcacaggcgacattgactacagcaccgtgctcctcggcatgctggtgacgcaggacgtgcagctcgggctcttcatggccg

SEQ ID NO: 171802 - DNA, 98 bp, Homo sapiens
ccagagcctggagtctgcgaaggccgggacccggttccccggcccacagtgggggtgtgcaaacccgagagaactggactctgagatttgcccacctg

SEQ ID NO: 171803 - DNA, 85 bp, Homo sapiens
gcctccctccacgccggtgggagcccggctctggcttcttcagcggagccagaaaacattatgttgttagacaagaatattccca

SEQ ID NO: 171804 - DNA, 75 bp, Homo sapiens
ctcaacttaatgtggatgcttctgggaatttagcaaaggaagcaggtcagaatggcggcagcggagcatcgtcat

SEQ ID NO: 171805 - DNA, 88 bp, Homo sapiens
cgagaggagggcagcccagagccggaagtcttgcgagattcacggatccaccatctccggctgctcaacatcctgggctgccacgccg

SEQ ID NO: 171806 - DNA, 110 bp, Homo sapiens
tgtaaaacatgaacggaagagtggattatttggtcactgaggaagagatcaatcttaccagagggccctcaggtgtcatggagaaactccagctgggcccagagattctg

SEQ ID NO: 171807 - DNA, 100 bp, Homo sapiens
cctgatctccgtgtgcagtacctccgccagatccacgccaaccacgagtacatcgacgccatcagcaacaagcagggcgagctggagaattacgtgtccg

SEQ ID NO: 171808 - DNA, 90 bp, Homo sapiens
cagcgattggacagaatttgtgaaggtccctgtgcgttttattgcgacctgccggtgggaactttgtctccgagtcggagcagcatggag

SEQ ID NO: 171809 - DNA, 100 bp, Homo sapiens
ggaggcggtgaagtgccatcttcggctaggtcgtcacaggctccggctcatggcatcaagtggcatccatcataagtgtggagatgtactttcctcagaa

SEQ ID NO: 171810 - DNA, 90 bp, Homo sapiens
gtcattttgggactgctgtgcctcctcctcctgtggtggaggagaaggaaagagaccacaccgctgttccagaccctctccatggatgat

SEQ ID NO: 171811 - DNA, 100 bp, Homo sapiens
gcacgctctatagccaaggaaggcttcgagaagattagcaaaggtgctaatccagtggaaatcaggagagttctaggtctcgttccagatcatattctcc

SEQ ID NO: 171812 - DNA, 99 bp, Homo sapiens
tgcaacggagataaattcccggaaccgcgattcggcgtgtcagatgagcaccatgccaggactgcccacccggccctgcttttatgacatagatcttga

SEQ ID NO: 171813 - DNA, 110 bp, Homo sapiens
ctgcgccggcccgctcactccgcccggccccagccctagcgctggccgcgaccccggcgagcacagcaatggaggaaacagctatatgggaacaacatacagtgacgctt

SEQ ID NO: 171814 - DNA, 101 bp, Homo sapiens
gaaggagccctggatggtgaagcgagagctgacaggaagcctgttctcagcaggaacgaatgcaggaatttgggaactgagctgtgcaagtgctgaagaag

SEQ ID NO: 171815 - DNA, 82 bp, Homo sapiens
gagcggctggcgcggcggaatccagggccgacccgggccggaccgaccccaggcggcgacaatgcagatcttcgtgaagact

SEQ ID NO: 171816 - DNA, 100 bp, Homo sapiens
atcttatcttttaattattaaaacagagcttcctgctgctattgcagaatttttgactggagactatagtaggaaatggctagtgatgagctgaaagaga

SEQ ID NO: 171817 - DNA, 123 bp, Homo sapiens
gaagacatgttctctcggtttgggcggatcatcaactcgcgggtcctcgtggatcagactacaggccccgtctgaggtctggcagtcagagacagccgggcgcccacggcccgagcgcccacg

SEQ ID NO: 171818 - DNA, 75 bp, Homo sapiens
ggcgtccaacatggaccgggagatgatcctggcggattttcagggggattcccgaagtcttccgttttctgagaa

SEQ ID NO: 171819 - DNA, 100 bp, Homo sapiens
ggatccaggataacggaggctgggtgtttgatatcagctgctaccaggaatccctggcaccgtgcttttgcctgtctgctcatagtaacatcaaccaaat

SEQ ID NO: 171820 - DNA, 98 bp, Homo sapiens
cttaatcctactcagaagaacttgtacagagatgtgatgttggagaactatagcaatctggttttcttgggaaactttgagggaaattttgagtcact

SEQ ID NO: 171821 - DNA, 100 bp, Homo sapiens
ggaaatggctgctgttgcttctgggccagaggaagagaatgagaaatgagccgtcagactgctacagcattacctaccggtacctcgaagtgtccaccat

SEQ ID NO: 171822 - DNA, 90 bp, Homo sapiens
atgggatacagctggacaagaagattatgacagattacgccccctatcctatccgcaaacagatctacagcgagatattgaacaacacag

SEQ ID NO: 171823 - DNA, 78 bp, Homo sapiens
atgaatccagggcctaacatgggacagccgcaaccaggaatgacttctatatatttgccttccctccatgatctccaa

SEQ ID NO: 171824 - DNA, 51 bp, Homo sapiens
cacagctgaggaagccaaaaaggtatctgatggtataattgccccaggata

SEQ ID NO: 171825 - DNA, 90 bp, Homo sapiens
agaaaatatcctatcaacttaagataaccctaaggaatatcttggatgtcttcacggggcttatgacttattctgaggtttacaaaatag

SEQ ID NO: 171826 - DNA, 83 bp, Homo sapiens
gggacccaccgctgccctcagctccgagtccagggcgaggatcatccagcagctcgtcaacggcatcatcacgcccgccacca

SEQ ID NO: 171827 - DNA, 98 bp, Homo sapiens
tctctgttcgtcaggaacgtggccgacgacaccagatcctaattatctcatggctaatgaacgcatgaacctcatgaacatggccaagctgagtatca

SEQ ID NO: 171828 - DNA, 90 bp, Homo sapiens
ctatgacttctatctgtggctcactggaaggaaacccagcggagcgtgctttggacaccatgaattttgatgttataaagggcaagccag

SEQ ID NO: 171829 - DNA, 100 bp, Homo sapiens
cccatttgaaatggtgttactaaacccagatgccgaagggaatccatttgatcattttagtgctggagaatctggacatggatttgattgacatactttg

SEQ ID NO: 171830 - DNA, 75 bp, Homo sapiens
aaagatctggttaaacaatttcatcagattaaagccactgaggcggctcccagctgcgttggcgacatggccgac

SEQ ID NO: 171831 - DNA, 75 bp, Homo sapiens
gtccgctggacaagcacgagggcgcgctcgagacgctcctgagggaatctggaaacatcaaagctggattagaac

SEQ ID NO: 171832 - DNA, 95 bp, Homo sapiens
ttcacctcgcgtcgcgcccgggaggaaggaacgaggcaaggagctaaagcagcgtgcgttcagccctggggacgggcgaattgagttctccgagt

SEQ ID NO: 171833 - DNA, 80 bp, Homo sapiens
gctaggaagcccctatcgccgagctcgttggagcttgaacccattgtcacccctccgcttaaagcttttcaagccaggcc

SEQ ID NO: 171834 - DNA, 100 bp, Homo sapiens
ggatccttggccgactacctgacctctgcaaaattccttctctaccttggtcattctctctctacttggataaggagacaaggaggcatccagctcctgg

SEQ ID NO: 171835 - DNA, 75 bp, Homo sapiens
cgcacgatcactgtcggggtgtacgaagcggccaagctgctcaacgtctcaccatggatgatgatatcgccgcgc

SEQ ID NO: 171836 - DNA, 83 bp, Homo sapiens
taccattcgcctgatgaactctcagaaacattgctgaggctcttgtcagcaaaggtctagccacagtgatcagataccggcag

SEQ ID NO: 171837 - DNA, 75 bp, Homo sapiens
ttgaaccacttgtatgagtcacagcctggaagctccgaccccaggagccagcccatcaacctgaaccattacgcc

SEQ ID NO: 171838 - DNA, 90 bp, Homo sapiens
gtggagatatggcgcaactgcggcgcggcagctggtggaatttttgaagaaaatggaatctcgaggccccctttcgtgcgacacggttct

SEQ ID NO: 171839 - DNA, 90 bp, Homo sapiens
agacgcccgccttcgacaagcccaaagtgacctaaagaattaatgaccattcagaaataaagcaaaaagcaggccacaaccttaaccaac

SEQ ID NO: 171840 - DNA, 90 bp, Homo sapiens
tgagacagcttgagccccatcgtggattccaagacatccctgctgagagagccaaggatgtgttcgaaatgcgctttgccaagatgccgg

SEQ ID NO: 171841 - DNA, 75 bp, Homo sapiens
gtatttcttagacaagaagatggtcacttgcatttgctggtctggcctttgcgtccttctacctggcagggaagt

SEQ ID NO: 171842 - DNA, 97 bp, Homo sapiens
gggcctcctgccagccccagcccctggagaggatgcagggagacattagagaagcaagtattttctctctggaggcagaagatgtttcagcatcgag

SEQ ID NO: 171843 - DNA, 98 bp, Homo sapiens
tgcttttcctcctgcagcccaccgtctacttgcccagagacacattggggctgacctgccgctgctgtcagtgggaggccagtggtgctggccaagaa

SEQ ID NO: 171844 - DNA, 111 bp, Homo sapiens
tggcaggccattagagcctcatctgctgctccaggctactttgcagaatatgcattgggaaatgatcttcatcaagaatctttgtgacattctctctcagcattctttatc

SEQ ID NO: 171845 - DNA, 82 bp, Homo sapiens
gtggggctcatcgtgatcccggcgacatactacctctggccccgagatcagaatgccggaacttggcattagaattcctcga

SEQ ID NO: 171846 - DNA, 98 bp, Homo sapiens
catacagctactggacaaagaatggggtggaactgagtgccactcgtaagaatgccagcaacatggagtacaggttcctaaagagaaagatgaaatgg

SEQ ID NO: 171847 - DNA, 49 bp, Homo sapiens
cctccccagtagctgggattacagatcatgtatcagttggaggacttgg

SEQ ID NO: 171848 - DNA, 98 bp, Homo sapiens
gaggcccaccctggagtaaccctcactggagaatccagaggagattgcatcctacctgatcacctttgagaagcatgatgagtggctgtcttgtgccc

SEQ ID NO: 171849 - DNA, 101 bp, Homo sapiens
ccgagggttggggactcgaacccccgcttcgcagctcaggagcctgaggtccgaaaggtcaaaatgcagatcttcgtgaaaacccttaccggcaagaccat

SEQ ID NO: 171850 - DNA, 100 bp, Homo sapiens
ggaatatgctgccggtggggacctaatgatgcacattcatactgatgtcttttctgaaccaagagctgtacctcaggatatcattgtgtttgtaattgga

SEQ ID NO: 171851 - DNA, 82 bp, Homo sapiens
cgaaggaaacttacccaaagggaagtctgtcatgcaagacaagataatctgccttccgaaaagagtgcagcctgctcagaac

SEQ ID NO: 171852 - DNA, 137 bp, Homo sapiens
ttgacatctgggaacaagcacaggcctgaaggggagcccaagggtgcacagcccctggctacggatgacgatgtcgataccaagaagcagaagaccgacgaggatgactagacagcaaaaaaggaaaagttaaacta

SEQ ID NO: 171853 - DNA, 101 bp, Homo sapiens
gcttgggcacttagattatattcgcaccacgttttttcatcatgtaaagtccatggttccctggcccgtgctggaaaagtgagaggtcagactcctaaggt

SEQ ID NO: 171854 - DNA, 73 bp, Homo sapiens
tttgtttgactccagtgttaagagaagaaatgaggacatatcagtatcggatatgttcaaggaatgagtgatt

SEQ ID NO: 171855 - DNA, 80 bp, Homo sapiens
tagaccttgccaagatggcacagactctccagaaagagcaacagtaatggagtacatgagcactggaagtgacaataaag

SEQ ID NO: 171856 - DNA, 98 bp, Homo sapiens
ttccaatggatgtcttcccgtgtctccccgaacaccctatgggatgccatatcttggtgaactgaattcaaagctgcaagatactttggaacagattg

SEQ ID NO: 171857 - DNA, 82 bp, Homo sapiens
gtggacgtcactggccctggtggggattgacagccacgggaagaggaccccgcctatacaccccgcgagtgcttccagcgca

SEQ ID NO: 171858 - DNA, 114 bp, Homo sapiens
cccagaccctggagcctcagttggaagcagccgatccagcctgcggagcctgtggggcagtgcagagcagagcgggcggaggaccccgggcgcgggcgcggacggcacgcgggg

SEQ ID NO: 171859 - DNA, 98 bp, Homo sapiens
gaacttggtggccagcgccgcgcccggggccgtgcgctctcgggccactcggccgcaggtttatgatgataaagactacaggagaattcggtttgtag

SEQ ID NO: 171860 - DNA, 95 bp, Homo sapiens
gacagatcctgtgtcacccggcaactcagaaacatcaggtccaagggtgagcttgtcggccacagactgctacattgtgcatgagatctacaatg

SEQ ID NO: 171861 - DNA, 50 bp, Homo sapiens
ccgtgaacggacagtcccccccagggtcctcagaagtggaatacagagcg

SEQ ID NO: 171862 - DNA, 80 bp, Homo sapiens
agagaaaaccagctgagacagggcgccacttactaggtgtggacactgccagcggctgcagccgacttggaatgacctgg

SEQ ID NO: 171863 - DNA, 82 bp, Homo sapiens
gaaccggcacctgcacacctggatccaggataacggaggctgggaaatttacatgccacttatgtgatagaagtttcacaga

SEQ ID NO: 171864 - DNA, 75 bp, Homo sapiens
gaggaacgcgctaaggcaaagcacctggttggaagctttcttagaatctatagccttcataccaaacttcaatca

SEQ ID NO: 171865 - DNA, 100 bp, Homo sapiens
gggtgcgctttctgcacgagaccgggctggccatgatctatggtcgagatttaatttgcatccagtctatggatgggatgctgatggtatttgagcagga

SEQ ID NO: 171866 - DNA, 75 bp, Homo sapiens
gtggtgtgttcttgactccgctgctcgccatggcaagaagcgaaaccctggccttaaaattccaaaagaagcatt

SEQ ID NO: 171867 - DNA, 75 bp, Homo sapiens
aattaacaaggcttgaatctgtattacccagaagccctgctgtgggtgaatttgtaagtgatgtcctgctagttc

SEQ ID NO: 171868 - DNA, 101 bp, Homo sapiens
caactttgaaaatgtctgtacagccaacggaagaccagggaatttatcagagcaaagttcgggagctgatcagtgacaaccaataccggctgattgtcaat

SEQ ID NO: 171869 - DNA, 58 bp, Homo sapiens
catcttaaagttcacacagcactgttcaactttgtggggaaacttttgggtccacgtg

SEQ ID NO: 171870 - DNA, 75 bp, Homo sapiens
tggagtgggcacgttaccaggaagtgacttaaaggttgtaaagaagaaagttctaccctttctgtcaaaatgaag

SEQ ID NO: 171871 - DNA, 100 bp, Homo sapiens
ttgtgcagtgtcttcagcgcattgctacctaccggctagccggtggagctcacgtttattcaacagaggagatgttaaagtaacccatcttgcaggacga

SEQ ID NO: 171872 - DNA, 50 bp, Homo sapiens
cctatggcgagaaaggctatggtacaggtttgcagattccgccagcagca

SEQ ID NO: 171873 - DNA, 76 bp, Homo sapiens
gcccagcgctatgccgacttcactctcctctccatcccgtatccagccaatgttttcagttgcaccaagcttagcc

SEQ ID NO: 171874 - DNA, 51 bp, Homo sapiens
tttaccaagcggagtgcaaattgtgtggatctaaaatgtccactgaggcac

SEQ ID NO: 171875 - DNA, 75 bp, Homo sapiens
ttcggaagcggcagctggtggaggacaggaacctgctggtggtgctggagaatctggtaaaagcaccattgtgaa

SEQ ID NO: 171876 - DNA, 96 bp, Homo sapiens
gaagaggcagaaaatggaagagacgcccctgctaacgggaatgctgcaggtaaaaatcaaggtgaccccaagaaaatggctcctcctccaaaggag

SEQ ID NO: 171877 - DNA, 75 bp, Homo sapiens
ccacatccaaaagattgggttggtatattcaaggtgtgatgaatgcagactctgctaccattttggctgtttgga

SEQ ID NO: 171878 - DNA, 72 bp, Homo sapiens
atcttgtgaaagaacagggagtgaagaacatttttggatggaagaccagtttgcagccctgcacgaaaatcc

SEQ ID NO: 171879 - DNA, 100 bp, Homo sapiens
cagaaccaaggagctgcgctgctacagatgttaccacttctgtggctgctaccccactcctgggccgtccctgaagaaacctgctcctccaaagccagag

SEQ ID NO: 171880 - DNA, 50 bp, Homo sapiens
gcccaacttccagcaggacaaggggccaaagggagacagaggcagccggg

SEQ ID NO: 171881 - DNA, 100 bp, Homo sapiens
gtcagaaacacaaagcagcccaaccaaaggcatatatagcagtgacgaggatgatgaggactttgagatgtgtgaccatgactatgatgggctgcttccc

SEQ ID NO: 171882 - DNA, 107 bp, Homo sapiens
tgctgtgtgggaagaagatttgtaaagaaaactcttaggtaccaggtcatcagtacaccatctgatattttcatggtgatggaatatgtctcaggaggagagctatt

SEQ ID NO: 171883 - DNA, 75 bp, Homo sapiens
cggagaagcgcgcgggcgcgcaggccgcggggagcacctggataatcacagctggcttatcaatattgctgtttg

SEQ ID NO: 171884 - DNA, 100 bp, Homo sapiens
cccccgccggactgcagtgacaacgcccaagggggaggccactcttcacctccaccatgagcctggacatccagagcctggacatccagtgtgaggagct

SEQ ID NO: 171885 - DNA, 101 bp, Homo sapiens
gaagagaccttcacctgggtgccacgtggaagattggccagcaccattttgactcctgtggatggatataccatggggtatacagttagcagccgtgtatg

SEQ ID NO: 171886 - DNA, 98 bp, Homo sapiens
ttgggcactgatgaacttagactgctctatggcatggcattggtcagtgtatcgcattaagttcaaggagagctttgctgagatgaacaggggctcga

SEQ ID NO: 171887 - DNA, 100 bp, Homo sapiens
gattctacatctcaagctcatattttgaagtgtttacgggaattcaccgtcccccagctccgtggccagcagcgactcaggaagtacagatgagatccag

SEQ ID NO: 171888 - DNA, 51 bp, Homo sapiens
gcgacgctaagttgctgatcgtggcgtgtcctgggtcatgaaacttaatcc

SEQ ID NO: 171889 - DNA, 100 bp, Homo sapiens
gtggagaccctcctgagacgttctgtgcaatggcagtggagctactgctgtggttcaggcagccctatgcaaacccaggcaagaacgtgtagcaataaaa

SEQ ID NO: 171890 - DNA, 100 bp, Homo sapiens
cttttgttgaacaaatttgatttccggagtcagtcattttactgtcaagacatttcttcggcattctgcaacaggtgtgttccagagaacaagccttcag

SEQ ID NO: 171891 - DNA, 83 bp, Homo sapiens
acccaggttacggaccggaagtgctccagaactcaaggatcagttcttaagagcagccccggtaactggaggaatgggagccg

SEQ ID NO: 171892 - DNA, 55 bp, Homo sapiens
tagagacggggtttcaccgtgttacccaggatggtctcgatctcctgacctcatg

SEQ ID NO: 171893 - DNA, 100 bp, Homo sapiens
gaatcatgtataaatggcttttaggaatggtagcttcctggggatggtatgctggatatacaggtgtagtgatggtttgtgtcgttctgcgttacatgaa

SEQ ID NO: 171894 - DNA, 90 bp, Homo sapiens
cagagcttgggatggtcgtcttggggatcgatacaacccacctgagctagagccggtgcaggccacgcagaacaagacagggaagtatgt

SEQ ID NO: 171895 - DNA, 97 bp, Homo sapiens
ggcaaggggcggccgggcgcggccgctccaccgggggacggctacgtgcaggcggacgcccggggccccccggaccacgaggagcacctgtatgtca

SEQ ID NO: 171896 - DNA, 100 bp, Homo sapiens
ccactcggccctgcgccgcgacaagtacgtggccgagttcctcgagtgggaggacgtcggtgatgaaggagaagaagaaaaagaattcatttcctataac

SEQ ID NO: 171897 - DNA, 50 bp, Homo sapiens
cacaacaccattgggaccagggtactgggcctaatcgctacgtgcctctt

SEQ ID NO: 171898 - DNA, 51 bp, Homo sapiens
cttagcagcttctaacctgccgtgctggccaaagtgagggaaaaagtgaag

SEQ ID NO: 171899 - DNA, 86 bp, Homo sapiens
gctgctcgcggacccagcgctcccggccggacgtcaccccccagtggtgctggagtttatgtggccgaggcagacaagtggaatta

SEQ ID NO: 171900 - DNA, 100 bp, Homo sapiens
cattggagttagtggcaagacgaagtgggatgtgctcgatggggtggttagacggctgttcaaatctattgtgcaagtggagacattaggagaatttggg

SEQ ID NO: 171901 - DNA, 90 bp, Homo sapiens
gtagtccagacaaagactgaatcagtaacaaatgtggcaattattttggatctatcacctgtcatcataactggcttctgcttgtcatcc

SEQ ID NO: 171902 - DNA, 75 bp, Homo sapiens
cgcttgtacaaaggagagtttaaacagccaaaacagttcattcatattcagccaccaaggatgacattgatcttg

SEQ ID NO: 171903 - DNA, 90 bp, Homo sapiens
tttatgagcaggtgcttcggagtgcttatgccaagaggaacagcagtgtaaatgactcagtaatccagtccctcatagcactggtgaatg

SEQ ID NO: 171904 - DNA, 100 bp, Homo sapiens
tggatgttaaaaatcaacaccaggactacagtaaggctgaaatcattgaagtgcttggagtgcagaactgaaagaggtgatggcatcagctgagaaggga

SEQ ID NO: 171905 - DNA, 75 bp, Homo sapiens
ttgtgtcaaccatccattccaggagccagctatctgagaatcttgtggaagaagaatgaagttgctgattatgaa

SEQ ID NO: 171906 - DNA, 83 bp, Homo sapiens
attttgatacggaaacatacaacgcgcttatgaaaacacttcagagagactgccggcactctggcccccagaagcttctccac

SEQ ID NO: 171907 - DNA, 100 bp, Homo sapiens
gttatggaagcccaagaatatatagccgtatgtgcactgcgcgtgaccagccgggcccgcagccgcatcctcagggcagggggcaagatcctcactttcg

SEQ ID NO: 171908 - DNA, 98 bp, Homo sapiens
cctgagcggcctgctgcggcaccgcggcggcctttctcctgggaagacgaataactgaagtgaagtgatggactccgatttggagagtagtaagacgt

SEQ ID NO: 171909 - DNA, 51 bp, Homo sapiens
ttctgcacgacgatgaggtgacagtcacggcactataagaccgacttcgac

SEQ ID NO: 171910 - DNA, 75 bp, Homo sapiens
ctctgcccccccttccccacgcaaccccagatccatttacactttacattatttctcaaactctgaggctgcgga

SEQ ID NO: 171911 - DNA, 74 bp, Homo sapiens
ggagcacagggcagcggagatccggacagaactgtaccgctctctttttggccagctccaccctcccgacgaag

SEQ ID NO: 171912 - DNA, 50 bp, Homo sapiens
tttgattatatctgtaagaatggaagggcaattcgaagttttcaagtagc

SEQ ID NO: 171913 - DNA, 111 bp, Homo sapiens
ccacgaggcgctggcccggaggctccagaaacgggtcctgctgctcaccaagctacgagttccagggagctctgtcctggtgaccgtgcccgggttatgacgactaatccc

SEQ ID NO: 171914 - DNA, 84 bp, Homo sapiens
ggaaacaattgatttgctcttacgtatttgtgtgacttgactcttcaaacacaaaggttttaaaatcaaagatgggaaaatcgg

SEQ ID NO: 171915 - DNA, 90 bp, Homo sapiens
gtaatgggatctcccagttgtgacccatttaacacaagtgttcccgaagagcatcagaggctccttgaaatgctagatacagagaaggaa

SEQ ID NO: 171916 - DNA, 126 bp, Homo sapiens
ggtcatcgacagctgcaaggaggccgtcaccttcaaggccgtcagacaaggcagcacaacaagattcgcagcgtggaggggagccagctgaaggcctacctttccttagaagtgttagatctgagt

SEQ ID NO: 171917 - DNA, 90 bp, Homo sapiens
tcctgccgtgcaaatgttcctcagcagcacatagcacctatcggggtgcgatagcgaactcgctgacctgcgtgcagctgcacaagagag

SEQ ID NO: 171918 - DNA, 100 bp, Homo sapiens
acgagggcatctgcaaccgcaacatcgaccagaccatgctctccatcctgctcttcttccacagatgcttcaggactgccccaaggcccgcagggaggtg

SEQ ID NO: 171919 - DNA, 75 bp, Homo sapiens
actccttggatgctggtgccacaagcgtagatgttaaactgggtggagagattcaaccagttagcgtgaaagttg

SEQ ID NO: 171920 - DNA, 101 bp, Homo sapiens
gccaggtcacgccacagtgaggctggagcactatgagaaggggagcagtcaggtgagagccagaagatacctgaaattcctgcagatgttgtgggtgccct

SEQ ID NO: 171921 - DNA, 97 bp, Homo sapiens
ccgccgcagaccccttcaagttctagtcatggccgagtgtactacttcaaccacatcactaacgccagccagtgggagcggcccagcggcaacagca

SEQ ID NO: 171922 - DNA, 75 bp, Homo sapiens
gaccattttcttcgtgagaaagaaatcgacgtgctgttttcatagggcagaattaagcaactcatagaacttgac

SEQ ID NO: 171923 - DNA, 90 bp, Homo sapiens
gaacagagtgctgttttagagctggcagcagcatctcagcccaagagaaggtcaataactgggagatggacaaactagagatggaagatg

SEQ ID NO: 171924 - DNA, 99 bp, Homo sapiens
tgaacaagacatggaaggaaatgagggcaacttctgaagacttcaacaagagtcctgtgaagataaatcagattagcttggatgaaagtggagagcaca

SEQ ID NO: 171925 - DNA, 50 bp, Homo sapiens
caggaggcagtagccaaacacccaggctccctgactggcagtcctcacct

SEQ ID NO: 171926 - DNA, 74 bp, Homo sapiens
ggcctggaggacaccaacatgatggtatgttacttacggtcatgaactgatttggaagaacagggagccgctag

SEQ ID NO: 171927 - DNA, 100 bp, Homo sapiens
ccaaggggtccttctactcctaagatatgtgaacttttgcaaagcggagccataatgaataaattttaccagcctcatgaagcgcatattccctacctcc

SEQ ID NO: 171928 - DNA, 100 bp, Homo sapiens
ctgatgcagatgcccctcctccaccagaggactgggaggagcatgtcaacagcggaagatccatccaaaagctatgtgaaattacgagactttgtgcttg

SEQ ID NO: 171929 - DNA, 100 bp, Homo sapiens
gctgtgtgctgagaacagaaaggagatggaggattggatcagctcactgaagtctgtacagaccagagaaccctacgagatgggcctttgggtccccgag

SEQ ID NO: 171930 - DNA, 73 bp, Homo sapiens
gggcattccggaggcagccgagggcagcagctcccagtttcttcttttcgagcttcttggacacttaatgatt

SEQ ID NO: 171931 - DNA, 90 bp, Homo sapiens
tgactatcttctcttcaccagctcttcagatcaatatggaaagggaattcttgaagaattatgtccagcgaatagttgatgttcgaccca

SEQ ID NO: 171932 - DNA, 75 bp, Homo sapiens
cttgctgtgagtgtctctagggtgatacgtgggtgagaaagggagccccagactctggtaaatgctctgcttcct

SEQ ID NO: 171933 - DNA, 75 bp, Homo sapiens
gggctcaggaggctgtgtgccgatacttctactccaaggagcttgcagagctagaaagtgccctccaagagcagc

SEQ ID NO: 171934 - DNA, 98 bp, Homo sapiens
agaccagtttcggtcctggaggtggggccgggcctgcgtagtgaaactgcgtaggaacctgggaagaaggctgcctttaatattggttgggaacaaat

SEQ ID NO: 171935 - DNA, 75 bp, Homo sapiens
gaactcaagtcaccgtggagctccgccgccccgaaactttcaccgcgagcgggtcatcgtgatgtcaggtcatga

SEQ ID NO: 171936 - DNA, 91 bp, Homo sapiens
cttaaatactcatctactaggcaagcatggagttggcaccccaaaagaaaggccccttcacagatgtagtcactacaaatcttaaattgcg

SEQ ID NO: 171937 - DNA, 100 bp, Homo sapiens
tggtgcgcttccggatcgggggcaagcggaaggtgatgcccaagatggaccagtatggtttgaagtggtgaacatggatttttctcggcttcacatgtac

SEQ ID NO: 171938 - DNA, 89 bp, Homo sapiens
tgaggccgcggagcgccagctcaatgaaggtgatattcatgaggatttttgcagcgtttgcagaaaaagtggccagttactgatgtgcg

SEQ ID NO: 171939 - DNA, 75 bp, Homo sapiens
gacaagcacacactatggcgctgaaacggattaataagaaaaggcgacggcggattgacagaagtatgattggag

SEQ ID NO: 171940 - DNA, 82 bp, Homo sapiens
cctcccgcgcgtgctgcgggtctgctcgggggtctacttcgagggatgttcttgagtcgaagaacagcaccatcaaggacct

SEQ ID NO: 171941 - DNA, 82 bp, Homo sapiens
acaactaccagtttggttcttgaaagatttgtgctgcatggaaacaacctgttagtatttggaggtacgggcatcccatttg

SEQ ID NO: 171942 - DNA, 83 bp, Homo sapiens
ccgagaagagcagagcggagggagccccagacacggctttatcctgtggataaacgcagagtgaacgagtttggggagtccta

SEQ ID NO: 171943 - DNA, 100 bp, Homo sapiens
ttacgtcagcgtgatgctgaggtgactcgactaagagaattaaccagattttaccaaatgttgcaagaactctggagttcttatggtagtaaaatgccgg

SEQ ID NO: 171944 - DNA, 96 bp, Homo sapiens
ccaggagcgcccaggcttgggcagcaacccctgcatccccattttttactgagctcaggagagcaagatgaaggacaaggactgccatccaccatg

SEQ ID NO: 171945 - DNA, 89 bp, Homo sapiens
aagaacaagagaagacctcagatgtgaagtccattaaagaatttcgaggatgtcagatgtaaatgtatctgccctccctataaagaaaa

SEQ ID NO: 171946 - DNA, 74 bp, Homo sapiens
tgcgcctccggggccggccctgcaggcccaagtctgttttggtggtctgagaggaaaaaagatgagcttctaaa

SEQ ID NO: 171947 - DNA, 100 bp, Homo sapiens
gcctggaccctgcccagcagaatttgtatagagatgtgatgttggagaactacagaaacctggtctccctaggtggggaagaaaacatgacagaaacaga

SEQ ID NO: 171948 - DNA, 82 bp, Homo sapiens
tcgctggcgggggtcgtgagggagtgcgccgggagcggagatatgattgtccccttggggcggaaagaagccaaggccaagg

SEQ ID NO: 171949 - DNA, 100 bp, Homo sapiens
aactacaggaacctgctttctctcgatgaggataacatccctccagaagatgtggggtgccgaggctcaggcagcatgacgacggagacctttgtgaagg

SEQ ID NO: 171950 - DNA, 100 bp, Homo sapiens
taatgaccacaacaagcaagcatgcagcttactgcttgaaagtgtccctggggaagccacccatggtcactcgctgcccgaatctgcctcctggcttggc

SEQ ID NO: 171951 - DNA, 82 bp, Homo sapiens
tgcggtttcagcctcaacccagaggaatcgttactctttcagaaaagcaccaaggattctcttttgttgaatttgagttggc

SEQ ID NO: 171952 - DNA, 98 bp, Homo sapiens
gcagaactacgccgtaatggcactttgccttggttacgccctgattctaaaactcaagaggagctattgaaagccattgcctgtgtggtgacagcttg

SEQ ID NO: 171953 - DNA, 80 bp, Homo sapiens
tctgtggaagaggtggttcgaggtgctccctcaaaggaaaaatgtgagccctggcatggtttcttgtttgaactctttct

SEQ ID NO: 171954 - DNA, 125 bp, Homo sapiens
cgcctcttccctccgtgagcgctggcctgggggaaccaaggccccctgatgttgagacatgggaaagcggaaccaccaaaaggagtgatgatcaacgatctcatgataaatctggatgctagttc

SEQ ID NO: 171955 - DNA, 80 bp, Homo sapiens
ccctcatcgccctggccgacaagcacgcaaggaaagcaggcaggatgggagagtcgccgatagaaccacctcttccctgc

SEQ ID NO: 171956 - DNA, 98 bp, Homo sapiens
gccgcggctccggccctggccccgatggctctgtgcaacggagactccaaggaggagcgagctgggctggaggcctcactcctggcatgccaccaagt

SEQ ID NO: 171957 - DNA, 97 bp, Homo sapiens
aacagtacatttctgcaattgagaaacaggcacacaagtgtgaggagttgctaaatgctcagagctggggtggaaaggagaatggctttggacttgc

SEQ ID NO: 171958 - DNA, 100 bp, Homo sapiens
ccgacaacattccgatcccaatgagcaagtgacaagaaaaaacatgctcctggctacaaaggcggcgactggcggcgcgatggacctgaccgggctcctg

SEQ ID NO: 171959 - DNA, 100 bp, Homo sapiens
aagatgaacttctgagttacataaagaagacctaaaactgatggctactaaaaagcagagcatttctggaggcaagtgaggcctatctggttggcctttt

SEQ ID NO: 171960 - DNA, 90 bp, Homo sapiens
cagacacaacccggccatcgaggccctgctgcacgacctcagctcccagaggatcaccagcgtggccacggagaccgcccagcagttgaa

SEQ ID NO: 171961 - DNA, 87 bp, Homo sapiens
caatggcatttacagaaagagtcaacagcagtggcaacagagtgtgaacatggctacgcctcttcattcccgtccatgccgagcccc

SEQ ID NO: 171962 - DNA, 96 bp, Homo sapiens
gcaacgaacgaaataaaccagaacatcgttcttcaagcctgtgaacttatgaatcaaggcatcttggccctggtcagctccattggctgcacgtca

SEQ ID NO: 171963 - DNA, 100 bp, Homo sapiens
accctctctcaagtagctgaggcctccgaaaccttccctagctggatttggggacagaggagcgctgcatcctggcactgcaggctcgcacttagccctg

SEQ ID NO: 171964 - DNA, 100 bp, Homo sapiens
gatgtggagacaaaactacgtgagtttgaagatcttcagatgcagcttaacacaagcattgatttgcgcacaatgtggacgagtgctcactagcagaaaa

SEQ ID NO: 171965 - DNA, 75 bp, Homo sapiens
gaccatcagtctgtgacctgccccttctctttacccttaccaataattctaggatcgtaggactcctggctcaac

SEQ ID NO: 171966 - DNA, 90 bp, Homo sapiens
gaagacagccccgatttactggctgctagaaagagccataagtgtgatccttggtgacaggtggaagaaaatgaagaatgaagagagaag

SEQ ID NO: 171967 - DNA, 98 bp, Homo sapiens
caccatggcagatggcaacagaggatgtcaacaattttttggaggaagcagtggctgggacaagctgtggaaaaagtacggatcacgctttccccagg

SEQ ID NO: 171968 - DNA, 100 bp, Homo sapiens
aacaaattaattaatgacctcaaaggttgccagagtctgccctccgagacctcatcgtagccaccattgctgtcaagtacactcagtctaactctgtgtg

SEQ ID NO: 171969 - DNA, 90 bp, Homo sapiens
cctgaccccaagattccagatgttcctgtggaccccagtccagggtgcagcagttggaggaagaaaatacagagcttagaacaacagtga

SEQ ID NO: 171970 - DNA, 101 bp, Homo sapiens
ctcatggacatggacactttcattctcatggaaaaccgtcttcagatacagtccctaagcccaagagagccccaaaacagaagaaagtagtagaggctgta

SEQ ID NO: 171971 - DNA, 101 bp, Homo sapiens
aagatggcgtctgctagtagggtcgttcagcgcacgtaccgggtgccgaaggaggtccgcgtggagcctcagaagttcgcggaggagctcatccaccgcct

SEQ ID NO: 171972 - DNA, 100 bp, Homo sapiens
ggagcagggcctgactgcgcagctgcagatctgggacacggccggccaggagcggttccgcaccatcacccagagctactaccgcagtgccaatggggcc

SEQ ID NO: 171973 - DNA, 133 bp, Homo sapiens
ggggacccagaccctggagcctcagttggaagcagccgatccagcctgcggagcctgtggggcaggcgcattctacattctaaaggggagctcagtgaagatagacataaacagtatgaggaatttgctatgt

SEQ ID NO: 171974 - DNA, 83 bp, Homo sapiens
caaaaagatgctgtaaatgatgatgattttgagccatacttaagtagccagacaaatcaggctttttggaaaggatataaaca

SEQ ID NO: 171975 - DNA, 73 bp, Homo sapiens
tttgctcttccatccgcctttgatcgtcttcctcttcagccatccaggtaagaatgattgatgttggctgata

SEQ ID NO: 171976 - DNA, 75 bp, Homo sapiens
atgctaccatttttaataacctgttgctgggagagacaccgccagttgagctggttcgatgcccagaactgaatg

SEQ ID NO: 171977 - DNA, 100 bp, Homo sapiens
ggagagcgcgccaagaccgctgcagccgctggctgaaatgacagggagagagtttttctctcgtttcccagaactctatccttttcttctcaaacagttg

SEQ ID NO: 171978 - DNA, 75 bp, Homo sapiens
agaggttcaaattggaccactcagtgagtagcaccgtagctttgcagtttggggagggctgttttccatgattga

SEQ ID NO: 171979 - DNA, 75 bp, Homo sapiens
cagcacctcacccactggacagagcccatacacctaccagatgcacggacagagcgggatgccaccagcttgtcc

SEQ ID NO: 171980 - DNA, 74 bp, Homo sapiens
ggtacattgagcaggctacagtccactccagcatgggaactcttgcagcagacaagaatgagattttgttttct

SEQ ID NO: 171981 - DNA, 50 bp, Homo sapiens
actattttcacgttttaatgccgagaggaagttggtgaaccatctaaaga

SEQ ID NO: 171982 - DNA, 88 bp, Homo sapiens
ccgagcgcaaggacagcgcgaggtccgcgcagcccagcgcagccatgaggatacgaagcgttttcggcttcctgcccggagctgtgca

SEQ ID NO: 171983 - DNA, 100 bp, Homo sapiens
gcttgcagagctttccagcccgtttgtgaatcagcgcttaacagagcgttccaaaaagaggactctccagctactttttattgcatcagtatgcagtggt

SEQ ID NO: 171984 - DNA, 100 bp, Homo sapiens
gcgagtcagtgactgaagcgcccgtccattccaaggggaaaacatatccatttcggggcgcctttccaccagtatggaatcccattgcatatttggatta

SEQ ID NO: 171985 - DNA, 82 bp, Homo sapiens
ccgatgtttaccctcaggaccccaaacagaaggaggtgccatgcctctgcaactcctcctgttgctgatcctactgggccct

SEQ ID NO: 171986 - DNA, 83 bp, Homo sapiens
attgtgtctgcttggtgtggagccatgaagggccagccaagtctcgggatggtgaacgtactgtctattgcaacgtacacaag

SEQ ID NO: 171987 - DNA, 100 bp, Homo sapiens
tccagagggccatggccggccagggggactgctgcgtcaaggtggccgtcaggtactgtgagaatagagatgtttcgaaatatgcagaatgcagaaatca

SEQ ID NO: 171988 - DNA, 48 bp, Homo sapiens
cgagctccagccgaaggagaagggggccgcagggccgtaggcagccat

SEQ ID NO: 171989 - DNA, 100 bp, Homo sapiens
gctgcatccccattgtgcaactgccagtctaaaaattgatatagagatccagagcttcgcgggcgccgagaaggacgcgcgcgtggtgggcgagatcgcc

SEQ ID NO: 171990 - DNA, 82 bp, Homo sapiens
ggaacgcctgaaggccgcgcccctcctttcaggtcggccaggagcgcgccggaaacccctcctggagtttccccaaagccat

SEQ ID NO: 171991 - DNA, 75 bp, Homo sapiens
cgctactctctctttctggcctggaggctatccagcatccggtgtttaaagccgtcccagtgcccaacatgacac

SEQ ID NO: 171992 - DNA, 101 bp, Homo sapiens
tgtggtacaggaaatcctgctcacctgagatactgtgtcacctgtgagggggccctgccttcatcacaagagaactgataaatttcaaacggaagagagtg

SEQ ID NO: 171993 - DNA, 100 bp, Homo sapiens
cagctgtctcctggccctgacttttctaagatgagaggagctggtaggaacaatttggctacgtaattcgaattgacttgattttttcaagtaatcctag

SEQ ID NO: 171994 - DNA, 83 bp, Homo sapiens
ctaaagcaggctaccaaggacagagtcagtgatttccataaattgaagcaaagaactgtggctgcaccatctgtcttcatctt

SEQ ID NO: 171995 - DNA, 50 bp, Homo sapiens
gtgctgggccccaccatcaaagcttaccctcttctccacctgctccccgg

SEQ ID NO: 171996 - DNA, 100 bp, Homo sapiens
gtctggatgtcggtgggcctctgagatatgccgtttacggtgattacagtggcgagatcttgaacaactgctgcgtcatggagtaccaccaagccacagg

SEQ ID NO: 171997 - DNA, 100 bp, Homo sapiens
atcactgactggcacaggtgttggggtagcatctccgcccccacttactgatactcctgacactacagcaaatgctgaaggagatttaccaacaaccatg

SEQ ID NO: 171998 - DNA, 50 bp, Homo sapiens
gtctggtagccaccggcactcacgcatccgcacttccactaatagccaag

SEQ ID NO: 171999 - DNA, 100 bp, Homo sapiens
ggacatctgaaagccaggaaatggaaaaccagtagattcccagacatcgcgaagtgaatctgaaattgtgccaaaagttgctaaaatgactgtatctgga

SEQ ID NO: 172000 - DNA, 75 bp, Homo sapiens
gaactacaggaacctgctttctctcgatgaggataacatccctccagaagatgaatgtgacagtgatgataacat

SEQ ID NO: 172001 - DNA, 82 bp, Homo sapiens
ctggagctgggtcagtccgccgctcaccccgcggccgcaccttcccgccttctcaggtgctgactgggttacttttttaaac

SEQ ID NO: 172002 - DNA, 78 bp, Homo sapiens
gacggtgctgaggaacctcacggcatgatgccttcttctgtagagtgggcgctttgcagaatacgtgttgaatgaaat

SEQ ID NO: 172003 - DNA, 100 bp, Homo sapiens
agggaggatgtcgggacaccccggaagctgggaaatgcacccagtcagcttgaagagtttcaaatggaccctaccactgagaaatcaagatggcagtcta

SEQ ID NO: 172004 - DNA, 90 bp, Homo sapiens
agcagctggctggctttgataagtacaagcctggagcattggtaagcgtcacactgccaaagtgagagctgctggagaactcataatccc

SEQ ID NO: 172005 - DNA, 75 bp, Homo sapiens
gacataggagaagtgattcttgtgggtggcatgactaggatgcccaagatcatcaagagggcccggcagaaccac

SEQ ID NO: 172006 - DNA, 100 bp, Homo sapiens
cacaaaccagcttcaggcctttttcaagaacaccttccaccatgaccacctcagcaagttcccacttaaataaaggcatcaagcaggtgtacatgtccct

SEQ ID NO: 172007 - DNA, 97 bp, Homo sapiens
acacgacctctactggccttgcccagcgcctagatatgaagatcaatgatgcagactgatggttttgatgaagctgggcatttataactagattcat

SEQ ID NO: 172008 - DNA, 100 bp, Homo sapiens
cctgcctcttcccacagggttcatagcagtggcagcaatgcttatggatgctggacagagatgggtgtaatgcctgagattgcacaagctgtggaagaga

SEQ ID NO: 172009 - DNA, 50 bp, Homo sapiens
gatcagattattcacgaagctctagaaagatccacagaccagcatggctg

SEQ ID NO: 172010 - DNA, 100 bp, Homo sapiens
caacaaccccggggtgcgagaggtggtgtgcatgacactcctggaaaacaggtgaattttgtggtatgccagcttgttgctctgtttgctgctttctggt

SEQ ID NO: 172011 - DNA, 83 bp, Homo sapiens
atccattctcatgaagcagctgcagcagcagcagcacagcgacaagacgaacatccagtcatggataaaaatgagctggttca

SEQ ID NO: 172012 - DNA, 97 bp, Homo sapiens
actttgacgccctggtgaagatgggggagctggccagcgagagccagggctccaaagaactcggtgtcatggagaaactccagctgggcccagagat

SEQ ID NO: 172013 - DNA, 82 bp, Homo sapiens
accattttcctagatgatagcacagtcagtcaaccaaacctcaagtatacaattaaatggaattacatgaatgacagtcttc

SEQ ID NO: 172014 - DNA, 83 bp, Homo sapiens
gcatggagttggcaccccaaaagaaaggaatgtttaggtgtccataatgtcactaaacccgtgtcttcactttgcaatggaat

SEQ ID NO: 172015 - DNA, 100 bp, Homo sapiens
gggccttcagcgtttctcactggttcgaggaaggcggcctcagaggagagggaagagtcgacttcaatgttcctatgaagaacaaccagataacaaacaa

SEQ ID NO: 172016 - DNA, 100 bp, Homo sapiens
gcaaatctggaagcggatcgcgtggagtgacggtcacaccgcggcggtgaaatgacaatggatgctctgttggctcgattgaaacttctgaatccagatg

SEQ ID NO: 172017 - DNA, 80 bp, Homo sapiens
agaagtggcctaaaacttcggcgttggaagccatgcagtgacacccgctaagacttgttggtagccatgtcggagcccca

SEQ ID NO: 172018 - DNA, 83 bp, Homo sapiens
ccggcttcgcgcgcgaacccggctttcgcatttgggaccctgcagggctctgaagggctccaagaagctggtgctgtctgtgt

SEQ ID NO: 172019 - DNA, 75 bp, Homo sapiens
gctgttgaccaacgagtttgatacagttgtggaagacgggagtctgccccaggagaaggccatcagcatttggga

SEQ ID NO: 172020 - DNA, 50 bp, Homo sapiens
gagagttacgtggcagaaatgatcaaggttctagtaaataccgcttgctg

SEQ ID NO: 172021 - DNA, 75 bp, Homo sapiens
cagaaaatgatagaatgagaatgaagtatggagtagcacagaagagggaggatgctgtttccaaagaagtgactc

SEQ ID NO: 172022 - DNA, 101 bp, Homo sapiens
agctcatcagcgtggaggacctgtggaaggcatggaagtcatcagaagagccagagcccagaggtggagcagttagggagggttgtggaactggacagtga

SEQ ID NO: 172023 - DNA, 82 bp, Homo sapiens
atgatcccaatttccagatgccttgttcaacaggtgcggtggctactaaagttcgaaggcacgatatgcgtgtccatcctta

SEQ ID NO: 172024 - DNA, 101 bp, Homo sapiens
cgtggttggagagctcatctggaattttgccgatttcatgactaaccagtgtggtatcacggaaaacttgacagaacgatagcagaagaacgcctcaggca

SEQ ID NO: 172025 - DNA, 83 bp, Homo sapiens
caaggattctcgctgtgacagagacaacaccgagtatgagaactcagagtcaagatctccactgaagttggcatcacaaatgt

SEQ ID NO: 172026 - DNA, 82 bp, Homo sapiens
cgcgtcgtggggcgagcggcagggttgtgagtcccggcccagcccctccacccccctgcccccccgatgcgaccatgggctc

SEQ ID NO: 172027 - DNA, 97 bp, Homo sapiens
cacccccggagcccccctcaacacggaccgcgcccgccgggcacacaagaatggtcactaccctctttcccagctgcccgctcctcagcacccgaag

SEQ ID NO: 172028 - DNA, 75 bp, Homo sapiens
ggtggtgccagtttggagctcctggaaggggatgctgcactgtatcagtccctgcccactctggcccgggccctg

SEQ ID NO: 172029 - DNA, 78 bp, Homo sapiens
agaccaatttttacgtctagatttccatgcccatggaaggttcattgcagaagaggccgcggcttctggggccaagtg

SEQ ID NO: 172030 - DNA, 88 bp, Homo sapiens
aaggaggaggagaacacagtggatggttggcaatggctgataaatgacactttgagacatctccatctcatctcaagtcactcccgcc

SEQ ID NO: 172031 - DNA, 100 bp, Homo sapiens
aggatggcgcggccgagtccccgtacggccacccggcggccttgaaaagatcttttgaggtcgaggaggtcgagacacccaactccaccccaccccggag

SEQ ID NO: 172032 - DNA, 83 bp, Homo sapiens
agctaaagcagcgtgcgttcagccctgggcatcctgaggttagcattacacttctcccagtggagcccatgacttctgatcag

SEQ ID NO: 172033 - DNA, 75 bp, Homo sapiens
tcggaaagttggaacctctgacaagaccaagtactaccttcaagtatctggagtccatctttcaccatcttctcc

SEQ ID NO: 172034 - DNA, 100 bp, Homo sapiens
ctgcaaatccttactcagtgacttcagggatacagggggagcacctggggaccacggaagcgaccgaggccttctttgccatgaccaagctctttcagtc

SEQ ID NO: 172035 - DNA, 96 bp, Homo sapiens
gtctggttgtgagcagggtctgcacgaaataaagctcctgggcaaggggacgtctgcagctgatctggctcttgctgattgaattcctttggtgca

SEQ ID NO: 172036 - DNA, 82 bp, Homo sapiens
caacttcctgcaggactccaaggtcattttcgtggagaaagccccagagcggttctggtgaggttggaaggatgcagccacc

SEQ ID NO: 172037 - DNA, 50 bp, Homo sapiens
cgccgctgccttcaggtttccgagcctacaggtggcagatgagaactctc

SEQ ID NO: 172038 - DNA, 99 bp, Homo sapiens
gctcagtggggaggccttcgactggctgcttggggagattgagtccaagttcaaccaagccattcaaatcgcagtcttctccaggctgacaaggcgaag

SEQ ID NO: 172039 - DNA, 50 bp, Homo sapiens
tggaggaatacacttatttatgaagctgcaaagttggctttcacagtgca

SEQ ID NO: 172040 - DNA, 98 bp, Homo sapiens
cagtaccgagtgccccggggaagccattccccaccccccaggattactacagcatcccatttcccacacccactactccgctgactgggagggatggt

SEQ ID NO: 172041 - DNA, 100 bp, Homo sapiens
cacggagcagcggccccggccccgccaacgctgccgccgggcctgtcatctttacttcagagtgttactgggaacccagttccagccagtgaagctgcct

SEQ ID NO: 172042 - DNA, 72 bp, Homo sapiens
tggtgtgagcacatggcatgatccaagagtgcccagcccttcttcgattcaaccaagccatcctggtatccc

SEQ ID NO: 172043 - DNA, 100 bp, Homo sapiens
ctatctatggtgcagatattaatgggagcatatatgatgagagggaagtgtaacatctcccatttttctgacatatttgctgctagagagtttaaagccc

SEQ ID NO: 172044 - DNA, 82 bp, Homo sapiens
ccttttcaactggatagtgtcaattattccctgaatatcctatacacgaaaaatctggtccttcatcagaactaggaaagca

SEQ ID NO: 172045 - DNA, 80 bp, Homo sapiens
agagtgctgatgtgaaaaataccacgacaaaaccaccctagaatgtttacccttgcggaagttgcatcacttaatgacat

SEQ ID NO: 172046 - DNA, 100 bp, Homo sapiens
cccaatttcccagctgctaaaggaagaggaagatttatcagcaagactgttgaacgcataactgcccaagatgcctgtccctccccctccagcacccccg

SEQ ID NO: 172047 - DNA, 82 bp, Homo sapiens
ccagagattatgccaggtctaatacagcttcgagcaaatgctctcatcaaaagaggcagcatgtacatgcaacagcagcagc

SEQ ID NO: 172048 - DNA, 98 bp, Homo sapiens
ggagatccacagctaagacgccaggacccactggaagcctagaaatgggatagctgggagtatggccaccctgctccacgatgcggtaatgaatccag

SEQ ID NO: 172049 - DNA, 100 bp, Homo sapiens
ctctgatttggggatctctagcctacaggatggcttggccttgcacataagtactatactggcaattgctggagaagattttgcaattgttgcttctgat

SEQ ID NO: 172050 - DNA, 75 bp, Homo sapiens
agcctcttgccaaagtgtcccttttaaaaggacttgtcagtcacatctgtaacctgctcactgaaactgccacac

SEQ ID NO: 172051 - DNA, 51 bp, Homo sapiens
cttatgcacagaagtatggcaagatgcctgtccctatgcttattccatctt

SEQ ID NO: 172052 - DNA, 96 bp, Homo sapiens
ggactctattcagagactgaaggcactttggaagcctccttagctgcagccaaaaaacagttagcagatgaaactttacttaaagtagatttggag

SEQ ID NO: 172053 - DNA, 98 bp, Homo sapiens
tccacgtctggaataatgggtactctttcctcgtggaatttgaagattctacagataaatcagttctttaaggaaaaacagtagtgctctgcatagtt

SEQ ID NO: 172054 - DNA, 100 bp, Homo sapiens
gtcagacccaggatggggccagaacggacaggggccgcgccgctgccgctgctgctggtgttagcgctcagtcaaggtgtctgacttccagcaactgctg

SEQ ID NO: 172055 - DNA, 96 bp, Homo sapiens
tcggagcggccgccggagcagcgccggagatggggttgaaatcacaaagattagacacctttttagataggtgttcttcagcaccactgacaacac

SEQ ID NO: 172056 - DNA, 100 bp, Homo sapiens
ctttttggctgttagatgctcttgttggaagaatactaccaggagtcccatttcgtggtatgctgtttggaggagattttcacaagtgatgataacctgt

SEQ ID NO: 172057 - DNA, 100 bp, Homo sapiens
cgaccgccatttcacatccagcagaggaggcgggggcagccgctgagacggtttttcacaagaatgctgagatgtataaactgtcttcagagcaattcca

SEQ ID NO: 172058 - DNA, 99 bp, Homo sapiens
gagagcgcgaatatcgtcatcgttagaaggtggacttaaatgaagaagaaactatattgatcatcaggcgtctacataaggtgttaagaccatttttac

SEQ ID NO: 172059 - DNA, 50 bp, Homo sapiens
ccggattcaggattcagatgaaccagctgtgatgcagatccatccgccct

SEQ ID NO: 172060 - DNA, 75 bp, Homo sapiens
ctcagatgtgaagtccattaaagattagcctgaggcctgctcagtcgttcctaatgaataaaaatcaagtgccaa

SEQ ID NO: 172061 - DNA, 90 bp, Homo sapiens
atcccatgctgtggctccccttcaggaaataaagcagctcctgaaactgggcactggtctcctggaaagtgggcgccattaccttgctgc

SEQ ID NO: 172062 - DNA, 100 bp, Homo sapiens
aggcacagctgtcctgacttctcccgtattggtgcctggctgccctagcaaggtgttcaagcagccctggccagggatcatgcgcacagtctatgggaac

SEQ ID NO: 172063 - DNA, 90 bp, Homo sapiens
ccaggagctaaacatggaaatattcaagtgggatgtgtagactgttcaatgcaacaaggcaaggaagagagaagggcacagttacctaag

SEQ ID NO: 172064 - DNA, 75 bp, Homo sapiens
tctctcctggcaaagactggacaagctgcagccaaaatgaagtttaatccctttgtgacttccgaccgaagcaag

SEQ ID NO: 172065 - DNA, 100 bp, Homo sapiens
acagaccaagttcgggcagccggctgcggtgccatgccctaagggatccgttgaaaactggatgcccaggtgagggccgcggtggagatgtatattgagg

SEQ ID NO: 172066 - DNA, 100 bp, Homo sapiens
tgctgttagcctttgcagtctcgacataagtattgtaccacctacttgaatccagtggggaagcatgtgattgctgacgcccagaatatcaccatcagcc

SEQ ID NO: 172067 - DNA, 129 bp, Homo sapiens
ggccagcttgggggccctgtccctggaggcttatctgaccacaggtgaagctgagacccgcgtccccactatgagtcactcagcctctgaagaagcttcgggttcagactcaggcagtcagtcggaaag

SEQ ID NO: 172068 - DNA, 75 bp, Homo sapiens
tgatggggcagcaagtggccaaaaaaggggccttgctgttcaacaacatattttctatcgtgcctgcgatcttaa

SEQ ID NO: 172069 - DNA, 111 bp, Homo sapiens
caggagaggaggtcttccgggccgcggcctccgagcgcgcgggatttgcagcaatttcctgctgcagagagcattttaagaaaggacagcattcctgtgacctctgcctac

SEQ ID NO: 172070 - DNA, 100 bp, Homo sapiens
caggatgtgggcccagccctgtgccaggaggctggctggaataaagtccacttcgactgctcagggaagtacagatgtcgctcatcctttaagtgtatcg

SEQ ID NO: 172071 - DNA, 100 bp, Homo sapiens
gctttctgccgctggagggaggtctccgccaaggcagggaacgtggtgacaggagaaatggtagaagagcttattctttccggagcagatatcatcaaag

SEQ ID NO: 172072 - DNA, 96 bp, Homo sapiens
ccggataagccgggcgggagcccctcggccagggctgtgggacagatgatgtctaccatgttctacccactggtcacctttgtcctcctcctcatc

SEQ ID NO: 172073 - DNA, 100 bp, Homo sapiens
tgggtggcgagtgacccgagaggccgtggggtgggctccggctcgggttcatcaggacgacgagcagtattaaaggtggaagaaggtccatatctttttc

SEQ ID NO: 172074 - DNA, 101 bp, Homo sapiens
gggccctattgtgctcacacattcagaacctgttacccaaggaattccctaaaggaaaatgtttataggaggccttagctgggacactacaaagaaagatc

SEQ ID NO: 172075 - DNA, 75 bp, Homo sapiens
gaagatcctggtgtcgccatgggccgccgccccgcccgttgaatccacattcatctcaatggaaggatcctgcct

SEQ ID NO: 172076 - DNA, 98 bp, Homo sapiens
aaggagttcaagaattcccagaagaggcagcatgcggaaggcattgctgggagcctgaaaactgtgaatgacccaagaagcttcgcttccacccaaag

SEQ ID NO: 172077 - DNA, 98 bp, Homo sapiens
gctgcttttgatgtctgacaacgtggatcgttgttttgaaacccagaagtcattggatctgtgtcactttctttgcgagctgtcattcaatcagagct

SEQ ID NO: 172078 - DNA, 100 bp, Homo sapiens
ataaagatacaggagagatttatacaaccagtgttaccttggacagagagatgatccataattatatggaacatttagaaagaacaaaacttcatcagct

SEQ ID NO: 172079 - DNA, 50 bp, Homo sapiens
ttcaccgagatctacgagttccatgccctgtctctgcccctggtggtcat

SEQ ID NO: 172080 - DNA, 98 bp, Homo sapiens
tggcttccatgatccccgccctgcgggagctgggcagaataacaagcctttgtattcatttgaagataatgcagactatgtttatgatgttatgtggt

SEQ ID NO: 172081 - DNA, 83 bp, Homo sapiens
ggactacgtgggcaccttgcgcttcttgcagtcgggcgccctgcgtccggcagaggaggcgagcatcccgctcaggtgatgag

SEQ ID NO: 172082 - DNA, 50 bp, Homo sapiens
ggcggtcctcctagcggcctgggcttatttcaaaacctttgtccctcagt

SEQ ID NO: 172083 - DNA, 75 bp, Homo sapiens
cggctccgtggagaacgtgctgcaagtcggtggatggagagagaaagaaaaagccagagaggagagctggggtcc

SEQ ID NO: 172084 - DNA, 83 bp, Homo sapiens
accagaattcggccatgagccgctacatactcatcatggggctcctgtacaaggcggctatgagaggttttcctccgagtacc

SEQ ID NO: 172085 - DNA, 80 bp, Homo sapiens
cggctctctgctcattggggcgttgaggaagtgcctggtgaagaatgtgatgggatcactagcatgtctgcggagagcgg

SEQ ID NO: 172086 - DNA, 100 bp, Homo sapiens
agaagctttatacgctgcacagcgtgaagcagccagggcagcaaagcagcgaaagctcttggaggaagttcttctaaatcaggaatggattgaaatctaa

SEQ ID NO: 172087 - DNA, 75 bp, Homo sapiens
agcatcaagatgatttatggtaataagttttcggctttgtgagaaaccttaccatcaaacacgatggccagcaac

SEQ ID NO: 172088 - DNA, 75 bp, Homo sapiens
tttaaaaataaaatgtcaagtgaattccagtgttgaagaaagaggttttctagacctgaaggagaagaaggagaa

SEQ ID NO: 172089 - DNA, 74 bp, Homo sapiens
tttcctcagaactactatattcagtggctaaatggctccctgattcatgctgcaggacaagttcgagcatctta

SEQ ID NO: 172090 - DNA, 97 bp, Homo sapiens
ttttcttaggagttaagttgctttccaaaaaaagattctagtgttccagaaactccagataatgaaagaaaagcaagtatatcatatttcaaaaatc

SEQ ID NO: 172091 - DNA, 74 bp, Homo sapiens
gccccgggccccccagcatgaagaccccggcggacacaggctgaagctcagggccctgtctgctctgtggactc

SEQ ID NO: 172092 - DNA, 100 bp, Homo sapiens
gcgctatggccgcgagctccggaggatgagtgacgagtttgtggactcctttaagcccaccttgggacaccttgactccaagcccagcagtaagtccaac

SEQ ID NO: 172093 - DNA, 75 bp, Homo sapiens
aggtactggtgttgggagactcaggaaccgcggggaaaggcgaatgggtgcttttgaatgtgttcgtaaagtgta

SEQ ID NO: 172094 - DNA, 83 bp, Homo sapiens
cagcgctctcgtcttctgcggctctcggtgccctctccttttcgtttccggaaacatggtgtccctacctgcaccggacgacg

SEQ ID NO: 172095 - DNA, 50 bp, Homo sapiens
aggcgcggatggcgaggccagcaggtcaaaatgcagatcttcgtgaaaac

SEQ ID NO: 172096 - DNA, 98 bp, Homo sapiens
cccgcgtgcgccttgctcgcccgcagccccgagaccgcagacttcagctacgggacggacgagtacgacggagaggggaatgaggagcagaaggggcc

SEQ ID NO: 172097 - DNA, 100 bp, Homo sapiens
tgtggagaacagagcctactctcaagaggaaatcactcaagatgatgagaaggaggagaagaggaagagaatgtggaggaagtgaatatggctgcatcaa

SEQ ID NO: 172098 - DNA, 75 bp, Homo sapiens
caataaccaggtgcttggcaaaatcgagcgggccattgcgtctgcttctgcgctttgcctgggagaggccctggt

SEQ ID NO: 172099 - DNA, 51 bp, Homo sapiens
cagaaagtgatggagagccagtaggttggcagagtcagcatatatgattcc

SEQ ID NO: 172100 - DNA, 82 bp, Homo sapiens
gaacatgcactcagggccagagcgagcgaacctgcctagagctggaacgttacctccagagcgagccctgctatgtttcagc

SEQ ID NO: 172101 - DNA, 101 bp, Homo sapiens
ctactatgagggtcgagcagaggtgaaaaattagacgatttcaagaattggagctgaatctgatgttaagtaatggcaacaggtgacttaaaaagaagctt

SEQ ID NO: 172102 - DNA, 100 bp, Homo sapiens
gttttgaaaaaccaggacgaaaagatgtagcaaaatgcattgatcactacaccaaacaatgtgtggaaaatgcagatttgcctgaaggagaaaaaaaacc

SEQ ID NO: 172103 - DNA, 95 bp, Homo sapiens
tcgaacagctggagcaaggcgacgaaccttggagagaggagaacgaacatcttctggacctttgtccaggaacgaatgcaggaatttgggaactg

SEQ ID NO: 172104 - DNA, 100 bp, Homo sapiens
ggtggaggttctctctcttttaggctttcttgatcatggatggtgaagatataccagatttttcaagtttaaaggaggaaactgcttattggaaggaact

SEQ ID NO: 172105 - DNA, 74 bp, Homo sapiens
ctcagggtatggaaccggccttctttcagccaacagacattcactcatgtaagctggcaccattcatcgccaaa

SEQ ID NO: 172106 - DNA, 100 bp, Homo sapiens
aggagaacgaacatcttctggacctttgtccagtaacaaatgtggcaattattttggatctatcacctgtcatcataactggcttctgcttgtcatccac

SEQ ID NO: 172107 - DNA, 83 bp, Homo sapiens
ttaatgaacttcacgcctcagcgtccagcctcccgcgacgatgcccctcaacgttagcttcaccaacaggaactatgacctcg

SEQ ID NO: 172108 - DNA, 100 bp, Homo sapiens
cggagaccccgaaaacggaagcgcagggagaaggaagaggtgtttgaaaaggccacctggttcttagtcccccacctccgcacacgggccctgccctcat

SEQ ID NO: 172109 - DNA, 75 bp, Homo sapiens
cagcgacaggccgctgcaattgccagaggagcatattatttaatatctagaagtctagggccagaatttggtggt

SEQ ID NO: 172110 - DNA, 75 bp, Homo sapiens
gtggagatcgtcccgcgcctgccgtccctgaagaggaaggagaaggaatatgagcatgaaatggagcggctggca

SEQ ID NO: 172111 - DNA, 100 bp, Homo sapiens
cataatatggaatgttcttaacccagaagtagctgaatgtgttactccattgctgaggagtggatgccaaagaagagtgaatggcccacaaagagcctgg

SEQ ID NO: 172112 - DNA, 75 bp, Homo sapiens
gagaggcgagcgcggcgcccggaccgcggattttttatcaagcagaaatgcatcgaacaacgagaatcaagatca

SEQ ID NO: 172113 - DNA, 100 bp, Homo sapiens
cccttcaagctctctatgagaatatatggctcgtggacagcagaaaattcagtctcagcagaaaaatgccaaaaagcaagctggacaaaagaagaaacaa

SEQ ID NO: 172114 - DNA, 75 bp, Homo sapiens
tttggtttccctggcaggggttgaactgtggagtgtgtgggccccttcacagatgtagtcactacaaatcttaaa

SEQ ID NO: 172115 - DNA, 74 bp, Homo sapiens
ctgcggtggagcctcggcagagggaacgaagccttgtactacacagatgacacagccatggccagggccctggt

SEQ ID NO: 172116 - DNA, 99 bp, Homo sapiens
ctcaatgaagttgaggttcaggaaggattcctgagattccaggaggaagtactggcgaagtgctccatggtagctttggatatgttaaatcctcatgtt

SEQ ID NO: 172117 - DNA, 82 bp, Homo sapiens
gcaaccattgacgccatgtcgggttattcgagtgaccgagaccgcggccgggaccgaggctcccgaaaagcccgtgaaacaa

SEQ ID NO: 172118 - DNA, 75 bp, Homo sapiens
ggcaagatccagatcgggatttacgtggagatcaagcgcagcgatgctggagagatttaccagcatgagaattaa

SEQ ID NO: 172119 - DNA, 100 bp, Homo sapiens
atgatgaccctgctttgaaatctcgacccaagaaaaagaagaattcagatgatgctccatggagtcctaaagacaagagtgagaatggtgaggcatatca

SEQ ID NO: 172120 - DNA, 100 bp, Homo sapiens
ggtccttcgcccccaagactgcgactctaaacggactcatgtactttgtcagaaatgggcaagttcatgaaacctgggaaggtggtgcttgtcctggctg

SEQ ID NO: 172121 - DNA, 75 bp, Homo sapiens
ttccatctgtggaaggacctaccaaccaggaattgaatgatctggcacgggaccctccagcacagtgttcagcag

SEQ ID NO: 172122 - DNA, 75 bp, Homo sapiens
tgccttctggacaatctttccgaatttggaggttttggttcagttagtggaaaaattgaaatagaaatcaagatc

SEQ ID NO: 172123 - DNA, 75 bp, Homo sapiens
ttcagcctcaaaaccgtcctgctgcttgctgaccaaatggtcagcccaaggccaaccccactgtcactctgttcc

SEQ ID NO: 172124 - DNA, 100 bp, Homo sapiens
cgaggaggctctaattgagaaattggcccagacctcgctggtggtacagaatgtttcagtcatcctgtgtggaatcatcctgatgatggttttcttacat

SEQ ID NO: 172125 - DNA, 75 bp, Homo sapiens
gaggggcatttcaggagtttcctgtctgtcagctccagtcagcccggtcaagcatgacagcaactcaaactcggc

SEQ ID NO: 172126 - DNA, 98 bp, Homo sapiens
cacgtcagaaagcaaggaagatcagtggatgggggtcaccgtccagagccaaggtccagggggcaaggtcgtggtcacaaacatgtcagacaaaagtg

SEQ ID NO: 172127 - DNA, 75 bp, Homo sapiens
tagtgcgagtggggcggacgcgcgcagcccgcccgcccggcgaccagcaaggacatttcattaccatccagaagt

SEQ ID NO: 172128 - DNA, 100 bp, Homo sapiens
gcccagattctgccaattcgttttcaggagcatctccagggagaaaactggttgtcctggatgtttgaaaagttggtcgttgtcatggtgtgttacttca

SEQ ID NO: 172129 - DNA, 75 bp, Homo sapiens
tctcaaaccacttctcagacaagttccatcccacctttgagtcagcaaatgcagccctgaggatttggctactgc

SEQ ID NO: 172130 - DNA, 90 bp, Homo sapiens
gacgattcacctgtccagcatccgaccaccgaggctggagggggagaacacccagcaggatcaggcaaaaatgatcatgccgaaaaagtg

SEQ ID NO: 172131 - DNA, 98 bp, Homo sapiens
gggaagaagaagaaacgggccgcgaaccgcagtatcatgctggccaagaagatcatcattaaggacggaggcacgactggattatggacagaacttgg

SEQ ID NO: 172132 - DNA, 75 bp, Homo sapiens
gaagatggcgtctcccacagacggtatgatctcgtgaaatcttgagagaaactgaatgacgaatgaaactattgt

SEQ ID NO: 172133 - DNA, 82 bp, Homo sapiens
atggacatgagggtccccgctcagctcctggggctcctgctgctctggctcccagatattgatgatgttaagaagttcaaac

SEQ ID NO: 172134 - DNA, 97 bp, Homo sapiens
gattcgcagtggtcgcttcttctccttgatcgacgtaattaacacattccagacgggagcctcttttaagggagtcctaaggcgacagaacatgggt

SEQ ID NO: 172135 - DNA, 90 bp, Homo sapiens
ctgacgctctgggtgaagaatggaagtttttcagttatgggacaaaaatattatatcaaaacactgaagctttgcaatctaaattctttt

SEQ ID NO: 172136 - DNA, 100 bp, Homo sapiens
gattacgtagtagaaaccaccaaaccaatttctcctgcaaaccagggtatcagagttaagtatgagagagaagctagtaaatactgggacacattttaca

SEQ ID NO: 172137 - DNA, 98 bp, Homo sapiens
gcctactgcggcgcggggacccttgattagcctgaggcctgctcagtcgttcctaatgaataaaaatcaagtgccaaagcttcagccccagataacta

SEQ ID NO: 172138 - DNA, 100 bp, Homo sapiens
gttctggcaggatttgctcaaggagccctggtggcctgctgcataggagctgtgattggtatagacgatgaggacgacagcaccttcacaataactgttg

SEQ ID NO: 172139 - DNA, 95 bp, Homo sapiens
cgcgagccgacaccatgcgatccaaggcgagggcgaggaagctagccaaaaagcttggggcttccttggtcgcacccaccacctgcctgcccact

SEQ ID NO: 172140 - DNA, 100 bp, Homo sapiens
cccgcgtccgccgattcctcctccttggtcgccgcgtccttggctggcgtatcacccggaagttcaggctgaattctgaaggcaaacttgagcagacggt

SEQ ID NO: 172141 - DNA, 82 bp, Homo sapiens
caccaaccaggtccctgacagcccagctccagccctggtacctgacagtgtaaagaaggagctcctacaaagaataagaaca

SEQ ID NO: 172142 - DNA, 100 bp, Homo sapiens
tacctcactgcagaggtgctggagctggcaggcaatccggctcatccaggcctgcgtggatgtcctttccagcaatgggtggctcagccctgctctggca

SEQ ID NO: 172143 - DNA, 100 bp, Homo sapiens
gtggtctgtgcatggacagaagcggctccaggagttccttgcagacatgggagacaagctgttccctgcatttggatttggggcccaggttccccctgac

SEQ ID NO: 172144 - DNA, 75 bp, Homo sapiens
gcccgacctgcgagcgccgcccgggcatgcgaagccgtccctccccgggaagcatgagtgggaaaagcatgggac

SEQ ID NO: 172145 - DNA, 100 bp, Homo sapiens
cggcggcccaggcacggagaggcggcgagaccgcaggaccgtataatagacgctggccccaaaggaaactactctcgatttatgaatcacagctgccagc

SEQ ID NO: 172146 - DNA, 83 bp, Homo sapiens
aggtgggcccggacggcacaccctacgttaccgtgctcaagcgtgagtgcatctccatccacgttggccaggctggtgtccag

SEQ ID NO: 172147 - DNA, 75 bp, Homo sapiens
agcccaatctcctttctgggcaaacgttccaagttggttgaatctggcgatgtggaacccatggatatggagggc

SEQ ID NO: 172148 - DNA, 83 bp, Homo sapiens
cgggcccggccacggcggagccaagttggaatcgaagcctcttaaaatggcagatgacttggacttcgagacaggagatgcag

SEQ ID NO: 172149 - DNA, 100 bp, Homo sapiens
aagctacttccattccagaaagatggcatcatttttgccctcaaaagaaatggcaggtggaaccgtcccaaaatgtcccttgctcagaagaaggatcggg

SEQ ID NO: 172150 - DNA, 97 bp, Homo sapiens
gatcccagactggttcttgaacagacagaaggatgtaaaggatggaaaatacagccaggggacatcagcagccaccagcatggtggggtctttgttg

SEQ ID NO: 172151 - DNA, 75 bp, Homo sapiens
gccgctgcggagcctgctcggcttcgtcgctgccaacctgctgttctggttagcactctacgtatatgaatatct

SEQ ID NO: 172152 - DNA, 137 bp, Homo sapiens
cagcactcagaatgctccaggcagtgtaatctcattccatcttcattcatgactccagacagattcagagcattcttcactccagaataatgagcaaccctctttggccaccagctccaatcagactagcatgcagg

SEQ ID NO: 172153 - DNA, 97 bp, Homo sapiens
acacacagcaagttcctgcttctgggacagctctactgacggtgcttttgaagatgatgatatcacgcacgttgaaggaagtgtagatcctattcga

SEQ ID NO: 172154 - DNA, 100 bp, Homo sapiens
tggaggcgcatgcggggaaggccagcagcagcatgacagggtcttactttgtcacccaagctggagtgcagtggcgtgatcccattacactgcaacctat

SEQ ID NO: 172155 - DNA, 100 bp, Homo sapiens
ggggaagcggcgccgaagtttgcctcggactcgccgggcgctgcggtggctccctgggccgagttttagagaattactccaaattcatcatgattgaaga

SEQ ID NO: 172156 - DNA, 97 bp, Homo sapiens
cgtgaatgacgtctaccgcgtgtataatcgacaccagtatccatttgttgttcttaacatttctgttgattcagattgctgctctctgaacactata

SEQ ID NO: 172157 - DNA, 100 bp, Homo sapiens
gtggttctagtggggaacaaggcagatctctctccagagaggctttcttctagtcaagatgagtgataaaccagacttgtcggaagtggagaagtttgac

SEQ ID NO: 172158 - DNA, 98 bp, Homo sapiens
catggagaagttgaaccagctgtgggagaaggcccagcgagaactgtggaaggtgcatcagtgaagaaatggaccaatgtgtataatcatggaatctc

SEQ ID NO: 172159 - DNA, 100 bp, Homo sapiens
gccggacgggcactgggcgactctgtgcctcgctgaggggtaacaagatgctcaactatagtgctcccagtgcagggggttgcctgctggacagaaaggc

SEQ ID NO: 172160 - DNA, 75 bp, Homo sapiens
gttcttcttcgagtatttgtagaagggtcattgagactgcctcttctcaaagggacactgtcctcagcactttat

SEQ ID NO: 172161 - DNA, 83 bp, Homo sapiens
agctggactatggcatctatgttatcaaccagatatctcccggggccaattcagcatctctacctggccatcctaacaaggtg

SEQ ID NO: 172162 - DNA, 83 bp, Homo sapiens
ggcccatcgaagcctttcctgcccctgaggaagtcaattacacggacacggccaacacggtgaaggaaaagttcgggaggaag

SEQ ID NO: 172163 - DNA, 75 bp, Homo sapiens
tgaaaagaaaagtaagaacaaacaaagaaacactggagatattcagaagctttggtgaagcacgtgcagtctaaa

SEQ ID NO: 172164 - DNA, 100 bp, Homo sapiens
ggcaggtcaaagctgaaaagtggaatcggagctgttgtattacctgggggtaaatgggaagttggtagctctgaaggtgatcaggctgcaggaagaagaa

SEQ ID NO: 172165 - DNA, 74 bp, Homo sapiens
aaggctccctcggtcgcgagtatctccgtttcctggatgtgaacctcaagactgcagtgcagatgacgacaact

SEQ ID NO: 172166 - DNA, 100 bp, Homo sapiens
caacgaaggtgaagccacggaagataaggatgagagccactcagagtgggtgtcttgtgtccgcttctcgcccaacagcagcaaccctatcatcgtctcc

SEQ ID NO: 172167 - DNA, 98 bp, Homo sapiens
tgccggtgccggcctagcgtcctggaattacttcaatcaagttgaaaggattgttgacaaaaggaaaaataaaaaagggaagacagagtatttggttc

SEQ ID NO: 172168 - DNA, 100 bp, Homo sapiens
ttcgatttattggaggcctacttgcagcatattacctatcaggagaggaggatacacacctgctaaaactgcttaaaacattagaaggacatgcttatgg

SEQ ID NO: 172169 - DNA, 100 bp, Homo sapiens
ttcagccctttgatgaccgcagcaggttaccacattctcatctggagccaggaggaagccaggacacggaagtgagagacactaaagaaggtgtgggcca

SEQ ID NO: 172170 - DNA, 100 bp, Homo sapiens
gtgtgagaaaaaaataaactcctatttgtttatggcaagaaaaatccagttacactcttaaaggaattgtcagtgataaagtctcgatatcaaactttgt

SEQ ID NO: 172171 - DNA, 100 bp, Homo sapiens
ccggagtcgcgcggccgggagcacgggcgccggcatagtacaatgaggcagccagcggatcttggatgccctccaaatccttggttatggaatatttggc

SEQ ID NO: 172172 - DNA, 100 bp, Homo sapiens
cctgcgcatgctccatcgcctggatggcccactgcgtgaccttggttcagctgtccatttcctgtgaccatctcattgacaaggacatcggctccaagtc

SEQ ID NO: 172173 - DNA, 100 bp, Homo sapiens
ccaaggcacttactgctgccaggccggccaggacagcacccacacacggctgctggtagagggaaagaccacagcaagattctttcattcgtctcctcct

SEQ ID NO: 172174 - DNA, 90 bp, Homo sapiens
ttctcttttttgacaaagcactactggctattggaaatgtccaagacaactttgacaagattgaattcaataggatgtgttggaccctct

SEQ ID NO: 172175 - DNA, 100 bp, Homo sapiens
ggagaagaggattggaggtgtcagtgttaaaggaacctctacaacgaaggtgaagccacggaagataaggaccaagaatcgccttcagccctgtctggtg

SEQ ID NO: 172176 - DNA, 82 bp, Homo sapiens
tcccaagaagtccgagacacgcggctgcttctgatgcttggaagatatcctctcagccacaaagatggtaataaatctttgc

SEQ ID NO: 172177 - DNA, 98 bp, Homo sapiens
ttggaactgtcaggtacctcaaagccttgaacatgcgaaagtgacacagacagagttgatgcgtgagtcatttagacagaaacaagaagcaacagagt

SEQ ID NO: 172178 - DNA, 100 bp, Homo sapiens
agaggtcaacaaggttctggacaagatgaagtctttctgccaggccttctccacagtaggcactcctgactacattgctcctgaggtgttcatgcagacc

SEQ ID NO: 172179 - DNA, 87 bp, Homo sapiens
acgatgctgctcatgaaatcatcgagaccatccggtatgactcttatgagtcctgcgactcgagggccgtcctgagtgagcgcgacc

SEQ ID NO: 172180 - DNA, 100 bp, Homo sapiens
ccgagttcaacatcctcctggccaccgactcctacaaggatgccggaccagatctctgtctcggagttcatcgccgagaccaccgaggactacaactcgc

SEQ ID NO: 172181 - DNA, 100 bp, Homo sapiens
acacaaagtaatgactttgcattgggataccctataggacccaaagcagcagaagatctacgacctattccagaagtcctttgagaaagaaggaagtgat

SEQ ID NO: 172182 - DNA, 97 bp, Homo sapiens
agatgtggttggaatccttgctgtgctgaatcctggctgtgtgaccccaagtgaccatggaggaagaagatgagtctcgagggaagacagaggagtc

SEQ ID NO: 172183 - DNA, 75 bp, Homo sapiens
gactgatttttagaactccacatttgaggtgtgtggcttttgaagaaaatgagttcaaagaaggacgcagagcca

SEQ ID NO: 172184 - DNA, 83 bp, Homo sapiens
gcagtagccgccgtgggagggagccatgaagcattacgaggctaccaacctggctcctgcagaccccaatggcaaagcagacc

SEQ ID NO: 172185 - DNA, 100 bp, Homo sapiens
ctggccgatgaggaagtactgagcctgttggaggaactggcccggaaacaggaggacatgaaggtcaccgtgtccaaagggggcgaccgggacagtgacg

SEQ ID NO: 172186 - DNA, 100 bp, Homo sapiens
gcagaggcggaattgcacaaggaaaggctgcaagccatagcagcccaaatattgagaaatcagtgaaggatttgcaacgctgcaccgtttctctaactag

SEQ ID NO: 172187 - DNA, 82 bp, Homo sapiens
ggaaagtgatgtccctctgaaaactgaggaatttgaagtgaccaaaacagcaggaggctactcacagtcgaactacaactcc

SEQ ID NO: 172188 - DNA, 80 bp, Homo sapiens
cctgccgtccttctccactttcgccagcccgtgccgcgagcgcggcctgcaggagccacataaagaagatccctaatagt

SEQ ID NO: 172189 - DNA, 75 bp, Homo sapiens
tttccacgacggtgacacgcttccctggattgggcggcttacagggagaacacagttggcctccaccgtttctgc

SEQ ID NO: 172190 - DNA, 97 bp, Homo sapiens
cggctgaggaaagcaggaggaggtggcggcggcgggaagatgtgagaagccctaccactgcaactgggacggctgcggctggaagtttgcgcgctca

SEQ ID NO: 172191 - DNA, 101 bp, Homo sapiens
ggacgagctccgggatgctgtactccttgtctttgcaaacaaacaggttatgaagacagtatggagtttccagaccatagtagacatttgctacagtgtct

SEQ ID NO: 172192 - DNA, 99 bp, Homo sapiens
ggctcgcctcgactccaaatggttgaaaacagatatacaggtcaccatggagtaacaagtatgaccctcccttggaggatggggccatgccgtcagctc

SEQ ID NO: 172193 - DNA, 100 bp, Homo sapiens
ggaggaggctcatgcgggatttcaagcgatatcagttttagagaatgtggcgtggagaaattctcaaggaaagagtaaaatgctggtgatgtgctgaggg

SEQ ID NO: 172194 - DNA, 82 bp, Homo sapiens
ctcgcggaccggcgtccccggcgcgaagaggctggactcggattcgttgcctgagcagacggtgtggtccggaccaccacgc

SEQ ID NO: 172195 - DNA, 82 bp, Homo sapiens
gcgaaggtggcggcgctgctgctcgggctgctcttggagacccaatgtctgtggatcacgttataatgcttactgttgccct

SEQ ID NO: 172196 - DNA, 75 bp, Homo sapiens
ctcaggagtgaagctgcagaccttcatgggtacccagtgtgttgaacaaattcaagagttggttctacgcttctg

SEQ ID NO: 172197 - DNA, 51 bp, Homo sapiens
cacctcgccaaagcagagaaatactgttgttggcctactgtacccctgtat

SEQ ID NO: 172198 - DNA, 50 bp, Homo sapiens
gtgtggggagtttcatcctagcggcaataagagctaactgccatcaagag

SEQ ID NO: 172199 - DNA, 100 bp, Homo sapiens
ccgcagtcggcaaggagagacgtcgctgaggggcttgcctgaagcgagggctgagctgactgctgcccactttggaggaggcggtgggctccttcacaag

SEQ ID NO: 172200 - DNA, 98 bp, Homo sapiens
cctcaagaagcagctccacgaaaggcagccgcggatcgccgcgctcagcgacaaacaaggcgccctgcgtccggcagaggaggcgagcatcccgctca

SEQ ID NO: 172201 - DNA, 100 bp, Homo sapiens
ttttggaacaaggattttggatgaagaagtttttgagcctaaagtggtaaacccactgatcggcctcttgggtgaatatggaggagacagtgactatgag

SEQ ID NO: 172202 - DNA, 76 bp, Homo sapiens
aagctgatgatgtccacactgcccaagtctctatccttgtcttctcacaagactttcaggattaagcgattcctgg

SEQ ID NO: 172203 - DNA, 100 bp, Homo sapiens
cagaatcacagctggtgttaacgagatctgctgatttgggtcctactttaatgacaagacctggacaaccagcacttaccagagtgcccccacctattct

SEQ ID NO: 172204 - DNA, 74 bp, Homo sapiens
catcattgatgtggtgcgatcgcagccgctcttctaaaacattcaaaccaaagaagaatatccctgaaggatct

SEQ ID NO: 172205 - DNA, 90 bp, Homo sapiens
ctcgcaggcgccgcacggagttgcgtcccggggacttggggccgcagggagaccctgtattcagtggatcagctggcaccacccaaatag

SEQ ID NO: 172206 - DNA, 100 bp, Homo sapiens
ttgattctgaacttgagcttatgacatacattaatgaaaactgggatagattgcaccctggagagatgccgtaatgagtgatggtaatttggaaacccgg

SEQ ID NO: 172207 - DNA, 75 bp, Homo sapiens
cctaagactcgaaggcagcacaggacctggaaaaattacatgcatgttatgttacccagagaactttccaaacaa

SEQ ID NO: 172208 - DNA, 82 bp, Homo sapiens
catggtggtacatctgggcacttaggtcctcagtgacctttctcccaggaactgtggctgcaccatctgtcttcatcttccc

SEQ ID NO: 172209 - DNA, 75 bp, Homo sapiens
cacacacatagggatcggccatcacaacagcagcctcttcgaaatcaggtggccagtctgatcttggatataatt

SEQ ID NO: 172210 - DNA, 100 bp, Homo sapiens
ctcaaagtcttatgtgtggacatcaggttttaaatgatacctgggtttccttcccttcgtggtctgaggactctacctttgtgagttccaagaagactca

SEQ ID NO: 172211 - DNA, 90 bp, Homo sapiens
gttcattgtccacagcattgaggagatccaggacagtcattttgtttactcattcagccctgttgcaggtcccaataaactcttcataag

SEQ ID NO: 172212 - DNA, 75 bp, Homo sapiens
gcagaggaacagttggccaaggaagtcagcttctcagagctcaagagtttttggctttcacccccaaccagtgac

SEQ ID NO: 172213 - DNA, 98 bp, Homo sapiens
acagttacagcagttgcttcaggcggtaaaccaacagctcacaaaggagaaagagcactaccaggtgttagggcaactccaacaacattgccaccgtg

SEQ ID NO: 172214 - DNA, 99 bp, Homo sapiens
ggccggcgggaccataagggcttaactcatatatttaacccccctccaaaaacatgcttttcacttccactgcatctctcgctggctcaaaacacgaca

SEQ ID NO: 172215 - DNA, 74 bp, Homo sapiens
cgaccatgactccgtggataagattgtcacactctccgaatcagagcagtgcctctctcagatacaagaattaa

SEQ ID NO: 172216 - DNA, 51 bp, Homo sapiens
ctgagactggagtgagagggtcttctgggccctaattcaatcatgattgtc

SEQ ID NO: 172217 - DNA, 98 bp, Homo sapiens
tgacattcttcgagatctacaatgggaaggtgtcacgtcttgaaattttaaatgtcctcagtgactctctacctctggcagatgatgttgaccttcag

SEQ ID NO: 172218 - DNA, 98 bp, Homo sapiens
tgagcgcaactagcggcgggtcgtgggcacctccaggatcaggtagacagagctgataccttccctcaggtactaaaaaaagtaattgactggatgaa

SEQ ID NO: 172219 - DNA, 90 bp, Homo sapiens
gcattgtgtctggtggctatgggggctctggtgatggactcatccccacagattatgatgatggcttttcaatgaagcatacagccaccg

SEQ ID NO: 172220 - DNA, 83 bp, Homo sapiens
gcttgaaccccggaggtggaggctacagacctcatctattccagcccagtggacacagctcacaaggtactgattagcctgag

SEQ ID NO: 172221 - DNA, 82 bp, Homo sapiens
ccgcgcgctctacaacgtgctggccaaggtgaagcgcgagcgcgacgagtataagcggagaaacgcttcgttaagggactca

SEQ ID NO: 172222 - DNA, 100 bp, Homo sapiens
ttccagtaccccattatctatgacattcgggccagacctcgaaaaatctcctcccctacaggctccaaaggcatccgtgtcattctggaccttactccca

SEQ ID NO: 172223 - DNA, 100 bp, Homo sapiens
tacaagaacagaaccatcctgggctacaagacgctggccgcgggctccatcagcatggctgaggttggcaggtttgactgttcctctgcaccagacatct

SEQ ID NO: 172224 - DNA, 75 bp, Homo sapiens
aagtcagagacaaatgggatactgtttgtggcaagtctgtggagcgaggagaaggcagagcccccccaggctatg

SEQ ID NO: 172225 - DNA, 80 bp, Homo sapiens
tgatctggttagtgcaatttatggccgagggatagcctatggaaagaagggactacatatcaatgtccgagttaccacca

SEQ ID NO: 172226 - DNA, 100 bp, Homo sapiens
cacaggggtgtagcccgagacccacctgcagcccccagcccttgccaggaaaggccgagatctttgctgagctgggagaagtgattaagggagtgaaacc

SEQ ID NO: 172227 - DNA, 74 bp, Homo sapiens
ttccgggggtgaagcctcctgcgccggccttgcctcgggtgaagctcgtgtgtggagtgccacggtacaatcag

SEQ ID NO: 172228 - DNA, 75 bp, Homo sapiens
ccttagctgtgctcgcgctactctctctttctggcctggaggctatccagcgggataaaaacattcagatggcag

SEQ ID NO: 172229 - DNA, 93 bp, Homo sapiens
ctgctgcacccacgaatctgcccacccctcctgtaacccagcctgtttcacttcttgggatcatagacggtatttctatgtaaacgaacagtc

SEQ ID NO: 172230 - DNA, 80 bp, Homo sapiens
atgacaggaagcagagtggctatggtgggcaaactaagccgattttccggaaaaagattcaaggcctcttccagatgtag

SEQ ID NO: 172231 - DNA, 111 bp, Homo sapiens
accggccgcctcagccatggacgcgtccctggagaagatcattaagcagcttcgagtctggaaaatttgttgaatgtactgagcaattagaattgttaccaggagaaaata

SEQ ID NO: 172232 - DNA, 90 bp, Homo sapiens
tgagatcaaaggtcacctggaaattgccttattggaaaaacatttcttacgtactccaaagattcaggtttactcacgtcatccagcaga

SEQ ID NO: 172233 - DNA, 90 bp, Homo sapiens
ggcgcgtcaggccgcgacgagggcgctgaggcctcttctgaagagctgaaagctgcctaccggaggctctgtatgctctaccatccagac

SEQ ID NO: 172234 - DNA, 75 bp, Homo sapiens
aagaaccattggtggagatagaagaccagcatctcagacatgtcgaaaaagatgttttgatccctaaaataatga

SEQ ID NO: 172235 - DNA, 74 bp, Homo sapiens
ggacgtgagcccagccgaggtaccgctgaagaggaatcaattttgggtggactccattatgctggtggaagagg

SEQ ID NO: 172236 - DNA, 88 bp, Homo sapiens
gcccgaggccgtcggccgccgtcagcgagggcgccgagcaacttcggttgagcaatgtttaaagcgtttgaaaaacatgaatttggag

SEQ ID NO: 172237 - DNA, 101 bp, Homo sapiens
cgacctcgacgtcttgcctgtgtcccacttgttcgcggcctatagttggaaaatggatataccttatttgattatgatgttggactgaatgatataattca

SEQ ID NO: 172238 - DNA, 114 bp, Homo sapiens
gcgtccgagcgacttctaggagcctggggttcggcgctatggaggagctcgatggcgagccaacagtcactttggaaatggaggatgaagatacaattgatgtgttccaacagc

SEQ ID NO: 172239 - DNA, 100 bp, Homo sapiens
tcccgcgccgcacggtggacgaggagtgtttctcaggagctatcagaaactatcctcaccatggtagccaattgcagtaatgttatgaataaggccagac

SEQ ID NO: 172240 - DNA, 82 bp, Homo sapiens
cttggttaacttgggagaaagtttcatctgtggatggagtattgggaccttaaaccggaaaacattttgttaaatgaagata

SEQ ID NO: 172241 - DNA, 100 bp, Homo sapiens
aaacgcagaaggactgcctcactgagcaaccaagacttcccatcgacggtcagtgcgcacgttgtaatcagctgaggccatgtcaggagacggagccacg

SEQ ID NO: 172242 - DNA, 74 bp, Homo sapiens
aaagctttcctaggccaaaaagaggatgaatttcacccattcatcgaggcacttcttccacatgtccgtgcaat

SEQ ID NO: 172243 - DNA, 75 bp, Homo sapiens
ttatgagagatttttgggacctgaaatcttttttcatccagagatggcaccgaaagcgaaggaagctcctgctcc

SEQ ID NO: 172244 - DNA, 117 bp, Homo sapiens
ttttgccagacattactacttcctaggcagaatgcttggaaaggtgactctgacatcattagaagcatgccagaacagactggtgaaaagtaaaccttttcacctacaaaatttcac

SEQ ID NO: 172245 - DNA, 99 bp, Homo sapiens
acgggatccagagcgccgcgcacttcgtcatgttcttcgcgccctgaagaagaaaggagggcgcgggctaatgaccgagaatacaatgagaaattccag

SEQ ID NO: 172246 - DNA, 100 bp, Homo sapiens
catagtcatggtgatgggtattacagatgtagatgataaaatcatcaaaagagccaatgaggtagtagccatggttatgtgggttccagtagtagaatat

SEQ ID NO: 172247 - DNA, 100 bp, Homo sapiens
ctcaccatgccgacagtagaggagctttaccgcaattatggcatcctggccgatgccacggagcaagtgggccaggagggatttgttcgtgttgaccgag

SEQ ID NO: 172248 - DNA, 100 bp, Homo sapiens
ccgggatcgtgaccgagaccgtgaccgagagcgtgaccgagagcgcgaatatcgtcatcgttagaaggtactggtgaccccggccggggcaggccccggg

SEQ ID NO: 172249 - DNA, 100 bp, Homo sapiens
tggactgcagcctcgtgcggacgctcgtgcacagatacatgccttcaattaagttgcagagttctgatggagagatatttgaagttgatgtggaaattgc

SEQ ID NO: 172250 - DNA, 100 bp, Homo sapiens
gccggaaggacggctctatcagcatgggaaacttacactgctgcataatggagaacctctctacattccagtaacccagctgagatctgtatctgtggac

SEQ ID NO: 172251 - DNA, 83 bp, Homo sapiens
agaagatggtgcagaagaaaccagccgaacttcagggtttccaccgttcgttcaaggtacacggtcctcttctcgcacggcaa

SEQ ID NO: 172252 - DNA, 100 bp, Homo sapiens
aggcgggagcgcgggctgggccgggctgggctacgcgcacgggctcggccgccgcccctgccggttttcaaatggaacattttgatgcatcacttagtac

SEQ ID NO: 172253 - DNA, 100 bp, Homo sapiens
cgacaagccgctggcagccgcggatctcaccgccgctcaggcatccagtcctggatgagccaatagctgaagctgtctgtattatcgcagacacggataa

SEQ ID NO: 172254 - DNA, 74 bp, Homo sapiens
ttggggcttgatgaaggcgtggatagcctgaaggcagccattcaggaagatgttaccgagtacttcagtgaatt

SEQ ID NO: 172255 - DNA, 90 bp, Homo sapiens
gccgcactccggagactcgcggttgctacgcgcaccatggctggaggatcatgcggccagatgatgccaacgtggccggcaatgtccacg

SEQ ID NO: 172256 - DNA, 75 bp, Homo sapiens
actggctctgctgaccttgtgccttgcagccagactgccttccgggtcactgccatggaggagccgcagtcagat

SEQ ID NO: 172257 - DNA, 96 bp, Homo sapiens
agcaagtgcaaggtcaaatggacccatgaggagggctcacgagcagctaaatgtgaaacatgaaccactccagctcatccagcctcagtttgagac

SEQ ID NO: 172258 - DNA, 155 bp, Homo sapiens
ggacgaggtcctcaagctgctgcaccgcggcgccgacatcaattacgccaatgtggacggactcactgccctgcaccagttcctctgtgacgagggtgcaggtatctctggggactacatcgatcgcgtggacgagcccttgtcctgctcttatg

SEQ ID NO: 172259 - DNA, 78 bp, Homo sapiens
gagtattttggccattgccatgtactgctgggtacttttgagaagtgaagtaagaactctgctagagaggaaatggct

SEQ ID NO: 172260 - DNA, 88 bp, Homo sapiens
ccgactgcactcacacgacgtgcgctatgggtcagatgatcctaccagacaatatgaaggaccattacatcactatcgaccacagcag

SEQ ID NO: 172261 - DNA, 51 bp, Homo sapiens
cagggtacgcgacaattggcggagtggaaagaggccagaagatcagtgagc

SEQ ID NO: 172262 - DNA, 75 bp, Homo sapiens
cagatgggatctttccggatcaatccagatggcagccagtcagtggtggagtctttagctaaagacctgtccgaa

SEQ ID NO: 172263 - DNA, 100 bp, Homo sapiens
cctgagcactgccttgtcagtggagaagaccagcaagcgtggcggcaagatcatcgtgggcgacgccacagagaaaggttcgacgaggtgctttataaat

SEQ ID NO: 172264 - DNA, 80 bp, Homo sapiens
gtttttcggatcatgtctggtggctccgcggattataacagctcaaaagccaaaagtctctgagaacgactttgaagatc

SEQ ID NO: 172265 - DNA, 100 bp, Homo sapiens
cgggtcttccagagcgtgaagatcaagatcgccctgggcgctgcctatggcacagccaagagcggtaccggcattgcggccatgtctgtcatgcggccgg

SEQ ID NO: 172266 - DNA, 82 bp, Homo sapiens
caagcgtcagcggcccgcgcctgtcgggctgaactgagacaatgcagatcttcgtgaagactctgactggtaagaccatcac

SEQ ID NO: 172267 - DNA, 98 bp, Homo sapiens
tgcacctggagattgacgcagagtgggcggcggtggtgtcatggactcctgccctgtaggtccttctgtgaggctgcaaaagaaggctgtgaatcagt

SEQ ID NO: 172268 - DNA, 107 bp, Homo sapiens
ctgcaggaactggtgaacgcaggatgcgaccagggcagcaggatgggtgtggaagcagtgatggcacttttggaggggaccccagataccccagcctgtgtagtgag

SEQ ID NO: 172269 - DNA, 75 bp, Homo sapiens
taccattctcttgcactctcaaaagaatccaagcaaaaatccctggattgaagcgcaaagctgaatgaaaacgcc

SEQ ID NO: 172270 - DNA, 98 bp, Homo sapiens
acaccggtaggagcggggaggtgggtactacacaaccgtctccagccttggtctgagtggactgtcctgcaggttatgaagacagtatggagtttcca

SEQ ID NO: 172271 - DNA, 83 bp, Homo sapiens
cctgttgtttgaaagctctcagcgggacaatgctgacccaggaactgtggctgcaccatctgtcttcatcttcccgccatctg

SEQ ID NO: 172272 - DNA, 98 bp, Homo sapiens
cccgaagagtgtaagatgttcgcctgcgccaagctcgcctgcaccccctctctgctgatgttctaatcatgtcagataaagatgatattgagactcca

SEQ ID NO: 172273 - DNA, 98 bp, Homo sapiens
aaagaagtggagcgtgtcctgaaggagttccaccaggccgggaagcccatcggaacactatggctatgcatcctccaacgtcagccccgccctgccgc

SEQ ID NO: 172274 - DNA, 75 bp, Homo sapiens
ctgggatcccggccaccagcaattgtccggattctcaaagttggattggtggaaacaatgaaccattgacaggct

SEQ ID NO: 172275 - DNA, 97 bp, Homo sapiens
cgcaaggtcgtgcacgatgccaaggaaaccatcaacacaggcccttttgtgatgcgttccacgtgtaggagatgtggtggccgcggctccatcatca

SEQ ID NO: 172276 - DNA, 100 bp, Homo sapiens
atttggctttgcctttctggacacagaagtatttgtgacaggaccagaggagcgagagcagcaagaaccacacccagcagcaatgtcagcggaagtggaa

SEQ ID NO: 172277 - DNA, 90 bp, Homo sapiens
atggagctgtaaagccacccacaaacaaactacccattttcttttttggaactcatgagaccttgtagaaacttcattaaaaggagaaat

SEQ ID NO: 172278 - DNA, 90 bp, Homo sapiens
ccggctttgaccgcgctaagatggcgactcccatgcatcggctaatagcccggagacaagcgtattatagctgcaaatgtccttgtattc

SEQ ID NO: 172279 - DNA, 74 bp, Homo sapiens
ccagacgctgcccgcgggcccggccacggcggagccaaggtctcctctgagcctccggcctccataagacccaa

SEQ ID NO: 172280 - DNA, 100 bp, Homo sapiens
gatcgcatggaagacgcagcctggccgcgctctcccaggacttgccatgaggtgttgaagccttgtttcactgagttggagagactggacctaaatggcg

SEQ ID NO: 172281 - DNA, 82 bp, Homo sapiens
gtcagaggcgcggcaaggaccagagctccgcgcggcgaaatggtgagaagccctaccactgcaactgggacggctgcggctg

SEQ ID NO: 172282 - DNA, 98 bp, Homo sapiens
gaaaaagagaagatgaagaaacccagcttgatacgttgatatgaggccccaggattcctggcgaggtcctcctccccttttccagcagcaaaggtttg

SEQ ID NO: 172283 - DNA, 50 bp, Homo sapiens
gatgatgctgactttgatgaaggtgatgcgactgtgaaaaagaaacctgc

SEQ ID NO: 172284 - DNA, 83 bp, Homo sapiens
ctgtgacctgtggagacacggccagatctgccctccatgtaaacaggaacatcgataagtagtgtaaaaacttgcacaatgaa

SEQ ID NO: 172285 - DNA, 75 bp, Homo sapiens
gccgcgcgggccgggaggggacggccgccggagccgcgaggccaagccagaagccaaggagtcctcagtgacggt

SEQ ID NO: 172286 - DNA, 100 bp, Homo sapiens
ctacacaagtggagctccttttcctccacctaccttcccgagtgacctggaactcccctcggtactgacatgatgacagtgtgcaggccggccaagggca

SEQ ID NO: 172287 - DNA, 90 bp, Homo sapiens
tacgttttgaaaatttcatcacctgagctgcggttggatttctcacgatgtccagtgttatctccatgtctgcccctttcttcctgggga

SEQ ID NO: 172288 - DNA, 106 bp, Homo sapiens
ggtggagcaggagcggctgggcatcctcctgagactccggggtcagacgcccactccagcttcaaggttactgactttttatgatgtttggtggctatgagactat

SEQ ID NO: 172289 - DNA, 76 bp, Homo sapiens
ggtctcggccgcccactgcttcagccacagtgtcaaaccagaagagaagtaaaattcaacaaaaatttatgtgtgg

SEQ ID NO: 172290 - DNA, 100 bp, Homo sapiens
ggcagtttgataaaacatggtggagacagcggctgaaatggaagcatatgttctagaagacattcttgagatcatatctgaagatattagtgagctacaa

SEQ ID NO: 172291 - DNA, 97 bp, Homo sapiens
aggattcagagcagatgtgatctgcgctaggtggcatctcctctcacggatgcctcggttttcaagatggcagcatctatgcatggtcagcccagtc

SEQ ID NO: 172292 - DNA, 74 bp, Homo sapiens
agctgtagagaggaccccggtacatctgaaagccgggaaatgactatggaaatgatgttagacaaaaagcaaat

SEQ ID NO: 172293 - DNA, 100 bp, Homo sapiens
ggttgaatgctatcttgtggatcttctgagtaacggaggacaattcaccatagttttctttaaggtgcaaattgagcatgacccagaattagaaaaagaa

SEQ ID NO: 172294 - DNA, 90 bp, Homo sapiens
cgaaggtcgtattgaatggtgttgtagagcctttgcactggcgatgccatctgctgcctggatgtcttcctgctggctggtcccgttgca

SEQ ID NO: 172295 - DNA, 96 bp, Homo sapiens
ggaaattcgttgatgttctggtggattatggatcagatccaaatcagcattgaagttgatatcgatgtggagcacggagggaaaagaagccgcctg

SEQ ID NO: 172296 - DNA, 86 bp, Homo sapiens
ccttctccactttcgccagcccgtgccgcgagcgcggcctgcaggagggcgaagctgtgctcaggcccgggctggacgcagagcca

SEQ ID NO: 172297 - DNA, 101 bp, Homo sapiens
gttatctgacctcatggatgaacttcaggatgttcagctcacagagatcaaaccacttctaaatgataagcgtcttcctccacttgatgaaggtggaccca

SEQ ID NO: 172298 - DNA, 50 bp, Homo sapiens
aaaggagcaagatggctaggggctctgtgtgctccgggatggagcaggtg

SEQ ID NO: 172299 - DNA, 98 bp, Homo sapiens
ggtgtccaacaacagctctgctcatggctctcaaagaaccagcggacctgagtcttcaatgaaaggttcatgctgaatactctagatttgtgaatcag

SEQ ID NO: 172300 - DNA, 97 bp, Homo sapiens
ttatctggagtgaggtggccggttcttggtgggatctgagcaggagccagcaccgctctttgaccttgccatgcttgccttagatagtccagagagt

SEQ ID NO: 172301 - DNA, 100 bp, Homo sapiens
tttggttcttggcaggaatatggaagacagggaactctaatgatccaggacaaagaagttaccctggagtatgtatcaagcctggatttttggtactgca

SEQ ID NO: 172302 - DNA, 102 bp, Homo sapiens
gaactgttggccgcgcggcctcgggaacggcccaggtccccgcccgcaggtcccgggcagtgaaaatgcctcgtgtaaaagcagctcaagctggaagacaga

SEQ ID NO: 172303 - DNA, 82 bp, Homo sapiens
aggcctgtgacgaaggtgctaccatcgtgagagtaagaaaaactgcttaaggttgaaaagagaaatttaagaaattgctgac

SEQ ID NO: 172304 - DNA, 148 bp, Homo sapiens
ctacaaagctgatgaagacccagcattattccagtcagtcaagaccaagagaggccctttgggacccaactggaaggattcccgaggaggccttgtcaccatcctacctgactgtgtgtctgaaactgcatgaagccatctgcagcag

SEQ ID NO: 172305 - DNA, 83 bp, Homo sapiens
cccagccacagcctcccgcgcctcgctcagctccaacatgggaaatcctcattgacgattcaatttgttgaaggccaatttgt

SEQ ID NO: 172306 - DNA, 104 bp, Homo sapiens
ccaaagacagattgaagaaatgcagagacaggcctcctcgaaagatgttgtcagacagctgtgtcaagaaagcttttccagttcagcccttggcttgaaaaaac

SEQ ID NO: 172307 - DNA, 100 bp, Homo sapiens
tcatcttggctggaggccaggtggacaacctgtcatcactgacttctgaaaagtggtatcacggaaaacttgacagaacgatagcagaagaacgcctcag

SEQ ID NO: 172308 - DNA, 100 bp, Homo sapiens
caggagactgggtgattccagcaaatgctggtttaggcattacagcagaagttctggtggtgacctctttcgatgaactgcagagaagggcctcagaagc

SEQ ID NO: 172309 - DNA, 101 bp, Homo sapiens
gagccaccagcagcgggtgggcgacctcttccagaagctggtgttggagcgggccggagagaagtagagtgggctgcgaggagaaggaaacaggcctttcg

SEQ ID NO: 172310 - DNA, 108 bp, Homo sapiens
cccaccatgtcagacgcagccgtagacaccagctccgaaatcaccaccaaggaatactcccccagttgcaagaggcgcaggaccgtggaagacttcaacaaattctgc

SEQ ID NO: 172311 - DNA, 80 bp, Homo sapiens
gatattgaagaggaagaactgaccagagctgatcccgagcagcgtcatgtacccctgtaaacgcaaagcactgaagttga

SEQ ID NO: 172312 - DNA, 90 bp, Homo sapiens
ctgggggattcgcagggaggatgtcgggacaccccggaagctgggaaatgccggcgcgacctggagattgagcgaccaatgccgggaacc

SEQ ID NO: 172313 - DNA, 100 bp, Homo sapiens
aaggagagggggatgaagaaatctgccaggagggtgcctcccgccagtatctgatgaaggtaagagatgataccatcttccaaaatcctatggtacaaga

SEQ ID NO: 172314 - DNA, 75 bp, Homo sapiens
tggagagctcatctggaattttgccgatttcatgactaaccagtagtaaagctaaaacattttgagaaatttcag

SEQ ID NO: 172315 - DNA, 90 bp, Homo sapiens
gtacattctcaatgagagcctcacagacccagccatcgttaaggctgattcaccccaagagtggccgttcctaccacgaggagttcaacc

SEQ ID NO: 172316 - DNA, 90 bp, Homo sapiens
ggcccttgcagatcgagatttgcgtcctagagtgggaaaaaagcagaggccagggcgccgatcagtgctaacatcttccgtacacttcct

SEQ ID NO: 172317 - DNA, 122 bp, Homo sapiens
ccggggctgcgtgagcgagcagaggcttaaggtcttcagcggggcgctccaggaggcactcacagacaatgcagatcttcgtgaagactctgactggtaagaccatcaccctcgaggttgag

SEQ ID NO: 172318 - DNA, 83 bp, Homo sapiens
atgatgtgatgctggagaccttgacacttatatcctccctggtgtgtcccggcatggatatccggaacaacctcactaggttg

SEQ ID NO: 172319 - DNA, 101 bp, Homo sapiens
gcttacccagcttaaagagctccacattcagaggaaccgcctcactgttctacgcccagaactaggctcctcctcagccatcctggccgtgctcagtcatc

SEQ ID NO: 172320 - DNA, 50 bp, Homo sapiens
ccagaacttgcagcaacaataggaattacatgaacgacagccttcgcacc

SEQ ID NO: 172321 - DNA, 100 bp, Homo sapiens
gaagcctgtcccgttgtcagagtggaagcggagtttaagagagctgtgaaagtagcaacaggacaagaactctcaaacaatattttggacactgtcttta

SEQ ID NO: 172322 - DNA, 90 bp, Homo sapiens
cctgaactcacctaacaccgcagcagcaaccgggcccggccaggttcggcgttccgtgagtgaacggctcttgtcaggatggtgaagctg

SEQ ID NO: 172323 - DNA, 82 bp, Homo sapiens
gcttctcagcagcaacatccccaaacagcggcgtttcacggtggcacatacatgggactttgaacatgtcggggatcgccct

SEQ ID NO: 172324 - DNA, 51 bp, Homo sapiens
gagacaggaggcagtagccaaacacccaggggatgttcgtctaaccccaga

SEQ ID NO: 172325 - DNA, 90 bp, Homo sapiens
cgctgggtgcgtggggctgcctcgccgcgtctcgccacggttactcctggatggagcacctctgatagcaatccacaaagccaggtatta

SEQ ID NO: 172326 - DNA, 88 bp, Homo sapiens
cggagaggagcagcccccggagacagcggcacagaggtgcttctgccaggctattgagggcacctacattgacaagaaatgccccttc

SEQ ID NO: 172327 - DNA, 90 bp, Homo sapiens
tgcggcaagatcgtgtatcccacggagaaggtgaactgtctggataaggttgcttatggaaccacagagaacagtcccgtgacattcgcg

SEQ ID NO: 172328 - DNA, 82 bp, Homo sapiens
agataattgataacaccctgtaacagctgagccatcatctctcagcaaggtgacatatttgtttttgacctggagacctcag

SEQ ID NO: 172329 - DNA, 73 bp, Homo sapiens
agacgttagcgtgagtgatcactctcaatcccgggtcatcatcagatttgaaatatttaaagtggatacaaaa

SEQ ID NO: 172330 - DNA, 82 bp, Homo sapiens
cagccaaggaagccctcatctgcccaagttcggactaaggatcaccgctttgaaagtgtcagtcaccttatcagctaccaca

SEQ ID NO: 172331 - DNA, 100 bp, Homo sapiens
ggtcgcgtctcggaaaccggtagcgcttgcagcatgtttggaaattttagcattcaggtgccaggaatgcagatgggacagccagtgccagaaacaggcc

SEQ ID NO: 172332 - DNA, 100 bp, Homo sapiens
cgccgagatgaagtctgataatgtgaaggttatcccatcatcaggtagcaagttgaaacgaccaacaccaacttttcattctagtcggacatcccttgct

SEQ ID NO: 172333 - DNA, 95 bp, Homo sapiens
ggctattgagctggatcccaccaaaggaaactgttacatgcattatggaggaagagttcatcgattggtggagcaaattctttgcctccataggg

SEQ ID NO: 172334 - DNA, 50 bp, Homo sapiens
cgaagaggcctgcagtgggagagcaggtgtactaatggtcacttgatgtg

SEQ ID NO: 172335 - DNA, 138 bp, Homo sapiens
ccggttcttgggggactatgtggtggacttggacacgtcccagctctctctgggcatctggaaagctcttgaatgtcgtctctcaactagccaaacggaatctgcgactgctggtcctaggccggaagcacatgctaa

SEQ ID NO: 172336 - DNA, 75 bp, Homo sapiens
gcggccccctggagggggcagtcccgggagaacctgcggcggccggagcggattttttatcaagcagaaatgcat

SEQ ID NO: 172337 - DNA, 75 bp, Homo sapiens
cttatgaccatcaatatgtttgcagtacacaactcccagctgaaagataatggagacatcaaatttctgactaaa

SEQ ID NO: 172338 - DNA, 82 bp, Homo sapiens
cccttcacctgcagaagcgtgtcgttctgcaccagcgccttgatcgagtacttgagaagtccattggaatattaagcccagg

SEQ ID NO: 172339 - DNA, 98 bp, Homo sapiens
ccggccctgcgcctcccgccgcgcccgggatgtattcgtccccgctctgcctcacccaggttcctggtagagttacacagttgtgccgccagtatagc

SEQ ID NO: 172340 - DNA, 82 bp, Homo sapiens
ggaaatcccaggctgccgcggctcctgtgtgctttgaagatatcagttttagagaatgtggcgtggagaaattctcaaggaa

SEQ ID NO: 172341 - DNA, 100 bp, Homo sapiens
ggtcttcctcgaccactggaaggaccggtacctgccggacacgcttctcttggaggagttaagtatgacattgacctgcccaacaagaaggtctgcattg

SEQ ID NO: 172342 - DNA, 100 bp, Homo sapiens
aggacaagagttggaaagacaggcctactgaacttgacgcactggtatttggccatctatacaccattcttaccacacaattgacaaatgatgaactttc

SEQ ID NO: 172343 - DNA, 82 bp, Homo sapiens
gggcgaagcgggcgagcggtggtttggacgccggcggagacgcgggcgagtgtggacgaatgtggaacctcgctctgtggct

SEQ ID NO: 172344 - DNA, 75 bp, Homo sapiens
tggccgtgcttgccctgtcatcccacctgagaaccatgctcaccgaccctaactgctttctccaggggttaaaaa

SEQ ID NO: 172345 - DNA, 75 bp, Homo sapiens
gcttccccacgtcgcttgggggccacggcgcggacgccatgggttatgagagaatttacaatgaaattccggaca

SEQ ID NO: 172346 - DNA, 51 bp, Homo sapiens
gctggactcggattcgttgcctgaggtgaggagcaaaagaagggatccacc

SEQ ID NO: 172347 - DNA, 101 bp, Homo sapiens
ttgttctgcctgacttggaccctggaaaacctggccctcttcaatttctgacaaaaggatgaggattttgtgggtcgggatgattttgatgatgctgacca

SEQ ID NO: 172348 - DNA, 74 bp, Homo sapiens
ctggatgaactgataaaacccaccagtctaggtttttggattcaaagcataaaaaccattacaagatatacaat

SEQ ID NO: 172349 - DNA, 75 bp, Homo sapiens
attattgataattctcaaggattctacgtttgctgggggactatgacaaggtcaaggctatgtctgagggctcgg

SEQ ID NO: 172350 - DNA, 90 bp, Homo sapiens
gacagattgtaggaccgagcgcgggcaggcgggaggcaacggagctaccagccggctacaactgaggtggaaattaagaagaaaggccct

SEQ ID NO: 172351 - DNA, 101 bp, Homo sapiens
tattccaagacagctgatggctttgaaacccacctgggagtcaaccacctgggcatgggtagcaagaaactaaaacgagtgggtttatcacaagagctgtg

SEQ ID NO: 172352 - DNA, 85 bp, Homo sapiens
attaatgagaaacataatgtattttgaccagcatctcagacatgtcgaaaaagatgttttgatccctaaaataatgagagaaaag

SEQ ID NO: 172353 - DNA, 82 bp, Homo sapiens
gatgaaagcctacgggatccgctttgacgtgatggtgaacggcaagttggagagaggcgatttcctctcagaagagtggagg

SEQ ID NO: 172354 - DNA, 90 bp, Homo sapiens
aactttttcacttactgcaggattttcagcttcagcaagcaggtgtcgtttcagtcagatgttgcatccaatttttgaggaagcttccga

SEQ ID NO: 172355 - DNA, 90 bp, Homo sapiens
ctgcctcgtgccgctgagcctggcgcagatcgaatacgctgccatcaactccatgctggaccagatcaactcctgtctggaccacctgga

SEQ ID NO: 172356 - DNA, 98 bp, Homo sapiens
gtgagctcagaggctgagcggcatgttgctctatatgcaatcagtgctgtctactttgctggagtgatggtgcgactgatgttgactttgactccagt

SEQ ID NO: 172357 - DNA, 50 bp, Homo sapiens
ctccatgccagtgggcaaagcacaggcctcatgcattgtgcgtcagcagc

SEQ ID NO: 172358 - DNA, 50 bp, Homo sapiens
ccatacaggcccaaaagagttcagagtggcccatggcgccctcagtgatg

SEQ ID NO: 172359 - DNA, 83 bp, Homo sapiens
tcagggctgcagcccaggagcctcaaggcggcccggcgggcgactggacggccggacagccactcatctctgcccagctgctg

SEQ ID NO: 172360 - DNA, 100 bp, Homo sapiens
ctcgaaagcctatcagcatagttaaggctaggcagctggaagagaaagaccgagtgctaaagaagcaggatgcattctacaaagaacagctggctagact

SEQ ID NO: 172361 - DNA, 100 bp, Homo sapiens
ccagcagcagcgtcaggaatctctagaaagaagaacctcggccacagggtcaaggagctgagcccccacagtgggcccagtggagagcagttgattcaaa

SEQ ID NO: 172362 - DNA, 100 bp, Homo sapiens
aattccaacacaccatttcttcctaaaatcttcatcaaacccaatgctcagaaacctctccctcaagactccctgccctcggaccctgtacagccgcagt

SEQ ID NO: 172363 - DNA, 82 bp, Homo sapiens
accctggtcaccgtctcctcaggaatcaaagatcaactcccactgaggacaaatggacctgtaattccgggtgtgacgagag

SEQ ID NO: 172364 - DNA, 90 bp, Homo sapiens
cgctcctggcgcatctggtggtcgtcatcaccttattctggtcccggccagatgaaaactcgctggatttttcctcctgtatgttacggc

SEQ ID NO: 172365 - DNA, 87 bp, Homo sapiens
gtcgtggctgagcttctgaggaccgtcccctgggagcagccggccactaagaaggaggaggagaaccgtcggctggaggaaaagcgg

SEQ ID NO: 172366 - DNA, 96 bp, Homo sapiens
gattactttgtgattgttagtggaacttctacccgacacttacatgccatggccttctacgttgtgaaaatgcgatgaagaacgatacagatacag

SEQ ID NO: 172367 - DNA, 90 bp, Homo sapiens
agaatcttgactttgaaccactttccaccaccgcactcatcctcgaggacagaccagcgcccggaggctgtttgatgtcctgcacgagcc
